United States Patent Application Publication US 2014/0259212 A1 - sequence listing, part 28

SEQ ID NO: 92864 - DNA, 1182 bp, Psychrobacter arcticus 273-4
  CDS (1)..(1182): transl_table=11
atgtcacatgatgcaattgtaatcttaaacggcgcacgtaccccaattggcggcttccaaggcatactcaaagacatgagtgctacagagctgggcgcagcggctattaaagccgctgttcagcgttcaggcgttaatgttgatagcattgatgaagtcatcatgggttgtatcttgactgcaggtttgggtcaaggtcctgcccgccaagcgatgcgtaaagcaggtctatctgatgcgactggtgcggtcaccatcaataagctatgcggctcaggtctaaaagcagtcatgcaagcacatgacggtatcaaagctggtagcttcaaggtcgctgttgcaggtggtatggaatcaatgaccaatgcgccttatatcatgccagggtcgcgtggcggctaccgcatggggcacaaagaagtcaaagatcacatgttcttagacggtctagaagatgctgagactggtaagctgatgggcatgttcgctcaagaagtggcagatgaaaaaggctatacacgcgagcaaatggatgattttgctattgagtcgctaagtcgtgcgcttacggctattaaagacaatcatttcaaaaatgagattgagccagttacgtttaagactcgcaaaggtgaacaaacggttgataccgatgagcagcctgcccttgccaatgctgagcgcatccctactttgcgtcctgcctttgcaaaagacggcaccatcacagcggcaaacgccagctctatctcagacggtgcagcggcggttgtgttgatgaaagagtcacaagccaaagaagaagggctagattatcaagcgcgtatcattgcgactgcctctaactctcgtcacccaagcgaatttaccatcgcgcctgttggggcgattgaaaaagtattggcaagtgcgggctggtcagtggctgatgtcgatttatgggaaatcaacgaagcatttgccatggttacgatggtagcgatggatgagctaaacatcgaacatgctaaagtaaacatcgaaggcggtgcttgtgctcttggtcacccagttggttgttcaggtgcgcgtatcttagtgacgctgattaactctctaaaacgtaccggtggcaaaaagggcgtcgctacgctatgtatcggtggcggtgaagcggtagcagtagcaatcgaactggcttaa

SEQ ID NO: 92865 - protein, 393 aa, Psychrobacter arcticus 273-4
MSHDAIVILNGARTPIGGFQGILKDMSATELGAAAIKAAVQRSGVNVDSIDEVIMGCILTAGLGQGPARQAMRKAGLSDATGAVTINKLCGSGLKAVMQAHDGIKAGSFKVAVAGGMESMTNAPYIMPGSRGGYRMGHKEVKDHMFLDGLEDAETGKLMGMFAQEVADEKGYTREQMDDFAIESLSRALTAIKDNHFKNEIEPVTFKTRKGEQTVDTDEQPALANAERIPTLRPAFAKDGTITAANASSISDGAAAVVLMKESQAKEEGLDYQARIIATASNSRHPSEFTIAPVGAIEKVLASAGWSVADVDLWEINEAFAMVTMVAMDELNIEHAKVNIEGGACALGHPVGCSGARILVTLINSLKRTGGKKGVATLCIGGGEAVAVAIELA

SEQ ID NO: 92866 - DNA, 1185 bp, Colwellia psychrerythraea 34H
  CDS (1)..(1185): transl_table=11
atgtcattatcagatcctattgttattgtttccgctgtaagaacgcctatgggtggttttggtggttgtttgtcgccggtaactacgccagatttaggtgctaccgcaataaaagccgctattactcgagcaaatttagccaatgatcaagttgatgaactcattatgggctgtgtcttacctgcaggtttaaagcaagcgccagcaagacaagcagcaattgctgctgaattatctttatctactgtgtgtaccacaatcaataaagtatgtggctcaggaatgaaagcggctatgcaggcgcatgactcattacttgcaggatctatcgatgttgccgttgctggtggtatggaaagcatgagtaatgcgccatatattttgccgaaagtaagaacaggtttacgcatgggccatggtcaagttatagatcatatgatgcaagacggtttagaaaatgcctatgacggaatttctatggggtgttttgcccaagatactgccgatgaatctagctttactcgtgaagcgatggatgatttcgcgattcgttcattgagtcgtgcaaaccaagcgattgattcgggcgcttttaaaaatgaaattgcagccgttacggtagttaatcgacgtaaagaaacgattattgataccgatgaacagccaggaaatgctcgtccagataagatcccatcattacgcgcagcatttaaaaaagacggcaccatcaccgcagctaattcaagttcaatttcagatggcgcagcagcgcttgtgatgatgaaattatcagaagctgaaaaacgtggtttaacaccactttgtaaaattgtagctcatgctacacatgcacaagcaccggcagaatttaccgcagcaccagtaggcgctatgaataaattactagataaagcaggttggactgcaagagatgttgatttattcgaaatcaatgaagcatttgctatggtcactatgcttgctgttaaagaaatggatttagatatcaataaagttaatgttaatggtggtgcttgtgccttaggtcacccattaggcgcaagtggagcgcgtattatggtaacccttattcatgcattgaagaataaaggtttgtcaaaaggtgttgcttctctttgtattggtggcggtgaagcgacagcaatcgcattagaaatgttgtaa

SEQ ID NO: 92867 - protein, 394 aa, Colwellia psychrerythraea 34H
MSLSDPIVIVSAVRTPMGGFGGCLSPVTTPDLGATAIKAAITRANLANDQVDELIMGCVLPAGLKQAPARQAAIAAELSLSTVCTTINKVCGSGMKAAMQAHDSLLAGSIDVAVAGGMESMSNAPYILPKVRTGLRMGHGQVIDHMMQDGLENAYDGISMGCFAQDTADESSFTREAMDDFAIRSLSRANQAIDSGAFKNEIAAVTVVNRRKETIIDTDEQPGNARPDKIPSLRAAFKKDGTITAANSSSISDGAAALVMMKLSEAEKRGLTPLCKIVAHATHAQAPAEFTAAPVGAMNKLLDKAGWTARDVDLFEINEAFAMVTMLAVKEMDLDINKVNVNGGACALGHPLGASGARIMVTLIHALKNKGLSKGVASLCIGGGEATAIALEML

SEQ ID NO: 92868 - DNA, 1191 bp, Dechloromonas aromatica RCB
  CDS (1)..(1191): transl_table=11
atgaatgacccgatcgttatcgtttccgccgcccgtaccgccatgggcgcctttcagggcggctttgccggcctgaccgccgccaatctcggcgccgtggccatcaaggccgctgtcgagcgcgccggcatcgacgccaacctgatcgaagaagtgctgatgggctgcgtgctgcaagccggccagggccaggctccggcccgccagtccgcgctgcaggccggcctgcccctctccgccggttgcgccaccatccacaaggtttgcggctcagccatgaaggcgaccatgctcggccacgacggcatcctggccggttcctacggtgcggccgtggtgggcggcatggagtcgatgaccaatgccccctacctgctgcccaaggcccgcggtggttaccgcctcggccacggccagctgatggaccacatgttcctcgatggcctggaagattcttacggcaaggaaacccgcggccgcctgatgggcacctttgccgaagaatgcgctgccagctacggcttcacccgtgaagcgcaggacgaatttgctgtccgctcgaccacccgtgccatcgaagccagcaacaacggcagcttcgcctgggaaatcgccccgaccaccgtcgccggccgcaaaggcgacgtcgtgatcgacaaggacgaaggcccgtttgccgtcaatgtcgaaaaaatcccgaccctgaagccggctttcaagaaagatggcacggtcaccgccgccaactcctcgtcgatttccgacggcgccgccgcgatggtcctgatgcgcgcctcgcaagccgccaagctcggcctgcaaccgattgcccgcatcgtcggccatacgacgcatgccggtacgcccgccctgttcccgtcggccccggtcggcgccatgcagaagctgttcgccaagaccggctggaccgctgagtcggtcgatctgtatgaaatcaacgaagccttcgccgtcgtcaccatggcctcgctgcatgacctcaagctcgacccggccaaggtcaacatccacggtggcgcctgcgcgctgggccacccgatcggcgcctccggtgcccgcatcgtcgtcacgctgttgggcgccctgaagaagtacggcaagaagcgcggcgtggccagcctgtgcatcggcggtggcgaagcaacggctctcgcggtggaaatgctgtaa

SEQ ID NO: 92869 - protein, 396 aa, Dechloromonas aromatica RCB
MNDPIVIVSAARTAMGAFQGGFAGLTAANLGAVAIKAAVERAGIDANLIEEVLMGCVLQAGQGQAPARQSALQAGLPLSAGCATIHKVCGSAMKATMLGHDGILAGSYGAAVVGGMESMTNAPYLLPKARGGYRLGHGQLMDHMFLDGLEDSYGKETRGRLMGTFAEECAASYGFTREAQDEFAVRSTTRAIEASNNGSFAWEIAPTTVAGRKGDVVIDKDEGPFAVNVEKIPTLKPAFKKDGTVTAANSSSISDGAAAMVLMRASQAAKLGLQPIARIVGHTTHAGTPALFPSAPVGAMQKLFAKTGWTAESVDLYEINEAFAVVTMASLHDLKLDPAKVNIHGGACALGHPIGASGARIVVTLLGALKKYGKKRGVASLCIGGGEATALAVEML

SEQ ID NO: 92870 - DNA, 1191 bp, Pseudomonas fluorescens PfO-1
  CDS (1)..(1191): transl_table=11
atgaccatctccaacgatccgattgtcatcgtcagcgccgtccgcaccccgatgggcggtttccagggcgaactgaaaagcctgaccgcgccgcaactgggcgccgctgcaatcaaggcggcggttgagcgtgccggtgtggccgccgatgcggtcgatgaagtgttgttcggctgcgtgttgccggccggtcttggtcaggcgcctgcacgtcaggctgcactgggcgccgggctggacaagtccacccgctgcaccacggtcaacaagatgtgcggttcgggcatggaaaccgccattctggcccacgacatgctgctggctggcagcgccgatgtggtgatcgccggcggcatggaaagcatgtccaacgcgccgtatctgctggatcgcgcccgtgccggttaccgcatgggccacggccgggtgctggattcgatgttcctcgacggcctcgaagacgcctatgacaagggccgcctgatgggcaccttcgccgaggattgcgccgaaaccaacgacttcagccgtgaagcgcaggacgcctttgccatcgcctcgaccacccgcgcccagcaggcgatcaaggacggcagcttcaaggacgaaatcgttccgctgaccgtgaccgtcggcaaggaacaggttgtgatcagcaacgatgagcagccaccaaaagccaagctggacaagattgcttcgcttaaaccggcgttccgcgaaggcggcaccgtgaccgctgccaactccagctcaatctctgacggcgccgctgcgctggtgctgatgcgtcagtcgcaagcacaaaagcagggtctgaagccgctggcggtgattcacggacacgcggcgtttgccgacaccccgggcctgttcccggtggcaccgattggcgcgatcaagaagctgatgaagaaaaccggctggtcgctggatcaggtcgatctgttcgaagtcaacgaagccttcgccgtggtcggcatggcggcgatgacccacctggaaatccctcacgacaagctcaacatccatggcggcgcctgcgccctcggtcacccgatcggtgcgtccggcgcgcggattctggtgactttgctctcggccctgcgccagaaaggcctgaaacgcggcgtcgcggcgatctgcatcggcggcggcgaagccacggcgatggctgtcgagtgcgtctga

SEQ ID NO: 92871 - protein, 396 aa, Pseudomonas fluorescens PfO-1
MTISNDPIVIVSAVRTPMGGFQGELKSLTAPQLGAAAIKAAVERAGVAADAVDEVLFGCVLPAGLGQAPARQAALGAGLDKSTRCTTVNKMCGSGMETAILAHDMLLAGSADVVIAGGMESMSNAPYLLDRARAGYRMGHGRVLDSMFLDGLEDAYDKGRLMGTFAEDCAETNDFSREAQDAFAIASTTRAQQAIKDGSFKDEIVPLTVTVGKEQVVISNDEQPPKAKLDKIASLKPAFREGGTVTAANSSSISDGAAALVLMRQSQAQKQGLKPLAVIHGHAAFADTPGLFPVAPIGAIKKLMKKTGWSLDQVDLFEVNEAFAVVGMAAMTHLEIPHDKLNIHGGACALGHPIGASGARILVTLLSALRQKGLKRGVAAICIGGGEATAMAVECV

SEQ ID NO: 92872 - DNA, 1161 bp, Rhodobacter sphaeroides 2.4.1
  CDS (1)..(1161): transl_table=11
atggcagcggaaccgatcgtgatcgcgggggcggcgcggacgccgatgggcgcctttcagggtgcgctcaagggccggacgggggtcgagctcggcgcggcggcgatctcggccgcgctcgcgcgggcgggcctcgcccccgaggcggtcgaggaggtcgtgatgggctgcgtgctgcccgcgggcctcgggcaggcgccggcgcggcaggcggctctgggcgcggggctgccgctctcggtgccctgcgctacgctgaacaaggtctgcggctcggggatgaaggccgccatggccgcgcatgacatgatccgggcgggcagcgcgggcatcgtcgtcgcgggcggtatggagagcatgtcgaacgcgccctatctgctcgacaaggcgcgcggcggctaccggatcgggcatgggcgcgtgctggaccacatgttcctcgacgggctcgaggatgcctacgaccgcggccgcgccatgggcaccttcgccgaggattgcgccgaggcctaccagttcacccgcgacgcgcaggatgcctatgcgctggcctcgctggcccgggcgcaggcggccattgccgaggggcgcttcgcggccgaggtggtggcagtggacggggtggcggttgacgaggccccgggccgcgcccgccccgagaagatcccccagctcaggcccgccttccgcgagggcggcacggtgacggcggccaacagctcctcgatctcggacggggcggcggcgctcgtgatcgcctcggccggcgcggccgaggcgcaggggctgaccccgctcgccacgatccgcggccatgcaagccatgcgcaggcgccgaacctttttaccacggcgccgatcttcgccatcgggaagcttctcgagcggttgggctggagcgcggccgaggtcgatctcttcgagatcaacgaggctttcgcagtggtggccatggccgcgatgcgcgacctagacctgccccacgacaaggtcaatgtgaacggcggcgcctgcgcgctcggccatccgatcggctgctcgggggcgcggatcgtggtgactttgatcgaggcgctgcgggcgcggggattgagacgcggcgtggcctcgctctgcatcggcggcggcgaggcgacggcgctggcggtggaggtgatctga

SEQ ID NO: 92873 - protein, 386 aa, Rhodobacter sphaeroides 2.4.1
MAAEPIVIAGAARTPMGAFQGALKGRTGVELGAAAISAALARAGLAPEAVEEVVMGCVLPAGLGQAPARQAALGAGLPLSVPCATLNKVCGSGMKAAMAAHDMIRAGSAGIVVAGGMESMSNAPYLLDKARGGYRIGHGRVLDHMFLDGLEDAYDRGRAMGTFAEDCAEAYQFTRDAQDAYALASLARAQAAIAEGRFAAEVVAVDGVAVDEAPGRARPEKIPQLRPAFREGGTVTAANSSSISDGAAALVIASAGAAEAQGLTPLATIRGHASHAQAPNLFTTAPIFAIGKLLERLGWSAAEVDLFEINEAFAVVAMAAMRDLDLPHDKVNVNGGACALGHPIGCSGARIVVTLIEALRARGLRRGVASLCIGGGEATALAVEVI

SEQ ID NO: 92874 - DNA, 1182 bp, Carboxydothermus hydrogenoformans Z-2901
  CDS (1)..(1182): transl_table=11
atggaagaagttgtaatagttagtgccgttagaactcccattggcagttttttgggtagccttgcccaaactccggcagtggatttgggagcgcttgttattaaagaaagtctaaaccgcattaaccttgcgccccggtttgtcgatgaggttatcatgggaaacgttttgcaggcaggattaggccagaacccagcccggcaggcagctataaaagcaggaataccccaggaagtacctgcttttacagtaaacaaagtttgcggttcaggattaaaatccgtcggactggcttatcaggcaatagcaacaggtgatgccgatatcgttgtcgccgggggaatggaaaacatgtctttagcaccttacgtcttgcccaaagccaggacaggttaccgcatggggcatgataccctgatagattccatgattaaagatggcttatggtgtgcttttaccgatgtgcatatgggtattaccgcggaaaatatagccgaaaaatacaatataacccgcgaagaacaggataaatttgccctgcaaagtcaggaaagagctataaaagcaattgatgaaggaaagtttaaagaagaaatcgttcccgtaatcatcccccagaaaaaaggagaacccctggtattttccaccgatgaatttcccaaacgcggtacatccctggaaaaacttgccgctctaaaaccggccttcaaaaaagatggtaccgtaactgccggaaatgcctcgggaattaacgatggagctgctgcggttgtagttatgtcagcaaaaaaagctcaagagttaaatattaaacccttggctgttatccgcggttatgcagctgcgggagtagatcctgcctatatgggtttaggcccaatacctgccacccgcaaagcccttaaaaaagccaatttaaccgtttcggacttggggcttattgaagcaaacgaagcttttgccgcccaggctttagcggtaattaaagagctcgaattaaatccggaaataactaatgtcaacggtggtgccatagcgttaggtcaccccataggagcctcgggagctcgaatattggtaaccttattacatgagatgcaaaaacgtaatacaaaatacggtttagcaaccttgtgtatcggtggcggccaaggatttgctttagtagttgaaaaagtttaa

SEQ ID NO: 92875 - protein, 393 aa, Carboxydothermus hydrogenoformans Z-2901
MEEVVIVSAVRTPIGSFLGSLAQTPAVDLGALVIKESLNRINLAPRFVDEVIMGNVLQAGLGQNPARQAAIKAGIPQEVPAFTVNKVCGSGLKSVGLAYQAIATGDADIVVAGGMENMSLAPYVLPKARTGYRMGHDTLIDSMIKDGLWCAFTDVHMGITAENIAEKYNITREEQDKFALQSQERAIKAIDEGKFKEEIVPVIIPQKKGEPLVFSTDEFPKRGTSLEKLAALKPAFKKDGTVTAGNASGINDGAAAVVVMSAKKAQELNIKPLAVIRGYAAAGVDPAYMGLGPIPATRKALKKANLTVSDLGLIEANEAFAAQALAVIKELELNPEITNVNGGAIALGHPIGASGARILVTLLHEMQKRNTKYGLATLCIGGGQGFALVVEKV

SEQ ID NO: 92876 - DNA, 1191 bp, Burkholderia sp. 383
  CDS (1)..(1191): transl_table=11
atgacgactcaggatccgatcgtaatcgttggtatggcgcgtacgccgatgggtggttttcagggcgacctggcggccgccagcgcgagcgaccttggcgcggtagcgattcgcgcggcgctcgagcgcgcgaacgtgccggccgaacgcatcgatgaaatcgtgttcggctgcgtgctgccggcgggccagggccaggcgccggcgcggcaggccgcgctgaaggccgggctgccactcgcggcgggcgcgaccacggtcaacaagatgtgcggctcggggatgaaggccgcaatgttcgcgcacgacctgctgctggcggactcggccggtgtcgccgtcgcgggcgggatggagagcatgacgaatgcgccgtacctgctgccgaaggcgcgcgcggggatgcgcatgggtcacgggcaggtgctcgatcacatgttcctcgacgggctcgaggacgcgtacgagaagggccgtctgatgggcacgttcgccgaggattgcgcgcaggcgtaccagttcacgcgcgaggctcaggatgcgttcgcgatcgcatcgctgacgcgtgcgcagcgtgcgatcgccgacgggcatttcgtgtcggaaatcgcaccggtgaccgtgaaggccggcaagagcgaaaccgtcgtgtcgatcgacgagcagccgggcaacgcgaagctcgacaagattccgacgctgaagccggccttccgcgaaggcggcacggtgacggccgcgaacgcgtcgtcgatctcggacggcgcggccgcgctcgtgatgatgcgccgctcggaagccgagcgcctcggcctcacgccgaaggccgtgatcgtcgggcattcgacctacgcggacaagccgggcctgttcgcgaccgcgccgatcggcgcgctgcgcaagctgtcggagaaaaccggctggaacctgcgcgacgtcgacctgttcgagatcaacgaagcattcgccgtggtgccgatggcagcgatgcgcgatctcgacctgccgcacgagaaggtcaacgtgcatggcggcgcgtgcgcgctcggccatccgatcggtgcatcgggcgcgcgcgtgatggtgacgctgctggccgcgcttgaaacgtatgggatgaagcgcggcgtcgcgtcgctgtgcatcggcggtggcgaggcgacggcgatcgcgatcgagcgcatcgtctaa

SEQ ID NO: 92877 - protein, 396 aa, Burkholderia sp. 383
MTTQDPIVIVGMARTPMGGFQGDLAAASASDLGAVAIRAALERANVPAERIDEIVFGCVLPAGQGQAPARQAALKAGLPLAAGATTVNKMCGSGMKAAMFAHDLLLADSAGVAVAGGMESMTNAPYLLPKARAGMRMGHGQVLDHMFLDGLEDAYEKGRLMGTFAEDCAQAYQFTREAQDAFAIASLTRAQRAIADGHFVSEIAPVTVKAGKSETVVSIDEQPGNAKLDKIPTLKPAFREGGTVTAANASSISDGAAALVMMRRSEAERLGLTPKAVIVGHSTYADKPGLFATAPIGALRKLSEKTGWNLRDVDLFEINEAFAVVPMAAMRDLDLPHEKVNVHGGACALGHPIGASGARVMVTLLAALETYGMKRGVASLCIGGGEATAIAIERIV

SEQ ID NO: 92878 - DNA, 1176 bp, Geobacter metallireducens GS-15
  CDS (1)..(1176): transl_table=11
atgagtgacgtttatgtaatcgaatcgctgcgcactcccctcggctccttcgggggggagttgtccgacgtggaggcgccgcgcctggccgccaccgtcatccgggaactgctccagcgttccggccttcctgccgagggcgtcgacgaggtgattgtcggtcaggttctcgcgggcgggacgggacaggccccggcccggcaggccatgcgctacgccgaactccccgacagcattcccgccatgaccatcaacaaggtctgcggcagcggcctcaaggcgctcatgctcggcgccgatgccatccgcctcggtgatgtcggcgtggtgatcgccggcggcatggagaacatgtccctggccccctatgtactgagcaaggggcgtaacggctatcgtctgggtaacggcgagctgatcgacctcctggtaaatgacggcctcctggatccctacagcggcaatcacatgggggtaatcgccgaggccaccacggaaaagcacggcatctcccgggcagaccaggatgcctttgccttccgctcctaccagaaagcgcagacagcggttaaggaagggatattccgggatgagatcgtcccggtggtcaaaaaggggcgcaagggggacgtgaccgtcagcgacgacgaagagccattcaaggtggacttcaccaaactcatggggttgaagagcgccttcaagaaggaagggaccatcaccgccggcaacgcctcaaccatcaatgatggtgcggccctgacccttctggccagtggagaggcggtgaaaaaatacggtctcaagcccagggcccgactggtcgcctatgcctccaacagcttgcatcccgaccaattcaccgaggcgccggtgggagccatcgaaaaggcctgcgccaaggccggtctgaagctcgaagacattgatctgttcgagatcaacgaggcctttgccgccgtgaccatgcttgccatcaagcaactggggctcgatccggaaaaggtcaacgtcaacggcggggcagtggccattggccatcccctgggggcaagcggcggacgtcttgccgctaccctggttcgggaactgcaccggcgccaggcccgcttcgggctcgcaaccctctgcattgggggtggtgaagcagtggcggcaatcttcgagcgggtctga

SEQ ID NO: 92879 - protein, 391 aa, Geobacter metallireducens GS-15
MSDVYVIESLRTPLGSFGGELSDVEAPRLAATVIRELLQRSGLPAEGVDEVIVGQVLAGGTGQAPARQAMRYAELPDSIPAMTINKVCGSGLKALMLGADAIRLGDVGVVIAGGMENMSLAPYVLSKGRNGYRLGNGELIDLLVNDGLLDPYSGNHMGVIAEATTEKHGISRADQDAFAFRSYQKAQTAVKEGIFRDEIVPVVKKGRKGDVTVSDDEEPFKVDFTKLMGLKSAFKKEGTITAGNASTINDGAALTLLASGEAVKKYGLKPRARLVAYASNSLHPDQFTEAPVGAIEKACAKAGLKLEDIDLFEINEAFAAVTMLAIKQLGLDPEKVNVNGGAVAIGHPLGASGGRLAATLVRELHRRQARFGLATLCIGGGEAVAAIFERV

SEQ ID NO: 92880 - DNA, 1221 bp, Rhodospirillum rubrum ATCC 11170
  CDS (1)..(1221): transl_table=11
atgtcgtctgccgcccccagcgccttcccgttttccgccggtgatccggtggtgattgtcggcgccaaacgcacgccgcttggcgccttcatgggatcgctggggtccttgcgcgcgcccgaactgggggcgagggcgatcagcggcgcgctggacgggctggagggggcggagcatcgcgttgacggggtgatcatgggctgcgttctgcccgccggccaggggcaggcgccggcccgtcaggccgcccatgcggcggggctgtcgtgggcggtgccctgcgccacggtcaacaagatgtgcgggtcggggatggaggcggcgatcctggcttgcaataccctggccgccggcgccgccgaggtgatggtggccggcggcatggaaagcatgaccaacgccccctatcttctggacaaggcacgcggcggccatcggttgggccatggtcaggtggtcgatcacatgttccttgatggactggaagacgcctatgaccggggccggctgatgggaaccttcgccgaggatacggcgcaaagctatcggttcagtcgcgaggagcaggacgccttcgccctcgagtcgctgttgcgggccaagcgcgccatcgccgacggcgtgatggcgcgggaatgcgtgagcgtggtcgtgcgcgagcgcggcgaggatcatctggtcgagaccgacgaggcgccgatcaaggccaatcccgaccgcatcccccacttgaagccggccttccgcgagggcgggacggtgacggcggccaatagctcgtcgatctcggatggggcggcggcgctggtgctgacccgggcctcggtggccgaccgggcgggatggaggcccttggccgtggtgcgcggccatgcggcctatgcggccgaacccgaattgtttccaaccgcgccggtcggggcgatcgaacggatgctggcgcgggtgggctggcggcgcgacgaggtggatttgtgggagatcaacgaagccttcgccgttgtcgccctggtggcgctgcgcgacctcggtctcgaccccgggcgtttgaacgttcatggtggagcctgcgccctgggccatccgatcggcgcctcgggcgcgcggatcatcgtcaccttgctcaacgccctgcgccagcggggtttgacgcggggggtggcctcgctgtgcatcggtggcggcgaggcgacggcgatggccgtggaacttgcgtcatag

SEQ ID NO: 92881 - protein, 406 aa, Rhodospirillum rubrum ATCC 11170
MSSAAPSAFPFSAGDPVVIVGAKRTPLGAFMGSLGSLRAPELGARAISGALDGLEGAEHRVDGVIMGCVLPAGQGQAPARQAAHAAGLSWAVPCATVNKMCGSGMEAAILACNTLAAGAAEVMVAGGMESMTNAPYLLDKARGGHRLGHGQVVDHMFLDGLEDAYDRGRLMGTFAEDTAQSYRFSREEQDAFALESLLRAKRAIADGVMARECVSVVVRERGEDHLVETDEAPIKANPDRIPHLKPAFREGGTVTAANSSSISDGAAALVLTRASVADRAGWRPLAVVRGHAAYAAEPELFPTAPVGAIERMLARVGWRRDEVDLWEINEAFAVVALVALRDLGLDPGRLNVHGGACALGHPIGASGARIIVTLLNALRQRGLTRGVASLCIGGGEATAMAVELAS

SEQ ID NO: 92882 - DNA, 1197 bp, Novosphingobium aromaticivorans DSM 12444
  CDS (1)..(1197): transl_table=11
atggcacagttctcctcgtccgatcccgtcgtcattctgtcctacgcacgcacgccgatgggcgcgatgcagggtgccctggcagaggtcgccgccaccgacctcggcgccaccgcggtcaaggccgccgttgagcgcgcgggcgtcgcgcccgacaaggtcgagcgcatctacatgggctgcgtgcttcccgccggcctcggccaggcacccgcacgtcaggccgcgatcaaggccggcctgcccaagtcggttcaagcgacaaccgtcaacaaggtctgcggttcgggcatgcagacgatcatcatgggcgccgaggctctggccgcgggcagcgccgacctgatcgtcgcgggcggcatggaatcgatgaccaacgccccctacctgctcaagaagcatcgctcgggcgcgcgcatcggtcacgacatggcctatgaccacatgttcctcgacgggctcgaggatgcctacgacgccggccgcgccatgggcacgttcgcgcaggacaccgccaacgcctatcaactcacccgcgaacagcaggacgcctactcgatcgaatcgctccgccgcgcgcaggccgccgtcgccgacggctcgttcaaggacgaagtcgtcgcggtcaccgtcaagacccgcgccggtgaagtgacggtcgatacggacgaggcacccggcaagggccgtcccgacaagatcccctcgctcaagccagccttcgccaaggacggcacgatcaccgccgccacctcgtcgtcgatttccgacggcgcggccgccgtggtcctcgcccgccaaagcgttgccgccgccgccggtcttgcgccggtcgcgcggatcgtcgcccttgccgcccacgcgcaggaaccgaaggacttcaccaccgctccggtcggcgcgatccagaaggttctcgacaaggccggctggtccattgccgacgtcgacctgttcgaggtgaacgaggcgttcgcctgcgtcgcgatgttcgcgatgcacgacctcggcatcccgcacgagaagatcaacgtccatggcggcgccaccgcgctcggtcacccgatcggcgcttcgggcacccgcatcgtcaccacgctgatcgccgcgctcaggaagcatggcaagacgaagggcgtcgccagcctctgcatcggcggcggcgaggcgacggccctcgcgatcgagctggtctga

SEQ ID NO: 92883 - protein, 398 aa, Novosphingobium aromaticivorans DSM 12444
MAQFSSSDPVVILSYARTPMGAMQGALAEVAATDLGATAVKAAVERAGVAPDKVERIYMGCVLPAGLGQAPARQAAIKAGLPKSVQATTVNKVCGSGMQTIIMGAEALAAGSADLIVAGGMESMTNAPYLLKKHRSGARIGHDMAYDHMFLDGLEDAYDAGRAMGTFAQDTANAYQLTREQQDAYSIESLRRAQAAVADGSFKDEVVAVTVKTRAGEVTVDTDEAPGKGRPDKIPSLKPAFAKDGTITAATSSSISDGAAAVVLARQSVAAAAGLAPVARIVALAAHAQEPKDFTTAPVGAIQKVLDKAGWSIADVDLFEVNEAFACVAMFAMHDLGIPHEKINVHGGATALGHPIGASGTRIVTTLIAALRKHGKTKGVASLCIGGGEATALAIELV

SEQ ID NO: 92884 - DNA, 1179 bp, Desulfitobacterium hafniense Y51
  CDS (1)..(1179): transl_table=11
atgagagaagtagtgattgtcagtgctgtccgtacacccctggggtcctttgggggagctttagagaactttacaggagccgaactgggagctatcgtgatcaaggaagcgatcaaacgggccggaatcctgcctgcacaagtggaagaagtcattatggggaatgtactcagtgctgcggcaggtcaaaaccctgcccgacaagcagcaattaaagcaggaattcctcaagaagtgcccgcctggaccctgaataaggtctgcggttccggacttaaatcggtaatctgtggagcccaggccatcctggccggtgatgcggatattattgtggccggcggcatggagtgcatgtcctcatcggcttatgctctccctaaagcaagaaaaggctatcggatgggcaatgacagcctggtggataccatgatcatggatgggttaaccgatgctttccataatattcacatgggattgaccgccgagaatatcgctgagcagttccagatttcccgggaggatcaggatgctttggcgctgcgcagtcaaaaccgggccgaggccgcgatccaatccggattattcgatgaagagattgtcgctgtggaaattccccaaaaaagaggagagcctctggtgttcagtcaggatgagtttccccgtttcggcaccactgccgatactttgaccaagctgcggccggcctttaagaaagagggtacggtgactgcgggcaacgcttcagggatcaatgacggggctgccgcagtggtggtcatgtccaaagagaaggctgaagaattgggattagcagtcctggccaaaatcacttcctgggcttctgccggggtggatcctctgatcatggggaccggaccgatccctgcgacacgaaaagccttggccaaagccggactgactattgccgatattgacctggtggaggccaatgaagcctttgccgcccaggccgctatcgttacccgggagctgggactggatgtggaaaagaccaatgtcaacggcggtgccatcgccttggggcaccccatcggtgcttccggcacccgcgttctggtcacccttcttcatgaattgaaacgacgggacggacagcgggggctggccaccttatgcatcggcggcggtcagggcgtcagcctgattgtagagagatag

SEQ ID NO: 92885 - protein, 392 aa, Desulfitobacterium hafniense Y51
MREVVIVSAVRTPLGSFGGALENFTGAELGAIVIKEAIKRAGILPAQVEEVIMGNVLSAAAGQNPARQAAIKAGIPQEVPAWTLNKVCGSGLKSVICGAQAILAGDADIIVAGGMECMSSSAYALPKARKGYRMGNDSLVDTMIMDGLTDAFHNIHMGLTAENIAEQFQISREDQDALALRSQNRAEAAIQSGLFDEEIVAVEIPQKRGEPLVFSQDEFPRFGTTADTLTKLRPAFKKEGTVTAGNASGINDGAAAVVVMSKEKAEELGLAVLAKITSWASAGVDPLIMGTGPIPATRKALAKAGLTIADIDLVEANEAFAAQAAIVTRELGLDVEKTNVNGGAIALGHPIGASGTRVLVTLLHELKRRDGQRGLATLCIGGGQGVSLIVER

SEQ ID NO: 92886 - DNA, 1179 bp, Saccharophagus degradans 2-40
  CDS (1)..(1179): transl_table=11
atgagtgacccgattgttatcgtaggtatagcgcgcacagccatgggcggtatgcagggtatgttttctgatgtaagtgcaccacaattaggcgcgcaagcgataaagggcgcattagaggacgcaggcctagctacgagtgatgtaagtgaagtgtttatgggttgtgttttaccagccggcacagggcaggcgccagcgcggcaagcggctttgggcgcagggcttgataaaggtgtacccactaccactgttaacaaagtgtgtggctcgggcatgaaaactgtgatgatgggctgccaggctattttggcgggtgaggccgaggtggttgtagccggtggtatggagagcatgaccaacgcaccctatatgcttactaaggcacgtggcggttatcgcttggggcacggccaagtgatggatcacatgtttttagatggcttgcaagatgcgtacgaaggtgagttaatgggtaactttgcagaagctacggcaagtaagtatggctttactcgcgaagcgcaagatgcattcgcaattgaatcgctcgcgcgcgctaataaggcgattaacgaaggcaaatttaagcgagaaattaccccctttacgttaaaaacacgcaaaggtgaaaccgtgatagacaccgacgagcagccgggcaatgcgcgtccagataaaatcccaagtttgcgcccagcattctcaaaagatggcactgtaacagccgctaactcaagctcaatttccgatggtgcggcagcattggtgttaatgaagcagagcaccgcacaagcaaaagggttaaagcccattgccaaaattaccggttatacgcaacacgcccacgagccagagtggtttactaccgcgccagtgggagcggttaaaaacttgctagaaaaaacaaactggtctgcaagcgatgtggacttgtttgaaattaacgaggcgttcgcggtggtaagtatggctgcgatgcacgatttagagttggaccacgccaaggtaaatgttaatggcggcgcttgtgcattgggtcacccgctgggtgcatcgggtgcgcgcgtattggttacactcattgcagcgctgcaaaacgagagtaaaaagactggagttgccgccctgtgtattggtggtggtgaagcggtagcaatggctgttgagctgatctaa

SEQ ID NO: 92887 - protein, 392 aa, Saccharophagus degradans 2-40
MSDPIVIVGIARTAMGGMQGMFSDVSAPQLGAQAIKGALEDAGLATSDVSEVFMGCVLPAGTGQAPARQAALGAGLDKGVPTTTVNKVCGSGMKTVMMGCQAILAGEAEVVVAGGMESMTNAPYMLTKARGGYRLGHGQVMDHMFLDGLQDAYEGELMGNFAEATASKYGFTREAQDAFAIESLARANKAINEGKFKREITPFTLKTRKGETVIDTDEQPGNARPDKIPSLRPAFSKDGTVTAANSSSISDGAAALVLMKQSTAQAKGLKPIAKITGYTQHAHEPEWFTTAPVGAVKNLLEKTNWSASDVDLFEINEAFAVVSMAAMHDLELDHAKVNVNGGACALGHPLGASGARVLVTLIAALQNESKKTGVAALCIGGGEAVAMAVELI

SEQ ID NO: 92888 - DNA, 1173 bp, Silicibacter sp. TM1040
  CDS (1)..(1173): transl_table=11
atgaccaagatcgttatcgcgggtgcagcccgaacgccgatgggtggatttcagggcatgtacgacggcgtcagcgcagcggatctcggtggcgcggccatcaaggcagcgttggaacgcgccggtgcgacaaccgtggatgaggtcttgatgggatgcgttctgccagcaggtcagggtcaggcgccggcacggcaggccggatttgctgccggtcttggcgaggaggttcccgccaccacgctcaacaagatgtgcggctctggcatgaaggcggcgatggtggcctatgatcagattgcgcttgggcacagcgatgtgatggttgcgggcggtatggagagcatgaccaatgccccctaccttctgcccaagatgcgcggtggcgcccggatcggccacggtcaggtcattgatcatatgttcctcgacgggcttgaggatgcctatgacaaggggcgcctgatgggcaccttcgccgaagactgcgcagagcattatcagttcagccgcgaggagcaggacgcctttgcgctggggtccttgtcaaacgctctggcggcgcaggaaagtggcgcgtttgaaggtgaaattactgaagttacagtgaaaacccgcaaaggcgctgttgtcacagatgcggatgagcagcccaaatccgcccgccccgacaagatcccgaccctgaagcccgcctttcgcgagggggggacggtcaccgcagccaactcctcgtcgatctcggatggggcggcggcgctggtactggcctccgagaccgccgctgcagcgcgcgggctttcggtgcgcggtcacatccttggccacgcgagccacgcacaggcaccgggctggttcaccaccgccccggttcctgccgcacgcaagctgatggcgcagatcggttgggacgtggaggatgtcgacctctgggaggtcaacgaagccttcgccgttgtgcccatggccttcatgcgcgagatgggcatcccgcgtgaaaaggtgaacgtcaacggcggtgcttgcgcgcttggccaccccatcggggcgtctggtgcgcgcatcatggtgacgctcttgaacgcgttggaaaagcgcggcctcaagcggggaattgccgccatctgcatcggcggcggcgagggaacggccatcgcgatcgaacgcgcctga

SEQ ID NO: 92889 - protein, 390 aa, Silicibacter sp. TM1040
MTKIVIAGAARTPMGGFQGMYDGVSAADLGGAAIKAALERAGATTVDEVLMGCVLPAGQGQAPARQAGFAAGLGEEVPATTLNKMCGSGMKAAMVAYDQIALGHSDVMVAGGMESMTNAPYLLPKMRGGARIGHGQVIDHMFLDGLEDAYDKGRLMGTFAEDCAEHYQFSREEQDAFALGSLSNALAAQESGAFEGEITEVTVKTRKGAVVTDADEQPKSARPDKIPTLKPAFREGGTVTAANSSSISDGAAALVLASETAAAARGLSVRGHILGHASHAQAPGWFTTAPVPAARKLMAQIGWDVEDVDLWEVNEAFAVVPMAFMREMGIPREKVNVNGGACALGHPIGASGARIMVTLLNALEKRGLKRGIAAICIGGGEGTAIAIERA

SEQ ID NO: 92890 - DNA, 1182 bp, Myxococcus xanthus DK 1622
  CDS (1)..(1182): transl_table=11
atggctcgtgacgtcgtcatcgtgggcgcggcccgtacccccattggtgcctttcagggcgcgctcgccaagctgacggccccgcagctgggcgcgatcgcgatcaaggcggcgctggagcgcgcgggcgtgaagcccgaggccgttcaggaagtcatcctgggctgtgtgctcaccgcgggcgtgggccaggcgcccgctcgccaggcggccatcttcgccggcctgcccgagacggttcccgccaccacgctcaacaaggtctgtggctccggcctcaaggccgtcagcgcgggcgcgcaggccattgccctgggtgacgcggacgtcgtcgtcgtgggcggcatggagtccatgagcaacgcgccgtacatcagccacacgatgcgtggcggcgcgcgcatgggcaacgtggaattcaaggacgcgatgatccacgacggcctctgggacgtgtacggcaacgtccacatgggcatctgcgccgaggagtgcgccacgacgcaggacatcagccgctcgcagcaggacgagtacgcgctggagtccacgcgccgcgccatccaggcccagaaggaaggcctgttcaaggcggagatcgtcccggtccagattccgggcaagaagccggaggacgtcgtcaccgtctccgacgacgaggggccccgcaacgcgaagccggagaagattccgggcctgaagccggtgttcaagaaggacggcacggtgacggccgccaacgcgtcctccatcaacgacggcgccgcggcgctggtgctgatgagcgaggagcgcgcgaaggccgagggccgcgccatcctgggccgcatcacgggctacgcccaggcggcgcgcaagccggtggagttcaccatcgcgcccacggacgccatcaacaagctgctgaagaagcagggcatcagcgcgggtgacgtggacctctgggagatcaacgaggcgttcgcggtggtgtccatcgcgaacaaccggctgctcggcctggacgtgtcgaaagtgaacgtgcgcggcggcgcggtggcgctggggcacccgattggcgcgtccggcgcgcgcgtgctggtgacgctgctgcagacgatgcaggacctggacaagaagcgtggcgtcgcgtcgctctgcatcggcggcggcgagggcatcgcgctgatggtggagcgctga

SEQ ID NO: 92891 - protein, 393 aa, Myxococcus xanthus DK 1622
MARDVVIVGAARTPIGAFQGALAKLTAPQLGAIAIKAALERAGVKPEAVQEVILGCVLTAGVGQAPARQAAIFAGLPETVPATTLNKVCGSGLKAVSAGAQAIALGDADVVVVGGMESMSNAPYISHTMRGGARMGNVEFKDAMIHDGLWDVYGNVHMGICAEECATTQDISRSQQDEYALESTRRAIQAQKEGLFKAEIVPVQIPGKKPEDVVTVSDDEGPRNAKPEKIPGLKPVFKKDGTVTAANASSINDGAAALVLMSEERAKAEGRAILGRITGYAQAARKPVEFTIAPTDAINKLLKKQGISAGDVDLWEINEAFAVVSIANNRLLGLDVSKVNVRGGAVALGHPIGASGARVLVTLLQTMQDLDKKRGVASLCIGGGEGIALMVER

SEQ ID NO: 92892 - DNA, 1182 bp, Cytophaga hutchinsonii ATCC 33406
  CDS (1)..(1182): transl_table=11
atgaaacctgtgtatattgttgcggcaagccgtacacctattggcagtttagccggttctctatcttctttaaacgcctcgcagcttggcgcagctgctattaaaggctgtctgaataatcttgaacttccacttgacgccatacagaatgcatacatgggaaatgtattaagcgctggtcttggccaatctccggcacgccaggcatcgaagtttgcgggattaccggattcaacagaggcaactacgattaataaagtgtgtgcatccggcatgaaagctatacagcttggcactcagcagatcttatgcggcgatgcggagattgttgttgccggtggaatggaaagcatgtcaaatgtgccttactacctagacaaagcacgccaggggtataaacttggtaatgcccaggtgattgacggcattataaaagatggcttgtgggatgtatattataactgccacatgggcaacgcagcagaaaacacggcaaaggaattacatattacccgtgaaatgcaggatgcatatgcaattgaatcctataaacgttcagcgtctgcatggcaaaacggttcatttaaaaacgaaattgtaccggtaaatatatcaggtaagcccggacaggaaacagttgttgacacggatgaagaattttcaaaagtaaattttgataaaatcccccagttaaaacccgtctttgataaagaaggaacggtgaccgctgccaatgcatcatccattaacgatggcgctgccgcattaattctcgtaagcgaagatgccttaaaaaaatataacctcactcccattgcccgcatcttatcgtatgcagatgctgcgcaggacccgctgtggtttacaacagctccggtattgtctgttaataaagcgctggagaaagcaggactgaacatacaggatattgattactttgaattgaatgaagcttttgctgttgtatgcctggctattaacaacaaacttggtattgacagccgcaaagctaatgtctggggtggagcggtttcattgggccatccgattggtgcctccggagcacgtattgttgttacattagtaaacatactaaaaaccaacaacgctcgtttgggtgttgcaggtatttgcaatggcggcggtggctccagcgcacttgttattgaaaacttagcttaa

SEQ ID NO: 92893 - protein, 393 aa, Cytophaga hutchinsonii ATCC 33406
MKPVYIVAASRTPIGSLAGSLSSLNASQLGAAAIKGCLNNLELPLDAIQNAYMGNVLSAGLGQSPARQASKFAGLPDSTEATTINKVCASGMKAIQLGTQQILCGDAEIVVAGGMESMSNVPYYLDKARQGYKLGNAQVIDGIIKDGLWDVYYNCHMGNAAENTAKELHITREMQDAYAIESYKRSASAWQNGSFKNEIVPVNISGKPGQETVVDTDEEFSKVNFDKIPQLKPVFDKEGTVTAANASSINDGAAALILVSEDALKKYNLTPIARILSYADAAQDPLWFTTAPVLSVNKALEKAGLNIQDIDYFELNEAFAVVCLAINNKLGIDSRKANVWGGAVSLGHPIGASGARIVVTLVNILKTNNARLGVAGICNGGGGSSALVIENLA

SEQ ID NO: 92894 - DNA, 1200 bp, Rhodococcus sp. RHA1
  CDS (1)..(1200): transl_table=11
atgacttctcccgccaggtccgtcatcgtcgccggagcccggacccccgtcggccggctgacgggttcgctcgcgtcactctccggatccgatctcggtggcatcgccatcaagggcgccctcgacaaggccggggtggcacccgaactggtggagtacgtgatcatggggcaggtcctcaccgccggcgccggtcagatcccggcccggcaggccgcggtcaacgcgggcatcccgatgtcggtgcccgccttgaccgtcaacaaggtgtgcctgtcgggtctcgacgccatcgcgctcgccgaccagctgatccgcgccggcgaattcgacgtcgtcgtcgccggggggcaggagtcgatgtcccaggcgccgcaccttctcccgaactcgcggagcggtttcaagtacggcgacaccaccctcgtcgaccacctcgcctacgacggcctgtacgacatcttcaccgagcaggcgatgggtgcgctcaccgaggaccggaacgcgaacaccgacaagatcggtcgcgaagagcaggacgccttcgccgccgcctcgcatcagcgcgccgcggccgcgtggaagaacggactcttcgacgacgaggtcgtacccgtcaccatcccgcagcgccggggcgagccactcgtggtcaccgaggacgagggcgtccgcgccgacaccaccgccgcgtcgctgtcgaagctgcggcccgcgttcagcaagaacggcaccgtcaccgcgggttcggcgtcgcagatctccgacggcgcggccgccgtcgtggtgatgagcaaggccaaggccgaggagctggggctcgaatggctcgccgagatcggcgcccacggcgtcgtcgccggaccggattcgacactccagcagcagcccgccaatgccatcgacaaggcctgcacccgtgagggactcgacccctcggcgctcgatctcgtcgagatcaacgaggccttcgccgccgtcggcatcgagtcgacccggcaactcggagtcgacccgtcgaaggtcaacgtgaacggcggcgccatcgccatcgggcacccgctcggcatgtcgggggcacgggtcgttctgcacctcgcgctcgagctgaaacgacgcggcggtggaaccggcgccgccgctctgtgcggcggcggcggacagggcgacgccctgattctccacgtcccgggcgagtga

SEQ ID NO: 92895 - protein, 399 aa, Rhodococcus sp. RHA1
MTSPARSVIVAGARTPVGRLTGSLASLSGSDLGGIAIKGALDKAGVAPELVEYVIMGQVLTAGAGQIPARQAAVNAGIPMSVPALTVNKVCLSGLDAIALADQLIRAGEFDVVVAGGQESMSQAPHLLPNSRSGFKYGDTTLVDHLAYDGLYDIFTEQAMGALTEDRNANTDKIGREEQDAFAAASHQRAAAAWKNGLFDDEVVPVTIPQRRGEPLVVTEDEGVRADTTAASLSKLRPAFSKNGTVTAGSASQISDGAAAVVVMSKAKAEELGLEWLAEIGAHGVVAGPDSTLQQQPANAIDKACTREGLDPSALDLVEINEAFAAVGIESTRQLGVDPSKVNVNGGAIAIGHPLGMSGARVVLHLALELKRRGGGTGAAALCGGGGQGDALILHVPGE

SEQ ID NO: 92896 - DNA, 1182 bp, Hyphomonas neptunium ATCC 15444
  CDS (1)..(1182): transl_table=11
atgtcagagaaagatccggtcgtcatcgtaggtatggcccgcacccccatgggcggcctgctcggcgaactctccagcttctcggccaatgagcttggcgcccatgttgtcaaagccgccgccgctgaagcaaagctcggcgctgcggaagtcgatgaagtcatcatgggcaactgcctgcccgctggccagggccaggcgcctgcccgccaggcggccatcaaatccggtctcgacaagaacaccgaagccaccaccatcaacaagatgtgcggctcgggcatggaagccgtcatcatgggccgcaacgccctgctcgccggtgaagccaccgtcattgttgcgggcggcatggaatccatgaccaacgcgccccacctcatcaccctacgccagggccataaatacggcgcggcgttcgcgcgcgaccatatggccaccgatggcctcgaagacgcgtatgaaggcggcccgatgggcaactttgccgacatgatcgcccgcgagtaccagttcacccgcgagcagcaggatgcctacgccctcgaaaccctgcgccgcgcgcaggacgccaccaagaacggcaagttcaagcgcgaaatcgctccgctcacggtaaagacccgcaagggcgaaaccgtcgtcgataccgaccagctgccccgcgaagcgatgccggacaagatcccgaccctgaaacctgccttcaacaaggatggcacggtaaccgccgccaacgcctcggcgatttccgatggcgccgcagccctcgtgctgatgcgcgagtccgaagccaagaagcgcggcctcacgccgattgcgaaaatcgtctcggcctccagccacgcgcaggagccggcctacttcaccaccgcccccgtccccgccatgcagaaggccctcaagaaagccggctggaaagcagaggatgtcgacctgtgggaagtcaacgaagccttcgccgtggtccccatgatcgcgatgaaagaactcggcatcagccatgacaagctgaacgtgaacggcggcgcctgcgccatgggccacccgatcggcgcgtccggggcccgcgtgctcatcacccttctggcggcgatggaagatcgcggcctcaagaagggcatggcctccctctgcatcggcggcggcgaaggtatcgccatggctgtcgagcgcgtctaa

SEQ ID NO: 92897 - protein, 393 aa, Hyphomonas neptunium ATCC 15444
MSEKDPVVIVGMARTPMGGLLGELSSFSANELGAHVVKAAAAEAKLGAAEVDEVIMGNCLPAGQGQAPARQAAIKSGLDKNTEATTINKMCGSGMEAVIMGRNALLAGEATVIVAGGMESMTNAPHLITLRQGHKYGAAFARDHMATDGLEDAYEGGPMGNFADMIAREYQFTREQQDAYALETLRRAQDATKNGKFKREIAPLTVKTRKGETVVDTDQLPREAMPDKIPTLKPAFNKDGTVTAANASAISDGAAALVLMRESEAKKRGLTPIAKIVSASSHAQEPAYFTTAPVPAMQKALKKAGWKAEDVDLWEVNEAFAVVPMIAMKELGISHDKLNVNGGACAMGHPIGASGARVLITLLAAMEDRGLKKGMASLCIGGGEGIAMAVERV

SEQ ID NO: 92898 - DNA, 1188 bp, Rhizobium leguminosarum bv. viciae 3841
  CDS (1)..(1188): transl_table=11
atgacattgcaggatcccatcgtcatcgtcggtgcggcgcgcaccccaattggcagctttcagggagagctgaaggaggcgacagcgccggaactcggagcaacggcgatccgcgcggcgctgcagcggagcggcgtcgaggctgcgacgatcgaggaggtcgtcttcggctgtgtactgccggcagggcaggggcaagcgccggcgcgccaggcggcgatccatgccggtctgcctttcgcgaccgcggccagcaccgtcaacaagatgtgcggctcgggcatgaaggcggtcatgatggcgcatgacctgatcgccgccggcagcgcctcggtggcggtcgcgggcggcatggaaagcatgaccaatgcgccctatctccttgacaaggcccgtggcggctacaggctcggccatgggcgtgtcgtggatcacatgttcctcgacgggctggaggatgcttatgacaaggggcgcttgatgggcagcttcgcggaggattgcgccgaggcctatcagttcacgcgcgaggcgcaggatagctacgccatcgcctcgctggcgcgggcgcagaaggcgattgccgaaggctgtttcgacagtgagatcgcggcggtcacggtgaaatcgagcaaagtcgagcaggtggcgagccgcgacgaacagcccggaaaagcgaagctggataagatcccgacgctgaagcccgccttccgcgagggcggcacggtgaccgccgccaattccagctcgatttccgatggcgcggcagcgctggtgctgatgcgccgctccgaggcggagcatcgcggcctcaagccgcttgcgactatcctcggccatgccacgcattcacaggcgcccaatcttttcgccacggcgccgatcggcgcgctgcagaaactgtccgatcgcaccggcctgccgctgtcggaggtcgatctgttcgaaatcaacgaggctttcgccgtcgttgccatggcggcgatgcgcgatctcaacctgccgcatgaaaaagtgaatgtgcatggcggcgcctgcgcgctcggccatccgatcggcgcctcgggggcccgcatcctggtgacgctgcttgccgcactggagcgatacgatctgaagcgcggtatggccgcgctctgcatcggtggcggcgaggcgacggctgtcgccatcgagcggcaatag

SEQ ID NO: 92899 - protein, 395 aa, Rhizobium leguminosarum bv. viciae 3841
MTLQDPIVIVGAARTPIGSFQGELKEATAPELGATAIRAALQRSGVEAATIEEVVFGCVLPAGQGQAPARQAAIHAGLPFATAASTVNKMCGSGMKAVMMAHDLIAAGSASVAVAGGMESMTNAPYLLDKARGGYRLGHGRVVDHMFLDGLEDAYDKGRLMGSFAEDCAEAYQFTREAQDSYAIASLARAQKAIAEGCFDSEIAAVTVKSSKVEQVASRDEQPGKAKLDKIPTLKPAFREGGTVTAANSSSISDGAAALVLMRRSEAEHRGLKPLATILGHATHSQAPNLFATAPIGALQKLSDRTGLPLSEVDLFEINEAFAVVAMAAMRDLNLPHEKVNVHGGACALGHPIGASGARILVTLLAALERYDLKRGMAALCIGGGEATAVAIERQ

SEQ ID NO: 92900 - DNA, 1155 bp, Oenococcus oeni PSU-1
  CDS (1)..(1155): transl_table=11
atgcaaaaagtatttattttaagtgcggttcgaacaccgatcggaaaatttggcggcgttttaaaaaataaaacggctgttgaactcggagcaacggttattaaatcactgcttaagcgttcagaaatatctgccgaggaaatagatgaaatttatatgggtaatgttattcaagcaggcgtcgggcagaatcctgctcgtcaatcagctcgtctagccggtattcccttttcaattcccagcacgacaattaatgatgtttgtgggtcgggactgcattcgattaatttggcggctaaattaatcgctggcggttttgatgacataattgtagccggaggaatggaatcgatgtccaatgctccatttttgcttaaaaatcatcgatttggacataaattaggaaacgaaaagattgatgatacattgttacgggatgctttgattgacccgatcggaaacttccatatgggtattacagccgagaacattgcagaaagatactctattagtcgtcaatcgatggatagatatgcgcttgaatcgcattctcgggcagttagagccgagaaaaagggtcttttcaatgatgaaatcgttgctgtcgatcaagttaagcaagatcaagcaccaagagccgacacttctttagaacaattgtcgaagttaaaggctgttttcaaagaagggggcaaagtcacagctggaaatgcttcgggaattaatgatggagctgctggagttattttagccagcgaaagaaaagtgggagaacttaatttgaatcctctagccgaatggaaatttgggaatgccgttggcgttaatccggagattatgggaatcggaccggtttttgcaattaatgatctgtataaaaaaaacaatctaagtgatcaggatattgacttatacgagttaaacgaagcttatgcttcacagatgctggtcgatacgtcggaacttcatctgaatttaaacaaggttaatcctaatgggggatcaattgctttgggacacccggtgggtgcttctggcgcaaggattttagtcaccttattgtacgatctgattcatgaagaaaaaaaacgcggaattgccagtttatgtgtcggcggtggcatgggtgtttcaacaatgattgaaaaaatttaa

SEQ ID NO: 92901 - protein, 384 aa, Oenococcus oeni PSU-1
MQKVFILSAVRTPIGKFGGVLKNKTAVELGATVIKSLLKRSEISAEEIDEIYMGNVIQAGVGQNPARQSARLAGIPFSIPSTTINDVCGSGLHSINLAAKLIAGGFDDIIVAGGMESMSNAPFLLKNHRFGHKLGNEKIDDTLLRDALIDPIGNFHMGITAENIAERYSISRQSMDRYALESHSRAVRAEKKGLFNDEIVAVDQVKQDQAPRADTSLEQLSKLKAVFKEGGKVTAGNASGINDGAAGVILASERKVGELNLNPLAEWKFGNAVGVNPEIMGIGPVFAINDLYKKNNLSDQDIDLYELNEAYASQMLVDTSELHLNLNKVNPNGGSIALGHPVGASGARILVTLLYDLIHEEKKRGIASLCVGGGMGVSTMIEKI

SEQ ID NO: 92902 - DNA, 1182 bp, Magnetococcus sp. MC-1
  CDS (1)..(1182): transl_table=11
atggaagatgtggtgattgttgcagccggtcgtacggccattggtaaatttttgggtagcctcagcgggcaagaggctaccgtattgggtagcgcggtgatcaaaggggtgctggctcgggcaggggtggcggctgagttggtggatgaagtgattttagggcaggtattaacagcgggtgtggggcaaaaccctgcacgtcaggctgctctgggtgctggtctttctatagagacacccgctatgaccattaacaaggtgtgtggttcgggtctaaaggcggttgctttggccgcccaagcgatcaagtgtggtgatgcccaagtaatattggccggtgggcaagagaatatgagtgcctccacccacgtgttacccaactcccgccatggtcagagcatgggggattggaaagcggtggataccatgatcaaggatggtttgtgggacgcctttaacgattatcatatgggcaacaccgccgaaaatatcgccgaacagtatgggtttagccgtgaagcgcaggacgcctttgccgccgcttcgcagcaaaagaccgaagcagcacaaaaggataaccgctttgccgaagagattatccccatctcgatcccacagcgcaaaaaagagcccatcatttttgataccgatgagttcccccggcatggcaccacagccgaatcgttggctggcttgcgccccgcctttaaaaaggatggtacggttacagcgggcaatgcgtcaggcatcaatgatggtgcggcggcggtgttggtgatgtccgccagcaaggccaaagcgttgggcctgagccccatggctaaagtggtggcctatgccagcgcgggggttgaccccaaagtgatgggcacgggacccatacccgctgtgagcaagtgtctggagaaggcgggttggaaggtgagtgatctggatttgattgaggcgaacgaagcgtttgccgctcaggccatgtcggttaataaggatctaggttttgacctgagcaaggtcaatgtcaatggtggggccattgcccttggccaccccattggtgcttctggggcgcgggtgctggtgacactgctgcatgaaatgaagcgtagaggtgcccaaaaaggtttggcaaccctttgtattggtggtggtatgggtgttgccttggcggttgaaagcctttaa

SEQ ID NO: 92903 - protein, 393 aa, Magnetococcus sp. MC-1
MEDVVIVAAGRTAIGKFLGSLSGQEATVLGSAVIKGVLARAGVAAELVDEVILGQVLTAGVGQNPARQAALGAGLSIETPAMTINKVCGSGLKAVALAAQAIKCGDAQVILAGGQENMSASTHVLPNSRHGQSMGDWKAVDTMIKDGLWDAFNDYHMGNTAENIAEQYGFSREAQDAFAAASQQKTEAAQKDNRFAEEIIPISIPQRKKEPIIFDTDEFPRHGTTAESLAGLRPAFKKDGTVTAGNASGINDGAAAVLVMSASKAKALGLSPMAKVVAYASAGVDPKVMGTGPIPAVSKCLEKAGWKVSDLDLIEANEAFAAQAMSVNKDLGFDLSKVNVNGGAIALGHPIGASGARVLVTLLHEMKRRGAQKGLATLCIGGGMGVALAVESL

SEQ ID NO: 92904 - DNA, 1191 bp, Nocardioides sp. JS614
  CDS (1)..(1191): transl_table=11
atgtccggttctgtcatcgtcgcgggggcacggacccccatcggacgcctgctcggcgggctcaaggggctctccgcggccgacctcggcggcgtcgccatcaaggccgcgctcgagaaggccggcgtcaccggcgaccaggtcgagtacgtgatcatgggtcacgtgatccaggccggggccggccagatcaccgcccgtcaggcctcggtcaagggcggcatcccgatgaacgttcccgccatcacgatcaacaaggtgtgcctgtccggcatgaacgcgatcgcgctcgccgaccagctgatccgggccggcgagcacgagatcgtcgtcgcgggcggcatggagtccatgacgcaggcgccgcacctgctccccaagtcccgtgagggcttcaagtacggcgacaccgccctggtcgactcgatggcctacgacgccctctacgaccagttcaccgaccagccgatgggcacgctgaccgaggcctgcaacacgggggcccgcgagctgacccgcgaggagcaggacgcgttctcggcgcgctcccaccagctcgccgctgccgcgtggaagaacggcgtcttcgacgacgaggtggtcccggtcgagatcccgcagcgcaagggcgatccggtcgtgatcgcgaacgacgaggggatccgcggcgacaccacggcggagtcgctcggcaagctgcgcccggcgttcagcaaggacggcacgatcaccgccggctcctcctcgcagatctccgacggcgcctgcgccgtggtcgtgatgagcaaggccaaggccgaggagctgggcctcacctggctcgccgagatcggcgcctccggtcaggtcgcgggcccggactccagcctgcagagccagccggccaacgcgatcaagaaggccgtcgccaaggagggcatctccgtggcggacctggacctggtcgagctgaacgaggccttcgcggccgtcgggatcgtgtccgcccgcgagctcgggatccccgaggagcaggtcaacgtgaacggtggggcgatcgcgctgggtcaccctgtcggcatgtcgggcgcccggatcgtgctgcacctcgcgctcgagctcaagcgccgcggtggcggggtcggcgcggccgccctgtgcggcggcggcgggcagggcgacgccctgatcgtgcgtgtcccgaagagctga

SEQ ID NO: 92905 - protein, 396 aa, Nocardioides sp. JS614
MSGSVIVAGARTPIGRLLGGLKGLSAADLGGVAIKAALEKAGVTGDQVEYVIMGHVIQAGAGQITARQASVKGGIPMNVPAITINKVCLSGMNAIALADQLIRAGEHEIVVAGGMESMTQAPHLLPKSREGFKYGDTALVDSMAYDALYDQFTDQPMGTLTEACNTGARELTREEQDAFSARSHQLAAAAWKNGVFDDEVVPVEIPQRKGDPVVIANDEGIRGDTTAESLGKLRPAFSKDGTITAGSSSQISDGACAVVVMSKAKAEELGLTWLAEIGASGQVAGPDSSLQSQPANAIKKAVAKEGISVADLDLVELNEAFAAVGIVSARELGIPEEQVNVNGGAIALGHPVGMSGARIVLHLALELKRRGGGVGAAALCGGGGQGDALIVRVPKS

SEQ ID NO: 92906 - DNA, 1212 bp, Azoarcus sp. BH72
  CDS (1)..(1212): transl_table=11
atgtccgatcccgtagtcatcgtttccgtcgcccgcacgccgatgggcggcttccagggcgatctttccggcctcaccgggccgcagctcggcgccatcgcgatcaagtcggcggtggagcgcgcgcgtcttgcgcccgagcaggtgcaggaggtgatcatgggttgcgtgctgccggccggcgtcggccaggcgccggcgcgtcaggcggcactcggtgccgggctgccgctggcggcgggctgcacgaccatcaacaaggtctgcgggtccggcatgaaggcgacgatgctggcccacgacctcctgttggcgggcaccaacgaggtgatggtggcgggcggcatggagtcgatgtcgaacgcgccgtatctgttgccgaaggcgcgcggcggttatcgcctgggccacggccagttgctcgaccacatgttcctcgacgggctggaagacagctattcgaaggagaacaagggccggctgatgggcacctttgccgaggattgcgccggccatttcgatttcagccgcagcgcgcaggacgcgttcgcggtggcctccaccgagcgcgcgcaggcggcgatcaccgaaggcgccttcagctgggaagtggtgccggtgacggtggccgggcgcaagggcgatgtggtggtggacaaggacgagcagccgctgaaggcgcagctcgacaagatcggcacgctgaagccggcgttcaagaaggacggcacggtgaccgcggcgaattcgtcgtcgatttcggatggtgcggcggcgctggtgctgatgcgcaagtcgacggccgacaagctggggctggcgccgctggcgaccatcgtcggccacgccacccacgcgcaggagccgcagtggttcaccaccgcgccggtgggggcgatgcagaaggtgctggcgaaggcgggctggggcgtgggcgacgtcgatctgtgggagatcaacgaggccttcgcggtggtgacgatggcggcgatgaaggagctgaacctgccgcacgacaaggtcaatgtgaatggcggcgcatgtgcgctgggccatccgatcggcgcgtccggtgcccgcatcctggtgacgctgatcggtgcgctgcgccggcgcgggctgaagcgcggcgtggccagcttgtgcatcggcggcggcgaggccacggcgatggcgatcgaactcaacgcatcggtggcctgcggcggttga

SEQ ID NO: 92907 - protein, 403 aa, Azoarcus sp. BH72
MSDPVVIVSVARTPMGGFQGDLSGLTGPQLGAIAIKSAVERARLAPEQVQEVIMGCVLPAGVGQAPARQAALGAGLPLAAGCTTINKVCGSGMKATMLAHDLLLAGTNEVMVAGGMESMSNAPYLLPKARGGYRLGHGQLLDHMFLDGLEDSYSKENKGRLMGTFAEDCAGHFDFSRSAQDAFAVASTERAQAAITEGAFSWEVVPVTVAGRKGDVVVDKDEQPLKAQLDKIGTLKPAFKKDGTVTAANSSSISDGAAALVLMRKSTADKLGLAPLATIVGHATHAQEPQWFTTAPVGAMQKVLAKAGWGVGDVDLWEINEAFAVVTMAAMKELNLPHDKVNVNGGACALGHPIGASGARILVTLIGALRRRGLKRGVASLCIGGGEATAMAIELNASVACGG

SEQ ID NO: 92908 - DNA, 1185 bp, Magnetospirillum magnetotacticum MS-1
  CDS (1)..(1185): transl_table=11
atgaccaccgatcccatcgtcattgtcggtgccgcccgtacccccatggggggcttccagggcgacttcgcctctctcgccgcgccgcaactgggcgcggtggccatccgggcggcggtggagcgggctggcatcaaagccgatcaggtggacgaggtgttcatgggctgcgtcctgcccgcgggcgtcggccaggccccggcgcgtcaggcatccctgggcgcggggctgtcgcgccatacgggctgcaccaccatctccaaggtctgcggctcgggcatgaaggcggccatgctggcccatgacctgctgaaggcggacacggccaaggtgatggtggcgggcggcatggaaagcatgtccaacgcgccctatctgctggacaaggcacgcggcggctatcgcctgggccatggcaaggtgctggaccacatgttcctggacggtctggaagacgcctatgaccggggccgtctgatgggaaccttcgccgaggaatgcgccagcagctacaaattcacccgcgaggcccaggacaacttcgctctggcctcgctgtcgcgcgccaagaaggccatcgccgagggctcgtttgctgccgagatcgccgccgtcagcgtcgtgggccgcaagggcgagaccttgatcactatcgacgagcagccgggcaaggctctgcccgacaagatcccgaccttgaagcccgcctttgccaaagacggcacggtgacggcggccaattcgtcgtccatctcggacggcgccgccgccctggtgatgatgcgggcgtccgaggccgaaaagcggggtctcaagcccatcgccactattctgggccacaccaatttcgcccaggagcccgccctgttcaccaccgcccccgtgggtgccatcaaggccctgctggacaaggtgggctgcaaggcgggtgacgtggatctgtgggagatcaacgaggccttcgccgtggtcaccatggcggccatgcatgatctcaagctggaccacgatcgggtcaacgtccatggcggcgcctgcgcgctgggccatcccatcggcgcctcgggcgcgcgcatcatcgtcaccttgctggcggcgctgaagacctatggcatgaagcgtggcgtggcctccttgtgcatcggcggcggcgaggctaccgcaatgatggtggagctgacctaa

SEQ ID NO: 92909 - protein, 394 aa, Magnetospirillum magnetotacticum MS-1
MTTDPIVIVGAARTPMGGFQGDFASLAAPQLGAVAIRAAVERAGIKADQVDEVFMGCVLPAGVGQAPARQASLGAGLSRHTGCTTISKVCGSGMKAAMLAHDLLKADTAKVMVAGGMESMSNAPYLLDKARGGYRLGHGKVLDHMFLDGLEDAYDRGRLMGTFAEECASSYKFTREAQDNFALASLSRAKKAIAEGSFAAEIAAVSVVGRKGETLITIDEQPGKALPDKIPTLKPAFAKDGTVTAANSSSISDGAAALVMMRASEAEKRGLKPIATILGHTNFAQEPALFTTAPVGAIKALLDKVGCKAGDVDLWEINEAFAVVTMAAMHDLKLDHDRVNVHGGACALGHPIGASGARIIVTLLAALKTYGMKRGVASLCIGGGEATAMMVELT

SEQ ID NO: 92910 - DNA, 1191 bp, Burkholderia vietnamiensis G4
  CDS (1)..(1191): transl_table=11
atgacgacgcaggacccgatcgtaatcgtcggcacggcacgcacgccgatgggcggttttcagggcgcgctggccgcggccagcgcaagcgaactcggcgcggtggcgattcgcgcggcactcgaacgcgcgaacgtgccggccgagcgtatcgacgaaatcgtgttcggctgcgtgctgccggccggacagggccaggcgccggcgcggcaggccgcgttgaaggccggcttgccgctgggagccggcgcgacgaccgtcaacaagatgtgcggctccgggatgaaggccgcgatgttcgcgcatgacctgctgttcgccggctcggccgacgtggccgtcgcgggcgggatggagagcatgacgaatgcgccgtatctgttgccgaaggcgcgcgcgggaatgcgcatgggccacggtcaggtgctcgaccacatgttcctcgacggcctcgaggacgcatacgacaagggccgcctgatgggcacgttcgcggaagactgcgcgcaggcctacgcgttttcgcgcgaggcgcaggacgacttcgcgatcgcgtcgctcacgcgcgcgcaacgcgcgatcgcggaaggacgcttcacgtcggagatcgcgccggtgaccgtgaaggccggcaagacggaagccgtcgtgtcgatcgacgagcagccgggcaatgcgaagctcgacaagatcccgacgctgaagccggcgttccgcgaaggcggcaccgtgacggccgccaattcgtcgtcgatttcggacggcgcggccgcgctcgtgatgatgcgccgctcgcaagcggagcggctcggcgtcacgccgaaggccgtgatcgtcgggcactcgacgtacgcgaacaagcccggcctgttcgcgaccgcgccgatcggcgcgatccgcaagctgtcggagaagaccggctggaacctgcgcgacgtcgatctgttcgagatcaacgaggcgttcgcggtggtcgcgatggcagcgatgcgcgttctcgacttgccgcacgacaaggtcaacgtgcacggcggcgcatgtgcgctcggccatccgatcggcgcctcgggcgcgcgcgtggtggtgacgctgctggctgcgctcgaaacgtatgggctgaagcgaggcgtcgcatcgctgtgcatcggcggcggcgaggcgaccgcgctcgcgatcgaacgcatcgcataa

SEQ ID NO: 92911 - protein, 396 aa, Burkholderia vietnamiensis G4
MTTQDPIVIVGTARTPMGGFQGALAAASASELGAVAIRAALERANVPAERIDEIVFGCVLPAGQGQAPARQAALKAGLPLGAGATTVNKMCGSGMKAAMFAHDLLFAGSADVAVAGGMESMTNAPYLLPKARAGMRMGHGQVLDHMFLDGLEDAYDKGRLMGTFAEDCAQAYAFSREAQDDFAIASLTRAQRAIAEGRFTSEIAPVTVKAGKTEAVVSIDEQPGNAKLDKIPTLKPAFREGGTVTAANSSSISDGAAALVMMRRSQAERLGVTPKAVIVGHSTYANKPGLFATAPIGAIRKLSEKTGWNLRDVDLFEINEAFAVVAMAAMRVLDLPHDKVNVHGGACALGHPIGASGARVVVTLLAALETYGLKRGVASLCIGGGEATALAIERIA

SEQ ID NO: 92912 - DNA, 1191 bp, Exiguobacterium sibiricum 255-15
  CDS (1)..(1191): transl_table=11
atgagtgaacaagtggtaatcgtcagtgcgacacgtacggcaatcggcagttttaacggcagtttaaaggatgttccggcaacaaaacttggcgcaacggtcatcgaagcggcactcgcacaggcgaatgtcgcaccagcgctcgtcgaggaagtcatcatgggcaacgtcctgcaggcgggactcggacaaaatccggcacggcaggccagtctcctcgccggtctcccggaatcggtcccggcgatgacgatcaataaagtctgtggttccggcttaaaggcgattcacctcgcgtttcaagcaatcaagtccggcgaggcggaaatcatcgtcgccggcgggatggaaaacatgagtcaggcaccgtacgtgttaagcggagcccggaccggcttacggatgggcgaccagccgcttgtcgatacgatcatcaaggacggtctggagtgcgcctttaacgactaccatatgggcatcacagcggaaaacttagccgagcaatatacgatttcccgggaggcgcaagaccagtttgcggcgaccagtcaacaaaaagcaagtcaagccatcgaagcggatcgtttccaagcggaaatcacaccggttgaaattccacagcgcaaaggtgatccggttgtcttcgccgaagatgagttcccgcgtgccggaacgacagcggaatcactcgcacgtttgcgtccggctttcaagaaagacggtacggtcacagccggcaatgcatccggcatcaatgacggagcggcagcagtcgtcgtcatgtcggcccgaaaggcaaaagaacttgggctgaccacgctcgtcgagatcgttgcgaacggtacgtccggtgtcgatccgagcatcatggggatcggtcccgtcaaagcggtcagccaggcgttgcataaagccggtcttgaactggacgccatcgacgtcatcgaggcgaacgaagcgtttgcggcgcaatcacttgccgtggatgcggaactccggtttgatccggcgaagctaaaccgtaacggcggagcaattgccctcggtcacccgatcggcgcgagcggaacacggatcatggttaccctgattcatgagatgttgcggaccggcgaaagccatggtctggcgacactctgcatcggcggcggtcaaggaattgcgacgatcgtcaagaagtacgaagagtaa

SEQ ID NO: 92913 - protein, 396 aa, Exiguobacterium sibiricum 255-15
MSEQVVIVSATRTAIGSFNGSLKDVPATKLGATVIEAALAQANVAPALVEEVIMGNVLQAGLGQNPARQASLLAGLPESVPAMTINKVCGSGLKAIHLAFQAIKSGEAEIIVAGGMENMSQAPYVLSGARTGLRMGDQPLVDTIIKDGLECAFNDYHMGITAENLAEQYTISREAQDQFAATSQQKASQAIEADRFQAEITPVEIPQRKGDPVVFAEDEFPRAGTTAESLARLRPAFKKDGTVTAGNASGINDGAAAVVVMSARKAKELGLTTLVEIVANGTSGVDPSIMGIGPVKAVSQALHKAGLELDAIDVIEANEAFAAQSLAVDAELRFDPAKLNRNGGAIALGHPIGASGTRIMVTLIHEMLRTGESHGLATLCIGGGQGIATIVKKYEE

SEQ ID NO: 92914 - DNA, 1179 bp, Croceibacter atlanticus HTCC2559
  CDS (1)..(1179): transl_table=11
atgagtaaatctgtagtcattgtaagtgcagcaagaacaccaattggaagctttttaggaagcttatctactgtaacagccactaaacttggtagtgttgctattaagggtgctttagataaaattaaattagatgcttcaaaagttcaggaagtatatatgggtaacgtagtgcaagctggtgtaggacaagctcctgcaagacaggctgcattaggtgctggtattccagaatctgtaccttgtacaacggttaataaagtttgtgctagtggtatgaaagctgtaataaatggagcgcaagctattgctttgggcgatgcagatatcgttgttgctggtggtatggagaatatgagcttaatacctcattatgtacatatgcgtaatggtcaaaaatttggacctgcaaaaatggaagacggaatgcaaaaagatggtttggtagatgcctacgatcaaaatgcaatgggaacatgtgcagatctttgtgctactgaatatgaattttcaagagaagatcaagatgcttatgcaattcaatcttataagcgttctgcaaaagcttggagcgaaggtaaatttgcaaatgaagttgttcctgtagaggtgccacaacgtcgtggagaacctgttgtagttagtgaagatgaagaatataaaaacgtaagaatggagaaaattccttctttacgtccagcatttactaaagacggtactgttaccgcagcaaatgcatctacaattaatgatggcgcaggagctgtagttttaatgagtgcagaaaaagcagaagaattaggcttaacacctttagcaactattaagagttatgcagatgcagcgcaagagcctaagtggtttacaactgctccagcaaaagcattacctaaggcattagataaagcaggaataactattgatgatgtagattattttgaattaaatgaagcattctctgttgtaggtctagctaacatgaagattttaggaatagatgatactaagaccaatgtaaatggtggtgcagtatcattagggcacccactaggatgttctggtgtaagaattttaatcaccctattaagtgttttagagcaaaacaatgcaaaaattggagctgctggtatttgtaatggtggtggcggtgcttctgcaattgtagttgaacgtccttaa

SEQ ID NO: 92915 - protein, 392 aa, Croceibacter atlanticus HTCC2559
MSKSVVIVSAARTPIGSFLGSLSTVTATKLGSVAIKGALDKIKLDASKVQEVYMGNVVQAGVGQAPARQAALGAGIPESVPCTTVNKVCASGMKAVINGAQAIALGDADIVVAGGMENMSLIPHYVHMRNGQKFGPAKMEDGMQKDGLVDAYDQNAMGTCADLCATEYEFSREDQDAYAIQSYKRSAKAWSEGKFANEVVPVEVPQRRGEPVVVSEDEEYKNVRMEKIPSLRPAFTKDGTVTAANASTINDGAGAVVLMSAEKAEELGLTPLATIKSYADAAQEPKWFTTAPAKALPKALDKAGITIDDVDYFELNEAFSVVGLANMKILGIDDTKTNVNGGAVSLGHPLGCSGVRILITLLSVLEQNNAKIGAAGICNGGGGASAIVVERP

SEQ ID NO: 92916 - DNA, 1173 bp, Roseovarius nubinhibens ISM
  CDS (1)..(1173): transl_table=11
atgaaagacgtggtgattgccggggcggcgcggacgcccatggggggatttcagggcgcctttgatggcgtgccggcggcgacgctcggcggggcggcgatccgcgccgcgctggctgatgccaaggctgcaacggtggacgaactgctgatgggctgtgtgttgcccgcggggcagggccaggcgccggcgcggcaggcgggctttgccggggggctgggcgaagaggtgccggcgaccacgctcaacaagatgtgcggctcgggcatgaaggccgcgatgatgggctttgaccagatcgcgctcggccatgccgagacgatgatcgcgggcggcatggagagcatgtcgaacgcgccctatatgctgcccaagatgcgcggcggggcgcggatcggccatggcgaagtggtcgatcacatgttcctcgacgggctcgaagatgcctatgacaagggccggttgatgggcacctttgccgaggattgcgccgagcattaccaattcacccgcgaggcgcaggacgcctatgcgatcggctcgctcgaaggggcgttggcggcgcagaaatccggtgcttttgcaggcgaaatcgcgcctgtgaccctgtcctcgcgcaagggcgatgtgaccgtgtcggaggatgagcaaccggccaaggcgcggcccgaaaagatcccgacgctgcggccagcgttccgcgagggcggcacggtgacggcggccaattcgagctcgatctcggacggggcggcggcgctggtgctggcgtcacgggcggcggcagaggcgcaggggctcaacatccgggcgcgcatcgtcggccatgccagccatgcgcaggcgccgggctggttcaccaccgcgccggtgcctgccgcgcgcaagctgctcgaccggatcggctggtcggtgtcggatgtcgatctgtgggaggtgaacgaagcctttgccgtggtgccgatggccttcatgcatgagatgggcctgccgcgcgatgtggtgaatgtgaacggcggggcctgtgcgctcggccatccgatcggggcctcgggggcgcggatcatggtgaccctgctcaacgcgctcgagacccgggggctcaagcggggggtggcggcgatctgcatcggtggcggcgaaggcacggccatcgcgatcgagcgcgactga

SEQ ID NO: 92917 - protein, 390 aa, Roseovarius nubinhibens ISM
MKDVVIAGAARTPMGGFQGAFDGVPAATLGGAAIRAALADAKAATVDELLMGCVLPAGQGQAPARQAGFAGGLGEEVPATTLNKMCGSGMKAAMMGFDQIALGHAETMIAGGMESMSNAPYMLPKMRGGARIGHGEVVDHMFLDGLEDAYDKGRLMGTFAEDCAEHYQFTREAQDAYAIGSLEGALAAQKSGAFAGEIAPVTLSSRKGDVTVSEDEQPAKARPEKIPTLRPAFREGGTVTAANSSSISDGAAALVLASRAAAEAQGLNIRARIVGHASHAQAPGWFTTAPVPAARKLLDRIGWSVSDVDLWEVNEAFAVVPMAFMHEMGLPRDVVNVNGGACALGHPIGASGARIMVTLLNALETRGLKRGVAAICIGGGEGTAIAIERD

SEQ ID NO: 92918 - DNA, 1173 bp, Oceanicola batsensis HTCC2597
  CDS (1)..(1173): transl_table=11
atgcaagaggtcgtgatcgcgggcgccgcgcggactgccatgggcggatttcagggggcattcgacggggtcgaggccgcgaccctcggggggacggccatccggtccgccctgaaggctgccaatatcgggacggtcgacgaggtcctgatgggctgcgtcctgcccgccgggcaggggcaggccccggcccgccaggccggtttcgccgccggtctgggcgaggaagtgccagccacgaccctgaacaagatgtgcggttcggggatgaaggccgccatgatggcctgggatcgcctcgccctcggccacgcgcaggtcatcgcggccggcggcatggagagcatgtccaacgccccctacctgctgcccaagatgcgcggcggcgcccgcatcggccaccacgaggtcaaggaccacatgttcctggacgggctcgaggatgcctatgacaagggccgcctgatgggcaccttcgccgaagactgcgccgaggcgtttcagttcacccgcgaggcccaggacgaatacgcgctcgggtctttgcagaacgcgctcgacgcccagaaatccggcgccttcgacgccgagatcgcgccggtgacgatcaccacccgcaagggcgagatcacggtcggcgaggacgaacagcccggcaatgcgcgccccgagaagatcccgcagctgaaacccgccttccgcaaggatggcacggtgacgcccgccaactcgtcctcgatctccgacggggccgccgcgctcgttctcgccacggccgaagccgccgcggcgcgcgacatgccggtccgggcccgcgtcctcggccatgccagccacgcccaggccccgtcgctctttccgaccgccccggtgccggccgcccagaaactgctttccgcaatcggctggacaaagaacgacgtcgacctgtgggaggtaaacgaagccttcgccgtggtgccgatggccttcatgcaagagatgggcctgccgcgcgacatcgtgaacgtgaacggcggcgcctgcgcgctcggtcatccgatcggcgcctcgggcgcgcgcatcatggtgaccctgctgaacgccctggaaaggcacggcctcaagcggggcatcgcggccatctgcatcggcggcggcgaaggcacggccatcgccatcgaacgggactga

SEQ ID NO: 92919 - protein, 390 aa, Oceanicola batsensis HTCC2597
MQEVVIAGAARTAMGGFQGAFDGVEAATLGGTAIRSALKAANIGTVDEVLMGCVLPAGQGQAPARQAGFAAGLGEEVPATTLNKMCGSGMKAAMMAWDRLALGHAQVIAAGGMESMSNAPYLLPKMRGGARIGHHEVKDHMFLDGLEDAYDKGRLMGTFAEDCAEAFQFTREAQDEYALGSLQNALDAQKSGAFDAEIAPVTITTRKGEITVGEDEQPGNARPEKIPQLKPAFRKDGTVTPANSSSISDGAAALVLATAEAAAARDMPVRARVLGHASHAQAPSLFPTAPVPAAQKLLSAIGWTKNDVDLWEVNEAFAVVPMAFMQEMGLPRDIVNVNGGACALGHPIGASGARIMVTLLNALERHGLKRGIAAICIGGGEGTAIAIERD

SEQ ID NO: 92920 - DNA, 1197 bp, Erythrobacter sp. NAP1
  CDS (1)..(1197): transl_table=11
atggcccagttttctgccaacgatccgatcgtcatcctctcttatgcgcgcacgcccatgggcgggatgcagggggcgctttccgacgtgtcggcgactgaccttggcgcgaccgcggtaaaggctgcggtcgagcgttcgggcgttctgggcgaaaagtttgatcgaacctacatgggctgcgtccttcccgcaggcctcggtcaggcaccagcccgccaagcgacgatcaaggcaggtctgcctgaaagcgtgcaggctaccaccgtgaacaaggtctgcggcagcggcatgcagaccgtgatcatgggcgcagaggcactcgccagcggcactgtcgattatgtcgtcgcaggcggtatggagagcatgaccaacgcgccgtatctcctgaagaagcaccgctcgggcgcgcgcatcgggcacgatacgacctacgatcacatgttcctcgacgggcttgaagacgcttacgaagaaggccgcgcaatgggcaccttcgctcaggacaccgcgaacgagtatcagctcactcgcgaggacatggacgaatactcgatcacctcgctcgaccgcgcaaacaaggctatcgaaagcggcgcgtttgcggatgaagtggtcccagtgactttcgcaacccgcaagggcgaagtgaccgtggacaccgacgaacagcccggcaagggccgccccgacaagatcccgacgcttcgcgctgccttcgccaaggacggcacgattactgcggctacgtcgagctcgatctcggacggcgctgcggctgtcgttctcacccgtgaaagtgtcgccaaggaaaacggtcagcagccggtcgccaaggttgtggcgatggccgcccatgcccgcatgcccaaagatttcactgtggcaccggtcggagcgattgagaaagtcctcgaaaaggcaggctggagcgtcggcgacgtcgacctttgggaagtgaacgaggcttttgcctgtgtcgccatgttcgcgatgcgcgacatcgggatcgaccatgccaagatcaacgtgaacggcggcgcgaccgctctcggtcacccgatcggcgcatcgggcacgcgtatcatcgtgacgctgatcaatgctctcaagacgcaaggcaagaccaagggtgtcgcctcgctgtgcatcggcggtggtgaagcaaccgcagtggctgtcgaactggtttga

SEQ ID NO: 92921 - protein, 398 aa, Erythrobacter sp. NAP1
MAQFSANDPIVILSYARTPMGGMQGALSDVSATDLGATAVKAAVERSGVLGEKFDRTYMGCVLPAGLGQAPARQATIKAGLPESVQATTVNKVCGSGMQTVIMGAEALASGTVDYVVAGGMESMTNAPYLLKKHRSGARIGHDTTYDHMFLDGLEDAYEEGRAMGTFAQDTANEYQLTREDMDEYSITSLDRANKAIESGAFADEVVPVTFATRKGEVTVDTDEQPGKGRPDKIPTLRAAFAKDGTITAATSSSISDGAAAVVLTRESVAKENGQQPVAKVVAMAAHARMPKDFTVAPVGAIEKVLEKAGWSVGDVDLWEVNEAFACVAMFAMRDIGIDHAKINVNGGATALGHPIGASGTRIIVTLINALKTQGKTKGVASLCIGGGEATAVAVELV

SEQ ID NO: 92922 - DNA, 1185 bp, Pseudoalteromonas tunicata D2
  CDS (1)..(1185): transl_table=11
atgtcagtacaagaccctatcgttatcgttgcagccagtcgtacccctatgggtggctttatgggtgcgctaagtgatgttcacaccacagatttaggtgcaaccgcgattgcacatgctgtagcacaaagcggtgtatcagttaatgacattgatgaagtgattatgggctgtgtacttccagctggtgtaggccaagcgcctgcgcgtcaagccatgttaaaagcacaattaccactaggaaccggtgcaaccacaatcaataaagtatgtggttcaggtttaaaagcagccatgtttgcccatgatttaatctcagcaggttcgattaatattgcagtggcaggcggtatggaaaatatgtccgcttctccgtattttttaccaaaagcccgtggtggttttcgtatgggccacggtgaaattaaagatcacatgatggctgatggtttagaagatgcctacgataaaaaagccatgggttgttttgctcaagaaacagcaaatgagtatggcattacacgtgccgatatggatgcgtttgccataaactcactgcaaaaagcgcaagctgctattgcaagtggtgcatttattggggaagtagcacctgtgacatatgcgactcgttcaggtgatgttgtggtcagcattgatgaacagcctggcaacgctaaagtagataaaataccaacacttcgcccagcatttgccaaagagggcactattacagcggctaactcttcatctatttctgatggtgcagcagcccttgtattaatgaaagcgtcagatgcgcaagcaaaaggtttaacgcccctgtgtaaaattgtggcacatgcaacccattcacaaaaaccagccgaatttaccgttgcccccgtaggcgcaatgaacaaagtacttattaaagcgggttggtctactgagcaagttgatttatgggaaattaatgaagcctttgccatggtcactatgcttgcaatcaacgaaatgaaacttgatagcgctaaagtaaatgtcaatggtggtgcttgtgcgctgggccatcctatcggtgcaagtggtgcacgtattttagtcacactgattcatgcattaaaaaatcgtaatttgaaaactggggttgcctcgttatgtatcggtggtggtgaagccgtcgcaatggcaattgaactaatttaa

SEQ ID NO: 92923 - protein, 394 aa, Pseudoalteromonas tunicata D2
MSVQDPIVIVAASRTPMGGFMGALSDVHTTDLGATAIAHAVAQSGVSVNDIDEVIMGCVLPAGVGQAPARQAMLKAQLPLGTGATTINKVCGSGLKAAMFAHDLISAGSINIAVAGGMENMSASPYFLPKARGGFRMGHGEIKDHMMADGLEDAYDKKAMGCFAQETANEYGITRADMDAFAINSLQKAQAAIASGAFIGEVAPVTYATRSGDVVVSIDEQPGNAKVDKIPTLRPAFAKEGTITAANSSSISDGAAALVLMKASDAQAKGLTPLCKIVAHATHSQKPAEFTVAPVGAMNKVLIKAGWSTEQVDLWEINEAFAMVTMLAINEMKLDSAKVNVNGGACALGHPIGASGARILVTLIHALKNRNLKTGVASLCIGGGEAVAMAIELI

SEQ ID NO: 92924 - DNA, 1206 bp, Photobacterium sp. SKA34
  CDS (1)..(1206): transl_table=11
atggctagggtatttattgttgctgcaaaacgtacaccaatcggtagttttaacggtgcactaaaatcagtaacagcagcagagcttggcgctgccgcaatcaaaggcgcgttagcggaaacatcagtgccagtagaagctattgatgaagtaattttcggtaatgtcattggcgcaggtcaaggtatgggaccgggccgacaagcatctttaaaagcgggcattcctaatgaagtacctgcatacacattaaatatggtgtgtggtagtggtatgaaagcggtaatggatgctgccgcgcacatcaaagctggtgatgctgacattgtggttgctgctggcgcagaaaacatgtctcaaattcctttttgtgcatcatcgaaaattcgtgatgggcaaaaaatgggtaaccttgaactaagcgatttattaattgctgacggtttaacggatgtctttaataattaccacatgggtgtaactgctgagaatgttgttgagaaagttggcttaacacgtgaacagcaagataatttcgcactagcgagccaacaaaaagccgttgctgctattgagcaaggtaagtttgttgatgaaattacacctgtagaagtggtaggtcgtcgtgcaaccgttgttgttgatacagatgagtacccgaaacaagatgcttcaatcgaaggtctagcaaaactccgccctgcatttaaacgtgatggctctgttactgctggtaacgcatcaggtattaatgatggcggtagtgcaattattgttgtttcagaagcggcagtaaataaatacaaccttacgccacttgctgaaattgaaagttatgcgcaagcaggtattgctcctgaaattatgggcttagggcctgtaccagcagtacttaaagcactagataaagcgcaattatcaattgataaaattgagcgcttagagtttaacgaggcctttgctggccaagctctaggtgtgctttatgaagtagcaaaagaaacgaattcaaaagttgaagatctcgttgaacgtgcaaacgtcaatggcggagccatcgctctaggtcacccactaggtgcatcaggtaatcgtattttagtgagtttattacatgaaatgcgccgccgagaagatcagtacggtattgcgaccttatgtgtcggtggtggtatgggtacagccgttattctaaaacgcgtttaa

SEQ ID NO: 92925 - protein, 401 aa, Photobacterium sp. SKA34
MARVFIVAAKRTPIGSFNGALKSVTAAELGAAAIKGALAETSVPVEAIDEVIFGNVIGAGQGMGPGRQASLKAGIPNEVPAYTLNMVCGSGMKAVMDAAAHIKAGDADIVVAAGAENMSQIPFCASSKIRDGQKMGNLELSDLLIADGLTDVFNNYHMGVTAENVVEKVGLTREQQDNFALASQQKAVAAIEQGKFVDEITPVEVVGRRATVVVDTDEYPKQDASIEGLAKLRPAFKRDGSVTAGNASGINDGGSAIIVVSEAAVNKYNLTPLAEIESYAQAGIAPEIMGLGPVPAVLKALDKAQLSIDKIERLEFNEAFAGQALGVLYEVAKETNSKVEDLVERANVNGGAIALGHPLGASGNRILVSLLHEMRRREDQYGIATLCVGGGMGTAVILKRV

SEQ ID NO: 92926 - DNA, 1182 bp, Oceanospirillum sp. MED92
  CDS (1)..(1182): transl_table=11
atgagtcaggatgcagtagttattgtgagcgcggcgcgtaccccaatgggcggtatgatgggctccctaagcgatgttcgtgcaccggatctgtgtgcaactgcgattaaagctgctgttgagcgtgcgggtattcaggcagcagatgttgatgaagttgttatgggttgtgtactgcctgcaggccttggccaggcaccggcacgtcaggcttctcgtgcggcgggtattccggatgctgcgggttgtacaaccattaacaaaatgtgcggctcaggtatgaaggccgttatgctggctcatgatcagattctggcaggatctgcagacattatggtcgcaggtggtatggagaatatgagtcagtctccttacattctgccaaaagcgcgtgcgggtatgcgcatgggccacggtcaggttattgaccatatgttctttgatggcctggaagacgcctacgaaggcggtcttatgggcacttacgcgcagaagagcgcggatgcttacaatgtaacccgtgaatcgatggatgatttcgcgatcgggtcactagagaaagcgatctctgcgattgaaaaaggcgagtttgttgaagagattgcgccagttacgattaaaactcgtaaaggtgaagtggttgttgatacggatgagcagccgggcaatgcgcgcatcgataagatccgcagcctgaagcctgctttcaaaaaagacggtacggtaactgccgctaactccagctctatctctgacggcggttctgcactggttctgatgaaagagtctgaagcgaaggccaaaggcctgcagccactggcacgtattgtttctcactcaacgcacgcacagctacctgctgaattcacgattgcacctattggctctatccagaaagcactggataaagcgggctggagcaaagacgacgtagatcttttcgaaatcaatgaagcttttgctgtggtatctatgctagcgatcaacgagctgggcctggatgctgacaaagttaacgttcgcggtggagcttgtgcactgggtcacccaatcggttccagtggttcccgcatcatggttacgctactgcatgcattgaagcagaaaggcctgaaaaaaggtgtagcttccctatgtatcggtggtggtgaagcgacggctgttgccgttgagatgctgtaa

SEQ ID NO: 92927 - protein, 393 aa, Oceanospirillum sp. MED92
MSQDAVVIVSAARTPMGGMMGSLSDVRAPDLCATAIKAAVERAGIQAADVDEVVMGCVLPAGLGQAPARQASRAAGIPDAAGCTTINKMCGSGMKAVMLAHDQILAGSADIMVAGGMENMSQSPYILPKARAGMRMGHGQVIDHMFFDGLEDAYEGGLMGTYAQKSADAYNVTRESMDDFAIGSLEKAISAIEKGEFVEEIAPVTIKTRKGEVVVDTDEQPGNARIDKIRSLKPAFKKDGTVTAANSSSISDGGSALVLMKESEAKAKGLQPLARIVSHSTHAQLPAEFTIAPIGSIQKALDKAGWSKDDVDLFEINEAFAVVSMLAINELGLDADKVNVRGGACALGHPIGSSGSRIMVTLLHALKQKGLKKGVASLCIGGGEATAVAVEML

SEQ ID NO: 92928 - DNA, 1176 bp, Flavobacteria bacterium BBFL7
  CDS (1)..(1176): transl_table=11
atgaataaagttgttatcgtttcatatgctagaacaccaataggtagctttatgggtaaattatctacagtaccagctactcaattaggtagtattgcaataaagggtgctttagacaaaattaaactagacgcttcattagttgaagaagttatcatgggtaatgtagttcaagccggtacagggcaagcacctgcgagacaggcagccttagctgctggattatctaatgaagttccttgtactactgtcaataaagtatgtgccagcggaatgaaaactgtaatgatggctgcacaagcaattgcttgtggagataaagagattgtggtcgcaggaggaatggaaaatatgagcatgattcctcactatgttcacatgagaactggtcaaaaatttggcccagcttctttaattgatggtatgcaaaaagatggattagtagatgcttatgatcaaaatgctatgggtgtttgtgctgatctatgtgcagaagaacatggtttttcaagatctgaccaggatgattttgctgttcaatcatataatagatctgccaaagcatggaaagaaggaaagtttaatgatgaagttgttccagttaatgttcctcagcgtcgaggtgatgatataattgttgatcatgatgaggaatatacaaatgtaaaaatggaaaagatcccagcattaagagctgcctttacaaaagaaggtacagttactgctgctaatgcttcgactattaatgatggtgctgctgcattaattttaatgagtgaagctaaggctaaatccttaggtttaacacctcttgcaacaattttaagctatgcagatgctgctcaagaaccaaagtggttcacaactgctcctgctaaagcattgcctattgcattggacaaagctggcattacaaaggatgaagtagatttttatgaatttaatgaagcatttgcggtagtcggtcttgctaatatgaaaattttaggtttaaaagattcaaatgtaaatgtctatggtggagctgtttcattaggtcatccactaggatgtagtggtgcgcgtattatcacaacactattgagcgttttaaaacaagagaacggatcgataggtgccgcagctatttgtaatggtggtggtggtgctagtgctatggtaattaaaaaaggataa

SEQ ID NO: 92929 - protein, 391 aa, Flavobacteria bacterium BBFL7
MNKVVIVSYARTPIGSFMGKLSTVPATQLGSIAIKGALDKIKLDASLVEEVIMGNVVQAGTGQAPARQAALAAGLSNEVPCTTVNKVCASGMKTVMMAAQAIACGDKEIVVAGGMENMSMIPHYVHMRTGQKFGPASLIDGMQKDGLVDAYDQNAMGVCADLCAEEHGFSRSDQDDFAVQSYNRSAKAWKEGKFNDEVVPVNVPQRRGDDIIVDHDEEYTNVKMEKIPALRAAFTKEGTVTAANASTINDGAAALILMSEAKAKSLGLTPLATILSYADAAQEPKWFTTAPAKALPIALDKAGITKDEVDFYEFNEAFAVVGLANMKILGLKDSNVNVYGGAVSLGHPLGCSGARIITTLLSVLKQENGSIGAAAICNGGGGASAMVIKKG

SEQ ID NO: 92930 - DNA, 1179 bp, marine gamma proteobacterium HTCC2207
  CDS (1)..(1179): transl_table=11
atgtctaagccaatcgctattctttcagcctcacgcacgccaatgggcggtatgttgggttcactatcttcagtttccgccgccgatctgggtgccgcagcaattagtgcggcagtgcaaaagtccaccttaggtgtagaccagatcgacgaagtgctgatgggttgcgtcctctcggctggtgtaggtcaggcacctgcgcgtcaggcagcattatctgctgggctcactcaaggaacgccctgcaccacaatcaataaagtctgtggctcggccatgaaagcggtaatgatgggctgcaatgcactgcgtgcgggacaggcaaccactgttgtagccggcggtatggaaagcatgagccgagcaccctatttgatcccccagggacgtcagggttacagatttggtcatgcgcagatgctagatcatatgcaatacgacggtctgcaagacgcctatcaaggcgttgctatgggcctgttcgctgaaaaatgtgctgacaaatacagttttagtcgcgagcatcaggacgcctatgctatcgagtcactgcgtcgcgccaacactgcgatcgacaacggttggtttgatcaggaaattgcgccagtcactatctcttcacgacgcggtgatgtggttgtagatacagatgagcagccgggcaatgctaagccagagaaaattccgcagttaagaccggcttttgacaaaaatggcacggttaccgctgccaatgccagctctatctccgacggtgccgcggccctgacattgatgatggctgacgaagctgaagcgcgaggcttaaagcccattgcccttattcacggctttgaccaaagcgcccatgaaccagagtggtttactacagcacctgtttcagcgattaacaagacattagaacgcgttggttggacagtggacgatgtggatctttgggaggttaacgaagcgtttgcggtagttgccatggcggctatgcacgagttgaaaataccccacgagaaactcaatgttcatggcggggcttgcgctcttggacatccaattggcaccagtggcgctagaattatcgttacccttattcacgccctgcaacagcacggtggccgcaaaggcattgctagtctctgtatcggcggcggcgaaggcactgcaatggctattgaactagtctag

SEQ ID NO: 92931 - protein, 392 aa, marine gamma proteobacterium HTCC2207
MSKPIAILSASRTPMGGMLGSLSSVSAADLGAAAISAAVQKSTLGVDQIDEVLMGCVLSAGVGQAPARQAALSAGLTQGTPCTTINKVCGSAMKAVMMGCNALRAGQATTVVAGGMESMSRAPYLIPQGRQGYRFGHAQMLDHMQYDGLQDAYQGVAMGLFAEKCADKYSFSREHQDAYAIESLRRANTAIDNGWFDQEIAPVTISSRRGDVVVDTDEQPGNAKPEKIPQLRPAFDKNGTVTAANASSISDGAAALTLMMADEAEARGLKPIALIHGFDQSAHEPEWFTTAPVSAINKTLERVGWTVDDVDLWEVNEAFAVVAMAAMHELKIPHEKLNVHGGACALGHPIGTSGARIIVTLIHALQQHGGRKGIASLCIGGGEGTAMAIELV

SEQ ID NO: 92932 - DNA, 1185 bp, Oceanobacter sp. RED65
  CDS (1)..(1185): transl_table=11
atgagtactcgtgacatagtaattgtcgctgctgggcgcagcgccatcggtactttccaaggtggcctaagtagtttatctgccgttgatctaggcagccaagtcatcaaacacttattgactaaacaccagatcgacggtgcccaggtcgatgaagttatccttggtcaggtgttaactgctggcacaggtcaaaatccggctcgccaaagtgctattagggctgggctaccgaatacaacacctgcaatgactattaataaagtgtgtggttctgctctaaaagcactgcacttgggtgctcaagccattgcttgcggcgatgctgatatgatcatcgcaggtggtcaagaaagcatgagcaatgccccacacgtcatgcctaattctcgcaatggtcaacgaatgggccctatcactatgattgataccatgattactgacggcctttgggatgcatttaacgactatcacatggggattacagcagagaacttggcagaaaagtttggcatcagccgtgaagaacaagatacctttgccgcagccagtcaacaaaaggcagtggcagcgcaagaagcgggtcgcttcgatgatgaaatcattccaatcacagtgccacaacgaaaaggcgatgatctagtctttgataaagacgagggtccgcgcgcaggcaccaccccagaaaaactcgcagccatgcgccctgcttttaaaaaagacggtactgtaactgctgccaatgcatctagcttaaatgatggtgccgccgcagtaattatgtgtagtcgcgaaaaggcagacgaattaggtctacctgtattagccacgattaaagcttatgcaaacgcaggagtagatcccagcattatgggaattggcccagtaagcgcaacacaacgctgcttaagtaaagccggttgggagctgaatgatatagacctaattgaagccaacgaagcctttgccgtgcaagcattaagcgtaggcaaagaacttggctgggatagcgacaaagtaaatgttaatggcggcgctattgcccttggtcatcctattggcgcttcaggctgccgtgttctcgtaacactattaaatgaaatgcaaaaacgtgacgtgaacaaaggattagcaactctttgtattggtggcggtatgggagtgtccatagccattgaacgctag

SEQ ID NO: 92933 - protein, 394 aa, Oceanobacter sp. RED65
MSTRDIVIVAAGRSAIGTFQGGLSSLSAVDLGSQVIKHLLTKHQIDGAQVDEVILGQVLTAGTGQNPARQSAIRAGLPNTTPAMTINKVCGSALKALHLGAQAIACGDADMIIAGGQESMSNAPHVMPNSRNGQRMGPITMIDTMITDGLWDAFNDYHMGITAENLAEKFGISREEQDTFAAASQQKAVAAQEAGRFDDEIIPITVPQRKGDDLVFDKDEGPRAGTTPEKLAAMRPAFKKDGTVTAANASSLNDGAAAVIMCSREKADELGLPVLATIKAYANAGVDPSIMGIGPVSATQRCLSKAGWELNDIDLIEANEAFAVQALSVGKELGWDSDKVNVNGGAIALGHPIGASGCRVLVTLLNEMQKRDVNKGLATLCIGGGMGVSIAIER

SEQ ID NO: 92934 - DNA, 1182 bp, Alteromonadales bacterium TW-7
  CDS (1)..(1182): transl_table=11
atgtctttagaatcagtggtaattgtagcagcaaaacgtacgcctatgggtggctttatgggcgggctaagcgatgctcagtctactgaattgggtgcaacggctattaaaagtgcattagcgcaaactggtttaaaaaccgatgcaattgacgaagtaattatgggctgtgtactccctgctggtttaggtcaagcgccagctcgtcaagccatgttaaaagcagggctagctttaagcacgggtgctaccaccattaataaagtatgtggttcaggtttaaaagccgccatgcttgctaacgatttaattaaagcaggctctatagaaacagctattgctggtggtatggaaagtatgaccaacgccccttactttatcccaaaagcgcgtggcggaatgcgaatgggccacggcgaaatcaaagatcacatgatgagtgatggccttgaagatgcatacgacaacaaagccatgggttgttttgcacaagataccgccgacgaatatggcattggccgtgagcaaatggataattttgcacttggctcattaagtaaagccaatgccgcaattgcaaacggcagctttgaaaacgaaatagcaccgcacacaattcaaacacgaaaaggcgatgtaacggtatcggttgatgagcaaccaggtaatgcacgcccagaaaaaatcccaagtttacgtgcagcctttaaaaaagacggcacaatcactgccgctaactcatcatctatttcggatggtggcgcagccctcgttttaatgactgagtcaaaagcaaaagcacacggcttaacacccctttgtaaaattgtagcgcacagcacacattctcaaaaaccgagcgaatttacggtagcaccagtaggtgcaatgaacaatgtgctcgaaaaagccggttggacaacaactgatgtagacctttgggaaattaacgaagcttttgccatggtaacaatgcttgcaataaacgagcttaagcttgatgaaagcaaagtaaatgttaacggtggggcatgtgcacttggccacccaattggtgccagtggcgcacgtattttggttacgcttattcacgctcttaaaaaccgaggccttaaaaaaggcgttgcttctttatgtattggtggcggtgaagccgttgcaatggcagtagaagcttactaa

SEQ ID NO: 92935 - protein, 393 aa, Alteromonadales bacterium TW-7
MSLESVVIVAAKRTPMGGFMGGLSDAQSTELGATAIKSALAQTGLKTDAIDEVIMGCVLPAGLGQAPARQAMLKAGLALSTGATTINKVCGSGLKAAMLANDLIKAGSIETAIAGGMESMTNAPYFIPKARGGMRMGHGEIKDHMMSDGLEDAYDNKAMGCFAQDTADEYGIGREQMDNFALGSLSKANAAIANGSFENEIAPHTIQTRKGDVTVSVDEQPGNARPEKIPSLRAAFKKDGTITAANSSSISDGGAALVLMTESKAKAHGLTPLCKIVAHSTHSQKPSEFTVAPVGAMNNVLEKAGWTTTDVDLWEINEAFAMVTMLAINELKLDESKVNVNGGACALGHPIGASGARILVTLIHALKNRGLKKGVASLCIGGGEAVAMAVEAY

SEQ ID NO: 92936 - DNA, 1197 bp, marine gamma proteobacterium HTCC2143
  CDS (1)..(1197): transl_table=11
ttgcaggaaaaagttatgtctgaagattcagttgttatcgttagcggtgcccgcactcccatgggcagtttacaaggaagcctaagcgcggcgactgcggttgagttaggcacggcagcgattcgagccgctgttgagcgtgcgggcattgcccccgctgatatcgaggaagtaatcatgggctgcgtattgcccgccgggctgaaacaaggcccagcgcgccaagccgctatttatgctggcattcccaatactactggcgccgtaacaatcaacaagctctgcggctctggtatgcaagctacaattttcgctcacgatcaaatcaaagctggtacggcaaagattgcactcgcaggtggaatggaaagtatgtcaaacgcgccacaccttttgcccaatgcccgcggcggtatcggcactggcgataaagaaattaaagatcatatgtttatcgatggtttaaccgatgcctatgccggcggaaccatgggctcatttgcacaaggtacagccaacgataacaatattagccgtgaagcgatggatcagtttgcgatacagtcaacagtaagagcacaaaaagcgatcgctgatggctcactcacagctgaaatggcaccggtcactatcacaacacgaaagggtgaaacggtcgttaacgatgacgagcaacccggtaaggcccgccttgataagatcggcggccttcgtccggccttcgccaaagacggcactatcactgcggctaactcaagttctatttccgatggtgcttctgcactaattctcaccagcgaaacagaagccaaagccagaaatttacaagccatagcgcgaattgttggccactctcgaaactctcatcagccggagctgtttaccactgcaccgattggtgctatcgaaaaactactggcaaaaacaggctggtctaaagatgatgtcgatctctgggaaattaatgaagcctttgccatggtgactatgctggcaattcaggggctggacctggatcctgaaaaagttaacatccatggcggtgcatgtgctcaggggcaccccattggttcaaccggttcacgcattattatctcgctaatgcatgcattgaaaggccatgggaaacaaaaaggcattgcggctttatgcataggcggtggtgaagcgctggcagttgccatcgaaataatctaa

SEQ ID NO: 92937 - protein, 398 aa, marine gamma proteobacterium HTCC2143
MQEKVMSEDSVVIVSGARTPMGSLQGSLSAATAVELGTAAIRAAVERAGIAPADIEEVIMGCVLPAGLKQGPARQAAIYAGIPNTTGAVTINKLCGSGMQATIFAHDQIKAGTAKIALAGGMESMSNAPHLLPNARGGIGTGDKEIKDHMFIDGLTDAYAGGTMGSFAQGTANDNNISREAMDQFAIQSTVRAQKAIADGSLTAEMAPVTITTRKGETVVNDDEQPGKARLDKIGGLRPAFAKDGTITAANSSSISDGASALILTSETEAKARNLQAIARIVGHSRNSHQPELFTTAPIGAIEKLLAKTGWSKDDVDLWEINEAFAMVTMLAIQGLDLDPEKVNIHGGACAQGHPIGSTGSRIIISLMHALKGHGKQKGIAALCIGGGEALAVAIEII

SEQ ID NO: 92938 - DNA, 1182 bp, Escherichia coli B
  CDS (1)..(1182): transl_table=11
atgaaagacgttgtgattgtcggggcgttacggacacctatcggctgctttcgcggtgcgttagcgggtcattccgccgtggaacttggtagtctggtcgtgaaagcgttaatagaacgtaccggcgttcctgcatatgcggtggatgaagtaattcttggtcaggtgttgactgcaggggcagggcagaatccggcaaggcaatcggctattaaaggtggtctgcctaatagcgtttctgcaatcacgattaatgacgtctgcggttccggacttaaagcactgcatctggctactcaggcgatacagtgtggcgaggctgatattgtcatcgccggtggccaggaaaacatgagccgcgcaccacatgttctgactgatagccgcaccggtgcacagcttggcaatagccagctggttgacagtcttgtgcatgatgggttatgggatgccttcaatgattatcatattggtgtcaccgccgaaaatctggctcgcgaatatggcatcagccgtcaattgcaggatgcttacgcacttagctcgcaacaaaaagcgcgagcggcgattgacgccggacgatttaaagatgagatcgtcccggtaatgacccaaagtaacggtcagacgttggttgttgataccgatgaacagccacgcactgacgccagtgcagaaggtttagcccgtttaaatccttcatttgatagtctcggttctgtgacagcgggtaatgcatcatccataaacgatggcgcagctgcggtaatgatgatgagcgaagccaaagcacgagcgttgaatttacccgtgctggcccgcattcgcgcatttgccagcgttggtgtagatccggcattgatgggaattgcgccggtgtatgcgacccgccgttgcctggagcgtgtaggctggcagttggctgatgtcgatcttatcgaggctaatgaagcgtttgctgcacaggcgctttcggttggcaagatgcttgagtgggatgagcgtcgggtcaatgtcaatggtggtgcgatcgcacttggtcacccgataggcgcttccggttgccgaatcctggtttctctggttcatgaaatggtgaaacgtaatgcccgcaaaggactggcaacgctttgtatcggcgggggccagggtgtggcattgaccattgaacgtgacgaatag

SEQ ID NO: 92939 - protein, 393 aa, Escherichia coli B
MKDVVIVGALRTPIGCFRGALAGHSAVELGSLVVKALIERTGVPAYAVDEVILGQVLTAGAGQNPARQSAIKGGLPNSVSAITINDVCGSGLKALHLATQAIQCGEADIVIAGGQENMSRAPHVLTDSRTGAQLGNSQLVDSLVHDGLWDAFNDYHIGVTAENLAREYGISRQLQDAYALSSQQKARAAIDAGRFKDEIVPVMTQSNGQTLVVDTDEQPRTDASAEGLARLNPSFDSLGSVTAGNASSINDGAAAVMMMSEAKARALNLPVLARIRAFASVGVDPALMGIAPVYATRRCLERVGWQLADVDLIEANEAFAAQALSVGKMLEWDERRVNVNGGAIALGHPIGASGCRILVSLVHEMVKRNARKGLATLCIGGGQGVALTIERDE

SEQ ID NO: 92940 - DNA, 1194 bp, Pseudomonas putida GB-1
  CDS (1)..(1194): transl_table=11
atgaccctcgccaatgacccgatcgttatcgtcagcgccgtgcgcacgcccatgggtgggctgcagggcgacctcaaaagcctgacagcgccgcaactgggcagcgcggccattcgcggcgccgtggagcgcgccggcatcgacgccgccagtgtcgagcaagtgttgttcggctgcgtgctgccggccgggcaaggccaggccccggcgcgccaggccgcgctgggcgccgggctggacaagcacaccacctgcaccaccctgaacaagatgtgtggctcgggcatgcaagccgcgatcatggcccatgacttgctgctggccggcactgcagacgtggtggtagcggggggcatggaaagcatgaccaatgccccgtacctgctggacaaagcccgtggtggttaccgcatgggacacggcaagatcatcgaccatatgttcatggacggcctggaagacgcctacgacaaaggccgcctgatgggtaccttcgctgaagactgcgctcaggccaacgccttcagccgcgaagcccaggaccagttcgccatcgcctcgctgacccgtgcccaggacgcgatcagcagcggccgctttgccgccgagatcgtgccggtggaagtcgccgagggcaaggaaaaacgcgtgatcaaggatgacgagcagccgcccaaggcgcgcttggacaagatcccgcagctcaagccggcgttccgtgaaggtggcaccgtgacggcggccaactccagttcgatttccgacggcgctgccgcgctggtgctgatgcgccgctccgaagctgacaagcgcggcctcaagcccctggcagtcatccatggccatgctgccttcgccgacgccccggcgttgttcccgaccgcgccgatcggggccatcgacaaactgctgaaacgcaccggttggaacctggcagaagtcgacttgttcgagatcaacgaggcctttgcggtggtcacgctggcggccatgaagcacctcgacctgccccacgaaaaggtcaacatccacggcggcgcctgcgcactcgggcacccgattggcgcttctggcgctcgcatcctggtaaccctgttgtcggccttgcgccagaacaacctgcgccgaggtgtggccgccatctgcatcggcggtggcgaggccacggccatggctgtcgaatgcctgtactga

SEQ ID NO: 92941 - protein, 397 aa, Pseudomonas putida GB-1
MTLANDPIVIVSAVRTPMGGLQGDLKSLTAPQLGSAAIRGAVERAGIDAASVEQVLFGCVLPAGQGQAPARQAALGAGLDKHTTCTTLNKMCGSGMQAAIMAHDLLLAGTADVVVAGGMESMTNAPYLLDKARGGYRMGHGKIIDHMFMDGLEDAYDKGRLMGTFAEDCAQANAFSREAQDQFAIASLTRAQDAISSGRFAAEIVPVEVAEGKEKRVIKDDEQPPKARLDKIPQLKPAFREGGTVTAANSSSISDGAAALVLMRRSEADKRGLKPLAVIHGHAAFADAPALFPTAPIGAIDKLLKRTGWNLAEVDLFEINEAFAVVTLAAMKHLDLPHEKVNIHGGACALGHPIGASGARILVTLLSALRQNNLRRGVAAICIGGGEATAMAVECLY

SEQ ID NO: 92942 - DNA, 1266 bp, Aspergillus niger
  CDS (1)..(1266)
atgtcttccgcgcaacaacgattgacctcgatcgcaaaccagctttcgggccctggtgcggcgtctgcaaagcaaagggtcttgtccaagaaccctgacgacattgtgattacactggccgttcggaccccgctcacaaaggccagaaagggcgggttgaaagacacgagtcttgacgatcttctcatctcgttgctgacgtccatccgcgaaaaatcgaatcttgaccccaaccttgtcgaggatgtttgcgttggaaatgtgctgtgccccggcgcagcttacgtcgcccgttcagctgtgctggccgcaggatttccggtcacagctgccgcttcagtcgccaatcgattctgttcctccggattgcttgccgtccagaacatcgccaaccagatcatggctggctctattgatgttggtatagctgtgggggctgagagcatgagcaccaacgccgacggtggttctccagaaatgtcctccaagattttgaaccacccgattgcctcgcagaacatccaacctatgggacagacatccgagaatgttgcctcgcagttcaacattacccgtgaaatgcatgatcggtttgccgccaacagctaccagaaagccgagcatgcccagaaggcgggatggttcaacgacgagattgtcccagtgaagacgataatcaaagaccccaagacgggcgagaccaaagaagttgtcgtcgaccgggatgatggtatccgctacggcaccacagccgagtctctgggcaagatccgctctgcgttccctcaatggaagcctagcgcaactacaggcggtaacgccagtcaaattaccgatggtgctgccggtctcattctcatgaagcgatctcgcgcccaagagctcggtcaacccattgtggccaagttctgcggtgctactgttgcaggcttggagcctaggattatgggcattggtccatcaatcgctattcccaagattctttccaagttcggtctgagtaaggaagatatcgacatctttgaaatcaacgaggcattcgcctcaatgggaacgtattgtgtccagaagctaggcctggatgaggccaaagttaacccccgtggcggtgctattgcttttggccaccctctgggctgcacaggagcgcgccaggtggtgaccgccctttcggagttgcgccgacagaacaagaggatcgcagttacctcgatgtgtgttggaacgggcatgggcatggctggtatcttcgtctctgagcattga

SEQ ID NO: 92943 - protein, 421 aa, Aspergillus niger
MSSAQQRLTSIANQLSGPGAASAKQRVLSKNPDDIVITLAVRTPLTKARKGGLKDTSLDDLLISLLTSIREKSNLDPNLVEDVCVGNVLCPGAAYVARSAVLAAGFPVTAAASVANRFCSSGLLAVQNIANQIMAGSIDVGIAVGAESMSTNADGGSPEMSSKILNHPIASQNIQPMGQTSENVASQFNITREMHDRFAANSYQKAEHAQKAGWFNDEIVPVKTIIKDPKTGETKEVVVDRDDGIRYGTTAESLGKIRSAFPQWKPSATTGGNASQITDGAAGLILMKRSRAQELGQPIVAKFCGATVAGLEPRIMGIGPSIAIPKILSKFGLSKEDIDIFEINEAFASMGTYCVQKLGLDEAKVNPRGGAIAFGHPLGCTGARQVVTALSELRRQNKRIAVTSMCVGTGMGMAGIFVSEH

SEQ ID NO: 92944 - DNA, 1260 bp, Aspergillus niger
  CDS (1)..(1260)
atgtcttccgcccagcagcgtctttcccaagtggcctcccacttcggccctggtggcaagaagggagtctccgccatcacggagaagcaccccgatgatatcgttgtgacctgcgctctgcgtacggctcttacaaagggtggaaagggtggtttcaaggacaccgctgccgccgacttgctggccggtgtcttcaagggggtcatcgaccgcagcggcatcgacccaagccaggttaacgacatcgctgtcggctccgtccttccccctggtggtggtgcgacggaattccgtgctgccgccctggtggcgggcttccctgagtctactgccgttaagagtctgaaccgtcagtgctctagcggtctccaggcgattgtggacattgccaatgccctgaaatcaggcatgatcgatgttggtattggtgctggtgtcgagagcatgtcgtctcaatacggccccggtgccgtgaccgagttctccgagcttctcgaggcccaccccgagtcggccaactgcaaggttcccatgggtgttctgtccgagcagatggccaaggatcgcaacgtcactcgtgcagcccaggacgccttcgccgcctcgtcgtaccagaaggccgtcaaggcccagaaggccggtctcttcaacgaagagatcatccctctgcaggtcaagtggacggaccctaagtccggcgaggagaagaccatcaccgtcaaggccgacgacggcatccgcgacggcattacccccgagtcgctgggcaagatccgacctgcattcgccaaggacggatccatccacgccggaaacgcctcccagatctccgacggtgctgccgccgtgctgctgatgaagcgttctacggccgagcgcctgggacagaagatcatcggcaagtacgtcgctgctagcgtcgtcggtgtcaagcctctgctcatgggtatcggcccgtggaaggccatccccgtggccttggagaaggccggcatcaccaaggacgacgtggatatctatgagatcaacgaagcgtttgcctcgcagtgcgtctggtgcatcaacgagctgggtctgccgcaggagaagatcaatcccaagggtggtgcgattgcctttggacacccgctcggctgcacgggttcgcgccagatcagcacgctgctgacggagctgaagcggacgaacaagaagattggtgttagcagcatgtgcgtcggaacgggtatgggtatggcagccgtttgggttgcggagtaa

SEQ ID NO: 92945 - protein, 419 aa, Aspergillus niger
MSSAQQRLSQVASHFGPGGKKGVSAITEKHPDDIVVTCALRTALTKGGKGGFKDTAAADLLAGVFKGVIDRSGIDPSQVNDIAVGSVLPPGGGATEFRAAALVAGFPESTAVKSLNRQCSSGLQAIVDIANALKSGMIDVGIGAGVESMSSQYGPGAVTEFSELLEAHPESANCKVPMGVLSEQMAKDRNVTRAAQDAFAASSYQKAVKAQKAGLFNEEIIPLQVKWTDPKSGEEKTITVKADDGIRDGITPESLGKIRPAFAKDGSIHAGNASQISDGAAAVLLMKRSTAERLGQKIIGKYVAASVVGVKPLLMGIGPWKAIPVALEKAGITKDDVDIYEINEAFASQCVWCINELGLPQEKINPKGGAIAFGHPLGCTGSRQISTLLTELKRTNKKIGVSSMCVGTGMGMAAVWVAE

SEQ ID NO: 92946 - DNA, 1257 bp, Aspergillus niger
  CDS (1)..(1257)
atggcagcagatcgtctaaactctattctcagtcacctgaagccgacaggcaatagtggactcgccgcaatcactcaaaagaacccagacgatgtagtcatcacccttgcgctgcgcacgcccctcgcaaaggccgttaagggtggattcaaggatacagagctggattacatcctctacgcactgttgaaggaagtgctctctaaatctaagctggatcccgctttagttgaggatgtgtgcctgggaaatgtcggcgacggcaaagcagcctacctcgtccgcgctgcctccctcgcagccggcatccctcacactgccggtggatcctccgtgaaccgcttctgctcgtctggtctgaaggccgtacaggacatcgcgaatcagattcagcttggagccattgatgttggtatcgctgtcggtgcggagttgatgtctgctggtggcgaccggctgccgcgtccgttcaacgaggaggtccttcgcaaccaggaagcggcggactgcatgcagcccatgggtcagacgtcggagaatgttggtgcggacttcaacatcacgcgcgagcagcaggacaagtacgctgcggaatctttccgtcgggcagaggaggctcagaaggcgggctggttcgatgacgagatcgtccccattaccacaaaggtcaaggacccgaagactggggagctgaagcaggttacgttgacgaaggatgagggtattcgctatggtacgacgccagagtcgctggccaagatccgtcctgctttcccgcagttcggtaatcggagcacgggaggaaactcgagtcaggttacggatggtgccgccgctgttcttctcatgcgccgctccaaggctattgagctgaaccagcccattctggccaagttctgcggtgccaccgtcgcgggagtgccgccccggatcatgggtattggtcccacggcagcgatccccaagctgctgtcccagttcaacttgaacaaggacgacattgacatctacgagattaacgaggccttcgcctccatggctgtctactgccttaacaaccttggtctggagcacgccaaggtgaacccgcgcggtggtgccattgcccttggccaccctctgggcgcaacgggcgcacgccagatctgcacgattctcagtgaggcgcgccggacgaagaagaagatcctggtgacaagtatgtgcattggcacgggccagggtatggcgggtttgtttgtgaatgagcaggtgtaa

SEQ ID NO: 92947 - protein, 418 aa, Aspergillus niger
MAADRLNSILSHLKPTGNSGLAAITQKNPDDVVITLALRTPLAKAVKGGFKDTELDYILYALLKEVLSKSKLDPALVEDVCLGNVGDGKAAYLVRAASLAAGIPHTAGGSSVNRFCSSGLKAVQDIANQIQLGAIDVGIAVGAELMSAGGDRLPRPFNEEVLRNQEAADCMQPMGQTSENVGADFNITREQQDKYAAESFRRAEEAQKAGWFDDEIVPITTKVKDPKTGELKQVTLTKDEGIRYGTTPESLAKIRPAFPQFGNRSTGGNSSQVTDGAAAVLLMRRSKAIELNQPILAKFCGATVAGVPPRIMGIGPTAAIPKLLSQFNLNKDDIDIYEINEAFASMAVYCLNNLGLEHAKVNPRGGAIALGHPLGATGARQICTILSEARRTKKKILVTSMCIGTGQGMAGLFVNEQV

SEQ ID NO: 92948 - DNA, 1428 bp, Aspergillus niger
  CDS (1)..(1428)
atgcatgtgcatctcatcccatctcccctcactctgctgtactacacatctacctgccttctgcttcttcatcaccgtcctcatcactatcactccatcccttactctttttctcttttgattctttgtctagctacgatacccacaatgcttgcctctcgtctcaccccgcggaccatccccgcacgccaatggcgtcgacacttcagcgccgcccgtccagctctgaaggagatccaagatgcctacattctcagcgctgcgcgcactcctacagccaagttcaacggctcctttgtctccgtcccagccccccaactcggcgccgtggcgatcaaatccgccgtcagcaaatctaacctccccaccgaaaagatcacagacgtgtacatgggcaacgtcctccaaggatccgtaggccaagcgcccgcgcgtcaagcctccattttcgccggcctcgctcccaccgtcgaagccatgaccgtgaacaaagtatgcgcgtccggattgaaagccgtcgctctggccgcccagaacatccagctcggactagcagaggcgcaagtggccggtggtatggagaacatgtcgcgtgtgccctactacatgccacgttccagtcagttgcctccctttggggagatcaagcttgaagatggcctgatcaaggacggcctgtgggatgtgtacaaccagattcatatgggtatttgcgcggagcagacggccaagaaatacgaggtatcacgggaagaacaggatgagtatgcaatccggtcgtacgagcgggcgcagaaggcctgggctgagggtttgtttggcgaggaaattgcccctgtgacggtgaagggcaagaagggggatacggtggtcgagagggatgagggcgttgagaacctcaaggcagacaagctgcgcgggttgaagcccgcgttcttacgggacggcaccggcacagtcacggcgggtaatgcgtccacgatgaacgatggcgcctccgccgtggtggtggctagtcgcgagctggccagggagtttggcacgggcaatcgtgcgctagcgaggattgtcagtactgctgatgcagctatcgaccctgttgatttccccgtggccccggccaaggccgtcccgattgcgctagagcgcgcgggcatcagcaaggagcaggttgccgtgtgggagtttaacgaggcatttgcggcggtgatcaaggccaacgagaagattcttggactgcaaaacgcgcgtgtcaacccgctgggcggggccatctcgctgggtcatgcactgggcagctcgggctcgcgcatcctggtgacgttgctgcaccagttgcagccgggcgagtacggtgtggcagccatctgcaatggcggaggagcagctagcgcgatggttgtgcagaagctggaccgggtggactga

SEQ ID NO: 92949 - protein, 475 aa, Aspergillus niger
MHVHLIPSPLTLLYYTSTCLLLLHHRPHHYHSIPYSFSLLILCLATIPTMLASRLTPRTIPARQWRRHFSAARPALKEIQDAYILSAARTPTAKFNGSFVSVPAPQLGAVAIKSAVSKSNLPTEKITDVYMGNVLQGSVGQAPARQASIFAGLAPTVEAMTVNKVCASGLKAVALAAQNIQLGLAEAQVAGGMENMSRVPYYMPRSSQLPPFGEIKLEDGLIKDGLWDVYNQIHMGICAEQTAKKYEVSREEQDEYAIRSYERAQKAWAEGLFGEEIAPVTVKGKKGDTVVERDEGVENLKADKLRGLKPAFLRDGTGTVTAGNASTMNDGASAVVVASRELAREFGTGNRALARIVSTADAAIDPVDFPVAPAKAVPIALERAGISKEQVAVWEFNEAFAAVIKANEKILGLQNARVNPLGGAISLGHALGSSGSRILVTLLHQLQPGEYGVAAICNGGGAASAMVVQKLDRVD

SEQ ID NO: 92950 - DNA, 1200 bp, Aspergillus niger
  CDS (1)..(1200)
atgtcttccctacctccggtctacattgtctccgccgcccgcactccagtgggctctttcctgggatctctctcgagccagactgctccgcagctgggttcccatgcgatcaaagctgctcttaacaaagtcgacggcatcaagccttccgatgtacaagaggttttcttcggcaacgttctttctgcaaatgtcggacagaaccccgccagacaatgcgctcttggcgccggacttgacgagtcaaccgtttgcaccactgttaacaaggtctgtgcctcgggtttgaaggcggtcattttgggcgctcagaccatcatgactggtaatgcagacatcgttgtggccggcggtactgagtccatgtccaatgccccacattaccttccaaacctccgcaatggcgcaaagtatggccaccagagcctggtggatgggatcatgaaagatggcctgacagatgcgggaaagcaggagcttatgggtttgcaggctgaggagtgtgcccaggatcatgaattcactcgggaacagcaggacgattatgctattcggacctacgaaaaggcccaagctgcccagaaggccggccttttcgacgaagagattgcacctgttgaactacccggcttcaggggtaaaccaggtgtcaccgtgtctcaagatgatgagcccaagaatctcaaccctgataagcttcgaagcatcaagcccgctttcattcctggctctggaactgtgacggcccccaactcctctcctctcaacgacggggctgccgctgttatcttggtttccgaggccaaggttaaagagctgaacctcaagcctgttgcaaagattctcggttggggagatgctgcacaccaacccagcaagttcacgactgctcctgcgctggcgattcccaaggcgcttaagcatgcgggtgtcactcaggactccatcgatgcatttgagatcaacgaggcctttagcgttgttgctctcgcgaacatgaagctcctcaacctacctgaagaaaaggtcaaccttcatggtggtgctgtggctattggtcaccctattggtgccagtggtgctagaatcttgactactttgctcggagtcctcaaggcaaagaagggcaagctcggctgtgtcggaatttgcaacggtggtggtggtgctagtgccatggtagtggaatccctcgtctaa

SEQ ID NO: 92951 - protein, 399 aa, Aspergillus niger
MSSLPPVYIVSAARTPVGSFLGSLSSQTAPQLGSHAIKAALNKVDGIKPSDVQEVFFGNVLSANVGQNPARQCALGAGLDESTVCTTVNKVCASGLKAVILGAQTIMTGNADIVVAGGTESMSNAPHYLPNLRNGAKYGHQSLVDGIMKDGLTDAGKQELMGLQAEECAQDHEFTREQQDDYAIRTYEKAQAAQKAGLFDEEIAPVELPGFRGKPGVTVSQDDEPKNLNPDKLRSIKPAFIPGSGTVTAPNSSPLNDGAAAVILVSEAKVKELNLKPVAKILGWGDAAHQPSKFTTAPALAIPKALKHAGVTQDSIDAFEINEAFSVVALANMKLLNLPEEKVNLHGGAVAIGHPIGASGARILTTLLGVLKAKKGKLGCVGICNGGGGASAMVVESLV

SEQ ID NO: 92952 - DNA, 1410 bp, Drosophila melanogaster
  CDS (1)..(1410)
atgagccttcaaaatgtctgccgcaagggtaacgccttcaacctgttgaatgtcgccaggaaagttcaatgccgcgctctatcggccgctgtggcgaatccacaaccgaagcagaagaacagccagaatatcgtgctcgtggatggagtccgcacaccctttctgacctccggaaccacctactccaagctgatgccccatgaactggccaggcactcgcttttgtcattgctgcaaaagaaacgcctggacaaggagctcatcgactacatcgtgtacggcagcgtcatccaggaagtgaagacctccaacattgccagggaagcagccttggcagctggattcagcaacaagacacctgcccacaccgtcaccatggcctgcatcagttccaatgcggccatcaccacgggcatgggtctgatagccaccaacacctacgatgtcatcgttgccggcggcgtggagttcatgtccgatgtgcccattcgccactcccgcaagatgcgctccctgctcctgaaagccaacaaggcaaagaccctgggccagcggctggccctgctgtccaccttcaggccagacttcctggcccccgagctgcccgccgttgcggagttctcctccggcgagaccatgggacactcggccgatcgcttggcatccgccttcaacgtatcccggagcgagcaggacgagtacgccttgcgatcccacacactggccaaggaggcccaggagaagggctacttcaccgatctggttcccttcaaggtgtccggcgtggaccagatcgtggacaaggacaacggcatccgcgtgtctagtcccgagagcctggcaaagctgaggcccgcctttgtgaagcccgacggcattgtgacagcagccaacgcctccttcctcacggacggagcttctgcttgcattatcatgaccgaggagaaggccaagcagctgggcctgaagcccaaggcctatctgcgcgacttcctgttcgtgtcgcaggatcccgtcaaccagctgctgctgggacccgcctacggaattcccaagctgctcaagaaggctggactcacgctgaaggacattgactcgtgggagatccacgaggcgttcgccggacagatcgtggccaatctgaaggccctggactccgactggttctgcaagacttacttgggcctgaacgagaaggtcggcactcccgacctgtccaagtggaacaactggggcggttctctgtccatcggccaccccttcgccgccacaggagtccgcctctgcatgcacaccgccaaccgcctggtgcgcgaggatggcaagttgggcgtggtcgccgcctgcgcggccggtggacagggcgtggctatgctcattgagcgctatccgggcgccacagccgactga

SEQ ID NO: 92953 - protein, 469 aa, Drosophila melanogaster
MSLQNVCRKGNAFNLLNVARKVQCRALSAAVANPQPKQKNSQNIVLVDGVRTPFLTSGTTYSKLMPHELARHSLLSLLQKKRLDKELIDYIVYGSVIQEVKTSNIAREAALAAGFSNKTPAHTVTMACISSNAAITTGMGLIATNTYDVIVAGGVEFMSDVPIRHSRKMRSLLLKANKAKTLGQRLALLSTFRPDFLAPELPAVAEFSSGETMGHSADRLASAFNVSRSEQDEYALRSHTLAKEAQEKGYFTDLVPFKVSGVDQIVDKDNGIRVSSPESLAKLRPAFVKPDGIVTAANASFLTDGASACIIMTEEKAKQLGLKPKAYLRDFLFVSQDPVNQLLLGPAYGIPKLLKKAGLTLKDIDSWEIHEAFAGQIVANLKALDSDWFCKTYLGLNEKVGTPDLSKWNNWGGSLSIGHPFAATGVRLCMHTANRLVREDGKLGVVAACAAGGQGVAMLIERYPGATAD

SEQ ID NO: 92954 - DNA, 1182 bp, Comamonas acidovorans
  CDS (1)..(1182): transl_table=11
atggaagacatcgtcatcgtttccgctgtccgtactgccgttggcaagtttggcggcacccttgccaagatccccgccaccgaactgggctccatcgtgatccgcgaggcactgaaccgtgccaaggtcggcaccgatcaggtcggtgaagtcatcatgggccaggtgctggccgctggcgcaggccagaaccccgcacgccaggccatgatgaaggccggcgttgccaaggaaaccccggccctcaccatcaacgccgtctgcggctcgggcctgaaggccgtgatgctggcagcccaggccgtggccacgggcgacagcgagatcgtcgtggccggcggccaggagaacatgagcctgtcgccccacgtgctgccgggctcgcgcgacggccagcgcatgggcgactggaagatggccgacaccatgatcgtggacggcctgtgggacgtctacaaccagtaccacatgggcatcacggccgagaacgtggccaaggaaaagagcgtcagccgcgagcagcaggatgccctggccctggccagccagcaaaaggccacggccgcgcaggacgccggcaagttcgtggacgaaatcgttcccgtcagcattccccagcgcaagggcgatcccgtggtgttcgctgccgacgagtacatcaaccgcaagaccaatgccgacgccctggcaggcctgcgcccggccttcgacaaggccggctcggtgacggccggcaacgcctcgggcctgaacgacggcgcggccgccgtggtggtgatgagcgcctccaaggccaaggccctgggcctgacgccgctggcgcgcatcgtctcctacgccaccagcggcctggaccccgccaccatgggcctgggcccggtgttcgcctcgcgcaaggcgctggagcgtgcgggctggaccgcgcaggacgtggacctgttcgagctgaacgaagccttcgcggcccaggcctgtgcggtgaaccaggagctgggcatcgacccggccaaggtcaacgtcaacggcggcgccattgccatcggccaccccatcggcgcatcgggcgcccgcatcctggtgaccctgctgcacgagatgcagcgcagcggcgccaagaagggcctggccggcctgtgcatcggcggcggcatgggcgtggccatggcggtggagcgcgtttga

SEQ ID NO: 92955 - protein, 393 aa, Comamonas acidovorans
MEDIVIVSAVRTAVGKFGGTLAKIPATELGSIVIREALNRAKVGTDQVGEVIMGQVLAAGAGQNPARQAMMKAGVAKETPALTINAVCGSGLKAVMLAAQAVATGDSEIVVAGGQENMSLSPHVLPGSRDGQRMGDWKMADTMIVDGLWDVYNQYHMGITAENVAKEKSVSREQQDALALASQQKATAAQDAGKFVDEIVPVSIPQRKGDPVVFAADEYINRKTNADALAGLRPAFDKAGSVTAGNASGLNDGAAAVVVMSASKAKALGLTPLARIVSYATSGLDPATMGLGPVFASRKALERAGWTAQDVDLFELNEAFAAQACAVNQELGIDPAKVNVNGGAIAIGHPIGASGARILVTLLHEMQRSGAKKGLAGLCIGGGMGVAMAVERV

SEQ ID NO: 92956 - DNA, 1709 bp, Cucumis sativus
  CDS (32)..(1420)
aatctcattcctccccacaacttcacacctcatggagaaggcgatcaacaggcagagcattttgctacatcatctccggccttcttcttccgcttacacaaatgaatcttcgctctctgcatcggtttgtgcagctggggatagtgcttcgtatcaaaggacatcggtgtttggagatgatgtcgtgattgttgcagcgtaccgtactgccatttgcaaatcgaagcgtggtggcttcaaggatacttatcccgatgatctgctcgcccctgttttgaaggcattgatagagaaaactaatttgaatccaagtgaagttggggatattgttgttggttctgtacttgcaccaggctctcagagagctagtgaatgtaggatggcggctttctatgccggcttccctgaaactgtgcccgttagaactgttaataggcaatgttcgtcggggctgcaggccgttgctgatgtagctgcagctataagagcagggttttatgatattggaattggagctgggttggagtctatgactactaatccaatggcttgggaaggatctgtcaacccaagagtgaaatcaatagaaaatgcacagaactgccttcttccaatgggtgtaacctcagaaaatgttgcccagcgttttggggtgtcaagggagaagcaggatcaggctgctattgagtctcaccggaaggctgcagctgccactgctagtggaaaatttaaggatgaaattatcccagtttctactaagattattgaccctaaaactggtcaagaaaaaccggttacaatctctgtggatgatgggattcggcctaacacaactcaagcagatctggggaaattgaaggctgtgtttaagaaagatgggactaccactgcaggtaattccagccaggtgagtgatggtgctggagctgttctcctcatgaagagaagtgttgcaatgcgaaaagggctccccattcttggtgttttcaggaccttttctgctgtgggtgtggatcctgctatcatgggtgttggcccggctgtagcaattccagctgctgtcaaggctgctggacttgaactgaacgatattgatctttttgagataaatgaggcatttgcatcccaatttgtttattgtcgtaacaagttggggctagatccagaaaagattaatgtcaatgggggagcaatcgccattggacacccattgggtgcaacaggcgcccgctgtgtcgctacattgttgcatgagatgaaacgccgtggcaaagattgtcgttttggagtcatatcaatgtgcataggcacgggaatgggggcggcagctgtatttgagaggggtgattgtgttgacgaactttgcaatgctaagaaagttgaaggaggtgtcaatcttctgtccaaggatgctcgttagaacagaacttcatagccctttcagtagtgcaagacaaaggacgaatcactcaataaaaggcggctatagttataatgaagatttgattatttatttggttgtaatcccaggcatttccctcaccctcttgtttccatattggacacaccgagtttttttagtgtcttttgatttgtttccaaaaggggttcgaagttgatcttttgcaaaactagtcgctagttatttggtttgaattcaacaggtgaattgatctttaggcttttgttaaaaaaaaaaaaaaaaaaaa

SEQ ID NO: 92957 - protein, 462 aa, Cucumis sativus
MEKAINRQSILLHHLRPSSSAYTNESSLSASVCAAGDSASYQRTSVFGDDVVIVAAYRTAICKSKRGGFKDTYPDDLLAPVLKALIEKTNLNPSEVGDIVVGSVLAPGSQRASECRMAAFYAGFPETVPVRTVNRQCSSGLQAVADVAAAIRAGFYDIGIGAGLESMTTNPMAWEGSVNPRVKSIENAQNCLLPMGVTSENVAQRFGVSREKQDQAAIESHRKAAAATASGKFKDEIIPVSTKIIDPKTGQEKPVTISVDDGIRPNTTQADLGKLKAVFKKDGTTTAGNSSQVSDGAGAVLLMKRSVAMRKGLPILGVFRTFSAVGVDPAIMGVGPAVAIPAAVKAAGLELNDIDLFEINEAFASQFVYCRNKLGLDPEKINVNGGAIAIGHPLGATGARCVATLLHEMKRRGKDCRFGVISMCIGTGMGAAAVFERGDCVDELCNAKKVEGGVNLLSKDAR

SEQ ID NO: 92958 - DNA, 1487 bp, Arabidopsis thaliana
  CDS (99)..(1343)
atttacatattgtctacttttagattttgatatctattggaactcttactagctcattcatccgtcggcctgtgaattgtgtttctgaagtttccccaatggctgcttttggagatgacattgtgattgtagcggcatatcgtaccgccatttgcaaagcgagacgtggaggtttcaaagacactcttcctgatgatcttcttgcttctgttcttaaggctgtagtggaaagaacatctttggatccaagtgaagttggtgatatcgttgttggtaccgtgatagcgcctggttctcagagagcaatggagtgtagagttgcagcttattttgctggttttcctgactccgtgccagttagaactgtcaatagacaatgctcatcaggactacaagcagttgctgatgttgctgcttccattagagctggttattacgacattggtattggtgctggagtggaatcaatgtcaactgatcatattcctggaggcggctttcatggctctaatccaagagcacaggatttcccaaaagcccgtgattgtttgcttccaatgggaattacttctgaaaacgttgcagaaaggttcggtgtcacaagagaagagcaagatatggctgcggtggagtctcacaaacgcgctgcagctgcaatcgcgtctggtaaactcaaggatgaaatcattcctgttgctactaagattgtggaccctgagactaaagcagagaaggcaatcgtcgtatctgttgatgacggtgtacgtccaaactcaaacatggcagatttggcaaagctgaagactgtctttaaacaggacggttccaccacagctggcaatgctagtcagatcagtgatggtgctggagcagtactgctaatgaagagaagtttggctatgaagaagggacttcccattcttggagtattcaggagttttgctgttactggtgtggaaccatctgtaatgggtattggtccagctgttgccattcccgctgcaactaagctcgcagggctcaacgtcagcgatattgatctattcgagatcaatgaggcatttgcatctcagtatgtgtactcttgcaagaagttagagctggatatggaaaaggtcaatgttaatggaggagccattgctattggccatcccctgggtgctacaggagctcgatgtgttgcgacattgttgcacgagatgaagcggagaggaaaagattgccgctttggagtaatctcaatgtgcataggcactggaatgggagctgcagctgtttttgagaggggagactctgttgataacttgtccaacgctcgtgtggctaacggggatagtcattagaacatcgaagagagcttgaataagtagaagtaatgatgcattgagtctaataaatatgatgctttagctctttcacattgctgaacaatgaaaacttttgtcattctgagtttaaaatcaactacttttctccgaaaaaaaaaa

SEQ ID NO: 92959 - protein, 414 aa, Arabidopsis thaliana
MAAFGDDIVIVAAYRTAICKARRGGFKDTLPDDLLASVLKAVVERTSLDPSEVGDIVVGTVIAPGSQRAMECRVAAYFAGFPDSVPVRTVNRQCSSGLQAVADVAASIRAGYYDIGIGAGVESMSTDHIPGGGFHGSNPRAQDFPKARDCLLPMGITSENVAERFGVTREEQDMAAVESHKRAAAAIASGKLKDEIIPVATKIVDPETKAEKAIVVSVDDGVRPNSNMADLAKLKTVFKQDGSTTAGNASQISDGAGAVLLMKRSLAMKKGLPILGVFRSFAVTGVEPSVMGIGPAVAIPAATKLAGLNVSDIDLFEINEAFASQYVYSCKKLELDMEKVNVNGGAIAIGHPLGATGARCVATLLHEMKRRGKDCRFGVISMCIGTGMGAAAVFERGDSVDNLSNARVANGDSH

SEQ ID NO: 92960 - DNA, 1288 bp, Schizosaccharomyces pombe
  CDS (49)..(1236)
attcatcatatacatttttggcttgtatattctttgacatattaagaaatggttaacacagaggtttacattgtgtctgctgttcgcacacccatgggcagctttggcggcagtttcgcttctcttcctgccaccaaattaggctctattgccatcaagggcgctcttgaaagggtcaatattaagccttctgatgttgatgaggtgtttatgggtaatgtcgtctcagccaatcttggccaaaaccctgctcgtcaatgcgccttaggtgctggactccctcgttccatcgtttgtactactgttaacaaggtttgtgcctctggtatgaaggcaacaattctcggtgctcaaactatcatgactggaaatgctgagattgtcgttgctggtggtaccgagagcatgtcaaatgctccttactatgccccaaagaaccgttttggtgccaaatacggtaacgttgagttggttgacggtctcttacgtgatggtttatctgatgcatatgatggacttcccatgggtaatgctgccgagctttgcgctgaggaacacagcattgaccgtgccagtcaagacgcctttgccatttcttcttacaaacgtgctcaaaacgctcaagctacaaaggcatttgaacaagaaatcgtccccgtcgaggtccctgttggtcgtggtaagcccaacaagcttgttactgaggacgaggagcccaagaaccttaacgaagacaaactcaaatccgtacgtgctgtcttcaagagtaacggtaccgtcactgctgctaatgcttctaccttgaacgatggtgctagcgctcttgttctcatgtcggctgccaaagtgaaagaacttggtcttaagcctcttgctaaaattattggttggggtgaagccgctcaagatcctgagcgttttaccacttctccttcccttgctattcccaaagctctcaagcatgcaggtattgaagcttcccaagttgactattacgagatcaatgaagcctttagtgttgttgctgttgccaacaccaaaattcttggattagatcccgagcgtgttaacattaacggaggtggtgttgccatgggtcatcccttgggtagcagtggttctcgtatcatttgtactttggcatatattcttgctcagaaggatgccaagattggtgtagctgctgtttgcaatggtggtggtggtccttcatccattgttatcgaaagagtttagacatgctcgtcaatgcgccttaggtgctggactccctcgctccatcgtttgt

SEQ ID NO: 92961 - protein, 395 aa, Schizosaccharomyces pombe
MVNTEVYIVSAVRTPMGSFGGSFASLPATKLGSIAIKGALERVNIKPSDVDEVFMGNVVSANLGQNPARQCALGAGLPRSIVCTTVNKVCASGMKATILGAQTIMTGNAEIVVAGGTESMSNAPYYAPKNRFGAKYGNVELVDGLLRDGLSDAYDGLPMGNAAELCAEEHSIDRASQDAFAISSYKRAQNAQATKAFEQEIVPVEVPVGRGKPNKLVTEDEEPKNLNEDKLKSVRAVFKSNGTVTAANASTLNDGASALVLMSAAKVKELGLKPLAKIIGWGEAAQDPERFTTSPSLAIPKALKHAGIEASQVDYYEINEAFSVVAVANTKILGLDPERVNINGGGVAMGHPLGSSGSRIICTLAYILAQKDAKIGVAAVCNGGGGPSSIVIERV

SEQ ID NO: 92962 - DNA, 1308 bp, Medicago truncatula
  CDS (1)..(1308)
atggagaaagcagttgaaagacaaagagttcttcttcaacatctcaatccaaattcagttacttcatctcatcattccactcatctctctgcttcattatgttctgctggacaaacaggtggatctgaaaatgatgtggtcattgtagctgcatatcgtacggctatttgcaaagcaaagcgcgggggattcaaggatactcttccagatgatctacttgcctcggttctcaaggctgtgatagagaaaacaaatgtggaaccaagtgaagtaggcgacatagttgtaggcacagttttaggaccaggatcagaaagagcaattgagtgcagaatggctgcattttatgctggtttcccagatactgtgccgcttcgaactgttaatagacaatgttcatctggacttcaagcagttgctgatgttgccgcttacataaaagctgggttctatgacattggaattggggctggattggagtgtatgacacaagatactatttcaggggttcgcaaaactaatccaaaggttgaaatctttgcacaagcccgagactgtcttctttctatgggaataacttctgagaatgttgcacagcgttacggtgtgacaaggcaggagcaagaccaggctgctgtcgagtctcacaggcgtgctgcagctgcaacagcgtctggtaaattcaaagacgaaatcattccagtttctacaaagttcgtggatcctaaaactggagaggagaaacaaattattgtttctgttgatgatggtatccggccaaatgcaaatttggtagatcttgcaaagctgaaacctgcattcaaaaaggatggaaccacaactgcagggaatgctagccaagttagcgatggtgcagcagcagtgcttctcatgaagagaagtgtggctgtgcaaaaggggcttcctattcttggaatcttcaggagtttttctgctgttggtgtagatcctgctgtcatgggtgttggtccagcttttgctattccagctgcagtgaaatctgctggtcttgaacttagtaacattgacttgtatgaaataaatgaggcatttgcatcacagtttgtttattcctgcaagaaattggggcttgatccaacaaaggtcaatgtcaatggtggtgccatggcttttggacatcctttaggcgccacaggtgcacgctgtgttgcaactttgttgaatgaaatgaagcgtcgtggaaaggactgtcggtttggtgtaatctcgatgtgtataggttctggtatgggagctgcggcagtatttgaaaggggagacttctga

SEQ ID NO: 92963 - protein, 435 aa, Medicago truncatula
MEKAVERQRVLLQHLNPNSVTSSHHSTHLSASLCSAGQTGGSENDVVIVAAYRTAICKAKRGGFKDTLPDDLLASVLKAVIEKTNVEPSEVGDIVVGTVLGPGSERAIECRMAAFYAGFPDTVPLRTVNRQCSSGLQAVADVAAYIKAGFYDIGIGAGLECMTQDTISGVRKTNPKVEIFAQARDCLLSMGITSENVAQRYGVTRQEQDQAAVESHRRAAAATASGKFKDEIIPVSTKFVDPKTGEEKQIIVSVDDGIRPNANLVDLAKLKPAFKKDGTTTAGNASQVSDGAAAVLLMKRSVAVQKGLPILGIFRSFSAVGVDPAVMGVGPAFAIPAAVKSAGLELSNIDLYEINEAFASQFVYSCKKLGLDPTKVNVNGGAMAFGHPLGATGARCVATLLNEMKRRGKDCRFGVISMCIGSGMGAAAVFERGDF

SEQ ID NO: 92964 - DNA, 1515 bp, Picrorhiza kurrooa
  CDS (55)..(1269)
ctcgctttgtcaaatcctttcaattttctacagtaatttacgcaaacgttgatcatggctccagcagcggccgattcaattaaaccgagagatgtttgcattgttggtgtttcccgaacccctatgggtggcttccttggttctatttcatctttaccagcaacaaagcttggatctattgctattgagagtgctcttaagagagcaaatgttgatccatctcatgtgcaagaagttttctttggaaatgtactcagtgcaaacttgggccaggctcctgccaggcaggcagctttaggtgcaggaatccccaatacagttatctgcacaactgtcaacaaagtctgtgcatctggaatgaaagctgctatgcttgcagcacaaagtatccagttgggcatcaatgatgttgttgttgctggtggcatggaaagtatgtctaatgtccctaaatatctggcagaagcgaggaaaggatctcgactcggacacgattctcttgttgatggaatgctgaaagatggattgtgggatgtctataatgactatggcatgggagtttgtgctgaattatgtgccgaacaccatagtgttactagagaggagcaggacaattatgcagttcagagttttgagcgtggtattgccgctaaagatagtggtgctttctcatgggagattgtgccggttgaagtgtctggtggaagaggaggaccatccacaattgttgataaggatgaaggtctaggaaagtttgatgctgcaaaattgaggaagctaagaccaagtttcaaggaaactgggggttctgttacagctggcaatgcatctagcataagtgatggtgctgctgctcttgttctagtaagcggagagaaggccctgaagcttaggctggaagttattgcaaagatcactggatatgctgatgctgctcaggcaccagaattatttaccactgctccggccattgctattccaaaagcaatctcaaatgctggtctagaagcatctcaaatagactattatgaaatcaatgaagcctttgcagttgtggctcttgcaaaccagaagctcttgagtctaaatccggaaaaagttaacgtacacggtggagctgtgtcactgggacatcctctaggttgtagtggagctcgtatcttggttacacttttaggggtattaaggcagaagggtggaaaatatggagttggtggtgtttgcaatggaggaggaggtgcttcagctgtcgttatagagctcctttaattcccccctgtttttgatttagtttggctgtagcttgcgatagaaggtgtgatcattccgcatgctggaagaattgaagttgtggacgcagcagacttgtcttctaaccatgcattttttaagcttagatcagatgaactactcgctactcgattctctctctttgtctctgtccaataaattaacgtgattagattgtgctaaagagtcttaaattcctacaaaaaaaaaaaaaaaaaaaaaaaa

SEQ ID NO: 92965 - protein, 404 aa, Picrorhiza kurrooa
MAPAAADSIKPRDVCIVGVSRTPMGGFLGSISSLPATKLGSIAIESALKRANVDPSHVQEVFFGNVLSANLGQAPARQAALGAGIPNTVICTTVNKVCASGMKAAMLAAQSIQLGINDVVVAGGMESMSNVPKYLAEARKGSRLGHDSLVDGMLKDGLWDVYNDYGMGVCAELCAEHHSVTREEQDNYAVQSFERGIAAKDSGAFSWEIVPVEVSGGRGGPSTIVDKDEGLGKFDAAKLRKLRPSFKETGGSVTAGNASSISDGAAALVLVSGEKALKLRLEVIAKITGYADAAQAPELFTTAPAIAIPKAISNAGLEASQIDYYEINEAFAVVALANQKLLSLNPEKVNVHGGAVSLGHPLGCSGARILVTLLGVLRQKGGKYGVGGVCNGGGGASAVVIELL

SEQ ID NO: 92966 - DNA, 1299 bp, Aspergillus oryzae
  CDS (1)..(1299)
atggcgatccaagcttcggctacgcgtctcttcaagagggcggctatccccgcatctcgccagtggcagcgacagttcagcgctgcagccccagcactcaaggagatccaggatgcctatatcctcagtgcttcacgaactccgactgctaagtttaatggatcgttcgcctccgtctctgcccccgagctgggcgccgttgccatcaagtctgctgtgaccaagtctggactccctgtcgagaagatcaccgatgtatacatgggaaatgtcctccaaggatcggtcggccaggcaccagctcgccaggcttctatcttcgctggtttgtcgccaacagtggaatccatgacagtaaacaaagtgtgcgcctcgggcctcaaggctgtagcacttgctgcacagaatatccagcttggcctggcagacgcccaagttgctggaggaatggagaatatgtctcgtgtcccttactacctcccacgttccagccagcttccaccgttcggagagatcaaactggaagatggtttaatcaaggatggtctgtgggatgtctataacaagtttcatatgggtatctgtgccgaaaccacagccaagaagtatgagatctcgagggaagaacaggatgaatatgcgattcagtcgtaccagcgggctcagaaggcctggaacgagaataagttcgccgatgagattgcccccgtcactgtcaagggtaagaagggtgagaccgttgtcgaacgtgacgaaggctatgagaatctgcgggttgataagatgaagaccttgaagcccgcattcttaagggacggcacaggcactgtcactgccggtaatgcttccaccatgaatgatggggcatcagctctggttctggctagcaaggacttggctcgcgagtttggccagggcaaccgggctcttgcgcgtatcgtgtcctccgcggatgcagctattgaccccgtggacttccctgtcgccccagctaaggcggttcccattgccctcgagcgagctggtatcaccaaggatcaggttgccgtctgggagtttaatgaggcatttgctgccgttatcaaagcaaacgagaagattcttggattgcagaacgcccgtgtcaaccctctgggaggagctatctctctgggacatgcactcggaagctcaggctcccgtatcctggtcactcttctccaccagctgcagcctggtgaatatggtgtggccgcgatttgcaatggtggtggcgccgctagtgccatggttgtccagaagttggaccgggttgattag

SEQ ID NO: 92967 - protein, 432 aa, Aspergillus oryzae
MAIQASATRLFKRAAIPASRQWQRQFSAAAPALKEIQDAYILSASRTPTAKFNGSFASVSAPELGAVAIKSAVTKSGLPVEKITDVYMGNVLQGSVGQAPARQASIFAGLSPTVESMTVNKVCASGLKAVALAAQNIQLGLADAQVAGGMENMSRVPYYLPRSSQLPPFGEIKLEDGLIKDGLWDVYNKFHMGICAETTAKKYEISREEQDEYAIQSYQRAQKAWNENKFADEIAPVTVKGKKGETVVERDEGYENLRVDKMKTLKPAFLRDGTGTVTAGNASTMNDGASALVLASKDLAREFGQGNRALARIVSSADAAIDPVDFPVAPAKAVPIALERAGITKDQVAVWEFNEAFAAVIKANEKILGLQNARVNPLGGAISLGHALGSSGSRILVTLLHQLQPGEYGVAAICNGGGAASAMVVQKLDRVD

SEQ ID NO: 92968 - DNA, 1200 bp, Aspergillus oryzae
  CDS (1)..(1200)
atgtcttctcttccgccggtctatattgtttcctctgcccgcaccccagtcggctctttcttggggtcgctctcaagtctcactgccccgcagttaggctctcatgctattaaagctgcgctcagcaaagcggatggaatcaagccgtctgatatccaggaggtcttctttggcaatgtcatctccgcaaacgttggacaaaatcctgctagacagtgtgctctcggcgctggtctcaatgaatcaactgtctgtactacggttaataaggtgtgcgcgtctggcttgaaagcggttattctcggtgcacagaccatcatgactggcaatgcggatattgtcgtagcaggcggtgctgaatccatgtctaacgcccctcattaccttccaaaccttcgcgtcggtgcgaaatacggcaaccagagtctggtggacggtattatgaaggatggcttgacagacgcaggaaagcaggaactcatgggcttgcaagccgaggagtgtgctcaggatcatggctttagcagggaacaacaggatgattatgccattcgcacttacgaaaaagcacaggcggctcaaaaggctggcctttttgacgaagaaattgcgcctattgaacttcctggctttaggggcaagccaggtgtgactgtgtcacaagacgaagaaccaaagaatcttaacccggataagcttcgagctatcaagcctgcatttatccccggatccggcacggtcacagccccgaattcctcacctcttaacgacggtgctgctgctgttatcctcgtctcagaagctaaactgaaagagcttaacctaaagcctgttgcaaagattcttggctggggagatgccgcccagcagccaagcaaattcacaactgccccagctctagcaattcccaaggccctcagccatgcaggtgtggctcaggatgctgttgatgcgttcgagattaacgaagcgttcagcgtagttgctctggccaatatgaaactcctggggttggctgaagataaagtcaacatccatggtggtgcagtggctatcggtcatcctatcggcgccagcggtgctcgtatcttgactacattgctcggtgtattgaaagcgagaaagggtaagattggttgtgccgggatttgtaatggaggaggtggtgctagcgctattgttgtcgaatctctcgtctga

SEQ ID NO: 92969 - protein, 399 aa, Aspergillus oryzae
MSSLPPVYIVSSARTPVGSFLGSLSSLTAPQLGSHAIKAALSKADGIKPSDIQEVFFGNVISANVGQNPARQCALGAGLNESTVCTTVNKVCASGLKAVILGAQTIMTGNADIVVAGGAESMSNAPHYLPNLRVGAKYGNQSLVDGIMKDGLTDAGKQELMGLQAEECAQDHGFSREQQDDYAIRTYEKAQAAQKAGLFDEEIAPIELPGFRGKPGVTVSQDEEPKNLNPDKLRAIKPAFIPGSGTVTAPNSSPLNDGAAAVILVSEAKLKELNLKPVAKILGWGDAAQQPSKFTTAPALAIPKALSHAGVAQDAVDAFEINEAFSVVALANMKLLGLAEDKVNIHGGAVAIGHPIGASGARILTTLLGVLKARKGKIGCAGICNGGGGASAIVVESLV

SEQ ID NO: 92970 - DNA, 1251 bp, Aspergillus oryzae
  CDS (1)..(1251)
atggccacagatcgtttgaactctattctcagccacctcaagggaggaaacactggccttgccgccatcacccagaagaacccagacgatgtagtcattacgctcgctctgcgtactcctctggccaaggccgttaagggtggattcaaggacacacagttggattacatcgtatactccttgttgaaggaggttatcgacaagtctaagattgaccctgctttggtcgaggatgtctgcttgggtaatgtcaacgacggcaaggccccctatctcctccgtgccgcctcccttgcggccggcatccccaacacatccggcgcatcgtccgtcaaccgattctgttcctccggtctcaaggctgttcaggacatcgccaaccagattacattgggtcagatcgatgtcggtatcgcccttggtgctgagttgatgtcggccggcggtgatgcagtccaacctttcagcgaggaagtcctgaagaaccaggagtctgccgactgcctgcagcccatgggtcagacatccgagaacgtcggctcggacttcaacatcagccgtgaggttcaggacaagtatgccgccgagtcgtaccgccgcgctgaggaggcccagaaggctgggtggttcgatgatgagatcgtccccatcaccaccaaggtgaaggaccccaagaccggcgaggtcaagcaggttactttgaccaaggatgaaggtatccgttatggaacgacggccgagtctctcggcaagatccgaccggctttccccaagttcggtaaccggagcactggtggcaactccagccaggtgactgacggcgctgccgctgtcctcctcatgcgtcgctctagggctatcgaacttaaccagcctatcctggctaagttctgtggtgccaccgttgctggcgttccccctcgcatcatgggtatcggccctaccgctgccatccccaagctcctctccaagttcaacttgaacaaggatgacatcgatatctacgagatcaacgaggccttcgcttccatggccgtctactgtttgcagaaccttggcttggaccatgccaaggtcaacccccgcggcggtgccattgcactcggccatcccttgggcgccacgggtgctcgccagatctgcacaattctgagcgaggcaagacggacgaagaagaaggtgctggtcacgagtatgtgcattggtaccggacagggcatggcgggattgttcgtcaacgaacaggtgtaa

SEQ ID NO: 92971 - protein, 416 aa, Aspergillus oryzae
MATDRLNSILSHLKGGNTGLAAITQKNPDDVVITLALRTPLAKAVKGGFKDTQLDYIVYSLLKEVIDKSKIDPALVEDVCLGNVNDGKAPYLLRAASLAAGIPNTSGASSVNRFCSSGLKAVQDIANQITLGQIDVGIALGAELMSAGGDAVQPFSEEVLKNQESADCLQPMGQTSENVGSDFNISREVQDKYAAESYRRAEEAQKAGWFDDEIVPITTKVKDPKTGEVKQVTLTKDEGIRYGTTAESLGKIRPAFPKFGNRSTGGNSSQVTDGAAAVLLMRRSRAIELNQPILAKFCGATVAGVPPRIMGIGPTAAIPKLLSKFNLNKDDIDIYEINEAFASMAVYCLQNLGLDHAKVNPRGGAIALGHPLGATGARQICTILSEARRTKKKVLVTSMCIGTGQGMAGLFVNEQV

SEQ ID NO: 92972 - DNA, 1260 bp, Aspergillus oryzae
  CDS (1)..(1260)
atgtcttctgctcagcagcgtcttacccaggtggcttctcacttcacccctggtggcaagaagggcgtcgccgccatcaccgagaagcaccccgatgacattgtcgtgacttgtgcccttcgttctgccctcaccaagggtggaaagggtggcttcaaggataccgcggctgctgatatcctggctggcgttttcaagggtgttattgagaagagtggcatcgaccccaacgtcgtcgaggatgttgccgtcggctccgtccttgcccctggtggcggtgccaccgagttccgtgctgctgctctggttgctggtttccccgagactactgctgtcaagagcttgaaccgtcagtgctccagtggtctccaggccatcgttgacattgccaatgctatcaagtccggcatgattgaagttggtattggtgctggtgtggagagcatgtcctctcagtatggtcctggtgctgtcaccgaattctcagacctcctcgagaaccaccaagagtctgccaactgcaaggttcccatgggtgttctgtcggagaacatggctaaggaccgtggcatttctcgtgctgtccaagatgctttcgccgcctcatcctaccagaaggcggttaaggctcagaaggctggtctctttaacgaggagatctatcctcttcaggtgaagtggactgaccccaagtctggcgaggagaagaccattaccgtgaaggccgatgatggtatccgtgacggtatcaccgctgaatccctgggcaagattcgccctgctttcgccaaggatggctccattcatgctggcaatgcctcccagatctccgacggtgccgctgctgttttgttaatgaagcgttccactgctgagcgcctcggtcagaagatcatcggcaagtacgtcgccgctagcgttgtgggtgttaagcccctgctcatgggcatcggcccctggaaggccatccccgtggcccttgagaaggctggcatcaccaaggatgacgttgatatctacgagatcaatgaggcctttgcctctcagtgcgtgtggtgtgtcaatgaacttggactacctcaagagaagatcaaccctaagggaggtgccattgcattcggacaccctcttggctgcaccggttctcgtcagatcagcaccctgctgacagagctgaagcgcactgacaagaagatcggtgtcactagcatgtgtgttggcactggtatgggtatggctgccgtttgggttcgcgaataa

SEQ ID NO: 92973 - protein, 419 aa, Aspergillus oryzae
MSSAQQRLTQVASHFTPGGKKGVAAITEKHPDDIVVTCALRSALTKGGKGGFKDTAAADILAGVFKGVIEKSGIDPNVVEDVAVGSVLAPGGGATEFRAAALVAGFPETTAVKSLNRQCSSGLQAIVDIANAIKSGMIEVGIGAGVESMSSQYGPGAVTEFSDLLENHQESANCKVPMGVLSENMAKDRGISRAVQDAFAASSYQKAVKAQKAGLFNEEIYPLQVKWTDPKSGEEKTITVKADDGIRDGITAESLGKIRPAFAKDGSIHAGNASQISDGAAAVLLMKRSTAERLGQKIIGKYVAASVVGVKPLLMGIGPWKAIPVALEKAGITKDDVDIYEINEAFASQCVWCVNELGLPQEKINPKGGAIAFGHPLGCTGSRQISTLLTELKRTDKKIGVTSMCVGTGMGMAAVWVRE

SEQ ID NO: 92974 - DNA, 1242 bp, Aspergillus oryzae
  CDS (1)..(1242)
atggcatctccaattccccggggcctccgccaggtcctccagaagtcccccaatgacattgtcatcctttcctcactgcgtacccccgtcactcgtgcgaagaaaggcggtttcaaagatgcctaccccgaagaactcctcgccaatgtcctcaaggcgacccttgaagcgaaccccaaactcgacccagccctgattgaggaagtcgctatcggctccgttctccaagagctcggcggtgcaaaggctggccgtatggctcagattcacgcaggcttcccccacacggttcccttccacacaatcaacagacaatgttcgtccggtctagctgctattaccgcgatcggcaacggaatccgggcaggcgctctcaacattggtgtcggtggaggaatggagtccatgacccggaattacggatttcgcgctatccccaccgtgctgtggcccgagctcaaggagtcgccgtcgaaggactctcgggactgcatcatgcctatgggtattacctccgaaaacgttgcttctcgttacggtatctcgagggaggaccaggacgtatttgccgccgagtcgcacaagaaggctactgctgcgcagaacgctggtctgttcgactccgaaatcgtgcccgtgaagaccctctcctttgaccctgaaaaccccgatgcgcccccgaaggaaatcaccgccacaaaggatgatggtgtccgccccaacatctccgtcgagaagatggccagtctgaagccagccttctccccgactggtgctagcaccgccggaaacagctcgcaggtcagcgacggtgctgccgctgcactgctcatgcgtcgttccaccgcgaccgaactcggactgacatcctccatcaagggccgctgggtcggcaccgctgttgctggttgtgctcccgatgagatgggtgttggacctgctgttgctattcccaagcttcttcagcagctcgacatgagcgtctccgatgttaacatctgggagatcaacgaggcttttgcctcccaggcgctctactctatccgcaagttgggtattgacgaggccaaggtcaaccctaagggtggtgctattgccatcggtcacccgctcggtgccactggagctagacagctcgccactctcctgcccgagatggagcgtaccggccaggaagtcggtgttgtcagcatgtgcattggaaccggtatgggaatggctggtatgtttgttcgggagtaa

SEQ ID NO: 92975 - protein, 413 aa, Aspergillus oryzae
MASPIPRGLRQVLQKSPNDIVILSSLRTPVTRAKKGGFKDAYPEELLANVLKATLEANPKLDPALIEEVAIGSVLQELGGAKAGRMAQIHAGFPHTVPFHTINRQCSSGLAAITAIGNGIRAGALNIGVGGGMESMTRNYGFRAIPTVLWPELKESPSKDSRDCIMPMGITSENVASRYGISREDQDVFAAESHKKATAAQNAGLFDSEIVPVKTLSFDPENPDAPPKEITATKDDGVRPNISVEKMASLKPAFSPTGASTAGNSSQVSDGAAAALLMRRSTATELGLTSSIKGRWVGTAVAGCAPDEMGVGPAVAIPKLLQQLDMSVSDVNIWEINEAFASQALYSIRKLGIDEAKVNPKGGAIAIGHPLGATGARQLATLLPEMERTGQEVGVVSMCIGTGMGMAGMFVRE

SEQ ID NO: 92976 - DNA, 1462 bp, Raphanus sativus
  CDS (43)..(1263)
gactagtcgcgcgctctctgaactgaagtacaagatttcccgatggcccattcagcagattcctccgacaatcccagagatgtttgcatcgtgggtgttgcacgcactcctatgggtggctttctcggatctctctcctccttacccgccacaaagcttggatcccttgccatcacagctgctctgaagagagaaatgttgacccgtctctggtccaaggaagttgtgtttgggaatgttctcagtgctaatttgggtcaagctcccgctcgtcaggccgctttaggtgctgggatctctaactctgttatctgtaccactgtcaacaaggtctgtgcctcaggcatgaaagctgtgatgattgctgctcagagtatccagctggggatcaatgatgtagtcgtggcgggtggtatggaaagcatgtctaatacaccaaagtatcttgcagaagcaagaaaaggatctaggtttggtcatgattctctcgtagatgggatgcttaaggatggactgtgggatgtctataacgactgtgggatgggaagctgtgcagagttatgcgctgagaagtttgagataaccagggagcagcaagatgattacgctgttcagagctttgagcgtggtattgctgctcaggaatctggcgccttcacatgggagatcgtcccggttgaagtttctggaggaaggggtaggccatcaaccattgttgacaaggatgaaggtcttgggaagtttgatgctgcaaaactgaggaaactccgtccgagtttcaaggagaatggaggcacagttacagctggaaatgcctctagcataagtgatggtgcagctgctattgtcctagtgagtggagagaaggcgcttcagctaggacttcaagtacttgcaaaagttaaaggttatggtgatgcagctcaggagccagagtttttcactactgctcctgctctggcaataccaaaagctattgcacccaattcgccctatagtgagtcgtatcaagttgattactatgagatcaatgaagcatttgcagttgtagcacttgcaaatcaaaagctacttgggattagtccggagaaggtgaatgtaaatggaggagccgtctccttaggacatcctctaggctgcagtggagcccgtattctaatcacattgcttgggatactgaagaagagaaacggcaagtacggtgtgggaggagtgtgcaacggaggaggaggtgcttctgctcttgttcttgaagtcgtgtgatgcatttatatgaatcccaggttgttgaactatatagagcgtatctactatcattctaccaacttgcacttcaagtttgatattggttggtctctctcaataaatgagtgatgatgatctttgatgttgttaagtttatttagttatattatatgaaaactatgtttctgttaaaaaaaaaaaaaaaaaaaaaaaaaac

SEQ ID NO: 92977 - protein, 406 aa, Raphanus sativus
MAHSADSSDNPRDVCIVGVARTPMGGFLGSLSSLPATKLGSLAITAALKREMLTRLWSKEVVFGNVLSANLGQAPARQAALGAGISNSVICTTVNKVCASGMKAVMIAAQSIQLGINDVVVAGGMESMSNTPKYLAEARKGSRFGHDSLVDGMLKDGLWDVYNDCGMGSCAELCAEKFEITREQQDDYAVQSFERGIAAQESGAFTWEIVPVEVSGGRGRPSTIVDKDEGLGKFDAAKLRKLRPSFKENGGTVTAGNASSISDGAAAIVLVSGEKALQLGLQVLAKVKGYGDAAQEPEFFTTAPALAIPKAIAPNSPYSESYQVDYYEINEAFAVVALANQKLLGISPEKVNVNGGAVSLGHPLGCSGARILITLLGILKKRNGKYGVGGVCNGGGGASALVLEVV

SEQ ID NO: 92978 - DNA, 1389 bp, Brassica napus
  CDS (1)..(1389)
atggagaaagcgatggagagacaaagagttcttcttgaacatctccgtccttcttcttcttcctctcacagctttgaaggctctctctctgcttcagcttgcttggctggggacagtgctgcgtatcagaggacctctctctatggagatgatgtagtcattgttgcggcacataggactgcactatgcaagtcgaaacgtggcaatttcaaggatacttatccggatgatcttcttgcacctgttttgagggcattgatagagaagacgaatctgaacccaagtgatgttggtgacattgttgtcggtactgtttgggcaccgggatctcagagggccagcgagtgcaggatgtctgctttctacgccggtttccctgaaaccgttcccgttagaaccgtgaatagacaatgctcttctgggcttcaggctgttgctgatgtagccgccgccatcaaagctggattttatgatattggtattggggctggattggagtccatgaccactaatccaatggcatgggaagggtcagtcaacccagcggtgaagaagtttgagcaagcacagaactgtcttctccctatgggtgttacttcagaaaatgtggcacaacgatttggtgtctcaaggcaggagcaagatcaagctgctgttgactcgcacagaaaggcagctgctgctactgctgctggtaagttcaaggatgagatcattccggttaaaaccaagcttgttgacccaaagacaggagatgagaaacccattacagtttctgtggatgatgggatccgaccaaccacaacccttgctactcttgggaagctgaagccagtgtttaaaaaggatggaaccacaacagctggaaactccagccaagttagtgatggtgctggagcggttcttctcatgaggaggagtgttgctacgcagaaaggacttcccgttcttggtgtattcaggacatttgctgcagttggtgttgacccagcaatcatgggagttggtccagcagttgccattcctgctgcagttaaggctgctggtttagaactcgatgacattgacttgtttgagatcaacgaggcatttgcatctcagtttgtttattgccgtaacaagttgggactcgacgcagagaaaatcaatgtcaacggaggcgcaatggccataggacatcctttgggtgctacaggagcacgttgcgttgctactttgttgcatgagatgaaacgccgcggaaaagactgtcgatttggggtagtttcaatgtgcattgggacggggatgggtgcagcggctgtgtttgagagaggagatggagttgatgagcttcgcaacgcaaggaaagttgaatcgcatggccttttgtccaaggacgctcgttag

SEQ ID NO: 92979 - protein, 462 aa, Brassica napus
MEKAMERQRVLLEHLRPSSSSSHSFEGSLSASACLAGDSAAYQRTSLYGDDVVIVAAHRTALCKSKRGNFKDTYPDDLLAPVLRALIEKTNLNPSDVGDIVVGTVWAPGSQRASECRMSAFYAGFPETVPVRTVNRQCSSGLQAVADVAAAIKAGFYDIGIGAGLESMTTNPMAWEGSVNPAVKKFEQAQNCLLPMGVTSENVAQRFGVSRQEQDQAAVDSHRKAAAATAAGKFKDEIIPVKTKLVDPKTGDEKPITVSVDDGIRPTTTLATLGKLKPVFKKDGTTTAGNSSQVSDGAGAVLLMRRSVATQKGLPVLGVFRTFAAVGVDPAIMGVGPAVAIPAAVKAAGLELDDIDLFEINEAFASQFVYCRNKLGLDAEKINVNGGAMAIGHPLGATGARCVATLLHEMKRRGKDCRFGVVSMCIGTGMGAAAVFERGDGVDELRNARKVESHGLLSKDAR

SEQ ID NO: 92980 - DNA, 1197 bp, Dendroctonus jeffreyi
  CDS (1)..(1197)
atgtccttctccaagtggcttaaggatgtaaacgaagtgatgattgtatcagcagtgcgcaccccaatagggtcatttttggggtctctggcgcccctcagcgctactcgtttgggcgctgtcgcggttcaaggcgccatcaaacgcgccggaattcccaaagaagaagtcaaggaagtttttttggggaatgtttgccaggggggcgtgggacaagctcctgctcgtcaggcgacactttttgctggtttgcccacctctaccatttgcaccaccattaataaggtttgtgcctcgggaatgaaatcaatcatgctgggagctcaagctctgcaaacgggatcgcaagaagtggttgtagcaggaggcatggagtcgatgtccaacgccccgtactacatgaagcggggccaaactccatatggaggcgttcagctagtggatggcgtggttttggacggtctgaccgacgtgtacaacaaagtgcacatgggaaattgtgcagagaacacggcaaagaagctgggaataacgcgacagcaacaggacgagttcggcatcagctcctacttaaggagcgcccaagcttggcagaatcgggtcttcgacttcgaactggtcccggtcagtgtgccgcaaaagaagggacaggacactgtagtcagcaaagacgaagaatacaagcgagtgaatatcgaaaagttctgcaaacttgccacgattttccagcgggaaaatggcacggtaacagcggcgaatgcctccactttgaatgacggggctgcggcgctgatcttaactacaagagcggccgctgagcgactcaatctcaagcctctggcgaggattgtggggtttgcggatggggcttgcgaccccatagattttcccatcgcacccgccaccgctattctgaaacttctgcagcaaacgggagtgaacaagaacgacgtggctctgtgggaggtcaacgaagccttcagtgtggtggtgctggccaatcagcagctgctggaaatcgatccaggcaaagtcaatgtgcatggaggggctgttagtcttggtcaccccattgggatgtcgggggcccgaatcgtggtgcatttggtgcatgcgttaaagccgggagaaaaaggcgtggcgtcgatttgcaacggcggaggtggcgcttcttctgtcatggtggagcgattgtaa

SEQ ID NO: 92981 - protein, 398 aa, Dendroctonus jeffreyi
MSFSKWLKDVNEVMIVSAVRTPIGSFLGSLAPLSATRLGAVAVQGAIKRAGIPKEEVKEVFLGNVCQGGVGQAPARQATLFAGLPTSTICTTINKVCASGMKSIMLGAQALQTGSQEVVVAGGMESMSNAPYYMKRGQTPYGGVQLVDGVVLDGLTDVYNKVHMGNCAENTAKKLGITRQQQDEFGISSYLRSAQAWQNRVFDFELVPVSVPQKKGQDTVVSKDEEYKRVNIEKFCKLATIFQRENGTVTAANASTLNDGAAALILTTRAAAERLNLKPLARIVGFADGACDPIDFPIAPATAILKLLQQTGVNKNDVALWEVNEAFSVVVLANQQLLEIDPGKVNVHGGAVSLGHPIGMSGARIVVHLVHALKPGEKGVASICNGGGGASSVMVERL

SEQ ID NO: 92982 - DNA, 1522 bp, Nicotiana tabacum
  CDS (118)..(1362)
tctttgatcaagctctttcctctgttcgttactttatcttggctcaaaatcagttcacttgggtcgtattcatctttgattcttgttcttgaacggatcatttttggagaaatctatatggcaaagatggttaatgattccattaaacctcgagatgtatgcattgtgggtgttgctcgaacaccaatgggtggtttccttggttctctttcgtctttgtctgctacagagcttggttctgtagctatccgagctgctcttaagagagcaaatgtagacccgtcccttgttcaagaggtcttctttggaaatgttctcagtgcaaacttaggtcaagcccctgctagacaggctgccttaggagccgggattcctaattcagtgatttgcacgaccatcaacaaagtttgttcttcgggacttaaagcaacaatgattgcagctcagactatacaatcaggaagcaatgatatcgttgtgactggtggcatggaaagcatgtctaatgtaccgaaatacctagctcaagcaaggaaggggtcgcggctaggtcatgatactatagtagatggcatgctaaaagatggactctgggatgcctataatgatttcgggatgggcgtctgtgcagaactatgtgctgatcagtataaaatcacaagacaacagcaggattcttacgctattcaaagctttgagcgaggaattgctgcacaacgtagtggtgcatttgtgtgggaaatagttccggtagaaatttctggtggaagtggaagaccatctacatatgttgataaagatgaaggtttaataaagtttgatgcctccaaactaaaaaagcttagaccaagtttcaaggagaatggaggttctgtcactgcaggcaatgcttccattataagtgatggcgctgcagcattagttctggtgagtggacaaaaggcacttgaacttggattgcaagtaattggtaggatcagaggatttgcagatgcagctcaggcacctgagttatttacaacagctccagctcttgcaataccaaaagcaattaagaattctggccttgagtcatctcaaattgactattatgaaataaatgaagcgttctctgtggtggctcttgccaacaaaagactgctcaatctcaattccggaaagctaaatgcacatggtggagctgtgtcattgggacatcccttggggtgcagtggagctaggatcctggtatctcttttaggggtattgaagcacaagaatgggaagtttggtgttgcaggaatctgcaatgggggaggaggcgcatctgctcttgttgtagagctcatgcctataaggatggtggcacgttcatcgctttgaaactggaatagtttgtactatatttacgtctagctgctgcacagttgcatgcctgctgagttctgccacattgcgtcaaaagtagtgaggtatctgaatgcttgtatccattatgtaaaaccatataagcaataacctaataataccatgaaaatcgagc

SEQ ID NO: 92983 - protein, 414 aa, Nicotiana tabacum
MAKMVNDSIKPRDVCIVGVARTPMGGFLGSLSSLSATELGSVAIRAALKRANVDPSLVQEVFFGNVLSANLGQAPARQAALGAGIPNSVICTTINKVCSSGLKATMIAAQTIQSGSNDIVVTGGMESMSNVPKYLAQARKGSRLGHDTIVDGMLKDGLWDAYNDFGMGVCAELCADQYKITRQQQDSYAIQSFERGIAAQRSGAFVWEIVPVEISGGSGRPSTYVDKDEGLIKFDASKLKKLRPSFKENGGSVTAGNASIISDGAAALVLVSGQKALELGLQVIGRIRGFADAAQAPELFTTAPALAIPKAIKNSGLESSQIDYYEINEAFSVVALANKRLLNLNSGKLNAHGGAVSLGHPLGCSGARILVSLLGVLKHKNGKFGVAGICNGGGGASALVVELMPIRMVARSSL

SEQ ID NO: 92984 - DNA, 1455 bp, Nicotiana tabacum
  CDS (19)..(1233)
tctttatacatattcacaatggctccagctgcagcagactccatcaagcctagagatgtttgcattgttggtgttgcccgtactccaatgggaggcttccttggttctctttcttcgctgtcagcgaccaaacttggatcaatagccattgagggtgctcttaagaaagctaatgttgatccatcactagtagaagaagtattctttgggaatgtcctcagtgcaaacctgggacaggctcctgctaggcaagcagcattaggtgcaggaatacccaatacagtagtttgtacagctgtgaacaaagtctgtgcatctgggttgaaagcaactatgcttgcagctcaaagtatccagttgggcatcaatgatgttgtggtggctggtggaatggaaagcatgtccaatgttccgaaatacattgcagaagcaaggaagggatctcgtcttggacatgatagtcttgttgacggaatgcttaaagatggtttgactgacgtatataaggattgtggtatgggagtttgtgcagaaatatgtgccgaaaatcataaaatcacaagagaggagcaggatgactatgcagttcaaagttttgaacgtggcatcgctgctcaggaagctggtgcttttgcatgggagattgtgccggttgaggtgcctgggggaagaggaaaaccatccattattgttgataaggatgacggtctaggaaagtttgatggtgcaaaattgagaaaactccgaccaagttttaaggaaaaggatggtactgtgactgctggtaacgcttctagcataagtgatggagctgctgcattggtcttagtaagtggagagaaggcgataaaacttggactaaatgtgattgcaaagatcagtggctatgctgacgctgctcaggcacctgaattattcacaactgcacctgctctagcaattccaaaagctatcaaaagtgctagcttagaggcttctcaaattgactactatgaaattaatgaagcttttgctgtggtatctcttgcaaatcaaaagctgcttggtcttaatccagaaaaagttaatgtacatggtggagctgtatctttggggcaccctcttggatgcagtggagctcgtatattggttacacttcttggggtattgagacagaaaaacggcaaatatggcgctgctggtgtttgcaatggcggaggaggtgcctcagcccttgtcctagagcttgtgtaatccttgttggcttttggttacatggtgcttgcggtggattagaagtggcggtgcgccttcagccagagatgattgtgcaacctctgtttttttttctttttccttgttagtgttctttcaatttgtattcttcctaaataaatgaaagttgcttcttcagagttaaagacagatatcccctctcccctctcccgatttcagcaatccaattgcattcctcat

SEQ ID NO: 92985 - protein, 404 aa, Nicotiana tabacum
MAPAAADSIKPRDVCIVGVARTPMGGFLGSLSSLSATKLGSIAIEGALKKANVDPSLVEEVFFGNVLSANLGQAPARQAALGAGIPNTVVCTAVNKVCASGLKATMLAAQSIQLGINDVVVAGGMESMSNVPKYIAEARKGSRLGHDSLVDGMLKDGLTDVYKDCGMGVCAEICAENHKITREEQDDYAVQSFERGIAAQEAGAFAWEIVPVEVPGGRGKPSIIVDKDDGLGKFDGAKLRKLRPSFKEKDGTVTAGNASSISDGAAALVLVSGEKAIKLGLNVIAKISGYADAAQAPELFTTAPALAIPKAIKSASLEASQIDYYEINEAFAVVSLANQKLLGLNPEKVNVHGGAVSLGHPLGCSGARILVTLLGVLRQKNGKYGAAGVCNGGGGASALVLELV

SEQ ID NO: 92986 - DNA, 1552 bp, Glycine max
  CDS (28)..(1365)
ggcacgaggagtacagggagctcaaatatggataaagcaattcaaagacagagagtcctgcttgatcatcttcaacccatttcttcaagttcaaatttttcttctcaaacccatcaatctacggatctctcagcttcattatgttttgccaagaattcttcgcacggtcaaataggtggatcagatgacgacgtggtgattgtagctgcatatcgtactgccatctgcaaagcaaagcgtgggggctttaaggatacccttccagatgacctgcttgccacagttctgaaggctgtaatagagaaaacaaatgtgaacccagcagaagttggagacattgttgtgggcactgtactggcacctggatcagatagaggaattgagtgcagaatggctgccttttatgcaggtttcccagagacagtgcctcttcgaactgtcaataggcaatgttcatctggacttcaggcggtttctgacgtagctgcttatataaaagctgggttctatgaaattgggattggggctggattggagtctatgacagtagatcgtgtgaataggcttcgcaacattaacccaaaggtagaaacctttgcagaagcccgggattgtcttcttccaatgggaattacttctgagaatgtagcgcagcgttatggtgtgacaaggctagagcaagatcaagctgctgttgagtctcatcagcgtgctgcagctgcaacagcagctggtaagttcaaagaagaaatcattccagtttctacaaagtttgtggaccctaaaactggagtggagaagaaaattgttgtttctgtcgatgatggtatccggccaaacacaaatttagtggatttggcaaagctgaagcctgcattccagaaagatggaaccacaacagcagggaatgctagccaaattagtgacggtgcagcagctgttctcctcatgaagagaagagtggctgtgcaaaaggggcttcctatacttggaatcttcaggagttttgctgctgttggagtagatcctgcagtcatgggtgttggccctgctgttgctatcccagctgcagtgaaatccgtgggccttgaacttggcaacattgacttatttgaaatcaatgaggcatttgcatcacagtatgtttattgcctcaagaaattgggacttgatcccagaaaggtcaatgtcaatggtggtgccattgctcttggacatcctttgggtgttacaggtgcacgctgtgttgcaactttgttgaatgagatgaaacgtcgtggcaaggattgtcgctatggtgtaatctcaatgtgcatagggtcaggtatgggagctgctgctgtatttgaaaggggagacttttgaagatttgtgcaagtttagaagagttcatacaaataacgatcttttgtcaaagaaagcttgacattagacatcatttgaagtctttctattttgaattcagctttgattgaaatattacaaaaaattggaagtgtaaacaagaattattttaaccatgaattatgactcaaaaaaaaaaaaaaaaaaa

SEQ ID NO: 92987 - protein, 445 aa, Glycine max
MDKAIQRQRVLLDHLQPISSSSNFSSQTHQSTDLSASLCFAKNSSHGQIGGSDDDVVIVAAYRTAICKAKRGGFKDTLPDDLLATVLKAVIEKTNVNPAEVGDIVVGTVLAPGSDRGIECRMAAFYAGFPETVPLRTVNRQCSSGLQAVSDVAAYIKAGFYEIGIGAGLESMTVDRVNRLRNINPKVETFAEARDCLLPMGITSENVAQRYGVTRLEQDQAAVESHQRAAAATAAGKFKEEIIPVSTKFVDPKTGVEKKIVVSVDDGIRPNTNLVDLAKLKPAFQKDGTTTAGNASQISDGAAAVLLMKRRVAVQKGLPILGIFRSFAAVGVDPAVMGVGPAVAIPAAVKSVGLELGNIDLFEINEAFASQYVYCLKKLGLDPRKVNVNGGAIALGHPLGVTGARCVATLLNEMKRRGKDCRYGVISMCIGSGMGAAAVFERGDF

SEQ ID NO: 92988 - DNA, 1350 bp, Helianthus annuus
  CDS (1)..(1350)
atggaaagagcaatcgagaggcaaagagtcctgttagagcaccttcgtccctcttctacttcttcatccttggaaaatctctccgtgtcggtctgtgcagctggtgatagtgctgcttaccaaaggaactctgtttttggggatgatgtagtcattgtagctgcctaccggtctccactctgcaaagcaaagagaggtgggcttaaggatacatatcctgatgatatccttgcacccgttttgaaggcattaatagagaaaacaaatattaatccagctgaagttggagacattgttgtcgggtcagttttgggagcaggctcccaaagagcaagtgagtgcaggatggctgctttctatgctggatttcctgaaacggtgccagttaggaccgtcaacagacagtgttcctcaggtcttcaggcagttgctgatgtagctgcagctattaaagctggattttatgatattggtattggtgctgggttggaatctatgaccgccaatcctatggcttgggaaggatcagtgaaccccaaagtgaaaactatggcacaggctcaagattgtctacttccgatgggcattacatcggaaaatgttgcgcaaaagttcagcataacaaggcaggaacaagatcaggctgcagttgggtcccataggaaggctgctgctgcaactgctgctggtagattcaaggatgaaatcattccaatcaaaactaagattgttgacccgaaaactggagacgaaaagcctgttaccatttctgttgacgatgggatccgcccaggaacaagtttggcagatctcgcaaaactaaaacccgtatttaggaaagacgggtcaaccactgctggaacttccagccaagtgagtgacggtgctggagctgttcttttgatgaagagaagtatcgctctgcagaagggattaccgattctcggtgtattcaggacttttgctgctgttggtgtaccgccatcaataatgggtatcggccctgctgttgcaattccagctgcagttaaggctgctgggcttcaaattgacgatattgaccttttcgagatcaatgaggcatttgcatcacagtttgtatattgccaaaaaaagctagaaatcgacccacaaaagatcaatgtcaacggaggtgcaatggctattggacaccctttgggtgcaacaggggcgcgttgtgttgctactctactgcatgagatgaaacgtcgtggcagagactgccgatttggtgttgtgtcaatgtgcatcggcacgggtatgggtgcggcagctgtttttgagaggggtgacgcgtgtgatgagctgtgcaatgctaaagctaaatag

SEQ ID NO: 92989 - protein, 449 aa, Helianthus annuus
MERAIERQRVLLEHLRPSSTSSSLENLSVSVCAAGDSAAYQRNSVFGDDVVIVAAYRSPLCKAKRGGLKDTYPDDILAPVLKALIEKTNINPAEVGDIVVGSVLGAGSQRASECRMAAFYAGFPETVPVRTVNRQCSSGLQAVADVAAAIKAGFYDIGIGAGLESMTANPMAWEGSVNPKVKTMAQAQDCLLPMGITSENVAQKFSITRQEQDQAAVGSHRKAAAATAAGRFKDEIIPIKTKIVDPKTGDEKPVTISVDDGIRPGTSLADLAKLKPVFRKDGSTTAGTSSQVSDGAGAVLLMKRSIALQKGLPILGVFRTFAAVGVPPSIMGIGPAVAIPAAVKAAGLQIDDIDLFEINEAFASQFVYCQKKLEIDPQKINVNGGAMAIGHPLGATGARCVATLLHEMKRRGRDCRFGVVSMCIGTGMGAAAVFERGDACDELCNAKAK

SEQ ID NO: 92990 - DNA, 1173 bp, Paracoccus zeaxanthinifaciens
  CDS (1)..(1173): transl_table=11
atgaccaaagccgtaatcgtatctgccgcacgtacccccgtcggcagcttcatgggcgcattcgccaatgtccccgcacatgatctgggcgccgccgtcctgcgcgaggtcgtggcccgcgccggtgtcgaccccgccgaggtcagcgagacgatcctgggccaggtgctgaccgccgcgcagggccagaaccccgcgcgccaggcgcatatcaatgcgggcctgcccaaggaatcggcggcgtggctcatcaaccaggtctgcggctcggggctgcgcgccgtcgcgctggcggcgcagcaggtcatgctgggcgatgcgcagatcgttctggcggggggccaggagagcatgtcgctgtcgacccatgccgcctatctgcgcgcgggccagaagatgggcgacatgaagatgatcgacaccatgatccgcgacgggctgtgggatgccttcaacggctatcacatgggtcagaccgccgagaacgtggccgaccagtggtcgatcagccgcgaccagcaggacgaattcgccctggcttcgcagaacaaggccgaggccgcgcagaatgcgggccgcttcgatgacgaaatcgtcgcctataccgtcaagggccgcaagggcgacacggtcgtcgacaaggacgaatacatccgccacggcgccacgatcgagggcatgcagaagctgcgccccgccttcaccaaggaaggctcggtcacggcgggcaacgcgtcgggcctgaacgacggcgcggcggccgtcatggtcatgtccgaggacgaggccgcacgccgcgggctgacgccgctggcgcgcatcgcctcctatgcgacggcgggcctcgacccggcgatcatgggcaccgggccgatcccctccagccgcaaggcgctggaaaaggcgggctggtcggtcggcgacctggacctggtcgaggcgaacgaggcctttgccgcgcaggcctgcgccgtgaacaaggacatgggctgggatccgtccatcgtgaacgtcaacggcggcgcgatcgccatcggccacccgatcggcgcctcgggggcgcggatcctgaacaccctgctgttcgagatgcagcgccgcgacgccaagaagggccttgcgacgctgtgcatcggcggcggcatgggcgtcgccatgtgcctcgaacgctga

SEQ ID NO: 92991 - protein, 390 aa, Paracoccus zeaxanthinifaciens
MTKAVIVSAARTPVGSFMGAFANVPAHDLGAAVLREVVARAGVDPAEVSETILGQVLTAAQGQNPARQAHINAGLPKESAAWLINQVCGSGLRAVALAAQQVMLGDAQIVLAGGQESMSLSTHAAYLRAGQKMGDMKMIDTMIRDGLWDAFNGYHMGQTAENVADQWSISRDQQDEFALASQNKAEAAQNAGRFDDEIVAYTVKGRKGDTVVDKDEYIRHGATIEGMQKLRPAFTKEGSVTAGNASGLNDGAAAVMVMSEDEAARRGLTPLARIASYATAGLDPAIMGTGPIPSSRKALEKAGWSVGDLDLVEANEAFAAQACAVNKDMGWDPSIVNVNGGAIAIGHPIGASGARILNTLLFEMQRRDAKKGLATLCIGGGMGVAMCLER

SEQ ID NO: 92992 - DNA, 1335 bp, Laccaria bicolor
  CDS (21)..(1244)
gaccacactccatcacaaccatgtcaatccaacaagcttccacctcctccgcaaaagccgccattctccaaaagaacgacaacgacgtcgtcatagtctgtgcagtccgttccgccatcacaaagggcagaaaaggaggcttcaaagacaccaaacccgaactcatcctctcccacgtcctccgcgcagcatactccaaaatcagcctagaccccaagctcatcgaagatatcgcggtaggcaacgtactccctccgggaggaggcgcctccgccgcacgcatggcagccctccacgccggcatacccgtcgaaacctccatcaataccgtcaatcgccaatgttcgtcaggcctcaggcatcaaccagatcgcgaaccagattcgcgcagggcagatcgatattggtattggagccggcgtcgaatcaatgacacacggcttcggctccgcgcagccccgaagtatcgacgaagtctctccaaccaagacgcagaagactgtctcctccccatggggatcacttccgaaaacgttgcggccgactaccacatcccccgatccactcaagacgccttttccgctaaatccttccaaaaagccgcagcagctaacaaagcaggtaaattcaagtctgaaatcgtccccatcttggcaaaatggatagacccaaagacggaggaggttaaagaggtattggtgaatgaggatgatgggattagggagggggttacggctgaaagcttgcgaagattaaacctgcttttaagaaagatggctgcactcatgctggcaacgcatcccaagtctcagacggccgcagccgcaataatcctcgcccgccgctccgtcgccacacgcctcggcctcccaatcctaggcaaattcgtaaacgcgtcaactatcggcgtcccaccccgaatcatgggcgtcggccccgcctacgccatcccgcgcgttctcaaactgacaggcctgagtttggacgatgtggatttctttgagattaatgaggcgtttgcgagtcaggcgttgttttcgattgatacgttgaagattgcgcatgagaaggttaatttgaatgggggtgctattgctttggggcatcctttggggtgtactggtgcgagacaggtagctacgggcttgaatatcgcgaagcagacgggtggaagggtcttcgtgacgagtatgtgtattgggtctgggatggggatggctgctgttttcgttagtgagcagtaagcctccaggaaggaaagggtgattttgttattttaataatgtgacttattgtttaatcggtaaaaaaaaaaaaaaaaaaaaaaaaaaaaaa

SEQ ID NO: 92993 - protein, 407 aa, Laccaria bicolor
MSIQQASTSSAKAAILQKNDNDVVIVCAVRSAITKGRKGGFKDTKPELILSHVLRAAYSKISLDPKLIEDIAVGNVLPPGGGASAARMAALHAGIPVETSINTVNRQCSSGLRHQPDREPDSRRADRYWYWSRRRINDTRLRLRAAPKYRRSLSNQDAEDCLLPMGITSENVAADYHIPRSTQDAFSAKSFQKAAAANKAGKFKSEIVPILAKWIDPKTEEVKEVLVNEDDGIREGVTAESLRRLNLLLRKMAALMLATHPKSQTAAAAIILARRSVATRLGLPILGKFVNASTIGVPPRIMGVGPAYAIPRVLKLTGLSLDDVDFFEINEAFASQALFSIDTLKIAHEKVNLNGGAIALGHPLGCTGARQVATGLNIAKQTGGRVFVTSMCIGSGMGMAAVFVSEQ

SEQ ID NO: 92994 - DNA, 1194 bp, Pseudomonas putida
  CDS (1)..(1194): transl_table=11
atgaccctcgccaatgatccgattgttatcgtcagcgccgtgcgcacgcccatgggcggcctgcaaggcgacctgaaaagcctgaccgcaccacaactgggcagtgcggccattcgtggtgccgtggaacgtgccggcatcgatgctgccagtgtcgagcaagtgctgttcggctgtgtgctgccggccgggctgggccaggcgccagcacgccaggccgcactgggggctgggctggacaagcacaccacctgcaccaccctgaacaagatgtgcggctcgggcatgcaggccgcgatcatggcccatgacctgctggtggccggcaccgcatacgtggtggtggcggggggcatggaaagcatgaccaacgccccgtacttgctggacaaggcccgtggcggctatcgcatgggccacggcaagatcatcgaccacatgttcatggacggcctggaagacgcctatgacaaaggccgcctgatgggcaccttcgccgaagactgcgcccaggccaatgcgtttagtcgcgaagcccaggaccagttcgctatcacctcgcttacccgtgcccaggacgcgatcagcagcggccgttttgccgccgagatcgtgccggtggaagttaccgagggcaaggaaaagcgcgtcatcaaagatgacgagcatccgcccaaggcgcgcctggacaagatcccgcagctcaagcccgccttccgtgaaggtggcacggtgaccgcagccaactccagctcaatttccgacggcgctgccgcgctggtactgatgcgtcgctccgaagccgaaaagcgcggccttgaagcactggcagtcatccatggccacgcggccttcgccgacaccccggcgctgttcccgaccgcgccgatcggcgccatcgacaagctgatgaaacgcaccggctggaacctggccgacgtcgacctgttcgagatcaacgaggcctttgccgtggtcaccctggcggccatgaaacaccttgacctgccccacgacaaggtcaacatccacggtggcgcctgcgcccttggccacccgatcggcgcttcgggcgcacgcatcctggtgaccctgctgtcggcccttcgccagaacaacctgcgccgcggcgtggcggccatctgcattggcggcggcgaggccacggccatggccgtcgaatgcctgtactga

SEQ ID NO: 92995 - protein, 397 aa, Pseudomonas putida
MTLANDPIVIVSAVRTPMGGLQGDLKSLTAPQLGSAAIRGAVERAGIDAASVEQVLFGCVLPAGLGQAPARQAALGAGLDKHTTCTTLNKMCGSGMQAAIMAHDLLVAGTAYVVVAGGMESMTNAPYLLDKARGGYRMGHGKIIDHMFMDGLEDAYDKGRLMGTFAEDCAQANAFSREAQDQFAITSLTRAQDAISSGRFAAEIVPVEVTEGKEKRVIKDDEHPPKARLDKIPQLKPAFREGGTVTAANSSSISDGAAALVLMRRSEAEKRGLEALAVIHGHAAFADTPALFPTAPIGAIDKLMKRTGWNLADVDLFEINEAFAVVTLAAMKHLDLPHDKVNIHGGACALGHPIGASGARILVTLLSALRQNNLRRGVAAICIGGGEATAMAVECLY

SEQ ID NO: 92996 - DNA, 1343 bp, Laccaria bicolor
  CDS (21)..(1250)
caccacactccatcacaaccatgtcaatccaacaagcttccacctcctccgcaaaagccgccattctccaaaagaacgacaacgacgtcgtcatagtctgtgcagtccgttccgccatcacaaagggcagaaaaggaggcttcaaagacaccaaacccgaactcatcctctcccacgtcctccgcgcagcatactccaaaatcagcctagaccccaagctcatcgaagatatcgcggtaggcaacgtactccctccgggaggaggcgcctccgccgcacgcatggcagccctccacgccggcatacccgtcgaaacctccatcaataccgtcaatcgccaatgttcgtcaggcctcacggccatcaaccagatcgcgaaccagattcgcgcagggcagatcgatattggtattggagccggcgtcgaatcaatgacacacggcttcggctcccgcgcagcccccgaagtatccgacgaagtcctctccaaccaagacgcagaagactgtctcctccccatggggatcacttccgaaaacgttgcggccgactaccacatcccccgatccactcaagacgccttttccgctaaatccttccaaaaagccgcagcagctaacaaagcaggtaaattcaagtctgaaatcgtccccatcttggcaaaatggatagacccaaagacggaggaggttaaagaggtgttggtgaatgaggatgatgggattagggagggggttacggctgaaagccttgcgaagattaaacctgcttttaagaaagatggcgtcactcatgctggcaacgcatcccaagtctcagacggcgcagccgcaataatcctcgcccgccgctccgtcgccacacgcctcggcctcccaatcctaggcaaattcgtaaacgcgtcaactatcggcgtcccaccccgaatcatgggcgtcggccccgcctacgccatcccgcgcgttctcaaactgacaggcctgagtttggacgatgtggatttctttgagattaatgaggcgtttgcgagtcaggcgttgttttcgattgatacgttgaagattgcgcatgagaaggttaatttgaatgggggtgctattgctttggggcatcctttggggtgtactggtgcgagacaggtagctacgggcttgaatatcgcgaagcagacgggtggaagggtcttcgtgacgagtatgtgtattgggtctgggatggggatggctgctgttttcgttagtgagcagtaagcctccaggaaggaaagggtgtattttgttattttaacaatgtgacttattgtttaatgcggtaaaaaaaaaaaaaaaaaaaaaaaaaaaaaa

SEQ ID NO: 92997 - protein, 409 aa, Laccaria bicolor
MSIQQASTSSAKAAILQKNDNDVVIVCAVRSAITKGRKGGFKDTKPELILSHVLRAAYSKISLDPKLIEDIAVGNVLPPGGGASAARMAALHAGIPVETSINTVNRQCSSGLTAINQIANQIRAGQIDIGIGAGVESMTHGFGSRAAPEVSDEVLSNQDAEDCLLPMGITSENVAADYHIPRSTQDAFSAKSFQKAAAANKAGKFKSEIVPILAKWIDPKTEEVKEVLVNEDDGIREGVTAESLAKIKPAFKKDGVTHAGNASQVSDGAAAIILARRSVATRLGLPILGKFVNASTIGVPPRIMGVGPAYAIPRVLKLTGLSLDDVDFFEINEAFASQALFSIDTLKIAHEKVNLNGGAIALGHPLGCTGARQVATGLNIAKQTGGRVFVTSMCIGSGMGMAAVFVSEQ

SEQ ID NO: 92998 - DNA, 1419 bp, Polyandrocarpa misakiensis
  CDS (1)..(1419)
atgtctggaattggacgcacactaaatctaaacagagtggcattatatcaagtatcttcaagatgttttggttgtacgagccatactgccgctgcggcaaaatcgaagaaaaccttggccagacaaggaaaaccaaacatagttcttgttgaaggtgtacgaaccccgtttttgatgtcgggaacgcaatataaaaacctgatgcctcatgatcttgcacgtgaagcgttgaaaggattgctaaagaggacagaaatggcgaccacagacgttgattatattgtactaggaacagtcatacaggagtccaaaacccctaatattgccagagaagcagctctaggggctgggttttcagagaggattccatcgcacacagtatcacaagcttgtatttcatccaaccaagctatcactacagccatgagtttgattgccagtggccagtgtcaagcagttatagccggcggagttgatttcatgtcggatgttccaatcagattcaacagaacaatgaggaagctgatgttagatgctaataaggccaaaaccatgggacaaaggttagggctagcgagcaaggttatattcagccctatgcgatacctatctccagagcttccagctattgctgagttttccactaatgaggtcatgggtcattctgcggatagattggctgccgcttttggaatcacaagacaagcccaagacgaatttgcataccgttcacactcgcttgctcataaagcgacagaagaaggcaaactctctgatgtgctggaattcaaagttccaggcgttgcagatctcgtaaaaaccgataatggaatccgaccaacaccattggaaaaaatggcgaaattgaaggcagcttttatcaaaccacacggcagtataacagcagcaaattcttcatttctgagtgacggaggaagcgcttgtttaattatggaagaaagcaaggctaaagcaatgggactgaaaccaaaggcttatttaagagagtttacatatgtgtcacaagatcccaaagaccaacttttacttggaccagcatatgccacacctattgttttggaaaaagcaggattgaaaatgtctgatattgacgtttttgaatatcatgaagcattcgcaggtcaaattcttgctaacttggctgctatggagtctgaatactttgctaaaaactacatgaacagatctacaaaggtcggtgctccccctattgaaaaattcaatttatggggtggatccctgtctattggtcacccgttcggggctactggatgtcgcttgacaacaaccgccgccaatagactcaaagcagaagataagcagttcgctctcttggcagcttgtgcggcaggaggcttgggccattctatgattgttgaaaggcatccagacaactga

SEQ ID NO: 92999 - protein, 472 aa, Polyandrocarpa misakiensis
MSGIGRTLNLNRVALYQVSSRCFGCTSHTAAAAKSKKTLARQGKPNIVLVEGVRTPFLMSGTQYKNLMPHDLAREALKGLLKRTEMATTDVDYIVLGTVIQESKTPNIAREAALGAGFSERIPSHTVSQACISSNQAITTAMSLIASGQCQAVIAGGVDFMSDVPIRFNRTMRKLMLDANKAKTMGQRLGLASKVIFSPMRYLSPELPAIAEFSTNEVMGHSADRLAAAFGITRQAQDEFAYRSHSLAHKATEEGKLSDVLEFKVPGVADLVKTDNGIRPTPLEKMAKLKAAFIKPHGSITAANSSFLSDGGSACLIMEESKAKAMGLKPKAYLREFTYVSQDPKDQLLLGPAYATPIVLEKAGLKMSDIDVFEYHEAFAGQILANLAAMESEYFAKNYMNRSTKVGAPPIEKFNLWGGSLSIGHPFGATGCRLTTTAANRLKAEDKQFALLAACAAGGLGHSMIVERHPDN

SEQ ID NO: 93000 - DNA, 1266 bp, Aspergillus oryzae
  CDS (1)..(1266)
atgtcttcgcctcaacaacgactatcttctatcgcaaaccagcttacgagccctggtgctgtgtccgcaaagtcaaagctcttggcgaagaaccctgacgatgtggtgattactctcgccctgcggactcctcttacaaaagccaggaagggtggcttgaaggatactactttggatgagcttctcatctcactgctgacggatgtgcgcgagcggtcgaaactcgatccaaaccttgtcgaagatgtctgtgtcggaaatgtccttgcccctggtcaagcttacatcgcccgttccgctgttttggcagctggtttccccgtcaccgccgcagcatcagttgccaaccgattctgttcttctggattgctggcgatccagaacattgccaaccagatcattgccggttcaattgatgttggtatcgcagttggagcagagagcatgagcaccaaccccgacaacggtgctccagagctatctgacaaaatcacatcacacccaatcgcctcgcagaacaagcaacccatgggtcagacctccgaaaatgtcgcatctcaatttggaatcactcgcgaaatgcacgaccagttcgctgccaagagctaccagaaagcagagcatgcccagaaggctggctggttcaatgacgagattgttcccgttcacaccaaggttaaggatcctaagactggagaagtgaagaatgttgtggtcgatcgtgatgatggtattcgttatggcacgactgccgaatcgctcggcaagattcgttcagccttccctcagtggaagcccagtgctacaacgggtggcaatgctagccaaattaccgacggcgccgcagcactcgtcctcatgaaacgatcccgcgcacaagagctgggccagccaattctggccaagttcggcggggccactattgccggcttagagccccgaatcatgggaattggtccctctatcgccattcctaagctcctctccaaggtcggcttgaccaaggatgacattgatatctttgagatcaacgaggcgtttgcatccatgggtacttactgtgttcaaaaactcggtcttgacgaatctaaggtgaaccctcggggtggtgcaattgctttcggccacccgttgggatgcacaggagcacgacaggttgttactgccctctccgaattgcggcgacagaacaagaaagtggcagtcacctccatgtgtgttggaactggtatgggcatggctggtattttcatctccgaggcttga

SEQ ID NO: 93001 - protein, 421 aa, Aspergillus oryzae
MSSPQQRLSSIANQLTSPGAVSAKSKLLAKNPDDVVITLALRTPLTKARKGGLKDTTLDELLISLLTDVRERSKLDPNLVEDVCVGNVLAPGQAYIARSAVLAAGFPVTAAASVANRFCSSGLLAIQNIANQIIAGSIDVGIAVGAESMSTNPDNGAPELSDKITSHPIASQNKQPMGQTSENVASQFGITREMHDQFAAKSYQKAEHAQKAGWFNDEIVPVHTKVKDPKTGEVKNVVVDRDDGIRYGTTAESLGKIRSAFPQWKPSATTGGNASQITDGAAALVLMKRSRAQELGQPILAKFGGATIAGLEPRIMGIGPSIAIPKLLSKVGLTKDDIDIFEINEAFASMGTYCVQKLGLDESKVNPRGGAIAFGHPLGCTGARQVVTALSELRRQNKKVAVTSMCVGTGMGMAGIFISEA

SEQ ID NO: 93002 - DNA, 1185 bp, Escherichia coli
  CDS (1)..(1185): transl_table=11
atgaaaaattgtgtcatcgtcagtgcggtacgtactgctatcggtagttttaacggttcactcgcttccaccagcgccatcgacctgggggcgacagtaattaaagccgccattgaacgtgcaaaaatcgattcacaacacgttgatgaagtgattatgggtaacgtgttacaagccgggctggggcaaaatccggcgcgtcaggcactgttaaaaagcgggctggcagaaacggtgtgcggattcacggtcaataaagtatgtggttcgggtcttaaaagtgtggcgcttgccgcccaggccattcaggcaggtcaggcgcagagcattgtggcggggggtatggaaaatatgagtttagccccctacttactcgatgcaaaagcacgctctggttatcgtcttggagacggacaggtttatgacgtaatcctgcgcgatggcctgatgtgcgccacccatggttatcatatggggattaccgccgaaaacgtggctaaagagtacggaattacccgtgaaatgcaggatgaactggcgctacattcacagcgtaaagcggcagccgcaattgagtccggtgcttttacagccgaaatcgtcccggtaaatgttgtcactcgaaagaaaaccttcgtcttcagtcaagacgaattcccgaaagcgaattcaacggctgaagcgttaggtgcattgcgcccggccttcgataaagcaggaacagtcaccgctgggaacgcgtctggtattaacgacggtgctgccgctctggtgattatggaagaatctgcggcgctggcagcaggccttacccccctggctcgcattaaaagttatgccagcggtggcgtgccccccgcattgatgggtatggggccagtacctgccacgcaaaaagcgttacaactggcggggctgcaactggcggatattgatctcattgaggctaatgaagcatttgctgcacagttccttgccgttgggaaaaacctgggctttgattctgagaaagtgaatgtcaacggcggggccatcgcgctcgggcatcctatcggtgccagtggtgctcgtattctggtcacactattacatgccatgcaggcacgcgataaaacgctggggctggcaacactgtgcattggcggcggtcagggaattgcgatggtgattgaacggttgaattaa

SEQ ID NO: 93003 - protein, 394 aa, Escherichia coli
MKNCVIVSAVRTAIGSFNGSLASTSAIDLGATVIKAAIERAKIDSQHVDEVIMGNVLQAGLGQNPARQALLKSGLAETVCGFTVNKVCGSGLKSVALAAQAIQAGQAQSIVAGGMENMSLAPYLLDAKARSGYRLGDGQVYDVILRDGLMCATHGYHMGITAENVAKEYGITREMQDELALHSQRKAAAAIESGAFTAEIVPVNVVTRKKTFVFSQDEFPKANSTAEALGALRPAFDKAGTVTAGNASGINDGAAALVIMEESAALAAGLTPLARIKSYASGGVPPALMGMGPVPATQKALQLAGLQLADIDLIEANEAFAAQFLAVGKNLGFDSEKVNVNGGAIALGHPIGASGARILVTLLHAMQARDKTLGLATLCIGGGQGIAMVIERLN

SEQ ID NO: 93004 - DNA, 1182 bp, Haemophilus influenzae
  CDS (1)..(1182): transl_table=11
atggaaaatgttgttattgttagtgcagttagaacaccgatcggcagctttaatggtgcattatcttccgtaagtgcggttgatttaggtgcaattgtgatacaagaagccatcaaacgtgccaacattgaaagtgcattagttaatgaagtcatcatggggaacgtattacaagcaggactagggcaaaatccagcccgtcaagcagcattaaaagcaggaatagagaaagaaatcccttctttaacaatcaataaagtatgtggatctggtctaaaaagtgtcgcattaggtgcacagtctattatcagtggtgatgctgatattgttgttgtgggtggcatggaaaatatgagccaagcaccttatcttttagatagcaaagtacgacaaggcgtcaaaatgggtaatctcacattaagggacacaatgattgaagacggactaacttgcgctagcaatcactatcatatggggattactgccgaaaatattgcagaacaatatggtattagccgccaagcacaagatgaactcgcattacgttcacaaaccttagcatctcaagccgtgcaattaggtgtatttgataaggaaattgtccctgttatggtaaaaactcgcaaaggtgacattattgtttcacgagacgagtatcctaaagcagatactacagctgaaggtttagctaaattaaaacctgctttcaaaaaagagggtactgtcaccgcaggtaacgcttctggcattaatgatggtgctgcagcacttattttagttagcgaaagcaaagctcatgcacttggattaaaagccattgcaaaaattagaagctatgccagcggtggggtagatccatctgttatgggattaggtccagttccagcaacgcaaaaagcattgaaaaaagcaggaataaatcttgatgatatcgatctgatagaagcaaatgaagcctttgcctcacagttcttaggtgttggcaaagatctcaatttggatatgaataaaaccaatattcatggtggagcgatcgcacttgggcatccaatcggcgcgagtggtgcaaggattttagtaacgttattgcacaatcttatcgaaaaagataaaaaacttggacttgctacactttgtattggcggtggtcaagggatttctatgattgtagaacgcttataa

SEQ ID NO: 93005 - protein, 393 aa, Haemophilus influenzae
MENVVIVSAVRTPIGSFNGALSSVSAVDLGAIVIQEAIKRANIESALVNEVIMGNVLQAGLGQNPARQAALKAGIEKEIPSLTINKVCGSGLKSVALGAQSIISGDADIVVVGGMENMSQAPYLLDSKVRQGVKMGNLTLRDTMIEDGLTCASNHYHMGITAENIAEQYGISRQAQDELALRSQTLASQAVQLGVFDKEIVPVMVKTRKGDIIVSRDEYPKADTTAEGLAKLKPAFKKEGTVTAGNASGINDGAAALILVSESKAHALGLKAIAKIRSYASGGVDPSVMGLGPVPATQKALKKAGINLDDIDLIEANEAFASQFLGVGKDLNLDMNKTNIHGGAIALGHPIGASGARILVTLLHNLIEKDKKLGLATLCIGGGQGISMIVERL

SEQ ID NO: 93006 - DNA, 1702 bp, Candida tropicalis
  CDS (266)..(1477): transl_table=12
tccacttcttgtctcgtttgatcaaaattgcttcgttccctcggcacgtcttccctcgctcgcacacgtcgtataaccaccactgaattttttttcactataaaagcgttagacacggactcgttttctgccatacacactaaccatagttcattccaaaaattttttttgcttctttgacaacactagagtattgcctcctacttgttgctaaagaactatccattcacctatagatatatatattccacacactcacacaactatggctctcccaccagtctacatcgtctccacagcaagaaccccaattggttccttccaaggttcgttatcttccttgacctactccgatttgggtgcccacgctgttaaggcagccttagccaaagtcccacagatcaagccacaagacgttgacgagatcgtttttggtggcgtcttgcaagccaacgttggtcaggcaccagccagacaagtcgccttgaaggcaggcttgccagactccatcgtcgcctccaccattaacaaagtctgtgcctccggtatgaaggccgtcattatcggtgcccaaaacatcatctgtggcaccagtgatatcgtcgttgttggtggtgccgaatccatgtctaacactccatactacttgccaagcgccagaagcggggccagatacggtgacgccatcatggttgacggtgtccagaaggatggtttgttggatgtttacgaagaaaaattaatgggtgtcgctgctgaaaaatgtgccaaggaccacggattcagcagagaagaccaggacaactttgccatcaactcttacaagaaggctggtaaggctttgagtgaaggcaagttcaaatccgaaatcgctccagtcactatcaaaggattcagaggcaagccggatactgttattgaaaacgatgaagagattggcaaattcaacgaagaaagactcaagtctgccagaactgtcttccaaaaggaaaacggtaccgttactgctccaaacgcttctaagttgaacgatggtggtgctgccttagtcttggtttctgaagccaagttgaagcaattgggcttgaagccattggccaagatctccggttggggtgaagctgccagaactccattcgatttcacgattgccccagctttggctgttccaaaagctgtcaagcacgccggtttgaccgttgacagagtcgacttctttgaattgaacgaagccttctccgttgttggtttggccaacgctgaattggtcaacatcccattggaaaaattgaacgtctacggtggtgctgttgccatgggtcacccattgggttgcagtggtgctagaattattgtcactttgttgtccgtcttgacccaagaaggcggtagattcggtgttgctggtgtctgtaatggcggtggtggtgcgtctgctgtcgttattgaaaagattgacgccgacgccaagttgtaaaaagatttagagaaagaggtaatgcgaatctcaatattgttttccgcgtatagagaagtgcagaagaggcgagaaaatttatacaaaatagctacatatttgctgtctacaatacacacatatacagagcaaacagccagctatgtcgtcagattacttgtggacagaggacgaattgacctcgtttgaaatcgaacaccggttcaacgacaccacaatcacatt

SEQ ID NO: 93007 - protein, 403 aa, Candida tropicalis
MALPPVYIVSTARTPIGSFQGSLSSLTYSDLGAHAVKAALAKVPQIKPQDVDEIVFGGVLQANVGQAPARQVALKAGLPDSIVASTINKVCASGMKAVIIGAQNIICGTSDIVVVGGAESMSNTPYYLPSARSGARYGDAIMVDGVQKDGLLDVYEEKLMGVAAEKCAKDHGFSREDQDNFAINSYKKAGKALSEGKFKSEIAPVTIKGFRGKPDTVIENDEEIGKFNEERLKSARTVFQKENGTVTAPNASKLNDGGAALVLVSEAKLKQLGLKPLAKISGWGEAARTPFDFTIAPALAVPKAVKHAGLTVDRVDFFELNEAFSVVGLANAELVNIPLEKLNVYGGAVAMGHPLGCSGARIIVTLLSVLTQEGGRFGVAGVCNGGGGASAVVIEKIDADAKL

SEQ ID NO: 93008 - DNA, 1707 bp, Candida tropicalis
  CDS (272)..(1483): transl_table=12
tccacttcttgtctcgtttggtcaaaaatccttcgttccctcggcacgtcttccctcgctcgcacacgtcgtataaccaccactgaatttttttttttcactataaaaacgttaggcacagactcgttttctgccatacacactaaccatagttcattccaaaaatttttttttgtttcttttttacactagagtattgcttcctacttgttgctagagaactatcctatagatatatatatatatatatattccacacactcacacaactatgaccctcccaccagtctacatcgtctccacagcaagaactccaattggttccttccaaggttcgttatcttccttgacctactccgatttgggtgcccacgccgttaaggcagctttagccaaggtcccacagatcaagccacaggacgtcgacgagatcgtctttggtggtgtcttgcaagccaacgttggtcaggcaccagccagacaagtcgccttgaaggcaggcttgccagactctatcattgcctccaccattaacaaagtctgtgcctccggtatgaaggccgtcattatcggtgcccaaaacatcatctgtggaaccagtgacatcgtcgttgttggtggtgccgaatccatgtctaacactccatactacttgccaagcgccagaagcggggccagatacggtgacgccgtcatggttgatggtgtccagaaggatggtttgttggatgtctacgaagaaaaattgatgggtgttgctgctgaaaagtgtgccaaggaccacggattcagcagagaagaccaggacaactttgccatcaactcttacaagaaggctggcaaggctttgagtgaaggtaagttcaaatcagaaatcgccccagtcaccattaaaggattcagaggcaagccagatactgttattgaaaatgatgaagagattggcaaattcaacgaagacagactcaagtctgccagaactgtcttccaaaaggaaaacggtactgttactgctccaaacgcttctaaattgaacgatggtggtgctgccttggtcttggtttctgaagccaagttgaagcaattgggcttgaagccattggccaagatctctggttggggtgaagctgccagaactccattcgatttcaccattgccccagctttggctgttccaaaggctgtcaagcacgctggtttgaccgttgacagagtcgacttctttgaattgaacgaagccttctccgttgttggtttggccaacgctgaattggtcaagatcccattggaaaaattgaacgtctacggtggtgctgtcgccatgggtcacccattgggttgcagtggtgctagaattattgtcaccttgttgtccgtcttgacccaagaaggcggtagatttggtgctgctggtgtctgtaacggtggtggtggtgcctctgccatcgtcattgaaaagattgactccgatgccaagttgtaaaaaggtttagaggggtagtgcgaacctcaatattgttttgcgcgtatagagaagagcaaaggaggcaagaaaatttatacaaaatagctacatatttacttgctacaatacacacacatatacagagagaaacaaccagctatgtcgtcagactacttgtggacagaggacgaattgacctcgtttgaaatcgaacatcggttcaacgacaccacaatcacatt

SEQ ID NO: 93009 - protein, 403 aa, Candida tropicalis
MTLPPVYIVSTARTPIGSFQGSLSSLTYSDLGAHAVKAALAKVPQIKPQDVDEIVFGGVLQANVGQAPARQVALKAGLPDSIIASTINKVCASGMKAVIIGAQNIICGTSDIVVVGGAESMSNTPYYLPSARSGARYGDAVMVDGVQKDGLLDVYEEKLMGVAAEKCAKDHGFSREDQDNFAINSYKKAGKALSEGKFKSEIAPVTIKGFRGKPDTVIENDEEIGKFNEDRLKSARTVFQKENGTVTAPNASKLNDGGAALVLVSEAKLKQLGLKPLAKISGWGEAARTPFDFTIAPALAVPKAVKHAGLTVDRVDFFELNEAFSVVGLANAELVKIPLEKLNVYGGAVAMGHPLGCSGARIIVTLLSVLTQEGGRFGAAGVCNGGGGASAIVIEKIDSDAKL

SEQ ID NO: 93010 - DNA, 1736 bp, Arabidopsis thaliana
  CDS (188)..(1399)
tagttatcgtcgctgattcaccaacaacaacaacatcacaagaaagcgtcctcttttataggaccctctgtccctgtttctctctccagttttattgtagaattcgctgtcattttcacaacgactcacttctttcagctctctccattcggcgctctcttctggaattgaagaatcaagattagcaatggcccatacatcagaatctgtgaatcctagagatgtttgcattgtgggtgttgcacgtactccaatgggtggctttctcggatctctttcatctttacctgccacaaagcttggatctttagctattgcagctgctttgaagagagcaaatgttgatccagctcttgttcaagaagttgtctttggcaatgttcttagtgctaatttgggtcaagctcctgctcgtcaagctgctttaggtgcaggaatccctaactctgttatctgtactacagttaacaaggtttgtgcatcaggcatgaaagcggtaatgattgctgctcaaagtatccagttagggatcaatgatgtagttgtggcgggtggtatggaaagcatgtctaatacaccaaaatatttggcagaagcaaggaagggatctcgttttggtcatgattctttagtagatggaatgttgaaggatggactatgggatgtctataacgactgtgggatgggaagctgtgcagaattatgcgctgagaagtttcagattacaagggagcagcaagatgactatgcagttcagagttttgagcgtggtattgctgcccaggaagctggcgccttcacatgggaaatcgtcccggttgaagtttctggaggaagaggtaggccatcaaccattgttgacaaggacgaaggtcttgggaagtttgatgctgcaaaattgaggaaactccgtcctagtttcaaagagaatggagggactgttacagctggaaatgcgtctagcataagtgatggtgcagctgcccttgtcctagtgagcggagagaaggctcttcagctaggacttctagtattagcaaaaattaaagggtatggtgacgcagctcaggaaccagagtttttcactactgctcctgctcttgctataccaaaagccattgcacatgctggtttggaatcttctcaagttgattactatgagatcaatgaagcatttgcagttgtagcacttgcaaatcaaaagctactcgggattgctccagagaaagtgaacgtaaatggaggagctgtctccttaggacaccctctaggctgcagtggcgcccgtattctaatcacgttgcttgggatactaaagaagagaaacggaaagtacggtgtgggaggagtgtgcaacggaggaggaggtgcttctgctctagttcttgagctcctttgatgcattatgaatccaggttggtaaactaaatagatggatctatctctcatccaacttccatgagtcagtcattgcactttacgttttatgttagttggtctctcaataaaggagtgatcgttgatgttgttaagtctatttatttatatgaactcggcttctttttttctcttaccggtgacagtcagttattgaatcatggaccgatttaccgtagttaatgatttatcctcatgtactcattaaaacgtcgaccaagatttgacatttgatggataaatttaagtacacaatgtgtatgtaagacaagaaaataataataattggacatttctgt

SEQ ID NO: 93011 - protein, 403 aa, Arabidopsis thaliana
MAHTSESVNPRDVCIVGVARTPMGGFLGSLSSLPATKLGSLAIAAALKRANVDPALVQEVVFGNVLSANLGQAPARQAALGAGIPNSVICTTVNKVCASGMKAVMIAAQSIQLGINDVVVAGGMESMSNTPKYLAEARKGSRFGHDSLVDGMLKDGLWDVYNDCGMGSCAELCAEKFQITREQQDDYAVQSFERGIAAQEAGAFTWEIVPVEVSGGRGRPSTIVDKDEGLGKFDAAKLRKLRPSFKENGGTVTAGNASSISDGAAALVLVSGEKALQLGLLVLAKIKGYGDAAQEPEFFTTAPALAIPKAIAHAGLESSQVDYYEINEAFAVVALANQKLLGIAPEKVNVNGGAVSLGHPLGCSGARILITLLGILKKRNGKYGVGGVCNGGGGASALVLELL

SEQ ID NO: 93012 - DNA, 1248 bp, Arabidopsis thaliana
  CDS (1)..(1248)
atggctccgcctgtctctgatgattccctacagcctcgagatgtttgtgttgtgggagtggcgcgaacgcctataggggacttccttggctccctctcgtctttgactgctacaagacttgggtccatagccatccaagccgcacttaagagagcacatgttgatccggcccttgtggaagaggtcttctttggcaatgtcttaactgccaatcttgggcaagcaccagcaagacaggctgcacttggtgctgggattccctattctgtgatctgcaccactatcaacaaagtttgtgctgcaggaatgaaatctgtaatgctagcgtctcaaagtatccagctcggcttgaatgatattgttgttgctggtgggatggagagcatgtcaaacgtacctaagtacctcccggacgcaagaaggggttctcgattaggtcatgatactgttgttgatggtatgatgaaagatggactttgggatgtctataatgactttggaatgggagtttgtggagaaatatgcgctgaccagtaccgtattacaagagaagaacaggatgcttatgctatccagagctttgagcgtggtattgctgcgcaaaacactcagttgttcgcttgggaaattgttccggtcgaagtttccactggaagagggaggccttcagttgttattgacaaggatgaaggattggggaagtttgatgcagccaagttaaaaaagcttagaccaagtttcaaggaggatgggggatcagtcactgctggaaatgcatcaagcataagtgatggtgcggcagcgttagtgctagtgagtggagagaaggctcttgagcttggactgcatgttatcgctaagattagaggatacgctgatgctgctcaggcaccagagttattcacaaccacgccagctcttgctattcctaaagctataaagcgggctggtttggatgcatctcaagtggattattatgaaataaacgaagcattttctgtggtagctctagccaatcagaaactactgggattagatcctgaacggctcaatgcgcatggaggggctgtttcactgggacatccattgggctgtagcggtgctcgtatcttggtcacattattgggggtgttgagagcaaagaagggaaagtatggagtggcatcaatatgcaacggaggaggaggagcatcagcacttgtccttgagttcatgtcggagaagacaatcggatattcggcactctga

SEQ ID NO: 93013 - protein, 415 aa, Arabidopsis thaliana
MAPPVSDDSLQPRDVCVVGVARTPIGDFLGSLSSLTATRLGSIAIQAALKRAHVDPALVEEVFFGNVLTANLGQAPARQAALGAGIPYSVICTTINKVCAAGMKSVMLASQSIQLGLNDIVVAGGMESMSNVPKYLPDARRGSRLGHDTVVDGMMKDGLWDVYNDFGMGVCGEICADQYRITREEQDAYAIQSFERGIAAQNTQLFAWEIVPVEVSTGRGRPSVVIDKDEGLGKFDAAKLKKLRPSFKEDGGSVTAGNASSISDGAAALVLVSGEKALELGLHVIAKIRGYADAAQAPELFTTTPALAIPKAIKRAGLDASQVDYYEINEAFSVVALANQKLLGLDPERLNAHGGAVSLGHPLGCSGARILVTLLGVLRAKKGKYGVASICNGGGGASALVLEFMSEKTIGYSAL

SEQ ID NO: 93014 - DNA, 1363 bp, Arabidopsis thaliana
  CDS (1)..(1332)
atggaaaaagcaacggagagacaaaggatactgcttcgtcatcttcaaccttcgtcatcttccgacgcctctctctctgcctcagcttgcttgtccaaagacagtgctgcatatcaatatggagatgatgttgtcattgtcgcggcacaaaggactgcactttgcaaggcaaaacgtggcagcttcaaggatacatttccagacgagttgcttgcctctgtattgagagcattgatagagaaaactaatgtaaacccaagtgaagttggtgacattgtagtgggtactgttttgggaccaggatctcagagagccagtgaatgcaggatggctgcgttctatgctggtttccccgaaactgttcccatcagaaccgtgaacagacagtgttcatctgggcttcaggctgttgctgatgttgccgctgccataaaagctggtttttatgacattggtattggagctgggctggagtccatgacaactaatccaaggggatggaaaggatcagtcaacccaaatgtgaagaagtttgaacaagctcacaattgccttcttccaatgggtattacttcagaaaatgtagcacaccggtttaatgtttcaagggaggagcaggatcaagctgctgttgattctcacagaaaggctgcttctgctactgcttccggaaagtttaaggatgagataacccctgtaaaaaccaagattgttgacccaaagacaggtgatgagaaacccataacagtttctgtggatgatgggattcgacctaacacaaccctttccggacttgcaaagctgaagccagtgtttaaggaagacggaaccacaactgctgggaattctagccaattaagtgacggtgctggagctgttctccttatgaggagaaatgtcgcaatgcagaaaggccttcccattcttggtgtattcaggacattttctgcagttggtgtggacccagccatcatgggggttgggccagccgttgccattcctgctgcagtcaaggcagctggtttagaactcaatgacgtcgacttgtttgagattaacgaggcatttgcatctcagtttgtttattgtcggaacaagctcgggctagacgcggaaaagatcaatgtcaatggaggagccatagccattggacatcccttgggcgctacaggagccagatgcgttgcgacgctgctgcatgagatgaaacgacgtggtaaagactgtcgttttggcgtagtgtcaatgtgtataggttcgggaatgggagcagccgctgtgtttgagagaggaggcggtgtggatgagctctgtgatgtccggaaagtctaatgacaataaggccttttgaccaaggacccta

SEQ ID NO: 93015 - protein, 443 aa, Arabidopsis thaliana
MEKATERQRILLRHLQPSSSSDASLSASACLSKDSAAYQYGDDVVIVAAQRTALCKAKRGSFKDTFPDELLASVLRALIEKTNVNPSEVGDIVVGTVLGPGSQRASECRMAAFYAGFPETVPIRTVNRQCSSGLQAVADVAAAIKAGFYDIGIGAGLESMTTNPRGWKGSVNPNVKKFEQAHNCLLPMGITSENVAHRFNVSREEQDQAAVDSHRKAASATASGKFKDEITPVKTKIVDPKTGDEKPITVSVDDGIRPNTTLSGLAKLKPVFKEDGTTTAGNSSQLSDGAGAVLLMRRNVAMQKGLPILGVFRTFSAVGVDPAIMGVGPAVAIPAAVKAAGLELNDVDLFEINEAFASQFVYCRNKLGLDAEKINVNGGAIAIGHPLGATGARCVATLLHEMKRRGKDCRFGVVSMCIGSGMGAAAVFERGGGVDELCDVRKV

SEQ ID NO: 93016 - DNA, 1389 bp, Arabidopsis thaliana
  CDS (1)..(1389)
atggagaaagcgatcgagagacaacgcgttcttcttgagcatctccgaccttcttcttcttcttcgcacaattacgaggcttctctatctgcttctgcttgcttggctggggacagtgctgcatatcagaggacctctctctatggagatgatgttgtcattgtcgcggcacataggactccactatgcaagtccaaacgtggcaatttcaaggatacatatcccgatgatttgctcgcacctgttttgagggcattgatagagaagacgaatctaaacccaagtgaagtaggtgacattgttgtgggtactgttttggcacctggatctcagagagccagtgaatgcaggatggctgcgttctatgctggtttccctgaaaccgtggctgtcagaactgtgaatagacagtgctcatctgggcttcaggctgttgctgatgtagccgctgccattaaagcgggattttatgacattggtatcggggctggtttggagtccatgactaccaatccaatggcatgggaagggtcagtcaacccagcggtgaagaagtttgcacaagcgcagaattgtcttcttcctatgggtgttacgtcagaaaatgtagcacaacgctttggtgtctcaaggcaggagcaagatcaagctgctgttgactcgcacagaaaggcagctgctgctactgctgctggtaaattcaaggatgagatcattcctgttaagaccaagcttgttgacccgaagactggtgatgagaaacccattacagtttctgttgatgatggtatccgaccaaccacaactcttgcttctcttgggaagctgaagccagtgtttaagaaggatggcaccactactgctggaaattccagccaagtaagtgatggtgcaggagcggttctcctaatgaagagaagtgttgcaatgcaaaaaggacttcccgttcttggtgtattcaggacatttgctgcagttggtgttgaccctgcaatcatgggtatcggtccagcagttgccattcctgctgcagttaaggcggctggtttagaacttgatgacatcgacttgtttgagatcaatgaggcatttgcatctcagtttgtttattgccgtaacaaattgggacttgacccagagaaaatcaatgtcaacggaggtgcaatggccataggccatcctttgggcgctacaggagcgcgttgtgttgctacattgttgcacgagatgaaacgccgtggtaaagactgccgttttggagtagtgtcaatgtgcattgggacggggatgggtgcagcagctgtgtttgagagaggagatggagttgatgagcttcgcaacgcaaggaaagttgaagcgcaaggtcttttgtccaaggacgctcgctag

SEQ ID NO: 93017 - protein, 462 aa, Arabidopsis thaliana
MEKAIERQRVLLEHLRPSSSSSHNYEASLSASACLAGDSAAYQRTSLYGDDVVIVAAHRTPLCKSKRGNFKDTYPDDLLAPVLRALIEKTNLNPSEVGDIVVGTVLAPGSQRASECRMAAFYAGFPETVAVRTVNRQCSSGLQAVADVAAAIKAGFYDIGIGAGLESMTTNPMAWEGSVNPAVKKFAQAQNCLLPMGVTSENVAQRFGVSRQEQDQAAVDSHRKAAAATAAGKFKDEIIPVKTKLVDPKTGDEKPITVSVDDGIRPTTTLASLGKLKPVFKKDGTTTAGNSSQVSDGAGAVLLMKRSVAMQKGLPVLGVFRTFAAVGVDPAIMGIGPAVAIPAAVKAAGLELDDIDLFEINEAFASQFVYCRNKLGLDPEKINVNGGAMAIGHPLGATGARCVATLLHEMKRRGKDCRFGVVSMCIGTGMGAAAVFERGDGVDELRNARKVEAQGLLSKDAR

SEQ ID NO: 93018 - DNA, 1374 bp, Arabidopsis thaliana
  CDS (1)..(1374)
atggagagagctatggaaagacaaaagatattgcttcgtcatctcaatccagtttcttcttctaattcttctcttaaacatgaaccttctcttctgtctcctgtgaattgtgtttctgaagtttccccaatggctgcttttggagatgacattgtgattgtagcggcatatcgtaccgccatttgcaaagcgagacgtggaggtttcaaagacactcttcctgatgatcttcttgcttctgttcttaaggctgtagtggaaagaacatctttggatccaagtgaagttggtgatatcgttgttggtaccgtgatagcgcctggttctcagagagcaatggagtgtagagttgcagcttattttgctggttttcctgactccgtgccagttagaactgtcaatagacaatgctcatcaggactacaagcagttgctgatgttgctgcttccattagagctggttattacgacattggtattggtgctggagtggaatcaatgtcaactgatcatattcctggaggcggctttcatggctctaatccaagagcacaggatttcccaaaagcccgtgattgtttgcttccaatgggaattacttctgaaaacgttgcagaaaggttcggtgtcacaagagaagagcaagatatggctgcggtggagtctcacaaacgcgctgcagctgcaatcgcgtctggtaaactcaaggatgaaatcattcctgttgctactaagattgtggaccctgagactaaagcagagaaggcaatcgtcgtatctgttgatgacggtgtacgtccaaactcaaacatggcagatttggcaaagctgaagactgtctttaaacagaacggttccaccacagctggcaatgctagtcagatcagtgatggtgctggagcagtactgctaatgaagagaagtttggctatgaagaagggacttcccattcttggagtattcaggagttttgctgttactggtgtggaaccatctgtaatgggtattggtccagctgttgccattcccgctgcaactaagctcgcagggctcaacgtcagcgatattgatctattcgagatcaatgaggcatttgcatctcagtatgtgtactcttgcaagaagttagagctggatatggaaaaggtcaatgttaatggaggagccattgctattggccatcccctgggtgctacaggagctcgatgtgttgcgacattgttgcacgagatgaagcggagaggaaaagattgccgctttggagtaatctcaatgtgcataggcactggaatgggagctgcagctgtttttgagaggggagactctgttgataacttgtccaacgctcgtgtggctaacggggatagtcattag

SEQ ID NO: 93019 - protein, 457 aa, Arabidopsis thaliana
MERAMERQKILLRHLNPVSSSNSSLKHEPSLLSPVNCVSEVSPMAAFGDDIVIVAAYRTAICKARRGGFKDTLPDDLLASVLKAVVERTSLDPSEVGDIVVGTVIAPGSQRAMECRVAAYFAGFPDSVPVRTVNRQCSSGLQAVADVAASIRAGYYDIGIGAGVESMSTDHIPGGGFHGSNPRAQDFPKARDCLLPMGITSENVAERFGVTREEQDMAAVESHKRAAAAIASGKLKDEIIPVATKIVDPETKAEKAIVVSVDDGVRPNSNMADLAKLKTVFKQNGSTTAGNASQISDGAGAVLLMKRSLAMKKGLPILGVFRSFAVTGVEPSVMGIGPAVAIPAATKLAGLNVSDIDLFEINEAFASQYVYSCKKLELDMEKVNVNGGAIAIGHPLGATGARCVATLLHEMKRRGKDCRFGVISMCIGTGMGAAAVFERGDSVDNLSNARVANGDSH

SEQ ID NO: 93020 - DNA, 1640 bp, Candida tropicalis
  CDS (166)..(1392): transl_table=12
tcacattctccccacacattcccaccctcaagatttcacaggcaaaaactgcaaatatatataaatctacaaccaattctttccccagatggaaaatctaatttttgttcaccctttttctttctcctgctatcactgctactgcacatattcaacaccacaaccatggatagattaaaccaattaagcggccaattaaagccaaacgccaaacaatccatcttgcaaaaaaacccagacgacgtcgttatcgttgctgcatacagaaccgccatcggtaaaggtttcaaaggttccttcagaagcgtccgctctgaattcatcttgactgagttcttgaaagaattcattaaaaagaccaacatcgacccatctttgattgaagatgtcgctatcggtaacgtcttgaaccaggccgccggtgccaccgaacacagaggtgcttgtttggctgccggtatcccatacaccgccgctttcatcgccgtcaacagattctgctcatccggtttgatggccatctccgacattgccaacaagatcaagactggtgaaatcgagtgtggtttggctggtggtgccgaatccatgtccaccaactaccgtgatcctagagttgccccaagaatcgacccacacttggctgacgacgcccaaatggaaaagtgtttgattcctatgggtatcaccaacgaaaacgttgctaaccaattcaacatctccagagaaagacaagacgagttcgccgccaagtcctacaacaaggctgccaaggctgttgccgctggtgctttcaagagcgaaatcttgccaatcagatccatcatcagaaactctgacggtaccgaaaaggaaatcattgtcgacactgacgaaggtccaagagaaggtgtcaccgctgaatccttgggcaagttgagaccagctttcgacggtaccaccactgccggtaacgcttcccaagtctctgacggtgctgccgccgtcttgttgatgaagagaagcttggctgaagccaagggatacccaatcattggtaagtacgtcctttgttccaccgccggtgttcctccagaaattatgggtgttggtccagcctacgctatcccagaagtcttgaagagaactggtttgactgttgacgacattgatgttttcgaaatcaacgaagcctttgctgctcaatgtctctactctgctgaacaagtcaatgtgcctgaagagaagttgaacatcaacggtggtgccattgccttgggccacccattgggtgaaaccggtgctcgtcaatacgccaccatcatcccattgttaaaaccaggtcaaattggattgacttcaatgtgtattggttctggtatgggttctgcttctattttggttagagaatagagaggaagcggaagtgttttatagtcattgaatgaatatatgtttataaaagaaagcaagatgagtctaccacacgagatgatgtatagtctacttttatttataattatatgtactaattaaagtataacaagtatctaaacatgacttgctaaacaaagtataaaacattaaaaaaccagctaaaccaaaaaaaaaaaaaaaataacccagaatgaattaaataccttacttgaaataaacattag

SEQ ID NO: 93021 - protein, 408 aa, Candida tropicalis
MDRLNQLSGQLKPNAKQSILQKNPDDVVIVAAYRTAIGKGFKGSFRSVRSEFILTEFLKEFIKKTNIDPSLIEDVAIGNVLNQAAGATEHRGACLAAGIPYTAAFIAVNRFCSSGLMAISDIANKIKTGEIECGLAGGAESMSTNYRDPRVAPRIDPHLADDAQMEKCLIPMGITNENVANQFNISRERQDEFAAKSYNKAAKAVAAGAFKSEILPIRSIIRNSDGTEKEIIVDTDEGPREGVTAESLGKLRPAFDGTTTAGNASQVSDGAAAVLLMKRSLAEAKGYPIIGKYVLCSTAGVPPEIMGVGPAYAIPEVLKRTGLTVDDIDVFEINEAFAAQCLYSAEQVNVPEEKLNINGGAIALGHPLGETGARQYATIIPLLKPGQIGLTSMCIGSGMGSASILVRE

SEQ ID NO: 93022 - DNA, 1658 bp, Candida tropicalis
  CDS (166)..(1392): transl_table=12
tcgcattctccccacacattcccaccctcaagatttcacaggcaaaaactgcaaatatatataaatctacaaccaattctttccccagatggaaaatctaatttttgttcaccctttttctttctcccactatcactgctactgcacatattcaacatcacaaccatggatagattaaaccaattaagcggccaattaaagccaaacgctaaacaatccatcttgcaaaaaaacccagacgacgtcgttatcgttgctgcatacagaaccgccatcggtaagggtttcaaaggttccttcagaaacgtccactctgaattcatcttgactgagttcttgaaagaatttatcaaaaagaccaacatcgacccatctttgattgaagatgtcgctatcggtaacgtcttgaaccaggccgcaggtgccaccgaacacagaggtgcttgtttggctgccggtatcccatacaccgccgccttcatcgctgtcaacagattctgttcctccggtttgatggccatctccgacattgccaacaagatcaagactggtgaaatcgagtgtggtttggctggtggtgccgaatccatgtccaccaactaccgtgacccaagagttgccccaagaatcgacccacatttggctgacgacgcccaaatggaaaagtgtttgattcctatgggtatcaccaacgaaaacgttgctaaccaattcaacatctccagagaaagacaagacgagtttgccgccaagtcctacaacaaggctgccaaggcggttgcctctggtgctttcaagagtgaaatcttgccaatcagatccatcatcagaaactctgacggtaccgaaaaggaaatcattgtcgacactgacgaaggtccaagagaaggtgtcaccgctgaatctttgggcaagttgagaccagctttcgacggtaccaccactgcaggtaacgcttctcaagtctctgacggtgccgccgccgtcttgttgatgaagagaagcttggctgaagccaagggatacccaatcattggtaagtacgtcctttgttccaccgccggtgttccaccagaaatcatgggtgttggtccagccttcgctatcccagaagtcttgaagagaactggcttgactgttgacgacattgatgttttcgaaatcaacgaagcctttgccgctcaatgtctttactctgctgaacaagtcaatgtgcctgaagaaaagttgaacatcaacggtggtgccattgccttgggccatccattgggtgaaaccggtgctcgtcaatacgccaccatcatcccattgttaaagccaggtcaaattggattgacttcaatgtgtattggttctggtatgggttctgcttctattttggttagagaatagagaggaagcggtaggtcaaaagtgttttatagtcattgaatgaatatatgtttataaaagaaaacaagatgaggccacgacgcaagataatgtatagtctactttcatttatcattatatgtactaattaaagtataacaagtatctaaacatgatttgctaaacaaagtataaaacattaaaaaagcagccaaaccaaaaaaaaaccaaaaaaaacccagaataaataagaatgaaataaataccttacttgaaataaacattag

SEQ ID NO: 93023 - protein, 408 aa, Candida tropicalis
MDRLNQLSGQLKPNAKQSILQKNPDDVVIVAAYRTAIGKGFKGSFRNVHSEFILTEFLKEFIKKTNIDPSLIEDVAIGNVLNQAAGATEHRGACLAAGIPYTAAFIAVNRFCSSGLMAISDIANKIKTGEIECGLAGGAESMSTNYRDPRVAPRIDPHLADDAQMEKCLIPMGITNENVANQFNISRERQDEFAAKSYNKAAKAVASGAFKSEILPIRSIIRNSDGTEKEIIVDTDEGPREGVTAESLGKLRPAFDGTTTAGNASQVSDGAAAVLLMKRSLAEAKGYPIIGKYVLCSTAGVPPEIMGVGPAFAIPEVLKRTGLTVDDIDVFEINEAFAAQCLYSAEQVNVPEEKLNINGGAIALGHPLGETGARQYATIIPLLKPGQIGLTSMCIGSGMGSASILVRE

SEQ ID NO: 93024 - DNA, 1245 bp, Yarrowia lipolytica
  CDS (1)..(1245)
atggaccgacttaacaacctcgccacccagctcgagcagaaccccgccaagggcctcgacgctatcacctccaagaaccccgatgacgttgtcatcaccgccgcctaccgaactgcccacaccaagggaggcaagggtctgttcaaggacacctcttcttccgagctgctcgcctctctgctggagggcctcgtcaaggagtccaagatcgaccccaagctcatcggtgatgtcgtctgcgggaacgttctcgctgccggtgccggtgccactgagcaccgagctgcctgccttgttgccggcatccccgagaccgttcccttcgtcgctctcaaccgacagtgctcctctggtctgatggccgtcaacgacgttgccaacaagatccgagccggccagattgacattggtatcggctgtggtgtcgagtccatgtccaaccagtacggtcccaactccgtcacccccttctccaacaagttccagaacaacgaggaggctaagaagtgcctgatccccatgggtatcacttccgagaacgttgccgccaagtacaacgtgtcccgaaaggcccaggacgcctttgctgccaagtcctacgagaaggccgccgctgcccaggccgccggcaagttcgaccaggagatcctccccatcaagaccactgttctcgatgatgatgacaacgagaaggaggttaccgtcaacaaggacgacggtatccgacctggtgtcaccgccgagaagctcggcaagctcaagcctgctttctccgccgagggaaccacccacgctggtaacgcctctcagatctccgacggtgccggagccgttctcctcatgcgacgatctgttgccgagaagcttggccagcccatccttgccaagtttgtccactgcaagaccgtcggtgttccccccgagctcatgggaattggccccgcttacgccattcctgctgtccttgaggaccttggtctgaccgtcaacgacgttgacgttttcgagatcaacgaggctttcgcttcccaggctctgttctccatccagcattgtggaatcgacgagtccaaggtcaacccccgaggtggtgccattgctattggccaccctctgggagccaccggtgctcgacagtttgccactctgctctccgagcttaaggagtctggcaagaaggtcggtgtcacctccatgtgcattggtaccggtatgggtgccgcttctctggttgttgccgagtaa

SEQ ID NO: 93025 - protein, 414 aa, Yarrowia lipolytica
MDRLNNLATQLEQNPAKGLDAITSKNPDDVVITAAYRTAHTKGGKGLFKDTSSSELLASLLEGLVKESKIDPKLIGDVVCGNVLAAGAGATEHRAACLVAGIPETVPFVALNRQCSSGLMAVNDVANKIRAGQIDIGIGCGVESMSNQYGPNSVTPFSNKFQNNEEAKKCLIPMGITSENVAAKYNVSRKAQDAFAAKSYEKAAAAQAAGKFDQEILPIKTTVLDDDDNEKEVTVNKDDGIRPGVTAEKLGKLKPAFSAEGTTHAGNASQISDGAGAVLLMRRSVAEKLGQPILAKFVHCKTVGVPPELMGIGPAYAIPAVLEDLGLTVNDVDVFEINEAFASQALFSIQHCGIDESKVNPRGGAIAIGHPLGATGARQFATLLSELKESGKKVGVTSMCIGTGMGAASLVVAE

SEQ ID NO: 93026 - DNA, 1254 bp, Saccharomyces cerevisiae
  CDS (1)..(1254)
atgtctcaaagactacaaagtatcaaggatcatttggtggagagcgccatgggtaagggtgaatcgaagaggaagaactcgttgctggagaaaagacccgaagatgtagttattgtggctgctaacaggtctgccatcggtaaaggttttaaaggtgccttcaaagatgtaaacacagactacttattatacaactttctcaatgagttcatcgggaggtttccggaacctttgagggctgatttgaacttaatcgaagaagttgcctgtggaaatgttctcaatgttggagccggtgctacagaacacagggctgcatgcttggcaagtgggattccctactcgacgccatttgtcgctttaaacagacaatgttcttcaggtttaacggcggtgaacgatattgccaacaagattaaggttgggcaaattgatattggtttggcgctgggagtggaatcaatgaccaataactacaaaaacgtcaatcccttgggcatgatctcctctgaagagctgcaaaaaaaccgagaagcgaagaaatgtctaataccaatgggcattactaatgagaatgttgccgctaatttcaagatcagtagaaaggatcaagacgagttcgctgcgaattcatatcaaaaagcttacaaggcgaaaaatgaggggcttttcgaagatgaaattttacctataaaattaccagatggctcaatttgccagtcggacgaagggccacgccctaacgtcactgcggagtcgctttcaagcatcaggcctgcctttatcaaagacagaggaaccacaactgcgggcaatgcatcccaggtctccgatggtgtggcaggtgtcttgttagcccgcaggtccgtagccaaccagttaaatctgcctgtgctaggtcgctacatcgattttcaaacagtgggggttccccctgaaatcatgggtgtgggccctgcatacgccataccaaaagtcctggaagctactggcttgcaagtccaagatatcgatatttttgaaataaatgaagcattcgcggcccaagcattatactgcatccataaactgggcatcgatttgaataaagtaaatccaagaggtggtgcaatcgcgttaggccatcccttgggttgtactggcgcaaggcaagtagctaccatactaagagaactgaaaaaggatcaaatcggggttgttagtatgtgtatcggtactggtatgggtgccgccgccatctttattaaagaatag

SEQ ID NO: 93027 - protein, 417 aa, Saccharomyces cerevisiae
MSQRLQSIKDHLVESAMGKGESKRKNSLLEKRPEDVVIVAANRSAIGKGFKGAFKDVNTDYLLYNFLNEFIGRFPEPLRADLNLIEEVACGNVLNVGAGATEHRAACLASGIPYSTPFVALNRQCSSGLTAVNDIANKIKVGQIDIGLALGVESMTNNYKNVNPLGMISSEELQKNREAKKCLIPMGITNENVAANFKISRKDQDEFAANSYQKAYKAKNEGLFEDEILPIKLPDGSICQSDEGPRPNVTAESLSSIRPAFIKDRGTTTAGNASQVSDGVAGVLLARRSVANQLNLPVLGRYIDFQTVGVPPEIMGVGPAYAIPKVLEATGLQVQDIDIFEINEAFAAQALYCIHKLGIDLNKVNPRGGAIALGHPLGCTGARQVATILRELKKDQIGVVSMCIGTGMGAAAIFIKE

SEQ ID NO: 93028 - DNA, 1179 bp, Chromobacterium violaceum
  CDS (1)..(1179): transl_table=11
atggaagtagcaatcgtagccgcgcagcgcaccgccatcggcagcttcggcggcggcttggccaagattccggcgccggagctgggcgccactgtgatcaaggcgttgctggagaagaccggcgtcaaaccggaagacgtcagcgaagtgatcctgggccaggtgctgaccgccggcagcggccagaacccggcccgccaggcgctgatcaaggccggcctgccggtcaccactccggccaccacgctgaacgtggtgtgcggctccggcctgcgcgccgtgcatctggcggcccaggccatcctggccggcgacgccgacatcgtcatcgccggcggccaggaaagcatgtcgctgtccccgcacatcctgccgggctcgcgcgacggtttccgcatgggcaacgcccaactggtggacaccatggtcaacgacggcctgaccgacgcctacaacgcctaccacatgggcatcaccgctgagaacgtggcggccaaatacggcatcggccgcgaagagcaggacgccttctcgctgcagtcgcagcagcgcgccgccgccgcccagaaggccggcaaattccgggacgagatcgttccggtgctggtgccgcagcgcaagggcgatccgctggccttcgacgccgacgagttcatcaagcacgacgccagcgccgacggcctggccaagctgcgcccggccttcaagaaggacggcacggtcaccgccggcaacgcctccggcatcaacgacggcgccgccgctgtgctgctgatgtccacgcaaaaggccgatcagctgggcctgaagccgctggccatcatcaagggctacgcgctgaccggctgcgagccggaaatcatgggcatcggcccggtatccgccacccgcaaggcgctgtccaaggccggctggacggtggaagacctggacctggtggaggccaacgaggccttcgccgctcaggcgctgggcgtggccaaggagctgggctggggctcggacaaggtcaacgtcaacggcggcgccatcgcgctgggccacccgatcggcgcctccggctgccgcgtgctggtgaccctgctgcacgaaatgcagcgccgcggcgccaagaagggcctggccacgctgtgcatcggcggcggcatgggcgtggcgctggcggtcgagcgtccgtaa

SEQ ID NO: 93029 - protein, 392 aa, Chromobacterium violaceum
MEVAIVAAQRTAIGSFGGGLAKIPAPELGATVIKALLEKTGVKPEDVSEVILGQVLTAGSGQNPARQALIKAGLPVTTPATTLNVVCGSGLRAVHLAAQAILAGDADIVIAGGQESMSLSPHILPGSRDGFRMGNAQLVDTMVNDGLTDAYNAYHMGITAENVAAKYGIGREEQDAFSLQSQQRAAAAQKAGKFRDEIVPVLVPQRKGDPLAFDADEFIKHDASADGLAKLRPAFKKDGTVTAGNASGINDGAAAVLLMSTQKADQLGLKPLAIIKGYALTGCEPEIMGIGPVSATRKALSKAGWTVEDLDLVEANEAFAAQALGVAKELGWGSDKVNVNGGAIALGHPIGASGCRVLVTLLHEMQRRGAKKGLATLCIGGGMGVALAVERP

SEQ ID NO: 93030 - DNA, 2001 bp, Saccharomyces bayanus
  CDS (475)..(1671)
aagcttgatagattaaagaaaaatccctacgcacgcaagccgtatgcctcgacgagagaccagtggctgccctcgggaagaagagtacatacataaaacgcgatatatcctgtaaatagaaacagatacaccgttctgaagcatcaatacaatacagtcttggcatgaagccattattgcgcctagtcgggtttatcgtttgctatgtttcacatcgctttgcacgatgtgcctgtcgtttaccgcttaaaccggttttttcgctggagagtgcggtgttactagcccacagcatgtacgtggccaggttgatagttaccgttgagcaaagagcagtcaagtatataaaagaggaactcagcttctcccttgcaagtgttgaacggtctctttgccttccgcttctccaataaaggatcttccacacacgcgccgtatcgtatctattttacccttatattatacgtacctagaatgtctcagaacgtttacattgtttcgactgccagaaccccaattggttcattccaaggctctctttcttccaagacagccgtagagttgggtgctgctgctttgaagggtgccttggctaaagttccagaattggatgcttccaaggactttgacgaaattatctttggtaatgtcctttccgccaatttgggtcaagccccagctagacaagtcgctttgaccgctgggttaggcaatcacattgttgctacgacagttaacaaagtgtgtgcttctgctatgaaggccatcattttgggtgctcaatccattaagtgtggtaatgctgacgtcgtcgtggccggtggctgtgaatctatgaccaacgctccatactacatgccagctgcccgtggtggtgctaagtttggccaaacggtccttattgacggtgtcgaaagagatgggctaaacgatgcatatgatggcttagccatgggtgttcacgcggaaaagtgtgctcgtgattgggatatcaccagagatcaacaagatagctttgccatcgaatcttaccaaaaatctcaacaatcccaaaaggaaggtaaatttgacaacgaaattgtaccagtaaccatcaagggattcagaggtaagccagatactcaagtgacaaacgacgaagaacctgctagattacacgttgaaaaattaaagtctgcaagaactgttttccaaagagaaaatggtaccgtcactgctgccaacgcttctccaatcaacgatggtgctgcagctatcattttagtctctgaaagagtcttgaaggaaaagaatttaaaacccttggctatcgtcaaaggttggggtgaagcagcccatttaccagcagatttcacatgggccccatctcttgcagttccaaaggctttgaaacatgctggtatcgaagatatcaactctgtagactactttgaattcaacgaggctttctccgtcgttggtttggttaacactaagattttaaagctagacccatctaaagttaatgtatacggtggtgcagtcgctttggggcatccattgggatgttcgggtgccagagtggtcgttactctactatctattctacaacaagagggaggtaagatcggtgttgctgccatttgtaatggtggtggtggtgcttcatctgtcgtcattgaaaagctatgattgcattttgtgtcttttatcatcttttcctaaattcataaaaatatatacatatatatagctttatatataacaagcataatttaaatttttctttgcaatatttcaatgttattttattataacggttaccttttagtctatttttctgtcgtcgcgctgggccgggtcatacataattgtacgagttcgatgagtaaattactgacgtttgtggtttgggtacccgatcttcaccattgtgtgtagctcatctagcgccaactacttcttaaactggctgcaggtttttggttactcgagctggctgcaggtttttggttactcgag

SEQ ID NO: 93031 - protein, 398 aa, Saccharomyces bayanus
MSQNVYIVSTARTPIGSFQGSLSSKTAVELGAAALKGALAKVPELDASKDFDEIIFGNVLSANLGQAPARQVALTAGLGNHIVATTVNKVCASAMKAIILGAQSIKCGNADVVVAGGCESMTNAPYYMPAARGGAKFGQTVLIDGVERDGLNDAYDGLAMGVHAEKCARDWDITRDQQDSFAIESYQKSQQSQKEGKFDNEIVPVTIKGFRGKPDTQVTNDEEPARLHVEKLKSARTVFQRENGTVTAANASPINDGAAAIILVSERVLKEKNLKPLAIVKGWGEAAHLPADFTWAPSLAVPKALKHAGIEDINSVDYFEFNEAFSVVGLVNTKILKLDPSKVNVYGGAVALGHPLGCSGARVVVTLLSILQQEGGKIGVAAICNGGGGASSVVIEKL

SEQ ID NO: 93032 - DNA, 1194 bp, Yarrowia lipolytica
  CDS (1)..(1194)
atgcgactcactctgccccgacttaacgccgcctacattgtaggagccgcccgaactcctgtcggcaagttcaacggagccctcaagtccgtgtctgccattgacctcggtatcaccgctgccaaggccgctgtccagcgatccaaggtccccgccgaccagattgacgagtttctgtttggccaggtgctgaccgccaactccggccaggcccccgcccgacaggtggttatcaagggtggtttccccgagtccgtcgaggccaccaccatcaacaaggtgtgctcttccggcctcaagaccgtggctctggctgcccaggccatcaaggccggcgaccgaaacgttatcgtggccggtggaatggagtccatgtccaacaccccctactactccggtcgaggtcttgttttcggcaaccagaagctcgaggactccatcgtcaaggacggtctctgggacccctacaacaacatccacatgggcaactgctgcgagaacaccaacaagcgagacggcatcacccgagagcagcaggacgagtacgccatcgagtcctaccgacgggccaacgagtccatcaagaacggcgccttcaaggatgagattgtccccgttgagatcaagacccgaaagggcaccgtgactgtctccgaggacgaggagcccaagggagccaacgccgagaagctcaagggcctcaagcctgtctttgacaagcagggctccgtcactgccggtaacgcctcccccatcaacgatggtgcttctgccgttgtcgttgcctctggcaccaaggccaaggagctcggtacccccgtgctcgccaagattgtctcttacgcagacgccgccaccgcccccattgactttaccattgctccctctctggccattcccgccgccctcaagaaggctggccttaccaaggacgacattgccctctgggagatcaacgaggccttctccggtgtcgctctcgccaacctcatgcgactcggaattgacaagtccaaggtcaacgtcaagggtggagctgttgctctcggccaccccattggtgcctccggtaaccgaatctttgtgactttggtcaacgccctcaaggagggcgagtacggagttgccgccatctgcaacggtggaggagcttccaccgccatcgtcatcaagaaggtctcttctgtcgagtag

SEQ ID NO: 93033 - protein, 397 aa, Yarrowia lipolytica
MRLTLPRLNAAYIVGAARTPVGKFNGALKSVSAIDLGITAAKAAVQRSKVPADQIDEFLFGQVLTANSGQAPARQVVIKGGFPESVEATTINKVCSSGLKTVALAAQAIKAGDRNVIVAGGMESMSNTPYYSGRGLVFGNQKLEDSIVKDGLWDPYNNIHMGNCCENTNKRDGITREQQDEYAIESYRRANESIKNGAFKDEIVPVEIKTRKGTVTVSEDEEPKGANAEKLKGLKPVFDKQGSVTAGNASPINDGASAVVVASGTKAKELGTPVLAKIVSYADAATAPIDFTIAPSLAIPAALKKAGLTKDDIALWEINEAFSGVALANLMRLGIDKSKVNVKGGAVALGHPIGASGNRIFVTLVNALKEGEYGVAAICNGGGASTAIVIKKVSSVE

SEQ ID NO: 93034 - DNA, 1182 bp, Staphylococcus aureus
  CDS (1)..(1182): transl_table=11
atgacgagagtcgtattagcagcagcatacaggacacctattggcgtttttggaggtgcgtttaaagacgtgccagcctatgatttaggtgcgactttaatagaacatattattaaagagacgggtttgaatccaagtgagattgatgaagttatcatcggtaacgtactacaagcaggacaaggacaaaatccagcacgaattgctgctatgaaaggtggcttgccagaaacagtacctgcatttacggtgaataaagtatgtggttctgggttaaagtcgattcaattagcatatcaatctattgtgactggtgaaaatgacatcgtgctagctggcggtatggagaatatgtctcaatcaccaatgcttgtcaacaacagtcgctttggttttaaaatgggacatcaatcaatggttgatagcatggtatatgatggtttaacagatgtatttaatcaatatcatatgggtattactgctgaaaatttagcagagcaatatggtatttcaagagaagaacaagatacatttgctgtaaactcacaacaaaaagcagtacgtgcacagcaaaatggtgaatttgatagtgaaatagttccagtatcgattcctcaacgtaaaggtgaaccaatcgtagtcactaaggatgaaggtgtacgtgaaaatgtatcagtcgaaaaattaagtcgattaagaccagctttcaaaaaagacggtacagttacagcaggtaatgcatcaggaatcaatgatggtgctgcgatgatgttagtcatgtcagaagacaaagctaaagaattaaatatcgaaccattggcagtgcttgatggctttggaagtcatggtgtagatccttctattatgggtattgcaccagttggcgctgtagaaaaggctttgaaacgtagtaaaaaagaattaagcgatattgatgtatttgaattaaatgaagcatttgcagcacaatcattagctgttgatcgtgaattaaaattacctcctgaaaaggtgaatgttaaaggtggcgctattgcattaggacatcctattggtgcatctggtgctagagtattagtgacattattgcatcaactgaatgatgaagttgaaactggtttaacatcattgtgtattggtggcggtcaagctatcgctgcagttgtatcaaagtataaataa

SEQ ID NO: 93035 - protein, 393 aa, Staphylococcus aureus
MTRVVLAAAYRTPIGVFGGAFKDVPAYDLGATLIEHIIKETGLNPSEIDEVIIGNVLQAGQGQNPARIAAMKGGLPETVPAFTVNKVCGSGLKSIQLAYQSIVTGENDIVLAGGMENMSQSPMLVNNSRFGFKMGHQSMVDSMVYDGLTDVFNQYHMGITAENLAEQYGISREEQDTFAVNSQQKAVRAQQNGEFDSEIVPVSIPQRKGEPIVVTKDEGVRENVSVEKLSRLRPAFKKDGTVTAGNASGINDGAAMMLVMSEDKAKELNIEPLAVLDGFGSHGVDPSIMGIAPVGAVEKALKRSKKELSDIDVFELNEAFAAQSLAVDRELKLPPEKVNVKGGAIALGHPIGASGARVLVTLLHQLNDEVETGLTSLCIGGGQAIAAVVSKYK

SEQ ID NO: 93036 - DNA, 1224 bp, Oryza sativa
  CDS (1)..(1224)
atggctcctcctccgcactcggactctgacctgctcaagccgagagacgtctgcatcgtgggcgtcgcccgcacgcccatcggcgccctgctcggctccctctcctccctccccgccaccaagctcggctccgtcgccatccaggccgctctcaggagagcaaatgtggagccggcgctcgtgcaggaggtcttcatggggaacgttctcagcgccaaccttggccaagccccggcgaggcaagccgccctaggcgccggcttgcccgacactgtgccctgcaccaccgtcaacaaagtttgctcctcggggatgaaggctgtcatgcttgcggcgcagactattcagcttgggatgcatgatgttgttgtcgctggtgggatggagagcatgtccaatgcccccaaatatgtcgcggcagcaagacgggggtcacggtttgggcacgacgtcctcatcgatgggatgctcaaggatgggctgtgggatgtgtataatgatttcccaatgggaatgtgtgccgagttgtgtgcggatcaacactccatttcaagggaggagcaggatctttatgctatccagagcaatgaacgtgcaatagcagctcgtgatagcggcacattttcttgggaaattgctccggttgaaatttcttccggtagagggaaaccaccacttattgttgacaaggatgagagtcttgcaaagttcaattcagcgaagctgaggaaacttgggccgactttcaagaagaatggttctgtaactgccggcaattcttctagtataagtgatggtgctgctgcaatcgtgctagtcagtggacagaaagccaagagtcttggccttcaagttattgcaaggatcagagggtatgcggatgctgctcaggcacctgaattatttacaactactccagctcttgctattccaaaggctgtatcaaatgcgggtctccaaacttcacaaatagattattatgagataaacgaagctttctccgtcgttgctttagccaaccagaagcttcttggtattccttcgggaaagcttaacctaagtggtggtggtgtttctctgggccatcctattggttgcagtggtgcgagaatcatagtcactttgctcgggattcttagacataaaaatggaaagattggggttgctggagtttgcaatggaggtggtggtgcttctgcccttgttgtggaactcattatctga

SEQ ID NO: 93037 - protein, 407 aa, Oryza sativa
MAPPPHSDSDLLKPRDVCIVGVARTPIGALLGSLSSLPATKLGSVAIQAALRRANVEPALVQEVFMGNVLSANLGQAPARQAALGAGLPDTVPCTTVNKVCSSGMKAVMLAAQTIQLGMHDVVVAGGMESMSNAPKYVAAARRGSRFGHDVLIDGMLKDGLWDVYNDFPMGMCAELCADQHSISREEQDLYAIQSNERAIAARDSGTFSWEIAPVEISSGRGKPPLIVDKDESLAKFNSAKLRKLGPTFKKNGSVTAGNSSSISDGAAAIVLVSGQKAKSLGLQVIARIRGYADAAQAPELFTTTPALAIPKAVSNAGLQTSQIDYYEINEAFSVVALANQKLLGIPSGKLNLSGGGVSLGHPIGCSGARIIVTLLGILRHKNGKIGVAGVCNGGGGASALVVELII

SEQ ID NO: 93038 - DNA, 1206 bp, Oryza sativa
  CDS (1)..(1206)
atggcttcggacaacattggctcgagagatgtatgtgttgttggggttgcacgcacccctatgggtggtttcctaggtgccctgtcttccttgtcagctaccaaacttggttccatagcaattgaagctgctctgaagagggcaaatgttgatccagcccttgtgcaagaggtcttctttggtaatgtgttgagtgctaatttggggcaagctcctgcaagacaagctgctttaggtgcagggataccaaacacagttgtttgcagcgcagttaacaaagtttgcgcatctggcatgaaagcgacaatgtttgcagcacagtcaattctattgggcatcaatgatattgttgtagccggtggcatggaaagcatgtctaatgctccaaaatacattgctgaagctagaaaaggatctcgttttggacatgacactcttgttgatggcatgcttaaagatggcctttgggatgtatacggtgattttgccatgggaaattgtgctgagctttgtgctgacaatcatgctctgacaagggaagaccaggatgcctatgctattcaaagcaatgagcgtggaattgctgctcggaacagtggtgcttttgcatgggagattgttccgattgaagttcctgttgggagagggaaaccaccggtacttgttgacaaagatgagggcctggacaagtttgacccagtgaaactgaagaagctccgtcctagtttcaaggagaatggtggtactgttactgctgggaatgcttctagtataagtgacggtgctgccgcattagtattggtgagtgggcagaaggcacaagaacttggactgcaagttattgcacgaatcaaaggatttgcagatgcagctcaagctcctgaattatttaccactagcccggcacttgccatacctaaggctcttgctaatgctggcttggagtcttctcgtgttgattactatgaaattaatgaagccttttcagctgttgcacttgcaaatcaaaagcttcttggaattccttcagaaaaaattaatgtacatggaggagctgtgtctttaggacatcctcttggatgcagtggtgctcgaattttggtcaccctgcttggtgttcttagggagaaaggtggcaaaatcggagttgctggtgtttgcaatggcggaggcggagcatctgctctcgttctcgagcttgcataa

SEQ ID NO: 93039 - protein, 401 aa, Oryza sativa
MASDNIGSRDVCVVGVARTPMGGFLGALSSLSATKLGSIAIEAALKRANVDPALVQEVFFGNVLSANLGQAPARQAALGAGIPNTVVCSAVNKVCASGMKATMFAAQSILLGINDIVVAGGMESMSNAPKYIAEARKGSRFGHDTLVDGMLKDGLWDVYGDFAMGNCAELCADNHALTREDQDAYAIQSNERGIAARNSGAFAWEIVPIEVPVGRGKPPVLVDKDEGLDKFDPVKLKKLRPSFKENGGTVTAGNASSISDGAAALVLVSGQKAQELGLQVIARIKGFADAAQAPELFTTSPALAIPKALANAGLESSRVDYYEINEAFSAVALANQKLLGIPSEKINVHGGAVSLGHPLGCSGARILVTLLGVLREKGGKIGVAGVCNGGGGASALVLELA

SEQ ID NO: 93040 - DNA, 1371 bp, Brassica napus
  CDS (1)..(1371)
atggagaaagccactgaaaggcagaagattttacttcgtcatctcaatccactttcttcttctcctcctccttataaacctacccttctctccgctgtgaactgtgctgctgagctttccccaatggctgcttttggagacgacgttgtgatcgttgcggcgtaccgcactgccatttgtaaagctaagcgtggagggttcaaagatactctcccagatgatcttctcgcttctgttctcaaggctgtggtggaaaggacgtctttggatccaagtgaagttggggatattgttgttggtaccgttatagctcctggctctcagagggccatggagtgtagagtagctgcattctttgctggctttcctgactctgtgccgattagaactgtcaacagacaatgctcatcaggactacaagcagttgctgatgttgctgcttccatcagagctggatattacgacattggtattggtgctggagtggagtcaatgtcaactgatcatattcctggaggcggatttaacaccacaaacccgagggcacaagagtttcctggagctcgtgactgcttgcttccaatgggcattacctctgaaaacgttgcagagagatacggtgtcacaagagaagagcaagacatggctgcggtggagtctcacaagcgtgctgcagctgcaaacgcctctggtaaactcaaggacgagatagttcctgttgctactaagattgttgacccggtgacaaaagcagagaagccaatcgttgtttctgttgatgatggtgtacgtccaaactcaaacatggctgatctggcaaagctgaagacagtctttaaacctaatggttcaaccacagcaggtaatgctagtcagattagtgatggtgctggagctgtactgctaatgaagaggagcttggccatgaagaagggacttcccattcttggagttttcaggagctttgctgttactggtgtggatccggctgtaatgggtatcggtccagcttacgccattcccgctgcagccaaccttgcaggactcaaagttagcgatatcgatctatttgagatcaatgaggcatttgcatctcagtatgtgtactgttgcaagaagctggagctggatgtggaaaaggtcaatgttaatggaggagccattgctattggccatcctcttggtgctacaggagctcgatgtgttgcgacattgttgcatgagatgaaacggagagggaaagactgccgctttggagtgatttcaatgtgcataggcactggtatgggagctgcagctgtgtttgagagaggagactctgttgatgacctgtccaatgcccgtgtggtggctaatgggagcggtcattag

SEQ ID NO: 93041 - protein, 456 aa, Brassica napus
MEKATERQKILLRHLNPLSSSPPPYKPTLLSAVNCAAELSPMAAFGDDVVIVAAYRTAICKAKRGGFKDTLPDDLLASVLKAVVERTSLDPSEVGDIVVGTVIAPGSQRAMECRVAAFFAGFPDSVPIRTVNRQCSSGLQAVADVAASIRAGYYDIGIGAGVESMSTDHIPGGGFNTTNPRAQEFPGARDCLLPMGITSENVAERYGVTREEQDMAAVESHKRAAAANASGKLKDEIVPVATKIVDPVTKAEKPIVVSVDDGVRPNSNMADLAKLKTVFKPNGSTTAGNASQISDGAGAVLLMKRSLAMKKGLPILGVFRSFAVTGVDPAVMGIGPAYAIPAAANLAGLKVSDIDLFEINEAFASQYVYCCKKLELDVEKVNVNGGAIAIGHPLGATGARCVATLLHEMKRRGKDCRFGVISMCIGTGMGAAAVFERGDSVDDLSNARVVANGSGH

SEQ ID NO: 93042 - DNA, 1248 bp, Brassica napus
  CDS (1)..(1248)
atggcttcatccgtctctgatcagtccgtacagcctcaagatgtttgtgttgtgggagtggcgagaacgcctatgggagacttcctaggctctctctcttctataactgccccaagactcggctccatagccattgaagccgcacttaagagtgcaaacgttgaaccggctcttgtggaagaggttttctttggtaatgtcttaaccgcaaatcttgggcaagcgccagcaagacaggctgcacttggtgctgggattccctattcagtgatctgcaccactgtcaacaaagtctgtgctgctggaatgaaagctgtaatgttagcggctcaaagtatccagctcggtttgaatgatgttgttgtggctggtgggatggagagcatgtcaaacgtcccaaagtacctcccaaacgcaagaaggggttcacgattaggacatgatactgttgttgacggtatgacgaaagatggactttgggatgtgtacaatgactttggaatgggagtttgtggagaaatatgcgctgaccagtaccgtattacaagagaagaacaggatgcttatgctatacagagctttgagcgtggtattgctgcacaaaacgctcggttgttctcttgggaaattgttccggttgaggtttcttctggaagagggaagccatctgttgttattgacaaggatgatggacttgggaagtttgatgctgccaagttaaagaagcttagaccaagcttcaaggaggatgggggatcagtcactgctggcaatgcatcaagtataagtgatggtgcggcagcgttagtgctagttagtggaaagaaggctcttgagcttggactgcatgttatagctaagattagaggatacgctgatgctgctcaggcacctgagttgttcacaaccacgccggcacttgctattcctaaagctataatgcgtgctggtttagatgcatctcaagttgattactatgaaattaacgaagctttctctgttgtagctctggccaatcagaaactgctgggattagatcctgcacggttgaatgcacatggcggggctgttgcattgggacatccactgggatgcagtggtgctcgtattttagtcacgttactgggtgtattgaaagcaaagaagggaaagtatggagtggcatcaatatgcaacggaggaggaggagcatcagcacttgttctcgagttcatgtcggagaagacaatagggtattcatcactctga

SEQ ID NO: 93043 - protein, 415 aa, Brassica napus
MASSVSDQSVQPQDVCVVGVARTPMGDFLGSLSSITAPRLGSIAIEAALKSANVEPALVEEVFFGNVLTANLGQAPARQAALGAGIPYSVICTTVNKVCAAGMKAVMLAAQSIQLGLNDVVVAGGMESMSNVPKYLPNARRGSRLGHDTVVDGMTKDGLWDVYNDFGMGVCGEICADQYRITREEQDAYAIQSFERGIAAQNARLFSWEIVPVEVSSGRGKPSVVIDKDDGLGKFDAAKLKKLRPSFKEDGGSVTAGNASSISDGAAALVLVSGKKALELGLHVIAKIRGYADAAQAPELFTTTPALAIPKAIMRAGLDASQVDYYEINEAFSVVALANQKLLGLDPARLNAHGGAVALGHPLGCSGARILVTLLGVLKAKKGKYGVASICNGGGGASALVLEFMSEKTIGYSSL

SEQ ID NO: 93044 - DNA, 1215 bp, Brassica napus
  CDS (1)..(1215)
atggcccattcagcagattcctccgtcaatcccagagatgtttgcatcgtgggtgttgcacgcactcctatgggtggctttctcggatctctctcctccttacccgccacaaagcttggatccgttgccatcacagctgctctgaagagagcaaatgttgacccgtctctggtccaagaagttgtgtttgggaatgttctcagtgctaatttgggtcaagctcccgctcgtcaagctgctttaggtgctgggatctctaactctgttatctgtaccactgtcaacaaggtttgtgcttcaggcatgaaagctgtgatgattgctgctcagagtatccagctggggatcaatgatgtagtcgtggcgggtggtatggaaagcatgtctaatacaccaaagtatcttgcagaagcaaggaaaggatctaggtttggtcatgattctctagtagatgggatgcttagggatggactgtgggatgtctataacgactgtgggatgggaagctgtgcagagttatgcgctgagaagtttgagataaccagggagcagcaagatgactacgctgttcagagctttgagcgtggtattgctgctcaagaagctggcgccttcacttgggagatcgtcccggttgaagtttctggaggaaggggtaggccatcaaccattgctgacaaggatgaaagtcttgggaagtttgatgctgcaaaactgaggaaactccgtccgagtttcaaggagaatggaggcacagttacagctggaaatgcctctagcataagtgatggtgcagctgctattgtcctagtgagtggagagaaggcgcttcagctaggacttcaagtacttgcaaaagttaaaggttatggtgatgcagctcaggagccagagtttttcactactgctcctgctctggcaataccaaaagctattgcacatgctggtttggaatcttctcaagttgattactatgagatcaatgaagcatttgcagttgtagcacttgcaaatcaaaagctacttgggattagtccggagaaggtgaatgtaaatggaggagccgtctccttaggacatcctctaggctgcagtggagcgcgtattctaatcacattgcttgggatactgaagaagagaaacggcaagtacggtgtgggaggagtgtgcaacggaggaggaggtgcttctgctcttgttcttgaagtcgtttga

SEQ ID NO: 93045 - protein, 404 aa, Brassica napus
MAHSADSSVNPRDVCIVGVARTPMGGFLGSLSSLPATKLGSVAITAALKRANVDPSLVQEVVFGNVLSANLGQAPARQAALGAGISNSVICTTVNKVCASGMKAVMIAAQSIQLGINDVVVAGGMESMSNTPKYLAEARKGSRFGHDSLVDGMLRDGLWDVYNDCGMGSCAELCAEKFEITREQQDDYAVQSFERGIAAQEAGAFTWEIVPVEVSGGRGRPSTIADKDESLGKFDAAKLRKLRPSFKENGGTVTAGNASSISDGAAAIVLVSGEKALQLGLQVLAKVKGYGDAAQEPEFFTTAPALAIPKAIAHAGLESSQVDYYEINEAFAVVALANQKLLGISPEKVNVNGGAVSLGHPLGCSGARILITLLGILKKRNGKYGVGGVCNGGGGASALVLEVV

SEQ ID NO: 93046 - DNA, 1206 bp, Triticum aestivum
  CDS (1)..(1206)
atgggttcagacaacatcggccccagagatgtctgcgttgtcggggtcgcgcgcacccctatgggtggtttcctcggcgccctgtcctccttgcctgccaccaaacttggctccatagctatcgaagctgctctgaaaagggcgaatgtggatccaccccttgtgcaggaggtcttcttcggcaatgtcctgagtgctaacttgggccaagctccagcgagacaagctgccttaggcgcagggataccaaacacggttgtttgcacgacggtcaacaaagtctgcgcgtctggcatgaaagcaacgatgtttgctgcacagtcgattcaactgggcagcaatgatattgtagtggcagggggcatggaaagcatgtcgaatgctccgaaatacatcgctgaagctagaaaaggttctcgtttcggacatgacagccttgttgacggtatgcttaaggatggcctttgggatgtatacggcgattgtgccatgggagtgtgtgctgagctttgtgctgacaatcatgctctgacaagggaagaccaagatgcttttgctattcaaagtaatgagcgtggaattgctgctcgtgatagtggcgcttttgcatgggagatcgttccggttgaagttcctgtcggcagaggaaaaccaccagtacttgttgaaaaagatgagagccttgacaggtttgacccagcgaaactgaggaagctccgcccaagtttcaaggagaaagctggcactgttactgctgggaacgcttctagtataagtgatggctctgccgcattagtattggtgagtgggcagaaggctcaagagcttgggctgcaagttcttgcaaggatcaaaggatttgccgatgcggctcaagctcccgaactatttaccaccaccccagcacttgccataccgaaggctctctcaaatgctggcttagaatcttcatctgttgatttttacgaaattaacgaagcctttgcggctgttgcacttgcaaatcagaagattctcggaattccttcagaaaagattaatgtacatggaggagcagtgtctttaggacaccctcttggatgcagcggtgctcgcattttggtcacccttattggtgtcctcagggagaagggtggcaaaatcggggtcgccggtgtctgcaacggcggaggcggagcatccgcacttgttctcgagctcgcgtag

SEQ ID NO: 93047 - protein, 401 aa, Triticum aestivum
MGSDNIGPRDVCVVGVARTPMGGFLGALSSLPATKLGSIAIEAALKRANVDPPLVQEVFFGNVLSANLGQAPARQAALGAGIPNTVVCTTVNKVCASGMKATMFAAQSIQLGSNDIVVAGGMESMSNAPKYIAEARKGSRFGHDSLVDGMLKDGLWDVYGDCAMGVCAELCADNHALTREDQDAFAIQSNERGIAARDSGAFAWEIVPVEVPVGRGKPPVLVEKDESLDRFDPAKLRKLRPSFKEKAGTVTAGNASSISDGSAALVLVSGQKAQELGLQVLARIKGFADAAQAPELFTTTPALAIPKALSNAGLESSSVDFYEINEAFAAVALANQKILGIPSEKINVHGGAVSLGHPLGCSGARILVTLIGVLREKGGKIGVAGVCNGGGGASALVLELA

SEQ ID NO: 93048 - DNA, 1206 bp, Zea mays
  CDS (1)..(1206)
atggcatccaacggcatcgctcccagagatgtatgtgttgttggcgttgcacgcacccctttgggtggtttccttggtgccttgtcttccttgcccgcaacaaagcttggctctatagcaattgaagctgctctgaaaagagcaaatgtggatccggccctcgtgcaggaggtctttttcggaaacgtcttgagtgctaatttgggacaagctcctgcaaggcaagccgctctgggtgcagggataccaaacactgttgtttgcaccactgttaacaaagtctgcgcatctggcatgaaagctactatgttcgccgcacagtcaattcagctgggtatcaatgatattgttgtggcaggtggcatggaaagcatgtccaacgccccaaagtacattgctgaagctaggaaagggtctcgttttggacatgacacacttgttgatgccatgcttaaggatggactttgggatgtatacaatgactgtgccatgggaatgtgtgccgaactttgtgctgacaatcatgccctcacaagagaagaccaggatgcttttgctatccaaagcaaccagcgtggaattactgctcgtgacagtggtgcttttgcatgggagattgttccgattgaagttcctgttgggagaggaaaaccacctgtactcattgagaaagatgaaagcctggataagtttgacccagcaaaactgaagaaacttcgcccaagtttcaaggagaatggtggtaccgttacagctggaaatgcttctagtataagtgatggggcggctgcattagttttggtgagtgggcagaaggctcaagagcttggcctgcaagtccttgcaaggatcagaggatatgcagatgcggctcaagctccggaactttttacaaccaccccagcacttgcgataccaaaggctatatcaaatgctggattagagtcatcccatgttgatttttttgagattaatgaagcattttctgctgtcgcacttgcaaatcaaaagcttcttgggattccttcagaaaagattaatgtccatggaggagctgtgtctctagggcatcctcttgggtgcagcggtgctcgcattttggtcacccttcttggtgtccttagggaaaagggcggcaagatcggtgttgctggtgtctgcaacggcggaggtggagcatcagctcttgttctcgaactcgcataa

SEQ ID NO: 93049 - protein, 401 aa, Zea mays
MASNGIAPRDVCVVGVARTPLGGFLGALSSLPATKLGSIAIEAALKRANVDPALVQEVFFGNVLSANLGQAPARQAALGAGIPNTVVCTTVNKVCASGMKATMFAAQSIQLGINDIVVAGGMESMSNAPKYIAEARKGSRFGHDTLVDAMLKDGLWDVYNDCAMGMCAELCADNHALTREDQDAFAIQSNQRGITARDSGAFAWEIVPIEVPVGRGKPPVLIEKDESLDKFDPAKLKKLRPSFKENGGTVTAGNASSISDGAAALVLVSGQKAQELGLQVLARIRGYADAAQAPELFTTTPALAIPKAISNAGLESSHVDFFEINEAFSAVALANQKLLGIPSEKINVHGGAVSLGHPLGCSGARILVTLLGVLREKGGKIGVAGVCNGGGGASALVLELA

SEQ ID NO: 93050 - DNA, 1212 bp, Brassica napus
  CDS (1)..(1212)
atggcccattcagcagattccgtcaatcccagagatgtttgcattgtgggtgttgcacgaactccaatgggtggctttctcggatctctctcgtctttacccgccacaaagcttggatccgtagctattgcagctgctttgaagagagcaaatgttgacccgtctctcgtccaagaagttgtgtttggcaatgttcttagtgccaatttgggtcaggctcctgctcgtcaggctgctttaggtgcagggatccctaactctgttatctgtacaacagttaacaaggtttgtgcttcaggcatgaaagcggtaatgattgctgctcagagtattcaattggggatcaatgatgtagtcgtagcgggtggcatggaaagcatgtctaatacaccaaaatatttggctgaagcaaggaaaggatctcggtttggtcatgattctctagtagatgggatgcttaaggatggactgtgggatgtctataacgactgtgggatgggaagctgtgcagagttatgcgctgagaagtttcagataactagggagcagcaagatgactacgctgttcagagtttggagcgtggcattgctgctcaagaagctggcgccttcacatgggaaatcgtcccggttgaagtttctggaggaagaggtaggccatcaaccattgttgacaaggacgaaggtcttgggaagtttgatgctgcaaaattgaggaaactccgtccaagtttcaaggagaatggaggcactgttacagctggaaatgcgtctagcataagcgatggtgcagctgcccttgtcctagtgagtggagagaaggcgcttcagctaggacttcaagtactcgcaaaagttaaaggttatggtgatgcagctcaggaaccagagtttttcactactgctcctgctcttgcaataccgaaagctattgcacatgctggtttggaatcttctcaagtcgattactatgagatcaatgaagcatttgcagttgtggctctcgcaaatcaaaagctacttgggattactccggagaaggtgaatgtaaatggaggagctgtctccttaggacatcctctaggctgtagtggagcccgtattctaatcacattacttgggatactgaagaagagaaacggaaagtacggtgtgggaggagtgtgcaacggaggaggaggtgcttctgctcttgttcttgaacttgtttga

SEQ ID NO: 93051 - protein, 403 aa, Brassica napus
MAHSADSVNPRDVCIVGVARTPMGGFLGSLSSLPATKLGSVAIAAALKRANVDPSLVQEVVFGNVLSANLGQAPARQAALGAGIPNSVICTTVNKVCASGMKAVMIAAQSIQLGINDVVVAGGMESMSNTPKYLAEARKGSRFGHDSLVDGMLKDGLWDVYNDCGMGSCAELCAEKFQITREQQDDYAVQSLERGIAAQEAGAFTWEIVPVEVSGGRGRPSTIVDKDEGLGKFDAAKLRKLRPSFKENGGTVTAGNASSISDGAAALVLVSGEKALQLGLQVLAKVKGYGDAAQEPEFFTTAPALAIPKAIAHAGLESSQVDYYEINEAFAVVALANQKLLGITPEKVNVNGGAVSLGHPLGCSGARILITLLGILKKRNGKYGVGGVCNGGGGASALVLELV

SEQ ID NO: 93052 - DNA, 1212 bp, Brassica napus
  CDS (1)..(1212)
atggcccattcagcagattccgtcaatcccagagatgtttgcatcgtgggtgttgcacgcactccaatgggtggctttctcggatctctctcgtccttacccgctacaaagcttggatccgttgctatcacagctgctctgaagagggcaaatgttgacccgtctctggtccaagaagttgtgttcggcaatgttcttagtgctaatttgggtcaagctcctgctcgtcaagctgctttaggtgcagggatccctaactctgttatctgtactacagtcaacaaggtgtgtgcttcaggcatgaaagcggtggtgattgctgctcagagtatccagttggggatcaatgatgtagtcgtcgcgggtggcatggaaagcatgtctaatacaccaaaatacctggcagaagccaggaaaggatctcggtttggtcatgattttctagtagatgggatgcttaaggatggactgtgggatgtctataacgactgtgggatgggaagttgtgccgagttatgcgctgagaagtttcagataactagggagcagcaagatgactacgctgttcagagttttgagcgtggtattgctgctcaagaagctggcgccttcacatgggagatcgtcccggttgaagtttctggaggaaggggtaggccatcaaccattgttgacaaggacgaaggtcttgggaagtttgatgctgcaaaattgaggaaactccgtccaagtttcaaggagaatggaggcactgttacagctggaaatgcctctagcataagcgatggtgcagctgcccttgtcctagtgagtggagagaaagcgcttcagctaggacttcaagtactcgcaaaaattaaaggttatggtgatgcagctcaggaaccagagtttttcactactgctcctgctcttgcgataccaaaagctattgcacatgctggtttggaatcttctcaagttgattactatgagatcaatgaagcatttgcagttgtagcacttgcaaatcaaaagctactagggattagtccggagaaggtgaatgtaaatggaggagctgtctccttaggacatcctctaggctgtagtggagcccgtattctaatcacattacttgggatactgaagaagagaaacgggaagtacggtgtgggaggagtgtgcaacggaggaggaggtgcttctgctcttgttcttgaacttgtttga

SEQ ID NO: 93053 - protein, 403 aa, Brassica napus
MAHSADSVNPRDVCIVGVARTPMGGFLGSLSSLPATKLGSVAITAALKRANVDPSLVQEVVFGNVLSANLGQAPARQAALGAGIPNSVICTTVNKVCASGMKAVVIAAQSIQLGINDVVVAGGMESMSNTPKYLAEARKGSRFGHDFLVDGMLKDGLWDVYNDCGMGSCAELCAEKFQITREQQDDYAVQSFERGIAAQEAGAFTWEIVPVEVSGGRGRPSTIVDKDEGLGKFDAAKLRKLRPSFKENGGTVTAGNASSISDGAAALVLVSGEKALQLGLQVLAKIKGYGDAAQEPEFFTTAPALAIPKAIAHAGLESSQVDYYEINEAFAVVALANQKLLGISPEKVNVNGGAVSLGHPLGCSGARILITLLGILKKRNGKYGVGGVCNGGGGASALVLELV

SEQ ID NO: 93054 - DNA, 1389 bp, Brassica napus
  CDS (1)..(1389)
atggagaaagcaatcgagagacaaagagttcttcttgaacatctccgtccttcttcttcttcctctcacagctttgaaggctctctctctgcttcagcttgcttggctggggacagtgctgcgtatcagaggacctctctctatggagatgatgtagtcattgttgcggcacataggactgcactatgcaagtcgaaacgtggcaatttcaaggatacttatccggatgatcttcttgcacctgttttgagggcattgatagagaagacgaatctgaacccaagtgatgttggtgacattgttgttggtactgttttggcaccgggatctcagagggccagcgagtgcaggatgtctgctttctacgccggtttccctgaaaccgttccggttagaaccgtgaataggcagtgctcttctgggcttcaggctgttgctgacgttgccgccgccatcaaagctggattttatgatattggtattggggctggattggagtccatgaccactaatccaatggcatgggaagggtcagtcaacccagcggtgaagaagtttgagcaagcacagaactgtcttctccctatgggtgttacttcagaaaatgtggcacaacgctttggtgtctcaaggcaggaccaagatcaagctgctgttgactcgcacagaaaggcagctgctgcaactgctgctggtaaattcaaggatgagatcattccagttaaaaccaagcttgctgacccaaagacaggtgatgagacaccaattacacgctctgttgatgatgggatccgaccaagcacaacccttgccactcttgggaagctgaagccagtatttaaaaacgatggcacaacaaccgctggaaactccagtcaagtaagtgatggtgcaggagccgttctcctcatgaggagaagtgttgctacgcaaaaaggacttcccgttcttggtgtattcaggacatttgctgcagttggtgttgatccagcaatcatgggtgtcggtccagcagttgccattcctgctgcagttaaggctgctggtttagaactcgatgacatcgacttgtttgagatcaacgaggcatttgcatctcagtttgtttattgccgtaacaagttgggacttgacgcagagaaaatcaatgtcaacggaggcgcaatggccataggacatcctttgggtgctacaggagcacgttgcgttgctactttgttgcatgagatgaaacgccgcggaaaagactgtcgatttggggtagtttcaatgtgcattgggacggggatgggtgcagcggctgtgtttgagagaggagatggagttgatgagcttcgcaacgcaaggaaagttgaatcgcatggccttttgtccaaggacgctcgctag

SEQ ID NO: 93055 - protein, 462 aa, Brassica napus
MEKAIERQRVLLEHLRPSSSSSHSFEGSLSASACLAGDSAAYQRTSLYGDDVVIVAAHRTALCKSKRGNFKDTYPDDLLAPVLRALIEKTNLNPSDVGDIVVGTVLAPGSQRASECRMSAFYAGFPETVPVRTVNRQCSSGLQAVADVAAAIKAGFYDIGIGAGLESMTTNPMAWEGSVNPAVKKFEQAQNCLLPMGVTSENVAQRFGVSRQDQDQAAVDSHRKAAAATAAGKFKDEIIPVKTKLADPKTGDETPITRSVDDGIRPSTTLATLGKLKPVFKNDGTTTAGNSSQVSDGAGAVLLMRRSVATQKGLPVLGVFRTFAAVGVDPAIMGVGPAVAIPAAVKAAGLELDDIDLFEINEAFASQFVYCRNKLGLDAEKINVNGGAMAIGHPLGATGARCVATLLHEMKRRGKDCRFGVVSMCIGTGMGAAAVFERGDGVDELRNARKVESHGLLSKDAR

SEQ ID NO: 93056 - DNA, 1266 bp, Brassica napus
  CDS (1)..(1266)
atggcttcatccgtctctgatcagtccgtacagcctcaagatgtttgtgttgtgggagtggcgagaacgcctatgggagacttcctaggctctctctcttctataactgccccaagactcggctccatagcgattgaagccgcacttaagagagcaaacgttgaaccggctcttgtggaagaggttttctttggcaatgtcttaaccgccaatcttgggcaagcgccagcaagacaggctgcacttggtgctgggattccctattcagtgatctgcaccactgtcaacaaagtctgtgctgctgggatgaaagccgtaatgttagcggctcaaagtatccagctcggtttgaatgatgttgttgtggctggtgggatggagagcatgtcaaacgtaccaaagtacctcccaaacgcaagaaggggttcacgattaggacatgatactgttgttgacggtatgacgaaagatggactttgggatgtgtacaatgactttggaatgggagtttgtggagaaatatgcgctgaccagtaccgtattacaagagaagaacaggatgcttatgctatacagagctttgagcgtggtattgctgcacaaaacgctcggttgttcgcttgggaaattgttccggttgaggtttcttctggaagagggaagccatctgttgttattgacaaggatgatggaattgggaagtttgatgctgccaagttaaagaagcttagaccaagcttcaaggaggatgggggatcagtcactgctggaaatgcatcaagtataagtgatggtgcggcagcgttagtgctagttagtggaaagaaggctattgaacttggattgaatgttatagctaagattagaggatatgctgatgctgctcaggcacctgagttgttcacaaccacgccggcacttgctattcctaaagctataatgcgtgctggtttagatgcatctcaagttgattactatgaaattaacgaagctttctctgttgtagctctggccaatcagaaactgctggggttagatcctgcacggttgaatgcacatggaggggctgttgcattgggacatccactgggatgcagtggtgctcgcattttagtcacattactgggtgtattgagagcaaagaagggaaagtatggagtggcatcaatatgcaacggaggaggaggagcatcagcacttgttctcgagttcatgtcggagaagacaatcgggtattcatcactctgtagcaagttgaagctatag

SEQ ID NO: 93057 - protein, 421 aa, Brassica napus
MASSVSDQSVQPQDVCVVGVARTPMGDFLGSLSSITAPRLGSIAIEAALKRANVEPALVEEVFFGNVLTANLGQAPARQAALGAGIPYSVICTTVNKVCAAGMKAVMLAAQSIQLGLNDVVVAGGMESMSNVPKYLPNARRGSRLGHDTVVDGMTKDGLWDVYNDFGMGVCGEICADQYRITREEQDAYAIQSFERGIAAQNARLFAWEIVPVEVSSGRGKPSVVIDKDDGIGKFDAAKLKKLRPSFKEDGGSVTAGNASSISDGAAALVLVSGKKAIELGLNVIAKIRGYADAAQAPELFTTTPALAIPKAIMRAGLDASQVDYYEINEAFSVVALANQKLLGLDPARLNAHGGAVALGHPLGCSGARILVTLLGVLRAKKGKYGVASICNGGGGASALVLEFMSEKTIGYSSLCSKLKL

SEQ ID NO: 93058 - DNA, 1212 bp, Brassica napus
  CDS (1)..(1212)
atggcccattcagcagattccgtcaatcccagagatgtttgcattgtgggtgttgcacgcactccaatgggtggctttctcggatctctctcgtctttacccgccacaaagcttggatccgtagctattacagctgctttgaagagagcaaatgttgacccgtctctcgtccaagaagttgtgtttggcaatgttcttagtgccaatttgggtcaggctcctgctcgtcaggctgctttaggtgcagggatccctaactctgttatctgtacaacagttaacaaggtttgtgcttcaggcatgaaagcggtaatgattgctgctcagagtattcaattggggatcaatgatgtagtcgtagcgggtggcatggaaagcatgtcgaatacaccaaaatatttggctgaagcaaggaaaggatctcggtttggtcatgattctctagtagatggaatgctaaaggatggactatgggatgtctataacgactgtgggatgggaagctgtgcagagttatgcgctgagaagtttcagataacaagggagcagcaagatgactacgctgttcagagttttgaacgtggtattgctgcccaggaagctggcgccttcacatgggaaatcgtcccggttgaagtttctggaggaaggggtaggccatcaaccattgttgacaaggacgaaggtcttgggaagtttgatgctgcaaaattgaggaaactccgtccaagtttcaaggacaatggaggcactgttacagctggaaatgcctctagcataagcgatggtgcagctgcccttgtcttagtgagtggagagaaagcgcttcagctaggacttcaagtactcgcaaaaattaaaggttatggtgatgcagctcaggaaccagagtttttcactactgctcctgctcttgcgataccaaaagctattgcacatgctggtttggaatcttctcaagttgattactatgagatcaatgaagcatttgcagttgtagcacttgcaaatcaaaagctactagggattggtccggagaaggtgaatgtaaatggaggagctgtctccttaggacatcctctaggctgtagtggagcccgtattctaatcacattacttgggatactgaagaagagaaacggaaagtacggtgtgggaggagtgtgcaacggaggaggaggtgcttctgctcttgttcttgaacttgtttga

SEQ ID NO: 93059 - protein, 403 aa, Brassica napus
MAHSADSVNPRDVCIVGVARTPMGGFLGSLSSLPATKLGSVAITAALKRANVDPSLVQEVVFGNVLSANLGQAPARQAALGAGIPNSVICTTVNKVCASGMKAVMIAAQSIQLGINDVVVAGGMESMSNTPKYLAEARKGSRFGHDSLVDGMLKDGLWDVYNDCGMGSCAELCAEKFQITREQQDDYAVQSFERGIAAQEAGAFTWEIVPVEVSGGRGRPSTIVDKDEGLGKFDAAKLRKLRPSFKDNGGTVTAGNASSISDGAAALVLVSGEKALQLGLQVLAKIKGYGDAAQEPEFFTTAPALAIPKAIAHAGLESSQVDYYEINEAFAVVALANQKLLGIGPEKVNVNGGAVSLGHPLGCSGARILITLLGILKKRNGKYGVGGVCNGGGGASALVLELV

SEQ ID NO: 93060 - DNA, 1215 bp, Brassica napus
  CDS (1)..(1215)
atggcccattcagcagattcctccgtcaatcccagagatgtttgcatcgtgggtgttgcacgcactcctatgggtggctttctcggatctctctcctccttacccgccacaaagcttggatccgttgccatcacagctgctctgaagagagcaaatgttgacccgtctctggtccaagaagttgtgtttgggaatgttctcagtgctaatttgggtcaagctcctgctcgtcaagctgctttaggtgctgggatccctaactctgttatctgtactactgtcaacaaggtttgtgcttcaggcatgaaagctgtgatgattgctgctcagagtatccagttggggatcaatgatgtagtcgtggcgggtggtatggaaagcatgtctaatacaccaaaatatcttgcagaagcaaggaaaggatctaggtttggtcatgattctctagtagatgggatgcttagggatggactgtgggatgtctataacgactgtgggatgggaagctgtgcagagttatgcgctgagaagtttgagataaccagggagcagcaagatgactacgctgttcagagttttgagcgtggtattgctgctcaagaagctggcgccttcacatgggagatcgtcccggttgaagtttctggaggaaggggtaggccatcaaccattgttgacaaggatgaaggtcttgggaagtttgatgctgcaaaactgagaaaactccgtccgagtttcaaggagaatggaggcactgttacagctggaaatgcctctagcataagtgatggtgcagctgcccttgtcttagtgagtggagagaaagcgcttcagctaggacttcaagtactcgcaaaaattaaaggttatggtgatgcagctcaggaaccagagtttttcactactgctcctgctcttgcgataccaaaagctattgcacatgctggtttggaatcttctcaagttgattactatgagatcaatgaagcatttgcagttgtagcacttgcaaatcaaaagctactagggattagtccggagaaggtgaatgtaaatggaggagctgtctccttaggacatcctctaggctgtagtggagcccgtattctaatcacattacttgggatactgaagaagagaaacggcaagtacggtgtgggaggagtgtgcaacggaggaggaggtgcttctgctcttgttcttgaacttgtttga

SEQ ID NO: 93061 - protein, 404 aa, Brassica napus
MAHSADSSVNPRDVCIVGVARTPMGGFLGSLSSLPATKLGSVAITAALKRANVDPSLVQEVVFGNVLSANLGQAPARQAALGAGIPNSVICTTVNKVCASGMKAVMIAAQSIQLGINDVVVAGGMESMSNTPKYLAEARKGSRFGHDSLVDGMLRDGLWDVYNDCGMGSCAELCAEKFEITREQQDDYAVQSFERGIAAQEAGAFTWEIVPVEVSGGRGRPSTIVDKDEGLGKFDAAKLRKLRPSFKENGGTVTAGNASSISDGAAALVLVSGEKALQLGLQVLAKIKGYGDAAQEPEFFTTAPALAIPKAIAHAGLESSQVDYYEINEAFAVVALANQKLLGISPEKVNVNGGAVSLGHPLGCSGARILITLLGILKKRNGKYGVGGVCNGGGGASALVLELV

SEQ ID NO: 93062 - DNA, 1230 bp, Glycine max
  CDS (1)..(1230)
atgtctacttgtgtaaaatcccgagatgtttgtattgttggtgttgcacggacgccaataggtggtttacttggcaccctatcatctctttctgccacagagttaggctcaattgctattaagactgctctcaagagagcaaatgttgatccatcactcgtgcaagaggtgttttttgggaatgttcttagtgccaatttagggcaggctcctgccagacaggctgcattaggtgcaggaattcctacatctgtaatctgcactactattaacaaggtctgtgcatcagggatgaaagctaccatgcttgcagcactcaccatacaattcggtctcaatgatgttgttgtggctggtggtatggaaagcatgtcaaatgcacctaagtacattgcagaggccaggaaaggatctcgatatggacacgataccatcattgatggtatggtcaaagatggcctttgggatgtctataataacttcggcatgggagtatgtgccgaactatgtgcagatcagcatgtcataacaagagatgagcaggattcttatgccattcgaagctttgagagaggaatatctgctcaaaatgctggtcattttgcttgggagatagttccggttgaagtttccactggaagagggagggcttccacaattgttgataaagatgaaggtctggggaagtttgatgctgcaaagttaaggaagcttagaccaagctttaaagaggttgggggttctgtgactgctggcaatgcttctagcataagtgatggtgctgctgcattagtgctagtgagtgaagagaaggcacgtgagcttggattgcatgtaattgcaaagataaaaggatatggggatgcagctaaggcgcctgaattatttacaactgctccttcccttgcaataccaaaagctatatcaaatgctggtcttgatgcttctcaaattgattattatgaaataaatgaagctttttcagttgtagctcttgcaaatcagaagcttcttgctcttaatcctgaaaaagttaacgtgtatggtggagctgtgtcattggggcatcccttgggttgcagtggagctcgcatcttagtcacattattaggggtattgagacagaagagagggaagtatggtgttgctgccatctgcaacgggggaggaggagcatctgctcttgttcttgagctcatgccggttgccgtgggacgttctttattatga

SEQ ID NO: 93063 - protein, 409 aa, Glycine max
MSTCVKSRDVCIVGVARTPIGGLLGTLSSLSATELGSIAIKTALKRANVDPSLVQEVFFGNVLSANLGQAPARQAALGAGIPTSVICTTINKVCASGMKATMLAALTIQFGLNDVVVAGGMESMSNAPKYIAEARKGSRYGHDTIIDGMVKDGLWDVYNNFGMGVCAELCADQHVITRDEQDSYAIRSFERGISAQNAGHFAWEIVPVEVSTGRGRASTIVDKDEGLGKFDAAKLRKLRPSFKEVGGSVTAGNASSISDGAAALVLVSEEKARELGLHVIAKIKGYGDAAKAPELFTTAPSLAIPKAISNAGLDASQIDYYEINEAFSVVALANQKLLALNPEKVNVYGGAVSLGHPLGCSGARILVTLLGVLRQKRGKYGVAAICNGGGGASALVLELMPVAVGRSLL

SEQ ID NO: 93064 - DNA, 1338 bp, Glycine max
  CDS (1)..(1338)
atggataaagcaattcaaagacagagagtcctgcttgatcatcttcaacccatttcttcaagttcaaatttttcttctcaaacccatcaatctacggatctctcagcttcattatgttttgccaagaattcttcgcacggtcaaataggtggatcagatgacgacgtggtgattgtagctgcatatcgtactgccatctgcaaagcaaagcgtgggggctttaaggatacccttccagatgacctgcttgccacagttctgaaggctgtaatagagaaaacaaatgtgaacccagcagaagttggagacattgttgtgggcactgtactggcacctggatcagatagaggaattgagtgcagaatggctgccttttatgcaggtttcccagagacagtgcctcttcgaactgtcaataggcaatgttcatctggacttcatgcggtttctgacgtagctgcttatataaaagctgggttctatgaaattgggattggggctggattggagtctatgacagtagatcgtgtgaataggcttcacaacattaacccaaaagtagaaacctttacagaagcccgggattgtcttcttccaatgggaattacttctgagaatgtagcgcagcgttatggtgtgacaaggctagagcaagatcaagctgctgtggagtctcataagcgtgctgcagctgcaacagcagctggtaagttcaaagaagaaatcattccagtttctacaaagtttgtggaccctaaaactggagtggagaagaaaattgttgtttctgtcgatgatggtatccggccaaacacaaatttagtggatttggcaaagctgaagcctgcattccagaaagatggaaccacaacagcagggaatgctagccaaattagtgacggtgcagcagctgttctcctcatgaagagaagagtggctgtgcaaaaggggcttcctatacttggaatcttcaggagttttgctgctgttggagtagatcctgcagtcatgggtgttggccctgctgttgctatcccagctgcagtgaaatccgtgggccttgaacttggcaacattgacttatttgaaatcaatgaggcatttgcatcacagtatgtttattgcctcaagaaattgggacttgatcccagaaaggtcaatgtcaatggtggtgccattgctcttggacatcctttgggtgttacaggtgcacgctgtgttgcaactttgttgaatgagatgaaacgtcgtggcaaggattgtcgctatggtgtaatctcaatgtgcatagggtcaggtatgggagctgctgctgtatttgaaaggggagacttttga

SEQ ID NO: 93065 - protein, 445 aa, Glycine max
MDKAIQRQRVLLDHLQPISSSSNFSSQTHQSTDLSASLCFAKNSSHGQIGGSDDDVVIVAAYRTAICKAKRGGFKDTLPDDLLATVLKAVIEKTNVNPAEVGDIVVGTVLAPGSDRGIECRMAAFYAGFPETVPLRTVNRQCSSGLHAVSDVAAYIKAGFYEIGIGAGLESMTVDRVNRLHNINPKVETFTEARDCLLPMGITSENVAQRYGVTRLEQDQAAVESHKRAAAATAAGKFKEEIIPVSTKFVDPKTGVEKKIVVSVDDGIRPNTNLVDLAKLKPAFQKDGTTTAGNASQISDGAAAVLLMKRRVAVQKGLPILGIFRSFAAVGVDPAVMGVGPAVAIPAAVKSVGLELGNIDLFEINEAFASQYVYCLKKLGLDPRKVNVNGGAIALGHPLGVTGARCVATLLNEMKRRGKDCRYGVISMCIGSGMGAAAVFERGDF

SEQ ID NO: 93066 - DNA, 1338 bp, Glycine max
  CDS (1)..(1338)
atggagaaagcaattcaaagacagagagttctgcttgaacatcttcaacccatttcttcaagttcaaatttttcctctcaaacccatcaatctacggatctctcagcttcattatgttttgctgggaattcttcgcatggtcaaacaggtggatcagatgatgacgtggtgattgtagctgcatatcgtactgccatctgcaaagcaaagcgtgggggctttaaggatacccttccagatgaccttcttgccacagttctgaaggctgtaatagagaaaacaaatgtggaccctgcggaagttggagatattgtcgtgggcacagtactggcacctggatcagatagaggaattgagtgcagaatggctgccttttatgcaggtttcccagagactgtgcctcttcgaactgtcaatcggcagtgttcatctggacttcaggcggtttctgacgtagctgcctatataaaagccgggttctatgacattggtattggggctggactggagtctatgacagtagatcgtgtgaataggcttcccaacattaacccaaaggtagagacctttgcagaagcccgggattgtcttcttccaatgggaatcacttctgagaatgtagcacaacgttatggtgtgacaaggctagagcaagatcaggctgctgttgagtctcacaagcgagctgcagctgcaacagcagctggcaagttcaaagaagaaatcattccagtttctacaaagtttgtggaccctaaaactggagtggagaagaaaattattgtttctgtcgatgatggtatccggccaaacacaaatttagcagatttggcaaagctgaagcctgcattccagaaagatggaaccacgacagcagggaatgctagccaaattagtgatggtgcagcagctgtgctcctcatgaagagaagagtggctgtgcaaaaggggcttcctattcttggaatcttcaggagttttgctgctgttggagtagatcctgcagtcatgggtgttggccctgctgttgctatcccagctgcagtgaaatctgctggtcttgaacttggcaacattgacttatttgaaatcaatgaggcatttgcatcgcagtatgtttattgcctcaagaaattgggacttgatcccagaaaggtcaatgtcaatggtggtgccattgctcttggacatcctttgggcgttacaggtgcacgttgtgttgcaactttgttgaatgagatgaaacgcggtggcaaggattgtcgctttggtgtaatctcaatgtgcatagggtcaggtatgggagctgctgctgtatttgaaaggggggacttttaa

SEQ ID NO: 93067 - protein, 445 aa, Glycine max
MEKAIQRQRVLLEHLQPISSSSNFSSQTHQSTDLSASLCFAGNSSHGQTGGSDDDVVIVAAYRTAICKAKRGGFKDTLPDDLLATVLKAVIEKTNVDPAEVGDIVVGTVLAPGSDRGIECRMAAFYAGFPETVPLRTVNRQCSSGLQAVSDVAAYIKAGFYDIGIGAGLESMTVDRVNRLPNINPKVETFAEARDCLLPMGITSENVAQRYGVTRLEQDQAAVESHKRAAAATAAGKFKEEIIPVSTKFVDPKTGVEKKIIVSVDDGIRPNTNLADLAKLKPAFQKDGTTTAGNASQISDGAAAVLLMKRRVAVQKGLPILGIFRSFAAVGVDPAVMGVGPAVAIPAAVKSAGLELGNIDLFEINEAFASQYVYCLKKLGLDPRKVNVNGGAIALGHPLGVTGARCVATLLNEMKRGGKDCRFGVISMCIGSGMGAAAVFERGDF

SEQ ID NO: 93068 - DNA, 1338 bp, Glycine max
  CDS (1)..(1338)
atggataaagcaattcaaagacagagagtcctgcttgatcatcttcaacccatttcttcaagttcaaatttttcttctcaaacccatcaatctacggatctctcagcttcattatgttttgccaagaattcttcgcacggtcaaataggtggatcagatgacgacgtggtgattgtagctgcatatcgtactgccatctgcaaagcaaagcgtgggggctttaaggatacccttccagatgacctgcttgccacagttctgaaggctgtaatagagaaaacaaatgtgaacccagcagaagttggagacattgttgtgggcactgtactggcacctggatcagatagaggaattgagtgcagaatggctgccttttatgcaggtttcccagagacagtgcctcttcgaactgtcaataggcaatgttcatctggacttcaggcggtttctgacgtagctgcttatataaaagctgggttctatgaaattgggattggggctggattggagtctatgacagtagatcgtgtgaataggcttcgcaacattaacccaaaggtagaaacctttgcagaagcccgggattgtcttcttccaatgggaattacttctgagaatgtagcgcagcgttatggtgtgacaaggctagagcaagatcaagctgctgttgagtctcataagcgtgctgcagctgcaacagcagctggtaagttcaaagaagaaatcattccagtttctacaaagtttgtggaccctaaaactggagtggagaagaaaattgttgtttctgtcgatgatggtatccggccaaacacaaatttagtggatttggcaaagctgaagcctgcattccagaaagatggaaccacaacagcagggaatgctagccaaattagtgacggtgcagcagctgttctcctcatgaagagaagagtggctgtgcaaaaggggcttcctatacttggaatcttcaggagttttgctgctgttggagtagatcctgcagtcatgggtgttggccctgctgttgctatcccagctgcagtgaaatccgtgggccttgaacttggcaacattgacttatttgaaatcaatgaggcatttgcatcacagtatgtttattgcctcaagaaattgggacttgatcccagaaaggtcaatgtcaatggtggtgccattgctcttggacatcctttgggtgttacaggtgcacgctgtgttgcaactttgttgaatgagatgaaacgtcgtggcaaggattgtcgctatggtgtaatctcaatgtgcatagggtcaggtatgggagctgctgctgtatttgaaaggggagacttttga

SEQ ID NO: 93069 - protein, 445 aa, Glycine max
MDKAIQRQRVLLDHLQPISSSSNFSSQTHQSTDLSASLCFAKNSSHGQIGGSDDDVVIVAAYRTAICKAKRGGFKDTLPDDLLATVLKAVIEKTNVNPAEVGDIVVGTVLAPGSDRGIECRMAAFYAGFPETVPLRTVNRQCSSGLQAVSDVAAYIKAGFYEIGIGAGLESMTVDRVNRLRNINPKVETFAEARDCLLPMGITSENVAQRYGVTRLEQDQAAVESHKRAAAATAAGKFKEEIIPVSTKFVDPKTGVEKKIVVSVDDGIRPNTNLVDLAKLKPAFQKDGTTTAGNASQISDGAAAVLLMKRRVAVQKGLPILGIFRSFAAVGVDPAVMGVGPAVAIPAAVKSVGLELGNIDLFEINEAFASQYVYCLKKLGLDPRKVNVNGGAIALGHPLGVTGARCVATLLNEMKRRGKDCRYGVISMCIGSGMGAAAVFERGDF

SEQ ID NO: 93070 - DNA, 1392 bp, Glycine max
  CDS (1)..(1392)
atggagaaagcgatcaacagacagaagattttgcttcatcatctcaacccttcatcatccacccaccccaacgaatcatcctccctccatgcttcagcatgtgtggcgggggatagcgctgcttatcaaaggacatcgacattcggggacgatgttgtgatcgtggctgcttatcggactgctcattgcaaagctaaacgaggtggtttcaaagacactcttcctgatgatctactggctcctgttttgaaggctgtaattgagaaaaccaatgtgaacccaagtgaagttggggatattgttgtaggtagtgtattggctcctggagctcaaagagctagtgaatgccgaatggctgcattttatgctggttttcccgaaactgtgcctgttaggaccgttaataggcaatgttcatctgggctccaggctgtcgctgatgtagctgctgctataagggctgggttctatgacattggtattggtgccggtttggaatctatgaccactaatccaatgggatgggatggatcagtgaatcctaaggtaaaaatgtttgaacaagcacaaaactgccttcttcctatgggaattacctctgaaaatgttgcacagcgctttggggtttcaaggaaggaacaagaccaggctgcagttgagtctcacaggcgagctgctgcagctactgctgctggtaaatttaaagatgaaattgtcccagttaccaccaagattgtggacccaaaaaccggtgaggagaaatctgtcaccatttctgttgatgatggaattcgacctggcacaacagtgtctgatctaggaagactcaaacctgtgttcaagaaagacggaagcaccactgctggtaattctagccaggtgaccgatggggcttcagctgttctgctgatgaaaagaagtgttgcattgcaaaaggggctacccattcttggtgtattcaggacttttgcagcagttggtgttgatcctgccatcatgggtgttggccctgctgctgcaattcctgttgctgttaaggctgcaggtctagagcttgatgatattgatctttttgaaataaatgaggcatttgcctcccagttcgtgtattgccgtaacaagctagggcttgatccagaaaagatcaatgttaatggaggtgcaatggcaattgggcatcctctgggttcaacaggtgctcgatgtgttgcaactctgttgcatgaaatgaagaaacgtggcagggactgtcgatttggagttatatctatgtgcataggtactggaatgggggcagctgctgtttttgagagtggtgattgtgctgatgagctatgcaatgcccggaaagtggatgaccttcttttatccaaggatgctcgcttgaaatag

SEQ ID NO: 93071 - protein, 463 aa, Glycine max
MEKAINRQKILLHHLNPSSSTHPNESSSLHASACVAGDSAAYQRTSTFGDDVVIVAAYRTAHCKAKRGGFKDTLPDDLLAPVLKAVIEKTNVNPSEVGDIVVGSVLAPGAQRASECRMAAFYAGFPETVPVRTVNRQCSSGLQAVADVAAAIRAGFYDIGIGAGLESMTTNPMGWDGSVNPKVKMFEQAQNCLLPMGITSENVAQRFGVSRKEQDQAAVESHRRAAAATAAGKFKDEIVPVTTKIVDPKTGEEKSVTISVDDGIRPGTTVSDLGRLKPVFKKDGSTTAGNSSQVTDGASAVLLMKRSVALQKGLPILGVFRTFAAVGVDPAIMGVGPAAAIPVAVKAAGLELDDIDLFEINEAFASQFVYCRNKLGLDPEKINVNGGAMAIGHPLGSTGARCVATLLHEMKKRGRDCRFGVISMCIGTGMGAAAVFESGDCADELCNARKVDDLLLSKDARLK

SEQ ID NO: 93072 - DNA, 1386 bp, Zea mays
  CDS (1)..(1386)
atggagaaggccgtcgacaggcagcgggtcctgctgcggcacctgaaccccgccgcggcggccagccccgccccgcacgccatctccgcaagcgcgtgcgcggcgggggacagcgcggcgtaccaccggaggccggccttcgccgacgacgtcgtcatcgtcgctgcttacaggacggcaatttgcaaggccaagagagggggtttcaaggatacctttgctgaggacctcttggttcctgtcttcaaggctttggtagacaagacgaagctggacccaagtgaagttggcgacattgttgttggtactgtcttagctcctggttcccagagggcaatcgaatgcagaatggctgcactgtatgctggtttccctgacactgttcctcttaagactgtaaacaggcagtgctcttctggccttcaggcagttgcagatgttgccactgctattaaagcagggctctatgacattggtattgctgctggtttggagtccatgacagtgaacaaagttagtcttgatggccaagcgaatcccaaagttgagctattttctcaagcacgtgattgtcttctcccaatgggcctcacatctgagaatgttgcacaccgttttggcataacacgactggagcaagatcaagctgctgttgagtcacatagaaaggctgctgccgcagcagctgctggtaaattcaaagaggaaattgtgccagttcatacaaagattgttgatccaaaaactggtgaggaaaaaaagatcgtaatctctgcagatgatggaatccgagtggatacttctcttgcagtcctgtcaaaactcaaaccagcattttcaaaggatggcagcactactgctgggaatgcaagccaagtgagtgatggtgctggggccgtcttgctaatgagacgggatgttgctatgaagaagggtcttccagttcttggtgtctttaggacctttgccgctgttggagttgatccagctgtaatgggtattggtcctgccgttgcaatccctgcagcagtgaaagctgctggccttcagatggatgatatcgatcttttcgaaatcaacgaggcttttgcatctcagtatgtctactgctgcaagaagttggaacttgatcctgctaaagtcaatgttaatggcggtgcaatggctcttggacatcctttgggtgctacaggtgcacggtgcgtcagtactcttctcaatgagatgaagcgccgcggcaaggattgccggttcggagtgatttctatgtgcataggttctgggatgggtgctgctgctgtgttcgagcggggagacggcgttgatgagctcaccaatgctcggggaatctcgacccacaactggctttccaaggacgccatgtaa

SEQ ID NO: 93073 - protein, 461 aa, Zea mays
MEKAVDRQRVLLRHLNPAAAASPAPHAISASACAAGDSAAYHRRPAFADDVVIVAAYRTAICKAKRGGFKDTFAEDLLVPVFKALVDKTKLDPSEVGDIVVGTVLAPGSQRAIECRMAALYAGFPDTVPLKTVNRQCSSGLQAVADVATAIKAGLYDIGIAAGLESMTVNKVSLDGQANPKVELFSQARDCLLPMGLTSENVAHRFGITRLEQDQAAVESHRKAAAAAAAGKFKEEIVPVHTKIVDPKTGEEKKIVISADDGIRVDTSLAVLSKLKPAFSKDGSTTAGNASQVSDGAGAVLLMRRDVAMKKGLPVLGVFRTFAAVGVDPAVMGIGPAVAIPAAVKAAGLQMDDIDLFEINEAFASQYVYCCKKLELDPAKVNVNGGAMALGHPLGATGARCVSTLLNEMKRRGKDCRFGVISMCIGSGMGAAAVFERGDGVDELTNARGISTHNWLSKDAM

SEQ ID NO: 93074 - DNA, 1206 bp, Zea mays
  CDS (1)..(1206)
atggcatccaacggcatcgcccccagagatgtatgtgttgttggcgttgcacgcacccctttgggtggtttccttggtgccttgtcttccttgcccgcaacaaagcttggctctatagcaattgaagctgctctgaaaagagcaaatgtggatccggccctcgtgcaggaggtctttttcggaaacgtcttgagtgctaatttgggacaagctcctgcaaggcaagccgctctgggtgcagggataccaaacactgttgtttgcaccactgttaacaaagtctgcgcatctggcatgaaagctactatgttcgccgcacagtcaattcagctgggtatcaatgatattgttgtggcaggtggcatggaaagcatgtccaatgccccaaagtacattgctgaagctaggaaagggtctcgttttggacatgacacacttgttgatgccatgcttaaggatggactttgggatgtatacaatgactgtgccatgggaatgtgtgccgaactttgtgctgacaatcatgccctcacaagagaagaccaggatgcttttgctatccaaagcaaccagcgtggaattgctgctcgtgacagtggtgcttttgcatgggagattgttccgattgaagttcctgttgggagaggaaaaccacctgtacttattgagaaagatgaaagcctggataagtttgacccagcaaaactgaagaaacttcgcccaagtttcaaggagaatggtggtaccgttacagctggaaatgcttctagtataagtgatggggcggctgcattagttttggtgagtgggcagaaggctcaagagcttggcctgcaagtccttgcaaggatcagaggatatgcagatgcagctcaagctccggaactttttacaaccaccccagcacttgcgataccaaaggctatatcaaatgctggattagagtcatcccatgttgatttttttgagattaatgaagcattttctgctgtcgcacttgcaaatcaaaagcttcttgggattccttcagaaaagattaatgtccatggaggagctgtgtctctagggcatcctcttgggtgcagcggtgctcgcattttggtcacccttcttggtgtccttagggaaaagggcggcaagatcggtgttgctggtgtctgcaacggcggaggtggagcatcagctcttgttctcgaactcgcataa

SEQ ID NO: 93075 - protein, 401 aa, Zea mays
MASNGIAPRDVCVVGVARTPLGGFLGALSSLPATKLGSIAIEAALKRANVDPALVQEVFFGNVLSANLGQAPARQAALGAGIPNTVVCTTVNKVCASGMKATMFAAQSIQLGINDIVVAGGMESMSNAPKYIAEARKGSRFGHDTLVDAMLKDGLWDVYNDCAMGMCAELCADNHALTREDQDAFAIQSNQRGIAARDSGAFAWEIVPIEVPVGRGKPPVLIEKDESLDKFDPAKLKKLRPSFKENGGTVTAGNASSISDGAAALVLVSGQKAQELGLQVLARIRGYADAAQAPELFTTTPALAIPKAISNAGLESSHVDFFEINEAFSAVALANQKLLGIPSEKINVHGGAVSLGHPLGCSGARILVTLLGVLREKGGKIGVAGVCNGGGGASALVLELA

SEQ ID NO: 93076 - DNA, 1266 bp, Zea mays
  CDS (1)..(1266)
atggcgtcgtcgagctcggctgctactactagtggtgacagtcagggcctcaaggctcgagatgcctgcatcgtcggcgtcgcccgcacgcccatcggcgcacttctcgggtcgctgtcgtccctccccgccaccaagctcggctccatcgccatccagggcgctctcaagagggcgaaggtcgacccggcgctcgtgcaggaggttttcatgggcaacgtcctcagcgccaacctcggccaggctccggcaaggcaggcagcccttggcgccggcttgcccaactccgtgccatgtaccaccgtcaacaaagtttgctcctcgggaatgaaggctgtcatgtttgcggctcaaagtattcagctggggatcaacgatgttgtggtcgccggtggcatggaaagcatgtcgaatgccccaaaatatgtggctgaagcaagacgaggatcacggttcggacatgatgtccttgttgatgggatgctcaaggatggcctgtgggatgtctataacgatttcccgatgggaatgtgtgctgaattgtgttcagaccagcactcaatctcaagggaggagcaggattcgtatgctatcctcagcaatgaacgtggcatagcagctcgggatagcggtgcattttcttgggagattgttcctgttgaaatttcttctggtagagggaaaccaccagttgttgttgacaaggatgagagtcttgcaaagtttgatccagtaaagctgaagaaacttgggccaacttttaagacgaatggttctgtaacggctggcaattcttctagtataagtgatggcgctgctgcaattgtccttgtcagtggagagagagccaagaatcttggccttgaagttattgcaaggattacagggtatgctgatgctgcacaggcacctgagctgtttacgacagctccagcccttgccattccaaaggctatatcaaatgcagctcttcaaacttcacagatagattattatgaagtaaatgaggctttctctgttgttgctatagctaatcagaggcttcttggtatcccttccggaaagctaaacttaagtggtggtgctgtttccctgggccatcctatcggttgcagtggtgcacggataattgtcactttgcttgggattcttaggcagaaaaatggaaaatttggtgttgctggagtttgcaatggcggcggcggcgcttcagccctcgttttggagctcatgcaaccctcttcgcatatccattcatcattgtga

SEQ ID NO: 93077 - protein, 421 aa, Zea mays
MASSSSAATTSGDSQGLKARDACIVGVARTPIGALLGSLSSLPATKLGSIAIQGALKRAKVDPALVQEVFMGNVLSANLGQAPARQAALGAGLPNSVPCTTVNKVCSSGMKAVMFAAQSIQLGINDVVVAGGMESMSNAPKYVAEARRGSRFGHDVLVDGMLKDGLWDVYNDFPMGMCAELCSDQHSISREEQDSYAILSNERGIAARDSGAFSWEIVPVEISSGRGKPPVVVDKDESLAKFDPVKLKKLGPTFKTNGSVTAGNSSSISDGAAAIVLVSGERAKNLGLEVIARITGYADAAQAPELFTTAPALAIPKAISNAALQTSQIDYYEVNEAFSVVAIANQRLLGIPSGKLNLSGGAVSLGHPIGCSGARIIVTLLGILRQKNGKFGVAGVCNGGGGASALVLELMQPSSHIHSSL

SEQ ID NO: 93078 - DNA, 1386 bp, Zea mays
  CDS (1)..(1386)
atggagaaggcgatcgatcggcagcgggtcctcctggcgcacctcctcccctccccctccgccgcctcctcgcagcctcagcttgcggcgtcggcgtgcgcggccggggacagcgccgcctaccagaggtcctcctccttcggggacgatgtcgtcgtcgtcgctgcctacaggacgccgatatgcaaggccaagcgaggaggcttcaaggacacctacccagaggacctcctcactgttgttctcaaggctgttctggacaacactagaatcaatccagctgacatcggtgacatcgtcgttgggacggtgctcggccctggttcccagcgtgcaaacgagtgcaggatggctgcgttgtttgctggattccctgaaaccgtccctgttagaactgtcaaccgccagtgttcatctgggctacaggcagtagccgatgtcgcagctgctataaaggctggttactatgacatagggattggtgctggtttggaatccatgtccataaattccattgcttgggaaggacaagttaacccaaaaataagcgcattccagaaagcacaggattgtcttctgcccatgggaattacttctgaaaatgttgcccatcgatatggtgtaaccaggcaagagcaagatcaggccgccgctgagtctcataggagagctgctgcagccacggcctctggaaaattcaaggatgagatcgtcccggtgccaacaaagatcgttgatcctaaaactggagaggagaaggaagttgtgatatcagttgatgatgggattaggccagggaccacagcatctggattggcgaaactgaaaccagtttttaaaaaggatggaactacaactgcaggcaattccagtcaagtgagtgatggtgctggagctgttcttctcatgaaaagatctgtggctctgaagaaagggctgcccattcttggtgttttcaggagctttgcggctgttggagtggatccagctgttatgggcgttggtcctgctgtggccattcctgctgctgtgaagtctgcaggccttgagattggcgacattgatctgtttgaactgaatgaggccttcgcctctcagtttgtctattgctgcaacaagttggggctggaccgttctaaagtaaatgtaaatggaggcgcgattgcccttggacaccctctgggtgcaacaggtgcccggtgtgtggctactcttctaaatgaaatgaagcgccggggcagagactgcagatttggtgttgtcaccatgtgtatcggatctggaatgggggcagcagctgtgttcgagcggggagacgcggtggatggactctccaacgtgagggacatgcaggcacataattttctgtctaaggatgcgaagtag

SEQ ID NO: 93079 - protein, 461 aa, Zea mays
MEKAIDRQRVLLAHLLPSPSAASSQPQLAASACAAGDSAAYQRSSSFGDDVVVVAAYRTPICKAKRGGFKDTYPEDLLTVVLKAVLDNTRINPADIGDIVVGTVLGPGSQRANECRMAALFAGFPETVPVRTVNRQCSSGLQAVADVAAAIKAGYYDIGIGAGLESMSINSIAWEGQVNPKISAFQKAQDCLLPMGITSENVAHRYGVTRQEQDQAAAESHRRAAAATASGKFKDEIVPVPTKIVDPKTGEEKEVVISVDDGIRPGTTASGLAKLKPVFKKDGTTTAGNSSQVSDGAGAVLLMKRSVALKKGLPILGVFRSFAAVGVDPAVMGVGPAVAIPAAVKSAGLEIGDIDLFELNEAFASQFVYCCNKLGLDRSKVNVNGGAIALGHPLGATGARCVATLLNEMKRRGRDCRFGVVTMCIGSGMGAAAVFERGDAVDGLSNVRDMQAHNFLSKDAK

SEQ ID NO: 93080 - DNA, 1386 bp, Zea mays
  CDS (1)..(1386)
atggagaaggcgatcgatcggcagcgggtcctcctggcgcacctcctcccctccccctccgccgcctcctcgcagcctcagcttgcggcgtcggcgtgcgcggccggggacagcgccgcctaccagaggtcctcctccttcggggacgatgtcgtcgtcgtcgctgcctacaggacgccgatatgcaaggccaagcgaggaggcttcaaggacacctacccagaggacctcctcactgttgttctcaaggctgttctggacaacactagaatcaatccagctgacatcggtgacatcgtcgttgggacggtgcttggccctggttcccagcgtgcaaacgagtgcaggatggctgcgttgtttgctggattccctgaaaccgtccctgttagaactgtcaaccgccagtgttcatctgggctacaggcagtagccgatgtcgcagctgctataaaggctggttactatgacatagggattggtgctggtttggaatccatgtccataaattccattgcttgggaaggacaagttaacccaaaaataagcgcattccagaaagcacaggattgtcttctgcccatgggaattacgtctgaaaatgttgcccatcgatatggtgtaaccaggcaagagcaagatcaggccgccgctgagtctcataggagagctgctgcagccacggcctctggaaaattcaaggatgagatcgtcccggtgccaacaaagatcgttgatcctaaaactggagaggagaaggaagttgtgatatcagttgatgatgggattaggccagggaccacagcatctagattggcgaaactgaaaccagtttttaaaaaggatggaactacaactgcaggcaattccagtcaagtgagtgatggtgctggagctgttcttctcatgaaaagatctgtggctctgaagaaagggctgcccattcttggtgttttcaggagctttgcggctgttggagtggatccagctgttatgggtgttggtcctgctgtggccattcctgctgctgtgaagtctgcaggccttgagattggcgacattgatctgtttgaactgaatgaggccttcgcctctcagtttgtctattgctgcaacaagttggggctggaccgttctaaagtaaatgtaaatggaggcgcgattgcccttggacaccctctgggtgcaacaggtgcccggtgtgtggctactcttctaaatgaaatgaagcgccggggcagagactgcagatttggtgttgtcaccatgtgtatcggatctggaatgggggcagcagctgtgttcgagcggggagacgcggtggatggactctccaacgtgagggacatgcaggcacataattttctgtctaaggatgcgaagtag

SEQ ID NO: 93081 - protein, 461 aa, Zea mays
MEKAIDRQRVLLAHLLPSPSAASSQPQLAASACAAGDSAAYQRSSSFGDDVVVVAAYRTPICKAKRGGFKDTYPEDLLTVVLKAVLDNTRINPADIGDIVVGTVLGPGSQRANECRMAALFAGFPETVPVRTVNRQCSSGLQAVADVAAAIKAGYYDIGIGAGLESMSINSIAWEGQVNPKISAFQKAQDCLLPMGITSENVAHRYGVTRQEQDQAAAESHRRAAAATASGKFKDEIVPVPTKIVDPKTGEEKEVVISVDDGIRPGTTASRLAKLKPVFKKDGTTTAGNSSQVSDGAGAVLLMKRSVALKKGLPILGVFRSFAAVGVDPAVMGVGPAVAIPAAVKSAGLEIGDIDLFELNEAFASQFVYCCNKLGLDRSKVNVNGGAIALGHPLGATGARCVATLLNEMKRRGRDCRFGVVTMCIGSGMGAAAVFERGDAVDGLSNVRDMQAHNFLSKDAK

SEQ ID NO: 93082 - DNA, 1386 bp, Zea mays
  CDS (1)..(1386)
atggagaaggccgtcgacaggcagcgggtcctgctgcggcacctcaaccccgccgcggcggggagccccgccccgcccgccatctccgcaagcgcgtgcgcggcgggggacagcgcggcgtaccaccggaggccggccttcgccgacgacgtcgtcatcgtcgctgcttacaggacggcaatttgcaaggccaagagagggggtttcaaggatacctttgctgaggacctcttggttcctgtcttcaaggctttggtagacaagacgaagctggacccaagtgaagttggcgacattgttgttggtactgtcttagctcctggttcccagagggcaatcgaatgcagaatggctgcactgtatgctggtttccctgacaccgttcctcttaagactgtaaacaggcagtgctcttctggccttcaggcagttgcagatgttgccactgctattaaagcagggctctatgacattggtattgctgctggtttggagtccatgacagtgaacaaagttagtcttgatggccaagcgaatcccaaagttgagctattttctcaagcacgtgattgtcttctcccaatgggcctcacatctgagaatgttgcacaccgttttggcataacacgactggagcaagatcaagctgctgttgagtcacatagaaaggctgctgccgcagcagctgctggtaaattcaaagaggaaattgtgccagttcatacaaagattgttgatccaaaaactggtgaggaaaagaagatcgtagtctctgcagatgatggaatccgagtggatacttctcttgcagtcctgtcaaaactcaaaccagcattttcaaaggatggcagcactactgctgggaatgcaagccaagtgagtgatggtgctggggccgtcttgctaatgagacgggatgttgctatgaaaaagggtcttccagttcttggtgtctttaggacctttgccgctgttggagttgatccagctgtaatgggtattggtcctgccgtagcaatccccgcagcagtgaaagctgctggccttcagatggatgatatcgatcttttcgaaatcaatgaggcttttgcatctcagtatgtctactgctgcaagaagttgaaacttgatcctgctaaagtcaatgttaatggcggtgcaatggcccttggacatccgttgggtgctacaggtgcacggtgcgtcagtactcttctcaatgagatgaagcgccgcggcaaggattgccggttcggagtgatttctatgtgcataggttctgggatgggtgctgctgctgtgttcgagcggggagacggcgttgatgagctcaccaatgctcggggaatctcgacccacaactggctttccaaggacgccatgtaa

SEQ ID NO: 93083 - protein, 461 aa, Zea mays
MEKAVDRQRVLLRHLNPAAAGSPAPPAISASACAAGDSAAYHRRPAFADDVVIVAAYRTAICKAKRGGFKDTFAEDLLVPVFKALVDKTKLDPSEVGDIVVGTVLAPGSQRAIECRMAALYAGFPDTVPLKTVNRQCSSGLQAVADVATAIKAGLYDIGIAAGLESMTVNKVSLDGQANPKVELFSQARDCLLPMGLTSENVAHRFGITRLEQDQAAVESHRKAAAAAAAGKFKEEIVPVHTKIVDPKTGEEKKIVVSADDGIRVDTSLAVLSKLKPAFSKDGSTTAGNASQVSDGAGAVLLMRRDVAMKKGLPVLGVFRTFAAVGVDPAVMGIGPAVAIPAAVKAAGLQMDDIDLFEINEAFASQYVYCCKKLKLDPAKVNVNGGAMALGHPLGATGARCVSTLLNEMKRRGKDCRFGVISMCIGSGMGAAAVFERGDGVDELTNARGISTHNWLSKDAM

SEQ ID NO: 93084 - DNA, 26 bp, Artificial sequence
  primer
atgtctcagaacgtttacattgtatc

SEQ ID NO: 93085 - DNA, 26 bp, Artificial sequence
  primer
tcatatcttttcaatgacaatagagg

SEQ ID NO: 93086 - protein, 452 aa, Artificial sequence
  consensus sequence
  Variant (2)..(5): Xaa in position 2 to 5 is any amino acid
  Variant (8)..(13): Xaa in position 8 to 13 is any amino acid
  Variant (14)..(14): Xaa in position 14 is any or no amino acid
  Variant (16)..(23): Xaa in position 16 to 23 is any amino acid
  Variant (24)..(24): Xaa in position 24 is any or no amino acid
  Variant (26)..(47): Xaa in position 26 to 47 is any amino acid
  Variant (48)..(53): Xaa in position 48 to 53 is any or no amino acid
  Variant (55)..(55): Xaa in position 55 is any amino acid
  Variant (58)..(83): Xaa in position 58 to 83 is any amino acid
  Variant (84)..(86): Xaa in position 84 to 86 is any or no amino acid
  Variant (88)..(89): Xaa in position 88 to 89 is any amino acid
  Variant (91)..(91): Xaa in position 91 is any amino acid
  Variant (94)..(103): Xaa in position 94 to 103 is any amino acid
  Variant (105)..(106): Xaa in position 105 to 106 is any amino acid
  Variant (108)..(115): Xaa in position 108 to 115 is any amino acid
  Variant (117)..(117): Xaa in position 117 is any amino acid
  Variant (119)..(119): Xaa in position 119 is any amino acid
  Variant (121)..(129): Xaa in position 121 to 129 is any amino acid
  Variant (130)..(177): Xaa in position 130 to 177 is any or no amino acid
  Variant (180)..(182): Xaa in position 180 to 182 is any amino acid
  Variant (184)..(185): Xaa in position 184 to 185 is any amino acid
  Variant (187)..(192): Xaa in position 187 to 192 is any amino acid
  Variant (193)..(193): Xaa in position 193 is any or no amino acid
  Variant (195)..(196): Xaa in position 195 to 196 is any amino acid
  Variant (199)..(200): Xaa in position 199 to 200 is any amino acid
  Variant (202)..(203): Xaa in position 202 to 203 is any amino acid
  Variant (205)..(210): Xaa in position 205 to 210 is any amino acid
  Variant (212)..(214): Xaa in position 212 to 214 is any amino acid
  Variant (216)..(216): Xaa in position 216 is any amino acid
  Variant (218)..(218): Xaa in position 218 is any amino acid
  Variant (219)..(219): Xaa in position 219 is any or no amino acid
  Variant (222)..(222): Xaa in position 222 is any amino acid
  Variant (224)..(229): Xaa in position 224 to 229 is any amino acid
  Variant (230)..(255): Xaa in position 230 to 255 is any or no amino acid
  Variant (257)..(269): Xaa in position 257 to 269 is any amino acid
  Variant (270)..(270): Xaa in position 270 is any or no amino acid
  Variant (272)..(274): Xaa in position 272 to 274 is any amino acid
  Variant (276)..(279): Xaa in position 276 to 279 is any amino acid
  Variant (280)..(283): Xaa in position 280 to 283 is any or no amino acid
  Variant (286)..(286): Xaa in position 286 is any amino acid
  Variant (288)..(288): Xaa in position 288 is any amino acid
  Variant (290)..(292): Xaa in position 290 to 292 is any amino acid
  Variant (296)..(296): Xaa in position 296 is any amino acid
  Variant (298)..(305): Xaa in position 298 to 305 is any amino acid
  Variant (307)..(309): Xaa in position 307 to 309 is any amino acid
  Variant (311)..(326): Xaa in position 311 to 326 is any amino acid
  Variant (327)..(328): Xaa in position 327 to 328 is any or no amino acid
  Variant (330)..(335): Xaa in position 330 to 335 is any amino acid
  Variant (336)..(336): Xaa in position 336 is any or no amino acid
  Variant (338)..(339): Xaa in position 338 to 339 is any amino acid
  Variant (341)..(348): Xaa in position 341 to 348 is any amino acid
  Variant (350)..(355): Xaa in position 350 to 355 is any amino acid
  Variant (356)..(357): Xaa in position 356 to 357 is any or no amino acid
  Variant (359)..(360): Xaa in position 359 to 360 is any amino acid
  Variant (362)..(362): Xaa in position 362 is any amino acid
  Variant (367)..(376): Xaa in position 367 to 376 is any amino acid
  Variant (378)..(382): Xaa in position 378 to 382 is any amino acid
  Variant (383)..(399): Xaa in position 383 to 399 is any or no amino acid
  Variant (401)..(401): Xaa in position 401 is any amino acid
  Variant (403)..(404): Xaa in position 403 to 404 is any amino acid
  Variant (408)..(410): Xaa in position 408 to 410 is any amino acid
  Variant (414)..(414): Xaa in position 414 is any amino acid
  Variant (416)..(417): Xaa in position 416 to 417 is any amino acid
  Variant (421)..(423): Xaa in position 421 to 423 is any amino acid
  Variant (426)..(430): Xaa in position 426 to 430 is any amino acid
  Variant (431)..(438): Xaa in position 431 to 438 is any or no amino acid
  Variant (440)..(443): Xaa in position 440 to 443 is any amino acid
  Variant (445)..(445): Xaa in position 445 is any amino acid
  Variant (447)..(447): Xaa in position 447 is any amino acid
  Variant (449)..(451): Xaa in position 449 to 451 is any amino acid
IXXXXRTXXXXXXXGXXXXXXXXXLXXXXXXXXXXXXXXXXXXXXXXXXXXXXGXVLXXXXXXXXXXXXXXXXXXXXXXXXXXXXXNXXCXSGXXXXXXXXXXIXXGXXXXXXXXGXEXMXXXXXXXXXXXXXXXXXXXXXXXXXXXXXXXXXXXXXXXXXXXXXXXXXXXXXXXXXMGXXXEXXAXXXXXXXRXXQDXXAXXSXXXXXXAXXXGXFXXEIXPXXXXXXXXXXXXXXXXXXXXXXXXXXXXXXXXDXXXXXXXXXXXXXXLXXXFXXXXXXXXTAXNXSXXXDGAXAXXXXXXXXAXXXGXXXXXXXXXXXXXXXXXXPXXXXXXXPXXAXXXXXXXXGXXXXXXXXDXXEXNEAFXXXXXXXXXXLXXXXXXXXXXXXXXXXXXXXXXKXNXXGGAXXXGHPXGXXGARXXXTLXXXXXXXXXXXXXGXXXXCXGXGXXXA

SEQ ID NO: 93087 - protein, 21 aa, Artificial sequence
  protein pattern
  Variant (2)..(2): Xaa in position 2 is any amino acid
  Variant (4)..(5): Xaa in position 4 to 5 is any amino acid
  Variant (8)..(8): Xaa in position 8 is Ala, Gly or Ser
  Variant (9)..(9): Xaa in position 9 is any amino acid
  Variant (10)..(10): Xaa in position 10 is Ala or Ser
  Variant (11)..(11): Xaa in position 11 is Phe, Ile, Leu, Met or Val
  Variant (15)..(15): Xaa in position 15 is Phe, Ile, Leu or Val
  Variant (17)..(17): Xaa in position 17 is any amino acid
  Variant (18)..(18): Xaa in position 18 is Ser or Thr
  Variant (20)..(20): Xaa in position 20 is Ala, Cys, Gly, Asn, Ser, Thr or Val
KXNXXGGXXXXGHPXGXXGXR

SEQ ID NO: 93088 - protein, 17 aa, Artificial sequence
  protein pattern
  Variant (2)..(3): Xaa in position 2 to 3 is any amino acid
  Variant (6)..(6): Xaa in position 6 is Ala, Gly or Pro
  Variant (7)..(7): Xaa in position 7 is Asn, Ser or Thr
  Variant (8)..(8): Xaa in position 8 is Ala or Ser
  Variant (10)..(10): Xaa in position 10 is any amino acid
  Variant (11)..(11): Xaa in position 11 is Ile, Leu, Met or Val
  Variant (12)..(12): Xaa in position 12 is Cys, Asn, Ser or Thr
  Variant (15)..(15): Xaa in position 15 is any or no amino acid
  Variant (17)..(17): Xaa in position 17 is Ala, Cys, Gly, Ser or Val
GXXTAXXXSXXXDGXAX

SEQ ID NO: 93089 - protein, 18 aa, Artificial sequence
  protein pattern
  Variant (2)..(3): Xaa in position 2 to 3 is any amino acid
  Variant (4)..(4): Xaa in position 4 is Gly or Asn
  Variant (5)..(9): Xaa in position 5 to 9 is any amino acid
  Variant (10)..(10): Xaa in position 10 is Ile, Leu or Val
  Variant (11)..(11): Xaa in position 11 is Ala, Gly, Thr or Val
  Variant (12)..(12): Xaa in position 12 is any amino acid
  Variant (14)..(14): Xaa in position 14 is any amino acid
  Variant (16)..(16): Xaa in position 16 is any amino acid
  Variant (18)..(18): Xaa in position 18 is Ser or Thr
IXXXXXXXXXXXGXEXMX

SEQ ID NO: 93090 - protein, 14 aa, Artificial sequence
  protein pattern
  Variant (2)..(2): Xaa in position 2 is Ala, Ile, Leu or Val
  Variant (3)..(3): Xaa in position 3 is any amino acid
  Variant (4)..(4): Xaa in position 4 is Ala, Gly, Ser or Thr
  Variant (5)..(5): Xaa in position 5 is Ile, Leu, Met or Val
  Variant (7)..(7): Xaa in position 7 is any amino acid
  Variant (9)..(9): Xaa in position 9 is any or no amino acid
  Variant (11)..(11): Xaa in position 11 is any or no amino acid
  Variant (13)..(13): Xaa in position 13 is any amino acid
  Variant (14)..(14): Xaa in position 14 is Ala or Ser
GXXXXCXGXGXGXX

SEQ ID NO: 93091 - DNA, 1461 bp, Saccharomyces cerevisiae
  CDS (1)..(1461)
atggtacaaaggcttctaccgggcgcacatatatgcagaaggtccttcaattcgtctgcaattataaagtcttctgcattgactctcaaggaagcattagaaaacgtgatacctaagaaaagagatgctgtgaagaaattgaaggcctgttatggcagcacgtttgtcggaccgattaccatttcatcagttctaggtgggatgagaggtaatcagtcaatgttttggcaaggaacatcattagatcccgaacatggcattaaatttcaaggtttaacgattgaagaatgtcaaaatagattacctaatacaggtattgatggcgataatttcctgccagaatcaatgttatggctgttgatgacaggtggtgtgccaactttccagcaagctgcttctttcaggaaagaattggctattcgtggaaggaaattgccacattatacagagaaagttttgtcaagtttacccaaagatatgcaccctatgacccaacttgcaattggtttagcatcaatgaacaaaggatccctctttgctacaaactaccaaaagggcctcataggaaagatggaattttggaaagatactcttgaagattcgctaaatttaattgcttcactcccgctgctgactgggagaatttattcgaacattacaaatgagggacacccattaggtcaatatagtgaggaggtggattggtgtacaaacatatgttccctgctcggcatgacaaatggaacgaactcttctaatacatgcaaccttacttcccagcaatccctggacttcataaacttgatgcggttatataccggtatacatgtagaccatgaaggtggtaatgtttctgctcacaccacccacttggttggaagtgcgttgagtgacccgtatctcagctattcatctggaataatgggattagcgggtcctttgcatgggttagcagcacaagaagtagtaaggtttctcatagagatgaactctaatatttccagcattgcacgagaacaagaaatcaaagattatctttggaaaattttgaattcaaaccgtgtgatccccggttatgggcacgcagttttgcgtaaaccggatcctcgatttacagcaatgcttgaatttgcgcaaaagaggcctattgaatttgagaacgacaagaacgttttgttgatgcaaaaattggcagaaatagcgcctaaggttttgttggaacacggaaagagtaagaatccatttcccaatgttgactctgcatcggggattttgttttatcattatggaatcagggaattattattctttaccgtcatttttgggtgttcaagggccatgggacccttgacacaacttgtttgggatcgcattctaggtttaccaattgaaaggcccaagagtttgaacttggagggtctggaagcacttaccaaagcaagcaatgttaacaagttgtaa

SEQ ID NO: 93092 - protein, 486 aa, Saccharomyces cerevisiae
MVQRLLPGAHICRRSFNSSAIIKSSALTLKEALENVIPKKRDAVKKLKACYGSTFVGPITISSVLGGMRGNQSMFWQGTSLDPEHGIKFQGLTIEECQNRLPNTGIDGDNFLPESMLWLLMTGGVPTFQQAASFRKELAIRGRKLPHYTEKVLSSLPKDMHPMTQLAIGLASMNKGSLFATNYQKGLIGKMEFWKDTLEDSLNLIASLPLLTGRIYSNITNEGHPLGQYSEEVDWCTNICSLLGMTNGTNSSNTCNLTSQQSLDFINLMRLYTGIHVDHEGGNVSAHTTHLVGSALSDPYLSYSSGIMGLAGPLHGLAAQEVVRFLIEMNSNISSIAREQEIKDYLWKILNSNRVIPGYGHAVLRKPDPRFTAMLEFAQKRPIEFENDKNVLLMQKLAEIAPKVLLEHGKSKNPFPNVDSASGILFYHYGIRELLFFTVIFGCSRAMGPLTQLVWDRILGLPIERPKSLNLEGLEALTKASNVNKL

SEQ ID NO: 93093 - DNA, 1891 bp, Zea mays subsp. mays
  CDS (199)..(1569)
aggacgacgaccggtcccattccccccgccccaacttgtcaggactcaagaggctcccctcctccctcgccgcggaacacgcgcgccgtcgtcgccagcccgggttcatttctccgttccttggtgcggtggtagccgagcgctccggccatggcgttctatcggggcctcaccgcagtctcgagactgcgatcacgcatggcgcaggaggccaccacgctggggggtgtgaggtggctgcagatgcagagcgcgtccgatctcgatcttaagtcccagttgcaggaattgattccggaacaacaggatcgcttaaagaagctcaagtcagagcatggaaagacccagcttggaaacataactgtggatatggtccttggtggaatgagagggatgactggaatgctttgggaaacatccctacttgatccagaggagggtattcgttttaggggcctctcaattccagaatgccaaaaagtgctgccaacagcagttaagggcggcgaacctttgcctgagggtctcctttggcttcttttgacggggaaggtcccaaccaaagagcaagttgatgcactatcaaaggaattgcttgcgcgctcaactgttccagctcatgtctataagacaatagatgctctcccagtagatgcacatcctatgacacagtttaccacgggagtaatggctcttcaggttgagagtgaatttcaaaaggcttatgacaatggattgccaaagtcaaagttttgggagcctacttatgaagactgcttaaatttgattgctcggcttccaccagtgtcttcttatgtttaccggagaattttcaagagtgggaaatcaatagaagccgataattctttggactatgcggcaaatttctcacacatgcttggttttgacgaccaaaaaatgctggagctgatgcggctctatgtaacaattcacactgatcatgaaggcgggaatgtcagtgctcatactggtcatctggttgggagtgctctgtcagatccttatctttctttcgcagcggctctaaatgggctagctgggccactgcatggccttgcaaatcaggaagtgcttttatggatcaaatctgtaattgaggaaactgggagtggtgttaccacagatcaactcaaagactatgtctggaagacactaaagagtggaaaggttgttcctgggtttggtcatggagttctgcgtaagaccgacccacggtattcatgtcaaagggagtttgccctgaagcatttgcctgaggatccacttttccaattggtgtccaagttgtatgaagttgtacctcctatcctcactgagctgggcaaggtcaagaacccatggccaaatgttgatgctcacagtggagttttgctgaaccactttggactatctgaagcacggtattacactgtcttgttcggtgtttcaagaagcatggggataggatctcagctcatctgggaccgtgcccttggcctgccacttgagaggccgaagagtgttaccatggagtggctggagaactactgcaagaacaaggctgcttgaagcttttcacaaatgctgctttttcccaaccttggctgttaataatttaaacgcgagttatagaaatagtcattttcctttggccgttgaataacgcaagagcaatatgctcaggcggaagaattttgtatcttccgtaacttggtgaacatccagatacttgatctgcggcaacaatgggcagaagagattaggacatgctgattgatctttatacgccaacacttgtttttctttaacattacttgttcgctgcagctttaatccagctgtttgtaactgcaatttatagcaatttatagagatttgggctatggcatgc

SEQ ID NO: 93094 - protein, 456 aa, Zea mays subsp. mays
MAQEATTLGGVRWLQMQSASDLDLKSQLQELIPEQQDRLKKLKSEHGKTQLGNITVDMVLGGMRGMTGMLWETSLLDPEEGIRFRGLSIPECQKVLPTAVKGGEPLPEGLLWLLLTGKVPTKEQVDALSKELLARSTVPAHVYKTIDALPVDAHPMTQFTTGVMALQVESEFQKAYDNGLPKSKFWEPTYEDCLNLIARLPPVSSYVYRRIFKSGKSIEADNSLDYAANFSHMLGFDDQKMLELMRLYVTIHTDHEGGNVSAHTGHLVGSALSDPYLSFAAALNGLAGPLHGLANQEVLLWIKSVIEETGSGVTTDQLKDYVWKTLKSGKVVPGFGHGVLRKTDPRYSCQREFALKHLPEDPLFQLVSKLYEVVPPILTELGKVKNPWPNVDAHSGVLLNHFGLSEARYYTVLFGVSRSMGIGSQLIWDRALGLPLERPKSVTMEWLENYCKNKAA

SEQ ID NO: 93095 - DNA, 1419 bp, Oryza sativa (japonica cultivar-group)
  CDS (1)..(1419)
atggcgttcttcaggggcctgaccgcggtgtcgaggcttcgatcccgcgtggcacaggaggccaccacgcttggtggtgtgcgatggctgcagatgcagagcgcatctgatcttgatctcaagtcccagctgcaggaattgattcctgaacaacaggaccgcttaaagaaacttaaatcggagcatggaaaggtccaacttggaaatataacagtcgatatggtccttggtgggatgagagggatgactggaatgctttgggaaacatcattgcttgacccggatgagggtattcgttttaggggtctctcgattccagagtgccagaaagtgctgccgacagcagttaaagatggggagcctttgcctgagggtctactttggcttcttttgaccggaaaggtgccaaccaaagagcaagttgatgctctatcaaaggaattggctagtcgttcgagtgttccaggtcatgtgtatgaggcaatcgatgctcttcctgtaactgctcatccgatgacccagtttaccacaggagtgatggcacttcaggtggagagtgagtttcaaaaagcctatgacaaaggaatgtcaaaatcaaagttctgggagcctacctatgaagattgcttaaatttgatagctcgccttccagcagtggcttcatatgtttaccggaggatattcaagggagggaaaactatagcagctgataatgcactggattatgcagcaaatttttcacacatgcttgggtttgatgatcccaaaatgcttgagttgatgcgactatatataacaatccacactgatcatgaaggtggaaacgtcagtgctcatactggacatctggttggaagtgctctgtcagacccttatctttcttttgcagctgcactgaatggtttagctggaccgttgcacggcctggctaatcaggaagtgttgttgtggatcaaatctgtaataggtgagactggtagtgacgttacaactgatcaactcaaagagtatgtgtggaagacactaaaaagtggaaaggttgttcctggctttggtcatggagttctacgtaagaccgatccacggtatacatgtcagagggagtttgctttgaagtacttgcctgaggatccacttttccaactggtctccaagttgtatgaagttgtgcctcctatcctcactgagcttggcaaggtcaaaaacccatggcctaatgttgatgctcacagcggagttctactgaaccactttggattatctgaagctcggtattacactgttcttttcggagtttcaaggagcattggaataggatctcagctcatttgggaccgtgctcttggcctgccgctcgaaagaccgaagagtgtcaccatggagtggctggagaaccactgcaagaaggttgctgcttga

SEQ ID NO: 93096 - protein, 472 aa, Oryza sativa (japonica cultivar-group)
MAFFRGLTAVSRLRSRVAQEATTLGGVRWLQMQSASDLDLKSQLQELIPEQQDRLKKLKSEHGKVQLGNITVDMVLGGMRGMTGMLWETSLLDPDEGIRFRGLSIPECQKVLPTAVKDGEPLPEGLLWLLLTGKVPTKEQVDALSKELASRSSVPGHVYEAIDALPVTAHPMTQFTTGVMALQVESEFQKAYDKGMSKSKFWEPTYEDCLNLIARLPAVASYVYRRIFKGGKTIAADNALDYAANFSHMLGFDDPKMLELMRLYITIHTDHEGGNVSAHTGHLVGSALSDPYLSFAAALNGLAGPLHGLANQEVLLWIKSVIGETGSDVTTDQLKEYVWKTLKSGKVVPGFGHGVLRKTDPRYTCQREFALKYLPEDPLFQLVSKLYEVVPPILTELGKVKNPWPNVDAHSGVLLNHFGLSEARYYTVLFGVSRSIGIGSQLIWDRALGLPLERPKSVTMEWLENHCKKVAA

SEQ ID NO: 93097 - DNA, 1419 bp, Oryza sativa (japonica cultivar-group)
  CDS (1)..(1419)
atggcgttcttccggggcctgaccgcggtttcgaggattcgatcccgcatggcacaggaggccaccacgcttggtggtgtgagatggctgcagatgcagagtccatctgatcttgatcttaagtcccagctgcaggaattgattcccgagcaacaggatcgcttaaagaaacttaaatcagaacatgggaaggtccagcttggaaacataactgttgatatggtccttggcgggatgagaggaatgattggaatgctttgggaaacatcattgcttgacccggaggagggtattcgtttcaggggtctctcgattccagagtgccagaaagtgctgccaacagcaattaaaggtggagaacctttgccggagggtctcctttggcttcttttgactggaaaggtgccaaccaaagagcaagtcgatgctctatcaaaggaattggttacccgttcgagtgttccaggccatgtgtataaggcaattgatgctctccctgtaactgctcatccaatgacacagtttaccacaggggtgatggcacttcaagttgagagtgagtttcaaaaagcttacgacaaaggaatgccaaaatcaaagttctgggagcctacctatgaagattgcttaaatttgatagctcgccttccaccagtggcttcgtatgtttaccggaggatcttcaaggatgggaaaactatagcagctgataatgcactggactatgcagcaaacttttcacacatgcttgggtttgatgatcccaaaatgctcgagttgatgcgactatatgtgacaatccacactgatcatgaaggtggaaatgtcagtgctcatactggacatctggttggaagtgctctgtcagatccttatctttcttttgcagctgcactgaatggtttagctggaccattgcacggcctggctaatcaggaagtgctgttgtggatcaaatctgtaataggtgagacaggtagtgatgttacaactgatcaactcaaagagtatgtgtggaagacactaaaaagtggaaaggttgttcctggcttcggtcatggagttctacgtaagaccgatccacgatatacatgtcagagggagtttgctttgaagtacttgcctgaggatccacttttccaactggtctccaagttgtatgaagttgtgcctccaatcctcactgagcttggcaaggtcaaaaacccatggcctaatgttgatgctcacagtggagttctgctgaaccactttggattatctgaagctcggtattacaccgtccttttcggagtttcgaggagcataggcataggatcccagctcatttgggaccgtgctcttggtctgccgctcgaaagaccgaagagtgtcaccatggagtggctggaaaaccactgcaagaaggctgctgcttga

SEQ ID NO: 93098 - protein, 472 aa, Oryza sativa (japonica cultivar-group)
MAFFRGLTAVSRIRSRMAQEATTLGGVRWLQMQSPSDLDLKSQLQELIPEQQDRLKKLKSEHGKVQLGNITVDMVLGGMRGMIGMLWETSLLDPEEGIRFRGLSIPECQKVLPTAIKGGEPLPEGLLWLLLTGKVPTKEQVDALSKELVTRSSVPGHVYKAIDALPVTAHPMTQFTTGVMALQVESEFQKAYDKGMPKSKFWEPTYEDCLNLIARLPPVASYVYRRIFKDGKTIAADNALDYAANFSHMLGFDDPKMLELMRLYVTIHTDHEGGNVSAHTGHLVGSALSDPYLSFAAALNGLAGPLHGLANQEVLLWIKSVIGETGSDVTTDQLKEYVWKTLKSGKVVPGFGHGVLRKTDPRYTCQREFALKYLPEDPLFQLVSKLYEVVPPILTELGKVKNPWPNVDAHSGVLLNHFGLSEARYYTVLFGVSRSIGIGSQLIWDRALGLPLERPKSVTMEWLENHCKKAAA

SEQ ID NO: 93099 - DNA, 1422 bp, Arabidopsis thaliana
  CDS (1)..(1422)
atggtgtttttccgcagcgtatcggcctttactaggctgaggtctcgcgtcggccaacaatcttcactcagcaattctgtcagatggattcagatgcagagctctaccgacctggacctgaagtcgcagctgcaagagttaattccggaacagcaggaccgtctgaagaaactgaagtcagaacatgggaaggtccaactgggaaacatcactgttgatatggttattggtggaatgagagggatgactggattgctttgggaaacctcattgcttgacccggaagagggtattcgctttaggggattgtcgattcctgagtgccagaaagtattacctactgcccagtctggagctgaaccattaccggagggtcttttgtggcttctcttaactggaaaggtacctagcaaagagcaagttgaagcactgtcgaaagacttggcgaaccgtgctgctgtgccagattatgtgtacaatgccatcgatgctctgccttccacagctcatccaatgactcaatttgctagcggtgttatggccctccaggtgcaaagtgagtttcaaaaggcatatgagaatggaattcataagtcaaagttctgggagccaacatatgaggattgcctcaacctgattgctcgtgttcctgttgtagctgcatatgtttatcgaaggatgtataagaatggtgattccattccctcagataaatctttggattatggtgcaaatttttcccacatgttgggatttgatgatgaaaaggtgaaagagctcatgaggctttacatcaccatccacagtgatcatgaaggtggaaatgttagtgctcacactggtcacctggttggtagtgcactttcagacccatatctgtcatttgcagctgcattaaatggtttagctgggccactccatggtttggctaatcaggaagttttgctttggatcaaatcagtcgtagaggaatgtggagaagatatatcaaaagaacagttgaaagaatatgtttggaaaacattaaacagtggcaaggttattccgggatatggtcacggtgttctgcgcaatactgatccaagatatgtatgccaaagagaatttgccttgaagcatctacctgacgaccctcttttccagctggtgtcaaagctttatgaagttgtgcctcctgttctcactgagcttggaaaggtgaagaacccgtggccaaatgttgatgctcacagtggggtcttgctgaaccactatggtctaaccgaagcaaggtactacaccgtgctctttggtgtttcaaggagtcttggcatctgctctcagcttatatgggaccgagctcttggacttgcacttgagaggccaaagagtgttaccatggactggcttgaagcccattgtaagaaagcttcatctgcttaa

SEQ ID NO: 93100 - protein, 473 aa, Arabidopsis thaliana
MVFFRSVSAFTRLRSRVGQQSSLSNSVRWIQMQSSTDLDLKSQLQELIPEQQDRLKKLKSEHGKVQLGNITVDMVIGGMRGMTGLLWETSLLDPEEGIRFRGLSIPECQKVLPTAQSGAEPLPEGLLWLLLTGKVPSKEQVEALSKDLANRAAVPDYVYNAIDALPSTAHPMTQFASGVMALQVQSEFQKAYENGIHKSKFWEPTYEDCLNLIARVPVVAAYVYRRMYKNGDSIPSDKSLDYGANFSHMLGFDDEKVKELMRLYITIHSDHEGGNVSAHTGHLVGSALSDPYLSFAAALNGLAGPLHGLANQEVLLWIKSVVEECGEDISKEQLKEYVWKTLNSGKVIPGYGHGVLRNTDPRYVCQREFALKHLPDDPLFQLVSKLYEVVPPVLTELGKVKNPWPNVDAHSGVLLNHYGLTEARYYTVLFGVSRSLGICSQLIWDRALGLALERPKSVTMDWLEAHCKKASSA

SEQ ID NO: 93101 - DNA, 1437 bp, Drosophila melanogaster
  CDS (1)..(1437)
atgcaaaaaaccaataactacaaaagcttcaaaatcttcttcaagaacgttccatttcgttcatatcccgactgcaagaatggtaaaggttcaggcctaaaagccaagttggcaaagaaaattcctatagaacgtgaaaagtttttgggtataaagtgtctgcacggcaagaagataattggccagatcagtgttaatagcgtgattggaggaatgcgaggacttccacttttgttttgcgagacatccagcttggacaaaaacaagggtatttattaccgtggaaaactgcttaaggatgtgtgtgccaaactgccacgggtgcaagagggcacacaagagggcactcccgaaggatgtttcttcctgctgaccagcggatcgatgcccacgaagaaggaggcacaggaagtgaccaacgagtggctgaagcggggctcagttccgcgctactgcctccggatgatcgactccatggacaagcgggtgcatccgatggcccaattgtgcgccgccagtgcctgtctcaatccgcagagccagttcgtcgaggcttacaccaaaggggccagacgtgcagactactggaaatactcctacgaggattcaatgaacctcatcgccatgctgcccaccgtggcggctgccatctattctaacgtgtttagggatggcgaaggttcacgggaggtcaactatgaggaggactggtccggcaacttctgccgcatgcttggactacccgaaaaggatttcgttgatcttatgcggctctacatgatcctgcatgcagatcatgagagcggcaatgtttccgcccatgcttgccacctagtcggaacggcgctcagcgatcccttcctgtctttctcggccagcatgtgcggcctggctgggccacttcatggtttggccaatcaggaagtgctggtttggctgacaaagcttaggaaggccattggcgatgacccctccgatgaagagctaaagaagttcatcgatgatacgctgaaagggggccaggtcattcccggctacggacacgctgtccttcgggacaccgatcctcggttcgtcctgcaaaacgagtttgccatgaagcactgcaaggatgatccaggcgtaaagctggtgacccgcctgtggaagatcataccagaggtgctcaagaagctcaacaaggtagcgaatccgtatccaaacgtcgatgcccattcgggcgtcctgctgcaacattactgtctgaaggagctgaagttctacacagttcttttcggagtttctcgggcgcttggagttctgtcccagctgatttggtccagggctttgggagccccaattgaaagaccaaagtcattttcctccatcgagatctgcaaattcatcaatgaagcagacaaaaaggcaggaaaaaagaacaataagaaaaagtgctag

SEQ ID NO: 93102 - protein, 478 aa, Drosophila melanogaster
MQKTNNYKSFKIFFKNVPFRSYPDCKNGKGSGLKAKLAKKIPIEREKFLGIKCLHGKKIIGQISVNSVIGGMRGLPLLFCETSSLDKNKGIYYRGKLLKDVCAKLPRVQEGTQEGTPEGCFFLLTSGSMPTKKEAQEVTNEWLKRGSVPRYCLRMIDSMDKRVHPMAQLCAASACLNPQSQFVEAYTKGARRADYWKYSYEDSMNLIAMLPTVAAAIYSNVFRDGEGSREVNYEEDWSGNFCRMLGLPEKDFVDLMRLYMILHADHESGNVSAHACHLVGTALSDPFLSFSASMCGLAGPLHGLANQEVLVWLTKLRKAIGDDPSDEELKKFIDDTLKGGQVIPGYGHAVLRDTDPRFVLQNEFAMKHCKDDPGVKLVTRLWKIIPEVLKKLNKVANPYPNVDAHSGVLLQHYCLKELKFYTVLFGVSRALGVLSQLIWSRALGAPIERPKSFSSIEICKFINEADKKAGKKNNKKKC

SEQ ID NO: 93103 - DNA, 1569 bp, Drosophila melanogaster
  CDS (1)..(1569)
atgttcgtacgccgtttcggaaatggctctttgggccatcattttgcctttcaacgacgttatttggctaaaaattctatgtgggactcgaagtccattgggactccaagttcattccgaatgcgttccaaaaaggataacgtgactggcaatctcaaggagcagcaacaatcggcgactccggaaaccttgaacatgcctgatatgcaggatgcccaaaaactgccaaatgtgggagcctatgttcgcatgatcgccgccgatggcaagagcctgcgcgacgtgctggccgccaaggtgccccaggagcaggagcgcgtaaagaacttccgcaagcagcatggcgccaccaagatgggcgagacgaccatcgacatgatgtacggcggcatgcgcggcatcaaggccctggtcaccgagacctcggtgctggatgctgacgagggtatccgcttccgcggcctctccattcccgagtgccaaaaggttctgccagccgccgatggcggcactgagcccctgcccgagggtctcttctggctgctgttgaccggcgaggtgcccaccaagtcccaggtgcagcagctgtcccgcgaatgggccgagcgcgccgccctgccccagcacgtggtcaccatgttgaacaacatgcccaccaccctgcacccgatgtcgcagtttgctgccgccgtcactgcgctgaatcacgacagcaaattcgccaaggcatactcggatggtgtgcacaagagcaagtactgggagtacgtctacgaggacagcatggacctgatcgccaagctcccagtggtggcggccaccatctactgcaacacctatcgcggcggcaagggctcccgttcgattgactccagcctggattggtcggcgaactttgtgaagatgctcggctacgacaacgcccccttcaccgagctgatgcgtctctatctgaccatccacagtgaccacgagggtggcaacgtgtctgcccacaccgttcacttggtgggctccgccctcagcgatccctacctctcctttgccgccggcctgaacggtctggctggtcccctgcacggcctggccaaccaggaggtgctcgtgtggctgcgcaagctgcagaaggaggccggcaacaacccgtcggaggagcagctcaaggagtacatctggaagaccctcaagtccggacaggtggttcccggctacggacacgccgtgctccgcaagaccgatccccgctacacctgccagcgtgagttcgcgctgaagcacctgcccgaggacgagacgttccagctggtgtcgaagatctacaaggtggtgccaccaattctgaccgagaccggcaaggtgaagaacccctggcccaatgtagatgcccattccggtgtgctgctgcagtactacggcatgaaggagatgaactactacaccgtgttgttcggcgtttcccgtgccctcggcgtgctggcctccctcgtctgggatcgcgccctcggcctgcccatcgagcgccccaagtcattctccaccgatctgctggtcaaaatggtccagaagtaa

SEQ ID NO: 93104 - protein, 522 aa, Drosophila melanogaster
MFVRRFGNGSLGHHFAFQRRYLAKNSMWDSKSIGTPSSFRMRSKKDNVTGNLKEQQQSATPETLNMPDMQDAQKLPNVGAYVRMIAADGKSLRDVLAAKVPQEQERVKNFRKQHGATKMGETTIDMMYGGMRGIKALVTETSVLDADEGIRFRGLSIPECQKVLPAADGGTEPLPEGLFWLLLTGEVPTKSQVQQLSREWAERAALPQHVVTMLNNMPTTLHPMSQFAAAVTALNHDSKFAKAYSDGVHKSKYWEYVYEDSMDLIAKLPVVAATIYCNTYRGGKGSRSIDSSLDWSANFVKMLGYDNAPFTELMRLYLTIHSDHEGGNVSAHTVHLVGSALSDPYLSFAAGLNGLAGPLHGLANQEVLVWLRKLQKEAGNNPSEEQLKEYIWKTLKSGQVVPGYGHAVLRKTDPRYTCQREFALKHLPEDETFQLVSKIYKVVPPILTETGKVKNPWPNVDAHSGVLLQYYGMKEMNYYTVLFGVSRALGVLASLVWDRALGLPIERPKSFSTDLLVKMVQK

SEQ ID NO: 93105 - DNA, 1326 bp, Geobacter sulfurreducens PCA
  CDS (1)..(1326): transl_table=11
atggcactcaaggaaaccctaaagcaaaaaattgaggagcaccgtccccgcaccacccggctcgtaaaggagttcggcaaggtcattatcgaccaggtgaccattgatcaatgcatcggcggtgcccgtgacatccgctgcctggtaaccgatatctcctatctcgacccgcaggaagggatccggttccgtggcaagaccattcccgagacctttgaggctctccccaaggctgccggttctgactatccgaccgttgaatccttctggtacttcctcctgaccggcgaagtcccgacccaggcccaggttgacgaagtggttgccgagtggaaggtacgtcaggaagttccccagtacgtgttcgacgccatccgtgcactgccgcgtgatagccaccccatggtcatgctctccgtcggtatccttgccctccaaaaggattccaagttcgcgggcttctacaactcgggcaagttcaacaaaatgacggcttgggaatacgtctacgaagatgcctatgatcttgtagcccgtatccccgtcatcgccgcattcatctacaacctcaagtacaaaggcgacaagcagcttcccatcgatccgagtgcagactgcggcgccaacttcgcccgtatgatcggccagtgcaaggagtacgaggatgttgcccggatgtacttcatccttcactccgaccatgagtccggcaacgtgtcggcccacaccactcacttggtgcactcggccctgtccgacccctactatgcctactccgccggcctgaacggcctcgccggtccgctgcacggccttgccaaccaggaagttctcgactggaccatcaagttccaggagaagtactgcaaggacgtggagcccaccaaggagctggtcaccaaggccctgtgggataccctcaacgccggtcaggtcgttccgggatacggccacgccgttctccgcaagaccgacccccggtatacctctcagcgcgagttctgcctcaagactccggggctcaaggatgatccgctgttcaaactggttgccatgatctttgaaaccgctcctggcgtgctcatggagcacggtaaggccaagaacccctggccgaacgtcgatgctcagtccggcgtcatccagtggtactatggcctccgtgagtgggacttctacaccgtcctcttcggtgtgggccgtgcgctcggctgcatggcgaacatcacctgggaccgtggcctcggttacgccatcgagcgtcccaagtccgttaccactccgatgcttgagaagtgggcggaagaaggcggccgcaagttctag

SEQ ID NO: 93106 - protein, 441 aa, Geobacter sulfurreducens PCA
MALKETLKQKIEEHRPRTTRLVKEFGKVIIDQVTIDQCIGGARDIRCLVTDISYLDPQEGIRFRGKTIPETFEALPKAAGSDYPTVESFWYFLLTGEVPTQAQVDEVVAEWKVRQEVPQYVFDAIRALPRDSHPMVMLSVGILALQKDSKFAGFYNSGKFNKMTAWEYVYEDAYDLVARIPVIAAFIYNLKYKGDKQLPIDPSADCGANFARMIGQCKEYEDVARMYFILHSDHESGNVSAHTTHLVHSALSDPYYAYSAGLNGLAGPLHGLANQEVLDWTIKFQEKYCKDVEPTKELVTKALWDTLNAGQVVPGYGHAVLRKTDPRYTSQREFCLKTPGLKDDPLFKLVAMIFETAPGVLMEHGKAKNPWPNVDAQSGVIQWYYGLREWDFYTVLFGVGRALGCMANITWDRGLGYAIERPKSVTTPMLEKWAEEGGRKF

SEQ ID NO: 93107 - DNA, 1377 bp, Magnaporthe grisea 70-15
  CDS (1)..(1377)
atgccatgcacttccaacgtgcgatccaccagaaactactcggctagctcagagccagacctgaagaccacattgaagagtgtcattccagccaagcgcgaactcctcaagaaggtcaaggcccatggttccaaggtcatcggcgaagtcaaggtcgagaacactattggaggcatgcgtggcctgaaggccatggtatgggaaggatctgttcttgacgccgacgagggtattcgtttccacggccgcacaatcaaagactgccaacgtgagctgcccaagggcaagactggcactgaaatgctacccgaggctatgttctggctgcttctcactggccaggtccccagcaccaaccaggttcgcgttctgtctcgtcaacttgctgagcaggcccaactcccggcttttgtcaacaagatgttggatgacttcccccgcgacctgcaccccatgacgcagtttgctattgcagtttccgccctcaaccacacatccaaatttgccaaggcgtatgccgatggcctcaacaaggctgattactgggagcctacatttgacgacagcattagcttgctggccaagctgcccacaatcgcagccaagatctaccacaactcgtacaagggcggtggtgctctgcctgccgaggtggacctggagcaggattggtcatacaactttgctgccatgctgggcaagggtggcaagggaaacgagaacttccaggaccttctgcgattgtacctcgctcttcatggcgaccacgagggaggcaacgtctcagcccacgccacacatcttgtgggcagcgctcttagcgatccgttcctcagttacagtgccggtctgcagggtctggctggacctcttcatggtcttgctgcccaggaggttctccgctggatcatccagatgaaggaggctattcctgccacatactcggagaaggacgtaaccgactacctctggtcaacgctcaactcgggtcgcgtagtacccggctacggtcacgccgtgctgcgcaagcctgacccgcgattccaggcccttatggactacgctgcgtcgcgtcccgagatcgccaaagaccccgtcttccagctcgtccagctcaacagccaggttgctcccgaggttctcaaaaagcacggcaagaccaagaacccgtacccgaacgttgactcgagctccggcgtgcttttccaccactacggcttccacgaaacactatactacaccgccactttcggcgtgagccgtggtcttggaccgcttgcccagctcatctgggaccgggcgctgggtctgccaattgagaggcccaagagcatcaacttggagggaattctcaaaattgtcggtgacaagagctag

SEQ ID NO: 93108 - protein, 458 aa, Magnaporthe grisea 70-15
MPCTSNVRSTRNYSASSEPDLKTTLKSVIPAKRELLKKVKAHGSKVIGEVKVENTIGGMRGLKAMVWEGSVLDADEGIRFHGRTIKDCQRELPKGKTGTEMLPEAMFWLLLTGQVPSTNQVRVLSRQLAEQAQLPAFVNKMLDDFPRDLHPMTQFAIAVSALNHTSKFAKAYADGLNKADYWEPTFDDSISLLAKLPTIAAKIYHNSYKGGGALPAEVDLEQDWSYNFAAMLGKGGKGNENFQDLLRLYLALHGDHEGGNVSAHATHLVGSALSDPFLSYSAGLQGLAGPLHGLAAQEVLRWIIQMKEAIPATYSEKDVTDYLWSTLNSGRVVPGYGHAVLRKPDPRFQALMDYAASRPEIAKDPVFQLVQLNSQVAPEVLKKHGKTKNPYPNVDSSSGVLFHHYGFHETLYYTATFGVSRGLGPLAQLIWDRALGLPIERPKSINLEGILKIVGDKS

SEQ ID NO: 93109 - DNA, 1422 bp, Magnaporthe grisea 70-15
  CDS (1)..(1422)
atggcctctgctatgcgcctcagctctgccttcagggccactgcccgcgctcctgcgttcactgcccgcaggactgctttcaacggcatgcgatgctactccgccaagactcagaccctgaaggagcgcttcgccgagcttctgccagagaagatcgaggagatcaagtctctgcgcaaggagcacggttccaaggtcattgacaaggtcactcttgaccaggtctacggtggtgcccgtggcatcaagtgcctcgtctgggagggatccgtcctcgactctgaggagggtatccgtttccgtggcaagactatcccagaatgccaggagctcctccccaaggctcccggtggcaaggagcctcttcctgagggtcttttctggctcctcctgaccggtgaggttccctcggaggcccaggttcgcgccctgtccgccgagtgggctgcccgttccgaccttcccaagttcgtcgaggagctcatcgaccgctgccccaacgacctgcaccccatggctcagttctcgatggccatcactgccctcgagcagacctcttcctttgccaaggcctatgccaagggtattaacaagaaggagtactggggatacacctttgaggactctatggacttgattgctaagctgcccaccatcgctgcccgcatctaccagaacgtcttcaagggtggcaaggtcgcccctgtccagaaggacaaggactactcgttcaacttcgccaaccagctcggtttcggcaacaactccgacttcgttgagctgctccgtctctacctgaccatccacaccgaccacgagggtggcaacgtcagcgcccacaccacccaccttgtcggctctgccctcagctcgcccttcctttcgcttgctgctggcatgaacggactggctggtcctctgcacggtctggctaaccaggaggtgctgaactggcttaccgagatgaagaagtccgttggcgacgacctgagcgacaagtccatcactgactacctttggtcgaccctgaactctggccgtgtcgtccccggttacggccacgccgtcctccgcaagaccgacccccgctacaccgcccagcgtgtcttcgcccaggagaaaatgcccaacgaccccatgttcaagcttgtcagccaggtctacaagattgctcctggtgtcctgactgagcacggcaagaccaagaaccccttccccaacgtcgatgcccactccggtgttctcctgcagtactacggcctgactgaggccaactactacactgtcctcttcggtgtttcgcgtgccattggtgtcctgccccagctcatcattgaccgcgccgtcggtgcccccattgagaggcccaagtcgttctcgactgagaagtggatcgagattgccaagaagactgcggcctaa

SEQ ID NO: 93110 - protein, 473 aa, Magnaporthe grisea 70-15
MASAMRLSSAFRATARAPAFTARRTAFNGMRCYSAKTQTLKERFAELLPEKIEEIKSLRKEHGSKVIDKVTLDQVYGGARGIKCLVWEGSVLDSEEGIRFRGKTIPECQELLPKAPGGKEPLPEGLFWLLLTGEVPSEAQVRALSAEWAARSDLPKFVEELIDRCPNDLHPMAQFSMAITALEQTSSFAKAYAKGINKKEYWGYTFEDSMDLIAKLPTIAARIYQNVFKGGKVAPVQKDKDYSFNFANQLGFGNNSDFVELLRLYLTIHTDHEGGNVSAHTTHLVGSALSSPFLSLAAGMNGLAGPLHGLANQEVLNWLTEMKKSVGDDLSDKSITDYLWSTLNSGRVVPGYGHAVLRKTDPRYTAQRVFAQEKMPNDPMFKLVSQVYKIAPGVLTEHGKTKNPFPNVDAHSGVLLQYYGLTEANYYTVLFGVSRAIGVLPQLIIDRAVGAPIERPKSFSTEKWIEIAKKTAA

SEQ ID NO: 93111 - DNA, 1419 bp, Gibberella zeae PH-1
  CDS (1)..(1419)
atggctctcaatttgacgacttctcgccgggctttgagctcgctcaagcccctcacccgtgccgcttttgtgggagctcgcggttatgctactgctgagcctgacctcaaggccactctccgcgaggccattcccgccaagcgagagctcctcaagaaggtcaaggctcattctaacaaggtccttggagaagtcaaggtcgagaacactctcggtggtatgcgaggtctcaaggccatggtctgggagggttccgtcttagatgccaacgagggtatccgattccacggccgaactatcaaggactgccaaaaggagcttcccaagggaaagactggcacagagatgcttcccgaggccatgttctggctgcttctcacaggccaggttccctcagtcaaccaggtccgcggcttctcgcgtgagctcgctgaaaaggcccagattcccgagtttgtctccaagatgctcaatgacttccccaaggaccttcaccccatgactcaattcgccatggccgtttctgctctcaactacgagtcaaagttcgccaaggcctatgagcagggcatcaacaaggctgactactgggagcctacttttgacgactgcatttccctcctggccaagcttcccaccattgctgccaagatttaccaaaacgcttaccgcggcggtggtgctctgcctgctgaggtcgatcttgagcaggattggtcctacaactttgctgccatgctcggcaagggtggcaaggagaatgagaacttccaggatctcctccgtctttaccttgctcttcacggtgaccacgagggtggcaacgtctctgcccacgccactcatctggttggaagtgctctgtccgatcccttcctgtcttacagtgctggtctccagggtcttgctggtcctctccacggtcttgccgctcaggaggtcctccgatggattatccagatgaaggaggccattccttccaactacaccgagcaggacgtcaacgactacctctggtctaccctcaactcgggtcgtgttgttcccggctatggtcacgccgttctccgaaagcccgatccccgattcgaagctctcatggattacgccgctgcccgtcctgagatcgccaacgaccctgtcttccagcttgtcgagaagaacagccgaattgctcccgaggttctcaagaagcatggcaagaccaagaacccttaccccaacgtcgacagcagctctggagttttgttccaccactacggcttccacgagactctgtactacactgccacgttcggtgtgtcgcgtggtctcggacctcttgcccagttgatctgggaccgtgctctgggtcttcccattgagcgacccaagagcatcaacctcgagggcattctcaagcaggttgagggtcaataa

SEQ ID NO: 93112 - protein, 472 aa, Gibberella zeae PH-1
MALNLTTSRRALSSLKPLTRAAFVGARGYATAEPDLKATLREAIPAKRELLKKVKAHSNKVLGEVKVENTLGGMRGLKAMVWEGSVLDANEGIRFHGRTIKDCQKELPKGKTGTEMLPEAMFWLLLTGQVPSVNQVRGFSRELAEKAQIPEFVSKMLNDFPKDLHPMTQFAMAVSALNYESKFAKAYEQGINKADYWEPTFDDCISLLAKLPTIAAKIYQNAYRGGGALPAEVDLEQDWSYNFAAMLGKGGKENENFQDLLRLYLALHGDHEGGNVSAHATHLVGSALSDPFLSYSAGLQGLAGPLHGLAAQEVLRWIIQMKEAIPSNYTEQDVNDYLWSTLNSGRVVPGYGHAVLRKPDPRFEALMDYAAARPEIANDPVFQLVEKNSRIAPEVLKKHGKTKNPYPNVDSSSGVLFHHYGFHETLYYTATFGVSRGLGPLAQLIWDRALGLPIERPKSINLEGILKQVEGQ

SEQ ID NO: 93113 - DNA, 1413 bp, Gibberella zeae PH-1
  CDS (1)..(1413)
atggcttcagtcgctcgtctcagcaacgctgccctccgggcttccctccgctcctctcccgtcaatggctctgccttcaacgccattcgatgctactccgccaagacccaaaccttgaaggagcgattcgccgaactcctgcccgagaagattgagcaggtcaaggccctccgaaaggagcatggttccaaggtcgttgacaaggtcactcttgaccaggtttacggtggtgcccgtggcatcaaggcccttgtttgggagggttccgtcctcgactctgaggagggtatccgattccgtggcaagaccatccccgagtgccaggagcttctccccaaggcccccggtggcaaggagccccttcctgagggtctcttctggcttctcctgactggtgaggtccctactgagcagcaggtccgcgacctctccgctgagtgggctgcccgctccgatctccccaagttcgtcgaggagctcatcgaccactgccctaccgacctccaccccatggctcagttctccctggccgttactgctctcgagcacacctccagcttcgccaaggcctacgccaagggtatcaacaagaaggagtactggggatacacctttgaggactctatggacctcattgctaagctccccaacatcgcttctcgcatctaccagaacgtcttcaagggcggaaaggtcgctgccatccagaaggacaaggattactccttcaacttcgccaaccagcttggcttcgccgacaacgccgacttcgttgagcttatgcgtctttacctgaccatccacaccgaccacgagggtggcaacgtctctgcccacaccactcaccttgtcggctctgctctcagctcccccttcctctctctcgccgctggtctcaacggtcttgctggtcccctccacggtcttgctaaccaggaggtcctcaactggctcaccgagttcaagaagtccgttggcgatgaccttagcgacaaggccatcactgactacctctggtccaccctcaacgccggccgtgtcgtccccggttacggccacgccgttctccgaaagactgaccctcgttacatggctcagcgcacttttgcccaagagaagatgcccaacgaccccatgttcaagctcgtctctcaggtctacaagatcgcccccggtgtcctcactgagcacggcaagaccaagaacccctaccctaacgttgacgcccactccggtgtcctcctccagtactacggtctcactgaggctaactactacaccgtcctcttcggtgtctcccgtgccattggtgtccttccccagctcatcattgaccgcgctctcggtgcccccatcgagcgacccaagtccttctccactgacaagtgggctgagcttgttaagaagctgtaa

SEQ ID NO: 93114 - protein, 470 aa, Gibberella zeae PH-1
MASVARLSNAALRASLRSSPVNGSAFNAIRCYSAKTQTLKERFAELLPEKIEQVKALRKEHGSKVVDKVTLDQVYGGARGIKALVWEGSVLDSEEGIRFRGKTIPECQELLPKAPGGKEPLPEGLFWLLLTGEVPTEQQVRDLSAEWAARSDLPKFVEELIDHCPTDLHPMAQFSLAVTALEHTSSFAKAYAKGINKKEYWGYTFEDSMDLIAKLPNIASRIYQNVFKGGKVAAIQKDKDYSFNFANQLGFADNADFVELMRLYLTIHTDHEGGNVSAHTTHLVGSALSSPFLSLAAGLNGLAGPLHGLANQEVLNWLTEFKKSVGDDLSDKAITDYLWSTLNAGRVVPGYGHAVLRKTDPRYMAQRTFAQEKMPNDPMFKLVSQVYKIAPGVLTEHGKTKNPYPNVDAHSGVLLQYYGLTEANYYTVLFGVSRAIGVLPQLIIDRALGAPIERPKSFSTDKWAELVKKL

SEQ ID NO: 93115 - DNA, 1389 bp, Apis mellifera
  CDS (1)..(1389)
atggcgttattccgttttggtccaaaacattgtttagaaattcagaaaataacttcaactgtatttttgagatcgttgagcgatagttccaccgacttaaaaaaaatcttggctgagaaaattccgaaacatctagaggttgttaaaaaatttcgtaaagaacatggatccgccgtagttggagaggtcactgtggatatgatgtatggtggtatgcgtggaattaaaggtcttctatgggaaccatcagttctagatcctgaagaaggtattagatttcgaggaaaatcgattccagaatgtcagaagatcttaccgaaagcgaaagatggttcagaaccacttccggaaggtttgttctggcttttgattactggcgatgttcctaataataagcaagtagaaacaatatctaaggaatgggcctctagaagtaaactgcctgaacatgtagtcaaaactctaaaaaattttccaaaatctcttcatcctatgactcagttttctgccgctatcactattctgaacagtgaaagtgaattcgtaaaagcatataataaaggcgtacacaaaagcaaatattgggagtacgtctatgaagatattatgaatctgattgcaaaattaccctctgtggctgccataatatacagaaatacttataaggatggtaacaccgtatctgtcgattctagtaaagattgggcttggaatttttcaagaatgctcggttatgaagatcctcaattcactgaactcttgcgcttgtatttatcgatacacgctgatcacgaaggtggaaacgtatctgcacatactactcatttagtcggttcagcattatctgatgcttatctatcattcgcggctggaatgaatggtttggctggacctcttcatggtctcgcaaatcaagaagtgttgatatggttagaaaaagtacaaaaagagattggagattctccttctgatgaaaaagtagctgaatttgttcgaaatacactgaagagcggtcaagtcgttcctggatatggacatgccgtactcagaaagactgatcctagatatatatgtcagagagaatttgctttgaaacatttgcctgatgataaattattcaagcttgttagtcaagtattcaaagtagttcctcccattcttcaagaaactggtaaggtaaagaacccttggccaaatgtagacgctcattcgggagttctattgcaatattatggaatgaaagaaatgaactattataccgtcttatttggagtatcacgtgctcttggtgttttatcatctcttgtgtggtctcgtggtcttggtttcccaattgaaaggcctaaatctttgagcaccgaacatcttatgagatgtattagagcttaa

SEQ ID NO: 93116 - protein, 462 aa, Apis mellifera
MALFRFGPKHCLEIQKITSTVFLRSLSDSSTDLKKILAEKIPKHLEVVKKFRKEHGSAVVGEVTVDMMYGGMRGIKGLLWEPSVLDPEEGIRFRGKSIPECQKILPKAKDGSEPLPEGLFWLLITGDVPNNKQVETISKEWASRSKLPEHVVKTLKNFPKSLHPMTQFSAAITILNSESEFVKAYNKGVHKSKYWEYVYEDIMNLIAKLPSVAAIIYRNTYKDGNTVSVDSSKDWAWNFSRMLGYEDPQFTELLRLYLSIHADHEGGNVSAHTTHLVGSALSDAYLSFAAGMNGLAGPLHGLANQEVLIWLEKVQKEIGDSPSDEKVAEFVRNTLKSGQVVPGYGHAVLRKTDPRYICQREFALKHLPDDKLFKLVSQVFKVVPPILQETGKVKNPWPNVDAHSGVLLQYYGMKEMNYYTVLFGVSRALGVLSSLVWSRGLGFPIERPKSLSTEHLMRCIRA

SEQ ID NO: 93117 - DNA, 1392 bp, Candida glabrata CBS 138
  CDS (1)..(1392)
atgcccaatttatcacatcaatgggagagcgtctcgctcaaggaagcctatgcccgcaacctgccagcgcaggccgagcgactcaagcggttcaagagcgagtttggcagcacggtgatcggcgaggtgaccgtcgagcaggcgcttggcggtatgcgcggtgtcacgggccttgtgtgggagggctccgtgctggaccctgaagaaggcatcaagtttagaggcctcactatcgacgaggtacgtgtgtcgctgggagtggcaggtgagcgggagccgcagcccgaggcgctgttctggctgttgctcacgggccagatccccaacgaggaccaggtggcgcagctgtcgcgcgagctggcagcgcgcggggagctaccggggcatgtggagacgctgctggacactcttccacgtgacctgcaccctatggcgcagctgagtatagcggttactgccctggaaggggagtcgcactttgcgcgggcgtacctggctggtgttccgcgcggggagctgtgggagcacacctacgaggacgcgctgaaccttattgcgaagctgcctgcgatcgctgggcgcatctaccacaatgtgtttggcggtgcgcaaggcgcccaagggcaaggcacgcaaggtgcgttcgtgctggacccgcaggcggactacagtgagaacctgtgccgggcgctcggggtgcagcccgacggggagacggaggacttccacaacctgatgaggctgtacctgaccatccacgcggaccacgagggcggcaacgtcagcgcacatacgacgcacctggtgggcagcgcgctgtcgtcgccttacctgagcttcgccgccggcctggacgggcttgcgggtcccctgcacggccgcgcgaaccaggaagtgctggagtggctgctggtgttgaagggcgagctggtgcgcgagggcaagaccgtgacggaccgcgaggccatccgccagtacctgtggagaacactaaactccgggaaggtagtccctgggtacggccacgctgtgctcaggaagacggaccccaggttcctggcacagcgcgagttcgggcgcacgcggttcccgggggacgagctgtaccagctggtctcgacggtctacgaggtggccccgcaggtgctcaaggagcacggcaagacgcgcaacccataccctaacgtagacgcgcactccggggtcctgctcacgcactacggactagaccagcccagcttctacacagtgttgttcggcatctcgcggtgcttcggggtcatggcacagctcatcaccgaccgcgcgctgggtgcgcccatcgagaggcccaagtccctgtccaccgacaggtacatcgagctggccacccgccaccacaacaagctgtga

SEQ ID NO: 93118 - protein, 463 aa, Candida glabrata CBS 138
MPNLSHQWESVSLKEAYARNLPAQAERLKRFKSEFGSTVIGEVTVEQALGGMRGVTGLVWEGSVLDPEEGIKFRGLTIDEVRVSLGVAGEREPQPEALFWLLLTGQIPNEDQVAQLSRELAARGELPGHVETLLDTLPRDLHPMAQLSIAVTALEGESHFARAYLAGVPRGELWEHTYEDALNLIAKLPAIAGRIYHNVFGGAQGAQGQGTQGAFVLDPQADYSENLCRALGVQPDGETEDFHNLMRLYLTIHADHEGGNVSAHTTHLVGSALSSPYLSFAAGLDGLAGPLHGRANQEVLEWLLVLKGELVREGKTVTDREAIRQYLWRTLNSGKVVPGYGHAVLRKTDPRFLAQREFGRTRFPGDELYQLVSTVYEVAPQVLKEHGKTRNPYPNVDAHSGVLLTHYGLDQPSFYTVLFGISRCFGVMAQLITDRALGAPIERPKSLSTDRYIELATRHHNKL

SEQ ID NO: 93119 - DNA, 1419 bp, Candida glabrata CBS 138
  CDS (1)..(1419)
atgtctttatcctcagcagctagagctaccccagccttgagggcacaagcttacaaagctctcacttctacgagagcattcagtgccacttccataagttccgaaaagactttgaaggacacatttgctgacatcttcccaaaacaagcagaagagatcaagcaattcaagaaagaacatggtaagaccgtcattgaccaactactactggaacaagcttacggtggtatgcgtggtatcaaaggtatcgtttgggaaggttccgtgctagaccctgaggaaggtattagattcagaggtagaaccattccggaaatcaagaaggaattgcctaccattggtggcagctccgaaccagtcccagaagctcttttctggttgctattgaccggtgaagtcccaaccgaatctcaagttaaggctttctccgctgacttggcctccagatctgaagttccagaacatgtcttgaagttgctggacagcttaccaaaggatttgcacccaatggctcaattgtccattgccgttaacgctttagaaacagagtccaagttcgctaaggcttacgcaagaggtgttaacaagaaggaatactggagctacactttcgaagactccctagacctgctgggtaagttgcctgttattgcatccaagatctaccgtaacatctttaaggatggtaagatctgccaagtcgaccctaacgccgactacggtaagaacttggcccacctattgggttacactaacaaagatttcgtcgacttgatgagattgtacttgactatccactccgatcatgaaggtggtaacgtttctgctcacaccacacacttggtcggttccgctctatcttctccttacctatcctttgctgctggtatgaacggtttggctggtccattgcacggtcgtgccaaccaagaagttttggaatggttgttcactttcagagaagaggtcaagggtgattactcaaaggaaactgttgagaagtacctatgggacacgctgaacggtggtagagttatcccaggttacggtcacgccgtcctaagaaagacagatccacgttacactgctcaacgtgaatttgctctaaagcacttcccagactacgagttgttcaagttggtttctaccatctacgacgttgctccaaaggtcttaaccaagcacggtaagaccaagaacccatggccaaatgttgactcccactccggtgttctattacaatactacggcctaactgaagcttccttctacactgtattgtttggtgtttccagagcattcggtgttcttccacaattgatcatcgacagagctgttggtgctccaattgaaagaccaaagtctttctccaccgagaagttcaaggaattggtaaaatctattgaaagcaagaaataa

SEQ ID NO: 93120 - protein, 472 aa, Candida glabrata CBS 138
MSLSSAARATPALRAQAYKALTSTRAFSATSISSEKTLKDTFADIFPKQAEEIKQFKKEHGKTVIDQLLLEQAYGGMRGIKGIVWEGSVLDPEEGIRFRGRTIPEIKKELPTIGGSSEPVPEALFWLLLTGEVPTESQVKAFSADLASRSEVPEHVLKLLDSLPKDLHPMAQLSIAVNALETESKFAKAYARGVNKKEYWSYTFEDSLDLLGKLPVIASKIYRNIFKDGKICQVDPNADYGKNLAHLLGYTNKDFVDLMRLYLTIHSDHEGGNVSAHTTHLVGSALSSPYLSFAAGMNGLAGPLHGRANQEVLEWLFTFREEVKGDYSKETVEKYLWDTLNGGRVIPGYGHAVLRKTDPRYTAQREFALKHFPDYELFKLVSTIYDVAPKVLTKHGKTKNPWPNVDSHSGVLLQYYGLTEASFYTVLFGVSRAFGVLPQLIIDRAVGAPIERPKSFSTEKFKELVKSIESKK

SEQ ID NO: 93121 - DNA, 1443 bp, Candida glabrata CBS 138
  CDS (1)..(1443)
atgaaagtcttgttaactcacacaaccagaagtctacatacttctcggatattgagttcctcaactgcttcaagtttgaaacagcggttaaaggaggtaattccagataaaagagaaaagttcactaaaataaagaagaactattctgatgttaaggtaggtgatattacgatcggtagcgttattggtggtatgagaggaaatcagtctatgttttggcaaggcacctcgttggacccagaagaaggaattaggtttcaaggactttcgattcctgaatgtatggaccaaatggctggtatcagtgaaatacatggcggctctaagagcttgttaccggagtcaatgctttggttactaatgacaggagaactaccaactaaggaacaaactaactcactatcgaaagaactagctgaacgtggcaaaattttacctcaatccgtgaacacaattgtaagtaatttacctaaagatatgcatccgatgactcaattagctattggcttagcgtcattgaatcaatattcgcagtttgccaaagaatacgaaaaaggttccattggtaagaacgattattgggatttcatatatgaggatgttctaaacttaattgctagtctaccacatctaacaggccaaatttacgcaaacatcacaaatgaaggtaagccacttggggagtttaacgaaaatgcggattgggcctacaatattagttctttgcttggaatgaccacggaggctagttctgctaataaacaaaacctctccgaaaagcgtgcgcaagattttgcagaccttgtaagactgtatacagcaattcatgttgatcatgaaggtggaaacgtatctgcacatgccacccacctagtaggaagtgcccttggagatccatttatcagttatgcatcaggtattatgggacttgcaggaccgttgcatggtctagcggcccaggaagtagttcggttcttagtggagatgaatgcctcaatttcttcgccagagaatgtacctgaaattgaaaattatctatggtctattctcaattcccgtagagttgttcctggttatggtcatgcagttttaagaaagcctgaccccagattcaatgctatgctaaatttcgcaaaagaaagacccgacgagttccaatcggacaagaatgtactacttatggaaaacttatccactatcgctccaaaggtattacaagagcatggtaaatgtaagaatccattccccaatgtggactcagcgtcaggtatactattccatcactacggaattcaagagacactatttttcacagtaatatttggctgttctagggcaattggttctctaacccaattggtatgggatagaatacttggcctacctatcgaaagacctcgcagtctagatatggctgcactagaacgcttgtgtaataagtga

SEQ ID NO: 93122 - protein, 480 aa, Candida glabrata CBS 138
MKVLLTHTTRSLHTSRILSSSTASSLKQRLKEVIPDKREKFTKIKKNYSDVKVGDITIGSVIGGMRGNQSMFWQGTSLDPEEGIRFQGLSIPECMDQMAGISEIHGGSKSLLPESMLWLLMTGELPTKEQTNSLSKELAERGKILPQSVNTIVSNLPKDMHPMTQLAIGLASLNQYSQFAKEYEKGSIGKNDYWDFIYEDVLNLIASLPHLTGQIYANITNEGKPLGEFNENADWAYNISSLLGMTTEASSANKQNLSEKRAQDFADLVRLYTAIHVDHEGGNVSAHATHLVGSALGDPFISYASGIMGLAGPLHGLAAQEVVRFLVEMNASISSPENVPEIENYLWSILNSRRVVPGYGHAVLRKPDPRFNAMLNFAKERPDEFQSDKNVLLMENLSTIAPKVLQEHGKCKNPFPNVDSASGILFHHYGIQETLFFTVIFGCSRAIGSLTQLVWDRILGLPIERPRSLDMAALERLCNK

SEQ ID NO: 93123 - DNA, 1422 bp, Kluyveromyces lactis NRRL Y-1140
  CDS (1)..(1422)
atgatgctcaaaaactttacgcaaactagattgtttcattctagtagacatctattgaatttgaaagctgcaattgctgacgttataccaaaaagaagagaagaattactacatatcaagaagaacttttcggatgtgaaagttggtgacattactattggcagcgttatcaatggtatgagaggaaatcaatctatgtattgggaaagtaccacattggaccccaatgaaggaataaggttccatgggaaaactattgctgaatgtcaaaagttgttacctggcgcgccagaagataatgggaaaggtgaattcttaccagaatccatgttatggttattgatgactggggaggtaccttcagaggaacaggtaagaaaattgactcaagaattggctgaaagaggtgccaagttaccacctcacacggagaagctattaacgagcttgcctcgtgacatgcatcctatgacccaattggcaattgcattggcatccatgaacaagggatccatattcgctgagaagtatcaagaaggtagcattgggaaaatggattattgggaatacgtctatgaagacgtgttgaatctaattgccgctttacccaagatcaccgggaaaatttacagcaatattgttaacgatggtgaacctttaggccattacaacgtcgaaaaggattggtcgtacaacattgcatctttgcttggaatgacagttagtgattccgtgaacatgcactcgctcacacaagaaagatctaacgacttcgttaacctagttcgtttatactgcggtattcatgttgatcatgaaggtgggaacgtttctgcacataccacgcaccttgtcgggagtgccttaagtgacccatacctcagttattcttctggtatcatgggtttggcaggaccgttgcatggattagcggctcaagaagtggttagattcctagttgagatggaaaaggatgtcgattctgtagaaaatgtgaaacaagtggaagaatatctatggaaagtattgaattcaagtagagtgattccaggatacggccacgccgtgttaaggaaaccagatccaagatttgatgcaatgttgaattttgcagaaaagagaccaaaagaattcaaatctgatgccaaagtccaattgatgaaacaattatcacaaattgcaccaaaagtcttgaaagaacatggtaaaacaaagaatccatatccaaacgtcgacagcgcatcaggaattttattctaccactacggtattgatcagctactatttttcacagtaatattcggttgttcaagggcaatgggacccttgtcacagttggtttgggacagaatccttggtttaccaattgaaagaccaaagagcatcgatctaaacaccataaaaaaaatatgcaaaatttaa

SEQ ID NO: 93124 - protein, 473 aa, Kluyveromyces lactis NRRL Y-1140
MMLKNFTQTRLFHSSRHLLNLKAAIADVIPKRREELLHIKKNFSDVKVGDITIGSVINGMRGNQSMYWESTTLDPNEGIRFHGKTIAECQKLLPGAPEDNGKGEFLPESMLWLLMTGEVPSEEQVRKLTQELAERGAKLPPHTEKLLTSLPRDMHPMTQLAIALASMNKGSIFAEKYQEGSIGKMDYWEYVYEDVLNLIAALPKITGKIYSNIVNDGEPLGHYNVEKDWSYNIASLLGMTVSDSVNMHSLTQERSNDFVNLVRLYCGIHVDHEGGNVSAHTTHLVGSALSDPYLSYSSGIMGLAGPLHGLAAQEVVRFLVEMEKDVDSVENVKQVEEYLWKVLNSSRVIPGYGHAVLRKPDPRFDAMLNFAEKRPKEFKSDAKVQLMKQLSQIAPKVLKEHGKTKNPYPNVDSASGILFYHYGIDQLLFFTVIFGCSRAMGPLSQLVWDRILGLPIERPKSIDLNTIKKICKI

SEQ ID NO: 93125 - DNA, 1449 bp, Kluyveromyces lactis NRRL Y-1140
  CDS (1)..(1449)
atgtctactactatgttatctactagaaacgcgctagcgcgcggtttgctacgcaccagcggcggtgccgctggtgcttcaagaaacaacttgttgttgtctcttgttgcatctcgttattacagtaacggtgaaaaaacgttgaagcaaaggtttgctgaaattttcccagaaaaggccgaagaaattaagcgcctaaagaaggaacacggtaaaaccgtaattggtgaagtgttgttggaacaagcttacggtggtatgcgtggtatcaagggtcttgtttgggaaggttccgttttggacccagaagaaggtattagattcagaggtcgtaccattccagatatccaaaaggaattgccaaaggcagccgatggtgaagaaccattgccagaagctatcttttggttgcttttgaccggtgaagttccaactgaaactcaagttaaggctttgtcagcagatttggcttctagatctgagttgccagctcatgttgagtctctattggataacttaccaaaggatttgcatccaatggctcaattctcgatggcagttactgcattggaatcagaatccaaatttgccaaggcttacgctcaaggtgtttctaagaaggattactggaactatacttttgaagattctttggatctattgggtaagttgccagttatcgcctccaagatttaccgtaacgttttcaaagacggtaagatcacttccattgatcaaaacgccgattacggtaagaacttggcccatctattgggttaccaaaacaaagagtttgtcgacttgatgagattgtacttgaccatccattctgaccatgaaggtggtaacgtttcagctcacactacccatttggttggttctgcattgtcctctccatatttatccttgtccgctggtttgaacgggttggctggtccattgcacggacgtgcaaaccaagaagtcttggaatggttgttcaagttgagagaggaagttaagggagattactctccagctaccatcgagaaatacttgtgggatactttaaactctggtcgtgttgttccaggttatggtcacgccgtcttgagaaagactgatccacgttacactgctcaacgtgaattcgctttgaaacatttcccagattacgaattgttcaaattggtttctaccatctacgaagtcgctccaaaagtcttgaccaagcacggtaagaccaagaacccatggccaaatgtggactcccactctggtgtcctattgcaatactacggtttgactgaagcttcattctacacagttctattcggtgttgctagagctttcggtgtcttgcctcaattgatcatcgacagagccgttggtcaaccaatcgaaagaccaaagtccttctccaccgaaaagtacatcgaactagttcaatccatcaacgctaagaaatag

SEQ ID NO: 93126 - protein, 482 aa, Kluyveromyces lactis NRRL Y-1140
MSTTMLSTRNALARGLLRTSGGAAGASRNNLLLSLVASRYYSNGEKTLKQRFAEIFPEKAEEIKRLKKEHGKTVIGEVLLEQAYGGMRGIKGLVWEGSVLDPEEGIRFRGRTIPDIQKELPKAADGEEPLPEAIFWLLLTGEVPTETQVKALSADLASRSELPAHVESLLDNLPKDLHPMAQFSMAVTALESESKFAKAYAQGVSKKDYWNYTFEDSLDLLGKLPVIASKIYRNVFKDGKITSIDQNADYGKNLAHLLGYQNKEFVDLMRLYLTIHSDHEGGNVSAHTTHLVGSALSSPYLSLSAGLNGLAGPLHGRANQEVLEWLFKLREEVKGDYSPATIEKYLWDTLNSGRVVPGYGHAVLRKTDPRYTAQREFALKHFPDYELFKLVSTIYEVAPKVLTKHGKTKNPWPNVDSHSGVLLQYYGLTEASFYTVLFGVARAFGVLPQLIIDRAVGQPIERPKSFSTEKYIELVQSINAKK

SEQ ID NO: 93127 - DNA, 1380 bp, Yarrowia lipolytica CLIB122
  CDS (1)..(1380)
atgatccctcttcgaaccgcccgtgttgcccgaacctccgtgtcctccatggtccagaagcgatttgcttctgacctcaagggcgccctcaaggaggccatccccgccaagctggagctcttcaagaaggtcaagtccgagtactcccagaagtctctcggtgattgcaaggtcgagaacctgctcggaggcatgcgaggcctcaagtgcatgctctgggagggctccgttcttgacgctgatgagggtatccgattccacggcaagaccatcaaggagtgccaggaggtgctccccaaggccgttgagggcggcgagatgctccccgagtccatgctgtggttcctcttcaccggcaaggttcccactgaggagcaggtccgaggcctgtctcgagagctcgctgagaagggcgaggtccccgagtttgtcaacaagatgctcgacaacctgccccctaccctgcaccccatgacccagttctccatggccgtgtctgcccttaaccacgactccaagttcgccaaggcctacgagcgaggtatccccaagtccgagtactgggagtacaccttcgatgactccatcgacctcattgccaagctgccccagattgccgccaagatctaccagaactcttaccttggtggaggacctctccccggcaagattgatctcaaccgagactggtcttacaactacgccgctatgatgggcaagggcgatgagaccggcttcgttgatctcctgcgactctactttgctctccacggtgaccacgagggaggaaacgtctctgctcacgccacccacctggttggatccgctctgtccgatccttacctgtcctactctgctggtctccagggtcttgctggtcctctccacggcctcgccgcccaggaggtcctgcgattcatcctcgacatggagaagaacgtccccaagggctactccaacgaggacctcgtcaagtacctgtggtctgtcctcaagtctggccgagtcatccccggttacggccacgccgttctgcgaaagcctgaccctcgattcgaggctctgatgaactttgccaactctcgacaggagatccgagacgaccccgtcttccagctcgtttcccgaacctccgaggttgccactggcgtcctcaccgagcacggcaagaccaagaacccccaccccaacgtcgactcctcttccggtgtcctcttccaccactacggtatccacgagactctgtactacaccgtcaccttcggtgtgtcccgagctcttggtcctctgcctcagctggtctgggaccgaattctgggtcttcccattgagcgacccaagtctctctctctcgaggagattattaaggtcgccaaataa

SEQ ID NO: 93128 - protein, 459 aa, Yarrowia lipolytica CLIB122
MIPLRTARVARTSVSSMVQKRFASDLKGALKEAIPAKLELFKKVKSEYSQKSLGDCKVENLLGGMRGLKCMLWEGSVLDADEGIRFHGKTIKECQEVLPKAVEGGEMLPESMLWFLFTGKVPTEEQVRGLSRELAEKGEVPEFVNKMLDNLPPTLHPMTQFSMAVSALNHDSKFAKAYERGIPKSEYWEYTFDDSIDLIAKLPQIAAKIYQNSYLGGGPLPGKIDLNRDWSYNYAAMMGKGDETGFVDLLRLYFALHGDHEGGNVSAHATHLVGSALSDPYLSYSAGLQGLAGPLHGLAAQEVLRFILDMEKNVPKGYSNEDLVKYLWSVLKSGRVIPGYGHAVLRKPDPRFEALMNFANSRQEIRDDPVFQLVSRTSEVATGVLTEHGKTKNPHPNVDSSSGVLFHHYGIHETLYYTVTFGVSRALGPLPQLVWDRILGLPIERPKSLSLEEIIKVAK

SEQ ID NO: 93129 - DNA, 1398 bp, Yarrowia lipolytica CLIB122
  CDS (1)..(1398)
atgatttctgctattcgtcccgccgttcgatcttccgttcgtgttgcccctatggccaacaccgccttccgggcctactctacccaggatggtcttaaggagcgattcgccgagctcatccccgagaacgtcgagaagatcaagaagctccgaaaggagaagggtaacaccgtcatcggcgaggtcatcctcgaccaggcttacggtggtatgcgaggtattaagggtctcgtctgggagggatccgtcctcgaccccgaggagggtatccgattccgaggtctgactatccccgacctccagaagcagctcccccacgcccctggcggaaaggagcctctccccgagggtcttttctggctcctgctcaccggcgagatccccactgatgctcaggtcaagggtctgtccgctgactgggcctctcgagccgagatccccaagcatgttgaggagctcatcgaccgatgcccccccaccctccaccccatggctcagctcggtattgccgtcaacgctctggagtccgagtctcagttcaccaaggcttacgagaagggtgttaacaagaaggagtactggcagtacacctacgaggattccatgaacctcattgccaagctccccgtcattgcttctcgaatctaccgaaaccttttcaaggacggaaagattgttggctccattgacaactctcttgactactctgctaacttcgcctctctgctcggctttggcgacaacaaggagttcattgagcttctgcgactctacctcaccatccacgctgaccacgagggaggtaacgtctctgcccacaccaccaagcttgttggttctgctctctcctctcccttcctctctctgtccgctggtctcaacggtcttgccggtcctctccacggccgagctaaccaggaggtccttgagtggattctcgagatgaagtccaagattggctctgatgtcaccaaggaggacattgagaagtacctctgggatacccttaaggccggtcgagtcgtccccggttacggacacgccgttctccgaaagaccgatcctcgatacaccgcccagcgagagttcgccctcgagcacatgcccgactacgacctcttccacctcgtttccaccatctacgaggttgcccccaaggttctcaccgagcacggcaagaccaagaacccctggcccaatgtggactcccactccggtgtcctcctccagtactacggtctcactgagcagtcttactacactgttctcttcggtgtttcccgagctatcggtgtcctgccccagctcatcatggaccgagcttacggtgctcccatcgagcgacccaagtccttctctaccgagaagtacgctgagctcgttggcctcaagctctaa

SEQ ID NO: 93130 - protein, 465 aa, Yarrowia lipolytica CLIB122
MISAIRPAVRSSVRVAPMANTAFRAYSTQDGLKERFAELIPENVEKIKKLRKEKGNTVIGEVILDQAYGGMRGIKGLVWEGSVLDPEEGIRFRGLTIPDLQKQLPHAPGGKEPLPEGLFWLLLTGEIPTDAQVKGLSADWASRAEIPKHVEELIDRCPPTLHPMAQLGIAVNALESESQFTKAYEKGVNKKEYWQYTYEDSMNLIAKLPVIASRIYRNLFKDGKIVGSIDNSLDYSANFASLLGFGDNKEFIELLRLYLTIHADHEGGNVSAHTTKLVGSALSSPFLSLSAGLNGLAGPLHGRANQEVLEWILEMKSKIGSDVTKEDIEKYLWDTLKAGRVVPGYGHAVLRKTDPRYTAQREFALEHMPDYDLFHLVSTIYEVAPKVLTEHGKTKNPWPNVDSHSGVLLQYYGLTEQSYYTVLFGVSRAIGVLPQLIMDRAYGAPIERPKSFSTEKYAELVGLKL

SEQ ID NO: 93131 - DNA, 1425 bp, Aspergillus nidulans FGSC A4
  CDS (1)..(1425)
atggcttctacactcagacttagtacctctgctctccgctccagcactcttgctggcaagcccgttgttcagtctgttgccttcaatggcctgcgctgctactctaccggcaagaccaagtcccttaaagagaccttcgccgacaagcttcccggcgagctcgagaaggtcaagaagctccgaaaggagcatggcaacaaggtcattggcgagctcacccttgaccaggcttatggtggtgcccgtggcgtgaagtgcctcgtgtgggagggttccgtccttgattccgaggagggtatccgtttccgtggtctcaccattcccgagtgccagaagcttcttcccaaggcccccggtggtgaggagcctctccctgaaggtctcttctggttgcttctgaccggcgaggttccctctgagcagcaggttcgtgacctgtctgctgagtgggccgcccgctccgacctccccaagttcattgaggagcttatcgaccgctgcccgagcactctccaccccatggctcagttctctctcgccgtcactgctcttgagcacgagtctgctttcgccaaggcctacgccaagggtatcaacaagaaggagtactggcactacaccttcgaggactctatggaccttattgccaagctgcccaccatcgccgccaagatctaccgcaatgttttcaaggacggcaaggttgctcctatccagaaggacaaggactactcctacaacttggccaaccagctcggctttgccgacaacaaggacttcgttgagctgatgcgcctgtacctcaccatccactccgatcacgagggtggaaatgttagcgctcacactacccaccttgttggtagtgctctgagctcccccatgctttccctggcggctggtctcaacggtctggccggtcctctccatggattggccaaccaggaagtccttaactggctcaccgaaatgaagaaggtcgtcggcaacgacctcagcgaccagtccatcaaggactatctctggtctaccctcaacgctggtcgcgttgttcctggatacggtcacgccgttcttcgcaagaccgaccctcgctacacgtcccagcgcgagtttgctctccgcaagttgcctgatgaccccatgttcaagttggtcagccaggtttacaagatcgctcctggcgtcctgaccgagcacggcaagaccaagaacccttaccccaatgttgatgctcactctggtgtcctcctgcagtactacggcctcactgaggctaactactacaccgtcttgttcggtgtctcgcgtgctcttggtgtccttcctcagctcatcattgaccgtgcttttggtgctcctatcgagcgtcccaagagtttcagcactgaggcttacgccaagcttgttggcgctaagctataa

SEQ ID NO: 93132 - protein, 474 aa, Aspergillus nidulans FGSC A4
MASTLRLSTSALRSSTLAGKPVVQSVAFNGLRCYSTGKTKSLKETFADKLPGELEKVKKLRKEHGNKVIGELTLDQAYGGARGVKCLVWEGSVLDSEEGIRFRGLTIPECQKLLPKAPGGEEPLPEGLFWLLLTGEVPSEQQVRDLSAEWAARSDLPKFIEELIDRCPSTLHPMAQFSLAVTALEHESAFAKAYAKGINKKEYWHYTFEDSMDLIAKLPTIAAKIYRNVFKDGKVAPIQKDKDYSYNLANQLGFADNKDFVELMRLYLTIHSDHEGGNVSAHTTHLVGSALSSPMLSLAAGLNGLAGPLHGLANQEVLNWLTEMKKVVGNDLSDQSIKDYLWSTLNAGRVVPGYGHAVLRKTDPRYTSQREFALRKLPDDPMFKLVSQVYKIAPGVLTEHGKTKNPYPNVDAHSGVLLQYYGLTEANYYTVLFGVSRALGVLPQLIIDRAFGAPIERPKSFSTEAYAKLVGAKL

SEQ ID NO: 93133 - DNA, 1425 bp, Ustilago maydis 521
  CDS (1)..(1425)
atgttgtcgctcaccgtcccccgcctcgctctccgcgctgctgccccctcccgccagttcgctgctgctgccggcgttggtgctgtccgattcgcctccaccaagtccctcaaggatgccgtcgccgaaatcatccctgccaagcaggagcagctcaagaagctcaaggctgagcacggcgagtccaaactcggcgagatccagctgcagcacctcctcggtggtatgcgtggtctcaaggtcatgctctgggagggctccgttctcgactctgagaccggtatcaccttccacggcaagtccatccccgactctcagaaggtcctccccaccgccgctgaccttggcctcaacggtaacgagatccttcccgagtccatgctctggctccttttgaccggcaacgtcccctccaaggacgaggtcaagggcctctcggctgagctcgctgccaagggtgctctccccgcccatgtcgagaagatcatcgactcgttccccaagacgcttcaccccatgacccagttcgccgctgctgttgctgccctcaaccacgacagcaagttcgctgccgcctacgccaagggtatcaagaagaccgagtactgggcccccgtcctcgaggactcgatcgacctcatcgccaagctccccgccgttgccgctcgtatctactacaacgtcttcggccgtggtgacggcaagcaggctatcgactcgaacctcgacctgatcggcaactactccaacatgatcggctacggtgacaaccagggtatgaccgactacctccgtctctacattgccatccacggtgaccacgagggtggaaacgtctcggcgcacacggcgcacttggtcggttcggcgctctcggacccttacctctcctactcggctgcccttctcggtctcgccggtccgctgcacggtcttgccaaccaggaggttctcggctgggcgctttccatgcaggaggctgtaggcgagaacgcgtcggaggagcagatcaaggagtacctctggtctaccctcaagtccggccgtgttgttcctggttacggtcacgccgttctccgtcagcccgacccgcgtttcacggctctcagcaagttctgcgacacgcgccccgagctccgcgacagctcgatcgtcaagctcgtccagaaggtcagccaggtcgcgcctggcgtcctcaaggagcacggcaagaccaagaacccgttccccaacgtcgacgccgcttccggttgcgttctgtaccagtacggcctcaccgagttcacctactacacggtcatcttcggtatctcgcgtgccatcggtgcgcttccccagctcgttgccgaccgatacctcggcatgcccatcgagcgtcccaagtccatgtccatggactcgctcgaggctttcctcaagaagtaa

SEQ ID NO: 93134 - protein, 474 aa, Ustilago maydis 521
MLSLTVPRLALRAAAPSRQFAAAAGVGAVRFASTKSLKDAVAEIIPAKQEQLKKLKAEHGESKLGEIQLQHLLGGMRGLKVMLWEGSVLDSETGITFHGKSIPDSQKVLPTAADLGLNGNEILPESMLWLLLTGNVPSKDEVKGLSAELAAKGALPAHVEKIIDSFPKTLHPMTQFAAAVAALNHDSKFAAAYAKGIKKTEYWAPVLEDSIDLIAKLPAVAARIYYNVFGRGDGKQAIDSNLDLIGNYSNMIGYGDNQGMTDYLRLYIAIHGDHEGGNVSAHTAHLVGSALSDPYLSYSAALLGLAGPLHGLANQEVLGWALSMQEAVGENASEEQIKEYLWSTLKSGRVVPGYGHAVLRQPDPRFTALSKFCDTRPELRDSSIVKLVQKVSQVAPGVLKEHGKTKNPFPNVDAASGCVLYQYGLTEFTYYTVIFGISRAIGALPQLVADRYLGMPIERPKSMSMDSLEAFLKK

SEQ ID NO: 93135 - DNA, 1401 bp, Tribolium castaneum
  CDS (1)..(1401)
atggcactgttccgttttacagcaacaaaattggccgaaagtcagaaaatcgtccctcaaatctcggtggttttgcgacaacttagcgatgcctcaaccgatctcaaagcggtcctcgccgccaaaatccccaaagaacaagaacgtgtcaaaaacttccgtaaaaactacggaaaccagaaagtcggggaagtcaccgtcgatatgatgtatggtggtatgagaggcattaaaggcctcgtgtgtgaaacttcggttctcgacccggacgaaggtatccgattccgaggtctgtccatccccgaatgtcagaaattgttaccgaaagcacccggaggcagcgaacccttgcccgaagggctcttctggttgttgatcaccggggacgtaccgaccgaagctcaggtgagggccatttcgaaagagtgggccgaacgtgcagagttaccgtcacatgtggtcacactgttgaacaatttgcccacaaatgtgcaccccatgtcccagttgtcggccgctatcactgtactgaacagcgaaagcaagttcgctaaggcgtattcaagcggtgtccacaagtcgaaatattgggagtacgtttacgaggattccatggacttgatcgcgaaattgccggtgattgcggccactatctaccggaacacgttcaaggacgggtctgggatcggtgccatagacacttccaaagactggagttacaacttcacgcaaatgctgggttatgataaccccgaatttgtcgaacttatgcgactatatctcacgattcacagtgatcatgaaggtggcaacgtttcggcccacactgtccatttggtggggtctgctttgagcgacccttatttgtcttttgctgccggtatgaacggactcgctggacccctccacggtttagccaaccaagaggtgctcctgtggttgcaaaaaatccgccaacaaatcggcgataaagccaccgaagaacagctcaaggacttcatctggaagacgctcaaatcgggacaggttgttccagggtacggacacgccgttctgcgtaaaactgaccccagatacacgtgccagagagaatttgccttgaaacacctccccaacgatcctctcttccagctggtgtcgaacatcttcaaggtggttcccccaatcctgctcgagctgggcaaggtgaagaacccgtggcccaacgtggacgcccactccggcgtgcttttgcagtattacggacttaaagaaatgaattattacactgttttgttcggggtttcccgtgcattgggtgtgttggcatcactggtctgggatcgggctctcggtctgccgatcgaaaggccgaaatcgttgtcaacggatggtctcatgaaggcgctcaaggccgcttaa

SEQ ID NO: 93136 - protein, 466 aa, Tribolium castaneum
MALFRFTATKLAESQKIVPQISVVLRQLSDASTDLKAVLAAKIPKEQERVKNFRKNYGNQKVGEVTVDMMYGGMRGIKGLVCETSVLDPDEGIRFRGLSIPECQKLLPKAPGGSEPLPEGLFWLLITGDVPTEAQVRAISKEWAERAELPSHVVTLLNNLPTNVHPMSQLSAAITVLNSESKFAKAYSSGVHKSKYWEYVYEDSMDLIAKLPVIAATIYRNTFKDGSGIGAIDTSKDWSYNFTQMLGYDNPEFVELMRLYLTIHSDHEGGNVSAHTVHLVGSALSDPYLSFAAGMNGLAGPLHGLANQEVLLWLQKIRQQIGDKATEEQLKDFIWKTLKSGQVVPGYGHAVLRKTDPRYTCQREFALKHLPNDPLFQLVSNIFKVVPPILLELGKVKNPWPNVDAHSGVLLQYYGLKEMNYYTVLFGVSRALGVLASLVWDRALGLPIERPKSLSTDGLMKALKAA

SEQ ID NO: 93137 - DNA, 1383 bp, Tribolium castaneum
  CDS (1)..(1383)
atgcttcgcattaaaccgctccaagtaatttccaagcgtttcgcttgcgaattaaagtcaatccttgccgccaagatccccaaagagcaggagcgcatcaaagccttccgtaaggcccatggcaagaccaaaatcggcgaagttaccgtcaacatggcatacggcggcatgcggggcatcaagggcctcatctgcgagacctcggtcctggacccccatgaaggcatccgtttccggggcctctccatccccgagtgccaggagaagctcccgaaggccgagtgtggcgaacagccgttgcctgaaggcttgttctggttgctcctcaccggggaagtccccacaagtgagcaagtcaagtccctgtcggaggagtgggccagtcgctccgaattgccggcacacgtgtgcaaattcctgaaacaggtccccaaggaagtgcaccctatggcgcagctctcggccgcttgctcgatttgcaacactgagagtattttcaaaaagtcgtacgcctcggttcccaaggggaagtactgggagagcatctacgaggattgcatgaatttgattgcgaagcttacgcccatcgccgcgctgatttacaagcacacgttcaaaggcacggacgagatagggaccattgattcggacaaggactggagtctgaatttttgcagaatgctggggtttgacaacgaggagtttgtcgagttgatgcgcttgtatttgactatacacagcgaccatgaagggggcaatgtctcggctcacaccgtgcatttggtggggtccgcccttagcgacccctacttgtcttatgccgccggtatgaatggtttggctggaccattgcacggtctggcaaaccaagaagtactgcagtggctacgcaatttgcaaaaagaagtagggaaagaccccactcatgacaaaatcaaagaattcatttggaaaactctgaaatcgggtcgggtggttcccggctatggccacgccgtgctgcgcatcaccgatcccaggttcaccgttcagaagcaattcgctgagaagtatctccccgatgacccgttgttcaaaattgtgtcgttggtgttcgaggtggttcccccgattttgaaggagttggggaaagtacagaacccgtggcccaatgttgatgcccactccggtgtcctcttgcaatattacggcatgactgaaatgacctattacaccgtgttgtttgcggtgtctcgtgccctgggtgtgttggcttgcacggtgtgggaccgcgctctcggcctgcccattgaacggcccaagtccatctccaccgaacgtctcattaaagaagtcacgggtggcgacgacaaaaaagggaagaaagggaaaaaatgtgactaa

SEQ ID NO: 93138 - protein, 460 aa, Tribolium castaneum
MLRIKPLQVISKRFACELKSILAAKIPKEQERIKAFRKAHGKTKIGEVTVNMAYGGMRGIKGLICETSVLDPHEGIRFRGLSIPECQEKLPKAECGEQPLPEGLFWLLLTGEVPTSEQVKSLSEEWASRSELPAHVCKFLKQVPKEVHPMAQLSAACSICNTESIFKKSYASVPKGKYWESIYEDCMNLIAKLTPIAALIYKHTFKGTDEIGTIDSDKDWSLNFCRMLGFDNEEFVELMRLYLTIHSDHEGGNVSAHTVHLVGSALSDPYLSYAAGMNGLAGPLHGLANQEVLQWLRNLQKEVGKDPTHDKIKEFIWKTLKSGRVVPGYGHAVLRITDPRFTVQKQFAEKYLPDDPLFKIVSLVFEVVPPILKELGKVQNPWPNVDAHSGVLLQYYGMTEMTYYTVLFAVSRALGVLACTVWDRALGLPIERPKSISTERLIKEVTGGDDKKGKKGKKCD

SEQ ID NO: 93139 - DNA, 1320 bp, Symbiobacterium thermophilum IAM 14863
  CDS (1)..(1320): transl_table=11
gtgtcacagctgaaagccaccctggttcggaagatcgaggagcatcgcccgcggacccagcggctgctgaaggagttcgggcacgtggtcatcgacgaggtgaccatcgagaaggccatcggcggcgcgcgggacgtccgctgcctggtcaccgacatctcctacctggacccgatggaggggatccgcttccgcggcaagaccatcgaggagaccttcgccgccctgcccaaggcgccgggcggggagtacccgacggtggaggcgttctggttcttcctgctcaccggcgaggtgccgacccaggagcaggtggacgaggtcatcgccgagtggaaagagcggcggaacgtgccgcagtacgtgtacgacgtgatccgggcgctgcccaaggacagccacccgatgaccatgctgtccgcgggcatcctggcgatgcagcgggagtcaaagttcgcccggtactaccactcgggcgagtacaacaagcagcgcgcctgggagtacatgtacgaggacgcgagcgatctggtggcccgcatcccgatgatcgccgcctacatctaccgctacaagtacaaggacgacgtccatattccgcccgatcccaacctggacatgggcgcgaacttcgcccacatgatgggcgtgccgaagccttacgatgatgtctcccgcatgtacttcatcctgcattccgaccacgagtcgggcaacgtctccgcccacaccggccacctggtggcctcggctctgtcggacgcctacctcgcgtactcggcggccctgaacggcctggcgggcccgctgcacgggctggccaaccaggaggtcctgcgctggatcatggacttccaggcgaagctgggcgagggcgtagagcccacccgggagaacgtcacccaggcgctctgggacacgctcaacgccggccaggtgatcccgggctacggccatgcggtgctgcgcaagaccgacccgcgctacaccgcgcagcgggagttctgcctgaagcacatgcccgacgatccgctgttcaagctggtcagcatgatctacgaggtcgccccgggcgtgctgatgcagcacggcaaggccaagaacccgtggccgaacgtcgatgcccagtccggtgtcatccagtggcactacggcgtgcgcgagtgggacttctacacggtcctgttcggtgtcggccgggcgctgggcgtcatggccaacatcgtctgggaccgggccctgggatatccgatcgagcggcccaagtcggtgaccaccgagatgctggagcagtgggccgcggccggcggccgcaagtga

SEQ ID NO: 93140 - protein, 439 aa, Symbiobacterium thermophilum IAM 14863
MSQLKATLVRKIEEHRPRTQRLLKEFGHVVIDEVTIEKAIGGARDVRCLVTDISYLDPMEGIRFRGKTIEETFAALPKAPGGEYPTVEAFWFFLLTGEVPTQEQVDEVIAEWKERRNVPQYVYDVIRALPKDSHPMTMLSAGILAMQRESKFARYYHSGEYNKQRAWEYMYEDASDLVARIPMIAAYIYRYKYKDDVHIPPDPNLDMGANFAHMMGVPKPYDDVSRMYFILHSDHESGNVSAHTGHLVASALSDAYLAYSAALNGLAGPLHGLANQEVLRWIMDFQAKLGEGVEPTRENVTQALWDTLNAGQVIPGYGHAVLRKTDPRYTAQREFCLKHMPDDPLFKLVSMIYEVAPGVLMQHGKAKNPWPNVDAQSGVIQWHYGVREWDFYTVLFGVGRALGVMANIVWDRALGYPIERPKSVTTEMLEQWAAAGGRK

SEQ ID NO: 93141 - DNA, 1317 bp, Geobacter metallireducens GS-15
  CDS (1)..(1317): transl_table=11
atgggattaaaagaaacgcttaagcagaaaatcgaggaatttcgcccccgcaccaccaggcttgtcaaagagttcggcaaggtcaagatcgatgaggtcaccatcgagcagtgtatcggcggcgcccgcgacattcgcagtctcgtgaccgatatctcctacctggacccccaggagggaatccggttccgcggcaagaccattcccgagacctttgccgccctccccaaggcgccgggttctgattacccgacagtcgaatccttctggtatttcctgctgacgggggaggttcccacccaggcccaggtggatgaagtgctgaccgaatggaaggttcgccaggaagttcctcagtatgttttcgataccatccggaccctgccccgggacagccatcccatggcaatgctctcggtgggcatcaccgccatgcagcgggactcgaagttcgccgccctctacaatgccggcaaattcaacaaactctctgcgtgggaatccgtgtacgaggacgcctgcgacatcgtcgcccgcattccggtcatcgccgcattcatctataacctgaagtacaagggcgacaagcagatcgccatcgatcccgcgctggacatgggggcaaatttcgcccacatgatcgaccagggcgatgcgtacaaggatgtggcacggatgtactttatcctccactccgaccacgaatccggcaacgtctccgcccacaccacccacctggtgcattccgccctgtccgacccctactatgcctatgccgccgggttgaacggcctggccggtccgctccacggccgcgccaaccaggaagtgctcgactggaccatcaagttccaggagaagtactgcaaggaccaggaaccgaccaaggagctcatcaccagggcgctgtgggataccctcaactccggtcaggtcatccccggctacggccatgccgtcctgcgcaaaaccgatccccgctacatttcccagcgggagttctgccagaagcacctcccggaggatcccctcttcaaactggtttccatgatcttcgaggtggctccgggcgtcctcaccgagcacggcaagaccaagaatccctggcccaacgtcgatgcccagtccggcgtcatccagtggcactacggggtcaaggaatgggatttctacaccgttctcttcggtgtcggccgggctctcggctgcatggcaaacatcacctgggaccggggactcggctatgccatcgagcgcccgaaatcggtaaccacccccatgctcgaagagtgggccgctaaaggtggccgtctgtag

SEQ ID NO: 93142 - protein, 438 aa, Geobacter metallireducens GS-15
MGLKETLKQKIEEFRPRTTRLVKEFGKVKIDEVTIEQCIGGARDIRSLVTDISYLDPQEGIRFRGKTIPETFAALPKAPGSDYPTVESFWYFLLTGEVPTQAQVDEVLTEWKVRQEVPQYVFDTIRTLPRDSHPMAMLSVGITAMQRDSKFAALYNAGKFNKLSAWESVYEDACDIVARIPVIAAFIYNLKYKGDKQIAIDPALDMGANFAHMIDQGDAYKDVARMYFILHSDHESGNVSAHTTHLVHSALSDPYYAYAAGLNGLAGPLHGRANQEVLDWTIKFQEKYCKDQEPTKELITRALWDTLNSGQVIPGYGHAVLRKTDPRYISQREFCQKHLPEDPLFKLVSMIFEVAPGVLTEHGKTKNPWPNVDAQSGVIQWHYGVKEWDFYTVLFGVGRALGCMANITWDRGLGYAIERPKSVTTPMLEEWAAKGGRL

SEQ ID NO: 93143 - DNA, 1326 bp, Geobacter metallireducens GS-15
  CDS (1)..(1326): transl_table=11
atggcactcaaggaaaccctgaagcaaaaaattgaggagttccgtccccgtaccaccagacttgtgaaagagtttgggaaagtggttatcgaccaggtaacaattgatcaggccattggcggtgcccgtgacatccgcagcctggtaaccgatatctcctacctcgacccgcaggaaggtatccggttccgcggcaagaccattcccgagacctttgaggcgctccccaaggcctccggctctgattatccgaccgttgagtccttctggtacttcctccttaccggcgaggttccgactcaagcccaggttgacgaggtggttgctgagtggaagacccgtcaggtagtcccccagtatgtatttgacgcaatcagcgccctgccgaaggaaagccacccgatggtgatgctgtcggtcggcatcctcgccctgcagaaggattccaaatttgccggtttctacaactctggcaagtttaacaagatgactgcctgggaatacgtttatgaagatgccagcgatctcgttgcccgtatccccatcatcgccgcgttcatttacaacctcaagtacaggggtggcaagcagagtgccatagacccgactgcagactgcggcgccaacttcgcccgcatgatcggtcagtgcaaggagtacgaggacgttgcccggatgtacttcatccttcactccgaccacgaatccggcaacgtttcagcgcacaccactcacttggtacactctgccctgtccgacccctactatgcatactctgccggtcttaacggccttgccggtccgctgcacggccttgccaaccaggaagtcctcgactggaccatcaagttccagcagaagtactgcaaggatgtggagccgaccaaggaactggtcaccaaggccctctgggataccctcaatgccggccaggtcgtaccgggctacggccacgccgttctccgcaagaccgacccgcgctacatgtcgcagcgtgagttctgcctcaagaccccgggtctcaaagatgatccgctcttcaagcttgttgccatgatctttgagaccgccccgggcgtcctcatggagcacggcaaggccaagaacccctggccgaacgttgatgcccagtccggtgtcatccagtggtactatggcctccgtgagtgggacttctacaccgtcctcttcggtgtaggccgcgctctcggttgcatggcgaacatcacttgggaccgtggtctcggctacgccatcgagcgtccgaagtccgttaccaccccgatgcttgagaagtgggctgaagaaggtggccggaagttctaa

SEQ ID NO: 93144 - protein, 441 aa, Geobacter metallireducens GS-15
MALKETLKQKIEEFRPRTTRLVKEFGKVVIDQVTIDQAIGGARDIRSLVTDISYLDPQEGIRFRGKTIPETFEALPKASGSDYPTVESFWYFLLTGEVPTQAQVDEVVAEWKTRQVVPQYVFDAISALPKESHPMVMLSVGILALQKDSKFAGFYNSGKFNKMTAWEYVYEDASDLVARIPIIAAFIYNLKYRGGKQSAIDPTADCGANFARMIGQCKEYEDVARMYFILHSDHESGNVSAHTTHLVHSALSDPYYAYSAGLNGLAGPLHGLANQEVLDWTIKFQQKYCKDVEPTKELVTKALWDTLNAGQVVPGYGHAVLRKTDPRYMSQREFCLKTPGLKDDPLFKLVAMIFETAPGVLMEHGKAKNPWPNVDAQSGVIQWYYGLREWDFYTVLFGVGRALGCMANITWDRGLGYAIERPKSVTTPMLEKWAEEGGRKF

SEQ ID NO: 93145 - DNA, 1747 bp, Nicotiana tabacum
  CDS (70)..(1479)
gctcttgggatctatttcctctctctatttctccctaggtaaaagttaatttgttgatttttgcgagccatggtgttctatcgcggcgtttctctgctgtcaaagctgcgttctcgagcggtccaacagacaaatcttagcaactctgtgcggtggcttcaagtccaaacctcttctggtcttgatctgcgttctgagctgcaagaattgattccagaacaacaggatcgcctaaagaagctcaagtcagagcatggaaaggttcaattgggaaacatcacagttgatatggttcttggtggaatgagaggaatgacaggattactgtgggaaacctcattacttgaccccgatgaaggaattcgctttcggggcttgtctatctatgaatgccaaaaggtattacctgcagcaaagcctgggggagagcccttgcctgaaggtcttctctggcttcttttaacaggaaaggtgccatcaaaagagcaagtggattcattgtctcaggaattgcgaagtcgtgctactgtccccgatcatgtatacaaaactattgatgccttaccagtcacagctcatccaatgactcagtttgctactggagtcatggctcttcaggttcaaagtgaatttcaaaaggcatatgagaaagggattcacaaatcaaagttatgggaaccgacatatgaggattccatgagtttgattgctcaagttccacttgttgctgcttatgtttatcgcaggatgtacaagaacggcaacactatacctaaggatgactcactggattatggtgcaaattttgctcacatgcttggtttcagtagctctgacatgcatgagcttatgaagctctatgtcacgatacacagtgatcatgaaggtggtaacgtcagtgctcacacaggtcacttggttgctagtgctttgtcagacccttacctctccttcgctgctgctttgaatggtttagctggaccacttcatggtttagccaatcaggaagttttgctatggatcaaatctgttgtagaggagtgtggggagaacatttccaaagagcagttgaaagactacgcttggaaaacattgaaaagtggcaaggttgtccctggtttcggacatggagttctgcgcaagactgatccaagatacacatgccagagagagttcgctttgaagcatttgcctgaagatccactgtttcaactggttgcaaaactctacgaagtgttcctccaattcttacagaacttggcaaagttaaacccttggccaaatgttgatgcccacagtggtgtgttgttgaactattatggtttaactgaagcaagatattatacggtcctctttggtgtatcaagagctcttggcatttgctctcagctaatttgggaccgagctcttggattgccactagagaggccaaagagtgtcacaatggagtggcttgagaaccattgcaagaaagcatgatttgtttgaaatctctgcgagcataaaagcacaatgtaaaatctttatgaataattgcttgagaaagcagttttttcttggagccaaggtaggtcgcattaggatgttcatcgattggcttagtacggttttgaaagattttggttgtgtattttcagtttcggttttaaaaatgttataccaataccttatcgatataaattcaatatgattcgattttttacttttgtttgaaaaaaaaaacaaaaaaaaaaaaaaaaaaaaaaaa

SEQ ID NO: 93146 - protein, 469 aa, Nicotiana tabacum
MVFYRGVSLLSKLRSRAVQQTNLSNSVRWLQVQTSSGLDLRSELQELIPEQQDRLKKLKSEHGKVQLGNITVDMVLGGMRGMTGLLWETSLLDPDEGIRFRGLSIYECQKVLPAAKPGGEPLPEGLLWLLLTGKVPSKEQVDSLSQELRSRATVPDHVYKTIDALPVTAHPMTQFATGVMALQVQSEFQKAYEKGIHKSKLWEPTYEDSMSLIAQVPLVAAYVYRRMYKNGNTIPKDDSLDYGANFAHMLGFSSSDMHELMKLYVTIHSDHEGGNVSAHTGHLVASALSDPYLSFAAALNGLAGPLHGLANQEVLLWIKSVVEECGENISKEQLKDYAWKTLKSGKVVPGFGHGVLRKTDPRYTCQREFALKHLPEDPLFQLVAKLYEVFLQFLQNLAKLNPWPNVDAHSGVLLNYYGLTEARYYTVLFGVSRALGICSQLIWDRALGLPLERPKSVTMEWLENHCKKA

SEQ ID NO: 93147 - DNA, 1425 bp, Trichoderma reesei
  CDS (1)..(1425)
atggctctcaacctcacctcgtcggctcgagccctgcgctccttcaagccctacacccgcgccgccctcctcgccaacgccgcgcgatgctactcaaccgctgagcccgacctcaagacgacgctcaagagcgtcatccctgagaagcgcgagctgctgaagaaggtcaaggcccacggcagcaaggtcattggcgaggtcaaggttgagaacaccattggcggcatgcgcgggctcaaggccatggtctgggagggctccgtgctcgaccccaacgagggcatccgcttccacggccgcaccatcaaggactgccagaaggagctgcccaagggcaagacgggcaccgagatgctgcccgaggccatgttttggctgctgttgaccggccaggtgccctccgtcaaccaggtccgccagttctcccgcgagctggcctcccagacccagatccccgccttcgtcaacaggatgctcgacgatttccccaaggatctgcaccccatgacccagtttgccattgccgtctcggccctcaactacgagtccaagtttgcaaaggcctacgagaagggcctcgccaaggccgactactgggagcccacctttgacgacagcatctcgctgctcgccaagctgcccaccattgccgccaagatctaccagaactcttaccgcggcggcggcgccctccctgccgaggtcgaccttgagcaggattggtcatacaactttgctgccatgctcggcaagggcggcaaggagaacgaggacttccaggacctcctccgtctctaccttgccctccacggcgaccacgagggtggcaatgtgtctgcccacgccactcaccttgttggtagtgccctgagtgaccccttcctgtcttacagcgctggtctccagggtctggccggtcctcttcacggacttgccgcccaggaagttctccgctggatcctgcagatgaaggaggccatccccgccaactacaccgagcaggatgtccacgactacctctggtccaccctcaactcgggccgcgtcgtgcccggctacggacacgccgttctgcgcaagcccgaccctcgattcgaggctctcatggactatgccgcttcccgccccgcgattgccaaggaccccgtcttccagctggttgagaagaacagccgcatcgcccccgaggtgctcaagaagcacggcaagaccaagaacccctaccccaacgtcgacagcagctccggcgtcctcttccaccactacggcttccacgagacgctctactacacggccacctttggtgtttcgcgtggtctcggtcctctggctcagctcatctgggaccgcgccctgggtctgcccattgagcgccccaagagcatcaacctcgagggtattctgaagcaggtggagagcagctaa

SEQ ID NO: 93148 - protein, 474 aa, Trichoderma reesei
MALNLTSSARALRSFKPYTRAALLANAARCYSTAEPDLKTTLKSVIPEKRELLKKVKAHGSKVIGEVKVENTIGGMRGLKAMVWEGSVLDPNEGIRFHGRTIKDCQKELPKGKTGTEMLPEAMFWLLLTGQVPSVNQVRQFSRELASQTQIPAFVNRMLDDFPKDLHPMTQFAIAVSALNYESKFAKAYEKGLAKADYWEPTFDDSISLLAKLPTIAAKIYQNSYRGGGALPAEVDLEQDWSYNFAAMLGKGGKENEDFQDLLRLYLALHGDHEGGNVSAHATHLVGSALSDPFLSYSAGLQGLAGPLHGLAAQEVLRWILQMKEAIPANYTEQDVHDYLWSTLNSGRVVPGYGHAVLRKPDPRFEALMDYAASRPAIAKDPVFQLVEKNSRIAPEVLKKHGKTKNPYPNVDSSSGVLFHHYGFHETLYYTATFGVSRGLGPLAQLIWDRALGLPIERPKSINLEGILKQVESS

SEQ ID NO: 93149 - DNA, 1425 bp, Aspergillus oryzae
  CDS (1)..(1425)
atggcttcttccttgagaatcggaacttctgttcttcgatccacctctctcgccggtaagccggtcgtgcagtccgttgccttcaatggtttgcgctgctactctaccggcaaggccaagtccttgaaggagacattcgccgacaatctccctggcgagattgagaaggtcaagaagctcaggaaggactatggcaacaaggtcatcggcgaggtcaccctcgaccaggcctacggcggtgctcgtggtgtgaagtgcctcgtgtgggaaggttctgttttggattccgaagaaggtatccgtttccgtggatacaccatccccgaatgccagaagctgttacccaaggctcccggtggcgaggagcctcttcccgaaggtctcttctggctgctgttgaccggcgaaattccctctgagcagcaggttcgcgatctgtctgccgagtgggctgctcgttctgacctccccaaattcatcgaggagctcattgaccgctgtcccagcactcttcaccccatggctcagttctctctggctgtcactgcccttgagcacgagtccgctttcgccaaggcctacgctaaaggtatcaacaagaaggactactggaactacaccttcgaggattccatggacctcattgccaagcttcctactatcgccgcgaagatttaccgcaacgtcttcaaggacggcaaggtcgctcctatccagaaggacaaggattactcctacaacttggccaaccagctcggctttggtaacaacaatgacttcgttgagctcatgcgtttgtacctgaccatccactctgaccatgagggtggaaacgtcagcgctcacaccacccaccttgttggtagtgctctgagctcccctatgctgtctttgtctgctggtctgaacggattggctggcccccttcacggattggcaaaccaggaagtgcttaactggctcacaaagatgaaggctgccattggtaacgacctcagtgaccaggccatcaaggactacttgtggtccactctcaacgctggccaggttgttcccggatacggtcacgctgtcctgcgtaagactgatcctcgttacgtttctcagcgcgagtttgcacttcgcaagctccctgatgaccaaatgttcaatctcgtcagccaggtctacaagattgctcctggcgtgctgactgagcatggcaagaccaagaaccccttccccaatgttgatgctcactctggtgtccttcttcagtactatggcctgactgaggccaactattacaccgtcctgttcggtgtctctcgtgctctaggtgttctgcctcagctgatcattgaccgcgcccttggtgcccccattgagcgccccaagtccttcagcacggaggcttacgccaagcttgtcggtgccaagctgtaa

SEQ ID NO: 93150 - protein, 474 aa, Aspergillus oryzae
MASSLRIGTSVLRSTSLAGKPVVQSVAFNGLRCYSTGKAKSLKETFADNLPGEIEKVKKLRKDYGNKVIGEVTLDQAYGGARGVKCLVWEGSVLDSEEGIRFRGYTIPECQKLLPKAPGGEEPLPEGLFWLLLTGEIPSEQQVRDLSAEWAARSDLPKFIEELIDRCPSTLHPMAQFSLAVTALEHESAFAKAYAKGINKKDYWNYTFEDSMDLIAKLPTIAAKIYRNVFKDGKVAPIQKDKDYSYNLANQLGFGNNNDFVELMRLYLTIHSDHEGGNVSAHTTHLVGSALSSPMLSLSAGLNGLAGPLHGLANQEVLNWLTKMKAAIGNDLSDQAIKDYLWSTLNAGQVVPGYGHAVLRKTDPRYVSQREFALRKLPDDQMFNLVSQVYKIAPGVLTEHGKTKNPFPNVDAHSGVLLQYYGLTEANYYTVLFGVSRALGVLPQLIIDRALGAPIERPKSFSTEAYAKLVGAKL

SEQ ID NO: 93151 - DNA, 1404 bp, Aspergillus oryzae
  CDS (1)..(1404)
atggccatgcccatgcgaaccactcgccatgctaccaagctggctcagtcttcgcgcctattggctcagtatacctctcgcagatcttatgcgacggcggaacccgatctgaagtccgccctcaaggcggtcatccccgccaaacgtgaactcttccagcaggtgaaacaacagggtgacgatgtgattggtgaggtcaaagttgccaatgtcattggtggtatgcgtggtctcaagtcgatgctctgggagggctcggtccttgatcccgatgaggggatccgcttccacggcaagaccatcaaggattgtcagaaggagctccctaagggtacctccggtaccgagatgttgcccgaagccatgttctggctcctcctgacgggacaggtcccctcgaccagccaggtgcgcgccttctcgcgcgaattggccgagaagtcccacctccctcagcacatcctggacctcattaagtccttcccccgcaacatgcaccccatgacacagctgtcgatcgccgtcgctgctctgaacactgagtcgcagttcgccaaggcctacgagaagggcctgaacaaggccgattactgggagcccacattcgacgacagcatctcgttgctggccaagattccccgtgtcgccgcattggtcttccgccccgaggagatcgacgctgttggcacccaagctctcgacgtgagccaggattggtcttacaacttcgcagagctactcggcaaaggtggtcaacagaaccaggacttccacgatttgctgcgtctgtacttggccctgcacggtgaccacgagggcggtaacgtgtctgcccacgctacccacttggttggaagcgccctgagcgaccccttcctgagctacagtgcgggtcttttgggtcttgccggacctctgcacggccttgctgcccaggaagtcctgcggtggatcctgtccatgcaggagaagatcggaaccaagttcactgacgaggacgttcgtacctacctctgggacactctgaagtcgggccgtgtcgtccctggctacggccatggtgtcctccgcaagcctgaccctcgtttcgaggctctcatggactttgctgccactcgccctgatgtcctggccaaccctgtcttccaattggtcaagaagaattccgagatcgcccctggtgttcttacggaacatggaaagaccaagaacccccaccccaatgttgacgccgcgtctggtgttctcttctaccactacggattccagcagcccctctactacaccgtcaccttcggtgtcagccgtgctctgggccctctcgtccagctcatctgggaccgtgccctcggcctgcccatcgagcgtcctaagagcattaacctcctgggcctgaagaaatga

SEQ ID NO: 93152 - protein, 467 aa, Aspergillus oryzae
MAMPMRTTRHATKLAQSSRLLAQYTSRRSYATAEPDLKSALKAVIPAKRELFQQVKQQGDDVIGEVKVANVIGGMRGLKSMLWEGSVLDPDEGIRFHGKTIKDCQKELPKGTSGTEMLPEAMFWLLLTGQVPSTSQVRAFSRELAEKSHLPQHILDLIKSFPRNMHPMTQLSIAVAALNTESQFAKAYEKGLNKADYWEPTFDDSISLLAKIPRVAALVFRPEEIDAVGTQALDVSQDWSYNFAELLGKGGQQNQDFHDLLRLYLALHGDHEGGNVSAHATHLVGSALSDPFLSYSAGLLGLAGPLHGLAAQEVLRWILSMQEKIGTKFTDEDVRTYLWDTLKSGRVVPGYGHGVLRKPDPRFEALMDFAATRPDVLANPVFQLVKKNSEIAPGVLTEHGKTKNPHPNVDAASGVLFYHYGFQQPLYYTVTFGVSRALGPLVQLIWDRALGLPIERPKSINLLGLKK

SEQ ID NO: 93153 - DNA, 1314 bp, Desulfuromonas palmitatis
  CDS (1)..(1314): transl_table=11
atgtccacactgaaggagactctgcgcaaaaagatcgaagagcaccgtccccgcaccacccggcttgtcaaggaattcggcgacgtcaagctgggtgatgttaccatttcgcaggctattggtggcgcacgcggcatcaagtgtcttgtaaccgacatttcttacctcgatcccatggaaggcatccgcttccgtggcaagaccattcctgagactttcgctgctctgcccaaggttcccggttccgactatccttatgtcgagggattctggtggatgctgctgaccggcgatgttcccaccatggagcagactctggaagttgtggaagactggaaaaaacgttctcagatcccggcttacgtcatcgacgtgttgcgcgctctgccccgtgattcccatccgatggccatgttctccgctgccatcgtcgccatgcagcgcgactctgtgttcgccaagaactacgctgctggcaagttcaacaaaatgacctgctgggaagatatgtacgaggacgccaacgaactgatggcgaaactcggccccatcgccgcttatatctatcgcatgaagtacaagggggacacccacattcctgccgatcccaaactcgacatgggtgggaacttcgctcacatgatgggtgttgacaagccttacgacgatgtcgcccgcatgtacttcattctgcattccgaccacgagtccggcaacgtttccgcccacacgactcatctggttgcctctgctctgtccgacgcttactactcctatgccgccggcatcaatggcctggctggcccgctgcacggtctggctaaccaggaagttctggcctggacccagaatttcatggacaagttgggcggcaaggtccccaccaaggaagagctggaaaaagctctgtgggacaccctcaacagcggacaggttattcccggatacggccatgccgttctgcgcaagaccgatccccgctacacttcccagcgtgaattctgcctcaagactccgggcctgaaggaatacccgctcttccagctggtttccatgatctttgaagtggctcccgacgttctgctcaagcacggcaaggctaagaacccctggccgaatgttgacgctcagtccggtgttatccagtggtactatggtgtcaccgagtatgacttctacaccgtactgttcggtgtaggtcgtgctcttggctgcttggccaacatcacttgggaccgcgctcttggctatgctatcgagcgtcccaagtctgttaccacggctatgctggaggatgctgccggcatcaagtaa

SEQ ID NO: 93154 - protein, 437 aa, Desulfuromonas palmitatis
MSTLKETLRKKIEEHRPRTTRLVKEFGDVKLGDVTISQAIGGARGIKCLVTDISYLDPMEGIRFRGKTIPETFAALPKVPGSDYPYVEGFWWMLLTGDVPTMEQTLEVVEDWKKRSQIPAYVIDVLRALPRDSHPMAMFSAAIVAMQRDSVFAKNYAAGKFNKMTCWEDMYEDANELMAKLGPIAAYIYRMKYKGDTHIPADPKLDMGGNFAHMMGVDKPYDDVARMYFILHSDHESGNVSAHTTHLVASALSDAYYSYAAGINGLAGPLHGLANQEVLAWTQNFMDKLGGKVPTKEELEKALWDTLNSGQVIPGYGHAVLRKTDPRYTSQREFCLKTPGLKEYPLFQLVSMIFEVAPDVLLKHGKAKNPWPNVDAQSGVIQWYYGVTEYDFYTVLFGVGRALGCLANITWDRALGYAIERPKSVTTAMLEDAAGIK

SEQ ID NO: 93155 - DNA, 1733 bp, Citrus junos
  CDS (32)..(1426)
gctggtgactgctcgaagtttgaagtgaaccatggcgttcttcaggagcgtaactgcgctttctcgcctccgttctcgcgttgggcaacagtctaatctcagtaattcagtgagatggcttcaaatgcaaagctcttctgatcttgaccttcattctcagctcaaggaaatgattccagaacaacaggagcgcctgaagaaagtgaagtcagaacttggaaaagcccagctgggaaatattaccgttgacatggtaatcggcgggatgagaggaatgactggcttactctgggaaacctcattacttgaccctgatgagggaattcgctttcggggtctgtctattcctgagtgccagaagttgttacctgccgctaagccagatggagaacctttgcctgagggtcttctttggcttcttttaactggaaaggtaccgagcaaagagcaggtcgatggcttgtccaaggaattgagagatcgtgccactgtcccagattatgtgtacaaggccattgatgctctacctgtaacggcacatccgatgactcaatttgctagtggggtcatggctctgcaggtgcaaagtgaatttcaggaggcttatgagaagggaattcataaatcaaagtactgggaaccaacatatgaggattctcttaatttgattgctcgtgtgccggtagtagctgcgtacgtttatcaaaggatatacaaggatggaaagattattcccaaggatgactcactggattatggtgggaacttctcgcacatgttgggattcgatgatcctaagatgctagagcttatgaggctttatgttaccattcacagtgaccacgaaggtggaaatgtcagtgctcacaccggccatctagttgcaagtgcactttcagatccttatctttcttttgctgccgcattaaatggtttagctggaccactccatggtttggctaatcaggaagttttgctttggatcaaatctgtggtggatgagtgtggtgagaacgtaacaacggagcagttgaaagattatgtctggaaaacattgaatagtggcaaggttgtccctggatttggtcatggtgttttgcgtaaaactgatccgagatacacttgtcagagggagtttgccttgaagcatttgcctgatgatccattgttccagctggtttctaagctgtttgaagtggtgcccccaatattaacaaaactaggcaaggttaaaaacccctggccaaatgttgatgctcacagtggggtgctgctgaaccattttggtttggctgaggcaagatattatactgttctttttggagtatcaaggagtcttggaatctgctctcagttgatatgggaccgagctcttgggctgccacttgagaggccaaaaagtgtaactttagattggattgagtaaaattgcaagaaagcagcttagaattggaaagggtgggtgtataaattttttcttcggtaataattgctcaagaagcaagggaattagtgatggatggagagtttgtgtagaattgcgaggccatttgattactgcaggcattttaactttcttatctttatgattttcttattcagcaatttgatttaacacagattttggctgttttgttttgaatacatatgatttagaaccatattgagtcagttgaataaagtaatgattggttacaaaatggccaacaatttctactgtaaaaaaaaaaaaa

SEQ ID NO: 93156 - protein, 464 aa, Citrus junos
MAFFRSVTALSRLRSRVGQQSNLSNSVRWLQMQSSSDLDLHSQLKEMIPEQQERLKKVKSELGKAQLGNITVDMVIGGMRGMTGLLWETSLLDPDEGIRFRGLSIPECQKLLPAAKPDGEPLPEGLLWLLLTGKVPSKEQVDGLSKELRDRATVPDYVYKAIDALPVTAHPMTQFASGVMALQVQSEFQEAYEKGIHKSKYWEPTYEDSLNLIARVPVVAAYVYQRIYKDGKIIPKDDSLDYGGNFSHMLGFDDPKMLELMRLYVTIHSDHEGGNVSAHTGHLVASALSDPYLSFAAALNGLAGPLHGLANQEVLLWIKSVVDECGENVTTEQLKDYVWKTLNSGKVVPGFGHGVLRKTDPRYTCQREFALKHLPDDPLFQLVSKLFEVVPPILTKLGKVKNPWPNVDAHSGVLLNHFGLAEARYYTVLFGVSRSLGICSQLIWDRALGLPLERPKSVTLDWIE

SEQ ID NO: 93157 - DNA, 1422 bp, Saccharomyces castellii
  CDS (1)..(1422)
atgttacgattctctagacaactacacaattcaaccaggctctgctcccaagcaactgggttaaaagaatctttgaaggctatcattccaaaaagaaaggaggagtttctaaaattgaaaaaggaatgcatgggtacgaaggtggacgatattacaattggctccattctttccggcatgagaggtaaccgttcaatgttttgggagggttctatggtagatgcacaaagggggataacattccatggtaagaccattgaacaatgccagcgagaactgcctggtgatgaatccggtaatttctatcctgaatcaatgttgtggttattaatgaccggagaagttccaacaaagcaacaaactaagcaacttatggaagaattggctgtaagaggttctgaagctaactttcctatcgctacttcaagagttattgattcattaccaaatgatatgcatccaatgactcaattagcaattgggctagcatccatgaacaaagtctcaaggtttgccagcaattatgaaaagggactcttgaacaaaaataattattgggaagacacctttgaagatacgttaaatttaatatcatttctcccaattttaactgggaaaatctactccaaaatcactaacgatggtaaaccactaggtaaatttagtcccaccgaggattggagttcaaatatctgttctctcatggggatgtccaatagtacttattcggtaaataagaataattttaatgcaagtgaatccaaggatttcctttcgctgatgaggttgtacaccggaattcatgctgatcacgaaggtggaaacgtttccgctcacactactcatctagttggtagcgctctcagtgatccttatctgagttactcttctggtattatgggcttggcaggacccttacatgggttagctgctcaagaggtagttcgcttcttagtggaaatgaacggtcaaatatcttctcctaatcagcctgatgaaatagaaaggtatctatgggatcttttgaactccaagagagttattcctgggtatggacatgccactttgagaaagccagacccaagattcacagcgatgctcaagtttaccaaagataggaaaagtgaatttgaaaatgacaagaatgttgttttaatgcaaaatttatcatccattgcgcctaaagttttgaaagctcatgggaaatgtcaaaatccttatccaaacgtcgattcagcctctggtatcctcttccaccattatggcttaaaagagagtttatttttcacggtaattttcggctgttcaagatctatgggacctctcactcagttggtctgggatcgcatttatggtttacctattgaaaggccaaagagtgtcaatatggaaactttaaaactgttatcaaattctcagtaa

SEQ ID NO: 93158 - protein, 473 aa, Saccharomyces castellii
MLRFSRQLHNSTRLCSQATGLKESLKAIIPKRKEEFLKLKKECMGTKVDDITIGSILSGMRGNRSMFWEGSMVDAQRGITFHGKTIEQCQRELPGDESGNFYPESMLWLLMTGEVPTKQQTKQLMEELAVRGSEANFPIATSRVIDSLPNDMHPMTQLAIGLASMNKVSRFASNYEKGLLNKNNYWEDTFEDTLNLISFLPILTGKIYSKITNDGKPLGKFSPTEDWSSNICSLMGMSNSTYSVNKNNFNASESKDFLSLMRLYTGIHADHEGGNVSAHTTHLVGSALSDPYLSYSSGIMGLAGPLHGLAAQEVVRFLVEMNGQISSPNQPDEIERYLWDLLNSKRVIPGYGHATLRKPDPRFTAMLKFTKDRKSEFENDKNVVLMQNLSSIAPKVLKAHGKCQNPYPNVDSASGILFHHYGLKESLFFTVIFGCSRSMGPLTQLVWDRIYGLPIERPKSVNMETLKLLSNSQ

SEQ ID NO: 93159 - DNA, 1431 bp, Saccharomyces castellii
  CDS (1)..(1431)
atgtccgcagtgctatccacacaaactacaagatccatactctcaaactctggtcgcagagctgccaccatcgccctcatccaccgtctctacaccaccgcctccgcagaacccaccctcaaggagaccttctcccaactcatcccctccaagatcgacgaaatcaagcagttcaagaaagatcacggcaagaccgtcatcggcaacgtcctcctcgagcaagcatacggcgggatgagaggtatcaagggaatagtatgggaagggtccgtcctggaccctgaagaaggtatcaagttccgcggtctcaccatcccagagatccgtgatcaattgccaaaattaggggatgaaccattgcccgaaggtatcttttggctcctattgactggtgaaattccatcgagggcccaagtggaacaattgagtgcggatttggcctccagggccgaattaccggaacatgtcgtgaacttgttgaatggcttgcccaaacatttacatccaatggcccaattctccatcgcggtcaatgccttggaatcggaatctaagttcgctaaggcttacgctcagggggtcaacaagaaggaatattggaagtatactttcgaggattcattggatttgttggggaaactaccaactatcgctgctaccatttacagaaacgtgtttaaagatgggaaactgggtgcttgggaccctcaggctgactacgggaagaatttggctacgttgatggggttcaagaataaggatttcatggaattgatgagattgtatttgaccatccattcagatcatgaaggtgggaatgtatctgctcataccacccatttagtcggctcagcattatcctctccatatttatctttggccgctgggttgaacgggttggctggtccattgcatggtagagctaatcaagaagtcttggaatggttattcaaattacgtgaagaagttaagggagattattccaaggaaaccatcgagaaatatttgtgggatactttgaactccggaagagtcgtcccagggtacggtcatgccgtcttgagaaagacagatcctcgttacactgcacaacgtgaattcgcattgaaacatttcccagattacgaactatttaaattggtctcctccatttatgaagtggcaccaaaagtattgaccaaacaggggaagactaagaacccatggccaaatgtcgattctcattcaggggtcctattacaatactacggcttgactgaagcttctttctacacggtcctattcggtgtcgctagagctttcggtgtcctacctcaattgatcatcgatagagccgtgggtgccccaatcgaaagaccaaaatcattctccactgaaaaatacaaagaattggttgccaagattgaaagtggtgaaacaaaagttgtataa

SEQ ID NO: 93160 - protein, 476 aa, Saccharomyces castellii
MSAVLSTQTTRSILSNSGRRAATIALIHRLYTTASAEPTLKETFSQLIPSKIDEIKQFKKDHGKTVIGNVLLEQAYGGMRGIKGIVWEGSVLDPEEGIKFRGLTIPEIRDQLPKLGDEPLPEGIFWLLLTGEIPSRAQVEQLSADLASRAELPEHVVNLLNGLPKHLHPMAQFSIAVNALESESKFAKAYAQGVNKKEYWKYTFEDSLDLLGKLPTIAATIYRNVFKDGKLGAWDPQADYGKNLATLMGFKNKDFMELMRLYLTIHSDHEGGNVSAHTTHLVGSALSSPYLSLAAGLNGLAGPLHGRANQEVLEWLFKLREEVKGDYSKETIEKYLWDTLNSGRVVPGYGHAVLRKTDPRYTAQREFALKHFPDYELFKLVSSIYEVAPKVLTKQGKTKNPWPNVDSHSGVLLQYYGLTEASFYTVLFGVARAFGVLPQLIIDRAVGAPIERPKSFSTEKYKELVAKIESGETKVV

SEQ ID NO: 93161 - DNA, 1440 bp, Saccharomyces bayanus
  CDS (1)..(1440)
atgtcagcgatattatcaactaccagcaaaaatttcttatcaagaaaccccgccagacaatgtcagagcgcacaaaaggctctttttgccctattgagctctcgccactatagtagcgccacagaacaaacgttgaaggagaggtttgctgaaattattccagcaaaggctgaagagattaagaaattcaagaaagaacatggtaaaactgtcattggcgaagttctcttggagcaagcctacggtggtatgagaggtattaaaggccttgtttgggagggttccgttttggatcccgatgaaggtattagattcagaggtcgtactattccagaaattcaaagagaattgccaaaggctgaaggcagtactgagcctttaccggaagctttgttttggctacttttgacgggcgaaatacctactgacgctcaagttaaggccctttctgcagatttggcggcaagatcagaaattccagaacatgtcgtccaacttttggatagccttccaaaggacttacatccaatggctcaattttccattgccgtaactgctttggaaagcgaatccaaatttgccaaagcatatgctcaaggtgtatctaaaaaggaatattggagttacacttttgaagactcactggatttgctgggtaaattgcctgttatcgcttccaaaatttaccgtaacgtatttaaagatggtaaaatcaccaccgttgatcccaatgctgattatggtaaaaatttggcccaactattgggttacgaaaacaaggacttcgtcgatttgatgagactatacctaactattcattctgatcatgaaggtggtaacgtttctgcccatactacccatttagtgggttctgcattgtcttctccatatctatctttagccgctggtttgaatggtttggctggcccattgcatggtcgtgctaaccaagaagtcttggaatggttattcaaattgagagaagaagttaaaggcgattattcaaaagaaacaatcgaaaagtacttatgggaaactttgaattcaggaagagttgttccaggttatggtcatgccgtcttaagaaaaacagaccctcgttacatggcccaacgtgaatttgctttgaagcatttcccagattatgaactattcaagttggtgtccaccatttatgatgtggccccaggcgttttaactaagcatggtaagacaaagaacccatggcctaatgtcgattctcattctggtgtcctattgcaatactatggtttaactgaagcatcattctataccgtactgtttggtgttgcaagagccattggtgtattgcctcagctgatcatcgatagggctgtcggcgctccaatcgaaagaccaaaatcattctctacagaaaaatataaggagttagtgaaaaaaatcgaaagtaagaattaa

SEQ ID NO: 93162 - protein, 479 aa, Saccharomyces bayanus
MSAILSTTSKNFLSRNPARQCQSAQKALFALLSSRHYSSATEQTLKERFAEIIPAKAEEIKKFKKEHGKTVIGEVLLEQAYGGMRGIKGLVWEGSVLDPDEGIRFRGRTIPEIQRELPKAEGSTEPLPEALFWLLLTGEIPTDAQVKALSADLAARSEIPEHVVQLLDSLPKDLHPMAQFSIAVTALESESKFAKAYAQGVSKKEYWSYTFEDSLDLLGKLPVIASKIYRNVFKDGKITTVDPNADYGKNLAQLLGYENKDFVDLMRLYLTIHSDHEGGNVSAHTTHLVGSALSSPYLSLAAGLNGLAGPLHGRANQEVLEWLFKLREEVKGDYSKETIEKYLWETLNSGRVVPGYGHAVLRKTDPRYMAQREFALKHFPDYELFKLVSTIYDVAPGVLTKHGKTKNPWPNVDSHSGVLLQYYGLTEASFYTVLFGVARAIGVLPQLIIDRAVGAPIERPKSFSTEKYKELVKKIESKN

SEQ ID NO: 93163 - DNA, 1371 bp, Issatchenkia orientalis
  CDS (1)..(1371)
atgtctcttagaaatttcgcaagatccgcaactagagcctactctactgctgaaccaaccttaaaggaaagatttgctgaattgttacctggctggcaggcagaagtcaaggagttgaagtcaaagcacggtaagaccgttattggcgaagttctccttgaacaagcatatggtggtatgagaggtatcaagggtttagtttgggaaggttctgttttggaccctgttgaaggtatcagattcagaggtaagactattccagatattcaaaaggaattgccaaaggctgaaggtagtagtgaaccattaccagaagctttattctggttattattaactggtgaagtcccaactcttgctcaaactaaggcattctctgctgaattggcttctagatctgctttaccaaagcatgttgaagacttgttggatacttgtccaacaactttacacccaatggcccaattctctattgcaatcaatgctttagaatcagaatccaaattcgcgaaggcttatgctgatggtgtcaataagaaggaatactggaaatacacttatgaagattccattgacttgttggcaaaattacctaatgttgctgcaaagatttacagaaatgtctttaaggatggtaaggttgctcctgtcaatgcttctcttgattactcccataactttgccaacatgttaggttttggtgataataaggaatttgttgaattgatgagattatacttgtctatccattccgatcatgaaggtggtaatgtttctgctcataccacccatttggttggttctgctttatcttctccatacttgtccttggcggcaggtatgaatggtttagcaggtccactacatggtagagccaaccaagaagttttggaatggttagttggtatgaagaaggaattaggtgatgacattttcaacaaggaaaaaatcgaagaatacttgtggaagaccttgaacgctggtagagttgttccaggttatggtcatgcagttttaagaaagaccgatccaagatatactgctcaaagagaatttgctctaaagcacatgccagattacgacatgttcaagttggtctccaacatttacgaagttgctccaaaggttctcgctgaacaaggtaagaccaagaacccatggcctaatgtcgactcccactctggtatcttgttacaatattacggcttgacccaagaatcttactacactgtcttgtttggtgttgctagagcatttggtgtcttacctcaattgatcattgacagaggtttaggtatggccattgaaagaccaaagtccttctccactcaaaagtacaaggaattagttgaaaacttaaacaaggcttaa

SEQ ID NO: 93164 - protein, 456 aa, Issatchenkia orientalis
MSLRNFARSATRAYSTAEPTLKERFAELLPGWQAEVKELKSKHGKTVIGEVLLEQAYGGMRGIKGLVWEGSVLDPVEGIRFRGKTIPDIQKELPKAEGSSEPLPEALFWLLLTGEVPTLAQTKAFSAELASRSALPKHVEDLLDTCPTTLHPMAQFSIAINALESESKFAKAYADGVNKKEYWKYTYEDSIDLLAKLPNVAAKIYRNVFKDGKVAPVNASLDYSHNFANMLGFGDNKEFVELMRLYLSIHSDHEGGNVSAHTTHLVGSALSSPYLSLAAGMNGLAGPLHGRANQEVLEWLVGMKKELGDDIFNKEKIEEYLWKTLNAGRVVPGYGHAVLRKTDPRYTAQREFALKHMPDYDMFKLVSNIYEVAPKVLAEQGKTKNPWPNVDSHSGILLQYYGLTQESYYTVLFGVARAFGVLPQLIIDRGLGMAIERPKSFSTQKYKELVENLNKA

SEQ ID NO: 93165 - DNA, 1873 bp, Prunus persica
  CDS (142)..(1563)
  misc_feature (576)..(576): k is g or t
  misc_feature (577)..(577): k is g or t
  misc_feature (721)..(721): w is a or t
ttgcctttggctttggctttggctttggcttttctgccgtttaaattgctttctttgtattttgtgtaataattttcatacgtaaattgggtgggtgcggtgcggtgcggtgcagatacctgatagcggctgctgtcaccgatggtgttcttcaggagtgtcaatgcgctttccaagctccgttctcgtcttggccaacagtcgaatctcagagattccgtcagatggcttcaaacgcaaacctccacagatcttgaccttcgttctcagttgaaggaattgattccagaacaacaggaacgtctgaagaaaatcaaggcagaatatggaaaagttcaactgggcaatatcactgttgatatggttcttggggggatgagggggatgacagggttgctgtgggaaacttccttacttgacccagatgaggggattcgtttcaggggtttgtcaattccagaatgccagaaagtattaccaggtgcaaagcctggtggggaacctttgcctgagggtcttctgtggctacttttaacaggaaaggtaccaagcaaagagcaagttgatgcattatckkaggaattgaggagccgtgccgcagttccagattatgtgtataaggccattgatgctctgcctattacagcacatccaatgactcagtttaccaccggtgttatggccctccaggttcagagtgaattccagaaggcatacgatwaggggatttataaatcgaagtactgggagccaacttttgaggattcacttagcttgattgcacaactgccagtagtagcttcttatgtttaccagagaatttttaaggatggaaaagtaatacctgttgatgactccctggattatggtgcaaatttttcacacttgtggggctttgacgatcccaagatgcatgagcttatgaggctttatgtcaccattcatagtgatcacgaaggtgggaatgtcagtgctcacaccggccaccttgttgctagtgcactgtcagacccttatctttcatttgcagctgcattaaatgggttggctggcccactccatggtttggctaatcaggaagttttgctctggataaaatctgtggtagatgaagttggggagaacgtaactacagagcagttgaaagattatgtctggaaaacattaaacagtgggaaggttgttcctggttttggacacggagtcttgcgtaaaacagatccacgatactcatgtcaacgggagtttgcattaaagcacttgcctgatgatccgctgtttcagctggtctccaagctttatgaagtcgtgcctcccattcttatcgaactaggcaaggttaaaaacccctggcccaatgtagatgctcacagtggagttctgttgaaccattttggtttgaccgaggcaagattttttactgttctctttggcgtatcaaggagtatagggattggttctcagctgatatgggaccgggctcttggtttgcctcttgaaaggccaaaaagcgttacgatggaatcacttgaaaattactgcaagaaagcagcttcatcctgagaatcggagggttgtatcattctctttcagtaataattgctctgatgaattcatggctttgtgaaggatatactgaggggtgtaaaatttcaggttctgctgtttttagttgagttgttacaggaaaacctcaacactagagcatttttaagtacttagaagaaattttgaagttacttaggctcagggtgttttactgctctgtctgattttaataaacgcactgaagaagatatttggaataaaaagtatagtcgaagatggcccttgcattttaggcttttctttcaaaaaaaaaaaaaaaaaaaaa

SEQ ID NO: 93166 - protein, 473 aa, Prunus persica
  misc_feature (146)..(146): The Xaa at location 146 stands for Stop, or Glu.
  misc_feature (194)..(194): The Xaa at location 194 stands for Stop, or Lys.
MVFFRSVNALSKLRSRLGQQSNLRDSVRWLQTQTSTDLDLRSQLKELIPEQQERLKKIKAEYGKVQLGNITVDMVLGGMRGMTGLLWETSLLDPDEGIRFRGLSIPECQKVLPGAKPGGEPLPEGLLWLLLTGKVPSKEQVDALSXELRSRAAVPDYVYKAIDALPITAHPMTQFTTGVMALQVQSEFQKAYDXGIYKSKYWEPTFEDSLSLIAQLPVVASYVYQRIFKDGKVIPVDDSLDYGANFSHLWGFDDPKMHELMRLYVTIHSDHEGGNVSAHTGHLVASALSDPYLSFAAALNGLAGPLHGLANQEVLLWIKSVVDEVGENVTTEQLKDYVWKTLNSGKVVPGFGHGVLRKTDPRYSCQREFALKHLPDDPLFQLVSKLYEVVPPILIELGKVKNPWPNVDAHSGVLLNHFGLTEARFFTVLFGVSRSIGIGSQLIWDRALGLPLERPKSVTMESLENYCKKAASS

SEQ ID NO: 93167 - DNA, 1523 bp, Oryza sativa
  CDS (105)..(1523)
gaacaatcgctctctctctctctccctccccgattcgattcaattcgcgacgcctccgtgaaattctccaaagccagcttgccctgtagccgcgtgctccggccatggcgttcttcaggggcctgaccgcggtgtcgaggcttcgatcccgcgtggcacaggaggccaccacgcttggtggtgtgcgatggctgcagatgcagagcgcatctgatcttgatctcaagtcccagctgcaggaattgattcctgaacaacaggaccgcttaaagaaacttaaatcggagcatggaaaggtccaacttggaaatataacagtcgatatggtccttggtgggatgagagggatgactggaatgctttgggaaacatcattgcttgacccggatgagggtattcgttttaggggtctctcgattccagagtgccagaaagtgctgccgacagcagttaaagatggggagcctttgcctgagggtctactttggcttcttttgaccggaaaggtgccaaccaaagagcaagttgatgctctatcaaaggaattggctagtcgttcgagtgttccaggtcatgtgtataaggcaatcgatgctctccctgtaactgctcatccgatgacccagtttaccacaggagtgatggcacttcaggtggagagtgagtttcaaaaagcctatgacaaaggaatgtcaaaatcaaagttctgggagcctacctatgaagattgcttaaatttgatagctcgccttccagcagtggcttcatatgtttaccggaggatattcaagggagggaaaactatagcagctgataatgcactggattatgcagcaaatttttcacacatgcttgggtttgatgatcccaaaatgcttgagttgatgcgactatatataacaatccacactgatcatgaaggtggaaacgtcagtgctcatactggacatctggttggaagtgctctgtcagacccttatctttcttttgcagctgcactgaatggtttagctggaccgttgcacggcctggctaatcaggaagtgttgttgtggatcaaatctgtaataggtgagactggtagtgacgttacaactgatcaactcaaagagtatgtgtggaagacactaaaaagtggaaaggttgttcctggctttggtcatggagttctacgtaagaccgatccacggtatacatgtcagagggagtttgctttgaagtacttgcctgaggatccacttttccaactggtctccaagttgtatgaagttgtgcctcctatcctcactgagcttggcaaggtcaaaaacccatggcctaatgttgatgctcacagcggagttctactgaaccactttggattatctgaagctcggtattacactgttcttttcggagtttcaaggagcattggaataggatctcagctcatttgggaccgtgctcttggcctgccgctcgaaagaccgaagagtgtcaccatggagtggctggagaaccactgcaagaaggttgctgcttga

SEQ ID NO: 93168 - protein, 472 aa, Oryza sativa
MAFFRGLTAVSRLRSRVAQEATTLGGVRWLQMQSASDLDLKSQLQELIPEQQDRLKKLKSEHGKVQLGNITVDMVLGGMRGMTGMLWETSLLDPDEGIRFRGLSIPECQKVLPTAVKDGEPLPEGLLWLLLTGKVPTKEQVDALSKELASRSSVPGHVYKAIDALPVTAHPMTQFTTGVMALQVESEFQKAYDKGMSKSKFWEPTYEDCLNLIARLPAVASYVYRRIFKGGKTIAADNALDYAANFSHMLGFDDPKMLELMRLYITIHTDHEGGNVSAHTGHLVGSALSDPYLSFAAALNGLAGPLHGLANQEVLLWIKSVIGETGSDVTTDQLKEYVWKTLKSGKVVPGFGHGVLRKTDPRYTCQREFALKYLPEDPLFQLVSKLYEVVPPILTELGKVKNPWPNVDAHSGVLLNHFGLSEARYYTVLFGVSRSIGIGSQLIWDRALGLPLERPKSVTMEWLENHCKKVAA

SEQ ID NO: 93169 - DNA, 1419 bp, Podospora anserina
  CDS (1)..(1419)
atggctcctgcgatgcgcctgacttcctccgccctccgggcttcgttgaaggcttcgtcctttgcgaccaagcagactgccttcactgctgcccgctgctactcctccaagacccagaccctcaaggagcgtttcgccgagctcctccccgagaagatcgaggagatcaaggctctcagaaaggagcatggctccaaggtcgttgacaaggtcactctcgaccaggtctatggcggtgcccgtggcatcaagtgcctcgtctgggagggttctgtcctcgacgccgaggagggcatccgtttccgcggcaagaccatccccgagtgccagcaggtcctccccaaggcccccggcggcagcgagccccttcccgagggtctcttctggctcctcctcaccggtgaggttcccaccgagcagcaggtccgcgacctctctgccgactgggctgcccgcgccgagatccccaagttcgttgaggagttgatcgaccgctgccccagcgacctccaccccatggctcagttctccatggccgtcactgctcttgagcagacctcttccttcgcccgtgcctacgccaagggcatcaacaagaaggaatactggggatacacctttgaggactccatggacctcatcgccaagctccccaccatcgctgcccgcatctaccagaacgtcttcaagggcggcaaggtcgctcccgtccagaaggacaaggactactccttcaacttcgccaaccagctcggcttcggcaacaacgctgacttcattgagctcatgcgtctctacctcaccatccacaccgaccacgagggtggcaacgtcagcgcccacaccactcaccttgtcggctctgctctcagctcccccttcctgtccctcgctgccggtctcaacggtcttgccggtcccctccacggcctcgccaaccaggaggtgctcaactggctcaccgagatgaagaaggtcattggtgatgatatctccgatgagagcatcaccaagtacctctgggacaccctcaactccggccgtgtcgtccccggttacggccacgccgtcctccgcaagaccgacccccgctactctgcccagcgcgagttcgcccagaagcacatgtctgaggaccccatgttcaagctcgtcagccaggtctacaagatcgcccccaaggttcttaccgagcacggcaagaccaagaacccctaccccaacgtcgatgcccactccggtgtcctcctccagtactatggtctcaccgaggctaactactacaccgtcctcttcggtgtctcccgcgccattggtgtccttccccagctcatcattgaccgcgctgtcggtgcccccattgagagacccaagtctttctccaccgagaagtggatcgagatctgcaagaagttgtaa

SEQ ID NO: 93170 - protein, 472 aa, Podospora anserina
MAPAMRLTSSALRASLKASSFATKQTAFTAARCYSSKTQTLKERFAELLPEKIEEIKALRKEHGSKVVDKVTLDQVYGGARGIKCLVWEGSVLDAEEGIRFRGKTIPECQQVLPKAPGGSEPLPEGLFWLLLTGEVPTEQQVRDLSADWAARAEIPKFVEELIDRCPSDLHPMAQFSMAVTALEQTSSFARAYAKGINKKEYWGYTFEDSMDLIAKLPTIAARIYQNVFKGGKVAPVQKDKDYSFNFANQLGFGNNADFIELMRLYLTIHTDHEGGNVSAHTTHLVGSALSSPFLSLAAGLNGLAGPLHGLANQEVLNWLTEMKKVIGDDISDESITKYLWDTLNSGRVVPGYGHAVLRKTDPRYSAQREFAQKHMSEDPMFKLVSQVYKIAPKVLTEHGKTKNPYPNVDAHSGVLLQYYGLTEANYYTVLFGVSRAIGVLPQLIIDRAVGAPIERPKSFSTEKWIEICKKL

SEQ ID NO: 93171 - DNA, 1428 bp, Saccharomyces kluyveri
  CDS (1)..(1428)
atgacttctatcttatcctcaacttacagatctcctgtggctcgcaacctactaaaaagctccaaaactagaggcggcttgtttttagctgctcgtaattatagcaacggcgagaagactctaaaagaaagatttgccgagattttcccatcgaaggccgaagaaattaaaaaactaaagaaagaacacggtaaaactgtcatcggagaagtcttgttagaacaagcttacggtggtatgcgtggtattaaaggtttagtttgggaaggctctgtcttggacccagaagagggtattagattcagaggccgtactatcccagaaatccaaaaggaattgccaaaggccgccgacggttccgaacctctaccagaagctatcttttggctactactgactggtgaaattccaactgaaacccaagtcaaggctttatcagctgatttagcctccagatctgagctaccagaacacgttgttgatctgctagacagactgccaaaggacctacacccaatggcacaattttctatcgctgtcaccgctttggaaagtgaatctaagttgcccaaggcttacgctcaaggtgttgctaagaaggactactggaactatacttttgaagactctttggatctactgggtaagttgccagttattgcttccaagatttaccgtaacgttttcaaggacggtaagttggcttccgttgatcctaacgccgactacggtaaaaacttggctaacctgctgggcttccaaaacaaggatttcgttgatctgatgagattatacttgactatccactccgatcatgaaggtggtaatgtctctgctcatactacacatttggttggctctgctttgtcgtcgccatatctctccctagctgccggtttgaacggtttagctggtccattcgacggtcgtgccaaccaagaagttttggaatggttgttcaaattgagagaggaagttaagggtgactactctaaagaaactattgaaaagtacctatgggatactttgaactctggtagagtcgttccaggctatggtcatgcagtcttgagaaagactgacccacgttacactgcccaacgtgagtttgccttaaagcatttcccagattatgagttgttcaaattggtctccaccatctacgaagtcgcaccaggtgttttgacaaagcaaggtaagactaagaacccatggccaaatgttgactctcactccggtgttctattgcaatactacggtttgacagaagcctctttctacactgttttgtttggtgttgccagagccttcggtgttctaccacaactgattatcgacagggccgttggtcaaccaatcgagagaccaaaatctttctctactgaaaagtacattgaattggtcaactctatcaaagccaagaattaa

SEQ ID NO: 93172 - protein, 475 aa, Saccharomyces kluyveri
MTSILSSTYRSPVARNLLKSSKTRGGLFLAARNYSNGEKTLKERFAEIFPSKAEEIKKLKKEHGKTVIGEVLLEQAYGGMRGIKGLVWEGSVLDPEEGIRFRGRTIPEIQKELPKAADGSEPLPEAIFWLLLTGEIPTETQVKALSADLASRSELPEHVVDLLDRLPKDLHPMAQFSIAVTALESESKLPKAYAQGVAKKDYWNYTFEDSLDLLGKLPVIASKIYRNVFKDGKLASVDPNADYGKNLANLLGFQNKDFVDLMRLYLTIHSDHEGGNVSAHTTHLVGSALSSPYLSLAAGLNGLAGPFDGRANQEVLEWLFKLREEVKGDYSKETIEKYLWDTLNSGRVVPGYGHAVLRKTDPRYTAQREFALKHFPDYELFKLVSTIYEVAPGVLTKQGKTKNPWPNVDSHSGVLLQYYGLTEASFYTVLFGVARAFGVLPQLIIDRAVGQPIERPKSFSTEKYIELVNSIKAKN

SEQ ID NO: 93173 - DNA, 1425 bp, Aspergillus niger
  CDS (1)..(1425)
atggcttccaccttgagactgggcacctctgctctccgttccacctccattgccgctaagccggttgttcagtccgctgccttcaatggcctgcgctgctactctaccggcaaggccaagtccttgaaggagactttcgctgagaagctccctgccgagatcgagaaggtcaagaagctccgcaaggagcacggcagcaaggtcatcggcgaggtcacccttgaccaggcctatggtggtgcccgtggtgtcaagtgcctcgtgtgggagggttccgtcctcgactctgaggagggtatccgtttccgtggccgtaccatccccgagtgccaggagctcctccccaaggctcccggtggtcaggagcctcttcccgagggtctcttctggctgctcttgactggcgagatccctaccgagcagcaggtccgcgatctgtctgctgagtgggctgcccgctccgacctccccaagttcattgaggagctcatcgaccgctgccccagcactctgcaccccatgtcccagttctctctggccgtcaccgctcttgagcacgagtctgctttcgccaaggcctatgccaagggtatcaacaagaaggactactggaactacaccttcgaggactccatggacctcattgccaagctgcccaccatcgctgccaagatctaccgcaacgtcttcaaggatggcaaggtcgctcctatccagaaggacaaggattactcctacaacttggccaaccagctcggctacggcgacaacaacgacttcgttgagctcatgcgtctttacctgaccatccactccgaccacgagggtggcaacgtcagtgctcacaccacccaccttgttggtagcgctctgagctcccccatgctctctctcgctgctggtctgaacggtctggctggacctctccacggattggccaaccaggaagtccttaactggctcaccaagatgaaggccgccattggcaacgacctcagcgacgaggccatcaagaactacctctggtccaccctgaacgccggccaggtcgttcccggatacggtcacgccgtccttcgtaagaccgacccccgctacgtgtctcagcgcgagttcgctcttcgcaagctgcccgatgaccccatgttcaagctggtcagccaggtctacaagatcgctcctggtgtcctgaccgagcacggcaagaccaagaacccctaccccaacgtcgatgctcactctggtgtcctcctccagtactatggcctgactgaggccaactactacaccgtcctcttcggtgtttcccgtgctctgggtgtccttccccagctgatcatcgaccgtgcccttggtgcccccattgagcgccccaagtcctacagcaccgaggccttcgccaagcttgttggtgctaagctgtaa

SEQ ID NO: 93174 - protein, 474 aa, Aspergillus niger
MASTLRLGTSALRSTSIAAKPVVQSAAFNGLRCYSTGKAKSLKETFAEKLPAEIEKVKKLRKEHGSKVIGEVTLDQAYGGARGVKCLVWEGSVLDSEEGIRFRGRTIPECQELLPKAPGGQEPLPEGLFWLLLTGEIPTEQQVRDLSAEWAARSDLPKFIEELIDRCPSTLHPMSQFSLAVTALEHESAFAKAYAKGINKKDYWNYTFEDSMDLIAKLPTIAAKIYRNVFKDGKVAPIQKDKDYSYNLANQLGYGDNNDFVELMRLYLTIHSDHEGGNVSAHTTHLVGSALSSPMLSLAAGLNGLAGPLHGLANQEVLNWLTKMKAAIGNDLSDEAIKNYLWSTLNAGQVVPGYGHAVLRKTDPRYVSQREFALRKLPDDPMFKLVSQVYKIAPGVLTEHGKTKNPYPNVDAHSGVLLQYYGLTEANYYTVLFGVSRALGVLPQLIIDRALGAPIERPKSYSTEAFAKLVGAKL

SEQ ID NO: 93175 - DNA, 1440 bp, Saccharomyces cerevisiae
  CDS (1)..(1440)
atgtcagcgatattatcaacaactagcaaaagtttcttatcaaggggctccacaagacaatgtcaaaatatgcaaaaggctctttttgcactattgaatgctcgccactatagtagcgcctccgaacaaacgttgaaggagagatttgctgaaattatcccagcaaaggcagaagaaattaaaaaattcaagaaagaacacggtaaaaccgttattggtgaagttcttttggagcaagcttatggtggtatgagaggtattaaaggccttgtttgggaaggttccgtgttagaccccgaagaaggtattagatttaggggtcgtactattccagaaattcaaagggaactaccaaaggctgagggtagtacagaacctttgccagaagctttattttggttgcttttgactggtgaaatacctactgacgctcaagttaaagccctttctgctgatttagctgccagatcagaaattccagagcacgttatccaacttttagatagcctcccaaaagatctacatccaatggcgcaattttctattgccgtgactgctttagaaagcgagtctaagtttgccaaagcatatgctcaaggtgtatccaagaaagaatattggagctatacatttgaagattcgttagatctgctgggtaaattacctgttattgcttccaaaatttatcgtaatgtgttcaaggatggtaaaattacttcaaccgatcctaatgctgactatggtaaaaatttggcccaacttttgggctacgaaaacaaggattttattgacttaatgagactatatttaactattcattctgatcatgaaggtggtaacgtttctgcccatactacacatttagtgggttctgccttatcttcgccatacttatctttggccgctggtttgaatggtttagctggcccattacatggtcgtgccaatcaagaagttttagaatggctatttaaattgagagaagaagtgaaaggtgactattcaaaagaaacaattgaaaagtacttgtgggatactttgaacgcagggagagttgttcctggttatggccatgcggttttgagaaaaactgatcctcgttatacggctcaacgtgaattcgcattgaaacatttcccagattacgagttatttaagttggtctccaccatttatgaagttgccccaggggttttaactaagcatggtaaaactaagaacccatggccaaatgttgattcacattccggtgttttattgcaatactatggtctaactgaggcttcgttctacactgtattgtttggtgttgccagagctattggtgtgttaccccaattaatcatcgatagggctgttggtgctccaatcgaaaggccaaaatcattctccaccgaaaaatacaaggagttggtaaagaaaatcgaaagtaagaactaa

SEQ ID NO: 93176 - protein, 479 aa, Saccharomyces cerevisiae
MSAILSTTSKSFLSRGSTRQCQNMQKALFALLNARHYSSASEQTLKERFAEIIPAKAEEIKKFKKEHGKTVIGEVLLEQAYGGMRGIKGLVWEGSVLDPEEGIRFRGRTIPEIQRELPKAEGSTEPLPEALFWLLLTGEIPTDAQVKALSADLAARSEIPEHVIQLLDSLPKDLHPMAQFSIAVTALESESKFAKAYAQGVSKKEYWSYTFEDSLDLLGKLPVIASKIYRNVFKDGKITSTDPNADYGKNLAQLLGYENKDFIDLMRLYLTIHSDHEGGNVSAHTTHLVGSALSSPYLSLAAGLNGLAGPLHGRANQEVLEWLFKLREEVKGDYSKETIEKYLWDTLNAGRVVPGYGHAVLRKTDPRYTAQREFALKHFPDYELFKLVSTIYEVAPGVLTKHGKTKNPWPNVDSHSGVLLQYYGLTEASFYTVLFGVARAIGVLPQLIIDRAVGAPIERPKSFSTEKYKELVKKIESKN

SEQ ID NO: 93177 - DNA, 1383 bp, Saccharomyces cerevisiae
  CDS (1)..(1383)
atgacagttccttatctaaattcaaacagaaatgttgcatcatatttacaatcaaattcaagccaagaaaagactctaaaagagagatttagcgaaatctaccccatccatgctcaagatgtaaggcaattcgttaaagagcatggcaaaactaaaattagcgatgttctattagaacaggtatatggtggtatgagaggtattccagggagcgtatgggaaggttccgttttggacccagaagacggtattcgtttcagaggtcgtacgatcgccgacattcaaaaggacctgcccaaggcaaaaggaagctcacaaccactaccagaagctctcttttggttattgctaactggcgaggttccaactcaagcgcaagttgaaaacttatcagctgatctaatgtcaagatcggaactacctagtcatgtcgttcaacttttggataatttaccaaaggacttacacccaatggctcaattctctattgctgtaactgccttggaaagcgagtcaaagtttgctaaggcttatgctcaaggaatttccaagcaggattattggagttatacttttgaagattcactagacttgctgggtaaattgccagttattgcagctaaaatttatcgtaatgtattcaaagatggcaaaatgggtgaagtggacccaaatgccgattatgctaaaaatctggtcaacttgattggttctaaggatgaagatttcgtggacttgatgagactttatttaaccattcattcggatcacgaaggtggtaatgtatctgcacatacatcccatcttgtgggctcagcactatcatcaccttatctgtcccttgcatcaggtttgaacgggttggctggcccacttcatgggcgtgctaatcaagaagtactagaatggttatttgcacttaaagaagaggtaaatgatgactactctaaagatacgatcgaaaaatatttatgggatactctaaactcagggagagtcattcccggttatggtcatgctgtgctaaggaaaactgatcctcgttatatggctcagcgtaagtttgccatggaccattttccagattatgaattattcaagttagtttcatcaatatacgaggtagcacctggcgtattgactgaacatggtaaaaccaaaaatccatggccaaatgtagatgctcactctggtgtcttattacaatattatggactaaaagaatcttctttctataccgttttatttggcgtttcaagggcatttggtattcttgctcaattgatcactgatagggccatcggtgcttccattgaaaggccaaagtcctattctactgagaaatacaaggaattggtcaaaaacattgaaagcaaactatag

SEQ ID NO: 93178 - protein, 460 aa, Saccharomyces cerevisiae
MTVPYLNSNRNVASYLQSNSSQEKTLKERFSEIYPIHAQDVRQFVKEHGKTKISDVLLEQVYGGMRGIPGSVWEGSVLDPEDGIRFRGRTIADIQKDLPKAKGSSQPLPEALFWLLLTGEVPTQAQVENLSADLMSRSELPSHVVQLLDNLPKDLHPMAQFSIAVTALESESKFAKAYAQGISKQDYWSYTFEDSLDLLGKLPVIAAKIYRNVFKDGKMGEVDPNADYAKNLVNLIGSKDEDFVDLMRLYLTIHSDHEGGNVSAHTSHLVGSALSSPYLSLASGLNGLAGPLHGRANQEVLEWLFALKEEVNDDYSKDTIEKYLWDTLNSGRVIPGYGHAVLRKTDPRYMAQRKFAMDHFPDYELFKLVSSIYEVAPGVLTEHGKTKNPWPNVDAHSGVLLQYYGLKESSFYTVLFGVSRAFGILAQLITDRAIGASIERPKSYSTEKYKELVKNIESKL

SEQ ID NO: 93179 - DNA, 1425 bp, Arabidopsis thaliana
  CDS (1)..(1425)
atggtgtttttccgcagcgtatcggcctttactaggctgaggtctcgcgtccagggccaacaatcttcactcagcaattctgtcagatggattcagatgcagagctctaccgacctggacctgaagtcgcagctgcaagagttaattccggaacagcaggaccgtctgaagaaactgaagtcagaacatgggaaggtccaactgggaaacatcactgttgatatggttattggtggaatgagagggatgactggattgctttgggaaacctcattgcttgacccggaagagggtattcgctttaggggattgtcgattcctgagtgccagaaagtattacctactgcccagtctggagctgaaccattaccggagggtcttttgtggcttctcttaactggaaaggtacctagcaaagagcaagttgaagcactgtcgaaagacttggcgaaccgtgctgctgtgccagattatgtgtacaatgccatcgatgctctgccttccacagctcatccaatgactcaatttgctagcggtgttatggccctccaggtgcaaagtgagtttcaaaaggcatatgagaatggaattcataagtcaaagttctgggagccaacatatgaggattgcctcaacctgattgctcgtgttcctgttgtagctgcatatgtttatcgaaggatgtataagaatggtgattccattccctcagataaatctttggattatggtgcaaatttttcccacatgttgggatttgatgatgaaaaggtgaaagagctcatgaggctttacatcaccatccacagtgatcatgaaggtggaaatgttagtgctcacactggtcacctggttggtagtgcactttcagacccatatctgtcatttgcagctgcattaaatggtttagctgggccactccatggtttggctaatcaggaagttttgctttggatcaaatcagtcgtagaggaatgtggagaagatatatcaaaagaacagttgaaagaatatgtttggaaaacattaaacagtggcaaggttattccgggatatggtcacggtgttctgcgcaatactgatccaagatatgtatgccaaagagaatttgccttgaagcatctacctgacgaccctcttttccagctggtgtcaaagctttatgaagttgtgcctcctgttctcactgagcttggaaaggtgaagaacccgtggccaaatgttgatgctcacagtggggtcttgctgaaccactatggtctaaccgaagcaaggtactacaccgtgctctttggtgtttcaaggagtcttggcatctgctctcagcttatatgggaccgagctcttggacttgcacttgagaggccaaagagtgttaccatggactggcttgaagcccattgtaagaaagcttcatctgcttaa

SEQ ID NO: 93180 - protein, 474 aa, Arabidopsis thaliana
MVFFRSVSAFTRLRSRVQGQQSSLSNSVRWIQMQSSTDLDLKSQLQELIPEQQDRLKKLKSEHGKVQLGNITVDMVIGGMRGMTGLLWETSLLDPEEGIRFRGLSIPECQKVLPTAQSGAEPLPEGLLWLLLTGKVPSKEQVEALSKDLANRAAVPDYVYNAIDALPSTAHPMTQFASGVMALQVQSEFQKAYENGIHKSKFWEPTYEDCLNLIARVPVVAAYVYRRMYKNGDSIPSDKSLDYGANFSHMLGFDDEKVKELMRLYITIHSDHEGGNVSAHTGHLVGSALSDPYLSFAAALNGLAGPLHGLANQEVLLWIKSVVEECGEDISKEQLKEYVWKTLNSGKVIPGYGHGVLRNTDPRYVCQREFALKHLPDDPLFQLVSKLYEVVPPVLTELGKVKNPWPNVDAHSGVLLNHYGLTEARYYTVLFGVSRSLGICSQLIWDRALGLALERPKSVTMDWLEAHCKKASSA

SEQ ID NO: 93181 - DNA, 1302 bp, Arabidopsis thaliana
  CDS (1)..(1302)
atggtaatgcaggacttgaagtcgcagatgcaagagatcattccagaacaacaggaccgtttgaagaaactgaaatcagaacaaggaaaggttccagtggggaacatcaccgttgatatggtacttggtggaatgagagggatgactggattactctgggaaacctcattgcttgatgcagatgagggaatacggtttagaggcatgtcgattcctgaatgtcagaaaatattaccttcagctgagtctggagaagagcccttgcctgagagtcttctgtggcttctattaactggaaaggtgccaactaaagagcaagctaatgctttgtcaacagagttggctcatcgtgcggctgtgccagctatagatgctttgccttcaacagctcatccaatgactcaatttgctagtggtgttatggcccttcaggttcaaagtgagtttcaaaaggcgtatgagcagggtgatatttctaagtcaaagtactgggaaccaaccttcgaagatgccctaaacttgattgctcgtgttcctgttgtagcttcatacgtttatcggaggatgtacaaggatggtagcatcattccattagatgattctttggattatggtgcaaatttttcacacatgctgggatttgatagtcctcagatgaaagagctcatgaggctttatgtcactatccacagtgatcatgaaggtggaaatgttagtgctcacgctggtcacctggttgggagtgcactttcagatccatatctttcatttgctgctgcattgaatggtttagctgggccactccatggtttggctaatcaggaagttttgctgtggatcaaattagttgttgaggaatgtggagaaagtatatcaaaggaacagctaaaagattatgtctggaaaacgttaaacagtggcaaggttgttccaggatatggccatggtgttttgcgtaaaacggatccaagatatatatgccaaagagagtttgccttgaagcatctacctgatgatcctctttttcagctggtctcaaaactttatgaagtggtgcctcctattctaaccgagctgggaaaggtcaagaacccgtggcctaacgttgatgctcatagcggagtgcttctgaactactatggtctaaccgaagcaagatactacacggtgctttttggcgtctcaagaagtcttggaatctgctcgcagctgatatgggacagggcacttggactgccacttgagagaccaaagagtgtaaacatggactggctcgataacttcacgcgcttgaaccgctaa

SEQ ID NO: 93182 - protein, 433 aa, Arabidopsis thaliana
MVMQDLKSQMQEIIPEQQDRLKKLKSEQGKVPVGNITVDMVLGGMRGMTGLLWETSLLDADEGIRFRGMSIPECQKILPSAESGEEPLPESLLWLLLTGKVPTKEQANALSTELAHRAAVPAIDALPSTAHPMTQFASGVMALQVQSEFQKAYEQGDISKSKYWEPTFEDALNLIARVPVVASYVYRRMYKDGSIIPLDDSLDYGANFSHMLGFDSPQMKELMRLYVTIHSDHEGGNVSAHAGHLVGSALSDPYLSFAAALNGLAGPLHGLANQEVLLWIKLVVEECGESISKEQLKDYVWKTLNSGKVVPGYGHGVLRKTDPRYICQREFALKHLPDDPLFQLVSKLYEVVPPILTELGKVKNPWPNVDAHSGVLLNYYGLTEARYYTVLFGVSRSLGICSQLIWDRALGLPLERPKSVNMDWLDNFTRLNR

SEQ ID NO: 93183 - DNA, 1710 bp, Aspergillus niger
  CDS (66)..(1493)
ctctttctctcctctctttctttccttccaaccactcaacttactgcaagttgttcacattcgccatggcttccaccttgagactgggcacctctgctctccgttcctcctccattgccgctaagccggttgttcagtctgctgccttcaatggcctgcgctgctactctaccggcaaggccaagtccttgaaggagactttcgctgagaagctccctgccgagctcgagaaggtcaagaagctccgcaaggagcacggcagcaaggtcatcggcgaggtcactcttgaccaggcctatggtggtgcccgtggtgttaagtgcctcgtgtgggagggttccgtcctcgactctgaggagggtatccgtttccgtggccgtaccatccccgagtgccaggagctcctccccaaggctcccggtggtcaggagcctcttcctgagggtctcttctggctcctcttgactggcgagatccctactgagcagcaggtccgcgacctgtctgctgagtgggctgcccgctccgacctccccaagttcattgaggagctcatcgaccgctgccccagcaccctccaccccatgtcccagttctctctggccgtcaccgctcttgagcacgagtctgccttcgccaaggcctatgccaagggtatcaacaagaaggactactggaactacaccttcgaggactccatggacctcattgccaagctgcccaccatcgctgccaagatctaccgcaacgtcttcaaggatggcaaggtcgctcctatccagaaggacaaggattactcctacaacttggccaaccagctcggctacggcgacaacaacgacttcgttgagctcatgcgtctttacctgaccatccactccgaccacgagggtggcaacgtcagtgctcacaccacccaccttgttggtagcgctctgagctcccccatgctctctctcgccgctggtctgaacggtctggctggtcctctccacggattggccaaccaggaagtccttaactggctcaccaagatgaaggccgccattggcaacgacctcagcgacgaggccatcaagaactacctctggtccaccctgaacgccggccaggtcgttcccggatacggtcacgccgtccttcgtaagaccgacccccgctacgtgtctcagcgcgagtttgctcttcgcaagctgcccgatgaccccatgttcaagctggtcagccaggtctacaagatcgctcctggtgtcctgaccgagcacggcaagaccaagaacccctaccccaacgtcgatgctcactctggtgtcctccttcagtactacggcctgactgaggccaactactacaccgtcctcttcggtgtttcccgtgctctgggtgtccttccccagctgatcatcgaccgtgcccttggtgcccccattgagcgccccaagtcctacagcactgagctttcgccaagcttgttggtgctaagctgtaaatgagtttgggatgacacgaaaaaccggaggtgattcttatttctttttacgataaacacagcatcttgtattatgcctaccctgttctggtttagtatttttgtgactggggacgatttttaaagtgttggggtttgttcgattaatgtatgataggacacggttcgagcgggccttgtaacaaacagcacttgagaaattccaagtcaatcgtcttctg

SEQ ID NO: 93184 - protein, 475 aa, Aspergillus niger
MASTLRLGTSALRSSSIAAKPVVQSAAFNGLRCYSTGKAKSLKETFAEKLPAELEKVKKLRKEHGSKVIGEVTLDQAYGGARGVKCLVWEGSVLDSEEGIRFRGRTIPECQELLPKAPGGQEPLPEGLFWLLLTGEIPTEQQVRDLSAEWAARSDLPKFIEELIDRCPSTLHPMSQFSLAVTALEHESAFAKAYAKGINKKDYWNYTFEDSMDLIAKLPTIAAKIYRNVFKDGKVAPIQKDKDYSYNLANQLGYGDNNDFVELMRLYLTIHSDHEGGNVSAHTTHLVGSALSSPMLSLAAGLNGLAGPLHGLANQEVLNWLTKMKAAIGNDLSDEAIKNYLWSTLNAGQVVPGYGHAVLRKTDPRYVSQREFALRKLPDDPMFKLVSQVYKIAPGVLTEHGKTKNPYPNVDAHSGVLLQYYGLTEANYYTVLFGVSRALGVLPQLIIDRALGAPIERPKSYSTELSPSLLVLSCK

SEQ ID NO: 93185 - DNA, 1404 bp, Candida tropicalis
  CDS (1)..(1404): transl_table=12
atgtctgcattaagatcattccaacgctcttctaacgttgctaagtccaccttaaagaactcagtcagaacctatgccactgctgaaccaaccttgaaacaaagattggaagaaatcttgccagccaaggctgaagaagtcaagcaattgaagaaagactacggtaaaaccgtcattggcgaagtcttgttggaacaagcctatggtggtatgagaggtatcaagggtttggtctgggaaggttccgtcttggacccaatcgaaggtatccgtttcagaggcagaactattccagacatccaaaaggaattgccaaaggccccaggtggtgaagaaccattgccagaagctcttttctggttgttgttgactggcgaagtcccaaccgaagctcagaccagagctctctctgaagaatttgctgctagatcagccttgccaaagcacgttgaagaactcattgacagatctccatcccacttgcacccaatggctcaattctccatcgccgtcactgctttggaatccgaatcccaattcgccaaggcttacgctaagggtgtccacaagtccgaatactggaagtacacttacgaggactccattgaattgttggccaaattgccaaccattgctgctaagatttacagaaacgtcttccacgacggtaagttgccagctcaaatcgactccaagttggattacggtgctaacttggcctctttgttgggtttcggcgaaaacaaggaattccttgaattgatgagattgtaccttaccatccactctgaccacgaaggtggtaacgtctccgcccacaccacccacttggttggttccgctttgtcctccccattcttgtccttggctgctggtttgaatggtttggctggtccattgcacggtagagctaaccaagaagtcttggaatggttgttcaagttgagagaagaattgaacggtgactactccaaggaagccattgaaaagtacttgtgggataccttgaacgccggtagagtcggcccaggttacggtcacgctgtcttgagaaagactgatccaagatacactgcccaaagagaattcgctctcaaacacatgccagactacgaattgttcaagttggtttctaacatttacgaagttgctccaggtgtctttgaccagcacggtatgaccaagaacccatggccaaatgtgggctcccactctggtgtcttgttgcaatactacggcttgactgaagaatccttctacactgtcttgtttggtgtctccagagccttcggtgtcttgccacaattgatcttggaccgtggcttgggtatgccaatcgaaagaccaaagtctttctccactgaaaagtacattgaattggtcaaaagcattggtaagaactaa

SEQ ID NO: 93186 - protein, 467 aa, Candida tropicalis
MSALRSFQRSSNVAKSTLKNSVRTYATAEPTLKQRLEEILPAKAEEVKQLKKDYGKTVIGEVLLEQAYGGMRGIKGLVWEGSVLDPIEGIRFRGRTIPDIQKELPKAPGGEEPLPEALFWLLLTGEVPTEAQTRALSEEFAARSALPKHVEELIDRSPSHLHPMAQFSIAVTALESESQFAKAYAKGVHKSEYWKYTYEDSIELLAKLPTIAAKIYRNVFHDGKLPAQIDSKLDYGANLASLLGFGENKEFLELMRLYLTIHSDHEGGNVSAHTTHLVGSALSSPFLSLAAGLNGLAGPLHGRANQEVLEWLFKLREELNGDYSKEAIEKYLWDTLNAGRVGPGYGHAVLRKTDPRYTAQREFALKHMPDYELFKLVSNIYEVAPGVFDQHGMTKNPWPNVGSHSGVLLQYYGLTEESFYTVLFGVSRAFGVLPQLILDRGLGMPIERPKSFSTEKYIELVKSIGKN

SEQ ID NO: 93187 - DNA, 1733 bp, Citrus maxima
  CDS (57)..(1472)
aataggaggactactctgtcccctcgctggtgactgctcgaagtctgaactgaaccatggcgtccctcaggagcgccactgcgctctctcgcctccgctctcgcgctgggcaacagtctaatctcagtaattcagtgagatggcttcaaatgcaaagctctgctgatcttgaccttcattctcagctcaaggaaatgattccagaacaacaggagcgcctgaagaaagtgaagtcagaccttggaaaagcccagctgggaaatattaccattgacgtggtaattggcgggatgagaggaatgactggcttactttgggaaacctcattacttgaccctgatgagggaattcgctttcggggtctgtctattcctgagtgccagaagttgttacctgccgctaagccagatggagaacctttgcctgagggtcttctttggcttcttttaactggaaaggtaccgagcaaagagcaggtcgatggcttgtccaaggaattgagagatcgtgccactgtcccagattatgtgtacaaggccattgatgctctacctgtatcggcacatccgatgactcagtttgctagtggggtcatggctctgcaggtgcaaagtgaatttcaggaggcttatgagaagggaattcataaatcaaagtcatgggaaccaacatctgaggattctcttaatttgattgctcgtgtgccggtagtagctgcatacgtttatcaaaggatatacaaggatggaaagattattcccaaggatgactcactggattatggtgggaacttctcgcacatgttgggattcgatgatcctaagatgctagagcttatgaggctttatgttaccattcacagtgaccacgaaggtggaaatgtcagtgctcacaccggccatctagttgcaagtgcactttcagatccttatctttctttcttggccgcattaaatggtttagctggaccactccatggtttggctaatcaggaagttttgctttggatcaaatctgtggtggatgagtgtggtgagaacgtaacaacggagcagttgaaagattatgtctggaaaacattgaatagtggcaaggttgtccctggatttggtcatggtgttttgcgtaaaactgatccgagatacacttgtcagagggagtttgccttgaagcatttgcctgatgatccattgttccagctggtttctaagctgtatgaagtggtgcccccaatattaacaaaactaggcaaggttaaaaacccctggccaaatgttgatgctcacagtggggtgctgctgaaccattttggtttggctgaggcaagatattatactgttctttttggagtatcaaggagtcttgggatctgctctcagttgatatgggaccgagctcttgggctgccacttgagaggccaaaaagtgtaactttagattggattgagaaaaattgcaagaaagcagcttagaattggaaagggtgggtgggtgtataaattttttcttcggtaataattgctgaagaagcaaggggattagtgatggatggagatttgtgtagaattgcgaggccatttgattgctgcaggcattttaactttcttatctttatgattttcttattcagcaatttgatttaacacagattttggatgtttttgtttttgaatacatatgatttagaaccatattgagtcagtcagctgaataaaagtaatgattggttacca

SEQ ID NO: 93188 - protein, 471 aa, Citrus maxima
MASLRSATALSRLRSRAGQQSNLSNSVRWLQMQSSADLDLHSQLKEMIPEQQERLKKVKSDLGKAQLGNITIDVVIGGMRGMTGLLWETSLLDPDEGIRFRGLSIPECQKLLPAAKPDGEPLPEGLLWLLLTGKVPSKEQVDGLSKELRDRATVPDYVYKAIDALPVSAHPMTQFASGVMALQVQSEFQEAYEKGIHKSKSWEPTSEDSLNLIARVPVVAAYVYQRIYKDGKIIPKDDSLDYGGNFSHMLGFDDPKMLELMRLYVTIHSDHEGGNVSAHTGHLVASALSDPYLSFLAALNGLAGPLHGLANQEVLLWIKSVVDECGENVTTEQLKDYVWKTLNSGKVVPGFGHGVLRKTDPRYTCQREFALKHLPDDPLFQLVSKLYEVVPPILTKLGKVKNPWPNVDAHSGVLLNHFGLAEARYYTVLFGVSRSLGICSQLIWDRALGLPLERPKSVTLDWIEKNCKKAA

SEQ ID NO: 93189 - DNA, 1859 bp, Daucus carota
  CDS (157)..(1575)
acatatattaaccacctcataccagtctctctctctctccatttttcacgtttctctcccaccgtctcgcaaatcacactgcgatttatatcactacatacatattttatatctctctcgcatcttattcgtcgaattaggttttcggtttgagaaatggtgttctttcggagtgtttcgctgcttaacaagctgcggtctcgggctgttcagcagtcgaacctcagtaatacagtgcgttggtttcaagtgcagacctccgcttctgatctcgatcttcgttctcaacttaaggagctgattccagaacagcaggagcggattaaaaaacttaaagcagaacatggaaaggttcagctgggaaacataactgttgatatggtacttggcggtatgagagggatgacaggacttctatgggaaacctctttacttgacccagaagagggaattcgctttagggggttgtccatacctgaatgtcagaagctattaccaggagcgaagcccggtggagaaccattgcctgagggtctgctctggcttcttttaactggaaaggtaccaactaaagagcaagtagatgcattgtccgcagagttgcgaagtcgtgctgctgtaccagagcatgtatacaaaaccatcgatgcgttacctgttacagctcatccaatgactcaatttgcaactggtgtcatggccctccaggttcaaagtgaatttcagaaggcatacgagaaagggattcacaaaacaaagtattgggagccaacatatgaggactctattactttaattgctcaattaccagttgtagcagcttatatctatcgcaggatgtacaagaatggacaaagtatatccacggatgattctctagattatggtgcaaactttgcccacatgcttggttacgatagtcccagcatgcaagagcttatgaggctttacgttactatccatactgaccatgaaggtggaaacgttagtgctcatactggtcatctagttgcaagtgccctttcagacccatatctttcttttgcagctgcattaaatggtttagcagggcctcttcatggtttggcaaatcaggaagttttgttatggatcaagtctgtggtttccgaatgcggagaaaatgtaactaaggaacaattgaaagattatatctggaaaacattaaacagcgggaaggttgttcctggatatggacatggtgttctgcgtaacacagatccaagatacatatgtcagagagagtttgctttaaagcatttacctgatgatccactctttcaattggtttcaaacctctttgaagtggtgcctcctattcttacagaacttggcaaggtaaagaacccctggccaaatgttgatgcccatagtggggtactgctgaatcattatggcctaacagaagccagatattatactgttctctttggagtatcgagggccattggtatttgttctcagctggtatgggacagagctcttggattaccacttgagaggccaaaaagtgttacaatggaatggcttgaaaaccactgcaagaaatcttcttaagtttgaaagttacacgatgtgtacgtcatttttctataataattgctcttgtagcgtttcttcctttgataggaaatactgttgccaacaattgaaaggtgaaaagaagaggtccagaaatttttagaaaactatgcaagcaggttttttaagttgcttagaagggttgattacattagatgtttttgcctttttgtggatgaattctaatgttgtggacagctcaacttggggacatgcatagtttgaggtatcttattcaaataaatacattcaatttaact

SEQ ID NO: 93190 - protein, 472 aa, Daucus carota
MVFFRSVSLLNKLRSRAVQQSNLSNTVRWFQVQTSASDLDLRSQLKELIPEQQERIKKLKAEHGKVQLGNITVDMVLGGMRGMTGLLWETSLLDPEEGIRFRGLSIPECQKLLPGAKPGGEPLPEGLLWLLLTGKVPTKEQVDALSAELRSRAAVPEHVYKTIDALPVTAHPMTQFATGVMALQVQSEFQKAYEKGIHKTKYWEPTYEDSITLIAQLPVVAAYIYRRMYKNGQSISTDDSLDYGANFAHMLGYDSPSMQELMRLYVTIHTDHEGGNVSAHTGHLVASALSDPYLSFAAALNGLAGPLHGLANQEVLLWIKSVVSECGENVTKEQLKDYIWKTLNSGKVVPGYGHGVLRNTDPRYICQREFALKHLPDDPLFQLVSNLFEVVPPILTELGKVKNPWPNVDAHSGVLLNHYGLTEARYYTVLFGVSRAIGICSQLVWDRALGLPLERPKSVTMEWLENHCKKSS

SEQ ID NO: 93191 - DNA, 1395 bp, Drosophila melanogaster
  CDS (1)..(1395)
atgtcgctctatcgcatttccgcacggaaattgtccgaggcacagaaactgccaaatgtgggagcctatgttcgcatgatcgccgccgatggcaagagcctgcgcgacgtgctggccgccaaggtgccccaggagcaggagcgcgtaaagaacttccgcaagcagcatggcgccaccaagatgggcgagacgaccatcgacatgatgtacggcggcatgcgcggcatcaaggccctggtcaccgagacctcggtgctggatgctgacgagggtatccgcttccgcggcctctccattcccgagtgccaaaaggttctgccagccgccgatggcggcactgagcccctgcccgagggtctcttctggctgctgttgaccggcgaggtgcccaccaagtcccaggtgcagcagctgtcccgcgaatgggccgagcgcgccgccctgccccagcacgtggtcaccatgttgaacaacatgcccaccaccctgcacccgatgtcgcagtttgctgccgccgtcactgcgctgaatcacgacagcaaattcgccaaggcatactcggatggtgtgcacaagagcaagtactgggagtacgtctacgaggacagcatggacctgatcgccaagctcccagtggtggcggccaccatctactgcaacacctatcgcggcggcaagggctcccgttcgattgactccagcctggattggtcggcgaactttgtgaagatgctcggctacgacaacgcccccttcaccgagctgatgcgtctctatctgaccatccacagtgaccacgagggtggcaacgtgtctgcccacaccgttcacttggtgggctccgccctcagcgatccctacctctcctttgccgccggcctgaacggtctggctggtcccctgcacggcctggccaaccaggaggtgctcgtgtggctgcgcaagctgcagaaggaggccggcaacaacccgtcggaggagcagctcaaggagtacatctggaagaccctcaagtccggacaggtggttcccggctacggacacgccgtgctccgcaagaccgatccccgctacacctgccagcgtgagttcgcgctgaagcacctgcccgaggacgagacgttccagctggtgtcgaagatctacaaggtggtgccaccaattctgaccgagaccggcaaggtgaagaacccctggcccaatgtagatgcccattccggtgtgctgctgcagtactacggcatgaaggagatgaactactacaccgtgttgttcggcgtttcccgtgccctcggcgtgctggcctccctcgtctgggatcgcgccctcggcctgcccatcgagcgccccaagtcattctccaccgatctgctggtcaaaatggtccagaagtaa

SEQ ID NO: 93192 - protein, 464 aa, Drosophila melanogaster
MSLYRISARKLSEAQKLPNVGAYVRMIAADGKSLRDVLAAKVPQEQERVKNFRKQHGATKMGETTIDMMYGGMRGIKALVTETSVLDADEGIRFRGLSIPECQKVLPAADGGTEPLPEGLFWLLLTGEVPTKSQVQQLSREWAERAALPQHVVTMLNNMPTTLHPMSQFAAAVTALNHDSKFAKAYSDGVHKSKYWEYVYEDSMDLIAKLPVVAATIYCNTYRGGKGSRSIDSSLDWSANFVKMLGYDNAPFTELMRLYLTIHSDHEGGNVSAHTVHLVGSALSDPYLSFAAGLNGLAGPLHGLANQEVLVWLRKLQKEAGNNPSEEQLKEYIWKTLKSGQVVPGYGHAVLRKTDPRYTCQREFALKHLPEDETFQLVSKIYKVVPPILTETGKVKNPWPNVDAHSGVLLQYYGMKEMNYYTVLFGVSRALGVLASLVWDRALGLPIERPKSFSTDLLVKMVQK

SEQ ID NO: 93193 - DNA, 1398 bp, Glossina morsitans morsitans
  CDS (1)..(1398)
atgtcgatttatcgtatttctactacacgtaaaatgcccgaagttcagaaactgaacgctttgttggcttcttacgttcgttttatatcagctgattccagtttgcgtgacgttttagctgcgaagattccagctgaacaggagagagtgaagaatttccgtaaacaacatgggtcgtttaaaatgggtgaaaccactgtcgatatgatgtacggcggtatgcgtggtattaaagctctggttacagaaacttcagttttagatgcagacgaaggtattcgttttcgtggtctatccatacccgaatgtcaaaaagtgttaccggctgctgacggcggtgaggagcctctgcccgaaggtctcttttggttattgttgactggtgaagtccccagcaaagctcaagtaaaacaggtttcacgcgagtgggctgcacgcgctgctttgccacaacatgtagtgaccatgttgaacaattttcccactagcttgcatcccatgtcacaattttcggctgccattactgccctgaatcatgacagcaaatttgccaaagcctactcagacggtgttcataaatcaaaatattgggaacatgtctacgaagatagcatggatttgattgccaaactgccagttgtagctgccaccatctactgtaacacatatcgtaatggaaaaggttcgaagtcaatcgattcgagtttagattggtctgctaattttgttaagatgttgggttacgatgatcccaagtttaccgaattaatgcgtctgtatttgactatacacagtgatcatgaaggtggcaatgtgtcagctcacacagtgcatttggtgggttctgctttgagcgatccctatttatcattcgccgctggtatgaacggattggccggtcctttgcatggcttggccaatcaggaagtactggtctggttgcgtaagttacaaaaagaagctggtagcaacccaagtgaagagcaactgaaggaatatatctggaagaccctgaaatccggtcaagtagtgcctggttatggtcatgctgtactgcgcaagaccgatcctcgctacacctgtcaacgcgaattcgctctcaaacatttacctaatgatgaacttttccagttggtatccaaaatctataaagttgttccacccattcttcaggaaactggaaaagttaagaacccgtggcctaatgtggatgctcactctggtgttttattgcagtactatggcatgaaggagatgaactactatacggtgttgttcggtgtatcgcgcgctctcggcgtattggcttcgcttgtctgggatcgtgctttaggtctacccatcgagcgtccaaaatcgttatcaacagatttacttatgaaaatggttcaaaagtaa

SEQ ID NO: 93194 - protein, 465 aa, Glossina morsitans morsitans
MSIYRISTTRKMPEVQKLNALLASYVRFISADSSLRDVLAAKIPAEQERVKNFRKQHGSFKMGETTVDMMYGGMRGIKALVTETSVLDADEGIRFRGLSIPECQKVLPAADGGEEPLPEGLFWLLLTGEVPSKAQVKQVSREWAARAALPQHVVTMLNNFPTSLHPMSQFSAAITALNHDSKFAKAYSDGVHKSKYWEHVYEDSMDLIAKLPVVAATIYCNTYRNGKGSKSIDSSLDWSANFVKMLGYDDPKFTELMRLYLTIHSDHEGGNVSAHTVHLVGSALSDPYLSFAAGMNGLAGPLHGLANQEVLVWLRKLQKEAGSNPSEEQLKEYIWKTLKSGQVVPGYGHAVLRKTDPRYTCQREFALKHLPNDELFQLVSKIYKVVPPILQETGKVKNPWPNVDAHSGVLLQYYGMKEMNYYTVLFGVSRALGVLASLVWDRALGLPIERPKSLSTDLLMKMVQK

SEQ ID NO: 93195 - DNA, 1410 bp, Neurospora crassa
  CDS (1)..(1410)
atggctcccgttatgcgcctgggctccgccgccctgaggtcctccatccacctcacttctcgccagactgccttcactgccgccagatgctactcttccaagactcagactctcaaggagcgcttcgctgagctcctccccgagaacatcgagaagatcaaggccctccgcaaggagcacggttccaaggtcgtcgacaaggtcactctcgaccaggtctatggcggtgcccgtggcatcaagtgccttgtctgggagggttccgtcctcgacgccgaggagggtatccgtttccgcggcaagaccatccccgagtgccaggaactgcttcccaaggctcccggcggcaaggagcccctgcccgagggtctcttctggcttctcctgaccggtgaggtcccctccgagcagcaggtccgcgacctttctgccgagtgggctgcccgctccgatgtccccaagttcattgaggagctcatcgaccgctgcccctctgacctccaccccatggctcagctctccctcgctgtcaccgctctcgagcacacctcttccttcgcccgtgcctacgccaagggtatcaacaagaaggagtactggggctacacctttgaggactccatggacctcattgccaagctccccaccattgctgcccgcatctaccagaacgtcttcaagggcggcaaggtcgctgctgtccagaaggacaaggactactccttcaacttcgccaaccagctcggcttcggcgacaacaaggacttcgttgagctcctccgtctctacctcaccatccacaccgatcacgagggtggcaacgtctctgcccacaccactcaccttgtcggctctgctctcagctctcccttcctctccgtcgctgccggtctgaacggtctcgccggtcccctccacggtcttgccaaccaggaggtccttaactggctcaccgagatgaagaaggtcatcggtgacgatctctccgatgaggccatcaccaagtacctctgggacacccttaacgccggtcgcgttgtccccggttacggccacgccgtcctccgcaagaccgacccccgctactctgcccagcgcaagttcgcccaggagcacctccccgaggaccccatgttccagctcgtcagccaggtctacaagatcgcccccaaggtcctcaccgagcacggcaagaccaagaacccctaccccaacgtcgatgcccactctggtgtccttctccagcactatggtcttactgaggccaactactacactgttctcttcggtgtttcccgcgccattggtgtccttcctcagctgattatcgaccgcgccgtcggtgcccccattgagaggcccaagtcttactccactgacaagtggatcgagatctgcaagaagctttaa

SEQ ID NO: 93196 - protein, 469 aa, Neurospora crassa
MAPVMRLGSAALRSSIHLTSRQTAFTAARCYSSKTQTLKERFAELLPENIEKIKALRKEHGSKVVDKVTLDQVYGGARGIKCLVWEGSVLDAEEGIRFRGKTIPECQELLPKAPGGKEPLPEGLFWLLLTGEVPSEQQVRDLSAEWAARSDVPKFIEELIDRCPSDLHPMAQLSLAVTALEHTSSFARAYAKGINKKEYWGYTFEDSMDLIAKLPTIAARIYQNVFKGGKVAAVQKDKDYSFNFANQLGFGDNKDFVELLRLYLTIHTDHEGGNVSAHTTHLVGSALSSPFLSVAAGLNGLAGPLHGLANQEVLNWLTEMKKVIGDDLSDEAITKYLWDTLNAGRVVPGYGHAVLRKTDPRYSAQRKFAQEHLPEDPMFQLVSQVYKIAPKVLTEHGKTKNPYPNVDAHSGVLLQHYGLTEANYYTVLFGVSRAIGVLPQLIIDRAVGAPIERPKSYSTDKWIEICKKL

SEQ ID NO: 93197 - DNA, 1422 bp, Schizosaccharomyces pombe
  CDS (1)..(1422)
atgacaaacacaagattagctagtactcgacgacttgcttcgtcgttactttctcaagcgtcgcttcgttcccgtcaattaaacccccttttcacatcttcttactcaactcgttcctcttccttaaaggatcggttagctgagcttattcctgaaaaacaagcagaaatcaaaaaatttcgcgcagaacatggccaagatgtcattggtgaggtaactatcaatcaaatgtatggtggtgctcgtggggttcgttctttaatatgggaaggctctgttttagaccctaacgagggtatccgattccgtggttatactatcccggaatgccaaaaattacttccttcttctcccaacggaaaacagcctcttcctgaatctttgttctggcttttagttaccggggaaattcctactctgagtcaagtgcaggcgctttccgctgactgggccgcccgttctcagttacccaaatttgttgaagaactcattgaccgttgccctcctacccttcatccaatggcccaattctctctcgctgttactgcacttgagcacgattctgcatttgctaaagcatatgagcgtggaatgaacaagcatgattattggaagtatgaatatgaagactgcatggatttgattgccaagaccgttccaattgccggtcgtatctaccgcaatttgtaccgtgatggtgttgttgctcctattcaaatggataaggaccattcgtacaattttgctaatgttctgggctttgctaacaatgaggaatttgtggagcttatgcgtctttatttgaccatccatgctgaccacgaaggtggtaatgtatctgctcacaccggtcatttggtaggttctgctctttcttcaccctttttgtcgatggctgcctccttaaatggacttgctggtccccttcatggtcttgccaaccaagaagttttgaactttttgattacaatgaagaaagaaatcggtgatgatttatctgaagaaacaatcaagtcttatctctggaagcttttgaattctggtcgtgttgttcctggttatggtcatgccgtacttcgtaagacagatcctcgctatacggctcagcgtgaatttgcacttgagcatcttcctaaagatcccatgtttcaacttgtaagccgtctgtatgaaatagttccaggtgttcttacagagcatggaaaaaccaaaaatccatatcccaacgttgactcacattctggtgttcttttgcaatattatggcttgaaagaacaaagcttctacaccgttttgttcggtgtttctcgaacactcggtgttgcctctcaactcatctgggatcgagctttgggactacctattgagcgtcctaagtctttctctactgaagcattaaagaagatggttgaaacgaaatga

SEQ ID NO: 93198 - protein, 473 aa, Schizosaccharomyces pombe
MTNTRLASTRRLASSLLSQASLRSRQLNPLFTSSYSTRSSSLKDRLAELIPEKQAEIKKFRAEHGQDVIGEVTINQMYGGARGVRSLIWEGSVLDPNEGIRFRGYTIPECQKLLPSSPNGKQPLPESLFWLLVTGEIPTLSQVQALSADWAARSQLPKFVEELIDRCPPTLHPMAQFSLAVTALEHDSAFAKAYERGMNKHDYWKYEYEDCMDLIAKTVPIAGRIYRNLYRDGVVAPIQMDKDHSYNFANVLGFANNEEFVELMRLYLTIHADHEGGNVSAHTGHLVGSALSSPFLSMAASLNGLAGPLHGLANQEVLNFLITMKKEIGDDLSEETIKSYLWKLLNSGRVVPGYGHAVLRKTDPRYTAQREFALEHLPKDPMFQLVSRLYEIVPGVLTEHGKTKNPYPNVDSHSGVLLQYYGLKEQSFYTVLFGVSRTLGVASQLIWDRALGLPIERPKSFSTEALKKMVETK

SEQ ID NO: 93199 - DNA, 1891 bp, Solanum tuberosum
  CDS (73)..(1488)
tttttcgttccatcagcctacttgagatgtattcccactggtaaaagttaatttttttgattttcgcgagcaatggtgttctaccgtagcgtttcgttgctgtcaaagctccgctctcgagcggtccaacagtcaaatgttagcaattctgtgcgctggcttcaagtccaaacctcttccggtcttgatctgcgttctgagctggtacaagaattgattcctgaacaacaggatcgcctgaaaaagatcaagtcagatatgaaaggttcaattgggaacatcacagttgatatggttcttggtggaatgagaggaatgacaggattactgtggaaacctcattaccttgaccctgatgagggaattcgcttccgggggttgtctatacctgaatgccaaaaggtattacctgcagcaaagcctgggggtgagcccttgcctgaaggtcttctctggcttcttttaacaggaaaggtgccatcaaaagagcaagtgaattcaattgtctcaggaattgcagagtcgggcatcatatccctgatcatcatgtatacaactattgatgccttaccagtcacagctcatccaatgacccagtttgctactggagtcatggctcttcaggttcaaagtgaatttcaaaaggcatacgagaaagggattcacaaatcaaagtattgggaaccaacatatgaggattccatgaatctgattgctcaagttccacttgttgctgcttatgtttatcgcaggatgtacaagaatggtgacactatacctaaggatgaatccctggattatggtgcaaattttgctcacatgcttggtttcagtagctctgaaatgcatgaacttcttatgaggctctatgtaacaatacacagtgatcatgaaggtggtaatgtcagtgctcacaccggtcacttggttgctagtgctttgtctgatccttacctctcctttgctgctgctttgaatggtttagccggaccacttcatggtttagccaatcaggaagttttgctatggataaaatctgttgtagaagaatgtggggagaacatttccaaagagcagttgaaagactatgtttggaaaacattgaacagtggcaaggttgtccctggttttggacatggagttctgcgaaagactgtaccaagatatacatgccagagagagttcgctatgaagcatttgcctgaagatccactgtttcaactggtttcaaaactctacgaagttttcctcctgttcttacagaacttggcaaagttaaaaccttggccaaatgttgatgcccacagtggtgtgttgttgaactattatggtttaactgaagcaagatattatacggtcctctttggcgtatcaagagctcttggcatttgctctcagctaatttgggaccgagctcttggattgccgctagagaggccaaagagtgtcacaatggagtggcttgagaaccagtgcaagaaagcatgaattgtttgaaatctcgcgagcataaaacacaatgtataatctctatgaataattgcttgacaaagcactcctttcttgggggacaagataggtcggcccttcaatgggttaacgaacttcagttcaaacttcactgaatttgtgtgaattgtatggtttctcgagacttgtcctgaattttgaacttagtctagtggattcatttttcttcattccgaattcctcacacgctgatccagcatgtaaaaattaataggtcaatgctattaatcgcgttcttggttgccattagacttgtgaatgacttcctttgctggaaagttagtaatcggctgattcacgcaataaactgcaattgtgtagtttcttaaatttgctaattcttatttgatgatattatgaa

SEQ ID NO: 93200 - protein, 471 aa, Solanum tuberosum
MVFYRSVSLLSKLRSRAVQQSNVSNSVRWLQVQTSSGLDLRSELVQELIPEQQDRLKKIKSDMKGSIGNITVDMVLGGMRGMTGLLWKPHYLDPDEGIRFRGLSIPECQKVLPAAKPGGEPLPEGLLWLLLTGKVPSKEQVNSIVSGIAESGIISLIIMYTTIDALPVTAHPMTQFATGVMALQVQSEFQKAYEKGIHKSKYWEPTYEDSMNLIAQVPLVAAYVYRRMYKNGDTIPKDESLDYGANFAHMLGFSSSEMHELLMRLYVTIHSDHEGGNVSAHTGHLVASALSDPYLSFAAALNGLAGPLHGLANQEVLLWIKSVVEECGENISKEQLKDYVWKTLNSGKVVPGFGHGVLRKTVPRYTCQREFAMKHLPEDPLFQLVSKLYEVFLLFLQNLAKLKPWPNVDAHSGVLLNYYGLTEARYYTVLFGVSRALGICSQLIWDRALGLPLERPKSVTMEWLENQCKKA

SEQ ID NO: 93201 - DNA, 1383 bp, Emericella nidulans
  CDS (1)..(1383)
atggctcttccgctccgcaccgctcgtcatgcctcccggctagcccagacaatcggccgccgcggctacgccactgctgagccagacctcaagtccgccctgaaggccgtcatccccgcgaagcgggaactcctcgccgaagtcaagaaacaaggcgacgaagttattggcgaagtcaaggtctccaatgtcattggcggcatgcgtggcctcaaatctatgctctgggagggttccgttctcgacgcagacgagggaatccgatttcacggcaaaaccatcaaggattgccagaaggagctgcccaagggccctacgggcacagagatgctgcccgaagccatgttctggctgcttcttaccggggaagtcccttcgacatcccaggtccgggcgttctcgaagcaattggccgaggagtcgcacctgccagaccacatcctcgacctggctaagtcgttcccaaagcatatgcaccccatgacgcagattagtattatcactgctgcgcttaacacagagtccaaattcgccaagctctacgagaagggcatcaacaaggcagactactgggagcctacctttgacgacgccatctcgcttctcgcaaagattccccgtgtcgcggcgctcgtcttccgccccaacgagatcgatgtcgttggccgccagaaactcgacccggcccaggactggtcctacaacttcgccgagctcctcggtaagggcggtgcgaacaacgccgacttccacgacctcctccgtctttacctcgctctccacggcgaccacgagggcggcaacgtttccgcccacgcaacccatcttgtcggttctgctctttccgacccgttcctcagttactccgccggtctgctcggtctagccgggcccctgcacggtctcgcagcccaggaagtgcttcgctggatcctagcgatgcaggagaaaattggcaccaaattcaccgacgaggacgtccgcgcgtacctctgggacacgcttaagtctggccgtgttgttcctggatacggtcacggtgtgctccgcaagccggatccccgcttccaggccctcatggacttcgccgccacgaggaaggatgtcctcgccaacccggtcttccagctcgtcaagaagaactcagagattgcccctggagtgctcactgagcatggaaagaccaagaacccccaccccaacgtcgacgccgcctcaggcgtgctcttctaccactacggattccagcagccgctctactatactgtgacattcggtgtgtcgcgtgctctgggtcccctcgtgcagctgatctgggaccgcgcgcttggcctccccattgagcggccgaagagcatcaacctgctcggcctgaaaaagtaa

SEQ ID NO: 93202 - protein, 460 aa, Emericella nidulans
MALPLRTARHASRLAQTIGRRGYATAEPDLKSALKAVIPAKRELLAEVKKQGDEVIGEVKVSNVIGGMRGLKSMLWEGSVLDADEGIRFHGKTIKDCQKELPKGPTGTEMLPEAMFWLLLTGEVPSTSQVRAFSKQLAEESHLPDHILDLAKSFPKHMHPMTQISIITAALNTESKFAKLYEKGINKADYWEPTFDDAISLLAKIPRVAALVFRPNEIDVVGRQKLDPAQDWSYNFAELLGKGGANNADFHDLLRLYLALHGDHEGGNVSAHATHLVGSALSDPFLSYSAGLLGLAGPLHGLAAQEVLRWILAMQEKIGTKFTDEDVRAYLWDTLKSGRVVPGYGHGVLRKPDPRFQALMDFAATRKDVLANPVFQLVKKNSEIAPGVLTEHGKTKNPHPNVDAASGVLFYHYGFQQPLYYTVTFGVSRALGPLVQLIWDRALGLPIERPKSINLLGLKK

SEQ ID NO: 93203 - DNA, 1428 bp, Brassica napus
  CDS (1)..(1428)
atggtgttcttccgcagcgtatcggccttagcgaggctgaggtctcgcgttgggcaacagtcttcgctcagcaactccgttagatggattcagatgcagagctctaccgatatggacctcaagtcgcagctgcaagagttgattccggaacaacaggaccgtttgaagaaactgaagtcagaacatgggaaggtccaactgggaaacatcactgttgatatggtaattggtgggatgagagggatgactggattgctctgggaaacctcattgcttgacccggaagagggaatacgctttaggggcttgtcaattcctgagtgccagaaagtattgcctgctgctcagtctggaggagagccgttacccgagggtcttttgtggcttcttttaactggaaaggtacctagtaaagagcaagttaaagcactatcacaagacttggcaaaccgtgctgctgtgccagattatgtgtacaatgccatcgatgccctgccttctacggctcacccaatgactcaatttgctagcggtgtcatggctctccaggtgcaaagtgagttccaaaaggcatatgagaatggaattcacaagtcaaagttctgggagccaacatacgaggattgcctcaacctgattgctcgtgttcctgtcgtagctgcatatgtttatcggaggatgtataagaatggcgattccattccctcagataaatctttggattatggtgcaaatttttcccacatgttgggatttgatgatgataaaatgaaagagctcatgaggctttacattactatccacagtgatcatgaaggtggaaacgttagtgctcacactggtcacctggtcggtagtgcactttcagatccgtatctctcatttgcagctgcattaaacggtttggctggaccactccatggtttggctaatcaggaagttttgctttggatcaaatcagttgtcgaggaatgtggagagaacatatcgaaagaccagttgaaagaatatgtctggaaaacattgaacagtggcaaggttgttcctggatatggacatggtgttcttcgcaaaactgatccaagatatgtatgccaaagagagtttgcgttgaagcatttacctgatgaccctcttttccagctggtatcaaagctttatgaagttgtgcctcctgttctcaccgaactcggaaaggtgaagaacccatggccaaatgttgatgctcacagtggagtgttgctcaaccactatggtctaaccgaagcaaggtactacaccgtgctcttcggtgtctcaaggagtcttggaatatgctctcagctaatatgggacagagctcttggactggcactagagaggccaaagagtgttacaatggactggcttgacgccttctgtaagaaagcaaaagcttcatctgcttga

SEQ ID NO: 93204 - protein, 475 aa, Brassica napus
MVFFRSVSALARLRSRVGQQSSLSNSVRWIQMQSSTDMDLKSQLQELIPEQQDRLKKLKSEHGKVQLGNITVDMVIGGMRGMTGLLWETSLLDPEEGIRFRGLSIPECQKVLPAAQSGGEPLPEGLLWLLLTGKVPSKEQVKALSQDLANRAAVPDYVYNAIDALPSTAHPMTQFASGVMALQVQSEFQKAYENGIHKSKFWEPTYEDCLNLIARVPVVAAYVYRRMYKNGDSIPSDKSLDYGANFSHMLGFDDDKMKELMRLYITIHSDHEGGNVSAHTGHLVGSALSDPYLSFAAALNGLAGPLHGLANQEVLLWIKSVVEECGENISKDQLKEYVWKTLNSGKVVPGYGHGVLRKTDPRYVCQREFALKHLPDDPLFQLVSKLYEVVPPVLTELGKVKNPWPNVDAHSGVLLNHYGLTEARYYTVLFGVSRSLGICSQLIWDRALGLALERPKSVTMDWLDAFCKKAKASSA

SEQ ID NO: 93205 - DNA, 1419 bp, Zea mays
  CDS (1)..(1419)
atggcgttcttccggggcctcaccgcggtctcgagactgcgatcccgcatggcgcaggaggccaccacgctgggtggtgtgagatggctgcagatgcagagcgcgtccgatctcgatcttaagtcccagttgcaggaattgattccggaacagcaggatcgcttaaagaagcttaaatcagagcatgggaaggttcagcttggaaacataactgtggatatggtccttggtggaatgagagggatgattggaatgctttgggaaacatccctacttgacccagaggagggtattcgttttaggggcctctcaattccagaatgccaaaaagtgctgccaacagcagttaagggcggtgaacctttgcctgagggtctcctttggcttcttttgacagggaaggtcccaaccaaagagcaagttgatgcactatcaaaggaattgcttgcgcgctcaactgtcccagctcatgtctataaggcaatagatgctctcccagtaactgcacatcctatgacacagtttaccacgggagtaatggctcttcaggttgagagtgaatttcaaaaggcttatgacaatggattgccaaagtcaaagttttgggagcctacttatgaagactgcttaaatttgattgctcggcttccaccagtggcttcttatgtttaccggagaattttcaagagtgggaaatcaatagaagccgataattctttggactatgcggcaaatttctcacacatgcttggttttgacgacccaaaaatgctggagctgatgcggctctatgtaacaattcacactgatcatgaaggcgggaatgtcagtgctcatactggtcatctggttggaagtgctctgtcagatccttatctttctttcgcagcggctctaaatgggctagctgggccactacatggccttgcaaatcaggaagtgcttttatggatcaaatctgtaattcaggaaactgggagtgatgttacaacagatcaactcaaagactatgtctggaagacactaaagagtggaaaggttgttcctgggtttggtcatggagttctgcgtaagaccgacccacggtattcatgtcaaagggagtttgccctgaagcatttgcccgaggatccacttttccaattggtgtccaagttgtatgaagttgtacctcctatcctcactgagctgggcaaggtcaagaacccatggccaaatgttgatgctcacagtggagttttgctgaaccactttggactatctgaagcacggtattacactgtcttgttcggtgtttcaagaagcatggggataggatctcagctcatctgggaccgtgcccttggcctgccacttgagaggccgaagagtgttaccatggagtggctggagaactactgcaagaacaaggctgcttga

SEQ ID NO: 93206 - protein, 472 aa, Zea mays
MAFFRGLTAVSRLRSRMAQEATTLGGVRWLQMQSASDLDLKSQLQELIPEQQDRLKKLKSEHGKVQLGNITVDMVLGGMRGMIGMLWETSLLDPEEGIRFRGLSIPECQKVLPTAVKGGEPLPEGLLWLLLTGKVPTKEQVDALSKELLARSTVPAHVYKAIDALPVTAHPMTQFTTGVMALQVESEFQKAYDNGLPKSKFWEPTYEDCLNLIARLPPVASYVYRRIFKSGKSIEADNSLDYAANFSHMLGFDDPKMLELMRLYVTIHTDHEGGNVSAHTGHLVGSALSDPYLSFAAALNGLAGPLHGLANQEVLLWIKSVIQETGSDVTTDQLKDYVWKTLKSGKVVPGFGHGVLRKTDPRYSCQREFALKHLPEDPLFQLVSKLYEVVPPILTELGKVKNPWPNVDAHSGVLLNHFGLSEARYYTVLFGVSRSMGIGSQLIWDRALGLPLERPKSVTMEWLENYCKNKAA

SEQ ID NO: 93207 - DNA, 1419 bp, Glycine max
  CDS (1)..(1419)
atggcattcttcagaagcgtttctgcactttctcgacttcgctctcgcgtgggccaacaatctaatctggcgaattcagttagatggctccaaactccgagctccagtaacactgatctttattctgagttgaaggaactggttccagagtatcaggaacgtgttaagaagctgaagaaagatcatggaagtgttgaattaggaaaaatcactgttgatatggtacttggtggaatgagaggaatgacagctttagtatggctaggctcagctgttgacccggatgagggaattcgctttaggggcatgtcaattcctgaatgccagaaaaagcttccaggtgcttttcctggtggggagcctttgcctgaggctgtactgtggcttctattgacaggaaagataccaagcaaagcacaagttgactcattatcccaggaattgcgaagtcgtgcaactatcccagattatgcttataaggcaattgatgcattgcctgtttctgctcatccaatgactcaattcacaactggtgtcatggcccttcaggtgcagagtgagtttcagaaggcatatgagggtgggataactaaggcaaggtactgggagccaacttatgaggatacaatgaatttaattgctcgtttgccagccattgctgcttatatttatcgacggaaatataaggatggaaaaatcataccattggacgattctttggattatggcgcaaactatgctcacatgttagggtttgatgatccggaaatgctggagtttatgaggctgtatatttccatccacagtgatcatgaaggtggcaatgttagttcacacacagcacacctagttgctagcccgctatcagatccttatcttgcatttgcggctgctttgaatgggttagctgggcccctgcatggtctggccaatcaggaggttctacgatggatcagatcaatagttgcagaatttggaactcctaacataagtactgaacaattggctgactacattaataaaacattgagtagaggccaggttgtgcctggatatggacatggggttttacgccagacagatccaagatacacatgtcagagggagtttgctttgaagcatttgcctaatgatccatatttccagttggtgtctaagataaaagaggttgtgcctcccattcttaccaagttaggcaaggttaaaaatccatggcctaatgttgatgctcacagtggagtgctactgaactattatggtctaactgaggaaaactattatactgttctctttggtgtatcaaggagctttggagttggccctcagttgatatgggacagggctcttggaatgccactcgaaaggccgaaaagtgtaacactggagaagctcgagcaattggtcgccaaatcatcctga

SEQ ID NO: 93208 - protein, 472 aa, Glycine max
MAFFRSVSALSRLRSRVGQQSNLANSVRWLQTPSSSNTDLYSELKELVPEYQERVKKLKKDHGSVELGKITVDMVLGGMRGMTALVWLGSAVDPDEGIRFRGMSIPECQKKLPGAFPGGEPLPEAVLWLLLTGKIPSKAQVDSLSQELRSRATIPDYAYKAIDALPVSAHPMTQFTTGVMALQVQSEFQKAYEGGITKARYWEPTYEDTMNLIARLPAIAAYIYRRKYKDGKIIPLDDSLDYGANYAHMLGFDDPEMLEFMRLYISIHSDHEGGNVSSHTAHLVASPLSDPYLAFAAALNGLAGPLHGLANQEVLRWIRSIVAEFGTPNISTEQLADYINKTLSRGQVVPGYGHGVLRQTDPRYTCQREFALKHLPNDPYFQLVSKIKEVVPPILTKLGKVKNPWPNVDAHSGVLLNYYGLTEENYYTVLFGVSRSFGVGPQLIWDRALGMPLERPKSVTLEKLEQLVAKSS

SEQ ID NO: 93209 - DNA, 1419 bp, Zea mays
  CDS (1)..(1419)
atggcgttcttccggggcctcaccgcggtctcgagactgcgatcccgcatggcgcaggaggccaccacgctgggtggtgtgagatggctgcagatgcagagcgcgtccgacctcgatcttaagtcccagctgcgggaactgattccggaacagcaggaccgcttaaagaagcttaaatcagagcatgggaaggttcagcttggaaacataactgtggatatggtccttggtggaatgagagggatcattggaatgctttgggagacatccctagtcgacccagaggagggtattcgttttaggggcctctcaattccagagtgccgaaaagtgctgccaacagcagttgagggtggtgaacctttgcctgagggtctcctctggcttcttttgacagggaaggtcccaaccaaagatcaagttgatgctctatcaaaagaattgcttgcgcgctcaactgtcccagctcatgtctataaggtaatagatgctctcccagtaactgcacatcctatgacacaatttaccgcaggaataatggctcttcaggttgagagcgaatttcaaaaagcttacggcaatggattgccaaaatcaaagctttgggagcctacttatgaagactgcttaaatttgattgctcggcttccaccagtggcttcttatgtttaccggagaattttcaagagtgggaaatcaatagaagccgataattctttggactatgcggcaaatttctcacacatgcttggttttgacgacccaaaaatgctggagctgatgcggctctatgtaacaattcacactgatcatgaaggcgggaatgtcagtgctcatactggtcatctggttgggagtgctctgtcagatccttatctttctttcgcagcggctctaaatgggctagctgggccactgcatggccttgcaaatcaggaagtgcttttatggatcaaatctgtaattgaggaaactgggagtggtgttaccacagatcaactcaaagactatgtctggaagacactaaagagtggaaaggttgttcctgggtttggtcatggagttctgcgtaagaccgacccacggtattcatgtcaaagggagtttgccctgaagcatttgcccaaggatccacttttccaattggtgtccaagttgtatgaagttgtacctcctatcctcactgagctgggcaaggtcaagaacccatggccaaatgttgatgctcacagtggagttttgctgaaccactttggactatctgaagcacggtattacactgtcttgttcggtgtttcaagaagcatggggataggatctcagctcatctgggaccgtgcccttggcctgccacttgagaggccgaagagtgttaccatggagtggctggagaactactgcaagaacaaggctgcttga

SEQ ID NO: 93210 - protein, 472 aa, Zea mays
MAFFRGLTAVSRLRSRMAQEATTLGGVRWLQMQSASDLDLKSQLRELIPEQQDRLKKLKSEHGKVQLGNITVDMVLGGMRGIIGMLWETSLVDPEEGIRFRGLSIPECRKVLPTAVEGGEPLPEGLLWLLLTGKVPTKDQVDALSKELLARSTVPAHVYKVIDALPVTAHPMTQFTAGIMALQVESEFQKAYGNGLPKSKLWEPTYEDCLNLIARLPPVASYVYRRIFKSGKSIEADNSLDYAANFSHMLGFDDPKMLELMRLYVTIHTDHEGGNVSAHTGHLVGSALSDPYLSFAAALNGLAGPLHGLANQEVLLWIKSVIEETGSGVTTDQLKDYVWKTLKSGKVVPGFGHGVLRKTDPRYSCQREFALKHLPKDPLFQLVSKLYEVVPPILTELGKVKNPWPNVDAHSGVLLNHFGLSEARYYTVLFGVSRSMGIGSQLIWDRALGLPLERPKSVTMEWLENYCKNKAA

SEQ ID NO: 93211 - DNA, 1419 bp, Zea mays
  CDS (1)..(1419)
atggcgttcttccggggcctcaccgcggtctcgaggctgcgatcccgcatggcgcaggaggccaccacgctgggtggtgtgagatggctgcagatgcagagcgcgtccgatctcgatcttaagtcccagttgcaggaattgattccggaacagcaggatcgcctaaagaagcttaaatcagagcatgggaaggttcagcttggaaacataactgtggatatggtccttggtggaatgagagggatgattggaatgctttgggaaacatccctacttgacccagaggagggtattcgttttaggggtctctcgattccagagtgccaaaaagtgctgccaacagcagttaagggtggtgaacctttgcctgagggtctcctttggcttcttttgacagggaaggtcccaaccaaagagcaagttgatgcactatcaaaggaattgcttgcgcgctcaactgtcccagctcatgtctataaggcaatagatgctctcccagtaactgcacatcctatgacacagtttaccacgggagtaatggctcttcaggttgagagcgaatttcaaaaagcttatgacaatggattgccaaaatcaaagttttgggagcctacttatgaagactgcttaaacatgattgctcggcttccaccagtggcttcttatgtttaccggagaattttcaagggtgggaaatcaatagaaactgacaattctctggattatgcggcaaatttctcacacatgcttggttttgatgaccctaaaatgctggagctgatgcggctctatgtaacaattcacactgatcatgaaggcgggaatgtcagtgctcatactggtcatctggttggaagtgctctgtcagatccttatctttctttcgcagcggctctaaatgggttagctgggccactacatggccttgcaaatcaggaagtgcttctatggatcaaatctgtaattcaggaaactgggagtgatgttacaacggatcaactcaaagagtatgtctggaagacactaaagagtggaaaggttgttcctggatttggtcatggagttctgcgtaagacagacccacggtattcatgtcaaagggagtttgccctgaagcatttgcccgaggatccacttttccaactggtgtccaagttatatgaagtcgtacctccgatcctcactgagctaggaaaggtcaagaacccgtggccgaatgttgatgctcacagtggagttttgctgaaccactttggactatctgaagcacggtattacactgtcttgttcggtgtttcgagaagcatggggataggatcccagctcatctgggaccgtgcccttggcctgccacttgagaggccgaagagtgttaccatggagtggctggagaactactgcaataacaaggctgcctga

SEQ ID NO: 93212 - protein, 472 aa, Zea mays
MAFFRGLTAVSRLRSRMAQEATTLGGVRWLQMQSASDLDLKSQLQELIPEQQDRLKKLKSEHGKVQLGNITVDMVLGGMRGMIGMLWETSLLDPEEGIRFRGLSIPECQKVLPTAVKGGEPLPEGLLWLLLTGKVPTKEQVDALSKELLARSTVPAHVYKAIDALPVTAHPMTQFTTGVMALQVESEFQKAYDNGLPKSKFWEPTYEDCLNMIARLPPVASYVYRRIFKGGKSIETDNSLDYAANFSHMLGFDDPKMLELMRLYVTIHTDHEGGNVSAHTGHLVGSALSDPYLSFAAALNGLAGPLHGLANQEVLLWIKSVIQETGSDVTTDQLKEYVWKTLKSGKVVPGFGHGVLRKTDPRYSCQREFALKHLPEDPLFQLVSKLYEVVPPILTELGKVKNPWPNVDAHSGVLLNHFGLSEARYYTVLFGVSRSMGIGSQLIWDRALGLPLERPKSVTMEWLENYCNNKAA

SEQ ID NO: 93213 - DNA, 23 bp, Artificial sequence
  primer
atggtacaaaggcttctaccggg

SEQ ID NO: 93214 - DNA, 26 bp, Artificial sequence
  primer
ttacaacttgttaacattgcttgctt

SEQ ID NO: 93215 - protein, 459 aa, Artificial sequence
  consensus sequence
  Variant (3)..(9): Xaa in position 3 to 9 is any amino acid
  Variant (10)..(10): Xaa in position 10 is any or no amino acid
  Variant (12)..(17): Xaa in position 12 to 17 is any amino acid
  Variant (19)..(23): Xaa in position 19 to 23 is any amino acid
  Variant (24)..(24): Xaa in position 24 is any or no amino acid
  Variant (26)..(29): Xaa in position 26 to 29 is any amino acid
  Variant (31)..(38): Xaa in position 31 to 38 is any amino acid
  Variant (41)..(41): Xaa in position 41 is any amino acid
  Variant (44)..(48): Xaa in position 44 to 48 is any amino acid
  Variant (51)..(51): Xaa in position 51 is any amino acid
  Variant (53)..(53): Xaa in position 53 is any amino acid
  Variant (56)..(57): Xaa in position 56 to 57 is any amino acid
  Variant (65)..(66): Xaa in position 65 to 66 is any amino acid
  Variant (68)..(70): Xaa in position 68 to 70 is any amino acid
  Variant (72)..(73): Xaa in position 72 to 73 is any amino acid
  Variant (76)..(79): Xaa in position 76 to 79 is any amino acid
  Variant (80)..(85): Xaa in position 80 to 85 is any or no amino acid
  Variant (91)..(93): Xaa in position 91 to 93 is any amino acid
  Variant (100)..(101): Xaa in position 100 to 101 is any amino acid
  Variant (103)..(105): Xaa in position 103 to 105 is any amino acid
  Variant (108)..(110): Xaa in position 108 to 110 is any amino acid
  Variant (112)..(116): Xaa in position 112 to 116 is any amino acid
  Variant (118)..(120): Xaa in position 118 to 120 is any amino acid
  Variant (121)..(123): Xaa in position 121 to 123 is any or no amino acid
  Variant (125)..(129): Xaa in position 125 to 129 is any amino acid
  Variant (130)..(135): Xaa in position 130 to 135 is any or no amino acid
  Variant (137)..(139): Xaa in position 137 to 139 is any amino acid
  Variant (143)..(143): Xaa in position 143 is any amino acid
  Variant (145)..(150): Xaa in position 145 to 150 is any amino acid
  Variant (153)..(155): Xaa in position 153 to 155 is any amino acid
  Variant (157)..(157): Xaa in position 157 is any amino acid
  Variant (159)..(160): Xaa in position 159 to 160 is any amino acid
  Variant (163)..(164): Xaa in position 163 to 164 is any amino acid
  Variant (166)..(167): Xaa in position 166 to 167 is any amino acid
  Variant (168)..(168): Xaa in position 168 is any or no amino acid
  Variant (170)..(172): Xaa in position 170 to 172 is any amino acid
  Variant (174)..(177): Xaa in position 174 to 177 is any amino acid
  Variant (180)..(182): Xaa in position 180 to 182 is any amino acid
  Variant (184)..(184): Xaa in position 184 is any amino acid
  Variant (186)..(187): Xaa in position 186 to 187 is any amino acid
  Variant (189)..(190): Xaa in position 189 to 190 is any amino acid
  Variant (192)..(194): Xaa in position 192 to 194 is any amino acid
  Variant (196)..(200): Xaa in position 196 to 200 is any amino acid
  Variant (201)..(201): Xaa in position 201 is any or no amino acid
  Variant (203)..(211): Xaa in position 203 to 211 is any amino acid
  Variant (212)..(220): Xaa in position 212 to 220 is any or no amino acid
  Variant (222)..(224): Xaa in position 222 to 224 is any amino acid
  Variant (226)..(229): Xaa in position 226 to 229 is any amino acid
  Variant (232)..(238): Xaa in position 232 to 238 is any amino acid
  Variant (239)..(243): Xaa in position 239 to 243 is any or no amino acid
  Variant (245)..(245): Xaa in position 245 is any amino acid
  Variant (246)..(256): Xaa in position 246 to 256 is any or no amino acid
  Variant (260)..(261): Xaa in position 260 to 261 is any amino acid
  Variant (264)..(264): Xaa in position 264 is any amino acid
  Variant (276)..(276): Xaa in position 276 is any amino acid
  Variant (285)..(285): Xaa in position 285 is any amino acid
  Variant (287)..(287): Xaa in position 287 is any amino acid
  Variant (290)..(291): Xaa in position 290 to 291 is any amino acid
  Variant (293)..(295): Xaa in position 293 to 295 is any amino acid
  Variant (311)..(311): Xaa in position 311 is any amino acid
  Variant (313)..(331): Xaa in position 313 to 331 is any amino acid
  Variant (332)..(335): Xaa in position 332 to 335 is any or no amino acid
  Variant (337)..(337): Xaa in position 337 is any amino acid
  Variant (339)..(339): Xaa in position 339 is any amino acid
  Variant (342)..(343): Xaa in position 342 to 343 is any amino acid
  Variant (345)..(345): Xaa in position 345 is any amino acid
  Variant (347)..(347): Xaa in position 347 is any amino acid
  Variant (353)..(353): Xaa in position 353 is any amino acid
  Variant (362)..(364): Xaa in position 362 to 364 is any amino acid
  Variant (366)..(367): Xaa in position 366 to 367 is any amino acid
  Variant (370)..(378): Xaa in position 370 to 378 is any amino acid
  Variant (379)..(381): Xaa in position 379 to 381 is any or no amino acid
  Variant (383)..(383): Xaa in position 383 is any amino acid
  Variant (386)..(392): Xaa in position 386 to 392 is any amino acid
  Variant (394)..(395): Xaa in position 394 to 395 is any amino acid
  Variant (397)..(399): Xaa in position 397 to 399 is any amino acid
  Variant (402)..(402): Xaa in position 402 is any amino acid
  Variant (406)..(406): Xaa in position 406 is any amino acid
  Variant (411)..(412): Xaa in position 411 to 412 is any amino acid
  Variant (417)..(419): Xaa in position 417 to 419 is any amino acid
  Variant (422)..(423): Xaa in position 422 to 423 is any amino acid
  Variant (425)..(427): Xaa in position 425 to 427 is any amino acid
  Variant (437)..(438): Xaa in position 437 to 438 is any amino acid
  Variant (440)..(442): Xaa in position 440 to 442 is any amino acid
  Variant (445)..(446): Xaa in position 445 to 446 is any amino acid
  Variant (450)..(450): Xaa in position 450 is any amino acid
  Variant (452)..(452): Xaa in position 452 is any amino acid
  Variant (454)..(454): Xaa in position 454 is any amino acid
LKXXXXXXXXPXXXXXXKXXXXXXGXXXXGXXXXXXXXGGXRGXXXXXWEXSXLDXXEGIRFRGXXIXXXQXXLPXXXXXXXXXXEPLPEXXXWLLLTGXXPXXXQVXXXSXXXXXRXXXXXXPXXXXXXXXXXXPXXXHPMXQXXXXXXALXXXSXFXXAYXXGXXXKXXXWXXXXEDXXXLXAXXPXXAXXXYXXXXXXGXXXXXXXXXXXXXXXXXXDXXXNXXXXLGXXXXXXXXXXXXLXXXXXXXXXXXXRLYXXIHXDHEGGNVSAHTXHLVGSALSXPXLSXXAXXXGLAGPLHGLANQEVLXWXXXXXXXXXXXXXXXXXXXXXXXYXWXTLXXGXVXPGYGHXVLRKTDPRXXXQXXFAXXXXXXXXXXXXFXLVXXXXXXXPXXLXXXGKXKNPXPNVDXXSGVLXXXYGXXEXXXYTVLFGVSRXXGXXXQLXXDRAXGXPXERPKS

SEQ ID NO: 93216 - protein, 60 aa, Artificial sequence
  protein pattern
  Variant (2)..(3): Xaa in position 2 to 3 is any or no amino acid
  Variant (7)..(7): Xaa in position 7 is any amino acid
  Variant (8)..(8): Xaa in position 8 is Ala, Gly, Ser or Thr
  Variant (9)..(9): Xaa in position 9 is Ile or Leu
  Variant (11)..(11): Xaa in position 11 is Ala, Gly, Ser, Thr or Val
  Variant (22)..(22): Xaa in position 22 is Ala or Thr
  Variant (23)..(23): Xaa in position 23 is Ala, Gly, Ser, Thr or Val
  Variant (27)..(27): Xaa in position 27 is Ala or Gly
  Variant (32)..(32): Xaa in position 32 is Asp or Ser
  Variant (34)..(34): Xaa in position 34 is any amino acid
  Variant (37)..(38): Xaa in position 37 to 38 is any amino acid
  Variant (39)..(39): Xaa in position 39 is Ala or Ser
  Variant (40)..(40): Xaa in position 40 is Ala, Gly or Ser
  Variant (41)..(41): Xaa in position 41 is Ile, Leu or Met
  Variant (42)..(42): Xaa in position 42 is any amino acid
  Variant (51)..(51): Xaa in position 51 is any amino acid
  Variant (53)..(53): Xaa in position 53 is Ala or Asn
  Variant (57)..(57): Xaa in position 57 is Leu or Val
  Variant (58)..(58): Xaa in position 58 is any amino acid
  Variant (59)..(59): Xaa in position 59 is Phe or Trp
  Variant (60)..(60): Xaa in position 60 is Ala, Ile or Leu
LXXRLYXXXHXDHEGGNVSAHXXHLVXSALSXPXLSXXXXXXGLAGPLHGXAXQEVXXXX

SEQ ID NO: 93217 - protein, 34 aa, Artificial sequence
  protein pattern
  Variant (2)..(2): Xaa in position 2 is any amino acid
  Variant (4)..(5): Xaa in position 4 to 5 is any amino acid
  Variant (7)..(7): Xaa in position 7 is any amino acid
  Variant (8)..(8): Xaa in position 8 is Ala, Gly or Ser
  Variant (9)..(10): Xaa in position 9 to 10 is any amino acid
  Variant (12)..(12): Xaa in position 12 is Gly, Ile or Val
  Variant (15)..(15): Xaa in position 15 is Phe or Tyr
  Variant (18)..(18): Xaa in position 18 is Ala or Gly
  Variant (22)..(22): Xaa in position 22 is any amino acid
  Variant (23)..(23): Xaa in position 23 is Pro or Thr
  Variant (27)..(27): Xaa in position 27 is Phe or Tyr
  Variant (28)..(28): Xaa in position 28 is any amino acid
  Variant (29)..(29): Xaa in position 29 is Ala, Cys or Ser
  Variant (30)..(32): Xaa in position 30 to 32 is any amino acid
  Variant (33)..(33): Xaa in position 33 is Phe or Tyr
  Variant (34)..(34): Xaa in position 34 is Ala, Cys or Gly
YXWXXLXXXXVXPGXGHXVLRXXDPRXXXXXXXX

SEQ ID NO: 93218 - DNA, 1470 bp, Saccharomyces cerevisiae; identical to SEQ ID NO: 67607
  CDS (1)..(1470)

SEQ ID NO: 93219 - protein, 489 aa, Saccharomyces cerevisiae; identical to SEQ ID NO: 67608

SEQ ID NO: 93220 - DNA, 1959 bp, Oryza sativa
  CDS (151)..(1725)
gttcgtttctacacggatagagtttctgcttggcccggccatcgcacgccctgcccctccagctctgcttccaccagacgggcgtcgagtcttgcacgtgtaactctccagtccagtcccgggctgtctcaccaccaccaccgcgacaccatgtcgtactcgtgggtgggcgcccccgccgagttcaatggcacgaaccaggagaccggcggtgattccaccaccgagaacctgaaccaatggtaccagtcgggagaccaggccttcatcctcgtggcctcatgcatggtcctgatcatggtacctggtatcgccttcctctactccggcctctcacgaagaaagtcggctctgtctttgatctgggtcgttatgatgtccttcagcgtcgtcgtattccagtggtatttctggggttactccctggccctcagcagcacggcaaccaacgggttcatcggcgacctgcaccactttggcctccggaacaccctcgccaagccctcgccgggctccgccctcatccctgagctgctctactctttttaccagatgcaattctgtgccgtgaccgcagcgctcgtggtgggcgcgaccgccgaacgaggccgggtactccccgccatgattttcgtcttcttctgggccacgctggtctactgccccatcgcctgctgggtttggaacgtcaacggatgggccttcaaatacggcgtgctcgactacgccggtggcggccccgtcgaaatcggctccggcatgtcggcgctggcctactcctggatcctcggccgccgccacgaaaagatgatgctcaacttccggcctcacaacgtgtcactcattacgctgggaaccatcctcctgtggttcgggtggctgggcttcaacggcggctcgacctttggcgccaaccttcgtgccaccatggcttgctggaactcgtgcctgacggccatgtttgccgccatgacgtggtgtctgctcgattttcgcctggccaagaagtggtccatggtcggctggtgctctggcgtcatctcgggtcttgttgctgctacgccggcctctggattcatccctccctgggcttcgattattctgggcgtcgtgaccggcgtctgctgcaatttcggcaccaagatcaagttcctcgtcgggattgatgattctctggacgtcttcgccgagcacggaatcggcggtattgttggcctccttttcaacgccttcttcggagcaagctacattgtcgggttggatggtgtcaatacgggcgccgccatgggtggctggttggaccacacctggaagcagctgtacatccagattgccttcatcgtcgcctgcagcgcatacacgtttgtcatgtccgccatcatcgccaagctcatcgacatggtccctggtctgcacctccgggcgagcgaggaggccgagttgctcggcatggacgacaccgagctgggagagtttgcctacgactacgtcgaggttcgccgagatttcttggcctggactccggccatcgaagagcccatgacgcacggtgcgcgcatcgtcccgcaacacggcatcgaggagcacgccaacatggccaacacgaacggcacctcgctcgagtcgcaggaggagaagattggcgcctcagcgcgcgccccggcgaagcaagaggcggccgagaaggcggccggcgcggccccagacagtgaggccacgcagtagagggccggccggctgcgtgttgatgaaagtgacccaagtcaggggaagaagagattaaatcatattggaagatattggattggattgttgggatctgtactaataccccgccgttgcgcggtcctgccggtaaaccggcgtgatgctcggttttaccctcaaaaagggggtctagggagcgaggagttgacaaggagtttaccaaatcaagataccatgttttttcttctgggc

SEQ ID NO: 93221 - protein, 524 aa, Oryza sativa
MSYSWVGAPAEFNGTNQETGGDSTTENLNQWYQSGDQAFILVASCMVLIMVPGIAFLYSGLSRRKSALSLIWVVMMSFSVVVFQWYFWGYSLALSSTATNGFIGDLHHFGLRNTLAKPSPGSALIPELLYSFYQMQFCAVTAALVVGATAERGRVLPAMIFVFFWATLVYCPIACWVWNVNGWAFKYGVLDYAGGGPVEIGSGMSALAYSWILGRRHEKMMLNFRPHNVSLITLGTILLWFGWLGFNGGSTFGANLRATMACWNSCLTAMFAAMTWCLLDFRLAKKWSMVGWCSGVISGLVAATPASGFIPPWASIILGVVTGVCCNFGTKIKFLVGIDDSLDVFAEHGIGGIVGLLFNAFFGASYIVGLDGVNTGAAMGGWLDHTWKQLYIQIAFIVACSAYTFVMSAIIAKLIDMVPGLHLRASEEAELLGMDDTELGEFAYDYVEVRRDFLAWTPAIEEPMTHGARIVPQHGIEEHANMANTNGTSLESQEEKIGASARAPAKQEAAEKAAGAAPDSEATQ

SEQ ID NO: 93222 - DNA, 1365 bp, Ciona intestinalis
  CDS (1)..(1365)
atgcagactggctttgcgtttttggaagcaggttctgtccgcagcaaaaatacgacaaatattatcatgaaaaatgttcttgatttatttattggtgctatcatgtattttgccgtcggctattcgttcgcgtacggccaaccagggaatcgtttcatcggccacaattatttctttgcgacgaacaaagatgaggtaatgaaaacaaaaatccttactttaaatcctcaaatatttagctttttgcttacaaataaaatcaatacgcagaacttcacatacgcatcatggttctttcaatacgtatttgctgcaactgcatctactatagtatctggtgcgatggctgaacgaactgagtttacaacttatatggtgtactgcacttttcttactggcttcgtgtacccagttatagtacattggtgctggacggacgttggttggctgcaatatggaactggtaccgggttaaaatatatcgactacgctgggtccggtgttgttcacttaactggagggacagcggcgtttgttggagcgattattcttggaccacgaataggaagatttaataacgatggcaccgtaaatgatctgcctggacacactgtaactgttgcggctttgggtgggtttatcttgttcgtcgggttcatggcattcaacggcggatctcagcttactatttcgaaccccggggacggagctattgttgccttatctattatgaacactgtacttggtggggcatcaggtgcaatagtggcgatgctggtttataaaacaacagacgccattcgaggggaagatcattactggtcgttgttgatcaccatcaacggtggattaaccggcatggtatctatgtgtgccggatgtaacgatatgctaccatgggctgcagtagtgattggtacagtcgctggacttgctttcatgacgtggcatcatatcatgctaaagcttaggattgacgatccgttagacgctgtggcagtgcatctcggcggtggacttacgggcgtccttcttgccccaatattcgttgtaaagggtttgcagctcgctgagacgaaagaatacgttggtggaatcatatatggaaaacattggctcgctttccagggctttggttggaaccttcttggagcagtcgccatcatcatatggacgggtgtgatcagcatcctgttgtttggaagcatgagtttgcttggtgttctacgtgtaagcgaggaagttgaattgaaaggcctggataaactgaagcatggtgaaccggcttatcctattgagagctattgtgacggcgtaccaccttggagcaaaggtaaagttaagcaatgtaacataaaagtatag

SEQ ID NO: 93223 - protein, 454 aa, Ciona intestinalis
MQTGFAFLEAGSVRSKNTTNIIMKNVLDLFIGAIMYFAVGYSFAYGQPGNRFIGHNYFFATNKDEVMKTKILTLNPQIFSFLLTNKINTQNFTYASWFFQYVFAATASTIVSGAMAERTEFTTYMVYCTFLTGFVYPVIVHWCWTDVGWLQYGTGTGLKYIDYAGSGVVHLTGGTAAFVGAIILGPRIGRFNNDGTVNDLPGHTVTVAALGGFILFVGFMAFNGGSQLTISNPGDGAIVALSIMNTVLGGASGAIVAMLVYKTTDAIRGEDHYWSLLITINGGLTGMVSMCAGCNDMLPWAAVVIGTVAGLAFMTWHHIMLKLRIDDPLDAVAVHLGGGLTGVLLAPIFVVKGLQLAETKEYVGGIIYGKHWLAFQGFGWNLLGAVAIIIWTGVISILLFGSMSLLGVLRVSEEVELKGLDKLKHGEPAYPIESYCDGVPPWSKGKVKQCNIKV

SEQ ID NO: 93224 - DNA, 1500 bp, Ciona intestinalis
  CDS (1)..(1500)
atgttcatattcttcatgcaatgtgggttcgcttttctggaagcaggatcagtaagaagtagtaacacagtcaatattcttatgaagaacacacttgacgttttcgttggttctttatcatttttcgcgttcggttatccatttgcatatggtcgtccgggcaactcgttcatcggccacaacaactttttcggggcaaatgtgcaatactttgagaaatcggtcatagcaaacaaccaaactttgggcggatatgaaaccagtagttcgtattttgcaaacttttttttccaatatgtgtttgcggccactgcagcgactgtggtatcgggcgctgtggcggaaagggccgacttctcatgttatataatctacagcttcactattacagggtttatatatccagtaggtgcgcactgggtttggtcgcccgatggatggcttaatacaggagcaggtactgggttaagcatgcaggactacgctggtagttgtgtggttcatgtatgtggaggcatggctgctttagccggagcaaaaatactcggtccgaggctaggaaggttttccgatgatggtttagataaaccaatacctggacacagcgtacctctcgtatcactaggggcattcattctattagttggtttcttatgttttaatggtgcctctattcaacgcatatccaagaacggagatggccttgaagtatcactgtctgtaactaatacaatactgagtggctccgctgcaggtctatcgtctatgttaacgcatcgagtacacagtatggtgaaagggaaggggaagtattggtctttactaatgactatcaacggtggattgactggcatggtggcgtcgtgtgctggctgtaacgacattgctccttgggctgcactgctcaccggatctgtggctggggtggtttttgtgttcgctcgacaatttgttctatggttgaagatagacgacccactggatgcgatttccgttcatttgtttggaggaactgtcgggacacttgcggctccaattctcgctattcgtggtcaaacaattaacggggtttcggtgggaggtccaatatacggaggtggtgtggacgcatggaggggggttgggtggagcttggttggcttgttctctattgggttgtggtcggggttgtgctgtttcacgttattcacgactttggacatggtgggtttaatgagaattccaaaatcggttgaagaaagtgggatcgatatgcagaagcatggggagcatgcttatccggaaacatttgtgagaatcatagacgacagaccagaaactccacggaaaaacaaagtggtcaaacggaatgtggcatctgcgctcgttgataaatccctgccagcgatcaccacgtcagcatgggatggtcaacatccatctgaagcaggctcctccacaaacggatgtatagaagatccaacaaggttatcaccaagcaccgcgtacaatcgcaaatag

SEQ ID NO: 93225 - protein, 499 aa, Ciona intestinalis
MFIFFMQCGFAFLEAGSVRSSNTVNILMKNTLDVFVGSLSFFAFGYPFAYGRPGNSFIGHNNFFGANVQYFEKSVIANNQTLGGYETSSSYFANFFFQYVFAATAATVVSGAVAERADFSCYIIYSFTITGFIYPVGAHWVWSPDGWLNTGAGTGLSMQDYAGSCVVHVCGGMAALAGAKILGPRLGRFSDDGLDKPIPGHSVPLVSLGAFILLVGFLCFNGASIQRISKNGDGLEVSLSVTNTILSGSAAGLSSMLTHRVHSMVKGKGKYWSLLMTINGGLTGMVASCAGCNDIAPWAALLTGSVAGVVFVFARQFVLWLKIDDPLDAISVHLFGGTVGTLAAPILAIRGQTINGVSVGGPIYGGGVDAWRGVGWSLVGLFSIGLWSGLCCFTLFTTLDMVGLMRIPKSVEESGIDMQKHGEHAYPETFVRIIDDRPETPRKNKVVKRNVASALVDKSLPAITTSAWDGQHPSEAGSSTNGCIEDPTRLSPSTAYNRK

SEQ ID NO: 93226 - DNA, 1497 bp, Oryza sativa (japonica cultivar-group); identical to SEQ ID NO: 67619
  CDS (1)..(1497)

SEQ ID NO: 93227 - protein, 498 aa, Oryza sativa (japonica cultivar-group); identical to SEQ ID NO: 67620

SEQ ID NO: 93228 - DNA, 1491 bp, Oryza sativa (japonica cultivar-group)
  CDS (1)..(1491)
atggcaacgtgcgcggataccctcggcccgctgctgggcacggcggcggcgaacgcgacggactacctgtgcaaccagttcgcggacacgacgtcggccgtggactcgacgtacctgctcttctcggcgtacctcgtgttcgccatgcagctcggcttcgccatgctctgcgccgggtccgtccgcgccaagaacaccatgaacatcatgcttaccaacgtgctcgacgccgccgccggcgcgctcttctactacctcttcggcttcgccttcgccttcggggcgccgtccaacggcttcatcgggaagcacttcttcggcctcaagcaggtcccacaggtcggcttcgactacagcttcttcctcttccagtgggccttcgccatcgccgccgcgggcatcacgtccggctccatcgccgagcggacccagttcgtggcgtacctcatctactccgccttcctcaccggcttcgtctacccggtggtgtcccactggatctggtccgccgacgggtgggcctcggcttcccggacgtcggggtcgctgctcttcgggtccggcgtcatcgacttcgccgggtcaggggttgtccacatggtgggcggcgtggccggactctggggcgccctcatcgagggcccccgcattgggcggttcgaccacgccggccgctcggtggcgctgcgcggccacagcgcgtcgctcgtcgtgctcggcagcttccttctgtggttcgggtggtacgggtttaaccccggctcgttcctcaccatcctcaaatcctacggcccgcccggtagcatccacgggcagtggtcggcggtgggacgcaccgccgtgaccaccaccctcgccggcagcacggcggcgctcacgacgctcttcgggaagaggctccagacggggcactggaacgtgatcgacgtctgcaacggcctcctcggcggcttcgcggcgatcaccgccggttgctccgtcgtcgacccgtgggccgcgatcatctgcgggttcgtctcggcgtgggtgctcatcggcctcaacgcgctggcggcgaggctcaagttcgacgacccgctcgaggcggcgcagctgcacggcgggtgcggcgcgtggggggtcatcttcacggcgctgttcgcgcgcaaggagtacgtggaccagatcttcggccagcccgggcgcccgtacgggctgttcatgggcggcggcggccggctgctcggggcgcacatagtggtcatcctggtcatcgcggcgtgggtgagcttcaccatggcgccgctgttcctggtgctcaacaagctgggcttgctgcgcatctcggccgaggacgagatggccggcatggaccagacgcgccacggcgggttcgcgtacgcgtaccacgacgacgacgcgagcggcaagccggaccgcagcgtcggcgggttcatgctcaagtcggcgcacggcacgcaggtcgccgccgagatgggaggccatgtctag

SEQ ID NO: 93229 - protein, 496 aa, Oryza sativa (japonica cultivar-group)
MATCADTLGPLLGTAAANATDYLCNQFADTTSAVDSTYLLFSAYLVFAMQLGFAMLCAGSVRAKNTMNIMLTNVLDAAAGALFYYLFGFAFAFGAPSNGFIGKHFFGLKQVPQVGFDYSFFLFQWAFAIAAAGITSGSIAERTQFVAYLIYSAFLTGFVYPVVSHWIWSADGWASASRTSGSLLFGSGVIDFAGSGVVHMVGGVAGLWGALIEGPRIGRFDHAGRSVALRGHSASLVVLGSFLLWFGWYGFNPGSFLTILKSYGPPGSIHGQWSAVGRTAVTTTLAGSTAALTTLFGKRLQTGHWNVIDVCNGLLGGFAAITAGCSVVDPWAAIICGFVSAWVLIGLNALAARLKFDDPLEAAQLHGGCGAWGVIFTALFARKEYVDQIFGQPGRPYGLFMGGGGRLLGAHIVVILVIAAWVSFTMAPLFLVLNKLGLLRISAEDEMAGMDQTRHGGFAYAYHDDDASGKPDRSVGGFMLKSAHGTQVAAEMGGHV

SEQ ID NO: 93230 - DNA, 1455 bp, Apis mellifera
  CDS (1)..(1455)
atggaaataggaaacaatgaaacgaatattacaaattcttcaattacagaaacatactttgtttctgcttataatttgaatcaagaagatagtaattggattataacaaattcattcataatttttactatgcaaacgggtttcggtatgttagaatctggatgtgtttctttaaaaaatgaagttaacattatgatgaagaatgttgtcgatatagtacttggcggtttaacttattgggcttttggttttgcaatgagttttggaacagataaattaaataatccttttatcggtatgggcgaatttttaatagatccttctttagaagatgaatttatgggtccgaaatgtgcggcatttttattccaattaagttttgcaaccacttcaacaactatcgttagcggtgctatggctgaacgatgtaattttaaagcatattgtttattttctttcttaaatacgattgtgtattgtgtaccagctggatggatatggggtgatcagggttttttaaaaaaattgggtgctgttgatattgctggttcaggggcagtgcatcttgttggtggtagttctgcacttgcatgtgccataatgttgggaccaagactaggcagatatgataatggaattgatccattgcctcttggatgtccagttaatgctattatgggcttatttgtactttggtggggttggttagctttcaatagtggtagcacatatggtgtcagtggacaacgatggcaatatgctgctagagcagcaatttctacgatgttagcaagcatgggaggtggtttagttggtttaggctttagcctaaatggtccagatagaattgatattttaagtcaaataaatggcattcttggttcattagttgcaatcacaggtggttgtttcctttttagagcctgggaatctataattgttggaatgattggtgcttttattacatgttttactatgcctctattagataaaatgcacattgatgatcctgttggagctagtgctacacatggtgcaagtggaatctggggtataattgctattggtttatttgcagacaatccatatccccttaatactaccaatggaagaaaaggattattaaaaggaggaggaggatatttgttaggtatacaatgtttaacagttgtatgcttagcattttggagttttattgtatctactattttgctatggttcataaataaaattataccaattagaatgagtattcatgacgagcttttaggtgcagatttagtagaacatcgaatacgacattcacagattggaataagtagagccatgtctgctcttcgaattttagaaaaacatgaattagcaaatgttcatcctgtgggaatcaatccaggtaagatgcagttgaaaaatattataaaaaaattattacaaatcaattgttacaggtcatga

SEQ ID NO: 93231 - protein, 484 aa, Apis mellifera
MEIGNNETNITNSSITETYFVSAYNLNQEDSNWIITNSFIIFTMQTGFGMLESGCVSLKNEVNIMMKNVVDIVLGGLTYWAFGFAMSFGTDKLNNPFIGMGEFLIDPSLEDEFMGPKCAAFLFQLSFATTSTTIVSGAMAERCNFKAYCLFSFLNTIVYCVPAGWIWGDQGFLKKLGAVDIAGSGAVHLVGGSSALACAIMLGPRLGRYDNGIDPLPLGCPVNAIMGLFVLWWGWLAFNSGSTYGVSGQRWQYAARAAISTMLASMGGGLVGLGFSLNGPDRIDILSQINGILGSLVAITGGCFLFRAWESIIVGMIGAFITCFTMPLLDKMHIDDPVGASATHGASGIWGIIAIGLFADNPYPLNTTNGRKGLLKGGGGYLLGIQCLTVVCLAFWSFIVSTILLWFINKIIPIRMSIHDELLGADLVEHRIRHSQIGISRAMSALRILEKHELANVHPVGINPGKMQLKNIIKKLLQINCYRS

SEQ ID NO: 93232 - DNA, 1305 bp, Neisseria meningitidis Z2491
  CDS (1)..(1305): transl_table=11
atgaaaaaacacatatgggcggcatctttgctgccggcatccctatcggcagaacctttaaactggtggaagccttattccgccgtcaattcgggcgataccgcctgggtgatgactgcggctgccttggtactgttgatgacgcttcccgggctggctttattctacggcgggatggtgcggaaaaaaaacctgctctcgacgatgatgcacagcttttccatcgcgacattggtgggcatcctttgggtcgccgtcggctattctttagcgttcacgccgggaaatgcctttatcggcggtttggggcgcgtatttttaagcgggatgcagatagacgctgccgcacagatgctgaccgtgtcgcccaatgcgccgactgttcccgaaccggtatttatgttttttcagatgacgtttgccattatttcgaccgccattattaccggcgcgtttgccgaacggatgaaatattcggcaatgatgctgttttcgggcatatggtttttattggtttatgtgccgggagcgcattgggtgtggggcggcggctttatgagcaagggcggcgtattggattatgccggcggtacggtggtgcacatcaatgccggtatcgcgggactcgtcgccgccttggttttgggcaggcgcataggctacgggcgcgaggcgatgcctccgcacaatatggcgatgacactgatcggcgcggcaatgttgtggttcggctggttcggctttaacgccggatcggcgcttgcggcagacgcggcggcgggtatggcgatggcggtaacgcaggtgtcggccgtattcggcgcggcaggctggcttgcctgcgaaaaaatagcgggacacaaaccttccgctttggggctggcttccggcgcggtttccggtctggtcggcatcacccctgccgccggctttaccggcccgtcgggcgcggccgccatcggtatattgactgccgccgcgtgctttgtgtccgtcaccgtcgtcaaacacaaattgcgttacgatgattctttggacgctttcggcatacacggattcggcgggctggtgggcggaatattgaccggcatctttttcgacaaccgcattttcggcggggatgcggcagtttggcagcagttgtggatacaggtaaaagacgggttcgttatggcggcatacagcgggctgatgagttgggcgattttgaaggtcgtggggaaaatctgcggcggcctgcgcgtcggcaaggatgtcgaacgcgaaggtttggatctgaatatccacggcgaacgcgtggaataa

SEQ ID NO: 93233 - protein, 434 aa, Neisseria meningitidis Z2491
MKKHIWAASLLPASLSAEPLNWWKPYSAVNSGDTAWVMTAAALVLLMTLPGLALFYGGMVRKKNLLSTMMHSFSIATLVGILWVAVGYSLAFTPGNAFIGGLGRVFLSGMQIDAAAQMLTVSPNAPTVPEPVFMFFQMTFAIISTAIITGAFAERMKYSAMMLFSGIWFLLVYVPGAHWVWGGGFMSKGGVLDYAGGTVVHINAGIAGLVAALVLGRRIGYGREAMPPHNMAMTLIGAAMLWFGWFGFNAGSALAADAAAGMAMAVTQVSAVFGAAGWLACEKIAGHKPSALGLASGAVSGLVGITPAAGFTGPSGAAAIGILTAAACFVSVTVVKHKLRYDDSLDAFGIHGFGGLVGGILTGIFFDNRIFGGDAAVWQQLWIQVKDGFVMAAYSGLMSWAILKVVGKICGGLRVGKDVEREGLDLNIHGERVE

SEQ ID NO: 93234 - DNA, 1350 bp, Agrobacterium tumefaciens str. C58; identical to SEQ ID NO: 67321
  CDS (1)..(1350): transl_table=11

SEQ ID NO: 93235 - protein, 449 aa, Agrobacterium tumefaciens str. C58; identical to SEQ ID NO: 67322

SEQ ID NO: 93236 - DNA, 1206 bp, Listeria innocua Clip11262; identical to SEQ ID NO: 67315
  CDS (1)..(1206): transl_table=11

SEQ ID NO: 93237 - protein, 401 aa, Listeria innocua Clip11262; identical to SEQ ID NO: 67316

SEQ ID NO: 93238 - DNA, 1413 bp, Nostoc sp. PCC 7120; identical to SEQ ID NO: 67317
  CDS (1)..(1413): transl_table=11

SEQ ID NO: 93239 - protein, 470 aa, Nostoc sp. PCC 7120; identical to SEQ ID NO: 67318

SEQ ID NO: 93240 - DNA, 1317 bp, Corynebacterium glutamicum ATCC 13032; identical to SEQ ID NO: 67323
  CDS (1)..(1317): transl_table=11

SEQ ID NO: 93241 - protein, 438 aa, Corynebacterium glutamicum ATCC 13032; identical to SEQ ID NO: 67324

SEQ ID NO: 93242 - DNA, 1347 bp, Streptomyces coelicolor A3(2); identical to SEQ ID NO: 67327
  CDS (1)..(1347): transl_table=11

SEQ ID NO: 93243 - protein, 448 aa, Streptomyces coelicolor A3(2); identical to SEQ ID NO: 67328

SEQ ID NO: 93244 - DNA, 1476 bp, Xanthomonas campestris pv. campestris str. ATCC 33913; identical to SEQ ID NO: 67331
  CDS (1)..(1476): transl_table=11

SEQ ID NO: 93245 - protein, 491 aa, Xanthomonas campestris pv. campestris str. ATCC 33913; identical to SEQ ID NO: 67332

SEQ ID NO: 93246 - DNA, 1476 bp, Xanthomonas axonopodis pv. citri str. 306; identical to SEQ ID NO: 67333
  CDS (1)..(1476): transl_table=11

SEQ ID NO: 93247 - protein, 491 aa, Xanthomonas axonopodis pv. citri str. 306; identical to SEQ ID NO: 67334

SEQ ID NO: 93248 - DNA, 1287 bp, Escherichia coli CFT073
  CDS (1)..(1287): transl_table=11
atgaagatagcaacgataaaaactgggcttacttcactggcgatgctgccgggactggtaatggctgcacctgcggtggccgataaagccgacaatgcgtttatgatgatttgtactgcgctggtgctgtttatgaccgttccggggattgccctgttttatggagggctgattcgtggcaaaaacgtgctgtcgatgctgacgcaggtgaccgtgacgtttgcactggtctgtattctctgggtggtttacggctactcgctggcgtttggcgaaggcaacaacttcttcggcaacattaacgggttgatgctgaaaaacattgaactgacggcggtgatgggcagcatttatcagtatatccacgtggcgtttcagggatcgtttgcctgcattaccgtaggcttgatagttggggcgctggcggaacgaatccgcttctcagctgtgttgatttttgtggtggtatggctgacgctctcttacattccgattgcgcatatggtctggggcggcggtttgctggcttctcacggggcactggatttcgcgggtggcacggtggtgcatattaacgccgcaatcgccggtctggtgggcgcgtatctgataggcaaacgcgtgggcttcggtaaagaggcgtttaaaccgcacaacctgccgatggtcttcaccgggactgctattctctatatcggttggtttggctttaacgccgggtcagcgggcacggcgaatgaaatcgcggcactggcatttgtgaatactgtggtcgcaactgcggcggcaattcttggctggatcttcggtgaatgggcgctgcgtggtaagccttcactgctgggagcgtgttctggcgcgattgccggtctggtcggcgtgacgccagcctgtggttacattggggttggcggcgcgttgattatcggcgtggtagctggtctggcgggcttgtggggcgttaccatgctcaaacgcttgctgcgggtggatgatccctgcgatgtcttcggtgtgcacggcgtttgtggtattgtcggctgtatcatgaccgggatttttgccgccagctcgctgggcggtgtgggcttcgctgaaggtgtgacgatgggccatcagttgctggtacagctggaaagcatcgccattacgattgtctggtctggtgtggtggcatttatcggctacaaactggcggatctgacggttggtctgcgtgtaccggaagagcaggagcgagaagggctggacgtcaacagccacggcgagaatgcctataacgcgtaa

SEQ ID NO: 93249 - protein, 428 aa, Escherichia coli CFT073
MKIATIKTGLTSLAMLPGLVMAAPAVADKADNAFMMICTALVLFMTVPGIALFYGGLIRGKNVLSMLTQVTVTFALVCILWVVYGYSLAFGEGNNFFGNINGLMLKNIELTAVMGSIYQYIHVAFQGSFACITVGLIVGALAERIRFSAVLIFVVVWLTLSYIPIAHMVWGGGLLASHGALDFAGGTVVHINAAIAGLVGAYLIGKRVGFGKEAFKPHNLPMVFTGTAILYIGWFGFNAGSAGTANEIAALAFVNTVVATAAAILGWIFGEWALRGKPSLLGACSGAIAGLVGVTPACGYIGVGGALIIGVVAGLAGLWGVTMLKRLLRVDDPCDVFGVHGVCGIVGCIMTGIFAASSLGGVGFAEGVTMGHQLLVQLESIAITIVWSGVVAFIGYKLADLTVGLRVPEEQEREGLDVNSHGENAYNA

SEQ ID NO: 93250 - DNA, 1455 bp, Xylella fastidiosa Temecula1
  CDS (1)..(1455): transl_table=11
atgcactctaactcttgccattttagtgatatgaagaatggttttttcgcaatctgtatatttatcgcgttggctttgttggcaggtggcaatgccatcggtcgtgcggaggctcaggtacaaaccaatcctttgcctagcgagcaagtcaccaccgaattgttgatgtctgaagcaaccccttccgacgcggttgcaatacctaaaacgacttcaccccccgtggtagacaagggggacgttgcttggatgctcacctcaacgctattagtgctactgatggtgttaccaggcttggcactgttttacggcggcatgttgcgttctaaaaacgtactatcaatgatggtacaaattggtgtggtgttttctctgatagccatcttgtgggtgctatacggctatagccttgcttttgctgatggtgacatgtttattggtacattcaataaggcatttctttatggcgtagacactgcaacgttggtagataccttctctaaagggttcaaactgcccgagtacgtgtacgttgctttccaattgacttttgcaggtatcaccgctgcattgattgtcggtgcttttgcagaacgcgtgaaatttgctgcggtactgctgtttattttcatttggttttccttcggctacctgccactggcacacatggtgtggtcgacgccaggttttctgttgagcaagggggccttggattttgccggtgggacagttgtacatatcaatgctggtattgctggattgatcggtgcttactttgttggtaagcgtattggttttggccaggttgccgtcaagccgcataacgtccccatgactttcactggtgctgcactgctatgggtcggttggttcggcttcaatgctggttcggcgttagaagccaatagcattgctgccttggctttcatcaacaccatgcttgcgactgctgctgcgattctcgtttggtcgttgctcgaaaagatgaccaagggaaaattctcagctctgggtgttgcttcaggcatgattgctggtttagtaggcgtcactccagcggcgggtacggttggtccatttggtgcaattgcgattggtgctgttgccgccgtgtgctgtatctggggcatcactggactgaaaagattattgaaggtagacgataccttggacgtattcggcgtgcatggcattggcggcattgttggtgcgattttgactggggtttttaccgataaggcgctaggcggtcagggatatgctgaggggatgacaatgagcaatcaagtcatgattcaagccatgagtgtggggatcagcatcgtgtggattggaatcgtttcgctggtaggtttcttaattgtcaaactgctgtttggtttgcgtgtaagcgaagaagctgaacgtgaaggattggacattacatcgcacggtgagtcggcgtacgagtcctga

SEQ ID NO: 93251 - protein, 484 aa, Xylella fastidiosa Temecula1
MHSNSCHFSDMKNGFFAICIFIALALLAGGNAIGRAEAQVQTNPLPSEQVTTELLMSEATPSDAVAIPKTTSPPVVDKGDVAWMLTSTLLVLLMVLPGLALFYGGMLRSKNVLSMMVQIGVVFSLIAILWVLYGYSLAFADGDMFIGTFNKAFLYGVDTATLVDTFSKGFKLPEYVYVAFQLTFAGITAALIVGAFAERVKFAAVLLFIFIWFSFGYLPLAHMVWSTPGFLLSKGALDFAGGTVVHINAGIAGLIGAYFVGKRIGFGQVAVKPHNVPMTFTGAALLWVGWFGFNAGSALEANSIAALAFINTMLATAAAILVWSLLEKMTKGKFSALGVASGMIAGLVGVTPAAGTVGPFGAIAIGAVAAVCCIWGITGLKRLLKVDDTLDVFGVHGIGGIVGAILTGVFTDKALGGQGYAEGMTMSNQVMIQAMSVGISIVWIGIVSLVGFLIVKLLFGLRVSEEAEREGLDITSHGESAYES

SEQ ID NO: 93252 - DNA, 1287 bp, Salmonella enterica subsp. enterica serovar Typhi Ty2
  CDS (1)..(1287): transl_table=11
atgaagatagcgatgataaaaaccacactggcttcactggcgctgctgcctgggctaacgatagccgcgccagcggttgccgataaagcggatagtgcttttatgatgatttgcaccgcgctggtgctgttcatgacgataccgggtatcgcgctgttttacggcggattaattcgcgccaagaatgtgctgtcaatgttaacgcaagtgaccgtcacctttgcgctggtctgtattttatgggtggtgtacggctattcgctggcttttggcgaagggaatcatttcttcggtaatgccgatggggcgatgttgaagaatatcgcgttgacggcggtaacgggtacgatttatcagtatattcatgtcgcgtttcagggatctttcgcctgtattaccgtcgggctgattgtcggcgcgctggcggagcgtattcgtttttcggcggtactgatttttgtcgtggtgtggttcacgctctcttatatcccgattgcgcacatggtgtggggcggcggcctgctggctgctcacggcgcgctggattttgccggtggtacggtggtgcatattaacgccgctatcgccgggctggtgggggcttatttaattggcaaacgcgtcggctttgggaaagaagcatttaaaccccataacctgccgatggtctttaccggtactgcgattctgtatatcggctggtttggatttaacgcgggttctgcgggtagcgcaaacgagatagcagcgctggcctttgtgaacaccgtggtggcgaccgccgccgcgattctggggtggattatcggcgagtggacgctacgcggtaagccttccctgctgggagcgtgttccggcgcgattgccggtctggtcggcgtgacgccagcctgtggctatgttggcgttggcggcgcgctggttatcggcgttattgcgggtctggcgggattgtggggagtcaccatgcttaaacgtctgctacgggtagatgatccgtgcgacgtatttggcgttcacggcgtttgcggaatagtcggctgtatcctgaccggcgtttttgccgccagttcgctgggtggcgtcggctttgtcgacggcgttacgatgggacatcaggtgatggtacagctggaaagtattgctattacggtcgtctggtccggcgttgtcgcgtttgttggttacaaactggcggatatccttgttggactgcgtgtaccggaagagcaggagcgcgaggggctggatgtgaacagtcacggcgagaatgcgtataacgcgtga

SEQ ID NO: 93253 - protein, 428 aa, Salmonella enterica subsp. enterica serovar Typhi Ty2; identical to SEQ ID NO: 67314

SEQ ID NO: 93254 - DNA, 1437 bp, Gloeobacter violaceus PCC 7421; identical to SEQ ID NO: 67349
  CDS (1)..(1437): transl_table=11

SEQ ID NO: 93255 - protein, 478 aa, Gloeobacter violaceus PCC 7421; identical to SEQ ID NO: 67350

SEQ ID NO: 93256 - DNA, 1440 bp, Mycobacterium avium subsp. paratuberculosis K-10; identical to SEQ ID NO: 67355
  CDS (1)..(1440): transl_table=11

SEQ ID NO: 93257 - protein, 479 aa, Mycobacterium avium subsp. paratuberculosis K-10; identical to SEQ ID NO: 67356

SEQ ID NO: 93258 - DNA, 1644 bp, Strongylocentrotus purpuratus
  CDS (1)..(1644)
atgaacacgacgacagtgatttgggaagaggaaaacttgacgaccacggagagcccgacggcgtacagggcaacgacgtgggatgatgcaacatggattctgacaagtgccttcctcatattcaccatgcaatcaggcttcggtctcctcgagtcaggcagtgtcactctcaagaacgaagtcaacatcatggtcaagaacgccgtcgacgtcctgttcggcggaatctcattctggatgttcggttacgggttgagcttcggcgtcgacaagggatccaacgccttcatcggcattggggatttctttgttgatagcaagatgatggatgctgagatgggtcatctctttgcccatttcttctttcatgcctccttcgcgaccacggcgaccaccatcgtcagcggggcgatggcggagagaacaaaactcgaagcctacatcgtcttttctttcgtcaacaccttcgtgtacgcactaccagctcattggatatgggcacctaacggatggctccacgcgatgggtgtggtcgatatctctggagcaggaccggtgcacctgctgggaggggtaacaggactggtagctaccctcatgctgggtcctagacacggacggtttggagagatagaagaacgaccggtacagagtagtcccattaatacactgctcggtctattcatgttatggtggggttggcttggttttaactgtggtagtacgtatggcgttgctggccaaaaatggatcttgactataaggtcagctgtttctaccatcttgtcatcaatctctggaggtataacaggcattacactcagttacctgtttctaaatcgtcgctttaatattccgtggcttatcaactccgtgttagcatcgctcgtatccatcacagcgtactgtgctctggcccacccgtgggaggcgatcatcatcggcgctgtgggtggggtgataggttgtgcgtcaacacccttcatcgaatggttgaagattgatgatcctgccagtgttatctccgttcacttcttccctgcgatctggagtttgatggcagtggggatctttggtcagatcgataccctgggagatttcaatcgtcacaatggtttgattcacggaggaggtttctggttgcttggtgtccagctcctgtccgtggtctgtctggtggtttggacagccatcacctccttcatattcctcttcgccctcaaggtcaccgtcggaattcgtgtctcgctccacgaagaactcatcggcgccgacgtcgtcgagcacggcttacacggcaactacgacaagcgctcgggtgagcttaccgaccaggagggcgtcgttattctccggattgatcggtcgacgccgcatgactacgagttgtccctcgccgctctgcgtcgtcgggtgaaattgtttggaggtacggtatttcagaggcagtggacaggaggggctcacactctagatgtgccttctaagaagagtacgagtaagaaatacgagtgtgactcgttccaagaacgtcaggatgaaagcattcgatcagacggtccagcagttcatgttcactttctaaacgcggctttggaaggcagatctctatccgtgaatggtggtattgggaatgaacgataa

SEQ ID NO: 93259 - protein, 547 aa, Strongylocentrotus purpuratus
MNTTTVIWEEENLTTTESPTAYRATTWDDATWILTSAFLIFTMQSGFGLLESGSVTLKNEVNIMVKNAVDVLFGGISFWMFGYGLSFGVDKGSNAFIGIGDFFVDSKMMDAEMGHLFAHFFFHASFATTATTIVSGAMAERTKLEAYIVFSFVNTFVYALPAHWIWAPNGWLHAMGVVDISGAGPVHLLGGVTGLVATLMLGPRHGRFGEIEERPVQSSPINTLLGLFMLWWGWLGFNCGSTYGVAGQKWILTIRSAVSTILSSISGGITGITLSYLFLNRRFNIPWLINSVLASLVSITAYCALAHPWEAIIIGAVGGVIGCASTPFIEWLKIDDPASVISVHFFPAIWSLMAVGIFGQIDTLGDFNRHNGLIHGGGFWLLGVQLLSVVCLVVWTAITSFIFLFALKVTVGIRVSLHEELIGADVVEHGLHGNYDKRSGELTDQEGVVILRIDRSTPHDYELSLAALRRRVKLFGGTVFQRQWTGGAHTLDVPSKKSTSKKYECDSFQERQDESIRSDGPAVHVHFLNAALEGRSLSVNGGIGNER

SEQ ID NO: 93260 - DNA, 1491 bp, Strongylocentrotus purpuratus; identical to SEQ ID NO: 67359
  CDS (1)..(1491)

SEQ ID NO: 93261 - protein, 496 aa, Strongylocentrotus purpuratus; identical to SEQ ID NO: 67360

SEQ ID NO: 93262 - DNA, 1458 bp, Magnaporthe grisea 70-15; identical to SEQ ID NO: 67361
  CDS (1)..(1458)

SEQ ID NO: 93263 - protein, 485 aa, Magnaporthe grisea 70-15; identical to SEQ ID NO: 67362

SEQ ID NO: 93264 - DNA, 1482 bp, Magnaporthe grisea 70-15; identical to SEQ ID NO: 67363
  CDS (1)..(1482)

SEQ ID NO: 93265 - protein, 493 aa, Magnaporthe grisea 70-15; identical to SEQ ID NO: 67364

SEQ ID NO: 93266 - DNA, 1563 bp, Magnaporthe grisea 70-15; identical to SEQ ID NO: 67365
  CDS (1)..(1563)

SEQ ID NO: 93267 - protein, 520 aa, Magnaporthe grisea 70-15; identical to SEQ ID NO: 67366

SEQ ID NO: 93268 - DNA, 1542 bp, Gibberella zeae PH-1; identical to SEQ ID NO: 67367
  CDS (1)..(1542)

SEQ ID NO: 93269 - protein, 513 aa, Gibberella zeae PH-1; identical to SEQ ID NO: 67368

SEQ ID NO: 93270 - DNA, 1392 bp, Gibberella zeae PH-1; identical to SEQ ID NO: 67369
  CDS (1)..(1392)

SEQ ID NO: 93271 - protein, 463 aa, Gibberella zeae PH-1; identical to SEQ ID NO: 67370

SEQ ID NO: 93272 - DNA, 1401 bp, Gibberella zeae PH-1; identical to SEQ ID NO: 67371
  CDS (1)..(1401)

SEQ ID NO: 93273 - protein, 466 aa, Gibberella zeae PH-1; identical to SEQ ID NO: 67372

SEQ ID NO: 93274 - DNA, 1449 bp, Gibberella zeae PH-1; identical to SEQ ID NO: 67373
  CDS (1)..(1449)

SEQ ID NO: 93275 - protein, 482 aa, Gibberella zeae PH-1; identical to SEQ ID NO: 67374

SEQ ID NO: 93276 - DNA, 1359 bp, Candida glabrata CBS 138; identical to SEQ ID NO: 67375
  CDS (1)..(1359)

SEQ ID NO: 93277 - protein, 452 aa, Candida glabrata CBS 138; identical to SEQ ID NO: 67376

SEQ ID NO: 93278 - DNA, 1437 bp, Candida glabrata CBS 138; identical to SEQ ID NO: 67377
  CDS (1)..(1437)

SEQ ID NO: 93279 - protein, 478 aa, Candida glabrata CBS 138; identical to SEQ ID NO: 67378

SEQ ID NO: 93280 - DNA, 1515 bp, Candida glabrata CBS 138; identical to SEQ ID NO: 67379
  CDS (1)..(1515)

SEQ ID NO: 93281 - protein, 504 aa, Candida glabrata CBS 138; identical to SEQ ID NO: 67380

SEQ ID NO: 93282 - DNA, 1362 bp, Kluyveromyces lactis NRRL Y-1140; identical to SEQ ID NO: 67381
  CDS (1)..(1362)

SEQ ID NO: 93283 - protein, 453 aa, Kluyveromyces lactis NRRL Y-1140; identical to SEQ ID NO: 67382

SEQ ID NO: 93284 - DNA, 1482 bp, Kluyveromyces lactis NRRL Y-1140; identical to SEQ ID NO: 67383
  CDS (1)..(1482)

SEQ ID NO: 93285 - protein, 493 aa, Kluyveromyces lactis NRRL Y-1140; identical to SEQ ID NO: 67384

SEQ ID NO: 93286 - DNA, 1470 bp, Kluyveromyces lactis NRRL Y-1140; identical to SEQ ID NO: 67385
  CDS (1)..(1470)

SEQ ID NO: 93287 - protein, 489 aa, Kluyveromyces lactis NRRL Y-1140; identical to SEQ ID NO: 67386

SEQ ID NO: 93288 - DNA, 1545 bp, Debaryomyces hansenii CBS767; identical to SEQ ID NO: 67387
  CDS (1)..(1545)

SEQ ID NO: 93289 - protein, 514 aa, Debaryomyces hansenii CBS767; identical to SEQ ID NO: 67388

SEQ ID NO: 93290 - DNA, 1578 bp, Debaryomyces hansenii CBS767; identical to SEQ ID NO: 67389
  CDS (1)..(1578)

SEQ ID NO: 93291 - protein, 525 aa, Debaryomyces hansenii CBS767; identical to SEQ ID NO: 67390

SEQ ID NO: 93292 - DNA, 1722 bp, Yarrowia lipolytica CLIB122; identical to SEQ ID NO: 67391
  CDS (1)..(1722)

SEQ ID NO: 93293 - protein, 573 aa, Yarrowia lipolytica CLIB122; identical to SEQ ID NO: 67392

SEQ ID NO: 93294 - DNA, 1368 bp, Yarrowia lipolytica CLIB122; identical to SEQ ID NO: 67393
  CDS (1)..(1368)

SEQ ID NO: 93295 - protein, 455 aa, Yarrowia lipolytica CLIB122; identical to SEQ ID NO: 67394

SEQ ID NO: 93296 - DNA, 1380 bp, Yarrowia lipolytica CLIB122
  CDS (1)..(1380)
atggactcagaagcccccgtggaaactcttactgcggcgcaaataaaatcgtatgtcgacacagcatacattcttgtgtgtgcagtgggcgtgtcgctcatcaccccaggtattggaatgctgtatgccggcatgatcagacgcaagaacgcactcactatcgtcgcccaaagtgtactcacaacctgtgtcatctgtcttcaatggtggatctggggctactctctgggtaacgttcccaatggcaagatgcttggtaacctgagtctggctttcatgatgggtagccctactagccatgacgagctttctctcgaccagctcgaggaggagggaatccccacttctgttcatttcatcttctccgccttctttgttgtctgcacagtccagattttcgctggtgccatcgctgagcgaggtagactcatttcatcacagattgtcggcttcatcttcgctacggtcgtctactgtcctctctcgtactggttctgggccgaggacggctggctcaacgccatgggagtccttgactttgctggaggaggacccgtccacatcgccagtggaacgggtgctcttgcctacgcactgtacctaggaaagcgaattgatgacaacggagaggcctctatgcttgcccgtgccaaaccccataaccccactctggttctgcttggaactctgctcatctggtacggatggctcttcttcaactcaggcaccttgttggctgtcagctctcgaactggatacatcatgctgaacacccagctttctgcctgcactggcggtatcatctttgccgccgtcgacaagtggcgatacggacgggtgtctctcgtcggtctttgtgagggagtcatctgtggtctagtggccatcactccttcctgtggatacatctctccatggttctctgttgttggagctatcatcactgctggagtctgctgctctctgtccaatatcaaccagtggattggcattgacgatactatccgatcctttaacatccacgcaattggcggaatcatgggatctatctgcactgccttctttgccgaccctgcctgggcccaggaagatattccaggaggctggatcaagcacaactgggtccaactgggccacgagctcgccgctgtcaccacctgtgtcgcctggtccttcgtcctcacctacatcatctgtttcgtggttgaccacattcctggtctcaagctgcgagtcactgctgaggaagagatgctcggaactgatgtcaaggatctgtcagagaaggtcgaaaacatggaggactctctctggggcaactccccatccatgagccgagagcccaccgtcgccaagcgggacgctgagcccatggtctaa

SEQ ID NO: 93297 - protein, 459 aa, Yarrowia lipolytica CLIB122
MDSEAPVETLTAAQIKSYVDTAYILVCAVGVSLITPGIGMLYAGMIRRKNALTIVAQSVLTTCVICLQWWIWGYSLGNVPNGKMLGNLSLAFMMGSPTSHDELSLDQLEEEGIPTSVHFIFSAFFVVCTVQIFAGAIAERGRLISSQIVGFIFATVVYCPLSYWFWAEDGWLNAMGVLDFAGGGPVHIASGTGALAYALYLGKRIDDNGEASMLARAKPHNPTLVLLGTLLIWYGWLFFNSGTLLAVSSRTGYIMLNTQLSACTGGIIFAAVDKWRYGRVSLVGLCEGVICGLVAITPSCGYISPWFSVVGAIITAGVCCSLSNINQWIGIDDTIRSFNIHAIGGIMGSICTAFFADPAWAQEDIPGGWIKHNWVQLGHELAAVTTCVAWSFVLTYIICFVVDHIPGLKLRVTAEEEMLGTDVKDLSEKVENMEDSLWGNSPSMSREPTVAKRDAEPMV

SEQ ID NO: 93298 - DNA, 1461 bp, Yarrowia lipolytica CLIB122; identical to SEQ ID NO: 67395
  CDS (1)..(1461)

SEQ ID NO: 93299 - protein, 486 aa, Yarrowia lipolytica CLIB122; identical to SEQ ID NO: 67396

SEQ ID NO: 93300 - DNA, 1362 bp, Yarrowia lipolytica CLIB122; identical to SEQ ID NO: 67397
  CDS (1)..(1362)

SEQ ID NO: 93301 - protein, 453 aa, Yarrowia lipolytica CLIB122; identical to SEQ ID NO: 67398

SEQ ID NO: 93302 - DNA, 1497 bp, Yarrowia lipolytica CLIB122; identical to SEQ ID NO: 67399
  CDS (1)..(1497)

SEQ ID NO: 93303 - protein, 498 aa, Yarrowia lipolytica CLIB122; identical to SEQ ID NO: 67400

SEQ ID NO: 93304 - DNA, 1419 bp, Aspergillus nidulans FGSC A4; identical to SEQ ID NO: 67401
  CDS (1)..(1419)

SEQ ID NO: 93305 - protein, 472 aa, Aspergillus nidulans FGSC A4; identical to SEQ ID NO: 67402

SEQ ID NO: 93306 - DNA, 1437 bp, Aspergillus nidulans FGSC A4; identical to SEQ ID NO: 67403
  CDS (1)..(1437)

SEQ ID NO: 93307 - protein, 478 aa, Aspergillus nidulans FGSC A4; identical to SEQ ID NO: 67404

SEQ ID NO: 93308 - DNA, 1635 bp, Aspergillus nidulans FGSC A4; identical to SEQ ID NO: 67405
  CDS (1)..(1635)

SEQ ID NO: 93309 - protein, 544 aa, Aspergillus nidulans FGSC A4; identical to SEQ ID NO: 67406

SEQ ID NO: 93310 - DNA, 1443 bp, Candida albicans SC5314; identical to SEQ ID NO: 67407
  CDS (1)..(1443): transl_table=12

SEQ ID NO: 93311 - protein, 480 aa, Candida albicans SC5314; identical to SEQ ID NO: 67408

SEQ ID NO: 93312 - DNA, 1605 bp, Candida albicans SC5314; identical to SEQ ID NO: 67409
  CDS (1)..(1605): transl_table=12

SEQ ID NO: 93313 - protein, 534 aa, Candida albicans SC5314; identical to SEQ ID NO: 67410

SEQ ID NO: 93314 - DNA, 1587 bp, Ustilago maydis 521; identical to SEQ ID NO: 67411
  CDS (1)..(1587)

SEQ ID NO: 93315 - protein, 528 aa, Ustilago maydis 521; identical to SEQ ID NO: 67412

SEQ ID NO: 93316 - DNA, 1464 bp, Ustilago maydis 521; identical to SEQ ID NO: 67413
  CDS (1)..(1464)

SEQ ID NO: 93317 - protein, 487 aa, Ustilago maydis 521; identical to SEQ ID NO: 67414

SEQ ID NO: 93318 - DNA, 1728 bp, Cryptococcus neoformans var. neoformans B-3501A; identical to SEQ ID NO: 67417
  CDS (1)..(1728)

SEQ ID NO: 93319 - protein, 575 aa, Cryptococcus neoformans var. neoformans B-3501A; identical to SEQ ID NO: 67418

SEQ ID NO: 93320 - DNA, 1401 bp, Acinetobacter sp. ADP1
  CDS (1)..(1401): transl_table=11
atgaaaaaaatgcttttagcgctaagtctatctggtgcgcttttaggtggttcggctgcgtgggcagaaaatgcggcatcagcaccggcaactgaagaaacaacaaccgttgtagctacaacgactgaagcacctgtaactggctcggcagaagcaccttccgccgctactgctacaccagcgccagcagcaacacccaaaatggattcgggtgatacagcatggattctgatttctactgctttagttcttttaatgaccattcctggtttagcacttttttatggtggtatggtacgtaagaaaaacgtattaagcactatggcacatagctttgtcgctgctgcaattgtcagtattgtttgggtggtgattggttataccttggcatttagtactacaggcaatgcctttgttggtggtctggataaaatcatgctgtcgggtattaccacagaggccttgagtggtaccattcctgagattctttttgttattttccaaatgacctttgcgattattactgttgccattattagtggctcggttgctgaacgtatgaagtttggagcctttgttgcatttatcaccatttgggtcatcgtggtgtatgcgccaattacccactgggtatggggtggtggctggttgggtagcgatggcgcacttgactttgctggtggtaccgttgttcatatcaattcgggtgttgctggtctggttgctgcgtatatgctcggtaagcgtattgggctgggtaaagaatcaatggcaccacacaaccttgcactcacagtgattggcgcaagcttgctctgggtaggttggttcggtttcaatggtggttctgcacttgctgcaaatggtgctgcaggctatgccttggtgacgactcaggttgcagcagcagcagcggcaatttcttggggtattgttgagaaaattgttcgcggtaaaacttcattgcttggtcttctttcaggtgcagttgcaggtctggttgtgattacaccggctgcaggctttgttactgtaagtggcgcgttgatcatgggattgattggtggtgtcgtttgcttctggggaatttctggcctaaaacgtatgttgaaagcagacgactcattggatgcatttggtctgcatgccgtaggtggtatggcaggtgcaatcttgacggctgtatttgcaagtccattcatcatgggtgacaaagcgccagcaagtgtgacacatcagctctggattcaaatagaaggtgtattggctacaattgcatatagtgctgtgttgacctttattatcttgaaagtcattgatgtcgtgattggaattcgtgctaactctgatgatgagcgtatgggtctcgatttgagccagcatggcgaacgtgtagaataa

SEQ ID NO: 93321 - protein, 466 aa, Acinetobacter sp. ADP1
MKKMLLALSLSGALLGGSAAWAENAASAPATEETTTVVATTTEAPVTGSAEAPSAATATPAPAATPKMDSGDTAWILISTALVLLMTIPGLALFYGGMVRKKNVLSTMAHSFVAAAIVSIVWVVIGYTLAFSTTGNAFVGGLDKIMLSGITTEALSGTIPEILFVIFQMTFAIITVAIISGSVAERMKFGAFVAFITIWVIVVYAPITHWVWGGGWLGSDGALDFAGGTVVHINSGVAGLVAAYMLGKRIGLGKESMAPHNLALTVIGASLLWVGWFGFNGGSALAANGAAGYALVTTQVAAAAAAISWGIVEKIVRGKTSLLGLLSGAVAGLVVITPAAGFVTVSGALIMGLIGGVVCFWGISGLKRMLKADDSLDAFGLHAVGGMAGAILTAVFASPFIMGDKAPASVTHQLWIQIEGVLATIAYSAVLTFIILKVIDVVIGIRANSDDERMGLDLSQHGERVE

SEQ ID NO: 93322 - DNA, 1233 bp, Bacillus cereus E33L; identical to SEQ ID NO: 67433
  CDS (1)..(1233): transl_table=11

SEQ ID NO: 93323 - protein, 410 aa, Bacillus cereus E33L; identical to SEQ ID NO: 67434

SEQ ID NO: 93324 - DNA, 1338 bp, Pseudomonas fluorescens Pf-5
  CDS (1)..(1338): transl_table=11
atgactctgcgtaaattcgcagggctaggagcccttttgtccctcgtaatgccaggcctggccatggcggcagacgaagcggcggctccagtcctcaactccggcgataccgcctggatgctgacctccacagccctggtgctgttcatgaccattcctggcctggcgctgttctacggcggcatggtgcggtcgaaaaacattctttcggtaatgatgcagtgcttcgccattaccggcctgatcactgtcctgtggttcatctatggctacagcatggcgttcgacaccaccgggatggaagccggcgtggtcaacctcaattccttcgtgggcggcttctccaaggccttcctggcgggcatcaccccggccagcctgaccggcccggctgcgctgttccctgaagcggtgttcgtcaccttccagatgaccttcgccatcatcactccagcgctgatcgtcggtgccttcgccgagcggatgaaattctccgccatgctgatcttcatgggcgtgtggttcaccctggtgtatgcgccgatcgcccatatggtctggagcggtccgggctcgctgctgggcgactggggcgtgctggactttgccggcggcaccgtagtgcacatcaacgccggtatcgcgggcctggtggcctgcctggtgctgggcaagcgcaagggtttcccgaccacgccgatggcgccacacaacctgggttacaccctgatgggcgcagccatgctgtggatcggctggttcggcttcaacgccggttccgccgctgccgccaacggcaccgccggcatggccatgctggtaacgcagatcgcgacggctgccgccgccttgggctggatgtttgccgagtggatcacccacggcaagcctagcgcgctgggcatcgcttcgggtgtggtcgcaggcctggtggcaatcactccggctgccggtaccgttggcccgatgggcgccctgatcatcggtctggcggccggtgtggtgtgcttcttctgcgccaccagcctcaagcgcaagctgggatatgacgattccctggacgcctttggcgtgcacggcatcggcggtattctcggtgcgatcctcaccggtgtgttcgctgctccgtccctgggtggcttcggcaccgtgaccgatgttgccgctcaggtctggatccaggccaagggcgtgggtttcacggtgatctacaccgcgatcgtcaccttcatcatcctcaaggttctggacgcggtcatggggctgcgggtgagcgaggaagaagaggcggtcggcctcgatctggcacaacacaacgagcgtggttacaacctgtaa

SEQ ID NO: 93325 - protein, 445 aa, Pseudomonas fluorescens Pf-5
MTLRKFAGLGALLSLVMPGLAMAADEAAAPVLNSGDTAWMLTSTALVLFMTIPGLALFYGGMVRSKNILSVMMQCFAITGLITVLWFIYGYSMAFDTTGMEAGVVNLNSFVGGFSKAFLAGITPASLTGPAALFPEAVFVTFQMTFAIITPALIVGAFAERMKFSAMLIFMGVWFTLVYAPIAHMVWSGPGSLLGDWGVLDFAGGTVVHINAGIAGLVACLVLGKRKGFPTTPMAPHNLGYTLMGAAMLWIGWFGFNAGSAAAANGTAGMAMLVTQIATAAAALGWMFAEWITHGKPSALGIASGVVAGLVAITPAAGTVGPMGALIIGLAAGVVCFFCATSLKRKLGYDDSLDAFGVHGIGGILGAILTGVFAAPSLGGFGTVTDVAAQVWIQAKGVGFTVIYTAIVTFIILKVLDAVMGLRVSEEEEAVGLDLAQHNERGYNL

SEQ ID NO: 93326 - DNA, 1413 bp, Anabaena variabilis ATCC 29413; identical to SEQ ID NO: 67445
  CDS (1)..(1413): transl_table=11

SEQ ID NO: 93327 - protein, 470 aa, Anabaena variabilis ATCC 29413; identical to SEQ ID NO: 67446

SEQ ID NO: 93328 - DNA, 1338 bp, Pseudomonas fluorescens PfO-1
  CDS (1)..(1338): transl_table=11
atgactctgcgtaaattcgcagggctaggagccctgttgtctatcgtaatgcccggcctggccatggcggcagacgaagtggcagctccagtcctgaactccggcgacaccgcctggatgctcacctccacagccctcgtgctgttcatgaccattcccggcctcgcgctgttctacggcggcatggtccggtcgaaaaacattctttccgtgatgatgcagtgctttgccattaccggtctgatcagcgtcctgtgggtcatttatggctacagcatcgcgttcgacaccaccggcatggagcagggcgtcgtcaacttcaattcgttcgtgggcggtttcggcaaggcgttcctggccggtgtcacgccagcgagcctgaccggcccggcggcgctgttccccgaggcggtcttcatcaccttccagatgaccttcgcgatcatcaccccggcgctgatcgtcggtgcattcgccgagcggatgaagttctccgcgatgctgatcttcatgggcatctggttcaccctggtttatgcaccgatcgcgcacatggtctggtccggcaacggcggcctgatgtgggactggggcgtactcgacttcgcgggcggcaccgtggtgcacatcaacgccggtgtggccggtctgattgcctgcctggtactgggtaaacgcaaaggcttcccgaccacgccgatggcgccacacaatctgggttacaccctgatgggcgcggcgatgctgtgggtcggctggttcggcttcaacgccggttccgctgcggccgccaacggcaccgccggcatggcgatgctggtgacccagatcgcgaccgccgctgctgcactgggctggatgttcgccgagtggatcacccacggcaaacctagcgcactgggtatcgcatccggcgtcgttgcaggtctggtggcgatcactccggccgctggcaccgtgggcccgatgggtgccctggtcatcggtctggcggcaggcgtggtgtgcttcttctgcgccaccaccctgaaacgcaaactcggttatgacgactccctggacgccttcggcgtgcacggtatcggcggtatcctcggcgcgatcctgaccggtgtgttcgccgcaccgtcgctgggtggcttcggcaccgtcaccgacatcgccgcacaagtctggattcagtgcaaaggcgtcggcttcaccgtgatctataccgcgatcgtcaccttcatcatcctcaaggtgctggatgccgtgatgggtctgcgcgtgaccgaggaagaagaatcggtcggcctggatctggcacaacacaacgagcgtggctacaacctgtaa

SEQ ID NO: 93329 - protein, 445 aa, Pseudomonas fluorescens PfO-1
MTLRKFAGLGALLSIVMPGLAMAADEVAAPVLNSGDTAWMLTSTALVLFMTIPGLALFYGGMVRSKNILSVMMQCFAITGLISVLWVIYGYSIAFDTTGMEQGVVNFNSFVGGFGKAFLAGVTPASLTGPAALFPEAVFITFQMTFAIITPALIVGAFAERMKFSAMLIFMGIWFTLVYAPIAHMVWSGNGGLMWDWGVLDFAGGTVVHINAGVAGLIACLVLGKRKGFPTTPMAPHNLGYTLMGAAMLWVGWFGFNAGSAAAANGTAGMAMLVTQIATAAAALGWMFAEWITHGKPSALGIASGVVAGLVAITPAAGTVGPMGALVIGLAAGVVCFFCATTLKRKLGYDDSLDAFGVHGIGGILGAILTGVFAAPSLGGFGTVTDIAAQVWIQCKGVGFTVIYTAIVTFIILKVLDAVMGLRVTEEEESVGLDLAQHNERGYNL

SEQ ID NO: 93330 - DNA, 1515 bp, Burkholderia sp. 383; identical to SEQ ID NO: 67449
  CDS (1)..(1515): transl_table=11

SEQ ID NO: 93331 - protein, 504 aa, Burkholderia sp. 383; identical to SEQ ID NO: 67450

SEQ ID NO: 93332 - DNA, 1296 bp, Rhodospirillum rubrum ATCC 11170
  CDS (1)..(1296): transl_table=11
atgatgagagccttcacgttcctccccgccgccctggtcgcccttctggcgccggccctggcctatgcccaggatgcggcccccaccctggattcgggcaataccgcctggatgctgacctcgaccgcgctggtccttctgatgaccatcccgggcctcgcgcttttctatgccggcatggtccgcaagaagaacgtgctggcgaccatgatgcagagcttcatcatcaccgcgctggtcagcgtcgtgtggatggtggccggctactcgatcgcctttggcaccggcaacgcctatttcggtgacttctcgaagttcctgctgtcggacatcagcattgacagcctgaacggcaccttccccgaaacggtgttcgtcgtcttccagatgaccttcgccatcatcaccccggccctgatcaccggcgccttcgccgaacgcatgaagttctcggcgatgctgtggttcatcggcctgtgggtgctgatcgtctacgcgccgatctgccattgggtgtggagttcctcgggcttcctgttcaacgccggcgtccttgattacgcgggcggcaccgtggttcacatcaacgccggcgtggccggtctggtctgcgccctcgtcttgcgtcgtcgcgccggcttcggcagcgagaacatggccccctataacctgtcgctggccgtgatcggcgccgccctgctgtgggtgggctggttcggcttcaacgccgggtccgccgtcgccgccgatggccgtgccggcatggccatgctggcgacccagcttggcgccgccggtgccaccttgtcgtggatcgccgccgaatggctggtgcgcggcaagcccagcgtgctgggcgcggtttcgggcgccgtcgccggtctggtcgccatcaccccggcctcgggcttcgttctgcccggtggcgccctggtcatcggcctggtggccggcgtcgtctgcttctggggcgcgacttggctgaagaagaccctgggctatgacgacagcctggacgccttcggcgtgcatggcatcggcggtctggtcggcgccctgctgaccggcgtcttcgccgcccagagcgttggtggcgaagccgccgtcggcctgctcgaaggcaatcccggtcaggtcctcacccaggcctggggctgccttgccaccatcgtgtggacggccgtcgcctcctacgtgatcttgaaggtcattgatctggccatcggcctgcgggtttcgcccgagcaggaaagcgaaggcctcgacatctcgctgcacggcgagcgcctgcagtaa

SEQ ID NO: 93333 - protein, 431 aa, Rhodospirillum rubrum ATCC 11170
MMRAFTFLPAALVALLAPALAYAQDAAPTLDSGNTAWMLTSTALVLLMTIPGLALFYAGMVRKKNVLATMMQSFIITALVSVVWMVAGYSIAFGTGNAYFGDFSKFLLSDISIDSLNGTFPETVFVVFQMTFAIITPALITGAFAERMKFSAMLWFIGLWVLIVYAPICHWVWSSSGFLFNAGVLDYAGGTVVHINAGVAGLVCALVLRRRAGFGSENMAPYNLSLAVIGAALLWVGWFGFNAGSAVAADGRAGMAMLATQLGAAGATLSWIAAEWLVRGKPSVLGAVSGAVAGLVAITPASGFVLPGGALVIGLVAGVVCFWGATWLKKTLGYDDSLDAFGVHGIGGLVGALLTGVFAAQSVGGEAAVGLLEGNPGQVLTQAWGCLATIVWTAVASYVILKVIDLAIGLRVSPEQESEGLDISLHGERLQ

SEQ ID NO: 93334 - DNA, 1404 bp, Moorella thermoacetica ATCC 39073; identical to SEQ ID NO: 67457
  CDS (1)..(1404): transl_table=11

SEQ ID NO: 93335 - protein, 467 aa, Moorella thermoacetica ATCC 39073; identical to SEQ ID NO: 67458

SEQ ID NO: 93336 - DNA, 1290 bp, Frankia sp. CcI3; identical to SEQ ID NO: 67463
  CDS (1)..(1290): transl_table=11

SEQ ID NO: 93337 - protein, 429 aa, Frankia sp. CcI3; identical to SEQ ID NO: 67464

SEQ ID NO: 93338 - DNA, 1368 bp, Rhodococcus sp. RHA1
  CDS (1)..(1368): transl_table=11
gtggatttccccactatcggtgcaccggacaccggggacacagcgtggatgctgaccagcgccgcgctcgtgttgctcatgactccgggtcttgcgttcttctacggcggcatggtgcgggccaagagcgtgctgaacatgctcatgatgagcatcagcgcgatgggtgtcgtcggcatcctgtgggttctctacggctactccatggccttcggtgaggacaagggaaaccttgtcggtgatccgttccagtacttcgggctcaaaggactgatcggcgggtcgtacctcgccgagaccgacgatgccggttcggtgatcgccgattccgcgatcccgctcgtcggcaccatccccgcgacggtcttcgtcgcgttccaggccatgttcgcgatcatcaccgtggccctcatctcgggtgccgtggcggatcgcctgcgcttcggttcctggctgctgttcgccggcctctgggcgacggtcgtgtacttccccgtggcgcactgggtcttcgccttcgacggcgtcaccgcagagaccggtggctggatcgccaacaagctcgccgcggtcgacttcgcgggtggtaccgccgtccacatcaacgccggcgccgccggcctcgtcctcgcgatcatcctcggcaagcgcaagggatggccgggcaccccgttccgtccgcacaacctgcccttcgtgatgctcggcgccggcctcctctggttcggctggttcggtttcaacgccggttcggccgtcggttccaacggcatcgccggagcaaccttcatcaccaccgtcatcggaacgtgcgcggccatgctcgcctggctcctggtcgagcggattcgcgacggccacgccaccacactcggtgcggcgtccggaatcgtggccggcctggttgccatcacgccttcctgctcgtcggtgaacgtcctcggcgcgctcgccatcggcgtcgtcgcaggcgcactctgcgcgctcgcggtcggactcaagttccgcttcgggttcgacgactcgctcgacgtcgtcggtgtccacctcgtcggcggcatcgtcggaacgctgatggtcggcctggtcgcaacggctgaggcgcccgcgggtgttgtcggactgttctatggtggaggcctcgaccaactctggcgtcaggcagtgggcgccggagcagtactgctttactcgctcgtcggtacggccgtcgtcgcgttgatcgtgaagttcacgatcggtctgcggctcagcgacgagggtgaatcacttggagtggacgagtcggaacacgcagaaactggctacgatttcgccgctctcggcggaaactcggcgactgctcgtgtatccggcaaggagggatga

SEQ ID NO: 93339 - protein, 455 aa, Rhodococcus sp. RHA1
MDFPTIGAPDTGDTAWMLTSAALVLLMTPGLAFFYGGMVRAKSVLNMLMMSISAMGVVGILWVLYGYSMAFGEDKGNLVGDPFQYFGLKGLIGGSYLAETDDAGSVIADSAIPLVGTIPATVFVAFQAMFAIITVALISGAVADRLRFGSWLLFAGLWATVVYFPVAHWVFAFDGVTAETGGWIANKLAAVDFAGGTAVHINAGAAGLVLAIILGKRKGWPGTPFRPHNLPFVMLGAGLLWFGWFGFNAGSAVGSNGIAGATFITTVIGTCAAMLAWLLVERIRDGHATTLGAASGIVAGLVAITPSCSSVNVLGALAIGVVAGALCALAVGLKFRFGFDDSLDVVGVHLVGGIVGTLMVGLVATAEAPAGVVGLFYGGGLDQLWRQAVGAGAVLLYSLVGTAVVALIVKFTIGLRLSDEGESLGVDESEHAETGYDFAALGGNSATARVSGKEG

SEQ ID NO: 93340 - DNA, 1311 bp, Magnetococcus sp. MC-1
  CDS (1)..(1311): transl_table=11
atgaaatccatcaaacgaaccctgctgccagccgccgctttggctatgggcagcattctgcccgctaccgcttgggccgaagatactttagacagtggtaacaccgcttggatgttgacctccaccgcgttggtcttgttcatgaccctgcccggtctggcgctgttctatgcgggcatggtgcgttccaaaaacgtgctgtcggtgctgatgcagtgtttcgccattgctggcgtcatgtccattttgtgggcgatttatggttactccctggccttctccagcgcggcggatgcaggcgtcaaccaattcattggtggcatgggcgactttttcttaaagtcggttaaggcggactccctaagcggctccatccccacctcggtctttgttacctttcagatgaccttcttcatcatcacccctgcgctgattgtgggtggttttgccgagcgcatgaagttctcctccatgctggttttcatggccctatggggaaccatcgtctacctgcccatctgccacgcggtctggggtggtggtttcatggctgaagatggcgtgctcgatttcgcgggtggtaccgtggtgcacatcaatgcgggtgtggctggcttggttgctgccctggtactgggtaagcgtcgtggctaccccaccaccgccatgcccccccacaacctgagcctgaccgtaaccggtgccgccatgttgtgggtgggttggttcggctttaacgccggttctgagttggctgccgatggtactgctggcatggcgatgttggtcacccaactggccgccgccaccgccgctatcgtgtggatggcgctggagtggatgaaacacggcaaaccctctgtgctgggcattgccaccggtgcggttgctggcctggttgccatcacccctgcttctggtacggctggccccatgggcggcatcctgatcggtctggccgctggcttctttgccttcatcggtgccacctccatcaaacgcgccctgggctacgatgactcgctggacgcctttggtgtgcatggtatcgccggtatcgttggcgccattctgaccggtgtgttcgccgatgcctccttgggcggctctggcttagcagaaggcaagaccatcatgagtcaggttgcggtgcaaacgaccagcgttggctacaccatcgtctactgtgcggttgcgaccttcattatcctcaaggtactggatgtgatcatggggctgcgtgtggatgacgaagccgaagagatgggcttggatctcgccgaacacgacgagcgtggctacaatatctaa

SEQ ID NO: 93341 - protein, 436 aa, Magnetococcus sp. MC-1
MKSIKRTLLPAAALAMGSILPATAWAEDTLDSGNTAWMLTSTALVLFMTLPGLALFYAGMVRSKNVLSVLMQCFAIAGVMSILWAIYGYSLAFSSAADAGVNQFIGGMGDFFLKSVKADSLSGSIPTSVFVTFQMTFFIITPALIVGGFAERMKFSSMLVFMALWGTIVYLPICHAVWGGGFMAEDGVLDFAGGTVVHINAGVAGLVAALVLGKRRGYPTTAMPPHNLSLTVTGAAMLWVGWFGFNAGSELAADGTAGMAMLVTQLAAATAAIVWMALEWMKHGKPSVLGIATGAVAGLVAITPASGTAGPMGGILIGLAAGFFAFIGATSIKRALGYDDSLDAFGVHGIAGIVGAILTGVFADASLGGSGLAEGKTIMSQVAVQTTSVGYTIVYCAVATFIILKVLDVIMGLRVDDEAEEMGLDLAEHDERGYNI

SEQ ID NO: 93342 - DNA, 1305 bp, Pseudomonas putida GB-1; identical to SEQ ID NO: 67503
  CDS (1)..(1305): transl_table=11

SEQ ID NO: 93343 - protein, 434 aa, Pseudomonas putida GB-1; identical to SEQ ID NO: 67504

SEQ ID NO: 93344 - DNA, 1332 bp, Pseudomonas putida GB-1; identical to SEQ ID NO: 67505
  CDS (1)..(1332): transl_table=11

SEQ ID NO: 93345 - protein, 443 aa, Pseudomonas putida GB-1; identical to SEQ ID NO: 67506

SEQ ID NO: 93346 - DNA, 1401 bp, Gibberella fujikuroi; identical to SEQ ID NO: 67509
  CDS (1)..(1401)

SEQ ID NO: 93347 - protein, 466 aa, Gibberella fujikuroi; identical to SEQ ID NO: 67510

SEQ ID NO: 93348 - DNA, 1551 bp, Cenarchaeum symbiosum
  CDS (1)..(1551): transl_table=11
atggagagcatcagcaagcgtgcactgatcctggcggcggccgttgccattgcagccacgggcgcaatgtcgacggcatactcgcagaccatggaagacgacgcagacgggtatgataatcgcggactctacaccggcaaccccaatgaatgctgggtggatgacggcgagggcgagttcacagcctgctacatagacagcggggatacctcgtttatgattatcgcaacagccttggtgctgttcatgacgccaggtgttgcgttcttttacggcgggatggcccgctcaaagaatgtcgtcaacgtgatcggcatgaccctgatagtaatgggcgcaatatcatggcagtgggtcgcgtgggggtactcgctctcgtttgggcccggggacagcgactggaacatgttcgcgggctcgctggactatgcgggctttaaccaggtgtcatactttgcgccgctgggcagcccgatagaatgccaggataccgcatcgaacgaatacctcatgcaggagataaagtcgggggttgcctgcagcgatacatggccgggaacaataccccatgcgctctttgcggcattccagggcacgtttgcgataatcacgccagctctcatagtgggcggcctgatcgacaggatgaagtttagcgcgctgatcatctttgtgctcctctgggccacgttcgtctatgatcctgtcgcacactggatctggggcggcgggtttgtaagcgcgggatcgctggacatagatccggacctctcgccgtcgttcgcgcttgactttgcaggcggcattgtggtgcacgttacatcgggattttcagcgctggcggcagcgctggtgctaggtaggaggataggatacggcaaggtgccaatggatccgcacaacgttcccatgatggtcctcggagtgaccatactctggttcggctggaccggctttaacgcgggaagcgaggtgatggccgacggggtggccgtaagggcgatggtggtgaccaaccttgctgcaggcgtgggaacagtcacatggatgctgctaagctgggcccacacgggcaagccgagcatagtgggcgccgcaaccggtacaatcgcagggctggggacgatcacgcccgcggccggttgggtgggcccgatggccgcaataataataggaatagctgcagcttctgtctgctatgcatgtgtcgccttcaagaacgcgcacaaatgggatgacgcgctcgatgtatggggggtgcacggcatgggcggcattacgggcagcgtgctagtcggcacgcttgcaagccccgacaactgggatacggggggaattggcgcatggactggcacgcccgaaggctttgagcagcagggcatcaatataatggcggcagggatcgtggcaggatactcgtttggcatgacagtagtgatactaaaaatcatggacaaggtatggcccggcgggataagggtgactgccaaggaagaggagatgggcctcgatcttgcccagcacggcgaactggcgtatacaaacgagtaa

SEQ ID NO: 93349 - protein, 516 aa, Cenarchaeum symbiosum
MESISKRALILAAAVAIAATGAMSTAYSQTMEDDADGYDNRGLYTGNPNECWVDDGEGEFTACYIDSGDTSFMIIATALVLFMTPGVAFFYGGMARSKNVVNVIGMTLIVMGAISWQWVAWGYSLSFGPGDSDWNMFAGSLDYAGFNQVSYFAPLGSPIECQDTASNEYLMQEIKSGVACSDTWPGTIPHALFAAFQGTFAIITPALIVGGLIDRMKFSALIIFVLLWATFVYDPVAHWIWGGGFVSAGSLDIDPDLSPSFALDFAGGIVVHVTSGFSALAAALVLGRRIGYGKVPMDPHNVPMMVLGVTILWFGWTGFNAGSEVMADGVAVRAMVVTNLAAGVGTVTWMLLSWAHTGKPSIVGAATGTIAGLGTITPAAGWVGPMAAIIIGIAAASVCYACVAFKNAHKWDDALDVWGVHGMGGITGSVLVGTLASPDNWDTGGIGAWTGTPEGFEQQGINIMAAGIVAGYSFGMTVVILKIMDKVWPGGIRVTAKEEEMGLDLAQHGELAYTNE

SEQ ID NO: 93350 - DNA, 1386 bp, Gibberella fujikuroi; identical to SEQ ID NO: 67511
  CDS (1)..(1386)

SEQ ID NO: 93351 - protein, 461 aa, Gibberella fujikuroi; identical to SEQ ID NO: 67512

SEQ ID NO: 93352 - DNA, 1542 bp, Gibberella fujikuroi; identical to SEQ ID NO: 67513
  CDS (1)..(1542)

SEQ ID NO: 93353 - protein, 513 aa, Gibberella fujikuroi; identical to SEQ ID NO: 67514

SEQ ID NO: 93354 - DNA, 1654 bp, Glomus intraradices
  CDS (143)..(1582)
acgcggggaaccaaaaaataaataattatttggtccattaattaaaaaaaaaattatacctttattatttattacttttgaaaaataatttactctcttacgataaatcaaattttttcattctccctccttttaagataaaatgtctgctcccgctgctgctcctgctgcagaacctaatccattcgatggtgttaatataacagaactcattgcaaatgtgtcagcattgtcttcagttaacgatattgatcaaggacatacagcatggattatgatgtcaactgctttggtatttattatgattccaggtgtcggatacttttacagtggtatggctagaagtaaaaatgcattatcccttataatgttaagtgttttatccttggctgtagtatcaattcagtggtgggctatcggtttcagtttagcattcggcccaggcacaagtggttatatcggaaacttaaattatgctttctttatgggtgtcggtactgaacctcttaatggtgctgtaaaaattccaggaatagtttttgccatgtatcagtgtatgtttgctgctattacacccgcacttgccatcgggtctgcagctgaacgtggtagaattttcccaagcatagtcttcatttttatttggtcaactattgtatatgatccaattgcttactggacatggaatcttaatggttggtccgcaaaaatgggtggtctcgatttcgctggtggtactcccgtacacatttcttctggtgctgctgctcttgcttactgtttaatcttgggtaaaagaactagtcatggaactgatgaatttaaacctcataatattgctaatgttgtacttggaaccgttttactttggttcggttggtttggtttcaacggtggttcagctcttaattctacttctcgtgctgctatggctatcgctgtaaccaatttatcagctgctgttggtggtcttacttggtgtttattggattatcgacttgaaaagaaattgtcagctctagctttctgttccggtgctgttgcaggacttgttgctatcaccccaggttctggttatgttggtaccccagctgctgttgcttttggtttcattgctggaatttgttgtaatttggccgttaaattgaagcacatctttgattttgatgacgctttggatgttttcgctgttcatggagtcggtggtgttattggtaatattttaactgctatttttgctgaacagaaaattgttgcccttgacgaaactgttttacctggaggttggcttaatcaacattggatacaaatgggtcatcaactcgctgattcagttactggtgtagcttattcatttgttgttacatatttaatcttatttattatggataaaattcccggactttcactcagagctgatcctgaatctgaagctaaaggtttagatgaaactgaattaggagaattggcttattatcatgtcgatagacttgtagcagtaaatacacgaaccggtgagacaaaacccgtaaaagaagaaacaattccccaacaaaatgacgcaaatgcaacaattgtataaaacgaatgaaaattttttatttcccattatcatttttttaattcccaaaaaaaaaaaaaaaaaaaaaaaaaa

SEQ ID NO: 93355 - protein, 479 aa, Glomus intraradices; identical to SEQ ID NO: 67516

SEQ ID NO: 93356 - DNA, 1440 bp, Oryza sativa subsp
  CDS (1)..(1440)
atgtcgtcgtcggcgacggtggtgccgctggcgtaccaggggaacacgtcggcgtcggtggcggactggctgaacaagggggacaacgcgtggcagctggtggcggcgacgctggtggggctgcagagcgtgccgggcttggtggtgctgtacggcggcgtggtgaagaagaagtgggcggtgaactcggcgttcatggcgctctacgccttcgccgccgtgtggatctgctgggtcacctgggcgtacaacatgtcgttcggggagaagctcctcccgatctgggggaaggcgcggccggcgctggaccagggcctcctcgtcggccgcgccgcgctgccggcgacggtccactaccgcgccgacggcagcgtggagacggcggcggtggagccgctgtacccgatggcgacggtggtgtacttccagtgcgtgttcgccgccatcaccctcatcctcgtcgccggctccctcctcggccgcatgagcttcctcgcctggatgatcttcgtcccgctctggctcaccttctcctacaccgtcggcgccttctccctctggggcggcggcttcctcttccactggggcgtcatcgactactgcggcggctacgtcatccacgtctccgccggcatcgccggcttcaccgccgcttactgggtggggccaagggcgcagaaggacagggagaggttcccgccgaacaatatactgttcacgctgacgggggcagggctgctgtggatggggtgggcagggttcaacggcggcggtccgtacgccgccaactccgtcgcctctatggccgtcctcaacaccaacatctgcaccgccatgagcctcatcgtctggacatgcctcgacgtcatcttcttcaagaagccctccgtcgtcggcgccgtccagggcatgatcaccggcctcgtttgcatcacccccgctgcaggggtggtgcaggggtgggcggcgctggtgatgggggtgctcgccggcagcatcccgtggtacaccatgatgatcctccacaagcgctccaagatcctgcagcgcgtcgacgacaccctcggcgtcttccacacccacggcgtcgccggcctcctcggcggcctcctcaccggcctcttcgccgagcccaccctctgcaacctcttcctccccgtcgccgactcccggggcgccttctacggcggcgccggcggcgcccagttcggcaagcagatcgccggcggcctcttcgtcgtcgcctggaacgtcgtcgtcacctccctcatctgcctcgccatcaacctcctcgtcccgctccgcatgcccgacgacaagctcgaggtcggcgacgacgccgtccacggcgaggaggcctacgcgctctggggcgacggcgagatgtacgacgtcaccaagcacggctccgacgccgccgttgcccccgtcgtcgtatga

SEQ ID NO: 93357 - protein, 479 aa, Oryza sativa subsp
MSSSATVVPLAYQGNTSASVADWLNKGDNAWQLVAATLVGLQSVPGLVVLYGGVVKKKWAVNSAFMALYAFAAVWICWVTWAYNMSFGEKLLPIWGKARPALDQGLLVGRAALPATVHYRADGSVETAAVEPLYPMATVVYFQCVFAAITLILVAGSLLGRMSFLAWMIFVPLWLTFSYTVGAFSLWGGGFLFHWGVIDYCGGYVIHVSAGIAGFTAAYWVGPRAQKDRERFPPNNILFTLTGAGLLWMGWAGFNGGGPYAANSVASMAVLNTNICTAMSLIVWTCLDVIFFKKPSVVGAVQGMITGLVCITPAAGVVQGWAALVMGVLAGSIPWYTMMILHKRSKILQRVDDTLGVFHTHGVAGLLGGLLTGLFAEPTLCNLFLPVADSRGAFYGGAGGAQFGKQIAGGLFVVAWNVVVTSLICLAINLLVPLRMPDDKLEVGDDAVHGEEAYALWGDGEMYDVTKHGSDAAVAPVVV

SEQ ID NO: 93358 - DNA, 1377 bp, Oryza sativa subsp
  CDS (1)..(1377)
atggcgtcggtggcggtgccggagtggctgaacaagggcgacaacgcctggcagatgctctccgccacgctcgtcgccctgcagggcttccccggtctcgccctcttctacgccggcgccgtcacccgcaagtgcgcgctcacctccgcattcatggcgctctacgccatggccgccaccatgccgtgctgggcgctctgggcgcacaacatggccttcggccaccgcctcctgcccttcgtcagccgccccgccccggcgctcgcccaggactacatgctcacccaggcgctgctcccctccaccctccacctccactccaacggcgaggtggagacggccgcggtggcgccgctgtacccgtcggcgagcatggtgttcttccagtgggccttcgccggcgtcaccgtggggctggtcgccggcgccgtgctcgggcgcatgagcgtcaaggcgtggatggcgttcgtgccgctgtggacgacgctgtcctatacggtgggagcgtacagcatttggggcgggggcttcctcttccactggggcgtcatggactactccggcggctacgtcgttcacctcgccgccggcgtctccggctacacggccgcgtactgggtgggaccaaggaggaaggaggaggaggaaatgacaatggcgggtggtggcaacctggtggcgatggtggccggcgcgggcatcctgtggatggggtggaccggcttcaacggcggcgaccccttctccgccaacaccgactcgtcggtggcggtgctcaacacgcacatctgcgccaccaccagcatcctcgcttgggtttgctgcgacatcgccgtccgcgggaggccgtcggtggtgggcgcggtgcagggcatgatcaccggcctggtgtgcataactccggcggcagggctggtgcaggggtgggcagctctgctaatgggcgtcgcgtcggggacactgccatgctacaccatgaacgccgccatgtcgttcaaggtagacgacacgctgggcatcctgcacacccacgcggtgtccggtgttctgggcggcgtcctcaccggcgttttcgcgcaccctactctctgtgacatgttccttccggtgaccggctcaaggggcctcgtctacggcgtccgcgccggcggggtgcaggtgttgaagcaggtcgccgccgcattgttcgttgccgcatggaacgtggccgccacgtccatcatcttggtcgtcgtcagggcgttcgtgccgctgaggatgacggaagatgagctgctcgccggagacattgccgtacatggggaacaagcttattatttttcgagtggcaccaattgtagtttaagccatgagaccattgaggtcggaaattcataa

SEQ ID NO: 93359 - protein, 458 aa, Oryza sativa subsp
MASVAVPEWLNKGDNAWQMLSATLVALQGFPGLALFYAGAVTRKCALTSAFMALYAMAATMPCWALWAHNMAFGHRLLPFVSRPAPALAQDYMLTQALLPSTLHLHSNGEVETAAVAPLYPSASMVFFQWAFAGVTVGLVAGAVLGRMSVKAWMAFVPLWTTLSYTVGAYSIWGGGFLFHWGVMDYSGGYVVHLAAGVSGYTAAYWVGPRRKEEEEMTMAGGGNLVAMVAGAGILWMGWTGFNGGDPFSANTDSSVAVLNTHICATTSILAWVCCDIAVRGRPSVVGAVQGMITGLVCITPAAGLVQGWAALLMGVASGTLPCYTMNAAMSFKVDDTLGILHTHAVSGVLGGVLTGVFAHPTLCDMFLPVTGSRGLVYGVRAGGVQVLKQVAAALFVAAWNVAATSIILVVVRAFVPLRMTEDELLAGDIAVHGEQAYYFSSGTNCSLSHETIEVGNS

SEQ ID NO: 93360 - DNA, 1311 bp, Azotobacter vinelandii; identical to SEQ ID NO: 67523
  CDS (1)..(1311): transl_table=11

SEQ ID NO: 93361 - protein, 436 aa, Azotobacter vinelandii; identical to SEQ ID NO: 67524

SEQ ID NO: 93362 - DNA, 1943 bp, Azospirillum brasilense
  CDS (346)..(1662): transl_table=11
  misc_feature (1792)..(1792): s is g or c
gggcgcatcattgtgcataaaaaacaggcaagcgcgcgggaaacgagcgtgcagcgcccgaaccggaccagcaatcggcccacaatccatgggcgaatcacgctgtattgcgggggggtggatgggccgagtttctgcttattttctgggcaatgcagtccggcgactcgggtcctatgctgctttgcggtcatccgaaaggccgcaaccaccgcgattcctagcccttttgggttggcacgcttcttgaagacaaatcggcgtacacggccccctcccgccgccccgtctgtaccggggacggggcgaaacgggccagaagcattcgaataaagaggagcctcgatgagccgtctcttcaccctcgccgcgccgacgatggcggcgattctgggcttggccggtctgcctgccgccgccctcgcccaggaaagcgccgccgccgcggccgaacccaccctgagcagcggcgacacggcttggatgctggtcgccacggcgctggttctgttcatgaccatcccgggtctggctctgttctacggcggcatggtccgcaagatgaacgtgctgtcggtcgtgatgcagagctttgcgatctgctgcctggtcagcatcctgtggttcttcgccggttacagcatcgcctttaccgaaggcaccccgtatttcggcagcctgtccaagttcatgctggccggcatcaccaaggacagcctgacgggcgtcattcccgagacgatcttcgtcgtctttcagatgaccttcgccatcatcaccccggccctgatcaccggcgccttcgccgaccgcatgaagttctcctcgatgctggtcttcacgggcctgtggtcgctgatcgtctacgcgccgatcacccactgggtctggggtccgggcggctatctggcgggtgacggcgtgctcgactacgccggcggcaccgtggtgcacatcaacgcgggcgtggccggtctggtcgccgccatcgtgctgggcaagcgcaagggctatccgaacgagaacttcgctccgcacaacctggtgctcagcctgatcggcgcctcgatgctgtgggtcggctggttcggcttcaacgcgggttccgccgtggccgccgacggccgtgcgggcatggccatgctggtcacgcagatcgccgccgccaccgccgccatgtcctggctgctggtcgagtgggccaccaagggcaagggttcggttctcggcatcatctccggcgccatcgccggtctggtcgccatcaccccggcctcgggcttcgtcggtccgaccggcgccctggtcatcggtctggccgccggcgtgatctgctactggggcgccaccggcctgaagcgcgccctcggctatgacgactcgctggacgccttcggggtgcacggcgtgggcggcatcgtcggcgccatcctgaccggcgtcttcgcccaggaagccatcggcggcaccgccggcgccctggaaggcaacgtcggccagatctggacgcaggtctacggcattctcgccaccatcgtctactcggcggtcggctccttcatcatcctgaaggtcatcgacgtggtgatgggcctgcgcgtcgacgaggacgtcgagcgcgacggcctggacctcgccctgcacggcgagaccatccactaagcacccttgctgcctggttgtttcctccatgaacttccgccgccgggtcgcccggcgggaatttttcattttggagaccgtggacggttcagcggcgcagatacatcttgccgacgccgttcagcgccgsgaaaagctgcgcgaattgtgccaggaaggcgtcccaggccagcggccggcctttcccgtcaccgcttggtggatggcgcccaggctggcccgcccgtccacccgcgccaggatcggcccggccagacggggcaggggcagggggacgacgg

SEQ ID NO: 93363 - protein, 438 aa, Azospirillum brasilense; identical to SEQ ID NO: 67526

SEQ ID NO: 93364 - DNA, 1365 bp, Ostreococcus tauri; identical to SEQ ID NO: 67527
  CDS (1)..(1365)

SEQ ID NO: 93365 - protein, 454 aa, Ostreococcus tauri; identical to SEQ ID NO: 67528

SEQ ID NO: 93366 - DNA, 1530 bp, Phaeosphaeria nodorum
  CDS (1)..(1530)
atggagccctcatcgaacggagcggatcctacgctcccgcttcaagcgtacaatggcacaggtgcggccggaggcgactcaagagtcgacaatcttaatgtctactacaaccccggtgacatcgcttggatgatcacagcaacagctctcgtgcttctcatgattccaggtgtggggttcttctactctggacttgcacgaagaaagtccgcgctatcgctactatggctttctgtcatgtcgacggcagtcgtctccttccaatggttcttctggggctactcactagcattctcacacaaggctggaaagtatatcggtgcgcttgataacttcggatacatgaatgtgcttggcgctccttcaattggcagcccacgtattcccgacctgatgtttgccgtctaccagggcatgtttgcagccatcacagtcgcgctcgccgttggtgcagtcgcagaacgcggtaggatgctcccctgcatcatctacatgttcgtctggaccaccatcatctacgaccccatcgcctgctggacctggaactcctctggctgggtataccgcatgggcggtctcgacttcgccggcggcacccccgtgcatattgcctccggatgcgccgcgctcgcatactcatacatgctcgggaagcgcagcggccacggaacccaggaactcaactatcgcccccacaacgtgacgcacatcgtcattggcacggtctttctctgggtcggctggtttggcttcaacgctggctccgcactgtctgccaacctccgggccgtcatggctgccgtgtgcaccaatcttgccgcatgtgttggcggcatcacctggtgtctcgtcgactaccgcctcgagcgcaaatggtcaacagtcggcttctgctccggcgtcatcgccggcctagtcgccatcacgcctggctctggctacgtacccgcatgggcagccgtcatcttcggtgtctgtggcggcatcgcgtgcaactacgccaccaagctcaagtacttcctccgctgcgacgacgcgctggatattttcgcagtgcacggtgtcggcggcttcgtaggcaacatcctcaccgccttcttcgcggcggattacattgcgcatttggacggatacacggtcattcctggtggctggctcaaccacaactggatccagctcgggtaccaactcgccgactccttcaccggcggcgcttactctttcgtcggaacgtgcataatcctcggcgcattggatttcatcggcaagttcgtgcctgtgtttaggctgcgcgcaagcgaggaggaagaggcgctgggtattgacgatgtggagattggagagtttgcttacgattacgtcgagctcacgcgcgaagtcaaaatcccagacgacgacgaagacgtcgatgaaggcatgtcgacgcactccctgcacgaccatccggcgtccatgggcacgcatcatgagaagaatcaggagtcgattgactcggcgaatcagcttgctgagtgggcgcatcgcgcgtag

SEQ ID NO: 93367 - protein, 509 aa, Phaeosphaeria nodorum
MEPSSNGADPTLPLQAYNGTGAAGGDSRVDNLNVYYNPGDIAWMITATALVLLMIPGVGFFYSGLARRKSALSLLWLSVMSTAVVSFQWFFWGYSLAFSHKAGKYIGALDNFGYMNVLGAPSIGSPRIPDLMFAVYQGMFAAITVALAVGAVAERGRMLPCIIYMFVWTTIIYDPIACWTWNSSGWVYRMGGLDFAGGTPVHIASGCAALAYSYMLGKRSGHGTQELNYRPHNVTHIVIGTVFLWVGWFGFNAGSALSANLRAVMAAVCTNLAACVGGITWCLVDYRLERKWSTVGFCSGVIAGLVAITPGSGYVPAWAAVIFGVCGGIACNYATKLKYFLRCDDALDIFAVHGVGGFVGNILTAFFAADYIAHLDGYTVIPGGWLNHNWIQLGYQLADSFTGGAYSFVGTCIILGALDFIGKFVPVFRLRASEEEEALGIDDVEIGEFAYDYVELTREVKIPDDDEDVDEGMSTHSLHDHPASMGTHHEKNQESIDSANQLAEWAHRA

SEQ ID NO: 93368 - DNA, 1476 bp, Phaeosphaeria nodorum
  CDS (1)..(1476)
atggcgacattaccagctcccactccaattgtggagtggccggactacaaccttcagccaaatggaggagatgttatgacgacagatttgaatgcactctatgacaaaggcgacctttgctggatgttggtcagcacgattctatgctggcaaattactccagctattggctttctctacgccggcatgcaccgaagaaaagctgcactcaccatgatattccagtcgcttttctgcgcatgtgccgtgggcatccagttctgggtgtacggatactcactctatcaatctcacactactggccctttcattggcgatctgtccaaagctggtcttcacaatacgcttggttatccttcgctcgcaaactctgacatccccgacatcctatacgcctgcttcggctttacattcgtgacatgtacggcaatgattctcgccggagccatgcttgagcgcggccgcatgtggccttcgatgctatttttactttgctggacgacattcgtttattatgttctagcatatgccgaatggaatccaagtggctggctgttcaagctcggagtctatgattttgctggctcaggaccagttcatatcgcatcgggcttctcagcattggcttgggcggtcatgttaggcccaagagctgatccgcacaaagaatcgcatcatcccaggataccacattttaggccccataacccttttcttgtgggtcttggtacgatcttgatctggtttggctggtatgcgttcaatggtgcttccactgccaatatctccatccgctcaatctacgtcgtatgcaacaccaaccttgcggcctgtggcggcggcatggcctgggctcttcttgaatacgcgcacagtggaaagttctcaatcatcggtttctgctccggaatcatctcaggtctagttggaattacgccggctgccggcttcgtaccgatttacgtcgcgtcgctcgtcggagccttgacctcttgctgctcctacttcacggtcaagtacaagtacctacttcgtatcgatgagggtctcgatatcttcgccatccacggtgttggcggcttcgttggcgacatcctgactggattcttcgctgctgactacgtaccagccatggacggcgtgacaaatacgtatgaaggtggatggtggaatcgcaactggaagcagatgggctaccaattagctgctgcttgtacatgcgctgcatggtcatttgtaatttccatcatactgctcttcattatcaacaggatcccgggatgccacatcagggcgtctgaagacgatgagcttagaggattggactacaagtacttccacgacgttgagggcgatatgatggtcttggatgggtatggcgcgtcaaccccaggaatgaccaggtctggtgttgtgagcaatgctcccagtcacgagggtgttgaagttcctatttcgtctgagaagcgagattaa

SEQ ID NO: 93369 - protein, 491 aa, Phaeosphaeria nodorum
MATLPAPTPIVEWPDYNLQPNGGDVMTTDLNALYDKGDLCWMLVSTILCWQITPAIGFLYAGMHRRKAALTMIFQSLFCACAVGIQFWVYGYSLYQSHTTGPFIGDLSKAGLHNTLGYPSLANSDIPDILYACFGFTFVTCTAMILAGAMLERGRMWPSMLFLLCWTTFVYYVLAYAEWNPSGWLFKLGVYDFAGSGPVHIASGFSALAWAVMLGPRADPHKESHHPRIPHFRPHNPFLVGLGTILIWFGWYAFNGASTANISIRSIYVVCNTNLAACGGGMAWALLEYAHSGKFSIIGFCSGIISGLVGITPAAGFVPIYVASLVGALTSCCSYFTVKYKYLLRIDEGLDIFAIHGVGGFVGDILTGFFAADYVPAMDGVTNTYEGGWWNRNWKQMGYQLAAACTCAAWSFVISIILLFIINRIPGCHIRASEDDELRGLDYKYFHDVEGDMMVLDGYGASTPGMTRSGVVSNAPSHEGVEVPISSEKRD

SEQ ID NO: 93370 - DNA, 1560 bp, Phaeosphaeria nodorum
  CDS (1)..(1560)
atgtcctacgcgtggattggcccaccggcccagttcaatggcaccgaccccgtcacaggcggtgactctagaaccgaaaacttaaaccagtggtacgatgctggtgatcaggcctttatcatcgtggcttcggctatggtgttggtcatggtcccaggtctagcgttcctctactctggtcttgcgcgcagaaagtccgccctctccctgatctgggcctgcatgttctccgcctcggtcatcacattccaatggtacttctggggatactcgctcgccttcggcccaagcacaaatggcttcattggcaacctcgacaagtttggtctcaagggcgtgcttggtgcaccaagccaaggctctccattgattcccgagcttctctacgcattttaccagatgcaattctgctccgttactgctgccattgtcgtcggctgtgttgctgaacgcggtcgtctgattcctatgatggtcttcatttggctctgggccacaatcgtatactgccctgtcgcatactgggcgtggaacgcaaacggctggttcttcttgtggggtggactcgactacgctggtggcggccctgtcgagatcgtttctggatgcaccgccttggcctactcgatgatcctcggacgtcgccaggagaagatgatgctcaacttccgtcctcacaacgtctctctgatcaccctcggcaccgttttcctatggttcggctggttgggcttcaacggtggctctgctttcggtgccaacctccgcgctgtcatggcctgctggaacagcaacttgactgccatgttcgccgcgatgacctgggttcttctcgattggcgcctggcgcgcaagtggtccatggtcggatggtgctcaggtgtcatctctggactcgtcgctgccactcccgcttctggtttcatcccaccgtgggctagcgttgttctcggcatcaccaccggtgtagttgctaactttgctaccaagatcaagttctggatcaggatcgacgattctctcgatgtgttcgctgagcacggtgtcgctggaatggttggactcttctttaacggcctcttcggtgccgactacatcattggacttgacggagtcaacgctggtcttgagggcggtgccatcactggtactcccgctgccatctacaagcaaatcgcctacatcgccgccgtcaccgcctactcgttcgtcgtcagcgccctccttgcattcgccattgacaagattcctggtctcaagctccgtgcttccgaagaggctgagcttctaggtatggatgacgaccagctcggcgagtttgcatacgactacgttgaggttcgccgtgactacctcgcatggactcctgctaagggggagcccatcgatggcgagcactccgttccccaaggggaccgccacggcatcccacaacacagccaaatgctcgagggcaaggcaccaagtgacaacgactctggacacgagcacactggtattggaggagaccgtcacgcagttgcaatgggcgcggagcacgagaagcaggtccacacctag

SEQ ID NO: 93371 - protein, 519 aa, Phaeosphaeria nodorum
MSYAWIGPPAQFNGTDPVTGGDSRTENLNQWYDAGDQAFIIVASAMVLVMVPGLAFLYSGLARRKSALSLIWACMFSASVITFQWYFWGYSLAFGPSTNGFIGNLDKFGLKGVLGAPSQGSPLIPELLYAFYQMQFCSVTAAIVVGCVAERGRLIPMMVFIWLWATIVYCPVAYWAWNANGWFFLWGGLDYAGGGPVEIVSGCTALAYSMILGRRQEKMMLNFRPHNVSLITLGTVFLWFGWLGFNGGSAFGANLRAVMACWNSNLTAMFAAMTWVLLDWRLARKWSMVGWCSGVISGLVAATPASGFIPPWASVVLGITTGVVANFATKIKFWIRIDDSLDVFAEHGVAGMVGLFFNGLFGADYIIGLDGVNAGLEGGAITGTPAAIYKQIAYIAAVTAYSFVVSALLAFAIDKIPGLKLRASEEAELLGMDDDQLGEFAYDYVEVRRDYLAWTPAKGEPIDGEHSVPQGDRHGIPQHSQMLEGKAPSDNDSGHEHTGIGGDRHAVAMGAEHEKQVHT

SEQ ID NO: 93372 - DNA, 1533 bp, Aedes aegypti
  CDS (1)..(1533)
atggctaacgccacagaagcacctgtaatcctgatcgattacatgacagtgaactctacagtgcatattcctgcgcaatacgatgtaacaatcgcagacgcagcgtatatcgttacgcattcgttaatccttatcactatgcaaactggatttgccctcgtcaacgccggaacagtaggagttcgtaacagtgttaacatgatgatgaagaatacagtggacacagctattggtggttttgcgttttggctggttggtttcggtttggcctacggaagaagtgcttactccaactttttgtttggctggggagatttcttcgtggatgttgcaaaaactgaccccctgatgggtggtgtgatgactgcgttcatgtacgaaatttcattttcgtcatcttccacaaccattgccagcggtggaatggctgaacggttcaacttccgggcatactgcttcttcgccttcttcaattcaataatgtacgccttctgcgctggttgggtatggcgtgagaacggattcctcagcgtcttgggtgctgtagacattgccggaggcggtccagtgcacatgttaggaggtgtatgctcgttcgcagccgcagtattcctcggaccacgtattggtcgattcgataagggaagccgtcatcttccgatgggaaatgtgttgattgctttcttgggcctgttcattctttggtgggcgtggctttccttcaacacggccagcagctttggactcagccgtggtcgatggggttacacgattcgtgcagccgttatgacaatgttgggatcgatgggaggtggagtggtagcttgcagttactctttgattgaaaacaaaggcaaagctcaacctttccaaattatgaacggagttcttgcttcactcgtatccgtaactggaggatgctatctgtttgaatcgtggtcagctgtacttattggagcaatcggatcattgatgtgtttgctgagcatgaagctgatggacaaattcaaaattgatgatcctctgtacgcgtgtaccgtccacggagttggaggtgcctggtctttgatctctattggcctgtttgccatgaatccagaacctctgtctactactggaggaagatcgggactgctcatgggaggaggatacagtctgcttgtttcgcagttggcagaaatggctactattcttgtgtggggactactcggaacatggaccttgctgtgggtattgaataaattcgttcgagtgcgattaactccagaggaagagctgatgggagcagatttgtcagaacatgatgtagatcatgcaaggaacgcacttgaagaaatgaaacctctatgggaaagagaggtagagctgagcgacggattgaactacaggctgtcgaaggcaatgttcgcggcaaaggacgtgacaacaggaatgtacaaaggaaacatcaacaacgcattcaatgacggaactgtagttcaactggatatgcatttcaaggagcagtcacaaataaattgtggcgttaactga

SEQ ID NO: 93373 - protein, 510 aa, Aedes aegypti
MANATEAPVILIDYMTVNSTVHIPAQYDVTIADAAYIVTHSLILITMQTGFALVNAGTVGVRNSVNMMMKNTVDTAIGGFAFWLVGFGLAYGRSAYSNFLFGWGDFFVDVAKTDPLMGGVMTAFMYEISFSSSSTTIASGGMAERFNFRAYCFFAFFNSIMYAFCAGWVWRENGFLSVLGAVDIAGGGPVHMLGGVCSFAAAVFLGPRIGRFDKGSRHLPMGNVLIAFLGLFILWWAWLSFNTASSFGLSRGRWGYTIRAAVMTMLGSMGGGVVACSYSLIENKGKAQPFQIMNGVLASLVSVTGGCYLFESWSAVLIGAIGSLMCLLSMKLMDKFKIDDPLYACTVHGVGGAWSLISIGLFAMNPEPLSTTGGRSGLLMGGGYSLLVSQLAEMATILVWGLLGTWTLLWVLNKFVRVRLTPEEELMGADLSEHDVDHARNALEEMKPLWEREVELSDGLNYRLSKAMFAAKDVTTGMYKGNINNAFNDGTVVQLDMHFKEQSQINCGVN

SEQ ID NO: 93374 - DNA, 1347 bp, Candidatus Kuenenia stuttgartiensis
  CDS (1)..(1347): transl_table=11
atgaaaaaatttagtttactgacaatgttaagccttgtactggtgatggccgcatcatccgtagtattggcaggtgacgatgtattggattcgggcgataatgcatggattcttatgtcggcatcattagtacttctgatgtccccgggccttgccttcttttatggcggcatgtgttcatccaaaaatatcataaatatgttaatgatggtttttatgagtatggcggtaatcagtatccaatgggtattctggggatactctctctcatttggagaggattgcggcaactttatcggaaatttggcaaaggtcggcttgcgcggtataacgcccgatacactctccggcaccattccggaatacacttttttggcattccaggcaacatttgcgattattaccgtggggcttatcatgggtgcagttgaagggcgcatgaaattcagcgcacttttaatatttattcccctgtgggcgactgccgtatatgacccggtatgtcattgggtgtggggcggcggtttcctccaagcctgggaagtgctggattttgccggcggaacggtggtacacataaattcaggtgcggcagcccttgccctcgtgatattactcggaaaacgcaagaaacaaaacataaggccaccatgcaatgtcccgatggtgctactcggcacgggcctgctctggttcggatggttcggttttaatgctggcagcgaactggcttctgacggaagggcggcatttgcgtgggtaataacaaactcgtctgcagccactgctgctttcgtttggatggtatgcgaatggattcataggaaaaaacctacgcttatcggtgcggcttcaggcgcagttgccggccttgtagccataaccccggcgtctggttttgtagggcctttaggcgctatacagattggaattatggcgggtgttggatgttactttgccagcatgaagctaaaagcgctttttggatatgacgacgctttggacgtagttggagtacatgggattggcggtacgataggcgcctttgccacaggtctatattgtaccaaaatggtaatggggcctgatggagttgacggcttattcattggatggggtatggaaggcttcaaacaattgggcttacaatgtattggtttcctgatttcatggtcatacgcattttcagtgacaatggttatcggattatttctcaagtatacgataggcttaaggacagcagaaatacaagaagacaccgggctggatattactcagcacggcgagattggctaccaccttgagatggaatctactagcacattgaagatacctgccgggcactaa

SEQ ID NO: 93375 - protein, 448 aa, Candidatus Kuenenia stuttgartiensis
MKKFSLLTMLSLVLVMAASSVVLAGDDVLDSGDNAWILMSASLVLLMSPGLAFFYGGMCSSKNIINMLMMVFMSMAVISIQWVFWGYSLSFGEDCGNFIGNLAKVGLRGITPDTLSGTIPEYTFLAFQATFAIITVGLIMGAVEGRMKFSALLIFIPLWATAVYDPVCHWVWGGGFLQAWEVLDFAGGTVVHINSGAAALALVILLGKRKKQNIRPPCNVPMVLLGTGLLWFGWFGFNAGSELASDGRAAFAWVITNSSAATAAFVWMVCEWIHRKKPTLIGAASGAVAGLVAITPASGFVGPLGAIQIGIMAGVGCYFASMKLKALFGYDDALDVVGVHGIGGTIGAFATGLYCTKMVMGPDGVDGLFIGWGMEGFKQLGLQCIGFLISWSYAFSVTMVIGLFLKYTIGLRTAEIQEDTGLDITQHGEIGYHLEMESTSTLKIPAGH

SEQ ID NO: 93376 - DNA, 1458 bp, Medicago truncatula
  CDS (1)..(1458)
atggctgctccaccggtaaacacattaccggtagcataccaagcatggacaagtctagcagtaccagactggttaaacaaaggagacaactcatggcaaatgatatcagctacccttgttggaattcaaagcatgccaggactagttatcctctatggcagcatagtgaaaaagaaatgggctgtaaactctgctttcatggctctctacgctttcgcggcggttataatctgttgggttacatgggcttataagatgtcatttggtgaaaaacttttacccttttggggtaaagctggccctgctttaggccagaaatttctaatcagacaggcagggctacccgcgacggtgcattatcatcatgacggtagtttggagactgctgagattgaaccattttatccaatggctactatggtttggtttcagtgtgtttttgctgctatttcacttgttatattggctggttctgttttggctaggatgaattttaaggcttggatgatgtttgtgccactttggttaactttttcttatactattggtgcttttagtttgtggggtggtggtttcttgtttcaatggggtgttatggattattctggtggttatgttattcatctttcttctgggattgctggtttcaccgctgcttattgggtggggcctagatcgaagaaggacagggagagattcccaccaaacaatgtgttactaacgttggcaggggcagggttactatggatgggatgggcaggtttcaacggtggagatccctactctgccaacattgattcatcaatggctgttctcaacacaaacatttgtgctgctacaagcctccttgtatggacatggcttgatgtcatattcttcaaaaaaccatcagttattggagctgttcaaggcatgattactggtcttgtttgcattactcccggagctggtttggttcaaggatgggctgccatagtaatgggagtgctatcaggaagtgtgccatggtacacaatgatggtacttggaaagaagatatcaatatttcaaaaggttgatgacaccctcgccgtgttccacactcatgccgtggctggcctactaggcggtgtactcaccggcctattcgccgagccacaattaagtactctctttctccccgtcaccaattccaaaggaggtgtctatggaggctctggtggtgtccaaattttaaaacaaatagttggagctttattcatcgttggatggaacattgttgctacttcaataatttgtctagttataagtttcattgttcctttaagaatgacggaggaagagttgctcattggggatgatgcagttcatggggaagaagcttatgctttatggggtgatggagagaaacttagtctctacaaagatgatactacacaacatggcatggcttcaagtggtgtcactcaagttgtctag

SEQ ID NO: 93377 - protein, 485 aa, Medicago truncatula
MAAPPVNTLPVAYQAWTSLAVPDWLNKGDNSWQMISATLVGIQSMPGLVILYGSIVKKKWAVNSAFMALYAFAAVIICWVTWAYKMSFGEKLLPFWGKAGPALGQKFLIRQAGLPATVHYHHDGSLETAEIEPFYPMATMVWFQCVFAAISLVILAGSVLARMNFKAWMMFVPLWLTFSYTIGAFSLWGGGFLFQWGVMDYSGGYVIHLSSGIAGFTAAYWVGPRSKKDRERFPPNNVLLTLAGAGLLWMGWAGFNGGDPYSANIDSSMAVLNTNICAATSLLVWTWLDVIFFKKPSVIGAVQGMITGLVCITPGAGLVQGWAAIVMGVLSGSVPWYTMMVLGKKISIFQKVDDTLAVFHTHAVAGLLGGVLTGLFAEPQLSTLFLPVTNSKGGVYGGSGGVQILKQIVGALFIVGWNIVATSIICLVISFIVPLRMTEEELLIGDDAVHGEEAYALWGDGEKLSLYKDDTTQHGMASSGVTQVV

SEQ ID NO: 93378 - DNA, 1377 bp, Oryza sativa subsp; identical to SEQ ID NO: 67627
  CDS (1)..(1377)

SEQ ID NO: 93379 - protein, 458 aa, Oryza sativa subsp; identical to SEQ ID NO: 67628

SEQ ID NO: 93380 - DNA, 1437 bp, Aspergillus oryzae; identical to SEQ ID NO: 67535
  CDS (1)..(1437)

SEQ ID NO: 93381 - protein, 478 aa, Aspergillus oryzae; identical to SEQ ID NO: 67536

SEQ ID NO: 93382 - DNA, 1422 bp, Aspergillus oryzae; identical to SEQ ID NO: 67537
  CDS (1)..(1422)

SEQ ID NO: 93383 - protein, 473 aa, Aspergillus oryzae; identical to SEQ ID NO: 67538

SEQ ID NO: 93384 - DNA, 1350 bp, Aspergillus oryzae; identical to SEQ ID NO: 67539
  CDS (1)..(1350)

SEQ ID NO: 93385 - protein, 449 aa, Aspergillus oryzae; identical to SEQ ID NO: 67540

SEQ ID NO: 93386 - DNA, 1686 bp, Aspergillus oryzae; identical to SEQ ID NO: 67541
  CDS (1)..(1686)

SEQ ID NO: 93387 - protein, 561 aa, Aspergillus oryzae; identical to SEQ ID NO: 67542

SEQ ID NO: 93388 - DNA, 1596 bp, Ciona intestinalis; identical to SEQ ID NO: 67545
  CDS (1)..(1596)

SEQ ID NO: 93389 - protein, 531 aa, Ciona intestinalis; identical to SEQ ID NO: 67546

SEQ ID NO: 93390 - DNA, 2284 bp, Pichia angusta
  CDS (373)..(1875)
aagttccagaacaatttgtgaagcctcgacgtaagagcgtgcgtttcgaaagctaaatgagtcagtcaagtgtgcagagttgactcaagcgcatgcttgagaattcatactgccctccttcatgctgccgtacaatcgtgcgttttttgtcggtgcagcaggaaaagatggttttcgcacgaatgtatttttatcatcgcaggatacaatagagatgcatgaaataatagtcggagatgtagataagtaccatgataagtgcataaacagccaatcacatcaatttatctcgaaccgggcttcttgaagaaatatttgtggctggagattacattcgcagctacgagagctttccggcgcaacgaaactgccatgcctagacaatggacccgcttttttgaatataaatatctcgagatgcgcagattttctcgtctaatcaatactaattcattttttgcaacgatgaaagactcaatgactgaggacctcgctgcagactatgacaaggccgacatggtctgggtcatggtcagtggtgtgctggtctggattatgattcctggtgttggacttctgtactctgggctatctagaaagaaacatgctctttctctgttgtgggcatcgctcatggctatctgtttgatttccttccaatggttcttctgggggtactcgcttactttcggtaccaactcatctgtgtttttaggatcattggacaatttttgcctgatgaaagttcttggagattctaacgcactgtctactgtgccggacattgttttctgctttttccagggaatgtttgccatgatcaccggatgcattatgctcggtggtgcgtgcgagagagctagactgggcccaatgatggtgttcttgtttctctggatgactgtcgtttactgcccttgtgccatgtggacatggaacgctaacggctggcttgcaaccctcggtgcttacgactttgccggtggaggaccagtccaccaggcttctggtttcggagccttggcctacgctttgatctgtggtaagagacacgacccggttgctggttccaacttgcctaagtacagacctcattctgtcacaagtgtcgttctgggtactgttttcctgtggttcggatggtttggattcaacggaggatcttccggagatgcctccatcagaggattttacgcctgtgttaacaccaaccttgctgctgcttgcggtggccttgcttggatgttcctcgactacttcagatgcggccgtaaatggaccaccgtcggaatgtgctctggtgctgttgctggtcttgttggtatcactccggcagctggtttcgtgcctgtttactttgccgttccaatcggtgctctcactgcaattgcttgcaactactcggttgacatcaagaacatgattggaattgacgacggtctggatgtttggtgtcttcacggtgttggtggatttaccggttctgtgctgaccggtctgtttgctgcagactacatcattgctactgactatggtgtctctggtgagggaggatggctcaaccaccactacaagcagctcggctaccagctggcagccagtgtctccatcgacgcatggtcttttgttgtcacttccatcctcctgctggttcttaacagaattccattcctcaagatcagattgagcgaggaggaagaggagctgggtactgatgctgctcaaatcggcgaatttacttaccaggagtccagggtctatatcccagagccagtgagatctgtcaaaagtattccaggtaccaaggccaccaagtccaacgaactcgacgctgacgccgttccgcttccaaaagacgaaaaagttgacgtttaataccgtgttctaataatgataataagtttagtgtaatggagtaaataaaatgacggtgctactattctcggcgttaatcttcaatttgcctgcattcttgccggaggttcagattaggaggggtccagcgttgattacattagcatcccaagtacacatctaaaaccataaggctgtgtaactttattttttgtgcctacttaaaactaccctaagctattttctgaaattcgcgtacctatgaactacgactctaagagtcaaaactcggtcagcttttgtctttcaaaggatttgaagctgccgcttagatttcgaataaacgggcttaacgattacacccaaaggattgcgcaatgtctctcccttgaaaagcggagtgccacttctcgaatcatacaggccaaac

SEQ ID NO: 93391 - protein, 500 aa, Pichia angusta; identical to SEQ ID NO: 67548

SEQ ID NO: 93392 - DNA, 1413 bp, Triticum aestivum; identical to SEQ ID NO: 67557
  CDS (1)..(1413)

SEQ ID NO: 93393 - protein, 470 aa, Triticum aestivum; identical to SEQ ID NO: 67558

SEQ ID NO: 93394 - DNA, 2716 bp, Chlamydomonas reinhardtii
  CDS (26)..(1654)
gaggttcgctggctagagcacaacaatgagcgaagcttgtctcctcgctgcaaagtcggctttggtcggcgtcgccaatggcgatagcctcgcgtccgcaatttgcgcggcgatggaggctgccgcaccagtggctcgccacctgcaagagacaacggtggatctaactacgctccaagagacggtcgacactattgggctgaacttgcaaggcacaatggacggcctgaacacgctgctgctgctctacggaggcgcgctggtgttcctgatgcacggaggctccgctatgctcgaggccggtgccatccgctccaagaacgcgatgaacatcctgctgcagaccgtcctcgacgcctcttgcagcgcgctcatgtggtacttcgtcgggttcgccttcgccttcggcattggcgacaagcccaacaagtttatcggcaacgccatgtttgcgctggtggacattgatacgcacaacaccggctcgggcaccggcaagtggatcgactggttcttccagtgggccttcgccgcaaccgccgtcaccattcccgccggcgctgtggctgagcgtttcaacttcaacgcctacctgggctattccatgttcatcggtggctgggtctaccccatcattgcccactgggtgtggtgcattgagggctggctgggctatggcgtgatcaagcccttcatcaacgccggcatgattgacttcgccggatccggcgtcatccacatgactggcggcctggccggcctcatcggcgccatcatggtgggcccccgcctgggccgcttcgacgccgacggcaagcccgtcgacatgcccggccactccgccatcctggtggtgctgggaaccgtactgctgtggttcggctggtacggattcaaccccgcctccgtgctgctcatcaactccagcacctacgccatcgtgtgcggccgcgcggccgtgtgcaccacgctggccggcgccgcgggcggcgtgagctgcctcatcttcggctttgcgcgccaccgcggctgggacctggtcggcctctgcaacggcatcctgtgcggcttcgtcgcagtcaccgcctgcccccacgtgatctacccctgggccgcaatcatctgcggcctggtcgcgggcctgtggtttgagttcctgtgctggctgttgctcaagctcaagatcgacgacccgttgtcagctgggccgatgcacttcggctgcggcatgtggggcgtcttcttcaccggcctcttcgcgcgccagcaatacatccaggagtactacgtgcacggcccttccgcggccggcgagctgtccaagccctacccctggggcgccttctacaagggctacaatgccgacggcgagctggtcatgtccgatggcaagctgctcgcgtcgcagatcgtgggcatcctggttatcatcggctgggtgattggcatgatggttccgttcttcggcattttccagttctttggcgcgcttcgcattccgcccgaggaggaggagatgggcctggaccgctccaagcacggcggctcggcctacaatggcaccggtgccaacacgctcggcggcctgtcgcccggcaacgacgtgatgcgaaacaactcgcctttgggcaaggttctgcctgtgaccgcgtaaggaccggcggcgttatgcggcacgacggcgtcaggggatcaggagggaacgcagaaccggagctgtggctgcggccatggcagcggcggcggctggtgaccgacgttcttgtgaggatggtaaagggcgagcattcaaatgcgtgaagcgtgaagaactgcagtgtgtggattggggagggggggccagattccactagcacgttgtgtgctgctggcagcagcacgatgattgacgattggaaaacgcttgctcgtgagcggctcgtgtgacgtgactaggggcgcattttttgacagagcgatccgaatgtatgcctatgatcagtaagggcatacgttgctgctgcttgggcgcgggggcctgctgcgccagttgcattgctgcctgcgtgtcaggcccgttgggcgcccattcgagtttggcgttccgcattcatatcacacctacttaagcgccacacattcacgcatcccagccccttacccggatctgaaccatactatgatgcatcatgtttgacaagtgtctgtgtgtgactgtcgtgacttaaaccatgagcgcgctgccgggtgctgattgcgagaaggctggacggcttcgcaggtgactggaccgcaggacagcgtgcttttactttctggtacggtacgaattgcttgacacctccttgcacaatgaattgtcgtgtgtgcgcgcgtaacttcgtagatttgaaagtagtcttgttgtgcgctcgcgtgtgatttgcgcccccctgagtgatttcctgcgaacagttcggaccttgaagttacttgtatgggcatatgggtaaacagcggtcttcagaggaccaacttcagtcaggggacggaaggcatggtgtgcatcaggtgcgtgtgtgcgtgcgtgcatgtggtggacggagattgggccgaggggaaagaaagcccccgcgccatgactgtgacggcggcactgcaaagtgggcgcacgtccagagccaaacaacggctgtaacgatattccgaatgcaaaaaaaaaaaaaaaaaaaaaaaaaaaaaaaaaaaaaaaaaaaaa

SEQ ID NO: 93395 - protein, 542 aa, Chlamydomonas reinhardtii; identical to SEQ ID NO: 67562

SEQ ID NO: 93396 - DNA, 1434 bp, Hebeloma cylindrosporum; identical to SEQ ID NO: 67563
  CDS (1)..(1434)

SEQ ID NO: 93397 - protein, 477 aa, Hebeloma cylindrosporum; identical to SEQ ID NO: 67564

SEQ ID NO: 93398 - DNA, 1317 bp, Pseudomonas stutzeri; identical to SEQ ID NO: 67565
  CDS (1)..(1317): transl_table=11

SEQ ID NO: 93399 - protein, 438 aa, Pseudomonas stutzeri; identical to SEQ ID NO: 67566

SEQ ID NO: 93400 - DNA, 2689 bp, Tuber borchii
  CDS (386)..(1837)
ggcacgagcaaccaacgtgcggccggccctgattattctcgacactccagaaagcgtgcgttgcgagaaaataataaaggaagaggaaaaaaaggaaagaaatttaatacaaacaactaattcgtcgtcctaacccgtgcacgttttattcgaaccctttttctctcaccattttctactgttttgtccgacaaacctacctaccgcacctaccaacctacaaccgtccaaccaaccctccgcttcatccatcatacttgtacgagtactgtagctgtgcaactctatcaccgccctctacatttcactctgacactttgctacttgcgccaagataaaccttcaacttcaagcgggaatatacgagtagtagagtttagccacaatgaatgacccagatcatctcaattatgtcccacttgttcctttcaatggaactaaaccattcgggggtgattcactgactcaagacctgaacatttggtacgagagcggaaatgttgcctgggtcatgacctcgactgcgcttgttctgctgatgattccgggtgtcggattcttctattcgggactcgcgagaagaaagtcggctctttctctcatctggctgtcaatgatggcaaccgctgtagttagctttcagtggttcctttggggttattctttggctttctcgcatactggtggtagattcattggaaaccttgacaatttcggatttaagggacttctcggttatccttctattggaagtgagaaaattccggacctgctgtttgctctctatcagggaatgttctctgctattacggttgctctggctattggtgccgctgcagagagaggccgtatgttgccttgtgtagtttttatgtttgtctgggctactttgatttacgaccctattgcatgctggacgtggaattcctcgggatggtcgttcaggatgggtggattggattttgctggtggaacgccagttcatatttcatccggatccgccgccttggcctactctctgatgttgggaaagcgacgaggccatggaacacatgagttaaactaccgcccacacaatgtcactcacatcgttctcggaacagttttcctgtgggttggctggtttgggtttaacggaggatccgctctttctggcaacatgagagctgttatggcttgtgtcgtcactaatttggctgcatctgttggaggaattacttggtgtcttctcgattaccgtttggagcagaagtggtctactgtgggattctgttcaggagtcattgccggactggttgctattacccctggatctggatatgttccctcttgggctgctgttatttacggtgttgttggtggtgccgcatgtaactatgctaccaagctcaagtttgttattggcgtagatgatgctttggatatcttcgcggagcacggtgtcgggggtattgtaggaaatatcctgacagccttctttgcggctgattacattgcgcatcttgacggctctaccgagattaatggaggttggttgaacggacactataagcaacttggatatcaagttgcggactctgttgcgggttttgcatactccttcggaggcacttgtatcatcctcttcatcatgaatcttatccctggtttgagtcttcgtgctactgaggaggccgagattcttggtattgatgatgccgagctcggagagttcgcctatgactatgttgagcttactcgcgaagttatctctgacgatgacactgtacctaaaatgtcatcggagaacaatgcgagtgtagaactacctgctgaaagggctgagaagtctgcttaaagacttcatcgcttcctcttttcacaaacaatggatccacttgaattcaacactgttcatgtctttctttcttcctttctttcttcctcatcactttcaacgtgctgtgatttctgggcttcaactattcataagtatcaagggaggggggtcacgggaaaaaaaggaaatttaatcggtcacagtgatcagcttactggggaaaaatgaaatattttcctttttatattccctatttgttaattacttgtttcgggggcgtcttgttgttccctatagtgggggtgtgatttggatgaatgataggcttcaataccctcttattttttcttctcgctttttctgtctgggtgcggctctgtctacttttgctcttttttgctttctcacaacttttatttggtctggtcttggtttctctttttctttttttatatatctataaaaaaaaaaaagaagctcctgcttgaatagaagaggaagcaaggtgtcgagaattattgttcgcctttggcaccaatgcttgtagcgttttactctttcttttttaaatttctttcctactgttgatattaactttctactttttttgcccaattcttctttcttctttaccttacattacattttttatttcttaactatgataccggtagagcaacaggtggcagtgggtgtacctttacttgtctgggaggggggttttttttaatgaaaccttgcacgagcgagccggatgtgtgatgaaggaggggtgggggtggatgtacagatttctagggctgtattgtatgtacttgctgtatatgcaggtggataatttttttccctctcaaaaaaaaaaaaaaaaaa

SEQ ID NO: 93401 - protein, 483 aa, Tuber borchii; identical to SEQ ID NO: 67574

SEQ ID NO: 93402 - DNA, 1488 bp, Oryza sativa
  CDS (1)..(1488)
atggcaacgtgcgcggataccctcggcccgctgctgggcacggcggcggcgaacgcgacggactacctgtgcaaccagttcgcggacaccacgtcggccgtggactcgacgtacctgctcttctcggcgtacctcgtgttcgccatgcagctcggcttcgccatgctctgcgccgggtccgtccgcgccaagaacaccatgaacatcatgcttaccaacgtgctcgacgccgccgccggcgcgctcttctactacctcttcggcttcgccttcgccttcggggcgccgtccaacggcttcatcgggaagcacttcttcggcctcaagcaggtcccacaggtcggcttcgactacagcttcttcctcttccagtgggccttcgccatcgccgccgcgggcatcacgtccggctccatcgccgagcggacccagttcgtggcgtacctcatctactccgccttcctcaccggcttcgtctacccggtggtgtcccactggatctggtccgccgacgggtgggcctcggcttcccgaacgtcggggtcgctgctcttcgggtccggcgtcatcgacttcgccgggtcaggggttgtccacatggtggcggcgtgccggactctggggcgccctcatcgagggcccccgcattggcggttcgaccacgccggccgctcggtggcgctgcgcggccacagcgcgtcgctcgtcgtgctcggcagcttcctgctgtggttcgggtggtacgggtttaaccccggctcgttcctcaccatcctcaaatcctacggcccgcccggtagcatccacgggcagtggtcggcggtgggacgcaccgccgtgaccaccaccctcgccggcagcacggcggcgctcacgacgctcttcgggaagaggctccagacggggcactggaacgtgatcgacgtctgcaacggcctcctcggcggcttcgcggcgatcaccgccggttgctccgtcgtcgacccgtgggccgcgatcatctgcgggttcgtctcggcgtgggtgctcatcggcctcaacgcgctggcggcgaggctcaagttcgacgacccgctcgaggcggcgcagctgcacggcgggtgcggcgcgtggggggtcatcttcacggcgctgttcgcgcgcaaggagtacgtggaccagatcttcggccagcccgggcgcccgtatgggctgttcatgggcggcggcggccggctgctcggggcgcacatagtggtaatcctggtcatcgcggcgtgggtgagcttcaccatggcgccgctgttcctggtgctcaacaagctgggattgctgcgcatctcggccgaggacgagatggccggcatggaccagacgcgccacggcgggttcgcgtacgcgtaccacgacgacgacgcgagcggcaagccggaccgcagcttcggcgggttcatgctcaagtcggcgcacggcacgcaggtcgccgccgagatgggaggccatgtctag

SEQ ID NO: 93403 - protein, 495 aa, Oryza sativa
MATCADTLGPLLGTAAANATDYLCNQFADTTSAVDSTYLLFSAYLVFAMQLGFAMLCAGSVRAKNTMNIMLTNVLDAAAGALFYYLFGFAFAFGAPSNGFIGKHFFGLKQVPQVGFDYSFFLFQWAFAIAAAGITSGSIAERTQFVAYLIYSAFLTGFVYPVVSHWIWSADGWASASRTSGSLLFGSGVIDFAGSGVVHMVAACRTLGRPHRGPPHWRFDHAGRSVALRGHSASLVVLGSFLLWFGWYGFNPGSFLTILKSYGPPGSIHGQWSAVGRTAVTTTLAGSTAALTTLFGKRLQTGHWNVIDVCNGLLGGFAAITAGCSVVDPWAAIICGFVSAWVLIGLNALAARLKFDDPLEAAQLHGGCGAWGVIFTALFARKEYVDQIFGQPGRPYGLFMGGGGRLLGAHIVVILVIAAWVSFTMAPLFLVLNKLGLLRISAEDEMAGMDQTRHGGFAYAYHDDDASGKPDRSFGGFMLKSAHGTQVAAEMGGHV

SEQ ID NO: 93404 - DNA, 1479 bp, Hebeloma cylindrosporum; identical to SEQ ID NO: 67575
  CDS (1)..(1479)

SEQ ID NO: 93405 - protein, 492 aa, Hebeloma cylindrosporum; identical to SEQ ID NO: 67576

SEQ ID NO: 93406 - DNA, 1416 bp, Hebeloma cylindrosporum; identical to SEQ ID NO: 67577
  CDS (1)..(1416)

SEQ ID NO: 93407 - protein, 471 aa, Hebeloma cylindrosporum; identical to SEQ ID NO: 67578

SEQ ID NO: 93408 - DNA, 1771 bp, Ustilago maydis
  CDS (149)..(1735)
ccctttccccttctctcttctctcttgctccattccccctccgttctccagctgcttccaagcttgtcgtcatcctcgatccgtctgactcgagtcgcgcctcgcctcgcctcgcctcgcctcgccttggtcgcagtttgtctacaaaatggtcaacatcacttacggtgtgcttcaagcacccgatggctcctcggctacctcgagcgccatcgccaagggaactgacattatcgtttcttacggcccaaatggcgagagcgtcgcttcctattcgcccggtgacatttcctgggttctcacatgtaccgctctcgtatggctcatgattcccggtctcggttacctctactctggtcttgctcgcagaaagaacgcgcctcacctccttttgctcactttggccgctctcgccgttgtctcgttccagtggttcttttggggctactcgctcaccttttctcaaacctcaggcgctttcctcggcaatctgcgcaactttggctacatgggtgttctcgaaaatcccgtgcctcaggcatacaacaaagtgcccgaaattgtatacgccatctaccagtgcatgttcgccaaccttgtccccgccatcgccatcggtgccgcttgtgagcgtggccgtgtctggcctttcctcgtctttacctttgtctggaccacgctcgtctacgatgtgatcgcctgctgggtctggaaccccaccggttgggcgttcaagtggggtgttcttgactacgccggtggtggacccgtcgagattaactcgggtatcactggtctcgtcatctcttactatcttggccctcgtaccggttatggcaccgagcgtctactcttcaagccacacaacgtttcctacatcttcctgggcaccgccttcctctggttcggctggatcggcttcaacggtggttcggtctttgctgccaacctccgtgcggctatggccatcagcaccaccaacctcgccgcttcgtccgccggtctcacctggatgttcctcgactggcgtctcgaacgcaagtggtccgtcgttggcttctgcacgggtgccattgctggtctcgtcgccatcactcccgctgctggctttgtcggcatgcccgctgctttgctcgtcggagtcgtttcctcggccgtttccaactttgccaccgttctcaagggccccatgcgcgttgacgatgtcatggacattttctcggtccacgctctcgccggtattgttggcacccttctcaccggtatcttcgcccaggcttccgtagccaacaacgacggcaacacggtcatcgccggtggctggctcgactcaaactggatccagctcgcctatcaactcgcctactgtgtcgctgtcacctgttggtgtggtggcgtcacgtttgctatcatgtttgttattgaccacattccttacatcggtcccttccgttcgagcgagatgggtgaagtggtgggtatggatgaggaccagtgtggcgagtgggcttacgactacgcctttatcaaccgtgatcttgagggcaactacaagcccgaccacggtcagacgctcgacatcaacgaaaagatgcccaacgttcatcaaaccgactcgctgcgctccgaaacgcacgccgactcgagccaagacaaccccaactcgcagctcgccgctgccgaacaccagtctccatccaccgctgaaccagccgtggaaatgaagcaggcttaaaagttgcaaagacgtcgtagagtgcaagcgttcgaa

SEQ ID NO: 93409 - protein, 528 aa, Ustilago maydis; identical to SEQ ID NO: 67580

SEQ ID NO: 93410 - DNA, 1690 bp, Ustilago violacea
  CDS (19)..(1500)
ttcgacttcagtctcatcatggtcaacgttgcgtacgatacgacagggactcttgttgccaatgtagatggcactcagaccgtgtacaatggcggtgacatggcatgggtgcttgtcgccggtgttctcgtcatgatcatgtcccccggagttggtttcctctattctggtcttttgcgtaggaagaatgctttgtctatgatgatgctcggtgtccttgtctatgcggttattacaattcaatggtttttttggggctactcgttggcttttagcagcaccggcagtgccttcatcggcgacttgaagcactttggcctcatgaacgtcacgctcgaaccatccgccgggtcctccaagattcctgctctgttgtattacttctaccaatccatgttcgccactgtgactgtggttattcttgttggaggtattgcagaacgtgcacgtattctaccgcttctcattttctgcttctgttgggccaccatcgtgtacgaccctattgccaactgggtctggaaccccaacggatggctctacaagctcggtgagctcgactttgccggcggaggacccgtccatatcacttcgggaaccgctggctttgcgtggtcgctctacttgggccgtcgtcgcggttatggtacagccaagctcgcttaccgcccccactcggtcttccaaatcatcctcggcaccgtcttcctctggttcggctggttcggatttaacggtggatccgaactggcgatgaacttgcgcgcagtccaggcctcgactgtcaccaacatcgctgccgctatgggtggaatcacctggttcgcgatggattggttctacaccaagaagtggtctgctgtctcgatgtgctccggtatcctcgctggtctcgtcggcatcacccctgcggctggttatattggctctcccgcggcgttggccattggtttcctcaccgcaattgcatgcaactttggcactggcctcaaagttctgctcggaatcgatgatgccgtcgactcgttcgcgctccacgccattgggggctactgcggatccgccttgactgcgctcttcgccgatagccgcgtcgctggatttgatggctacaccgagattcctggcggctggatcaaccacaactacatccagcttgggtggcaactcgccggagcgacgacgatcatggcttacaccttcgtcgtcacctacctgctcctctttgtcatcgaccacattcctggcctcaaactccgagctactgaggacatggagattcttggtatcgacgagaccgagctcggcgagaacgcctacgactttgtcttccgcaaccgtgatcttgagaaccctgaggaattctccgaattgcacaaccgagcaactggcgaagaccttagccgccaagtgagccatcactcgtcgtcgagccacaacaaggacatcaagtcgcctcactccgctgtccccgtgacggaggagaaattgagcgtttgagacggaatgtagagaccactgcaccgactcgccggctttgaccagcgctgtacactctcccatatccaaccactttgcctctctgtctgacctaacgtcgcctgtgcttctaccaatctcgcattcgttttcttttgggggtattctttgtgtttcctatatttaattacacatatgctctttcagccgc

SEQ ID NO: 93411 - protein, 493 aa, Ustilago violacea; identical to SEQ ID NO: 67582

SEQ ID NO: 93412 - DNA, 1494 bp, Schizosaccharomyces pombe; identical to SEQ ID NO: 67589
  CDS (1)..(1494)

SEQ ID NO: 93413 - protein, 497 aa, Schizosaccharomyces pombe; identical to SEQ ID NO: 67590

SEQ ID NO: 93414 - DNA, 1428 bp, Arabidopsis thaliana; identical to SEQ ID NO: 67591
  CDS (1)..(1428)

SEQ ID NO: 93415 - protein, 475 aa, Arabidopsis thaliana; identical to SEQ ID NO: 67592

SEQ ID NO: 93416 - DNA, 1539 bp, Schizosaccharomyces pombe; identical to SEQ ID NO: 67593
  CDS (1)..(1539)

SEQ ID NO: 93417 - protein, 512 aa, Schizosaccharomyces pombe; identical to SEQ ID NO: 67594

SEQ ID NO: 93418 - DNA, 1554 bp, Schizosaccharomyces pombe; identical to SEQ ID NO: 67595
  CDS (1)..(1554)

SEQ ID NO: 93419 - protein, 517 aa, Schizosaccharomyces pombe; identical to SEQ ID NO: 67596

SEQ ID NO: 93420 - DNA, 1287 bp, Escherichia coli O157; identical to SEQ ID NO: 67597
  CDS (1)..(1287): transl_table=11
  misc_feature (1152)..(1152): r is g or a

SEQ ID NO: 93421 - protein, 428 aa, Escherichia coli O157; identical to SEQ ID NO: 67598

SEQ ID NO: 93422 - DNA, 1272 bp, Aquifex aeolicus; identical to SEQ ID NO: 67599
  CDS (1)..(1272): transl_table=11

SEQ ID NO: 93423 - protein, 423 aa, Aquifex aeolicus; identical to SEQ ID NO: 67600

SEQ ID NO: 93424 - DNA, 1359 bp, Corynebacterium glutamicum; identical to SEQ ID NO: 67601
  CDS (1)..(1359): transl_table=11

SEQ ID NO: 93425 - protein, 452 aa, Corynebacterium glutamicum; identical to SEQ ID NO: 67602

SEQ ID NO: 93426 - DNA, 2264 bp, Saccharomyces cerevisiae
  CDS (601)..(2079)
acctctgaagcacaaaagggagcataagagcacttagggacaaacgtatttctttcccccactcccctttttccctttgcgatgcacatccataacttgtacttgtgtcttgacattcttcaaaatcaacatggcgatgctcttctacggttgtcctttgccacgaactttgttttgcgcctcccctccctttgtcaggctgagtgcaaaagaaaaggccctggttgcttatctctgcggacacgcgcccctcttattggatgagacatctcagagattgcgataacgataagattcacaattgctacagacacccttgtgtgacatcttatggctatgtaagcacagaagagaagaagaaagaaatgacaaagtattgatggaagatgtttttcctgaaaaaaaaaaaaaaaaaaaatcggaaaagtggtgtaggcttctatagcaccttctgcttaccagtcgataatgcagttccagaataagatacttaaaaggtagtttatttatataggcgctcttgtaacttgtttaggcttatgatcagagaattattttagtaaacataactgcagtacggattcttatactgtagaaactatggagagtcgaactacagggcctttaacgactgaaacctacgatggccccactgtggccttcatgatattaggtgccgccctagtattttttatggtgcccggattgggattcttgtactccggattggcaagaaggaagtctgcactagcactaatctgggttgtattaatggcgactttggtcggtatactgcaatggtatttctggggttactctctagctttttcaaagtccgctccgaataataaattcattgggaatctagattcgtttggctttagaaacgtgtacggaaaaaaattcgatgaagatgcctaccctgagctcgcgtatgcaaccttccaaatgatgttttcgtgcgtcaacttaagtattatcgctggcgccactgccgaaagaggcaggctgctaccgcacatggtttttctctttattctagctaccattggatattgtccagtgacgtattggatttggtcaccaggtggttgggcataccaatggggagtcctcgattgggcaggcggcggcaacattgaaatattaagcgctgtttccgggtttgtttactcttggtttttgggcaaaagaaatgaaaagttactgataaatttcaggcctcataatgtttcattggtcactctaggcacatccatactgtggtttggctggctgctatttaattctgcatcctcattatccccaaatttgaggtcagtttatgcattcatgaatacatgtctcagtgccattactggtgggatgacgtggtgtcttctggattacagatcggagaagaaatggtcgacagttggtctgtgctccggtatcatttctgggctggtggctgcaacgccaagctcaggctgtataaccctttacggttcacttattcaaggcattgtggcgggggtagtgtgtaactttgcgacgaagttgaaatactacgctaaagtagatgatgccatggacattctagctgagcacggggttgcaggcgtaataggactaattttcaatgccctttttggagcagactgggtcattggtatggatggcactacagagcacgagggcggctgggtaactcacaattacaagcaaatgtataagcagatcgcttacattgccgcatccattgggtacactgctgctgtaactgcaataatctgctttgtgctcggctacatacccggtatgaggctaagaatatcagaagaggcagaggaggcgggtatggacgaagatcaaattggcgaatttgcgtacgattatgtggaagtgagaagagattactatctatggggtgtagacgaagattcacaacgctctgatgtaaatcaccgggtgaacaacgctcatttggccgctgaacgtagcagtagcggtactaatagttcctcggatgggaatggagaaatgattcaatccgaaaagatcctaccaattcatcaagaagatcctgccaataggtaaacggtttattgattttgtttccagcttggctctcttgattttttatgagcacgtgttatttattccttattcaaaccttcatatatgtatagatgtgcattgtttatacgttacctagcattttaatgaccctcctatttagttatcttttatcacattcgttaaaacctagaggaaaaaaagaa

SEQ ID NO: 93427 - protein, 492 aa, Saccharomyces cerevisiae; identical to SEQ ID NO: 67606

SEQ ID NO: 93428 - DNA, 2200 bp, Saccharomyces cerevisiae
  CDS (515)..(2014)
aatacccgggctgccaaaatagaaaaggaacaaatggtaggtctttaagataagaaagataagataagacatctttttttttttttttttttttttttttttttttccgataacaaagaagaatccttcggtctcttcttactgctgttactgcttatcaagagtgtctggtaatagtcaaagccagataagataagaaatgtaaaatcgactatttccctcgtaaaaagcttcaattgctcacgcatcgacgaatactaagcggcgtgaagaccctgtgccttatcaatgaagtattcagtacaagaggtgttcattccgagccacttttctgcaccatatataagcagtagttacacatgtgctaaccaaacatcagtgggtagtaatcattcgtgctttcacgtcctttcaaattaaatatccttcttaaataataagtctgcacagagctttgaaagaagtttagttttgtaatatatcatacttaatatattacaatacaatatcaacaatgtcttacaattttacaggtacgcctacaggcgaaggaacgggtggtaactcgttgacaacagatttgaatacacaatttgacttggccaacatgggatggatcggtgtggcttcagcaggtgtgtggattatggtcccaggtatcggtttattatattctggtttatccaggaaaaagcatgctttatccttgctttgggcctcgatgatggcttccgccgtgtgtattttccaatggtttttctggggatactcattagctttctcacacaacactagaggtaacggttttattggtaccttggaattctttgggtttcgtaacgttttaggagccccatctagtgtcagttctcttcccgatatactgtttgccgtttaccaaggtatgtttgccgcagtcaccggtgccctaatgctaggtggtgcctgcgagagggcaaggttgtttcctatgatggtgttcttgtttttatggatgactattgtttattgtcctattgcatgctgggtctggaatgccgagggttggttggtcaaattgggtagcttggactatgcaggtggtttatgtgtccatttaacatctggacatggtggtctagtttacgctttgatactgggtaagcgtaatgaccctgttacacgtaaagggatgcccaagtacaaaccacattccgtcacctcggtggttttaggcacagtgttcttatggtttggttggatgttctttaacggaggctctgcaggtaatgcaactatacgagcatggtactctattatgtccacaaacttagctgctgcttgcggtggcttgacatggatggttatcgattatttcagatgcggaagaaagtggactacagttggtttgtgttcaggtatcatcgctggcctagtgggtatcaccccagccgccgggttcgtgccaatctggtcagccgttgtcattggtgtggttactggtgcaggatgtaaccttgctgttgacttaaagagtctattgcgcatcgatgatggtctagattgttactctatccatggtgtgggtggttgtattggttctgtattaactggtatctttgctgcagactatgtaaatgccactgcaggctcttacattagtccaattgatggtggctggatcaatcatcactataaacaagttggttatcaattagcaggtatatgcgctgcactagcctggactgttactgtcacatctatcttgcttctaactatgaatgccattccatttttaaaactaagattaagtgctgatgaggaagaattaggtaccgacgctgctcaaattggtgaatttacatacgaggaatccactgcttacatcccagaaccaatcagatctaaaacatcggcacaaatgccacctcctcatgaaaacattgatgataagattgtgggtaacacagacgcagaaaagaattctacgccttccgacgcttcttctactaagaacactgaccatatagtataatgatatactcaagcagactatgattttatgtttaatctttatgtaacgcttcatttaataattttatttttaatatttgatatattttctttttttgataactccgaatgatgaggggagacgttagtattacttctcttgtcttatgttattatcataatcgatgactttaactgtgcacactat

SEQ ID NO: 93429 - protein, 499 aa, Saccharomyces cerevisiae; identical to SEQ ID NO: 67300

SEQ ID NO: 93430 - DNA, 2157 bp, Bacillus subtilis
  CDS (126)..(1340): transl_table=11
tcgataacatttctcaaaaaccatgtcaggaaatcttacatgaaaatgttttatcattcttttttctctataatgaagaaatataataattgctttttattctgaaagatacggaggaatgagacatgcaaatgggcgatacagtttttatgttcttttgcgctttactcgtgtggctgatgaccccgggattagcgttattttatggaggaatggtaaagagcaaaaatgtgctgagcactgccatgcacagtttctcttccattgccatcgtttccatcgtttgggtgctgttcggatatacacttgccttcgcaccaggcaattcaatcatcggcgggctggagtgggcaggcctcaaaggggtcggatttgatccgggagattacagcgataccatcccccactcgttatttatgatgttccaaatgacgttcgccgttctgactacagcgattatttccggggctttcgcagagcggatgcgattcggcgcttttcttttattctcggttttatgggcctctttggtttacacacccgtagcgcactgggtatggggcggcggctggatcggccagcttggagcgctcgatttcgctggcggcaatgttgttcatatttcctccggggtggcaggacttgttcttgccattgtgctcggcaaacggaaagacggtacagcgtcttctccgcataacctcatttacaccttcttaggaggagctttgatttggttcggctggttcggctttaacgtcggcagcgcattgaccttagatggtgtggccatgtacgcgttcatcaacacaaacaccgcggctgcagccgggatcgccggctggatcttagtagaatggatcattaacaaaaaaccgacaatgctcggagcggtatctggggcaatcgccgggcttgtcgccattacgccggctgccggatttgtcacaccgttcgcttccattattatcggcatcatcggcggagctgtttgtttctggggagtattctcgcttaaaaagaaattcggatacgacgacgcgcttgacgcctttggcctgcacgggatcggcggcacatggggcggaatcgcaacaggattattcgcaacaacctctgttaactcagcgggcgcagatgggttattttacggtgatgcaagcttaatctggaaacaaatcgtcgccatcgccgccacttatgtttttgtatttattgtcactttcgttattattaaaattgtaagcctcttccttccccttcgcgcaactgaagaagaagagtcacttgggcttgacttaacgatgcacggggaaaaagcatatcaagattctatgtgaggagtgacgctatgagcggtcaaatgttcaaggtagaaattgtaacgcgtccggcaaattttgaaaagctgaagcaggaactcggaaaaatcggagtgacctctctgactttctccaatgtacacggctgcggccttcaaaaagcacatacggagctctatcgaggggtaaaaatagaaagcaatgtatacgagcgtttaaaaatagaaattgtggtcagcaaggttcctgttgatcaagtgacagagaccgctaaaagggtgctgaaaacgggatcaccaggtgacggtaaaatatttgtctatgaaatcagcaatacgatcaacatccgcacaggcgaagaaggacctgaagcactttaatatcggtacgagattcggacactccggatctctttttttgtgcacagaatccccccagaaaccgcgattcctcttcgaattctcttcaagcgccgttatttcagacaatctctatttttatttgaaacttttcatgagtaagattagtctactaaatataaaaatgtaaaaggtgattatttgaactacgaaatttttaaagcaatccatggactatctcatcacaattcagttctcgattccattatggtcttcatcacggaatatgccattgtcgcctatgcccttatcctattggcaatctggctgtttgggaacacacaaagcagaaaacatgtgctatacgcaggcatcacaggaattgcaggccttgtgatcaactatttgattacgcttgtttatttcgaaccgcgcccgttcgttgcgcatacagtgcatacactgattccgcatgc

SEQ ID NO: 93431 - protein, 404 aa, Bacillus subtilis; identical to SEQ ID NO: 67610

SEQ ID NO: 93432 - DNA, 1440 bp, Oryza sativa; identical to SEQ ID NO: 67623
  CDS (1)..(1440)

SEQ ID NO: 93433 - protein, 479 aa, Oryza sativa; identical to SEQ ID NO: 67624

SEQ ID NO: 93434 - DNA, 1512 bp, Brassica napus; identical to SEQ ID NO: 67629
  CDS (1)..(1512)

SEQ ID NO: 93435 - protein, 503 aa, Brassica napus; identical to SEQ ID NO: 67630

SEQ ID NO: 93436 - DNA, 1512 bp, Brassica napus; identical to SEQ ID NO: 67631
  CDS (1)..(1512)

SEQ ID NO: 93437 - protein, 503 aa, Brassica napus; identical to SEQ ID NO: 67632

SEQ ID NO: 93438 - DNA, 1461 bp, Glycine max; identical to SEQ ID NO: 67633
  CDS (1)..(1461)

SEQ ID NO: 93439 - protein, 486 aa, Glycine max; identical to SEQ ID NO: 67634

SEQ ID NO: 93440 - DNA, 1503 bp, Glycine max; identical to SEQ ID NO: 67635
  CDS (1)..(1503)

SEQ ID NO: 93441 - protein, 500 aa, Glycine max; identical to SEQ ID NO: 67636

SEQ ID NO: 93442 - DNA, 1437 bp, Zea mays; identical to SEQ ID NO: 67637
  CDS (1)..(1437)

SEQ ID NO: 93443 - protein, 478 aa, Zea mays; identical to SEQ ID NO: 67638

SEQ ID NO: 93444 - DNA, 1497 bp, Zea mays; identical to SEQ ID NO: 67639
  CDS (1)..(1497)

SEQ ID NO: 93445 - protein, 498 aa, Zea mays; identical to SEQ ID NO: 67640

SEQ ID NO: 93446 - DNA, 21 bp, Artificial sequence
  primer
atggctcggggtgacggacat

SEQ ID NO: 93447 - DNA, 25 bp, Artificial sequence
  primer
tcatgcttcttttgcgtgatgcaat

SEQ ID NO: 93448 - protein, 546 aa, Artificial sequence
  consensus sequence
  Variant (3)..(6): Xaa in position 3 to 6 is any amino acid
  Variant (8)..(8): Xaa in position 8 is any amino acid
  Variant (10)..(11): Xaa in position 10 to 11 is any amino acid
  Variant (13)..(13): Xaa in position 13 is any amino acid
  Variant (15)..(33): Xaa in position 15 to 33 is any amino acid
  Variant (35)..(37): Xaa in position 35 to 37 is any amino acid
  Variant (40)..(42): Xaa in position 40 to 42 is any amino acid
  Variant (44)..(64): Xaa in position 44 to 64 is any amino acid
  Variant (65)..(104): Xaa in position 65 to 104 is any or no amino acid
  Variant (106)..(112): Xaa in position 106 to 112 is any amino acid
  Variant (114)..(115): Xaa in position 114 to 115 is any amino acid
  Variant (117)..(125): Xaa in position 117 to 125 is any amino acid
  Variant (127)..(130): Xaa in position 127 to 130 is any amino acid
  Variant (131)..(131): Xaa in position 131 is any or no amino acid
  Variant (133)..(140): Xaa in position 133 to 140 is any amino acid
  Variant (142)..(148): Xaa in position 142 to 148 is any amino acid
  Variant (149)..(149): Xaa in position 149 is any or no amino acid
  Variant (151)..(153): Xaa in position 151 to 153 is any amino acid
  Variant (155)..(157): Xaa in position 155 to 157 is any amino acid
  Variant (159)..(160): Xaa in position 159 to 160 is any amino acid
  Variant (161)..(173): Xaa in position 161 to 173 is any or no amino acid
  Variant (175)..(179): Xaa in position 175 to 179 is any amino acid
  Variant (181)..(182): Xaa in position 181 to 182 is any amino acid
  Variant (183)..(193): Xaa in position 183 to 193 is any or no amino acid
  Variant (195)..(195): Xaa in position 195 is any amino acid
  Variant (199)..(200): Xaa in position 199 to 200 is any amino acid
  Variant (203)..(205): Xaa in position 203 to 205 is any amino acid
  Variant (207)..(215): Xaa in position 207 to 215 is any amino acid
  Variant (216)..(220): Xaa in position 216 to 220 is any or no amino acid
  Variant (222)..(222): Xaa in position 222 is any amino acid
  Variant (224)..(229): Xaa in position 224 to 229 is any amino acid
  Variant (230)..(279): Xaa in position 230 to 279 is any or no amino acid
  Variant (281)..(288): Xaa in position 281 to 288 is any amino acid
  Variant (289)..(290): Xaa in position 289 to 290 is any or no amino acid
  Variant (292)..(294): Xaa in position 292 to 294 is any amino acid
  Variant (297)..(297): Xaa in position 297 is any amino acid
  Variant (300)..(300): Xaa in position 300 is any amino acid
  Variant (301)..(301): Xaa in position 301 is any or no amino acid
  Variant (305)..(305): Xaa in position 305 is any amino acid
  Variant (308)..(320): Xaa in position 308 to 320 is any amino acid
  Variant (321)..(334): Xaa in position 321 to 334 is any or no amino acid
  Variant (336)..(345): Xaa in position 336 to 345 is any amino acid
  Variant (347)..(360): Xaa in position 347 to 360 is any amino acid
  Variant (361)..(366): Xaa in position 361 to 366 is any or no amino acid
  Variant (368)..(370): Xaa in position 368 to 370 is any amino acid
  Variant (372)..(373): Xaa in position 372 to 373 is any amino acid
  Variant (374)..(374): Xaa in position 374 is any or no amino acid
  Variant (378)..(379): Xaa in position 378 to 379 is any amino acid
  Variant (382)..(383): Xaa in position 382 to 383 is any amino acid
  Variant (385)..(394): Xaa in position 385 to 394 is any amino acid
  Variant (396)..(412): Xaa in position 396 to 412 is any amino acid
  Variant (413)..(419): Xaa in position 413 to 419 is any or no amino acid
  Variant (422)..(428): Xaa in position 422 to 428 is any amino acid
  Variant (430)..(432): Xaa in position 430 to 432 is any amino acid
  Variant (434)..(435): Xaa in position 434 to 435 is any amino acid
  Variant (437)..(442): Xaa in position 437 to 442 is any amino acid
  Variant (445)..(457): Xaa in position 445 to 457 is any amino acid
  Variant (458)..(492): Xaa in position 458 to 492 is any or no amino acid
  Variant (494)..(521): Xaa in position 494 to 521 is any amino acid
  Variant (522)..(527): Xaa in position 522 to 527 is any or no amino acid
  Variant (529)..(532): Xaa in position 529 to 532 is any amino acid
  Variant (533)..(533): Xaa in position 533 is any or no amino acid
  Variant (535)..(535): Xaa in position 535 is any amino acid
  Variant (536)..(536): Xaa in position 536 is any or no amino acid
  Variant (538)..(538): Xaa in position 538 is any amino acid
  Variant (540)..(543): Xaa in position 540 to 543 is any amino acid
  Variant (545)..(545): Xaa in position 545 is any amino acid
PGXXXXYXGXXRXKXXXXXXXXXXXXXXXXXXXWXXXGYXXXFXXXXXXXXXXXXXXXXXXXXXXXXXXXXXXXXXXXXXXXXXXXXXXXXXXXXXXXXXXXXXPXXXXXXXQXXFXXXXXXXXXGXXXXXRXXXXXXXXFXXXXXXXXYXXXAXXXWXXXXXXXXXXXXXXXGXXXXXGXXXXXXXXXXXXXDXAGGXXVHXXXGXXXXXXXXXXXXXXGXRXXXXXXXXXXXXXXXXXXXXXXXXXXXXXXXXXXXXXXXXXXXXXXXXXXXXXXXXPXXXXXXXXXXGXXXLWXGWXXGFNXGSXXXXXXXXXXXXXXXXXXXXXXXXXXXTXXXXXXXXXXWXXXXXXXXXXXXXXXXXXXXGXXXGXXXGLVXXTPXXGXXXXXXXXXXGXXXXXXXXXXXXXXXXXXXXXXXXDDXXXXXXXHXXXGXXGXXXXXXFAXXXXXXXXXXXXXXXXXXXXXXXXXXXXXXXXXXXXXXXXXXXXXXXXQXXXXXXXXXXXXXXXXXXXXXXXXXXXXXXXXXXRXXXXXEXXGXDXXXXGXE

SEQ ID NO: 93449 - protein, 14 aa, Artificial sequence
  protein pattern
  Variant (2)..(3): Xaa in position 2 to 3 is any amino acid
  Variant (4)..(4): Xaa in position 4 is any or no amino acid
  Variant (6)..(6): Xaa in position 6 is any or no amino acid
  Variant (8)..(8): Xaa in position 8 is any amino acid
  Variant (11)..(11): Xaa in position 11 is any amino acid
  Variant (12)..(12): Xaa in position 12 is Ala, Gly or Leu
GXXXLXWXGWXXFN

SEQ ID NO: 93450 - protein, 18 aa, Artificial sequence
  protein pattern
  Variant (2)..(4): Xaa in position 2 to 4 is any amino acid
  Variant (5)..(5): Xaa in position 5 is Ala or Gly
  Variant (6)..(6): Xaa in position 6 is any amino acid
  Variant (7)..(7): Xaa in position 7 is Ile, Leu, Met or Val
  Variant (8)..(8): Xaa in position 8 is Ala, Cys, Ser, Thr or Val
  Variant (11)..(11): Xaa in position 11 is Ala, Gly or Val
  Variant (12)..(12): Xaa in position 12 is Ala, Cys, Asp, Gly, Ser, Thr or Val
  Variant (13)..(13): Xaa in position 13 is Ala, Ile or Val
  Variant (16)..(17): Xaa in position 16 to 17 is Ala, Cys, Gly or Ser
  Variant (18)..(18): Xaa in position 18 is Ala, Asp, Gly or Ser
GXXXXXXXGLXXXTPXXX

SEQ ID NO: 93451 - DNA, 1710 bp, Arabidopsis thaliana; identical to SEQ ID NO: 84039
  CDS (1)..(1710)

SEQ ID NO: 93452 - protein, 569 aa, Arabidopsis thaliana; identical to SEQ ID NO: 84040

SEQ ID NO: 93453 - DNA, 2068 bp, Oryza sativa
  CDS (59)..(1762)
tcgcctcgccgccacctccgcttttattctagaagcttcggtcggactcggtgctgacatggcggtggcgctccggttcgcggcggccgtcgcgcgggactcgccggcggccgccgctccccccagggtggggaggggggagcagcagtatctcgcgtgcgcggcggcggcgaggccgggagggaggtgttcgaggaggaggggattggtggcgcggtgccagagcgtggcggcggcggttgtcctcaacaaggacgacgcggcgtcggtggccgccgccgccgcctcctccgcgacggggttcaccgtcgccatgaagttcggcgggtcgtcggtggcgtcggcggagcggatgcgggaggtggccgatctcatactcagcttccccgaggagactcccgttgttgttctctccgccatggggaagaccaccaataacctcctcctggccggagagaaggctgtcagctgcggcgccccgaaggcgtctgaaattcccgagctcgcagttatcaaggagctccatgttaggactattgatgagcttggattggatagatcgattgtttcaggtttattggaagaattggaacaacttcttaagggtgttgctatgatgaaagaactaactcctaggacacgggattaccttgtttccttcggtgaatgcatgtctacaagaatatttgctgcatatttgaataaacttgggaaaaaggctcggcagtatgatgcatttgatattggctttataactactgatgatttcacaaatgcggacattcttgaagcgacatatcctgctgttgcaaagaggttacagggtgattggattgacgaccctgctattcctatagttactggtttccttggaaaaggatggaaatcatgtgctgtcaccactttaggcagaggtggcagcgacttgactgctaccaccattggcaaagcgttgggattaagagagatccaggtatggaaggatgttgatggtgtgttgacatgtgatcctaatatttgtgcgaacgcgatacctgtaccctacttgacttttgaggaggcagctgaacttgcctactttggtgcacaggttttgcatccccaatcaatgagaccagccaaagaaggtgatataccagttagagttaagaattcatataaccgtcgagcacctggtactgttattactaaaacaagagatttgagcaagagtatattaaccagcattgtattgaagtcaaacattactatgctggatatagtgagcacaaggatgcttggccagtatggttttctggcgaaggttttctcaatatttgaagatttaggtatctctgttgattgtgtggctaccagtgaagtcagtatatcattgacactagatccatcaaaactatggtgtcgtgaattgatccagcaggaacttgatcatgtagttgaagaacttgaaaaaattgcagttgttcatctactgcagcacaggtctatcatctcactgatagggaatgtacagagatcgtcattgattcttgagaaggctttcaatgttctacggagaaatggcgttaacgtccagatgatctcacaaggggcatccaaggtgaacatttcattggtggtccatgatagcgaggcgaaacagtgtatacaggcccttcattcagcattctttgagaacggtttcttgtcagaagttgaggaagaggatcttcaacacaatggctctcctgtgagcccaaatggtgtcatttacggaaactagtcgacttagcatttcctgctattgttgtatctttggaatttggataggtttaaaggtgattcaggcatatagtcatttaggccacctaggtgaaatggtgaattccctggtgttgtaagagccctacaaggagcaccctgtgttaatgataatcacgcatagcaggctcacttataatgttaagtttgctgcaataccagcggtgcgatcgtaaataacattgtttgttatcttttggaataaagaatgatccggtgttgaaacaaaaaaaaaaaaaaaaaagggcggcgctcgcgatctagaaca

SEQ ID NO: 93454 - protein, 567 aa, Oryza sativa
MAVALRFAAAVARDSPAAAAPPRVGRGEQQYLACAAAARPGGRCSRRRGLVARCQSVAAAVVLNKDDAASVAAAAASSATGFTVAMKFGGSSVASAERMREVADLILSFPEETPVVVLSAMGKTTNNLLLAGEKAVSCGAPKASEIPELAVIKELHVRTIDELGLDRSIVSGLLEELEQLLKGVAMMKELTPRTRDYLVSFGECMSTRIFAAYLNKLGKKARQYDAFDIGFITTDDFTNADILEATYPAVAKRLQGDWIDDPAIPIVTGFLGKGWKSCAVTTLGRGGSDLTATTIGKALGLREIQVWKDVDGVLTCDPNICANAIPVPYLTFEEAAELAYFGAQVLHPQSMRPAKEGDIPVRVKNSYNRRAPGTVITKTRDLSKSILTSIVLKSNITMLDIVSTRMLGQYGFLAKVFSIFEDLGISVDCVATSEVSISLTLDPSKLWCRELIQQELDHVVEELEKIAVVHLLQHRSIISLIGNVQRSSLILEKAFNVLRRNGVNVQMISQGASKVNISLVVHDSEAKQCIQALHSAFFENGFLSEVEEEDLQHNGSPVSPNGVIYGN

SEQ ID NO: 93455 - DNA, 1713 bp, Oryza sativa (japonica cultivar-group); identical to SEQ ID NO: 83837
  CDS (1)..(1713)

SEQ ID NO: 93456 - protein, 570 aa, Oryza sativa (japonica cultivar-group); identical to SEQ ID NO: 83838

SEQ ID NO: 93457 - DNA, 1728 bp, Oryza sativa (japonica cultivar-group); identical to SEQ ID NO: 83839
  CDS (1)..(1728)

SEQ ID NO: 93458 - protein, 575 aa, Oryza sativa (japonica cultivar-group); identical to SEQ ID NO: 83840

SEQ ID NO: 93459 - DNA, 1350 bp, Salmonella typhimurium LT2; identical to SEQ ID NO: 83867
  CDS (1)..(1350): transl_table=11

SEQ ID NO: 93460 - protein, 449 aa, Salmonella typhimurium LT2; identical to SEQ ID NO: 83868

SEQ ID NO: 93461 - DNA, 1413 bp, Chlorobium tepidum TLS; identical to SEQ ID NO: 83875
  CDS (1)..(1413): transl_table=11

SEQ ID NO: 93462 - protein, 470 aa, Chlorobium tepidum TLS; identical to SEQ ID NO: 83876

SEQ ID NO: 93463 - DNA, 1350 bp, Shigella flexneri 2a str. 301; identical to SEQ ID NO: 83879
  CDS (1)..(1350): transl_table=11

SEQ ID NO: 93464 - protein, 449 aa, Shigella flexneri 2a str. 301; identical to SEQ ID NO: 83880

SEQ ID NO: 93465 - DNA, 1569 bp, Kluyveromyces lactis NRRL Y-1140; identical to SEQ ID NO: 83907
  CDS (1)..(1569)

SEQ ID NO: 93466 - protein, 522 aa, Kluyveromyces lactis NRRL Y-1140; identical to SEQ ID NO: 83908

SEQ ID NO: 93467 - DNA, 1386 bp, Yersinia pseudotuberculosis IP 32953; identical to SEQ ID NO: 83925
  CDS (1)..(1386): transl_table=11

SEQ ID NO: 93468 - protein, 461 aa, Yersinia pseudotuberculosis IP 32953; identical to SEQ ID NO: 83926

SEQ ID NO: 93469 - DNA, 1353 bp, Mannheimia succiniciproducens MBEL55E; identical to SEQ ID NO: 83929
  CDS (1)..(1353): transl_table=11

SEQ ID NO: 93470 - protein, 450 aa, Mannheimia succiniciproducens MBEL55E; identical to SEQ ID NO: 83930

SEQ ID NO: 93471 - DNA, 1419 bp, Methanosarcina barkeri str. Fusaro; identical to SEQ ID NO: 83941
  CDS (1)..(1419): transl_table=11

SEQ ID NO: 93472 - protein, 472 aa, Methanosarcina barkeri str. Fusaro; identical to SEQ ID NO: 83942

SEQ ID NO: 93473 - DNA, 1410 bp, Acidobacteria bacterium Ellin345; identical to SEQ ID NO: 83955
  CDS (1)..(1410): transl_table=11

SEQ ID NO: 93474 - protein, 469 aa, Acidobacteria bacterium Ellin345; identical to SEQ ID NO: 83956

SEQ ID NO: 93475 - DNA, 1371 bp, Acidobacteria bacterium Ellin345
  CDS (1)..(1371): transl_table=11
atgatcgtcatgaaatttggcgggacgtcggttgagagcgcggaggcgatcgaccgcgtcgccggcatcgtgcgtggaagactcgaccgtcgcccgacggtggtggtcagcgcgatgtcgaaggccacagaccaactgctcgcgatggctgctgcagccggcgcgggcgataaagagaaagctgtcacgctctgccaagcgctgcgcgatcgacacttcggagttgcaagtgcgctggtttcggacgcctcgaaccccgttcacacttcaatcgccgccgactatctagcgctggaacaacttcttgagggtatctgcgctgtcggcgaactgacgccgcgcacgcaggacaatgtcgtcgcttacggtgagcgtatcaacagcaaagtggtggctgcggcgttcgcagcgcgagggctgaaggctacgcatgtggatgcgcgcgagatcattgtcactgatcacaccttcggtaaggcgactccgcaggtggcggagatcgatcgtcgcctcatggcgaaggtgaaaccgctcatcgacgacggtgtggttccggtgttgggcggcttcatagggagcacgcctgatggcatcaccacgactatcggccgcggaggctcggacttctctgctgcgctcgtcggggcgggactaaacgctgaagcgattgagatatggaccgatgttgatggcatgaagacgacggatccgaatctctgtcctgatgcacaccggattaaggtcatcagcttcgaggaagcagctgagttggcgtacttcggcgccaaggttcttcacccagcgacggtactgcccgcgatcgagaagaatattccggtctatgtgctgaactcgcgcaatccatcgaacgaagggaccaagatcgtcgcgcgcgcaccgcagacgcggaatccgttcaaggccattgcggcgaagaagcgcattacggtgatcgatgtcgtcgctgcccgcatgttgatggcacacggcttcctccggcagatctttgaaatctttgaccggcacaagtgcgcggtggacgtcgtctcaacttccgaagtcagcgtctcgcttacggtggattcgaacgagcgcattccagagattgcagccgacatggagaaactcgcgttcgtgaaatactccggacgcaaggcgattgtgtgtctcgtgggggagaacatccgcgagcgtccgggcattgcggcgcaggtcttcaccgcgatttccgacattaacgtccgcatgatttctcaaggcgcttccgagatcaacatcacgttcgtgattgacgaggccgatgtgcccgaggctgtgcgtcgattgcacgcgcacttcttcaccgacgttgatccggaggtgtttgattga

SEQ ID NO: 93476 - protein, 456 aa, Acidobacteria bacterium Ellin345
MIVMKFGGTSVESAEAIDRVAGIVRGRLDRRPTVVVSAMSKATDQLLAMAAAAGAGDKEKAVTLCQALRDRHFGVASALVSDASNPVHTSIAADYLALEQLLEGICAVGELTPRTQDNVVAYGERINSKVVAAAFAARGLKATHVDAREIIVTDHTFGKATPQVAEIDRRLMAKVKPLIDDGVVPVLGGFIGSTPDGITTTIGRGGSDFSAALVGAGLNAEAIEIWTDVDGMKTTDPNLCPDAHRIKVISFEEAAELAYFGAKVLHPATVLPAIEKNIPVYVLNSRNPSNEGTKIVARAPQTRNPFKAIAAKKRITVIDVVAARMLMAHGFLRQIFEIFDRHKCAVDVVSTSEVSVSLTVDSNERIPEIAADMEKLAFVKYSGRKAIVCLVGENIRERPGIAAQVFTAISDINVRMISQGASEINITFVIDEADVPEAVRRLHAHFFTDVDPEVFD

SEQ ID NO: 93477 - DNA, 1392 bp, Solibacter usitatus Ellin6076; identical to SEQ ID NO: 83979
  CDS (1)..(1392): transl_table=11

SEQ ID NO: 93478 - protein, 463 aa, Solibacter usitatus Ellin6076; identical to SEQ ID NO: 83980

SEQ ID NO: 93479 - DNA, 1407 bp, Prosthecochloris aestuarii DSM 271; identical to SEQ ID NO: 83985
  CDS (1)..(1407): transl_table=11

SEQ ID NO: 93480 - protein, 468 aa, Prosthecochloris aestuarii DSM 271; identical to SEQ ID NO: 83986

SEQ ID NO: 93481 - DNA, 1350 bp, Escherichia coli B; identical to SEQ ID NO: 84005
  CDS (1)..(1350): transl_table=11

SEQ ID NO: 93482 - protein, 449 aa, Escherichia coli B; identical to SEQ ID NO: 84006

SEQ ID NO: 93483 - DNA, 1533 bp, Oryza sativa subsp
  CDS (1)..(1533)
atggcgatcgctctccgattcgcggccgcgccgctccgcctccgactcgtctcgccggcccctccggcgatcggcggcgcgggagatggaggaagaagaggaggaggaggagcagagcgtatcggtgtcctgggcagggctcgctgccgccgccgccgcggcggaggcgggagactggaggtggcggcggcggccgccgatgactccgctcgctgtcgggccaagggagtgggcgccgccgccgccgcggcggaaaccctaggtgggatcggggtgggaggtggggaccagctgagcgtggtgatgaagttcggggggtcgtcggtgtcgtcggcggcgaggatgcgggaggtggcgggcctcatcctcgccttccccgaggagcgccccgtcgtcgtcctctccgccatggggaagaccaccaatctcctcctcctcgctggtgagaaggcagtgggatgcggcgtgatccgtgtttcggaaattgaagagtggaatttgatcaaagatctacacattaaaactgtggaggaacttgcactgccaagatctgtaatacacactatgctggatgaactggagcagctcttgaaaggtattgcaatgatgaaagagctgacacttcggaccactgactaccttgtttcatttggggagtgcatgtctacacggatttttgctgcttatttgaacaaaatcggagtaaaagcacggcagtacgacacatttgatattggtttcataacaacagacgatttcggaaacgcggacatcttggaggcaacttatcctgctgttgcgaagagattacatggagactggattcgtgatccagcgatacctattgttactgggttccttgggaagggctggaaatcaggcgctgtaaccactttaggccgaggtggcagtgacttgactgctacaaccattggtaaagccctggggttgagagaaattcaggtatggaaagatgttgatggtgtactgacctgtgatccaaatatctacccgaatgcaaccactgtgccatacttaacatttgaagaggcagcagaacttgcttattttggtgcccaggtattacatccacaatctatgagacctgctagagaaggtgatataccagtcagggttaagaattcgtacaaccctaaagctccaggcaccctgatcactaaacaaagagagatggataaggttgtgctaactagcatagtgctcaagtcaaatgtcactatgttggatatagtaagcactcggatgcttggtcaatttggttttctggcaaaggaacttgaccatgtagttgaagagcttgagaaaattgcagttgtccatctacttcagcagagggcaataatatcactcattggaaacgtacggcgatcatctcttatactggaaaaggttaacatgtctctgattgttcatgatagcgaggcaaagcagtgcataaaggccctccaccaggctttcttcgaggacgatgtcctgacagaagtcgaggaagaagcccttcacatgagctga

SEQ ID NO: 93484 - protein, 510 aa, Oryza sativa subsp
MAIALRFAAAPLRLRLVSPAPPAIGGAGDGGRRGGGGAERIGVLGRARCRRRRGGGGRLEVAAAAADDSARCRAKGVGAAAAAAETLGGIGVGGGDQLSVVMKFGGSSVSSAARMREVAGLILAFPEERPVVVLSAMGKTTNLLLLAGEKAVGCGVIRVSEIEEWNLIKDLHIKTVEELALPRSVIHTMLDELEQLLKGIAMMKELTLRTTDYLVSFGECMSTRIFAAYLNKIGVKARQYDTFDIGFITTDDFGNADILEATYPAVAKRLHGDWIRDPAIPIVTGFLGKGWKSGAVTTLGRGGSDLTATTIGKALGLREIQVWKDVDGVLTCDPNIYPNATTVPYLTFEEAAELAYFGAQVLHPQSMRPAREGDIPVRVKNSYNPKAPGTLITKQREMDKVVLTSIVLKSNVTMLDIVSTRMLGQFGFLAKELDHVVEELEKIAVVHLLQQRAIISLIGNVRRSSLILEKVNMSLIVHDSEAKQCIKALHQAFFEDDVLTEVEEEALHMS

SEQ ID NO: 93485 - DNA, 1272 bp, Oryza sativa subsp
  CDS (1)..(1272)
atgaagatggctgtcactctgttcggtcgtggaggtggagtggccactgcttcaggaatcaggcgtcggcagatggagcgccggtgtattaggccgcagaaggttgggtacggcggccgtcgccacggagtggatagcgagcctgtgtcttgttggctgagttgccagcccccctgcagcgacgagtcagtggacgacgggaggagtcgaggcttgtcggatgagcttgagcaacttcttaagggaattgctatgatgaaagagcttactcttaggacaagagactatcttgtttccttcggtgaatgcatgtcaacaaggatatttgcggcacttttgaataaacttggggtgaaagcacgtcagtatgatgcatttgaaataggctttataaccactgatgatttcacaaacgctgatattctggaagcaacttatcctgccattgcaaagaggctacatggggactgggttactggtcctgctattccaatagtcactggttttctcggaaagggatggaaaactggtgcaatcaccactttaggcaggggtggtagtgacctgacagctactaccattggcaaagccttgggattaagagaaatccaggtttggaaagatgttgatggtgttttaacttgtgatcctaatattcatccaaatgcgaaacctgtgccatacttgacatttgatgaggcagctgaacttgcctattttggtgcacaggttttgcatccacaatcgatgcgaccagctagagaaggtgatatacctgtcagggttaaaaactcttataaccgccgagcccctggtacactcattactaaagctagagatatgagtaagactgttttgactagtattgtacttaaatcaaatattacaatgcttgatatagtgagcacacggatgcttggacaatatggttttctagctaaggtcttttcaatttttgaagatttgggcatctctgttgattgtgtagctacaagtgaagaacttgatcatgtcatcgaagaacttgaaaagatagcagttgttcacctactgcagcatagatcgataatttcgttaattggaaatgtgcagaggtcatctttgattcttgaaaaggtgaacatttccttggtggtccatgacagtgaggcaaagcagtgcgttcaagccctccactcagcattctttgagagtggtttcttgccagaagtcaatgatattctgcaggacgactctgtggcacattccaatggcacagtttacaggcattag

SEQ ID NO: 93486 - protein, 423 aa, Oryza sativa subsp
MKMAVTLFGRGGGVATASGIRRRQMERRCIRPQKVGYGGRRHGVDSEPVSCWLSCQPPCSDESVDDGRSRGLSDELEQLLKGIAMMKELTLRTRDYLVSFGECMSTRIFAALLNKLGVKARQYDAFEIGFITTDDFTNADILEATYPAIAKRLHGDWVTGPAIPIVTGFLGKGWKTGAITTLGRGGSDLTATTIGKALGLREIQVWKDVDGVLTCDPNIHPNAKPVPYLTFDEAAELAYFGAQVLHPQSMRPAREGDIPVRVKNSYNRRAPGTLITKARDMSKTVLTSIVLKSNITMLDIVSTRMLGQYGFLAKVFSIFEDLGISVDCVATSEELDHVIEELEKIAVVHLLQHRSIISLIGNVQRSSLILEKVNISLVVHDSEAKQCVQALHSAFFESGFLPEVNDILQDDSVAHSNGTVYRH

SEQ ID NO: 93487 - DNA, 1746 bp, Oryza sativa subsp; identical to SEQ ID NO: 84011
  CDS (1)..(1746)

SEQ ID NO: 93488 - protein, 581 aa, Oryza sativa subsp; identical to SEQ ID NO: 84012

SEQ ID NO: 93489 - DNA, 1449 bp, Oryza sativa subsp
  CDS (1)..(1449)
atggaggacgacgaggaggaggaggagcagctcgtatcggtgtcctgggcagggctcgctgccgccgccgccgcggcgaaggcgggagactggaggttgcggcggcggcccgccgatgactccgctcgctgtcgggccaagggagtgggcgccgccgccgccgcggcggaaaccctaggtgggatcggggtgggaggtggggaccagctgagcgtggtgatgaagttcggggggtcgtcggtgtcgtcggcggcgaggatgcgggaggtggcgggcctcatcctcgcattccccgaggagcgccccgtcgtcgtcctctccgccatggggaagaccaccaatctcctcctcctcgctggtgagaaggcagtgggatgcggcgtgatccgtgtttcggaaattgaagagtggaatttgatcaaagatctacacattaaaactgtggaggaacttgcactgccaagatctgtaatacacactatgctggatgaactggagcagctcttgaaaggtattgcaatgatgaaagagctgacacttcggaccactgactaccttgtttcatttggggagtgcatgtctacacggatttttgctgcttatttgaacaaaatcggagtaaaagcacggcagtacgacgcatttgatattggtttcataacaacagacgatttcggaaacgcggacatcttggaggcaacttatcctgctgttgcgaagagattacatggagactggattcgtgatccagcgatacctattgttactgggttccttgggaagggctggaaatcaggcgctgtaaccactttaggccgaggtggcagtgacttgactgctacaaccattggtaaagccctggggttgagagaaattcaggtatggaaagatgttgatggtgtactgacctgtgatccaaatatctacccgaatgcaaccactgtgccatacttaacatttgaagaggcagcagaacttgcttattttggtgcccaggtattacatccacaatctatgagacctgctagagaaggtgatataccagtcagggttaagaattcgtacaaccctaaagctccaggcaccctgatcactaaacaaagagagatggataaggttgtgctaactagcatagtgctcaagtcaaatgtcactatgttggatatagtaagcactcggatgcttggtcaatttggttttctggcaaaggaacttgaccatgtagttgaagagcttgagaaaattgcagttgtccatctacttcagcagagggcaataatatcactcattggaaacgtacggcgatcatctcttatactggaaaaggttaacatgtctctgattgttcatgatagcgaggcaaagcagtgcataaaggccctccaccaggcgttcttcgaggacgatgtcctgacagaagtcgaggaagaagcccttcacatgagctga

SEQ ID NO: 93490 - protein, 482 aa, Oryza sativa subsp
MEDDEEEEEQLVSVSWAGLAAAAAAAKAGDWRLRRRPADDSARCRAKGVGAAAAAAETLGGIGVGGGDQLSVVMKFGGSSVSSAARMREVAGLILAFPEERPVVVLSAMGKTTNLLLLAGEKAVGCGVIRVSEIEEWNLIKDLHIKTVEELALPRSVIHTMLDELEQLLKGIAMMKELTLRTTDYLVSFGECMSTRIFAAYLNKIGVKARQYDAFDIGFITTDDFGNADILEATYPAVAKRLHGDWIRDPAIPIVTGFLGKGWKSGAVTTLGRGGSDLTATTIGKALGLREIQVWKDVDGVLTCDPNIYPNATTVPYLTFEEAAELAYFGAQVLHPQSMRPAREGDIPVRVKNSYNPKAPGTLITKQREMDKVVLTSIVLKSNVTMLDIVSTRMLGQFGFLAKELDHVVEELEKIAVVHLLQQRAIISLIGNVRRSSLILEKVNMSLIVHDSEAKQCIKALHQAFFEDDVLTEVEEEALHMS

SEQ ID NO: 93491 - DNA, 1743 bp, Oryza sativa subsp
  CDS (1)..(1743)
atggcggtggcgctccggttcgcggccgtcgcgcgggactcgccggcggccgccgctccccccagggtggggagggagcagcagtatctcgcgtgcgcggcggcggcgaggccgggagggaggtgttcgaggaggaggggattggtggtgcggtgccagagcggggcggcggcggttgtcctcaacaaggacgacgcggcgtcggtggccgccgccgccgcctcctccgcgacggggttcaccgtcgccatgaagttcggcgggtcgtcggtggcgtcggcggagcggatgcgggaggtggccgatctcatactcagcttccccgaggagactcccgttgttgttctctccgccatggggaagaccaccaataacctcctcctggccggagagaaggctgtcagctgcggcgccccgaaggcgtctgaaattcccgagctcgcagttatcaaggagctccatgttaggactattgatgagcttggattggatagatcgattgtttcagcccaccatgttttaaacatgaaagattttagacagctgaaacatggtttattggaagaattggaacaacttcttaagggtgttgctatgatgaaagaactaactcctaggacacgggattaccttgtttccttcggtgaatgcatgtctacaagaatatttgctgcatatttgaataaacttgggaaaaaggctcggcagtatgatgcatttgatattggctttataactactgatgatttcacaaatgcggacattcttgaagcgacatatcctgctgttgcaaagaggttacagggtgattggattgacgaccctgctattcctatagttactggtttccttggaaaaggatggaaatcatgtgctgtcaccactttaggcagaggtggcagcgacttgactgctaccaccattggcaaagcgttgggattaagagagatccaggtatggaaggatgttgatggtgtgttgacatgtgatcctaatatttgtgcgaacgcgatacctgtaccctacttgacttttgaggaggcagctgaacttgcctactttggtgcacaggttttgcatccccaatcaatgagaccagccaaagaaggtgatataccagttagagttaagaattcatataaccgtcgagcacctggtactgttattactaaaacaagagatttgagcaagagtatattaaccagcattgtattgaagtcaaacattactatgctggatatagtgagcacaaggatgcttggccagtatggttttctggcgaaggttttctcaatatttgaagatttaggtatctctgttgattgtgtggctaccagtgaagtcagtatatcattgacactagatccatcaaaactatggtgtcgtgaattgatccagcaggaacttgatcatgtagttgaagaacttgaaaaaattgcagttgttcatctactgcagcacaggtctatcatctcactgatagggaatgtacagagatcgtcattgattcttgagaaggctttcaatgttctacggagaaatggcgttaacgtccagatgatctcacaaggggcatccaaggtgaacatttcattggtggtccatgatagcgaggcgaaacagtgtatacaggcccttcattcagcattctttgagaacggtttcttgtcagaagttgaggaagaggatcttcaacacaatggctctcctgtgagcccaaatggtgtcatttacggaaactag

SEQ ID NO: 93492 - protein, 580 aa, Oryza sativa subsp
MAVALRFAAVARDSPAAAAPPRVGREQQYLACAAAARPGGRCSRRRGLVVRCQSGAAAVVLNKDDAASVAAAAASSATGFTVAMKFGGSSVASAERMREVADLILSFPEETPVVVLSAMGKTTNNLLLAGEKAVSCGAPKASEIPELAVIKELHVRTIDELGLDRSIVSAHHVLNMKDFRQLKHGLLEELEQLLKGVAMMKELTPRTRDYLVSFGECMSTRIFAAYLNKLGKKARQYDAFDIGFITTDDFTNADILEATYPAVAKRLQGDWIDDPAIPIVTGFLGKGWKSCAVTTLGRGGSDLTATTIGKALGLREIQVWKDVDGVLTCDPNICANAIPVPYLTFEEAAELAYFGAQVLHPQSMRPAKEGDIPVRVKNSYNRRAPGTVITKTRDLSKSILTSIVLKSNITMLDIVSTRMLGQYGFLAKVFSIFEDLGISVDCVATSEVSISLTLDPSKLWCRELIQQELDHVVEELEKIAVVHLLQHRSIISLIGNVQRSSLILEKAFNVLRRNGVNVQMISQGASKVNISLVVHDSEAKQCIQALHSAFFENGFLSEVEEEDLQHNGSPVSPNGVIYGN

SEQ ID NO: 93493 - DNA, 2225 bp, Zea mays; identical to SEQ ID NO: 84015
  CDS (157)..(1902)

SEQ ID NO: 93494 - protein, 581 aa, Zea mays; identical to SEQ ID NO: 84016

SEQ ID NO: 93495 - DNA, 1584 bp, Phaeosphaeria nodorum; identical to SEQ ID NO: 84019
  CDS (1)..(1584)

SEQ ID NO: 93496 - protein, 527 aa, Phaeosphaeria nodorum; identical to SEQ ID NO: 84020

SEQ ID NO: 93497 - DNA, 1488 bp, Oryza sativa subsp
  CDS (1)..(1488)
atggcggtggcgctccggttcgcggccgtcgcgcgggactcgccggcggccgccgctccccccagggtggggagggagcagcagtatctcgcgtgcgcggcggcggcgaggccgggagggaggtgttcgaggaggaggggattggtggtgcggtgccagagcggggcggcggcggttgtcctcaacaaggacgacgcggcgtcggtggccgccgccgccgcctcctccgcgacggggttcaccgtcgccatgaagttcggcgggtcgtcggtggcgtcggcggagcggatgcgggaggtggccgatctcatactcagcttccccgaggagactcccgttgttgttctctccgccatggggaagaccaccaataacctcctcctggccggagagaaggctgtcagctgcggcgccccgaaggcgtctgaaattcccgagctcgcagttatcaaggagctccatgttaggactattgatgagcttggattggatagatcgattgtttcaggtttattggaagaattggaacaacttcttaagggtgttgctatgatgaaagaactaactcctaggacacgggattaccttgtttccttcggtgaatgcatgtctacaagaatatttgctgcatatttgaataaacttgggaaaaaggctcggcagtatgatgcatttgatattggctttataactactgatgatttcacaaatgcggacattcttgaagcgacatatcctgctgttgcaaagaggttacagggtgattggattgacgaccctgctattcctatagttactggtttccttggaaaaggatggaaatcatgtgctgtcaccactttaggcagaggtggcagcgacttgactgctaccaccattggcaaagcgttgggattaagagagatccaggtatggaaggatgttgatggtgtgttgacatgtgatcctaatatttgtgcgaacgcgatacctgtaccctacttgacttttgaggaggcagctgaacttgcctactttggtgcacaggttttgcatccccaatcaatgagaccagccaaagaaggtgatataccagttagagttaagaattcatataaccgtcgagcacctggtactgttattactaaaacaagagatttgagcaagagtatattaaccagcattgtattgaagtcaaacattactatgctggatatagtgagcacaaggatgcttggccagtatggttttctggcgaaggttttctcaatatttgaagatttaggtatctctgttgattgtgtggctaccagtgaagtcagtatatcattgacactagatccatcaaaactatggtgtcgtgaattgatccagcaggaacttgatcatgtagttgaagaacttgaaaaaattgcagttgttcatctactgcagcacaggtctatcatctcactgatagggaatgtacagagatcgtcattgattcttgagaaggttattatctcttag

SEQ ID NO: 93498 - protein, 495 aa, Oryza sativa subsp
MAVALRFAAVARDSPAAAAPPRVGREQQYLACAAAARPGGRCSRRRGLVVRCQSGAAAVVLNKDDAASVAAAAASSATGFTVAMKFGGSSVASAERMREVADLILSFPEETPVVVLSAMGKTTNNLLLAGEKAVSCGAPKASEIPELAVIKELHVRTIDELGLDRSIVSGLLEELEQLLKGVAMMKELTPRTRDYLVSFGECMSTRIFAAYLNKLGKKARQYDAFDIGFITTDDFTNADILEATYPAVAKRLQGDWIDDPAIPIVTGFLGKGWKSCAVTTLGRGGSDLTATTIGKALGLREIQVWKDVDGVLTCDPNICANAIPVPYLTFEEAAELAYFGAQVLHPQSMRPAKEGDIPVRVKNSYNRRAPGTVITKTRDLSKSILTSIVLKSNITMLDIVSTRMLGQYGFLAKVFSIFEDLGISVDCVATSEVSISLTLDPSKLWCRELIQQELDHVVEELEKIAVVHLLQHRSIISLIGNVQRSSLILEKVIIS

SEQ ID NO: 93499 - DNA, 1578 bp, Aspergillus oryzae; identical to SEQ ID NO: 84025
  CDS (1)..(1578)

SEQ ID NO: 93500 - protein, 525 aa, Aspergillus oryzae; identical to SEQ ID NO: 84026

SEQ ID NO: 93501 - DNA, 1722 bp, Oryza sativa subsp; identical to SEQ ID NO: 84027
  CDS (1)..(1722)

SEQ ID NO: 93502 - protein, 573 aa, Oryza sativa subsp; identical to SEQ ID NO: 84028

SEQ ID NO: 93503 - DNA, 1698 bp, Oryza sativa subsp; identical to SEQ ID NO: 84061
  CDS (1)..(1698)

SEQ ID NO: 93504 - protein, 565 aa, Oryza sativa subsp; identical to SEQ ID NO: 84062

SEQ ID NO: 93505 - DNA, 1695 bp, Glycine max; identical to SEQ ID NO: 84033
  CDS (1)..(1695)

SEQ ID NO: 93506 - protein, 564 aa, Glycine max; identical to SEQ ID NO: 84034

SEQ ID NO: 93507 - DNA, 2229 bp, Arabidopsis thaliana; identical to SEQ ID NO: 84041
  CDS (395)..(2029)

SEQ ID NO: 93508 - protein, 544 aa, Arabidopsis thaliana; identical to SEQ ID NO: 84042

SEQ ID NO: 93509 - DNA, 2164 bp, Arabidopsis thaliana; identical to SEQ ID NO: 84043
  CDS (322)..(2001)

SEQ ID NO: 93510 - protein, 559 aa, Arabidopsis thaliana; identical to SEQ ID NO: 84044

SEQ ID NO: 93511 - DNA, 1350 bp, Escherichia coli; identical to SEQ ID NO: 83835
  CDS (1)..(1350): transl_table=11

SEQ ID NO: 93512 - protein, 449 aa, Escherichia coli; identical to SEQ ID NO: 83836

SEQ ID NO: 93513 - DNA, 1560 bp, Schizosaccharomyces pombe; identical to SEQ ID NO: 84055
  CDS (1)..(1560)

SEQ ID NO: 93514 - protein, 519 aa, Schizosaccharomyces pombe; identical to SEQ ID NO: 84056

SEQ ID NO: 93515 - DNA, 2553 bp, Saccharomyces cerevisiae; identical to SEQ ID NO: 84057
  CDS (365)..(1948)

SEQ ID NO: 93516 - protein, 527 aa, Saccharomyces cerevisiae; identical to SEQ ID NO: 84058

SEQ ID NO: 93517 - DNA, 1680 bp, Oryza sativa; identical to SEQ ID NO: 84059
  CDS (1)..(1680)

SEQ ID NO: 93518 - protein, 559 aa, Oryza sativa; identical to SEQ ID NO: 84060

SEQ ID NO: 93519 - DNA, 1701 bp, Zea mays; identical to SEQ ID NO: 84063
  CDS (1)..(1701)

SEQ ID NO: 93520 - protein, 566 aa, Zea mays; identical to SEQ ID NO: 84064

SEQ ID NO: 93521 - DNA, 1698 bp, Zea mays; identical to SEQ ID NO: 84065
  CDS (1)..(1698)

SEQ ID NO: 93522 - protein, 565 aa, Zea mays; identical to SEQ ID NO: 84066

SEQ ID NO: 93523 - DNA, 20 bp, Artificial sequence
  primer
atggcggctactagggttcg

SEQ ID NO: 93524 - DNA, 23 bp, Artificial sequence
  primer
tcaattttctacttgcagtgtcc

SEQ ID NO: 93525 - protein, 526 aa, Artificial sequence
  consensus sequence
  Variant (2)..(2): Xaa in position 2 is any amino acid
  Variant (7)..(7): Xaa in position 7 is any amino acid
  Variant (10)..(25): Xaa in position 10 to 25 is any amino acid
  Variant (26)..(33): Xaa in position 26 to 33 is any or no amino acid
  Variant (36)..(36): Xaa in position 36 is any amino acid
  Variant (39)..(42): Xaa in position 39 to 42 is any amino acid
  Variant (44)..(45): Xaa in position 44 to 45 is any amino acid
  Variant (47)..(66): Xaa in position 47 to 66 is any amino acid
  Variant (67)..(112): Xaa in position 67 to 112 is any or no amino acid
  Variant (114)..(120): Xaa in position 114 to 120 is any amino acid
  Variant (121)..(121): Xaa in position 121 is any or no amino acid
  Variant (123)..(125): Xaa in position 123 to 125 is any amino acid
  Variant (127)..(128): Xaa in position 127 to 128 is any amino acid
  Variant (130)..(132): Xaa in position 130 to 132 is any amino acid
  Variant (134)..(134): Xaa in position 134 is any amino acid
  Variant (137)..(138): Xaa in position 137 to 138 is any amino acid
  Variant (140)..(146): Xaa in position 140 to 146 is any amino acid
  Variant (148)..(150): Xaa in position 148 to 150 is any amino acid
  Variant (152)..(153): Xaa in position 152 to 153 is any amino acid
  Variant (155)..(164): Xaa in position 155 to 164 is any amino acid
  Variant (165)..(176): Xaa in position 165 to 176 is any or no amino acid
  Variant (178)..(183): Xaa in position 178 to 183 is any amino acid
  Variant (185)..(210): Xaa in position 185 to 210 is any amino acid
  Variant (211)..(220): Xaa in position 211 to 220 is any or no amino acid
  Variant (223)..(223): Xaa in position 223 is any amino acid
  Variant (225)..(231): Xaa in position 225 to 231 is any amino acid
  Variant (232)..(232): Xaa in position 232 is any or no amino acid
  Variant (242)..(243): Xaa in position 242 to 243 is any amino acid
  Variant (245)..(250): Xaa in position 245 to 250 is any amino acid
  Variant (252)..(258): Xaa in position 252 to 258 is any amino acid
  Variant (260)..(260): Xaa in position 260 is any amino acid
  Variant (263)..(263): Xaa in position 263 is any amino acid
  Variant (265)..(266): Xaa in position 265 to 266 is any amino acid
  Variant (268)..(268): Xaa in position 268 is any amino acid
  Variant (271)..(275): Xaa in position 271 to 275 is any amino acid
  Variant (277)..(283): Xaa in position 277 to 283 is any amino acid
  Variant (285)..(285): Xaa in position 285 is any amino acid
  Variant (292)..(292): Xaa in position 292 is any amino acid
  Variant (296)..(296): Xaa in position 296 is any amino acid
  Variant (301)..(304): Xaa in position 301 to 304 is any amino acid
  Variant (307)..(310): Xaa in position 307 to 310 is any amino acid
  Variant (314)..(314): Xaa in position 314 is any amino acid
  Variant (316)..(316): Xaa in position 316 is any amino acid
  Variant (319)..(324): Xaa in position 319 to 324 is any amino acid
  Variant (327)..(327): Xaa in position 327 is any amino acid
  Variant (329)..(343): Xaa in position 329 to 343 is any amino acid
  Variant (344)..(370): Xaa in position 344 to 370 is any or no amino acid
  Variant (372)..(380): Xaa in position 372 to 380 is any amino acid
  Variant (382)..(383): Xaa in position 382 to 383 is any amino acid
  Variant (386)..(388): Xaa in position 386 to 388 is any amino acid
  Variant (393)..(393): Xaa in position 393 is any amino acid
  Variant (394)..(394): Xaa in position 394 is any or no amino acid
  Variant (396)..(404): Xaa in position 396 to 404 is any amino acid
  Variant (407)..(409): Xaa in position 407 to 409 is any amino acid
  Variant (414)..(420): Xaa in position 414 to 420 is any amino acid
  Variant (421)..(446): Xaa in position 421 to 446 is any or no amino acid
  Variant (449)..(453): Xaa in position 449 to 453 is any amino acid
  Variant (454)..(455): Xaa in position 454 to 455 is any or no amino acid
  Variant (457)..(466): Xaa in position 457 to 466 is any amino acid
  Variant (468)..(468): Xaa in position 468 is any amino acid
  Variant (470)..(480): Xaa in position 470 to 480 is any amino acid
  Variant (481)..(482): Xaa in position 481 to 482 is any or no amino acid
  Variant (484)..(485): Xaa in position 484 to 485 is any amino acid
  Variant (486)..(491): Xaa in position 486 to 491 is any or no amino acid
  Variant (493)..(494): Xaa in position 493 to 494 is any amino acid
  Variant (497)..(498): Xaa in position 497 to 498 is any amino acid
  Variant (502)..(502): Xaa in position 502 is any amino acid
  Variant (503)..(503): Xaa in position 503 is any or no amino acid
  Variant (505)..(512): Xaa in position 505 to 512 is any amino acid
  Variant (513)..(513): Xaa in position 513 is any or no amino acid
  Variant (515)..(520): Xaa in position 515 to 520 is any amino acid
  Variant (523)..(525): Xaa in position 523 to 525 is any amino acid
VXKFGGXSVXXXXXXXXXXXXXXXXXXXXXXXXVVXSAXXXXTXXLXXXXXXXXXXXXXXXXXXXXXXXXXXXXXXXXXXXXXXXXXXXXXXXXXXXXXXXXXXXXXXXXXXLXXXXXXXXEXXXRXXDXXXSXGEXXSXXXXXXXLXXXGXXAXXXXXXXXXXXXXXXXXXXXXXTXXXXXXAXXXXXXXXXXXXXXXXXXXXXXXXXXXXXXXXXXXXGFXGXXXXXXXXTTLGRGGSDXXAXXXXXXLXXXXXXXWXDVXGXXTXDPXXXXXAXXXXXXXFXEAAELAXFGAXVLHPXXXXPAXXXXIPVXVXNSXXXXXXGTXIXXXXXXXXXXXXXXXXXXXXXXXXXXXXXXXXXXXXXXXXXXKXXXXXXXXXSXXMLXXXGFLAXXFXXXXXXXXXVDXXXTSEVXXXXXXXXXXXXXXXXXXXXXXXXXXXXXXXXXELXXXXXXXVXXXXXXXXXXLXGXXXXXXXXXXXXXFXXXXXXXXNXXMIXXGASXXNXXXXXXXXXAXXXXXXLHXXXF

SEQ ID NO: 93526 - protein, 55 aa, Artificial sequence
  protein pattern
  Variant (2)..(2): Xaa in position 2 is Ile, Met or Val
  Variant (3)..(3): Xaa in position 3 is any amino acid
  Variant (4)..(4): Xaa in position 4 is Ser or Thr
  Variant (5)..(5): Xaa in position 5 is Ala, Cys or Thr
  Variant (8)..(8): Xaa in position 8 is any amino acid
  Variant (9)..(9): Xaa in position 9 is Ile, Leu or Val
  Variant (10)..(12): Xaa in position 10 to 12 is any amino acid
  Variant (13)..(13): Xaa in position 13 is Ala or Gly
  Variant (14)..(15): Xaa in position 14 to 15 is any amino acid
  Variant (16)..(16): Xaa in position 16 is Ile or Val
  Variant (17)..(18): Xaa in position 17 to 18 is any amino acid
  Variant (19)..(19): Xaa in position 19 is Ile, Leu or Met
  Variant (20)..(20): Xaa in position 20 is Ala, Asp, Gly, Ser or Thr
  Variant (22)..(22): Xaa in position 22 is Ala, Asp, Glu or Ser
  Variant (25)..(25): Xaa in position 25 is Ala, Ser or Thr
  Variant (27)..(27): Xaa in position 27 is Leu or Met
  Variant (29)..(29): Xaa in position 29 is any amino acid
  Variant (30)..(30): Xaa in position 30 is Phe or Leu
  Variant (33)..(33): Xaa in position 33 is any amino acid
  Variant (38)..(38): Xaa in position 38 is any amino acid
  Variant (39)..(39): Xaa in position 39 is Ser or Thr
  Variant (40)..(40): Xaa in position 40 is Ile, Leu, Met or Val
  Variant (41)..(41): Xaa in position 41 is any amino acid
  Variant (44)..(46): Xaa in position 44 to 46 is any amino acid
  Variant (47)..(47): Xaa in position 47 is Asp, Glu, Gly or Asn
  Variant (48)..(48): Xaa in position 48 is Ile or Val
  Variant (51)..(51): Xaa in position 51 is any amino acid
  Variant (52)..(52): Xaa in position 52 is Ile or Val
  Variant (53)..(53): Xaa in position 53 is any amino acid
  Variant (54)..(54): Xaa in position 54 is Asn or Ser
  Variant (55)..(55): Xaa in position 55 is Ser or Thr
GXXXXDPXXXXXXXXXXXXXFXEAXEXAXXGAXVLHPXXXXPAXXXXXPVXXXXX

SEQ ID NO: 93527 - protein, 29 aa, Artificial sequence
  protein pattern
  Variant (2)..(3): Xaa in position 2 to 3 is any or no amino acid
  Variant (5)..(9): Xaa in position 5 to 9 is any amino acid
  Variant (10)..(10): Xaa in position 10 is Ile, Leu or Val
  Variant (11)..(11): Xaa in position 11 is Asp, Asn or Ser
  Variant (12)..(12): Xaa in position 12 is Phe, Ile or Val
  Variant (13)..(13): Xaa in position 13 is any amino acid
  Variant (14)..(14): Xaa in position 14 is Ala or Ser
  Variant (15)..(15): Xaa in position 15 is Ala, Asn, Pro or Thr
  Variant (16)..(16): Xaa in position 16 is Lys or Arg
  Variant (17)..(21): Xaa in position 17 to 21 is any amino acid
  Variant (24)..(24): Xaa in position 24 is Phe, Leu or Met
  Variant (25)..(27): Xaa in position 25 to 27 is any amino acid
  Variant (28)..(28): Xaa in position 28 is Phe or Leu
  Variant (29)..(29): Xaa in position 29 is Ala, Asp, Glu, Asn, Ser or Thr
IXXKXXXXXXXXXXXXXXXXXGFXXXXXX

SEQ ID NO: 93528 - protein, 28 aa, Artificial sequence
  protein pattern
  Variant (2)..(3): Xaa in position 2 to 3 is any or no amino acid
  Variant (5)..(6): Xaa in position 5 to 6 is any amino acid
  Variant (7)..(8): Xaa in position 7 to 8 is any or no amino acid
  Variant (11)..(11): Xaa in position 11 is any amino acid
  Variant (12)..(12): Xaa in position 12 is Leu or Met
  Variant (14)..(14): Xaa in position 14 is Cys, Ser or Thr
  Variant (15)..(16): Xaa in position 15 to 16 is any amino acid
  Variant (17)..(17): Xaa in position 17 is Phe, Met or Val
  Variant (18)..(18): Xaa in position 18 is Ala, Ser, Thr or Val
  Variant (19)..(19): Xaa in position 19 is Ala, Glu or Gln
  Variant (20)..(27): Xaa in position 20 to 27 is any amino acid
  Variant (28)..(28): Xaa in position 28 is Ala, Ser or Val
DXXLXXXXGEXXSXXXXXXXXXXXXXXX

SEQ ID NO: 93529 - protein, 19 aa, Artificial sequence
  protein pattern
  Variant (3)..(3): Xaa in position 3 is Ile or Leu
  Variant (5)..(6): Xaa in position 5 to 6 is any amino acid
  Variant (10)..(10): Xaa in position 10 is any amino acid
  Variant (11)..(11): Xaa in position 11 is Ser or Thr
  Variant (13)..(13): Xaa in position 13 is Ala, Ser or Thr
  Variant (14)..(14): Xaa in position 14 is any amino acid
  Variant (15)..(15): Xaa in position 15 is Phe, Ile, Leu or Val
  Variant (16)..(16): Xaa in position 16 is Ala or Gly
  Variant (17)..(18): Xaa in position 17 to 18 is any amino acid
TTXGXXGSDXXAXXXXXXL

SEQ ID NO: 93530 - protein, 13 aa, Artificial sequence
  protein pattern
  Variant (2)..(2): Xaa in position 2 is Asp or Glu
  Variant (3)..(3): Xaa in position 3 is any amino acid
  Variant (4)..(4): Xaa in position 4 is Ile or Val
  Variant (5)..(5): Xaa in position 5 is Ala, Ser or Thr
  Variant (6)..(6): Xaa in position 6 is Ser or Thr
  Variant (10)..(11): Xaa in position 10 to 11 is any or no amino acid
  Variant (13)..(13): Xaa in position 13 is Ile, Leu, Met or Val
VXXXXXSEVXXSX

SEQ ID NO: 93531 - protein, 19 aa, Artificial sequence
  protein pattern
  Variant (2)..(2): Xaa in position 2 is any or no amino acid
  Variant (4)..(4): Xaa in position 4 is any amino acid
  Variant (5)..(5): Xaa in position 5 is any or no amino acid
  Variant (8)..(10): Xaa in position 8 to 10 is any amino acid
  Variant (11)..(11): Xaa in position 11 is any or no amino acid
  Variant (13)..(13): Xaa in position 13 is Asp, Asn or Thr
  Variant (14)..(14): Xaa in position 14 is any amino acid
  Variant (16)..(16): Xaa in position 16 is Ile, Leu or Val
  Variant (17)..(18): Xaa in position 17 to 18 is any amino acid
  Variant (19)..(19): Xaa in position 19 is Ala or Gly
VXVXXSAXXXXTXXLXXXX

SEQ ID NO: 93532 - DNA, 1086 bp, Azotobacter vinelandii
  CDS (1)..(1086): transl_table=11
atgctggcctacatcctgcgccgcctgctgctgatcgtaccgaccctgttcggcatcctgctgctcaacttcgtcatcatccaggccgctcccggcggcccggtggagcagaccatcgccagactggaaggcttcgaggccgcatccggcggcgccaccggccgcatttccggcggcggcggcgaagtttccgggggcagctcccgctaccgcggcgcccagggcctggaccccgatctgatcgccgagatcgagcgcatgtacggcttcgacaagccggcccacgagcgtttctggctgatgctgaccaactacctgaagctggacttcggcgagagcttcttccgcgacgccagggtcaccgacctgatcctcgagaagatgccggtgtcgatctccctggggctgtggagcaccctgatcatgtacctggtgtccattcccctggggatcgccaaggcggtgcgccacggcagcgccttcgacgtctggaccagttcggcgatcatcgtcggctatgcgatcccggccttcctgttcgccatcctgctcatcgtactgttcgccggcggcagctatttcgactggttcccgctgcgcgggctgacctcgaacaacttcgacgaactcagcttgggcggcaagatcctcgactacttctggcacctgaccctgccggtgaccgccctggtgatcggcaacttcgccaccctcaccctgctgaccaagaacagcttcctcgacgagatcaacaagcagtacgtggtcaccgcgcgcgccaagggcctgtcgaagaaccgcgtgctctacgggcacgtgttccgcaacgccatgctgatcgtcatcgccggcttcccctcggccttcatcggcctgttcttcaccggctcgctgctgatcgaggtgatcttctccctcgacggcctgggcctcttgagcttcgaggcggcgatcaaccgcgactatccggtggtgttcggcaccctcttcatcttcaccctgctgggactggtcgtgaaactgatcggcgatctcacctacaccctggtcgatccacgcatcgacttcgaaagccgggagagctga

SEQ ID NO: 93533 - protein, 361 aa, Azotobacter vinelandii
MLAYILRRLLLIVPTLFGILLLNFVIIQAAPGGPVEQTIARLEGFEAASGGATGRISGGGGEVSGGSSRYRGAQGLDPDLIAEIERMYGFDKPAHERFWLMLTNYLKLDFGESFFRDARVTDLILEKMPVSISLGLWSTLIMYLVSIPLGIAKAVRHGSAFDVWTSSAIIVGYAIPAFLFAILLIVLFAGGSYFDWFPLRGLTSNNFDELSLGGKILDYFWHLTLPVTALVIGNFATLTLLTKNSFLDEINKQYVVTARAKGLSKNRVLYGHVFRNAMLIVIAGFPSAFIGLFFTGSLLIEVIFSLDGLGLLSFEAAINRDYPVVFGTLFIFTLLGLVVKLIGDLTYTLVDPRIDFESRES

SEQ ID NO: 93534 - DNA, 1095 bp, Klebsiella pneumoniae subsp. pneumoniae MGH 78578
  CDS (1)..(1095): transl_table=11
atgggcagctacctgatccgccgtttgctgttagtcatccccaccctgtgggccatcatcaccattaacttttttattgtccagatcgcgcctggcggcccggtcgatcaggccatcgccgccatcgagtttaatcagcgcggcgggatgccgggggctggcgacggcgggatgggcgccagccattcccgcaccggcgcaggcaatatcagcgagggtcactatcgcggcgggcgcggcctcgacccggaagtcatcgccgagataacccaccgctacggcttcgataaacctctccatgagcgctatctgaagatgctgggcgattatctgcgctttgatttcggcgacagcctgtttcgcagcgcctccgtgctgcagctgattaaagacagcctgccggtctcggtgagcctcgggctgtggagcacgctgattatctatctggtctccattccgctgggcatccgcaaagcggtcagcaacggcagccgctttgatatctggagcagtacgctgattatcattggctatgcgatccctgcctttctgttcgccatcctgctgatcgtgatttttgccggcggcagctatttcgacctcttcccgctgcgcggtctggtctcgccaaatttcgacaccctcccctggtatcagaagatcctcgactacctgtggcacatcaccctgccggtgctggcgacggtaattggcggctttgccgcgctgactatgctgaccaaaaacagcttcctcgacgagatccgcaaacagtatgtggtcaccgcccgcgccaaaggcgttggtgagaaacagatcctctggggacacgtgttccgtaacgccatgctgctggtaatcgccggcttcccggccacctttatcagtatgttctttaccggctcgttgctgatcgaagtgatgttctcgctaaacggcctgggtctgctgggctatgaagcgacggtctcccgcgactatccggtgatgtttggcacgctctatattttcactctgattggcctgctgctgaatatcgtcagcgatatcagctatacgctggtcgacccgcgcattgattttgagggccgctaa

SEQ ID NO: 93535 - protein, 364 aa, Klebsiella pneumoniae subsp. pneumoniae MGH 78578
MGSYLIRRLLLVIPTLWAIITINFFIVQIAPGGPVDQAIAAIEFNQRGGMPGAGDGGMGASHSRTGAGNISEGHYRGGRGLDPEVIAEITHRYGFDKPLHERYLKMLGDYLRFDFGDSLFRSASVLQLIKDSLPVSVSLGLWSTLIIYLVSIPLGIRKAVSNGSRFDIWSSTLIIIGYAIPAFLFAILLIVIFAGGSYFDLFPLRGLVSPNFDTLPWYQKILDYLWHITLPVLATVIGGFAALTMLTKNSFLDEIRKQYVVTARAKGVGEKQILWGHVFRNAMLLVIAGFPATFISMFFTGSLLIEVMFSLNGLGLLGYEATVSRDYPVMFGTLYIFTLIGLLLNIVSDISYTLVDPRIDFEGR

SEQ ID NO: 93536 - DNA, 1116 bp, Xanthobacter autotrophicus Py2; identical to SEQ ID NO: 39106
  CDS (1)..(1116): transl_table=11

SEQ ID NO: 93537 - protein, 371 aa, Xanthobacter autotrophicus Py2; identical to SEQ ID NO: 39107

SEQ ID NO: 93538 - DNA, 1095 bp, Mesorhizobium loti MAFF303099
  CDS (1)..(1095): transl_table=11
atgggcgcctatatactgcgccgcatccttttgatgatcccgaccctgttcggcatcatggcgatctccttcgccgtcatccagttcgcgccgggcggcccggtcgagcaggtgatcgccaagctgaccaatcagggcggcagcgaccgcctcggcggtggcggtggcgatgcgggcggtaccaatttcgacgtcgccggcgacgtcagctcgaaatatcgcggcgcgcaggggctcgatccggaattcatcaagaagctggagaagcagttcggcttcgacaagccgccgctcgagcgcttcggcatgatgctgtggaactacatccgcttcgatttcggcaacagctacttccgcgacatctcggtgctcgacctgatcctggaaaagatgccggtgtcgatttcgatcgggctctggatcacgctcttgtcctatctgatttccatcccgctcggcatccgcaaggcggtgaaggacggcacgcccttcgacgtctggaccagcggcgtcgtcatcgtcggctatgccattcccggcttcctgttcggcatcatgctcatggtgctgttcgccggcggatccttctgggactggttcccattgcgcggcatcgtctcggacaattgggaccagttgtcctggctaggcaagatcgccgactatttctggcacatgaccctgccgctgacggcgctggtgctgtcggccttcgccacgacgacgcttttgaccaagaactcgttcctggaggaaatccgcaagcagtatgtggtgacggcgcgggccaagggcctgtcggagcgacaagtgctctacggccatgtcttccgcaatgccatgctgatcgtcattgccggctttcccggcgccttcatctcggccttcttcaccggctcgctgctgatcgagaacatcttctcgctcgatggtctcggcctgctcggcttccgctcggtggtcgagcgcgactatccggtggttttcgccaacctctatatcttctcgcttctcggcctgttcgtcggcttgctgtccgacctcatctacacctgggtcgatccgcgcatcgatttcgagcggagagacgtctga

SEQ ID NO: 93539 - protein, 364 aa, Mesorhizobium loti MAFF303099
MGAYILRRILLMIPTLFGIMAISFAVIQFAPGGPVEQVIAKLTNQGGSDRLGGGGGDAGGTNFDVAGDVSSKYRGAQGLDPEFIKKLEKQFGFDKPPLERFGMMLWNYIRFDFGNSYFRDISVLDLILEKMPVSISIGLWITLLSYLISIPLGIRKAVKDGTPFDVWTSGVVIVGYAIPGFLFGIMLMVLFAGGSFWDWFPLRGIVSDNWDQLSWLGKIADYFWHMTLPLTALVLSAFATTTLLTKNSFLEEIRKQYVVTARAKGLSERQVLYGHVFRNAMLIVIAGFPGAFISAFFTGSLLIENIFSLDGLGLLGFRSVVERDYPVVFANLYIFSLLGLFVGLLSDLIYTWVDPRIDFERRDV

SEQ ID NO: 93540 - DNA, 972 bp, Pyrococcus horikoshii OT3
  CDS (1)..(972): transl_table=11
atgggatcaatgaaggtttatattataaagaggagtattcaactcatcctggtaatattcttcgtcttgttcttaaattttataataataaatgccgctcctggtaatcccgctcaactcatggctggagagtatagtacagaggaatatattaaggcaatagaagcccgatggggattagataaacctattcacattagattcttgatatacatgaaaaacctcctgcatggggatttaggatattcttatagatatcttgaaccagtttcaaaacttataatggagagaattggaaaaaccctacttctcacagttccaagtataattttggcatttctagttggagtatggcttgcaagaatagcagcgaggaagcctggaggtaagcttgatgtatcgctctctataataactttgatattttactcaatgccttcattttggcttggcctgcttttaatcttagtatttggagttaaacttggaattttgccaatagcgggaatgactaatattagggccgtttactcaagctcttgggataaggcatttgatatattaaaacatatggtcctcccagttacgacgctcatgctaattcagattccagcatactttaggattactaggggagccataattgaacagtctacagaggattatgtgaaaacctttgatgcggtagggttttcaaagaagcacattttcaataaatacatattcagaaacgccatcttacctccagttaccattctaggtcttaggctcggttatgcgttttctggtgctgccctagttgaaatagtttttggatggccaggaatgggaagactattgctagatgctgcatttgcaagggattatcctttgataatgggaatttatctagtgattgcagttagtgtagccgttgcgatattcatcacagatctattgtatgcggttctcgatcctaggataaggtattag

SEQ ID NO: 93541 - protein, 323 aa, Pyrococcus horikoshii OT3
MGSMKVYIIKRSIQLILVIFFVLFLNFIIINAAPGNPAQLMAGEYSTEEYIKAIEARWGLDKPIHIRFLIYMKNLLHGDLGYSYRYLEPVSKLIMERIGKTLLLTVPSIILAFLVGVWLARIAARKPGGKLDVSLSIITLIFYSMPSFWLGLLLILVFGVKLGILPIAGMTNIRAVYSSSWDKAFDILKHMVLPVTTLMLIQIPAYFRITRGAIIEQSTEDYVKTFDAVGFSKKHIFNKYIFRNAILPPVTILGLRLGYAFSGAALVEIVFGWPGMGRLLLDAAFARDYPLIMGIYLVIAVSVAVAIFITDLLYAVLDPRIRY

SEQ ID NO: 93542 - DNA, 1047 bp, Helicobacter pylori 26695
  CDS (1)..(1047): transl_table=11
atgattgcttacattctcaaacgcttgcttttgattatccctactttattagctatcatgaccattaatttctttttgatccaatcggctcctggaggccctatagagcagatgatggctaaaatcaataacacgcagtccaaagagattcaaggcgttgttaaagagcgttcgtatagggcgtctcaagggttggagagcgatttgttagaaaatttaaaaaaactctatggttttgacaagcccataggggagcgctaccttctcatgctcaaaaaatatctgcaatttgattttggggagagcttttatcgccagattaaagtgatagatttgattaaggaaaaattgcccgtatccatttcgttagggctttttagcacgcttttgatttatcttatttctatccctttagggattttcaaggccaaacgcaataacgagcctttagacgtgttaagcagcgtggtgatcattgtcgctaacgctatcccggcctttttgtttgcggtggtgttgatcgtgttttttgctggagggaattattggcattggttccctttaaaggggctagtgagcgataattttgaaagtttgagcgcgttaggtaaaatcaaggattatttatggcatatcactttgcccgttctttgcatttctttagggggttttgcaagccttacgcttttagtgaaaaactcttttttagatgaaatgggcaagctctatgtactgagcgctaaggctaagggttgttcagtggggcgtattttttatgcgcatgtgttccgtaatgcgattttattagtggtggcgggtttcccgcaagcttttttgggcatgttctttagctcaagtttgttgatagagattgtttttagcctagacgggttagggcttttagggtatgaaagcattgtgagtagggattatcccgttgtgtttggttcgctttatattttcacgcttttaggtttggtagcgagtttgataagcgatttgctctgtgtggtgattgaccctaggattgattttgaaaagcgttga

SEQ ID NO: 93543 - protein, 348 aa, Helicobacter pylori 26695
MIAYILKRLLLIIPTLLAIMTINFFLIQSAPGGPIEQMMAKINNTQSKEIQGVVKERSYRASQGLESDLLENLKKLYGFDKPIGERYLLMLKKYLQFDFGESFYRQIKVIDLIKEKLPVSISLGLFSTLLIYLISIPLGIFKAKRNNEPLDVLSSVVIIVANAIPAFLFAVVLIVFFAGGNYWHWFPLKGLVSDNFESLSALGKIKDYLWHITLPVLCISLGGFASLTLLVKNSFLDEMGKLYVLSAKAKGCSVGRIFYAHVFRNAILLVVAGFPQAFLGMFFSSSLLIEIVFSLDGLGLLGYESIVSRDYPVVFGSLYIFTLLGLVASLISDLLCVVIDPRIDFEKR

SEQ ID NO: 93544 - DNA, 1083 bp, Vibrio cholerae O1 biovar eltor str. N16961; identical to SEQ ID NO: 39042
  CDS (1)..(1083): transl_table=11

SEQ ID NO: 93545 - protein, 360 aa, Vibrio cholerae O1 biovar eltor str. N16961; identical to SEQ ID NO: 39043

SEQ ID NO: 93546 - DNA, 1074 bp, Pseudomonas aeruginosa PAO1
  CDS (1)..(1074): transl_table=11
atgggcggctacctgttgcgccgcctggcgctgatcctgccgaccctgctgggcatcctgctgatcaacttcgccatcgtccaggccgcacccggcgggccggtggatcaggccatcgcgcgcctgcagggcgtcgacggcggcggcccgctggggcgtggcggggagggtgggcatggcgctctggaaccgcagcgccacggcgagaccggcatcgatccgcagctggtggccgccctggagcgccagtacggcttcgacaagccgccgctgcaacggctctggctgatgctgtcgagctacgcccggctggatttcggcgagagcttctaccgcgacgcgcgggtcatcgacctgatcgccgagaagctgccggtctcgctgtccctgggcttgtgggcgacactgatcacctacctggtgtcgattcccctgggggtggccaaggcggtgcgccacggcagcgccttcgacctgtggagcagcgcgctggtggtgatcggctatgcggtgcccggcttcctcttcgccatcgtcctgatcgtgctgttcgccggcggcagctacctggactggttccccctgcgcggcctggcttccgagggcgccgagcgcctcggcccgctggcgcgcttcgccgattacctctggcacctggcgctgccggtgggttcgctggtggtcggcggtttcgccagcctgaccctgctgaccaagaacagcttcctcgacgagatatccaggcagtacgtcgccaccgctcgcgccaaagggctcagcgagcgccgggtgctctacggccatgtgttccgcaacgccatgttgctggtggtggccgggctgccggcggcgctggtctcggtgttcttcaccgggtcgctgctgatcgaggtgctgttctccctcgacggcctcggcctgatgggctacgaagcggcgctcggccgcgactacccggtggtgttcggcagcctgttcatcttcaccctgctcgggttgctggtgaagctggccggcgacctggcctacagcctggtcgacccgcgcatcgacttcgccgcgaggagacagtga

SEQ ID NO: 93547 - protein, 357 aa, Pseudomonas aeruginosa PAO1
MGGYLLRRLALILPTLLGILLINFAIVQAAPGGPVDQAIARLQGVDGGGPLGRGGEGGHGALEPQRHGETGIDPQLVAALERQYGFDKPPLQRLWLMLSSYARLDFGESFYRDARVIDLIAEKLPVSLSLGLWATLITYLVSIPLGVAKAVRHGSAFDLWSSALVVIGYAVPGFLFAIVLIVLFAGGSYLDWFPLRGLASEGAERLGPLARFADYLWHLALPVGSLVVGGFASLTLLTKNSFLDEISRQYVATARAKGLSERRVLYGHVFRNAMLLVVAGLPAALVSVFFTGSLLIEVLFSLDGLGLMGYEAALGRDYPVVFGSLFIFTLLGLLVKLAGDLAYSLVDPRIDFAARRQ

SEQ ID NO: 93548 - DNA, 1083 bp, Sinorhizobium meliloti 1021; identical to SEQ ID NO: 39044
  CDS (1)..(1083): transl_table=11

SEQ ID NO: 93549 - protein, 360 aa, Sinorhizobium meliloti 1021; identical to SEQ ID NO: 39045

SEQ ID NO: 93550 - DNA, 1095 bp, Salmonella typhimurium LT2
  CDS (1)..(1095): transl_table=11
atgggcgcctatcttatccgccgtctgttactggtgatccccacgctatgggccattattaccattaacttttttatcgtgcagatcgctcccggcggccctgtcgatcaggcgattgccgcgattgaatttggccagggcggcgcgttgcccggcgccagcggcgaaggcgttcgcgccagtcatgcgcaaaccggcgtcggcaatatcagcgacagccattatcgcggcggccggggactcgatccggaggtgatcgcggagatcacccatcgctacggcttcgacaaaccgctgcatgagcgttatttcaagatgctacgggactatctctcttttgacttcggcgacagtctgtttcgcagcgcatccgtactaacgctgatcaaagatagccttcccgtctccattaccctgggattatggagcacgctgattatttatctggtgtctatcccgctggggattcgcaaagccgtccataacggcagtcgctttgatgtgtggagcagcgcgtttatcattattggttatgcgatccccgcctttctgttcgctattttattaatcgtcttttttgccggcggcagctactacgatatctttccgctacgtggcctggtctcagccaactttgacacattaccgtggtaccagaaaatcaccgattatttgtggcatattacgctgccggtgttggcgaccgtcatcggcggttttgccgccctgacgatgctgacgaaaaattcgtttctcgacgaggtgcgtaaacagtatgtcgttaccgctcgcgctaaaggcgtgagtgaaaaaaacattctctggaaacatgtttttcgtaacgccatgctgctggtgatcgccgggtttcccgccacttttatcagtatgtttttcaccggctcgctgctaattgaagtcatgttctcgctcaacggcctggggctgctgggttatgaagcaaccgtttcgcgcgactatccggtgatgttcggtacgctttatatctttaccctgattggcttattactgaatatcctgagcgatatcagctatacgctggtcgatccacgcattgattttgagggacgataa

SEQ ID NO: 93551 - protein, 364 aa, Salmonella typhimurium LT2
MGAYLIRRLLLVIPTLWAIITINFFIVQIAPGGPVDQAIAAIEFGQGGALPGASGEGVRASHAQTGVGNISDSHYRGGRGLDPEVIAEITHRYGFDKPLHERYFKMLRDYLSFDFGDSLFRSASVLTLIKDSLPVSITLGLWSTLIIYLVSIPLGIRKAVHNGSRFDVWSSAFIIIGYAIPAFLFAILLIVFFAGGSYYDIFPLRGLVSANFDTLPWYQKITDYLWHITLPVLATVIGGFAALTMLTKNSFLDEVRKQYVVTARAKGVSEKNILWKHVFRNAMLLVIAGFPATFISMFFTGSLLIEVMFSLNGLGLLGYEATVSRDYPVMFGTLYIFTLIGLLLNILSDISYTLVDPRIDFEGR

SEQ ID NO: 93552 - DNA, 1038 bp, Nostoc sp. PCC 7120
  CDS (1)..(1038): transl_table=11
gtgacatctacaagaattacctgggaaagcagttgggattggctgattaggctagttaccagcgaaacgttcatttatgtggtgaagcggattttgcaggcgctgttgactttgtttttggcttcagcgctgtcatttttcatcatgaagttatctcctggggattatgtagatacattgcgacaaaatccgaaaatttcaccagaacgcatcgaagaactcaagagacagtttggtttagataagtcttgggtagaacaatattggctgtggttatggcggattatcaccaaaggagattttggcacgagttttgtttaccagcgctcagtatcatctctgctatgggaaagaataccagcaactttactactagcgatcgcttctttaatcatgacatgggcgatcgctattcctttaggaatcgttgcggcggtcaaacaaaatcgagccactgacagaattttacaggtgattagctacacagggcagggatttcccagctttattactgtgttgtttctgctcgtatttgctcaagtcagttcgcctctgtttccagtaggtgggatgacaagcatcgaccacgctgatttatcttggttcggtaaaattattgatgtcggctggcacatgattttacctaccatcgccttaagtatcactagtttcgccggtttacaacgcatcactcgcggcgaattattagacgtattgcggcaagattacattcaaacagcacgcgccaaaggattaccagaaaatcgcgtgatttacgttcatgcactgcgtaatgccattaatcccctgattactctgttaggctttgagttagctggtttattaggtggtgcatttatcgccgagcaatttttcaactggccaggtttaggtagattaactttgcaagcagtcatcgccaaagaccagtatttagtcatggcaagtttagtcatgagtgccgttttactgaatgtaggcaacttactagccgatttattactcaaagtagccgacccacgcatccgcttagaatag

SEQ ID NO: 93553 - protein, 345 aa, Nostoc sp. PCC 7120
MTSTRITWESSWDWLIRLVTSETFIYVVKRILQALLTLFLASALSFFIMKLSPGDYVDTLRQNPKISPERIEELKRQFGLDKSWVEQYWLWLWRIITKGDFGTSFVYQRSVSSLLWERIPATLLLAIASLIMTWAIAIPLGIVAAVKQNRATDRILQVISYTGQGFPSFITVLFLLVFAQVSSPLFPVGGMTSIDHADLSWFGKIIDVGWHMILPTIALSITSFAGLQRITRGELLDVLRQDYIQTARAKGLPENRVIYVHALRNAINPLITLLGFELAGLLGGAFIAEQFFNWPGLGRLTLQAVIAKDQYLVMASLVMSAVLLNVGNLLADLLLKVADPRIRLE

SEQ ID NO: 93554 - DNA, 1095 bp, Agrobacterium tumefaciens str. C58; identical to SEQ ID NO: 39046
  CDS (1)..(1095): transl_table=11

SEQ ID NO: 93555 - protein, 364 aa, Agrobacterium tumefaciens str. C58; identical to SEQ ID NO: 39047

SEQ ID NO: 93556 - DNA, 1098 bp, Brucella melitensis 16M
  CDS (1)..(1098): transl_table=11
atgggcgcatatattcttcgccgcctgcttctgatggtccccaccctactgggtattatggccatttccttcgctgtcgtacaattcgcccccggcggcccggtcgagcgcgtaatcgcgcagctttccggccagggcggcgatgcgctcgaccgtctttccggcgcaggcagcgatttcggccaaagtgctatcgatagcggttcggtcaattccaaatatcgcggcgctcagggccttgatccgcaattcatcgcagatctggagaagcagttcggtttcgacaagcctccgctggagcgtttcggccagatgttgtggaactatatgcgcttcgatttcggccgcagctatttccgcgacatcagcgtgatcgatcttatcaaggaaaaaatgccggtttcgatctcgctcggtctatggctgacctttctgtcctacatgatctcgattccactcggcattcgcaaggcgatcaaggatggttcgcgcttcgacacatggaccagcgccgtcatcatcatcggctatgccattccaagcttccttttcgccattcttctgatcgtggtctttgcgggcggttccttctttgactggttccccttgcgcggcctcacctcgcccgatttcgcgcagatgacatggttcgagaagatcaaggattatctctggcacatggtcctgccggtaacggcactggtgctttcggcctttgcaacgacgacacttctcaccaagaattcgtttctggaagaaatccgcaagcaatatgtgacgaccgcacgcgccaaggggctgaccgagaaccaggttctctatcgccacgtcttccgcaatgcgatgctgatcgtgatcgccggttttcccggtgcgttcatttccgccttcttcaccggttcgcttttgatcgagacgatcttctcgctcgacgggcttggcctgctcggctaccagtcggtcatcaaccgcgactatccggtggttttcgccaatctcttcatcttttcgctgattggccttctggtcggcctcctgtccgatcttacctatacgtggatcgatccgcgcatcgatttcgaccggagggacgtgtga

SEQ ID NO: 93557 - protein, 365 aa, Brucella melitensis 16M
MGAYILRRLLLMVPTLLGIMAISFAVVQFAPGGPVERVIAQLSGQGGDALDRLSGAGSDFGQSAIDSGSVNSKYRGAQGLDPQFIADLEKQFGFDKPPLERFGQMLWNYMRFDFGRSYFRDISVIDLIKEKMPVSISLGLWLTFLSYMISIPLGIRKAIKDGSRFDTWTSAVIIIGYAIPSFLFAILLIVVFAGGSFFDWFPLRGLTSPDFAQMTWFEKIKDYLWHMVLPVTALVLSAFATTTLLTKNSFLEEIRKQYVTTARAKGLTENQVLYRHVFRNAMLIVIAGFPGAFISAFFTGSLLIETIFSLDGLGLLGYQSVINRDYPVVFANLFIFSLIGLLVGLLSDLTYTWIDPRIDFDRRDV

SEQ ID NO: 93558 - DNA, 966 bp, Chlorobium tepidum TLS
  CDS (1)..(966): transl_table=11
atgctcaggtatatcttcaaacggctcttgattgccgtgccgctcatcttcggggtgctgaccctgaccttcttcatcatccggctcgcgccgggcgaccccgcggcgttcttcatccagccgggcatcagtcccaacgtggccgagcagatccgccagcagtatgggctgaacgatccgctgccggtgcagtacatcaagtggctcggcaacgtgctgcacggtgatttcggacgcagtttcagccgcgcgcagcagccggtgttcgacgtgattgccgaggcgttgccggtaacgatgaccatcgccgtgctgacgctcatcgcgaacttcgtcttcggtatcatcatcggcgtgatttcggcggtcaaacagaacagctttcttgaccgcttcctgacggttacggcgctcttcttctattcgatgccggagttctggctcgccctgatgatgattatcctttttgccctgaagtggccgcttttcccggtttcaggcctgaacgaaatcggcgcggagagctacgggacgttcggcttcatcatggacaggatctggcacctcgccttgccagtaacggtgctcagcatcaacggctccgccggcatcgcccgctacgtgcggggcagtatgcttgaggtgatccggcaggactacgtccgcacggctcgggccaaggggctcagcgagcgggtggtgattctcaaacacgccttgcgcaatgcgctcttgccggtggtcacgctgatgggcagctcgctgccgttcatcttcagcggggcgctctttatcgaggtgatctttgcttttcccggcatggggcgcgtcacggtcgaggcgatctttgcacgcgactatccgctgattatcgccaataccttcgtctccggcacgatgatcgtcttcggtaacctcttggccgacgtgctctacgcggtggtcgatccgaggatcaaactgtga

SEQ ID NO: 93559 - protein, 321 aa, Chlorobium tepidum TLS
MLRYIFKRLLIAVPLIFGVLTLTFFIIRLAPGDPAAFFIQPGISPNVAEQIRQQYGLNDPLPVQYIKWLGNVLHGDFGRSFSRAQQPVFDVIAEALPVTMTIAVLTLIANFVFGIIIGVISAVKQNSFLDRFLTVTALFFYSMPEFWLALMMIILFALKWPLFPVSGLNEIGAESYGTFGFIMDRIWHLALPVTVLSINGSAGIARYVRGSMLEVIRQDYVRTARAKGLSERVVILKHALRNALLPVVTLMGSSLPFIFSGALFIEVIFAFPGMGRVTVEAIFARDYPLIIANTFVSGTMIVFGNLLADVLYAVVDPRIKL

SEQ ID NO: 93560 - DNA, 1074 bp, Pseudomonas putida KT2440; identical to SEQ ID NO: 39052
  CDS (1)..(1074): transl_table=11

SEQ ID NO: 93561 - protein, 357 aa, Pseudomonas putida KT2440; identical to SEQ ID NO: 39053

SEQ ID NO: 93562 - DNA, 1110 bp, Bradyrhizobium japonicum USDA 110
  CDS (1)..(1110): transl_table=11
atgagcgcgtatatcgcccgccgcatcctcctgatgatcccgacattgctcgggatcctcttcgtctccttcgtcgtcgtgcagttcgcgcctggcggtcctgtcgagcgcgtgattgcgcagctctccggcgccgataccggcggcacctcgcgcatttcgggcggtagcgactttgcgcagcgtgcgcccgggcaagtcggcgcgggcggcgattccatcaactcgaaatatcgcggcgcgcaggggctcgatcctgatttcatcaagaagctggaggcgcaattcggcttcgacaagccggcaccggaacgcttcgcgctgatggtgtggaatttcgcccgcttcgatttcggcaagagctattttcgcgacgtcagcgtgattcagctgatcaaggagaagctgccggtctcgatttcgctcggcatctggttgacgctgatcacctatctgatctcgattccgctcggcatccgcaaggcggtgaaggacggcacgcgttttgacacctggacgtcgaccattctcgtgctgggctatgccattcccggctttctgttcgcaatcctcctcatcatcctgtttgccggcggctccttctttaactggttcccgctgcgcggactgacttcggacggctggtcgcagtttccctggtactggaagatcctcgattatttctggcacctgacgctgccgctgatcgccatggggctcggcgcgttcaccaccatgacgttcctgaccaagaattcgtttttggatgagattcgcaagcaatacgtcatgaccgcgcgcgccaagggctgcagcgagggccgggtgctttacggccacgtcttccgcaatgcgatgctgatcgtgatcgccggattccccgggaccttcatccacgccttcttctcaggctcgcttctgatcgagaccatcttctcgctggacgggctcgggctgctgagcttcgagagcgtgctcaaccgcgactatcccgtggtgttcggcacgctctacatcttttcgttggtcggcctcgtgatcaacctgatctccgacctgacctatatgtggatcgacccccggatcgatttcgaggcgcgggaggtctga

SEQ ID NO: 93563 - protein, 369 aa, Bradyrhizobium japonicum USDA 110
MSAYIARRILLMIPTLLGILFVSFVVVQFAPGGPVERVIAQLSGADTGGTSRISGGSDFAQRAPGQVGAGGDSINSKYRGAQGLDPDFIKKLEAQFGFDKPAPERFALMVWNFARFDFGKSYFRDVSVIQLIKEKLPVSISLGIWLTLITYLISIPLGIRKAVKDGTRFDTWTSTILVLGYAIPGFLFAILLIILFAGGSFFNWFPLRGLTSDGWSQFPWYWKILDYFWHLTLPLIAMGLGAFTTMTFLTKNSFLDEIRKQYVMTARAKGCSEGRVLYGHVFRNAMLIVIAGFPGTFIHAFFSGSLLIETIFSLDGLGLLSFESVLNRDYPVVFGTLYIFSLVGLVINLISDLTYMWIDPRIDFEAREV

SEQ ID NO: 93564 - DNA, 1068 bp, Pseudomonas syringae pv. tomato str. DC3000
  CDS (1)..(1068): transl_table=11
atgctggcttacgtgattcgacgcctgctgctgatcatccccacgctgctggccattctgattgtcaacttcctcatcgtgcaggccgcccccggcgggccggtcgagcaggccatcgcccgcattcagggtttcagccccaacggggtcggtggcggcggtggtgaagtggccgcaagcggcaccgccagccgcagcacgcgcgggctggacccggcgctgatcgagcagatcaaagagcattacggtttcgacaaacccatgcacgaacgactctggctgatgctcaagaactacgcgcaactggacttcggcaccagcttctttcggggtgcgccggtcaccgaactgattgcgcaaaagctgccggtatcgctgtcactcgggctatgggcgacgctgatcacttacctgatttccatcccgctgggcattcgcaaggcggtgcggcatggcagcgcgttcgatgtgtggagcagcacgctggtgatcatcggctacgctacgcccgcgtttctgttcgccattctgctgatcgtggtgtttgccggtggcagctacctgagttggtttccggcgcagggtttgctctcggaaaacttcgacagcctgagcacctggggcaaggtgaaggactacctgtggcacctggtgctgccggtcagttcgctggtgattggcgggtttgccacgctgaccattctcaccaagaacagctttctcaacgagatcagtcgccagtacgtggtcacggcgcgggccaagggtctgaccgagcatcgcgtgctgtacggccatgtgtttcgcaacgccatgctgctggtcatcgccggcattccgcaggcattgatcgaagtgttcttcgccggttccctgctgatcgaaaccatcttcggcctcgacggtttggggcgcatgagttacgaggctgcggtgtcgcgggattacccgattgtgttcggcacgctgtttctattcacgctgttcggcctgctgatcaaactgatcggtgacctgtgctacacgctggtcgacccgcgtatcgacttttccgcgaggagcgcctga

SEQ ID NO: 93565 - protein, 355 aa, Pseudomonas syringae pv. tomato str. DC3000
MLAYVIRRLLLIIPTLLAILIVNFLIVQAAPGGPVEQAIARIQGFSPNGVGGGGGEVAASGTASRSTRGLDPALIEQIKEHYGFDKPMHERLWLMLKNYAQLDFGTSFFRGAPVTELIAQKLPVSLSLGLWATLITYLISIPLGIRKAVRHGSAFDVWSSTLVIIGYATPAFLFAILLIVVFAGGSYLSWFPAQGLLSENFDSLSTWGKVKDYLWHLVLPVSSLVIGGFATLTILTKNSFLNEISRQYVVTARAKGLTEHRVLYGHVFRNAMLLVIAGIPQALIEVFFAGSLLIETIFGLDGLGRMSYEAAVSRDYPIVFGTLFLFTLFGLLIKLIGDLCYTLVDPRIDFSARSA

SEQ ID NO: 93566 - DNA, 1065 bp, Pseudomonas syringae pv. tomato str. DC3000
  CDS (1)..(1065): transl_table=11
atgctcggttatatcctgcgacgcctgctgctgatcatccctaccctgctgtgcatcctgctggtcaactttttcatcgtccaggccgcgccgggcggtcctgttgaacaagctattgcgcgcctgcagggtatcggcggtgcaaccgtcggcgcgggggccacggaatcggccggcgctggacactctcgcgcctcccgagggctggacccggtgctgataaagcaaatcgaacgtcaatacggcttcgataaaccgctgcatgaacgcctatggctgatgctgaaaagctatgcacgactggatttcggcagcagcttctttcgcggcgcgacggtcaccgatcttattctgcaaaagctgccggtttccatctcgctggggttgtgggcgacgctgttgacctacctggtatcgattccgctgggcattcgcaaggcggtcaaacatggcagccagttcgatatctggagcagcaccgcgatcatcatcggctacgccacgccggcgtttctgttcgccatgctgctagtggtggtgttctgcggtggcacgtcgctgaactggtttccggtacgcgggctggtgtcggacaacttcgagcaactgagcacgctgggcaaggtcgccgactatttctggcacttggtgctaccggtttcagcgctggtgatcggcggctttgccacactgacgctgctgaccaagcattctttcctcaatgaaatcacccgccagtacgtgaccacggcccgcgccaagggcatgagcgagcgacgtgtgctgtacgggcatgtgtttcgcaacgccatgctgctggtggtctcaggcattccgcaggcgttcatcagcgtattttttgccggttcattgctgatcgaggtgattttctcgctggatgggctggggcgcatgagttacgaagcggccgtctcgcgggattacccggtggtatttggttcgttgtttatcttcaccgtgtttggcctgctgataaaactgatcggtgatgtctgttacacgctggttgatccgcgaatcgacttcagcgcgaggaatgcctga

SEQ ID NO: 93567 - protein, 354 aa, Pseudomonas syringae pv. tomato str. DC3000
MLGYILRRLLLIIPTLLCILLVNFFIVQAAPGGPVEQAIARLQGIGGATVGAGATESAGAGHSRASRGLDPVLIKQIERQYGFDKPLHERLWLMLKSYARLDFGSSFFRGATVTDLILQKLPVSISLGLWATLLTYLVSIPLGIRKAVKHGSQFDIWSSTAIIIGYATPAFLFAMLLVVVFCGGTSLNWFPVRGLVSDNFEQLSTLGKVADYFWHLVLPVSALVIGGFATLTLLTKHSFLNEITRQYVTTARAKGMSERRVLYGHVFRNAMLLVVSGIPQAFISVFFAGSLLIEVIFSLDGLGRMSYEAAVSRDYPVVFGSLFIFTVFGLLIKLIGDVCYTLVDPRIDFSARNA

SEQ ID NO: 93568 - DNA, 1074 bp, Pseudomonas syringae pv. tomato str. DC3000
  CDS (1)..(1074): transl_table=11
atgctggcttatattctgcggcggctgctgctgatcattccgaccctgctgggcatcctgatcatcaactttgtcatcattcaggcggcccccggcgggccggtggaacagatgatcgccaagatcgaaggcttcgacggggccaccagccggattgccggcggcggcgcggaagtatcggtagcgggttccaactatcgtggcgcgcaaggtctggacccggcgctgatcaaggaaatcgaacgcatgtacggtttcgacaaatcggcaccggaacgcctgtggatcatgatcaagaactacgccacgctggatttcggcgacagcttctttagcgatgccaaggtgattgacctgattgtcgagaaaatgccggtatccatttccctcgggttatggagcacgctgatcatgtatctggtgtcgatcccgctgggcatcgccaaggccacgcgccacggcagccagttcgacgtctggaccagctcggccatcatcgtcggttacgccattccggccttcctgtttgcaatcctgctgatcgtggtgtttgccggtggcagctacttcaactggtttccgttgcgcggcctgacctccaacaactacgaggagctgagcacgctgggcaagattttcgattacttctggcacttggtgctgcccgtcaccgcactggtgatcggcaacttcgccaccatgaccctgctgaccaagaacagctttctcgacgagatcagcaaacaatacgtcaccaccgccaaagccaagggtctgagcaatcacaaggtgctttacggtcacgtgttccgcaatgcgatgctgctggtgattgccggtttcccctcggcattcatcggtattttcttcaccggctcgctgctggtggaggtgatcttctcgctggacggcctgggcctgatgagttttgaagccgctatcaaccgcgactacccggtggtctttggcaccctgttcatcttcaccctgcttgggttggtggtgaagctgatcggcgacatcacctacaccctggtggatccgcgcatcgatttcgaaagcaggaagcattga

SEQ ID NO: 93569 - protein, 357 aa, Pseudomonas syringae pv. tomato str. DC3000
MLAYILRRLLLIIPTLLGILIINFVIIQAAPGGPVEQMIAKIEGFDGATSRIAGGGAEVSVAGSNYRGAQGLDPALIKEIERMYGFDKSAPERLWIMIKNYATLDFGDSFFSDAKVIDLIVEKMPVSISLGLWSTLIMYLVSIPLGIAKATRHGSQFDVWTSSAIIVGYAIPAFLFAILLIVVFAGGSYFNWFPLRGLTSNNYEELSTLGKIFDYFWHLVLPVTALVIGNFATMTLLTKNSFLDEISKQYVTTAKAKGLSNHKVLYGHVFRNAMLLVIAGFPSAFIGIFFTGSLLVEVIFSLDGLGLMSFEAAINRDYPVVFGTLFIFTLLGLVVKLIGDITYTLVDPRIDFESRKH

SEQ ID NO: 93570 - DNA, 1077 bp, Wolinella succinogenes DSM 1740; identical to SEQ ID NO: 39056
  CDS (1)..(1077): transl_table=11

SEQ ID NO: 93571 - protein, 358 aa, Wolinella succinogenes DSM 1740; identical to SEQ ID NO: 39057

SEQ ID NO: 93572 - DNA, 1110 bp, Rhodopseudomonas palustris CGA009; identical to SEQ ID NO: 39058
  CDS (1)..(1110): transl_table=11

SEQ ID NO: 93573 - protein, 369 aa, Rhodopseudomonas palustris CGA009; identical to SEQ ID NO: 39059

SEQ ID NO: 93574 - DNA, 1020 bp, Herminiimonas arsenicoxydans
  CDS (1)..(1020): transl_table=11
atgctgccgaccctgctgggtgtggtcgcgatcacgttcgcggtgatccagtttgtgccgggcggcccggtcgaacaggcgctgatggagttgaaagggcaggtcggcgcaggtgaggcgaccggcggcggcgcttcgcagtatcgcggacgacaaggcatagacgcggagcgggtggcggaaatcaaggcgctgtacggtttcgacaagccggccagcgagcgcttctggcaaatgctgaaaggttttgccaccttcgatctggggaaaagtttttatcatcacaaggatgtgtgggatttggtggtgtccaagctgccggtctcgatcacgctgggcttatggactttcttcctgacttactttatttccgtgccgctgggaattgccaaggcggtgcgcgagggcagtcgcttcgatgccatcaccagcatgatggtactggtcggttattcgattcccggctttatcctcggcgtgttcctgctggtgatgttcggtggtggcagcttcgtccagtggtttcccttgcgcggtttgacctcggatgactgggagcagttatcgctgctcggcaaggtgctggattacctgtggcacatcaccttgcctgtcactgcatcggtcgccggatcgtttgcggtgatgacgatgctgaccaaaaatacctttctcgatgaaatacgcaaacagtatgtactgactgcccgcgccaagggtttgagcgagaacgccgtgctgtacaagcatgtgttccgtaatgcgctgataccgctggtgaccggctttcctgcggcttttatcggcgccttctttgccggcagcctgctgattgaaacgctgttctcgctcgacggtctcggcctgctgtcctatgagtcggtgatacggcgcgattatccggtggtgatgggcaccttgtatctgtttacgctgatcggcctggtggtcaaattgctgggcgacctgtgttacgtgtgggccgatccgcgcctgcagtttgaaagtctgaaccgatga

SEQ ID NO: 93575 - protein, 339 aa, Herminiimonas arsenicoxydans
MLPTLLGVVAITFAVIQFVPGGPVEQALMELKGQVGAGEATGGGASQYRGRQGIDAERVAEIKALYGFDKPASERFWQMLKGFATFDLGKSFYHHKDVWDLVVSKLPVSITLGLWTFFLTYFISVPLGIAKAVREGSRFDAITSMMVLVGYSIPGFILGVFLLVMFGGGSFVQWFPLRGLTSDDWEQLSLLGKVLDYLWHITLPVTASVAGSFAVMTMLTKNTFLDEIRKQYVLTARAKGLSENAVLYKHVFRNALIPLVTGFPAAFIGAFFAGSLLIETLFSLDGLGLLSYESVIRRDYPVVMGTLYLFTLIGLVVKLLGDLCYVWADPRLQFESLNR

SEQ ID NO: 93576 - DNA, 1044 bp, Burkholderia vietnamiensis G4; identical to SEQ ID NO: 39096
  CDS (1)..(1044): transl_table=11

SEQ ID NO: 93577 - protein, 347 aa, Burkholderia vietnamiensis G4; identical to SEQ ID NO: 39097

SEQ ID NO: 93578 - DNA, 1113 bp, Bradyrhizobium sp. ORS278
  CDS (1)..(1113): transl_table=11
atggctgcctatatcgctcgccgcatctttctgatgctcccgaccctgctcgggatccttttcatctccttcgtcgtggtgcagttcgcgccgggcggcccggtcgagcgcgtcatcgcgcagctgaccggcgccgacaccggcggcacctcgcgcatctccggcggcagcggctcggatttcggcgcgcggccgccgggacaggtcggctcaggcggcgagatcaactccaaatatcgcggcgcgcagggactcgatcccgccttcatcaagaagctggagcagcagttcggcttcgacaagccggcgccggagcgcttcgcgctgatggtctggaacttcgcccgcttcgatttcggcaagagctatttccgcgacacgtcggtgctgcagctgatcaaggagaagctgccggtctcgatctcgctcggcctgtggatgaccttgctgacctatctgatctcgattcccttgggcattcgcaaggccgtgcatgacggctcacgcttcgacgtctggacctcggcggtgatcatcgtcggctacgcgatccccggcttcctgttcgcgatcctgctcatcatcctgttcgccggcggctccttcctcaacatcttcccgctgcgcggcctgacctcggacggctgggccggctttccctggtactggaagatcctcgactatttctggcacatcaccctgccgctgctgtcgatggcgctcggcgccttcgcgaccatgaccttgctcaccaagaactcgttcctcgacgagatccgcaagcaatatgtcatgaccgcgcgcgccaagggctgcagcgagacccaggtgctatatggtcacatcttccgcaacgcgatgctgatcgtgatcgcgggcttcccgggtaccttcatccacgccttcttctccggatcgctgctgatcgagaccatcttctcgctcgacggcctcggcctgttgtcgttcgagagcatcctcaaccgcgactatccggtcgtgttcggcaacctctacatcttctcgctgctcggcctggtggtgaacctgatctccgacctcacctatatgtggatcgatccgcggatcgatttcgaggcacgggaggtctga

SEQ ID NO: 93579 - protein, 370 aa, Bradyrhizobium sp. ORS278
MAAYIARRIFLMLPTLLGILFISFVVVQFAPGGPVERVIAQLTGADTGGTSRISGGSGSDFGARPPGQVGSGGEINSKYRGAQGLDPAFIKKLEQQFGFDKPAPERFALMVWNFARFDFGKSYFRDTSVLQLIKEKLPVSISLGLWMTLLTYLISIPLGIRKAVHDGSRFDVWTSAVIIVGYAIPGFLFAILLIILFAGGSFLNIFPLRGLTSDGWAGFPWYWKILDYFWHITLPLLSMALGAFATMTLLTKNSFLDEIRKQYVMTARAKGCSETQVLYGHIFRNAMLIVIAGFPGTFIHAFFSGSLLIETIFSLDGLGLLSFESILNRDYPVVFGNLYIFSLLGLVVNLISDLTYMWIDPRIDFEAREV

SEQ ID NO: 93580 - DNA, 1011 bp, Leptospira interrogans serovar Copenhageni str. Fiocruz L1-130; identical to SEQ ID NO: 39060
  CDS (1)..(1011): transl_table=11

SEQ ID NO: 93581 - protein, 336 aa, Leptospira interrogans serovar Copenhageni str. Fiocruz L1-130; identical to SEQ ID NO: 39061

SEQ ID NO: 93582 - DNA, 1122 bp, Bartonella henselae str. Houston-1; identical to SEQ ID NO: 39062
  CDS (1)..(1122): transl_table=11

SEQ ID NO: 93583 - protein, 373 aa, Bartonella henselae str. Houston-1; identical to SEQ ID NO: 39063

SEQ ID NO: 93584 - DNA, 1068 bp, Acinetobacter sp. ADP1; identical to SEQ ID NO: 39064
  CDS (1)..(1068): transl_table=11

SEQ ID NO: 93585 - protein, 355 aa, Acinetobacter sp. ADP1; identical to SEQ ID NO: 39065

SEQ ID NO: 93586 - DNA, 1098 bp, Erwinia carotovora subsp. atroseptica SCRI1043; identical to SEQ ID NO: 39066
  CDS (1)..(1098): transl_table=11

SEQ ID NO: 93587 - protein, 365 aa, Erwinia carotovora subsp. atroseptica SCRI1043; identical to SEQ ID NO: 39067

SEQ ID NO: 93588 - DNA, 1092 bp, Silicibacter pomeroyi DSS-3; identical to SEQ ID NO: 39070
  CDS (1)..(1092): transl_table=11

SEQ ID NO: 93589 - protein, 363 aa, Silicibacter pomeroyi DSS-3; identical to SEQ ID NO: 39071

SEQ ID NO: 93590 - DNA, 1068 bp, Pseudomonas syringae pv. syringae B728a
  CDS (1)..(1068): transl_table=11
atgctggcttatgtgattcgacgcctgctgctgatcattcccacgctgctggccattctgatcgtcaacttcctgatcgtgcaggccgcccccggcggaccggtcgagcaggccattgcgcgcattcagggcttcagccccaacggtgtgggcggcggcgggggcgaagtggctgcctccggcactgcgagccgcagcacccgcgggctggacccggcgctgatcgagcagatcaagcaacactacggtttcgacaaaccgatgcacgaacggctgtggctgatgctcaagaactacgcgcaactggacttcggcaccagcttcttccgtggcgcgccggtcaccgaactgatcgcgcaaaagcttccggtgtcgctgtccctcgggctctgggcgacgctgatcacgtacctgatttccatcccgctgggcattcgcaaggcggtgcggcatggcagtgcgtttgatgtctggagcagcacgctggtgatcatcggttacgccacgcccgcgtttctgttcgccattctgctgatcgtggtgttcgccgggggcagttacctgagctggtttccggcgcaggggctgttctcggacaacttcgacagcctgagcacctggggcaaggtgaaggactacctgtggcacttggtgctgccggtcagttcgctggtgatcggcgggttcgccacgctgaccatcctcaccaagaacagctttctcaacgagatcagccgccagtacgtggtcacggcgcgcgccaagggcctgaccgagcatcgcgtgctgtacggccatgtgtttcgcaacgccatgttgctggtgatcgccggtattccacaggccttgatcgaagtgtttttcgccggctcgttgctgatcgaaaccatcttcggcctcgatggtttggggcgtatgagttacgaagcggcggtgtcgcgcgactacccgattgtgttcggcacgctgtttctgttcacgctgttcggcctgctgatcaagctgatcggtgacctgtgttacacgctggtcgacgcacgcatcgacttttccgcgaggagcgcctga

SEQ ID NO: 93591 - protein, 355 aa, Pseudomonas syringae pv. syringae B728a
MLAYVIRRLLLIIPTLLAILIVNFLIVQAAPGGPVEQAIARIQGFSPNGVGGGGGEVAASGTASRSTRGLDPALIEQIKQHYGFDKPMHERLWLMLKNYAQLDFGTSFFRGAPVTELIAQKLPVSLSLGLWATLITYLISIPLGIRKAVRHGSAFDVWSSTLVIIGYATPAFLFAILLIVVFAGGSYLSWFPAQGLFSDNFDSLSTWGKVKDYLWHLVLPVSSLVIGGFATLTILTKNSFLNEISRQYVVTARAKGLTEHRVLYGHVFRNAMLLVIAGIPQALIEVFFAGSLLIETIFGLDGLGRMSYEAAVSRDYPIVFGTLFLFTLFGLLIKLIGDLCYTLVDARIDFSARSA

SEQ ID NO: 93592 - DNA, 1065 bp, Pseudomonas syringae pv. syringae B728a
  CDS (1)..(1065): transl_table=11
atgcttggctatattctgcggcgcctgctgctgatcatccctaccctgctgtgcattctgctggtcaactttttcatcgtccaggccgctccgggtgggcctgtggagcaggccatcgctcgcctgcaagggatcggcggtgccaccgtgggcgcaggtgccagcgagtccgccggggccggtcactccaaagcgtcccgcgggctggacccggctttgatcaagcagatcgaacgtcaatacggtttcgacaaaccgctgcacgaacgtctctggctgatgctgaagaactacgcccgactggatttcggcagcagtttctttcgcggcgctacggtgaccgacctcattctgcagaaaatgccggtgtcgatatcgctggggctctgggcgacgttgctgacctacctggtgtcgatcccgctggggattcgcaaagcagtcaaacacggcagccagttcgatatctggagcagcaccgccatcatcatcggctacgccatgccagccttcctgttcgccatgctgctggtggtggtgttctgtggcggcacgtcgctgaactggtttccggtgcgcggactggtctcggacaacttcgagcaactgaccacgatcggcaagatcgctgactatttctggcacctcgcgctgccggtcttggcgctggtgattggtggcttcgccacgctgaccctgctgaccaaacattcctttctcaacgaaatcacccgccagtacgtgaccacggcccgcgccaagggcatgagcgagcggcgggtgctgtatggccatgtgtttcgcaatgccatgttgctggtggtgtcgggcattccgcaggcgttcatcagcgtgttctttgccgggtcgctgctgatcgaggtgatcttctcgctggatggcctgggccgcatgagctatgaagccgctgtgtcgcgggactatccggtggtgttcggctcgttgttcatcttcaccgtgttcggcctgctgataaaactgatcggcgatatctgctacacgctggtcgaccccagaatcgacttcagcgcgaggaatgcatga

SEQ ID NO: 93593 - protein, 354 aa, Pseudomonas syringae pv. syringae B728a
MLGYILRRLLLIIPTLLCILLVNFFIVQAAPGGPVEQAIARLQGIGGATVGAGASESAGAGHSKASRGLDPALIKQIERQYGFDKPLHERLWLMLKNYARLDFGSSFFRGATVTDLILQKMPVSISLGLWATLLTYLVSIPLGIRKAVKHGSQFDIWSSTAIIIGYAMPAFLFAMLLVVVFCGGTSLNWFPVRGLVSDNFEQLTTIGKIADYFWHLALPVLALVIGGFATLTLLTKHSFLNEITRQYVTTARAKGMSERRVLYGHVFRNAMLLVVSGIPQAFISVFFAGSLLIEVIFSLDGLGRMSYEAAVSRDYPVVFGSLFIFTVFGLLIKLIGDICYTLVDPRIDFSARNA

SEQ ID NO: 93594 - DNA, 1074 bp, Pseudomonas fluorescens Pf-5
  CDS (1)..(1074): transl_table=11
atgctggcctatatctttcgccgcctgctgctgatcatccccacgctgctgggcatcctgctgatcaacttcgtgatcatccaggccgcacccggcggcccggtggagcagatgatcgccaagctcgaaggcttcgacggcgccaccagccgcatcgccggcggcggcgccgaagtctcggtggccggttccagctaccgcggcgcccagggcctggacccggcgctgatcaaggaaatcgagcacatgtacggcttcgacaagtcggcgccggaacgcttgtggatcatgatcaagaactacgccaccctggatttcggcaacagcttcttccgtgacgccaaggtggtggacctgatcaaggagaagatgccggtgtccatctccctcgggttgtggagcaccctgatcatgtacctggtgtcgatccccctggggatcgccaaggccacccgccacggcagccacttcgatgtctggaccagttcggcgatcatcgtcggctacgcgatcccggccttcctgttcgccatcctgctgatcgtggtgttcgccggcggcagctatttcaactggttccccctgcgcggcctgacctccaacgacttcgaccagctgagctggggcggcaagatcctcgactacttctggcacctggcgctgccggtcaccgccctggtgatcggccacttcgccaccatgaccctgctgaccaagaacagcttcctcgacgagatcaacaagcagtacgtggtcaccgccaaggccaagggcctgacccagcggcgggtgctctacggccatgtgttccgcaacgccatgctgctggtgatcgccggcttcccctcggccttcatcggcatcttcttcaccggctccctgctggtggaagtgatcttctccctcgacggcctgggcctgatgagcttcgaggcagcgatcaaccgcgactacccggtggtgttcggcaccctgttcatcttcaccctgctggggctggtggtgaaactgatcggcgacctgacctacaccctggtcgaccctcgcatcgacttcgacagccgggagcattga

SEQ ID NO: 93595 - protein, 357 aa, Pseudomonas fluorescens Pf-5
MLAYIFRRLLLIIPTLLGILLINFVIIQAAPGGPVEQMIAKLEGFDGATSRIAGGGAEVSVAGSSYRGAQGLDPALIKEIEHMYGFDKSAPERLWIMIKNYATLDFGNSFFRDAKVVDLIKEKMPVSISLGLWSTLIMYLVSIPLGIAKATRHGSHFDVWTSSAIIVGYAIPAFLFAILLIVVFAGGSYFNWFPLRGLTSNDFDQLSWGGKILDYFWHLALPVTALVIGHFATMTLLTKNSFLDEINKQYVVTAKAKGLTQRRVLYGHVFRNAMLLVIAGFPSAFIGIFFTGSLLVEVIFSLDGLGLMSFEAAINRDYPVVFGTLFIFTLLGLVVKLIGDLTYTLVDPRIDFDSREH

SEQ ID NO: 93596 - DNA, 1065 bp, Pseudomonas fluorescens Pf-5
  CDS (1)..(1065): transl_table=11
atgctggcctacattctgcggcgcctgctgctgatcatcccgacgctattgatcatccttctggtgaacttcgtcatcgtccaggccgcccccggcggcccggtggaacaggccatcgcccgcttgcagggcatcggtggcggcgccgctgtcggcggctccgccgatgccatgagcagcagcggttcccgggccagccgcggcctggaccccaagctgatccaggacatcgagaaacagtacggcttcgacaagccggcccatgaacgcctgtggctgatgctcaagaactacgcccagctggacttcggcaagagcttctttcgcggcgccacggtcaccgacctgatcctggaaaagatgccggtgaccatttccctggggctctgggcgaccctgatcacctacctggtgtcgatccccctggggatccgcaaggcggtgcaccacggcagccatttcgacatctggagcagcaccgcgatcatcatcggctacgccatgccggccttcctgttcgccatgttcctgatcgtgctgttcgccggcggcacctcgctgaactggttcccggtgcgcggcctggtctcggacaacttcgagcagttgagcaccctgggcaaggtcgccgactacttctggcacctggtactgccggtcagctccctggtgatcggcggcttcgccaccctgaccatcctcaccaagaactccttcctcaacgagatcacccgccagtacgtggtcaccgcccgggccaagggcctgagcgagcgccgggtgctgtatgggcatgtgttccgcaacgccatgctgctggtggtctcgggcattccccaggcctttatcagcgtgttcttcgccggctccctgctgatcgaggtgatcttctccctcgacggcctggggcgcatgagctatgaggccgcggtgtccagggactacccggtggtgttcggctcgctgttcatcttcaccctgttcggcctcttgataaaactcatcggcgacctgtgctacaccctggtcgacccgcgcatcgacttcgccgcgaggaacgcctga

SEQ ID NO: 93597 - protein, 354 aa, Pseudomonas fluorescens Pf-5
MLAYILRRLLLIIPTLLIILLVNFVIVQAAPGGPVEQAIARLQGIGGGAAVGGSADAMSSSGSRASRGLDPKLIQDIEKQYGFDKPAHERLWLMLKNYAQLDFGKSFFRGATVTDLILEKMPVTISLGLWATLITYLVSIPLGIRKAVHHGSHFDIWSSTAIIIGYAMPAFLFAMFLIVLFAGGTSLNWFPVRGLVSDNFEQLSTLGKVADYFWHLVLPVSSLVIGGFATLTILTKNSFLNEITRQYVVTARAKGLSERRVLYGHVFRNAMLLVVSGIPQAFISVFFAGSLLIEVIFSLDGLGRMSYEAAVSRDYPVVFGSLFIFTLFGLLIKLIGDLCYTLVDPRIDFAARNA

SEQ ID NO: 93598 - DNA, 1074 bp, Pseudomonas syringae pv. phaseolicola 1448A; identical to SEQ ID NO: 39074
  CDS (1)..(1074): transl_table=11

SEQ ID NO: 93599 - protein, 357 aa, Pseudomonas syringae pv. phaseolicola 1448A; identical to SEQ ID NO: 39075

SEQ ID NO: 93600 - DNA, 1065 bp, Pseudomonas syringae pv. phaseolicola 1448A
  CDS (1)..(1065): transl_table=11
atgctcggctatattttgcgtcgcctgctgctgatcatccctactctgctgtgcattttgctggtcaactttttcatcgtgcaggccgcgccgggcggccctgtcgaacaggctattgcgcgcttgcagggaattggcggtgcgaccatgggcgcgggggcgagcgaatcggccgatgccggacactcccgagcgtcccgaggactggacccggtactgatcaaacagatcgaacatcaatacggtttcgacaagcccttgcatgagcggctctggctgatgctgaagagttacgcccgactggatttcggcaacagcttctttcgcggtgccacggtgaccgaccttattctgcaaaaaatgccggtctccatatcattgggcctctgggcgacgttgctgacatacctggtatccatcccgctgggtattcgcaaagcggtcaaacatggcagtcagttcgatatctggagcagcaccgcgatcatcatcggttacgccacgccagccttcctgttcgccatgctgctggtggtggtgttctgcggtggcacgtcactgaactggtttccggtgcgcgggctggtctcggacaacttcgagcaactgaccaccgtcggcaagatcgctgactatttctggcatttggtgctgcctgtttcagcgctggtgatcggcggttttgccacactgaccctgctgaccaaacattcctttctcaacgaaataacccgtcagtatgtgactaccgcccgcgccaagggtatgagcgagcggcgcgtgctctatggccatgtgtttcgcaatgccatgttgctggttgtgtcgggtattccgcaggcgttcatcagcgtgttctttgccggttcgctgctgatcgaagtgatcttctcgctggatggcctgggccgcatgagctatgaagcggccgtttcgcgggattatccggtggtgttcggctcgctgttcatctttaccgtcttcggcctgctgataaaactgattggcgatgtctgctacacgctggttgacccccgaatcgacttcagcgcgaggaatgcatga

SEQ ID NO: 93601 - protein, 354 aa, Pseudomonas syringae pv. phaseolicola 1448A
MLGYILRRLLLIIPTLLCILLVNFFIVQAAPGGPVEQAIARLQGIGGATMGAGASESADAGHSRASRGLDPVLIKQIEHQYGFDKPLHERLWLMLKSYARLDFGNSFFRGATVTDLILQKMPVSISLGLWATLLTYLVSIPLGIRKAVKHGSQFDIWSSTAIIIGYATPAFLFAMLLVVVFCGGTSLNWFPVRGLVSDNFEQLTTVGKIADYFWHLVLPVSALVIGGFATLTLLTKHSFLNEITRQYVTTARAKGMSERRVLYGHVFRNAMLLVVSGIPQAFISVFFAGSLLIEVIFSLDGLGRMSYEAAVSRDYPVVFGSLFIFTVFGLLIKLIGDVCYTLVDPRIDFSARNA

SEQ ID NO: 93602 - DNA, 1062 bp, Pseudomonas fluorescens PfO-1
  CDS (1)..(1062): transl_table=11
atgtgggcttacatactgcggcgcctgctgctgatcattccgacgctggtgattattctgctggtcaatttcgtgatcatccaggccgcgccgggcggcccggttgaacaggccattgcccacttgcaaggcatcggcggcgccagtgtcggcggtggtgcgagcgagaccatgagcggcacgtcccgcgccagccgcggcctcgatccgcagctgatcaaggacatcgaaaaacagtacggcttcgacaaacccgcccatgaacgcctgtggctgatgctcaagaattacgcgcaactggatttcggcaaaagctttttccgcggcgccacggtcaccgacctgatcctgcagaaaatgccggtgaccatttcccttggcctgtgggcgacgctgatcacttatctggtgtcgatcccgctgggcatccgcaaagccgtgcaccacggcagccatttcgatatctggagcagcacggcgatcatcatcggctacgccatgccggcattcctgttcgcgatgttcctgatcgtggtgttcgccggcggcacctcgctgaactggtttccggtgcgcgggctggtgtccgacaacttcgaatccctgtcgacaatgggcaagatcaccgactacttctggcatctggtgctgccggtcacggcgctggtgatcggcggtttcgccaccctgaccatcctcaccaagaactcgttcctcaatgaaatcacccgtcaatacgtggtcaccgcgcgcgccaaaggcctgagcgaaaaccgggtgctctacggacacgtgttccgcaacgcgatgctgctggtggtgtcgggcattccccaggcgttcatcagcgtattcttcgccggttcgttgctgatcgaagtgatcttctctctcgacggtctggggcgcatgagttacgaagcggccgtgtcccgtgattatccggtggtgttcggctcgctgttcatcttcaccttgttcggcctcctgataaaactgatcggcgacctgtgctacaccctggtcgacccgcgcatcgacttcgccgcgaggaacgcctga

SEQ ID NO: 93603 - protein, 353 aa, Pseudomonas fluorescens PfO-1
MWAYILRRLLLIIPTLVIILLVNFVIIQAAPGGPVEQAIAHLQGIGGASVGGGASETMSGTSRASRGLDPQLIKDIEKQYGFDKPAHERLWLMLKNYAQLDFGKSFFRGATVTDLILQKMPVTISLGLWATLITYLVSIPLGIRKAVHHGSHFDIWSSTAIIIGYAMPAFLFAMFLIVVFAGGTSLNWFPVRGLVSDNFESLSTMGKITDYFWHLVLPVTALVIGGFATLTILTKNSFLNEITRQYVVTARAKGLSENRVLYGHVFRNAMLLVVSGIPQAFISVFFAGSLLIEVIFSLDGLGRMSYEAAVSRDYPVVFGSLFIFTLFGLLIKLIGDLCYTLVDPRIDFAARNA

SEQ ID NO: 93604 - DNA, 1065 bp, Pseudomonas fluorescens PfO-1
  CDS (1)..(1065): transl_table=11
atgtggggttatagcctgcggcgtctgctgctgatcgtgccaaccttgctggcgattctgctggtgaacttcgtgatcgtgcaggccgcgcccggtggcccggtcgaacaagccatcgcccgattgcaggggatcggtgtcggtgcggcggtgggtgccagtcatgtcgaaagcattggcggcgagtcccgcgcgacccgtgggctggacccgaaactggtggccgagatcgagcgccagtacggcttcgataaaagcaccggcgagcgcttgtggctgatgctcaagagctatgcgcaactggatttcggcaagagtttcttccggggtgcgtcggtgaccgagctgatctggcagaagctgccggtgaccttgtcgttgggattgtgggcgacgctgatcacttatctggtatcgattccgctgggcattcgcaaggcggtgcacaacggttcggcgttcgatgtctggagcagcgcgacgatcatcatcggctacgcgatgccgggatttctgtttgcgctgctgctgatcgtggtgttcgccggcggtacggcgctggactggttcccggtgcgagggctggtctcggacaacttcgtcgagctgtcgctgtggggcaaggttgctgactacttctggcatttggtgttgccggtcagcgcgttggtgatcggtgggtttgcaacgctgacgatcctgaccaagaacagcttcctcaacgagatctcgcggctgtacgtggtcacggcccgcgctaaaggcctgagcgaacgacaggtgttgtacgggcatgtgtttcgcaacgcgatgctgctggtggtggccggattgcctcaggcgttggtcacggtgtttttcggcggttcattgttgatcgaagtgatcttctccctcgacggtctcggccgcctgagctacgaagcggcggtgtcgcgggattacccggtggtgttcggttcgctgttcatcttcaccctgttcgggctcttgataaaactgttgggcgacctgtgttacacgctggtcgatccgcgcatcgacttcaccgcgaggactgcctga

SEQ ID NO: 93605 - protein, 354 aa, Pseudomonas fluorescens PfO-1
MWGYSLRRLLLIVPTLLAILLVNFVIVQAAPGGPVEQAIARLQGIGVGAAVGASHVESIGGESRATRGLDPKLVAEIERQYGFDKSTGERLWLMLKSYAQLDFGKSFFRGASVTELIWQKLPVTLSLGLWATLITYLVSIPLGIRKAVHNGSAFDVWSSATIIIGYAMPGFLFALLLIVVFAGGTALDWFPVRGLVSDNFVELSLWGKVADYFWHLVLPVSALVIGGFATLTILTKNSFLNEISRLYVVTARAKGLSERQVLYGHVFRNAMLLVVAGLPQALVTVFFGGSLLIEVIFSLDGLGRLSYEAAVSRDYPVVFGSLFIFTLFGLLIKLLGDLCYTLVDPRIDFTARTA

SEQ ID NO: 93606 - DNA, 1065 bp, Pseudomonas fluorescens PfO-1
  CDS (1)..(1065): transl_table=11
atgtggcgttatctgagtcgacgtctgttgctgatcatcccgacgctgctgtgcattctggtggtcaacttcgtcatcgtgcaggccgcgcccggcggcccggtggaacaagccatcgcccgcctgcaaggcttcggcgggcacagcatgggcggcgccagcgaggtcaccgcgatcggcggtgccgggcgcagcagccgaggcctggacccggcgctgatcgaagagatcaagcatcactacggcttcgacaagccgatgcacgaacgcctgtggctgatgctcaagaactacgcgcaactggacctgggcagcagcttctttcgcggtgcgaaggtgacggatctgatcgtgcagaagctgccggtgtcgctgtcccttggcctgtgggcaaccttgatcacctacctgatctcgatcccgctgggcattcgcaaggcaatcaaaaacggtagcgcgttcgatgtctggagcagtacggcgatcatcgtcggttacgcgatgccggcgtttctgttcgcgattctgttgatcgtggtgttcgccgggggcagctacgtcaactggtttccggtgcagggcctggtttcggacaatttcgacagcctgagcctgtggggcaaggtcggcgactacctctggcacctggtgttgccggtgacggcgctggtgatcggcggttttgcgacgctgacgatcctgaccaaaaacagcttcctcaacgagatcagccgccagtacgtgatcaccgcgcgcgccaagggcctgaccgaaaggcgcgtgctctacggccatgtgtttcgcaacgcaatgctgctggtggtggccggagtgccatcggcattgatcgaggtgtttttcgccggctcgctgctgatcgaaaccatcttcaacctcgacggcctcgggcgcatgagctacgaagcggcggtgtcgcgggactacccggtggtgttcggcacgctgtttctgttcaccctgttcggcctgttgatcaagctgatcggcgacctctgctacaccctgctcgacccgcgcatcgacttctcggcgaggactgcctga

SEQ ID NO: 93607 - protein, 354 aa, Pseudomonas fluorescens PfO-1
MWRYLSRRLLLIIPTLLCILVVNFVIVQAAPGGPVEQAIARLQGFGGHSMGGASEVTAIGGAGRSSRGLDPALIEEIKHHYGFDKPMHERLWLMLKNYAQLDLGSSFFRGAKVTDLIVQKLPVSLSLGLWATLITYLISIPLGIRKAIKNGSAFDVWSSTAIIVGYAMPAFLFAILLIVVFAGGSYVNWFPVQGLVSDNFDSLSLWGKVGDYLWHLVLPVTALVIGGFATLTILTKNSFLNEISRQYVITARAKGLTERRVLYGHVFRNAMLLVVAGVPSALIEVFFAGSLLIETIFNLDGLGRMSYEAAVSRDYPVVFGTLFLFTLFGLLIKLIGDLCYTLLDPRIDFSARTA

SEQ ID NO: 93608 - DNA, 1089 bp, Rhodobacter sphaeroides 2.4.1; identical to SEQ ID NO: 39078
  CDS (1)..(1089): transl_table=11

SEQ ID NO: 93609 - protein, 362 aa, Rhodobacter sphaeroides 2.4.1; identical to SEQ ID NO: 39079

SEQ ID NO: 93610 - DNA, 1122 bp, Desulfovibrio desulfuricans G20; identical to SEQ ID NO: 39080
  CDS (1)..(1122): transl_table=11

SEQ ID NO: 93611 - protein, 373 aa, Desulfovibrio desulfuricans G20; identical to SEQ ID NO: 39081

SEQ ID NO: 93612 - DNA, 1104 bp, Rhodospirillum rubrum ATCC 11170; identical to SEQ ID NO: 39082
  CDS (1)..(1104): transl_table=11

SEQ ID NO: 93613 - protein, 367 aa, Rhodospirillum rubrum ATCC 11170; identical to SEQ ID NO: 39083

SEQ ID NO: 93614 - DNA, 1113 bp, Burkholderia thailandensis E264
  CDS (1)..(1113): transl_table=11
gtgcgaagcgacgagcggccgtcctgcgccgcgccgattgacgaaaccgttcgaacacgcccgaatgagcctatgtggagctacatcctcaaacgtctgctgctgatgatcccgacgctcgtcggcgtcttgaccatcacgttcgcggtgatccagttcgtgccgggcggccccgtcgagcaggcggtgcaggagctgcgcaagggcgccgagcggggcggcgcgccgttcggaatgcgctcgtacacgggcgtcgacgcgcagcagctcgcgcagctcaaagcgctgtacgggttcgacaagccgcccctcgaacgctactggctgatgctcaagcgcttcgcgcgcttcgatctcggcgacagctacttccaccaccagagcgtgtggtcgctcgtcgtgtcgaagctgcccgtgtcgatcagcatcggcgtgtggacgttcctgctcacttatttgatctcggtgccgctcggcatcgcgaaggcggtgaggaacggctcgccgttcgatttcgcgacgagcctcgtcgtgctcgtcggctacgcgattccgggcttcgtgctcggcgtgctgctgctcgtgctgttcggcggcggctcgttctggcagatcttcccgctgcgcggcctcacgtcggacaacttcgcgcagctcagcgtcgccggcaagatcgccgattacctgtggcacatcgcgctgccgatcaccgcgtcggtcgtcggcagcttcgcggtgatcacgatgctgacgaagaacgcgttcctcgacgagatccgcaagcagtacgtgctgaccgcgcgcgcgaaggggctcgccgagcgcaccgtgctgggcaagcacgtgttccgcaacgcgctgctgccgctcgtggtcggctttccggccgcgttcatcggcgcgttcttcacgggcagcctgctgatcgagacgctcttctcgctcgacgggctcggccttttgtcgtatgaatctgtgatccggcgcgactatccggtcgtgctcggcacgctgtacatcttcacgctgatcggcctggcgacgaagctcgtgtccgatctctgttacgtgtgggttgacccgcgcgttcaattcgagcaactggagcgctga

SEQ ID NO: 93615 - protein, 370 aa, Burkholderia thailandensis E264
MRSDERPSCAAPIDETVRTRPNEPMWSYILKRLLLMIPTLVGVLTITFAVIQFVPGGPVEQAVQELRKGAERGGAPFGMRSYTGVDAQQLAQLKALYGFDKPPLERYWLMLKRFARFDLGDSYFHHQSVWSLVVSKLPVSISIGVWTFLLTYLISVPLGIAKAVRNGSPFDFATSLVVLVGYAIPGFVLGVLLLVLFGGGSFWQIFPLRGLTSDNFAQLSVAGKIADYLWHIALPITASVVGSFAVITMLTKNAFLDEIRKQYVLTARAKGLAERTVLGKHVFRNALLPLVVGFPAAFIGAFFTGSLLIETLFSLDGLGLLSYESVIRRDYPVVLGTLYIFTLIGLATKLVSDLCYVWVDPRVQFEQLER

SEQ ID NO: 93616 - DNA, 1059 bp, Methylobacillus flagellatus KT
  CDS (1)..(1059): transl_table=11
atgtggccctacctgataaaacgcctgttcattatggtgccgacattgatcggcgtgctgacgctgactttcttcgtcacccagtttgtgcctggcgggccggtggacagtgtgctttcgcaactggatgccgaagacgtgcgttcaggcgaggatgggtccagcggaggcgggtggagctataccgcgcggcaaggcatagacgcgcagcaggtggagcaactgaccgctttgtacggtttcgaccggccgccgcttgagcgttatctgttgatgctgaagaatttcctcagcttcgacgtgggagagagttatttccgtaacgaaagcgtctggtcattgatcaaggacaagctgggtgtctcggtttctctgggaatatggacgtttgtcctgacctacctcatatccatcccgctcgggattgccaaggccgtacgtgccggcagccgcttcgatatcatcacgacgttgctggtgctggcagggtatgcagttcccggcttcgtgctcggtgtattgctgattgtcctgttcggcggcggttccttctgggacatcttcccgttgcgcggcctgacctcggacaactgggaggagctggatgcctggggcaaggtgaccgactatctctggcacatcacgttgccggtgacggcctcagtagtcagcaccttcgccttcaagacattgctcaccaagaacacctttctcgaggaaatcaaccgccagtacgtattgaccgcgcgagccaagggactttccgagaacaaggtgctatacaagcacgtattccgcaatgccttgcttccgctgattaccggcttcccgggcactttcattgccgccttcttcaccggcagcctgcttatcgagacattgttttcgctcgacggcttggggctactatcgttcgagtccatcaatagtcgggattatccggtcgtgctcggcaccctctacctcttcacgttggttggactgttcgtcaagttggcaggcgacatcgcctacgtgctggctgacccacgtatcaaatttgacgccttggagccataa

SEQ ID NO: 93617 - protein, 352 aa, Methylobacillus flagellatus KT
MWPYLIKRLFIMVPTLIGVLTLTFFVTQFVPGGPVDSVLSQLDAEDVRSGEDGSSGGGWSYTARQGIDAQQVEQLTALYGFDRPPLERYLLMLKNFLSFDVGESYFRNESVWSLIKDKLGVSVSLGIWTFVLTYLISIPLGIAKAVRAGSRFDIITTLLVLAGYAVPGFVLGVLLIVLFGGGSFWDIFPLRGLTSDNWEELDAWGKVTDYLWHITLPVTASVVSTFAFKTLLTKNTFLEEINRQYVLTARAKGLSENKVLYKHVFRNALLPLITGFPGTFIAAFFTGSLLIETLFSLDGLGLLSFESINSRDYPVVLGTLYLFTLVGLFVKLAGDIAYVLADPRIKFDALEP

SEQ ID NO: 93618 - DNA, 1050 bp, Ralstonia metallidurans CH34
  CDS (1)..(1050): transl_table=11
atgcttgcctatctgttgaagcgcattctgctgatgattccgacgttgatcggcgtcattacgcttacgttcgtcgtgatccagttcgtgcccggtggcccagtcgagcagatgatgcttgagatgaaagggcggggcggtgctgccgaggccagcggcggcggtgccgagtatcgcggccgtcgcggcgtggacccggacaagatcaaggagatccaggcgctgtacggtttcgacaagccgccgatcgagcgctatttcctgatgctcaagcgctttgcaaagttcgacctcggccagagctacttccagcaccgcagcgtctgggaactggtgaagtcgaagatgcctgtgtcgatcagcctggggctctggacattcttcctgacctatctgatatcggtgccgctgggcatctccaaggcaatccgggccggcagccgcttcgacgtgatcagcagcatgatcgtgctggtggggtatgcgatccccggcttcgtgctcggcgtgctgctgctggtgctgtttggcggcggcacgttcgtgcagtggttcccgctgcgcggcctgacctccgatgactgggaccagttgtcgctcatgggcaaggtgatggattacctctggcacctggtgctgccgatcacggcatcggtcgtgggcagcttcgccgtggtcaccatgctgaccaagaatgcgttcctggaggaaatccgcaagcagtacgtgctgaccgcgcgggccaagggcctgtccgagcaccgcgtgctctggaagcatgtgttccgtaacgcgctgattccgctcgtgacggggttcccggcggcgtttatcggcgcgttcttcaccggctcgctgctgatcgaaacactgttttcgctcgacgggctgggtctgctgtcctatgaggcggtgctgcgtcgtgactaccccgtggtgctcggcacgctgtacctgttcacgctgatcggtctggtgacgcgcctgatttcggacatttgctacgtgatggtcgatcctcgtattcacttcgaggggatgcatcgatga

SEQ ID NO: 93619 - protein, 349 aa, Ralstonia metallidurans CH34
MLAYLLKRILLMIPTLIGVITLTFVVIQFVPGGPVEQMMLEMKGRGGAAEASGGGAEYRGRRGVDPDKIKEIQALYGFDKPPIERYFLMLKRFAKFDLGQSYFQHRSVWELVKSKMPVSISLGLWTFFLTYLISVPLGISKAIRAGSRFDVISSMIVLVGYAIPGFVLGVLLLVLFGGGTFVQWFPLRGLTSDDWDQLSLMGKVMDYLWHLVLPITASVVGSFAVVTMLTKNAFLEEIRKQYVLTARAKGLSEHRVLWKHVFRNALIPLVTGFPAAFIGAFFTGSLLIETLFSLDGLGLLSYEAVLRRDYPVVLGTLYLFTLIGLVTRLISDICYVMVDPRIHFEGMHR

SEQ ID NO: 93620 - DNA, 1089 bp, Silicibacter sp. TM1040; identical to SEQ ID NO: 39084
  CDS (1)..(1089): transl_table=11

SEQ ID NO: 93621 - protein, 362 aa, Silicibacter sp. TM1040; identical to SEQ ID NO: 39085

SEQ ID NO: 93622 - DNA, 1101 bp, Mesorhizobium sp. BNC1; identical to SEQ ID NO: 39086
  CDS (1)..(1101): transl_table=11

SEQ ID NO: 93623 - protein, 366 aa, Mesorhizobium sp. BNC1; identical to SEQ ID NO: 39087

SEQ ID NO: 93624 - DNA, 1077 bp, Trichodesmium erythraeum IMS101
  CDS (1)..(1077): transl_table=11
atgttgaaggaattattacaagcaattttgaagaaattattacaggcaattttaattttattattaccacaggcaaaacaactaattgctagtgaaatttttacttatatattgaagagattattacaggcaattttgactttatttttagcatctgctctttgttttgctgtaattcaattagctccaggcaattatttagatactttaagtcaaaatccccaaatatctcaagaaactattcaacaacttgagcaacaatttgggttagataagtctgctttagaacaatatttacgttggttaggagaaattattagaagtggaaattttggcagaagttttgtttttcagcaaccagtagctgatttattatgggagagaataccagctactttagttttatctatttcttccttaatcatgacttgggcgatcgctattcctcttggtattattgctggagttaatcaaaaccgtattttagaccgttttttacaattaattagttacactggtcaaggttttcctagttttattactgctctattattattatttttagcccaaaatatttctcctttattaccagttggaggaatgcaaagtattgactatgatgacttctcttttgtgggtaaaattttagatatgggttggcatatgattttaccgactattgctttaagtattaccagttttgctggtttacagaggttaatgcgggggcaattattggatgttttgcgacaaaattatattcaaacggcgagagcgaaaggtcttccagagaatagagtgatttatgttcatgctttgagaaatgctattaaccctttagtaacattattgggatttgagtttgcttcattgttaagtggttcgtttattgctgaatatttctttaactggccaggattaggaagtctaattttagaagcggtaagaaaccaggatttatatttagttatggcgagtttaatgatgggagctttaatgttaattattggtaatttattggcagatttattattgaaagttgtagaccctcggattaagttggaaagtattaagtga

SEQ ID NO: 93625 - protein, 358 aa, Trichodesmium erythraeum IMS101
MLKELLQAILKKLLQAILILLLPQAKQLIASEIFTYILKRLLQAILTLFLASALCFAVIQLAPGNYLDTLSQNPQISQETIQQLEQQFGLDKSALEQYLRWLGEIIRSGNFGRSFVFQQPVADLLWERIPATLVLSISSLIMTWAIAIPLGIIAGVNQNRILDRFLQLISYTGQGFPSFITALLLLFLAQNISPLLPVGGMQSIDYDDFSFVGKILDMGWHMILPTIALSITSFAGLQRLMRGQLLDVLRQNYIQTARAKGLPENRVIYVHALRNAINPLVTLLGFEFASLLSGSFIAEYFFNWPGLGSLILEAVRNQDLYLVMASLMMGALMLIIGNLLADLLLKVVDPRIKLESIK

SEQ ID NO: 93626 - DNA, 1092 bp, Alkalilimnicola ehrlichei MLHE-1; identical to SEQ ID NO: 39088
  CDS (1)..(1092): transl_table=11

SEQ ID NO: 93627 - protein, 363 aa, Alkalilimnicola ehrlichei MLHE-1; identical to SEQ ID NO: 39089

SEQ ID NO: 93628 - DNA, 1089 bp, Rhizobium leguminosarum bv. viciae 3841; identical to SEQ ID NO: 39090
  CDS (1)..(1089): transl_table=11

SEQ ID NO: 93629 - protein, 362 aa, Rhizobium leguminosarum bv. viciae 3841; identical to SEQ ID NO: 39091

SEQ ID NO: 93630 - DNA, 1074 bp, Pseudomonas aeruginosa UCBPP-PA14
  CDS (1)..(1074): transl_table=11
atgggcggctacctgttgcgccgcctggcgctgatcctgccgaccctgctgggcatcctgctgatcaacttcgccatcgtccaggccgcacccggcgggccggtggaacaggccatcgcgcgcctgcagggcgtcgacggcggcggcccgctggggcgtggcggggagggcgggcatggcgcgctggaaccgcagcgccacggcgagaccggcatcgacccgcagctggtggccgccctggagcgccagtacggcttcgacaagccgccgctgcaacggctctggctgatgctgtcgagctacgcccggctggatttcggcgagagcttctaccgcgacgcgcgggtcgtcgacctgatcgccgagaagctgccggtctcgctgtccctgggcttgtgggcgacgttgatcacctacctggtgtcgattcccctgggggtggccaaggcggtgcgccacggcagcgccttcgacctgtggagcagcgcgttggtggtggtcggctatgcggtgcccggcttcctcttcgccatcgtcctgatcgtgctgttcgccggcggcagctacctggactggttccccctgcgcggcctggcttccgagggcgccgagcgcctcggcccgttggcgcgtttcgccgattacctctggcacctggcgctgccggtgggttcgctggtggtcggcggtttcgccagcctgaccctgctgaccaagaacagcttcctcgacgagatatccaggcagtacgtcgccaccgctcgcgccaagggcctcagcgagcgccgggtgctctacggccatgtgttccgcaacgccatgttgctggtggtggccgggctgccggcggcgctggtctcggtgttcttcaccgggtcgctgctgatcgaggtgctgttctccctcgacggcctcggcctgatgggctacgaagcggcgctcggccgcgactacccggtggtgttcggcagcctgttcatcttcaccctgctcgggttgctggtgaagctggccggcgacctggcctacagcctggtcgacccgcgcatcgacttcgccgcgaggaaacagtga

SEQ ID NO: 93631 - protein, 357 aa, Pseudomonas aeruginosa UCBPP-PA14
MGGYLLRRLALILPTLLGILLINFAIVQAAPGGPVEQAIARLQGVDGGGPLGRGGEGGHGALEPQRHGETGIDPQLVAALERQYGFDKPPLQRLWLMLSSYARLDFGESFYRDARVVDLIAEKLPVSLSLGLWATLITYLVSIPLGVAKAVRHGSAFDLWSSALVVVGYAVPGFLFAIVLIVLFAGGSYLDWFPLRGLASEGAERLGPLARFADYLWHLALPVGSLVVGGFASLTLLTKNSFLDEISRQYVATARAKGLSERRVLYGHVFRNAMLLVVAGLPAALVSVFFTGSLLIEVLFSLDGLGLMGYEAALGRDYPVVFGSLFIFTLLGLLVKLAGDLAYSLVDPRIDFAARKQ

SEQ ID NO: 93632 - DNA, 1083 bp, Pseudomonas aeruginosa UCBPP-PA14; identical to SEQ ID NO: 39092
  CDS (1)..(1083): transl_table=11

SEQ ID NO: 93633 - protein, 360 aa, Pseudomonas aeruginosa UCBPP-PA14; identical to SEQ ID NO: 39093

SEQ ID NO: 93634 - DNA, 1053 bp, Magnetococcus sp. MC-1
  CDS (1)..(1053): transl_table=11
atgtttacctatattctgcgtcgcttgctgcttatttttcccaccttgctgggtattatggccatcacctttgcggtcatccagtttgtgcccggtggcccggtagaacgcatggtctcgctcatgtcgcaaaatcaggcgggtggcggcgaagtaagcagcggtggcggcgcgggctatcgggccgccaaggggttggatgcccagcagatcgagcaattaaaacagctctacggcttcgataaacccgcctaccaacggtttatccatatggttggcaattttttaacctttgaatttggtgaatcctactaccaccataagagcgtcacggctttggttatggagaagttacctgtctctatctccctgggtatatggacctttttgctcacctatctgataagcatccccttgggtatccgcaaggcggtcaaccatggcagccgttttgatgccgcaacctccatcctggtgttggcgggctactccatccctggttttgtcttaggtattttactgctggtgctgtttggcgggggcagtttttgggatattttcccactccgaggcttggtctcggataactgggaaacgctctcttggccagcccgcatcggcgattatctatggcacatggtgctgcccatcaccgcatcggtggtcggctcctttgcggtgatgacgatgctcaccaaaaacagctttttggaggagatctccaagcaatatgtcattaccgcccgcgccaaaggccttagcgaacggcaagtgctctatgggcatgttttccgcaatgccctaatcccgctggtgacgggctttccttccgcctttgttggggcctttttcagcggtagtttgctcatcgaaaccatcttcagcctcgatggtcttggactgctgggttatgactcggtgatcaaccgcgactacccggtggtcatggccacgctctactttttcaccctattggggcttatttccaaactgctcaccgatattacctacgtgctggtcgacccacgcattagctttgaaaacgaaacctag

SEQ ID NO: 93635 - protein, 350 aa, Magnetococcus sp. MC-1
MFTYILRRLLLIFPTLLGIMAITFAVIQFVPGGPVERMVSLMSQNQAGGGEVSSGGGAGYRAAKGLDAQQIEQLKQLYGFDKPAYQRFIHMVGNFLTFEFGESYYHHKSVTALVMEKLPVSISLGIWTFLLTYLISIPLGIRKAVNHGSRFDAATSILVLAGYSIPGFVLGILLLVLFGGGSFWDIFPLRGLVSDNWETLSWPARIGDYLWHMVLPITASVVGSFAVMTMLTKNSFLEEISKQYVITARAKGLSERQVLYGHVFRNALIPLVTGFPSAFVGAFFSGSLLIETIFSLDGLGLLGYDSVINRDYPVVMATLYFFTLLGLISKLLTDITYVLVDPRISFENET

SEQ ID NO: 93636 - DNA, 1038 bp, Acidovorax sp. JS42
  CDS (1)..(1038): transl_table=11
atgttcgcctacatcctcaagcgcatcctgctcatgctgcccacgctgttgggcgtgttgctgttgaccttcgtggtgatccagttcgtgccgggcggtccggtggagcagtacctggccgaggccaaggccggcgctgccggcatgggcgggggcggcgagggcggcggcatggcctatcgcggcgcgcagggcgtcgatcccaagcggctggagcagatcaagcagctctatggctttgacaagccggcgcacgagcgcttctttcagatgctgggccagttcgcgcgcttcgacctggggcgcagcttctttcagaacaaggacgtgtggcaactcgtgaaggagaagctgcccgtgtccgtcagcctggggttgtggaccttcttcatcagctacctcgtggcggtgccgctgggtgtggccaaggcggtgcgcgccggctcgcgctttgacttcgtcaccacgctcatcatcctggtgggctacgcgattccgggtttcgtgctcggcgtggcgctgctggtgatctttggcgggcaattgcagtggttcccgctgcgcgggctgacctcggccaactgggacgagctgggcctgtgggccaaggtgacggattacctatggcatatcgcgctgcccatcacggccatggtggccggcagctttgcggtgacggcgatgctgaccaagaacgcttttctggaagagatccgcaagcaatatgtgctcaccgcgcgtgccaagggactgacagaccggcaggtgctctacaagcacgtgtttcgcaatgcgctgattcccatcatcacgggcttcccatccgccttcatcggcgcgttcttcgcgggctcgctgctcatcgagacgctgttctcgctcgacggcctgggcctgctgtcctatgagagcgtgatccgccgcgactaccccgtggtgctgggcacgctgtacctgttcaccctgatcgggctggtgaccaagctcatcagcgacctgtgctacgtgtgggtggatccccgcgtcaagtttgattga

SEQ ID NO: 93637 - protein, 345 aa, Acidovorax sp. JS42
MFAYILKRILLMLPTLLGVLLLTFVVIQFVPGGPVEQYLAEAKAGAAGMGGGGEGGGMAYRGAQGVDPKRLEQIKQLYGFDKPAHERFFQMLGQFARFDLGRSFFQNKDVWQLVKEKLPVSVSLGLWTFFISYLVAVPLGVAKAVRAGSRFDFVTTLIILVGYAIPGFVLGVALLVIFGGQLQWFPLRGLTSANWDELGLWAKVTDYLWHIALPITAMVAGSFAVTAMLTKNAFLEEIRKQYVLTARAKGLTDRQVLYKHVFRNALIPIITGFPSAFIGAFFAGSLLIETLFSLDGLGLLSYESVIRRDYPVVLGTLYLFTLIGLVTKLISDLCYVWVDPRVKFD

SEQ ID NO: 93638 - DNA, 1104 bp, Magnetospirillum magnetotacticum MS-1; identical to SEQ ID NO: 39094
  CDS (1)..(1104): transl_table=11

SEQ ID NO: 93639 - protein, 367 aa, Magnetospirillum magnetotacticum MS-1; identical to SEQ ID NO: 39095

SEQ ID NO: 93640 - DNA, 1047 bp, Nostoc punctiforme PCC 73102
  CDS (1)..(1047): transl_table=11
atgacatctacgagaatttccttggagacaggtagggattggctaatcaggctagtcacgagcgaaacttttatttatgtggcaaagcgggtattgcaggcactactgactctgtttttggcatcagcattatcgtttttcattattcaactcgctccaggggattatgtagatacgctgcggcaaaacccgaagatatctccagaaagaattgaggaaataaagcggcaatttggtcttgataagtcttggccagagcaattttggctatggctatggcgaatcttgacaaaaggagattttggcacgagttttatttatcaacgttcagtggcatcgctgttgtgggaaagagtaccagcaactttgctattagcgatcgcatctttaattgtcacatgggcgatcgccatccctctagggatttttgctgctgttaaccaaaataagctatcagatcggcttttacaggtgattagctatgccggacaaggctttcccagtttcatcactgccttggcactgctggttttagcccaaatcacctcgcccttattccccgtgggtagcatgactagcattaatcactcagaactaacgtggtttggcaaaatcttagatgtcggctggcacatgattttacctacgattgccctctcaattactagttttgctggtttacaacgcatcactcgcggcgaattattggatgtgctgcgtcaagattatattcaaacggctcgcgctaaaggattgccagaaaatcgcgttatctacgttcatgcacttcgtaacgccgtaaatcccttgattaccttattgggttttgaattagctggtttattaaacggtgctttcattgccgaatttttcttcaactggcccggtttagggaggttgactttacaggctttacaagctcaagatttatatttgttaatggcaagcttggtaatgggcgcagtgttgctaattgctggtaatttaatcgccgatttgatgttaaaagctgccgatccacgcattcggctagaaaatctcaattag

SEQ ID NO: 93641 - protein, 348 aa, Nostoc punctiforme PCC 73102
MTSTRISLETGRDWLIRLVTSETFIYVAKRVLQALLTLFLASALSFFIIQLAPGDYVDTLRQNPKISPERIEEIKRQFGLDKSWPEQFWLWLWRILTKGDFGTSFIYQRSVASLLWERVPATLLLAIASLIVTWAIAIPLGIFAAVNQNKLSDRLLQVISYAGQGFPSFITALALLVLAQITSPLFPVGSMTSINHSELTWFGKILDVGWHMILPTIALSITSFAGLQRITRGELLDVLRQDYIQTARAKGLPENRVIYVHALRNAVNPLITLLGFELAGLLNGAFIAEFFFNWPGLGRLTLQALQAQDLYLLMASLVMGAVLLIAGNLIADLMLKAADPRIRLENLN

SEQ ID NO: 93642 - DNA, 1050 bp, Crocosphaera watsonii WH 8501
  CDS (1)..(1050): transl_table=11
atgactcaaaccctatcccctgaacctaataaaccttcaaataagttagaaaactggttagatgcggaaaacattgtctatgttgtaaagcgaattttacaaggcttattaactatattattggcttctattcttagttttattatcattcaacttgccccaggagactacttagataccttaaaacagaatccgaaaattgctgaggaaactatcaaacaattaactaatcaatttggcttagataaaccttggtatgttcaatattggcgatggtttgtgcaggttgttactcaattagattttggcacaagctttgtttataaccgttctgttgcttctttactaggcgaaagaatacccgcaaccttattattagcaatttcttctattattattacttggttaatagccattcctttaggaattctaagcgcagttaaacagagtagttggactgataaaatactaagggttgttagttatttaggacaaggatttcctagttttataacagccttagttttactgattattgctcaatatttatccccgttattaccagtgggaaatatgaccagtttaaaccatacagaattatctcccataggcaaaatattagatattgcttggcacatgatcttgcctactattgccttgagtattaccagctttgctggtttaatgcgtttaatgcggggacaaatgttagacgtgatgagacaggattatattcagactgctagggccaaaggactaccagaatataaggttatctatgtccatgggttacgcaatgctattaaccccttaattaccctcttaggatttgaatttgctagtttattagggggatcatttattgccgaatttttctttaattggccagggctaggaagactgattttacaggcggtaacggcacaggatttgtatttagtaatgggaagtttaactatgggtgctactatgttaattgtgggtaatttattagctgacttattattgaaagcagtcgatcctcgcattaaattggaaaatattaaatag

SEQ ID NO: 93643 - protein, 349 aa, Crocosphaera watsonii WH 8501
MTQTLSPEPNKPSNKLENWLDAENIVYVVKRILQGLLTILLASILSFIIIQLAPGDYLDTLKQNPKIAEETIKQLTNQFGLDKPWYVQYWRWFVQVVTQLDFGTSFVYNRSVASLLGERIPATLLLAISSIIITWLIAIPLGILSAVKQSSWTDKILRVVSYLGQGFPSFITALVLLIIAQYLSPLLPVGNMTSLNHTELSPIGKILDIAWHMILPTIALSITSFAGLMRLMRGQMLDVMRQDYIQTARAKGLPEYKVIYVHGLRNAINPLITLLGFEFASLLGGSFIAEFFFNWPGLGRLILQAVTAQDLYLVMGSLTMGATMLIVGNLLADLLLKAVDPRIKLENIK

SEQ ID NO: 93644 - DNA, 1089 bp, Roseovarius nubinhibens ISM; identical to SEQ ID NO: 39100
  CDS (1)..(1089): transl_table=11

SEQ ID NO: 93645 - protein, 362 aa, Roseovarius nubinhibens ISM; identical to SEQ ID NO: 39101

SEQ ID NO: 93646 - DNA, 1092 bp, Oceanicola batsensis HTCC2597; identical to SEQ ID NO: 39102
  CDS (1)..(1092): transl_table=11

SEQ ID NO: 93647 - protein, 363 aa, Oceanicola batsensis HTCC2597; identical to SEQ ID NO: 39103

SEQ ID NO: 93648 - DNA, 1101 bp, Oceanospirillum sp. MED92; identical to SEQ ID NO: 39104
  CDS (1)..(1101): transl_table=11

SEQ ID NO: 93649 - protein, 366 aa, Oceanospirillum sp. MED92; identical to SEQ ID NO: 39105

SEQ ID NO: 93650 - DNA, 1056 bp, delta proteobacterium MLMS-1
  CDS (1)..(1056): transl_table=11
atggccgcctacgtcctgcgccgcatactgttgatgatccccaccctgttcggggtgatgctggtgacctttatcgtcacccagttcgtccccggcggaccggtggagcgactgctggccgagatcgagggccatggggtggcggccggcgaaattcgcgccaccggggccggcgacctctaccagggagcccagggcctggacgaagagcggattcaacagttgcaggccctctacggtttcgatcaaccgccggtccagcgttttctcaccatgatgaaaaattatctggtctttgacttcggcgacagttattaccaccacacctcggtgaccgggctggtgatctccaagctgccggtatcgatgtcactggggctgtggacctttatcatcgtctacggggtctgcatcccgctgggcattaaaaaagcggtacgggacggctcccgttttgacgtggtcagcagtacgatactgctgatcggctacgccattcccggcttcgtgctgggcatcgtgctgatcgtcctctttggcggcggcagttttttcaatatctttcccctgcgggggatcgtctccgacggctggcatgagctgaccatcatcgcccagatccttgattatctctggcatatggtcctgccggtgaccgccagcgccgtgggcagcctggccctgatgaccctgctgaccaagaactcgtttttagaagagatccgcaaacagtacgtgctcaccgcccgggccaaaggcttaagcgagcagcgcattctttaccgccacgtctttcgcaacgccatcatcccgattctcaccggctttcccggctcctttgtcgccgccttctttaccggcagcctgctgatcgaaaccatcttctcgctggacggtttgggactgctggcctacgagtcgatcatgaaccgcgactatccggtggttttaggcaccctctacatctttaccatcatcggcctgatctcgcggctgctcaccgatatcagctacgtggtggtggacccccggataacctttgagagtgtcaagtag

SEQ ID NO: 93651 - protein, 351 aa, delta proteobacterium MLMS-1
MAAYVLRRILLMIPTLFGVMLVTFIVTQFVPGGPVERLLAEIEGHGVAAGEIRATGAGDLYQGAQGLDEERIQQLQALYGFDQPPVQRFLTMMKNYLVFDFGDSYYHHTSVTGLVISKLPVSMSLGLWTFIIVYGVCIPLGIKKAVRDGSRFDVVSSTILLIGYAIPGFVLGIVLIVLFGGGSFFNIFPLRGIVSDGWHELTIIAQILDYLWHMVLPVTASAVGSLALMTLLTKNSFLEEIRKQYVLTARAKGLSEQRILYRHVFRNAIIPILTGFPGSFVAAFFTGSLLIETIFSLDGLGLLAYESIMNRDYPVVLGTLYIFTIIGLISRLLTDISYVVVDPRITFESVK

SEQ ID NO: 93652 - DNA, 1059 bp, Pseudomonas putida GB-1
  CDS (1)..(1059): transl_table=11
atgaccgcctacctgctgcgccgcctgttgctgatcattccgacgctgctggcaatcctgctggtcaatttcgccatcgtccaagccgcgccgggtggcccggtggagcaggccgtggcgcgcctgcagggcctcggtggcagcgcacccggcgcgcgggctgaggttgtgcatggtgaatcccgcgccacccgtggcctggacccgaaactgatcgatgagataaagcgccagtacggtttcgacaagtccgcccccgaacgcctgtggctgatgctgggtcagtatgcccggctggattttggcaacagcttctttcgcggagcgaaggtgaccgacctgatcctcgacaagttgccggttaccttgtcgctgggtttctgggccacgctgatcacttacctggtgtcgatcccgctgggtattcgcaaggcagtgcgccacggcagccgtttcgatgcctggagcagcgcgctgatcgtgattggctacgccctgccctcgttcctcttcgccctgttgctgatcgtgctgttcgccggcggcacctcgctcaactggttcccggtgcgtggcctggtctcggacaatttcgacgagctcagcctgctgggcaaggtcgcggactatttctggcacctggtgttgccggtcggcgccctggtgatcggtggtttcgccaccctcacgctgctgaccaagaacgccttcctcgacgagatttcccgccagtatgtggtgactgccagggccaagggcctcagcgagcgctgtgtgctgtatggccatgtgttgcgcaatgccatgctgctggtggtggctggcctgccgcaggcattgatcacggtattcttcgccggctcgctgctgatcgaagtgatcttctcgctcgatggcctgggccgcatgagctatgaagcagccgtgtcgcgagattacccggtggtgttcggcacgctgttcatcttcaccctggctggcctgctgattcgcctgatcggggacctgtcgtacaccctgctggacccgcgcatcgacttcgacacgagggcgcactga

SEQ ID NO: 93653 - protein, 352 aa, Pseudomonas putida GB-1
MTAYLLRRLLLIIPTLLAILLVNFAIVQAAPGGPVEQAVARLQGLGGSAPGARAEVVHGESRATRGLDPKLIDEIKRQYGFDKSAPERLWLMLGQYARLDFGNSFFRGAKVTDLILDKLPVTLSLGFWATLITYLVSIPLGIRKAVRHGSRFDAWSSALIVIGYALPSFLFALLLIVLFAGGTSLNWFPVRGLVSDNFDELSLLGKVADYFWHLVLPVGALVIGGFATLTLLTKNAFLDEISRQYVVTARAKGLSERCVLYGHVLRNAMLLVVAGLPQALITVFFAGSLLIEVIFSLDGLGRMSYEAAVSRDYPVVFGTLFIFTLAGLLIRLIGDLSYTLLDPRIDFDTRAH

SEQ ID NO: 93654 - DNA, 1074 bp, Pseudomonas putida GB-1
  CDS (1)..(1074): transl_table=11
atgctggcctacatcctgcgccgcctgctgctgatcatcccgaccctattcggcatcctcatcatcaacttcatcatcgttcaggccgcccccggcggcccggtcgagcagatgatcgccaagctcgaaggcttcgaaggcgcgaccagccgcatcgccggtggcggcgccgaggtttccgtggccggttccaactaccgcggtgcacagggcctggacccggcgctgatcgctgaaatcgagcgcatgtacggcttcgacaagtcgccgcccgagcgcctgtggatcatgatcaagaactacgcccagctcgactttggcgacagcttcttccgcgatgccaaggtcatcgacctgatcatcgagaagatgccagtgtcgatctcgctagggctgtggagcacgctgatcatgtacctggtgtcgatcccgctgggcatcgccaaggcggtgcgccatggcagccacttcgacgtgtggaccagttcggcgattatcgtcggctacgccatcccggcgttcctgttcgctatcctgctgatcgtgctgtttgccggcggcagctacttcgactggttcccgctgcgtggcctcacctccaacaacttcgatgagctgagtaccaccggtaaagtactggattacttctggcacctggtgttgccgatcaccgcgctggtcattggcaacttcgccaccatgaccctgctgaccaagaacagcttcctcgacgaaatcaacaaacaatacgtggtcaccgccaaggccaaaggcttgaaccggtcacgggtgctgtacggccacgtgttccgcaacgccatgctgttggtgatcgccggtttcccctcggcgttcatcggcatcttcttcaccggctccttgctgatcgaggtgatcttcagccttgacggcctgggcctgatgagtttcgaggcggccatcaaccgcgactacccggtggtcttcggcaccctgttcatcttcaccctgctggggctggtggtgaaactgatcggcgacctgacctacaccctggtcgacccacgcatcgacttcgccagccgggagcactga

SEQ ID NO: 93655 - protein, 357 aa, Pseudomonas putida GB-1
MLAYILRRLLLIIPTLFGILIINFIIVQAAPGGPVEQMIAKLEGFEGATSRIAGGGAEVSVAGSNYRGAQGLDPALIAEIERMYGFDKSPPERLWIMIKNYAQLDFGDSFFRDAKVIDLIIEKMPVSISLGLWSTLIMYLVSIPLGIAKAVRHGSHFDVWTSSAIIVGYAIPAFLFAILLIVLFAGGSYFDWFPLRGLTSNNFDELSTTGKVLDYFWHLVLPITALVIGNFATMTLLTKNSFLDEINKQYVVTAKAKGLNRSRVLYGHVFRNAMLLVIAGFPSAFIGIFFTGSLLIEVIFSLDGLGLMSFEAAINRDYPVVFGTLFIFTLLGLVVKLIGDLTYTLVDPRIDFASREH

SEQ ID NO: 93656 - DNA, 1083 bp, Marinobacter sp. ELB17
  CDS (1)..(1083): transl_table=11
atgggcgtttacattctgcgccgtctggcgctgatcatccccactctgatcggcattatgctgctcaatttcgtcattgttcaggcggccccgggcggcccgattgaacaaatgattgcccaaatgcagggccacggtggcaacaccctggcccgtgccggaggcggcgacagcagcggcgaagtcgtcaccagcaacgatagccggggcagccgtggtattccggacgaattgctgaaagaaatcgaagtcatgtacggcttcgacaagcccgcccatgagcgctttttcaaaatgttcaaagactacgccactctcgatttcggcgactcgtttttccgtgataaaagcgtgctggaactgattctggacaaaatgccggtgtccatttccctcgggctctggtccacgcttattatctatctgatttctattcccctgggcattcgcaaagcggtcagtgacggctcacgctttgacgtatggagcagttcggcaattgtgattggctatgccattcccggcttcctgtttgccatattgctgatcgtactgtttgccggcggcagctactatgactggttccccctgcgcgggcttacctccagcaatttcgacgaaatgacctggtatcagcaggtgggcgactatttctggcacctggcgttgcctgtgacggccaatgtgattggcggttttgccacgctcaccctactcaccaagaactcgtttatggatgaaatcggcaagcactacgtggtcactgcccgcgcaaaaggcctggaagaaaaacaggtgctttacggccacgtcttccgcaacgccatgctgattgtgatcgccagtctgcccggggttctggtgtcgctgtttttcaccggatccttgctgattgaggttatcttctccctcgacggtctcggactattgggctttgaagcggccctgaaccgggattacccggtgatatttggcacccttttcatattcactctgatgggcctgttgctgaagctgatcagcgatatcacttacgtattggtagacccgcgcatcgatttcgaaagccgggaaggtgcctga

SEQ ID NO: 93657 - protein, 360 aa, Marinobacter sp. ELB17
MGVYILRRLALIIPTLIGIMLLNFVIVQAAPGGPIEQMIAQMQGHGGNTLARAGGGDSSGEVVTSNDSRGSRGIPDELLKEIEVMYGFDKPAHERFFKMFKDYATLDFGDSFFRDKSVLELILDKMPVSISLGLWSTLIIYLISIPLGIRKAVSDGSRFDVWSSSAIVIGYAIPGFLFAILLIVLFAGGSYYDWFPLRGLTSSNFDEMTWYQQVGDYFWHLALPVTANVIGGFATLTLLTKNSFMDEIGKHYVVTARAKGLEEKQVLYGHVFRNAMLIVIASLPGVLVSLFFTGSLLIEVIFSLDGLGLLGFEAALNRDYPVIFGTLFIFTLMGLLLKLISDITYVLVDPRIDFESREGA

SEQ ID NO: 93658 - DNA, 1092 bp, Moritella sp. PE36
  CDS (1)..(1092): transl_table=11
atgtggagttatatactacgccgttgtttgttaatgatccccactttgttaggtatcatcacccttaattttattattattcaagcggccccaggcggccctgttgaacagtcgttggctaaattacaaggcattgagtcctctgcaaccagtcgtgttgatggcagtagtcagggcgaagtgaaagtgaatctaagcaatggtactcagtcacaataccgaggtgcacaaggtattgatcctgaatatattaaggaattagaacggttatatggttttgataaacctttatacgaacgctattggttgttgcttaaaagctatttgaaattcgatttcggtgatagtttttttcgtgatagttcggtgattgatctgatattagataagttaccagtctcgatttcattaggactgtggacgacgatcttggtgtatcttatttcgataccgctggggataaaaaaagccgttactcacggttcttctttcgatgtttggagttcaagcgcgatcgtgattggtttcgctattcctaacttcctgtttgcgttattactgatcgtgcttttcgctggtggcagttattttgattggtttccattacggggtttaacgtctgctaacttcgatgagttatccacgtttgggaaagtcaaagattacttctggcatctggcattaccggtgttggcttcggtgatcagtagctttgccacgttaaccttgctgactaaaaatacctttttagatgaaattaataaacaatatgtgatcaccgcaagagccaaaggtcttaccgaaaaccaggtgttatacggtcatgtatttcgcaatgcgatgttattagtgattgccggattaccggccgcgttgatcagtattttctttacgggttcattgatgatagaaattatcttctcgttagacgggctgggtttattaggctttgagtcggtaataaatcgtgattatccggtggtgtttggcaccttatatatctttaccttgatggggctggttattaagttaatcagtgatgttacctatatgatgatcgacccacgcattaattttgaggcgcaatcataa

SEQ ID NO: 93659 - protein, 363 aa, Moritella sp. PE36
MWSYILRRCLLMIPTLLGIITLNFIIIQAAPGGPVEQSLAKLQGIESSATSRVDGSSQGEVKVNLSNGTQSQYRGAQGIDPEYIKELERLYGFDKPLYERYWLLLKSYLKFDFGDSFFRDSSVIDLILDKLPVSISLGLWTTILVYLISIPLGIKKAVTHGSSFDVWSSSAIVIGFAIPNFLFALLLIVLFAGGSYFDWFPLRGLTSANFDELSTFGKVKDYFWHLALPVLASVISSFATLTLLTKNTFLDEINKQYVITARAKGLTENQVLYGHVFRNAMLLVIAGLPAALISIFFTGSLMIEIIFSLDGLGLLGFESVINRDYPVVFGTLYIFTLMGLVIKLISDVTYMMIDPRINFEAQS

SEQ ID NO: 93660 - DNA, 1089 bp, Magnetospirillum gryphiswaldense
  CDS (1)..(1089): transl_table=11
atgctggcctatgcgctgcgccgcctgctgctgatgccgctgaccttgctgggcatcatgctgatcaatttcgtcatcgcccagatggctccgggcgggccggtggaacagatgatcgcccgcatcgaaggccaagcggccagcaccacccagcgcatcagcggcgccggggccggcgaggtgcaagcgccgcgcggccaaagcggcgcctatcgcggcgcccagggcctggaccccaaattcattgccgagatcgagacgcaattcggtttcgacaagccggcacatgaacgcttcatcggtatggtcggcaattacctgcgcttcgatttcggcaaaagcttttaccgcgacgtgtcggtgatcgacctcattatcgagaaaatgccggtttcggtgtcgctggggctgtggagcaccctgatcatctatctggtctccatccccttgggcatcgccaaggcaaggcgcgacggcaatagcttcgacatcgccacctcgtgggcggtgatcatcggctatgcggtgcccggcttcctgttcgccatcctgctgatcgtggtctttgccggcgggcgctatctggactggtttccgctgcgcggcctgacctcggtggatttcgaccaattgggcgcctggggcaagatcaaggattacctgtggcacctgaccctgccggtcaccgccctggtcatcggcggttttgctggactggtcatgctgaccaagaattccttcctcgaagaaatcggcaagcaatacgtggtcaccgcccgggccaagggcctgagcgaaaatcaggtgctctaccgccatgtgttcaggaacgccatgctgctggtcatcgccggcttcccatcggccctggtcggcatcttgttcgccggcagcatcctgatcgagatcatcttttcgctggacggtatcggcctgttgggcttcgaggcggtgaccaaccgcgattatccggtgatgttcggcaccctttacatgttcagcctgctggggttggtgctgaacctgatcagcgacctgacctatcactacgtcgatccgcgcatcgacttttccagccgtccggtgtga

SEQ ID NO: 93661 - protein, 362 aa, Magnetospirillum gryphiswaldense
MLAYALRRLLLMPLTLLGIMLINFVIAQMAPGGPVEQMIARIEGQAASTTQRISGAGAGEVQAPRGQSGAYRGAQGLDPKFIAEIETQFGFDKPAHERFIGMVGNYLRFDFGKSFYRDVSVIDLIIEKMPVSVSLGLWSTLIIYLVSIPLGIAKARRDGNSFDIATSWAVIIGYAVPGFLFAILLIVVFAGGRYLDWFPLRGLTSVDFDQLGAWGKIKDYLWHLTLPVTALVIGGFAGLVMLTKNSFLEEIGKQYVVTARAKGLSENQVLYRHVFRNAMLLVIAGFPSALVGILFAGSILIEIIFSLDGIGLLGFEAVTNRDYPVMFGTLYMFSLLGLVLNLISDLTYHYVDPRIDFSSRPV

SEQ ID NO: 93662 - DNA, 1089 bp, Methylocapsa acidiphila; identical to SEQ ID NO: 39108
  CDS (1)..(1089): transl_table=11

SEQ ID NO: 93663 - protein, 362 aa, Methylocapsa acidiphila; identical to SEQ ID NO: 39109

SEQ ID NO: 93664 - DNA, 1095 bp, Escherichia coli O157
  CDS (1)..(1095)
atgggcgcttatctgattcgccgtctgttgctggtgatcccaacgttatgggcgattatcactatcaactttttcatcgtgcaaattgcgcctggcggtccggtcgaccaggccatcgccgccattgagtttggtaatgccggagtattacccggcgcaggcggtgaaggcgttcgcgccagccatgcgcaaacgggcgtcggtaatatcagcgacagtaattaccgtggcggacgcggattagatccagaagtgatcgccgagatcactcatcgctacggtttcgataagccgatccacgaacgttacttcaaaatgctctgggactacatccgctttgattttggcgatagcctgtttcgcagcgcctcggtgctgacgctgattaaagacagtctgccggtttccatcaccctcggattgtggagcacgctgattatctatctggtgtcgattccgttaggcattcgcaaagctgtttataatgggagccgctttgacgtctggagtagcgcatttatcatcatcggctacgccattccggcctttttgtttgccatcctgctgattgtcttcttcgcaggcggcagctatttcgacctgttccctctacgcggcctggtttccgctaactttgattcgctgccgtggtatcagaaaatcaccgattatctgtggcatatcacgctgccggtgctggcgacggtgattggtggctttgcggcgctgactatgctgacaaaaaactcattccttgatgaagtacgcaagcaatacgtggtgaccgcgcgtgcgaaaggggtaagtgaaaaaaatattctctggaaacatgtgttccgcaacgccatgctgctggtgattgccggttttccggcgacgtttatcagcatgttttttaccggctcgctgctgattgaggtgatgttttcactcaatggtcttggcttactgggctacgaagcgaccgtctcgcgcgattatcctgtaatgtttggtaccttgtatattttcaccctgattggcctgctgctgaatattgtcagtgatatcagctatacgctggtcgatccgcgtatagattttgagggacgttaa

SEQ ID NO: 93665 - protein, 364 aa, Escherichia coli O157; identical to SEQ ID NO: 39041

SEQ ID NO: 93666 - DNA, 20 bp, Artificial sequence
  primer
atgctggcctacatcctgcg

SEQ ID NO: 93667 - DNA, 22 bp, Artificial sequence
  primer
tcagctctcccggctttcgaag

SEQ ID NO: 93668 - protein, 370 aa, Artificial sequence
  consensus sequence
  Variant (2)..(3): Xaa in position 2 to 3 is any amino acid
  Variant (5)..(7): Xaa in position 5 to 7 is any amino acid
  Variant (9)..(9): Xaa in position 9 is any amino acid
  Variant (12)..(13): Xaa in position 12 to 13 is any amino acid
  Variant (17)..(23): Xaa in position 17 to 23 is any amino acid
  Variant (25)..(27): Xaa in position 25 to 27 is any amino acid
  Variant (29)..(30): Xaa in position 29 to 30 is any amino acid
  Variant (37)..(47): Xaa in position 37 to 47 is any amino acid
  Variant (48)..(86): Xaa in position 48 to 86 is any or no amino acid
  Variant (88)..(95): Xaa in position 88 to 95 is any amino acid
  Variant (96)..(100): Xaa in position 96 to 100 is any or no amino acid
  Variant (106)..(107): Xaa in position 106 to 107 is any amino acid
  Variant (110)..(112): Xaa in position 110 to 112 is any amino acid
  Variant (114)..(120): Xaa in position 114 to 120 is any amino acid
  Variant (121)..(121): Xaa in position 121 is any or no amino acid
  Variant (125)..(125): Xaa in position 125 is any amino acid
  Variant (127)..(132): Xaa in position 127 to 132 is any amino acid
  Variant (133)..(133): Xaa in position 133 is any or no amino acid
  Variant (135)..(136): Xaa in position 135 to 136 is any amino acid
  Variant (138)..(142): Xaa in position 138 to 142 is any amino acid
  Variant (146)..(146): Xaa in position 146 is any amino acid
  Variant (150)..(150): Xaa in position 150 is any amino acid
  Variant (152)..(156): Xaa in position 152 to 156 is any amino acid
  Variant (158)..(159): Xaa in position 158 to 159 is any amino acid
  Variant (166)..(166): Xaa in position 166 is any amino acid
  Variant (169)..(171): Xaa in position 169 to 171 is any amino acid
  Variant (173)..(174): Xaa in position 173 to 174 is any amino acid
  Variant (177)..(179): Xaa in position 177 to 179 is any amino acid
  Variant (181)..(185): Xaa in position 181 to 185 is any amino acid
  Variant (189)..(189): Xaa in position 189 is any amino acid
  Variant (191)..(191): Xaa in position 191 is any amino acid
  Variant (193)..(197): Xaa in position 193 to 197 is any amino acid
  Variant (199)..(199): Xaa in position 199 is any amino acid
  Variant (201)..(201): Xaa in position 201 is any amino acid
  Variant (203)..(203): Xaa in position 203 is any amino acid
  Variant (206)..(208): Xaa in position 206 to 208 is any amino acid
  Variant (209)..(210): Xaa in position 209 to 210 is any or no amino acid
  Variant (213)..(213): Xaa in position 213 is any amino acid
  Variant (217)..(217): Xaa in position 217 is any amino acid
  Variant (219)..(223): Xaa in position 219 to 223 is any amino acid
  Variant (225)..(231): Xaa in position 225 to 231 is any amino acid
  Variant (234)..(234): Xaa in position 234 is any amino acid
  Variant (237)..(238): Xaa in position 237 to 238 is any amino acid
  Variant (241)..(248): Xaa in position 241 to 248 is any amino acid
  Variant (251)..(252): Xaa in position 251 to 252 is any amino acid
  Variant (254)..(254): Xaa in position 254 is any amino acid
  Variant (259)..(259): Xaa in position 259 is any amino acid
  Variant (262)..(262): Xaa in position 262 is any amino acid
  Variant (265)..(266): Xaa in position 265 to 266 is any amino acid
  Variant (270)..(270): Xaa in position 270 is any amino acid
  Variant (277)..(278): Xaa in position 277 to 278 is any amino acid
  Variant (280)..(281): Xaa in position 280 to 281 is any amino acid
  Variant (285)..(285): Xaa in position 285 is any amino acid
  Variant (292)..(292): Xaa in position 292 is any amino acid
  Variant (294)..(297): Xaa in position 294 to 297 is any amino acid
  Variant (299)..(299): Xaa in position 299 is any amino acid
  Variant (301)..(305): Xaa in position 301 to 305 is any amino acid
  Variant (306)..(306): Xaa in position 306 is any or no amino acid
  Variant (309)..(309): Xaa in position 309 is any amino acid
  Variant (316)..(317): Xaa in position 316 to 317 is any amino acid
  Variant (321)..(321): Xaa in position 321 is any amino acid
  Variant (325)..(333): Xaa in position 325 to 333 is any amino acid
  Variant (338)..(342): Xaa in position 338 to 342 is any amino acid
  Variant (344)..(345): Xaa in position 344 to 345 is any amino acid
  Variant (347)..(347): Xaa in position 347 is any amino acid
  Variant (349)..(349): Xaa in position 349 is any amino acid
  Variant (352)..(354): Xaa in position 352 to 354 is any amino acid
  Variant (356)..(357): Xaa in position 356 to 357 is any amino acid
  Variant (359)..(360): Xaa in position 359 to 360 is any amino acid
  Variant (362)..(364): Xaa in position 362 to 364 is any amino acid
  Variant (369)..(369): Xaa in position 369 is any amino acid
MXXYXXXRXLLXXPTLXXXXXXXFXXXQXXPGGPVEXXXXXXXXXXXXXXXXXXXXXXXXXXXXXXXXXXXXXXXXXXXXXXXXXXGXXXXXXXXXXXXXGFDKPXXERXXXMXXXXXXXXDFGXSXXXXXXXVXXLXXXXXPVSXSLGXWXXXXXYXXSIPLGIXKAXXXGXXFDXXXSXXXXXGYAXPXFXXXXXLXVXFXGGXXXXXFPXRGLXSXXXXXLXXXXXXXDYXWHXXLPXXXXXXXXFAXXTXLTKNXFLXEIXXQYVXTARAKGXXEXXVLYXHVFRNAXLXXXXGXPXXXXXXFFXGSLLIEXXFSLXGLGXXXXXXXXXRDYPXXXXXLXXFXLXGLXXXLXXDXXYXXXDPRIXF

SEQ ID NO: 93669 - protein, 61 aa, Artificial sequence
  protein pattern
  Variant (3)..(3): Xaa in position 3 is any amino acid
  Variant (4)..(4): Xaa in position 4 is His, Trp or Tyr
  Variant (6)..(6): Xaa in position 6 is Ile, Leu or Met
  Variant (7)..(7): Xaa in position 7 is Ala, Thr or Val
  Variant (10)..(10): Xaa in position 10 is Ile, Leu or Val
  Variant (11)..(11): Xaa in position 11 is any amino acid
  Variant (12)..(12): Xaa in position 12 is Ala, Ser or Thr
  Variant (13)..(14): Xaa in position 13 to 14 is any amino acid
  Variant (15)..(15): Xaa in position 15 is Ala, Ile, Leu or Val
  Variant (16)..(16): Xaa in position 16 is Gly or Ser
  Variant (17)..(17): Xaa in position 17 is any amino acid
  Variant (18)..(18): Xaa in position 18 is Phe or Leu
  Variant (19)..(19): Xaa in position 19 is Ala or Thr
  Variant (20)..(21): Xaa in position 20 to 21 is any amino acid
  Variant (23)..(23): Xaa in position 23 is any or no amino acid
  Variant (25)..(25): Xaa in position 25 is any or no amino acid
  Variant (28)..(28): Xaa in position 28 is any amino acid
  Variant (29)..(29): Xaa in position 29 is Ala, Cys, Ser or Thr
  Variant (31)..(31): Xaa in position 31 is Ile, Leu or Met
  Variant (32)..(32): Xaa in position 32 is Asp, Glu or Asn
  Variant (34)..(34): Xaa in position 34 is Ile or Val
  Variant (35)..(37): Xaa in position 35 to 37 is any amino acid
  Variant (40)..(40): Xaa in position 40 is any amino acid
  Variant (43)..(43): Xaa in position 43 is Lys or Arg
  Variant (44)..(44): Xaa in position 44 is any amino acid
  Variant (47)..(47): Xaa in position 47 is any amino acid
  Variant (48)..(48): Xaa in position 48 is Ala, Asp, Glu, Gly, Asn, Ser or Thr
  Variant (49)..(51): Xaa in position 49 to 51 is any amino acid
  Variant (52)..(52): Xaa in position 52 is Ile or Val
  Variant (53)..(53): Xaa in position 53 is Leu or Met
  Variant (54)..(55): Xaa in position 54 to 55 is any amino acid
  Variant (57)..(57): Xaa in position 57 is Ile or Val
  Variant (58)..(58): Xaa in position 58 is Phe or Leu
DYXXHXXLPXXXXXXXXXXXXTXLXTKXXFXXEXXXXYVXTAXXKGXXXXXXXXXHXXRNA

SEQ ID NO: 93670 - protein, 27 aa, Artificial sequence
  protein pattern
  Variant (3)..(3): Xaa in position 3 is any or no amino acid
  Variant (5)..(5): Xaa in position 5 is any amino acid
  Variant (6)..(6): Xaa in position 6 is any or no amino acid
  Variant (8)..(8): Xaa in position 8 is any amino acid
  Variant (9)..(9): Xaa in position 9 is Ile, Leu, Met or Val
  Variant (11)..(11): Xaa in position 11 is Gly, Asn, Ser or Thr
  Variant (13)..(13): Xaa in position 13 is Asp, Glu or Asn
  Variant (15)..(15): Xaa in position 15 is Ile or Leu
  Variant (17)..(17): Xaa in position 17 is any amino acid
  Variant (18)..(18): Xaa in position 18 is Leu or Met
  Variant (19)..(19): Xaa in position 19 is Ala, Gly or Ser
  Variant (20)..(20): Xaa in position 20 is Phe or Tyr
  Variant (21)..(21): Xaa in position 21 is any amino acid
  Variant (22)..(22): Xaa in position 22 is Ala or Ser
  Variant (23)..(25): Xaa in position 23 to 25 is any amino acid
GSXLXXEXXFXLXGXGXXXXXXXXXRD

SEQ ID NO: 93671 - protein, 13 aa, Artificial sequence
  protein pattern
  Variant (2)..(2): Xaa in position 2 is any amino acid
  Variant (3)..(3): Xaa in position 3 is Ile, Leu or Val
  Variant (4)..(4): Xaa in position 4 is any amino acid
  Variant (6)..(6): Xaa in position 6 is any amino acid
  Variant (7)..(7): Xaa in position 7 is Ala or Val
  Variant (13)..(13): Xaa in position 13 is Asp or Glu
FXXXQXXPGGPVX

SEQ ID NO: 93672 - protein, 13 aa, Artificial sequence
  protein pattern
  Variant (2)..(2): Xaa in position 2 is Ile, Leu or Val
  Variant (3)..(3): Xaa in position 3 is any amino acid
  Variant (5)..(6): Xaa in position 5 to 6 is any amino acid
  Variant (7)..(7): Xaa in position 7 is Ala, Ile, Leu or Val
  Variant (12)..(12): Xaa in position 12 is any amino acid
DXXYXXXDPRIXF

SEQ ID NO: 93673 - protein, 12 aa, Artificial sequence
  protein pattern
  Variant (2)..(2): Xaa in position 2 is any amino acid
  Variant (3)..(3): Xaa in position 3 is Ile or Val
  Variant (4)..(4): Xaa in position 4 is Cys or Ser
  Variant (9)..(9): Xaa in position 9 is Ile or Val
  Variant (10)..(10): Xaa in position 10 is any amino acid
YXXXIPLGXXKA

SEQ ID NO: 93674 - protein, 19 aa, Artificial sequence
  protein pattern
  Variant (2)..(2): Xaa in position 2 is any amino acid
  Variant (5)..(9): Xaa in position 5 to 9 is any amino acid
  Variant (12)..(12): Xaa in position 12 is Ala, Leu or Val
  Variant (13)..(13): Xaa in position 13 is Gln or Arg
  Variant (15)..(15): Xaa in position 15 is Ile or Leu
  Variant (16)..(16): Xaa in position 16 is any amino acid
  Variant (18)..(18): Xaa in position 18 is any amino acid
  Variant (19)..(19): Xaa in position 19 is Asp, Gly or Asn
FXGGXXXXXFPXXGXXSXX

SEQ ID NO: 93675 - protein, 17 aa, Artificial sequence
  protein pattern
  Variant (2)..(3): Xaa in position 2 to 3 is any amino acid
  Variant (5)..(5): Xaa in position 5 is Ile, Leu or Val
  Variant (6)..(6): Xaa in position 6 is any amino acid
  Variant (7)..(7): Xaa in position 7 is Asp, Glu, Gln or Ser
  Variant (8)..(8): Xaa in position 8 is any amino acid
  Variant (9)..(9): Xaa in position 9 is Leu or Met
  Variant (13)..(13): Xaa in position 13 is any amino acid
  Variant (14)..(14): Xaa in position 14 is Ser or Thr
  Variant (15)..(15): Xaa in position 15 is Phe, Ile or Leu
  Variant (17)..(17): Xaa in position 17 is Phe, Ile, Leu or Val
VXXLXXXXXPVSXXXGX

SEQ ID NO: 93676 - protein, 15 aa, Artificial sequence
  protein pattern
  Variant (2)..(2): Xaa in position 2 is any amino acid
  Variant (3)..(3): Xaa in position 3 is Ala, Gly, Asn, Ser, Thr or Val
  Variant (5)..(6): Xaa in position 5 to 6 is any amino acid
  Variant (7)..(7): Xaa in position 7 is Lys or Arg
  Variant (9)..(10): Xaa in position 9 to 10 is any amino acid
  Variant (12)..(12): Xaa in position 12 is Ile, Leu, Met or Val
  Variant (13)..(13): Xaa in position 13 is Phe, Ile, Leu or Val
MXXYXXXRXXLXXPT

SEQ ID NO: 93677 - protein, 15 aa, Artificial sequence
  protein pattern
  Variant (2)..(4): Xaa in position 2 to 4 is any amino acid
  Variant (5)..(5): Xaa in position 5 is Phe or Tyr
  Variant (6)..(7): Xaa in position 6 to 7 is any amino acid
  Variant (8)..(8): Xaa in position 8 is Phe or Leu
  Variant (9)..(9): Xaa in position 9 is Asp or Asn
  Variant (10)..(10): Xaa in position 10 is Phe, Leu or Val
  Variant (12)..(12): Xaa in position 12 is any amino acid
  Variant (14)..(14): Xaa in position 14 is any or no amino acid
MXXXXXXXXXGXSXF

SEQ ID NO: 93678 - DNA, 2685 bp, Escherichia coli
  CDS (1)..(2685): transl_table=11
atgaataacgaacccttacgtcccgaccccgatcgtctgctggaacaaactgccgcgccgcatcgggggaagctgaaagttttcttcggtgcctgtgcaggcgtcgggaagacctgggcgatgctggcagaagcccagcgactgcgggcgcaagggctggatattgtggttggcgtggtagaaacccacgggcgaaaagataccgccgccatgctggaagggctggctgttctgccgttaaaacgccaggcgtaccgtgggcggcatatcagcgagtttgatctcgatgccgccctcgcccgccgcccggcgctgatcttaatggacgaactggcgcacagtaatgcgccaggttcccgtcatcccaaacgctggcaggatatcgaagaactgctggaagctggcattgatgttttcactaccgtcaacgttcagcatctggaaagtctgaatgatgtggtcagcggcgtcaccggaattcaggtacgggaaaccgtgcccgatccttttttcgatgccgccgacgacgtggtgctggtggacttgcccccggacgatctgcgccagcggctgaaagaaggcaaagtctatattgccgggcaggcggagcgcgccattgaacattttttccgcaaaggtaatctgatcgccctgcgcgaactggcactgcgccgtactgccgatcgcgttgatgagcaaatgcgcgcctggcgggggcatcctggcgaagagaaagtgtggcacacgcgcgacgcgatccttttatgcatcggccataacaccggcagcgaaaaactggtccgcgcagcggcgcggctggcgtcacggctgggtagcgtctggcacgcggtgtatgttgaaacccctgccctgcaccgcttaccggaaaaaaaacgtcgggcaattctcagcgccttacgtctggcgcaggaactgggcgcggagacggcaacactttctgatccagcggaagagaaagcggtagtgcgttatgcccgtgaacataatctcggcaagattattctcggtcgcccggcctcgcgccgctggtggcgtcgggaaacgtttgctgaccgactggcgcgcatcgcccccgatctcgatcaggtgctggtcgcgcttgatgaaccacccgcccgcacgattaacaacgcgccggataaccgctcttttaaagacaagtggcgtgtacaaattcagggatgcgtggttgccgccgcgttatgcgccgttatcaccttaattgccatgcagtggctgatggcgtttgatgccgccaacctggtgatgctgtatctgcttggcgtggtggtggtggcgctattttatggacgctggccttcagtggttgccaccgtcattaatgtagtgagtttcgatctcttttttatcgccccacgcggcacgctcgccgtctctgatgtgcaatatctgctgaccttcgcggtgatgttaaccgtcgggctggtgatcgggaaccttactgctggcgtgcgttatcaggcgcgggtagcccgttaccgcgagcaacgcacacggcacttatatgaaatgtcgaaagctctggcggtgggccgcagtccgcaggatatcgctgccaccagcgaacaatttattgcctccacgtttcatgcccgcagtcaggtgttgttgcccgatgacaacggtaaattgcagccgttaacacatccgcaaggaatgacgccgtgggacgatgccatcgcgcagtggagttttgataaaggcctgcctgcgggcgcgggcaccgacacgttacccggtgtaccgtaccagattttgccgctaaaaagcggcgagaaaacctacgggctggtggtggtggagccggggaatctgcgccagttgatgatcccggaacagcagcgcctgctggagacgtttacgctgttagtcgccaatgcccttgagcggctgacgctaaccgccagcgaagaacaggcgcggatggcaagcgaacgtgaacagatccgcaacgccctgctggcggcgctttcgcatgatttacgcacgccgcttacggtgctgtttggtcaggcagaaatcttaacgctcgatctggcaagcgaaggatcaccccacgcccgccaggccagcgagatccgtcagcatgtgctgaacactacccgactggtgaataatctactggatatggcgcgaattcagtccggcggctttaatttgaagaaagagtggttaacgctggaagaagtagtcggcagcgcgctgcaaatgctggaaccgggtttatcgtcgcccatcaatctttctctgccagaaccgctgaccttaatccacgttgacgggccactctttgaacgggtgctgattaatctgctggagaacgcggtgaaatatgcgggtgcgcaggccgaaattggtatcgatgcccacgttgagggcgaaaatctacaactggatgtctgggataacggccccggtcttccgccaggccaggagcagacgatatttgataagtttgctcgcgggaataaagagtcggcagtaccgggggtagggcttggactggcaatttgtcgggcgatagtggatgtacacgggggcactattaccgcgttcaaccgaccggaaggtggtgcctgttttcgtgttacacttccccagcaaactgcccctgaacttgaagaatttcatgaggatatgtaa

SEQ ID NO: 93679 - protein, 894 aa, Escherichia coli
MNNEPLRPDPDRLLEQTAAPHRGKLKVFFGACAGVGKTWAMLAEAQRLRAQGLDIVVGVVETHGRKDTAAMLEGLAVLPLKRQAYRGRHISEFDLDAALARRPALILMDELAHSNAPGSRHPKRWQDIEELLEAGIDVFTTVNVQHLESLNDVVSGVTGIQVRETVPDPFFDAADDVVLVDLPPDDLRQRLKEGKVYIAGQAERAIEHFFRKGNLIALRELALRRTADRVDEQMRAWRGHPGEEKVWHTRDAILLCIGHNTGSEKLVRAAARLASRLGSVWHAVYVETPALHRLPEKKRRAILSALRLAQELGAETATLSDPAEEKAVVRYAREHNLGKIILGRPASRRWWRRETFADRLARIAPDLDQVLVALDEPPARTINNAPDNRSFKDKWRVQIQGCVVAAALCAVITLIAMQWLMAFDAANLVMLYLLGVVVVALFYGRWPSVVATVINVVSFDLFFIAPRGTLAVSDVQYLLTFAVMLTVGLVIGNLTAGVRYQARVARYREQRTRHLYEMSKALAVGRSPQDIAATSEQFIASTFHARSQVLLPDDNGKLQPLTHPQGMTPWDDAIAQWSFDKGLPAGAGTDTLPGVPYQILPLKSGEKTYGLVVVEPGNLRQLMIPEQQRLLETFTLLVANALERLTLTASEEQARMASEREQIRNALLAALSHDLRTPLTVLFGQAEILTLDLASEGSPHARQASEIRQHVLNTTRLVNNLLDMARIQSGGFNLKKEWLTLEEVVGSALQMLEPGLSSPINLSLPEPLTLIHVDGPLFERVLINLLENAVKYAGAQAEIGIDAHVEGENLQLDVWDNGPGLPPGQEQTIFDKFARGNKESAVPGVGLGLAICRAIVDVHGGTITAFNRPEGGACFRVTLPQQTAPELEEFHEDM

SEQ ID NO: 93680 - DNA, 2688 bp, Enterobacter cloacae
  CDS (1)..(2688): transl_table=11
atgaccgacgagcccatgcgcccggatccggacaggctgcttgaacagacggctgaagcccaccgtggcaagctgaaaatttttttcggcgcctgcgcgggtgtcgggaaaaccttcgccatgctgacggaagcccagcggcttcgggcgcaggggcttgatattctcatcggcgtggtggaaacccacggtcgcaaagagactgctgcgctgctgacggggctggcgacgcagccgccccagcgtatcagccatcgcgggcggctggtcacggagtttgatcttgatgccgccctcgcccgccgccctgccctgatcctgatggacgaactggcgcacagcaatgcgccaggctcccgccatccgaagcgctggcaggatgttgaggagctgcttgaggcaggcattgacgtcttcaccacggtgaatgttcagcatctggaaagcctgaacgacgtggtgagcggcgtaaccggtatccaggtgcgggaaaccgtccccgatccgttttttgattctgccgatgaagtcgtactggttgacctgccgccggacgatctgcgccagcgcctgcatgaaggcaaagtgtatattgccggccaggccgaacgcgccatcgaacattttttccgcaaaggaaacctgattgccctgcgcgagctggccctgcgccgcaccgccgatcgcgttgatgaccagatgcgcgcctggcgagacctacagggacaagagcgcgtctggcacacgcgggacgccattctgttatgcattggtcacggcagcggcaacgaaaaactggttcgcaccgccgcccggcttgcagcgaagtttggcagcgtctggcacgcggtctacgtcgaaacgccgcagctgcatggcctgccggaaaatcagcgccgcgccattttgagcgcgctgcggctggcgcaggagctgggcgccgaaaccgcaaccctttccgatccgcaggaagataaagccattctgcgctacgcgcgggagcacaacctgggcaagattgtcattggacgtcgccagcaccgccgctggtttagccgcgaatcttttgccgacaggctggcccgccgcgcgccggatcttgatttagtcatcgtcgcgctggatgacaagcccgcccccctgcccaaccgtacgccggatgctcgcacctttggcgataaatggcgcattcagatccggggctgcatggtggccgtggtcctctgcgccctgattacggtgattgccagccagtggctcatcgccttcgacgccgccaatctggtcatgatttatctgctcggcgtcgttgtggtcgcgctcttttatggccgctggccgtcggtgctggcgacggtgatcaacgtcatcagcttcgatctcttctttattgctccgcgcgggacgcttgctgtctcggacgtgcagtacattctgacctttgccgtgatgcttaccgtcgggctggtgatcgggaatctgacggcaggcgtgcgctaccaggcacgcattgcccgctatcgcgagcagcgcacgcgccatctgtatgaaatgtcaaaatcgctggcggttggccgcacgcagcgagatatcgtgcagaccagcgagcagtttatccgttcgacctttcatgccagtaacctgattttgctccccgacgaacaagggcgccttcgcccgctgacctccccttcggggatgacgccctgggatgaagcgattgcccgctggagtttcgataagggtttacctgccggagccggcaccgacacgctgcccggcgtgccttaccagatcctgccgctgcgcagcgcggataaaaatcacgggctggtcatcgtcgagccgtctaacctgcgtcagctgatgatccccgagcagcagcgcctgcttgaaaccttcaccctgctggtcgccagcgcccttgaacggctggcgctcaccgccagcgaagagcaggcgcggctggcaagcgagcgcgaaagtattcgcaactcgctgctggcagcgctgtctcacgatttgcgcacgccgcttaccgtgctgtttggccagtccgaaattctgacgctggatctggcggcggaaggatcaaagcacgcgatgcaggccagcgaaattcgccagcacgtgctgaataccacgcgcctggtgaacaacctgctggacatggcgcgcattcagtccggcgggtttaacctcaaaaaagagtggctcacccttgaggaggttgtcggcagtgcgctgaagatgctggagccgggtctcggcgggcgccatattgagctggacatgccggaacccctgacgttaatccatgtggatggcccgctgtttgagcgcgtgctgattaatcttctggaaaatgccgctaaatacgccggggcaaaggcccggctggggattgctgccagggtggataaacgtgtgctgcggctcgacgtctgggataccgggccgggtattccggccggacaggagcgcgctatattcgaaaaatttgcgcgcggtaataaggaatccgccattcctggcgttgggctggggctggcgatctgccaggcgattgtcgacgtgcatggcggcaccatttccgcagagaaccgcccggaaggtggggcacgcttttgtgttacacttcctctggaaagcccaccagaacttgatgaattaccagaggatttgtga

SEQ ID NO: 93681 - protein, 895 aa, Enterobacter cloacae
MTDEPMRPDPDRLLEQTAEAHRGKLKIFFGACAGVGKTFAMLTEAQRLRAQGLDILIGVVETHGRKETAALLTGLATQPPQRISHRGRLVTEFDLDAALARRPALILMDELAHSNAPGSRHPKRWQDVEELLEAGIDVFTTVNVQHLESLNDVVSGVTGIQVRETVPDPFFDSADEVVLVDLPPDDLRQRLHEGKVYIAGQAERAIEHFFRKGNLIALRELALRRTADRVDDQMRAWRDLQGQERVWHTRDAILLCIGHGSGNEKLVRTAARLAAKFGSVWHAVYVETPQLHGLPENQRRAILSALRLAQELGAETATLSDPQEDKAILRYAREHNLGKIVIGRRQHRRWFSRESFADRLARRAPDLDLVIVALDDKPAPLPNRTPDARTFGDKWRIQIRGCMVAVVLCALITVIASQWLIAFDAANLVMIYLLGVVVVALFYGRWPSVLATVINVISFDLFFIAPRGTLAVSDVQYILTFAVMLTVGLVIGNLTAGVRYQARIARYREQRTRHLYEMSKSLAVGRTQRDIVQTSEQFIRSTFHASNLILLPDEQGRLRPLTSPSGMTPWDEAIARWSFDKGLPAGAGTDTLPGVPYQILPLRSADKNHGLVIVEPSNLRQLMIPEQQRLLETFTLLVASALERLALTASEEQARLASERESIRNSLLAALSHDLRTPLTVLFGQSEILTLDLAAEGSKHAMQASEIRQHVLNTTRLVNNLLDMARIQSGGFNLKKEWLTLEEVVGSALKMLEPGLGGRHIELDMPEPLTLIHVDGPLFERVLINLLENAAKYAGAKARLGIAARVDKRVLRLDVWDTGPGIPAGQERAIFEKFARGNKESAIPGVGLGLAICQAIVDVHGGTISAENRPEGGARFCVTLPLESPPELDELPEDL

SEQ ID NO: 93682 - DNA, 2724 bp, Mesorhizobium loti MAFF303099
  CDS (1)..(2724): transl_table=11
atgccggacgacagaagcaacgaaaaccgaccttcccccgacgcgctgctcgagcatgccgagcgggagggacgcggccgtttgcggatattcctcggcgccgcgcccggtgtcggcaagacctacgaaatgctgatgtcgggccgtgccaggctggccgacggcatcgacgtggtgatcggcgtcgtcgagacgcatggccgccgggaaacacaggcgctggtcgagggctatgaggtcatcccccgccgcaaggtcgactacaaggggcgcgtcctcgaggagatggacatcgacgccatccttgcccggcgccccgcactggtcctggtcgacgaactcgcccacaccaacgcgcccggcagccgccaccccaagcgttatctcgacgtccaggagatcctggcgcgcggcatcgacgtctacacgacgctcaacatccagcatgtcgaaagcctgaacgatgtcgtcgcgcagatcacgcgggtcagggtgcgcgagacggttcccgattcgatcatcgaccaggccgacgacgtcgaaatcatcgacctgacgcccgacgacctgatcaagcggctggaagagggaaaggtctatttccccaacacggcgcagcgcgccatcgagaactatttctcgtcgggcaatctgacggcgctgcgcgaactggcgctgcgccgcaccgcccagcgtgtcgacgagcaattgctcaatcacatgcagtcccacgctatccagggtccatgggccgcgggcgagagggtgctcgtctgcgtcgacgcgcgtccaggcggtgcggcccgcatccgctacgcacgcaggctggccgaccggcttcgcgcgccatggacggcgctgcatgtcgatacgccgcgctcggctggcatgtccgaggaagacaaggaccggctcgccgcgctgatgcgccttgccgagcagctcggcgccgaggtgacgaccattcccggccagagcgtcgcgcaggacattgtgcgccatgcgacggcgaacaatttcacccatatcgtggtcggccggccgacccgatcgcgctggcgcgaactgatcgagggctcgctcacctatgatctgatccgcaatgccggcgacatcagtgtccacgtcatttctggaaccgagcgggatgccgaggcggcctcgagaagggtcaaggcggcggccgagcagaagcagttccagatctggccctatctgctcgccaccacctatgtcgcgggctcattggccctcagcgccgtcctcgaccagtttctcgacgttcgcaatctggcgatcgtcttcctcctggcggtgctgacatcggcggtggccggcggcctttggccggcgctctatgcgtgcttcctcagcgcccttgccttcaactatttctttctcgagccgcgctacacgctgacgatccgggaccccgagagcatcgtggcgctcgccgtcttccttgccgtggcggtgatcgccagcaatctcgccgcgcgcatgcagcgccaggccgtcgccgcccgctcgcgggcacgggccaccgaggacatctatctcttctccaagaagctcgccggcgccggcacgctcgacgatgtgctgtgggccaccgccttccagatcgcctcgatgctgaagctgcgcgtggtgttgcttctgcccgaagacggcaccatcaccgtcaaggcaggctatccgcccgacgatacgctggccgaggccgacattgccgccgcccgctgggcctgggaacacaaccgcgccgccgggcgcggcgccgatacgctgcccggcgccaagcgtctctacctgcctttgcggacagggcgcacggcgatcggtgtcatcggcctcgacaatgacaagcaaggcccgctgctgacgcctgagcagcagcgtctgctcgacgcgctggccgaccaggcggcggtggcgatcgagcgcatccaattggtcgccgatgtcgaccgcgccaagcttgctgccgaagccgaccggctgcgctcggccctgctgacctcgatttcgcatgatctgaaaacgccgctctcggccatcatgggagcggccggcacgctcaaggaattcgcgccggatctgcccgagcaggaccgggcggagcttttgtcgacggtgatcgacgaatcggaacggctgaaccgcttcatcgccaatctgctcgacatgaccaagatcgagtccggggcaatggagccgaactatgctctgcattatgtcggcgatattgtcggcacggcgctcaaccgcgcccgcaagatcaccagcgaacacaagatcgaggtcgatattccgcccgacctgccgatgctgaagctcgatcccgtgctgttcgagcaggttctgttcaaccttctcgacaatgcgtcgaaatattcgccgcccggctcgacgatccgcctgcagggatgggccgataatggatccgtcatcgtgcagatcatggatgaggggccgggcattccgtcgcatgatttggaacgtgtgttcgacacgttttaccgggtgcgcaagggcgatcaggtgcgcgccggcaccggccttggcctgtcgatctgccgcggctttgtcgaatcgatgggcggcaccatctcggccgccaaccggaccgaccgccccggtgccgcgttcaccatcaggatgccggtgccgaccgaagcgcccgatcgcggcgaagagaccagcatggatcggccttcatga

SEQ ID NO: 93683 - protein, 907 aa, Mesorhizobium loti MAFF303099
MPDDRSNENRPSPDALLEHAEREGRGRLRIFLGAAPGVGKTYEMLMSGRARLADGIDVVIGVVETHGRRETQALVEGYEVIPRRKVDYKGRVLEEMDIDAILARRPALVLVDELAHTNAPGSRHPKRYLDVQEILARGIDVYTTLNIQHVESLNDVVAQITRVRVRETVPDSIIDQADDVEIIDLTPDDLIKRLEEGKVYFPNTAQRAIENYFSSGNLTALRELALRRTAQRVDEQLLNHMQSHAIQGPWAAGERVLVCVDARPGGAARIRYARRLADRLRAPWTALHVDTPRSAGMSEEDKDRLAALMRLAEQLGAEVTTIPGQSVAQDIVRHATANNFTHIVVGRPTRSRWRELIEGSLTYDLIRNAGDISVHVISGTERDAEAASRRVKAAAEQKQFQIWPYLLATTYVAGSLALSAVLDQFLDVRNLAIVFLLAVLTSAVAGGLWPALYACFLSALAFNYFFLEPRYTLTIRDPESIVALAVFLAVAVIASNLAARMQRQAVAARSRARATEDIYLFSKKLAGAGTLDDVLWATAFQIASMLKLRVVLLLPEDGTITVKAGYPPDDTLAEADIAAARWAWEHNRAAGRGADTLPGAKRLYLPLRTGRTAIGVIGLDNDKQGPLLTPEQQRLLDALADQAAVAIERIQLVADVDRAKLAAEADRLRSALLTSISHDLKTPLSAIMGAAGTLKEFAPDLPEQDRAELLSTVIDESERLNRFIANLLDMTKIESGAMEPNYALHYVGDIVGTALNRARKITSEHKIEVDIPPDLPMLKLDPVLFEQVLFNLLDNASKYSPPGSTIRLQGWADNGSVIVQIMDEGPGIPSHDLERVFDTFYRVRKGDQVRAGTGLGLSICRGFVESMGGTISAANRTDRPGAAFTIRMPVPTEAPDRGEETSMDRPS

SEQ ID NO: 93684 - DNA, 2658 bp, Pseudomonas aeruginosa PAO1
  CDS (1)..(2658): transl_table=11
atgaccgacaccgcacgcgccgacgcgctgctggccgacctgcccgctgacgggcgcggccgcctgaaagtctttctcggcgcggcgccgggggtgggcaagaccttcgccatgctgcaggccgcccaggcccagttgcgccagggcgtgaaactgcgcgccggggtggtcgagacccactcgcgggcggaaaccgagtccctcctcgcaggcgtgccgcagcagccgctgcgcagcctcgagtatcgagggatgaaactgcaggaaatggacctcgacggtctcctcgccgacccgccggcgctggccctggtcgacgaactggcccacagcaacgttcccggcagccgccacgccaagcgctggcaggacatccaggagttgctggcggcgggaatcgacgtctacacaacggtcaacgtccagcacctggagagcctcaacgaccaggtccgcgacatcaccggcgtgcaggtccgcgagacggtgccggactgggtgttgcaggaggcctacgagatcgtcctcatcgacctgccgccgcgcgagctgctggagcgcctgcgcgagggcaaggtctacgtgccggaacaggcgcgggcggcgatcgatgcgttcttctcgcagaccaacctcaccgcgctgcgtgaactggcgatgcagaccgccgccgcgcgggtcgacgccgacctcaaccaccgctaccgccagcgcggcgaggaagcgccggcgttgcgcgggcggctgctggtgggcatcgacggtgacgaacaggccgaacgcctggtgcgccacgcctgccgggtcgccgaacgtcggcacctgccctggagcgtggtacacgtcgataccggcggcttgcgcggcgagcaggcgcggatgcgcctgcagggtgcgcagcaactggccgagcggctcggcggcgagatcgtcgtgctgcgcgccggcgaggtggcgcggaccctcctgcaacatgcccgcgagcgccgcgccagcctggtcctggttggccagtcgcggcgccgctggtatcgccgggccttcggcggtggtctcgccgggcgtctgctgcgcgacggccagggcctggagatcagtgccctggacagcgaggccgacctgcgcccggcggaaccgcggccacgctatccggtggtgtggaacgactatctgctggcgctgctggcgaccgccctggccagcggcctggcctggatcgtggcgcacctgctggagctgccgaacatctccctggtgttcctgatggcggtgctgctggtggcagtgcgcagcagcctgatgccggcactgctgtgcgcggtggcgtcgttcctggcctatgacttcctgttcatcccgccgcatttttccttcgccatccatcgccacgaagacctgctgagcctggcgttcttcctgttcatggccggcctcaccggcaacctggcggcacgccagcggcgccagctggaggcgctgcgcgatacccaggaggaaaccagcctgctgctggagctgtcgcgcaagctcaccgccgccaccgaccgccaggcggtgctggccgccgccgcccagcagttcgacgactggaaggacgtcgaggtctgcctgctcggtcaggtcaatggcgagtggaagaccgaggccggcgtgcagcggcaactcgccgaccaggaacgggtcgccgcggactgggcctgggcccacgaccagccggccggcctcggtactggcacgctgcccggaggacgctggtggtggtggccgctgtcggcggaagagggaccgctggcactgctcggtgtcgcgccgctggacggccagccgctgagcccgcagcgccggcgcctgctcgccgccctcggccagcctctggcccaggccctggcgcgggctcgcctggccgaggacctggaggccgcgcgcctgcacggcgagaccgagcaactgcgcagcgccttgctcgcctcggtgtcccacgacctgcgcacgccgctgacggccatgcgcggctccatcgacagcctgctggcgctgggtgaggcgatcccgccggcggatcgtcgcgaactgctggaaagcacccgcgacgaggccgagcgactggaccgctatatccagaacctgctcgacatgacccgtctcggccacggtggcctgaagctggcgcgcgactgggtggcgccgggcgacatcgttggcagcgcgctgaaccgcctgcgcgcggtgctggcgccgtaccgggtgcaggcgatcgtggccaacgacctgccgttgctctacgtgcatgcggcgctgatcgagcaggcgctgatcaacgtgctggaaaatgccgcgcgcttctcgccgaaccacggccggttgcgcatcgaggtcagccaggatgccgccgagctgcgtttcgcggtgagcgacgaggggccggggattcccgaggccgagcgggagaagatcttcgacatgttctacaccgctgcccgtggcgaccgcggtggccagggcaccggcctgggcctggcgatctgccagggcatgatcggcgcccacggcgggcgcatcagcgtcggcgaaggcctcgacggtcgcggcaccacgctggtcctgcacctgccgctgcatccgcagccggacctcgggcaactggagggcgacgaatga

SEQ ID NO: 93685 - protein, 885 aa, Pseudomonas aeruginosa PAO1
MTDTARADALLADLPADGRGRLKVFLGAAPGVGKTFAMLQAAQAQLRQGVKLRAGVVETHSRAETESLLAGVPQQPLRSLEYRGMKLQEMDLDGLLADPPALALVDELAHSNVPGSRHAKRWQDIQELLAAGIDVYTTVNVQHLESLNDQVRDITGVQVRETVPDWVLQEAYEIVLIDLPPRELLERLREGKVYVPEQARAAIDAFFSQTNLTALRELAMQTAAARVDADLNHRYRQRGEEAPALRGRLLVGIDGDEQAERLVRHACRVAERRHLPWSVVHVDTGGLRGEQARMRLQGAQQLAERLGGEIVVLRAGEVARTLLQHARERRASLVLVGQSRRRWYRRAFGGGLAGRLLRDGQGLEISALDSEADLRPAEPRPRYPVVWNDYLLALLATALASGLAWIVAHLLELPNISLVFLMAVLLVAVRSSLMPALLCAVASFLAYDFLFIPPHFSFAIHRHEDLLSLAFFLFMAGLTGNLAARQRRQLEALRDTQEETSLLLELSRKLTAATDRQAVLAAAAQQFDDWKDVEVCLLGQVNGEWKTEAGVQRQLADQERVAADWAWAHDQPAGLGTGTLPGGRWWWWPLSAEEGPLALLGVAPLDGQPLSPQRRRLLAALGQPLAQALARARLAEDLEAARLHGETEQLRSALLASVSHDLRTPLTAMRGSIDSLLALGEAIPPADRRELLESTRDEAERLDRYIQNLLDMTRLGHGGLKLARDWVAPGDIVGSALNRLRAVLAPYRVQAIVANDLPLLYVHAALIEQALINVLENAARFSPNHGRLRIEVSQDAAELRFAVSDEGPGIPEAEREKIFDMFYTAARGDRGGQGTGLGLAICQGMIGAHGGRISVGEGLDGRGTTLVLHLPLHPQPDLGQLEGDE

SEQ ID NO: 93686 - DNA, 2685 bp, Escherichia coli O157:H7 EDL933
  CDS (1)..(2685): transl_table=11
  misc_feature (1416)..(1416): s is g or c
atgaataacgaacccttacgtcccgaccccgatcgtctgctggaacaaactgccgcgccgcatcgggggaagctgaaagttttcttcggtgcctgcgcaggcgtcgggaagacctgggcgatgctggcagaagcccagcgactgcgggcgcaagggctggatattgtggttggcgtggtagaaacccacgggcggaaagataccgccgccatgctggaagggctggctgttctgccgccaaaacgcctggcgtaccgtgggcggcacatcagcgagtttgatctcgatgccgccctcgcccgccgtccggcgctgatcttaatggacgaactggcgcacagtaatgcgccaggttctcgtcatcctaaacgctggcaggatatcgaagaactgctggaagctggcattgatgttttcacaaccgtcaacgttcagcatctggaaagtctgaatgatgtggtcagcggcgtcaccggaattcaggtacgggaaaccgtgcccgatccttttttcgatgccgccgacgacgtggtgctggtggacttgcccccggacgatctgcgccagcggctgaaagaaggcaaagtctatattgccgggcaggcggagcgcgccattgaacattttttccgcaaaggcaatctgatcgccctgcgcaaactggcactgcgccgtactgccgatcgcgttgatgagcaaatgcgcgcctggcgggggcatcctggcgaagagaaagtctggcacacgcgcgacgcgatccttttatgcatcggccataacaccggcagcgaaaaactggtccgcgcggcggcgcggctggcgtcacggctggggagcgtctggcacgcggtgtatgttgaaacccctgccctgcatcgcttaccggagaaaaaacgtcgggcaattctcagcgccttacgtctggcgcaggagctgggcgcggagacggcaacactttctgatccagcggaagagaaagcggtagtgcgttatgcccgtgaacataatctcggcaagattattctcggtcgcccagcctcgcgccgctggtggcgtcgggaaacgtttgctgaccgactggcgcgcatcgcccccgatctcgatcaggtgctggtcgcgcttgatgaaccacccgcccgcacgattaacaacgcgccggatagccgctcttttaaagacaagtggcgggtacagattcagggatgcgtggttgccgccgcgttatgcgccgttatcaccttaattgccatgcagtggctgatggcgtttgatgccgccaacctggtgatgctgtatctacttggcgtggtggtggtggcgctattttatggacgctggccttcggtggttgctaccgtcattaatgtggtgagtttcgatctcttttttatcgccccacgcggcacgctcgccgtstctgatgtgcaatatctgctgaccttcgcggtgatgttaaccgtcgggctggtgatcgggaaccttactgcgggtgtgcgttatcaggcgcgggtagcccgttaccgcgagcaacgcacacggcacttatatgaaatgtcgaaagctctggcggtgggccgcagtccgcaggacatcgccgccaccagcgaacaatttattgcctccacgtttcatgcccgcagtcaggtgttgttgcccgatgacaacggtaaattgcagccgttaacacatccgcaaggaatgacgccgtgggacgatgccatcgcgcagtggagttttgataaaggcctgcctgcgggtgcgggcaccgacacgttacccggcgtgccgtaccagattttgccgttaaaaagcggtgagaaaacctacgggctggtggtggtggaaccggggaatctgcgtcagttgatgatcccggaacagcagcgcctgctggagacgtttacgctgttagtcgccaatgcgcttgagcggctgacgctgaccgccagcgaagaacaggcgcggatggcaagcgaacgtgaacagatccgcaacgccctgctggcggcgctttcgcatgatttacgcactccgcttacggtgctgtttggtcaggcagaaatcttaacgctcgatctggcaagcgaaggatcaccccacgcccgccaggccagcgagattcgtcagcatgtgctgaacactacccgactggtgaataatctactggatatggcgcgaattcagtccggcggctttaatttgaagaaagagtggttaacgctggaagaagtagtcggcagcgcgctgcaaatgctggaaccgggtttatcgtcgcccatcaatctttctctgccagaaccgctgaccttaatccacgttgacgggccactctttgaacgggtgctgattaatctgctggagaacgcggtgaaatatgcgggtgcgcaggccgaaattggtatcgatgcccacgttgagggcgaaaatctacaactggatgtctgggataacggccccggtcttccgccaggccaggagcagacgatatttgataagtttgctcgcgggaataaagagtcggcagtaccgggggtagggcttggactggcaatttgtcgggcgatagtggatgtacacgggggcactattaccgcgttcaaccggccggaaggtggtgcctgttttcgtgttacacttccccagcaaactgcccctgaacttgaagaatttcatgaggatatgtga

SEQ ID NO: 93687 - protein, 894 aa, Escherichia coli O157:H7 EDL933
MNNEPLRPDPDRLLEQTAAPHRGKLKVFFGACAGVGKTWAMLAEAQRLRAQGLDIVVGVVETHGRKDTAAMLEGLAVLPPKRLAYRGRHISEFDLDAALARRPALILMDELAHSNAPGSRHPKRWQDIEELLEAGIDVFTTVNVQHLESLNDVVSGVTGIQVRETVPDPFFDAADDVVLVDLPPDDLRQRLKEGKVYIAGQAERAIEHFFRKGNLIALRKLALRRTADRVDEQMRAWRGHPGEEKVWHTRDAILLCIGHNTGSEKLVRAAARLASRLGSVWHAVYVETPALHRLPEKKRRAILSALRLAQELGAETATLSDPAEEKAVVRYAREHNLGKIILGRPASRRWWRRETFADRLARIAPDLDQVLVALDEPPARTINNAPDSRSFKDKWRVQIQGCVVAAALCAVITLIAMQWLMAFDAANLVMLYLLGVVVVALFYGRWPSVVATVINVVSFDLFFIAPRGTLAVSDVQYLLTFAVMLTVGLVIGNLTAGVRYQARVARYREQRTRHLYEMSKALAVGRSPQDIAATSEQFIASTFHARSQVLLPDDNGKLQPLTHPQGMTPWDDAIAQWSFDKGLPAGAGTDTLPGVPYQILPLKSGEKTYGLVVVEPGNLRQLMIPEQQRLLETFTLLVANALERLTLTASEEQARMASEREQIRNALLAALSHDLRTPLTVLFGQAEILTLDLASEGSPHARQASEIRQHVLNTTRLVNNLLDMARIQSGGFNLKKEWLTLEEVVGSALQMLEPGLSSPINLSLPEPLTLIHVDGPLFERVLINLLENAVKYAGAQAEIGIDAHVEGENLQLDVWDNGPGLPPGQEQTIFDKFARGNKESAVPGVGLGLAICRAIVDVHGGTITAFNRPEGGACFRVTLPQQTAPELEEFHEDM

SEQ ID NO: 93688 - DNA, 2703 bp, Agrobacterium tumefaciens str. C58
  CDS (1)..(2703): transl_table=11
atgcctgacgatatcagcgatatgccaagccgaccgtcgcccgatgcgctgctggaaaatgcccagcgcgaggcaagaggccggctgaagatttttctgggcgccgcacccggcgtcggcaagacctatgagatgctgatgtccggccgggcgaagctcgcggatggcgtcgataccgttatcggtgtcgtggaaacccacggccgccgggaaaccgaggcgctggtcgaagggttgagcgtggtcccgcgcaagcgcatcgattatcgcggtcaggtactggaggagatggatatcgatgccatcctcgcccgtcgccccgctctggttctggtcgatgaactcgcccacaccaatgccgccggcagccgccaccccaagcgctatatggatgttcaggaaatcctcgcgcagggcatcaatgtctatacgacgctcaacatccagcatgtcgaaagcctgaatgatgtggtggctcagatcacccgtatccgcgtgcgcgaaacggtgccggacagcatcatcgaccgcgccgacgacgtcgaaatcatcgatatcacccccgatgatctgatcaagcggctgcaggacggcaaggtctacctgccgcgtaccgcccggcgcgccatcgagaattatttctcccggggcaacctgacagcgctgcgcgaactcgcactgcgacgcacggcgcagcgggtggacgagcaattgctcaaccacatgcagtcccatgccatttccggcccgtgggcggcgggggaccgggttctggtctgcctcgaccacggccgtaacgggccgggtcttgtgcgttatgcccgaaggcaggcggaccgactgcgcgcgccgtggacggcgctgcatctcgacacgccgcgttcgcagcaattatcagaggcggagaaggaccggctggcgggcaccatgcggcttgcccagcagcttggcggcgaaacggtaaccctgccagcgcttgacctcacacgcgaaatcatcgcttacgccaatgccaataatttcacccacatcatcatcgggcgcccgcgaaaatcctggtggcagcggatttttcagcgctcgctgacccatgatctgatcgatcacgccggcgatatcagcgtgcacgtcatttccggcgacaagaacgaggaaaagccgggtcaggccgtgaagctcgcaccggcacgatccccacagtccttccggtcctatctcaacagcactttgttcgtcgggttggcgatcatcgtcgggatcgtactcgatcagacgctcgacgttcaaaatcttgcgctcgtcttcctgatggccgttctggctgccgccgtgcgcggggggctcggaccggcgctttatgcatccttgctcggcgcccttgcgttcaatttcttctttctggagccgcgttatacgctgacggtcagttctccggacagccttgtcgccctgctgttctacttcggcgtcgcgctggtcgcttccaatctcacggtcgcggtgcagcggcaggcggcctccgcacgctcgagggcacgcacgactgaagacctctatctgttttcgaaaaagctggctggcacgggaacgctcgatgatgtgttgtgggcagctgcatatcagatggcgtcaatgctgaaggtgagggtcgtcctgctcatgccggaaaacggcgccatcgccgtcaaggcgggttatccgcccgacgacacattggtggatgccgatatcgccgccgcacaatgggcatgggaacataacaaggcggcaggtcgtggcgcggatactttgccgggtgccaaaaggctttatctcccgcttcgcaccggcagcggtgcggtgggtgtggtgggcctggatgacgaccgaagcggaccgcttttgacgccggaacagcagcggctttttgatgcgttggccgaccaggccgcgctggcggtcgaacgtatccagcttgcctcggatgtggatagagcaaggctggcggccgaaacggaccggctgcgcacggcacttctgacctccatttcccacgatcttaaaaccccgcttgccgccattctgggctcggccggaacgctcaaggatttcgccgatgacattccacctgatgcgcgcgccgaactgctgtcgacgatcgtggaggaatccgaacggctgaaccgtttcatctccaatcttctcgatatgacgaggatcgggtcgggcgcgatggagccgaattacgggctgcatttcctcggcgacatggtcggaacggcgctgtcgcgcgccgcgaagatcgttgtccggcatgaggtcgttctcgatatcccctccgacctgccgatgctgaaggtcgatcccgtgcttttcgaacaggtgctgttcaacctgatcgacaatgcggccaaatacgctcccgaacatacgaccattgcgatacgcggctggcggcagggaaagaatatcttcctctcggtcgccgatgagggaccgggcattccgcccgatgatcttgagcgggtcttcgacagtttttaccgggtgcgcaaggttgaccatgtgcaggcgggaacggggctcggtctttccatctgcaaggggttcatcgaggcgatgggtggctcgatccgcgcggaaaacagagcggatcgcggcggagcgcaatttaccataggcctgcccgtcgccgtcgataccccggtgctggatcatgattaa

SEQ ID NO: 93689 - protein, 900 aa, Agrobacterium tumefaciens str. C58
MPDDISDMPSRPSPDALLENAQREARGRLKIFLGAAPGVGKTYEMLMSGRAKLADGVDTVIGVVETHGRRETEALVEGLSVVPRKRIDYRGQVLEEMDIDAILARRPALVLVDELAHTNAAGSRHPKRYMDVQEILAQGINVYTTLNIQHVESLNDVVAQITRIRVRETVPDSIIDRADDVEIIDITPDDLIKRLQDGKVYLPRTARRAIENYFSRGNLTALRELALRRTAQRVDEQLLNHMQSHAISGPWAAGDRVLVCLDHGRNGPGLVRYARRQADRLRAPWTALHLDTPRSQQLSEAEKDRLAGTMRLAQQLGGETVTLPALDLTREIIAYANANNFTHIIIGRPRKSWWQRIFQRSLTHDLIDHAGDISVHVISGDKNEEKPGQAVKLAPARSPQSFRSYLNSTLFVGLAIIVGIVLDQTLDVQNLALVFLMAVLAAAVRGGLGPALYASLLGALAFNFFFLEPRYTLTVSSPDSLVALLFYFGVALVASNLTVAVQRQAASARSRARTTEDLYLFSKKLAGTGTLDDVLWAAAYQMASMLKVRVVLLMPENGAIAVKAGYPPDDTLVDADIAAAQWAWEHNKAAGRGADTLPGAKRLYLPLRTGSGAVGVVGLDDDRSGPLLTPEQQRLFDALADQAALAVERIQLASDVDRARLAAETDRLRTALLTSISHDLKTPLAAILGSAGTLKDFADDIPPDARAELLSTIVEESERLNRFISNLLDMTRIGSGAMEPNYGLHFLGDMVGTALSRAAKIVVRHEVVLDIPSDLPMLKVDPVLFEQVLFNLIDNAAKYAPEHTTIAIRGWRQGKNIFLSVADEGPGIPPDDLERVFDSFYRVRKVDHVQAGTGLGLSICKGFIEAMGGSIRAENRADRGGAQFTIGLPVAVDTPVLDHD

SEQ ID NO: 93690 - DNA, 2679 bp, Caulobacter crescentus CB15
  CDS (1)..(2679): transl_table=11
gtgccggtggacgacccgaaacgaccggaccccgaagcgctcctggccgccgccaacaaggcgcgccgggggcgcctgaaagtgtttctgggcatggcgccgggcgtgggcaagacctacgagatgctgcgcgccgcccgtcgccgcaaggccgagggcgctgatgtgctgatcggggtcgtcgagacccatgggcgacgcgaaaccgaaagcctgctgcgcggcatggacgtgctgccacgtcggccgatcgagcatcgcggccgcgtccagatggagttcgacatcgatgcggcccttgagcgcaagcccaagatcctgctggtcgatgagtacgcccattccaacgccatcggctcgcggcatcccaagcgctggcaggatgtcgaagagctgcttgcggcgggcatcgatgtctggaccacgctgaacgtccagcacctggagagcctggtcgacgtcgtccagcgcatcaccggcgtgcgccagcgcgagacggtgcccgacagcgccctctctcgcgccgacgacatcgagctggtggacatcacgcccgacgagctgcgggagcggatggcggccggcaaggtctatgtgcccgagacggcgcgccttgcggcggacaacttcttcaaggtcgagaacctcacggcgctgcgggaactggcgctgcgccgggcggcccagacggtggacgatcagctgatcgccaccatgcgcgagaagggggtcgaggggccctgggccgccggtgaacggatcctggtgctggtcagcggcgacgccatggccgccaccctggtgcgggccggccggcgcctgtcggacatgatgatggacgccccgtggatcgtcacccatgtcgagcggaccgatcggccgctggccagggatggcgacgcggcgcggctgcgcgaggcctaccgcctggccgagcaactggggggcgcgacggtggccctcagcggtggggacatcgtcgatacggtgatggcctatgcgcggcgtcacaacgtcacccagatcgtgatcggcaagtccgtcgagagccgctggcgggagcttctggagcggtccctggccggggccctgctgcgcgaagcgcgcggcgtcgcggttcacgtcgtcaccgaggccgcgcccgagcgtgagccgagaccgcccgcgccgctccggcccgatcgttggcgcggctatgcggtcggcgccctgttcatcgcagcggccacactggcggcctggggcctggacgtggcgttcaatcgtgtcgacctggggatgatcttcctgacggccgtcctggcggcgggcgtgctgcatggcttgcggcccgcgctggcggcggcgaccgtggcgtttctggtctacaattgtctgttcctggagccgcgctacagtttcgtggtcggctcgcccaccgacttcatcacgctggtggtgttctgggcggtggccctcgcgtctggcggacttgctggccgggtgcgtgagcaggccctcggctcgcaacgtcgcgccgccgctgtcaccacgctgctggccgccagccgcacgttctccgccgccagcggccgcgacgccgtggccaaggcgctggccgaacaggtctccgccgctgcgggggggctcgccgtcgtgcttctgccccagggggacgagatcgcgctcgcgcacgggtcaccggagctggcccctctggacgccgcccagatggccgccgcgcgctgggcctgggacaagggcgaagtcgccggcttcgggacgggcaccttgccgcagagccggtggactttctggccgctggacggtgtccgcgcccggacgggcgtggccggcctggcggcgggcgcagcgccgctgggcgcagaccaggagcgcctcgtcctggcgctgctggaacagggcgccgtggcgctggagcgctcgcaactcgcggccgaggcggtcgagaccgaaacgcttcgccgcgccgatcgcttccgctcggctctgatgaactcggtcagccatgacctgcgcacgccgctatcgacggtgctgggggcctccacgaccctgatcgactatggcgacaagctggccaagcccgtgcgggaggaccttgtcgtcagcatccgggaggaggctgaacggctcaatcgctatgtcgccaacctgctcgacatgacgcgcatcgagggcggcgccctgcgcctgcggaccgactggatcgacgtccgcgatgtcctgaacgccgctgcggaccgggtgtcgcgtcggcttggcggccgcgagctcgcccgggactttccgcgcgagctgtctctgatccaggccgatgcgagcttgctggaacaggtggtcgtcaatgttctggagaatgcgatcgcctacagcccgccagaagcgcgcatcgaaatggccgcctatgaggatcgcgccaacgtggtgatcagcatcgaggacgaggggcgcgggataccgacctccgagctggagcgggtgttcgacaagttccgccgcatggaggagcccagcgaccgcactcagggggcgggcctggggctttcgatcgccaagggcttcatcgacgcgctgggcggacgtatcgccgccgccagcccgattcacgatggaaggggcacgcggattctcatcagcctgcccaagaccgtcacgacgccgcatcacctgctatga

SEQ ID NO: 93691 - protein, 892 aa, Caulobacter crescentus CB15
MPVDDPKRPDPEALLAAANKARRGRLKVFLGMAPGVGKTYEMLRAARRRKAEGADVLIGVVETHGRRETESLLRGMDVLPRRPIEHRGRVQMEFDIDAALERKPKILLVDEYAHSNAIGSRHPKRWQDVEELLAAGIDVWTTLNVQHLESLVDVVQRITGVRQRETVPDSALSRADDIELVDITPDELRERMAAGKVYVPETARLAADNFFKVENLTALRELALRRAAQTVDDQLIATMREKGVEGPWAAGERILVLVSGDAMAATLVRAGRRLSDMMMDAPWIVTHVERTDRPLARDGDAARLREAYRLAEQLGGATVALSGGDIVDTVMAYARRHNVTQIVIGKSVESRWRELLERSLAGALLREARGVAVHVVTEAAPEREPRPPAPLRPDRWRGYAVGALFIAAATLAAWGLDVAFNRVDLGMIFLTAVLAAGVLHGLRPALAAATVAFLVYNCLFLEPRYSFVVGSPTDFITLVVFWAVALASGGLAGRVREQALGSQRRAAAVTTLLAASRTFSAASGRDAVAKALAEQVSAAAGGLAVVLLPQGDEIALAHGSPELAPLDAAQMAAARWAWDKGEVAGFGTGTLPQSRWTFWPLDGVRARTGVAGLAAGAAPLGADQERLVLALLEQGAVALERSQLAAEAVETETLRRADRFRSALMNSVSHDLRTPLSTVLGASTTLIDYGDKLAKPVREDLVVSIREEAERLNRYVANLLDMTRIEGGALRLRTDWIDVRDVLNAAADRVSRRLGGRELARDFPRELSLIQADASLLEQVVVNVLENAIAYSPPEARIEMAAYEDRANVVISIEDEGRGIPTSELERVFDKFRRMEEPSDRTQGAGLGLSIAKGFIDALGGRIAAASPIHDGRGTRILISLPKTVTTPHHLL

SEQ ID NO: 93692 - DNA, 2691 bp, Sinorhizobium meliloti 1021
  CDS (1)..(2691): transl_table=11
atgccccacaatgaccgcgacctgaagagccgccccgatccggacgccctgctggcgctcgccgaacagggcaggagaggcaaactcaccgtctttcttggggccgcacccggtgtcggcaagacctttgcgatgctgacgcgtgcgcggcgcctcaaggaagaaggcggcgatatcgtcatcgggctcgtcgaaacgcatggacgcggcgagaccgctgccctgctcgaggggctcgaagtcctgccgcgtcgccaggtgctgcacaacggacggacgctccacgaattcgacctcgacgcggcgttggctcggcgcccgcgcgtcatcctggtcgacgagctagcccataccaatttcggcgaaagccgccaccccaaacgctaccaggatatagaggagctggtcgatgccggcatagacgtgtggacggcactcaacatccagcacctggaaagcctctcggacgtggttgcgcatattgccggcgtgccggtgcgcgagcgcgtccccgatacggttctcaatcgcgctgacgatgtcctgctggtggacctgccgccggccgaactgatcgagcggttgaaggagggcaaggtctatctgcccgacaacgccaagcgcgccgccgatcgcttcttccgcctgggcaatctgacagcgctgcgcgaactcgcgctgcgccggacggccgaccgggtcgacgaccagatggtcgactatctcaggcagaacgcgatcgagggtccctggggcgccgccgaacggcttctcgtctgcatcggtcccgaccctctatccgagaaggtggtgaggacggcaagccggctcgcttcgagcctgaatgccgactggatggtcgtttccgtcgagcgtgcggaggcggagagcagcggtgcgatgcgacagctcgacgagactttccggctcgccgagcaattgggcgccgagacgcgccgtatcatcggcaacgacttcgtggaagaaattctgaagctcgcaaggcgggaacatgcaacgcaaatcgtcatcggcacgcgccgccactatttcccgctacgcctcttccgccgctccttgccggacgcacttgccgcgcgggcggccggtatcgccatccacctcgtcactgacgggagtgcacccgccgtaaaaccggcggccagacgcagaagcacgcttccggatgggtgggggcggggggttgccatcgcaaccggtacggctgcagccgcgacagcacttggcctgctgatcgagcaattcgtcgtcctgcagaatatctcgcttctcttccttctggctgttctcgtctcggcgacttacgcgggctatgtcgctgcgattgcggccgcgctcatttcgattctcgcctataatttctgcttcatcgaaccggtcggcactttcacggttgccgaaccgcacgaagtctttgccctcttcgtgttcctcgcggcggcgatgcttgccggggggctcgcctcccgcgttcgcgagcaggcgaagacagcgaggcggcgggccgccgcgacgcaggcgctttacgatttttcccgcaagctgtccggtacggcaaatgccgaggacgtgctatgggcggccgtcacgcaaatccacgcgacccttcggcgcaacgcggcgctgctgttgccggaagacggagatgtccgcttgatggcggcttggccgccggatacggagctcggccttaccgacacgatggcggggcgctgggctttcgagaagaaggaggctgccggcaacggtaccggcacgctgccgaacagtcccttccagttcaggccgctgatgagcccgcatggagtcgtcggcgtctttggtttcctccaggaagacaagccgctggaaataaacgaggagcgagcgcttgccgcgatcctcgaccagaccgcgatcgccgtcgacagagcacgtctctcgcgcgagagcctcgaccaggctgcgcagctcgagggcgagaagttcctcgcggcgctgctttcgtccatatcccacgacctcagaacaccgctcgcgacgatcaccggagctgtgacaagtttgcggcaactcggcgagcggatgtcggaggagagccgggacgatctgctcaagtcgatcgaggaggagagcggcagactcacccgcttcgttgccaacctgctcgacatgacccgcatcgaagccggaacggtaaacgccaagcgcgattgggtcgatgtcgccgatgtggtccattcggctgtggagcgtgcgcggaagtacttccccggccgcgtcttcgaaacgagcatcgctccggacttgccgttgatccgcggcgatagcgtgttgcttggtcaagtgatcttcaacctgctcgacaacgctaacaggtttgggggtgacgagccggtcagcatctatgggcggcgggaagaagatgagatcgtgctctcggtgaccgacctcggtaaaggcatcgccccggccgacctcgaccgtgtgttcgacaaattcttccgcaagggaaagccggacggccgttcgctcggcaccgggcttggcctttccatcagcaagggcttcgtcgaggcgatggacgggcggataaaggcggagagcccggcgatgaagcgccgcggcacgcgcatttccatgcggttcccggtggctgaaaccggtatcacggagaaggagcgcggatga

SEQ ID NO: 93693 - protein, 896 aa, Sinorhizobium meliloti 1021
MPHNDRDLKSRPDPDALLALAEQGRRGKLTVFLGAAPGVGKTFAMLTRARRLKEEGGDIVIGLVETHGRGETAALLEGLEVLPRRQVLHNGRTLHEFDLDAALARRPRVILVDELAHTNFGESRHPKRYQDIEELVDAGIDVWTALNIQHLESLSDVVAHIAGVPVRERVPDTVLNRADDVLLVDLPPAELIERLKEGKVYLPDNAKRAADRFFRLGNLTALRELALRRTADRVDDQMVDYLRQNAIEGPWGAAERLLVCIGPDPLSEKVVRTASRLASSLNADWMVVSVERAEAESSGAMRQLDETFRLAEQLGAETRRIIGNDFVEEILKLARREHATQIVIGTRRHYFPLRLFRRSLPDALAARAAGIAIHLVTDGSAPAVKPAARRRSTLPDGWGRGVAIATGTAAAATALGLLIEQFVVLQNISLLFLLAVLVSATYAGYVAAIAAALISILAYNFCFIEPVGTFTVAEPHEVFALFVFLAAAMLAGGLASRVREQAKTARRRAAATQALYDFSRKLSGTANAEDVLWAAVTQIHATLRRNAALLLPEDGDVRLMAAWPPDTELGLTDTMAGRWAFEKKEAAGNGTGTLPNSPFQFRPLMSPHGVVGVFGFLQEDKPLEINEERALAAILDQTAIAVDRARLSRESLDQAAQLEGEKFLAALLSSISHDLRTPLATITGAVTSLRQLGERMSEESRDDLLKSIEEESGRLTRFVANLLDMTRIEAGTVNAKRDWVDVADVVHSAVERARKYFPGRVFETSIAPDLPLIRGDSVLLGQVIFNLLDNANRFGGDEPVSIYGRREEDEIVLSVTDLGKGIAPADLDRVFDKFFRKGKPDGRSLGTGLGLSISKGFVEAMDGRIKAESPAMKRRGTRISMRFPVAETGITEKERG

SEQ ID NO: 93694 - DNA, 2709 bp, Salmonella enterica subsp. enterica serovar Typhi str. CT18
  CDS (1)..(2709): transl_table=11
atgaacgacgaacccttgcgtcctgatccggatcgcttgttggaacaaacgcccccgccccaccgggggaagttaaaaattttcttcggcgcctgcgcaggcgtcggaaaaacctgggcgatgctggcgcaagcgcagcggctgcgagcgcaggggctggatgtggtgatcggcgtggtagagacgcacggccgtaaagagaccgccgcgctacttgacgggctgaccattctgccgccaaaacgtcactcgcaccgggggcggcaaattcgcgaatttgacctggatgccgccctcgcccggcgtccggcgctgattttaatggatgagctggcgcacagtaacgcgcctggctcacgccatcctaagcgctggcaggatattgaagagctgctggaagcgggaatcgacgttttcaccaccgtgaacgtacaacatctggaaagtctgaatgatgtggtgagcggcgtcacggggattcaggtgcgcgagaccgtccccgatcccttttttgatgccgctgatgaagtcgtactggtcgatctgccgcccgacgatctgcgccaacggctcaacgaaggtaaagtgtatatcgccggtcaggcggaacgcgctattgaacattttttccgcaagggcaatctgatcgccctccgcgagctggcgctacgccggacagccgatcgcgtggacgatcagatgcgcgcctggcgcgcgcatccgggcgaagaaaaagtatggcatacccgcgatgcgattttactgtgtatcgggcataacactggcagcgaaaaactggtgcgtaccgcggcgcgtctggcctcccggctcggcagcgtctggcacgccgtctatgtcgaaacgccaacgttacaccgcttaccggaaaaacaacggcgggctattttaagcgcgctgcgcctggcgcaggagcttggcgcggaaaccgccaccctgtccgatcccgccgaagagaaagcggtcgtgcgctatgcccgcgagcataatctggggaaaatcgtcatgggccgcccggcgtcgcgacgctggtggcgacgtgacgctttcgccgaccgtcttgccaggcgcgcgccggatctcgatcaggtaatcgtcgcgctggaagagccgccagcgcgcgcgttggcgcaaacgcctgataaccgaccttttaaagagaaatggcgtggacagattcagggctgtctggtcgccgtggcgctttgcgccataaccacgtttatcgctatgcagtggcttgtcaccttcgacgccgccaatctggtgatgctctatttgctgggcgtagtggtgattgcgctgctttacggacgctggccgtcggtggtggcgacggtgattaacgtggcgagtttcgatctcttttttatcgcaccacgcggtacgctcgccgtttcggacgtgcagtatttgctgacctttgccgtgatgctgacggttggtctggtgattggcaatcttactgccggggtgcgctatcaggcgcgcgtcgcccgttatcgggaacagcgtacccgccatttatatgaaatgtctaaagcgctggccgtcgggcgtagcgaacatgatatcgccgcgaccagcgagcggtttatcgcctcgacgtgtcaggcgcgcagccaaattttattacctgatactaacggtaagttgctgcctctcacccaccagcaaggcatgacgccgtgggacgacgcaattgcgcgctggagttttgataaaggccagcctgccggcgcaggcaccgatacccttcctggcgtgccttatcaaatcctgccgctgaaaagcgccgataaaacgtacggtctggctatcgtcgaaccgggtaatttgcgtcagttaatggtgccggagcagcaacgcctgctggaaacattcactctgcttgtcgccaacgcgctggaacgactgacgctgaccgccagcgaagaacaggcgcgtctcgccagcgaagaacaggcgcgtctcgccagcgagcgcgaaagtattcgcaacgctctgctggcggctctgtcgcatgatttacgcacgccgctgacggtattgttcggccaggcggaaattttgacgctggatttagccagcgcaggatcgccccacgcgcgtcaggccagtgaaatccgccagcatattctcaacaccacccggctggtgaataatttgctggatatggcgcgtattcagtccggcgggtttaatcttaaaaaagagtggctgacgctggaagaggtcgtcggtagcgcgttacagatgttagagccgggtttattgcatccgattacattgtcgctgccgcaacagttaacgcttatccatgtcgatggccccttatttgagcgtgtcctgatcaacttgctggaaaacgccgttaagtacgccgggccgcaggccagtatcggcattgatgctgcggttaaggacaatcgtttacaactggatgtctgggataatgggccgggtattcctgcggggcaagaacagaagattttcgataagttcgcccgcggcaacaaagagtccgccgtccccggcgtggggctggggctggcgatttgccatgctatcgtagaggtacacggcggcacgcttaccgcctataatcgaccgcagggcggcgcctgtttccgtgtgacgctgccgcaaggaaagccacctgaacttgacgattttcatgaggatatgtga

SEQ ID NO: 93695 - protein, 902 aa, Salmonella enterica subsp. enterica serovar Typhi str. CT18
MNDEPLRPDPDRLLEQTPPPHRGKLKIFFGACAGVGKTWAMLAQAQRLRAQGLDVVIGVVETHGRKETAALLDGLTILPPKRHSHRGRQIREFDLDAALARRPALILMDELAHSNAPGSRHPKRWQDIEELLEAGIDVFTTVNVQHLESLNDVVSGVTGIQVRETVPDPFFDAADEVVLVDLPPDDLRQRLNEGKVYIAGQAERAIEHFFRKGNLIALRELALRRTADRVDDQMRAWRAHPGEEKVWHTRDAILLCIGHNTGSEKLVRTAARLASRLGSVWHAVYVETPTLHRLPEKQRRAILSALRLAQELGAETATLSDPAEEKAVVRYAREHNLGKIVMGRPASRRWWRRDAFADRLARRAPDLDQVIVALEEPPARALAQTPDNRPFKEKWRGQIQGCLVAVALCAITTFIAMQWLVTFDAANLVMLYLLGVVVIALLYGRWPSVVATVINVASFDLFFIAPRGTLAVSDVQYLLTFAVMLTVGLVIGNLTAGVRYQARVARYREQRTRHLYEMSKALAVGRSEHDIAATSERFIASTCQARSQILLPDTNGKLLPLTHQQGMTPWDDAIARWSFDKGQPAGAGTDTLPGVPYQILPLKSADKTYGLAIVEPGNLRQLMVPEQQRLLETFTLLVANALERLTLTASEEQARLASEEQARLASERESIRNALLAALSHDLRTPLTVLFGQAEILTLDLASAGSPHARQASEIRQHILNTTRLVNNLLDMARIQSGGFNLKKEWLTLEEVVGSALQMLEPGLLHPITLSLPQQLTLIHVDGPLFERVLINLLENAVKYAGPQASIGIDAAVKDNRLQLDVWDNGPGIPAGQEQKIFDKFARGNKESAVPGVGLGLAICHAIVEVHGGTLTAYNRPQGGACFRVTLPQGKPPELDDFHEDM

SEQ ID NO: 93696 - DNA, 2685 bp, Salmonella typhimurium LT2
  CDS (1)..(2685): transl_table=11
atgaacgacgaacccttgcgtcctgatccggatcgcttgttggaacaaacgcccccgccccaccgggggaagttgaaaattttcttcggcgcctgcgcaggtgtcggaaaaacctgggcgatgctggcgcaagcgcagcggctgcgagcgcaggggctggatgtggtgatcggcgtggtagagacgcatggccgtaaagagaccgccgcactacttgacgggctgaccattctgccgccaaaacgtcactcgcaccgggggcggcaaatccgcgaatttgacctggatgccgccctcgcccggcgtccggcgctgattttaatggatgagctggcgcacagtaacgcgcctggctcacgccatcctaagcgctggcaggatattgaagagctgctggaagcgggaatcgacgttttcaccaccgtgaacgtacaacatctggaaagtctgaatgatgtggtgagcggcgtcacgggaattcaggtgcgcgaaaccgtccccgatcccttttttgatgccgctgatgaagtcgtactggtcgatctgccgcccgacgatctgcgccaacggctcaacgaaggtaaagtgtatatcgccggccaggcggaacgcgctattgaacattttttccgcaagggcaatctgatcgccctccgcgagctggcgttacgccggacagccgatcgcgtggacgatcagatgcgcgcctggcgcgcgcatccgggcgaagaaaaagtatggcatacccgcgatgcgattttgctgtgtatcgggcataacaccggcagcgaaaaactggtgcgtaccgcggcgcgtctggcctcccggcttggcagcgtctggcacgccgtctatgtcgaaacgccaacgttacaccgcttaccggaaaagcaacggcgggctattttaagcgcgctgcgcctggcgcaggagcttggcgcggaaaccgccaccctgtccgatcccgccgaagagaaagcggtcgtgcgctatgcccgcgagcataatctggggaaaatcgtcatgggccgcccggcgtcgcgacgctggtggcgacgtgacgctttcgccgaccgtcttgccaggcgcgcgccggatctcgatcaggtgatcgtcgcgctggaagagccgccagcccgcgcattggcgcaaacgcctgataaccgaccttttaaagagaaatggcgtgggcagattcagggctgtctggtcgccgtggcgctttgcgccatcaccacgcttatcgctatgcagtggcttgtcaccttcgacgccgccaatctggtaatgctctatttgctgggcgtagtggtgattgcgctgctttacggacgctggccgtcggtggtggcgacggtgattaacgtggcgagtttcgatctcttttttatcgcgccacgcggtacgctcgccgtttcggacgtgcagtatttgctgacctttgccgtgatgctgacggttggtctggtgattggcaatcttactgccggggtgcgctatcaggcgcgcgtcgcccgttatcgggaacagcgtacccgccatttatatgaaatgtctaaagcgctggccgtcgggcgtagcgaacatgatatcgccgcgaccagcgagcggtttatcgcctcgacgttccaggcgcgcagccaaattttgttacctgatgctaacggtaagttgctgcctctcacccaccagcaaggcatgacgccgtgggacgacgcaattgcgcgctggagttttgataaaggccagcctgccggcgcaggcaccgataccctccctggcgtgccttatcaaatcctgccgctgaaaagcgccgataaaacgtacggtctggctatcgtcgaaccgggtaatttgcgtcagttaatggtgccggagcagcaacgcctgctggaaacatttactctgcttgtcgccaacgcgctggaacgactgacgctgaccgccagcgaagaacaggcgcgtctcgccagcgagcgcgaaagtattcgcaacgctctgctggcggcgctgtcgcatgatttacgcacgccgctgacggtattgttcggccaggcggaaattttgacgctggatttagccagcgcaggatcgccccacgcgcgtcaggccagtgaaatccgccagcatattctcaacaccacccggctggtgaataatttgctggatatggcgcgtattcagtccggcgggtttaatcttaaaaaagagtggctgacgctggaagaggtcgtcggtagcgcgttacagatgttagagccgggtttattgcatccgattacattgtcgctgccgcaacagttaacgcttatccatgtcgatggccccttatttgagcgcgtcctgatcaacttgctggaaaacgccgttaagtacgccgggccgcaggccagtatcggcattgatgctgcggttaaggacgatcgtttacaactggatgtctgggataacgggccgggtattcctgcggggcaagaacagaagattttcgataagttcgcccgcggcaacaaagagtccgccgtccccggcgtggggctggggctggcgatttgccatgctatcgtagaggtacacggcggcacgcttaccgcctataatcgaccgcagggcggcgcctgtttccgtgtgacgctgccgcaaggaaagccacctgaacttgatgattttcatgaggatatgtga

SEQ ID NO: 93697 - protein, 894 aa, Salmonella typhimurium LT2
MNDEPLRPDPDRLLEQTPPPHRGKLKIFFGACAGVGKTWAMLAQAQRLRAQGLDVVIGVVETHGRKETAALLDGLTILPPKRHSHRGRQIREFDLDAALARRPALILMDELAHSNAPGSRHPKRWQDIEELLEAGIDVFTTVNVQHLESLNDVVSGVTGIQVRETVPDPFFDAADEVVLVDLPPDDLRQRLNEGKVYIAGQAERAIEHFFRKGNLIALRELALRRTADRVDDQMRAWRAHPGEEKVWHTRDAILLCIGHNTGSEKLVRTAARLASRLGSVWHAVYVETPTLHRLPEKQRRAILSALRLAQELGAETATLSDPAEEKAVVRYAREHNLGKIVMGRPASRRWWRRDAFADRLARRAPDLDQVIVALEEPPARALAQTPDNRPFKEKWRGQIQGCLVAVALCAITTLIAMQWLVTFDAANLVMLYLLGVVVIALLYGRWPSVVATVINVASFDLFFIAPRGTLAVSDVQYLLTFAVMLTVGLVIGNLTAGVRYQARVARYREQRTRHLYEMSKALAVGRSEHDIAATSERFIASTFQARSQILLPDANGKLLPLTHQQGMTPWDDAIARWSFDKGQPAGAGTDTLPGVPYQILPLKSADKTYGLAIVEPGNLRQLMVPEQQRLLETFTLLVANALERLTLTASEEQARLASERESIRNALLAALSHDLRTPLTVLFGQAEILTLDLASAGSPHARQASEIRQHILNTTRLVNNLLDMARIQSGGFNLKKEWLTLEEVVGSALQMLEPGLLHPITLSLPQQLTLIHVDGPLFERVLINLLENAVKYAGPQASIGIDAAVKDDRLQLDVWDNGPGIPAGQEQKIFDKFARGNKESAVPGVGLGLAICHAIVEVHGGTLTAYNRPQGGACFRVTLPQGKPPELDDFHEDM

SEQ ID NO: 93698 - DNA, 2691 bp, Listeria innocua Clip11262
  CDS (1)..(2691): transl_table=11
atggagacgaatcgtccaagtccggatgcgctactcgtgaatttgcaagaagaagcagattcatcagtaggtaaattaaaaatatattttggatttgcagcaggtgttgggaaaacttacgccatgttaagtgacgccaaagatcaattagcagcaggtgtggatgtcgtggcgggttatattgaacctcatgcccgcgaggaaacgctgagaatgttagaaggaattccgattatccctcctaaagcaatcaatcataaaaatatcgcgctcaaagaattcgatttggacgaagcgttgaaacgaaaaccggaacttattttggtagacgaactcgcacatacgaatgcatcaggcgtacgcaataagaaacgtttccaagatgtggaagaattgcttcaagcgggaattgatgtatatacgactgtcaatgtgcaacatattgaaagtttaaacgatattgtagaaggcatcaccaaggtagctgttcgcgaaacgattcctgactatgtttttgatgaggcggaccgagttaagttaattgatattgaacccgatgaacttctaaaacgactagaacaaggcaaaatttaccaaccagcgcgcgcaaaaacagcgatgcagaacttcttcactagagaaaatttaaaactcttacgcgaaattgcgatgcgaaaagcggccgaccgaattagtcatgaatacgatcaaacagggatttatccagaaaaacgggcgagtagtaaatggctagtctgtattgggacgtcgccttcgtctgcaaaactcattcgctggacagcgcgcactgccgaggctttccgcgcaccgtggactgccctttatattgaaaatgaagaaaatgattacatgactaaagcggagaaaaaatgtttgcgggaaacgatggaactcgctgaacgacttggtgcggaaattgttacccttgccggacacgacattgcagaaacagtagctgagtacgcccggttgactggtgtgacaaatatcgttgtcgggaaatcgcgtcgccgcatgggtttaaggtctttatttgaagaggattttgaggatcgtctcattacgcaccttgataacgtcgatatgcatattattccctcaagccaaccgcaaactaaaaaacgtcgaatgaaaatacgttttaaaagctttctatcctggcatgatatggcgaaaatgattttactgctagcattggcaacggcgatttgtgtcggtttaagtgaattcggcattggtgatcaaaatgttattatggtatatattttatccgtgttaattatttctcgcgtaacaagtggctatgtttatggcgttatgggttctatcattggcgttatgttatttaatttctttttcacgacgccactttatacgtttaatacaattcaagcgggctatccggtgacgttcggaattatgcttttagttgctcttattacgagtgcgctcactgtccgaattaaaacgcaagctagcctggccgttgagcgagaacgtcgaaccgaagtgctttatgaaatcaataagcggctattagttatccgcaatttaaaaggaattatcgatttaaccaacgaatatattttgcatttatttagccgctccgttattttttattctgcggatcctgctaaaagtaataaagggattttcgtacaagcagaaggaaaagaagatgccagtgcgcttcttagtgcggatgaagaagctgtcgcgcattgggtatttaaaaataaaaagcgggcgggtgccgggacggatacgctaatgggggcatttggttattatatgccagtgatgtcacaaggaaaagtgcttggcgtcattggcgtttcttgctccccagaagatggtccacttacacaagataatcggatctttttacgaatgattagctctcaagtggcactagctttagaacggcaatatttatccgaagaacaacgccaaatcgtcatcgaatcagcaaaagaaaaaatgagaagcaatttacttcgggcgatttcgcatgatttaagaacaccgctaactggtattgttggagcaagttctgccttacttgaaaaagaaactgagttagataaagaaacggaacataatttaattaaaggtattaaagatgactctggctggctcattcggatggttgagaatttactttctgtgacgagaattagtgaaggattggtgagtttggaacgagctccagaagccgtagaagaaattgttggtgaggctgtcggtcgaatcaaaaaacgtttcgcagaccgaacaattcatgtcaaagtaccgcgcgaccttcttatggttccgatggatggcacgttaattgagcaagtccttattaatttaatggaaaatgcgttgcgacatggtggatctgatgcggaagtttgggtgaacgtgacgaaaacgaagaaaagtgcgatttttagtgtgcgtgataacggaaaaggcattccagaaaatcgcttgccagatttatttgatacttttgctgtggaagcgagagaacgttcggatatgtcacgcggattagggcttggtttatcgatttgtatgtcgattattcgagcgcatgacgggactttagaagcgaaaaacaacgaacatggtggggcgacattctggttcactttgccactagacggaggagatggaaaatga

SEQ ID NO: 93699 - protein, 896 aa, Listeria innocua Clip11262
METNRPSPDALLVNLQEEADSSVGKLKIYFGFAAGVGKTYAMLSDAKDQLAAGVDVVAGYIEPHAREETLRMLEGIPIIPPKAINHKNIALKEFDLDEALKRKPELILVDELAHTNASGVRNKKRFQDVEELLQAGIDVYTTVNVQHIESLNDIVEGITKVAVRETIPDYVFDEADRVKLIDIEPDELLKRLEQGKIYQPARAKTAMQNFFTRENLKLLREIAMRKAADRISHEYDQTGIYPEKRASSKWLVCIGTSPSSAKLIRWTARTAEAFRAPWTALYIENEENDYMTKAEKKCLRETMELAERLGAEIVTLAGHDIAETVAEYARLTGVTNIVVGKSRRRMGLRSLFEEDFEDRLITHLDNVDMHIIPSSQPQTKKRRMKIRFKSFLSWHDMAKMILLLALATAICVGLSEFGIGDQNVIMVYILSVLIISRVTSGYVYGVMGSIIGVMLFNFFFTTPLYTFNTIQAGYPVTFGIMLLVALITSALTVRIKTQASLAVERERRTEVLYEINKRLLVIRNLKGIIDLTNEYILHLFSRSVIFYSADPAKSNKGIFVQAEGKEDASALLSADEEAVAHWVFKNKKRAGAGTDTLMGAFGYYMPVMSQGKVLGVIGVSCSPEDGPLTQDNRIFLRMISSQVALALERQYLSEEQRQIVIESAKEKMRSNLLRAISHDLRTPLTGIVGASSALLEKETELDKETEHNLIKGIKDDSGWLIRMVENLLSVTRISEGLVSLERAPEAVEEIVGEAVGRIKKRFADRTIHVKVPRDLLMVPMDGTLIEQVLINLMENALRHGGSDAEVWVNVTKTKKSAIFSVRDNGKGIPENRLPDLFDTFAVEARERSDMSRGLGLGLSICMSIIRAHDGTLEAKNNEHGGATFWFTLPLDGGDGK

SEQ ID NO: 93700 - DNA, 2814 bp, Ralstonia solanacearum GMI1000
  CDS (1)..(2814): transl_table=11
atggacgaaacccgccccaaccccgacaccctcctcgccgagctccaatccggcgaggagaaagccgctcgcggcaagctgcgcatctatttcggcgcgtcggcgggcgtcggcaagacgtacgcgatgctgtcggccgccaaggtcgcgcgggccgagggcatcgatgtggtcgtcgggctggtcgagacccacggccgcgccgagaccgccgcgctggtggagggcctggagcacctgccgccgcgccaggtcgagtatcgcggtcgcaccctgcccgagttcgacctggacgccgcgctggcccgcaagcccgcgctgatcctcgtcgatgagctcgcgcattccaacgtggccggctcgcgtcaccccaagcgctggcaggacatcgaagacctgctcgccgccgggatcgacgtgtggaccacggtcaacgtgcagcatctcgacagcctgaacgaggcggtcggcagcattaccggcatccgcgtgtgggagacggtgccggatgcggttttcgacagcgcggccgaggtgatcctcgtcgacctgcccgccgacgagctgctgcgccgcctggccgagggcaaggtctacctgcccgagcaggcccggcacgcggcgcgcaacttcttccgcaagggcaacctgatcgcgctgcgcgagctggcgctgcgccgcaccgccgaccgcgtcgacgacgacgtgcaggcctatcgccgcgcgcgccgcatcgagaacgtctggcgcacgcgcgagaccatcgtcgcctgcctcgacccgcagggcgacggcgagcaggtgatccgcagcgccgcgcgcctggccgcgcagctcgaatgcgactggcacgcggtggccgtggtgatgccgcacctgcgcgccgccgatgcgcgcgccgagcggctgcacgcgctgctcaagatggccgaggacgccggcgccaggatcgagacgctggccggcaccaacgcggtggaggccatcaccggctatgtccgtcgccacaacatcaccaaggtcgtggtcggccgcccgccggccaggcgctggcgctcggcgcgggccatcgtcgtggcgctgcgcctggcgatcgggctggagcgtcgcctgccgagcggtgattttgccgaggcgctggcgcggcagtgcccggaggtggatgtgatccgcgccgccgccgatccggcgcgcgtgcagttgccgccgcgcgccgccagcatcggccgcgtcgatgtgcgcgacaccgctcagcgcgccgccgccgaggccgagggcacctggctgcgcccggcctacctggccgcctgcgtgtacgtgggcgcggcgacgctgctgtcgagcctggtgcggccggtgttcgatctcgccaacatcgtcatgctgttcctggcggccgtggtggccgtggcgatgcggcacgggcgcgggccggcggcgctggcgtcggtgctgtcggtggcgctgttcgatttcttcttcgtgccgccgcgctactcgttcgccgtcagcgatgtgcaatacctgctgaccttcgcggtgatgctggcggtcggcctgctggtcggccagctgactgcgggcctgcgcgaacaggccgaggcggccgtgcagcgcgaagccgccgcgcgcgcgctgtacgaggcggcccgcgaactgtcggcggcgctgacgctggaccagatcgtcagcatcggcgggcgcttcgtcaacgcgaccttcggcgggcggtgcgcctttttcttcgtcgggcccgacggccgcctgggcgccgcgcaggtggccaggcccgagggcacgcccgatgcgccgtccggcatgcccaacctcgaccgcgtgctggccgactggacctgccagcacggccagccggccggcaccggcacgcatacgctgccctcgggctcggtgctctacttgccgctgaaggcgccgatggccatccgcggcgtgctggcggtcgagcccgagaccttccaggtgctggcccagcccgacaaccgccgccagatcgacgcctgcgccacgctgatcgccatcgccatcgagcgcgtgcactacgtggagatcgcccaggacgccctgttgcgcatcgaatcggagcggctgcgcaattcgctgctggcggcggtgtcgcatgatctgcgcacgccgctgaccgggctggcgggcatggccgagaccctgttgcgcacgcagccgcccctgtcgccgctgcaggccgaggccgccgaggccatcggcgaacaggcgcagcgcatgcgcgcgatggtcaccaacctgctcgacatggccaggctgcagaaccacgacgtcaagctgcggctggagtggcagtcgatcgaggaactggtgggggcggcgctcaaggggacgccgctgcccacgcacgccgtggtggtggatgacctggccgacctgccgttgctgcgctgcgatggcccgctgatggagcgcgtgttgtccaacctgctggagaacgccggcaagttcgcgccggccgggaccgaggtgcgcatctccgccggcgtggtgcacgacgccgcgcacggcgacgagatgtgcgtgcgcgtgcgtgaccacgggcccggcgtgccggccggggcggagcgcgtcatcttcgagaagttcacgcgcggcgacaaggagtccgccacgggtggcgtcgggctgggcctggcggtgtgcgaggcgatcgtcagcgcacacggcgggcggatctgggtcgagacgccggccgacggcggcgcctgcttcgtggtcgcgctgccggccagcgatcagcccgccatggaggacgacatccccgcttga

SEQ ID NO: 93701 - protein, 937 aa, Ralstonia solanacearum GMI1000
MDETRPNPDTLLAELQSGEEKAARGKLRIYFGASAGVGKTYAMLSAAKVARAEGIDVVVGLVETHGRAETAALVEGLEHLPPRQVEYRGRTLPEFDLDAALARKPALILVDELAHSNVAGSRHPKRWQDIEDLLAAGIDVWTTVNVQHLDSLNEAVGSITGIRVWETVPDAVFDSAAEVILVDLPADELLRRLAEGKVYLPEQARHAARNFFRKGNLIALRELALRRTADRVDDDVQAYRRARRIENVWRTRETIVACLDPQGDGEQVIRSAARLAAQLECDWHAVAVVMPHLRAADARAERLHALLKMAEDAGARIETLAGTNAVEAITGYVRRHNITKVVVGRPPARRWRSARAIVVALRLAIGLERRLPSGDFAEALARQCPEVDVIRAAADPARVQLPPRAASIGRVDVRDTAQRAAAEAEGTWLRPAYLAACVYVGAATLLSSLVRPVFDLANIVMLFLAAVVAVAMRHGRGPAALASVLSVALFDFFFVPPRYSFAVSDVQYLLTFAVMLAVGLLVGQLTAGLREQAEAAVQREAAARALYEAARELSAALTLDQIVSIGGRFVNATFGGRCAFFFVGPDGRLGAAQVARPEGTPDAPSGMPNLDRVLADWTCQHGQPAGTGTHTLPSGSVLYLPLKAPMAIRGVLAVEPETFQVLAQPDNRRQIDACATLIAIAIERVHYVEIAQDALLRIESERLRNSLLAAVSHDLRTPLTGLAGMAETLLRTQPPLSPLQAEAAEAIGEQAQRMRAMVTNLLDMARLQNHDVKLRLEWQSIEELVGAALKGTPLPTHAVVVDDLADLPLLRCDGPLMERVLSNLLENAGKFAPAGTEVRISAGVVHDAAHGDEMCVRVRDHGPGVPAGAERVIFEKFTRGDKESATGGVGLGLAVCEAIVSAHGGRIWVETPADGGACFVVALPASDQPAMEDDIPA

SEQ ID NO: 93702 - DNA, 2682 bp, Agrobacterium tumefaciens str. C58
  CDS (1)..(2682): transl_table=11
atgccaagccgaccgtcgcccgatgcgctgctggaaaatgcccagcgcgaggcaagaggccggctgaagatttttctgggcgccgcacccggcgtcggcaagacctatgagatgctgatgtccggccgggcgaagctcgcggatggcgtcgataccgttatcggtgtcgtggaaacccacggccgccgggaaaccgaggcgctggtcgaagggttgagcgtggtcccgcgcaagcgcatcgattatcgcggtcaggtactggaggagatggatatcgatgccatcctcgcccgtcgccccgctctggttctggtcgatgaactcgcccacaccaatgccgccggcagccgccaccccaagcgctatatggatgttcaggaaatcctcgcgcagggcatcaatgtctatacgacgctcaacatccagcatgtcgaaagcctgaatgatgtggtggctcagatcacccgtatccgcgtgcgcgaaacggtgccggacagcatcatcgaccgcgccgacgacgtcgaaatcatcgatatcacccccgatgatctgatcaagcggctgcaggacggcaaggtctacctgccgcgtaccgcccggcgcgccatcgagaattatttctcccggggcaacctgacagcgctgcgcgaactcgcactgcgacgcacggcgcagcgggtggacgagcaattgctcaaccacatgcagtcccatgccatttccggcccgtgggcggcgggggaccgggttctggtctgcctcgaccacggccgtaacgggccgggtcttgtgcgttatgcccgaaggcaggcggaccgactgcgcgcgccgtggacggcgctgcatctcgacacgccgcgttcgcagcaattatcagaggcggagaaggaccggctggcgggcaccatgcggcttgcccagcagcttggcggcgaaacggtaaccctgccagcgcttgacctcacacgcgaaatcatcgcttacgccaatgccaataatttcacccacatcatcatcgggcgcccgcgaaaatcctggtggcagcggatttttcagcgctcgctgacccatgatctgatcgatcacgccggcgatatcagcgtgcacgtcatttccggcgacaagaacgaggaaaagccgggtcaggccgtgaagctcgcaccggcacgatccccacagtccttccggtcctatctcaacagcactttgttcgtcgggttggcgatcatcgtcgggatcgtactcgatcagacgctcgacgttcaaaatcttgcgctcgtcttcctgatggccgttctggctgccgccgtgcgcggggggctcggaccggcgctttatgcatccttgctcggcgcccttgcgttcaatttcttctttctggagccgcgttatacgctgacggtcagttctccggacagccttgtcgccctgctgttctacttcggcgtcgcgctggtcgcttccaatctcacggtcgcggtgcagcggcaggcggcctccgcacgctcgagggcacgcacgactgaagacctctatctgttttcgaaaaagctggctggcacgggaacgctcgatgatgtgttgtgggcagctgcatatcagatggcgtcaatgctgaaggtgagggtcgtcctgctcatgccggaaaacggcgccatcgccgtcaaggcgggttatccgcccgacgacacattggtggatgccgatatcgccgccgcacaatgggcatgggaacataacaaggcggcaggtcgtggcgcggatactttgccgggtgccaaaaggctttatctcccgcttcgcaccggcagcggtgcggtgggtgtggtgggcctggatgacgaccgaagcggaccgcttttgacgccggaacagcagcggctttttgatgcgttggccgaccaggccgcgctggcggtcgaacgtatccagcttgcctcggatgtggatagagcaaggctggcggccgaaacggaccggctgcgcacggcacttctgacctccatttcccacgatcttaaaaccccgcttgccgccattctgggctcggccggaacgctcaaggatttcgccgatgacattccacctgatgcgcgcgccgaactgctgtcgacgatcgtggaggaatccgaacggctgaaccgtttcatctccaatcttctcgatatgacgaggatcgggtcgggcgcgatggagccgaattacgggctgcatttcctcggcgacatggtcggaacggcgctgtcgcgcgccgcgaagatcgttgtccggcatgaggtcgttctcgatatcccctccgacctgccgatgctgaaggtcgatcccgtgcttttcgaacaggtgctgttcaacctgatcgacaatgcggccaaatacgctcccgaacatacgaccattgcgatacgcggctggcggcagggaaagaatatcttcctctcggtcgccgatgagggaccgggcattccgcccgatgatcttgagcgggtcttcgacagtttttaccgggtgcgcaaggttgaccatgtgcaggcgggaacggggctcggtctttccatctgcaaggggttcatcgaggcgatgggtggctcgatccgcgcggaaaacagagcggatcgcggcggagcgcaatttaccataggcctgcccgtcgccgtcgataccccggtgctggatcatgattaa

SEQ ID NO: 93703 - protein, 893 aa, Agrobacterium tumefaciens str. C58
MPSRPSPDALLENAQREARGRLKIFLGAAPGVGKTYEMLMSGRAKLADGVDTVIGVVETHGRRETEALVEGLSVVPRKRIDYRGQVLEEMDIDAILARRPALVLVDELAHTNAAGSRHPKRYMDVQEILAQGINVYTTLNIQHVESLNDVVAQITRIRVRETVPDSIIDRADDVEIIDITPDDLIKRLQDGKVYLPRTARRAIENYFSRGNLTALRELALRRTAQRVDEQLLNHMQSHAISGPWAAGDRVLVCLDHGRNGPGLVRYARRQADRLRAPWTALHLDTPRSQQLSEAEKDRLAGTMRLAQQLGGETVTLPALDLTREIIAYANANNFTHIIIGRPRKSWWQRIFQRSLTHDLIDHAGDISVHVISGDKNEEKPGQAVKLAPARSPQSFRSYLNSTLFVGLAIIVGIVLDQTLDVQNLALVFLMAVLAAAVRGGLGPALYASLLGALAFNFFFLEPRYTLTVSSPDSLVALLFYFGVALVASNLTVAVQRQAASARSRARTTEDLYLFSKKLAGTGTLDDVLWAAAYQMASMLKVRVVLLMPENGAIAVKAGYPPDDTLVDADIAAAQWAWEHNKAAGRGADTLPGAKRLYLPLRTGSGAVGVVGLDDDRSGPLLTPEQQRLFDALADQAALAVERIQLASDVDRARLAAETDRLRTALLTSISHDLKTPLAAILGSAGTLKDFADDIPPDARAELLSTIVEESERLNRFISNLLDMTRIGSGAMEPNYGLHFLGDMVGTALSRAAKIVVRHEVVLDIPSDLPMLKVDPVLFEQVLFNLIDNAAKYAPEHTTIAIRGWRQGKNIFLSVADEGPGIPPDDLERVFDSFYRVRKVDHVQAGTGLGLSICKGFIEAMGGSIRAENRADRGGAQFTIGLPVAVDTPVLDHD

SEQ ID NO: 93704 - DNA, 2547 bp, Streptomyces coelicolor A3(2)
  CDS (1)..(2547): transl_table=11
atgggacgcggcaagcttcggatctacctcggtgcggcaccgggcgtcggcaagacgtacgcgatgctctccgaggcccaccggcgcgtcgaacggggcaccgactgcgtcgtggccctcgtcgagcaccacggcagggcacgcaccgaggtgatgctgcgcggcctggaacaggtgccgcgccgggaggccgagtaccggggcgcggccttcaccgagctggacctggacgcggtactggcccgcgccccccgggtggcgctggtggacgagctggcccacaccaacgtccccggcgtgcgcaacgccaagcgctggcaggacgtcgaggaactcctcgccgccggcatcgacgtcgtctcgaccgtcaacatccagcacctggagtcactcggcgacgtcgtggagtccatcaccggcgtacggcagcgcgagaccgtgccggacgaggtggtgcggcgcgcggaccagatcgaactggtcgacatgtcgccgcaggcgctgcgccgccgcatggcccacggcaacatctaccagtcggacaaggtcgacgcggccctgtccaactacttccgccccggcaatctcaccgccctgcgcgagctggccctgctctgggtcgcggaccgggccgacgagtacctccagcagtaccgcagcgagcaccgggtctcgaagatctggggctcgcgcgaacgcatcgtggtcggcctgaccggcggccccgagggccggacgctgatacggcgggccgcgcgcctcgccgagaaaggcgccggcggcgaggtgctggcggtctacatagcccgcagcgacgggctgacctcggcctctccgaaggagctggcggtccagcgcaccctcgtggaggacctcggcggcaccttccaccacgtgctcggcgaggacataccggccgcgctgctcgacttcgcccgcggcgtcaacgccacccagatcgtcctcggctcctcgcgccgcaaggcctggcagtacgtcttcggacccggcgtcggcgccaccgtcgcccgggagtccggctccgacctggacgtccacatcgtgacccacgaggaggtcgccaaggggcgcgggctgccggtggccaggggcgcgcggctcggccggtcccggatcgtctggggctggttcgcgggcctgggcggcccggtgctgctgacgctgctgctcagcacggtccacctcgggctcgccaacgacgtcctgctctacctggcgctcaccgtcgccgccgccctgctcggcgggctgtacccggcgctcgcctcggccgcggtcgggtcgctgctgctgaactggtacttcacgccgcccgtcaaccggatcaccatcgccgaccccaggaacatgcttgcgctcgccatattcgtgggcgtggcgctctccgtcgcctcggtcgtcgacgtcgcggcccgccgcacccaccaggcggcccggctgcgtgccgagtcggagatcctgtccttcctcgccggtgacgtgctgcgcggcgagaccagcctggagacgctcctggagcgggtgcgcgagaccttcggcatggagtcggccgccctcctggagcgggagggcgacgtggcgccctggacctgtgcgggccgcgccggttccggaccgccggtcgaccgcccggaggacgcggacgtggacatgcccgtcggcgaccacatggccctcgcgctgaccggccgggtcctgcccgccgaggaccgccgggtgctggccgccttcgccgcccaggccgccgtcgtcctggaccgccgccgcctgcgcgaggaggccgaccgggcccgcacgctggccgagggcaaccgcatccgcacggcgctgctggccgccgtcagccacgacctgcgcaccccgctggccgggatcaaggcggcggtgaccagcctcaggtccgacgacgtggcctggtccgaggaggaccgggcggagctgctcgagggcatcgaggagggcgccgaccgcctcgaccacctggtgggcaacctgctcgacatgtcccgcctgcagaccggcaccgtcaccccgctgatccgcgagatcgacgtggacgaggtggcgccgatggcgctcggcggggtccccgagggaagcgcggagctggacatccccgagacgctgcccatggtcgccgtggacgccgggctcctggagcgggcgctggccaacctggtggagaacgccgtcaagtacagtccggacgaccggaccgtcctggtcgccgccagcgccctcgccgaccgcgtcgaggtgcgcgtcgtcgaccgggggccgggagtgccggacgaggccaaggaccgcatcttcgagcccttccagcgctacggcgacgccccgcgcggggccggggtgggactgggcctggccgtggcccgcggtttcgccgaggcgatgggcggcaccctgaacgccgaggacacccccggcggcggcctcaccatggtcctcaccctccgcgcggtgggctcgtccgcgccgacctcccgtcccgcgacagcagaaaggcaggccgccctgtga

SEQ ID NO: 93705 - protein, 848 aa, Streptomyces coelicolor A3(2)
MGRGKLRIYLGAAPGVGKTYAMLSEAHRRVERGTDCVVALVEHHGRARTEVMLRGLEQVPRREAEYRGAAFTELDLDAVLARAPRVALVDELAHTNVPGVRNAKRWQDVEELLAAGIDVVSTVNIQHLESLGDVVESITGVRQRETVPDEVVRRADQIELVDMSPQALRRRMAHGNIYQSDKVDAALSNYFRPGNLTALRELALLWVADRADEYLQQYRSEHRVSKIWGSRERIVVGLTGGPEGRTLIRRAARLAEKGAGGEVLAVYIARSDGLTSASPKELAVQRTLVEDLGGTFHHVLGEDIPAALLDFARGVNATQIVLGSSRRKAWQYVFGPGVGATVARESGSDLDVHIVTHEEVAKGRGLPVARGARLGRSRIVWGWFAGLGGPVLLTLLLSTVHLGLANDVLLYLALTVAAALLGGLYPALASAAVGSLLLNWYFTPPVNRITIADPRNMLALAIFVGVALSVASVVDVAARRTHQAARLRAESEILSFLAGDVLRGETSLETLLERVRETFGMESAALLEREGDVAPWTCAGRAGSGPPVDRPEDADVDMPVGDHMALALTGRVLPAEDRRVLAAFAAQAAVVLDRRRLREEADRARTLAEGNRIRTALLAAVSHDLRTPLAGIKAAVTSLRSDDVAWSEEDRAELLEGIEEGADRLDHLVGNLLDMSRLQTGTVTPLIREIDVDEVAPMALGGVPEGSAELDIPETLPMVAVDAGLLERALANLVENAVKYSPDDRTVLVAASALADRVEVRVVDRGPGVPDEAKDRIFEPFQRYGDAPRGAGVGLGLAVARGFAEAMGGTLNAEDTPGGGLTMVLTLRAVGSSAPTSRPATAERQAAL

SEQ ID NO: 93706 - DNA, 2661 bp, Xanthomonas axonopodis pv. citri str. 306
  CDS (1)..(2661): transl_table=11
atgaacgacgcccgcacccagcaagccgatgccctgatcggcgaattacagcgcgaacacggtggtcggttgacggtgttcctgggcgccgcgcccggggtcggcaagacctacgccatgttgtcgcgggcgcgcgagcgcctgcgccagggcatggatgtggtggccggcgtggtggaaacgcacgggcgcagcgaaaccgcggcgttgctggaaggcttgccgctgctgccgcgcgccggcgtgagttaccagggccgcatgctggaagaactcgacctggatgcattgctggcacgcaagccgcggctggccctgatcgacgagctggcgcaccgcaacgtgcccggcagccgccatgagcggcgctggcaagacatcgtggagttgctcgatgccgggatcgacgtctacaccacggtcaacatccagcacctggaaagcctcaacgacatcgtgctgcgcatcaccggcgtgcgcgtgtccgagaccgtgcccgatgccgtgttcgaccgcctgcgcgacatcgtgctggtggacctgccgccacgcgaactgatcgagcgcctgcagcagggcaaggtgtatttgcccgagcaggccacgcaggcattgcaggcgtttttctcgccttccaacctcaccgccttgcgcgagctggcgatgcagaccgctgccgaccgcgtcgacagcgatctgcgcgatacccaggccgcgcgcggcctgcctggcaccgccgcgttgcgacgccgcgtggtggtggccatcgatggccgcggcagctcggattatctggtgcgcgtggcgcggcgtctgtcggagcggcgcgatgcaccgtggacggtggtcaccgtgcagacccgcaccgtgaccgatgcagcctggcagctggaaatcgatcgcgcattcgcgctcgcccatcgcctcggtggcgacaccgcgctgctgcatggcgccaatgtggccgatgccttgctggatttcgcctcgcagaacggcatctccaccctggtgctggggcgcacccgcgagcgcccgctggcgcgcatgttcaaccgcacgctgacccagcaattgctgcaacgtggcgcgcattacgaactggtgatcgtcagctccgccgatgcgcgcgcacgtgcgcgccaacgctggcgcaacccgcgccaatggctgcagcgctacgacatggcgttcgctgcgatcgcggccgctggtgcggtgggggtggcgtggttgctgcagcgctggaccgatatcgatgacctgtcgatggtgttcatcgtcgcagtggtgctggtggcttcgcgcacgcgcatggccgctgcggtggttgccgcattgctgagttttgtcgcctacaacttcttcttcatcgagccgcgtttcaccttgcagatcagcgcgcgccagggcgtggtgacggtgtgcatgttcctgatcgccgcgctggtcgccggccggctggcctcgcgtttgcgcagccaggtcctggccttgcgcgcggccaatgcgcatgccaacgccttgcaggcgctggcccgccagctcagcaccgccgccgatctggggcaggtgctggaagccggccgtcgggcgctgaccactgcgctggatgccgaggtctggctacgcctggagcagcgcgaaagcgacgcacccgccagcttcggtgcgctcgatcgcagcgccgccgattggacccagcgccacggccaaccggccggccgtttcaccgataccttggccggggcgcagtggtggtgcctgccggtgcgccacgagcgcggcaccctgggtgtggccgcgctgcgctttcgacaggcgctgcaacggcccggcctggaacaacgccgcctggccgaagcgatggtggaagacatcggccaggctgcgctgcgcacgcgcctggtcgccgatctggaaggcgcgcgcgtcagtggcgaaaccgagcgcctgcgttctgccttgctctcgtcggtctcgcacgatctacgctcgccgctggcctcgatgatcggctcggccagcagcctggccagctacggcgatgcgatggacgcgcacgaccgccacagtctgctcgacaccatccagctcgaaggcgagcggctggatcgctacatccagaacctgctcgacatgacccggctcggccacaccggcctgaccttgaatcgcgactggatcggcgtcgacgaattgatcggctcggccgcccgccgcctgcagcgctatcagccggaggtgcgcctgcaactggacctggccgccgacctgccggcgatctgggtgcatccggcgctggtggaacaggccatcttcaacgtgctggaaaatgcggcgaaattttcgccagccggcgtgccggtgaccgtgcacgcgcagctgcgtgccggcgcgttgcagatcgacatcggcgaccaggggccgggcattcccgaagacgagcgcgcgcggatcttcgacatgttctacagcgtggagcgcggtgaccgcgggcgcaacggcaccggcttgggtcttgccatctgccagggcatgatcggcgcgcacggcggcagcgtggcggcattggcgggcgcgcatggtcacggcaccaccatccgcattacgctgccgttgctcgttcccgccgcgccacctcgccccgatgccgactga

SEQ ID NO: 93707 - protein, 886 aa, Xanthomonas axonopodis pv. citri str. 306
MNDARTQQADALIGELQREHGGRLTVFLGAAPGVGKTYAMLSRARERLRQGMDVVAGVVETHGRSETAALLEGLPLLPRAGVSYQGRMLEELDLDALLARKPRLALIDELAHRNVPGSRHERRWQDIVELLDAGIDVYTTVNIQHLESLNDIVLRITGVRVSETVPDAVFDRLRDIVLVDLPPRELIERLQQGKVYLPEQATQALQAFFSPSNLTALRELAMQTAADRVDSDLRDTQAARGLPGTAALRRRVVVAIDGRGSSDYLVRVARRLSERRDAPWTVVTVQTRTVTDAAWQLEIDRAFALAHRLGGDTALLHGANVADALLDFASQNGISTLVLGRTRERPLARMFNRTLTQQLLQRGAHYELVIVSSADARARARQRWRNPRQWLQRYDMAFAAIAAAGAVGVAWLLQRWTDIDDLSMVFIVAVVLVASRTRMAAAVVAALLSFVAYNFFFIEPRFTLQISARQGVVTVCMFLIAALVAGRLASRLRSQVLALRAANAHANALQALARQLSTAADLGQVLEAGRRALTTALDAEVWLRLEQRESDAPASFGALDRSAADWTQRHGQPAGRFTDTLAGAQWWCLPVRHERGTLGVAALRFRQALQRPGLEQRRLAEAMVEDIGQAALRTRLVADLEGARVSGETERLRSALLSSVSHDLRSPLASMIGSASSLASYGDAMDAHDRHSLLDTIQLEGERLDRYIQNLLDMTRLGHTGLTLNRDWIGVDELIGSAARRLQRYQPEVRLQLDLAADLPAIWVHPALVEQAIFNVLENAAKFSPAGVPVTVHAQLRAGALQIDIGDQGPGIPEDERARIFDMFYSVERGDRGRNGTGLGLAICQGMIGAHGGSVAALAGAHGHGTTIRITLPLLVPAAPPRPDAD

SEQ ID NO: 93708 - DNA, 2727 bp, Yersinia pestis KIM
  CDS (1)..(2727): transl_table=11
atggtggatgcagaaccaacccgtccgaaccccgatagcctgttagccgtggcgaatgaaaaacctcgtggccggttaaaagtcttttttggggcctgcgccggggtaggtaaaacctacgccatgctgcaagaggcgcaacgcttgcgcgctcaagggttagatgtgctggtcggggtggtggaaacgcacgggcgcagtgaaaccgccgccttacttgaagggctaaccgccctccccctgaaacgcatccaccaccgtaaccgccagatacgtgaatttgatttagatgctgcgctggcccgccgtcccgcgctgatcctcatggatgaactggcgcacagtaatgccaatggctcccgccatcccaaacgctggcaagatgtcgaagagctattggatgcaggcattgatgtgctgaccaccgttaatgtgcagcatttagaaagcctgaatgacgtggtcggcggtgtgaccggtattcgggtgcgtgaaaccgtgcccgaccatatgttcgacgaagccagcgaagtggttttagtcgatttaccccccgatgatctgcgccaacgcctcaatgaaggcaaagtgtatatccccggccaagctgagcgcgccatcgaacattttttccgtaaagggaatttaatcgccctacgtgagttggcgctacgccgtacggccgatcgggttgatgatcaaatgcgcgccttccgcgatacccaaggacgtgaacgggtttggcatactcgcgatgccattttgctgtgtatcggccaccacgcgggtaatgaaaagttagtgcgtaccgccgcccggttggccgcccgcttaggctgcatctggcatgcagtctatgttgaaaccccccggttgcacggcctgccagaggctaaacggcgcgctatcctgcgcacccttaaactggcacaagagttaggcgcggaaaccgctaccttatcggaccccagtgaagaacaggcggtattgcgctacgcccgtgaacacaatctggggaaaatcattattggccgccgcaccgagcaacattggaaactgcgaggcagttttgccgatcgcttaggtaagctggggccagatctggatttggtgattattgcactggatgccgatccgccaaccaatgtcgctaaagaaccagactcgcgccccttcaccgaaaaatggcgtatgcagctacggggatgtgtcgccgctatcgccctatgtgcgctgatcaccgtgctatcgttgtggttgatcccccgtttcgatcaagccaatctggtgatggtttacttgttgggcgtggtgattattgccctgttttatggccgctggccttcagtgctggcggcggtgattaatgtcgccagcttcgatctgttttttgtccaaccgcactggtcattagccgttaccgatgtgcaatatttgctgactttcggtgtgatgctgattgtcggtatcgtggtggggaatctgaccgctggggtgcgctatcaggctaaaattgcccgttatcgggaacaacgggccagacatctgtatgaaatgtctcgcagtttaagccgcgctctgacaccggaggatattgccaaaaccagccgccattttctttccagcagttttcaggccaaaaccagcctgctactgccacaggaagagggccatttacagccaataatgcccgatgacgggggcatcctgtccgttgatgatgccattgcccattggagttttaatcagggtgcccctgcaggagcgggcaccgataccctgccgggcgtgccctaccaactgctgccgttgacagcggctcaacagacctacggcgtgttggcgattgaacccgctaacttacgccaactgatggtgccggagcagcaacggctgttgcaaacatttaccagcctgattgccaatgcattggaaaggctacatctggcccgcagtgctgaactggcaaaactggatgctgaacgggagcaattgcgtaattcgctgctggcggcattgtcccatgatttgcgtaccccgctcaccgtgttattcggtcaggcagaaattctgacgctggatctggccgccgaaggttcgcgccatgccccgcaggctaaccaaatccgccagcaggtcttgagcaccacccggttggtgaacaatctgctggatatggcgcgtattcagtctggtggttttaatctacgtaaagagtggcaatcgctggaagagattattggcagcgccctgtatatgctggaaaccaccttaagtcagcatcagatacgcgttgaattgccggatgaaatggtgttgatcaattgcgacgcaagcttgctggagcgggtctttatcaacctcctggaaaatgcccataaatatgcaggtcacgccgccttgttgggtatccgggcggaagtgcaaggcgagtggttaaatgtggacgtgtgggataatggccccggagtcaccatcggtcaggaaaatcttatttttgataagttttcccgcgggaataaagagtctgccattccgggtgttggcttgggtttagccatttgtcgtgccattattgatgtccacggcgggcgtatctgggtggagaagcgtcaagagggcggagccagcttccgttttgttttgccactggaaaaagtgccggaaattgatgccgacaatattgataccaacaatattgatactgaaaataatgatatatcctga

SEQ ID NO: 93709 - protein, 908 aa, Yersinia pestis KIM
MVDAEPTRPNPDSLLAVANEKPRGRLKVFFGACAGVGKTYAMLQEAQRLRAQGLDVLVGVVETHGRSETAALLEGLTALPLKRIHHRNRQIREFDLDAALARRPALILMDELAHSNANGSRHPKRWQDVEELLDAGIDVLTTVNVQHLESLNDVVGGVTGIRVRETVPDHMFDEASEVVLVDLPPDDLRQRLNEGKVYIPGQAERAIEHFFRKGNLIALRELALRRTADRVDDQMRAFRDTQGRERVWHTRDAILLCIGHHAGNEKLVRTAARLAARLGCIWHAVYVETPRLHGLPEAKRRAILRTLKLAQELGAETATLSDPSEEQAVLRYAREHNLGKIIIGRRTEQHWKLRGSFADRLGKLGPDLDLVIIALDADPPTNVAKEPDSRPFTEKWRMQLRGCVAAIALCALITVLSLWLIPRFDQANLVMVYLLGVVIIALFYGRWPSVLAAVINVASFDLFFVQPHWSLAVTDVQYLLTFGVMLIVGIVVGNLTAGVRYQAKIARYREQRARHLYEMSRSLSRALTPEDIAKTSRHFLSSSFQAKTSLLLPQEEGHLQPIMPDDGGILSVDDAIAHWSFNQGAPAGAGTDTLPGVPYQLLPLTAAQQTYGVLAIEPANLRQLMVPEQQRLLQTFTSLIANALERLHLARSAELAKLDAEREQLRNSLLAALSHDLRTPLTVLFGQAEILTLDLAAEGSRHAPQANQIRQQVLSTTRLVNNLLDMARIQSGGFNLRKEWQSLEEIIGSALYMLETTLSQHQIRVELPDEMVLINCDASLLERVFINLLENAHKYAGHAALLGIRAEVQGEWLNVDVWDNGPGVTIGQENLIFDKFSRGNKESAIPGVGLGLAICRAIIDVHGGRIWVEKRQEGGASFRFVLPLEKVPEIDADNIDTNNIDTENNDIS

SEQ ID NO: 93710 - DNA, 2655 bp, Pseudomonas putida KT2440
  CDS (1)..(2655): transl_table=11
atgagtgactccgcccgcgccgatgcgctgttggccaacctcccacgcaccggccggggccggctgaaggtgttcctgggcgctgcccccggcgtcggcaagaccttcgccatgctccaggccgcacacgcccagcaacgccagggcgtgcaggtgttggccggggtggtcgaaacccatggccgcgccgaaaccgaagcgttgctcggagggctgcatcagcagcccttgttgcgcagccagtaccgtggcgtcacccttgaggaaatggaccttgacggcctgctgcgtgccgcgccggccttggccctggtggacgaactggcccacacgaacgcccccggcagccgccacgccaaacgctggcaggatgtgcaagaactcttggccgcgggcatcgacgtgtacaccacggtcaacgtccagcacctggaaagcctcaacgacaaggtccgcgacattaccggcgtgcaagtgcgcgagaccctgccggactgggtgctgcaggaagcgttcgagctggtgctgatcgacctgcctccgcgagagctgctcgaacgcctgcgtgaaggcaaggtgtacgtgcccgagcaggcaagggcggccatcgatgcgtatttttcgcaaaccaacctcaccgccctgcgcgagctggccatgcagaccgccgctgctcaggtcgatgccgacctggcccacggctatcgtcagcgcggccaggaggcgccggccttgcgcggccggttgctggtgggcatagacggtgacgaccaggccgaacgcctggtgcgccatgccagccgcgtggcccagcgccgccacctgccctggagcctggtgcatgtggacaacggccgcctgcgtgacgaaaccgcacggcatcgtttgcaagccgcgcagcaactggccgagcgactgggcggggaggtggtactgctgcgtgctggcgaagtggcccgtacgctgatccagcatgctgtcgagcggcgggccagcctggtgctggtcgggcagtcccgcaaccgcctgcgtaggcgtttgttcggcgcgggtgtggcggcgcggctgctgcgcgaaagccgtggcctggaaatcaacgtgctggaccgcgacgtgcagccgccagcgccgcgttcagccgtgcggcgggtgtgggtgtggcgtcattacctgcttgcgctgctggccaccgtgatggctgcgggtctggcctgggcggtgtccagtgtgctcgcgttgcccaatatctcgctggtgttcctggcggcggtgttgctggtcgcggtgcgcagtagcctgggacctgcgctggcttgcgccgcgctgtcgttcctggtctatgacttcctgttcataccgcccaacttctcgttcaccatccagcgcgaagaagacgtgctgacactggtgttctttctgttgatggctgcgcttaccggcaacctggccgcgcgccagcgtcgccagttgcaggcgctgcgcgagacccaggcacagaccagccagttgctcgacctgtctcgccggttgacggtagccaccgaccgccaagccatattcaaggctgccggccagcacctggacgggtggcaggacgcccaggtgtgcttgctggagcgcaacgccgaaggccagttgcaagtggccagcggggaagcctgcaccttcagcgacaccgaacgggcggctgccgattgggcctggcagcatgggcaggccgccggtcacggcagcgataccctgcctaatggccgctggtggtggtggccattggcggtagacgatcagccgctggcgctgctgggtgtgcgcccgcgcaacgggcagccgctcagcgacccacgccggcgcctgctcaccgccctaggccagcccctggcccaggccctggcccgcgcacgcctggctgaacagctggaagccgcacgcctgcacggcgaaaccgagcaactgcgcagcgccctgctggcttccgtatcccatgacttgcgcacgccgttgaccgccatgcgtggcagcatcgacagcctgttggcgttgggcgatgcgatcccggctgaagaccgccgcgagctgctggagggcacccgtaacgaagccgaacgcctcgatcgctacatccagaacctgctggacatgacccgcctgggccatggcggcctcaagctggcccgcgactgggtggccccggcggatatcgtcggcagtgcgctcaaccgcctgcgggtggtgctggcgccgctgcgtgtgcacacggacgtgccgaccgagctgccattgctgttcgtgcatgcggcgttgatcgagcaggcactggtcaacgtgctggaaaacgccgcacgcttttcgccggccaatggtcggcttgagctgcaggtggcggtgcatgacgaccaactgcgcttgaccgtcagcgaccagggccccggcattcctgaagccgaccgcgagaaaatcttcgatatgttctacaccgccgcccgtggcgaccgcggcgggcagggtaccgggctgggcctggctatctgccagggcatgatcggtgcccatggcgggcagattctggtgggcgaaggcattgatggccaaggcaccagcatcactctatgcttgccgctgcctcctcaacctgaagccgaaagcgaaaccccatga

SEQ ID NO: 93711 - protein, 884 aa, Pseudomonas putida KT2440
MSDSARADALLANLPRTGRGRLKVFLGAAPGVGKTFAMLQAAHAQQRQGVQVLAGVVETHGRAETEALLGGLHQQPLLRSQYRGVTLEEMDLDGLLRAAPALALVDELAHTNAPGSRHAKRWQDVQELLAAGIDVYTTVNVQHLESLNDKVRDITGVQVRETLPDWVLQEAFELVLIDLPPRELLERLREGKVYVPEQARAAIDAYFSQTNLTALRELAMQTAAAQVDADLAHGYRQRGQEAPALRGRLLVGIDGDDQAERLVRHASRVAQRRHLPWSLVHVDNGRLRDETARHRLQAAQQLAERLGGEVVLLRAGEVARTLIQHAVERRASLVLVGQSRNRLRRRLFGAGVAARLLRESRGLEINVLDRDVQPPAPRSAVRRVWVWRHYLLALLATVMAAGLAWAVSSVLALPNISLVFLAAVLLVAVRSSLGPALACAALSFLVYDFLFIPPNFSFTIQREEDVLTLVFFLLMAALTGNLAARQRRQLQALRETQAQTSQLLDLSRRLTVATDRQAIFKAAGQHLDGWQDAQVCLLERNAEGQLQVASGEACTFSDTERAAADWAWQHGQAAGHGSDTLPNGRWWWWPLAVDDQPLALLGVRPRNGQPLSDPRRRLLTALGQPLAQALARARLAEQLEAARLHGETEQLRSALLASVSHDLRTPLTAMRGSIDSLLALGDAIPAEDRRELLEGTRNEAERLDRYIQNLLDMTRLGHGGLKLARDWVAPADIVGSALNRLRVVLAPLRVHTDVPTELPLLFVHAALIEQALVNVLENAARFSPANGRLELQVAVHDDQLRLTVSDQGPGIPEADREKIFDMFYTAARGDRGGQGTGLGLAICQGMIGAHGGQILVGEGIDGQGTSITLCLPLPPQPEAESETP

SEQ ID NO: 93712 - DNA, 2688 bp, Escherichia coli CFT073
  CDS (1)..(2688): transl_table=11
ttgatgaataacgaacccttacgtcccgaccccgatcgtctgctggaacaagctgccgcgccgcatcgggggaagctgaaagtattcttcggtgcctgcgcaggcgtcgggaagacctgggcgatgctggcggaagcccagcgactgcgggcgcaagggctggatattgtggttggcgtggtagaaacccacggtcggaaagataccgccgccatgctgaaaggtctggctgttctgccgttaaaacgccaggcgtaccgtgggcggcacatcagcgagtttgatctcgatgccgccctcgcccgccgtccggcactgatcttaatggacgaactggcgcacagtaatgcgccaggttcacgtcatcctaaacgctggcaggacatcgaagagctgctggaagctggcattgatgttttcactaccgtcaacgttcagcatctggaaagtctgaatgatgtggtcagcggcgtcaccggaattcaggtacgggagaccgtgcccgatcctttttttgatgccgccgacgacgtagtactggtggacttgcccccggacgatctgcgccagcgactgaaagaaggcaaagtctatattgccgggcaggcggagcgcgccattgaacattttttccgcaaaggtaatctgatcgccctgcgcgaactggcactgcgccgtactgccgatcgcgtagatgagcaaatgcgcgcctggcgggggcatcctggcgaagagaaagtctggcacacacgcgacgcgatccttttatgcatcgggcataacaccggcagtgagaaactggtccgcacggcggcgcggttggcctcgcgcctgggcagtgtctggcacgcggtgtatgttgaaacccctgccctgcatcgcttaccggagaaaaaacgtcgggcaattctcagcgccttacgtctggcgcaggagctgggcgcggagacggcaacactttctgatccagcggaagagaaagcggtagtgcgttatgcccgtgaacataatctcggcaagattattctcggtcgcccggcttcgcgccgctggtggcgtcgggaaacatttgctgaccggctggcacgcatcgcccccgatctcgatcaggtgctggtcgcgcttgatgaaccacccgcccgcacgattaacaacgcgccggatagccgctcttttaaagacaagtggcgggtacagattcagggatgcgtggttgccgccgcgttatgcgccgttatcaccttaattgccatgcagtggctgatggcgtttgatgccgccaacctggtgatgctgtatctgcttggcgtcgtggtggtggcactattttacggacgctggccttcggtggttgccaccgtcattaatgtggtgagtttcgatctcttttttatcgccccacgcggcacgctcgccgtctctgatgtgcaatatctgctgaccttcgcggtgatgttaaccgtcgggctggtgatcgggaaccttactgctggcgtgcgttatcaggcgcgggtagcccgttaccgcgaacaacgcacacggcacttatatgaaatgtccaaagctctggctgtgggccgtagttcgcaggatatcgccgccaccagcgaacagtttattgcctccacgtttcatgcccgtagccaggtgttgctgcctgatgacaacggtaaattgcagcctttaacacatccgcaaggaatgacgccgtgggacgatgccatcgcgcagtggagttttgataaaggcctgcctgcgggcgcgggcaccgacacgttacccggtgtaccgtaccagattttgccgctaaaaagcggcgagaaaacctacggactggtggtggtggaaccggggaatctgcgccagttgatgatcccggaacagcagcgcctgctggagacgtttacgctgttagtcgccaatgcccttgagcgactgacactaaccgccagcgaagaacaggcgcggatggcaagcgaacgtgaacagatccgcaacgccctgctggcggcgctttcgcatgatttacgcacgccgcttacggtgctgttcggtcaggcagaaatcttaacgctcgatctggcaagcgaaggatcgccccacgcccgccaggccagcgagattcgtcagcatgtgctgaacaccacccgactggtgaataatctactggatatggcgcgaattcagtccggcggctttaatttgaagaaagagtggttaacgctggaagaagtggtcggcagcgcgctgcaaatgctggaaccgggtttatcgtcgcccatcaatctttctctgccagagccgctgaccttaatccacgttgacgggccactctttgaacgggtgctgattaacctgctagagaacgcggtgaaatatgcgggggcgcaggccgaaattggtatcaatgcccacgttgagggcgaaaatctacaactggatgtctgggataacggccccggtcttccaccaggccaggagcagacgatatttgataagtttgctcgcgggaataaagagtcggcggtaccgggtgtagggcttgggttggcaatttgtcgggcgatagtggatgtacacggcggcaccattaccgcattcaaccgaccggaaggtggtgcctgttttcgtgttacacttccccagcaaacagcccctgaacttgaagaatttcatgaggatatgtga

SEQ ID NO: 93713 - protein, 895 aa, Escherichia coli CFT073
MMNNEPLRPDPDRLLEQAAAPHRGKLKVFFGACAGVGKTWAMLAEAQRLRAQGLDIVVGVVETHGRKDTAAMLKGLAVLPLKRQAYRGRHISEFDLDAALARRPALILMDELAHSNAPGSRHPKRWQDIEELLEAGIDVFTTVNVQHLESLNDVVSGVTGIQVRETVPDPFFDAADDVVLVDLPPDDLRQRLKEGKVYIAGQAERAIEHFFRKGNLIALRELALRRTADRVDEQMRAWRGHPGEEKVWHTRDAILLCIGHNTGSEKLVRTAARLASRLGSVWHAVYVETPALHRLPEKKRRAILSALRLAQELGAETATLSDPAEEKAVVRYAREHNLGKIILGRPASRRWWRRETFADRLARIAPDLDQVLVALDEPPARTINNAPDSRSFKDKWRVQIQGCVVAAALCAVITLIAMQWLMAFDAANLVMLYLLGVVVVALFYGRWPSVVATVINVVSFDLFFIAPRGTLAVSDVQYLLTFAVMLTVGLVIGNLTAGVRYQARVARYREQRTRHLYEMSKALAVGRSSQDIAATSEQFIASTFHARSQVLLPDDNGKLQPLTHPQGMTPWDDAIAQWSFDKGLPAGAGTDTLPGVPYQILPLKSGEKTYGLVVVEPGNLRQLMIPEQQRLLETFTLLVANALERLTLTASEEQARMASEREQIRNALLAALSHDLRTPLTVLFGQAEILTLDLASEGSPHARQASEIRQHVLNTTRLVNNLLDMARIQSGGFNLKKEWLTLEEVVGSALQMLEPGLSSPINLSLPEPLTLIHVDGPLFERVLINLLENAVKYAGAQAEIGINAHVEGENLQLDVWDNGPGLPPGQEQTIFDKFARGNKESAVPGVGLGLAICRAIVDVHGGTITAFNRPEGGACFRVTLPQQTAPELEEFHEDM

SEQ ID NO: 93714 - DNA, 2724 bp, Bradyrhizobium japonicum USDA 110
  CDS (1)..(2724): transl_table=11
atggtccgagagcgccgcgattccgaacaacgtccgtctcccgaggcactgctggaagccgcgcgccgggaggaaagcgcgagcggcaagctgaagattttcgtcggcgcggccccgggcgtcggcaagacctacgagatgctgcaaagcgcccatgccaagcgcaaggccggcatcgacgtcgtggtcggcttcgtcgagacccatggccgcgccgagaccgaggcgctggtgcgggggctcgaagtcgtcccgcgcaagaggctcgactaccgcggccagacgatcgaggagatggacctcgacgccgtgatcgcgcgccggccgcaaatcgcgctggtcgacgagctcgcccacaccaacgcggccggcagccgccatcccaagcgctatctcgacgtcgaggagctgctctcccacggcatcgacgtctacaccgccgtcaacatccagcacaccgagagcctgaacgacgtcgtcgcccagatcacccatgtccgggtgcgcgagacggtgccggactcggtgttcgaccgcgcggatgcgatcgagctgatcgacctcacgcccgacgacctgatccagcggctcagagaaggcaaggtttacgtccccaggcaggccgagcgggcgctggagcattatttctcgccgggcaatctgaccgcgctgcgcgagctcgctttgcggcggacagccgaacgggtcgacgagcagctcctcacccacatgcaggcgaacgccatcgccggcccctgggccgcgggcgagcgtattctcgtctgcgtcagcgaggatccgcgcgccgccggcctcgtgcgctacaccaagcggctggccgaccggctgcatgcgccgtttaccgcgatttcgatcgagacgcggcgctccctccagctttccgatgacgagcgcgaccggctcgccgacacgctgcggctcgccgaagccttgggcggcgaggcactgacgattcccgcggtcggccgccgcatcgccgacgacgtcgtcaatttcgcgcagggcaacaacgtcacccagatcgtgatcggaaagtcgacgcgctcgcgctggttcgagatcacgcgcggctcggtcgtgcatgacctggtgcgccgtgccggcaatatcacggttcatgtcatcgccggcgacgatgtgccgggcgaggcggcgcccaagaccgcggtgcagaccgcggcgcggacggagccgttcgatccgctgccctatctgaaggcgctcggcatcgtgctgatcggcctcggcgctgccgagctgattcagccgaggttcggcatcgagaacgtggacctcgtgctgctcacggccgtggtggcggtcgcggtccgctatggcctgtggccgtcgctgctcgccaccgtcgcggcctcgctgtcctataatttcttcttcctgccgccgatctacaccttcacgatcaccgatccgaccaacgtcgccgcctttgtcctgttcatggtggtggcgatgatcgtctccaatgtcgccgcgcgcgtgcgcacgcaggccgacaccgcgatcggccggatcaggaccaccgagcagctctatgctttcagccgcaagcttgccggcaccgccacgctcgacgacgtcttgtgggcgacggcctatcagatcgcgctgatgctgaaggtgcgcgtggtgctgttgctgccggaggatgggctgctcacggtgaagtccggctatccgccggaggaccagctcgaccaggcggaccttgccgccgccaactgggcctggagcaatgatcgcccagccggtcgcggctcggacacgctgccgggtgcgaaacggctgttcctgccgatgcgcaccggccgcggcccgatcggggtgatcggcatcgacaacgaccgtaccggcccgttgctgacgccggaccagcgccggctgctggacgcgctggtcgaccagggcgcgctcgcgatcgagcgcgtgctgctggtcgaggacatggaccgcgtcaagcgcaccgtcgaatccgagcggctgcgctcggcactgctgacgtcgatttcgcatgacctcaagacgccgctcgcctccgtgttgggggccgcctccacgatgcgcgatctggcaggtgccttgtccgacaccgagaagcgcgacctgctggccaccgtgatcgacgagtccgagcgactcaaccgtttcatcgccaatctgctcgacatgacgaagctcgaatccggcgccatcgtgcccaacacggcgctgcatgatcttagtgagatcgtcggcagcgcactccggcgggcagccaagatcctcacggcgcacaaggtggagctggtgctggccgccgatctgccgatgctccagctggatgccgtgttgttcgagcaggtgctgttcaacctgctcgacaacgccgcgaagtattcgccggcggagacgacgatctcgatcaagagccagcgcgagcgagatcaagtggtgctccagatcgccgacgaggggagcggtattccgccggacgaggtcgagagcgtgttcgacaagttctatcgcgtgcagaagggcgatcacgttcgtcccggcaccgggctcgggctcgccatttcccgcggcttcgtcgaggcaatgcatggcacgatctcggccgccaaccgcagcgaccggagcggcgcggtcctcaccatccgtttgcccgttccggcacagacccacgcattggataccgccgcatga

SEQ ID NO: 93715 - protein, 907 aa, Bradyrhizobium japonicum USDA 110
MVRERRDSEQRPSPEALLEAARREESASGKLKIFVGAAPGVGKTYEMLQSAHAKRKAGIDVVVGFVETHGRAETEALVRGLEVVPRKRLDYRGQTIEEMDLDAVIARRPQIALVDELAHTNAAGSRHPKRYLDVEELLSHGIDVYTAVNIQHTESLNDVVAQITHVRVRETVPDSVFDRADAIELIDLTPDDLIQRLREGKVYVPRQAERALEHYFSPGNLTALRELALRRTAERVDEQLLTHMQANAIAGPWAAGERILVCVSEDPRAAGLVRYTKRLADRLHAPFTAISIETRRSLQLSDDERDRLADTLRLAEALGGEALTIPAVGRRIADDVVNFAQGNNVTQIVIGKSTRSRWFEITRGSVVHDLVRRAGNITVHVIAGDDVPGEAAPKTAVQTAARTEPFDPLPYLKALGIVLIGLGAAELIQPRFGIENVDLVLLTAVVAVAVRYGLWPSLLATVAASLSYNFFFLPPIYTFTITDPTNVAAFVLFMVVAMIVSNVAARVRTQADTAIGRIRTTEQLYAFSRKLAGTATLDDVLWATAYQIALMLKVRVVLLLPEDGLLTVKSGYPPEDQLDQADLAAANWAWSNDRPAGRGSDTLPGAKRLFLPMRTGRGPIGVIGIDNDRTGPLLTPDQRRLLDALVDQGALAIERVLLVEDMDRVKRTVESERLRSALLTSISHDLKTPLASVLGAASTMRDLAGALSDTEKRDLLATVIDESERLNRFIANLLDMTKLESGAIVPNTALHDLSEIVGSALRRAAKILTAHKVELVLAADLPMLQLDAVLFEQVLFNLLDNAAKYSPAETTISIKSQRERDQVVLQIADEGSGIPPDEVESVFDKFYRVQKGDHVRPGTGLGLAISRGFVEAMHGTISAANRSDRSGAVLTIRLPVPAQTHALDTAA

SEQ ID NO: 93716 - DNA, 2685 bp, Salmonella enterica subsp. enterica serovar Typhi Ty2
  CDS (1)..(2685): transl_table=11
atgaacgacgaacccttgcgtcctgatccggatcgcttgttggaacaaacgcccccgccccaccgggggaagttaaaaattttcttcggcgcctgcgcaggcgtcggaaaaacctgggcgatgctggcgcaagcgcagcggctgcgagcgcaggggctggatgtggtgatcggcgtggtagagacgcacggccgtaaagagaccgccgcgctacttgacgggctgaccattctgccgccaaaacgtcactcgcaccgggggcggcaaattcgcgaatttgacctggatgccgccctcgcccggcgtccggcgctgattttaatggatgagctggcgcacagtaacgcgcctggctcacgccatcctaagcgctggcaggatattgaagagctgctggaagcgggaatcgacgttttcaccaccgtgaacgtacaacatctggaaagtctgaatgatgtggtgagcggcgtcacggggattcaggtgcgcgagaccgtccccgatcccttttttgatgccgctgatgaagtcgtactggtcgatctgccgcccgacgatctgcgccaacggctcaacgaaggtaaagtgtatatcgccggtcaggcggaacgcgctattgaacattttttccgcaagggcaatctgatcgccctccgcgagctggcgctacgccggacagccgatcgcgtggacgatcagatgcgcgcctggcgcgcgcatccgggcgaagaaaaagtatggcatacccgcgatgcgattttactgtgtatcgggcataacactggcagcgaaaaactggtgcgtaccgcggcgcgtctggcctcccggctcggcagcgtctggcacgccgtctatgtcgaaacgccaacgttacaccgcttaccggaaaaacaacggcgggctattttaagcgcgctgcgcctggcgcaggagcttggcgcggaaaccgccaccctgtccgatcccgccgaagagaaagcggtcgtgcgctatgcccgcgagcataatctggggaaaatcgtcatgggccgcccggcgtcgcgacgctggtggcgacgtgacgctttcgccgaccgtcttgccaggcgcgcgccggatctcgatcaggtaatcgtcgcgctggaagagccgccagcgcgcgcgttggcgcaaacgcctgataaccgaccttttaaagagaaatggcgtggacagattcagggctgtctggtcgccgtggcgctttgcgccataaccacgtttatcgctatgcagtggcttgtcaccttcgacgccgccaatctggtgatgctctatttgctgggcgtagtggtgattgcgctgctttacggacgctggccgtcggtggtggcgacggtgattaacgtggcgagtttcgatctcttttttatcgcaccacgcggtacgctcgccgtttcggacgtgcagtatttgctgacctttgccgtgatgctgacggttggtctggtgattggcaatcttactgccggggtgcgctatcaggcgcgcgtcgcccgttatcgggaacagcgtacccgccatttatatgaaatgtctaaagcgctggccgtcgggcgtagcgaacatgatatcgccgcgaccagcgagcggtttatcgcctcgacgtttcaggcgcgcagccaaattttattacctgatactaacggtaagttgctgcctctcacccaccagcaaggcatgacgccgtgggacgacgcaattgcgcgctggagttttgataaaggccagcctgccggcgcaggcaccgatacccttcctggcgtgccttatcaaatcctgccgctgaaaagcgccgataaaacgtacggtctggctatcgtcgaaccgggtaatttgcgtcagttaatggtgccggagcagcaacgcctgctggaaacattcactctgcttgtcgccaacgcgctggaacgactgacgctgaccgccagcgaagaacaggcgcgtctcgccagcgagcgcgaaagtattcgcaacgctctgctggcggctctgtcgcatgatttacgcacgccgctgacggtattgttcggccaggcggaaattttgacgctggatttagccagcgcaggatcgccccacgcgcgtcaggccagtgaaatccgccagcatattctcaacaccacccggctggtgaataatttgctggatatggcgcgtattcagtccggcgggtttaatcttaaaaaagagtggctgacgctggaagaggtcgtcggtagcgcgttacagatgttagagccgggtttattgcatccgattacattgtcgctgccgcaacagttaacgcttatccatgtcgatggccccttatttgagcgtgtcctgatcaacttgctggaaaacgccgttaagtacgccgggccgcaggccagtatcggcattgatgctgcggttaaggacaatcgtttacaactggatgtctgggataatgggccgggtattcctgcggggcaagaacagaagattttcgataagttcgcccgcggcaacaaagagtccgccgtccccggcgtggggctggggctggcgatttgccatgctatcgtagaggtacacggcggcacgcttaccgcctataatcgaccgcagggcggcgcctgtttccgtgtgacgctgccgcaaggaaagccacctgaacttgacgattttcatgaggatatgtga

SEQ ID NO: 93717 - protein, 894 aa, Salmonella enterica subsp. enterica serovar Typhi Ty2
MNDEPLRPDPDRLLEQTPPPHRGKLKIFFGACAGVGKTWAMLAQAQRLRAQGLDVVIGVVETHGRKETAALLDGLTILPPKRHSHRGRQIREFDLDAALARRPALILMDELAHSNAPGSRHPKRWQDIEELLEAGIDVFTTVNVQHLESLNDVVSGVTGIQVRETVPDPFFDAADEVVLVDLPPDDLRQRLNEGKVYIAGQAERAIEHFFRKGNLIALRELALRRTADRVDDQMRAWRAHPGEEKVWHTRDAILLCIGHNTGSEKLVRTAARLASRLGSVWHAVYVETPTLHRLPEKQRRAILSALRLAQELGAETATLSDPAEEKAVVRYAREHNLGKIVMGRPASRRWWRRDAFADRLARRAPDLDQVIVALEEPPARALAQTPDNRPFKEKWRGQIQGCLVAVALCAITTFIAMQWLVTFDAANLVMLYLLGVVVIALLYGRWPSVVATVINVASFDLFFIAPRGTLAVSDVQYLLTFAVMLTVGLVIGNLTAGVRYQARVARYREQRTRHLYEMSKALAVGRSEHDIAATSERFIASTFQARSQILLPDTNGKLLPLTHQQGMTPWDDAIARWSFDKGQPAGAGTDTLPGVPYQILPLKSADKTYGLAIVEPGNLRQLMVPEQQRLLETFTLLVANALERLTLTASEEQARLASERESIRNALLAALSHDLRTPLTVLFGQAEILTLDLASAGSPHARQASEIRQHILNTTRLVNNLLDMARIQSGGFNLKKEWLTLEEVVGSALQMLEPGLLHPITLSLPQQLTLIHVDGPLFERVLINLLENAVKYAGPQASIGIDAAVKDNRLQLDVWDNGPGIPAGQEQKIFDKFARGNKESAVPGVGLGLAICHAIVEVHGGTLTAYNRPQGGACFRVTLPQGKPPELDDFHEDM

SEQ ID NO: 93718 - DNA, 2553 bp, Enterococcus faecalis V583
  CDS (1)..(2553): transl_table=11
atgcaatctggcgatggacgccgaggtcgattgcggatattttttggatttgcggctggtgttgggaaaacctacggtatgttgacagaggctcatgaattattgatgatgggaaaacatgttgttgtcggctatatcgaacctcatgatcgtccagataccaatcgattattagaaggattaccgcaaattcctcctaagaatattttttataaacaaatggttttaacagagccggatattgatcaaatcattcaacagaagcccgaaatcgtgttgattgatgaactggctcattccaatgcggaaggttctcgaaatcgtaaacgataccaggatattgatgaactgttgaatgcaggaatcgatgtttttactacggtcaatgttcaacatatcgaaagtttgaatgatatcgttgaagaagttaccggaattgaggtcaaggaaacggtgccggacacttttctacggcaagcgacaataagagtgattgatgtggagcccgatgagctgatcgaacgacttgaacaaggaaaaatatatgcgaatgaaaacgcgaaacgtgccttgaaaaatttttttattccacaaaaattggaccaattacgtggattagcaattcagcgagcgtcggatcatattaatcgaattagtggaaagacaattgggatacaaagtaaattattgacggtggtgaacgatgcctttccaaaaatgaccgaaaaatgtattcgctggacagcacgtttagcgcaaggtctagttgtcgattggacagtgattcaagttcgtacgcaagaaaatacaccaacgaacattcctttagccgataaattaggtgcggaggttattagtattgaagaggatgatagttttgagacgattgtcgagttcgcaaaaatgacgggtgttactgatattattatggggaaaaatctaaggcagccgtggtatgaaaaaatctttattgaagcgtttgatgatcgcttgttaaaacgattgaaagatacggaacttcatttaattcctttcaatgaagaaaagcggtctttattttttaagactcgtaaagtcattgagggtggcggaaaagatttagtgattgcaattggtggtgtttttctagcgacggtcgtgacggaattgatgcaatatatccacgttggcgatcaaaatctgatgcttatttatatttcattcgtattattagtcgctcgaacgacatccggttatttttggagctcattatcctctattttaagtgttttgtcttttaactggttttttgtcgaaccattatattctctgacagtatataaacagggatatccttttactttattgctcatgctagttgttgccctgatgagcagtaatttaatgattcgattaaagaaacaagcagatacttctatgaaaaaagagcaccaaatggaaattttgtacgaattgaacaaacgatatgttttagtggaaagtcgaaaacaaattcttgatatttctgccacttatttatcaagattattggaacgagaagtgattatttttgatcgtcaagtgaagacagagagtgttcattgtatcaacgaaaaaaaatcaatattaaataatgaagacgaagcagctgtagccttttgggcagcaaagaaccaaaaagaagctgggaatggtacagacacactaaatggagctaaaggattctatttgccgattgctgcaggcaggaagacgttggcggtattaggcattgaacgaaatgcagatcttgatttggaaaatgatcagctcaattacttaaaattggtgctgactcaaattgcggtcatcttggaacaaacagaattgaaagatgagaaagagcaagttgagttagaaaatgaacgggaaaaagtccgcagcaatttattacgagccgtatctcatgatctgagaacaccattaactgttatctcagggattgctgaaacattaggcattggaaatgatttaaaagaagagacacagcgaaaattattaaaggatattcaagaagagtcacaatggctgattcggatggttgaaaatcttttatccatcacgcgaatcaacatggatactatgaaggttaataaaactgctgaaccagtagaagaggtcatcgaggctgtttataagcatttgaggaaggtctatccagacggccaagtggatattcacctgccagaagaggtcatttttattcaagcggaccccattttgattgaacaagcgttgtttaatctgatagaaaatgcgtttcgtcatggagaaaatgatctaccagtcaaactaaacgtctatcaggaaaaagaacaaacagtttttgaaattgaaaatcacggcgaaattccattaaaacaatttcaaaagatccaatcaaacttgtccggcacaaatgaagtaccggttgactcaaaaaatggtttaggaatcggattgagtattgtaaaaacaatcgtccatgcgcacaatggtaaaatggaaatgacgataggtaggggcaaaacattggttcgaatttatttgaagtga

SEQ ID NO: 93719 - protein, 850 aa, Enterococcus faecalis V583
MQSGDGRRGRLRIFFGFAAGVGKTYGMLTEAHELLMMGKHVVVGYIEPHDRPDTNRLLEGLPQIPPKNIFYKQMVLTEPDIDQIIQQKPEIVLIDELAHSNAEGSRNRKRYQDIDELLNAGIDVFTTVNVQHIESLNDIVEEVTGIEVKETVPDTFLRQATIRVIDVEPDELIERLEQGKIYANENAKRALKNFFIPQKLDQLRGLAIQRASDHINRISGKTIGIQSKLLTVVNDAFPKMTEKCIRWTARLAQGLVVDWTVIQVRTQENTPTNIPLADKLGAEVISIEEDDSFETIVEFAKMTGVTDIIMGKNLRQPWYEKIFIEAFDDRLLKRLKDTELHLIPFNEEKRSLFFKTRKVIEGGGKDLVIAIGGVFLATVVTELMQYIHVGDQNLMLIYISFVLLVARTTSGYFWSSLSSILSVLSFNWFFVEPLYSLTVYKQGYPFTLLLMLVVALMSSNLMIRLKKQADTSMKKEHQMEILYELNKRYVLVESRKQILDISATYLSRLLEREVIIFDRQVKTESVHCINEKKSILNNEDEAAVAFWAAKNQKEAGNGTDTLNGAKGFYLPIAAGRKTLAVLGIERNADLDLENDQLNYLKLVLTQIAVILEQTELKDEKEQVELENEREKVRSNLLRAVSHDLRTPLTVISGIAETLGIGNDLKEETQRKLLKDIQEESQWLIRMVENLLSITRINMDTMKVNKTAEPVEEVIEAVYKHLRKVYPDGQVDIHLPEEVIFIQADPILIEQALFNLIENAFRHGENDLPVKLNVYQEKEQTVFEIENHGEIPLKQFQKIQSNLSGTNEVPVDSKNGLGIGLSIVKTIVHAHNGKMEMTIGRGKTLVRIYLK

SEQ ID NO: 93720 - DNA, 2583 bp, Mycobacterium bovis AF2122/97
  CDS (1)..(2583): transl_table=11
gtgacgttgctcttcgccgatctttgcgcgatctttacgccctaccggtggatgattgagcatgtgaccaccaagcgcgggcagctgcggatctatctgggcgcggcccccggcgtgggcaaaacctacgccatgctcggcgaggcgcaccgcaggctggagcgcggcaccgacgtggtcgccgcggtcgtcgagacacacggacgcaacaagaccgcgaaactgctcgagggcatcgagatgatcccgccgcgctacgtcgaatatcggggtgccaggtttcccgaactcgatgtggaggcagtactgcgacgtcatcctcaggtggtgctggtggacgaactcgcccacaccaacacacctggcagcaagaaccccaagcgctggcaggacgttcaggaaatcctcgacgccggcatcacggtgatctcgacggtcaacatccagcacttggagggcctaaacgatgtcgtggagcaaatcaccggcatcgagcagaaggagaagatccccgacgagatcgtccgcgcggccgatcaggtcgagctggtcgacatcacaccggaagcgttgcggcgcaggcttgctcacggcaacgtctatgcagccgaacgggtcgatgccgcgctgtcgaactacttccgcacgggcaatctgaccgcgctgcgcgagatcgcgttgctgtggctggccgaccaagttgatgcggccctggagaagtaccgcgcagacaaaaagatcaccgccacgtgggaggcgcgggaacgcgtcgtcgtcgccgtgaccggcggcccggagtcggagacgttggtgcgacgggcatcgcggatcgcgtcgaagtccagcgccgagctgatggtggttcacgttatccgtggcgacgacctggcgggggtgtccgcgccgcagctgggcagggtccgcgagctggcgacaagcctcggtgcgaccatgcacaccgtggtcggcgacgacgtgcccaccgcgctgctggacttcgcccgcgagatgaacgccacgcagctcgtcgtcggcacatcgcggcgatcgcgatgggcacgcctgtttgacgaggggatcggcgcccgcaccgtccaggagtccggcggcatcgacgttcacatggtcacccatcccgcggccagccgggcctccgggtggtcgcgggtctccccgcgcgagcggcatatcgcgtcgtggctggccgcgctggtggtgccctcggtgatctgcgccatcacggtggcctggctcgaccgattcatgggcatcggcggcgagagcgcgttgttcttcatcggcgtgctgatcgtggcgttgctgggcggcgtcgcccccgccgcattgtcggccttgctgtcgggcatgctgctgaactactttctgaccgagccccgctacacctggaccatcgccgaaccggacgccgcagtaaccgaattcgtgttgttggcgatggccgttgcggtggcggtgttggtggacggcgcggctagccgaacccgtgaggctcggcgcgcatcccaggaggctgagttgctggccctgtttgccggttcggtgttgcgcggcgcagaccttgccacgctgctgcagcgggtccgcgaaacgtattcccaacgggccgtgaccatgctgcgtgtccggcagggcgcatcgacaggcgaaaccgtcgcgtgcgtcgggacaaacccgtgtcgggacgtcgactccgccgacaccgcaatcgaagtcggcgacgacgagttttggatgctgatggcaggccgcaagttggccgcccgcgaccgccgagtgctgaccgcggtcgcgacacaggccgcgggtctggtgaagcagcgcgagctggcggaagaggccggccaggccgaggccatcgctagggccgatgagctgcgccggtcgctgctgtcggcggtcagccacgacctgcgcaccccgctggcggcggccaaggttgcggtgtccagcttgcgcaccgaagacgtcgctttctcccccgaggataccgccgagctgttggccaccatcgaggagtccatcgaccaactcaccgccctggtcgcaaacctgctcgattcgtcgcggttggctgccggcgtgattcgcccccagctgcgccgggcatacctggaagaagcggtgcaacgggccttggtcagcatcggcaagggcgccaccggtttttaccgatccggcatcgaccgggtcaaggtcgacgtgggagacgccgtggcgatggccgacgccgggttgctggagcgggtgctagccaacctgatcgacaacgcgctgcgatatgcgcccgactgcgtggtccgggtcaacgcgggacgggtgcgtgagcgggtcctgattaatgtcatcgacgagggcccaggggtcccgcgcgggaccgaggagcaactctttgccccgttccagcggccgggggatcacgacaacaccaccggtgtcggtctggggatgtcggtggcacgcggcttcgtcgaggctatgggcggcacgatttcggctaccgataccccgggcggcgggctcacagtggtgatcgatctagcggctcccgaggaccgcccatga

SEQ ID NO: 93721 - protein, 860 aa, Mycobacterium bovis AF2122/97
MTLLFADLCAIFTPYRWMIEHVTTKRGQLRIYLGAAPGVGKTYAMLGEAHRRLERGTDVVAAVVETHGRNKTAKLLEGIEMIPPRYVEYRGARFPELDVEAVLRRHPQVVLVDELAHTNTPGSKNPKRWQDVQEILDAGITVISTVNIQHLEGLNDVVEQITGIEQKEKIPDEIVRAADQVELVDITPEALRRRLAHGNVYAAERVDAALSNYFRTGNLTALREIALLWLADQVDAALEKYRADKKITATWEARERVVVAVTGGPESETLVRRASRIASKSSAELMVVHVIRGDDLAGVSAPQLGRVRELATSLGATMHTVVGDDVPTALLDFAREMNATQLVVGTSRRSRWARLFDEGIGARTVQESGGIDVHMVTHPAASRASGWSRVSPRERHIASWLAALVVPSVICAITVAWLDRFMGIGGESALFFIGVLIVALLGGVAPAALSALLSGMLLNYFLTEPRYTWTIAEPDAAVTEFVLLAMAVAVAVLVDGAASRTREARRASQEAELLALFAGSVLRGADLATLLQRVRETYSQRAVTMLRVRQGASTGETVACVGTNPCRDVDSADTAIEVGDDEFWMLMAGRKLAARDRRVLTAVATQAAGLVKQRELAEEAGQAEAIARADELRRSLLSAVSHDLRTPLAAAKVAVSSLRTEDVAFSPEDTAELLATIEESIDQLTALVANLLDSSRLAAGVIRPQLRRAYLEEAVQRALVSIGKGATGFYRSGIDRVKVDVGDAVAMADAGLLERVLANLIDNALRYAPDCVVRVNAGRVRERVLINVIDEGPGVPRGTEEQLFAPFQRPGDHDNTTGVGLGMSVARGFVEAMGGTISATDTPGGGLTVVIDLAAPEDRP

SEQ ID NO: 93722 - DNA, 2715 bp, Bordetella pertussis Tohama I
  CDS (1)..(2715): transl_table=11
atggccgaccccggcaacgaccgcctcgaccccgaccgcctgctccagaccctggagcaggcgcagtccgacgcccggcgcgggcggctgcgcatctacttcggcgcctgcgccggcgtaggcaagacctatgccatgctggccgcggcgcgcgcccaggccgcgcagggcgtggatgtcgtggcggggctggtcgaaacccacggccgcgccgacaccgccgcgctgctcgatacgctgccggccctgcccctgcagacgctcgacttccagggacgccgcctgcgcgaattcgacctgcaggccaccgtggcgcgccggccccgcctgctgctgctcgacgaactggcgcacaccaacgcgcccggggcgcgccacgccaagcgctggcaggacgtcgaggaactgctggcggccggcatcgacgtctggaccaccctcaacgtccagcacctggaaagcctgaacgaggcggtcggcggcatcaccggagtgcgcgtgcgcgaaaccgtgccagactcggtattcgatgccgccgacgagatcatcctggtggacctgtcggccgacgaattgctgcgccgcctgcgcgagggccgggtctatgtgccggaacaggcccgccacgccagccggcacttcttccgcaagggcaatctgatcgccctgcgcgaactggcgctgcgccgcaccgccgaacacgtcgacgacgatgtgcgcgcgtaccgccacgaacgcgcgatcgagccggtctggcgcacgcgcgaggccgtggtcgcctgtatcgacgccgacccgcatgccgagcatgtgctgcgcagcgcgcaccggctggcccagcaactggactgcgagtggcatgccatcaccatcgaggcgccgcgggtcgcgcccctgccgcgcgccggccgggcgcggctggaccaggcgctggcgctggccgagacgctgggcgcgcatgtcgagaccgtggccggcaccgacatggtcgacgccgcgacccgctacatgcgccgccacaacatcaccaaggccgtggtcgggcgcgacgcgtggcgccgccgcggcctgtcgggcctgctggatgccgccctgacgccgggccggctgctgcgccggcgcagcttcgccgatgtcctggcgtcggcctgcccggaagcggacatcgtgagggtcggcgcgccgtcggcggccacggccgcgccacggcgcgacccgcgttcgtggcgcaacgcttccgcgcccgccggccacgccgccgccggcgcctatctgtgggccctggcctattgcgcggcggccaccctggcctcgcgcctggcctttccggttctgcaccagaccaatatcgtcatgatcttcctgctggcggtcgtggcggcggccctgcgccacggacgcgggccggcggcgctggcctcggtggtcagcgtcgcgctgttcgatttcttcttcgtgcagccattggcctcgttcgccgtctcggacgtgcagtacctgctgacgttcgccgtcctgctgacggtcgggctgctgatcggccagctgaccgccggcttgcgccagcaggcccgggccgccgccaggcgcgaggccgatgcgcgcggcctttacgaattcgcgcgggagctgtccgcggccctgcagccggagcaaatcgccggcgcggcctcggcattcctgaacgccgcgttcggcgcccgcggcgccctctacatactgggcctggacgaccggctgcggctggcgcccggcgctggcgacgcggcactcgaacccacgctggcgcaatgggccttcgaccacggccaggcctgcggcgccggcaccgacaccctgtcgaacagccccgtgctgtacctgcccctgcgcgcgcccatgcgggtgcgcggcgtgctggccctgcaccacgccggcccgccgctctacagcgcggcgccggcgcgccgccagctcgacgcctacgccaccctgatcgccatcgccatcgaacggctgcactatgtggaagtcgcccagcaggcgctgctcagtatcgaatccgaacgcctgcgcaacgccctgctggcggcggtctcgcacgatctgcgcacgccgctgaccagcttgctcggcatggccgagaccctgcagcgctcgcccgccgccatgacgccggccgcgctcgaaaccgtggccgccatgcaggaccaggcgcggcgcatgcacgcgctggtcgtcaacctgctggacatggcgcggctgcaaagccacgatgcgccgctgcggcgccaatggcaatcggtcgaggaactggtgggctcggccctggcggccatgaacgccgcgctgcaggatcgccccgtcacggtcgcgccgctttctgccctgccgctggtgaaatgcgatggcatcctgatcgaacgggtgctgtgcaacctgctggaaaatgccgccaaatacacgccgcccggcagtgccatccacatcgacgccctggccgacgcccataccctgcaggtacgggtggccgatgacggggcgggcgtcgcgcaggccgaccgccagcggatcttcgagaaattcgcgcgcggccagcgcgagtcggccccccccccggcgcaggcctcgggctggcggtatgccgcgccatcctggacgcccaccagggccgcatctgggtcgagccggcccggcgcctgcgcggcgcctgcttcgtcttcgcgctgccgctga

SEQ ID NO: 93723 - protein, 904 aa, Bordetella pertussis Tohama I
MADPGNDRLDPDRLLQTLEQAQSDARRGRLRIYFGACAGVGKTYAMLAAARAQAAQGVDVVAGLVETHGRADTAALLDTLPALPLQTLDFQGRRLREFDLQATVARRPRLLLLDELAHTNAPGARHAKRWQDVEELLAAGIDVWTTLNVQHLESLNEAVGGITGVRVRETVPDSVFDAADEIILVDLSADELLRRLREGRVYVPEQARHASRHFFRKGNLIALRELALRRTAEHVDDDVRAYRHERAIEPVWRTREAVVACIDADPHAEHVLRSAHRLAQQLDCEWHAITIEAPRVAPLPRAGRARLDQALALAETLGAHVETVAGTDMVDAATRYMRRHNITKAVVGRDAWRRRGLSGLLDAALTPGRLLRRRSFADVLASACPEADIVRVGAPSAATAAPRRDPRSWRNASAPAGHAAAGAYLWALAYCAAATLASRLAFPVLHQTNIVMIFLLAVVAAALRHGRGPAALASVVSVALFDFFFVQPLASFAVSDVQYLLTFAVLLTVGLLIGQLTAGLRQQARAAARREADARGLYEFARELSAALQPEQIAGAASAFLNAAFGARGALYILGLDDRLRLAPGAGDAALEPTLAQWAFDHGQACGAGTDTLSNSPVLYLPLRAPMRVRGVLALHHAGPPLYSAAPARRQLDAYATLIAIAIERLHYVEVAQQALLSIESERLRNALLAAVSHDLRTPLTSLLGMAETLQRSPAAMTPAALETVAAMQDQARRMHALVVNLLDMARLQSHDAPLRRQWQSVEELVGSALAAMNAALQDRPVTVAPLSALPLVKCDGILIERVLCNLLENAAKYTPPGSAIHIDALADAHTLQVRVADDGAGVAQADRQRIFEKFARGQRESAPPPAQASGWRYAAPSWTPTRAASGSSRPGACAAPASSSRCR

SEQ ID NO: 93724 - DNA, 2796 bp, Bordetella bronchiseptica RB50
  CDS (1)..(2796): transl_table=11
atgcgtgccgcctgcgcgcgacccttcccgacgcgacacacccaccccatggccgaccccggcaacgaccgcctcgaccccgaccgcctgctccagaccctggagcaggcgcagtccgacgcccggcgcgggcggctgcgcatctacttcggcgcctgcgccggcgtaggcaagacctatgccatgctggccgcggcgcgcgcccaggccgcgcagggcgtggatgtcgtggcggggctggtcgaaacccacggccgcgccgacaccgccgcgctgctcgatacgctgccggccctgcccctgcagacgctcgacttccagggacgccgcctgcgcgaattcgacctgcaggccgccgtggcgcgccggccccgcctgctgctgctcgacgaactggcgcacaccaacgcgcccggggcgcgccacgccaagcgctggcaggacgtcgaggaactgctggcggccggcatcgacgtctggaccaccctcaacgtccagcacctggaaagcctgaacgaggcggtcggcggcatcaccggagtgcgcgtgcgcgaaaccgtgccagactcggtattcgatgccgccgacgagatcatcctggtggacctgtcggccgacgaattgctgcgccgcctgcgcgagggccgggtctatgtgccggaacaggcccgccacgccagccggcacttcttccgcaagggcaatctgatcgccctgcgcgaactggcgctgcgccgcaccgccgaacacgtcgacgacgatgtgcgcgcgtaccgccacgaacgcgcgatcgagccggtctggcgcacgcgcgaggccgtggtcgcctgtatcgacgccgacccgcatgccgagcatgtgctgcgcagcgcgcaccggctggcccagcaactggactgcgagtggcatgccatcaccatcgaggcgccgcgggtcgcgcccctgccgcgcgccggccgggcgcggctggaccaggcgctggcgctggccgagacgctgggcgcgcatgtcgagaccgtggccggcaccgacatggtcgacgccgcgacccgctacatgcgccgccacaacatcaccaaggccgtggtcgggcgcgacgcgtggcgccgccgcggcctgtcgggcctgctggatgccgccctgacgccgggccggctgctgcgccggcgcagcttcgccgatgccctggcgtcggcctgcccggaagcggacatcgtgcgggtcggcgcgccgtcggcggccacagccgcgccacggcgcgacccgcgttcgtggcgcaacgcttccgcgcccgccggccacgccgccgccggcgcctatctgtgggccctggcctattgcgcggcggccaccctggcctcgcgcctggcctttccggttctgcaccagaccaatatcgtcatgatcttcctgctggcggtcgtggcggcggccctgcgccacggacgcgggccggcggcgctggcctcggtggtcagcgtcgcgctgttcgatttcttcttcgtgcagccattggcctcgttcgccgtctcggacgtgcagtacctgctgacgttcgccgtcctgctgacggtcgggctgctgatcggccagctgaccgccggcttgcgccagcaggcccgggccgccgccaggcgcgaggccgatgcgcgcggcctttacgaattcgcgcgggagctgtccgcggccctgcagccggagcaaatcgccggcgcggcctcggcattcctgaacgccgcgttcggcgcccgcggcgccctctacatactgggcctggacgaccggctgcggctggcgcccggcgctggcgacgcggcactcgaacccgcgctggcgcaatgggccttcgaccacggccaggcctgcggcgccggcaccgacaccctgtcgaacagccccgtgctgtacctgcccctgcgcgcgcccatgcgggtgcgcggcgtgctggccctgcaccacgccggcccgccgctctacagcgcggcgccggcgcgccgccagctcgacgcctacgccaccctgatcgccatcgccatcgaacggctgcactatgtggaagtcgcccagcaggcgctgctcagtatcgaatccgaacgcctgcgcaacgccctgctggcggcggtctcgcacgatctgcgcacgccgctgaccagcttgctcggcatggccgagaccctgcagcgctcgcccgccgccatgacgccggccgcgctcgaaaccgtggccgccatgcaggaccaggcgcggcgcatgcacgcgctggtcgtcaacctgctggacatggcgcggctgcaaagccacgatgcgccgctgcggcgccaatggcaatcggtcgaggaactggtgggctcggccctggcggccatgaacgccgcgctgcaggatcgccccgtcacggtcgcgccgctttctgccctgccgctggtggaatgcgatggcatcctgatcgaacgggtgctgtgcaacctgctggaaaatgccgccaaatacacgccgcccggcagtgccatccacatcgacgccctggccgacgcccataccctgcaggtacgggtggccgatgacggggcgggcgtcgcgcaggccgaccgccagcggatcttcgagaaattcgcgcgcggccagcgcgagtcggccacccccggcgcaggcctcgggctggcggtatgccgcgccatcctggacgcccaccagggccgcatctgggtcgagccggcccggcgcctgcgcggcgcctgcttcgtcttcgcgctgccgctgaccccgccgccggccgtgccccccgaacccgcctga

SEQ ID NO: 93725 - protein, 931 aa, Bordetella bronchiseptica RB50
MRAACARPFPTRHTHPMADPGNDRLDPDRLLQTLEQAQSDARRGRLRIYFGACAGVGKTYAMLAAARAQAAQGVDVVAGLVETHGRADTAALLDTLPALPLQTLDFQGRRLREFDLQAAVARRPRLLLLDELAHTNAPGARHAKRWQDVEELLAAGIDVWTTLNVQHLESLNEAVGGITGVRVRETVPDSVFDAADEIILVDLSADELLRRLREGRVYVPEQARHASRHFFRKGNLIALRELALRRTAEHVDDDVRAYRHERAIEPVWRTREAVVACIDADPHAEHVLRSAHRLAQQLDCEWHAITIEAPRVAPLPRAGRARLDQALALAETLGAHVETVAGTDMVDAATRYMRRHNITKAVVGRDAWRRRGLSGLLDAALTPGRLLRRRSFADALASACPEADIVRVGAPSAATAAPRRDPRSWRNASAPAGHAAAGAYLWALAYCAAATLASRLAFPVLHQTNIVMIFLLAVVAAALRHGRGPAALASVVSVALFDFFFVQPLASFAVSDVQYLLTFAVLLTVGLLIGQLTAGLRQQARAAARREADARGLYEFARELSAALQPEQIAGAASAFLNAAFGARGALYILGLDDRLRLAPGAGDAALEPALAQWAFDHGQACGAGTDTLSNSPVLYLPLRAPMRVRGVLALHHAGPPLYSAAPARRQLDAYATLIAIAIERLHYVEVAQQALLSIESERLRNALLAAVSHDLRTPLTSLLGMAETLQRSPAAMTPAALETVAAMQDQARRMHALVVNLLDMARLQSHDAPLRRQWQSVEELVGSALAAMNAALQDRPVTVAPLSALPLVECDGILIERVLCNLLENAAKYTPPGSAIHIDALADAHTLQVRVADDGAGVAQADRQRIFEKFARGQRESATPGAGLGLAVCRAILDAHQGRIWVEPARRLRGACFVFALPLTPPPAVPPEPA

SEQ ID NO: 93726 - DNA, 2688 bp, Chromobacterium violaceum ATCC 12472
  CDS (1)..(2688): transl_table=11
atgaccgatcagcgccccgacccggatgccctgctggacgaactgaaacgcgaagcgctggaagcgcagcgcggacgcctgaagatattcttcggcgcctgcgccggcgtcggcaagacctacgccatgctggccgcagcgcgcgtcaagcgccaggaaggcgtgcgggtgctggtcggcgtggtggaaacccacggccgcaaggaaaccgccgagcagctggaggggctggacatcctgcccctcagccgcatcgagtacaagggccgcgccttgtcggaattcgacatcgacgcggcgctggccgccaaaccccagctgatcctgatcgacgagttcgcccactccaacgcccccggctcgcgccatcccaagcgctggcaggacgtggaggagctgctggccgccggcatcgacgtatacacgacgctgaacgtgcagcatttggagagccttaacgatgtggtcggccagatcaccggcatcatcgtcagggaaacgctgccggaccatgtgttcgacatggccgatgaagtctcgctggtggacctgccgccggacgagctgctgtcccgcctcgcagccggcaaggtctacctgccgcaccaggccgagcgcgcggtcaagaactttttccgcaagggcaatctgctggcgctgcgcgaactggcgctcaggcgcaccgccgaccgggtcgacgcccagatgcgcgcctaccgcgccgaccagtcgatcaagccggtgtggcacgcgcgcgagcggctgctggtctgcgtcggcccaggcccaggcaccgagaagctggtgcgcagcgccaagcgcctggccgccaacctggacgccgattggatcgccgtctacgtggaaacgccgcgcttgcagcggctgcccgaagagcagcgcgcgcggattctgaaagggctgaagctggcgcaggagctgggcgcggaaaccacggtgctgggcggcagctcgctggccgccaccctgctcgcctacgcccgcacccgcaacgtgtccaagctggtggtcggcaagtccaaccgcggctgggccgcgcgcctgtgggaaggctcgctggtcggcgaactcagccgcctgtccggcgacgtcgatgtctacgtggtcgcgcacgaactggaagaagaagccgaccagcggggcaagcgcgtgcccagcctgctgttcagcgatagcgagtccggccacgccgcccgcggctacctggccgccgccgccatctgcttcgccaccaccgagctcaaccacctgctggtgccctacttcgcgctgtccaacgtgatcatggtgcacctgctggcggtggtgctgatcgccacccgctacggccgcgggccgggcgtgctggcatccttcctgtcggtcgcggccttcgactttttcttcgtgccgccgcagctgtcgttcgcggtatccgacacccagtacctgctcaccttcggcgtgatgctggtggtggcgctgatcatcagccagctgaccgcccgcttccgcttcgaggccaccatcgccacctaccgcgagcgccgcacccgcgcgctgtacgacctgggccgcgagctggccagcgcgctgaccgcgtcgcagatcatcgaaaccgcggtcggccggctggagccgctgttccgcgccaaggtgatgctgttcatccccaatagcgaggaccggctgcgcgccgccaccgaaaccggcaacgacgccgacgccggggtcgcgcagtgggtgttcgacaaccagcagcccgccggcctcggcaccaatacgctgccgtccaacgccgcgctttacgtgccgctgaaggccccgatgcgcgtgcgcggcgtgatcgcgctgctgccggaggacgcggttcaccctttcctgccggaacagcagcggctgctggagacctgcgccgcgcagatcgcgctggcgctggagcgagtgcattacgtggaggtggcgcaggacgccatcgtggcgatggagtcagagcgtctccgcaacagcgtgctgtcggtggtgtcgcacgacctgcgcacgccgctgaccaccatgctgggcctggccaatatgctgaacgcccccaccctgccgcccggccggcaaagcgagatcgcccagtccatacaggacgaggcgatacggatgaccaagctggtgaccaacctgctggacatggccaagctgcagtcgggcgtcaagctgaacaaggaatggcagctgctggacgaagtggttggcagcgcggtgcgcgcctgcgagcacagcctgcgccatcacaagctggagctcaagctcagccgcgatctgccggtgctggaatacgacgcggtgctgatagagcgggtgctggtcaacctgctggaaaacgccggcaaatacacgccggccggctcccgcatcgaactggccgcccggcacgatggcgacaaggtgcgcatcaccgtcaccgacgacggccccggcctgcccgccagcatggagcacagggccttcgacaagttcacgcgcggcgcgccggaatcgaccacgcccggcgtcgggctgggcctggccatctgccgcgccatcatcgaaaaccatggcggaacgatagaagccggcaacgcgcagccgcacggcgcccgcttctccttcacgctgccggccggctctccgcccgagctgccgccggaagacgcctga

SEQ ID NO: 93727 - protein, 895 aa, Chromobacterium violaceum ATCC 12472
MTDQRPDPDALLDELKREALEAQRGRLKIFFGACAGVGKTYAMLAAARVKRQEGVRVLVGVVETHGRKETAEQLEGLDILPLSRIEYKGRALSEFDIDAALAAKPQLILIDEFAHSNAPGSRHPKRWQDVEELLAAGIDVYTTLNVQHLESLNDVVGQITGIIVRETLPDHVFDMADEVSLVDLPPDELLSRLAAGKVYLPHQAERAVKNFFRKGNLLALRELALRRTADRVDAQMRAYRADQSIKPVWHARERLLVCVGPGPGTEKLVRSAKRLAANLDADWIAVYVETPRLQRLPEEQRARILKGLKLAQELGAETTVLGGSSLAATLLAYARTRNVSKLVVGKSNRGWAARLWEGSLVGELSRLSGDVDVYVVAHELEEEADQRGKRVPSLLFSDSESGHAARGYLAAAAICFATTELNHLLVPYFALSNVIMVHLLAVVLIATRYGRGPGVLASFLSVAAFDFFFVPPQLSFAVSDTQYLLTFGVMLVVALIISQLTARFRFEATIATYRERRTRALYDLGRELASALTASQIIETAVGRLEPLFRAKVMLFIPNSEDRLRAATETGNDADAGVAQWVFDNQQPAGLGTNTLPSNAALYVPLKAPMRVRGVIALLPEDAVHPFLPEQQRLLETCAAQIALALERVHYVEVAQDAIVAMESERLRNSVLSVVSHDLRTPLTTMLGLANMLNAPTLPPGRQSEIAQSIQDEAIRMTKLVTNLLDMAKLQSGVKLNKEWQLLDEVVGSAVRACEHSLRHHKLELKLSRDLPVLEYDAVLIERVLVNLLENAGKYTPAGSRIELAARHDGDKVRITVTDDGPGLPASMEHRAFDKFTRGAPESTTPGVGLGLAICRAIIENHGGTIEAGNAQPHGARFSFTLPAGSPPELPPEDA

SEQ ID NO: 93728 - DNA, 2694 bp, Photorhabdus luminescens subsp. laumondii TTO1
  CDS (1)..(2694): transl_table=11
atggatcaacacgaaccacagcgccctgaccctgatgaattactgacactggttaatgagaaacagcgcggtaaattaaagatatttttcggtgcctgcgctggcgtcggaaaaacctatgccatgttgcaggaagcgcaaagattgcgtgctcaaggactggatgtggttatcggcgtggtagaaacccatgagcggcaaggaactgccgctttacttgatggtctgccacaactgccactgaagcagatctactaccgacggcgcaaaatcagcgtctttgatcttgatgctgccattgcccgccacccggccatcattttgatggatgagttggcattcagtaatcctcacaccaaccgtcatcccaaacgctggcaagacgttgaagaactgcttgaagctggcatagatgtactgactaccatcaacgttcagcatctggaaagcctcaatgatgttgtgggggatattaccggtatccgggtcagggaaaccattcctgatcatatctttgatcaagcgaatgaaattgtcttagttgatctgcccccggatgatctgcgccagcggctcaatgaaggtaaagtctatattcctagccaggcagaacgtgctattgaacatttttttcgcaaaggtaatttgattgcattgcgggaactggctttgcgccggacggctgatcgggttgatgatcaaatgcgtgctttccgcgacacacaagggcatgaaccggtctggcatacccgtgataatcttctactatgcattggtaacagctcaggtaatgaaaagctcatccgcactgccgctcgccttgcggcccgattaggctgtatctggcatgcaatctacgttgaaaccccaaaactgtaccaactacccgaaggtaaacggcgctccatcttaaaagcgctcagattagcgcatgaattgggggctgaaaccgcgacgctttctgatccaaacaaagaaaaagcggtattacgttatgccagagaacataacctcggcaagattctgataggccgccgctgtacatccaaacagaaactgtttggctggcaatggcgttcaggttttgctgaccgactagggaaactagggccagatttggatctggtgattgtcgcattagaagaacgcagccactgggataaagaacaagacaaccgctctgtgagtgaaaaatggcgagtacagattcagggctgcctgatcgcgattgcgctctgtacacttatcaccttgttctcccgaacgtttttactgacccttgataaagccaatcttgtcacgctttacctgcttggcgtcgtcgtcattgcgctattttacggacgccgaccatcaatctttgctgcttttattaatgtcattagtttcgatatcttctttgtacagcctcattggtctcttgctgttaccgatatgcagtacctgctgacttttagtgtcatgctgatagtgggcgtcgtcgtcggaaacttaacagcaggaatgagatatcaggcgcgaattgcccgttaccgcgaacaacgaacccgcaatctctatgaaatgacccgtgaactgagccgagcgctgaatgaagaagatattgcccgcaccagctaccactttcttactaatggttttcaagctaaaactggcctctttttacccaacgacgatggcaatttatatcaactgacgaccaataatggcggtcacatgctgattgatgatgccattgcaaaatggagttttgataaaaacctgccggccggagcgggaacagatacgctacctagcgtaccttaccaactacagcctatcgccacaccttctcaaacactggcggtattggctattgagccctcctatttgcgccagttactgatccctgaacaacagcgattgctgcaaacatttaccggcctgatcgccaatgcgctggaaagattacaactctcacgccgggcagaatccgccaaattggatacagaaagggaacagttacgtaactcgcttctggcggccctgtctcacgatttacgcacaccgctgaccgtcctattcggacaagcggaaatcctgatgttggatctctctgccgaaggttctccacataccaaacaggtgaatcagatccgccaacaaattctcagcacttcccgtctggttaataacttactggacatggcgcgtatccaatcgggaggcattcagctcaatctggaatggcaatcgctggaagagatcgtcggcagtaccttacgttcgctggaatatgcactcaaccgtcatcccgtcgcggtttccctgccatcggatttactgttgcattgtgatgccagtttactggagcgggtatttatcaacctgttggaaaacgcaattaaatataccgatgaacaaataccattaggtattaaagcgacaacagaaaaaaatcaaattcatattgaagtttgggatgcaggcaaaggcattccgccggaacaagaacagttaattttcgataaattctcccgcgctcgtaaagaatctgctattcccggcgtgggccttggattggcaatttgccgggcaattattgaaattcaccaaggaaagatttgggcgagcaataacgaaaaaggtggagcaagttttcactttgttctaccgttagagaaaccgccagaaattattactgaggagatgtga

SEQ ID NO: 93729 - protein, 897 aa, Photorhabdus luminescens subsp. laumondii TTO1
MDQHEPQRPDPDELLTLVNEKQRGKLKIFFGACAGVGKTYAMLQEAQRLRAQGLDVVIGVVETHERQGTAALLDGLPQLPLKQIYYRRRKISVFDLDAAIARHPAIILMDELAFSNPHTNRHPKRWQDVEELLEAGIDVLTTINVQHLESLNDVVGDITGIRVRETIPDHIFDQANEIVLVDLPPDDLRQRLNEGKVYIPSQAERAIEHFFRKGNLIALRELALRRTADRVDDQMRAFRDTQGHEPVWHTRDNLLLCIGNSSGNEKLIRTAARLAARLGCIWHAIYVETPKLYQLPEGKRRSILKALRLAHELGAETATLSDPNKEKAVLRYAREHNLGKILIGRRCTSKQKLFGWQWRSGFADRLGKLGPDLDLVIVALEERSHWDKEQDNRSVSEKWRVQIQGCLIAIALCTLITLFSRTFLLTLDKANLVTLYLLGVVVIALFYGRRPSIFAAFINVISFDIFFVQPHWSLAVTDMQYLLTFSVMLIVGVVVGNLTAGMRYQARIARYREQRTRNLYEMTRELSRALNEEDIARTSYHFLTNGFQAKTGLFLPNDDGNLYQLTTNNGGHMLIDDAIAKWSFDKNLPAGAGTDTLPSVPYQLQPIATPSQTLAVLAIEPSYLRQLLIPEQQRLLQTFTGLIANALERLQLSRRAESAKLDTEREQLRNSLLAALSHDLRTPLTVLFGQAEILMLDLSAEGSPHTKQVNQIRQQILSTSRLVNNLLDMARIQSGGIQLNLEWQSLEEIVGSTLRSLEYALNRHPVAVSLPSDLLLHCDASLLERVFINLLENAIKYTDEQIPLGIKATTEKNQIHIEVWDAGKGIPPEQEQLIFDKFSRARKESAIPGVGLGLAICRAIIEIHQGKIWASNNEKGGASFHFVLPLEKPPEIITEEM

SEQ ID NO: 93730 - DNA, 2724 bp, Rhodopseudomonas palustris CGA009
  CDS (1)..(2724): transl_table=11
atgcctgatccgcgcgttgagccgccgtcgcgaccctctccggacgccttgcttgaacaggcgaggcggcaggagcccggcacgggccggctcaaggtcttccttggggccgcgcctggcgtcgggaagacttacgccatgctgcagagcgcgcacgcccgcgccaaggccggggtcgatgtggtgatcggctatgccgagacccatggccgtgccgagaccgaggctttgctcgccggcttggagaccgtgccacgccggcgcattccgtacaaagggcaggtcctcgaagagatggacctcgatgcggtgctcgccaggcggccgcagctcgccatcgtcgacgagcttgcccacagcaacgccccgggcagccgccatcctaagcgctatctcgacgtattggagctgttggccaacggcatcgacgtctacaccgcagtcaacattcagcacatcgaaagcctgaacgacgtcgtcgcgcagatcaccacggtccgggtgcgggagaccgtcccggactcggcgttcgagcgggccgatgcgatcgagttggtcgacctgacgccggacgacctgatccagcgtctgaaggaaggcaaggtctatgtgccgaagcaggccgagcgcgcgctggagcactacttctcaccgggcaacctgaccgcactgcgcgaactggcactgcggcggaccgccgagcgggtcgacgagcagctgctgtcgcacatgcaggccaatgcgatccccgggccctgggcggcgggcgagcgcgtcctggtgtgcgtcagtcatgatcagcgctcgcaggggctggtccgctacaccaagcggctcgcggatcggctgcgtgcgccgtggacggcgatcaacatcgagacgcgtcgcagcctgtcgctgaccgagcagcagcgcgatcggcttgccgatacgctgcgtctggccgaggcgctgggcggcgaagcgctggcgatccccggcggcgatcgcagcctggcgcacgacatcctggcgttcgcgcgcgccaacaacattacccagatcgtggtcggcaaggcgccgcgatcgttctggtacgaagctctgcgcggctcgacggtccacgagctggtgcgcggctccggcaacatctcgatccacgtcatgaccggtaccgcggtctcgatcgaggaaagccagaccggttcgctgcgcccggccgagggaacggagccgttcaacccgtggccgtatccgatggcgctggtgctggtcgggatcgggctcggcgtcgccaagctgatcgaaccgttcttcagcatcgagaacgtcgatctggtgtttctcaccgcggtggtcggcgtcgcggtccgctacgggctggggccctcgctgctcgccagcgtcgtcgcgtcgctgtgctacaactttttctttcttccgccggtctacactttcaccatcaccgatccgaccaacatcgtcgcgttcttcttcttcatgttgatcgcgatcctggtctcgaacctcgccgggcgtgttcgcgcccaggcgaccgccgcggcgcagcgggtgcggacgacggagtcgctgtacgccttcagccggaagctcgccggtaccgccgcgctcgacgacgtgctgtgggcgaccgcgtatcagatcgcgctgatgctgaaggtccgggtggtgttgctgctccccgaacagggccgcatcgccgtcaaggccggctatccgccggaagatcagctggatccggccgatctcgcggcggcgaattgggcttgggagaacgatcgagtggcagggcgaggctccgacaccttgcccggtgccaaacgtttgtttctgccgatgcggaccgggcgcggaccgatcggcgtgatcgggatcgatgatgatcgcgccggtgccttgctgacaccggatcagcgccgcctgctcgacgcactgaccgatcagggggcgctggcgatcgagcgggtgcatctggtcgaggacatggatcgggtcaagcgcgatgccgagtccgaccggttgcggcaggcgttgctcacctcgatttcgcacgatctgaagactccgctggccgcggtcctcggcgccgcgacgacgatgcgggatctggcatcgcatctgagcgacgcgcaacggaccgaactcatcggcaccatcgtcgaggaatccgaacgcctcaaccgcttcatcgccaatctgctggacatgaccaagctcgaatccggtgccgtcgtgccaaacagcgcggcgcacgatctcggtgaactggtcggcgccacgctgcggcgcgcgacatcgatcctggcgcagcatacggtcaagctggatctcgggcatgatctgccgctgatcgaggtcgatccggtgctgttcgaacaggcgctgttcaacctgctcgacaacgcagcgaaatacgcgccggccggcagtgccatccagcttcgcgccgcgcagagcggcggtcaggttgagcttcaagtgcgcgacgaaggcgagggcattccgcctgccgaactggaaaccgtgttcgataaattttatcgcgtgcggaaaggcgatcatataaggcccggtactggcctcggactggcgatcgcacgaggtttcatcgaggccatgggcgggcgattgtcggccggcaatcgatccgatcgtagcggtgccgcgatgaccatccgtctccccattgcatcgcgtggcgatgccctgatcagtgcagcgtga

SEQ ID NO: 93731 - protein, 907 aa, Rhodopseudomonas palustris CGA009
MPDPRVEPPSRPSPDALLEQARRQEPGTGRLKVFLGAAPGVGKTYAMLQSAHARAKAGVDVVIGYAETHGRAETEALLAGLETVPRRRIPYKGQVLEEMDLDAVLARRPQLAIVDELAHSNAPGSRHPKRYLDVLELLANGIDVYTAVNIQHIESLNDVVAQITTVRVRETVPDSAFERADAIELVDLTPDDLIQRLKEGKVYVPKQAERALEHYFSPGNLTALRELALRRTAERVDEQLLSHMQANAIPGPWAAGERVLVCVSHDQRSQGLVRYTKRLADRLRAPWTAINIETRRSLSLTEQQRDRLADTLRLAEALGGEALAIPGGDRSLAHDILAFARANNITQIVVGKAPRSFWYEALRGSTVHELVRGSGNISIHVMTGTAVSIEESQTGSLRPAEGTEPFNPWPYPMALVLVGIGLGVAKLIEPFFSIENVDLVFLTAVVGVAVRYGLGPSLLASVVASLCYNFFFLPPVYTFTITDPTNIVAFFFFMLIAILVSNLAGRVRAQATAAAQRVRTTESLYAFSRKLAGTAALDDVLWATAYQIALMLKVRVVLLLPEQGRIAVKAGYPPEDQLDPADLAAANWAWENDRVAGRGSDTLPGAKRLFLPMRTGRGPIGVIGIDDDRAGALLTPDQRRLLDALTDQGALAIERVHLVEDMDRVKRDAESDRLRQALLTSISHDLKTPLAAVLGAATTMRDLASHLSDAQRTELIGTIVEESERLNRFIANLLDMTKLESGAVVPNSAAHDLGELVGATLRRATSILAQHTVKLDLGHDLPLIEVDPVLFEQALFNLLDNAAKYAPAGSAIQLRAAQSGGQVELQVRDEGEGIPPAELETVFDKFYRVRKGDHIRPGTGLGLAIARGFIEAMGGRLSAGNRSDRSGAAMTIRLPIASRGDALISAA

SEQ ID NO: 93732 - DNA, 2658 bp, Geobacter sulfurreducens PCA
  CDS (1)..(2658): transl_table=11
atgctgaagctggcccaggccgaagaggccgaggcaaagcgggggaagctgaagatcttcctcggctacgccgccggtgtcggcaagacctacgccatgctgcaggcggcccgggagcgcaggcatgaagggcgcgacgtggtggccgcctacgtggaatcccacggccgaccggaaaccgatgcactcctggaagggctggaaatcctccccgcggcccggatcgagtaccagggggtcatgctcccggagctggatatcgacggggtgctggcccgccggccccagctcgccctggtggacgagctggcccacaccaacgcgccaggctcccggcacgagaagcgctggcaggacgtggaggaactgctggcggccggcatcgacgtcttcaccacggtcaacgtccagcacttcgagagcctcaacgacgtggtggcgcagatcaccggcatcgccgtgcgcgagaccgtgccggaccgcctcctggacctggcggcggagatccggttggtggacatcccgccggaggatctcctgcagcggttgcgcgaagggaaggtctacgtgccggagcaggccgcgtttgccgcggaaaagttcttccgcgccggcaacctgatcgccctgcgggagctatcgctccgccgcgccgcggtccgcgtggacgaagagatgcgggcctacatggaggcgcgggccattccgggcccctggccggcggccgagcggcttctggtgagcatcagcggcagcccgttcagcgagcggctgatccggaccacccgccgcctggcggacgaactgaaggccccctggttcacggtctacgtggagacccccggcaacggcaggcatgagcaggaaaaccggaaacgggtctggaaggatctccgcctggcggaaagcctcggcgcccaggtcgccaccgtcaccgccacgtcggtggcggaggcgctcatcgactacgcccgcaggcacaacgtgaccaggatcgtggtcggcaagccggcaaagccgcgctggcgcgagtttctgcgcctccccctggtcgaccggattatccgcctgagcggcgccatcgatgtgcacgtggtcagctacgagccggccgaggccggaaaggggccggtccttcccgtacggagggggccgatctccttctccggctacctggcgagcctggcactggtcgtcgcggcctccctggcctgcctcctgctccgtcccttcctggcgccgaccaacatggtcatgatctacctgctggcagtggtgctggcggcactgaggctcggcctcaagccggccatcctcacggcctttctgggggtcctggccttcgacttcttcttcattccgccgcacctgacctttgccgtggcagacacccagtacctgatcacctttgtcgccctgttcaccgtgggcgtggtcatcagcaccctggtctccacggtgcgcgaacgggccgaggccgtgcgggaacgggaggagcagaccgcctccctctactatctgagccgcgacctggcagcagccgccgacatcgagaccctcgtggccgccgtgatcaggaacatcggcgagaccctgttcgccagggccgccgtgctccttcccgagggagaccggctcagagtcgccgccgccagcaaggggctcaagcccgacgtcaaggagatggccgtggccgactgggcgttccgcaaccgccagaccgcgggccaggggaccgaaaccctcgcctcggcgggatttctctacctgccgctccagacatcgggctccgtcctcggggtgctgggggtcaggctgaaaaacgatgccgattaccgctccacccaggtccgccgcatgctggacgcattcacctcccagaccgccatggccctcgagcgggtccagctctcccggcaggccgagcaggcccagatcctccaggcccgcgagaacctcgaacgggccctgctcaactccatctcccacgacctgcgtacccccctggtcgccatcaccggcgccctggacaccctgcgcgacaaggtccataccctggccgacgaatcccggctggaactgctcgacaccgcgtgggaagaggcagagcggctgaaccgcttcgtgggcaacctcctcgacatgacccgcctggagtccggggcgatcaaactgaaacgggagctgagcgatgttcaggacttgatcgggtgcgccctggcggccctggagcggcggatcggcgagcgcgggatcgacgtgcgccttgctcccgacctgcccctggtcaggatagacatggtcctgatgacccaggtgctggtcaatctgctcgacaatgcgctgaaatattcgccgcccgacagcggcgtggagataacggcccgggtggacggaggcaggctccgcatcgagatggcagaccgcggcccgggcattcccgagcaggacctgaagcgggtattcgacaagttctaccgcattgcggttcccgaaggggcgcagggaaccgggctggggctttccatctgcaaaggaatcgtcgaggcccacggcggctccatccgggccgagaaccggaccgggggcgggctccgggtgatcgtgaccctgccgctggccggcggggcgaaagagggtgtttcccatgggccatga

SEQ ID NO: 93733 - protein, 885 aa, Geobacter sulfurreducens PCA
MLKLAQAEEAEAKRGKLKIFLGYAAGVGKTYAMLQAARERRHEGRDVVAAYVESHGRPETDALLEGLEILPAARIEYQGVMLPELDIDGVLARRPQLALVDELAHTNAPGSRHEKRWQDVEELLAAGIDVFTTVNVQHFESLNDVVAQITGIAVRETVPDRLLDLAAEIRLVDIPPEDLLQRLREGKVYVPEQAAFAAEKFFRAGNLIALRELSLRRAAVRVDEEMRAYMEARAIPGPWPAAERLLVSISGSPFSERLIRTTRRLADELKAPWFTVYVETPGNGRHEQENRKRVWKDLRLAESLGAQVATVTATSVAEALIDYARRHNVTRIVVGKPAKPRWREFLRLPLVDRIIRLSGAIDVHVVSYEPAEAGKGPVLPVRRGPISFSGYLASLALVVAASLACLLLRPFLAPTNMVMIYLLAVVLAALRLGLKPAILTAFLGVLAFDFFFIPPHLTFAVADTQYLITFVALFTVGVVISTLVSTVRERAEAVREREEQTASLYYLSRDLAAAADIETLVAAVIRNIGETLFARAAVLLPEGDRLRVAAASKGLKPDVKEMAVADWAFRNRQTAGQGTETLASAGFLYLPLQTSGSVLGVLGVRLKNDADYRSTQVRRMLDAFTSQTAMALERVQLSRQAEQAQILQARENLERALLNSISHDLRTPLVAITGALDTLRDKVHTLADESRLELLDTAWEEAERLNRFVGNLLDMTRLESGAIKLKRELSDVQDLIGCALAALERRIGERGIDVRLAPDLPLVRIDMVLMTQVLVNLLDNALKYSPPDSGVEITARVDGGRLRIEMADRGPGIPEQDLKRVFDKFYRIAVPEGAQGTGLGLSICKGIVEAHGGSIRAENRTGGGLRVIVTLPLAGGAKEGVSHGP

SEQ ID NO: 93734 - DNA, 2703 bp, Clostridium difficile 630
  CDS (1)..(2703): transl_table=11
atggatagacctaatcctgatattctattagaaaaaattaaaaatgaagaagaaaaactaagtagaggtcaattaaaaatattctttggttatgcagctggagtaggaaaaacctactctatgttggaatctgcacaaaatttaaaaaaagtgggtgtagatgtagtagttggatatattgaaccacacactagaccagaaacattggctttacttgatggcttggaaattcttcctgtaaaggagatagaatataaatctataaaactaaaagaatttgatttagatgctgctttagaaagaaaaccagaagttatattagtagatgaatttgcccattctaatgttgctgggttaaggcatacaaaaagatggcaagatatagaagaattgctgttagcaggcataaatgtctacactactgtaaatgtacaacatttagaaagtctaaatgacattgttgagataattacaaacgtatcagttaaagagactataccagataagtttttggatacaaatacacagttagaacttatagatgttgaacctgatgtacttcttgaaaggttcaatgaaggtaagatatataagaaagaacaagctactagagcaaaaaataatttttttataaaagataacctggttgcacttagagaaatcgcacttagaaaaacagcagagagagttaataaagaagttcaaatgaccagactatcaaagggtgatgtaactgtaatacctacatcagatacacttcttgcatgtataagtccatctccatcttcagcaaaagttattagaactgcatccagaatatcagacagtacatttgcaaaatggatagctttatatgttgaaactccaaacacagcaagacttccatttgatgaacaaaaacaactacaaaataacctaaaattagctaagaaattaggtggagaaataattgttttacatggtgaaaatataatagagcaaatacttagaattgcaaaactgagaaatgtaacaaaaattgtaataggtagaaatcattcaagtaataaaagatttagtaaaagatttaaaaaagatatagttgacaaattaattgatgaagttgattatatagatatacatataattccatataaatttgcctcagatgttaaatacaaaactaaaaaggataaatcatcaataaaatctaaatttaaaattagcaaagttgattttataaaacttatatttattactttgatgataagtattttagcatatgcagtacaaagcatgggatttataagagaaaatatattattaatatatatgttgggtgtagttttagtttctatgtggactaaagggtatagtacaggcataataagttctgtatttaatatagttcttttaaattatttttttacagcaccattatatacattatctatagcagattcaaactatatagtaacactggttgtattctcaatagtaggtataataactagcactcttacgtctaagatacagcatgaagcagaaactgctgctaaaagagaagaaaatacaaaaatgatatatcaaataattaagggatttttaagattatcaaataaagatgatatagtaaacaaaggtatagaacttttgtctcttagcttaagtagagatgtaatttgttatttaaatgtagataagcataataaatcaaagctttacaaaaaaaatactaataataaggataaaaatgatttggatagtgaagatgaaaaagctgttgcaagttgggttttatccaattcaacagtggcaggaaatgacacggatacacttcctggttcaaagggatactatataccaattgtaggaatgaatttaactttaggagtagtgggaatatcatgtattgattcaaaattggatacagaagatataagcttaattgaaacaataattgctcaaatggcaatagcgcttgatagagaaatattgtcagaagctaaagaaaataccaatcttgagattgaaagggaaagattaagaagtaatcttttaagagcagtttcgcatgaccttagaactccactagcaggaatatctggtgcagtaagtacaattataaaaaacaagggtactataggtcaagatataatagatgaattacttagtggtgtatatgaagatactcagtggttaataagacttgttgaaaatttacttagtatgaccaagatagatgaagggaaattggaagttaaaaaacattctgaactggttgaggaaattatatcagaagcgttacaaaaaataaaaaaaagaattgaaaatgcacttatagatattaatataccagaacagatattatttgttcctatggatgcaaaattaatagaacaagttttaattaatttaatagataattctttgaaatattcaaaggaagattgtaagatagagataaatgtatatgagaaagatgattatgtttggtttgaagtatctgataatggtcctggtatatcaaaggaacttaaaaagcatatctttgacagattttttactggagaagaaggagctaaagattccagaaagggtgttggacttggattatcaatttgtaaatctataattcaagctcataaaggtgaaattatggtagaaaacaataaagataagggttcaacttttaagtttagtttgcctaaggaaaatgaatag

SEQ ID NO: 93735 - protein, 900 aa, Clostridium difficile 630
MDRPNPDILLEKIKNEEEKLSRGQLKIFFGYAAGVGKTYSMLESAQNLKKVGVDVVVGYIEPHTRPETLALLDGLEILPVKEIEYKSIKLKEFDLDAALERKPEVILVDEFAHSNVAGLRHTKRWQDIEELLLAGINVYTTVNVQHLESLNDIVEIITNVSVKETIPDKFLDTNTQLELIDVEPDVLLERFNEGKIYKKEQATRAKNNFFIKDNLVALREIALRKTAERVNKEVQMTRLSKGDVTVIPTSDTLLACISPSPSSAKVIRTASRISDSTFAKWIALYVETPNTARLPFDEQKQLQNNLKLAKKLGGEIIVLHGENIIEQILRIAKLRNVTKIVIGRNHSSNKRFSKRFKKDIVDKLIDEVDYIDIHIIPYKFASDVKYKTKKDKSSIKSKFKISKVDFIKLIFITLMISILAYAVQSMGFIRENILLIYMLGVVLVSMWTKGYSTGIISSVFNIVLLNYFFTAPLYTLSIADSNYIVTLVVFSIVGIITSTLTSKIQHEAETAAKREENTKMIYQIIKGFLRLSNKDDIVNKGIELLSLSLSRDVICYLNVDKHNKSKLYKKNTNNKDKNDLDSEDEKAVASWVLSNSTVAGNDTDTLPGSKGYYIPIVGMNLTLGVVGISCIDSKLDTEDISLIETIIAQMAIALDREILSEAKENTNLEIERERLRSNLLRAVSHDLRTPLAGISGAVSTIIKNKGTIGQDIIDELLSGVYEDTQWLIRLVENLLSMTKIDEGKLEVKKHSELVEEIISEALQKIKKRIENALIDINIPEQILFVPMDAKLIEQVLINLIDNSLKYSKEDCKIEINVYEKDDYVWFEVSDNGPGISKELKKHIFDRFFTGEEGAKDSRKGVGLGLSICKSIIQAHKGEIMVENNKDKGSTFKFSLPKENE

SEQ ID NO: 93736 - DNA, 2766 bp, Herminiimonas arsenicoxydans
  CDS (1)..(2766): transl_table=11
atgcctccagccgattaccaacgccccgatccagatgccttgctggcgcatgtgcaggaacaggaacgccgggccgaacggggcaaactgcgcatttacttcggcgcatctgccggcgtaggcaaaacctatgcaatgctgtccgccgcgcgcaggatgcaggcggaaggccatgatgtcatcgtcggcatcgtcgaaacgcacggtcgtaatgaaacggctgcgctgcttgacggactggaaatgctgccgcgcaaagagatcgcctatcgcgacaaaatcatttccgaattcgatatcgatgccgcgctggtacgtcgcccggcgctgattctggtggatgagctggcgcattccaacgcgccaggttcacgccatcccaagcgctggcaggatgtccatgaattactggacgccggcatcgacgtgttcaccaccgtcaatgtgcagcatctggaaacgctgaacgacgtggtcggcggcatcaccggcattcgtgtggcggaaaccctgccggatacagtcttcgaccaggccgatgaagtcgtgctggtcgatattccggccgacgacttgctggcacgcctgagcaccggcaaggtctatcagccgcagcaggctgaacgcgcatcgcgcaattttttccgcaagggcaatctgatcgccttgcgtgagctggccttgcgtagaaccgctgatcgcatcggcgatgatgtgcaggcgtaccggatagaaaaatccatcaatggcgtgtggaaaaccgattccgatttgctggtctgcgtggggccgggcaccaattgcgaacatgtgattcgcagcgcggcgcaacttgcaggacagttgaatgcaaagtggcatgcagtgtatgtggaaacgccgcaattgcagagcctgcctccagcgcatcgcgaacatatcctgaaaaccctgaagctggcgcaagacctcagcgcgacgacggcggttctatcaggtaatacagtcgcaaatgaaatcgtcaactatgcgcgcagccataatttttcacgcatcgtgctgggacgagatcacagcaaatggccgtggcaaacctcgcatttaaaattgatcgcgcatcatctgccggatatcgatctgatagaaatagggcggattgaaggcaagggctcgtcgtcatcacaaaacctgtcggcgcgcctcagctcgggactggatgaaacgcctggcggaacgaagccgcgttttatgccttatgtatggacagtcgtggcgtgtatttttaccgccttactggcgacgcccttgctgccgcacctggatctggccaatatcgtgatgctgtttttgctggccgaagtattgattgccgtgcgctttggacgcgggccggctgtgctggcggcatttctcagtgtggccgtattcgactttttcttcgtcttgccgcgcttttcctttgcggtcagcgatgtgcaatatctggtgactttttctgtcttgctggtcgtcggactgatagtcggtcaattgacgtcgggattgcgcttccaggcaaggatcgccgcacatcgggaaggcagggcacgcgcgctgtatgaatttgccagggagttatcgagtgcattgcaggccgagcagatattcgaaattacacaatccttcatacaacgcacgtttcgggcaaaggcagtattgctgttgccggatgatgcggcgcgcttgaggctgccggcacaagctgcggacgacatcggcagcgatgctgctaacggcaagaacgttgccgagctggatatcggcgtcgcgcagtgggcattcgatcgcgccacgccggccggcatggggacagatacgctgccggccagcacgtatttttacctgccgctggtcgctccgatgcgcacgcgtggtgtactggccattcaaccggggaatcggcgctggattctgattcccgagcaaagaaagcaactcgataccttcgcagcgctcgctgccatcgcacttgaacgcgtgcattacatcgaagtagcgcaggacgcactggtgcggatggagtcggaacgtttgcgcaattccttgctgtcggcgctatcgcatgacctgcgtactccactgacatcgctggttggtttatctgaatcgctgaccatgtcgaaaccgccactgacatccagccagcaagaactcgcgcaagccttgcacgatgaagcgcggcgcatgagcaatctggtgtccaatctgctggacatggcacgcatacaaagcggcgaagtgaaattcaatctgcaatggctgcagtttgaagaggtggtcggcagcgcattgcgcgccagtcaatccgcgattgcccatcacgaaattaaaaccaggctggcgcctgacttgccgctggtgcgcttcgatgcagtgctgatagagcgcgtgctgtgcaatctgatcgagaatgcagccaagtacacgcctgccggctcccgtatcgtcatcgcggcagaaatcagcggacgttttctggaagtctccgtctacgacaatggccccggtttgccggccggccaggaagaagcgatctttgataaattcacccgcggcgaacgcgaatccgcaacgccgggcgttggtctcggattggcgatttgccgtgccatcgtcgaagcgcatcagggtacgatacgtgccgcacattcgccggatggcggtgcatccatcaactttaccctgccgctcggcacaccgccggccatcgacgagagcgagatcaccaccttggaccaaagaccatga

SEQ ID NO: 93737 - protein, 921 aa, Herminiimonas arsenicoxydans
MPPADYQRPDPDALLAHVQEQERRAERGKLRIYFGASAGVGKTYAMLSAARRMQAEGHDVIVGIVETHGRNETAALLDGLEMLPRKEIAYRDKIISEFDIDAALVRRPALILVDELAHSNAPGSRHPKRWQDVHELLDAGIDVFTTVNVQHLETLNDVVGGITGIRVAETLPDTVFDQADEVVLVDIPADDLLARLSTGKVYQPQQAERASRNFFRKGNLIALRELALRRTADRIGDDVQAYRIEKSINGVWKTDSDLLVCVGPGTNCEHVIRSAAQLAGQLNAKWHAVYVETPQLQSLPPAHREHILKTLKLAQDLSATTAVLSGNTVANEIVNYARSHNFSRIVLGRDHSKWPWQTSHLKLIAHHLPDIDLIEIGRIEGKGSSSSQNLSARLSSGLDETPGGTKPRFMPYVWTVVACIFTALLATPLLPHLDLANIVMLFLLAEVLIAVRFGRGPAVLAAFLSVAVFDFFFVLPRFSFAVSDVQYLVTFSVLLVVGLIVGQLTSGLRFQARIAAHREGRARALYEFARELSSALQAEQIFEITQSFIQRTFRAKAVLLLPDDAARLRLPAQAADDIGSDAANGKNVAELDIGVAQWAFDRATPAGMGTDTLPASTYFYLPLVAPMRTRGVLAIQPGNRRWILIPEQRKQLDTFAALAAIALERVHYIEVAQDALVRMESERLRNSLLSALSHDLRTPLTSLVGLSESLTMSKPPLTSSQQELAQALHDEARRMSNLVSNLLDMARIQSGEVKFNLQWLQFEEVVGSALRASQSAIAHHEIKTRLAPDLPLVRFDAVLIERVLCNLIENAAKYTPAGSRIVIAAEISGRFLEVSVYDNGPGLPAGQEEAIFDKFTRGERESATPGVGLGLAICRAIVEAHQGTIRAAHSPDGGASINFTLPLGTPPAIDESEITTLDQRP

SEQ ID NO: 93738 - DNA, 2718 bp, Bradyrhizobium sp. ORS278
  CDS (1)..(2718): transl_table=11
atggctcatcaacgccgcgatcctgaccagcgtccctcgccggaagccctgctcgaagcggcccggcgggaggagagtcctgccggcaagctcaagatctttgtcggcgccgcccccggcgtcggcaagacctacgagatgctgtcgagcgcgcacgccaagctgaaggccggcatcgatgtcgtgatcggcttcgtcgagacccacggtcgtgtcgagaccgatgcgctggtgcgcggcctcgaggtcattccccgcaagcgtatcggctacaaggaccaggtcatcgaggagatggatctggatgccgtgatcgcgcggcgtccgaagcttgcgatcgtcgacgagctggctcacaccaatgctgcgggcagccgtcatcccaaacgctacctcgatgtcgaggagctgctgtcgcacgggatcgacgtctataccgccgtgaacgtccagcatatcgaaagcctcaacgacgtcgtcgcccagatcacccatgtgcgcgtgcgcgagaccgtgccggattcgatcctcgatcgcgccgatgccatcgagctcatcgacctcacgcccgacgacctgatccagcggctgaaggagggcaaagtctatgtgcccaagcaggccgagcgtgcgctggagcactacttctcgccgggcaatctgacggcgctgcgcgagctcgcgctgcgcaggacggccgagcgcgtcgacgagcagctgctcaaccatatgcaggccaatgcgatcgccggcccctgggccgcgggcgagcgcattctcgtctgcgtctccgaggatccgcgcgcagccggcctcgtgcgctacaccaagcgcctcgccgacagggttcatgcgccgtggacggctgtcaccatcgagacccgtcgcaacctgcagctctcggacaaacagcgcgaccgccttgccgatacgctccggctggccgagtcgctcggcggcgaagcgctgacaattcccagcgcgggccgccgcatcgccgatgatctcatcggctttgcccaagccaacaacgtcacccagatcatcatcggcaagtcgcagcgctcgcgtctgttcgagatcatcaggggctccgtcgtccacgatctcgtgcgccgggccggcaacatcagcattcacgtcatccccggcgaggagacgccgggcgagaccggtacgtcggtccagacgcgggctcgcagcgagccgctgcaggccaagccctacatcatggccctgctgatcacggccgtcggcctcggcctcgccgagctgatccagccgttcttcggcatcgagaacgtcgaccttgtcttcctcaccgccgtcgtcggcgtcgccgcgcgctatggcctgtggccgtcgctgctggcgagcctgatggcatccttgtgctacaatttcttcttcctgccgccgatctacaccttcacgatcaccgatcccaccaatgtcgccgcgttcttcttcttcatgctgatcgcgctcctggtctccaatgtcgcctcccgcgtgcgtgtgcaggcggattcggcaacgcagcggattcggaccaccgagcagctgtatgccttcagccgcaagctggcgggcaccgctacgctcgacgacgtcctgtgggcgacggcctatcaggccgcgctgatgctcaaagtgcgcgtcgtgctgctgctgccgcaggacggcaagctcatcgtgatggccggctatccgccggaggatcaactcgatgatgcggaccttgccgcggccagctgggcctggagcaatgaccgcgccgccggccgcggctcggacaccttgcccggcgccaagcgcctgttcctgccgatgcgcaccggccgcggactgatcggcgtcatcggcatcgatgacgaccgctccggtccgctgctgacgcccgaccagcgccggctgctcgacgcgctggtcgaccagggtgcgctggcgatcgagcgcgtgctgctggtcgaggacatggacaaggtcaagcgcaccatggagcaggaccggctgcgctcggcgctgctgacctcgatctcgcacgatttgaagacgccactcgcctccgtgctcggcgccgcgtcgaccatgcgcgacctcgcgacacgcttgtcggacaaggagaagctcgacctgctcgcgaccgtcatcgacgagtccgagcggctgaaccgcttcattgccaacctcctggacatgaccaagctcgaatccggcgcgatcaagccgaatacggcgccgcacgatctcggcgagatcgtcggcagcgcgctgcgccgcgccagcaagatcctggcgggtcacaaaatctcgctggaactcgccgccgacctgccgatgctcgagctcgatgccgtgctgttcgagcaggtgctgttcaacctgctcgacaacgccgccaaatatgctccggccgacacgacgatcgagttgcgctcgcggcgcgacggcgcctgggtggtgctcgacgtccgcgacgagggagacggcattccgcccgatgaggtcgagcacgtgttcgacaagttctatcgtgtgcagaaaggcgaccaggtgcgtcccggcactggcctcgggcttgcgatttcgcgcggcttcgtcgaggcgatgcaaggccggatgaccgccggcaaccgtgcggatcgcagcggcgcggttctcacgatccgtctgccggtgccaccgcaggcgaagaccctggagactgcggcatga

SEQ ID NO: 93739 - protein, 905 aa, Bradyrhizobium sp. ORS278
MAHQRRDPDQRPSPEALLEAARREESPAGKLKIFVGAAPGVGKTYEMLSSAHAKLKAGIDVVIGFVETHGRVETDALVRGLEVIPRKRIGYKDQVIEEMDLDAVIARRPKLAIVDELAHTNAAGSRHPKRYLDVEELLSHGIDVYTAVNVQHIESLNDVVAQITHVRVRETVPDSILDRADAIELIDLTPDDLIQRLKEGKVYVPKQAERALEHYFSPGNLTALRELALRRTAERVDEQLLNHMQANAIAGPWAAGERILVCVSEDPRAAGLVRYTKRLADRVHAPWTAVTIETRRNLQLSDKQRDRLADTLRLAESLGGEALTIPSAGRRIADDLIGFAQANNVTQIIIGKSQRSRLFEIIRGSVVHDLVRRAGNISIHVIPGEETPGETGTSVQTRARSEPLQAKPYIMALLITAVGLGLAELIQPFFGIENVDLVFLTAVVGVAARYGLWPSLLASLMASLCYNFFFLPPIYTFTITDPTNVAAFFFFMLIALLVSNVASRVRVQADSATQRIRTTEQLYAFSRKLAGTATLDDVLWATAYQAALMLKVRVVLLLPQDGKLIVMAGYPPEDQLDDADLAAASWAWSNDRAAGRGSDTLPGAKRLFLPMRTGRGLIGVIGIDDDRSGPLLTPDQRRLLDALVDQGALAIERVLLVEDMDKVKRTMEQDRLRSALLTSISHDLKTPLASVLGAASTMRDLATRLSDKEKLDLLATVIDESERLNRFIANLLDMTKLESGAIKPNTAPHDLGEIVGSALRRASKILAGHKISLELAADLPMLELDAVLFEQVLFNLLDNAAKYAPADTTIELRSRRDGAWVVLDVRDEGDGIPPDEVEHVFDKFYRVQKGDQVRPGTGLGLAISRGFVEAMQGRMTAGNRADRSGAVLTIRLPVPPQAKTLETAA

SEQ ID NO: 93740 - DNA, 2691 bp, Listeria monocytogenes str. 4b F2365
  CDS (1)..(2691): transl_table=11
atggaaacgaatcgtccaagtccggatgcgctgctggtgaatttgcaagaagaggcagattcatccgtgggtaaattaaaaatatattttggctttgcggcaggtgttgggaaaacatatgccatgttaagtgacgccaaagatcaattagcagcaggtgtggatgtcgtggcgggttatattgaacctcatgctcgcgaggaaacgctgagaatgttagaaggaatcccgattattccaccaaaagcaattactcacaaaaatattgcgctcaaagaattcgatttggacgaagcgttgaaacggaagccggaacttattttggtagacgaactcgcacatacgaacgcatcaggtgtacgcaataagaaacgtttccaagatgtggaagaattgcttcaagcgggaattgatgtgtatacgactgtcaatgtgcaacatattgaaagtttaaacgatattgtagaaggcatcaccaaagtagctgttcgcgaaacgattcctgactatgtttttgatgaggcggaccgagttaaattaattgatattgaacccgatgaacttctaaaacggttagaacagggtaaaatttatcaaccggcgcgcgcaaaaacagctatgcagaacttcttcactagagaaaacttaaaactcttgcgtgaaattgcgatgcgaaaagcggccgaccgaattagtcacgaatacgatcaaacaggtgtttatccagagaaacgggcgagtagtaaatggttagtctgtattggaacgtcgccttcatctgcaaaactcattcgctggacagcgcgcactgccgaggctttccgcgcaccatggacggccctttatattgaaaatgaagaaaatgattatatgaccaaagcagagaaaaaatgtttacgggaaacgatggaactcgctgaacggcttggcgctgaaattgtcaccctcgccggacatgacattgcagaaacagtagctgagtatgcccggttgactggtgtgacaaatatcgttgtcgggaaatcgcgtcgccgcatgggtttaaggtctttatttgaagatgattttgaggatcgtctcattacgcaccttgataacgttgatatgcatattatcccctcgagccaaccaaaaacgaaaaagcgtcgaatgaaaatgcgttttaaaagttttttaacctggcatgacatggcgaaaatgattttacttctaacattggcaacggcgatttgtgtcggtttaagtgaatttggcatcggtgatcaaaatgttattatggtatatattttatccgtgttaattatttctcgcgtaacaagcggctatgtttatggcgttatgggttctatcattggtgttatgttatttaatttctttttcacgacaccactttatacgtttaatacaattcaagcgggctatccggtgacgttcggaattatgcttttagtcgctcttattacgagtgcgctaactgtccgaattaaaacccaagctagcctggccgttgagcgagaacgtcgaaccgaagtgctttatgaaatcaataaacggctattagtcacccgtaatttaaaaggaattatcgatttaaccaacgaatatattttgcatttatttagccgttccgttattttttattctgcggatcctgccaaaagtaataaagggattttcgtgcaagcagaaggaaaagaagatgcgagtgcgcttcttagtgcggatgaagaagcggttgcccactgggtatttaaaaataaaaagcgggcgggtgctgggacggatacgttaatgggggcatttggttattatatgccagtgatgtcacaggggaaagtgcttggtgttattggtgtttcttgctccccagaagatggtccacttacacaagataatcggatctttttacgaatgattagctctcaagtggcactagctttagaacggcaatatttatctgaagaacaacgccaaatcgtcatcgaatcagcaaaagaaaaaatgagaagcaatttacttcgggcaatttcgcatgatttaagaacaccgctcactggcattgttggagcaagttctgccttacttgaaaaagaaactgagctagataaagaaacggaacataatttaattaaaggtattaaagatgactctggctggctcattcggatggttgagaatttgctttctgtgacgagaattagtgaagggttagtgagtttggaacgagctccagaagccgtagaagaaattgtaggtgaggctgtcggtcgaatcaaaaaacgtttcgcggaccgaacaatccatgtcaaagtaccgcgcgaccttcttatggttccgatggatggcacgttaattgagcaagtccttattaatttaatggaaaatgcgctacgtcatggtggaactggtgcagaagtttgggtagacgtgacgaaaacgaagcaaagtgcgatttttagtgttcgtgataatggaaaagggattccggaaaaacgcttgccagatttatttgatacttttgctgtggaagcgagagagcgttctgatatgtcacgcggattaggacttggtttatcgatttgtatgtcgattattcgagcgcatgacgggactttagaagcgaaaaataacaaacatggcggggcgacattctggttcactttgccactagacggaggagatggaaaatga

SEQ ID NO: 93741 - protein, 896 aa, Listeria monocytogenes str. 4b F2365
METNRPSPDALLVNLQEEADSSVGKLKIYFGFAAGVGKTYAMLSDAKDQLAAGVDVVAGYIEPHAREETLRMLEGIPIIPPKAITHKNIALKEFDLDEALKRKPELILVDELAHTNASGVRNKKRFQDVEELLQAGIDVYTTVNVQHIESLNDIVEGITKVAVRETIPDYVFDEADRVKLIDIEPDELLKRLEQGKIYQPARAKTAMQNFFTRENLKLLREIAMRKAADRISHEYDQTGVYPEKRASSKWLVCIGTSPSSAKLIRWTARTAEAFRAPWTALYIENEENDYMTKAEKKCLRETMELAERLGAEIVTLAGHDIAETVAEYARLTGVTNIVVGKSRRRMGLRSLFEDDFEDRLITHLDNVDMHIIPSSQPKTKKRRMKMRFKSFLTWHDMAKMILLLTLATAICVGLSEFGIGDQNVIMVYILSVLIISRVTSGYVYGVMGSIIGVMLFNFFFTTPLYTFNTIQAGYPVTFGIMLLVALITSALTVRIKTQASLAVERERRTEVLYEINKRLLVTRNLKGIIDLTNEYILHLFSRSVIFYSADPAKSNKGIFVQAEGKEDASALLSADEEAVAHWVFKNKKRAGAGTDTLMGAFGYYMPVMSQGKVLGVIGVSCSPEDGPLTQDNRIFLRMISSQVALALERQYLSEEQRQIVIESAKEKMRSNLLRAISHDLRTPLTGIVGASSALLEKETELDKETEHNLIKGIKDDSGWLIRMVENLLSVTRISEGLVSLERAPEAVEEIVGEAVGRIKKRFADRTIHVKVPRDLLMVPMDGTLIEQVLINLMENALRHGGTGAEVWVDVTKTKQSAIFSVRDNGKGIPEKRLPDLFDTFAVEARERSDMSRGLGLGLSICMSIIRAHDGTLEAKNNKHGGATFWFTLPLDGGDGK

SEQ ID NO: 93742 - DNA, 2658 bp, Staphylococcus aureus subsp. aureus MRSA252
  CDS (1)..(2658): transl_table=11
atgtcaaacactgaatcgctaaacataggaaaaaagcgtggatctttaacaatttacatcggttacagtccaggtgttggtaaaacatttgagatgctttcaaatgccattgaactatttcaaagtaacgttgatattaaactaggatatattgaaccgcatcaacgtgatgaaacaaatgcattagctgaacaattacctaaaatcgcaaccaattttactaaacatggtagtcatcattttcaatatttagatgtcgaccgcataatcgaagaatcgccgacaatagtacttatcgatgagttagcacatacgaacatttctagagatcgtcatgagaaacgatatatggatattgaagaaattttaaatcatggtatcgatgttcatactactttgaacattcaacatattgaaagtttaagtagtcaaattgaactgatgaccggtgtacatgttaaagaacgtgtacccgactatttcataatgagcgccgatgtattagaagtcgtagatatctcacctgaacaattaattaaacgcttaaaagctggcaaggtatataaaaaggataggctagatgtagcatttagtaatttctttacgtatgcccacctaagcgaactgcgtacattgacgttaagaacagttgccgacttgatgagtgataaagaaaaagtccgacacaatcataaaacgtcactcaaacctcatattgctgtggcaattagtgggagtatttataatgaagcagtaattaaagaggcattccatattgctcaaaaagaacatgcaaaattcactgctatttatatagatgtattcgaaaaaagcaggcaatataaagatagtcaaaagcaagtgcatcaacatctcatgcttgcaaaatctttaggagcaaaagtaaaagtagtttatagccaaaccgttgcattaggattagacgaatggtgtaaaaatcaagatgtaaccaaattaattatcggacaacatattagaaataagcggcgagactttttcaataaacctttaattgaccatttaatgtcctttgaacatagctataaaatcgaaatcgttccaatcaaacaaatacctgttgaattgaaaatgaacaaatcaccctatcgtcctaaaggcaaacggttcgccatagatatgttaaaaatgattctgattcaaataatttgtgtaatgatgggactgtggatttatcaacttgataagcatgagtctagtacgattattttaatgatttttctcatcggcatcattttgttatccatttggacgcggtcctacatcattggctttttagcagcaattattaacgtatttgtttttaattatttttttacggaacctagatatacatttgaagtataccgctttgactatcctattacatttatcgtcagcattttaacaagtattttaacgagtgctttattaaaacaaattaaattccaatacgccattactaaaaagcaactttatcgtacagatttattatttcaatttaatgattcgattaaacaaacttatacagttgaaaacttactaataaatgctggataccaaattaatcaattattgcaacaatcaattactatatacgttatcaatcaatccaaagtaattaaaacaataccattgcaaaaccatatcgataataagactcaacagcatgaacaagcattaagctgggtaattaaaaatgaaagacaagctggtgcaacaacagatacatttccaggcattaataaatggttgataccaattggcacatctccgattaaaggcattctagccattgattaccaaagttctcaagtgattaatccatatgatgcatcaatattagaatcaatgttaaatgaactttctctcgccgttgaaaatgtgacgttgcttaaacaaacaagagaatccatgttacaggctgaacgtcaactgacacattcaaattttttaagatcaatttcgcatgacatacgtacaccgttaacaacaattatgggaaatttagatattttagtgtcacatagtaaagatatgtctatcatagaaaaggaacaattacttgtgcatagttttcaagaaagtcagtatttatatctattagtgacaaatattttatcattaacaaaattacagtcatcaaatgttcagataaaattgcaaccttatctcgttagtgaattagtagaagaaatcgatatgattttagaacgtcgccatttaaaaaagcgtataactgtatcatcctcagtagatttacagtttatacacattgacagtaagttgattttacaagctttattcaatttgattgaaaatgcagttaaacacacttctactgacaccaaaatcaatttatctattcgttatgctagcgatgaacaaatcgaatttgctgttatagacgaaggacctggaattagtatagaagaacaacaaaagatattcgagcctttttacacagggtcaaataaatattttaaagataaccaaaaagaaagcatgggactaggcttatatttagtacagactatcctacacaaacatcaatcaaacctacaatataaaccgaaccaaccacatggcagtatattctatttcaatatagatacagactttaatgaaggagacatataa

SEQ ID NO: 93743 - protein, 885 aa, Staphylococcus aureus subsp. aureus MRSA252
MSNTESLNIGKKRGSLTIYIGYSPGVGKTFEMLSNAIELFQSNVDIKLGYIEPHQRDETNALAEQLPKIATNFTKHGSHHFQYLDVDRIIEESPTIVLIDELAHTNISRDRHEKRYMDIEEILNHGIDVHTTLNIQHIESLSSQIELMTGVHVKERVPDYFIMSADVLEVVDISPEQLIKRLKAGKVYKKDRLDVAFSNFFTYAHLSELRTLTLRTVADLMSDKEKVRHNHKTSLKPHIAVAISGSIYNEAVIKEAFHIAQKEHAKFTAIYIDVFEKSRQYKDSQKQVHQHLMLAKSLGAKVKVVYSQTVALGLDEWCKNQDVTKLIIGQHIRNKRRDFFNKPLIDHLMSFEHSYKIEIVPIKQIPVELKMNKSPYRPKGKRFAIDMLKMILIQIICVMMGLWIYQLDKHESSTIILMIFLIGIILLSIWTRSYIIGFLAAIINVFVFNYFFTEPRYTFEVYRFDYPITFIVSILTSILTSALLKQIKFQYAITKKQLYRTDLLFQFNDSIKQTYTVENLLINAGYQINQLLQQSITIYVINQSKVIKTIPLQNHIDNKTQQHEQALSWVIKNERQAGATTDTFPGINKWLIPIGTSPIKGILAIDYQSSQVINPYDASILESMLNELSLAVENVTLLKQTRESMLQAERQLTHSNFLRSISHDIRTPLTTIMGNLDILVSHSKDMSIIEKEQLLVHSFQESQYLYLLVTNILSLTKLQSSNVQIKLQPYLVSELVEEIDMILERRHLKKRITVSSSVDLQFIHIDSKLILQALFNLIENAVKHTSTDTKINLSIRYASDEQIEFAVIDEGPGISIEEQQKIFEPFYTGSNKYFKDNQKESMGLGLYLVQTILHKHQSNLQYKPNQPHGSIFYFNIDTDFNEGDI

SEQ ID NO: 93744 - DNA, 2646 bp, Acinetobacter sp. ADP1
  CDS (1)..(2646): transl_table=11
ctgatgcagattgaccgcaatgaaaaagccgatgcttggttggcgcatacgcaacgtgagcaatctgggcgtcttaccatttttttaggtgctgcacctggcgtgggtaaaacctatgccatgctcacgcgggcgcatgagctgatgcagcagggcaaacaggtcgttgtgggggtagtcgaaactcacggtcgtgccgatacagcgcggttgattgcgggtttaaatgtgattccacgtcgagtggtcgagtatcaagaccgtaaacttgaggaaatggatttagaccagattcttcacattaagcctgaaattgtgctggtcgatgaactggcccatcgtaatgtgccaggcagtcggcatgagtatcgctggcaagatgtcaatgaaattctggatgccggaatcaatgtttatagcaccctcaatattcagcacctagaaagcctaaacgatgtggtgtatcagattaccggcattcgcgtgaccgaaactgtgcccgatgcgttactcaagcgattgaaagatattcgtttggtcgatttgcctgtgcctgaactgcttgaacggatgaaacatggcaaaatctatctagacgatatggcaccgcatgccttgcagggcttttttaaacctgcacatttaactgcactgcgtgatctggcgattcagactgtggcggggcaggtcgaaattgattatcgggaaaaatctgtggcgcaggggcgcatcgtcccgattcagaatcatgtgatgctggccatcgatggttctgtctttgctgaggatctggtgcgccgtgctcatcgcattgccgagcgacgcaatgcaacgtggagtgtaatttcaattcaaaaaagcaaaacctcctcggcgcaaagtctggccgtgagtaaagcatttaatctggcacgtaaactgggtgccgacacctatttgctttacagtcatcaaattgcgccaaccattttgcaagcggcctatgattatggtgcctcaaatattttgctgggaaaaagccccaaaaaaacacttcttgaacgtattcgctccgagcatattgccgatcagctcctcgacaagcagcacccctttgaaattacctttgtacaaccactcaaagcaacatcgtattcggcacaggctgctgtgcccgatcaaacatggctgcaacagtacactcattttcaagcgcgagaactgatcgaaagcgtattgattgtactggcaggatttattatcgcggtcatcagtgatcattttattggctataccgagctggcgctgatttttgtggtgacggtgctggtggtggccatgcgtgcccgaatgctcatgaccttgctgagtgttttcgtttgttttttactgtacaactacttttttattgaaccccgctttacctttagaattagcgcagagcgtggtgtgattaccatcgtgatttttattttatcggctttgctggttgggcgtctggccaatcagttacgcgcacaggtactgagtttaagggtggccaatagtgtatcgctgcaactgcaagagcttgagcgtaaactctcgacgtgcgtagatattgcacaggtgcttagtgtatctaaacagcatctggagagtgcattgaaagccacggcatggttaagagtgagcgaacttgaggcgggtgatcggagtcagttaaatcacaaagaccacattgcagccgactggacacaaaaaaatggtcagccctgtgggcgttttaccaataccctgacccaatctgagtggtggtttaatccgctcaatctggcgggggagcatggtgtgattgcactgcgctttcatcccgatttagacgtgatcagttttgagcagcagcgtttggccgagctgatgattgaagatattgcacaaacactggcgcgggttttactgtcatttcagctcgaaaactcacgagtggtagccgaaaccgaaaaacttcgatcagcgctcttgtcatcggtatcgcatgacttacgttcacctttggccgccatgattggctcggcagatacgctaaaatattacagtgtgcaattgtcagatacagatcgggacagcctgctcgacaccattcacatcgagggcgaacggcttgatcgttatatccaaaatctactcgatatgacgcgtttaggccatcaggggctgacgttaagccgtgcatggatcagtatcgatgagttgataggctcggcgacccagcgtttaaaacgctatcaacccaatattcagatagacacacacattgcgccgaatttacccgctttgtatgtacatccggcattaatcgaacaggcattatttaatgtgcttgaaaatgcagccaagttttcacctgatgctgttcccattcaggtgaagatcagtgcagtcgatgagcagtttcagattgacatcatcgatctgggtatcgggattcccgagcaggagcgtgagcaaatttttgatatgttttataccatgcagcgtggtgatcggggtaaaactggtactgggcttgggcttgccattgtgaaagccattatcggggcacatatggggagcattgaagcaatggctgggccgtatggtcaaggcacccaaattcgaatacgattacctcaacaccaagaataa

SEQ ID NO: 93745 - protein, 881 aa, Acinetobacter sp. ADP1
MMQIDRNEKADAWLAHTQREQSGRLTIFLGAAPGVGKTYAMLTRAHELMQQGKQVVVGVVETHGRADTARLIAGLNVIPRRVVEYQDRKLEEMDLDQILHIKPEIVLVDELAHRNVPGSRHEYRWQDVNEILDAGINVYSTLNIQHLESLNDVVYQITGIRVTETVPDALLKRLKDIRLVDLPVPELLERMKHGKIYLDDMAPHALQGFFKPAHLTALRDLAIQTVAGQVEIDYREKSVAQGRIVPIQNHVMLAIDGSVFAEDLVRRAHRIAERRNATWSVISIQKSKTSSAQSLAVSKAFNLARKLGADTYLLYSHQIAPTILQAAYDYGASNILLGKSPKKTLLERIRSEHIADQLLDKQHPFEITFVQPLKATSYSAQAAVPDQTWLQQYTHFQARELIESVLIVLAGFIIAVISDHFIGYTELALIFVVTVLVVAMRARMLMTLLSVFVCFLLYNYFFIEPRFTFRISAERGVITIVIFILSALLVGRLANQLRAQVLSLRVANSVSLQLQELERKLSTCVDIAQVLSVSKQHLESALKATAWLRVSELEAGDRSQLNHKDHIAADWTQKNGQPCGRFTNTLTQSEWWFNPLNLAGEHGVIALRFHPDLDVISFEQQRLAELMIEDIAQTLARVLLSFQLENSRVVAETEKLRSALLSSVSHDLRSPLAAMIGSADTLKYYSVQLSDTDRDSLLDTIHIEGERLDRYIQNLLDMTRLGHQGLTLSRAWISIDELIGSATQRLKRYQPNIQIDTHIAPNLPALYVHPALIEQALFNVLENAAKFSPDAVPIQVKISAVDEQFQIDIIDLGIGIPEQEREQIFDMFYTMQRGDRGKTGTGLGLAIVKAIIGAHMGSIEAMAGPYGQGTQIRIRLPQHQE

SEQ ID NO: 93746 - DNA, 2733 bp, Erwinia carotovora subsp. atroseptica SCRI1043
  CDS (1)..(2733): transl_table=11
atgattgacggtgaagaccgccgcccagatcccgatagcctgctggcacaggtgggtacgccaccgcgtgggaagctgaaaatcttttttggcgcctgtgcaggcgtagggaaaacctatgccatgttgcaggaagctcaacggctgcgggcgcagggattagatattattgtcggcgtggtcgaaacccacggacggagcgaaactgctgcgctgttggatgggttaccgcaactgccgctcaagcatcttcgccatcacggtcgccacactgtcgaattcgatctggatgccgcgctggcacgctgtccggcactgattctgatcgacgaactggcgcacagcaacgtcaacggctcacgtcaccccaagcgctggcaggatgtgcaggaactgctcgatgccggtatcgacgtctttaccacggtgaacgtccagcatctggaaagcctgaatgacgtagtcggtggcgtcacagggatcagagtacgagaaacggtgccggatccgatcttcgatcaggctagcgaagtcattttagtggatctgccgccagacgacctgcggcagcgtttgaatgaaggcaaagtgtatttgccgcttcaggccgaacgcgccgtcgagaactttttccgtaaaggcaatttgatcgccctgcgcgagctggcgctacggcgcatggcagatcgggttgacgatcaaatgcgcgctatgcgtgccggacaaggccgcgagcaagtctggcatacgcgcgacgccattctgttatgtatcggccacggcacgggtaatgaaaaactggtgcgtaccgcagcacgactcgcagcacgcttaggcagtgcctggcacgcagtttacgtcgaaacaccacgcctgcaccgcttacccgaaccgcagcgacgtgccattttgcgtgcattaaagctggcgcaggacctcggggccgaaaccgttacgctatccgagcccgacgaagagcttgccgtcctgcgctatgcccgtgaacataatctcggcaaaatcgtcattggacgccatgtggagcagcgcttcggctggtggtggcgcactcgctttgccgaacggctcggcagattagggcccgatctcgatctggttgtcgtcgccgtacaggatgacgcgcctgccgcaccgataaaaacgcccgatgcgcgtgggctggtagaaaaatggcgtatgcaactgtttggctgtgggttggcaacgctgctgtgcgcctttatcaccctgctagcctcatggtcgccatttgccatgctggaaccggtcaatctggtgatgatttatctgctggccgtggtgatcgtcgcgctcttctttggtcgttggccatcggtgttcgctgccgtcatcaacgtcgccagtttcgatctctttttcattctaccgagcggtacgtttgccgtgtcggatgcgcaatatctggtgacctttgccgtgatgctcggcgtcggcctgctggtcggtaacctgacggcgggcgtacgctatcaggccagagtcgcccgttatcgcgagcagcgcgtccgtcatctgtatgagatgtccaaggcactgaatcgcagcctgtccagcgccgatatcgtcgaagccagccagcattttctcagtacaacgtttcaggccaagatcgcggttctgttggccgatagcctgcatcacacctcgcccgacttgccgcagcccgcacgggataatcagcagctgattgtcgataacgctatcgctcgctggagcttcgatcatcgtgcgcctgccggtgcggggacatccaccctgcccggtgtgtcgtatcagattctgccgctcgccaccacgcagcaaatcttcggcgtactggcgatcgagcccagtaacgcgcggcagttgatgattcccgagcagcagcgcctgctggaaacctttaccgtgctgatcgctaatgcgctggagcgtctgcatctggtgcaaagtacagaaaatgcccggctggatgccgagcgtgagcagttgcgtaactcgctgcttgccgcactctcgcacgatctgcgtacgccgctgacagtactctttggtcaggccgagattcttacgttgaatctggcgagcgaaggatcgccttatgcccagcaggccaatcagatccgccagcacattttgaacactacgcggctggtgaataatctgctcgatatggcacgtattcagtctgatggttttaacctgcgcaaagagtggcaaacatccgaggagctaatcggcagtgccctacaacagttggaaagcgcgctggcgaaaaacaccattcaggttaatctacctgatgagatggttctggtttattgtgatgctgggctggtagaacgcgtgttcattaacctgttggagaatgcgctgaagtacgccggagagcaggccacgatcgtcattacggctcacgttgtcccgcagactgatacgcaggaaaacgcactggaaatcatcgtgatggataatggtccgggaattgagcacggccaagaaagtattatttttgataaattctcccgcggtcacaaagagtcatcgattcccggcgtgggattggggctggcgatctgccgggcaattgtggaaattcacggtggccgtatctgggcaactcacgtcgaaagcggcggtgcagcctttcatttcaccctaccgctgtcggcaccaccggatctcgaaccggaagatattgaggagcactaa

SEQ ID NO: 93747 - protein, 910 aa, Erwinia carotovora subsp. atroseptica SCRI1043
MIDGEDRRPDPDSLLAQVGTPPRGKLKIFFGACAGVGKTYAMLQEAQRLRAQGLDIIVGVVETHGRSETAALLDGLPQLPLKHLRHHGRHTVEFDLDAALARCPALILIDELAHSNVNGSRHPKRWQDVQELLDAGIDVFTTVNVQHLESLNDVVGGVTGIRVRETVPDPIFDQASEVILVDLPPDDLRQRLNEGKVYLPLQAERAVENFFRKGNLIALRELALRRMADRVDDQMRAMRAGQGREQVWHTRDAILLCIGHGTGNEKLVRTAARLAARLGSAWHAVYVETPRLHRLPEPQRRAILRALKLAQDLGAETVTLSEPDEELAVLRYAREHNLGKIVIGRHVEQRFGWWWRTRFAERLGRLGPDLDLVVVAVQDDAPAAPIKTPDARGLVEKWRMQLFGCGLATLLCAFITLLASWSPFAMLEPVNLVMIYLLAVVIVALFFGRWPSVFAAVINVASFDLFFILPSGTFAVSDAQYLVTFAVMLGVGLLVGNLTAGVRYQARVARYREQRVRHLYEMSKALNRSLSSADIVEASQHFLSTTFQAKIAVLLADSLHHTSPDLPQPARDNQQLIVDNAIARWSFDHRAPAGAGTSTLPGVSYQILPLATTQQIFGVLAIEPSNARQLMIPEQQRLLETFTVLIANALERLHLVQSTENARLDAEREQLRNSLLAALSHDLRTPLTVLFGQAEILTLNLASEGSPYAQQANQIRQHILNTTRLVNNLLDMARIQSDGFNLRKEWQTSEELIGSALQQLESALAKNTIQVNLPDEMVLVYCDAGLVERVFINLLENALKYAGEQATIVITAHVVPQTDTQENALEIIVMDNGPGIEHGQESIIFDKFSRGHKESSIPGVGLGLAICRAIVEIHGGRIWATHVESGGAAFHFTLPLSAPPDLEPEDIEEH

SEQ ID NO: 93748 - DNA, 2733 bp, Methylococcus capsulatus str. Bath
  CDS (1)..(2733): transl_table=11
atggccgcggaacgtccggacccggatgccctgctcgccagggtcgagcgcgagcaggccagagcgcggcggggccggctcaagattttcttcggcgccgcggcgggggtgggcaagacctatgcgatgctggaggcggcccgggagcggcgcgccgagggtatcgatgtcgtggtcggactggtggaaacccacggccgcaaggagaccgaggccctcctcgaaggactggagatgttgccggtacggacggtcgaataccgcggaacggtggtcggcgagttcgatctcgacggcgcgctcaaacgccggccctccgtgatcctggtcgacgagctggctcacaccaacaccgccggttcccgccatcccaagcgctggcaggacgtggaagagttgctgcgtgccggcatcgacgtctacaccacgctcaacgtccagcacctcgagagtctcaacgacgacgtgggccagatttccggcatccgggtgtgggaaaccgtgccggacacggtgttcgaagcggcggatgaagtcgaactgatcgacttgcctccggacgagctgctggtccgtctcaaggagggcaaggtctatctaccccagcaggcagagctggcggcagagaatttcttccgcaagggcaacctcatcgcgctgcgcgaactggccttgcgccagaccgcggctcgtgtcgacgcccagatgcaggactaccgcgaggaccacaccatccgggaggtctggcaggtcggcgagcgcatcctggtgtgcatcggcccgaacccgatggcggaacggctgatccgcgccggcaagcgactggcggccagcctcaaggcggagtggctcgtggtgtacgtggagaccccggcgctgcagcgcctcccggcggagcggcgcgatgcagtgctgcgcatgctgcggctggcggaacagctcggcgccgagacagtcaccctgagtgcgccggacatgagcgaggccatcatcgatctcgccagggaacgtaacgtcaccaagatcgtgatgggcaaacctcggcggcgcggctggaagcgctggctgctgggttcggtggtggacacgatcattgccgaggctcacaacatcaacgtctacctgctgggcagtccgccgggtgaggaccgtggccaggaatcgcttcaggcgccgcagccagggctgagcgccaaaccggaccgcggcggtggggcggagtaccggggctatctgggagcggcgacggcgacgttcctgtgtactctgacggcgaaggcgatgttcggccggttcgagctgaccaacctggtgatggtgtatctgctgggcgtcatcttcgtggcgacccgttatgggcgcgggccgtccatcctcgcttccatcctgggcgtcctcgccttcgatttcttcttcgtggtgccgtatcacaccttttccgtcgccgacacccagtatttgttcaccttcgccgtcatgttcagcgttgctctggtgaccgccaacctgatggcaaacgtccgctcccaggccaaggtcgcttcccatcgggaacgccgggcgaccgtcctgtatgccatgagcaaagaactggcggcgagccggagcgaggccgagatcgtccggatcgcggtgcgccagatcgaaaccgagttcggaggacgcgccgtgctgctgttcccggacgaaagcggaaggatcggctatccggtttccccgcttgcggaggaattcttgccgggcatcgacatgagcgtggcccaatgggtgttcgatcacgacgaaatggccggccggggtaccaatacgctgccgggcgccagcggcgtgtacatccctttgaccggagcggaaaagaccatcggcgtgctggtcatgaagccggtcaacctgcggcgggttttcctgccggagcagcaaaagctcctgcagaccttcgtgaacctgatcgtgcaggcgatcgagcgggtccgcctcgccgaacaggcccgcatcaaccaggtgcggatggagtccgagcgcctgcgcaattccctgctcagctcgatctcccacgatctgcgcaccccgctcgcgaccatcgtgggctcggcgagcaccctggtcgaaggcgactacgccctggagccggaggaccggcgggagctctgtcgggcgatctacgacgagtcccgccgcatggccagcctggtgaacaatatcctggacatggcctggttcgacgccggggtggtcaagctccatctgcagtggcacgttctggaggaaatcgtcggcaccgtgttgacgcgcttgaagaagcagctcgaacggcgcccggtgacggtgcgcctgccgcgggacgcccccttcgtctacgtggattcggtgatgctggagcaggtgctggccaacctgatggagaatgccatccgctacacgccggaaaatagtcccatcgagattgccgccgaggccacgccgttcacgatgaccatcacggtttccgaccacgggcctggcattcccaaaggtcaggaggagctcatcttcgaaaaattctaccgggtccaccgcgaaggcccgcaaagcggtgtcggtctgggactcgccatctgccgtgccatcgtggaggcgcatggcggttacatccgcgccaggaaccgggccggcggtggagcggtattcacgatcgtcctgccgctgcgggagtcgccgccccggatcgaaccggaagccgagccggcggaatag

SEQ ID NO: 93749 - protein, 910 aa, Methylococcus capsulatus str. Bath
MAAERPDPDALLARVEREQARARRGRLKIFFGAAAGVGKTYAMLEAARERRAEGIDVVVGLVETHGRKETEALLEGLEMLPVRTVEYRGTVVGEFDLDGALKRRPSVILVDELAHTNTAGSRHPKRWQDVEELLRAGIDVYTTLNVQHLESLNDDVGQISGIRVWETVPDTVFEAADEVELIDLPPDELLVRLKEGKVYLPQQAELAAENFFRKGNLIALRELALRQTAARVDAQMQDYREDHTIREVWQVGERILVCIGPNPMAERLIRAGKRLAASLKAEWLVVYVETPALQRLPAERRDAVLRMLRLAEQLGAETVTLSAPDMSEAIIDLARERNVTKIVMGKPRRRGWKRWLLGSVVDTIIAEAHNINVYLLGSPPGEDRGQESLQAPQPGLSAKPDRGGGAEYRGYLGAATATFLCTLTAKAMFGRFELTNLVMVYLLGVIFVATRYGRGPSILASILGVLAFDFFFVVPYHTFSVADTQYLFTFAVMFSVALVTANLMANVRSQAKVASHRERRATVLYAMSKELAASRSEAEIVRIAVRQIETEFGGRAVLLFPDESGRIGYPVSPLAEEFLPGIDMSVAQWVFDHDEMAGRGTNTLPGASGVYIPLTGAEKTIGVLVMKPVNLRRVFLPEQQKLLQTFVNLIVQAIERVRLAEQARINQVRMESERLRNSLLSSISHDLRTPLATIVGSASTLVEGDYALEPEDRRELCRAIYDESRRMASLVNNILDMAWFDAGVVKLHLQWHVLEEIVGTVLTRLKKQLERRPVTVRLPRDAPFVYVDSVMLEQVLANLMENAIRYTPENSPIEIAAEATPFTMTITVSDHGPGIPKGQEELIFEKFYRVHREGPQSGVGLGLAICRAIVEAHGGYIRARNRAGGGAVFTIVLPLRESPPRIEPEAEPAE

SEQ ID NO: 93750 - DNA, 2673 bp, Pseudomonas fluorescens Pf-5
  CDS (1)..(2673): transl_table=11
atgccgccccgcgacggtcgccccgatcccgatgcgctgctggaaaaactgcagcaggaagagcaagcggcccaacggggcaaactgcggatctatttcggttccaacgccggagtcggcaagacctgcgccatgctcaccgcggcgcgcaacgaagtggcccagggccgcgacgtggtggccggggtggtggaaacccatggccggcgggaaaccgccgagctgctgcaagggctgcaagtgctggagcgccaccgcctgatgcaccgcgactacgccttgccggagttcgacctggatgccgccctggcgcggcacccggcggtgctgctggtggacgagctggcccacagcaacgtgcccggctcgcgccatcccaagcgctggcaggacgtggaggaattgctgcgggccggcatcgatgtttggaccaccctcaacgtccagcacctggaaagcctcaacgacatcgtcagcgggatcatcggcatccgggtgcgcgagacggtgcccgaccacctgttcgacgaagcccacgaagtgctggtgatcgacctgccgccggatgacctgctgcgccgcctcaaggacggcaaggtctacctcgggccccaggccgaacgcgcttcacggcatttctttcgcaagggtaacctgctggccctgcgtgaactgaccctgcgccgcaccgccgaccgggtcgatgcacagatgcgcgactatcgccgcgagcgttcgatcaatgccttgtggccggctcgcgagcgcttgctggtggggatcgccggcgacccggcggacgagcgcctggtgcgcgaagccgcgcgcctggcgcaaaagctcgaagccgactggatggtggtgcacgtggcttcggcccagcgccgtggcgccggcgccgcccgttatgcggcggccatgaagaccctggccctggccgccgagtttggcgccgagaccgccactttgcccggcatggatgtcgccgaagccctggtggcctgcgctcgcgagcacaacgccaatcgcctggtgctgggccattacccgcgcaaggtctggcagttctggcaccagtcggtgagcgaccgcatcagccgccagcacccggaaatcgaccagatcgtgatcgccaacgggcccttgagccggcgccctgcgccagtggacaagcccgaggccggcctgccgcctagccgcgcgccggcctacctgtgggcgagcctggcgtgctttgccgccaccgcggtggcggcgctgctgctcaaagtgttcgacccggccaacgtggtcatgctgttcctgctgaccgtggtcctggtggcgctgcgctacgggcgggggcccggcgtctgggcggcgatgctggcggtgctgtgcttcgatttcttcttcgtccagccggtgtggtcgttcacggtcaacgacacccagtacttcttcaccttcgccctgatgctggggattgccctgatcaccggccagctcaccgcgcgcctgcgccatgaagcgcgtaccgcggccgcgggcgagcgtcgtgccacctccctggccgggctggcccgtgagctgtcggcggcgttgaccgaggagcagatctgcgccgtggccttgcgtaccttcagcggggtgttcgaggcccgggtcgggctggcgttgccggatgccgagaaccgggtgcgggcgctgagcgccaataccctggccattgacgagagcatcgcccagtgggcctatgaccacgaccaaccggccgggcgcggcaccgataccctggcggcggccaagggctgctatctgccgctcaaggcgccgatgcgggtgcgtggcgtgctggtgcttgaagccgaggatgccgagcgcctcaaggagccggaagaacagcgcctgctggaggcctgcatgagccagctggcgattgccctggagcgcgtgcattacgtcgaggtggcccagagcactgtgctgcagatggagggcgagcgcatgcgcaacaccctgctggcggccatttcccatgacctgcgcacgcccttgaccaccatcatcggcgccgccgacgccgccttgccccacgctgcgcagggcccgctcaagcacctgctggcagggattcacgatcaggcttcgtccatgcagcggctgatcgagaacctgctggacatggcgcgcatgcaggagcgcggggtacgcctgaatcgccagtggaactccctggaggagattgtcggcagtgccctgcgccagctgcgcgagcccctggccgggcatcaattgcgagtggccatggcgccgcagctgcccttggtggaagtggacgcgctgttgctggagcgggtgctggtgaaccttctggacaacgccgccaagtacaccccggccgggaccctggtgcagatcagcgcccgccaggtcgaccagcagatcatcctgcaggtcagcgacagcggcccgggctgcccgaagggcagttccccggccagcctgttcgaagccttcagtcgcggtcagcaggaatccgccgtggccggcatcggcctgggcctggccctggccaaacgtatcgtcgaggcccatggcgggcgcatcgaggcccagcctcatgccgatgccgggctgagttttgtcatcaccttgccggcgggtcagccgccttccatggaaaccctatga

SEQ ID NO: 93751 - protein, 890 aa, Pseudomonas fluorescens Pf-5
MPPRDGRPDPDALLEKLQQEEQAAQRGKLRIYFGSNAGVGKTCAMLTAARNEVAQGRDVVAGVVETHGRRETAELLQGLQVLERHRLMHRDYALPEFDLDAALARHPAVLLVDELAHSNVPGSRHPKRWQDVEELLRAGIDVWTTLNVQHLESLNDIVSGIIGIRVRETVPDHLFDEAHEVLVIDLPPDDLLRRLKDGKVYLGPQAERASRHFFRKGNLLALRELTLRRTADRVDAQMRDYRRERSINALWPARERLLVGIAGDPADERLVREAARLAQKLEADWMVVHVASAQRRGAGAARYAAAMKTLALAAEFGAETATLPGMDVAEALVACAREHNANRLVLGHYPRKVWQFWHQSVSDRISRQHPEIDQIVIANGPLSRRPAPVDKPEAGLPPSRAPAYLWASLACFAATAVAALLLKVFDPANVVMLFLLTVVLVALRYGRGPGVWAAMLAVLCFDFFFVQPVWSFTVNDTQYFFTFALMLGIALITGQLTARLRHEARTAAAGERRATSLAGLARELSAALTEEQICAVALRTFSGVFEARVGLALPDAENRVRALSANTLAIDESIAQWAYDHDQPAGRGTDTLAAAKGCYLPLKAPMRVRGVLVLEAEDAERLKEPEEQRLLEACMSQLAIALERVHYVEVAQSTVLQMEGERMRNTLLAAISHDLRTPLTTIIGAADAALPHAAQGPLKHLLAGIHDQASSMQRLIENLLDMARMQERGVRLNRQWNSLEEIVGSALRQLREPLAGHQLRVAMAPQLPLVEVDALLLERVLVNLLDNAAKYTPAGTLVQISARQVDQQIILQVSDSGPGCPKGSSPASLFEAFSRGQQESAVAGIGLGLALAKRIVEAHGGRIEAQPHADAGLSFVITLPAGQPPSMETL

SEQ ID NO: 93752 - DNA, 2709 bp, Dechloromonas aromatica RCB
  CDS (1)..(2709): transl_table=11
atggctgatcaaagacccgaccccgatcaactgctcaaccgcgtgaatgcggaagaagccaggtccaaacgcggcaagctgaagatatttttcggcgcctcagccggggtcggcaagacctacgccatgctgggcgcagcgcggcagcaattgctggccggggtggatgtcgtcatcggcatcgtcgagacccatggccggatggaaacggaagtcatggctgacggcctggaatacctgccattaagggatattccctaccgcgaccgcctactcaaggaatttgatctggacggcgccctggcccgcaagccgcaactgatcctgatggacgaactggcccattccaacgtcgccggttcgcgtcatgccaagcgctggcaggatatcgaagaattgctggcggccggcatcgatgtctattcgaccgtcaatgtccagcatctggaaagcctgaacgacgtggtcagcggcattaccggcatccgcgtttgggaaacggtgccggacaaggtgttcgatgccgccgatgagattgtcctggtcgacctgccacccgatgaactcctgcaacgcttgcaggccggcaaggtctatctgcccaatcaggcagaacgggcgattcgcaactttttccgtaagggcaacctgattgccttacgcgaactggcgttgcgccgcacggccgaccgggtcgatgaccagatgctgcaataccggcgcgatcagctcgtgtcgccggtctggcaaacccgggattccctgctcgcctgcatcggaactggcgcgggaggggaaaagatcgtccgcaccacggcccgtgttgccaaccggctggaagccccttggcacgccatttacatcgaaaccccggcgttgcagcggctgtccgagaacagtcgccatcggatcctgcgcaatctcaagctggccgaggaactgggtgcccagacggctacgctatcgggcaacgatgctgaaggggtcgcagtcaaatatgcccgcgatcacaacctgtcgaaaattttcgtcggccgggatcacccgcgcccctggcgtccctggtaccgatccttcgccgaccgccttggccagcgagcgcccgacctcgatgtactccaggtggcgcgcgccgatatcgaccgggaacccgggcaagcagcccgggagagcattggcgacagcattttcgaccagtggccggcttacgcgaaagcagccgcaggttgcgcgctggctggggttgcagctgccgcgctgttcccgattgtcgacctgcccaacatcgtcatggtctttctgctcgcggtggtgctggtcagcgtgcgctacggccgcggcccaggcgtgttggcatccttcctttccgttgcgatttttgattttttctatgtcccaccgcgcttttcctttgcggtcagtgatgtgcaatacctgatgactttcgccgtcatgctcgcggttggcctgatcaccggccagttaaccgccggctccaaataccaggccaaggtggcgacgcgccgggaacagcgcgtccgctcgctctatgaaatgtcgcgcgacctttcagcggcgctgatgcccgaccagatcactgaaatcggcgaacgcttcatcgttgctgaactgggggccaaggccgctttcctgctaaccgacgacaacgaccgcttgcagccggctcttccctcggccaatggcctgccggctgtcgacatgggtattgcccagtgggcttttgatcacgccgaagcagcaggccaagggaccaatacgctggcggccagcccaattctgtatttgccattgaaggcgccaatgcgccagcgcggggtgttagcgctggaaatgcgcgatacggaccgcctgctcatcccggagcagcggcgcttgctcgacacctttgcctctctaattgccatcgcactggaacgggtgcattacgttgaggtcgcccagaacacgaccgtgcaaatggaatcggagcgtctgcgcaactccgtgctctcggccatttcccatgatctgcggaccccgatgagtgtcttggttgggctggccgattcgatgttcctgacccagccgccaccgaccggaccgcaggccgaaattgcccactccctgaaggaagaggcgctgcgcgtcagtagccaggtcaacaacctgctcgacatggccaagctacagtcaggccgggtggagttgaaccggcaatggcagccgttggaggaagtggttgtcagcgccctgaaaacactggagcgggcctttgctgagcatcagatcagcgtctcgctcgatgaaaacctgccactggtcaacattgactccgtgctgatggagcgagttatctacaacttgctggaaaacacagtcaaatacacgccgccgggcagcttggtcgaaatcggtgccaacgtcacagaaaggatgattgaggtctgggttgaagataacggccccggattgcccgaagggaaagaggaaattattttcaagaaatttgaacgggggcagccggaaagtgccacccggggcgtcggtttgggactggccatttgccgggctattgtcgaagcgcatggtggagaaatttatgctgtgaatcggccgcaaggtggtgcgcgtttcatgttcaccctgccaaggggcaatccgccatcgcttgatgctgaggaaatgccagcagacgaggaggctcattaa

SEQ ID NO: 93753 - protein, 902 aa, Dechloromonas aromatica RCB
MADQRPDPDQLLNRVNAEEARSKRGKLKIFFGASAGVGKTYAMLGAARQQLLAGVDVVIGIVETHGRMETEVMADGLEYLPLRDIPYRDRLLKEFDLDGALARKPQLILMDELAHSNVAGSRHAKRWQDIEELLAAGIDVYSTVNVQHLESLNDVVSGITGIRVWETVPDKVFDAADEIVLVDLPPDELLQRLQAGKVYLPNQAERAIRNFFRKGNLIALRELALRRTADRVDDQMLQYRRDQLVSPVWQTRDSLLACIGTGAGGEKIVRTTARVANRLEAPWHAIYIETPALQRLSENSRHRILRNLKLAEELGAQTATLSGNDAEGVAVKYARDHNLSKIFVGRDHPRPWRPWYRSFADRLGQRAPDLDVLQVARADIDREPGQAARESIGDSIFDQWPAYAKAAAGCALAGVAAAALFPIVDLPNIVMVFLLAVVLVSVRYGRGPGVLASFLSVAIFDFFYVPPRFSFAVSDVQYLMTFAVMLAVGLITGQLTAGSKYQAKVATRREQRVRSLYEMSRDLSAALMPDQITEIGERFIVAELGAKAAFLLTDDNDRLQPALPSANGLPAVDMGIAQWAFDHAEAAGQGTNTLAASPILYLPLKAPMRQRGVLALEMRDTDRLLIPEQRRLLDTFASLIAIALERVHYVEVAQNTTVQMESERLRNSVLSAISHDLRTPMSVLVGLADSMFLTQPPPTGPQAEIAHSLKEEALRVSSQVNNLLDMAKLQSGRVELNRQWQPLEEVVVSALKTLERAFAEHQISVSLDENLPLVNIDSVLMERVIYNLLENTVKYTPPGSLVEIGANVTERMIEVWVEDNGPGLPEGKEEIIFKKFERGQPESATRGVGLGLAICRAIVEAHGGEIYAVNRPQGGARFMFTLPRGNPPSLDAEEMPADEEAH

SEQ ID NO: 93754 - DNA, 2856 bp, Ralstonia eutropha JMP134
  CDS (1)..(2856): transl_table=11
atgcccgaattgcgatctcccgccgaacgtccggatccggacaccctgctgcaacgcatgcaggaggagggcgcgcgcgccgcgcgtggcaagctgcgcgtctatttcggtgcctcggccggcgtgggcaagacctttgccatgcttgccgcggcgcggtcgctgcgagagcagggcgtggacgtggtcatcggcgtggtcgagacgcatggccgcgccgagaccgaggcactgatcgatggcatcgagcgcctgcccatgaaggacgtgccgtaccgcgaccgcgtgctcaaggagttcgatctcgacggtgcgctggcgcgtcgtccggcgctggttctcgtcgacgagttggcccattccaatgctgcgggcagccgccacccgaaacgctggcaggacatccaggaactgcagtcgtctggcatcgacgtctggacgaccgtcaacgtgcagcacctggacagcctcaatgaagccgtcggcggcattaccggcattcgcgtctgggaaaccgtgccggacgccgtgttcgacggcgccgacgaagtgatcctcgttgacctgcctgccgacgagttgctgcgtcgcctgcgtgagggcaaggtgtacctgccggagcaggcccgccatgcggtgcgcaacttcttccgcaagggcaacctgattgccctgcgtgaactggcattgcgacgcaccgcggaccgtgtcgatgacgatgtgcgtgcctatcgccgcgccgaatcgatccagtcggtgtggcgcacgcgcgaggcggtgctcgcctgcatcggcactggcagcgatgccgagcaggtcgtcagaagcgcgcgccggctggccggccagctcgattgcgactgccatgtgatcacggtagcggcgccacgactggcgtctgtccccgatgccgagcgcgtgcggctggagtcggcgatgcggctggccgaggaactcggcgcgcgcaccgagacgctggccggcagcgacatggtgcaggcggtggccggctatgtccggcggcacaacctgaccaaggtcgtgcttggccgcacgccgacgcgatggcggcgcgaagatgactcgctgctgatgcaggggcgttcgctactggcctgggtactatctccattcctgggcgcgcgcgcatggctgttcggccgcaagagctttgccgatgctctgtcggccgcgtgcccggagatcgacgtgatacgcgtcgcggctgataccacgcgcgtagacgtcaagcccgccagcgcgccgatcccgctcgaggaaagcgaggccgcgcacgcacaggagcgtcgcgtgcgcatgcagtcgtacctgtgggccattgcgtggtgcgccggcgcgacggcagtgtcgatgctcgcacggccgtggttcgaccttgtcaacatcgccatgctgttcctggtggcggtggtcggcgtggcgctgcgccatggccgcgcggcggcggcactggcctcggtagttgccgtgggcgcattcgatttcttcttcgtgcccccgcgaatgtcgtttagcgtgagcgacgtgcagtacctgctgaccttcctggtgctcctgtcggtgggcctggtcatcggtcagctcacggccggactgcgcgaacaggccgaagtcgcggtgcaacgcgagaccgatgcgcgcacgctgtacgagctcgcgcgcgaactgtcgtcggccctgatgaacgagcagatcgtctcgattggcagccgcttcctgcgcgcggccttcgacgcacgctcggcattcttcctcgtcggaccggacggccggctgctgccgcctgtggtggatacgcagggacaggccggcgggcacagcgacgcgatcgaccgcgtgctcgcgcagtgggtgttcgaccatggccagccggccggcacaggcacccatacgctgccggccggtaccgtgctgtacctgccgctcaaggcgccgatgcagacgcgtggcgtgctggccgtcgagccgcaggcgtggcgcgcatttgcgcagccggcactgcggcgccaggtcgatgtattcgcgacgctgatcgccatcaccatcgaacggctgcactacgtggacgtcgcgcagcgggcgctgttgtcgatggagtcggagcggttgcgcagttcgctgctggccgcggtgtcgcatgacctgcgcacgccgctgaccagcctgatcggcatggccgagaccctgcagcgcggcgatccgccgctcgcgccgcgcgtagcggatacggtctcggcgatgcgtgaccaggccaggcgcatgagcacgatggtcgtcaacctactcgacatggcgcggttgcaagggcgggacgtgcgcatgcagaaggagtggcagtcgttcgaggagcttgttggcgcggcgcttggagccttgcgcgatgcgcttgtcggacatcgtgtcgcggtggcggatctgcacaagatgccgctggtggagtgcgatgccgtgctgatggatcgcgtgctgtgcaacctgctggagaacgccgccaagtacacgcctgccggaaccgaaatccgcatccgcgcggaggtcgtggacgacgaggtgcgcctcgtggtggaagatgatggccccggcgtgccccccggcagcgaacggcagattttcgagaagttcacgcgcggtgaacgtgaatcggtgacaaccggcgtgggcctgggccttgccgtctgcgacgcgatcgtgcaggcgcatggcggacggatctgggtcgagcctgtgcgcgatgctgccacggcaggggctggcatcggtgcacgattcatagtggccttgccgcgcggcaatccgccggtgatcgagcccgaagccgcggacattcccgcataa

SEQ ID NO: 93755 - protein, 951 aa, Ralstonia eutropha JMP134
MPELRSPAERPDPDTLLQRMQEEGARAARGKLRVYFGASAGVGKTFAMLAAARSLREQGVDVVIGVVETHGRAETEALIDGIERLPMKDVPYRDRVLKEFDLDGALARRPALVLVDELAHSNAAGSRHPKRWQDIQELQSSGIDVWTTVNVQHLDSLNEAVGGITGIRVWETVPDAVFDGADEVILVDLPADELLRRLREGKVYLPEQARHAVRNFFRKGNLIALRELALRRTADRVDDDVRAYRRAESIQSVWRTREAVLACIGTGSDAEQVVRSARRLAGQLDCDCHVITVAAPRLASVPDAERVRLESAMRLAEELGARTETLAGSDMVQAVAGYVRRHNLTKVVLGRTPTRWRREDDSLLMQGRSLLAWVLSPFLGARAWLFGRKSFADALSAACPEIDVIRVAADTTRVDVKPASAPIPLEESEAAHAQERRVRMQSYLWAIAWCAGATAVSMLARPWFDLVNIAMLFLVAVVGVALRHGRAAAALASVVAVGAFDFFFVPPRMSFSVSDVQYLLTFLVLLSVGLVIGQLTAGLREQAEVAVQRETDARTLYELARELSSALMNEQIVSIGSRFLRAAFDARSAFFLVGPDGRLLPPVVDTQGQAGGHSDAIDRVLAQWVFDHGQPAGTGTHTLPAGTVLYLPLKAPMQTRGVLAVEPQAWRAFAQPALRRQVDVFATLIAITIERLHYVDVAQRALLSMESERLRSSLLAAVSHDLRTPLTSLIGMAETLQRGDPPLAPRVADTVSAMRDQARRMSTMVVNLLDMARLQGRDVRMQKEWQSFEELVGAALGALRDALVGHRVAVADLHKMPLVECDAVLMDRVLCNLLENAAKYTPAGTEIRIRAEVVDDEVRLVVEDDGPGVPPGSERQIFEKFTRGERESVTTGVGLGLAVCDAIVQAHGGRIWVEPVRDAATAGAGIGARFIVALPRGNPPVIEPEAADIPA

SEQ ID NO: 93756 - DNA, 2664 bp, Rhodobacter sphaeroides 2.4.1
  CDS (1)..(2664): transl_table=11
atggcggacgaggatctccgtcccgaacccgaggcgcttctggcggaagccgcgcgcgagggccgggggcggctcaagatcttcctcggggcggcgccgggcgtgggcaagaccttcgccatgctcgaggccgcccgccagcggctgcgcgagggtaccgacgtggtggcgggcgtgatcgagacccacggccgcgccgagaccgaggcgctggtccatgaccttcccgtggtgccgcgccgccccggctactaccgcggccgcatcctctccgagatggatctcgacgcgctgctggcccggcggccccggctggcgctgatcgacgagctggcccacacgaacctcgagggcagccggcacgagaagcgctggcaggatgtcgaggaggtgctggccgcgggcatcgatgtgtggaccacgctcaacgtccagcatgtcgagacgctgaacgatgccgtggcgcggatcaccggcatccgcgtgcgcgagacggtgccggaccggatcctcgacaccgccgacgagatcgagctgatcgatctctcgcccgaggatctgatcgcgcggctgcgcgcgggcaaggtctatgtgcccgagcaggcggcgcgggcggtgcagaacttcttcgccaagggcaacctgacggcgctgcgcgagctggcgatgcgggccgcggccgaccgggtggatgcgcagctgcgcgagcacatggccgccaatgcgatccccggcccctggcccgcgcaggagcgcctccttgtctgcgtctcggacagtcccgcggcgcggaatgcgatccgggcggccaagcggtcggcggatcgggcgcgggtcgagtggatcgcgctgtcggtgacctcgccccggatcgagaccctgcccgagggcgcgcgcgacgatctggcgctggccctccggctggccgagcggctgggcgccacggtggcgagcctgcaggccggcggcgacgtggcgcgcgagatcctcgattttgcgcgccggaacaatgtccgccgcatcatcgtggggcggccccgcccccggtccacgctccacgctctggctcacccctttcgcgagcgggtggccgagcgcctgttgcggctcgggaccgagttcgaggtgacgctggtctcggcggagcccgggcgcgcgcggccgcaggcccggcgcctgcccgccctgtccttccccgcgacgggctgggcgctgctcgccaccgcgctcgcctcgggcgccgcctgggtcgtggaccggatgctgccggtggcgagcctcgcgcttctcttcatgacggccgtcatcgtggtggccacgcgcttcggccgctgggcctcggccctgaccgccgtctcgggcttctttgcctacaatttcttcttcaccgagccgcggctgaccttcaccgttcactatcgcgaccagatcctgacgctgggcctgttcctcgcggcctcgctgctgacggggggccttgcggccgaactgcgggcgcgggtcgatgcgcagcgcgcggccgccgaccggatggggaagctctacgatttcagccggcgcgtcgcggccgcggcggccttcgacgatgtggtctgggccgccgtcagccatgtgagcatgacgctggcctgccggacggtgcttctcgtgcccgagggcgagcggcttgcggtggccgggggcttcccgcccgaggatcggctggagctgcgcgacatgtcggctgcgcgctacgcctggcagcggggcgaggaggcggggcgcggctcggccacgctgcccgcggccgactggctcttcctgccgatccgggcgggcgagcggcggctgggcgtggtgggggtggcctacgagggcgggcgcagcttctcgccggtggaccgccgcctgctcgatgcgctgatcgatcaggtggcgctggcgatggagcgggtgcgtctggccgaggatctggagggcgcgcggctggcggccgagaccgaccggctccggacggcgcttctgtcctcggtgagccacgatctgcgcacgccgctcgtgaccatcatcggcgccgctggcagcctcgccgagccgggggcgcttccgcccgaggcgcagcaggccttggcggaaacgatccgcgaggagggcgagcggctcgaccgctacgtccagaacctgctcgacatgacccggctcggccacggggcgctgaagccggcggtccagccctcggatctggccgagctggtgggtgcggcgcgcacgcgcctggccgccgtgctgcgcggccaccggctcgggaccgatctgccgcccgatctgcccgccgtgctggtcgatccggtgctgaccgagcaggttctggtcaatatcctcgacaatgccgcgaaatatgcgcctccgggcagcccgatcactctggcggcgcggcttgacgcggggcgggtggtgctgtcggttgccgacgaggggccgggcatcccgccggccgaccgcgagaaggtcttcgacatgttctaccgcgtcgcgggcacggaccggcggcgggcgggcaccgggctgggcctcgccatctgccgcggccttctcgaggcgcagggcggcacgatccgggccgaggccgcacggccggacgggcaggggacgcgcatcctgctgaccctgccggtggcgccgtga

SEQ ID NO: 93757 - protein, 887 aa, Rhodobacter sphaeroides 2.4.1
MADEDLRPEPEALLAEAAREGRGRLKIFLGAAPGVGKTFAMLEAARQRLREGTDVVAGVIETHGRAETEALVHDLPVVPRRPGYYRGRILSEMDLDALLARRPRLALIDELAHTNLEGSRHEKRWQDVEEVLAAGIDVWTTLNVQHVETLNDAVARITGIRVRETVPDRILDTADEIELIDLSPEDLIARLRAGKVYVPEQAARAVQNFFAKGNLTALRELAMRAAADRVDAQLREHMAANAIPGPWPAQERLLVCVSDSPAARNAIRAAKRSADRARVEWIALSVTSPRIETLPEGARDDLALALRLAERLGATVASLQAGGDVAREILDFARRNNVRRIIVGRPRPRSTLHALAHPFRERVAERLLRLGTEFEVTLVSAEPGRARPQARRLPALSFPATGWALLATALASGAAWVVDRMLPVASLALLFMTAVIVVATRFGRWASALTAVSGFFAYNFFFTEPRLTFTVHYRDQILTLGLFLAASLLTGGLAAELRARVDAQRAAADRMGKLYDFSRRVAAAAAFDDVVWAAVSHVSMTLACRTVLLVPEGERLAVAGGFPPEDRLELRDMSAARYAWQRGEEAGRGSATLPAADWLFLPIRAGERRLGVVGVAYEGGRSFSPVDRRLLDALIDQVALAMERVRLAEDLEGARLAAETDRLRTALLSSVSHDLRTPLVTIIGAAGSLAEPGALPPEAQQALAETIREEGERLDRYVQNLLDMTRLGHGALKPAVQPSDLAELVGAARTRLAAVLRGHRLGTDLPPDLPAVLVDPVLTEQVLVNILDNAAKYAPPGSPITLAARLDAGRVVLSVADEGPGIPPADREKVFDMFYRVAGTDRRRAGTGLGLAICRGLLEAQGGTIRAEAARPDGQGTRILLTLPVAP

SEQ ID NO: 93758 - DNA, 2844 bp, Burkholderia sp. 383
  CDS (1)..(2844): transl_table=11
atgaaccgtccagatccagaccaactcctcgacaagctgcagcgcgacgaagaaaaacagcggcgcggccagctcaagatcttcttcggcgcatcggccggtgtcggcaagacctacgcgatgctgcaggccgcgcgccagcgcctgcaggagggcgtcgacgtcgtcgtcggtatcgtcgagacgcacgggcgcagcgaaaccgctgcgctgctcgacggcctcgacgtgttgccgctcgcgcgcatcgactatcgcggccgcacgctcgccgaattcgacctcgacggcgcgctcgcgcgccagccgcaactgatcctcgtcgacgaactcgcacactcgaacgtacagggcgcacggcacctgaagcgctggcaggacgtgtacgaactgctcgatgcgggcatcgacgtctacacgaccgtcaacgtccagcacctcgaaagcctgaacgacgtggtcggcgcgatcaccggcatccgcgtgtgggagacggtgcccgaccgcgtgttcgacgcggccgacgaagtcacgctcgtcgacctgccggccgaggaactgctcgagcggatgcgcgacggcaaggtctatctcgcgcagcaggccgagcgtgcggtgcgcaacttcttccgcaagggcaacctgatcgcgctgcgcgaactggcgctgcggcgcacggccgatcgcgtcgacgcgcagatgcgcgaataccgcgccgaccgttcgatccagcgcatctggcaggcgcgcgagcggctgctcgtgtgcgtcggtcccggcgccgaagcgccgacgctcgtgcgggcggccgcgcggctcgccgcgagcctgaaggccgactggatcgccgtctatgtggaaacgccgcgcctgcaacggctgcccgatgcgcgacggcaacgcacgctcgacgcgctgaagctcgcggccgagctcggcgcggagacggccacgctcgccggtggcgacgcggttgccgcgctgatcggctatgcgaaggtgcgcaacgtgtcgaagatcgtcgcgggcggctcgccgaaggtcgggctcgtgcgccgcctcgcgcggccgttcggcgagcagcttgccgaacgcgcgggcgacgtcgacctgatgctgatccgtgcgtccgcgagcgacgaggcgcgcgccgcaccgctcgacgcgcgtgcgcgcgactggcgcgatgcgttcgcgcagttcggcacgcattgttcgccgccgcggcactacgtgtacgcggccgcgatctgcgcggcgatcacggtcgtcgcgagcctcgtgtccgagcggctcgacctcacgaacctcgtgatgctgtacctgctcggcgtcgtgttctcggccgtgcggctcgggcgcggcccgggcgtgctgcagtcgttcctgtcggtggccgcgttcgattacttcttcgtgccgccgcgcatgtcgttctcggtcagcgacacgcagtacctgctgactttcttcgggatgctgctgacgtcgctcgtgatcagccacctgacgtcgacgctgacgcgccaggcgagcgtcgcgcagcgccgcgagcggcgcaccggcgcgatctacgcgatggcgcgcgagctgggcgcggcgctgaccaccgagcagatcgtcgagatcggcagccgccacgtgggcgaggtgttccgtgcgcgcgtcgcgttcctgctgcccgacagcgcggacaaggtgcggcagaagatcgaggagcccgatgcggccgtcacgctgacgggcgccgatctcgacagcgacgtcggccagtgggtgtacgaccagcagaagccggccggccgcggcaccgatacgttgcccgcgacagccgcgctgtacctgccgctgaaggcgccgatgcgcacgcgcggcgtgctcgcggtggcgtcgcgcgagccgcgcgaactcgaggtgccggaacagcagcggatgctcgacgcattcgccgcgcagatcgcactcgcgctcgaacgcgtgcactacgtcgagatcgcgcgcgacgcgctcgtcaacatggaatccgagcggctgcgcaactcgctgctgtcggcgatctcgcacgacctgcgcacgccgctcacgacgatcgtcggcttctcgtcgatgctcgcgaacgggcgcacggccgcgcggggcggcgacgccgtggcggccgagcgcttcgcgcagcgcgagggcgaactcgtcgacgcgatccacgacgaggcgctgcggatgacgggcatcgtcacgaacctgctcgacatggcgcggctgcaggccggcagcctgcagttgaagcgccagtggtcgctgctcgaggaaaccgtcggcgccgcactcgccgcatgcaagcgcgtgctcgcccgccatcccgcgcgcgtcgtgctgccggccgacctgccgctcctgcagatggacgcggtgctgatggagcgcctgttcaccaacctgttcgagaacgcggcaaagtacacgccggccgatacgccgctcgacatcggtgccgagcgcatgacggaagacggcctgccgttcgtgcgcgtgctcgtcgacgactacggtcccggcctgccggccgggatggaaacgcggatcttcgacaagttcacgcgcggcgagaaggaatcggcgacgccgggcatcggcctcggcctcgcgatctgccgcgcgatcgtcgaggcgcacggcggtaaaatcggcgcgctcaaccgtacggcacccgacggccacgtgacgggcgcgcgtttctggttcacgctgccggtcgagacaccgccggccgcgcctgccgtacccgacgacgaacccgatgtaccgggtgcgtcgtccccatccgaatcattgccagaccatgagtga

SEQ ID NO: 93759 - protein, 947 aa, Burkholderia sp. 383
MNRPDPDQLLDKLQRDEEKQRRGQLKIFFGASAGVGKTYAMLQAARQRLQEGVDVVVGIVETHGRSETAALLDGLDVLPLARIDYRGRTLAEFDLDGALARQPQLILVDELAHSNVQGARHLKRWQDVYELLDAGIDVYTTVNVQHLESLNDVVGAITGIRVWETVPDRVFDAADEVTLVDLPAEELLERMRDGKVYLAQQAERAVRNFFRKGNLIALRELALRRTADRVDAQMREYRADRSIQRIWQARERLLVCVGPGAEAPTLVRAAARLAASLKADWIAVYVETPRLQRLPDARRQRTLDALKLAAELGAETATLAGGDAVAALIGYAKVRNVSKIVAGGSPKVGLVRRLARPFGEQLAERAGDVDLMLIRASASDEARAAPLDARARDWRDAFAQFGTHCSPPRHYVYAAAICAAITVVASLVSERLDLTNLVMLYLLGVVFSAVRLGRGPGVLQSFLSVAAFDYFFVPPRMSFSVSDTQYLLTFFGMLLTSLVISHLTSTLTRQASVAQRRERRTGAIYAMARELGAALTTEQIVEIGSRHVGEVFRARVAFLLPDSADKVRQKIEEPDAAVTLTGADLDSDVGQWVYDQQKPAGRGTDTLPATAALYLPLKAPMRTRGVLAVASREPRELEVPEQQRMLDAFAAQIALALERVHYVEIARDALVNMESERLRNSLLSAISHDLRTPLTTIVGFSSMLANGRTAARGGDAVAAERFAQREGELVDAIHDEALRMTGIVTNLLDMARLQAGSLQLKRQWSLLEETVGAALAACKRVLARHPARVVLPADLPLLQMDAVLMERLFTNLFENAAKYTPADTPLDIGAERMTEDGLPFVRVLVDDYGPGLPAGMETRIFDKFTRGEKESATPGIGLGLAICRAIVEAHGGKIGALNRTAPDGHVTGARFWFTLPVETPPAAPAVPDDEPDVPGASSPSESLPDHE

SEQ ID NO: 93760 - DNA, 2667 bp, Geobacter metallireducens GS-15
  CDS (1)..(2667): transl_table=11
atgaccgatatcaacgacgaaagacgcccctcgccggaggcgcttttgaggctcgcccagaaggaagaggctcaagcggaacagggaaggctgaagatctttctcggctatgcagccggtgtcggaaagacctacgccatgctggaggcagcccgccagcggaaaggggaaggccgggacgtggtggccgcgtacgtggagtcccacggccgggccgaaaccgatgcacttctcgaaggggtggagatcatcccaccggcacgcatcgaataccagggggtcacacttcgcgaagtggacgtggatgcggtgctggcccgaaaaccccaactcgccctggtggacgagctggcccacaccaatgcccccggctcgcggcacgagaaacgctggcaggatgtggaggaactcctggcggccggcatcaacgtctacaccacggtcaacgtccagcacttcgagagcctgaacgacgtggtggtgcagatcactggcattgcggtgcgggaaaccgtccctgacagcctcctggaccaggcgacggagatccggctcgtggacatcccgccggaggatcttttgcagcgcctgcgcgaaggaaaggtttacgtaccggagcaggccgcgtttgccacggagaagttcttccggcccggcaacctgatcgccctgcgggagctgtcccttcgccgcgccgcctcccgcgtggacgaggagatgcgggcctacatggagtcacgggcgattccggggccctggccggcgaccgagcggctcctggtgagcgtcagcggcagcccgtacagcgagcggctgatccgtaccacccgccgcctggcggatgaactgaaggccccctggttcacggtctacgtggagactcccggcggcgggcgacaggagcaagaaaaccggaaacgggtctggaaggatctccgcctggcagaaagcctcggcgcccacgttgccactctaaccgccacgtcggcggcggatgcaatcatcgactacgcccgcagccacaacgtcacccagatcgtggtcggcaagccggccaagccgcgctggcgcgagctcctgcgccttccccttgtcgatcagattatccgcctgagcggcgccatcgatgtgcacgtcgtcagcttcgaaccggccggagccaaaaagggaccggtaatccccagacagagaaggccgatttccctcaccggatacatggcgagcctggccctggtcgccgctactaccctggtttgcctcctcggccgcccattcctcgcgccgaccaacatggtcatgatctacctgctggcggtggttctggccgcgctgcggctcggcctcaagccggcaatccttacggcctttctgggtgtcctggccttcgacttcttcttcgtgccgccacgcctgacctttgccgtggcagacacccagtatctcatcacctttgtcgcgctcttcactgtcggggtggtcatcagcaccctcgtctccaaggcgcgcgaacgggccgaagctgtgcgggaacgggaggtgcagaccgcggccctctactacctgagccgcgacctggccgccgccgccgacatcgaaaccctcgtgcaggctgtagtcagaaacatcggcgagtcacttgccgccggatctaccgtgctcctccccaaaggggaccggctcgaagttgctgccgcgagcaaagggctcaaacccgatgtaaaggagatggcagtggccgactgggcgtttcgcaaccggcaaccggcgggacaggggaccgaaacactcgtctcggcaggtctcctttatcttccgctccagacatcggggaatatcctcggggtactggggatcaggctgaaaaacgttgccgattatcggtctacccagccccgtcggctcctcgacgcctttgtcacccagaccgccatggcgctggagcgggtccagctctcccggcaggccgagcagacccagatcctccaggcccgggaaaccctcgaacgtgcccttctcaattccatttcccacgacctgcgtactcccctcgtttccataaccggcgccctggacaccctgcgggaaaaggtgcataccctggccaacgaagcccggatggagcttctcgacaccgcatgggaagaggcggagcggctgaaccgcttcgtcggcaatctcctcgacatgacccgtttggaggccggggcgctcaaggtgaagaaggagctgtgcgatgttcaggatctggtcggatgcgctctggctgctctcgaacggcggatcggagggcggcaggtcgatgtacatctcccccccgatctgccgctcgtcaggatggacatggtcctgatgacccaggtgctggcaaatctgcttgataatgcgttaaagtactcgccaccggaaagcggcatagagatatctgttcgtgtgaatgacgggaggctcgaaatggaggtggccgaccacggtcccggaattcccgaacaggacctgaagagggtattcgacaagttctaccgaatcccgatcccggaagggtcacgggggaccggccttggtctctcaatctgcaaggggattgtcgaggctcacggcggcgccatccgggccgaaaaccgggcacgtggcggattgagagtaatcgtcacgttaacgatcaaatag

SEQ ID NO: 93761 - protein, 888 aa, Geobacter metallireducens GS-15
MTDINDERRPSPEALLRLAQKEEAQAEQGRLKIFLGYAAGVGKTYAMLEAARQRKGEGRDVVAAYVESHGRAETDALLEGVEIIPPARIEYQGVTLREVDVDAVLARKPQLALVDELAHTNAPGSRHEKRWQDVEELLAAGINVYTTVNVQHFESLNDVVVQITGIAVRETVPDSLLDQATEIRLVDIPPEDLLQRLREGKVYVPEQAAFATEKFFRPGNLIALRELSLRRAASRVDEEMRAYMESRAIPGPWPATERLLVSVSGSPYSERLIRTTRRLADELKAPWFTVYVETPGGGRQEQENRKRVWKDLRLAESLGAHVATLTATSAADAIIDYARSHNVTQIVVGKPAKPRWRELLRLPLVDQIIRLSGAIDVHVVSFEPAGAKKGPVIPRQRRPISLTGYMASLALVAATTLVCLLGRPFLAPTNMVMIYLLAVVLAALRLGLKPAILTAFLGVLAFDFFFVPPRLTFAVADTQYLITFVALFTVGVVISTLVSKARERAEAVREREVQTAALYYLSRDLAAAADIETLVQAVVRNIGESLAAGSTVLLPKGDRLEVAAASKGLKPDVKEMAVADWAFRNRQPAGQGTETLVSAGLLYLPLQTSGNILGVLGIRLKNVADYRSTQPRRLLDAFVTQTAMALERVQLSRQAEQTQILQARETLERALLNSISHDLRTPLVSITGALDTLREKVHTLANEARMELLDTAWEEAERLNRFVGNLLDMTRLEAGALKVKKELCDVQDLVGCALAALERRIGGRQVDVHLPPDLPLVRMDMVLMTQVLANLLDNALKYSPPESGIEISVRVNDGRLEMEVADHGPGIPEQDLKRVFDKFYRIPIPEGSRGTGLGLSICKGIVEAHGGAIRAENRARGGLRVIVTLTIK

SEQ ID NO: 93762 - DNA, 2694 bp, Rhodospirillum rubrum ATCC 11170
  CDS (1)..(2694): transl_table=11
atggcccccgctgatcgcgaaaaccgcccctcgcccgatgccctgctggccgaagcccaccgggaaggccggggcaagctgaagatattcctgggggcggcgccgggggtggggaaaacctacgccatgcttgaagccgcccgcgagcgggcgcgcgatggcgtcgacgtggcggtggcggtggtcgaaacccatggccggcgcgagaccgaggccctggtccatggcctggacgtcgttcccaagcgcacgctcgagtatcgcggccgcgacttcgaggaaatggaccttgatggcgttctcgcccgccggccggccctggccctggtcgatgagctggcccataccaacatctcgggcagccgccatctcaagcgctggcaggatgtccaggaactgctcgatgtcggcatcgatgtttacaccaccctgaacgtccagcacctggaaagcctcaacgacgtggtcgagcggatttccggggtgcgggtccgcgaaaccctgcccgattccgttttgcagcaggccgacgagatcaagctgatcgatctggcgcccgaggatctgctcaaacgcctggaggagggcaaggtctatgtgcccgatcaggcgcggcgggcggccaacgccttcttctcgcgcggcaatctgacggcgctgcgcgaaatggccctgcgtcaggcggccgagcgcgtcgacgcccagatgatcagttatatgcacgcccacgccatccaggggccctggccggcgcgcgagcggctgatggcctgtatcggcgatgatctggcggccgaaagcgtcgtgcggctggcggcgcgttcggccgagcgccggcaggcgccgtggatcgccgtctatatcgaaaccgcccgccacttgtcgctgtcggaagaggtgaaggaccgcatcgcccgcgccctgcgtctggccgaggaactgggcggcgaggcgacgacggttcagggcgatgacgtggtggccgaggtcttgtctttcgccaaggcccgcaatatcacccagatcatcatcggccgccctcggcgccaccgtcagcgctggtttggcggcggcgatacggccaaggccctgctcgcccgggccgaggccttcaatgtgaccgtcatcggccgcgagaacgccagcccctcgccgatcgcccgcatccgccgcgacatgcccaaggactggcttggctatggattggccaccctggcggtcgccctggccaccggttttagcgtgctgatcgacatgtggatgcccgtgcccaacatctcggtcgcctatctgatggccgtgctgctggtcgccatgcgtcttggcctcgcgccgtcgatcttcgcctcgctgctcagtttcctgatttattcgttcctgttcaccgagccgcggctgaccctggccatcaccgattcccataacatcctgaccatggtgttcttcctggtcgccgcggtgatcgtgtcgaacctgggcagtcggctgcgcgagcaggttcaggcgacccggctgtcggcccggcgcaccggcaccctttatgatttcagccgcaagatcgccgccgccgccacccaggacgacgtgctgtgggcggtggtccaccatgtggcctcgaccattcacggccagtcgctgatccttttgcccgaaaacgaccgtttggcgatcaaggccggctatccgcccgaggacaccctggacgacaaggccgccgccgccgccgaatgggcttggacccacggcacccgcgccggcgccggttcggccaccctgccaacctcgccctggctgttcctgccgctcaaaaccgtgcgcggcccggtgggggtgatgggggtgcagatggccggcgccggcattcccccgcccagcgaggcccggttgctggaaaccctggccgatcaggcggcggtggcgatcgaacgcaccgccctggtcgccgatatcgaggcggcgcgggtcgccggcgagcgcgatcgcctgcgcaccgccttgctgtcgtcgttgtcccatgatctgcgcacgccgctggtctcgatcatgggctcggccagcgccctggtgaactaccaagacaccctgtccgacgacgccgaacgcgaattggccctgaccatccaggacgaggccgagcgcctgaaccgcttcgtgcagaacctgctcgatatgaccaaactgggcgccggcgccctcaagccccggatcgattgggccgatttccgtgatatcgtcggcggcgcccttgaacgggccaagcggctgatcggtcagcgcaaggtgcggatcgacctcagcgatgattttccgctgctgtgcgttgattccgtgctgatggaacaggtggtcttcaacctgatcgacaacgcctgcaaatacacgccgccgggcagcgccatcaccgtttgggggcggccgcgccgcgacaaggtggtggtcgagatctgcgatcagggcccgggcattcccgaggccgaccgcgagcaggtgtttgacatgttctaccgggtcaaggcccaggatgcccagatcgccggcaccggccttggtctggccatctgccggggactggtcgaggcccatggcggaacgatcgccgccgagcccggcatcaatgattgcggaacctgcatcgtcatcaccttgccgctgctggtcgagcccgaactgcttggcgccgaggagaaggtttga

SEQ ID NO: 93763 - protein, 897 aa, Rhodospirillum rubrum ATCC 11170
MAPADRENRPSPDALLAEAHREGRGKLKIFLGAAPGVGKTYAMLEAARERARDGVDVAVAVVETHGRRETEALVHGLDVVPKRTLEYRGRDFEEMDLDGVLARRPALALVDELAHTNISGSRHLKRWQDVQELLDVGIDVYTTLNVQHLESLNDVVERISGVRVRETLPDSVLQQADEIKLIDLAPEDLLKRLEEGKVYVPDQARRAANAFFSRGNLTALREMALRQAAERVDAQMISYMHAHAIQGPWPARERLMACIGDDLAAESVVRLAARSAERRQAPWIAVYIETARHLSLSEEVKDRIARALRLAEELGGEATTVQGDDVVAEVLSFAKARNITQIIIGRPRRHRQRWFGGGDTAKALLARAEAFNVTVIGRENASPSPIARIRRDMPKDWLGYGLATLAVALATGFSVLIDMWMPVPNISVAYLMAVLLVAMRLGLAPSIFASLLSFLIYSFLFTEPRLTLAITDSHNILTMVFFLVAAVIVSNLGSRLREQVQATRLSARRTGTLYDFSRKIAAAATQDDVLWAVVHHVASTIHGQSLILLPENDRLAIKAGYPPEDTLDDKAAAAAEWAWTHGTRAGAGSATLPTSPWLFLPLKTVRGPVGVMGVQMAGAGIPPPSEARLLETLADQAAVAIERTALVADIEAARVAGERDRLRTALLSSLSHDLRTPLVSIMGSASALVNYQDTLSDDAERELALTIQDEAERLNRFVQNLLDMTKLGAGALKPRIDWADFRDIVGGALERAKRLIGQRKVRIDLSDDFPLLCVDSVLMEQVVFNLIDNACKYTPPGSAITVWGRPRRDKVVVEICDQGPGIPEADREQVFDMFYRVKAQDAQIAGTGLGLAICRGLVEAHGGTIAAEPGINDCGTCIVITLPLLVEPELLGAEEKV

SEQ ID NO: 93764 - DNA, 2835 bp, Burkholderia xenovorans LB400
  CDS (1)..(2835): transl_table=11
atgaaccgccccgatcccgatgagttgctcgacaagctgcaacgcgacgaagaaaaacgtcagcgaggcaggctgaagatttttttcggcgcgtcggcgggcgtcggcaaaacctatgcaatgctgcaggccgcgcgccgccgtcacgacgaaggcgcggacgtggtggtcggcattgccgaaacgcatggccgcagtgaaaccgcggcgctgctcgaaggcctcgacgtgctgccgctcgcgcagatcgagtatcgcggccgcaagctcggcgagttcgatctcgacgccgcgctcgcccgcaagccgcaactgatcctcgtcgacgaactcgcgcattcgaacgtgcagggcgcgcgccatctgaagcgctggcaggacgtctacgaactgctcgacgcgggcatcgacgtctatacgacggtcaacgtccagcacctcgaaagcctgaacgacgtggttggccagatcaccggcattcgcgtctgggagacggtgccggaccgcgtattcgatagcgccgacgaagtcacgctggtcgacctgcccgccgaggaactgctcgaccgcatgcgcgacggcaaggtgtatttgccgcagcaggccgagcgcgcggtgcgcaacttttttcgcaaaggcaatctgatcgcgctgcgcgaattggcgctgcgccgcaccgcggaccgtgtcgacgcgcaaatgcgcgagtatcgcgccgaccgctcgatccggcgcatctggcaggcgcgcgagcgcttgctggtgtgtgtcggccccggtccggaagcgccgatgctggtgcgcgcggcggcacgccttgccgccagcctgaaggccgactggatcgcggtttatgtcgagacgcccgcgttgcagcgcttgccggatgcgcgtcgcgaacgcacgctgaacgcgctgaaactcgccgccgaactcggcgccgaaaccgcgacactggcgggcgccgacgcggccaccgcgttgatcggctatgcgcaggcgcgcaacgtatcgaaactggtggccggcgcgtcggcgcgcacgggtgcggagcgctggctgcgccggccgctcagtgaacggatcgccgaaaaggcgggcgatctcgatctcacgctgattcgcgcttcgtccgggcgcgacggcggcgagcatcggcatctgctgaacaccaccgcgaatgcgtggcgcgaggcgctgagcgcggcgcgcgaacgccgctcgccgccgcgcgcctatgctttcgcgctggcgatctgcgcggccatcacgctgctcgcgagccagctgagcgaccatatcgatctgaccaacctcgtcatgctgtatctgctcggcgtgatcttcgccgcggtgaagctcgggcgcgggccgggtgtggtgctgtcgttcatgagcgtggccgcgttcgatttctttttcgtgccgccgcgcatgtcgctgtcggtctccgatacgcagtacctgttgaccttcttcggcatgctgctgacttcgctggtgatcagccatctcacgtcgagcttgcgccgcgaggcgagcgtggcgcggcgccgcgagcagcgcaccggcgcgatgtacgcgatggcgcgcgaactggccgcggcgttgaccacggagcagatcgtcggcattggcagccgtcatgtgagcgaggtgttcggcgcgcgcgttgcgattctgttgccggacagcgtcgatcaggtgaagcagaagatcgaggatcccgacgcggcggtcacgctcgaaggcgagatgctcgatagcgatgtcggccagtgggtctacgatcagcagaagccggccggccacggcaccgacacgctgccggccgccgccgcgctatacctgccgctcaaggcgccgatgcgcacgcgcggcgtgctggcggtcgtgacgcgcaacgagggtgaactcgacgtgcccgagcagcagcgtatgctcgacgcgttcgccgcgcagatcgcgctcgcgctggaacgggtgcactacgtggatatcgcgcgcgatgcgctcgtcaacatggagtcggagcgtttgcgcaactcgttgctgtcggcgatctcgcacgatctgcgcacgccgttgacgaccatcgtcggcttctcgtcgatgctcgcgcaatcgcccgacgcgcagcccaacgccgaactggtcgaagcgattcacgaggaagcgctgcgcatgaccggcatcgtcacgaatctgctcgacatggcgcgtctgcaggcgggcagtctgcaactgaatcagcaatggacgctgctcgaagaaaccgtgggcgccgcgctgcgtgcgtgcaaacgcgtgctggcgaatcatccggtgcaggtgaagctgcccgccgatctgccgctcctgcatctggacgctgtgctgatggagcggcttttctccaacctgttcgaaaacgccgccaaatacactgcgccggccacgcctttgacgatcggcgcgcagcgtctcgacacggacggcaaatcgttcgtgcgcgtgaccgtcgacgataacggccccggcctgcccgccggcatggaagcgcgcgtgttcgagaaattcacgcgcggcgagaaggaatcggcaaagccgggcatcggtctcggacttgcgatctgccgcgcgatcgtggaagcgcacggcggtacaatcggcgcgctcaatcgcgtgtcggcgaacggccatgtggaaggcgcgcgcttctggttcacgctgccggtggaaaccccgcccgaggcaccggatgcactggaagacgaaggcgccgatgccttgacgcatgtcgataccgacagcgaatcaactcctaacccgtttgccaagcccagccatgactga

SEQ ID NO: 93765 - protein, 944 aa, Burkholderia xenovorans LB400
MNRPDPDELLDKLQRDEEKRQRGRLKIFFGASAGVGKTYAMLQAARRRHDEGADVVVGIAETHGRSETAALLEGLDVLPLAQIEYRGRKLGEFDLDAALARKPQLILVDELAHSNVQGARHLKRWQDVYELLDAGIDVYTTVNVQHLESLNDVVGQITGIRVWETVPDRVFDSADEVTLVDLPAEELLDRMRDGKVYLPQQAERAVRNFFRKGNLIALRELALRRTADRVDAQMREYRADRSIRRIWQARERLLVCVGPGPEAPMLVRAAARLAASLKADWIAVYVETPALQRLPDARRERTLNALKLAAELGAETATLAGADAATALIGYAQARNVSKLVAGASARTGAERWLRRPLSERIAEKAGDLDLTLIRASSGRDGGEHRHLLNTTANAWREALSAARERRSPPRAYAFALAICAAITLLASQLSDHIDLTNLVMLYLLGVIFAAVKLGRGPGVVLSFMSVAAFDFFFVPPRMSLSVSDTQYLLTFFGMLLTSLVISHLTSSLRREASVARRREQRTGAMYAMARELAAALTTEQIVGIGSRHVSEVFGARVAILLPDSVDQVKQKIEDPDAAVTLEGEMLDSDVGQWVYDQQKPAGHGTDTLPAAAALYLPLKAPMRTRGVLAVVTRNEGELDVPEQQRMLDAFAAQIALALERVHYVDIARDALVNMESERLRNSLLSAISHDLRTPLTTIVGFSSMLAQSPDAQPNAELVEAIHEEALRMTGIVTNLLDMARLQAGSLQLNQQWTLLEETVGAALRACKRVLANHPVQVKLPADLPLLHLDAVLMERLFSNLFENAAKYTAPATPLTIGAQRLDTDGKSFVRVTVDDNGPGLPAGMEARVFEKFTRGEKESAKPGIGLGLAICRAIVEAHGGTIGALNRVSANGHVEGARFWFTLPVETPPEAPDALEDEGADALTHVDTDSESTPNPFAKPSHD

SEQ ID NO: 93766 - DNA, 2904 bp, Ralstonia metallidurans CH34
  CDS (1)..(2904): transl_table=11
atgtacgcatggcaatcgcctgcgtggcacaatcatcgccaccaaccgccgttgccgatgaccgatccagacgcccgcccggaccccgacgccctgctgcaacgcatgcaggcggagcgcgcgcgtgccgctcgcggcaaactgcgcgtgtactttggcgcgtcggccggcgttggcaagacctttgccatgctgggcgccgcgcgtgcgttgcgcgagcagggcgtggacgtggtggtcggcgtggtcgagacacatggccgcgccgagaccgaggctctgctcgatggactcgagcgcctgccgctgcgcgaggttccatatcgggaccgcgtcctggcggagttcgatctcgacggcgcgctggcccgacgccccgcgctgattctggtggatgaactcgcgcattcgaatgctgcgggcagccggcatccgaaacgctggcaggacattcaggaactacaggccacgggcatcgacgtctggaccacggtcaatgtgcagcacctggacagcctcaatcaggccgtgggtggcatcaccggtgtgcgcgtctgggagaccgtgcccgatgcggtgttcgacggcgccgacgaagtggtgctggtggacctgcccgccgatgaactgctgcgccggctgcgcgagggcaaggtctacctgcccgatcaggcgcgccacgccgcacgtaatttcttccgcaaaggcaacctgatcgcgctgcgcgaactcgcgttgcggcggaccgccgatcgcgtcgacgacgatgtgcgcgcgtatcgacatgccgaatcgatcgatctggtctggcgcacgcgggaagccctggtggcgtgcatcggcgccggcgacgatgccgagcaggtggtgcgcagcgcgcagcgtctggcgggccagctcgattgcgactggcatgtggtgacgatcgccacgccccagttgatgccgccatccaacgaggtccgcgcgcgcatgcgcgccgccatgcaattggcagaggaactgggggcccgcacggagacgctcgccggcaacgacatggtcaaggcggtggcaggctacgtgcgacgccacaacctgaccaaggtgctgcttggccgtgcccccgccgactggtatgcgcgagggaactggatcgacaaggggcgtgccttgctggcccgtgcgctgtcgccgttgcttggtgtcggtaaccggctgttcggccggcagatgttcgccgatgcgctggcggcgggttgcccggagatcgacgtgatcagggtggcggccgactccacacgggcggacctgcgtccgcgagtccaggaggggctatccaccgaggcgcacgatgcggaggccgaagccgagttggcccgcgtgcgccgtcataactatggctgggccgtggtctggtgcatggcggcgacgttcctgtcgacgttgaccagaccctggttcgacctggtcaatatcgcgatgctgttcctggttgccgtggtaggcgtggcgttgcgtcatggccggggaccggcggcattggcatcggtgatttcggtggcggcgttcgactttttcttcgtgccgccgagaatgtcgttcgccgtcagcgacgtgcagtacctgttgacgttcttcgtgctgctgacggttggtctggtgatcggccagcttacggcgggactacgcgagcaggctcaggtgtccgtgcggcgcgaaaccgatgcgcgcacgctctatgagctggcgcgcgagttgtccgctgcgctgacggcgcagcagatcgtcgagatcggcggtcgcttcctgcgtgccgcctttgacgcggatggcacttttttcctcgtcgcagagaacggacggctcatgccgatggccggcggagaaaagacaccggagccgcggacaggcaaaggcgatgccatcgacaaggtgttggcgcaatgggtgttcgatcacggtcagcctgccggcacgggcacgcacacgctacccggcagcacggtgctgtatctgccgctgaaggcgccgatgcagacgcgcggcgtgctggccgtggagccgcgcgcgtggcgggcgctggcggacccggcgttgcgtcgtcaggccgatgtctttgccacgctgatcgcgatcgcgatcgagcgtatccattacgtcgacgtggcgcagcgcgcgctggtgtcgatcgagtcggaacggctgcgcagttcgctgctggccgcggtgtcgcatgatctgcgtacgccgctgaccgggctgatcggcatggccgaaacgctgcagcgcgcggagatgccgctgccggccagcgtcgcggagacagtcgaggcaatgcgcgttcaggcacaacggatgcgcacgatggtcgtcaacctgctcgacatggcgcgcctgcagcatcacgacctggcgctcaagcgtggctggcaatcgcttgaggaactgattggcgcggcgctggcgtcgatgcgcgacgtgctcggtcggcaccatgtggaagtgatgaatcttgtggagctgccgctggtggagtgcgacgatgtgctgatggagcgtgtgctgtgcaacctgctggagaacgcggcgaagtacacgccggcaggcaccgccatccgcatccgcggcgcggtggtgggcgacgaggtgcaactgtcagtggaagacgaaggcccgggcgtgcagtcgggccaggagcgctacatcttcgagaaattcacgcgtggcgagcgcgaatcggccacctccggcgtcgggctcggcctggcggtctgcgaggcgatcatgcaggcccatggtggtcgcatctgggtggaggccgcccacccacatggttcgcgattcacgctggcgctgccgcgcggcaatccaccggctatcgagccagagtcgctggacgaacccattccggatcatcactga

SEQ ID NO: 93767 - protein, 967 aa, Ralstonia metallidurans CH34
MYAWQSPAWHNHRHQPPLPMTDPDARPDPDALLQRMQAERARAARGKLRVYFGASAGVGKTFAMLGAARALREQGVDVVVGVVETHGRAETEALLDGLERLPLREVPYRDRVLAEFDLDGALARRPALILVDELAHSNAAGSRHPKRWQDIQELQATGIDVWTTVNVQHLDSLNQAVGGITGVRVWETVPDAVFDGADEVVLVDLPADELLRRLREGKVYLPDQARHAARNFFRKGNLIALRELALRRTADRVDDDVRAYRHAESIDLVWRTREALVACIGAGDDAEQVVRSAQRLAGQLDCDWHVVTIATPQLMPPSNEVRARMRAAMQLAEELGARTETLAGNDMVKAVAGYVRRHNLTKVLLGRAPADWYARGNWIDKGRALLARALSPLLGVGNRLFGRQMFADALAAGCPEIDVIRVAADSTRADLRPRVQEGLSTEAHDAEAEAELARVRRHNYGWAVVWCMAATFLSTLTRPWFDLVNIAMLFLVAVVGVALRHGRGPAALASVISVAAFDFFFVPPRMSFAVSDVQYLLTFFVLLTVGLVIGQLTAGLREQAQVSVRRETDARTLYELARELSAALTAQQIVEIGGRFLRAAFDADGTFFLVAENGRLMPMAGGEKTPEPRTGKGDAIDKVLAQWVFDHGQPAGTGTHTLPGSTVLYLPLKAPMQTRGVLAVEPRAWRALADPALRRQADVFATLIAIAIERIHYVDVAQRALVSIESERLRSSLLAAVSHDLRTPLTGLIGMAETLQRAEMPLPASVAETVEAMRVQAQRMRTMVVNLLDMARLQHHDLALKRGWQSLEELIGAALASMRDVLGRHHVEVMNLVELPLVECDDVLMERVLCNLLENAAKYTPAGTAIRIRGAVVGDEVQLSVEDEGPGVQSGQERYIFEKFTRGERESATSGVGLGLAVCEAIMQAHGGRIWVEAAHPHGSRFTLALPRGNPPAIEPESLDEPIPDHH

SEQ ID NO: 93768 - DNA, 2703 bp, Clostridium perfringens ATCC 13124
  CDS (1)..(2703): transl_table=11
atgagggaaactcgtcctaatccacaggaaatattaaaagaaataaataagaatgaaaaagatagtaaaagaggaaaacttaaaattttctttggatatgctgctggggttgggaaaacatatgcaatgttagaagcggcacattcagcaattgctatgggactagatgttgtagttggatatattgagcctcatacaagaccagaaaccctagcacttttagaaggattagaattattacctaatttagaagtagcatatagaggattggtattaagggaatttaatttagatttagctttaagtagaaaaccagatttaatcattgtggacgagttagctcataccaatgttaagggacttagacatgaaaagagatatagtgatatagaggaattattagatgctggcatagatgtttatactactcttaatgttcaacacatagagagtttaaatgatgtagtggcatctataactaatatagttgttaaagagagaatacctgatagaatatttaaaaatgcttttcaaattgaattaatagatgtagatccatctgtcttgattgaaagattaaatagtggaaaaatatatgttaaaaatcaagcaaaaaaggcattaaaaaacttttttataagagaaaacttagttgctttgagagagttagccttaagagagactgctaatagtgtaaataaagaggttatgataaataaaaatgaaaatttttatcatactaatgagcatatattggtatgtttaagttcttccccttcaaatagtaaagtaattagaacatcagcaagaatggcagaagcctttcatggaaagtttactgctttatttgttgaaacaacttcatcaagagaattaaaagaaggaaatattgaaaggttaagagaacatgttaaattagcaaaagatttaggggctaaaatagaaacagtttatggagatgatgttgcatatcaagtttcagagttttctaagattagttcagtttcaaaagttataatagggagaacaaagaagaaaagacatctatggtcaagatttggtattgtagacagattaatagaattagctccagagctagacgtttatataataccagatgaagaagaaaatgtagaagatataaataaaatttgcttaaataaagaaaaaataacaattaaagattctttaaaaactttggggattttaattattacaattattataagcttattctttgaaaatttaggttttagtgaagctaatataataatagtatttattttaggtgttttaattatagcaaaggagacttatggaagaatatatggagttatatcttccttatttagtgttttacttttcaactttttcttcacggaacctaaatttacttttaatgcttatgattcaagctatatatttacgttttttataatgcttgtatcagctttaataactagtactcttacaaataaagttaaagtacaggctaataaatcagcaataacagcatatagaacaaatattttattagaatctagtagtgagcttggaagatgttcagatttagaagaaattattttaaagtctcaagagcaagttagtagattagtaaaaaaacctgtagtagtttataaggcgaagaatagtcaaattgaaaatatatataattataaattcaaagatggaagtgaattaagtgataaatatattaacttagacgaacagggagtagtactttgggttatcaataatagaaaatatgctggaaagggtacagaaacattgcctggagctaaagctatgtatattcctgtattaggacaagaggatataggcatagtaatagggataattttagaagaaggagaggaattagaggaaggagaaaaatccttactaattgcaatgataaatcaagtatcttttgtcatagataattatattttagaagaagcaaagaagcaggctttaatgcaagctgagaatgaaaaatttaaagcaaatttattaagggctgtttctcatgatttaagaacacccttaacaagtatatctggaagtgcaagtttgcttttaaataataattttgacgaagaaactaaaagaaagttaacattagatatatatgatgattcaatttggttaataaacttagttgaaaatttactttctgtttcaagaatagataatggaaatataaatttaaatagagaagctcaattagtagaagaaattattttagaggctttgcaacatgttaatagaaatgcctgtgactataatatagaaattgatttgaaagatgaattgttaatggttaatgctgatgtaagacttataatacaagtaataataaatattgttgataatgcaataaagtatacagaaaaaggatcaaatataaaaataagtgccttttcaaaaggagataatgtaataattgagatagcagataatggtgtaggaattagtaaagaagataaggaacatatatttgatatgttttttacatctaagaaaaatattagtgatagtagaagaggattagggttaggattagcattgtgcaaatcaattataaatgtacatgaaggagaaatatatgttagagataataaacctaggggaactataattggctttagtttgcagagatttgaggtgaataataatgaaaccagcaattttagttattga

SEQ ID NO: 93769 - protein, 900 aa, Clostridium perfringens ATCC 13124
MRETRPNPQEILKEINKNEKDSKRGKLKIFFGYAAGVGKTYAMLEAAHSAIAMGLDVVVGYIEPHTRPETLALLEGLELLPNLEVAYRGLVLREFNLDLALSRKPDLIIVDELAHTNVKGLRHEKRYSDIEELLDAGIDVYTTLNVQHIESLNDVVASITNIVVKERIPDRIFKNAFQIELIDVDPSVLIERLNSGKIYVKNQAKKALKNFFIRENLVALRELALRETANSVNKEVMINKNENFYHTNEHILVCLSSSPSNSKVIRTSARMAEAFHGKFTALFVETTSSRELKEGNIERLREHVKLAKDLGAKIETVYGDDVAYQVSEFSKISSVSKVIIGRTKKKRHLWSRFGIVDRLIELAPELDVYIIPDEEENVEDINKICLNKEKITIKDSLKTLGILIITIIISLFFENLGFSEANIIIVFILGVLIIAKETYGRIYGVISSLFSVLLFNFFFTEPKFTFNAYDSSYIFTFFIMLVSALITSTLTNKVKVQANKSAITAYRTNILLESSSELGRCSDLEEIILKSQEQVSRLVKKPVVVYKAKNSQIENIYNYKFKDGSELSDKYINLDEQGVVLWVINNRKYAGKGTETLPGAKAMYIPVLGQEDIGIVIGIILEEGEELEEGEKSLLIAMINQVSFVIDNYILEEAKKQALMQAENEKFKANLLRAVSHDLRTPLTSISGSASLLLNNNFDEETKRKLTLDIYDDSIWLINLVENLLSVSRIDNGNINLNREAQLVEEIILEALQHVNRNACDYNIEIDLKDELLMVNADVRLIIQVIINIVDNAIKYTEKGSNIKISAFSKGDNVIIEIADNGVGISKEDKEHIFDMFFTSKKNISDSRRGLGLGLALCKSIINVHEGEIYVRDNKPRGTIIGFSLQRFEVNNNETSNFSY

SEQ ID NO: 93770 - DNA, 2709 bp, Rhizobium leguminosarum bv. viciae 3841
  CDS (1)..(2709): transl_table=11
atgccagacgacaaccgcgaccaggccggcaggccctcgcccgatgcgcttctcgaaaaggcccgggccgagacgcgcggccgtctgaagatctttctgggtgccgcccccggcgtcggcaagacctacgagatgctcatttccggtcgtgcgaaggtcgccgacggtctcgatgtcgtcatcggcgtcgtcgagacccacggccgcaaggagaccgaggcgctcgtcgccggcttcgagatcatccctcgcgtcgaaatcagctacaagggccgggcgcttgaagaaatggatctcgacggcatcctcgcccgccggcctgatctcgtgctggtcgacgaactcgcccataccaatgccgagggcagccgccatccgaagcgctatctcgacgtgagggaattgctcgatcgcggcatcgacgtctatacgacgctgaacatccagcacgtcgaaagcctgaacgacgtcgtctcgcagattacccgcatccgtgtgcgcgagacggtgccggactcaatcatcgaccttgccgacgacgtcgagatcatcgacctgacgccggatgatctgatcaagcggctgcatgacggcaaggtctatatggcgcgcaccgccgagcgggcgctgaccaattatttcacccccggcaacctgacggcgctcagagagcttgcgctgcgcaagaccgcccagcgcgtcgacgatcagttgctcacccatatgcaggctcatgccatatccggcccatgggcggcgagcgagcgcgttctcgtctcggtcgaccaccatccgcgctcagcgtcactggtgcgctacgccgcccgcatggcctcgcgcctgcgcgcgccttgggccgctgtctatatcgagaccaaccgctcgatcaatctgagcgaggccgagcgtgacacggtcgcatcgacgctgcgccttgccgagcagctcggcggcgaggcgatcacccttcccggccgcgaggtcgccgaagagctcgtcggtcacgccaccgccaacaacgtcacccacatcgtcatcggcgccccgaagaagccgacatggcgggactggtggagccgctcgatcaccgacgaactgatccgcagggccggagagatcagcgtccacgtcatttcaggcaacgagaaggacggcactaccacacgcggcgtcaaggccgccgtcaccgcgccgccgctggatttcagggcctacctgctggcgaccggctatgtcgccatcgcgctcggcgtcagcgtcgtgctcgaccaagtgctcgacgtgcgcaacctcgccctcgtcttcctgatggcggtgctgacctccgccgttctccacggcctgcggcctgcactctacagctgcatcctcagcgccctttccttcaacttcttcttcctgccgccgcgctacacgctgacgatcagcgatccggaaagcgtgcttgcgctcttcttcttcctgggcgtcgccattatcgccagcaatctgacagcgaccgtgcagcggcaggcggcggccgcccgccagcgggcgcgcacgacggaagacctctatctcttttcgaaaaagctcgccggcaccggcacgctcgacgacgtgctctgggcaaccgccttccagctcgcctcgatgctgaaggtccgcgtcgtgctgctgctgccggaagagggcagcatcgccgtcaaggccggttatccgcctgatgacacgctcgacgatgccgatatcgccgcggcccgctgggcctgggaacacaatcacgccgccggccgcggcgccgacaccctgcccggcgccaagcgcctctatgtgccgcttagaaccgggcgcaccgccgtcggcgtcatcggcctcgacagcgaccgccgcgacgggccgctgctgacgccagagcagcagcggctgctcgatgcgctggccgaccaggcggcccttgccatcgaacgcatccagcttgtcgccgatgtcgaccgggcaagacttgcggccgaatccgaccggttgcgctcagccctgctgacgtcgatctcgcacgacctgaaaaccccgcttgccgccatccttggcgccgccggcacgctacgcgattatttcgcctcgatgccggaagaggatcgcagcgaccttctgtcgaccgtcgtcgacgaatccgaacgcctcaaccgcttcatcgccaacctgctcgacatgaccaagatcgaatccggcgcgatggagccgaaccacgcgctgcattatgccggcgatatcatcggcagcgcgctgcgccgggcggcaaagatcctcgacggccacaagaccgagatgagcattcccgccgacctgccgatggtgcgtgtcgatcccgtcctgttcgagcaggtgatcttcaacctgctcgacaatgccgcgaaatatgcgcctgagggatcggtcatccatatcgagggctgggccgatgccgacaacgtcgtcgtgcaggtctcggacgaaggcccgggcatcccgccagcagatctcacccgcgtcttcgacactttctaccgtgtgcgcaaaggcgatcaggtgcgcgccggcaccgggcttggcctttccatctgccgcggcttcatcgaggcgatgggcggcacgatcaccgccggcaaccggacgggccgccggggcgccgtcttcaccatccgcctgccgaaacccaccgacattccgaaactggatgaactcagatga

SEQ ID NO: 93771 - protein, 902 aa, Rhizobium leguminosarum bv. viciae 3841
MPDDNRDQAGRPSPDALLEKARAETRGRLKIFLGAAPGVGKTYEMLISGRAKVADGLDVVIGVVETHGRKETEALVAGFEIIPRVEISYKGRALEEMDLDGILARRPDLVLVDELAHTNAEGSRHPKRYLDVRELLDRGIDVYTTLNIQHVESLNDVVSQITRIRVRETVPDSIIDLADDVEIIDLTPDDLIKRLHDGKVYMARTAERALTNYFTPGNLTALRELALRKTAQRVDDQLLTHMQAHAISGPWAASERVLVSVDHHPRSASLVRYAARMASRLRAPWAAVYIETNRSINLSEAERDTVASTLRLAEQLGGEAITLPGREVAEELVGHATANNVTHIVIGAPKKPTWRDWWSRSITDELIRRAGEISVHVISGNEKDGTTTRGVKAAVTAPPLDFRAYLLATGYVAIALGVSVVLDQVLDVRNLALVFLMAVLTSAVLHGLRPALYSCILSALSFNFFFLPPRYTLTISDPESVLALFFFLGVAIIASNLTATVQRQAAAARQRARTTEDLYLFSKKLAGTGTLDDVLWATAFQLASMLKVRVVLLLPEEGSIAVKAGYPPDDTLDDADIAAARWAWEHNHAAGRGADTLPGAKRLYVPLRTGRTAVGVIGLDSDRRDGPLLTPEQQRLLDALADQAALAIERIQLVADVDRARLAAESDRLRSALLTSISHDLKTPLAAILGAAGTLRDYFASMPEEDRSDLLSTVVDESERLNRFIANLLDMTKIESGAMEPNHALHYAGDIIGSALRRAAKILDGHKTEMSIPADLPMVRVDPVLFEQVIFNLLDNAAKYAPEGSVIHIEGWADADNVVVQVSDEGPGIPPADLTRVFDTFYRVRKGDQVRAGTGLGLSICRGFIEAMGGTITAGNRTGRRGAVFTIRLPKPTDIPKLDELR

SEQ ID NO: 93772 - DNA, 2520 bp, Mycobacterium smegmatis str. MC2 155
  CDS (1)..(2520): transl_table=11
gtgactacgcgggcgtcgaacgcctcgaagcgcggcgagctgcgcatctacctgggtgccgcgcccggcgtgggaaagacgtacgcgatgctcggggaggcgcaccgccggctcgaccgcgggaccgacctggtggccgctgtcgtcgagacccacggacgcaagaacaccgcagagctcctcgccggcatcgaggtcattccgccgcggtacatcgagtaccgcggcggccggttccccgagctggatgtgcccgcggtgctggaccgcaaaccgcaggtggtgctggtcgacgaactcgcgcacaccaacacccccggcagcaagaacgcgaaacgctggcaagacgtcgacgagttgctcaacgccgggatcaccgtgatctcgacggtgaacgtgcagcacctcgacagcctcaacgacgtcgtcgcggcgatcaccggcatcgaacagcaggagacggtacccgacgaggtggtgcgttcggccgaccagatcgaactggtcgacatcaccccggaggcgttgcggcgccggctgtctcacggcaacgtgtatgcacccgagcggatcgacgccgcgctgtcgaactacttccggcggggaaacctcacggcgctgcgggaattggcactgctgtggctggccgatcaggtcgacgcggcgctggccaagtaccgggccgacaacaagatcaccgcgttgtgggaaacccgcgaacgtgtcgtcgtcgcggtcaccggcggaacggagtcggaaacgttggtgcgccgcgcgttccgcatcgcgtcgaagtccagcgccgaactcatggtggtccatgtggttcatggcgacggactcacgggcatctcggctgcccagatgggcaaagtgcgtgaactcgcggtgagcctcggcgccacggtgcacaccgtcgtcggtgatgacgtgcccactgcgctgttggacttcgcgcgtgacatcaacgccacccagttggtgctcggcacatcccgtcggtcgcggtgggcgcggatgttcgacgagggcatcggggcgaccgtcgtgcagcagtcccaaaagatcgatgtccacatggtgacccacgaagccgccaaacgcggattccgttggtcctcgacctcaccacggcagaggcacgcggcctcgtgggccgcagcgctgatggtgccatccctgatctgcgcgttctcggtcgcgattctcgatccgttccttgacgtcggcggcaagagcgcactgtttttcgtcggagtgctggtggtcgccctactcggcggtgtcgctcccgcggcgttgtcggccgtgttgtccggactgctgctcaactacttcctgaccagcccacgacacacgttcaccatgtccgatccggacagcgcgctcaccatcgtcgtgctgctcgcggtggcagtcgccgtcgcggccctcgtggacggtgcggccaaacgggcccgggaggcccgccacgcgtcgcgggaggccgaactgctcgcactgttcgccggatcggtgctgcgcggcgccgatctcacggcactgctggagcgtgtccgcgaaacctacgcgcaacgtgcggtgagtctgttgcgtgaaacatctgatggcgcaaccatcgtcgactgcgtcggtcaggatccgtgtgaccgcgtcgccgccgccgacaccgcagtggaggccggagacgagttttggctgctgctctccggccgggagttgcccgcacgcgacaggcgtgtgttgggcgcggtcgccaaccaggccgcaggactggtccgccaacgcgaactcaccgaagaggccgcgaaggccaacgcgatcgcgaaagccgacgagttgagccgctcactgctgtcggcggtgagccacgacctgcgcaccccactggccgccgccaaggccgccgcgtcgagtctgcgcagctgcgacatcgacttctctgccgaggacaccgccgaattgctcgccaccatcgaggaatccgtcgatgcgctcacggcactcgtcggcaatctgctcgactcctcacggttggccgccggggtgatccaccccgagttgaggccggtgtatctggaggagacggtgcaacgtgcactgctcggaatccgtcgcggccccaccggttacggccgctccgccgtggaccgggtaaaggtcgaggtgggtgactcggtggcactggccgacggcggcctgctcgagcgcgtgctggccaacctgatcgacaacgccctgcggtacgcgcccgacggtttgatccgcgtgacggcgggacgcgtcgcgaacaaggtgctgatcgccgttgtcgacgagggccccggaattccacgcggcgccgaggacgcgttgttcgcacccttccaacggctcggcgacacgaataccaccactggtgtgggcctgggactctcggtggccaaagggtttgtcgaggccatgggcggcaccatctcggcgggagacaccccgggcggcgggttgaccgtcgagatcgaactggcggtcccggcatga

SEQ ID NO: 93773 - protein, 839 aa, Mycobacterium smegmatis str. MC2 155
MTTRASNASKRGELRIYLGAAPGVGKTYAMLGEAHRRLDRGTDLVAAVVETHGRKNTAELLAGIEVIPPRYIEYRGGRFPELDVPAVLDRKPQVVLVDELAHTNTPGSKNAKRWQDVDELLNAGITVISTVNVQHLDSLNDVVAAITGIEQQETVPDEVVRSADQIELVDITPEALRRRLSHGNVYAPERIDAALSNYFRRGNLTALRELALLWLADQVDAALAKYRADNKITALWETRERVVVAVTGGTESETLVRRAFRIASKSSAELMVVHVVHGDGLTGISAAQMGKVRELAVSLGATVHTVVGDDVPTALLDFARDINATQLVLGTSRRSRWARMFDEGIGATVVQQSQKIDVHMVTHEAAKRGFRWSSTSPRQRHAASWAAALMVPSLICAFSVAILDPFLDVGGKSALFFVGVLVVALLGGVAPAALSAVLSGLLLNYFLTSPRHTFTMSDPDSALTIVVLLAVAVAVAALVDGAAKRAREARHASREAELLALFAGSVLRGADLTALLERVRETYAQRAVSLLRETSDGATIVDCVGQDPCDRVAAADTAVEAGDEFWLLLSGRELPARDRRVLGAVANQAAGLVRQRELTEEAAKANAIAKADELSRSLLSAVSHDLRTPLAAAKAAASSLRSCDIDFSAEDTAELLATIEESVDALTALVGNLLDSSRLAAGVIHPELRPVYLEETVQRALLGIRRGPTGYGRSAVDRVKVEVGDSVALADGGLLERVLANLIDNALRYAPDGLIRVTAGRVANKVLIAVVDEGPGIPRGAEDALFAPFQRLGDTNTTTGVGLGLSVAKGFVEAMGGTISAGDTPGGGLTVEIELAVPA

SEQ ID NO: 93774 - DNA, 2703 bp, Xanthobacter autotrophicus Py2
  CDS (1)..(2703): transl_table=11
atgcccgacgaccgtgccgctcccgtgcggccttcgcccgatgccctgctcgcggccgccgagcaggagacgcgcggccgcctgaagatcttcctcggggctgcgccgggcgtcggtaagacctacgagatgctcgcctccggccatgcccgccgcaacgatggcgcggacgtggtgatcggcgtggtggagacccacggccggcgcgagaccgaagcgctggtggccggcctcgaggtgatcccgcgccggagcatcccctacaaggggcggatgatcgaggagatggacctcgacgccatcctcgcccgccgcccggccctggtgctggtggacgagctggcccacaccaacgcccccgaaagccgccacgccaagcgctacatggatgtagaggagctgctggcggcgggcatcgatgtctacaccacgctgaacatccagcatgtggagagcctcaacgacgtggtggcgcagatcacccgcgtgcgggtgcgagagacggtgcccgacgccatcatcgaccgcgccgacgacatcgaggtcatcgacatcacccccggcgacctcctccagcgcctgaaggagggcaaggtctacgtgcccgagacggcgcggcgagcggtggagaactatttctcccccggcaacctcaccgccctgcgggaactcgccctgcgccgcaccgccgagcgggtggacgagcaattgctctcccacatgcgggcgcatgccatatccggcccgtgggcggcgggggagcgggtgctggtctgcctcagcgaggacccgcgcagcgccgcgctggtgcgctacaccaagcgcctcgccgaccggctgcgtgcgccgtgggtcgcgctctacgtggagaccgagcgcgcgctgcgcctcgacaccgccgagcgcgaccgcatcgccgatttcctgcggctggcggagcgcatgggcggggaggcggtgaccatccccggcggcacccgcatcgccgatgatgtgctcagctatgcccgctccgccaacgtgacccatatcgtcatcggcaagtcggaccgttcccgctggttcgagatcctccacggctcggtggtgcacgacctcgtgcgccgctccggcaacatctcggtccacgtcatcgccggggacaaggagacgcccgcgcccggccgctcaggggccgccgtgcccaccgcccggcgggagacgtggccctatctcgccagccttgtcatcgtcgcgctggcgacccttgtcggcttcggcctccagaaggtcctggcgctccagaacatcgcgctggtgttcctcaccgcggtgctggtcagcgcggtgcgcttcgggctggcgccggccttggtcgcctccggcgccgccatgctggcgttcaatttcttcttcatcccgccgctctacactttcaccattaccgatccggagaacgtggtcgcgctgttcttcttcctggtggtggccatcatcgcctcgaacctcacggcgcgggtgcgcgcccaggcgctggcggcgcgggcgcgggccaagacggcggaagacctctacctgttctcaaaaaagctcgccggcgccggcaccctcgacgatctgctctgggccaccgccttccagatcgcctccatgctcaacgtccgagtggtgatcgtgctgcccgatggcgacaccctggcggtgaaggccgcctacccgccggaagacgccatcgacgccgccgaccttgccgccgcccgctgggccttcgagaacaaccgctgggccgggcgcggcgccgataccctgccgggggccaagcgcctgttcatgcccatgcagaccgggcgcggcgcggtgggggtcatcggcatcgaccgcgacaaggagggaccgctcctcacccccgagcagcggcggctgatggatgcgctggccgaccaggcggcgctggcggtggagcgcgtgaacctcgtcgccgacgtggagaaggcgaagctggacgccgccaccgaccggctgcgcacggcgctgctcacctccatctcccatgacctgaagacgccgctcgcctccatcatgggcgccgccggcaccctgcgcagcttcttctccgcgctcaccgaggaggcgcgctcggacctgctctccaccgtcgaggaggaggccgagcggctcaaccgcttcatcgccaacctgctcgacatgacccggctggaatccggcgccatcgtgcccaatgccggcctctgcgacgtgagcgaggtggtgggcagcgcgctcgaccgcgcccggtccatcctgcggcatcatcgcctggagatcgaccttgccccggacctgccgatgctgagcatcgatcccgtgctgttcgagcaggccctgttcaacctcctcgacaatgccgcaaaatatgcgccggagggcgcgctggtgcgcatcgagggctggtccgacggcgccttcgtcacgctccgcgtgctggacgaggggccgggcatcgccgaggaggatcgcgagcgggtgttcgacaaattctatcgcgtccgcaagggcgaccaggtacgggccggaacgggcttggggctcggcatcagccgcggcttcctggaggccatgggcggcaccctcaccgccgacgggcggcccgaccggcgcggcgccgccttcaccatccgcatgccggtgccgccccaggcccgcgcgctgaaggcgttgccatga

SEQ ID NO: 93775 - protein, 900 aa, Xanthobacter autotrophicus Py2
MPDDRAAPVRPSPDALLAAAEQETRGRLKIFLGAAPGVGKTYEMLASGHARRNDGADVVIGVVETHGRRETEALVAGLEVIPRRSIPYKGRMIEEMDLDAILARRPALVLVDELAHTNAPESRHAKRYMDVEELLAAGIDVYTTLNIQHVESLNDVVAQITRVRVRETVPDAIIDRADDIEVIDITPGDLLQRLKEGKVYVPETARRAVENYFSPGNLTALRELALRRTAERVDEQLLSHMRAHAISGPWAAGERVLVCLSEDPRSAALVRYTKRLADRLRAPWVALYVETERALRLDTAERDRIADFLRLAERMGGEAVTIPGGTRIADDVLSYARSANVTHIVIGKSDRSRWFEILHGSVVHDLVRRSGNISVHVIAGDKETPAPGRSGAAVPTARRETWPYLASLVIVALATLVGFGLQKVLALQNIALVFLTAVLVSAVRFGLAPALVASGAAMLAFNFFFIPPLYTFTITDPENVVALFFFLVVAIIASNLTARVRAQALAARARAKTAEDLYLFSKKLAGAGTLDDLLWATAFQIASMLNVRVVIVLPDGDTLAVKAAYPPEDAIDAADLAAARWAFENNRWAGRGADTLPGAKRLFMPMQTGRGAVGVIGIDRDKEGPLLTPEQRRLMDALADQAALAVERVNLVADVEKAKLDAATDRLRTALLTSISHDLKTPLASIMGAAGTLRSFFSALTEEARSDLLSTVEEEAERLNRFIANLLDMTRLESGAIVPNAGLCDVSEVVGSALDRARSILRHHRLEIDLAPDLPMLSIDPVLFEQALFNLLDNAAKYAPEGALVRIEGWSDGAFVTLRVLDEGPGIAEEDRERVFDKFYRVRKGDQVRAGTGLGLGISRGFLEAMGGTLTADGRPDRRGAAFTIRMPVPPQARALKALP

SEQ ID NO: 93776 - DNA, 2706 bp, Magnetospirillum gryphiswaldense
  CDS (1)..(2706): transl_table=11
atgaatgacgaccgtcacgaccgtccgtcccccgatgcgcttctggccgaggcgcaaaaggagagccgcggccatctcaagattttcctgggggcggcgcccggtgtcggcaagacctatgccatgctggaaaccgcccatgagcgccggcgcgaggggatcgacgtggtcgccggcatcatcgagacccatggccggcgcgaaaccgaggcgttgctggccgatctggacgttctgccgccgcgtctggccgaatatcgcgggcgaagtttccgcgagatggatttggacgggctgttgcgccgccgcccacgcatcgccctggtggacgaactggcccacagcaatatccccggttcgcgccacctcaagcgctggcaggatgtggaggaattgctggccgccggcatcgacgtctattcgaccctgaacatccagcatctggaatccatcaacgacatcgtcgagcagatttccggcgtcaaggtgcgcgaaaccctgcccgacagcgttctggccaccgccgacgagatcgaactgatcgacctgccgccccaggacctgatcaagcggctggaagagggcaaggtctatgtgccggaacaggcgcggcgggcggtgcattcgttcttctcgcccggcaacctgaccgccttgcgcgaattggccttgcgccacgccgccgagcgggtcgaccgccagatggtcgattacatgcgcgcccatgccatccccggtccgtggccggcgcgcgaacgcatcttggtctgcatcgacgaacgggtcgatgccgagcggctggtgcgcaccgccaagcgctcggcggaacgccgcggcgccgcctgggtggcggtgacggtggaaacaccggcggcgcacggtttgccggaagcggccaaggaccgcatcgacgccgccttgcggctggcggcgcagatgggcggcgataccgtgaccctgcatggcgacgacgtgggcgagtgcgtcttgtcctatgcgcgcgagcacaattgcacccagatcgtggtggggcgcgcccgcaaggccggttggctgcggcggtggtcgcgatcggtgaccgacgatctgatcagccgcgccggcgactttaccgtggtgctggtcggcggcgaggacgagaccagaccaaaacccgcccgtcccgccgtcaacaagacggatgacacttggctgcacctgggcttgggctatgccgtcgctttattggcgacggctgcggccaccggattgggctttgtcatccatccctggctgcccatcgccaatatctcggtgggctatttgctggcggtgatgatcgtcgccatgaaatccggcctgcgtcccggtatcctggcttcggcggccagtttcctcgccttcaatttcttcttcaccgaaccgcgcttcaccttcgccatcaccgacacccagaacatcgtcaccgtggtgttcttcctgatcgccgccttcatcatcagcaacatggcggcgcggctgcgcgaccagatccgggccacgcgggaaagcgcgcggcgcaccggcaatctctatgatttcggccgcaagatatcggcggcggccacccaggacgacgtgctgtgggcggtggttcatcacgtatcggcgaccattcacggtaagtccctggtgctgctgccgggcgaggcgggattgtccatcgccgccggctatccgcccgaggaccagatcgacgacaaatccgccggtgccgccgactgggcctggagccatggcaagatcgccgggcgcggctcggccaccttgcccgccgcccaatggctgttcctgccgttgaagaccgggcgcggcccggtgggggtgctgggcgtgcagatgaccgaagacgccgatctgccgtcgccggggcagatgcgtctgctggaaaccctggcagatcaggcggcggtggccatcgagcgcaccaccatggtggccgacatcgaaaccgcccgtgtcgccaccgagcgcgagcgtctgcgcgctgccttgctgtcgtcgctgtcgcacgatctgcgcacgcccttggtgtcgatcatgggggcggccagttcgctgatcgcctatgacgacaaactggatgccgacgggcgccgcgatctggcccagaccatccaggacgaggccgagcggctcaaccgcttcgtccagaacctgctggacatgacccggctgggatcgggggcgctgaagcccagggtggattgggtggatttgcgcgatgtggtgacggcggcggtcaagcgtaccgagcggctggcccggcgccacgccatcaaggtcgacatcgccccggatacgccgctgctgtgcctggatgcggtgctgatggagcaggtgatcttcaatctgctggacaatgcctgcaaatacgccccgccgggatcgccggtcaaggtgtgggccaagcgtaccgccgaccatatcgccatcgaggtggccgatcaggggccgggcatcccgcccgaggaccgcgaaaaggtgttcgacatgttctatcgggtcagggccgccgacacgcaagaggccggtaccgggcttggcttggccatctgtcgcggcatcgtcgaggcccatggcggcaccatcaaggccgagccgggtttgcatggggcgggaacctgcatcatcatccatctgccgccgccgcccgatcttgaccttgatggcaaaggaaatccgtga

SEQ ID NO: 93777 - protein, 901 aa, Magnetospirillum gryphiswaldense
MNDDRHDRPSPDALLAEAQKESRGHLKIFLGAAPGVGKTYAMLETAHERRREGIDVVAGIIETHGRRETEALLADLDVLPPRLAEYRGRSFREMDLDGLLRRRPRIALVDELAHSNIPGSRHLKRWQDVEELLAAGIDVYSTLNIQHLESINDIVEQISGVKVRETLPDSVLATADEIELIDLPPQDLIKRLEEGKVYVPEQARRAVHSFFSPGNLTALRELALRHAAERVDRQMVDYMRAHAIPGPWPARERILVCIDERVDAERLVRTAKRSAERRGAAWVAVTVETPAAHGLPEAAKDRIDAALRLAAQMGGDTVTLHGDDVGECVLSYAREHNCTQIVVGRARKAGWLRRWSRSVTDDLISRAGDFTVVLVGGEDETRPKPARPAVNKTDDTWLHLGLGYAVALLATAAATGLGFVIHPWLPIANISVGYLLAVMIVAMKSGLRPGILASAASFLAFNFFFTEPRFTFAITDTQNIVTVVFFLIAAFIISNMAARLRDQIRATRESARRTGNLYDFGRKISAAATQDDVLWAVVHHVSATIHGKSLVLLPGEAGLSIAAGYPPEDQIDDKSAGAADWAWSHGKIAGRGSATLPAAQWLFLPLKTGRGPVGVLGVQMTEDADLPSPGQMRLLETLADQAAVAIERTTMVADIETARVATERERLRAALLSSLSHDLRTPLVSIMGAASSLIAYDDKLDADGRRDLAQTIQDEAERLNRFVQNLLDMTRLGSGALKPRVDWVDLRDVVTAAVKRTERLARRHAIKVDIAPDTPLLCLDAVLMEQVIFNLLDNACKYAPPGSPVKVWAKRTADHIAIEVADQGPGIPPEDREKVFDMFYRVRAADTQEAGTGLGLAICRGIVEAHGGTIKAEPGLHGAGTCIIIHLPPPPDLDLDGKGNP

SEQ ID NO: 93778 - DNA, 2703 bp, Clostridium acetobutylicum
  CDS (1)..(2703): transl_table=11
atggatatcaactacgaaagacctgatccatattatcttttaaacaaaatagataaggaagaaaaaaataagaatagaggcaaattaaaaatcttttttggctatgcagcgggtgtaggtaaaacctatgcaatgcttagagctgctcactatatgaaagaacttggaaaggatatagttatagggtatatagagcctcacgcaaggatggatacaatgtcacttacaaaggggcttccacagataccagtaaaaaatatagattataaaggagttatactaagggaatttgatgtagataaagcgcttttaagaaagcctgaaataattcttgtagatgaattagcgcatactaatgcaaaaagtcaaaggaataaaaaaagatggaaggatatagaggagcttttggatgcaggaattgatgtgtacaccactttaaatgttcagcatatagaaagcttaaatgatatagttgcaaatataactcatgtttcagtaagagaaactattccagacaaggtatttgatgatgcagataaggttgaattaatagatatagaaccagatgagcttttaaagagatttacagacggtaagatatataggaaagagcaggttaaaagggcattcaataatttttttactaagaataatttatatgcattaagagaaattgcccttagaagaactgcggatagagttaattttgaaatagaaattgcaagattatcaaagggtcaaattacagtaatggcaacctcagatcaaatacttgcgtgtataggaacctcaccatcttcggcaagaataataagaactgctgcaaggatggcagaatcctaccattcaaagtggatagcactttatgttgatactggtagaagcttaggtaaagcagataaggaaaccctcaatgcaaattttaatctggtggagcttttaggtggggaacttgttactgttcatggagaaaatgttgcagaccaaataataagatatgcagagcttagaaacactactaaaatagtaataggaaaaaatcataaaagaacaggaactctcctgcatttttatgctaaggatgtagtagataagcttatggattcaaattcttatatagatgtctatatgataccgaattcatcttattatagagatcacaaaaatagtattttatcaaaaataagtattcagcataaaggatcagttaaggatgtattaaaagcaataataattatggcaattactacagatatagctgaactttttagttacatgggctttaaggatgtcaatgttataatgatatttatacttggtgtaataattgtatatatggcaactaaagggcaaattatggggataatatcatccatagcagctgtattagtgttcaattatagatttactgaacctaaaaattcttttatagtttatgataaaagctatcttgttacctttccaataatgatgattgttgcattcataattggaagtcttactaataaggtgcaaaaggaagctcaagattctaatatgagggaaaaaaggactcaaactttgtatatagtaagtggtaagctattgagtgctgttggaacctccgaggttgtgtccataggtataaagtatatatcaagattagttaatagaaatgtaatatgctatttggcagacactagtaataagctttcaacaccatttgtatataaaaaggataaaggagccaaggaagaaatcatcatgagtaaggatgaaaatgctgctgcctactggacctttttaaatggaaaagaatctggatgtggaacaagtactttttatagagcaaaagggtactacattcctataaaaattaaaaataaagtacttggagtaataggtgtatcgtgtccaagtggtcctttaagacctcaaaaaaaggctgtggttgatacagttacaggtcaaatagctattgccctcgatagagagatactttcaaaggaacaagaaaaatctaaagttgaaatagagcgtgaaaggcttagaagcaatctcttaagatcaatctcacatgatttaagaagtccacttgcaggtataaagggagcggcaagtactatacttgaaaatggagaacttatagatgaaaagagaaaacaggagcttataaatggaatatatgaagatactgaatggcttataagattaattgagaatttgcttagtatgacaaagtttgatgaggggaatacaaaaataaaaaaagatgtggagttagtggaagaggttgtttccgaagcagtgcaaagaagctctaaatacttcaaaaatcataagataaaagtaagtgtgccagaagatgttataatggtatcgatggatggaagcttaattgaacaagttataataaatcttttagataatgcttcaaagttctcacctaaaggttctactatagaaattaaggtttacgaaaaaaagaaggatgttgtttttgaaataatagatgaaggacagggtatttcagaggatatacttcctaatatatttgatagattttttacaaatggaagcaaaatatcagattcaaggagaggagtaggacttggactggctatttgtaagtctatagtagaagctcatggaggaaaaatagaggctgttaacaaaggtagtggaggagctatctttaagttcaatattcctaaagagttatag

SEQ ID NO: 93779 - protein, 900 aa, Clostridium acetobutylicum
MDINYERPDPYYLLNKIDKEEKNKNRGKLKIFFGYAAGVGKTYAMLRAAHYMKELGKDIVIGYIEPHARMDTMSLTKGLPQIPVKNIDYKGVILREFDVDKALLRKPEIILVDELAHTNAKSQRNKKRWKDIEELLDAGIDVYTTLNVQHIESLNDIVANITHVSVRETIPDKVFDDADKVELIDIEPDELLKRFTDGKIYRKEQVKRAFNNFFTKNNLYALREIALRRTADRVNFEIEIARLSKGQITVMATSDQILACIGTSPSSARIIRTAARMAESYHSKWIALYVDTGRSLGKADKETLNANFNLVELLGGELVTVHGENVADQIIRYAELRNTTKIVIGKNHKRTGTLLHFYAKDVVDKLMDSNSYIDVYMIPNSSYYRDHKNSILSKISIQHKGSVKDVLKAIIIMAITTDIAELFSYMGFKDVNVIMIFILGVIIVYMATKGQIMGIISSIAAVLVFNYRFTEPKNSFIVYDKSYLVTFPIMMIVAFIIGSLTNKVQKEAQDSNMREKRTQTLYIVSGKLLSAVGTSEVVSIGIKYISRLVNRNVICYLADTSNKLSTPFVYKKDKGAKEEIIMSKDENAAAYWTFLNGKESGCGTSTFYRAKGYYIPIKIKNKVLGVIGVSCPSGPLRPQKKAVVDTVTGQIAIALDREILSKEQEKSKVEIERERLRSNLLRSISHDLRSPLAGIKGAASTILENGELIDEKRKQELINGIYEDTEWLIRLIENLLSMTKFDEGNTKIKKDVELVEEVVSEAVQRSSKYFKNHKIKVSVPEDVIMVSMDGSLIEQVIINLLDNASKFSPKGSTIEIKVYEKKKDVVFEIIDEGQGISEDILPNIFDRFFTNGSKISDSRRGVGLGLAICKSIVEAHGGKIEAVNKGSGGAIFKFNIPKEL

SEQ ID NO: 93780 - DNA, 2565 bp, Rathayibacter rathayi
  CDS (1)..(2565): transl_table=11
atgctcgtgggcgctcgcgttctgctcggggccccccggggcgtcggcaaaacgttcaccatgctcgaggaggcaaagcccctccgcgatgagggcgtggatgttgtggtggccgtcgtggagacgcacggccgcgccggaacagccgccgcccttgtcgggttggaggtggtgccccgcctcaccgtcgagcaccgcggggtggtgctcaccgaaatggatgtcgcgggtgtgatcgtccgtcgcgccccacagctggctctcgtcgacgagttggcgcacactaacgcctcccggcagcgcacagaaaagcggtggcaggatgtggaggcgatcctggatgccggaatcgacgtgatgtcgaccgtgaacatccagcacatcgagtcgctgacggatgtggtacacaaaatcacgggtgccccgcagcgggagacgattccggatgaggtgctgcgggctgcccgggagatcgaagtgatcgacgtgacccctgtcgctgcgggagcgttggcgagtgggttggtgtacccggccgagcggatcgacgccgccctatcgaactattttcggctcggaaacctcaccggcctgcgcgagctggccctgctgtggttggccgacgaggtcgacagtgcgctcaaaaactatcgggctgagcaggggatcgacagcacctgggaaacccgggagcgcgtcgtggtggcgctgacaggaggcccggagggagactctcatccgccgggggccacgcattgccgcccgtgcggccggggtgagctgctcgcggtgcatgtaaccggccaagatgggttcgcgccgccaacccgggggctttggcgtcagcgttccctcgtggagagcctcggcgggagctaccaccaggtgatcggtgacgacattgcgctcgtcgagttcgcgcgcgccgcaaacgccacccaattggtgatcggggtgagccgccggggaagactcgcgcggcgctgtccggtccggggatcggtcgacggtcatcgagagtccggaaacatcgatgtgcatattgtcaatcatgcggccgcgggcgggcggttcaccctgccacggatggctggtggggccctcaccgtgaagcgtcggctgagcggtctggcgctcacgctcatcctgggccccctgatcaccgcggttttggtgacttttcgctcgcccgattcgatcacgagcgatgtgctcacctatcaggtgctggtcgtgctggtcgccctggtcggtggaatttggccggcgttgttggccgcggtgctctctgggatcacactggactactttttggtcgagcctctattcactgtgacagtcgacaaaccgctgcacctcttcgccctcgcgctgtacatcacgatcgccatgatggtgagctatgtggtcgaccaggctgcccgcagaacccgggtcgcacgtcggtcggccgccgagtcggagctgctcgccaccatcgcaggcagtgtgctgcgcggtgacggggcgctgcaatcgttggtcagccgcacgcggaaggtttgggttgaggggtgcgattgctggatgccacgcgtgcggccgatcacgccgacaaggcctcctggagcggacggtcagaccgcggccgatcacgccgtgatttgcgctgacggggagccggcatccgatgatcgtgtggtgctcgtgccggtgggtgaacgtgcaaccctggagttgcatggggccgatttggatgcatccgagcgtcgactgctcgcggtgattgcggcccagatcgatgcggcgcttgaacatgaggcgctcagcgtgacggcccgcgaggtgggcccgctggcggaaaccgatcgggtgcgcacggcgttgctgtccgcggtcagtcatgatttgcggcgcccgtttgacggcggcaaccaaaagggtgggtggcttgcgctccaccgcgatgaccctgtctgccgacgaccgggaggagctgctcgcgaccgccgacgaaagcctgcacacctgtcggtgttggtgaccgatctgctcgatgtgagtcgggtgcaggcgggggtgctcggggtgacggtgcgtcaggtggatgtggaggatgttttgccgcgggcactcgacgagctcggggtcggccccgaccaggtggtgctcgacctggatgccgcggtcggtccggtgctcgccgacccgggcctgctgcagcgggtgctggtcaatttgctcgccaatgcgctgcggttttcccccgagggtgcggtgccgactatcgaccagtcgtttggtgacaccgtgcagattcgggtcaccgatcacgggcccggaatcgccgccgaccgccgcgatgacgtgtttgtgccgtttcagcggctcggagataccgacaattcgaccggactcggcctagggttggcattgtcgaaagggttcacagtgggtatgggcggcgaactcgacaccgaagacacccccggcggcggtctcaccatggtggtcacgctgccggtcgccagcgctgatgcggatgcgaatgcggaccggcccggcgggtcgcgggcttcgctatga

SEQ ID NO: 93781 - protein, 854 aa, Rathayibacter rathayi
MLVGARVLLGAPRGVGKTFTMLEEAKPLRDEGVDVVVAVVETHGRAGTAAALVGLEVVPRLTVEHRGVVLTEMDVAGVIVRRAPQLALVDELAHTNASRQRTEKRWQDVEAILDAGIDVMSTVNIQHIESLTDVVHKITGAPQRETIPDEVLRAAREIEVIDVTPVAAGALASGLVYPAERIDAALSNYFRLGNLTGLRELALLWLADEVDSALKNYRAEQGIDSTWETRERVVVALTGGPEGDSHPPGATHCRPCGRGELLAVHVTGQDGFAPPTRGLWRQRSLVESLGGSYHQVIGDDIALVEFARAANATQLVIGVSRRGRLARRCPVRGSVDGHRESGNIDVHIVNHAAAGGRFTLPRMAGGALTVKRRLSGLALTLILGPLITAVLVTFRSPDSITSDVLTYQVLVVLVALVGGIWPALLAAVLSGITLDYFLVEPLFTVTVDKPLHLFALALYITIAMMVSYVVDQAARRTRVARRSAAESELLATIAGSVLRGDGALQSLVSRTRKVWVEGCDCWMPRVRPITPTRPPGADGQTAADHAVICADGEPASDDRVVLVPVGERATLELHGADLDASERRLLAVIAAQIDAALEHEALSVTAREVGPLAETDRVRTALLSAVSHDLRRPFDGGNQKGGWLALHRDDPVCRRPGGAARDRRRKPAHLSVLVTDLLDVSRVQAGVLGVTVRQVDVEDVLPRALDELGVGPDQVVLDLDAAVGPVLADPGLLQRVLVNLLANALRFSPEGAVPTIDQSFGDTVQIRVTDHGPGIAADRRDDVFVPFQRLGDTDNSTGLGLGLALSKGFTVGMGGELDTEDTPGGGLTMVVTLPVASADADANADRPGGSRASL

SEQ ID NO: 93782 - DNA, 24 bp, Artificial sequence
  primer
atgaataacgaacccttacgtccc

SEQ ID NO: 93783 - DNA, 28 bp, Artificial sequence
  primer
ttacatatcctcatgaaattcttcaagt

SEQ ID NO: 93784 - protein, 970 aa, Artificial sequence
  consensus sequence
  Variant (3)..(4): Xaa in position 3 to 4 is any amino acid
  Variant (5)..(13): Xaa in position 5 to 13 is any or no amino acid
  Variant (16)..(16): Xaa in position 16 is any amino acid
  Variant (18)..(21): Xaa in position 18 to 21 is any amino acid
  Variant (23)..(25): Xaa in position 23 to 25 is any amino acid
  Variant (31)..(32): Xaa in position 31 to 32 is any amino acid
  Variant (35)..(36): Xaa in position 35 to 36 is any amino acid
  Variant (38)..(43): Xaa in position 38 to 43 is any amino acid
  Variant (45)..(45): Xaa in position 45 is any amino acid
  Variant (47)..(47): Xaa in position 47 is any amino acid
  Variant (49)..(49): Xaa in position 49 is any amino acid
  Variant (51)..(52): Xaa in position 51 to 52 is any amino acid
  Variant (58)..(59): Xaa in position 58 to 59 is any amino acid
  Variant (61)..(62): Xaa in position 61 to 62 is any amino acid
  Variant (64)..(65): Xaa in position 64 to 65 is any amino acid
  Variant (68)..(70): Xaa in position 68 to 70 is any amino acid
  Variant (72)..(83): Xaa in position 72 to 83 is any amino acid
  Variant (85)..(85): Xaa in position 85 is any amino acid
  Variant (87)..(87): Xaa in position 87 is any amino acid
  Variant (89)..(90): Xaa in position 89 to 90 is any amino acid
  Variant (92)..(92): Xaa in position 92 is any amino acid
  Variant (94)..(94): Xaa in position 94 is any amino acid
  Variant (95)..(95): Xaa in position 95 is any or no amino acid
  Variant (97)..(99): Xaa in position 97 to 99 is any amino acid
  Variant (101)..(101): Xaa in position 101 is any amino acid
  Variant (107)..(107): Xaa in position 107 is any amino acid
  Variant (109)..(110): Xaa in position 109 to 110 is any amino acid
  Variant (112)..(112): Xaa in position 112 is any amino acid
  Variant (115)..(115): Xaa in position 115 is any amino acid
  Variant (118)..(119): Xaa in position 118 to 119 is any amino acid
  Variant (121)..(122): Xaa in position 121 to 122 is any amino acid
  Variant (126)..(127): Xaa in position 126 to 127 is any amino acid
  Variant (132)..(132): Xaa in position 132 is any amino acid
  Variant (135)..(135): Xaa in position 135 is any amino acid
  Variant (137)..(137): Xaa in position 137 is any amino acid
  Variant (140)..(140): Xaa in position 140 is any amino acid
  Variant (146)..(146): Xaa in position 146 is any amino acid
  Variant (148)..(150): Xaa in position 148 to 150 is any amino acid
  Variant (152)..(154): Xaa in position 152 to 154 is any amino acid
  Variant (156)..(156): Xaa in position 156 is any amino acid
  Variant (159)..(159): Xaa in position 159 is any amino acid
  Variant (162)..(166): Xaa in position 162 to 166 is any amino acid
  Variant (168)..(170): Xaa in position 168 to 170 is any amino acid
  Variant (171)..(171): Xaa in position 171 is any or no amino acid
  Variant (173)..(173): Xaa in position 173 is any amino acid
  Variant (175)..(176): Xaa in position 175 to 176 is any amino acid
  Variant (178)..(179): Xaa in position 178 to 179 is any amino acid
  Variant (181)..(181): Xaa in position 181 is any amino acid
  Variant (182)..(182): Xaa in position 182 is any or no amino acid
  Variant (185)..(186): Xaa in position 185 to 186 is any amino acid
  Variant (191)..(194): Xaa in position 191 to 194 is any amino acid
  Variant (196)..(197): Xaa in position 196 to 197 is any amino acid
  Variant (199)..(202): Xaa in position 199 to 202 is any amino acid
  Variant (204)..(206): Xaa in position 204 to 206 is any amino acid
  Variant (209)..(209): Xaa in position 209 is any amino acid
  Variant (218)..(219): Xaa in position 218 to 219 is any amino acid
  Variant (221)..(222): Xaa in position 221 to 222 is any amino acid
  Variant (225)..(253): Xaa in position 225 to 253 is any amino acid
  Variant (254)..(260): Xaa in position 254 to 260 is any or no amino acid
  Variant (262)..(264): Xaa in position 262 to 264 is any amino acid
  Variant (266)..(266): Xaa in position 266 is any amino acid
  Variant (268)..(273): Xaa in position 268 to 273 is any amino acid
  Variant (274)..(274): Xaa in position 274 is any or no amino acid
  Variant (276)..(291): Xaa in position 276 to 291 is any amino acid
  Variant (292)..(301): Xaa in position 292 to 301 is any or no amino acid
  Variant (304)..(305): Xaa in position 304 to 305 is any amino acid
  Variant (308)..(323): Xaa in position 308 to 323 is any amino acid
  Variant (324)..(327): Xaa in position 324 to 327 is any or no amino acid
  Variant (329)..(331): Xaa in position 329 to 331 is any amino acid
  Variant (333)..(338): Xaa in position 333 to 338 is any amino acid
  Variant (340)..(354): Xaa in position 340 to 354 is any amino acid
  Variant (355)..(383): Xaa in position 355 to 383 is any or no amino acid
  Variant (385)..(442): Xaa in position 385 to 442 is any amino acid
  Variant (443)..(461): Xaa in position 443 to 461 is any or no amino acid
  Variant (463)..(470): Xaa in position 463 to 470 is any amino acid
  Variant (472)..(474): Xaa in position 472 to 474 is any amino acid
  Variant (476)..(496): Xaa in position 476 to 496 is any amino acid
  Variant (497)..(497): Xaa in position 497 is any or no amino acid
  Variant (500)..(501): Xaa in position 500 to 501 is any amino acid
  Variant (503)..(529): Xaa in position 503 to 529 is any amino acid
  Variant (531)..(550): Xaa in position 531 to 550 is any amino acid
  Variant (552)..(595): Xaa in position 552 to 595 is any amino acid
  Variant (596)..(621): Xaa in position 596 to 621 is any or no amino acid
  Variant (623)..(623): Xaa in position 623 is any amino acid
  Variant (625)..(630): Xaa in position 625 to 630 is any amino acid
  Variant (631)..(631): Xaa in position 631 is any or no amino acid
  Variant (634)..(634): Xaa in position 634 is any amino acid
  Variant (636)..(637): Xaa in position 636 to 637 is any amino acid
  Variant (640)..(642): Xaa in position 640 to 642 is any amino acid
  Variant (643)..(647): Xaa in position 643 to 647 is any or no amino acid
  Variant (649)..(655): Xaa in position 649 to 655 is any amino acid
  Variant (656)..(656): Xaa in position 656 is any or no amino acid
  Variant (658)..(668): Xaa in position 658 to 668 is any amino acid
  Variant (669)..(676): Xaa in position 669 to 676 is any or no amino acid
  Variant (678)..(686): Xaa in position 678 to 686 is any amino acid
  Variant (688)..(688): Xaa in position 688 is any amino acid
  Variant (690)..(691): Xaa in position 690 to 691 is any amino acid
  Variant (693)..(706): Xaa in position 693 to 706 is any amino acid
  Variant (707)..(714): Xaa in position 707 to 714 is any or no amino acid
  Variant (716)..(719): Xaa in position 716 to 719 is any amino acid
  Variant (721)..(722): Xaa in position 721 to 722 is any amino acid
  Variant (725)..(727): Xaa in position 725 to 727 is any amino acid
  Variant (736)..(738): Xaa in position 736 to 738 is any amino acid
  Variant (739)..(739): Xaa in position 739 is any or no amino acid
  Variant (741)..(744): Xaa in position 741 to 744 is any amino acid
  Variant (746)..(773): Xaa in position 746 to 773 is any amino acid
  Variant (774)..(786): Xaa in position 774 to 786 is any or no amino acid
  Variant (792)..(813): Xaa in position 792 to 813 is any amino acid
  Variant (814)..(814): Xaa in position 814 is any or no amino acid
  Variant (816)..(837): Xaa in position 816 to 837 is any amino acid
  Variant (838)..(845): Xaa in position 838 to 845 is any or no amino acid
  Variant (847)..(848): Xaa in position 847 to 848 is any amino acid
  Variant (850)..(850): Xaa in position 850 is any amino acid
  Variant (852)..(855): Xaa in position 852 to 855 is any amino acid
  Variant (858)..(859): Xaa in position 858 to 859 is any amino acid
  Variant (862)..(884): Xaa in position 862 to 884 is any amino acid
  Variant (885)..(891): Xaa in position 885 to 891 is any or no amino acid
  Variant (893)..(893): Xaa in position 893 is any amino acid
  Variant (895)..(895): Xaa in position 895 is any amino acid
  Variant (897)..(897): Xaa in position 897 is any amino acid
  Variant (899)..(907): Xaa in position 899 to 907 is any amino acid
  Variant (908)..(908): Xaa in position 908 is any or no amino acid
  Variant (910)..(911): Xaa in position 910 to 911 is any amino acid
  Variant (913)..(922): Xaa in position 913 to 922 is any amino acid
  Variant (923)..(926): Xaa in position 923 to 926 is any or no amino acid
  Variant (928)..(928): Xaa in position 928 is any amino acid
  Variant (933)..(935): Xaa in position 933 to 935 is any amino acid
  Variant (936)..(943): Xaa in position 936 to 943 is any or no amino acid
  Variant (945)..(953): Xaa in position 945 to 953 is any amino acid
  Variant (954)..(961): Xaa in position 954 to 961 is any or no amino acid
  Variant (963)..(968): Xaa in position 963 to 968 is any amino acid
LLXXXXXXXXXXXRGXLXXXXGXXXGVGKTXXMLXXAXXXXXXGXDXVXGXXETHGRXXTXXLXXGLXXXPXXXXXXXXXXXXEXDXDXXLXRXXPXXXLXDELAHXNXXGXRHXKRXXDXXELLXXGIDVXTTXNXQHXESLNDXVXXXTXXXVXETXPDXXXXXAXXXXLXDXXPXXLXXRLXXGKVYXXXXAXXAXXXXFXXXNLXALRELALRXXAXXVDXXXXXXXXXXXXXXXXXXXXXXXXXXXXXXXXXXXXRXXXRXAXXXXXXXWXXXXXXXXXXXXXXXXXXXXXXXXXXLAXXLGXXXXXXXXXXXXXXXXXXXXAXXXNXXXXXXGXXXXXXXXXXXXXXXXXXXXXXXXXXXXXXXXXXXXXXXXXXXXLXXXXXXXXXXXXXXXXXXXXXXXXXXXXXXXXXXXXXXXXXXXXXXXXXXXXXXXXXXXXXXXXXXXXXXXXXXXXXNXXXXXXXXVXXXAXXXXXXXXXXXXXXXXXXXXXXFFXXPXXXXXXXXXXXXXXXXXXXXXXXXXXXLXXXXXXXXXXXXXXXXXXXXLXXXXXXXXXXXXXXXXXXXXXXXXXXXXXXXXXXXXXXXXXXXXXXXXXXXXXXXXXXXXXXXXXXXXXXAXWXXXXXXXAGXGXXTLXXXXXXXXPXXXXXXXXGXXXXXXXXXXXXXXXXXXXRXXXXXXXXXAXAXXRXXXXXXXXXXXXXXXXXXXXXXEXXXXRXXLLXXXSHDLRTPLXXXXGXXXXLXXXXXXXXXXXXXXXXXXXXXXXXXXXXXXXXXXXXXXXXXNLLDMXXXXXXXXXXXXXXXXXXXXXXXAXXXXXXXXXXXXXXXXXXXXXXXXXXXXXXDXXLXEXXXXNLXXNAXXXXXXXXXXXXXXXXXXXXXXXXXXXXXXVXDXGXGXXXXXXXXXXFXXFXXXXXXXXXXXXXXGXGLGLXXXXXXXXXXXGXXXXXXXXXXXXXXXXXGXXXXXXLP

SEQ ID NO: 93785 - protein, 61 aa, Artificial sequence
  protein pattern
  Variant (3)..(3): Xaa in position 3 is any amino acid
  Variant (6)..(6): Xaa in position 6 is Ser or Thr
  Variant (8)..(9): Xaa in position 8 to 9 is any amino acid
  Variant (11)..(11): Xaa in position 11 is any amino acid
  Variant (13)..(14): Xaa in position 13 to 14 is any amino acid
  Variant (17)..(17): Xaa in position 17 is Phe, Trp or Tyr
  Variant (18)..(18): Xaa in position 18 is any amino acid
  Variant (20)..(20): Xaa in position 20 is any amino acid
  Variant (21)..(21): Xaa in position 21 is any or no amino acid
  Variant (23)..(23): Xaa in position 23 is any or no amino acid
  Variant (25)..(26): Xaa in position 25 to 26 is any amino acid
  Variant (27)..(27): Xaa in position 27 is any or no amino acid
  Variant (30)..(30): Xaa in position 30 is Asp or Asn
  Variant (32)..(32): Xaa in position 32 is any amino acid
  Variant (33)..(33): Xaa in position 33 is Ser or Thr
  Variant (34)..(34): Xaa in position 34 is Ala or Thr
  Variant (35)..(35): Xaa in position 35 is Leu or Val
  Variant (37)..(37): Xaa in position 37 is Ile or Val
  Variant (40)..(40): Xaa in position 40 is any amino acid
  Variant (41)..(41): Xaa in position 41 is Asp or Glu
  Variant (42)..(42): Xaa in position 42 is Ser or Thr
  Variant (43)..(43): Xaa in position 43 is Ile or Leu
  Variant (44)..(44): Xaa in position 44 is Gly, Asn or Val
  Variant (45)..(45): Xaa in position 45 is Asp, Glu or Gln
  Variant (46)..(46): Xaa in position 46 is any amino acid
  Variant (48)..(49): Xaa in position 48 to 49 is any amino acid
  Variant (50)..(50): Xaa in position 50 is Ile or Val
  Variant (51)..(52): Xaa in position 51 to 52 is any amino acid
  Variant (53)..(53): Xaa in position 53 is Ile or Val
  Variant (54)..(56): Xaa in position 54 to 56 is any amino acid
  Variant (58)..(58): Xaa in position 58 is any amino acid
  Variant (59)..(59): Xaa in position 59 is Ile, Leu or Val
DEXAHXNXXGXRXXKRXXDXXEXLXXXGIXVXXXXNXQHXXXXXXXVXXXXXXXXXEXXPD

SEQ ID NO: 93786 - protein, 59 aa, Artificial sequence
  protein pattern
  Variant (2)..(2): Xaa in position 2 is any amino acid
  Variant (4)..(4): Xaa in position 4 is any amino acid
  Variant (5)..(5): Xaa in position 5 is Ile or Val
  Variant (6)..(6): Xaa in position 6 is Phe or Tyr
  Variant (7)..(7): Xaa in position 7 is Phe, Leu or Val
  Variant (9)..(9): Xaa in position 9 is any or no amino acid
  Variant (11)..(11): Xaa in position 11 is any or no amino acid
  Variant (13)..(13): Xaa in position 13 is any or no amino acid
  Variant (19)..(19): Xaa in position 19 is Phe, Trp or Tyr
  Variant (20)..(20): Xaa in position 20 is Ala, Glu or Gly
  Variant (23)..(24): Xaa in position 23 to 24 is any amino acid
  Variant (26)..(31): Xaa in position 26 to 31 is any amino acid
  Variant (33)..(36): Xaa in position 33 to 36 is any amino acid
  Variant (37)..(37): Xaa in position 37 is Ala, Ile or Val
  Variant (38)..(38): Xaa in position 38 is Ala or Gly
  Variant (39)..(39): Xaa in position 39 is any amino acid
  Variant (40)..(40): Xaa in position 40 is Ala, Ile or Val
  Variant (42)..(42): Xaa in position 42 is any amino acid
  Variant (44)..(44): Xaa in position 44 is Ala, Asp, Glu, Gly, Ser or Thr
  Variant (46)..(47): Xaa in position 46 to 47 is any amino acid
  Variant (49)..(53): Xaa in position 49 to 53 is any amino acid
  Variant (54)..(54): Xaa in position 54 is Asp, Gly or Thr
  Variant (55)..(55): Xaa in position 55 is Ile, Leu or Val
  Variant (56)..(58): Xaa in position 56 to 58 is any amino acid
GXLXXXXGXAXAXGVGKTXXMLXXAXXXXXXGXXXXXXXXEXHXRXXTXXXXXXXXXXP

SEQ ID NO: 93787 - protein, 42 aa, Artificial sequence
  protein pattern
  Variant (2)..(2): Xaa in position 2 is any amino acid
  Variant (5)..(8): Xaa in position 5 to 8 is any amino acid
  Variant (9)..(10): Xaa in position 9 to 10 is any or no amino acid
  Variant (12)..(13): Xaa in position 12 to 13 is any or no amino acid
  Variant (15)..(17): Xaa in position 15 to 17 is any amino acid
  Variant (18)..(18): Xaa in position 18 is Phe or Tyr
  Variant (20)..(21): Xaa in position 20 to 21 is any amino acid
  Variant (22)..(22): Xaa in position 22 is Glu, Gly, Ser or Thr
  Variant (25)..(25): Xaa in position 25 is any amino acid
  Variant (29)..(29): Xaa in position 29 is Glu or Lys
  Variant (30)..(30): Xaa in position 30 is Ile, Leu or Met
  Variant (31)..(31): Xaa in position 31 is Ala, Ser or Thr
  Variant (32)..(32): Xaa in position 32 is Leu or Met
  Variant (33)..(35): Xaa in position 33 to 35 is any amino acid
  Variant (37)..(38): Xaa in position 37 to 38 is any amino acid
  Variant (39)..(39): Xaa in position 39 is Ile or Val
  Variant (40)..(40): Xaa in position 40 is Asp or Gly
  Variant (41)..(41): Xaa in position 41 is any amino acid
  Variant (42)..(42): Xaa in position 42 is Ala, Asp, Glu or Gln
GXVYXXXXXXAXXAXXXXFXXXNLXALRXXXXXXXAXXXXXX

SEQ ID NO: 93788 - protein, 29 aa, Artificial sequence
  protein pattern
  Variant (2)..(2): Xaa in position 2 is any amino acid
  Variant (3)..(3): Xaa in position 3 is Asp, Glu or Asn
  Variant (4)..(4): Xaa in position 4 is any amino acid
  Variant (5)..(5): Xaa in position 5 is Phe, Ile, Leu, Met or Val
  Variant (6)..(6): Xaa in position 6 is any amino acid
  Variant (7)..(7): Xaa in position 7 is Ala, Asn, Gln, Ser or Thr
  Variant (8)..(8): Xaa in position 8 is Ala, Asn, Ser or Thr
  Variant (9)..(9): Xaa in position 9 is Leu or Val
  Variant (11)..(11): Xaa in position 11 is any amino acid
  Variant (12)..(12): Xaa in position 12 is Ala, Ser or Val
  Variant (13)..(13): Xaa in position 13 is Ile, Leu or Val
  Variant (18)..(18): Xaa in position 18 is Lys or Arg
  Variant (19)..(19): Xaa in position 19 is Ser or Thr
  Variant (21)..(23): Xaa in position 21 to 23 is any or no amino acid
  Variant (25)..(25): Xaa in position 25 is Ala, Ser, Thr or Val
  Variant (26)..(26): Xaa in position 26 is Ala, Gly, Ser, Thr or Val
  Variant (27)..(27): Xaa in position 27 is Ile, Leu, Met or Val
  Variant (28)..(28): Xaa in position 28 is any amino acid
  Variant (29)..(29): Xaa in position 29 is Ala, Asp, Glu or Gly
EXXXXXXXXLXXXSHDLXXPXXXLXXXXX

SEQ ID NO: 93789 - protein, 20 aa, Artificial sequence
  protein pattern
  Variant (2)..(3): Xaa in position 2 to 3 is any amino acid
  Variant (5)..(5): Xaa in position 5 is Phe, Ile, Leu, Met or Val
  Variant (6)..(6): Xaa in position 6 is any amino acid
  Variant (7)..(7): Xaa in position 7 is Gln or Arg
  Variant (8)..(8): Xaa in position 8 is Ala, Leu or Val
  Variant (9)..(9): Xaa in position 9 is Phe, Ile, Leu or Val
  Variant (10)..(10): Xaa in position 10 is any amino acid
  Variant (13)..(13): Xaa in position 13 is Phe, Ile, Leu, Met or Val
  Variant (14)..(14): Xaa in position 14 is Ala, Asp or Glu
  Variant (17)..(17): Xaa in position 17 is any amino acid
  Variant (18)..(18): Xaa in position 18 is Lys or Arg
  Variant (19)..(19): Xaa in position 19 is Phe, His or Tyr
  Variant (20)..(20): Xaa in position 20 is Ala, Gly, Ser or Thr
DXXLXXXXXXNLXXNAXXXX

SEQ ID NO: 93790 - protein, 17 aa, Artificial sequence
  protein pattern
  Variant (2)..(2): Xaa in position 2 is any amino acid
  Variant (7)..(7): Xaa in position 7 is any amino acid
  Variant (8)..(11): Xaa in position 8 to 11 is any or no amino acid
  Variant (13)..(13): Xaa in position 13 is Ala, Cys, Ser or Val
  Variant (14)..(14): Xaa in position 14 is any amino acid
  Variant (15)..(15): Xaa in position 15 is Ala, Gly, Ser or Val
  Variant (16)..(16): Xaa in position 16 is any amino acid
  Variant (17)..(17): Xaa in position 17 is Gly, Ile, Leu or Val
GXGLGLXXXXXIXXXXX

SEQ ID NO: 93791 - protein, 16 aa, Artificial sequence
  protein pattern
  Variant (2)..(4): Xaa in position 2 to 4 is any amino acid
  Variant (5)..(7): Xaa in position 5 to 7 is any or no amino acid
  Variant (11)..(11): Xaa in position 11 is Asp or Ser
  Variant (13)..(13): Xaa in position 13 is Ala or Thr
  Variant (14)..(14): Xaa in position 14 is Lys or Arg
  Variant (15)..(15): Xaa in position 15 is Phe, Ile, Leu or Met
  Variant (16)..(16): Xaa in position 16 is Asp, Glu, Gly or Gln
RXXXXXXNLLXMXXXX

SEQ ID NO: 93792 - protein, 15 aa, Artificial sequence
  protein pattern
  Variant (2)..(2): Xaa in position 2 is Phe, Leu or Met
  Variant (4)..(4): Xaa in position 4 is Ile, Leu or Val
  Variant (5)..(5): Xaa in position 5 is Asp, Glu or Pro
  Variant (6)..(6): Xaa in position 6 is any amino acid
  Variant (7)..(7): Xaa in position 7 is Ala, Ile, Leu or Val
  Variant (9)..(11): Xaa in position 9 to 11 is any amino acid
  Variant (13)..(13): Xaa in position 13 is any amino acid
  Variant (14)..(14): Xaa in position 14 is Ile, Leu or Val
  Variant (15)..(15): Xaa in position 15 is Ala, Ile, Leu or Val
EXDXXXXLXXXPXXX

SEQ ID NO: 93793 - DNA, 1167 bp, Escherichia coli
  CDS (1)..(1167): transl_table=11
atgaacttacatgaatatcaggcaaaacaactttttgcccgctatggcttaccagcaccggtgggttatgcctgtactactccgcgcgaagcagaagaagccgcttcaaaaatcggtgccggtccgtgggtagtgaaatgtcaggttcacgctggtggccgcggtaaagcgggcggtgtgaaagttgtaaacagcaaagaagacatccgtgcttttgcagaaaactggctgggcaagcgtctggtaacgtatcaaacagatgccaatggccaaccggttaaccagattctggttgaagcagcgaccgatatcgctaaagagctgtatctcggtgccgttgttgaccgtagttcccgtcgtgtggtctttatggcctccaccgaaggcggcgtggaaatcgaaaaagtggcggaagaaactccgcacctgatccataaagttgcgcttgatccgctgactggcccgatgccgtatcagggacgcgagctggcgttcaaactgggtctggaaggtaaactggttcagcagttcaccaaaatcttcatgggcctggcgaccattttcctggagcgcgacctggcgttgatcgaaatcaacccgctggtcatcaccaaacagggcgatctgatttgcctcgacggcaaactgggcgctgacggcaacgcactgttccgccagcctgatctgcgcgaaatgcgtgaccagtcgcaggaagatccgcgtgaagcacaggctgcacagtgggaactgaactacgttgcgctggacggtaacatcggttgtatggttaacggcgcaggtctggcgatgggtacgatggacatcgttaaactgcacggcggcgaaccggctaacttccttgacgttggcggcggcgcaaccaaagaacgtgtaaccgaagcgttcaaaatcatcctctctgacgacaaagtgaaagccgttctggttaacatcttcggcggtatcgttcgttgcgacctgatcgctgacggtatcatcggcgcggtagcagaagtgggtgttaacgtaccggtcgtggtacgtctggaaggtaacaacgccgaactcggcgcgaagaaactggctgacagcggcctgaatattattgcagcaaaaggtctgacggatgcagctcagcaggttgttgccgcagtggaggggaaataa

SEQ ID NO: 93794 - protein, 388 aa, Escherichia coli
MNLHEYQAKQLFARYGLPAPVGYACTTPREAEEAASKIGAGPWVVKCQVHAGGRGKAGGVKVVNSKEDIRAFAENWLGKRLVTYQTDANGQPVNQILVEAATDIAKELYLGAVVDRSSRRVVFMASTEGGVEIEKVAEETPHLIHKVALDPLTGPMPYQGRELAFKLGLEGKLVQQFTKIFMGLATIFLERDLALIEINPLVITKQGDLICLDGKLGADGNALFRQPDLREMRDQSQEDPREAQAAQWELNYVALDGNIGCMVNGAGLAMGTMDIVKLHGGEPANFLDVGGGATKERVTEAFKIILSDDKVKAVLVNIFGGIVRCDLIADGIIGAVAEVGVNVPVVVRLEGNNAELGAKKLADSGLNIIAAKGLTDAAQQVVAAVEGK

SEQ ID NO: 93795 - DNA, 1167 bp, Acinetobacter baumannii
  CDS (1)..(1167): transl_table=11
atgaacttacatgagtatcaagctaaagcgttattgaaagaatatggtatgccggtacaagaaggtatcttggcaaccaatgcagacgaagcagttgctgcatttgaacagcttggtggtaaattcgctgtaatgaaggcgcaagttcatgctggtggtcgtggtaaggctggtggcgttaaagttgcaaaatctaaagaagatgttatcgaatttgcaaacaatatcattggtactcgtcttgtaacgtatcaaacagatgcaaatggtcaaccagtaaacagcatcattgttgctgaagacgtatatccagttgagcgtgagctttacttgggcgcggttgtagaccgttctagccgtcgtattactttcatggcttctacagaaggtggtgtagaaatcgagaaagttgcggaagaaactccagaaaaaattatcaaagttgaagttgatccattagttggtttacaaccattccaagcacgtgaagttgcgtttgctttaggtttgaaagacaagcaaatcggtcaattcgtgaaaatcatgacagctgcttaccaagcatttgttgaaaatgatttcgctttatttgaaattaacccactttcagttcgtgaaaatggcgaaattttatgtgtagacgcgaaagtaggtatcgactctaacgcgctttaccgtttacctaaagttgctgctttacgtgacaaatctcaagagaatgagcgtgaattaaaagcatctgaatttgatcttaactatgttgctttagaaggtaacattggctgtatggttaacggtgctggtcttgcaatggcaactatggacatcattaaactttatggtggtcagcctgcaaacttccttgacgttggtggcggtgcaactaaagagcgtgtaatcgaagcgttcaaaatcattcttgctgatacgtctgtacaaggtgttttaatcaacatcttcggtggtatcgtacgttgtgacatgattgctgaagcaattattgcagcggttcaagaagtaaacgtaactgttccagttgttgttcgtttagaaggtaacaacgctgagttaggtgcgaaattacttgatgaatctggtttgaaattaatttctgcgaacggtttgtctgatgccgcagaaaaagttgtagctgcagttaaagcgtaa

SEQ ID NO: 93796 - protein, 388 aa, Acinetobacter baumannii
MNLHEYQAKALLKEYGMPVQEGILATNADEAVAAFEQLGGKFAVMKAQVHAGGRGKAGGVKVAKSKEDVIEFANNIIGTRLVTYQTDANGQPVNSIIVAEDVYPVERELYLGAVVDRSSRRITFMASTEGGVEIEKVAEETPEKIIKVEVDPLVGLQPFQAREVAFALGLKDKQIGQFVKIMTAAYQAFVENDFALFEINPLSVRENGEILCVDAKVGIDSNALYRLPKVAALRDKSQENERELKASEFDLNYVALEGNIGCMVNGAGLAMATMDIIKLYGGQPANFLDVGGGATKERVIEAFKIILADTSVQGVLINIFGGIVRCDMIAEAIIAAVQEVNVTVPVVVRLEGNNAELGAKLLDESGLKLISANGLSDAAEKVVAAVKA

SEQ ID NO: 93797 - DNA, 1167 bp, Neisseria meningitidis MC58
  CDS (1)..(1167): transl_table=11
atgaatttacacgagtatcaggctaaagaactgctggctagctacggtttgcccgtacaaggcggtattttggcacacaacggcgaagaagccgctgcagcttacgacaaattgggcggcaaattcgctgttgtcaaagcacaagtacacgccggcggccgcggtaaagcgggcggcgtaaaagtcgttaaaagccgcgaagaagctaaagaagtggctgaaagcctgattggcaccaacttggtaacttaccaaaccgatgccaacggccaacctgtcaacagtgttttggtttgcgaagacatgtatccggttcaaaccgagctgtacttgggcgcagtggttgaccgttctacccgccgcattacattcatggcctctaccgaaggcggcgtggaaatcgaaaaagttgctgccgaaactcctgaaaaaatcttcaaagtaaccgttgatccgctggtcggcctgcaaccttgccaagctcgcgaagttgcgttccaactgggcttgaaagacaaacaaatcaacgagttcgtcaaactgatgaccggtgcgtacaaagcgtttgtcgaaaatgacttcgccctgtttgaagtcaacccgctggcagttcgcgaaaacggcgcgctcgcctgcgtggacggcaaaatcggcatcgacagcaacgcgctctaccgcctgccgaaaatcgccgaattgcgcgacaaatctcaagaaaacgaacgcgagttgaaagcttctgaatttgacctgaactatgttgccctggaaggcaacatcggctgtatggtgaacggtgccggtttggcgatggccactatggacatcatcaaactgaaaggcggccaacctgccaacttcttggacgttggcggcggcgcaaccaaagaccgcgtggttgaagcgttcaaactgattctggaagacaaatccgttcaaggcgtattgatcaacatcttcggcggtatcgtacgttgcgacatgattgcggaagccatcgtggcagccgttaaagaaatcaacgtcaacgttcctgtcgttgttcgtttggaaggcaacaacgccgaactcggcgcgaaaatcctgaacgaatcaggtctgaaactgacttctgcagacggcctgaatgacgcagccgaaaaaattgttgcagccgtaaacgcctaa

SEQ ID NO: 93798 - protein, 388 aa, Neisseria meningitidis MC58
MNLHEYQAKELLASYGLPVQGGILAHNGEEAAAAYDKLGGKFAVVKAQVHAGGRGKAGGVKVVKSREEAKEVAESLIGTNLVTYQTDANGQPVNSVLVCEDMYPVQTELYLGAVVDRSTRRITFMASTEGGVEIEKVAAETPEKIFKVTVDPLVGLQPCQAREVAFQLGLKDKQINEFVKLMTGAYKAFVENDFALFEVNPLAVRENGALACVDGKIGIDSNALYRLPKIAELRDKSQENERELKASEFDLNYVALEGNIGCMVNGAGLAMATMDIIKLKGGQPANFLDVGGGATKDRVVEAFKLILEDKSVQGVLINIFGGIVRCDMIAEAIVAAVKEINVNVPVVVRLEGNNAELGAKILNESGLKLTSADGLNDAAEKIVAAVNA

SEQ ID NO: 93799 - DNA, 1164 bp, Legionella pneumophila
  CDS (1)..(1164): transl_table=11
atgaatttacatgaatatcaagccaagcaattgttcgctagctatggtttaccagttcctcgtggtgaggtcgcttataatgttgaagatgccttgctcgttgcttctcaattatcaacctctcgatgggttgtgaaagcacaagtccatgctggtggaagaggtaaagcaggtggtgtgaaactggtttctagcaaagatgaattggctgcagttgcgaaatccatgttaggcacacgtctggttacttatcaaactgatgccagaggtcaaccagttaatgccattttggttgaagaaacctgcgaaatagacaaggaattatatcttggtgctgttgttgatagagccaccagacgagttgtcattatggcctccacagaaggtggtgttgaaattgaaaaggttgctcatgaaacacctgagaaaattttcaaggtggttgttgaccccttagttggtgttatgccctttcaatgtcgtgaaacagcttttaaacttggattaaaagacgatcaaatcaaacaattcactcatttgatgatgggattagggaaaatgtttgttgattgtgatttaagtttattagagataaatccgcttgtcataacaaaatcagggcaactgatttgtctggatggaaaaattaatatcgatggaaatgctttattccgacagcctaaattgaaaaatatgcgagacgtttcccaggaagatgatcgagaaaatcgtgccagtgattgggaacttaattatattcctttggatgggacaataggttgcatggtaaatggtgctggtttggctatggctaccatggacgtgataaaattacatggtggtgagccggctaatttcctggatgttgggggaggcgccacaaaagaaagagtcagcgaagctttgaagattattgtgtcagatgaaaaagtcaaaggaattctagttaatatttttggtggaatcgttcgttgtgaccttattgctgatggaattcttgctgctgtaaaagaagtggatgtaaaaattcctgttgttgtcagactggaaggtaataatgcccagttaggtgctgagatattgaataaaagcaatttaaatgtgattgctgcaacgagtttgacagacgcagccaagaaaattgtagcagcagtttccgaataa

SEQ ID NO: 93800 - protein, 387 aa, Legionella pneumophila
MNLHEYQAKQLFASYGLPVPRGEVAYNVEDALLVASQLSTSRWVVKAQVHAGGRGKAGGVKLVSSKDELAAVAKSMLGTRLVTYQTDARGQPVNAILVEETCEIDKELYLGAVVDRATRRVVIMASTEGGVEIEKVAHETPEKIFKVVVDPLVGVMPFQCRETAFKLGLKDDQIKQFTHLMMGLGKMFVDCDLSLLEINPLVITKSGQLICLDGKINIDGNALFRQPKLKNMRDVSQEDDRENRASDWELNYIPLDGTIGCMVNGAGLAMATMDVIKLHGGEPANFLDVGGGATKERVSEALKIIVSDEKVKGILVNIFGGIVRCDLIADGILAAVKEVDVKIPVVVRLEGNNAQLGAEILNKSNLNVIAATSLTDAAKKIVAAVSE

SEQ ID NO: 93801 - DNA, 1509 bp, Drosophila melanogaster
  CDS (1)..(1509)
atggcttcattcttggcacgaactggcggccccctgatcgaaaccgttaggccagcggccataaaaaagattcttggcctggctcccatcgccgtccagcagctgaggaacctcaatgtccaggaacacgtttcctacagtctgctcaatgaggccaagatcccaacacctcgtttcgctgttgccaagaacggcaaggaggccaacgatatcgccaccaagctgaagaccgataacctggtgctgaaggctcaggttttggccggaggacgaggcaaaggaacctttaagaatggcctgaagggaggtgtgcgagtggtctacgatccccagaccgctgaagaactttcaagcaaaatgatcgatcagcttctggtcaccaagcaaaccggagcagccggtcgcatctgcaaaaaggtgatggttgccgaaaggaagttcccccgccgtgagttctacttcgccgtgatgatggagcgtgcctttaacggtcccgtgctgatcgcctccaaggagggtggtgttgatattgaggaggtggctgccagcagtccagatgccattttgtacgaacccatcgatataggcactggcttgaccagtgaacaggccgaaaagatcgtcaagaaggttggtctgggcggcgatggcgaggacacacatgtccagatgctgttgaatctgtatgacctgttcgtcaagaaggatgccctcttggttgagatcaacccctatgccgaggatgccatgtccggcttcttcgcattggatgctaagctgcgatttgatgacaacgccgagtttcgtcagaaggagctgtttgcgctgcgcgattggacccaggaggatcccaaggaagtcgaggctgccaaatacaatctgaactacattgccctggatggcactatcggctgcatggtgaacggcgccggtctggccatggccaccatggatatcattaagttgtatggcggtgaaccggccaatttcctggatgtcggtggtggtgccactgccgaggcggtcaaggccgccttcaagatcatcacttccgatccgaaggtgctttgcattctggtcaacatcttcggtggtattatgcgttgtgatgtcattgccgagggtatcatctccgccaccaaggatctgaatctgaacatgcccgtggttgtgcgtcttcagggaaccaaagtcaaggaggcccgcgaactgattcgtacatctggactgaagattctggcccgcgatgatctagataaggctgccgatctcgccgtgcacttggcgcaaatcgtcaaactggcccgcgaaatgaagatggacgtgaacttcgagattcccgatgcccaaaagggcaagggcgattgcaagaaagatcaaaaacagcccgacagtaaaggtggcaagaagtcggagaagaaagatgacaagaaatctgattgcacaaaaaaagaggaaaagaaaaaggaagaaaagaaagacatttgcgaaaagaaaggtaaaaagtaa

SEQ ID NO: 93802 - protein, 502 aa, Drosophila melanogaster
MASFLARTGGPLIETVRPAAIKKILGLAPIAVQQLRNLNVQEHVSYSLLNEAKIPTPRFAVAKNGKEANDIATKLKTDNLVLKAQVLAGGRGKGTFKNGLKGGVRVVYDPQTAEELSSKMIDQLLVTKQTGAAGRICKKVMVAERKFPRREFYFAVMMERAFNGPVLIASKEGGVDIEEVAASSPDAILYEPIDIGTGLTSEQAEKIVKKVGLGGDGEDTHVQMLLNLYDLFVKKDALLVEINPYAEDAMSGFFALDAKLRFDDNAEFRQKELFALRDWTQEDPKEVEAAKYNLNYIALDGTIGCMVNGAGLAMATMDIIKLYGGEPANFLDVGGGATAEAVKAAFKIITSDPKVLCILVNIFGGIMRCDVIAEGIISATKDLNLNMPVVVRLQGTKVKEARELIRTSGLKILARDDLDKAADLAVHLAQIVKLAREMKMDVNFEIPDAQKGKGDCKKDQKQPDSKGGKKSEKKDDKKSDCTKKEEKKKEEKKDICEKKGKK

SEQ ID NO: 93803 - DNA, 1251 bp, Drosophila melanogaster
  CDS (1)..(1251)
atgtcgttcctactgaaagcagttaccacagcccgtcacatcgttcataaggttcccgtgcgcaacctgaatctgctggagttccagagcaaggatctcctccagaagtatggagtggccatacagcaattcaaggtcttgaataactccaaggcagatgccgaggtcgtcaagacttttgagtgcccggaatacgtggtgaaggcgcagattctcgccggtgggcgtggcaagggaactttcgacaacggattcaaaggcggcgtccatatcaccaccaacaagagcgaggtgctttcgcttacccagcagatgattggaaaccgactgataacgaaacaaacgcccaaatcgggaattttggtcaacaaggtcatggtggcacgcagtatcaacatcacccgcgagacctatctctgcatcttgctggaccgcgagcacaatggacccgtgctgattgcctcacctgccggtggcatggatatcgaggcggtggccgaggaaacccctgagaaaattaagactgttccgctagacattggcaagcccataccggagtcgacgctcttggaggtggccaagttcttggagttcaagggagactctgtaaagcgttgtgctgaggaaattcaaaaactctatactctcttcaaagctgtggatgccgtacagatcgagatcaacccgctggcggagacggataagggagaagttatctccgttgatgctaagctcaactttgacgacaatgcccagttccgtcagaaggatattttctccatggacgtcaccgaggaggaatccgatccccgagaagtggaggcggccaagtacaatctgaactacgtcgccatggatggcaacattggctgcttggttaatggtgccggcctggccatggccaccatggacatcatcaagctgaatggaggcgagcccgccaactttttggacgtcggcggtggcgtcagggaggatcaggtggccaaagccttcgagatcctcactgctgacccgaaagtcaagggaatcctggtcaatgtctttggcggcattgtcaattgtgccaccattgccaatggcattgtggctgcatccaaaaagctgcaactgaatgttccactggttgtgcgactggagggcaccaatgtaaatcaggctcgcgagatcctgaagaattcgggcctgcccattcagacagccagtgacttggatgatgccgcccacaaggctgtggcagcccttaattag

SEQ ID NO: 93804 - protein, 416 aa, Drosophila melanogaster
MSFLLKAVTTARHIVHKVPVRNLNLLEFQSKDLLQKYGVAIQQFKVLNNSKADAEVVKTFECPEYVVKAQILAGGRGKGTFDNGFKGGVHITTNKSEVLSLTQQMIGNRLITKQTPKSGILVNKVMVARSINITRETYLCILLDREHNGPVLIASPAGGMDIEAVAEETPEKIKTVPLDIGKPIPESTLLEVAKFLEFKGDSVKRCAEEIQKLYTLFKAVDAVQIEINPLAETDKGEVISVDAKLNFDDNAQFRQKDIFSMDVTEEESDPREVEAAKYNLNYVAMDGNIGCLVNGAGLAMATMDIIKLNGGEPANFLDVGGGVREDQVAKAFEILTADPKVKGILVNVFGGIVNCATIANGIVAASKKLQLNVPLVVRLEGTNVNQAREILKNSGLPIQTASDLDDAAHKAVAALN

SEQ ID NO: 93805 - DNA, 1167 bp, Pseudomonas putida KT2440
  CDS (1)..(1167): transl_table=11
atgaatcttcacgagtatcagggtaagcagctgttcgctgagtacggcctgccagtttccaagggtttcgcagtcgacacccctgagcaagctgcagaagcctgcgacaagatcggcgggaacgagtgggttgtaaaagcccaggttcacgcgggtggtcgcggtaaagcgggcggcgtaaagctggttcgcagcaaggaagacgccaaggcgttcgctgcacagtggttgggcaagaatctggttacctaccagaccgatgccaacggtcaacccgtctccaagattctggtcgaatcctgcactgacatcgccaaagagctgtacctgggcgctgtagtcgatcgttcgagccgccgtatcgtgttcatggcttccaccgaaggtggcgtggacatcgagaaagtcgctcacgaaacgcctgagaaaatcctcaaggccaccatcgacccactggtcggcgctcagccgttccagggtcgcgagctggctttccagctgggcctggaaggcaagcaagttcaacagttcgccaagatcttcgttggcctggccaagctgttcaaggatcatgacctggcgctgctggaagtgaacccgctggtgatcaaggccgatggcgacctgcactgcctcgatgccaagatcaacatcgacgccaacgccatgtaccgtcagccgaagctgaaaaccttccacgacccgtcgcaggacgacgcccgtgaagcccacgctgccaagttcgaactgaactacgttgcccttgaaggcaacatcggctgcatggtcaacggtgccggcctggccatgggtaccatggacatcgtcaacctgcacggcggcaagccggccaacttcctcgacgttggcggtggtgctaccaaagagcgcgttaccgaagcgttcaagatcattctgtccgacagcaatgtcgcggccgttctggtcaacatcttcggcggcatcgttcgctgcgacatgattgccgaaggcatcatcggtgcagtgaaagaagttggcgttaaagttccggtcgtcgttcgcctcgaaggcaacaacgccgaactgggcgctaaagtactggcagaaagcggtttgaacatcattgcggcaaccagcctgaccgacgctgctcaacaagttgtcaaagctgcggagggcaagtaa

SEQ ID NO: 93806 - protein, 388 aa, Pseudomonas putida KT2440
MNLHEYQGKQLFAEYGLPVSKGFAVDTPEQAAEACDKIGGNEWVVKAQVHAGGRGKAGGVKLVRSKEDAKAFAAQWLGKNLVTYQTDANGQPVSKILVESCTDIAKELYLGAVVDRSSRRIVFMASTEGGVDIEKVAHETPEKILKATIDPLVGAQPFQGRELAFQLGLEGKQVQQFAKIFVGLAKLFKDHDLALLEVNPLVIKADGDLHCLDAKINIDANAMYRQPKLKTFHDPSQDDAREAHAAKFELNYVALEGNIGCMVNGAGLAMGTMDIVNLHGGKPANFLDVGGGATKERVTEAFKIILSDSNVAAVLVNIFGGIVRCDMIAEGIIGAVKEVGVKVPVVVRLEGNNAELGAKVLAESGLNIIAATSLTDAAQQVVKAAEGK

SEQ ID NO: 93807 - DNA, 1170 bp, Escherichia coli CFT073
  CDS (1)..(1170): transl_table=11
atgaatttacatgagtatcaggccaaatcgttactggctggcatggggatgccgtgtccaaaagagatagccatccaacagatttcgcaactggcagatgcctggcaacatattgcttgcccgagtaaaggcgcggtacttaaagcgcaggtacatgctggtgggcgcggtaaagctggcggcgtaaaagtgcttaagcagctgccggaagcacaggcttttgtacagcaaatgttgggatcgcaactggtgacttatcagaccgggccagaagggcagtatgtcagcagtattttgctgtgcgaaaacatctatccggtacgccaggaactctattttggcatggtggtggatcgtgaaagccagcgggtcacgtttattgtcagcccggaaggtggcgtggaaattgaaaaagtcgcccatgagacaccggagaaaatcagcagtgtcagcattgatccactgacaggcgtgcagccttgccatatccgcgaaatgtttgctgttctgcaactggaacacgggctatttgctgcctttagtcgcctggttaatcaggcgtggaaagcctttaacgaactggatttcgccctgctggaaattaaccctctggtgttgcgggaaacgggcgaatttatgtgtgcagacgcgaaagtatcgctggatgataacgcgctgtatcgtcacccggaactccaggtgctacgtgatgaaacccaggaagatccacgcgaaagccaggcagcgaagcttgatcttaattatgtctcgctggacggaaatatcggctgcatggtcaatggtgcagggctggctatggcaaccatggacatcatcaagctatacggtgaacaacccgcaaacttcctggatgttggcggtggcgcaacccaggagcgcgtcagtgaagcctttcggctgattgtttccgacagcaaagtgaaagccattctggttaatatttttggtgggattgtccgttgcgacatgatcgccagagccattattcatgctctgaatgaggcccgtatcaccctgcctgtcgtggtgcgtctctccggtaataacgctgccgaagggcagcggttactggcagaaagtggcctgacggtggaagccgtcaattctctggatgatgccgctaaacgcatcattgcgttactgaattaa

SEQ ID NO: 93808 - protein, 389 aa, Escherichia coli CFT073
MNLHEYQAKSLLAGMGMPCPKEIAIQQISQLADAWQHIACPSKGAVLKAQVHAGGRGKAGGVKVLKQLPEAQAFVQQMLGSQLVTYQTGPEGQYVSSILLCENIYPVRQELYFGMVVDRESQRVTFIVSPEGGVEIEKVAHETPEKISSVSIDPLTGVQPCHIREMFAVLQLEHGLFAAFSRLVNQAWKAFNELDFALLEINPLVLRETGEFMCADAKVSLDDNALYRHPELQVLRDETQEDPRESQAAKLDLNYVSLDGNIGCMVNGAGLAMATMDIIKLYGEQPANFLDVGGGATQERVSEAFRLIVSDSKVKAILVNIFGGIVRCDMIARAIIHALNEARITLPVVVRLSGNNAAEGQRLLAESGLTVEAVNSLDDAAKRIIALLN

SEQ ID NO: 93809 - DNA, 1167 bp, Pseudomonas syringae pv. tomato str. DC3000
  CDS (1)..(1167): transl_table=11
atgaatcttcacgagtatcagggtaagcagctgttcgctgagtacggcctgccagtatccaaaggttacgcggtagacaccccggaagcagcagcagaagcctgcgacaagatcggcgggaccgagtgggtcgtcaaagcccaggttcacgcaggtggtcgcggtaaagcgggcggcgtaaagctggttcgtagcaaggaagacgctgcagcgttcgcccaacagtggttgggcaagcgcctggtgacttaccagactgacgccaacggtcagccagtgaccaagatcctggtcgagtcctgcaccgacatcgccaaagagctgtatctgggcgctgtggtcgatcgttccagccgtcgtatcgtgttcatggcttccaccgaaggtggtgtggacatcgagaagattgctcacgacactcctgaaaagattcttaaggccacgatcgatccactggttggcgctcagccattccagggtcgcgatctggctttccagctgggtctggaaggcaagcaggtcactcagttcgccaagatcttcaccggtctggccaaactgttccaggaccatgacctggctctgctggaagtgaacccgttggtgatcaaggccgacggcgatctgcactgcctggacgcgaagatcaacatcgacgccaacgccatgtaccgtcagcctaagctgaagggcttccacgatccttcgcaggacgatcctcgcgaagctcacgctgccaagttcgaactgaactacgttgcgctggaaggcaacatcggctgcatggtcaatggtgctggcctggccatgggaaccatggacatcgtcaacctgcatggcggcaagcctgcaaacttccttgacgttggcggcggtgccaccaaggaacgcgttaccgaagcgttcaagatcattctgtccgacaccaatgtcgccgcagtactggtcaacatcttcggcggcatcgttcgttgcgacatgattgccgaaggcatcatcggtgcagtgaaagaagtcggcgtgaaaatcccggttgttgtgcgccttgaaggcaacaacgctgaactgggcgctaaagtactggcagaaagcggtttgaacatcatcgctgcgaccagcctgaccgacgctgctcaacaagttgtcaaagccgcggagggcaagtaa

SEQ ID NO: 93810 - protein, 388 aa, Pseudomonas syringae pv. tomato str. DC3000
MNLHEYQGKQLFAEYGLPVSKGYAVDTPEAAAEACDKIGGTEWVVKAQVHAGGRGKAGGVKLVRSKEDAAAFAQQWLGKRLVTYQTDANGQPVTKILVESCTDIAKELYLGAVVDRSSRRIVFMASTEGGVDIEKIAHDTPEKILKATIDPLVGAQPFQGRDLAFQLGLEGKQVTQFAKIFTGLAKLFQDHDLALLEVNPLVIKADGDLHCLDAKINIDANAMYRQPKLKGFHDPSQDDPREAHAAKFELNYVALEGNIGCMVNGAGLAMGTMDIVNLHGGKPANFLDVGGGATKERVTEAFKIILSDTNVAAVLVNIFGGIVRCDMIAEGIIGAVKEVGVKIPVVVRLEGNNAELGAKVLAESGLNIIAATSLTDAAQQVVKAAEGK

SEQ ID NO: 93811 - DNA, 1131 bp, Streptomyces avermitilis MA-4680
  CDS (1)..(1131): transl_table=11
atggacctgtacgaacaccaggcaagggaactcttcgcggaccacggcatcttggtgccgagggccgaggtcaccgactcgtcccaggaggcgcgcgtcatcgcccgcaggctcggcggccgcgtcgtagtgaaggcgcaggtcaagaccggtggccgcggcaaggcgggtggtgtgaagctcgccgcggaccccgccgccgccgaactcacggcgcgccagatcctcggcatggacatcaagggacacacggtcggcaaggtgatgctggccgaacccgtcgacatcgaggcagagttctacgtctcctacgtactcgaccgcgcggccggccgcttcctcgccatcgcctccgcggaaggcggcatggagatcgaggaggtggccgccacccgcccggaagccgtggcgcgtgtccccgtcgacccggccgagggtgtcacctccgcgaaggcggccgagatcgcggaagcggccgggcttcccccggcgaccgtcgacgtactcgtccggctctgggaggtactgctccgcgaggacgccgtactggtcgaggtgaacccgctcgtgcgtacggcgcaggggcagatcctcgccctcgacggcaaggtcacgctcgacgacaacgcccgcttccggcagacgcgttggggcgccgaagccgcggagcacggcgatcagctggaggcggcggcagcggccaaggggctcaactacgtgaagctggacggcgaggtcggcatcatcggcaacggagcgggcctcgtcatgtcgacgctcgacgtggtcgcgggctgcggggcccgccccgccaacttcctcgacatcggcggcggcgcctccgcccagatcatggccgacggcctgtccgtcatcctctccgacccggccgtgaagtccgtcttcgtcaacgtcttcggcgggatcaccgcctgcgacgcggtcgccgacgggatcgtgcaggccctggacaccgtccggttgaccaagccgctcgtggtccgcctggacgggaacaacgcggcacgggggcgggcgatcctcgacggccgccggcaccccctggtccagcaggtcaccaccatggacggcgccgcgcgccgcgccgcccaactcgccgacgccggctga

SEQ ID NO: 93812 - protein, 376 aa, Streptomyces avermitilis MA-4680
MDLYEHQARELFADHGILVPRAEVTDSSQEARVIARRLGGRVVVKAQVKTGGRGKAGGVKLAADPAAAELTARQILGMDIKGHTVGKVMLAEPVDIEAEFYVSYVLDRAAGRFLAIASAEGGMEIEEVAATRPEAVARVPVDPAEGVTSAKAAEIAEAAGLPPATVDVLVRLWEVLLREDAVLVEVNPLVRTAQGQILALDGKVTLDDNARFRQTRWGAEAAEHGDQLEAAAAAKGLNYVKLDGEVGIIGNGAGLVMSTLDVVAGCGARPANFLDIGGGASAQIMADGLSVILSDPAVKSVFVNVFGGITACDAVADGIVQALDTVRLTKPLVVRLDGNNAARGRAILDGRRHPLVQQVTTMDGAARRAAQLADAG

SEQ ID NO: 93813 - DNA, 1194 bp, Nitrosomonas europaea ATCC 19718
  CDS (1)..(1194): transl_table=11
atgaaaattcatgaataccaggctaaagcgattctcagccgttacggggtgagtgtgccagccggggttgcctgtttcagcgtggaggaagcggtattggctgccgagaagctgggtggaaataaatgggtggtcaaagcacagatttacgctggcggacgcggtaagggcggcggagtgaaactggcaaaatccattgcggaagtccggcagtttgctgaagctatgctgtttgctccgctggtaacgcaccagaccggcccgcaaggtcggatcgttcaccgactgtatatcgaacagggagtcgacatccgccatgagtattatctggcactggtggtagaccgtacttcacagtgtgtgagtttgattgcaagtgatgccggggggatggatatcgaacaggttgcagccggctcgccggaaaaaatacacaaaattcagatcgatccgctggcgggattgaatcttcgggatgccgagagaatcgtgcgtgagatcgatttgcctgaatcgtgtcagtcggctgcgataactatgctggatgcgctgtatcgggcattcgatgaaaatgatgcttcgttgctcgaaatcaatccgctgattgtcacgccggataaccgcctgattgcgctggatgccaaaatgaatttcgatgacaatgccctgtttcgtcatcctgaaatcgttgccttgcgggatctggatgaagatgatccgctcgaggcagaggcgtcgcagcatgggctttcttatattccactggatggtgatattgcctgcttggtcaacggagccggtctggcgatggccaccatggacatcattaaactctatggcggtaatccagctaattttctggatgtgggagggggagcaaccgtagagaaagtgaccgaagcattcaagctgatgctgagaaaccccggtttgcaggcaatactggtcaatatttttggcgggattatgcgttgtgatgtgattgctgaaggggtggtatcggcagcacgtgaggtgaaactgactgttccattgattgttcgactggaggggaccaacgtggagctgggaaaaaagattctggcagattcgggattaacgatcatttctgccggcaacatggctgatgctgccagaaaagcggttgatgcagctgcccgacattgtgctgaagctgcaaccggaggagtgtga

SEQ ID NO: 93814 - protein, 397 aa, Nitrosomonas europaea ATCC 19718
MKIHEYQAKAILSRYGVSVPAGVACFSVEEAVLAAEKLGGNKWVVKAQIYAGGRGKGGGVKLAKSIAEVRQFAEAMLFAPLVTHQTGPQGRIVHRLYIEQGVDIRHEYYLALVVDRTSQCVSLIASDAGGMDIEQVAAGSPEKIHKIQIDPLAGLNLRDAERIVREIDLPESCQSAAITMLDALYRAFDENDASLLEINPLIVTPDNRLIALDAKMNFDDNALFRHPEIVALRDLDEDDPLEAEASQHGLSYIPLDGDIACLVNGAGLAMATMDIIKLYGGNPANFLDVGGGATVEKVTEAFKLMLRNPGLQAILVNIFGGIMRCDVIAEGVVSAAREVKLTVPLIVRLEGTNVELGKKILADSGLTIISAGNMADAARKAVDAAARHCAEAATGGV

SEQ ID NO: 93815 - DNA, 1161 bp, Bacillus anthracis str. Ames
  CDS (1)..(1161): transl_table=11
atgaatatccatgagtaccaaggtaaggcagtccttagaagttatggggttagcgttccgaacgggaaggttgcatttacagtagaagaagctgtagaagcagcgaaagaattaggaacggatgtatgtgtagtaaaagcacaaattcacgctggtggacgcggcaaagctggcggagtaaaagttgcaaaaaatttagatgaagttcgtacatatgcagagagcattttaggaactacacttgtgacacatcaaacaggtcctgaaggtaaggaagtaaaacgcttacttatcgaagaaggttgcgatattaaaaaagaatattatgtaggtcttgttttagatcgtgcaacttctcaagttgttttaatggcgtctgaagaaggcggaacagaaattgaagaagtagcagaaaaaacaccagaaaaaatctttaaagaatatattgatccagcagtaggtttacaaggcttccaagcacgccggattgcatttaacatcaatattccaaaagagcttgtaggacaagctgtgaagtttatgatgggcttataccgtgcgtttatcgaaaaagattgttctatcgcagagattaatccacttgttacaacaggtgacggtaaagttatggcattagatgcgaaattaaactttgattctaacgctttatatcgccataaagacattttagaacttcgtgatcttgatgaagaagatgcaaaagaaatcgaagcttctaaatatgacttaaactacattcctttagatggaaatatcggttgtatggttaatggtgcaggtttagcgatggctacgatggatatcattaaacattaccatggcgatccagctaacttcttagatgttggtggcggtgcgacagctgaaaaagttacagaagcatttaaaattatcctttctgacaaaaatgtaaaaggtatcttcgttaacatttttggtggcattatgaagtgtgatgttattgcagaaggtgttattgaagcaacgaaacaagtaggtcttgaattgcctttagttgtacgtcttgaaggtacaaacgttgagttaggtaagaaaattttaaatgagtctggcttaaatattgttgcagcagaatctatgacagacggtgcacaaaaaattgtttcactagtgggctaa

SEQ ID NO: 93816 - protein, 386 aa, Bacillus anthracis str. Ames
MNIHEYQGKAVLRSYGVSVPNGKVAFTVEEAVEAAKELGTDVCVVKAQIHAGGRGKAGGVKVAKNLDEVRTYAESILGTTLVTHQTGPEGKEVKRLLIEEGCDIKKEYYVGLVLDRATSQVVLMASEEGGTEIEEVAEKTPEKIFKEYIDPAVGLQGFQARRIAFNINIPKELVGQAVKFMMGLYRAFIEKDCSIAEINPLVTTGDGKVMALDAKLNFDSNALYRHKDILELRDLDEEDAKEIEASKYDLNYIPLDGNIGCMVNGAGLAMATMDIIKHYHGDPANFLDVGGGATAEKVTEAFKIILSDKNVKGIFVNIFGGIMKCDVIAEGVIEATKQVGLELPLVVRLEGTNVELGKKILNESGLNIVAAESMTDGAQKIVSLVG

SEQ ID NO: 93817 - DNA, 1242 bp, Rhodopirellula baltica SH 1
  CDS (1)..(1242): transl_table=11
atggcgaggagacgtaccttcgcattcctttcgcttgccaactgggctgaacccccgatgaaaattcacgagtatcaaggcaaacagcttttccgaaccgccggcgtgccggttttggatgggcacatggtgacaacgcctgacgaagcggctgccgcatacgacaaactaggtggcaaaatcgcggtcgttaaagctcagattcacgctggcgggcgtggcaaaggcaacgtcattgacaacccggaccaaaagggcgtcgtcctggtcaaatcggccgaagaagccaaagcggcagccgagggattgttgggcaagaagttggtcaccattcaaaccgggcccgaagggcaaacggtttctaaagttttcgtcgaagccggatgcgacatcgctcgcgaattgtacttgggcatcgtggtggatcgtgcgggaagcaagcccgttttgatggtcagcaccgaaggcggtgtcgagatcgaaaccgtcgcggaagaaactcccgagctgattttcaaggaacacttcgatcccgccgttgggctggacggtttccaagtccgcaagctttgcaagaagctcggcatcgaaggtgctgcggccaaaagtgcctataagttcatgaccgcgatgtgccgtttcttcgtcgacttcgattgcgaaatggcggagatcaacccgctcgtgatcaccggcgacggtgaaatggtggctttggacgccaagatcatcttcgacgagaacgcgatgttccgtcacaaagacttggaagaactgcgcgaccttagtgaagaggaagagtccgagttgcgggccaagaaggctggtctcagctacgtcaagctcgatggcaacatcgcttgcttggtcaacggagccgggctggcgatgtcgacgatggacatcatcaagtatcacggtggcgaaccggccaacttcttggacgtcggtggtggagccaacgcggctcaagtcaccgaagcgttccggatcctgttgtcggatcccaactgcaagggtgtgttggtcaatatcttcggcgggatcgctcgttgcacaacgattgcgggagccttgatcacggccagcaaagaagtcgggttcaacgtgcctttggtggtgcgattggaaggaaccgaagtcgaggaaggccgcaaaatgctggccgaaagcgatgtcgacatcatcaatgcgatggatttgaccgacgcggcgaagaagatcgtcgcggcaactgcgtag

SEQ ID NO: 93818 - protein, 413 aa, Rhodopirellula baltica SH 1
MARRRTFAFLSLANWAEPPMKIHEYQGKQLFRTAGVPVLDGHMVTTPDEAAAAYDKLGGKIAVVKAQIHAGGRGKGNVIDNPDQKGVVLVKSAEEAKAAAEGLLGKKLVTIQTGPEGQTVSKVFVEAGCDIARELYLGIVVDRAGSKPVLMVSTEGGVEIETVAEETPELIFKEHFDPAVGLDGFQVRKLCKKLGIEGAAAKSAYKFMTAMCRFFVDFDCEMAEINPLVITGDGEMVALDAKIIFDENAMFRHKDLEELRDLSEEEESELRAKKAGLSYVKLDGNIACLVNGAGLAMSTMDIIKYHGGEPANFLDVGGGANAAQVTEAFRILLSDPNCKGVLVNIFGGIARCTTIAGALITASKEVGFNVPLVVRLEGTEVEEGRKMLAESDVDIINAMDLTDAAKKIVAATA

SEQ ID NO: 93819 - DNA, 1191 bp, Wigglesworthia glossinidia endosymbiont of Glossina brevipalpis
  CDS (1)..(1191): transl_table=11
atgaacttacatgaatatcaggcaaaaaaattatttaataaatatgagataccaatacctaaaggatattgtattaaagaacttgatgaaatagaaaaaacaatctcaaatctcagtactggtccatgggtaataaaatgccaaatacatgctggaggaagaggaaaatctggaggtattaaaataactaattcaaaaaaagaaatacatgaatttgctaaaaaatggttaggaaataaattaataacatatcaaacagataaaaacggtcaaaaagtaaattacttattaatagaaaaaaaaacgataattaagaaagaactatatttaagctttgttattaatagaaaaaaatcaagtataatgctaatatcctctgattcaggaggagtagatattgaaaatatttttaaaaaaaaatcaaataatatttataaagaaattttagaatcatgttatttaattcaagattttcaatcaagaaaaattgcatttaaattaggcctacaaggcaatcaaattaatcaatttgttaaaatatgtaataaattatctttgttatttttagaaaatgatctcactacattagagattaatcctatcgttattgatgataagaataatttaatttgcttagatggaaaaattattatagacgataatgctatatatagaaattattctttatatgaagaacatgataacagtcaattagataaaagagaagtatatgctgcaaatgataatttaaattatattcctttagatggaaatatagggtgtatggttaatggagccggtcttgcaatggggacaatggatcttattaaatttcatggaggcaatccagcaaattttttagatgttggaggaaatactacagtagaaaaagtagaaaaagcctttaaaataattttactagattctaatgttaaagtaatactagttaatatttttggaggaattgtaaggtgtgatttgatatcgaatggaattataaattcagttattaatttaaaaataaaaataccaattatagttagattagaaggaaataattcaattaatggaataaaagccttaaaaaaaagtaatttaaatattatagcagcaaatagtctaaatgatgcagtaaaaaaagctattaaaaattctattgggaaacataattatgtcgattttaatagataa

SEQ ID NO: 93820 - protein, 396 aa, Wigglesworthia glossinidia endosymbiont of Glossina brevipalpis
MNLHEYQAKKLFNKYEIPIPKGYCIKELDEIEKTISNLSTGPWVIKCQIHAGGRGKSGGIKITNSKKEIHEFAKKWLGNKLITYQTDKNGQKVNYLLIEKKTIIKKELYLSFVINRKKSSIMLISSDSGGVDIENIFKKKSNNIYKEILESCYLIQDFQSRKIAFKLGLQGNQINQFVKICNKLSLLFLENDLTTLEINPIVIDDKNNLICLDGKIIIDDNAIYRNYSLYEEHDNSQLDKREVYAANDNLNYIPLDGNIGCMVNGAGLAMGTMDLIKFHGGNPANFLDVGGNTTVEKVEKAFKIILLDSNVKVILVNIFGGIVRCDLISNGIINSVINLKIKIPIIVRLEGNNSINGIKALKKSNLNIIAANSLNDAVKKAIKNSIGKHNYVDFNR

SEQ ID NO: 93821 - DNA, 1173 bp, Chromobacterium violaceum ATCC 12472
  CDS (1)..(1173): transl_table=11
atgaacctgcatgaataccaagcgaaagagctgctgagccgttacggcctgccggtgcaacaaggcattctggccaagtcgccggaagaggcggctgccgcttacgacaagctgggcggcaaattcgccgtcgtgaaggcccaggtgcacgccggcggccgcggcaaggcgggcggcgtgaaggtggtgaagagccgcgaggaagccgcggaagtcgccaagaccctgatcggcaccaacctggtgacctaccagaccgacgccgccggccagccggtgaacagcgtgctggtttgcgaagacatgtacccggtgcagcgcgaactgtacctgggcgccgtggtggaccgcggcagccagcgcgtcgtgttcatggtttccaccgaaggcggcgtggaaatcgagaaggtggctgaagagaccccggaaaagatcatcaagatcgaagtggacccgctggtcggcatgcagccgttccaggcgcgcgacgccgctttcgcgctgggcctgtccggcgcgcaggtcgccgcgttcagcaagctgatgctgggctcctaccaggccttcatcgagaacgacttcgccctgttcgaagtgaacccgctggcgctgcgcgaaaacggcgagctggcttgcgtggacggcaagatcaacctggactccaacgccctgtaccgccacccggaactgctggcccagcgcgacaagagccaggagaacgagcgcgaagtgaaggcttccgagttcgacctgaactacgtggccctggaaggcaatatcggctgcatggtgaacggcgccggcctggcgatggctaccatggacatcatcaagctgaagggcggccagccggccaacttcctggacgtgggcggcggcgcgaccaaagagcgcgtgatcgaagcgttcaagctgatcctggccgacacctcggtgcaaggcgtgctgatcaacatcttcggcggcatcgtccgctgcgacatgatcgccgaagccatcatcgccgccgtgaaggaagtgaacgtgaccgtgccggtcgtggtccgtctggaaggcaacaacgccgagctgggcgccaagatcctggacgaatccggcctgaaactgacttccgcccagggtctgaacgacgctgccgagaagatcgtcgccgccgtcaaggccgtggcctga

SEQ ID NO: 93822 - protein, 390 aa, Chromobacterium violaceum ATCC 12472
MNLHEYQAKELLSRYGLPVQQGILAKSPEEAAAAYDKLGGKFAVVKAQVHAGGRGKAGGVKVVKSREEAAEVAKTLIGTNLVTYQTDAAGQPVNSVLVCEDMYPVQRELYLGAVVDRGSQRVVFMVSTEGGVEIEKVAEETPEKIIKIEVDPLVGMQPFQARDAAFALGLSGAQVAAFSKLMLGSYQAFIENDFALFEVNPLALRENGELACVDGKINLDSNALYRHPELLAQRDKSQENEREVKASEFDLNYVALEGNIGCMVNGAGLAMATMDIIKLKGGQPANFLDVGGGATKERVIEAFKLILADTSVQGVLINIFGGIVRCDMIAEAIIAAVKEVNVTVPVVVRLEGNNAELGAKILDESGLKLTSAQGLNDAAEKIVAAVKAVA

SEQ ID NO: 93823 - DNA, 1167 bp, Photorhabdus luminescens subsp. laumondii TTO1
  CDS (1)..(1167): transl_table=11
atgaatttacacgagtatcaggcaaaacagctttttgcacggtatggtttacccgctccggctggttatgcctgcacgacaccgcgtgaagcagaagaagctgcatctaaaatcggctctggcccttgggtggtgaagtgccaggttcatgctggcggtcgcggtaaagcgggcggcgtgaaagtagttaacagtaaagaagaaattcgcgctttcgcagagcagtggctaggcaaacgtttggtcacttaccaaacagatgcgcaagggcagcctgttcgtcagattttagtggaagcggcaactgatattgcgaaggagctgtatcttggtgctgtggttgatcgtggtacacgtcgtgtagtgttcatggcctctactgaaggtggtgttgaaattgaaaaagttgcggaagagaccccggaactgattcataaagcgattatcgacccgctgattggtcctatgtcttatcaggggcgtgaactggcatttaaattgggtttaaccggtaaacaagttagccagttcactaaaattttcttagggttggcaaatctattcctggagcgcgatctggctctggttgaaattaacccattggttattacgactcaaggtgatttgatttgtctggatggcaaattgggcgctgatggtaacgcactgttccgtcaggctgaattgcgtgaaatgcatgacccatctcaggaagatcctcgtgaagctcaggcggcacagtgggagctgaactatgttgcgctggatggcaatattggttgcatggtaaacggtgcgggcttggcaatggggacgatggatatcgttaaattgcatggcggggcgccagctaacttccttgatgtcggtggtggtgcaaccaaagagcgtgttacagaagcgtttaagatcatcctgtcagatgaaaacgtgaaagcggtattggttaatatctttggtggtattgttcgttgtgacctgattgctgacggtattattggtgcggtggaagaagtcggggttcacgtaccggttgttgttcgtttggaagggaacaatgctgagctgggagcgaaaaaactggctgatagtggcttgaatatcattgctgcaaccagcctgacggacgcagctaagcaagcagtagccgcagtggaggcaaaataa

SEQ ID NO: 93824 - protein, 388 aa, Photorhabdus luminescens subsp. laumondii TTO1
MNLHEYQAKQLFARYGLPAPAGYACTTPREAEEAASKIGSGPWVVKCQVHAGGRGKAGGVKVVNSKEEIRAFAEQWLGKRLVTYQTDAQGQPVRQILVEAATDIAKELYLGAVVDRGTRRVVFMASTEGGVEIEKVAEETPELIHKAIIDPLIGPMSYQGRELAFKLGLTGKQVSQFTKIFLGLANLFLERDLALVEINPLVITTQGDLICLDGKLGADGNALFRQAELREMHDPSQEDPREAQAAQWELNYVALDGNIGCMVNGAGLAMGTMDIVKLHGGAPANFLDVGGGATKERVTEAFKIILSDENVKAVLVNIFGGIVRCDLIADGIIGAVEEVGVHVPVVVRLEGNNAELGAKKLADSGLNIIAATSLTDAAKQAVAAVEAK

SEQ ID NO: 93825 - DNA, 1197 bp, Rhodopseudomonas palustris CGA009
  CDS (1)..(1197): transl_table=11
atgaatattcacgaataccaggccaaggcggtgctgcgcgagttcggtgtgccggtggggcacggcttcccgatcttcaaggcgtccgaagcggaagccgccgccaagcagctcggcggcccggtctgggtggtgaagagccagatccacgccggcggccgcggcaagggcaagttcaaggaagcttccgccggcgataagggcggcgttcgcctcgccaagtcgatcgacgaggtcaaggaattcgccaagcagatgctcggcgccacgctggtgacggtgcagaccggcgctgacggcaagcaggtcaaccgcctctacatcgaggaaggctccgacatcgacaaggagttctacctgtcgctgctggtcgatcgcgccacctcgcggatttccttcgtggtctcgaccgaaggcggcatgtcgatcgaagacgttgcccacgagacgcccgagaagatcgtgtcgttcaccgtcgatccggcgaccggcatcatgggccatcacggccgcaccgtcgccaaggcgctgaacctcaagggcgagcaggccaagcaggccgaagcgatggtggcgaagctttacaccgccttcgtcgccaaagacatggacatgctcgagatcaacccgctggtgctgaccaagcagggcgatctgaagtgcctcgacgccaagatctcgttcgacggcaacgcgctgtaccgccacaccgacatccaggccctgcgtgacgagaccgaggaagacgccaaggaaatcgaagcgtcgaaatacgacctcaactacgtcaccctcgacggcaccatcggctgcatggtcaacggcgccggcctcgcgatggcgacgatggacatcatcaagctgtacggcatgagcccggccaacttcctcgacgtcggcggcggcgccagcaaggagaaggtgaccgcggcgttcaagatcatcactgccgatccgaacgtgaagggcatcctgatcaacatcttcggcggcatcatgaagtgcgacgtgatcgccgaaggcgtggtcgcagcggtcaaggaagtcggtctcgacgtgccgctggtggttcgcctcgaaggcaccaatgtcgaagccggcaagaagatcatcaagcattccggcctcaacgtgctgcccgccgacaatctcgacgacgccgcgcagaagatcgtcgccgccgtgaagggagcctga

SEQ ID NO: 93826 - protein, 398 aa, Rhodopseudomonas palustris CGA009
MNIHEYQAKAVLREFGVPVGHGFPIFKASEAEAAAKQLGGPVWVVKSQIHAGGRGKGKFKEASAGDKGGVRLAKSIDEVKEFAKQMLGATLVTVQTGADGKQVNRLYIEEGSDIDKEFYLSLLVDRATSRISFVVSTEGGMSIEDVAHETPEKIVSFTVDPATGIMGHHGRTVAKALNLKGEQAKQAEAMVAKLYTAFVAKDMDMLEINPLVLTKQGDLKCLDAKISFDGNALYRHTDIQALRDETEEDAKEIEASKYDLNYVTLDGTIGCMVNGAGLAMATMDIIKLYGMSPANFLDVGGGASKEKVTAAFKIITADPNVKGILINIFGGIMKCDVIAEGVVAAVKEVGLDVPLVVRLEGTNVEAGKKIIKHSGLNVLPADNLDDAAQKIVAAVKGA

SEQ ID NO: 93827 - DNA, 1164 bp, Bdellovibrio bacteriovorus HD100
  CDS (1)..(1164): transl_table=11
atgaatattcatgagtatcaggctaaagaagtcttgagaaagttcggagtggctacgctgaaaggcaaacttgctcactctcctgaagaagctgttgctgcggcaaaagaaatcggcggaagcgtttgggttgtaaaagcccagatccacgctggtggtcgcggtaaaggtggcggtgttaaagttgccaagtctctggacgaggtttctgaattcaccaagaaaatgatcggcatgactttggtgactcaccaaacaggccctgaaggcaaagttgttcaaaaagtcttcatcgaacaaggctgcaacatcgcaaaagaatactatgttgcctgcttgatcgaccgtgcgacaggccgtgcggctatgatggcatcttccgaaggtggtatggacatcgaggaagttgctgaacacaatccagacgcgatcaaaaaagtcgacatcgacccaactgtgggcttgatgccgttccaggctcgcgaactggctttccaaattggtatggaaccagcgatcgtgaacaaagcggtgaaattcttcgccggtctttacaacgcattcgttgctacggactgctctatcgcggaaatcaacccattggttgtgactaaagaaggcgacgttctttgcttggatgcgaaaatgaacttcgactccaactctttgttccgtcatccagacatcgtagagatgcgcgacctgaacgaagaagaaccgtctgaaatcgaagcttccaaattcgacctggcgttcatcaagcttgatggtaacatcggctgccttgtgaacggtgcgggtctggcgatggcgactttggacatcatcaaattgcacggtgctgagcctgcaaacttcctggatgttggcggcggcgctaacaaagagaaagtgactgaagcgttcaaaatcatcctgaaagacaaaaacgtaaaagggatcctggttaacatcttcggtggtatcatgaaatgtgacatcatcgcggaaggtgtgatcgcggcgtccaaagaattgggcctgaaagttccattggttgttcgccttgaaggtacaaacgtggaattgggtaaaaagatgttgaaagaatctggtttgaacatcactccagccgacaacctgactgatgcagctaaaaagatcgttgctgcgattaaaggataa

SEQ ID NO: 93828 - protein, 387 aa, Bdellovibrio bacteriovorus HD100
MNIHEYQAKEVLRKFGVATLKGKLAHSPEEAVAAAKEIGGSVWVVKAQIHAGGRGKGGGVKVAKSLDEVSEFTKKMIGMTLVTHQTGPEGKVVQKVFIEQGCNIAKEYYVACLIDRATGRAAMMASSEGGMDIEEVAEHNPDAIKKVDIDPTVGLMPFQARELAFQIGMEPAIVNKAVKFFAGLYNAFVATDCSIAEINPLVVTKEGDVLCLDAKMNFDSNSLFRHPDIVEMRDLNEEEPSEIEASKFDLAFIKLDGNIGCLVNGAGLAMATLDIIKLHGAEPANFLDVGGGANKEKVTEAFKIILKDKNVKGILVNIFGGIMKCDIIAEGVIAASKELGLKVPLVVRLEGTNVELGKKMLKESGLNITPADNLTDAAKKIVAAIKG

SEQ ID NO: 93829 - DNA, 1113 bp, Apis mellifera
  CDS (1)..(1113)
atgttgcgatttgtaagccgaaaattacgttcaactcaagtgtttaataaaactttaaaattgagtattaaacaaacaagaaatttaaatttacttgaataccagagcaaagaacttttaagagattgtggagtttctgtacaaaattttgctattgtagatgatttaaataaagcaaattctgctttacaaaatttacatgcaaatgaatatgttataaaagctcaagtattagctggtggtcgtggaaaaggatggtttgataatggtttcaaaggaggtgtacatcttacaaaggaccgtaaagctgttatagatgttgtgaaaaatatgttgggtcatcgtctttttacaaaacagacttcagaagatggtatattagtacaaaagattatgatagcagagtctgtaaatattgcacgtgaaacatatatttgtattcttatggatagacaatataatggtcctgtattaatagcttcaccagcaggtggtatggatattgaaacagtagctgaaaaaaatccagaattaataaaaacaatacctcttgatatatattatggaattgacgatgaaatcgctaaagatgttagcatatttcttggttttatggatccaacagtacaacagaaggcaatatatgaattaaaaaatttgtggaaactatttgtagatattgatgccttacaagttgaaattaatccattggttgaaactacagataaccaagttatagcagtagatgcaaaaatatcatttgatgataatgctcaatttagacaacaagatttatttgctttagagaataatgatacaaaagatcctagagaagcagatgcattgcggtttgatttgaatttatctctagatccaaaagtaaaagttattcttgtaaatgtatttggaggtattgtaaattgtgctacaatagcaaaaggaattattgcagcatctcataatttacaacttaaaattccacttgttattagactagaaggtactaatgtaacagaagcaaagaaacttcttgcagagagtaatttatcaattataacagctaatgatttagatgaagctgcaaaaaaagcagttacttttgtgaaaacataa

SEQ ID NO: 93830 - protein, 370 aa, Apis mellifera
MLRFVSRKLRSTQVFNKTLKLSIKQTRNLNLLEYQSKELLRDCGVSVQNFAIVDDLNKANSALQNLHANEYVIKAQVLAGGRGKGWFDNGFKGGVHLTKDRKAVIDVVKNMLGHRLFTKQTSEDGILVQKIMIAESVNIARETYICILMDRQYNGPVLIASPAGGMDIETVAEKNPELIKTIPLDIYYGIDDEIAKDVSIFLGFMDPTVQQKAIYELKNLWKLFVDIDALQVEINPLVETTDNQVIAVDAKISFDDNAQFRQQDLFALENNDTKDPREADALRFDLNLSLDPKVKVILVNVFGGIVNCATIAKGIIAASHNLQLKIPLVIRLEGTNVTEAKKLLAESNLSIITANDLDEAAKKAVTFVKT

SEQ ID NO: 93831 - DNA, 1359 bp, Strongylocentrotus purpuratus
  CDS (1)..(1359)
atggcagcttccatttggaaattcggcaaacttgtcttgcctaaaacgagaggatctcctcgtcttttcaagtctttggaatcaagttcagtgctccctcagcatgaccagcataggaacctctccatccatgagtacatggggtatgatctactagaggaagcaggcgtccctatccctagggctgaggtggctaccactgcacagagggcttatgagattgccaagagcttagggtcaggagatgtggtggtcaaggcccaggtgttggccggcgggagggggaagggcgccttcaccagtggtctgaagggaggggtcaagctggccttctcaccggaagaggtcaaagatcttgcctcccagatgattgggaacaagctggtcacaaagcagaccggtgagggaggcaggatctgtaactcggttcttgtttgtgagaggatgtatgtcaggagagagtactactttgctatcacaatggaaagggcatttaatgggccagtattggtaggcagttcacagggtggtgtaaacatcgaggatgtggcagcagagaatccagaagcaatcatcaaagaacccatcgatattgaagcaggtattcagagatcacaggcggaaaagatggccaaactcatgggcttccccgacagagctgtggaacaggctgcagaaacatttatgaacctgtataataatatcttcataaagtatgatgctaccatgctcgagatcaaccccctggtcgaagacagcgaaggacaagtactgtgtatggactccaagatcaactttgatgacaatgctttgttcagacaaaagaagatccatgatctgagagactggtcccaagaagatgagagggaagtgtcagcagcggagtacaacctcaactacataggtctggatggagacattggatgtttagtaaatggagctggattagctatgtcaaccatggatatcattaagcttcatggaggtactcctgcaaacttccttgatgtcggaggcggagccactgctgaccaggtcaagcaggctttcaagctcatcacatcggatagcaaggttcaagccatcatggtgaatatctttggaggcatcatgcaatgtgacatcatagctcagggtatcatcgccgctgccaatgaactcaatctcaaagtacccattgtcgtcaggttacagggaaccatggttgacgaagctaaagcaatcattgcccatagtgatctcaggatactggcctgtgatgatttagatgaagcagcaaagatggtcgttagattatccaccattgtaggactagcaaaagatgctcatgtagatgtcaacttccagttgccgttgtga

SEQ ID NO: 93832 - protein, 452 aa, Strongylocentrotus purpuratus
MAASIWKFGKLVLPKTRGSPRLFKSLESSSVLPQHDQHRNLSIHEYMGYDLLEEAGVPIPRAEVATTAQRAYEIAKSLGSGDVVVKAQVLAGGRGKGAFTSGLKGGVKLAFSPEEVKDLASQMIGNKLVTKQTGEGGRICNSVLVCERMYVRREYYFAITMERAFNGPVLVGSSQGGVNIEDVAAENPEAIIKEPIDIEAGIQRSQAEKMAKLMGFPDRAVEQAAETFMNLYNNIFIKYDATMLEINPLVEDSEGQVLCMDSKINFDDNALFRQKKIHDLRDWSQEDEREVSAAEYNLNYIGLDGDIGCLVNGAGLAMSTMDIIKLHGGTPANFLDVGGGATADQVKQAFKLITSDSKVQAIMVNIFGGIMQCDIIAQGIIAAANELNLKVPIVVRLQGTMVDEAKAIIAHSDLRILACDDLDEAAKMVVRLSTIVGLAKDAHVDVNFQLPL

SEQ ID NO: 93833 - DNA, 1350 bp, Nasonia vitripennis
  CDS (1)..(1350)
atgctgaaaactctggcaaaattcgctgtgaaagacggtcaaattaaatcgattttagcaggtattcaatcttcgtcatgtagtaaacagcagcggcgattcctcaatgtccacgagaaccaggcgtatactttgttgaagtcgatgggaataccgacgccgaagttcggagtagccaaaacaccggaggaagctgcggaaatcgccagggaactcgattccaaggatctggtgctgaaggctcaggttctcgccggaggcagagggaagggaaaattcagcggtagcaatgtcagcggcgttgttatgtgtgaaacgcctgaagaagcgaaggaactggcttcaaaaatgctgggaaagtacctcgtgacgaagcagaccggtgaggtcggtcgtatctgcaacgaggtgatgatcaccacaaggatgttcacgcggaaagagctttatctatcggtcatgatggagcgcagcttcgacggaccagtaatcatagcctcgagcgaaggcggcgtcaacatcgaggacatcgcggcaactaacccagaggcaatctcatacacaccagttgacataagaaaaggtctgacgtgtgagcaagcggatgcgatcgcctgtagattcggtgtaggtgatcctcgggtcctttccgagattgtgtgtaatctgtacgaactgtttatcgaaaaggatgccttattgttggagatcaatccgctcgtacaggatatctgcggacagtatttcgccctggactgcaaatgcaacttcgacgacagcgcgagttttcgacagaaagatttgtttgcgctgcaggactggagccagaaaaatcctatggaggtcaaggctgacaaaattggactaaactacatagcgttggatggaaacattggttgtatggtcaatggagctggcttggctatggctacaatggatataattaaactctatggtggagaacccgcgaatttcttggatgtaggcgggggagcttctgtgaagactgtcacggaagctttcaaaatcatatcatcagatcccaaggtggaatcaattttcgtaaacatattcggaggcatcatacgctgcgacgtgatagccgaaggcattatcgcggcgttccaagacttaaagttgaacgtcccagtcatcgtgagacttcagggcacaaacgccgaaaaaggcaagaagctgataatggacgcaaagctgaaaataattcccatcgatgacatgtcggcggcggccgaggcttcggtatcggtagcagatatctgtcgcctggcgcggaatctcaatctcgacattgagctgactcccaagtcgacgcagaaaagcgtctgctga

SEQ ID NO: 93834 - protein, 449 aa, Nasonia vitripennis
MLKTLAKFAVKDGQIKSILAGIQSSSCSKQQRRFLNVHENQAYTLLKSMGIPTPKFGVAKTPEEAAEIARELDSKDLVLKAQVLAGGRGKGKFSGSNVSGVVMCETPEEAKELASKMLGKYLVTKQTGEVGRICNEVMITTRMFTRKELYLSVMMERSFDGPVIIASSEGGVNIEDIAATNPEAISYTPVDIRKGLTCEQADAIACRFGVGDPRVLSEIVCNLYELFIEKDALLLEINPLVQDICGQYFALDCKCNFDDSASFRQKDLFALQDWSQKNPMEVKADKIGLNYIALDGNIGCMVNGAGLAMATMDIIKLYGGEPANFLDVGGGASVKTVTEAFKIISSDPKVESIFVNIFGGIIRCDVIAEGIIAAFQDLKLNVPVIVRLQGTNAEKGKKLIMDAKLKIIPIDDMSAAAEASVSVADICRLARNLNLDIELTPKSTQKSVC

SEQ ID NO: 93835 - DNA, 1353 bp, Nasonia vitripennis
  CDS (1)..(1353)
atggccaccatgttgtcgcggacgaccgtcagccttgcggagtctctcagccgattgaacggctcgaagatcttggcctgcaccagcagcctcaacaaacagcccgtcaggaatctcaatgtccacgaacacatcagctacagcatcctcaatgaggcaggaattcctacacccaagtttggcgttgccaagacacctgatgaagctgccaagcttgctaccgacttgaacaccaaggatatcgtgctgaaagctcaggttctcgctggtggccgtggcaagggccacttcaagggcggcaatgtcagtggtgtcaagatgtgcgaaactccagaagaggcaaagcaactggcaagccagatgctgggcaagctgctggtgaccaaacagaccggtgaggccggcaggatatgcaacgctgtgatggtaacgcagaggatgttccctcgcaaggagtactatctggcagtgatgatggagcgcgcgttcggtggtccagtaatcattgcctcgagccaaggtggtgtcaatatcgaagaggtcgcggcgacaaacccacaggccatcatgtacgagcccattgacatcaacaaaggcatcaccaaggatcaggctgacaggatcgctgtcaagctgggactggagaacgtcaaggaatacatctccaagatgatcatgaacatgtacagtctgtttgtcaagaaagacgccctgctgctcgaggtcaatcctttggctgaggacatcaacggcgaatatttcgccctggattgcaaatgcaggttcgacgacaacgccgagttccgtcagaaggacctgttcgcgctgcgcgactggacgcaagaagacccgaaagaagtggaggccgccaagttcgagctgaattacatcgctttggacggtaacatcggctgcatggtcaacggtgctggcttagctatggctactatggacatcatcaagctgcacggaggcgaacccgctaacttcctcgacgtcggtggcggtgccactgcgtcggctgtgaaggaggctttcaaaatcatcacctccgactcgaaggttcatgcgcttctggtaaatatcttcggaggtatcatgaggtgcgacgttattgctgagggtattattgctgcgacgaaggagcttgacctcaaaatacccgttgttgttagactacagggaaccaacgtcgatgaggccaaagctctgatcgccaacgcgggtctgaagatcgtgccggtcgacgatctcgacgaggcagcccgtatcgcggtcaaactctccaccatcgtcaagcttgcccagtccgcgaatctgagcgtcaacttcgaaatccctcagatatcctaa

SEQ ID NO: 93836 - protein, 450 aa, Nasonia vitripennis
MATMLSRTTVSLAESLSRLNGSKILACTSSLNKQPVRNLNVHEHISYSILNEAGIPTPKFGVAKTPDEAAKLATDLNTKDIVLKAQVLAGGRGKGHFKGGNVSGVKMCETPEEAKQLASQMLGKLLVTKQTGEAGRICNAVMVTQRMFPRKEYYLAVMMERAFGGPVIIASSQGGVNIEEVAATNPQAIMYEPIDINKGITKDQADRIAVKLGLENVKEYISKMIMNMYSLFVKKDALLLEVNPLAEDINGEYFALDCKCRFDDNAEFRQKDLFALRDWTQEDPKEVEAAKFELNYIALDGNIGCMVNGAGLAMATMDIIKLHGGEPANFLDVGGGATASAVKEAFKIITSDSKVHALLVNIFGGIMRCDVIAEGIIAATKELDLKIPVVVRLQGTNVDEAKALIANAGLKIVPVDDLDEAARIAVKLSTIVKLAQSANLSVNFEIPQIS

SEQ ID NO: 93837 - DNA, 1326 bp, Nasonia vitripennis
  CDS (1)..(1326)
atgtcaagttttctcgtccgcaagtccctcgttgggtctgtaaaaaccctgaagagtctctcgcaatttggaattgttcctgtgaggaggttgaatttgctggaataccagagtaaagagttgctgcgcgactccggagtttcggtccaaaacttcgctattgttgacgatttacagaaaacacccaatgctctggagaccttgcatgccgaggagtatgtagtgaaagctcaggtcttggctggaggtcgaggaaaaggatggtttgacaatggcttcaagggtggtgttaaaatcaccaaagacaagaaagcagtggcagaatatgtgaaaagcatgctgggccatcgtttgattacaaagcaaacttccaaagatggaatcctagttcaaaaaattatgattgcagagtctgtagatatcactagagaaacatatgtttgtatactcatggacagatcacacaatggacctgttctgatagcgtcccctgctggtggcatggatattgaagctgtggcagaaaaaactccagagcagattaaaactatacctctagatatctacactggtattgatgatgagattgcaaaggaagtggcagaatttttaggtttcaaagaggaaaaactcaaacaaaaagccgtctatgaattgaaaaacttgtggaaactgtttgttgatattgatgctcttcaggttgaaattaatcctctggttgaaactaaagatggagaagttgtagctgtggatgccaaaatatcatttgatgataatgcagaattcaggcagaaagatatctttgatttggaagataccagtgaaaaagatccaagagaggtggatgcctccaagttcaacttgaactacattggaatggatggaaatattggatgcttggtaaatggagctggacttgcaatggcaactatggatattatcaaactgaatggtggaactccggccaactttttggatgtgggtggtagtgtgaaggaagatcaagtttatcaagcatttagaatacttactgaagatccgaaagtgcagtcgattcttgttaatgtttttggaggtatcgttaattgcgccacaatcgctaaaggaatagtgtccgctgcgcgtaatttgggtcttaaaattccccttgttgttagattggaaggcacaaacgtaaacgaagccaaaaagatcattgccgagtccggcctgccgattttgacggccaacgatctggacgaagctgcgaaaaaggcagttgcctcgatcaaaaaattgcaaagtgaagaagggcacaatgacctgaagctcaaaatgtcgcaatag

SEQ ID NO: 93838 - protein, 441 aa, Nasonia vitripennis
MSSFLVRKSLVGSVKTLKSLSQFGIVPVRRLNLLEYQSKELLRDSGVSVQNFAIVDDLQKTPNALETLHAEEYVVKAQVLAGGRGKGWFDNGFKGGVKITKDKKAVAEYVKSMLGHRLITKQTSKDGILVQKIMIAESVDITRETYVCILMDRSHNGPVLIASPAGGMDIEAVAEKTPEQIKTIPLDIYTGIDDEIAKEVAEFLGFKEEKLKQKAVYELKNLWKLFVDIDALQVEINPLVETKDGEVVAVDAKISFDDNAEFRQKDIFDLEDTSEKDPREVDASKFNLNYIGMDGNIGCLVNGAGLAMATMDIIKLNGGTPANFLDVGGSVKEDQVYQAFRILTEDPKVQSILVNVFGGIVNCATIAKGIVSAARNLGLKIPLVVRLEGTNVNEAKKIIAESGLPILTANDLDEAAKKAVASIKKLQSEEGHNDLKLKMSQ

SEQ ID NO: 93839 - DNA, 1341 bp, Magnaporthe grisea 70-15
  CDS (1)..(1341)
atgttcaacgtcgcgcgcaatcgggtgctggcctcggccatcaagacttctcccagacttccaggcctcgccaggccagctttcgcccagcaacaaaagcgtgctctgagcatccacgagtacctgtcggccgaactcctcagcaaatatggcgttcaagttcccgctggtagggtcgccaggagcggcgaggaggccgagcaggtcgcaaaggagatcggccacgacgacatggtcatcaaggcgcaggttctcgccggtggccgtggtaagggtactttcgacaacggcctgaagggtggtgtccgcgttatctactcccctaccgaggcccgcatgttcgccgaccagatgattggccacaagcttatcaccaagcagaccggcgcccagggccgtccctgcaacgccgtctacatctgcgaacgcaagtttgcccgtcgtgaattctacctcgccatcctcatggaccgtggctcgcagagccccgtcatcgtttcctcgtcgcagggcggtatggacattgagggtgtcgccaaggagaacccggatgccatcgtcaccactcacatcgacatcaacactggagtcactgatgagactgctcgcgacattgctcagaagctgggattcagcgagcagtgcattgaggacgccaaggacaccatccagaagctgtacaagatcttcatcgagaaggacatgacccagattgagatcaaccctctgtcggagacctcggaccacaaggtcatgtgcatggatgccaagttcggtttcgacgacaatgccgagttccgtcagaaggagatcttcgagaagcgcgacaccacccaggaggacgccgaggaggtccgtgccgccgagtctggcctcaacttcatcaagctggatggtgacattggctgcttggtcaacggtgccggtcttgccatggccaccatggacatcatcaagctgaacggcggctcgcccgctaacttcctcgacgtcggtggcggtgccactcccgctgccatcaaggaggcctttgagctcatcacgagcgaccagaaggtctctgccgtctttgtcaacatcttcggtggtatcgtccgttgcgaccacattgccaacggtctgatcaacaccgtcaagaccctgaacctcaaggttcccatcattgcccgtctccagggcaccaacgtcgagcaggcacaccagatcatcaacgactcgggcatgaagatcttctcgatcgacgacctgcaaagcgcagctgagaaggctgtgcagctgtcaaaggttgtcaagatggctcgtgacatcgatgtcggcgttgagttcagcctgggtatctaa

SEQ ID NO: 93840 - protein, 446 aa, Magnaporthe grisea 70-15
MFNVARNRVLASAIKTSPRLPGLARPAFAQQQKRALSIHEYLSAELLSKYGVQVPAGRVARSGEEAEQVAKEIGHDDMVIKAQVLAGGRGKGTFDNGLKGGVRVIYSPTEARMFADQMIGHKLITKQTGAQGRPCNAVYICERKFARREFYLAILMDRGSQSPVIVSSSQGGMDIEGVAKENPDAIVTTHIDINTGVTDETARDIAQKLGFSEQCIEDAKDTIQKLYKIFIEKDMTQIEINPLSETSDHKVMCMDAKFGFDDNAEFRQKEIFEKRDTTQEDAEEVRAAESGLNFIKLDGDIGCLVNGAGLAMATMDIIKLNGGSPANFLDVGGGATPAAIKEAFELITSDQKVSAVFVNIFGGIVRCDHIANGLINTVKTLNLKVPIIARLQGTNVEQAHQIINDSGMKIFSIDDLQSAAEKAVQLSKVVKMARDIDVGVEFSLGI

SEQ ID NO: 93841 - DNA, 1338 bp, Gibberella zeae PH-1
  CDS (1)..(1338)
atgttcaagctcggccgtagtcgcgctgtggcttcggccctcaacgcctcaaagttcgttgcccctgccgctcgattccctggcgttcaacaacgacgagctctcagcattcacgagtacctctctgccgacctcctccgacagtacggtattggtgttccccagggttccgtcgcaaagtccgccaaggaggccaaggagatcgctgagaagattggcaacgatgatatggttatcaaggctcaggtccttgccggtggccgaggaaagggtaccttcgacaacggtcttaagggtggtgtccgtgtcatctactctccccacgaggctgagatgttcgccgagcagatgatcggccacaagcttgttaccaagcagacgggtgctggcggccgtctctgcaactctgtctacatctgcgagcgcaagtttgctcgtcgtgagttctacctcgccatccttatggaccgtcagaaccagtgccccgtcattgtctcttcttcccagggtggtatggacattgaggccgttgccaaggacacccccgacgccatcaacaccaactacatcgacatcaatgtcggtgtcactgacgagactgcccgcgagatcgccaccaagctcggcttcagcgagcagtgcatcgaggacgccaaggacaccatccagaagctctacaagatcttccgcgagaaggactccacccagattgagatcaaccccctgtctgagacctctgaccatcaggtcctctgcatggacgccaagttcggctttgacgacaacgccgacttccgacagaaggaggtctttgagtggcgcgacaccactcaggaggaccccgatgaggtccgcgctgccgagtccaacctcaacttcatcaagcttgacggtgatatcggctgcctcgtcaacggtgctggtcttgccatggccaccatggacatcatcaagctgaacggtggccagcccgccaacttcctcgacgttggtggtggtgccacccctgccgccatcaaggaggctttcgagctcatcaccagcgaccccaaggtcactgccatctttgtcaacatctttggtggtatcgttcgatgtgatgccatcgccactggtcttatcaagaccgtcgagagtttgaacctcaagatccccatcattgcccgtctccagggtaccaacgtcgagaaggctcaccagctcatcaacgactctggtcttaagatcttctccattgatgacctacaaaccgctgctgagaagtctgtccagctctccaaggtcgtcaagatggcccgtgacatcgatgtcggtgtcgagttcaccctcggaatctaa

SEQ ID NO: 93842 - protein, 445 aa, Gibberella zeae PH-1
MFKLGRSRAVASALNASKFVAPAARFPGVQQRRALSIHEYLSADLLRQYGIGVPQGSVAKSAKEAKEIAEKIGNDDMVIKAQVLAGGRGKGTFDNGLKGGVRVIYSPHEAEMFAEQMIGHKLVTKQTGAGGRLCNSVYICERKFARREFYLAILMDRQNQCPVIVSSSQGGMDIEAVAKDTPDAINTNYIDINVGVTDETAREIATKLGFSEQCIEDAKDTIQKLYKIFREKDSTQIEINPLSETSDHQVLCMDAKFGFDDNADFRQKEVFEWRDTTQEDPDEVRAAESNLNFIKLDGDIGCLVNGAGLAMATMDIIKLNGGQPANFLDVGGGATPAAIKEAFELITSDPKVTAIFVNIFGGIVRCDAIATGLIKTVESLNLKIPIIARLQGTNVEKAHQLINDSGLKIFSIDDLQTAAEKSVQLSKVVKMARDIDVGVEFTLGI

SEQ ID NO: 93843 - DNA, 1260 bp, Candida glabrata CBS 138
  CDS (1)..(1260)
atgtttagaggaactgtattgaacaagaacctggctcaattggctcgtgtccagggtaagagacacttatctatccatgaatataggtctgctgaattactgaggaagtatggtgttggtacccctcgtggtttaccggccatgactcctgaagaagctgccaaggctgcagaacagctcgggaccgacaagctggtcatcaaggctcaggctttgactggtggtagaggtaaaggccatttcgacaccggcttcaagagcggtgttcatatgatctcatctcctcaggaggcctccaaattggccaaggaaatgctacagcacaaattgattactaaacaaactggtgagaagggtaagctagtgtctgccgtttacatcgctgaaagagtcgagacaaagcatgaagcttatctctctattctgatggacagagcaactggtaagccaatgataatatgctccagtgaaggtggtatgaacattgaagaagttgcagaaaagaacccagatgccattaagaagttttcaatcaccgtttccgagggtctaaaaccggaaacagctcgtgaaattgctgagtctttgggtttcagtgccgatgctatcgacgatgcccaggatgctgtcagcaaactgtataagatcttcagtgaaaccgatgccacacaagtagaaattaacccattgagtgagattgctaacaacaaagaccacaaagttatgtgtacagatgccaagtttggatttgatgacaatgctttcttcaagcaagaagagattttctcctggagagacttgactcaggaagacccagatgaagtaagtgccaagaaatacgaattgaattttgttaaactattcggaaacatcggatgtttggtcaatggtgctggtctagccatggctactatggatgttattaagttgaatggtggtgagccagccaacttcttggactgtggtggtggtgccactccagaaaccatcaaagaaggcttcagattgatcatgtctaatgataaagtagatgccatttttgtaaatatcttcggaggcattgttagatgtgatttcgttgccttaggtctagtggaagctgcaaaagaattggggttgagaattccaattgtggctagattacaaggtaccaatttagatgaaggtcgtcaaatcatcaaggactctggtttgaagatctactcattcgatgaattggaccctgctgctaagaaggtagttgaactagcccaccattaa

SEQ ID NO: 93844 - protein, 419 aa, Candida glabrata CBS 138
MFRGTVLNKNLAQLARVQGKRHLSIHEYRSAELLRKYGVGTPRGLPAMTPEEAAKAAEQLGTDKLVIKAQALTGGRGKGHFDTGFKSGVHMISSPQEASKLAKEMLQHKLITKQTGEKGKLVSAVYIAERVETKHEAYLSILMDRATGKPMIICSSEGGMNIEEVAEKNPDAIKKFSITVSEGLKPETAREIAESLGFSADAIDDAQDAVSKLYKIFSETDATQVEINPLSEIANNKDHKVMCTDAKFGFDDNAFFKQEEIFSWRDLTQEDPDEVSAKKYELNFVKLFGNIGCLVNGAGLAMATMDVIKLNGGEPANFLDCGGGATPETIKEGFRLIMSNDKVDAIFVNIFGGIVRCDFVALGLVEAAKELGLRIPIVARLQGTNLDEGRQIIKDSGLKIYSFDELDPAAKKVVELAHH

SEQ ID NO: 93845 - DNA, 1269 bp, Kluyveromyces lactis NRRL Y-1140
  CDS (1)..(1269)
atgttgtcgcaagcttacaaattaagaagctgtttgcacaagtcttcttctgttgttcgtcaacaagttagaaacttgtccatccacgaataccgttcggctgaactgttgagacaatacggcgttggtactccaaaaggtgcagctgctcataccgtcgatgaggctaccaagattgccaaggaattgggtggtaagaacttggtcgtcaaggctcaagctttgaccggtggtagaggtaaaggtcatttcgataacggtatgcaatctggtatccatatgatcgattctgtgcaagatgctactgaagtcagtggtaagatgcttggttaccatttgatcaccaagcaatctggtattaagggtaagttagtgtccggtgtttacattgtcgaaagagtgaatgccaaacacgaagcttatttgtctatcttgatggacagaaagactaagaagccattgatcatttgctctagtgaaggtggtatgaatatcgaagatgtggcaaagaccaacccagatgctatcaagaagttctacgtcgaagattccgttggattgaccccagaaactgctgctgagattgctgcctccttgggtttctccaaggaagccgaagctgatgctaaggatgcagtcttgaagttatataagatcttcaaggaaaaggatgctactcaaatcgaaattaacccattgagtgaagttcttgaccaggataagaaggtcatgtgtatggatgccaagttcggtttcgatgacaatgcctccttcagacaaaaagacgtgtactcatggagagatttgactcaagaagatccagatgaagttaccgccaagaagagtgacttgaactttgtcaagttaaagggtaatatcggttgtttggtcaacggtgccggtttagccatggccaccatggatgtcattaagttatatggtggtgatccagctaacttcttggattgtggtggtggtgccactccggaaactatcgaaactgctttcaagttgatcttgtccaacgataacgtcgatgccatcttcgttaacattttcggtggtattgtcagatgtgatttcgtcgctcaaggtctagtcgctgctaccaagaacttgtctgtcaaggtcccaattgttgctcgtctacaaggtaccaacttggaacaaggtagacgaattatcgctgaatccggtttgaagatctattccttcgacgaattggacccagctgctgaaaaggttgttgagttgactaatagcaaataa

SEQ ID NO: 93846 - protein, 422 aa, Kluyveromyces lactis NRRL Y-1140
MLSQAYKLRSCLHKSSSVVRQQVRNLSIHEYRSAELLRQYGVGTPKGAAAHTVDEATKIAKELGGKNLVVKAQALTGGRGKGHFDNGMQSGIHMIDSVQDATEVSGKMLGYHLITKQSGIKGKLVSGVYIVERVNAKHEAYLSILMDRKTKKPLIICSSEGGMNIEDVAKTNPDAIKKFYVEDSVGLTPETAAEIAASLGFSKEAEADAKDAVLKLYKIFKEKDATQIEINPLSEVLDQDKKVMCMDAKFGFDDNASFRQKDVYSWRDLTQEDPDEVTAKKSDLNFVKLKGNIGCLVNGAGLAMATMDVIKLYGGDPANFLDCGGGATPETIETAFKLILSNDNVDAIFVNIFGGIVRCDFVAQGLVAATKNLSVKVPIVARLQGTNLEQGRRIIAESGLKIYSFDELDPAAEKVVELTNSK

SEQ ID NO: 93847 - DNA, 1245 bp, Debaryomyces hansenii CBS767
  CDS (1)..(1245)
atgttatccagaaatattgcccgtgcttcaaaaactgttgctaatcaaaaaagattcttatcgttacatgaattccgttcagcagctttgttgaagacctacggtgttggtgttccagatggtagtgctgctactacaccagaaaaggcgtacgaagtagccaaggcattaggtactaacgacttggttgttaaggcccaagccttgaccggtggtcgtggtaaaggtcactttgataacggattccaaggtggtgttaagttaatttcatctccagaagaagccaaagaattggccgaaaagatgttgggacacaagttgatcaccaagcaaaccggtgaagctggtaaggaagttaccgctgtgtacattgtcgaaagaagagatgccagaactgaagcttacttggctattttgatggacagaagtacccagaccccattgatcgttgcttcttctcaaggtggtatggacattgaaggtgtcgctgccaaggatccagatgccatcaagagtttcccagttccattagaagagggtgtctctgacaaattggccattgacattgcatctgtcttgggatacacccaagaagccattccagaagctgctaagaccgttcaaaacttgtacaaggttttcatggaaagagactgtactcaagttgaaatcaacccattatccgaaaccccagatcacaaggttttggctatggatgctaagttgaacttcgatgacaatgctgctttccgtcaaaaggaagttttctcatggagagatccaagtcaagaagacccagaagaagtcactgctgctgaatacggtttgaatttcatcaagttagatggtaacattgctaacattgttaacggtgccggtttagctatggccactatggatatcattaagttatacggtggtgctccagccaacttcttagattgtggtggtactgctactccagaaaccatcgaaaaggcattcgagttaatcttatctgataagaaggttaacggtattttcgtcaacatcttcggtggtatcgtcagatgtgactacgtcgctgaaggtttaattgctgctaccaagaacttcaacttagatattccagttgtcgtcagattacaaggtactaacatggctaaagctaaggaattgattgaaaactctggtttgaaattatacgctttcgaagacttagatccagctgctgaaaagattgtcgctttagctccaaaggcttag

SEQ ID NO: 93848 - protein, 414 aa, Debaryomyces hansenii CBS767
MLSRNIARASKTVANQKRFLSLHEFRSAALLKTYGVGVPDGSAATTPEKAYEVAKALGTNDLVVKAQALTGGRGKGHFDNGFQGGVKLISSPEEAKELAEKMLGHKLITKQTGEAGKEVTAVYIVERRDARTEAYLAILMDRSTQTPLIVASSQGGMDIEGVAAKDPDAIKSFPVPLEEGVSDKLAIDIASVLGYTQEAIPEAAKTVQNLYKVFMERDCTQVEINPLSETPDHKVLAMDAKLNFDDNAAFRQKEVFSWRDPSQEDPEEVTAAEYGLNFIKLDGNIANIVNGAGLAMATMDIIKLYGGAPANFLDCGGTATPETIEKAFELILSDKKVNGIFVNIFGGIVRCDYVAEGLIAATKNFNLDIPVVVRLQGTNMAKAKELIENSGLKLYAFEDLDPAAEKIVALAPKA

SEQ ID NO: 93849 - DNA, 1347 bp, Apis mellifera
  CDS (1)..(1347)
atggctactatgttgtctcggactatctcactcgttgaaaatcttacccgatttaatggatcaaagatattgggatgcaaaatcaacttagtaaaacaagtaaggaatttaaatgttcatgaacatattagttatagtttattgaatgaagctggagttccaactcctaaatttggagttgcaaaaactccagatgaagcagcaaaacttgctgctgacttaaaatctaaagatattgttttgaaagcacaagttttagctggtggcagaggaaaagggcattttaagggaactaatataagtggtgtgaaaatgtgtgaaacaccagaagaagccaaaaaattagccagtcaaatgttaggtaaattactaattactaaacaaacaggcgaagcaggtagaatatgcaatgcagtaatggtaacacaacgcatgtttcctcgtaaagaatattatcttgctgtcatgatggaaagagcttttggtggtccagtcataatagcttcaagtcaaggtggtgtaaatattgaagaagttgctgcaacaaatcccagtgctattatgtatgaacctattgatatttacaagggtattacaaaagatcaagcagaacgtattgctattaaacttggacttcaaaatgttaaagattatatttctaatatcattgtgaatttatatcaaatgtttcttaaaaaagatgctcttttgctagaagtaaatcctctggcagaagatgttaatggacagtattttgctttggactgcaaatgtagatttgatgataatgctgaatttaggcaaaaagaattattttctttgagagattggactcaagaagataccaaagaagttgaagctgctaaatatgatttaaattatattgcacttgatggcaatattggttgtatggtaaatggagctggtttagccatggctactatggacattataaaattacatggaggagaaccagctaatttcttagatgtaggtggtggtgcatctacatctgctgtgaaagaagcatttaaaataattacatctgattcacgagttcacgctcttttagtcaatatatttggtggaattatgagatgtgatgttattgcagaaggaatcattgctgcaacaaaagaacttagcttaaaaattcctgttgttgttcgattacagggtacaaatgtagatgaagcaaaagctcttatcgcgaatgcaggtttaaaaattgtaccaattgatgatttggatgaagctgctcgagtcgcagttaaattatcaacgattgtcaaattagcacaatctgaaaatcttagcgttaatttcgaaataccttcaatttcataa

SEQ ID NO: 93850 - protein, 448 aa, Apis mellifera
MATMLSRTISLVENLTRFNGSKILGCKINLVKQVRNLNVHEHISYSLLNEAGVPTPKFGVAKTPDEAAKLAADLKSKDIVLKAQVLAGGRGKGHFKGTNISGVKMCETPEEAKKLASQMLGKLLITKQTGEAGRICNAVMVTQRMFPRKEYYLAVMMERAFGGPVIIASSQGGVNIEEVAATNPSAIMYEPIDIYKGITKDQAERIAIKLGLQNVKDYISNIIVNLYQMFLKKDALLLEVNPLAEDVNGQYFALDCKCRFDDNAEFRQKELFSLRDWTQEDTKEVEAAKYDLNYIALDGNIGCMVNGAGLAMATMDIIKLHGGEPANFLDVGGGASTSAVKEAFKIITSDSRVHALLVNIFGGIMRCDVIAEGIIAATKELSLKIPVVVRLQGTNVDEAKALIANAGLKIVPIDDLDEAARVAVKLSTIVKLAQSENLSVNFEIPSIS

SEQ ID NO: 93851 - DNA, 1350 bp, Apis mellifera
  CDS (1)..(1350)
atgtttattaatgtcatcgtgccatttatatcattttatgttcgaagaatagagaaacagtttttaaatcgtgcttctgccactattcaacaaactcgaaatctacaaattcatgaaaatcttgcttatactttattgaaagatgctggaattccaacaccaccatttggagtagctaaaactccagaagaggcagaaaaaatagcagcgaatcttaatacaaaagatattgttctaaaagctcaagttcttgctggaggacgtggaataggacatttcaaggataccaatgtcaggggtgttgttatgtgcgaaagtcccaaagaagctaaaactgtggctagtagtatgataggcaaattattaataactaaacaaactggaccggctggtaaaatttgtaattcagtaatggtaacgacacgtatgtttccacgtaaagaatattatatatcagtaatgttggaaaccacttttgatggtcctgttataatcgtatctaagcaaggcggtgtaaatatcgaagatattgctgctacgagtccggaagctatatcgtatacgccaatagatattatgaaaggtttaacacttgaacaaataaataaaattgtggataatttaggtcttgaaggggaatcaaaaaaactcacctcaataattatttgcaatctctatgagttatttattgaaaaagacgctttgttacttgaaattaatccatttgcattagacatttgtgaagaatattttgctttagattgtaaatgttcttttgatgacagcgcagaatttagacagaaggaattatttaatctacaagatatatcacaaattgatcctagtgagcttcatgcaactaaatttaatttaaattatatacatttggatggaaatataggatgtttggtaaatggagctggattagcaatggctactatggatgtaataaaaatgaatggcggttttccagctaattttttagatgttggtggttctgctactaaagaagcagtaacagaaggttttaaaataatactatctgatccaaatgtagaagcaatattcgtaaatatttttggcggtattatgagatgcgacataatcgcacaaggtattattgctgcatccaaagaattacagataaaagtgccaatagttgtaagactacagggaactagagtaaaagaagcaaatcaattaataaaagatgctcaattgaaagtttttgttgaagaagatttttctacagctgctattgcagctgtaaaattggcttcagtaataaaaattgcaaattctttgaatttagaaatggatttcaaaattaaaaataaatctagcaaataa

SEQ ID NO: 93852 - protein, 449 aa, Apis mellifera
MFINVIVPFISFYVRRIEKQFLNRASATIQQTRNLQIHENLAYTLLKDAGIPTPPFGVAKTPEEAEKIAANLNTKDIVLKAQVLAGGRGIGHFKDTNVRGVVMCESPKEAKTVASSMIGKLLITKQTGPAGKICNSVMVTTRMFPRKEYYISVMLETTFDGPVIIVSKQGGVNIEDIAATSPEAISYTPIDIMKGLTLEQINKIVDNLGLEGESKKLTSIIICNLYELFIEKDALLLEINPFALDICEEYFALDCKCSFDDSAEFRQKELFNLQDISQIDPSELHATKFNLNYIHLDGNIGCLVNGAGLAMATMDVIKMNGGFPANFLDVGGSATKEAVTEGFKIILSDPNVEAIFVNIFGGIMRCDIIAQGIIAASKELQIKVPIVVRLQGTRVKEANQLIKDAQLKVFVEEDFSTAAIAAVKLASVIKIANSLNLEMDFKIKNKSSK

SEQ ID NO: 93853 - DNA, 1371 bp, Aspergillus nidulans FGSC A4
  CDS (1)..(1371)
atgttcacagttctccgcagccggccagttgcggcgctcagagctgccacgggctcatcttcgcgcattgctcagcagcaaagaaacctctccatccatgaatacctttccgccaacctgctgaaatcatatggtgtgggtgtgcccaagggtgaagtcgctcggtcggcagaggaggctgagaaggtcgccaagtcactcggtaacgatgacatggttatcaaggctcaggtccttgccggtggtcgtggcaagggtcactttgataacggcctcaagggaggtgtgcgcgtgatctactctcccaccgaggccaagatgtttgctggtcaaatgattggacacaagctcatcaccaagcagactggcgccggcggtcgtctttgcaacgccgttttcattgtcgagcgcaagttcgctcgtcgcgaattctaccttgctgtcctcatggaccgcaagactcaaggtcctgtcatcgttgcttcgtcgcagggtggtatggacatcgaggctgtcgccaaggaaaaccccgatgccattatcacgactcctattgatatcaatgtcggcgtgacggatgccatcgccaccaagattgccaatgagctcggtttctccgagcaatgcgttgatgacgccaagaagaccattcagaacctttacaaggcctttatggagaccgatgctactcagattgaaatcaaccctctgtctgagacttcagaccaccaggttttggccatggacgccaagttgggcttcgacgacaacgccgaattccgtcagaaggaaattttctcatggagggacaccacgcaggaggacgctgacgaggtcaaggccgctgagcacggcctgaactttattaaacttgatggtgacattggttgcttgggtgtgtatccccgtcccaatgatattatagcagttctaactcgtacagtcaacggtgctggtctcgccatggccaccatggatatcatcaagcttaacggtggcagccctgccaacttccttgatgtcggaggcggtgccacccctgctgccattaagtcggcgttcgagctcatcacaagcgaccccaaggtttcggctatctttgtcaacatcttcggtggtatcgtccgctgcgacgccatcgcgcagggcttgatcaacgttgttcaggagatgggcctgcgcactcctatcgtagcccggttacagggaaccaacatggagcaggctcacaagctgatcaatgaatccggcctcaagatcttctctattgaggacctccagagcgctgcggagaagtccgttcagttctccaaggttgtcaagatggcccgcgaaatcgacgtgggcgttgaatttactctcggtatctaa

SEQ ID NO: 93854 - protein, 456 aa, Aspergillus nidulans FGSC A4
MFTVLRSRPVAALRAATGSSSRIAQQQRNLSIHEYLSANLLKSYGVGVPKGEVARSAEEAEKVAKSLGNDDMVIKAQVLAGGRGKGHFDNGLKGGVRVIYSPTEAKMFAGQMIGHKLITKQTGAGGRLCNAVFIVERKFARREFYLAVLMDRKTQGPVIVASSQGGMDIEAVAKENPDAIITTPIDINVGVTDAIATKIANELGFSEQCVDDAKKTIQNLYKAFMETDATQIEINPLSETSDHQVLAMDAKLGFDDNAEFRQKEIFSWRDTTQEDADEVKAAEHGLNFIKLDGDIGCLGVYPRPNDIIAVLTRTVNGAGLAMATMDIIKLNGGSPANFLDVGGGATPAAIKSAFELITSDPKVSAIFVNIFGGIVRCDAIAQGLINVVQEMGLRTPIVARLQGTNMEQAHKLINESGLKIFSIEDLQSAAEKSVQFSKVVKMAREIDVGVEFTLGI

SEQ ID NO: 93855 - DNA, 1383 bp, Ustilago maydis 521
  CDS (1)..(1383)
atgaccggcgtcatcacattctgtttctccttctgctctgctctcctcaaacccacatccttgccacctctttcctttgcaccgcttcgcttttatcacatcatgctgttcaacgcgctccgcacacgcgcctcgatggccaggaccatggtccgcggtggtcaggctgccgctcagaagcgatacctgtcgatccacgagcacctttccatggacattcttaacaagtacggcatcgctactcccaagtacatcgccgctaagacgcccgaagaggcatacaaggctgcacagtcttttggcggcaaggagatcgtaatcaaggcacaggtgcttgcgggtggtcgtggtaagggtcactttgactcgggtctcaagggtggtgttcacctgatcaagacgcccgaagaggctcgcgaccttgctgccaagatgatcggcaaccacctgatcaccaagcagaccggggctggtggtcgtctctgcaatgctgtcatgatcgccgaggctcgtccaccacaccacgagtactacgtcgctgtgctcaacgaccgtgctacgcaacttcccgtcttgatcgcgtcgaaccaaggtggtatgtcgatcgaagaggttgcagccgaaaacccggatgccatcatcaccacgcctatcgattttgaaaagggtctcagcaaccaagatgcgcttgggattgccaagaagctcggcttcaccggcgccaagcaggagcaacaggctgccgaaaccttccagaagctgtacaagctgtttgacgaaaaggacgccacgcaggtcgagatcaaccctcttgccgagtccaaggacggcgaggttctctgcatggatgctaagctcggatttgatgaaaacgccgatttccgtcaggctgacatcttcgagctgcgcgacaccacgcaggaggaccccgacgaggttgacgccgccaagtatggcctcaactttatcaagctcgatggcaacatcggttgtctcgtcaacggcgccggtcttgccatggccaccatggatgtgttgaagctcaacggaggtaaccccgctaacttcctcgacgtcggaggcaccgcttccgctgcttccgtcaaaaaggctttcgaactgctcctcaactccaaagaggtcaagggtatctttgtcaacatctttggcggtatcgtctcgtgcaagaaaatcgccgagggcatcattcaggccacccaagaattggatatgtccatccctctcgtcgtccgtctccagggcacccacgagaaagaggcaaaggagttgatcaagaactccaacctcaagatcttcgccttcgacggcttggacgaggccgctgccaaggctgttgagagcgctcaaaagggcaccctttaa

SEQ ID NO: 93856 - protein, 460 aa, Ustilago maydis 521
MTGVITFCFSFCSALLKPTSLPPLSFAPLRFYHIMLFNALRTRASMARTMVRGGQAAAQKRYLSIHEHLSMDILNKYGIATPKYIAAKTPEEAYKAAQSFGGKEIVIKAQVLAGGRGKGHFDSGLKGGVHLIKTPEEARDLAAKMIGNHLITKQTGAGGRLCNAVMIAEARPPHHEYYVAVLNDRATQLPVLIASNQGGMSIEEVAAENPDAIITTPIDFEKGLSNQDALGIAKKLGFTGAKQEQQAAETFQKLYKLFDEKDATQVEINPLAESKDGEVLCMDAKLGFDENADFRQADIFELRDTTQEDPDEVDAAKYGLNFIKLDGNIGCLVNGAGLAMATMDVLKLNGGNPANFLDVGGTASAASVKKAFELLLNSKEVKGIFVNIFGGIVSCKKIAEGIIQATQELDMSIPLVVRLQGTHEKEAKELIKNSNLKIFAFDGLDEAAAKAVESAQKGTL

SEQ ID NO: 93857 - DNA, 1281 bp, Strongylocentrotus purpuratus
  CDS (1)..(1281)
atggctaatgttgcaaggctagtatcaggctgtcgccactcttttcagacaatacttcaccggaatgctggtgtagctggggcagtccctgtgagacacctcaatctacaggagtaccagagtaagaagttaatgcagcagtatgatgtcaatgttcagaagttcatggttgccgatgatgctcaacaagcagtccagcaaggcaaagacttggatgtgagggagatcgtattgaaggctcagatacttgcaggaggtaggggtaaaggaacattcactagtggtctcaaaggaggagttcatctaaccaaaaaccccaatgatcttggtccattggtcgaacagatgatcggagccaaactcaccaccaaacaaactcccaaggatggtgttcttgttaaaaaggtgatggtagcagaagcactggacattgagagggagacgtatctggccatcttaatggacagaggaatgatgggtccggttcttattggaagtccagctggtggggtggacattgaagaggtgtccgagaagaccccagagctcatatacaaggtacccattgacatcactattggcatcaccgatgagcaagctcttacaatggcaaagaatcttgactttaaaggagatctcatcagagtggccgcagatcaaatcaagaatttatatgagctattccttggagttgatgccacacaagttgaagtcaatccatttggagaaacagatgatggtagagtggtatgctttgatgccaagatcaactttgacgacaacgcagagttccgccagaaggaggtctttgccatggacgatatgacagaagccgaccccaaggaagtcttagcagctgagcacaatctgaactacatcagtatggatggcaatataggatgcttagtgaatggtgctggtctggccatggcaaccatggatatcatcaagctacatggaggagagccggcaaacttccttgattgcggtggtggtgtaggagaagggcaggtctttgaagccttcaaactcatcagctcagatgaaaatgtaaaggctatcctagtgaatgtatttggaggtattgtagattgttccatcattgctaatggcatcacgtcggcttgcaggggaatggatctcaaggtaccccttgtggtcaggttagcagggttcaacgtagagaaagctaccagcatcctccacgaaagtggtcttccaattaagattgctgcagatctggaagatgctgccaagaaagccgtagcttgccttaattaa

SEQ ID NO: 93858 - protein, 426 aa, Strongylocentrotus purpuratus
MANVARLVSGCRHSFQTILHRNAGVAGAVPVRHLNLQEYQSKKLMQQYDVNVQKFMVADDAQQAVQQGKDLDVREIVLKAQILAGGRGKGTFTSGLKGGVHLTKNPNDLGPLVEQMIGAKLTTKQTPKDGVLVKKVMVAEALDIERETYLAILMDRGMMGPVLIGSPAGGVDIEEVSEKTPELIYKVPIDITIGITDEQALTMAKNLDFKGDLIRVAADQIKNLYELFLGVDATQVEVNPFGETDDGRVVCFDAKINFDDNAEFRQKEVFAMDDMTEADPKEVLAAEHNLNYISMDGNIGCLVNGAGLAMATMDIIKLHGGEPANFLDCGGGVGEGQVFEAFKLISSDENVKAILVNVFGGIVDCSIIANGITSACRGMDLKVPLVVRLAGFNVEKATSILHESGLPIKIAADLEDAAKKAVACLN

SEQ ID NO: 93859 - DNA, 1344 bp, Tribolium castaneum
  CDS (1)..(1344)
atggctacaatgttgcggagcgtccttttggccgaaagcgttctcctgaaaaacggaccaaagattttgggctctgcaagttggcagccacagcagcaacagaagcgaaatttaaatgttcacgaacatatcagttacacccttctcaaggatgctggtatccaggtccccaaattcggggttgccaagaccaagcaggaggcgcgcaaaatcgccgaagacttgaaaaccaaagacattgtacttaaagcgcaagttttggcaggtggcaggggcaaaggtcacttcaagaacggactcaagggtggagtcaggatggtttattcgccagaagaggccgaggacattgctgggcaaatgcttggccaatatttagtcactaaacaaactggggaaaaggggcgcatctgcaacgctgttatggtcgcagagaggaaattccccaggaaggaattctactttgcaattatgatggaacgcgcgtttggcggtcctgtaataatagcttcctcccaaggaggtatcaacattgaagaagtggctgctgagaatcccgccgctattttgtacgaaccaatcgacattgtcaaaggtttgagcaaagaacaagcccaaaaagtggccgtcaacgtcggtttggggtctcagaaggagaaaactggtgacatgttgctaaaaatgtacgatttgttttgcaagaaggacgccctcctgattgagatcaacccttatgccgaagatgcgggagaaacatatttctcgcttgatgcaaaattccgatttgacgacaacgctgctttcagacagaaagatttgtttgctttgcgtgattggacccaagaggacgagaaagaggtggctgcggccaaattcgatctcaactacattgctctcgacggcagtattgggtgtcttgtgaatggggctggtcttgccatggccaccatggacattatctctctgcatggtggctcccctgctaatttcctggacgtgggaggtggggccacagcccaggctgtcaaagaagccttcaaaattatcacagcggatcccaaagttcacgcaattcttgtgaatattttcggcggtattatgaggtgtgatgtcatagcggagggtattattgccgctgctaaagaactcaacctcaaaatgccgattatttgccgtttgcaaggcacgaatgtcgacgatgccaaagttttaattgccagctcagggttgaagattttgccagttgataaccttgatgaagcggctcgtttggctgttaaactgtctaatattgtcagtctggcgcgcgatgcgaagctagatatcaattttgagattccattgtaa

SEQ ID NO: 93860 - protein, 447 aa, Tribolium castaneum
MATMLRSVLLAESVLLKNGPKILGSASWQPQQQQKRNLNVHEHISYTLLKDAGIQVPKFGVAKTKQEARKIAEDLKTKDIVLKAQVLAGGRGKGHFKNGLKGGVRMVYSPEEAEDIAGQMLGQYLVTKQTGEKGRICNAVMVAERKFPRKEFYFAIMMERAFGGPVIIASSQGGINIEEVAAENPAAILYEPIDIVKGLSKEQAQKVAVNVGLGSQKEKTGDMLLKMYDLFCKKDALLIEINPYAEDAGETYFSLDAKFRFDDNAAFRQKDLFALRDWTQEDEKEVAAAKFDLNYIALDGSIGCLVNGAGLAMATMDIISLHGGSPANFLDVGGGATAQAVKEAFKIITADPKVHAILVNIFGGIMRCDVIAEGIIAAAKELNLKMPIICRLQGTNVDDAKVLIASSGLKILPVDNLDEAARLAVKLSNIVSLARDAKLDINFEIPL

SEQ ID NO: 93861 - DNA, 1245 bp, Tribolium castaneum
  CDS (1)..(1245)
atgtcttccctctggaactctcttttaaaagtcccgactcagataaaacaattctccgttccggtgcgttatttgaacctgttggagtaccaaagcaagcaccttttgcgcaaaaatggggtggctgtgcaagacttttgcatggttgatgataagggatgctccgagttcgataaatttaatgtgaaagaatacgtaataaaggcacaaattctggcgggtggtcgcggcaaaggccactttaccaatggttttaaaggcggggttcatgtcactgagaaacgcaatgaagtcgacgatatcgtcaaaaaaatgctcggccacaggcttatcacgaagcagacgcccaaggacggcatcgaggtgaaaaaaatcatgtttgccgaaagtgtgaacattcagagggagacctacgtttgcattttaatggacaggcagaagaacgggcctgtcttaattgcgtcccccgcaggcggcgtggacatcgaagccgtggctgagaagacgccccatttgatcaaaaacatccccattgatattcacaagggggtgaccgatagtatggccaatgaggtggccgagttcctggagttcaaggggcccctcaagggtttggccgcagccgagctgaaaaaactgtggcagttcttcctcgccgtcgatgccactcagctcgaaatcaaccctttggtcgaaacggacaacaataaagtgatcgcagtggatgcgaaaatcaatttcgacgacaacgcgcagttccgccaaaaggacatcttcgcgttggaggacgtcaccgagagcgacccccgcgaggtcgaagcggcgaaatacaacctgaactacatcgggatgacaggaaacatcggctgtttggtcaacggcgccggtttggccatggccaccatggacatcatcaagctgcatgggggcgaccccgccaacttcctcgacgtcgggggcagcgtccgcgaggagcaggtcaaagccgcgttcaatattctcacgtctgataagaacgttaaatgtattttggtcaacgttttcggcgggatcgtgaattgcgcgacgattgccaatggaatcgtgggtgcaatgaaggcgatgaagcttgaagtgcctttgattgtcagactggaaggcacgaatgcggcggaggcccggagaattatcaaggattcaggcatgaatatccaaacagctgaaaatctcgacgatgccgccaaaaaagcggtgcagaatgcctaa

SEQ ID NO: 93862 - protein, 414 aa, Tribolium castaneum
MSSLWNSLLKVPTQIKQFSVPVRYLNLLEYQSKHLLRKNGVAVQDFCMVDDKGCSEFDKFNVKEYVIKAQILAGGRGKGHFTNGFKGGVHVTEKRNEVDDIVKKMLGHRLITKQTPKDGIEVKKIMFAESVNIQRETYVCILMDRQKNGPVLIASPAGGVDIEAVAEKTPHLIKNIPIDIHKGVTDSMANEVAEFLEFKGPLKGLAAAELKKLWQFFLAVDATQLEINPLVETDNNKVIAVDAKINFDDNAQFRQKDIFALEDVTESDPREVEAAKYNLNYIGMTGNIGCLVNGAGLAMATMDIIKLHGGDPANFLDVGGSVREEQVKAAFNILTSDKNVKCILVNVFGGIVNCATIANGIVGAMKAMKLEVPLIVRLEGTNAAEARRIIKDSGMNIQTAENLDDAAKKAVQNA

SEQ ID NO: 93863 - DNA, 1167 bp, Erwinia carotovora subsp. atroseptica SCRI1043
  CDS (1)..(1167): transl_table=11
atgaatttacacgagtatcaggcaaaacaactctttgctcgatatggtttaccggcaccgaccggctatgcctgtactacaccgcgtgaagcagaagaagccgcatctaagattggctcgggtccgtgggtcgtaaaatgtcaggttcacgcaggcggtcgcggtaaagcgggcggcgttaaagtggtcagcaacaaagaagacattcgcgcttttgctgaaaactggctgggtaaaaagctcgttacttatcaaactgacgcacagggccaaccggttcatcagattctggttgaagcggcaacggatatcgacaaagagctttatctgggcgcggttgttgaccgtggcacgcgtcgtgtcgtgttcatggcgtccactgaaggtggcgtagaaattgaaaaagttgcggaagagacgccggaactgatccacaaagctgctatcgatccactggtaggcccacagccttatcagggtcgcgagctggccttcaagctgggtctgagcggcaagcaagttgcccagttcaccaaaattttcatgggtctggcgacgctgttccttgagcgcgatctggcgctggtagaaatcaacccgctggttatcactaagcagggcgatctgatctgtctggatggcaaactgggcgcggacggcaatgcactatttcgtcagcctgagctgcgtgaaatgcgtgacccaagccaggaagattcccgtgaagcgcatgcggcacagtgggaactaaactatgttgcgctggatggtaacatcggctgtatggtgaacggcgcgggtcttgcgatgggtaccatggacatcgtgaaactgcacggcggttctcctgctaacttcctcgatgttggtggtggcgcgacgaaagaacgtgtaactgaagcattcaaaattatcctgtctgacgacaaggtaaaagccgtctttgttaacatctttggtggcatcgtacgttgcgatttgatcgctgacggtatcatcggcgcggtagccgaagtgggcgttagcgtaccggttgtggtacgtcttgaaggaaacaatgcagaacttggagccaagaaactggcggatagcggcctgaatattattgccgccaccagcctgacgggtgcggctcagcaggttgttgcagcagcgggagataaataa

SEQ ID NO: 93864 - protein, 388 aa, Erwinia carotovora subsp. atroseptica SCRI1043
MNLHEYQAKQLFARYGLPAPTGYACTTPREAEEAASKIGSGPWVVKCQVHAGGRGKAGGVKVVSNKEDIRAFAENWLGKKLVTYQTDAQGQPVHQILVEAATDIDKELYLGAVVDRGTRRVVFMASTEGGVEIEKVAEETPELIHKAAIDPLVGPQPYQGRELAFKLGLSGKQVAQFTKIFMGLATLFLERDLALVEINPLVITKQGDLICLDGKLGADGNALFRQPELREMRDPSQEDSREAHAAQWELNYVALDGNIGCMVNGAGLAMGTMDIVKLHGGSPANFLDVGGGATKERVTEAFKIILSDDKVKAVFVNIFGGIVRCDLIADGIIGAVAEVGVSVPVVVRLEGNNAELGAKKLADSGLNIIAATSLTGAAQQVVAAAGDK

SEQ ID NO: 93865 - DNA, 1161 bp, Desulfotalea psychrophila LSv54
  CDS (1)..(1161): transl_table=11
atgaaaatccatgaataccaagccaagcagctgttccgtaaatactctatccccgtacccgaaggactcctctgtacgaacctgcaagaggtcaagacggcccttaagtcccttcaactccccatcgcagttaaggcccagatacatgccggaggacggggtaagggaggaggggtcaaacttggcaaaacagccacagaggtagtgcagtacgccgatgatatcttgggaatgtctctggttacggcccagacggggccctcgggcaggactgtttccaaaatactccttgaagaaggcgtctccatcgcccgcgaactctatctctccatccttgtcgaccgggaaagggcgtgcatcaccatcattgcctgccaggacggtggaatgaatatcgaagaggttgccgcctcaacccccgaacgaattggcaaaatccatatcaacccattaattggtccccgttcctaccatatcaatcaggcaagagaatggctgaatattgcccaggaacaggccagagctttttccctctttatccacgccctctataaactctttcttgattacgactgttctatggtggagatcaacccccttattatcaccgaggataatcagctcatcgccctcgatgccaaggtcgacaccgactccaacgccctctttcgccagcgggaactgcagaaaatgcacgatcccgccgaagatgatccagcagaggcagaggccgccaagttcaatctgaactatatcaagctgagcggcaatgtgggcaatatggtcaacggtgccggtctggccatggccaccatggatattattaaacgggcgggagcggaaccagcaaattttctggatgtgggagggagcgccgacgcggaaaggattgaaaacggttttcgcatcatcctggccgacaccaatgtaaaggccattcttatcaatatttttggcggaatccttcgctgtgacatcctcgcccagggcgtggtgcaggccgccgccaaggtatcactccaggtacctgtcgttatccgcatggaaggtaccaatgtgaaagagggacgtgaaattctggccaagtcaggactctccctgataaatgccacagacctgaacgatgccgccgaaaaaatttctaccctacttacagattaa

SEQ ID NO: 93866 - protein, 386 aa, Desulfotalea psychrophila LSv54
MKIHEYQAKQLFRKYSIPVPEGLLCTNLQEVKTALKSLQLPIAVKAQIHAGGRGKGGGVKLGKTATEVVQYADDILGMSLVTAQTGPSGRTVSKILLEEGVSIARELYLSILVDRERACITIIACQDGGMNIEEVAASTPERIGKIHINPLIGPRSYHINQAREWLNIAQEQARAFSLFIHALYKLFLDYDCSMVEINPLIITEDNQLIALDAKVDTDSNALFRQRELQKMHDPAEDDPAEAEAAKFNLNYIKLSGNVGNMVNGAGLAMATMDIIKRAGAEPANFLDVGGSADAERIENGFRIILADTNVKAILINIFGGILRCDILAQGVVQAAAKVSLQVPVVIRMEGTNVKEGREILAKSGLSLINATDLNDAAEKISTLLTD

SEQ ID NO: 93867 - DNA, 1161 bp, Bacillus licheniformis ATCC 14580
  CDS (1)..(1161): transl_table=11
atgaatatccatgagtaccaagggaaagaagtactcagaaaatacggagtggctgttccggaaggtaaagtggcatttacagcagatgaagcggtcaaagcagcggaagcgctgtccagctcggtttatgtcgtgaaagctcaaattcacgccggcggacgcggtaaagctggcggggttaaaattgcaaaatcaaaagaagaagtcaaagcctatgcggaagaattgttgggaaagacgcttgtcactcaccagacgggtcccgacggccaacaaataaaacgcttacttattgaagaaggctgcgatatcaaaaaagaatactatgtcggcctagttctcgacagggcgacttcacgcatcgtgctgatggcctctgaagaaggcggcacggaaattgaagaagtcgctgaaaaaacaccggaaaaaatcgtcaaagaagtgatcgatccggctgtcggactgcagagctaccaggcgagaaaaatcgccttcgccatcaatattccgaaagagcttgtcggccaggccgttaagtttatgatggggctgtacaaggcgtttactgaaaaagactgttccattgctgaaatcaatccgctcgtcgtcacaggggacggaaaagtcatggcccttgacgccaagctgaactttgacagcaatgcgctatacagacaaaaagacatcttggagtacagagatctcgatgaagaagatccgaaggaaatcgaagcatccaagtatgatttaagctatatttcgctcgatggaaacatcggctgcatggtcaacggagcggggcttgcgatgtcgaccatggacattatcaagcactacggaggggaaccggccaacttccttgacgttggaggcggcgcgacagccgaaaaggtaacggaagcgttcaagatcattttgtctgatcaaaacgtcaaagggatctttgtcaatattttcggcggcatcatgaaatgcgacgtcattgcagaaggcgttgttgaagcgacaaaacaagtcggtctgacattgccgcttgtcgttcgccttgaaggcaccaatgtcgatctcggcaagaagatcctcgatgattcaggactcaatattacgtctgcggaatcaatggctgacggcgcgcagaaaatcgtatccttagtgaagtaa

SEQ ID NO: 93868 - protein, 386 aa, Bacillus licheniformis ATCC 14580
MNIHEYQGKEVLRKYGVAVPEGKVAFTADEAVKAAEALSSSVYVVKAQIHAGGRGKAGGVKIAKSKEEVKAYAEELLGKTLVTHQTGPDGQQIKRLLIEEGCDIKKEYYVGLVLDRATSRIVLMASEEGGTEIEEVAEKTPEKIVKEVIDPAVGLQSYQARKIAFAINIPKELVGQAVKFMMGLYKAFTEKDCSIAEINPLVVTGDGKVMALDAKLNFDSNALYRQKDILEYRDLDEEDPKEIEASKYDLSYISLDGNIGCMVNGAGLAMSTMDIIKHYGGEPANFLDVGGGATAEKVTEAFKIILSDQNVKGIFVNIFGGIMKCDVIAEGVVEATKQVGLTLPLVVRLEGTNVDLGKKILDDSGLNITSAESMADGAQKIVSLVK

SEQ ID NO: 93869 - DNA, 1167 bp, Mannheimia succiniciproducens MBEL55E
  CDS (1)..(1167): transl_table=11
atgaatttacacgaataccaggcaaaacagatttttgcgcaatatggtttaccggtaagtgaggggtgtgcctgtcaaagcctagaggaggcaattcaagccgttaaaaaattaggcggcgggcaatgggtggcaaaatgtcaggtccatgccggcggacgaggcaaagcgggcggtgtgaaactggtaaaatccgaagaagaagtgcggtctttttttgagaagtttttaggtcaacgcttggtaacctttcaaaccgatgcaaaagggcaacctgttaatgccatttatatggaagcttgcgcgaatgtgaaaaaagaactctatttgggtgccgtattagatcgcagttcgcagcgcattgtgtttatggtttctaccgaaggcggcgtgaatatagaagaagtggcggaaaaaacaccgcacttgttacataaaatgcccattgatcctttagtcggcgccatgccttatcaaggtcgcgaacttgctttcaaacttggcttacagggtaaacaaattcagcaatttgcacaaattttctgccaactgggcaaaatgtttgtggaaaaagatctttctctgttggaaatcaatccgttggttattttagacaatgatcaattacattgtttagatgccaaaatcgtggtggacggcaacgccctataccgccagccggaactgaacgcaatgcgtgatccgagtcaggaagacgccagagaagcggctgccgaacaatggcatttaaattacgtggcgcttgaaggtaatatcggctgtatggttaacggcgccgggcttgccatgggcaccatggatattgtgaagttgcacggcggacagccggctaacttccttgatgtgggcggcggcaccacaaaagagcgggtagcggaagcttttaaaataatcctttccgatcaatctgttaaagccattttagtcaatatcttcggtggcattgttcgttgcgatcttatcgcggaaggcattgtggcggcggttaatgaagtcggcgtaagcgtgccggtagttgtccgtttagagggaaataatgcgccgttaggccgtgaaattttagcgcaaagcggtttgaatattatcgccgcaaccagtttaacggatgccgcggtacaagtggtaaacgcggcagagggaaaataa

SEQ ID NO: 93870 - protein, 388 aa, Mannheimia succiniciproducens MBEL55E
MNLHEYQAKQIFAQYGLPVSEGCACQSLEEAIQAVKKLGGGQWVAKCQVHAGGRGKAGGVKLVKSEEEVRSFFEKFLGQRLVTFQTDAKGQPVNAIYMEACANVKKELYLGAVLDRSSQRIVFMVSTEGGVNIEEVAEKTPHLLHKMPIDPLVGAMPYQGRELAFKLGLQGKQIQQFAQIFCQLGKMFVEKDLSLLEINPLVILDNDQLHCLDAKIVVDGNALYRQPELNAMRDPSQEDAREAAAEQWHLNYVALEGNIGCMVNGAGLAMGTMDIVKLHGGQPANFLDVGGGTTKERVAEAFKIILSDQSVKAILVNIFGGIVRCDLIAEGIVAAVNEVGVSVPVVVRLEGNNAPLGREILAQSGLNIIAATSLTDAAVQVVNAAEGK

SEQ ID NO: 93871 - DNA, 1221 bp, Legionella pneumophila subsp. pneumophila str. Philadelphia 1
  CDS (1)..(1221): transl_table=11
atgtttaactgcaaggcccgtcttgacgggtcttgcttttttaaaaaggtaattagaatgaatttacatgaatatcaagccaagcaattattcgcgagctatgatttaccagttcctcgtggtgaggtcgcttataatgttgaggatgccttgctcgttgcttctcaattatcaacctctcgctgggttgtgaaagcacaagtccatgctggtggtagaggtaaagctggtggggtgaaactggtttctagcaaggatgaattggctgcagttgcgaaatccatgttaggtacacgcttggttacctatcaaactgatgccagaggccaaccggttaatgctattttggttgaagaaacctgcgaaatagacaaggaattatatctcggtgctgttgttgatagatccaccagacgagttgttattatggcctctacagaaggtggtgttgaaattgaaaaggttgctcatgaaacacctgaaaaaattttcaaggtggttgttgacccattagttggtgttatgccctttcaatgtcgtgaaacagcttttaaacttggattaaaagacgatcaaatcaaacagttcactcatttgatgatgggattagggaaaatgtttgttgagtgtgatttaagtctattagagataaatccgcttgtcataacaaaatcagggcaactaatttgtctggatggaaaaattaatatcgatggaaatgctttattccgacagcctaaactgaaaaatatgcgagatgtttctcaggaagatgatcgagaaaatcgtgccagtgattgggagcttaattatattcctttggatgggacaataggttgcatggtaaatggtgctggtttggctatggctaccatggacgtgataaaattacatggtggtgagccggctaatttcctggatgttgggggaggcgccacaaaagaaagagtcagtgaagctttgaagattattgtgtcagatgaaaaagtcaaaggaattctagttaatatttttggtggtatcgttcgttgtgaccttattgctgatggaattcttgctgctgtaaaagaagtggatgtaaaaattcctgttgttgtcagactggaaggtaataatgcccagttaggtgctgagatattgaataaaagcaatttgaatgtgattgctgcaacgagtttgacagacgcagccaagaaaattgtagcagcagtttccgaataa

SEQ ID NO: 93872 - protein, 406 aa, Legionella pneumophila subsp. pneumophila str. Philadelphia 1
MFNCKARLDGSCFFKKVIRMNLHEYQAKQLFASYDLPVPRGEVAYNVEDALLVASQLSTSRWVVKAQVHAGGRGKAGGVKLVSSKDELAAVAKSMLGTRLVTYQTDARGQPVNAILVEETCEIDKELYLGAVVDRSTRRVVIMASTEGGVEIEKVAHETPEKIFKVVVDPLVGVMPFQCRETAFKLGLKDDQIKQFTHLMMGLGKMFVECDLSLLEINPLVITKSGQLICLDGKINIDGNALFRQPKLKNMRDVSQEDDRENRASDWELNYIPLDGTIGCMVNGAGLAMATMDVIKLHGGEPANFLDVGGGATKERVSEALKIIVSDEKVKGILVNIFGGIVRCDLIADGILAAVKEVDVKIPVVVRLEGNNAQLGAEILNKSNLNVIAATSLTDAAKKIVAAVSE

SEQ ID NO: 93873 - DNA, 1167 bp, Neisseria gonorrhoeae FA 1090
  CDS (1)..(1167): transl_table=11
atgaatttacacgagtatcaggctaaagaactgctggctagctacggtttgcccgtacaaggcggtattttggcgcacaacggcgaagaagccgctgcagcttacgacaaattgggcggcaaattcgctgttgtcaaagcacaggtacacgccggcggccgcggtaaagcgggcggcgtaaaagtcgttaaaagccgcgaaaaagccaaagaagtggctgaaagcctgattggcaccaacttggtaacttaccaaaccgatgccaacggccaacctgtcaacagcgttttggtttgcgaagatatgtatcctgttcaaaccgagctgtacttgggcgcagtggttgaccgttctacccgccgcgttacattcatggcttctaccgaaggcggcgtggaaatcgaaaaagttgctgctgaaactccagaaaaaatcttcaaagtaaccgttgatccgctggtcggcctgcaaccttgccaagctcgcgaagttgccttccaactgggcttgaaagacaaacaaatcaacgagttcgccaaactgatgaccggcgcgtacaaagcgtttgtcgaaaacgacttcgccctgtttgaagtcaacccgctggcagttcgcgaaaacggcgcactggcttgcgtggacggcaaaatcggcatcgacagcaacgcgctctaccgcctgccaaaaatcgctgaattgcgcgacaaatctcaagaaaacgaacgtgaactgaaagcttctgaattcgacctgaactatgttgccctggaaggcaaaatcggctgtatggttaacggtgccggtttggcgatggccaccatggacatcatcaaactcaaaggcggccaacctgccaacttcttggacgttggcggcggcgcaaccaaagaccgcgtggttgaagcgttcaaactgattttggaagacaaatccgttaaaggcgtattgatcaacatcttcggcggtatcgtacgttgcgacatgattgcggaagccatcgtggcagccgttaaagaaatcaacgtcaacgttcctgtcgttgttcgtttggaaggcaacaacgccgaactcggcgcgaaaatcctgaacgaatcaggtctgaaactgacttctgcagacggtctgaatgacgcagccgaaaaaattgttgcagccgtaaacgcctaa

SEQ ID NO: 93874 - protein, 388 aa, Neisseria gonorrhoeae FA 1090
MNLHEYQAKELLASYGLPVQGGILAHNGEEAAAAYDKLGGKFAVVKAQVHAGGRGKAGGVKVVKSREKAKEVAESLIGTNLVTYQTDANGQPVNSVLVCEDMYPVQTELYLGAVVDRSTRRVTFMASTEGGVEIEKVAAETPEKIFKVTVDPLVGLQPCQAREVAFQLGLKDKQINEFAKLMTGAYKAFVENDFALFEVNPLAVRENGALACVDGKIGIDSNALYRLPKIAELRDKSQENERELKASEFDLNYVALEGKIGCMVNGAGLAMATMDIIKLKGGQPANFLDVGGGATKDRVVEAFKLILEDKSVKGVLINIFGGIVRCDMIAEAIVAAVKEINVNVPVVVRLEGNNAELGAKILNESGLKLTSADGLNDAAEKIVAAVNA

SEQ ID NO: 93875 - DNA, 1209 bp, Corynebacterium glutamicum ATCC 13032
  CDS (1)..(1209): transl_table=11
atggaattggcagtggatctttttgaataccaagcacgggacctctttgaaacccatggtgtgccagtgttgaagggaattgtggcatcaacaccagaggcggcgaggaaagcggctgaggaaatcggcggactgaccgtcgtcaaggctcaggtcaaggtgggcggacgtggcaaggcgggtggcgtccgtgtggcaccgacgtcggctcaggcttttgatgctgcggatgcgattctcggcatggatatcaaaggacacactgttaatcaggtgatggtggcgcagggcgctgacattgctgaggaatactatttctccattttgttggatcgcgcgaatcgttcgtatctggctatgtgctctgttgaaggtggcatggagatcgagatcctggcgaaggaaaagcctgaagctttggcaaaggtggaagtggatcccctcactggtattgatgaggacaaagcgcgggagattgtcactgctgctggctttgaaactgaggtggcagagaaagtcattccggtgctgatcaagatctggcaggtgtattacgaagaggaagcaacactcgttgaggtgaacccgttggtgctcacggatgacggcgatgtgattgcgcttgatggcaagatcacgctggatgataacgctgatttccgccatgataaccgtggtgcgttggctgaatctgccggtggcttggacattttggaactgaaggccaagaagaatgatctgaactacgtgaaacttgatggctctgtgggcatcattggcaatggtgcaggtttggtgatgtccacgttggatatcgtggctgcagctggtgaacgccatggtgggcagcgccccgcgaacttcctagacattggtggcggagcatcagctgaatcgatggctgctggtctcgatgtgatccttggggatagccaggtacgcagtgtgtttgtgaatgtgtttggtggcatcaccgcgtgtgatgtggtggcaaagggaatcgttggagctttggatgtgctcggcgatcaagcaacgaagcctcttgtggtgcgccttgatggcaacaacgtggtggaaggcagacgaatcctcgcggaatataaccaccctttggtcaccgttgtggagggtatggatgcagcggctgatcacgctgcccatttggccaatcttgcccagcacggccagttcgcaaccgctaattag

SEQ ID NO: 93876 - protein, 402 aa, Corynebacterium glutamicum ATCC 13032
MELAVDLFEYQARDLFETHGVPVLKGIVASTPEAARKAAEEIGGLTVVKAQVKVGGRGKAGGVRVAPTSAQAFDAADAILGMDIKGHTVNQVMVAQGADIAEEYYFSILLDRANRSYLAMCSVEGGMEIEILAKEKPEALAKVEVDPLTGIDEDKAREIVTAAGFETEVAEKVIPVLIKIWQVYYEEEATLVEVNPLVLTDDGDVIALDGKITLDDNADFRHDNRGALAESAGGLDILELKAKKNDLNYVKLDGSVGIIGNGAGLVMSTLDIVAAAGERHGGQRPANFLDIGGGASAESMAAGLDVILGDSQVRSVFVNVFGGITACDVVAKGIVGALDVLGDQATKPLVVRLDGNNVVEGRRILAEYNHPLVTVVEGMDAAADHAAHLANLAQHGQFATAN

SEQ ID NO: 93877 - DNA, 1167 bp, Pseudomonas fluorescens Pf-5
  CDS (1)..(1167): transl_table=11
atgaatcttcacgagtatcagggtaagcagctgttcgctgaatacggcctgccagtatccaaaggctacgcggtagacaccccggaagaagcagcagaagcttgcgacaaaatcggcggctccgagtgggttgtcaaagcccaggttcacgccggtggtcgcggtaaagcgggcggcgttaagctggttcgcagcaaagaagacgctaaggcattcgctcagcagtggttgggcaagcgtctggtgacctatcagactgacgccaatggccagcctgtcaccaagatcctggttgaatcgtgcactgatatcgctaaagagctgtacctgggcgctgtcgttgaccgttcgagccgtcgcatcgtgttcatggcttccaccgaaggtggcgtggacatcgagaaaatcgctcacgacactccagaaaaaattctcaaggccactatcgatccactggttggcgctcagccattccaggggcgcgagctggctttccaactgggtctggaaggcaagcaagttgcccagttcgccaagatcttcgtaggtctggccaaactgttccaggatcacgatctggccctgctggaagtgaacccgctggtgatcaaggccgacggcgatctgcactgcctggacgcgaagatcaacatcgacgccaacgccatgtaccgtcagcctaagctgaaaaccttccacgatccgtcccaggacgatccgcgcgaagcccacgctgccaagttcgaactgaactacgtagctctggaaggcaacatcggctgcatggtcaacggtgccggcctggccatgggtaccatggacatcgtcaacctgcacggcggcaagccagccaacttcctcgacgtaggtggtggtgctaccaaagagcgcgtgaccgaagccttcaagatcatcctgtccgacaccaacgtcgctgcagtactggtcaacatcttcggcggcatcgttcgctgcgacatgattgccgaaggcatcatcggcgccgtgaaagaagtcggcgtgaaaatcccggttgttgttcgccttgaaggcaacaacgctgaactgggcgctaaagtactggcagaaagcggcttgaacatcatcgctgctaccagcctgaccgacgctgctcaacaagttgtcaaagctgcggagggcaaataa

SEQ ID NO: 93878 - protein, 388 aa, Pseudomonas fluorescens Pf-5
MNLHEYQGKQLFAEYGLPVSKGYAVDTPEEAAEACDKIGGSEWVVKAQVHAGGRGKAGGVKLVRSKEDAKAFAQQWLGKRLVTYQTDANGQPVTKILVESCTDIAKELYLGAVVDRSSRRIVFMASTEGGVDIEKIAHDTPEKILKATIDPLVGAQPFQGRELAFQLGLEGKQVAQFAKIFVGLAKLFQDHDLALLEVNPLVIKADGDLHCLDAKINIDANAMYRQPKLKTFHDPSQDDPREAHAAKFELNYVALEGNIGCMVNGAGLAMGTMDIVNLHGGKPANFLDVGGGATKERVTEAFKIILSDTNVAAVLVNIFGGIVRCDMIAEGIIGAVKEVGVKIPVVVRLEGNNAELGAKVLAESGLNIIAATSLTDAAQQVVKAAEGK

SEQ ID NO: 93879 - DNA, 1167 bp, Psychrobacter arcticus 273-4
  CDS (1)..(1167): transl_table=11
atgaatttacatgagtatcaagcaaaagagctattgaaaagctatggcttgccaattcaagaaggcctcattgcctacagtggcgacgaagcagcggcagcttttgataaaaccccaaccgatatcgcagtcatcaaagcacaggttcatgctggtggtcgcggtaaagcgggcggcgttaaattggttaagactcgcgaagaagccaagcaagtgactgatgagcttatcggtactaaccttgtaacttatcaaacggatgccgctggtcagccagtgaacttcgttttggttgcagaagatatgtacccagtacaaactgagctatatcttggcgctgttgttgatcgctcttcacgtcgtgtgacgtttatggcatcaactgaaggtggtgttgagattgagaaagttgcagaagaaacccctgaaaaaatctttaaagtaagtattgatccactggttggtttattgccatttcaagcgcgtgaagtggcgtttaaattgggtttagaaggcaagcaaatcagtcagttcgttaaattgatgactggcgcttatcaagcattcgttgaaaacgacattgatttacttgagatcaacccattagccgtgcgcgaaaatggcgagattgtttgtgttgatggcaaaattagtatcgactcaaacgctttgtatcgtctgcctaaaattgctgcgctacaagacaaatcacaagagaatgagcgtgagcttaaagcggctgagtttgatctaaactatgttgcgctagaaggcaatatcggttgtatggtaaacggtgccggtcttgccatggcaacgatggacatcatcaaattgtacggcggcaagcctgctaacttcttggacgttggcggcggtgcaaccaaagatcgcgttgttgaagcatttaagatcattcttgaagacagcagcgttgaaggtgttttgatcaacattttcggtggtatcgtacgttgtgacatgattgcagaagccataatcgctgctatcaaagaagttgatgttaaagtaccagtcgttgtccgtttagagggtaacaatgctgagctaggcgcgaaaatcctagaagaatctggtctgaaattgatctcagctcaaggtttatcagacgccgctcaaaaaattgttgacgctgttaaagcttaa

SEQ ID NO: 93880 - protein, 388 aa, Psychrobacter arcticus 273-4
MNLHEYQAKELLKSYGLPIQEGLIAYSGDEAAAAFDKTPTDIAVIKAQVHAGGRGKAGGVKLVKTREEAKQVTDELIGTNLVTYQTDAAGQPVNFVLVAEDMYPVQTELYLGAVVDRSSRRVTFMASTEGGVEIEKVAEETPEKIFKVSIDPLVGLLPFQAREVAFKLGLEGKQISQFVKLMTGAYQAFVENDIDLLEINPLAVRENGEIVCVDGKISIDSNALYRLPKIAALQDKSQENERELKAAEFDLNYVALEGNIGCMVNGAGLAMATMDIIKLYGGKPANFLDVGGGATKDRVVEAFKIILEDSSVEGVLINIFGGIVRCDMIAEAIIAAIKEVDVKVPVVVRLEGNNAELGAKILEESGLKLISAQGLSDAAQKIVDAVKA

SEQ ID NO: 93881 - DNA, 1167 bp, Colwellia psychrerythraea 34H
  CDS (1)..(1167): transl_table=11
atgaatttgcatgaataccaagcgaaacaattgttcgctgaatacggtttaccagtttctgaaggtttcgcttgcgatacacctcaagaagctgccgaagcggctgataaaattggcggcgatatgtgggttgttaaaactcaagtacacgcaggcggacgtggtaaggctggcggtgttaagctagttaaatcaaaagaagaaatcaaagagtttgctcaacactggttaggtaagaacttagttacttaccaaacagatgcaaacggacagccagtagctaaaattttagttgaaagctgtactgatatcgccaacgaattatatcttggtgctgttgttgatagagcttctcaaagagttgttttcatggcatctactgaaggcggtgttgacattgaaaagatcgcagaagagactccagaattaattcaccaagctgagattgatccactagttggcgctcaaccttaccaagcacgtgaattaggttttaaacttggtttaaaccctacgcaaatgaagcaatttgttaagatctttatgggtcttgctaaaatgtttgaagattgtgatttcgccttattagaaatcaacccgttagttattactgacgaaggcaaccttcattgtttagacggcaaaattggtatcgatggtaatgctatttaccgtcaacctaaaatgcgcgctttccacgatccatctcaagaagatgaacgtgaagcacatgcagcacaatgggagcttaactatgtagctcttgatggtactgttggttgtatggttaacggtgcaggcctagcaatgggtactatggatatcgttaatttacacggcggcaagccagctaacttcctagatgttggcggcggagcaaacaaagaacgtgtttctgaagcattcaaaatcatcctttctgacgataacgttaaagctgttttagttaacatctttggtggcattgttcgttgtgacatgattgctgaaggtattattggcgctgttaaagaagtaggcgttaaagtaccagttgttgtacgtttagaaggtactaatgctgaattaggtcgtgaagttcttaaaaactctggcttagacatcattgctgctgaatcactaactgatgcagcaactaaagttgtagcagctgcggagggcaaataa

SEQ ID NO: 93882 - protein, 388 aa, Colwellia psychrerythraea 34H
MNLHEYQAKQLFAEYGLPVSEGFACDTPQEAAEAADKIGGDMWVVKTQVHAGGRGKAGGVKLVKSKEEIKEFAQHWLGKNLVTYQTDANGQPVAKILVESCTDIANELYLGAVVDRASQRVVFMASTEGGVDIEKIAEETPELIHQAEIDPLVGAQPYQARELGFKLGLNPTQMKQFVKIFMGLAKMFEDCDFALLEINPLVITDEGNLHCLDGKIGIDGNAIYRQPKMRAFHDPSQEDEREAHAAQWELNYVALDGTVGCMVNGAGLAMGTMDIVNLHGGKPANFLDVGGGANKERVSEAFKIILSDDNVKAVLVNIFGGIVRCDMIAEGIIGAVKEVGVKVPVVVRLEGTNAELGREVLKNSGLDIIAAESLTDAATKVVAAAEGK

SEQ ID NO: 93883 - DNA, 1161 bp, Thiobacillus denitrificans ATCC 25259
  CDS (1)..(1161): transl_table=11
atgaacctgcacgaataccaggccaaacaagtcttgcggtcgagcaaccttaacacgccgcgcggcatcgctgcgacgagcgccgacgccgcggccgacgccgcccgcgaactgggcggcgaggcctgggtcgtgaaggcccagatccacgccggcgggcgcggcaaggccggcggcgtcaaggtcgtgacgagcatcgacgcggtgcgcagcgtcgccgccgcgttgctcggcaagccgctcgtcaccgtgcagaacgcgcccgacggccagccggtccataccgtgctggtcgaggaaacgctgccgatcgcacgcgaactgtatctttcgctgctggtcgaccgtgcctccgagcgcgtcgcggtcgtcgcgtcggccgcgggcggcatggacatcgagcaggtcgcccatgccacacccgagaaagttctgaccgagatctgcgatccgctgctcggcgtgcaggatttccagtgccgcgcgctcgctttcgcgctcgggctcggcggcgacgcctacaaggatttctgccgcctgctgccgcagctctaccgtgtcttcgtcgccaatgatctgagcctgctcgagatcaatccgctcgtcgtcaccaccgacaaccgcgttctgccgctcgactgcaagatgagcgtcgacgacaacgcgctctaccgcaggaaggcgctcgccgacctgcgcgacgacagccagatcgacgccaaggaagcggccgccaacgcggccaacgtcaactacgtcgcgctcgccggcaacatcggctgcatggtcaacggtgccggtctcgcgatggcgacgatggacctgatccagctcgaaggcggcgcgccggccaactttctcgacgtcggcggcggagcgacgcccgagaccgtcgcgcagggcttcaagatcatcctgctcgaccccaacgtgaaggccgtgctgatcaacatcttcggcggcatcgtgcgctgcgacgtgatcgccgagggcatcatccaggcggtcagggaagtcggcgtcgaggttccggtcatcgtgcgcctcgagggcacgaatgccgaactcggccgcaccctgctggccgaatcgggcctcgcgatcgtcgcggccgagagcctgacccaggccgcgaaattcgccgtggagaaagcggcatga

SEQ ID NO: 93884 - protein, 386 aa, Thiobacillus denitrificans ATCC 25259
MNLHEYQAKQVLRSSNLNTPRGIAATSADAAADAARELGGEAWVVKAQIHAGGRGKAGGVKVVTSIDAVRSVAAALLGKPLVTVQNAPDGQPVHTVLVEETLPIARELYLSLLVDRASERVAVVASAAGGMDIEQVAHATPEKVLTEICDPLLGVQDFQCRALAFALGLGGDAYKDFCRLLPQLYRVFVANDLSLLEINPLVVTTDNRVLPLDCKMSVDDNALYRRKALADLRDDSQIDAKEAAANAANVNYVALAGNIGCMVNGAGLAMATMDLIQLEGGAPANFLDVGGGATPETVAQGFKIILLDPNVKAVLINIFGGIVRCDVIAEGIIQAVREVGVEVPVIVRLEGTNAELGRTLLAESGLAIVAAESLTQAAKFAVEKAA

SEQ ID NO: 93885 - DNA, 1167 bp, Pseudomonas fluorescens PfO-1
  CDS (1)..(1167): transl_table=11
atgaatcttcacgagtatcagggtaagcagctgttcgctgaatacggcctgccagtttccactggtttcgcagtagacaccccggaagcagcagcagaagcttgcgacaaaatcggcggcaacgagtgggttgtcaaagcccaggttcacgccggtggtcgcggtaaatcgggcggcgtcaagctggttcgcagcaaagaagacgccaaagccttcgcacagcagtggctgggcaagcgtctggtgacttaccagactgacgccaacggccagccagtcaccaagatcctggttgaatcgtgcactgatatcgctaaagagctgtacctgggcgctgtcgttgaccgttcgagccgtcgcatcgtgttcatggcttccaccgaaggtggcgtggacatcgagaaaatcgctcacgacactccagaaaaaattctgaaagccactatcgatccactggttggcgctcagccattccagggtcgcgagctggcattccagctgggtctggaaggcaagcaggttgctcagttcgccaagatcttcgtaggtctggccaagctgttcaaggatcacgacctggctctgctggaagtgaacccgctggtgatcaaggctgacggcgatctgcactgcctggacgccaagatcaacatcgacgccaacgcaatgtaccgccagcctaagctgaagactttccacgatccgtcgcaggacgatccgcgcgaagcgcacgctgccaagttcgaactgaactacgtagcactggaaggcaacatcggctgcatggtgaacggtgccggcctggccatgggtaccatggacatcgtcaacctgcacggcggcaagccagccaacttcctcgacgtaggtggtggtgctaccaaagaacgcgtaaccgaagctttcaaaatcattctgtccgacagcaatgtcgctgcagtactggttaacatcttcggcggcatcgttcgttgcgacatgattgccgaaggcatcatcggtgcagtgaaagaagtcggcgtgaaaatcccggttgttgttcgtcttgaaggcaacaacgctgaactgggcgctaaagtactggcagaaagcggtttgaacatcatcgctgctaccagcctgaccgacgctgctcaacaagtcgttaaagctgcggagggcaagtaa

SEQ ID NO: 93886 - protein, 388 aa, Pseudomonas fluorescens PfO-1
MNLHEYQGKQLFAEYGLPVSTGFAVDTPEAAAEACDKIGGNEWVVKAQVHAGGRGKSGGVKLVRSKEDAKAFAQQWLGKRLVTYQTDANGQPVTKILVESCTDIAKELYLGAVVDRSSRRIVFMASTEGGVDIEKIAHDTPEKILKATIDPLVGAQPFQGRELAFQLGLEGKQVAQFAKIFVGLAKLFKDHDLALLEVNPLVIKADGDLHCLDAKINIDANAMYRQPKLKTFHDPSQDDPREAHAAKFELNYVALEGNIGCMVNGAGLAMGTMDIVNLHGGKPANFLDVGGGATKERVTEAFKIILSDSNVAAVLVNIFGGIVRCDMIAEGIIGAVKEVGVKIPVVVRLEGNNAELGAKVLAESGLNIIAATSLTDAAQQVVKAAEGK

SEQ ID NO: 93887 - DNA, 1194 bp, Rhodobacter sphaeroides 2.4.1
  CDS (1)..(1194): transl_table=11
atgaacatccacgaataccaggcgaaggcgctcctgcgcagctacggtgcgccggtgtccgacggccgggtcgtgctgaaggccgacgaagccaaatccgcggcaggcgagctcggcgggccgctctgggtcgtcaaggcgcagatccatgcgggcggacgcggcaagggcaaattcaaggagccggaagcgggcgagaagggcggcgtgcgtctggccaagtccgtgggcgaagcggccgagcttgccaagcagatgctgggccgcacgctcgtcacccaccagaccggcccggccggcaagcaggtgaaccgcatctacatcgaggaaggctcggacattgcgcgcgagctctacctcgcgctgctggtggaccgcggcacctcgcgcatctccttcgtcgtctcgaccgaaggcgggatggacatcgaggaagtggcggcctcgacgcccgagaagatcgtctccttctcggtcgatccggcctcgggcctgtcggacttccacggccgccgcgtcgccttcgccctcgggctcgaaggcgcgcaggtcaagcaatgcgtgcagctggtcaagaacctctaccgcgccttcgtcgagaaggacatggagatgctcgagatcaacccgctgatcgtcatgaccgacggcaacctcaaggtgctcgacgccaaggtgggcttcgacaacaacgcgctctaccgccagtccgacgtcatggcgctgcgcgacgagaccgaagaggatccgaaggaactcgcggcctcgaagttcgacctgaactacatcgcgctcgacggcgagatcggctgcatggtgaacggcgcgggcctcgccatggccacgatggacatcatcaagctctacggcgcggagcctgcgaacttcctcgacgtgggcggcggcgccacgaaggagaaggtgaccgaggccttcaagatcatcacctcggacccgaacgtgaagggcatcctcgtcaacatcttcggcggcatcatgcgctgcgacatcatcgcggaaggcatcatcgccgcggtgaaggaagtggggctgcaggttccgctggtcgtgcgcctcgagggcacgaacgtcgagaagggcaaggagatcatcgcgaattccggcctcaacgtcatcgcgggcgacaatctgtcggacgcggcacagaagatcgtcaaagcggtgaagggataa

SEQ ID NO: 93888 - protein, 397 aa, Rhodobacter sphaeroides 2.4.1
MNIHEYQAKALLRSYGAPVSDGRVVLKADEAKSAAGELGGPLWVVKAQIHAGGRGKGKFKEPEAGEKGGVRLAKSVGEAAELAKQMLGRTLVTHQTGPAGKQVNRIYIEEGSDIARELYLALLVDRGTSRISFVVSTEGGMDIEEVAASTPEKIVSFSVDPASGLSDFHGRRVAFALGLEGAQVKQCVQLVKNLYRAFVEKDMEMLEINPLIVMTDGNLKVLDAKVGFDNNALYRQSDVMALRDETEEDPKELAASKFDLNYIALDGEIGCMVNGAGLAMATMDIIKLYGAEPANFLDVGGGATKEKVTEAFKIITSDPNVKGILVNIFGGIMRCDIIAEGIIAAVKEVGLQVPLVVRLEGTNVEKGKEIIANSGLNVIAGDNLSDAAQKIVKAVKG

SEQ ID NO: 93889 - DNA, 1161 bp, Geobacter metallireducens GS-15
  CDS (1)..(1161): transl_table=11
atgaacattcacgagtatcaggcaaaggcgatactaaggaatttcggcgtacctgtcccggacgggcatgtgtgctacaacggggcgagcgcgcgggagtgggcgaagcggctgggggatggcccctgggtggtgaaggcccagatccatgccggtgggcgcggcaagggcggaggggtcaaactggcccgcaccaaccaggaagtccagcaaatagcccgggacatgctggggatgacgctcaggacccatcagaccgggccggaagggaaagtggtcacccgggtcctggtggaaaacggctgcaacatcgaccgggaactgtacgtgagccttctggtggaccgggccacctcccgggtcaccgtcatggcctccaccgaagggggaatggacatcgaagaggtggcggcaaagaccccggagaagatcttccgggaggcgatcgatcccctggtggggctcaccccgttccagagccgcaacctcgccttcagcctggggctgacggggaagctcacccccaaggcggtcaacctgctggaagggctctacaccacctttctcgcctgtgactgttcccttctggagatcaaccccctggtggtcaccaaggaaggagacctcctcgccctggatgccaaattcggcttcgacgacaatgctgtcttcaaacatccggggatagcggatttcagggattacaacgaagaagaccccaacgaggtggaagcgtcccagcacgacctctcctacgtatccctgaacggcaacatcggctgcctggtcaacggcgccggtctggccatggccaccatggacatcatcaaattctccggcggcgagccggccaacttcctggacgtgggaggcggggccaccattgagcgggtcaccgaggcgttcaagatcatcctttccgacaagaacgtcaaaggaatcttcgtcaacatcttcggcggcatcatgaagtgcgacgtcatcgccaccggggtcatcgaggcggcccggcaggtatcgctccaggtgcctttggtggtacgtctcgaagggaccaacgtggaaatcggcaagaaaatgctggccgagagcggcctcaacatagtcgccgccgacggtatggccgatggcgcccaaaaaatcgtccaggccgttgcctga

SEQ ID NO: 93890 - protein, 386 aa, Geobacter metallireducens GS-15
MNIHEYQAKAILRNFGVPVPDGHVCYNGASAREWAKRLGDGPWVVKAQIHAGGRGKGGGVKLARTNQEVQQIARDMLGMTLRTHQTGPEGKVVTRVLVENGCNIDRELYVSLLVDRATSRVTVMASTEGGMDIEEVAAKTPEKIFREAIDPLVGLTPFQSRNLAFSLGLTGKLTPKAVNLLEGLYTTFLACDCSLLEINPLVVTKEGDLLALDAKFGFDDNAVFKHPGIADFRDYNEEDPNEVEASQHDLSYVSLNGNIGCLVNGAGLAMATMDIIKFSGGEPANFLDVGGGATIERVTEAFKIILSDKNVKGIFVNIFGGIMKCDVIATGVIEAARQVSLQVPLVVRLEGTNVEIGKKMLAESGLNIVAADGMADGAQKIVQAVA

SEQ ID NO: 93891 - DNA, 1197 bp, Syntrophus aciditrophicus SB
  CDS (1)..(1197): transl_table=11
gtgcgacgcgacggattgcatgggaaaatgaagatttatgaatatcaggtaaaagagtttttccgcagcttcggcatacccacaccccggggtgctgcaggaaagacatcggatgaaattgtcaccgccgcgcgatcgctcggcgtcatgccggttgtcctgaagtcacagatcaaggcgggaggcagaggcaaggccgggggaatccggaccgcaaacaccctggaagaggcgggcctgcaggcaattgatcttctcggcagccggctggtgacagctcaaaccggaccggccggggagcaggtcaacagcctgctcctggaagaacgcattgaccacgaacgggaactctatgtgggaattctggtggacagggaaacagggaggccggctcttctggtcagcggcgaaggcggtgttgatatcgaaaaactcggccgcgaagcgccgggacagattctctgcgaatccattgatcctgcttacggcctgcggtcgtttcaagcttcacgcgtctttctttcccttgggcttccgtctgcttcagcagcccgctgcgcggaattgtctctgagcctctacaggctgttcatggaaatggactgttccgatgtggagatcaatcccctcgccctcacgacatcgggagaacccgtcgccctggatggcaaagtcaatgtagacgacaacgccctgtaccgtcacccgcccctggcctccctgcatgagaaggaagaggagaacgccctggaagccgccgcgtcggcgctgggattgaattacatcaaattgaacggcagtgtgggctgcatggtgaacggggccgggctggccatggcgaccatggatctcatcaagatgacaggcgccgagccggcgaattttctcgatgtgggaggaggggcgagcgtttccaggatcagagaggggcttcgaatcgtccttgccgacaggaatgtcaagatactcttcgtcaacatcttcggtggcatactccgctgcgacaccgtcgccgagggtattgcccagggcgtaagagacctgtccatcagcgttccggtggtgatccgactggagggaaccaacagggatgagggactgaagattctatcctcctcagggctcaattttatccaggtaaccgacctgagggaagccgtactgcggatcggagaagaggtcgcgagggcgggatga

SEQ ID NO: 93892 - protein, 398 aa, Syntrophus aciditrophicus SB
MRRDGLHGKMKIYEYQVKEFFRSFGIPTPRGAAGKTSDEIVTAARSLGVMPVVLKSQIKAGGRGKAGGIRTANTLEEAGLQAIDLLGSRLVTAQTGPAGEQVNSLLLEERIDHERELYVGILVDRETGRPALLVSGEGGVDIEKLGREAPGQILCESIDPAYGLRSFQASRVFLSLGLPSASAARCAELSLSLYRLFMEMDCSDVEINPLALTTSGEPVALDGKVNVDDNALYRHPPLASLHEKEEENALEAAASALGLNYIKLNGSVGCMVNGAGLAMATMDLIKMTGAEPANFLDVGGGASVSRIREGLRIVLADRNVKILFVNIFGGILRCDTVAEGIAQGVRDLSISVPVVIRLEGTNRDEGLKILSSSGLNFIQVTDLREAVLRIGEEVARAG

SEQ ID NO: 93893 - DNA, 1200 bp, Novosphingobium aromaticivorans DSM 12444
  CDS (1)..(1200): transl_table=11
atgaacgtccatgaataccaggccaaggaactgctcgcgaagtatggtgtgggcatcccggcaggcatcgccgcgctgacggtcgaggaagccgtcgccgctgccaagcagcttcccggaccgctttacgtcgtcaaggcgcagatccacgccggcggccgcggcaagggcaagttcaaggaactccccgccgacgccaagggcggcgtgcgcctcgccaagagcatcgaggaagtcgaggctttcgccaaggaaatgctcggcaacaccctcgtcaccgtgcagaccggtgaagccggcaagcaggtcaaccgcctctacgtgaccgacggcgtcgacatcgacaaggaatactacctctcgatggtcgtcgatcgcgccaccggccgcgtcgcgatcatcgtgtcgaccgaaggcggcatggacatcgaggaagtcgcccactcgaccccggaaaagatcgccaccatcgtgatcgatcccgccgaaggcttcatgccgcaccacggccgcgccgtcggtttcgcgctcaagctttcgggtgacctgctcaagcaggccgccaagatcgccgagcagctctacaccgccttcgtcgcgctcgactgctcgatgctcgaaatcaacccgctggtgcagaccaaggatggcaacctcctcgtgctcgacaccaagatgagcttcgattcgaacgcgctctatcgtcaccccgatgtcgtcgccctgcgcgacgaaaccgaggaagacccggccgagatcgaggccagcaagtacgacctcgcctacatcaagctcgacggcaacatcggctgcatggtcaacggcgcgggccttgccatggcgacgatggacatcatcaagctgaacggcgaattcccggcgaacttcctcgacgtgggcggcggcgccaacaaggaaaaggtcaccgcagccttcaagatcatcctcaaggacccggccgtgaagggcattctcgtcaacatcttcggcgggatcatgaagtgcgacatcatcgccgagggcatcgttgccgcggcgaaggaagtgaacctctcggttccgctggtcgttcgcctcgaaggcaccaacgtccagcagggcaaggacatcctcgccaactcgggcctgccgatcgttcccgccaacgacctcggcgatgccgccaagaagatcgttgccgaagtgcgcgcggtcgcctga

SEQ ID NO: 93894 - protein, 399 aa, Novosphingobium aromaticivorans DSM 12444
MNVHEYQAKELLAKYGVGIPAGIAALTVEEAVAAAKQLPGPLYVVKAQIHAGGRGKGKFKELPADAKGGVRLAKSIEEVEAFAKEMLGNTLVTVQTGEAGKQVNRLYVTDGVDIDKEYYLSMVVDRATGRVAIIVSTEGGMDIEEVAHSTPEKIATIVIDPAEGFMPHHGRAVGFALKLSGDLLKQAAKIAEQLYTAFVALDCSMLEINPLVQTKDGNLLVLDTKMSFDSNALYRHPDVVALRDETEEDPAEIEASKYDLAYIKLDGNIGCMVNGAGLAMATMDIIKLNGEFPANFLDVGGGANKEKVTAAFKIILKDPAVKGILVNIFGGIMKCDIIAEGIVAAAKEVNLSVPLVVRLEGTNVQQGKDILANSGLPIVPANDLGDAAKKIVAEVRAVA

SEQ ID NO: 93895 - DNA, 1164 bp, Francisella tularensis subsp. holarctica
  CDS (1)..(1164): transl_table=11
atgaacttacatgaatatcaagctaaagatcttttagaaagctatggtctaaaagttcaaaaaggtatcgtagctcataacccaaatgaagctgctcaagcatttgaccaattaggtggcaaatttgctgtggttaaagctcaggtacatgctggtggtcgtggtaaagctggtggtgtaaaggttgttaaatcatctcaagaagctcgtgaagtagcagaaagcttaatcggtaaaaatcttgttactttccaaactgatgctgaaggtcagccagttaattctgtaggtatatttgaagatgtataccctgttactcgtgagttataccttggtgcggtagttgatagatctagccgtaaagtaacattcatggcttcaactgaaggcggtgtagatattgaagaagttgcacacaactctcctgaaaaaatccttaaagtagaagtagatcctttagttggcttacaacctttccaagctcgtgaagtagctttcaagcttggtctagaaggcaagcaaatcaatgattttgttaaaactatgctaggcgcttacaaagcattcatcgaatgtgattttgccctatttgaaatcaaccctcttgcagttagagaaaacggagagattgtctgtgttgatggtaaaatcaaccttgattcaaatgctctttatagacaccctaaacttttagctctaagagacaaatctcaagaaaatgctaaagaacttaaagcttcagagcatgagctaaactatgtagctcttgaaggtaacatcggttgtatggtaaacggtgctggtctagcaatggctactatggatattatccaattatacggtggtaagcctgctaacttcctagatgtaggtggtggtgctactaaagagagagtaatcgaagctttcaaactaatcctagatgatgaaaatgtaaaagctgttttaattaacatcttcggtggtattgttcgttgtgatatgatcgctgaagcaattattgaagctgttaaagaagtaaatgtaactgtaccagtagttgttcgtctagaaggtaacaatgcagaaaaaggtgctaaaatattagctgattcaggtttaaaactaatacctgctgatggtttagctgatgctgctgataaagttgtgaaatcactaggttaa

SEQ ID NO: 93896 - protein, 387 aa, Francisella tularensis subsp. holarctica
MNLHEYQAKDLLESYGLKVQKGIVAHNPNEAAQAFDQLGGKFAVVKAQVHAGGRGKAGGVKVVKSSQEAREVAESLIGKNLVTFQTDAEGQPVNSVGIFEDVYPVTRELYLGAVVDRSSRKVTFMASTEGGVDIEEVAHNSPEKILKVEVDPLVGLQPFQAREVAFKLGLEGKQINDFVKTMLGAYKAFIECDFALFEINPLAVRENGEIVCVDGKINLDSNALYRHPKLLALRDKSQENAKELKASEHELNYVALEGNIGCMVNGAGLAMATMDIIQLYGGKPANFLDVGGGATKERVIEAFKLILDDENVKAVLINIFGGIVRCDMIAEAIIEAVKEVNVTVPVVVRLEGNNAEKGAKILADSGLKLIPADGLADAADKVVKSLG

SEQ ID NO: 93897 - DNA, 1167 bp, Saccharophagus degradans 2-40
  CDS (1)..(1167): transl_table=11
atgaatttacatgaatatcaaggcaaacagctttttgctgaatatggtttgccagtatctaaaggcatagctgcagaaactcctgcagaagcggcagcagctgcagacattattggtggtgataagtgggttgttaaagctcaggttcacgctggtggtcgcggtaaagcgggcggcgttaaattggtttctagcaaagcagaaatcgaagagttcgctaaaaagtggttaggtaataacttaattacttatcaaacagatgaaaatggtcagccagttagccgtattttggttgaaagctgcaccgatatcgctgacgaattgtacttgggtgcagttgtagaccgttctactcgtcgcgtaatttttatggcgtctactgaaggcggcgtagagattgaaaaagttgctgaagaaactccagaaaaaatcttaaaagcgattatcgatcctttgactggcgcacagccatatcaagctcgcgaattaggttttaaattgggcttaaacccagttcaaatcaagcaattcacccaaatctttttaggtttggcgaaaatgtttgttgataaagacttggctcttttagaaatcaacccattggttattactgatgaaggtaacttgcactgcctagacgctaaagtagctatcgacggcaacgcaatgtaccgtcagcctgcgcttaaagaaatgcacgatccttcacaagaagacgagcgtgaagcgcatgcagctaaatgggaacttaactacgtagcactagatggcaacatcggctgtatggttaacggtgctggtttggcaatgggtactatggatatcgtgaaattacacggtggccaacctgcaaacttcctagacgtaggcggcggcgcaactaaagagcgcgttgttgaagcattcaaaattattctttctgacgacaacgtaaaagctgttttaattaacatctttggcggtattgttcgttgtgacctgattgcagaaggtgtaatcggcgcagtggaagaggttggtgttaaggttcctgttgttgttcgtttagaaggtaacaacgcagaattgggtgcaaaagtgttggcagatagtggcctaaacattattgctgcagaaagcttaactgatgctgcagtacaagttgttaaagctgcggagggcaaataa

SEQ ID NO: 93898 - protein, 388 aa, Saccharophagus degradans 2-40
MNLHEYQGKQLFAEYGLPVSKGIAAETPAEAAAAADIIGGDKWVVKAQVHAGGRGKAGGVKLVSSKAEIEEFAKKWLGNNLITYQTDENGQPVSRILVESCTDIADELYLGAVVDRSTRRVIFMASTEGGVEIEKVAEETPEKILKAIIDPLTGAQPYQARELGFKLGLNPVQIKQFTQIFLGLAKMFVDKDLALLEINPLVITDEGNLHCLDAKVAIDGNAMYRQPALKEMHDPSQEDEREAHAAKWELNYVALDGNIGCMVNGAGLAMGTMDIVKLHGGQPANFLDVGGGATKERVVEAFKIILSDDNVKAVLINIFGGIVRCDLIAEGVIGAVEEVGVKVPVVVRLEGNNAELGAKVLADSGLNIIAAESLTDAAVQVVKAAEGK

SEQ ID NO: 93899 - DNA, 1164 bp, Methylobacillus flagellatus KT
  CDS (1)..(1164): transl_table=11
atgaatttgcatgagtatcaggccaaggcgctgctgcagcgttatggcgtgaatgtgccgcgcagtcaggtggccgagacggcacaggcagcagtggaagccgcgcgggccctcgaaggcgatgcctgggtggtgaaggcgcaggtgcatgccggcggtcgcggcaaggccgggggcgtcaagctggtgcgcactctggacgaggtgcaggatattgccgtcagcctgcttggcaagcgtctggtcacctaccagaatgcaccggatgggcagccggtggaaaaggtgctggtcgaggcaaccctgccaatcgcccgtgaattgtatgtctccatgctcgtggaccgttctctggagcgtgtcgtattggtagcgtcggcggcaggtggtatggaaatcgaggaaatcgccaaggatagtccggaaaaaatcctgcaggaagtctgtgatccgctgaacgggctggtcgattaccaggcacgcaatatcgcatttgcactaggcctggttggtgaccaggttgcggcgttcacgcggctggccaagggcttgtaccgcctgttcaaggaaaacgacctggccttgctcgagatcaatccgctgatcgtcactgcggaaggtgccctggtagcgctggattgcaagatgagcgttgatgataatgcgctctaccggcgccgcgagcttgcggagcagcgcgactggagccaagacgacgccaaggaggccgaggcgcacaatgctgggctcaactatattgcattgaatggcaatattggctgtatggtgaatggcgccggcctggccatggcgaccatggacctgatcaagctgcacggtggcgcgcccgccaacttcctcgatgttggcggtggcgcaactgcgaccacggtggcgcgtgcgttcaagatcattctcgccgaccccaacgtcaaggccattctcgtcaacatctttggcggcatcatgcgctgcgacatcattgccgaaggcatcatcactgctgtcaaggaggtggggatcgagattcccgtggtggtgcgtctggaagggaccaacgttgagcttggccgcaagatgctgagcgaaagcggcttatccattatttctgccgcaggcctgacagatgccgcgcagcaggcagtagcagcagtgaaggtgtaa

SEQ ID NO: 93900 - protein, 387 aa, Methylobacillus flagellatus KT
MNLHEYQAKALLQRYGVNVPRSQVAETAQAAVEAARALEGDAWVVKAQVHAGGRGKAGGVKLVRTLDEVQDIAVSLLGKRLVTYQNAPDGQPVEKVLVEATLPIARELYVSMLVDRSLERVVLVASAAGGMEIEEIAKDSPEKILQEVCDPLNGLVDYQARNIAFALGLVGDQVAAFTRLAKGLYRLFKENDLALLEINPLIVTAEGALVALDCKMSVDDNALYRRRELAEQRDWSQDDAKEAEAHNAGLNYIALNGNIGCMVNGAGLAMATMDLIKLHGGAPANFLDVGGGATATTVARAFKIILADPNVKAILVNIFGGIMRCDIIAEGIITAVKEVGIEIPVVVRLEGTNVELGRKMLSESGLSIISAAGLTDAAQQAVAAVKV

SEQ ID NO: 93901 - DNA, 1212 bp, Ralstonia metallidurans CH34
  CDS (1)..(1212): transl_table=11
gtgaacattcacgaatatcaggccaaggagctgctgcggcgctacgacgtcgccgtgccaaacggctgcgtggcatttacccccgaagaggctgcgcaggccgcacgcaagctgggcgggcccatctgggtggtgaagtcgcagatccacgccggtggacgcggcgcgggccggtttgccggcgatccatccggcaagggcggcgtgcgcgtggtgaagtccatcgacgaggtgcaggcaaacgcctcgcagatgctgggcgccacgctggtgaccaagcagaccgggccggccgggcgcgaagtgcgacggctatatatcgaggaaggctgcgacatcgcgcgcgagctctatcttgggatgctgatcgaccgcgccacatcgcgcatcaccgtcatggcatccacggaaggcggcatggaaatcgaggaggttgccgcgcataccccggagaagatcctgaaagtggcgatcgatcccgccagtggtatccagccgttccatgcccggcgcctggcattcgggctgggtctgtccggcaagcaggtggcggcggccacgcgcttcatcctgtctgcctatcgcgcatttacggaactcgatgcctcgattgtcgagatcaatccgctcgtggtgacaggcagcggcgacgtgatcgcgctcgacgccaagttcaacttcgacgacaacgcccttttccggcatcccgatatcgaagcgatgcgcgacgaaagcgaggaagatccggccgaaaccgaagccgccaggcacgcgctgaactacgtgcggctcgacggcaacatcggctgcatggtcaatggcgcggggctggcgatggccacgatggacatcatcaagctttacggcggcgagccggccaacttcctcgacgtaggcggtggcgccaccaaggaacgcgtgacggcggcgttccggctcatcctggccgatcccaaggtggaaggcatcctggtcaacatcttcggcggcatcatgcgctgcgatgtcattgccgaaggcgtgatcgccgccgcgcgcgatgtcgacctgacagtgccgctggtggtgcgcctggaaggcaccaatgtcgaactaggcaagaccatcctgcgcgattcgggactgccgatcctatcggccaatcatctcgccgacgcggcggagaaagtcgtggccgcggtccgggcccatcagaagaaaggaggcaagtga

SEQ ID NO: 93902 - protein, 403 aa, Ralstonia metallidurans CH34
MNIHEYQAKELLRRYDVAVPNGCVAFTPEEAAQAARKLGGPIWVVKSQIHAGGRGAGRFAGDPSGKGGVRVVKSIDEVQANASQMLGATLVTKQTGPAGREVRRLYIEEGCDIARELYLGMLIDRATSRITVMASTEGGMEIEEVAAHTPEKILKVAIDPASGIQPFHARRLAFGLGLSGKQVAAATRFILSAYRAFTELDASIVEINPLVVTGSGDVIALDAKFNFDDNALFRHPDIEAMRDESEEDPAETEAARHALNYVRLDGNIGCMVNGAGLAMATMDIIKLYGGEPANFLDVGGGATKERVTAAFRLILADPKVEGILVNIFGGIMRCDVIAEGVIAAARDVDLTVPLVVRLEGTNVELGKTILRDSGLPILSANHLADAAEKVVAAVRAHQKKGGK

SEQ ID NO: 93903 - DNA, 1179 bp, Acidobacteria bacterium Ellin345
  CDS (1)..(1179): transl_table=11
atgaaaattcacgaataccagggcaaggcgattctgcgtaagtatggcgtggccgtcccccgcggagaaatggtgactacgcgcgaagaagccgagcgcgtggccaacgacctgatgcacgatggcgccaagggcgtcgtcgtcaaagcccagattcacgccggaggccgcggcaaaggcggcggcgtaaagatcgccaagagcgtggacgaagccggccagcttgccggcaaaatcctcggcatgaccctcatcacccaccagaccgggcccgagggtaagaaagtgcagcgcctgctgattgaagagacgctgccgatcgaacgcgagctttatctctccatcgtgctcgaccgcagcaacggcaagccggtgttcatggcctccgccgcgggcggcatggagatcgaagaagtcgccgcgaaagaccccaacgcgatcatcaaggaatggattgagcccggttacggactgggtgcgttccaggcgcgcaagatcgccttcaaactcggtctgaagccggaactcattgggcaggctgtgaagttcatgcaggcgctctacaagacctacgacgagaccgacgcctcgctggtggaaatcaatccgttcatcaccaccagtgacaaccggctcttcgcgctcgatgccaagttcaacttcgacgacaacggactcttccgccatcctgacctgaaggacctgcgcgacgttaccgaagaagacccgctcgaagtggaagccagcaagtacggcctcaactacatcaagctcgacggcaccgtgggctgcatggtcaacggcgccggcctcgcgatggcgaccatggacatcatccagtacgccggcggcatgcctgcgaacttcctcgatgtgggcggcggcgccaacgccgagcaagtcacccacgcgtttgaaatcctgctcagcgacaagaacgtgaaggccgtgctgatcaatatctttggcggcatcctgcgcgtagacacgctggccaccggcgtggtgcaggccgcaacccaaaccaagattcaattgccgatcgtccttcgactcgaaggtacgaacgtagagcagggccgcgaaatccttcagaagagcggattgaacttcatcgtcgcagagaccatgaaagacgccgctgaaaaggtcgttgcagccgcgaaaggggtgaagtaa

SEQ ID NO: 93904 - protein, 392 aa, Acidobacteria bacterium Ellin345
MKIHEYQGKAILRKYGVAVPRGEMVTTREEAERVANDLMHDGAKGVVVKAQIHAGGRGKGGGVKIAKSVDEAGQLAGKILGMTLITHQTGPEGKKVQRLLIEETLPIERELYLSIVLDRSNGKPVFMASAAGGMEIEEVAAKDPNAIIKEWIEPGYGLGAFQARKIAFKLGLKPELIGQAVKFMQALYKTYDETDASLVEINPFITTSDNRLFALDAKFNFDDNGLFRHPDLKDLRDVTEEDPLEVEASKYGLNYIKLDGTVGCMVNGAGLAMATMDIIQYAGGMPANFLDVGGGANAEQVTHAFEILLSDKNVKAVLINIFGGILRVDTLATGVVQAATQTKIQLPIVLRLEGTNVEQGREILQKSGLNFIVAETMKDAAEKVVAAAKGVK

SEQ ID NO: 93905 - DNA, 1194 bp, Silicibacter sp. TM1040
  CDS (1)..(1194): transl_table=11
atgaacatccacgaatatcaggccaaggccctccttcgcagctacggcgctccggtttcggacgggcgcgtggtgatgaaagcagacgaagccaaaaccgcagcaggcgagcttgacggcccgctttgggtcgtgaaggcccagatccacgcaggtggtcgcggcaagggctccttcaaggaagccgacgccggtgaaaaaggcggcgtacgcctgaccaaatcggtcgaagaagccgccgaagaagccaagaagatgctgggccgcaccctcgtgacccaccagaccggcccggcgggcaagcaggtgaaccgcatctacatcgaggcgggctctggcatccagaccgagctgtatctggcgctgctggtggatcgcgtgacctcccgcgtgtcttttgtctgctccaccgagggcggcatggacattgaagaagtcgccgctgagaccccggaaaagatcctgtcgttctccgttgatccggccaccggctatcaggcgtaccacgggcgccgcgttgccttctcgctcggccttgagggcgcgcaggtgaagcagtgcgtcaagctgatgggtcagctctaccaagccttcatcgagaaggacatggagatgctggagatcaacccgctgatcgtcgccgacaatggtgacctgaaagtgctggacgcaaaggtcggtttcgacggcaacgcgatctatcgccacgccgatatcgccgccctgcgcgacgagaccgaagaagaccccaaagagctcgaagcgtccaagtacgacctgaactacatcgcgctcgacggtgagatcggctgcatggtgaacggcgcgggtctggcgatggccaccatggacatcatcaagctctatggagcagagcctgcgaacttcctcgatgtgggcggcggcgccaccaaagagaaagtgaccgaagcgttcaagatcatcacctccgacaagaacgtcaaaggtatcctcgtgaacatctttggcggcatcatgcgctgcgacgtgatcgcagaaggcgtgattgcagccgtgaaagaagtgggccttgaggtgccgctggttgtgcgtctcgaaggcacaaacgtcgagaagggcaaagaaatcatcgcgaactccggtcttaacgtgatcgcggcagatgatctgtccgatggggccgagaagatcgtgaaagcggtaaagggttaa

SEQ ID NO: 93906 - protein, 397 aa, Silicibacter sp. TM1040
MNIHEYQAKALLRSYGAPVSDGRVVMKADEAKTAAGELDGPLWVVKAQIHAGGRGKGSFKEADAGEKGGVRLTKSVEEAAEEAKKMLGRTLVTHQTGPAGKQVNRIYIEAGSGIQTELYLALLVDRVTSRVSFVCSTEGGMDIEEVAAETPEKILSFSVDPATGYQAYHGRRVAFSLGLEGAQVKQCVKLMGQLYQAFIEKDMEMLEINPLIVADNGDLKVLDAKVGFDGNAIYRHADIAALRDETEEDPKELEASKYDLNYIALDGEIGCMVNGAGLAMATMDIIKLYGAEPANFLDVGGGATKEKVTEAFKIITSDKNVKGILVNIFGGIMRCDVIAEGVIAAVKEVGLEVPLVVRLEGTNVEKGKEIIANSGLNVIAADDLSDGAEKIVKAVKG

SEQ ID NO: 93907 - DNA, 1170 bp, Haemophilus somnus 129PT
  CDS (1)..(1170): transl_table=11
atgaatttacatgagtatcagagtaaaaaactttttgcagattatggtttacctgtaactaaaggttatgtttgtgaaaatgttgaacaggcgttaagtgcgattgagaaattatcaggttctcaatggattgcaaaatgtcaaatccatgccggtggacgtggtaaagctggtggagtaaaagtggttaaatcagcacaagaagtgcggtcgttttttactaagtttttaggacagcgtttagttaccgttcaaacaaatgaacagggacaaccgattcatcaaatttatcttgaaccctgtgcggaaattcaaaaagaattgtacttgagtgcaattattgaccgtagctctcaacgtattgtctttatggcatcaagtgaaggcggtatggatatagaagaagtagcagaaaaaacaccgcacttattgcatagggtaactatcgatcctttggttggagcgatgccatatcaagggcgagaattggcatttaaattaggattatcagggaaacaaattcagcaattcagccaaattttttgccaacttgccaaattatttgttgaaaaagatttatccctactggaaatcaacccattggttattttaaaaaacgatgaattattttgcttagacgcaaaagttgtggttgatgataatgcgttgtatcgtcatcccgacttgttttctatgcgtgatttaacgcaagaagatcctcgtgaggctgaggctgaaaagtggaatttaaattacgttgcgttagatgggaatattggttgtatggtcaatggtgccggtttagccatgggaacgatggatattattaaattacatggcggacgaccagcaaatttccttgatgtcggtggtggagcaacaaaagaacgtgttatggaagcattcaaaattattttaacggacagtgcggttaaagccgtattagtgaatatttttggcggtattgtgcgttgtgatttaattgctaaaggaattgtttccgcaatcaatgaaattggtgtgagtgttccagttattgtgcgtttggaaggaacaaatgcggacttaggatgtgaaattttagcacaaagtaacttgaatttaattgctgtaaacagcttaactgaagcagcggaacaagcagttaatgcagcaaaggagagtgaataa

SEQ ID NO: 93908 - protein, 389 aa, Haemophilus somnus 129PT
MNLHEYQSKKLFADYGLPVTKGYVCENVEQALSAIEKLSGSQWIAKCQIHAGGRGKAGGVKVVKSAQEVRSFFTKFLGQRLVTVQTNEQGQPIHQIYLEPCAEIQKELYLSAIIDRSSQRIVFMASSEGGMDIEEVAEKTPHLLHRVTIDPLVGAMPYQGRELAFKLGLSGKQIQQFSQIFCQLAKLFVEKDLSLLEINPLVILKNDELFCLDAKVVVDDNALYRHPDLFSMRDLTQEDPREAEAEKWNLNYVALDGNIGCMVNGAGLAMGTMDIIKLHGGRPANFLDVGGGATKERVMEAFKIILTDSAVKAVLVNIFGGIVRCDLIAKGIVSAINEIGVSVPVIVRLEGTNADLGCEILAQSNLNLIAVNSLTEAAEQAVNAAKESE

SEQ ID NO: 93909 - DNA, 1167 bp, Shewanella sp. MR-4
  CDS (1)..(1167): transl_table=11
atgaatttgcatgagtatcaggcaaaatccctatttgccgaatatggtttaccagtgtcagaaggttttgcatgtgatacagcccaagaagctgtagaagcggcaggccgtattggcggaaatttatgggttgttaagtgtcaagtacacgcaggcggccgcggtaaagcgggtggcgttaaagtcactggcgataaagaagaaatcagagcctttgccgaacactggttaggcaaaaatctggtgacttatcaaacagatgagaaaggtcagcctgttgctaaaattttagtagaaagctgcaccgacatcgctaacgaactgtacttaggtgcagtagttgaccgtgctacccgtcgcgtggtgttcatggcttctactgaaggtggtgttgagattgagaaagtggccgaagaaacgccagaactcattcacaaagcgatcatcgatccactgactggtcctcaaccataccaagcacgtgatcttggcttcaaactgggcttaaacccaactcaaatgaagcaattcaccaagatctttatgggtctggcgactatgttcgttgatcacgatttcgcactgctggaaatcaacccactggttatcaccactgaaggtaacctgcactgcttagacggtaaaattggtatcgatggtaacgcactgttccgtcaaccaaaaatcaaagcaatgcacgatccatcacaggatgacgcccgtgaagctcacgctgcaatgttcgaactgaactatgttgcgctggacggaaacgtgggttgtatggtgaacggtgctggcctagcaatgggtactatggacatcgttaacctgcacggcggcaagccagctaacttcctcgacgtaggtggtggcgcgactaaagaacgtgttgctgaagcattcaagattattctgtctgacagcaatgtgaaagccgttctggttaacatcttcggtggtatcgtacgttgtgacatgatcgcagaaggtatcatcggcgctgttaaagaagttggcgttaaagttccagttgtagtgcgtttagaaggtactaacgctgaattaggccgtgaagtattagctaaatcaggtcttgatatcattgcagctaacagtctgactgatgcggctgagcaagtagttaaagctgcggagggcaaataa

SEQ ID NO: 93910 - protein, 388 aa, Shewanella sp. MR-4
MNLHEYQAKSLFAEYGLPVSEGFACDTAQEAVEAAGRIGGNLWVVKCQVHAGGRGKAGGVKVTGDKEEIRAFAEHWLGKNLVTYQTDEKGQPVAKILVESCTDIANELYLGAVVDRATRRVVFMASTEGGVEIEKVAEETPELIHKAIIDPLTGPQPYQARDLGFKLGLNPTQMKQFTKIFMGLATMFVDHDFALLEINPLVITTEGNLHCLDGKIGIDGNALFRQPKIKAMHDPSQDDAREAHAAMFELNYVALDGNVGCMVNGAGLAMGTMDIVNLHGGKPANFLDVGGGATKERVAEAFKIILSDSNVKAVLVNIFGGIVRCDMIAEGIIGAVKEVGVKVPVVVRLEGTNAELGREVLAKSGLDIIAANSLTDAAEQVVKAAEGK

SEQ ID NO: 93911 - DNA, 1176 bp, Alkalilimnicola ehrlichei MLHE-1
  CDS (1)..(1176): transl_table=11
atgaatctccatgaatttcaggctaaacacctgtttgctgattacgacatccccatcccacagggctacgtggcccgctccagcggcgaggcggtcgaagccgccggtcggctgggcggttccgtctgggtcgtcaaggcacaggtacacgccggcgggcgcggcaaggcaggcggggtcaaggtcctcaagaccaaagaagaagtagaagaattcaccgactccctcctgggctcccgcctcgtcacccaccaaaccgatgccaagggtcaacccatccacgccgttctggtcgagcagggcctcgacatcgcccgcgaactctacctgggcgccctagtggaccgcgcgagcaagcgcgtcaccttcatgggctccgcggccggcggcatggacatcgaggaggtcgccgccagcacccccgagaagatcctcaccctggccgtcgacccggccgccggcttccaggcctaccagggccggaagatggcctttgcgctgggcctcgaaggcaagcagatcggccaactggtcaagatcatgaaaagcctgtatcggatctttgaggagaaggatctgagcatgatcgagatcaacccgctgatcgtgaccggcgatggccagctgttggccctggacgccaaagtcaacgtggacgacaacgccgtcgagatcggccgtcagccgcagatcgccgacatgcgcgacatcacccaggaggatgaggccgaggtccaagccgccgagcacaacctcaactacattaccctggacggcaacatcggctgcatggtcaacggcgccggtctggccatggccaccatggacgtggtcaacctgcacggcggctcgccggccaacttcctggacgtgggtggtggcaccaccaccgaacgcgtcaccgcggccttcaagctgatcctctccagcgacacggtggagggcatcctggtgaacatcttcggtggcatcgtgcgctgcgacgtgatcgccgagggcatcatcgccgccgtcaaggaggtgggcgtggatgtccccgtggtggttcgcctggagggcaccaacgtcgagcagggcaagcagatgctggctgacagcggcatggacctgatccccgccgacgatctcaccgacgccgccaagaaggttgtggccgccgtcggcaaggccgcctga

SEQ ID NO: 93912 - protein, 391 aa, Alkalilimnicola ehrlichei MLHE-1
MNLHEFQAKHLFADYDIPIPQGYVARSSGEAVEAAGRLGGSVWVVKAQVHAGGRGKAGGVKVLKTKEEVEEFTDSLLGSRLVTHQTDAKGQPIHAVLVEQGLDIARELYLGALVDRASKRVTFMGSAAGGMDIEEVAASTPEKILTLAVDPAAGFQAYQGRKMAFALGLEGKQIGQLVKIMKSLYRIFEEKDLSMIEINPLIVTGDGQLLALDAKVNVDDNAVEIGRQPQIADMRDITQEDEAEVQAAEHNLNYITLDGNIGCMVNGAGLAMATMDVVNLHGGSPANFLDVGGGTTTERVTAAFKLILSSDTVEGILVNIFGGIVRCDVIAEGIIAAVKEVGVDVPVVVRLEGTNVEQGKQMLADSGMDLIPADDLTDAAKKVVAAVGKAA

SEQ ID NO: 93913 - DNA, 1194 bp, Hyphomonas neptunium ATCC 15444
  CDS (1)..(1194): transl_table=11
atgaacatccatgaatatcaggccaaggcgctgctcaaatccttcggggcgcctgtggcagaaggcgtgcctgtgctctcgctcgccgatgtgcagaaggcaatcgacaccctcccaggcccgctctgggtcgtgaaaagccagatccacgcaggtggccgcggcaagggcaaattcatcgaaaaagaagccggtgaaaaaggcggcgttcgcctcgccttcaacaaggaagacgtgaaaaagcacgctgaagcgatgctgggcaaccacctcgtcaccgcgcagacctctgccgccggcaaacaggtcaaccgcctctacatcgaagacggcgccgacatcgagaaagaactctacctctcgatcctcgtcgaccgcgccacctcgaacgtggccttcgtggtctccaccgaaggcggcatggacatcgaagcggtcgcccatgacacgcccgagaagatcctcaccgttcagatcgacccgatggccggcgtcacgcccgctgatgcggccaagatcaactcggccctgaacctttcaggttcggccgctgaagacggtctcaagctctacccgatcctctacaaagcctttgtcgagaaagacatggcgatgctggaagtgaacccgttgatcgtgatgaaggacggccatctgcgcgtcctcgacgcgaaagtgtcgttcgacggcaacgcgctgttccgccaccctgacgtcgccgccctcaaggacgagaccgaacaggacgccaaggaactcgaagcggctgaatgggaccttgcttacatcgccctcgacggcaccatcggctgcatggtcaacggcgcaggccttgccatggcaaccatggacatcatcaagctctatggcgaagagccagccaacttctgtgacgttggcggcggcgccggcaaggagaaggtggcagctgccttcaagatcatcatgaaggaccctaacgtgaagggtatcctcgtgaacatcttcggcggcatcatgaagtgcgatgtcatcgccgaaggcgtgatcgcagccgtgaaagaaaccaatcttgccgttccgctcgttgtccgcctcgaaggcaccaacgtcgacctcggcaagaagatcatccgcgagagcggcctgaacgtcattccggccgacgatctcgacgatgcagcccagaaaattgttaaagcggtgcggggatag

SEQ ID NO: 93914 - protein, 397 aa, Hyphomonas neptunium ATCC 15444
MNIHEYQAKALLKSFGAPVAEGVPVLSLADVQKAIDTLPGPLWVVKSQIHAGGRGKGKFIEKEAGEKGGVRLAFNKEDVKKHAEAMLGNHLVTAQTSAAGKQVNRLYIEDGADIEKELYLSILVDRATSNVAFVVSTEGGMDIEAVAHDTPEKILTVQIDPMAGVTPADAAKINSALNLSGSAAEDGLKLYPILYKAFVEKDMAMLEVNPLIVMKDGHLRVLDAKVSFDGNALFRHPDVAALKDETEQDAKELEAAEWDLAYIALDGTIGCMVNGAGLAMATMDIIKLYGEEPANFCDVGGGAGKEKVAAAFKIIMKDPNVKGILVNIFGGIMKCDVIAEGVIAAVKETNLAVPLVVRLEGTNVDLGKKIIRESGLNVIPADDLDDAAQKIVKAVRG

SEQ ID NO: 93915 - DNA, 1167 bp, Pseudomonas aeruginosa UCBPP-PA14
  CDS (1)..(1167): transl_table=11
atgaatctccacgaatatcagggtaagcagctgttcgctgaatacggcctgcctgtatccaagggctttgccgtagacacccccgaagaggccgcagaagcctgcgacaagatcggcggcagcgagtgggtcgtcaaagctcaggtgcacgccggcggccgcggtaaagcgggcggtgtgaagctggtgaagagcaaagaggacgccaaggcgttcgcccagcagtggctgggcaagaacctggtgacctaccagaccgacgccaacggccagccggtcagcaagatcctggtggagtcctgcaccgacatcgacaaggagctgtacctcggcgccgtcgtcgatcgttccagccgccgcatcgtgttcatggcttccaccgaaggtggcgtggacatcgagaaggtcgcccacgacactcccgagaagatcctcaaggtcaccatcgacccgctggtcggcgcgcagccgtaccagggccgcgagctggccttccaactgggcctgaagggcgaccagatcaagcagttcacccatatcttcgtcggcctggcgaagctgttccaggactacgacctggccctgctggaagtgaacccgctggtgatcaagaaagacggcaacctgcactgcctggatgccaagatcaacatcgacagcaacgccctgtaccgtcagccgaagctgcgcgccatgcacgacccgtcccaggacgacgcccgtgaagcccatgcgcagaagtgggagctgaactacgtcgcgctggaaggcaacatcggctgcatggtcaacggcgccggcctggccatgggtaccatggacatcgtcaacctgcacggcggcaagccggccaacttcctcgacgttggcggcggtgcgaccaaggagcgcgtgaccgaagcgttcaagatcatcctgtccgacagcaacgtgaaggctgtcctggtgaacatcttcggcggcatcgtgcgttgcgacatgatcgccgaaggcatcatcggcgccgtcaaagaagtcggcgtgaaggttccggttgtcgtccgcctggaaggcaacaacgctgaactgggtgccaaggtcctggccgaaagcggcctgaacatcatcgcggcaaccagcctgaccgacgctgcccagcaagtcgtcaaggccgcggagggtaagtaa

SEQ ID NO: 93916 - protein, 388 aa, Pseudomonas aeruginosa UCBPP-PA14
MNLHEYQGKQLFAEYGLPVSKGFAVDTPEEAAEACDKIGGSEWVVKAQVHAGGRGKAGGVKLVKSKEDAKAFAQQWLGKNLVTYQTDANGQPVSKILVESCTDIDKELYLGAVVDRSSRRIVFMASTEGGVDIEKVAHDTPEKILKVTIDPLVGAQPYQGRELAFQLGLKGDQIKQFTHIFVGLAKLFQDYDLALLEVNPLVIKKDGNLHCLDAKINIDSNALYRQPKLRAMHDPSQDDAREAHAQKWELNYVALEGNIGCMVNGAGLAMGTMDIVNLHGGKPANFLDVGGGATKERVTEAFKIILSDSNVKAVLVNIFGGIVRCDMIAEGIIGAVKEVGVKVPVVVRLEGNNAELGAKVLAESGLNIIAATSLTDAAQQVVKAAEGK

SEQ ID NO: 93917 - DNA, 1167 bp, Magnetococcus sp. MC-1
  CDS (1)..(1167): transl_table=11
atgaatattcatgagtaccaagccaaagagatcatcgccaagtttggcgtcaatgtccctcgcgggcgggtagcctataccccccaagaggcagagatggcggccaaagagctggacagtgaggtctttgtggtgaaagcccagatccacgcgggtggacgtggtaaagcgggcggcgtgaaggtggtaaaaaccaccgatgccgtgcgtgaagaggctagccgcatgcttggcttgacgttggtgacccatcaaaccggtcctgagggtaaagaagttaaacgcctctacgtggaagaggggtgtgacattgcccgggaactctatttgggtattgtgattgatcgggcgaccagccgtgtcacctttatggcctccactgaggggggaatggagattgaagaggtcgctgagaagagcccagagaaaattctgcgtgaagtggtcgacccagcggttggcttggttgctttccaagcccgcaacctggcgtttgggttgggactggaaggtaagcagattaacaaggcggtgcagctgatgagcggcctctataatgcgtttatggagaccgacgcctccctgatggagatcaacccattggtgatcaccggtgctggggatgttattgcgctggattgcaaaatgaattttgacgccaatgcgctctatcgccaaaaagctattgaagagctgcgggattttgatgaagagaatcctaaggagatcgaagcttctaagcacgagctaaactacatcgctctggatggcaatattggttgcatggtcaacggggccggtttggccatggcgaccatggatattatcaagataaagggtggcgcaccggccaactttttggacgttgggggtggtgccaccacagagcgggtcacagaagcgtttaagctgattctctccgatgaaaatgtaaaagcagttctggttaacatctttggtggcatcatgcgctgtgatgtgattgccaatggtgtggtggaggcggcaaagcaggtgaatctgaatgttcccctgatcgtccgtttggaaggcaccaatgtggagaagggcaaagaaattttggccaactcgggtctgccgatcatctctgccgataacttggacgatgccgcgaccaaagcggtagcctcgctgaaggagggctaa

SEQ ID NO: 93918 - protein, 388 aa, Magnetococcus sp. MC-1
MNIHEYQAKEIIAKFGVNVPRGRVAYTPQEAEMAAKELDSEVFVVKAQIHAGGRGKAGGVKVVKTTDAVREEASRMLGLTLVTHQTGPEGKEVKRLYVEEGCDIARELYLGIVIDRATSRVTFMASTEGGMEIEEVAEKSPEKILREVVDPAVGLVAFQARNLAFGLGLEGKQINKAVQLMSGLYNAFMETDASLMEINPLVITGAGDVIALDCKMNFDANALYRQKAIEELRDFDEENPKEIEASKHELNYIALDGNIGCMVNGAGLAMATMDIIKIKGGAPANFLDVGGGATTERVTEAFKLILSDENVKAVLVNIFGGIMRCDVIANGVVEAAKQVNLNVPLIVRLEGTNVEKGKEILANSGLPIISADNLDDAATKAVASLKEG

SEQ ID NO: 93919 - DNA, 1167 bp, Shewanella sp. ANA-3
  CDS (1)..(1167): transl_table=11
atgaatttgcatgagtatcaggcaaaatccctatttgccgaatatggtttaccagtgtcagaaggttttgcatgtgatacagcccaagaagctgtagaagcggcaggccgtattggcggaaatttatgggttgttaagtgtcaagtacacgcaggcggccgcggtaaagcgggtggcgttaaagtcactggcgataaagaagaaatcagagcctttgccgaacactggttaggcaaaaatctggtgacttatcaaactgatgagaaaggtcagccggttgctaaaattttagtagaaagctgcactgacatcgctaacgaactgtacttaggtgcagtagttgaccgcgctacccgtcgcgtagtgtttatggcgtcaactgaaggtggtgttgagattgagaaagtggccgaagaaacgccagaactcattcacaaagcgatcatcgatccactgactggtcctcaaccataccaagcacgtgatcttggcttcaaactgggcttaaacccaactcaaatgaagcaattcaccaagatcttcatgggtctggcgactatgttcgttgatcacgatttcgctctgctggaaatcaacccactggttatcaccactgaaggtaacctgcactgcttagacggtaaaattggtatcgatggtaacgcactgttccgtcaagcaaaaatcaaagcaatgcacgatccatctcaagatgacgcccgtgaagctcacgctgcaatgttcgaactgaactatgttgcgctagacggaaacgtaggttgtatggtgaacggtgctggcctagcgatgggtactatggacatcgttaacctgcacggcggcaagccagctaacttcctcgacgtaggtggtggcgcgactaaagaacgtgttgctgaagcattcaagatcattctgtctgacagcaatgtgaaagccgttctagttaacatcttcggtggtatcgtacgttgtgacatgatcgcagaaggtatcattggcgctgttaaagaagttggcgttaaagttccagttgtagtgcgtttagaaggtactaacgctgaattaggccgtgaagtattagctaaatcaggtcttgatatcattgcagctaacagtctgactgatgcggctgagcaagtagttaaagctgcggagggcaaataa

SEQ ID NO: 93920 - protein, 388 aa, Shewanella sp. ANA-3
MNLHEYQAKSLFAEYGLPVSEGFACDTAQEAVEAAGRIGGNLWVVKCQVHAGGRGKAGGVKVTGDKEEIRAFAEHWLGKNLVTYQTDEKGQPVAKILVESCTDIANELYLGAVVDRATRRVVFMASTEGGVEIEKVAEETPELIHKAIIDPLTGPQPYQARDLGFKLGLNPTQMKQFTKIFMGLATMFVDHDFALLEINPLVITTEGNLHCLDGKIGIDGNALFRQAKIKAMHDPSQDDAREAHAAMFELNYVALDGNVGCMVNGAGLAMGTMDIVNLHGGKPANFLDVGGGATKERVAEAFKIILSDSNVKAVLVNIFGGIVRCDMIAEGIIGAVKEVGVKVPVVVRLEGTNAELGREVLAKSGLDIIAANSLTDAAEQVVKAAEGK

SEQ ID NO: 93921 - DNA, 1167 bp, Neisseria meningitidis FAM18
  CDS (1)..(1167): transl_table=11
atgaatttacacgagtatcaggctaaagaactgctggctggctacggtttgcccgtacaaggcggtattttggcacacaacggcgaagaagccgctgcagcttacgacaaattgggcggcaaattcgctgttgtcaaagcacaagtacacgccggcggccgcggtaaagcgggcggcgtaaaagtcgttaaaagccgcgaagaagctaaagaagtggctgaaagcctgattggcaccaacttggtaacttaccaaactgatgccaacggccaacctgtcaacagcgttttggtttgcgaagacatgtatccggttcaaaccgagctgtacttgggcgcagtggttgaccgttctacccgccgcattacattcatggcctctaccgaaggcggcgtggaaatcgaaaaagttgctgccgaaactcctgaaaaaatcttcaaagtaaccgttgatccgctggtcggcctgcaaccttgccaagctcgcgaagttgcgttccaactgggcttgaaagacaaacaaatcaacgagttcgtcaaactgatgaccggtgcgtacaaagcgtttgtcgaaaatgacttcgccctgtttgaagtcaacccgctggcagttcgcgaaaacggcgcgctcgcctgcgtggacggcaaaatcggcatcgacagcaacgcgctctaccgcctgccgaaaatcgccgaattgcgcgacaaatctcaagaaaacgaacgcgagttgaaagcttctgaatttgacctgaactatgttgccctggaaggcaacatcggctgtatggtgaacggtgccggtttggcgatggccactatggacatcatcaaactgaaaggcggccaacctgccaacttcttggacgttggcggcggcgcaaccaaagaccgcgtggttgaagcgttcaaactgattctggaagacaaatccgttcaaggcgtattgatcaacatcttcggcggtatcgtacgttgcgacatgattgcggaagccatcgtggcagccgttaaagaaatcaacgtcgacgttcctgtcgttgttcgtttggaaggcaacaacgccgaactcggcgcgaaaatcctgaacgaatcaggtctgaaactgacttctgcagacggcctgaatgacgcagccgaaaaaattgtcgcagccgtaaacgcctaa

SEQ ID NO: 93922 - protein, 388 aa, Neisseria meningitidis FAM18
MNLHEYQAKELLAGYGLPVQGGILAHNGEEAAAAYDKLGGKFAVVKAQVHAGGRGKAGGVKVVKSREEAKEVAESLIGTNLVTYQTDANGQPVNSVLVCEDMYPVQTELYLGAVVDRSTRRITFMASTEGGVEIEKVAAETPEKIFKVTVDPLVGLQPCQAREVAFQLGLKDKQINEFVKLMTGAYKAFVENDFALFEVNPLAVRENGALACVDGKIGIDSNALYRLPKIAELRDKSQENERELKASEFDLNYVALEGNIGCMVNGAGLAMATMDIIKLKGGQPANFLDVGGGATKDRVVEAFKLILEDKSVQGVLINIFGGIVRCDMIAEAIVAAVKEINVDVPVVVRLEGNNAELGAKILNESGLKLTSADGLNDAAEKIVAAVNA

SEQ ID NO: 93923 - DNA, 1167 bp, Actinobacillus pleuropneumoniae serovar 1 str. 4074
  CDS (1)..(1167): transl_table=11
atgaatctacacgaatatcaagcaaaacaaatttttgcacaatatcgacttcccgtaagtaaaggtattgtttgtcattctctcgatgacgccgtttcagccattcacacattagcaggcgacacttgggcggcgaaatgccaagttcacgccggcggtagaggcaaagcgggcggagtaaaattagtgcgcagtgaagcggaaattcgtgagttttgtaatcaatggttgggacagcgtttagtcacttttcaaaccgataaaaacggacaaccggtaaatacgatttatctcgaagaaacgtgcctaatagaacgtgaattatatttgggtgcagtaattgatcgttcttcacaaaaaattgtttttatggcatcaaatgccggcggtatgaatattgaagatgtcgccgcacaaacaccggagcttatccataaagcaaccattgatccgcttaccggtgcgcaagcttttcagggtcgtgaattagcttttaaactcggtctgtccggcgatcaaatcaaacaattcgctcatctttttgtacaacttgccaaattatttattgaaaaagatcttgccttactcgaagtaaatccgctcgtattgaccaaacaaggtcaattactttgtttagatgccaaaatggtaattgacagtaatgctctttatcgccatccggagctaaaagccctacaagatccaagccaagaagatgcgcgagaagccgatgcggcaaaatgggatcttaactatgtcgcattagacggcaatatcggttgtatggttaatggtgcaggcttagccatgggaaccatggatatcgtgaaactacacggtggtcgtccggcaaactttttagatgtcggcggcggcgcaacgaaagaacgtgtttcggaagcctttaaactgattctttccgatcagaatgttaaagccgtcttagtcaatattttcggcggcatcgtcagatgcgatttaattgcggaaggtattattgcggcggttaatgaagtcgggataaacattccggtcatcgtgcgtttagaaggtactaatgcggaattaggtcgtgaaattttagcaaacagcggcttacgtctcattgcggcaaatacattaacacaagcggcacaacttgcagtcaaagcagcggaaggaaaataa

SEQ ID NO: 93924 - protein, 388 aa, Actinobacillus pleuropneumoniae serovar 1 str. 4074
MNLHEYQAKQIFAQYRLPVSKGIVCHSLDDAVSAIHTLAGDTWAAKCQVHAGGRGKAGGVKLVRSEAEIREFCNQWLGQRLVTFQTDKNGQPVNTIYLEETCLIERELYLGAVIDRSSQKIVFMASNAGGMNIEDVAAQTPELIHKATIDPLTGAQAFQGRELAFKLGLSGDQIKQFAHLFVQLAKLFIEKDLALLEVNPLVLTKQGQLLCLDAKMVIDSNALYRHPELKALQDPSQEDAREADAAKWDLNYVALDGNIGCMVNGAGLAMGTMDIVKLHGGRPANFLDVGGGATKERVSEAFKLILSDQNVKAVLVNIFGGIVRCDLIAEGIIAAVNEVGINIPVIVRLEGTNAELGREILANSGLRLIAANTLTQAAQLAVKAAEGK

SEQ ID NO: 93925 - DNA, 1170 bp, Haemophilus influenzae R2866
  CDS (1)..(1170): transl_table=11
atgaatttacacgaataccaagcaaaacaactatttgagcattatggattacccgtaaaaaatggggcagtctgtcaatctgttgaggatgtcgatttggtactggctcaactttctggcgataagtgggcagcgaaatgccaagttcatgcgggtgggcgtggtaaagcgggtggcgttaaattagtacaggatgtagaggaagcaagagcttttgcagaaaaatggctgggacaacgtttagtcacttttcaaacggataaattgggtcagccagtaaaccagatttattttgaagaaacttgcgatattgataaagaattttacttaagtgcggttgttgatcgtgcctctcaaaaagttatgtttattgcttctcctgctggtggaatgaatattgaagaagttgcgcaaaattcaccgcacttactccataaagtcgagattgatcctttatttgggggattgccttatcaaggccgtgaattggcgtttaaattagggttaagtggtacgcaaaacaaacagtttaccgatatctttatgggcttatctcgtttgtttttagaaaaagatttatctttactggaagtcaatccacttgttctaactaaacaaggcaatttggtttgtctcgatgctaaaatatctgttgatgataacgctttatttcgccataaagatctcttagcactgcaagatttaactcaaaatgatgcccgtgaagcagaagctgaaaaattccagttaaactatgtggctttagagggcgatattggttgtatggtaaacggggctgggcttgcaatgggcaccatggatattgtgaaactctatggtgggaagcctgcgaattttcttgatgtgggtggtggtgcaacgaaagagcgggttgctgaagcgttcaaaatcattttaaccgatccttccgttaaagtgattttagtgaatatttttggtggcattgttcgttgtgatttgattgctgaaggcgtgattgctgcagtaaatgaagtgggcgtgagagtgcctgtggttgtgcgattagaaggaacgaatgctgaaatgggtcgccaaattttagtggaaagtgacgttaatattcttaccgcacagagtttacaacaagccgcagaattagccgtgaatgcagcaaaaggagaacactaa

SEQ ID NO: 93926 - protein, 389 aa, Haemophilus influenzae R2866
MNLHEYQAKQLFEHYGLPVKNGAVCQSVEDVDLVLAQLSGDKWAAKCQVHAGGRGKAGGVKLVQDVEEARAFAEKWLGQRLVTFQTDKLGQPVNQIYFEETCDIDKEFYLSAVVDRASQKVMFIASPAGGMNIEEVAQNSPHLLHKVEIDPLFGGLPYQGRELAFKLGLSGTQNKQFTDIFMGLSRLFLEKDLSLLEVNPLVLTKQGNLVCLDAKISVDDNALFRHKDLLALQDLTQNDAREAEAEKFQLNYVALEGDIGCMVNGAGLAMGTMDIVKLYGGKPANFLDVGGGATKERVAEAFKIILTDPSVKVILVNIFGGIVRCDLIAEGVIAAVNEVGVRVPVVVRLEGTNAEMGRQILVESDVNILTAQSLQQAAELAVNAAKGEH

SEQ ID NO: 93927 - DNA, 1161 bp, Exiguobacterium sibiricum 255-15
  CDS (1)..(1161): transl_table=11
atgaatgtacatgaatatcaggcaaaagagttacttcgttcgtacggtgtacctgttccgaacggaattgcagcatttacagtcgaagaggcagtcgatgcagcagaacaattgtcaggtccgatcaaagtcgtaaaagcacagattcacgcagggggtcgcggtaaagccggtggtgttaaattggctaaatcgcaagaagaagtgaaagaattcgcgacagagttactcggcaaaacactcgtcacgcatcaaacaggtccagaaggtaaagtcattcaacgtcttcttgttgaagaaggttgtgcgattgacaaagaatactatctcgggattgtccttgaccgtgtaacgggacgtgtcgtcatcatgggttcaagtgaaggcggaatggatatcgaggaagtcgcagaagcaactccggaaaaaattatcaaagaagtagtggatccggcagtcggcttacaagctttccaagcgcgtaaactggcgtttgcaatgggtgttccggttaagcttgtcaacaagttcgtcggcatggtgacgaaattgtatacattcttcgtcgataaagactgttcaatcgctgagatcaatccactcgtcacaacaaaagacggtgatgttttggcacttgatgcaaaactgaactttgattcaaacgcgttataccgtcatgccgatgtcgttgcacttcgtgacgaaacggaagaagatccacgcgaagtggaagcttctaaaaatgacttaaactatattgcacttgacggaaacatcggatgtctcgtcaacggtgcaggacttgccatggcgacgatggatatcatcaagcacttcagcggcgatccggcaaacttccttgatgttggcggcggtgcgacgaaagagaaagtaacagaagcctttaaattgattttgtcggatgagaacgtcaaaggaattttcgttaacatttttggtggaatcatgaaatgtgacgtcattgcagaaggtatcgttgcagcaacaaaagaagtgggcttagaattgccactcgtcgtccgtctcgaaggaacaaacgtcgatgccggaaaacaaattctcaaagattcaggtctagcgattacagcagctacatcaatggcagacggcgcagaaaaaattgctgcgctcgtgaagtaa

SEQ ID NO: 93928 - protein, 386 aa, Exiguobacterium sibiricum 255-15
MNVHEYQAKELLRSYGVPVPNGIAAFTVEEAVDAAEQLSGPIKVVKAQIHAGGRGKAGGVKLAKSQEEVKEFATELLGKTLVTHQTGPEGKVIQRLLVEEGCAIDKEYYLGIVLDRVTGRVVIMGSSEGGMDIEEVAEATPEKIIKEVVDPAVGLQAFQARKLAFAMGVPVKLVNKFVGMVTKLYTFFVDKDCSIAEINPLVTTKDGDVLALDAKLNFDSNALYRHADVVALRDETEEDPREVEASKNDLNYIALDGNIGCLVNGAGLAMATMDIIKHFSGDPANFLDVGGGATKEKVTEAFKLILSDENVKGIFVNIFGGIMKCDVIAEGIVAATKEVGLELPLVVRLEGTNVDAGKQILKDSGLAITAATSMADGAEKIAALVK

SEQ ID NO: 93929 - DNA, 1173 bp, Prosthecochloris aestuarii DSM 271
  CDS (1)..(1173): transl_table=11
atgaatatccatgagtatcagggcaaggatatactacgcaaattcggagtatccgtccccaaaggcattgtggcatttaccgccgaagaggctcgccaggctgcagaacagctttttgaagaacaggaaaatcctgttgtcgtcgtcaaggcacagatccatgccggaggcagaggaaaagccggaggagtcaagcttgcaaaatcacctgacgaggtcttcgacattgcacgtcagatgattggctgcacccttgtgacccatcagaccggaccggaaggcaaagaggttcgtcgcctgctcgtcgaagagggcatgaatatcgaaaaagagttttatgtcggcattacgctcgaccgcgccacatcccagaatgtgctgatggtctcgaccgaaggtggcatggaaatcgaaacagtcgcagaagaaacccctgaaaaactgcttaaaatccagatccatccgcttcagggtcttcagggattccaggcacgacaggcggcttttttcctcggtctcgagggagacaagttcaaaaacaccgtcaaattcatcacagcgctctacaaggcctacaccgcaatcgatgcttcgattgctgaaatcaacccgctggtcatcaccaaagagggaaaggttatggctcttgacgccaaaatcaatttcgactccaacgcactcttccgccacaaggactttcttgaactgcgtgatatcagtgaagaggacccgtttgaagtcgaagcatcgaaatcaaatctgaactacgtccggcttgacggcaatgtcggctgcatggtcaacggtgcaggtcttgcaatggcaacgatggacatgatccagcttgccggaggcaaaccggccaacttccttgacgtcggaggcagcgcgagccccgaaaccgttgaagaaggcttcaagatcatcatgagtgacaaaaacgtcaaagccatccttatcaatatcttcggaggcatcgtccgttgcgaccgcgtagccggaggagttatcgaagccgccaaaaaggttgggctcgacatgccggtcatcgtccggctcgaaggcaccaatgccgaaattgcccagaaaatgcttgatgaatcagggctcaacctgatcgcagcaaacggtctgcgcgaagccgcacagaaagtcaacgaagcactttcctga

SEQ ID NO: 93930 - protein, 390 aa, Prosthecochloris aestuarii DSM 271
MNIHEYQGKDILRKFGVSVPKGIVAFTAEEARQAAEQLFEEQENPVVVVKAQIHAGGRGKAGGVKLAKSPDEVFDIARQMIGCTLVTHQTGPEGKEVRRLLVEEGMNIEKEFYVGITLDRATSQNVLMVSTEGGMEIETVAEETPEKLLKIQIHPLQGLQGFQARQAAFFLGLEGDKFKNTVKFITALYKAYTAIDASIAEINPLVITKEGKVMALDAKINFDSNALFRHKDFLELRDISEEDPFEVEASKSNLNYVRLDGNVGCMVNGAGLAMATMDMIQLAGGKPANFLDVGGSASPETVEEGFKIIMSDKNVKAILINIFGGIVRCDRVAGGVIEAAKKVGLDMPVIVRLEGTNAEIAQKMLDESGLNLIAANGLREAAQKVNEALS

SEQ ID NO: 93931 - DNA, 1164 bp, Xylella fastidiosa Dixon
  CDS (1)..(1164): transl_table=11
atgaatttccacgaataccaggcaaaacaactatttgccgaatacggcatccctgttccggccggacgcatcgcgtcttcagccgatgaagcggtcacagccgccaaatccttgggcaacggcccctggatggtaaaagctcagattcatgcgggcggtcgcggtaaggccggcggcgtgaaattctgcaagacaaccgacgaagtgaaacaggccgcagcaacaatgctcggtaccaagatggctacttaccagtcagcaggtgtcgctctgccggtgaatctggtcctggtcaccgaagccggtgaaatcactaaagaactctatctgtcagtgttagtggatcgcggcacgcgttcaatcacctacatcgcctcatccgagggcggcgtggacattgagcacgttgcagctgaaacccctgaaaaaatccaaacgctcaacgtcgactttgtcgaaggcctacagccataccaaggacgcgatattggatttcacctcggcttagaagcaaaacaggttaatcagctgtccaaaatcatgattagcctctatcaattgttcaacgacaaagatttgtccttgatcgaattaaatccattagcaatcctgagcaatggggatttgtacgcactggatggaaaaattaattccgacgacaacgccacattccgccataaagaattggccgcaatgcgcgataaaactcaggaagacgaaaccgaggttctagcttcagaaaacgatctgaactacgtcaccatggatggcaacatcggctgcatggtcaatggagccggacttgccatggccacgatggatgtgatcaaactcaatggcggcgaaccggcaaacttccttgatgtcggcggcggcgctaccaaagagcgcgtgacgaccgcattcaaactgatcctttcctcaaacaaggtcaaagccatctttgtcaatatcttcggtggcattgtccgctgcgacatgattgccgaaggcatcatcgctgcagtgaaggaagtgggtgtcaaagtgcctgttatcgtacgcttggaaggcaccaatgtagacgctggcaaacaactgctagccacatccggcctcgccatcatcccggctgacgacatcaacgatggcgccaaaaaagccgtggccgctgtcaccgcctga

SEQ ID NO: 93932 - protein, 387 aa, Xylella fastidiosa Dixon
MNFHEYQAKQLFAEYGIPVPAGRIASSADEAVTAAKSLGNGPWMVKAQIHAGGRGKAGGVKFCKTTDEVKQAAATMLGTKMATYQSAGVALPVNLVLVTEAGEITKELYLSVLVDRGTRSITYIASSEGGVDIEHVAAETPEKIQTLNVDFVEGLQPYQGRDIGFHLGLEAKQVNQLSKIMISLYQLFNDKDLSLIELNPLAILSNGDLYALDGKINSDDNATFRHKELAAMRDKTQEDETEVLASENDLNYVTMDGNIGCMVNGAGLAMATMDVIKLNGGEPANFLDVGGGATKERVTTAFKLILSSNKVKAIFVNIFGGIVRCDMIAEGIIAAVKEVGVKVPVIVRLEGTNVDAGKQLLATSGLAIIPADDINDGAKKAVAAVTA

SEQ ID NO: 93933 - DNA, 1194 bp, Sulfitobacter sp. EE-36
  CDS (1)..(1194): transl_table=11
atgaacatccacgaatatcaggcaaaagcccttttgcgtagctacggcgcgccagtatccgacggccgggtcgtgctgaaagctgaagaagcgaaaacagccgcaggcgagatggacggacctctttgggtcgtcaaggcacagatccacgcaggtggccgcggcaaaggttctttcaaagaagccgacgctggcgacaaaggcggtgtacgcctgaccaaatcggttgaagaagccgccgaggaagccaagaaaatgctgggccgcaccctggtcacgcatcagaccggccccgcgggcaaacaggtcaaccggatctacatcgaagacggttcgggcatcgaaaccgaattgtacctcgcgctgctggtggatcgccagacctcgcgcatcgggttcgtctgctccaccgagggcggcatggacatcgaagaagtagccgagtccacccccgagaaaatcatcagcttctctgttgaccccgccgcgggcttccagccctaccacggccgccgcgttgctttcgccctggggctggaaggcaagcaggtcaaacaatgtgtgaccctgatgggccagctgttcaaagccttcgtcgaaaaagacatggaaatgctggaaatcaacccgctgatcgtcaccgacagcggcgacctcaaagtgctggacgccaaagtcagctttgacggcaatgcgatgtaccgccacggcgatattgccgatctgcgcgacaccaccgaagaagaccccaaagagctcgaggcgtccaagtacgacctgaactacatcgctctggacggtgaaatcggctgcatggtgaacggtgccggtctggcgatggccacaatggacatcatcaagctttacggtgccgagcctgcgaacttccttgatgttggtggtggtgccaccaaagagaaagtgaccgaagcgttcaagatcatcacctccgacccgcaggtcaaaggtattctggtcaacatcttcggcggcatcatgcgctgtgacgtcatcgccgaaggtgtggtcgcagccgtgaaggaagtcggcctgcaggttccgctggttgtccgtctggaaggcacaaacgttgaagaaggcaaagccatcatcaacaactccggcctggacgtgatcgctgcggacgacttgaaagatggcgcgcaaaagatcgtgaaagcggtcaaaggctaa

SEQ ID NO: 93934 - protein, 397 aa, Sulfitobacter sp. EE-36
MNIHEYQAKALLRSYGAPVSDGRVVLKAEEAKTAAGEMDGPLWVVKAQIHAGGRGKGSFKEADAGDKGGVRLTKSVEEAAEEAKKMLGRTLVTHQTGPAGKQVNRIYIEDGSGIETELYLALLVDRQTSRIGFVCSTEGGMDIEEVAESTPEKIISFSVDPAAGFQPYHGRRVAFALGLEGKQVKQCVTLMGQLFKAFVEKDMEMLEINPLIVTDSGDLKVLDAKVSFDGNAMYRHGDIADLRDTTEEDPKELEASKYDLNYIALDGEIGCMVNGAGLAMATMDIIKLYGAEPANFLDVGGGATKEKVTEAFKIITSDPQVKGILVNIFGGIMRCDVIAEGVVAAVKEVGLQVPLVVRLEGTNVEEGKAIINNSGLDVIAADDLKDGAQKIVKAVKG

SEQ ID NO: 93935 - DNA, 1194 bp, Roseovarius nubinhibens ISM
  CDS (1)..(1194): transl_table=11
atgaacatccacgagtatcaggcgaaggcgctgcttcgctcttacggcgcgccggtttccgatggccgggtcgtgcttcgcgcagaagaggcgaagaccgccgcaggcgaaatggacggccctctctgggtggtcaaggcacagatccacgcgggcggccgcggcaagggctccttcaaagaggccggcgccggtgaagcaggcggcgtgcgtctcgccaaatcggtcgaagaggccgccgaagaggccaagcgcatgctcggccgcaccctggtgaccaaacaaaccggccccgccggcaaacaggtcaaccgcatctatatcgaagacggctcgggcatcgaaaaggaattctacctcgccctgctcgtcgaccggcagacaagccgcgtctccttcgtcgcctccacagagggcggcatggacatcgaggaagtcgccgaaagcacccctgagaaaatcctcagcttctcggtcgatccggccaccggctatcagcccttccacggccgtcgcatcgccttcaacctcggtctcgagggcaagcaggtcaaacaatgcgtttcgctgatgggcacgctctacaagatgttcctcgaaaaggacatggagatgctcgagatcaacccgctgatcatcaccgacgcgggcgatctgaaatgcctcgacgccaagatgggctttgacggcaacgcgatctatcgccacgccgacatcgccgagctgcgcgacaccaccgaagaagaccccaaagagctcgaagcgtcgaaatacgacctcaactatatcgcgctcgacggtgaaatcggctgcatggtgaacggcgcgggcctcgccatggcgaccatggacatcatcaagctctacggtgccgaacccgccaacttcctcgacgtgggcggtggcgcgaccaaggaaaaggtcaccgaggcgttcaagatcatcacctccgaccccaacgtcaaaggcatcctcgtcaacatcttcggcggcatcatgcgctgtgacgtgatcgccgagggcgtcgtcgccgcggtcaaggaagtgggcctcaaggtgccgctcgtcgtccgcctcgaaggcaccaatgtcgaagagggcaaggccatcatcaacaattccgatgtcgatgtgatcgccgccgacgacctcaaggatggcgccgaaaagatcgtcaaggcggtcaagggctaa

SEQ ID NO: 93936 - protein, 397 aa, Roseovarius nubinhibens ISM
MNIHEYQAKALLRSYGAPVSDGRVVLRAEEAKTAAGEMDGPLWVVKAQIHAGGRGKGSFKEAGAGEAGGVRLAKSVEEAAEEAKRMLGRTLVTKQTGPAGKQVNRIYIEDGSGIEKEFYLALLVDRQTSRVSFVASTEGGMDIEEVAESTPEKILSFSVDPATGYQPFHGRRIAFNLGLEGKQVKQCVSLMGTLYKMFLEKDMEMLEINPLIITDAGDLKCLDAKMGFDGNAIYRHADIAELRDTTEEDPKELEASKYDLNYIALDGEIGCMVNGAGLAMATMDIIKLYGAEPANFLDVGGGATKEKVTEAFKIITSDPNVKGILVNIFGGIMRCDVIAEGVVAAVKEVGLKVPLVVRLEGTNVEEGKAIINNSDVDVIAADDLKDGAEKIVKAVKG

SEQ ID NO: 93937 - DNA, 1194 bp, Oceanicola batsensis HTCC2597
  CDS (1)..(1194): transl_table=11
atgaacattcatgagtatcaggcgaaggcgattcttcgcgactacggatgcccggtctccgacggacgtgcagtcctgaaagccgagaacgccaagactgccgccggggaactggacggccccctctgggtcgtgaaggcgcagatccacgcgggcggccgcggcaagggctcgttcaaggaggccgacgccggcgagaagggcggcgtgcgcctggccaagtccgtcgaggaagccgccgaggaagccaagaagatgctcggccgcaccctcgtgacccaccagaccggtccggccggcaagcaggtgaaccgcatctatatcgaggacgggtccgacatcgagcgcgaactctacctcgccctgctcgtcgaccgccagacctcggccgtctcgatcgtctgctcgaccgagggcggcatggacatcgaggaggtcgccgcatcgacccccgagaagatcctgtccttctcgatcgagcccgccaccggctaccagccgttccacggccggcgcgtcgcctttgccctcggcatggaaggtccgcaggtcaagcagatggtccagcttcttgacaagctctaccgtgccttcaccgagaaggacatggagatgctcgagatcaacccgctgatcgtcatgcccgacggcaacctcaaggtgctggacgccaaggtcggcttcgacggcaacgcgctgtatcgtcacaacgacatcatcgccctgcgcgacgagacggaagaggaccccaaggaactcgccgcgtccaagtacgacctcaactacatcgcgctggatggcgagatcggctgcatggtgaacggcgcgggcctcgccatggcgacgatggacatcatcaagctgtatggggcggagcctgccaacttcctcgacgtcggcggcggcgccacgaaggagaaggtgaccgaagcgttcaagatcatcacgtccgacaagaacgtgaagggaatcctggtgaacatcttcggcggcatcatgcgttgcgacgtcatcgccgagggcgtggtcgccgcggtgaaggaagtcggactggaggtcccgctggtcgtccggctggaaggcacgaacgtcgagaagggcaaggagatcatcaacacctccggcctgaacgtcatcgcggccgacaacctcagcgacggtgccgagaagatcgtgaaggccgtgaagggatga

SEQ ID NO: 93938 - protein, 397 aa, Oceanicola batsensis HTCC2597
MNIHEYQAKAILRDYGCPVSDGRAVLKAENAKTAAGELDGPLWVVKAQIHAGGRGKGSFKEADAGEKGGVRLAKSVEEAAEEAKKMLGRTLVTHQTGPAGKQVNRIYIEDGSDIERELYLALLVDRQTSAVSIVCSTEGGMDIEEVAASTPEKILSFSIEPATGYQPFHGRRVAFALGMEGPQVKQMVQLLDKLYRAFTEKDMEMLEINPLIVMPDGNLKVLDAKVGFDGNALYRHNDIIALRDETEEDPKELAASKYDLNYIALDGEIGCMVNGAGLAMATMDIIKLYGAEPANFLDVGGGATKEKVTEAFKIITSDKNVKGILVNIFGGIMRCDVIAEGVVAAVKEVGLEVPLVVRLEGTNVEKGKEIINTSGLNVIAADNLSDGAEKIVKAVKG

SEQ ID NO: 93939 - DNA, 1200 bp, Erythrobacter sp. NAP1
  CDS (1)..(1200): transl_table=11
atgaacgtccacgaatatcaggccaaggaactgctcaaggaacacggaattgccgttcctgacgggcacgcggcgctcagcgtcgaagaagcggttgccgctgccaagaagcttcccggtccgctctacgtggtcaaggcgcagattcacgccggcggacgcggcaagggcaagttcaaggaactgcctgaagacgcgaagggcggcgtgcgcctcgccaagagcatcgaggaagttgaggccaacgccaaggaaatgctcggcaacacgctcgtgaccgtgcagaccggcgctgaaggcaagcaggtcaaccgcctctacgtcaccgacggcgtcgacatcgccaaggaatattacttctcgcttctcgtcgatcgtgcatcaggccaggttgccatggtcgtctcgaccgaaggcggcatggatattgaagcggtcgcgcacgatacgcctgaaaagatcaccaccatcaccatcgacccggctcagggcttcatgcctcaccacggccgcgccgtggcgttcggcctcaagctttcaggcgacctcaacaagcaggcacaaaagctcgcgaagaagctctacgacgccttcatggcaaccgattcggagatgctcgagatcaacccgctcgtcgagaccgaagatggccagctgctcgtgctcgacgcgaagatgagcttcgacggcaacgcgctgttccgtcaccccgacatcgaggcgatgcgcgacgagaccgaagaagatccggccgaagtcgaagcgagcgaatacgaccttgcctacatcaagctcgacggaaacatcggctgcatggtcaacggcgcaggccttgcaatggcgacgatggacatcatcaagctgaacggcgccttccccgcaaacttcctcgacgtgggcggcggcgccaccacggagaaggtgacggcagcgttcaagatcatcctcaaggacccggcggtcgagggcatcctggtcaacatctttggcggcatcatgcgctgcgacaccattgcggaaggtatcgtgatcgcagccaaggaagtcgacctgagcgttccgctggtcgtgcgcctcgaaggcaccaacgtcgagaagggcaaggaaatcctcgccaattcgggccttccgattgtcccggctgacgatcttggcgatgcagccaaaaagatcgtcgcagaggtcaagcaggcggcgtga

SEQ ID NO: 93940 - protein, 399 aa, Erythrobacter sp. NAP1
MNVHEYQAKELLKEHGIAVPDGHAALSVEEAVAAAKKLPGPLYVVKAQIHAGGRGKGKFKELPEDAKGGVRLAKSIEEVEANAKEMLGNTLVTVQTGAEGKQVNRLYVTDGVDIAKEYYFSLLVDRASGQVAMVVSTEGGMDIEAVAHDTPEKITTITIDPAQGFMPHHGRAVAFGLKLSGDLNKQAQKLAKKLYDAFMATDSEMLEINPLVETEDGQLLVLDAKMSFDGNALFRHPDIEAMRDETEEDPAEVEASEYDLAYIKLDGNIGCMVNGAGLAMATMDIIKLNGAFPANFLDVGGGATTEKVTAAFKIILKDPAVEGILVNIFGGIMRCDTIAEGIVIAAKEVDLSVPLVVRLEGTNVEKGKEILANSGLPIVPADDLGDAAKKIVAEVKQAA

SEQ ID NO: 93941 - DNA, 1167 bp, Pseudoalteromonas tunicata D2
  CDS (1)..(1167): transl_table=11
atgaatttgcatgagtatcaggcaaaacaactgtttgccgaatatggtttacctgtatctgagggtttcgcttgtgacactcctcaagaagctgctgaagctgctgataaaatcggcggaaatatgtgggttgttaaaactcaagttcacgcaggcggacgtggtaaagctggcggtgtaaagctagttaagactaaagaagaaatcaaagagtttgcacagcactggttaggtaaaaacctagttacttaccaaactgatgctaatggccaaccagtttctaaaatcttagtagaaagctgtactgatatcgcgaatgaattatatcttggcgctgttgtagaccgtggttcacgtaaagttgtgttcatggcctctactgaaggtggtgttgagattgagaaagttgctgaagaaactccagagttaattcataaagctattatcgatccattagtaggcccacaagcttaccaagcgcgcgagttaggttttaaacttggtttaaacccagatcaaatgaaacaatttactaagatcttcatgggtcttgctaaaatgttcaacgattttgactttgcattattagaaatcaacccattagtaatcactgagcaaggtaacttacattgtttagatggtaaaattggtgtggatggtaatgcgttatatcgtcaaccaaaaatccgtgcaatgcgcgatccttctcaagaagatgagcgtgaagcacaagctgcacaatgggaacttaactacgttgcattagatggcaatgttggttgtatggttaacggtgctggtcttgcaatgggtactatggacattgtaaatcttcacggtggaaaaccagctaacttcctagatgttggcggcggcgcaactaaagaacgtgttgctgaagcattcaaaattatcctttctgactctaatgttaaagctgttttagttaacatttttggtggtatcgttcgttgtgacatgattgccgaaggtatcattggtgcagtgaaagaagtgggcgttacaattccagtagttgttcgtttagaaggtactaacgctgaattaggccgtcaagtattagcaaactctggtttagatatcattgctgctgaatcattaactgatgctgctgaaaaagtagttgctgctgcggagagcaaataa

SEQ ID NO: 93942 - protein, 388 aa, Pseudoalteromonas tunicata D2
MNLHEYQAKQLFAEYGLPVSEGFACDTPQEAAEAADKIGGNMWVVKTQVHAGGRGKAGGVKLVKTKEEIKEFAQHWLGKNLVTYQTDANGQPVSKILVESCTDIANELYLGAVVDRGSRKVVFMASTEGGVEIEKVAEETPELIHKAIIDPLVGPQAYQARELGFKLGLNPDQMKQFTKIFMGLAKMFNDFDFALLEINPLVITEQGNLHCLDGKIGVDGNALYRQPKIRAMRDPSQEDEREAQAAQWELNYVALDGNVGCMVNGAGLAMGTMDIVNLHGGKPANFLDVGGGATKERVAEAFKIILSDSNVKAVLVNIFGGIVRCDMIAEGIIGAVKEVGVTIPVVVRLEGTNAELGRQVLANSGLDIIAAESLTDAAEKVVAAAESK

SEQ ID NO: 93943 - DNA, 1167 bp, Photobacterium sp. SKA34
  CDS (1)..(1167): transl_table=11
atgaatttgcacgaatatcaggcaaaacagctattcgctgaatatggtttaccagtaccagaaggttacgcttgcgatacgccacaagaagcggcagaagctgcaggtaaaattggtggcagtaagtgggtagttaaatgtcaggttcacgctggtggtcgcggtaaagcgggcggtgtggaattacatgaaaccaaagatggtatcaaacagttcgcccaaaactggctaggtaaaaatctagtaacttaccaaacagatgctaatggtcagccagtaacaaaaatattagttgaagaagcatctaatattgccaatgagttgtacttaggtgcagttgttgatcgtggctctcgccgtatcgttttcatggcatcaacggaaggtggtgtggaaattgaaaaagtagcagaagagacacctgaacttattcataaagcagcaattgatccattggttgggcctcagccataccaaggacgtgagcttgcattcaaactaggtcttaaaggcgatcagattaaacaatttactaagatctttatgggcttagcaaatatgttcgctgaatatgatcttgcactgcttgaaattaacccacttgttattactggcgataacaacttattgtgcttagacggtaagattaatatcgattctaacgcaatgtaccgccagcctaagctacgtgaaatgcatgatccatcgcaagaagatgagcgtgaagcgcatgctgcacagtgggaattaaattacgttgcattagacggaaacattggctgtatggttaatggtgcaggccttgcaatgggtacgatggatatcgttaacctgcatggtggacagccggctaacttccttgatgttggtggcggtgcaacgaaagagcgtgttactgaagcatttaaaattatcctatctgatagcaacgtaaaagccgtattggttaatatcttcggtggtattgtacgttgtgatttgattgctgatggcatcatcggcgcgattgcagaagttggcgttaaagtaccagttgttgttcgccttgaaggtaacaacgcagaagtaggtgcagcaaaacttgcagatagtggtcttaatattattgctgcgacttcgttaacagaagcggcggaaaaagttgttgctgcagcggagggtaaataa

SEQ ID NO: 93944 - protein, 388 aa, Photobacterium sp. SKA34
MNLHEYQAKQLFAEYGLPVPEGYACDTPQEAAEAAGKIGGSKWVVKCQVHAGGRGKAGGVELHETKDGIKQFAQNWLGKNLVTYQTDANGQPVTKILVEEASNIANELYLGAVVDRGSRRIVFMASTEGGVEIEKVAEETPELIHKAAIDPLVGPQPYQGRELAFKLGLKGDQIKQFTKIFMGLANMFAEYDLALLEINPLVITGDNNLLCLDGKINIDSNAMYRQPKLREMHDPSQEDEREAHAAQWELNYVALDGNIGCMVNGAGLAMGTMDIVNLHGGQPANFLDVGGGATKERVTEAFKIILSDSNVKAVLVNIFGGIVRCDLIADGIIGAIAEVGVKVPVVVRLEGNNAEVGAAKLADSGLNIIAATSLTEAAEKVVAAAEGK

SEQ ID NO: 93945 - DNA, 1167 bp, Oceanospirillum sp. MED92
  CDS (1)..(1167): transl_table=11
atgaaccttcacgagtaccagggtaaacaactgtttgccgaatatggtctgccggtatccaaaggatacgctgtagatactccggaagcagcagcagaagctgctgagaaaattggcggtgacaagtgggttgttaaaactcaggtgcacgcaggcggccgtggtaaggctggcggtgtaaagctggttgattctcctgctgaagcacaagagttcgcagctaactggctgggtaagaaccttgttacttatcagactgacgctaacggtcagcctgtttctaaaattctggttgaagactgcacagatattgcgaatgagctatacctgggtgcggttgttgaccgttcttctcgtcgtatcgttttcatggcatctactgaaggtggtgtggaaatcgagaaagttgcagaagaaacgccagaaaaaatccttaaagcaactgttgatccactgactggcgctcagccatatcagggtcgtgagctggcattcaagctgggtcttgaaggcgatcagatcaagcagtttgttaagatcttcctgggtcttgcacagatgttccaggaaaaagatctggcactactagagattaaccctctggtaatcactgaagaaggtaacctgcactgcctggacgctaaagtagcgatcgatggcaacgctgtttaccgtcacaaagaccttcaggcaatggaagatccatctcaggaagacgagcgtgaagcgcgtgcagctgagtgggatcttaactacgttgctctggatggcagcatcggctgtatggttaacggtgcaggtctggcaatgggtacgatggatatcgtatctctgcacggtggtttccctgcaaacttcctggacgttggtggcggcgcgactaaagagcgtgttactgaagcgttcaagatcatccttgaagatgacaaagttaaagcagtactggttaacatctttggcggtatcgtacgttgcgacctgattgctgaaggtatcatcggtgcagttaaagaggtaggcgtagaagtacctgtagttgtacgtctggaaggtaacaacgcagagctgggttctcagcttctgtctgagtctggtctggatatcattgcggctaccagcctgactgatgctgctgtacaggcagttaaagcagcggagggtaaataa

SEQ ID NO: 93946 - protein, 388 aa, Oceanospirillum sp. MED92
MNLHEYQGKQLFAEYGLPVSKGYAVDTPEAAAEAAEKIGGDKWVVKTQVHAGGRGKAGGVKLVDSPAEAQEFAANWLGKNLVTYQTDANGQPVSKILVEDCTDIANELYLGAVVDRSSRRIVFMASTEGGVEIEKVAEETPEKILKATVDPLTGAQPYQGRELAFKLGLEGDQIKQFVKIFLGLAQMFQEKDLALLEINPLVITEEGNLHCLDAKVAIDGNAVYRHKDLQAMEDPSQEDEREARAAEWDLNYVALDGSIGCMVNGAGLAMGTMDIVSLHGGFPANFLDVGGGATKERVTEAFKIILEDDKVKAVLVNIFGGIVRCDLIAEGIIGAVKEVGVEVPVVVRLEGNNAELGSQLLSESGLDIIAATSLTDAAVQAVKAAEGK

SEQ ID NO: 93947 - DNA, 1233 bp, Xanthobacter autotrophicus Py2
  CDS (1)..(1233): transl_table=11
atgcgcggccctcgtcgagggaggaaccccatgaacattcacgagtaccaggcgaaagcccttctcaaggaattcggcgtgccggtgtcgcgcggccttgccgccttcacgccacaggacgcggaagccgccgccgcgaagctgggcggcatcgcgttcgtggtgaaggcacagatccatgcgggcgggcgcggcaagggcaagttcaaggaactgcccgcagaggccaagggcggtgtgcgggtggtgaagaccgccgccgacgtgaaggcgaatgccgcggagatgctcggtaatactctggtgaccatccagaccgggccggacggcaagcaggtgaaccgcctctatattgaggaaggcgcctccatcgacaaggaattctacctgtccatgctggtggaccgcgccaccgcgcgcgtcgccttcgtggtctccactgagggcggcatggacatcgaggaggtggcccatgccacccccgagcgcatcgtcaccttctccgtggacccggccaccggcgtgcagcccctgcacggccgcaaggtggcgcaggcgctgggcctgtccggcgacctcgccaagcaggcggtggcgctgacggcaaacctctatcgcgccttcaccgataaggacatgagccttctggagatcaaccccctggtgctgacgcgggacgatcgcctcgtctgcctcgacgccaaggtggggtttgattccaacgccctgttccgccatccggaggtggtgcaactgcgcgacgagagcgaggaggacttcaaggagatcgaagcctcgcgctacgacctgtcctatatcgccctcgacggcaccatcggctgcatggtcaacggcgcgggcctcgccatggccaccatggacatcatcaaactctacggccgcgagccggcgaacttcctggacgtgggtggcggcgccaccaaggagaaggtgacggccgccttcaagatcatcaccgccgatcccaatgtcgagggaatcctggtgaacatcttcggcggcatcatgcgctgcgacgtgatcgcggagggcgtcatcgccgctgtgcgccagatggggctgaacgtgcccctcgtggtaaggcttgccggcaccaacgtggaagaaggcaagaagatcatccgggaatcgggtctgaacgtgatcccggcggatgacctcgatgacgcggcgcagaagattgtcgcggccgtgaagaaggaagctgcgtga

SEQ ID NO: 93948 - protein, 410 aa, Xanthobacter autotrophicus Py2
MRGPRRGRNPMNIHEYQAKALLKEFGVPVSRGLAAFTPQDAEAAAAKLGGIAFVVKAQIHAGGRGKGKFKELPAEAKGGVRVVKTAADVKANAAEMLGNTLVTIQTGPDGKQVNRLYIEEGASIDKEFYLSMLVDRATARVAFVVSTEGGMDIEEVAHATPERIVTFSVDPATGVQPLHGRKVAQALGLSGDLAKQAVALTANLYRAFTDKDMSLLEINPLVLTRDDRLVCLDAKVGFDSNALFRHPEVVQLRDESEEDFKEIEASRYDLSYIALDGTIGCMVNGAGLAMATMDIIKLYGREPANFLDVGGGATKEKVTAAFKIITADPNVEGILVNIFGGIMRCDVIAEGVIAAVRQMGLNVPLVVRLAGTNVEEGKKIIRESGLNVIPADDLDDAAQKIVAAVKKEAA

SEQ ID NO: 93949 - DNA, 1167 bp, marine gamma proteobacterium HTCC2207
  CDS (1)..(1167): transl_table=11
atgaacctgcatgaatatcagggtaagcagctgtttgccgaatatggactgcctgtgtcgaagggcattgcagcagagactgtagcggaagcggtcgccgctgccgacgaaattggtggtgataagtgggtcgtcaaggctcaggtccacgctggtggtcgcggtaaagccggcggcgttaagctggttagctctaaagccgaaatcgaagcattctctgagcagtggttgggtaaaaacctagtcacctatcaaacagatgccaaaggccagccggttagccgcattttggtagagacttgcactgacatcgaccaagagctgtatttgggcgctgtggttgatcgtggttcacgtcgcattatctttatggcctccaccgaaggcggtgttgagatcgagaaagttgcggaagagactccagaaaaaattctgaaagcgattattgacccactgactggcgcgcagccatatcagggtcgtgatctggcttttaaactgggccttaaaggcgttcaaattaagcagtttgtacagatcttcatgggtctcgcgaaactgtttaaagagaaagatcttgagctgttagaagttaacccactggttatcaccgacgaaggcaaccttcactgcctagatgctaaagtgattatcgacggcaacgctatgtaccgtcagccagcgattaaagcgatgcacgatccctcgcaggaagatgctcgtgaagctcatgccgcttcgtttgagctcaactatgttgccctagacggcaatattggttgcatggtaaatggtgcaggtctggccatgggtactatggacatcgtgcacctgcacggtggttcaccagccaacttcctcgacgtaggtggcggcgcaaccaaagagcgcgtagtagaagcgttcaaaattattctgtctgacagcaatgttaaagccgttcttatcaacattttcggcggcatcgtacgctgtgatttgattgcagacggtgttatcggtgcagtagaagaagtaggcgttaaaattccagtagtcgttcgcttggaaggtaacaacgcagagctaggcactaaaaagctggctgaatctggtctggctattattgccgccaccagcctaactgacgcagcacaacaggcagttaaagctgctggaggtaactaa

SEQ ID NO: 93950 - protein, 388 aa, marine gamma proteobacterium HTCC2207
MNLHEYQGKQLFAEYGLPVSKGIAAETVAEAVAAADEIGGDKWVVKAQVHAGGRGKAGGVKLVSSKAEIEAFSEQWLGKNLVTYQTDAKGQPVSRILVETCTDIDQELYLGAVVDRGSRRIIFMASTEGGVEIEKVAEETPEKILKAIIDPLTGAQPYQGRDLAFKLGLKGVQIKQFVQIFMGLAKLFKEKDLELLEVNPLVITDEGNLHCLDAKVIIDGNAMYRQPAIKAMHDPSQEDAREAHAASFELNYVALDGNIGCMVNGAGLAMGTMDIVHLHGGSPANFLDVGGGATKERVVEAFKIILSDSNVKAVLINIFGGIVRCDLIADGVIGAVEEVGVKIPVVVRLEGNNAELGTKKLAESGLAIIAATSLTDAAQQAVKAAGGN

SEQ ID NO: 93951 - DNA, 1173 bp, Rickettsiella grylli
  CDS (1)..(1173): transl_table=11
atgaatttacatgaatatcaaggtaaagcgttattgagcgaatacggtctacccgttccacgcggtaagctcgcaagtacagtcgaagaagcgttggccgctacagaagccttgggtggttctgcatggatggtcaaagcacaggttcatgcaggaggaagaggaaaagcgggaggcgtcaagtatgttacttcgaaagaagccgttgcaattgaagtaaaacgattactgggtcagcgcttagtgacgcctcaaaccgatgaaaaaggacaaccggttaaccatgtcttgattgcacaaccgtgtgatattaaacgggaactttatttaggcgtcgtgctgtgtcgaagtacgcagcgcattatcatgatggccagtaccgaaggcggcgttgaaattgagaaagtggctgaagaaacacctgaaaaaatcgtgaaggtaatttgtgatcctttacttggagtcatgccttatcaagcgcgcgatttggcctttcaattaaaattaacaccaaatcaagtcaaagaatttacctcaattttattaggcttaggtcggctctttgttgaacgcgatctgagtttgattgaaatcaaccccttaatttgtgacgaaaaaggtcatctaatttgcttagatgctaaagtagttgttgatgacaatgcgttatttcgccaaccagaatgtcgtgcgatgcgtgatccatcacaagaagatgcacgtgagaaccgtgcgcatgattgggaattaaattatatcgcgttagacggcgatataggttgcatggtgaacggtgcaggtttagcgatggcaacgatggatttaattaaattacaggggggtaatcctgctaatttcttagatgttggcggtggcgctacgcaagagcgagtagcagaggcctttaaaattatcttatcggatgaaaaagtgaagggtatattagtgaatatttttggcggcatcgtccgctgcgatatgattgccgaagggattataggtgctgtgaaagaagtcggtattaaaattcctgttgtcgttcgtttagaagggaataacgcagatgttggcgcaaaaaaattatctgaaagtggattaaatattattgccgctaaaagtttaaccgaggctgcagaacacatcattgcagccgttaaatcaacggccgcctaa

SEQ ID NO: 93952 - protein, 390 aa, Rickettsiella grylli
MNLHEYQGKALLSEYGLPVPRGKLASTVEEALAATEALGGSAWMVKAQVHAGGRGKAGGVKYVTSKEAVAIEVKRLLGQRLVTPQTDEKGQPVNHVLIAQPCDIKRELYLGVVLCRSTQRIIMMASTEGGVEIEKVAEETPEKIVKVICDPLLGVMPYQARDLAFQLKLTPNQVKEFTSILLGLGRLFVERDLSLIEINPLICDEKGHLICLDAKVVVDDNALFRQPECRAMRDPSQEDARENRAHDWELNYIALDGDIGCMVNGAGLAMATMDLIKLQGGNPANFLDVGGGATQERVAEAFKIILSDEKVKGILVNIFGGIVRCDMIAEGIIGAVKEVGIKIPVVVRLEGNNADVGAKKLSESGLNIIAAKSLTEAAEHIIAAVKSTAA

SEQ ID NO: 93953 - DNA, 1167 bp, Oceanobacter sp. RED65
  CDS (1)..(1167): transl_table=11
atgaatttacatgaataccaggctaagcagctgttcgcggcctatggtttacctgtttcagaaggcgtagtggcaaccaccgcccaagaagcagaacaagccgccgataagattcccggcgacaaatgggtagttaaagcacaagtacatgctggcggacgtggtaaagctggcggtgtgaaattggtgtcgagcaaacaagaaatcgcagattttgctcaaagctggttaggtaaaaaccttgtaacctatcaaactgacgaaaacggtcagcctgttaatcaaatcctcgtagaatcctgtactgatattgaccaagaattgtacttgggtgcggtagtcgaccgtggtacacgtcgtgttgtatttatggcatccaccgaaggcggcgttgaaattgaaaaagtcgctgaagaaacccctgaaaaaattctaaaagcggaaattgatccgttaaccggtgctcagccatatcaagcacgggaaatcgcattcaagttgggcttgaaagacaagcaaatcaaacagttcacacaaatctttttaggtttgagcaaactgttcttcgacaaggacttagcattgctcgaagtaaacccattggtcatcaccaaagacggtgatcttcactgtcttgatgccaagatcaacgtagatagtaacgcgctatatgcacacaaagatattcaagccatgcacgacccatcacaagaagatggtcgcgaagcggaagctgccaagtgggatcttaactacgtagccctagacggtaacatcggttgtatggtgaatggtgccggtctagccatgggcacaatggatatcatcaagctaagcggtggtgatccagctaacttccttgatgtaggtggcggtgcaacaaaagaacgtgttgcagaagcgttcaaaatcatcctaagcgatgacaatgtcaaagccgtattagtaaacatttttggtggtatcgtacgttgtgacatgatcgccgaaggtattatcggcgcagtaaaagaagtgggcgtaaaagtgccagtggttgtgcgtttagaaggtaacaacgcagaactcggttcaaaagtactggcggaaagtggtttagatattatcgccgccgaaagcttaaccgatgccgctcaacaagtggtaaaagcagcaggaggtaaataa

SEQ ID NO: 93954 - protein, 388 aa, Oceanobacter sp. RED65
MNLHEYQAKQLFAAYGLPVSEGVVATTAQEAEQAADKIPGDKWVVKAQVHAGGRGKAGGVKLVSSKQEIADFAQSWLGKNLVTYQTDENGQPVNQILVESCTDIDQELYLGAVVDRGTRRVVFMASTEGGVEIEKVAEETPEKILKAEIDPLTGAQPYQAREIAFKLGLKDKQIKQFTQIFLGLSKLFFDKDLALLEVNPLVITKDGDLHCLDAKINVDSNALYAHKDIQAMHDPSQEDGREAEAAKWDLNYVALDGNIGCMVNGAGLAMGTMDIIKLSGGDPANFLDVGGGATKERVAEAFKIILSDDNVKAVLVNIFGGIVRCDMIAEGIIGAVKEVGVKVPVVVRLEGNNAELGSKVLAESGLDIIAAESLTDAAQQVVKAAGGK

SEQ ID NO: 93955 - DNA, 1167 bp, Vibrio sp. Ex25
  CDS (1)..(1167): transl_table=11
atgaatttgcatgaataccaagccaaacagctgtttgcagaattcggtttgcctgtgccagaaggctacgcgtgtgatacaccacaagaagcttttgaagctgcaggccgtatcagtacagaaaagaaagtagttaaatgtcaggttcacgctggtggccgtggtaaagcgggcggtgtagagctgcacgatacaaaagaaggcgttaaagagtttgcacaaaagtggttaggtaaaaacctagtgacttaccaaactgacgctaacggtcagccagttacaaaaatccttgttgaagaagcttcaaacattgcaaacgaattatacctaggtgcggttgttgaccgtgcaagccgtaagatcgttttcatggcttcaacagaaggtggtgtggaaatcgaaaaagttgcggaagaaacgccggagcttatccacaaagcagcaatcgatccactagtaggcccacaagcttaccaaggtcgcgagcttgcgttcaaacttggtcttgaaggcgaccaaatcaaacaattcgttaagatcttcatgggtcttggcacgatgttcgcccagtacgatcttgctctacttgagatcaacccgcttgtggttactggtgaaggcaacctgctatgtcttgatggtaagatcaacatcgattcaaacgctctttaccgtcagcctaagcttcgtgaaatgcacgatccatcacaagaagatgagcgtgaagcacacgcagctcagtgggaactgaactacgtagcactagacggtaacgttggctgtatggttaacggtgctggcctagcaatgggtacgatggatatcgtaaacctacacggcggcaaaccagctaacttcctagacgtaggtggcggcgcgacgaaagagcgtgttgctgaagcattcaagatcatcctatcagatgacaacgtgaaagcggtacttgttaacatcttcggtggtatcgtacgttgtgacatgatcgcagaaggtattatcggtgcggttaaagaagtaggtgtaagcgtacctgttgttgttcgtctagaaggtactaacgctgacctaggtcgcgaagttcttgctaattctgatgttgatatcattgctgctgagtcgctaacggatgctgctcagaaagttgttgctgctgcggaggctaaataa

SEQ ID NO: 93956 - protein, 388 aa, Vibrio sp. Ex25
MNLHEYQAKQLFAEFGLPVPEGYACDTPQEAFEAAGRISTEKKVVKCQVHAGGRGKAGGVELHDTKEGVKEFAQKWLGKNLVTYQTDANGQPVTKILVEEASNIANELYLGAVVDRASRKIVFMASTEGGVEIEKVAEETPELIHKAAIDPLVGPQAYQGRELAFKLGLEGDQIKQFVKIFMGLGTMFAQYDLALLEINPLVVTGEGNLLCLDGKINIDSNALYRQPKLREMHDPSQEDEREAHAAQWELNYVALDGNVGCMVNGAGLAMGTMDIVNLHGGKPANFLDVGGGATKERVAEAFKIILSDDNVKAVLVNIFGGIVRCDMIAEGIIGAVKEVGVSVPVVVRLEGTNADLGREVLANSDVDIIAAESLTDAAQKVVAAAEAK

SEQ ID NO: 93957 - DNA, 1167 bp, Alteromonadales bacterium TW-7
  CDS (1)..(1167): transl_table=11
atgaatttgcatgagtatcaggcaaaacaactttttgccgaatatggtttaccagtttctcaaggtttcgcttgcgatacacctgaagaagctgcagcagctgctgaaaaaatcggcggtgatatgtgggttgttaaaactcaggttcacgcaggtggacgtggtaaagctggcggtgtaaagctagttaaaactatcgatgaagttaaagcgtttgcagctaactggttaggtaaaaacctagttacttaccaaacagacgaaaatggtcagccagttgctaaaattttagtagaaagctgtacagatatcgccaacgaattgtacttaggtgcagtagttgatcgtgcttctcgcaaagttgttttcatggcgtctactgaaggcggtgttgaaattgaaactgttgctgaagaaacaccagaacttatccacaaagctgagatcgatccactagtaggtcctcaagcttaccaagcacgtgaacttggtttcaaattgggtcttaacccaacacaaatgaaacagttcgttaagatcttcatgggtcttggtaaaatgtttaacgatttcgatttcgcattacttgaaatcaacccgttagtaatcacagacgaaggtaaccttcactgtcttgacggcaaaataggtatcgatggtaatgcactttaccgtcaaccaaaaatccgtgagttccacgatccatctcaagaagatgcgcgtgaagcacatgcagcaagctttgagcttaactacgtagcactagatggcaacgtaggttgtatggttaacggtgcaggcctagcaatgggtactatggacatcgtaaacctacacggtggcaagccagctaacttcctagatgttggtggcggcgcgactaaagaacgtgtttctgaagcattcaaaatcatcctttctgacgacaatgttaaagctgttttagttaacatctttggcggtatcgtacgttgtgacatgattgctgaaggtatcattggcgcagttaaagaagttggcgtaaacgtacctgtagttgtacgtttagaaggtactaatgctgaattaggtcgtgaagttcttaagagctctgacttagacatcatcgctgctgaatcattaacagacgctgctgaaaaagttgttgctgctgcggagggcaaataa

SEQ ID NO: 93958 - protein, 388 aa, Alteromonadales bacterium TW-7
MNLHEYQAKQLFAEYGLPVSQGFACDTPEEAAAAAEKIGGDMWVVKTQVHAGGRGKAGGVKLVKTIDEVKAFAANWLGKNLVTYQTDENGQPVAKILVESCTDIANELYLGAVVDRASRKVVFMASTEGGVEIETVAEETPELIHKAEIDPLVGPQAYQARELGFKLGLNPTQMKQFVKIFMGLGKMFNDFDFALLEINPLVITDEGNLHCLDGKIGIDGNALYRQPKIREFHDPSQEDAREAHAASFELNYVALDGNVGCMVNGAGLAMGTMDIVNLHGGKPANFLDVGGGATKERVSEAFKIILSDDNVKAVLVNIFGGIVRCDMIAEGIIGAVKEVGVNVPVVVRLEGTNAELGREVLKSSDLDIIAAESLTDAAEKVVAAAEGK

SEQ ID NO: 93959 - DNA, 1167 bp, marine gamma proteobacterium HTCC2143
  CDS (1)..(1167): transl_table=11
atgaaccttcacgagtatcaaggtaaacaattgtttgctgaatacgggttacccgtgtcgaaaggctacgcctgcgacactcccgaagaagcagcgcaggctgccgataaaattggcggcaataaatgggttgttaaagcacaagtgcatgccggtggccgaggcaaggctggtggcgtaaaactggtagatagcaaagaagaaatcaaaagctttgccgaaaattggttgggtaaaaacctggtaacttaccaaacggatgaaaacggtcagccggtttcgaagattttggttgaagcttgcactgacatagatcaagagttgtatctcggcgcggttgtagatcgctcatctcgtcgtattgttttcatggcatccaccgaaggtggtgtggaaatcgagaaagttgctgacgaaacaccagagaaaatcctccgggcagagattgaccccttggtcggagcgcagccctatcaggggcgtgagctagcgtttaagcttggcctcaaaggcgtacaaattaagcagttcgtcaacattttccttggtttggcaaaattgtttcaggacaaagacttggcgttgatagaagttaatccgttagtgattaccgatgaaggtaatttgcattgcctagatgccaagctgggcgtcgatagtaacgctatgtaccggcaaccaacgttgaaggaaatgcatgatccttcacaggaagatgcgcgcgaagcacaagctgcccagtgggagctgaattatgtagcattggacggcaatatcggctgtatggttaacggcgctggcctggctatgggaaccatggatattgttaagttacatggcggttcaccggccaatttcctcgatgttggcggcggtgcgacaaaagagcgtgtatctgaagcgttcaagattattttatcagacgacacagtcaaagcagttttggtgaatatcttcggtggtatcgttcgttgcgatctcattgccgaaggtattatcggtgcagtagaagaagttggtgttgaggttccagtggtagttcgtctcgaggggaacaatgctgagcttggatcaaaactactcgctgaaagcggcttgaacattattgcagctaacagcttaaaagaagctgccgatgcagtggttaaagcagcggagggcaaataa

SEQ ID NO: 93960 - protein, 388 aa, marine gamma proteobacterium HTCC2143
MNLHEYQGKQLFAEYGLPVSKGYACDTPEEAAQAADKIGGNKWVVKAQVHAGGRGKAGGVKLVDSKEEIKSFAENWLGKNLVTYQTDENGQPVSKILVEACTDIDQELYLGAVVDRSSRRIVFMASTEGGVEIEKVADETPEKILRAEIDPLVGAQPYQGRELAFKLGLKGVQIKQFVNIFLGLAKLFQDKDLALIEVNPLVITDEGNLHCLDAKLGVDSNAMYRQPTLKEMHDPSQEDAREAQAAQWELNYVALDGNIGCMVNGAGLAMGTMDIVKLHGGSPANFLDVGGGATKERVSEAFKIILSDDTVKAVLVNIFGGIVRCDLIAEGIIGAVEEVGVEVPVVVRLEGNNAELGSKLLAESGLNIIAANSLKEAADAVVKAAEGK

SEQ ID NO: 93961 - DNA, 1170 bp, marine gamma proteobacterium HTCC2080
  CDS (1)..(1170): transl_table=11
atgaatcttcacgagtatcaaggaaaggcattgtttgcccagtatggtttgccggtttcagtcggtcatgctgtgtctacacctgaggaggcacgtagtgccgcggaaaaaataggtggtgacaagtgggtggttaaagctcaggttcacgctggtggtcggggtaaggccggaggggtaaagttggttgatagccccgacgatgccgcggcttttgcagaacattggctagacaagcgtttagtcacctatcaaacagatgttgatggacagccggtgtcgaagattctggtagaaacctgtaccgatattgatcaggaactctatttaggtgcggtcttggatagagcaagccgtcgtattgtttttatggcctcgactgagggtggcgtagaaattgaaaaggttgctgaagaaactccagaaaaaatccttcgagctgaaatcgatcctctgacgggcccacagccctatcaggggcgtgaactggcgttcaagcttggcttggaaggggttcaagtaaaacaattcgtcgctatttttgtcggcttggcgaaattatttcaggataaagatctcgcgctcattgaagttaaccctttggtcattactgatgagggtaatctgcattgtctggacgctaaaatcgtggccgactccaatgcactttatcggcacgccgatctacgcgagatgcatgacccatcacaggaagatgctcgcgaagctcatgccgcggaatgggacctcaactacgttgcgctggatggcagtatcggttgcatggttaacggcgcaggtttggccatgggaaccatggatattgttaagttgcacggcggctcgcctgcaaactttttggacgttggcggcggcgccaccaaagagcgtgttaccgaggcatttaaaatcatcctgtctgatgaaaatgttaaggcggttctgatcaatatttttggcggtatcgtgcgctgtgatctcatcgccgagggcgttattggtgccgttgaggaagtgggcgttaccgttccggtggtagtcaggctcgagggcaacaatgcagagcttggacaaaaggttctggccgatagtggtctcaatattatggcggcatcaagtctgactgacgctgcagaacaagtggttgcagcagccggaggtgcccaatga

SEQ ID NO: 93962 - protein, 389 aa, marine gamma proteobacterium HTCC2080
MNLHEYQGKALFAQYGLPVSVGHAVSTPEEARSAAEKIGGDKWVVKAQVHAGGRGKAGGVKLVDSPDDAAAFAEHWLDKRLVTYQTDVDGQPVSKILVETCTDIDQELYLGAVLDRASRRIVFMASTEGGVEIEKVAEETPEKILRAEIDPLTGPQPYQGRELAFKLGLEGVQVKQFVAIFVGLAKLFQDKDLALIEVNPLVITDEGNLHCLDAKIVADSNALYRHADLREMHDPSQEDAREAHAAEWDLNYVALDGSIGCMVNGAGLAMGTMDIVKLHGGSPANFLDVGGGATKERVTEAFKIILSDENVKAVLINIFGGIVRCDLIAEGVIGAVEEVGVTVPVVVRLEGNNAELGQKVLADSGLNIMAASSLTDAAEQVVAAAGGAQ

SEQ ID NO: 93963 - DNA, 1167 bp, Pseudomonas putida GB-1
  CDS (1)..(1167): transl_table=11
atgaatcttcacgagtatcagggtaagcagctgttcgctgaatacggcctgccagtttccaagggtttcgcagtcgatacccctgaagctgcagcagaagcttgcgacaagatcggcggttccgagtgggttgtaaaagctcaggttcacgcgggtggtcgcggcaaagcgggcggcgtcaagctggttcgcagcaaggaagacgccaaggcgttcgctgcgcaatggttgggcaagcgcctggtaacctaccagaccgatgccaacggtcagccagtgaccaagatcctggtcgaatcctgcactgacatcgccaaagagctgtacctgggcgctgtagtcgatcgctcgagccgccgtatcgtgttcatggcctccaccgaaggtggcgtggacatcgagaaagtcgctcacgaaactcctgagaagatcatcaaggctactatcgatccgctggtcggcgctcagccgttccagggtcgtgaactggcattccagctgggtctggaaggcaagcaagttgcacagttcgccaagattttcgtaggcctggccaagctgttcaaagaacatgacctggccctgctggaagtcaacccgctggtcatcaaggccgacggcgacctgcactgcctggatgcgaagatcaacatcgacgcaaacgccatgtaccgtcagcctaagctgaaaaccttccacgacccgtctcaggacgaccctcgtgaagcccacgctgccagcttcgagctgaactacgtggccctggaaggcaacatcggctgcatggtcaacggtgctggcctggccatgggtaccatggacatcgtcaacctgcacggcggcaagccggccaacttcctcgacgttggcggtggtgctaccaaagagcgcgttaccgaagcgttcaagatcattctgtccgacagcaatgtcgcggccgttctggtcaacatcttcggcggcatcgttcgctgcgacatgattgccgaaggcatcatcggtgcagtgaaagaagtcggcgttaaagttccggttgtggttcgcctcgaaggcaacaacgccgaactgggcgctaaagtactggcagaaagcggtttgaacatcattgcggcaaccagcctgaccgacgctgctcaacaagttgtcaaagctgcggagggcaagtaa

SEQ ID NO: 93964 - protein, 388 aa, Pseudomonas putida GB-1
MNLHEYQGKQLFAEYGLPVSKGFAVDTPEAAAEACDKIGGSEWVVKAQVHAGGRGKAGGVKLVRSKEDAKAFAAQWLGKRLVTYQTDANGQPVTKILVESCTDIAKELYLGAVVDRSSRRIVFMASTEGGVDIEKVAHETPEKIIKATIDPLVGAQPFQGRELAFQLGLEGKQVAQFAKIFVGLAKLFKEHDLALLEVNPLVIKADGDLHCLDAKINIDANAMYRQPKLKTFHDPSQDDPREAHAASFELNYVALEGNIGCMVNGAGLAMGTMDIVNLHGGKPANFLDVGGGATKERVTEAFKIILSDSNVAAVLVNIFGGIVRCDMIAEGIIGAVKEVGVKVPVVVRLEGNNAELGAKVLAESGLNIIAATSLTDAAQQVVKAAEGK

SEQ ID NO: 93965 - DNA, 1332 bp, Aspergillus niger
  CDS (1)..(1332)
atgtttaagcttgcccgcagcaaaccggttacggcagctttgagggctgcgacggagtcttccgttcagtcccgtgttgctcagcaacagagaaacctgtcgattcacgaatacctgtctgcgaacctgctcaagtcgtatggcatcggcatgcccaagggtgaagtcgcccgctccgcggaggaggctgaggccgttgccaagtccctcggtaatgacgacatggtcatcaaggcccaggttcttgctggtggtcgtggtaagggtactttcgacaatggccttaagggtggtgtgcgcgtgatctactcgcctaccgaggccaagatgttcgctagccagatgatcggacagaagctcatcaccaagcagactggcgctgctggtcgtctttgcaattctgtctacatctgtgagcgcaagtttgctcgccgcgagttctaccttgctgtcctcatggaccgcgcctctcagagccccgtcattgtcgcctcgtcgcaaggtggtatggacattgaggccgtcgctaaggagaaccctgaggccatcatcaccactcccattgacatcaaggtcggtgtgaccgatgccattgctcacaagatcgtcaccgagctcggcttctccgagcagtgcgtcgaggaggccaaggacaccatccagaagctctacaaggtcttcatggagaaggatgctacccagattgagatcaaccctctgtctgagacctccgaccacaaggtcatggccatggatgccaagcttggcttcgatgacaacgccgaattccgccagaaggaggtcttctcctggagagacaccactcaggaagatgccgatgaggtcaaggccgctgagcacggtctgaacttcatcaagcttgacggtgacattggatgcctggttaacggtgctggtcttgccatggccaccatggatatcatcaagcttaacggcggtgcccccgccaacttcctcgatgtcggtggtggtgccacccctgccgccatcaagtccgctttcgagctcatcaccagcgaccccaaggtgactgctatcttcgtcaacatcttcggtggtatcgttcgctgcgatgctatcgcccagggtttgatcaacgtcgtgcaggagatgggtctgcgcactcccatcgttgcccgtctgcagggtaccaacatggagcaggctcacaagctgatcaacgagtctggcctcaagatcttctccattgaggatctccagagcgctgctgagaagtctgttcagttctccaaggtcgtcaagatggcccgcgagatcgacgttggcgttgagttcactcttggtatctaa

SEQ ID NO: 93966 - protein, 443 aa, Aspergillus niger
MFKLARSKPVTAALRAATESSVQSRVAQQQRNLSIHEYLSANLLKSYGIGMPKGEVARSAEEAEAVAKSLGNDDMVIKAQVLAGGRGKGTFDNGLKGGVRVIYSPTEAKMFASQMIGQKLITKQTGAAGRLCNSVYICERKFARREFYLAVLMDRASQSPVIVASSQGGMDIEAVAKENPEAIITTPIDIKVGVTDAIAHKIVTELGFSEQCVEEAKDTIQKLYKVFMEKDATQIEINPLSETSDHKVMAMDAKLGFDDNAEFRQKEVFSWRDTTQEDADEVKAAEHGLNFIKLDGDIGCLVNGAGLAMATMDIIKLNGGAPANFLDVGGGATPAAIKSAFELITSDPKVTAIFVNIFGGIVRCDAIAQGLINVVQEMGLRTPIVARLQGTNMEQAHKLINESGLKIFSIEDLQSAAEKSVQFSKVVKMAREIDVGVEFTLGI

SEQ ID NO: 93967 - DNA, 1161 bp, Herbaspirillum seropedicae
  CDS (1)..(1161): transl_table=11
atgaaaatccatgagtatcagggtaaagaaatcctgcgccagttcggcgtaaccgtgccgcgcggcattccgtgcatgtcggtcgacgaagtcgaagcggccgccaaagagctgggtggtccggtgtgggtcgtcaaagcccagatccatgcgggtggtcgcggcaagggcggtggcgtgaaggtggccaagtccatcgaacaggtcaaggaatacgccaaccagatcatgggcatgcaactggtcacccaccagaccggtcccgaaggccagaaggtccgtcgcctgctgatcgaagaaggcgctgacatcaagaaggaactgtacgtttccctggtcaccgaccgtgtctcgcagaaggtcgtgctgatggcctccagcgaaggcggcatggacatcgaagaagtggcccacagcaacccggaaaagatccacaacgtcatcatcgacccggtcgatggcctgaccgatgcgcaagccgacgacgtggccgccaagatcggcgtgcccgctgcttccatccccgcagcccgcaagaacctgcaaggtctgtacaaggcctactgggaaaccgacgcttccctggctgaaatcaaccccctgatcctgaccggcgacggcaaggtcatcgccctggacgccaagttcaacttcgactccaacgccctgttccgtcatccggaaatcgtcgcctaccgcgacctggacgaagaagatccggctgaagtcgaagcctccaagttcgacctggcctacatctccctggacggcaacatcggctgcctggtcaacggcgccggcctggccatggccaccatggacaccatcaagctgttcggcggcgagccggccaacttcctggacgtgggcggcggtgccaccaccgagaaggtcactgaagccttcaagatcatgctgaagaaccccgaactgaaggccatcctggtcaacatcttcggcggcatcatgcgctgtgacgtgatcgccgaaggcgtgatcgctgcttccaaggcggtctcgctgaaggtgcctctggtggtgcgcatgaagggcaccaacgaagacctgggcaagaagctgttggccgattccggtctgccgatcatctcggccgattcgatggaagaagccgcccaaaaggtcgtggcagccgccaagtaa

SEQ ID NO: 93968 - protein, 386 aa, Herbaspirillum seropedicae
MKIHEYQGKEILRQFGVTVPRGIPCMSVDEVEAAAKELGGPVWVVKAQIHAGGRGKGGGVKVAKSIEQVKEYANQIMGMQLVTHQTGPEGQKVRRLLIEEGADIKKELYVSLVTDRVSQKVVLMASSEGGMDIEEVAHSNPEKIHNVIIDPVDGLTDAQADDVAAKIGVPAASIPAARKNLQGLYKAYWETDASLAEINPLILTGDGKVIALDAKFNFDSNALFRHPEIVAYRDLDEEDPAEVEASKFDLAYISLDGNIGCLVNGAGLAMATMDTIKLFGGEPANFLDVGGGATTEKVTEAFKIMLKNPELKAILVNIFGGIMRCDVIAEGVIAASKAVSLKVPLVVRMKGTNEDLGKKLLADSGLPIISADSMEEAAQKVVAAAK

SEQ ID NO: 93969 - DNA, 1383 bp, Aspergillus oryzae
  CDS (1)..(1383)
atgttcaagctcgcccgcagcaggccaatcgcggcagcttttagagctgcgacggagtcttccgttcaatctcgcatttgccagcaacagagaaacctgtcgatccatgaacatttgtccgcgaagctcctcaagtcgtatggtgtaggaatgcccaagggcgaggtcgcttactctgcggaggaagccgaagctgttgccaagtcccttggcaatgatgacatggtcatcaaggctcaagttcttgctggtggtcgcggtaagggtagttttgataatggtctcaagggcggtgtacgcgttatctactcacctaccgaagccaagatgttcgctggccaaatgatcggacacaaactcattacgaagcagaccggtgctgccggccgtctttgtaatgctgtgtatatctgcgagcgcaagttcgctcgccgtgagttctacctagccgttctcatggatcgccagtcacagagccccgtcattgtcgcctcctcacaaggcggtatggacattgaggccgttgccaaggaaacccccgaagctatcatcaccactcccatcgacattaaggtcggtgttactgatgagattgctggcaagattgctactgagctcggtttctccgagcagtgcatcacggaggctaaggacactattcaaaagctttacaaggtcttcatggagaaggatgctactcagatcgagatcaaccctctgtcagagacctccgaccaccaggttatggccatggatgccaagttgggctttgatgacaacgcagacttcagacaaaaggaagtgttctcgtggagagacaccacccaagaagacgctgatgaggtcaaggctgctgagcacggattgaacttcatcaaactcgatggtgatatcggctgcttgggtaagaacggcaatgggttgctcgtctcttctatgctaattacagatctagttaacggtgctggtctcgccatggctactatggatatcatcaagcttaacggtggtaaccccgccaacttcctcgatgttggtggtggtgccacccctgctgccatcaagtctgctttcgagcttattaccagcgatcccaaggtgtcggccatctttgtcaacatctttggcggtattgttcgctgtgacgccatcgctcagggcttgatcaatgttgtgaacgagatgggactgcgcactcctattgttgcgcgtttgcagggtaccaacatggagcaggctcataaactgctgaacgagtctggtctgaagatcttttccattgaggaccttcagaatgccgctgagaaatctgttcaattctcgaaagttgtaaagatggcccgtgaaatcgacgtgggtgttgagtttactcttggtatctaa

SEQ ID NO: 93970 - protein, 460 aa, Aspergillus oryzae
MFKLARSRPIAAAFRAATESSVQSRICQQQRNLSIHEHLSAKLLKSYGVGMPKGEVAYSAEEAEAVAKSLGNDDMVIKAQVLAGGRGKGSFDNGLKGGVRVIYSPTEAKMFAGQMIGHKLITKQTGAAGRLCNAVYICERKFARREFYLAVLMDRQSQSPVIVASSQGGMDIEAVAKETPEAIITTPIDIKVGVTDEIAGKIATELGFSEQCITEAKDTIQKLYKVFMEKDATQIEINPLSETSDHQVMAMDAKLGFDDNADFRQKEVFSWRDTTQEDADEVKAAEHGLNFIKLDGDIGCLGKNGNGLLVSSMLITDLVNGAGLAMATMDIIKLNGGNPANFLDVGGGATPAAIKSAFELITSDPKVSAIFVNIFGGIVRCDAIAQGLINVVNEMGLRTPIVARLQGTNMEQAHKLLNESGLKIFSIEDLQNAAEKSVQFSKVVKMAREIDVGVEFTLGI

SEQ ID NO: 93971 - DNA, 1388 bp, Solanum tuberosum
  CDS (5)..(1270)
agaaatggtgagaggaatgctgcgtaaacttgccaatcagtctctttcagtcgccggaaaatggcagcagcaacagctccgccgcctcaacatccacgagtatcagggagctgagttgatgggaaaatatggaatcaatgtaccgaaaggtgttgctgttgcttcccttgatgaagtgaaaaaagcaattcaagacgtgttccctaaccaaagcgaggtcgttgttaagtcacaagtccttgctggtggacgtggccttggaacgttcaaaaatggatttcagggtggagttcatattgtcaaggctgatcaggctgaagagattgccagtaaaatgcttggacagatacttgttactaagcaaactggagctcaaggaaaagttgtcagcaaggtttacctatgtgaaaagatgtccttggttaatgaaatgtacttttcaattatacttgatcgtgcaactgctggccctctcattattgcttgtcgaaagggtggaaccagcatagaagacctagcagaaaaatttcccgacatgattataaaggttccaattgatgttttcaaaggaatcagtgatgaagatgccgcaaaggttgttgatggattggctccaaaagtagctgacagaaatgattcaattgaacaagtgaaaaagttgtacaaccttttctgtgaaactgactgcacaatgttagagatcaacccccttgcagaaacatctgacaacaagctggtagctgcagatgcaaagctcaattttgacgataatgctgcttaccgtcaaaaagaaatcttttctcttcgcgattcatcacaagaagatcctcgtgaggttgctgctgcaaaagctgatttgaattatattggcttggatggagaaattggttgcatggtaaatggtgctgggttggcaatggctaccatggatattattaagcttcatgggggaactccagccaattttctagatgttggtggaaatgctactgaaggccaggttgtcgaggccttcaaaattttgactgcagatgagaaggtgaaagctattttggtgaacatctttggaggaataatgaagtgtgatgtgatagccagtggtattgttaatgctgccaaacaggttcaactgaaagtgcctgtgattgttcgtctggaaggaaccaacgtcgaacaagggaagagaattcttaaggaaagtggcatgaaactgattaccgctgaggatttagatgacgcagctgaaaaggcagtcaaggccttagcttagttgaaagaacaaaaaagagaacaaatttgtataattctaatttgtgtaagctttcgattggtcccttttttgtctgggataatctgaatgtggcattcttgattttacaataaaaaca

SEQ ID NO: 93972 - protein, 421 aa, Solanum tuberosum
MVRGMLRKLANQSLSVAGKWQQQQLRRLNIHEYQGAELMGKYGINVPKGVAVASLDEVKKAIQDVFPNQSEVVVKSQVLAGGRGLGTFKNGFQGGVHIVKADQAEEIASKMLGQILVTKQTGAQGKVVSKVYLCEKMSLVNEMYFSIILDRATAGPLIIACRKGGTSIEDLAEKFPDMIIKVPIDVFKGISDEDAAKVVDGLAPKVADRNDSIEQVKKLYNLFCETDCTMLEINPLAETSDNKLVAADAKLNFDDNAAYRQKEIFSLRDSSQEDPREVAAAKADLNYIGLDGEIGCMVNGAGLAMATMDIIKLHGGTPANFLDVGGNATEGQVVEAFKILTADEKVKAILVNIFGGIMKCDVIASGIVNAAKQVQLKVPVIVRLEGTNVEQGKRILKESGMKLITAEDLDDAAEKAVKALA

SEQ ID NO: 93973 - DNA, 1555 bp, Neocallimastix patriciarum
  CDS (98)..(1408)
atattttttattaataattaattttacaagactttcaaaattttctaattattattaataattttagagatctttaatttttaaaattaaatacaaaatgcttgctaacgttactcgttcaacttctaaggctgctccagctttagcttccattgcccaaactgcccaaaagcgtttcctttctgttcatgaatactgttccatgaaccttcttcacgaatacaatgttaacgctccaaagggtattgttgccaagaccccagaagaagcttaccaagctgccaagaagcttaacactgaagacttagtcatcaaggctcaagttcttgctggtggtcgtggtaagggtcacttcgacagtggtcttcaaggtggtgtcaagctttgctacactccagaacaagttaaggattacgcttccaagatgttaggtcacaagcttatcaccaagcaaactggtgctgctggtagagactgtaacgctgtttacgttgtcgaacgtcaatacgctcgtcgtgaatactacttcgccattcttttagatcgtgccactcgtggtccagttcttgttgcttcttctgaaggtggtgttgaaattgaagaagttgccaagaccaacccagatgctattattactgttccattcagtattaagactggtcttaccaaggaaattgctcttgataccgctaagaagatgggtttcactgaaaagtgtgttccacaagctgctgacactttcttaaagctttacaagatcttcattgaaaaggatgccactatggttgaaattaacccaatggccgaaaacaacagaggtgaagttgtttgtatggatgccaagttcggtttcgatgataacgcttcttacaagcaaaagggtatcttcgctctccgtgataccactcaagaagatccacgtgaagttgctgctgccaagtggaaccttaactacgtcggtatggaaggtaacattggttgtcttgttaacggtgccggtcttgctatggctactatggatatcattaagcttaacggtggtgtcccagctaacttccttgatgtcggtggttctgctactgctaagcaagttaaggaagccttcaagattatttcttccgataaggctgtttccgctatccttgttaacattttcggtggtatcatgagatgtgatatcgtcgctgaaggtgttatccaagctgttaaggaactcggtcttgacattccacttgttgttcgtcttcaaggtaccaaggtcgaagaagccagagaacttatcagaaactctaacctttccttatacgctattgatgatcttgacaaggccgctaagaaggttgtccaacttgccaatgttgttggtttagctaagaaaaacggtattaagatcaagattgaaaactagattaatttatttataaaagccaaattaaattaaaatattcttttttttttgtaattttgaaagaaagaaaaaaaaaggagaaaatattttttttttaactttttataaagaatatatatatataataaaattaaaaaaaaaaaaaaa

SEQ ID NO: 93974 - protein, 436 aa, Neocallimastix patriciarum
MLANVTRSTSKAAPALASIAQTAQKRFLSVHEYCSMNLLHEYNVNAPKGIVAKTPEEAYQAAKKLNTEDLVIKAQVLAGGRGKGHFDSGLQGGVKLCYTPEQVKDYASKMLGHKLITKQTGAAGRDCNAVYVVERQYARREYYFAILLDRATRGPVLVASSEGGVEIEEVAKTNPDAIITVPFSIKTGLTKEIALDTAKKMGFTEKCVPQAADTFLKLYKIFIEKDATMVEINPMAENNRGEVVCMDAKFGFDDNASYKQKGIFALRDTTQEDPREVAAAKWNLNYVGMEGNIGCLVNGAGLAMATMDIIKLNGGVPANFLDVGGSATAKQVKEAFKIISSDKAVSAILVNIFGGIMRCDIVAEGVIQAVKELGLDIPLVVRLQGTKVEEARELIRNSNLSLYAIDDLDKAAKKVVQLANVVGLAKKNGIKIKIEN

SEQ ID NO: 93975 - DNA, 1427 bp, Solanum lycopersicum
  CDS (14)..(1267)
  misc_feature (1276)..(1276): n is a, g, c or t
  misc_feature (1377)..(1377): n is a, g, c or t
gcacgagggaggaatgctgcgtaaacttgccaatcagtctctttcagtcgccggaaaatggcagcagcaacagctccgccgcctcaacatccacgaatatcagggagctgaattgatgagtaaatatggaatcaatgtaccgaaaggtgttgctgttgcttcccttgatgaagtgaaaaaagcaattcaagacgtgttccctaaccaaagcgaggttgttgttaagtcacaagtccttgctggtggtcgtggccttggaacgtttaaaaatggatttcagggtggagttcatattgtcaaggctgatcaggctgaagacattgccagtaaaatgcttggacagatacttgttactaaacaaactggagctcaaggaaaagttgtcagcaaggtttatctatgtgaaaagatgtccctggttaatgaaatgtacttttcaattatacttgatcgtgcaactgctggccctctcattattgcttgtcgaaagggtggaaccagcatagaagacctagcagaaaaattccccgacatgattataaaggttccaattgatgttttcaaaggaatcagtgatgcagatgctgcaaaggttgttgatggtttggctccaaaagtagctgacagaaacgattcaattgaacaagtgaaaaagttgtataaacttttctgtgaaactgactgcacaatgttagagatcaacccccttgcagaaacttctgacaacaagctggtagctgcagatgcaaagctcaattttgacgataatgctgcttaccgccaaaaggaaatattttctcttcgcgattcatcacaagaagatcctcgtgaggttgctgctgcaaaagccgatttgaattatattggcttggatggagaaattggttgcatggtaaatggtgctggattggcaatggctaccatggatattattaagcttcatgggggaactccagccaattttctagatgttggtggaaatgctactgaaggccaggttgtcgaggccttcaaaattttgactgcagatgagaaggtgaaagctattttggtgaacatctttggcggaataatgaagtgtgatgtgatagccagtggtattgttaatgcagccaagcaggttcaactgaaagtacctgtgattgttcgtctggaaggaaccaacgtcgaacaagggaagagaattctcaaggaaagtggcatgaaactgattaccgctgaggatttagatgacgcagctgaaaaggcagtcaaggccttagcttagttgaaagancaaaaaagagaacaaaatttgttataattttaatttgtgtaagccttttgattggctccctttttgtctgggataatctgaatgtgcaattcttgattttncaataaaacaatgagctacacttttttgtcaaaaaaaaaaaaaaaaaaaa

SEQ ID NO: 93976 - protein, 417 aa, Solanum lycopersicum
MLRKLANQSLSVAGKWQQQQLRRLNIHEYQGAELMSKYGINVPKGVAVASLDEVKKAIQDVFPNQSEVVVKSQVLAGGRGLGTFKNGFQGGVHIVKADQAEDIASKMLGQILVTKQTGAQGKVVSKVYLCEKMSLVNEMYFSIILDRATAGPLIIACRKGGTSIEDLAEKFPDMIIKVPIDVFKGISDADAAKVVDGLAPKVADRNDSIEQVKKLYKLFCETDCTMLEINPLAETSDNKLVAADAKLNFDDNAAYRQKEIFSLRDSSQEDPREVAAAKADLNYIGLDGEIGCMVNGAGLAMATMDIIKLHGGTPANFLDVGGNATEGQVVEAFKILTADEKVKAILVNIFGGIMKCDVIASGIVNAAKQVQLKVPVIVRLEGTNVEQGKRILKESGMKLITAEDLDDAAEKAVKALA

SEQ ID NO: 93977 - DNA, 1511 bp, Arabidopsis thaliana
  CDS (119)..(1384)
ataaagtaggaaaaaattagggttagactcgatcattcatagctgcgactattctctgctctttctacattttctcattttctcttgggctacttttcgactactaacaaatccaacgatgaggggattggtgaacaagctcgtgtccagatctctctccatctccgggaaatggcagaaccaacagcttcgtcgtctcaacatccacgagtatcagggagctgaattgatggggaaatatggagttaatgtgccgaaaggagtagctgcttcttcgttggaagaagttaaaaaggctattcaagatgttttccctaatgaaagcgagttggttgttaagagccagattttggctggtggaagaggtcttggaacattcaagagtggtcttaagggtggtgttcacattgttaaacgtgatgaggctgaagagattgctggaaagatgctaggacaagtacttgtcaccaagcaaactggtcctcaaggcaaagtagttagcaaggtttacttgtgtgagaaattgtcactcgtcaatgagatgtacttttccattattctggaccgtaaatctgctggaccgttgatcattgcctgtaaaaagggtggtaccagtattgaagatcttgctgagaagttccctgacatgatcatcaaggtaccaattgatgtatttgcaggaatcactgatgaagatgctgctaaggttgtggatggtctggctcccaaagctgctgacagaaaagattcgattgaacaagtgaagaagctatacgaactcttccgcaagactgactgcacaatgttggaaatcaatccccttgcggagacatcaactaatcaattggtagctgctgatgccaaattgaacttcgatgataatgctgcgttccgacaaaaagaggttttcgccatgcgtgatccaacacaggaggatccacgagaggtggctgctgctaaagttgacctgaactacatcggtttagatggagagattggttgcatggtgaatggtgctggattggccatggcaaccatggacatcattaaattacacggtggaacacccgccaatttccttgacgttggtggaaatgcttctgagcaccaggtggtggaagcgtttaagatactgacatcggacgataaagtgaaagcaatcttggtgaacatatttggtgggataatgaaatgtgatgtgattgctagtggaatcgtgaacgctgcaaaagaggtcgcattgaaagtgccagtggtggttagtctagaaggaacgaatgttgagcagggaaagagaatcctcaaggaaagtggaatgaaactcataacagctgatgatttggatgatgcagctgagaaagcggttaaagctttagctcactaatctctctatatataccaaaagccggtttgttaattgttttgtggttgacgcccaatttacactttcttgcggatatcatttcctcaaacagatcaataatgaactggtctcctttttttgtgtgatc

SEQ ID NO: 93978 - protein, 421 aa, Arabidopsis thaliana
MRGLVNKLVSRSLSISGKWQNQQLRRLNIHEYQGAELMGKYGVNVPKGVAASSLEEVKKAIQDVFPNESELVVKSQILAGGRGLGTFKSGLKGGVHIVKRDEAEEIAGKMLGQVLVTKQTGPQGKVVSKVYLCEKLSLVNEMYFSIILDRKSAGPLIIACKKGGTSIEDLAEKFPDMIIKVPIDVFAGITDEDAAKVVDGLAPKAADRKDSIEQVKKLYELFRKTDCTMLEINPLAETSTNQLVAADAKLNFDDNAAFRQKEVFAMRDPTQEDPREVAAAKVDLNYIGLDGEIGCMVNGAGLAMATMDIIKLHGGTPANFLDVGGNASEHQVVEAFKILTSDDKVKAILVNIFGGIMKCDVIASGIVNAAKEVALKVPVVVSLEGTNVEQGKRILKESGMKLITADDLDDAAEKAVKALAH

SEQ ID NO: 93979 - DNA, 1512 bp, Drosophila melanogaster
  CDS (1)..(1512)
atggcttcattcttggcacgaactggcggccccctgatcgaaaccgttaggccagcggccataaaaaagattcttggcctggctcccatcgccgtccagcagctgaggaacctcaatgtccaggaacacgtttcctacagtctgctcaatgaggccaagatcccaacacctcgtttcgctgttgccaagaacggcaaggaggccaacgatatcgccaccaagctgaagaccgataacctggtgctgaaggctcaggttttggccggaggacgaggcaaaggaacctttaagaatggcctgaagggaggtgtgcgagtggtctacgatccccagaccgctgaagaactttcaagcaaaatgatcgatcagcttctggtcaccaagcaaaccggagcagccggtcgcatctgcaaaaaggtgatggttgccgaaaggaagttcccccgccgtgagttctacttcgccgtgatgatggagcgtgcctttaacggtcccgtgctgatcgcctccaaggagggtggtgttgatattgaggaggtggctgccagcagtccagatgccattttgtacgaacccatcgatataggcactggcttgaccagtgaacaggccgaaaagatcgtcaagaaggttggtctgggcggcgatggcgaggacacacatgtccagatgctgttgaatctgtatgacctgttcgtcaagaaggatgccctcttggttgagatcaacccctatgccgaggatgccatgtccggctgcttcttcgcattggatgctaagctgcgatttgatgacaacgccgagtttcgtcagaaggagctgtttgcgctgcgcgattggacccaggaggatcccaaggaagtcgaggctgccaaatacaatctgaactacattgccctggatggcactatcggctgcatggtgaacggcgccggtctggccatggccaccatggatatcattaagttgtatggcggtgaaccggccaatttcctggatgtcggtggtggtgccactgccgaggcggtcaaggccgccttcaagatcatcacttccgatccgaaggtgctttgcattctggtcaacatcttcggtggtattatgcgttgtgatgtcattgccgagggtatcatctccgccaccaaggatctgaatctgaacatgcccgtggttgtgcgtcttcagggaaccaaagtcaaggaggcccgcgaactgattcgtacatctggactgaagattctggcccgcgatgatctagataaggctgccgatctcgccgtgcacttggcgcaaatcgtcaaactggcccgcgaaatgaagatggacgtgaacttcgagattcccgatgcccaaaagggcaagggcgattgcaagaaagatcaaaaacagcccgacagtaaaggtggcaagaagtcggagaagaaagatgacaagaaatctgattgcacaaaaaaagaggaaaagaaaaaggaagaaaagaaagacatttgcgaaaagaaaggtaaaaagtaa

SEQ ID NO: 93980 - protein, 503 aa, Drosophila melanogaster
MASFLARTGGPLIETVRPAAIKKILGLAPIAVQQLRNLNVQEHVSYSLLNEAKIPTPRFAVAKNGKEANDIATKLKTDNLVLKAQVLAGGRGKGTFKNGLKGGVRVVYDPQTAEELSSKMIDQLLVTKQTGAAGRICKKVMVAERKFPRREFYFAVMMERAFNGPVLIASKEGGVDIEEVAASSPDAILYEPIDIGTGLTSEQAEKIVKKVGLGGDGEDTHVQMLLNLYDLFVKKDALLVEINPYAEDAMSGCFFALDAKLRFDDNAEFRQKELFALRDWTQEDPKEVEAAKYNLNYIALDGTIGCMVNGAGLAMATMDIIKLYGGEPANFLDVGGGATAEAVKAAFKIITSDPKVLCILVNIFGGIMRCDVIAEGIISATKDLNLNMPVVVRLQGTKVKEARELIRTSGLKILARDDLDKAADLAVHLAQIVKLAREMKMDVNFEIPDAQKGKGDCKKDQKQPDSKGGKKSEKKDDKKSDCTKKEEKKKEEKKDICEKKGKK

SEQ ID NO: 93981 - DNA, 1333 bp, Arabidopsis thaliana
  CDS (1)..(1266)
atgaggggattggtgaacaagctcgtgtccagatctctctccatctccgggaaatggcagaaccaacagcttcgtcgtctcaacatccacgagtatcagggagctgaattgatggggaaatatggagttaatgtgccgaaaggagtagctgcttcttcgttggaagaagttaaaaaggctattcaagatgttttccctaatgaaagcgagttggttgttaagagccagattttggctggtggaagaggtcttggaacattcaagagtggtcttaagggtggtgttcacattgttaaacgtgatgaggctgaagagattgctggaaagatgctaggacaagtacttgtcaccaagcaaactggtcctcaaggcaaagtagttagcaaggtttacttgtgtgagaaattgtcactcgtcaatgagatgtacttttccattattctggaccgtaaatctgctggaccgttgatcattgcctgtaaaaagggtggtaccagtattgaagatcttgctgagaagttccctgacatgatcatcaaggtaccaattgatgtatttgcaggaatcactgatgaagatgctgctaaggttgtggatggtctggctcccaaagctgctgacagaaaagattcgattgaacaagtgaagaagctatacgaactcttccgcaagactgactgcacaatgttggaaatcaatccccttgcggagacatcaactaatcaattggtagctgctgatgccaaattgaacttcgatgataatgctgcgttccgacaaaaagaggttttcgccatgcgtgatccaacacaggaggatccacgagaggtggctgctgctaaagttgacctgaactacatcggtttagatggagagattggttgcatggtgaatggtgctggattggccatggcaaccatggacatcattaaattacacggtggaacacccgccaatttccttgacgttggtggaaatgcttctgagcaccaggtggtggaagcgtttaagatactgacatcggacgataaagtgaaagcaatcttggtgaacatatttggtgggataatgaaatgtgatgtgattgctagtggaatcgtgaacgctgcaaaagaggtcgcattgaaagtgccagtggtggttcgtctagaaggaacgaatgttgagcagggaaagagaatcctcaaggaaagtggaatgaaactcataacagctgatgatttggatgatgcagctgagaaagcggttaaagctttagctcactaatctctctatatataccaaaagccggtttgttaattgttttgtggttgacgcccaatttacactttct

SEQ ID NO: 93982 - protein, 421 aa, Arabidopsis thaliana
MRGLVNKLVSRSLSISGKWQNQQLRRLNIHEYQGAELMGKYGVNVPKGVAASSLEEVKKAIQDVFPNESELVVKSQILAGGRGLGTFKSGLKGGVHIVKRDEAEEIAGKMLGQVLVTKQTGPQGKVVSKVYLCEKLSLVNEMYFSIILDRKSAGPLIIACKKGGTSIEDLAEKFPDMIIKVPIDVFAGITDEDAAKVVDGLAPKAADRKDSIEQVKKLYELFRKTDCTMLEINPLAETSTNQLVAADAKLNFDDNAAFRQKEVFAMRDPTQEDPREVAAAKVDLNYIGLDGEIGCMVNGAGLAMATMDIIKLHGGTPANFLDVGGNASEHQVVEAFKILTSDDKVKAILVNIFGGIMKCDVIASGIVNAAKEVALKVPVVVRLEGTNVEQGKRILKESGMKLITADDLDDAAEKAVKALAH

SEQ ID NO: 93983 - DNA, 1449 bp, Neocallimastix frontalis
  CDS (61)..(1374)
gaattccgaataattattaaaataattttagagatcttttaatttttgaaattatacacaatgcttgctaacgttactcgttcaacttctaaggctgctccagctttagcttccattgcccaaactgcccaaaagcgtttcctttctgttcatgaatactgttccatgaaccttcttcacgaatacaacgtcaatgctccaaagggtattgtcgctaagactccagaagaagcttaccaagctgccaagaagcttaacactgaagacttagtcatcaaggctcaagttcttgctggtggtcgtggtaagggtcacttcgacagtggtcttcaaggtggtgtcaagctctgttacaccccagaacaagttaaggactacgcttccaagatgttaggtcacaagcttatcaccaagcaaactggtgctgctggtagagactgtaacgctgtttacgttgtcgaacgtcaatacgctgctcgtgaatactacttcgccattcttttagatcgtgccactcgtggtccagttcttgttgcttcctctgaaggtggtgttgaaattgaagaagttgccaagaccaacccagatgctatcctcactgttccattcagtattaagactggtcttaccagagaagttgctcttgataccgctaagaagatgggtttcactgaaaagtgtgttccacaagctgctgatactttcatgaagctttacaagatcttcattgaaaaggatgccactatggttgaaattaacccaatggctgaaaacaacagaggtgaagttgtctgtatggatgctaagttcggtttcgatgataacgcttcttacaagccaaagggtatcttcgctctccgtgataccactcaagaagatccacgtgaagttgctggacatgccaagtggaaccttaactacgtcggtatggaaggtaacattggttgtcttgttaatggtgccggtcttgctatggctactatggatatcattaagcttaacggtggtgttccagctaacttccttgatgttggtggttctgctactgccaagcaagttaaggaagccttcaagattatttcctctgataaggctgtctctgctattcttgttaacattttcggtggtatcatgagatgtgatattgtcgctgaaggtgtcatccaagccgttaaggaacttggtcttgacattccacttgttgtccgtctccaaggtactaaggttgaagaagccagagaacttattaagaactctaacctctccttatacgccattgatgatcttgacaaggccgctaagaaggttgtccaacttgccaatgttgttggtttagctaaggaaaacggtattaagattaagattgaaaactagatttaatttattttagccttaccaaactttttttttaaaaaagataatcttctttttttttgatttttttttttt

SEQ ID NO: 93984 - protein, 437 aa, Neocallimastix frontalis
MLANVTRSTSKAAPALASIAQTAQKRFLSVHEYCSMNLLHEYNVNAPKGIVAKTPEEAYQAAKKLNTEDLVIKAQVLAGGRGKGHFDSGLQGGVKLCYTPEQVKDYASKMLGHKLITKQTGAAGRDCNAVYVVERQYAAREYYFAILLDRATRGPVLVASSEGGVEIEEVAKTNPDAILTVPFSIKTGLTREVALDTAKKMGFTEKCVPQAADTFMKLYKIFIEKDATMVEINPMAENNRGEVVCMDAKFGFDDNASYKPKGIFALRDTTQEDPREVAGHAKWNLNYVGMEGNIGCLVNGAGLAMATMDIIKLNGGVPANFLDVGGSATAKQVKEAFKIISSDKAVSAILVNIFGGIMRCDIVAEGVIQAVKELGLDIPLVVRLQGTKVEEARELIKNSNLSLYAIDDLDKAAKKVVQLANVVGLAKENGIKIKIEN

SEQ ID NO: 93985 - DNA, 1344 bp, Neurospora crassa
  CDS (1)..(1344)
atgttcaagctcggccgcaaccgcgcattggcttctgcctttgctgccacctccagggctcccctcgcctccagactccccagcgtttcccaacaacaaaggagagccctcagcatccacgaatacctctctgctgatctcctccgtcagtatggcatcggtgttcccaagggtgatgtcgccaggaccggcgccgaggccgaggccatcgccaagcagattggcggcgaggacatggtcatcaaggcccaggttcttgctggtggccgtggaaagggtaccttcgacaacggcctcaagggcggtgttcgcgtcatctactcccccaccgaggccaagatgttcgccgagcagatgatcggccacaagctcatcaccaagcagactggcgcccagggccgtctctgcagcgctgtctacatctgcgagcgcaagttcgcccgtcgcgagttctacctcgccgtcctcatggaccgtgcttcgcagggacccgtcattgtttcgtcgtcccagggtggcatggacattgagggtgtcgccaaggagaaccccgaagccatccacaccacctacatcgacatcaacgtcggtgtcaccgatgagatggcccgcgacatcgccaccaagctcggcttcagcgagcagtgcgtcgaggaggccaaggacaccatccagaagctctacaagatcttctgcgagaaggatgccacccagatcgagatcaaccctctttccgagacctctgaccacaaggtcatggccatggacgccaagttcggcttcgatgacaacgctgatttcaggcaacccgacatcttcaagctccgcgacactacccaggaggatcccgatgaggttcgcgccgcccaggctggccttaacttcatcaagctcgatggtgacattggctgccttgtcaacggtgccggtctcgccatggctaccatggacattatcaagctgaacggtggccagcccgccaacttccttgacgtcggtggtggtgctacccccgcggccattagggaggccttcgagctcatcaccagcgaccccaaggttaccgccatctttgtcaacattttcggtggtatcgtccgctgcgacgccatcgcccacggtctcatcaacacggtcaagtctctggacctcaagatccccatcattgcccgtctccagggtaccaacatggaggctgcccgccagctcatcaacgactctggcatgaagatcttctccattgatgatctccagagcgctgctgagaagtctgtccagctctccaaggtcgtcaagatggctcgtgacattgatgtcggcgttgagttcacccttggtatttaa

SEQ ID NO: 93986 - protein, 447 aa, Neurospora crassa
MFKLGRNRALASAFAATSRAPLASRLPSVSQQQRRALSIHEYLSADLLRQYGIGVPKGDVARTGAEAEAIAKQIGGEDMVIKAQVLAGGRGKGTFDNGLKGGVRVIYSPTEAKMFAEQMIGHKLITKQTGAQGRLCSAVYICERKFARREFYLAVLMDRASQGPVIVSSSQGGMDIEGVAKENPEAIHTTYIDINVGVTDEMARDIATKLGFSEQCVEEAKDTIQKLYKIFCEKDATQIEINPLSETSDHKVMAMDAKFGFDDNADFRQPDIFKLRDTTQEDPDEVRAAQAGLNFIKLDGDIGCLVNGAGLAMATMDIIKLNGGQPANFLDVGGGATPAAIREAFELITSDPKVTAIFVNIFGGIVRCDAIAHGLINTVKSLDLKIPIIARLQGTNMEAARQLINDSGMKIFSIDDLQSAAEKSVQLSKVVKMARDIDVGVEFTLGI

SEQ ID NO: 93987 - DNA, 1965 bp, Oryza sativa
  CDS (120)..(1388)
gagtgaaaaatcaaacccgcatatagagagagaggaacagcgaaagaccacgcgtgccatccctccacgcttgtagggtttccggatcggaggagagagccccccacgccgccgcagccatggttcgcggatcgctcgggaagctggcctcgcgcgccctctccgtcgccgggaaatggcagcaccagcagctccgccgcctcaacatccacgagtaccagggcgcggagctgatggggaagtacgggatcaacgtgcccaggggcgcggcggcgggatcggtggaggaggtcaaaaacaccttgaagaacgtcttccctagtgagaaagagatagttgttaagagtcaaatcctggctggtggccgtggattgggaacattcaaaagtggactgcagggtggtgttcatattgttaaggcagaggaagctgaaagcctcgcagcaaaaatgcttggccagattctggtaacaaaacaaactggtccacaggggaagattgtgagcaaggtctacttatgtgagaaactgtcacttgttaatgagatgtacttcgccatcacccttgacaggaatactgctggtccgctcattatagcgtgcagcaagggaggaaccagtattgaagatcttgcagagaagtaccctgatatgatcatcaaggttcctattgatgtattcaagggaatcacagatgatgatgcagctaaagttgttgatggtctggcaccaaagacagctgacagacagtcttccatagaacagattaagaagctctatgaactgttctgcaagtctgattgcacactgctcgagattaatcctcttgctgagacagctgacaacaagctggtcgctgctgatgcaaagttgaactttgatgacaatgctgcctttaggcagaaagagatatttgccatgcgtgacacaacacaggaagatcccagagaggtggctgctgccaaagctgacttgaactacattgggcttgatggagaaattggctgcatggtgaacggtgcaggattggcaatggctacaatggacatcattaagttgcatgggggtacgcctgccaattttcttgatgttggtggaagtgcatcagagggacaggttgtggaagcatttaagattttgacttccgatgatagagtgaaggctattctagtgaacatttttggtggtatcatgaaatgtgatgtgatagcaagtggaatagtgaatgcagcaaaacaggttgacctgaaggtgcctgttgttgttcggttggaaggcaccaatgttgaccaagggaagaggattctaaaggaaagtggaatgaccttaatcactgcagaggatcttgatgatgcggctgagaaagctgtaaaagcatctgtcaaataattaactatttgtagtataccaacatcaagtttattttttgctggcacaagatgagcggtgctcatgacatatttcaggggtctgaagttgggaaccccaaatccttttgaagtggaattattttggcttgatttcccctagaaacattttggtctactgttaataaacctctgtcggcaccaaactgagcaaccacttctttttgccaaagttaaagtggagtttatctgtttttgccttgagcaagagagtacggctttacactttgcatatgcgcgataactgattgtaaagtctgtaacatcttggctataggttatgatgacgtgttatgatcatattgttctgttctaatactgaaatggtattggacgctagctaatgctatgatgccaactaacccttcttttgatgctgaactgtgcactacattgtgccggaaatcaagctgaaggtgtagtcactttgtattacatatgtcacagagcacctgtgtggcttgtgcccgtagtttggcatactttgatttattacgccttcctctcgcgatcgtgaacaaaattgatcagttatctgg

SEQ ID NO: 93988 - protein, 422 aa, Oryza sativa
MVRGSLGKLASRALSVAGKWQHQQLRRLNIHEYQGAELMGKYGINVPRGAAAGSVEEVKNTLKNVFPSEKEIVVKSQILAGGRGLGTFKSGLQGGVHIVKAEEAESLAAKMLGQILVTKQTGPQGKIVSKVYLCEKLSLVNEMYFAITLDRNTAGPLIIACSKGGTSIEDLAEKYPDMIIKVPIDVFKGITDDDAAKVVDGLAPKTADRQSSIEQIKKLYELFCKSDCTLLEINPLAETADNKLVAADAKLNFDDNAAFRQKEIFAMRDTTQEDPREVAAAKADLNYIGLDGEIGCMVNGAGLAMATMDIIKLHGGTPANFLDVGGSASEGQVVEAFKILTSDDRVKAILVNIFGGIMKCDVIASGIVNAAKQVDLKVPVVVRLEGTNVDQGKRILKESGMTLITAEDLDDAAEKAVKASVK

SEQ ID NO: 93989 - DNA, 1302 bp, Schizosaccharomyces pombe
  CDS (1)..(1302)
atgttaaccagaagtgtgctgagaaaagcacctcgcgctttttctccctttttacaaaaaagaaatctagctttacatgaatatatttctcatgatattctcagaaagtttggtgtggacgttcctcgtggtgctcctgctcggagcggtgaagaggcagaaaaggttgctcgtgatcttaaagtcacagatttggtagttaaagctcaagttctagcaggcggtcgtggaaagggccaatttgacagtggcctgcgtggaggagtacggcctgtttatgatgctacagaagcgagaatgtttgctgaacaaatgatcggtcataagttaattaccagacaaactggtcctgctggaaagatttgcaatgttgtctatgtttgcgagaggaagtttattcgtaaagagtattacttcgctattttaatggatcgtgagaaccaatgccccatgatagtcgcctccgaccaaggaggtgttgacattgagactgtagcagctgaaaatcctagcgctatcatcaaacgatctcttcccaacagtccaaatcttgaccctcatatcgcagaagaacttgttgacaaactcggcttttcctcttctagcaagccaaaggccgttgacgcaatcgtcaaactttacaaagtattcaatgattgtgatgctacacaagtagagattaatccccttgctgaaactactgatcacaaggtgttgtgcatggatgctaagctgaactttgacgataatgccgaatttcgtcattccaacattttcgttttgcgggacatttctcaagaagatcctgatgaggctagggctgccaaggttgggttgaactttatcaaattggacggtaacattggttgtttggtcaatggtgctggtctcgcaatggccactatggatatcatcaaacttcatggtggtgaacctgctaatttccttgatgtcggtggtaatgctaatgctgaagcaattcgtgaggcattctctctcatcactaatgatcccaaaactactgctatctttgtgaacatttttggaggtattgttcgatgcgacgttattgccaaaggtcttatctcggtagtatcagcgttgaatctgaacatacctattatttgcagacttcaaggaaccaaccaaggtgctgccaaagaggtaatcaacaactcaggtctccgtattttctcatttgatgatcttgatgaagcagctaagaaggcttgtcgtttcagtcgcgttgtcgaaatggcacgtgaagccgatgtgaatgttagcttcgagctacctttgtag

SEQ ID NO: 93990 - protein, 433 aa, Schizosaccharomyces pombe
MLTRSVLRKAPRAFSPFLQKRNLALHEYISHDILRKFGVDVPRGAPARSGEEAEKVARDLKVTDLVVKAQVLAGGRGKGQFDSGLRGGVRPVYDATEARMFAEQMIGHKLITRQTGPAGKICNVVYVCERKFIRKEYYFAILMDRENQCPMIVASDQGGVDIETVAAENPSAIIKRSLPNSPNLDPHIAEELVDKLGFSSSSKPKAVDAIVKLYKVFNDCDATQVEINPLAETTDHKVLCMDAKLNFDDNAEFRHSNIFVLRDISQEDPDEARAAKVGLNFIKLDGNIGCLVNGAGLAMATMDIIKLHGGEPANFLDVGGNANAEAIREAFSLITNDPKTTAIFVNIFGGIVRCDVIAKGLISVVSALNLNIPIICRLQGTNQGAAKEVINNSGLRIFSFDDLDEAAKKACRFSRVVEMAREADVNVSFELPL

SEQ ID NO: 93991 - DNA, 1988 bp, Saccharomyces cerevisiae
  CDS (446)..(1729)
acgacatcgtagccatattaatatatacatacatatacacagatacattcatctctccaactgtatgaggacttctctaccttgaatggaacaccaaagccaggtagatactaaaaaaaactctttttatgtcttggtacagagaaaaatgctccaactggtatcgattatgtgttcatcgggaattctcggcttttccccgcagcggcggagtgagtattctaaaagttggttggcctttcaattgccgcgtagtcaacatctttgaggttttatataagatcgacgttttccttatcagcactttgacgttttctctcgaaaaataacagtgactatagagcgatagtccagtttttttgtaactgacttttaggtagttaggattaataaggattgagtcaatacaatcgaaaaaaatactgaagcattgcaactgaacaaaatgtactcaagaaaatccttatccctaatttcaaagtgtgggcaattaagcaggctaaacgcgcaagctgctttacaagcaaggagacacttgtcaattcatgaatacaggtcagctcagttattgagggaatacggtattggtactccagaaggatttccagcgttcactcccgaagaggctttcgaagcagccaagaaattaaacactaacaaactggtcatcaaggcgcaggcattgaccggaggtagaggtaaaggtcacttcgacaccggttacaaaagcggtgttcacatgatcgaaagtcctcagcaggcagaggatgttgcaaaagaaatgctcaatcataacctgattactaaacagacgggaatagcggggaagccagtatctgctgtatatatagtgaaaagagtagatacaaagcatgaagcttatttatctattctaatggacagacaaaccaagaaaccgatgatcattgcgtccagtcaaggtggtatgaatattgaagaggtggctgagagaaccccagatgctataaagaaattttcaattgaaacttcaaagggattgagcccacaaatggccaaggatgttgccaagagtctcggtttcagtcccgatgcacaagacgaggcagcaaaagctgtttccaatttgtataaaatattcatggaaagggatgctacacaagtggagattaaccctttgagtgaaattgaacatgatccaacccacaaaatcatgtgtacagacgccaaatttgggtttgatgataacgcatcattcagacaggaaaagatatattcctggagggacttatcacaagaagatcctgatgaagttaaggcaaagaagtatgatttgaattttgttaagttgaagggtaacattggatgtttagtcaatggtgctggtttggctatggctactatggatgtcatcaaattaaatggaggcgatcctgcgaactttttggattgtggtggtggtgccacccctgagaccatcaaacaaggtttcgaattgatcttatccaataagaacgtagatgcaattttcgtcaatattttcggcggtatcgtaagatgtgactatgttgccctggggctggtagaagccgccagagaactagaagttagggtccccattgtggcacgtttgcaaggtaccaaagtagaagaaggccgcgacattatcaataagtcaggcgtgaagatttattcgtttgatgaattagatcctgctgctaaaaaggtcgttgaattgacccaaaattaagcttctcgagaaaaacaaaagagttaataataaagtatatatgcttttttactattaataaagtttcttattttccctacatgtatacatacatataaatatactcttttggaaaaaatttcttttttttttttttaatttttttatatttttccatcttttgatgtaatatagaggttatataatgaaagaatatataagaggtcataaaaaatcattaaaaaaatgcgagttcaggaacatattatcgtttacgtaa

SEQ ID NO: 93992 - protein, 427 aa, Saccharomyces cerevisiae
MYSRKSLSLISKCGQLSRLNAQAALQARRHLSIHEYRSAQLLREYGIGTPEGFPAFTPEEAFEAAKKLNTNKLVIKAQALTGGRGKGHFDTGYKSGVHMIESPQQAEDVAKEMLNHNLITKQTGIAGKPVSAVYIVKRVDTKHEAYLSILMDRQTKKPMIIASSQGGMNIEEVAERTPDAIKKFSIETSKGLSPQMAKDVAKSLGFSPDAQDEAAKAVSNLYKIFMERDATQVEINPLSEIEHDPTHKIMCTDAKFGFDDNASFRQEKIYSWRDLSQEDPDEVKAKKYDLNFVKLKGNIGCLVNGAGLAMATMDVIKLNGGDPANFLDCGGGATPETIKQGFELILSNKNVDAIFVNIFGGIVRCDYVALGLVEAARELEVRVPIVARLQGTKVEEGRDIINKSGVKIYSFDELDPAAKKVVELTQN

SEQ ID NO: 93993 - DNA, 1152 bp, Streptomyces coelicolor
  CDS (1)..(1152): transl_table=11
atggacctgtacgaacaccaggcaagggaactcttcaaggaacacgggatcgtggtcccgagggccgaggtcaccgactcgcccgaacgggcccgggagatcgcccgcgcactcggcggacgcgccgtcgtcaaggcgcaggtgaagaccggcgggcgcggcaaggcgggcggagtgcggctcgccgccgacccggccgaggccgaggaggcggcgcggcacatcctcggcatggacatcaggggacacacggtcgacaccgtcatgctggccgaaccctgcgagatagagcgggagttctacgtctcctacgtcctcgaccgggcgtccggcggcttcctcgccatcgcctccgcggagggcggcacggagatcgaggaggtcgccgcccggcggcccgaggccgtggcgcgcatccccgtcgaccccgccacgggcgtgcacacggccaccgcggtacgcatcgccgacgccgccggcctgcccccgcagaccgtcgacacgctggtgcggctgtggaaggtactggtccgcgaggacgccctcctggtcgaggtcaacccgttggtcaggacggccgagggccggatcgtggccctcgacggcaaggtcaccctcgacgacaacgcccgcttccgacagtcccgttggggcgagacgaggcaggaggacgccgactccctggaggcgcgggccggcgccaagggcctcaactacgtcaagctggacggcgaggtcggcgtcatcggcaacggcgccgggctggtcatgtcgacactcgacgtggtcgccggctgcggtgcccgccccgccaacttcctcgacatcggcgggggcgcctccgcccgggtcatggccgacggactgtccgtcgtgctctccgaccccgacgtgaggtccgtcctcgtcaacgtcttcggcggcatcaccgcctgcgacgcggtcgccgacggcatcgtccgcgccctggacgaggtccggctcaccaaaccgctcgtcgtacgcctcgacgggaacaacgccgcgcggggccgggccctgctcgacgcccgcgcgcaccccctggtcgaacaggccaccaccatggacggcgccgcccgccgtgccgcccggctcgccaccgcggcgtccaccgccggacaggccggataa

SEQ ID NO: 93994 - protein, 383 aa, Streptomyces coelicolor
MDLYEHQARELFKEHGIVVPRAEVTDSPERAREIARALGGRAVVKAQVKTGGRGKAGGVRLAADPAEAEEAARHILGMDIRGHTVDTVMLAEPCEIEREFYVSYVLDRASGGFLAIASAEGGTEIEEVAARRPEAVARIPVDPATGVHTATAVRIADAAGLPPQTVDTLVRLWKVLVREDALLVEVNPLVRTAEGRIVALDGKVTLDDNARFRQSRWGETRQEDADSLEARAGAKGLNYVKLDGEVGVIGNGAGLVMSTLDVVAGCGARPANFLDIGGGASARVMADGLSVVLSDPDVRSVLVNVFGGITACDAVADGIVRALDEVRLTKPLVVRLDGNNAARGRALLDARAHPLVEQATTMDGAARRAARLATAASTAGQAG

SEQ ID NO: 93995 - DNA, 1194 bp, Agrobacterium tumefaciens
  CDS (1)..(1194): transl_table=11
atgaatattcacgaatatcaggctaaggctcttctgaagggctacggcgcgccggttgctgaaggcgtcgccatcctcaaggtcgaagaagccgaagctgccgcaaagcagcttcccggcccgctttacgtcgtcaagagccagattcacgctggcggtcgcggcaagggcaagttcaaggagctcggccccgacgccaagggcggcgttcgcctagcgaagtcgatcgaggaagtcgtttctcattccagggacatgctcggcaacacgctggtaacggcgcagacgggcgacgccggcaaacaggtcaaccgcctctacatcgaagacggtgcggacattgcccgcgaactctattgctcgcttctggttgaccgttcggtcggtcaggtcgcattcgtggtttccactgaaggcggcatggatatcgaagctgtcgcccatgacacgccggaaaagatccacaccatcgccatcaacccggaaaagggcgtgagcgacgctgacgttgccgcaatctccaaggctctcgagcttgatggtgttgcagccgaagacgccaaagcgctgttcccgatcctctacaaggccttcaacgagaaggacatggctctcctcgaggttaacccgctgatcgtcatggaaaatggccatctgcgcgttctcgacgccaagatgtccttcgacggcaacgcgctgttccgccatgaagacgtcaaggcgctgcgcgacgagaccgaagaagacgccaaggaaatcgaagcctccaagtgggacctcgcttacgtggcgctcgacggcaacatcggctgcatggtcaatggtgccggtctcgccatggcgacgatggacatcatcaagctttacggcaaagagccggcaaacttctgtgacgtcggcggcggcgccggcaaggagaaggttgcggcagctttcaagatcattacggctgacccgaaggtcgagggtatcctcgtcaacatcttcggcggcatcatgaagtgcgacgtcatcgccgaaggtgttatcgccgcggtgaaggaagtcggtttgcaggttccgctcgttgttcgcctcgaaggcaccaacgtcgaacttggcaagaagctcctgaacgaatcgggccttgcgattacggctgctgacgacctggacgacgcagccaagaagatcgtcgcggcgatcaacggctaa

SEQ ID NO: 93996 - protein, 397 aa, Agrobacterium tumefaciens
MNIHEYQAKALLKGYGAPVAEGVAILKVEEAEAAAKQLPGPLYVVKSQIHAGGRGKGKFKELGPDAKGGVRLAKSIEEVVSHSRDMLGNTLVTAQTGDAGKQVNRLYIEDGADIARELYCSLLVDRSVGQVAFVVSTEGGMDIEAVAHDTPEKIHTIAINPEKGVSDADVAAISKALELDGVAAEDAKALFPILYKAFNEKDMALLEVNPLIVMENGHLRVLDAKMSFDGNALFRHEDVKALRDETEEDAKEIEASKWDLAYVALDGNIGCMVNGAGLAMATMDIIKLYGKEPANFCDVGGGAGKEKVAAAFKIITADPKVEGILVNIFGGIMKCDVIAEGVIAAVKEVGLQVPLVVRLEGTNVELGKKLLNESGLAITAADDLDDAAKKIVAAING

SEQ ID NO: 93997 - DNA, 1158 bp, Bacillus subtilis
  CDS (1)..(1158): transl_table=11
atgaatatccatgagtaccagggaaaagaagtcctcagaaaatatggggtatctgttcctgaaggtaaagtggcttttacagcagaagaagcagttgagagtgcaaagagcttatccagctcggtttatgtcgtaaaggctcaaattcatgctggcggtcgaggcaaagctggtggggtaaaaatagcaaaatcattagacgaagtaaaagcgtatgccgaagaactattagggaagaccctagttacacatcagacgggtccggacggccaagtaataaaacgcttacttattgaagaaggctgcgatattaaaaaagaatattacatcggtctagtgcttgaccgcgccacttcaagaatcgttttaatggcttctgaagaaggcggaacggaaattgaagaggttgcggagaaaacaccagaaaaaatcaaaaaagctgtcattgatccagctgttggccttcaaggctatcaagccagagaaattgcattcgctattaatattccaaaagagctcgtgggaaaagctgctaaatttatgcttggactatataaagcgtttgttgagaaagactgctcaatcgccgaaatcaatccgcttgttgtgactggcgacggaaatgtgatggcgcttgatgcaaaattgaattttgacagcaatgcgttgtaccgacaaaaggacattatggaatacagagatttggatgaagaagatccgaaagaaattgaagcgtccaaatatgatctaagctacatttcccttgatggaaatatcggctgtatggtaaacggcgcgggacttgcaatgtctacgatggatattatcaagcattatggaggagaaccggccaacttccttgatgtgggcggcggtgcaaccgcggaaaaagtcacggaagcatttaaaatcattctttctgatcaaaacgttaaagggatttttgtcaacattttcggcggcattatgaaatgtgatgtcatcgcagaaggggttgttgaagcgactagacaagttggtttgacattgccgcttgtcgtccgtcttgaaggcacaaacgtggatctagggaagaaaatccttagtgaatcaggattaaacattacatctgcggaatcaatggctgacggcgcgcagaaaatcgtatccttagtttaa

SEQ ID NO: 93998 - protein, 385 aa, Bacillus subtilis
MNIHEYQGKEVLRKYGVSVPEGKVAFTAEEAVESAKSLSSSVYVVKAQIHAGGRGKAGGVKIAKSLDEVKAYAEELLGKTLVTHQTGPDGQVIKRLLIEEGCDIKKEYYIGLVLDRATSRIVLMASEEGGTEIEEVAEKTPEKIKKAVIDPAVGLQGYQAREIAFAINIPKELVGKAAKFMLGLYKAFVEKDCSIAEINPLVVTGDGNVMALDAKLNFDSNALYRQKDIMEYRDLDEEDPKEIEASKYDLSYISLDGNIGCMVNGAGLAMSTMDIIKHYGGEPANFLDVGGGATAEKVTEAFKIILSDQNVKGIFVNIFGGIMKCDVIAEGVVEATRQVGLTLPLVVRLEGTNVDLGKKILSESGLNITSAESMADGAQKIVSLV

SEQ ID NO: 93999 - DNA, 1197 bp, Brucella melitensis
  CDS (1)..(1197): transl_table=11
atgaatattcacgaataccaggccaagcgcctgcttcacacctacggcgcgccgatcgccaatggtgtggctgtctattccgtcgaacaggcggaagaatgggcaaagacgcttcccggaccgctttatgtcgtcaagagccagatccatgctggcggacgcggcaagggcaagttcaaggaactgcctgccgatgcaaagggcggcgtgcgcctcgccaagtctgtcgaggaagtggttgccaatgcgaaggaaatgctgggcaacacgctcgtcaccaagcagaccggcgaagccggcaagcaggtcaaccgtctctacattgaagatggcgccgatatcgagcgtgagctttatctctccatcctgatcgaccgcagcgttggccgtccggcctttgtcgtttcgaccgaaggcggcatggatattgaagccgttgccgaagaaacccctgaaaagatcgtcaccgtcgccatcgacccggccaagggcgtgaccgacgaagatgccaacaagcttgccgatgcgctgaagcttgaaggtggagcccgcgaggacggcctgaagctgttcccgatcctttacaaggctttcaccgagaaggacatgagcctcctcgaaatcaatccgctgatcgtcatgacgaacggtcgcgtgcgcgttctcgatgccaaggtttcgttcgacaacaacgccctgttccgtcacccggacattgttgaactgcgcgacctgacggaagaagatccgaaggaaatcgaagcctccaaatatgacctggcctatgtcgccctcgatggcaatatcggctgcatggtcaatggcgccggccttgccatggcgacgatggacatcatcaagctctatggcgcagaacctgccaacttcctcgatgttggcggcggcgcttccaaggagaaggtgacggctgcgttcaagatcatcaccgccgatccggctgtcgaaggcattctggtcaacattttcggcggcatcatgaagtgcgatgtcattgccgaaggcgtgatcgccgcggtcaaggaagtcggcctcaaggttccgctggttgtccgtctcgaaggcaccaatgtcgagcttggcaagaagatcatcaacgagagcggcctgaacgtcatttcggccgacgatctcgacgatgcggcgcagaagatcgtcgctgcagtgaaggggaattaa

SEQ ID NO: 94000 - protein, 398 aa, Brucella melitensis
MNIHEYQAKRLLHTYGAPIANGVAVYSVEQAEEWAKTLPGPLYVVKSQIHAGGRGKGKFKELPADAKGGVRLAKSVEEVVANAKEMLGNTLVTKQTGEAGKQVNRLYIEDGADIERELYLSILIDRSVGRPAFVVSTEGGMDIEAVAEETPEKIVTVAIDPAKGVTDEDANKLADALKLEGGAREDGLKLFPILYKAFTEKDMSLLEINPLIVMTNGRVRVLDAKVSFDNNALFRHPDIVELRDLTEEDPKEIEASKYDLAYVALDGNIGCMVNGAGLAMATMDIIKLYGAEPANFLDVGGGASKEKVTAAFKIITADPAVEGILVNIFGGIMKCDVIAEGVIAAVKEVGLKVPLVVRLEGTNVELGKKIINESGLNVISADDLDDAAQKIVAAVKGN

SEQ ID NO: 94001 - DNA, 1200 bp, Caulobacter crescentus
  CDS (1)..(1200): transl_table=11
atgaacatccacgaacatcaagccaaagctgtactcgccgagttcggcgcccccgtgccgcgcggcttcgccgccttcacgcccgatgaagccgccgccgccgccgaaaagctgggtgggccggtcttcgtcgtgaagagccagatccacgccggtggccgtggtaagggcaagttcgagggcctgggccccgacgccaagggcggcgtccgcgtcgtcaagtcggtggaagaggttcgctcgaacgccgaggaaatgctgggccgcgtccttgtgacgcaccagaccggcccgaagggcaagcaggtcaaccgcctctacatcgaagaaggcgcggcgatcgccaaggaattctacctgtcgctgctggttgaccgcgcctcgagcaaggtctcggtcgtcgcctcgaccgaaggcggcatggacatcgaggacgtcgcccactcgacgcccgagaagatccacaccttcaccatcgacccggcgacgggcgtgtggccgacgcatcaccgcgccctggccaaggctctgggcctgaccggcggtctggccaaggaagccgcctcgctgctgaaccagctctatacggcgttcatggccaaggacatggccatgctggagatcaacccgctgatcgtgacggcggatgatcacctgcgcgtcctggacgccaagctgtcgttcgacggcaacagcctgttccgtcacccggacatcaaggcgctgcgcgacgagagcgaagaagaccccaaggaaatcgaagcgtcgaagtacgacctggcctacatcgccctcgacggcgaaatcggctgcatggtcaacggcgccggtctggccatggccaccatggacatcatcaagctgtacggcgccgagccggccaacttcctggatgtcggcggcggcgccagcaaggagaaggtcaccgcagccttcaagatcatcaccgccgatccggccgtcaaaggcatcctggtcaacatcttcggcggcatcatgcgctgcgacatcatcgccgaaggcgtgatcgccgcggtgaaggaagtcggtctccaggttccgctggtcgtccgtctggaaggcaccaacgtcgaactcggcaagaaaatcatctcggaaagcggcctgaacgtcatcgccgccaacgatctgtctgacggcgccgagaagatcgtcgccgctgtgaagggcgcccgctaa

SEQ ID NO: 94002 - protein, 399 aa, Caulobacter crescentus
MNIHEHQAKAVLAEFGAPVPRGFAAFTPDEAAAAAEKLGGPVFVVKSQIHAGGRGKGKFEGLGPDAKGGVRVVKSVEEVRSNAEEMLGRVLVTHQTGPKGKQVNRLYIEEGAAIAKEFYLSLLVDRASSKVSVVASTEGGMDIEDVAHSTPEKIHTFTIDPATGVWPTHHRALAKALGLTGGLAKEAASLLNQLYTAFMAKDMAMLEINPLIVTADDHLRVLDAKLSFDGNSLFRHPDIKALRDESEEDPKEIEASKYDLAYIALDGEIGCMVNGAGLAMATMDIIKLYGAEPANFLDVGGGASKEKVTAAFKIITADPAVKGILVNIFGGIMRCDIIAEGVIAAVKEVGLQVPLVVRLEGTNVELGKKIISESGLNVIAANDLSDGAEKIVAAVKGAR

SEQ ID NO: 94003 - DNA, 1179 bp, Chlorobium tepidum
  CDS (1)..(1179): transl_table=11
atgaatattcatgagtatcagggtaaaggcatcctgaaacagttcggcgtggccgttcccaagggcatagtagcattttcggctgaagaagcaaaacaagcggcagagcagctcttcgaggagcagtcgagccccgtagtggtcgtcaaggcgcagattcacgccggtggccgcggcaaggctggcggtgtcaaactggcaaaatcgcctgaagaggtgttcgaaatcgcccagaaaatgctcggcgcaacgctggtaacacaccagaccggacccgaaggcaaggaggttcgccgtctcctcatcgaagagggcatgaatatcgacaaggagttctacctcggcatcaccctcgaccgcaccacgtcgagcaacgtgctcatggtctcgaccgaaggcggcatggagatcgagaaagtggccgaagagaccccagaaaagctgctcaagattcacgtcgatccagtctacggcctgcagggcttccaggctcgcaaggcggcgttcttcctcggcttgcagggtgagcagttccgcaacggcgtcaagttcatcgaggcgctttacaacgcgtacaccaccatcgacgcctcgctggctgagatcaacccgctggtcatcaccaaggagggccgcgtgctcgcgctcgacgccaagatcaacttcgacgacaacgccctctaccgccactctgatttccacgatctgcgtgacattaccgaagaggatccgctcgaatacgaagcctcgaaatcgaacctcaactacgtgcgcctcgacggcaacgttggctgcatggtcaacggcgcaggcctggcgatgggcaccatggacctcatccagctctccggcggcagaccggccaacttccttgatgtcggcggcggtgcaagctccaagacagtcgaagagggtttcaaaatcatcttgggcgacaaaaacgtcaaggcgatcctggtcaacatcttcggcggcatcgtacgctgcgaccgcgtggccggaggcatcatcgaagccgccaaaaacatcggcctgaaggtaccggtgatcgtgcgcctcgaaggcacaaacgccacagaggcccagaaaatgctcgacgaatcgggtctcaacctcatctcggccaaaggcctgagggacgctgcggaaaaggtgcagaaggcactggccacagcataa

SEQ ID NO: 94004 - protein, 392 aa, Chlorobium tepidum
MNIHEYQGKGILKQFGVAVPKGIVAFSAEEAKQAAEQLFEEQSSPVVVVKAQIHAGGRGKAGGVKLAKSPEEVFEIAQKMLGATLVTHQTGPEGKEVRRLLIEEGMNIDKEFYLGITLDRTTSSNVLMVSTEGGMEIEKVAEETPEKLLKIHVDPVYGLQGFQARKAAFFLGLQGEQFRNGVKFIEALYNAYTTIDASLAEINPLVITKEGRVLALDAKINFDDNALYRHSDFHDLRDITEEDPLEYEASKSNLNYVRLDGNVGCMVNGAGLAMGTMDLIQLSGGRPANFLDVGGGASSKTVEEGFKIILGDKNVKAILVNIFGGIVRCDRVAGGIIEAAKNIGLKVPVIVRLEGTNATEAQKMLDESGLNLISAKGLRDAAEKVQKALATA

SEQ ID NO: 94005 - DNA, 1161 bp, Chlamydia trachomatis
  CDS (1)..(1161): transl_table=11
atgcatcttcatgagtatcaagctaaggaccttttaactgcttatcaacttcctattcccccctatcacgtagcgacctccgtacctgaagtagaaacagcgattcaagccgaacaatggaaagctggtgttgtgaaagcacaggttcatgctggaggaagaggaaaaaatggaggggtggttattgcgcactctccggaagacttattagcagcagctgataagctactgcatatgcaattttctagtaatcagacagcagggttgtctcttcctattaataaagtattgatttcccctttagtagagattgcttcggagtattatcttgcgatcgtcatcgatagaaaacatcgttgtcctgtcattatgctatctaaagcaggaggtgtggatatcgaggaagtcgcagaaaagcagccggatcagctgcttaaaatgacactaccttcttctggaaaaatttatgggtatcagttacgccgtattgctaagttcatggagtgggatcaacctattgccgatcaagggaatcgtatcattcgccagttattacaatgtttttatgaaaaggatgcttctttattagagattaatccattggtacttactaaagacgggtctcttgtcattctagatgccaaaatgacgattgatgacaatgctctttatcgacatcctcagctagcagactgctatgatccttctcaggaaaatattcgtgacgtactagctaagcagttaggcctttcatacattgctctagatggaacaatcggatgtttagtcaatggtgcaggattagcgatgagcaccttagatattctgaagttatatggcggttctgctgccaatttcttagatgtaggaggaagtgcttctgaaaagcaaattcaagaagccatctctttagtcttatctgataaaagtgtgcgcgtgctctttatccatatttttggggggattatggattgtgcagtcgtcgcttctggacttgtttctgctatgcaaggacagaaagaaacgatccctactgtaattcggttagaagggacgaatgtagataaaggaaaggacatgattattaacgcaggaattccttgtgagttcgttacatccatgagcgagggggctgaactcgctgtgcaattaagtcgttag

SEQ ID NO: 94006 - protein, 386 aa, Chlamydia trachomatis
MHLHEYQAKDLLTAYQLPIPPYHVATSVPEVETAIQAEQWKAGVVKAQVHAGGRGKNGGVVIAHSPEDLLAAADKLLHMQFSSNQTAGLSLPINKVLISPLVEIASEYYLAIVIDRKHRCPVIMLSKAGGVDIEEVAEKQPDQLLKMTLPSSGKIYGYQLRRIAKFMEWDQPIADQGNRIIRQLLQCFYEKDASLLEINPLVLTKDGSLVILDAKMTIDDNALYRHPQLADCYDPSQENIRDVLAKQLGLSYIALDGTIGCLVNGAGLAMSTLDILKLYGGSAANFLDVGGSASEKQIQEAISLVLSDKSVRVLFIHIFGGIMDCAVVASGLVSAMQGQKETIPTVIRLEGTNVDKGKDMIINAGIPCEFVTSMSEGAELAVQLSR

SEQ ID NO: 94007 - DNA, 1173 bp, Coxiella burnetii
  CDS (1)..(1173): transl_table=11
atgaacctacatgaatatcaatcaaaacatttattaaaaaaatacaacatccccgttcctgccagcgaagtggttttcaatcccgacgccgctgtcgatgcggccgctaaaatcggtggcgatcgttgggttgtcaaagcccaagtgcatgccggaggtcgtggtaaagcgggtggtgtgcgtttggtgaagaataaagaagaattaaaatcggccgtcaaggcattattaggcacgcggttagtcacctatcaaaccgatgaacgtggccagccggtgaatcagatcctcgttgaacaaacttctgatatagcacgggaattgtacctaggggcggtgattgatcgtgcttctcaacgtatcgttttcatggcgtcgactgaaggcggtgtggaaattgaaaaagtcgctgaaaaatcgcctgaaaaaatactaaaagttactattgacccggccattggtttacaaccctttcaatgtcgccaattattttttggtttagggctccaagacttaaaacaaatgcgctcattcaccgatattgtgatgggcttataccgattatttaccgagcgcgatttaagcttattagaaattaatccattggtcatcactggttcgggtgaactcatttgtttggatgccaaaatcaatatcgatgacagcgcgctttatcgtcaatccgaattgcgcgaaatgcgagacaccactcaagaagatgagcatgaaacgatggcccaacaatgggaattaaattacatcaaactggatggcaatatcggttgtatggtaaacggtgctggacttgccatggcaacgatggatttaatcaaactgtccggtggcgatcctgctaatttcctcgacgttggcggcagcgctactaaagaacgcgtgacagaagcgtttaagattattgtatcggataaaaatgttaaaggcattttagttaatattttcggtggtattgttcgttgcgatctcatcgctgacggaattatcagtgcagtaaaagaagttggcattgatgtgccagtggttgttcggcttgaaggaaataatgctcagttgggtgcaaaaaaattggcagatagtggcatgaatattatcgccgccaaaggatttgccgatgcagcggaacaaattgtcaaacaagtaggggtgatcgcataa

SEQ ID NO: 94008 - protein, 390 aa, Coxiella burnetii
MNLHEYQSKHLLKKYNIPVPASEVVFNPDAAVDAAAKIGGDRWVVKAQVHAGGRGKAGGVRLVKNKEELKSAVKALLGTRLVTYQTDERGQPVNQILVEQTSDIARELYLGAVIDRASQRIVFMASTEGGVEIEKVAEKSPEKILKVTIDPAIGLQPFQCRQLFFGLGLQDLKQMRSFTDIVMGLYRLFTERDLSLLEINPLVITGSGELICLDAKINIDDSALYRQSELREMRDTTQEDEHETMAQQWELNYIKLDGNIGCMVNGAGLAMATMDLIKLSGGDPANFLDVGGSATKERVTEAFKIIVSDKNVKGILVNIFGGIVRCDLIADGIISAVKEVGIDVPVVVRLEGNNAQLGAKKLADSGMNIIAAKGFADAAEQIVKQVGVIA

SEQ ID NO: 94009 - DNA, 1182 bp, Mycobacterium leprae
  CDS (1)..(1182): transl_table=11
atggatcttttcgagtatcaagctaaggaattgttcgccaagcacggcgtccctggcatacaaggacgggtgaccgacagcgcggaaggcgctaagaccatcgccatggagattggtcgtcccgtaatggtgaaagctcaggtaaaaacaggcgggcgaggcaaagcgggtggcgtcaaatatgctgccaccccagaagaagcctaccaacaggccaagaacattcttggcctggacataaaaggccatattgtcaagaaattgctggtggtcgaagctagcgacatcgccgaggaatactatctctccttcctgctcgaccgtgccaaccgaacataccttgcgatgtgctcggtggaaggcggcatggaaatcgaagaggtggccgccaccaagcctgagcgactggccaaggtctcggtggacgcggtaaagggtgtagatttagcctgcgcacgctctattgcgcagcagggccatctgccggctgaggtgctcgacgccgccgcggccaccatcgccaagttgtgggaactctttgtagccgaggacgccaccctggtggaggtcaacccgttggtgcgcactccctcccgcgggtacggaagctcgggcaagattttggcgctggacggcaaggtcactcttgatgccaacgcccgcttccgccagcccggccatgccgagttcgaagatcgcgcggccactgatccgctggagtggaaggccaagcagcacaacctcaactacatcaagctcgacggtgaggtggggatcatcggtaacggcgcgggtctgaccatgtcgaccttcgacgtcgtcgcctatgcaggggaacagcacgggggggttaagccggccaacttcctcgatatcggtggcggcgcttccgctgaggtgatggctgccagtctggacgtagttctgggcgacgttcaggtcaagagcgtgttcgtcaacatattcggtgggattaccacatgtgacaccgtcgctaccggaattgtcaaggcattggaaatcttgggtgatgaggccaacaagcctttagtggtgcgcctggacggcaataacgtcggtgaaggccgacgcatcctggccgaggccaaccatccgctagtgatgctggtcccgacgatggacgaggccgctaacaaggccgccgagttggcccgcacttga

SEQ ID NO: 94010 - protein, 393 aa, Mycobacterium leprae
MDLFEYQAKELFAKHGVPGIQGRVTDSAEGAKTIAMEIGRPVMVKAQVKTGGRGKAGGVKYAATPEEAYQQAKNILGLDIKGHIVKKLLVVEASDIAEEYYLSFLLDRANRTYLAMCSVEGGMEIEEVAATKPERLAKVSVDAVKGVDLACARSIAQQGHLPAEVLDAAAATIAKLWELFVAEDATLVEVNPLVRTPSRGYGSSGKILALDGKVTLDANARFRQPGHAEFEDRAATDPLEWKAKQHNLNYIKLDGEVGIIGNGAGLTMSTFDVVAYAGEQHGGVKPANFLDIGGGASAEVMAASLDVVLGDVQVKSVFVNIFGGITTCDTVATGIVKALEILGDEANKPLVVRLDGNNVGEGRRILAEANHPLVMLVPTMDEAANKAAELART

SEQ ID NO: 94011 - DNA, 1167 bp, Pasteurella multocida
  CDS (1)..(1167): transl_table=11
atgaacctacacgagtatcaagcgaagcaaatttttgcagaatatcaattgccagtaggcaagggttatgcgtgtaaaagcgcagatgaagccgcagatgcaataaaaaaactcaatggtgatgtttgggtcgcaaaatgccaagttcacgcaggtgggcggggtaaagctggtggtgtgaaattggtgcgtaacgaagccgaagtgcgtgcttttgctgaccaatggttaggacaacgcttagtgactttccaaacggacgttaatgggcaacctgttaatactctttatgtggaagaaggatcgagcattgcgcgtgagttgtatttaggggcagtgcttgatcgtgcatcacaacgtgttgtgtttatggtgtccactgaaggtggggtaaatatcgaagaagtggcggaaaaaacaccgcacttattacataaaatggcgattgatcctctaacgggggggatgccataccaagggcgtgaacttgcgtttaaactgggtttaaaaggtgatcaaattaaacaatttgctcatattttcgtacaaatggcaaaaatgtttgtggaaaaagacttggcgctgttagaagtgaatcccttagtggtgaccaaagaaggtaatttactgtgtttagatgccaaaatcgtggtcgatagtaacgccttataccgtcagccagcattaaaagcgatgcaagacccaagccaagaagatccacgtgaggcgcttgcagaatcacaccaattaaactatgtagcacttgagggtaacattggttgtatggtgaatggtgcaggcttagccatggggaccatggatattattaaattacacgggggtcaaccagcaaacttccttgatgtgggcggtggggcgaccaaagagcgtgtggcggaagcgttcaaaattatcttatcggatagtgcagtaaaagcggtattagtgaatatctttggtggtatcgtgcgttgcgatttaattgcagaagggatcattgctgccgtgaatgaagtcggcgtcaatgtgcctgtggtggtccgtttagaagggaataatgcgcctttaggtcgtgagattttagcaaacagtggtgtgaatattattgcggcaaatactttaacggatgctgcgattcaagctgtgaaagccgcggagggaaaataa

SEQ ID NO: 94012 - protein, 388 aa, Pasteurella multocida
MNLHEYQAKQIFAEYQLPVGKGYACKSADEAADAIKKLNGDVWVAKCQVHAGGRGKAGGVKLVRNEAEVRAFADQWLGQRLVTFQTDVNGQPVNTLYVEEGSSIARELYLGAVLDRASQRVVFMVSTEGGVNIEEVAEKTPHLLHKMAIDPLTGGMPYQGRELAFKLGLKGDQIKQFAHIFVQMAKMFVEKDLALLEVNPLVVTKEGNLLCLDAKIVVDSNALYRQPALKAMQDPSQEDPREALAESHQLNYVALEGNIGCMVNGAGLAMGTMDIIKLHGGQPANFLDVGGGATKERVAEAFKIILSDSAVKAVLVNIFGGIVRCDLIAEGIIAAVNEVGVNVPVVVRLEGNNAPLGREILANSGVNIIAANTLTDAAIQAVKAAEGK

SEQ ID NO: 94013 - DNA, 1167 bp, Pseudomonas aeruginosa
  CDS (1)..(1167): transl_table=11
atgaatctccacgaatatcagggtaagcagctgttcgctgaatacggcctgcctgtatccaagggctttgccgtagacacccccgaagaggccgcagaagcctgcgacaagatcggcggcagcgagtgggtcgtcaaagctcaggtgcacgccggcggccgcggtaaagcgggcggtgtgaagctggtgaagagcaaagaggacgccaaggcgttcgcccagcagtggctgggcaagaacctggtgacctaccagaccgacgccaacggccagccggtcagcaagatcctggtggagtcctgcaccgacatcgacaaggagctgtacctcggcgccgtcgtcgatcgttccagccgccgcatcgtgttcatggcttccaccgaaggtggcgtggacatcgagaaggtcgcccacgacactcccgagaagatcctcaaggctaccatcgacccgctggtcggcgcgcagccgtaccagggccgcgagctggccttccagctgggcctgaagggcgaccagatcaagcagttcacccatatcttcgtcggcctggcgaagctgttccaggactacgacctggccctgctggaagtgaacccgctggtgatcaagaaagacggcaacctgcactgcctggatgccaagatcaacatcgacagcaacgccctgtaccgtcagccgaagctgcgcgccatgcacgacccgtcccaggacgacgcccgtgaagcccatgcgcagaagtgggagctgaactacgtcgcgctggaaggcaacatcggctgcatggtcaacggcgccggcctggccatgggtaccatggacatcgtcaacctgcacggcggcaagccggccaacttcctcgacgttggcggcggtgcgaccaaggagcgcgtgaccgaagcgttcaagatcatcctgtccgacagcaacgtgaaggctgtcctggtgaacatcttcggcggcatcgtgcgttgcgacatgatcgccgaaggcatcatcggcgccgtcaaagaagtcggcgtgaaggttccggttgtcgtccgcctggaaggcaacaacgctgaactgggtgccaaggtcctggccgaaagcggcctgaacatcatcgcggcaaccagcctgaccgacgctgcccagcaagtcgtcaaggccgcggagggtaagtaa

SEQ ID NO: 94014 - protein, 388 aa, Pseudomonas aeruginosa
MNLHEYQGKQLFAEYGLPVSKGFAVDTPEEAAEACDKIGGSEWVVKAQVHAGGRGKAGGVKLVKSKEDAKAFAQQWLGKNLVTYQTDANGQPVSKILVESCTDIDKELYLGAVVDRSSRRIVFMASTEGGVDIEKVAHDTPEKILKATIDPLVGAQPYQGRELAFQLGLKGDQIKQFTHIFVGLAKLFQDYDLALLEVNPLVIKKDGNLHCLDAKINIDSNALYRQPKLRAMHDPSQDDAREAHAQKWELNYVALEGNIGCMVNGAGLAMGTMDIVNLHGGKPANFLDVGGGATKERVTEAFKIILSDSNVKAVLVNIFGGIVRCDMIAEGIIGAVKEVGVKVPVVVRLEGNNAELGAKVLAESGLNIIAATSLTDAAQQVVKAAEGK

SEQ ID NO: 94015 - DNA, 1197 bp, Rhizobium meliloti
  CDS (1)..(1197): transl_table=11
atgaacatccatgaataccaggccaaggctctgttgaagagctatggcgcgccggtcgcggaaggcgtcgcgatcttctccgccgacgaggccgaggcggccgcgaagaagctgccggggccgctttacgtggtgaagagccagatccacgccggcggccgcggcaagggcaagttcaaggaactcggccccgatgcgaagggcggcgtgcgcctggccaagtcggtggacgaggtcgtcgccaatgccaaggacatgctcggcaacacgctggtgaccaagcagaccggtccggccggcaagcaggtcaaccgcctctatatcgaggacggcgccgatatcgaccgcgagctctatctctcgatcctcgtcgatcgctccgtcggccaggtggccttcgtcgtttcgaccgagggcggcatggatatcgaagcggtcgccgaacatacgccggagaagatcgtcaccgttgcgatcgatccggaaaagggtgtgaccgcagagaatctgaagacgctggccgacgcgctgaagctcgaaggcgaagcgcgtgccgacgccgagaagctcttcccgatcctctacaaggcattcgtcgaaaaggacatgagcctgctcgaggtcaatccgctgatcgtcatgacgaacggccggatgcgcgtcctcgacgccaaggtctccttcgacggcaatgcgctcttccgccatgaggacgtggtcgcgctgcgcgacacgacggaagaggacgacaaggaaatcgaggcgtcgaaatacgacctcgcctatgtcgccctggacggcaatatcggctgtatggtcaacggcgccggtcttgccatggcgacgatggacatcatcaagctctacggcgccgagcccgcgaacttcctcgatgtcggcggcggcgcctcgaaggaaaaggtcacccaggccttcaagatcatcacggccgatccggcggtgaagggcatcctcgtcaacatcttcggcggcatcatgaaatgcgatgtcatcgccgagggcgtgctcgcagcggtcaaggaagtcggcctcaaggtgccgctcgtcgtgcgcctggaaggcaccaatgtcgagctcggcaagaagatcatcaatgaatcgggcctcaacgtgatttccgccgatgatctggacgacgccgcccagaagatcgttgcagccgtgaagggagcctga

SEQ ID NO: 94016 - protein, 398 aa, Rhizobium meliloti
MNIHEYQAKALLKSYGAPVAEGVAIFSADEAEAAAKKLPGPLYVVKSQIHAGGRGKGKFKELGPDAKGGVRLAKSVDEVVANAKDMLGNTLVTKQTGPAGKQVNRLYIEDGADIDRELYLSILVDRSVGQVAFVVSTEGGMDIEAVAEHTPEKIVTVAIDPEKGVTAENLKTLADALKLEGEARADAEKLFPILYKAFVEKDMSLLEVNPLIVMTNGRMRVLDAKVSFDGNALFRHEDVVALRDTTEEDDKEIEASKYDLAYVALDGNIGCMVNGAGLAMATMDIIKLYGAEPANFLDVGGGASKEKVTQAFKIITADPAVKGILVNIFGGIMKCDVIAEGVLAAVKEVGLKVPLVVRLEGTNVELGKKIINESGLNVISADDLDDAAQKIVAAVKGA

SEQ ID NO: 94017 - DNA, 1185 bp, Rhodopirellula baltica
  CDS (1)..(1185): transl_table=11
atgaaaattcacgagtatcaaggcaaacagcttttccgaaccgccggcgtgccggttttggatgggcacatggtgacaacgcctgacgaagcggctgccgcatacgacaaactaggtggcaaaatcgcggtcgttaaagctcagattcacgctggcgggcgtggcaaaggcaacgtcattgacaacccggaccaaaagggcgtcgtcctggtcaaatcggccgaagaagccaaagcggcagccgagggattgttgggcaagaagttggtcaccattcaaaccgggcccgaagggcaaacggtttctaaagttttcgtcgaagccggatgcgacatcgctcgcgaattgtacttgggcatcgtggtggatcgtgcgggaagcaagcccgttttgatggtcagcaccgaaggcggtgtcgagatcgaaaccgtcgcggaagaaactcccgagctgattttcaaggaacacttcgatcccgccgttgggctggacggtttccaagtccgcaagctttgcaagaagctcggcatcgaaggtgctgcggccaaaagtgcctataagttcatgaccgcgatgtgccgtttcttcgtcgacttcgattgcgaaatggcggagatcaacccgctcgtgatcaccggcgacggtgaaatggtggctttggacgccaagatcatcttcgacgagaacgcgatgttccgtcacaaagacttggaagaactgcgcgaccttagtgaagaggaagagtccgagttgcgggccaagaaggctggtctcagctacgtcaagctcgatggcaacatcgcttgcttggtcaacggagccgggctggcgatgtcgacgatggacatcatcaagtatcacggtggcgaaccggccaacttcttggacgtcggtggtggagccaacgcggctcaagtcaccgaagcgttccggatcctgttgtcggatcccaactgcaagggtgtgttggtcaatatcttcggcgggatcgctcgttgcacaacgattgcgggagccttgatcacggccagcaaagaagtcgggttcaacgtgcctttggtggtgcgattggaaggaaccgaagtcgaggaaggccgcaaaatgctggccgaaagcgatgtcgacatcatcaatgcgatggatttgaccgacgcggcgaagaagatcgtcgcggcaactgcgtag

SEQ ID NO: 94018 - protein, 394 aa, Rhodopirellula baltica
MKIHEYQGKQLFRTAGVPVLDGHMVTTPDEAAAAYDKLGGKIAVVKAQIHAGGRGKGNVIDNPDQKGVVLVKSAEEAKAAAEGLLGKKLVTIQTGPEGQTVSKVFVEAGCDIARELYLGIVVDRAGSKPVLMVSTEGGVEIETVAEETPELIFKEHFDPAVGLDGFQVRKLCKKLGIEGAAAKSAYKFMTAMCRFFVDFDCEMAEINPLVITGDGEMVALDAKIIFDENAMFRHKDLEELRDLSEEEESELRAKKAGLSYVKLDGNIACLVNGAGLAMSTMDIIKYHGGEPANFLDVGGGANAAQVTEAFRILLSDPNCKGVLVNIFGGIARCTTIAGALITASKEVGFNVPLVVRLEGTEVEEGRKMLAESDVDIINAMDLTDAAKKIVAATA

SEQ ID NO: 94019 - DNA, 1167 bp, Shewanella oneidensis
  CDS (1)..(1167): transl_table=11
atgaatttgcatgagtatcaggcaaaatccttatttgccgaatatggtttaccagtgtcagaaggttttgcctgtgatacagcccaagaagctgtagaagcggcaggacgtattggcggaaatttatgggttgttaagtgtcaagtacacgcaggcggccgcggtaaagcgggtggcgttaaagtcactggcgataaagaagaaatcagagcctttgccgaatactggttaggcaaaaatctggtgacttatcaaactgatgagaaaggtcagccggttgctaaaattttagtagaaagctgcaccgacatcgcgaacgaactgtacttaggtgcagttgttgaccgtgctacccgtcgtgtggtgttcatggcatcaacagaaggcggtgttgagattgagaaagtggccgaagaaacgccagaactcattcacaaagcgatcatcgatccgctgacaggtcctcaaccattccaagcgcgtgatcttggcttcaaactgggcttaaacccaactcaaatgaagcaattcaccaagatcttcatgggtctggcaacgatgttcgttgaccacgatttcgcgctcttagaaatcaacccactggttatcaccactgaaggtaacctgcactgcttagacggtaaaattggtatcgatggcaacgcactgttccgtcaaccaaaaatcaaagctatgcacgacccatctcaagatgacgcccgtgaagcccatgctgcgatgttcgaactgaactatgtggctctggatggtaacgttggttgtatggtgaacggtgcaggtcttgctatgggtacgatggacatcgttaatctgcacggcggcaagccagctaacttcctcgacgtaggtggtggcgcgaccaaagaacgtgttgcagaagcattcaagatcattttgtctgacagcaatgtgaaagccgttctggttaacatcttcggtggtatcgtacgttgtgacatgatcgcagaaggtatcattggcgctgttaaagaagtgggcgttaaggttccagttgtggttcgtttagaaggtactaacgctgaattaggccgtgaagtattagctaaatcaggtcttgatatcattgcagctaacagtctgactgatgcggctgagctagtagttaaagctgcggagggcaaataa

SEQ ID NO: 94020 - protein, 388 aa, Shewanella oneidensis
MNLHEYQAKSLFAEYGLPVSEGFACDTAQEAVEAAGRIGGNLWVVKCQVHAGGRGKAGGVKVTGDKEEIRAFAEYWLGKNLVTYQTDEKGQPVAKILVESCTDIANELYLGAVVDRATRRVVFMASTEGGVEIEKVAEETPELIHKAIIDPLTGPQPFQARDLGFKLGLNPTQMKQFTKIFMGLATMFVDHDFALLEINPLVITTEGNLHCLDGKIGIDGNALFRQPKIKAMHDPSQDDAREAHAAMFELNYVALDGNVGCMVNGAGLAMGTMDIVNLHGGKPANFLDVGGGATKERVAEAFKIILSDSNVKAVLVNIFGGIVRCDMIAEGIIGAVKEVGVKVPVVVRLEGTNAELGREVLAKSGLDIIAANSLTDAAELVVKAAEGK

SEQ ID NO: 94021 - DNA, 1167 bp, Staphylococcus epidermidis
  CDS (1)..(1167): transl_table=11
atgaatatccacgagtatcaagggaaagaaatatttcgttcaatgggcgttgcagttccagagggacgagtagcatttactgctgaagaagcagtggaaaaagcgaaagaattaaattcagacgtatatgtggttaaagcgcaaattcacgctgggggtagaggtaaagcaggcggcgtgaaaattgctaaatcattatctgaagtcgaaacgtacgcaaatgaactgctaggtaaacaattggtcacacatcaaactgggccagagggcaaagaggtcaaacgtttatatatcgaagaaggatgcgatatccaaaaagaatattatgttggttttgttattgatcgtgctactgataaagtgactttgatggcatcagaagaaggtggaactgaaattgaagaggttgcagctcaaacacctgaaaagattttcaaagaaacaattgatccagtagtaggattatcaccttaccaagcgcgacgtatcgcttttaatattaacattccaaaagaatcagttggaaaagcaactaaatttttattagcactatataatgtctttatcgaaaaagattgttctattgttgaaattaacccacttgttacaactggagacggtcaggtattggctttagatgctaaattaaactttgatgataatgcattatttagacataaagatattttagaattacgagatttagaagaagaagatcctaaggaaatagaagcttctaaatatgatttatcatacatcgctttagatggagatattggttgtatggttaatggcgcaggtttagccatggcaacaatggatacaattaatcattttggtggaaatccagccaacttcttagatgtaggtggcggtgctacaaaagaaaaggtaactgaagcatttaaaattattttaggtgatgacaatgttaaaggtatctttgtaaatatttttggtggaattatgaaatgtgatgttattgccgaaggtattgtagcagcggttaaagaagttgaactaacattaccattagttgttcgtttagaaggaactaatgtcgaacgtggtaaagcaatattaaacgaatcaggtttagctattgagccagcagcaactatggctgaaggtgctcaaaaaattgtgaaacttgttaaagaagcataa

SEQ ID NO: 94022 - protein, 388 aa, Staphylococcus epidermidis
MNIHEYQGKEIFRSMGVAVPEGRVAFTAEEAVEKAKELNSDVYVVKAQIHAGGRGKAGGVKIAKSLSEVETYANELLGKQLVTHQTGPEGKEVKRLYIEEGCDIQKEYYVGFVIDRATDKVTLMASEEGGTEIEEVAAQTPEKIFKETIDPVVGLSPYQARRIAFNINIPKESVGKATKFLLALYNVFIEKDCSIVEINPLVTTGDGQVLALDAKLNFDDNALFRHKDILELRDLEEEDPKEIEASKYDLSYIALDGDIGCMVNGAGLAMATMDTINHFGGNPANFLDVGGGATKEKVTEAFKIILGDDNVKGIFVNIFGGIMKCDVIAEGIVAAVKEVELTLPLVVRLEGTNVERGKAILNESGLAIEPAATMAEGAQKIVKLVKEA

SEQ ID NO: 94023 - DNA, 1167 bp, Vibrio cholerae
  CDS (1)..(1167): transl_table=11
atgaatttgcatgaatatcaagctaaacagctgtttgcagaattcggtttgcctgtaccggaaggttatgcttgtgatacgccacaagaagcgtttgaagctgcaggacgcatcagcacagccaagaaagtcgtaaaatgccaagttcacgcaggtggacgtggtaaagcaggtggcgttgaactgcatgacactaaagaaggcgtaaaagcgtttgcacaaaaatggctaggtaagaacctagtaacttatcaaacggatgcaaatggccaaccggtttcaaaaattttggttgaagaagcatcaaatatcgctaatgagctttatcttggtgcggtagttgaccgctctacacgtcgtatcgttttcatggcatcgactgaaggtggcgtggaaattgagaaagtggcagaagaaactccagaactgatccacaaagcggcgattgatccactggttggcccacaagcctaccaaggtcgtgaattggcgttcaagctaggcctgcaaggtgatcaaatcaaacagttcgtgaaaatcttcatgggcttgggtgaaatgtttgctcaatatgatctcgcactgctggaaatcaacccgctggtgattactgcagaaggtaacttgctgtgccttgatggcaaaatcaacatcgactccaatgcgatgtaccgtcaacccaaactgcgtcaaatgcacgatgcttctcaagaagatgcgcgcgaagcacacgcagcgaaatgggagcttaactacgttgcgctggatggtaacgtaggctgtatggttaacggtgccggccttgcgatgggtacgatggacattgttaacttgcacggcggaaaacccgcaaacttccttgacgtaggtggcggcgcgaccaaagagcgtgttgcagaagccttcaaaatcatcttgtctgataccaatgtaaaagccgtactggtgaacatctttggtggcattgtgcgctgcgacatgattgcagaaggcattatcggtgcagttaaggaagttggtgtaagcgttccagtggttgtgcgtcttgaaggtacaaacgcagaacttggacgcaaagtgctggcagaatcaggtctagatattattgcagctgtatctttgacagacgcagcgcaaaaagtagttgccgcggcggagggcaaataa

SEQ ID NO: 94024 - protein, 388 aa, Vibrio cholerae
MNLHEYQAKQLFAEFGLPVPEGYACDTPQEAFEAAGRISTAKKVVKCQVHAGGRGKAGGVELHDTKEGVKAFAQKWLGKNLVTYQTDANGQPVSKILVEEASNIANELYLGAVVDRSTRRIVFMASTEGGVEIEKVAEETPELIHKAAIDPLVGPQAYQGRELAFKLGLQGDQIKQFVKIFMGLGEMFAQYDLALLEINPLVITAEGNLLCLDGKINIDSNAMYRQPKLRQMHDASQEDAREAHAAKWELNYVALDGNVGCMVNGAGLAMGTMDIVNLHGGKPANFLDVGGGATKERVAEAFKIILSDTNVKAVLVNIFGGIVRCDMIAEGIIGAVKEVGVSVPVVVRLEGTNAELGRKVLAESGLDIIAAVSLTDAAQKVVAAAEGK

SEQ ID NO: 94025 - DNA, 1167 bp, Vibrio parahaemolyticus
  CDS (1)..(1167): transl_table=11
atgaatttgcatgaataccaagccaaacagctgtttgcagaattcggtttgcctgtgccagaaggctacgcatgtgatacaccacaagaagcgtttgaagcagcaggccgtatcagcacagcaaagaaagtagtcaagtgtcaggttcacgctggtggccgcggtaaagcgggtggcgtagagcttcacgacactaaagaaggtgtaaaagagtttgcgcaaaagtggctaggtaaaaatctagtaacttaccaaacagatgcaaatggtcagccagttacaaaaatccttgttgaagaagcgtcaaacattgccaacgaactttacttaggtgcggtagttgaccgtgctagccgtaagatcgttttcatggcttctacagaaggcggtgtggaaatcgaaaaagttgcggaagaaacaccggagctaatccacaaagcagccatcgatccactagtcggccctcaagcttaccaaggtcgtgagcttgcgttcaaacttggtcttgaaggtgaccaaatcaaacaattcgttaagatctttatgggtcttggcactatgttctctcagtacgaccttgctctactagagatcaacccgcttgtgattactgctgaaggcaacctgctatgtcttgacggtaagatcaacatcgactcaaacgcactttaccgtcagcctaagctacgtgaaatgcacgatccatcacaagaagatgagcgtgaagcgcacgcagctcagtgggaactgaactacgtagcactagacggtaacgttggctgtatggttaacggtgcaggcctagcaatgggtacgatggatatcgtaaacctacatggcggcaaaccagcgaacttcctagacgtaggtggcggcgcaactaaagaacgcgttgctgaagcattcaagatcatcctatctgatgacaatgtgaaagcggtactcgtaaacatcttcggtggtatcgttcgttgtgacatgatcgcagaaggtattatcggtgcagttaaagaggtaggtgtaagcgtacctgttgttgttcgtctagaaggtactaacgcagacctaggtcgcgaagttcttgctaattctgatgttgatatcattgctgctgagtcgctaactgacgctgctcagaaagttgttgctgctgcggaggctaaataa

SEQ ID NO: 94026 - protein, 388 aa, Vibrio parahaemolyticus
MNLHEYQAKQLFAEFGLPVPEGYACDTPQEAFEAAGRISTAKKVVKCQVHAGGRGKAGGVELHDTKEGVKEFAQKWLGKNLVTYQTDANGQPVTKILVEEASNIANELYLGAVVDRASRKIVFMASTEGGVEIEKVAEETPELIHKAAIDPLVGPQAYQGRELAFKLGLEGDQIKQFVKIFMGLGTMFSQYDLALLEINPLVITAEGNLLCLDGKINIDSNALYRQPKLREMHDPSQEDEREAHAAQWELNYVALDGNVGCMVNGAGLAMGTMDIVNLHGGKPANFLDVGGGATKERVAEAFKIILSDDNVKAVLVNIFGGIVRCDMIAEGIIGAVKEVGVSVPVVVRLEGTNADLGREVLANSDVDIIAAESLTDAAQKVVAAAEAK

SEQ ID NO: 94027 - DNA, 1167 bp, Vibrio vulnificus
  CDS (1)..(1167): transl_table=11
atgaatttgcatgaataccaagccaaacagctgtttgcagaattcggtttgccggtaccagaaggttatgcttgtgatacacctcaagaagcatttgaagctgctggccgcattagcaccgcgaagaaagttgtaaaatgtcaggttcacgcaggtggccgcggtaaagcgggtggcgtagagcttcacgatacgaaagaaggcgtgaaagaatttgcacaaaaatggcttggcaaaaacctggtaacttatcagacagatgcgaatggtcagccagtaacaaaaattttggttgaagaagcgtccaatattgccaacgagctatacttgggtgctgtcgttgaccgtgcaacacgtaaagtcgttttcatggcctcaactgaaggcggtgtggaaatcgaaaaagttgcagaagaaacacctgaactgattcacaaagcggctattgatccactggtaggccctcaggcttatcaaggtcgtgagcttgcatttaaacttggtcttcaaggcgatcaaattaagcagtttgtgaaaatcttcatgggtttgggtgaaatgttcactcaatacgatctcgctcttcttgaaatcaacccacttgtgattactggtgaaggcaacctactttgtctagatggtaagatcaacatcgactcaaatgcgctttaccgccaacctaaactgcgtgaaatgcacgatccttctcaagaagataagcgtgaagctcatgcggcgcagtgggaactgaactacgtagcacttgatggtaacgtcggctgtatggtgaacggtgcaggccttgcaatgggtactatggacatcgtaaacctacacggtggcaaaccagccaacttcttggatgtaggtggcggcgcgacaaaagagcgtgtagcagaggcattcaagatcatcctttctgatgacaatgtaaaagccgttttggtgaacatctttggtggtattgttcgttgtgacatgatcgcagaaggtatcatcggcgcggtaaaagaagttggtgtaagcgtacccgttgttgtacgccttgaaggtactaatgcggatcttggccgcaaagtactggcagagtcaggtttggatatcattgcagcagaatcactaacagatgctgctcagaaagtagttgctgcggcggagggcaaataa

SEQ ID NO: 94028 - protein, 388 aa, Vibrio vulnificus
MNLHEYQAKQLFAEFGLPVPEGYACDTPQEAFEAAGRISTAKKVVKCQVHAGGRGKAGGVELHDTKEGVKEFAQKWLGKNLVTYQTDANGQPVTKILVEEASNIANELYLGAVVDRATRKVVFMASTEGGVEIEKVAEETPELIHKAAIDPLVGPQAYQGRELAFKLGLQGDQIKQFVKIFMGLGEMFTQYDLALLEINPLVITGEGNLLCLDGKINIDSNALYRQPKLREMHDPSQEDKREAHAAQWELNYVALDGNVGCMVNGAGLAMGTMDIVNLHGGKPANFLDVGGGATKERVAEAFKIILSDDNVKAVLVNIFGGIVRCDMIAEGIIGAVKEVGVSVPVVVRLEGTNADLGRKVLAESGLDIIAAESLTDAAQKVVAAAEGK

SEQ ID NO: 94029 - DNA, 1167 bp, Yersinia pestis
  CDS (1)..(1167): transl_table=11
atgaatttacacgaatatcaggcaaaacaactgtttgctcggtatggcatgccagctccaactggctacgcctgtaccactccgcgtgaagcagaagaagccgcatctaaaattggtgcaggcccgtgggtggttaaatgtcaggttcatgcgggcggccgcggtaaagcggggggcgtaaaactggttaacagcaaagaagatattcgtgctttcgctgaacagtggctaggtaaaaaactggtcacttaccaaacagatgccaacggacagccggtgcatcagatcttggttgaagcagccacggatattgataaagaactgtatctgggggcggttatcgatcgcagctctcgccgtgtggtctttatggcatccactgaaggtggtgttgaaattgaaaaagtcgccgaagagacacctgaactgatccataaaatcgcattagatccattgaccggaccacagccttaccaagggcgtgagctggcatttaaattgggcttgaccggtaaacaagtcggtcagttcaccaagatctttatggggctggcaacactgttcctggaacgtgacctggcgatggtagagattaacccgttggtggtcactaagcagggcgatctgatttgtctggatggtaagctcggtgccgatggcaatgccttgttccgtcagccggaactgcgtgaaatgcgcgatccaagccaagaagatgctcgcgaagcacatgctgcccagtgggaactgaactatgtggcgttagatggcaacatcggttgcatggtaaacggtgccggtttggcgatgggaaccatggacatcgtgaaacttcatggtggcgaacccgctaacttccttgatgtgggcggtggtgcaacaaaagagcgcgtgaccgaagcgttcaaaatcattctgtctgacgataaagtgaaagcggtttttgttaatatcttcggcggtatcgtgcgttgtgacctcattgctgacggcatcattggtgcagttgaagaagtgggcgttaacgtacccgttgttgttcgtctcgaaggtaataatgcagagctgggtgccaagaaactggcagacagcggtttgaatatcattgctgcgaccagcctgacagatgcggctcagcaagttgtagcggcagtgggggctaaataa

SEQ ID NO: 94030 - protein, 388 aa, Yersinia pestis
MNLHEYQAKQLFARYGMPAPTGYACTTPREAEEAASKIGAGPWVVKCQVHAGGRGKAGGVKLVNSKEDIRAFAEQWLGKKLVTYQTDANGQPVHQILVEAATDIDKELYLGAVIDRSSRRVVFMASTEGGVEIEKVAEETPELIHKIALDPLTGPQPYQGRELAFKLGLTGKQVGQFTKIFMGLATLFLERDLAMVEINPLVVTKQGDLICLDGKLGADGNALFRQPELREMRDPSQEDAREAHAAQWELNYVALDGNIGCMVNGAGLAMGTMDIVKLHGGEPANFLDVGGGATKERVTEAFKIILSDDKVKAVFVNIFGGIVRCDLIADGIIGAVEEVGVNVPVVVRLEGNNAELGAKKLADSGLNIIAATSLTDAAQQVVAAVGAK

SEQ ID NO: 94031 - DNA, 1269 bp, Zea mays
  CDS (1)..(1269)
atggttcgcggatcgctcggcaagcttgcatcgcgcgccctctccgtcgccgggagatggcagcaccagcagctccgccgcctcaacatccacgagtaccagggcgcggagttgatgggtaaatacgggatcaacgtgcccaggggcgcggcggctgggtccgtacacgaggtcaaggacgccttgaagaacatgttccccagcgagaaagagatagttgttaaaagtcaaatccttgctggtggccgagggctgggaactttcaaaagcggactgcaaggtggtgtccatattgttaaggctgaggaagctgaattgattgcaagtaaaatgttaggccagattctgataacgaaacaaactggttcagagggaaagattgtgagcaaggtctacttgtgtgagaaactatctcttactaatgagatgtacttcgccatcacccttgataggaaaactgctggtccgctcattattgcttgcagcaagggaggaaccagtattgaagatcttgcggagaagtatcctgatatgattattaaggttcctattgatgtatttaaaggaatcacagatgaggatgcagctaaagttgttgatggtctagctctaaaggcagcggataggcagtcttctatagaacagattaagaagctgtatgaacttttctgcaagtgtgattgcacattgctggagataaatcctctggcggagacagctgacaacaagcttgttgctgctgatgcaaaattgaactttgatgataatgctgcatttagacagaaagaaatatttgcactgcgtgatacaactcaggaagaccccagggaggtcgctgctgccaaagcagatttgaactatattggtcttgatggagagattggttgcatggtgaatggagcaggattggccatggcgaccatggatattataaagttgcatggtggtacgcccgccaattttcttgatgtcggtggaagtgcatcagaggggcaggttgtggaagcttttaagatactgacttcagatgatagagtgaaggcaattctagtgaacatttttggtggcattatgaaatgtgatgtgatagcaagtggaattgttaatgctgccaaacaggttgacctgaaagttcctgttgttgttcggttggaaggcaccaatgtagaccaaggaaagaggattcttaaggaaagtggaatgactttgatcactgcagaagatcttgatgatgcggcagagaaagctgtaaaagcatccgtcaaataa

SEQ ID NO: 94032 - protein, 422 aa, Zea mays
MVRGSLGKLASRALSVAGRWQHQQLRRLNIHEYQGAELMGKYGINVPRGAAAGSVHEVKDALKNMFPSEKEIVVKSQILAGGRGLGTFKSGLQGGVHIVKAEEAELIASKMLGQILITKQTGSEGKIVSKVYLCEKLSLTNEMYFAITLDRKTAGPLIIACSKGGTSIEDLAEKYPDMIIKVPIDVFKGITDEDAAKVVDGLALKAADRQSSIEQIKKLYELFCKCDCTLLEINPLAETADNKLVAADAKLNFDDNAAFRQKEIFALRDTTQEDPREVAAAKADLNYIGLDGEIGCMVNGAGLAMATMDIIKLHGGTPANFLDVGGSASEGQVVEAFKILTSDDRVKAILVNIFGGIMKCDVIASGIVNAAKQVDLKVPVVVRLEGTNVDQGKRILKESGMTLITAEDLDDAAEKAVKASVK

SEQ ID NO: 94033 - DNA, 1266 bp, Brassica napus
  CDS (1)..(1266)
atgaggggattggtgaacaagctcgtgtccagatctctctccgtctccggcaaatggcagaaccaacagctccgccgtctcaacatccacgagtatcagggagcagagctgatgggtaaatacggagttaacgtgccaaagggagtcgctgtttcttctctcgatcaagttaaaaacgctatccaacaagttttccctaacgaaacagagttggtcgttaagagccagatcttggctggtggaagaggtcttggcactttcaagagtggccttaagggcggtgttcacattgtcaaccgtgatcaggttccagatattgctgggaagatgcttggacaagttctcgtcaccaaacaaactggtcctcaaggcaaagttgtcagcaaggtttacttgtgtgagaaactgtctctcgtcaatgagatgtacttctccattattcttgaccgtaaatctgctggaccgttgataattgcctgtaagaagggtggtaccagcatcgaagatcttgctgacaagttccctgacatgattattaaggtaccgatcgatgtatttgcaggaattacagatgaagatgctgctaaggttgtggatggtctggctccaaaagctgctgacagaaaagattctattgaacaagtcaagaagctatacgaactcttccgcaagactgactgcacaatgttggaaatcaaccctctcgctgagacatccactaatcaattggtagctgctgatgccaagttgaactttgatgataacgctgctttccgtcagaaagagatttttgctcttcgtgatccaacacaggaggatccacgagaggtcgctgctgcaaaagttgacttgaattatatcggtttagatggagagattggctgtatggtgaacggtgctggattggccatggcaaccatggacatcatcaaactgcacggtgggactcccgcaaatttccttgacgtcggtggaaacgcttctgaacaccaggtggtggaggcgtttaagatactgacgtcggacgataaagtgaaagcaatattggtgaacatatttggtggaataatgaaatgtgatgtgattgctagtggaattgtgaatgctgctaaagaggtttcactgaaagtaccagtggtggttcgtctagaaggaacaaatgtggaacaaggaaagagaatcctcaaggaaagtggaatgaaactcataacagctgatgatttggatgatgcagcagagaaagctgtaaaggcattagctaagtag

SEQ ID NO: 94034 - protein, 421 aa, Brassica napus
MRGLVNKLVSRSLSVSGKWQNQQLRRLNIHEYQGAELMGKYGVNVPKGVAVSSLDQVKNAIQQVFPNETELVVKSQILAGGRGLGTFKSGLKGGVHIVNRDQVPDIAGKMLGQVLVTKQTGPQGKVVSKVYLCEKLSLVNEMYFSIILDRKSAGPLIIACKKGGTSIEDLADKFPDMIIKVPIDVFAGITDEDAAKVVDGLAPKAADRKDSIEQVKKLYELFRKTDCTMLEINPLAETSTNQLVAADAKLNFDDNAAFRQKEIFALRDPTQEDPREVAAAKVDLNYIGLDGEIGCMVNGAGLAMATMDIIKLHGGTPANFLDVGGNASEHQVVEAFKILTSDDKVKAILVNIFGGIMKCDVIASGIVNAAKEVSLKVPVVVRLEGTNVEQGKRILKESGMKLITADDLDDAAEKAVKALAK

SEQ ID NO: 94035 - DNA, 1266 bp, Brassica napus
  CDS (1)..(1266)
atgaggggattggtgaacaagctggtgtccagatctctctccgtctccggcaaatggcagaatcaacagctccgccgtctcaacatccacgagtatcagggagcagagctgatgggtaaatacggagttaacgtgccgaagggagtcgctgtttcttctctcgatgaagttaaaaacgctatccaacaagttttccctaacgaaaccgagttggtcgttaagagccagatcttggctggtggaagaggtcttggcactttcaagagtggccttaagggtggtgttcacattgtcaaccgtgatcaggttccagatattgctgggaagatgcttggtcaagttctcgtcaccaaacaaactggtcctctaggcaaagttgtcaccaaggtttacttgtgtgagaaactgtctctcgtcaatgagatgtacttctccattattcttgaccgtaaatctgctggaccgttgataattgcctgtaagaagggtggtaccagcattgaagatcttgctgagaagttccctgacatgattattaaggtaccgatcgatgtatttgcaggaattacagatgaggatgctgctaaggttgtggatggtctggctccaaaagctgctgacaggaaagattcgattgaacaagtgaagaagctatacgaactcttccgcaagactgactgcacaatgttggaaatcaaccctctcgctgagacatccactaatcaattggtagctgctgatgctaagttgaactttgatgataatgctgctttccgtcagaaagacatttttgcccttcgtgatccaacacaggaggatccacgtgaggtggctgctgcaaaagtagacctgaactatatcggtttagatggagagattggctgcatggtgaatggtgcgggattggccatggcaaccatggacatcatcaaactgcacggtgggactcccgcaaatttccttgacgtcggtggaaacgcttctgagcaccaggtggtggaggcgtttaagatactgacgtcggacgataaagtgaaagcaatattggtgaacatatttggtggaataatgaaatgtgatgtgattgctagtggaattgtgaatgctgctaaagaggtttcactgaaagtaccagtggtggttcgtctagaaggaacaaatgtggaacagggaaagagaatcctcaaggaaagtggaatgaaactcataacggctgatgatttggatgatgctgcagagaaagctgtcaaagcattagctaattag

SEQ ID NO: 94036 - protein, 421 aa, Brassica napus
MRGLVNKLVSRSLSVSGKWQNQQLRRLNIHEYQGAELMGKYGVNVPKGVAVSSLDEVKNAIQQVFPNETELVVKSQILAGGRGLGTFKSGLKGGVHIVNRDQVPDIAGKMLGQVLVTKQTGPLGKVVTKVYLCEKLSLVNEMYFSIILDRKSAGPLIIACKKGGTSIEDLAEKFPDMIIKVPIDVFAGITDEDAAKVVDGLAPKAADRKDSIEQVKKLYELFRKTDCTMLEINPLAETSTNQLVAADAKLNFDDNAAFRQKDIFALRDPTQEDPREVAAAKVDLNYIGLDGEIGCMVNGAGLAMATMDIIKLHGGTPANFLDVGGNASEHQVVEAFKILTSDDKVKAILVNIFGGIMKCDVIASGIVNAAKEVSLKVPVVVRLEGTNVEQGKRILKESGMKLITADDLDDAAEKAVKALAN

SEQ ID NO: 94037 - DNA, 1269 bp, Zea mays
  CDS (1)..(1269)
atggttcgcggatcgctaggcaagcttgcgtcgcgcgccctctccgtcgccgggagatggcagcaccagcagcttcgccgcctcaacatccacgagtaccagggtgcggagttgatggggaagtacggtatcaacgtacccaggggtgcggcggcggggtccgtacaggaggtcaatgacgccttgaagaacatgttccccagtgagaaagagatagttgttaaaagtcaaatccttgctggtggccgagggctgggaactttcaaaagtgggctgcaaggaggtgtccatattgttaaggctgaggaagctgaaagcattgcacgtaaaatgttaggccagattctggtaacgaaacaaactggtccggagggaaagattgtgagcaaggtctacttgtgtgagaaactgtctctcactaatgagatgtattttgccatcacccttgataggaaaactgctggtccgctcattattgcttgcagcaagggaggaaccagtattgaagatcttgcggagaagtatcctgatatgattatcaaggttcctgttgatgtatttaaaggaataacagacgaggatgcagctaaagttgttgatggtctagctctaaagtcagcggataggcagtcttctatagaacagattaagaaactgtatgaacttttctgcaagtctgattgcacattgctggagataaatcctctggcggagacagctgacaacaagcttgttgctgctgatgcaaagttgaactttgatgataatgctgcatttagacagaaagaaatatttgcacttcgtgatacaactcaggaagaccccagggaggtcgctgctgccaaagcagatttgaactatattggtcttgatggagagattggttgcatggtgaatggagcaggattggccatggcgaccatggatattataaagttgcatggtgggacgcctgccaatttccttgatgttggtggaagtgcatcagaggggcaggttgtggaagcttttaagatactgacttcagatgatagagtgaaggcaattctagtgaatatttttgggggcattatgaaatgtgacgtgatagcaagtggaattgttaatgctgctaaacaggttgacctgaaggttcctgttgttgttcggttggaaggcaccaatgtagaccaaggaaaaaggattcttaaggaaagtggaatgactttgatcactgcagaagatcttgacgatgcggcagagaaagctgtaaaagcatccgtcaaataa

SEQ ID NO: 94038 - protein, 422 aa, Zea mays
MVRGSLGKLASRALSVAGRWQHQQLRRLNIHEYQGAELMGKYGINVPRGAAAGSVQEVNDALKNMFPSEKEIVVKSQILAGGRGLGTFKSGLQGGVHIVKAEEAESIARKMLGQILVTKQTGPEGKIVSKVYLCEKLSLTNEMYFAITLDRKTAGPLIIACSKGGTSIEDLAEKYPDMIIKVPVDVFKGITDEDAAKVVDGLALKSADRQSSIEQIKKLYELFCKSDCTLLEINPLAETADNKLVAADAKLNFDDNAAFRQKEIFALRDTTQEDPREVAAAKADLNYIGLDGEIGCMVNGAGLAMATMDIIKLHGGTPANFLDVGGSASEGQVVEAFKILTSDDRVKAILVNIFGGIMKCDVIASGIVNAAKQVDLKVPVVVRLEGTNVDQGKRILKESGMTLITAEDLDDAAEKAVKASVK

SEQ ID NO: 94039 - DNA, 1269 bp, Zea mays
  CDS (1)..(1269)
atggttcgcggatcgctcggcaagcttgcatcgcgcgccctctccgtcgccgggagatggcagcaccagcagctccgccgcctcaacatccacgagtaccagggcgcggagttgatgggtaaatacgggatcaacgtgcccaggggcgcggcggctgggtccgtacacgaggtcaaggacgccttgaagaacatgttccccagcgagaaagagatagttgttaaaagtcaaatccttgctggtggccgagggctgggaactttcaaaagcggactgcaaggtggtgtccatattgttaaggctgaggaagctgaattgattgcaagtaaaatgttaggccagattctgataacgaaacaaactggtccagagggaaagattgtgagcaaggtctacttgtgtgagaaactatctcttactaatgagatgtacttcgccatcacccttgataggaaaactgctggtccgctcattattgcttgcagcaagggaggaaccagtattgaagatcttgcggagaagtatcctgatatgattattaaggttcctattgatgtatttaaaggaatcacagatgaggatgcagctaaagttgttgatggtctagctctaaaggcagcggataggcagtcttctatagaacagattaagaagctgtatgaacttttctgcaagtgtgattgcacattgctggagataaatcctctggcggagacagctgacaacaagcttgttgctgctgatgcaaaattgaactttgatgataatgctgcatttagacagaaagaaatatttgcactgcgtgatacaactcaggaagaccccagggaggtcgctgctgccaaagcagatttgaactatattggtcttgatggagagattggttgcatggtgaatggagcaggattggccatggcgaccatggatattataaagttgcatggtggtacgcccgccaattttcttgatgtcggtggaagtgcatcagaggggcaggttgtggaagcttttaagatactgacttcagatgatagagtgaaggcaattctagtgaacatttttggtggcattatgaaatgtgatgtgatagcaagtggaattgttaatgctgccaaacaggttgacctgaaagttcctgttgttgttcggttggaaggcaccaatgtagaccaaggaaagaggattcttaaggaaagtggaatgactttgatcactgcagaagatcttgatgatgcggcagagaaagctgtaaaagcatccgtcaaataa

SEQ ID NO: 94040 - protein, 422 aa, Zea mays
MVRGSLGKLASRALSVAGRWQHQQLRRLNIHEYQGAELMGKYGINVPRGAAAGSVHEVKDALKNMFPSEKEIVVKSQILAGGRGLGTFKSGLQGGVHIVKAEEAELIASKMLGQILITKQTGPEGKIVSKVYLCEKLSLTNEMYFAITLDRKTAGPLIIACSKGGTSIEDLAEKYPDMIIKVPIDVFKGITDEDAAKVVDGLALKAADRQSSIEQIKKLYELFCKCDCTLLEINPLAETADNKLVAADAKLNFDDNAAFRQKEIFALRDTTQEDPREVAAAKADLNYIGLDGEIGCMVNGAGLAMATMDIIKLHGGTPANFLDVGGSASEGQVVEAFKILTSDDRVKAILVNIFGGIMKCDVIASGIVNAAKQVDLKVPVVVRLEGTNVDQGKRILKESGMTLITAEDLDDAAEKAVKASVK

SEQ ID NO: 94041 - DNA, 24 bp, Artificial sequence
  primer
atgaacttacatgaatatcaggca

SEQ ID NO: 94042 - DNA, 22 bp, Artificial sequence
  primer
ttatttcccctccactgcggca

SEQ ID NO: 94043 - protein, 431 aa, Artificial sequence
  consensus sequence
  Variant (5)..(7): Xaa in position 5 to 7 is any amino acid
  Variant (9)..(12): Xaa in position 9 to 12 is any amino acid
  Variant (14)..(18): Xaa in position 14 to 18 is any amino acid
  Variant (20)..(25): Xaa in position 20 to 25 is any amino acid
  Variant (26)..(28): Xaa in position 26 to 28 is any or no amino acid
  Variant (30)..(40): Xaa in position 30 to 40 is any amino acid
  Variant (41)..(45): Xaa in position 41 to 45 is any or no amino acid
  Variant (47)..(47): Xaa in position 47 is any amino acid
  Variant (49)..(49): Xaa in position 49 is any amino acid
  Variant (51)..(52): Xaa in position 51 to 52 is any amino acid
  Variant (59)..(59): Xaa in position 59 is any amino acid
  Variant (60)..(69): Xaa in position 60 to 69 is any or no amino acid
  Variant (73)..(83): Xaa in position 73 to 83 is any amino acid
  Variant (84)..(84): Xaa in position 84 is any or no amino acid
  Variant (86)..(88): Xaa in position 86 to 88 is any amino acid
  Variant (91)..(92): Xaa in position 91 to 92 is any amino acid
  Variant (94)..(94): Xaa in position 94 is any amino acid
  Variant (96)..(96): Xaa in position 96 is any amino acid
  Variant (99)..(101): Xaa in position 99 to 101 is any amino acid
  Variant (103)..(103): Xaa in position 103 is any amino acid
  Variant (104)..(104): Xaa in position 104 is any or no amino acid
  Variant (106)..(118): Xaa in position 106 to 118 is any amino acid
  Variant (119)..(119): Xaa in position 119 is any or no amino acid
  Variant (121)..(121): Xaa in position 121 is any amino acid
  Variant (123)..(127): Xaa in position 123 to 127 is any amino acid
  Variant (130)..(138): Xaa in position 130 to 138 is any amino acid
  Variant (140)..(141): Xaa in position 140 to 141 is any amino acid
  Variant (144)..(145): Xaa in position 144 to 145 is any amino acid
  Variant (148)..(148): Xaa in position 148 is any amino acid
  Variant (151)..(153): Xaa in position 151 to 153 is any amino acid
  Variant (155)..(156): Xaa in position 155 to 156 is any amino acid
  Variant (158)..(162): Xaa in position 158 to 162 is any amino acid
  Variant (164)..(166): Xaa in position 164 to 166 is any amino acid
  Variant (168)..(179): Xaa in position 168 to 179 is any amino acid
  Variant (181)..(192): Xaa in position 181 to 192 is any amino acid
  Variant (193)..(197): Xaa in position 193 to 197 is any or no amino acid
  Variant (199)..(201): Xaa in position 199 to 201 is any amino acid
  Variant (202)..(202): Xaa in position 202 is any or no amino acid
  Variant (204)..(206): Xaa in position 204 to 206 is any amino acid
  Variant (208)..(211): Xaa in position 208 to 211 is any amino acid
  Variant (213)..(213): Xaa in position 213 is any amino acid
  Variant (217)..(227): Xaa in position 217 to 227 is any amino acid
  Variant (228)..(233): Xaa in position 228 to 233 is any or no amino acid
  Variant (235)..(235): Xaa in position 235 is any amino acid
  Variant (237)..(239): Xaa in position 237 to 239 is any amino acid
  Variant (241)..(241): Xaa in position 241 is any amino acid
  Variant (244)..(245): Xaa in position 244 to 245 is any amino acid
  Variant (246)..(247): Xaa in position 246 to 247 is any or no amino acid
  Variant (249)..(256): Xaa in position 249 to 256 is any amino acid
  Variant (258)..(260): Xaa in position 258 to 260 is any amino acid
  Variant (261)..(262): Xaa in position 261 to 262 is any or no amino acid
  Variant (264)..(265): Xaa in position 264 to 265 is any amino acid
  Variant (267)..(268): Xaa in position 267 to 268 is any amino acid
  Variant (269)..(269): Xaa in position 269 is any or no amino acid
  Variant (271)..(274): Xaa in position 271 to 274 is any amino acid
  Variant (278)..(279): Xaa in position 278 to 279 is any amino acid
  Variant (281)..(281): Xaa in position 281 is any amino acid
  Variant (283)..(283): Xaa in position 283 is any amino acid
  Variant (287)..(287): Xaa in position 287 is any amino acid
  Variant (288)..(304): Xaa in position 288 to 304 is any or no amino acid
  Variant (313)..(313): Xaa in position 313 is any amino acid
  Variant (318)..(319): Xaa in position 318 to 319 is any amino acid
  Variant (321)..(321): Xaa in position 321 is any amino acid
  Variant (322)..(326): Xaa in position 322 to 326 is any or no amino acid
  Variant (329)..(329): Xaa in position 329 is any amino acid
  Variant (341)..(344): Xaa in position 341 to 344 is any amino acid
  Variant (346)..(347): Xaa in position 346 to 347 is any amino acid
  Variant (350)..(351): Xaa in position 350 to 351 is any amino acid
  Variant (353)..(354): Xaa in position 353 to 354 is any amino acid
  Variant (356)..(357): Xaa in position 356 to 357 is any amino acid
  Variant (359)..(362): Xaa in position 359 to 362 is any amino acid
  Variant (370)..(371): Xaa in position 370 to 371 is any amino acid
  Variant (374)..(374): Xaa in position 374 is any amino acid
  Variant (377)..(377): Xaa in position 377 is any amino acid
  Variant (379)..(381): Xaa in position 379 to 381 is any amino acid
  Variant (383)..(390): Xaa in position 383 to 390 is any amino acid
  Variant (391)..(392): Xaa in position 391 to 392 is any or no amino acid
  Variant (394)..(394): Xaa in position 394 is any amino acid
  Variant (399)..(399): Xaa in position 399 is any amino acid
  Variant (401)..(401): Xaa in position 401 is any amino acid
  Variant (403)..(412): Xaa in position 403 to 412 is any amino acid
  Variant (415)..(421): Xaa in position 415 to 421 is any amino acid
  Variant (422)..(422): Xaa in position 422 is any or no amino acid
  Variant (424)..(425): Xaa in position 424 to 425 is any amino acid
  Variant (428)..(430): Xaa in position 428 to 430 is any amino acid
HEYQXXXLXXXXGXXXXXGXXXXXXXXXAXXXXXXXXXXXXXXXXVXKXQXXAGGRGKXXXXXXXXXXXGGVXXXXXXXXXXXXAXXXLGXXLXTXQTXXXGXXVXXXXXXXXXXXXXXEXYXXXXXDRXXXXXXXXXSXXGGXXIEXVAXXXPXXIXXXXXDXXXGXXXXXXXXXXXXLXXXXXXXXXXXXXXXXXLXXXXFXXXDXXXXEXNPLXXXXXXXXXXXXXXXXXDXKXXXDXNAXXXXRXXXXXXXXDXXXXXDXXEXXXAXXXXLNYXXLXGXIGCXXXXXXXXXXXXXXXXXXVNGAGLAMXTMDIXXLXXXXXXGGXPANFLDVGGGAXXXXVXXAFXXIXXDXXVXXXXVNIFGGIXXCDXIAXGXXXAXXXXXXXXXXPXVVRLXGXNXXXXXXXXXXSGXXXXXXXXLXXAAXXXV

SEQ ID NO: 94044 - protein, 30 aa, Artificial sequence
  protein pattern
  Variant (3)..(3): Xaa in position 3 is Leu or Met
  Variant (12)..(12): Xaa in position 12 is Ala or Gly
  Variant (16)..(16): Xaa in position 16 is any or no amino acid
  Variant (18)..(21): Xaa in position 18 to 21 is any amino acid
  Variant (23)..(23): Xaa in position 23 is any amino acid
  Variant (24)..(24): Xaa in position 24 is any or no amino acid
GCXVNGAGLAMXTMDXIXXXXGXXPANFLD

SEQ ID NO: 94045 - protein, 39 aa, Artificial sequence
  protein pattern
  Variant (2)..(2): Xaa in position 2 is Glu, Lys or Arg
  Variant (3)..(4): Xaa in position 3 to 4 is Ile or Leu
  Variant (5)..(6): Xaa in position 5 to 6 is any amino acid
  Variant (7)..(7): Xaa in position 7 is Asp, Asn or Ser
  Variant (8)..(9): Xaa in position 8 to 9 is any amino acid
  Variant (11)..(12): Xaa in position 11 to 12 is any amino acid
  Variant (13)..(14): Xaa in position 13 to 14 is any or no amino acid
  Variant (16)..(17): Xaa in position 16 to 17 is any or no amino acid
  Variant (24)..(24): Xaa in position 24 is Ile, Met or Val
  Variant (25)..(25): Xaa in position 25 is any amino acid
  Variant (28)..(28): Xaa in position 28 is any amino acid
  Variant (29)..(29): Xaa in position 29 is Ile or Val
  Variant (31)..(31): Xaa in position 31 is any amino acid
  Variant (32)..(32): Xaa in position 32 is Ala or Gly
  Variant (33)..(34): Xaa in position 33 to 34 is Ile, Leu or Val
  Variant (35)..(35): Xaa in position 35 is any amino acid
  Variant (36)..(36): Xaa in position 36 is Ala, Thr or Val
  Variant (37)..(38): Xaa in position 37 to 38 is any amino acid
  Variant (39)..(39): Xaa in position 39 is Asp, Glu, Asn, Gln, Ser or Thr
FXXXXXXXXVXXXXVXXNIFGGIXXCDXXAXXXXXXXXX

SEQ ID NO: 94046 - protein, 14 aa, Artificial sequence
  protein pattern
  Variant (2)..(2): Xaa in position 2 is Ile, Leu or Val
  Variant (4)..(4): Xaa in position 4 is Ala, Cys or Ser
  Variant (6)..(6): Xaa in position 6 is Ile or Val
  Variant (7)..(7): Xaa in position 7 is any amino acid
  Variant (13)..(13): Xaa in position 13 is any amino acid
  Variant (14)..(14): Xaa in position 14 is Ala or Gly
VXKXQXXAGGRGXX

SEQ ID NO: 94047 - protein, 19 aa, Artificial sequence
  protein pattern
  Variant (2)..(2): Xaa in position 2 is any amino acid
  Variant (3)..(3): Xaa in position 3 is Ala, Glu or Gln
  Variant (6)..(6): Xaa in position 6 is any amino acid
  Variant (7)..(7): Xaa in position 7 is Asp, Glu or Asn
  Variant (10)..(10): Xaa in position 10 is any amino acid
  Variant (13)..(15): Xaa in position 13 to 15 is any amino acid
  Variant (17)..(18): Xaa in position 17 to 18 is any amino acid
  Variant (19)..(19): Xaa in position 19 is Ile, Leu or Val
SXXGGXXIEXVAXXXPXXX

SEQ ID NO: 94048 - protein, 27 aa, Artificial sequence
  protein pattern
  Variant (4)..(7): Xaa in position 4 to 7 is any amino acid
  Variant (8)..(8): Xaa in position 8 is Ala, Asp, Glu, Asn, Gln, Ser or Thr
  Variant (9)..(12): Xaa in position 9 to 12 is any amino acid
  Variant (13)..(13): Xaa in position 13 is Ala, Cys, Pro or Val
  Variant (14)..(14): Xaa in position 14 is any amino acid
  Variant (16)..(16): Xaa in position 16 is Ala, Cys, Gly, Ser or Thr
  Variant (18)..(20): Xaa in position 18 to 20 is any amino acid
  Variant (22)..(22): Xaa in position 22 is Ala, Asp, Glu, Gly, Asn or Ser
  Variant (25)..(25): Xaa in position 25 is any amino acid
  Variant (26)..(26): Xaa in position 26 is Phe or Tyr
NPLXXXXXXXXXXXDXKXXXDXNAXXR

SEQ ID NO: 94049 - protein, 19 aa, Artificial sequence
  protein pattern
  Variant (2)..(2): Xaa in position 2 is any or no amino acid
  Variant (4)..(4): Xaa in position 4 is any or no amino acid
  Variant (8)..(8): Xaa in position 8 is Ala, Asp, Glu or Gln
  Variant (10)..(10): Xaa in position 10 is Asn or Thr
  Variant (11)..(14): Xaa in position 11 to 14 is any amino acid
  Variant (15)..(15): Xaa in position 15 is Ala or Gly
  Variant (16)..(18): Xaa in position 16 to 18 is any amino acid
  Variant (19)..(19): Xaa in position 19 is Ile or Leu
PXVXVRLXGXXXXXXXXXX

SEQ ID NO: 94050 - protein, 15 aa, Artificial sequence
  protein pattern
  Variant (2)..(4): Xaa in position 2 to 4 is any amino acid
  Variant (5)..(5): Xaa in position 5 is Asp, Glu, Gly, Asn or Gln
  Variant (7)..(7): Xaa in position 7 is Ala, Asn or Ser
  Variant (9)..(9): Xaa in position 9 is Ile or Val
  Variant (10)..(10): Xaa in position 10 is any amino acid
  Variant (12)..(12): Xaa in position 12 is Asp, Glu, Asn or Ser
  Variant (14)..(14): Xaa in position 14 is any amino acid
  Variant (15)..(15): Xaa in position 15 is Ile or Val
AXXXXLXYXXLXGXX

SEQ ID NO: 94051 - DNA, 1434 bp, Escherichia coli
  CDS (1)..(1434): transl_table=11
atgcaggttttacatgtatgttcagagatgttcccgctgcttaaaaccggcggtctggctgatgttattggggcattacccgcagcacaaatcgcagacggcgttgacgctcgcgtactgttgcctgcatttcccgatattcgccgtggcgtgaccgatgcgcaggtagtatcccgtcgtgataccttcgccggacatatcacgctgttgttcggtcattacaacggggttggcatttacctgattgacgcgccgcatctctatgatcgtccgggaagcccgtatcacgataccaacttatttgcctataccgacaacgtattgcgttttgcgctgctggggtgggttggggcagaaatggccagcgggcttgacccattctggcgtcctgatgtggtgcatgcgcacgactggcatgcaggccttgcgcctgcgtatctggcggcgcgcgggcgtccggcgaagtcggtgtttactgtgcacaacctggcctatcaaggcatgttttatgcacatcacatgaatgacatccaattgccatggtcattctttaatattcatgggctggaattcaacggacaaatctctttcctgaaggccggtctgtactatgccgatcacattacggcggtcagtccaacctacgctcgcgagatcaccgaaccgcagtttgcctacggtatggaaggtctgttgcaacagcgtcaccgtgaagggcgtctttccggcgtactgaacggcgtggacgagaaaatctggagtccagagacggacttactgttggcctcgcgttacacccgcgatacgttggaagataaagcggaaaataagcgccagttacaaatcgcaatggggcttaaggttgacgataaagtgccgctttttgcagtggtgagccgtctgaccagccagaaaggtctcgacctggtgctggaagccttaccgggtcttctggagcagggcgggcagctggcgctactcggcgcgggcgatccggtgctgcaggaaggtttccttgcggcggcagcggaataccccggtcaggtgggcgttcagattggctatcacgaagcattttcgcatcgcattatgggcggcgcggacgtcattctggtgcccagccgttttgaaccgtgcggcttaacgcaactttatggattgaagtacggtacgctgccgttagtgcggcgcaccggtgggcttgctgatacggtttctgactgttctcttgagaaccttgcagatggcgtcgccagtgggtttgtctttgaagatagtaatgcctggtcgctgttacgggctattcgacgtgcttttgtactgtggtcccgtccttcactgtggcggtttgtgcaacgtcaggctatggcaatggattttagctggcaggtcgcggcgaagtcgtaccgtgagctttactatcgcttgaaataa

SEQ ID NO: 94052 - protein, 477 aa, Escherichia coli [sequence omitted]

SEQ ID NO: 94053 - DNA, 1464 bp, Escherichia coli
  CDS (19)..(1452): transl_table=11
gatctaacaggagcgataatgcaggttttacatgtatgttcagagatgttcccgctgcttaaaaccggcggtctggctgatgttattggggcattacccgcagcacaaatcgcagacggcgttgacgctcgcgtactgttgcctgcatttcccgatattcgccgtggcgtgaccgatgcgcaggtagtatcccgtcgtgataccttcgccggacatatcacgctgttgttcggtcattacaacggggttggcatttacctgattgacgcgccgcatctctatgatcgtccgggaagcccgtatcacgataccaacttatttgcctataccgacaacgtattgcgttttgcgctgctggggtgggttggggcagaaatggccagcgggcttgacccattctggcgtcctgatgtggtgcatgcgcacgactggcatgcaggccttgcgcctgcgtatctggcggcgcgcgggcgtccggcgaagtcggtgtttactgggcacaacctggcctatcaaggcatgttttatgcacatcacatgaatgacatccaattgccatggtcattctttaatattcatgggctggaattcaacggacaaatctctttcctgaaggccggtctgtactatgccgatcacattacggcggtcagtccaacctacgctcgcgagatcaccgaaccgcagtttgcctacggtatggaaggtctgttgcaacagcgtcaccgtgaagggcgtctttccggcgtactgaacggcgtggacgagaaaatctggagtccagagacggacttactgttggcctcgcgttacacccgcgatacgttggaagataaagcggaaaataagcgccagttacaaatcgcaatggggcttaaggttgacgataaagtgccgctttttgcagtggtgagccgtctgaccagccagaaaggtctcgacctggtgctggaagccttaccgggtcttctggagcagggcgggcagctggcgctactcggcgcgggcgatccggtgctgcaggaaggtttccttgcggcggcagcggaataccccggtcaggtgggcgttcagattggctatcacgaagcattttcgcatcgcattatgggcggcgcggacgtcattctggtgcccagccgttttgaaccgtgcggcttaacgcaactttatggattgaagtacggtacgctgccgttagtgcggcgcaccggtgggcttgctgatacggtttctgactgttctcttgagaaccttgcagatggcgtcgccagtgggtttgtctttgaagatagtaatgcctggtcgctgttacgggctattcgacgtgcttttgtactgtggtcccgtccttcactgtggcggtttgtgcaacgtcaggctatggcaatggattttagctggcaggtcgcggcgaagtcgtaccgtgagctttactatcgctcgaaatagttttcagtcgac

SEQ ID NO: 94054 - protein, 477 aa, Escherichia coli
MQVLHVCSEMFPLLKTGGLADVIGALPAAQIADGVDARVLLPAFPDIRRGVTDAQVVSRRDTFAGHITLLFGHYNGVGIYLIDAPHLYDRPGSPYHDTNLFAYTDNVLRFALLGWVGAEMASGLDPFWRPDVVHAHDWHAGLAPAYLAARGRPAKSVFTGHNLAYQGMFYAHHMNDIQLPWSFFNIHGLEFNGQISFLKAGLYYADHITAVSPTYAREITEPQFAYGMEGLLQQRHREGRLSGVLNGVDEKIWSPETDLLLASRYTRDTLEDKAENKRQLQIAMGLKVDDKVPLFAVVSRLTSQKGLDLVLEALPGLLEQGGQLALLGAGDPVLQEGFLAAAAEYPGQVGVQIGYHEAFSHRIMGGADVILVPSRFEPCGLTQLYGLKYGTLPLVRRTGGLADTVSDCSLENLADGVASGFVFEDSNAWSLLRAIRRAFVLWSRPSLWRFVQRQAMAMDFSWQVAAKSYRELYYRSK

SEQ ID NO: 94055 - DNA, 1937 bp, Oryza sativa
  CDS (25)..(1854)
cacagcaacagctagacaaccaccatgtcggctctcaccacgtcccagctcgccacctcggccaccggcttcggcatcgccgacaggtcggcgccgtcgtcgctgctccgccacgggttccagggcctcaagccccgcagccccgccggcggcgacgcgacgtcgctcagcgtgacgaccagcgcgcgcgcgacgcccaagcagcagcggtcggtgcagcgtggcagccggaggttcccctccgtcgtcgtgtacgccaccggcgccggcatgaacgtcgtgttcgtcggcgccgagatggccccctggagcaagaccggcggcctcggtgacgtcctcggtggcctcccccctgccatggctgcgaatggccacagggtcatggtgatctctcctcggtacgaccagtacaaggacgcttgggataccagcgttgtggctgagatcaaggttgcagacaggtacgagagggtgaggtttttccattgctacaagcatggagtcgaccgtgtgttcatcgaccatccgtcattcctggagaaggtttggggaaagaccggtgagaagatctacggacctgacactggagttgatcacaaagacaaccagatgcgtttcagccttctttgccaggcagcactcgaggctcctaggatcctaaacctcaacaacaacccatacttcaaaggaacttatggtgaggatgttgtgttcgtctgcaacgactggcacactggcccactggcgagctacctgaagaacaactaccagcccaatggcatctacaggaatgcaaaggttgctttctgcatccacaacatctcctaccagggccgtttcgctttcgaggattaccctgagctgaacctctccgagaggttcaggtcatccttcgatttcatcgacgggtatgacacgccggtggagggcaggaagatcaactggatgaaggccggaatcctggaagccgacagggtgctcaccgtgagcccgtactacgccgaggagctcatctccggcatcgccaggggatgcgagctcgacaacatcatgcggctcaccggcatcaccggcatcgtcaacggcatggacgtcagcgagtgggatcctagcaaggacaagtacatcaccgccaagtacgacgcaaccacggcaatcgaggcgaaggcgctgaacaaggaggcgttgcaggcggaggcgggtcttccggtcgacaggaaaatcccactgatcgcgttcatcggcaggctggaggaacagaagggccctgacgtcatggccgccgccatcccggagctcatgcaggaggacgtccagatcgttcttctgggtactggaaagaagaagttcgagaagctgctcaagagcatggaggagaagtatccgggcaaggtgagggccgtggtgaagttcaacgcgccgcttgctcatctcatcatggccggagccgacgtgctcgccgtccccagccgcttcgagccctgtggactcatccagctgcaggggatgagatacggaacgccctgtgcttgcgcgtccaccggtgggctcgtggacacggtcatcgaaggcaagactggtttccacatgggccgtctcagcgtcgactgcaaggtggtggagccaagcgacgtgaagaaggtggcggccaccctgaagcgcgccatcaaggtcgtcggcacgccggcgtacgaggagatggtcaggaactgcatgaaccaggacctctcctggaaggggcctgcgaagaactgggagaatgtgctcctgggcctgggcgtcgccggcagcgcgccggggatcgaaggcgacgagatcgcgccgctcgccaaggagaacgtggctgctccttgaagagcctgagatctacatatggagtgattaattaatatagcagtatatggatgagagacgaatgaaccagtggaatcggatcc

SEQ ID NO: 94056 - protein, 609 aa, Oryza sativa
MSALTTSQLATSATGFGIADRSAPSSLLRHGFQGLKPRSPAGGDATSLSVTTSARATPKQQRSVQRGSRRFPSVVVYATGAGMNVVFVGAEMAPWSKTGGLGDVLGGLPPAMAANGHRVMVISPRYDQYKDAWDTSVVAEIKVADRYERVRFFHCYKHGVDRVFIDHPSFLEKVWGKTGEKIYGPDTGVDHKDNQMRFSLLCQAALEAPRILNLNNNPYFKGTYGEDVVFVCNDWHTGPLASYLKNNYQPNGIYRNAKVAFCIHNISYQGRFAFEDYPELNLSERFRSSFDFIDGYDTPVEGRKINWMKAGILEADRVLTVSPYYAEELISGIARGCELDNIMRLTGITGIVNGMDVSEWDPSKDKYITAKYDATTAIEAKALNKEALQAEAGLPVDRKIPLIAFIGRLEEQKGPDVMAAAIPELMQEDVQIVLLGTGKKKFEKLLKSMEEKYPGKVRAVVKFNAPLAHLIMAGADVLAVPSRFEPCGLIQLQGMRYGTPCACASTGGLVDTVIEGKTGFHMGRLSVDCKVVEPSDVKKVAATLKRAIKVVGTPAYEEMVRNCMNQDLSWKGPAKNWENVLLGLGVAGSAPGIEGDEIAPLAKENVAAP

SEQ ID NO: 94057 - DNA, 1639 bp, Oryza sativa
  CDS (13)..(1602)
aaggaggttgtgatgagtgagcaggagtctgagatcatggatgtgaaggagcaagctcaagctaaagtaacacgcagcgttgtctttgtaaccggtgaagcttctccttatgcaaagtcaggtggactaggagatgtttgtggttcactgccaattgctcttgctcttcgtggtcatcgtgtgatggttgtaatgccgagatacatgaacggggccttgaacaaaaattttgcaaacgcattttacactgagaagcacattaagattccatgctttggcggagaacatgaagttactttttttcacgagtatagggattctgttgattgggtgtttgttgatcatccctcatatcatagacctggaaatttgtatggagataattttggtgcttttggcgataatcagttcagatacacactcctgtgctatgcggcgtgtgaagccccattaattcttgaactgggaggatatatctatggacagaaatgcatgtttgttgtgaatgattggcatgccagtcttgtgccagtccttcttgctgcaaaatatagaccatatggtgtttacagggatgcccgcagtgttcttgtcatacataatctagcacatcagggtgtggagcctgccagtacatatcctgacctgggattgccacctgaatggtatggagcattagaatgggtgtttccagagtgggcaaggcggcatgcccttgacaagggtgaggcagtcaattttttaaaaggcgcagttgtgacagcagatcgaattgtgactgtcagccaggggtattcatgggaggtcacaactgctgaaggtgggcaaggcctcaatgagctcttaagctcccggaagagtgtattgaatggaattgtaaatggaattgacattaatgattggaacccatccacagacaagtttctcccttatcattattctgttgatgacctgtccggaaaggccaagtgtaaagctgaattgcagaaggagctgggtttacctataaggcccgatgtgcctctgattggctttattggaagattggactatcaaaaaggcattgatctaattaaacttgccattccagatctcatgcgggacaatattcaattcgtcatgcttggatctggtgacccaggttttgaaggatggatgagatccacagaatcagggtacagggataaatttcgtggatgggttggatttagtgttccagtttcccaccgaataactgcaggttgcgatatattgttgatgccatccagattcgaaccttgtggcctcaatcagctatatgctatgcaatatggtacagtgcctgttgttcatggaactggaggcctcagagatacagtggagaattttaacccgtttgctgagaaaggagagcagggtacagggtgggcattctcgccactaaccattgaaaaaatgctgtgggcattgcggatggcaatttcgacatacagggaacacaagtcctcttgggagggtctaatgaagcgaggcatgtcaagcgactttacatgggaccatgccgcctcacagtatgaacagatcttcgaatgggccttcatggatcaaccatatgtcatgtaaatggatttgaaggaagcagcgaatttctccgaggacc

SEQ ID NO: 94058 - protein, 529 aa, Oryza sativa
MSEQESEIMDVKEQAQAKVTRSVVFVTGEASPYAKSGGLGDVCGSLPIALALRGHRVMVVMPRYMNGALNKNFANAFYTEKHIKIPCFGGEHEVTFFHEYRDSVDWVFVDHPSYHRPGNLYGDNFGAFGDNQFRYTLLCYAACEAPLILELGGYIYGQKCMFVVNDWHASLVPVLLAAKYRPYGVYRDARSVLVIHNLAHQGVEPASTYPDLGLPPEWYGALEWVFPEWARRHALDKGEAVNFLKGAVVTADRIVTVSQGYSWEVTTAEGGQGLNELLSSRKSVLNGIVNGIDINDWNPSTDKFLPYHYSVDDLSGKAKCKAELQKELGLPIRPDVPLIGFIGRLDYQKGIDLIKLAIPDLMRDNIQFVMLGSGDPGFEGWMRSTESGYRDKFRGWVGFSVPVSHRITAGCDILLMPSRFEPCGLNQLYAMQYGTVPVVHGTGGLRDTVENFNPFAEKGEQGTGWAFSPLTIEKMLWALRMAISTYREHKSSWEGLMKRGMSSDFTWDHAASQYEQIFEWAFMDQPYVM

SEQ ID NO: 94059 - DNA, 1467 bp, Bradyrhizobium sp. ORS278
  CDS (1)..(1467): transl_table=11
atgacgccattgcgcgttctgtcggtcgcctccgaggtctatcccatcatcaagaccggcggtctcgccgacgtcgccggtgcgctgccctgggcgctgatggcggaggacgtcgaggtccgcaccttgatccccggctatcccgccgtgatgaaggcgctggagcacgccagcgagatcagctcgctgccgaacttcttcggcggcaatgcccggctgctcggcggcagtcatggcgcgctcgacctgttcgtgctcgatgcgccgcatttgtatgatcgcgagggcaacccgtatctcggtccggacggcaaggattggcctgacaacccgttccgcttcgccgcactcgcgcgcgcggcgtcctatatcggcctcggcgcagtcgcgagcttcgtgcccgatatcgtccacggccacgactggcaggccggactcatcccggcctatctgctctacagccatcggccgcatcccggcacggtcatgaccgtgcacaatctggcgttccagggccgctttccgcgtcacttcctgccgccgctcggcctgccgccggaatccttctcgatctacgggctcgaatattacggcgacatcagcttcctgaaagcggggctgcaattcgccgacaagatcacgacggtgtcgccgacctatgcgcgcgagatccagagcgacgagcacggcatgggcctcggcggcctgctgcgccagcgctcgtccgatctcgtcggcatcctcaatggcatcgatacgacggtgtgggatcctgccagcgattccgcgatcccctcgcatttcggcatcgaaaagctcgaggcgcgcgcgccgaacaaggccgcgctgcagacgcgcatgggcctgcaggcctcgccggagaccttcctgctcggcgtcgtcagccggctgacctcgcagaagggactcgacctgctgctgtcgtgcctgccgaccttgaccagtgccggtatccagctggcgctgctcggcgacggcgaggccgagctgcgtgacgcgttccgcgccgccgccgcgcaccatcccggacagatcggcgtgttcatcggctatgacgaagatctcgcgcatctgatccaggccggctgcgacgcgctggtcgtgccgtcgcggttcgagccgtgcgggctgacgcagctctgcgcgctgcgctacggcgcgctgccgatcgtcaccgccgtcggcggccttgccgacaccgtgatcgacgagaccgaggccggcgtggccgcgaccggcttcaaatgcggagctgtgacagccgaggcgctcgaccagaccttgcgccgcgccgccgccgcgttctacgccgcccgcagcaacgcctcgaactggacccgcatgcagctcaacgcgatgctgaccgacgtgtcatggcggcaccgcgcggggcgttatgccgagctgtaccgccagatcgtcgcgcagcgccgcccggcggggtga

SEQ ID NO: 94060 - protein, 488 aa, Bradyrhizobium sp. ORS278
MTPLRVLSVASEVYPIIKTGGLADVAGALPWALMAEDVEVRTLIPGYPAVMKALEHASEISSLPNFFGGNARLLGGSHGALDLFVLDAPHLYDREGNPYLGPDGKDWPDNPFRFAALARAASYIGLGAVASFVPDIVHGHDWQAGLIPAYLLYSHRPHPGTVMTVHNLAFQGRFPRHFLPPLGLPPESFSIYGLEYYGDISFLKAGLQFADKITTVSPTYAREIQSDEHGMGLGGLLRQRSSDLVGILNGIDTTVWDPASDSAIPSHFGIEKLEARAPNKAALQTRMGLQASPETFLLGVVSRLTSQKGLDLLLSCLPTLTSAGIQLALLGDGEAELRDAFRAAAAHHPGQIGVFIGYDEDLAHLIQAGCDALVVPSRFEPCGLTQLCALRYGALPIVTAVGGLADTVIDETEAGVAATGFKCGAVTAEALDQTLRRAAAAFYAARSNASNWTRMQLNAMLTDVSWRHRAGRYAELYRQIVAQRRPAG

SEQ ID NO: 94061 - DNA, 1926 bp, Oryza sativa (japonica cultivar-group); identical to SEQ ID NO: 52598
  CDS (1)..(1926)

SEQ ID NO: 94062 - protein, 641 aa, Oryza sativa (japonica cultivar-group); identical to SEQ ID NO: 52599

SEQ ID NO: 94063 - DNA, 3123 bp, Arabidopsis thaliana; identical to SEQ ID NO: 52374
  CDS (1)..(3123)

SEQ ID NO: 94064 - protein, 1040 aa, Arabidopsis thaliana; identical to SEQ ID NO: 52375

SEQ ID NO: 94065 - DNA, 1452 bp, Lactococcus lactis subsp. lactis Il1403; identical to SEQ ID NO: 53474
  CDS (1)..(1452): transl_table=11

SEQ ID NO: 94066 - protein, 483 aa, Lactococcus lactis subsp. lactis Il1403; identical to SEQ ID NO: 53475

SEQ ID NO: 94067 - DNA, 1419 bp, Deinococcus radiodurans R1; identical to SEQ ID NO: 52376
  CDS (1)..(1419): transl_table=11

SEQ ID NO: 94068 - protein, 472 aa, Deinococcus radiodurans R1; identical to SEQ ID NO: 52377

SEQ ID NO: 94069 - DNA, 1593 bp, Agrobacterium tumefaciens str. C58; identical to SEQ ID NO: 52378
  CDS (1)..(1593): transl_table=11

SEQ ID NO: 94070 - protein, 530 aa, Agrobacterium tumefaciens str. C58; identical to SEQ ID NO: 52379

SEQ ID NO: 94071 - DNA, 1437 bp, Yersinia pestis KIM; identical to SEQ ID NO: 52380
  CDS (1)..(1437): transl_table=11

SEQ ID NO: 94072 - protein, 478 aa, Yersinia pestis KIM; identical to SEQ ID NO: 52381

SEQ ID NO: 94073 - DNA, 1452 bp, Prochlorococcus marinus str. AS9601; identical to SEQ ID NO: 52384
  CDS (1)..(1452): transl_table=11

SEQ ID NO: 94074 - protein, 483 aa, Prochlorococcus marinus str. AS9601; identical to SEQ ID NO: 52385

SEQ ID NO: 94075 - DNA, 1443 bp, Clostridium thermocellum ATCC 27405
  CDS (1)..(1443): transl_table=11
atgaaaaaaataaaagttctttttgcgtcttcggaagttgatccttttgcaaaaacaggcgggcttgcagatgtagcgtcttcactgccgaaggctttgtgcaagcttggacatgatgtgagggtggtaatgcccaaatacaaggacataccttttcagtacgttgagaaaatgcaaaaggttggagaaataggtgtctatgtatcctggaggaggcaatactgcgggattttaaaattggaaatggacaatattacatattactttattgataatgagtattatttcaaaagagacggttattacgggtattatgacgaagctgagcgttttgcattcttttccaaagcagtgctggagatactgcctgtgattggtttcaagccggatataattcactgcaatgactggcagaccggggttgtgagtgctttccttaatgcatggtacaaaggcttggatttctacaaggacataaagacggtatttacaatccacaacctcaaatatcagggaatatttccaaaagaagtttttggcgaagtcttaggacttccctgggattatttccatgccgacggaatagagttttatgacaaggtgaattaccttaaagcgggtattgtttactcggatataataacaacggtaagcaaaacctatgccgaggagataaagaccgatttcttcggtgaaaacttaaacaatgtgctgagaaaaagatcgaacgacctctatggtatcttgaacggcatagacatggaggaaaatgacccggccgttgataacagaatctttgccaactactcggttgacaaccttgaagggaaacttacgaacaagcagatgcttcaaaagagtctggggcttcaggaaagaattgatattcctctgatagggatcatatccaggctggttgcccaaaaagggtttgatttgattgactatgtaatggatgaaattttaaaaatggatattcagtttgtgctgcttggggcaggggaatataggtatgaacaaatgttcaggtattatcaggaaaagtatccgggtaaaatttctgtaaacctgaaatatgatgctgttttggctcaaagaatatatgcaggtgcggatatgtttttgatgccgtccctttttgagccttgcggactaagccaaatgttcagcctaagatacggtacaatccccatagtccgggagaccggaggacttaaggataccataactccttacaatgacatcacccatgaaggaaatggctttactttttcaagatacaatgcccatgacatgctttatgccatcaaagaggccgttcattattactatcacaggtcaacatggacgtatctgatgaaaaagggcatgaccaccgatttcagttgggagaagtctgcaaaggaatatctcgaactgtatgaaaaattggctggaaattaa

SEQ ID NO: 94076 - protein, 480 aa, Clostridium thermocellum ATCC 27405
MKKIKVLFASSEVDPFAKTGGLADVASSLPKALCKLGHDVRVVMPKYKDIPFQYVEKMQKVGEIGVYVSWRRQYCGILKLEMDNITYYFIDNEYYFKRDGYYGYYDEAERFAFFSKAVLEILPVIGFKPDIIHCNDWQTGVVSAFLNAWYKGLDFYKDIKTVFTIHNLKYQGIFPKEVFGEVLGLPWDYFHADGIEFYDKVNYLKAGIVYSDIITTVSKTYAEEIKTDFFGENLNNVLRKRSNDLYGILNGIDMEENDPAVDNRIFANYSVDNLEGKLTNKQMLQKSLGLQERIDIPLIGIISRLVAQKGFDLIDYVMDEILKMDIQFVLLGAGEYRYEQMFRYYQEKYPGKISVNLKYDAVLAQRIYAGADMFLMPSLFEPCGLSQMFSLRYGTIPIVRETGGLKDTITPYNDITHEGNGFTFSRYNAHDMLYAIKEAVHYYYHRSTWTYLMKKGMTTDFSWEKSAKEYLELYEKLAGN

SEQ ID NO: 94077 - DNA, 1467 bp, Clostridium thermocellum ATCC 27405
  CDS (1)..(1467): transl_table=11
atgagagagaatcataatttgaaagtattgtttgtttctgttgaagttgctccatttgctaaaacgggaggattggcagatgtagcgggttctttgccaaaggctttggtttccatgggatatgacgttaggattgcaatgccgaagtatcagcagatagatgctgatatgaggtacgtgacggattttccggtggatatgggaggaaggcaggcaacttgtatagtacgggaaggagaaatcagtttcaaagcagacggtaaggatttgaacgtgcctgtttattttgtggacaattaccactattttaatagaggcgggatatattgttattttgatgatgcagacagatttgctttcttctgcaaggcaacattggatatgcttccgaaaatagacttcaaaccggatataattcactgtaatgactggcatacaggacctatctgcatgtttttaaatgagaagtataaaagttatcctttctataaaaacataaagaccatgtttacaattcacaatcttgagtatcaaggtaatttttcaagggatgttttaggcatcatgggagtttccgatgaagtatttgtacctgaaaaagtcgaattttacggaatgttcagctttatgaaagccggactggtttatgcggatattataaccacggtaagtgagacctatgcaaaagaaattcagaccgaaaagtacggtgagaggctggaaggtttgctgagaaaacggtccaaagacctttacggtattgtaaacggtatagactatgatgtgttcaatccccagaccgacccggcgatttataaaaactataatgttgagacatttgaattgaaagtggaaaacaaatatgctctccagaaggaaatgggacttccaaaaaaagatgtgcctgttatcgggctgatatcaaggttgaccggacagaaaggcttaaaccttataatggatgaaattgacgagatgatgaaggaggatattcagtttgtcctgctgggagccggagatgaatattatgagacaggatttaagaaaattcaggaaaagtatcctgacaaagtgggagtgtatatcgggtttaatgcgcctttggcccagcgaatttatgcgggcagtgacatgttccttatgccgtcgagatttgagccttgcggacttgggcagctgtttagcctgaggtatggtaccatacccatagtaagggctacaggaggattggcagagacggtaattgatatagacaaggacaagaaaaacggaaacggtttttcatatgaagagttttcatcaaaggatatgttaaagactgtcaagcgggcgataaagttttacaatgaaaagcccgatgaatggaaggctatggtaaagcgtgccatgagtgccgattattcatggaacaactcggcaagcaaatattcagatttgtatatgaaacttacaaaaaagaaaaaataa

SEQ ID NO: 94078 - protein, 488 aa, Clostridium thermocellum ATCC 27405
MRENHNLKVLFVSVEVAPFAKTGGLADVAGSLPKALVSMGYDVRIAMPKYQQIDADMRYVTDFPVDMGGRQATCIVREGEISFKADGKDLNVPVYFVDNYHYFNRGGIYCYFDDADRFAFFCKATLDMLPKIDFKPDIIHCNDWHTGPICMFLNEKYKSYPFYKNIKTMFTIHNLEYQGNFSRDVLGIMGVSDEVFVPEKVEFYGMFSFMKAGLVYADIITTVSETYAKEIQTEKYGERLEGLLRKRSKDLYGIVNGIDYDVFNPQTDPAIYKNYNVETFELKVENKYALQKEMGLPKKDVPVIGLISRLTGQKGLNLIMDEIDEMMKEDIQFVLLGAGDEYYETGFKKIQEKYPDKVGVYIGFNAPLAQRIYAGSDMFLMPSRFEPCGLGQLFSLRYGTIPIVRATGGLAETVIDIDKDKKNGNGFSYEEFSSKDMLKTVKRAIKFYNEKPDEWKAMVKRAMSADYSWNNSASKYSDLYMKLTKKKK

SEQ ID NO: 94079 - DNA, 1443 bp, Clostridium difficile 630; identical to SEQ ID NO: 52368
  CDS (1)..(1443): transl_table=11

SEQ ID NO: 94080 - protein, 480 aa, Clostridium difficile 630; identical to SEQ ID NO: 52369

SEQ ID NO: 94081 - DNA, 1323 bp, Thermus thermophilus HB27; identical to SEQ ID NO: 52392
  CDS (1)..(1323): transl_table=11

SEQ ID NO: 94082 - protein, 440 aa, Thermus thermophilus HB27; identical to SEQ ID NO: 52393

SEQ ID NO: 94083 - DNA, 1497 bp, Bacillus thuringiensis serovar konkukian str. 97-27
  CDS (1)..(1497): transl_table=11
atgaaaactcgaagggaggaagctgcaagggaagtagtagaagcttttcgtgcagtgggacaacaagtgaatattttatttgcagtatcagaatgtgtgccatttgtgaaatctggaggattagctgatgtagcaggtgcgctcccaaaagagctaaaaaaattaggtgtggaagttcgcattatacttccgaattatagtcttattccgcaaaaattaagggatggatgtacgctacataaagtaattaacgtcccgcttggctggagaaatcaatattgtggaattttaaaaggtgagcaagacgggattacgtattacttaatagataatgaatattattttaagagggattctctgtatggtcattatgatgatggagagcgtttttcttatttctcgaaagcagtattagagtgtattccgcatcttgatttcgaagtggatgttcttcatagccacgattggcatacagccatggtgaattttttactgcgtgaaaagtatcaagataacccgtcatatgagcatattaaaacggtatatacgattcataacttgcagttccaaggtgtattttctcctgaagtgatgtacgacttgttagaacttggtgatgaatattttcatagtgagcagttagagttttatggaaatgtgaactttatgaagggtggcattatcgcctctgatcaaattacagcggttagcccgacgtataaagaagaaattcaatatgaatttttcggtgagaagttagatggattactgcgaaaatataatgataagcttagcggcattgtaaatggaattgatacgagcgtgtacaatccagaaacggattcgtatattactgcgcagtacgatgcggattcattatatgaaaagaatgaaaataaacgcgcgttgcagcgttattttggtttgccagaaaaagaagatacaccaattatttcaatggtaacgagattaacgaagcaaaaaggtcttgatttagtacgtactgtattccgagaaataatggaagaagatgtacaatgtattattttagggtcaggtgattctgaatatgaacaattctttgagtggatggcatatgagtatcctgagaaggtaaaagtgtatatcggctttaatgaggagttagcgcaccaagtgtatgcgggaagtgatttattcttaatgccatcactgtttgagccgtgtggccttggacaacttatcgcattagcgtatggtacgattccaattgtaagggaaacaggcggattaaatgatacggtacaatcttatgacgaagaaactggagaaggaaatggtttcagtttcacgaactttaatgcacatgatatgttgcacacggttcttcgtgcaattgaattttatcatgataaaccggtatgggatcagcttgtaaaacaagcgatgactgaagattatagctgggagaaatcagctcttgcttataagaaattgtataaaagtctcatggaataa

SEQ ID NO: 94084 - protein, 498 aa, Bacillus thuringiensis serovar konkukian str. 97-27
MKTRREEAAREVVEAFRAVGQQVNILFAVSECVPFVKSGGLADVAGALPKELKKLGVEVRIILPNYSLIPQKLRDGCTLHKVINVPLGWRNQYCGILKGEQDGITYYLIDNEYYFKRDSLYGHYDDGERFSYFSKAVLECIPHLDFEVDVLHSHDWHTAMVNFLLREKYQDNPSYEHIKTVYTIHNLQFQGVFSPEVMYDLLELGDEYFHSEQLEFYGNVNFMKGGIIASDQITAVSPTYKEEIQYEFFGEKLDGLLRKYNDKLSGIVNGIDTSVYNPETDSYITAQYDADSLYEKNENKRALQRYFGLPEKEDTPIISMVTRLTKQKGLDLVRTVFREIMEEDVQCIILGSGDSEYEQFFEWMAYEYPEKVKVYIGFNEELAHQVYAGSDLFLMPSLFEPCGLGQLIALAYGTIPIVRETGGLNDTVQSYDEETGEGNGFSFTNFNAHDMLHTVLRAIEFYHDKPVWDQLVKQAMTEDYSWEKSALAYKKLYKSLME

SEQ ID NO: 94085 - DNA, 1542 bp, Methylococcus capsulatus str. Bath; identical to SEQ ID NO: 53478
  CDS (1)..(1542): transl_table=11

SEQ ID NO: 94086 - protein, 513 aa, Methylococcus capsulatus str. Bath; identical to SEQ ID NO: 53479

SEQ ID NO: 94087 - DNA, 1599 bp, Pseudomonas syringae pv. syringae B728a
  CDS (1)..(1599): transl_table=11
atgattagcgccgctgtgaaaacccagaagggagagagttttaaccagcctgtcggcgagctgactcatctgccggtgttctctaccaagagcgttcctgtgctgcaaatgccaacgtcgactgtccagcctcagccgaccatgtcccaggtcaacagacgcaaagtgttgttcgtgacctccgaactggccgatctggtgaaaaccggtgggctgggcgatgtgtctgccgcactgccgcgagccatgcgtcacctgcacgacgttcgagtactgattccaggttatccgcaggtcattaacagcggtaatccgatccatatcatcagccagctgggcgggcatgcagcactgccaccttgcaaggtcggtcgcatggacatgaaagatggcctggtgatctacgtgctgatctgcccggagctttacgagcgcgaaggcaccccttacgccgacagcaacggtcgcgactggtctgataaccatattcgttttgcccgcctgggcctggcagccgccgagttcgccgccggcgaagtaaagagccagtggtgccccgagctggttcacgcccatgactggccagccggcctggcgcctgcgtacatgcgctggcgcgggcagtccacgcccagcatcttcactgttcacaacctagcctatcaaggcacggtaagcacagcctcgagccgtgaactgggtatcccggactccgccattacccctgagggcatggagttctacggccagctgtcgttcatcaaggcgggtatggcgttcgccagccacatcaccaccgtcagcgccacctacgctcgggaaatcaccaccccggagttcggctgcggcctggaaggcttcctgcaaagcaaggccaacaagggccagctcagcggcatccccaacggcattgacgaaagctgggatgcggccaccgacgaacacctgatctgccactttgcgcccaacgaatggacgcgcaaggaaatcaacgctgactatgtgcgtgagctgttcgaactggacgcctcgaccgggccgctattcgcggtggtatcgcgccttgtgtatcagaaaggtcttgacctgacgatcggcgtcgccgagcacatcgtcaacaatggcgggcagatcgcaatcatcggccgcggtgaaccggaggaagaagaggccatgcgcgagttggctgcccgcttccccggacgtgtcggcgtgcgcatcggcttcaacgaaaccgacgcacgacgcatgttcgccggcagcgatttcctgctgatgccgtcccgctatgagccgtgcgggcttagccagatgtacgcgcaacgcttcggctcgttgcctgtcgcacgcaataccggcggcctggccgatacgatcgaagacggtgtcactggcttcctgttcaatgaatcgacagtcgaaagctacacccaggcactggatcgcgccttccaggtcttcgcccatccggagctgctcaacgccatgcgctgccgtgccatggcggctcccttcaactggcatcaggcagtagagccctacgcagatctctatcgcgacctgttgaagaaaaacgtgagcgtttccagcaactactag

SEQ ID NO: 94088 - protein, 532 aa, Pseudomonas syringae pv. syringae B728a
MISAAVKTQKGESFNQPVGELTHLPVFSTKSVPVLQMPTSTVQPQPTMSQVNRRKVLFVTSELADLVKTGGLGDVSAALPRAMRHLHDVRVLIPGYPQVINSGNPIHIISQLGGHAALPPCKVGRMDMKDGLVIYVLICPELYEREGTPYADSNGRDWSDNHIRFARLGLAAAEFAAGEVKSQWCPELVHAHDWPAGLAPAYMRWRGQSTPSIFTVHNLAYQGTVSTASSRELGIPDSAITPEGMEFYGQLSFIKAGMAFASHITTVSATYAREITTPEFGCGLEGFLQSKANKGQLSGIPNGIDESWDAATDEHLICHFAPNEWTRKEINADYVRELFELDASTGPLFAVVSRLVYQKGLDLTIGVAEHIVNNGGQIAIIGRGEPEEEEAMRELAARFPGRVGVRIGFNETDARRMFAGSDFLLMPSRYEPCGLSQMYAQRFGSLPVARNTGGLADTIEDGVTGFLFNESTVESYTQALDRAFQVFAHPELLNAMRCRAMAAPFNWHQAVEPYADLYRDLLKKNVSVSSNY

SEQ ID NO: 94089 - DNA, 1497 bp, Thiobacillus denitrificans ATCC 25259; identical to SEQ ID NO: 52398
  CDS (1)..(1497): transl_table=11

SEQ ID NO: 94090 - protein, 498 aa, Thiobacillus denitrificans ATCC 25259; identical to SEQ ID NO: 52399

SEQ ID NO: 94091 - DNA, 1587 bp, Pseudomonas fluorescens PfO-1
  CDS (1)..(1587): transl_table=11
atgatcagtgcggcattggatattcagggagaacgggctcatcagccgatgggtgaatcgagcaccgtaagtgttcccggcagccggtcgatcaacgtcccgagcaccaagacgctgaccccgatggccagtcagaaccccaacaagaagaaagtcttgttcgtcacctcggaaattgccgatctggtgaagaccggcggtctgggagacgtttcagccgccctgccccgcgccatggcgcacctgcatgacgtccgggtgttgatccccggttacccgcaagtgatgaacagcgagaatccgatccacatcatcggcgaactgggcggtcacgccgcgctgccgccctgcaagatcgggcgcatggacatgcccgatggtctggtgatttatgtgttgatctgccctgaactttacgctcgtgacggtggcccgtatggcgccaacaacggccgcgactggccggacaaccacattcgcttcgcccgcctgggcctggccgccgccgatatcgcggccaatctcgcgcaaatccactggtgcccggatctggtgcacgcccatgactggccggccgggctggcgcctgcctatatgcactggcgcgggcaacgcacgccgaccctgttcaccattcacaacctcgcttatcaaggcgtgaccagcctcggttcgtgcccggaactcgggatccccgctcatgccctgcaacaggaaggcatggagttctacggcaagatgtcgttcctcaaggccggcatggcctattcgagccacatcaccacggtcagcgccacctacgcgcaggaaatcaccaccccggatttcggctgcggtctcgacggttttcttgccgccaagacccagcaaggcctgctcagcggcatccccaacggcatcgatgagagctgggacgctgccaccgacccgcatctgttcgcgccatttgccatcggcgactgggaaggcaaggccatcaacgccgcccatgtgcgcgaactgttcggcttgaaagactcggaaggtccactgtttgccgtggtctcgcgtctggtttatcaaaaaggtttggacctgaccgaggcggtgtcggaatacatcgtccagaacggtggccagatcgcgatcatcggccgtggcgaaccggaagaagaacaggccatgcgtgaactggcgctgcgcttccccggccagatcggcgtgcgcatcggcttcaacgaaacagacgcccggcggatgttcgccggcagcgatttcctgctgatgccgtcgcgctatgagccgtgcggcctgagccagatgtacgcccagcgcttcggctcgctgccggtggcgcgcaacactggtgggctggccgacaccattgaaaacggcgtcaccggtttcctattcaacgaatccaccgccgacagctaccgcgaagccctgagccgcgcgttcaaggtgtttgccttccccgaactgctcaatgcaatgcgttgccgggcgatggccgcacccttcaactggtgcaaggcggtcgaaccttacgccgaactctacgaaaaactggtggccaaggcgctgggtaaaacgcaccacaaataa

SEQ ID NO: 94092 - protein, 528 aa, Pseudomonas fluorescens PfO-1
MISAALDIQGERAHQPMGESSTVSVPGSRSINVPSTKTLTPMASQNPNKKKVLFVTSEIADLVKTGGLGDVSAALPRAMAHLHDVRVLIPGYPQVMNSENPIHIIGELGGHAALPPCKIGRMDMPDGLVIYVLICPELYARDGGPYGANNGRDWPDNHIRFARLGLAAADIAANLAQIHWCPDLVHAHDWPAGLAPAYMHWRGQRTPTLFTIHNLAYQGVTSLGSCPELGIPAHALQQEGMEFYGKMSFLKAGMAYSSHITTVSATYAQEITTPDFGCGLDGFLAAKTQQGLLSGIPNGIDESWDAATDPHLFAPFAIGDWEGKAINAAHVRELFGLKDSEGPLFAVVSRLVYQKGLDLTEAVSEYIVQNGGQIAIIGRGEPEEEQAMRELALRFPGQIGVRIGFNETDARRMFAGSDFLLMPSRYEPCGLSQMYAQRFGSLPVARNTGGLADTIENGVTGFLFNESTADSYREALSRAFKVFAFPELLNAMRCRAMAAPFNWCKAVEPYAELYEKLVAKALGKTHHK

SEQ ID NO: 94093 - DNA, 1455 bp, Rhodobacter sphaeroides 2.4.1; identical to SEQ ID NO: 52400
  CDS (1)..(1455): transl_table=11

SEQ ID NO: 94094 - protein, 484 aa, Rhodobacter sphaeroides 2.4.1; identical to SEQ ID NO: 52401

SEQ ID NO: 94095 - DNA, 1500 bp, Methylobacillus flagellatus KT
  CDS (1)..(1500): transl_table=11
ttgatcttcaactccccaaaaaagcaaagagcacataccttgcgcatcctttttgtcacttcagaggcctaccccttaatcaaaactggcggcctcgcagatgtcagcggctcattgccagccgctatacgcgaccttggtatcgatatccgcatattgctgccaggttatccggcagtgctggaaaagctgcaagaaaaacacctcatcacgcagattcatggcctgccggaagtgggcagcgttaatctgctggggggcaaaatgccggatacaggggtcgatgtcatggtggttgaacatgcccagttgttcgaaagaccgggtggcccgtacaacgacggccaaggcattgactggggcgacaatgctctgcgctttggcatcttgtccaaagtaggcagtatattgggcggcctacactcgcccttgcaggacgactggatccctgacgttgtccactgcaatgactggcaaagtgggttaactcctgccttcctgcatcattcggccagccctcatgcaagatccattatcagcattcacaacctagcattccagggcaactttgcgccggaatgggtacagcggctgggcctgcctaaccacagctaccagatgcacggccttgaatattatgggcagatgtctttcctgaaggccggaatctactatgccgatagcattactaccgtcagcccgacctatgcccgtgaaatccagacggagcaatacggctttggcatgcagggattgctggcagcccgaagccatgaaattcatggcatattgaacgggattgaaattcaggaatggaatccggctaccgacccttaccttgcaaagacctacaacctggagcatcttgcagacaagaaaatcgtcaagaaagcacttcaagtccagttggggctcgagaccgcaccccacaagccactgcttggcgtcgtcagcaggcttacacaccagaagggcttggatattttcctggaagtggcagagagcctattggcaaagcactgccagattgtcgtacttggcagcggtgaagcacacatggagaacggattcaaggatctggcgagacgatatccccgccaggtgagcgtaacgattggctataaggaacccttgtcccatcagatcatggcaggtgcggacatgttcatcatgccatcccgttttgagccttgcggactcaaccagatgtatggcctgcgctatggtaccccccctgtcgtgacccgcactggcgggctggctgattcagtccaagacagcaatagcactacaatgaaaaacaacacggcaacgggattcgtactggaatctgcggaacctcgccaactgcttcatactgtgcagcgggccttggtgtattatcacgatccgagggcatggcgcagaatccagcgtaacggcatgcgccgcgatctgagctggaccagcagtgcaaaactctatctggacctgtatcaatcacttgcccagcgccgctag

SEQ ID NO: 94096 - protein, 499 aa, Methylobacillus flagellatus KT
MIFNSPKKQRAHTLRILFVTSEAYPLIKTGGLADVSGSLPAAIRDLGIDIRILLPGYPAVLEKLQEKHLITQIHGLPEVGSVNLLGGKMPDTGVDVMVVEHAQLFERPGGPYNDGQGIDWGDNALRFGILSKVGSILGGLHSPLQDDWIPDVVHCNDWQSGLTPAFLHHSASPHARSIISIHNLAFQGNFAPEWVQRLGLPNHSYQMHGLEYYGQMSFLKAGIYYADSITTVSPTYAREIQTEQYGFGMQGLLAARSHEIHGILNGIEIQEWNPATDPYLAKTYNLEHLADKKIVKKALQVQLGLETAPHKPLLGVVSRLTHQKGLDIFLEVAESLLAKHCQIVVLGSGEAHMENGFKDLARRYPRQVSVTIGYKEPLSHQIMAGADMFIMPSRFEPCGLNQMYGLRYGTPPVVTRTGGLADSVQDSNSTTMKNNTATGFVLESAEPRQLLHTVQRALVYYHDPRAWRRIQRNGMRRDLSWTSSAKLYLDLYQSLAQRR

SEQ ID NO: 94097 - DNA, 1461 bp, Burkholderia xenovorans LB400
  CDS (1)..(1461): transl_table=11
atgacgattcgcgccctgcacgtcgcaagcgagctgtatcccctcctcaaaacgggcggcctcgccgacgtcgcgggcgcgttgccgcccgcgctgatcgagcgcggcgccgatgtgcgggtgctgttgcccggcttcccggcggtggtggccggtttgaccgagctcgcgccggttgcgcaactggggcgccaattcgatgccccgggcgtcacgctcgaacgcggcacgctggcgtcgagcggcctgatcgtctatgtgatccgcgcgagcacgctgtatgaccggccaggcaatccctatctgaacgacgaacacgtgccgtacggcgacaacgcgcagcgtttcgcgctgctcggctgggtcgccgcgcaactcgcgcagcatctggatccggcctggtcgccgcagatcgtccacgcgcacgactggcatgcggggctcgcgccggcctatctgaaagcggccgaacgccagcatggccggtctttcgcgcgcagcgtcttcacggtgcacaacctcgcgtatcaaggcgtgtttcccgcgccccagttcggccaactggggctgccggccgattacttcagcatgcacggcgtggagttctacgggcaactgtcgtttctcaaggccggcctttacttcagcgaccgcatcaccaccgtgagcccgacctacgcgcgcgaaatccagacgctcgcccagggcggcggactcgacgggctgctgcgccatcgttcgcacgacctgagcggcattctgaacggcgtcgactacacggtctggaatccggccagcgacgcgcttctcgaagaccactacagcgccacgcgcctcgccggcaaactggcgtgcaaggaagcactgcaaaaacgcttcggcctcgcgcagaaaagcgacgcgctgctgttcggcgtggtgagccgcctgaccgaacagaaaggcctcgacctgctgctcgaggcggtgcccgaaatcatcaaacatggcggccaactggtggtattcggcaccggcgacccggcgctggaaaacggtttgaaacgcgtcgcgcatgcgcacccggaagccgtcgcggtggaactcggcttcgacgaaaagctcgcgcatacgatcgtcgcgggcagcgacgtgatcgcggtgccgtcgcgtttcgagccctgcggcttgacccagctgtatgcgctcgcttatggctcgctgccgctcgtgcattgcgtgggcggtctcgcggacacggtggtggacgcgtcgctcgaaaatctcgccgacgacctcgccaccggtttcatgttcgaacgcttcgagctgaagggtatcggcgccgcgatccgccgcgccttcgcgctccgagaacgccgcaccgaatggaaagcgacccagcggcgcgcgatgcgccaggacttcggctggggcgcttcggcggagcgctatctggcgctgtatcgcgagctcgcctga

SEQ ID NO: 94098 - protein, 486 aa, Burkholderia xenovorans LB400
MTIRALHVASELYPLLKTGGLADVAGALPPALIERGADVRVLLPGFPAVVAGLTELAPVAQLGRQFDAPGVTLERGTLASSGLIVYVIRASTLYDRPGNPYLNDEHVPYGDNAQRFALLGWVAAQLAQHLDPAWSPQIVHAHDWHAGLAPAYLKAAERQHGRSFARSVFTVHNLAYQGVFPAPQFGQLGLPADYFSMHGVEFYGQLSFLKAGLYFSDRITTVSPTYAREIQTLAQGGGLDGLLRHRSHDLSGILNGVDYTVWNPASDALLEDHYSATRLAGKLACKEALQKRFGLAQKSDALLFGVVSRLTEQKGLDLLLEAVPEIIKHGGQLVVFGTGDPALENGLKRVAHAHPEAVAVELGFDEKLAHTIVAGSDVIAVPSRFEPCGLTQLYALAYGSLPLVHCVGGLADTVVDASLENLADDLATGFMFERFELKGIGAAIRRAFALRERRTEWKATQRRAMRQDFGWGASAERYLALYRELA

SEQ ID NO: 94099 - DNA, 1434 bp, Myxococcus xanthus DK 1622; identical to SEQ ID NO: 52408
  CDS (1)..(1434): transl_table=11

SEQ ID NO: 94100 - protein, 477 aa, Myxococcus xanthus DK 1622; identical to SEQ ID NO: 52409

SEQ ID NO: 94101 - DNA, 1383 bp, Trichodesmium erythraeum IMS101; identical to SEQ ID NO: 52412
  CDS (1)..(1383): transl_table=11

SEQ ID NO: 94102 - protein, 460 aa, Trichodesmium erythraeum IMS101; identical to SEQ ID NO: 52413

SEQ ID NO: 94103 - DNA, 1452 bp, Alkalilimnicola ehrlichei MLHE-1; identical to SEQ ID NO: 52416
  CDS (1)..(1452): transl_table=11

SEQ ID NO: 94104 - protein, 483 aa, Alkalilimnicola ehrlichei MLHE-1; identical to SEQ ID NO: 52417

SEQ ID NO: 94105 - DNA, 1443 bp, Rhizobium leguminosarum bv. viciae 3841; identical to SEQ ID NO: 52418
  CDS (1)..(1443): transl_table=11

SEQ ID NO: 94106 - protein, 480 aa, Rhizobium leguminosarum bv. viciae 3841; identical to SEQ ID NO: 52419

SEQ ID NO: 94107 - DNA, 1422 bp, Solibacter usitatus Ellin6076
  CDS (1)..(1422): transl_table=11
gtgtcccgcgtcctcatgatctcctccgaggctgctccgttcgccaagacaggcggcctggccgacgtggttggcgcactgcccaccgcgcttcatagctttggcgacgaagtggccgtggtcatcccgcgctatggttcgatcgatctcaaacatgcccgccgggtctgggagaacctcttcgtacaccttggtcccgccgcgtttccgattacaatctatcaggctcccgccgaataccccgtttatctggtggattgtccgccgctcttcgagcgcaagggcttctatggcgattctgcaatggatttcccggacaaccacatccgcttcgcagtcttcgcgcgcgctgcgctcgcggtcgcccgagtgctcttccgcaccgagatcttccactgccacgactggcagtcggggctggtgcccgcctacctgcgcaccaccttcgcttccgatcccacgtacctgggatgccgcacgcttttcaccatccacaacctgggctatcagggactctttccgaagagcgcgctcgccgaagtcgccctgcctgtcgaggatgtcttccgtcccgatgccatggagttcttcggccgcgtcagttatatcaaagccgggatcgcattcgcggacgtcctgagcaccgtgagccccacttacgcccgcgagatccagacgccggagtacggtttcggactggacggcgccctgcgcgcccgctccaacgtgctgaccgggattctgaacggtgttgactatcgggaatggaacccggaaatcgaccccctgattccggcccgctactcggtggacgacttgagcgggaaagagatctgcaaacgccaattgctcgcggaattcggacttccgccggaggcgatgggacggcccctgctcggcatcgtctcgcgcttcactcggcagaagggcaccgatatactcgcggaggtcatttcccatatcatcgcccaggatgtttatctggtcgcgctgggtagcggggatgtcgcctacgaggaattctttcgtagcatgcagagcgactatcccgggcgcatcggcgtccgcattggcttcgataacggactcgcccaccggatcgaagccggcgccgatatcttcctgatgcccagccactatgaaccctgcggtctcaaccagatatatagccttcgctatggaaccgtgcccgtggttcgcgccaccggcggcctggatgataccatcgatgagggcactggattcaagttcgcggaatattccggcgaggcgctcctggaagcggttcgagccgccgtcgcgggtttttcggaccccggcgcctggcggaatatgatgcgcaacggtatgcggaaggatttctcctggaagacctccgccgctgcctattcggagctttaccgccggctgttgggccgctga

SEQ ID NO: 94108 - protein, 473 aa, Solibacter usitatus Ellin6076
MSRVLMISSEAAPFAKTGGLADVVGALPTALHSFGDEVAVVIPRYGSIDLKHARRVWENLFVHLGPAAFPITIYQAPAEYPVYLVDCPPLFERKGFYGDSAMDFPDNHIRFAVFARAALAVARVLFRTEIFHCHDWQSGLVPAYLRTTFASDPTYLGCRTLFTIHNLGYQGLFPKSALAEVALPVEDVFRPDAMEFFGRVSYIKAGIAFADVLSTVSPTYAREIQTPEYGFGLDGALRARSNVLTGILNGVDYREWNPEIDPLIPARYSVDDLSGKEICKRQLLAEFGLPPEAMGRPLLGIVSRFTRQKGTDILAEVISHIIAQDVYLVALGSGDVAYEEFFRSMQSDYPGRIGVRIGFDNGLAHRIEAGADIFLMPSHYEPCGLNQIYSLRYGTVPVVRATGGLDDTIDEGTGFKFAEYSGEALLEAVRAAVAGFSDPGAWRNMMRNGMRKDFSWKTSAAAYSELYRRLLGR

SEQ ID NO: 94109 - DNA, 1446 bp, Magnetococcus sp. MC-1; identical to SEQ ID NO: 52420
  CDS (1)..(1446): transl_table=11

SEQ ID NO: 94110 - protein, 481 aa, Magnetococcus sp. MC-1; identical to SEQ ID NO: 52421

SEQ ID NO: 94111 - DNA, 1479 bp, Magnetospirillum magnetotacticum MS-1; identical to SEQ ID NO: 52424
  CDS (1)..(1479): transl_table=11

SEQ ID NO: 94112 - protein, 492 aa, Magnetospirillum magnetotacticum MS-1; identical to SEQ ID NO: 52425

SEQ ID NO: 94113 - DNA, 1440 bp, Nostoc punctiforme PCC 73102; identical to SEQ ID NO: 52426
  CDS (1)..(1440): transl_table=11

SEQ ID NO: 94114 - protein, 479 aa, Nostoc punctiforme PCC 73102; identical to SEQ ID NO: 52427

SEQ ID NO: 94115 - DNA, 1461 bp, Haemophilus somnus 2336
  CDS (1)..(1461): transl_table=11
atgggaggattaaaattaacaatgaaagtattacatgtttgttccgaattatatccattattaaaaacaggcggattggctgatgtaatgggggctttaccttttgcacaaaatgaaattggtattgatgctagacttgttttaccggcttatcctgctatttctcgtggtattccaaataccgttgtagttgctgaatttgataattttgccggacatgttgtactacgttatggtgaatacaatggtattggtgtttatttaatcgatgcaccgcatttatatgcccgtgaaggtaatccataccatgatatgtggtataacgattatacggacaactataagcgttttgctttattggcttgggttggggcagagttggctacaggattagacttttggtggcgtgctgaaattgtgcatgctcatgattggcatgcaggcttaacagctgcttatttgcatcataaaggacgccctgctaaatcggtgtttactatccataatttagcctatcaaggacgttttttaccttatcatctaactgaaattggattgccttggtggatgtttaatgtagatggattggaattatatggtgaaatgtcttatttaaaagccggactgtattattccgatatttctactgcagttagtccaacctatgccaaagaaattacaacacctgaatttgcttatggtttacaagggttgttgcaaactttgaaagcacagggacgattggttggtattttgaatggcgtagatgaaaaaatttggcatccgtatagtgatccgtatattgaagatcattacaaattgaaatcaatgcagggtaaacgtaagaataaaataaaattacaagcttattttaatttaccacaaaatcctaatgcactgttatttgtaatggttacacgtctaacagagcaaaaaggtgtagatttactaattggtagtgccgagagaattgtacaacaaggtgggcaattagcaattttaggttccggttcagcacatttagaagccggtattaattggcttgcacaagagtatccggaaaatatcgcagtaaaaattggatatgatgaagcattatcacatttaatgattgccggaggagatgtcattcttgttccaagtcgtttcgagccttgtggcttaacgcagttatacggattaaaatatggaactttaccgttagttcgttcaacaggcggtttggctgatactgtcattgatagtagcagtgaaaacatcaaagcacgtcatgcaacaggatttgtatttaatgatgctgatgttgggggattatgttatggtattgatagtgcatttactttgtggcgtaaaccaagtcaatgggaaagtgtgatagtcaatgctatggaacaggatttcagttggcagacatctgcaaaaggatatcaatccctatatgatattcttttacataaataa

SEQ ID NO: 94116 - protein, 486 aa, Haemophilus somnus 2336
MGGLKLTMKVLHVCSELYPLLKTGGLADVMGALPFAQNEIGIDARLVLPAYPAISRGIPNTVVVAEFDNFAGHVVLRYGEYNGIGVYLIDAPHLYAREGNPYHDMWYNDYTDNYKRFALLAWVGAELATGLDFWWRAEIVHAHDWHAGLTAAYLHHKGRPAKSVFTIHNLAYQGRFLPYHLTEIGLPWWMFNVDGLELYGEMSYLKAGLYYSDISTAVSPTYAKEITTPEFAYGLQGLLQTLKAQGRLVGILNGVDEKIWHPYSDPYIEDHYKLKSMQGKRKNKIKLQAYFNLPQNPNALLFVMVTRLTEQKGVDLLIGSAERIVQQGGQLAILGSGSAHLEAGINWLAQEYPENIAVKIGYDEALSHLMIAGGDVILVPSRFEPCGLTQLYGLKYGTLPLVRSTGGLADTVIDSSSENIKARHATGFVFNDADVGGLCYGIDSAFTLWRKPSQWESVIVNAMEQDFSWQTSAKGYQSLYDILLHK

SEQ ID NO: 94117 - DNA, 1431 bp, Haemophilus influenzae R2866
  CDS (1)..(1431): transl_table=11
atgaaaatcttacacgtttgctcggaactctatccgctcttaaaaataggcgggcttgccgatgttttaggagcattaccccaagcgcagaaccaaatcgggctagatgcccgcgttttattgcctgcttatcctgcaattacagcaggtattccgaatactcaagtggttgccgaatttgataacttcgcagggcacgtggtattgcgttatggagaatataatggtgtcgggatctatttgattgactcaccgcacttatacggtcgcgaaggcaatccttatcacgatgcctattacaatgactacggcgacaactacaaacgttttgctttgctcggttgggtgggggcagaattagccacaggtttagatagctggtggcgtgcagaagtggtacacgcccacgattggcacgcaggtttgtgtgcagcatatctcttcaacaaaggtcgccctgcgaaatcggtgttcactattcataacttggcgtatcaagggcagttttcttatcatcatttgtatgaaatcggcttgccaacaggaatgttccacgtagaaggcttggaattatttgggcagatttcttacttgaaatcaggcttgttctattccgatgcaagcacggcagttagcccaacttatgccgaagaaatcacgacaccagaatttgcctacggtttgcaaggcttgctttctggcttaaaagctcaagatcgtttggtggggattttaaacggcgtggacgaaaatatttggcatccgaacgtggatcaatacattccgaaccattacaagctgaaatatatggcaggcaaaaagaaaaacaaagccgaactgcaagcctatttcaatttgccacaagatgaatctgctttggcatttgtgatggtcacccgtttaaccgagcaaaaaggtgtagatttattaatcgaaagtgcagatgaaatcgtcaaacaaggcgggcagttgatgattttaggttcaggtgcaccgcacttggaacaaggtattcgtgagcttgctgaacgttatccacaaaatattgcggtaaaaatcggctatgatgaagccctttcgcatttaatggtggcaggtggtgatgtgattttagtgccaagccgtttcgagccttgtggcttaacccaactttatggtttgcaatatggcacactgccactagttcgtaaaacgggtggtttggcggatacggtggtggatagcacctcagaaagtatcaaagctcgcaccgcaacaggttttgtgtttgaacaggctgaggcagatgatttacgccgtaccattcagcacgcattttcaatttggaagaaaccaagagcttggtcaatgatacgcacggacgcaatggaacaagacttcagctggcgtaaggctgcagagcaatatagaacactttatgaacgcttgtag

SEQ ID NO: 94118 - protein, 476 aa, Haemophilus influenzae R2866
MKILHVCSELYPLLKIGGLADVLGALPQAQNQIGLDARVLLPAYPAITAGIPNTQVVAEFDNFAGHVVLRYGEYNGVGIYLIDSPHLYGREGNPYHDAYYNDYGDNYKRFALLGWVGAELATGLDSWWRAEVVHAHDWHAGLCAAYLFNKGRPAKSVFTIHNLAYQGQFSYHHLYEIGLPTGMFHVEGLELFGQISYLKSGLFYSDASTAVSPTYAEEITTPEFAYGLQGLLSGLKAQDRLVGILNGVDENIWHPNVDQYIPNHYKLKYMAGKKKNKAELQAYFNLPQDESALAFVMVTRLTEQKGVDLLIESADEIVKQGGQLMILGSGAPHLEQGIRELAERYPQNIAVKIGYDEALSHLMVAGGDVILVPSRFEPCGLTQLYGLQYGTLPLVRKTGGLADTVVDSTSESIKARTATGFVFEQAEADDLRRTIQHAFSIWKKPRAWSMIRTDAMEQDFSWRKAAEQYRTLYERL

SEQ ID NO: 94119 - DNA, 1473 bp, Crocosphaera watsonii WH 8501; identical to SEQ ID NO: 53496
  CDS (1)..(1473): transl_table=11

SEQ ID NO: 94120 - protein, 490 aa, Crocosphaera watsonii WH 8501; identical to SEQ ID NO: 53497

SEQ ID NO: 94121 - DNA, 1776 bp, Crocosphaera watsonii WH 8501; identical to SEQ ID NO: 52432
  CDS (1)..(1776): transl_table=11

SEQ ID NO: 94122 - protein, 591 aa, Crocosphaera watsonii WH 8501; identical to SEQ ID NO: 52433

SEQ ID NO: 94123 - DNA, 1446 bp, Streptococcus suis 89/1591; identical to SEQ ID NO: 52436
  CDS (1)..(1446): transl_table=11

SEQ ID NO: 94124 - protein, 481 aa, Streptococcus suis 89/1591; identical to SEQ ID NO: 52437

SEQ ID NO: 94125 - DNA, 1590 bp, delta proteobacterium MLMS-1
  CDS (1)..(1590): transl_table=11
atgcaagaaaaaacgatcgatcatatctggatggtgagccgggagtacgagggcttggccggggccggcggggtcaaggacgtggtacggcaactggccgaggccctggcccgctcggggcggcaagtcagcgtggtgctgcccctttacggctccatcgaggccgaagaggccggctttgcccccacggacctccaattcgaggtggggatgaactacaccggggtggagcggcgggagttggtccgggtattggcccgccaccaaacgcccggcgacggcaccctttccctctacctgctcgacgcccagcgttaccaggaaaaacaggggatctacacctataccgccgccgaagaggcccttaaccccgcccatcggcagggagccggtcatatcgactatttcgcgatgaatgtgctgctgcagaaggcggccctggccctgatgatccaccttgagcagcggccggagatcatccactgccacgacggccataccgccctgctgccggccctgatccgcgaactggaaggtttccggcactactttgccgacagcgccgcggtggtcacggtccacaacgccgggctgggctaccaccaggaggtggacgacctggcttttgccgaggcgatcagcggtctgcccggccgggtgatccgcgacaacctgctgggcgtcagctttgacccgctgttggccgctgccagctacgcgccgctgaacacggtcagcgaaaactacgcccgggagctgcgggagagcgacgacgacgccttaaccggctggctgggccaccgcctgctgggccggggggtggccctgcaggggatcaccaacgggatcgaccccacggaattcgaccccgaagaaccgcaaaaactcggcctgcccgccgccttctcccccggcaaacgggactttgccggcaaggaggtttgtcggcaacaactgctcaccaccctggccaccgcctcctggccccatctccaacgctacggcagcctggagccggaaggggagcagcatttgcccctgttcacctttgtcggccgcttaaccgcccagaaaggggtggatgtactgctggagaccctgaccaccctgttgcccctggaccgggattttcaggtgttgatcctgggttccggggaatcggagagcgaacgggccctgatccggctggcggaagcgccggccaaccggggccgaatctgtttcctgcggggctatgattcgctggtggccaaccaactgttcgccgccggcgatttttttctgatcccctcccgttacgagccctgcggcctgaccgactacctggcccagttgttcggcaatatccccgtcgtccaccacgtcggcggcctggtcaaggttgtggacggggtcaccggcctggcctaccgggaacacacttcggccgccctgatgggggccatgcggcgggccctgaaactttaccgccggcagcccgaaaagatgcttgacatgcgtcaggcagccgttcagcatgtcagggaacgttatacttgggatcgcgtcaaagacgaatatctggaattttaccgtaagtcctgtttgtaa

SEQ ID NO: 94126 - protein, 529 aa, delta proteobacterium MLMS-1
MQEKTIDHIWMVSREYEGLAGAGGVKDVVRQLAEALARSGRQVSVVLPLYGSIEAEEAGFAPTDLQFEVGMNYTGVERRELVRVLARHQTPGDGTLSLYLLDAQRYQEKQGIYTYTAAEEALNPAHRQGAGHIDYFAMNVLLQKAALALMIHLEQRPEIIHCHDGHTALLPALIRELEGFRHYFADSAAVVTVHNAGLGYHQEVDDLAFAEAISGLPGRVIRDNLLGVSFDPLLAAASYAPLNTVSENYARELRESDDDALTGWLGHRLLGRGVALQGITNGIDPTEFDPEEPQKLGLPAAFSPGKRDFAGKEVCRQQLLTTLATASWPHLQRYGSLEPEGEQHLPLFTFVGRLTAQKGVDVLLETLTTLLPLDRDFQVLILGSGESESERALIRLAEAPANRGRICFLRGYDSLVANQLFAAGDFFLIPSRYEPCGLTDYLAQLFGNIPVVHHVGGLVKVVDGVTGLAYREHTSAALMGAMRRALKLYRRQPEKMLDMRQAAVQHVRERYTWDRVKDEYLEFYRKSCL

SEQ ID NO: 94127 - DNA, 1521 bp, Synechococcus sp. RS9916; identical to SEQ ID NO: 52446
  CDS (1)..(1521): transl_table=11

SEQ ID NO: 94128 - protein, 506 aa, Synechococcus sp. RS9916; identical to SEQ ID NO: 52447

SEQ ID NO: 94129 - DNA, 1560 bp, Pseudomonas putida GB-1
  CDS (1)..(1560): transl_table=11
atgatcagtgccgctgtcgagcctcacgtagattcattcaacccggacaaccgcgagccgctcaccccggatttcgccacgacaggcaaggcacccggcgcccagcgccaacacaacccgaacatgcgcaagattctgttcgtgacctcggaaatcgccgacctggtgaaaaccggcggcctgggcgacgtgtccgccgcgctgccccgtgccctggcgcacctgcacgatgtacgggtgctcatccccggctaccgccaggtcatggaaagcgacaacccgatccatatcgtgggtgaactgggcggccacgcggccctgccgccgtgcaagatcgggcgcatggacatggccgacggcctggtcatctacgtgctgatctgccccgaactgtatcaacgcgacggcacaccctatggtgccaacaacggccgcgactggcctgacaaccacattcgcttcgctcgcctgggcctggctgccgccgaaatcgccgctggcgaaggcaagatccactggacgccggaagtggtgcacgcgcatgactggcccgccggcctggccccggcctacatgcactggcgcgggctgagcacgcccaccctgttcaccatccataacctggcctaccagggggtatatagccgcggctgcagcccggagctggcgatccccgaccacgccatgcagcaagaaggcatggagttctacggcaagttgtcgttcctcaaggctgggctggcctactccagccacatcaccacggtcagcgccacctatgcgcgggaaatcaccaccccggaattcggctgcggcctggacggcttcctcgccagcaaggcccagcaaggcctgcttggtggtatccccaacggtatcgacgaaagctgggactcggccaccgacaagcacctgcagcacaacttcagcatcaacgactgggaaggcaaggcgcgcaacacccatgaagtgcgcgagctgttcggcctggaagactccgaaggcccgctgttcgccgtggtctcgcggctggtctatcagaagggcctggacctgaccctgggcgtggccgactacatcgtcgaacaaggtgggcagatcgcgatcatcggccgtggcgagccggaagaagaacaagccatgcgcgaactggcgctgcgccacccagggcgtatcggtgtgcgcatcggtttcaatgaaaccgatgctcgacggatgttcgcgggcagcgacttcctgcttatgccgtcgcgctacgagccttgcggcctcagccagatgtacgcgcaacgcttcggctcactgccggtggcgcgcaatacaggcggcctggccgacaccatcgagtgcggcgtcacgggcttcttgttcaacgaatcgaccgtcgagagctaccgccaggcactgagccgagccttctatgtatacggcaagaaggacctgctcaacgccatgcgctgcctttcgatgacccagccattcaactggtgccaggcggtggagccctacgcccgcctgtacgaggacctggtcaagcaggcacaactgagccactactga

SEQ ID NO: 94130 - protein, 519 aa, Pseudomonas putida GB-1
MISAAVEPHVDSFNPDNREPLTPDFATTGKAPGAQRQHNPNMRKILFVTSEIADLVKTGGLGDVSAALPRALAHLHDVRVLIPGYRQVMESDNPIHIVGELGGHAALPPCKIGRMDMADGLVIYVLICPELYQRDGTPYGANNGRDWPDNHIRFARLGLAAAEIAAGEGKIHWTPEVVHAHDWPAGLAPAYMHWRGLSTPTLFTIHNLAYQGVYSRGCSPELAIPDHAMQQEGMEFYGKLSFLKAGLAYSSHITTVSATYAREITTPEFGCGLDGFLASKAQQGLLGGIPNGIDESWDSATDKHLQHNFSINDWEGKARNTHEVRELFGLEDSEGPLFAVVSRLVYQKGLDLTLGVADYIVEQGGQIAIIGRGEPEEEQAMRELALRHPGRIGVRIGFNETDARRMFAGSDFLLMPSRYEPCGLSQMYAQRFGSLPVARNTGGLADTIECGVTGFLFNESTVESYRQALSRAFYVYGKKDLLNAMRCLSMTQPFNWCQAVEPYARLYEDLVKQAQLSHY

SEQ ID NO: 94131 - DNA, 1815 bp, Oryza sativa subsp
  CDS (1)..(1815)
atgtcggctctcaccacgtcccagctcgccacctcggccaccggcttcggcatcgccgacaggtcggcgccgtcgtcgctgctccgccacgggttccagggcctcaagccccgcagccccgccggcggcgacgcgacgtcgctcagcgtgacgaccagcgcgcgcgcgacgcccaagcagcagcggtcggtgcagcgtggcagccggaggttcccctccgtcgtcgtgtacgccaccggcgccggcatgaacgtcgtgttcgtcggcgccgagatggccccctggagcaagaccggcggcctcggtgacgtcctcggtggcctcccccctgccatggctgcgaatggccacagggtcatggtgatctctcctcggtacgaccagtacaaggacgcttgggataccagcgttgtggctgagatcaaggttgcagacaggtacgagagggtgaggtttttccattgctacaagcgtggagtcgaccgtgtgttcatcgaccatccgtcattcctggagaaggtttggggaaagaccggtgagaagatctacggacctgacactggagttgattacaaagacaaccagatgcgtttcagccttctttgccaggctcctaggatcctaaacctcaacaacaacccatacttcaaaggaacttatggtgaggatgttgtgttcgtctgcaacgactggcacactggcccactggcgagctacctgaagaacaactaccagcccaatggcatctacaggaatgcaaaggttgctttctgcatccacaacatctcctaccagggccgtttcgctttcgaggattaccctgagctgaacctctccgagaggttcaggtcatccttcgatttcatcgacgggtatgacacgccggtggagggcaggaagatcaactggatgaaggccggaatcctggaagccgacagggtgctcaccgtgagcccgtactacgccgaggagctcatctccggcatcgccaggggatgcgagctcgacaacatcatgcggctcaccggcatcaccggcatcgtcaacggcatggacgtcagcgagtgggatcctagcaaggacaagtacatcaccgccaagtacgacgcaaccacggcaatcgaggcgaaggcgctgaacaaggaggcgttgcaggcggaggcgggtcttccggtcgacaggaaaatcccactgatcgcgttcatcggcaggctggaggaacagaagggccctgacgtcatggccgccgccatcccggagctcatgcaggaggacgtccagatcgttcttctgggtactggaaagaagaagttcgagaagctgctcaagagcatggaggagaagtatccgggcaaggtgagggccgtggtgaagttcaacgcgccgcttgctcatctcatcatggccggagccgacgtgctcgccgtccccagccgcttcgagccctgtggactcatccagctgcaggggatgagatacggaacgccctgtgcttgcgcgtccaccggtgggctcgtggacacggtcatcgaaggcaagactggtttccacatgggccgtctcagcgtcgactgcaaggtggtggagccaagcgacgtgaagaaggtggcggccaccctgaagcgcgccatcaaggtcgtcggcacgccggcgtacgagatggtcaggaactgcatgaaccaggacctctcctggaaggggcctgcgaagaactgggagaatgtgctcctgggcctgggcgtcgccggcagcgcgccggggatcgaaggcgacgagatcgcgccgctcgccaaggagaacgtggctgctccttga

SEQ ID NO: 94132 - protein, 604 aa, Oryza sativa subsp
MSALTTSQLATSATGFGIADRSAPSSLLRHGFQGLKPRSPAGGDATSLSVTTSARATPKQQRSVQRGSRRFPSVVVYATGAGMNVVFVGAEMAPWSKTGGLGDVLGGLPPAMAANGHRVMVISPRYDQYKDAWDTSVVAEIKVADRYERVRFFHCYKRGVDRVFIDHPSFLEKVWGKTGEKIYGPDTGVDYKDNQMRFSLLCQAPRILNLNNNPYFKGTYGEDVVFVCNDWHTGPLASYLKNNYQPNGIYRNAKVAFCIHNISYQGRFAFEDYPELNLSERFRSSFDFIDGYDTPVEGRKINWMKAGILEADRVLTVSPYYAEELISGIARGCELDNIMRLTGITGIVNGMDVSEWDPSKDKYITAKYDATTAIEAKALNKEALQAEAGLPVDRKIPLIAFIGRLEEQKGPDVMAAAIPELMQEDVQIVLLGTGKKKFEKLLKSMEEKYPGKVRAVVKFNAPLAHLIMAGADVLAVPSRFEPCGLIQLQGMRYGTPCACASTGGLVDTVIEGKTGFHMGRLSVDCKVVEPSDVKKVAATLKRAIKVVGTPAYEMVRNCMNQDLSWKGPAKNWENVLLGLGVAGSAPGIEGDEIAPLAKENVAAP

SEQ ID NO: 94133 - DNA, 1821 bp, Oryza sativa subsp
  CDS (1)..(1821)
atgtcggctctcaccacgtcccagctcgccacctcggccaccggcttcggcatcgccgacaggtcggcgccgtcgtcgctgctccgccacgggttccagggcctcaagccccgcagccccgccggcggcgacgcgacgtcgctcagcgtgacgaccagcgcgcgcgcgacgcccaagcagcagcggtcggtgcagcgtggcagccggaggttcccctccgtcgtcgtgtacgccaccggcgccggcatgaacgtcgtgttcgtcggcgccgagatggccccctggagcaagaccggcggcctcggtgacgtcctcggtggcctcccccctgccatggctgcgaatggccacagggtcatggtgatctctcctcggtacgaccagtacaaggacgcttgggataccagcgttgtggctgagatcaaggttgcagacaggtacgagagggtgaggtttttccattgctacaagcgtggagtcgaccgtgtgttcatcgaccatccgtcattcctggagaaggtttggggaaagaccggtgagaagatctacggacctgacactggagttgattacaaagacaaccagatgcgtttcagccttctttgccaggaggctcctaggatcctaaacctcaacaacaacccatacttcaaaggaacttatggtgaggatgttgtgttcgtctgcaacgactggcacactggcccactggcgagctacctgaagaacaactaccagcccaatggcatctacaggaatgcaaaggttgctttctgcatccacaacatctcctaccagggccgtttcgctttcgaggattaccctgagctgaacctctccgagaggttcaggtcatccttcgatttcatcgacgggtatgacacgccggtggagggcaggaagatcaactggatgaaggccggaatcctggaagccgacagggtgctcaccgtgagcccgtactacgccgaggagctcatctccggcatcgccaggggatgcgagctcgacaacatcatgcggctcaccggcatcaccggcatcgtcaacggcatggacgtcagcgagtgggatcctagcaaggacaagtacatcaccgccaagtacgacgcaaccacggcaatcgaggcgaaggcgctgaacaaggaggcgttgcaggcggaggcgggtcttccggtcgacaggaaaatcccactgatcgcgttcatcggcaggctggaggaacagaagggccctgacgtcatggccgccgccatcccggagctcatgcaggaggacgtccagatcgttcttctgggtactggaaagaagaagttcgagaagctgctcaagagcatggaggagaagtatccgggcaaggtgagggccgtggtgaagttcaacgcgccgcttgctcatctcatcatggccggagccgacgtgctcgccgtccccagccgcttcgagccctgtggactcatccagctgcaggggatgagatacggaacgccctgtgcttgcgcgtccaccggtgggctcgtggacacggtcatcgaaggcaagactggtttccacatgggccgtctcagcgtcgactgcaaggtggtggagccaagcgacgtgaagaaggtggcggccaccctgaagcgcgccatcaaggtcgtcggcacgccggcgtacgaggagatggtcaggaactgcatgaaccaggacctctcctggaaggggcctgcgaagaactgggagaatgtgctcctgggcctgggcgtcgccggcagcgcgccggggatcgaaggcgacgagatcgcgccgctcgccaaggagaacgtggctgctccttga

SEQ ID NO: 94134 - protein, 606 aa, Oryza sativa subsp
MSALTTSQLATSATGFGIADRSAPSSLLRHGFQGLKPRSPAGGDATSLSVTTSARATPKQQRSVQRGSRRFPSVVVYATGAGMNVVFVGAEMAPWSKTGGLGDVLGGLPPAMAANGHRVMVISPRYDQYKDAWDTSVVAEIKVADRYERVRFFHCYKRGVDRVFIDHPSFLEKVWGKTGEKIYGPDTGVDYKDNQMRFSLLCQEAPRILNLNNNPYFKGTYGEDVVFVCNDWHTGPLASYLKNNYQPNGIYRNAKVAFCIHNISYQGRFAFEDYPELNLSERFRSSFDFIDGYDTPVEGRKINWMKAGILEADRVLTVSPYYAEELISGIARGCELDNIMRLTGITGIVNGMDVSEWDPSKDKYITAKYDATTAIEAKALNKEALQAEAGLPVDRKIPLIAFIGRLEEQKGPDVMAAAIPELMQEDVQIVLLGTGKKKFEKLLKSMEEKYPGKVRAVVKFNAPLAHLIMAGADVLAVPSRFEPCGLIQLQGMRYGTPCACASTGGLVDTVIEGKTGFHMGRLSVDCKVVEPSDVKKVAATLKRAIKVVGTPAYEEMVRNCMNQDLSWKGPAKNWENVLLGLGVAGSAPGIEGDEIAPLAKENVAAP

SEQ ID NO: 94135 - DNA, 1818 bp, Oryza nivara; identical to SEQ ID NO: 52448
  CDS (1)..(1818)

SEQ ID NO: 94136 - protein, 605 aa, Oryza nivara; identical to SEQ ID NO: 52449

SEQ ID NO: 94137 - DNA, 1860 bp, Glycine max; identical to SEQ ID NO: 52452
  CDS (1)..(1860)

SEQ ID NO: 94138 - protein, 619 aa, Glycine max; identical to SEQ ID NO: 52453

SEQ ID NO: 94139 - DNA, 1830 bp, Zea mays
  CDS (1)..(1830)
atggctgcaacgatgggttcaatatctgccaatggttcttaccaaacaaataggcccagtgcactaaagcaggcacctcacatgcaattccaacaatgttgcaacggtggacttaggttcttaagcaagcactcccaatccatgcgaagtaagatacaggtggctaaaagaagagctacagataatggaattcatccaaagactacgggacatcgggcacctattgtatgttctgctgggatgactattgtatttgttgcaactgaagtgcacccatggtgcaaaactggtggcctcggtgatgttgtaggaggactgcccccagctttggctgctatgggacaccgtgtcatgacaatagctcctcgttatgatcaatacaaggatgcatgggatacaagtgtccttgttgaggtaaatattggtgacacggtagaaactgttcgcttcttccactgctacaaaagaggagtcgatcgtgtttttgttgatcatcctatgtttcttgaaaaggtatggggcaagactggagcaaaattgtgtggtcctactactggaactgactatcgagataaccagttgaggttctgccttttgtgccttgctactttggaggctccaagagttctcaatttcaacaattctgaatatttctctggaccatatggggaagatgttgtcttcgtagccaatgattggcacactgctattttgccatgttatctgaagagcatgtataagccaaatggaatttataaaaatgctaaggttgctttctgcatacataatattgcctatcaaggtagatttgccagagcagacttcgatcttcttaatctacctgacagtttcttgccatcattcgattttattgatggacatgttaagcctgttctagggagaaagcttaactggatgaaggcagggatcattgagagtgatatggttctaacagtcagtccacattatgtcaaggaactcatttctggcccagataagggtgttgagttggatggtgtccttcgcacaaagcctcttgaaattggaatcgtaaatggcatggatgtttatgaatgggatccttcaacagataagtacatcagcgtgaaatatgatgcaacaacggtaactgaagcaagggctctcaataaagagaggttgcaagccgaagtcggattgcctgtggactcgagcatccctgttatagttttcgtcgggcgtctcgaagaacagaaagggtccgacatactcattgcagccattccagagttcgtgggcgagaatgtccagataatcgttcttggcacgggaaagaagaagatggaggaggaactaacgcagctggaagtgaaatatccaaacaacgctagaggcatagcgaaattcaatgttccattggcacacatgatgtttgctggggctgacttcattatcgtcccgagcaggtttgagccatgtggtctcattcagctgcaagggatgcgatatggagtgattcccatctgttcatccactggaggacttgtcgacacggttgaggagggtgtcaccggattccacatgggttctttcaatgtcgagtgtgaaactgtagacccagccgacgtgacagcagtagcgtcaaccgtcacgcgagccctgatgcagtacgacaccccggcgttccatgagatggttcagaactgcatggcgcaagacctgtcctggaaggggcctgcgaaggagtgggaggaggtgcttctgggccttggagtcgaggggagtcgagctggcatcgacgacgcagaggagatcgccccacttgccaaggaaaacgtagccactccgtga

SEQ ID NO: 94140 - protein, 609 aa, Zea mays
MAATMGSISANGSYQTNRPSALKQAPHMQFQQCCNGGLRFLSKHSQSMRSKIQVAKRRATDNGIHPKTTGHRAPIVCSAGMTIVFVATEVHPWCKTGGLGDVVGGLPPALAAMGHRVMTIAPRYDQYKDAWDTSVLVEVNIGDTVETVRFFHCYKRGVDRVFVDHPMFLEKVWGKTGAKLCGPTTGTDYRDNQLRFCLLCLATLEAPRVLNFNNSEYFSGPYGEDVVFVANDWHTAILPCYLKSMYKPNGIYKNAKVAFCIHNIAYQGRFARADFDLLNLPDSFLPSFDFIDGHVKPVLGRKLNWMKAGIIESDMVLTVSPHYVKELISGPDKGVELDGVLRTKPLEIGIVNGMDVYEWDPSTDKYISVKYDATTVTEARALNKERLQAEVGLPVDSSIPVIVFVGRLEEQKGSDILIAAIPEFVGENVQIIVLGTGKKKMEEELTQLEVKYPNNARGIAKFNVPLAHMMFAGADFIIVPSRFEPCGLIQLQGMRYGVIPICSSTGGLVDTVEEGVTGFHMGSFNVECETVDPADVTAVASTVTRALMQYDTPAFHEMVQNCMAQDLSWKGPAKEWEEVLLGLGVEGSRAGIDDAEEIAPLAKENVATP

SEQ ID NO: 94141 - DNA, 2097 bp, Zea mays
  CDS (1)..(2097)
atgccgggggcaatctcttcctcgtcgtcggcttttctcctccccgtcgcgtcctcctcgccgcggcgcaggcggggcagtgtgggtgctgctctgcgctcgtacggctacagcggcgcggagctgcggttgcattgggcgcggcggggcccgcctcaggatggagcggcgtcggtacgcgccgcagcggcaccggccgggggcgaaagcgaggaggcagcgaagagctcctcctcgtcccaggcgggcgctgttcagggcagcacggccaaggctgtggattctgcttcacctcccaatcctttgacatctgctccgaagcaaagtcagagcgctgcaatgcaaaacggaacgagtgggggcagcagcgcgagcaccgccgcgccggtgtccggacccaaagctgatcatccatcagctcctgtcaccaagagagaaatcgatgccagtgcggtgaagccagagcccgcaggtgatgatgctagaccggtggaaagcataggcatcgctgaaccggtggatgctaaggctgatgcagctccggctacagatgcggcggcgagtgctccttatgacagggaggataatgaacctggccctttggctgggcctaatgtgatgaacgtcgtcgtggtggcttctgaatgtgctcctttctgcaagacaggtggccttggagatgtcgtgggtgctttgcctaaggctctggcgaggagaggacaccgtgttatggtcgtgataccaagatatggagagtatgccgaagcccgggatttaggtgtaaggagacgttacaaggtagctggacaggattcagaagttacttattttcactcttacattgatggagttgattttgtattcgtagaagcccctcccttccggcaccggcacaataatatttatgggggagaaagattggatattttgaagcgcatgattttgttctgcaaggccgctgttgaggttccatggtatgctccatgtggcggtactgtctatggtgatggcaacttagttttcattgctaatgattggcataccgcacttctgcctgtctatctaaaggcctattaccgggacaatggtttgatgcagtatgctcgctctgtgcttgtgatacacaacattgctcatcagggtcgtggccctgtagacgacttcgtcaattttgacttgcctgaacactacatcgaccacttcaaactgtatgacaacattggtggggatcacagcaacgtttttgctgcggggctgaagacggcagaccgggtggtgaccgttagcaatggctacatgtgggagctgaagacttcggaaggcgggtggggcctccacgacatcataaaccagaacgactggaagctgcagggcatcgtgaacggcatcgacatgagcgagtggaaccccgctgtggacgtgcacctccactccgacgactacaccaactacacgttcgagacgctggacaccggcaagcggcagtgcaaggccgccctgcagcggcagctgggcctgcaggtccgcgacgacgtgccactgatcgggttcatcgggcggctggaccaccagaagggcgtggacatcatcgccgacgcgatccactggatcgcggggcaggacgtgcagctcgtgatgctgggcaccgggcgggccgacctggaggacatgctgcggcggttcgagtcggagcacagcgacaaggtgcgcgcgtgggtggggttctcggtgcccctggcgcaccgcatcacggcgggcgcggacatcctgctgatgccgtcgcggttcgagccgtgcgggctgaaccagctctacgccatggcgtacgggaccgtgcccgtggtgcacgccgtgggggggctccgggacacggtggcgccgttcgacccgttcaacgacaccgggctcgggtggacgttcgaccgcgcggaggcgaaccggatgatcgacgcgctctcgcactgcctcaccacgtaccggaactacaaggagagctggcgcgcctgcagggcgcgcggcatggccgaggacctcagctgggaccacgccgccgtgctgtatgaggacgtgctcgtcaaggcgaagtaccagtggtga

SEQ ID NO: 94142 - protein, 698 aa, Zea mays
MPGAISSSSSAFLLPVASSSPRRRRGSVGAALRSYGYSGAELRLHWARRGPPQDGAASVRAAAAPAGGESEEAAKSSSSSQAGAVQGSTAKAVDSASPPNPLTSAPKQSQSAAMQNGTSGGSSASTAAPVSGPKADHPSAPVTKREIDASAVKPEPAGDDARPVESIGIAEPVDAKADAAPATDAAASAPYDREDNEPGPLAGPNVMNVVVVASECAPFCKTGGLGDVVGALPKALARRGHRVMVVIPRYGEYAEARDLGVRRRYKVAGQDSEVTYFHSYIDGVDFVFVEAPPFRHRHNNIYGGERLDILKRMILFCKAAVEVPWYAPCGGTVYGDGNLVFIANDWHTALLPVYLKAYYRDNGLMQYARSVLVIHNIAHQGRGPVDDFVNFDLPEHYIDHFKLYDNIGGDHSNVFAAGLKTADRVVTVSNGYMWELKTSEGGWGLHDIINQNDWKLQGIVNGIDMSEWNPAVDVHLHSDDYTNYTFETLDTGKRQCKAALQRQLGLQVRDDVPLIGFIGRLDHQKGVDIIADAIHWIAGQDVQLVMLGTGRADLEDMLRRFESEHSDKVRAWVGFSVPLAHRITAGADILLMPSRFEPCGLNQLYAMAYGTVPVVHAVGGLRDTVAPFDPFNDTGLGWTFDRAEANRMIDALSHCLTTYRNYKESWRACRARGMAEDLSWDHAAVLYEDVLVKAKYQW

SEQ ID NO: 94143 - DNA, 1923 bp, Zea mays
  CDS (1)..(1923)
atggcgacgccctcggccgtgggcgccgcgtgcctcctcctcgcgcgggccgcctggccggccgccgtcggcgaccgggcgcgcccgcggcggctccagcgcgtgctgcgccgccggtgcgtcgcggagctgagcagggaggggcccgcgccgcgcccgctgccacccgcgctgctggcgcccccgctcgtgcccggcttcctcgcgccgccggccgagcccacgggtgagccggcatcgacgccgccgcccgtgcccgacgccggcctgggggacctcggtctcgaacctgaagggattgctgaaggttccatcgataacacagtagttgtggcaagtgagcaagattctgagattgtggttggaaaggagcaagctcgagctaaagtaacacaaagcattgtctttgtaaccggcgaagcttctccttatgcaaagtctgggggtctaggagatgtttgtggttcattgccagttgctcttgctgctcgtggtcaccgtgtgatggttgtaatgcccagatatttaaatggtacctccgataagaattatgcaaatgcattttacacagaaaaacacattcggattccatgctttggcggtgaacatgaagttaccttcttccatgagtatagagattcagttgactgggtgtttgttgatcatccctcatatcacagacctggaaatttatatggagataagtttggtgcttttggtgataatcagttcagatacacactcctttgctatgctgcatgtgaggctcctttgatccttgaattgggaggatatatttatggacagaattgcatgtttgttgtcaatgattggcatgccagtctagtgccagtccttcttgctgcaaaatatagaccatatggtgtttataaagactcccgcagcattcttgtaatacataatttagcacatcagggtgtagagcctgcaagcacatatcctgaccttgggttgccacctgaatggtatggagctctggagtgggtattccctgaatgggcgaggaggcatgcccttgacaagggtgaggcagttaattttttgaaaggtgcagttgtgacagcagatcgaatcgtgactgtcagtaagggttattcgtgggaggtcacaactgctgaaggtggacagggcctcaatgagctcttaagctccagaaagagtgtattaaacggaattgtaaatggaattgacattaatgattggaaccctgccacagacaaatgtatcccctgtcattattctgttgatgacctctctggaaaggccaaatgtaaaggtgcattgcagaaggagctgggtttacctataaggcctgatgttcctctgattggctttattggaaggttggattatcagaaaggcattgatctcattcaacttatcataccagatctcatgcgggaagatgttcaatttgtcatgcttggatctggtgacccagagcttgaagattggatgagatctacagagtcgatcttcaaggataaatttcgtggatgggttggatttagtgttccagtttcccaccgaataactgccggctgcgatatattgttaatgccatccagattcgaaccttgtggtctcaatcagctatatgctatgcagtatggcacagttcctgttgtccatgcaactgggggccttagagataccgtggagaacttcaaccctttcggtgagaatggagagcagggtacagggtgggcattcgcacccctaaccacagaaaacatgttgtggacattgcgaactgcaatatctacatacagggaacacaagtcctcctgggaagggctaatgaagcgaggcatgtcaaaagacttcacgtgggaccatgccgctgaacaatacgaacaaatcttccagtgggccttcatcgatcgaccctatgtcatgtaa

SEQ ID NO: 94144 - protein, 640 aa, Zea mays
MATPSAVGAACLLLARAAWPAAVGDRARPRRLQRVLRRRCVAELSREGPAPRPLPPALLAPPLVPGFLAPPAEPTGEPASTPPPVPDAGLGDLGLEPEGIAEGSIDNTVVVASEQDSEIVVGKEQARAKVTQSIVFVTGEASPYAKSGGLGDVCGSLPVALAARGHRVMVVMPRYLNGTSDKNYANAFYTEKHIRIPCFGGEHEVTFFHEYRDSVDWVFVDHPSYHRPGNLYGDKFGAFGDNQFRYTLLCYAACEAPLILELGGYIYGQNCMFVVNDWHASLVPVLLAAKYRPYGVYKDSRSILVIHNLAHQGVEPASTYPDLGLPPEWYGALEWVFPEWARRHALDKGEAVNFLKGAVVTADRIVTVSKGYSWEVTTAEGGQGLNELLSSRKSVLNGIVNGIDINDWNPATDKCIPCHYSVDDLSGKAKCKGALQKELGLPIRPDVPLIGFIGRLDYQKGIDLIQLIIPDLMREDVQFVMLGSGDPELEDWMRSTESIFKDKFRGWVGFSVPVSHRITAGCDILLMPSRFEPCGLNQLYAMQYGTVPVVHATGGLRDTVENFNPFGENGEQGTGWAFAPLTTENMLWTLRTAISTYREHKSSWEGLMKRGMSKDFTWDHAAEQYEQIFQWAFIDRPYVM

SEQ ID NO: 94145 - DNA, 1545 bp, Pasteurella haemolytica; identical to SEQ ID NO: 52462
  CDS (1)..(1545): transl_table=11

SEQ ID NO: 94146 - protein, 514 aa, Pasteurella haemolytica; identical to SEQ ID NO: 52463

SEQ ID NO: 94147 - DNA, 2400 bp, Triticum aestivum
  CDS (1)..(2400)
atgtcgtcggcggtcgcgtccgccgcatccttcctcgcgctcgcgtcagcctcccccgggagatcacgcaggcgggcgagggtgagcgcgcagccaccccacgccggggccggcaggttgcactggccgccgtggccgccgcagcgcacggctcgcgacggagctgtggcggcgctcgccgccgggaagaaggacgcggggatcgacgacgccgccgcgtccgtgaggcagccccgcgcactccgcggtggcgccgccaccaaggtcgcggagcgaagggatcccgtcaagacgctcgaccgcgacgccgcggaaggcggcgggccgtccccgccggcagcgaggcaggacgccgcccgtccgccgagtatgaacggcatgccggtgaacggcgagaacaaatctaccggcggcggcggcgcgactaaagacagcgggctgcccacgcccgcacgcgcgccccatccgtcgacccagaacagagcaccggtgaacggtgaaaacaaagctaacgtcgcctcgccgccgacgagcatagccgaggccgcggcttcggattccgcagctaccatttccatcagcgacaaggcgccggagtccgttgtcccagctgagaagacgccgccgtcgtccggctcaaatttcgagtcctcggcctctgctcccgggtctgacactgtcagcgacgtggaacaagaactgaagaagggtgcggtcgttgtcgaagaagctccaaagccaaaggctctttcgccgcctgcagcccccgctgtacaagaagacctttgggatttcaagaaatacattggtttcgaggagcccgtggaggccaaggatgatggccgggctgtcgcagatgatgcgggctcctttgaacaccaccagaatcacgactccggacctttggcaggggagaatgtcatgaacgtggtcgtcgtggctgctgagtgttctccctggtgcaaaacaggtggtctgggagatgttgcgggtgctctgcccaaggctttggcaaagagaggacatcgtgttatggttgtggtaccaaggtatggggactatgaagaagcctacgatgtcggagtccgaaaatactacaaggctgctggacaggatatggaagtgaattatttccatgcttatatcgatggagttgattttgtgttcattgacgctcctctcttccgacaccgtcaggaagacatttatgggggcagcagacaggaaattatgaagcgcatgattttgttctgcaaggccgctgttgaggttccatggcacgttccatgcggcggtgtcccttatggggatggaaatctggtgtttattgcaaatgattggcacacggcactcctgcctgtctatctgaaagcatattacagggaccatggtttgatgcagtacactcggtccattatggtgatacataacatcgctcaccagggccgtggccctgtagatgaattcccgttcaccgagttgcctgagcactacctggaacacttcagactgtacgaccccgtgggtggtgaacacgccaactacttcgccgccggcctgaagatggcggaccaggttgtcgtggtgagccccgggtacctgtgggagctgaagacggtggagggcggctgggggcttcacgacatcatacggcagaacgactggaagacccgcggcatcgtcaacggcatcgacaacatggagtggaaccccgaggtggacgcccacctcaagtcggacggctacaccaacttctccctgaggacgctggactccggcaagcggcagtgcaaggaggccctgcagcgcgagctgggcctgcaggtccgcgccgacgtgccgctgctcggcttcatcggccgcctggacgggcagaagggcgtggagatcatcgcggacgccatgccctggatcgtgagccaggacgtgcagctggtgatgctgggcaccgggcgccacgacctggagagcatgctgcagcacttcgagcgggagcaccacgacaaggtgcgcgggtgggtggggttctccgtgcgcctggcgcaccggatcacggcgggggcggacgcgctcctcatgccctcccggttcgagccgtgcgggctgaaccagctctacgccatggcctacggcaccgtccccgtcgtgcacgccgtcggcggcctcagggacaccgtgccgccgttcgaccccttcaaccactccgggctcgggtggacgttcgaccgcgccgaggcgcacaagctgatcgaggcgctcgggcactgcctccgcacctaccgagacttcaaggagagctggagggccctccaggagcgcggcatgtcgcaggacttcagctgggagcacgccgccaagctctacgaggacgtcctcgtcaaggccaagtaccagtggtga

SEQ ID NO: 94148 - protein, 799 aa, Triticum aestivum; identical to SEQ ID NO: 53467

SEQ ID NO: 94149 - DNA, 1830 bp, Zea mays; identical to SEQ ID NO: 52470
  CDS (1)..(1830)

SEQ ID NO: 94150 - protein, 609 aa, Zea mays; identical to SEQ ID NO: 52471

SEQ ID NO: 94151 - DNA, 1830 bp, Pennisetum americanum; identical to SEQ ID NO: 52474
  CDS (1)..(1830)

SEQ ID NO: 94152 - protein, 609 aa, Pennisetum americanum; identical to SEQ ID NO: 52475

SEQ ID NO: 94153 - DNA, 1812 bp, Hordeum bogdanii
  CDS (1)..(1812)
atggcggctctggtcacgtcccagctcgccacctccggcaccgtcctcggcatcaccgacagattccggcgtccaggtttccagggcctgaggccccggaacccggcggatgcggcgctcagcatgaggaccatcggagcgagcgccgccccgaagcaaagccggaaagcgcaccgcgggagccggcggtgcctctcaatggtgatgcgtgccacgggcagcggcatgaacctcgtgttcgtcggcgctgagatggcgccctggagcaagaccggtggcctcggcgacgtgctgggcggcctccccccggccatggccgccaacggtcaccgggtcatggtcgtctccccgcgctacgaccagtacaatgacgcctgggacaccagtgtcgtctccgagatcaaggtcgccgatgagtgcgagacggtgaggttcttccactgctacaagcgcggagtggaccgcgtgttcatcgaccacccgtggttcctggagaaggtccggggcaagaccaaggagaagatctacgggcccgacgccggcacggattacgaggacaaccagcagcgcttcagccttctctgccaggcagcacttgaggcacctaggatcctcgatctcaacaacaacccctacttttcggggccctacggggaagacgtggtgttcgtgtgcaacgactggcacacgggccctctggcctgctacctcaagagcaactaccagtccaatggcatctacaggaccgccaaggtggccttctgcatccacaacatctcgtaccagggccgcttctccttcgacgactttgcgcagctcaacctgcccgataggttcaagtcgtccttcgacttcattgacggctacgacaagccggtggaggggcgcaagatcaactggatgaaggccgggatcttgcaggccgacaaggtgctgacggtgagcccctactacgctgaggagctcatctctggcgaagccagaggctgcgagctcgacaacatcatgcgcctcacggggatcaccggcatcgtcaacggcatggacattagcgagtgggaccccaccaaggacaacttcctcgccgtcaactacgacatcaccaccgcgttggagggcaaggcactgaacaaggaggcgctgcaggccgaggtgggtctgccggtggacaggaaggtgccgctggtggccttcatcggcaggctggaggagcagaagggccccgacgtgatgatcgccgccatcccggagatcgtgaaggaagaggatgtccagatcattctccttggcaccgggaaaaagaagtttgagcggctgctcaagagcgtcgaggagaagttcccgggcaaggtgagggccgtggtcaggttcaacgcgccgctggctcaccagatgatggctggcgccgacttgctcgccgtcaccagccgcttcgagccctgcggcctgatccagctccagggaatgcgctacggaacgccgtgcgcgtgcgcgtcgacgggcgggctcgtcgacacgatcgtggagggcaagaccgggttccacatgggccgcctcagcgtcgactgcaacgtggtggagcccgccgatgtgaagaaggtggtgaccaccctgaagcgtgccgtcaaggtcgtcggcacgccggagtaccaggagatggtcaagaactgcatgatccaggatctctcctggaagggacctgccaagaactgggaggacgtgcttctggaactgggggtcgaggggagcgagccggggatcgtcggtgacgagatcgcgccgctcgccatggagaacgtcgccgctccctga

SEQ ID NO: 94154 - protein, 603 aa, Hordeum bogdanii
MAALVTSQLATSGTVLGITDRFRRPGFQGLRPRNPADAALSMRTIGASAAPKQSRKAHRGSRRCLSMVMRATGSGMNLVFVGAEMAPWSKTGGLGDVLGGLPPAMAANGHRVMVVSPRYDQYNDAWDTSVVSEIKVADECETVRFFHCYKRGVDRVFIDHPWFLEKVRGKTKEKIYGPDAGTDYEDNQQRFSLLCQAALEAPRILDLNNNPYFSGPYGEDVVFVCNDWHTGPLACYLKSNYQSNGIYRTAKVAFCIHNISYQGRFSFDDFAQLNLPDRFKSSFDFIDGYDKPVEGRKINWMKAGILQADKVLTVSPYYAEELISGEARGCELDNIMRLTGITGIVNGMDISEWDPTKDNFLAVNYDITTALEGKALNKEALQAEVGLPVDRKVPLVAFIGRLEEQKGPDVMIAAIPEIVKEEDVQIILLGTGKKKFERLLKSVEEKFPGKVRAVVRFNAPLAHQMMAGADLLAVTSRFEPCGLIQLQGMRYGTPCACASTGGLVDTIVEGKTGFHMGRLSVDCNVVEPADVKKVVTTLKRAVKVVGTPEYQEMVKNCMIQDLSWKGPAKNWEDVLLELGVEGSEPGIVGDEIAPLAMENVAAP

SEQ ID NO: 94155 - DNA, 1815 bp, Hordeum bulbosum; identical to SEQ ID NO: 52476
  CDS (1)..(1815)

SEQ ID NO: 94156 - protein, 604 aa, Hordeum bulbosum; identical to SEQ ID NO: 52477

SEQ ID NO: 94157 - DNA, 1812 bp, Hordeum spontaneum
  CDS (1)..(1812)
atggcggctctggccacgtcccagctcgccacctccggcaccgtcctcggcgtcaccgacagattccggcgtccaggttttcagggcctcaggccccggaacccagcggatgcggcgcttggtatgaggactatcggagcaagcgccgccccgaagcaaagccggaaagcgcaccgcgggagccggcggtgcctctccgtggtggtgcgcgccacgggcagcggcatgaacctcgtgttcgtcggcgccgagatggcgccctggagcaagaccggcggccttggcgatgtcctcggcggcctccccccggccatggccgccaacggtcaccgggtgatggtcgtctccccgcgctacgatcagtacaaggacgcctgggacaccagcgtcatctccgagatcaaggtcgctgacgagtacgagagggtgaggttcttccactgctacaagcgcggagtggaccgcgtgttcatcgaccacccgtggttcctggagaaggtccggggcaagaccaaggagaagatctacgggcccgacgccggcacagactatgaggacaaccagcagcgcttcagccttctctgccaggcagcactcgaggcacccaggatcctcaacctcaacaacaacccctacttttctggtccctacggggaagacgtggtgttcgtgtgcaacgactggcacacgggccttctggcctgctacctcaagagcaactaccagtccaatggcatctacaggacggccaaggtggccttctgcatccacaacatctcgtaccagggccgcttctccttcgacgactttgcgcagctcaacctgcccgacagattcaagtcgtccttcgacttcattgacggctacgacaagcccgtggaggggcgcaagatcaactggatgaaggccgggatcctgcaggccgacaaggtgctgacggtgagcccctactacgctgaggagctcatctctggcgaagccaggggctgcgagctcgacaacatcatgcgcctcacggggatcaccggcatcgtcaacggcatggacgtcagtgagtgggaccccaccaaggacaagttcctcgccgtcaactacgacatcaccaccgcgttggaggccaaggcgctgaacaaggaggcgctgcaggccgaggtggggctgccggtggacaggaaggtgccgctggtggccttcatcggcaggctggaggagcagaagggccccgacgtgatgatcgccgccatcccggagatcctgaaggaggaggacgtccagatcattctccttggcaccgggaagaagaagtttgagaagctgctcaagagcatggaggagaagttcccgggcaaggtgagggccgtggtcaggttcaacgcgccgctagctcaccagatgatggccggcgccgacttgctcgctgtcaccagccgcttcgagccctgcggcctcatccagctccagggaatgcgctatggaacgccgtgcgtgtgcgcgtccaccggcgggctcgtcgacacgatcgtggagggcaagaccgggttccacatgggccgcctcagcgtcgactgcaacgtggtggagccggcggacgtgaagaaggtggcgaccaccctgaagcgggccgtcaaggtcgtcggcacgccggcgtaccaggagatggtcaagaactgcatgatccaggatctctcctggaagggacctgccaagaactgggaggacgtgcttctggaactgggggtggaggggagcgagccggggatcgtcggcgaggagatcgcgccgctcgccatggagaacgtcgccgctccctga

SEQ ID NO: 94158 - protein, 603 aa, Hordeum spontaneum
MAALATSQLATSGTVLGVTDRFRRPGFQGLRPRNPADAALGMRTIGASAAPKQSRKAHRGSRRCLSVVVRATGSGMNLVFVGAEMAPWSKTGGLGDVLGGLPPAMAANGHRVMVVSPRYDQYKDAWDTSVISEIKVADEYERVRFFHCYKRGVDRVFIDHPWFLEKVRGKTKEKIYGPDAGTDYEDNQQRFSLLCQAALEAPRILNLNNNPYFSGPYGEDVVFVCNDWHTGLLACYLKSNYQSNGIYRTAKVAFCIHNISYQGRFSFDDFAQLNLPDRFKSSFDFIDGYDKPVEGRKINWMKAGILQADKVLTVSPYYAEELISGEARGCELDNIMRLTGITGIVNGMDVSEWDPTKDKFLAVNYDITTALEAKALNKEALQAEVGLPVDRKVPLVAFIGRLEEQKGPDVMIAAIPEILKEEDVQIILLGTGKKKFEKLLKSMEEKFPGKVRAVVRFNAPLAHQMMAGADLLAVTSRFEPCGLIQLQGMRYGTPCVCASTGGLVDTIVEGKTGFHMGRLSVDCNVVEPADVKKVATTLKRAVKVVGTPAYQEMVKNCMIQDLSWKGPAKNWEDVLLELGVEGSEPGIVGEEIAPLAMENVAAP

SEQ ID NO: 94159 - DNA, 1578 bp, Ostreococcus tauri; identical to SEQ ID NO: 52478
  CDS (1)..(1578)

SEQ ID NO: 94160 - protein, 525 aa, Ostreococcus tauri; identical to SEQ ID NO: 52479

SEQ ID NO: 94161 - DNA, 2444 bp, Phaseolus vulgaris
  CDS (78)..(2015)
cctctttttgttcttttcgcagccacttttcttcttggttcacgatcccttccctcctgcatcagacttctcttctcatggactctctacaactccatgctcttctacatccgcatctatgcgcatcatcatcatcaccatcactaaggcagctgcgtttccctcttccgttaatacgaaattcaagaaatcgcaacttccgattgttttctgctcacaatggcggcgctgcttcgcaagacggtcccttcgcttttgaagaaaaagttgtctcttcccccaaagatgatagaggtctcgtgctggccagagaaaccgacgattttggttatctcgttggctttcgcttgattccggagtcaggtcttgaagagttgatgagtgtgcaacatgcaatagctgaggaagactctagtagcgacttggctaaaaaacctgggattaaggatacaggtgaagaggaagccgagactagagtgtcccacaacattatttttgtgactgctgaagctgcgccatattccaagactggtggtcttgctgatgtttgtggctctttgccaattgctctggcggctcgcgggcaccgtgtgatggttgtcacgcccagatacattcatggtacttctgaggatgctaagtttgctggggcagttgatctggagcaacgcaccaaagtgtcgtgctttggaggtgctcaagaagttggctttttccatgagtatagggaaggggttgattgggtatttgtggaccacccctcgttccatagaccagggaatccgtatggggacaagtttgggacttttggggataatcagtttcggttcactttactttcccatgcagcgtgtgaagcgccattggtgcttccattggggggtttcacttacggagaaaaatgtttattccttgctaatgattggcatgccagcctagttccagtacttttggcagcgaagtatcgtccacatggggtatatagggatgctcgcagtatattagtgatacataatatagcacatcagggagtggaacctgcaattacatacagtagtttggggctgcctacagaatggtatggagcactggaatgggtgttccctacgtgggcaaggacgcatgctcttgacacaggtgaagctgtcaactttctaaaaggtgctgttgttacagctgaccggattgtgacagtaagcaagggctattcctgggagataactacaagtgaaggtggaaatggtctacatgaattattaaatggtcgaaaaagtattctcagtgggatcacaaatggaattgacgtcactgaatgggacccatcatgtgataaacatattgctttcaactactctgctgatgacctttccgggaaggccaaatgcaagtatgctttgcagaaggaattgggtcttccagtgaggtctgattgtccattgattgggttcattggaagactggactaccagaaaggtattgacttgatccgcttggcaatgccagagctcatggaagcggatgttcagtttgtaatgcttgggtcaggaaaccctatttatgaagactggatgagagcaacagagtccgtttatagagataaatttcggggttgggtgggatttaatgttccaatatctcataaaataactgcaggctgtgatatattgttgatgccatctgcgtttgagccctgtggactgaatcagttgtatgcaatgagatatggaactatacccgtagttcatgaaactgggggcctaagagatactgttcataattttagtccatatactgaagacagcaaagctgaaagcactgggtggacgttttctccactaacaaaagagagcatgttaacggctctaagatatgccattcagacatacaatgaacacaagtcttcgtgggagggattgatgctaagaggcatgacaaaagattacacatgggtaaatgcagctactcaatacgagcaaatcattgagtgggcattcatcggcccaccctattgctgaaatgaagattgcataaatgatccacgcaaggatttctccaataccaagctacttagaggattatcatgctcataattaagtcataatagtttccttcaaggaggcagatgtctcacttgtctaagccgtactcctttgatgatatgatattgggtacataaactcagctaggcactctcgaggaattttttacactgattggaactccaatttggaaccacgccaatgtatagtgctgttagaagttttttaccttttttgtttctttaaagggttttagaatgggtcatgtgacacatggaatttgtaccatgtgagagtgtgcgtgtattggcactgttattgcgagtgaccgacatgatttgtaagatgcgtcaatctctgtcttgtgcatgcatctatttggtatcaataaaaaaaaaaaaaaaa

SEQ ID NO: 94162 - protein, 645 aa, Phaseolus vulgaris
MDSLQLHALLHPHLCASSSSPSLRQLRFPLPLIRNSRNRNFRLFSAHNGGAASQDGPFAFEEKVVSSPKDDRGLVLARETDDFGYLVGFRLIPESGLEELMSVQHAIAEEDSSSDLAKKPGIKDTGEEEAETRVSHNIIFVTAEAAPYSKTGGLADVCGSLPIALAARGHRVMVVTPRYIHGTSEDAKFAGAVDLEQRTKVSCFGGAQEVGFFHEYREGVDWVFVDHPSFHRPGNPYGDKFGTFGDNQFRFTLLSHAACEAPLVLPLGGFTYGEKCLFLANDWHASLVPVLLAAKYRPHGVYRDARSILVIHNIAHQGVEPAITYSSLGLPTEWYGALEWVFPTWARTHALDTGEAVNFLKGAVVTADRIVTVSKGYSWEITTSEGGNGLHELLNGRKSILSGITNGIDVTEWDPSCDKHIAFNYSADDLSGKAKCKYALQKELGLPVRSDCPLIGFIGRLDYQKGIDLIRLAMPELMEADVQFVMLGSGNPIYEDWMRATESVYRDKFRGWVGFNVPISHKITAGCDILLMPSAFEPCGLNQLYAMRYGTIPVVHETGGLRDTVHNFSPYTEDSKAESTGWTFSPLTKESMLTALRYAIQTYNEHKSSWEGLMLRGMTKDYTWVNAATQYEQIIEWAFIGPPYC

SEQ ID NO: 94163 - DNA, 1827 bp, Hordeum spontaneum
  CDS (1)..(1827)
atggcggctctggccacgtcccagctcgccacctccggcaccgtcctcggcgtcaccgacaggtcggcgccgtccatgttccggcatgctggttttcagggcctgaggccccggaagcccgcagatgggacgtttggtatgaggactgtcggagcaagcgccgccccgaagcaaagccggaaagcgcaccgcgggaaccggcggtgcctctccgtggtggtgcgtgccacgggcagcggcatgaacctcgtgttcgtcggcgccgagatggcgccctggagcaagaccggcggccttggcgacgtcctcggcggccttccaccagccatggccgccaacggtcaccgggtgatggtcgtctccccgcgctacgatcagtacaaggacgcctgggacaccagcgtcatctccgagatcaaggtcgctgacgaatacgagagggtgaggttcttccactgctacaagcgcggagtggaccgcgtgttcatcgaccacccgtggttcctggagaaggtccggggcaagaccaaggagaagatctacgggcccgacgccggcacggactacgaggacaaccagcagcgcttcagccttctctgccaggcagcactcgaggcacccaggatcctcaacctcaacaacaacccctacttttctggtccctacggggaagacgtggtgttcgtgtgcaacgactggcacacgggccttctggcctgctacctcaagagcaactaccagtccaatggcatctacaggacggccaaggtggccttctgcatccacaacatctcgtaccagggccgcttctccttcgacgactttgcgcagctcaacctgcccgacaggttcaagtcgtccttcgacttcattgacggctacgacaagcccgtggaggggcgcaagatcaactggatgaaggccgggatcctgcaggccgacaaggtgctgacggtgagcccctactacgctgaggagctcatctctggcgaagccaggggctgcgagctcgacaacatcatgcgcctcacggggatcaccggaatcgtcaacggcatggacgtcagtgagtgggaccccaccaaggacaagttcctcgccgtcaactatgacatcaccaccgcgttggaggccaaggcgctgaacaaggaagcgctgcaggccgaggtggggctgccggtggacaggaaggtgccgctggtggccttcatcggcaggctggaggagcagaagggccccgacgtgatgatcgccgccatcccggagatcctgaaggaggaggacgtccagatcattctccttggcaccgggaagaagaagtttgagaagctgctcaagagcatggaggagaagttcccgggcaaggtgagggccgtggtcaggttcaacgcgccgctagctcaccagatgatggccggcgccgacttgctcgctgtcaccagccgcttcgagccctgcggcctcatccagctccagggaatgcgctatggaacgccgtgcgtgtgcgcgtccaccggcgggctcgtcgacacgatcgtggagggcaagaccgggttccacatgggccgcctcagcgtcgactgcaacgtggtggagccggcggacgtgaagaaggtggcgaccaccctgaagcgggccgtcaaggtcgtcggcacgccggcgtaccaggagatggtcaagaactgcatgatccaggatctctcctggaagggacctgccaagaactgggaggacgtgcttctggaactgggggtggaggggagcgagccggggatcgtcggcgaggagatcgcgccgctcgccatggagaacgtcgccgctccctga

SEQ ID NO: 94164 - protein, 608 aa, Hordeum spontaneum; identical to SEQ ID NO: 52483

SEQ ID NO: 94165 - DNA, 1815 bp, Aegilops tauschii; identical to SEQ ID NO: 52484
  CDS (1)..(1815)

SEQ ID NO: 94166 - protein, 604 aa, Aegilops tauschii; identical to SEQ ID NO: 52485

SEQ ID NO: 94167 - DNA, 1815 bp, Triticum aestivum
  CDS (1)..(1815)
atggcggctctggtcacgtcccagctcgccacctccggcaccgtcctcggcatcaccgacaggttccggcgtgcaggtttccatggcgtgaggccccggagcccggcggatgcggctctcggcatgaggaccgtcggagctagcgccgccccaacgcaaagccggaaagcgcaccgcgggacccggcggtgcctctccatggtggtgcgcgccaccggcagcggcggcatgaacctcgtgttcgtcggcgccgagatggcgccctggagcaagaccggcggcctcggcgacgtcctcgggggcctccccccagccatggccgccaacggccaccgggtcatggtcatctccccgcgctacgaccagtacaaggacgcctgggacaccagcgtcgtctccgagatcaaggtcgttgacaagtacgagagggtgaggtacttccactgctacaagcgcggggtggaccgcgtgttcgtcgaccacccgtgcttcctggagaaggtccggggcaagaccaaggagaagatctacgggcccgacgccggcacggactacgaggacaaccagcagcgcttcagccttctctgccaggcggcgctggaagtgccgaggatcctgaacctcgacaataacccctacttttctgggccctacggggaggacgtggtgttcgtgtgcaatgactggcacacgggccttctggcctgctacctcaagagcaactaccagtccaatggcatctacagggccgcaaaggtggcattctgcatccacaacatctcgtaccagggccgcttctccttcgacgacttcgcgcagctcaacctgcccgacaggttcaagtcgtccttcgacttcatcgacggctacgacaagccggtggaggggcgcaagatcaactggatgaaggccgggatcctgcaggccgacaaggtgctgacggtgagcccctactacgcggaggagctcatctctggcgaagccaggggctgcgagctcgacaacatcatgcgcctcactgggatcaccggcatcgtcaacggcatggatgttagcgagtgggaccccaccaaggacaagttcctcgccgtcaactacgacatcaccaccgcgttggaggggaaggcgctgaacaaggaggcgctgcaggccgaggtggggctgccggtggaccggaaggtgcccctggtggcgttcatcggcaggctggaggagcagaagggccccgacgtgatgatcgccgccatcccggagatcctgaaggaggaggacgtccagatcgttctcctgggcaccgggaagaagaagttcgagcggctactcaagagcattgaggagaaattcccgagcaaggtgagggccgtggtcaggttcaacgcgccgctggctcaccagatgatggccggcgccgacgtgctcgccgtcaccagccgcttcgagccctgcggcctcatccagctccaggggatgcgctacggaacgccgtgcgcgtgcgcgtccaccggcgggcttgtcgacacgatcgtggagggcaagaccgggttccacatgggccggctcagtgtcgattgcaacgtggtggagccggccgacgtgaagaaggtggtgaccaccctgaagcgcgccgtcaaggtcgtcggcacgccggcataccatgagatggtcaagaactgcatgatacaggatctctcctggaaggggccagccaagaactgggaggacgtgcttctggaactgggtgtcgaggggagcgagccgggggtcatcggcgaggagattgcgccgctcgccatggagaacgtcgccgctccctga

SEQ ID NO: 94168 - protein, 604 aa, Triticum aestivum
MAALVTSQLATSGTVLGITDRFRRAGFHGVRPRSPADAALGMRTVGASAAPTQSRKAHRGTRRCLSMVVRATGSGGMNLVFVGAEMAPWSKTGGLGDVLGGLPPAMAANGHRVMVISPRYDQYKDAWDTSVVSEIKVVDKYERVRYFHCYKRGVDRVFVDHPCFLEKVRGKTKEKIYGPDAGTDYEDNQQRFSLLCQAALEVPRILNLDNNPYFSGPYGEDVVFVCNDWHTGLLACYLKSNYQSNGIYRAAKVAFCIHNISYQGRFSFDDFAQLNLPDRFKSSFDFIDGYDKPVEGRKINWMKAGILQADKVLTVSPYYAEELISGEARGCELDNIMRLTGITGIVNGMDVSEWDPTKDKFLAVNYDITTALEGKALNKEALQAEVGLPVDRKVPLVAFIGRLEEQKGPDVMIAAIPEILKEEDVQIVLLGTGKKKFERLLKSIEEKFPSKVRAVVRFNAPLAHQMMAGADVLAVTSRFEPCGLIQLQGMRYGTPCACASTGGLVDTIVEGKTGFHMGRLSVDCNVVEPADVKKVVTTLKRAVKVVGTPAYHEMVKNCMIQDLSWKGPAKNWEDVLLELGVEGSEPGVIGEEIAPLAMENVAAP

SEQ ID NO: 94169 - DNA, 2340 bp, Colocasia esculenta; identical to SEQ ID NO: 52488
  CDS (155)..(2086)

SEQ ID NO: 94170 - protein, 643 aa, Colocasia esculenta; identical to SEQ ID NO: 52489

SEQ ID NO: 94171 - DNA, 2409 bp, Hordeum vulgare var
  CDS (1)..(2409)
atgtcgtcggcggtcgcgtcccccgcgtccttcctcgcgctcgcgtccgcctcgcccgggagatcatcacggaggagggcgagggtgggcgcgtcgccaacccgcgctggggccggcaggctgcaatggcggccgtcgccgctgcagcgcacggctcgcgacggagcggtggccgcgcgcgccgccgggatcgacgacgccgcgcccggtaggcagccccgcgctcgccgctatggcgccgccaccaaggtcgcggatcccgtcaagacgctcgatcgcgacgccgcggaaggtggtgggccgtccccgccggcaccgaggcaggacgccgcccgtctgccgagtaagaacggcacgctgatcaacggtgagaacaaacctaccggcggcggtggcgcgactaaagacagcgggctgcccacacccgcacgcgcgccccatctgtcaatccagaacagagtaccggtgaacggtgaaaacaaacataaggtcgcctcgccgccgaccagcatagtggatgtcgcgtctccgggttccgcagctaacatttccatcagtaacaaggtgccgccgtccgttgtcccagccaagaagacgccgccgtcgtccgttttcccggccaagaagacgctgccgtcgtccggctcaaattttgtgtcctcggcctctgctcccaggctggacactgtcagcgatgtggaacttgcacagaagaaggatgcgctgattgtcaaagaagctccaaaaccaaaggctctttcggcccctgcagcccccgctgtacaagaagacctttgggatttcaagaaatacattggtttcgaggagcccgtggaggccaaggatgatggctcggctgttgcagatgatgcgggttcctttgaacatcaccagaatcatgattccggacctttggcaggggagaacgtcatgaacgtggtcgtcgttgctgctgaatgttctccctggtgcaaaacaggtggtcttggagatgttgcgggtgctttgcccaaggctttggctaagagaggacatcgtgttatggttgtggtactaaggtatggggactatgaggaagcctacgatgtcggagtccgaaaatactacaaggctgctggacaggatatggaagtgaattatttccatgcttatatcgatggagtggattttgtgttcattgacgctcctctcttccgacaccgtcagcaagacatttatgggggcagcagacaggaaattatgaagcgcatgattttgttctgcaaggccgctgtcgaggttccttggcacgttccatgcggcggtgtcccttacggggatggaaatctggtcttcattgcaaatgattggcacacggcactcctgcctgtctatctgaaagcatattacagggaccatggtttgatgcaatacagtcgctccgttatggtgatacataacatcgctcaccagggccgtggccctgtagatgaattcccgttcaccgagttgcctgagcactacctggaacacttcagactgtacgaccccgtcggcggtgagcacgccaactacttcgccgccggcctgaagatggcggaccaggttgtcgtcgtgagccccgggtacctgtgggagctgaagacggtggagggcggctgggggcttcacgacatcatacggcagaacgactggaagacccgcggcatcgtgaacggcatcgacaacatggagtggaaccctgaggtggacgtccacctgaagtcggacggctacaccaacttctccctgaagacgctggactccggcaagcggcagtgcaaggaggccctgcagcgcgagctggggctgcaggtccgcggcgacgtgccgctgctcgggttcatcgggcggctggacgggcagaagggcgtggagatcatcgcggacgcgatgccctggatcgtgagccaggacgtgcagctggtgatgctgggcacggggcgccacgacctggagagcatgctgcagcacttcgagcgggagcaccacgacaaggtgcgcgggtgggtggggttctccgtgcgcctggcgcaccggatcacggcgggcgccgacgcgctcctcatgccctcccggttcgagccgtgcgggctgaaccagctctacgcgatggcctacggcaccatccctgtcgtgcacgccgtcggcggcctgagggataccgtgccgccgttcgaccccttcaaccactccgggctcgggtggacgttcgaccgcgccgaggcgcacaagctgatcgaggcgctcgggcactgcctccgcacctaccgggaccacaaggagagctggaggggcctccaggagcgcggcatgtcgcaggacttcagctgggaacatgccgccaagctctacgaggacgtcctcgtccaggccaagtaccagtggtga

SEQ ID NO: 94172 - protein, 802 aa, Hordeum vulgare var
MSSAVASPASFLALASASPGRSSRRRARVGASPTRAGAGRLQWRPSPLQRTARDGAVAARAAGIDDAAPGRQPRARRYGAATKVADPVKTLDRDAAEGGGPSPPAPRQDAARLPSKNGTLINGENKPTGGGGATKDSGLPTPARAPHLSIQNRVPVNGENKHKVASPPTSIVDVASPGSAANISISNKVPPSVVPAKKTPPSSVFPAKKTLPSSGSNFVSSASAPRLDTVSDVELAQKKDALIVKEAPKPKALSAPAAPAVQEDLWDFKKYIGFEEPVEAKDDGSAVADDAGSFEHHQNHDSGPLAGENVMNVVVVAAECSPWCKTGGLGDVAGALPKALAKRGHRVMVVVLRYGDYEEAYDVGVRKYYKAAGQDMEVNYFHAYIDGVDFVFIDAPLFRHRQQDIYGGSRQEIMKRMILFCKAAVEVPWHVPCGGVPYGDGNLVFIANDWHTALLPVYLKAYYRDHGLMQYSRSVMVIHNIAHQGRGPVDEFPFTELPEHYLEHFRLYDPVGGEHANYFAAGLKMADQVVVVSPGYLWELKTVEGGWGLHDIIRQNDWKTRGIVNGIDNMEWNPEVDVHLKSDGYTNFSLKTLDSGKRQCKEALQRELGLQVRGDVPLLGFIGRLDGQKGVEIIADAMPWIVSQDVQLVMLGTGRHDLESMLQHFEREHHDKVRGWVGFSVRLAHRITAGADALLMPSRFEPCGLNQLYAMAYGTIPVVHAVGGLRDTVPPFDPFNHSGLGWTFDRAEAHKLIEALGHCLRTYRDHKESWRGLQERGMSQDFSWEHAAKLYEDVLVQAKYQW

SEQ ID NO: 94173 - DNA, 2400 bp, Aegilops tauschii
  CDS (1)..(2400)
atgtcgtcggcggtcgcgtccgccgcatccttcctcgcgctcgcgtcagcctcccccgggagatcacgcaggcgggcgagggtgcgcgcgcagccaccccacgccggggccggcaggttgcactggccgccgtggccgccgcagcgcacggctcgcgacggagctgtggcggcgctcgccgccgggaagaaggacgcggggatcgacgacgccgccgcgtccgcgaggcagccccgcgcactccgcggtggcgccgccaccaaggtcgcggagcgaagggatcccgtcaagacgctcgaccgcgacgccgcggaaggcggcgggccgtccccgccggcagcgaggcaggacgccgcccgtccgccgagtatgaacggcatgccggtgaacggcgagaacaaatctaccggcggcggcggcgcgactaaagacagcgggctgcccacgcccgcacgcgcgccccatccgtcgacccagaacagagcaccggtgaacggtgaaaacaaagctaacgtcgcctcgccgccgacgagcatagccgaggccgcggcttcggattccgcagctaccatttccatcagcgacaaggcgccggagtccgttgtcccagctgagaagacgccgccgtcgtccggctcaaatttcgagtcctcggcctctgctcccgggtctgacactgtcagcgacgtggaacaagaactgaagaagggtgcggtcgttgtcgaagaagctccaaagccaaaggctctttcgccgcctgcagcccccgctgtacaagaagacctttgggatttcaagaaatacattggtttcgaggagcccgtggaggccaaggatgatggccgggctgtcgcagatgatgcgggctcctttgaacaccaccagaatcacgactccggacctttggcaggggagaatgtcatgaacgtggtcgtcgtggctgctgagtgttctccctggtgcaaaacaggtggtctgggagatgttgcgggtgctctgcccaaggctttggcgaagagaggacatcgtgttatggttgtggtaccaaggtatggggactatgaagaagcctacgatgtcggagtccgaaaatactacaaggctgctggacaggatatggaagtgaattatttccatgcttatatcgatggagttgattttgtgttcattgacgctcctctcttccgacaccgtcaggaagacatttatgggggcagcagacaggaaattatgaagcgcatgattttgttctgcaaggccgctgttgaggttccatggcacgttccatgcggcggtgtcccttatggggatggaaatctggtgtttattgcaaatgattggcacacggcactcctgcctgtctatctgaaagcatattacagggaccatggtttgatgcagtacactcggtccattatggtgatacataacatcgctcaccagggccgtggccctgtagatgaattcccgttcaccgagttgcctgagcactacctggaacacttcagactgtacgaccccgtgggtggtgaacacgccaactacttcgccgccggcctgaagatggcggaccaggttgtcgtggtgagccccgggtacctgtgggagctgaagacggtggagggcggctgggggcttcacgacatcatacggcagaacgactggaagacccgcggcatcgtcaacggcatcgacaacatggagtggaaccccgaggtggacgcccacctcaagtcggacggctacaccaacttctccctgaggacgctggactccggcaagcggcagtgcaaggaggccctgcagcgcgagctgggcctgcaggtccgcgccgacgtgccgctgctcggcttcatcggccgcctggacgggcagaagggcgtggagatcatcgcggacgccatgccctggatcgtgagccaggacgtgcagctggtgatgctgggcaccgggcgccacgacctggagagcatgctgcggcacttcgagcgggagcaccacgacaaggtgcgcgggtgggtggggttctccgtgcgcctggcgcaccggatcacggcgggggcggacgcgctcctcatgccctcccggttcgagccgtgcgggctgaaccagctctacgccatggcctacggcaccgtccccgtcgtgcacgccgttggcggcctcagggacaccgtgccgccgttcgaccccttcaaccactccgggctcgggtggacgttcgaccgcgccgaggcgcacaagctgatcgaggcgctcgggcactgcctccgcacctaccgagacttcaaggagagctggagggccctccaggagcgcggcatgtcgcaggacttcagctgggagcacgccgccaagctctacgaggacgtcctcgtcaaggccaagtaccagtggtga

SEQ ID NO: 94174 - protein, 799 aa, Aegilops tauschii
MSSAVASAASFLALASASPGRSRRRARVRAQPPHAGAGRLHWPPWPPQRTARDGAVAALAAGKKDAGIDDAAASARQPRALRGGAATKVAERRDPVKTLDRDAAEGGGPSPPAARQDAARPPSMNGMPVNGENKSTGGGGATKDSGLPTPARAPHPSTQNRAPVNGENKANVASPPTSIAEAAASDSAATISISDKAPESVVPAEKTPPSSGSNFESSASAPGSDTVSDVEQELKKGAVVVEEAPKPKALSPPAAPAVQEDLWDFKKYIGFEEPVEAKDDGRAVADDAGSFEHHQNHDSGPLAGENVMNVVVVAAECSPWCKTGGLGDVAGALPKALAKRGHRVMVVVPRYGDYEEAYDVGVRKYYKAAGQDMEVNYFHAYIDGVDFVFIDAPLFRHRQEDIYGGSRQEIMKRMILFCKAAVEVPWHVPCGGVPYGDGNLVFIANDWHTALLPVYLKAYYRDHGLMQYTRSIMVIHNIAHQGRGPVDEFPFTELPEHYLEHFRLYDPVGGEHANYFAAGLKMADQVVVVSPGYLWELKTVEGGWGLHDIIRQNDWKTRGIVNGIDNMEWNPEVDAHLKSDGYTNFSLRTLDSGKRQCKEALQRELGLQVRADVPLLGFIGRLDGQKGVEIIADAMPWIVSQDVQLVMLGTGRHDLESMLRHFEREHHDKVRGWVGFSVRLAHRITAGADALLMPSRFEPCGLNQLYAMAYGTVPVVHAVGGLRDTVPPFDPFNHSGLGWTFDRAEAHKLIEALGHCLRTYRDFKESWRALQERGMSQDFSWEHAAKLYEDVLVKAKYQW

SEQ ID NO: 94175 - DNA, 2115 bp, Setaria italica; identical to SEQ ID NO: 52490
  CDS (142)..(1959)

SEQ ID NO: 94176 - protein, 605 aa, Setaria italica; identical to SEQ ID NO: 52491

SEQ ID NO: 94177 - DNA, 1800 bp, Triticum aestivum
  CDS (1)..(1800)
atggcggctctggtcacgtcccagctcgccacctccggcaccgtcttcagcgtcaccgacagattccggcgtccaggttttcagggtgtgaggccccggagcccggcagatgcgccgctcggcatgaggactaccggagcgagcgccgccccgaagcaacaaagccggaaagcgcaccgcgggacccggcggtgcctctccatggtggtgcgcgccacgggcagcgccggcatgaacctcgtgttcgtcggcgccgagatggcgccctggagcaagaccggcggcctcggcgacgtcctcgggggcctccccccagccatggccgccaacggtcaccgggtcatggtcatctccccgcgctacgaccagtacaaggacgcctgggacaccagcgtcgtctccgagatcaaggtcgcggacgagtacgagagggtgaggtacttccactgctacaagcgcggggtggaccgcgtgttcgtcgaccacccgtgcttcctggagaaggcccggggcaagaccaaggagaagatctacgggcccgatgccggcacggactacgaggacaaccagctacgcttcagcctgctctgccaggcagcgcttgaggcacccaggatcctcgacctcaacaacaacccatacttctccggaccctacggggaagacgtggtgttcgtgtgcaacgactggcacacgggccttctggcctgctacctcaagagcaactaccagtccagtggcatctataggacggccttggtagcgttctgcatccacaacatctcgtatcagggccgcttctccttcgacgacttcgcgcagctcaacctgcccgacaggttcaagtcgtccttcgacttcatcgacggctacgacaagccggtggaggggcgcaagatcaactggatgaaggccgggatcctgactgtgagcccctactatgctgaggagctaatctctggcgaagccaggggctgcgagctcgacaacatcatgcgcctcactgggatcaccggcatcgtcaacggcatggacgtcagcgagtgggaccccatcaaggacaagttcctcaccgtcaactacgacgtcaccaccgcgttggaggggaaggcgctgaacaaggaggcgctgcaggccgaggtggggctgccggtggaccggaaggtgcccctggtggcgttcatcggcaggctggaggagcagaagggccccgacgtgatgatcgccgccatcccggagatcttgaaggaggaggacgtccagatcgttctcctgggcaccgggaagaagaagtttgagcggctgctcaagagcgtggaggagaagttcccgagcaaggtgagggccgtggtcaggttcaacgcgccgctggctcaccagatgatggccggcgccgacgtcctcgccgtcaccagccgcttcgagccctgcggcctcatccagctccaggggatgcgctacggaacgccgtgcgcgtgcgcgtccaccggcgggcttgtcgacacgatcatggagggcaagaccgggttccacatgggccacctcagcgttgactgcaacgtggtggagccggccgacgtgaagaaggtggtcaccaccctgaagcgcgccgtcaaggtcgtcggcacgccggcgtaccatgagatggtcaagaactgcatgatacaggatctctcctggaaggggcctgccaagaactgggaggacgtgcttctggaactgggggtcgaggggagcgagccgggggtcatcggcgaggagattgcgccgctcgccatggagaacgtcgccgctccctga

SEQ ID NO: 94178 - protein, 599 aa, Triticum aestivum
MAALVTSQLATSGTVFSVTDRFRRPGFQGVRPRSPADAPLGMRTTGASAAPKQQSRKAHRGTRRCLSMVVRATGSAGMNLVFVGAEMAPWSKTGGLGDVLGGLPPAMAANGHRVMVISPRYDQYKDAWDTSVVSEIKVADEYERVRYFHCYKRGVDRVFVDHPCFLEKARGKTKEKIYGPDAGTDYEDNQLRFSLLCQAALEAPRILDLNNNPYFSGPYGEDVVFVCNDWHTGLLACYLKSNYQSSGIYRTALVAFCIHNISYQGRFSFDDFAQLNLPDRFKSSFDFIDGYDKPVEGRKINWMKAGILTVSPYYAEELISGEARGCELDNIMRLTGITGIVNGMDVSEWDPIKDKFLTVNYDVTTALEGKALNKEALQAEVGLPVDRKVPLVAFIGRLEEQKGPDVMIAAIPEILKEEDVQIVLLGTGKKKFERLLKSVEEKFPSKVRAVVRFNAPLAHQMMAGADVLAVTSRFEPCGLIQLQGMRYGTPCACASTGGLVDTIMEGKTGFHMGHLSVDCNVVEPADVKKVVTTLKRAVKVVGTPAYHEMVKNCMIQDLSWKGPAKNWEDVLLELGVEGSEPGVIGEEIAPLAMENVAAP

SEQ ID NO: 94179 - DNA, 1443 bp, Rhizobium loti
  CDS (1)..(1443): transl_table=11
atgcaggttctgtcggtcacgcccgagatttttccgctgatcaagaccggtgggctggccgacgtgaccggcgctctgcccatcgcgctcgctgccaagggcgtaaccatgcgcacgctcattccaggctttcccgtggtgatggctgctttcaagaaaaagaaagccgtctaccaatatccgctgttgcagggcggcaaggcttccgtccacgccgtgcagattgctgggctcgacctgttcgtgctcgacgcgccgcatctgttcgaccgcccgggcggcccctacggcaatgcttcggggcggactgccggacaattgcggcgcttcgcggcgctgagccaggttggtggcgatatcgccggcggcgccatctccggctatcagcctgacatcgtccacgcccatgactggcagtcggcgatgacgctggcctatatgcgctacggcaaggcggtcggcgttccgtcgatgatgaccgtccacaatctcgccttccagggccagttcggcgccggcatcttcggcgaactcggcctgccggctgttgcgatggcgctcgacggcgtcgaatattatggcggcgtcggcttcctaaaggccggtctgcaggccgcctgggcgatcaccacggtcagcccgacctatgcgcaggagatccggtcggcggagttcggcatgggcctcgacggcctgatcaacatgcgcgccagcgatctccatggcatcgtcaacggcatcgacaccgctatctgggatccgcaaacggacaagcatctggtgtcgaactataccgccgcgacgctcgaggcacgggcgcccaacagggccgccgtggaggaacgcttcggcctcgaccgcgacgacagcccgatcgtctgcgtcatcagccggctgacctggcagaagggcatggatattttggctacagtgatcgacggcgtcgtcgcgaccggcgcgcggctcgccatactgggctcgggcgacgccggcctcgaaggcgcgctgcttgcagccgccgcgcgccaccgtggccgcatcggcgtggtcatcggctacgacgaggggctgtcgcacaccatgcagggcggttgcgacgccatcgtcatcccgtcgcgcttcgaaccctgcggactgacgcagctttacggcctgcgctacggctgcgtgccggtggtcgcccgcactggcggcctcgccgacaccatcatcgacgccaacgaagcggcgatggcggccggcgtggcgacagggttccagttcgctcccaacaatggcggcgcgatgctgcacgccattgcccggctggccgacgctcacgcgaatcccgcggctttcgaaaccatccagcgtcagggcatgaagacggatgtgtcgtgggatcgaagcgccgaaaaatatgttggactctatcgcctgctgctttcgaaaagggttgcctga

SEQ ID NO: 94180 - protein, 480 aa, Rhizobium loti
MQVLSVTPEIFPLIKTGGLADVTGALPIALAAKGVTMRTLIPGFPVVMAAFKKKKAVYQYPLLQGGKASVHAVQIAGLDLFVLDAPHLFDRPGGPYGNASGRTAGQLRRFAALSQVGGDIAGGAISGYQPDIVHAHDWQSAMTLAYMRYGKAVGVPSMMTVHNLAFQGQFGAGIFGELGLPAVAMALDGVEYYGGVGFLKAGLQAAWAITTVSPTYAQEIRSAEFGMGLDGLINMRASDLHGIVNGIDTAIWDPQTDKHLVSNYTAATLEARAPNRAAVEERFGLDRDDSPIVCVISRLTWQKGMDILATVIDGVVATGARLAILGSGDAGLEGALLAAAARHRGRIGVVIGYDEGLSHTMQGGCDAIVIPSRFEPCGLTQLYGLRYGCVPVVARTGGLADTIIDANEAAMAAGVATGFQFAPNNGGAMLHAIARLADAHANPAAFETIQRQGMKTDVSWDRSAEKYVGLYRLLLSKRVA

SEQ ID NO: 94181 - DNA, 2745 bp, Triticum aestivum
  CDS (1)..(2745)
atggcgtgctccgcggcggcgggcgtcgaggcgaccgccctcctgtccccgcgctgccccgccccttccccgcccgacggccgctcccgccgccgcctcgccctcgcttcccgcacgcgccaccgcagcctcagggcggccgcgcagcgccctcacaagagcgcaaccggcgccgaccccctttataacaacagggccaatgtgcggagcgacgaggcgtcggtttccgctgaaaaagaacggcaaaggaaatacaacgatggagatggcatatcaaaccttaagctggaagatttggtaggaatgatacagaacaccgagaagaatatacttcttttgaatcaagcccgtcttcaggcaatggaacacgctgataaagttcttaaagaaaaggaagccttgcagagaaagataaacattttagagacgaggttgtcagaaacagatgaacaacataagctttcaagtgaagggaatttcagtgactctccactagcattggagcttggtattctaaaggaagagaacattctactgaaggaggacatagaatttttcaaaacaaagcttatagaggttgccgagatagaggagggtatattcaaattggagaaggagcatgctcttttagatgcttcccttagggagctggagtctaggtttatagccgcccaagcagatacgatgaaacttggtcctagggatgcctggtgggagaaagtagaaaaattggaagacttgcttgagaccacagcaaaccaagtagagcatgctgctgtgatattggaccacaatcatgatctgcaggataggcttgacaatttagaggcatcactgcaagcagcaaatatttcaaagttctcttgttctcttgttgatcttttgcagcaaaaggtcaaattggtagaagaccgcttccaagcatgtaacagcgaaatgcattctcagattgaactgtacgagcattcaatagtggaatttcatgatactcttagcaaactaatagaggaaagtgagaaaagatcactggagaattttacaggaaacatgccttcggaactatggagcaaaatttcccttttaattgatggatggttactggagaagaaaatatcttacaatgacgcaagtatgttgcgagaaatggttcagaaaagggacagtcgtcttcgggaagcatacttgtcatacagaggtaccgaaaacagggaagttatggacaacttacttaagatggcattaccaggaaccagttctggtttgcacatcgctcacatagcagcagagatggctcctgtcgcgaaggttggtggcctggcagatgtgatatctggtcttgggaaggcacttcagaaaaaaggccatctagtagagatcattcttcccaaatacgactgcatgcaggttgaccaagttagcaatctaaaggttttagatgttcttgtgcagtcctactttgaaggaaatatgttcaacaacaaaatttggaccgggactgttgaaggcctacccgtgtactttattgagccacagcatccagcgatgttcttttcgagggctcagtactatggagagcatgatgacttcaaacgtttttcatacttcagccgtgcggcactagaattactttatcaatctgggaagaaagttgatataatccactgccatgactggcaaactgcatttgttgcacctctttattgggatgtatatgcaaatctaggcttcaactcagctagaatttgcttcacctgtcataattttgaataccaaggaactgctccagctcgtgatttagcatggtgtggtcttgatgttgagcacctagacagaccagacaggatgcgggacaattcgcatggcagaataaatgctgttaagggagcagttgtgtattcaaacatcgtgacaactgtctcgccaacatatgcactagaggttcgctcagagggtgggcgtggactccaagatacacttaaagtacattccaggaaatttcttgggatacttaatggaatcgacacagatacatggaacccttgcacagataggtatctcaaggtccagtataatgctaaggatctccagggaaaggcagccaacaaagcagccctcagagagcaactaaacctggcttctgcatatccttcacaaccactggttggttgcattaccaggctggttgctcagaagggtgtacatcttatcaggcatgcaatatacaaaacagctgaattaggaggacagtttgtccttctgggttcaagtccagtaccagaaattcagagggagtttgaaggtattgcagaccattttcagaacaacaacaatatccggctgattttgaagtatgatgatgcgctgtctcattgcatatatgctgcgtctgacatgttcattgttccctctatatttgagccatgtggcctcactcagatgatagccatgagatatggttctgtgccaatcgttcggaaaactggtgggctgaatgacagtgtctttgacttcgatgacgaaacaatacccatggaggtgcggaacggctttacatttgtcaaggccgacgagcagggcctaagcagcgcgatggagagggcgttcaactgctacacgaggaagcccgaggtgtggaaacagcttgtgcagaaagacatgacgatcgatttcagctgggacacctcggcttcgcagtacgaggacatctaccagaaggcggtggctcgagcgagggcagtggcgtga

SEQ ID NO: 94182 - protein, 914 aa, Triticum aestivum; identical to SEQ ID NO: 52499

SEQ ID NO: 94183 - DNA, 1818 bp, Triticum aestivum
  CDS (1)..(1818)
atggcggctctggtcacgtcgcagctcgccacctccggcaccgtcctcggcatcaccgacaggttccggcgtgcaggttttcagggtgtgaggccccggagcccggcagatgcgccgctcggcatgaggactaccggagcgagcgccgccccgaagcaacaaagccggaaagcgcaccgcgggacccggcggtgcctctccatggtggtgcgcgccacgggcagcgccggcatgaacctcgtgttcgtcggcgccgagatggcgccctggagcaagaccggcggcctcggcgacgtcctcgggggcctccccccagccatggccgccaacggtcaccgggtcatggtcatctccccgcgctacgaccagtacaaggacgcctgggacaccagcgtcgtctccgagatcaaggtcgcggacgagtacgagagggtgaggtacttccactgctacaagcgcggggtggaccgcgtgttcgtcgaccacccgtgcttcctggagaaggtccggggcaagaccaaggagaagatctacgggcccgatgccggcacggactacgaggacaaccagctacgcttcagcctgctctgccaggcagcgcttgaggcacccaggatcctcgacctcaacaacaacccatacttctccggaccctacggggaagacgtggtgttcgtgtgcaacgactggcacacgggccttctggcctgctacctcaagagcaactaccagtccagtggcatctataggacggccaaggtagcgttctgcatccacaacatctcgtatcagggccgcttctccttcgacgacttcgcgcagctcaacctgcccgacaggttcaagtcgtccttcgacttcatcgacggctacgacaagccggtggaggggcgcaagatcaactggatgaaggccgggatcctgcaggccgacaaggtgctcacggtgagcccctactacgcggaggagctcatctccggcgaagccaggggctgcgagctcgacaacatcatgcgcctcacgggcatcaccggcatcgtcaacggcatggacgtcagcgagtgggaccccgccaaggacaagttcctcgccgccaactacgacgtcaccaccgcgttggaggggaaggcgctgaacaaggaggcgctgcaggccgaggtggggctgccggtggaccggaaggtgcccctggtggccttcatcggcaggctggaggagcagaagggccccgacgtgatgatcgccgccatcccggagatcttgaaggaggaggacgtccagatcgttctcctgggcaccgggaagaagaagtttgagcggctgctcaagagcgtggaggagaagttcccgagcaaggtgagggccgtggtcaggttcaacgcgccgctggctcaccagatgatggccggcgccgacgtgctcgccgtcaccagccgcttcgagccctgcggcctcatccagctccaggggatgcgctacggaacgccgtgcgcgtgcgcgtccaccggcgggctcgtcgacacgatcatggagggcaagaccgggttccacatgggccacctcagcgtcgactgcaacgtggtggagccggccgacgtgaagaaggtggtgaccaccctgaagcgcgccgtcaaggtcgtcggcacgccagcctaccatgagatggtcaagaactgcatgatccaggatctctcctggaaggggccagccaagaactgggaggacgtgcttctggaactgggggtcgaggggagcgagccaggggtcatcggcgaggagattgcgccgctcgccatggagaacgtcgccgctccctga

SEQ ID NO: 94184 - protein, 605 aa, Triticum aestivum; identical to SEQ ID NO: 52503

SEQ ID NO: 94185 - DNA, 1944 bp, Triticum aestivum
  CDS (1)..(1944)
atggcggcgacgggcgtcggcgccgggtgcctcgcccccagcgtccgcctgcgcgccgatccggcgacggcggcccgggcgtccgcctgcgtcgtccgcgcgcggctccggcgcttggcgcggggccgctacgtcgccgagctcagcagggagggccccgcggcgcgccccgcgcagcagcagcaactggccccgccgctcgtgccaggcttcctcgcgccgccgccgcccgcgcccgcccagtcgccggccccgacgcagccgcccctgccggacgccggcgtgggggaactcgcgcccgacctcctgctcgaagggattgctgaggattccatcgacagcataattgtggctgcaagtgagcaggattctgagatcatggatgcgaatgagcaacctcaagctaaagttacacgtagcatcgtgtttgtgactggtgaagctgctccttatgcaaagtcaggggggctgggagatgtttgtggttcgttaccaattgctcttgctgctcgtggtcaccgtgtgatggttgtaatgccaagatacttgaatgggtcctctgataaaaactatgcaaaggcattatacactgggaagcacattaagattccatgctttgggggatcacatgaagtgaccttttttcatgagtatagagacaacgtcgattgggtgtttgtcgatcatccgtcatatcatagaccaggaagtttatatggagataattttggtgcttttggtgataatcagttcagatacacactcctttgctatgctgcatgcgaggccccactaatccttgaattgggaggatatatttatggacagaattgcatgtttgttgtgaacgattggcatgccagccttgtgccagtccttcttgctgcaaaatatagaccatacggtgtttacagagattcccgcagcacccttgttatacataatttagcacatcagggtgtggagcctgcaagtacatatcctgatctgggattgccacctgaatggtatggagctttagaatgggtatttccagaatgggcaaggaggcatgcccttgacaagggtgaggcagttaactttttgaaaggagcagtcgtgacagcagatcgaattgtgaccgtcagtcagggttattcatgggaggtcacaactgctgaaggtggacagggcctcaatgagctcttaagctcccgaaaaagtgtattgaatggaattgtaaatggaattgacattaatgattggaaccccaccacagacaagtgtctccctcatcattattctgtcgatgacctctctggaaaggccaaatgtaaagctgaattgcagaaggagctgggtttacctgtaagggaggatgttcctctgattggctttattggaagactggattaccagaaaggcattgatctcattaaaatggccattccagagctcatgagggaggacgtgcagtttgtcatgcttggatctggggatccaatttttgaaggctggatgagatctaccgagtcgagttacaaggataaattccgtggatgggttggatttagtgttccagtttcccacagaataactgcaggttgcgatatattgttaatgccatccaggtttgaaccttgtggtcttaatcagctatatgctatgcaatatggtacagttcctgtagttcatggaactgggggcctccgagacacagtcgagaccttcaacccttttggtgcaaaaggagaggagggtacagggtgggcgttctcaccgctaaccgtggacaagatgttgtgggcattgcgaaccgcgatgtcgacattcagggagcacaagccgtcctgggaggggctcatgaagcgaggcatgacgaaagaccatacgtgggaccatgccgccgagcagtacgagcagatcttcgaatgggccttcgtggaccaaccctacgtcatgtag

SEQ ID NO: 94186 - protein, 647 aa, Triticum aestivum
MAATGVGAGCLAPSVRLRADPATAARASACVVRARLRRLARGRYVAELSREGPAARPAQQQQLAPPLVPGFLAPPPPAPAQSPAPTQPPLPDAGVGELAPDLLLEGIAEDSIDSIIVAASEQDSEIMDANEQPQAKVTRSIVFVTGEAAPYAKSGGLGDVCGSLPIALAARGHRVMVVMPRYLNGSSDKNYAKALYTGKHIKIPCFGGSHEVTFFHEYRDNVDWVFVDHPSYHRPGSLYGDNFGAFGDNQFRYTLLCYAACEAPLILELGGYIYGQNCMFVVNDWHASLVPVLLAAKYRPYGVYRDSRSTLVIHNLAHQGVEPASTYPDLGLPPEWYGALEWVFPEWARRHALDKGEAVNFLKGAVVTADRIVTVSQGYSWEVTTAEGGQGLNELLSSRKSVLNGIVNGIDINDWNPTTDKCLPHHYSVDDLSGKAKCKAELQKELGLPVREDVPLIGFIGRLDYQKGIDLIKMAIPELMREDVQFVMLGSGDPIFEGWMRSTESSYKDKFRGWVGFSVPVSHRITAGCDILLMPSRFEPCGLNQLYAMQYGTVPVVHGTGGLRDTVETFNPFGAKGEEGTGWAFSPLTVDKMLWALRTAMSTFREHKPSWEGLMKRGMTKDHTWDHAAEQYEQIFEWAFVDQPYVM

SEQ ID NO: 94187 - DNA, 1932 bp, Hordeum vulgare; identical to SEQ ID NO: 53524
  CDS (1)..(1932)

SEQ ID NO: 94188 - protein, 643 aa, Hordeum vulgare; identical to SEQ ID NO: 53525

SEQ ID NO: 94189 - DNA, 1815 bp, Triticum turgidum subsp
  CDS (1)..(1815)
atggcggctctggtcacgtcccagctcgccacctccggcaccgtcctcggcatcaccgacaggttccggcgtgcaggtttccagggcgtgaggccccggaacccggcggatgcggccctcgtcatgaggactatcggagcgagcgccgccccgaagcaaagccggaaagcgcaccgcgggagccggcggtgcctctccatggtggtgcgcgccacgggcagcggcggcatgaacctcgtgttcgtcggcgccgagatggcgccctggagcaagaccggcggcctcggcgacgtcctcggaggcctccccccagccatggccgccaacggtcaccgggtcatggtcatctccccgcgctacgaccagtacaaggacgcctgggacaccagcgtcgtctccgagatcaaggtcgcggacgagtacgagagggtgaggtacttccactgctacaagcgcggggtggaccgcgtgttcgtcgaccacccgtgcttcctggagaaggtccggggcaagaccaaggagaagatctacgggcccgatgccggcaccgactacgaggacaaccagctacgcttcagcctgctctgccaggcagcgctggaagcacccaggatcctggacctcaacaacaacccatacttttctggaccctacggggaggacgtggtgttcgtgtgcaacgactggcacacgggccttctggcctgctacctcaagagcaactaccagtccaatggcatctatatgacggccaaggtggcgttctgcatccacaacatctcgtaccagggccgcttctccttcgacgacttcgcgcagctcaacctgcccgacaggttcaagtcgtccttcgacttcatcgacggctacgacaagccggtggaggggcgcaagatcaactggatgaaggccgggatcctgcaggccgacaaggtgctgacggtgagcccctactacgctgaggagctcatctccggcgaagccaggggctgcgagctcgacaacatcatgcgcctcacgggcatcaccggcatcgtcaacggcatggacgtcagcgagtgggaccccaccaaggacaagttcctcgccgtcaactacgacgtcaccaccgcgttggaggggaaggcgctgaacaaggaggcgctgcaggccgaggtggggctgccggtggaccggaaggtgcccctggtggcgttcatcggcaggctggaggagcagaagggccccgacgtgatgatcgccgccatcccggagatcttgaaggaggaggacgtccagatcgttctcctgggcaccgggaagaagaagtttgagcggctgctcaagagcgtggaggagaagttcccgaacaaggtgagggccgtggtcaggttcaacgcgccgctggctcaccagatgatggctggcgccgacgtgctcgccgtcaccagccgcttcgagccctgtggcctcatccagctccaggggatgcgctacggaacgccgtgcgcgtgcgcgtccaccggcgggctcgtcgacactatcgtggagggcaagaccgggttccacatgggccgcctcagcgtcgactgtaatgtggtggaaccggccgacgtgaagaaggtggtgaccaccctgaagcgcgccgtcaaggtcgtcggcacgccggcgtaccatgggatggtcaagaactgcatgatacaggatctctcctggaagggtcctgccaagaactgggaggacgtgcttttggaactgggtgtcgaggggagcgagccgggggtcatcggcgaagagattgcgccgctcgccatggagaacgtcgccgctccctga

SEQ ID NO: 94190 - protein, 604 aa, Triticum turgidum subsp
MAALVTSQLATSGTVLGITDRFRRAGFQGVRPRNPADAALVMRTIGASAAPKQSRKAHRGSRRCLSMVVRATGSGGMNLVFVGAEMAPWSKTGGLGDVLGGLPPAMAANGHRVMVISPRYDQYKDAWDTSVVSEIKVADEYERVRYFHCYKRGVDRVFVDHPCFLEKVRGKTKEKIYGPDAGTDYEDNQLRFSLLCQAALEAPRILDLNNNPYFSGPYGEDVVFVCNDWHTGLLACYLKSNYQSNGIYMTAKVAFCIHNISYQGRFSFDDFAQLNLPDRFKSSFDFIDGYDKPVEGRKINWMKAGILQADKVLTVSPYYAEELISGEARGCELDNIMRLTGITGIVNGMDVSEWDPTKDKFLAVNYDVTTALEGKALNKEALQAEVGLPVDRKVPLVAFIGRLEEQKGPDVMIAAIPEILKEEDVQIVLLGTGKKKFERLLKSVEEKFPNKVRAVVRFNAPLAHQMMAGADVLAVTSRFEPCGLIQLQGMRYGTPCACASTGGLVDTIVEGKTGFHMGRLSVDCNVVEPADVKKVVTTLKRAVKVVGTPAYHGMVKNCMIQDLSWKGPAKNWEDVLLELGVEGSEPGVIGEEIAPLAMENVAAP

SEQ ID NO: 94191 - DNA, 1815 bp, Triticum turgidum subsp
  CDS (1)..(1815)
atggcggctctggtcacgtcccagctcgccacctccggcaccgtcctcagcgtcaccgacagattccggcgtccaggttttcagggcctgaggccccggaacccggcggatgcggcgctcggcatgaggactgtcggagcgagcgccgccccaaagcaaagcaggaaaccgcaccgtgggaaccggcggtgcctctccatggtggtgcgcgccacgggcagcggcggcatgaacctcgtgttcgtcggcgccgagatggcgccctggagcaagactggcggcctcggcgacgtcctcgggggcctccccgccgccatggccgccaacggtcaccgggtcatggtcatctccccgcgctacgaccagtacaaggacgcctgggacaccagcgtcatctccgagatcaaggtcgttgacaggtacgagagggtgaggtacttccactgctacaagcgcggggtggaccgcgtgttcgtcgaccacccgtgcttcctggagaaggtccggggcaagaccaaggagaagatctatggacccgacgccggcactgactacgaggacaaccagcagcgcttcagccttctctgccaggcagcacttgaggtgcccaggatcctcgacctcaacaacaacccacacttttctggaccctacggggaagacgtggtgtttgtgtgcaacgactggcacacgggccttctggcctgctacctcaagagcaactaccagtccaatggcatctataggacggccaaggtggcattctgcatccacaacatctcgtaccagggccgcttctccttcgacgacttcgcgcagctcaacctgcccgacaggttcaagtcgtccttcgacttcatcgacggctacgacaagccggtggaggggcgcaagatcaactggatgaaggccgggatcctgcaggccgacaaggtgctgactgtgagcccctactatgctgaggagctaatctctggcgaagccaggggctgcgagctcgacaacatcatgcgcctcactgggatcaccggcatcgtcaacggcatggacgtcagcgagtgggaccccatcaaggacaagttcctcaccgtcaactacgacgtcaccaccgcgttggaggggaaggcgctgaacaaggaggcgctgcaggccgaggtggggctgccggtggaccggaaggtgcccctggtggcgttcatcggcaggctggaggagcagaagggccccgacgtgatgatcgccgccatcccggagatcgtgaaggaggaggacgtccagatcgttctcctgggcaccgggaagaagaagtttgagcggctgctcaagagcgtggaggagaagttcccgaccaaggtgagggccgtggtcaggttcaacgcgccgctggctcaccagatgatggccggcgccgacgtgctggcggtcaccagccgcttcgagccctgcggcctcatccagctccagggaatgcgctacggaacgccgtgcgcctgcgcgtcgacaggcgggctcgtcgacactatcgtggaaggcaagaccgggttccacatgggccgcctcagcgttgactgcaacgtggtggagccggccgacgtgaagaaggtggtcaccaccctgaagcgcgccgtcaaggtcgtcggcacgccggcgtaccatgagatggtcaagaactgcatgatacaggatctctcctggaaggggcctgccaagaactgggaggacgtgcttctggaactgggggtggaggggagcgagcccggcatcgtcggcgaggagatcgcgccgctcgccctggagaacgtcgccgctccctga

SEQ ID NO: 94192 - protein, 604 aa, Triticum turgidum subsp
MAALVTSQLATSGTVLSVTDRFRRPGFQGLRPRNPADAALGMRTVGASAAPKQSRKPHRGNRRCLSMVVRATGSGGMNLVFVGAEMAPWSKTGGLGDVLGGLPAAMAANGHRVMVISPRYDQYKDAWDTSVISEIKVVDRYERVRYFHCYKRGVDRVFVDHPCFLEKVRGKTKEKIYGPDAGTDYEDNQQRFSLLCQAALEVPRILDLNNNPHFSGPYGEDVVFVCNDWHTGLLACYLKSNYQSNGIYRTAKVAFCIHNISYQGRFSFDDFAQLNLPDRFKSSFDFIDGYDKPVEGRKINWMKAGILQADKVLTVSPYYAEELISGEARGCELDNIMRLTGITGIVNGMDVSEWDPIKDKFLTVNYDVTTALEGKALNKEALQAEVGLPVDRKVPLVAFIGRLEEQKGPDVMIAAIPEIVKEEDVQIVLLGTGKKKFERLLKSVEEKFPTKVRAVVRFNAPLAHQMMAGADVLAVTSRFEPCGLIQLQGMRYGTPCACASTGGLVDTIVEGKTGFHMGRLSVDCNVVEPADVKKVVTTLKRAVKVVGTPAYHEMVKNCMIQDLSWKGPAKNWEDVLLELGVEGSEPGIVGEEIAPLALENVAAP

SEQ ID NO: 94193 - DNA, 1818 bp, Triticum turgidum subsp
  CDS (1)..(1818)
atggcggctctggtcacgtcgcagctcgccacctccggcaccgtcctcggcatcaccgacaggttccggcgtgcaggttttcagggtgtgaggccccggagcccggcagatgcgccgctcggcatgaggactaccggagcgagcgccgccccgaagcaacaaagccggaaagcgcaccgcgggacccggcggtgcctctccatggtggtgcgcgccacgggcagcgccggcatgaacctcgtgttcgtcggcgccgagatggcgccctggagcaagaccggcggcctcggcgacgtcctcgggggcctccccccagccatggccgccaacggtcaccgggtcatggtcatctccccgcgctacgaccagtacaaggacgcctgggacaccagcgtcgtctccgagatcaaggtcgcggacgagtacgagagggtgaggtacttccactgctacaagcgcggggtggaccgcgtgttcgtcgaccacccgtgcttcctggagaaggtccggggcaagaccaaggagaagatctacgggcccgacgccggcacggactacgaggacaaccagctacgcttcagcctgctctgccaggcagcgcttgaggcacccaggatcctcgacctcaacaacaacccatacttctccggaccctacggggaagacgtggtgttcgtgtgcaacgaccggcacacgggccttctggcctgctacctcaagagcaactaccagtccagtggcatctataggacggccaaggtagcgttctgcatccacaacatctcgtatcagggccgcttctccttcgacgacttcgcgcagctcaacctgcccgacaggttcaagtcgtccttcgacttcatcgacggctacgacaagccggtggaggggcgcaagatcaactggatgaaggccgggatcctgcaggccgacaaggtgctcacggtgagcccctactacgcggaggagctcatctccggcgaagccaggggctgcgagctcgacaacatcatgcgcctcacgggcatcaccggcatcgtcaacggcatggacgtcagcgagtgggaccccgccaaggacaagttcctcgccgccaactatgacgtcaccaccgcgttggaggggaaggcgctgaacaaggaggcgctgcaggccgaggtggggctgccggtggaccggaaggtgcccctggtggccttcatcggcaggctggaggagcagaagggccccgacgtgatgatcgccgccatcccggagatcttgaaggaggaggacgtccagatcgttctcctgggcaccgggaagaagaagtttgagcggctgctcaagagcgtggaggagaagttcccgagcaaggtgagggccgtggtcaggttcaacgcgccgctggctcaccagatgatggccggcgccgacgtgctcgccgtcaccagccgcttcgagccctgcggcctcatccagctccaggggatgcgctacggaacgccgtgcgcgtgcgcgtccaccggcgggctcgtcgacacgatcgtggagggcaagaccgggttccacatgggccgcctcagcgtcgactgcaacgtggtggagccggccgacgtgaagaaggtggtgaccaccctgaagcgcgccgtcaaggtcgtcggcacgccagcctaccatgagatggtcaagaactgcatgatccaggatctctcctggaaggggccagccaagaactgggaggacgtgcttctggaactgggggtcgaggggagcgagccaggggtcatcggcgaggagattgcgccgctcgccatggagaacgtcgccgctccctga

SEQ ID NO: 94194 - protein, 605 aa, Triticum turgidum subsp
MAALVTSQLATSGTVLGITDRFRRAGFQGVRPRSPADAPLGMRTTGASAAPKQQSRKAHRGTRRCLSMVVRATGSAGMNLVFVGAEMAPWSKTGGLGDVLGGLPPAMAANGHRVMVISPRYDQYKDAWDTSVVSEIKVADEYERVRYFHCYKRGVDRVFVDHPCFLEKVRGKTKEKIYGPDAGTDYEDNQLRFSLLCQAALEAPRILDLNNNPYFSGPYGEDVVFVCNDRHTGLLACYLKSNYQSSGIYRTAKVAFCIHNISYQGRFSFDDFAQLNLPDRFKSSFDFIDGYDKPVEGRKINWMKAGILQADKVLTVSPYYAEELISGEARGCELDNIMRLTGITGIVNGMDVSEWDPAKDKFLAANYDVTTALEGKALNKEALQAEVGLPVDRKVPLVAFIGRLEEQKGPDVMIAAIPEILKEEDVQIVLLGTGKKKFERLLKSVEEKFPSKVRAVVRFNAPLAHQMMAGADVLAVTSRFEPCGLIQLQGMRYGTPCACASTGGLVDTIVEGKTGFHMGRLSVDCNVVEPADVKKVVTTLKRAVKVVGTPAYHEMVKNCMIQDLSWKGPAKNWEDVLLELGVEGSEPGVIGEEIAPLAMENVAAP

SEQ ID NO: 94195 - DNA, 1815 bp, Triticum turgidum subsp
  CDS (1)..(1815)
atggcggctctggtcacgtcccagctcgccacctccggcaccgtcctcagcgtcaccgacagattccggcgtccaggttttcagggcctgaggccccggaacccggcggatgcggcgctcggcatgaggactgtcggagcgagcgccgccccaaagcaaagcaggaaaccgcaccgattcgaccggcggtgcctctccatggtggtgcgcgccacgggcagcggcggcatgaacctcgtgttcgtcggcgccgagatggcgccctggagcaagactggcggcctcggcgacgtcctcgggggcctccccgccgccatggccgccaacggtcaccgggtcatggtcatctccccgcgctacgaccagtacaaggacgcctgggacaccagcgtcatctccgagatcaaggtcgttgacaggtacgagagggtgaggtacttccactgctacaagcgcggggtggaccgcgtgttcgtcgaccacccgtgcttcctggagaaggtccggggcaagaccaaggagaagatctatggacccgacgccggcaccgactacgaggacaaccagcagcgcttcagccttctctgccaggcagcacttgaggtgcccaggatcctcgacctcaacaacaacccacacttttctggaccctacggggaagacgtggtgtttgtgtgcaacgactggcacacgggccttctggcctgctacctcaagagcaactaccagtccaatggcatctataggacggccaaggtggcattctgcatccacaacatctcgtaccagggccgcttctccttcgacgacttcgcgcagctcaacctgcccgacaggttcaagtcgtccttcgacttcattgacggctacgacaagccggtggaggggcgcaagatcaactggatgaaggccgggatcctgcaggccgacaaggtgctgactgtgagcccctactatgctgaggagctaatctctggcgaagccaggggctgcgggctcgacaacatcatgcgcctcactgggatcaccggcatcgtcaacggcatggacgtcagcgagtgggaccccatcaaggacaagttcctcaccgtcaactacgacgtcaccaccgcgttggaggggaaggcgctgaacaaggaggcgctgcaggccgaggtggggctgccggtggaccggaaggtgcccctggtggcgttcatcggcaggctggaggagcagaagggccccgacgtgatgatcgccgccatcccggagatcgtgaaggaggaggacgtccagatcgttctcctgggcaccgggaagaagaagtttgagcggctgctcaagagcgtggaggagaagttcccgaccaaggtgagggccgtggtcaggttcaacgcgccgctggctcaccagatgatggccggcgccgacgtgctggcggtcaccagccgcttcgagccctgcggcctcatccagctccagggaatgcgctacggaacgccgtgcgcctgcgcgtcgacaggcgggctcgtcgacactatcgtggaaggcaagaccgggttccacatgggccgcctcagcgttgactgcaacgtggtggagccggccgacgtgaagaaggtggtcaccaccctgaagcgcgccgtcaaggtcgtcggcacgccggcgtaccatgagatggtcaagaactgcatgatacaggatctctcctggaaggggcctgccaagaactgggaggacgtgcttctggaactgggggtggaggggagcgagccgggcatcgtcggcgaggagatcgcgccgctcgccctggagaacgtcgccgctccctga

SEQ ID NO: 94196 - protein, 604 aa, Triticum turgidum subsp
MAALVTSQLATSGTVLSVTDRFRRPGFQGLRPRNPADAALGMRTVGASAAPKQSRKPHRFDRRCLSMVVRATGSGGMNLVFVGAEMAPWSKTGGLGDVLGGLPAAMAANGHRVMVISPRYDQYKDAWDTSVISEIKVVDRYERVRYFHCYKRGVDRVFVDHPCFLEKVRGKTKEKIYGPDAGTDYEDNQQRFSLLCQAALEVPRILDLNNNPHFSGPYGEDVVFVCNDWHTGLLACYLKSNYQSNGIYRTAKVAFCIHNISYQGRFSFDDFAQLNLPDRFKSSFDFIDGYDKPVEGRKINWMKAGILQADKVLTVSPYYAEELISGEARGCGLDNIMRLTGITGIVNGMDVSEWDPIKDKFLTVNYDVTTALEGKALNKEALQAEVGLPVDRKVPLVAFIGRLEEQKGPDVMIAAIPEIVKEEDVQIVLLGTGKKKFERLLKSVEEKFPTKVRAVVRFNAPLAHQMMAGADVLAVTSRFEPCGLIQLQGMRYGTPCACASTGGLVDTIVEGKTGFHMGRLSVDCNVVEPADVKKVVTTLKRAVKVVGTPAYHEMVKNCMIQDLSWKGPAKNWEDVLLELGVEGSEPGIVGEEIAPLALENVAAP

SEQ ID NO: 94197 - DNA, 2256 bp, Manihot esculenta
  CDS (1)..(2256)
atggcatttataggatcacttccttttattatccaaaccaaagcagaaagttctgtccttctccatgacaaaaacctacagcgatccagattctccgttttcccatgtagatcacaaaactcttttaatttagccgtttcgttatctttgagttttaagcctgtaagagctacaggtaaggaaggcgttagtggtgatgggtcagaggatacacttcaagccaccatcgagaaaagcaagaaagttctcgccttgcaaagggacctacttcagaagattgctgaaagaaggaaattggtttcttctatacaaagtagtgttggtgaccacgacacaaacaaaacttctcatgaacagagggaaaactctttggcaaattcagataatacttcaactagtgatgtgaatatgcaccaacagcaaaatggcccagttcttccgagtagctatgtccattcaactgcagatgaggtatcagaaactgcatcttcagctattaatagaggtcatgctaaagatgataaggaacttgaacaacatgcatctcctagaacagcctttgttaagaattctaccaaacagtttaaagagatggattctgagaaactacagacagatgagataccatcttttctttcaaacaccacagatatttccactataaatgaagaaaatagtgaacattcaaatgaatcaacctcacctatggtcgacatttttgaaagtgattctatgactgaagacatgaagccacctcctttggctggggacaatgtcatgaatgttattttggtagctgcagaatgtgctccatggtccaaaacaggtggccttggtgatgtcgctggatctttaccaaaggctttggctcggcgtggacatcgggttatggttgtggcaccgcgatatggcaactatgttgaacctcaggatactggagtccgaaagaggtataaggtggatggtcaggattttgaagtatcatacttccaagccttcattgatggggttgattttgtattcattgacagtcctatgtttcgccacatagggaatgatatatatggaggaaacagaatggatatattaaagaggatggtattattttgcaaagctgctgttgaggttccttggcatgtcccatgtggtggagtctgctatggggatggaaatttggctttcattgcaaatgattggcatacagcattgttgccagtgtatctgaaggcatattatcgggataatggtttaatgcaatatacaagatctgttcttgtaattcataacatagctcaccagggtcggggtcccagtggagatttctcttacgtgggtctaccagaacattacattgatctcttcaaactgcatgatccgattggtggtgaccacttcaatatctttgcacctggtcttaaggtggcagatcgtgtggttactgttagtcatggatacgcctgggagcttaaaacatctgaaggtggttggggtcttcacaatatcataaatgagaaccactggaaattgcagggcattgttaatgggattgatgccaaagaatggaatccacagtttgatattcaactgacatcagatggttatactaactattccctggaaacacttgatactggcaagcctcagtgcaagacagccttacagaacgagctccggtttgccatccccccagatgtccctgttattgggttcattggaaggttggattatcagaaaggtgtcgatctcatagctgaggcaattccctggatggtgggtcaggatgtgcaactagtaatgttgggtactggcagacaagacttggaagagatgcttagacaatttgaaaaccaacatagagataaagtgaggggatgggttggtttttctgtgaagacagctcacaggataactgctggtgcagatattttgctcatgccatcaagatttgaaccatgtgggctaaaccagttatatgctatgatgtacgggacgattcctgtagtacacgctgtgggtggactaagggacacggtgcaacctttcgatccatttaatgagtcggggcttgggtggacatttgatagcgctgaatcacataaactgatacatgcattaggcaattgcttgctcacttaccgagagtacaagaagagctgggaaggcctgcagagaagagggatgactccaaacctcagctgggaccatgctgctgagaaatatgaggagactcttgttgcagccaagtaccagtggtga

SEQ ID NO: 94198 - protein, 751 aa, Manihot esculenta; identical to SEQ ID NO: 52505

SEQ ID NO: 94199 - DNA, 2400 bp, Triticum aestivum
  CDS (1)..(2400)
atgtcgtcggcggtcgcgtccgccgcgtccttcctcgcgctcgcctccgcctcccccgggagatcacgcaggcgggcgagggtgagcgcgccgccaccccacgccggggccggcaggctgcactggccgccgtggccgccgcagcgcacggctcgcgacggaggtgtggccgcgcgcgccgccgggaagaaggacgcgagggtcgacgacgacgccgcgtccgcgaggcagccccgcgcacgccgcggtggcgccgccaccaaggtcgcggagcggagggatcccgtcaagacgctcgatcgcgacgccgcggaaggtggcgcgccggcaccgccggcaccgaggcaggacgccgcccgtccaccgagtatgaacggcacgccggtgaacggtgagaacaaatctaccggcggcggcggcgcgaccaaagacagcgggctgcccgcacccgcacgcgcgccccatccgtcgacccagaacagagtaccagtgaacggtgaaaacaaagctaacgtcgcctcgccgccgacgagcatagccgaggtcgtggctccggattccgcagctaccatttccatcagtgacaaggcgccggagtccgttgtcccagccgagaagccgccgccgtcgtccggctcaaatttcgtggtctcggcttctgctcccaggctggacattgacagcgatgttgaacctgaactgaagaagggtgcggtcatcgtcgaagaagctccaaacccaaaggctctttcgccgcctgcagcccccgctgtacaagaagacctttgggacttcaagaaatacattggcttcgaggagcccgtggaggccaaggatgatggctgggctgttgcagatgatgcgggctcctttgaacatcaccagaaccatgattccggacctttggcaggggagaacgtcatgaacgtggtcgtcgtggctgctgaatgttctccctggtgcaaaacaggtggtcttggagatgttgccggtgctttgcccaaggctttggcgaagagaggacatcgtgttatggttgtggtaccaaggtatggggactatgaggaagcctacgatgtcggagtccgaaaatactacaaggctgctggacaggatatggaagtgaattatttccatgcttatatcgatggagttgattttgtgttcattgacgctcctctcttccgacaccgccaggaagacatttatgggggcagcagacaggaaattatgaagcgcatgattttgttctgcaaggccgctgtcgaggttccttggcacgttccatgcggcggtgtcccttatggggatggaaatctggtgtttattgcaaatgattggcacacggcactcctgcctgtctatctgaaagcatattacagggaccatggtttgatgcagtacactcggtccattatggtgatacataacatcgcgcaccagggccgtggcccagtagatgaattcccgttcaccgagttgcctgagcactacctggaacacttcagactgtacgaccccgtgggtggtgagcacgccaactacttcgccgccggcctgaagatggcggaccaggttgtcgtggtgagccccgggtacctgtgggagctcaagacggtggagggcggctgggggcttcacgacatcatacggcagaacgactggaagacccgcggcatcgtcaacggcatcgacaacatggagtggaaccccgaggtggacgtccacctcaagtcggacggctacaccaacttctccctggggacgctggactccggcaagcggcagtgcaaggaggccctgcagcgcgagctgggcctgcaggtccgcgccgacgtgccgctgctcggcttcatcggccgcctggacgggcagaagggcgtggagatcatcgcggacgccatgccctggatcgtgagccaggacgtgcagctggtcatgctgggcaccggccgccacgacctggagagcatgctgcggcacttcgagcgggagcaccacgacaaggtgcgcgggtgggtggggttctccgtgcgcctggcgcaccggatcacggcgggcgccgacgcgctcctcatgccctcccggttcgagccgtgcgggttgaaccagctttacgccatggcctacggcaccgtccccgtcgtgcacgccgtcggcggggtgagggacaccgtgccgccgttcgaccccttcaaccactccggcctcgggtggacgttcgaccgcgccgaggcgcacaagctgatcgaggcgctcgggcactgcctccgcacctaccgggactacaaggagagctggaggggcctccaggagcgcggcatgtcgcaggacttcagctgggagcatgccgccaagctctacgaggacgtcctcctcaaggccaagtaccagtggtga

SEQ ID NO: 94200 - protein, 799 aa, Triticum aestivum
MSSAVASAASFLALASASPGRSRRRARVSAPPPHAGAGRLHWPPWPPQRTARDGGVAARAAGKKDARVDDDAASARQPRARRGGAATKVAERRDPVKTLDRDAAEGGAPAPPAPRQDAARPPSMNGTPVNGENKSTGGGGATKDSGLPAPARAPHPSTQNRVPVNGENKANVASPPTSIAEVVAPDSAATISISDKAPESVVPAEKPPPSSGSNFVVSASAPRLDIDSDVEPELKKGAVIVEEAPNPKALSPPAAPAVQEDLWDFKKYIGFEEPVEAKDDGWAVADDAGSFEHHQNHDSGPLAGENVMNVVVVAAECSPWCKTGGLGDVAGALPKALAKRGHRVMVVVPRYGDYEEAYDVGVRKYYKAAGQDMEVNYFHAYIDGVDFVFIDAPLFRHRQEDIYGGSRQEIMKRMILFCKAAVEVPWHVPCGGVPYGDGNLVFIANDWHTALLPVYLKAYYRDHGLMQYTRSIMVIHNIAHQGRGPVDEFPFTELPEHYLEHFRLYDPVGGEHANYFAAGLKMADQVVVVSPGYLWELKTVEGGWGLHDIIRQNDWKTRGIVNGIDNMEWNPEVDVHLKSDGYTNFSLGTLDSGKRQCKEALQRELGLQVRADVPLLGFIGRLDGQKGVEIIADAMPWIVSQDVQLVMLGTGRHDLESMLRHFEREHHDKVRGWVGFSVRLAHRITAGADALLMPSRFEPCGLNQLYAMAYGTVPVVHAVGGVRDTVPPFDPFNHSGLGWTFDRAEAHKLIEALGHCLRTYRDYKESWRGLQERGMSQDFSWEHAAKLYEDVLLKAKYQW

SEQ ID NO: 94201 - DNA, 1818 bp, Aegilops speltoides
  CDS (1)..(1818)
atggcggctctggtcacgtcccagctcgccacctccgccaccgtcctcggcatcaccgacaggttccgccatgcaggtttccagggcgtgaggccccggagcccggcagatgcgccgctcggcatgaggactgtcggagcgagcgccgccccgaagcaacaaagccggaaagcgcaccgcgggacccggcggtgcctctcgatggtggtgcgcgccaccggcagcggcggcatgaacctcgtgttcgtcggcgccgagatggcgccctggagcaagaccggcggcctcggcgacgtcctcgggggcctccccccagccatggccgccaacggtcaccgggtgatggtcatctccccgcgctacgaccagtacaaggacgcctgggacaccagcgtcgtctccgagatcaaggtcgccgatgagtacgagagggtgaggtacttccattgctacaagcgcggggtggaccgcgtgttcgtcgaccacccgtgcttcctggagaaggtccggggcaagaccaaggagaagatctacgggcccgacgccggcaccgactacgaggacaaccagctacgcttcagcctcctctgccaggcagcgctggaagcacccaggatcctcgacctcaacaacaacccatacttttctggaccctacggggaagacgtggtgttcgtgtgcaacgactggcacacaggccttctggcctgctacctcaagagcaactaccagtccaatggcatctacagcacggccaaggtggccttctgcatccacaacatctcgtaccagggccgcttctccttcgacgacttcgcgcagctcaacctgcccgacaggttcaagtcgcccttcgacttcatcgacggctacgacaagccggtggaggggcgcaagatcaactggatgaaggctgggatcctgcaggccgacaaggtgctcacggtgagcccctactacgctgaggagctcatctccggcgaagccaggggctgcgagctcgacaacatcatgcgcctcacgggcatcaccggcatcgtcaacggcatggacgtcagcgagtgggaccccaccaaggacaatttcctcgccgccaactacaacatcaccaccgcgttggaggggaaggcgctgaacaaggaggcgctgcaggccgaggtggggctgccggtggaccggaaggtgcccctggtggccttcatcggcaggctggaggagcagaagggccccgacgtgatgatcgcctccatcccggagatcttgaaggaggaggacgtccagatcgttctcctgggcaccgggaagaagaagttcgagcggctgctcaagagcgtggaggaaaaattcccgagcaaggtgagggccgtggtcaggttcaacgcgccgctggctcaccagatgatggccggggccgacgtgctcgccgtcaccagccgcttcgagccctgtggcctcatccagctccaggggatgcgctacggaacgccgtgcgcgtgcgcgtccaccggcgggctcgtcgacactatcgtggagggcaagaccgggttccacatgggccgcctcagcgtcgactgtaacgtggtggagccggccgacgtgaagaaggtggtgaccaccctgaagcgcgccgtcaaggtcgtcggcacgccggcgtaccatgagatggtcaagaactgcatgatccaggatctctcctggaaggggcctgccaagaactgggaggacgtgcttctggaactgggtgtcgaggggagcgagccgggggtcatcggcgaggagattgcgccgctcgccatggagaacgtcgccgctccctga

SEQ ID NO: 94202 - protein, 605 aa, Aegilops speltoides
MAALVTSQLATSATVLGITDRFRHAGFQGVRPRSPADAPLGMRTVGASAAPKQQSRKAHRGTRRCLSMVVRATGSGGMNLVFVGAEMAPWSKTGGLGDVLGGLPPAMAANGHRVMVISPRYDQYKDAWDTSVVSEIKVADEYERVRYFHCYKRGVDRVFVDHPCFLEKVRGKTKEKIYGPDAGTDYEDNQLRFSLLCQAALEAPRILDLNNNPYFSGPYGEDVVFVCNDWHTGLLACYLKSNYQSNGIYSTAKVAFCIHNISYQGRFSFDDFAQLNLPDRFKSPFDFIDGYDKPVEGRKINWMKAGILQADKVLTVSPYYAEELISGEARGCELDNIMRLTGITGIVNGMDVSEWDPTKDNFLAANYNITTALEGKALNKEALQAEVGLPVDRKVPLVAFIGRLEEQKGPDVMIASIPEILKEEDVQIVLLGTGKKKFERLLKSVEEKFPSKVRAVVRFNAPLAHQMMAGADVLAVTSRFEPCGLIQLQGMRYGTPCACASTGGLVDTIVEGKTGFHMGRLSVDCNVVEPADVKKVVTTLKRAVKVVGTPAYHEMVKNCMIQDLSWKGPAKNWEDVLLELGVEGSEPGVIGEEIAPLAMENVAAP

SEQ ID NO: 94203 - DNA, 1818 bp, Triticum monococcum
  CDS (1)..(1818)
atggcggctctggtcacgtcccagctcgccacctccggcgccgtcctcggcatcaccgacaggttccggcgtgcaggttttcagggcgtgaggccccggagcccggcggatgcggcgctcggcatgaggactgtcggagcaagcgcggcaccgaagcaacaaagcaggaaagcgcaccgcgggacccggcggtgcctctcggtggtggtgcgcgccacgggcagcggcggcatgaacctcgtgttcgtcggcgccgagatggcgccctggagcaagaccggcggcctcggcgacgtcctcgggggcctccccccagccatggccgccaacggtcaccgggtcatggtcatctccccgcgctacgaccagtacaaggacgcctgggacaccagcgtcgtctccgagatcaaggtcgccgacgagtacgagcgggtgaggtacttccactgcttcaaacgtggggtggaccgcgtgttcgtcgaccacccgtgcttcctggagaaggtccggggcaagaccaaggagaagatctatgggcccgacgccggcacggactacgaggacaaccagctacgcttcagccttctctgccaggcagcacttgaggtgcccaggatcctcgacctcaacaacaacccatacttttctggaccctacggggaagacgtggtgttcgtgtgcaacgactggcacacgggccttctggcctgctacctcaagagcaactaccagtccaatggcatctataggacggccaaggtggcgttctgcatccacaacatctcgtaccagggccgcttctccttcgacgacttcgcgcagctcaacctgcccgacaggttcaagtcgtccttcgacttcatcgacgggtacgacaagccggtggaggggcgcaagatcaactggatgaaggccgggatcctgcaggccgacaaggtgctgacggtgagcccctactacgcggaggagctcatctccggcgaagccaggggctgcgagctcgacaacatcatgcgcctcacgggcatcaccggcatcgtcaacggcatggatgtcagcgagtgggaccccaccaaggacaatttcctcaccgtcaactacaacgtcaccaccgcgttggaggggaaggtgctgaacaaggaggcgctgcaggccgaggtggggctgccggtggaccggaaggtgccgctggtggcgttcatcggcaggctggaggagcagaagggccccgacgtgatgatcgccgccatcccggagatcgtgaaggaggaggacgtccagatcgttctcctgggcaccgggaagaagaagtttgagcggctgctcaagagcgtggaggagaagttcccaagcaaggtgagggccgtggtcaggttcaacgcgccgctggctcaccagatgatggccggagccgacgtgctcgccgtcaccagccgctttgagccctgcggcctcatccagctccaggggatgcgctacggaacgccgtgcgcatgcgcgtccaccggcgggctcgtcgacaccatcgtggagggcaagaccgggttccacatgggccgcctcagcgtcgactgcaacgtggtggagccggccgacgtgaagaaggtggtgaccaccctgaagcgcgccgtcaaggtcgtcggcacgccggcgtaccatgagatggtcaagaactgcatgatacaggatctctcctggaaggggcctgccaagaactgggagcacgtgcttctggaactgggggtcgaggggagcgagccggggatcgtcggcgaggagatcgcgccgctcgccatggagaacgtcgccgctccctga

SEQ ID NO: 94204 - protein, 605 aa, Triticum monococcum
MAALVTSQLATSGAVLGITDRFRRAGFQGVRPRSPADAALGMRTVGASAAPKQQSRKAHRGTRRCLSVVVRATGSGGMNLVFVGAEMAPWSKTGGLGDVLGGLPPAMAANGHRVMVISPRYDQYKDAWDTSVVSEIKVADEYERVRYFHCFKRGVDRVFVDHPCFLEKVRGKTKEKIYGPDAGTDYEDNQLRFSLLCQAALEVPRILDLNNNPYFSGPYGEDVVFVCNDWHTGLLACYLKSNYQSNGIYRTAKVAFCIHNISYQGRFSFDDFAQLNLPDRFKSSFDFIDGYDKPVEGRKINWMKAGILQADKVLTVSPYYAEELISGEARGCELDNIMRLTGITGIVNGMDVSEWDPTKDNFLTVNYNVTTALEGKVLNKEALQAEVGLPVDRKVPLVAFIGRLEEQKGPDVMIAAIPEIVKEEDVQIVLLGTGKKKFERLLKSVEEKFPSKVRAVVRFNAPLAHQMMAGADVLAVTSRFEPCGLIQLQGMRYGTPCACASTGGLVDTIVEGKTGFHMGRLSVDCNVVEPADVKKVVTTLKRAVKVVGTPAYHEMVKNCMIQDLSWKGPAKNWEHVLLELGVEGSEPGIVGEEIAPLAMENVAAP

SEQ ID NO: 94205 - DNA, 1800 bp, Triticum aestivum
  CDS (1)..(1800)
atgggttccattcctaattattgttcttatcaaacaaacagtgttggttcactgaaactgtcgcctcacatccaattccagcaatcttgtaacaatgaagttatgttcctatccatgcgaaataagacacagctggccaaaagaagagccacaaattatggaactcatcgtaattctagtaggactcctgcacctatcgtatgttcaactggaatgcccataattttcgttgccactgaagtgcacccatggtgcaaaactggaggccttggtgatgtcgtaggaggattgcccccagctctggctgcaatggggcaccgggttatgacgatagctcctcgctatgatcagtacaaggatacatgggatacaaatgttcttgttgaggtaattgttggtgacagaacagaaacagtgcgcttttttcactgctacaaaaggggggttgatcgtgtttttgttgatcatcctatgtttcttgagaaggtatggggcaaaactggatcaaaattgtatgggcctaccactggaacagacttccgagataaccaattacggttctgccttttgtgccttgctgcattggaggctccgagggttcttaatctcaacaattctgaatacttctctggaccatatggagaaaatgttgtcttcgttgcaaatgactggcacactgcagttttgccatgctatttgaagagcatgtataagcaaaatggaatttatgtgaatgccaaggttgctttctgcattcacaatatcgcctatcagggcagatttcccagagtggacttcgaacttcttaatttacctgaaagtttcatgccgtcatttgattttgttgatgggcatgttaagccagtagtagggagaaagattaactggatgaaggcagggatcactgagtgtgatgtggtccttacagttagtccacattatgtcaaagaacttacttctggcccagagaaaggtgttgagttggatggcgtccttcgtgcaaagcctcttgaaactggaattgtaaatggaatggatgttgttgattggaatccagcaacagataagtacatcagtgtcaaatacaatgcaacaacggtggcggaagcaagagctctcaataaagaaatactgcaggctgaagttggattgcctgtggactctagcatacctgttatagttttcattggacgtcttgaagaacagaaagggtcagacatactaattgcagccataccggagtttctcgaggagaatgttcagataattgttctcggcacagggaagaagaaaatggaggaggaactgatgctgctagaagcgaagtacccacagaatgccagaggcatagcaaaattcaatgtcccattggcgcacatgatgtttgccggggctaatttcataattgttccaagtaggttcgagccatgtggcctcatccaattgcaagggatgagatatggagtgattcccatctgttcatccaccggaggactcgttgacacggtgagcgagggtgtcaccggattccacatgggttcgttcaatgtcgagtttgaaaccgtcgatccagcagatgtcgcggcagttgcttcgaatgtcacacgagctctgaaacagtacaaaacaccgtcgttccacgcaatggttcagaattgcatggcgcaggacctatcttggaagggaccggcaaagaagtgggaggaggctcttcttggcctaggagtcgagggaagtcagccgggcatcgagggcgaggagatcgctccacttgcgaaacagaatgtggccactccctga

SEQ ID NO: 94206 - protein, 599 aa, Triticum aestivum
MGSIPNYCSYQTNSVGSLKLSPHIQFQQSCNNEVMFLSMRNKTQLAKRRATNYGTHRNSSRTPAPIVCSTGMPIIFVATEVHPWCKTGGLGDVVGGLPPALAAMGHRVMTIAPRYDQYKDTWDTNVLVEVIVGDRTETVRFFHCYKRGVDRVFVDHPMFLEKVWGKTGSKLYGPTTGTDFRDNQLRFCLLCLAALEAPRVLNLNNSEYFSGPYGENVVFVANDWHTAVLPCYLKSMYKQNGIYVNAKVAFCIHNIAYQGRFPRVDFELLNLPESFMPSFDFVDGHVKPVVGRKINWMKAGITECDVVLTVSPHYVKELTSGPEKGVELDGVLRAKPLETGIVNGMDVVDWNPATDKYISVKYNATTVAEARALNKEILQAEVGLPVDSSIPVIVFIGRLEEQKGSDILIAAIPEFLEENVQIIVLGTGKKKMEEELMLLEAKYPQNARGIAKFNVPLAHMMFAGANFIIVPSRFEPCGLIQLQGMRYGVIPICSSTGGLVDTVSEGVTGFHMGSFNVEFETVDPADVAAVASNVTRALKQYKTPSFHAMVQNCMAQDLSWKGPAKKWEEALLGLGVEGSQPGIEGEEIAPLAKQNVATP

SEQ ID NO: 94207 - DNA, 1944 bp, Triticum aestivum
  CDS (1)..(1944)
atggcggcgacgggcgtcggcgccgggtgcctcgcccccagcgtccgcctgcgcgccgatccggcgacggcggcccgggcgtccgcctgcgtcgtccgcgcgcggctccggcgcttggcgcggggccgctacgttgccgagctcagcagggagggccccgcggcgcgccccgcgcagcagcagcaactggccccgccgctcgtgccaggcttcctcgcgccgccgccgcccgcgcccgcccagtcgccggccccgacgcagccgcccctgccggacgccggcgtgggggaactcgcgcccgacctcctgctcgaagggattgctgaggattccatcgacagcataattgtggctgcaagtgagcaggattctgagatcatggatgcgaatgagcaacctcaagctaaagttacacgtagcatcgtgtttgtgactggtgaagctgctccttatgcaaagtcaggggggctgggagatgtttgtggttcgttaccaattgctcttgctgctcgtggtcaccgtgtgatggttgtaatgccaagatacttgaatgggtcctctgataaaaactatgcaaaggcattatacactgggaagcacattaagattccatgctttgggggatcacatgaagtgaccttttttcatgagtatagagacaacgtcgattgggtgtttgtcgatcatccgtcatatcatagaccaggaagtttatatggagataattttggtgcttttggtgataatcagttcagatacacactcctttgctatgctgcatgcgaggccccactaatccttgaattgggaggatatatttatggacagaattgcatgtttgttgtgaacgattggcatgccagccttgtgccagtccttcttgctgcaaaatatagaccatacggtgtttacagagattcccgcagcacccttgttatacataatttagcacatcagggtctggagcctgcaagtacatatcctgatctgggattgccacctgaatggtatggagctttagaatgggtatttccagaatgggcaaggaggcatgcccttgacaagggtgaggcagttaactttttgaaaggagcagtcgtgacagcagatcgaattgtgaccgtcagtcagggttattcatgggaggtcacaactgctgaaggtggacagggcctcaatgagctcttaagctcccgaaaaagtgtattgaatggaattgtaaatggaattgacattaatgattggaaccccaccacagacaagtgtctccctcatcattattctgtcgatgacctctctggaaaggccaaatgtaaagctgaattgcagaaggagctgggtttacctgtaagggaggatgttcctctgattggctttattggaagactggattaccagaaaggcattgatctcattaaaatggccattccagagctcatgagggaggacgtgcagtttgtcatgcttggatctggggatccaatttttgaaggctggatgagatctaccgagtcgagttacaaggataaattccgtggatgggttggatttagtgttccagtttcccacagaataactgcaggttgcgatatattgttaatgccatccaggtttgaaccttgtggtcttaatcagctatatgctatgcaatatggtacagttcctgtagttcatggaactgggggcctccgagacacagtcgagaccttcaacccttttggtgcaaaaggagaggagggtacagggtgggcgttctcaccgctaaccgtggacaagatgttgtgggcattgcgaaccgcgatgtcgacattcagggagcacaagccgtcctgggaggggctcatgaagcgaggcatgacgaaagaccatacgtgggaccatgccgccgagcagtacgagcagatcttcgaatgggccttcgtggaccaaccctacgtcatgtag

SEQ ID NO: 94208 - protein, 647 aa, Triticum aestivum
MAATGVGAGCLAPSVRLRADPATAARASACVVRARLRRLARGRYVAELSREGPAARPAQQQQLAPPLVPGFLAPPPPAPAQSPAPTQPPLPDAGVGELAPDLLLEGIAEDSIDSIIVAASEQDSEIMDANEQPQAKVTRSIVFVTGEAAPYAKSGGLGDVCGSLPIALAARGHRVMVVMPRYLNGSSDKNYAKALYTGKHIKIPCFGGSHEVTFFHEYRDNVDWVFVDHPSYHRPGSLYGDNFGAFGDNQFRYTLLCYAACEAPLILELGGYIYGQNCMFVVNDWHASLVPVLLAAKYRPYGVYRDSRSTLVIHNLAHQGLEPASTYPDLGLPPEWYGALEWVFPEWARRHALDKGEAVNFLKGAVVTADRIVTVSQGYSWEVTTAEGGQGLNELLSSRKSVLNGIVNGIDINDWNPTTDKCLPHHYSVDDLSGKAKCKAELQKELGLPVREDVPLIGFIGRLDYQKGIDLIKMAIPELMREDVQFVMLGSGDPIFEGWMRSTESSYKDKFRGWVGFSVPVSHRITAGCDILLMPSRFEPCGLNQLYAMQYGTVPVVHGTGGLRDTVETFNPFGAKGEEGTGWAFSPLTVDKMLWALRTAMSTFREHKPSWEGLMKRGMTKDHTWDHAAEQYEQIFEWAFVDQPYVM

SEQ ID NO: 94209 - DNA, 1944 bp, Aegilops tauschii
  CDS (1)..(1944)
atggcggcgacgggcgtcggcgccgggtgcctcgcccccagcgtccgcctgcgcgccgatccggcgacggcggcccgggcgtccgcttgcgtcgtccgcgcgcggctccggcgcttggcgcggggccgctacgtcgccgagctcagcagggagggccccgcggcgcgccccgcgcagcagcagcaactggccccgccgctcgtgccaggcttcctcgcgccgccgccgcccgcgcccgcccagtcgccggccccgacgcagccgcccctgccggacgccggcgtgggggaactcgcgcccgacctcctgctcgaagggattgctgaggattccatcgacagcataatcgtggctgcaagtgagcaggattctgagatcatggatgcgaatgagcaacctcaagctaaagttacacgtagcatcgtgtttgtgactggtgaagctgctccttatgcaaagtcaggggggctgggagatgtttgtggttcgttaccaattgctcttgctgctcgtggtcaccgtgtgatggttgtaatgccaagatacttgaatgggtcctctgataaaaactatgcaaaggcattatacactgcgaagcacattaagattccatgctttgggggatcacatgaagtgaccttttttcatgagtatagagacaacgtcgattgggtgtttgtcgatcatccgtcatatcatagaccaggaagtttatatggagataattttggtgcttttggtgataatcagttcagatacacactcctttgctatgctgcatgcgaggccccactaatccttgaattgggaggatatatttatggacagaattgcatgtttgttgtgaacgattggcatgccagccttgtgccagtccttcttgctgcaaaatatagaccatacggtgtttacagagattcccgcagcacccttgttatacataatttagcacatcagggtgtggagcctgcaagtacatatcctgatctgggattgccacctgaatggtatggagctttagaatgggtatttccagaatgggcaaggaggcatgcccttgacaagggtgaggcagttaactttttgaaaggagcagttgtgacagcagatcgaattgtgaccgtcagtcagggttattcatgggaggtcacaactgctgaaggtggacagggcctcaatgagctcttaagctcccgaaaaagtgtattgaatggaattgtaaatggaattgacattaatgattggaaccccaccacagacaagtgtctccctcatcattattctgtcgatgacctctctggaaaggccaaatgtaaagctgaattgcagaaggagctgggtttacctgtaagggaggatgttcctctgattggctttattggaagactggattaccagaaaggcattgatctcattaaaatggccattccagagctcatgagggaggacgtgcagtttgtcatgcttggatctggggatccaatttttgaaggctggatgagatctaccgagtcgagttacaaggataaattccgtggatgggttggatttagtgttccagtttcccacagaataactgcaggttgcgatatattgttaatgccatccaggtttgaaccttgtggtcttaatcagctatatgctatgcaatatggtacagttcctgtagttcatggaactgggggcctccgagacacagtcgagaccttcaacccttttggtgcaaaaggagaggagggtacagggtgggcgttctcaccgctaaccgtggacaagatgttgtgggcattgcgaaccgcgatgtcgacattcagggagcacaagccgtcctgggaggggctcatgaagcgaggcatgacgaaagaccatacgtgggaccatgccgccgagcagtacgagcagatcttcgaatgggccttcgtggaccaaccctacgtcatgtag

SEQ ID NO: 94210 - protein, 647 aa, Aegilops tauschii
MAATGVGAGCLAPSVRLRADPATAARASACVVRARLRRLARGRYVAELSREGPAARPAQQQQLAPPLVPGFLAPPPPAPAQSPAPTQPPLPDAGVGELAPDLLLEGIAEDSIDSIIVAASEQDSEIMDANEQPQAKVTRSIVFVTGEAAPYAKSGGLGDVCGSLPIALAARGHRVMVVMPRYLNGSSDKNYAKALYTAKHIKIPCFGGSHEVTFFHEYRDNVDWVFVDHPSYHRPGSLYGDNFGAFGDNQFRYTLLCYAACEAPLILELGGYIYGQNCMFVVNDWHASLVPVLLAAKYRPYGVYRDSRSTLVIHNLAHQGVEPASTYPDLGLPPEWYGALEWVFPEWARRHALDKGEAVNFLKGAVVTADRIVTVSQGYSWEVTTAEGGQGLNELLSSRKSVLNGIVNGIDINDWNPTTDKCLPHHYSVDDLSGKAKCKAELQKELGLPVREDVPLIGFIGRLDYQKGIDLIKMAIPELMREDVQFVMLGSGDPIFEGWMRSTESSYKDKFRGWVGFSVPVSHRITAGCDILLMPSRFEPCGLNQLYAMQYGTVPVVHGTGGLRDTVETFNPFGAKGEEGTGWAFSPLTVDKMLWALRTAMSTFREHKPSWEGLMKRGMTKDHTWDHAAEQYEQIFEWAFVDQPYVM

SEQ ID NO: 94211 - DNA, 1818 bp, Triticum aestivum; identical to SEQ ID NO: 52506
  CDS (1)..(1818)

SEQ ID NO: 94212 - protein, 605 aa, Triticum aestivum; identical to SEQ ID NO: 52507

SEQ ID NO: 94213 - DNA, 1815 bp, Triticum aestivum
  CDS (1)..(1815)
atggcggctctggtcacgtcccagctcgccacctccggcaccgtcctcagcgtcaccgacagattccggcgtccaggttttcagggcctgaggccccggaacccggcggatgcggcgctcggcatgaggactgtcggagcgagcgccgccccaaagcaaagcaggaaaccgcaccgattcgaccggcggtgcctctccatggtggtgcgcgccacgggcagcggcggcatgaacctcgtgttcgtcggcgccgagatggcgccctggagcaagactggcggcctcggcgacgtcctcgggggcctccccgccgccatggccgccaacggtcaccgggtcatggtcatctccccgcgctacgaccagtacaaggacgcctgggacaccagcgtcatctccgagatcaaggtcgttgacaggtacgagagggtgaggtacttccactgctacaagcgcggggtggaccgcgtgttcgtcgaccacccgtgcttcctggagaaggtccggggcaagaccaaggagaagatctatggacccgacgccggcaccgactacgaggacaaccagcagcgcttcagccttctctgccaggcagcacttgaggtgcccaggatcctcgacctcaacaacaacccacacttttctggaccctacggggaagacgtggtgtttgtgtgcaacgactggcacacgggccttctggcctgctacctcaagagcaactaccagtccaatggcatctataggacggccaaggtggcattctgcatccacaacatctcgtaccagggccgcttctccttcgacgacttcgcgcagctcaacctgcctgacaggttcaagtcgtccttcgacttcatcgacggctacgacaagccggtggaggggcgcaagatcaactggatgaaggccgggatcctgcaggccgacaaggtgctgactgtgagcccctactatgctgaggagctaatctctggcgaagccaggggctgcgagctcgacaacatcatgcgcctcactgggatcaccggcatcgtcaacggcatggacgtcagcgagtgggaccccatcaaggacaagttcctcaccgtcaactacgacgtcaccaccgcgttggaggggaaggcgctgaacaaggaggcgctgcaggccgaggtggggctgccggtggaccggaaggtgcccctggtggcgttcatcggcaggctggaggagcagaagggccccgacgtgatgatcgccgccatcccggagatcgtgaaggaggaggacgtccagatcgttctcctgggcaccgggaagaagaagtttgagcggctgctcaagagcgtggaggagaagttcccgaccaaggtgtgggccgtggtcaggttcaacgcgccgctggctcaccagatgatggccggcgccgacgtgctggcggtcaccagccgcttcgagccctgcggcctcatccagctccagggaatgcgctacggaacgccgtgcgcctgcgcgtcgacaggcgggctcgtcgacactatcgtggaaggcaagaccgggttccacatgggccgcctcagcgttgactgcaacgtggtggagccggccgacgtgaagaaggtggtcaccaccctgaagcgcgccgtcaaggtcgtcggcacgccggcgtaccatgagatggtcaagaactgcatgatacaggatctctcctggaaggggcctgccaagaactgggaggacgtgcttctggaactgggggtggaggggagcgagccgggcatcgtcggcgaggagatcgcgccgctcgccctggagaacgtcgccgctccctga

SEQ ID NO: 94214 - protein, 604 aa, Triticum aestivum
MAALVTSQLATSGTVLSVTDRFRRPGFQGLRPRNPADAALGMRTVGASAAPKQSRKPHRFDRRCLSMVVRATGSGGMNLVFVGAEMAPWSKTGGLGDVLGGLPAAMAANGHRVMVISPRYDQYKDAWDTSVISEIKVVDRYERVRYFHCYKRGVDRVFVDHPCFLEKVRGKTKEKIYGPDAGTDYEDNQQRFSLLCQAALEVPRILDLNNNPHFSGPYGEDVVFVCNDWHTGLLACYLKSNYQSNGIYRTAKVAFCIHNISYQGRFSFDDFAQLNLPDRFKSSFDFIDGYDKPVEGRKINWMKAGILQADKVLTVSPYYAEELISGEARGCELDNIMRLTGITGIVNGMDVSEWDPIKDKFLTVNYDVTTALEGKALNKEALQAEVGLPVDRKVPLVAFIGRLEEQKGPDVMIAAIPEIVKEEDVQIVLLGTGKKKFERLLKSVEEKFPTKVWAVVRFNAPLAHQMMAGADVLAVTSRFEPCGLIQLQGMRYGTPCACASTGGLVDTIVEGKTGFHMGRLSVDCNVVEPADVKKVVTTLKRAVKVVGTPAYHEMVKNCMIQDLSWKGPAKNWEDVLLELGVEGSEPGIVGEEIAPLALENVAAP

SEQ ID NO: 94215 - DNA, 1725 bp, Triticum aestivum
  CDS (1)..(1725)
atggcggctctggtcacgtcccagctcgccacctccggcaccgtcctcggcatcaccgacaggttccggcgtgcaggtttccagggcgtgaggccccggagcccggcggatgcggctctcggcatgaggaccgtcggagctagcgccgccccaacgcaaagccggaaagcgcaccgcgggacccggcggtgcctctccatggtggtgcgcgccaccggcagcggcggcatgaacctcgtgttcgtcggcgccgagatggcgccctggagcaagaccggcggcctcggcgacgtcctcgggggcctccccccagccatggccgccaacggccaccgggtcatggtcatctccccgcgctacgaccagtacaaggacgcctgggacaccagcgtcgtctccgagatcaaggtcgttgacaagtacgagagggtgaggtacttccactgctacaagcgcggggtggaccgcgtgttcgtcgaccacccgtgcttcctggagaaggtccggggcaagaccaaggagaagatctacgggcccgacgccggcacggactacgaggacaaccagcagcgcttcagccttctctgccaggcggcgctggaagtgccgaggatcctgaacctcgacaataacccctacttttctgggccctacggggaggacgtggtgttcgtgtgcaatgactggcacacgggccttctggcctgctacctcaagagcaactaccagtccaatggcatctacagggccgcaaaggtggcattctgcatccacaacatctcgtaccagggccgcttctccttcgacgacttcgcgcagctcaacctgcccgacaggttcaagtcgtccttcgacttcatcgacggctacgacaagccggtggaggggcgcaagatcaactggatgaaggccgggatcctgcaggccgacaaggtgctgacggtgagcccctactacgcggaggagctcatctctggcgaagccaggggctgcgagctcgacaacatcatgcgcctcactgggatcaccggcatcgtcaacggcatggatgttagcgagtgggaccccaccaaggacaagttcctcgccgtcaactacgacatcaccaccgcgttggaggggaaggcgctgaacaaggaggcgctgcaggccgaggtggggctgccggtggaccggaaggtgcccctggtggcgttcatcggcaggctggaggagcagaagggccccgacgtgatgatcgccgccatcccggagatcctgaaggaggaggacgtccagatcgttcttctgggcaccgggaagaagaagttcgagcggctactcaagagcattgaggagaaattcccgagcaaggtgagggccgtggtcaggttcaacgcgccgctggctcaccagatgatggccggcgccgacgtgctcgccgtcaccagccgcttcgagccctgcggcctcatccagctccaggggatgcgctacggaacgccgtgcgcgtgcgcgtccaccggcgggcttgtcgacacgatcgtggagggcaagaccgggttccacatgggccggctcagtgtcgattgcaacgtggtggagccggccgacgtgaagaaggtggtgaccaccctgaagcgcgccgtcaaggtcgtcggcacgccggcataccatgagatggtcaagaactgcatgatacaggatctctcctggaaggggccagcctggaaggtaagtcgatga

SEQ ID NO: 94216 - protein, 574 aa, Triticum aestivum
MAALVTSQLATSGTVLGITDRFRRAGFQGVRPRSPADAALGMRTVGASAAPTQSRKAHRGTRRCLSMVVRATGSGGMNLVFVGAEMAPWSKTGGLGDVLGGLPPAMAANGHRVMVISPRYDQYKDAWDTSVVSEIKVVDKYERVRYFHCYKRGVDRVFVDHPCFLEKVRGKTKEKIYGPDAGTDYEDNQQRFSLLCQAALEVPRILNLDNNPYFSGPYGEDVVFVCNDWHTGLLACYLKSNYQSNGIYRAAKVAFCIHNISYQGRFSFDDFAQLNLPDRFKSSFDFIDGYDKPVEGRKINWMKAGILQADKVLTVSPYYAEELISGEARGCELDNIMRLTGITGIVNGMDVSEWDPTKDKFLAVNYDITTALEGKALNKEALQAEVGLPVDRKVPLVAFIGRLEEQKGPDVMIAAIPEILKEEDVQIVLLGTGKKKFERLLKSIEEKFPSKVRAVVRFNAPLAHQMMAGADVLAVTSRFEPCGLIQLQGMRYGTPCACASTGGLVDTIVEGKTGFHMGRLSVDCNVVEPADVKKVVTTLKRAVKVVGTPAYHEMVKNCMIQDLSWKGPAWKVSR

SEQ ID NO: 94217 - DNA, 1443 bp, Agrobacterium tumefaciens
  CDS (1)..(1443): transl_table=11
atgaatgtcctttcggtttcatccgaaatttatcccctgatcaagaccggagggctcgccgacgttgtcggcgcgctccccatcgcgctcgaagcccatggcgtcagaacgcggacattgatacccggctatccggcggtgaaagccgccgtgacggaccccgtcaaatgttttgagttcaccgacctgcttggcgaaaaggccgatctgctcgaagtccaacacgagaggctagaccttttgatcctcgacgcgcccgcctattacgagcgttccggcggcccctatctcggccagaccggcaaggattatcctgataactggaagcgttttgcggcgctgtcactggcggcggcgcggatcggcgccggtgtgctccccggctggcggccggatatggtgcacgcgcatgactggcaggccgccatgacgcctgtctatatgcgttacgccgaaacaccggaaattccgagccttctcaccatccacaacattgcctttcagggccagttcggcgcaaacatcttcagcaaacttgccctgcccgcccacgccttcggcatggagggcatcgaatattacaacgacgtcagcttcctcaagggcggcttgcagacggcaaccgcgctcagcacggtcagcccatcctatgcggaagaaatcctgaccgcggaattcggcatggggcttgaaggggtgatcggcagccgcgcccatgtgctgcacggcatcgtcaacggcatcgacgccgatgtctggaacccggccaccgaccatctgatccacgacaattattccgccgccaatctcaagaaccgtgccctgaacaagaaggcggtcgccgaacatttccgtatcgatgatgatggcagcccgctattctgcgtcatctcccgcctcacctggcagaagggcatcgacctcatggcggaagccgtggatgagatcgtttccctcggcggccgcctggtcgtgctgggcgcgggcgatgtggcactggaaggcgcgcttcttgcggcggcatcccgccaccatggacgcgtcggtgttgccatcggttacaacgagccgctgtcgcatctcatgcaggcgggttgcgacgcgatcatcattccctctcgcttcgagccctgcggcctgacccagctttacgcgttgcgttacggctgcattccggtcgtcgcccgcaccggcggccttgccgacaccgtgattgacgccaaccatgccgccctcgccagcaaggcggcaactggcgtacaattttcacccgtcacacttgacggtctgaaacaggcgatccgccggaccgtccgttattatcacgacccgaaactgtggacacaaatgcagaaactcggaatgaaatccgatgtttcctgggaaaaaagcgccggtctctacgccgcgctttatagccagcttatttcgaaaggccattga

SEQ ID NO: 94218 - protein, 480 aa, Agrobacterium tumefaciens
MNVLSVSSEIYPLIKTGGLADVVGALPIALEAHGVRTRTLIPGYPAVKAAVTDPVKCFEFTDLLGEKADLLEVQHERLDLLILDAPAYYERSGGPYLGQTGKDYPDNWKRFAALSLAAARIGAGVLPGWRPDMVHAHDWQAAMTPVYMRYAETPEIPSLLTIHNIAFQGQFGANIFSKLALPAHAFGMEGIEYYNDVSFLKGGLQTATALSTVSPSYAEEILTAEFGMGLEGVIGSRAHVLHGIVNGIDADVWNPATDHLIHDNYSAANLKNRALNKKAVAEHFRIDDDGSPLFCVISRLTWQKGIDLMAEAVDEIVSLGGRLVVLGAGDVALEGALLAAASRHHGRVGVAIGYNEPLSHLMQAGCDAIIIPSRFEPCGLTQLYALRYGCIPVVARTGGLADTVIDANHAALASKAATGVQFSPVTLDGLKQAIRRTVRYYHDPKLWTQMQKLGMKSDVSWEKSAGLYAALYSQLISKGH

SEQ ID NO: 94219 - DNA, 1419 bp, Anabaena sp
  CDS (1)..(1419): transl_table=11
atgcggattctatttgtggcagcagaagcagcacccattgcaaaagtaggagggatgggtgatgttgtcggtgcattacctaaggtcttgagaaaaatggggcatgatgtacgtatcttcttgccctattacggctttttgccagacaaaatggagattcccaaagatccaatatggaagggatacgccatgtttcaggactttacagttcacgaagcagttctgcctggtactgatgttcccttgtatttatttggacatccagcctttaccccccggcggatttattcgggagatgatgaagactggcgcttcaccttgttttccaatggtgcggctgagttttgctggaattactggaaacccgacattattcactgtcatgattggcacacgggcatgattcctgtgtggatgaaccaatcaccagatatcaccacagtcttcactatccacaatctggcttaccaagggccttggcgttggtatttagataaaattacttggtgtccttggtatatgcagggacacaacacaatggcggcggctgtccagtttgcggacagggtaaatacagtttctcccacatacgccgagcaaatcaagaccccggcttacggtgagaaaatagaaggtttgctgtctttcatcagtggtaaattatctgggattgttaacggtatagatacggaagtttacgacccagctaatgataaatatattgctcaaacgttcactgccgatactttagataaacgcaaagccaacaaaattgctttacaagaagaagtaggattagaagttaacagcaatgcctttttaattggcatggtgacaaggttagtcgagcagaagggcttagatttagtcatccaaatgctcgatcgctttatggcttatactgatgctcagttcgtcttgttgggaacaggcgatcgctactacgaaacccaaatgtggcaattagcatcccgctaccccggtcgtatggctacttacctcctgtataacgatgccctatctcgccgcatctacgctggtactgatgcctttttgatgcccagtcgctttgaaccatgcggtattagtcaaatgatggctttacgctacggttccattcccatcgtccgccgcactggaggcttggttgacaccgtatcccaccacgaccccatcaacgaagcaggtacaggctactgcttcgaccgctacgaacccctcgacttatttacctgcatgattcgcgcctgggaaggcttccgctacaaaccacaatggcaagaactacaaaaacgcggtatgagtcaagacttcagctggtacaaatccgctaaggaatacgacaaactctatcgctcaatgtacggtttgccagacccagaagagacacagccggagttaattctgacaaatcagtag

SEQ ID NO: 94220 - protein, 472 aa, Anabaena sp
MRILFVAAEAAPIAKVGGMGDVVGALPKVLRKMGHDVRIFLPYYGFLPDKMEIPKDPIWKGYAMFQDFTVHEAVLPGTDVPLYLFGHPAFTPRRIYSGDDEDWRFTLFSNGAAEFCWNYWKPDIIHCHDWHTGMIPVWMNQSPDITTVFTIHNLAYQGPWRWYLDKITWCPWYMQGHNTMAAAVQFADRVNTVSPTYAEQIKTPAYGEKIEGLLSFISGKLSGIVNGIDTEVYDPANDKYIAQTFTADTLDKRKANKIALQEEVGLEVNSNAFLIGMVTRLVEQKGLDLVIQMLDRFMAYTDAQFVLLGTGDRYYETQMWQLASRYPGRMATYLLYNDALSRRIYAGTDAFLMPSRFEPCGISQMMALRYGSIPIVRRTGGLVDTVSHHDPINEAGTGYCFDRYEPLDLFTCMIRAWEGFRYKPQWQELQKRGMSQDFSWYKSAKEYDKLYRSMYGLPDPEETQPELILTNQ

SEQ ID NO: 94221 - DNA, 1479 bp, Anabaena variabilis; identical to SEQ ID NO: 53530
  CDS (1)..(1479): transl_table=11

SEQ ID NO: 94222 - protein, 492 aa, Anabaena variabilis; identical to SEQ ID NO: 53531

SEQ ID NO: 94223 - DNA, 1509 bp, Geobacter metallireducens
  CDS (1)..(1509): transl_table=11
atgaaaaaactgaagatcctcatggccgcctccgaatgcgttccttttgccaaggaggggggactcgccgatgtggtgggggtgttgccgaagcacctggcccgcatggggcacgacgtgcgggtggtgatgccccgctacaagagggtggatcgggaacgctatggtctgaagcagcttcccggcgtactcgtggtccccatgggggtcatcggtaaccaatactgtggcgtctgggaaggccggattccgggaagtgatgtcccggtctatttcctggagcacgagggatactacgaccgcgacggtctctacgaggtgaacaacgagggattcctcgacaacgacaaccgcttcgtcttcctctccaaggcggccctggagctgccgaagatgatcggtttcgagccggacctcctccacgcccacgactggcacacggcggccattccggtcctcgtcaataccacctacgccgccgacccctacgtgggggggaaggccacggtcctcagcgtccacaacatgcagcaccaagggaacttctacgaggggctcatggatgtcctcggcatcggctgggagcacttcaccttcctggggctggaaaacaacggcgaggcgaacctcctcaagggggggctttaccacgccacggtcctcaataccgtgagcgaggggtatgcccgggagatgcagacccccgaatacggctgggggctcgacggggtggtgcgggagcgggcggccgacctctacggcattctgaacggggtcgactacgaagactggaacccggaggtggacccctatatcgcggcccgctattcggccgccgacctctcggggaagaagctctgcaagcgggatctccagcggaccttcggcctcccggaacgggatgacgttcccctcttcggcatggtgtcgcggctcgtgaagcagaagggggtagacatcctggccgaggcgatccatcgcatcctcgctctcgatgtccaatttgtcatgctcggggccggcgagccctggacccacttctacttcggcgatatcaagaacgcctaccccgacaagttcaatatcttcgtggggtacaacaaccccctctcccaccagatcgaggcaggggccgactttttcctcatgccgagcgccttcgagccgtgcggcctcaaccagatgtattcgctccgctacggcacccttcccattgtccgggccacgggggggctcgatgacagcgtggagaacttcgacgagaagacccttgtcggcaccggcttcaagttctggagtcgcgacgccggggccctcttcgacaccgtcggctgggcggtccacacctggtaccaccgcaaggacgccatggagcggctcatcgccaatgccatggccaagcgcttcacctgggaggatgcggcagccaggtacgaggatctctacggtcgggccctccgcaagcgcctgggcgagaaggaatttgcccggcggtacggcaaggggtaa

SEQ ID NO: 94224 - protein, 502 aa, Geobacter metallireducens
MKKLKILMAASECVPFAKEGGLADVVGVLPKHLARMGHDVRVVMPRYKRVDRERYGLKQLPGVLVVPMGVIGNQYCGVWEGRIPGSDVPVYFLEHEGYYDRDGLYEVNNEGFLDNDNRFVFLSKAALELPKMIGFEPDLLHAHDWHTAAIPVLVNTTYAADPYVGGKATVLSVHNMQHQGNFYEGLMDVLGIGWEHFTFLGLENNGEANLLKGGLYHATVLNTVSEGYAREMQTPEYGWGLDGVVRERAADLYGILNGVDYEDWNPEVDPYIAARYSAADLSGKKLCKRDLQRTFGLPERDDVPLFGMVSRLVKQKGVDILAEAIHRILALDVQFVMLGAGEPWTHFYFGDIKNAYPDKFNIFVGYNNPLSHQIEAGADFFLMPSAFEPCGLNQMYSLRYGTLPIVRATGGLDDSVENFDEKTLVGTGFKFWSRDAGALFDTVGWAVHTWYHRKDAMERLIANAMAKRFTWEDAAARYEDLYGRALRKRLGEKEFARRYGKG

SEQ ID NO: 94225 - DNA, 1506 bp, Geobacter sulfurreducens
  CDS (1)..(1506): transl_table=11
atgacacgactgaacatcctcatggccgcgtccgagtgcgtcccctttgccaaggaagggggactggcggacgtggtgggggtgctgcccaagtacctggcccatatggggcacgatgtgcgggtggtgatgcccctctactcccggatcgacccggagcggttcgggctggagcggcttcccggcgtgctcgtggttcccatgggaatcatgggcaatcagtactgcggcgtctgggagggacggcttccgggctccgccgtgccggtctatttcctcgaacacgaggggtactacggtcgggaagggctctacgaggaagacaacgtggggtacatggacaacgacaaccggttcattttcctctcccgggccgccatggaactgcccaagttgatcggcttcgcccccgatgtcttccatgcccacgactggcacactgccgccgtgccggtcttcctcaacaccctttaccgtgacgacccgctggtgggcggtgccgcatcggtgctcaccgtccacaatatgcagcaccagggcaatttctaccccggtgccatggaggtcctgggcatcggctgggagcacttcacctttctggggctcgaaaaggacaaccagaccaacctgctcaaaggggggctttaccacgccacggtcctcaacaccgtgagcgagggatacgcccgggagatgcagacgccggagtacgggtgggggctcgacggcgtggtgcgggcacggtccgccgatctggtcggcatcctcaacggcgtcgattacgaggagtggaacccggagaccgacccgcacatcgtggcgaactattcccgttccgacctgtcgggcaagaagctctgcaaaagggacgtgcagcgattcttcggcctgcccgagcgggatgacgtgccgttgttcggcctggtggggcggctggtgaagcagaagggaatcgatatcctggccgaggcgattcaccgtatccttgccctggatgttcaggtcgtcatgctgggggcgggtgagccctggtcgcacttttatttcggggatgtcagaaacgaatatcctgagaagttcggcctgtatatcgggtacaacaatgggctttcccaccggatcgaggcggggagcgacttcttcgtgatgccgtcggccttcgagccgtgcgggctcaatcagatgtactcgttgcgctacgggaccctgcccattgtccgggccacgggggggctcgacgacagcgtggagaacttcgacgaacagaacctgaccggcaacggtttcaagttctggagccacgatgccgatgccctgttcgatacggtggggtggacggtgcatacctggtaccgccgcaaggacgccatggcagccctcatcggcaatgcaatggcaaagcggttcacctgggaggattcggcggccaggtatgaggaactctactgccgggccctgcgcaaacggctcggcgtcggggtctttgtccggcgcttcgggggatga

SEQ ID NO: 94226 - protein, 501 aa, Geobacter sulfurreducens
MTRLNILMAASECVPFAKEGGLADVVGVLPKYLAHMGHDVRVVMPLYSRIDPERFGLERLPGVLVVPMGIMGNQYCGVWEGRLPGSAVPVYFLEHEGYYGREGLYEEDNVGYMDNDNRFIFLSRAAMELPKLIGFAPDVFHAHDWHTAAVPVFLNTLYRDDPLVGGAASVLTVHNMQHQGNFYPGAMEVLGIGWEHFTFLGLEKDNQTNLLKGGLYHATVLNTVSEGYAREMQTPEYGWGLDGVVRARSADLVGILNGVDYEEWNPETDPHIVANYSRSDLSGKKLCKRDVQRFFGLPERDDVPLFGLVGRLVKQKGIDILAEAIHRILALDVQVVMLGAGEPWSHFYFGDVRNEYPEKFGLYIGYNNGLSHRIEAGSDFFVMPSAFEPCGLNQMYSLRYGTLPIVRATGGLDDSVENFDEQNLTGNGFKFWSHDADALFDTVGWTVHTWYRRKDAMAALIGNAMAKRFTWEDSAARYEELYCRALRKRLGVGVFVRRFGG

SEQ ID NO: 94227 - DNA, 1482 bp, Methylococcus capsulatus; identical to SEQ ID NO: 52512
  CDS (1)..(1482): transl_table=11

SEQ ID NO: 94228 - protein, 493 aa, Methylococcus capsulatus; identical to SEQ ID NO: 52513

SEQ ID NO: 94229 - DNA, 1443 bp, Rhizobium meliloti; identical to SEQ ID NO: 52514
  CDS (1)..(1443): transl_table=11

SEQ ID NO: 94230 - protein, 480 aa, Rhizobium meliloti; identical to SEQ ID NO: 52515

SEQ ID NO: 94231 - DNA, 1434 bp, Synechocystis sp; identical to SEQ ID NO: 52364
  CDS (1)..(1434): transl_table=11

SEQ ID NO: 94232 - protein, 477 aa, Synechocystis sp; identical to SEQ ID NO: 52365

SEQ ID NO: 94233 - DNA, 1530 bp, Agrobacterium tumefaciens
  CDS (1)..(1530): transl_table=11
atgcggattcttgccgttacggccgaaatgtttcccttcgtcaaaaccggcggattggccgatgccacgagcgctttgccgcaggcgctggaacgaaaaggggctgacgttcggacattgctacccctctaccgcgggctcacgccgcttgtccgcggccggaagccggtcctggttgccaatattctggagcagccggtatcagtttattacgttgtttccgatggtcacaagcttctgcttcttgaagcggcaagcctgttcgacagagacggacatccctatggcgtaaaaggcgagccttttgctgacaacgatcttcgctttgcggttctgtccaaagtagcggcggaaatagccctcggcgcgattgacggctggcagccggatgttgtccatgtccatgattggcacgcggctctgacctgcgtctatctcgcggattcgacgccctcggtagcctccgttctaacccttcacaatctcgcatttcagggtcagtatccgctggagagggcgggtatgcttggactaccctcgcacctctgcactgtcgattgccttgaatattacgatgacatgtcatttttgaagggcggtctgacgaccgcgtcggcggtaacgacggttagtccaacttatgcaagagaaatccttacgccggaaatggggatgggaatgcatggcgtgctcgccaggcggcgaggggacctgcgcggcatcgtcaacggtgtcgatcacgacgtctggaatccggcaacagatccgtacattctcgcaaatttcacggctgccacggcgacaagacggagcctcaacaaatatgccttgcttcaggcccttggcctagcccctacccagggccctgtcttcggcgtggtcagtcgcctgacctggcaaaagggaatcgatctcctccctcacgtcgtaccccttataatagaaaggaaaggcaggctgatcgttcacggagagggagatacggcactggaagacagcttgcaggcgctggcaaagcgctatccggaactagtctgcgcccatatcggctatgacgaacggctggcgcacatgatccaggccggctcggatttcatcatccagccgtcacggttcgaaccctgcgggctgacgcagctttacgcgctgcgatacggcgcgctgcccatcgtcagccgcacgggcgggctggcggaaaccattatcgacgcgaatgacgcggccattgaagcgggcgtagcaacaggctttcaattcgagccggcgaatgaagacgatctgcgcgccgcgctggagcgtgccattagcgcctataacgaccgggaacttttccgacggcttcagacgcaggccatgcaggccaatttttcctgggacaagagtgccgcacaatatatggcgcttttcgagagccttgtcggcaacagcacgcgcgaaacggatgccgtcgccgacatcagaaccgagacttttgcaaagataagagctgataggcggctggcgggaaccccaggatcaccaacaggttag

SEQ ID NO: 94234 - protein, 509 aa, Agrobacterium tumefaciens
MRILAVTAEMFPFVKTGGLADATSALPQALERKGADVRTLLPLYRGLTPLVRGRKPVLVANILEQPVSVYYVVSDGHKLLLLEAASLFDRDGHPYGVKGEPFADNDLRFAVLSKVAAEIALGAIDGWQPDVVHVHDWHAALTCVYLADSTPSVASVLTLHNLAFQGQYPLERAGMLGLPSHLCTVDCLEYYDDMSFLKGGLTTASAVTTVSPTYAREILTPEMGMGMHGVLARRRGDLRGIVNGVDHDVWNPATDPYILANFTAATATRRSLNKYALLQALGLAPTQGPVFGVVSRLTWQKGIDLLPHVVPLIIERKGRLIVHGEGDTALEDSLQALAKRYPELVCAHIGYDERLAHMIQAGSDFIIQPSRFEPCGLTQLYALRYGALPIVSRTGGLAETIIDANDAAIEAGVATGFQFEPANEDDLRAALERAISAYNDRELFRRLQTQAMQANFSWDKSAAQYMALFESLVGNSTRETDAVADIRTETFAKIRADRRLAGTPGSPTG

SEQ ID NO: 94235 - DNA, 1419 bp, Anabaena variabilis; identical to SEQ ID NO: 52516
  CDS (1)..(1419): transl_table=11

SEQ ID NO: 94236 - protein, 472 aa, Anabaena variabilis; identical to SEQ ID NO: 52517

SEQ ID NO: 94237 - DNA, 1449 bp, Bradyrhizobium japonicum; identical to SEQ ID NO: 52518
  CDS (1)..(1449): transl_table=11

SEQ ID NO: 94238 - protein, 482 aa, Bradyrhizobium japonicum; identical to SEQ ID NO: 52519

SEQ ID NO: 94239 - DNA, 1455 bp, Geobacter metallireducens; identical to SEQ ID NO: 52520
  CDS (1)..(1455): transl_table=11

SEQ ID NO: 94240 - protein, 484 aa, Geobacter metallireducens; identical to SEQ ID NO: 52521

SEQ ID NO: 94241 - DNA, 1461 bp, Rhizobium meliloti
  CDS (1)..(1461): transl_table=11
atgcagatactgtctgtcacggccgaaatttttccgctcgtcaagaccgggggcctggcagatgtagcgggatcgctccccaaggcactcagggcccacggcatccacacgcgcagcttcgttccgggttaccccggcgtcatgcgcgcgctcagcgacgcgaccccggtcgccgagtttgaaagcctgttcggcgaacgcgccactctcatcgcggcgcgggctcacgggctggatctcttcgtgctcgatgcgccggccttctatgacaggcaaggggccctctacgtagacaggcatggccgggattatgcggacaactggaaacgcttcgccgccttctcgctggtcgcatcgcaaatcgcgcgcgggctcgttcccaactggcggccgcacatcattcacgcacatgactggcacgcggcgatgagcctcctctatctgaagtacgccggcgacgacaccattcctcgcgtcctaaccgtgcacaaccttgcgttccaggggcaattcccggcccactacttccccgagctcgggctcccggcggaagcatattcgatcgacggcgtcgaatattacggcgatatcgggttcctcaagggcggcctgcaggcagccgatgcgatcacggtcgtcagccccacctatgcgcgggaaatcatgtccccggccttcggcatggggctggaaggcgtgatgaacgaacggcatgcggatgtcgtgggcatcgtcaacggcatagacctggaagtatgggatccatcctcagatccctgcatcgagcatcactattcggcgcgcgtgccgctgcgccgcctgcccaaccggcaggtgctgctccggcatttcggcctgccggacacctgcggaccgatcttcgccagcgtcaaccggttgacatggcagaagggcatggaccttctcgctgcgaccgccggcgagattgtcaagaatggcggcaccctgatcatccatgggcaaggcgaggagaagctggaagccgcattcatggatctcatgcgacggttcccgcaaaacatcagtgtaagcatcggttatgacgagcacctcgcccacaggattcatgccggcgcggatgcaatgctcgttccgtcccggttcgagccctgcggcctcacgcagctttacgcgctacgctacggctgcgtaccggtcgtcgcccgcacgggcggcctgtcggagaccatcatcgatgccaacgatgccgcgctccatgcccatgtcgcgacgggcatacagtttgcgcccattgacgaggacggactacgccatgcactgcgccgcaccttccggctctaccggctgcgacgcgtctgggagggacttcgccgccagggcatgaaaaccgactgctcgtggcatcgcagtgcggcccgctatgcggacctttacagcgaactcctcaatcccgacatgcgcctggtcggcagcgcttga

SEQ ID NO: 94242 - protein, 486 aa, Rhizobium meliloti
MQILSVTAEIFPLVKTGGLADVAGSLPKALRAHGIHTRSFVPGYPGVMRALSDATPVAEFESLFGERATLIAARAHGLDLFVLDAPAFYDRQGALYVDRHGRDYADNWKRFAAFSLVASQIARGLVPNWRPHIIHAHDWHAAMSLLYLKYAGDDTIPRVLTVHNLAFQGQFPAHYFPELGLPAEAYSIDGVEYYGDIGFLKGGLQAADAITVVSPTYAREIMSPAFGMGLEGVMNERHADVVGIVNGIDLEVWDPSSDPCIEHHYSARVPLRRLPNRQVLLRHFGLPDTCGPIFASVNRLTWQKGMDLLAATAGEIVKNGGTLIIHGQGEEKLEAAFMDLMRRFPQNISVSIGYDEHLAHRIHAGADAMLVPSRFEPCGLTQLYALRYGCVPVVARTGGLSETIIDANDAALHAHVATGIQFAPIDEDGLRHALRRTFRLYRLRRVWEGLRRQGMKTDCSWHRSAARYADLYSELLNPDMRLVGSA

SEQ ID NO: 94243 - DNA, 1431 bp, Bacillus halodurans
  CDS (1)..(1431): transl_table=11
gtgaatgtgttacacgtcgcttcagaatgcaacccttttttcaaaacagggggacttgccgacgttctcggttcgctcccaaaagctcttataaaacaagggatcaatgtttccgtcatcctaccaaaatatggacacctctctgacgaatggcagaaccaattaacgttaaaaaaatcgttcacggtctccgtcacatggcgaaatcaatattgtggactggagcagtttgtagatcaaggagtgacctactacttcatcgataacgaatattactttaagcgggaacgcctttacggctatctcgatgaggctgaacggttcacattttttaatcatgctgttcttagctctttaccgttccttgatgaatcacctgatttaattcattgccatgattggcagtcaggtcttattcctgcctatatgaaaacgggttccgtcgaaaatcccgtaccgacggtgttcacaatccataaccttcgctatcaaggagcctttccccctgatgtttttcgcgaattgcttcactttgcgccagagcactttgctggattagagatggacggtgcgatcaattttttgaagggagcactcgtccattctgaccgggttacaacggtaagcccaacatatgctcaggaaatacaaacccctgcctttggcgaaggcttgcacggattgcttcatcaagaacgaggaaaaacaagaggtattttaaatgggattgacctggaggatttcgatccaaaaaccgatccgcatgttacgtatccttataagcacaatcaaatggaaaaacggaaaaacaaacaggtcatccaacgtctgtttgaattgccagagcgcaaggacattcctcttattgcgatggtcagccgtctcgtagaagagaaaggggtccctcttctcacccaaattgcaggtgaacttgtgacaacggaaaatgtgcagctcgccattctcggtacaggcgatccttctttagaggaccaactgcatcatctagcttctttgcatccacatcaaatttcatttaaatgtgtgtttgcggagccgctcgcgcgtaagctttatgcaggggctgatttattcatcatgccgtcccgattcgaaccgtgcggacttagccaaatgatttcccttcgctacgaaacggttccaattgttcgtgaaacaggagggttatatgacacgattcaatcctataatgaagaaataggcgaaggaaatggattcagttttactcattataacgcccatgatttcttgtatacaatcaagcgagccctccgtttttatcgtacggaaaaagagtgggaaaaccttttgcttaacatctacagctcggaagtaggatgggacgtttccgccaaacaatatacagcgctttatgaagaaatactagggaaaaggaaggtggaggcatga

SEQ ID NO: 94244 - protein, 476 aa, Bacillus halodurans
MNVLHVASECNPFFKTGGLADVLGSLPKALIKQGINVSVILPKYGHLSDEWQNQLTLKKSFTVSVTWRNQYCGLEQFVDQGVTYYFIDNEYYFKRERLYGYLDEAERFTFFNHAVLSSLPFLDESPDLIHCHDWQSGLIPAYMKTGSVENPVPTVFTIHNLRYQGAFPPDVFRELLHFAPEHFAGLEMDGAINFLKGALVHSDRVTTVSPTYAQEIQTPAFGEGLHGLLHQERGKTRGILNGIDLEDFDPKTDPHVTYPYKHNQMEKRKNKQVIQRLFELPERKDIPLIAMVSRLVEEKGVPLLTQIAGELVTTENVQLAILGTGDPSLEDQLHHLASLHPHQISFKCVFAEPLARKLYAGADLFIMPSRFEPCGLSQMISLRYETVPIVRETGGLYDTIQSYNEEIGEGNGFSFTHYNAHDFLYTIKRALRFYRTEKEWENLLLNIYSSEVGWDVSAKQYTALYEEILGKRKVEA

SEQ ID NO: 94245 - DNA, 1455 bp, Bacillus licheniformis
  CDS (1)..(1455): transl_table=11
ttgaaagtcttatttgctgtttctgaatgtgtgccgtttgttaaatcaggcgggctcgccgatgtcgccggggcgctcccgaaagagctcgcccttttaggcatagaaacggtcgtcatgatgccgaaatacagtttgattgcggaagacgtcagaagacggatggttaaaacggctgaatgcgaggttcgcgtcgggtggcgcaggcagttttgcggcattgaacaccttgaacatgacggagtttcctattattttcttgatcatgggtattattttaatcgggattccctttacggccattatgatgatggagagcggtttgcttttttctcgcgggctgttttggaagcactatacgcgctgaattttgaagctgatgtcatccatacccacgattggcacacagggatggtcaattatttattaaaagaagaatatcgaaaaaagccgttctatcagcacatgaaaagcgtatttacaattcataaccttcaatttcagggcattttcccgaaggaagcggttcatgacctgctcggacttgatatttcccatttcacgaccgaaaagctcgagttttatgggaacattaattatatgaaaggcggcattatcgccgctgatcaggtgacaacggtcagtccgacgtaccgcgatgaaatcttgactccatactacggcgagcggcttgaaggggtgctgtcagacaagaaggatgcactgacaggcattttaaacgggattgacgatgtgctgtacgaccctttaaacgatccgcacatcgattatcattacgatgccgtcaaccgggacggaaaacggaaaaataaagccgtgatccagaagacattcggtctgccggtgaatgaagacattccgctcatcagcatggtggcaaggctgacgaagcaaaaaggcttcgatttgatcaagcgggtattgcatgaactgtttgaagaagaagacatgcagctgatcgttttaggaaccggagaagcggaatttgaaaattacttccgctatatggagcatgcttttccggacaggtgcaaggcgtatatcggttttcatgaaccgctcagccgcaagatttatgccgcgagcgatcttttcctgatgccttcaaaattcgagccgtgcggtcttggacagctgattgccctcaggtacggcgcggtgccggttgtcagggaaacaggcgggcttcatgatacggtgaccgcttaccgggaaacaaccggtgaaggcaacggttttacgttcgcccattttaacgcccatgatatgaagcatacgatcaaaagagcactgtcattttatcacaggaaagaagagtggggcaggatcgttcaaaaagcgatgacacatgatgtcagctgggctttgtcagcccgtcagtatcagcggttatacagccgggagataaagggggaagcgcatgttctcaagtaa

SEQ ID NO: 94246 - protein, 484 aa, Bacillus licheniformis
MKVLFAVSECVPFVKSGGLADVAGALPKELALLGIETVVMMPKYSLIAEDVRRRMVKTAECEVRVGWRRQFCGIEHLEHDGVSYYFLDHGYYFNRDSLYGHYDDGERFAFFSRAVLEALYALNFEADVIHTHDWHTGMVNYLLKEEYRKKPFYQHMKSVFTIHNLQFQGIFPKEAVHDLLGLDISHFTTEKLEFYGNINYMKGGIIAADQVTTVSPTYRDEILTPYYGERLEGVLSDKKDALTGILNGIDDVLYDPLNDPHIDYHYDAVNRDGKRKNKAVIQKTFGLPVNEDIPLISMVARLTKQKGFDLIKRVLHELFEEEDMQLIVLGTGEAEFENYFRYMEHAFPDRCKAYIGFHEPLSRKIYAASDLFLMPSKFEPCGLGQLIALRYGAVPVVRETGGLHDTVTAYRETTGEGNGFTFAHFNAHDMKHTIKRALSFYHRKEEWGRIVQKAMTHDVSWALSARQYQRLYSREIKGEAHVLK

SEQ ID NO: 94247 - DNA, 1458 bp, Bacillus stearothermophilus; identical to SEQ ID NO: 52524
  CDS (1)..(1458): transl_table=11

SEQ ID NO: 94248 - protein, 485 aa, Bacillus stearothermophilus; identical to SEQ ID NO: 52525

SEQ ID NO: 94249 - DNA, 1455 bp, Bacillus subtilis
  CDS (1)..(1455): transl_table=11
ttgaagatattatttgctgtgtcagaatgcaccccatttgtgaaatcaggaggtcttgccgatgtagcaggtgctctgccaaaggcgcttgcgcgattaggcaatgaggtagctgtgatgctgccgaagtacagccaaatacctgaaccgtggaaaaagcgtatgaaaaaacaggctgagtgtaccgtagctgtcggctggcggcagcaatattgcggaattgaacatatggcagagaatgatgtgaattattacttcatcgacaatgagtactatttcaacagggattcgttgtacgggcattatgatgacggtgagcggtttgcctttttttcaagagctgtgctggaggctgccaaagttgtgaatgttcaagccgatattgttcatactcacgattggcatacagcgatggtcaattatttgctgaaagaggagtacagaaaacatcctttttatgaacggatgaaaagcgtgctcacgatccacaacctgcagtttcaaggcatattccctcctgatgtcacacatgacttgctgggtcttgagatggatcattttcattatgaaaggttagaatgcaacggatttgttaattttatgaaagcgggcatcattgcggctgatcatgtgacaactgtgagccccacttacagaaatgaaatcatgacgccgtattatggtgagcagttggaacaggttttgcaatatagggaagatgatgtaaccggcatattaaatggcattgatgatacgttctatcagccgaaaagcgacccttatatagaggcgcaatacgattcaggggatcttgcatgcaagctggaaaacaaaacgaagcttcagcagcggatggggcttccagagaaaaacgatattccgctgatcagtatggtgacaaggctcactaaacaaaaggggcttgatcttgtccgcagaattatgcacgaacttcttgaggagcaagacatacagctggttgtgctaggcacaggagaacgtgaatttgaagattatttccggtatgcagaatttgcttttcatgagaagtgccgggcttatatcgggtttgatgagccgctagcccatcaaatttatgcgggctctgatatgtttttgatgccgtcgaaatttgagccgtgcggtttggggcagctcattgctcttcaatatggcgccattccgattgtcagggaaacgggcggtctttacgacactgtccgtgcctatcaggaggaagagggaacgggcaatggctttacgttttccgcctttaatgcgcatgatctgaaatttacgatagaaagggcgctgtcgttttattgccaacaggatgtatggaagagcatcgtgaagaccgctatgaatgcagattacagctgggggaagtcggctaaagagtatcagcgtattttcgagcaggtgacaaggagtggacgggatgttctcgagtaa

SEQ ID NO: 94250 - protein, 484 aa, Bacillus subtilis
MKILFAVSECTPFVKSGGLADVAGALPKALARLGNEVAVMLPKYSQIPEPWKKRMKKQAECTVAVGWRQQYCGIEHMAENDVNYYFIDNEYYFNRDSLYGHYDDGERFAFFSRAVLEAAKVVNVQADIVHTHDWHTAMVNYLLKEEYRKHPFYERMKSVLTIHNLQFQGIFPPDVTHDLLGLEMDHFHYERLECNGFVNFMKAGIIAADHVTTVSPTYRNEIMTPYYGEQLEQVLQYREDDVTGILNGIDDTFYQPKSDPYIEAQYDSGDLACKLENKTKLQQRMGLPEKNDIPLISMVTRLTKQKGLDLVRRIMHELLEEQDIQLVVLGTGEREFEDYFRYAEFAFHEKCRAYIGFDEPLAHQIYAGSDMFLMPSKFEPCGLGQLIALQYGAIPIVRETGGLYDTVRAYQEEEGTGNGFTFSAFNAHDLKFTIERALSFYCQQDVWKSIVKTAMNADYSWGKSAKEYQRIFEQVTRSGRDVLE

SEQ ID NO: 94251 - DNA, 1467 bp, Chlorobium tepidum
  CDS (1)..(1467): transl_table=11
atggccagaagaaattttaaggttctttatgtctctggcgagagttctccttttgtaagggtcagttctctggccgactacatggcatcattcccccaggcgctcgaagaggagggtttcgaggccagaatcatgatgcccaaatatggtatcatcaacgaccggaagttccgtttgcatgatgtgctcaggctgtcggacattgaagtccctctcaaggacaagaccgacatgctgcacataaaggttaccgccctcccgtcaagcaagattcaaacctatttcctctataacgagaaatatttcaagcgctacgggcttttctccgacatttcgctcggaggagaccacaagggcagcgcggagcgaatcatctttttcagcgtcggcgtcatggagacgctcgtgcgcctgggctggcagcccgacattatccactgccatgactggcacgccggtctggtggcgctgctcgccaagacgcgatacgccaaacacgacttcttcaaaaaggtgaaggttgtgcagaccattcataatgtttaccgccagggcgtttttccgtcgaaggcgttccagaagcatctcgacccggaggtgtgcgacgcgctcgacatggagggcggcgaggtcaacctgctggctaccggcatcaagcacgccgatctggtcaccaccacctcggatcgctacgcccgccagcttctcgatgatccggagctttcgttcggcatggacaaggcgctgaaggcgtgcggcgaccgtttccacggtattctcaacggcatggacactcgccagtggaatccatcctcggacaagctcatcaagaagcgctacagcgccgaacagccggagatgaaactcgaggacaagaaggtgctgctcgaagaggttggtctgccattttccgaagagacgccggttgtcggcgtgatcggaagcttcgatcaataccagggcgcggagatcgtcaaggcaagcctcgcgaagctgcttgagctcgacattcagctcatcgtgttcggttcgggcgacaaggagttcgaccaggcgctcaaggagaccgcggaggaaaacgaggagaagatggccttccggcccgaattcactgatgcgttttaccaccagatgatcgccggacttgacattttgctcatgacctcccgcatcgaggcgtgcggcatgatgcagatgtttgccatgaactacggcaccgtgccggttgcctacgcgggcggcggcattgtcgataccatcgaggaggtctccggcgacaagggtaccggcttcatctttaccgactacacgcccgaggcgctgacggcgaagttgcaggaggcgctggcactgtttgccaacagggagcgctggagcgcgctcatgctcgaatgcatggggcgcgatttttcgtggagcacgtcggcggggcagtatgccgagctctaccgaaatctgcttggctga

SEQ ID NO: 94252 - protein, 488 aa, Chlorobium tepidum
MARRNFKVLYVSGESSPFVRVSSLADYMASFPQALEEEGFEARIMMPKYGIINDRKFRLHDVLRLSDIEVPLKDKTDMLHIKVTALPSSKIQTYFLYNEKYFKRYGLFSDISLGGDHKGSAERIIFFSVGVMETLVRLGWQPDIIHCHDWHAGLVALLAKTRYAKHDFFKKVKVVQTIHNVYRQGVFPSKAFQKHLDPEVCDALDMEGGEVNLLATGIKHADLVTTTSDRYARQLLDDPELSFGMDKALKACGDRFHGILNGMDTRQWNPSSDKLIKKRYSAEQPEMKLEDKKVLLEEVGLPFSEETPVVGVIGSFDQYQGAEIVKASLAKLLELDIQLIVFGSGDKEFDQALKETAEENEEKMAFRPEFTDAFYHQMIAGLDILLMTSRIEACGMMQMFAMNYGTVPVAYAGGGIVDTIEEVSGDKGTGFIFTDYTPEALTAKLQEALALFANRERWSALMLECMGRDFSWSTSAGQYAELYRNLLG

SEQ ID NO: 94253 - DNA, 1425 bp, Chlamydia trachomatis
  CDS (1)..(1425): transl_table=11
atgaaaattattcacacagctatcgaatttgctccggtaatcaaagccggaggcctgggagacgcgctatacggactagcaaaagctttagccgctaatcacacaacggaagtggtaatccctttataccctaaattatttactttgcccaaagaacaagatctttgctcgatccaaaaattatcttatttttttgctggagagcaagaagcaactgctttctcctacttttatgaaggaattaaagtaactctattcaaactcgacacacagccagagttattcgagaatgcggaaacaatctacacaagcgatgatgccttccgtttttgcgctttttctgctgctgcggcctcctacatccaaaaagaaggagccaatatcgttcatttacacgattggcatacaggattagttgctggactactcaaacaacagccctgctctcaattacaaaagattgttcttaccctacataattttggttatcgaggctatacaacacgagaaatattagaagcctcctctttgaatgaattttatatcagccagtaccaactatttcgcgatccacaaacttgtgtgttgctaaaaggagctttatactgttcagatttcgtgactacggtttctcctacatacgccaaagaaattcttgaagattattccgattacgaaattcacgatgccattactgctagacaacatcatctccgcgggattttaaatggaatcgacacgacaatttgggggcctgaaacggatcccaatttagcgaaaaactacactaaagagcttttcgagaccccttcaattttttttgaagctaaagccgagaataaaaaagccttgtacgaaagattaggcctctctttagaacactctccttgcgtgtgcattatttctagaattgctgagcagaaaggtcctcactttatgaaacaggccattctccatgcactagaaaacgcttacacgctcattattataggtacctgctacgggaatcaattgcatgaagaatttgcaaatcttcaagaatcattagcgaattcccctgatgtaaggattcttttgacttatagtgatgtgctggcacgacaaattttcgccgctgcagatatgatctgcattccttctatgtttgaaccatgtggactcacacaaatgattggaatgcgttacgggactgtaccgttagtaagagctacaggaggactagcagatactgtagcaaatggaatcaatggattttccttctttaatccgcatgacttctatgaattccgaaacatgctttcggaagcagtgacaacctaccgtaccaaccacgacaagtggcaacatattgtacgtgcttgtctagatttttcttcagacctagaaactgccgccaataaatatttagaaatttataaacaataa

SEQ ID NO: 94254 - protein, 474 aa, Chlamydia trachomatis
MKIIHTAIEFAPVIKAGGLGDALYGLAKALAANHTTEVVIPLYPKLFTLPKEQDLCSIQKLSYFFAGEQEATAFSYFYEGIKVTLFKLDTQPELFENAETIYTSDDAFRFCAFSAAAASYIQKEGANIVHLHDWHTGLVAGLLKQQPCSQLQKIVLTLHNFGYRGYTTREILEASSLNEFYISQYQLFRDPQTCVLLKGALYCSDFVTTVSPTYAKEILEDYSDYEIHDAITARQHHLRGILNGIDTTIWGPETDPNLAKNYTKELFETPSIFFEAKAENKKALYERLGLSLEHSPCVCIISRIAEQKGPHFMKQAILHALENAYTLIIIGTCYGNQLHEEFANLQESLANSPDVRILLTYSDVLARQIFAAADMICIPSMFEPCGLTQMIGMRYGTVPLVRATGGLADTVANGINGFSFFNPHDFYEFRNMLSEAVTTYRTNHDKWQHIVRACLDFSSDLETAANKYLEIYKQ

SEQ ID NO: 94255 - DNA, 1434 bp, Clostridium acetobutylicum
  CDS (1)..(1434): transl_table=11
ttgaaaattttatttgcttcttctgaaagttatccttttataaaaacaggtgggcttggtgatgtatcctatgcccttcctaaagctttaagaaaaataggaattgatgcaagagtaataattccaaaatattcagatatacctgaatactttagatataatactcaccatattgcaagttttggtgttccagttggctggaggagtcagtatggaggccttgaatactatgaatacgatggagttcctttttacttcatagataacgactactatttcaaaagatctggactttatggatactatgatgatggagaacgcttcgcctatttttcaagaggagtacttcaagccataacttatatgcaggactttaatccagatattattcaatgcaacgattggcaaacagcgataatacctgttcttcttaaagatcattatcgaaattacagaaactataatcatataaaaactatatttacaatacacaatctaaaatatcaaggtgtttttggaaaatcagtacttggagagcttttgtgtttaaatgaaggctattataacgaaaatgcattaaagttttacgatggtatttcctttatgaaaggcggtattttattttcagataaactttcaactgtaagcagaacttatgctgaagaaattaaagacccttattatggagaacatcttgatggcttacttagaagtcgttcttatgacttatggggtattgtaaatggaattgattacgatatattaaatcctgaaacagacaaagacttgttttttaattttgattcttcaaccttgtataataaaacaaaaaataaaatagagcttcaaaaaatgctgaatttacctgtgtcagaaaatataccaatgataggtatagtctctagacttgtaagtcaaaaaggtttagatttaatttcctgcgttttagaagacttacttcaagatggaatacaacttgtagtacttggtactggtgatgctaaatatgaaaatatgtttaaatatttcgcatggaagtacccaaataaactatctgcaaatattcaattcaataacagcttagctcaaaaaatatatggtgcatccgatatgttcttaatgccttcaaaattcgaaccttgtggtataggacaattaatagctcttagatacggtagtctccctatagtacgtgagacaggaggtcttaaagacactgtaagaccttttaatccaataacaggtgaaggaaatggtttctcttttaccaattataatgcacatgatatgctgcatgttataagaaatgcagaatatttctattacaacgaaaaatacaattggaataagcttgtacaaactgcaatgaatgatgataacagttggagtaaatcagcagaaatttacagaaatttgtacatgtcagtactttaa

SEQ ID NO: 94256 - protein, 477 aa, Clostridium acetobutylicum
MKILFASSESYPFIKTGGLGDVSYALPKALRKIGIDARVIIPKYSDIPEYFRYNTHHIASFGVPVGWRSQYGGLEYYEYDGVPFYFIDNDYYFKRSGLYGYYDDGERFAYFSRGVLQAITYMQDFNPDIIQCNDWQTAIIPVLLKDHYRNYRNYNHIKTIFTIHNLKYQGVFGKSVLGELLCLNEGYYNENALKFYDGISFMKGGILFSDKLSTVSRTYAEEIKDPYYGEHLDGLLRSRSYDLWGIVNGIDYDILNPETDKDLFFNFDSSTLYNKTKNKIELQKMLNLPVSENIPMIGIVSRLVSQKGLDLISCVLEDLLQDGIQLVVLGTGDAKYENMFKYFAWKYPNKLSANIQFNNSLAQKIYGASDMFLMPSKFEPCGIGQLIALRYGSLPIVRETGGLKDTVRPFNPITGEGNGFSFTNYNAHDMLHVIRNAEYFYYNEKYNWNKLVQTAMNDDNSWSKSAEIYRNLYMSVL

SEQ ID NO: 94257 - DNA, 1458 bp, Dechloromonas aromatica; identical to SEQ ID NO: 52532
  CDS (1)..(1458): transl_table=11

SEQ ID NO: 94258 - protein, 485 aa, Dechloromonas aromatica; identical to SEQ ID NO: 52533

SEQ ID NO: 94259 - DNA, 1470 bp, Desulfovibrio vulgaris
  CDS (1)..(1470): transl_table=11
atgcaacggcaggtcgtgttcgccacatcggagatgtaccccttctccaaaagcggggggctgggcgatgtgcttggtgcgctgccccttgccctgcaccgcatgggcgtgcccacggcggtggtgacacccttctatggcagattgcgaacggcggactatcccatccggctgacggtctccgactgccatgtgggctacccgtgggcccccatcacctgcgacgtcttcgaggccgactatcatggcatgccggtctacttcatccaccggggcgagtatttcgacaggcgttactactacaacgaccacaagggcgactacttcgacaactgcgaacgcttcgtcttcttctgccgcgcgctgctggcgctgatgcgccgtctggggcagcccccggcagtgctgcacgcccacgactggcagacggcacttgtgcccgcctttctctacttcctgcggcagaccgacccgttctggcaggatacgcgcagtgtgctcaccatacacaacctcgccttccaggggcgtttcgcctcgcgtcttttcgagacttcgggcctgcccccgcaggcatggagcgtggacggcgcggaattctggggcgacttcaacctgctcaaggcgggcatcgcctatgccgacaaggtgaccacggtcagccccagctatgcgcgtgagattctcggccccgcctatggcagcggtctcgacggtatcctgcggaagcgtgcccacgccctgcacggcatcctcaacggtgcggactacgacatctggtcgcccggcaacgaccgcttcctcccctgccgctatacgcccacggaccttgcaggaaaggcgcagtgcaagcgcgccctcatcgaagaactcggcctcgacccgcaccttgccaggcgtcccatcctcggcttcatcggcagactgcgcgggcagaaggggatagacctgctgctcgacatcctgccccgcctcatggagagcgacgtcggggtcatcatcctcggcgagggcaatctgacccatgaggcgcgggcccttgagctgatggaggcctaccggggccgggtgtgcaccatcgtcagctacaccgaagacctcgcccaccgcatccaggcgggcagcgacatctttctcatgccgtcgcggtacgaaccgtgcggcctcacccagatgtacgccctgcgctacggcacaccgcccgtggccacggccgtgggcgggctgcgcgacaccatcgtcccgtggccctcgccggagagcacgggcttcaccttcggccggtgcgagtccgcggcctttctgcgggccatcctcgatgcggtgcacctgtggaccacggcccccggcgactggcagggcatggtgcgacgcgccatggcacaggccttcacctgggaacgcgccggacgcgcctacctcgacctttacgcccaactgggggtctcccccggtgaggagggcgcgtga

SEQ ID NO: 94260 - protein, 489 aa, Desulfovibrio vulgaris
MQRQVVFATSEMYPFSKSGGLGDVLGALPLALHRMGVPTAVVTPFYGRLRTADYPIRLTVSDCHVGYPWAPITCDVFEADYHGMPVYFIHRGEYFDRRYYYNDHKGDYFDNCERFVFFCRALLALMRRLGQPPAVLHAHDWQTALVPAFLYFLRQTDPFWQDTRSVLTIHNLAFQGRFASRLFETSGLPPQAWSVDGAEFWGDFNLLKAGIAYADKVTTVSPSYAREILGPAYGSGLDGILRKRAHALHGILNGADYDIWSPGNDRFLPCRYTPTDLAGKAQCKRALIEELGLDPHLARRPILGFIGRLRGQKGIDLLLDILPRLMESDVGVIILGEGNLTHEARALELMEAYRGRVCTIVSYTEDLAHRIQAGSDIFLMPSRYEPCGLTQMYALRYGTPPVATAVGGLRDTIVPWPSPESTGFTFGRCESAAFLRAILDAVHLWTTAPGDWQGMVRRAMAQAFTWERAGRAYLDLYAQLGVSPGEEGA

SEQ ID NO: 94261 - DNA, 1386 bp, Fusobacterium nucleatum subsp
  CDS (1)..(1386): transl_table=11
atgaaagttctttttgcaacaggagaagcttttccatttgttaaaacaggggggttaggagatgtgtcttattctctcccaaaaaccttaaaacaaaaggaaaatgttgatattagagttattttacctaagtatagtaaaatttcaaatgaattattaaaagatgctaggcacttaggacataaggaaatttgggttgcacatcataatgaatatgtaggaattgaagaggttgaactggaaggagttatttactattttgtagataatgaaagatattttaaaagacctaatgtttatggtgaatttgatgactgtgaaagatttttatttttctgcaaagcagttgttgaaactatggatatcacaaaatttaaacctgatatcattcattgtaatgattggcaatcagctcttatacctatatatttaaaggaaagaggaatatatgatgtaaaaactatttttactattcataatcttagatttcaaggttttttctttaataatgtaatagaagatttattagaaattgatagggcaaaatatttccaagaagatggtttaaaatattacgatatgatttctttcttaaaaggaggagttgtttattctgattatattacaacagtgagtgatagttatgctgaagaaataaaaactcaagagcttggtgaaggtatacatggattatttcaaaaatatgattataaattatcaggaatagtcaatggaattgataaaatttcatatccattatctaaaaaacctcataaaatattaaaggctgatttacaaaaaaaattaggtttagatgtagaagaggatacacctttaattgttattataactcgtttagatagacaaaagggcctagattatattgttgaaaaatttgatgaaatgatgagtttaggaatacaattcattcttttaggaacaggtgaaaaacgttatgaacatttctttgcttatcaagaatatctccataaaggacaagtatgttcatacattggttttaatcaagaattatctactgaaatctatgcaggagcagatatatttttaatgccttctgtttttgagccttgtggactttctcaaatgatagcaatgagatatggttgtatacctgttgttagagaaacaggaggcttaaaagatactgtaaaaccatataatgagtatacaggtgaaggagatggctttggttttaaacaagctaatgctgatgatatgataaaaactttaaaatatgcaattaaaatgtatcatagacctaatgtatggcaagagattattaagaatgctaagaaaagagataactcttgggataaacctgcaaagagatataaggaattataccaaaggttgatagaaggataa

SEQ ID NO: 94262 - protein, 461 aa, Fusobacterium nucleatum subsp
MKVLFATGEAFPFVKTGGLGDVSYSLPKTLKQKENVDIRVILPKYSKISNELLKDARHLGHKEIWVAHHNEYVGIEEVELEGVIYYFVDNERYFKRPNVYGEFDDCERFLFFCKAVVETMDITKFKPDIIHCNDWQSALIPIYLKERGIYDVKTIFTIHNLRFQGFFFNNVIEDLLEIDRAKYFQEDGLKYYDMISFLKGGVVYSDYITTVSDSYAEEIKTQELGEGIHGLFQKYDYKLSGIVNGIDKISYPLSKKPHKILKADLQKKLGLDVEEDTPLIVIITRLDRQKGLDYIVEKFDEMMSLGIQFILLGTGEKRYEHFFAYQEYLHKGQVCSYIGFNQELSTEIYAGADIFLMPSVFEPCGLSQMIAMRYGCIPVVRETGGLKDTVKPYNEYTGEGDGFGFKQANADDMIKTLKYAIKMYHRPNVWQEIIKNAKKRDNSWDKPAKRYKELYQRLIEG

SEQ ID NO: 94263 - DNA, 1431 bp, Haemophilus influenzae
  CDS (1)..(1431): transl_table=11
atgaaaatactacacgtttgttcggaactctatccgctcttaaaaacaggcgggcttgccgatgttttaggggcattaccccaagcacagaaccaaattgggctagatgctcgcgttttattgcctgcttatcccgcaattatagcaggcattcagaatactcaagtggttgccgaatttgacaacttcgctgggcacgtggtgttgcgttatggagaatataatggtgtcgggatctatttgattgacgcaccgcacttatacggtcgcgaaggcaatccttatcacgatgcctattacaacgactacggcgacaactacaaacgttttgctttgctcggttgggtgggggcagaattagccacaggtttagatagctggtggcgtgcagaagtggtacacgctcatgattggcacgcaggtttgtgtgcagcatatctgttcaacaaaggtcgccctgcgaaatcggtgttcaccattcacaacttggcatatcaagggcagttttcttatcatcatttgtatgaaatcggcttgccgacagggatgttccacgtagaaggcttggaattatttgggcagatttcttacttgaaatcaggtttgttctattctgatgcaagcacggcagttagcccaacttatgcagaagaaatcacgacaccagaatttgcctacggtttgcaaggcttgctttctggcttaaaagctcaaggtcgtttggtggggattttaaatggtgtggacgaaaatatttggcatccgaacgtggatcaatacattccgcaccattacaagctcaaatatatggcaggcaaaaagaaaaacaaagccgaactgcaagcctatttcaatttgccacaagatgaatctgccttggcatttgtgatggttacccgtttaaccgagcaaaaaggtgttgatttattaatcgaaagtgcagacgaaatcgtcaaacaaggcggtcagttgatgattttaggttcaggtgcaccgcactttgaacaaggtattcgtgagcttgctgaacgttatccgcaaaatattgcggtaaaaatcggctacgatgaagccctttcgcatttaatggtggcaggtggcgatgtgattttagtgccaagtcgtttcgagccttgtggcttaacccaactttatggtttgcaatatggcacactgccacttgttcgtaaaacaggtggtttagcggatacggtggtggatagcacttcagaaagcatcaaagctcgcaccgcaacaggttttgtgtttgaaagtgcaacgcctgaagctctccgccattgcttgcaacgtgcctttgccttatggcaaaaaccgcgtgcatgggcgatggttcgtacagatgcaatggaacaagacttcagctggcgtaaggctgcagagcaatatagaacactttatgaacgcttgtag

SEQ ID NO: 94264 - protein, 476 aa, Haemophilus influenzae
MKILHVCSELYPLLKTGGLADVLGALPQAQNQIGLDARVLLPAYPAIIAGIQNTQVVAEFDNFAGHVVLRYGEYNGVGIYLIDAPHLYGREGNPYHDAYYNDYGDNYKRFALLGWVGAELATGLDSWWRAEVVHAHDWHAGLCAAYLFNKGRPAKSVFTIHNLAYQGQFSYHHLYEIGLPTGMFHVEGLELFGQISYLKSGLFYSDASTAVSPTYAEEITTPEFAYGLQGLLSGLKAQGRLVGILNGVDENIWHPNVDQYIPHHYKLKYMAGKKKNKAELQAYFNLPQDESALAFVMVTRLTEQKGVDLLIESADEIVKQGGQLMILGSGAPHFEQGIRELAERYPQNIAVKIGYDEALSHLMVAGGDVILVPSRFEPCGLTQLYGLQYGTLPLVRKTGGLADTVVDSTSESIKARTATGFVFESATPEALRHCLQRAFALWQKPRAWAMVRTDAMEQDFSWRKAAEQYRTLYERL

SEQ ID NO: 94265 - DNA, 1431 bp, Lactobacillus acidophilus
  CDS (1)..(1431): transl_table=11
gtgcgagttttatttactggtgctgaatgtgcaccttttttcaaaactgggggattgggcgatgtattaggctctttgcctaaccaattagctaaagaaggtgttgatgttggtgtcgtccttcctttgtatcaagatttaccagaaaagtatcgtaaaaatttaaaatatcaaggtaactttattgtgccagtaggttggcgtaatcaatattgtggaatttttactttgaaattaaatggtgtgaattacttctttattgataatgaatattattttaagcgtccgggaatttatggttattatgatgatggcgaaagatatgcttatttccaacaagcagtcatcatgatgatggagcgttttgattttattccggatgtgttgcattgcaatgattatcacactgcatttattccatttttactccatgaaaaatggggctttgtcgatgcatataaagggattaaaacaattttaactattcataacttagagtttcaggggaaatataatgcaaaaactttaccggatttctttggtatgaattacgactggtttgatagtggtattgtccgaatggataatgatgttaactggatgaaaaccggcattttatatgcagaccgtgtaactacggttagtccatcttatgctcgtgaaattcaaactgttgaattcggacaaggcttagatgcgattttaagaatgtgttcacataagttaactggtattttaaatgggattgattttgaaaaatataatcccaagactgatcccgtaattaagaaaaattatgatgtttatcatttacatcataaatcaaaggataaaatagcacttcaaaaagaattagatttgccaattaagccaaatattcctttaattggtatggtttcacgtttaactgcacaaaagggctgtcaattattgcttgacgagttagataatattttgcaatttaatgttcagattgtaattttaggtaatggtgatccatattatgaacatcgtctaatggaaattgctgagcgttatccagataaactaaaggttattttagcgtttgatgttaaattggctcaaagaatttatgctggagcagatagtttcttaatgccttctgcgtttgaaccgtgtggactttcacagctaattgcattgcgttatggtactttaccaattgttcatgaaattggtgggttagcagatactgtttgggtatatgatgagactaccaatgaaggtactggctttggctttaaggaatttagtggttatcaaatggtacaagcaataaagaaaatgttagcgttgtatcaacaaaagaataattggcttaaaatacaaaaaatagccatgaaatcggacttttcatggaaaaattctgctgataagtataagtggatgtatggagagttaattgggtaa

SEQ ID NO: 94266 - protein, 476 aa, Lactobacillus acidophilus
MRVLFTGAECAPFFKTGGLGDVLGSLPNQLAKEGVDVGVVLPLYQDLPEKYRKNLKYQGNFIVPVGWRNQYCGIFTLKLNGVNYFFIDNEYYFKRPGIYGYYDDGERYAYFQQAVIMMMERFDFIPDVLHCNDYHTAFIPFLLHEKWGFVDAYKGIKTILTIHNLEFQGKYNAKTLPDFFGMNYDWFDSGIVRMDNDVNWMKTGILYADRVTTVSPSYAREIQTVEFGQGLDAILRMCSHKLTGILNGIDFEKYNPKTDPVIKKNYDVYHLHHKSKDKIALQKELDLPIKPNIPLIGMVSRLTAQKGCQLLLDELDNILQFNVQIVILGNGDPYYEHRLMEIAERYPDKLKVILAFDVKLAQRIYAGADSFLMPSAFEPCGLSQLIALRYGTLPIVHEIGGLADTVWVYDETTNEGTGFGFKEFSGYQMVQAIKKMLALYQQKNNWLKIQKIAMKSDFSWKNSADKYKWMYGELIG

SEQ ID NO: 94267 - DNA, 1440 bp, Lactobacillus plantarum; identical to SEQ ID NO: 52534
  CDS (1)..(1440): transl_table=11

SEQ ID NO: 94268 - protein, 479 aa, Lactobacillus plantarum; identical to SEQ ID NO: 52535

SEQ ID NO: 94269 - DNA, 1434 bp, Mannheimia succiniciproducens
  CDS (1)..(1434): transl_table=11
atgaaagtattacatgtttgttccgaactttatcctttgttaaaaaccggcgggcttgcagatgtgctgggcgcattacctgcggcacaaaaagaaataggtcttgacgctcgaattttaattcctgcatatcccgcgatttcagccggcattcccgataccggcgtagtggcggaatttcataattccgctgccggtcatgtagtgttgcgctacggtgaatttaacggtgtcggcgtatatttaattgatgcgccaaacttatatgcccgcgaaggtaatccttatcatgaccaatggtataacgattatgccgacaactataaacgttttgccttattaggttgggttggagcggagcttgccaccggtttagacccttggtggatggcggaagtggtgcatgctcatgactggcacgccggcttaaccagcgcttatttggcgtataaaggccgcccggcaaaatcggtatttaccattcataacctggcttatcagggcttgtttgcttatcatcatttatttgaaatcggcttgcctacatccatgttcaacgtgaacggcttggagttttacggtcagatttcttatttaaaagcggggctttattattctgatgcggtcacagccgtcagtccgacttacgccagagaaattaccactcccgaatttgcttacggttttgaaggtttattgtcaaccttgcacagtcaaggcaaattagtgggaattttaaacggcgtggatgacaacatttggaatccgaatacggacggttatattcaggatcattacaaattaaaatccatgaccggcaaaaagaaaaacaaagccgcgttgcaagcgcatttcaatttgccggaaaaaccggatgcgctgttgtttgtgatgatcacgcgtttaaccgaacaaaaaggcgtggatttgcttattcaaagtgccgaaaatattatcaaacaaggcggacaacttgccttattgggttccggtgcgccttctcttgaatccgctttattggggcttgcccacaaacatccgaaaaatattgcggtgaaaatcggttatgatgagcctttatctcatttaatggttgcaggcggcgatgtgattctggtgcctagccgttttgaaccttgcggattaacccagctttacggcttgaaatacggcactctgccgttggttcgccaaaccggcggtttagccgacaccgtagtggacagcacggcggaaaatattaaagaacgtcgtgcaacgggctttgtgtttaatgaggcaaactcacaagcattaagccatgctatttcccgcgcattttccctttggaaaaaacaacgtacctggtttaccgtgcggacggttgccatggagcaggatttcagctggcaaatttccgcccgtcgttacgaagaactatatcgacgtatttag

SEQ ID NO: 94270 - protein, 477 aa, Mannheimia succiniciproducens
MKVLHVCSELYPLLKTGGLADVLGALPAAQKEIGLDARILIPAYPAISAGIPDTGVVAEFHNSAAGHVVLRYGEFNGVGVYLIDAPNLYAREGNPYHDQWYNDYADNYKRFALLGWVGAELATGLDPWWMAEVVHAHDWHAGLTSAYLAYKGRPAKSVFTIHNLAYQGLFAYHHLFEIGLPTSMFNVNGLEFYGQISYLKAGLYYSDAVTAVSPTYAREITTPEFAYGFEGLLSTLHSQGKLVGILNGVDDNIWNPNTDGYIQDHYKLKSMTGKKKNKAALQAHFNLPEKPDALLFVMITRLTEQKGVDLLIQSAENIIKQGGQLALLGSGAPSLESALLGLAHKHPKNIAVKIGYDEPLSHLMVAGGDVILVPSRFEPCGLTQLYGLKYGTLPLVRQTGGLADTVVDSTAENIKERRATGFVFNEANSQALSHAISRAFSLWKKQRTWFTVRTVAMEQDFSWQISARRYEELYRRI

SEQ ID NO: 94271 - DNA, 1464 bp, Moorella thermoacetica; identical to SEQ ID NO: 52536
  CDS (1)..(1464): transl_table=11

SEQ ID NO: 94272 - protein, 487 aa, Moorella thermoacetica; identical to SEQ ID NO: 52537

SEQ ID NO: 94273 - DNA, 1488 bp, Nitrosomonas europaea; identical to SEQ ID NO: 52538
  CDS (1)..(1488): transl_table=11

SEQ ID NO: 94274 - protein, 495 aa, Nitrosomonas europaea; identical to SEQ ID NO: 52539

SEQ ID NO: 94275 - DNA, 1458 bp, Novosphingobium aromaticivorans; identical to SEQ ID NO: 52540
  CDS (1)..(1458): transl_table=11

SEQ ID NO: 94276 - protein, 485 aa, Novosphingobium aromaticivorans; identical to SEQ ID NO: 52541

SEQ ID NO: 94277 - DNA, 1434 bp, Oceanobacillus iheyensis; identical to SEQ ID NO: 52542
  CDS (1)..(1434): transl_table=11

SEQ ID NO: 94278 - protein, 477 aa, Oceanobacillus iheyensis; identical to SEQ ID NO: 52543

SEQ ID NO: 94279 - DNA, 1503 bp, Protochlamydia amoebophila
  CDS (1)..(1503): transl_table=11
atgcacatcattcatatagcctcagaacttgcccctttagccaaagttggaggattagcagacgttgttctaggtctttgccgtgagttatcttggaaagggcatgatgttgacatcattattcctaagtatgattgcatggatagcgagcaaatccgagacctgacagtggattattttgaactcccctcattttataatggagaatggtttttcaatacagtttggatgggatgggtggaaaatttaaaagtttattttattgaaccccatcaccctcgcttcttttttaatcgcggctgcttttatggttgtgaagatgatctcgaacgtttcttatacttttctcgtacagctctagagtttttgtataaaaagtctatcttgccggatattattcatctccatgattggcaaacagctgttattgctcctctgtacaaagacatgtatcaaaagcttgggtacacaaaaccaaaaatattgtttacaattcacaacatggaatatcagggaaaatgtgcagcacatgatttgaattacattggcctcgatggcaatcgatatcaacaacatagttttatgcaagacaatctctaccctcatttaattaatttgctcaagggcggcatcgtttattcagatttcgtaaccactgtatctcctaattatgcaaaagaggttttaacaccgaaggaaggaagaggacttgaagccaccttagtagaatatcagcataaattcaaagggattttaaatggaattgactactcttattggaatccagaaattgatcgatttttgcccgctcattattctttaagagaaatgcctaaaaataaaaaagatcgaaatactgttgataaaaaaggttttatcaaaaaaattttaagagaaaaactttatttggccgaggaacatagacctattattggatgcataactagacttgtcccacaaaaaggaatcgatttgattaaacatacgattagacatatcgttgaaaaaaaaggacagtttatcttactaggctcaagtcctatccctagtattaatgatgaatttcatcgtttaaagcatcaatacaccgaccatccacatattcacttaattttgcatcatagcgaagaacttgctcatctcatttatgcgggctctgacatgtttattgttccctcactttttgaaccttgcggccttacacaaatcattgctcttaaatatggcactgttcccattgttcgtcgcacaggaggattagctgacacaattatcgacgtcgatcatacagatcaacaacctgataaaaaaaatggatatgtttttgacgatccagatgctaatggaatagattctgccatcgaccgcgccattcattgttggtttgaagaacctgaaaaatggcgtcagttgatgcttaatggaatgaaaatggattttagctggaatcaatcttcagattgttatctgaaaatttatcaagctatctcagcaaaaaattaa

SEQ ID NO: 94280 - protein, 500 aa, Protochlamydia amoebophila
MHIIHIASELAPLAKVGGLADVVLGLCRELSWKGHDVDIIIPKYDCMDSEQIRDLTVDYFELPSFYNGEWFFNTVWMGWVENLKVYFIEPHHPRFFFNRGCFYGCEDDLERFLYFSRTALEFLYKKSILPDIIHLHDWQTAVIAPLYKDMYQKLGYTKPKILFTIHNMEYQGKCAAHDLNYIGLDGNRYQQHSFMQDNLYPHLINLLKGGIVYSDFVTTVSPNYAKEVLTPKEGRGLEATLVEYQHKFKGILNGIDYSYWNPEIDRFLPAHYSLREMPKNKKDRNTVDKKGFIKKILREKLYLAEEHRPIIGCITRLVPQKGIDLIKHTIRHIVEKKGQFILLGSSPIPSINDEFHRLKHQYTDHPHIHLILHHSEELAHLIYAGSDMFIVPSLFEPCGLTQIIALKYGTVPIVRRTGGLADTIIDVDHTDQQPDKKNGYVFDDPDANGIDSAIDRAIHCWFEEPEKWRQLMLNGMKMDFSWNQSSDCYLKIYQAISAKN

SEQ ID NO: 94281 - DNA, 1443 bp, Pasteurella multocida; identical to SEQ ID NO: 52544
  CDS (1)..(1443): transl_table=11

SEQ ID NO: 94282 - protein, 480 aa, Pasteurella multocida; identical to SEQ ID NO: 52545

SEQ ID NO: 94283 - DNA, 1506 bp, Prochlorococcus marinus; identical to SEQ ID NO: 52546
  CDS (1)..(1506): transl_table=11

SEQ ID NO: 94284 - protein, 501 aa, Prochlorococcus marinus; identical to SEQ ID NO: 52547

SEQ ID NO: 94285 - DNA, 1500 bp, Prochlorococcus marinus; identical to SEQ ID NO: 52548
  CDS (1)..(1500): transl_table=11

SEQ ID NO: 94286 - protein, 499 aa, Prochlorococcus marinus; identical to SEQ ID NO: 52549

SEQ ID NO: 94287 - DNA, 1452 bp, Prochlorococcus marinus subsp
  CDS (1)..(1452): transl_table=11
atgagaattcttcttgctgctgctgaatgcgctccaatgatcaaagttggagggatgggagatgtagttggttcattaccaccctcattgataaaacttggtcatgatgtaagagttataattcctggctatagcaaattatggaatctactagaagtatcaagcgaaccagtatttagagcaaatactatgggaaatgatttctctgtgtatgaagcaaaacatccaatacataattacgtaatctacctagttggacatccaacttttgattcgggccacatatatggaggagaagatgaagactggcgatttacattttttgcaagtgctactgctgaattttcctggaattgttggaagccccaagttctacattgccatgattggcacacgggtatgattccagtatggatgcatcaagatcccgaagtaagtacagtttttactatacataatttaaaatatcaaggaccatggagatggaagcttgaaaaaatgacctggtgtccatggtatatgcatggagatcatacgatggctgctgcaatgttatatgcagatagagttaatgcagtttctccaacatatgctgatgagataaaaactcatgagtatggagaaagtcttgagggattattgaattatatttctggtaaattaagaggtatcctcaatgggattgatctaaatgaatgggatcctgataaagataaagtgttacctgcacaattcaatattaaaaatttagaaagtagattagaaaataagattattcttcagaaagaaatgggacttgaggtcaatagtaaaaaatatcttttaggtatggtaagtaggctagtggaccaaaaaggtgttgatttagttttgcaagtttcccgaagattactcgcatatacagattctcaaattgctattttaggtacaggtgatagatctttagaatctggattatggcaattagcattagattatcctggaagattttcagtgtttcttacttatgatgattctttatcaaggcttatatatggaggatctgatgcattcttaatgccaagccgatttgaaccctgcggtatcagtcaattacttgctatgagatatggatcaattccaatagtaagaagagttggaggcttggttgatactgttttgcctcatgatccagaaaataatagtggtacaggtttttgttttgatcgatttgaaccgattgacttttatactgctctagtaagatcttgggaggcatttaggcataaagatagttggaaatcattacagctcagagctatgagtcaagaatttagttggcagagatcggcattagaatatgaatcgatgtataaagatgtatgtgggataaaggcgccatccccggatattgctgaaattgaaaagttttcttatgggcaatctgctgatccttctcttaaaacaatgtga

SEQ ID NO: 94288 - protein, 483 aa, Prochlorococcus marinus subsp
MRILLAAAECAPMIKVGGMGDVVGSLPPSLIKLGHDVRVIIPGYSKLWNLLEVSSEPVFRANTMGNDFSVYEAKHPIHNYVIYLVGHPTFDSGHIYGGEDEDWRFTFFASATAEFSWNCWKPQVLHCHDWHTGMIPVWMHQDPEVSTVFTIHNLKYQGPWRWKLEKMTWCPWYMHGDHTMAAAMLYADRVNAVSPTYADEIKTHEYGESLEGLLNYISGKLRGILNGIDLNEWDPDKDKVLPAQFNIKNLESRLENKIILQKEMGLEVNSKKYLLGMVSRLVDQKGVDLVLQVSRRLLAYTDSQIAILGTGDRSLESGLWQLALDYPGRFSVFLTYDDSLSRLIYGGSDAFLMPSRFEPCGISQLLAMRYGSIPIVRRVGGLVDTVLPHDPENNSGTGFCFDRFEPIDFYTALVRSWEAFRHKDSWKSLQLRAMSQEFSWQRSALEYESMYKDVCGIKAPSPDIAEIEKFSYGQSADPSLKTM

SEQ ID NO: 94289 - DNA, 1542 bp, Pseudomonas aeruginosa; identical to SEQ ID NO: 52552
  CDS (1)..(1542): transl_table=11

SEQ ID NO: 94290 - protein, 513 aa, Pseudomonas aeruginosa; identical to SEQ ID NO: 52553

SEQ ID NO: 94291 - DNA, 1560 bp, Pseudomonas putida; identical to SEQ ID NO: 53544
  CDS (1)..(1560): transl_table=11

SEQ ID NO: 94292 - protein, 519 aa, Pseudomonas putida; identical to SEQ ID NO: 53545

SEQ ID NO: 94293 - DNA, 1455 bp, Pseudomonas syringae pv
  CDS (1)..(1455): transl_table=11
atgtctcaggtcaacaggcgcaaagtgctgttcgtgacctccgaactggccgacctggtgaaaaccggcgggctgggcgatgtgtctgccgcactgccacgcgccatgcgccacctgcacgacgttcgtgttctgattcctggttatccgcaagtgatcaacagcggcaacccgatccatatcatcagccagctgggtgggcatgctgcactgccgccctgcaaggttgggcgtatggatatgaaagatggcttggtcatctacgtgctgatctgcccggaactgtacgagcgcgaaggcacgccttacgctgacactaacggccgcgactggtccgacaaccacatccgttttgcccgtctgggcctggccgctgccgagtttgctgctggcgaagtgaaaagccagtggtgccccgagctggttcacgcccacgactggcctgccggtctggcgccggcttacatgcgctggcgcggacagtccacgccgagtattttcacggttcacaacctggcctatcaaggcaccgtgagtactgcgtcgagccgtgaactgggcatcccggatgaggcgatcaccccggaaggcatggaattttacggcaagctgtcgttcatcaaggccggcatggcgttcgcgaaccacatcaccacggtcagcgccacttacgcccgggaaatcaccacacctgaattcggctgcggccttgagggctttttgcagagcaaggccgacaaaggtcagctcagcggcattcccaacggtatcgatgaaagctgggacgccgccactgacgaacacctgatctgtcacttcgcgcccaatgagtggacgcgcaaggaaatcaacgccgattacgtccgcgagctgtttgagctggacgcctccagcgggccgctttacgcggtggtttcgcgcctcgtttaccagaaaggcctggacctgaccatcggcgtggccgagcacatcgtcaacaacggtgggcagattgcaatcatcggccgcggggagcccgaagaagaagatgccatgcgcgaactggcggcacgctttcctggccgtatcggtgtgcgtatcggtttcaacgaaaccgatgcacgacgcatgtttgccggcagtgattttctgctgatgccgtcgcgctatgaaccctgcggcttgagccagatgtacgcccagcgtttcggctcgctgcctgtcgcccgcaacaccggcggcctggcggacaccatcgaggatggcgttaccggctttctgttcaatgaatcaaccgtcgaaagctacaccgaagccctgaaccgcacgtttcaggtcttcgctcacccggaactgctcaatgccatgcgctgccgcgcaatggctgcccccttcaactggcatcaggcagtggagccctacgcagagctttatcgcgacctgttgaagaaaaacgtgagcatgaccagcaactaa

SEQ ID NO: 94294 - protein, 484 aa, Pseudomonas syringae pv
MSQVNRRKVLFVTSELADLVKTGGLGDVSAALPRAMRHLHDVRVLIPGYPQVINSGNPIHIISQLGGHAALPPCKVGRMDMKDGLVIYVLICPELYEREGTPYADTNGRDWSDNHIRFARLGLAAAEFAAGEVKSQWCPELVHAHDWPAGLAPAYMRWRGQSTPSIFTVHNLAYQGTVSTASSRELGIPDEAITPEGMEFYGKLSFIKAGMAFANHITTVSATYAREITTPEFGCGLEGFLQSKADKGQLSGIPNGIDESWDAATDEHLICHFAPNEWTRKEINADYVRELFELDASSGPLYAVVSRLVYQKGLDLTIGVAEHIVNNGGQIAIIGRGEPEEEDAMRELAARFPGRIGVRIGFNETDARRMFAGSDFLLMPSRYEPCGLSQMYAQRFGSLPVARNTGGLADTIEDGVTGFLFNESTVESYTEALNRTFQVFAHPELLNAMRCRAMAAPFNWHQAVEPYAELYRDLLKKNVSMTSN

SEQ ID NO: 94295 - DNA, 1626 bp, Ralstonia solanacearum
  CDS (1)..(1626): transl_table=11
ttgtcgctgaacgtcctctttgtcgcatcggaagcggtgccgctggccaagaccggtggcttgggagacatggtcggggcatgcgccggcgcgctgcagcgcgccggattgcacgtgaccgtgatgctgccggggtaccccgccgcgcaggcgcagctgcgcgatgcccgggtggcctgcgcgcttcccgatctgccgggcgggcccgcgcgcgtgctgctgggcgcgatgcccgataccggcgtgccggtgctgctgctcgacgccccggcgctgttcgatcgcccgggcaacccgtacctcgatgcctgcggcgagccctacgccgacaacgcgctgcgcttcgccgcgttcagccatgcggccgcgcacgtggccggcggcgtgcccgacctgcccgcattcgacatcgtgcaggcgcatgactggcatgccgcgctggtgccgctgctggtcaagcgcgcgggacggccggtcaagacggtcctgaccgtgcacaacctggcgttccagggcaacttcccgccacgtatcgcgcaggacctcggtcttcccccggaggcggtgcgcgaggccggattctttgggcagttcagtttcctgaaggcggggctgatgtgggccgaccgcatcaccaccgtgagccggacctatgcgcgcgagatcctgaccgacgcgttcggctacggcatgcaggacgtgctgcgggcgcgccggcatgacctcgtcgccattctcaacggcatcgacaacgcggtgtggaatccctcgaaagatgcttacctgtcgcggccgtttttcgcgggcaacctgagtggcaagcacgccgccaagctgcagctgcagacgctgctgcgcctgccgaaagacgcgcatgcgccactgctggcgctgggcagccgcctgacgcaccagaagatggcggacgtggcgctgcaggcgctgccgcagatgctggaagcccatcccgacctgcaggtggcggtgctgggctgcggcgagcgccgctatgaaagcgccatggccgccctggccgaacggcatccgcgccggatggcggccgtgatcggctataccgagcgcaacgcgcacatgctgcacgccggcgccgacctgctgctgcacggcagccgtttcgagccgtgcggcctgacaccgctgtatgccatgcgctacggcacggtgccggtggcctcgcgggtgggcgggctggtcgacacgatcgccgatcgcggctcgcccgaggcggcgctgcgcggcgccaccggcttcctgttcgacggcgagacgcccgaggccatggcgggcgcggtggcgcgcgcgctgcgcgtgttcgtccagccgcgcgcatggcgcgtcctgcaatacaacggcatgacgacggacttcggctggtcgcagccggcaagcgagtacctagcgctgtatgccacgctggcaccgcgcgccacgccgatgccgcatctgcagcactggccgatgcgcacgcttgcgcggcccgcgagccccccggacacggcgccggtgggcaaacccgcgcgccggcgccggacgacggcgttgtccaccacggcccgcgcgcacccggtggcgcgcgccgccggccgggaaaagatccgcgcatga

SEQ ID NO: 94296 - protein, 541 aa, Ralstonia solanacearum
MSLNVLFVASEAVPLAKTGGLGDMVGACAGALQRAGLHVTVMLPGYPAAQAQLRDARVACALPDLPGGPARVLLGAMPDTGVPVLLLDAPALFDRPGNPYLDACGEPYADNALRFAAFSHAAAHVAGGVPDLPAFDIVQAHDWHAALVPLLVKRAGRPVKTVLTVHNLAFQGNFPPRIAQDLGLPPEAVREAGFFGQFSFLKAGLMWADRITTVSRTYAREILTDAFGYGMQDVLRARRHDLVAILNGIDNAVWNPSKDAYLSRPFFAGNLSGKHAAKLQLQTLLRLPKDAHAPLLALGSRLTHQKMADVALQALPQMLEAHPDLQVAVLGCGERRYESAMAALAERHPRRMAAVIGYTERNAHMLHAGADLLLHGSRFEPCGLTPLYAMRYGTVPVASRVGGLVDTIADRGSPEAALRGATGFLFDGETPEAMAGAVARALRVFVQPRAWRVLQYNGMTTDFGWSQPASEYLALYATLAPRATPMPHLQHWPMRTLARPASPPDTAPVGKPARRRRTTALSTTARAHPVARAAGREKIRA

SEQ ID NO: 94297 - DNA, 1443 bp, Rhizobium tropici
  CDS (1)..(1443): transl_table=11
atgaaggttctctcggtttcgtccgaagtcttccccttgatcaagacagggggtctggccgatgtggtcggcgccctgcctattgcactgaagccctatggcgtcgaaaccaagaccctcatcccaggctatcctgcggtcatgaaagccattcgcgatccggttgttcgtctggagcttccggatcttcttggcgaggccgccaccattctagaagtcgagcacgcgggcatttccttcctcgtgctcgacgcaccggcctattacagccgcaccggcggcccctatgtcgatgcgacgggcaaggactatcccgacaattggcgacgtttcgccgcgctgtcgctggccggcgcggaaattgcagctggtctcctgcccggctggcggccggatctcgtgcacgcacatgattggcagtcggcgctggtgccggtctatatgcgttactatccgacgccggaactgccgagcgttctgaccatccacaacatcgcattccagggccagttcggcgccgatatcttccccggccttcgtctgccggcgcatgctttctcggtggaaggcatcgaatattacggtgatgtcggcttcctgaaaggtgggctgcagacggcgcatgccctgaccaccgtcagcccttcctatgccgaggaaatcctgacgccggaattcggcatgggcctcgaaggcgtcatcgccagcaaggcctacaatctctacggcatcgtcaacggcatcgacgcagatatctggaatccggcgaccgatccgatgatcgcgcaaacctatagcgcggcgacgctgaaggagcgcgccatcaaccgccatcgggtcgtcgagcatttcggcctcgaagaggatgatggtccgatcttctgcgtcgtcagccgcctcacctggcagaagggcatggatattctggcggaggttgcgagcgaggtcgtccacatgggtggcaagctcgcaattctcggcgcaggcgacgcggcgctggagggcgcgctctttgccgcagccggccgtcaccgcggtcgcgtcggcgttgtcggcaggcacaacgagcccatgtcgcatctgatgcaggccggctgcgacgcgattatcatcccctcgcgtttcgaaccctgtggtctcacgcagctttatggcttacgttcaggctgcctgccaatcgttgcgcgaacgggcgggctgaacgatacgattatcgacgccaaccacgccgcgctgcaggcaaaagtcgcgaccggcattcaattttcacccgtcaccgcggaggggctgttgcaggccatgcgccgcgcgatgcacctcttccaggatcgaaaggtctggacgcagatgcaaaagcagggcatgaaatccgacgtatcctggggcaggagcgcagaacgctacgccgctctctactccagtctagtctcgagaggcgcttaa

SEQ ID NO: 94298 - protein, 480 aa, Rhizobium tropici
MKVLSVSSEVFPLIKTGGLADVVGALPIALKPYGVETKTLIPGYPAVMKAIRDPVVRLELPDLLGEAATILEVEHAGISFLVLDAPAYYSRTGGPYVDATGKDYPDNWRRFAALSLAGAEIAAGLLPGWRPDLVHAHDWQSALVPVYMRYYPTPELPSVLTIHNIAFQGQFGADIFPGLRLPAHAFSVEGIEYYGDVGFLKGGLQTAHALTTVSPSYAEEILTPEFGMGLEGVIASKAYNLYGIVNGIDADIWNPATDPMIAQTYSAATLKERAINRHRVVEHFGLEEDDGPIFCVVSRLTWQKGMDILAEVASEVVHMGGKLAILGAGDAALEGALFAAAGRHRGRVGVVGRHNEPMSHLMQAGCDAIIIPSRFEPCGLTQLYGLRSGCLPIVARTGGLNDTIIDANHAALQAKVATGIQFSPVTAEGLLQAMRRAMHLFQDRKVWTQMQKQGMKSDVSWGRSAERYAALYSSLVSRGA

SEQ ID NO: 94299 - DNA, 1452 bp, Rhodopseudomonas palustris; identical to SEQ ID NO: 52556
  CDS (1)..(1452): transl_table=11

SEQ ID NO: 94300 - protein, 483 aa, Rhodopseudomonas palustris; identical to SEQ ID NO: 52557

SEQ ID NO: 94301 - DNA, 1458 bp, Rhodospirillum rubrum; identical to SEQ ID NO: 52558
  CDS (1)..(1458): transl_table=11

SEQ ID NO: 94302 - protein, 485 aa, Rhodospirillum rubrum; identical to SEQ ID NO: 52559

SEQ ID NO: 94303 - DNA, 1434 bp, Salmonella paratyphi; identical to SEQ ID NO: 52560
  CDS (1)..(1434): transl_table=11

SEQ ID NO: 94304 - protein, 477 aa, Salmonella paratyphi; identical to SEQ ID NO: 52561

SEQ ID NO: 94305 - DNA, 1434 bp, Shigella flexneri; identical to SEQ ID NO: 52562
  CDS (1)..(1434): transl_table=11

SEQ ID NO: 94306 - protein, 477 aa, Shigella flexneri; identical to SEQ ID NO: 52563

SEQ ID NO: 94307 - DNA, 1434 bp, Streptococcus pneumoniae; identical to SEQ ID NO: 52564
  CDS (1)..(1434): transl_table=11

SEQ ID NO: 94308 - protein, 477 aa, Streptococcus pneumoniae; identical to SEQ ID NO: 52565

SEQ ID NO: 94309 - DNA, 1317 bp, Thermus caldophilus
  CDS (1)..(1317): transl_table=11
gtgatacgcgtgctccacctggcccccgaggcctaccccctggccaaggtgggagggcttgccgacgtggtgggggccctccccaaggccctgaggcctttgggggtggaggcccatgtcctcctcccctggcacggggggctagaggccaggcgggtgggggaggtggccttcgccttcttcgggcgggaggagagggcccccttgggggagcgggtggagggtggggtgcggtttctcctcctcggggtggaggggtttgggcgggagcgggtctacggctaccccgacgacgccgagcgctacctccgcttcgccctggcggccaaggaggtggcgagggggtacgacctggtccacgcccacgactggacggcggccctcctcgccctctacgcccccacggtctacaccatccacaacctggcccaccagggcctcgtggacccggggctcttcttttcctggaccgggcttccctggagcctcttccacatggaggccctggagttctacggccgggtgaacctgatgaagggggggatcgtcttcgcccgccgggtcaccacggtgcgcccctcttacgccgaggagatccagacccccgagttcggcatgggcctggacggggtcttgaggaggcacgccgggaagcttaggggcatcttgaacggcctggacacggaggtctttgaccccggcaaagacccctacctccccgccccctacacccgggaggacccctcggggaaggcccgggccaaggaggtcttccgggagaggacggggcttaggccccccgtcctcgcttacgtgggccgcctggattaccagaagggcctggacctcgtcttaaaggccctcccccgcctcctggagatgggctttcgcctctacgtccagggcgtgggggacggggggcttcaggaggcgttcctccgggcggaggaggaaaaccccgaaggggtacgcttcctccccgcctacgacgaggccatggcccgcctggcctacgccggggcggaggcggtcttggtcccgagccgctttgagccctgcggcctggtgcagatgatcgcgagccgctacggcacccctcccgtggcccgggcggtgggggggctcaaggacaccgtggaggacgggagggccggggtcctttttgagacctaccaccccgaggggcttctttacggcgtgctccgcctcttccgcctgggggcggaggagatgggccttagggccatggagaaggacttctcctgggaggggccggcgcgggcctaccgggaggtgtaccgggaggccttgggctag

SEQ ID NO: 94310 - protein, 438 aa, Thermus caldophilus
MIRVLHLAPEAYPLAKVGGLADVVGALPKALRPLGVEAHVLLPWHGGLEARRVGEVAFAFFGREERAPLGERVEGGVRFLLLGVEGFGRERVYGYPDDAERYLRFALAAKEVARGYDLVHAHDWTAALLALYAPTVYTIHNLAHQGLVDPGLFFSWTGLPWSLFHMEALEFYGRVNLMKGGIVFARRVTTVRPSYAEEIQTPEFGMGLDGVLRRHAGKLRGILNGLDTEVFDPGKDPYLPAPYTREDPSGKARAKEVFRERTGLRPPVLAYVGRLDYQKGLDLVLKALPRLLEMGFRLYVQGVGDGGLQEAFLRAEEENPEGVRFLPAYDEAMARLAYAGAEAVLVPSRFEPCGLVQMIASRYGTPPVARAVGGLKDTVEDGRAGVLFETYHPEGLLYGVLRLFRLGAEEMGLRAMEKDFSWEGPARAYREVYREALG

SEQ ID NO: 94311 - DNA, 1461 bp, Thermotoga maritima; identical to SEQ ID NO: 52566
  CDS (1)..(1461): transl_table=11

SEQ ID NO: 94312 - protein, 486 aa, Thermotoga maritima; identical to SEQ ID NO: 52567

SEQ ID NO: 94313 - DNA, 1476 bp, Treponema denticola; identical to SEQ ID NO: 52568
  CDS (1)..(1476): transl_table=11

SEQ ID NO: 94314 - protein, 491 aa, Treponema denticola; identical to SEQ ID NO: 52569

SEQ ID NO: 94315 - DNA, 1443 bp, Vibrio vulnificus
  CDS (1)..(1443): transl_table=11
ttgtcgattctgtttgtagcatcggaagtcgaaggtttgatcaaaagtggtggcttggcggatgttgccaaggcactgcctgaagctttagtgaaccttcagcatgatgcgagaattgccattccggcttataccgcaattccagatgtgtgtgatgatgaagtcatcctcgatacacatctagaaacctggccacatactcattatcaagtcaaaaaacgtttcttaggtgacaatcctgtctacttaattgcgtgtgggcattattttgaccgtccgtcgatgtacgctgagaataatcaggcgtataccgataacggtgagcgctttgctttttttagtgctgcttgtttggatatgttaccaaagattggtttccagcctgacatcgtgcatgccaatgattggcatacaggcttagtgccatttttgcttaagcaccgttacggtcaagatccgttttttgcacaaacaaagagtattttgtctatccataatgcggtctttaaaggtgtctttcactatgatgagatgcaatgtttgcctgaatttcattgccgaaatgtacccgatgctgctgtcagctctacgcatatgacgatgctgaaagctggggttatgaatgcggataaaatcaacgcagtgagcccaacttatgcagaggaactgaaaactgaacttggcagtcacggaatggcttgggagtttcagcaacgcgcgggtgatctcgtcgggattctaaacggctgcgattattctgcatggcatccagatactgacagctatttacccatcaactacaaagcaactaagcagagcatggtgagagggaaaaatggctgtaaacgtgcgcttcaagagcaagtcggcctacctataaaggacgtcgctatgtttggtatggtatgtcgcttgacgcatcagaaaggggtgcattacctattgccagtattaactgagttcctgaagttggatgttcagttggttttggttgggaccggtgatccgttgcttgctgcgcaattacgtgatgttgcagcacagttcggtgaaaagtttgtctttgttgaagcttataacaatcaactcgcacacttagttgaagctgcatccgatttctttttaatgccttcagagtttgagccttgtggcttaaaccaaatctatagcatggcgtatggctccttgccgatcgtgagaggcgttgggggtctaaaagacagtgtatgtgattacgatgtgaatccagagactgcgacaggatttgtgttctatgagcccacagcgcaagcgttgttgattaccatgcaaagagcgttgttactgtatgcacagaacctaacagagcttcgacgggttcagctgtacgcgatggaacgagatttttgctggaacaaggcagcagagcaatatgtggagttgtatcgttctgcgctaaaatag

SEQ ID NO: 94316 - protein, 480 aa, Vibrio vulnificus
MSILFVASEVEGLIKSGGLADVAKALPEALVNLQHDARIAIPAYTAIPDVCDDEVILDTHLETWPHTHYQVKKRFLGDNPVYLIACGHYFDRPSMYAENNQAYTDNGERFAFFSAACLDMLPKIGFQPDIVHANDWHTGLVPFLLKHRYGQDPFFAQTKSILSIHNAVFKGVFHYDEMQCLPEFHCRNVPDAAVSSTHMTMLKAGVMNADKINAVSPTYAEELKTELGSHGMAWEFQQRAGDLVGILNGCDYSAWHPDTDSYLPINYKATKQSMVRGKNGCKRALQEQVGLPIKDVAMFGMVCRLTHQKGVHYLLPVLTEFLKLDVQLVLVGTGDPLLAAQLRDVAAQFGEKFVFVEAYNNQLAHLVEAASDFFLMPSEFEPCGLNQIYSMAYGSLPIVRGVGGLKDSVCDYDVNPETATGFVFYEPTAQALLITMQRALLLYAQNLTELRRVQLYAMERDFCWNKAAEQYVELYRSALK

SEQ ID NO: 94317 - DNA, 1425 bp, Xanthomonas axonopodis pv
  CDS (1)..(1425): transl_table=11
ttgttcgtggtgtcggaaatggcggacttcatcaaggctggcgggttgggcgacgtggcggccgcgctgccgcgcgcgctgcgccaccgctacgacgtccgcgtgctgattcccggctaccgtgccgtgctcgagcgcgcaggcaaggtggagatcgttggtcgcgtgttggcgcatgccgcgctgccggcctgcgacatcggccgcatcgtgcaatcggacgggctgccgatctacatcctgttgtccaaggaactgttcgagcgcgacggctcgccctatgtgagcaccagcggttcggagttcgaagacaacgcgattcgctttgccaccttgtcgcatgccgccgcgcagatcgcggccggccatgccggcctgggctggaagccgcgcctgctgcatctgaacgactggccgtgcgcgctggcggccggctatgtgcgctggtccggcggcaccacgccgtgcctgctgaccatccataacctggcctaccagggcctggtgccgtattcgatggccgccgcgctgggcatccccgccgagcgggtggccgagttggagttctacgggcagatgtcgttcctgcgcggtggcatcgtcaacgccgaccacgtcaacacggtcagcgtcagctacgccaagcagatcaccggcccggcacagggctgcggcctggaccggctgttggccgggcgcgccgccaagggcgcgctcaccggcatcgtcaacggcatcgacgccagctgggacccgcgcaccgaccaatacctggattcgcacttcagcgtgaaccaatggcagggccgccaggccaacgcagcgcaggtacgcaaggcattcgggctgcgcgagagcgctggcccactgtttgcggtggtctcgcggttggtgcatcagaagggcctggacctgatctgcgaggtggccccgcaaatcgtggccgctggcggccagatcgcggtgatcggcggcggcgagccggagatcgaacagcaggtggccgagctgaccaggcgctatcccggccaggtgggcgccttcatcggcttcgaggaaggcctggcccggcggatgttcgccggtgccgacttcctgctgatgccctcgcgcttcgagccctgcggcctgagccagatgtatgcgcagcgcttcggctgcctgccgatcgcccacgcgaccggcgggctgatcgataccgtggacgacggcgtgaccggcttcctgttccagcacgccagcgtcgaagccctgcgccgctgcctggagcgcgccttccgcaccttccgcctgcccagcctgttgtctgcgatgcggcgcgcagccatgctgcgtcccagcggttgggacgtggcaggcaagaaatacctctcgctctacgaacacaccgctgccaccgcgcccgcgctcgcgacggtgccatga

SEQ ID NO: 94318 - protein, 474 aa, Xanthomonas axonopodis pv
MFVVSEMADFIKAGGLGDVAAALPRALRHRYDVRVLIPGYRAVLERAGKVEIVGRVLAHAALPACDIGRIVQSDGLPIYILLSKELFERDGSPYVSTSGSEFEDNAIRFATLSHAAAQIAAGHAGLGWKPRLLHLNDWPCALAAGYVRWSGGTTPCLLTIHNLAYQGLVPYSMAAALGIPAERVAELEFYGQMSFLRGGIVNADHVNTVSVSYAKQITGPAQGCGLDRLLAGRAAKGALTGIVNGIDASWDPRTDQYLDSHFSVNQWQGRQANAAQVRKAFGLRESAGPLFAVVSRLVHQKGLDLICEVAPQIVAAGGQIAVIGGGEPEIEQQVAELTRRYPGQVGAFIGFEEGLARRMFAGADFLLMPSRFEPCGLSQMYAQRFGCLPIAHATGGLIDTVDDGVTGFLFQHASVEALRRCLERAFRTFRLPSLLSAMRRAAMLRPSGWDVAGKKYLSLYEHTAATAPALATVP

SEQ ID NO: 94319 - DNA, 1431 bp, Yersinia pestis
  CDS (1)..(1431): transl_table=11
atgagggttttacatgtatgttctgagctgttccctttactaaaaacaggcgggttggctgatgttatcggtgctttacccgcagctcagcttgccgagggggctgatgtgcggatcatcttgcccgccttcccggatttgcgtagagggatccctgagaccgtactggtcagggagattgacacttttgcggggcgggtagcattacgctatggccattatcgggggattggcatttatctgattgatgcgccagcgctctatgatcgtgcgggtagcccttatcacgatgcttctttatatgcctatagcgataactatctacgctttgccttgctgggatggatggcgtgcgaactggcttgtggcctggacggttactggcgtccagaggttgtccatgcccatgattggcacgcgggattaacctgtgcttatctggctgcgcgtgggcggcctgcacgatcggtgtttaccgtccataatttggcttatcaggggctattttctgcagatcacttatctgaattacacctgcccgctgagtttttccagatctatgggctggagttttacgggcagatctcttatctgaaagccgggttgttctttgccgaccatgtcacgaccgtcagcccgacctatgcaaaagagatcactcagcctgcttttggctatggcatggaggggttgctacaagcattggcgcgtcaaggccggttgacggggatcctgaacggggtcgacagtgatatttgggatccgcagagcgataccttgctacctactcgttatgatgcggagaacctgcaagcaaaggccatcaataaaacacatttgcaaacggctatgggtttgcaactggcagaaaataaacccatttttgctgttgtcagtcgattgaccgtccagaaagggttggatctggtattggaagcactgcccgaattactggcactgggggggcagttggtcgtcttggggagcggagatgccacgctgcaagaggcatttctagccgccgcagcagagcattctggccaggttggggtgcaaataggttatcacgaggcattctctcatcgaattattgccgggtcggatgtcattctggtgcccagccgctttgaaccctgtgggctaacacagttgtatgggttgaaatatggcacgttgccgctggtgcgacataccggtgggctggctgataccgtggtggattgcgcgttggaaaacctggctgacggcagcgcttcgggatttgtattcaatgaatgtgaggcgcaagccttagtgaaggcgatacgccgtgcctttgtactgtggagcaggccgaagcattggcgtcacgtccagcgccatgcgatgaggctcgactttggttggcaacttgccgccgtagattatttgtcactttatcgacgtctgtaa

SEQ ID NO: 94320 - protein, 476 aa, Yersinia pestis
MRVLHVCSELFPLLKTGGLADVIGALPAAQLAEGADVRIILPAFPDLRRGIPETVLVREIDTFAGRVALRYGHYRGIGIYLIDAPALYDRAGSPYHDASLYAYSDNYLRFALLGWMACELACGLDGYWRPEVVHAHDWHAGLTCAYLAARGRPARSVFTVHNLAYQGLFSADHLSELHLPAEFFQIYGLEFYGQISYLKAGLFFADHVTTVSPTYAKEITQPAFGYGMEGLLQALARQGRLTGILNGVDSDIWDPQSDTLLPTRYDAENLQAKAINKTHLQTAMGLQLAENKPIFAVVSRLTVQKGLDLVLEALPELLALGGQLVVLGSGDATLQEAFLAAAAEHSGQVGVQIGYHEAFSHRIIAGSDVILVPSRFEPCGLTQLYGLKYGTLPLVRHTGGLADTVVDCALENLADGSASGFVFNECEAQALVKAIRRAFVLWSRPKHWRHVQRHAMRLDFGWQLAAVDYLSLYRRL

SEQ ID NO: 94321 - DNA, 1833 bp, Arabidopsis thaliana
  CDS (1)..(1833)
atggcaactgtgactgcttcttctaactttgtgtcaagaacttcacttttcaacaatcatggtgcttcttcatgctctgatgtcgctcagattaccttaaaaggccaatccttgactcattgtgggttaaggtcattcaacatggtggataaccttcagaggagatctcaagctaaacctgtttctgctaaatcctcaaagagatcttctaaagttaagactgctggtaagattgtgtgtgagaaaggaatgtctgtgatttttattggagctgaagttggtccatggagtaaaactggtggtcttggtgatgttctcggtggtctacctccagctcttgctgctagaggccaccgtgtgatgacaatttgtcctcggtatgaccaatataaagatgcttgggacacttgtgttgtggttcagatcaaagttggggataaagttgagaatgttcgtttcttccattgctacaaacgaggagttgatcgtgtctttgttgaccatccaatctttcttgctaaggttgtgggcaaaacaggatccaaaatctatggtcctataactggagtagactacaatgacaaccaactccggttcagtttgttgtgtcaggctgctcttgaggcaccacaggttctgaacctgaacagcagcaagtacttctctggaccatatggtgaagatgtagtctttgttgccaatgactggcacactgctctacttccatgttacctcaaatctatgtatcaatcccgcggagtctacatgaatgcaaaggtggtcttctgcattcacaacatagcctaccagggaagatttgcctttgatgactattcccttctcaacttgcccatcagctttaaaagttctttcgacttcatggacgggtatgaaaagccagtaaaaggacggaaaattaactggatgaaggctgcaattctggaagctcaccgtgtcttaacagttagtccatactacgctcaagaactcatctctggagttgatagaggcgtggaattgcataaatatcttcgaatgaaaacagtttccggaattattaatggaatggatgttcaagaatggaacccgtctactgacaagtacatcgatatcaaatacgatattaccactgttacagatgctaaaccattgatcaaagaagcacttcaggctgctgttggacttcccgtggacagggatgtcccggttatcggtttcatagggagattggaggagcagaagggttctgatattctagtggaagctatttccaagttcatggggctcaatgttcagatggttatccttgggactggaaagaagaagatggaggctcagattcttgaactagaagagaagttcccagggaaggcggttggagtggcgaaattcaacgtgccattggctcatatgatcactgctggagctgacttcatcattgtcccaagcaggtttgagccgtgtggtctcattcagctgcacgcaatgagatatggaaccgtccctattgtggcatctactggtggacttgtggacactgtgaaagatggctacacaggtttccacattggaagattcaacgtcaagtgtgaagttgtggatccagatgatgtgatagcaacagcaaaggctgtgacaagagccgttgcagtatatggaacatccgcaatgcaagaaatggtcaagaactgcatggaccaagacttctcctggaagggacctgcgaggttgtgggagaaggtactattgtcccttaatgtggcgggaagtgaagccggaaccgagggtgaagagatagctcctctggccaaggagaacgtagcgacgccgtga

SEQ ID NO: 94322 - protein, 610 aa, Arabidopsis thaliana; identical to SEQ ID NO: 52573

SEQ ID NO: 94323 - DNA, 1812 bp, Hordeum vulgare
  CDS (1)..(1812)
atggcggctctggccacgtcccagctcgccacctccggcaccgtcctcggcgtcaccgacagattccggcgtccaggttttcagggcctcaggccccggaacccggcggatgcggcgcttggtatgaggactatcggagcaagcgccgccccgaagcaaagccggaaagcgcaccgcgggagccggcggtgcctctccgtggtggtgagcgccacgggcagcggcatgaacctcgtgttcgtcggcgccgagatggcgccctggagcaagaccggcggccttggcgatgtcctcggcggcctccccccggccatggccgccaacggtcaccgggtgatggtcgtctccccgcgctacgatcagtacaaggacgcctgggacaccagcgtcatctccgagatcaaggtcgctgacgagtacgagagggtgaggttcttccactgctacaagcgcggagtggaccgcgtgttcatcgaccacccgtggttcctggagaaggtccggggcaagaccaaggagaagatctacgggcccgacgccggcacagactatgaggacaaccagcagcgcttcagccttctctgccaggcagcactcgaggcacccaggatcctcaacctcaacaacaacccctacttttctggtccctacggggaagacgtggtgttcgtgtgcaacgactggcacacgggccttctggcctgctacctcaagagcaactaccagtccaatggcatctacaggacggccaaggtggccttctgcatccacaacatctcgtaccagggccgcttctccttcgacgactttgcgcagctcaacctgcccgacaggttcaagtcgtccttcgacttcattgacggctacgacaagcccgtggaggggcgcaagatcaactggatgaaggccgggatcctgcaggccgacaaggtgctgacggtgagcccctactacgctgaggagctcatctctggcgaagccaggggctgcgagctcgacaacatcatgcgcctcacggggatcaccggaatcgtcaacggcatggacgtcagtgagtgggaccccaccaaggacaagttcctcgccgtcaactacgacatcaccaccgcgttggaggccaaggcgctgaacaaggaggcgctgcaggccgaggtggggctgccggtggacaggaaggtgccgctggtggccttcatcggcaggctggaggagcagaagggccccgacgtgatgatcgccgccatcccggagatcctgaaggaggaggacgtccagatcattctccttggcaccgggaagaagaagtttgagaagctgctcaagagcatggaggagaagttcccgggcaaggtgagggccgtggtcaggttcaacgcgccgctagctcaccagatgatggccggcgccgacttgctcgctgtcaccagccgcttcgagccctgcggcctcatccagctccagggaatgcgctatggaacgccgtgcgtgtgcgcgtccaccggcgggctcgtcgacacgatcgtggagggcaagaccgggttccacatgggccgcctcagcgtcgactgcaacgtggtggagccggcggacgtgaagaaggtggcgaccaccctgaagcgggccgtcaaggtcgtcggcacgccggcgtaccaggagatggtcaagaactgcatgatccaggatctctcctggaagggacctgccaagaactgggaggacgtgcttctggaactgggggtggaggggagcgagccggggatcgtcggcgaggagatcgcgccgctcgccatggagaacgtcgccgctccctga

SEQ ID NO: 94324 - protein, 603 aa, Hordeum vulgare; identical to SEQ ID NO: 52575

SEQ ID NO: 94325 - DNA, 2263 bp, Zea mays; identical to SEQ ID NO: 52576
  CDS (194)..(2011)

SEQ ID NO: 94326 - protein, 605 aa, Zea mays; identical to SEQ ID NO: 52577

SEQ ID NO: 94327 - DNA, 1827 bp, Manihot esculenta
  CDS (1)..(1827)
atggcaactgtaatagctgcacatttcgtttccaggagctcacacttgagcatccatgcattagagactaaggctaataatttgtctcacactggaccctggacccaaactatcactcccaatggtttaaggtccctcaacactatggataaactccaaatgaagacacaatcaaaagctgtgaaaaaggtctctgccaccggcaatggtaggcctgctgccaaaattatttgtggtcatggaatgaatttaatctttgttggagctgaagttggtccctggagcaaaactggtggacttggtgatgttcttggaggactcccccctgccatggccgcaagagggcaccgcgtcatgacagtgtctccccgctatgaccagtacaaggatgcttgggatacctctgtatcggtggagattaaaattggagatagaattgaaactgtccgcttcttccactcctacaaaagaggagttgatcgggtcttcgtggatcatccaatgttccttgagaaggtatggggcaaaactggatctaaaatatatggcccaagagcaggtttggattaccaggacaaccaactgcgatttagcttgttatgccttgctgctctggaggcaccgagagttctgaacttgaacagcagcaaaaatttctcaggaccctacggagaagaagttgccttcattgccaacgactggcacactgctctgcttccatgttatctaaaagccatttaccaacctatggggatttacaaacacgccaaggttgccttttgcatccacaacattgcatatcagggaagatttgccttctcagacttcccacgacttaatctgccagataaattcaaaagctcttttgactttatcgatgggtatgagaagcccgtgaagggaaggaaaatcaattggatgaaggccgggatattggaatcagacagggttttgactgtgagcccatactatgcccaagaagtcatctctggagttgaaagaggcgtcgagctggataacttcattcgtaaaactggcattgctggtattataaatggcatggacgtccaggagtggaatcctgttacagataaatacattgacatccactacgatgccacaactgttatggacgcaaaacctttgttgaaggaagcccttcaagcagaagtcggattgcctgttgataggaatgttcctttgataggcttcattggtagattagaagagcagaagggttcagatatttttgttgcagctatttcccaattggttgaacacaatgtgcagatagtaatccttggaactggcaaaaagaaatttgagaagcagattgagcatctggaggttttgtaccctgacaaggcaagaggagttgcaaaattcaatgtgccgttggcgcacatgatcacagctggtgctgactttatgctggttccaagtagatttgagccctgtggtctcattcagttgcatgctatgcgatatggaacagttcccattgttgcttctactggtggtcttgttgatactgttaaagaaggttacacaggattccaaatgggggccttgcatgttgaatgtgacaaaattgattcagcagatgtagctgcgatagttaaaactgtggcaagagctcttggcacttatgctaccgctgcattaagagaaatgatcctgaattgcatggcccaagacttgtcatggaagggaccagccagaatgtgggagaaaatgctcctggacctggaagttactggcagcgaacctggcactgaaggggaggagatcgctcctcttgctaaggagaacgttcccacgccttga

SEQ ID NO: 94328 - protein, 608 aa, Manihot esculenta
MATVIAAHFVSRSSHLSIHALETKANNLSHTGPWTQTITPNGLRSLNTMDKLQMKTQSKAVKKVSATGNGRPAAKIICGHGMNLIFVGAEVGPWSKTGGLGDVLGGLPPAMAARGHRVMTVSPRYDQYKDAWDTSVSVEIKIGDRIETVRFFHSYKRGVDRVFVDHPMFLEKVWGKTGSKIYGPRAGLDYQDNQLRFSLLCLAALEAPRVLNLNSSKNFSGPYGEEVAFIANDWHTALLPCYLKAIYQPMGIYKHAKVAFCIHNIAYQGRFAFSDFPRLNLPDKFKSSFDFIDGYEKPVKGRKINWMKAGILESDRVLTVSPYYAQEVISGVERGVELDNFIRKTGIAGIINGMDVQEWNPVTDKYIDIHYDATTVMDAKPLLKEALQAEVGLPVDRNVPLIGFIGRLEEQKGSDIFVAAISQLVEHNVQIVILGTGKKKFEKQIEHLEVLYPDKARGVAKFNVPLAHMITAGADFMLVPSRFEPCGLIQLHAMRYGTVPIVASTGGLVDTVKEGYTGFQMGALHVECDKIDSADVAAIVKTVARALGTYATAALREMILNCMAQDLSWKGPARMWEKMLLDLEVTGSEPGTEGEEIAPLAKENVPTP

SEQ ID NO: 94329 - DNA, 1821 bp, Oryza sativa
  CDS (1)..(1821)
atgtcggctctcaccacgtcccagctcgccacctcggccaccggcttcggcatcgccgacaggtcggcgccgtcgtcgctgcttcgccacgggttccagggcctcaagccccgtagcccagccggcggggacgcatcatccctcagcgtgacgaccagcgcgcgcgcgacgcccaagcagcagcggtcggtgcagcgcggcagccggaggttcccctccgtcgtcgtgtacgccaccggcgccggcatgaacgtcgtgttcgtcggcgccgagatggccccctggagcaagaccggcggcctcggtgacgtcctcggtggcctcccccctgccatggctgcgaatggccacagagtcatggtgatctctcctcggtacgaccagtacaaggacgcctgggacaccagcgttgtggctgagatcaaggttgcagacaggtacgagagggtgaggtttttccattgctacaagcgtggagttgaccgtgtgttcatcgaccatccgtcattcctggagaaggtttggggaaagaccggtgagaagatctacggacctgacactggagtcgattacaaggacaaccagatgcgtttcagccttctttgccaggaggctcctaggatcctaaacctcaacaacaacccatacttcaaaggaacttatggtgaggatgttgtgttcgtctgcaacgactggcacactggcccactgccgagctacctgaagaacaactaccagcccaatggcatctacaggaatgcaaaggttgctttctgcatccacaacatctcctaccagggccggttcgctttcgaggactaccctgagctgaacctctccgagaggttcaagtcatccttcgatttcatcgacgggtatgacacgccagtggagggcaggaagatcaactggatgaaggctggtatcctggaatccgacagggtgctcaccgtgagcccgtactacgccgaggagctcatctccggcatcgccaggggatgcgagctcgacaacatcatgcgactcaccggcatcaccggcatcgtcaacggcatggacgtcagcgagtgggatcctagcaaggacaagtacatcaccaccaagtacgacgcaaccacggccatcgaggcgaaggcgctgaacaaggaggcgttgcaagcggaggcggggcttccggtcgaccggaaagtcccgctgatcgcgttcatcggcaggctggaggaacagaagggccccgacgtcatggccgccgccatcccggagctcatgcaggagaacgtccagatcgttcttttgggtactggaaagaagaagttcgagaagctgctcaagagcatggaggagaagtaccccggcaaggtgagggccgtggtgaagttcaacgcgccgctggctcacctcatcatggccggagccgacgtgctcgccgtccccagccgcttcgagccctgtggactcatccagctgcaggggatgagatacggaacgccctgtgcttgcgcgtccaccggtgggctcgtggacacggtcatcgaaggcaagactggtttccacatgggccgtctcagcgtcgactgcaaggtggtggagccaagcgacgtgcagaaggtggcgaccaccctgaagcgggccatcaagatcgtcggcacgccggcgtacaacgagatggtcaggaactgcatgaaccaggacctctcctggaaggggccagcgaagaactgggagaatgtgttgttgggcctgggcgtcgccgggagcgagccgggggtcgaaggcgaggagatcgcgccgctcgccaaggagaacgtggctgctccttga

SEQ ID NO: 94330 - protein, 606 aa, Oryza sativa
MSALTTSQLATSATGFGIADRSAPSSLLRHGFQGLKPRSPAGGDASSLSVTTSARATPKQQRSVQRGSRRFPSVVVYATGAGMNVVFVGAEMAPWSKTGGLGDVLGGLPPAMAANGHRVMVISPRYDQYKDAWDTSVVAEIKVADRYERVRFFHCYKRGVDRVFIDHPSFLEKVWGKTGEKIYGPDTGVDYKDNQMRFSLLCQEAPRILNLNNNPYFKGTYGEDVVFVCNDWHTGPLPSYLKNNYQPNGIYRNAKVAFCIHNISYQGRFAFEDYPELNLSERFKSSFDFIDGYDTPVEGRKINWMKAGILESDRVLTVSPYYAEELISGIARGCELDNIMRLTGITGIVNGMDVSEWDPSKDKYITTKYDATTAIEAKALNKEALQAEAGLPVDRKVPLIAFIGRLEEQKGPDVMAAAIPELMQENVQIVLLGTGKKKFEKLLKSMEEKYPGKVRAVVKFNAPLAHLIMAGADVLAVPSRFEPCGLIQLQGMRYGTPCACASTGGLVDTVIEGKTGFHMGRLSVDCKVVEPSDVQKVATTLKRAIKIVGTPAYNEMVRNCMNQDLSWKGPAKNWENVLLGLGVAGSEPGVEGEEIAPLAKENVAAP

SEQ ID NO: 94331 - DNA, 1824 bp, Solanum tuberosum
  CDS (1)..(1824)
atggcaagcatcacagcttcacaccactttgtgtcaagaagccaaacttcactagacaccaaatcaaccttgtcacagataggactcaggaaccatactctgactcacaatggtttaagggctgttaacaagcttgatgggctccaatcaagaactaatactaaggtaacacccaagatggcatccagaactgagaccaagagacctggatgctcagctaccattgtttgtggaaagggaatgaacttgatctttgtgggtactgaggttggtccttggagcaaaactggtggactaggtgatgttcttggtggactaccaccagcccttgcagcccgcggacatcgggtaatgacaatatccccccgttatgaccaatacaaagatgcttgggatactagcgttgcggttgaggtcaaagttggagacagcattgaaattgttcgtttctttcactgctataaacgtggggttgatcgtgtttttgttgaccacccaatgttcttggagaaagtttggggcaaaactggttcaaaaatctatggccccaaagctggactagattatctggacaatgaacttaggttcagcttgttgtgtcaagcagccctagaggcacctaaagttttgaatttgaacagtagcaactacttctcaggaccatatggagaggatgttctcttcattgccaatgattggcacacagctctcattccttgctacttgaagtcaatgtaccagtccagaggaatctatttgaatgccaaggtcgctttctgcatccataacattgcctaccaaggccgattttctttctctgacttccctcttctcaatcttcctgatgaattcaggggttcttttgatttcattgatggatatgagaagcctgttaagggtaggaaaatcaactggatgaaggctgggatattagaatcacatagggtggttacagtgagcccatactatgcccaagaacttgtctctgctgttgacaagggtgttgaattggacagtgtccttcgtaagacttgcataactgggattgtgaatggcatggatacacaagagtggaacccagcgactgacaaatacacagatgtcaaatacgatataaccactgtcatggacgcaaaacctttactaaaggaggctcttcaagcagcagttggcttgcctgttgacaagaagatccctttgattggcttcatcggcagacttgaggagcagaaaggttcagatattcttgttgctgcaattcacaagttcatcggattggatgttcaaattgtagtccttggaactggcaaaaaggagtttgagcaggagattgaacagctcgaagtgttgtaccctaacaaagctaaaggagtggcaaaattcaatgtccctttggctcacatgatcactgctggtgctgattttatgttggttccaagcagatttgaaccttgtggtctcattcagttacatgctatgcgatatggaacagtgccaatctgtgcatcgactggtggacttgttgacactgtgaaagaaggctatactggattccatatgggagccttcaatgttgaatgcgatgttgttgacccagctgatgtgcttaagatagtaacaacagttgctagagctcttgcagtctatggcaccctcgcatttgctgagatgataaaaaattgcatgtcagaggaactctcctggaaggaacctgccaagaaatgggagacattgctattgggcttaggagcttctggcagtgaacccggtgttgaaggggaagaaatcgctccacttgccaaggaaaatgtagccactccctaa

SEQ ID NO: 94332 - protein, 607 aa, Solanum tuberosum
MASITASHHFVSRSQTSLDTKSTLSQIGLRNHTLTHNGLRAVNKLDGLQSRTNTKVTPKMASRTETKRPGCSATIVCGKGMNLIFVGTEVGPWSKTGGLGDVLGGLPPALAARGHRVMTISPRYDQYKDAWDTSVAVEVKVGDSIEIVRFFHCYKRGVDRVFVDHPMFLEKVWGKTGSKIYGPKAGLDYLDNELRFSLLCQAALEAPKVLNLNSSNYFSGPYGEDVLFIANDWHTALIPCYLKSMYQSRGIYLNAKVAFCIHNIAYQGRFSFSDFPLLNLPDEFRGSFDFIDGYEKPVKGRKINWMKAGILESHRVVTVSPYYAQELVSAVDKGVELDSVLRKTCITGIVNGMDTQEWNPATDKYTDVKYDITTVMDAKPLLKEALQAAVGLPVDKKIPLIGFIGRLEEQKGSDILVAAIHKFIGLDVQIVVLGTGKKEFEQEIEQLEVLYPNKAKGVAKFNVPLAHMITAGADFMLVPSRFEPCGLIQLHAMRYGTVPICASTGGLVDTVKEGYTGFHMGAFNVECDVVDPADVLKIVTTVARALAVYGTLAFAEMIKNCMSEELSWKEPAKKWETLLLGLGASGSEPGVEGEEIAPLAKENVATP

SEQ ID NO: 94333 - DNA, 2287 bp, Sorghum bicolor; identical to SEQ ID NO: 52578
  CDS (207)..(2033)

SEQ ID NO: 94334 - protein, 608 aa, Sorghum bicolor; identical to SEQ ID NO: 52579

SEQ ID NO: 94335 - DNA, 2259 bp, Pisum sativum
  CDS (1)..(2259)
atgatgctatcactaggttctgatgcaactgtgttaccttttcatgctaagaatctcaaatttactccaaagttaagtactttgaatggtgatttagcatttagtaagggtttgggtgttggtagattgaactgtggaagtgttagattgaatcataagcagcatgtaagagctgttggtaagagttttggtgcagatgagaatggagatgggtcagaggatgatgttgttaatgctacaattgaaaagagcaaaaaggttcttgctttgcaaagggaacttattcaacagattgctgaaagaaagaaactagtttcttctatagatagtgacagcattcctggattggaaggaaacggtgtttcttatgaaagcagtgaaaaatctctgtcaagggactcaaatccacagaaaggttcttccagcagcggcagtgctgttgaaaccaaacggtggcactgttttcagcaactatgtcgttctaaagaaacggagacatgggccgtttcatctgttggcattaatcaaggttttgatgaaattgaaaagaaaaatgacgctgtaaaggcgtcatctaagctacacttcaatgaacaaattaaaaacaagctgtacgagagacctgatacgaaagacatttcaagtagcatcagaacttctagtctaaagtttgaaaatttcgaaggtgcgaatgaaccaagttcaaaggaggttgctaatgaagctgaaaattttgagagcggcggtgaaaagccaccaccgttggctgggaccaatgttatgaacattatattggtttctgcagaatgcgctccttggtcgaaaacaggcgggcttggagatgttgctggatcactcccaaaggctttggctcggcgtggacatagagttatgattgttgcacctcattatggtaattatgctgaagcacacgatataggagtacggaagagatacaaagtagctggtcaggacatggaagtgacgtatttccatacttatattgatggtgtcgatattgtttttattgacagtccaatatttcgcaatctagagagtaatatatatggcggaaaccgattggatattctaaggcgcatggtgttgttttgcaaggcggcggttgaggttccttggcatgttccgtgtggtggaatttgctatggagatggaaatctggtcttcatagcaaatgattggcatactgcattgctgccggtgtatctgaaagcatattatcgcgatcatggtttgatgaactatacacgatcagttctcgtgattcataacatagctcaccagggtcggggcccggtcgaggatttcaacaccgtggatttatctggaaactacttagaccttttcaaaatgtacgaccctgttggaggtgagcacttcaacatctttgcagccggtttaaaaaccgccgacaggattgtcaccgtcagtcacggttacgcatgggagcttaaaacttcagaaggtggttggggtttgcataacatcataaatgaaagtgactggaaatttcggggaattgtgaacggtgtcgacacaaaagattggaaccctcaattcgacgcttacttgacatcagacggctacactaactacaacctgaaaaccctacaaaccggcaagcgtcaatgtaaggcagctttgcaaagggagctcggtttgcctgtccgtgaggatgttccgataatttccttcatcggaaggctcgatcaccagaaaggtgttgatcttatagccgaagcgattccttggatgatgagccacgatgttcaactagtcatgttgggaaccggaagagctgatttagaacaaatgctcaaagaattcgaagcccaacactgcgacaaaatccgaagttgggttggtttttcggttaagatggctcataggataacagcaggttcagatatattactcatgccgtcaagattcgagccgtgtggactgaatcaactctatgcgatgagttacggaacagttcctgttgtacacggggtgggcggactcagagacacggtgcagccttttaatccgttcgacgaatcgggtgtcggttggacatttgatcgcgccgaagctaacaagttaatggcggcattatggaattgcttattgacttataaggattataagaagagctgggaagggattcaagaaagagggatgtcacaggatcttagctgggacaatgctgctcaacaatatgaagaggttcttgttgctgccaaataccaatggtga

SEQ ID NO: 94336 - protein, 752 aa, Pisum sativum
MMLSLGSDATVLPFHAKNLKFTPKLSTLNGDLAFSKGLGVGRLNCGSVRLNHKQHVRAVGKSFGADENGDGSEDDVVNATIEKSKKVLALQRELIQQIAERKKLVSSIDSDSIPGLEGNGVSYESSEKSLSRDSNPQKGSSSSGSAVETKRWHCFQQLCRSKETETWAVSSVGINQGFDEIEKKNDAVKASSKLHFNEQIKNKLYERPDTKDISSSIRTSSLKFENFEGANEPSSKEVANEAENFESGGEKPPPLAGTNVMNIILVSAECAPWSKTGGLGDVAGSLPKALARRGHRVMIVAPHYGNYAEAHDIGVRKRYKVAGQDMEVTYFHTYIDGVDIVFIDSPIFRNLESNIYGGNRLDILRRMVLFCKAAVEVPWHVPCGGICYGDGNLVFIANDWHTALLPVYLKAYYRDHGLMNYTRSVLVIHNIAHQGRGPVEDFNTVDLSGNYLDLFKMYDPVGGEHFNIFAAGLKTADRIVTVSHGYAWELKTSEGGWGLHNIINESDWKFRGIVNGVDTKDWNPQFDAYLTSDGYTNYNLKTLQTGKRQCKAALQRELGLPVREDVPIISFIGRLDHQKGVDLIAEAIPWMMSHDVQLVMLGTGRADLEQMLKEFEAQHCDKIRSWVGFSVKMAHRITAGSDILLMPSRFEPCGLNQLYAMSYGTVPVVHGVGGLRDTVQPFNPFDESGVGWTFDRAEANKLMAALWNCLLTYKDYKKSWEGIQERGMSQDLSWDNAAQQYEEVLVAAKYQW

SEQ ID NO: 94337 - DNA, 1959 bp, Arabidopsis thaliana
  CDS (1)..(1959)
atggcgtctcttcaaatcagtggctccgttaaattcgagccgttcgttggattcaaccggatccgccatttccgtccgatcgccagtctcggatttcctcgttttcgacggagattcagtatcggacggtcattgttgcttcgtcgttcttcttccttctccggtgactctcgtgagtctgatgaagagagatttatcacagacgcagagagagatggttctggctccgttcttggctttcagctcactcctcctggtgatcaacaaacagttagcactagcacaggagaaattacacatcatgaagagaagaaagaggctattgatcaaattgtaatggctgactttggcgtacctggaaatagagctgttgaagaaggagctgcagaggttgggattccgagtggaaaagctgaagttgtcaataaccttgttttcgttacatccgaggcggctccttactcgaaaacaggaggattaggagatgtttgtggttctttgccgatagctttagctggtcgtgggcatcgtgttatggtcatttctcctcggtacttaaatggaactgctgcagacaagaactatgcccgggctaaggatttggggatacgtgtaacagtaaattgctttggtggttctcaagaagtttccttctatcatgagtatagagatggtgttgattgggtttttgttgatcacaaatcctaccatagacctggtaatccctacggagatagtaaaggagcctttggtgacaatcagtttcggttcacgttactttgccatgctgcatgtgaagcccctctcgtgctgcctcttggagggttcacttatggagagaaatcactcttccttgtcaatgactggcatgccggccttgttcccatacttttggccgcaaagtatcgcccatatggagtttataaggatgcaagaagcattctcattatccataacctcgctcatcagggggtggagccagcagctacatacaccaacttgggattgccttcggaatggtatggagcagtcgggtgggtatttccaacgtgggcaagaactcatgcccttgacaccggtgaagcggttaatgttctcaagggtgctattgtgacctctgaccgtatcattactgtgagccagggctatgcatgggaaatcactactgttgaaggtggttatggtcttcaagatttgctttctagtcggaaaagtgttataaatgggatcacaaatggaattaatgttgatgaatggaatccatccacggatgaacacattcctttccattactctgctgatgatgtctccgagaagatcaaatgcaagatggcactacaaaaggaattgggtctccccattaggcctgaatgtcctatgattggttttataggaagacttgattaccagaagggcattgatctgatccaaaccgctggtcctgatctcatggtggatgacattcaattcgtcatgcttggttcgggtgacccaaaatatgaaagctggatgagaagtatggaggaaacatacagagacaaattccgtggttgggttgggttcaatgtccccatctctcatcgaatcacagccggctgtgacattcttctcatgccgtcgagattcgagccctgtggtttaaatcagctatacgcaatgagatacggaaccattccagttgttcatggcactggaggactcagagatacggttgagaatttcaacccttatgcagaaggtggagctggtactggtacagggtgggtcttcactcccttgtcgaaagatagcatggtctcggccttgaggttggctgcagcaacgtacagagagtataaacagtcatgggaaggattgatgagaagaggaatgacccgaaactactcttgggaaaacgctgccgttcagtatgagcaagtttttcagtgggttttcatggaccctccctatgtcagctag

SEQ ID NO: 94338 - protein, 652 aa, Arabidopsis thaliana; identical to SEQ ID NO: 52581

SEQ ID NO: 94339 - DNA, 2360 bp, Solanum tuberosum; identical to SEQ ID NO: 52582
  CDS (68)..(1993)

SEQ ID NO: 94340 - protein, 641 aa, Solanum tuberosum; identical to SEQ ID NO: 52583

SEQ ID NO: 94341 - DNA, 2304 bp, Solanum tuberosum
  CDS (1)..(2304)
atggagaattccattcttcttcatagtggaaatcagttccaccccaacttaccccttttagcacttaggcccaaaaaattatctctaattcatggctccagtagagagcaaatgtggaggatcaagcgcgttaaagcaacaggtgaaaattctggggaagctgcaagtgctgatgaatcgaatgatgccttacaggttacaattgaaaagagcaaaaaggttttagccatgcaacaggacctacttcaacagattgcagaaagaagaaaagtagtctcttcaataaaaagcagtcttgccaatgccaaaggtacttatgatggtgggagtggtagcttatcagatgttgatatccctgacgtggataaagattataatgttactgtacctagtactgctgctactccaattactgatgtcgataaaaatacaccgcctgctataagccaagattttgttgaaagtaaaagagaaatcaaaagggacctggccgatgaaagggcacccccactgtcgagatcatctatcacagccagtagccagatttcctctactgtaagttccaaaagaacgttgaatgtccctccagaaactccgaagtccagtcaagagacacttttggatgtgaattcacgcaaaagtttagtagatgttcctggaaagaagatccagtcttatatgccttcattacgtaaagaatcctcagcatcccatgtggaacagaggaatgaaaatcttgaaggatcaagtgctgaggcaaacgaagagactgaagatcctgtgaatatagatgagaaaccccctccattggcaggaacaaatgttatgaacattattttggtggcttcagaatgcgctccatggtctaaaacaggtgggcttggagatgttgctggagcattacccaaagctttggctcgacgtggccacagagttatggttgtggcacctcgttatgacaactatcctgaacctcaagattctggtgtaagaaaaatttataaagttgatggtcaggatgtggaagtgacttacttccaagcttttattgatggtgtggattttgttttcattgacagtcatatgtttagacacattgggaacaacatttacggagggaaccgtgtggatattttaaaacgcatggttttattttgcaaagcagcgattgaggttccttggcatgttccatgtggtggggtctgctatggagatggaaatttagtgttcattgctaatgattggcatactgctttattgccagtatatctgaaagcttattatcgtgacaatggaattatgaactatacaagatctgtcctggtgattcataacatcgctcatcagggtcgtggtcctttggaggatttttcatatgtagatcttccaccacactatatggaccctttcaagttgtatgacccagtaggaggtgagcatttcaacatttttgcggctggtctaaagacagcagatcgtgtagttacagttagtcatggatattcatgggaactaaagacttcccaaggtggttggggattgcatcagataattaatgagaacgattggaaattacagggtattgtgaatgggattgatacaaaagagtggaaccctgagttggacgttcacttacagtcagatggttacatgaactactccttggacacgctacagactggcaagcctcaatgtaaagctgcattgcagaaggaacttggtttaccagttcgtgatgatgtcccactgatcggtttcattgggaggcttgacccacaaaagggtgttgatctgattgctgaggcagtgccttggatgatgggtcaggatgtacaactggtcatgttggggacggggaggcgtgaccttgaacagatgctaaggcaatttgagtgtcaacacaatgataaaattagaggatgggttggtttctctgtgaagacttctcatcgtataactgctggtgcagacattctgctcatgccttctagatttgagccttgcggactgaaccagctttatgcaatgaaatatgggactattcctgttgttcatgcagtaggaggactcagagatactgtgcagccctttgatccttttaatgagtcaggactggggtggaccttcagtagggctgaagctagccagctgatccacgcattaggaaattgcttactgacttatcgtgagtacaaaaagagttgggaggggattcagacacgttgtatgacacaagacttaagttgggataatgctgctcagaactatgaagaagttctcatcgctgctaagtatcagtggtga

SEQ ID NO: 94342 - protein, 767 aa, Solanum tuberosum; identical to SEQ ID NO: 52585

SEQ ID NO: 94343 - DNA, 2085 bp, Oryza sativa; identical to SEQ ID NO: 52590
  CDS (1)..(2085)

SEQ ID NO: 94344 - protein, 694 aa, Oryza sativa; identical to SEQ ID NO: 52591

SEQ ID NO: 94345 - DNA, 1830 bp, Oryza sativa; identical to SEQ ID NO: 52594
  CDS (1)..(1830)

SEQ ID NO: 94346 - protein, 609 aa, Oryza sativa; identical to SEQ ID NO: 52595

SEQ ID NO: 94347 - DNA, 1824 bp, Oryza sativa; identical to SEQ ID NO: 52596
  CDS (1)..(1824)

SEQ ID NO: 94348 - protein, 607 aa, Oryza sativa; identical to SEQ ID NO: 52597

SEQ ID NO: 94349 - DNA, 1827 bp, Oryza sativa; identical to SEQ ID NO: 52372
  CDS (1)..(1827)

SEQ ID NO: 94350 - protein, 608 aa, Oryza sativa; identical to SEQ ID NO: 52373

SEQ ID NO: 94351 - DNA, 1800 bp, Triticum aestivum; identical to SEQ ID NO: 52604
  CDS (1)..(1800)

SEQ ID NO: 94352 - protein, 599 aa, Triticum aestivum; identical to SEQ ID NO: 52605

SEQ ID NO: 94353 - DNA, 1848 bp, Brassica napus; identical to SEQ ID NO: 52606
  CDS (1)..(1848)

SEQ ID NO: 94354 - protein, 615 aa, Brassica napus; identical to SEQ ID NO: 52607

SEQ ID NO: 94355 - DNA, 1860 bp, Glycine max; identical to SEQ ID NO: 52608
  CDS (1)..(1860)

SEQ ID NO: 94356 - protein, 619 aa, Glycine max; identical to SEQ ID NO: 52609

SEQ ID NO: 94357 - DNA, 1479 bp, Hordeum vulgare; identical to SEQ ID NO: 52610
  CDS (1)..(1479)

SEQ ID NO: 94358 - protein, 492 aa, Hordeum vulgare; identical to SEQ ID NO: 52611

SEQ ID NO: 94359 - DNA, 1800 bp, Triticum aestivum; identical to SEQ ID NO: 52612
  CDS (1)..(1800)

SEQ ID NO: 94360 - protein, 599 aa, Triticum aestivum; identical to SEQ ID NO: 52613

SEQ ID NO: 94361 - DNA, 1815 bp, Triticum aestivum; identical to SEQ ID NO: 52614
  CDS (1)..(1815)

SEQ ID NO: 94362 - protein, 604 aa, Triticum aestivum; identical to SEQ ID NO: 52615

SEQ ID NO: 94363 - DNA, 2745 bp, Triticum aestivum; identical to SEQ ID NO: 52616
  CDS (1)..(2745)

SEQ ID NO: 94364 - protein, 914 aa, Triticum aestivum; identical to SEQ ID NO: 52617

SEQ ID NO: 94365 - DNA, 1830 bp, Zea mays; identical to SEQ ID NO: 52618
  CDS (1)..(1830)

SEQ ID NO: 94366 - protein, 609 aa, Zea mays; identical to SEQ ID NO: 52619

SEQ ID NO: 94367 - DNA, 2730 bp, Zea mays; identical to SEQ ID NO: 52620
  CDS (1)..(2730)

SEQ ID NO: 94368 - protein, 909 aa, Zea mays; identical to SEQ ID NO: 52621

SEQ ID NO: 94369 - DNA, 2199 bp, Zea mays; identical to SEQ ID NO: 52624
  CDS (1)..(2199)

SEQ ID NO: 94370 - protein, 732 aa, Zea mays; identical to SEQ ID NO: 52625

SEQ ID NO: 94371 - DNA, 1821 bp, Zea mays; identical to SEQ ID NO: 52626
  CDS (1)..(1821)

SEQ ID NO: 94372 - protein, 606 aa, Zea mays; identical to SEQ ID NO: 52627

SEQ ID NO: 94373 - DNA, 1830 bp, Zea mays; identical to SEQ ID NO: 52628
  CDS (1)..(1830)

SEQ ID NO: 94374 - protein, 609 aa, Zea mays; identical to SEQ ID NO: 52629

SEQ ID NO: 94375 - DNA, 25 bp, Artificial sequence
  primer
atgcaggttttacatgtatgttcag

SEQ ID NO: 94376 - DNA, 26 bp, Artificial sequence
  primer
ttatttcaagcgatagtaaagctcac

SEQ ID NO: 94377 - protein, 554 aa, Artificial sequence
  consensus sequence
  Variant (2)..(3): Xaa in position 2 to 3 is any amino acid
  Variant (5)..(6): Xaa in position 5 to 6 is any amino acid
  Variant (8)..(8): Xaa in position 8 is any amino acid
  Variant (12)..(12): Xaa in position 12 is any amino acid
  Variant (15)..(17): Xaa in position 15 to 17 is any amino acid
  Variant (20)..(20): Xaa in position 20 is any amino acid
  Variant (22)..(24): Xaa in position 22 to 24 is any amino acid
  Variant (25)..(25): Xaa in position 25 is any or no amino acid
  Variant (27)..(32): Xaa in position 27 to 32 is any amino acid
  Variant (33)..(35): Xaa in position 33 to 35 is any or no amino acid
  Variant (37)..(37): Xaa in position 37 is any amino acid
  Variant (39)..(83): Xaa in position 39 to 83 is any amino acid
  Variant (84)..(100): Xaa in position 84 to 100 is any or no amino acid
  Variant (102)..(103): Xaa in position 102 to 103 is any amino acid
  Variant (104)..(110): Xaa in position 104 to 110 is any or no amino acid
  Variant (112)..(114): Xaa in position 112 to 114 is any amino acid
  Variant (117)..(136): Xaa in position 117 to 136 is any amino acid
  Variant (137)..(151): Xaa in position 137 to 151 is any or no amino acid
  Variant (154)..(167): Xaa in position 154 to 167 is any amino acid
  Variant (168)..(180): Xaa in position 168 to 180 is any or no amino acid
  Variant (184)..(186): Xaa in position 184 to 186 is any amino acid
  Variant (187)..(188): Xaa in position 187 to 188 is any or no amino acid
  Variant (191)..(212): Xaa in position 191 to 212 is any amino acid
  Variant (213)..(232): Xaa in position 213 to 232 is any or no amino acid
  Variant (234)..(237): Xaa in position 234 to 237 is any amino acid
  Variant (238)..(243): Xaa in position 238 to 243 is any or no amino acid
  Variant (247)..(248): Xaa in position 247 to 248 is any amino acid
  Variant (251)..(251): Xaa in position 251 is any amino acid
  Variant (253)..(257): Xaa in position 253 to 257 is any amino acid
  Variant (258)..(259): Xaa in position 258 to 259 is any or no amino acid
  Variant (261)..(262): Xaa in position 261 to 262 is any amino acid
  Variant (264)..(273): Xaa in position 264 to 273 is any amino acid
  Variant (274)..(279): Xaa in position 274 to 279 is any or no amino acid
  Variant (282)..(282): Xaa in position 282 is any amino acid
  Variant (285)..(285): Xaa in position 285 is any amino acid
  Variant (287)..(288): Xaa in position 287 to 288 is any amino acid
  Variant (289)..(289): Xaa in position 289 is any or no amino acid
  Variant (291)..(291): Xaa in position 291 is any amino acid
  Variant (293)..(294): Xaa in position 293 to 294 is any amino acid
  Variant (296)..(300): Xaa in position 296 to 300 is any amino acid
  Variant (301)..(323): Xaa in position 301 to 323 is any or no amino acid
  Variant (325)..(326): Xaa in position 325 to 326 is any amino acid
  Variant (328)..(331): Xaa in position 328 to 331 is any amino acid
  Variant (334)..(335): Xaa in position 334 to 335 is any amino acid
  Variant (336)..(353): Xaa in position 336 to 353 is any or no amino acid
  Variant (355)..(360): Xaa in position 355 to 360 is any amino acid
  Variant (363)..(364): Xaa in position 363 to 364 is any amino acid
  Variant (368)..(368): Xaa in position 368 is any amino acid
  Variant (370)..(382): Xaa in position 370 to 382 is any amino acid
  Variant (383)..(388): Xaa in position 383 to 388 is any or no amino acid
  Variant (390)..(392): Xaa in position 390 to 392 is any amino acid
  Variant (395)..(395): Xaa in position 395 is any amino acid
  Variant (396)..(398): Xaa in position 396 to 398 is any or no amino acid
  Variant (400)..(402): Xaa in position 400 to 402 is any amino acid
  Variant (403)..(403): Xaa in position 403 is any or no amino acid
  Variant (405)..(432): Xaa in position 405 to 432 is any amino acid
  Variant (433)..(435): Xaa in position 433 to 435 is any or no amino acid
  Variant (438)..(438): Xaa in position 438 is any amino acid
  Variant (440)..(443): Xaa in position 440 to 443 is any amino acid
  Variant (453)..(453): Xaa in position 453 is any amino acid
  Variant (455)..(459): Xaa in position 455 to 459 is any amino acid
  Variant (462)..(463): Xaa in position 462 to 463 is any amino acid
  Variant (465)..(469): Xaa in position 465 to 469 is any amino acid
  Variant (473)..(473): Xaa in position 473 is any amino acid
  Variant (476)..(496): Xaa in position 476 to 496 is any amino acid
  Variant (497)..(521): Xaa in position 497 to 521 is any or no amino acid
  Variant (523)..(537): Xaa in position 523 to 537 is any amino acid
  Variant (538)..(543): Xaa in position 538 to 543 is any or no amino acid
  Variant (545)..(546): Xaa in position 545 to 546 is any amino acid
  Variant (548)..(549): Xaa in position 548 to 549 is any amino acid
  Variant (551)..(553): Xaa in position 551 to 553 is any amino acid
EXXPXXKXGGLXDVXXXLPXAXXXXGXXXXXXXXXPXYXXXXXXXXXXXXXXXXXXXXXXXXXXXXXXXXXXXXXXXXXXXXXXXXXXXXXXXXXXXXXXYXXXXXXXXXDXXXRFXXXXXXXXXXXXXXXXXXXXXXXXXXXXXXXXXXXDWXXXXXXXXXXXXXXXXXXXXXXXXXXXIHNXXXXXQGXXXXXXXXXXXXXXXXXXXXXXXXXXXXXXXXXXXXXXXXXXKXXXXXXXXXXTVSXXYAXEXXXXXXXGXXLXXXXXXXXXXXXXXXXGIXNGXDXXXWXPXXDXXXXXXXXXXXXXXXXXXXXXXXXXXXXKXXLXXXXGLXXXXXXXXXXXXXXXXXXXXPXXXXXXRLXXQKGXDXXXXXXXXXXXXXXXXXXXQXXXLGXXXXGXXXXEXXXXXXXXXXXXXXXXXXXXXXXXXXXXXXXAGXDXXXXPSRFEPCGLXQXXXXXYGXXPXXXXXGGLXDTXXXXXXXXXXXXXXXXXXXXXXXXXXXXXXXXXXXXXXXXXXXXXXAXXXXXXXXXXXXXXXXXXXXXMXXDXXWXXXA

SEQ ID NO: 94378 - protein, 22 aa, Artificial sequence
  protein pattern
  Variant (2)..(5): Xaa in position 2 to 5 is any amino acid
  Variant (6)..(9): Xaa in position 6 to 9 is any or no amino acid
  Variant (11)..(11): Xaa in position 11 is Ala, Ser, Thr or Val
  Variant (14)..(14): Xaa in position 14 is Leu or Met
  Variant (15)..(15): Xaa in position 15 is Ala or Gly
  Variant (17)..(19): Xaa in position 17 to 19 is any amino acid
  Variant (20)..(20): Xaa in position 20 is Ala, Gly, Ser or Thr
  Variant (22)..(22): Xaa in position 22 is Gly, Pro or Ser
VXXXXXXXXKXGGXXDXXXXLX

SEQ ID NO: 94379 - protein, 13 aa, Artificial sequence
  protein pattern
  Variant (2)..(2): Xaa in position 2 is Ile, Leu, Met or Val
  Variant (3)..(5): Xaa in position 3 to 5 is any amino acid
  Variant (6)..(6): Xaa in position 6 is Gly, Ile or Val
  Variant (7)..(7): Xaa in position 7 is Ala, Gly, Asn, Ser or Thr
  Variant (10)..(11): Xaa in position 10 to 11 is any amino acid
PXXXXXXRLXXQK

SEQ ID NO: 94380 - DNA, 1179 bp, Escherichia coli
  CDS (1)..(1179): transl_table=11
atgagtaatattgtttacctgacagtaacgggagaacaacaaggaagcatctccgcaggttgtgggacttctgagtctacaggtaatcgttggcagagcgggcatgaggatgaaatatttacattctcactcttaaataatattaataatacggggcttggttcacagttccatggtataacattttgtaaattaattgataaaagcactccattatttattaattccattaacaataatgaacaattatttatgggatttgacttctatcgaataaatagatttggtagattggaaaagtattattatatacaactaagaggcgcttttttatcggctattcatcaccagatcattgaaaaccaactggatacagaaacaataactattagttatgaatttatcctctgtcaacatcttatcgcaaataccgagttcagctatttggcactccctgaaaattataaccgtttgtttttaccaaattcaaaaaaccaaacaaataatcgtttcaaaacgttaaacagcaaagctattggcaggctacttgctgctggtggcgtatacaatgggaacattgaaggattcagagatactgcggaaaaactgggtggagatgcaataaaaggctatgatcaaatactaaatgaaaaaacagcgggcatagcgatagcaacagcatctattcttttaacaaagcgttctaatgttgatacatatacagaaataaatagttacttaggcaaacttagaggtcaacaaaaacttcttgatggtatagacataatagaaataatatacattaagagaccttcaaaagacttagctaacttacgaaaggagtttaataaaactgtaagaaaaaattttcttatcaaacttgcaaaaacctccgaagcatctggaagattcaacgccgaagaccttttaagaatgagaaagggcaatgttcctctaaattataatgttcaccataaactatctctagatgatggtggtactaatgatttcgaaaatttagtattaatcgaaaacgaaccatatcataaagtttttactaacatgcaatcacgaatagctaagggaatattagtaggtgaaagcaaaatcactccctgggccattccatctggctcaatttatcctcccatgaaaaatattatggaccacacaaaataa

SEQ ID NO: 94381 - protein, 392 aa, Escherichia coli
MSNIVYLTVTGEQQGSISAGCGTSESTGNRWQSGHEDEIFTFSLLNNINNTGLGSQFHGITFCKLIDKSTPLFINSINNNEQLFMGFDFYRINRFGRLEKYYYIQLRGAFLSAIHHQIIENQLDTETITISYEFILCQHLIANTEFSYLALPENYNRLFLPNSKNQTNNRFKTLNSKAIGRLLAAGGVYNGNIEGFRDTAEKLGGDAIKGYDQILNEKTAGIAIATASILLTKRSNVDTYTEINSYLGKLRGQQKLLDGIDIIEIIYIKRPSKDLANLRKEFNKTVRKNFLIKLAKTSEASGRFNAEDLLRMRKGNVPLNYNVHHKLSLDDGGTNDFENLVLIENEPYHKVFTNMQSRIAKGILVGESKITPWAIPSGSIYPPMKNIMDHTK

SEQ ID NO: 94382 - DNA, 1179 bp, Escherichia coli CFT073
  CDS (1)..(1179): transl_table=11
atgagtaatattgtttatctgacagtaacgggagaacaacaaggaagcatctccgcaggttgtgggactactgaatctataggtaatcgctggcagagcgggcatgaggatgaaatatttacattctcactcttaaatagtattactaatacggggcttggttcacagttccatggtataacattttgtaaattaattgataaaagcactccattatttattaattccattaacaataatgaacaattatttatggaatttgacttctatcgaataaatagatttggtagatgggaaaagtattattatatacaactaagaggcgcttttttatcggctattcatcaccagatctttgaaaaccaactggatacagaaacaataactgttagttatgaatttatcctctgccaacatcttatcactaacaccgagttcagctatttggcactccctgaaaattataaccgcttgtttttaccaaattcaaaaaacaaaacaaataatggtttaaaaacgttaaacagcgaagctgttggcaggctacttgctgctggtggcgtatacaatgggaacattgaaggattcagagatactgcggaaaaactgggtggagatgcaatcaaaggctatgatcaaatactaaatgaaaaaacagcgggcatagcgatagcaacagcatctattcttttaacaaagcgttctaatgttgatacatatacagaaataaatagttacttaggcaagcttagaggccaacaaaaacttcttgatagtatagacataatagaaataatatacattaagagaccttcaaaagacttagctaacttacgaaaggagtttaataaaaatgtaagaaaaaattttcttatcaaacttgcaaaaacctccgaagcatctggaagattcaacgccgaagaccttttaagaatgagaaagggcaatgttcctctaaattataatgtacaccataaactatctctagatgatggtggtactaatgatttggaaaatttagtattaatcgaaaacgaaccatatcataaggtgtttactaacatgcaatcacgaatagctaagggaatattagtgggtgaaagcaaaatcactccctgggccattccatctggctcaatttatcctcccatgaaaaatattatggaacccacaaaatga

SEQ ID NO: 94383 - protein, 392 aa, Escherichia coli CFT073
MSNIVYLTVTGEQQGSISAGCGTTESIGNRWQSGHEDEIFTFSLLNSITNTGLGSQFHGITFCKLIDKSTPLFINSINNNEQLFMEFDFYRINRFGRWEKYYYIQLRGAFLSAIHHQIFENQLDTETITVSYEFILCQHLITNTEFSYLALPENYNRLFLPNSKNKTNNGLKTLNSEAVGRLLAAGGVYNGNIEGFRDTAEKLGGDAIKGYDQILNEKTAGIAIATASILLTKRSNVDTYTEINSYLGKLRGQQKLLDSIDIIEIIYIKRPSKDLANLRKEFNKNVRKNFLIKLAKTSEASGRFNAEDLLRMRKGNVPLNYNVHHKLSLDDGGTNDLENLVLIENEPYHKVFTNMQSRIAKGILVGESKITPWAIPSGSIYPPMKNIMEPTK

SEQ ID NO: 94384 - DNA, 26 bp, Artificial sequence
  primer
atgagtaatattgtttacctgacagt

SEQ ID NO: 94385 - DNA, 28 bp, Artificial sequence
  primer
ttattttgtgtggtccataatatttttc

SEQ ID NO: 94386 - DNA, 1476 bp, Escherichia coli
  CDS (1)..(1476): transl_table=11
atggctaactacttcaatacactgaatctgcgccagcagctggcacagctgggcaaatgtcgctttatgggccgcgatgaattcgccgatggcgcgagctaccttcagggtaaaaaagtagtcatcgtcggctgtggcgcacagggtctgaaccagggcctgaacatgcgtgattctggtctcgatatctcctacgctctgcgtaaagaagcgattgccgagaagcgcgcgtcctggcgtaaagcgaccgaaaatggttttaaagtgggtacttacgaagaactgatcccacaggcggatctggtgattaacctgacgccggacaagcagcactctgatgtagtgcgcaccgtacagccactgatgaaagacggcgcggcgctgggctactcgcacggtttcaacatcgtcgaagtgggcgagcagatccgtaaagatatcaccgtagtgatggttgcgccgaaatgcccaggcaccgaagtgcgtgaagagtacaaacgtgggttcggcgtaccgacgctgattgccgttcacccggaaaacgatccgaaaggcgaaggcatggcgattgccaaagcctgggcggctgcaaccggtggtcaccgtgcgggtgtgctggaatcgtccttcgttgcggaagtgaaatctgacctgatgggcgagcaaaccatcctgtgcggtatgttgcaggctggctctctgctgtgcttcgacaagctggtggaagaaggtaccgatccagcatacgcagaaaaactgattcagttcggttgggaaaccatcaccgaagcactgaaacagggcggcatcaccctgatgatggaccgtctctctaacccggcgaaactgcgtgcttatgcgctttctgaacagctgaaagagatcatggcacccctgttccagaaacatatggacgacatcatctccggcgaattctcttccggtatgatggcggactgggccaacgatgataagaaactgctgacctggcgtgaagagaccggcaaaaccgcgtttgaaaccgcgccgcagtatgaaggcaaaatcggcgagcaggagtacttcgataaaggcgtactgatgattgcgatggtgaaagcgggcgttgaactggcgttcgaaaccatggtcgattccggcatcattgaagagtctgcatattatgaatcactgcacgagctgccgctgattgccaacaccatcgcccgtaagcgtctgtacgaaatgaacgtggttatctctgataccgctgagtacggtaactatctgttctcttacgcttgtgtgccgttgctgaaaccgtttatggcagagctgcaaccgggcgacctgggtaaagctattccggaaggcgcggtagataacgggcaactgcgtgatgtgaacgaagcgattcgcagccatgcgattgagcaggtaggtaagaaactgcgcggctatatgacagatatgaaacgtattgctgttgcgggttaa

SEQ ID NO: 94387 - protein, 491 aa, Escherichia coli
MANYFNTLNLRQQLAQLGKCRFMGRDEFADGASYLQGKKVVIVGCGAQGLNQGLNMRDSGLDISYALRKEAIAEKRASWRKATENGFKVGTYEELIPQADLVINLTPDKQHSDVVRTVQPLMKDGAALGYSHGFNIVEVGEQIRKDITVVMVAPKCPGTEVREEYKRGFGVPTLIAVHPENDPKGEGMAIAKAWAAATGGHRAGVLESSFVAEVKSDLMGEQTILCGMLQAGSLLCFDKLVEEGTDPAYAEKLIQFGWETITEALKQGGITLMMDRLSNPAKLRAYALSEQLKEIMAPLFQKHMDDIISGEFSSGMMADWANDDKKLLTWREETGKTAFETAPQYEGKIGEQEYFDKGVLMIAMVKAGVELAFETMVDSGIIEESAYYESLHELPLIANTIARKRLYEMNVVISDTAEYGNYLFSYACVPLLKPFMAELQPGDLGKAIPEGAVDNGQLRDVNEAIRSHAIEQVGKKLRGYMTDMKRIAVAG

SEQ ID NO: 94388 - DNA, 1482 bp, Colwellia psychrerythraea 34H
  CDS (1)..(1482): transl_table=11
atgagcaattattttaatactttaagcttacgtgaaaaactaggtcagctaggcaaatgtcgttttatgaaacgtgaagaattcaacgatggttgtaacttcattaaagattggaacattgttatcgttggttgtggtgctcaaggtttaaaccaaggtttaaacatgcgtgattcaggtttgaatatttcttatacattgcgtgatgcagcgattagcgaaaagcgtcaatcatggcagtgggctactgaaaatggtttcacagtaggtagctacgcagaattaattcctcaagccgatttagttttaaacttaacacctgataagcaacatacttcagcagttactgcggtaatgccattgatgaagcagggcgcaacactagcttactcacatggtttcaatatcgttgaagaaggcatgcaaattcgttctgatatcacagtagttatggttgctcctaagtgtccaggtactgaagtacgtgaagaatacaaacgtggttttggtgttccaacacttatcgcagttcacccagaaaatgatccacaaggtaacggtttagccattgctaaagcttacgcaagcgcaacaggtggtgatagagcgggtgttcttgagtcttctttcatcgctgaagttaagtctgatttaatgggcgagcaaacaattctttgtggtatgttgcaaacggctgcagttttaggtcacaaacagctaattgctcaaggtatggacgcagcttacgcacgtaaattattacaatacggtttagagacaaccactgaaggtcttaagcatggcggcatcactaacatgatggatcgcttatcaaacccagctaaaattttagcgtttgatatggctgaagagttaaaagtaattttacgtcctttattccaaaaacatatggacgacatcattgaaggtcgtttctctgcaactatgatggcagattgggccaacgacgatgttaacttattaacatggcgtgcagaaacagcagaaacttcttttgaaaaatcacctgagtgtgacactgagatttcagagcaagaatactacgataaaggtatctttgttgttgcgatgattaaagctggtgttgaattagcattcgacgcaatggttgattcaggtatcatcaatgcatctgcatattatgagtcgttacacgaaacgccattaattgctaactgtattgcacgtaacatgttacacgaaatgaacgttgttatttctgatactgcagaatacggtaactatttatttactcacgctgctgtgccattacttgcagactacacggctagcttaacgttagaacaattaggcgaaggcttaaaagagagttcaaataacgttgataatgctcgtttgattgaagtaaacgaagcgattcgcagtcatggtgttgaagtgattggtaaagaacttcgcggttatatgactgacatgaaaaaaattgctagtgcaaaataa

SEQ ID NO: 94389 - protein, 493 aa, Colwellia psychrerythraea 34H
MSNYFNTLSLREKLGQLGKCRFMKREEFNDGCNFIKDWNIVIVGCGAQGLNQGLNMRDSGLNISYTLRDAAISEKRQSWQWATENGFTVGSYAELIPQADLVLNLTPDKQHTSAVTAVMPLMKQGATLAYSHGFNIVEEGMQIRSDITVVMVAPKCPGTEVREEYKRGFGVPTLIAVHPENDPQGNGLAIAKAYASATGGDRAGVLESSFIAEVKSDLMGEQTILCGMLQTAAVLGHKQLIAQGMDAAYARKLLQYGLETTTEGLKHGGITNMMDRLSNPAKILAFDMAEELKVILRPLFQKHMDDIIEGRFSATMMADWANDDVNLLTWRAETAETSFEKSPECDTEISEQEYYDKGIFVVAMIKAGVELAFDAMVDSGIINASAYYESLHETPLIANCIARNMLHEMNVVISDTAEYGNYLFTHAAVPLLADYTASLTLEQLGEGLKESSNNVDNARLIEVNEAIRSHGVEVIGKELRGYMTDMKKIASAK

SEQ ID NO: 94390 - DNA, 984 bp, Synechococcus elongatus PCC 7942
  CDS (1)..(984): transl_table=11
atgtattacgacgccgatgccaatctggatttgttgaatggcaaaacggtggccatcattggctatggctcgcaaggccatgcccacgccctcaacctccgcgacagcggtgtgaatgtcgtggttggtctgtaccccggcagcaaatcggctgctaaagccgaagccgaaggtctgaaagtgctgcccgtggcggaagctgcgcaagccgcagactggatcatgatcctgctgcccgatgaattccaaaagagcgtttttgaaaacgaaatccgtccggccttgagcgcaggcaaagtcctcgcttttgcccacggcttcaacatccacttcgcccaaatcgtgccgccggctgatgtagacgtggtgatgattgcaccgaagagccccggccacttggtgcgtcgcacctacgaacaaggccaaggtgtgccttgcctgttcgcaatctaccaagatgccagcggtcaagcccgcgatcgcgccatggcctacgccaaaggcattggcggcacccgtgccggcattctggaaaccagcttccgcgaagaaactgaaaccgacctgttcggcgaacaagccgtgctctgcggtggtttgagtgccttgatcaaagctggctttgaaacgctggtagaagccggttatcagcctgagctggcctacttcgagtgtctgcacgaagtcaaactgatcgtcgacttgatcgtcgaaggtggtttggcggcaatgcgcgacagcatctccaacacggcagaatacggcgactacgtgaccggcccccgcctgatcacggaagaaaccaaggccgaaatgaaaagagtgctggccgacattcagcaaggtcgcttcgccctcgactttgtgcaagagtgtggcgctggcaagccggtgatgactgccacccgtcgtttggaagctgagcatccgatcgagtcggtgggcaaagacctgcgtgccatgttcagctggctgaaaaagtaa

SEQ ID NO: 94391 - protein, 327 aa, Synechococcus elongatus PCC 7942
MYYDADANLDLLNGKTVAIIGYGSQGHAHALNLRDSGVNVVVGLYPGSKSAAKAEAEGLKVLPVAEAAQAADWIMILLPDEFQKSVFENEIRPALSAGKVLAFAHGFNIHFAQIVPPADVDVVMIAPKSPGHLVRRTYEQGQGVPCLFAIYQDASGQARDRAMAYAKGIGGTRAGILETSFREETETDLFGEQAVLCGGLSALIKAGFETLVEAGYQPELAYFECLHEVKLIVDLIVEGGLAAMRDSISNTAEYGDYVTGPRLITEETKAEMKRVLADIQQGRFALDFVQECGAGKPVMTATRRLEAEHPIESVGKDLRAMFSWLKK

SEQ ID NO: 94392 - DNA, 1479 bp, Cytophaga hutchinsonii ATCC 33406
  CDS (1)..(1479): transl_table=11
atggcaaattatttcaatactctttcattaagagaaaaattagatcagttaggcgtttgcgaattcatggacagaagtgagttttctgacggtgtagctgctttgaaaggtaaaaaaattgtaatcgtaggttgtggtgcacaaggtttgaaccagggtttaaaccttcgtgattctggtttagatgtttcttatacattacgtaaagaagccattgattctaaaagacaatcatttttaaatgcttctgaaaatggtttcaaagtgggcacgtacgaagaattaattcctactgctgatttagtaattaacttaacgccggataaacaacatactgctgttgtgtctgcagttatgccattaatgaaaaaaggttctaccttatcttactctcacggtttcaacatcgttgaagaaggtatgcagatccgtaaggacatcacggtaatcatggttgctcctaagtctccgggttctgaagttcgtgaagaatataaaagaggtttcggtgtccctacgttgatcgccgttcaccctgaaaacgatcctgaaggtaaaggctgggattatgctaaggcttactgcgtaggtacaggtggtgacagagctggtgtattgaaatcatctttcgttgctgaagtaaaatctgatttaatgggtgagcaaacaatcctttgtggtttgttgcaaactggttctatcctttgcttcgacaaaatggttgaaaaaggcattgataaaggatatgcttctaaattgatccagtacggatgggaagttatcacggaatcattgaaacatggcggtatcagcggtatgatggatcgtctttcaaaccctgctaaaatcaaggcgttccaggtatctgaagaattgaaagatatcatgcgtccattattccgtaagcatcaggatgatatcatcagcggagaattctcccgcatcatgatggaagactgggcgaatggcgataaaaatttattgacatggagagctgcaacaggtgaaactgcatttgaaaaaacgcctgcaggtgacgttaaaattgctgagcaggaatattatgacaatggtttgctgatggttgctatggttcgtgcgggtgttgaactggcattcgaaacaatgactgaatcaggtatcattgatgaatctgcttactacgaatcattacacgaaacaccgcttatcgcgaacacaatcgcgcgtaagaaattattcgaaatgaaccgtgtaatttctgatacagctgaatacggctgctacttattcgatcatgcctgtaagccattattggcgaacttcatgaagacagtagatacagacatcattggtaaaaacttcaacgcgggtaaagataatggtgttgacaaccagatgctgatcgctgtaaatgaagtattacgttctcacccgatcgaaatcgttggtgctgaattacgtgaagcaatgactgaaatgaaagcaatcgtttcttaa

SEQ ID NO: 94393 - protein, 492 aa, Cytophaga hutchinsonii ATCC 33406
MANYFNTLSLREKLDQLGVCEFMDRSEFSDGVAALKGKKIVIVGCGAQGLNQGLNLRDSGLDVSYTLRKEAIDSKRQSFLNASENGFKVGTYEELIPTADLVINLTPDKQHTAVVSAVMPLMKKGSTLSYSHGFNIVEEGMQIRKDITVIMVAPKSPGSEVREEYKRGFGVPTLIAVHPENDPEGKGWDYAKAYCVGTGGDRAGVLKSSFVAEVKSDLMGEQTILCGLLQTGSILCFDKMVEKGIDKGYASKLIQYGWEVITESLKHGGISGMMDRLSNPAKIKAFQVSEELKDIMRPLFRKHQDDIISGEFSRIMMEDWANGDKNLLTWRAATGETAFEKTPAGDVKIAEQEYYDNGLLMVAMVRAGVELAFETMTESGIIDESAYYESLHETPLIANTIARKKLFEMNRVISDTAEYGCYLFDHACKPLLANFMKTVDTDIIGKNFNAGKDNGVDNQMLIAVNEVLRSHPIEIVGAELREAMTEMKAIVS

SEQ ID NO: 94394 - DNA, 1482 bp, Haemophilus somnus 129PT
  CDS (1)..(1482): transl_table=11
atgggtaattatttcaatacattaaatttgcgtcaacaacttgaccagttaggtcgttgtcgctttatggagcgtgaggaatttgccgatggggttaatttcttaaaaggtaaaaaaattgtcattatcggatgtggtgctcaaggattaaatcaaggtttaaatatgcgagattccggtttggatattgcttatgcccttcgtccggaagctattgaggaaaagcgtgcttcttttcagcgagcaagtgaaaacggatttgttgtaggagcttatcagcaattaattcctacggcggatttggtgattaatttaacaccagataaacaacactctaaagtcgttgctgatgttatgccgttaattaaacaaggagcggctttgggatattcgcatggtttaaatattgttgaagtgggagaaaaaattcgtcaggacatcactgtggtaatggtcgctcctaagtgtcctgggacggaagtgcgggaagaatttaaacgtggattcggtgtgccgacgttaattgctgttcatcctgaaaacgatccgaaaggtgaagggttagccattgctaaagcatgggctgcggcgactggtggacatcgtgctggtgttttggaatcttcttttgttgcggaagtaaaatccgatttaatgggagagcaaacaattttatgcggtatgttacaggctggttctttagtatgttatgacaagttaatcgctgatggtaaagatccggcatatgcgggtaaattaattcaatatggttgggaaacaattactgaagccttaaaacaaggcggtattaccttaatgatggatcggttatccaatagcgctaagttacgtgcattttccctttccgagcaaattaaagaaaaattggattttctatttaaaaaacatatggatgatattattagcggtgaattttcccgtgtcatgatggaagactgggcaaacggtgatgctaatttattgaaatggcgtgaacaaaccggtaaaacagcatttgaaaatgcaccaaaaggagaaaatattaaaatttccgaacaagaatatttcgatcatggcgtattaatggtagcaatggttaaagctggcgttgaattggcttttgatacaatggtagaaacgggaatttatgaagagtctgcctattatgaatcactacacgagttaccattaattgccaatacaattgctcgtaagcgtttatatgaaatgaatgtagtcatctctgatactgctgagtatggtaattatttatttgctaacgtagcggctccaattttagctaaagaaattattccaacgttaaaacgtggtgatttaggtgagtcaacaccagcaacagaaatcgataatattttgttacgtgatgtaaatgatgcaattcgtcagcatccgattgaattaatcggtcaggaattgcgtggttatatgacagacatgaaacgtatttcttcacagggataa

SEQ ID NO: 94395 - protein, 493 aa, Haemophilus somnus 129PT
MGNYFNTLNLRQQLDQLGRCRFMEREEFADGVNFLKGKKIVIIGCGAQGLNQGLNMRDSGLDIAYALRPEAIEEKRASFQRASENGFVVGAYQQLIPTADLVINLTPDKQHSKVVADVMPLIKQGAALGYSHGLNIVEVGEKIRQDITVVMVAPKCPGTEVREEFKRGFGVPTLIAVHPENDPKGEGLAIAKAWAAATGGHRAGVLESSFVAEVKSDLMGEQTILCGMLQAGSLVCYDKLIADGKDPAYAGKLIQYGWETITEALKQGGITLMMDRLSNSAKLRAFSLSEQIKEKLDFLFKKHMDDIISGEFSRVMMEDWANGDANLLKWREQTGKTAFENAPKGENIKISEQEYFDHGVLMVAMVKAGVELAFDTMVETGIYEESAYYESLHELPLIANTIARKRLYEMNVVISDTAEYGNYLFANVAAPILAKEIIPTLKRGDLGESTPATEIDNILLRDVNDAIRQHPIELIGQELRGYMTDMKRISSQG

SEQ ID NO: 94396 - DNA, 1479 bp, Shewanella sp. MR-4
  CDS (1)..(1479): transl_table=11
atggctaactattttaactctctgaatttacgtcaacaattagaacagcttggccaatgccgttttatggatcgctccgagtttagcgatggctgcaattacatcaaagattggaatattgttattttaggttgtggtgctcagggtcttaaccaaggtctgaacatgcgtgactctgggctgaatattgcctacgccctgcgcccagaagccattgcccagaaacgtgcctcatggcaaaaagccacggacaacggctttaaagtgggcacctttgaagagctgatcccaacggcggatttggtactgaacttaacgcccgataagcagcactccaatgtggttagcgctgtgatgccactgatgaaacaaggcgcaacgctgtcttattcccacggttttaacatcgttgaagaaggcatgcagatccgccccgatattacagttgtgatggtagcgcctaagtgcccaggtactgaagtgcgtgaagaatacaagcgtggttttggtgtaccgacactgattgcagtgcacccagaaaacgaccctaatggcgatggtttagagattgccaaagcctatgcgagtgccacaggcggtgaccgcgctggcgtgttgcaatcttcctttattgccgaagtaaaatcggatctgatgggcgaacaaaccattctgtgcggtatgttgcagacgggcgctatcctaggttacgacaagatggtggccgatggtgttgaacctggctatgccgctaagttaatccaacaaggttgggaaaccgtgaccgaggcgcttaagcacggcggtatcaccaacatgatggacagactgtctaatcctgccaagattaaagcgtttgaaattgcagaagatttaaaagaaattctgcaacccttattcgaaaaacatatggatgacatcatcagcggcgagttctcacgcactatgatgcaagactgggcgaatgacgacgctaacctgctgcgttggcgcgccgaaaccgccgaaacgggcttcgaaaatgcccctgtttcgagcgagcatatcgacgagcaaacctatttcgacaaggggattttcctagttgcgatgatcaaagccggtgtcgaattagccttcgatactatggtgtcggcgggtattgttgaagagtcagcctattacgaatcactgcatgaaacgccgctgatcgctaacaccatcgcccgtaaacgtctttacgagatgaacgtggtgatctcggataccgcagaatacggttgttatctgttcaaccatgctgcagtacctatgctgcgtgactatgtaaatgccatgtcgccagagtatttaggtgcgggtctgaaggacagttctaacaacgtcgataacctgcagttaatcgccatcaatgatgcgattcgccacacttcagttgagtatatcggtgcggaacttcgtggttatatgactgatatgaaaagtattgttggagcttaa

SEQ ID NO: 94397 - protein, 492 aa, Shewanella sp. MR-4
MANYFNSLNLRQQLEQLGQCRFMDRSEFSDGCNYIKDWNIVILGCGAQGLNQGLNMRDSGLNIAYALRPEAIAQKRASWQKATDNGFKVGTFEELIPTADLVLNLTPDKQHSNVVSAVMPLMKQGATLSYSHGFNIVEEGMQIRPDITVVMVAPKCPGTEVREEYKRGFGVPTLIAVHPENDPNGDGLEIAKAYASATGGDRAGVLQSSFIAEVKSDLMGEQTILCGMLQTGAILGYDKMVADGVEPGYAAKLIQQGWETVTEALKHGGITNMMDRLSNPAKIKAFEIAEDLKEILQPLFEKHMDDIISGEFSRTMMQDWANDDANLLRWRAETAETGFENAPVSSEHIDEQTYFDKGIFLVAMIKAGVELAFDTMVSAGIVEESAYYESLHETPLIANTIARKRLYEMNVVISDTAEYGCYLFNHAAVPMLRDYVNAMSPEYLGAGLKDSSNNVDNLQLIAINDAIRHTSVEYIGAELRGYMTDMKSIVGA

SEQ ID NO: 94398 - DNA, 1479 bp, Shewanella sp. MR-7
  CDS (1)..(1479): transl_table=11
atggctaactattttaactctctgaatttacgtcaacaattagaacagcttggccaatgccgttttatggatcgctccgagtttagcgatggctgcaattacatcaaagattggaatattgttattttaggttgtggtgctcagggtcttaaccaaggtctgaacatgcgtgactctgggctgaatattgcctacgccctgcgcccagaagccattgcccagaaacgtgcctcatggcaaaaagccacggacaacggctttaaagtgggcacctttgaagagctgatcccaacggcggatttggtactgaacttaacgcccgataagcagcactccaatgtggttagcgctgtgatgccactgatgaaacagggcgcaacgctgtcttattcccacggttttaacatcgttgaagaaggcatgcagatccgccccgatattacagttgtgatggtagcgcctaagtgcccaggtactgaagtgcgtgaagaatacaagcgtggttttggtgtaccgacactgattgcagtgcacccagaaaacgaccctaatggcgatggtttagagattgccaaagcctatgcgagtgccacaggcggtgaccgcgctggcgtgttgcaatcttcctttatcgccgaagtaaaatcggatctgatgggcgaacaaaccattctgtgcggtatgttgcagactggcgctatcttaggttacgacaagatggtggccgatggtgttgaacctggctatgccgctaagttaatccaacaaggttgggaaaccgtgaccgaggcgcttaagcacggcggtatcaccaacatgatggacagactgtctaatccagccaagattaaagcgtttgaaattgcagaagatttaaaagaaattctgcaacccttattcgaaaaacatatggatgacatcatcagcggcgagttctcacgcactatgatgcaagactgggcgaatgacgacgctaacctgctgcgttggcgcgccgaaaccgccgaaacgggcttcgaaaatgcccctgtttcgagcgagcatatcgacgagcaaacctatttcgacaaggggattttcctggttgcgatgatcaaagccggtgtcgaattagccttcgatactatggtgtcggcgggtattgttgaagagtcagcctattacgaatcactgcatgaaacgccgctgatcgctaacaccatcgcccgtaaacgtctttacgagatgaacgtggtgatctcggataccgcagaatacggttgttatctgttcaaccatgctgcagtacctatgctgcgtgactatgtaaatgccatgtcgccagagtatttaggtgcgggtctgaaggacggttctaacaacgtcgataacctgcagttaatcgccatcaatgatgcgattcgccacacttcagttgagtatatcggtgcggaacttcgtggttatatgactgatatgaaaagtattgttggagcttaa

SEQ ID NO: 94399 - protein, 492 aa, Shewanella sp. MR-7
MANYFNSLNLRQQLEQLGQCRFMDRSEFSDGCNYIKDWNIVILGCGAQGLNQGLNMRDSGLNIAYALRPEAIAQKRASWQKATDNGFKVGTFEELIPTADLVLNLTPDKQHSNVVSAVMPLMKQGATLSYSHGFNIVEEGMQIRPDITVVMVAPKCPGTEVREEYKRGFGVPTLIAVHPENDPNGDGLEIAKAYASATGGDRAGVLQSSFIAEVKSDLMGEQTILCGMLQTGAILGYDKMVADGVEPGYAAKLIQQGWETVTEALKHGGITNMMDRLSNPAKIKAFEIAEDLKEILQPLFEKHMDDIISGEFSRTMMQDWANDDANLLRWRAETAETGFENAPVSSEHIDEQTYFDKGIFLVAMIKAGVELAFDTMVSAGIVEESAYYESLHETPLIANTIARKRLYEMNVVISDTAEYGCYLFNHAAVPMLRDYVNAMSPEYLGAGLKDGSNNVDNLQLIAINDAIRHTSVEYIGAELRGYMTDMKSIVGA

SEQ ID NO: 94400 - DNA, 1479 bp, Shewanella sp. ANA-3
  CDS (1)..(1479): transl_table=11
atggctaactattttaactctctgaatttacgtcaacaattagcacagcttggccaatgtcgtttcatggaccgttctgaattcagcgacggctgcaattacatcaaagattggaatattgttattttaggttgtggtgctcagggtcttaaccaaggtctgaacatgcgcgactctgggctgaatattgcctacgctctgcgccctgaagccattgctcaaaaacgtgcatcatggcaaaaagccacagataacggttttaaagtaggtacttttgaagagctgatcccaacggcggatttggtattgaacttaacgcccgataagcagcactccaatgtggttagcgctgtgatgccactgatgaaacagggcgcaacactgtcttattcccacggttttaacatcgttgaagaaggcatgcagatccgccccgatattacagttgtgatggtagcgcctaagtgtccaggcaccgaagtgcgtgaagaatacaagcgtggttttggtgtaccaacactgattgccgtgcacccagaaaacgaccctaatggcgatggtttagagattgccaaagcctatgcgagtgccacaggtggtgaccgcgctggcgtgttgcaatcttcctttatcgccgaagtaaaatcggatctgatgggcgagcaaaccattctgtgcggtatgttgcagactggcgctatcttaggttacgacaagatggtggccgatggtgttgaacctggctatgccgctaagttaattcaacaaggttgggaaaccgtgaccgaggcgcttaagcacggcggtatcaccaatatgatggacagactgtctaatccagccaagattaaagcgtttgaaattgcagaagatttaaaagaaattctgcaacccttattcgaaaaacatatggatgacatcatcagcggcgagttctcccgcactatgatgcaagactgggccaatgacgacgctaacctgctgcgttggcgcgccgaaaccgccgaaacgggcttcgaaaatgccccagtgtcgagcgagcatatcgacgagcaaacctatttcgacaaggggattttcctggttgcgatgatcaaagccggtgtcgaattagcctttgatactatggtgtcggcgggtattgttgaagagtcagcctattacgaatcactgcatgaaacgccgctgatcgctaacaccatcgcccgtaaacgtctttatgagatgaacgtggtgatctcggataccgcagaatacggttgttatctgttcaaccatgctgccgtgcctatgctgcgtgactatgtaaatgccatgtcgccagagtatttaggtgcgggtctgaaggacagttcaaacaacgtcgataacctgcagttaatcgccatcaatgatgcgattcgccacacctcagttgagtatatcggtgcggaacttcgtggttatatgactgatatgaaaagtattgttggagcttaa

SEQ ID NO: 94401 - protein, 492 aa, Shewanella sp. ANA-3
MANYFNSLNLRQQLAQLGQCRFMDRSEFSDGCNYIKDWNIVILGCGAQGLNQGLNMRDSGLNIAYALRPEAIAQKRASWQKATDNGFKVGTFEELIPTADLVLNLTPDKQHSNVVSAVMPLMKQGATLSYSHGFNIVEEGMQIRPDITVVMVAPKCPGTEVREEYKRGFGVPTLIAVHPENDPNGDGLEIAKAYASATGGDRAGVLQSSFIAEVKSDLMGEQTILCGMLQTGAILGYDKMVADGVEPGYAAKLIQQGWETVTEALKHGGITNMMDRLSNPAKIKAFEIAEDLKEILQPLFEKHMDDIISGEFSRTMMQDWANDDANLLRWRAETAETGFENAPVSSEHIDEQTYFDKGIFLVAMIKAGVELAFDTMVSAGIVEESAYYESLHETPLIANTIARKRLYEMNVVISDTAEYGCYLFNHAAVPMLRDYVNAMSPEYLGAGLKDSSNNVDNLQLIAINDAIRHTSVEYIGAELRGYMTDMKSIVGA

SEQ ID NO: 94402 - DNA, 996 bp, Nostoc punctiforme PCC 73102
  CDS (1)..(996): transl_table=11
atggcccggatgtactatgacgaagatgccaatttagaccttttggctggaaaaactattgctatcatcggctatggttctcaaggtcatgcccacgctctcaatctcaaagatagtggtttgaatgtgattgtgggactatatccgggtagtaagtcagtagcaaaagctgaagctgctgggttaactgtgaagagtgtcgcagatgctgccaatgctgctgactttatcatgattttgttacctgatgaagttcaaaaaacgatttacaaaaacgagattgaaccaaatttagaagaagggaatgtgttagcctttgcccacggtttcaatattcactttgggcaagttgtaccaccggctaacgtagatgtggtgatggttgcaccaaaagggccagggcatttggtacggcggacttatgaaggtggggaaggtgtaccagcgctgtttgcagtttatcaagatgctagtggtcaggcacgcgatcgcgccatgtcttatgctaaaggtatcggtggcactcgcgctggtgttctcgaaaccactttccgcgaagaaaccgaaaccgatttatttggcgaacaggcagtattgtgcggtggtttgagtgctttaatcaaagccggatttgaaactttggtagaagctggttatcaaccagaattggcttattttgaatgtctgcatgaagtcaagctgattgttgacttggttgtagaaggcggtttagctaaaatgcgcgacagcatttctaacacagctgaatatggcgattatacccgtgggccgcggattgttactcaacaaaccaaagctgaaatgcaaaagattctcagcgaaattcaatctgggcaatttgcacgagaattcgttctagaaaaccaatctggtaaaccaggatttaccgccatgcgtcgcaaagaatctgaacacaaaattgaggaagttggtaaagatttacgcgctatgtttagctggttgaaaaaagcttaa

SEQ ID NO: 94403 - protein, 331 aa, Nostoc punctiforme PCC 73102
MARMYYDEDANLDLLAGKTIAIIGYGSQGHAHALNLKDSGLNVIVGLYPGSKSVAKAEAAGLTVKSVADAANAADFIMILLPDEVQKTIYKNEIEPNLEEGNVLAFAHGFNIHFGQVVPPANVDVVMVAPKGPGHLVRRTYEGGEGVPALFAVYQDASGQARDRAMSYAKGIGGTRAGVLETTFREETETDLFGEQAVLCGGLSALIKAGFETLVEAGYQPELAYFECLHEVKLIVDLVVEGGLAKMRDSISNTAEYGDYTRGPRIVTQQTKAEMQKILSEIQSGQFAREFVLENQSGKPGFTAMRRKESEHKIEEVGKDLRAMFSWLKKA

SEQ ID NO: 94404 - DNA, 1482 bp, Haemophilus somnus 2336
  CDS (1)..(1482): transl_table=11
atgggtaattatttcaatacattaaatttgcgtcaacaacttgaccagttaggtcgttgtcgctttatggatcgtgaggaatttgccgatgaggttaatttcttaaaaggtaaaaaaattgtcattatcggatgtggtgctcaaggattaaatcaaggtttaaatatgcgagattccggtttggatattgcttatgctcttcgtccggaagctattgaggaaaagcgtgcttcttttcagcgagcaagtgaaaacggatttgttgtaggaacttatcagcaattaattcctacggcagatttggtgattaatttaacaccagataaacaacactctaaagttgttgccgatgttatgccgttaattaaacaaggagcggctttgggatattcgcatggtttaaatattgttgaactgggagaaaaaattcgtcaggacatcactgtggtaatggtcgctcctaagtgtccggggacggaagtgcgggaagaatttaaacgtggattcggtgtgccgacgttaattgctgttcatcctgaaaacgatccgaaaggtgaagggttagccattgctaaagcatgggctgcggctactggtggacatcgtgctggtgttttggaatcttcttttgttgcggaagtaaaatccgatttaatgggagagcaaacaattttatgcggtatgttacaggctggttctttagtatgttatgacaagttaatcgctgatggtaaagatccggcatatgcgggtaaattaattcaatatggttgggaaacaattactgaagccttaaaacaaggcggtattaccttaatgatggatcggttatccaatagcgctaagttacgtgcattttccctttccgagcaaattaaagaaaaattggattttctatttaaaaaacatatggatgatattatcagcggtgaattttcccgtgtcatgatggaagactgggcaaacggtgatgctaatttattggaatggcgtgaacaaaccggtaaaacagcatttgaaaatgcaccgaaaggagaaaatattaaaatttccgaacaagaatatttcgatcatggcgtattaatggtagcaatggttaaagctggcgttgaattggcttttgatacaatggtagaaacgggaatttatgaagagtctgcctattatgaatcactacacgagttaccattaattgccaatacaattgctcgtaagcgtttatatgaaatgaatgtagtcatctctgataccgctgagtatggtaattatttatttgctaacgtagcagctccaattttagctaaagaaattattccaacgttaaaacgtggtgatttaggtgagtcaacaccagcaacagaaatcgataatattttgttacgtgatgtaaatgatgcaattcgtcagcatccgattgaattaatcggtcaggaattgcgtggttatatgacagacatgaaacgtatttcttcacaggaataa

SEQ ID NO: 94405 - protein, 493 aa, Haemophilus somnus 2336
MGNYFNTLNLRQQLDQLGRCRFMDREEFADEVNFLKGKKIVIIGCGAQGLNQGLNMRDSGLDIAYALRPEAIEEKRASFQRASENGFVVGTYQQLIPTADLVINLTPDKQHSKVVADVMPLIKQGAALGYSHGLNIVELGEKIRQDITVVMVAPKCPGTEVREEFKRGFGVPTLIAVHPENDPKGEGLAIAKAWAAATGGHRAGVLESSFVAEVKSDLMGEQTILCGMLQAGSLVCYDKLIADGKDPAYAGKLIQYGWETITEALKQGGITLMMDRLSNSAKLRAFSLSEQIKEKLDFLFKKHMDDIISGEFSRVMMEDWANGDANLLEWREQTGKTAFENAPKGENIKISEQEYFDHGVLMVAMVKAGVELAFDTMVETGIYEESAYYESLHELPLIANTIARKRLYEMNVVISDTAEYGNYLFANVAAPILAKEIIPTLKRGDLGESTPATEIDNILLRDVNDAIRQHPIELIGQELRGYMTDMKRISSQE

SEQ ID NO: 94406 - DNA, 1482 bp, Actinobacillus pleuropneumoniae serovar 1 str. 4074
  CDS (1)..(1482): transl_table=11
atggctaactatttcaacacattaaacttacgtcaaaaattagaccaactcggtcgttgccgttttatggatcgtaacgagtttgcagacggctgcaatttcttaaaaggcaagaaaatcgttatcgtaggttgtggtgcgcaaggtttaaaccaaggtttaaatatgcgtgattccggtttagacattagctatgcgttacgtgcggaagccattgctgaaaaacgtgcgtcatttactcgtgcaaccgaaaacggtttcaaagtcggcacataccaagaattaattccaaccgctgacttagttatcaacttaacgccggataaacaacactcaaaagtggttgcagatgttgttccgttaatgaaacaaggttctgcattcggttactcgcacggtttcaacattgttgaagaaggtgagcaaattcgtaaagatattaccgtagtaatgactgcaccaaaatgtcctggtacggaagtgcgtgaagaatataaacgtggtttcggtgtaccgacacttatcgcagttcaccctgaaaatgacccgaaaggcgagggtatggcaatcgcaaaagcgtgggcatcagcaaccggtggtgaccgtgcgggcgtattgaaatcttcattcgtagcggaagttaaatccgacttaatgggcgaacaaactatcctttgcggtatgttacaagcaggctcaatcgtatgttatgacaaattagtggctgacggtaaagatccggcatacgcaagcaaattaatccaatacggttgggaaaccattactgaagcgttaaaacaaggcggtatcacattaatgatggatcgcttatcaaacgctgcgaaaatccgcgcttttgaattaagtgaagaaatcaaagttcaattaaacgacctttacttaaaacatatggacgacatcatcagcggtgaattctcatcaaccatgatggctgactgggcaaacggtgacgtgaacttattcaaatggcgtgaagaaaccggtaaaaccgcattcgaaaattcaccgaaagcagacggcatcaaaatttccgaacaagaatactttgataacggcgtagttatggttgcaatggtgaaagcgggtgtagaaatggcattcgatgcaatggttgcaagcggtatctacgaagaatctgcatactatgagtcattacacgaattaccgttaatcgcaaatacgatcgctcgtaaacgtttatacgaaatgaacgtggtaatttcagatacggcggaatacggtaactacttattctctcatgttgcaacgccaattcttgcagagaaattaatcccgatgttacaaaaaggcgacttaggggagccgacacctgctgctgaaatcgacaacgtttacttacgtgatatcaacgatgcaatccgtaaccatccggttgaattaatcggtcaagagttacgtggttatatgacggatatgaaacgtatttcatcgcaaggttaa

SEQ ID NO: 94407 - protein, 493 aa, Actinobacillus pleuropneumoniae serovar 1 str. 4074
MANYFNTLNLRQKLDQLGRCRFMDRNEFADGCNFLKGKKIVIVGCGAQGLNQGLNMRDSGLDISYALRAEAIAEKRASFTRATENGFKVGTYQELIPTADLVINLTPDKQHSKVVADVVPLMKQGSAFGYSHGFNIVEEGEQIRKDITVVMTAPKCPGTEVREEYKRGFGVPTLIAVHPENDPKGEGMAIAKAWASATGGDRAGVLKSSFVAEVKSDLMGEQTILCGMLQAGSIVCYDKLVADGKDPAYASKLIQYGWETITEALKQGGITLMMDRLSNAAKIRAFELSEEIKVQLNDLYLKHMDDIISGEFSSTMMADWANGDVNLFKWREETGKTAFENSPKADGIKISEQEYFDNGVVMVAMVKAGVEMAFDAMVASGIYEESAYYESLHELPLIANTIARKRLYEMNVVISDTAEYGNYLFSHVATPILAEKLIPMLQKGDLGEPTPAAEIDNVYLRDINDAIRNHPVELIGQELRGYMTDMKRISSQG

SEQ ID NO: 94408 - DNA, 1476 bp, Pseudoalteromonas tunicata D2
  CDS (1)..(1476): transl_table=11
atgacgactaattattttaatacactaagtttacgtgagcaattagcgcaattagcgcaatgcgaatttatgagcccatctgaatttactgatggcgttaacgtactacttggtaaaaagctcgttattgttggttgtggtgcacaaggtttaaatcaaggcttaaacttacgtgattcaggattagatgtgagttatgcattgcgtgaatctgcaattgcagaaaaacgtcaatcatttttaaacgcatctgataatggctttgttgttggaacttatgagcaactgatcccaacggccgatttagtgttaaacctaacacccgataaacaacatacctcagttgtaaccgccattatgccactgatgaaacaaggttctacccttgcctactcacatggcttcaacattgttgaagaaggcatgcaaattcgtaaagacattaccgtcattatggtggcaccaaaatgcccaggtactgaagtacgcgaagaatataaacgcggttttggtgtgccaacactgattgcagttcatccagaaaatgacccacaaggcaaaggacttgcacaagcaaaagcttatgccgcaggtactggggggcatcgtgcaggggttttattgtcatcgttcattgctgaagttaaatctgacctaatgggtgaacaaactattttatgcggcatgttacaaactggctcaattttatgttttaacaaaatggttgaaaaaggtattgatgcagcttatgcctctaaatttatccaatacggttgggaagtgatcaccgaagcacttaaatacggcggtgtaaccaatatgcttgaccggttaactaaccctgcgaaagtaaaagcgtttgagctaagcgaagagctaaaacaaattatgcgcccgctttataacaagcatatggatgacatcatcagcggtgagttttcatcgggtatgatggctgattgggcagaagatgatgctaaattattaggctggcgcgctgaaacagctcaaacagcatttgagaaacaaaccaatacagatgcaacaatcagcgaacaagacttctttgataaaggcattttaatgattgcgatggtaaaagcgggtgttgaacttgcttatgaaaccatgacagcagcagggattaaagcagaatctgcgtattatgaatcgctgcatgaaacgccacttattgctaataccattgcacgtaaaaaattgtttgaaatgaatcgtactatttctgataccgctgaatacggttgttatttatataaccatgcttgtttaccgttattagctaactttatgcaatcgattgaaacagatgtgattggtcaaggtttagcgtcaacttcaaacgcggttgataacgcgacactgattaaagtaaataaagcattacgtgaacatccagttgaaatcattggtgcgacactgcgaagctacatgtcagacatgaaacccatcatctaa

SEQ ID NO: 94409 - protein, 491 aa, Pseudoalteromonas tunicata D2
MTTNYFNTLSLREQLAQLAQCEFMSPSEFTDGVNVLLGKKLVIVGCGAQGLNQGLNLRDSGLDVSYALRESAIAEKRQSFLNASDNGFVVGTYEQLIPTADLVLNLTPDKQHTSVVTAIMPLMKQGSTLAYSHGFNIVEEGMQIRKDITVIMVAPKCPGTEVREEYKRGFGVPTLIAVHPENDPQGKGLAQAKAYAAGTGGHRAGVLLSSFIAEVKSDLMGEQTILCGMLQTGSILCFNKMVEKGIDAAYASKFIQYGWEVITEALKYGGVTNMLDRLTNPAKVKAFELSEELKQIMRPLYNKHMDDIISGEFSSGMMADWAEDDAKLLGWRAETAQTAFEKQTNTDATISEQDFFDKGILMIAMVKAGVELAYETMTAAGIKAESAYYESLHETPLIANTIARKKLFEMNRTISDTAEYGCYLYNHACLPLLANFMQSIETDVIGQGLASTSNAVDNATLIKVNKALREHPVEIIGATLRSYMSDMKPII

SEQ ID NO: 94410 - DNA, 1485 bp, Photobacterium sp. SKA34
  CDS (1)..(1485): transl_table=11
atggctaattattttaataccctgaacctacgtcagcagttagatcaactaggtcgctgtcgctttatggatcgtgcagagtttgcaacagaagctgattaccttaaaggtaaaaaagtagtgattgttggttgtggtgcgcaaggtcttaaccaaggtcttaacatgcgtgactctggtctagatgtctcttatgcgctacgccaagcggcgattgatgagcaacgtcaatcatttaagaacgcaaaagaaaatgggtttgaagtaggtagctacgagcaactgatcccacaagctgatttagtggtaaacctaactccagataagcagcacacgaatgttgttgaaacggttatgccattgatgaagcaaggtgcatcactgggttactctcacggtttcaacatcgttgaagaggggatgcaaattcgtaaagacttaaccgttgttatggttgcacctaagtgtccaggtacagaggttcgtgaagaatataagcgtggttttggtgttccaacactgattgctgttcaccctgaaaacgatccacaaggtgatggccttgaaattgctaaagcatgggcggcagcgacgggtggtcaccgtgcaggcgtacttgagtcttcattcgttgcagaagtgaaatctgatctaatgggtgagcaaacgatcctgtgtggcatgctacaagcaggctcaattgtttgttacgagaagatgattgctgatggcatcgcacctgaatacgcaggtaagcttctgcagtacggttgggaaacgatcactgaagcgctgaagtttggtggtgtttctcatatgatggatcgtctatcaaaccctgctaaagtaaaagcgtttgacctatcggaagagctaaaagatctgatgcgtccactttacaacaagcacatggatgacattatctctggccacttctctagcacgatgatggctgactgggcgaacgatgatgctgatcttcttggctggcgtggtgagaccgctgaaacacaattcgaaaactacccatcttctgatattcaaatcagtgagcaagagtactttgataacggcatcattatggttgctatggtacgtgcaggtgttgaactggcatttgaagcaatgacagcatcaggcattattgatgagtcagcatactacgagtcactacacgaactaccgcttattgcaaataccattgcacgtaagcgtctgtacgagatgaacgtggttatttctgatacagcagagtacggtaactacctatttgcaaacgtagcaacaccattactacgtgagcaatttatgccgaaagtagcgacggatgtgattggtaaaggcttgggtgagacatctaactttgctgataaccagaagctaattgaagtgaacgaagcactacgtaatcacccagtggaagtgattggtaaagagctacgtggttacatgaaagacatgaagcaaatcgctgttggcggttaa

SEQ ID NO: 94411 - protein, 494 aa, Photobacterium sp. SKA34
MANYFNTLNLRQQLDQLGRCRFMDRAEFATEADYLKGKKVVIVGCGAQGLNQGLNMRDSGLDVSYALRQAAIDEQRQSFKNAKENGFEVGSYEQLIPQADLVVNLTPDKQHTNVVETVMPLMKQGASLGYSHGFNIVEEGMQIRKDLTVVMVAPKCPGTEVREEYKRGFGVPTLIAVHPENDPQGDGLEIAKAWAAATGGHRAGVLESSFVAEVKSDLMGEQTILCGMLQAGSIVCYEKMIADGIAPEYAGKLLQYGWETITEALKFGGVSHMMDRLSNPAKVKAFDLSEELKDLMRPLYNKHMDDIISGHFSSTMMADWANDDADLLGWRGETAETQFENYPSSDIQISEQEYFDNGIIMVAMVRAGVELAFEAMTASGIIDESAYYESLHELPLIANTIARKRLYEMNVVISDTAEYGNYLFANVATPLLREQFMPKVATDVIGKGLGETSNFADNQKLIEVNEALRNHPVEVIGKELRGYMKDMKQIAVGG

SEQ ID NO: 94412 - DNA, 1476 bp, Oceanospirillum sp. MED92
  CDS (1)..(1476): transl_table=11
atgtctaacaactatttcaacacgctgccactgcgtgaacagctggaacagctggctaaatgtcgttttatgtctatggatgagttcagcgaaggcgttgaagctctgaaaggcaaaaaaatggtcgttatcggttgtggtgctcagggccttaaccagggtctgaacctgcgtgacagtggtctggacgtttcttacgctctgcgtgaagctgcaattgctgaaaagcgtcagtcttggaagaacgcaactgaaaacggtttcgttgttggtacatacgaagagctgatcccaacagctgacgttgtactgaacctgactccagacaagcagcacacttctgttgtaaacgctgttatgccactaatgaaagaaggctcttgcctgtcttactctcacggtttcaacatcgttgaagaaggcatgcagatccgtgacgacatcactgtaatcatggttgcacctaagtgcccaggttctgaagtacgtgctgaatacgttcgtggcttcggtgtaccaacactgatcgcagttcacgaagacaacgatcctaaaggcgaaggtctggcactggctaaggcatacgctgtaggtactggcggccacaaagcaggcgttcttatgtcttctttcatcgctgaagttaagtctgacctgatgggcgagcagactatcctgtgcggcatgctgcagactggctctatcctgtgcttcgacaagatggttgagaaaggcatcgacgcaggttacgcatctaaactgatccagtacggctgggaaactatcactgaagcactgaaatacggcggcgtaactaacatgctggaccgtctttctaacccagctaagatcaaagcattcgatctgtctgaagagctgaaagtgatcatgcgtccgctgtacaacaagcaccaggacgacatcatcaacggtactttctctcgcgtgatgatggaagactgggctaatgatgacaaaaacctactgggctggcgtgcagaaactgctgagactaacttcgagaagactccagcaggtgatgtagagatctctgagcaggaattcttcgacaacggcatcctgatggttgctatggttaaagcgggtgttgagctggcattcgaaacaatgacggctgctggcatcatcgctgaatctgcttactatgagtctctgcacgaaactccgctgattgccaacacaatcgcacgtaagaagctgtacgaaatgaacgcaactatctctgatactgctgagtacggctgctacctgtacaaccacgcttgtctgccattgctaggcgacttcatgaaaaacatcgacactgatgttatcggtaaaggtctggacctggccgacaatggcgtagacaacgctcgcttgatcgaagttaatgctgcactacgcgcgcaccctgtagaagcagtaggtgcagagctacgtgctcacatggctgacatgaagaagatcgtataa

SEQ ID NO: 94413 - protein, 491 aa, Oceanospirillum sp. MED92
MSNNYFNTLPLREQLEQLAKCRFMSMDEFSEGVEALKGKKMVVIGCGAQGLNQGLNLRDSGLDVSYALREAAIAEKRQSWKNATENGFVVGTYEELIPTADVVLNLTPDKQHTSVVNAVMPLMKEGSCLSYSHGFNIVEEGMQIRDDITVIMVAPKCPGSEVRAEYVRGFGVPTLIAVHEDNDPKGEGLALAKAYAVGTGGHKAGVLMSSFIAEVKSDLMGEQTILCGMLQTGSILCFDKMVEKGIDAGYASKLIQYGWETITEALKYGGVTNMLDRLSNPAKIKAFDLSEELKVIMRPLYNKHQDDIINGTFSRVMMEDWANDDKNLLGWRAETAETNFEKTPAGDVEISEQEFFDNGILMVAMVKAGVELAFETMTAAGIIAESAYYESLHETPLIANTIARKKLYEMNATISDTAEYGCYLYNHACLPLLGDFMKNIDTDVIGKGLDLADNGVDNARLIEVNAALRAHPVEAVGAELRAHMADMKKIV

SEQ ID NO: 94414 - DNA, 1482 bp, gamma proteobacterium HTCC2207
  CDS (1)..(1482): transl_table=11
atggctaattactttaataccctgagcttgcgcgacaaactgacgcagctgggcaaatgcagatttatggatcgcagcgaatttaccgatggctgtgattttatcaaggactggaacattgtcattattggctgcggtgctcagggccttaaccagggtctcaatatgcgcgattctggcctgaatatttcctacgcactgcgcgctcaagcaattgccgagaagcgtcagtcgtttgtttgggcatcagagaatggctttactgttggcaccgctgaagagcttgttccagctgccgatctggttcttaatctgactcctgacaagcagcacaccgctgctgttacggcggttatgccgttaatgaagcaaggggccactctcgcttactcacatggctttaacattgttgaagaaggcatgcagattcgccctgacctgacagttgttatggttgctcccaagtgcccaggcacagaagtacgcgaagagtacaagcgcggctttggtgttcccaccctgatcgcagtacaccctgagaatgatccacagggcaatggtcacgcaatcgccaaagcctatgcctctgctactggcggcgatcgcgctggtgtattggagtcttcgtttatcgctgaagttaagtctgacctgatgggcgagcaaactattctctgtggtatgttgcagaccggtgcagttctgggtcatcagcagcttatcaatcttggtgtcgatgccgcctatgcccgcaagctgatccagtacggctgggaaacagtgactgaaggcctgaagcacggtggcatcactaacatgatggatcgcttgagcaacccggcgaaaatcaaagcctttgatatgtcagaagaacttaaagtgactctgcgcccactgtttgaaaagcatatggacgacattatcgaaggtgagttctcacacacgatgatgattgactgggctaacgatgatgccaacttgctgaagtggcgcgctgagactgccgactcttcttttgaacaggcagcggattgcgatatcgaaatcactgagcaagagttctatgacaaaggtatctacctggttgcgatgattaaagccggtgttgagctggccttcgagaccatggttgcttcgggtattatcgaagagtctgcctactatgagtcacttcatgagacaccactgatcgccaactgtattgctcgcaataagctttacgagatgaacgtagtgatctctgatacagctgaatacggcaactacctgtttactcacgccgctgtgccactgttgcaagcccatgctagctcactgactctggaagagttaggtggtggtttagctgatagctctaatgccgtcgacaaccttcgtctgatcgaagtaaacgatgcgattcgcgaccatgatgttgaaatcattggccacgaactgcgcggctatatgacggatatgaagcgtattgtagaagcgggctga

SEQ ID NO: 94415 - protein, 493 aa, gamma proteobacterium HTCC2207
MANYFNTLSLRDKLTQLGKCRFMDRSEFTDGCDFIKDWNIVIIGCGAQGLNQGLNMRDSGLNISYALRAQAIAEKRQSFVWASENGFTVGTAEELVPAADLVLNLTPDKQHTAAVTAVMPLMKQGATLAYSHGFNIVEEGMQIRPDLTVVMVAPKCPGTEVREEYKRGFGVPTLIAVHPENDPQGNGHAIAKAYASATGGDRAGVLESSFIAEVKSDLMGEQTILCGMLQTGAVLGHQQLINLGVDAAYARKLIQYGWETVTEGLKHGGITNMMDRLSNPAKIKAFDMSEELKVTLRPLFEKHMDDIIEGEFSHTMMIDWANDDANLLKWRAETADSSFEQAADCDIEITEQEFYDKGIYLVAMIKAGVELAFETMVASGIIEESAYYESLHETPLIANCIARNKLYEMNVVISDTAEYGNYLFTHAAVPLLQAHASSLTLEELGGGLADSSNAVDNLRLIEVNDAIRDHDVEIIGHELRGYMTDMKRIVEAG

SEQ ID NO: 94416 - DNA, 1491 bp, Oceanobacter sp. RED65
  CDS (1)..(1491): transl_table=11
atgggtcagaattactttaatacacttaacctacgtgaacagctagaccaacttggtcaatgccgtttcatgaaccgtgatgaattctctaacggttgtgaattccttaagggcaagaaagtcgtgatcatcggctgtggtgctcaaggtcttaaccaaggccttaacatgcgcgattctggtctggacgtttcttacgctctacgtgaagcggctatcgctgaaaagcgtcaatcttggaaaaacgcgacagataacggttttactgttggtacttatgaagagctagtacctactgcagacctagtatgtaacctaacgccagacaagcaacacactgacgccgtatctactgttatgcctctaatgaagcaaggcgcaactctaggttactctcacggcttcaatatcgttgaagaaggtatgcaaatccgcgaagacctaacggttgttatggttgcgcctaagtgcccaggttctgaagtacgtgaagaatataagcgtggtttcggtgtaccaacgctaatcgctgttcacccagaaaacgaccctaaaggcgaaggcctagacatcgctaaagcgtgggcgtctgctactggtggcgaccgtgctggtgtcctagaaagctctttcgttgccgaagttaaatctgaccttatgggtgagcaaactatcctttgcggtatgttacaaactggtgccatccttggttacgaaaaaatggttgctgacggcatcgacggcccatacgcagctaagctgattcaattcggttgggaaacagtgactgaagcattgaagattggtggtatcaccaacatgatggaccgtctatcaaacccagccaaaatcaaagcgtttgatctagctgacgaattgaaaggcctaatgcgccctctattccgtaagcaccaagacgacatcatgactggcgaattctctcgcaccatgatggaagactgggcaaacgacgatgcgaacctattaaaatggcgcgcagaaacagccgaaacgggttttgaaaaagaaggcccatgtgatgtagaaatcgacgagcaagaattcttcgacaaaggcattctactggttgctatggttaaagccggtgttgaactagcattcgaaaccatggttgagtctggcatcatcgaagagtctgcatactacgagtctctacacgaaactccacttattgctaacactatcgctcgtaagaaactttacgaaatgaacgtggttatttctgatacggcagaatacggttgctacctgttctctcacgctgcggtacctctgctacgtgaagagttcatgcctaacatcggtacggatgtaatcggtaaaggtttagagcttaagtctaactctgtagacaacgctcgcttggtagacgttaacgaagaaattcgcgaacacccagttgagtggatcggtcaagaactacgtggttatatgactgacatgaaaaagatcgttgaagcttctaagtaa

SEQ ID NO: 94417 - protein, 496 aa, Oceanobacter sp. RED65
MGQNYFNTLNLREQLDQLGQCRFMNRDEFSNGCEFLKGKKVVIIGCGAQGLNQGLNMRDSGLDVSYALREAAIAEKRQSWKNATDNGFTVGTYEELVPTADLVCNLTPDKQHTDAVSTVMPLMKQGATLGYSHGFNIVEEGMQIREDLTVVMVAPKCPGSEVREEYKRGFGVPTLIAVHPENDPKGEGLDIAKAWASATGGDRAGVLESSFVAEVKSDLMGEQTILCGMLQTGAILGYEKMVADGIDGPYAAKLIQFGWETVTEALKIGGITNMMDRLSNPAKIKAFDLADELKGLMRPLFRKHQDDIMTGEFSRTMMEDWANDDANLLKWRAETAETGFEKEGPCDVEIDEQEFFDKGILLVAMVKAGVELAFETMVESGIIEESAYYESLHETPLIANTIARKKLYEMNVVISDTAEYGCYLFSHAAVPLLREEFMPNIGTDVIGKGLELKSNSVDNARLVDVNEEIREHPVEWIGQELRGYMTDMKKIVEASK

SEQ ID NO: 94418 - DNA, 1512 bp, Vibrio sp. Ex25
  CDS (1)..(1512): transl_table=11
atggaagaatctcaaaggagcacccagatggctaattatttcaataccctaaacttgcgcgagcagttggaccaattaggtcgttgtcgttttatggatcgcagtgagttcgcttcagaagcggattatctgaaaggtaagaaagtagtcattgtaggttgtggtgctcaaggtcttaaccaaggtctgaacatgcgcgactctggtctagacgttgcttatgcgcttcgccaagccgcgattgatgagcaacgccagtcattcaaaaacgcaaaagacaacggttttgaggtaggtagctacgaaacgctaattccacaagctgatctagtagtaaaccttactccagataagcagcacacaaacgttgttgagacggtaatgccgttaatgaaagaaggcgcagcactaggttactctcacggtttcaacgttgttgaagaaggaatgcaaatccgtaaagacctaacggtagtaatggttgcacctaaatgtccaggtacggaagttcgtgaagaatacaagcgcggtttcggtgtaccgactcttatcgctgttcacccagagaacgacccaaaaggtgaaggttgggatatcgcgaaagcttgggctgcagcaacaggtggtcaccgtgcaggctgtctagagtcttcttttgttgctgaggtgaaatctgacctaatgggtgagcaaactatcctttgtggcatgttgcaggctggctctatcgtatgttacgagaagatgattgctgatggtatcgatcctggctacgcaggcaagcttcttcaatacggttgggaaaccatcactgaagcactgaagtttggtggtatcactcacatgatggatcgcctaacgaaccctgcaaaagtgaaagcatttgaactttctgaagagctaaaagagctgatgcgtccgctatacaacaagcacatggatgacattatcacaggtcacttctctagcactatgatggctgactgggcaaacgacgatgcgaacctactaggctggcgtgcagaaacgggtgaaactgctttcgaaaactacccagaaactgacgtagaaatctctgagcaagagtacttcgataacggtatcctgatggttgctatggttcgtgcgggtgttgagctagcattcgaagcaatgacggcatctggcatcatcgatgagtctgcttactacgagtctctacacgagctgccacttatcgcaaacactatcgcacgtaagcgtttatacgagatgaacgtggttatctctgatacggctgaatatggtaactacctatttgctaatgtagcaacgccgctactgcgtgaaaaattcatgccttctgttagtacagacgtcattggtaaaggtctaggtgaaacgtctaaccaagtggataacgcgactcttatcgctgtgaatgaaacaatccgcaaccaccctgtagaatacatcggtgaagaactacgtggttatatgacagatatgaagcgcatcgcggttggtggctaa

SEQ ID NO: 94419 - protein, 503 aa, Vibrio sp. Ex25
MEESQRSTQMANYFNTLNLREQLDQLGRCRFMDRSEFASEADYLKGKKVVIVGCGAQGLNQGLNMRDSGLDVAYALRQAAIDEQRQSFKNAKDNGFEVGSYETLIPQADLVVNLTPDKQHTNVVETVMPLMKEGAALGYSHGFNVVEEGMQIRKDLTVVMVAPKCPGTEVREEYKRGFGVPTLIAVHPENDPKGEGWDIAKAWAAATGGHRAGCLESSFVAEVKSDLMGEQTILCGMLQAGSIVCYEKMIADGIDPGYAGKLLQYGWETITEALKFGGITHMMDRLTNPAKVKAFELSEELKELMRPLYNKHMDDIITGHFSSTMMADWANDDANLLGWRAETGETAFENYPETDVEISEQEYFDNGILMVAMVRAGVELAFEAMTASGIIDESAYYESLHELPLIANTIARKRLYEMNVVISDTAEYGNYLFANVATPLLREKFMPSVSTDVIGKGLGETSNQVDNATLIAVNETIRNHPVEYIGEELRGYMTDMKRIAVGG

SEQ ID NO: 94420 - DNA, 1473 bp, Alteromonadales bacterium TW-7
  CDS (1)..(1473): transl_table=11
atggcgaattattttaataccttacctttacgcgaacaattagcacaattagcgcaatgtgaatttatggacgcaagcgaatttacagacggtgttaacgcacttaaaggtaaaaaattagttattgtaggctgtggcgcacaaggtttaaaccaaggccttaacctacgcgattcaggtttagacgtgtcttatacgttacgcgattcagctattgctgagcgccgccaatcatttttaaacgcatctgaaaacggctttactgtaggtacttaccaagagctaattccaacagctgacgtagtacttaatttaacgccagataaacaacacacatcagtcgttaacgccatcatgccgttaatgaagcaaggttctacacttgcttactcacatggctttaatattgttgaagaaggcatgcaggttcgcgaagatatcactgtaatcatggttgcacctaaatgcccaggttctgaagtacgtgaagagtacaaacgtggttttggtgtaccaacacttattgccgttcacccagaaaacgacccacaaggtcatggcctagcacaagctaaagcctacgctgctggcacaggtggtgaccgcgcaggtgtgcttaaatcgtcattcattgctgaagttaaatcagaccttatgggtgagcaaactattttatgcggcatgttacaaacgggttctattttatgttttgacaaaatgattgaaaaaggaattgatgcaggttacgcatctaaactaattcaatttggttgggaagtgatcacagaagcccttaaatacggcggcgtaacaaacatgcttgaccgtttatctaacccagcaaaagtgaaagcatttgaacttagtgaagagctaaaagttattatgcgtccactttataataagcaccaagacgacatcatcgacggtacattttcacgtgtaatgatggaagattgggcaaacgatgatgctaaccttcttaaatggcgcgcagaaaccgctgaaactaattttgaaaaaacacccgctggtgatgtagaaatttcagaacaagaattcttcgacaacggtattttgatggtcgctatggttaaagcaggtgttgaacttgcgttcgaaactatgacagcggcaggcattattgaagagtcagcatactacgagtcgcttcacgaaacaccgctgattgctaataccattgcacgtaaaaagttattcgaaatgaatcgtactatttcagacaccgctgaatatgggtgttacttatataaccatgcttgcttaccattacttgctgactttatgaaaaatatcgacaccgatgtaattggtaaaggcttaggtgagcaaagtaaccaggtagacaacaaagcgttaattgaaattaatacagcgctgcgtgagcacccggttgaaatagtaggcgctaaattacgtggctacatgtcagcaatgaaaaaaattgtttaa

SEQ ID NO: 94421 - protein, 490 aa, Alteromonadales bacterium TW-7
MANYFNTLPLREQLAQLAQCEFMDASEFTDGVNALKGKKLVIVGCGAQGLNQGLNLRDSGLDVSYTLRDSAIAERRQSFLNASENGFTVGTYQELIPTADVVLNLTPDKQHTSVVNAIMPLMKQGSTLAYSHGFNIVEEGMQVREDITVIMVAPKCPGSEVREEYKRGFGVPTLIAVHPENDPQGHGLAQAKAYAAGTGGDRAGVLKSSFIAEVKSDLMGEQTILCGMLQTGSILCFDKMIEKGIDAGYASKLIQFGWEVITEALKYGGVTNMLDRLSNPAKVKAFELSEELKVIMRPLYNKHQDDIIDGTFSRVMMEDWANDDANLLKWRAETAETNFEKTPAGDVEISEQEFFDNGILMVAMVKAGVELAFETMTAAGIIEESAYYESLHETPLIANTIARKKLFEMNRTISDTAEYGCYLYNHACLPLLADFMKNIDTDVIGKGLGEQSNQVDNKALIEINTALREHPVEIVGAKLRGYMSAMKKIV

SEQ ID NO: 94422 - DNA, 1476 bp, marine gamma proteobacterium HTCC2143
  CDS (1)..(1476): transl_table=11
atgggtcaaaactatttcaatacccttccgctgcgcctgcaactggaagagctcgccaaatgccgctttatggcacaggaagaattcgctgatggctgcgaatatatcaaaggcaaaaagatagtcattgtcggctgtggtgcacagggtttaaaccaaggtttaaatttgcgcgattccggactggacgtatcttatacgttgcgtgcggctgcaatcgaagaaaagcgtcaatcctacaaaaatgcatcagaaaatggatttaccgtcggaacttacgaagaactcattccacatgccgatattgtgatgaacctaactcccgataagcagcacacggacgttgtgactacgataatgccgctaatgaaagaaggagcaacactggactatgcccacggtttcaatctggttgaagaaggcatgcagatacgcaaagatataaccgttgttatgtgctgtccaaaatgtccgggatcggaagttcgagcggaatatgttcgtggatttggtgttcccaccttaattgcggtccaccgcgaaaatgaccccaacggcgatggtttggaaattgccaaggctttggcctccggaaccggcggtgatcgtgccggcgtattagagtcatctcccattgcagaagtaaaatctgatctgatgggcgagcagactattctgtgcggaatgctgcaaaccggatcaattttgtgtttcgacaagatggttgagcaaggcattgaacctacttacgcttctaaattaattcagtatggatgggagactatcactgaaggtttgaagatggggggtattaccaacatgatggatcgccttagtaatcccgccaaaatcaaagcctttgatttggccgaagaactcaaggatattatgcggccactgtacgaaaagcatcaggatgacattatcgccggcgagttttctaaaacaatgatggtcgactgggctaacgacgatgccaatctgctaggttggagagcggccaccgccgagacagccttcgaaaagtctgccaatactagccaggaaatcagcgagcaggaatattatgatcacggcatcctaatgattgccatggtcaaagcgggcgttgagctagcgtttgaaaccatggttgctgccggtattattgacgagtcggcgtattatgagtcactgcatgaaacaccattaatcgccaatactatcgcacggaaaaaactctatgaaatgaatgttgttatttctgacaccgccgaatacggttgctatctttttgaccatgcttgtaaaccgttactccaagattttatgaaaaaaatcagtacggatgttatcggcaaaggtttgaatttgaaagacagtggtgtcgacaatcaggaattggtagcggttaatgcggctattcgtaatcacccggtagaagttgttggtacaaagctgcgcggttatatgacggcaatgacgaaaatcgtttaa

SEQ ID NO: 94423 - protein, 491 aa, marine gamma proteobacterium HTCC2143
MGQNYFNTLPLRLQLEELAKCRFMAQEEFADGCEYIKGKKIVIVGCGAQGLNQGLNLRDSGLDVSYTLRAAAIEEKRQSYKNASENGFTVGTYEELIPHADIVMNLTPDKQHTDVVTTIMPLMKEGATLDYAHGFNLVEEGMQIRKDITVVMCCPKCPGSEVRAEYVRGFGVPTLIAVHRENDPNGDGLEIAKALASGTGGDRAGVLESSPIAEVKSDLMGEQTILCGMLQTGSILCFDKMVEQGIEPTYASKLIQYGWETITEGLKMGGITNMMDRLSNPAKIKAFDLAEELKDIMRPLYEKHQDDIIAGEFSKTMMVDWANDDANLLGWRAATAETAFEKSANTSQEISEQEYYDHGILMIAMVKAGVELAFETMVAAGIIDESAYYESLHETPLIANTIARKKLYEMNVVISDTAEYGCYLFDHACKPLLQDFMKKISTDVIGKGLNLKDSGVDNQELVAVNAAIRNHPVEVVGTKLRGYMTAMTKIV

SEQ ID NO: 94424 - DNA, 1470 bp, marine gamma proteobacterium HTCC2080
  CDS (1)..(1470): transl_table=11
gtgagcaattattttaatacgctacccctgcgtatccagctcgaagagcttggaaagtgccgattcatggatcgcgctgaattcgccgacggtgtagatgccctgcgcggcaaacaaattgtcattattggttgtggcgcccaaggcctaaatcaaggccttaacctcagagatagcggcctcgatgtggcctacgcacttcggcccgaggcgattgccgagaaacgggcttcctggcaacgagccaccgacaatggttttaaggtgggtgattacgaggcgctcattcccactgcagatgtggtgatgaatctgactcccgataagcagcacacgccggtagtaactgctgtcatgcccctcatgaaacagggtgcatgtctcgattacgcacacggctttaacctcgtagaagaaggcatgcaagtacgcaaagacatcaccgttgtaatgatgtgccccaaatgcccaggtactgaggtcagggaagaatataagcgcggatttggtgttcccacactcattgccgtgcaccgtgaaaatgatccgcaaggcgacggcatggccattgcaaaggccttagcagcaggtacgggcgcacacaaagccggcgtcctcgaatcatcccctatcgcagaagttaaatcggacttgatgggcgagcagaccattctatgcggcatgctgcaatcgggttcgctactttgctacgaccgtatggtcgcgctgggcactgatccagggtacgccgccaaattggtgcagtatgggtgggagacagtaacagagggccttaagcagggcggcatcaccaacatgatggaccgactgtcgaacccagccaaaatcaaagcctttgagctgtctgacaccatgaaagacattctgcgcccgctatttgagaagcatcaggacgacatcatgtccggggtattctcaagtactatgatggcagattgggctcaggacgatgccaatctactgaagtggcgtgccgagaccaacgagacagcttttgagaagcaggcgctcaccgacaatgaaatcacggagcaggaatactacgacaagggtattttgatgatcgccatggttaaggccggtgtagagctggcttttgagaccatggtagacgctggcatcattgaagagtccgcttactacgagtcgctgcacgaaactccgctcattgccaataccattgcgagaaagaagctgtatgaaatgaacgtggtgatatcagacaccgcagagtacggctgctacctctttgaccaagctgccagaccattgctggctgagtttatgcagtctgtaggcagcgatgttattggtggcggcatgatcggtgacaacggcgtcgacaataaaacgctcattgaagtcaatgctgagattcgcaaccatacggtagagttagttggcgaggaattaaggggctacatgacggaaatgaagtccatcgtctga

SEQ ID NO: 94425 - protein, 489 aa, marine gamma proteobacterium HTCC2080
MSNYFNTLPLRIQLEELGKCRFMDRAEFADGVDALRGKQIVIIGCGAQGLNQGLNLRDSGLDVAYALRPEAIAEKRASWQRATDNGFKVGDYEALIPTADVVMNLTPDKQHTPVVTAVMPLMKQGACLDYAHGFNLVEEGMQVRKDITVVMMCPKCPGTEVREEYKRGFGVPTLIAVHRENDPQGDGMAIAKALAAGTGAHKAGVLESSPIAEVKSDLMGEQTILCGMLQSGSLLCYDRMVALGTDPGYAAKLVQYGWETVTEGLKQGGITNMMDRLSNPAKIKAFELSDTMKDILRPLFEKHQDDIMSGVFSSTMMADWAQDDANLLKWRAETNETAFEKQALTDNEITEQEYYDKGILMIAMVKAGVELAFETMVDAGIIEESAYYESLHETPLIANTIARKKLYEMNVVISDTAEYGCYLFDQAARPLLAEFMQSVGSDVIGGGMIGDNGVDNKTLIEVNAEIRNHTVELVGEELRGYMTEMKSIV

SEQ ID NO: 94426 - DNA, 1482 bp, Pasteurella haemolytica
  CDS (1)..(1482): transl_table=11
atggctaactatttcaacactttaaatttacgtcaaaaattagaccagttaggtcgttgccgctttatggatcgtgatgaatttgcagatggctgcaatttcttaaaaggcaaaaaaatcgtgattgtgggttgtggtgctcaaggtttaaaccaaggtttaaatatgcgtgattcaggcttagatattgcttacgctttacgtgccgaagcgattgctgaaaaacgtgcttcatttaaacgtgcttctgaaaacggctttgtggtgggtacttacgagcaattaattcctgaagcggatttagtcattaacttaacgccggacaaacagcactctaaagtagttgccgatgtaatgccgttaatgaaacaaggtgcggcatttggttattcacacggtttcaacattgtggaagaaggtgagcaaattcgtccggatttaacggttgtgatgaccgctccgaaatgcccgggcacggaagtgcgtgaagagtacaaacgtggtttcggtgtgccaaccttaattgccgttcacccggaaaatgaccctaaaggcgaaggtttagccattgcgaaagcgtgggcaagtgctaccggtggtgaccgtgcgggcgtattagaatcttcattcgtagcagaagtgaaatctgatttaatgggtgaacaaaccattctttgcggtatgttacaagcaggttcaatcgtgtgctacgacaaattagtgtcggaaggtaaagatccggcttacgcaggtaaattgatccaatacggttgggaaaccattaccgaagcgttaaaacaaggcggtatcaccttaatgatggatcgcttatcaaacagtgccaaattgcgtgcgttcgagctttctgagcaaatcaaagaagaattagcgttcttatttgaaaaacatatggacgacatcatcagtggtgagttctcatcaacgatgatggcagactgggcaaacggcgatgccaacttattaaaatggcgtgaagaaacaggtaaaacagcctttgaaaacgcaccacaagcagacggtattaaaatttctgagcaagaatactttgataacggtgtgttaatggttgcaatggtgaaagcaggggttgaattagcctttgatacaatggtttcagccggtatttatgaagaatcggcttactacgagtctctacacgagttaccgttaatcgcaaatacaatcgctcgtaagcgtttatatgaaatgaacgtggtaatttcagataccgcagaatacggtaactacttattctctcacgttgcaaccccgattttagcggagaaaattatcccaacgttagagaaaggcgatttaggtgaaccaactccggcagtggaaatcgacaacgttaccttacgtgatgtgaatgacgcaatccgtaaccacccaatcgagttaatcggtcaagaattacgtggttatatgacagatatgaaacgtatttcttcgcaaggctaa

SEQ ID NO: 94427 - protein, 493 aa, Pasteurella haemolytica
MANYFNTLNLRQKLDQLGRCRFMDRDEFADGCNFLKGKKIVIVGCGAQGLNQGLNMRDSGLDIAYALRAEAIAEKRASFKRASENGFVVGTYEQLIPEADLVINLTPDKQHSKVVADVMPLMKQGAAFGYSHGFNIVEEGEQIRPDLTVVMTAPKCPGTEVREEYKRGFGVPTLIAVHPENDPKGEGLAIAKAWASATGGDRAGVLESSFVAEVKSDLMGEQTILCGMLQAGSIVCYDKLVSEGKDPAYAGKLIQYGWETITEALKQGGITLMMDRLSNSAKLRAFELSEQIKEELAFLFEKHMDDIISGEFSSTMMADWANGDANLLKWREETGKTAFENAPQADGIKISEQEYFDNGVLMVAMVKAGVELAFDTMVSAGIYEESAYYESLHELPLIANTIARKRLYEMNVVISDTAEYGNYLFSHVATPILAEKIIPTLEKGDLGEPTPAVEIDNVTLRDVNDAIRNHPIELIGQELRGYMTDMKRISSQG

SEQ ID NO: 94428 - DNA, 1485 bp, Vibrio cholerae
  CDS (1)..(1485): transl_table=11
atggcgaattatttcaatacgctgaatctgcgtgaacagttggatcaacttggtcgttgccgttttatggcgcgagaagagtttgcaaccgaagctgattacctaaaaggtaagaaagtggtgatcgtaggttgtggggctcaaggcctaaaccaaggcctcaatatgcgtgattcaggtttggatgtttcttacgctctgcgtcaggctgcgattgatgaacagcgtcagtcatttaagaatgccaagaataatggcttcaacgtgggtagttatgaacaactcatcccaaccgcagatttggtgattaacttgacgccagacaagcagcacaccagtgtggtcaatgcggtgatgcctctgatgaagcaaggtgctgccttgggttactcacacggttttaatatcgttgaagagggcatgcagatccgtaaagacatcacggttgtgatggtggcaccaaaatgtccgggtacggaagttcgtgaagagtataagcgcggtttcggcgttcctactcttatcgcggtacaccctgaaaacgatccacaaggtgaaggttgggaaattgctaaagcgtgggctgcggcaacgggtggccatcgtgcgggctgtttagcttcttcttttgtggcggaagtgaaatccgatttgatgggtgagcaaaccattctctgcggtatgctgcaagcgggctctatcgtttgttacgagaaaatggttgctgatggcatcgaccctggttatgcgggcaagcttttgcaatttggttgggaaaccattaccgaagcactcaagtttggcggtattactcatatgatggatcgcctgtctaaccctgcaaaaatcaaagcgtttgagctgtctgaagagttgaaagatctgatgcgcccactgtacaacaagcatatggatgacatcatttctggccacttctctagcaccatgatggcggattgggcgaatgatgataaagacttattcggctggcgtgcagaaaccgctgagacgacctttgaaaactatccaacaaccgacgtaaaaattgctgagcaagaatactttgataacggtattttgatgattgccatggtgcgtgctggggttgagttggcgtttgaagcgatgacggcttcaggcatcatcgatgagtcggcttactatgaatcactgcacgaactcccactgattgccaatacggtagcgcgtaagcgtctgtatgaaatgaacgtggtaatctctgacactgctgagtacggtaactatctgtttgccaatgtggcggtaccactattgcgtgaaaagtttatgccgaaagtgggcactgatgtgattggtaaaggattaggcgtggtctctaatcaagttgataacgcaacgcttatcgaagtaaacagcatcatccgtaaccatccggttgagtatatcggtgaagagctacgcggttacatgaaagacatgaagcgcatcgccgtgggtgattaa

SEQ ID NO: 94429 - protein, 494 aa, Vibrio cholerae
MANYFNTLNLREQLDQLGRCRFMAREEFATEADYLKGKKVVIVGCGAQGLNQGLNMRDSGLDVSYALRQAAIDEQRQSFKNAKNNGFNVGSYEQLIPTADLVINLTPDKQHTSVVNAVMPLMKQGAALGYSHGFNIVEEGMQIRKDITVVMVAPKCPGTEVREEYKRGFGVPTLIAVHPENDPQGEGWEIAKAWAAATGGHRAGCLASSFVAEVKSDLMGEQTILCGMLQAGSIVCYEKMVADGIDPGYAGKLLQFGWETITEALKFGGITHMMDRLSNPAKIKAFELSEELKDLMRPLYNKHMDDIISGHFSSTMMADWANDDKDLFGWRAETAETTFENYPTTDVKIAEQEYFDNGILMIAMVRAGVELAFEAMTASGIIDESAYYESLHELPLIANTVARKRLYEMNVVISDTAEYGNYLFANVAVPLLREKFMPKVGTDVIGKGLGVVSNQVDNATLIEVNSIIRNHPVEYIGEELRGYMKDMKRIAVGD

SEQ ID NO: 94430 - DNA, 1026 bp, Bacillus stearothermophilus
  CDS (1)..(1026): transl_table=11
atggcaaaattctactataacggggatgcaaacgaacaatatttgcaagggaaaacggtcgcgatcatcggctacggctcacaaggccacgcccatgcacaaaacttgcgcgacagcggcgtccgcgtcattgtcgggttgcgcaaagggaaatcgtgggagcaggcggaacaggacggctttgaagtatactcggtgcgcgaagcggcaaaacaagcggatattgtgatggtgttgctgccggatgagaaacagccggctgtctacaaggaagagattgaaccggggcttgaaccgggcaacgcgcttgtgtttgcgcacgggtttaacattcatttcagccaaatcgtcccgccggagcatgtcgatgtcttcttggtggcgccgaaaggaccaggccatctcgtgcgtcgcacatatgcggaaggagccggggtgccggcgctcatcgccgtttatcaagatgtaaccggacacgcgaaagaaacggcgctcgcctatgcgaaagcgattggtgctgctcgagctggggtgttggagacaacgttcaaagaagagacggaaaccgacttgttcggtgaacaagcggtgctgtgcggcgggctgacggcgctcatcaaggccgggtttgaaacgctcgttgaagccgggtatcagccggaagtcgcctatttcgagtgtttgcatgaaatgaagctcatcgttgatcttctttatgaaggtggcttgtcgtggatgcgctactcgatttccgatacggcgcaatggggcgactttatcaccggtccgcgcatcattaacgacgccgtgaaagcggaaatgaaaaaggtgctcgatgacatccaaaccggcaaattcgcgaaaagctggattttggaaaaccaagcaaaccgtccggagttcaacgccatcaaccggcgcgagaacgagcatttaatcgaagtcgtcggacgcgaactgcggagcatgatgccgtttgtgaaagcaaaacaaaaaaaagcggtggtgccaggtgcgaaacattaa

SEQ ID NO: 94431 - protein, 341 aa, Bacillus stearothermophilus
MAKFYYNGDANEQYLQGKTVAIIGYGSQGHAHAQNLRDSGVRVIVGLRKGKSWEQAEQDGFEVYSVREAAKQADIVMVLLPDEKQPAVYKEEIEPGLEPGNALVFAHGFNIHFSQIVPPEHVDVFLVAPKGPGHLVRRTYAEGAGVPALIAVYQDVTGHAKETALAYAKAIGAARAGVLETTFKEETETDLFGEQAVLCGGLTALIKAGFETLVEAGYQPEVAYFECLHEMKLIVDLLYEGGLSWMRYSISDTAQWGDFITGPRIINDAVKAEMKKVLDDIQTGKFAKSWILENQANRPEFNAINRRENEHLIEVVGRELRSMMPFVKAKQKKAVVPGAKH

SEQ ID NO: 94432 - DNA, 1011 bp, Bacillus anthracis
  CDS (1)..(1011): transl_table=11
atggcaaaagtttattatgaaaaagatgtaacggtaaatgtattaaaggaaaagaaagtagcaatcattggatatggctcgcaaggtcatgcacatgcgcaaaatttacgtgataacggatttgatgtagtagtaggtttaagaaaagggaagtcttgggataaagcgaaagaagatggattttctgtatatacagtagcggaagcagcaaaacaggctgatgtagtaatgattttgctaccggatgaactgcaaccagaagtatatgaagaggaaattgcgccaaatttacaggcaggaaattctctcgtttttgcacacggatttaatgttcactttgatcaagtgaaaccaccagtgaatgtagatgtatttctagtagcaccaaaaggtccaggacatcttgtgcgtcgtacgtttagtgagggcggagctgttcctgcattatttgcagtatatcaagatgcaacaggagttgcgactgaaaaggcactttcttatgctgatggaattggagcgacgagagctggtgtattagaaacgacatttaaagaagaaacggaaacagatttatttggagagcaagcagtactttgcggcggagtaactgcgctagtcaaagctggatttgaaacgttagttgatgccggatatcagccggaacttgcatattttgaatgtttacatgaactgaaacttattgttgaccttatgtatgaaggtggacttgaaaatatgagatattcagtttcagatacagcgcagtggggcgacttcgtatcaggaccacgtgttgtaacagaagatacgaagaaagcgatgggtacagtgctagcagaaattcaagatggtacatttgcaagaggttggattgcagagcataaagcaggaaaaccaaatttttatgcgacaaatgaaaaagagaatgaacatgaaatcgaagtagttggacgtaaattacgtggaatgatgcctttcgtacagccgcgagtaaaggcaggggtcaaataa

SEQ ID NO: 94433 - protein, 336 aa, Bacillus anthracis
MAKVYYEKDVTVNVLKEKKVAIIGYGSQGHAHAQNLRDNGFDVVVGLRKGKSWDKAKEDGFSVYTVAEAAKQADVVMILLPDELQPEVYEEEIAPNLQAGNSLVFAHGFNVHFDQVKPPVNVDVFLVAPKGPGHLVRRTFSEGGAVPALFAVYQDATGVATEKALSYADGIGATRAGVLETTFKEETETDLFGEQAVLCGGVTALVKAGFETLVDAGYQPELAYFECLHELKLIVDLMYEGGLENMRYSVSDTAQWGDFVSGPRVVTEDTKKAMGTVLAEIQDGTFARGWIAEHKAGKPNFYATNEKENEHEIEVVGRKLRGMMPFVQPRVKAGVK

SEQ ID NO: 94434 - DNA, 1011 bp, Bacillus thuringiensis subsp
  CDS (1)..(1011): transl_table=11
atggctaaagtttattatgaaaaagatgtaacggtaaatgtattaaaggaaaagaaagtagcaatcattggatatggctcgcaaggtcatgcacatgcgcaaaatttacgtgataacggatttgatgtagtagtaggtttaagaaaaggtaagtcttgggataaagcgaaagaagatggattttctgtatatacagtagcagaagcagcaaagaaggctgatgtagtaatgattttgctgccagatgagctgcaaccagaagtatatgaagcggaaattgcaccaaatttacaggcaggaaattctctcgtttttgcacacggatttaatgttcactttgatcaagtgaaaccaccagtgaatgtagatgtatttctagtagcaccaaaaggtccaggacatcttgtgcgccgtacgtttgttgaaggcggagctgttcctgcattatttgcagtatatcaagatgcaacaggagttgcgactgaaaaggcactttcttatgctgatggaattggagcgacgagagctggtgtattagaaacgacatttaaagaagaaacggaaacagatttatttggagagcaagctgtactttgcggcggagtaactgcgctagtcaaagctggatttgaaacgttagttgatgccggatatcagccggaacttgcatattttgaatgtttacatgaactgaaacttattgttgaccttatgtatgaaggtggacttgaaaatatgagatattcagtttcagatacagcgcagtggggcgacttcgtatcaggaccacgcgttgtaacagaagatacgaaaaaagcgatggatacagtgctagcagaaattcaagatggtacatttgcaagaggttggattgcagaacataaagcaggaagaccgaatttccatgcgacaaatgagaaagaaaatgaacatgaaatcgaagtagttggacgtaaattacgtgaaatgatgcctttcgtacagccgcgagtaaaggcaggggtcaaataa

SEQ ID NO: 94435 - protein, 336 aa, Bacillus thuringiensis subsp
MAKVYYEKDVTVNVLKEKKVAIIGYGSQGHAHAQNLRDNGFDVVVGLRKGKSWDKAKEDGFSVYTVAEAAKKADVVMILLPDELQPEVYEAEIAPNLQAGNSLVFAHGFNVHFDQVKPPVNVDVFLVAPKGPGHLVRRTFVEGGAVPALFAVYQDATGVATEKALSYADGIGATRAGVLETTFKEETETDLFGEQAVLCGGVTALVKAGFETLVDAGYQPELAYFECLHELKLIVDLMYEGGLENMRYSVSDTAQWGDFVSGPRVVTEDTKKAMDTVLAEIQDGTFARGWIAEHKAGRPNFHATNEKENEHEIEVVGRKLREMMPFVQPRVKAGVK

SEQ ID NO: 94436 - DNA, 1008 bp, Bacillus thuringiensis subsp
  CDS (1)..(1008): transl_table=11
atgaaaacatattatgagcaagatgcaaatgtagggctattacaaggaaaaactgttgcggtaattggttatggatctcaaggtcatgcgcaggcacaaaatttgcgtgattctggtgtggaagtggtagttggtgttcgtcctggtaagtcttttgaagtagcaaaagcagatgggtttaaagtaatgtctgtttcagaagcagttcgaaccgcgcaagttgtgcaaatgttattgccagatgaacagcaagcacatgtgtataaagcagaagtagaagagaatctccgcgaaggacaaatgttacttttctcacatggatttaatattcacttcggacaaattaacccgccaagctacgtagatgtagcaatggtcgcgccaaaaagtccgggtcatctcgttcgccgtgtattccaagaaggaaacggtgttccggcattagtcgcagtacatcaagatgcaacaggcacagcattacatgtagcactcgcgtacgcaaaaggtgtagggtgtacacgtgcaggtgtaattgaaacgacattccaagaagaaacggagacagatttattcggagagcaagctgtactttgcggaggggtaactgcacttgtgaaagctggttttgaaacattaacagaaggtggatatcgtcctgaaattgcatactttgaatgtttgcatgaattaaagttgatcgttgatttaatgtacgaaggcggtttaacgaatatgcgccattctatatcagatacggcagagttcggggattatgtaacaggatcgagaattgttacagatgaaacgaagaaagagatgaaacgagtacttacagaaattcagcaaggtgaattcgcgaagaaatggattttagaaaatcaagcagggcgtccaacgtataatgcgatgaaaaaagcagaacaaaatcatcagttggaaaaagtaggagaagagcttcgtgaaatgatgagctggattcatgcaccgaaagaattagtgaagaaatag

SEQ ID NO: 94437 - protein, 335 aa, Bacillus thuringiensis subsp
MKTYYEQDANVGLLQGKTVAVIGYGSQGHAQAQNLRDSGVEVVVGVRPGKSFEVAKADGFKVMSVSEAVRTAQVVQMLLPDEQQAHVYKAEVEENLREGQMLLFSHGFNIHFGQINPPSYVDVAMVAPKSPGHLVRRVFQEGNGVPALVAVHQDATGTALHVALAYAKGVGCTRAGVIETTFQEETETDLFGEQAVLCGGVTALVKAGFETLTEGGYRPEIAYFECLHELKLIVDLMYEGGLTNMRHSISDTAEFGDYVTGSRIVTDETKKEMKRVLTEIQQGEFAKKWILENQAGRPTYNAMKKAEQNHQLEKVGEELREMMSWIHAPKELVKK

SEQ ID NO: 94438 - DNA, 1017 bp, Acinetobacter sp
  CDS (1)..(1017): transl_table=11
atgcaaattttttacgataaagattgtgacttatcaatcatccaaggcaaaaaagtagcaattattggttacggttcacaaggtcacgcgcatgcgcttaacctgaaagattctggtgttgatgtaactgtaggtttacgtgcaaattcagcatcttggaaaaaagctgaaaatgcgggccttaaagttgctgaagtacctgaagctgtgaaacaagctgacttggtcatgattttgactccagatgagtttcagtcacaactttaccgtgatgtaattgagccaaacatcaaagaaggtgcaaccttagcatttgcacacggtttctcggttctttataaccaagttgttccacgtcaagatcttgacgtgattatggttgcaccaaaagcaccaggtcatacggttcgttctgaattccaacgtggttcaggtgtacctgatctgattgcaattcatcaagatgcttcaggtaatgcacgtaatgttgcattgtcttacgcgtcaggtgttggtggtggccgtactggtatcatcgagacttcattccgtgaagaaactgaaactgacttgttcggtgagcaagcagtactctgtggtggtgcggttgaattggttaaaatgggcttcgaaactttggttgaagcgggttattcaccagaaatggcatacttcgaatgcttgcacgagcttaagttgattgttgacttgatgttcgaaggcggtattgcggacatgaactactctgtatcaaacaatgctgagtatggcgaatatgtgactggtgttgaagtcatcaatgaacagtctcgtgaagcgatgcgtaatgcacttaaacgtattcaatctggcgaatacgcgaaaatgttcattcaggaaggtgcgctgaactatccgtcaatgactgcgcgtcgtcgtcaaaatgcagcacacggtattgaagtaacaggttcgaaattgcgtgcgatgatgccttggattcaagccaacaaaatcgtggacaaagaaaagaactaa

SEQ ID NO: 94439 - protein, 338 aa, Acinetobacter sp
MQIFYDKDCDLSIIQGKKVAIIGYGSQGHAHALNLKDSGVDVTVGLRANSASWKKAENAGLKVAEVPEAVKQADLVMILTPDEFQSQLYRDVIEPNIKEGATLAFAHGFSVLYNQVVPRQDLDVIMVAPKAPGHTVRSEFQRGSGVPDLIAIHQDASGNARNVALSYASGVGGGRTGIIETSFREETETDLFGEQAVLCGGAVELVKMGFETLVEAGYSPEMAYFECLHELKLIVDLMFEGGIADMNYSVSNNAEYGEYVTGVEVINEQSREAMRNALKRIQSGEYAKMFIQEGALNYPSMTARRRQNAAHGIEVTGSKLRAMMPWIQANKIVDKEKN

SEQ ID NO: 94440 - DNA, 1002 bp, Aquifex aeolicus
  CDS (1)..(1002): transl_table=11
atggcaaagatatactacgacgaagacgcaagtcttgacatactaaaagacaaggtaatagcaattctcggttacggcagtcagggacacgctcacgctcttaatctaagagacagcggacttaacgtaataataggactgcacgaaggaagccgttcaagggaaaaggctaaagcggacggctttgaagtctacactccaagagaagcggcaaagagagctgatatcataatgttcctcattcccgatacagttcagcccgaagtttacaaaaacgaggtggagcccgaactcaactcctcaaagactcttgcatttgcacacggctttaacatacacttcagacagatagttcctcccaaggatgttgacgttttcatggtagctcctaaaggccccggacaccttgtgaggtggatgtacaccgaaggcaagggagttccggcactcgtggccatacatcaggacgcttctggaacgtgcaaggacaaagccctcgcctacgctaaagggataggtgcaacgagggcgggagttatagagaccacattcaaagaagagacggaaacggacctcttcggtgaacagatggttctctgcggtggagtgacagcacttataaaggcaggatttgagactttggtaaatgcgggataccagccggaggttgcgtactttgagtgtttgcacgaacttaaacttatagtggatttaatatacgaacacggcatttccggaatgaggtactccatttcagacacagccaagtacggggacgttacaagaggtgaaaggatttacaaagtggtaaaacccgtaatggagaagaccttagaagagatacagaaaggtgagtttgcgagggaatggatactggaaaacaaagccggaagacccgtgtactacgcactcctggagagggacagagaacacctcgtggagaaagtaggggaagagctcagaaagatgatgccctggctcggaaagaaggagcttaaatga

SEQ ID NO: 94441 - protein, 333 aa, Aquifex aeolicus
MAKIYYDEDASLDILKDKVIAILGYGSQGHAHALNLRDSGLNVIIGLHEGSRSREKAKADGFEVYTPREAAKRADIIMFLIPDTVQPEVYKNEVEPELNSSKTLAFAHGFNIHFRQIVPPKDVDVFMVAPKGPGHLVRWMYTEGKGVPALVAIHQDASGTCKDKALAYAKGIGATRAGVIETTFKEETETDLFGEQMVLCGGVTALIKAGFETLVNAGYQPEVAYFECLHELKLIVDLIYEHGISGMRYSISDTAKYGDVTRGERIYKVVKPVMEKTLEEIQKGEFAREWILENKAGRPVYYALLERDREHLVEKVGEELRKMMPWLGKKELK

SEQ ID NO: 94442 - DNA, 1479 bp, Blochmannia floridanus
  CDS (1)..(1479): transl_table=11
atgaataattattttaataagttaacttttatacaaaaaataaaacatcttggtcagtgtcgacttatgaaaaaaaatgaattttcagatggagttcgagcattgttatctaagaaaatagttataattggttgcgggtcacaaggtttaaatcaaggattaaatatgagagattctggtttaaatattacatatgctttgcgtcgagattcaattattaatcaatctcaatcttatattagagctatgaagtatggattttctgtaggaacttatgatgaattaataccagaagcagattttgttattaatttaattcctgataagtatcatgaatcgcttatacaaaagatagaaccgttaatgaaatataaagctgttttaggttattcacatggatttcatattgttgaaattggagttaaaattcgtcaagatattacagttattatggttgctccaaaatgtccaggtacagaagttcgtcaagagtatcaaagaggatttggtgttcctgcattaattgctgttcatgaagagaataatgcatatggaacaggaatggaattagcaaaatcttgggcttgttctataggtagtaataaagctggagtattggaatcatcatttgtagcagaagtgaaatctgatcttatgggggaacaaactgttttatgtggtatgcttcaagttggatctattttttgttttgataaaatggttgaagatggattggattctggatacgcaggtaagttagttcagaatggttgggaagttataacggaagcgttgaaacaaggaggaattacattaatgatggatagattatcaaatgtttcgaaattgcgtgcttttgagttatctgatcaattaaagaatatattaacccctgtttttgaaaaacatatggaagatatactcgatggatcgttttctaaaaatatgatgttagattggattaataaagattgtaaattattaagttatcgtcagaataatagtcagttattatttgaaaaagctccagtatattgtgagactattttagaacaaacatattttgaccatggagttttaatggttgctataattaaagcaagtgtagaattagcttttgatattatggtgaaatctggtattaaaccagaatcagcatattatgagtcattacatgaattgccgttaattgctaatactatagcgcgaaaaagattgtacgaaatgaatatggtcatttctgatactgcagagtacggtaattatttatttagtgattttgtattacctttgttgaaaaaagaattcgttccatatttaaaaagaggagatttagatttatcacatgttaataatattgtgcatatagataatattttattaagagatattaatgaaatgatccggactcatcctattgaaaaagttggagtacaattaagaagttatatgaaagatatggttagtttatcattttga

SEQ ID NO: 94443 - protein, 492 aa, Blochmannia floridanus
MNNYFNKLTFIQKIKHLGQCRLMKKNEFSDGVRALLSKKIVIIGCGSQGLNQGLNMRDSGLNITYALRRDSIINQSQSYIRAMKYGFSVGTYDELIPEADFVINLIPDKYHESLIQKIEPLMKYKAVLGYSHGFHIVEIGVKIRQDITVIMVAPKCPGTEVRQEYQRGFGVPALIAVHEENNAYGTGMELAKSWACSIGSNKAGVLESSFVAEVKSDLMGEQTVLCGMLQVGSIFCFDKMVEDGLDSGYAGKLVQNGWEVITEALKQGGITLMMDRLSNVSKLRAFELSDQLKNILTPVFEKHMEDILDGSFSKNMMLDWINKDCKLLSYRQNNSQLLFEKAPVYCETILEQTYFDHGVLMVAIIKASVELAFDIMVKSGIKPESAYYESLHELPLIANTIARKRLYEMNMVISDTAEYGNYLFSDFVLPLLKKEFVPYLKRGDLDLSHVNNIVHIDNILLRDINEMIRTHPIEKVGVQLRSYMKDMVSLSF

SEQ ID NO: 94444 - DNA, 1017 bp, Bordetella pertussis
  CDS (1)..(1017): transl_table=11
atgaaagttttctacgacaaagactgcgatctctccctggtcaagggcaaaaccgtcgccatcatcggctacggctcgcaaggccacgcccacgcgctgaacctgcatgattcgggcgtcaaggtcgtggtgggcctgcgcaagggcggcgcctcgtggaacaaggccgccaacgccggcctggaagtcgccgaagtggccgaggccgtcaagcgcgccgacatcgtcatgatgctgctgcccgacgagaacatcgccgccgtctaccgcgacgaagtgcacgccaacatcaaggccggcgccgcgctggccttcgcccacggcttcaacgtgcactacggccaggtcgtgccgcgcgaagacatcgacgtcatcatggcggcgcccaaggccccgggccacaccgtgcgctcgacctacagccagggcggcggcgttccgcacctgatcgccgtctaccaggacaagtcgggcagcgcccgcgacgtggccctgtcgtacgccagcgccaacggcggcggtcgtgccggcatcatcgagaccaacttccgcgaagagaccgagaccgacctgttcggcgaacaggccgtgctgtgcggcggcaccgtcgagctgatcaaggccggcttcgacacgctggtggaagccggctacgcgcccgaaatggcctatttcgagtgcctgcacgagctcaagctgatcgtcgacctgatctacgaaggcggcatcgccaacatgaactactcgatctcgaacaacgccgaattcggcgagtacgagaccggcccgaaggtcgtgaccgacgcgacccgccaggcgatgcgcgagtgcctgacggccatccagaccggcgaatacgccaagaagttcatcctggaaaacgccgccggcgccccgaccctgacctcgcgccgccgcatcaacgcggaatcgcagatcgagcaggtcggcggcaagctgcgcgccatgatgccctggatcgccgccaacaagctggtggacaaggccaagaactaa

SEQ ID NO: 94445 - protein, 338 aa, Bordetella pertussis
MKVFYDKDCDLSLVKGKTVAIIGYGSQGHAHALNLHDSGVKVVVGLRKGGASWNKAANAGLEVAEVAEAVKRADIVMMLLPDENIAAVYRDEVHANIKAGAALAFAHGFNVHYGQVVPREDIDVIMAAPKAPGHTVRSTYSQGGGVPHLIAVYQDKSGSARDVALSYASANGGGRAGIIETNFREETETDLFGEQAVLCGGTVELIKAGFDTLVEAGYAPEMAYFECLHELKLIVDLIYEGGIANMNYSISNNAEFGEYETGPKVVTDATRQAMRECLTAIQTGEYAKKFILENAAGAPTLTSRRRINAESQIEQVGGKLRAMMPWIAANKLVDKAKN

SEQ ID NO: 94446 - DNA, 1020 bp, Bradyrhizobium japonicum
  CDS (1)..(1020): transl_table=11
atgcgtgtttattacgatcgcgacgccgacctgaacctgatcaagggcaagaaggtcgccatcgtcggctacggcagccagggccacgcccatgcgctcaacctgaaggattccggcgtcaaggaagtcgccattgcgctgcgcaaggactcgagctcggttaagaaggcggaagctgccggcttcaaggtgatggatgtcgccgaagccgccaaatgggccgacctcgtcatgatgctgaccccggacgaactccagggcgatatctatcgcgagcacctgcacgacaacatgaagaagggcgccgccctcgtgttcgcccacggcctcaacgtccacttcaacctgctcgacccgcgcgccgacctcgacgtgctgatgatcgcgccgaagggccccggccacaccgtgcgctcggagtatcagcgcggcggcggcgtgccctgcctgattgcgatcgccaaggatgtctcgggcaacgcccacgacctcggcctgtcctacgcctctgcggtcggcggtggccgcgccggcatcatcgagaccaccttcaaggaagagtgcgagaccgacctgttcggcgagcaggtcgtgctctgcggcggcttggtcgagctgatcaagggcggctacgagaccctggtcgaagccggctacgccccggagatggcctatttcgagtgcctgcacgaagtgaagctgatcgtcgacctgatctatgaaggcggcatcgccaacatgaactactcgatctccaacaccgccgagtatggcgagtacgtcacgggtccgcgcatcgtcactgccgagaccaaggccgagatgaagcgcgttctcgccgacatccagggcggcaagttcgcccgcgactggatgctcgagaacaaggtcaaccagacctcgttcaaggcgacccgcgccaagctcgccgcgcatccgatcgaggaagtcggcgcgaaactccgcgacatgatgccctggatcaagaagggcgcgctggtcgacaagagcaagaactaa

SEQ ID NO: 94447 - protein, 339 aa, Bradyrhizobium japonicum
MRVYYDRDADLNLIKGKKVAIVGYGSQGHAHALNLKDSGVKEVAIALRKDSSSVKKAEAAGFKVMDVAEAAKWADLVMMLTPDELQGDIYREHLHDNMKKGAALVFAHGLNVHFNLLDPRADLDVLMIAPKGPGHTVRSEYQRGGGVPCLIAIAKDVSGNAHDLGLSYASAVGGGRAGIIETTFKEECETDLFGEQVVLCGGLVELIKGGYETLVEAGYAPEMAYFECLHEVKLIVDLIYEGGIANMNYSISNTAEYGEYVTGPRIVTAETKAEMKRVLADIQGGKFARDWMLENKVNQTSFKATRAKLAAHPIEEVGAKLRDMMPWIKKGALVDKSKN

SEQ ID NO: 94448 - DNA, 1473 bp, Buchnera aphidicola subsp
  CDS (1)..(1473): transl_table=11
atgaattattttaatacactaaattttactcaaaaaattaatcaaataaataaatgtcgtttcatgaaaaaagaagaatttaacaaaaaaaatgatatattaaaaaataagaatatagttattgttggttgtggtgctcaaggtttaaatcaaggactaaatatgagagacgctggattaaatatttcctatgcgttaaaaaaaaatagtattgccaataaaaatcaatcttggattaatgctattgagaataattttaaagtagacgactatgatgcattaatacccgatgctgatttagtaattaatttaactccggataaacaacatcatagtgtcattaaaaaattacaaaaattaatgaaaaaaaacgctgttttaggatattctcatggttttaatattgtagaatttggagaaaaaatacgaaaagatatcactgttattatggtagcgccaaaatgtccaggaacagaagtacgagaagaatataaaagaggatttggagtacccacattaattgccgttcaccatgaaaacgatattaataaaataggattagaagttgcaaaagcttgggctttttctactggagggcatcgcgcaggtgtgctcgaatcgtcatttatagctgaagtaaaatcagatttaatgggtgaacaaacaattttatgtggtatgcttcaaacagcatcattattatgctatgaaaagttgattacagaaaaatgtaatccagcatattcggcaaaattaatacaaaatggatgggaaactattacggagtctcttaaacatggaggtatcaccttaatgatggatagattatctaattcctcaaaaataagagcctataaactttctaaagaaattaaaaaaatactatctccactctttcaaaaacacatggatgatattatttctggagaattttctaatgaaatgatgaaagattgggaaaatcaggatttaaagttattgaattggcgatataaaactaaaaatacatcttttgaaactgctcctgtttataatgaaaaaataccagaacaagaatattatgatcacggtatactcatgatcgcaatattaaaatctggtatcgaattatcttttgaaaaaatgattgaaacgggtatcaaagaagaatcagcttattatgaatccttacatgaacttccattgattgccaatactattgcaagaaaaaaattatatgagatgaataaagttatttcagatactgctgaatatggtagctatcttttttctgaatctgcatatcctattttaaaagaatttatatctactctcaacaaaagtgatcttggttgcgcattatctcatcaatcagtaaataatattgaactttataggataaatcaaaaaatacagaatcatcctatagaaattatcggatgcacattaagaaactatatgaaaaaaatgaaagcaataacagttgcaaaataa

SEQ ID NO: 94449 - protein, 490 aa, Buchnera aphidicola subsp
MNYFNTLNFTQKINQINKCRFMKKEEFNKKNDILKNKNIVIVGCGAQGLNQGLNMRDAGLNISYALKKNSIANKNQSWINAIENNFKVDDYDALIPDADLVINLTPDKQHHSVIKKLQKLMKKNAVLGYSHGFNIVEFGEKIRKDITVIMVAPKCPGTEVREEYKRGFGVPTLIAVHHENDINKIGLEVAKAWAFSTGGHRAGVLESSFIAEVKSDLMGEQTILCGMLQTASLLCYEKLITEKCNPAYSAKLIQNGWETITESLKHGGITLMMDRLSNSSKIRAYKLSKEIKKILSPLFQKHMDDIISGEFSNEMMKDWENQDLKLLNWRYKTKNTSFETAPVYNEKIPEQEYYDHGILMIAILKSGIELSFEKMIETGIKEESAYYESLHELPLIANTIARKKLYEMNKVISDTAEYGSYLFSESAYPILKEFISTLNKSDLGCALSHQSVNNIELYRINQKIQNHPIEIIGCTLRNYMKKMKAITVAK

SEQ ID NO: 94450 - DNA, 1476 bp, Buchnera aphidicola subsp
  CDS (1)..(1476): transl_table=11
atgggaagtaattatttcaattcgcttaattttcgtcaaaaattaattcaattaagacaatgcacattaattcgtaaagaagagttttctgaaacatttaaaattttaaagggaaaaaatattgtaattgtagggtgtggttctcaaggtttaaatcaaggtttaaatatgagagattcaggtttaaacgtcaaatatgctttgcgtaaaaattctattatttctcagcgttcttcttggaaacgtgctattgataataaatttttagtaggtacttgtgaagaacttataccaacagcagatttagttattaatttaactcctgataaacaacatgaacatgtggtagatgttttgcaaaatttaatgaaaaaaaattctattcttggattttcgcatgggtttaatattatagaatttggtcaaaaaatacgacaagacattacagtgattatggttgctcctaagtgtccaggaacagaagttagagaagagtataaacgtaattttggggttcctacgttaatttctgttcatttagataatgattgtcataatattggcttagaagtagcaaaagaatgggcgactgctattggtgggcatcgtgcaggagtattgcattcttctttttctgcagaagttaaatcagatttaatgggtgaacaaacaatattatgcggtttacttcaaactgggtcagtattatgttatgacaagttaatttctcaaggacatgattgtcattatgcagtaaaattagttcaatcaggatgggaagttattacagaatctttaaaacatggtggtattacacttatgtttgatagattatctaatacagctaagattagggcatataaattatcaaatgatttaaaaaaaattttatcaccgatttttaagaagcacatggatgacatactttcaggttattactctaaaaatatgatgttagattggaaaaatgatgacaaacagttaaaaatttggaggagaagtattcaaaatacaagttttgaacaatgtagtattagtcatattacgttattggaacatgagtatttcgaaaatggattgttaatggtagctattattagagcaggtgtagaacttgcatttgaaattatgattgaagcaggaataaaagaagaatcagcttattatgaatctttacatgaattacctctaatcgctaatactattgctcgaaaaagactttacgaaatgaatttaataatttctgatacagcagaatatggaagtcatttgttttttcaatcagcgtttccattattgcaggattttatgaatacactagaacatggtgatttaggtaataaaatgttggatcaagctattaataatgtagatttgaattatattaatactacgattagaaatcatcctgttgaacatattggacaaaaattgagacgttatatgactaatataaaacagattaattgttattaa

SEQ ID NO: 94451 - protein, 491 aa, Buchnera aphidicola subsp
MGSNYFNSLNFRQKLIQLRQCTLIRKEEFSETFKILKGKNIVIVGCGSQGLNQGLNMRDSGLNVKYALRKNSIISQRSSWKRAIDNKFLVGTCEELIPTADLVINLTPDKQHEHVVDVLQNLMKKNSILGFSHGFNIIEFGQKIRQDITVIMVAPKCPGTEVREEYKRNFGVPTLISVHLDNDCHNIGLEVAKEWATAIGGHRAGVLHSSFSAEVKSDLMGEQTILCGLLQTGSVLCYDKLISQGHDCHYAVKLVQSGWEVITESLKHGGITLMFDRLSNTAKIRAYKLSNDLKKILSPIFKKHMDDILSGYYSKNMMLDWKNDDKQLKIWRRSIQNTSFEQCSISHITLLEHEYFENGLLMVAIIRAGVELAFEIMIEAGIKEESAYYESLHELPLIANTIARKRLYEMNLIISDTAEYGSHLFFQSAFPLLQDFMNTLEHGDLGNKMLDQAINNVDLNYINTTIRNHPVEHIGQKLRRYMTNIKQINCY

SEQ ID NO: 94452 - DNA, 1470 bp, Buchnera aphidicola subsp
  CDS (1)..(1470): transl_table=11
atgaattattttaatacattaaattttcgtcaaaaaattaatcaaattaaaaaatgtcgttttatggaaaaaaaagaatttaacaaaaaaaatgaaatattgaaaaataaaaaaatagttattgtaggatgtggatctcaaggtttaaatcaaggtttaaatatgagagactcaggattaaatatttcttatgctttaagaaaaaatagtattttaaaaaaaaatcaatcttggattaatgcaacaaaaaataattttttagtaggtgattatgaatcacttataccaaatgctgatttagtaattaatttaactcccgataaacaacattctaatgtagttaaggaattacaaaaattaatgaaaaaagatgcatgtttaggttattcacatggttttaacattgtagaaaaactgagaaacattagaaaagatattactgtaattatggttgctcccaaatgtccaggtacagaagtacgagaagaatataaaagaggatttggtgttggtacattaatcgctgtacataatgaaaatgattattctaatatgggattagaagttgcaaaagcatgggctttctctactggtggacatcgtgcaggagttcttgaatcatcatttgttgctgaagtaaaatcagatctcatgggtgaacaaacaattctatgtggcatgcttcaaaccgcttcattagtatgttatgaaaaattaattacaactcaaaaccatccgggttatgcaggtaaattaatacaatttggttgggaaaccataacagaatcgcttaaacatggtggtatcactttaatgatggatcgactatctaattcatcaaaaatcagagcattcaaactatctcaagaaataaaagaattttctcaaaacctatttcaaaaacatatggatgatattatttcaggagatttttcttcaaaaatgatacaagattggaaaaataaagatcaaaatttgttaaattggcgatataaaacaaaaaacacatcctttgaacaatctcctgattatgataaaaaaatattagaacaagaatattatgatcatgggatacttatggtcgcaatattaaaagcaggaattgagttgtcttttgaaacaatgatacaatcaggtattatggaagaatcagcgtattatgaatcattacatgaattaccattaatagcgaatacaattgcgagaaaaaaactatacgaaatgaatatggtaatttcagatacagctgaatacggcaattatcttttttctgaatcagcatatcctattttaaaagaatttgtaaaaaatattaataacactgatcttggttctgctttacctagaaattctgtaaacaacattgaattatataatgtcaacacaatgattcgtaatcatccgatagaaattattggacgtaagttaagatcttatatgaaaaacatgaaaacaattattgtaggttaa

SEQ ID NO: 94453 - protein, 489 aa, Buchnera aphidicola subsp
MNYFNTLNFRQKINQIKKCRFMEKKEFNKKNEILKNKKIVIVGCGSQGLNQGLNMRDSGLNISYALRKNSILKKNQSWINATKNNFLVGDYESLIPNADLVINLTPDKQHSNVVKELQKLMKKDACLGYSHGFNIVEKLRNIRKDITVIMVAPKCPGTEVREEYKRGFGVGTLIAVHNENDYSNMGLEVAKAWAFSTGGHRAGVLESSFVAEVKSDLMGEQTILCGMLQTASLVCYEKLITTQNHPGYAGKLIQFGWETITESLKHGGITLMMDRLSNSSKIRAFKLSQEIKEFSQNLFQKHMDDIISGDFSSKMIQDWKNKDQNLLNWRYKTKNTSFEQSPDYDKKILEQEYYDHGILMVAILKAGIELSFETMIQSGIMEESAYYESLHELPLIANTIARKKLYEMNMVISDTAEYGNYLFSESAYPILKEFVKNINNTDLGSALPRNSVNNIELYNVNTMIRNHPIEIIGRKLRSYMKNMKTIIVG

SEQ ID NO: 94454 - DNA, 1473 bp, Buchnera aphidicola subsp
  CDS (1)..(1473): transl_table=11
atgaaaaattattttaactcacttaattttcgtcaaaaattaattaatttgcaaaaatgtaaattaatagataaccaatttctttctgaaaaaaataatgttttaaaaggaaaaaatattgttattgtgggatgtggatcgcaaggtttaaatcaaggattaaatatgcgggattcaggtttaaatatttcttatgcgttacgtgatgattctatctttaataaaaatcaatcatggataaatgcaactagtaatggttttttcgtaggaacatatgaaaatatcattcctacagcagatttagttataaatttaactcctgataaacagcatgaacaagtagtgaatgtattacaaaaatttatgaaacctaattcagttctgggtttttcgcatgggtttaatattgttgaagtaggacaattaatacgaaatgatattacagttattatggttgctccaaaatgtccaggaacagaggtaagagaagaatataaacgaggttttggggttcctgcgttaattgcagtacattctgaaaatgatccacatgatattggatttgaaattgcaaaatcatgggctatttcaattggaagtcatcatgcaggaattttacactcttcatttatagcagaagttaaatcagatttaatgggtgagcaaactattttatgcggaatgttgcaagcaagttctttagtttgttataaccaacttatttttcagggagttaatccaagttatgcaggtaaattgattcaaacaggatgggaagttattactgaatcagtaaaacatggtggaatcacattaatgttagatcgattgtctaatactgctaaaattagagcatattttctttctaaaaagttaaaaaaaatattttttccgttgtttaggaaacatatggacgatattatttcaggagaattttctaaaaatatgatgttcgattggaaaaataatgatcaacaattaaaagaatggagaacagaaatacaaaatactgattttgagaaatgtaatatctattacaaacaaataccagaacaagaatattttgataatggattattaatggtagcaatattaaaagcaggcattgagttatcatttgaaattatgattgaaacaggaattaaagaagaatcagcgtattatgaatcattacatgaattacctttaatagctaatactattgctagaaagcgtttgtatgaaatgaatttggtaatatcggatactgctgaatatggaagttatcttttttcgcatgcagctataccattacttaaaaaatttatgaatgaattacaacctggtgatcttggtaacaaaatttctacttcagaattagataacataactttatataaagttaatgccaagattgaaagtcatcctatagagattattggaaaaaaattaagactatatatgactagtatggtacctattaaaaccaaataa

SEQ ID NO: 94455 - protein, 490 aa, Buchnera aphidicola subsp
MKNYFNSLNFRQKLINLQKCKLIDNQFLSEKNNVLKGKNIVIVGCGSQGLNQGLNMRDSGLNISYALRDDSIFNKNQSWINATSNGFFVGTYENIIPTADLVINLTPDKQHEQVVNVLQKFMKPNSVLGFSHGFNIVEVGQLIRNDITVIMVAPKCPGTEVREEYKRGFGVPALIAVHSENDPHDIGFEIAKSWAISIGSHHAGILHSSFIAEVKSDLMGEQTILCGMLQASSLVCYNQLIFQGVNPSYAGKLIQTGWEVITESVKHGGITLMLDRLSNTAKIRAYFLSKKLKKIFFPLFRKHMDDIISGEFSKNMMFDWKNNDQQLKEWRTEIQNTDFEKCNIYYKQIPEQEYFDNGLLMVAILKAGIELSFEIMIETGIKEESAYYESLHELPLIANTIARKRLYEMNLVISDTAEYGSYLFSHAAIPLLKKFMNELQPGDLGNKISTSELDNITLYKVNAKIESHPIEIIGKKLRLYMTSMVPIKTK

SEQ ID NO: 94456 - DNA, 1470 bp, Buchnera aphidicola subsp
  CDS (1)..(1470): transl_table=11
atgaattattttaactcacttaactttcgtcaaaagttaattaatttacgaaaatgtaaattggtagaaaagaattttttttctaaaaagtgtgacattttaaaaagaaagaatattgtcatcgtaggttgcggttcacaaggtttgaatcaagggcttaatatgcgtgattcaggtcttcatgtttcttatgcattacgtggcagttctattttaaataaaaataagtcttgggaaaatgctactaaaaataatttttttgtagatacatatgaaaacattattcctacagcagatttagttataaatttaactcctgataaacaacgtaaagaagtagtaacattattgcaaaaatttatgaaggaaaattctgttcttggtttttcgcatggttttcatattgtcgaaataggacaaaaaatacgaaatgatataacagtaattatggtagctccaaaatgtccgggaacagaagtgcgagaagagtataaaaaaggttttggtgtaccttctttaattgctgttcatatggaaaatgatccaaaaaaaattggattcgaaattgcaaaggcttgggcttattctcttggtagtcatcgtgcaggtgttttacattcttcttttattgcagaagttaaatcagatttaatgggtgaacaaactattttatgtggaatgctgcaaactagttctttggtatgttatgatcaacttgtttcacaaggaaaagatccaaattatgctggtaaattaattcagttaggatgggaatctattactgaatcagtaaaacatggtggaattactttgatgttgaatagattatctaacactgcgaaaattagagcatacattctttcaaaaaaattaaaagttatgttttcatcgttatttagaaaacatatggatgatattatatccggtgaattttctaaaaatatgatagatgattggaatagcgacgataaaaagttaaaagaatggagaacacaaattaaaaaaactgattttgaaaaatgtaaaatttgtcataaggaaatatcggaacaagaatattttgatcaaggattattaatggttgcaatattaaaagcaggtattgaactatcttttgaaattatggtagaaactggtataaaagaagaatctgcatactatgaatctcttcatgaattacctttaatagctaatactattgctcgaaaacgtctttatgaaatgaatttagtaatatcagatactgctgaatatggaagttatttattttcccaatccgcaatacctttattaaaagaatttatgaatgagttgtgtccaggtgatcttggtgaaaaaatatcagatttacaatttgataatgttaccttaaataaaattaatcatgatattgaaaatcatccagtagagattattggaaaaaaattaagaaaatacatggttgacatgaagccaattaaattatcataa

SEQ ID NO: 94457 - protein, 489 aa, Buchnera aphidicola subsp
MNYFNSLNFRQKLINLRKCKLVEKNFFSKKCDILKRKNIVIVGCGSQGLNQGLNMRDSGLHVSYALRGSSILNKNKSWENATKNNFFVDTYENIIPTADLVINLTPDKQRKEVVTLLQKFMKENSVLGFSHGFHIVEIGQKIRNDITVIMVAPKCPGTEVREEYKKGFGVPSLIAVHMENDPKKIGFEIAKAWAYSLGSHRAGVLHSSFIAEVKSDLMGEQTILCGMLQTSSLVCYDQLVSQGKDPNYAGKLIQLGWESITESVKHGGITLMLNRLSNTAKIRAYILSKKLKVMFSSLFRKHMDDIISGEFSKNMIDDWNSDDKKLKEWRTQIKKTDFEKCKICHKEISEQEYFDQGLLMVAILKAGIELSFEIMVETGIKEESAYYESLHELPLIANTIARKRLYEMNLVISDTAEYGSYLFSQSAIPLLKEFMNELCPGDLGEKISDLQFDNVTLNKINHDIENHPVEIIGKKLRKYMVDMKPIKLS

SEQ ID NO: 94458 - DNA, 1017 bp, Burkholderia mallei
  CDS (1)..(1017): transl_table=11
atgaaagttttctacgacaaggatgccgacctctccctcatcaagggcaagcaggtgacgatcatcggttacggctcgcaaggccatgcgcacgcgctgaacctgaaggacagcggcgtgaacgtgacggtcggtctgcgccgcggcggcgcgtcgtggagcaaggccgagaacgccggcctcgcggtcaaggaagtcgccgaggcggtgaagggcgcggacgtcgtgatgatgctgctgcccgacgagcagatcgccgccgtctacgcgcaggaagtgcacgcgaacatcaaggaaggcgccgcgctcgcgttcgcgcacggcttcaacgtccactacggccaggtgatcccgcgcgcggatctcgacgtgatcatggtcgcgccgaaggcgccgggccacacggtgcgcggcacgtacgcgcagggcggcggcgtgccgcacctgatcgcggtcgcgcaggacaagtcgggcgcggcgcgcgacatcgcgctgtcgtacgcggcggccaacggcggcggccgtgccggcatcatcgagacgaacttccgcgaagagacggaaaccgatctgttcggcgagcaggccgtgctgtgcggcggcaccgtcgagctgatcaaggccggtttcgagacgctcgtcgaagcgggctacgcgccggaaatggcgtacttcgagtgcctgcacgagctgaagctgatcgtcgacctgatctatgaaggcggcatcgcgaacatgaactactcgatctcgaacaacgccgagtacggcgagtacgtgacgggcccgcgcgtcgtcaccgaagagacgaagaaggcgatgaagcaatgcctgaccgacatccagacgggcgagtatgcaaagagcttcattctcgagaacaaggcgggcgcgccgacgctgcagtcgcgccgccgcctgacggccgagcaccagatcgagcaggtcggctcgaagctgcgcgcgatgatgccgtggatcgcgaagaacaagctcgtcgaccagtcgaagaactga

SEQ ID NO: 94459 - protein, 338 aa, Burkholderia mallei
MKVFYDKDADLSLIKGKQVTIIGYGSQGHAHALNLKDSGVNVTVGLRRGGASWSKAENAGLAVKEVAEAVKGADVVMMLLPDEQIAAVYAQEVHANIKEGAALAFAHGFNVHYGQVIPRADLDVIMVAPKAPGHTVRGTYAQGGGVPHLIAVAQDKSGAARDIALSYAAANGGGRAGIIETNFREETETDLFGEQAVLCGGTVELIKAGFETLVEAGYAPEMAYFECLHELKLIVDLIYEGGIANMNYSISNNAEYGEYVTGPRVVTEETKKAMKQCLTDIQTGEYAKSFILENKAGAPTLQSRRRLTAEHQIEQVGSKLRAMMPWIAKNKLVDQSKN

SEQ ID NO: 94460 - DNA, 1017 bp, Chromobacterium violaceum
  CDS (1)..(1017): transl_table=11
atgaaagtttattacgacaaggacgccgatctctccatcatcaagggcaagaaagtggccatcatcggctacggctcgcaaggccatgcccatgcgcagaacctgaaggaatcgggcgtcgacgtcatcgtcggcctgcgcaaggacggcgcgtcgtggaagaaggccgaggcggccggccacaaggtcaaggaagtggccgaggcggtgaaaaaggccgacgtggtgatgattctgctgccggacgagtcgcagcccgaggtctaccacaaggacatcgcgcccaatctgaagaagggcgcggcgctggccttcgcccacggcttcaacatccactacaaccagatcgtgccgccggccgacgtcgacgtgatcatggtggcgccgaaaggcccgggccacaccgtgcgctccgaatacctgaagggcggcggcgtgccgaccctgatcgccgtctaccaggacaagaccggcaaggcgcgcgacgtggcgctgtcctacgccgcggccaacggcggcaccaagggcggcgtgatcgagaccaacttccgcgaggaaaccgagaccgatctgttcggcgagcaggccgtgctgtgcggcggcgccgtcgaactggtcaaggccggcttcgagaccctggtggaagccggctacgcgccggaaatggcctacttcgagtgcctgcacgagctgaagctgatcgtcgacctgatgtacgaaggcggcatcgccaacatgaactactcgatctccaacaacgccgagtacggcgagtacgtcaccggcccggaagtggtgaccgccgccaccaaggaagcgatgaagaaggcgctgtaccgcatccagagcggcgaatacgccaagatgttcatcctggaaggcaagaccaactacccgtccatgaccgcccgccgccgcctgaccgccgcccacccgatcgagaaggtcggcgccgagctgcgcgcgatgatgccttggatcgccaagaacaagctggtggaccagtccaagaactga

SEQ ID NO: 94461 - protein, 338 aa, Chromobacterium violaceum
MKVYYDKDADLSIIKGKKVAIIGYGSQGHAHAQNLKESGVDVIVGLRKDGASWKKAEAAGHKVKEVAEAVKKADVVMILLPDESQPEVYHKDIAPNLKKGAALAFAHGFNIHYNQIVPPADVDVIMVAPKGPGHTVRSEYLKGGGVPTLIAVYQDKTGKARDVALSYAAANGGTKGGVIETNFREETETDLFGEQAVLCGGAVELVKAGFETLVEAGYAPEMAYFECLHELKLIVDLMYEGGIANMNYSISNNAEYGEYVTGPEVVTAATKEAMKKALYRIQSGEYAKMFILEGKTNYPSMTARRRLTAAHPIEKVGAELRAMMPWIAKNKLVDQSKN

SEQ ID NO: 94462 - DNA, 1017 bp, Corynebacterium glutamicum
  CDS (1)..(1017): transl_table=11
atggctattgaactgctttatgatgctgacgctgacctctccttgatccagggccgtaaggttgccatcgttggctacggctcccagggccacgcacactcccagaacctccgcgattctggcgttgaggttgtcattggtctgcgcgagggctccaagtccgcagagaaggcaaaggaagcaggcttcgaggtcaagaccaccgctgaggctgcagcttgggctgacgtcatcatgctcctggctccagacacctcccaggcagaaatcttcaccaacgacatcgagccaaacctgaacgcaggcgacgcactgctgttcggccacggcctgaacattcacttcgacctgatcaagccagctgacgacatcatcgttggcatggttgcgccaaagggcccaggccacttggttcgccgtcagttcgttgatggcaagggtgttccttgcctcatcgcagtcgaccaggacccaaccggaaccgcacaggctctgaccctgtcctacgcagcagcaatcggtggcgcacgcgcaggcgttatcccaaccaccttcgaagctgagaccgtcaccgacctcttcggcgagcaggctgttctctgcggtggcaccgaggaactggtcaaggttggcttcgaggttctcaccgaagctggctacgagccagagatggcatacttcgaggttcttcacgagctcaagctcatcgttgacctcatgttcgaaggtggcatcagcaacatgaactactctgtttctgacaccgctgagttcggtggctacctctccggcccacgcgtcatcgatgcagacaccaagtcccgcatgaaggacatcctgaccgatatccaggacggcaccttcaccaagcgcctcatcgcaaacgttgagaacggcaacaccgagcttgagggccttcgtgcttcctacaacaaccacccaatcgaggagaccggcgctaagctccgcgacctcatgagctgggtcaaggttgacgctcgcgcagaaaccgcttaa

SEQ ID NO: 94463 - protein, 338 aa, Corynebacterium glutamicum
MAIELLYDADADLSLIQGRKVAIVGYGSQGHAHSQNLRDSGVEVVIGLREGSKSAEKAKEAGFEVKTTAEAAAWADVIMLLAPDTSQAEIFTNDIEPNLNAGDALLFGHGLNIHFDLIKPADDIIVGMVAPKGPGHLVRRQFVDGKGVPCLIAVDQDPTGTAQALTLSYAAAIGGARAGVIPTTFEAETVTDLFGEQAVLCGGTEELVKVGFEVLTEAGYEPEMAYFEVLHELKLIVDLMFEGGISNMNYSVSDTAEFGGYLSGPRVIDADTKSRMKDILTDIQDGTFTKRLIANVENGNTELEGLRASYNNHPIEETGAKLRDLMSWVKVDARAETA

SEQ ID NO: 94464 - DNA, 1476 bp, Escherichia coli O157
  CDS (1)..(1476): transl_table=11
  misc_feature (1437)..(1437): m is a or c
atggctaactacttcaatacactgaacctgcgccagcaactggcacagttgggcaaatgtcgctttatgggccgcgacgaattcgccgatggcgcgagctaccttcagggtaaaaaagtggtcatcgtcggctgtggcgcacagggtctgaaccagggcctgaacatgcgtgattctggtctcgatatctcctacgctctgcgtaaagaagcgattgccgagaagcgcgcgtcctggcgtaaagcgaccgaaaatggttttaaagtgggtacttacgaagaactgatcccacaggcggatctggtggttaacctgacgccggacaagcagcactctgatgtagtgcacaccgtacagccactgatgaaagacggcgcggcgctgggttactcgcatggtttcaacatcgtcgaagtgggcgagcagatccgtaaagacatcaccgtagtaatggttgcgccgaaatgcccaggcaccgaagtacgtgaagagtacaaacgtggattcggcgtaccgacgctgattgccgttcacccggaaaacgatccgaaaggcgaaggcatggcgatcgctaaagcatgggcggcggcaaccggtggtcatcgtgcgggcgtgctggaatcctctttcgttgcggaagtgaaatctgacctgatgggcgagcaaaccattctgtgcggtatgttgcaggccggctctctgctgtgcttcgacaagctggtggaagaaggcaccgatccggcatacgcagaaaaactgattcagttcggctgggaaaccatcaccgaagcgctgaaacagggcggcatcaccctgatgatggaccgtctctctaacccggcgaaactgcgcgcttacgcgttgtcagaacagctgaaagagatcatggcaccgctgttccagaaacatatggacgacatcatctccggcgaattctcctccggcatgatggcggactgggccaacgatgataagaaactgctgacctggcgtgaagagaccggcaaaaccgcgtttgaaaccgcgccgcagtatgaaggcaaaatcggcgagcaggagtacttcgataaaggcgtactgatgatcgcgatggtgaaagcgggcgttgagctggcgtttgaaaccatggttgattccggcatcatcgaagaatctgcttactatgaatcactgcacgaactgccgctgattgccaacaccatcgcccgtaagcgtctgtacgaaatgaacgtggttatctctgataccgctgagtacggtaactatctgttctcttacgcttgtgtgccgttgctgaaaccgtttatggcagagctgcaaccgggcgatttgggtaaagctattccggaaggtgcggtagataacgcgcaactgcgtgatttgaacgaagcgattcgcagccatgcgattgagcaggtaggtaagaaactgcgcggmtacatgactgatatgaaacgtattgctgttgcgggttaa

SEQ ID NO: 94465 - protein, 491 aa, Escherichia coli O157
MANYFNTLNLRQQLAQLGKCRFMGRDEFADGASYLQGKKVVIVGCGAQGLNQGLNMRDSGLDISYALRKEAIAEKRASWRKATENGFKVGTYEELIPQADLVVNLTPDKQHSDVVHTVQPLMKDGAALGYSHGFNIVEVGEQIRKDITVVMVAPKCPGTEVREEYKRGFGVPTLIAVHPENDPKGEGMAIAKAWAAATGGHRAGVLESSFVAEVKSDLMGEQTILCGMLQAGSLLCFDKLVEEGTDPAYAEKLIQFGWETITEALKQGGITLMMDRLSNPAKLRAYALSEQLKEIMAPLFQKHMDDIISGEFSSGMMADWANDDKKLLTWREETGKTAFETAPQYEGKIGEQEYFDKGVLMIAMVKAGVELAFETMVDSGIIEESAYYESLHELPLIANTIARKRLYEMNVVISDTAEYGNYLFSYACVPLLKPFMAELQPGDLGKAIPEGAVDNAQLRDLNEAIRSHAIEQVGKKLRGYMTDMKRIAVAG

SEQ ID NO: 94466 - DNA, 1479 bp, Erwinia carotovora subsp
  CDS (1)..(1479): transl_table=11
atggctaactatttcaacacattaaacctgcgtcagcagctggatcaattgggcaagtgccgctttatggggcgtgatgaatttgccgatgaggcgagctacctgaaagggaaaaaagtggtgatcgtcggttgtggtgctcagggtctgaatcagggtctgaacatgcgcgattctggtttggatatcgcttatgctctgcgtgctgaagccattgcagaaaaacgtgcatcatggcgcaaagcgaccgaaaacggcttcaccgttggcacttacgaagatctgatcccgcaggctgatttgatcgttaacctgacgccggacaaacagcactccgcagtggttcaggcggtacagccgctgatgaaacagggcgcagcgctgggctactctcacggcttcaacatcgttgaagtcggtgagcaaatccgtaaagacatcactgtcgtgatggtggcaccgaagtgtccaggtacggaagtgcgtgaagaatacaaacgtggtttcggcgtaccgacgctgatcgcggttcaccctgaaaacgatccaaaaggcgaaggcatggcaatcgccaaagcctgggctgcggccactggcggccaccgtgctggcgttctgcaatcctctttcgttgcagaagtgaaatctgacctgatgggtgagcaaactatcctgtgtggtatgttgcaggccggttctctgctgggcttcgacaaactggtttctgaaggtaccgatcctgcttacgcagaaaaactgattcagttcggctgggaaaccatcaccgaagcgctgaagcaaggcggtattacgctgatgatggatcgcctgtctaacccggcgaaactgcgcgcttatgcactgtctgagcaactgaaaggcattatggctccgctgttccagaaacacatggatgacatcatctccggtgaattctccggcggcatgatggctgactgggcgaacgatgacgtgaaactgctgacctggcgtgaagagaccggtaaaaccgcgttcgaaaacgccccgcagttcgacggtaaaatcgctgagcaggaatactttgataacggcgtgctgatggttgcgatggtaaaagcgggcgttgagctggcgtttgaaaccatggtgagctccggtatcatcgaagagtcagcttactatgaatcactgcatgagctgccgctgatcgccaacaccatcgcgcgtaagcgtctgtatgaaatgaacgtggttatctctgataccgcagaatacggtaactacctgtttgctaacgcagcggttccgttgctgaaaggtgcgttcatggcatctctgcagccgggcgatctgggtaaagcggttgctggcaccgaagtagacaacgcgcaactgcgtgatgttaacgaagctatccgtaaccacccgatcgaaaccgtaggccacacgctgcgcggttacatgaaagacatgaagcgtatcgctgtcgcgggttaa

SEQ ID NO: 94467 - protein, 492 aa, Erwinia carotovora subsp
MANYFNTLNLRQQLDQLGKCRFMGRDEFADEASYLKGKKVVIVGCGAQGLNQGLNMRDSGLDIAYALRAEAIAEKRASWRKATENGFTVGTYEDLIPQADLIVNLTPDKQHSAVVQAVQPLMKQGAALGYSHGFNIVEVGEQIRKDITVVMVAPKCPGTEVREEYKRGFGVPTLIAVHPENDPKGEGMAIAKAWAAATGGHRAGVLQSSFVAEVKSDLMGEQTILCGMLQAGSLLGFDKLVSEGTDPAYAEKLIQFGWETITEALKQGGITLMMDRLSNPAKLRAYALSEQLKGIMAPLFQKHMDDIISGEFSGGMMADWANDDVKLLTWREETGKTAFENAPQFDGKIAEQEYFDNGVLMVAMVKAGVELAFETMVSSGIIEESAYYESLHELPLIANTIARKRLYEMNVVISDTAEYGNYLFANAAVPLLKGAFMASLQPGDLGKAVAGTEVDNAQLRDVNEAIRNHPIETVGHTLRGYMKDMKRIAVAG

SEQ ID NO: 94468 - DNA, 999 bp, Gloeobacter violaceus
  CDS (1)..(999): transl_table=11
atgaccagggcgcgcatgtactacgacgaggacgccgatctgtcggtactcgacaacaagacgatcgccatcgtcggctacggatcccagggccatgcccacgccctgaatctcaaagactcgggaatcgacgtgatcgtgggtctgtacgaaggctcgcgctcctgggcgcgcgccgaaaacgagggccttgccgtctatccgaccgctgaggcggcggccaaggcggatctggtgatgattttgttgcccgacgaagtgcagcgcgagatctacaaccgcgacatcgccccgcacctgggcacaggcaaaaccctcgccttcgcccacggcttcaatattcatttctcccagatcgtcccttcccaagaggtggacgtgctcatggtcgcccccaaaggtcccggccacctggtgcgccgcgtgttcaccgaaggcaagggggtaccgtgtctgtttgccgtcgagcaggatgcgagcggccgggcgcgcgccacggcgatggcctacgcccgggcgatcggcggcacgcgggcgggcattttggagaccacctttcgagaagaagccgagacggacctcttcggcgagcaaaccgtgctctgcggggggctgaccgccctcatcaaggcgggcttcgagacgctggtggaggcgggctaccagccggaactggcttacttcgagtgcctgcacgaggtgaagctgatcgtcgatttgatcgtcgaggggggactggccaagatgcgcgactcgatctccaacacggccgaattcggcgattacacccgcggcccgcgcatcgtcgatgagcgcaccaaggctgagatgaaaaagatcctggccgaaatccagaacggtgaatttgccaaacagtgggtgctggatagccaggccaattacgcgagcttcaaggcgatgcgccgccgcgaagccgaacacccgatcgaagaggtgggggcggatctgcgcaagatgatgtcctggctacgcccctga

SEQ ID NO: 94469 - protein, 332 aa, Gloeobacter violaceus
MTRARMYYDEDADLSVLDNKTIAIVGYGSQGHAHALNLKDSGIDVIVGLYEGSRSWARAENEGLAVYPTAEAAAKADLVMILLPDEVQREIYNRDIAPHLGTGKTLAFAHGFNIHFSQIVPSQEVDVLMVAPKGPGHLVRRVFTEGKGVPCLFAVEQDASGRARATAMAYARAIGGTRAGILETTFREEAETDLFGEQTVLCGGLTALIKAGFETLVEAGYQPELAYFECLHEVKLIVDLIVEGGLAKMRDSISNTAEFGDYTRGPRIVDERTKAEMKKILAEIQNGEFAKQWVLDSQANYASFKAMRRREAEHPIEEVGADLRKMMSWLRP

SEQ ID NO: 94470 - DNA, 1479 bp, Haemophilus influenzae
  CDS (1)..(1479): transl_table=11
atggctaactatttcaacacattaaatttacgtcaaaaattagaccaattaggtcgttgtcgttttatggatcgcgaagaatttgcagatgaagcaaacttcttaaaaggcaaaaaaatcgttatcgtgggctgtggtgcgcaaggtttaaaccaaggtttgaatatgcgtgattctggcttagatattagctatgccttacgtcctgaagcaattgctgaaaaacgtgcgtcattccaacgtgcaactgaaaatggttttaaagtgggtacttatgaagaattgatcccaactgcagatttagtcgtaaacttaacaccagacaaacaacactctaaagtggttgctgatgtgatgcctttaatgaaaaaagactctgcatttggttattcacacggtttcaacattgttgaagttggcgaagaaatccgtaaagacattacggttgtgatggttgcaccaaaatgcccgggtactgaagtacgtgaagaatacaaacgtggtttcggtgtgccaacattaattgcggttcatcctgaaaatgacccgaaaggcgaaggcttggcgatcgcgaaagcttgggctgctgcaacaggcggtcataaagcaggtgttttagaatcttcattcgtggcagaagtaaaatctgacttaatgggtgagcaaactatcctttgcggtatgttacaagcaggttctatcgtatgttatgacaaattagtggctgacggtaaagatcctgcatacgcaggtaaattaatccaatacggttgggaaaccattaccgaagcgttaaaacaaggtggtatcacattaatgatggatcgcctatcaaacagcgcaaaattacgtgcatttgaacttgctgaacaaattaaagaaagccttggtttcttatattacaaacacatggatgacatcatcagcggtcacttctctgcaaccatgatggcagactgggcaaatggcgataaagatttattcgcatggcgtgaagcaacaggtaaaacagcctttgaaaatgcaccaaaatatgatggcaaaattagcgaacaagaatactttgataacggtgtattaatgattgcaatggttaaagctggtgtagaattagcctttgatgcgatggttgcaagcggtatttatgaagaatcagcttactatgaatcacttcatgaattaccattaattgcgaacaccatcgcacgtaaacgcttatacgaaatgaacgtagtaatttcagataccgcagaatatggtaactacttattctctaacgtagcaaccccaattcttgcaaaagaaattatacccaaccttcaaaaaggtgacttgggcgagcctactccagcagtggaaatcgataacatcaccttacgcgatgtaaacgatgcaattcgtaaccaccctgttgaattaatcggtcaagaattacgtggttatatgacagatatgaaacgtattgctgttgcaggttaa

SEQ ID NO: 94471 - protein, 492 aa, Haemophilus influenzae
MANYFNTLNLRQKLDQLGRCRFMDREEFADEANFLKGKKIVIVGCGAQGLNQGLNMRDSGLDISYALRPEAIAEKRASFQRATENGFKVGTYEELIPTADLVVNLTPDKQHSKVVADVMPLMKKDSAFGYSHGFNIVEVGEEIRKDITVVMVAPKCPGTEVREEYKRGFGVPTLIAVHPENDPKGEGLAIAKAWAAATGGHKAGVLESSFVAEVKSDLMGEQTILCGMLQAGSIVCYDKLVADGKDPAYAGKLIQYGWETITEALKQGGITLMMDRLSNSAKLRAFELAEQIKESLGFLYYKHMDDIISGHFSATMMADWANGDKDLFAWREATGKTAFENAPKYDGKISEQEYFDNGVLMIAMVKAGVELAFDAMVASGIYEESAYYESLHELPLIANTIARKRLYEMNVVISDTAEYGNYLFSNVATPILAKEIIPNLQKGDLGEPTPAVEIDNITLRDVNDAIRNHPVELIGQELRGYMTDMKRIAVAG

SEQ ID NO: 94472 - DNA, 1479 bp, Haemophilus influenzae
  CDS (1)..(1479): transl_table=11
atggctaactatttcaacacattaaatttacgtcaaaaattagaccaattaggtcgttgtcgttttatggatcgcgaagaatttgcagatgaagcaaacttcttaaaaggcaaaaaaatcgttatcgtaggctgtggtgcgcaaggtttaaaccaaggtttgaatatgcgtgattctggcttagatattagctatgccttacgccctgaagcgattgcagaaaaacgtgcgtcattccaacgtgcaaccgaaaatggttttaaagtgggtacttatgaagaattaattccaactgcagatttagtcgtaaacttaacaccagacaaacaacactctaaagtagttgccgatgtcatgcctttaatgaaaaaagactctgcatttggttattcacacggtttcaatattgttgaagttggcgaagaaatccgtaaagatattacggttgtgatggttgcgccaaaatgtccaggtactgaagttcgtgaagaatacaaacgtggtttcggtgtgccaacattaatcgcggttcatcctgaaaatgacccgaaaggcgaaggcatggcgatcgcaaaagcatgggctgctgcaactggcggtcataaagcgggtgttttagaatcttcattcgtggcagaagtaaaatctgacttaatgggtgagcaaactatcctttgcggtatgttacaagcaggttctatcgtatgttatgacaaattagtggcagatggtaaagatccagcatacgcaggtaaattaatccaatacggttgggaaaccattaccgaggcattaaaacaaggcggcatcacattaatgatggatcgcctatcaaacagtgcaaaattacgtgcatttgaactagctgaacaaatcaaagaaagccttggtttcttatattacaaacatatggatgacatcattagcggtcacttctctgcaacaatgatggcagactgggcaaatggcgacaaagatttattcgcatggcgtgaagcaacaggtaaaacagcctttgaaaatgcgccaaaatatgatggcaaaattagcgaacaagaatattttgataacggcgtattaatgatcgcaatggttaaagctggtgtagaattagcctttgatgcgatggttgcaagcggtatttatgaagaatcagcttactacgaatcacttcacgaattgccattaattgcgaacactatcgcacgtaaacgcttatacgaaatgaacgtggtaatttctgataccgcagaatatggtaactacttattctctaacgtagcgaccccaattcttgcaaaagaaattatccctaaccttcaaaaaggcgatttgggcgagccaactccagcagtggaagtcgataacattaccttacgtgatgtaaacgatgcaattcgcaaccaccctgttgaattaatcggtcaagaattacgtggttatatgacagatatgaaacgtatcgcagtcgcaggttaa

SEQ ID NO: 94473 - protein, 492 aa, Haemophilus influenzae
MANYFNTLNLRQKLDQLGRCRFMDREEFADEANFLKGKKIVIVGCGAQGLNQGLNMRDSGLDISYALRPEAIAEKRASFQRATENGFKVGTYEELIPTADLVVNLTPDKQHSKVVADVMPLMKKDSAFGYSHGFNIVEVGEEIRKDITVVMVAPKCPGTEVREEYKRGFGVPTLIAVHPENDPKGEGMAIAKAWAAATGGHKAGVLESSFVAEVKSDLMGEQTILCGMLQAGSIVCYDKLVADGKDPAYAGKLIQYGWETITEALKQGGITLMMDRLSNSAKLRAFELAEQIKESLGFLYYKHMDDIISGHFSATMMADWANGDKDLFAWREATGKTAFENAPKYDGKISEQEYFDNGVLMIAMVKAGVELAFDAMVASGIYEESAYYESLHELPLIANTIARKRLYEMNVVISDTAEYGNYLFSNVATPILAKEIIPNLQKGDLGEPTPAVEVDNITLRDVNDAIRNHPVELIGQELRGYMTDMKRIAVAG

SEQ ID NO: 94474 - DNA, 1482 bp, Mannheimia succiniciproducens
  CDS (1)..(1482): transl_table=11
atgtctaactatttcaatacattaaacttacgtcaaaaattagatcaattaggtcgttgccgttttatggaacgcagcgaattcgctgacggttgcaatttcttaaaaggcaagaaaatcgtaattgtcggttgcggtgcgcaaggcttaaaccaaggtttaaatatgcgtgattcagggctggatatcagctatgcattacgccctgaagctattactgaaaaacgcgcttcattccaacgcgcaacggaaaacggttttaaagtaggtacttatcaagaattaattccgactgcggatttggtggttaatttaacgccggataaacaacacagcaaagtggtggcggatgtcatgccgttaatgaaacaaggcgcttcattcggttactcgcacggttttaacattgttgaagtaggcgaacaaattcgtgaagatatcactgtggtaatggtggcgccgaaatgtccgggtaccgaagtgcgtgaagaatacaaacgcggtttcggtgtgccgacattaatcgcggttcacccggcaaacgatcctaaaggcgagggtatggcgattgccaaagcatgggcaagcgctaccggcggcgaccgtgccggcgtattggaatcttcgttcgtagcggaagtgaaatccgacttaatgggtgaacaaaccattctttgcggtatgttacaagcgggttcaattgtttgttacgacaaattggtagcggacggtaaagatccggcctacgcaggtaaattaatccaatacggttgggaaactattaccgaggccttaaaacaaggcggtatcactttaatgatggatcgcctgtcaaacagtgcgaaaatccgtgcgtttgaattagcggaagaaatcaaagaacatttgaacttcttatatttaaaacatatggatgacatcatcagcggtgagttctccgcaactatgatggcagactgggcaaacggcgataaagatttgttcgcatggcgtgaagcgacaggtaaaaccgctttcgaaaacgcaccaaaagcggacggcatcaaaatttccgaacaagaatattttgataacggcgtcgtaatggtagctatggttaaagccggcgttgaaatggcgtttgatgcgatggttgcaagcggtatttacgaagaatccgcttattatgagtcgttacacgaattaccgttaattgcaaacactatcgcccgtaaacgtttatacgaaatgaacgtagtaatttcagatacggcggaatacggtaactacttattctctaacgtggcgacacctattcttgctaaagaaatcgtgtctcaattaaaacgcggcgacttaggcgaaccgactccggcggctgaaatagataatgtttatttacgtgatatcaacgacacaatccgtaaccacccggttgaattaatcggtcaggaattacgcggttatatgacggatatgaaacgtatttcatctcaaggttaa

SEQ ID NO: 94475 - protein, 493 aa, Mannheimia succiniciproducens
MSNYFNTLNLRQKLDQLGRCRFMERSEFADGCNFLKGKKIVIVGCGAQGLNQGLNMRDSGLDISYALRPEAITEKRASFQRATENGFKVGTYQELIPTADLVVNLTPDKQHSKVVADVMPLMKQGASFGYSHGFNIVEVGEQIREDITVVMVAPKCPGTEVREEYKRGFGVPTLIAVHPANDPKGEGMAIAKAWASATGGDRAGVLESSFVAEVKSDLMGEQTILCGMLQAGSIVCYDKLVADGKDPAYAGKLIQYGWETITEALKQGGITLMMDRLSNSAKIRAFELAEEIKEHLNFLYLKHMDDIISGEFSATMMADWANGDKDLFAWREATGKTAFENAPKADGIKISEQEYFDNGVVMVAMVKAGVEMAFDAMVASGIYEESAYYESLHELPLIANTIARKRLYEMNVVISDTAEYGNYLFSNVATPILAKEIVSQLKRGDLGEPTPAAEIDNVYLRDINDTIRNHPVELIGQELRGYMTDMKRISSQG

SEQ ID NO: 94476 - DNA, 1017 bp, Methylococcus capsulatus
  CDS (1)..(1017): transl_table=11
atgcagatttactacgacaaagacgccgacctttccatcatccagggaaagaaggttgccatcatcggctacggctcgcagggccacgcccacgccaacaacctcaaggattccggagtgcaggtcgtggtggggctgcgtccgggttcggcttccgccaagaaggccgagaacgccggcctcgcggtcgcctcggtcgaggatgcggtcaaacaggcggacgtcatcatgatcctggcgccggacgagcatcaggcccgcctctacaatgaacagatcgcgccgaacatcaagcagggcgccgccctcgccttcgcccacggcttcaacatccacttcgagcagatcaccccgcgcgccgacctcgacgtgatcatgatcgcgcccaagggtcccggccatctggtacgttccacctacacccagggcggcggcgtgccctcgctgatcgccgtgtaccagaatgccagcgggcgcgccaaggaactcgcgctgtcctatgcttcggccaatggcggcggtcgggctggtatcatcgagaccaccttccgcgaagagaccgaaaccgatctgttcggcgaacaggccgtcctgtgtggcggcgccaccgcactggtgcaggcgggtttcgagacgctggtcgaagccggttatgcgcccgagatggcctatttcgagtgtctgcacgaactcaagctgatcgtcgacctgatgtacgaaggcggcatcgccaacatgcgttattcgatctccaatacggcagagtacggcgacctgacccgtggtccgcgcatcgtcaccgagcagaccaagcaggaaatgaagaaaatcctgcgcgagatccagaccggcgaattcgcccgtgagttcattttggaaaaccaggccggagccgccaccctgaaagcgaaacgccgtctcggccgagagcatctcatcgagagcgtgggcgccaggctgcgcgacatgatgccgtggatcaaggccaaccgcattgtggacacgagcaagaactga

SEQ ID NO: 94477 - protein, 338 aa, Methylococcus capsulatus
MQIYYDKDADLSIIQGKKVAIIGYGSQGHAHANNLKDSGVQVVVGLRPGSASAKKAENAGLAVASVEDAVKQADVIMILAPDEHQARLYNEQIAPNIKQGAALAFAHGFNIHFEQITPRADLDVIMIAPKGPGHLVRSTYTQGGGVPSLIAVYQNASGRAKELALSYASANGGGRAGIIETTFREETETDLFGEQAVLCGGATALVQAGFETLVEAGYAPEMAYFECLHELKLIVDLMYEGGIANMRYSISNTAEYGDLTRGPRIVTEQTKQEMKKILREIQTGEFAREFILENQAGAATLKAKRRLGREHLIESVGARLRDMMPWIKANRIVDTSKN

SEQ ID NO: 94478 - DNA, 1017 bp, Methylobacillus flagellatus
  CDS (1)..(1017): transl_table=11
atgaaagtctattacgacaaggacgcggatctttccctgatcaagaagctgaaagtgaccatcgtcggttacggctcccaaggccatgcccatgcccagaatttgaaggattccggcgtcaacgtcaccatcggcgcccgcaaggaaggcagttccttcgccaaggcagtgaacgcagggcatgaagtcaaggaaatcaaggaagcggtcactggcgccgacgtcgtcatggtattgctgcctgacgaaaccatggcagaaatctaccatgcggaaatcgaacccaacttgaaaaagggtgccgcgctagcctttgcccatggcttcaacatacattacaaccagattgtgccgagcaaggatctggacgtgatcatgatcgcgcccaagggcccaggccacactgtgcgttcggaatacctgaagggcggcggcgtgccctccctgatcgcggtttaccaggatgcgtctggcaaagccaaggacattgcgctctcctacgctgcggccaacggtggcaccaagggcggcgtgatcgagaccaacttccgcgaagaaaccgaaaccgacctgtttggcgagcaggccgtgctctgtggtggcgcagtcgaattggtgaaggcaggcttcgagaccctggttgaagctggatatgctccggaaatggcttacttcgagtgcttgcacgagctcaagttgatcgtcgacctcatgtacgaaggcggcattgccaacatgaactactccatctccaacaatgcagaatatggcgaatatgtcactggcccccgcgtgattgccgaccaggcccgcgctgcaatgaaggagtgcctgaagaacatccagaacggtgactatgccaagcagttcattctggaaggccgcaccggttatccatccatgactgcacgccgccgccttaacgctgctcacccgattgaacaggtcggcagccagctgcgtgccatgatgccttggattgccaagaacaaactggtagatcaatccaagaactaa

SEQ ID NO: 94479 - protein, 338 aa, Methylobacillus flagellatus
MKVYYDKDADLSLIKKLKVTIVGYGSQGHAHAQNLKDSGVNVTIGARKEGSSFAKAVNAGHEVKEIKEAVTGADVVMVLLPDETMAEIYHAEIEPNLKKGAALAFAHGFNIHYNQIVPSKDLDVIMIAPKGPGHTVRSEYLKGGGVPSLIAVYQDASGKAKDIALSYAAANGGTKGGVIETNFREETETDLFGEQAVLCGGAVELVKAGFETLVEAGYAPEMAYFECLHELKLIVDLMYEGGIANMNYSISNNAEYGEYVTGPRVIADQARAAMKECLKNIQNGDYAKQFILEGRTGYPSMTARRRLNAAHPIEQVGSQLRAMMPWIAKNKLVDQSKN

SEQ ID NO: 94480 - DNA, 993 bp, Moorella thermoacetica
  CDS (1)..(993): transl_table=11
gtggcagttgtatactatgaccaggacgcagatctaaacgtcctgaagggcaaaaaaatcgccgtgatgggttatggcagccagggacactcccaggctcaaaatttaaaggatagcggcttggacgtagtggttggcctgcgcccggagagtaaatccagggccgcagcccaggctgccggcctggaggtaaagacggtagccgaagcagccgcagaggctgatataatccagatcctcctcccggatgaaacccaggccagggtttatcgggaagagatcgccccttacctgacgggcggcaaggtcctgatgttctcccatggctttaacattcatttcaaccagattgtacctccggccgatgtcgatgtaatcatggttgcccccaagggtcccgggcacctggtacgccgtacctatgttgaaggccagggggttccggccttgattgccatttaccaggatgccagcggtaaggccaaagaaatcggcctggcctatgccaagggcatcggtgccacccgcgcgggggtaatcgagaccaccttcaaagaagagacggaaaccgacctcttcggagagcaggccgtcctttgcggggggacaactgccctggttaaagccggtttcgaaaccctggtcgaggccggttatcagccggagattgcctactttgagtgcctccacgaactgaagcttattgtcgacttgatgtatgagggcggcattaagtacatgcgctactccatcagcgacacggccgagtatggtgatgtcaccaggggaccccggctgatcgatgaccatgtcaagtcaactatgaaatctattttaaaggagatccaggacggtgtctttgccagggaatggatcttggaaaaccaggccgggcgccccagcttcaacgctttccggaagaaggaacgtgaacacctcatcgaacaggtcggcgaccagctccgggaaatgatgtcctggttgaagaaatag

SEQ ID NO: 94481 - protein, 330 aa, Moorella thermoacetica
MAVVYYDQDADLNVLKGKKIAVMGYGSQGHSQAQNLKDSGLDVVVGLRPESKSRAAAQAAGLEVKTVAEAAAEADIIQILLPDETQARVYREEIAPYLTGGKVLMFSHGFNIHFNQIVPPADVDVIMVAPKGPGHLVRRTYVEGQGVPALIAIYQDASGKAKEIGLAYAKGIGATRAGVIETTFKEETETDLFGEQAVLCGGTTALVKAGFETLVEAGYQPEIAYFECLHELKLIVDLMYEGGIKYMRYSISDTAEYGDVTRGPRLIDDHVKSTMKSILKEIQDGVFAREWILENQAGRPSFNAFRKKEREHLIEQVGDQLREMMSWLKK

SEQ ID NO: 94482 - DNA, 1014 bp, Nocardia farcinica
  CDS (1)..(1014): transl_table=11
gtggcagtcgagatgttctatgacgacgacgccgatctgtcgatcatccagggccgtaaggtcgcggtgatcggctacggcagccaggggcacgcgcactcgctgagcctgcgcgactccggtgtcgaggtccgggtcggtctggccgagggctcgaagtcgcgtccgaaggccgaggaggccgggctgaccgtcggcactccggccgaggtctcggcgtgggccgatgtgatcatgctgctggcgcccgacaccgcgcaggcgtcgatcttcaccaacgacatcgagccgaacctgaaggacggcgacgcgctgttcttcggccacggcctcaacatccacttcggcctgatcaagcctccggcgaatgtcaccatcggcatggtcgccccgaagggccctggccacctggtgcgtcgtcagttcgtcgacggcaagggcgtgcccgccctgatcgcgatcgaccaggaccccaagggtgagggccaggcgctggcgctgtcctacgccaagggcatcggcggcacccgcgcgggtgtcatcaagaccaccttcaaggaagagaccgagaccgacctgttcggtgagcaggccgtgctgtgcggtggcaccgaggaactggtcaagaccggtttcgaggtcatggtcgaggccggctacgccccggagatggcctacttcgaggtgctgcacgagctcaagctgatcgtggacctgatgtacgagggcggcatcgcccggatgaactactcggtctccgacaccgccgaattcggtggctacctgtcgggcccgcgcgtcatcgacgccggcaccaaggagcggatgaaggagatcctgaaggacatccaggacggcaccttcgtcaagcgtctggtcgccaacgtcgagggcggcaacaaggagctcgagggtctgcgcaagcagaacgccgagcacccgatcgaggtcaccggcgccaagctgcgcggtctgatgagctgggtcgaccggcccatcaccgaaaccgcctga

SEQ ID NO: 94483 - protein, 337 aa, Nocardia farcinica
MAVEMFYDDDADLSIIQGRKVAVIGYGSQGHAHSLSLRDSGVEVRVGLAEGSKSRPKAEEAGLTVGTPAEVSAWADVIMLLAPDTAQASIFTNDIEPNLKDGDALFFGHGLNIHFGLIKPPANVTIGMVAPKGPGHLVRRQFVDGKGVPALIAIDQDPKGEGQALALSYAKGIGGTRAGVIKTTFKEETETDLFGEQAVLCGGTEELVKTGFEVMVEAGYAPEMAYFEVLHELKLIVDLMYEGGIARMNYSVSDTAEFGGYLSGPRVIDAGTKERMKEILKDIQDGTFVKRLVANVEGGNKELEGLRKQNAEHPIEVTGAKLRGLMSWVDRPITETA

SEQ ID NO: 94484 - DNA, 1476 bp, Pasteurella multocida
  CDS (1)..(1476): transl_table=11
atggctaactatttcaatacattaaatttacgccaacaattagatcaattagggcgttgtcgctttatggatcgcaatgaatttgcgaatgaagcagattacctaaaaggaaaaaaaattgtcatcgtcggttgcggggcacaaggcttgaatcagggcttgaacatgcgtgattcggggctagatattagctatgccttacgtgcagaagccattgcagaaaaacgcgcgtctttccaacgtgcgacggaaaatggctttaaagtggggacgtatgatgaattaattccaagtgcagatttagtggtgaatttaacccctgacaaacagcactcgaaagtggtggcagatgtcatgccgttaatgaaacaaggtgccgcactcggttattcacatggtttaaatatcgtggaagtaggtgaacaaatccgtaaagatattacagtggtgatggtggcaccaaaatgtccgggcacggaagtacgtgaagaatataaacgtggctttggtgtaccgaccttgatcgcggtgcatccagaaaatgatccaaatggtgatggtttagaaattgctaaagcctgggcggcagcaacgggtggtcatcgtgcgggcgtgcttgagtcgtcttttgttgcagaagtgaaatcggatttaatgggtgaacagactattctgtgtggtatgttacaagcgggttctatcgtttgttatgataagcttgtggcggacggcaaagatcctgcgtatgccggtaaattaatccagtacggttgggaaaccattactgaagcgctgaaacaaggtgggattacgttgatgatggatcgtttatccaattctgcgaagttacgtgctttcgaactttcagagcaaatcaaagcgaaattaacgttcttatttgaaaaacacatggacgatattatcagtggcgaattttctgccacgatgatggcggattgggcaaacggtgatgcaaatcttttaaaatggcgtgaagaaaccggcaaaacggcatttgaaaatgcaccaaaatatgaaggtaaaatcagcgagcaagagtattttgatcacggtgtattgatggtggcaatggtgaaagcaggcgtagagttagcctttgataccatggtcgcgagcgggatttatgaagagtcagcctattatgagtcattgcatgaattaccactaatcgctaatacgattgcgcgtaagcgtttatatgaaatgaatgtggtgatttctgatacggcagaatatggtaactacttatttgctaatgtggcgacgccaattttggcaaaagagattatgccgaccttacaaaaaggggatttaggtgagcctacgcctacggttgagattgataatattacgctacgtgatgtgaatgacgcgattcgcaatcatccaattgaattgatcgggcaagaattacgtggttatatgacagatatgaaacgtatttcctctcattaa

SEQ ID NO: 94485 - protein, 491 aa, Pasteurella multocida
MANYFNTLNLRQQLDQLGRCRFMDRNEFANEADYLKGKKIVIVGCGAQGLNQGLNMRDSGLDISYALRAEAIAEKRASFQRATENGFKVGTYDELIPSADLVVNLTPDKQHSKVVADVMPLMKQGAALGYSHGLNIVEVGEQIRKDITVVMVAPKCPGTEVREEYKRGFGVPTLIAVHPENDPNGDGLEIAKAWAAATGGHRAGVLESSFVAEVKSDLMGEQTILCGMLQAGSIVCYDKLVADGKDPAYAGKLIQYGWETITEALKQGGITLMMDRLSNSAKLRAFELSEQIKAKLTFLFEKHMDDIISGEFSATMMADWANGDANLLKWREETGKTAFENAPKYEGKISEQEYFDHGVLMVAMVKAGVELAFDTMVASGIYEESAYYESLHELPLIANTIARKRLYEMNVVISDTAEYGNYLFANVATPILAKEIMPTLQKGDLGEPTPTVEIDNITLRDVNDAIRNHPIELIGQELRGYMTDMKRISSH

SEQ ID NO: 94486 - DNA, 1479 bp, Photorhabdus luminescens subsp
  CDS (1)..(1479): transl_table=11
atggctaattattttaatacgctgaatttgcgtcagcagttggcgcagttaggtaaatgtcgttttatggcgcgggaagagtttgttgatgagacaggatatttaaaaggtaaaaaagtggttatcgtcggttgcggagcgcaggggctgaatcagggcctgaatatgcgtgactccggtctggatatcgcttatgccctgcgtaaagaggccattgaagaaaaacgcgcttcatggcgtaaagcaacggaaaatggttttcaagtcggtacttatgaagagttaataccgcaggctgatttggtgattaacctgacaccagataagcaacactcttctgttgttagcgcagttcaaccgttgatgaaagaaggcgctgcactgggttattctcacggcttaaatattgttgaagtcggtgaacaaatccgtaaagacatcacggtggtgatggtagcgcctaagtgtcctggcaccgaagtgcgtgaagaatataaacggggttttggtgtgcctactttgatcgcagttcacccggaaaacgatccgaaaggtgaaggtatggcaatcgctaaggcatgggccgcggcaacgggcgcgcatcgcgctggtgttctggaatcttctttcgtggctgaagtgaaatccgacctgatgggtgagcaaactattctgtgcggtatgttacaggctggttcactgctgtgttatgacaaactggtggcagatggtgctgagccgggttatgcaggaaaattgatccagtttggctgggaaaccatcacagaagccctgaaacaaggtggtatcaccctgatgatggaccgtctgtctaacccggcaaaactgcgagcgtatgcgctgtctgagcagttgaaagaaatgatgacgccgctgttccagaaacatatggatgatatcatttctggtgaattttcctccggtatgatggctgactgggccaatgatgataagaaactattaggttggcgtgaggaaaccggtaacacttcgtttgagaattcacctgaatatgatggcaaaatcagtgaacaggaatattttgatcacggcgttttaatggttgctatggtgaaagcgggggttgaactggcattcgaaattatggttgataccggtattattgctgaatctgcctattatgagtctctgcatgaattaccgctgattgcgaatactatctctcgtaaacgtctgtacgaaatgaatgtcgttatttctgacacagcagaatatggtaactatttgttctctcatgttgcggtcccactgttgaaagagaagtttatgggttcgctacaggcgggtgatttaggtaagcccgttgtagataacggtattgataacgcccagttgcgcgatgtaaacgaggctattcgtcaccacccaattgaagttgttggccgcgtattacgtggttacatgacagatatgaaacgtattgcagttggtggttga

SEQ ID NO: 94487 - protein, 492 aa, Photorhabdus luminescens subsp
MANYFNTLNLRQQLAQLGKCRFMAREEFVDETGYLKGKKVVIVGCGAQGLNQGLNMRDSGLDIAYALRKEAIEEKRASWRKATENGFQVGTYEELIPQADLVINLTPDKQHSSVVSAVQPLMKEGAALGYSHGLNIVEVGEQIRKDITVVMVAPKCPGTEVREEYKRGFGVPTLIAVHPENDPKGEGMAIAKAWAAATGAHRAGVLESSFVAEVKSDLMGEQTILCGMLQAGSLLCYDKLVADGAEPGYAGKLIQFGWETITEALKQGGITLMMDRLSNPAKLRAYALSEQLKEMMTPLFQKHMDDIISGEFSSGMMADWANDDKKLLGWREETGNTSFENSPEYDGKISEQEYFDHGVLMVAMVKAGVELAFEIMVDTGIIAESAYYESLHELPLIANTISRKRLYEMNVVISDTAEYGNYLFSHVAVPLLKEKFMGSLQAGDLGKPVVDNGIDNAQLRDVNEAIRHHPIEVVGRVLRGYMTDMKRIAVGG

SEQ ID NO: 94488 - DNA, 1485 bp, Photobacterium profundum
  CDS (1)..(1485): transl_table=11
atggctaattatttcaataccttaaacttacgtcagcagttagatcaactaggtcgttgtcgttttatggatcgtaatgagtttgcaacagaggctgactacctgaaaggaaagaaagtagttattgttggttgtggtgcgcagggtctaaatcagggactaaatatgcgtgattctggtcttgatgtctcttatgcgctacgtcaagcggcgattgatgagcaacgtcagtcctacaagaatgcgaaagaaaatggctttgatgtaggtagttacgagcagttaatcccaattgcagacttagtggttaatcttactcctgataagcagcactcaaatgtggttgaaacggtaatgccacttatgaaggaaggggcagcacttggttattcgcatggtttcaacattgttgaagaaggcatgcagattcgtaaagatattactgttgtaatggttgcacctaagtgtccaggcactgaagttcgtgaagaatataaacgtggctttggtgttccaactcttattgcggttcaccctgagaatgacccaaaaggtgatggtcaagaaatcgctaaagcttgggctgctgcaactggtggccaccgtgctggcgtattagaatcatcatttgttgccgaagttaaatctgaccttatgggtgagcaaacaattttgtgtggcatgctacaagcaggttcaatcgtttgttacgagaaaatgatcgctgatggtatcgatgcaggttatgcaggaaaacttctacagtatggttgggaaacgattactgaagcactgaagtttggtggtattacacacatgatggatcgcttatcaaaccctgcaaaagttaaagcgtttgagctttctgaagaactgaaagatctaatgcgtccactgtataacaaacacatggataatatcattacagggcacttctctagcaccatgatggctgattgggctaacgatgacgttaacctactgggctggcgtgaagagacgggtgagactgcattcgagaattatcctgtaactgatgttgaaatcccagagcaagagtacttcgataacggtattttgatggttgctatggttcgtgctggtgttgagcttgcgtttgaagcaatgactgcatcgggtatcgttgaagagtcagcatattacgaatcactacacgagctaccattgattgcaaatacagtggcacgtaagcgtctgtatgaaatgaacgtagtaatttcagatactgcggaatatggtaactacctatttgctaacgtagcaactccactacttcgtgagaagtttatgacagacgttgataccgatgttattggccgtggcttgggcgaagtgagcaaccaagttagcaatgaaacactaattgttgtgaatgagacactgcgtagccaccctgttgagttggttggtcaagaattacgtggttacatgacagacatgaagcgtattgctgttggtgattaa

SEQ ID NO: 94489 - protein, 494 aa, Photobacterium profundum
MANYFNTLNLRQQLDQLGRCRFMDRNEFATEADYLKGKKVVIVGCGAQGLNQGLNMRDSGLDVSYALRQAAIDEQRQSYKNAKENGFDVGSYEQLIPIADLVVNLTPDKQHSNVVETVMPLMKEGAALGYSHGFNIVEEGMQIRKDITVVMVAPKCPGTEVREEYKRGFGVPTLIAVHPENDPKGDGQEIAKAWAAATGGHRAGVLESSFVAEVKSDLMGEQTILCGMLQAGSIVCYEKMIADGIDAGYAGKLLQYGWETITEALKFGGITHMMDRLSNPAKVKAFELSEELKDLMRPLYNKHMDNIITGHFSSTMMADWANDDVNLLGWREETGETAFENYPVTDVEIPEQEYFDNGILMVAMVRAGVELAFEAMTASGIVEESAYYESLHELPLIANTVARKRLYEMNVVISDTAEYGNYLFANVATPLLREKFMTDVDTDVIGRGLGEVSNQVSNETLIVVNETLRSHPVELVGQELRGYMTDMKRIAVGD

SEQ ID NO: 94490 - DNA, 1017 bp, Pseudomonas putida
  CDS (1)..(1017): transl_table=11
atgaaagttttctacgataaagactgcgacctttccatcatccagggtaagaaagtcgccatcatcggttacggctcccagggccacgctcaggcgtgcaacctgaaagactccggtgtagacgttaccgtcggtctgcgtaaaggttcggctaccgttgccaaggctgaagcccacggcctgaaagttgccgacgttgctaccgctgtcgctgcggctgacctggtcatgatcctgaccccggacgagttccagggcgctctgtacaagaacgaaatcgagccgaacatcaagaagggcgctaccctggccttctctcacggcttctcgatccactacaaccaggttgttccgcgtgccgacctcgacgtgatcatgatcgcgccgaaagccccgggccacaccgttcgctccgagttcgtcaaaggcggcggcatccctgacctgatcgctatctaccaggacgcttccggcaacgccaagaacgtcgcactgtcctatgcttcgggcgtaggtggtggccgtaccggtatcatcgaaaccaccttcaaggacgaaaccgaaaccgacctgttcggtgagcaggctgttctgtgtggcggtaccgtcgagctggtcaaagccggtttcgaaaccctggtcgaagctggctacgcgccggaaatggcctacttcgagtgcctgcacgagctgaagctgatcgtagacctcatgtacgaaggcggcatcgccaacatgaactactcgatctccaacaacgccgaatacggtgagtacgtcactggcccggaagtcatcaacgaagaatcccgcaaggccatgcgcaatgctctgaagcgcatccaggacggcgagtacgcgaagatgttcatctccgaaggtgctaccaactacccatcgatgaccgccaagcgccgcaacaacgccgctcacggcatcgagatcatcggcgagcagctgcgctcgatgatgccgtggatctcggctaacaaaatcgtcgacaagaccaagaactaa

SEQ ID NO: 94491 - protein, 338 aa, Pseudomonas putida
MKVFYDKDCDLSIIQGKKVAIIGYGSQGHAQACNLKDSGVDVTVGLRKGSATVAKAEAHGLKVADVATAVAAADLVMILTPDEFQGALYKNEIEPNIKKGATLAFSHGFSIHYNQVVPRADLDVIMIAPKAPGHTVRSEFVKGGGIPDLIAIYQDASGNAKNVALSYASGVGGGRTGIIETTFKDETETDLFGEQAVLCGGTVELVKAGFETLVEAGYAPEMAYFECLHELKLIVDLMYEGGIANMNYSISNNAEYGEYVTGPEVINEESRKAMRNALKRIQDGEYAKMFISEGATNYPSMTAKRRNNAAHGIEIIGEQLRSMMPWISANKIVDKTKN

SEQ ID NO: 94492 - DNA, 1017 bp, Pseudomonas syringae pv
  CDS (1)..(1017): transl_table=11
atgaaagttttctacgacaaagactgtgacctttcgatcatccagggcaagaaagtcgccatcatcggttacggttcgcagggccacgctcaagcgtgcaacctgaaagactccggtgttgacgtgactgtcggcctgcgcaagggttcggccactgtcgccaaggctgaagcccacggcctgaaagtgactgacgtcgcttccgccgttgctgctgccgacctggtcatgatcctgaccccggacgagttccagtcccagttgtacaagaacgaagtcgagccgaacctgaaaaaaggcgcaacactggcgttctcccacggtttcgcgattcactacaaccaggttgtgccgcgcgctgacctcgacgtgatcatgatcgcgccgaaggctccaggccacaccgtgcgtaccgagttcgtcaaaggtggcggtattcctgacctgatcgctgtttatcaggatgcttccggcaacgccaagaacgttgctctgtcctacgcttcgggtgttggtggtggccgtaccggcatcatcgaaaccaccttcaaggacgagactgaaaccgacctgttcggcgagcaggctgttctgtgtggcggtactgtcgagctggtcaaagccggtttcgaaacactggttgaagcgggctacgcgccagaaatggcttacttcgagtgcctgcacgagctgaagctgatcgttgacctcatgtacgaaggcggcatcgccaacatgaactactcgatctccaacaatgccgagtacggcgagtacgtgactggccctgaggtcatcaacgctgaatcccgtcaggccatgcgcaacgctctgaagcgcatccaggacggtgaatacgcgaagatgttcatcaccgaaggcgctaccggctacccatcgatgaccgccaagcgtcgtaacaacgctgagcacggcatcgaagtcatcggcgagaaactgcgttcgatgatgccttggatcgcagcgaacaaaatcgtcgacaaagacaagaactaa

SEQ ID NO: 94493 - protein, 338 aa, Pseudomonas syringae pv
MKVFYDKDCDLSIIQGKKVAIIGYGSQGHAQACNLKDSGVDVTVGLRKGSATVAKAEAHGLKVTDVASAVAAADLVMILTPDEFQSQLYKNEVEPNLKKGATLAFSHGFAIHYNQVVPRADLDVIMIAPKAPGHTVRTEFVKGGGIPDLIAVYQDASGNAKNVALSYASGVGGGRTGIIETTFKDETETDLFGEQAVLCGGTVELVKAGFETLVEAGYAPEMAYFECLHELKLIVDLMYEGGIANMNYSISNNAEYGEYVTGPEVINAESRQAMRNALKRIQDGEYAKMFITEGATGYPSMTAKRRNNAEHGIEVIGEKLRSMMPWIAANKIVDKDKN

SEQ ID NO: 94494 - DNA, 1017 bp, Ralstonia solanacearum
  CDS (1)..(1017): transl_table=11
atgaaagtgttttacgacaaggacgccgacctctccctcatcaagggcaagaacgtcaccatcatcggctacggctcgcaaggccacgctcacgccctgaacctgaacgactcgggcgtgaaggtgacggtcggcctgcgcaagaatggcgcatcgtggaacaaggccgtcaacgccggcctgcaggtcaaggaagtggccgaggccgtgaaggacgccgacgtcgtcatgatcctgctgccggacgagcagatcgccgacgtgtacaagaacgaagtgcacggcaacatcaagcagggcgccgcgctggcgttcgcccacggcttcaacgtgcactacggcgccgtgattccgcgcgccgacctggacgtcatcatggttgcgccgaaggccccgggccacaccgtgcgcggcacctacgcccagggcggcggcgtgccccacctgatcgccgtccaccaggacaagtccggctcggcccgtgatatcgccctgtcgtacgccaccgccaacggcggcggccgcgccggcatcatcgagaccaacttccgcgaagagaccgaaaccgacctgttcggcgagcaagccgtgctgtgcggcggcaccgtcgaactgatcaaggccggcttcgagacgctggtggaagccggctacgcgccggaaatggcctacttcgagtgcctgcacgagctcaagctgatcgtcgacctgatctacgaaggcggcatcggcaacatgaactactcgatctcgaacaacgccgagtacggcgagtacgtcaccggcccgcgcgtcgtgacggccgagaccaagcaggccatgaagcagtgcctgcacgacatccagaccggcgagtacgccaagagcttcctgctggaaaacaaggccggcgccccgacgctgatctcgcgccgccgcctgaccgccgatcaccagatcgagcaggtcggcgccaagctgcgcgcgatgatgccgtggatcgccaagaacaagctggtcgaccagtccaagaactga

SEQ ID NO: 94495 - protein, 338 aa, Ralstonia solanacearum
MKVFYDKDADLSLIKGKNVTIIGYGSQGHAHALNLNDSGVKVTVGLRKNGASWNKAVNAGLQVKEVAEAVKDADVVMILLPDEQIADVYKNEVHGNIKQGAALAFAHGFNVHYGAVIPRADLDVIMVAPKAPGHTVRGTYAQGGGVPHLIAVHQDKSGSARDIALSYATANGGGRAGIIETNFREETETDLFGEQAVLCGGTVELIKAGFETLVEAGYAPEMAYFECLHELKLIVDLIYEGGIGNMNYSISNNAEYGEYVTGPRVVTAETKQAMKQCLHDIQTGEYAKSFLLENKAGAPTLISRRRLTADHQIEQVGAKLRAMMPWIAKNKLVDQSKN

SEQ ID NO: 94496 - DNA, 1014 bp, Rhodococcus sp
  CDS (1)..(1014): transl_table=11
gtggcagtcgagatgttctacgacgacgatgccgatctgtcgatcatccagggccgtaaggtcgctgtgatcggttacggaagccagggccacgcgcactcgctgagcctgcgcgactcgggcgtcgatgtgcgtatcggcctcaaggaaggctcgaagtcccgcgcgaaggccgaggagcagggcctgaccgtcggtacccccgccgaggtctccgagtgggccgacgtgatcatggtgctcgcacccgacaccgcgcaggcgtcgatcttcaccaatgacatcgagcccaacctgaaggacggcgacgcgctgttcttcggacacggcctcaacatccacttcgacctgatcaaggctccggagttcgtcaccgtcggcatggtcgcccccaagggccccggccacctggtgcgtcgtcagttcgtcgacggcaagggtgttcccgcgctcatcgcgatcgaccaggacccgaagggtgagggccaggccctcgcgctgtcctacgccaagggcatcggcggcacccgcgccggcgtcatcaagaccacgttcaaggaagagaccgagacggacctcttcggcgagcaggccgtgctctgtggcggcaccgaggaactggtcaagaccggtttcgaggtcatggtcgaggccggctacgcgcccgagatggcgtacttcgaggtgctgcacgagctcaagctcatcgtcgacctcatgtacgagggtggcatcgcccgcatgaactactcggtgtccgacaccgcggagttcggtggctacctctccggcccgcgcgtcatcgacgccggcaccaaggagcggatgaaggcgatcctggccgacatccagtcgggtgagttcacccgccgcctcgtcgccaacgtcgagaacggcaacaccgagctcgagggcctgcgcaaggccaacgccgagcacccgatcgaggtcaccggcaagaagctgcgcgacctgatgagctgggtcgaccggccgatcaccgaaaccgcctag

SEQ ID NO: 94497 - protein, 337 aa, Rhodococcus sp
MAVEMFYDDDADLSIIQGRKVAVIGYGSQGHAHSLSLRDSGVDVRIGLKEGSKSRAKAEEQGLTVGTPAEVSEWADVIMVLAPDTAQASIFTNDIEPNLKDGDALFFGHGLNIHFDLIKAPEFVTVGMVAPKGPGHLVRRQFVDGKGVPALIAIDQDPKGEGQALALSYAKGIGGTRAGVIKTTFKEETETDLFGEQAVLCGGTEELVKTGFEVMVEAGYAPEMAYFEVLHELKLIVDLMYEGGIARMNYSVSDTAEFGGYLSGPRVIDAGTKERMKAILADIQSGEFTRRLVANVENGNTELEGLRKANAEHPIEVTGKKLRDLMSWVDRPITETA

SEQ ID NO: 94498 - DNA, 1476 bp, Salmonella choleraesuis
  CDS (1)..(1476): transl_table=11
atggctaactactttaatacactgaatctgcgccagcagctggcacagctgggtaaatgccgctttatgggccgcgacgaattcgccgacggcgcgagctaccttcagggtaaaaaagtggtcatcgtcggctgtggcgctcagggtctgaaccagggcctgaacatgcgtgactccggtctggatatttcctacgccctgcgtaaagaagccattgctgagaagcgtgcttcctggcgtaaagcgaccgagaacggcttcaaagtaggcacctacgaagagctgatcccgcaggctgacctggtagttaacctgacgccggacaaacagcactccgacgtggtgcgctccgtacagccgctgatgaaagacggcgcggcgctgggctactcccacggcttcaatatcgtggaagtgggcgagcagatccgtaaagacatcaccgtggtgatggtggcgccgaagtgtccgggcaccgaagtgcgcgaagagtacaaacgtggtttcggcgtgccgacgctgatcgcggtacacccggaaaacgacccgaaaggcgaaggtatggcgattgctaaagcctgggcggcggccaccggtggtcaccgtgcgggcgtactggaatcttctttcgtggcagaagtgaaatctgacctgatgggcgagcagaccatcctgtgcggtatgctgcaggccggttctctgctgtgcttcgacaagctggtggcagaaggcaccgacccggcatacgccgaaaaactgattcagtttggctgggaaaccatcaccgaagcgctgaagcagggcggcatcaccctgatgatggaccgtctgtctaacccggcgaaactgcgtgcttacgcgctgtccgaacagctgaaagagatcatggcgccgttgttccagaaacacatggatgacatcatctccggcgaattctcttccggcatgatggctgactgggccaacgacgataagaaactgctgacctggcgtgaagagaccggtaaaaccgcgttcgaaaccgcgccgcagtttgagggtaaaatcggcgagcaggagtacttcgataaaggcgtgctgatgattgcgatggtgaaagcgggcgttgagctggcgttcgaaaccatggtcgattccggcatcatcgaagaatccgcttactacgaatcactgcacgaactgccgctgatcgccaacaccatcgcccgtaagcgtctgtacgaaatgaacgtggttatttccgataccgcagaatacggtaactacctgttctcttacgcttgcgtaccgctgctgaaaccgtttatggcggaattgcaaccgggcgatctgggtagtgctatcccggaaggcgcggtagacaacgcacagcttcgcgacgtgaacgacgcgattcgtagtcatgcgattgagcaggtaggtaagaaactgcgcggctatatgacggatatgaagcgtattgcggtagcgggttga

SEQ ID NO: 94499 - protein, 491 aa, Salmonella choleraesuis
MANYFNTLNLRQQLAQLGKCRFMGRDEFADGASYLQGKKVVIVGCGAQGLNQGLNMRDSGLDISYALRKEAIAEKRASWRKATENGFKVGTYEELIPQADLVVNLTPDKQHSDVVRSVQPLMKDGAALGYSHGFNIVEVGEQIRKDITVVMVAPKCPGTEVREEYKRGFGVPTLIAVHPENDPKGEGMAIAKAWAAATGGHRAGVLESSFVAEVKSDLMGEQTILCGMLQAGSLLCFDKLVAEGTDPAYAEKLIQFGWETITEALKQGGITLMMDRLSNPAKLRAYALSEQLKEIMAPLFQKHMDDIISGEFSSGMMADWANDDKKLLTWREETGKTAFETAPQFEGKIGEQEYFDKGVLMIAMVKAGVELAFETMVDSGIIEESAYYESLHELPLIANTIARKRLYEMNVVISDTAEYGNYLFSYACVPLLKPFMAELQPGDLGSAIPEGAVDNAQLRDVNDAIRSHAIEQVGKKLRGYMTDMKRIAVAG

SEQ ID NO: 94500 - DNA, 1476 bp, Salmonella typhimurium
  CDS (1)..(1476): transl_table=11
atggctaactactttaatacactgaatctgcgccagcagctggcgcagttgggtaaatgccgctttatgggccgcgacgaattcgccgacggcgcgagctaccttcagggtaaaaaagtggtcatcgtcggctgtggcgctcagggtctgaaccagggcctgaacatgcgtgactccggtctggatatttcctacgccctgcgtaaagaagccattgctgagaagcgtgcttcctggcgtaaagcgaccgagaacggcttcaaagtaggcacctacgaagagctgatcccgcaggctgacctggtagttaacctgacgccggacaaacagcactccgacgtggtgcgttccgtacagccgctgatgaaagacggcgcggcgctgggctactcccacggcttcaacatcgtggaagtgggcgagcagatccgtaaagacatcaccgtggtgatggtggcgccgaagtgtccgggcaccgaagtacgtgaagaatacaagcgtggcttcggtgtgccgacgctgatcgccgttcacccggaaaacgatccgcaaggcgaaggcatggcgattgctaaagcctgggcggcggcgaccggcggtcaccgtgcgggcgtactggagtcttctttcgtggcggaagtgaaatccgacctgatgggcgagcagaccatcctgtgcggtatgctgcaggccggttctctgctgtgtttcgacaagctggtggcagaaggcaccgacccggcttatgcggaaaaactgattcagttcggctgggaaaccatcaccgaagcgctgaagcagggcggcatcaccctgatgatggaccgtctgtctaacccggcgaaactgcgtgcttacgcgctgtccgaacagctgaaagagatcatggcgccgctgttccagaaacacatggatgacatcatctccggcgaattctcttccggcatgatggctgactgggctaacgacgataagaaactgctgacctggcgtgaagagaccggcaaaaccgcgttcgaaaccgcgccgcagtatgaaggcaaaatcggcgagcaggagtactttgataaaggcgtgctgatgatcgcgatggtgaaagcgggcgttgagttggcgttcgaaactatggtggattccggcatcatcgaagaatccgcttactacgaatcactgcacgagctgccgctgatcgccaacaccatcgcccgtaagcgtctgtacgaaatgaacgtggttatctctgataccgcagaatacggtaactacctgttctcttacgcttgcgtaccgctgctgaaaccgtttatggcggaattgcaaccgggcgatctgggtagtgctatcccggaaggcgcggtagacaacgcacagcttcgcgacgtgaacgacgcgattcgtagtcatgcgattgagcaggtaggtaagaaactgcgcggctatatgacggatatgaagcgtattgcggtagcgggttga

SEQ ID NO: 94501 - protein, 491 aa, Salmonella typhimurium
MANYFNTLNLRQQLAQLGKCRFMGRDEFADGASYLQGKKVVIVGCGAQGLNQGLNMRDSGLDISYALRKEAIAEKRASWRKATENGFKVGTYEELIPQADLVVNLTPDKQHSDVVRSVQPLMKDGAALGYSHGFNIVEVGEQIRKDITVVMVAPKCPGTEVREEYKRGFGVPTLIAVHPENDPQGEGMAIAKAWAAATGGHRAGVLESSFVAEVKSDLMGEQTILCGMLQAGSLLCFDKLVAEGTDPAYAEKLIQFGWETITEALKQGGITLMMDRLSNPAKLRAYALSEQLKEIMAPLFQKHMDDIISGEFSSGMMADWANDDKKLLTWREETGKTAFETAPQYEGKIGEQEYFDKGVLMIAMVKAGVELAFETMVDSGIIEESAYYESLHELPLIANTIARKRLYEMNVVISDTAEYGNYLFSYACVPLLKPFMAELQPGDLGSAIPEGAVDNAQLRDVNDAIRSHAIEQVGKKLRGYMTDMKRIAVAG

SEQ ID NO: 94502 - DNA, 1479 bp, Shewanella oneidensis
  CDS (1)..(1479): transl_table=11
atggctaactattttaactctctgaatttacgtcaacaattagcacaacttggccagtgtcgttttatggaccgttccgagtttagtgatggctgcaattacatcaaagattggaatattgttattttaggctgtggtgctcagggccttaaccaaggtctgaacatgcgtgactctgggctgaatatcgcttacgccctgcgcccagaagccattgcccaaaaacgtgcctcatggcaaaaagccaccgataacggctttaaagtcggcacctttgaagagctgatcccgagcgccgatttagtgctgaacctaacacccgataagcagcattccaatgtagtgagcgcagtgatgccgctgatgaagcaaggcgcgaccctgtcttactcccatggtttcaacatcgttgaagaaggcatgcagatccgcccagatatcacggtcatcatggtggcgcctaagtgcccaggtaccgaagtgcgtgaagaatacaagcgtggctttggtgtgccgaccttgattgctgtgcaccccgaaaacgaccctaatggcgatggtttagacatcgcgaaagcctatgcgagcgccacaggcggcgaccgtgctggcgtgttgcaatcctcttttatcgctgaagtaaaatcggatctgatgggcgagcaaacgatcctctgcggtatgttacagactggtgccatcctaggttatgaaaaaatggtggccgatggtgttgagcctggctacgccgctaagttaatccaacaaggttgggaaaccgtgaccgaggcgcttaagcacggcggtatcaccaacatgatggatagattgtctaatcctgccaagattaaagcgtttgaaattgcagaagatttaaaagatatcctgcaaccattatttgaaaagcacatggatgacatcatcagcggtgagttctctcgcactatgatgcaagactgggccaatgacgatgcaaacttgctacgttggcgcgccgaaaccggtgaaactggtttcgaaaatgcgccagtttcgagcgagcatatcgacgagcaaacctatttcgacaaaggtattttcctggtcgcgatgatcaaagcgggtgtggagctggcgttcgatactatggtgtctgcggggattgttgaagagtcggcttactacgagtcattgcacgaaacgccgctgattgctaacaccatcgcccgtaagcgtctgtacgagatgaacgtggtgatctccgataccgcagaatatggttgttatctgttcaaccatgccgctgtgccactgctgcgtgactatgtaaatgccatgtcgccagagtacttaggcgcaggtctgaaggacagttctaatagtgttgataatctgcaattaatcgcgattaacgatgcaatccgccacactgcagtggaatatgttggcgccgaactccgcggttatatgactgatatgaaaagtattgttggagcttaa

SEQ ID NO: 94503 - protein, 492 aa, Shewanella oneidensis
MANYFNSLNLRQQLAQLGQCRFMDRSEFSDGCNYIKDWNIVILGCGAQGLNQGLNMRDSGLNIAYALRPEAIAQKRASWQKATDNGFKVGTFEELIPSADLVLNLTPDKQHSNVVSAVMPLMKQGATLSYSHGFNIVEEGMQIRPDITVIMVAPKCPGTEVREEYKRGFGVPTLIAVHPENDPNGDGLDIAKAYASATGGDRAGVLQSSFIAEVKSDLMGEQTILCGMLQTGAILGYEKMVADGVEPGYAAKLIQQGWETVTEALKHGGITNMMDRLSNPAKIKAFEIAEDLKDILQPLFEKHMDDIISGEFSRTMMQDWANDDANLLRWRAETGETGFENAPVSSEHIDEQTYFDKGIFLVAMIKAGVELAFDTMVSAGIVEESAYYESLHETPLIANTIARKRLYEMNVVISDTAEYGCYLFNHAAVPLLRDYVNAMSPEYLGAGLKDSSNSVDNLQLIAINDAIRHTAVEYVGAELRGYMTDMKSIVGA

SEQ ID NO: 94504 - DNA, 1476 bp, Shigella flexneri
  CDS (1)..(1476): transl_table=11
atggctaactacttcaatacactgaatctgcgtcagcagctggcacagctgggcaaatgtcgctttatggggcgcgatgaattcgccgatggcgcgagctaccttcagggtaaaaaagtagtcatcgtcggctgtggcgcacaaggtctgaaccagggtctgaacatgcgtgattctggtctcgatatctcctacgctctgcgtaaagaagcgattgccgagaagcgcgcgtcctggcgtaaagcgaccgaaaatggttttaaagtgggtacttacgaagaactgatcccacaggcggatctggtggttaacctgacgccggacaagcagcactctgatgtagtgcgcaccgtacagccactgatgaaagacggcgcggcgctgggttactcgcacggtttcaacatcgtcgaagtgggcgagcagatccgtaaagacatcaccgtagtcatggttgcgccgaaatgccctggcaccgaagtgcgtgaagagtacaaacgtggattcggcgtaccgacgctgattgccgttcacccggaaaacgatccgaaaggcgaaggcatggcgatcgctaaagcatgggcggcagcaaccggtggtcaccgtgcgggcgtgctggaatcgtccttcgttgcggaagtgaaatctgacctgatgggtgagcaaaccatcctgtgcggtatgttgcaggctggctcgctgctgtgcttcgacaagctggtggaagagggcaccgatccggcatacgcagaaaaactaattcagttcggttgggaaaccatcaccgaagcgctgaagcagggcggtatcacactgatgatggaccgtctctctaacccggcgaaactgcgtgcttacgcgttgtctgaacagctgaaagagatcatggcaccgctgttccagaaacatatggacgacatcatctccggcgaattctcctccggtatgatggcggactgggccaacgatgataagaaactgctgacctggcgtgaagagaccggcaaaaccgccttcgaaaccgcgccgcagtatgaaggcaaaatcggcgagcaggagtacttcgataaaggcgtactgatgatcgcgatggtgaaagcgggcgttgaactggcgttcgaaaccatggttgattccggcatcatcgaagaatctgcttactatgaatcactgcacgaactgccgctgattgccaacaccatcgtccgtaagcgtctgtatgaaatgaacgtggttatctctgatactgccgagtacggtaactatctgttctcttacgcttgtgtgccgctgctgaaaccgtttatggcagaactgcaaccgggcgatttgggtaaagctattccggaaggtgcggtagataacgcgcagctgcgtgatgtaaatgaagcgattcgcagccatgcgattgagcaagtaggtaagaaactgcgcggctatatgacggatatgaaacgtattgctgttgcgggttaa

SEQ ID NO: 94505 - protein, 491 aa, Shigella flexneri
MANYFNTLNLRQQLAQLGKCRFMGRDEFADGASYLQGKKVVIVGCGAQGLNQGLNMRDSGLDISYALRKEAIAEKRASWRKATENGFKVGTYEELIPQADLVVNLTPDKQHSDVVRTVQPLMKDGAALGYSHGFNIVEVGEQIRKDITVVMVAPKCPGTEVREEYKRGFGVPTLIAVHPENDPKGEGMAIAKAWAAATGGHRAGVLESSFVAEVKSDLMGEQTILCGMLQAGSLLCFDKLVEEGTDPAYAEKLIQFGWETITEALKQGGITLMMDRLSNPAKLRAYALSEQLKEIMAPLFQKHMDDIISGEFSSGMMADWANDDKKLLTWREETGKTAFETAPQYEGKIGEQEYFDKGVLMIAMVKAGVELAFETMVDSGIIEESAYYESLHELPLIANTIVRKRLYEMNVVISDTAEYGNYLFSYACVPLLKPFMAELQPGDLGKAIPEGAVDNAQLRDVNEAIRSHAIEQVGKKLRGYMTDMKRIAVAG

SEQ ID NO: 94506 - DNA, 1011 bp, Thermotoga maritima
  CDS (1)..(1011): transl_table=11
atggcagtgatttattacgacaaggacgcggatctcaatctgatcaaggacaaaaagatcgctatcatagggtacgggagtcaggggcatgcgcacgcgttgaatttgaaagacagcggtctcaacgttgtggtcggattgagagagggaagcaagagctggaagaaggcggaggaacagggtctcaccgtgaaaacaatagaagaggcggcaaaagaggccgacatcatcatgatactcattcccgatgaacaccagccggagatctacaaaaagtacatagaaaaacacctcaccgagggtaagatgctgatgtttgcccacgggttcaacatccactatcatcagatcattcctccaaagaacgtggatgtgacaatgatcgctccaaagagccctggtcacatcgtgagaagagaatacgtcgaaggaaggggtgtgccggctcttgtagcggtctatcaggactacaccggtaaggccaaagatatagcgcttgcctacgccaaaggtatcggcgtgacgagagctggtgtgatagagacgaccttcaaggaagagacggaaacggacctgtttggagagcaggcggtcctctgcggtggagtaacggctctcataaaagccggttttgaaactctcgtggatgcgggttatcaaccggaaattgcctacttcgagtgtctcaacgagctcaagctcatcgttgatctcatctacgaaggtggtctttccttcatgagatactccgtcagcaacaccgcagagtacggtgactacatcagtcaggaaaagatcgttacaaaagaagtgagagagaacatgaagcagatgctcaaggacattcagacaggaaagttcgctaaagactggatactcgagaatcaggcgggaagaccctacttctacaccatgagaaagaaagaatcagaacatctcatagaaaaagtgggaaaagaactcagaaaaatgatgccatggctcaaggagaggaacgtcgatgaggagtga

SEQ ID NO: 94507 - protein, 336 aa, Thermotoga maritima
MAVIYYDKDADLNLIKDKKIAIIGYGSQGHAHALNLKDSGLNVVVGLREGSKSWKKAEEQGLTVKTIEEAAKEADIIMILIPDEHQPEIYKKYIEKHLTEGKMLMFAHGFNIHYHQIIPPKNVDVTMIAPKSPGHIVRREYVEGRGVPALVAVYQDYTGKAKDIALAYAKGIGVTRAGVIETTFKEETETDLFGEQAVLCGGVTALIKAGFETLVDAGYQPEIAYFECLNELKLIVDLIYEGGLSFMRYSVSNTAEYGDYISQEKIVTKEVRENMKQMLKDIQTGKFAKDWILENQAGRPYFYTMRKKESEHLIEKVGKELRKMMPWLKERNVDEE

SEQ ID NO: 94508 - DNA, 1485 bp, Vibrio cholerae
  CDS (1)..(1485): transl_table=11
atggcgaattatttcaatacgctgaatctgcgtgaacagttggatcaacttggtcgttgccgttttatggcgcgagaagagtttgcaaccgaagctgattacctaaaaggtaagaaagtggtgatcgtaggttgtggggctcaaggcctaaaccaaggcctcaatatgcgtgattcaggtttggatgtttcttacgctctgcgtcaggctgcgattgatgaacagcgtcagtcatttaagaatgccaagaataatggcttcaacgtgggtagttatgaacaactcatcccaaccgcagatttggtgattaacttgacgccagataagcagcacaccagtgtggtcaatgcggtgatgcctctgatgaagcaaggtgctgccttgggttactcacacggttttaatatcgttgaagagggcatgcagatccgtaaagacatcacggttgtgatggtggcaccaaaatgtccgggtacggaagttcgtgaagagtataagcgcggtttcggcgttcctactcttatcgcggtacaccctgaaaacgatccacaaggtgaaggttgggaaattgctaaagcgtgggctgcggcaacgggtggccatcgtgcgggctgtttagcttcttcttttgtggcggaagtgaaatccgatttgatgggtgagcaaaccattctctgcggtatgctgcaagcgggctctatcgtttgttacgagaaaatggttgctgatggcatcgaccctggttatgcgggcaagcttttgcaatttggttgggaaaccattaccgaagcactcaagtttggcggtattactcatatgatggatcgcctgtctaaccctgcaaaaatcaaagcgtttgagctgtctgaagagttgaaagatctgatgcgcccactgtacaacaagcatatggatgacatcatttctggccacttctctagcaccatgatggcggattgggcgaatgatgataaagacttattcggctggcgtgcagaaaccgctgagacggcctttgaaaactatccaacaaccgacgtaaaaattgctgagcaagaatactttgataacggtattttgatgattgccatggtgcgtgctggggttgagttggcgtttgaagcgatgacggcttcaggcatcatcgatgagtcggcttactatgaatcactgcacgaactcccactgattgccaatacggtagcgcgtaagcgtctgtatgaaatgaacgtggtaatctctgacactgctgagtacggtaactatctgtttgccaatgtggcggtaccactattgcgtgaaaagtttatgccgaaagtgggcactgatgtgattggtaaaggattaggcgtggtctctaatcaagttgataacgcaacgcttatcgaagtaaacagcatcatccgtaaccatccggttgagtatatcggtgaagagctgcgcggttacatgaaagacatgaagcgcatcgccgtgggtgattaa

SEQ ID NO: 94509 - protein, 494 aa, Vibrio cholerae
MANYFNTLNLREQLDQLGRCRFMAREEFATEADYLKGKKVVIVGCGAQGLNQGLNMRDSGLDVSYALRQAAIDEQRQSFKNAKNNGFNVGSYEQLIPTADLVINLTPDKQHTSVVNAVMPLMKQGAALGYSHGFNIVEEGMQIRKDITVVMVAPKCPGTEVREEYKRGFGVPTLIAVHPENDPQGEGWEIAKAWAAATGGHRAGCLASSFVAEVKSDLMGEQTILCGMLQAGSIVCYEKMVADGIDPGYAGKLLQFGWETITEALKFGGITHMMDRLSNPAKIKAFELSEELKDLMRPLYNKHMDDIISGHFSSTMMADWANDDKDLFGWRAETAETAFENYPTTDVKIAEQEYFDNGILMIAMVRAGVELAFEAMTASGIIDESAYYESLHELPLIANTVARKRLYEMNVVISDTAEYGNYLFANVAVPLLREKFMPKVGTDVIGKGLGVVSNQVDNATLIEVNSIIRNHPVEYIGEELRGYMKDMKRIAVGD

SEQ ID NO: 94510 - DNA, 1485 bp, Vibrio parahaemolyticus
  CDS (1)..(1485): transl_table=11
atggctaactatttcaataccctaaacttgcgcgagcaattggatcaacttggtcgttgtcgctttatggatcgtgaagaatttgtatctgaagcggattacctgaaaggtaaaaaagtggtcattgtgggctgtggtgctcaaggtctaaaccaaggcctaaacatgcgcgattctggtcttgatgtgtcttacgcactacgtcaagctgcgatcgatgaacagcgtcaatcgtttaaaaacgccaaagataatggctttgaagttggtagctacgaaacgctaattcctcaagcagacctggttgttaacttaacgccagacaaacagcacactaacgttgttgagacggtgatgccactaatgaaagaaggcgctgcactaggttactctcacggtttcaacgttgtggaagaaggcatgcagattcgtaaagatctgaccgttgtcatggttgctcctaagtgtcctggtacagaggttcgtgaagaatacaaacgtggttttggcgttcctaccctaatcgcggttcatccagagaatgatccgaaaggtgaaggttgggatatcgcgaaagcttgggctgcagcaacaggtggtcatcgtgcgggttgtcttgagtcttcttttgtcgctgaggtgaaatcagacctaatgggtgagcaaaccattctatgtggcatgctacaagcggggtctatcgtatgttacgagaagatgattgctgaaggcattgatccgggttatgccggtaagctactgcagtacggttgggaaaccattacggaagctctgaaattcggtggtatcactcacatgatggaccgtctatctaatccagcgaaaatcaaggcgttcgagctttctgaagaattaaaagacctaatgcgtccactgtataacaagcacatggacgacattatttctggtcatttctctagcaccatgatggctgactgggcaaatgatgataaaaatcttctaggatggcgtgcagaaactggtgaaaccgcatttgaaaattacccagaaacggacgttgagatctctgagcaagagtacttcgacaacggcatcttaatggttgcaatggttcgtgctggggttgaactggcatttgaagcgatgacagcttctggaatcatcgatgaatcagcgtactacgagtctctacatgaacttccgttgattgctaatactatcgcacgtaagcgtctatatgagatgaacgtggttatctctgatacggctgaatacggtaactacctatttgctaacgtagcaacgcctttgttacgtgagaaattcatgccttctgttggtacagatgttattggtaaaggcctaggtgaaacgtctaaccaagtggataacgcgactcttatcgcagtgaacgagactatccgtaaccacccagtggaatacattggcgaagaactacgtggctacatgacggatatgaagcgcatcgcggttggtggctaa

SEQ ID NO: 94511 - protein, 494 aa, Vibrio parahaemolyticus
MANYFNTLNLREQLDQLGRCRFMDREEFVSEADYLKGKKVVIVGCGAQGLNQGLNMRDSGLDVSYALRQAAIDEQRQSFKNAKDNGFEVGSYETLIPQADLVVNLTPDKQHTNVVETVMPLMKEGAALGYSHGFNVVEEGMQIRKDLTVVMVAPKCPGTEVREEYKRGFGVPTLIAVHPENDPKGEGWDIAKAWAAATGGHRAGCLESSFVAEVKSDLMGEQTILCGMLQAGSIVCYEKMIAEGIDPGYAGKLLQYGWETITEALKFGGITHMMDRLSNPAKIKAFELSEELKDLMRPLYNKHMDDIISGHFSSTMMADWANDDKNLLGWRAETGETAFENYPETDVEISEQEYFDNGILMVAMVRAGVELAFEAMTASGIIDESAYYESLHELPLIANTIARKRLYEMNVVISDTAEYGNYLFANVATPLLREKFMPSVGTDVIGKGLGETSNQVDNATLIAVNETIRNHPVEYIGEELRGYMTDMKRIAVGG

SEQ ID NO: 94512 - DNA, 1485 bp, Vibrio vulnificus
  CDS (1)..(1485): transl_table=11
atggcgaactatttcaatactttgaaccttcgtgagcaactagaccaattgggtcgttgtcgttttatggatcgcagtgaattcgctacagaggcggattaccttaagggtaaaaaagtcgtcatcgtaggttgtggtgcgcaaggcctaaaccaaggtctaaacatgcgtgactccggtcttgatgttgcttacgcgctacgtcaagccgcgattgatgagcagcgtcaatcatacaaaaatgctaaagagaacggttttgaagtgggtagctatgaaacgctgatccctcaagctgatcttgttgttaacttgacaccagataaacagcacaccaatgtggttgaaaccgtaatgcccctaatgaaagaaggcgcggctcttggctactcacacggttttaacgttgttgaagaaggcatgcaaatccgtaaagacctaacggttgttatggtggcgcctaagtgtcctggtacagaagttcgtgaagaatacaaacgtggctttggtgttcctacattgattgctgttcacccagagaacgatccaaaaggtgagggttgggacattgcgaaagcttgggcggctgcgactggtggtcatcgtgcgggttgtcttgagtcttcatttgttgctgaagtgaaatcagacttgatgggtgagcaaaccattctatgtggcatgcttcaagctggttctatcgtatgttacgagaagatggttgcggaaggcattgacccaggttacgcaggtaagttactgcagtacggttgggaaaccattactgaagcactgaagttcggtggtatcactcatatgatggaccgtctatcaaacccagcgaagatcaaagcatttgagctttctgaagagctaaaggatctgatgcgtcctctgtacaacaaacacatggacgacattatctcaggtcacttctctagcactatgatggctgactgggcgaatgatgatgcgaatctgctaggctggcgcgctgaaacgggtgaaacggcgttcgaaaattacccatcaacggatgttgaaatctctgagcaagagtactttgacaacggtatcttaatggttgcaatggttcgtgctggcgttgaactggcgtttgaagcaatgacggcttctggcattattgacgaatcggcttactacgagtcgctgcatgagttaccacttattgccaacacaattgcacgtaagcgtctatacgagatgaacgtggttatctcagacacagcggaatatggtaactacctgtttgctaatgtggcaacaccgctacttcgtgagaagtttatgccttcggtagggacagatgtgattggtaaggggttaggtgaaacttctaatcaagttgataacgcgacactcattgccgtaaatgagactatccgcaatcaccctgttgagtacatcggtgaagagctgcgtggttacatgactgacatgaaacgtatcgctgttggtggctaa

SEQ ID NO: 94513 - protein, 494 aa, Vibrio vulnificus
MANYFNTLNLREQLDQLGRCRFMDRSEFATEADYLKGKKVVIVGCGAQGLNQGLNMRDSGLDVAYALRQAAIDEQRQSYKNAKENGFEVGSYETLIPQADLVVNLTPDKQHTNVVETVMPLMKEGAALGYSHGFNVVEEGMQIRKDLTVVMVAPKCPGTEVREEYKRGFGVPTLIAVHPENDPKGEGWDIAKAWAAATGGHRAGCLESSFVAEVKSDLMGEQTILCGMLQAGSIVCYEKMVAEGIDPGYAGKLLQYGWETITEALKFGGITHMMDRLSNPAKIKAFELSEELKDLMRPLYNKHMDDIISGHFSSTMMADWANDDANLLGWRAETGETAFENYPSTDVEISEQEYFDNGILMVAMVRAGVELAFEAMTASGIIDESAYYESLHELPLIANTIARKRLYEMNVVISDTAEYGNYLFANVATPLLREKFMPSVGTDVIGKGLGETSNQVDNATLIAVNETIRNHPVEYIGEELRGYMTDMKRIAVGG

SEQ ID NO: 94514 - DNA, 1479 bp, Yersinia pestis
  CDS (1)..(1479): transl_table=11
atggctaactatttcaacacattgaacctgcgtcagcagttggcgcaattaggtaagtgtcgctttatggcacgtgacgaatttgccgatgaagccggctacctgaaaggcaaaaaagtggtgattgtcggttgtggcgcacagggcctgaaccaagggttgaacatgcgtgactccggcctggatgtcgcttatgccctgcgtaaagaagcgattgccgagaagcgtgcttcatggcgtaaagcgaccgaaaatggtttcaaagtaggcacttacgaagagttgatcccacaggcggatctggtggttaacctgacgccagacaagcagcactctgccgtggttaaggcggttcagcctctgatgaaagagggcgcagcactgggttactcgcatggtttcaacattgttgaagtgggtgagcaagtgcgtaaagacatcaccgtggtgatggttgcgccgaaatgccctggtaccgaagttcgtgaagagtacaaacgtggttttggtgtgccgacgctgattgcggttcatccagaaaacgaccctaaaggcgaaggcatggcgattgctaaagcctgggccgcggccaccggtggtcaccgtgcgggtgtactggaattttcttttgttgccgaagtgaaatctgacctgatgggcgagcaaactatcctgtgtggtatgttgcaggcgggttcactgttatgtttcgacaagttggtttcagagggtactgatgccgcttacgctgaaaaactgattcaattcggctgggaaaccattaccgaagcgctgaaacaaggcgggatcacgctgatgatggaccgtttgtctaatccagcaaaactgcgtgcgtatgcattatctgaacagttgaaagaaattatggcgccattgttccagaaacacatggacgacattatttctggtgcgttctccagcggcatgatggctgactgggctaacgatgacgttaagttgttgaactggcgtgaagagaccggcagaacggcttttgaaaatgcgccacagtttgaaggcaagatctctgagcaggaatattttgaccacggcgtactgatgatcgcgatggtaaaagcgggagttgagctggcattcgaaaccatggtggattccggcattattgaagagtctgcttactacgaatctctgcacgagctgccgttgattgccaacactatcgcccgtaagcgtctgtatgaaatgaacgtggttatctctgataccgcagaatacggtaactacttgtttgctaatgcagcggtgccgttgctgaaagagaagtttatggattccctgcaagccggtgacttgggtaaaagtatccctggttcggcggtagataacgcacaactgcgtgatgtgaatgaagccattcgcaatcacccgatcgaagccgttggtcataagctgcgtggttacatgacagatatgaagcgtattgctgttgcgggctaa

SEQ ID NO: 94515 - protein, 492 aa, Yersinia pestis
MANYFNTLNLRQQLAQLGKCRFMARDEFADEAGYLKGKKVVIVGCGAQGLNQGLNMRDSGLDVAYALRKEAIAEKRASWRKATENGFKVGTYEELIPQADLVVNLTPDKQHSAVVKAVQPLMKEGAALGYSHGFNIVEVGEQVRKDITVVMVAPKCPGTEVREEYKRGFGVPTLIAVHPENDPKGEGMAIAKAWAAATGGHRAGVLEFSFVAEVKSDLMGEQTILCGMLQAGSLLCFDKLVSEGTDAAYAEKLIQFGWETITEALKQGGITLMMDRLSNPAKLRAYALSEQLKEIMAPLFQKHMDDIISGAFSSGMMADWANDDVKLLNWREETGRTAFENAPQFEGKISEQEYFDHGVLMIAMVKAGVELAFETMVDSGIIEESAYYESLHELPLIANTIARKRLYEMNVVISDTAEYGNYLFANAAVPLLKEKFMDSLQAGDLGKSIPGSAVDNAQLRDVNEAIRNHPIEAVGHKLRGYMTDMKRIAVAG

SEQ ID NO: 94516 - DNA, 1479 bp, Yersinia pseudotuberculosis
  CDS (1)..(1479): transl_table=11
atggctaactatttcaacacattgaacctgcgtcagcagttggcgcaattaggtaagtgtcgctttatggcacgtgacgaatttgccgatgaagccggctacctgaaaggcaaaaaagtggtgattgtcggttgtggcgcacagggcctgaaccaagggttgaacatgcgtgactccggcctggatgtcgcttatgccctgcgtaaagaagcgattgccgagaagcgtgcttcatggcgtaaagcgaccgaaaatggtttcaaagtaggcacttacgaagagttgatcccacaggcggatctggtggttaacctgacgccagacaagcagcactctgccgtggttaaggcggttcagcctctgatgaaagagggcgcagcactgggttactcgcatggtttcaacattgttgaagtgggtgagcaagtgcgtaaagacatcaccgtggtgatggttgcgccgaaatgccctggtaccgaagttcgtgaagagtacaaacgtggttttggtgtgccgacgctgattgcggttcatccagaaaacgaccctaaaggcgaaggcatggcgattgctaaagcctgggccgcggccaccggtggtcaccgtgcgggtgtactggaatcttcttttgttgccgaagtgaaatctgacctgatgggcgagcaaactatcctgtgtggtatgttgcaggcgggttcactgttatgtttcgacaagttggtttcagagggtactgatgccgcttacgctgaaaaactgattcaattcggctgggaaaccattaccgaagcgctgaaacaaggcgggatcacgctgatgatggaccgtttgtctaatccagcaaaactgcgtgcgtatgcattatctgaacagttgaaagaaattatggcgccattgttccagaaacacatggacgacattatttctggtgcgttctccagcggcatgatggctgactgggctaacgatgacgttaagttgttgaactggcgtgaagagaccggcagaacggcttttgaaaatgcgccacagtttgaaggcaagatctctgagcaggaatattttgaccacggcgtactgatgatcgcgatggtaaaagcgggagttgagctggcattcgaaaccatggtggattccggcattattgaagagtctgcttactacgaatctctgcacgagctgccgttgattgccaacactatcgcccgtaagcgtctgtatgaaatgaacgtggttatctctgataccgcagaatacggtaactacttgtttgctaatgcagcggtgccgttgctgaaagagaagtttatggattccctgcaagccggtgacttgggtaaaagtatccctggttcggcggtagataacgcacaactgcgtgatgtgaatgaagccattcgcaatcacccgatcgaagccgttggtcataagctgcgtggttacatgacagatatgaagcgtattgctgttgcgggctaa

SEQ ID NO: 94517 - protein, 492 aa, Yersinia pseudotuberculosis
MANYFNTLNLRQQLAQLGKCRFMARDEFADEAGYLKGKKVVIVGCGAQGLNQGLNMRDSGLDVAYALRKEAIAEKRASWRKATENGFKVGTYEELIPQADLVVNLTPDKQHSAVVKAVQPLMKEGAALGYSHGFNIVEVGEQVRKDITVVMVAPKCPGTEVREEYKRGFGVPTLIAVHPENDPKGEGMAIAKAWAAATGGHRAGVLESSFVAEVKSDLMGEQTILCGMLQAGSLLCFDKLVSEGTDAAYAEKLIQFGWETITEALKQGGITLMMDRLSNPAKLRAYALSEQLKEIMAPLFQKHMDDIISGAFSSGMMADWANDDVKLLNWREETGRTAFENAPQFEGKISEQEYFDHGVLMIAMVKAGVELAFETMVDSGIIEESAYYESLHELPLIANTIARKRLYEMNVVISDTAEYGNYLFANAAVPLLKEKFMDSLQAGDLGKSIPGSAVDNAQLRDVNEAIRNHPIEAVGHKLRGYMTDMKRIAVAG

SEQ ID NO: 94518 - DNA, 1770 bp, Brassica napus
  CDS (1)..(1770)
atggcggctgcgacttcatccatcgctccttccctctcatgcccatctccttcttcttcctccaaagcccttaggtcatcgaaagccacaacctttgctttccccaacatcggttccctctcgtctacttccaagtctctgaggtccctcactgccaccgtcgctggaaatggtaccggatcttccctctccgcgcgaatggttgcgtcgtctgcggttagagcccctatgtctctagatttcgagacgtctgtgttcaaaaaggagaaagtctctcttgctggtcacgaagagtacattgtgagaggaggaagggacttgttcaagcatcttcctgatgctttcaaagggattaagcagattggtgtcattggctggggatctcagggacctgctcaagctcagaatttaagggattcccttgtggaggcaaagtctgacatcgttgttaagattgggcttagaaagggctctcgctcatttgaggaagcacgtgctgttggcttcaccgaagaaagcggtactctgggtgatatatgggaaactatctctggcagtgatcttgtgttgctcttgatctctgatgctgctcaggctgataactatgagaaaatattctcccacatgaagccaaacagcattctcggtttgtcacacgggtttctactggggcatttacagtcaatgggacttgatttcccaaagaacatcagcgtggtagctgtttgccctaagggaatgggtccatccgtgagaaggctttatgtccaaggcaaagaaatcaacggtgctggaatcaacgccagttttgcagtccaccaggatgttgacggtagagccgctgatgttgctctgggatggtcagtagcacttggttctccttttacttttgctactactcttgagcaagagtacaagagtgacatctttggagaaagaggtattttgcttggtgccgttcacggaatcgtggagtctctgttcagaaggtacactgaaaatggaatgagcgaagacttggcttacaagaacacagtagagtgcatcacaggaacaatctcaaggactatctctactcagggaatgttggctgtctacaactccttgtctgaagaaggcaaaaaggatttcgagactgcatacagtgcatccttctatccttgtatggagattctctatgaatgctacgaggatgtagcagctggcagcgaaatcaggagtgttgtcttagccggtcgtcgcttctacgataaggagggcttgcctgcattcccaatgggaaagattgatcagacaagaatgtggaaggtcggtgaacgcgtcaggaagtccagaccagctggtgacttgggtccgttgtatcccttcaccgctggagtttacgttgcccttatgatggctcagattgagatcttgaggaagaagggtcactcttactcagagatcatcaacgagagtgtgattgagtctgttgattctctgaacccgtttatgcacgctagaggagtgtccttcatggtggacaactgctcgaccacagcaagattgggatcgaggaaatgggcaccaaggttcgactacaacctgacccaacaagctctggtggctgtggacaatggtgcaccaatcaacaaagacttgatcagcaacttcttcgctgatccagtccatggtgctatccaggtctgtgcacagctcaggcctaccgtggatatctctgtgcctcaagatgcagattttgttcgaccagagctgcgtcagtccaactag

SEQ ID NO: 94519 - protein, 589 aa, Brassica napus
MAAATSSIAPSLSCPSPSSSSKALRSSKATTFAFPNIGSLSSTSKSLRSLTATVAGNGTGSSLSARMVASSAVRAPMSLDFETSVFKKEKVSLAGHEEYIVRGGRDLFKHLPDAFKGIKQIGVIGWGSQGPAQAQNLRDSLVEAKSDIVVKIGLRKGSRSFEEARAVGFTEESGTLGDIWETISGSDLVLLLISDAAQADNYEKIFSHMKPNSILGLSHGFLLGHLQSMGLDFPKNISVVAVCPKGMGPSVRRLYVQGKEINGAGINASFAVHQDVDGRAADVALGWSVALGSPFTFATTLEQEYKSDIFGERGILLGAVHGIVESLFRRYTENGMSEDLAYKNTVECITGTISRTISTQGMLAVYNSLSEEGKKDFETAYSASFYPCMEILYECYEDVAAGSEIRSVVLAGRRFYDKEGLPAFPMGKIDQTRMWKVGERVRKSRPAGDLGPLYPFTAGVYVALMMAQIEILRKKGHSYSEIINESVIESVDSLNPFMHARGVSFMVDNCSTTARLGSRKWAPRFDYNLTQQALVAVDNGAPINKDLISNFFADPVHGAIQVCAQLRPTVDISVPQDADFVRPELRQSN

SEQ ID NO: 94520 - DNA, 1752 bp, Zea mays
  CDS (1)..(1752)
atggcggccgcctccaccctcgcgttcgggcacccaaaaaccctagccgccgccggcgccaagcccctgcccgccgccacctccacgtccgtctccttcccggccacccaccagcccgcgtgcctgctctcctcgcccgcgcccgggtctctgcgccgccgggacgtcgccgccatggtctccgcgccgccggccgtcggcaccgccatgccgtcgctcgacttcgacacctccgtcttcaacaaggagaaggtctccctcgccggccacgacgagtacatcgtgcgcggcgggaggaacctgttcccgctgctttcggaggcgttcaagggggtcaagcagatcggagtcattggatggggctcgcagggtcctgcccaagcccagaacctgagagattcactggctgatgccaagtcagatattgttgtgaagattggtctccggaaaggatccaaatcttttgaggaagcacgtgccgctggattcaccgaagagagcggaaccttgggcgatatttgggaaaccgtctccggcagcgatcttgtgttgctgctgatatccgatgctgcacaggctgacaactatgagaagatcttctctcacatgaaaccaaacagtatccttggtttatctcatggatttcttctgggacatttgcaatcactcggactcgatttcccaaagaacatcagtgtgattgctgtatgccccaagggaatgggtccatccgtccgcaggctttatgttcagggcaaggaagtcaatggcgctggcatcaactctagctttgctgtgcaccaggatgttgatggaagggcaactgatgttgctttagcatggtcagttgcacttggttcccccttcacgtttgctactactttggaacaggagtacaagagtgatatctttggagagcgaggcatcttgctgggtgctgtccatggtatcgtggaggctctgtttaggaggtacacagaacaaggaatggatgaagagtcggcctacaaaaacactgtcgagggcataactgggatcatctcgaaaaccatctcaaagaaagggatgcttgaagtgtacaactctttgagcgaggaaggcaaaaaggagttcaacaaggcttatagcgcatcgttttacccgtgcatggatatactctacgaatgctatgaagatgtggcctctggaagtgaaatccggagcgtggtgttggctgggcggaggttttatgagaaagagggcctcccagcttttccgatgggcaacatcgaccaaactcgcatgtggaaggttggtgaaaaggtgcgctcaacccgtccggaaggtgatcttggcccgctccatgccttcactgctggagtgtacattgccctgatgatggctcagattgagatcctgaggaagaaggggcactcctactctgagatcatcaacgagagcgtgattgagtcggtggactcgctgaacccgttcatgcacgcccgtggggtcgccttcatggtggacaactgctccacaacggctcgcctgggatccaggaagtgggcgcctcgcttcgactacatcctgacgcagcaggccttcgtggcggtggacaaggacgccccgatcaaccaggacctcatcagcaacttcttgtcggaccctgtccatggtgccattgaggtctgcgccgagctgaggcccaccgtcgacatctctgtgcctgccaacgccgactttgtgcgcccggagctccggcagtcttcctag

SEQ ID NO: 94521 - protein, 583 aa, Zea mays
MAAASTLAFGHPKTLAAAGAKPLPAATSTSVSFPATHQPACLLSSPAPGSLRRRDVAAMVSAPPAVGTAMPSLDFDTSVFNKEKVSLAGHDEYIVRGGRNLFPLLSEAFKGVKQIGVIGWGSQGPAQAQNLRDSLADAKSDIVVKIGLRKGSKSFEEARAAGFTEESGTLGDIWETVSGSDLVLLLISDAAQADNYEKIFSHMKPNSILGLSHGFLLGHLQSLGLDFPKNISVIAVCPKGMGPSVRRLYVQGKEVNGAGINSSFAVHQDVDGRATDVALAWSVALGSPFTFATTLEQEYKSDIFGERGILLGAVHGIVEALFRRYTEQGMDEESAYKNTVEGITGIISKTISKKGMLEVYNSLSEEGKKEFNKAYSASFYPCMDILYECYEDVASGSEIRSVVLAGRRFYEKEGLPAFPMGNIDQTRMWKVGEKVRSTRPEGDLGPLHAFTAGVYIALMMAQIEILRKKGHSYSEIINESVIESVDSLNPFMHARGVAFMVDNCSTTARLGSRKWAPRFDYILTQQAFVAVDKDAPINQDLISNFLSDPVHGAIEVCAELRPTVDISVPANADFVRPELRQSS

SEQ ID NO: 94522 - DNA, 1752 bp, Zea mays
  CDS (1)..(1752)
atggcggccgcctccaccctcgcgttcgggcacccaaaaaccctagccgccgccggcgccaagcccctgcccgccgccacctccacgtccgtctccttcccggccacccaccagcccgcgtgcctgctctcctcgcccgcgcccgggtctctgcgccgccgggacgtcgccgccatggtctccgcgccgccggccgtcggcaccgccatgccgtcgctcgacttcgacacctccgtcttcaacaaggagaaggtctccctcgccggccacgacgagtacatcgtgcgcggcgggaggaacctgttcccgctgcttccggaggcgttcaagggggtcaagcagatcggagtcattggatggggctcgcagggtcctgcccaagcccagaacctgagagattcactggctgaagccaagtcagatattgttgtgaagattggtctccggaaaggatccaaatcttttgaggaagcacgtgccgctggattcaccgaagagagcggaaccttgggcgatatttgggaaaccgtctccggcagcgatcttgtgttgctgctgatatcggatgctgcacaggctgacaactatgagaagatcttctctcacatgaaaccaaacagtatccttggtttatctcatggatttcttctaggacatttgcaatcactcggactcgatttcccaaagaacatcagtgtgattgctgtatgccccaagggaatgggtccatccgtccgcagactttatgttcagggcaaggaagtcaatggcgctggcatcaactctagctttgctgtgcaccaggatgttgatggaagggcaactgatgttgctttagcatggtcagttgcacttggttcccccttcacgtttgctactactttggaacaggagtacaagagtgatatctttggagagcgaggcatcttgctgggtgctgtccatggtatcgtggaggctctgtttaggaggtacacagaacaaggaatggatgaagagtcggcctacaaaaacactgtcgagggcataactgggatcatctcgaaaaccatctcaaagaaagggatgcttgaagtgtacaactctttgagcgaggaaggcaaaaaggagttcaacaaggcttatagcgcatcgttttacccatgcatggatatactctacgaatgctatgaagatgtggcctctggaagtgaaatccggagcgtggtgttggctgggcggaggttttatgagaaagagggcctcccagcttttccgatgggcaacatcgaccaaactcgcatgtggaaggttggtgaaaaggtgcgctcaacccgtccggaaggtgatcttggcccgctccatgccttcactgctggagtgtacattgccctgatgatggctcagattgagatcctgaggaagaaggggcactcctactctgagatcatcaacgagagcgtgattgagtcggtggactcgctgaacccgttcatgcacgcccgtggggtcgccttcatggtggacaactgctccacaacggctcgcctgggatccaggaagtgggcgcctcgcttcgactacatcctgacgcagcaggccttcgtggcggtggacaaggacgccccgatcaaccaggacctcatcagcaacttcttgtcggaccctgtccatggtgccattgaggtctgcgccgagctgaggcccaccgtcgacatctctgtgcctgccaacgccgactttgtgcgcccggagctccggcagtcttcctag

SEQ ID NO: 94523 - protein, 583 aa, Zea mays
MAAASTLAFGHPKTLAAAGAKPLPAATSTSVSFPATHQPACLLSSPAPGSLRRRDVAAMVSAPPAVGTAMPSLDFDTSVFNKEKVSLAGHDEYIVRGGRNLFPLLPEAFKGVKQIGVIGWGSQGPAQAQNLRDSLAEAKSDIVVKIGLRKGSKSFEEARAAGFTEESGTLGDIWETVSGSDLVLLLISDAAQADNYEKIFSHMKPNSILGLSHGFLLGHLQSLGLDFPKNISVIAVCPKGMGPSVRRLYVQGKEVNGAGINSSFAVHQDVDGRATDVALAWSVALGSPFTFATTLEQEYKSDIFGERGILLGAVHGIVEALFRRYTEQGMDEESAYKNTVEGITGIISKTISKKGMLEVYNSLSEEGKKEFNKAYSASFYPCMDILYECYEDVASGSEIRSVVLAGRRFYEKEGLPAFPMGNIDQTRMWKVGEKVRSTRPEGDLGPLHAFTAGVYIALMMAQIEILRKKGHSYSEIINESVIESVDSLNPFMHARGVAFMVDNCSTTARLGSRKWAPRFDYILTQQAFVAVDKDAPINQDLISNFLSDPVHGAIEVCAELRPTVDISVPANADFVRPELRQSS

SEQ ID NO: 94524 - DNA, 1740 bp, Zea mays
  CDS (1)..(1740)
atggcggcggcgacttcctcttccacctacctcgccatcggccgcaaaaccctaaaccccgccccctccgtagccacagccgccacctccgtctccttccccgccacgcagcacccatgcctcgtcgccgcctccgcggaccgccgccgcgccgtggctgcgaaggtctcgtcgccgtcggtcatcggcaccgccatgccgtcgctcgacttcgagacctccgtcttcaagaaggaaagagtgtccctggccggccatgaggagtatattgtgaggggtgggagggatctgttcccgctgttaccggaggccttcaagggaatcaaacagatcggcgtaatcggctggggctcgcagggtcctgcacaagctcagaacttgagagactcacttgttgaggcaaagtcagatattgttgttaagattggtctccggaaaggttctaaatcttttgaagaagcccgagcagcaggattcaccgaagagagtgggacgctgggtgatatatgggagactgtatcaaacagtgatcttgttttgctactgatatctgattctgctcaggctgataactacgagaaaattttctcgcacatgaaaccaaacagtattcttggtttgtcacatggatttctccttggacatttgcaatctctgggttttgatttccctaaaaacatcagtgtggttgctgtatgccccaagggaatgggcccatcagtcagaagactttatgttcagggcaaagagatcaatggtgctggtatcaatgctagctttgctgttcaccaggatgttgatggaagggcaacagatgtagctctagggtggtcagtagctttaggttctcctttcacatttgctactactctagagcaggagtaccggagtgacatttttggcgagcgaggtattttgcttggtgctgtccatggcatggtggaggctcttttcaggagatacacagaacaaggaatggacgaggactcagcatataagaatactgtagagagcatcactggaattatatcgaaaactatttcaaagaagggtatgcttgaagtgtataactctctgactgaagaaggaaagaagcagtttattgaggcctatagtgcagcatattacccatgcatggacatattgtatgagtgctatgaagacgtctcttctggaagtgagattagaagtgtggtgttggctgggaggagattttatgagaaggaagggctccctgctttccctatgggaaaaattgatcaaacacgtatgtggaaggtgggtgaaagggtccgttcaaccaggccacaaggtgatcttggcccactgcatcccttcactgctggagtgtatgttgcactaatgatggctcagattgaggtccttaggaagaagggccactcttactcagagataattaacgagagcctgatcgagtccgtggactcgttgaacccgttcatgcatgctcgcggtgtggccttcatggtcgataactgctccacaactgctcgtttgggatctaggaagtgggcaccacgcttcgattacatcttgacccaacaggcgtttgtgactgttgacaagaaagcaccgatcaaccaagacctcatcagcaacttcatgtctgaccctgtccacggtgccatcgaagtctgcgctcagctgaggcccactgttgacatctcagtgaccgctgatgcagatttcgtgcgtccagagcttcgacagtcttcataa

SEQ ID NO: 94525 - protein, 579 aa, Zea mays
MAAATSSSTYLAIGRKTLNPAPSVATAATSVSFPATQHPCLVAASADRRRAVAAKVSSPSVIGTAMPSLDFETSVFKKERVSLAGHEEYIVRGGRDLFPLLPEAFKGIKQIGVIGWGSQGPAQAQNLRDSLVEAKSDIVVKIGLRKGSKSFEEARAAGFTEESGTLGDIWETVSNSDLVLLLISDSAQADNYEKIFSHMKPNSILGLSHGFLLGHLQSLGFDFPKNISVVAVCPKGMGPSVRRLYVQGKEINGAGINASFAVHQDVDGRATDVALGWSVALGSPFTFATTLEQEYRSDIFGERGILLGAVHGMVEALFRRYTEQGMDEDSAYKNTVESITGIISKTISKKGMLEVYNSLTEEGKKQFIEAYSAAYYPCMDILYECYEDVSSGSEIRSVVLAGRRFYEKEGLPAFPMGKIDQTRMWKVGERVRSTRPQGDLGPLHPFTAGVYVALMMAQIEVLRKKGHSYSEIINESLIESVDSLNPFMHARGVAFMVDNCSTTARLGSRKWAPRFDYILTQQAFVTVDKKAPINQDLISNFMSDPVHGAIEVCAQLRPTVDISVTADADFVRPELRQSS

SEQ ID NO: 94526 - DNA, 1752 bp, Zea mays
  CDS (1)..(1752)
atggcggccgcctccaccctcgcgttcgggcacccaaaaaccctagccgccgccggcgccaagcccctgcccgccgccacctccacgtccgtctccttcccggccacccaccagcccgcgtgcctgctctcctcgcccgcgcccgggtctctgcgccgccgggacgtcgccgccatggtctccgcgccgccggccgtcggcaccgccatgccgtcgctcgacttcgacacctccgtcttcaacaaggagaaggtctccctcgccggccacgacgagtacatcgtgcgcggcgggaggaacctgttcccgctgctttcggaggcgttcaagggggtcaagcagatcggagttattggatggggctcgcagggtcctgcccaagcccagaacctgagagattcactggctgaagccaagtcagatattgttgtgaagattggtctccggaaaggatccaaatcttttgaggaagcacgtgccgctggattcaccgaagagagcggaaccttgggcgatatttgggaaaccgtctccggcagcgatcttgtgttgctgctgatatccgatgctgcacaggctgacaactatgagaagatcttctctcacatgaaaccaaacagtatccttggtttatctcatggatttcttctaggacatttgcaatcactcggactcgatttcccaaagaacatcagtgtgattgctgtatgccccaagggaatgggtccatccgtccgcagactttatgttcagggcaaggaagtcaatggcgctggcatcaactctagctttgctgtgcaccaggatgttgatggaagggcaactgatgttgctttagcatggtcagttgcacttggttcccccttcacgtttgctactactttggaacaggagtacaagagtgatatctttggagagcgaggcatcttgctgggtgctgtccatggtatcgtggaggctctgtttaggaggtacacagaacaaggaatggatgaagagtcggcctacaaaaacactgtcgagggcataactgggatcatctcgaaaaccatctcaaagaaagggatgcttgaagtgtacaactctttgagcgaggaaggcaaaaaggagttcaacaaggcttatagcgcatcgttttacccatgcatggatatactctacgaatgctatgaagatgtggcctctggaagtgaaatccggagcgtggtgttggctgggcggaggttttatgagaaagagggcctcccagcttttccgatgggcaacatcgaccaaactcgcatgtggaaggttggtgaaaaggtgcgctcaacccgtccggaaggtgatcttggcccgctccatgccttcactgctggagtgtacattgccctgatgatggctcagattgagatcctgaggaagaaggggcactcctactctgagatcatcaacgagagcgtgattgagtcggtggactcgctgaacccgttcatgcacgcccgtggggtcgccttcatggtggacaactgctccacaacggctcgcctgggatccaggaagtgggcgcctcgcttcgactacatcctgacgcagcaggcctttgtggcggtggacaaggacgccccgatcaaccaggacctcatcagcaacttcttgtcggaccctgtccatggtgccattgaggtctgcgccgagctgaggcccaccgtcgacatctctgtgcctgccaacgccgactttgtgcgcccggagctccggcagtcttcctag

SEQ ID NO: 94527 - protein, 583 aa, Zea mays
MAAASTLAFGHPKTLAAAGAKPLPAATSTSVSFPATHQPACLLSSPAPGSLRRRDVAAMVSAPPAVGTAMPSLDFDTSVFNKEKVSLAGHDEYIVRGGRNLFPLLSEAFKGVKQIGVIGWGSQGPAQAQNLRDSLAEAKSDIVVKIGLRKGSKSFEEARAAGFTEESGTLGDIWETVSGSDLVLLLISDAAQADNYEKIFSHMKPNSILGLSHGFLLGHLQSLGLDFPKNISVIAVCPKGMGPSVRRLYVQGKEVNGAGINSSFAVHQDVDGRATDVALAWSVALGSPFTFATTLEQEYKSDIFGERGILLGAVHGIVEALFRRYTEQGMDEESAYKNTVEGITGIISKTISKKGMLEVYNSLSEEGKKEFNKAYSASFYPCMDILYECYEDVASGSEIRSVVLAGRRFYEKEGLPAFPMGNIDQTRMWKVGEKVRSTRPEGDLGPLHAFTAGVYIALMMAQIEILRKKGHSYSEIINESVIESVDSLNPFMHARGVAFMVDNCSTTARLGSRKWAPRFDYILTQQAFVAVDKDAPINQDLISNFLSDPVHGAIEVCAELRPTVDISVPANADFVRPELRQSS

SEQ ID NO: 94528 - DNA, 1740 bp, Zea mays
  CDS (1)..(1740)
atggcggcggcgacttcctcttccacctacctcgccatcggccgcaaaaccctaaaccccgccccctccgtagccacagccgccacctccgtctccttccccgccacgcagcacccatgcctcgtcgccgcctccgcggaccgccgccgcgccgtggctgcgaaggtctcgtcgccgtcggtcatcggcaccgccatgccgtcgctcgacttcgagacctccgtcttcaagaaggaaaaggtgtccctggccggccatgaggagtatattgtgaggggtgggagggatctgttcccgctgttaccggaggccttcaagggaatcaaacagatcggtgtaatcggctggggctcgcagggtcctgcacaagctcagaacttgagagactcacttgttgaggcaaagtcagatattgttgttaagattggtctccggaaaggttctaaatcttttgaagaagcccgagcagcaggattcaccgaagagagtgggacgctgggtgatatatgggagactgtatcaaacagtgatcttgttttgctactgatatctgattctgctcaggctgataactacgagaaaattttctcgcacatgaaaccaaacagtattcttggtttgtcacatggatttctccttggacatttgcaatctctgggttttgatttccctaaaaacatcagtgtggttgctgtatgccccaagggaatgggcccatcagtcagaagactttatgttcagggcaaagagatcaatggtgctggtatcaatgctagctttgctgttcaccaggatgttgatggaagggcaacagatgtagctctagggtggtcagtagctttaggttctcctttcacatttgctactactctagagcaggagtaccggagtgacatttttggcgagcgaggtattttgcttggtgctgtccatggcatggtggaggctcttttcaggagatacacagaacaaggaatggacgaggactcagcatataagaacactgtagagagcatcactggaattatatcgaaaactatttcaaagaagggtatgcttgaagtgtataactccctgactgaagaaggaaagaagcagtttattgaggcctatagtgcagcatattacccatgcatggacatattgtatgagtgctatgaagacgtctcttctggaagtgagattagaagtgtggtgttggctgggaggagattttatgagaaggaagggctccctgctttccctatgggaaaaattgatcaaacacgtatgtggaaggtgggtgaaagggtccgttcaaccaggccacaaggtgatcttggcccactgcatcccttcactgctggagtgtatgttgcactaatgatggctcagattgaggtccttaggaagaagggccactcttactcagagataattaacgagagcctgatcgagtccgtggactcgttgaacccgttcatgcatgctcgcggtgtggccttcatggtcgataactgctccacaactgctcgtttgggatctaggaagtgggcaccacgcttcgattacatcttgacccaacaggcgtttgtgactgttgacaagaaagcaccgatcaaccaagacctcatcagcaacttcatgtctgaccctgtccacggtgccatcgaagtctgcgctcagctgaggcccactgttgacatctcagtgaccgctgatgctgatttcgtgcgcccagagcttcgacagtcttcataa

SEQ ID NO: 94529 - protein, 579 aa, Zea mays
MAAATSSSTYLAIGRKTLNPAPSVATAATSVSFPATQHPCLVAASADRRRAVAAKVSSPSVIGTAMPSLDFETSVFKKEKVSLAGHEEYIVRGGRDLFPLLPEAFKGIKQIGVIGWGSQGPAQAQNLRDSLVEAKSDIVVKIGLRKGSKSFEEARAAGFTEESGTLGDIWETVSNSDLVLLLISDSAQADNYEKIFSHMKPNSILGLSHGFLLGHLQSLGFDFPKNISVVAVCPKGMGPSVRRLYVQGKEINGAGINASFAVHQDVDGRATDVALGWSVALGSPFTFATTLEQEYRSDIFGERGILLGAVHGMVEALFRRYTEQGMDEDSAYKNTVESITGIISKTISKKGMLEVYNSLTEEGKKQFIEAYSAAYYPCMDILYECYEDVSSGSEIRSVVLAGRRFYEKEGLPAFPMGKIDQTRMWKVGERVRSTRPQGDLGPLHPFTAGVYVALMMAQIEVLRKKGHSYSEIINESLIESVDSLNPFMHARGVAFMVDNCSTTARLGSRKWAPRFDYILTQQAFVTVDKKAPINQDLISNFMSDPVHGAIEVCAQLRPTVDISVTADADFVRPELRQSS

SEQ ID NO: 94530 - DNA, 1740 bp, Zea mays
  CDS (1)..(1740)
atggcggcggcgacttcctcttccacctacctcgccatcggccgcaaaaccctaaaccccgccccctccgtagccacagccgccacctccgtctccttccccgccacgcagcacccatgcctcgtcgccgcctccgcggaccgccgccgcgccgtggctgcgaaggtctcgtcgccgtcggtcatcggcaccgccatgccgtcgctcgacttcgagacctccgtcttcaagaaggaaaaggtgtccctggccggccatgaggagtatattgtgaggggtgggagggatctgttcccgctgttaccggaggccttcaagggaatcaaacagatcggtgtaatcggctggggctcgcagggtcctgcgcaagctcagaacttgagagactcacttgttgaggcaaagtcagatattgttgttaagattggtctccggaaaggttctaaatcttttgaagaagcccgagcagcaggattcaccgaagagagtgggacgctgggtgatatatgggagactgtatcaaacagtgatcttgttttgctactgatatctgattctgctcaggctgataactacgagaaaattttctcgcacatgaaaccaaacagtattcttggtttgtcacatggatttctccttggacatttgcaatctctgggttttgatttccctaaaagcatcagtgtgattgctgtatgccccaagggaatgggcccatcagtcagaagactttatgttcagggcaaagagatcaatggtgctggtatcaatgctagctttgctgttcaccaggatgttgatggaagggcaacagatgtagctctagggtggtcagtagctttaggttctcctttcacatttgctactactctagagcaggagtaccggagtgacatttttggcgagcgaggtattttgcttggtgctgtccatggcatggtggaggctcttttcaggagatacacagaacaaggaatggacgaggactcagcatataagaatactgtagagagcatcactggaattatatcgaaaactatttcaaagaagggtatgcttgaagtgtataactccttgactgaagaaggaaagaagcagtttattgaggcctatagtgcagcatattacccatgcatggacatattgtatgagtgctatgaagacgtctcttctggaagtgagattagaagtgtggtgttggctgggaggagattttatgagaaggaagggctccctgctttccctatgggaaaaattgatcaaacacgtatgtggaaggtgggtgaaagggtccgttcaaccaggccacaaggtgatcttggcccactgcatcccttcactgctggagtgtatgttgcactaatgatggctcagattgaggtccttaggaagaagggccactcttactcagagataattaatgagagcctgatcgagtccgtggactcgttgaacccgttcatgcatgctcgcggtgtggccttcatggtcgataactgctccacaactgctcgtttgggatctaggaagtgggcaccacgcttcgattacatcttgacccaacaggcgtttgtgactgttgacaagaaagcaccgatcaaccaagacctcatcagcaacttcatgtctgaccctgtccacggtgccatcgaagtctgcgctcagctgaggcccactgttgacatctcagtgaccgctgatgctgatttcgtgcgtccagagcttcgacagtcttcataa

SEQ ID NO: 94531 - protein, 579 aa, Zea mays
MAAATSSSTYLAIGRKTLNPAPSVATAATSVSFPATQHPCLVAASADRRRAVAAKVSSPSVIGTAMPSLDFETSVFKKEKVSLAGHEEYIVRGGRDLFPLLPEAFKGIKQIGVIGWGSQGPAQAQNLRDSLVEAKSDIVVKIGLRKGSKSFEEARAAGFTEESGTLGDIWETVSNSDLVLLLISDSAQADNYEKIFSHMKPNSILGLSHGFLLGHLQSLGFDFPKSISVIAVCPKGMGPSVRRLYVQGKEINGAGINASFAVHQDVDGRATDVALGWSVALGSPFTFATTLEQEYRSDIFGERGILLGAVHGMVEALFRRYTEQGMDEDSAYKNTVESITGIISKTISKKGMLEVYNSLTEEGKKQFIEAYSAAYYPCMDILYECYEDVSSGSEIRSVVLAGRRFYEKEGLPAFPMGKIDQTRMWKVGERVRSTRPQGDLGPLHPFTAGVYVALMMAQIEVLRKKGHSYSEIINESLIESVDSLNPFMHARGVAFMVDNCSTTARLGSRKWAPRFDYILTQQAFVTVDKKAPINQDLISNFMSDPVHGAIEVCAQLRPTVDISVTADADFVRPELRQSS

SEQ ID NO: 94532 - DNA, 22 bp, Artificial sequence
  primer
atggctaactacttcaatacac

SEQ ID NO: 94533 - DNA, 24 bp, Artificial sequence
  primer
ttaacccgcaacagcaatacgttt

SEQ ID NO: 94534 - protein, 470 aa, Artificial sequence
  consensus sequence
  Variant (2)..(4): Xaa in position 2 to 4 is any amino acid
  Variant (6)..(6): Xaa in position 6 is any amino acid
  Variant (8)..(8): Xaa in position 8 is any amino acid
  Variant (10)..(10): Xaa in position 10 is any amino acid
  Variant (13)..(17): Xaa in position 13 to 17 is any amino acid
  Variant (19)..(19): Xaa in position 19 is any amino acid
  Variant (24)..(29): Xaa in position 24 to 29 is any amino acid
  Variant (30)..(35): Xaa in position 30 to 35 is any or no amino acid
  Variant (38)..(40): Xaa in position 38 to 40 is any amino acid
  Variant (41)..(46): Xaa in position 41 to 46 is any or no amino acid
  Variant (48)..(50): Xaa in position 48 to 50 is any amino acid
  Variant (52)..(54): Xaa in position 52 to 54 is any amino acid
  Variant (56)..(57): Xaa in position 56 to 57 is any amino acid
  Variant (59)..(67): Xaa in position 59 to 67 is any amino acid
  Variant (70)..(70): Xaa in position 70 is any amino acid
  Variant (72)..(73): Xaa in position 72 to 73 is any amino acid
  Variant (75)..(75): Xaa in position 75 is any amino acid
  Variant (78)..(78): Xaa in position 78 is any amino acid
  Variant (79)..(79): Xaa in position 79 is any or no amino acid
  Variant (81)..(91): Xaa in position 81 to 91 is any amino acid
  Variant (92)..(92): Xaa in position 92 is any or no amino acid
  Variant (94)..(97): Xaa in position 94 to 97 is any amino acid
  Variant (99)..(101): Xaa in position 99 to 101 is any amino acid
  Variant (106)..(118): Xaa in position 106 to 118 is any amino acid
  Variant (119)..(121): Xaa in position 119 to 121 is any or no amino acid
  Variant (123)..(123): Xaa in position 123 is any amino acid
  Variant (129)..(129): Xaa in position 129 is any amino acid
  Variant (132)..(133): Xaa in position 132 to 133 is any amino acid
  Variant (136)..(137): Xaa in position 136 to 137 is any amino acid
  Variant (139)..(140): Xaa in position 139 to 140 is any amino acid
  Variant (142)..(142): Xaa in position 142 is any amino acid
  Variant (143)..(145): Xaa in position 143 to 145 is any or no amino acid
  Variant (149)..(149): Xaa in position 149 is any amino acid
  Variant (151)..(151): Xaa in position 151 is any amino acid
  Variant (153)..(155): Xaa in position 153 to 155 is any amino acid
  Variant (156)..(157): Xaa in position 156 to 157 is any or no amino acid
  Variant (159)..(160): Xaa in position 159 to 160 is any amino acid
  Variant (162)..(166): Xaa in position 162 to 166 is any amino acid
  Variant (168)..(170): Xaa in position 168 to 170 is any amino acid
  Variant (172)..(174): Xaa in position 172 to 174 is any amino acid
  Variant (176)..(176): Xaa in position 176 is any amino acid
  Variant (177)..(178): Xaa in position 177 to 178 is any or no amino acid
  Variant (181)..(185): Xaa in position 181 to 185 is any amino acid
  Variant (187)..(188): Xaa in position 187 to 188 is any amino acid
  Variant (190)..(192): Xaa in position 190 to 192 is any amino acid
  Variant (195)..(195): Xaa in position 195 is any amino acid
  Variant (199)..(200): Xaa in position 199 to 200 is any amino acid
  Variant (204)..(243): Xaa in position 204 to 243 is any amino acid
  Variant (244)..(245): Xaa in position 244 to 245 is any or no amino acid
  Variant (247)..(252): Xaa in position 247 to 252 is any amino acid
  Variant (253)..(347): Xaa in position 253 to 347 is any or no amino acid
  Variant (350)..(353): Xaa in position 350 to 353 is any amino acid
  Variant (355)..(360): Xaa in position 355 to 360 is any amino acid
  Variant (362)..(364): Xaa in position 362 to 364 is any amino acid
  Variant (365)..(365): Xaa in position 365 is any or no amino acid
  Variant (367)..(367): Xaa in position 367 is any amino acid
  Variant (370)..(370): Xaa in position 370 is any amino acid
  Variant (372)..(372): Xaa in position 372 is any amino acid
  Variant (376)..(377): Xaa in position 376 to 377 is any amino acid
  Variant (380)..(390): Xaa in position 380 to 390 is any amino acid
  Variant (392)..(394): Xaa in position 392 to 394 is any amino acid
  Variant (397)..(397): Xaa in position 397 is any amino acid
  Variant (401)..(401): Xaa in position 401 is any amino acid
  Variant (403)..(403): Xaa in position 403 is any amino acid
  Variant (405)..(449): Xaa in position 405 to 449 is any amino acid
  Variant (450)..(456): Xaa in position 450 to 456 is any or no amino acid
  Variant (458)..(459): Xaa in position 458 to 459 is any amino acid
  Variant (461)..(462): Xaa in position 461 to 462 is any amino acid
  Variant (464)..(465): Xaa in position 464 to 465 is any amino acid
  Variant (468)..(469): Xaa in position 468 to 469 is any amino acid
KXXXIXGXGXQGXXXXXNXRDSGXXXXXXXXXXXXLRXXXXXXXXXSXXXAXXXGXXVXXXXXXXXXADXVXXLXPDXXQXXXXXXXXXXXXKXXXXLXXXHGFNXXXXXXXXXXXXXXXXVXMVAPKXPGXXVRXXYXXGXXXXGVPXLXAXXXXXDXXGXXXXXAXXXAXXXGXXXAGXXXXXFXXEXXXDLXGEQXXLCGXXXXXXXXXXXXXXXXXXXXXXXXXXXXXXXXXXXXXXXXXXGXXXXXXXXXXXXXXXXXXXXXXXXXXXXXXXXXXXXXXXXXXXXXXXXXXXXXXXXXXXXXXXXXXXXXXXXXXXXXXXXXXXXXXXXXXXXXXXXXXXXXAGXXXXFXXXXXXGXXXXEXAYXEXLHEXXLIXXXXXXXXXXXMXXXISXTAEXGXYXXXXXXXXXXXXXXXXXXXXXXXXXXXXXXXXXXXXXXXXXXXXXXXXXXXXHXXEXXGXXLRXXM

SEQ ID NO: 94535 - protein, 27 aa, Artificial sequence
  protein pattern
  Variant (2)..(2): Xaa in position 2 is any amino acid
  Variant (3)..(3): Xaa in position 3 is Ala or Cys
  Variant (6)..(6): Xaa in position 6 is Ala, Cys, Gly or Ser
  Variant (9)..(10): Xaa in position 9 to 10 is any amino acid
  Variant (13)..(14): Xaa in position 13 to 14 is any amino acid
  Variant (15)..(15): Xaa in position 15 is Phe or Tyr
  Variant (16)..(17): Xaa in position 16 to 17 is any amino acid
  Variant (19)..(19): Xaa in position 19 is any amino acid
  Variant (23)..(23): Xaa in position 23 is any amino acid
  Variant (25)..(25): Xaa in position 25 is Phe, Ile or Val
  Variant (27)..(27): Xaa in position 27 is Ile or Val
MXXPKXPGXXVRXXXXXGXGVPXLXAX

SEQ ID NO: 94536 - protein, 29 aa, Artificial sequence
  protein pattern
  Variant (2)..(4): Xaa in position 2 to 4 is any amino acid
  Variant (7)..(7): Xaa in position 7 is any amino acid
  Variant (8)..(8): Xaa in position 8 is Ile or Leu
  Variant (9)..(10): Xaa in position 9 to 10 is any amino acid
  Variant (11)..(11): Xaa in position 11 is Asn, Ser or Thr
  Variant (13)..(13): Xaa in position 13 is any amino acid
  Variant (14)..(14): Xaa in position 14 is Ala or Glu
  Variant (16)..(16): Xaa in position 16 is Ala, Cys, Thr or Val
  Variant (17)..(17): Xaa in position 17 is any amino acid
  Variant (18)..(18): Xaa in position 18 is Ser or Thr
  Variant (21)..(21): Xaa in position 21 is Phe or Met
  Variant (25)..(25): Xaa in position 25 is any amino acid
  Variant (26)..(26): Xaa in position 26 is Ile or Val
GXXXAGXXXXXFXXEXXXDLXGEQXXLCG

SEQ ID NO: 94537 - protein, 22 aa, Artificial sequence
  protein pattern
  Variant (2)..(2): Xaa in position 2 is any or no amino acid
  Variant (4)..(4): Xaa in position 4 is any or no amino acid
  Variant (6)..(6): Xaa in position 6 is any amino acid
  Variant (8)..(8): Xaa in position 8 is Ala or Ser
  Variant (11)..(11): Xaa in position 11 is any amino acid
  Variant (12)..(12): Xaa in position 12 is Ala or Asn
  Variant (13)..(13): Xaa in position 13 is any amino acid
  Variant (14)..(14): Xaa in position 14 is Ala or Gly
  Variant (15)..(15): Xaa in position 15 is any amino acid
  Variant (17)..(17): Xaa in position 17 is Leu or Met
  Variant (18)..(18): Xaa in position 18 is Lys or Arg
  Variant (21)..(21): Xaa in position 21 is Gly or Leu
  Variant (22)..(22): Xaa in position 22 is Ala, Leu or Val
VXIXGXGXQGXXXXXNXXDSXX

SEQ ID NO: 94538 - protein, 21 aa, Artificial sequence
  protein pattern
  Variant (2)..(2): Xaa in position 2 is any amino acid
  Variant (3)..(3): Xaa in position 3 is any or no amino acid
  Variant (6)..(6): Xaa in position 6 is Phe or Tyr
  Variant (8)..(8): Xaa in position 8 is Cys or Ser
  Variant (12)..(13): Xaa in position 12 to 13 is any or no amino acid
  Variant (16)..(16): Xaa in position 16 is Ala or Val
  Variant (17)..(17): Xaa in position 17 is Asp or Asn
  Variant (18)..(18): Xaa in position 18 is any amino acid
  Variant (19)..(19): Xaa in position 19 is Ile, Met or Val
  Variant (20)..(20): Xaa in position 20 is any amino acid
  Variant (21)..(21): Xaa in position 21 is Glu or Arg
EXXAYXEXLHEXXLIXXXXXX

SEQ ID NO: 94539 - protein, 14 aa, Artificial sequence
  protein pattern
  Variant (2)..(2): Xaa in position 2 is any amino acid
  Variant (3)..(3): Xaa in position 3 is Asp, Gly or Asn
  Variant (4)..(4): Xaa in position 4 is Ala or Ser
  Variant (5)..(5): Xaa in position 5 is any amino acid
  Variant (6)..(6): Xaa in position 6 is Phe or Leu
  Variant (7)..(7): Xaa in position 7 is Ala, Asp, Gly, Ser or Val
  Variant (8)..(8): Xaa in position 8 is any amino acid
  Variant (9)..(9): Xaa in position 9 is Ala or Ser
  Variant (12)..(12): Xaa in position 12 is Phe or Leu
  Variant (13)..(13): Xaa in position 13 is any amino acid
  Variant (14)..(14): Xaa in position 14 is Ile, Leu or Val
KXXXXXXXXHGXXX

SEQ ID NO: 94540 - protein, 13 aa, Artificial sequence
  protein pattern
  Variant (3)..(3): Xaa in position 3 is Ile, Leu or Val
  Variant (4)..(4): Xaa in position 4 is Ile or Val
  Variant (5)..(6): Xaa in position 5 to 6 is any amino acid
  Variant (8)..(8): Xaa in position 8 is any amino acid
  Variant (11)..(11): Xaa in position 11 is any amino acid
  Variant (12)..(12): Xaa in position 12 is any or no amino acid
ADXXXXLXPDXXQ

SEQ ID NO: 94541 - protein, 14 aa, Artificial sequence
  protein pattern
  Variant (2)..(2): Xaa in position 2 is any amino acid
  Variant (3)..(5): Xaa in position 3 to 5 is any or no amino acid
  Variant (7)..(7): Xaa in position 7 is Phe, Trp or Tyr
  Variant (9)..(9): Xaa in position 9 is Ser, Thr or Val
  Variant (10)..(10): Xaa in position 10 is Ile, Leu, Met or Val
  Variant (11)..(11): Xaa in position 11 is Thr or Val
  Variant (13)..(13): Xaa in position 13 is Ala, Gly or Ser
  Variant (14)..(14): Xaa in position 14 is Gly, Leu or Val
KXXXXGXEXXXEXX

SEQ ID NO: 94542 - DNA, 417 bp, Escherichia coli
  CDS (1)..(417): transl_table=11
atgtggtatcaaaagacgctcacgcttagcgccaaatctcgtgggtttcatctggtaacggatgaaattctgaatcagctggctgatatgccgcgcgttaacatcggcttactgcatctgttgctgcaacatacctccgcctctctgacacttaatgagaactgcgatcccaccgtacgccacgacatggagcgttttttcctccgcaccgttcccgacaacggaaattatgagcatgactatgagggagcagacgatatgccttctcatatcaaatcctcaatgctgggaacatcgcttgtattgccggtgcataaagggcgtattcagaccggcacctggcaaggcatttggctgggggaacatcgcatccacggcggatcgcgtcgcatcatcgcgacactacaaggggagtaa

SEQ ID NO: 94543 - protein, 138 aa, Escherichia coli
MWYQKTLTLSAKSRGFHLVTDEILNQLADMPRVNIGLLHLLLQHTSASLTLNENCDPTVRHDMERFFLRTVPDNGNYEHDYEGADDMPSHIKSSMLGTSLVLPVHKGRIQTGTWQGIWLGEHRIHGGSRRIIATLQGE

SEQ ID NO: 94544 - DNA, 649 bp, Arabidopsis thaliana
  CDS (101)..(547)
aaaaaaagctatgagctcgacgatcttgttctctggtgttgttcctctgcgtttgagatcggttttgactccagctaatccggctaccgatagagcttcaatggcgagttcctctggtgctaagtgggctcagaaaaccatcacgcttccaccgctacgtcgtggatgtcatcttattactccaaagatattgaaagaaataagggaagacttgtcagatttcaattgtggtcttgctcatgtcttcttacaacacacaagtgcttctctgacaatcaatgagaattatgatccagatgttcaggctgatactgagactttcttgaacaggattgttcctgaggggaattcagcgccttggaggcatactatggaaggtcctgatgacatgccagctcatatcaagtcatcaatgtttggatgtcaactcacaatcccaataacaaaaggaaaactcagcatgggaacttggcagggaatatggctctgtgaacaccgtgatgctccaacagcacgcagagttgtggtcactctcaatggaatctagagatgtctcttcacgttagatggcttgtaacctcgtaatgttttaatagatttttacagtcttgtaatgaaatttgactttctatatgagaccactttgtcc

SEQ ID NO: 94545 - protein, 148 aa, Arabidopsis thaliana
MASSSGAKWAQKTITLPPLRRGCHLITPKILKEIREDLSDFNCGLAHVFLQHTSASLTINENYDPDVQADTETFLNRIVPEGNSAPWRHTMEGPDDMPAHIKSSMFGCQLTIPITKGKLSMGTWQGIWLCEHRDAPTARRVVVTLNGI

SEQ ID NO: 94546 - DNA, 765 bp, Zea mays subsp. mays
  CDS (199)..(633)
aatttttgccacagcaccacttgctcctgcctcctgctgcttctttccccgagttcccgtgccgccgcgagcgctcccaaccaagcaacgagacaacaacaacaaccctgcaccgccgcagcacttgcgccgtccggtcctgtcctcccgcggtctcgacgccgtcccctaccgtcctaccttatcgcgcaccgctccatggccgccaagtgggcccagaagaccgtcgttatcccggcgcatcggcggggctgccacctcatcacccccaagattctgagggagatcgagggcgacctggccgggttcaagtgcggtctcgcgcatttcttccttcagcacacaagcgcatcgctgaccatcaacgagaactatgactctgatgtgcaggctgacactgagacttttcttaacagaattgttccagagggccacaatgctccttggaaacacactatggaaggacctgatgacatgccagcacatattaaatcttctatgtttggttgttccctaacgattcctataactgatggacgtctcaatacgggcacttggcagggcatatggctgtgcgaacatcgagaccatgccagccctcgcaaaattgtgattactctcaacggtgtgtaacttgaagatcttatatgctgccaggaaatagggccaatgcaatttggacctgaatgtgtttcagttaccatgtactatgttgagttgtaatgtatgctataaattccaataaattcatcgttactatttcgc

SEQ ID NO: 94547 - protein, 144 aa, Zea mays subsp. mays
MAAKWAQKTVVIPAHRRGCHLITPKILREIEGDLAGFKCGLAHFFLQHTSASLTINENYDSDVQADTETFLNRIVPEGHNAPWKHTMEGPDDMPAHIKSSMFGCSLTIPITDGRLNTGTWQGIWLCEHRDHASPRKIVITLNGV

SEQ ID NO: 94548 - DNA, 859 bp, Oryza sativa
  CDS (84)..(665)
aaaaagtgcgaagtggaatcaaccgccgccgctcgtcgaaagtcaccacacacaccctcgccgccccgccgctcaattcagtgatgcaggcggcagcacccgcgtgggctccgcccatcgtctcctcggcttccgccgtcttcgcgcggccccgccgtggcgcgcgcgccggcgccggcgccgtccggtgcgagctcgccgcctccgcgccatcgtcggccgccggctcgatggccccacgctgggcccagaggaccatcgtcatcccgccgcagcgccgcggatgccacctcatcacccccaagattgtgaaggggataaaagacgacctctccgagttcaagtgcggcatggcacatctgttcttgcagcacaccagcgcttccctgactatcaatgagaactatgactccgatgtccagtttgacactgaaacatttcttagtcgcattgtcccagagggtccatctgctccatggaagcacaccatagaagggccagacgacatgccagcacatattaaatcgtcgatgtttggttgtgccctgacgattcctatcactgatgggcgtctcaatatgggaacttggcagggtatatggctctgtgaacatcgagactatgctacccctcgccagattgtgatcactctcaatgggatctaaaaggtccatgacaatagatattaatagctgtaaatgcaatatgaccatctagacatctagatcatatgcattgaaactgaaactgaaaccttttcactcatttgtgatatgaattacagtggtgaatatattttgcaatcttgtaaaaaaaaaaaaaaaaaactcgagactagttctctctctctctcctcgtc

SEQ ID NO: 94549 - protein, 193 aa, Oryza sativa
MQAAAPAWAPPIVSSASAVFARPRRGARAGAGAVRCELAASAPSSAAGSMAPRWAQRTIVIPPQRRGCHLITPKIVKGIKDDLSEFKCGMAHLFLQHTSASLTINENYDSDVQFDTETFLSRIVPEGPSAPWKHTIEGPDDMPAHIKSSMFGCALTIPITDGRLNMGTWQGIWLCEHRDYATPRQIVITLNGI

SEQ ID NO: 94550 - DNA, 798 bp, Sorghum bicolor
  CDS (203)..(637)
  misc_feature (774)..(774): n is a, g, c or t
  misc_feature (783)..(783): n is a, g, c or t
gccggccgggtacaaaaatgtcctcgccatcttcattgtcgctttcttcccaagcgccttccacctgctcctaaaaccgataaccctccccttcgagctcttcaacacgcctctcgcgccttctctcaaactcccaacttgcgcctgctgtcccccagcctcctgctcatcctcagcaacaccacaaccacaaccgcccagcatgtctttcttccaaaaacaattcgcccttcccgcgaagtcgcgcggctgctacctcatcacggacgaagtcacacgccaagtaccagagatcaagaacttcaaagtcggcgtcatgcacctcttcatccagcacacttcctgcggtctcaccctcaacgagaatgccgatcccaccgtgcgcgccgacatggctgacgcgctggaccgccttgcgccagaggacaaggagggcgtgctctaccagcacgacgacgagggactggatgatatgccgggacacatcaagagcagtttggtgggtgctagtgtcagtgtgccgatcacgaatggaaggttgaacacgggcacatggcagggtatctactactgcgagtttagggcgagcaagcactcgaggaagcttgtggctactatccagggcgagaaggcttagagaatatattggagaatacctaagggtataatgactgatgtagtaacacttgcctcgaggtcgagcccgattttatatggcatgagcattagacaattacttcttcagacattatggtattatgtgatgaacatcanaaaaaaaanaaaaaaaaggcccct

SEQ ID NO: 94551 - protein, 144 aa, Sorghum bicolor
MSFFQKQFALPAKSRGCYLITDEVTRQVPEIKNFKVGVMHLFIQHTSCGLTLNENADPTVRADMADALDRLAPEDKEGVLYQHDDEGLDDMPGHIKSSLVGASVSVPITNGRLNTGTWQGIYYCEFRASKHSRKLVATIQGEKA

SEQ ID NO: 94552 - DNA, 1116 bp, Zea mays
  CDS (202)..(813)
cattgggtacctcgaggccggccgggccgacatagaaaaaggggagaactagaaggaaccgctgtgtcacacacacacacaccacacggcggccggagcggcggagccaccataaattggtgctctctccgtccgaagtgctctctgaaattccccccaaatatcccagccactgccgtcgtgcagtcaaagtgtcaaaccatgccggcagtagcgttcgcgtcggctcctgccatattcgcctccgcctccgcgcgtccctgccgcagcgcggctccgggcatcctttcctccgactccgggcggccccgccgcggcgcgcgtggcgccgtccagtgtgaggtcgcctcctcctcggcaccgtcggcggctggaccccaggccgcccggtgggcccagaggaccgtggtcatcccgccacagcgccgcgggtgccacctcatcaccaacaagatcgtaaatgagatagggaatgacctggccgacttcaagtgtggcatggcgcatctgttcttgcagcacacaagtgcgtcgttgactattaatgagaactacgactctgatgtccaggttgacactgaaacatttcttagtcgcattgttccagagggtccatctgctccatggaggcacaccatagaaggacctgatgacatgccagcacatatcaaatcatcaatgtttggttgttccctgatgattcctatcaccaatggacgtctcaacatgggaacttggcagggtatttggctctgtgaacatcgagattatgctactcctcgacagattgtgatcacgctgaatgggatctagcctaaggtgatctatgttaagagctggaaatgcaatgcagcgacttcgacatgtttaaatcagatgcactgaaactgaaactgtctttggcccagttgtgataggcgttccagtggagaatgttatttgtaatatgatgctagcatgaggggaacaaaatctcttaacgagcttcttctcatgttgagcttgtttagttatctttggtggtttaaagaaatggtttataagttgttagtgtcgtttggttcacgaaatgtaacgtaaatggtaatgataatgattcacactctgattaacact

SEQ ID NO: 94553 - protein, 203 aa, Zea mays
MPAVAFASAPAIFASASARPCRSAAPGILSSDSGRPRRGARGAVQCEVASSSAPSAAGPQAARWAQRTVVIPPQRRGCHLITNKIVNEIGNDLADFKCGMAHLFLQHTSASLTINENYDSDVQVDTETFLSRIVPEGPSAPWRHTIEGPDDMPAHIKSSMFGCSLMIPITNGRLNMGTWQGIWLCEHRDYATPRQIVITLNGI

SEQ ID NO: 94554 - DNA, 435 bp, Oryza sativa (japonica cultivar-group)
  CDS (1)..(435)
atggccgccaagtgggcgcagaagacaatcgtcatccccgcccagcgccggggatgccacctcatcacccccaagattctgagggagattgagggcgacctgtccgggttcaagtgcggcttggcgcatctgttcttgcagcacacaagcgcttccctaaccatcaatgagaactatgactccgatgtacaagctgacaccgaaactttccttaaccgaattgtaccagagggccgatctgctccttggaagcacactctagaaggacctgatgacatgccagcacatattaaatcatcaatgtttggttgtgccctgacgatccctataactgatgggcatctcaatatgggcacttggcagggtatatggctctgtgaacatcgtgacaatgcttcctcccggaaaattgtgatcactctcaatggggtctag

SEQ ID NO: 94555 - protein, 144 aa, Oryza sativa (japonica cultivar-group)
MAAKWAQKTIVIPAQRRGCHLITPKILREIEGDLSGFKCGLAHLFLQHTSASLTINENYDSDVQADTETFLNRIVPEGRSAPWKHTLEGPDDMPAHIKSSMFGCALTIPITDGHLNMGTWQGIWLCEHRDNASSRKIVITLNGV

SEQ ID NO: 94556 - DNA, 420 bp, Vibrio cholerae O1 biovar eltor str. N16961
  CDS (1)..(420): transl_table=11
atgtggcatcagcacaccatccagttacgcccacgagcacgtggttttcatctgatcactgatgaaattgaacaacaattgccgcaaatcaaaagactaaatgtcggtttattacatttatttgtacagcatacttcggccagtctcaccatcaatgagaatgccgatccgacggtgcgccaagatatggaagcccattttaaccacgctgcgcctgaaggggcgccttattatcggcacattgatgagggcgatgatgatatgcccgcgcatatcaagtcttcactacttggatgtagcgtcagtattcccattcaacaaggcaggttagcgctcggtacttggcaaggtatctatttgggggagcatcgcaatcacggcggaataagaagggtgatcgcgaccattcaaggcgagtaa

SEQ ID NO: 94557 - protein, 139 aa, Vibrio cholerae O1 biovar eltor str. N16961
MWHQHTIQLRPRARGFHLITDEIEQQLPQIKRLNVGLLHLFVQHTSASLTINENADPTVRQDMEAHFNHAAPEGAPYYRHIDEGDDDMPAHIKSSLLGCSVSIPIQQGRLALGTWQGIYLGEHRNHGGIRRVIATIQGE

SEQ ID NO: 94558 - DNA, 456 bp, Deinococcus radiodurans R1
  CDS (1)..(456): transl_table=11
gtgccctaccctttccccatgtggacccagcaccagctcaccctgcctccgcagcggcgcggttttcatctcatcacccgcgaggtcgtggcggcggtgcccgagctggccggggtgcaggtcgggctgctgcacgtctggattcagcacacctcggccagcctgaccgtcaacgaaaacgcctcgcccgacgtgcggcgcgatttcgagcggtatttcaatcatgcggtgcccgacggctggcgcgagttcgagcacacgctggaaggccccgacgacatggccgcccacatcaaggcgagcgtgctggggccgtcgctgctgctgcccgtcagcggcggacggctggcgctgggccgctggcaaggcattttcctgtgcgagcaccgcgaccacgccagtgcgcggcggctggtcctcaccttgcagggcgaagagaagcaggcaggaaaatag

SEQ ID NO: 94559 - protein, 151 aa, Deinococcus radiodurans R1
MPYPFPMWTQHQLTLPPQRRGFHLITREVVAAVPELAGVQVGLLHVWIQHTSASLTVNENASPDVRRDFERYFNHAVPDGWREFEHTLEGPDDMAAHIKASVLGPSLLLPVSGGRLALGRWQGIFLCEHRDHASARRLVLTLQGEEKQAGK

SEQ ID NO: 94560 - DNA, 423 bp, Sinorhizobium meliloti 1021
  CDS (1)..(423): transl_table=11
atggcgcagaccgtcataaccatatctacgaaggggcaggggctttacgagttcaccgccgaggctgacggcttcgtgcgtgcgtccggcgtggccgagggattgctcacggtgttcgtccgtcatacttccgcttcgctgatcatccaggagaacgccgatgcggacgtgaagcgtgacctccatgccttcttccaccggctggtgccgccgtcctccgatccatcgatgagctgggtcgtccacaccatggaggggccggacgacatgccggcgcatatcaaggcggcactcacgcaggtttcgctcggcattcccgtcatgcaggggcgcctggcgcttggaacctggcaggggctttatctgttcgaacaccgcgaccggccgcaccgccgcgagatcgtcctgcatctcggcagctga

SEQ ID NO: 94561 - protein, 140 aa, Sinorhizobium meliloti 1021
MAQTVITISTKGQGLYEFTAEADGFVRASGVAEGLLTVFVRHTSASLIIQENADADVKRDLHAFFHRLVPPSSDPSMSWVVHTMEGPDDMPAHIKAALTQVSLGIPVMQGRLALGTWQGLYLFEHRDRPHRREIVLHLGS

SEQ ID NO: 94562 - DNA, 480 bp, Nostoc sp. PCC 7120
  CDS (1)..(480): transl_table=11
atggaaatgtggcgatcgctcaagctattattaattatttctagtctcataaaaatatctataactatgactcactaccaaaaactcctgagagtttctacgaacggtaaatcattccacaatattactgccaaaattgaatctatcgttgcagaatctggtgtggaaactggactttgtactttatttttgcgccatacttctgccagtttagtgattcaagaaaatgctgacccagatgtacttgtggatttagctaattatatggctaaacttgtgccagaatctgggaaatatattcatgatgctgaaggtgctgatgatatgccggcacatatccgcacggctttgactcacacttctgaaaatattccgataaatcgtggtcatttggtgttgggaacttggcagggaatatatgtttgggaacatcgtcagcacagtcatgtcagagaattagttgtgcatatctcgcaatag

SEQ ID NO: 94563 - protein, 159 aa, Nostoc sp. PCC 7120
MEMWRSLKLLLIISSLIKISITMTHYQKLLRVSTNGKSFHNITAKIESIVAESGVETGLCTLFLRHTSASLVIQENADPDVLVDLANYMAKLVPESGKYIHDAEGADDMPAHIRTALTHTSENIPINRGHLVLGTWQGIYVWEHRQHSHVRELVVHISQ

SEQ ID NO: 94564 - DNA, 450 bp, Agrobacterium tumefaciens str. C58
  CDS (1)..(450): transl_table=11
ttgttccgactaccagaaagaaaaaatgtgccgcaaagaacaataaccatcgcaacccgcggacaaggcctctacgagtttacatctgaagcagaagcgatggtgaggcaggcagggctggaggaggggttgctgacgatctttgtccggcacacatcctgctcgttgcttattcaggaaaatgccgaccctgacgtcaagcacgatctgctgacatttttctctcgcctcgtgccgccttccagcgatccttccatgcgctggatcgttcatacgctcgaaggtccggatgatatgcccgcccacatcaaatcggcgctgacggcggtttccatcggtgtgccgatcggcgaggggcggctcgtgctcggcacgtggcaggggctttacctgtttgaacaccgtgaccagccgcatcgccgtgaaattgtgctgcatatctcaccctga

SEQ ID NO: 94565 - protein, 149 aa, Agrobacterium tumefaciens str. C58
MFRLPERKNVPQRTITIATRGQGLYEFTSEAEAMVRQAGLEEGLLTIFVRHTSCSLLIQENADPDVKHDLLTFFSRLVPPSSDPSMRWIVHTLEGPDDMPAHIKSALTAVSIGVPIGEGRLVLGTWQGLYLFEHRDQPHRREIVLHISP

SEQ ID NO: 94566 - DNA, 654 bp, Arabidopsis thaliana
  CDS (1)..(654)
atggtgatgatggtgaaagtgaaaggccttattgggaggttttggtttggagttggaggtgggattgtgttggccattgttgttgttattattgggcttagaggaacacaaaaagctatgagctcgacgttcttgttctctggtgttgttcctctgcgtgtgagatcggttttgactccagctaatccggctaccgatagagcttcaatggcgagttcctctggtgctaagtgggctcagaaaaccatcacgcttccaccgctacgtcgtggatgtcatcttattactccaaagatattgaaagaaataagggaagacttgtcagatttcaattgtggtcttgctcatgtcttcttacaacacacaagtgcttctctgacaatcaatgagaattatgatccagatgttcaggctgatactgagactttcttgaacaggattgttcctgaggggaattcagcgccttggaggcatactatggaaggtcctgatgacatgccagctcatatcaagtcatcaatgtttggatgtcaactcacaatcccaataacaaaaggaaaactcagcatgggaacttggcagggaatatggctctgtgaacaccgtgatgctccaacagcacgcagagttgtggtcactctcaatggaatctag

SEQ ID NO: 94567 - protein, 217 aa, Arabidopsis thaliana
MVMMVKVKGLIGRFWFGVGGGIVLAIVVVIIGLRGTQKAMSSTFLFSGVVPLRVRSVLTPANPATDRASMASSSGAKWAQKTITLPPLRRGCHLITPKILKEIREDLSDFNCGLAHVFLQHTSASLTINENYDPDVQADTETFLNRIVPEGNSAPWRHTMEGPDDMPAHIKSSMFGCQLTIPITKGKLSMGTWQGIWLCEHRDAPTARRVVVTLNGI

SEQ ID NO: 94568 - DNA, 432 bp, Methanopyrus kandleri AV19
  CDS (1)..(432): transl_table=11
atgtcccccggggtgcgggcgttgtcagtgtaccaggccgagctgaggatcaagtcggaacgcagggttcaggtgatcgacgtcaccgaccaggtcagagagaaagttagggagagcggagtggagaaagggatcgctcacgtgtactcacggcacaccaccgcggccgtggtcgtgaacgagcccgagtcgggtctcctccgtgatatcgttaataagcttgaagagctagtgccccaaggtgcggggtacgaacacgatagaatcgacaacaacgccgatgcacacctgcgcgctctactcctagggagttccgtcaccatccccgtatccgacggtgatctcgtactgggaacctggcaatccgtgctgttcgtggagttagacggcccacgatctcgtcgtctgctcgtgaccgtggtgggggagtga

SEQ ID NO: 94569 - protein, 143 aa, Methanopyrus kandleri AV19
MSPGVRALSVYQAELRIKSERRVQVIDVTDQVREKVRESGVEKGIAHVYSRHTTAAVVVNEPESGLLRDIVNKLEELVPQGAGYEHDRIDNNADAHLRALLLGSSVTIPVSDGDLVLGTWQSVLFVELDGPRSRRLLVTVVGE

SEQ ID NO: 94570 - DNA, 537 bp, Bradyrhizobium japonicum USDA 110
  CDS (1)..(537): transl_table=11
atgggtcctggctcccgtgcgcaattgcgcactaggccaggacgacgttacgagagaacctccatgacatcagccagatccgtaacccgctcggcgccatcctcggtgcaagccaccattatctcatcgtcgctgctcaccgtggagacgcaggggcgcggcttcacggacctgacccgcgaagcagcggcgttcattgccgaggcccgcgcgcgcgagggcgcgctgacgctgttcatccgtcacacctcggcctcgctgacgatccaggaaaacgccgatccctccgtgctggttgatctcaccaccgcgctgtccaggctcgcgccggagaacgccggctggacccacgacaccgaggggccggacgacatgcccggacatatcaagaccatgctgacgcagacctcgcttcaggtcccggtcctgaacggcaggctcgcgcttggcacctggcaggcgatctatctgatcgagcatcgcgcccgcccgcaccggcgcgaggtggtgctgcaattcatcggcgccaatcagtag

SEQ ID NO: 94571 - protein, 178 aa, Bradyrhizobium japonicum USDA 110
MGPGSRAQLRTRPGRRYERTSMTSARSVTRSAPSSVQATIISSSLLTVETQGRGFTDLTREAAAFIAEARAREGALTLFIRHTSASLTIQENADPSVLVDLTTALSRLAPENAGWTHDTEGPDDMPGHIKTMLTQTSLQVPVLNGRLALGTWQAIYLIEHRARPHRREVVLQFIGANQ

SEQ ID NO: 94572 - DNA, 426 bp, Pseudomonas syringae pv. tomato str. DC3000
  CDS (1)..(426): transl_table=11
atgtggcatcaatccaggattgccttgcgcgccaggtctcgcgggtttcatctggtgactgacgagatcgtcgcaggcttgcctcagttgcgcgattgtcgtgtcggcctgcttcacgtatggctgcaacatacctcggcttcgttgaccgtcaacgaaaatgccgatccggcagttcgtcgtgacttcgagcgttttttcaaccgtctggtgcctcagggcgtggacggctacgaacatgacgacgaaggccctgatgatttgcccgcgcatttcaaggccagtttgctgggctgccagttgtttttgccggtgacggcaggccgactggcgctgggcacctggcaaggtatttatctgggcgaacatcgagacgcgggtgggtctcgtaacgtcctggccacccttcagggtgagtacgcataa

SEQ ID NO: 94573 - protein, 141 aa, Pseudomonas syringae pv. tomato str. DC3000
MWHQSRIALRARSRGFHLVTDEIVAGLPQLRDCRVGLLHVWLQHTSASLTVNENADPAVRRDFERFFNRLVPQGVDGYEHDDEGPDDLPAHFKASLLGCQLFLPVTAGRLALGTWQGIYLGEHRDAGGSRNVLATLQGEYA

SEQ ID NO: 94574 - DNA, 420 bp, Vibrio parahaemolyticus RIMD 2210633
  CDS (1)..(420): transl_table=11
atgtgggcacaaaaaacactgcaattaaaagcaagaagtcgtggctttcatctaattactgatgaaattgaacaacaattaccgcaaatacacgagctttcagtaggtttgttacatctatttattcagcatacctccgccagtctgaccttaaatgagaatgcagacccaactgtgcgcatggacatggaagcgcatttcaacaagtttgtgcaggagagagctccttattatcagcacacctatgaaggtgatgacgacatgccagcacacattaaagcatcactgcttggcagtagtgtgacgataccaatccaaaatggtcgattagcattaggaacatggcaaggtatttacttgggtgagcaccgagactttggcggcagccgccgcatcattgcaaccatcaatggcgagtaa

SEQ ID NO: 94575 - protein, 139 aa, Vibrio parahaemolyticus RIMD 2210633
MWAQKTLQLKARSRGFHLITDEIEQQLPQIHELSVGLLHLFIQHTSASLTLNENADPTVRMDMEAHFNKFVQERAPYYQHTYEGDDDMPAHIKASLLGSSVTIPIQNGRLALGTWQGIYLGEHRDFGGSRRIIATINGE

SEQ ID NO: 94576 - DNA, 426 bp, Coxiella burnetii RSA 493
  CDS (1)..(426): transl_table=11
atggggatgatttatcaaaaaacattaattttccataccaaggctcggggaactatcgatatcactgacaaagttatcgacatagttctaagttcggaatgtaaaaagggtttgtgccacgtttttattcaacatacaagcgcctctttgatcgtctgtgaaaatgctgatcggacagtacgaaaagatttagaacggttcatggaacgttttatccaggacggcgataagcttttccaacacaaagttgaagggcccgacgatatgccggctcatttgcgaacgattttaacgcaaacgagcttaacagttccaattgaaaataatgaattggctttaggaacatggcaggggatctatctttgggaacaccgactaggggctcattttcgtcgccgaattatggttacggttatgggtagctaa

SEQ ID NO: 94577 - protein, 141 aa, Coxiella burnetii RSA 493
MGMIYQKTLIFHTKARGTIDITDKVIDIVLSSECKKGLCHVFIQHTSASLIVCENADRTVRKDLERFMERFIQDGDKLFQHKVEGPDDMPAHLRTILTQTSLTVPIENNELALGTWQGIYLWEHRLGAHFRRRIMVTVMGS

SEQ ID NO: 94578 - DNA, 450 bp, Rhodopirellula baltica SH 1
  CDS (1)..(450): transl_table=11
ttggtagcttcccaaatgtcgtactggatgcagcgtgaactgacaattccagccgttcgtcgcggatttcacctggtcacgcggccgattctgcaagccattccggaactggctgagatcgaggttgggttgttgcacgtttttatccggcacaccagtgcatcgctgacgatcaacgaaaacgccgatccggacgtgcgagttgatttcgaaacggcgatgaatcacgcggtgcctgaatcgcttccctatgttcacactttggaaggtcccgatgacatgcccgctcacgtgaaagcatcgatgatgggcagcagcgtcagcgttccagtgcgagatggacgcttgaacgtgggaacttggcaggggatttatctgtgcgagcatcgcgatcgagcctcctcgagacatctcgttttgacgctgcaaggcaaacggtccgacacttag

SEQ ID NO: 94579 - protein, 149 aa, Rhodopirellula baltica SH 1
MVASQMSYWMQRELTIPAVRRGFHLVTRPILQAIPELAEIEVGLLHVFIRHTSASLTINENADPDVRVDFETAMNHAVPESLPYVHTLEGPDDMPAHVKASMMGSSVSVPVRDGRLNVGTWQGIYLCEHRDRASSRHLVLTLQGKRSDT

SEQ ID NO: 94580 - DNA, 561 bp, Prochlorococcus marinus subsp. marinus str. CCMP1375
  CDS (1)..(561): transl_table=11
gtggaacaatttctatcagagctttcgcttaaaacccatggtgaagggtttacagacattactaatgatattaatagctggattaaaaaaaagaaaattagaaaaggaattttgattattacttcaaagcacactagttgcagcttgataattaatgagaatgctgatccaagagtattggaagatctttcagcttatatgaaagcaattgttccggaaataggattcaaatctattcttgataatgggaaaatagaaaagtatcttcattcggaagaaggagttgatgatatgccagctcatattcgaacaactcttacatcaagctctctaactcttagcattaacgaatcaaagctagatcttggagtatggcaagcagtatacctctgggagcatagatattcagacaatattaggaatataaacctgcattcaatatgtgagacacttaaacccaagccaccagattctcatgtaactttaaacacaacttcaattaatactcactcttccaaaattaataaaattgcattaaataattatagttcaatcaattaa

SEQ ID NO: 94581 - protein, 186 aa, Prochlorococcus marinus subsp. marinus str. CCMP1375
MEQFLSELSLKTHGEGFTDITNDINSWIKKKKIRKGILIITSKHTSCSLIINENADPRVLEDLSAYMKAIVPEIGFKSILDNGKIEKYLHSEEGVDDMPAHIRTTLTSSSLTLSINESKLDLGVWQAVYLWEHRYSDNIRNINLHSICETLKPKPPDSHVTLNTTSINTHSSKINKIALNNYSSIN

SEQ ID NO: 94582 - DNA, 486 bp, Prochlorococcus marinus subsp. pastoris str. CCMP1986
  CDS (1)..(486): transl_table=11
atggaacaaattttctcaaaattaaactttataaccaacggggagggtttcactgatattactgatgatttaaatttattcatacaaaaaagtaattttgattcaggaattttttgcttaacctcactacacacaagttgtagtttgactattaatgaaaatgcagatccaaatgttcttaaagatctagaaaagttcattaaatctatagttccgtacaactgttatacctcgttatcaaaagaaagagaggagatatattatgaacattttcaagaaggagaggacgatatgccagctcatattaaaactgctttaacaaatactaatttgtctttaagctttcaaaaaggtagactcatacttggcacttggcaagcaatttatttatgggaacatcgatttagtacaaaaaaaagaagtataagtgttcatattattggaaaaaaaaaatcaagtatctatagtagtaaacagtcacaataa

SEQ ID NO: 94583 - protein, 161 aa, Prochlorococcus marinus subsp. pastoris str. CCMP1986
MEQIFSKLNFITNGEGFTDITDDLNLFIQKSNFDSGIFCLTSLHTSCSLTINENADPNVLKDLEKFIKSIVPYNCYTSLSKEREEIYYEHFQEGEDDMPAHIKTALTNTNLSLSFQKGRLILGTWQAIYLWEHRFSTKKRSISVHIIGKKKSSIYSSKQSQ

SEQ ID NO: 94584 - DNA, 699 bp, Prochlorococcus marinus str. MIT 9313
  CDS (1)..(699): transl_table=11
gtggcgagtgttgtctttgccagcacaaggtttcgagacaagccatcgggtagatatttttcagctgcttcagacccgctgcgcatggagagaggcagagccactcgcaatcgcagcaagcaaagcaatgatcgccagcagaccctttcagcgaaacagcacgccccattgctgctaggtcaactgtgtagaccaaacttaggcagccagtcactccccccaacagcgatgtctcttcagcaagcgttacaccagctggagatcgtcacgacaggagaaggcttcacagacctcactgcccaactcaatcattggattgcctcctcgagaattaagcgtggcgttctccacctcacggcattgcacaccagctgcagcctcaccatcaacgaaaacgcagacccacgagtgctcacagatctctcggcttatctcaaggctctcgtgccagaagagggcttccggccgatcaacgacctaggcgcgcggcgttcctatctccatgacgatgaagggccagacgatatgcccgcgcatatccgcacagctctcacctgcagcactcttagcctcagcattgatcaaggcaggctgctactaggcatctggcaggcgatttatctctgggaacatcgccggcatggaagccacaggcgggtggcgatccacgcgattggcgaaatgaacagccatgaatga

SEQ ID NO: 94585 - protein, 232 aa, Prochlorococcus marinus str. MIT 9313
MASVVFASTRFRDKPSGRYFSAASDPLRMERGRATRNRSKQSNDRQQTLSAKQHAPLLLGQLCRPNLGSQSLPPTAMSLQQALHQLEIVTTGEGFTDLTAQLNHWIASSRIKRGVLHLTALHTSCSLTINENADPRVLTDLSAYLKALVPEEGFRPINDLGARRSYLHDDEGPDDMPAHIRTALTCSTLSLSIDQGRLLLGIWQAIYLWEHRRHGSHRRVAIHAIGEMNSHE

SEQ ID NO: 94586 - DNA, 564 bp, Synechococcus sp. WH 8102
  CDS (1)..(564): transl_table=11
atggccttgcagcaggttctgcatcagctcgagctggccacccagggccagggtttcacgcgattggatcgccagatcaaccaatggcttcttggcaccgggctctggcagggaatgctgcatctcagctgccttcacaccagctgcagcctcacaatcaatgaaaacgctgatccacgcgttctgaacgatctcgccgactggatggcagacatcgttcccgagtcccgtcgctacagccatgacgacgagggagccgacgacatgccggcccacatccgcacagcgctcaccgctcagaccctgagcctcagcgttgacgccggccagctggtgttgggcacttggcaggcggtctacctctgggagcaccgacgccgtccccatcaacggcgcgtgctgtgtcaattccttggggaaccagctgcaatggagacaacaagcaaaaccctgaaccagcagatccaggcacgccacgaccccgaggcctgggctgccgatggaggaatcgaaacggaggtggacttgttggtggaccaactgcacgacctggcggacacctga

SEQ ID NO: 94587 - protein, 187 aa, Synechococcus sp. WH 8102
MALQQVLHQLELATQGQGFTRLDRQINQWLLGTGLWQGMLHLSCLHTSCSLTINENADPRVLNDLADWMADIVPESRRYSHDDEGADDMPAHIRTALTAQTLSLSVDAGQLVLGTWQAVYLWEHRRRPHQRRVLCQFLGEPAAMETTSKTLNQQIQARHDPEAWAADGGIETEVDLLVDQLHDLADT

SEQ ID NO: 94588 - DNA, 420 bp, Gloeobacter violaceus PCC 7421
  CDS (1)..(420): transl_table=11
atgatgcaccaccagcagatactcaagctgcagacccgaggccagtctctctaccctatcaccggggcagtgggcgaagtggtgaatcaatccggtgtacagatgggcttatgcaccttgtttttgcgccacacttccgccagcctgcttatccaggagaacgccgatcccgatgtactggccgatctggagagctttttggccaagctcgtgccggaggacgcccggtcctaccgccacaacgccgaggggccggacgatatgcccgcccatattcgcaccgccctcacccacaccagcgagaacattccggtgagcgacggccgactggtactgggcacctggcagggcatctatatctgggagcaccgccgccaccgccaactgcgcgaggtcgtggtgcacatcgccggaaattaa

SEQ ID NO: 94589 - protein, 139 aa, Gloeobacter violaceus PCC 7421
MMHHQQILKLQTRGQSLYPITGAVGEVVNQSGVQMGLCTLFLRHTSASLLIQENADPDVLADLESFLAKLVPEDARSYRHNAEGPDDMPAHIRTALTHTSENIPVSDGRLVLGTWQGIYIWEHRRHRQLREVVVHIAGN

SEQ ID NO: 94590 - DNA, 420 bp, Vibrio vulnificus YJ016
  CDS (1)..(420): transl_table=11
atgtggtatcagaagtgtttaaccctacccgtccgaaagcgtggctttcatctgatcactgatgaaattgaacaacaattaccagaactatcaaaattatccgttggtttgttacatctttttatccaacatacctcagccagtttgaccatcaatgagaacgcagaccccaccgttcgacatgatatggagcaacactttaatcgctttgttcctgaaagggccccttactatcagcatgattatgaaggcgatgatgatatgcccgcccacataaaagcctcaacattaggatgccatctcactattccaatctctcaggggcgtttagcgttaggtacttggcaagggatctacttaggcgaacatcgagatcatggtggacaacgtcgtatagtggccacgctctatggggaataa

SEQ ID NO: 94591 - protein, 139 aa, Vibrio vulnificus YJ016
MWYQKCLTLPVRKRGFHLITDEIEQQLPELSKLSVGLLHLFIQHTSASLTINENADPTVRHDMEQHFNRFVPERAPYYQHDYEGDDDMPAHIKASTLGCHLTIPISQGRLALGTWQGIYLGEHRDHGGQRRIVATLYGE

SEQ ID NO: 94592 - DNA, 474 bp, Rhodopseudomonas palustris CGA009
  CDS (1)..(474): transl_table=11
atgagttcatcacgtactctcagccgcgcgccgctggcacgcgcaaccgccaccagcgttgcttcgtcggttctgacggtgcagacgggtgggaccggcttcaccgacatcacgcgcgagatcgcggcgttcgttgccgaggcgcaggcgaaagacggcggcgtcaccgtgttcgtgcgccacacctcagcgtcgctgacgatccaggaaaatgccgatccgaccgtgctgacagatctatcgacggtgctgaaccggctcgcgccggagaatgccggttggcgtcacgacaccgaagggccggatgacatgccggcccacgtcaagacgatgctgacgtcggtctcgctgcagattccagtgctgcagggcaggctcgctctcggcacctggcagggcgtctatctgatcgaacaccgcgcgcggccgcatcgccgagaggtcgtgctgcagttcatcggcacgacgggttaa

SEQ ID NO: 94593 - protein, 157 aa, Rhodopseudomonas palustris CGA009
MSSSRTLSRAPLARATATSVASSVLTVQTGGTGFTDITREIAAFVAEAQAKDGGVTVFVRHTSASLTIQENADPTVLTDLSTVLNRLAPENAGWRHDTEGPDDMPAHVKTMLTSVSLQIPVLQGRLALGTWQGVYLIEHRARPHRREVVLQFIGTTG

SEQ ID NO: 94594 - DNA, 441 bp, Magnaporthe grisea 70-15
  CDS (1)..(441)
atgagctggttccagaagcaattcaccctacccgccaagtctcgaggctcgtatctgattactgacacggtggtgaaggagatccccgagatcaagaactacaaagttggcttgctcaacttgtttgtccagcacacaagttgtgcgctttctctgaacgaaaactgggatgaagacgtgagggaggatatgagcaatgctctcgatcgcattgcgcctgcggctggcccaaagggagaatctttgtacctgcacagcgctgagggtcccgatgatatgccggctcacatcaaatcagcactggttggggcctctgttacgataccaatctcgaacggcaagctcgcaacgggaacctggcaaggaatctggtatctcgaattcagagcttccaagcatcaacgcaagatcgttgccacaatccaaggcgagaagatgtaa

SEQ ID NO: 94595 - protein, 146 aa, Magnaporthe grisea 70-15
MSWFQKQFTLPAKSRGSYLITDTVVKEIPEIKNYKVGLLNLFVQHTSCALSLNENWDEDVREDMSNALDRIAPAAGPKGESLYLHSAEGPDDMPAHIKSALVGASVTIPISNGKLATGTWQGIWYLEFRASKHQRKIVATIQGEKM

SEQ ID NO: 94596 - DNA, 567 bp, Gibberella zeae PH-1
  CDS (1)..(567)
atgccccactatgacggacttttccactttatctggacacttccttttactctactcgttttctcaggatcatcacaaccccgtccaactgctctcccagtaatcgaccactcaacagcaacaagtatgagctggttccagaagcaattcaccctgcccgccaagtcgcgaggatcttaccttatcactgatcaggttgtctcttctcttcctgagattcgtgacttcaaagttggccttttgaatcttttcgttcagcacacaagctgtgctctgagcttaaacgagaactgggactctgatgttcgtgaggacatgagtgatgctctggacagaattgctccggccgagggaccaaaaggagaggccctttaccgacatgatgctgagggtcctgacgacatgcctgctcatatcaaatctgcactcattggagcgagtgtcaccatccccatcaaggatggaaagctggctactggaacatggcaaggaatctggtatctcgagttccgcgcagcccgccatcagcgacgagtcgtcgcaactatccagggggaaaaggcttaa

SEQ ID NO: 94597 - protein, 188 aa, Gibberella zeae PH-1
MPHYDGLFHFIWTLPFTLLVFSGSSQPRPTALPVIDHSTATSMSWFQKQFTLPAKSRGSYLITDQVVSSLPEIRDFKVGLLNLFVQHTSCALSLNENWDSDVREDMSDALDRIAPAEGPKGEALYRHDAEGPDDMPAHIKSALIGASVTIPIKDGKLATGTWQGIWYLEFRAARHQRRVVATIQGEKA

SEQ ID NO: 94598 - DNA, 513 bp, Apis mellifera
  CDS (1)..(513)
atggcctcgtcaaatagaagaattcaaatcggttctgcttggtttcaaacaaagattaacctaagaccacagcgccgaggtattcatcacgttaccgaagaaatcttaagaagaattccagaactctgcgaattttcagttgggctttgtcatatacaaattcttcacacatcagcaagtttagcactaaatgaaaattgggatccagatgttagagatgatgtagaaatgatgcttaataaaatagttcctgaaggtttggcctatagacacagttgtgaaggaccagatgatatgccagcacatgtaaaggcatgttttctgggctcttcattgagtattccaattactgatggcaagttgactttgggtacatggcaaggaatttggttgtgtgaacaccgtaatgatgctggaagtcgtaaagtagctattacattgactggttgtctcagggatcctgcacgtagtcctttgagtcctgttagtcctattgcttctactagcagctag

SEQ ID NO: 94599 - protein, 170 aa, Apis mellifera
MASSNRRIQIGSAWFQTKINLRPQRRGIHHVTEEILRRIPELCEFSVGLCHIQILHTSASLALNENWDPDVRDDVEMMLNKIVPEGLAYRHSCEGPDDMPAHVKACFLGSSLSIPITDGKLTLGTWQGIWLCEHRNDAGSRKVAITLTGCLRDPARSPLSPVSPIASTSS

SEQ ID NO: 94600 - DNA, 435 bp, Debaryomyces hansenii CBS767
  CDS (1)..(435)
atgacaacatcttgggatcaagctaaatttgcattaaaacctaaaactaagggattccatttagttacggatgaaattctcagtaacgttcctgagataagggactataaaataggccaattgaatttattcatccaacacactagtgctggtttgaccatcaacgagaattatgatcctgacgtgagaactgatttgattaatattttcgatagaattgtcccggacgatgccgaatatatccatatattagagggacttaatgatgcgaaatctcatggacaggctacgcttactggcttaaatgttacagttccaataagtaatggtaaattagcattcggaacgtggcaaggaatttaccttgctgaattcagggacaataaaccctcgagaagaattgtagcaaccatcaatggattgaaggaaaactag

SEQ ID NO: 94601 - protein, 144 aa, Debaryomyces hansenii CBS767
MTTSWDQAKFALKPKTKGFHLVTDEILSNVPEIRDYKIGQLNLFIQHTSAGLTINENYDPDVRTDLINIFDRIVPDDAEYIHILEGLNDAKSHGQATLTGLNVTVPISNGKLAFGTWQGIYLAEFRDNKPSRRIVATINGLKEN

SEQ ID NO: 94602 - DNA, 429 bp, Yarrowia lipolytica CLIB122
  CDS (1)..(429)
atgacctggacacaaaagacaatcactctgccccccaagaccaagggatcgtacctggtgaccgacgagattgtcagccaggtgccggagatcaagaactacaaggtcggcatggccaacttcttcatgcaacacacctcggctgctctgactctcaacgagaactgggacacagacgtgcgagcagatatgaccgatgctctggcccgaattgctcctgagtccgatgtctaccgacacagttgcgagggccccgatgacatgcctgctcacattcgatcttctctggtcggcgtgtccatcaatgtccccatcaaggacggatatctggccaccggaacctggcagggaatctggtacctcgagttccgaaagatgcggcatacccgaaaggttgttgtgactcttcagggtgaggagcgtagctga

SEQ ID NO: 94603 - protein, 142 aa, Yarrowia lipolytica CLIB122
MTWTQKTITLPPKTKGSYLVTDEIVSQVPEIKNYKVGMANFFMQHTSAALTLNENWDTDVRADMTDALARIAPESDVYRHSCEGPDDMPAHIRSSLVGVSINVPIKDGYLATGTWQGIWYLEFRKMRHTRKVVVTLQGEERS

SEQ ID NO: 94604 - DNA, 522 bp, Aspergillus nidulans FGSC A4
  CDS (1)..(522)
atgccttggacgcaaaagacatttactctgccctcaaaatcgcgcggctcctacctcataactgaccacatcctttcatcgctgccggaaatccgcgagtacaaggtcggcatgttgaacctcttcgttcagcacacctcctgcgcgctctcgctaaatgagaactgggacgaggatgtccgcgaggatatgtctgatgcgctggaccgcattgcgcccgctgacaagaaggggaacctttatcggcacagtgcggagggggaggatgatatgccggcacatatcaagtctgcgctcattggagcgtcggtcaacatacctatttcgaacggcaaattggcgacgggaacgtggcagggcatttggtacttggaattccgggctatgaggcatacgagaaaggttgttgctactattcagggggagaaggatatcagggtgctactattagttgtggcaccctcagtcacacgctggttttcgttcacctcctcggcagcaccggtgggttcaagagggtag

SEQ ID NO: 94605 - protein, 173 aa, Aspergillus nidulans FGSC A4
MPWTQKTFTLPSKSRGSYLITDHILSSLPEIREYKVGMLNLFVQHTSCALSLNENWDEDVREDMSDALDRIAPADKKGNLYRHSAEGEDDMPAHIKSALIGASVNIPISNGKLATGTWQGIWYLEFRAMRHTRKVVATIQGEKDIRVLLLVVAPSVTRWFSFTSSAAPVGSRG

SEQ ID NO: 94606 - DNA, 426 bp, Candida albicans SC5314
  CDS (1)..(426): transl_table=12
atgtcctgggatcaaactaaatttacattaagcccaaaaagtaaaggatgttaccttatcactgatgacgttatcagaagtgttcctcaaatcaaggattatgaaatgggtattttgaatttgtttttacaacatactagtgctgctttgtcaatcaatgaaaactgggatcctgatgtgagaacagatttggacaagtctttggatagaattgccccggaaggagatttctatttacacgacgccgagggaccagatgactctgttctgcatatcaaaagtagtactataggtgtcagcttatctattcctataaccaatggcaagttaagtcttggacagtggcaggggatctacctttgtgaatttagaaggtacagacatagcagaaccattgttgtcacaattaatgggaaaaagaaatag

SEQ ID NO: 94607 - protein, 141 aa, Candida albicans SC5314
MSWDQTKFTLSPKSKGCYLITDDVIRSVPQIKDYEMGILNLFLQHTSAALSINENWDPDVRTDLDKSLDRIAPEGDFYLHDAEGPDDSVSHIKSSTIGVSLSIPITNGKLSLGQWQGIYLCEFRRYRHSRTIVVTINGKKK

SEQ ID NO: 94608 - DNA, 513 bp, Tribolium castaneum
  CDS (1)..(513)
atggcttcttcggcgagaattatccaaagtaattccgcctggtttcagaagaaaatcaatttgaggccgcagcacaggggcgtacatctggtcactgaggagatcctcaggcaggtgcccgaactgtcgcagttcgccatgggcctctgtcatgtacagatcttgcataccagcgccagtctggccctcaacgagagttgggacccggacgtcagagacgacatggagatgatgttgaacaagattgtgcctgaggggctgccctataggcattcgtgcgagggccccgatgacatgccggcacacgtgaaggcatgcttcctgggctcatcgttgaccattccgataaccgagggcaaattgaatttagggacgtggcaaggcgtctggctgtgcgaacacagggaccacgcgggctcacgtaaactgctcattaccttgaacgggtgtctgcgcgacgccacctgcactcctctgtctcccgtcagcccaatggccagcacgagcagttag

SEQ ID NO: 94609 - protein, 170 aa, Tribolium castaneum
MASSARIIQSNSAWFQKKINLRPQHRGVHLVTEEILRQVPELSQFAMGLCHVQILHTSASLALNESWDPDVRDDMEMMLNKIVPEGLPYRHSCEGPDDMPAHVKACFLGSSLTIPITEGKLNLGTWQGVWLCEHRDHAGSRKLLITLNGCLRDATCTPLSPVSPMASTSS

SEQ ID NO: 94610 - DNA, 456 bp, Prochlorococcus marinus str. AS9601
  CDS (1)..(456): transl_table=11
atggaacaaatattttcaaaattaaaattcataaccaatggcgagggttttattgatatcacatatgatttaaatttatgtgttgaaaaaaataattttcattccggaattttaaatttaacttcacttcatacaagttgcagtttaactattaatgagaacgcagatcccaatgtactgagggacctaaaaaagtatatgcaatctatagtcccctataattcctacttaaccttatcaaaaaatagagaagaaatatcctataaacattatcaagaaggggctgacgatatgccagcacatattaaaacatccctaacaaacacttgtttatctttgagttttcaagacggtaaaattatgcttggcacatggcaagcagtttatttatgggaacatcgatttgatcaaaaagaaagaatcattaatgtacatataattggtgagaaaacgtaa

SEQ ID NO: 94611 - protein, 151 aa, Prochlorococcus marinus str. AS9601
MEQIFSKLKFITNGEGFIDITYDLNLCVEKNNFHSGILNLTSLHTSCSLTINENADPNVLRDLKKYMQSIVPYNSYLTLSKNREEISYKHYQEGADDMPAHIKTSLTNTCLSLSFQDGKIMLGTWQAVYLWEHRFDQKERIINVHIIGEKT

SEQ ID NO: 94612 - DNA, 456 bp, Prochlorococcus marinus str. MIT 9515
  CDS (1)..(456): transl_table=11
atggaacaaattttttcaaaattaatctttaaaactaatggagaggggttaactgatattactcacaatttaaatttatttatacaaaaaagtaacttccaatcaggtattttaaatttaacatcacttcataccagttgtagtttaactataaatgagaatgctgatccaaatgttttaaaggacttaaaaaaattcatgaaaagtatagtccctaacaattgctatacctccttatcgaaagaaagaaaggaaatatactatgaacattttcaggaaggagaggacgatatgccagctcatattaaaacagctttaactaatactaatttgtctttaagttttcaagaaggtgaaatcatacttggcacttggcaagctatttatttatgggaacatcgatttagtaaaaaagaaagaattataagtgttcatattattggttcaaaaagttaa

SEQ ID NO: 94613 - protein, 151 aa, Prochlorococcus marinus str. MIT 9515
MEQIFSKLIFKTNGEGLTDITHNLNLFIQKSNFQSGILNLTSLHTSCSLTINENADPNVLKDLKKFMKSIVPNNCYTSLSKERKEIYYEHFQEGEDDMPAHIKTALTNTNLSLSFQEGEIILGTWQAIYLWEHRFSKKERIISVHIIGSKS

SEQ ID NO: 94614 - DNA, 462 bp, Prochlorococcus marinus str. NATL1A
  CDS (1)..(462): transl_table=11
atggaacagattttatcaactattgatttcgagacgacgggacaaggttttactgacataacaaaagacattaatcattggatcaaatataaaaagcttaaaaaaggaatacttcttatttttctaaaacatacaagctgtagtttaattataaatgaaaatgcggatattaatgttcttaaagacctatcagcctacatgaatgctattgtcccagaggagggagtttatcccctcaacaaaaatcttaaaaaaatagaatatcttcattcagaagaaggtttagacgatatgcctgctcatataagaacaatgcttacttcaaataatttaagcttcagtgttgttgacggtaaattagaaataggcttatggcaagccatatatatatgggaacatagaacatcaaataaatcaaggtcattacaattacatgcaattggtgattttgatttaaattaa

SEQ ID NO: 94615 - protein, 153 aa, Prochlorococcus marinus str. NATL1A
MEQILSTIDFETTGQGFTDITKDINHWIKYKKLKKGILLIFLKHTSCSLIINENADINVLKDLSAYMNAIVPEEGVYPLNKNLKKIEYLHSEEGLDDMPAHIRTMLTSNNLSFSVVDGKLEIGLWQAIYIWEHRTSNKSRSLQLHAIGDFDLN

SEQ ID NO: 94616 - DNA, 396 bp, Desulfovibrio vulgaris subsp. vulgaris str. Hildenborough
  CDS (1)..(396): transl_table=11
atggagaccatcaccctgcataccaccacccgcgaacagatgctcgacatcacgtccgccatccgcgaactcgtgagcacacgaggctggcgtgacggggcgttgctgctcttctgcccgcataccacgggtgcgctcaccgtcaacgaagccgcagacccggacgtggcacgcgacatgaccgtgaacatgggacgcctcgtgccgcgccatggcgactatcgccatgccgaaggcaacagcgacgcgcacatcaagacgagccttttcggcccttcactcatgctcatcgtggacggcggcgaggtacgcctcggcacatggcagggcatctatttctgcgaatgggacggcccccgttcgcgcaagctgtgggcccaatggctggcccagtga

SEQ ID NO: 94617 - protein, 131 aa, Desulfovibrio vulgaris subsp. vulgaris str. Hildenborough
METITLHTTTREQMLDITSAIRELVSTRGWRDGALLLFCPHTTGALTVNEAADPDVARDMTVNMGRLVPRHGDYRHAEGNSDAHIKTSLFGPSLMLIVDGGEVRLGTWQGIYFCEWDGPRSRKLWAQWLAQ

SEQ ID NO: 94618 - DNA, 420 bp, Erwinia carotovora subsp. atroseptica SCRI1043
  CDS (1)..(420): transl_table=11
atgtggacgcaatatgaaatccgcctgaagccgaaagccagaggcttccatctggtgactgacgaaatactggcgcaggttgtcgcactgcgccagataaaggtcgggttgatgcatgtgttcatcaaacatacttcggcggcgctgacgattaatgagaatgccgatcccacggtacggcaggatttcgagagcttctttaatcgtttagtgccggaggatgagccgtactaccgccatacttatgaaggtagcgacgacatgcccgcgcacctgaaaggcagcctgctaggaaatagcctgacgattcccatcaccaacggacgcctgaacatcggcacttggcagggcatttacctgtgcgaacaccgcaaccacggcggcagccgctcgctggttgtcacgctgaatggggaataa

SEQ ID NO: 94619 - protein, 139 aa, Erwinia carotovora subsp. atroseptica SCRI1043
MWTQYEIRLKPKARGFHLVTDEILAQVVALRQIKVGLMHVFIKHTSAALTINENADPTVRQDFESFFNRLVPEDEPYYRHTYEGSDDMPAHLKGSLLGNSLTIPITNGRLNIGTWQGIYLCEHRNHGGSRSLVVTLNGE

SEQ ID NO: 94620 - DNA, 405 bp, Legionella pneumophila subsp. pneumophila str. Philadelphia 1
  CDS (1)..(405): transl_table=11
atggtacaacatgatataatcaaactgcctccaaaaccttatggtgctcatctaatcactaatgaagtgatgcaaaaaattacgttgaggggtaccggattattacatttatttattcagcatacctctgcggcacttgccttaaatgaaaatgcttcccctgatgtattgattgatctaaaccatttctttactcaacttgttcctgaacatcagcattatcgtcatgatatagaggggccagatgatatgcccgcccatattaaatcaattttgtgtggctcatctttaactattccatttcaggaaaacaagttgctattgggtgtttggcaaggcatttatttaatggaattcagaaaacaagcaggagcaagaacaattgttgccagtcaattgatttag

SEQ ID NO: 94621 - protein, 134 aa, Legionella pneumophila subsp. pneumophila str. Philadelphia 1
MVQHDIIKLPPKPYGAHLITNEVMQKITLRGTGLLHLFIQHTSAALALNENASPDVLIDLNHFFTQLVPEHQHYRHDIEGPDDMPAHIKSILCGSSLTIPFQENKLLLGVWQGIYLMEFRKQAGARTIVASQLI

SEQ ID NO: 94622 - DNA, 420 bp, Methylococcus capsulatus str. Bath
  CDS (1)..(420): transl_table=11
atgtggtttcagaagacgatcgttctcaagccccgctcgcggggcttccatctggtcaccgcggaaatcacggcgaacctgcccgaactcgcgcggttccgtcagggtatcgcccatttcttcatccaacacacttccgcttccctgaccatcaacgaaaacgccgacgccgacgtgcgtagcgatctcgaggcgtatctcctggcccaggtgccggagcgcgcgccctattaccgccataccctggaaggggacgacgatatgccggcccacatcaaagccgttctggtcggcaacagcgtgaccgttcccctacggcagggccggctggccctgggaacctggcagggaatctatctgggcgagcaccggaaccacggcggcagccgttccctggtggccaccctgcacggcgactga

SEQ ID NO: 94623 - protein, 139 aa, Methylococcus capsulatus str. Bath
MWFQKTIVLKPRSRGFHLVTAEITANLPELARFRQGIAHFFIQHTSASLTINENADADVRSDLEAYLLAQVPERAPYYRHTLEGDDDMPAHIKAVLVGNSVTVPLRQGRLALGTWQGIYLGEHRNHGGSRSLVATLHGD

SEQ ID NO: 94624 - DNA, 414 bp, Azoarcus sp. EbN1
  CDS (1)..(414): transl_table=11
atggcttaccaggaaacgttcgaaatccgcaccagcgggcgagggatgagcgacgtgaccggccaagtcgccgcgatcgtcgaacgcgcgccgaagggcgcggggctcgctcatgttttcgtccggcacacgagctgttcgcttctgatgaccgagaacgccgaccccgacgtgcggcgcgacctcgagacgcttgctcgccgctgggcgccggacggcgatccggcgtaccgacacgacctcgaaggcgacgacgacatggcggcgcacgcgcgctcggtgctgagcggcaccgacgtgacggtgccgttcaacgacgggcagttgctgctcgggacgtggcaggggatctacctgtgggagcatcgggcgcggggccatatgcggcaagtcgtcgtcacgctgatcgagtga

SEQ ID NO: 94625 - protein, 137 aa, Azoarcus sp. EbN1
MAYQETFEIRTSGRGMSDVTGQVAAIVERAPKGAGLAHVFVRHTSCSLLMTENADPDVRRDLETLARRWAPDGDPAYRHDLEGDDDMAAHARSVLSGTDVTVPFNDGQLLLGTWQGIYLWEHRARGHMRQVVVTLIE

SEQ ID NO: 94626 - DNA, 411 bp, Silicibacter pomeroyi DSS-3
  CDS (1)..(411): transl_table=11
atgctgaccgagttttcgatctcgacccggggcgtgggcctttacgagtttaccggcgaggtgacccgctggctggcggggcagggcgacgggctgctgacgctgatggtgcggcatacctcgtgctcgctgttgatccaggaaaacgccgacccagaggtgcagagcgatctgaccgcctatttcgaccggctggtgccgcccgccgatcacccctcgatgcgctatctgcgccatacctacgaaggccccgatgacatgcccgcccatatcaaggcggcgctgatgccggtgtcgctgggcattccggtgcgggcgggggcgcccatgctgggcacctggcagggtctctatctggtcgaacaccgccgcgcgccccatgaccgccggatcgccgcccatttcgcctga

SEQ ID NO: 94627 - protein, 136 aa, Silicibacter pomeroyi DSS-3
MLTEFSISTRGVGLYEFTGEVTRWLAGQGDGLLTLMVRHTSCSLLIQENADPEVQSDLTAYFDRLVPPADHPSMRYLRHTYEGPDDMPAHIKAALMPVSLGIPVRAGAPMLGTWQGLYLVEHRRAPHDRRIAAHFA

SEQ ID NO: 94628 - DNA, 417 bp, Dehalococcoides ethenogenes 195
  CDS (1)..(417): transl_table=11
gtgcctgactccctgcccctgtaccgccttgaaatacccagccgcagccagaccgaatttatagatattaccagccggattagttcgcttataacccaaagcggtgttacctccggcctgtgccaggtatttgtcccccacacaaccgccgggctgaccataaatgaaaatgccgaccctgatgttataaccgatatcaaagcccagctggaacggatagtcccggctgttactcccttcctccattcggaaggcaactcggccgcccatgtaaaaaccagccttatgggcagcagcctgaacctgattatagaagaaggcagacttctgctggggacttggcagggtatttaccttgcagaatttgacggcccgcgcagacggactgtatacataaaagttctcaaagaaaactaa

SEQ ID NO: 94629 - protein, 138 aa, Dehalococcoides ethenogenes 195
MPDSLPLYRLEIPSRSQTEFIDITSRISSLITQSGVTSGLCQVFVPHTTAGLTINENADPDVITDIKAQLERIVPAVTPFLHSEGNSAAHVKTSLMGSSLNLIIEEGRLLLGTWQGIYLAEFDGPRRRTVYIKVLKEN

SEQ ID NO: 94630 - DNA, 411 bp, Bacteroides fragilis NCTC 9343
  CDS (1)..(411): transl_table=11
atggcaacaacctttgacatacaattgccacactatccacgtggcttccatctgatcacccgtgacatcctttctctccttccggacctgccggaaaacggactgctggttgtgttcatcaagcatacctcagcaggcatcactatcaacgaaaatgccgatccggacgtgcgtcatgacttcaatacgtttttcaacaaactcgtacctgacggtgccccttatttcgtccacacccttgaaggcccggacgatatgagcgcacacattaaggcttcactaatcggaacctcagtcagtatccccatccggaatcaccgtctgaacctcggaacctggcaagggatctacttgtgtgaattccgggacgggggcgacaaacgcaaactgagtattaccattttggagtaa

SEQ ID NO: 94631 - protein, 136 aa, Bacteroides fragilis NCTC 9343
MATTFDIQLPHYPRGFHLITRDILSLLPDLPENGLLVVFIKHTSAGITINENADPDVRHDFNTFFNKLVPDGAPYFVHTLEGPDDMSAHIKASLIGTSVSIPIRNHRLNLGTWQGIYLCEFRDGGDKRKLSITILE

SEQ ID NO: 94632 - DNA, 426 bp, Pseudomonas syringae pv. syringae B728a
  CDS (1)..(426): transl_table=11
atgtggcatcaatccaggattgccttgcgggccaggccccgcgggttccatctggtgactgacgagatagtcgcggggttgcccccgttgcgcggttgtcgtgtcgggctactgcatgtatggctgcaacatacctcggcttcgttgaccgtcaacgaaaatgccgacccggcggtacgtcgcgactttgagcgttttttcaaccgtctggtgccccagggcgtggacggctacgaacatgacgacgaaggccctgatgacttgccagcgcatttcaaggccagtctgctgggctgccagttgctgttgccggttacggcagggcgactggcgctgggcacctggcaaggtatttacctgggcgaacatcgagacgctggtgggtctcgtaacgtcctggccacccttcagggtgagtggacataa

SEQ ID NO: 94633 - protein, 141 aa, Pseudomonas syringae pv. syringae B728a
MWHQSRIALRARPRGFHLVTDEIVAGLPPLRGCRVGLLHVWLQHTSASLTVNENADPAVRRDFERFFNRLVPQGVDGYEHDDEGPDDLPAHFKASLLGCQLLLPVTAGRLALGTWQGIYLGEHRDAGGSRNVLATLQGEWT

SEQ ID NO: 94634 - DNA, 426 bp, Pseudomonas fluorescens Pf-5
  CDS (1)..(426): transl_table=11
atgtggcaacagaccctgattaccctgcgggccaggccccggggctttcatctggtgacggacgagttgctcgccggcctgcctgagttgaaggcatgtcgggttggtctgctgcatctgtggctgcaacatacctcggcctcgttgaccatcaacgagaacgccgatccggcggtacggcgtgacttcgagcgttacttcaacaccctggtgcctcaaggcatggccgggtacgaacataacgacgaaggcgcggatgacctgccggcgcacttcaaggccagtttgctaggctgtcagctgactttgccggtagcggcggggcgtctggcgttgggcatctggcaaggcgtttatctgggcgagcatcgcgatcatggcggtgctcgcaaagtccttgccaccttgcacggtgataaggcataa

SEQ ID NO: 94635 - protein, 141 aa, Pseudomonas fluorescens Pf-5
MWQQTLITLRARPRGFHLVTDELLAGLPELKACRVGLLHLWLQHTSASLTINENADPAVRRDFERYFNTLVPQGMAGYEHNDEGADDLPAHFKASLLGCQLTLPVAAGRLALGIWQGVYLGEHRDHGGARKVLATLHGDKA

SEQ ID NO: 94636 - DNA, 420 bp, Colwellia psychrerythraea 34H
  CDS (1)..(420): transl_table=11
atgtggtatcaaactgaaataacgttgaaagcaagaaaacgtggttttcatttaatcactgatgaagtcctaaaacaactgcacgagctgaacaaggttaactgtggcattcttcatctttttataaaacacagctctgcttccattacccttaatgaaaatgccgacccaacggtacgctcagatatggaagcgcattttaatcactttgtccctgaaagagcgccttattatcagcatacttacgaaggtgatgatgatatgcctgcccatataaaagccagtctactgggtaatagccttagtttacctattagtcatgggcaattaaatattgggatttggcagggaatatatttaggtgagcatagagaccatgccagcaaccgaacgattgtggctaccatcaatggagagtaa

SEQ ID NO: 94637 - protein, 139 aa, Colwellia psychrerythraea 34H
MWYQTEITLKARKRGFHLITDEVLKQLHELNKVNCGILHLFIKHSSASITLNENADPTVRSDMEAHFNHFVPERAPYYQHTYEGDDDMPAHIKASLLGNSLSLPISHGQLNIGIWQGIYLGEHRDHASNRTIVATINGE

SEQ ID NO: 94638 - DNA, 414 bp, Dechloromonas aromatica RCB
  CDS (1)..(414): transl_table=11
atggccgaacagcagcgcctcgccatcaccacccgcggccgcggttccatcgaaatcaccgatgaaattgccgccgtggtgcgcaaggccaaagtcgactccggcatcgcccatattttcgtccgccacaccagttgcgggctggcgatcactgaaaacgccgatcccagcgttcgtcgcgatctcgaaatgctgatgcagcgctgggcacctgatggcgacccggactatcgccacgacatggaaggcgatgacgacatggcggcccatgcccgctcgctgctgacgggtgtctcgctaagcgttccgttcgccggcggcaggctgctgctcggcacctggcaaggcatctacctgttcgaacaccgtagccaggctcaccagcgggaaatcgtcgttaccctactcggctaa

SEQ ID NO: 94639 - protein, 137 aa, Dechloromonas aromatica RCB
MAEQQRLAITTRGRGSIEITDEIAAVVRKAKVDSGIAHIFVRHTSCGLAITENADPSVRRDLEMLMQRWAPDGDPDYRHDMEGDDDMAAHARSLLTGVSLSVPFAGGRLLLGTWQGIYLFEHRSQAHQREIVVTLLG

SEQ ID NO: 94640 - DNA, 462 bp, Prochlorococcus marinus str. NATL2A
  CDS (1)..(462): transl_table=11
atggaacagattttatcaactattgatttcgagacgaagggacaaggttttactgacataacaaaaaacattaatcattggatcaaatataaaaagcttaaaaaaggaatacttcttatttttctaaaacatacaagctgtagtttaattataaatgaaaatgcggatattaatgttcttaaagacctatcagcttacatgaatgctattgtcccagaggagggagtttatcctctcaacaaaaatcttaaaaaaatagaatatcttcattcagaagaaggtttagacgatatgcctgctcatataagaacaatgcttacttcaaataatttaagcttcagtgttgttgacggcaaattagaaataggcttatggcaagccatctatatatgggaacatagagcatcaaataaatcaaggtcattacaattacatgcaattggtgattttgatttaaattaa

SEQ ID NO: 94641 - protein, 153 aa, Prochlorococcus marinus str. NATL2A
MEQILSTIDFETKGQGFTDITKNINHWIKYKKLKKGILLIFLKHTSCSLIINENADINVLKDLSAYMNAIVPEEGVYPLNKNLKKIEYLHSEEGLDDMPAHIRTMLTSNNLSFSVVDGKLEIGLWQAIYIWEHRASNKSRSLQLHAIGDFDLN

SEQ ID NO: 94642 - DNA, 429 bp, Thiobacillus denitrificans ATCC 25259
  CDS (1)..(429): transl_table=11
atggcatccatgcgtcagatcatcgacaccatcacggtcccgacccgcggcaagggactctacgcctgcaccgacgaaatcctggctcgcgtgcgcgcgagcttgatcgagcgcggcctgctgacgctctacatccgacatacctcggcgagcctcctgatacaggaaaattacgacccgaccgtgcagagcgatctcgaacgctttctgtcgcggctggtgcccgagggcgacccgatttacgaacacgtcctcgaaggtgcggacgatatgccggctcacgtccgcgccgccttgacgcagactcaccttgccattccggtcgccgacggtgtcccgctcctcgggacctggcagggtatctacgtcttcgaacaccggcgcgcgccgcagacgcgcagcgtggtcttgcacctgctcggcgagtag

SEQ ID NO: 94643 - protein, 142 aa, Thiobacillus denitrificans ATCC 25259
MASMRQIIDTITVPTRGKGLYACTDEILARVRASLIERGLLTLYIRHTSASLLIQENYDPTVQSDLERFLSRLVPEGDPIYEHVLEGADDMPAHVRAALTQTHLAIPVADGVPLLGTWQGIYVFEHRRAPQTRSVVLHLLGE

SEQ ID NO: 94644 - DNA, 414 bp, Anabaena variabilis ATCC 29413
  CDS (1)..(414): transl_table=11
atgactcactaccaaaaacttcttagagtttctactaacgggaaatcattctacaatattactgccaaaattgaatctatagttgcagaatcaggtgtagaaactggactttgtactttatttttacgccacacttctgccagtttagtgattcaagaaaatgccgacccagatgtacttgtggatttagctaattatatggctaaacttgtgccagaatcagggaaatatattcatgatgctgaaggtgctgatgatatgccggcacatatccgcacggctttgactcacacttctgaaaatattccgataaatcgtggtcatttggtgttaggaacttggcagggaatatatatttgggaacatcgtcagcgcagtcatgtcagagaattagttgtgcatatttcgcaataa

SEQ ID NO: 94645 - protein, 137 aa, Anabaena variabilis ATCC 29413
MTHYQKLLRVSTNGKSFYNITAKIESIVAESGVETGLCTLFLRHTSASLVIQENADPDVLVDLANYMAKLVPESGKYIHDAEGADDMPAHIRTALTHTSENIPINRGHLVLGTWQGIYIWEHRQRSHVRELVVHISQ

SEQ ID NO: 94646 - DNA, 426 bp, Pseudomonas fluorescens PfO-1
  CDS (1)..(426): transl_table=11
atgtggcaacagactctgataaccctgcgggcacggccccggggctttcatctggtgaccgacgagttgctcgccggcctgcctgaactcaaggcatgccgggtcggtctgttgcatttgtggctgcagcatacctcggcgtcgttgaccatcaacgagaacgccgatccggcggtacgtcgcgacttcgaacgatttttcaatcgtctgatcccacaaggagcagacggctatgagcataacgacgaaggcctggacgacctcccggcgcacttcaaggccagcgtgctgggctgtcagatcagtttgccggtaacggcgggccgactggcactgggtacctggcaaggcgtttatctgggcgagcaccgtgatcatggcggtgcccgtaaagtcctcgccaccttgcacggtgaaggggcataa

SEQ ID NO: 94647 - protein, 141 aa, Pseudomonas fluorescens PfO-1
MWQQTLITLRARPRGFHLVTDELLAGLPELKACRVGLLHLWLQHTSASLTINENADPAVRRDFERFFNRLIPQGADGYEHNDEGLDDLPAHFKASVLGCQISLPVTAGRLALGTWQGVYLGEHRDHGGARKVLATLHGEGA

SEQ ID NO: 94648 - DNA, 420 bp, Burkholderia sp. 383
  CDS (1)..(420): transl_table=11
atgcaacaggcgatcacgcacatcggcatcgacacgcgcggcagcggcctcgtcgaattcacgccgcaggtgcgcgcattcgtcgaccagcaggcgatccgcaccggcctgctcaccgtgttctgccgccatacgtcggcatcgctgctgatccaggagaatgcggatgcgtcggtgcagcgcgacatcgaacgctacttcgcgacgctcgcgcccgaggacgccacgcgctacgagcacgacaccgaaggtgctgacgacatgccggcgcacctgcgcacggcgctcactcaggtgcaattgtcgatcccggtcgagcaggggcgcatggtgctcggcacgtggcagggcatctatctgttcgagcatcgccgcgcggcgcaccgccgcgatatcgtgctgcacctgatcggcgagtaa

SEQ ID NO: 94649 - protein, 139 aa, Burkholderia sp. 383
MQQAITHIGIDTRGSGLVEFTPQVRAFVDQQAIRTGLLTVFCRHTSASLLIQENADASVQRDIERYFATLAPEDATRYEHDTEGADDMPAHLRTALTQVQLSIPVEQGRMVLGTWQGIYLFEHRRAAHRRDIVLHLIGE

SEQ ID NO: 94650 - DNA, 618 bp, Synechococcus sp. CC9605
  CDS (1)..(618): transl_table=11
gtgggtgtgcagcagatcctgcatcagatcacagttcaaaccccggggaggggcttcacccgtctggatgggcggctgaacacctggatccgcagcacggggctggaccagggcgttctgcatctcacctgtctgcacaccagcgccagcctcacgatcaacgagaacgcagatccacgggtgctgcgggacctggatgcatggatggccgatgccgttccggaacaacgccgttatctccatgacgacgaaggtgccgatgacatgccggcccacatccgaaccgcgctcaccagccagaccctgaacctgagcgtcagcaggggccaactgctgctgggcacctggcaagccgtttacctctgggagcaccgcagcgctgctcactccagaacaatcgcctgccacctgttcggtgaaccatccagccgccccacccctgagggcaacacccaaaacacctcagccacgccgcaaaccctgttgaacctgcgcaacggcgaacggatcaatcaagccattcaggcccgccacgaccccaacgcctgggaaaccgacgacggcatcgacacagacaccgatctgatgattgatcgattgcatgacctgagcgactga

SEQ ID NO: 94651 - protein, 205 aa, Synechococcus sp. CC9605
MGVQQILHQITVQTPGRGFTRLDGRLNTWIRSTGLDQGVLHLTCLHTSASLTINENADPRVLRDLDAWMADAVPEQRRYLHDDEGADDMPAHIRTALTSQTLNLSVSRGQLLLGTWQAVYLWEHRSAAHSRTIACHLFGEPSSRPTPEGNTQNTSATPQTLLNLRNGERINQAIQARHDPNAWETDDGIDTDTDLMIDRLHDLSD

SEQ ID NO: 94652 - DNA, 456 bp, Prochlorococcus marinus str. MIT 9312
  CDS (1)..(456): transl_table=11
atggaacaaatattttcaaaattagaatttttaaccagtggagagggttttattgacatcacaaatgatttaaatttatttattgaaaaaaataactttcattcaggaatttttaatttaacttcacttcataccagttgcagcttaactattaatgagaatgcagatccaaatgtacttagggacttaaaaaaatatatgcaatctatagttccatatgattcctacctaacattatcaaaaaatagagaagaaatttcatataaacattatcaagaaggggctgatgatatgccagcacatattaaaacatccttaacaaacacttgtttatctttgagttttcaagatggtaaaataatacttggcacatggcaagcagtttatttatgggaacatcgatttgatcaaaaagaaagaattataaatgtacatataattggtgagaaaaagtaa

SEQ ID NO: 94653 - protein, 151 aa, Prochlorococcus marinus str. MIT 9312
MEQIFSKLEFLTSGEGFIDITNDLNLFIEKNNFHSGIFNLTSLHTSCSLTINENADPNVLRDLKKYMQSIVPYDSYLTLSKNREEISYKHYQEGADDMPAHIKTSLTNTCLSLSFQDGKIILGTWQAVYLWEHRFDQKERIINVHIIGEKK

SEQ ID NO: 94654 - DNA, 450 bp, Synechococcus elongatus PCC 7942
  CDS (1)..(450): transl_table=11
atggcacagtatcagcaaattctgcagcttcagagccaaggccaaggcttcctcaatatcactggggcgatcgctcgcatcgtgcgcgagtctcggattcagacgggcctctgtcatctctttactcggcacacttcagccagcctgatcattcaagaaaacgctgaccccgatgtactgcacgatctggccggctacttcgaagcgctagttcctgaagcgggctacgaatcgttgggcggaagtcgtcgcttccgcgcctatgcccacagcgccgaaggccctgatgatatgccggcccacattcgcactgtactaactcgcacctctgagcaaattccgatcgtcgaaggtcgcttgggattgggcacttggcaagctgtctatctctgggagcatcgcgatcgcccccacagccgccaagtgattgtccatatcagcggcgactag

SEQ ID NO: 94655 - protein, 149 aa, Synechococcus elongatus PCC 7942
MAQYQQILQLQSQGQGFLNITGAIARIVRESRIQTGLCHLFTRHTSASLIIQENADPDVLHDLAGYFEALVPEAGYESLGGSRRFRAYAHSAEGPDDMPAHIRTVLTRTSEQIPIVEGRLGLGTWQAVYLWEHRDRPHSRQVIVHISGD

SEQ ID NO: 94656 - DNA, 420 bp, Burkholderia thailandensis E264
  CDS (1)..(420): transl_table=11
atgcaacagtcgattcaacacatcaccgtcgaggcgcgcgggcgcggtctcgtcgagttcacgccgcaagtacgcgcgttcgtcgaagtgcagtcggtcagcaccggcctgcttaccgtgttctgccggcacacgtccgcttcactgctgatccaggagaacgcggacccgtcggtgcagcgcgatatcgaacgatacttcgccgcgctcgcgcccgaggacgacgcacgctacgagcacgacaccgaaggcgccgacgacatgccggcgcacctgcgcacggcgctcacgcaggtgcagctatcgattccggtcgagcatgggcgcatggtgctcggcacgtggcaaggcatctatctgttcgaacatcggcgcgccccgcatcggcgcgatgtggtgctgcatctgatcggcgagtga

SEQ ID NO: 94657 - protein, 139 aa, Burkholderia thailandensis E264
MQQSIQHITVEARGRGLVEFTPQVRAFVEVQSVSTGLLTVFCRHTSASLLIQENADPSVQRDIERYFAALAPEDDARYEHDTEGADDMPAHLRTALTQVQLSIPVEHGRMVLGTWQGIYLFEHRRAPHRRDVVLHLIGE

SEQ ID NO: 94658 - DNA, 435 bp, Novosphingobium aromaticivorans DSM 12444
  CDS (1)..(435): transl_table=11
atggattggcgcatgacattgcgccaatccgccaccgaactcctgatccccacccccggccggggcctgcacgaaatcacccgcgaggtgacccgctgggttgcggggcaggggatgaataccggcctcctcaccctgttctgccgccacacctcggcctcgctcaccgtccaggaaaacgccgccgccgaagtgcgcgacgacatcgtccgctggctcgaccgcgtcgccccggaggatgcggcctatgcgcacgacgacgaggggccggacgacatgcccgcccatctaaagtccgtgctcaccggcgtcagcctttccgtgccggtaatcgacggccgcccggctttgggcacatggcagggcatctacctttgcgaacaccgcagggcgccccaccggcgccgcattaccctgcacctgctgggcgattga

SEQ ID NO: 94659 - protein, 144 aa, Novosphingobium aromaticivorans DSM 12444
MDWRMTLRQSATELLIPTPGRGLHEITREVTRWVAGQGMNTGLLTLFCRHTSASLTVQENAAAEVRDDIVRWLDRVAPEDAAYAHDDEGPDDMPAHLKSVLTGVSLSVPVIDGRPALGTWQGIYLCEHRRAPHRRRITLHLLGD

SEQ ID NO: 94660 - DNA, 420 bp, Saccharophagus degradans 2-40
  CDS (1)..(420): transl_table=11
atgtggttgcaaaaagaaatccggctaagcgccaaggcaagaggttttcacttggtaactgccgaagtggtgcgagagttgccagaattggcggattttaacgtgggccttgcccatattttaattaagcacacttctgcagcacttactttaaatgaaaatgcagacccaacggtgcgcgatgattttggtcgatttttcaaccgtttggtaccagagaacgagccgtactacgtacatacagatgaggggccagatgatatgcccgcgcatttaaagtccagtattttgggctcgacgctctcgctacctattactcacgggcgctttaacttaggaatttggcagggtatttacctgtgtgagcatcgtaattacggcggtgagcgaactttattggttaccctacaaggggaataa

SEQ ID NO: 94661 - protein, 139 aa, Saccharophagus degradans 2-40
MWLQKEIRLSAKARGFHLVTAEVVRELPELADFNVGLAHILIKHTSAALTLNENADPTVRDDFGRFFNRLVPENEPYYVHTDEGPDDMPAHLKSSILGSTLSLPITHGRFNLGIWQGIYLCEHRNYGGERTLLVTLQGE

SEQ ID NO: 94662 - DNA, 420 bp, Methylobacillus flagellatus KT
  CDS (1)..(420): transl_table=11
atggagcagcaacatcaccagatcattcagcataccaatggacgtcgcttgtacgacatcacgcctgccgtgacgcggtgggtggcggatagcggtatgcagcaaggattgttgaccctatacatccagcatacttccgccagcatcctcatcaacgaaaattacgattccgatgtgctggtggatatggagagtttcttcgagcgcctagtccctgatggggactccttgttcatccataccgcagaaggtccggacgacatgccggcccatgtgcgctccgcattgacgcaaaccagtatttccattcccgtggtggaaggaagggttgcattgggcacgtggcagggaatattcctctatgagcatcggcgcatggcgcataagcgcaaggtgctgctgcatttgatcggcgaatag

SEQ ID NO: 94663 - protein, 139 aa, Methylobacillus flagellatus KT
MEQQHHQIIQHTNGRRLYDITPAVTRWVADSGMQQGLLTLYIQHTSASILINENYDSDVLVDMESFFERLVPDGDSLFIHTAEGPDDMPAHVRSALTQTSISIPVVEGRVALGTWQGIFLYEHRRMAHKRKVLLHLIGE

SEQ ID NO: 94664 - DNA, 423 bp, Burkholderia xenovorans LB400
  CDS (1)..(423): transl_table=11
atgatgcgacaagccctccaccacctgagcgtcaaggcccgcacccgcgggctggtcgaattcaccaacgacgtgcgccgcttcgtcgccgcgcaagccatcgaaaccggcctgctgacgctgttctgccgccatacgtccgcgtcgttgctgattcaggaaaacgccgatccttccgtgcagcgcgatctggaacgctacttcgcgagcctcgcgccggaagacgccgagcgctacgaacacgacgccgaaggcccggacgacatgccggcccatttgcgcaccgcactcacgcaggtgcagttgtcggtgccggtcgaacacggaaaaatggtgctcggcacctggcaaggcctgtatctgttcgaacaccgccgtcatacacagcagcgggatatcgtgctacatctgctcggagaatga

SEQ ID NO: 94665 - protein, 140 aa, Burkholderia xenovorans LB400
MMRQALHHLSVKARTRGLVEFTNDVRRFVAAQAIETGLLTLFCRHTSASLLIQENADPSVQRDLERYFASLAPEDAERYEHDAEGPDDMPAHLRTALTQVQLSVPVEHGKMVLGTWQGLYLFEHRRHTQQRDIVLHLLGE

SEQ ID NO: 94666 - DNA, 429 bp, Silicibacter sp. TM1040
  CDS (1)..(429): transl_table=11
atgagcaacatccaacagcgcacctttacgctctctacccacggccagggtctctacgagatcaccgatgagatccgcagctttgtccgctcaagcggtgctgttcaggcgctgctcactctctatgtgcgccatacctcttgctcgctcctcatccaagagaacgcagacccggaggtgcagggggatctcaaggcctattttgcgcgcttggtgcccccgacgaccgatccgcagatgtcctacctgcgccatacctatgaaggccccgacgacatgcctgcgcatatcaaggcggcgatgatgccggtgagtctctcgatccccgtttcgagcgccgagatggtcttgggcacatggcaggggatttatctttttgagcaccgtgacgctccacatcagcgccaaatcgttgctcatctggcctga

SEQ ID NO: 94667 - protein, 142 aa, Silicibacter sp. TM1040
MSNIQQRTFTLSTHGQGLYEITDEIRSFVRSSGAVQALLTLYVRHTSCSLLIQENADPEVQGDLKAYFARLVPPTTDPQMSYLRHTYEGPDDMPAHIKAAMMPVSLSIPVSSAEMVLGTWQGIYLFEHRDAPHQRQIVAHLA

SEQ ID NO: 94668 - DNA, 414 bp, Myxococcus xanthus DK 1622
  CDS (1)..(414): transl_table=11
atgttccacgcgaaggagctcacggtgtccagccggggccgcggcttcaccgacatcaccgcggacgtccagcgcgccgtcgcggagagcggcgctcgccaggggctgtgcaccgtgttccttcatcacacgagcgcgtccctgctgctgtgtgagaacgcggacccggacgtgcgccgggatttggagtccttcttctcgcggctggtgaaggacggagacccgctcttcgtccatgacgcggaggggccggacgacatgcccgcgcacgtgcgcaccgtcctcacgcagaacgcgctgaacatccccgtgaaggacggccgcgcggacctggggacgtggcagggcgtctacgtctgggagcaccggacctcaccgcaccggcgccgcgtcaccgtgtccgtggtgagctga

SEQ ID NO: 94669 - protein, 137 aa, Myxococcus xanthus DK 1622
MFHAKELTVSSRGRGFTDITADVQRAVAESGARQGLCTVFLHHTSASLLLCENADPDVRRDLESFFSRLVKDGDPLFVHDAEGPDDMPAHVRTVLTQNALNIPVKDGRADLGTWQGVYVWEHRTSPHRRRVTVSVVS

SEQ ID NO: 94670 - DNA, 435 bp, Mesorhizobium sp. BNC1
  CDS (1)..(435): transl_table=11
atgcacgacccaggtatggcccagacgcgccttttcatatccacctccggccaaggcctctacgagtttacgcgggaagctgccgatttcgtacgccgtcagccggtggaggaggggctgctcacggtcttcgtgcgccacacctcctgctcgcttatcattcaggagaatgccgatcctgacgtgaagcgggacctcgatgcattcttccgcaggctcgtgccctcgtcgagcgatccgtccatggactggatcgtccatcgcatcgaggggccggacgatatgccggcgcatatcaaggcggcgcttacgcagacctcgatcggcgttcccgtatcggggggccggatgctgctcggcacctggcagggcatctaccttttcgaacaccgcgaccagccgcaccggcgcgagatcatccttcacttgagctag

SEQ ID NO: 94671 - protein, 144 aa, Mesorhizobium sp. BNC1
MHDPGMAQTRLFISTSGQGLYEFTREAADFVRRQPVEEGLLTVFVRHTSCSLIIQENADPDVKRDLDAFFRRLVPSSSDPSMDWIVHRIEGPDDMPAHIKAALTQTSIGVPVSGGRMLLGTWQGIYLFEHRDQPHRREIILHLS

SEQ ID NO: 94672 - DNA, 417 bp, Trichodesmium erythraeum IMS101
  CDS (1)..(417): transl_table=11
atgactcactatcaacaattactgcaagttaatacttctggtaaatctttatctaaaattacttctaaagtaaaggaagctgtacttaagtcaggggtaaaaactggtttatgcaatctatttttacgccatacttccgccagtttaataattcaagaaaatgcagacccagatgtattacttgacttagaaaaatttatttctaaattagtgccagaaggcaattattatattcatagtgcagaaggacctgatgatatgccggctcatattcgtagtgttttaactcatacttctgaacaaattcctattaataatggcaaattagtattaggtacttggcaaggaatttatgtttgggaacatcgccaacgtggtcatcagcgagatttagtaattcatattagtggggagtga

SEQ ID NO: 94673 - protein, 138 aa, Trichodesmium erythraeum IMS101
MTHYQQLLQVNTSGKSLSKITSKVKEAVLKSGVKTGLCNLFLRHTSASLIIQENADPDVLLDLEKFISKLVPEGNYYIHSAEGPDDMPAHIRSVLTHTSEQIPINNGKLVLGTWQGIYVWEHRQRGHQRDLVIHISGE

SEQ ID NO: 94674 - DNA, 660 bp, Synechococcus sp. CC9311
  CDS (1)..(660): transl_table=11
ttgaaagtactggctggaactgttcaggcactagatgaaatcgcggttcagacgcaagggcaagggttttcaaacattacgcctctggtcaatgactttgtgtcaagaagtgggatcacaacaggacttctctccctatgcgtgcagcacaccagctgcagcatcacgatcaacgaaaacgcagatccacgcgttctcaacgatttagctgcgtggatggaggctgtcgtcccacaggacgggaaaggaccagcggacgcccaaggccagcggcgacgttatctccatgacgatgaaggagatgacgacatgcctgctcacatcagaacggcactcaccagtcagaccatgacgctcagcgttcacaacgctcgcttgctactgggcacctggcaagcggtgtatctctgggagcatcgcaaacacggaagcacgaggcgcatcgcatgccacttgatcggagagaagcaggcaacatcaacacaggcaaccacaacacaaacagccagcaaccaaaccctgctcaatctgcgcaacgcaacgcgactgaatcaacaaattcaagaccggattcatcccgaagcttgggctgaggatggaggaaatccaaccgatgttgacctgttgatcgacagattgcatgacatcagcgactcgtaa

SEQ ID NO: 94675 - protein, 219 aa, Synechococcus sp. CC9311
MKVLAGTVQALDEIAVQTQGQGFSNITPLVNDFVSRSGITTGLLSLCVQHTSCSITINENADPRVLNDLAAWMEAVVPQDGKGPADAQGQRRRYLHDDEGDDDMPAHIRTALTSQTMTLSVHNARLLLGTWQAVYLWEHRKHGSTRRIACHLIGEKQATSTQATTTQTASNQTLLNLRNATRLNQQIQDRIHPEAWAEDGGNPTDVDLLIDRLHDISDS

SEQ ID NO: 94676 - DNA, 423 bp, Alkalilimnicola ehrlichei MLHE-1
  CDS (1)..(423): transl_table=11
atgcggtttcatcaggcccagcacagcttttccaccgacggccgcggtaccctggagatcaccgagacggtggccggcgaagtgcgccgcgcaggggtccgtaacggcctttgccatgtcttcctgcaccacaccagcgcctcgttgatgctgtgcgagaatgccgatccctccgtgcgccgggacctggagcgctatttcagtcgcctggtcaccgacggagacccgctgttcgagcatcggctggagggggatgacgatatggccgcgcacatccgctcggtgttgacccacaacgacctgaccctgcccgtgcgcaacggccgtctggccctggggacctggcagggggtctacctgtgggagcaccgctatcagggccaccggcgccaagtgacggtgagtgtgcagggggtcgattag

SEQ ID NO: 94677 - protein, 140 aa, Alkalilimnicola ehrlichei MLHE-1
MRFHQAQHSFSTDGRGTLEITETVAGEVRRAGVRNGLCHVFLHHTSASLMLCENADPSVRRDLERYFSRLVTDGDPLFEHRLEGDDDMAAHIRSVLTHNDLTLPVRNGRLALGTWQGVYLWEHRYQGHRRQVTVSVQGVD

SEQ ID NO: 94678 - DNA, 423 bp, Rhizobium leguminosarum bv. viciae 3841
  CDS (1)..(423): transl_table=11
ttgccccagacaatcctcaccttgtccacacgcggacagggcctttacgagttcacccaccaggcggaggccttcgtcagcgcgtcggggcgggaggaggggcttctcacggtcttcgtgcgccacacctcctgctcgctgctgatccaggaaaatgccgatcccgatgtgcgcaccgatctcctcgccttcttccgccgcctcgtgccgccggcctccgatcccgacatgggctggatcgtgcacagagccgaggggccggacgacatgccggcgcatatcaaggcagcgctgacgcaggtctcgattggcattcccgttgccgatgggcggttgatgctcggcacctggcaaggcctttatcttttcgaacatcgagaccggccgcaccggcgcgaaatcgtgctgcatctcagcacctga

SEQ ID NO: 94679 - protein, 140 aa, Rhizobium leguminosarum bv. viciae 3841
MPQTILTLSTRGQGLYEFTHQAEAFVSASGREEGLLTVFVRHTSCSLLIQENADPDVRTDLLAFFRRLVPPASDPDMGWIVHRAEGPDDMPAHIKAALTQVSIGIPVADGRLMLGTWQGLYLFEHRDRPHRREIVLHLST

SEQ ID NO: 94680 - DNA, 426 bp, Pseudomonas aeruginosa UCBPP-PA14
  CDS (1)..(426): transl_table=11
atgtggcagcagaccctgatcaccttgcgcccgcgtccgcggggctttcacctcgtcaccgaggagatactcgacgccttgccggagcttcggcggtgccgggtcggcctgctgcacctgcttttgcaacatacgtcggcttcactgaccctgaatgaaaatgccgatcctgccgtacgccgggatttcgagcgttttttcgagcggctggcgccacgcggcgaagtcggctatgaacacaacgacgaaggtccggacgaccttccggcgcatttcaaggccagcctgctgggctgccaactgaccctgccgatacagtcgggagggttggcactgggcacctggcaggggatctatctcggtgaacaccgggacaggggcggggcacggcgcgtgctcgccacctggcagggcgagtcagtatga

SEQ ID NO: 94681 - protein, 141 aa, Pseudomonas aeruginosa UCBPP-PA14
MWQQTLITLRPRPRGFHLVTEEILDALPELRRCRVGLLHLLLQHTSASLTLNENADPAVRRDFERFFERLAPRGEVGYEHNDEGPDDLPAHFKASLLGCQLTLPIQSGGLALGTWQGIYLGEHRDRGGARRVLATWQGESV

SEQ ID NO: 94682 - DNA, 423 bp, Solibacter usitatus Ellin6076
  CDS (1)..(423): transl_table=11
atgctgatgacctcgcatcgcctgcagatcccgactcgcggtaagggcctctacgagatcacgcaccagatcgccggctggttggccggagtgaaagtccgctccggcctgctcaccgtcttcgtccagcacacctcggcatccctcaccattcaggaaaatgccgaccccgatgttgtccacgatctgaacaccttcttcagccgcctcgtgcccgaggacaaccgcctctaccgccacaccatcgaaggccccgacgatatgcctgcgcacatccgcgccgcgctcactctcacccaggtttccgttccggtggaagggggcggcctcgctcttggcacctggcagggaatctatctctttgagcaccgctcttcgccgcaccggcgcagtgtgctcctgcacctgatcggcgaaccataa

SEQ ID NO: 94683 - protein, 140 aa, Solibacter usitatus Ellin6076
MLMTSHRLQIPTRGKGLYEITHQIAGWLAGVKVRSGLLTVFVQHTSASLTIQENADPDVVHDLNTFFSRLVPEDNRLYRHTIEGPDDMPAHIRAALTLTQVSVPVEGGGLALGTWQGIYLFEHRSSPHRRSVLLHLIGEP

SEQ ID NO: 94684 - DNA, 405 bp, Magnetococcus sp. MC-1
  CDS (1)..(405): transl_table=11
atgttaaaacgccatgtcttagcggtcaacagtggtcgtgcccaagccttcattgatataaccgatggggtcaatgccctaataagcaaagcgaaaatgcaacagggtctatgccacctgtttgtgccccataccaccgctggcatcaccgtcaatgaaaactgtgatcccgacgtggctcgggatatattggcgaccctggatcaattggtgcccatccatgggaactaccgccatgccgaaggcaacagccacgcccacctgaaagcaagcttgatggggcacgctctaagtgtaccaatcgaggggggtaaactgttgctcggtacttggcaaggcctctattttaccgaatttgacggaccccgcgcccgcaaggtcatcctaacccttagcgagggttag

SEQ ID NO: 94685 - protein, 134 aa, Magnetococcus sp. MC-1
MLKRHVLAVNSGRAQAFIDITDGVNALISKAKMQQGLCHLFVPHTTAGITVNENCDPDVARDILATLDQLVPIHGNYRHAEGNSHAHLKASLMGHALSVPIEGGKLLLGTWQGLYFTEFDGPRARKVILTLSEG

SEQ ID NO: 94686 - DNA, 414 bp, Nostoc punctiforme PCC 73102
  CDS (1)..(414): transl_table=11
atgactcactaccaaaagttactcaaaatttccactactgccaaatctttttacaacatcaccgctaaaattgaagccgcagtcacagaatcggggattgaaactggtctttgtactttatttttgcgccacacttcagctagtttagttattcaagaaaatgccgatcctgatgttcttgtggatttagcgaattttatggcaaaacttgtcccagaatcaggcaaatatatccacgatgcagaaggccccgatgatatgccagcacacattcgtactgcacttacccacacttctgaaaatatccctattaatcgaggtcatttagtactgggaacttggcagggaatttatatttgggaacatcgccagcacagtcatttaagagaattggttatccacatttctggatag

SEQ ID NO: 94687 - protein, 137 aa, Nostoc punctiforme PCC 73102
MTHYQKLLKISTTAKSFYNITAKIEAAVTESGIETGLCTLFLRHTSASLVIQENADPDVLVDLANFMAKLVPESGKYIHDAEGPDDMPAHIRTALTHTSENIPINRGHLVLGTWQGIYIWEHRQHSHLRELVIHISG

SEQ ID NO: 94688 - DNA, 420 bp, Crocosphaera watsonii WH 8501
  CDS (1)..(420): transl_table=11
atgaataattatcagcagttattaagcattcagacaagaggaaaagattttcatcgtcttacccgtgacgttgaaaatgttgttagtaaatcaggaatttcaacgggtttatgtactatttttgtgcgccatacttccgcttctttacttattcaagaaaatgctgatcccgatgttttagtagacttagcaaacttcttttctaagctagtccctgaagattctaaactgtatattcatagtgccgaaggtgatgacgatatgccggctcatattcgttctatgttaacaaaaacttcggaacaaatacctgtttctaatggtagattagtgttaggaacttggcaaggtatttatctctgggaacaccgtcaacgtagtcatcaccgagagattgttattcatattaatggtgactaa

SEQ ID NO: 94689 - protein, 139 aa, Crocosphaera watsonii WH 8501
MNNYQQLLSIQTRGKDFHRLTRDVENVVSKSGISTGLCTIFVRHTSASLLIQENADPDVLVDLANFFSKLVPEDSKLYIHSAEGDDDMPAHIRSMLTKTSEQIPVSNGRLVLGTWQGIYLWEHRQRSHHREIVIHINGD

SEQ ID NO: 94690 - DNA, 414 bp, Sulfitobacter sp. EE-36
  CDS (1)..(414): transl_table=11
atggatagcgagtttacggtcaagaccggcgggcaggggctctacgaggtgacggatcaggtgcatcaggcgctgtcagggcaacgctctgacgggttggtgacactgtttctgcgccatacctccgcctcgctgcttattcaggaaaacgcggacccggatgtgcaacgcgatctgctggcctatttctcgcgtctggtgccgcctgcggatgacccctcaatgtcctacctccggcatacgctggaaggaccagatgacatgcccgcgcatatcagggcgtcagtgctgcccgttacgctcagcatccctgtggttgcaggccgcatggtgttgggcacatggcaaggcatctatttgttcgaacaccgcgacgcgccccatagcagacgcatcgcggtgcatttcgcctga

SEQ ID NO: 94691 - protein, 137 aa, Sulfitobacter sp. EE-36
MDSEFTVKTGGQGLYEVTDQVHQALSGQRSDGLVTLFLRHTSASLLIQENADPDVQRDLLAYFSRLVPPADDPSMSYLRHTLEGPDDMPAHIRASVLPVTLSIPVVAGRMVLGTWQGIYLFEHRDAPHSRRIAVHFA

SEQ ID NO: 94692 - DNA, 423 bp, Roseovarius nubinhibens ISM
  CDS (1)..(423): transl_table=11
atgcagcaggttttcacgatcacgacgcgcggtccggggctctatgagatcacccgcgagctgtctgcctgggtgcgcgggcaagggatcgagacgggtcttttgaccctgttcattcgccacacctcggcgagcctcaccattcaggaaaatgccgatcccgaggtgcggaccgatctgcgcaatttctttgcccggctggtgccgccgagcagcgacccgtcgatgcgctatctcacccatacctatgaggggccggatgatatgccggcgcatatcaaggcggcgcttttgccagtgagtctcggcattccggtgatggatggcgcgctgtgtcttggcacctggcagggcgtttatgtgtttgagcatcgggaggctgcgcatcgccgcgaggtggtggcgcatctgacgggagggtga

SEQ ID NO: 94693 - protein, 140 aa, Roseovarius nubinhibens ISM
MQQVFTITTRGPGLYEITRELSAWVRGQGIETGLLTLFIRHTSASLTIQENADPEVRTDLRNFFARLVPPSSDPSMRYLTHTYEGPDDMPAHIKAALLPVSLGIPVMDGALCLGTWQGVYVFEHREAAHRREVVAHLTGG

SEQ ID NO: 94694 - DNA, 417 bp, Oceanicola batsensis HTCC2597
  CDS (1)..(417): transl_table=11
gtggcgatcaccggattcacaatttccacggaaggccccggcctgtacgagttcaccgggaaggttcgggcctggacggagggccgtggcgacggtctgctcacgctcttcatccggcatacctctgccagtctcctgatcatggagaatgccgatcccgaggtgcagaccgacctcaccgcctatttccaccggctcgtgccgccgaccacggatccggccatgtcctacctgacccatacccatgaagggcccgacgatatgcccgcccatatcaaggcgggcatgatgccggtgagcttgtcgattccggtacagggcggtcgtccgcttctggggacgtggcagggcatatttgttgcggaacatcgcgccgcgccacatcgtcgcgaaattgcagcacatttcgctggctga

SEQ ID NO: 94695 - protein, 138 aa, Oceanicola batsensis HTCC2597
MAITGFTISTEGPGLYEFTGKVRAWTEGRGDGLLTLFIRHTSASLLIMENADPEVQTDLTAYFHRLVPPTTDPAMSYLTHTHEGPDDMPAHIKAGMMPVSLSIPVQGGRPLLGTWQGIFVAEHRAAPHRREIAAHFAG

SEQ ID NO: 94696 - DNA, 453 bp, Synechococcus sp. WH 5701
  CDS (1)..(453): transl_table=11
atgttgcgtcagcacctcgaccggcttgaactgaccaccgctggggaaggcttccacgacctgacgtcccggctcgggacaggcctggcggccaccggcctgcagctgggggtgttgcacctgagcgttctgcacaccagctgcagcctgaccatcaatgagaacgccgatccgcgggtgctgcaggatctggccgcctatctgcaggctgtggtgcctgaggagggggtgcgtcccatcagcggggcgggccccctgcgcccctgggtccacgacgacgaaggggctgatgacatgccggcccacatccgcaccgccctcaccgccagcagcctcagcctgtccttcgagcggggacggctgctgctcggcacctggcaggcgatctacctgtgggaacaccgtcggagcccccaccggcgtcagctgagcgcccactggatcggcagctga

SEQ ID NO: 94697 - protein, 150 aa, Synechococcus sp. WH 5701
MLRQHLDRLELTTAGEGFHDLTSRLGTGLAATGLQLGVLHLSVLHTSCSLTINENADPRVLQDLAAYLQAVVPEEGVRPISGAGPLRPWVHDDEGADDMPAHIRTALTASSLSLSFERGRLLLGTWQAIYLWEHRRSPHRRQLSAHWIGS

SEQ ID NO: 94698 - DNA, 432 bp, Pseudoalteromonas tunicata D2
  CDS (1)..(432): transl_table=11
atgagttggtttgaacgcactattactttgaagcctcgaaaacgaggctttcatttaataaccgatgaattagttgcccaattacctgaactgaaaaatattgatttaggccttgcacacttttttattcagcatacctctgccagtttaaccattaacgaaaacgcagaccccacagtaagacaagacctagaaagccattttaatcaattcgtgcccgagggtgcgacttattatcgccatgattatgaaggtgacgatgatatgccagctcacatcaaggcgagcatcttaggtgcaagtattagtgcgcccattaagaaaggaaaattacaattaggtacttggcaaggcatcacgcttggtgagcaccgagattgcgcaacaagcagaaaggttgttgcgacactacaaggccaattaaagcagtaa

SEQ ID NO: 94699 - protein, 143 aa, Pseudoalteromonas tunicata D2
MSWFERTITLKPRKRGFHLITDELVAQLPELKNIDLGLAHFFIQHTSASLTINENADPTVRQDLESHFNQFVPEGATYYRHDYEGDDDMPAHIKASILGASISAPIKKGKLQLGTWQGITLGEHRDCATSRKVVATLQGQLKQ

SEQ ID NO: 94700 - DNA, 420 bp, Photobacterium sp. SKA34
  CDS (1)..(420): transl_table=11
atgtggtatcaaaaaacaattaatcttactcctcaaaagcgcggttttcaccttatcactgaggaaatagtgcaacatttacatgagatccgacctttaaccgttggattagtccattgtttcctccaacacacctcggcaagcttaaccattaatgagaatgccgatcctacggtgcgccatgatatggagaaacactttaatcattttgtaccagaacgtgcgccttattatcgacatacctatgaaggcgatgatgatatgcctgcacatattaaaagttcattgctaggaaatagtatcgcgatccctatttcacaaggacgtttagcattaggtatatggcaaggtatttatttaggtgagcaccgtgatcatggcggctcccgcaaagtcgtgatcactattcaaggcgaatag

SEQ ID NO: 94701 - protein, 139 aa, Photobacterium sp. SKA34
MWYQKTINLTPQKRGFHLITEEIVQHLHEIRPLTVGLVHCFLQHTSASLTINENADPTVRHDMEKHFNHFVPERAPYYRHTYEGDDDMPAHIKSSLLGNSIAIPISQGRLALGIWQGIYLGEHRDHGGSRKVVITIQGE

SEQ ID NO: 94702 - DNA, 405 bp, Oceanospirillum sp. MED92
  CDS (1)..(405): transl_table=11
atggttgagatactttctgtccgtacgggtaggcagggcttatttgaatttacccatcagttgcaggatttagttgggcgttccggggtcaaagaaggtctttgtagcctacttgttcagcacaccagtgccagcctgacaatccaggagaatgccgacccctcggccaaagatgaccttgaaaactggttaaatcgattagtacctgaaaacgaccgtttatatacgcatatctttgaaggtgcagatgacatgcctgcgcatatcaagagcgctttaacggcaaccacgttaagtattcctgtcttaaatggcaggttgtgcttgggtacctggcagggcgtgtattgttgggagcatcggcatcaggccagaagccgaaatatagcggtacatattgcataa

SEQ ID NO: 94703 - protein, 134 aa, Oceanospirillum sp. MED92
MVEILSVRTGRQGLFEFTHQLQDLVGRSGVKEGLCSLLVQHTSASLTIQENADPSAKDDLENWLNRLVPENDRLYTHIFEGADDMPAHIKSALTATTLSIPVLNGRLCLGTWQGVYCWEHRHQARSRNIAVHIA

SEQ ID NO: 94704 - DNA, 384 bp, delta proteobacterium MLMS-1
  CDS (1)..(384): transl_table=11
atggactcattaacggttaagtcaacaaaaagagaacagtttttggacatcaccagccaggtgcaggaatatctcgccgccggccgccggcaagacggggtgcttaccctgtactgcccgcataccacggcgggcctgaccatcaacgaaggtgcggacccgtccgtgacccgggatattctggtcggtctggagcggctcattccccgcaccggcgattatcagcacgccgaaggcaacagcgacgcccatctcaagaccagcctggtgggttcctccctgcaggtaatcgtggagaatggccggccggcgctgggcacctggcaaaggattttctttgctgaattcgacggcccccgctcccggcaagtgtggcttatttag

SEQ ID NO: 94705 - protein, 127 aa, delta proteobacterium MLMS-1
MDSLTVKSTKREQFLDITSQVQEYLAAGRRQDGVLTLYCPHTTAGLTINEGADPSVTRDILVGLERLIPRTGDYQHAEGNSDAHLKTSLVGSSLQVIVENGRPALGTWQRIFFAEFDGPRSRQVWLI

SEQ ID NO: 94706 - DNA, 420 bp, Oceanobacter sp. RED65
  CDS (1)..(420): transl_table=11
atgtggcatcaaacaaccattcaattacaacccaaaccccagggcatgcatctcgtcacccgagagatcgttgagcagctgcccgaaatcgcgtctttgagggtgggcgttctccatctctttatccagcacacttcagcgggtcttttaattaatgaaaacgcggatcctactgttcggtcggattttgaggtttttatgcaaaggctggtgccggaagggttggagtattttgatcacaccttagaagggccagatgacatgccggcgcacatcaaaagtagtttactaggtcactcaatttctatccccattagtaatggtcagttggcgctaggtacttggcaggggatctatcttgcggagtgtcgctatcatggtggtgcaagaaggttgattgcaacaatcaatggtgcatga

SEQ ID NO: 94707 - protein, 139 aa, Oceanobacter sp. RED65
MWHQTTIQLQPKPQGMHLVTREIVEQLPEIASLRVGVLHLFIQHTSAGLLINENADPTVRSDFEVFMQRLVPEGLEYFDHTLEGPDDMPAHIKSSLLGHSISIPISNGQLALGTWQGIYLAECRYHGGARRLIATINGA

SEQ ID NO: 94708 - DNA, 666 bp, Synechococcus sp. RS9916
  CDS (1)..(666): transl_table=11
atgaaacaggttctgcaccaactggtgattgccacaccgggggcggggttcacccgattgaacgaacagctgaacagctggattcgcagcagcgacattcaattaggggtgctgcacctcacctgtctgcacaccagcgccagcctcacgatcaacgaaaatgctgatccccgtgtactggacgacctcagcgcctggatggatgccgtggtgccgcaggacggcaaaggaccgctgaacggccaaggccagcgccgtcactacaagcatgacgacgaagggaacgacgacatgcccgcgcacatccgcaccgcactcaccagccagaccatgaccttgagcgtggaggacggacggttgttgttggggatgtggcaggccgtctatctgtgggagcatcgggccatgccgcacaggagacgcgtggcctgtcacctgatcggggaatgcgacgcgactgcagctgcaccgcaggagacaggcacaactgcagcagcgtcagcacaaaccctgatgaacctccgcagtggagaacgcatcaaccgcgccgttcaggaacgctttgaccccacggcctgggagcgggatggcggcattgacaccgacatggatctgctgatcgaccggcttcatgagatcagtgacacgccgtcaaatcccgaatga

SEQ ID NO: 94709 - protein, 221 aa, Synechococcus sp. RS9916
MKQVLHQLVIATPGAGFTRLNEQLNSWIRSSDIQLGVLHLTCLHTSASLTINENADPRVLDDLSAWMDAVVPQDGKGPLNGQGQRRHYKHDDEGNDDMPAHIRTALTSQTMTLSVEDGRLLLGMWQAVYLWEHRAMPHRRRVACHLIGECDATAAAPQETGTTAAASAQTLMNLRSGERINRAVQERFDPTAWERDGGIDTDMDLLIDRLHEISDTPSNPE

SEQ ID NO: 94710 - DNA, 447 bp, Vibrio sp. Ex25
  CDS (1)..(447): transl_table=11
atgtgggcacaaaaaacactgcaattaaaagcgagaagccgcggttttcacctaataactgatgaaattgaacaacaattaccacaaataaacgagctttcagtaggtttattacacctatttattcaacatacctccgccagtttgaccttaaatgagaatgctgatccaaccgtgcgtatggatatggaagcgcacttcaataagtttgtgccagagcgtgctccttattatcagcacacctatgaaggtgatgacgacatgccagcacacattaaagcatccctacttggtagtagtgtgacgataccaatccaaaatggtcgattagctttaggaacatggcagggcatttacttgggtgagcaccgagactttggcggcggccgccgcgttattgctacgattaacggtgagtcgataaaacaaaggctaaccttaggttag

SEQ ID NO: 94711 - protein, 148 aa, Vibrio sp. Ex25
MWAQKTLQLKARSRGFHLITDEIEQQLPQINELSVGLLHLFIQHTSASLTLNENADPTVRMDMEAHFNKFVPERAPYYQHTYEGDDDMPAHIKASLLGSSVTIPIQNGRLALGTWQGIYLGEHRDFGGGRRVIATINGESIKQRLTLG

SEQ ID NO: 94712 - DNA, 429 bp, Alteromonadales bacterium TW-7
  CDS (1)..(429): transl_table=11
atgagttggcaacaaaaaacaatttcactgaaacctcgttctcggggttttcacttaattgatgatgacgttttaaaccaactccccgaaattgcccactacaaagtaggcttactgcatttatttattcaacacacatcagcaagtctaacgattaacgaaaatgccgatcctactgtgcgtatggatatggaaagtcacttcaataaatttgtacctgagcgacagccttattatcgtcatgattatgaaggcgacgacgatatgcctgcccacataaaaaccagcacacttggttgtgagttaagtattccaatttcaaatggatacttagctttaggaacttggcagggtatttatttaggcgagcaccgagatgttggtggcgcaaggcgcattatagcaactattcagggtgagctgctttaa

SEQ ID NO: 94713 - protein, 142 aa, Alteromonadales bacterium TW-7
MSWQQKTISLKPRSRGFHLIDDDVLNQLPEIAHYKVGLLHLFIQHTSASLTINENADPTVRMDMESHFNKFVPERQPYYRHDYEGDDDMPAHIKTSTLGCELSIPISNGYLALGTWQGIYLGEHRDVGGARRIIATIQGELL

SEQ ID NO: 94714 - DNA, 435 bp, Aspergillus niger
  CDS (1)..(435)
atgtcctggtaccaaaaatccttcactctgcctgcccgctcgcgcggcagctacctcatcaccgaccacgtcctcgagcaactccccgagatcaagaactacaaggtcggcatgctgaacctcttcgtgcaacacaccagctgcgcgctctccctgaacgagaactgggatgacgatgtgcgcgccgatatgagtgatgcgctggatcgcatcgctccttatgataagaaggggaacctgtatagacattcggctgagggggaggatgacatgccggctcatatcaagtcagcgttgattggcgcttcggttacgattcccatctccaatggacgcttggctacgggtacgtggcagggtatttggtacttggagttcagggccatgagacactcccggaaggtggttgctacgattcaaggtgagaaggcttga

SEQ ID NO: 94715 - protein, 144 aa, Aspergillus niger
MSWYQKSFTLPARSRGSYLITDHVLEQLPEIKNYKVGMLNLFVQHTSCALSLNENWDDDVRADMSDALDRIAPYDKKGNLYRHSAEGEDDMPAHIKSALIGASVTIPISNGRLATGTWQGIWYLEFRAMRHSRKVVATIQGEKA

SEQ ID NO: 94716 - DNA, 522 bp, Medicago truncatula
  CDS (1)..(522)
atgcaggtgtcatcactgtgcgtagcaaagtttccattaagcgtgaaagcgcagcttcccaccttgaagacgcaggaatccatggcgactgcacctaagtgggcccagaaaaccatcgctctacctccttacaaacgcggctgtcatcttgttactcctaagatagcgaaagaaattgaacaagatctttctggattcaagtgcggtctcgctcatctcttcttgcagcatacaagtgcttctcttactatcaatgagaattacgacactgatgttcgcgatgatactgagacattcctcaatcgaattgttcccgaggggccatctgcaccttggaagcacacactagagggtcatgatgacatgccggctcatattaagtcatcaatgtttggctgtgcactcacgataccgattacagatggaaagcttaacatgggaacctggcagggtatatggctttgtgagcaccgggatcatcctacctcacgaagagtcgttgtcactcttaatggaatatga

SEQ ID NO: 94717 - protein, 173 aa, Medicago truncatula
MQVSSLCVAKFPLSVKAQLPTLKTQESMATAPKWAQKTIALPPYKRGCHLVTPKIAKEIEQDLSGFKCGLAHLFLQHTSASLTINENYDTDVRDDTETFLNRIVPEGPSAPWKHTLEGHDDMPAHIKSSMFGCALTIPITDGKLNMGTWQGIWLCEHRDHPTSRRVVVTLNGI

SEQ ID NO: 94718 - DNA, 438 bp, Aspergillus oryzae
  CDS (1)..(438)
atgtcctggtttcagaaaaccttcaccctcgctccgaaggcccgcggttcatatctcatcgacaaggaggtcagagatcaacttcccgagattgaaaacttcaaggtcggaatcttacatctttttatcaaacacacgagctgtgccctctcgttgaacgagaactgggatagtgatgtgcgcgaagacatgaccaatgcacttgaacgaattgcgccttatgatcgggagggagacctttatctccattcggcggaaggagaggatgacatgccggcgcacattaaatctgcattgattggagcttctgttagcatccctatttctaatggaaagctggccaccggtacttggcaaggaatttggtatctggagttcagggcttataagcattcgaggagcattgttgctactatccagggagagaagtacgagtga

SEQ ID NO: 94719 - protein, 145 aa, Aspergillus oryzae
MSWFQKTFTLAPKARGSYLIDKEVRDQLPEIENFKVGILHLFIKHTSCALSLNENWDSDVREDMTNALERIAPYDREGDLYLHSAEGEDDMPAHIKSALIGASVSIPISNGKLATGTWQGIWYLEFRAYKHSRSIVATIQGEKYE

SEQ ID NO: 94720 - DNA, 649 bp, Arabidopsis thaliana; identical to SEQ ID NO: 94544
  CDS (11)..(547)

SEQ ID NO: 94721 - protein, 178 aa, Arabidopsis thaliana
MSSTILFSGVVPLRLRSVLTPANPATDRASMASSSGAKWAQKTITLPPLRRGCHLITPKILKEIREDLSDFNCGLAHVFLQHTSASLTINENYDPDVQADTETFLNRIVPEGNSAPWRHTMEGPDDMPAHIKSSMFGCQLTIPITKGKLSMGTWQGIWLCEHRDAPTARRVVVTLNGI

SEQ ID NO: 94722 - DNA, 426 bp, Pseudomonas stutzeri
  CDS (1)..(426): transl_table=11
atgtggcaacagaccctgatcaccttgcgcgcgcgcccacgtggttttcatctgatcaccgacgagctgctcgccgcgctgccggaactgcggcaatgtcaggtcggtctgttacacctgtggctgcggcatacctcggcctcgctgacgatcaacgagaatgccgactcagcggtacggcgcgatttcgaacggttcttcaatcgtctggtgccgcagggcgaggacggttacgagcatgactacgaagggccggacgacttgccggcacacttcaaggccagcctgctcggctgccagctgagcctgccggtaagcgcggggcgcctggcactggggacttggcagggcgtctatctcggagagcaccgcgaccagggtggcgcgcggcagatagtggcaacgctgcacgggacggcaagttga

SEQ ID NO: 94723 - protein, 141 aa, Pseudomonas stutzeri
MWQQTLITLRARPRGFHLITDELLAALPELRQCQVGLLHLWLRHTSASLTINENADSAVRRDFERFFNRLVPQGEDGYEHDYEGPDDLPAHFKASLLGCQLSLPVSAGRLALGTWQGVYLGEHRDQGGARQIVATLHGTAS

SEQ ID NO: 94724 - DNA, 474 bp, Bradyrhizobium japonicum
  CDS (1)..(474): transl_table=11
atgacatcagccagatccgtaaccccgctcggcgccatcctcggtgcaagccaccattatctcatcgtcgctgctcaccgtggagacgcaggggcgcggcttcacggacctgacccgcgaacagcggcgttcattgccgaggcccgcgcgcgcgagggcgccgtgacgctgttcatccgtcacacctcggcctcgctgacgatccaggaaaacgccgatccctccgtgctggttgatctcaccaccgcgctgtccaggctcgcgccggagaacgccggctggacccacgacaccgaggggccggacgacatgcccggacatatcaagaccatgctgacgcagacctcgcttcaggtcccggtcctgaacggcaggctcgcgcttggcacctggcaggcgatctatctgatcgagcatcgcgcccgcccgcaccggcgcgaggtggtgctgcaattcatcggcgccaatcagtag

SEQ ID NO: 94725 - protein, 157 aa, Bradyrhizobium japonicum
MTSARSVTPLGAILGASHHYLIVAAHRGDAGARLHGPDPRTAAFIAEARAREGAVTLFIRHTSASLTIQENADPSVLVDLTTALSRLAPENAGWTHDTEGPDDMPGHIKTMLTQTSLQVPVLNGRLALGTWQAIYLIEHRARPHRREVVLQFIGANQ

SEQ ID NO: 94726 - DNA, 429 bp, Schizosaccharomyces pombe
  CDS (1)..(429)
atggatgttattcaacgcattataactttagatagaagatccaaagggttttacataattacaaacgatttggtcaaaaagcttccagaattaaaaagcttttcttctggtacagtaaatttttttatacagcatacctctgctgctcttactatcaatgagaattgggacgcagatacgcgagctgacatgaacgatatattggataaaattgtccctgaatcagcaggctaccgtcatactgcagaaggattagacgatatgcctgctcatgttaaatctagcttaattggacctagtttaactgttcccattactaatgggaagttgagcttgggtacttggcaagacattcagttagctgagtttcgtcgccaacctcattctcgtacaattgtttgtactattataggtttacgaagcaattga

SEQ ID NO: 94727 - protein, 142 aa, Schizosaccharomyces pombe
MDVIQRIITLDRRSKGFYIITNDLVKKLPELKSFSSGTVNFFIQHTSAALTINENWDADTRADMNDILDKIVPESAGYRHTAEGLDDMPAHVKSSLIGPSLTVPITNGKLSLGTWQDIQLAEFRRQPHSRTIVCTIIGLRSN

SEQ ID NO: 94728 - DNA, 582 bp, Oryza sativa
  CDS (1)..(582)
atgcaggcggcagcacccgcgtgggctccgcccatcgtctcctcggcttccgccgtcttcgcgcggccccgccgtggcgcgcgcgccggcgccggcgccgtccggtgcgagctcgccgcctccgcgccatcgtcggccgccggctcgttggccccacgctgggcccagaggaccgtcgtcatcccgccgcagcgccgcggctgccacctcatcacccccaagattgtgaacgggataagagacgacctctccgagttcaagtgcggcatggcacatctgttcttgcagcacaccagtgcttcgttgactatcaatgagaactatgactccgatgtccagtttgacactgaaacatttcttagtcgcattgtcccagagggtccatctgctccatggaggcacaccatagaagggccagacgacatgccagcacatattaaatcgtcgatgtttggttgtgccctgacgattcctatcactgatgggcgtctcaacatgggaacttggcagggtatatggctctgtgaacatcgagactacgctactcctcgccagattgtgattactctcaatgggatctaa

SEQ ID NO: 94729 - protein, 193 aa, Oryza sativa
MQAAAPAWAPPIVSSASAVFARPRRGARAGAGAVRCELAASAPSSAAGSLAPRWAQRTVVIPPQRRGCHLITPKIVNGIRDDLSEFKCGMAHLFLQHTSASLTINENYDSDVQFDTETFLSRIVPEGPSAPWRHTIEGPDDMPAHIKSSMFGCALTIPITDGRLNMGTWQGIWLCEHRDYATPRQIVITLNGI

SEQ ID NO: 94730 - DNA, 23 bp, Artificial sequence
  primer
atgtggtatcaaaagacgctcac

SEQ ID NO: 94731 - DNA, 22 bp, Artificial sequence
  primer
ttactccccttgtagtgtcgcg

SEQ ID NO: 94732 - protein, 128 aa, Artificial sequence
  consensus sequence
  Variant (2)..(5): Xaa in position 2 to 5 is any amino acid
  Variant (7)..(18): Xaa in position 7 to 18 is any amino acid
  Variant (19)..(22): Xaa in position 19 to 22 is any or no amino acid
  Variant (24)..(30): Xaa in position 24 to 30 is any amino acid
  Variant (34)..(35): Xaa in position 34 to 35 is any amino acid
  Variant (37)..(39): Xaa in position 37 to 39 is any amino acid
  Variant (42)..(42): Xaa in position 42 is any amino acid
  Variant (44)..(45): Xaa in position 44 to 45 is any amino acid
  Variant (47)..(48): Xaa in position 47 to 48 is any amino acid
  Variant (50)..(58): Xaa in position 50 to 58 is any amino acid
  Variant (60)..(65): Xaa in position 60 to 65 is any amino acid
  Variant (66)..(76): Xaa in position 66 to 76 is any or no amino acid
  Variant (78)..(78): Xaa in position 78 is any amino acid
  Variant (79)..(79): Xaa in position 79 is any or no amino acid
  Variant (82)..(82): Xaa in position 82 is any amino acid
  Variant (89)..(100): Xaa in position 89 to 100 is any amino acid
  Variant (102)..(104): Xaa in position 102 to 104 is any amino acid
  Variant (106)..(109): Xaa in position 106 to 109 is any amino acid
  Variant (114)..(118): Xaa in position 114 to 118 is any amino acid
  Variant (122)..(125): Xaa in position 122 to 125 is any amino acid
  Variant (126)..(127): Xaa in position 126 to 127 is any or no amino acid
GXXXXTXXXXXXXXXXXXXXXXGXXXXXXXHTSXXLXXXENXDXXVXXDXXXXXXXXXPXXXXXXXXXXXXXXXXXHXXEGXDDMPAHXXXXXXXXXXXXPXXXGXXXXGTWQXXXXXEHRXXXXXXR

SEQ ID NO: 94733 - protein, 37 aa, Artificial sequence
  protein pattern
  Variant (3)..(3): Xaa in position 3 is any or no amino acid
  Variant (6)..(6): Xaa in position 6 is any or no amino acid
  Variant (9)..(9): Xaa in position 9 is Ala, Gly or Ser
  Variant (11)..(11): Xaa in position 11 is Ile, Leu or Val
  Variant (12)..(12): Xaa in position 12 is Lys or Arg
  Variant (13)..(13): Xaa in position 13 is Ala, Gly, Ser or Thr
  Variant (14)..(22): Xaa in position 14 to 22 is any amino acid
  Variant (23)..(23): Xaa in position 23 is Pro or Ser
  Variant (24)..(24): Xaa in position 24 is Phe, Ile, Leu or Val
  Variant (25)..(26): Xaa in position 25 to 26 is any amino acid
  Variant (27)..(27): Xaa in position 27 is Ala, Gly, Asn or Ser
  Variant (28)..(31): Xaa in position 28 to 31 is any amino acid
  Variant (33)..(33): Xaa in position 33 is any amino acid
  Variant (36)..(36): Xaa in position 36 is Ala, Asp or Gly
  Variant (37)..(37): Xaa in position 37 is Ile, Leu or Val
EGXDDXMPXHXXXXXXXXXXXXXXXXXXXXXGXWQXX

SEQ ID NO: 94734 - protein, 16 aa, Artificial sequence
  protein pattern
  Variant (4)..(4): Xaa in position 4 is Ala or Cys
  Variant (5)..(5): Xaa in position 5 is Ala, Gly or Ser
  Variant (7)..(7): Xaa in position 7 is any amino acid
  Variant (8)..(8): Xaa in position 8 is Ile, Leu or Val
  Variant (9)..(9): Xaa in position 9 is any amino acid
  Variant (12)..(12): Xaa in position 12 is any amino acid
  Variant (14)..(15): Xaa in position 14 to 15 is any amino acid
HTSXXLXXXENXDXXV

SEQ ID NO: 94735 - DNA, 165 bp, Escherichia coli
  CDS (1)..(165): transl_table=11
atgctgtcagtgttgctgaagttactgattatcttggtattaaccccccgagcctctacgcggcttttggcagtaaagctgggttatttagccgtgtactcaatgaatacgtcggtacggaagctattccgcttgccgatattcttcgtgatgatcgtccggtaa

SEQ ID NO: 94736 - protein, 54 aa, Escherichia coli
MLSVLLKLLIILVLTPRASTRLLAVKLGYLAVYSMNTSVRKLFRLPIFFVMIVR

SEQ ID NO: 94737 - DNA, 156 bp, Shigella flexneri 2a str. 2457T
  CDS (1)..(156): transl_table=11
gtgtctctgaagttactgattatcttggtattaaccccccgagtctctacgcggcttttggcagtaaggctgggttatttagccgtgtactcaatgaatatgtcggtacggaagctattccgcttgccgatattcttcgtgatgatcgtccggtag

SEQ ID NO: 94738 - protein, 51 aa, Shigella flexneri 2a str. 2457T
MSLKLLIILVLTPRVSTRLLAVRLGYLAVYSMNMSVRKLFRLPIFFVMIVR

SEQ ID NO: 94739 - DNA, 24 bp, Artificial sequence
  primer
atgctgtcagtgttgctgaagtta

SEQ ID NO: 94740 - DNA, 24 bp, Artificial sequence
  primer
ttaccggacgatcatcacgaagaa

SEQ ID NO: 94741 - DNA, 750 bp, Synechocystis sp.
  CDS (1)..(750): transl_table=11
atggctatgttatcctttcccccattcttggctaattggatcgtccccatgctacaaatttccgacctgaatgtgtattacggagaaagtcatattttacgtaatgtagacatgtccattgctccgggacagatggtatgtttgatcgggcgcaatggggttggtaaaactactctccttaaaaccattatgggactgctttccccccgcagtggttacgtagtatatggcgatcgccagttgaattccgtgccgacggataaacgggcccgtttaggtattggctatgtgccccaggggcgggaaattattccccgcttgacagtgcaggaaaatttactgctgggactggaagcctgtgccgataaaagtcaacggcaaaaaggcattcccgatgaaattttcgagcttttccctgtgctcaaaaccatgctttctcgctggggaggggacttgagtggtggtcagcaacaacaattggcgatcgccagagctttgatgggccagccgaaactattgctgttggatgaacccacggagggcattcaaccatccatcattctagaaattgaagcagcggtaaaacggattattgccgccacaggtatttccgtccttttggtggaacagcatttgcactttgtccgccaggctgatcgttactacgccatgcaaaaagggggcattgtggcatccggggaaacccaaactttgagccaggaggttatccaaaaatttttggcagtataa

SEQ ID NO: 94742 - protein, 249 aa, Synechocystis sp.
MAMLSFPPFLANWIVPMLQISDLNVYYGESHILRNVDMSIAPGQMVCLIGRNGVGKTTLLKTIMGLLSPRSGYVVYGDRQLNSVPTDKRARLGIGYVPQGREIIPRLTVQENLLLGLEACADKSQRQKGIPDEIFELFPVLKTMLSRWGGDLSGGQQQQLAIARALMGQPKLLLLDEPTEGIQPSIILEIEAAVKRIIAATGISVLLVEQHLHFVRQADRYYAMQKGGIVASGETQTLSQEVIQKFLAV

SEQ ID NO: 94743 - DNA, 696 bp, Bradyrhizobium sp. ORS278
  CDS (1)..(696): transl_table=11
atgctggcgctcgcccatgtcgacagcttctacgaccgcagccacatcctgcacgacgtcacgctcgacgtacccgaggggcgcgtcacggcggtgcttggccgcaacggcaccgggaagacgaccctgctgaagacgctgatggggctgaccgatcggatgcacggtcagatccgtttgggcgaccaggagatcggctcagagccgacattcaggcgggcgcgcgccggcatcgcctatgtcccgcagggtcgagagatcatccctgacttcaccattcgcgagaacatcctgatgggctcgttcgcgcgggccgacggcaagcgcgagattccgccgctggtcgccgagctgttcccgtatctgatgaacaatcttgaccgtaatggcggcgtgctgtccggtggtcagcagcaacagctcgcgatcgcgcgcgcgctcgccgccaatcccaggatcatcctgctcgacgaaccgaacgaggggattcagccctccatcgtcgaggagatcgagcaggtcatcatccggctcaaccgcgaggtcgggctgacggtgatactggtcgagcagaacgtcgcgttcgcccgtaatgcggcccatcgcttcgcgatgatggagaagggacgcatcgttgccgcgggcgatatttcggaactcaccgacgcgatggtccatcgccatatggcggtgtga

SEQ ID NO: 94744 - protein, 231 aa, Bradyrhizobium sp. ORS278
MLALAHVDSFYDRSHILHDVTLDVPEGRVTAVLGRNGTGKTTLLKTLMGLTDRMHGQIRLGDQEIGSEPTFRRARAGIAYVPQGREIIPDFTIRENILMGSFARADGKREIPPLVAELFPYLMNNLDRNGGVLSGGQQQQLAIARALAANPRIILLDEPNEGIQPSIVEEIEQVIIRLNREVGLTVILVEQNVAFARNAAHRFAMMEKGRIVAAGDISELTDAMVHRHMAV

SEQ ID NO: 94745 - DNA, 696 bp, Mesorhizobium loti MAFF303099
  CDS (1)..(696): transl_table=11
atgctcgaagtttccaacgccacgctccattacggcgccgcccaggcgctgcgcggcgtttcgctgaaggcgggcgccggcaagatcacttgcgtgctcggccgcaacggcgtcggcaagaccagtttgatgagatcgatcgtcggccaccaccggctgacgagcggaagcgttgccttcgaggggaaggcgctcgaccggagcgcggcgtatgaccgcgcccggtcgggcatcgcattcgtaccgcagggcagggagatctttcccctgctcacggtgcgcgaaaacctggagtccggctttgcgccattgaagcgtgccgaccgcaacgtgccggcgcacgtcttcgagttgtttccggtgctgaagcagatgcttggccgccgtggcggcgatctttcgggcggtcagcagcagcaactcgccattggcagggcgctggtgatgcggccgaagctgctggtgctggatgaacccaccgaaggcatccagccgtcgatcatcaaggatatcggccgcgccatccgctttttgcgcgaccaggctggtatcgccgtgctgctggtcgaacaatatctcgacttctgccgcgaactcgccgacgaggtcaacatcatggaccggggccagatcgtccataccggcccggccgaagatctagaccgggctgatgtccgcaagttccttaccgtctag

SEQ ID NO: 94746 - protein, 231 aa, Mesorhizobium loti MAFF303099
MLEVSNATLHYGAAQALRGVSLKAGAGKITCVLGRNGVGKTSLMRSIVGHHRLTSGSVAFEGKALDRSAAYDRARSGIAFVPQGREIFPLLTVRENLESGFAPLKRADRNVPAHVFELFPVLKQMLGRRGGDLSGGQQQQLAIGRALVMRPKLLVLDEPTEGIQPSIIKDIGRAIRFLRDQAGIAVLLVEQYLDFCRELADEVNIMDRGQIVHTGPAEDLDRADVRKFLTV

SEQ ID NO: 94747 - DNA, 693 bp, Bacillus halodurans C-125
  CDS (1)..(693): transl_table=11
atgctacagctctctaacctagaggtcgcctatgatgaaagcaccgtcattcgtgatgtatcgttatccgtccaaccgggaaaggttgtctgtctgttaggacgaaatggcgttgggaagtcaacgattatgaaaaccattatcggattgttgcaagtaaaacgaggctcgattcaattagagggggaggacgtcacaaaaaaaagccccacctaccgtgcgcgaagaggcattggctatgttcctcaaggtcgtgacatctttccattcctaaccgttcacgaaaatttgttgttaggcttggaagcctgcgatacaaaagagcagaaaattgatgaaagcctatatgcttactttccaattttaaaggagatgaaaaaccggcgtggtggtgacttaagcggcggtcaacagcagcaattggccctagcgcgagcccttgtcgctaacccaaagtttctgttgttggatgagccaaccgaaggagtacaaccgaacatcgtctatgacattcaaaaagtaattatggatgttaaaaaacagagcaaagatcaagcgattttattagtcgaacaaagcatcgattttgctaaacaagtaggagattacttctacgtggtcgataaaggacgcatcgcctatgaaggagattcattaatcgaagctgaaatcaagcagtatttaagtgtctaa

SEQ ID NO: 94748 - protein, 230 aa, Bacillus halodurans C-125
MLQLSNLEVAYDESTVIRDVSLSVQPGKVVCLLGRNGVGKSTIMKTIIGLLQVKRGSIQLEGEDVTKKSPTYRARRGIGYVPQGRDIFPFLTVHENLLLGLEACDTKEQKIDESLYAYFPILKEMKNRRGGDLSGGQQQQLALARALVANPKFLLLDEPTEGVQPNIVYDIQKVIMDVKKQSKDQAILLVEQSIDFAKQVGDYFYVVDKGRIAYEGDSLIEAEIKQYLSV

SEQ ID NO: 94749 - DNA, 699 bp, Pseudomonas aeruginosa PAO1
  CDS (1)..(699): transl_table=11
atgctgcaagtcgacaagctccaccagtactacggcggtagccatatcctccgtggcctgagcttcgaggcgaaggtgggcgaggtgacctgcctgctcggtcgcaacggggtgggcaagaccaccctgctgcgctgcctgatgggcctggtcccggcccgcgagggccaggtcgcctgggaaggccgttcgctcaccggactcaggccgcaccagcgggtccgcgccgggatcgcctacgtgccgcagggacgggaaatcttcccccggctgacggtggaagagaacctactgatgggactgtcccgtttcagcgccagggacgcccgggcggtgccggacttcatctacgagctgttcccggtcctgcgcgaaatgaaacagcgccgcggcggcgacctctccggcggccagcagcagcaactggcgatcggccgcgccctggccagccagccgcgactgctgatcctcgacgaacccacggaaggcatccagccttcggtgatcaaggagatcggcgcggtcgtccgcagcctggcggcgcgcggcgacatggcgatcctgctggtcgagcagttctacgacttcgccgccgaactggccgaccaatacctggtgatggcgcgcggcgagatcgtccagcagggccgcggccgcgacatggagagcgagggcgtgcgcgggctggtggcgatttga

SEQ ID NO: 94750 - protein, 232 aa, Pseudomonas aeruginosa PAO1
MLQVDKLHQYYGGSHILRGLSFEAKVGEVTCLLGRNGVGKTTLLRCLMGLVPAREGQVAWEGRSLTGLRPHQRVRAGIAYVPQGREIFPRLTVEENLLMGLSRFSARDARAVPDFIYELFPVLREMKQRRGGDLSGGQQQQLAIGRALASQPRLLILDEPTEGIQPSVIKEIGAVVRSLAARGDMAILLVEQFYDFAAELADQYLVMARGEIVQQGRGRDMESEGVRGLVAI

SEQ ID NO: 94751 - DNA, 705 bp, Deinococcus radiodurans R1
  CDS (1)..(705): transl_table=11
atgctcaagctcgaacacgtcagcgccgcttacggccaaagcccggtgctgttcgacatcgacctggaagtgcgcgacgccgaggcggtggcattgatcgggcgcaacggcgtcggcaaatccaccctgctgcgaaccatcagtggcctgcacccggtcacggcgggtggggtccggctgggcggcgaggccgtcgaacacgcaccggcttttgcccgcgcccgcgccgggctggcctacgtgccgcagggccggggcctgttttcccacctgaccgtcgaggaaaacctgcttatgggcctctcggcgctcggcgggcggcccgcgacgaaaaaggagattcctcctctggtgtacgacctttttcccatttgccacgacatgcgggcccgcaaggccggcaacctgtcgggcgggcaacagcagcaggtcgccatcgggcgcgcgctggtcacccggcccgcctacctgctgctcgatgagcccaccgagggcattcagccgagcatcgtgcaggacatcgaggccgcactgggccgcatccgcgccgagttgcgggtggcggtcttgctggtcgagcagtacctcgatttcgcctgggcctttgccgaccgctattacgtgctgcaacgcgggcgcgtggtcgaaagcggcctgactgccgacgtgcagccgagtgcggtgcagcgttacctgagcgtgtag

SEQ ID NO: 94752 - protein, 234 aa, Deinococcus radiodurans R1
MLKLEHVSAAYGQSPVLFDIDLEVRDAEAVALIGRNGVGKSTLLRTISGLHPVTAGGVRLGGEAVEHAPAFARARAGLAYVPQGRGLFSHLTVEENLLMGLSALGGRPATKKEIPPLVYDLFPICHDMRARKAGNLSGGQQQQVAIGRALVTRPAYLLLDEPTEGIQPSIVQDIEAALGRIRAELRVAVLLVEQYLDFAWAFADRYYVLQRGRVVESGLTADVQPSAVQRYLSV

SEQ ID NO: 94753 - DNA, 723 bp, Escherichia coli O157:H7 EDL933; identical to SEQ ID NO: 84469
  CDS (1)..(723): transl_table=11
  misc_feature (85)..(85): r is g or a
  misc_feature (336)..(336): r is g or a

SEQ ID NO: 94754 - protein, 240 aa, Escherichia coli O157:H7 EDL933; identical to SEQ ID NO: 84470
  misc_feature (29)..(29): The Xaa at location 29 stands for Ile, or Val.

SEQ ID NO: 94755 - DNA, 723 bp, Agrobacterium tumefaciens str. C58
  CDS (1)..(723): transl_table=11
gtgagaggaaatctactcgatatcagggacatccatgtcgcttacggccgcgccgaggtggtgcatggcatatctcttgccatggcggcaggcagcatcgtcaccgtcatcggggcgaatggggccggcaagacgacgctgctcaatgccataatgggcgtgatcccctcacgcgggaccattctctacgacggcgcgccggtgcccgacaccatcgagggccgggttgccgccggcctttgcctggtgccggaaaagcgcgaattgttcgggtcgatgacggtcgaggacaatatcgaactcggcggtttcctgcgctcacgccaggagcgcaacgaaacccgtgaagaggtccatgcactcttcccgcgccttcgcgagcgcagcaagcagcttgccggaacgctttccggcggcgaaaggcagatgctggcgctcgcccgggcactgatgagccggccgagactgctgctgctggatgagccaagcctcgggcttgcgccgttgatcgtcgccgaaatcctgcgcatcgtcgccgaactgcgccgtaccggcgtctccatcctgctggtcgaacagaacgcccgcgccgcgcttgaaatcgccgacgaggcctatctcgttgagctcggcgaggtccgccgctcaggtcctgccgctgaactcgccgtcgatccggcactgatggcaagctatctcggccccggtgaacacgccgtctag

SEQ ID NO: 94756 - protein, 240 aa, Agrobacterium tumefaciens str. C58
MRGNLLDIRDIHVAYGRAEVVHGISLAMAAGSIVTVIGANGAGKTTLLNAIMGVIPSRGTILYDGAPVPDTIEGRVAAGLCLVPEKRELFGSMTVEDNIELGGFLRSRQERNETREEVHALFPRLRERSKQLAGTLSGGERQMLALARALMSRPRLLLLDEPSLGLAPLIVAEILRIVAELRRTGVSILLVEQNARAALEIADEAYLVELGEVRRSGPAAELAVDPALMASYLGPGEHAV

SEQ ID NO: 94757 - DNA, 696 bp, Agrobacterium tumefaciens str. C58
  CDS (1)..(696): transl_table=11
atgctgacagtcgaaaacatcaaccttcactacggcgcggcgcaagccctgcgcggcgtgtcgttgaaagcggagatgggcaagatcacctgcgtcctcggccgcaacggcgtgggcaaaagctcgctgttgcgcgccgtcacgggtcagcagcccaccagtgccggctcgatcagctttgatggtgcgccgcttgacgggctggcgccctatcaccgggccaaacgcggtgtcggatatgtgccgcagggccgtgaaatctttccgttgctcagcgttcaggagaaccttgaaagcggttatgcgccgctgccgcgcaaggagcgtttcattcccgacgatattttcagcctgtttccggtgctgcaatcgatgctgggcaggcgcggtggcgatttgtccgggggacagcagcagcaactcgccatcggccgggcgctggtgacgcggccgaaaatcctcgttctcgatgagccgaccgagggcatccagccgtcgatcatcaaggatatcggccgggcgatcaaatatctgcgcgattccaccggcatggcgatcctgctggtcgagcaatatctggatttctgccgtgagcttgccgactatgtctacatcatggaccgcggtgagatcgtgcatgaagggctcgccgagacgctggatacgcccgaagcgcggcgtcatctgacagtataa

SEQ ID NO: 94758 - protein, 231 aa, Agrobacterium tumefaciens str. C58
MLTVENINLHYGAAQALRGVSLKAEMGKITCVLGRNGVGKSSLLRAVTGQQPTSAGSISFDGAPLDGLAPYHRAKRGVGYVPQGREIFPLLSVQENLESGYAPLPRKERFIPDDIFSLFPVLQSMLGRRGGDLSGGQQQQLAIGRALVTRPKILVLDEPTEGIQPSIIKDIGRAIKYLRDSTGMAILLVEQYLDFCRELADYVYIMDRGEIVHEGLAETLDTPEARRHLTV

SEQ ID NO: 94759 - DNA, 729 bp, Agrobacterium tumefaciens str. C58
  CDS (1)..(729): transl_table=11
atgtccggtgaaccgcttctgaaagtccagggtgtcgaaacctattatggcaatatccgcgctctggccggtgtcgatgtcgaagtcaaaaagggtgaaatcgtcagcctgatcggtgccaatggcgccggcaagtcgacgctgatgatgacaatctgcggcagtccgcaggcccgcacgggccaggtgatcttcgacggtgaggacatcacccagctgccgacgcatctgatcgcccgcaagcgcatcgcccagtcgcccgaaggccgccggatttttccgcgcatgacggtactggaaaatctgcagatgggcgccaatctcgacaatctcaaatatttcaaggaagacgtcgagaagattttcgtcatgttcccgcgcctgaaagagcgccagagccaacgcggcggcacgctttccggcggcgaacagcagatgctctccatcggccgcgcgctgatggcacggccgaagctgcttttgctcgacgagccgtcgctcggtcttgccccgctgatcgtcaagggcatcttcgaggcgatcaagaagctgaacaaggaagaggggctgaccgtcttcctggtggagcagaacgcctttgcggctctcaagctttccgaccgcgcttatgtgatggtcaacggcaaggtgacgatgagcggttcgggcagggaactgctcgccgatccgcaggtgcgcgccgcctatctggaaggcggacggcactga

SEQ ID NO: 94760 - protein, 242 aa, Agrobacterium tumefaciens str. C58
MSGEPLLKVQGVETYYGNIRALAGVDVEVKKGEIVSLIGANGAGKSTLMMTICGSPQARTGQVIFDGEDITQLPTHLIARKRIAQSPEGRRIFPRMTVLENLQMGANLDNLKYFKEDVEKIFVMFPRLKERQSQRGGTLSGGEQQMLSIGRALMARPKLLLLDEPSLGLAPLIVKGIFEAIKKLNKEEGLTVFLVEQNAFAALKLSDRAYVMVNGKVTMSGSGRELLADPQVRAAYLEGGRH

SEQ ID NO: 94761 - DNA, 768 bp, Agrobacterium tumefaciens str. C58
  CDS (1)..(768): transl_table=11
atgtcaccagcaatgcggaagtccgccaagcttatctcggaagttacgccaatgcccgcagcgccgcttgaaatcgccaacctcaccgccggttatggcccgacaagggtgatcgagggcctgtcgctctccgtgccatcgggctcgcgttttgccgtgctcggccgcaacggcgtcggcaagaccagcctcttcgccacgctggccggccagacgaaacgttttgccggcgatatccgcattggtggacaggacatcgccgctttgccgagtgctgcccgcgccaaggccggcctcggttacgtgccgcagacccgcgatgtattccccaccctcacggtggaggaaaaccttttcgtcggcctcaagacccgtccgaaatccgcgatcgaggaagcctacaccctgtttccgcgcctgaaggagcgccgccgcaacctcggctcgcaactctctggcggcgaacagcagatgctttccaccgcccgcaccattctcggccagccgcgcgtgctgcttctcgacgaaccgctcgaaggcctcgcccccgtcatctgcgaagaactgatggcggccttctcgaaactcgcgaaatccggcgaaatgaccattcttctcatcgaacagcgcatccagatggccatagactttgccgaccacgccatcatcatggaacgcggccgcatcgtctgggaaggaccatcgagcgagcttgcggagaaccctggtatcatcgacacccatctcggggttggcgggctgcactga

SEQ ID NO: 94762 - protein, 255 aa, Agrobacterium tumefaciens str. C58
MSPAMRKSAKLISEVTPMPAAPLEIANLTAGYGPTRVIEGLSLSVPSGSRFAVLGRNGVGKTSLFATLAGQTKRFAGDIRIGGQDIAALPSAARAKAGLGYVPQTRDVFPTLTVEENLFVGLKTRPKSAIEEAYTLFPRLKERRRNLGSQLSGGEQQMLSTARTILGQPRVLLLDEPLEGLAPVICEELMAAFSKLAKSGEMTILLIEQRIQMAIDFADHAIIMERGRIVWEGPSSELAENPGIIDTHLGVGGLH

SEQ ID NO: 94763 - DNA, 702 bp, Agrobacterium tumefaciens str. C58
  CDS (1)..(702): transl_table=11
atggcggcaatgctggaagtctccaacctgaaatcctggtatggcgaaagccaggccctgcacggcgtcgatctaacggtcggcgagggtgaaacaatcaccattctcggccgcaatggcgtgggcaagaccacgacgctgcgcaccatcatgggcatcatccgcaaccgcaagggcgtcatcaagcttggtggcaaagatatgatgccggtgccgctgcatcgcacggcaaaatacggcattggtttcgtgccggaagagcgcggcatcttcgcgacgctgagtgtcgaggaaaatctgatgctgccgcccgtggtcgcctccggcggcatgacgcttgatgaaatctatgaattgttccccaacctccatgagcgccgcaccagccccggaaccaagctttccggcggtgaacagcagatgctcgccatggcgcgcatcctgcgcaccggcgtgaaggtgctgctgctcgatgaaccgaccgaggggcttgcgcctgtcatcgtccaacgcatcggcgaagtgctgcaaaagctgaagagccgcggcatgaccgtggttctggtcgagcagaatttccggttcgccagccgtatcgctgatcgcttctacctgatggatcatggccagatggtcagcaatttcccggtgggcgagctttcggcccgcatgggcgaactcaataaagtgctgggggtttaa

SEQ ID NO: 94764 - protein, 233 aa, Agrobacterium tumefaciens str. C58
MAAMLEVSNLKSWYGESQALHGVDLTVGEGETITILGRNGVGKTTTLRTIMGIIRNRKGVIKLGGKDMMPVPLHRTAKYGIGFVPEERGIFATLSVEENLMLPPVVASGGMTLDEIYELFPNLHERRTSPGTKLSGGEQQMLAMARILRTGVKVLLLDEPTEGLAPVIVQRIGEVLQKLKSRGMTVVLVEQNFRFASRIADRFYLMDHGQMVSNFPVGELSARMGELNKVLGV

SEQ ID NO: 94765 - DNA, 696 bp, Agrobacterium tumefaciens str. C58
  CDS (1)..(696): transl_table=11
atgctgaccttgaaaaacgtacacagctattacggccgcagccatattttgcacggtgtcacgcttgacgttccgaccggcaaggtgacgagcattctgggccgcaacagcaccggcaagacgaccctgttgaagaccctgatggcgctgaccgacggcatgacaggcgaaatgcatttgcagggacaagatatctcatcgtcgccgacgcatatgagagcgcgggcgggtatcgcctatgtcccccagggcagggagatcatcccggatttcagcatccgcgaaaacatcctgatgggtgcttttgcgcgtgccgaccgcaaacgtgaaattccagcactcgtaccggaacttttcccatatctgatggccaacctcgaccgaccgggcggtgtgctttccggcggccagcaacaacagctcgccatcgcccgcgccctggctgcggacccgaaagtactgctgctcgacgaacccaacgaaggcatccagccctcaatcgtcgaggagattgaaaagatcatcatccggctcaatcgcgagatcggcatgacgatcgtcctcgttgagcaaaacgtagcgtttgcgcggcatgcctctcaccacttcgccatgctggagaagggaggcgtggtcgccgccggtgccatagacgcgctctccgacacgcttgtccatcgacatatggccgtctga

SEQ ID NO: 94766 - protein, 231 aa, Agrobacterium tumefaciens str. C58
MLTLKNVHSYYGRSHILHGVTLDVPTGKVTSILGRNSTGKTTLLKTLMALTDGMTGEMHLQGQDISSSPTHMRARAGIAYVPQGREIIPDFSIRENILMGAFARADRKREIPALVPELFPYLMANLDRPGGVLSGGQQQQLAIARALAADPKVLLLDEPNEGIQPSIVEEIEKIIIRLNREIGMTIVLVEQNVAFARHASHHFAMLEKGGVVAAGAIDALSDTLVHRHMAV

SEQ ID NO: 94767 - DNA, 696 bp, Sinorhizobium meliloti 1021
  CDS (1)..(696): transl_table=11
atgctgaacgtcgaaaacgtcagcctgcattacggcgccgcccaggcgctccgcgacgtctcgttcaaggcggaaatgggcaagatcacctgcgttctcggccgcaacggcgttggcaagtcgagcctgctcagggccgtcgccggccagcatccggtgacgagcggcacgatctctttcaacggcgcgccgctcgacggcatggcgcccttccggcgcgccaaacagggcgtcggctacgtgccccagggccgcgagatctttcccctgctgacggtgaaggaaaatctcgaaaccggcttcgctccgctgaggcgggctcaacgctcgatccccgacgatatattcagtctgtttccggtacttcagacgatgctcggccggagggcggcgacctttcgggcggccagcagcagcagctcgcgaatcgctcgcgctctcgtgacacgcccgaaaatcctggtgctggacgagccgaccgagggcatccagccgtcgatcatcaaggacatcggccgcgcgatcaaatatttgcgggattcgaccggtatggcgatcctgctcgtggagcaatatgtcgatttctgccgcgagcttgccgaccatgtctatatcatggaccgtggagctttcgtgcacgagggcccgccggagacgctcgacaccccgcaagcgcgccggcatctaaccgtttga

SEQ ID NO: 94768 - protein, 231 aa, Sinorhizobium meliloti 1021
MLNVENVSLHYGAAQALRDVSFKAEMGKITCVLGRNGVGKSSLLRAVAGQHPVTSGTISFNGAPLDGMAPFRRAKQGVGYVPQGREIFPLLTVKENLETGFAPLRRAQRSIPDDIFSLFPVLQTMLGRRAATFRAASSSSSRIARALVTRPKILVLDEPTEGIQPSIIKDIGRAIKYLRDSTGMAILLVEQYVDFCRELADHVYIMDRGAFVHEGPPETLDTPQARRHLTV

SEQ ID NO: 94769 - DNA, 699 bp, Nostoc sp. PCC 7120
  CDS (1)..(699): transl_table=11
atgctaaatatttctaaccttaacgtttactatggcgaaagccatattctccgcaatgtagatttaactgtaccaaatgggcaaatgatctgtctaattgggcgcaatggtgtaggtaaaacaaccctactgaaaacaattatgggtttactgaaacctcgcagtggcactattaacttagccgggaatttaatcaactccaaatctccagaccaaagggcgaaaatgggaattggttatgttcctcaaggaagagatattattcctcgtttaacagtcaaggaaaatctgctgctggggttagaagctagacagaaacaggtgaaaaaagctgaaattccggaagaaatttttagcttatttcctgtgttaaaaaccatgttatcgcggatgggtggtgatttaagtggtggacaacaacaacaactggcgatcgctcgtgctttaatgggacagcctcaattattggttttagatgaacccacagaagggattcaaccttcaatcatcctagaaattgaagcagccgtccgtcgcattattgaaactacaggtatttctgttttacttgtagaacaacacttacattttgtccgtcaggctgattactattacgctatgcaaaaaggggctattgttgcatctggttccactgatgaacttagtcaggatgtgattcaacggtttttggcggtttaa

SEQ ID NO: 94770 - protein, 232 aa, Nostoc sp. PCC 7120
MLNISNLNVYYGESHILRNVDLTVPNGQMICLIGRNGVGKTTLLKTIMGLLKPRSGTINLAGNLINSKSPDQRAKMGIGYVPQGRDIIPRLTVKENLLLGLEARQKQVKKAEIPEEIFSLFPVLKTMLSRMGGDLSGGQQQQLAIARALMGQPQLLVLDEPTEGIQPSIILEIEAAVRRIIETTGISVLLVEQHLHFVRQADYYYAMQKGAIVASGSTDELSQDVIQRFLAV

SEQ ID NO: 94771 - DNA, 693 bp, Ralstonia solanacearum GMI1000
  CDS (1)..(693): transl_table=11
atgctgcagatccagcaactgaaccagtactacggcggcagccacatcctgcgcaacgtcagcttcgaggtgccggccggcaagctgaccgcgctgctcgggcgcaacggcgtgggcaagaccacactgctcaagtgcctgatgggcgtgctgccggcgaccagcggcacgatcgattgggagggccgggccatccacaagctgccggcctacgagcgcgtctcgcgggggctcgcgtacgtgccgcagggccgcgagatctttccgcgcctgacggtggaagagaacctgctgatcggcgcggcggccaggcgcgcaccgtccggggtgccggattcgatctatgcgctctttcccgtgctcgcgcagatgaaggggcgccgcggcggcgacctgtccggcggccagcagcagcaactggccatcggccgcgcgctgatgagcgagccgcgcttgctgatcctggacgagccgaccgagggcatccagccgtccgtcatccaggagatcggccgcacgctgcgccggctggtggacgagttcggcatgtcggtgctgctggtcgagcagtactacgatttcgcgcggcgcatcgccgatcgctacgtcgtcatgcggcgcggcgaggtcatcgcccagggcgacggcgccgacatggatgccgatggcgtgcgcgaactggtggccgtctga

SEQ ID NO: 94772 - protein, 230 aa, Ralstonia solanacearum GMI1000
MLQIQQLNQYYGGSHILRNVSFEVPAGKLTALLGRNGVGKTTLLKCLMGVLPATSGTIDWEGRAIHKLPAYERVSRGLAYVPQGREIFPRLTVEENLLIGAAARRAPSGVPDSIYALFPVLAQMKGRRGGDLSGGQQQQLAIGRALMSEPRLLILDEPTEGIQPSVIQEIGRTLRRLVDEFGMSVLLVEQYYDFARRIADRYVVMRRGEVIAQGDGADMDADGVRELVAV

SEQ ID NO: 94773 - DNA, 717 bp, Agrobacterium tumefaciens str. C58
  CDS (1)..(717): transl_table=11
atgcccgcagcgccgcttgaaatcgccaacctcaccgccggttatggcccgacaagggtgatcgagggcctgtcgctctccgtgccatcgggctcgcgttttgccgtgctcggccgcaacggcgtcggcaagaccagcctcttcgccacgctggccggccagacgaaacgttttgccggcgatatccgcattggtggacaggacatcgccgctttgccgagtgctgcccgcgccaaggccggcctcggttacgtgccgcagacccgcgatgtattccccaccctcacggtggaggaaaaccttttcgtcggcctcaagacccgtccgaaatccgcgatcgaggaagcctacaccctgtttccgcgcctgaaggagcgccgccgcaacctcggctcgcaactctctggcggcgaacagcagatgctttccaccgcccgcaccattctcggccagccgcgcgtgctgcttctcgacgaaccgctcgaaggcctcgcccccgtcatctgcgaagaactgatggcggccttctcgaaactcgcgaaatccggcgaaatgaccattcttctcatcgaacagcgcatccagatggccatagactttgccgaccacgccatcatcatggaacgcggccgcatcgtctgggaaggaccatcgagcgagcttgcggagaaccctggtatcatcgacacccatctcggggttggcgggctgcactga

SEQ ID NO: 94774 - protein, 238 aa, Agrobacterium tumefaciens str. C58
MPAAPLEIANLTAGYGPTRVIEGLSLSVPSGSRFAVLGRNGVGKTSLFATLAGQTKRFAGDIRIGGQDIAALPSAARAKAGLGYVPQTRDVFPTLTVEENLFVGLKTRPKSAIEEAYTLFPRLKERRRNLGSQLSGGEQQMLSTARTILGQPRVLLLDEPLEGLAPVICEELMAAFSKLAKSGEMTILLIEQRIQMAIDFADHAIIMERGRIVWEGPSSELAENPGIIDTHLGVGGLH

SEQ ID NO: 94775 - DNA, 780 bp, Agrobacterium tumefaciens str. C58
  CDS (1)..(780): transl_table=11
atgaccgaggataacaggctgctcacggtggagggtctccatgcgacctacaatcatgccatcaccgccttgcatggcgtcacgctttcgcttgggcgaggggaaatcctcgccattctcggtgcgaacggcgcgggaaagaccacgacgctgaaggcggtttcgaaccttttgccagctgaacgagggcaggtggtcgccggccatatcctgttcgacggccgcgctgtcacgcacgaaaccccggcacgcctcgtccgtctcggtctcgtgcaggtgctcgagggccgccattgtttcaaggcgctgacggtcgaagagaacctggtatccggcggtctcggccgttccgcctcacgtgccgaaatcgcggttgatcttgagaaaatttatacgcacttcccgcgacttaaggaaaaacgccgggttctgtccggcctcacgtccggcggcgagcaacagatgacagcaatcggcagggcgcttatgtcgcgaccccggctgctggtgctcgatgagccatcgatggggcttgcgccgcgtgtcgtgcaggacattttccgcacgctgaaacacctcaatcgcgaggaaggcctgtcgatcctcgtagccgagcagaattcggcggtggcgctcaactatgcggacagggccgtcattctggagaatggcgtcagcgtgctttcgggcacggctgccgaactcagggcgcgggatgatgtgaaggctttttatctcggcgagaaaccatcggcatctgccgccgcgtatattcattga

SEQ ID NO: 94776 - protein, 259 aa, Agrobacterium tumefaciens str. C58
MTEDNRLLTVEGLHATYNHAITALHGVTLSLGRGEILAILGANGAGKTTTLKAVSNLLPAERGQVVAGHILFDGRAVTHETPARLVRLGLVQVLEGRHCFKALTVEENLVSGGLGRSASRAEIAVDLEKIYTHFPRLKEKRRVLSGLTSGGEQQMTAIGRALMSRPRLLVLDEPSMGLAPRVVQDIFRTLKHLNREEGLSILVAEQNSAVALNYADRAVILENGVSVLSGTAAELRARDDVKAFYLGEKPSASAAAYIH

SEQ ID NO: 94777 - DNA, 750 bp, Brucella melitensis 16M
  CDS (1)..(750): transl_table=11
atgatgcaggctgaaaccatgcagaaaaagcaaccgctcctatccgtcgagaaggtcgagacctattacggcaatatctgtgcgctcaagggcatcgatatgaccgtggatgagggtgagatcgtggcgctgatcggcgccaacggtgcgggcaaatccacattgatgatgacgatcttcggctcgccgcgcgcgcgcaccggtcgcattctcttcaatggcaaggacattacctccatgccgccgcacgagattgcgaagctacgtattgcgcagtcgccggaaggccgtcgcatcttcccgcgcatgacggttctggaaaacctccagatgggcgcgagcctcgataatcagcaatatttcgatgaagacgtaaagctgatgttcgatctgttcccgcgtctgaaggagcgtatcaaccagcgcggcggcacgctttcgggcggcgaacagcagatgctggccattgcgcgcgcgctgatggtgcgtccgaagctcctgcttctcgatgagccgtcactgggtcttgcgccgctgatcgtgaagcagatcttcgaggccatcaaggaattgaaccgcacacagggtttgacggtattcctcgtcgaacagaacgcattcggtgcgctgaagcttgccgaccgcggctatgtgatggtcaacggatcaatcacgatgagtggttcgggacgtgaacttttgtccgacccggaagtgcgtgcggcttatctcgaaggcggaaggcattag

SEQ ID NO: 94778 - protein, 249 aa, Brucella melitensis 16M
MMQAETMQKKQPLLSVEKVETYYGNICALKGIDMTVDEGEIVALIGANGAGKSTLMMTIFGSPRARTGRILFNGKDITSMPPHEIAKLRIAQSPEGRRIFPRMTVLENLQMGASLDNQQYFDEDVKLMFDLFPRLKERINQRGGTLSGGEQQMLAIARALMVRPKLLLLDEPSLGLAPLIVKQIFEAIKELNRTQGLTVFLVEQNAFGALKLADRGYVMVNGSITMSGSGRELLSDPEVRAAYLEGGRH

SEQ ID NO: 94779 - DNA, 702 bp, Corynebacterium glutamicum ATCC 13032
  CDS (1)..(702): transl_table=11
atgttggaaatcactaatttgtgtgcaggttatggccgcacgcaggtacttcattctctttcaatctccacgagcagcaacggcatcctgtcgatcctcggccacaatggcgctggtaaatccaccttgctgcgaaccgcggtggggttgattaagccgacttccggagaggtcaaacttttcggccaggatgtcacctcgttgtccacgcatgagcgagtaaagcgcggaatggcttatgtgccgcagggccagcagtcttttacgcagcttagttgcatggaaaatttgcaggtggtagcggatctgcagggacgtgtgggcaaggcacgcatcgcggaggcgcttgatcgctttccggcgctgacccaggtgctggaccgccaagccggcctgttgtcgggtggtcagcgtcagcagcttgccatcgcccgcgcgctgatcacggcgccaaagcttttgcttctcgacgaacccaccgagggtattcagccttcggtggttgctgaaattcagcagaccatcatcgatttggctaaggacggcatgagcattgtcctggtggagcaaaacattggttttgcattggatgctgcaacaagctacgccattgtggcgcgtggtcaggtcgtggaatcgggacaaggcgctgaaaccaccgcagagaagcagactaaagtgcgggaatctctagcaatctag

SEQ ID NO: 94780 - protein, 233 aa, Corynebacterium glutamicum ATCC 13032
MLEITNLCAGYGRTQVLHSLSISTSSNGILSILGHNGAGKSTLLRTAVGLIKPTSGEVKLFGQDVTSLSTHERVKRGMAYVPQGQQSFTQLSCMENLQVVADLQGRVGKARIAEALDRFPALTQVLDRQAGLLSGGQRQQLAIARALITAPKLLLLDEPTEGIQPSVVAEIQQTIIDLAKDGMSIVLVEQNIGFALDAATSYAIVARGQVVESGQGAETTAEKQTKVRESLAI

SEQ ID NO: 94781 - DNA, 792 bp, Streptomyces coelicolor A3(2)
  CDS (1)..(792): transl_table=11
atgcccgcagcaccaccggacggcgcgcccgcgctgcacgtcgagagcctcgacgtcacgtacgggcgcgcactgtccgccctccgctccgtgtccctgaccgtcccgcacggcgccgtcgtcgcgctgctcggagccaacggcgccggcaagacgacgctgctgcgggccgtctcgggcaccctgcgcctgcaccgcggcgcgatcacggccggccgggtccgctacggcgacacggtcctggacggccgggacccggtcgccgccgtacgcgccggagtcgtccaggtgcccgagggcaggcgggtcttcgccggactcaccgtcgacgagaacctgcgggccggcgggctcggcctgaaccgtcgcgcccccgcccaggtccgcgaggccagggagcgcgtcttcaccctgttcccgaggctcgccgagcgcacccgccaggccgcgggtctgctgtccggcggggaacagcagatgctcgccatcggccgggccctgatggccgcgccccgcctgctcctgctcgacgagccctcgctcgggctcgccccgatgatggtcgaccgcatcgccgaggtcgtccgcgagatcaacgcccagggcaccgccgtcctgctcgtcgaacagaacgccggcatggccctgtcgctcgccgagcacgcccacgtcctggaggtcggcgaggtccggctgtccggcgccgccgccgacctcgcgaggacggacgccgtacgccgcctctacctcggcgagaccaccgagggtgccgacggcaagggggccgcgtga

SEQ ID NO: 94782 - protein, 263 aa, Streptomyces coelicolor A3(2)
MPAAPPDGAPALHVESLDVTYGRALSALRSVSLTVPHGAVVALLGANGAGKTTLLRAVSGTLRLHRGAITAGRVRYGDTVLDGRDPVAAVRAGVVQVPEGRRVFAGLTVDENLRAGGLGLNRRAPAQVREARERVFTLFPRLAERTRQAAGLLSGGEQQMLAIGRALMAAPRLLLLDEPSLGLAPMMVDRIAEVVREINAQGTAVLLVEQNAGMALSLAEHAHVLEVGEVRLSGAAADLARTDAVRRLYLGETTEGADGKGAA

SEQ ID NO: 94783 - DNA, 717 bp, Streptomyces coelicolor A3(2)
  CDS (1)..(717): transl_table=11
atgaccgcactgctcgaggtcgaggacctccgcgtcgcctacggcaagatcgaggccgtcaagggcatctccttcaaggtcgacgccggcgaggtggtcaccctcatcggcaccaacggcgccgggaagaccacgacgctgcgcaccctgtcggggctgctgaagccggtcggcggccagatcaggttcggcggcaagtcgctcaagaaggtccccgcgcaccagatcgtctcgctgggcctcgcccactcgcccgaggggcggcacatcttcccgcgcatgacgatcgaggacaacctgcgcctcggcgccttcttgcgcagcgaccggccgggcatcgagaaggacatccagcgcgcctacgacctcttcccgatcctcggtgaacgccgcaagcaggccgcgggcaccctgtccggcggcgagcagcagatgctcgccatgggccgcgccctgatgtcccagcccaagctgctcatgctcgacgagccctccatgggcctgtcgccgatcatgatgcagaagatcatggcgacgatcgccgagctgaagtcccagggcaccaccatcctgctcgtcgagcagaacgcccaggcggccctgtccctggccgaccacggccacgtcatggaggtcggcaacatcgtcctgtccggcagcggccaggacctgctgcacgacgagtcggtccgcaaggcctacctgggcgaggactga

SEQ ID NO: 94784 - protein, 238 aa, Streptomyces coelicolor A3(2)
MTALLEVEDLRVAYGKIEAVKGISFKVDAGEVVTLIGTNGAGKTTTLRTLSGLLKPVGGQIRFGGKSLKKVPAHQIVSLGLAHSPEGRHIFPRMTIEDNLRLGAFLRSDRPGIEKDIQRAYDLFPILGERRKQAAGTLSGGEQQMLAMGRALMSQPKLLMLDEPSMGLSPIMMQKIMATIAELKSQGTTILLVEQNAQAALSLADHGHVMEVGNIVLSGSGQDLLHDESVRKAYLGED

SEQ ID NO: 94785 - DNA, 714 bp, Streptomyces coelicolor A3(2)
  CDS (1)..(714): transl_table=11
gtgagcgaactgctgcgggccaccgggctggtgtccggatacggccggatcgaggccctgcacggagtggacgtctcggtggatgccgggcaggccgtgaccgtgatcggacccaacggtgccggaaagtccacgctgttgcgcaccctggcgggcctgtcccgtccctggcgggggaccgtcgagttcgacggcacggacgtcacccgttggccggcggagcagcgggcgcgagtggggctggtgttcgttcccgagggccgtcacgtgttcgccgggctcaccgtcgaggagaacctgcggctgggcggctacgcggcggaccgggccgcggccggactggacgcggtctacgacctcttcccggcactcgtcgcccgccgacggcagcccgcgggcactctgtcgggcggcgagcagcagatggtggccatcggccgaggcctgatgagccgcccgagactgctgctgctggacgagccgtcgctggggctcgccccgcaggcggtccggctggtgaccgacgcactggtggaactggccgtgcgtggcacgacgctggtcctggtcgagcagagcgcgagcgtcgccttccgggtggcacagcgcggacacctcatggagcgtggggaactcgtggcctcgggacccgtcggccgactgagcgaggaccccagggtcgtccgggcctacttgggagggcccgtcggatga

SEQ ID NO: 94786 - protein, 237 aa, Streptomyces coelicolor A3(2)
MSELLRATGLVSGYGRIEALHGVDVSVDAGQAVTVIGPNGAGKSTLLRTLAGLSRPWRGTVEFDGTDVTRWPAEQRARVGLVFVPEGRHVFAGLTVEENLRLGGYAADRAAAGLDAVYDLFPALVARRRQPAGTLSGGEQQMVAIGRGLMSRPRLLLLDEPSLGLAPQAVRLVTDALVELAVRGTTLVLVEQSASVAFRVAQRGHLMERGELVASGPVGRLSEDPRVVRAYLGGPVG

SEQ ID NO: 94787 - DNA, 762 bp, Yersinia pestis KIM
  CDS (1)..(762): transl_table=11
ttggagaatgtcagtgagcttgcatttttccctcatatttatttgataattaagggcgcttttatgctgcaagtgaatgagcttgatcaatattatggtggtagccatattctgcgcggcttgacttttgaggcccgtgtgggggaagtcacttgtttattgggccgcaatggtgtcggcaaaaccacgttgctgaaatgcctgatagggcttgttccgattaagaacggcagcatcacttgggaggggaaaaatattagccaccagtcgccacatcagcgggtcaaagaaggcattgcttatgtcccccaagggagagaaattttcccccggcttacagtggaagagaatattttactggggctttcacgtttccccggttcacagagtaaaagcgtacctgaacatatctatcaactgttcccggtgttacaagagatgaagcatcgccgtggtggcgatttatccggtggtcagcagcagcagttggcgattggtcgggcattggcgtgccagccccggttattgattctggatgagccgaccgagggtattcagccatccgttatcaaggagatcgggggggttatcaaaaaactggcggctcagggggatatggctatcctgctcgtggagcagttttatgattttgccgccgagctggcggataactatttggtgatgtctcgaggaaaaatagtccaacggggattaggtattgatatggaacatgatgatgttcgccgtttggtggcgatttag

SEQ ID NO: 94788 - protein, 253 aa, Yersinia pestis KIM
MENVSELAFFPHIYLIIKGAFMLQVNELDQYYGGSHILRGLTFEARVGEVTCLLGRNGVGKTTLLKCLIGLVPIKNGSITWEGKNISHQSPHQRVKEGIAYVPQGREIFPRLTVEENILLGLSRFPGSQSKSVPEHIYQLFPVLQEMKHRRGGDLSGGQQQQLAIGRALACQPRLLILDEPTEGIQPSVIKEIGGVIKKLAAQGDMAILLVEQFYDFAAELADNYLVMSRGKIVQRGLGIDMEHDDVRRLVAI

SEQ ID NO: 94789 - DNA, 753 bp, Thermosynechococcus elongatus BP-1
  CDS (1)..(753): transl_table=11
atgacccacgttgatcactatcccctaccccggacagcagtggatgccgattggatgctgcgcattcgtggcctcaatgtctattacggcgaaagccatatcctgcgggatattgacctgagtgtgcctgctggcaaaatggtgtgccttattggccgtaatggcgttggcaaaaccacactcctgaaaacaatcattggcctgctcaaaccccgcagtggccaattgtactgtcaggggcaatctctgctgccgttgcgtccggatcagcgagccaagctaggaattggctatgtaccccaaggacgggaaattattccccggttgacggtgaaggagaatctactccttggcttggaagcgcgtccccgtcggcaggcaaaacaggagattccagaggaaatttttgacctctttcctgtgctgaagaaaatgatccaccgcatggggggagatctcagcggcgggcagcagcaacagttggcgatcgctcgcgccctaatgggagaacctagacttctcctgttggatgaacccactgagggaattcaaccctcgatcatccttgaaattgaggcggcggttcgtcgcattattgccgcccgaggcatttctgtccttctagtggagcagcacctccactttgtccgtgaggcggactggtactatgcaatgcaaaagggaggcattgttgcctctggccccaccagtgatctcagtcaagaggtgattcagcggttcctcgcagtctag

SEQ ID NO: 94790 - protein, 250 aa, Thermosynechococcus elongatus BP-1
MTHVDHYPLPRTAVDADWMLRIRGLNVYYGESHILRDIDLSVPAGKMVCLIGRNGVGKTTLLKTIIGLLKPRSGQLYCQGQSLLPLRPDQRAKLGIGYVPQGREIIPRLTVKENLLLGLEARPRRQAKQEIPEEIFDLFPVLKKMIHRMGGDLSGGQQQQLAIARALMGEPRLLLLDEPTEGIQPSIILEIEAAVRRIIAARGISVLLVEQHLHFVREADWYYAMQKGGIVASGPTSDLSQEVIQRFLAV

SEQ ID NO: 94791 - DNA, 696 bp, Pseudomonas putida KT2440
  CDS (1)..(696): transl_table=11
atgctcaacgtcgattcgatccattcctactacgacaagagccatgtgctcgaaggcgtctcgctcaaggtcgaggcaggcgaactggtaacgctgctggggcgcaacggcgcaggcaagaccaccaccttgcgcagcatccttggcattgtccgcccacgacaggggcagatcagcttcaacggccagcagttggtcggccgcgaaattttcgatatcgcccggctcggcattgctctggtgccggagcaccgcggcattttccgccagctcagcgtggaggagaacctgaagattgccgtgcgcaagaccagtcgctggcagctggaggacgtctacagcatgttcccgcgcctgaaggagcggcgccgcaacggtggtttcgccctgtccggtggcgagcagcaaatgttggccatcgcccgcgccctgctcaacggccccaggctgctgatcctcgacgagcccaccgaaggcctggccccggtgattgtcgatgaactggtgaagatcctgcgacggatcaaggacgaagggctgtcgatcctgctggtagagcagaacctaatggtctgcgatgcccttgctgatcgccactatgtgctggagcagggccgcgtcgcttaccagggcagtgcggcgcagttccgcgaggacccgagcatcaagaaccgttacctggcccttagcgcctga

SEQ ID NO: 94792 - protein, 231 aa, Pseudomonas putida KT2440
MLNVDSIHSYYDKSHVLEGVSLKVEAGELVTLLGRNGAGKTTTLRSILGIVRPRQGQISFNGQQLVGREIFDIARLGIALVPEHRGIFRQLSVEENLKIAVRKTSRWQLEDVYSMFPRLKERRRNGGFALSGGEQQMLAIARALLNGPRLLILDEPTEGLAPVIVDELVKILRRIKDEGLSILLVEQNLMVCDALADRHYVLEQGRVAYQGSAAQFREDPSIKNRYLALSA

SEQ ID NO: 94793 - DNA, 726 bp, Pseudomonas putida KT2440
  CDS (1)..(726): transl_table=11
atggcaaccctcaaagcccagcacctggcaaagagctacaaggggcggcaggtagtacgtgatgtcagcctgtctatcgacagcggccagatcgtcggcctgctcggccccaacggcgccggcaagaccacttgcttctacatgattgtcgggctggtccaggccgaacagggccgggtactgatcgacaacctcgatgtcagccaccagcccatgcacggccgcgcccgtgccggaatcggctacctgccgcaggaagcctcgatcttccgcaagctgtcggtcgccgacaacatcatggccatcctcgagacccgcaaggacctcgatcgggacggccgccgcaaagagctggaaagcctgctgcaggagttccacatcagccacatccgggacaacctcggcatgagcctgtctggtggtgaacgccgccgcgtcgaaattgcgcgcgccctggcgaccgcacccaagttcatcctgctggacgaaccgttcgccggtgtcgacccgatttcggtcggcgacatcaagcagatcatccaccacctcaaggccaaaggtatcggcgtactgattaccgaccacaacgtgcgtgaaaccctggacatctgcgaaaccgcttatatcgtcaacgatggccgactgatcgccgaaggtgacgctgaaaccatcctggcaaacgaactggtcaaagaagtttacctgggtcacgagttccgcctctga

SEQ ID NO: 94794 - protein, 241 aa, Pseudomonas putida KT2440
MATLKAQHLAKSYKGRQVVRDVSLSIDSGQIVGLLGPNGAGKTTCFYMIVGLVQAEQGRVLIDNLDVSHQPMHGRARAGIGYLPQEASIFRKLSVADNIMAILETRKDLDRDGRRKELESLLQEFHISHIRDNLGMSLSGGERRRVEIARALATAPKFILLDEPFAGVDPISVGDIKQIIHHLKAKGIGVLITDHNVRETLDICETAYIVNDGRLIAEGDAETILANELVKEVYLGHEFRL

SEQ ID NO: 94795 - DNA, 702 bp, Pseudomonas putida KT2440
  CDS (1)..(702): transl_table=11
atgctgaagttcgaaaacgtttccactttctacggcaagatccaggcgttgcacagcgtcaacgtggagatcaaccagggcgagatcgtcaccctgatcggcgccaacggtgccggcaagtcgaccttgctgatgaccctgtgcggttcgccgcaggcgcacagcggcagcatcaagtatctgggggaagaactggtcggccagccgtcctcgcacatcatgcgcaagagcatcgcggtggtgccggaaggccgccgcgtgttcgctcgtctgacggtcgaggaaaacctggccatgggcggtttcttcaccgacaagggcgactatcaggagcaactggacaaggtcctgcaactgttcccgcgcctgaaagagcgttacatccagcgcggcggcaccatgtccggtggcgagcagcagatgctggccatcggccgggcgctgatgagcaagcccaagctgctgctgctcgacgagccttcgctgggcctggcgccgatcatcatccagcagatcttcgacatcatcgaacagctgcgccgcgatggcgtgacggtgttcctggtggagcagaacgccaaccaggcgctgaagatcgctgaccgggcgtacgtgctggaaaacggccgggtggtgatgcagggtaccggtgaagcactgctgacggacccgaaggtacgcgacgcgtatctggggggatag

SEQ ID NO: 94796 - protein, 233 aa, Pseudomonas putida KT2440
MLKFENVSTFYGKIQALHSVNVEINQGEIVTLIGANGAGKSTLLMTLCGSPQAHSGSIKYLGEELVGQPSSHIMRKSIAVVPEGRRVFARLTVEENLAMGGFFTDKGDYQEQLDKVLQLFPRLKERYIQRGGTMSGGEQQMLAIGRALMSKPKLLLLDEPSLGLAPIIIQQIFDIIEQLRRDGVTVFLVEQNANQALKIADRAYVLENGRVVMQGTGEALLTDPKVRDAYLGG

SEQ ID NO: 94797 - DNA, 774 bp, Pseudomonas putida KT2440
  CDS (1)..(774): transl_table=11
atgaccaatgcgacgcttccagccgccgtcagcagcgaactgctggcagtggaggacatcgaagtgatctacgacggcacgatccttgccgtggccggtgtatccctgcgggtcgggcagggcgatatcgtcgccttgctaggcgccaacggtgctggcaagagcaccacgctcaaggctatttccggcctggttcaggccgaccgggcgcatgtcagtcgtggccatatccgcttccaggggcaggacaccgccggtgtcgcggccaacctgctggcacgccagggtatcgtccatgtgttggaaggacggcatgtgttctcccacctgactatcgaggaaaacctgcgcagtggcggcttcctgcgtaacccgacgcggcgccaactggagcaggatctggagcgcatctatgcctggttcccgcgcttgaagaccaagcgcaagactcaggctgggctgacttccggcggtgagcagcagatgctcgccatcggccgcgcgctgatgaccaaaccgcgcctggtgctgctcgacgaaccctcgatgggcttggcgccgatcatcgtcgaggagatcttcgccatcgtcgcccagctcaatgcgcagcagggcgtgagctttctggtggccgagcagaacatcaacgttgccctgcgctatgcgagccatgcctacatcctggaaaacggccgggtggtaggtgagggcagtgctgccgagctggccgcgcgggaagatattcagcatttctacctgggcggcaagggctga

SEQ ID NO: 94798 - protein, 257 aa, Pseudomonas putida KT2440
MTNATLPAAVSSELLAVEDIEVIYDGTILAVAGVSLRVGQGDIVALLGANGAGKSTTLKAISGLVQADRAHVSRGHIRFQGQDTAGVAANLLARQGIVHVLEGRHVFSHLTIEENLRSGGFLRNPTRRQLEQDLERIYAWFPRLKTKRKTQAGLTSGGEQQMLAIGRALMTKPRLVLLDEPSMGLAPIIVEEIFAIVAQLNAQQGVSFLVAEQNINVALRYASHAYILENGRVVGEGSAAELAAREDIQHFYLGGKG

SEQ ID NO: 94799 - DNA, 858 bp, Pseudomonas putida KT2440
  CDS (1)..(858): transl_table=11
atgagaggcgtgcccccagtccacccggagttcatgctggaaccggtattcgacaacctcggcgccgggcgcgatgccatcggcctgggccaaagccgcaaggccggcctggatacccgccacggtacggtgctgagcctggaagacatcagcgtcagcttcgatggtttcaaggcgctcaacacgctgaacctgtacatcggggtgggcgagctgcgctgcatcatcggccccaacggcgccggcaagaccacgatgatggacgtaatcaccggcaagacccgccccgacagcggcacggcttacttcggcgacaccctcgacctgacccgcatgagcgaataccagatcgcccaggccggcattggccgcaagttccagaagcccacagtgttcgaagcgctgaccgtgttcgagaacctggagctggcgctgaagaccgacaagtcggtgtgggccagcctggccgcgcgcctgagcggtgaccagcgccagcgcatcgaggacgtgctgaccaccttgcgcctgctgccgctggcccagcgccaggccggcttgctgtcgcatgggcagaagcagtttctggagatcggcatgctgctggtgcaggagccgcaactgctgctgctcgatgaaccggtggccggcatgaccgatgccgagaccgaatttaccgccgagctgttcaagggcctggctggcaagcattcgctgatggtggtggagcatgacatgggcttcgtcggcagcattgccgaccatgtgaccgtgctgcaccaggggagtgtgctggcggaaggctcgctggagcaggtgcaggcagatgagcgggtggtcgaggtgtatctgggccgctga

SEQ ID NO: 94800 - protein, 285 aa, Pseudomonas putida KT2440
MRGVPPVHPEFMLEPVFDNLGAGRDAIGLGQSRKAGLDTRHGTVLSLEDISVSFDGFKALNTLNLYIGVGELRCIIGPNGAGKTTMMDVITGKTRPDSGTAYFGDTLDLTRMSEYQIAQAGIGRKFQKPTVFEALTVFENLELALKTDKSVWASLAARLSGDQRQRIEDVLTTLRLLPLAQRQAGLLSHGQKQFLEIGMLLVQEPQLLLLDEPVAGMTDAETEFTAELFKGLAGKHSLMVVEHDMGFVGSIADHVTVLHQGSVLAEGSLEQVQADERVVEVYLGR

SEQ ID NO: 94801 - DNA, 699 bp, Pseudomonas putida KT2440
  CDS (1)..(699): transl_table=11
atgctcaagatcgacaccctgcaccagtactacggcggcagccacatcctgcgcggcctgtccttcgaagccaagatcggcgaagtgacctgcctgctgggccgcaacggcgtgggcaagaccaccttgctgcgctgcctgatgggcctggtgcccgcccgcgacggcagcatcgaatgggaaggcaagccgatcaccgcgctcaaaccgcagcaacgggtgcaggccggcatcgcctacgtgccccagggccgcgagatcttcccgcgcctgaccgtcgaggaaaatctgctgatgggcctgtcgcgcttccccgcccgtgaagcccgcgaggtcccggccttcatctacgaactgttccctgtgctggagcagatgaaacagcgccgcggtggcgacctgtctggcggccagcagcaacagctggccatcggccgcgccctcgccagccgcccgcgcctgctgattctcgacgagccgaccgaaggcatccagccctcggtgatcaaggaaatcggcgcggtcatccgccgcctggccgagcgtggcgacatggcgattttgctggtggagcagttctacgactttgccgaggcgctggctgaccagtacctggtcatggcccgtggcgaaatcatccagcgcggtcgcggcgaaaacatgcaagccgaaggtgtacgcgggctggtaaccatttaa

SEQ ID NO: 94802 - protein, 232 aa, Pseudomonas putida KT2440
MLKIDTLHQYYGGSHILRGLSFEAKIGEVTCLLGRNGVGKTTLLRCLMGLVPARDGSIEWEGKPITALKPQQRVQAGIAYVPQGREIFPRLTVEENLLMGLSRFPAREAREVPAFIYELFPVLEQMKQRRGGDLSGGQQQQLAIGRALASRPRLLILDEPTEGIQPSVIKEIGAVIRRLAERGDMAILLVEQFYDFAEALADQYLVMARGEIIQRGRGENMQAEGVRGLVTI

SEQ ID NO: 94803 - DNA, 717 bp, Pseudomonas putida KT2440
  CDS (1)..(717): transl_table=11
atgagtgcacccattctcgagctgaaagacttggacgtgttctatgggccgatccaggcactgaagaaagtctcgatgcacattaacgagggcgagacggtaagcctgatcggcgccaacggtgccggcaagtcgaccctgctgatgtcgattttcggccagccgcgggcggcatccgggcatatcgtgtaccgcggcaccgacatcacccgcaaatcctcgcactacatcgcctccaacggcattgcccagtcgccggaggggcgccgggtgtttcccgacatgaccgtcgaggaaaacctgatgatgggtaccatccccatcggcgacaagcatgccgacgaagacatgcagcgtatgtacgagctgttcccgcggttgaaggagcggcgtaaccagcgggccatgaccatgtcgggtggcgagcagcaaatgctggcgattgcccgggcgctgatgagccggccgaaattgctgttgctggacgagccctcgctgggtctggcaccgatcgtggtcaagcagattttctcgaccctgcgagaactggccaagaccgggatgactatcttcctggtggagcagaacgccaaccatgcgctgaaactgtcggaccgggcctatgtgatggtcaacgggcagattcgcatgaccgggaccgggcaggaactgttggtcaatgaggaagtgcgtaacgcttatctgggcgggcactga

SEQ ID NO: 94804 - protein, 238 aa, Pseudomonas putida KT2440
MSAPILELKDLDVFYGPIQALKKVSMHINEGETVSLIGANGAGKSTLLMSIFGQPRAASGHIVYRGTDITRKSSHYIASNGIAQSPEGRRVFPDMTVEENLMMGTIPIGDKHADEDMQRMYELFPRLKERRNQRAMTMSGGEQQMLAIARALMSRPKLLLLDEPSLGLAPIVVKQIFSTLRELAKTGMTIFLVEQNANHALKLSDRAYVMVNGQIRMTGTGQELLVNEEVRNAYLGGH

SEQ ID NO: 94805 - DNA, 771 bp, Bordetella parapertussis 12822
  CDS (1)..(771): transl_table=11
atgagcacagtcgccgagcctacccgcgccgccgccgccacgcaggcgcccgcgctgctgcgcgtggcggggctgaatgcctggtatggcgccgtccatatcctgttcgacgtggacctggaggtgcggcgcggcgaagtggtggcgctgatggggcgcaacggcgcgggcaagtccaccacgttcaaggccgtcatgggcctgctggccaagcggcgcggcgcggtggagttcatgggccgcgatatcgccggcctgcagccgttcgagatcgcgcggctgggcctgggtttcgtgcccgaggaccggcgcgtgttcaccgacctcacggtcaccgagaacctggaggtgggccgccagccggcgcggcgctggccggacggcagcgccgcgccgaactggcagccgggcgcgctgtatgagctgtttcccaacctgggcgccatgcaggaccgtccgggcgggcagatgagcggcggcgagcagcagatgctgacggtggcccgcacgctgatgggcaaccctttcctggtgttgctggacgagccctccgagggggtggcgcccgtcatcgtcgagcagatggccggcatgatcctggcgctgaaggcgcagggcgccagcatcctgctgtcggagcagaacgtgcatttcgccgaactggtttccgatcgcgtctatgtgctggagaagggccagatccgctacagcgggtcgatggccgaactggccgacaacgaggaagtgcgccgcgcctacctgacggtgtga

SEQ ID NO: 94806 - protein, 256 aa, Bordetella parapertussis 12822
MSTVAEPTRAAAATQAPALLRVAGLNAWYGAVHILFDVDLEVRRGEVVALMGRNGAGKSTTFKAVMGLLAKRRGAVEFMGRDIAGLQPFEIARLGLGFVPEDRRVFTDLTVTENLEVGRQPARRWPDGSAAPNWQPGALYELFPNLGAMQDRPGGQMSGGEQQMLTVARTLMGNPFLVLLDEPSEGVAPVIVEQMAGMILALKAQGASILLSEQNVHFAELVSDRVYVLEKGQIRYSGSMAELADNEEVRRAYLTV

SEQ ID NO: 94807 - DNA, 771 bp, Bordetella bronchiseptica RB50
  CDS (1)..(771): transl_table=11
atgagcacagtcgccgagcctacccgcgccgccgccgccacgcaggcgcccgcgctgctgcgcgtggcggggctgaatgcctggtatggcgccgcccatatcctgttcgacgtggacctggaggtgcggcgcggcgaagtggtggcgctgatggggcgcaacggcgcgggcaagtccaccacgttcaaggccgtcatgggcctgctggccaagcggcgcggcgcggtggagttcatgggccgcgatatcgccggcctgcagccgttcgagatcgcgcggctgggcctgggtttcgtgcccgaggaccggcgcgtgttcaccgacctcacggtcaccgagaacctggaggtgggccgccagccggcgcggcgctggccggacggcagcgccgcgccgaactggcagccgggcgcgctgtatgagctgtttcccaacctgggcgccatgcaggaccgtccgggcgggcagatgagcggcggcgagcagcagatgctgacggtggcccgcacgctgatgggcaaccctttcctggtgttgctggacgagccctccgagggggtggcgcccgtcatcgtcgagcagatggccggcatgatcctggcgctgaaggcgcagggcgccagcatcctgctgtcggagcagaacgtgcatttcgccgaactggtttccgatcgcgtctatgtgctggagaagggccagatccgctacagcgggtcgatggccgaactggccgacaacgaggaagtgcgccgcgcctacctgacggtgtga

SEQ ID NO: 94808 - protein, 256 aa, Bordetella bronchiseptica RB50
MSTVAEPTRAAAATQAPALLRVAGLNAWYGAAHILFDVDLEVRRGEVVALMGRNGAGKSTTFKAVMGLLAKRRGAVEFMGRDIAGLQPFEIARLGLGFVPEDRRVFTDLTVTENLEVGRQPARRWPDGSAAPNWQPGALYELFPNLGAMQDRPGGQMSGGEQQMLTVARTLMGNPFLVLLDEPSEGVAPVIVEQMAGMILALKAQGASILLSEQNVHFAELVSDRVYVLEKGQIRYSGSMAELADNEEVRRAYLTV

SEQ ID NO: 94809 - DNA, 708 bp, Prochlorococcus marinus str. MIT 9313
  CDS (1)..(708): transl_table=11
atgaccattcttgagatccgtggtctaaacacctactacggtgagagccatatccttagggatgtcgacctcactgtgaaagctggtgagatggtctgcttgattggccgcaacggtgtgggcaagaccaccttgttgaaatcattgatcggtctgttgcgtcctcgtagtggagagattctgtttaatggtgaaggcttggatcgccatcctccgcatcagcgggcacgtgctggcattggttatgtgcctcaggggcgagaaattattccccatctgacggtggaggagaacctgatgctagggatggaggcattgcccggcggcttggcgcgaaaccacagcattgacccgcttgtttatgagttgttcccgatcctgcaggagtttttgccgcgtaagggcggagacctcagtggtgggcaacagcagcagcttgcgattgctcgggctctgcttggtaagccgaaattgctcctgctagatgaaccgacagagggtattcagcccaatatcgttcaagacattgaaagggctgttcgacgcatcattgccgagacagggattggcgttcttttggtagagcagcatctgcactttgttcgtcaagctgatcgctactacgccatgcaacgaggtggcattgtggccagtggtccgaccagcgatcttagtcaggcagtggtggatcaattcctcagtgtatga

SEQ ID NO: 94810 - protein, 235 aa, Prochlorococcus marinus str. MIT 9313
MTILEIRGLNTYYGESHILRDVDLTVKAGEMVCLIGRNGVGKTTLLKSLIGLLRPRSGEILFNGEGLDRHPPHQRARAGIGYVPQGREIIPHLTVEENLMLGMEALPGGLARNHSIDPLVYELFPILQEFLPRKGGDLSGGQQQQLAIARALLGKPKLLLLDEPTEGIQPNIVQDIERAVRRIIAETGIGVLLVEQHLHFVRQADRYYAMQRGGIVASGPTSDLSQAVVDQFLSV

SEQ ID NO: 94811 - DNA, 711 bp, Synechococcus sp. WH 8102
  CDS (1)..(711): transl_table=11
atgacgatgctgcttgagatccgcggcttgaacacctactacggcgagagccatatcctccgggatgtggacctcagcgtgaaagctggcgagatggtctgcctgatcggccgcaacggtgtgggcaagacgaccctgctcaaatcgctcatcggtctgttgcgtccccgacgcggtgagattgtgttcaacggcgatcgccttgaccgacaggcgccgcatcaacgggccagggctggagttggctacgtgccccaggggcgggagatcattccgcagctcacggtggaggagaacctgcaactggggatggaggcgttgcccgggggtctggcacggaatcgacgcattgacccgtttgtctatgagctgtttccggtgctgcaggaatttctgccccgcaagggcggtgaccttagcggtgggcagcaacagcaactggcgattgcccgtgccttgctcggtaagccgaagctgttgctgctcgatgaacccaccgaggggattcagcccaacattgttcaggacattgagaacgccgttcgacggatcattgacgaaaccggcatcggcgttctcttggtggagcagcatctgcatttcgttcgtcaagcagaccgctactacgccatgcagcggggcggcatcgtggcgagtggccccaccagcgacctgagccaagcggtagtggatcagttcctgagtgtctga

SEQ ID NO: 94812 - protein, 236 aa, Synechococcus sp. WH 8102
MTMLLEIRGLNTYYGESHILRDVDLSVKAGEMVCLIGRNGVGKTTLLKSLIGLLRPRRGEIVFNGDRLDRQAPHQRARAGVGYVPQGREIIPQLTVEENLQLGMEALPGGLARNRRIDPFVYELFPVLQEFLPRKGGDLSGGQQQQLAIARALLGKPKLLLLDEPTEGIQPNIVQDIENAVRRIIDETGIGVLLVEQHLHFVRQADRYYAMQRGGIVASGPTSDLSQAVVDQFLSV

SEQ ID NO: 94813 - DNA, 720 bp, Gloeobacter violaceus PCC 7421
  CDS (1)..(720): transl_table=11
atgggtaccggtctggaagtgcgggggttgacggcgggctacgggcaaattgaagtgctgcaccaggtgaatctgcacgtaggagcgggggaactggtgacggtgattggccccaacggcgccggcaaatcgacgctgctgcgcaccatctcgggcctcatccggcccaccgccggggaggtgcttttagacaaccggcgcctcgaccggctctcggccgacctgattgtccgcaccgggctgatgcacgttccggaggggcggcgcatcttctcgcgcctcacggtgctcgaaaacctggagatgggcgcctacacccgcaacgaccgcatcgaaacggacctcgaagacatttttaatctgtttccgattctcaaggagcgccgctaccagcgcgccggcaccctctcgggaggcgagcagcagatgctcgccatcggccgggccttactcggcaaaccgcgcttgctggtgctcgacgagcccagcatgggcctcgcaccgctgattgtgcaaagcatctttcagatcattgagcgcatccgctcccagggagtgatggtgctcttagtcgaacagaacgctctgcaggcgttaaaactggccgaccggggctacgtgctcgaaaacggccgcatcgcccttgaaggtccggccaatgaactactcgtctgcgaagaagtacgccggagctatttgggcgaatcgatggtcagctga

SEQ ID NO: 94814 - protein, 239 aa, Gloeobacter violaceus PCC 7421
MGTGLEVRGLTAGYGQIEVLHQVNLHVGAGELVTVIGPNGAGKSTLLRTISGLIRPTAGEVLLDNRRLDRLSADLIVRTGLMHVPEGRRIFSRLTVLENLEMGAYTRNDRIETDLEDIFNLFPILKERRYQRAGTLSGGEQQMLAIGRALLGKPRLLVLDEPSMGLAPLIVQSIFQIIERIRSQGVMVLLVEQNALQALKLADRGYVLENGRIALEGPANELLVCEEVRRSYLGESMVS

SEQ ID NO: 94815 - DNA, 702 bp, Photorhabdus luminescens subsp. laumondii TTO1
  CDS (1)..(702): transl_table=11
atgttggaatttaagcgggtatctgcccactatggggaagttcaggtgttgcatcaggttagcctgaatattcagcagggagaaattgtcactctgattggtgcaaatggcgcaggaaaaacaacattgcttagtaccttatgtagtgaacccagagcaaccgaaggttctattatttttcgtggtaaggacatcacccaatggccgacatctcgtattatgcgtgaggacattgcgattgttcctgaggggcgcagagtgtttgctcgtatgacagtggaagagaatttggcaatgggcggtttttttgctgataagactcagtatcagcagcgcattgagcgggtttatgatctatttccgcgtttacaggaaagacgtcaccagcgggctggaacgatgtccggtggtgaacagcaaatgttggcaattggccgtgctttaatgagtcagccacagttattgttgttggatgagccttcattgggattggcgccgatagttatcattcagattttcgatactatccagcagttgagggaagaggggatgacaatctttttagttgaacagaatgcaaatcaggcgttgaaattggctgaccgaggatatgtattggaaaacggtcagatcgtactagaagacagcgggtctgcattattggttaatgaagctgtgagaaatgcgtatttggggggatag

SEQ ID NO: 94816 - protein, 233 aa, Photorhabdus luminescens subsp. laumondii TTO1
MLEFKRVSAHYGEVQVLHQVSLNIQQGEIVTLIGANGAGKTTLLSTLCSEPRATEGSIIFRGKDITQWPTSRIMREDIAIVPEGRRVFARMTVEENLAMGGFFADKTQYQQRIERVYDLFPRLQERRHQRAGTMSGGEQQMLAIGRALMSQPQLLLLDEPSLGLAPIVIIQIFDTIQQLREEGMTIFLVEQNANQALKLADRGYVLENGQIVLEDSGSALLVNEAVRNAYLGG

SEQ ID NO: 94817 - DNA, 690 bp, Rhodopseudomonas palustris CGA009
  CDS (1)..(690): transl_table=11
atgctcgctatcaacgatctgcacgtcgcctatggacagagcgaggtgttgcacgggctcaatatcgatgtcgcgccgaatgagatcgtcgcgatcatgggccgcaacggtatgggcaagaccacgctgatgaagtcgctgatgggcatcatcccgcagcgcaaaggctcgatcgcgatgaacggcatcgagctcggcggtctcaagagctacgagcgcgtcgccaaggggctcgcttacgtgccacagggccggatgatcttctccaccatgacggtgaaggagaacatcgaaaccggacttgcggcctctggcgacagcgaggtgccggcggacatttacgagctgttcccggtgctgctcgaaatgaaagggcggcgcggcggcaatctgtccggcggccagcaacagcaactcgcgatcgctcgcgcgctcgccaccaagccgaaggtgctgctgctcgacgagcctaccgaaggcatccagccgtcgatcattcgcgagatggcgcgcaccttgaagcgcatccgcgacagccgcggtctttcgatcatcgtttccgaacaggtgctcagctttgcgctcgacgtcgccgatcgggtgctggtgatcgaaaacggcgaaatcgttcgcgatgagccgcgcgccagcgtcgatgaggcgcaagtcgcgaaatatctgtccgtctag

SEQ ID NO: 94818 - protein, 229 aa, Rhodopseudomonas palustris CGA009
MLAINDLHVAYGQSEVLHGLNIDVAPNEIVAIMGRNGMGKTTLMKSLMGIIPQRKGSIAMNGIELGGLKSYERVAKGLAYVPQGRMIFSTMTVKENIETGLAASGDSEVPADIYELFPVLLEMKGRRGGNLSGGQQQQLAIARALATKPKVLLLDEPTEGIQPSIIREMARTLKRIRDSRGLSIIVSEQVLSFALDVADRVLVIENGEIVRDEPRASVDEAQVAKYLSV

SEQ ID NO: 94819 - DNA, 705 bp, Clostridium thermocellum ATCC 27405
  CDS (1)..(705): transl_table=11
gtgaaggatgtgcttaaggtggataatctctgtgcctgctacggggaaagcattgttctgaatgatgtaagcttaaaggttgaacccggaaaggtaacatgccttcttggcagaaacggggtgggtaaatcaaccttgcttaaaagcattatggggcttgtaaagacaccaaaaggaagcgtgtgtctgaacaacgagaacattatcaaacttcctacctacaaaagggcgcaaaaaggtataggctatgtgcctcagggaagggatatcttcccacagttaacggtgcatgaaaatcttattctgggtatggaaagaaacggtcataagaaaaagtcgatcgaagaggaaatatttgaactgtttccggtactaaagacaatgcttgacagaaaaggaggggatttgagcggcggacagcagcaacagctggctattgccagggctctgatatccgagcctgaagtacttcttttggatgaacctacagagggtattcagccttctataatacaggaaataggtagagttattaaaaaattgaaaaaccggggaaatgtaacaatgttgattgtagagcagtatctggagtttgtaatggatgtggccgactatttttacgttatggataaaggccgcatagtaatggagggaaaaacggagggaatcgatcctcatgaaatacaggaaaagattgctatttga

SEQ ID NO: 94820 - protein, 234 aa, Clostridium thermocellum ATCC 27405
MKDVLKVDNLCACYGESIVLNDVSLKVEPGKVTCLLGRNGVGKSTLLKSIMGLVKTPKGSVCLNNENIIKLPTYKRAQKGIGYVPQGRDIFPQLTVHENLILGMERNGHKKKSIEEEIFELFPVLKTMLDRKGGDLSGGQQQQLAIARALISEPEVLLLDEPTEGIQPSIIQEIGRVIKKLKNRGNVTMLIVEQYLEFVMDVADYFYVMDKGRIVMEGKTEGIDPHEIQEKIAI

SEQ ID NO: 94821 - DNA, 693 bp, Burkholderia vietnamiensis G4
  CDS (1)..(693): transl_table=11
atgctcaagatcgatgcactgaaccagtattacggcggcagccatatcctgcgcaacgtgaacctgagcgccgacgacggcaagctgaccgtgctgctcggccgcaacggcgtgggcaagagcacgctgctgcgctgcctgatgggggtcgtcgcggcgaaaagcggcagcgtgtcgtggcgcggcaccgcgctcggcacgctgccgccgtatgcgcgcgtcgctgccgggctcgcgtacgtgccgcagggccgcgacatctttccacggctgaccgtcgaggagaacctgctggtcggcgcggcgagccgcaaggcgccgtcgaaggtgcccgaccggatctacgaactgttcccggtgctgaaggacatgcgcgcgcgacgcggcggcgacctttccggcggccagcagcagcagcttgcgatcggccgcgcgctgatgagcgaaccgcagttgctgatcctcgacgagccgaccgaagggatccagccgtcgatcatccaggacatcgggcgcacgctgcgtcagctcgtcgacgaatcgaagatgaccgtgctgctggtcgagcagtattacgatttcgcgcgctcgatcgccgatcgctactgggtgatgagccgcggcgagatcgtcgcgggcggcgaggcgcaggatatggaaacgaacggcgtgcgcgagttgatcgcggtgtaa

SEQ ID NO: 94822 - protein, 230 aa, Burkholderia vietnamiensis G4
MLKIDALNQYYGGSHILRNVNLSADDGKLTVLLGRNGVGKSTLLRCLMGVVAAKSGSVSWRGTALGTLPPYARVAAGLAYVPQGRDIFPRLTVEENLLVGAASRKAPSKVPDRIYELFPVLKDMRARRGGDLSGGQQQQLAIGRALMSEPQLLILDEPTEGIQPSIIQDIGRTLRQLVDESKMTVLLVEQYYDFARSIADRYWVMSRGEIVAGGEAQDMETNGVRELIAV

SEQ ID NO: 94823 - DNA, 705 bp, Desulfovibrio vulgaris subsp. vulgaris str. Hildenborough
  CDS (1)..(705): transl_table=11
atgcttgagctgcgtaacgtcaacacctactacggcaacatacaggccctgcgcgacatcaacctcaccatcggcgagggggagatcgtcacgctcatcggtgccaacggcgcgggcaagagcaccacgctgatgaccatctgcggcgctacgccgccacgcaccggtgaagtgctgttcgagggaaagcccatccacaccatgaagcccaacgagatcgtgaggctgggcatcagccaggtcccggaagggcgtctcatcttccccgacctgaccgttcaggagaacctcgacctcggggcctttctgcgtagcgacaaggaaggcatcgcccgcgacctcgattacatcttcgacctctttcccatcctcgcacagcggcgtcgtcaggcagggggtaccctgtccggcggtgaacagcagatgctcgccatctcgcgcgccatcatgggccgcccgcggcttctgctgctggacgagccgtcgctgggcctcgcgcccatcatcatccagcagatcttcaacatcatccagaagatcaacggcgacggcaccacggtgtttctcgtggagcagaatgcgaaccaggcgctcaagatagcccaccgcggctatgtcatggagaccgggcgcatcacgcttgaggctcctgccgaaagtctgcttaccaacgaagaagtgcgaaaggcctacctcggcatgtaa

SEQ ID NO: 94824 - protein, 234 aa, Desulfovibrio vulgaris subsp. vulgaris str. Hildenborough
MLELRNVNTYYGNIQALRDINLTIGEGEIVTLIGANGAGKSTTLMTICGATPPRTGEVLFEGKPIHTMKPNEIVRLGISQVPEGRLIFPDLTVQENLDLGAFLRSDKEGIARDLDYIFDLFPILAQRRRQAGGTLSGGEQQMLAISRAIMGRPRLLLLDEPSLGLAPIIIQQIFNIIQKINGDGTTVFLVEQNANQALKIAHRGYVMETGRITLEAPAESLLTNEEVRKAYLGM

SEQ ID NO: 94825 - DNA, 699 bp, Acinetobacter sp. ADP1
  CDS (1)..(699): transl_table=11
atgctagaaataaagcagattaatcagttttatggtggtagccatattttacgtgatgtttccttaagtgcatcaatcggtaaatgtagcgttattttgggtagaaacggcgttggtaaaaccaccttgctaaaatgcctcatgggaattttgcccattaaatcaggagaaatcctgttggatggtcagaacatttctaaaatgtcgcctgaacagcgtgtacgtgctggtttggcatacgtaccacaaggtcgagatattttttcaacattaactgtagaagaaaatattttaattggtatggcaaaattctcaggttctaaagccaaaaaagtacctgaagaactttatgaaatttttccagtgttggacgaaatgaagcatcgacgaggcggagatttgtcgggtggacaacaacaacaactcgctattgcgcgtgctttagcatctaaacctcgtattttgatacttgatgaacctacagaaggtattcaaccttcaattattaaagatattggaaaagtaattaaaaaacttactgctcaaggtgatatgggcattattctggttgagcagttttacgattttgcagaggaacttgcagatacttacgccgttatgtcgcgtggtcaagttattgctcagggagtcggagatgaaatgccagaaaaagggattaaagaactcgtagctatttaa

SEQ ID NO: 94826 - protein, 232 aa, Acinetobacter sp. ADP1
MLEIKQINQFYGGSHILRDVSLSASIGKCSVILGRNGVGKTTLLKCLMGILPIKSGEILLDGQNISKMSPEQRVRAGLAYVPQGRDIFSTLTVEENILIGMAKFSGSKAKKVPEELYEIFPVLDEMKHRRGGDLSGGQQQQLAIARALASKPRILILDEPTEGIQPSIIKDIGKVIKKLTAQGDMGIILVEQFYDFAEELADTYAVMSRGQVIAQGVGDEMPEKGIKELVAI

SEQ ID NO: 94827 - DNA, 699 bp, Erwinia carotovora subsp. atroseptica SCRI1043
  CDS (1)..(699): transl_table=11
atgttagaaatttcagaactgaatcaatattacggcggcagccacatcctgcgcggcctgtcgtttgaggtaaaacccggtgagattacctgcctgttagggcgcaacggcgtagggaaaaccacgctgctgaaatgtctaatggggctgattccggcgaagtccggcacgattcgctggcagggcgaggcaattaatacacgtaaacctcaccagcgcgtgcagtctggcattgcctacgtaccgcagggacgggaaattttccctcgtctgacggtggaagaaaatctgctgatggggctatcgcgttttccgggcaaacaagctcgacaggtgccggatgagatctaccagctttttcccgtattggatgaaatgaaacagcgacgcggcggcgatttgtccggcggacaacagcagcagttggcgattggtcgtgcgttggcctgcaagccacagttgttgattctggatgaaccgacagaaggcatacagccatcggtgattaaagagatcggcgcggtgattcgccaactggcgcagcgtggtgacatggcgattttactggtcgaacagttttatgacttcgccgctgaactggccgacagctatctggtgatgtctcgcggggaaatcatacagcgcgggcgaggcgaaacgatggagcaggacggcgtacggggactggtcgcgatttga

SEQ ID NO: 94828 - protein, 232 aa, Erwinia carotovora subsp. atroseptica SCRI1043
MLEISELNQYYGGSHILRGLSFEVKPGEITCLLGRNGVGKTTLLKCLMGLIPAKSGTIRWQGEAINTRKPHQRVQSGIAYVPQGREIFPRLTVEENLLMGLSRFPGKQARQVPDEIYQLFPVLDEMKQRRGGDLSGGQQQQLAIGRALACKPQLLILDEPTEGIQPSVIKEIGAVIRQLAQRGDMAILLVEQFYDFAAELADSYLVMSRGEIIQRGRGETMEQDGVRGLVAI

SEQ ID NO: 94829 - DNA, 696 bp, Silicibacter pomeroyi DSS-3
  CDS (1)..(696): transl_table=11
atgctgaaactccaagacctgacgctgcattacgggcattcgcaaatcctgcacggtatctcgatggaggccgccttgggcgagatcacctgtgtcatgggcaccaacggggttggcaagaccagcctgatcaaggcgatctcggggacccatccccgctcgggcggcgagatgatcctggatggcgaaccgctgggtgttctgcctgcccaccaacttgcacacaagggggtggcctatgtcccgcaggggcgcgagatcttcccccttttgaccgtgcgtgaaaaccttgaaaccgggttcggttgcctgcccgcctcggaccggctcattcccgacgaaatctttgaactgttccctgttctcaagcagatgcagaaccgccgtggcggcgacctgtcaggtggtcagcaacaacaattggcgatcgcccgcgccctgatcaccagaccgcgtctcctgttgctggacgagccgacggagggcatccagcccaacatcatccagcagatcggccaggtcatccgccatctgcgcagccagggcacgatggcgatcattctggtcgaacaatatttcgaatttgcctacgatctcgctgaccggttcgtcgtcctgcgacgcggcgaagtgcttgtggcaggacgcaaaggggaactcagcaaggcagatgttctgaagggcgtgtcggtttga

SEQ ID NO: 94830 - protein, 231 aa, Silicibacter pomeroyi DSS-3
MLKLQDLTLHYGHSQILHGISMEAALGEITCVMGTNGVGKTSLIKAISGTHPRSGGEMILDGEPLGVLPAHQLAHKGVAYVPQGREIFPLLTVRENLETGFGCLPASDRLIPDEIFELFPVLKQMQNRRGGDLSGGQQQQLAIARALITRPRLLLLDEPTEGIQPNIIQQIGQVIRHLRSQGTMAIILVEQYFEFAYDLADRFVVLRRGEVLVAGRKGELSKADVLKGVSV

SEQ ID NO: 94831 - DNA, 693 bp, Dechloromonas aromatica RCB
  CDS (1)..(693): transl_table=11
atgctcaccattgaaaacctcaaccaggcctacggcggcagccacatcctgcgtggcctcagcttcgaagtgaagacaggcgaagtcaccaccctgcttggccgcaatggcgtcggcaagacgaccctgctcaagtcgctgatgggtctgctcaagaccaaatccggcagcatcaccttcgacggcaaggacatcacccacctgccgccgcacgaacgcgtcaaggccggcatcggcttcgtgccgcaaggccgcgagatcttcccgcgcctgacggtcgaggaaaacctgctgatgggcctcgccaccaagcccggcagcacacccatcccgcaacgcatcttcgacatgttcccggtgctcaagcagatgatgcaccgccgcggcggcgacctctccggcggccagcaacaacagctcgccatcggccgcgccctggccatggggccgaaactgctgatcctcgacgaaccgaccgaaggcatccagccctccatcatcaaggacatcgaacgcgccatccgcatgctggccgaaaccggtgaaatggcgattctactggtcgagcagtactacgacttcgccgaatcgctggccgaccagtacctgctgatggaacgcggcgaattcatcatgcgcggccggggtgagacgatgccgcaggatggggttagagaggcgttggctgtttga

SEQ ID NO: 94832 - protein, 230 aa, Dechloromonas aromatica RCB
MLTIENLNQAYGGSHILRGLSFEVKTGEVTTLLGRNGVGKTTLLKSLMGLLKTKSGSITFDGKDITHLPPHERVKAGIGFVPQGREIFPRLTVEENLLMGLATKPGSTPIPQRIFDMFPVLKQMMHRRGGDLSGGQQQQLAIGRALAMGPKLLILDEPTEGIQPSIIKDIERAIRMLAETGEMAILLVEQYYDFAESLADQYLLMERGEFIMRGRGETMPQDGVREALAV

SEQ ID NO: 94833 - DNA, 708 bp, Prochlorococcus marinus str. NATL2A
  CDS (1)..(708): transl_table=11
atgactatgcttcagataaaaggcttgaatacttactatggcgagagtcatattcttcgagatgttgatatgaatatcaaccaaggtgagatggtttgtcttataggtcgaaatggagtaggtaaaacaactttgcttaaatccttaataggtttattaactccacggcgtggagagattatttttaatggagatttagtaaatagaaagcaacctcatcaaagagctcgttcaggaattggatatgttcctcaaggacgagaaataataccttatctaactgtcgaggaaaatcttcaacttggattggaagctttgcctggaggtttagcaaaacataaaaagattgatgaacttgtatatgaactattccctgtcttaaaacaatttcttgatcgtaaagggggtgacttaagtggtggacaacagcaacaactggccattgcgcgagcactactgggaaaaccaaagttgcttttacttgatgaaccaactgaaggaatacagccgaatatcgttcaagatattgagtcagcagtcaaaaggattattagtgagactggtgttggagttttattagtagagcaacatctgcattttgtgaggcaagctgatcgttattatgcaatgcaacgtggagggatagtagcaaatggcccaactagtgaattaagtaaagcggtggtagagaaattccttagtgtttaa

SEQ ID NO: 94834 - protein, 235 aa, Prochlorococcus marinus str. NATL2A
MTMLQIKGLNTYYGESHILRDVDMNINQGEMVCLIGRNGVGKTTLLKSLIGLLTPRRGEIIFNGDLVNRKQPHQRARSGIGYVPQGREIIPYLTVEENLQLGLEALPGGLAKHKKIDELVYELFPVLKQFLDRKGGDLSGGQQQQLAIARALLGKPKLLLLDEPTEGIQPNIVQDIESAVKRIISETGVGVLLVEQHLHFVRQADRYYAMQRGGIVANGPTSELSKAVVEKFLSV

SEQ ID NO: 94835 - DNA, 693 bp, Ralstonia eutropha JMP134
  CDS (1)..(693): transl_table=11
atgctgcaggtcaatgcactgaaccagttctacggcggcagccatatcctgcgcaacgtctcgttcgaggtgccgcgcggcaagctcaccacgctgctcggccgcaacggcgtgggcaagagcaccttgctcaagtgcctgatgggggtggtgcccacgcgcagcggcagtatccaatgggaagggcgcgcgctggaaaagaagccgccttacgagcgcgtctcggcaggtctcgcctatgtgccgcaggggcgcgagatttttccacggctcacggtcgaagagaacctgctgatcggcgcggcgagccgggcgcgcccgacgggcgtgccggatcgcatctatcagctgttcccggtgctgcgcaccatgcgccagcgccgcggcggagacctgtccggcggacagcagcaacagctagcgatcggccgtgcgctgatgagcgagcccgaactgctgatcctcgacgagccgactgagggcatccagccatcgatcatccaggacatcggacgtgcgctgcgcctgctggtcgacgagttcggcatgacggtgctgcttgtcgagcagtactacgagttcgcgcgacatatcgccgaccattacgtggtgatgagccgcggcgaagtcgtggcgaagggagaaggcgcggccatggaacaggacggcgtgcgggagctgattgccgtgtga

SEQ ID NO: 94836 - protein, 230 aa, Ralstonia eutropha JMP134
MLQVNALNQFYGGSHILRNVSFEVPRGKLTTLLGRNGVGKSTLLKCLMGVVPTRSGSIQWEGRALEKKPPYERVSAGLAYVPQGREIFPRLTVEENLLIGAASRARPTGVPDRIYQLFPVLRTMRQRRGGDLSGGQQQQLAIGRALMSEPELLILDEPTEGIQPSIIQDIGRALRLLVDEFGMTVLLVEQYYEFARHIADHYVVMSRGEVVAKGEGAAMEQDGVRELIAV

SEQ ID NO: 94837 - DNA, 699 bp, Anabaena variabilis ATCC 29413
  CDS (1)..(699): transl_table=11
atgctaaatatttctaaccttaacgtttactatggcgaaagccatattctccgcaacgtagatttaactgtaccaaatgggcaaatgatctgcctaattggacgtaatggcgtaggtaaaacaaccttacttaaaacaattatggggttactgaaacctcgcagtggcactattaacttagccgggaatttaattaactccaaatcaccagatcaaagggcgaaaatggggataggttatgttccccaaggacgagatattattccgcgtttgacagttaaagaaaatctgttactggggttggaagctagacaaaaacaggtaaaaaaagctgaaattccggaagaaatttttggcttatttcctgtgttgaaaactatgttatcgcggatgggtggtgatttaagtggtggacaacagcaacaactggcgatcgctcgtgctttaatgggacagcctcaattattggttttggatgaacctacagaagggattcaaccctcaatcatcctggaaattgaagcagccgtccgtcgcattattgaaactacaggcatttctgttttacttgtagaacaacatttacactttgtccgtcaggctgattactattacgctatgcaaaagggggctattgttgcatctggttctactgatgaactgagtcaggatgtgattcaacggtttttggcagtttag

SEQ ID NO: 94838 - protein, 232 aa, Anabaena variabilis ATCC 29413
MLNISNLNVYYGESHILRNVDLTVPNGQMICLIGRNGVGKTTLLKTIMGLLKPRSGTINLAGNLINSKSPDQRAKMGIGYVPQGRDIIPRLTVKENLLLGLEARQKQVKKAEIPEEIFGLFPVLKTMLSRMGGDLSGGQQQQLAIARALMGQPQLLVLDEPTEGIQPSIILEIEAAVRRIIETTGISVLLVEQHLHFVRQADYYYAMQKGAIVASGSTDELSQDVIQRFLAV

SEQ ID NO: 94839 - DNA, 699 bp, Rhodobacter sphaeroides 2.4.1
  CDS (1)..(699): transl_table=11
atgatgctgaagaccgaagcgctgaccttgcattacggcggcagccagattctccacgggatcgacatggaggcgcgcgcgggcgaggtgacctgcatcatgggcacgaacggggtgggcaagacctcgctcctgaaggcgatctccggcacgcatccgcgctcgggcgggcggatcttcctcgaaggcgcagagctgccggtgctgccgccgcaggccatggcgcggcggggcctcggcttcgtgccgcaggggaggatgatctttccgctcctgacggtgacggagaatctcgagaccggctttgcggtccttccccgcgccgagcatcggatcccggaggagatctatgccctcttcccggtcctgaaggacatggcgcaccgccgcggcggcgatctctccggcggccagcagcagcagctcgccatcgcgcgtgccctgatcatgcggccgaagcttctgcttctcgacgagcccaccgaggggatccagcccaacatcatccagcagatcggccgcgtgatctcctatctgcgggagaagggcgacatggccattgtcctcgtcgagcagtatttcgacttcgcctacgaccttgcggaccggttctacgtcctcaaacgcggcgcggtggacctgtcgggcaccagagccgagctcgggcgcgaccggctgaagcaggcggtgtcggtctga

SEQ ID NO: 94840 - protein, 232 aa, Rhodobacter sphaeroides 2.4.1
MMLKTEALTLHYGGSQILHGIDMEARAGEVTCIMGTNGVGKTSLLKAISGTHPRSGGRIFLEGAELPVLPPQAMARRGLGFVPQGRMIFPLLTVTENLETGFAVLPRAEHRIPEEIYALFPVLKDMAHRRGGDLSGGQQQQLAIARALIMRPKLLLLDEPTEGIQPNIIQQIGRVISYLREKGDMAIVLVEQYFDFAYDLADRFYVLKRGAVDLSGTRAELGRDRLKQAVSV

SEQ ID NO: 94841 - DNA, 708 bp, Syntrophus aciditrophicus SB
  CDS (1)..(708): transl_table=11
atgctcgaattgcgtcaggtagaaacctggtacgggaacatccaggcgctgaaaggcatcagcatcaaggtccgcccgggagaaatcatcaccctgatcggcgccaacggagcagggaaaagcacgactctcatgtcgatttccggactcgttcctccccggaggggggagattctctttgagggacagcccattcacacccggacacccgatgccatcgtggccttgggaatctgtcaggtcccggaaggccggcacatctttccccaattgaccgttgcggaaaacctcgacatgggggcctttcttcgcagggatcgatcaggaatcaaaaacgatctggactatgtcttcgatctgtttccgatccttgccgaccgccgccatcagcccggtggaacgctgagcggcggcgaacagcagatgctggcgatatcccgagcactcatggcccggccaaagcttctactcctcgatgaaccgtccctgggtcttgccccgatgatggtccgtctcatctttcagatcatccgcaaaatcaacctggaaaacgaaacaaccatttttctggtagaacagaatgcccatatggcgcttcaggtcgcccatcgggggtacgtcctggaaaacggcagaattctgatggaaggaacatctgagaagcttctccacaacgaagccgtccgacaggcctatcttggactgtaa

SEQ ID NO: 94842 - protein, 235 aa, Syntrophus aciditrophicus SB
MLELRQVETWYGNIQALKGISIKVRPGEIITLIGANGAGKSTTLMSISGLVPPRRGEILFEGQPIHTRTPDAIVALGICQVPEGRHIFPQLTVAENLDMGAFLRRDRSGIKNDLDYVFDLFPILADRRHQPGGTLSGGEQQMLAISRALMARPKLLLLDEPSLGLAPMMVRLIFQIIRKINLENETTIFLVEQNAHMALQVAHRGYVLENGRILMEGTSEKLLHNEAVRQAYLGL

SEQ ID NO: 94843 - DNA, 690 bp, Saccharophagus degradans 2-40
  CDS (1)..(690): transl_table=11
atgttaaacgtatctaatttaaaagtaagttatggccaaagcgaagtgatacacgggcttgattttaccgtgcctaaaaacgaaacccttgcggtaatggggcgtaacggtatgggtaaaacgactttgttcaaatcgcttatcggtgtgctgcctttatctggcggttccataagtgtggatggcacagacgtgtcagacatggaaagccacaagcgtgtggaaaacggaattgcctatgtgccacaagggcgcatgatctttccatctttaaccgtgcaagagaacatcgagaccggaatggaagtttctggccttaaaaaaatacccgacgatatttacgcattgttcccagtgctgcgagaaatgcgcaaacgcaagggcggcaatctgtctggtggccaacaacaacagttagctattgcgcgcgcgttggtgactaacccaaaggtgttgctgctagacgagcccacagaaggtatacagccatccattattaaagatattgccaatgtacttaacgaaattaaaaagatgcgcgacataaccattattgtgtctgaacaagtgctgagttttaccatggccgtggcagacagaattatcgttatcgataaaggcaattttattcacgaagacctgcgagacgatgtcgataccgacaaaattaaaaagtatctgtctgtgtag

SEQ ID NO: 94844 - protein, 229 aa, Saccharophagus degradans 2-40
MLNVSNLKVSYGQSEVIHGLDFTVPKNETLAVMGRNGMGKTTLFKSLIGVLPLSGGSISVDGTDVSDMESHKRVENGIAYVPQGRMIFPSLTVQENIETGMEVSGLKKIPDDIYALFPVLREMRKRKGGNLSGGQQQQLAIARALVTNPKVLLLDEPTEGIQPSIIKDIANVLNEIKKMRDITIIVSEQVLSFTMAVADRIIVIDKGNFIHEDLRDDVDTDKIKKYLSV

SEQ ID NO: 94845 - DNA, 690 bp, Methylobacillus flagellatus KT
  CDS (1)..(690): transl_table=11
atgattgaaattgaagacctgacagtcagctacggacaaagtgaagtgatccacggcatcagctttagtgccgtcaagaacgaaactctggcgatcatgggccgcaacggtatgggcaagaccaccctgttcaagtcgctcatgggcattcttcccagcaagtgcaagaaagccacggtggacggcgtcgatattgccggcaacgaaactttccagcgcgtgcacaaaggactggcctacgtgccgcaaggccgcatgatcttcccgactatgaccgtgcaggaaaacatcgagaccggcctggagaaatccaagtcacgccagattcccgaggacatttatgccttgttcccggtactttacgacatgcgtggtcgcaagggcggcaacctttccggcggccagcagcaacaactggccattgcccgcgcgttggtgaccaaccccaaggtgctgttgctggatgagccgaccgagggtatccagccgtccatcatcaaggatattgccaaggtgctcaatgagatccgcaagatgcgtgaaatcacgatcatcgtgtccgagcaggtgctgagcttcacgatggaaattgcggaccgcatcatcgtgatcgacaagggcaacttcatccacgagaacaagcgcagcgaagtggatgcggccaaaatcaaaggctacctctccgtataa

SEQ ID NO: 94846 - protein, 229 aa, Methylobacillus flagellatus KT
MIEIEDLTVSYGQSEVIHGISFSAVKNETLAIMGRNGMGKTTLFKSLMGILPSKCKKATVDGVDIAGNETFQRVHKGLAYVPQGRMIFPTMTVQENIETGLEKSKSRQIPEDIYALFPVLYDMRGRKGGNLSGGQQQQLAIARALVTNPKVLLLDEPTEGIQPSIIKDIAKVLNEIRKMREITIIVSEQVLSFTMEIADRIIVIDKGNFIHENKRSEVDAAKIKGYLSV

SEQ ID NO: 94847 - DNA, 714 bp, Cytophaga hutchinsonii ATCC 33406
  CDS (1)..(714): transl_table=11
atgaaagatattatacttgaatccaacgatctacatgctgcttacggacagagtatgattttatggggtttaaattttaaagcagaaaaaggtaaagtaacaaccattatggggcgcaatggtgttggtaaaacaactttgttgaaaaccattatgagtctggtgcaggtatctaaaggtacaatcacctacaaaggcgaagaaatacaaacactaccttcttttaaaaaagcaaacatggggatcggttatgtgccgcaagggagagagatcattccaaaacttaccgtgtatgaaaatatcaaactaggcatggaagcattgggaagtaagtcgaaagctaaaattccggaagatgaaatttatgccatgtttccgatcttaaaagatttcaggaaacgtctgggtggcaacttaagcggcgggcagcagcagcagctggcaattgcccgggtgcttgtgagtaatccttcgctcatcttattagacgaacctacagaaggcatacagccatccattgcacaggagatcgggcaggtattgaaaaaccttgcagccgaaaaaggaattaccattttactggtagaacaaaaaattgattttgcaaaacagatcaccgactactattattttatggaccgcggcagaatgttaatggaaggaagcaaagatgaattggatctggatgatatccggaaatatttatcggtgtag

SEQ ID NO: 94848 - protein, 237 aa, Cytophaga hutchinsonii ATCC 33406
MKDIILESNDLHAAYGQSMILWGLNFKAEKGKVTTIMGRNGVGKTTLLKTIMSLVQVSKGTITYKGEEIQTLPSFKKANMGIGYVPQGREIIPKLTVYENIKLGMEALGSKSKAKIPEDEIYAMFPILKDFRKRLGGNLSGGQQQQLAIARVLVSNPSLILLDEPTEGIQPSIAQEIGQVLKNLAAEKGITILLVEQKIDFAKQITDYYYFMDRGRMLMEGSKDELDLDDIRKYLSV

SEQ ID NO: 94849 - DNA, 753 bp, Trichodesmium erythraeum IMS101
  CDS (1)..(753): transl_table=11
atgaatgttgatatccagaataaaactgagaaaaatcagctgaattatttcgccctacaaatatccgatttaaatgtattttatggagaaagtcatattctgcgtcatgttgatttaagtgtaaaacagggggaaatggtatgtttaattggtagaaatggagtgggtaaaacaacattattaaaaacattaatgggattaataaaaccacggaaaggaacaattaaattatggggtaaaggtattgctaaactgacaacggaccaacgggctcgtttaggtattggttatgtaccccaaggtagagaaattatacccagattgacagtaaaagaaaatttattgttaggtttagaagctagaaaaaaaggtagaaaaagaaaggatgaaatacctgaagaaatatttgaattgtttcctactctgaaaacaatgttatttagaatgggaggaaacttgagtggaggtcaacaacaacaactagcgatcgctcgtgcattgatgggtaaaccaaacttacttttgttagatgaaccaactgaaggtattcaaccctctattattttagagatagaaactgcactcagaaatattattgaaagtagaaatatttctgttctcttggtagaacaacatctccattttgtacggaaagcaaaccgatactatgcaatgcagaagggaggaattgttgcatcaggaaataccacggaactaactcaagaggtgatccaaagatttttagcagtttag

SEQ ID NO: 94850 - protein, 250 aa, Trichodesmium erythraeum IMS101
MNVDIQNKTEKNQLNYFALQISDLNVFYGESHILRHVDLSVKQGEMVCLIGRNGVGKTTLLKTLMGLIKPRKGTIKLWGKGIAKLTTDQRARLGIGYVPQGREIIPRLTVKENLLLGLEARKKGRKRKDEIPEEIFELFPTLKTMLFRMGGNLSGGQQQQLAIARALMGKPNLLLLDEPTEGIQPSIILEIETALRNIIESRNISVLLVEQHLHFVRKANRYYAMQKGGIVASGNTTELTQEVIQRFLAV

SEQ ID NO: 94851 - DNA, 690 bp, Alkalilimnicola ehrlichei MLHE-1
  CDS (1)..(690): transl_table=11
atgctcgagataaaggggctcaaccagtattacggcggcagtcacatcctcaagggcgtggatctcgccgtggagcagggcacctgcgcctgtctcatgggccgcaacggcatgggcaagaccaccctgctcaagtgcctgatgggcctggtgcccatcgccgatggcagcatcaccttccagggccgggagatcagccgcttgaggccccagcagcgggcgcgcatgggcatcggctacgtgccccaggggcgggagatcttcccccagctcacggtggaggagaacctgcgggtgcccctggcgggcaagcgctcaaggggtatcccggagcggatcttcgagcttttcccggtgttgaaagagatggcccgccggcgggggggcgacctctccggtgggcagcagcagcaactggccatcggccgggcactggtgctgcagcctgagatcctgctgctggacgagcccaacgagggcatccagcccaatatcgtccgccagatcggcgaggtgatccggatgctgaaccgggaggagggcctgaccatcctgctggtggagcagaagctgccgttcgcccgcgccaccggtgatcacttcaccctgctcaacaacggccgtgcggtcgcctccggcgccatgagtcagctcagtgacgagctgatccaggagcacatgacggtgtga

SEQ ID NO: 94852 - protein, 229 aa, Alkalilimnicola ehrlichei MLHE-1
MLEIKGLNQYYGGSHILKGVDLAVEQGTCACLMGRNGMGKTTLLKCLMGLVPIADGSITFQGREISRLRPQQRARMGIGYVPQGREIFPQLTVEENLRVPLAGKRSRGIPERIFELFPVLKEMARRRGGDLSGGQQQQLAIGRALVLQPEILLLDEPNEGIQPNIVRQIGEVIRMLNREEGLTILLVEQKLPFARATGDHFTLLNNGRAVASGAMSQLSDELIQEHMTV

SEQ ID NO: 94853 - DNA, 696 bp, Rhizobium leguminosarum bv. viciae 3841
  CDS (1)..(696): transl_table=11
atgctgacagtcgaaaacgcaaacctccactacggcgccgctcaggcgctgcgcggcatctcgatcaaagcggagatgggcaagatcacctgcgtgctggggcgtaacggcgtggggaagagttctcttctgcgcgccgttaccggccagcatccgctgtcggcgggcaccgtcaccttcaacgataccaagctcaacggcctgccgccctttgcccgcgccaagcagggcatcggctatgtgccgcaggggcgcgaaatcttcccgctgctgacagtcaaggaaaatctcgaaaccggctttgctccgcttggccgccgcgaccgcaacatccccgatgacatcttcagtctcttcccggtgctgaagtcgatgttgtcacgtcgcggcggcgatctttctggcgggcagcagcagcagctggcgatcgggcgggccatggtgacgcggcctaggattctcgtgctcgacgagccgaccgagggcattcagccatcgatcatcaaggatatcggccgggcgatccgctatctgcgtgactccacaggcatggcgatcctgctcgtcgagcagtatctcgatttctgccgcgagcttgccgactatgtctacatcatggaccgcggcgaaatcgtgcatgaagggcttgccgagacgctggatacgccggaggcccgccgccatctgactgtctga

SEQ ID NO: 94854 - protein, 231 aa, Rhizobium leguminosarum bv. viciae 3841
MLTVENANLHYGAAQALRGISIKAEMGKITCVLGRNGVGKSSLLRAVTGQHPLSAGTVTFNDTKLNGLPPFARAKQGIGYVPQGREIFPLLTVKENLETGFAPLGRRDRNIPDDIFSLFPVLKSMLSRRGGDLSGGQQQQLAIGRAMVTRPRILVLDEPTEGIQPSIIKDIGRAIRYLRDSTGMAILLVEQYLDFCRELADYVYIMDRGEIVHEGLAETLDTPEARRHLTV

SEQ ID NO: 94855 - DNA, 696 bp, Magnetococcus sp. MC-1
  CDS (1)..(696): transl_table=11
atgttgcaagtggaacaggttgatctgttttatggtgccagtcaggcgctaaaacaggtaggatttcaggcagaggtgggcgaagtcacctgtgtcttggggcgcaatggggtgggtaaaagctccttgatgcgggcggtggtggggcaacagagcattcgcgccgggcgcattgtctgggaggggcaggatatcacggggctcagcccgcccgagcgggcgcgacggggcatcgcctatgtgccccaagggcgcgaggtgtttccgctgctgacggtggaggagaacctgaaaaccggttttgctccgctggccaaagcgctgcggcacatccccgatgagctgtttgagctgttcccggtattgcgggatatgctgggccgtcggggtggggatctctccggtgggcagcagcagcagttggccattgcgcgggcattggtgacacgcccccgcctgctggtgctggatgaacccacagaggggattcagcccagcattatcaaggatattgagcgggttatccggttgttggccaatcggggggatatggccattattctggtggagcaatattttgagtttgcccgcaatctggccgacgcctttgtggtcttggaccggggcgaggtggtgttggcaggccggggtgaggggatgaacgaagatgaggtccgcagccaccttaccgtatga

SEQ ID NO: 94856 - protein, 231 aa, Magnetococcus sp. MC-1
MLQVEQVDLFYGASQALKQVGFQAEVGEVTCVLGRNGVGKSSLMRAVVGQQSIRAGRIVWEGQDITGLSPPERARRGIAYVPQGREVFPLLTVEENLKTGFAPLAKALRHIPDELFELFPVLRDMLGRRGGDLSGGQQQQLAIARALVTRPRLLVLDEPTEGIQPSIIKDIERVIRLLANRGDMAIILVEQYFEFARNLADAFVVLDRGEVVLAGRGEGMNEDEVRSHLTV

SEQ ID NO: 94857 - DNA, 693 bp, Azoarcus sp. BH72
  CDS (1)..(693): transl_table=11
atgctgaaagtcgacaacctcaaccagtactacggcggcagccacatcctgcgcggcctctcgttcgaagtgccggtgggcaaggtcaccacgctgctcggccgtaacggcgtcggcaagaccacgctgctcaagaccctgatgggcctcgtgcccgccgccagcggcacgatccacttcggtgcgcaggacatcacccgcgcaccatcgtacaaccgcgtgcgcgccggcatcggctacgtcccgcaagggcgcgagatctttccgcgcctcagcgtcgaagaaaacctgctgatgggtctcgccacgcagccgcgcggcagcagcatcccgcaacgcatcttcgacatgttcccggtactcaagcagatgatggggcggcgcggcggcgacctctccggcggccagcaacaacagctcgccatcggccgcgcgctcgccttcggccccaagctgctgatcctcgacgaaccgaccgaaggcatccagccctcgatcatcaaggacatcgaacgcgccatccgcagcctcgccgccaccggcgagatggccatcctgctcgtcgaacagtattacgacttcgcccgcgccctctccgatcaatacctcgtcatggagcgtggcgaaatcgtcatgcgcggcgagggcgccaacatggatgccgacggcgtgcgcgaagcgctcgcggtctga

SEQ ID NO: 94858 - protein, 230 aa, Azoarcus sp. BH72
MLKVDNLNQYYGGSHILRGLSFEVPVGKVTTLLGRNGVGKTTLLKTLMGLVPAASGTIHFGAQDITRAPSYNRVRAGIGYVPQGREIFPRLSVEENLLMGLATQPRGSSIPQRIFDMFPVLKQMMGRRGGDLSGGQQQQLAIGRALAFGPKLLILDEPTEGIQPSIIKDIERAIRSLAATGEMAILLVEQYYDFARALSDQYLVMERGEIVMRGEGANMDADGVREALAV

SEQ ID NO: 94859 - DNA, 699 bp, Nostoc punctiforme PCC 73102
  CDS (1)..(699): transl_table=11
atgcttaaaatctctaacctcaacgtttattacggcgaaagccacattctccgcaacgtagatttaagcgtaccatctgggcaaatggtctgcctaatcggacgcaatggtgtaggtaaaactaccctactcaaaaccatcatgggtttactcaaaccccgtagcggtactattaacttagctgaagaattaattaactccaaatccccagaccaaagagcaaaattaggaattggttatgtcccccaagggcgagagattatcccccgtttgacagtcaaagaaaatctgatgctggggttggaagctagacgcaaaccagtaaaaaaagcagaaattccagaggaagtttttagcttattcccggtgttaaaaaccatgctttcacggatgggtggtgatttgagtgggggacagcagcaacaattagcgatcgcacgtgctttaatgggagaacctcaattactcgtcttggatgaacccaccgaaggtattcaaccctcaatcatcctcgaaattgaagccgcagtccgtcgcattgtcgaaaccacaggcatttcggttttattggtagagcaacatttacactttgtccgtcaggctgattattattacgccatgcaaaaaggtggtattgtcgcctccggttccacagccgaactcagccaagatgtgattcagcgctttttagctgtttaa

SEQ ID NO: 94860 - protein, 232 aa, Nostoc punctiforme PCC 73102
MLKISNLNVYYGESHILRNVDLSVPSGQMVCLIGRNGVGKTTLLKTIMGLLKPRSGTINLAEELINSKSPDQRAKLGIGYVPQGREIIPRLTVKENLMLGLEARRKPVKKAEIPEEVFSLFPVLKTMLSRMGGDLSGGQQQQLAIARALMGEPQLLVLDEPTEGIQPSIILEIEAAVRRIVETTGISVLLVEQHLHFVRQADYYYAMQKGGIVASGSTAELSQDVIQRFLAV

SEQ ID NO: 94861 - DNA, 696 bp, Oceanicola batsensis HTCC2597
  CDS (1)..(696): transl_table=11
atgctgaacgtaaacgggctgaccctccattatggccagagccagatcctccacggcatcgacctgacggccgagaccggcaaggtcacctgcatcatgggcaccaatggcgtgggcaaaacctcgctgctcaaggcgatttcgggtacgcatccccgctcgggtggcacgatggagctggacggagaggacctgggccggatgcccgcgcatcagcttgcgcacaagggcatcggctatgtgccgcagggccggatgatctttccgctgctgacggtcgaagagaacatgcagacagcctatgcctgcctgcccaagtcagaacacggcatccccgacgagatcttcgaactcttcccgattctcagggacttcctgcaccgtcgcggcggcgacctgtcgggcggacagcagcagcaactcgccattgcccgcgcgatggtcaccaggcccaagctcctgctgctggacgaaccgaccgagggcattcagcccaacatcatccagcagatcggcagggtgatcgaatacctgcgcgacaggggcgacatggcgatcatcctcgtcgagcagtatttcgaattcgcctacggccttgccgacaggttctacgtcatgcgccggggcgaggtgacggcctccggcaccaaggcggacctgacaaaagaccagctgatggctgaggtctcggtctga

SEQ ID NO: 94862 - protein, 231 aa, Oceanicola batsensis HTCC2597
MLNVNGLTLHYGQSQILHGIDLTAETGKVTCIMGTNGVGKTSLLKAISGTHPRSGGTMELDGEDLGRMPAHQLAHKGIGYVPQGRMIFPLLTVEENMQTAYACLPKSEHGIPDEIFELFPILRDFLHRRGGDLSGGQQQQLAIARAMVTRPKLLLLDEPTEGIQPNIIQQIGRVIEYLRDRGDMAIILVEQYFEFAYGLADRFYVMRRGEVTASGTKADLTKDQLMAEVSV

SEQ ID NO: 94863 - DNA, 708 bp, Synechococcus sp. RS9917
  CDS (1)..(708): transl_table=11
atgacactgctggagattcagggcctgaacacctattacggcgagagccatatcctccgggatgtagacctgtcggtgcgggccggagagatggtgtgcctgattggacgcaacggcgttggcaagaccaccttgctgaagtcgttgatcgggttgctgaaaccccgcagcggtgatctgttgttggaagatcgctccctgcagcgcctgtcgccccaccaacgggctcgggccgggattggttacgtgccccaggggcgggagattattccccagctcacggtggaggagaacctgatgctcggcatggaagccctgccgggtggcctggcgcgcaaccgccggatcgatcccctggtgtatgagctgttcccgattctgcgggagtttctgccgcgcaagggtggggatctctccgggggacagcagcagcagctggccatcgcccgtgccctgctcggtcgccccaaattgctgttgctcgatgaacccaccgaggggattcagcccaacatcgtgcaagacatcgaggccgccgtgcggcgcatcatcgccgaaacaggcatcggcgtgctcctggtggagcagcatctgcatttcgtgcgccaggccgaccgctactacgccatgcaacggggtggcatcgtcgccagtggccccaccgctgaactcagccaggcggtggtggatcgcttcctctgcgtgtga

SEQ ID NO: 94864 - protein, 235 aa, Synechococcus sp. RS9917
MTLLEIQGLNTYYGESHILRDVDLSVRAGEMVCLIGRNGVGKTTLLKSLIGLLKPRSGDLLLEDRSLQRLSPHQRARAGIGYVPQGREIIPQLTVEENLMLGMEALPGGLARNRRIDPLVYELFPILREFLPRKGGDLSGGQQQQLAIARALLGRPKLLLLDEPTEGIQPNIVQDIEAAVRRIIAETGIGVLLVEQHLHFVRQADRYYAMQRGGIVASGPTAELSQAVVDRFLCV

SEQ ID NO: 94865 - DNA, 726 bp, Synechococcus sp. WH 5701
  CDS (1)..(726): transl_table=11
atgtctaccaccagcgaaaaacccctgctccaggtcaacggtctgaatgtgtattacggagaaagccatattctccgcaacgtggacctgagcatccatgaagggaaaatggtctgcctgatcggtcgcaacggcgtcggcaagaccacgtttctcaagaccatcatcggactgctgcagcagcgttcgggcaccatcgaatacggcagcggtcaactgtccagccagcctccctaccggagagctcgtgcaggcatcggctatgtctcccagggcagggacatcattccccaggtttcggtcaaggagaatctcctgctgggcatggaggcccttcccggagggctcgagaagaaccgccacatcgatcctctgatcttcgatctgtttccgattctcgagaagttcctcaagcgcaagggtggcgacctcagtggcggtcagcagcagcagctggccatcgcccgagctctgctgggcaagccgaaactgctgctgctggatgaaccgaccgaagggattcagccttcgatcatcctcgacatcgagcacgccgttcagcggatcatgaaggagaccggcatcagcgtgctgctggtggagcagcatcttcacttcgtgcgccagtccgatttctattacgccatgcagcgtggtggcattgtggccagtggcaagacggatcagctctccgacgaggtgatcaaggagttcctgacggtctga

SEQ ID NO: 94866 - protein, 241 aa, Synechococcus sp. WH 5701
MSTTSEKPLLQVNGLNVYYGESHILRNVDLSIHEGKMVCLIGRNGVGKTTFLKTIIGLLQQRSGTIEYGSGQLSSQPPYRRARAGIGYVSQGRDIIPQVSVKENLLLGMEALPGGLEKNRHIDPLIFDLFPILEKFLKRKGGDLSGGQQQQLAIARALLGKPKLLLLDEPTEGIQPSIILDIEHAVQRIMKETGISVLLVEQHLHFVRQSDFYYAMQRGGIVASGKTDQLSDEVIKEFLTV

SEQ ID NO: 94867 - DNA, 696 bp, Oceanospirillum sp. MED92
  CDS (1)..(696): transl_table=11
atgattgagatctctaaagtaaaccagcgctatggtggcacccagattctctgggatctggatttggatattaagcccggttcatgtacctgcatcatgggacgtaacggagtcgggaaaaccaccttgctgaaatgcctgatggggcttcttcccgttcagagtggcgagattctgttagatggtcagccgctacaaaacaaaccagctgaatttcgtgctccggccggtatagggtacgtaccccaggggcgcgacatctttccgatgcttaccgttgaggagaatctgcgtattggcctgccaatccgaaaggataaggcgaaggagataccagagaagatatttgaactatttccggtgcttaaagagatgctgcatcgccgtggtggcgacctttcaggtggtcagcaacagcagctggcaattggtcgggcgttggtgatcgaacctaaagtgctgattctcgatgagcctaatgaagggatacagccaaacatcgttcagcagattggcgatgtcattctcaagctcaatgaagaggaagggttgaccgtcattctggtcgaacagaagcttggctttgcccgccgtgtaggtaaagagtttcgcctgatggaaaaggggcgtgtggttgccagcgatcaaatggcaaaccttagtgaagacctgatcaaacagtatctggcggtataa

SEQ ID NO: 94868 - protein, 231 aa, Oceanospirillum sp. MED92
MIEISKVNQRYGGTQILWDLDLDIKPGSCTCIMGRNGVGKTTLLKCLMGLLPVQSGEILLDGQPLQNKPAEFRAPAGIGYVPQGRDIFPMLTVEENLRIGLPIRKDKAKEIPEKIFELFPVLKEMLHRRGGDLSGGQQQQLAIGRALVIEPKVLILDEPNEGIQPNIVQQIGDVILKLNEEEGLTVILVEQKLGFARRVGKEFRLMEKGRVVASDQMANLSEDLIKQYLAV

SEQ ID NO: 94869 - DNA, 696 bp, Xanthobacter autotrophicus Py2
  CDS (1)..(696): transl_table=11
atgctgaaggttgagaacctcgacctctattacggcgccgcccacaccctgaagaaggtgtcggtggaagcccatgcgggcaaggtcacctgcgtgctcggccgcaatggcgtgggcaagacctcgctgttgcgcgcaatcgtcgggcagcgacccatcgccggcggctccatcatgctggacggcaaggagatttcgcggatgccgacgccggatcgcgccgggctcggcatcggcttcgtgccgcagggtcgggaggtgttcccactgctgtccgtgaaggagaatctggaaaccggattcgctcgcctcgcccgcaaggacaaatacgtgccggacgaggtgttcgagctgttcccggtgctcaattccatgctgcgccggcgcggcggcgatctttccggcgggcagcagcaacagctcgccataggccgcgcgctggtgacgcgcccgcgcctgctggtgctggacgagccgacggaaggcatccagccctcgatcatcaaggatatcgggcgcgcaatttcctacctgcgtgacaagggcgacatggccatcgtactggtggagcagtatttcgagttcgcccgcgaccttgccgacagcttcatcctgatggatcgcggcgaggtggtggcgagcggggacaggagcgggctcgatggtgacgacgtccgccgcctcatggcgatctga

SEQ ID NO: 94870 - protein, 231 aa, Xanthobacter autotrophicus Py2
MLKVENLDLYYGAAHTLKKVSVEAHAGKVTCVLGRNGVGKTSLLRAIVGQRPIAGGSIMLDGKEISRMPTPDRAGLGIGFVPQGREVFPLLSVKENLETGFARLARKDKYVPDEVFELFPVLNSMLRRRGGDLSGGQQQQLAIGRALVTRPRLLVLDEPTEGIQPSIIKDIGRAISYLRDKGDMAIVLVEQYFEFARDLADSFILMDRGEVVASGDRSGLDGDDVRRLMAI

SEQ ID NO: 94871 - DNA, 690 bp, marine gamma proteobacterium HTCC2207
  CDS (1)..(690): transl_table=11
atgttgaaattacaggactacaacgttgcttacggccagagccgtgtgatcaacgatatgaatttagagattggcgaaggtgagattgtcgccttggtaggacgcaatggtatgggtaaaaccaccttgctcaagtccctaatcggtatggtgccacaccagtctggctcaatcacgctgggtggcgaagagattggtcccatggaaagtcatcagcgggttgccagtggtattggctttgtgccccaggggcgaatgattttttcaaccatgacggttaccgaaaatattattaccggactgactaccaccggtgagaaaaaaatccctgaagatttgtacgatctatttccggttctcaaggaaatgggtaagcgtcgaggcggtaatctgtccggcggtcagcagcaacagctagctattgcccgcgctctggccagtcgcccaaaactgctgattttagatgagcctaccgagggcattcagccttcgattattcgcgagatggtgcacacattaagacgtattcgagatgagcgtggactatcaattttagtgtcagagcaggttttgagttttgctctggatgtatcggaccgcgttatggtgatcgaaaagggcaatatagttcaccaggaacccagtgccactgcggatcagaaaaagatcgcagcctatttatctgtttaa

SEQ ID NO: 94872 - protein, 229 aa, marine gamma proteobacterium HTCC2207
MLKLQDYNVAYGQSRVINDMNLEIGEGEIVALVGRNGMGKTTLLKSLIGMVPHQSGSITLGGEEIGPMESHQRVASGIGFVPQGRMIFSTMTVTENIITGLTTTGEKKIPEDLYDLFPVLKEMGKRRGGNLSGGQQQQLAIARALASRPKLLILDEPTEGIQPSIIREMVHTLRRIRDERGLSILVSEQVLSFALDVSDRVMVIEKGNIVHQEPSATADQKKIAAYLSV

SEQ ID NO: 94873 - DNA, 699 bp, Oceanobacter sp. RED65
  CDS (1)..(699): transl_table=11
atgttaaaagtaagtgaacttgatgttttttacggtgccagtcaagcgctctataacgtttctatgcaggctgacattggtaaagtgacctgtgtattaggtcgtaatggtgtgggcaaaaccactttgatgaaagctttagcaggacaccaatttgcaaaaaatggcgacattatttggcagggcgacaaaatcaacaaggttgctgctgatggccgagcgaaacagggtatcgcctacgtgccgcaaggccgacacatcttttctcaattaaccgttgaagagaatttgaaaacggcatttagcagtttacctaaatcgcaacgatttattgatcctgaaatttatgatctgtttccagtattgaagcaaatgctaggacgccgtggcggtgacttaagtggtggtcagcaacaacagcttgccatcgctcgcgctttattgcttagacccaagatgctgattctagatgaaccaacagaagggattcagccttccatcatcaaggatattcaaaaggttattgagctactgcgagatcgcggcaacatggccattgttttagtggagcagtatttggattttgctaaagcccttgccgatgagtacatcatattggagcgtggtcgagtggtatcagccggtgacggagaagctttgaacacatcaggagatgtcgaacgtttattggctatctaa

SEQ ID NO: 94874 - protein, 232 aa, Oceanobacter sp. RED65
MLKVSELDVFYGASQALYNVSMQADIGKVTCVLGRNGVGKTTLMKALAGHQFAKNGDIIWQGDKINKVAADGRAKQGIAYVPQGRHIFSQLTVEENLKTAFSSLPKSQRFIDPEIYDLFPVLKQMLGRRGGDLSGGQQQQLAIARALLLRPKMLILDEPTEGIQPSIIKDIQKVIELLRDRGNMAIVLVEQYLDFAKALADEYIILERGRVVSAGDGEALNTSGDVERLLAI

SEQ ID NO: 94875 - DNA, 768 bp, Pseudomonas putida GB-1
  CDS (1)..(768): transl_table=11
atgatgaaccaacctttcatccccggtatcgcccaggccgccatatcgattcgtggcctgcagaaatggtacggcgagtttcacgtgctcaagggcatagacctggagatcgccagtggcgaaatcgtggtggtctgtgggccgtccggttcgggcaaatccacattgatccgctgcctgaacctgctcgaagacttccagaaaggccaggtgctgatcgccggcaacctgctgggccgcgacgcggccagcgtggcggccatccgccgccaggtgggtatggtgttccagcagttcaacctgttcccgcacctgaccgtactggaaaacctgatgctcggcccgcgcctggtcagcaagctcagcgaggcccaggcccgtgccctggcgctggagtacctggaccgggtgcgcatcgccagccaggccgacaagttccccgggcagctttccggtggccagcaacaacgcgtggccattgcccgcgcgctgtgcatgaaaccacgcatcatgctgttcgacgaacccacctcggcgctggacccggaaatggtcaaggaagtgctcgacgtcatgggcgagctggcccaggacggcatcaccatgctgtgcgttacccacgaaatgggcttcgcccgccgggtggccgaccgcatcatcttcatggaccagggccaggtgatcgaacaaggccagcccaacgcgtttttcgacaacccgcgccacgcacgtgccagggagttcctctcgcagatcctcagtcattga

SEQ ID NO: 94876 - protein, 255 aa, Pseudomonas putida GB-1
MMNQPFIPGIAQAAISIRGLQKWYGEFHVLKGIDLEIASGEIVVVCGPSGSGKSTLIRCLNLLEDFQKGQVLIAGNLLGRDAASVAAIRRQVGMVFQQFNLFPHLTVLENLMLGPRLVSKLSEAQARALALEYLDRVRIASQADKFPGQLSGGQQQRVAIARALCMKPRIMLFDEPTSALDPEMVKEVLDVMGELAQDGITMLCVTHEMGFARRVADRIIFMDQGQVIEQGQPNAFFDNPRHARAREFLSQILSH

SEQ ID NO: 94877 - DNA, 720 bp, Pseudomonas putida GB-1
  CDS (1)..(720): transl_table=11
atgatcaatcgaggacatgacatgcttaaaatcgacaccctgcaccagtactacggcggcagccacatcctgcgtggcctgtctttcgaagccaaggtcggcgaggttacctgcctgctgggccgcaacggcgtgggcaagaccaccctgctgcgctgcctgatgggcctggtacccgcccgtgacgggcgtatcgaatgggaaggcaagcccatcaccagcctcaagccccagcaacgggtccacgctggtatcgcctacgtgccccagggccgcgagatattcccgcgccttaccgtcgaggaaaacctgctgatgggcctgtcgcgcttccccgcccgtgaagcccgcgaagtgccgaccttcatctacgagctgttcccggtgctggagcagatgaagcaacgccgtggcggcgatttgtctggcggccagcagcaacagctggccatcggccgcgccctggccagccgcccgcgcctgctgattctcgacgagcccaccgaaggcatccaaccttcggtgatcaaggaaatcggcgccgtaatccgccgcctggcgcagcgcggcgacatggcgattctgctggtggagcagttctacgactttgccgaagaactggccgaccaatacctggtcatgtcccgcggcgaaatcgtccagcgcggccgcggtgaaaacatgcaagccgaaggtgtgcgcgggctggtaaccatttaa

SEQ ID NO: 94878 - protein, 239 aa, Pseudomonas putida GB-1
MINRGHDMLKIDTLHQYYGGSHILRGLSFEAKVGEVTCLLGRNGVGKTTLLRCLMGLVPARDGRIEWEGKPITSLKPQQRVHAGIAYVPQGREIFPRLTVEENLLMGLSRFPAREAREVPTFIYELFPVLEQMKQRRGGDLSGGQQQQLAIGRALASRPRLLILDEPTEGIQPSVIKEIGAVIRRLAQRGDMAILLVEQFYDFAEELADQYLVMSRGEIVQRGRGENMQAEGVRGLVTI

SEQ ID NO: 94879 - DNA, 696 bp, Pseudomonas putida GB-1
  CDS (1)..(696): transl_table=11
atgctcaacgtcgattcgatccactcctattacgacaagagccatgtgctcgaaggtgtctcgctcaaggttgaagcaggcgaactggtgacgctgctcgggcgcaatggtgccggcaagaccaccaccctgcgcagcatccttggcatcgtccgcccacggcaggggcagatcagcttcaacggccaacagttggtcggccgtgaaatcttcgatatcgcccggcttggtattgccctggtgcctgagcaccgtggcatcttccgccagctcagtgtggaagagaacctgaagatagccgtgcgcaaggccagccgctggcagctggaggacgtctacagcatgttcccacggctcaaggagcggcgccgcaatggtggtttcgccctgtccggtggcgagcagcagatgctggccatcgcccgcgccctgctcaacggccccaagctgctgatcctcgacgaacccaccgaaggcctggccccggtgatcgtcgacgagttggtgaagatcctgcggcggatcaaggacgaaggcctgtcgatcctgctggtggagcaaaacctgatggtctgcgatgcactcgccgatcgccattacgtgcttgaacagggccgggtcgcctaccagggcagcgccgcgcagttccgcgaggacccaagcatcaagaaccgttacctggccctgagcgcctga

SEQ ID NO: 94880 - protein, 231 aa, Pseudomonas putida GB-1
MLNVDSIHSYYDKSHVLEGVSLKVEAGELVTLLGRNGAGKTTTLRSILGIVRPRQGQISFNGQQLVGREIFDIARLGIALVPEHRGIFRQLSVEENLKIAVRKASRWQLEDVYSMFPRLKERRRNGGFALSGGEQQMLAIARALLNGPKLLILDEPTEGLAPVIVDELVKILRRIKDEGLSILLVEQNLMVCDALADRHYVLEQGRVAYQGSAAQFREDPSIKNRYLALSA

SEQ ID NO: 94881 - DNA, 759 bp, Pseudomonas putida GB-1
  CDS (1)..(759): transl_table=11
atgattgaagtcaaaggcctgaccaaacggttcaagggccagaccgtgctcaacggtatcgacctgaccgtgcagcccggcgaagtggtggccatcatcggccccagtggctcgggcaagaccaccttcctgcgctgcctgaacctgctggaaacccccgatgccgggcagatccagatcggcgccatcagcatcgatgccaaccgcccgctgggtggccagcaaggtgcgattcggcgtttgcgccagcaggccgggttcgtgttccagaacttcaacttgttccctcaccgcaccgccctggagaacgtgatcgaggggccggtgatcgtcaagaagacgcctcgcgaacaggccatcgagcttggccggcgtctgctggccaaggtcggcctggcgggcaaggaagacgcctacccacggcgcctgtccggcggccagcagcaacgggtggccatcgcccgcgccctggccatggagccggaggtgatcctgttcgacgaaccgacgtcggcgctggacccggagctggtgggtgaagtactggcgaccatccgcggcctggccgaggaaaagcgcaccatgatcatcgtcacccacgagatgagctttgctcgggatgtggcgaaccgggtgatcttcttcgacaagggcgtgatcgtggaacagggtgaagccaaggcgttgtttgcggcgcccaaggaagagcgtacccggcagttcctgcgcaagttcctcggtaccgcagcttccgagtaa

SEQ ID NO: 94882 - protein, 252 aa, Pseudomonas putida GB-1
MIEVKGLTKRFKGQTVLNGIDLTVQPGEVVAIIGPSGSGKTTFLRCLNLLETPDAGQIQIGAISIDANRPLGGQQGAIRRLRQQAGFVFQNFNLFPHRTALENVIEGPVIVKKTPREQAIELGRRLLAKVGLAGKEDAYPRRLSGGQQQRVAIARALAMEPEVILFDEPTSALDPELVGEVLATIRGLAEEKRTMIIVTHEMSFARDVANRVIFFDKGVIVEQGEAKALFAAPKEERTRQFLRKFLGTAASE

SEQ ID NO: 94883 - DNA, 735 bp, Marinobacter sp. ELB17
  CDS (1)..(735): transl_table=11
atgccaactgagagcctcatgccaatgaaaagcctgatgctgaaaatccagaaaatcgaccagtattatggcgaaagccacaccctctgggatctggagctggatgtgcccgagggtcagtgtacctgtgttatgggccgcaacggcgtgggtaaaaccacactgatgaaatgcatcatgggtgaagaaaccgtcaacagcggttccatcacgttcgcccaggaagtcgagcttacccagaaaaaaattgaagaccgttctcgccttggcataggctacgtgccccagggccggcagattttcccgctgctgacggtggaagaaaacctgcgtaccggcctggcggtgcgcaaagacggcagcaaaaaaatccccgagcgcgtgtacgaactgtttccggtgctggaagaaatgcgccaccgccgcggcggcgatctctctggcggccagcaacaacaactggccattggcagggccttggtgattgaaccccgtttgctgattctggacgagccgggggagggcattcagcccaacatcgtcgctcagattggtgaggttattcgcacgctgatcaaagaagacggcctgacggtgctgctggtggagcaaaaactgcccttcgcccgcaaatacgctgaccgcttcgccatcctcgaccgcggccgccgcgtagccgaaggcgaaattgccggtctgaccaacgaactcattaaaaagcacctgacggtatga

SEQ ID NO: 94884 - protein, 244 aa, Marinobacter sp. ELB17
MPTESLMPMKSLMLKIQKIDQYYGESHTLWDLELDVPEGQCTCVMGRNGVGKTTLMKCIMGEETVNSGSITFAQEVELTQKKIEDRSRLGIGYVPQGRQIFPLLTVEENLRTGLAVRKDGSKKIPERVYELFPVLEEMRHRRGGDLSGGQQQQLAIGRALVIEPRLLILDEPGEGIQPNIVAQIGEVIRTLIKEDGLTVLLVEQKLPFARKYADRFAILDRGRRVAEGEIAGLTNELIKKHLTV

SEQ ID NO: 94885 - DNA, 735 bp, Pseudomonas chlororaphis; identical to SEQ ID NO: 84733
  CDS (1)..(735): transl_table=11

SEQ ID NO: 94886 - protein, 244 aa, Pseudomonas chlororaphis; identical to SEQ ID NO: 84734

SEQ ID NO: 94887 - DNA, 717 bp, Pseudomonas putida
  CDS (1)..(717): transl_table=11
atgaaaaacatcctgcaagtgagtgacctgaaggtcagctacggggctatccaggccatcaagggcatcgacctgacggtgggcgagggtgagatggtggcgctgatcggcgccaatggcgccggcaagaccaccaccctgaaaaccttggccggcttgctgaagcccagcgccggcagcatcaccttcgatggcaaggcgcacgcggcgatcaagggccatgacctgatccgcgaagggctggcgctggtgccggaagggcggggcattttccccaagctgacggtgcacgaaaacctcgagatgggggccttcagtcggcgcgacggcaaggacgccatcggtgccgacatcgaacgcatgtacggtatctttccgcgcttgaaagaacgtgcctttcagctggccggcaccatgtcgggtggcgagcagcagatgctggccatttcacgggcactgatggggcggcccaagctattgttgctggacgagccctccatggggttggcgccgatcatcgtgcagaagattttcgaaaccatcgtcgaggtggtcaagggcggggtaacgctactgctggtggagcagaacgcccgcctggcgctgcagacctgccagcgcgcctacgtgatcgatggcggccgtatcagcctggaaggctgtgccaagaccttgttgcatgacgaccaggtgaagaaggcctacctgggcgaatga

SEQ ID NO: 94888 - protein, 238 aa, Pseudomonas putida
MKNILQVSDLKVSYGAIQAIKGIDLTVGEGEMVALIGANGAGKTTTLKTLAGLLKPSAGSITFDGKAHAAIKGHDLIREGLALVPEGRGIFPKLTVHENLEMGAFSRRDGKDAIGADIERMYGIFPRLKERAFQLAGTMSGGEQQMLAISRALMGRPKLLLLDEPSMGLAPIIVQKIFETIVEVVKGGVTLLLVEQNARLALQTCQRAYVIDGGRISLEGCAKTLLHDDQVKKAYLGE

SEQ ID NO: 94889 - DNA, 744 bp, Bacillus amyloliquefaciens; identical to SEQ ID NO: 84743
  CDS (1)..(744): transl_table=11

SEQ ID NO: 94890 - protein, 247 aa, Bacillus amyloliquefaciens; identical to SEQ ID NO: 84744

SEQ ID NO: 94891 - DNA, 723 bp, Comamonas acidovorans
  CDS (1)..(723): transl_table=11
atgaccgcgtcgaactctcatctgctggaagcaagtggactgcaagcggcgtatgggtcgagccatgtcctcttcggcatcgatctcaagatccagcgaggccaggtcgtgaccttgctcgggcgcaatggaatgggtaagaccacgacgatcaggagccttgtcggcgcgttgccgttgaaaggcggcaccatacgattcaacgggcgggagacgcaagccttgcgcgcggacgcggtcgcgcgactcggcgtggcgatcgtgcccgaggggcgccattgctttccgaatctcacggtggaggaacacctcattgcgtttgccagcgtgcgcaatgaacaggccgaaccgtggaccgttccaaggctctatgaattgtttccgcgcctgaaagcacgggcgcgcaacttcggcaaccagctgtcggggggagagcagcagatgctggccatcgcccgtgcgctgtcgacgaatcctcgcttgctgatcctcgacgaggccaccgaaggtctcgcgccgatcctgcgccaggagatctggcactgcctggaactgctcaggaaggcgggccagacgatcctcatcgtggacaagtacgtcgagcggctcctgaagcttgccgaccgccacctcatcgtggagcgcggcaaggtggtctgggaaggaagctcgtcggccctggaccgcgatcgggcgctgtggacccgctacctgggcgtttag

SEQ ID NO: 94892 - protein, 240 aa, Comamonas acidovorans
MTASNSHLLEASGLQAAYGSSHVLFGIDLKIQRGQVVTLLGRNGMGKTTTIRSLVGALPLKGGTIRFNGRETQALRADAVARLGVAIVPEGRHCFPNLTVEEHLIAFASVRNEQAEPWTVPRLYELFPRLKARARNFGNQLSGGEQQMLAIARALSTNPRLLILDEATEGLAPILRQEIWHCLELLRKAGQTILIVDKYVERLLKLADRHLIVERGKVVWEGSSSALDRDRALWTRYLGV

SEQ ID NO: 94893 - DNA, 720 bp, Burkholderia cepacia
  CDS (1)..(720): transl_table=11
atgttgaccattaaagggctcaaggcgggatacggggtgcctgtgcttcacgacatccgcatgtcgatcggcgagggcgaagccgtggcactggtgggcgcgaacggcgccggcaagaccacgctggtgcgctgtcttgccggtctggtgccgcccatggccggacaggtcgaaatggatggcgtggacatcactgcgatggcggggcacaggcggcccgagcatggcatcgccatggtgctggaaggccgaaacctgtttaccgagatgagcatcatggagaacctgcgactggccgagcatgccggccgtcgggtgcgccacgacagtgcgcgcttcaccatggacgaggtgctggccctcttcgacgtgctgcgcgagcgcgcccaatcccgtgtgggtttgctatccggcggccagcagcagatggtggccattcaacgcagcgcactgctgctgcagccaaagctgctgatcatggacgagttgacgactggattggctccaaagatcgtcaaagaaatcctggccatcctgaacaagctgcgtgaacgcggcatgagcattctgctcgtcgagcaaagcgtggcaattgcctccgagatgaccgagcgtgcctacgtcttgtctgtcggccgcgtgattcacgaagtgcaacgtggcgggtggcaagaaatgctgtcggacaaagcactggtaaaggcgtacctccatggttga

SEQ ID NO: 94894 - protein, 239 aa, Burkholderia cepacia
MLTIKGLKAGYGVPVLHDIRMSIGEGEAVALVGANGAGKTTLVRCLAGLVPPMAGQVEMDGVDITAMAGHRRPEHGIAMVLEGRNLFTEMSIMENLRLAEHAGRRVRHDSARFTMDEVLALFDVLRERAQSRVGLLSGGQQQMVAIQRSALLLQPKLLIMDELTTGLAPKIVKEILAILNKLRERGMSILLVEQSVAIASEMTERAYVLSVGRVIHEVQRGGWQEMLSDKALVKAYLHG

SEQ ID NO: 94895 - DNA, 744 bp, Rhizobium leguminosarum bv
  CDS (1)..(744): transl_table=11
atgggcgatgaagtaatgaccggtcaaccgctccttcaggtcaacagcgtcgaaacctattacggcaatatccgcgcgctggccggcgtcgatgtccacgtcaacaagggcgagatcgtcagcctgatcggcgccaatggcgcggccaagtcgacactgatgatgacgatctgcggcagcccgcaggcccgcaccggttcggtggtcttcgagggccgcgacatcacccgcatgccgacgcatgaaattgcccgtctacgcattgcacagtcgccagaaggccgccgcatcttcccgcgcatgacggttctggaaaatcttcagatgggcgcaggcctcgacaatctgaaacacttcgccgaagacgtcgagaagatcttcacgctcttcccgcgtctcaaggaacgtcacgcccagcgcggcggaacgctttcgggcggtgagcagcagatgctgtcgatcggccgcgcgctgatggtgcgcccgaagttgctgcttctcgacgaaccctcgctcggtcttgcgccgctgatcgtcaagggcatcttcgaggcgatcaagaagctcaacgaggcggaggggctgaccgttttcctcgtcgagcagaacgcgttcgccgccctcaggctttctcaccgcgcctacgtgatggtgaacggcaaggtgacgatgagcggctccggcaaggagcttcttgccaatcccgaggtccgcgccgcctatctcgaaggcggaagacactag

SEQ ID NO: 94896 - protein, 247 aa, Rhizobium leguminosarum bv
MGDEVMTGQPLLQVNSVETYYGNIRALAGVDVHVNKGEIVSLIGANGAAKSTLMMTICGSPQARTGSVVFEGRDITRMPTHEIARLRIAQSPEGRRIFPRMTVLENLQMGAGLDNLKHFAEDVEKIFTLFPRLKERHAQRGGTLSGGEQQMLSIGRALMVRPKLLLLDEPSLGLAPLIVKGIFEAIKKLNEAEGLTVFLVEQNAFAALRLSHRAYVMVNGKVTMSGSGKELLANPEVRAAYLEGGRH

SEQ ID NO: 94897 - DNA, 729 bp, Escherichia coli O157
  CDS (1)..(729): transl_table=11
atgagtattcaattaaacggcattaattgcttctacggcgcgcatcaggcgctgttcgatatcacgctggattgcccacagggcgaaacgctggtgttacttggccccagcggcgcgggtaaaagctcgctgctgcgtgtactcaatctgcttgagatgccgcgctccggtacgctcaacattgcaggcaaccatttcgatttcaccaaaacaccctcagacaaagcgattcgcgatttgcgtcgtaacgttggcatggtgtttcagcaatacaacctgtggccgcatctgaccgtgcagcaaaacctgattgaagcgccctgccgtgtactggggttgagtaaagatcaggcgctggcccgtgcagaaaaactgctggaacgtctgcgtctcaaaccttatagcgatcgttacccgctgcatctttctggtggtcagcagcagcgtgttgctattgcccgtgcgttaatgatggaaccgcaggtactgctgtttgatgaaccgaccgccgcactggacccggaaattacggcacaaatcgtcagcatcattcgtgagctggcagaaacgaatattacccaggtgatcgtcacccacgaagttgaagtggcgcgtaaaaccgccagccgagtggtgtatatggaaaacggtcatatcgtagaacaaggcgacgcgagctgctttaccgagccgcaaaccgaagcatttaaaaactatctctctcactaa

SEQ ID NO: 94898 - protein, 242 aa, Escherichia coli O157
MSIQLNGINCFYGAHQALFDITLDCPQGETLVLLGPSGAGKSSLLRVLNLLEMPRSGTLNIAGNHFDFTKTPSDKAIRDLRRNVGMVFQQYNLWPHLTVQQNLIEAPCRVLGLSKDQALARAEKLLERLRLKPYSDRYPLHLSGGQQQRVAIARALMMEPQVLLFDEPTAALDPEITAQIVSIIRELAETNITQVIVTHEVEVARKTASRVVYMENGHIVEQGDASCFTEPQTEAFKNYLSH

SEQ ID NO: 94899 - DNA, 714 bp, Escherichia coli
  CDS (1)..(714): transl_table=11
atggaaaaagtcatgttgtcctttgacaaagtcagcgcccactacggcaaaatccaggcgctgcatgaggtgagcctgcatatcaatcagggcgagattgtcacgctgattggcgcgaacggggcggggaaaaccaccttgctcggcacgttatgcggcgatccgcgtgccaccagcgggcgaattgtgtttgatgataaagacattaccgactggcagacagcgaaaatcatgcgcgaagcggtggcgattgtcccggaagggcgtcgcgtcttctcgcggatgacggtggaagagaacctggcgatgggcggtttttttgctgaacgcgaccagttccaggagcgcataaagtgggtgtatgagctgtttccacgtctgcatgagcgccgtattcagcgggcgggcaccatgtccggcggtgaacagcagatgctggcgattggtcgtgcgctgatgagcaacccgcgtttgctactgcttgatgagccatcgctcggtcttgcgccgattatcatccagcaaattttcgacaccatcgagcagctgcgcgagcaggggatgactatctttctcgtcgagcagaacgccaaccaggcgctaaagctggcggatcgcggctacgtgctggaaaacggccatgtagtgctttccgatactggtgatgcgctgctggcgaatgaagcggtgagaagtgcgtatttaggcgggtaa

SEQ ID NO: 94900 - protein, 237 aa, Escherichia coli [sequence omitted]

SEQ ID NO: 94901 - DNA, 753 bp, Escherichia coli
  CDS (1)..(753): transl_table=11
atgagtgccattgaagttaagaacctggtgaaaaaattccacggtcagacggtgctgcacggtatcgaccttgaggtaaagcctggcgaagtggtggcaattatcggtccgagtggttccggcaaaaccacgttgctacgcagcataaatctgctggaacaacccgaagcgggaacgatcaccgttggcgatatcactattgatactgcacgttcattaagtcagcaaaaatctctgattcgccagttgcgtcagcacgtcgggtttgtcttccagaactttaatttgtttccgcatcgtacggtgctggagaacattattgaagggccggtgatcgtcaaaggtgaaccgaaagaagaggccacggcgcgcgctcgcgagctgctggcaaaagttgggctggcaggtaaagaaaccagctatccacgtcgtttgtctggcggtcaacagcagcgtgttgcgattgcgcgtgcgctggcaatgcgtcctgaggtgattttgtttgacgagccaacgtcagcgctggatccagagctggtgggtgaagtcctgaacaccatccgtcagctggcgcaggaaaagcgcacgatggtgattgtgacgcacgaaatgagctttgcccgggatgttgcggaccgggcgatctttatggaccaggggcggatagtcgagcagggggccgcaaaagcgttatttgccgaccccgagcagcctcgcacccgccagttcctcgagaagtttctgctgcaataa

SEQ ID NO: 94902 - protein, 250 aa, Escherichia coli
MSAIEVKNLVKKFHGQTVLHGIDLEVKPGEVVAIIGPSGSGKTTLLRSINLLEQPEAGTITVGDITIDTARSLSQQKSLIRQLRQHVGFVFQNFNLFPHRTVLENIIEGPVIVKGEPKEEATARARELLAKVGLAGKETSYPRRLSGGQQQRVAIARALAMRPEVILFDEPTSALDPELVGEVLNTIRQLAQEKRTMVIVTHEMSFARDVADRAIFMDQGRIVEQGAAKALFADPEQPRTRQFLEKFLLQ

SEQ ID NO: 94903 - DNA, 726 bp, Escherichia coli O157
  CDS (1)..(726): transl_table=11
atggcaacattaactgcaaagaaccttgcaaaagcctataaaggccgtcgcgtggtagaagacgtcagcctgaccgtcaactccggggaaattgtcggtctgctggggccaaacggtgccggtaagaccaccactttctacatggttgtaggcattgtgccgcgcgatgcgggcaacatcattattgatgatgacgatatcagtctgctacctctgcatgcacgcgcgcgccgcggtatcggctatctgccacaggaagcctccattttccgtcgcctcagcgtttacgataacctgatggcggtactgcaaattcgtgacgacttgtctgctgaacagcgtgaagaccgcgcgaacgagctgatggaagagtttcacattgagcacctgcgtgacagcatggggcagtcactctccgggggtgaacgtcgccgtgtagaaattgcccgcgcactggctgcgaatccgaaatttattctgctcgacgaaccgtttgccggggttgacccgatctcagttatcgacattaaacgcatcattgagcacctgcgcgacagcggcttgggcgtgctgatcactgaccacaacgtgcgtgaaacactggcggtttgtgaacgcgcttatatcgtcagtcaggggcatttgatcgcccacggcacgcctacagaaatcttacaagacgaacacgttaagcgtgtataccttggggaagacttcagactctga

SEQ ID NO: 94904 - protein, 241 aa, Escherichia coli O157
MATLTAKNLAKAYKGRRVVEDVSLTVNSGEIVGLLGPNGAGKTTTFYMVVGIVPRDAGNIIIDDDDISLLPLHARARRGIGYLPQEASIFRRLSVYDNLMAVLQIRDDLSAEQREDRANELMEEFHIEHLRDSMGQSLSGGERRRVEIARALAANPKFILLDEPFAGVDPISVIDIKRIIEHLRDSGLGVLITDHNVRETLAVCERAYIVSQGHLIAHGTPTEILQDEHVKRVYLGEDFRL

SEQ ID NO: 94905 - DNA, 822 bp, Oryza sativa
  CDS (1)..(822)
atggcgcacgccttcgccggcggcacctccgccatctgccgctgcccccacgaccccggccgagccgccctcgtatcccgccctcgccaccgcctccgtgtcctcgcgtcgtccctacccacgccggccatcgagggccagggcgtcgagttgtcggtgacgactcggcgggggcgggtgctgccggtgctcaaggactgctccctccgcgtccctccgggtcagctctggatgctcctcggccccaacggctgcggcaagtccacccttctcaaggttttggcaggatttttaaatccttcttctggtacagtgtatattaacaggccatgcagctatgtcttccaaaatcccgatcaccaggttgtgatgccgacagtggaatcagatgttgcatttggtcttggtaagctcaacctttcgttggatgaggttaggtcaagagtatcacaatcactggatgctgtgggaatgttaagctactctcaaaggccaatccaaactctgagtggcgggcagaagcagagagttgcaattgccggtgctttagctgaagcatccaaagtactactactggatgagctgaccacattcttggatgaatacgaccagatgggtgttatcaaggcggtaaggaaatctgtaggtgctggtggggaggtttcagcattgtgggtgacccatcgactggaagaactcagatatgctgatggtgctatttatatggaagatggccagacaattattcaaggtgatgtgtctacaatatccaaatatataaagaaaaagcaagcccgctacttcggtcactttgagctttga

SEQ ID NO: 94906 - protein, 273 aa, Oryza sativa
MAHAFAGGTSAICRCPHDPGRAALVSRPRHRLRVLASSLPTPAIEGQGVELSVTTRRGRVLPVLKDCSLRVPPGQLWMLLGPNGCGKSTLLKVLAGFLNPSSGTVYINRPCSYVFQNPDHQVVMPTVESDVAFGLGKLNLSLDEVRSRVSQSLDAVGMLSYSQRPIQTLSGGQKQRVAIAGALAEASKVLLLDELTTFLDEYDQMGVIKAVRKSVGAGGEVSALWVTHRLEELRYADGAIYMEDGQTIIQGDVSTISKYIKKKQARYFGHFEL

SEQ ID NO: 94907 - DNA, 825 bp, Brassica napus; identical to SEQ ID NO: 84839
  CDS (1)..(825)

SEQ ID NO: 94908 - protein, 274 aa, Brassica napus; identical to SEQ ID NO: 84840

SEQ ID NO: 94909 - DNA, 1263 bp, Glycine max; identical to SEQ ID NO: 84841
  CDS (1)..(1263)

SEQ ID NO: 94910 - protein, 420 aa, Glycine max; identical to SEQ ID NO: 84842

SEQ ID NO: 94911 - DNA, 825 bp, Brassica napus; identical to SEQ ID NO: 84843
  CDS (1)..(825)

SEQ ID NO: 94912 - protein, 274 aa, Brassica napus; identical to SEQ ID NO: 84844

SEQ ID NO: 94913 - DNA, 1986 bp, Brassica napus
  CDS (1)..(1986)
atgtcaggttttgacggcgttgaaaatcaaatgaacggtccagattcatcacctcgtctccctcaagatacttgtgatcagccttcctcattattttcatcgtctccgtgtttcccaatcaccctcaagttcgtcgatgtgtgttaccgagtgaagatacaaggcaagtccagcgattccgtgaaactcaagagattgttgggacttgaacacaaaccgtccgatgagattccatcgacggagaggacgatactaagcggagtcaccggaatggtgacacctggcgagtttatggccgttctcggaccatcgggaagcggtaaatcaacgctgctaaacgcggtcgcagggagactccatggaacaggcctcacgggaaaaatactcgccaacgacgtcaaactaacgaaacaaacgttaaaacgcaccggcttcgtggcccaggacgatctcctctacccgcacttgaccgtgcgcgaaaccctagtgttcgtcgccttgctccgcctccctcggagtctaactcgagacgtcaagatcaaagccgccgagtcggtgatctccgagctcgggctcgagaaatgcgagaacacggtggttggcaacacgttcatcagggggatctcgggaggtgagaggaaacgagtgagcatcgctcacgagctgctcatcaacccgagccttctcgttctcgacgagccgacgtcgggtctcgacgcgacggcggctctgagattggtccagacgctggctgggttggctcatgagaaagggaagacggtggtgacgtcgattcaccagccgtcgagccgcgtctttcagatgtttgacactgtgctgcttttgagcgaagggaagtgtttgttcgtcggaaaaggaagagacgccatggcttacttcgactccgtcggattctcgccggcgtttccgatgaatccggctgacttccttctcgatcttgctaacggtgtctgtcagattgacggtacaactgagcgggaaaaacctgacgtgagacaaacactagccattgcttacgatacattgctagccccaaacgtcaaagcttgcatcgacgcgtcaccttctcccgcagagaacgcacgttttgtgaaaacgagaaaaaacgctcgtggaataatgtccggtcttgcaacatggtttagtcagctatgcatcctcctccatagacttataaaagaacgccgccacgaatcttttgatgcacttcgtgtcttccaggtcctcgcggcttcactactatgcagtctcatgtggtggcactcagattatcgtgacgtgcacgaccgacaaggactactcttcttcatatccatattctggggggtacttccgtcatttaacgcagtcttcacctttccgcaagaacgtgcgattttcactcgagaacgagcgtcgggtatgtacacactctcatcttacttcatggctcacgtcatcggatcgctctccatggaactcgttctcccggcagcgttcttgacgctaacttactggatggtcggtctacgtccagggctaatacctttcctcctcaccctttccgtgctattgctatacgtcttagcctctcagggactaggacttgccttaggcgcagctatcatggacgctaaaaaagcctccacgatcgtgactgtgacaatgctagcgtttgttttaacgggcggttactatgttaacaaagtgccatcaggcatggtgtggatgaaatacgtttccacaacgttttattgttaccgtctattaatagcggttcagtacggaaatggcgatgcgatattggcgatggttggatgcgagccaaagggaacgcaaggagcggcaaaggcggctgggtgccggtttatggaggaggaagtgatcggagacattggcttgtggacgagcgtgagcgttttgttcttcatgtttgttggttacagagtattggcctacttggctttgaggcgtattaaactataa

SEQ ID NO: 94914 - protein, 661 aa, Brassica napus
MSGFDGVENQMNGPDSSPRLPQDTCDQPSSLFSSSPCFPITLKFVDVCYRVKIQGKSSDSVKLKRLLGLEHKPSDEIPSTERTILSGVTGMVTPGEFMAVLGPSGSGKSTLLNAVAGRLHGTGLTGKILANDVKLTKQTLKRTGFVAQDDLLYPHLTVRETLVFVALLRLPRSLTRDVKIKAAESVISELGLEKCENTVVGNTFIRGISGGERKRVSIAHELLINPSLLVLDEPTSGLDATAALRLVQTLAGLAHEKGKTVVTSIHQPSSRVFQMFDTVLLLSEGKCLFVGKGRDAMAYFDSVGFSPAFPMNPADFLLDLANGVCQIDGTTEREKPDVRQTLAIAYDTLLAPNVKACIDASPSPAENARFVKTRKNARGIMSGLATWFSQLCILLHRLIKERRHESFDALRVFQVLAASLLCSLMWWHSDYRDVHDRQGLLFFISIFWGVLPSFNAVFTFPQERAIFTRERASGMYTLSSYFMAHVIGSLSMELVLPAAFLTLTYWMVGLRPGLIPFLLTLSVLLLYVLASQGLGLALGAAIMDAKKASTIVTVTMLAFVLTGGYYVNKVPSGMVWMKYVSTTFYCYRLLIAVQYGNGDAILAMVGCEPKGTQGAAKAAGCRFMEEEVIGDIGLWTSVSVLFFMFVGYRVLAYLALRRIKL

SEQ ID NO: 94915 - DNA, 2232 bp, Glycine max
  CDS (1)..(2232)
atggagaaagcaaatacatcactagtgagaacaaaatcagaccaactagtggagtcgatggtggcggccctgaagtcgccagcatcgagcgaccactccgcgaacggggtggttgaaggcggggggaccatctccaggaagtcgagccggcggctgacgggggcgtcaccggggcgcggcgggaagaacacgcacataaggaagtctaggagtgctcagataagtcaaatgaagctggagctcgatgatgtgagtagtggtgccgcacttagcagagcctcaagtgctagcttgggactctctttctccttcactggcttcactatgcctcctgaggaaattgcagactccaagcccttcagtgatgatgatatccctgaggatattgaatctggacctaggacgaagtttcaaacagaacctactctaccaatatatctaaagttcacggatgtgacctacaagatagtgatcaagggcatgacaacaactgaggagaaggatatcttgaatgggatcactggttctgtaaatccaggggaagttctggcattgatgggtccctcaggaagtggaaagacaactcttttaaaccttcttggaggcaggttaagccatcctataagtggtggttctatcacatacaatgaccaaccatattctaagtttcttaagagcaggataggattcgtgacacaagatgatgttctgtttcctcacctaactgtgaaagagacattgacatacgcagccagactaagattaccaaagacatacacaaaggagcaaaaggagaaacgagctttagatgtaatctatgagcttggcttggagaggtgccaagacactatgattggtggttcctttgttcgcggagtatctggtggtgagaggaagagagtttgtattggcaatgagatcataatcaacccttctcttctttttcttgatgaaccaacatctggtttggattctacaacagccttgaggattgttcagatgctacaagacatagcagaggctggcaaaacagtggtgacaacaattcaccaaccatcaagcagactctttcacaaatttgataaattgatccttcttggaaaagggagtttgctttactttggaaaagcatcagaagcaatgacttacttccagtctataggatgttcaccccttatttccatgaacccagctgagtttttgctagaccttgctaatggaaacataaatgatgtttccctaccttcagagttggaagataaagtgcagatgggaaatgcagaagctgaaacactaaatgggaagccatcaccagcagttgtacatgagtacctggtggaggcatacgaaactcgagtagcagaaacagaaaagaaaagactaatggttcctatacccattgatgaagcactgaagactaaggtgtgttctcataagagacaatggggagcaagttgggatgagcaatattccatactattttggagaggaatcaaagaacggaggcatgactattttagctggttgagaatcacccaagttttatccactgctgtcatcttaggattactctggtggcaatcagatactaagaacccaaaagatctgcaagatcaggcaggattgctattctttattgcggttttctggggattttttcctgttttcactgcaatattcacattccctcaagagagagccatgctgagtaaggagagagcagcagatatgtacagattgagtgcatacttcctggctagaaccacaagtgaccttccactagacctcattttaccagtgctttttctgcttgttgtttatttcatggccggtctcagactcagtgttgcaccatttttcctcaccattcttactgttttcctctgcattgtggctgctcagggacttggacttgctattggagccacacttatggacttgaaaagagcaacaactttggcttcagtaactgtgatgaccttcatgctggctggaggattttttgtgcagagagtccccatatttttttcttggatccggtacatgtcattcaactaccacacctacaagcttctgctcaaggtgcaatatgaacacatctcaccagtcatcaatggaatgagaattgatagtggtgcaacagaggtagctgctctaatagccatggtttttggttaccgtttcttggcatatctttctctaaggcgaatgaaacttcaatctggagcttaa

SEQ ID NO: 94916 - protein, 743 aa, Glycine max
MEKANTSLVRTKSDQLVESMVAALKSPASSDHSANGVVEGGGTISRKSSRRLTGASPGRGGKNTHIRKSRSAQISQMKLELDDVSSGAALSRASSASLGLSFSFTGFTMPPEEIADSKPFSDDDIPEDIESGPRTKFQTEPTLPIYLKFTDVTYKIVIKGMTTTEEKDILNGITGSVNPGEVLALMGPSGSGKTTLLNLLGGRLSHPISGGSITYNDQPYSKFLKSRIGFVTQDDVLFPHLTVKETLTYAARLRLPKTYTKEQKEKRALDVIYELGLERCQDTMIGGSFVRGVSGGERKRVCIGNEIIINPSLLFLDEPTSGLDSTTALRIVQMLQDIAEAGKTVVTTIHQPSSRLFHKFDKLILLGKGSLLYFGKASEAMTYFQSIGCSPLISMNPAEFLLDLANGNINDVSLPSELEDKVQMGNAEAETLNGKPSPAVVHEYLVEAYETRVAETEKKRLMVPIPIDEALKTKVCSHKRQWGASWDEQYSILFWRGIKERRHDYFSWLRITQVLSTAVILGLLWWQSDTKNPKDLQDQAGLLFFIAVFWGFFPVFTAIFTFPQERAMLSKERAADMYRLSAYFLARTTSDLPLDLILPVLFLLVVYFMAGLRLSVAPFFLTILTVFLCIVAAQGLGLAIGATLMDLKRATTLASVTVMTFMLAGGFFVQRVPIFFSWIRYMSFNYHTYKLLLKVQYEHISPVINGMRIDSGATEVAALIAMVFGYRFLAYLSLRRMKLQSGA

SEQ ID NO: 94917 - DNA, 2217 bp, Glycine max
  CDS (1)..(2217)
atggagaaagcaaatacatcactagtgagaacaaaatcagaccaactattagaatcaatggtggcaggcttaaagtcgccaccatcgagcgatcactccgcgaacggagtggtggactcgaggaagtcaagccgatggctgacgggggcctcgccggggcgcggcgggaagaacacccacataagaaagtcaaggagtgctcagataagtcaaatgaagctagagctcgatgatgtgagtagtggtgctgcacttagcagagcctcaagtgctagcttgggactctctttctccttcactggctttactatgcctcctgaagaaattgctgactccaagcccttcagtgatgatgatatccctgaggatattgaagctggacctaagacgaagtttcaaacggaaccaactctaccaatatatctaaagttcacggatgtgacctacaagatagtgatcaagggcatgacaacaactgaggagaaggatatcttgaatgggatcactggttctgtaaatccaggggaagttctggcattgatgggtccctcaggaagtggaaagacaactcttttaaaccttcttggaggcaggttaagccatcctataagtggtggttctatcacatacaatgaccaaccatattctaagtttcttaagagcaggataggattcgtgacacaagatgatgttctgtttcctcacctaactgtgaaagagacattgacatacgcagccagactaagattaccaaagacatacacaaaggagcaaaaggagaaacgagctttagatgtaatctatgagcttggcttggagaggtgccaagacactatgattggtggttcctttgttcgcggagtatctggtggtgagaggaagagagtttgtattggcaatgagatcataatcaacccttctcttctttttcttgatgaaccaacatctggtttggattctacaacagccttgaggattgttcagatgctacaagacatagcagaggctggcaaaacagtggtgacaacaattcaccaaccatcaagcagactctttcacaaatttgataaattgatccttcttggaaaagggagtttgctttactttggaaaagcatcagaagcaatgacttacttccagtctataggatgttcaccccttatttccatgaacccagctgagtttttgctagaccttgctaatggaaacataaatgatgtttccctaccttcagagttggaagataaagtgcagatgggaaatgcagaagctgaaacactaaatgggaagccatcaccagcagttgtacatgagtacctggtggaggcatacgaaactcgagtagcagaaacagaaaagaaaagactaatggttcctatacccattgatgaagcactgaagactaaggtgtgttctcataagagacaatggggagcaagttgggatgagcaatattccatactattttggagaggaatcaaagaacggaggcatgactattttagctggttgagaatcacccaagttttatccactgctgtcatcttaggattactctggtggcaatcagatactaagaacccaaaagatctgcaagatcaggcaggattgctattctttattgcggttttctggggattttttcctgttttcactgcaatattcacattccctcaagagagagccatgctgagtaaggagagagcagcagatatgtacagattgagtgcatacttcctggctagaaccacaagtgaccttccactagacctcattttaccagtgctttttctgcttgttgtttatttcatggccggtctcagactcagtgttgcaccatttttcctcaccattcttactgttttcctctgcattgtggctgctcagggacttggacttgctattggagccacacttatggacttgaaaagagcaacaactttggcttcagtaactgtgatgaccttcatgctggctggaggattttttgtgcagagagtccccatatttttttcttggatccggtacatgtcattcaactaccacacctacaagcttctgctcaaggtgcaatatgaacacatctcaccagtcatcaatggaatgagaattgatagtggtgcaacagaggtagctgctctaatagccatggtttttggttaccgtttcttggcatatctttctctaaggcgaatgaaacttcaatctggagcttaa

SEQ ID NO: 94918 - protein, 738 aa, Glycine max
MEKANTSLVRTKSDQLLESMVAGLKSPPSSDHSANGVVDSRKSSRWLTGASPGRGGKNTHIRKSRSAQISQMKLELDDVSSGAALSRASSASLGLSFSFTGFTMPPEEIADSKPFSDDDIPEDIEAGPKTKFQTEPTLPIYLKFTDVTYKIVIKGMTTTEEKDILNGITGSVNPGEVLALMGPSGSGKTTLLNLLGGRLSHPISGGSITYNDQPYSKFLKSRIGFVTQDDVLFPHLTVKETLTYAARLRLPKTYTKEQKEKRALDVIYELGLERCQDTMIGGSFVRGVSGGERKRVCIGNEIIINPSLLFLDEPTSGLDSTTALRIVQMLQDIAEAGKTVVTTIHQPSSRLFHKFDKLILLGKGSLLYFGKASEAMTYFQSIGCSPLISMNPAEFLLDLANGNINDVSLPSELEDKVQMGNAEAETLNGKPSPAVVHEYLVEAYETRVAETEKKRLMVPIPIDEALKTKVCSHKRQWGASWDEQYSILFWRGIKERRHDYFSWLRITQVLSTAVILGLLWWQSDTKNPKDLQDQAGLLFFIAVFWGFFPVFTAIFTFPQERAMLSKERAADMYRLSAYFLARTTSDLPLDLILPVLFLLVVYFMAGLRLSVAPFFLTILTVFLCIVAAQGLGLAIGATLMDLKRATTLASVTVMTFMLAGGFFVQRVPIFFSWIRYMSFNYHTYKLLLKVQYEHISPVINGMRIDSGATEVAALIAMVFGYRFLAYLSLRRMKLQSGA

SEQ ID NO: 94919 - DNA, 783 bp, Glycine max; identical to SEQ ID NO: 84845
  CDS (1)..(783)

SEQ ID NO: 94920 - protein, 260 aa, Glycine max; identical to SEQ ID NO: 84846

SEQ ID NO: 94921 - DNA, 1902 bp, Glycine max; identical to SEQ ID NO: 7665
  CDS (1)..(1902)

SEQ ID NO: 94922 - protein, 633 aa, Glycine max; identical to SEQ ID NO: 7666

SEQ ID NO: 94923 - DNA, 3867 bp, Glycine max; identical to SEQ ID NO: 7667
  CDS (1)..(3867)

SEQ ID NO: 94924 - protein, 1288 aa, Glycine max; identical to SEQ ID NO: 7668

SEQ ID NO: 94925 - DNA, 789 bp, Zea mays; identical to SEQ ID NO: 84851
  CDS (1)..(789)

SEQ ID NO: 94926 - protein, 262 aa, Zea mays; identical to SEQ ID NO: 84852

SEQ ID NO: 94927 - DNA, 4140 bp, Zea mays; identical to SEQ ID NO: 7669
  CDS (1)..(4140)

SEQ ID NO: 94928 - protein, 1379 aa, Zea mays; identical to SEQ ID NO: 7670

SEQ ID NO: 94929 - DNA, 4329 bp, Zea mays; identical to SEQ ID NO: 7671
  CDS (1)..(4329)

SEQ ID NO: 94930 - protein, 1442 aa, Zea mays; identical to SEQ ID NO: 7672

SEQ ID NO: 94931 - DNA, 1947 bp, Zea mays; identical to SEQ ID NO: 84857
  CDS (1)..(1947)

SEQ ID NO: 94932 - protein, 648 aa, Zea mays; identical to SEQ ID NO: 7674

SEQ ID NO: 94933 - DNA, 2214 bp, Zea mays; identical to SEQ ID NO: 7675
  CDS (1)..(2214)

SEQ ID NO: 94934 - protein, 737 aa, Zea mays; identical to SEQ ID NO: 7676

SEQ ID NO: 94935 - DNA, 1947 bp, Zea mays; identical to SEQ ID NO: 7677
  CDS (1)..(1947)

SEQ ID NO: 94936 - protein, 648 aa, Zea mays; identical to SEQ ID NO: 7678

SEQ ID NO: 94937 - DNA, 20 bp, Artificial sequence
  primer
atggctatgttatcctttcc

SEQ ID NO: 94938 - DNA, 21 bp, Artificial sequence
  primer
ttatactgccaaaaatttttg

SEQ ID NO: 94939 - protein, 214 aa, Artificial sequence
  consensus sequence
  Variant (2)..(10): Xaa in position 2 to 10 is any amino acid
  Variant (12)..(17): Xaa in position 12 to 17 is any amino acid
  Variant (19)..(20): Xaa in position 19 to 20 is any amino acid
  Variant (22)..(22): Xaa in position 22 is any amino acid
  Variant (25)..(25): Xaa in position 25 is any amino acid
  Variant (27)..(38): Xaa in position 27 to 38 is any amino acid
  Variant (39)..(44): Xaa in position 39 to 44 is any or no amino acid
  Variant (46)..(55): Xaa in position 46 to 55 is any amino acid
  Variant (56)..(72): Xaa in position 56 to 72 is any or no amino acid
  Variant (74)..(78): Xaa in position 74 to 78 is any amino acid
  Variant (79)..(80): Xaa in position 79 to 80 is any or no amino acid
  Variant (82)..(83): Xaa in position 82 to 83 is any amino acid
  Variant (84)..(84): Xaa in position 84 is any or no amino acid
  Variant (87)..(87): Xaa in position 87 is any amino acid
  Variant (90)..(91): Xaa in position 90 to 91 is any amino acid
  Variant (92)..(92): Xaa in position 92 is any or no amino acid
  Variant (94)..(122): Xaa in position 94 to 122 is any amino acid
  Variant (123)..(135): Xaa in position 123 to 135 is any or no amino acid
  Variant (140)..(141): Xaa in position 140 to 141 is any amino acid
  Variant (143)..(144): Xaa in position 143 to 144 is any amino acid
  Variant (147)..(147): Xaa in position 147 is any amino acid
  Variant (149)..(149): Xaa in position 149 is any amino acid
  Variant (152)..(154): Xaa in position 152 to 154 is any amino acid
  Variant (156)..(157): Xaa in position 156 to 157 is any amino acid
  Variant (159)..(159): Xaa in position 159 is any amino acid
  Variant (164)..(165): Xaa in position 164 to 165 is any amino acid
  Variant (167)..(168): Xaa in position 167 to 168 is any amino acid
  Variant (170)..(210): Xaa in position 170 to 210 is any amino acid
  Variant (211)..(213): Xaa in position 211 to 213 is any or no amino acid
LXXXXXXXXXGXXXXXXGXXGXGKXTXXXXXXXXXXXXXXXXXXGXXXXXXXXXXXXXXXXXXXXXXXXXXXVXXXXXXXFXXXTVXENXXXGXXXXXXXXXXXXXXXXXXXXXXXXXXXXXXXXXXXXXXXXXXLSGGXXQXXAIXRXALXXXPXXLXLDEPXXGXXPXXXXXXXXXXXXXXXXXXXXXXXXXXXXXXXXXXXXXXXXXXXXG

SEQ ID NO: 94940 - protein, 15 aa, Artificial sequence
  protein pattern
  Variant (2)..(3): Xaa in position 2 to 3 is any amino acid
  Variant (4)..(5): Xaa in position 4 to 5 is Ile, Leu, Met or Val
  Variant (6)..(6): Xaa in position 6 is Phe or Leu
  Variant (10)..(11): Xaa in position 10 to 11 is any amino acid
  Variant (12)..(12): Xaa in position 12 is Ala or Gly
  Variant (13)..(13): Xaa in position 13 is Ile, Leu or Val
  Variant (14)..(14): Xaa in position 14 is Ala, Asp, Gln or Ser
PXXXXXDEPXXXXXP

SEQ ID NO: 94941 - protein, 26 aa, Artificial sequence
  protein pattern
  Variant (2)..(10): Xaa in position 2 to 10 is any amino acid
  Variant (12)..(15): Xaa in position 12 to 15 is any amino acid
  Variant (16)..(16): Xaa in position 16 is Ile, Leu or Val
  Variant (17)..(17): Xaa in position 17 is any amino acid
  Variant (19)..(19): Xaa in position 19 is any amino acid
  Variant (20)..(20): Xaa in position 20 is Asn, Ser or Val
  Variant (22)..(22): Xaa in position 22 is any amino acid
  Variant (23)..(23): Xaa in position 23 is Ala or Gly
  Variant (25)..(26): Xaa in position 25 to 26 is Ser or Thr
LXXXXXXXXXGXXXXXXGXXGXXKXX

SEQ ID NO: 94942 - DNA, 957 bp, Synechocystis sp.
  CDS (1)..(957): transl_table=11
atgcccgagtatttgcttctgcccgctggcctaatttccctctccctggcgatcgccgctggactgtatctcctaactgcccggggctatcagtcatcggattccgtggccaacgcctacgaccaatggacagaggacggcattttggaatattactggggcgaccatatccacctcggccattatggcgatccgccagtggccaaggatttcatccaatcgaaaattgattttgtccatgccatggcccagtggggcggattagatacacttccccccggcacaacggtattggatgtgggttgcggcattggcggtagcagtcgcattctcgccaaagattatggttttaacgttaccggcatcaccattagtccccaacaggtgaaacgggcgacggaattaactcctcccgatgtgacggccaagtttgcggtggacgatgctatggctttgtcttttcctgacggtagtttcgacgtagtttggtcggtggaagcagggccccacatgcctgacaaagctgtgtttgccaaggaattactgcgggtcgtgaaaccagggggcattctggtggtggcggattggaatcaacgggacgatcgccaagtgcccctcaacttctgggaaaaaccagtgatgcgacaactgttggatcaatggtcccaccctgcctttgccagcattgaaggttttgcggaaaatttggaagccacgggtttggtggagggccaggtgactactgctgattggactgtaccgaccctccccgcttggttggataccatttggcagggcattatccggccccagggctggttacaatacggcattcgtgggtttatcaaatccgtgcgggaagtaccgactattttattgatgcgccttgcctttggggtaggactttgtcgcttcggtatgttcaaagcagtgcgaaaaaacgccactcaagcttaa

SEQ ID NO: 94943 - protein, 318 aa, Synechocystis sp.
MPEYLLLPAGLISLSLAIAAGLYLLTARGYQSSDSVANAYDQWTEDGILEYYWGDHIHLGHYGDPPVAKDFIQSKIDFVHAMAQWGGLDTLPPGTTVLDVGCGIGGSSRILAKDYGFNVTGITISPQQVKRATELTPPDVTAKFAVDDAMALSFPDGSFDVVWSVEAGPHMPDKAVFAKELLRVVKPGGILVVADWNQRDDRQVPLNFWEKPVMRQLLDQWSHPAFASIEGFAENLEATGLVEGQVTTADWTVPTLPAWLDTIWQGIIRPQGWLQYGIRGFIKSVREVPTILLMRLAFGVGLCRFGMFKAVRKNATQA

SEQ ID NO: 94944 - DNA, 1312 bp, Zea mays subsp. mays
  CDS (107)..(1165)
agtcactaggctacgaaacagtgccgcggtgcgcgcacacacagccgccacagcccagacccctcgcctcggcctcttttaaatatcgcgcattccggcgccgcaaatggctcacgcggcgctgctccattgctcccagtcctccaggagcctcgcagcctgccgccgcggcagccactaccccgccccttcgcacgtcccgcgccactcccgccgtcgccgacgcgccgtcgtcagcctgcgtccgatggcctcgtcgacggctcaggcccccgcgacggcgccgccgggtctgaaggagggcatcgcggggctgtacgacgagtcgtcagggctgtgggagaacatctggggcgaccacatgcaccacggcttctacgactcgagcgaggccgcctccatggccgatcaccgccgcgcccagatccgcatgatcgaggaggcgctcgccttcgccggcgtcccagcctcagatgatccagagaatacaccaaaaacaatagtcgatgtcggatgtggcattggtggtagttcaaggtacttggcgaagaaatacggagcgcagtgcacggggatcacgttgagccctgttcaagccgagagaggaaatgctctcgctggagcgcaggggttgtcggatcaggttactctgcaagttgctgatgctctggagcaaccgtttcctgacgggcagttcgatctggtgtggtccatggagagtggcgagcacatgccggacaagagaaagtttgttagtgagctagcacgcgtggcggctcctggagggacaataatcatcgtgacatggtgccataggaacctggatccatccgaaacctcgctaaagcccgatgaactgagcctcctgaagagaatatgcgacgcgtactacctcccggactggtgctcaccttcagactatgtgaacattgccaagtcactgtctctcgaggatatcaagacagctgactggtcggagaacgtggccccgttttggcccgccgtgataaaatcagcgctaacatggaagggcttcacctctctgctgacgaccggatggaagacgatcagaggcgcgatggtgatgccgctaatgatccagggctacaagaagggcctcatcaaattcaccatcatcacctgtcgcaagcctggagccgcgtaggaggaggccaaggagcaggagttacaggcacaggcacaggagtgccaagtgcaataatgtagatccgtggccccatcgccgtctactcatctgtactgcaccaaaatcaacattctcctaggacatgttaaataattttctgccacc

SEQ ID NO: 94945 - protein, 352 aa, Zea mays subsp. mays
MAHAALLHCSQSSRSLAACRRGSHYPAPSHVPRHSRRRRRAVVSLRPMASSTAQAPATAPPGLKEGIAGLYDESSGLWENIWGDHMHHGFYDSSEAASMADHRRAQIRMIEEALAFAGVPASDDPENTPKTIVDVGCGIGGSSRYLAKKYGAQCTGITLSPVQAERGNALAGAQGLSDQVTLQVADALEQPFPDGQFDLVWSMESGEHMPDKRKFVSELARVAAPGGTIIIVTWCHRNLDPSETSLKPDELSLLKRICDAYYLPDWCSPSDYVNIAKSLSLEDIKTADWSENVAPFWPAVIKSALTWKGFTSLLTTGWKTIRGAMVMPLMIQGYKKGLIKFTIITCRKPGAA

SEQ ID NO: 94946 - DNA, 1038 bp, Gossypium hirsutum
  CDS (1)..(1038)
atggctgccgcgttacaattacaaacacacccttgcttccatggcacgtgccaactctcacctccgccacgaccttccgtttccttcccttcttcctcccgctcgtttccatctagcagacgttccctgtccgcgcatgtgaaggcggcggcgtcgtctttgtccaccaccaccttgcaggaagggatagcggagttttacgatgagtcgtcggggatttgggaagacatatggggtgaccatatgcaccatggatattacgagccgggttccgatatttcgggttcagatcatcgtgccgctcagattcgaatggtcgaagaatcgctccgttttgctggaatatcagaggacccagcaaacaggcccaagagaatagttgatgttgggtgtgggataggaggcagttctaggtatctagcaaggaaatatggggcaaaatgccaaggcattactttgagccctgttcaagctggaagagccaatgctcttgctaatgctcaaggactagcagaacaggtttgttttgaagttgcagatgccttgaaccaaccattccctgatgaccaatttgatcttgtttggtctatggaaagcggagaacacatgcctgacaaacccaagtttgttaaagagctggtgcgagtggcagctccaggaggcacaataatagtagtgacatggtgccatagggatcttggtccatctgaagagtctttgcagccatgggagcaaaagcttttaaacagaatatgtgatgcttactatttaccagagtggtgttctacttctgattatgtcaaattatttcagtccctatctctccaggatataaaggcaggagactggactgagaatgtagcacccttttggccagcagtgatacgttcagcattgacatggaagggcttcacatcgctgctacgaagtggattaaaaacaataaaaggtgcactggtgatgccattgatgatcgaaggtttccagaaaggggtgataaagtttgccatcattgcttgccggaagccagctgagtag

SEQ ID NO: 94947 - protein, 345 aa, Gossypium hirsutum
MAAALQLQTHPCFHGTCQLSPPPRPSVSFPSSSRSFPSSRRSLSAHVKAAASSLSTTTLQEGIAEFYDESSGIWEDIWGDHMHHGYYEPGSDISGSDHRAAQIRMVEESLRFAGISEDPANRPKRIVDVGCGIGGSSRYLARKYGAKCQGITLSPVQAGRANALANAQGLAEQVCFEVADALNQPFPDDQFDLVWSMESGEHMPDKPKFVKELVRVAAPGGTIIVVTWCHRDLGPSEESLQPWEQKLLNRICDAYYLPEWCSTSDYVKLFQSLSLQDIKAGDWTENVAPFWPAVIRSALTWKGFTSLLRSGLKTIKGALVMPLMIEGFQKGVIKFAIIACRKPAE

SEQ ID NO: 94948 - DNA, 1044 bp, Brassica napus
  CDS (1)..(1044)
atgaaagcgacactcgcaccaccctcctctctcataagcctccccaggcacaaagtatcttccctccgttcaccgtcgcttctccttcagtcccaacggcgatcctcagccttaatgacgacgacggcatcacgtggaagcgtggctgtgacggctgctgctacctcctccgctgaggcgctgcgagaaggaatagcggaattctacaacgagacgtcgggattatgggaggagatttggggagatcatatgcatcacggcttctacgatcccgattcctctgttcaactttcagattccggtcaccgggaagctcagatccggatgattgaagagtctctacgtttcgccggcgttactgaagaggagaaaaagataaagagagtggtggatgttgggtgtgggatcggaggaagctcaaggtatattgcctctaaatttggtgccgaatgcattggcatcacactcagtcccgttcaagccaagagagcaaatgatctcgccaccgctcaatcactctctcataaggtttccttccaagttgcagatgcattggaccaaccatttgaagatggtatatccgatcttgtttggtcaatggaaagcggtgagcatatgcctgacaaggccaagttcgtgaaggaattggtacgtgtgacggctccaggaggaaggataataatagtgacatggtgccacagaaatctatctcaaggggaagaatctttgcagccatgggagcagaacctcttggacagaatctgcaaaacattttatctcccggcctggtgctccaccactgattatgtcgagttgcttcagtccctctcgctccaggatattaagtatgcagattggtcagagaacgtagctcctttctggccggcggttatacgaaccgcattaacgtggaagggccttgtgtctctgcttcgtagtggtatgaagagtataaaaggagcattgacaatgccattgatgattgaagggtacaagaaaggtgtcattaagtttggcatcatcacttgccagaagcctctctaa

SEQ ID NO: 94949 - protein, 347 aa, Brassica napus
MKATLAPPSSLISLPRHKVSSLRSPSLLLQSQRRSSALMTTTASRGSVAVTAAATSSAEALREGIAEFYNETSGLWEEIWGDHMHHGFYDPDSSVQLSDSGHREAQIRMIEESLRFAGVTEEEKKIKRVVDVGCGIGGSSRYIASKFGAECIGITLSPVQAKRANDLATAQSLSHKVSFQVADALDQPFEDGISDLVWSMESGEHMPDKAKFVKELVRVTAPGGRIIIVTWCHRNLSQGEESLQPWEQNLLDRICKTFYLPAWCSTTDYVELLQSLSLQDIKYADWSENVAPFWPAVIRTALTWKGLVSLLRSGMKSIKGALTMPLMIEGYKKGVIKFGIITCQKPL

SEQ ID NO: 94950 - DNA, 933 bp, Prochlorococcus marinus str. MIT 9301
  CDS (1)..(933): transl_table=11
atgtttgaattattaatccctttttttttactagttttattattactattgctatctataatctggagaattaaagctagaaaatatatttcttccagcacagtggcttctgcatatgatgcctggacacaggataaattacttgagagattgtggggagaacatatacatttgggttattatccgtcaggaaaaaatattgattttagaaaggctaaaattaagtttgtccatgaattagtcaaatggagtggtttagataaattgccaaagggatccagaattcttgatgtaggttgtggaataggggggagttccaggattcttgcggaatcttatgggtttaatgtcactgggattacaattagtccggctcaagttaaaagagctagagaacttactcctaatggactaaattgccacttccaagttatggatgctttaaatttgaaatttgaagaaggatcatttgatgcagtctggagtgttgaggctggtgcacatatgaatgataaaactaggtttgcagatgaaatgctgagaattctaagacctgatggttatttggcattggctgattggaactcaagagaccttgaggcataccccccatcattttttgaaaagttagttcttaaacaattactcgaacaatgggtacatcctaattttattagcattaatgatttcggtaatattctcagatctaataaaaatagttcaggaagagttattgctgaaaattggaattcctatacaaatccttcatggtatgactccattattgaaggcattcgaaggcctttcgcaattttgtcacttggcccatttgccatattgaagtcgattagagagattccaacaatacttctcatgaactgggcatttagaaaaggtttaatggagtttggagtttataaatgtagaggataa

SEQ ID NO: 94951 - protein, 310 aa, Prochlorococcus marinus str. MIT 9301
MFELLIPFFLLVLLLLLLSIIWRIKARKYISSSTVASAYDAWTQDKLLERLWGEHIHLGYYPSGKNIDFRKAKIKFVHELVKWSGLDKLPKGSRILDVGCGIGGSSRILAESYGFNVTGITISPAQVKRARELTPNGLNCHFQVMDALNLKFEEGSFDAVWSVEAGAHMNDKTRFADEMLRILRPDGYLALADWNSRDLEAYPPSFFEKLVLKQLLEQWVHPNFISINDFGNILRSNKNSSGRVIAENWNSYTNPSWYDSIIEGIRRPFAILSLGPFAILKSIREIPTILLMNWAFRKGLMEFGVYKCRG

SEQ ID NO: 94952 - DNA, 1089 bp, Oryza sativa (japonica cultivar-group)
  CDS (1)..(1089)
atggcccacgccgccgcggccacgggcgcactggcaccgctgcatccactgctccgctgcacgagccgtcatctctgcgcctcggcttcccctcgcgccggcctctgcctccaccaccaccgccgccgccgccgcagcagccggaggacgaaactcgccgtgcgcgcgatggcaccgacgttgtcctcgtcgtcgacggcggcggcagctcccccggggctgaaggagggcatcgcggggctctacgacgagtcgtccggcgtgtgggagagcatctggggcgagcacatgcaccacggcttctacgacgccggcgaggccgcctccatgtccgaccaccgccgcgcccagatccgcatgatcgaggaatccctcgccttcgccgccgtccccgatgatgcggagaagaaacccaaaagtgtagttgatgttggctgtggcattggtggtagctcaagatacttggcgaacaaatacggagcgcaatgctacggcatcacgttgagtccggtgcaggctgaaagaggaaatgccctcgcggcagagcaagggttatcagacaaggtctcctttcaagttggtgatgcattggagcagccttttcctgatgggcagtttgatcttgtctggtccatggagagtggcgagcacatgccagacaaacggcagtttgtaagcgagctggcacgcgtcgcagctcctggggcgagaataatcattgtgacctggtgccataggaacctcgagccatccgaagagtccctgaaacctgatgagctgaatctcctgaaaaggatatgcgatgcatattatctcccagactggtgctctccttctgattatgtcaaaattgccgagtcactgtctcttgaggatataaggacagctgattggtcagagaacgtcgccccattctggcctgcggttataaaatcagcattgacatggaaaggtttaacttctctgctaagaagtgggtggaagacgataagaggtgcaatggtgatgcctctgatgatcgaaggatacaagaaagggctcatcaaattcaccatcatcacctgtcgcaagcccgaaacaacgcagtag

SEQ ID NO: 94953 - protein, 362 aa, Oryza sativa (japonica cultivar-group)
MAHAAAATGALAPLHPLLRCTSRHLCASASPRAGLCLHHHRRRRRSSRRTKLAVRAMAPTLSSSSTAAAAPPGLKEGIAGLYDESSGVWESIWGEHMHHGFYDAGEAASMSDHRRAQIRMIEESLAFAAVPDDAEKKPKSVVDVGCGIGGSSRYLANKYGAQCYGITLSPVQAERGNALAAEQGLSDKVSFQVGDALEQPFPDGQFDLVWSMESGEHMPDKRQFVSELARVAAPGARIIIVTWCHRNLEPSEESLKPDELNLLKRICDAYYLPDWCSPSDYVKIAESLSLEDIRTADWSENVAPFWPAVIKSALTWKGLTSLLRSGWKTIRGAMVMPLMIEGYKKGLIKFTIITCRKPETTQ

SEQ ID NO: 94954 - DNA, 954 bp, Synechocystis sp. PCC 6803
  CDS (1)..(954): transl_table=11
atggtttaccatgttaggcctaagcacgccctgttcttagcattctattgttatttctctttgcttaccatggccagcgccaccattgccagtgcagacctctacgaaaaaattaaaaatttctacgacgactccagcggtctctgggaagacgtttggggtgagcatatgcaccacggctactacggtccccacggcacctatcggatcgatcgccgccaggctcaaattgatctgatcaaagaactattggcctgggcagtgccccaaaatagcgccaaaccacgaaaaattctcgatttaggctgtggcattggcggcagtagtttgtacttggcccagcaacaccaagcagaagtgatgggggctagtctttccccagtgcaggtggaacgggcgggggaaagggccagggccctggggttgggctcaacctgccagtttcaggtggccaatgccttggatttgccctttgcttccgattcctttgactgggtttggtcgttggaaagtggggagcacatgcccaacaaagctcagtttttacaagaagcttggcgggtacttaaaccaggtggccgtctgattttagcgacctggtgtcatcgtcccattgatcccggcaatggccccctgactgccgatgaacgtcgccatctccaagccatctatgacgtttactgtttgccctatgtggtttccctgccggactacgaggcgatcgccagggaatgtgggtttggggaaattaagactgccgattggtcagtggcggtggcacctttttgggaccgggtgattgagtctgcgttcgatccccgggtgttgtgggccttggggcaagcggggccaaaaattatcaatgccgccctgtgtttacgattaatgaaatggggctatgaacggggattagtgcgttttggcttattaacggggataaagcctttagtttga

SEQ ID NO: 94955 - protein, 317 aa, Synechocystis sp. PCC 6803
MVYHVRPKHALFLAFYCYFSLLTMASATIASADLYEKIKNFYDDSSGLWEDVWGEHMHHGYYGPHGTYRIDRRQAQIDLIKELLAWAVPQNSAKPRKILDLGCGIGGSSLYLAQQHQAEVMGASLSPVQVERAGERARALGLGSTCQFQVANALDLPFASDSFDWVWSLESGEHMPNKAQFLQEAWRVLKPGGRLILATWCHRPIDPGNGPLTADERRHLQAIYDVYCLPYVVSLPDYEAIARECGFGEIKTADWSVAVAPFWDRVIESAFDPRVLWALGQAGPKIINAALCLRLMKWGYERGLVRFGLLTGIKPLV

SEQ ID NO: 94956 - DNA, 993 bp, Nostoc sp. PCC 7120
  CDS (1)..(993): transl_table=11
atgagttggttgttttctacactggtatttttcttaacgctattgacagcagggatcgcgttatatctcattactgctagacgttatcaatcatctaactccgtagccaattcctacgaccagtggactgaagacggtattttagagttttactggggcgaacatatccatttaggtcattatggttcgccacctcaaagaaaggattttctggtggctaaatctgattttgtccatgaaatggtgcgttggggtggtttggataaactaccccctggtactaccttgttagatgttggttgtggaattgggggtagtagtcgcattttggcacgggattatggatttgccgttacaggtatcaccatcagcccccaacaagtccaacgcgctcaagagttaacaccacaggaactgaatgcacagtttttggtggatgatgcaatggcgctttccttcccagataatagttttgatgtagtttggtcaattgaagctggcccacatatgccagataaagccatttttgccaaagaattgatgcgggtactaaagcctggtggaatcatggttttagccgactggaatcagcgagacgatcgccaaaaacccctcaatttttgggagaaaccagtaatgcagcaactactagatcagtggtctcatccagctttttccagcatcgaaggcttttctgagcttttggcagcgacgggattagtagaaggggaggtaatcaccgcagactggacgaaacaaacactcccctcttggcttgattctatctggcaaggaatagttagaccagaaggattagtgcgttttggtctatctggtttcattaaatctctgcgagaagtgcctaccctactactgatgaggctggcattcggtacaggactctgtagatttgggatgttccgcgctttacgagctgacactgtaagatcatcagcagaacagacatctgcgatcaaggttgctcaaaagtaa

SEQ ID NO: 94957 - protein, 330 aa, Nostoc sp. PCC 7120
MSWLFSTLVFFLTLLTAGIALYLITARRYQSSNSVANSYDQWTEDGILEFYWGEHIHLGHYGSPPQRKDFLVAKSDFVHEMVRWGGLDKLPPGTTLLDVGCGIGGSSRILARDYGFAVTGITISPQQVQRAQELTPQELNAQFLVDDAMALSFPDNSFDVVWSIEAGPHMPDKAIFAKELMRVLKPGGIMVLADWNQRDDRQKPLNFWEKPVMQQLLDQWSHPAFSSIEGFSELLAATGLVEGEVITADWTKQTLPSWLDSIWQGIVRPEGLVRFGLSGFIKSLREVPTLLLMRLAFGTGLCRFGMFRALRADTVRSSAEQTSAIKVAQK

SEQ ID NO: 94958 - DNA, 987 bp, Thermosynechococcus elongatus BP-1
  CDS (1)..(987): transl_table=11
atgtctcatctagggctcatactggttatcactgttgttgcgttagtcctgctgggcttagcgctttacctgttgttcccccgcaagtacgagtctgcccgttccgtggccgagtcctatgacaactggaccaaggacggcattctagaattttactggggtgagcatattcaccttggccactatggtttgcctcctcgtcccaaggactttcgccaagcgaaggtagattttgttcatgaaatggtgcgttgggccggtctcgatcgcctgccgccggggacaaccgtcttggatgtcggctgtggtattggcgggagcagtcgtatcctggcccgtgactatggctttcatgtgactgggattacgattagccctgagcaggtacgccgggcgcgagaactcactcctgcggagctgaatgttcgctttcagctcgatgacgcgctagccttgtcatttccagatgccagctttgacgtagtttggtcaattgaagccggcccccacatgcccgataaacagcagttcgctaaagaattactccgtgtcctgaagcctgggggaattctggtggttgctgattggaaccagcgggacgatcgccagcagcccttgaacttctgggagcggctgatcatgcggcagctcttggatcaatgggcacaccccgcctttgccagcattgaaggctttgccgaggcccttgcagcaacgggtttagtggctggagaggtcatgactgctgactggacccaggaaacgctcccctcatggctagattcgatttggcagggaattgtgcggccagaggggctaattcgctttggcctaccggggctcgtgaaatccttgcgggaagttcccacattcctgctgatgcggattgcctttggtatgggactctgccgctttggtatgtttcgcgctgtgcgagcggagattcccgctgtctcccttgagcccgcccctcaagtgaactgctga

SEQ ID NO: 94959 - protein, 328 aa, Thermosynechococcus elongatus BP-1
MSHLGLILVITVVALVLLGLALYLLFPRKYESARSVAESYDNWTKDGILEFYWGEHIHLGHYGLPPRPKDFRQAKVDFVHEMVRWAGLDRLPPGTTVLDVGCGIGGSSRILARDYGFHVTGITISPEQVRRARELTPAELNVRFQLDDALALSFPDASFDVVWSIEAGPHMPDKQQFAKELLRVLKPGGILVVADWNQRDDRQQPLNFWERLIMRQLLDQWAHPAFASIEGFAEALAATGLVAGEVMTADWTQETLPSWLDSIWQGIVRPEGLIRFGLPGLVKSLREVPTFLLMRIAFGMGLCRFGMFRAVRAEIPAVSLEPAPQVNC

SEQ ID NO: 94960 - DNA, 930 bp, Prochlorococcus marinus subsp. marinus str. CCMP1375
  CDS (1)..(930): transl_table=11
atgatagctttcttattgccaatagtctctctattagtcctttctttaatatttttatggctatttaatgacagaaagtataaatcttctgaaagtgtttcttcagcatatgattcatggactaatgatcgcttgctagaaaaattgtggggtgaacatattcatcttggttattatgaaaattcttataaaacgaaggattttcgacaggcaaagatagattttgttcataagttagctcattggagtgggctttccactcttcctaaaggttctcgtattattgatattggttgtggtattggaggaagttccaggattttagctaaagactacggatttgatgttgttggtataacaattagttccgaacaagtaaaaagagcaaatcaattaactccaaaagagctcaaatgtcactttgaaatcatgaatgcacttaatttgaaattcgaagatggaagtttcgatggggtttggagtgttgaagcaggtcctcatattttaaataaacaattatttgctgatgaaatgcttagagtattacgtccagggggtgttttggctgttgctgattggaatagaagagattatgcgaaaaaagaaattggatttttaaatagtttagttcttaaacagttattaaatcaatggtctcacccagactttgcaactatttatggttttagaaataatctatcagatagtatttactctgcaggcagagtcgaaactgatgactggacaaaatatacgataccttcttggaatgattcaattattgaaggtattcgaaggccaaatgttttttttgacttgggtttaggatctttttttaaagcaattagagaagtgcctacaattgtattaatgcgatgggcctttcatactggccttatgcaatttggagtttttcgctctagaggataa

SEQ ID NO: 94961 - protein, 309 aa, Prochlorococcus marinus subsp. marinus str. CCMP1375
MIAFLLPIVSLLVLSLIFLWLFNDRKYKSSESVSSAYDSWTNDRLLEKLWGEHIHLGYYENSYKTKDFRQAKIDFVHKLAHWSGLSTLPKGSRIIDIGCGIGGSSRILAKDYGFDVVGITISSEQVKRANQLTPKELKCHFEIMNALNLKFEDGSFDGVWSVEAGPHILNKQLFADEMLRVLRPGGVLAVADWNRRDYAKKEIGFLNSLVLKQLLNQWSHPDFATIYGFRNNLSDSIYSAGRVETDDWTKYTIPSWNDSIIEGIRRPNVFFDLGLGSFFKAIREVPTIVLMRWAFHTGLMQFGVFRSRG

SEQ ID NO: 94962 - DNA, 936 bp, Prochlorococcus marinus subsp. pastoris str. CCMP1986
  CDS (1)..(936): transl_table=11
atgtccatttttttaatatcttcacttgttatatttttaactttattattttcttctctaatactttggagaattaatactagaaaatatatttcttcgagaactgtagctacagcatatgattcctggactcaagataaattactagaaagattatggggagaacatatacatctaggtttctatcctctaaataaaaatattgattttagagaggctaaagttcaatttgtacatgagttagtaagttggagtggtttagataaattaccaagaggttctaggattttagatgtcggttgcggaataggtggaagttctagaattctcgccaattattatggatttaatgtcactggaataactattagtccagctcaagtaaaaagagcaaaagaacttactccttatgaatgtaaatgcaacttcaaagttatggatgctttggatttgaaatttgaagagggaatatttgatggtgtttggagtgttgaggcaggagcccatatgaataataaaactaaatttgcagatcaaatgttaagaactttaagacctggaggatatttagcattggctgattggaattcaagagatttacaaaagcaacccccatccatgattgaaaaaataatcttaaaacaattacttgaacagtgggtacatcctaaatttattagtatcaatgaattcagtagtattcttataaataacaaaaatagttcaggtcaagttatatcctctaattggaattcttttacaaatccctcttggtttgattcaatatttgaaggaatgagaagacctaattcaattttatcccttggtccaggagcaattataaagtctatcagagagatacctacaatacttttaatggattgggcctttaaaaaaggtttaatggaatttggagtttataaatgtagaggttaa

SEQ ID NO: 94963 - protein, 311 aa, Prochlorococcus marinus subsp. pastoris str. CCMP1986
MSIFLISSLVIFLTLLFSSLILWRINTRKYISSRTVATAYDSWTQDKLLERLWGEHIHLGFYPLNKNIDFREAKVQFVHELVSWSGLDKLPRGSRILDVGCGIGGSSRILANYYGFNVTGITISPAQVKRAKELTPYECKCNFKVMDALDLKFEEGIFDGVWSVEAGAHMNNKTKFADQMLRTLRPGGYLALADWNSRDLQKQPPSMIEKIILKQLLEQWVHPKFISINEFSSILINNKNSSGQVISSNWNSFTNPSWFDSIFEGMRRPNSILSLGPGAIIKSIREIPTILLMDWAFKKGLMEFGVYKCRG

SEQ ID NO: 94964 - DNA, 915 bp, Prochlorococcus marinus str. MIT 9313
  CDS (1)..(915): transl_table=11
ttgatcctggcagggacaaccctgacttctgctgtagtgatctggacccaacgggatcgacgatacaaatcaagcgccagtgttgcctctgcttacgatgcctggaccaatgaccagctgctcgagcggctctggggtgaacacgtccacctcggctattacggcaaacctcctagcaccagagatttccgagccgcaaagcaagacttcgtacatgagctcgttcaatggagtggactggcccaactccctcgaggctcccgagtacttgacgtgggctgcggtattggtggtagcgcaagaatcctggcccgggattacaactttgacgtgcttggcatcaccatcagtccagcccaggtgaaacgagcgtctcaactcactcctgaggggatgacctgccaattccaggtgatggatgccctcgatttaaaactggccaacggtagcttcgacgctgtttggagtgtggaagcaggcccccacatgccagacaagcagcgctatgcagatgaactgctgcgtgtgctgaggccaaaaggtgtacttgcggtggccgattggaaccgccgtgattacgaagatggggagatgaccagccttgagcgatgggtgatgcgtcagctactcgaccagtgggcccatccggaattcgccagcattaaaggattccgccgcaatttgcttcatagcccttttgcttgcggcactgtcgaatctgacgactggacaagatccatcctgccctcctggaatgattcgattttggaggggtttcgtcgtcctggagccgtgctcgggttgggtccagccgccttggtcaagggattcagagaaataccaacgattttgttgatgcgctgggcttttgcccacggtctgatgcaattcggtgtcttccgcagccgcgactga

SEQ ID NO: 94965 - protein, 304 aa, Prochlorococcus marinus str. MIT 9313
MILAGTTLTSAVVIWTQRDRRYKSSASVASAYDAWTNDQLLERLWGEHVHLGYYGKPPSTRDFRAAKQDFVHELVQWSGLAQLPRGSRVLDVGCGIGGSARILARDYNFDVLGITISPAQVKRASQLTPEGMTCQFQVMDALDLKLANGSFDAVWSVEAGPHMPDKQRYADELLRVLRPKGVLAVADWNRRDYEDGEMTSLERWVMRQLLDQWAHPEFASIKGFRRNLLHSPFACGTVESDDWTRSILPSWNDSILEGFRRPGAVLGLGPAALVKGFREIPTILLMRWAFAHGLMQFGVFRSRD

SEQ ID NO: 94966 - DNA, 930 bp, Synechococcus sp. WH 8102
  CDS (1)..(930): transl_table=11
atgttggctggcctgcttctcctgaccggggctgccggtgccacggccctgctgatctggttgcagcgtgatcgccgctaccactcctcagacagcgtcgccgcggcctacgacgcctggaccgatgaccaactgctggaacggctctggggagaccatgtccacctggggcattacggaaacccgccaggttctgtcgacttccgccaggccaaggaggcttttgtgcacgagctggtgcgctggagcgggctcgaccaactacctcgaggcagtcgggtgttggatgtgggttgcggcatcggcggcagtgcccggatcctggccagggattacggcttggacgtgctcggggtgagcatcagcccagcccagatccgccgcgccacagaactcacccccgccggcctcagctgtcgctttgaagtgatggacgcccttaaccttcaacttcccgatcggcaattcgatgcggtgtggacggtggaggcggggccccacatgccagacaagcagcgtttcgctgatgagttgctgcgggtactccggcccgggggctgcttagccgccgctgattggaaccgccgcgcccccaaggatggcgccatgaacagcaccgaacgctgggtgatgcggcagttgttgaatcaatgggcgcatccggaattcgccagcatctccggcttccgggccaacctcgaagccagccctcaccagcggggcctgatcagtaccggcgactggactctggccacccttccctcctggtttgattcgatcgccgaaggcctccgtcgcccctgggctgtcctgggccttggtcccaaagcagtgcttcaaggcctgcgagagaccccgacgctgctgttgatgcattgggcctttgccacagggttgatgcagttcggcgtctttcgcctcagccgctga

SEQ ID NO: 94967 - protein, 309 aa, Synechococcus sp. WH 8102
MLAGLLLLTGAAGATALLIWLQRDRRYHSSDSVAAAYDAWTDDQLLERLWGDHVHLGHYGNPPGSVDFRQAKEAFVHELVRWSGLDQLPRGSRVLDVGCGIGGSARILARDYGLDVLGVSISPAQIRRATELTPAGLSCRFEVMDALNLQLPDRQFDAVWTVEAGPHMPDKQRFADELLRVLRPGGCLAAADWNRRAPKDGAMNSTERWVMRQLLNQWAHPEFASISGFRANLEASPHQRGLISTGDWTLATLPSWFDSIAEGLRRPWAVLGLGPKAVLQGLRETPTLLLMHWAFATGLMQFGVFRLSR

SEQ ID NO: 94968 - DNA, 846 bp, Gloeobacter violaceus PCC 7421
  CDS (1)..(846): transl_table=11
atgggcgagcgaacggttctcaacgaaaatatccggcggttctacgacgcgtcctccgggttgtgggaggaggtctggggcgagcacatgcaccacggccactgggaagtgggggaagcggacaaagatcgccgcgtcgcccaggtggatttggtcgtcaggctcctcgactgggcggggatcgaccgggccgagtcgatcgtcgatgtcggctgcggcatcggcggcagcagtctgtttctggcggagcgcttcggcgcccgggtggaggggatcaccctcagccccgtgcagtgtaagcgcgccgccgagcgcgcccgcgagcaccatctggacgggcgcgcgcactttcaggtggccgacgcccaccggatgcccttcgccgacggccggttcgacctggtctggtcgctcgaaagcggtgagcacatggccgacaaggcccaatttttgcgcgaatgccaccgggtgctcaggcccggcggccgcttcgtgtttgtgacttggtgctgtcgccacggcgccttggacgcgcgggatcaaaaatggctcggggcgatctaccggatctaccacctgccctacatcctctcgatcgagagctacacgcagttgcttggtgagacggggttctcgggcattcggaccaccgactggtccgatcgggtggcccgcttctggtcgctggtcatcgattcggccctcgaaccggcggtgctgtggaaggtgatcgcccagggaccgacggtaatcaaaggcgcgctcgccatgcagttgatgcggcgcagctacgcgcgggggctggtgcgcttcggcgtgttcgcggcccaaaaggcggagggataa

SEQ ID NO: 94969 - protein, 281 aa, Gloeobacter violaceus PCC 7421
MGERTVLNENIRRFYDASSGLWEEVWGEHMHHGHWEVGEADKDRRVAQVDLVVRLLDWAGIDRAESIVDVGCGIGGSSLFLAERFGARVEGITLSPVQCKRAAERAREHHLDGRAHFQVADAHRMPFADGRFDLVWSLESGEHMADKAQFLRECHRVLRPGGRFVFVTWCCRHGALDARDQKWLGAIYRIYHLPYILSIESYTQLLGETGFSGIRTTDWSDRVARFWSLVIDSALEPAVLWKVIAQGPTVIKGALAMQLMRRSYARGLVRFGVFAAQKAEG

SEQ ID NO: 94970 - DNA, 936 bp, Prochlorococcus marinus str. AS9601
  CDS (1)..(936): transl_table=11
atgattgatttattattccctttttttatactttttttactctttctagtccttgcaataatttggagaaataatgctagaaaatacatttcttccggtacagtagcttctgcatatgatgcttggaccaacgataaattacttgagagattatggggagaacatatacatttgggtttttatcccttaggaaacaaaaatactgattttagaaaggctaaagttcagtttgttcatgaattagtcaaatggagtggtttagataaattgccacggggatccagaatactcgacgtaggttgcggaataggggggagttctaggattcttgcagaatattatgggtttaatgtcactggcattacaattagtccggctcaagttaaaagagcaagagaacttactcctcatgggctaaattgcaacttccaagttatggatgctttaaatttgaaatttgaaaatggatcatttgatgccatctggagtgttgaggctggcgcacacatgaataataaaactaggtttgcagatgaaatgatgagaaccctaagacctggagggtatctagcattggcagattggaactcaagagacctccatgcatatcccccatcattttttgaaaagttagttcttaaacaattacttgaacaatgggtacatcctaattttattagcataaatgaattcagtaacattcttagaacaaacgaaaatagttcaggaagagttatatcagaaaattggaatacctatacaaatccttcatggtatgactccatttttgaaggtattcgaagaccctttgtaattttgtcgcttggcccatttgcgatagtgaagtcgattagagaaataccaacaatacttctcatgaattgggcatttagaaaaggtttaatggagtttggagtttataaatgtagaggataa

SEQ ID NO: 94971 - protein, 311 aa, Prochlorococcus marinus str. AS9601
MIDLLFPFFILFLLFLVLAIIWRNNARKYISSGTVASAYDAWTNDKLLERLWGEHIHLGFYPLGNKNTDFRKAKVQFVHELVKWSGLDKLPRGSRILDVGCGIGGSSRILAEYYGFNVTGITISPAQVKRARELTPHGLNCNFQVMDALNLKFENGSFDAIWSVEAGAHMNNKTRFADEMMRTLRPGGYLALADWNSRDLHAYPPSFFEKLVLKQLLEQWVHPNFISINEFSNILRTNENSSGRVISENWNTYTNPSWYDSIFEGIRRPFVILSLGPFAIVKSIREIPTILLMNWAFRKGLMEFGVYKCRG

SEQ ID NO: 94972 - DNA, 936 bp, Prochlorococcus marinus str. MIT 9515
  CDS (1)..(936): transl_table=11
atgtccttattcttaacatcttttatttttttagttttaattctatttttcttgtatttagtactttggaggattaatactagaaaatatatctcttcgggaactgtagcttcagcttatgactcgtggactcaagataaactactagaaagattgtggggtgagcatatacatttaggtttctatcctccaaataaaaatattgattttagagaagctaaagtccagtttgtacatgagctggtgagctggagtggtttggataaattacctagaggttcaagggttttagacgtaggttgtggaataggtggaagctctcggattctcgctaattattatggttttaatgtaacaggtataacaattagtccagctcaagtacaaagagctaaagaacttacgcctcatgaatgcagctgtaacttcaaagttatggatgctttaaatttgaaatttgaagatggagcatttgatggggtttggagtgttgaggcaggagctcatatgaataacaaaaataaatttgcagatcaaatgttaagaactttgagacctggaggatatttagctttagctgattggaattcaagagatttaaaaaaatatcctcctacaacgcttgaaaaaataatcctaaaacaattacttgaacaatgggttcatcctcaatttattagcattaaagattttagtaatattcttatcaataacaaaaatagttcaggtcaagttatctttgataactggaattactatacaaatccatcttggtttgattcaatatatgaaggaattagaaggccaaatgcaattttatccctaggtccaagagcattagtaaagtctgtaagagagattcctacaatattgttaatggattgggcttttaaaaaaggtttaatggaatttggagtttataaatgtagaggttaa

SEQ ID NO: 94973 - protein, 311 aa, Prochlorococcus marinus str. MIT 9515
MSLFLTSFIFLVLILFFLYLVLWRINTRKYISSGTVASAYDSWTQDKLLERLWGEHIHLGFYPPNKNIDFREAKVQFVHELVSWSGLDKLPRGSRVLDVGCGIGGSSRILANYYGFNVTGITISPAQVQRAKELTPHECSCNFKVMDALNLKFEDGAFDGVWSVEAGAHMNNKNKFADQMLRTLRPGGYLALADWNSRDLKKYPPTTLEKIILKQLLEQWVHPQFISIKDFSNILINNKNSSGQVIFDNWNYYTNPSWFDSIYEGIRRPNAILSLGPRALVKSVREIPTILLMDWAFKKGLMEFGVYKCRG

SEQ ID NO: 94974 - DNA, 933 bp, Prochlorococcus marinus str. NATL1A
  CDS (1)..(933): transl_table=11
atgcaatggatattgattttaatatttagtattttctgtctcttcactttaactaatcagtgggttaggaaaagtcgtaaatatgagtctgttaatagcgttgcatcctcatatgattcatggactaatgatcgtttattagaaaatctatggggagaacatattcatcttggtttttacgaaaaaccaagaataaaaaaagactttaggaaagctaagattgattttgttcatgaattagttcgctggagcggtttaaatcaattaccaaaaggctcgagagtgttagatgtaggttgtggaataggcggaagttcaagaatattgtctgattattatggatttgatgtcattggtatttcaataagtcaagaacaagttaaaagagcatatgaattaacatctaatagagatttttgtagttttgaagtaatgaatgctcttgacttaaagtttgaaaaaggtagctttgatggggtttggagtgtagaagctgggcctcatatcttagataaacaaacttttgcagatgagatgctcagagtccttaggcctggtggggttttggcagttgcagattggaatcaaagagattcaactaaacatcctttaaatttttttgaaaaactcatcatgaatcaattactaatccaatggacccatcctgaattttcaagtattgaaggatttaaaaacaacttattaaacagcccttactgtggaagctctgtagagacttcgaattggacaaaatacacaattcagtcttggaatgaatctatatatgaagggtttagaagaccttcatctatcttgaaattaggccttagatctttactaaaggcatttaaagaaatcccaacaatactaatgatgagatggtctttttcaagaggtttgatgaaatttggagtattcaaatcaagaggataa

SEQ ID NO: 94975 - protein, 310 aa, Prochlorococcus marinus str. NATL1A
MQWILILIFSIFCLFTLTNQWVRKSRKYESVNSVASSYDSWTNDRLLENLWGEHIHLGFYEKPRIKKDFRKAKIDFVHELVRWSGLNQLPKGSRVLDVGCGIGGSSRILSDYYGFDVIGISISQEQVKRAYELTSNRDFCSFEVMNALDLKFEKGSFDGVWSVEAGPHILDKQTFADEMLRVLRPGGVLAVADWNQRDSTKHPLNFFEKLIMNQLLIQWTHPEFSSIEGFKNNLLNSPYCGSSVETSNWTKYTIQSWNESIYEGFRRPSSILKLGLRSLLKAFKEIPTILMMRWSFSRGLMKFGVFKSRG

SEQ ID NO: 94976 - DNA, 915 bp, Prochlorococcus marinus str. MIT 9303
  CDS (1)..(915): transl_table=11
ttgatcctggcagggacaaccctggcttctgctgtagtgatctggacccaacgggatcggcgctacaaatcaagcgccagtgttgcctctgcttacgatgcctggaccaatgaccagctgctcgagcggctctggggtgaacacgtccacctcggctattacggcaaacctcctagccccagagatttccgagccgcaaagcaagacttcgtacatgagctcgttcaatggagtggactcgccaaactccctcgaggctcccgagtacttgacgtgggctgcggtattggtggtagcgcaagaatcctggcccgggattacaactttgacgtgcttggcatcaccatcagtccagcccaggtaaaacgagcgtctcaactcactcctgaggggatgacctgccaattccaggtgatggatgccctcgatttaaaactggccaaaggtagcttcgacgctgtttggagtgtggaagcaggcccccacatgccagacaagcagcgctatgcagatgaactgctgcgtgtgctgaggccaaaaggtgtacttgcggtggccgattggaaccgccgtgattacgaagatggggagatgaccaaccttgagcgatgggtgatgcgtcagctactcgaccagtgggcccatccggaattcgccagcattaaaggattccgccgcaatttgcttcatagcccttttgcttgcggccctgtcgaatctgacgactggacaagatccatcctgccctcctggaatgattcgattttggaggggtttcgtcgtcctggagccgtgctcgggttgggtccagccgccgtggtcaagggattcagagaaataccaacgattttgttgatgcgctgggcttttgcccatggtctgatgcaattcggtgtcttccgcagccgcgactga

SEQ ID NO: 94977 - protein, 304 aa, Prochlorococcus marinus str. MIT 9303
MILAGTTLASAVVIWTQRDRRYKSSASVASAYDAWTNDQLLERLWGEHVHLGYYGKPPSPRDFRAAKQDFVHELVQWSGLAKLPRGSRVLDVGCGIGGSARILARDYNFDVLGITISPAQVKRASQLTPEGMTCQFQVMDALDLKLAKGSFDAVWSVEAGPHMPDKQRYADELLRVLRPKGVLAVADWNRRDYEDGEMTNLERWVMRQLLDQWAHPEFASIKGFRRNLLHSPFACGPVESDDWTRSILPSWNDSILEGFRRPGAVLGLGPAAVVKGFREIPTILLMRWAFAHGLMQFGVFRSRD

SEQ ID NO: 94978 - DNA, 933 bp, Prochlorococcus marinus str. NATL2A
  CDS (1)..(933): transl_table=11
atgcaatggatattgattttaatatttagtattttctgtctcttcactttaactaatcagtgggttaggaaaagtcgaaaatatgagtctgttaatagcgttgcatcctcatatgattcatggactaatgatcgtttattagaaaatctatggggagaacatattcatctaggtttttacgaaaaaccaagaataaaaaaagactttaggaaagctaaggttgattttgttcatgaattagttcgctggagcggtttaaatcaattaccaaaaggctcgagggtgttagacgtaggttgtggaataggcggaagttcaagaatattgtctgattattatggatttgatgtcattggtatttcaataagtcaagaacaagttaaaagagcacgtgaattaacagctaatagggatttttgtagttttgaagtaatgaatgcacttgacttaaagtttgaaaaaggtagctttgacggggtttggagtgtagaagctgggcctcatatcttagataaacaaacttttgcagatgagatgctcagagttcttaggcctggtggggttttggcagttgcagattggaatcaaagagattcaactaaacatcctttaaatttttttgaaaaactcatcatgaatcaattactaatccaatggacccatcctgaattttcaagtattgaaggatttaaaaataacttattaaatagtccttactgtggaagctctgtagagacttctaattggacaaaatacacaattcagtcttggaatgaatctatatatgaggggtttagaagaccttcatctatcttgaaattaggccttagatctttactaaaggcatttaaagaaatcccaacaatactaatgatgagatggtctttttcaagaggcttgatgaaatttggagtattcaaatcaagaggataa

SEQ ID NO: 94979 - protein, 310 aa, Prochlorococcus marinus str. NATL2A
MQWILILIFSIFCLFTLTNQWVRKSRKYESVNSVASSYDSWTNDRLLENLWGEHIHLGFYEKPRIKKDFRKAKVDFVHELVRWSGLNQLPKGSRVLDVGCGIGGSSRILSDYYGFDVIGISISQEQVKRARELTANRDFCSFEVMNALDLKFEKGSFDGVWSVEAGPHILDKQTFADEMLRVLRPGGVLAVADWNQRDSTKHPLNFFEKLIMNQLLIQWTHPEFSSIEGFKNNLLNSPYCGSSVETSNWTKYTIQSWNESIYEGFRRPSSILKLGLRSLLKAFKEIPTILMMRWSFSRGLMKFGVFKSRG

SEQ ID NO: 94980 - DNA, 993 bp, Anabaena variabilis ATCC 29413
  CDS (1)..(993): transl_table=11
atgaattggttgttttctacactggtatttttcctaacactactggcagcaggtattgcgttatatctcattactgctagacgttatcaatcatctaactccgtagccaattcctacgaccagtggactgaagacggtattttagagttttactggggcgaacacatccatttaggtcattatggttcgccaccgcaaaggaaagattttctggcagctaaatctgattttgtccatgaaatggtgcgttggggtggtttggataaattaccccctggtactaccctgttagatgttggttgtggaattgggggaagtagtcgcattttggcacgggattatggatttgccgttacaggtatcaccatcagcccccaacaagtccaacgcgcccaagaattaacacctcaggaactgaatgcacagtttttggtggatgatgcgatggcgctttcttccccagatggtagttttgatgtagtttggtcaattgaagctggcccacatatgccagataaagccatttttgccaaagaattgatgcgggtgctaaagcctggtggaatcatggttttagccgactggaatcagcgagacgatcgccaaaaacccctaaatatttgggagaaaccagtaatgcagcaactactagatcagtggtctcacccggctttttccagcatcgaaggcttttctgagcttttggccgcgacgggattagtagaaggggaggtaatcacggcagactggacaaaacaaacactcccctcttggctggattctatctggcaaggaatagttagaccagaaggattagtgcgttttggtctatctggtttcattaaatctctgcgagaagtacccaccctactactgatgaggctagcatttggtatgggactctgtagatttgggatgttccgtgctttacgagctaacactgtgacaccaccagcagaacagacaactgggatcaaagttgctcaaaggtaa

SEQ ID NO: 94981 - protein, 330 aa, Anabaena variabilis ATCC 29413
MNWLFSTLVFFLTLLAAGIALYLITARRYQSSNSVANSYDQWTEDGILEFYWGEHIHLGHYGSPPQRKDFLAAKSDFVHEMVRWGGLDKLPPGTTLLDVGCGIGGSSRILARDYGFAVTGITISPQQVQRAQELTPQELNAQFLVDDAMALSSPDGSFDVVWSIEAGPHMPDKAIFAKELMRVLKPGGIMVLADWNQRDDRQKPLNIWEKPVMQQLLDQWSHPAFSSIEGFSELLAATGLVEGEVITADWTKQTLPSWLDSIWQGIVRPEGLVRFGLSGFIKSLREVPTLLLMRLAFGMGLCRFGMFRALRANTVTPPAEQTTGIKVAQR

SEQ ID NO: 94982 - DNA, 915 bp, Synechococcus sp. CC9605
  CDS (1)..(915): transl_table=11
atggtggccggcgccgttggaaccaccggagttgcgctatggcttcgccgcgaccggcgctacgaatcgtcggagagtgtcgcctccgcctacgacgcctggacggaagaccgtttgctggagcagctctggggagagcatgtccatctcggccattacgggaccccgccgggctccttcgacttccgcgaagccaaggaagccttcgtccacgagctggtgcgctggagcggtctggaccaactccccgctggcagccgggtgctggatgtgggatgcggcatcggtggcagcgcccgaatactggcgcgggattacggattggacgttctcggcatcagcatcagcccagcccaggtggaacgagccacacaactcaccccatcaggcctgagctgccgcttccaggtaatggacgccttggatcttcaactgcccgaccagagctttgatgcggtctggagtgtggaggccggtccccacatgccgaacaaacagcgttatgccgatgagctgctgcgggcgatgcgaccggggggtctgctagctgtggccgactggaaccgccgagacccctctgacggcggcatgacgagaaccgaacgctgggtgatgcgtcagctgctcaaccagtgggcccaccctgaattcgccagcatcaaggggttccgccagaacctcgacaacagcgtccaccaccgtggcgagatcgtcaccggcgattggacccaggccacgctcccctcatggattgactcgatcatcgagggcatccgacgcccctgggccgtggtcagcctggggccgaaagctgtcctgcaaggcctgagagaaacgccgacgttgctgctgatgcactgggccttcgccaccgggctgatgcaattcggcgtcttccgaatcagcaaagactga

SEQ ID NO: 94983 - protein, 304 aa, Synechococcus sp. CC9605
MVAGAVGTTGVALWLRRDRRYESSESVASAYDAWTEDRLLEQLWGEHVHLGHYGTPPGSFDFREAKEAFVHELVRWSGLDQLPAGSRVLDVGCGIGGSARILARDYGLDVLGISISPAQVERATQLTPSGLSCRFQVMDALDLQLPDQSFDAVWSVEAGPHMPNKQRYADELLRAMRPGGLLAVADWNRRDPSDGGMTRTERWVMRQLLNQWAHPEFASIKGFRQNLDNSVHHRGEIVTGDWTQATLPSWIDSIIEGIRRPWAVVSLGPKAVLQGLRETPTLLLMHWAFATGLMQFGVFRISKD

SEQ ID NO: 94984 - DNA, 936 bp, Prochlorococcus marinus str. MIT 9312
  CDS (1)..(936): transl_table=11
atggttgaattatttttacctttttttttactggttttatttcttttagctttgttttttgtctggagaattaatcctagaaaatatatttcttctggcacagtggcatctgcatatgatgcttggacccaagataaattgcttgagagattgtggggagagcatatacatttaggcttttatccctcagatgggaagaatattgattttagaaaggctaaagttcagtttgtgcatgaattagtcaagtggagtggtttagataaattgccaaaaggatccagaatactcgatgtaggttgtggaataggaggaagttctaggattcttgcgaaatattatggatttaatgttactggaattacaattagtcctgctcaagtaaaaagagcaaaagaacttactcctcttggactcaattgtaattttcaagttatggacgcattgaatttaaaatttaaagatggatcatttgatgcggtatggagtgtggaggcgggcgcacacatgaatgataaaactaagtttgcagatgaaatgctgagaactttgagacccggaggttatttggcattagctgattggaactcaagagatctcagatcatatcctccttctttttttgaaaagttggttcttaaacaattacttgatcagtgggttcatcctgattttataagcattaacgaatttgctaatattcttagtactaataaaaatagtgcaggaagagttgtttctgaaaattggaatttttatacaaatccttcatggtacgactccataatcgagggaattcgaagaccttctgcaattttaactcttggacctttagcgatagttaagtcaataagagagatcccgacaatacttcttatgaattgggcatttagaaaaggtttaatggagtttggagtttataaatgtagaggataa

SEQ ID NO: 94985 - protein, 311 aa, Prochlorococcus marinus str. MIT 9312
MVELFLPFFLLVLFLLALFFVWRINPRKYISSGTVASAYDAWTQDKLLERLWGEHIHLGFYPSDGKNIDFRKAKVQFVHELVKWSGLDKLPKGSRILDVGCGIGGSSRILAKYYGFNVTGITISPAQVKRAKELTPLGLNCNFQVMDALNLKFKDGSFDAVWSVEAGAHMNDKTKFADEMLRTLRPGGYLALADWNSRDLRSYPPSFFEKLVLKQLLDQWVHPDFISINEFANILSTNKNSAGRVVSENWNFYTNPSWYDSIIEGIRRPSAILTLGPLAIVKSIREIPTILLMNWAFRKGLMEFGVYKCRG

SEQ ID NO: 94986 - DNA, 933 bp, Synechococcus elongatus PCC 7942
  CDS (1)..(933): transl_table=11
atgcccatgtctcctctttggctgttgctggtgttgccggttagtctgctcgccatttacctcctcactcctcgtcgctaccagtcttccgactcagtggcgcaggcctacgacagctggacacaggacggcatcctggagttttactggggcgagcacattcacctcgggcactacggcaatccgctgcgccgcaaagattttcgggcagccaaagcagattttgttcatgaaatggtgcgctggggtaacctcgatcgcctgccagcgggcaccacagtcttggatgtgggttgcggcattggcggaagcagccggattctggcgcgggactaccactttgatgtcactggcatcacgatcagtccggggcaagttcagcgggcgcgatcgctgacgccagacggagtgacagcgcaattcaaagtcgatgacgccctcaatctctcgtttcctgacgccagctttgatgtggtctggtgcattgaggcagggcctcacatgcccgataaagccctgttcgctaaagaattgctgcgggtgctcaaacccggtggcacgctggtcgtggctgactggaatcaacgcgatacccgccggcgatcgctccaaggttgggagcgctgggtgatgcgccagctcttagatcagtgggctcacccagaatttgccagcatcgaaggcttcagtgaactgttagaagcgacaggctgggttgatggtgcggtcacaacagcggattggactcgcgaaaccctgccctcttggctggattcgatctggcagggtatcctccgcccggctggcctcgttcgctttggcttctcggggctgatcaaatcactgcgcgaagttccgaccctgatcctgatgcgaatcgcctttggtcaagggctctgccgcttcgggatgttccgagcgactcgcgcctag

SEQ ID NO: 94987 - protein, 310 aa, Synechococcus elongatus PCC 7942
MPMSPLWLLLVLPVSLLAIYLLTPRRYQSSDSVAQAYDSWTQDGILEFYWGEHIHLGHYGNPLRRKDFRAAKADFVHEMVRWGNLDRLPAGTTVLDVGCGIGGSSRILARDYHFDVTGITISPGQVQRARSLTPDGVTAQFKVDDALNLSFPDASFDVVWCIEAGPHMPDKALFAKELLRVLKPGGTLVVADWNQRDTRRRSLQGWERWVMRQLLDQWAHPEFASIEGFSELLEATGWVDGAVTTADWTRETLPSWLDSIWQGILRPAGLVRFGFSGLIKSLREVPTLILMRIAFGQGLCRFGMFRATRA

SEQ ID NO: 94988 - DNA, 987 bp, Trichodesmium erythraeum IMS101
  CDS (1)..(987): transl_table=11
atgtacttatattacgctcttggatttatattattactcgtagccctcggcatagttatctatttaatcactccccgtagctatgaatcctctaatacggtagccaattcctatgacgactggactcaagacggtattttagaattttactggggcgaacatattcatttaggtcactatggttcaccaccacgacgcaaagattttttgcaagccaaagctgacttcgttcacgaaatggtcaagtggggtggtttagacaaattacctcgtggtactactgttttagatgtcggttgtggaattggtggcagcagccgtatcttagccaaagaatacgagtttgaagttacgggggttaccattagccccaaacaggtacaacgggcaacagaattaacccctcaaggagttacggctaaattccaggtagatgatgcgttggcactatctttcccagacaatagttttgatgtggtttggtcgattgaagctggacctcatatgccggataaggtcaagtatggttcagaaatgatgcgtgtcttaaaacctggcggtattttggtcgtagctgattggaatcagcgcgatgaccgtcaaaaacccctgaattattgggaaaaacccgtaatgcgtcaattattggaccagtggtcacatcctgccttttctagtatcgaaggcttttcggaacaaatagcggaaactgggttagtcgaaggagaagtagccaccgcagattggactcaagaaactctcccttcttggttcgaatcaatttggcaaggaattgttagacccaaaggattgattaagtttggcttttcagggtttattaaatctctcagagaagtacctactatgttattgatgcgattgggatttggtgctgggctgtgcagatttggaatgttccgcgctgttaagtctaactcagtacctgtctcaacagagactgctaccactgaagtagctaacgcttaa

SEQ ID NO: 94989 - protein, 328 aa, Trichodesmium erythraeum IMS101
MYLYYALGFILLLVALGIVIYLITPRSYESSNTVANSYDDWTQDGILEFYWGEHIHLGHYGSPPRRKDFLQAKADFVHEMVKWGGLDKLPRGTTVLDVGCGIGGSSRILAKEYEFEVTGVTISPKQVQRATELTPQGVTAKFQVDDALALSFPDNSFDVVWSIEAGPHMPDKVKYGSEMMRVLKPGGILVVADWNQRDDRQKPLNYWEKPVMRQLLDQWSHPAFSSIEGFSEQIAETGLVEGEVATADWTQETLPSWFESIWQGIVRPKGLIKFGFSGFIKSLREVPTMLLMRLGFGAGLCRFGMFRAVKSNSVPVSTETATTEVANA

SEQ ID NO: 94990 - DNA, 945 bp, Synechococcus sp. CC9311
  CDS (1)..(945): transl_table=11
atgccttcaccgactgttctcataccaacagcagctggattactgctcttgggttgcgcctaccagctctggaatcgtcgcaatcgcgcctaccactccagtgagagcgttgctgccgcatacgacgcctggacagatgaccagttactggaatccctttggggtgagcatgttcatcttggccactacggatccccaccccagcctcgggatttcagacaggccaaatccgacttcgttcatgagttagtccactggagtggcttcgatcaattgccaccaggatcccgtgttttagatgtgggttgcggtatcgggggaagcgccaggatcctttctcgcgactacggtttagacgtactgggtatcagcatcagtccggctcaggtgaacagagccacccacctaacaccagactctctgccctgtcgcttcgcagtgatggatgccctcaacctgcaacttgaggatcaaagctttgacgccgtttggacggtcgaggccggtccgcatatgcctgacaagcagcggtttgccaacgaactcttaagagtcctaaaacctggcggtcgcctggctgttgccgactggaatcgccgtgatcctgtggatggtgcccttaatcggcgcgaacgctgggtgatgcatcaattactcacacaatgggcgcatcctgaattcgccagcatccgaggctttcgccagaaccttgagaacagccctcatcatcgcggcaccatcagcaccgatgattggacagacgccaccttgccctcttggaatgaatccatcctcgaaggcatccgcaggcccaatgcaatcctccgccttggccccaaggcagtgctgcagggcctacgtgaaacaccaacgctgttgttaatgcgctgggcttttgccagagggatgatgcagttcggcgtgtttaaaactaatcactgctga

SEQ ID NO: 94991 - protein, 314 aa, Synechococcus sp. CC9311
MPSPTVLIPTAAGLLLLGCAYQLWNRRNRAYHSSESVAAAYDAWTDDQLLESLWGEHVHLGHYGSPPQPRDFRQAKSDFVHELVHWSGFDQLPPGSRVLDVGCGIGGSARILSRDYGLDVLGISISPAQVNRATHLTPDSLPCRFAVMDALNLQLEDQSFDAVWTVEAGPHMPDKQRFANELLRVLKPGGRLAVADWNRRDPVDGALNRRERWVMHQLLTQWAHPEFASIRGFRQNLENSPHHRGTISTDDWTDATLPSWNESILEGIRRPNAILRLGPKAVLQGLRETPTLLLMRWAFARGMMQFGVFKTNHC

SEQ ID NO: 94992 - DNA, 843 bp, Nostoc punctiforme PCC 73102
  CDS (1)..(843): transl_table=11
atgagtgcaacactttaccagcaaattcagcaattttacgatgcttcatctggtctgtgggaacagatatggggcgaacacatgcaccacggctattacggcgctgatggtacccagaaaaaagaccgccgtcaggctcaaattgatttaatcgaagaattgcttaattgggcaggggtacaagcagcagaagatatactagatgtgggttgtggaattggcggtagttctttatacctggcgcaaaagtttaatgctaaagctacagggattacattgagtcctgtacaagctgcaagagcaacagaacgcgcattggaagctaatttgagtctgagaacacagttccaagtcgctaatgctcaagcaatgccctttgctgacgattcttttgacttggtttggtcgctggaaagtggcgaacacatgccagataaaaccaagtttcttcaggagtgctatcgagtactgaagcctggtggcaagttaattatggtgacttggtgtcatcgaccaactgatgaatctccattaacggcagatgaggaaaagcacttgcaggatatttatcgggtgtattgtttgccttatgtgatttctttgccagagtatgaagcgatcgcacatcaactaccattacataatatccgcactgctgattggtcaactgctgtcgcccccttttggaatgtggtaattgattctgcattcactccccaagcgctttggggtttactaaatgctggttggactaccattcaaggggcattatcactgggattaatgcgtcgcggttatgaacgtgggttaattcggtttggcttactgtgcggcaataagtag

SEQ ID NO: 94993 - protein, 280 aa, Nostoc punctiforme PCC 73102
MSATLYQQIQQFYDASSGLWEQIWGEHMHHGYYGADGTQKKDRRQAQIDLIEELLNWAGVQAAEDILDVGCGIGGSSLYLAQKFNAKATGITLSPVQAARATERALEANLSLRTQFQVANAQAMPFADDSFDLVWSLESGEHMPDKTKFLQECYRVLKPGGKLIMVTWCHRPTDESPLTADEEKHLQDIYRVYCLPYVISLPEYEAIAHQLPLHNIRTADWSTAVAPFWNVVIDSAFTPQALWGLLNAGWTTIQGALSLGLMRRGYERGLIRFGLLCGNK

SEQ ID NO: 94994 - DNA, 987 bp, Crocosphaera watsonii WH 8501
  CDS (1)..(987): transl_table=11
atgtacttatactataccctgggatttatcgccgtcgtcttagtcataggtgttgttgtctatcttgtaacacctcgcagttatgaatcatctgacacagtagccacttcttacgacgaatggactcaagacggaattttagaattttattggggagaacacattcatttaggtcattatggttcaccaccaagaagcaaagatttcttagaagcaaaagctgattttgttcacgaaatggtcaaatggggtggtttagacaaattacctcgcggtacaaccgttttagacgttggctgtggtattggtggcagtagtcggattttagccaaagcatacgggtttgagacaacaggagttaccatcagtcccaaacaagtacaacgggccaccgaattaacccccgaagatgttactgccaaattccaggtagatgacgctttaaatctctctttcccagataacagttttgatgtggtttggtccattgaagctggtccccatatgccagacaaagctaaatatgcccaagagatggtgcgagttttaaaacctggtggccttttagtagtagcagactggaaccaacgggatgaccgtcaaaaacccctgaatttctgggaaaaaccagtgatgcgtcaactcttagaccaatggtcacacccttcattttccagtatcgaaggcttttctgaacaaatcgcagccacaggattaatcgaaggagaagttatcaccgcagattggacaaaagaaaccctaccctcttggttagaatccatttggcaaggaattgttcgaccccaaggtttaattaagttcggtttctcaggattcattaaatctttaagagaagttcccactatgttattgatgcgattgggatttggtgctggtttgtgtcgttttggaatgttccgcgccattaaatctccttctgtttcccagtcaacccagactgcaaaaggtgaaacagtaaacgtttaa

SEQ ID NO: 94995 - protein, 328 aa, Crocosphaera watsonii WH 8501
MYLYYTLGFIAVVLVIGVVVYLVTPRSYESSDTVATSYDEWTQDGILEFYWGEHIHLGHYGSPPRSKDFLEAKADFVHEMVKWGGLDKLPRGTTVLDVGCGIGGSSRILAKAYGFETTGVTISPKQVQRATELTPEDVTAKFQVDDALNLSFPDNSFDVVWSIEAGPHMPDKAKYAQEMVRVLKPGGLLVVADWNQRDDRQKPLNFWEKPVMRQLLDQWSHPSFSSIEGFSEQIAATGLIEGEVITADWTKETLPSWLESIWQGIVRPQGLIKFGFSGFIKSLREVPTMLLMRLGFGAGLCRFGMFRAIKSPSVSQSTQTAKGETVNV

SEQ ID NO: 94996 - DNA, 855 bp, Crocosphaera watsonii WH 8501
  CDS (1)..(855): transl_table=11
atgactaacacatctaacctatcagaaaaaatcgctaaattttatgacacctccagtaatttatgggaaaaaacttggggtgaacatatgcaccacggctactatggaagaggcggaaactataaacttgatcgtcgtcaagcacaaatcaatttaatcgaagaactattaatttgggctgatattaaagaggtttctaacttagttgatgtggggtgtgggatcggaggcagtaccctttatttagctgaaagatttaacaccaaagcaacaggaataactctatcttctgtacaggcaaatagagccacggaaagagctagtgagttcaaattagaagaaacagtacagtttcaggtggctgatgccctaaatatgccctttccagaggataattttgacctggtatggtctctagaaagtggggaacatatgcccgataaaaagaaattttttcaagaatgttatcgggtattaaaacccggtggtacttttctttgtgtaacttggtgtcatcgtcccactaattcttgggcaggggaattaacagaagaggaaaaacaacatttagaagaaatctatcgggtttattgtttgccttatgtcctatctttacccgaatacgaaaccattgcccaggactgtggttttagtaatattaaaatagatgattggtcaatggaagtagcacctttttgggatattgtaattgactcagctttgaatttagaaacgatcgccggtttattaaacagtggttggcaaacggtacaaggagcgttatcattggggctgatgagtcgaggttatgaacggggtctaattcgttttggcttaatttacggacaaaaatag

SEQ ID NO: 94997 - protein, 284 aa, Crocosphaera watsonii WH 8501
MTNTSNLSEKIAKFYDTSSNLWEKTWGEHMHHGYYGRGGNYKLDRRQAQINLIEELLIWADIKEVSNLVDVGCGIGGSTLYLAERFNTKATGITLSSVQANRATERASEFKLEETVQFQVADALNMPFPEDNFDLVWSLESGEHMPDKKKFFQECYRVLKPGGTFLCVTWCHRPTNSWAGELTEEEKQHLEEIYRVYCLPYVLSLPEYETIAQDCGFSNIKIDDWSMEVAPFWDIVIDSALNLETIAGLLNSGWQTVQGALSLGLMSRGYERGLIRFGLIYGQK

SEQ ID NO: 94998 - DNA, 930 bp, Prochlorococcus marinus str. MIT 9211
  CDS (1)..(930): transl_table=11
atgggtacattaatttctttattggttggtattttattaatattgatcatatggatttggttaaagactaatcgagcttataagagcaaatcaagtgtttcactagcctatgattcttggactaatgaccgccttctagagagattgtggggagaacatattcatcttggctattacaaagatagttctgtaaaaactgattttaggcaagcaaaagttgattttgtacatcaattagtcaaatggagcggtatggatcatttgccaaaaggctcacgaattcttgatattggttgtggtataggaggtagtgcaagaatcttggcaagagattataactttgatgttttaggaattactattagtcctctccaggttcggagagcccaagaattgactcctgaggactctacttgtcgattcgaagtaatggatgctttggatcttcaactagaaaatggcagctttgatggtgtatggagtgtggaagctgggccgcatatacctgataaacaactttatgcagatgagatgcttcgtgtattacgtccaggcggtgttttggctgttgcggattggaatagaagagatatccaaaagaagaaatatgattttttggaagaacttgtgcttcgtcagcttttaaatcaatgggcccatcccgaattttctactattaatgcctttcaaaagaatttatcgaatagtgcatattctgcaggtactgcagatacagatgattggacaagatttacgataccttcctggaatgattcaataatcgaaggaattaaaagaccaaaagtcttttttgatttggggccaaaatccttctataaaggatttcgcgagattcctactatattattaatgcggtgggctttttctgtaggcctaatggagtttggtgtctttagaactagaggctga

SEQ ID NO: 94999 - protein, 309 aa, Prochlorococcus marinus str. MIT 9211
MGTLISLLVGILLILIIWIWLKTNRAYKSKSSVSLAYDSWTNDRLLERLWGEHIHLGYYKDSSVKTDFRQAKVDFVHQLVKWSGMDHLPKGSRILDIGCGIGGSARILARDYNFDVLGITISPLQVRRAQELTPEDSTCRFEVMDALDLQLENGSFDGVWSVEAGPHIPDKQLYADEMLRVLRPGGVLAVADWNRRDIQKKKYDFLEELVLRQLLNQWAHPEFSTINAFQKNLSNSAYSAGTADTDDWTRFTIPSWNDSIIEGIKRPKVFFDLGPKSFYKGFREIPTILLMRWAFSVGLMEFGVFRTRG

SEQ ID NO: 95000 - DNA, 945 bp, Synechococcus sp. RS9917
  CDS (1)..(945): transl_table=11
atgctgaacgccaccggcttcgccctggcccttggcattcccacggccgccgctgccgtgggccttgcgatctggagtcgccgcaatcgcgcctatcactccagcgccagtgtcgctgcggcttacgacgcctggaccgacgatcgcttgctcgagcagctctggggcgaacacgtgcacctcgggcactacggcgagccgcctcggcgccgagacttccgagccgccaaggccgatttcgtgcatgccctcgtgcactggagtggtcttgatcagctgccccccggctcgcgccttctcgatgtgggctgcggcattggcggcagcgcccgaatcctggcgcgtgagtacggctttgatgttctgggcatcagcatcagtcccgctcaggtggcccgcgccaccagcctcacccccacgggtctgagttgccgctttgcggtgatggatgccctcgatctgaaactcgccgacggccagtttgatgccgtgtggagcgtcgaggccggtccccacatgcccgacaaacagcgttacgccgatgaactgttgcgcgtgctccgccccggcggcgttctcgccgtggcggactggaatcgccgcgatgtctctgacggggccatgtcggggctcgagcggcaggtgatgcaccaactgctcacgcagtgggcccatccggaatttgccagcatcaaaggctttggcgccaatctcaacgccagcccctacaaccatggcggcaccatcgtcagcgccgactggaccgcggcgaccctgccctcctggattgactcgatcatggagggcgtgcgtcgccccggcgccgtgctcagcctcggccccaaggcagtgctgcaaggcttgagggaaacgccaacgctccttttgatgcactgggcgttcgccaccgggctgatgcagttcggggtgttccgccgtgattaa

SEQ ID NO: 95001 - protein, 314 aa, Synechococcus sp. RS9917
MLNATGFALALGIPTAAAAVGLAIWSRRNRAYHSSASVAAAYDAWTDDRLLEQLWGEHVHLGHYGEPPRRRDFRAAKADFVHALVHWSGLDQLPPGSRLLDVGCGIGGSARILAREYGFDVLGISISPAQVARATSLTPTGLSCRFAVMDALDLKLADGQFDAVWSVEAGPHMPDKQRYADELLRVLRPGGVLAVADWNRRDVSDGAMSGLERQVMHQLLTQWAHPEFASIKGFGANLNASPYNHGGTIVSADWTAATLPSWIDSIMEGVRRPGAVLSLGPKAVLQGLRETPTLLLMHWAFATGLMQFGVFRRD

SEQ ID NO: 95002 - DNA, 966 bp, Synechococcus sp. WH 7805
  CDS (1)..(966): transl_table=11
atgccactgcctgcttttctcggaccagcggcgatcggtgtggcggctgccgcgggtgcctatgtgctttggtctcggcgcaatcgcgcttacctctccagcgagagtgttgcttcggcatacgacgcttggacggaggacaggcttctagaaactctctggggcgatcatgttcatctcggtcactacggagctcccccccgcaacaaggatttccgtcgtgccaaagccgatttcgtccatgaattggttcgctggagtggcctagaccagctgccacctggagcgaaagtgctggatgtgggttgcggcatcggcggcagcgccaggattctggccagggattatgggtttgacgttcttggagtcagcatcagcccagcccagatccgccgggccaccgagctcaccccggaggggatgacctgcaggttcgccgttatggatgccctcgatctagagctgaacgatggagagtttgatgcggtttggagtgtggaagccggtccgcacatgccggacaagcagcgttatgccgatgaattgttgcgcatgatccgtcctggtggaatgctggccatcgcggattggaatcgtcgcgacccgctggatggacctttaaatcgccaagagcgctgggtcatgcatcagctgctcacccagtgggcgcaccctgaattcgccagcatccgtgggctgcagcacaacctggaaaccagcgtttattcgaaaggtccgattgcagtggccaattggaatcagcagacattgccctcctggaacgattcgatccttgaaggattaagacggccctcagccgttctgcgacttggcccctcagccatcgttcagggtttgcgcgaaacaccgacactgctgttgatgcgctgggccttcgcccggggaatgatgcagtttggtgtgtttcgcctgaatggagatcaggagagatctgaactcggataa

SEQ ID NO: 95003 - protein, 321 aa, Synechococcus sp. WH 7805
MPLPAFLGPAAIGVAAAAGAYVLWSRRNRAYLSSESVASAYDAWTEDRLLETLWGDHVHLGHYGAPPRNKDFRRAKADFVHELVRWSGLDQLPPGAKVLDVGCGIGGSARILARDYGFDVLGVSISPAQIRRATELTPEGMTCRFAVMDALDLELNDGEFDAVWSVEAGPHMPDKQRYADELLRMIRPGGMLAIADWNRRDPLDGPLNRQERWVMHQLLTQWAHPEFASIRGLQHNLETSVYSKGPIAVANWNQQTLPSWNDSILEGLRRPSAVLRLGPSAIVQGLRETPTLLLMRWAFARGMMQFGVFRLNGDQERSELG

SEQ ID NO: 95004 - DNA, 954 bp, Synechococcus sp. RS9916
  CDS (1)..(954): transl_table=11
atgagttcctctgctgttcttgggctggtgatcggcctgcccgtggcggttgctgctggcgttctgctgtgggcgaagcgcaaccgcgcctatcactccagtgaaagcgtcgccgcggcctatgacgcctggaccgaagatcgcttactggagaacctctggggtgagcacgtccacctcggccactacggagatccaccgcgacaacgggattttcgcgaagcgaaagccgattttgtgcatgctctcgtgcactggagtggcctggatcgcttatcaccaggcacgaagatccttgatgtgggctgtggcattggcggcagtgcgcgcatcctggcccgcgactatggcttcgatgtgctgggcatcagcatcagtcccgcccaggtggccagggccacagccctaacgcctgcaggactcagctgccgcttcgctgtgatggatgcccttgatctgcaattggcagaccaacagtttgatgcggtgtggagcgtggaggcaggaccgcacatgcccgacaagcagcgctacgccgacgaattgctgcgcgtgctcaagcccggtggaacgttggcggtggccgactggaacaggcgtgatcccagtgacggcgagatgaatcgccgcgaacgctgggtgatgcaccaactgctcacccaatgggcccaccccgaattttccagcatcaaaggattccatcgcaatctggaggccagcccccatcagcgcgggaccattgaggtgggtgactggacccgagccacacttccttcgtggatcgattccgtcgttgaaggccttcggcgccccggagcagtgctcggccttggtccttccgccgtgcttcagggcctgcgcgaaacacccaccctgctgctgatgcactgggctttcgccaccggtctgatgcagttcggagtgttccgcaccacccgccagcaggagccatga

SEQ ID NO: 95005 - protein, 317 aa, Synechococcus sp. RS9916
MSSSAVLGLVIGLPVAVAAGVLLWAKRNRAYHSSESVAAAYDAWTEDRLLENLWGEHVHLGHYGDPPRQRDFREAKADFVHALVHWSGLDRLSPGTKILDVGCGIGGSARILARDYGFDVLGISISPAQVARATALTPAGLSCRFAVMDALDLQLADQQFDAVWSVEAGPHMPDKQRYADELLRVLKPGGTLAVADWNRRDPSDGEMNRRERWVMHQLLTQWAHPEFSSIKGFHRNLEASPHQRGTIEVGDWTRATLPSWIDSVVEGLRRPGAVLGLGPSAVLQGLRETPTLLLMHWAFATGLMQFGVFRTTRQQEP

SEQ ID NO: 95006 - DNA, 1301 bp, Zea mays
  CDS (52)..(1110)
ccacgcgtccgcctcggcctcttttaaatatcgcgcatcccggcgccgcaaatggctcacgcggcgctgctccattgctcccagtcctccaggagcctcgcagcctgccgccgcggcagccactaccgcgccccttcgcacgtcccgcgccactcccgccgtctccgacgcgccgtcgtcagcctgcgtccgatggcctcgtcgacggctcaggcccccgcgacggcgccgccgggtctgaaggagggcatcgcggggctgtacgacgagtcgtcggggctgtgggagaacatctggggcgaccacatgcaccacggcttctacgactcgagcgaggccgcctccatggccgatcaccgccgcgcccagatccgcatgatcgaggaggcgctcgccttcgccggtgtcccagcctcagatgatccagagaagacaccaaaaacaatagtcgatgtcggatgtggcattggtggtagctcaaggtacttggcgaagaaatacggagcgcagtgcactggcaccacgttgagccctgttcaagccgagagaggaaatgctctcgctgcagcgcaggggttgtcggatcaggttactctgcaagttgctgatgctctggagcaaccgtttcctgacgggcagttcgatctggtgtggtccatggagagtggcgagcacatgccggacaagagaaagtttgttagtgagctagcacgcgtggcggctcctggagggacaataatcatcgtgacatggtgccataggaacctggatccatccgaaacctcgctaaagcccgatgaactgagcctcctgaggaggatatgcgacgcgtactacctcccggactggtgctcaccttcagactatgtgaacattgccaagtcactgtctctcgaggatatcaagacagctgactggtcggagaacgtggccccgttttggcccgccgtgataaaatcagcgctaacatggaagggcttcacctctctgctgacgaccggatggaagacgatcagaggcgcgatggtgatgccgctaatgatccagggctacaagaaggggctcatcaaattcaccatcatcacctgtcgcaagcctggagccgcgtaggaggaggccaaggagcacaagttactagcacaggcacaggagtgccaagtgcaataatgtagatccgtggcaccatcgccgtctactcatctatactgcaccaaaatcaacattctcctaggacatgttaaataattttctgccactcgtcgagatatttcaaattcactgtccacaaaaaaaaaaaaaaa

SEQ ID NO: 95007 - protein, 352 aa, Zea mays
MAHAALLHCSQSSRSLAACRRGSHYRAPSHVPRHSRRLRRAVVSLRPMASSTAQAPATAPPGLKEGIAGLYDESSGLWENIWGDHMHHGFYDSSEAASMADHRRAQIRMIEEALAFAGVPASDDPEKTPKTIVDVGCGIGGSSRYLAKKYGAQCTGTTLSPVQAERGNALAAAQGLSDQVTLQVADALEQPFPDGQFDLVWSMESGEHMPDKRKFVSELARVAAPGGTIIIVTWCHRNLDPSETSLKPDELSLLRRICDAYYLPDWCSPSDYVNIAKSLSLEDIKTADWSENVAPFWPAVIKSALTWKGFTSLLTTGWKTIRGAMVMPLMIQGYKKGLIKFTIITCRKPGAA

SEQ ID NO: 95008 - DNA, 1186 bp, Brassica juncea
  CDS (1)..(1044)
atgaaagcgactctcgcaccaccctcctctctcataagcctccccaggcacaaagtatcttctctccgttcaccgtcgcttctccttcagtcccaacggccatcctcagccttaatgacgacgacggcatcacgtggaagcgtggctgtgacggctgctgctacctcctccgctgaggcgctgcgagaaggaatagcggaattctacaacgagacgtcgggattatgggaggagatttggggagatcatatgcatcacggcttctacgatcctgattcctctgttcaactttcagattccggtcaccgggaagctcagatccggatgattgaagagtctctacgtttcgccggcgttactgaagaggagaaaaagataaagatagtggtggatgttgggtgtgggatcggaggaagctcaaggtatattgcctctaaatttggtgccgaatgcattggcatcacactcagtcccgttcaagccaagagagcaaatgatctcgccaccgctcaatcactctctcataaggtttccttccaagttgcagatgcattggaccaaccatttgaagatggtatattcgatcttgtttggtcaatggaaagcggtgagcatatgcctgacaaggccaagttcgtgaaggaattggtacgtgtgacggctccaggaggaaggataataatagtgacatggtgccacagaaatctatctcaaggggaagaatctttgcagccatgggagcagaacctcttggacagaatctgcaaaacattttatctcccggcctggtgctccaccactgattatgtcgagttgcttcaatccctctcgctccaggatattaagtatgcagattggtcagagaacgtagctcctttctggccggcggttatacgaaccgcattaacgtggaagggccttgtgtctctgcttcgtagtggtatgaagagtataaaaggagcattgacaattccattgatgattgaagggtacaagaaaggtgtcattaagtttggcatcatcacttgccagaagcctctctgagtttaatctaaacaataaaattgtcgtttaagtactttttcagcgaattgattcctatctatgatataggagattgaataagagtcacgtgagaaatgtggatgcatgaaatcccttgacgtcattaatgttcgttcatggc

SEQ ID NO: 95009 - protein, 347 aa, Brassica juncea
MKATLAPPSSLISLPRHKVSSLRSPSLLLQSQRPSSALMTTTASRGSVAVTAAATSSAEALREGIAEFYNETSGLWEEIWGDHMHHGFYDPDSSVQLSDSGHREAQIRMIEESLRFAGVTEEEKKIKIVVDVGCGIGGSSRYIASKFGAECIGITLSPVQAKRANDLATAQSLSHKVSFQVADALDQPFEDGIFDLVWSMESGEHMPDKAKFVKELVRVTAPGGRIIIVTWCHRNLSQGEESLQPWEQNLLDRICKTFYLPAWCSTTDYVELLQSLSLQDIKYADWSENVAPFWPAVIRTALTWKGLVSLLRSGMKSIKGALTIPLMIEGYKKGVIKFGIITCQKPL

SEQ ID NO: 95010 - DNA, 1254 bp, Brassica napus
  CDS (42)..(1085)
gagccacatttgttgtttctccaaccaacctctcattataaatgaaagcgactctcgcaccaccctcctctctcataagcctcccaaggcacaaagtatcttctctccgttcaccgtcgcttctccttcagtcccaacggccatcctcagccttaatgacaacgacggcatcacgtggaagcgtagctgtgacggctgctgctacctcctccgctgaggcgctgcgagaaggaatagcggaattctacaacgagacgtcgggattatgggaggagatttggggagatcatatgcatcacggcttctacgatcccgattcctctgttcaactttcagattccggtcaccgggaagctcagatccggatgattgaagagtctctacgtttcgccggcgttactgaagaggagaaaaagataaagagagtggtggatgttgggtgtgggatcggaggaagctcaaggtatattgcctctaaatttggtgccgaatgcattggcatcacactcagtcccgttcaagccaagagagccaatgatctcgccgccgctcaatcactctctcataaggtttccttccaagttgcagatgcattggaccaaccatttgaagatggtattttcgatcttgtttggtcaatggaaagcggtgagcatatgcctgacaaggccaagttcgtgaaggaattggtacgtgtgacggctccaggaggaaggataataatagtgacatggtgccacagaaatctatctcaaggggaagaatctttgcagccatgggagcaggacctcttggacagaatctgcaaaacattttatctcccggcctggtgctccaccactgattatgtcgagttgcttcaatccctctcgctccaggatattaagtatgcagattggtcagagaacgtagctcctttctggccggcggttatacgaaccgcattaacgtggaagggccttgtgtctctgcttcgtagtggtatgaagagtataaaaggagcattgacaattccattgatgattgaagggtacaagaaaggtgtcattaagtttggcatcatcacttgccagaaacctctctaagtttaatctaaacaataaaattgtcgtttaagtactttttcagcgaattgattcctatctatgatataggagattgaataagagtcacgtgagaaatgtggatgcacgaaatcccttgacgtcattaatgttcgttcatggcaaaaaaaaaaaaaaaaaaaaaaaaaaa

SEQ ID NO: 95011 - protein, 347 aa, Brassica napus
MKATLAPPSSLISLPRHKVSSLRSPSLLLQSQRPSSALMTTTASRGSVAVTAAATSSAEALREGIAEFYNETSGLWEEIWGDHMHHGFYDPDSSVQLSDSGHREAQIRMIEESLRFAGVTEEEKKIKRVVDVGCGIGGSSRYIASKFGAECIGITLSPVQAKRANDLAAAQSLSHKVSFQVADALDQPFEDGIFDLVWSMESGEHMPDKAKFVKELVRVTAPGGRIIIVTWCHRNLSQGEESLQPWEQDLLDRICKTFYLPAWCSTTDYVELLQSLSLQDIKYADWSENVAPFWPAVIRTALTWKGLVSLLRSGMKSIKGALTIPLMIEGYKKGVIKFGIITCQKPL

SEQ ID NO: 95012 - DNA, 1384 bp, Gossypium hirsutum
  CDS (126)..(1160)
gctgctctgcaattatccccctcacactcttttaactgttcttcccttttttacccttccaccactactacaacaaagcagccatttcagtcgctgacccaaccacaccgacgaaaccataatcaatggctgccgcgttacaattacaaacacacccttgcttccatggcacgtgccaactctcacctccgccacgaccttccgtttccttcccttcttcctcccgctcgtttccatctagcagacgttccctgtccgcgcatgtgaaggcggcggcgtcgtctttgtccaccaccaccttgcaggaagggatagcggagttctacgaccagtcgtcggggatttgggaagacatatggggtgaccatatgcaccatggatattacgacccggattccaatgtttcaggctcagatcatccagccgcccagatccgaatgatcgaagaatcgctccgtttcgctggaataaccgaggacccagcaaacaaacccaagacaatagttgatgttggatgtgggataggaggcagctctagatacctagcaaggaaatatggagcaaaatgccaaggcattactttgagccctgtccaagctggaagagccaatgctcttgctaaagatcaaggactagcagacaaggtttcatttcaagttgcagatgccctgaaccaaccattccctgatgaccaatttgatctagtttggtctatggaaagcggagaacacatgcctgacaaacccaagtttgttaaagagctggcacgagtggcagctccaggaggcacaataataatagtgacatggtgccatagggatcttggtccatcagaagaggatttgcagccatgggagaaaaagctgctaaacagaatatgtaatgcttactatttaccagagtggtgttctacttctgactatgtcaaactacttcagtccctatctctccaggatataaaggcagcagattggactgagaatgtagcacccttttggccagcagtgatacgctcagcattgacatggaagggcttcacatcactgctacgaagtggattaaaaacaataaaaggtgcactagtgatgccattgatgatccaagggtaccagaaaggggtgataaagttcgctatcatcacatgccggaaacccgagtaaaccgccacgacaaccaaatgttttactctgctgcattaatttgaaacataattcatcttcatagttgtaataggggtgtgtcagtgtcaccccccaattgcttatttcaagtataaaataaagtaagtctgggtttcctctcgtttctggaacttgttagtcttattgtaggccaataaaatcaatcagtctatagaatgcatggagaactattgtaacattgt

SEQ ID NO: 95013 - protein, 344 aa, Gossypium hirsutum
MAAALQLQTHPCFHGTCQLSPPPRPSVSFPSSSRSFPSSRRSLSAHVKAAASSLSTTTLQEGIAEFYDQSSGIWEDIWGDHMHHGYYDPDSNVSGSDHPAAQIRMIEESLRFAGITEDPANKPKTIVDVGCGIGGSSRYLARKYGAKCQGITLSPVQAGRANALAKDQGLADKVSFQVADALNQPFPDDQFDLVWSMESGEHMPDKPKFVKELARVAAPGGTIIIVTWCHRDLGPSEEDLQPWEKKLLNRICNAYYLPEWCSTSDYVKLLQSLSLQDIKAADWTENVAPFWPAVIRSALTWKGFTSLLRSGLKTIKGALVMPLMIQGYQKGVIKFAIITCRKPE

SEQ ID NO: 95014 - DNA, 1310 bp, Zea mays
  CDS (70)..(1128)
cacacagccaccacagcccagacccctcgcctcggcctcttttaaatatcgcgcatcccggcgccgcaaatggctcacgcggcgctgctccattgctcccagtcctccaggagcctcgcagcctgccgccgcggcagccactaccgcgccccttcgcacgtcccgcgccactcccgccgtctccgacgcgccgtcgtcagcctgcgtccgatggcctcgtcgacggctcaggcccccgcgacggcgccgccgggtctgaaggagggcatcgcggggctgtacgacgagtcgtcggggctgtgggagaacatctggggcgaccacatgcaccacggcttctacgactcgagcgaggccgcctccatggccgatcaccgccgcgcccagatccgcatgatcgaggaggcgctcgccttcgccggtgtcccagcctcagatgatccagagaagacaccaaaaacaatagtcgatgtcggatgtggcattggtggtagctcaaggtacttggcgaagaaatacggagcgcagtgcactgggatcacgttgagccctgttcaagccgagagaggaaatgctctcgctgcagcgcaggggttgtcggatcaggttactctgcaagttgctgatgctctggagcaaccgtttcctgacgggcagttcgatctggtgtggtccatggagagtggcgagcacatgccggacaagagaaagtttgttagtgagctagcacgcgtggcggctcctggagggacaataatcatcgtgacatggtgccataggaacctggatccatccgaaacctcgctaaagcccgatgaactgagcctcctgaggaggatatgcgacgcgtactacctcccggactggtgctcaccttcagactatgtgaacattgccaagtcactgtctctcgaggatatcaagacagctgactggtcggagaacgtggccccgttttggcccgccgtgataaaatcagcgctaacatggaagggcttcacctctctgctgacgaccggatggaagacgatcagaggcgcgatggtgatgccgctaatgatccagggctacaagaagggcctcatcaaattcaccatcatcacctgtcgcaagcctggagccgcgtaggaggaggccaaggagcacaagttacaggcacaggcacaggagtgtcatgtgcaataatgtagattcgtggccccatcgccgtctactcatctatactgcaccaaaatcaacattctcctaggacatgttaaataattttctgccactcgtcgagatatttcaaattcactgttccccccgct

SEQ ID NO: 95015 - protein, 352 aa, Zea mays
MAHAALLHCSQSSRSLAACRRGSHYRAPSHVPRHSRRLRRAVVSLRPMASSTAQAPATAPPGLKEGIAGLYDESSGLWENIWGDHMHHGFYDSSEAASMADHRRAQIRMIEEALAFAGVPASDDPEKTPKTIVDVGCGIGGSSRYLAKKYGAQCTGITLSPVQAERGNALAAAQGLSDQVTLQVADALEQPFPDGQFDLVWSMESGEHMPDKRKFVSELARVAAPGGTIIIVTWCHRNLDPSETSLKPDELSLLRRICDAYYLPDWCSPSDYVNIAKSLSLEDIKTADWSENVAPFWPAVIKSALTWKGFTSLLTTGWKTIRGAMVMPLMIQGYKKGLIKFTIITCRKPGAA

SEQ ID NO: 95016 - DNA, 1396 bp, Solanum tuberosum
  CDS (104)..(1210)
gaataaataaacaaacaattattagctcattgtttctccttctttcattgcttcaactgtcccctaaattatttctatagatagtatatagtaataaatcataatgggcagcccatgctattccgcttgtactatccaatcattgaaccccacgtgtccttcatcttcttcctcctctgttatcttcgctcttcataaaccccagattcacagtaatattattcaaaattatactaggagaagaatcattacttgtagtagtaatagtagaagaagaatggctagtgttactgcgatgaatgctgggtcttcatcatcagtagaagttggaatacagaatcaacaagagttgaaaaaaggaattgcagatttatatgatgagtcttctgggatttgggaagatatttggggtgaccatatgcatcatggatattatgaacctcagtcatctgtggaactttctgatcatcgtgctgctcagatccgtatgattgaaaaggcgctaagttttgctgctatttctgaagatccagcgaagaaaccaacgtccatagttgatgttggatgtggcattggtggcagttctaggtaccttgcaaagaaatatggcgctacagctaaaggtatcactttgagtcctgtacaagcagagagggctcaagctcttgctgatgctcagggattaggggataaggtttcatttcaagtagcagacgccttgaatcagccttttccagatgggcaattcgacttggtttggtccatggagagtggagaacacatgccaaacaaagaaaagtttgttggcgaattagctagagtggcagcaccaggaggcacaatcatccttgtcacatggtgccacagggacctttccccttcagaggaatctctgactccagaggagaaagagctgttaaataagatatgtaaagccttctatcttccggcgtggtgttccgctgctgattatgtgaagttacttcaatccaattctcttcaggatattaaggcagaagactggtctgagaatgttgctccattttggccagcagtcataaagtcagcactgacatggaagggcttcacatcagtactacgcagtggatggaagacaatcaaagctgcactggcaatgccactgatgattgaaggatacaagaaaggtctcatcaaatttgccatcatcacatgtcgaaaacctgaatagtaagtgagggtcttgttcaaatgagaatttccttaaaagtagaaagcctttctcaaacagatagaacactttattgttcgcagaggattcttaactaatattgtttatttatctttacgattgaggttttaaaccccttacacaccctctttacaatccatattactcaattggtttattaaaaaa

SEQ ID NO: 95017 - protein, 368 aa, Solanum tuberosum
MGSPCYSACTIQSLNPTCPSSSSSSVIFALHKPQIHSNIIQNYTRRRIITCSSNSRRRMASVTAMNAGSSSSVEVGIQNQQELKKGIADLYDESSGIWEDIWGDHMHHGYYEPQSSVELSDHRAAQIRMIEKALSFAAISEDPAKKPTSIVDVGCGIGGSSRYLAKKYGATAKGITLSPVQAERAQALADAQGLGDKVSFQVADALNQPFPDGQFDLVWSMESGEHMPNKEKFVGELARVAAPGGTIILVTWCHRDLSPSEESLTPEEKELLNKICKAFYLPAWCSAADYVKLLQSNSLQDIKAEDWSENVAPFWPAVIKSALTWKGFTSVLRSGWKTIKAALAMPLMIEGYKKGLIKFAIITCRKPE

SEQ ID NO: 95018 - DNA, 1047 bp, Arabidopsis thaliana
  CDS (1)..(1047)
atgaaagcaactctagcagcaccctcttctctcacaagcctcccttatcgaaccaactcttctttcggctcaaagtcatcgcttctctttcggtctccatcctcctcctcctcagtctctatgacgacaacgcgtggaaacgtggctgtggcggctgctgctacatccactgaggcgctaagaaaaggaatagcggagttctacaatgaaacttcgggtttgtgggaagagatttggggagatcatatgcatcatggcttttgtgaccctgattcttctgttcaactttctgattctggtcacaaggaagctcagatccgtatgattgaagagtctctccgttttgccggtgttactgatgaagaggaggagaaaaagataaagaaagtagtggatgttgggtgtgggattggaggaagctcaagatatcttgcctctaaatttggagctgaatgcattggcattactctcagccctgttcaggccaagagagccaatgatctcgcggctgctcaatcactcgctcataaggcttccttccaagttgcggatgcgttggatcagccattcgaagatggaaaattcgatctagtgtggtcgatggagagtggtgagcatatgcctgacaaggccaagtttgtaaaagagttggtacgtgtggcggctccaggaggtaggataataatagtgacatggtgccatagaaatctatctgcgggggaggaagctttgcagccgtgggagcaaaacatcttggacaaaatctgtaagacgttctatctcccggcttggtgctccaccgatgattatgtcaacttgcttcaatcccattctctccaggatattaagtgtgcggattggtcagagaacgtagctcctttctggcctgcggttatacggactgcattaacatggaagggccttgtgtctcggcttcgtagtggtatgaaaagtattaaaggagcattgacaatgccattgatgattgaaggttacaagaaaggtgtcattaagtttggtatcatcacttgccagaagccactctaa

SEQ ID NO: 95019 - protein, 348 aa, Arabidopsis thaliana
MKATLAAPSSLTSLPYRTNSSFGSKSSLLFRSPSSSSSVSMTTTRGNVAVAAAATSTEALRKGIAEFYNETSGLWEEIWGDHMHHGFCDPDSSVQLSDSGHKEAQIRMIEESLRFAGVTDEEEEKKIKKVVDVGCGIGGSSRYLASKFGAECIGITLSPVQAKRANDLAAAQSLAHKASFQVADALDQPFEDGKFDLVWSMESGEHMPDKAKFVKELVRVAAPGGRIIIVTWCHRNLSAGEEALQPWEQNILDKICKTFYLPAWCSTDDYVNLLQSHSLQDIKCADWSENVAPFWPAVIRTALTWKGLVSRLRSGMKSIKGALTMPLMIEGYKKGVIKFGIITCQKPL

SEQ ID NO: 95020 - DNA, 945 bp, Helianthus annuus
  CDS (1)..(945)
atggctacgacggcagttggcgtatcggcgacgccgatgacggagaagctgacggcggcagatgatgaccagcagcagcagaagctcaaaaaaggaatcgcagagttctacgacgaatcctcaggtatgtgggagaacatatggggagaacacatgcatcacggatattataactccgacgacgtcgttgaactctccgatcaccgttctgctcagatccgtatgattgaacaagccctaacgttcgcctctgtttcagatgatctggaaaagaaacctaaaaccatagttgatgtcgggtgtggtataggaggtagctcaaggtatctagcaagaaaatacggagccgaatgtcacggaatcaccctcagccctgtgcaagctgagagagctaatgcccttgctgcggcccaagggttggccgataaggtttcatttcaagttgctgatgctttaaaccagccgtttcctgatggaaagtttgacctggtttggtcaatggagagtggagagcacatgcctgacaaacttaagtttgttagtgagttgactcgggtggctgcccccggagccaccattatcatagttacatggtgccacagagatcttaaccccggagaaaaatcccttcgccccgaggaagaaaaaatcttgaataagatttgttccagcttttatcttcccgcttggtgttctacagctgattatgttaagttactagaatccctttctcttcaggacataaaatccgcagactggtctggcaatgtggccccattttggcctgctgtaataaaaacagcattgtcttggaagggcattacttcattgctacgtagtggttggaagtccataagaggggcaatggtaatgccactaatgattgaaggatttaagaaggatgtaataaaattctccatcattacatgcaaaaagcctgaataa

SEQ ID NO: 95021 - protein, 314 aa, Helianthus annuus
MATTAVGVSATPMTEKLTAADDDQQQQKLKKGIAEFYDESSGMWENIWGEHMHHGYYNSDDVVELSDHRSAQIRMIEQALTFASVSDDLEKKPKTIVDVGCGIGGSSRYLARKYGAECHGITLSPVQAERANALAAAQGLADKVSFQVADALNQPFPDGKFDLVWSMESGEHMPDKLKFVSELTRVAAPGATIIIVTWCHRDLNPGEKSLRPEEEKILNKICSSFYLPAWCSTADYVKLLESLSLQDIKSADWSGNVAPFWPAVIKTALSWKGITSLLRSGWKSIRGAMVMPLMIEGFKKDVIKFSIITCKKPE

SEQ ID NO: 95022 - DNA, 1288 bp, Triticum aestivum
  CDS (30)..(1127)
ccacgcgtccgcgaggctccacatacaaaatggcaaactccgccgccctgctccactcactcctctccaccggctggacgccgcgccgccgcctcgaccgagcctcggccacgcggctcgccccgtcccccggcctgtcctgccgctcctcccggccgacgcgctccgtgcgcccgatggcgtcgtcgacgaccgcggcccgggccgacgcggcgccgccggggctgaaggagggcatcgcggggctctacgacgagtcgtccggcctgtgggagagcatctggggcgagcacatgcaccacggcttctacgactccggcgaggccgcctccatgtccgaccaccgccgcgcccagatccgcatgatcgaggaggccctcgccttcgccgccgtccccgacgatccgacaaacaaaccgaaaacgattgttgatgttggatacggaatcggtggtagctcaagatacctggcgaacaaatatggagcacaatgctctgggatcacattgagcccagtgcaagccgagagaggaaatgccctcgcagcagtgcaggggttgtcggacaaggcttctttccaagttgctgatgctctggagcaaccatttcctgatgggcagtttgatcttgtctggtctatggagagtggtgagcacatgccgaacaaacagaagtttgtaagcgagctggcacgcgtcgcagctccaggagcaactatcatcatcgtgacctggtgccataggaacctcgcgccgtcggaggactcactgaaacctgacgagctgaatcttttgaaaaagatttgtgatgcatattacctcccagattggtgctcgccctcggattatgtcaagattgccgagtcattgtctcttgaggatatcaaaacggccgactggtctgaaaacgtggccccgttctggcctgctgtcatccaatcagcactgacatggaaaggcctcacttctctactaaggagtggatggaagacgataaagggagcactggtgatgcctctcatgatccaaggctacaagaaaggcctcattaagttcagcatcatcacctgccacaaaccccaagcagccatagaaggagaacctgaggccgcatcgcccagagtgtagaatagaacccatgtgattggaatagactcggcttgctgtcgccttgtagctgaataatttcgtgttaccgtgcctctgtatctgcaactggaagtgccatatgagaatggttcctaaagcaaaattctcctcagattcatcaaaaaaaaaaaaaaaaaaaa

SEQ ID NO: 95023 - protein, 365 aa, Triticum aestivum
MANSAALLHSLLSTGWTPRRRLDRASATRLAPSPGLSCRSSRPTRSVRPMASSTTAARADAAPPGLKEGIAGLYDESSGLWESIWGEHMHHGFYDSGEAASMSDHRRAQIRMIEEALAFAAVPDDPTNKPKTIVDVGYGIGGSSRYLANKYGAQCSGITLSPVQAERGNALAAVQGLSDKASFQVADALEQPFPDGQFDLVWSMESGEHMPNKQKFVSELARVAAPGATIIIVTWCHRNLAPSEDSLKPDELNLLKKICDAYYLPDWCSPSDYVKIAESLSLEDIKTADWSENVAPFWPAVIQSALTWKGLTSLLRSGWKTIKGALVMPLMIQGYKKGLIKFSIITCHKPQAAIEGEPEAASPRV

SEQ ID NO: 95024 - DNA, 1077 bp, Lotus japonicus
  CDS (1)..(1077)
atggccacgatgatgatgtcaatttttccaccaccaccaagcgtggcttcattatttatactatcacactgcactcacacaattcgtgtacaatcaacaacgcagttcacaggtttttctataagaaccagaacacgtgattgtagtagaattctgttaacagaagaacgagaaatggcggtgatggaggagaagaagcttttgcagaccggaatcgctgagttctacgacgagtcgtccgggttatgggaagacatgtggggagaccacatgcatcacgggttttacgagcaggatgtcaccgtctctgtttcagaccaccgtgttgctcagatccgaatgattgaagagtctcttcgttttgctgcactttctgaggatccagctaaaaagccagagagtatagtggatgttgggtgcggcataggaggcagttctaggtacctagctaagaaatttcaggcaaagagcgttggtatcactctgagtcctgttcaagctcagagagcaaatgctcttgctgcttctcaaggcttagctgacaaggtttcctttcaagttgctgatgctctagagcaaccattccctgatggtcagtttgatctggtgtggtccatggagagtggagagcatatgcctgacaaacctaagtttgttggcgagttagctcgggtggcagcaccaggtgggaccataataattgtaacatggtgccaccgggatcttggaccagctgaagaatccctgcagccatgggagcagaatctcttgaagaggatatgcgatgcattttaccttccagcatggtgctcaactgctgattatgtcaaattgctggaatcccattcacttcaggacatcaaatcagcagattggtctccctttgttgctccattttggccagctgtgatacgctcagcatttacatggaagggtctcacttcactgttgcgcagtggaatgaaaaccataaaaggagctttggctatgccattgatgatagaaggattcaagaagggtgtcatcaagtttgccattgttacatgtagaaagcctgaaaatgtggagatagaataa

SEQ ID NO: 95025 - protein, 358 aa, Lotus japonicus
MATMMMSIFPPPPSVASLFILSHCTHTIRVQSTTQFTGFSIRTRTRDCSRILLTEEREMAVMEEKKLLQTGIAEFYDESSGLWEDMWGDHMHHGFYEQDVTVSVSDHRVAQIRMIEESLRFAALSEDPAKKPESIVDVGCGIGGSSRYLAKKFQAKSVGITLSPVQAQRANALAASQGLADKVSFQVADALEQPFPDGQFDLVWSMESGEHMPDKPKFVGELARVAAPGGTIIIVTWCHRDLGPAEESLQPWEQNLLKRICDAFYLPAWCSTADYVKLLESHSLQDIKSADWSPFVAPFWPAVIRSAFTWKGLTSLLRSGMKTIKGALAMPLMIEGFKKGVIKFAIVTCRKPENVEIE

SEQ ID NO: 95026 - DNA, 1573 bp, Chlamydomonas reinhardtii
  CDS (35)..(1051)
agattaaaacaaaaccgctgagaagtttgccaagatgcccagcactgcgctgcaagggcacacgctgccctcaagctctgcatgcctaggtagagctacacgccatgtatgcagagtgtccacacggagccggcgcgctgtgacggttcgcgcgggaccgctggagacgctcgtgaagccgctcacgacgctgggaaaggtcagcgacctcaaagtcggcatcgccaacttctatgacgagtcttcggagctgtgggagaacatgtggggggagcacatgcatcacggctactatcccaagggtgcccccgtcaagagcaaccagcaggcacagatcgatatgattgaggagacgctcaaggtggctggtgtgacacaagccaagaagatggtggacgtgggctgcggcatcggcggcagctcgcgctacatcagccgcaagttcggctgcacctccaacggcatcacgctcagccccaagcaggctgctcgcgccaatgcgctgagcaaggagcagggctttggcgacaagctgcagttccaggtgggcgacgcgctggcgcagccgttcgaggccggcgccttcgacctggtgtggtccatggagagcggcgagcacatgcccgacaagaagaagtttgtgtcggagctggcgcgcgtgtgtgcgcccggcggcaccgtgattgtggtgacgtggtgccaccgcgtgttgggtccgggcgaggcgggcttgcgcgaggacgagaaggcgctgctggaccgcatcaacgaggcctactacctgcccgactggtgctccgtggcagactaccagaaactgttcgaggcacaaggcctgactgacatccagacccgcgactggagccaggaggtgtcgcccttctggggcgccgtgatcgccacggccctgaccagcgagggtctggcgggtctggccaaggcgggctggaccaccatcaagggcgccctggtgatgccgctcatggccgagggcttcagacgcggcctcatcaagttcaacctcatcagcggccgcaagctgcagcagtagtagcagtgcggcggcaatgcggctgtagcagcagtggtagtggtagcagggggccagcggggctgcagactatggagggagcgcccaatcgccgcggagctcttgcttgtgtttgtcgttgtgatgaggtcagtggcgcgatggcgcaagaagccagggacggaccggctcgcgaggagtggtggcaactgcattcatggtgggtgtgaccgcgtgggcgtgagcgcgtgagggtcaggtgagaacgaacgggccaggcaagaggacatggattgcggggctgcaggatgggggactgtcatcgtatcgctgtgagctggtgacagagctggtgaccggacaagcagctgtgaggacccggcgcggcatagcgtcgccggtgtgaccgccgtttctctttgggcaacgcaaaccaggtgactcagggggcaccccctttcttgtcttcgggctgcatcacgcatggtgccacgcatgtcatgtgcacctgaggctattgcaagttggctggttgggcatgtc

SEQ ID NO: 95027 - protein, 338 aa, Chlamydomonas reinhardtii
MPSTALQGHTLPSSSACLGRATRHVCRVSTRSRRAVTVRAGPLETLVKPLTTLGKVSDLKVGIANFYDESSELWENMWGEHMHHGYYPKGAPVKSNQQAQIDMIEETLKVAGVTQAKKMVDVGCGIGGSSRYISRKFGCTSNGITLSPKQAARANALSKEQGFGDKLQFQVGDALAQPFEAGAFDLVWSMESGEHMPDKKKFVSELARVCAPGGTVIVVTWCHRVLGPGEAGLREDEKALLDRINEAYYLPDWCSVADYQKLFEAQGLTDIQTRDWSQEVSPFWGAVIATALTSEGLAGLAKAGWTTIKGALVMPLMAEGFRRGLIKFNLISGRKLQQ

SEQ ID NO: 95028 - DNA, 1278 bp, Chlamydomonas reinhardtii
  CDS (1)..(1278)
atgcttgggcaatccctgcgaggcgatgtgggccggtcagcttctgtgaggtcgtcgcaacccactgcgtcaatcgcgcccatctcatctaggtcagcaagccggcgcgtggcctgcgcgtccgcacaatcgaccgatgtcgcctctgaggcagtggccacgaccagcgctggcgcagcccgctctgctgctcgggaggtataccagttgagcgatgctgcgtgctgctccacctctgcccccaccgcgagcactacttttgctggcgtcgacccaactgtcttggcagccgtcgctgggctagggctaagtctgtttgcgctcaagcgcatcctggacaccccctcgcgcaaatatgacaacaacgtgggccaggagtatgatgcgtggacggaggaaggcgttctggagtactactggggcgagcacatccatttgggctattattcggacgaggagctggcgcgcgggtacctaaagaaggacttcaagcaggcaaagttcgacttcgtggacgagatgctccgattcagcggggcgaagaaccccgcgaccatcctggacgtggggtgtggcttcggtggcacctcccgccacctggccaagaagttccgcgacgccaacgtgaccggtatcacgctgtctcccaagcaggtgcagcgcggcacggagctggccaaggagcagggcgtgggcaacgtcaagttccaggtgatggacgcgctggccatggagttccctgacaactcctttgacctggtgtgggcgtgcgagagcggcgagcacatgcccgacaagcgcaagtacatcgaggagatgacgcgtgtgctcaagcccggcggcacgctcgtcattgcctgctggtgccagcgcgaggagggcgacaagcccttcacgccccaggacaaggaggacctccagttcctgtacgacgagtgggcgcacccctacttcatctccatcgccgagttcggccgcctcatgaacggcacgggcaagctggacggcgtcaagctggaggactggaacaagaacaccatctcgtcctggcggcacagcatctgggtgggcgtgttcgacccctgggtcgtggtgttcaaggggccgcgcatctggtacaagaccgtgcgcgagatcgtgaccctggagcgcatgcaccaggcgttcgagaagggcctgatggagtacggcatgatgacggccacgaagaagctggcaccggcgagcgagtccgcggccaacacgcaggaccgcgtgccggtgggcgccaaggcgtga

SEQ ID NO: 95029 - protein, 425 aa, Chlamydomonas reinhardtii
MLGQSLRGDVGRSASVRSSQPTASIAPISSRSASRRVACASAQSTDVASEAVATTSAGAARSAAREVYQLSDAACCSTSAPTASTTFAGVDPTVLAAVAGLGLSLFALKRILDTPSRKYDNNVGQEYDAWTEEGVLEYYWGEHIHLGYYSDEELARGYLKKDFKQAKFDFVDEMLRFSGAKNPATILDVGCGFGGTSRHLAKKFRDANVTGITLSPKQVQRGTELAKEQGVGNVKFQVMDALAMEFPDNSFDLVWACESGEHMPDKRKYIEEMTRVLKPGGTLVIACWCQREEGDKPFTPQDKEDLQFLYDEWAHPYFISIAEFGRLMNGTGKLDGVKLEDWNKNTISSWRHSIWVGVFDPWVVVFKGPRIWYKTVREIVTLERMHQAFEKGLMEYGMMTATKKLAPASESAANTQDRVPVGAKA

SEQ ID NO: 95030 - DNA, 909 bp, Sorghum bicolor
  CDS (1)..(909)
atggcctccgcggcggtgccggcggccacaggaggcctgaaggaggacatcgcggggctatacgacgagtcgtcgggggtgtgggaacgcatctgcggcgagcacctgcaccacggcttctacgaaccggccggcgacgccacggcggtgcggcccgacgtccgccgcgcccagatccgcaccatcgacgaggcgctcgcattcgccgccgtcccagatgatctagagaagaggcccaaaacaatagtcgacgtaggatgtggcattggaggcagctcaaggtacttggccagaaaatacggagcacaatgtacgggcatcacgttgagccctgttcaagctgagagaggaaatgctcttactgccgcccagggcttgtcagaccaggtttccctccaagttgctgatgctctagaacaaccctttcctgatggaatgtttgatcttgtatggtccatggagagtggtgagcacatgccggataaaagaaagtttgttagtgagctagcgcgtgtcgcagctcctggagggacaataatcatcgtgacatgctgccataggaacctcaatccgtctgaaacttccctgaaacccgatgaacagagactcctaaagaggatatctgatgcatactgtcttgccgactggttcctaccttcagactatgtcagcattgctaagtcactgtctctcgaggatatcaggacagctgactggtcggagaacgtggtcccgttttggcccgctgtgataaaactgtcattgtcatggaagggcctgacctctgcgttaacatgtggatggaagacgatcaatggggcgatggggatactactgctgatccaaggctacaggaaggggctcatcaaattcacagtcatcacctgccgcaagcctggaccaccatag

SEQ ID NO: 95031 - protein, 302 aa, Sorghum bicolor
MASAAVPAATGGLKEDIAGLYDESSGVWERICGEHLHHGFYEPAGDATAVRPDVRRAQIRTIDEALAFAAVPDDLEKRPKTIVDVGCGIGGSSRYLARKYGAQCTGITLSPVQAERGNALTAAQGLSDQVSLQVADALEQPFPDGMFDLVWSMESGEHMPDKRKFVSELARVAAPGGTIIIVTCCHRNLNPSETSLKPDEQRLLKRISDAYCLADWFLPSDYVSIAKSLSLEDIRTADWSENVVPFWPAVIKLSLSWKGLTSALTCGWKTINGAMGILLLIQGYRKGLIKFTVITCRKPGPP

SEQ ID NO: 95032 - DNA, 1369 bp, Perilla frutescens
  CDS (89)..(1198)
gtcaaaatcaccaattacctatttccttcaatatccgcaatttccacatgcactgcacatatctttaattaaataaccgcaaagctcaatggccgaggcggtcacgccaggtatctgcaccaccgggtggcgccgcggtggggtccacgctcccacttataatatttctataaagccagcgacagcgttgctggttggctgcaccaccaaaaccaaaagcattacttctttttccacagactccctcaggacacgtggcagagcacgtcgcccgacgatgagcctgaacgccgctgcggcggagatggagacggagatggagaccttgcgtaaagggattgcggagttctacgacgagtcgtcgggggtgtgggagaacatatggggagaccacatgcaccacggcttttacgagccggccgccgacgtctccatctccgaccatcgcgccgcccagatccgcatgattgaggagtccctccgattcgcttccttctctccgataactacgacggagaaaccgaagaatatagttgatgtgggatgtggtataggaggcagttctaggtatctggcaagaaaatatggggctaaattgtctagggctattactctttccagccctgtgcaagcgcagagagctcaacagcttgctgatgctcaaggattaaatggcaaggtttcctttgaagttgctgatgcgttgaaccaaccatttcctgaagggaagtttgatctggtttggtcgatggagagtggagaacacatgcctgataagaaaaagtttgtaaatgagctggtgcgtgtggctgctcctggtggaagaataatcatcgttacatggtgccacagggacctatcaccttctgaagaatctcttcgccaagaggagaaagatttgctaaacaaaatatgtagtgcttattatcttccagcatggtgctctactgctgactatgtcaaattactcgactccctctcaatggaggacattaagtctgcagactggtctgaccatgtcgctccattttggccggcagttataaagtcggcattgacatggaagggcataacctcactgctaaggagcggatggaagactataagaggagcaatggtgatgccattgatgatcgaaggatataagaagggcgtgatcaaatttgccatcattacatgccgaaaacctgcatcttaataaatagggcctaacaaatcattgatggatatagatatagtgttgcttctggtattttcacatttgatggcccttatattgttaggtataacgtacttgtcatttcttttatccgtttataaattataatgaaagaagctttccttcaattcacaaaaaaaaaaaaaaaaa

SEQ ID NO: 95033 - protein, 369 aa, Perilla frutescens
MAEAVTPGICTTGWRRGGVHAPTYNISIKPATALLVGCTTKTKSITSFSTDSLRTRGRARRPTMSLNAAAAEMETEMETLRKGIAEFYDESSGVWENIWGDHMHHGFYEPAADVSISDHRAAQIRMIEESLRFASFSPITTTEKPKNIVDVGCGIGGSSRYLARKYGAKLSRAITLSSPVQAQRAQQLADAQGLNGKVSFEVADALNQPFPEGKFDLVWSMESGEHMPDKKKFVNELVRVAAPGGRIIIVTWCHRDLSPSEESLRQEEKDLLNKICSAYYLPAWCSTADYVKLLDSLSMEDIKSADWSDHVAPFWPAVIKSALTWKGITSLLRSGWKTIRGAMVMPLMIEGYKKGVIKFAIITCRKPAS

SEQ ID NO: 95034 - DNA, 1047 bp, Arabidopsis thaliana
  CDS (1)..(1047)
atgaaagcaactctagcagcaccctcttctctcacaagcctcccttatcgaaccaactcttctttcggctcaaagtcatcgcttctctttcggtctccatcctcctcctcctcagtctctatgacgacaacgcgtggaaacgtggctgtggcggctgctgctacatccactgaggcgctaagaaaaggaatagcggagttctacaatgaaacttcgggtttgtgggaagagatttggggagatcatatgcatcatggcttttatgaccctgattcttctgttcaactttctgattctggtcacaaggaagctcagatccgtatgattgaagagtctctccgttttgccggtgttactgatgaagaggaggagaaaaagataaagaaagtagtggatgttgggtgtgggattggaggaagctcaagatatcttgcctctaaatttggagctgaatgcattggcattactctcagccctgttcaggccaagagagccaatgatctcgcggctgctcaatcactcgctcataaggcttccttccaagttgcggatgcgttggatcagccattcgaagatggaaaattcgatctagtgtggtcgatggagagtggtgagcatatgcctgacaaggccaagtttgtaaaagagttggtacgtgtggcggctccaggaggtaggataataatagtgacatggtgccatagaaatctatctgcgggggaggaagctttgcagccgtgggagcaaaacatcttggacaaaatctgtaagacgttctatctcccggcttggtgctccaccgatgattatgtcaacttgcttcaatcccattctctccaggatattaagtgtgcggattggtcagagaacgtagctcctttctggcctgcggttatacggactgcattaacatggaagggccttgtgtctctgcttcgtagtggtatgaaaagtattaaaggagcattgacaatgccattgatgattgaaggttacaagaaaggtgtcattaagtttggtatcatcacttgccagaagccactctaa

SEQ ID NO: 95035 - protein, 348 aa, Arabidopsis thaliana
MKATLAAPSSLTSLPYRTNSSFGSKSSLLFRSPSSSSSVSMTTTRGNVAVAAAATSTEALRKGIAEFYNETSGLWEEIWGDHMHHGFYDPDSSVQLSDSGHKEAQIRMIEESLRFAGVTDEEEEKKIKKVVDVGCGIGGSSRYLASKFGAECIGITLSPVQAKRANDLAAAQSLAHKASFQVADALDQPFEDGKFDLVWSMESGEHMPDKAKFVKELVRVAAPGGRIIIVTWCHRNLSAGEEALQPWEQNILDKICKTFYLPAWCSTDDYVNLLQSHSLQDIKCADWSENVAPFWPAVIRTALTWKGLVSLLRSGMKSIKGALTMPLMIEGYKKGVIKFGIITCQKPL

SEQ ID NO: 95036 - DNA, 1053 bp, Glycine max
  CDS (1)..(1053)
atggccaccgtggtgaggatcccaacaatctcatgcatccacatccacacgttccgttcccaatcccctcgcactttcgccagaatccgggtcggacccaggtcgtgggctcctattcgggcatcggcagcgagctcggagagaggggagatagtattggagcagaagccgaagaaggatgacaagaagaagctgcagaagggaatcgcagagttttacgacgagtcttctggcttatgggagaacatttggggcgaccacatgcaccatggcttttatgactcggattccactgtttcgctttcggatcatcgtgctgctcagatccgaatgatccaagagtctcttcgctttgcctctgtttctgaggagcgtagtaaatggcccaagagtatagttgatgttgggtgtggcataggtggcagctctagatacctggccaagaaatttggagcaaccagtgtaggcatcactctgagtcctgttcaagctcaaagagcaaatgctcttgctgctgctcaaggattggctgataaggtttcctttcaggttgctgacgctctacagcaaccattctctgacggccagtttgatctggtgtggtccatggagagtggagagcatatgcctgacaaagctaagtttgttggagagttagctcgggtagcagcaccaggtgccactataataatagtaacatggtgccacagggatcttggccctgacgaacaatccttacatccatgggagcaagatctcttaaagaagatttgcgatgcatattacctccctgcctggtgctcaacttctgattatgttaagttgctccaatccctgtcacttcaggacatcaagtcagaagattggtctcgctttgttgctccattttggccagcagtgatacgctcagccttcacatggaagggtctaacttcactcttgagcagtggacaaaaaacgataaaaggagctttggctatgccattgatgatagagggatacaagaaagatctaattaagtttgccatcattacatgtcgaaaacctgaataa

SEQ ID NO: 95037 - protein, 350 aa, Glycine max
MATVVRIPTISCIHIHTFRSQSPRTFARIRVGPRSWAPIRASAASSERGEIVLEQKPKKDDKKKLQKGIAEFYDESSGLWENIWGDHMHHGFYDSDSTVSLSDHRAAQIRMIQESLRFASVSEERSKWPKSIVDVGCGIGGSSRYLAKKFGATSVGITLSPVQAQRANALAAAQGLADKVSFQVADALQQPFSDGQFDLVWSMESGEHMPDKAKFVGELARVAAPGATIIIVTWCHRDLGPDEQSLHPWEQDLLKKICDAYYLPAWCSTSDYVKLLQSLSLQDIKSEDWSRFVAPFWPAVIRSAFTWKGLTSLLSSGQKTIKGALAMPLMIEGYKKDLIKFAIITCRKPE

SEQ ID NO: 95038 - DNA, 1053 bp, Glycine max
  CDS (1)..(1053)
atggccaccgtggtgaggatcccaacaatctcatgcatccacatccacacgttccgttcccaatcccctcgcactttcgccagaatccgggtcggacccaggtcgtgggctcctattcgggcatcggcagcgagctcggagagaggggagatagtattggagcagaagccgaagaaggatgacaagaagaagctgcagaagggaatcgcagagttttacgacgagtcttctggcttatgggagaacatttggggcgaccacatgcaccatggcttttatgactcggattccactgtttcgctttcggatcatcgtgctgctcagatccgaatgatccaagagtctcttcgctttgcctctgtttctgaggagcgtagtaaatggcccaagagtatagttgatgttgggtgtggcataggtggcagctccagatacctggccaagaaatttggagcaaccagcgtaggcattactctgagtcctgttcaagctcaaagagcaaatgctcttgctgctgctcaaggattggctgataaggtttcctttgaggttgctgacgctctaaagcaaccattctctgacgggaagtttgatctggtgtggtccatggagagtggagagcatatgcctgacaaagctaagtttgttggagagttagctcgggtagcagcaccaggtgccactataataatagtaacatggtgccacagggatcttggccctgacgaacaatccttacatccatgggagcaagatctcttaaagaagatttgcgatgcatattacctccctgcctggtgctcaacttctgattatgttaagttgctccaatccctgtcacttcaggacatcaagtcagaagattggtctcgctttgttgctccattttggccagcagtgatacgctcagccttcacatggaagggtctaacttcactcttgagcagtggacaaaaaacgataaaaggagctttggctatgccattgatgatagagggatacaagaaagatctaattaagtttgccatcattacatgtcgaaaacctgaataa

SEQ ID NO: 95039 - protein, 350 aa, Glycine max
MATVVRIPTISCIHIHTFRSQSPRTFARIRVGPRSWAPIRASAASSERGEIVLEQKPKKDDKKKLQKGIAEFYDESSGLWENIWGDHMHHGFYDSDSTVSLSDHRAAQIRMIQESLRFASVSEERSKWPKSIVDVGCGIGGSSRYLAKKFGATSVGITLSPVQAQRANALAAAQGLADKVSFEVADALKQPFSDGKFDLVWSMESGEHMPDKAKFVGELARVAAPGATIIIVTWCHRDLGPDEQSLHPWEQDLLKKICDAYYLPAWCSTSDYVKLLQSLSLQDIKSEDWSRFVAPFWPAVIRSAFTWKGLTSLLSSGQKTIKGALAMPLMIEGYKKDLIKFAIITCRKPE

SEQ ID NO: 95040 - DNA, 21 bp, Artificial sequence
  primer
atgcccgagtatttgcttctg

SEQ ID NO: 95041 - DNA, 23 bp, Artificial sequence
  primer
ttaagcttgagtggcgttttttc

SEQ ID NO: 95042 - protein, 286 aa, Artificial sequence
  consensus sequence
  Variant (2)..(3): Xaa in position 2 to 3 is any amino acid
  Variant (6)..(11): Xaa in position 6 to 11 is any amino acid
  Variant (12)..(13): Xaa in position 12 to 13 is any or no amino acid
  Variant (15)..(16): Xaa in position 15 to 16 is any amino acid
  Variant (19)..(19): Xaa in position 19 is any amino acid
  Variant (21)..(21): Xaa in position 21 is any amino acid
  Variant (23)..(23): Xaa in position 23 is any amino acid
  Variant (25)..(25): Xaa in position 25 is any amino acid
  Variant (27)..(36): Xaa in position 27 to 36 is any amino acid
  Variant (37)..(42): Xaa in position 37 to 42 is any or no amino acid
  Variant (44)..(49): Xaa in position 44 to 49 is any amino acid
  Variant (51)..(64): Xaa in position 51 to 64 is any amino acid
  Variant (65)..(71): Xaa in position 65 to 71 is any or no amino acid
  Variant (81)..(81): Xaa in position 81 is any amino acid
  Variant (83)..(83): Xaa in position 83 is any amino acid
  Variant (86)..(93): Xaa in position 86 to 93 is any amino acid
  Variant (94)..(94): Xaa in position 94 is any or no amino acid
  Variant (98)..(98): Xaa in position 98 is any amino acid
  Variant (100)..(100): Xaa in position 100 is any amino acid
  Variant (102)..(102): Xaa in position 102 is any amino acid
  Variant (104)..(105): Xaa in position 104 to 105 is any amino acid
  Variant (108)..(109): Xaa in position 108 to 109 is any amino acid
  Variant (111)..(118): Xaa in position 111 to 118 is any amino acid
  Variant (119)..(121): Xaa in position 119 to 121 is any or no amino acid
  Variant (123)..(123): Xaa in position 123 is any amino acid
  Variant (125)..(125): Xaa in position 125 is any amino acid
  Variant (129)..(136): Xaa in position 129 to 136 is any amino acid
  Variant (139)..(139): Xaa in position 139 is any amino acid
  Variant (143)..(143): Xaa in position 143 is any amino acid
  Variant (145)..(145): Xaa in position 145 is any amino acid
  Variant (147)..(147): Xaa in position 147 is any amino acid
  Variant (153)..(157): Xaa in position 153 to 157 is any amino acid
  Variant (159)..(160): Xaa in position 159 to 160 is any amino acid
  Variant (163)..(164): Xaa in position 163 to 164 is any amino acid
  Variant (168)..(173): Xaa in position 168 to 173 is any amino acid
  Variant (175)..(176): Xaa in position 175 to 176 is any amino acid
  Variant (178)..(184): Xaa in position 178 to 184 is any amino acid
  Variant (185)..(189): Xaa in position 185 to 189 is any or no amino acid
  Variant (191)..(203): Xaa in position 191 to 203 is any amino acid
  Variant (205)..(207): Xaa in position 205 to 207 is any amino acid
  Variant (209)..(227): Xaa in position 209 to 227 is any amino acid
  Variant (228)..(230): Xaa in position 228 to 230 is any or no amino acid
  Variant (233)..(237): Xaa in position 233 to 237 is any amino acid
  Variant (239)..(239): Xaa in position 239 is any amino acid
  Variant (241)..(243): Xaa in position 241 to 243 is any amino acid
  Variant (245)..(271): Xaa in position 245 to 271 is any amino acid
  Variant (272)..(273): Xaa in position 272 to 273 is any or no amino acid
  Variant (276)..(281): Xaa in position 276 to 281 is any amino acid
  Variant (283)..(285): Xaa in position 283 to 285 is any amino acid
AXXYDXXXXXXXXEXXWGXHXHXGXYXXXXXXXXXXXXXXXXAXXXXXXEXXXXXXXXXXXXXXXXXXXXXDVGCGIGGSXRXLAXXXXXXXXXGITXSXPXQXXRAXXLXXXXXXXXXXXFXVXDALXXXXXXXXFDXVWSXEXGXHMPDKXXXXXEXXRVXXPGGXXXXXXWXXRXXXXXXXXXXXXEXXXXXXXXXXXXXPXXXSXXXXXXXXXXXXXXXXXXXXXXDWXXXXXPXWXXXIXXXXXXXXXXXXXXXXXXXXXXXXXXXXXLMXXXXXXGXXXF

SEQ ID NO: 95043 - protein, 56 aa, Artificial sequence
  protein pattern
  Variant (2)..(2): Xaa in position 2 is any amino acid
  Variant (5)..(6): Xaa in position 5 to 6 is any or no amino acid
  Variant (8)..(13): Xaa in position 8 to 13 is any amino acid
  Variant (14)..(15): Xaa in position 14 to 15 is any or no amino acid
  Variant (18)..(18): Xaa in position 18 is Ala, Gly, Leu or Val
  Variant (21)..(21): Xaa in position 21 is Ala, Cys, Ser or Thr
  Variant (22)..(22): Xaa in position 22 is any amino acid
  Variant (24)..(24): Xaa in position 24 is Ala or Ser
  Variant (26)..(26): Xaa in position 26 is any amino acid
  Variant (28)..(28): Xaa in position 28 is Ile or Met
  Variant (29)..(29): Xaa in position 29 is Asn or Pro
  Variant (30)..(30): Xaa in position 30 is Asp or Asn
  Variant (32)..(33): Xaa in position 32 to 33 is any amino acid
  Variant (34)..(34): Xaa in position 34 is Phe or Tyr
  Variant (35)..(36): Xaa in position 35 to 36 is any amino acid
  Variant (37)..(37): Xaa in position 37 is Glu or Gln
  Variant (38)..(39): Xaa in position 38 to 39 is any amino acid
  Variant (41)..(43): Xaa in position 41 to 43 is any amino acid
  Variant (45)..(45): Xaa in position 45 is any amino acid
  Variant (46)..(46): Xaa in position 46 is Ala or Gly
  Variant (47)..(47): Xaa in position 47 is any amino acid
  Variant (48)..(48): Xaa in position 48 is Phe, Ile, Leu, Met or Val
  Variant (49)..(49): Xaa in position 49 is Ala, Ile, Leu or Val
  Variant (50)..(50): Xaa in position 50 is any amino acid
  Variant (51)..(51): Xaa in position 51 is Ala or Val
  Variant (52)..(52): Xaa in position 52 is Cys, Asp or Thr
  Variant (53)..(53): Xaa in position 53 is any amino acid
  Variant (54)..(54): Xaa in position 54 is Cys or Asn
  Variant (55)..(55): Xaa in position 55 is any amino acid
VXDAXXLXXXXXXXXFDXVWXXEXGXHXXXKXXXXXXXXRXXXPXXXXXXXXXXXR

SEQ ID NO: 95044 - protein, 18 aa, Artificial sequence
  protein pattern
  Variant (10)..(10): Xaa in position 10 is Ala or Ser
  Variant (12)..(12): Xaa in position 12 is any amino acid
  Variant (13)..(13): Xaa in position 13 is Ile or Leu
  Variant (14)..(14): Xaa in position 14 is Ala or Ser
  Variant (15)..(16): Xaa in position 15 to 16 is any amino acid
  Variant (17)..(17): Xaa in position 17 is Phe or Tyr
  Variant (18)..(18): Xaa in position 18 is Glu, Gly, Asn or Gln
DVGCGIGGSXRXXXXXXX

SEQ ID NO: 95045 - protein, 15 aa, Artificial sequence
  protein pattern
  Variant (2)..(2): Xaa in position 2 is any or no amino acid
  Variant (4)..(5): Xaa in position 4 to 5 is any amino acid
  Variant (8)..(8): Xaa in position 8 is Asp or Glu
  Variant (10)..(10): Xaa in position 10 is Ile, Met or Val
  Variant (12)..(12): Xaa in position 12 is any amino acid
  Variant (14)..(14): Xaa in position 14 is Phe, His or Tyr
LXEXXWGXHXHXGXY

SEQ ID NO: 95046 - protein, 11 aa, Artificial sequence
  protein pattern
  Variant (3)..(3): Xaa in position 3 is Ser or Thr
  Variant (4)..(4): Xaa in position 4 is Ile or Leu
  Variant (6)..(6): Xaa in position 6 is Pro or Ser
  Variant (7)..(7): Xaa in position 7 is any amino acid
  Variant (9)..(9): Xaa in position 9 is Ala, Cys or Val
  Variant (10)..(10): Xaa in position 10 is any amino acid
GIXXSXXQXXR

SEQ ID NO: 95047 - DNA, 1275 bp, Synechocystis sp.
  CDS (1)..(1275): transl_table=11
atgtggttgattcggcggcggccgggcaaaggagcacagccttggataagactccaaggacttaactttttcccactacggccgaatggtcctattccagctaccttgcaatatatcattatgccaattgctgcggcgaaaccggcccttcttgtccttgcggatggcaccccttatcccggttggtccttcggggccgatggtaccacagtgggagaggtggtattcaacacgggtatgaccggctaccaggaagtgatgaccgaccccagttattgcggccaaattgtcacgtttacctatcctgagttgggcaacaccggagtcaatgcagaggacgaggaatctatccatccccatgtaaagggggtagtggcccgcaacatcacccgccgccccagcaattggcgatcgacccaatccctaccggactatttggtagaacataaaatcatcggcatttacggcatcgacactagggccctgactcgcaagttgcgttccatcggtgccatgaacggcggcatctctacggaaatcttggaaccggaagccctgttgcaccacatccaagcagctccttccatggccgggttaaatttggttaaggaagtgaccacccatgaagtttacgaatggactgattccaccaatgaccattggcagtttgggccagtggcagaacaacagggacaaccgcccctcaccgtggtggcgctggactttggcgttaagcgtaatatcctgcgtcgcttagctagttacggttgtcgtgtgattgtggtacctgctagcacctccgctgctgaaattctccagtacaaccccgatggcattttcctttccaatggccctggtgatccctccgctgttgaagaaggtattgtcaccaccaaagagttattggcggctaaaaagcccatgtttggcatttgcatggggcatcaagtgttggggttatccctgggagcggagacctttaagctcaaatttggtcatcgagggctcaatcaaccctgtggcctggagcaacaggtggaaattaccagccagaaccatggttttgcggtgacggaaggttccctggccgaagaagtggaaattacccatttcaacctcaacgataaaacggtggcggggctacgccataaagaattgccctttttctcggtgcagtaccacccggaggccagccctggaccccatgatgccgattatctgttcgagaagttcgtcaagttgatgcgacaacaaaaggcagaagtcgccggttaa

SEQ ID NO: 95048 - protein, 424 aa, Synechocystis sp.
MWLIRRRPGKGAQPWIRLQGLNFFPLRPNGPIPATLQYIIMPIAAAKPALLVLADGTPYPGWSFGADGTTVGEVVFNTGMTGYQEVMTDPSYCGQIVTFTYPELGNTGVNAEDEESIHPHVKGVVARNITRRPSNWRSTQSLPDYLVEHKIIGIYGIDTRALTRKLRSIGAMNGGISTEILEPEALLHHIQAAPSMAGLNLVKEVTTHEVYEWTDSTNDHWQFGPVAEQQGQPPLTVVALDFGVKRNILRRLASYGCRVIVVPASTSAAEILQYNPDGIFLSNGPGDPSAVEEGIVTTKELLAAKKPMFGICMGHQVLGLSLGAETFKLKFGHRGLNQPCGLEQQVEITSQNHGFAVTEGSLAEEVEITHFNLNDKTVAGLRHKELPFFSVQYHPEASPGPHDADYLFEKFVKLMRQQKAEVAG

SEQ ID NO: 95049 - DNA, 2173 bp, Zea mays
  CDS (205)..(1686)
ttgggtcgatcgaggccggcccgggagcgtttcaacagtaatctctctgtgcctgcgacgacgactaggtgggttaccgccgtcgcgccgccgccgccgccgccgtcatactacaggtgcgaggccttcatcggtatcttaacaggcgacgaacaccaaccaggtaacttcgtcggtatcttcacttcaccgacggcgacgagcatgaactcgaaccttttttttccccaaaaattgggggggggggtgccctgccccccggccgggctgcaccccagccctcacttaaaaactagtccccttgcgaaaaaattggtccgtccctgcctcagtctgcactctacgatggcggcgcctccggccacggctcccgcgaccgcccggtgtctgtccgtcgccaagtcgtgctgggctgccgagcggagctccagctcgtttgtcctctcggctcctgcgactggcctccggcaaagtgggagccgcgtcctcagcatccgtgccaaggttgccactggcctgcagagggcctgcattgcggatgatggagcggaaaggccgtggaagctcagtgatgctcgtcttgtcctggaagatggatcagtgtggacggccaagtcttttggtgcttcaggaacacaagttggtgaagttgttttcaacacatcactgacaggctatcaggagattttgaccgatccaagttatgctggtcagtttgtcctaatgaccaatcctcatattgggaacactggcgttaatcctgatgatgaagaatcaaaccaatgttttcttggtggcttaatcataagaaatctaagcatatgtacttccaactggcgatgcaaagaaacacttgagaagtatctgattaagaggaacatcatgggaatatatgatgtggatacacgtgctataacacgaagattaagagaagatggtagtcttattggtgtcttgagtactgatcagtctctgacagacaatgagttgttagaaatggcccaaaagtggaaaattgttggagttgatttgattagtggtgtcacatgtgatgctccatatgaatggtcggacaagactgattcagaatgggagtttaagagggatccgtcaagtgaaacttttcatgtggttgcctacgactttggtatcaagcataatattttgagacgattgacatcatatggatgcaaaataacagttgttccagcaaattggcctgcttcagaggtactcaatttgaagcctaatggtgttctttttagcaatggtcctggggatccagctgcagttccctatgctgtgaagacggtacaggaaataattgggaaggttcctgtttttggcatctgtatgggccaccaattgattgggcaggctcttggtgggaagacatttaaaatgaaatttggacatcatggcgggaatcaccctgtctgtgatctccgtagtggacgtgtagacataagtgcacagaaccataactacgcagttgacccagaatcactcccagaaggagcaaaagtaactcacgtcaatctcaacgataatagttgcgctggcctccagtactccaagatgaagcttatgtctctccagtaccatcccgagtcttcccctggtccgcatgactccgacacagccttcggcgagtttatagagctcatgaagagcaacagattgtaagaaaggggatcaggggagtacttgaaaaggtcaataattgtattggtgctccctcgcaccaacctcaaaagaatttgttgtatctgtagtgtttttcttttggttttgggacgttcatgtgcttgaatttttgggtccagaggacatagcataagatgctctgcgcattgtaccatgaaatggcctggttggatttcgtgaagataacatgtcatcaaactgtacggtacggtacactcactcggacagcgcctcgcgaatttcttaacggcaggtaaagtcgtcagtggatggccatgaaggccggtcagtggatgctttacttttgttgttccaggctaatcagatgtgcacgacgttgttgtcatctttattaaatgctttcatcatccaaaaaaaaaaaaaaaaaaaaaaacagctaatcagatgtgcacaacgttgttgccagctttttaaatgactgatggaaaatcaaaaaaaaaaaaaa

SEQ ID NO: 95050 - protein, 493 aa, Zea mays
MNSNLFFPQKLGGGVPCPPAGLHPSPHLKTSPLAKKLVRPCLSLHSTMAAPPATAPATARCLSVAKSCWAAERSSSSFVLSAPATGLRQSGSRVLSIRAKVATGLQRACIADDGAERPWKLSDARLVLEDGSVWTAKSFGASGTQVGEVVFNTSLTGYQEILTDPSYAGQFVLMTNPHIGNTGVNPDDEESNQCFLGGLIIRNLSICTSNWRCKETLEKYLIKRNIMGIYDVDTRAITRRLREDGSLIGVLSTDQSLTDNELLEMAQKWKIVGVDLISGVTCDAPYEWSDKTDSEWEFKRDPSSETFHVVAYDFGIKHNILRRLTSYGCKITVVPANWPASEVLNLKPNGVLFSNGPGDPAAVPYAVKTVQEIIGKVPVFGICMGHQLIGQALGGKTFKMKFGHHGGNHPVCDLRSGRVDISAQNHNYAVDPESLPEGAKVTHVNLNDNSCAGLQYSKMKLMSLQYHPESSPGPHDSDTAFGEFIELMKSNRL

SEQ ID NO: 95051 - DNA, 1140 bp, Prochlorococcus marinus str. MIT 9301
  CDS (1)..(1140): transl_table=11
atgattaatccatataagaaaaacgcaaaattagttttaagtaatggaattgtatttcctggattttattttggtgcttctggtacagcttttggtgaaatagtatttaatactggaatgactgggtatcaagaagttattactgatccaagttattacggccagatattgacatttacttatccagagattgggaatactggtattaattttgaagattccgaatcaaatactaatgttaaagggataattgttagaaatttttcatctaataacagcaattggagatctaaaaaggatttcaatcaatggttagttgaaaaaaatatagtaggtctccatggaattgatactagagctcttgttaaaattttaagatcaaatggctctatgaatggagttattacctctgaagataaaactttagagagttgtttgaagataattcatgatacgccaaatatggagggattaaatttatcaaaagttgtttcaacaaagcaaaaatatttatggacaactcacacacaaacaaattttgatttgaggataagaaatgctgaatcttctaaaaaattaaaaattgtagctattgattttggaattaaaaactcaattctaaataggctcgtatcccatggttgtgaagttttggttttaccttctcgatcctctctaaaagatgttctatctaacaagcctgatggtatttttttctcaaatggtccaggcgatccttcttctgtttctgaaggtatagacttagcaaaatcactaattgaatatggcgatatacctatgtttggtatttgccttggtcaccaaatatttgggttagcattaggaggttcaacttataaattacctttcggacatcgtggcttaaatcacccctgtggtgaaaataataaaattgagataactagtcagaatcacggttttgctatagatcctaattctctctcaaaggaaatagttagaattacccactacaaccttaatgataaaactgtggctggcatagaagttaataataagccaatatttagtgtgcaatatcatccagaggcgggacctggcccacatgattcagattatttatttaaaaaatttgtttctcttatgttagaaagatgttga

SEQ ID NO: 95052 - protein, 379 aa, Prochlorococcus marinus str. MIT 9301
MINPYKKNAKLVLSNGIVFPGFYFGASGTAFGEIVFNTGMTGYQEVITDPSYYGQILTFTYPEIGNTGINFEDSESNTNVKGIIVRNFSSNNSNWRSKKDFNQWLVEKNIVGLHGIDTRALVKILRSNGSMNGVITSEDKTLESCLKIIHDTPNMEGLNLSKVVSTKQKYLWTTHTQTNFDLRIRNAESSKKLKIVAIDFGIKNSILNRLVSHGCEVLVLPSRSSLKDVLSNKPDGIFFSNGPGDPSSVSEGIDLAKSLIEYGDIPMFGICLGHQIFGLALGGSTYKLPFGHRGLNHPCGENNKIEITSQNHGFAIDPNSLSKEIVRITHYNLNDKTVAGIEVNNKPIFSVQYHPEAGPGPHDSDYLFKKFVSLMLERC

SEQ ID NO: 95053 - DNA, 1125 bp, Methanothermobacter thermautotrophicus str. Delta H
  CDS (1)..(1125): transl_table=11
atgaatatcgaccagtctaatccaatcaaaggaaatcaggatcatggtggtgaaatgtttaaggaagcaaaactcgccttggaagacggtaccataatcagaggagaagcattcggatctgaaactgtgaaaacaggggaagttgtctttgcaacgggtatgacaggatatgttgagtccctcacagatccatcatacaggggccagatactgatgccaacctaccccttacagggcaattacggcgtcaccgaggagtggtaccagtcagatgggataaaggccgagggtctcatcgtcagggaaatgtgccctgcaccctcacacagcctgtcagaaaagactctcccggagttcctggaggaatatgggattcctgggatagctggagtggatacacgcgccctgacaataaagataagggataagggtaccatgaagggtgcccttgcaaccgaggagattgatgatgatgaactgcttgaaatggcagtgaaacagccagacataacagaaatcgaccttgtggatatggtttgtgtaagggaacctgtaatcctgaatgaggatgcatcagggagggttgttatagttgactgcgggatcaagaggaacagcatagatgccctccttgagaaggatctgggggtcgtgatcgtaccctacaccacatcacccgccgagatcatggattacgagcccgacggtctcctcatatcaagcggaccaggggaccccacacgtgtgagggatgccatagacacagttaaagcactatccgaacgtctgcccatattcgggatatgcctcggacagcagataatcgcactggccttcggggcccgcatatacaagatgaagtttggtcacaggggcgtaaatcagcctgtgaaggacctgaggagtgggacggtttcaataacctcccagaaccatggattcacggttgaccctgattcagtgaagggcaccgacatagagataacacagctgaacctcaacgacggaacaccggagggtatagagcacagggaactcccggtgttcagtgtccagtatcaccctgaagcgggtccagggccacatgacacggtgaacatctttgaccgcttgtggatgttttaa

SEQ ID NO: 95054 - protein, 374 aa, Methanothermobacter thermautotrophicus str. Delta H
MNIDQSNPIKGNQDHGGEMFKEAKLALEDGTIIRGEAFGSETVKTGEVVFATGMTGYVESLTDPSYRGQILMPTYPLQGNYGVTEEWYQSDGIKAEGLIVREMCPAPSHSLSEKTLPEFLEEYGIPGIAGVDTRALTIKIRDKGTMKGALATEEIDDDELLEMAVKQPDITEIDLVDMVCVREPVILNEDASGRVVIVDCGIKRNSIDALLEKDLGVVIVPYTTSPAEIMDYEPDGLLISSGPGDPTRVRDAIDTVKALSERLPIFGICLGQQIIALAFGARIYKMKFGHRGVNQPVKDLRSGTVSITSQNHGFTVDPDSVKGTDIEITQLNLNDGTPEGIEHRELPVFSVQYHPEAGPGPHDTVNIFDRLWMF

SEQ ID NO: 95055 - DNA, 1200 bp, Xylella fastidiosa 9a5c
  CDS (1)..(1200): transl_table=11
gtgttcgagctttcctgcaacctgatttcaggcggcggcatcggtgtcccaggcagccagagcgagactccacccgtgacagaacccgcaatcctagttctcgaagacggtaccgtattcgagggcgatgctgtaggcgctaatgggctttccgttggtgaggtggtctttaacacatccctcactggttatcaggaggtcctaaccgatccttcgtatgcgtaccaattggtcaccctgacttatccgcatattggcaatacgggttgtaccgatcaggatgatgaggcgaataaggtatgggcggctgggctgattgtgcgggatgtgccgcgtcgtccaagcaattggcgcagtcagatttcgttgtcagattggttggccgcacgcggtgtggttgctattgctgggattgatacgcgcaaactgacccgtattcttcgtgagaaaggcgctcagcatggtgcgttgatggctggtgagattgatgttgacagggctcaggatgcggcccgccaatttacaggcatcaaaggtatggatttagccaaagtggtcagtaccaaacaggcgtactcttggtacgaaggccagcttgacttggatcgtaacgaatggaagcgcgccgcgccgcaatataaggttgtggcctatgactacggcgtgaagctgaatattctgcggatgttggcggagcgtggttgtgatcttacagtggtgcctgcgcagactccggttgacgaggtgttggcgctgtgcccagatggggtgtttctttccaatggcccaggtgatccggaaccttgtgattacgccgttgcggcgatcaagacgttcatcatgcgacgggttccaatcttcggtatttgtctgggtcatcagttgttggcccagactgttggtgccaaggtcgtcaaaatgaggcatggtcaccatggcgcgaatcatccggtgcaggacttgcgcagcgggcgggtaatgattacgtcgcagaatcatggctttgctgttgacgaggcaacgttgccaagcaatgtcagggtgacgcatcgttcgttgttcgacgggaccaatcaggggattgagttgcttgatgtgccggcattctcgtttcaagggcatccggaggcttcccctggtccgcacgatgttgatgtgttgtttgacaggttcattacaatgatggcggctcaatcctga

SEQ ID NO: 95056 - protein, 399 aa, Xylella fastidiosa 9a5c
MFELSCNLISGGGIGVPGSQSETPPVTEPAILVLEDGTVFEGDAVGANGLSVGEVVFNTSLTGYQEVLTDPSYAYQLVTLTYPHIGNTGCTDQDDEANKVWAAGLIVRDVPRRPSNWRSQISLSDWLAARGVVAIAGIDTRKLTRILREKGAQHGALMAGEIDVDRAQDAARQFTGIKGMDLAKVVSTKQAYSWYEGQLDLDRNEWKRAAPQYKVVAYDYGVKLNILRMLAERGCDLTVVPAQTPVDEVLALCPDGVFLSNGPGDPEPCDYAVAAIKTFIMRRVPIFGICLGHQLLAQTVGAKVVKMRHGHHGANHPVQDLRSGRVMITSQNHGFAVDEATLPSNVRVTHRSLFDGTNQGIELLDVPAFSFQGHPEASPGPHDVDVLFDRFITMMAAQS

SEQ ID NO: 95057 - DNA, 1371 bp, Agrobacterium tumefaciens str. C58
  CDS (1)..(1371): transl_table=11
ttgggctgctttcgttattttccggcacctgcacgagattttaacgaagggtcggaacgcgagctttatcgcgcgcccctttatgtcacgaagcctgcgacagaaatggccccttaccccctgcctttcaagaggcggggtgcgaagcggcagaaacggaacgagatgaccgagacagcgccctggactacccgcaaacccaccgcaatgcttgttctagccgatggcacggtgattgaaggaacaggcatcggtgcaaccggcaaggttcaggccgaagtctgcttcaacacggcgctgacgggttacgaggaaatcctcaccgacccctcctatctcggccagatcgtcaccttcaccttccctcatatcggcaatgtcggcaccaatgaggaagacatcgaagacctgacgcccgccgcccgtcgcggcgccgtcggcgtcatcttcaaggccgatatcaccgacccctcgaacttccgcgccgtcaagcatctggatgcctggctgaaggcgcgtggggtcatcggcctctgcggtatcgatacacgcgcgctgacggcctggatccgcgaaaacggtgcgccgaacgcggtcatcgctcatgacccgaacggcgtctttgacatcgaagcgctgaaggccgaagccaaggcatggagcggtctcgtcggcctcgacctcgccatcgaagcgacgtccggccagtcctccacctggacggaaacgccgtgggtatggaacaagggttacggcacgctcggtgaagccgatgcgaaataccacgtcgtctgcgtggatttcggcgtcaagcgcaacatcctgcgcctgtttgccggcctcgattgcaaggtgacggttgttccggcgcagacctcggctgaagatattctggcgctgaagccggatggcgtctttctctccaacggtccgggagatccggccgcgacgggcgaatatgccgtgcctgttatccagaacctcatcaagagcgaactgccgatcttcggcatctgcctcggtcaccagatgcttggcctcgccgttggcgcgaagaccgaaaagatgcatcagggccatcacggcgccaaccatccggtcaaggacttcaccaccggcaaggtggaaatcgtctctatgaaccacggctttgcggtcgacaccaaatcgctgcccgagggcgtcgaggaaacccacacgtcgctgttcgacggcaccaattgcggcctgcgcatcgtcggcaagccggtcttctccgtccagcaccatccggaagcatcgcccggcccgcaggacagccactatctcttccgccgcttcgtcaacctgctgcgcgaaaacaagggtgaggcagcactcgccgagcgctga

SEQ ID NO: 95058 - protein, 456 aa, Agrobacterium tumefaciens str. C58
MGCFRYFPAPARDFNEGSERELYRAPLYVTKPATEMAPYPLPFKRRGAKRQKRNEMTETAPWTTRKPTAMLVLADGTVIEGTGIGATGKVQAEVCFNTALTGYEEILTDPSYLGQIVTFTFPHIGNVGTNEEDIEDLTPAARRGAVGVIFKADITDPSNFRAVKHLDAWLKARGVIGLCGIDTRALTAWIRENGAPNAVIAHDPNGVFDIEALKAEAKAWSGLVGLDLAIEATSGQSSTWTETPWVWNKGYGTLGEADAKYHVVCVDFGVKRNILRLFAGLDCKVTVVPAQTSAEDILALKPDGVFLSNGPGDPAATGEYAVPVIQNLIKSELPIFGICLGHQMLGLAVGAKTEKMHQGHHGANHPVKDFTTGKVEIVSMNHGFAVDTKSLPEGVEETHTSLFDGTNCGLRIVGKPVFSVQHHPEASPGPQDSHYLFRRFVNLLRENKGEAALAER

SEQ ID NO: 95059 - DNA, 1269 bp, Brucella melitensis 16M
  CDS (1)..(1269): transl_table=11
atgacagcacaggctggcgatgccaacgaaacaggagtgcacactatgactgaaacgaccccgaaaacagcaccctggaccgttcagaagcgaaccgccgttctcgtcctcgccgatggaaccgtgatcgaaggcaagggcctgggcgcgaccggcgcggttgaggccgaagtcgtcttcaacaccgctctcaccggctatgaggaaatactgaccgacccgtcctatgccggacagatcgtcaccttcactttcccacatatcggcaatgtcggcgccaatgccgaagatatcgaagatctgacacccgccaaccgccacggcgcagtcggcgcgatcttcaaggcagacatcaccgcaccctcgaatttccgtgccgcaaaagacctcgatagctggctcaagcatcgcggaatcattgcgcttgccggcatcgacacccgcgccctcaccgccctcatccgcgagcgtggcgcgcaaaacgccgttatcgcgcatgacccgaacggaaatttcgatctcgacgccctgaaagcgcgcgccgccaactggtgcggccttgaaaatctcgatctcgccaaggatgtcaccatcggccagagcctcgtctggaaggaactgccatggacactccaggacggctatggcgaacaggacgcaccgcaatatcacgtcgtcgctctcgatttcggtgtgaagcgcaatattctgcgccttctgaccgggcttggcgcaaaggtcacggttttaccggccacggcaacagccgaagacgttctggcgcataatcccgatggcgttttcctgtccaatggtcccggcgatccggcggcaacgggcgaatatgccgtgccgaccatcggcaagctggtggaaaccggcattccccttttcggcatctgcctcggccaccagatgctggcgctggcgctcggcggacgcacggaaaagatgcatcagggccatcacggtgcaaaccacccggtgaaggattatacgaccggcaaggtggaaatcgtctcgatgaatcacggtttcgcagttgattcggactcgctgccggaaaatgtcgaggaaacccatgtgtcgctcttcgacggcaccaattgcggcctgcgtgtcgtcggcaagccagtcttctccgtgcagcatcacccggaagcctcccccggcccgcaggattcgcactatctgttccgccggttcatcaatctcatccgcgagaggaaaggccaggctcctctgccggagcgcgaacaggctgcctga

SEQ ID NO: 95060 - protein, 422 aa, Brucella melitensis 16M
MTAQAGDANETGVHTMTETTPKTAPWTVQKRTAVLVLADGTVIEGKGLGATGAVEAEVVFNTALTGYEEILTDPSYAGQIVTFTFPHIGNVGANAEDIEDLTPANRHGAVGAIFKADITAPSNFRAAKDLDSWLKHRGIIALAGIDTRALTALIRERGAQNAVIAHDPNGNFDLDALKARAANWCGLENLDLAKDVTIGQSLVWKELPWTLQDGYGEQDAPQYHVVALDFGVKRNILRLLTGLGAKVTVLPATATAEDVLAHNPDGVFLSNGPGDPAATGEYAVPTIGKLVETGIPLFGICLGHQMLALALGGRTEKMHQGHHGANHPVKDYTTGKVEIVSMNHGFAVDSDSLPENVEETHVSLFDGTNCGLRVVGKPVFSVQHHPEASPGPQDSHYLFRRFINLIRERKGQAPLPEREQAA

SEQ ID NO: 95061 - DNA, 1248 bp, Schizosaccharomyces pombe 972h-
  CDS (1)..(1248)
atgttgcgatttttgaaaccattccctttgagatttggtaaaagattttattctaaggttcctcctgtcaccaatcacgagcgtattttaccaaagcaaccttcttttcctacagctcctgcgcaaaacgagattgccaccctcacgattcgcaatggtcctatctttcacggcacttcctttggtgccaacagaaatgtatctggtgaagctgttttcaccacttctcctgtcggctacgttgagtcattgactgacccttcttacaagcagcaaattctaattttcactcaaccattgatcggaaattatggtgtccccgattgtaaaaagcgcgatgaaaatggtcttttgcgacactttgaatcacctcatatccagtgtgctggtgtcgttgtcaacgattatgccaccaaatactcccactggactgcagttgagtcgctcggtgaatggtgtgctcgtgaaggagttgctgcaatcaccggtgtcgacactcgtgccatcgttactttcttgcgtgaacaaggaagtagtttggcaaagatcagtattggtgaagagtacgacgccaacgacgacgaagcgtttatcaatcctgaagaagtgaatttagttagccaggtttccacccgtgagcctttcttcgtcagtggcggagatggcatgttgaacattgccgttattgactgtggtgtcaaggaaaacattcttcgttctttggtttctcgtggtgctagtgttaccgttttcccctttgattatcctattcaaaatgttgctagcaattacgatggcatatttttgactaacggcccaggtgatccaacccatcttaccaaaaccgttaacaatcttcgtgagttgatgaatacttacaatggtccaattatgggcatttgtatgggtcatcagcttctcgctctttccacaggtgctaagactattaaacttaaatatggtaaccgtggccataatattcccgcattagacattgcttctggtaactgccatattacttctcaaaaccacggttacgctgtggatgcatctactctcccagctgagtggaaggctacttggactaatttgaatgatcaatctaacgaaggtattgcccatgtttctcgtcctatttcttctgtccaattccaccctgaagctcgtggtggccctatggataccttctatctttttgacaactatatcaaggaggccatcaaatatcaaaagtctcgtacggcttaa

SEQ ID NO: 95062 - protein, 415 aa, Schizosaccharomyces pombe 972h-
MLRFLKPFPLRFGKRFYSKVPPVTNHERILPKQPSFPTAPAQNEIATLTIRNGPIFHGTSFGANRNVSGEAVFTTSPVGYVESLTDPSYKQQILIFTQPLIGNYGVPDCKKRDENGLLRHFESPHIQCAGVVVNDYATKYSHWTAVESLGEWCAREGVAAITGVDTRAIVTFLREQGSSLAKISIGEEYDANDDEAFINPEEVNLVSQVSTREPFFVSGGDGMLNIAVIDCGVKENILRSLVSRGASVTVFPFDYPIQNVASNYDGIFLTNGPGDPTHLTKTVNNLRELMNTYNGPIMGICMGHQLLALSTGAKTIKLKYGNRGHNIPALDIASGNCHITSQNHGYAVDASTLPAEWKATWTNLNDQSNEGIAHVSRPISSVQFHPEARGGPMDTFYLFDNYIKEAIKYQKSRTA

SEQ ID NO: 95063 - DNA, 1140 bp, Methanosarcina mazei Go1
  CDS (1)..(1140): transl_table=11
atgtcttatgacatttactcgcaggttcagatgatgaaagcagtactaggattagaagatggaacagttattaagggcaccggttttggtgccgaaggcacagcttgcggcgaactcgtttttaccactcaattcacaggatatgaggaggctctgactgacccttcctacaagggccagattttaatgtttacttaccctttgatagggaattatggggtcagcggagagaggttccagtccgacaacatccatgctgaggggcttgttgtcagggaagcctgcaaaaaaccctatcactacaaatccacccgttctatccacaaatttttagaggatgaaggaaaaccagggattgaaggcgtggacacccgtatgctcacaataggggcaagggagcatgggaccatgcgtgcagcccttatcacagggagtgacgatggggaagaagccgttgatatggcgaggaactttccgcaggtaacggacgaagaacttattgcacgcgtaacctgcaaagaaccccgctttattcccggagcagccggagcatggaaaggaagcggcaaacccaaacatgcagttgtggtcgacctcggcataaagaggaacatcataaacaacctgcataaaaggggaattgacctgaccctggttcctgcaaccacaaaaccagaagaaatcgcaggctacgagcctgacatgctatttatctcaaacggtccaggagacccggaaaaagcaacggatgctatcaatgccgtaaaggcttttgcaggcacgattccggtagcagggatctgcttcgggcaccagattatctcccttgcaatgggagcaaggacatacaagcttaaattcgggcacaggggaggaaaccagcccgtaaaggaccttatcgagaacaaaattttcataagctcccagaaccatggatatgctgtcgatgcggattcccttgaagggacagggctttatgtaaagtacctgaacgcaaacgacaaaaccgttgaaggggtttcccacaaagacctcgacattttcagtgtgcagttccaccctgaagcacaggcaggtccactggataccgaggaaacgttcttcggcaaggtagtgaaggtcctcggagggggtctctga

SEQ ID NO: 95064 - protein, 379 aa, Methanosarcina mazei Go1
MSYDIYSQVQMMKAVLGLEDGTVIKGTGFGAEGTACGELVFTTQFTGYEEALTDPSYKGQILMFTYPLIGNYGVSGERFQSDNIHAEGLVVREACKKPYHYKSTRSIHKFLEDEGKPGIEGVDTRMLTIGAREHGTMRAALITGSDDGEEAVDMARNFPQVTDEELIARVTCKEPRFIPGAAGAWKGSGKPKHAVVVDLGIKRNIINNLHKRGIDLTLVPATTKPEEIAGYEPDMLFISNGPGDPEKATDAINAVKAFAGTIPVAGICFGHQIISLAMGARTYKLKFGHRGGNQPVKDLIENKIFISSQNHGYAVDADSLEGTGLYVKYLNANDKTVEGVSHKDLDIFSVQFHPEAQAGPLDTEETFFGKVVKVLGGGL

SEQ ID NO: 95065 - DNA, 1203 bp, Yersinia pestis KIM
  CDS (1)..(1203): transl_table=11
gtgactgtttattccctggaggatgttttgattaagtcagcgctattggttctcgaagacggaacccaattccacggtcgggccatcggggcagaaggtacggcagtaggggaagtggtcttcaatacgtcgatgaccggttatcaagaaatcctcactgatccttcctactcccgccagatcgttactcttacttatcctcatatcggcaatgtcggcactaatgcctccgatgaagaatcctctgcagtacacgcccaaggtcttgttattcgcgacctgccattgattgccagcaactaccgtaatgaagaaggcttatccgagtatctcaagcggcacaatattgtggcgattgccgatatcgatactcgtaagctgactcgcttgctgcgcgaaaaaggagcacagaacggctgcattattgttggggagttgtctgacgcggccctggcattggaaaaagcgaaagcatttccaggcttgaaagggatggatctggcgaaagaagtgaccaccaaagagatgtatcagtggctgcaaggcagttggacgctggaaggtgatttacctgcggcgaaacaaccagaagatttgccattccatgtggtggcttacgattatggtgtgaagcgtaatatcctgcgtatgctggttgatcgcggttgccgtctgaccgttgttccagcgcagacacccgctgaagacgttctgaaactgaatccagatggcatcttcttatccaatggtcctggggatccagaaccatgcgattacgcgatcacggccatcaaacgcttcctggaaacggatattccggtattcggcatctgtctgggccaccaattgctggcgctggccagtggcgctaaaacagtaaaaatgaagttcggtcaccatgggggtaaccatccggtgaaagatctggatgctagctgtgtgatgattaccgcgcaaaaccatggcttcgccgttgatgaaacctcattgccatccaacctgcgtactacacatgtctctttatttgatggttctctgcaagggctccaccgtacagataaagcagcgttcagcttccaggggcatccagaagccagccccggcccgcatgatgccgcgccattgtttgatcattttatcgaactgattgaggcttaccgagcttcatccgtgagtcttaactgtagtaacagccataaataa

SEQ ID NO: 95066 - protein, 400 aa, Yersinia pestis KIM
MTVYSLEDVLIKSALLVLEDGTQFHGRAIGAEGTAVGEVVFNTSMTGYQEILTDPSYSRQIVTLTYPHIGNVGTNASDEESSAVHAQGLVIRDLPLIASNYRNEEGLSEYLKRHNIVAIADIDTRKLTRLLREKGAQNGCIIVGELSDAALALEKAKAFPGLKGMDLAKEVTTKEMYQWLQGSWTLEGDLPAAKQPEDLPFHVVAYDYGVKRNILRMLVDRGCRLTVVPAQTPAEDVLKLNPDGIFLSNGPGDPEPCDYAITAIKRFLETDIPVFGICLGHQLLALASGAKTVKMKFGHHGGNHPVKDLDASCVMITAQNHGFAVDETSLPSNLRTTHVSLFDGSLQGLHRTDKAAFSFQGHPEASPGPHDAAPLFDHFIELIEAYRASSVSLNCSNSHK

SEQ ID NO: 95067 - DNA, 1089 bp, Oceanobacillus iheyensis HTE831
  CDS (1)..(1089): transl_table=11
atggataaaggttttttagtattagaaaccggagaagtatttgaaggaattctaattggagataaacaggcaatcgaaggtgaacttgtttttaataccggtatgacagggtatcaggagatgatgaccgacccttcttataaaggtcaaattcttacattttgttatccgattattgggaattatgggattaatgatatcgatgatgagagtaaagaaattgctgtttctgctgttattgctagtgatatttgtgatgaacctagtcactatcagttaacaaggtcattttcaaaacaattagagcaagctggtattccaggtttgtttgaaattgatacacgtcagcttgtcatgattatacgtgaacacggttctttgcgagcaaaaatagtgaccgacgaatgggaaacaaaaaatataacctggcaaacacgtagcttattgtcattagttaatagtgtgtctgttaaacaatcagaaacctatggtacaggtgatactcatattgcgattatggattacggatataaaaaatcaattcgaaatgcgctacttcaacaaggttgtaaagtgacggttgtttcttatcaaacaccacttcatcacataaaagaactgaaccctgatggtattgttcttagtaatgggcccggagatccaatggagttacaagcgtattttcctgttatcaaacaaataacacaagactacccaacacttggtatttgtctgggacatcaattaattgcattagcttatggggcaatgacaaagaaaatgcattttggtcatcgaggcggtaatcatccagtgaaagatttattcaccggaaaggtctggataacgtctcaaaatcacggatatgtagtagaggaagacaccattgattatatgcagtttgatgtattatttaagaatgtaaatgatcgttctttagaaggtttgaaacattgtcactatcccgttactactgtgcaatttcatccggaggcacatccaggaccaagtgataccaattatatttttgaagatttcttaaatgaagtgagagaaaagaaaggagcattgacgcatgccaaagcgtaa

SEQ ID NO: 95068 - protein, 362 aa, Oceanobacillus iheyensis HTE831
MDKGFLVLETGEVFEGILIGDKQAIEGELVFNTGMTGYQEMMTDPSYKGQILTFCYPIIGNYGINDIDDESKEIAVSAVIASDICDEPSHYQLTRSFSKQLEQAGIPGLFEIDTRQLVMIIREHGSLRAKIVTDEWETKNITWQTRSLLSLVNSVSVKQSETYGTGDTHIAIMDYGYKKSIRNALLQQGCKVTVVSYQTPLHHIKELNPDGIVLSNGPGDPMELQAYFPVIKQITQDYPTLGICLGHQLIALAYGAMTKKMHFGHRGGNHPVKDLFTGKVWITSQNHGYVVEEDTIDYMQFDVLFKNVNDRSLEGLKHCHYPVTTVQFHPEAHPGPSDTNYIFEDFLNEVREKKGALTHAKA

SEQ ID NO: 95069 - DNA, 1083 bp, Lactobacillus plantarum WCFS1
  CDS (1)..(1083): transl_table=11
atggcagaccgctatttgattcttgaagatggcagcgcctatttaggtgaaggctttggctcgccagcggtttctaccggagaaatcgtcgtcaacacgagtatgacgggctatcaagaaattattactaatcaaatttatcataaccaaatcgttgcttttacgcagccaaccattgggagctatgggatcaaccacgatagctacgaatcaattttaccgaccgttaagggggtcgttgttcgggatgtcgctagcatttcgaccaaccggcagcggcgctggtcactggatcaatatttaaagcaacaaaatattcctggcatcagccatattgatacacggcacttagcgaagcaactccgagcaagtggcccgatgaaagccagtatcgtagacgttgcagatgcccatgcctttgatcaattgggtgcgaccgtgctgactaatcaacaggtggcagcggtcgcaacaccgaaaccatttcctaatccggggacggggctcaatgtcgtggtcatcgactttggcctcaaacacgggattttgcgcgaacttagtaagcgtgcttgtaacgtcacggtcttaccttatacggcaacgactgaggaaattttaaacttagatccagacggcgtcattctatcgactgggcccggcaaaccgcaggacttaccagtcagtgtgactgagatgatcaagaacattcaaaatcgggtgccactgtttgccatcggactgggccacgaactatttgcgatggccaatggcgctcaaattatgaaattatcacctgaacatcatggggctaaccacccaatccgcgaagtgattacgaaccaaattatttatgcagctcagggccaggggttcgcggtagatgcggatactgttgatcgtaataagttaatcacgacatttgttgacttgatcgatgggacgattcaaggactgcgtctacgggactttccagcgttttcagtgcaatttttcccagatggcgctcctggtccgactgaaacgcgcgatatttttgatgaatttgttgagtcgatgcaacaagcaagggggccaatctggtga

SEQ ID NO: 95070 - protein, 360 aa, Lactobacillus plantarum WCFS1
MADRYLILEDGSAYLGEGFGSPAVSTGEIVVNTSMTGYQEIITNQIYHNQIVAFTQPTIGSYGINHDSYESILPTVKGVVVRDVASISTNRQRRWSLDQYLKQQNIPGISHIDTRHLAKQLRASGPMKASIVDVADAHAFDQLGATVLTNQQVAAVATPKPFPNPGTGLNVVVIDFGLKHGILRELSKRACNVTVLPYTATTEEILNLDPDGVILSTGPGKPQDLPVSVTEMIKNIQNRVPLFAIGLGHELFAMANGAQIMKLSPEHHGANHPIREVITNQIIYAAQGQGFAVDADTVDRNKLITTFVDLIDGTIQGLRLRDFPAFSVQFFPDGAPGPTETRDIFDEFVESMQQARGPIW

SEQ ID NO: 95071 - DNA, 1146 bp, Tropheryma whipplei str. Twist
  CDS (1)..(1146): transl_table=11
gtgcttagctttcggtctgcggtattcgtaatggaagatggttcttgttttgaaggtgttccatttggtgctgttggtactgcatttggcgaggccgttttttcgacatgcatgaccgggtatcaggaagtttttacagacccgagttacacagcgcaaattcttgttatgacagctgtgcatgtgggtaacacaggtattaatgattttgataacgaatcggacagaatgtggccaagtggggttgttataagggatccatccccaatcgcatccagttttcttgccaaaatggatttggcaaaagcccttgctagtgagggagttatcggaatttctgaggtggatacgcgcgctattgttagaaaattacgcacatcaggcgccatgcgtgccggtatattctcgcaaccggaccgacctttgcccgatttggtggatcagataaggggaacgcagtcaatgcatatgcgttctctaacatccgaggtgtccacaacatcgcgcaggtttatcagttccgagtcccattttgcaactcttcttgtcttagatctcggagtgaaaaaaagtaccatcaatttacttctagagcaggggttcgatatttggcttatgcctcataatatttcctttgatgaggctatgcagatcaaacctgatgcgatattttactcaaatggacccggtgatcccgcggcgagtggtacccaggtcgatctcttgcgcagtctgttgagagcgggtctgccctactttggtatttgctttgggaatcaattgctggccagagccttgggttttgaaaccaagaagcttctctttgggcacagggggatcaaccaacccgttttcaacagggcaacaaaacaggttgagataacatctcaaaatcatggattctcggttgatatgccaatcgatcgtatttctgtttcacctctgaattttggacgggtcgaagtatctcattattgtcttaatgattatgaagttgaaggcataagatgccttgatattcccgccatgtcagtccagtatcatccggaatcttgtgccggcccgcatgactcgcgctatctttttcgtgaatttagaagaatggtcgaaggacacctagagcgaagatacaatgccgaaccctag

SEQ ID NO: 95072 - protein, 381 aa, Tropheryma whipplei str. Twist
MLSFRSAVFVMEDGSCFEGVPFGAVGTAFGEAVFSTCMTGYQEVFTDPSYTAQILVMTAVHVGNTGINDFDNESDRMWPSGVVIRDPSPIASSFLAKMDLAKALASEGVIGISEVDTRAIVRKLRTSGAMRAGIFSQPDRPLPDLVDQIRGTQSMHMRSLTSEVSTTSRRFISSESHFATLLVLDLGVKKSTINLLLEQGFDIWLMPHNISFDEAMQIKPDAIFYSNGPGDPAASGTQVDLLRSLLRAGLPYFGICFGNQLLARALGFETKKLLFGHRGINQPVFNRATKQVEITSQNHGFSVDMPIDRISVSPLNFGRVEVSHYCLNDYEVEGIRCLDIPAMSVQYHPESCAGPHDSRYLFREFRRMVEGHLERRYNAEP

SEQ ID NO: 95073 - DNA, 1149 bp, Salmonella enterica subsp. enterica serovar Typhi Ty2
  CDS (1)..(1149): transl_table=11
ttgattaagtcagcgctattggttctggaagacggaacccagtttcacggtcgggccataggggcaacaggttcggcggttggggaagtcgttttcaatacttcaatgaccggttatcaagaaatcctcactgatccttcctattcccgccaaatcgtcactcttacttatccccatattggtaatgtcggcaccaatgaagccgatgaagaatcttctcaggttcatgcgcaaggtttagtgattcgcgatctgccgttgattgccagcaacttccgtaacaccgaagacctctcttcttacctgaaacgccataacatcgtggcgattgccgatatcgatacccgcaagctgacccgactgctgcgtgagaaaggcgcacagaacggctgcatcattgcaggcgatagcccggatgcgaagctggcgctggaaaaagcgaaagcatttcctggactgaacggtatggatctggcgaaagaagtgaccacggcggaaacttaccgctggacgcagggtagctggacgctgaaagacggtttaccggaagcgaaatctgaggatgacctgccgttccacgtggtggcctacgattttggcgccaagcgcaacattctacgtatgctggtggatcgcggctgccgcctgacggtggtgccagcgcaaacctctgctgaagaggtgctgaaaatgaatccggacggcatcttcctgtcgaacggccctggcgacccggcgccgtgcgactacgccatcgaggcgattaagaaattcctccagaccgacattcctgtgttcggcatctgcctcggccatcaactgctggcgctggcgagcggtgcgaagaccgttaagatgaagttcggccatcacggcggcaaccatccggtaaaagatatggacagaaacgtggtgatgatcaccgcgcagaaccacggatttgcggtggatgaagactcgctgcccgccaacctgcgcgtgacccacaagtcgctgttcgacggcaccctgcagggcattcaccgtaccgacaaaccggcgttcagcttccagggacacccggaggcgagcccgggcccgcacgatgcggcgccgctgttcgaccactttatcgaattgattaagcactaccgttcttcagcaaaataa

SEQ ID NO: 95074 - protein, 382 aa, Salmonella enterica subsp. enterica serovar Typhi Ty2
MIKSALLVLEDGTQFHGRAIGATGSAVGEVVFNTSMTGYQEILTDPSYSRQIVTLTYPHIGNVGTNEADEESSQVHAQGLVIRDLPLIASNFRNTEDLSSYLKRHNIVAIADIDTRKLTRLLREKGAQNGCIIAGDSPDAKLALEKAKAFPGLNGMDLAKEVTTAETYRWTQGSWTLKDGLPEAKSEDDLPFHVVAYDFGAKRNILRMLVDRGCRLTVVPAQTSAEEVLKMNPDGIFLSNGPGDPAPCDYAIEAIKKFLQTDIPVFGICLGHQLLALASGAKTVKMKFGHHGGNHPVKDMDRNVVMITAQNHGFAVDEDSLPANLRVTHKSLFDGTLQGIHRTDKPAFSFQGHPEASPGPHDAAPLFDHFIELIKHYRSSAK

SEQ ID NO: 95075 - DNA, 1167 bp, Bacteroides thetaiotaomicron VPI-5482
  CDS (1)..(1167): transl_table=11
atgagaaatgtgacattaatccttgacgacgggagccggttttccggtaagtcgtttggctacgagaagccggtggcgggcgaagtagttttcaacaccgccatgaccggatatccggagagccttactgacccttcctacgccggacagttgatgactcttacctatcctttggtgggtaattacggagttcctccttttaccatcgaacccaacggactcgccactttcatggaaagtgaaaagattcatgccgaagcgattatcgtaagtgactactcttctgagtacagccactggaacgcagtggaaagcctcggcgactggctgaaacgtgagaaagtaccgggcatcacaggcatcgatacgcgcgaactgaccaaaatacttcgtgaacacggagtcatgatgggacgtatcgtcttcgacgatgaaattgtcggggaaattgacaatggacaattgacaatggacaattacgctgccgttaattacgtagaccgtgtttcctgcaaagaaataatctcctatctccctgatggaacctcccaatgttttcctcttagcacttctattgcgcaacttaactctcaacttttaactttcaattctcaacttaaaaaagttgttttggtggattgtggtgtaaaaaccaatattatccgttgcttgttgaggcgtggtgtagaagtgatccgtgtaccttgggattatgattttaacggactcgaatttgacgggctgtttatctccaacggcccgggtgacccggatacctgcgacgcagctgtgcagaatatccgcaaggcaatggcgaacgagaaacttcccatctttggaatttgcatgggcaaccagttgctctcgaaagccggaggggcaaagatttacaaacttaaatatggacaccgtagccacaaccagccggtacgcatggtgggtacggaacgttgttttattacttcgcagaatcatggttatgcggtagacaataatacgctgggggcagattgggaaccgctgttcatcaatatgaatgatggttctaacgaaggaatcaaacacaagaaaaatccttggttctctgcacagttccatcccgaagctgcaagtggtcctacggatacggaattcctgttcgatgaatttgtaaacctgcttaaataa

SEQ ID NO: 95076 - protein, 388 aa, Bacteroides thetaiotaomicron VPI-5482
MRNVTLILDDGSRFSGKSFGYEKPVAGEVVFNTAMTGYPESLTDPSYAGQLMTLTYPLVGNYGVPPFTIEPNGLATFMESEKIHAEAIIVSDYSSEYSHWNAVESLGDWLKREKVPGITGIDTRELTKILREHGVMMGRIVFDDEIVGEIDNGQLTMDNYAAVNYVDRVSCKEIISYLPDGTSQCFPLSTSIAQLNSQLLTFNSQLKKVVLVDCGVKTNIIRCLLRRGVEVIRVPWDYDFNGLEFDGLFISNGPGDPDTCDAAVQNIRKAMANEKLPIFGICMGNQLLSKAGGAKIYKLKYGHRSHNQPVRMVGTERCFITSQNHGYAVDNNTLGADWEPLFINMNDGSNEGIKHKKNPWFSAQFHPEAASGPTDTEFLFDEFVNLLK

SEQ ID NO: 95077 - DNA, 1080 bp, Enterococcus faecalis V583
  CDS (1)..(1080): transl_table=11
ttgaaaaggttattgattttagaagacggaacagtatttgaaggaaaagcgtttggtgcagaaggcaatgtagtaggagaagttgtttttactactggcatgacaggttaccaagaagcaattactgaccaaagttttaatggacaaatgattacttttacgtatccattagttgggaattacggggtcaaccgagatgattatgaatccattgcaccaacctgtaaaggtgtcattgttaaagagcatgcgcgggttgcttcaaattggcgtcaacaaatgaccttggatgaatttttaaagcgcaaagggattccgggaatttcaggaattgatacgcgtgcgctgactcgtaagttacgatcagctggaacaatgaaagggagcatcattgatgccgtggatgatttgccgcatgcgtttgatcaattaaaagcgacagtcatgccgaaaaatcaagtggcacaagtctccaccactaagccttatccgagtccaggtattgggcgtaatgtggtcgtcgttgattttgggttgaaacatagtattttgcgagaattatcaaaacggcaatgcaacttaaccgtgttgccttataatacaacggccgaagagattttagaattaagtcccgatggtgtcatgttgacaaatgggcctggagatcccaaagatgtgcctgaagctattgaaatgattcaagcaatccaaggaaaagttccgattttcggcatctgcttaggtcatcagttattttcattagcgaatggtgcggatacgtataagatgaagtttggacatcgcggtttgaatcatcctgtacgagaaattgcaacaggacgcattgatttcacttcacaaaaccacggatatgccgtagatgaagcaacaattgatccagaaaaattacttgtgacccacgtggaagtcaatgatggaacggttgaaggcgtgcgtcatcgagattatcctgcttttactgtgcaatatcacccagatgcggctccaggaccgcacgatggtcttcatttatttgacgaatttatggaattaatggatgcatggaaggagcaaaactaa

SEQ ID NO: 95078 - protein, 359 aa, Enterococcus faecalis V583
MKRLLILEDGTVFEGKAFGAEGNVVGEVVFTTGMTGYQEAITDQSFNGQMITFTYPLVGNYGVNRDDYESIAPTCKGVIVKEHARVASNWRQQMTLDEFLKRKGIPGISGIDTRALTRKLRSAGTMKGSIIDAVDDLPHAFDQLKATVMPKNQVAQVSTTKPYPSPGIGRNVVVVDFGLKHSILRELSKRQCNLTVLPYNTTAEEILELSPDGVMLTNGPGDPKDVPEAIEMIQAIQGKVPIFGICLGHQLFSLANGADTYKMKFGHRGLNHPVREIATGRIDFTSQNHGYAVDEATIDPEKLLVTHVEVNDGTVEGVRHRDYPAFTVQYHPDAAPGPHDGLHLFDEFMELMDAWKEQN

SEQ ID NO: 95079 - DNA, 1149 bp, Coxiella burnetii RSA 493
  CDS (1)..(1149): transl_table=11
atgggcgatttcgatttgctcaatgggcgaaagccggcgattttggcattagcggatggtagtgttttgtatggatattctattggagcggatgggcagacggtcggagaggtcattttcaacaccactctcaccggttatcaagagattttgacggacccctcgtatgccgaacaaatcataacgtttacctacccgcatattggcaatgtgggtgtcaatatggacgatcaagaatcgcggcggatttgggcagccggattaattatccgagaattgtcaccgatcgtgagtaattggcgcgctcaacaagcattaagtgattatttaaaatccgaagaaataataggtattgcaggtattgatacccgacgtcttgtccgattgatccgcgaaaaaggagcgttacacggatgtatcgttgcaggagatggcgcgcaagcagagcaagcccttaaaaaagcgcgcgcttacgaaggcttgaaaggaaaagatctagcaaaggctgtttcaacgacaagggcacaaacttggcaggaaagaagttggaatcaggcatccgctccccacgcatcttctcgagcttaccaagtggtcgtttacgattttggtttaaagcaacaaattttgcgacttttagttgaccagggttgtttagtcacaatcgtaccggccgaaaccaacgttgaagaagtgattgccttgaagcccgatggggttgtattttctaacggacctggtgatccagcggcttgcgattatgccattgcaacgattcggcaattcctggaaaaaggcgttcctttattaggcatttgtttgggatttcaattgttggcattagcatgtggcgctaaaaccgaaaaaatgaagttcggtcatcacggagcgaatcatccggttcaagcggtggaaacggggcgtgtatttatcacaagccaaaatcacagtttttcggtggacgagaatagtttgccggctactttacgcgttacgcaccgttcgttgttcgatggcacattgcaagggattgctcataaaacgaagccggcgattgcttttcaaggacatcctgaagcaagcccaggaccgcatgacatgcggagggtcttcgaggagtttgttaaattaatgagggactccacctag

SEQ ID NO: 95080 - protein, 382 aa, Coxiella burnetii RSA 493
MGDFDLLNGRKPAILALADGSVLYGYSIGADGQTVGEVIFNTTLTGYQEILTDPSYAEQIITFTYPHIGNVGVNMDDQESRRIWAAGLIIRELSPIVSNWRAQQALSDYLKSEEIIGIAGIDTRRLVRLIREKGALHGCIVAGDGAQAEQALKKARAYEGLKGKDLAKAVSTTRAQTWQERSWNQASAPHASSRAYQVVVYDFGLKQQILRLLVDQGCLVTIVPAETNVEEVIALKPDGVVFSNGPGDPAACDYAIATIRQFLEKGVPLLGICLGFQLLALACGAKTEKMKFGHHGANHPVQAVETGRVFITSQNHSFSVDENSLPATLRVTHRSLFDGTLQGIAHKTKPAIAFQGHPEASPGPHDMRRVFEEFVKLMRDST

SEQ ID NO: 95081 - DNA, 1122 bp, Bacillus cereus ATCC 14579
  CDS (1)..(1122): transl_table=11
atggcaaaaggagagtgcattagtatgaaaagacaacttatcttagaagatggaacagtattaattggaacaggtttcggaggcgaaatcgaaaagtcaggtgaggttgtatttacaacaggaatgactggatatcaagaaacattatctgatccatcatattgcggtcaaatcgtaacattcacgtacccattaatcggaaactacggcattaaccgtgacgattttgaatccattcacccatctgtaaatggtttaatcgtaaacgaaatttgtaatcacccatcaaacttccgtaatgaaatttcgttaaatgattacttgaaagaaagaaatatcccaggattagcagggattgatacgagaaaattaacgagaaaaattcgtcaatacggtacattacgtggacgcctttgtaacatggatgcagatgtagagtacattgtaagccaattaaaagcgacagtatttacagatcatgtaaaacgcgtatcaacgaaagatccatacccaagcccaggtcgtggtcaccgagttgtactagtagacttcggtatgaaacatggtattttacgagaattaaataagcgtgactgtgatgtaattgtagttccttacaacacaacagcggaagaaattttacgccttagcccagatggaattatgttaagtaatggacctggagatccgaaagatgtaccagaagcaattgaaatgttaaaagacattatcggtaaagttcctttattcggaatttgcctaggacatcaattgttcgctctagcatcaggtgcaaatacaagtaagttgaaatttggtcaccgtggtttaaaccatccagtaaaaaatcttgcaactggaaaagtagcaattacatctcaaaaccacggatacgcagtagaagaagaatcagttgaaaatacagatcttgaaattacacatgttgctttaaacgatggaacggtagaaggtcttcgtcataagaagttcccggcatttacagtacaataccatccagaagcttcagcgggaccagaagatgcaaatgatttattcgaagatttcttaacaatgattgaaaacttcaagaaagaaggggaagagttatgccaaaacgcctag

SEQ ID NO: 95082 - protein, 373 aa, Bacillus cereus ATCC 14579
MAKGECISMKRQLILEDGTVLIGTGFGGEIEKSGEVVFTTGMTGYQETLSDPSYCGQIVTFTYPLIGNYGINRDDFESIHPSVNGLIVNEICNHPSNFRNEISLNDYLKERNIPGLAGIDTRKLTRKIRQYGTLRGRLCNMDADVEYIVSQLKATVFTDHVKRVSTKDPYPSPGRGHRVVLVDFGMKHGILRELNKRDCDVIVVPYNTTAEEILRLSPDGIMLSNGPGDPKDVPEAIEMLKDIIGKVPLFGICLGHQLFALASGANTSKLKFGHRGLNHPVKNLATGKVAITSQNHGYAVEEESVENTDLEITHVALNDGTVEGLRHKKFPAFTVQYHPEASAGPEDANDLFEDFLTMIENFKKEGEELCQNA

SEQ ID NO: 95083 - DNA, 1152 bp, Nitrosomonas europaea ATCC 19718
  CDS (1)..(1152): transl_table=11
gtgtctaaccgtccgcgtgctgtacttgttctggctgatggtactgtttttcacggagattcgattggtgcagaaggtattactatcggtgaagtggctttcaatacggccatgaccggttaccaggaaattctcactgacccttcttattgccgccagatcgttacgctgacttatccgcatatcggtaataccggtgtgaatgacgaggacattgaatcaactacggcttccaggatcattcatgcggcagggctggtggttcgtgatctgtcactcgtcaccagcagctggcgcagtcgtcatacgttaccggattttctcaaacagcatggtgtgccggcgattgccggggtcgatacacgcaaacttacgcgtattctgagaacgaagggcgcacaggcaggctgtatcatgaccggtcatatcgatgaaaccgaagcattgcgacaggcgcaggcatttcccggtctgacgggaatggatctggcgcgagtggtcagttgcagtcagccatgggaattcagtgaaggcgcatggtcaccagaaacaggctatcaagctgcgggcgagagccgctgccgggttgctgtgctggattttggtgtcaagcgtgcgattctgcgcaagttggtcgagcatggttgtcatgttaccgtttatcccgcgcagacacggattgatgaaattcttgccgcccggcctgatggtgtgctgctttccaatggtcctggagatccggaagcctgtgattatgcaatcgatatggcacgtgcattactggcaagcaaaatccctgtgttcggtatctgcctgggtcatcagataattgcactggcgattggtgccaggacgatcaagatgaaattcgggcaccatggtgccaatcatccggtattggatgtcgatagtggccgggtgatgatcaccagccagaatcatggatttgcagtggatgtcgatacactgcctgccaatgtgcgcgtcacccatcattcattgtttgatggaagtcttcagggatttgaattgacggatcatcctgttctatgttttcaaggacatcctgaagccagcccgggcccgcaagacgttaattatttattcagtcgtttcatcagtcggatagtgaaaaacaagcagtcagcctga

SEQ ID NO: 95084 - protein, 383 aa, Nitrosomonas europaea ATCC 19718
MSNRPRAVLVLADGTVFHGDSIGAEGITIGEVAFNTAMTGYQEILTDPSYCRQIVTLTYPHIGNTGVNDEDIESTTASRIIHAAGLVVRDLSLVTSSWRSRHTLPDFLKQHGVPAIAGVDTRKLTRILRTKGAQAGCIMTGHIDETEALRQAQAFPGLTGMDLARVVSCSQPWEFSEGAWSPETGYQAAGESRCRVAVLDFGVKRAILRKLVEHGCHVTVYPAQTRIDEILAARPDGVLLSNGPGDPEACDYAIDMARALLASKIPVFGICLGHQIIALAIGARTIKMKFGHHGANHPVLDVDSGRVMITSQNHGFAVDVDTLPANVRVTHHSLFDGSLQGFELTDHPVLCFQGHPEASPGPQDVNYLFSRFISRIVKNKQSA

SEQ ID NO: 95085 - DNA, 1146 bp, Prochlorococcus marinus subsp. marinus str. CCMP1375
  CDS (1)..(1146): transl_table=11
atgagcattttctctggtaatgacaatgcaattttggttttatctgatggtacttttattgaagggaaagcatttggttttagaggaactgtgtcaggcgaaattgtttttaatactggtattaccggttatcaggaggtattgacagatcctagttattttggacaattaataacgtttacttttcctgaattaggaaatactggtgtaaaccctgaagatcaagaatctgattcgccatctgcaaaaggtgttatcgctagacaagtctcttgctatgcaagtaattggcgttcaactaaaacttttgagcagtggttgaaagatgaaaaggttgttgggatttgtgatgtagatacaagagcgctagttagacacttgcgaagctctggcactatgaatgcaattatatcttcagaaaataatgcttctccatcatccttattaaatacaattaggcaggctccgcaaatgaaggggcttaatttaactggtgaagttacaactaaaaagccatataagtggaattcacttgcctcagttgattttgatgagagagttgttaatcaggcaatgtctccttttaatgtagtagctatagattttgggataaaaagatcaattctaaatcgattggtagcgcacggttgtgaagttaatgttttgcctgcaaatacaagcttttccgaagttatgtcttttaaccctgaaggggtgttcttctctaatggacctggagatccttcttctgttaaggaaggaatgtctttagctaagcgtttaatagaagaggtagatgtacctatgtttggaatttgtttaggccatcaaattctaggattggcccttggaggaaagacttttaaacttgcatatggtcatagaggtttaaatcatccatgcggtaaaacagggcgaatagaaataacaagtcagaatcatggctttgctttggatgccttgtctttagataaagatgttgttgagataacacatttgaacctgaatgatggaactgttgcaggcatcgcaatgtgtaacaggccaatctttggcatccaatatcacccagaagccagtccaggccctcatgatgcggatcaccatttttcccgttttgttgatctaatgtcagaacgtcgttga

SEQ ID NO: 95086 - protein, 381 aa, Prochlorococcus marinus subsp. marinus str. CCMP1375
MSIFSGNDNAILVLSDGTFIEGKAFGFRGTVSGEIVFNTGITGYQEVLTDPSYFGQLITFTFPELGNTGVNPEDQESDSPSAKGVIARQVSCYASNWRSTKTFEQWLKDEKVVGICDVDTRALVRHLRSSGTMNAIISSENNASPSSLLNTIRQAPQMKGLNLTGEVTTKKPYKWNSLASVDFDERVVNQAMSPFNVVAIDFGIKRSILNRLVAHGCEVNVLPANTSFSEVMSFNPEGVFFSNGPGDPSSVKEGMSLAKRLIEEVDVPMFGICLGHQILGLALGGKTFKLAYGHRGLNHPCGKTGRIEITSQNHGFALDALSLDKDVVEITHLNLNDGTVAGIAMCNRPIFGIQYHPEASPGPHDADHHFSRFVDLMSERR

SEQ ID NO: 95087 - DNA, 1149 bp, Candidatus Blochmannia floridanus
  CDS (1)..(1149): transl_table=11
gtgaagactgcattgttagttttagaagatggaagtcagttttatggtaagtcaatcggagcaaatggagaatcagtaggggagattgtttttaatacttctatgacagggtatcaggaaattattactgatccgtcttatgctcaccaaatagttgtattgacttatcctcatattggtaatattggtactaatgactttgataatgaatctgatcatattcaagtatctggaattgttatacgtaatttaacaataatctctagtaattttcgatataataggtctttatctaattttttaagatgtcaaaatatagttggtatttctgatgttgatactcgtagattaacgcgattaattagagaaaaaggaacgcaacgtgcttgtattatggcgaatagtgaacttgatgctaaattagctctatgtaaggcttgtacatttcttgggtcaaataaattaaaattagcatattcagtaagtacatctcaacaatatatttggaatcaaggaacagatcgatacgatggtaaatatagtagtgatgaaattattcctaaaaaatttttttatcgtgtagtagtatatgattttggtattaaatacaatattatgcgtatattagtagattacggttgtttattgattgtagttccagcaaatactgtagctcaagaagtggttaatttgaaacctgatggaattcttttatctaatgggccaggagatcctaatgaatatcaggatgtaatacatgtaattcgcttttttctatctaaaactaatattccaatgcttggtatttgtttaggacatcaattattggcattagctagcggagctaaaataataaaaatgaagtttggtcatcatggttctaatcatcctgtaaagaatgtagaaacaaataaagtaatgattactagtcaaaatcataattttgtagtagatatagaaactttaccaaatactatgaaagtaactcatatttcattatttgatggaacattacaaggtattcgttatttagataggtctgtcattagttttcagggtcatccagaagctagtccaggtcctcatgattctgtatcgatttttaatgattttattcaattaattaaaaaatatcgtaataaaaaatga

SEQ ID NO: 95088 - protein, 382 aa, Candidatus Blochmannia floridanus
MKTALLVLEDGSQFYGKSIGANGESVGEIVFNTSMTGYQEIITDPSYAHQIVVLTYPHIGNIGTNDFDNESDHIQVSGIVIRNLTIISSNFRYNRSLSNFLRCQNIVGISDVDTRRLTRLIREKGTQRACIMANSELDAKLALCKACTFLGSNKLKLAYSVSTSQQYIWNQGTDRYDGKYSSDEIIPKKFFYRVVVYDFGIKYNIMRILVDYGCLLIVVPANTVAQEVVNLKPDGILLSNGPGDPNEYQDVIHVIRFFLSKTNIPMLGICLGHQLLALASGAKIIKMKFGHHGSNHPVKNVETNKVMITSQNHNFVVDIETLPNTMKVTHISLFDGTLQGIRYLDRSVISFQGHPEASPGPHDSVSIFNDFIQLIKKYRNKK

SEQ ID NO: 95089 - DNA, 1098 bp, Bordetella pertussis Tohama I
  CDS (1)..(1098): transl_table=11
ttggcggacggtaccatttttcggggcgtatcgataggcgtgcctgggcataccgtggccgaagtggtgttcaacacttcgatgaccggataccaggaaatcctgacagacccgagctacgccgggcagaccgtcatgctgacctatccccacattggcaataccggcgtcaatcctgaagacgtcgaggccaatcgtgtgtacgccgccggtctggtggtgcgcgactgcccggcgcgcgtgtccaatttccgcgccacgcaatcgctgcccgagtacctgaacgcgcaaggcatcgtcgccattgcgggcatcgacacgcgcaagctgacccgcatcctgcgcgagtccggcgcccagggctcgtgcatcctggtcggcgaggacgccgagcgcgcggtcgagctggcccgcggctttccgggcatgagcggccaggacctggccaaggtcgtctccatcaaggagcgcgccgactggacccagggcacctgggaactgggctcgggctacacgcagccggcccaggaccgcttccacgtcgtggcctatgactatggcgtcaagagcaacatcctgcgcctgctggccgatcgcggctgccgtgtcacgctggtgccggcgcagactaccgccgaggaagcgttcaagctgcaacccgacggcgtgttcctgtccaacggcccgggcgatcccgagccgtgcgactacgcggtggacgccacgcgcgccttcctggagcgcaagctgccggtgttcggcatctgcctgggccaccagctgatgggcctggcgctgggcggcaagaccgtcaagatgaagaccggccaccacggggccaaccacccggtgcaggacgtgcagtccgggcgcgtcttcatcaccagccagaaccacggtttcgcggtcgacgccgcgaccctgccggccaatacgcgcgtcacgcacatctcgctgttcgacggcacgctgcagggtttcgagctgaccgaccggccggcgttctgcttccagggccaccccgaagccagccccgggccgcacgacatcatcgtgctgttcgacaagttcatcagcctgatggccggccagaaataa

SEQ ID NO: 95090 - protein, 365 aa, Bordetella pertussis Tohama I
MADGTIFRGVSIGVPGHTVAEVVFNTSMTGYQEILTDPSYAGQTVMLTYPHIGNTGVNPEDVEANRVYAAGLVVRDCPARVSNFRATQSLPEYLNAQGIVAIAGIDTRKLTRILRESGAQGSCILVGEDAERAVELARGFPGMSGQDLAKVVSIKERADWTQGTWELGSGYTQPAQDRFHVVAYDYGVKSNILRLLADRGCRVTLVPAQTTAEEAFKLQPDGVFLSNGPGDPEPCDYAVDATRAFLERKLPVFGICLGHQLMGLALGGKTVKMKTGHHGANHPVQDVQSGRVFITSQNHGFAVDAATLPANTRVTHISLFDGTLQGFELTDRPAFCFQGHPEASPGPHDIIVLFDKFISLMAGQK

SEQ ID NO: 95091 - DNA, 1143 bp, Prochlorococcus marinus subsp. pastoris str. CCMP1986
  CDS (1)..(1143): transl_table=11
atgaatcatctttttaagaaaaatgcaaaacttgttttgagtaatgggattacttttactggttattcatttggtgcgatgggttcaactgttggtgaaattgtttttaatactggtatgactggttatcaggaagtaatctctgacccaagttattttggccagatcattacatttacttatcctgagattggaaatacaggaattaatttcgaagattcagaatcagataattctgtcagaggtattattgtgcgtaatttttcaaataataatagtaattggagatctaaattaaactttaatcagtggctaattgaaaaaaatattattggactttatggaattgatacaagagctcttgttaaaattttaagatcgaatggttccatgaatggagttatcactagtgaaaaaaatgatttagatagttgtcttgaaattatttctaatactcccaatatgcaaggtttgaatttggccaaagatgtttcaacaaagaaaaattatatttttaaagcaactacaatgactgattttgatgtaagagaaaaaatccacaaaaatataaataaattcagagttgttgcgattgattttggtattaaaaaatcaattctcaatagattagcttcacatggatgtgaaattttggttttgccttcaaattcttcttttgaagatgttttaagtcatgatcctgatggaatatttttctcaaatggtccaggggatccttcatctgtacttgatggaattaatttagctaaattactaattaattatgggaaaattcctatgtttgggatctgcctcggtcatcaaatatttggtttggcattaggcggaaaaacttataaattaccttttggacatcgtggattaaatcatccttgtggcatgaataataataatattgaaattacaagtcagaatcatggttttgctatagatccaaattctttgtccactgaattagttgaaataacccacttgaatcttaatgataaaactgttgccggattgaaacttataaataagcctatatttagtgttcaatatcatccagaagcaagtcctgggcctcatgattcagattatttatttgaaaaatttgtttctctaatgttagaaagatgttga

SEQ ID NO: 95092 - protein, 380 aa, Prochlorococcus marinus subsp. pastoris str. CCMP1986
MNHLFKKNAKLVLSNGITFTGYSFGAMGSTVGEIVFNTGMTGYQEVISDPSYFGQIITFTYPEIGNTGINFEDSESDNSVRGIIVRNFSNNNSNWRSKLNFNQWLIEKNIIGLYGIDTRALVKILRSNGSMNGVITSEKNDLDSCLEIISNTPNMQGLNLAKDVSTKKNYIFKATTMTDFDVREKIHKNINKFRVVAIDFGIKKSILNRLASHGCEILVLPSNSSFEDVLSHDPDGIFFSNGPGDPSSVLDGINLAKLLINYGKIPMFGICLGHQIFGLALGGKTYKLPFGHRGLNHPCGMNNNNIEITSQNHGFAIDPNSLSTELVEITHLNLNDKTVAGLKLINKPIFSVQYHPEASPGPHDSDYLFEKFVSLMLERC

SEQ ID NO: 95093 - DNA, 1140 bp, Prochlorococcus marinus str. MIT 9313
  CDS (1)..(1140): transl_table=11
atgattgcttcatcgcgaaattcggcgctcttgatgcttgctgatggaacggtgcttgagggggaggcctttggtcattgcggtgacgcgatgggcgaggtggttttcaacaccggcatgacgggctaccaggaagtccttacggatcccagttactccggtcagttggtcacattcacctatccagagttgggcaacacaggcgtaaatcttgatgatcaagaatcatcccggccgcatgcaaggggtgtcatcgcccgtcaactctccccaacgccgagcagttggcgttgccaacagtcgctgcagacttggctggaggagaaaagagttgttggtatctcaggtgttgataccagggcgcttgtgagacatctgcgcgaggtcggagccatgaatggggtcataagcagcaatggttccacccctaagcagctgatggaactgttgcagcaggctccatcgatggagggattaaaccttgcagatcaggtctcaacgaaagatccataccgctggagatcaacttgtgctgtgggctttgatcaaaggttgaagcaacaaattgattcgccctatcacgttgtcgcgattgatttcggtatcaagcgggccatactcgaccgtttggtcgctcacggttgtgaggtcaccgtcctgccggccagttcagatttagccaccgtgttgagttcacaacccgagggcgtttttctatctaatggacctggtgaccctgctgccgtgactggtggtattgccctggttaaagatcttctcaataaggttgatatccccctgtttggcatttgcctgggtcatcagattattgggcttgccatgggtggccgtactttcaaattggcctatggccatcgcgggctcaaccatccctgcggcacaacggggcaggtggagatcaccagtcaaaaccatggattcgcacttgacgcctcgtctctgtcacaggtcaacgtggttgtgacccatctcaatctcaatgaccgcactgttgccgcgatagcgcatcgggatcgacctgtctttggtgtgcaataccacccggaggcgagtcctggtcctcatgatgcagaccaccacttcgctcactttgttgagctgatggcagatcgtcgctga

SEQ ID NO: 95094 - protein, 379 aa, Prochlorococcus marinus str. MIT 9313
MIASSRNSALLMLADGTVLEGEAFGHCGDAMGEVVFNTGMTGYQEVLTDPSYSGQLVTFTYPELGNTGVNLDDQESSRPHARGVIARQLSPTPSSWRCQQSLQTWLEEKRVVGISGVDTRALVRHLREVGAMNGVISSNGSTPKQLMELLQQAPSMEGLNLADQVSTKDPYRWRSTCAVGFDQRLKQQIDSPYHVVAIDFGIKRAILDRLVAHGCEVTVLPASSDLATVLSSQPEGVFLSNGPGDPAAVTGGIALVKDLLNKVDIPLFGICLGHQIIGLAMGGRTFKLAYGHRGLNHPCGTTGQVEITSQNHGFALDASSLSQVNVVVTHLNLNDRTVAAIAHRDRPVFGVQYHPEASPGPHDADHHFAHFVELMADRR

SEQ ID NO: 95095 - DNA, 1128 bp, Chromobacterium violaceum ATCC 12472
  CDS (1)..(1128): transl_table=11
gtgtcaaacctccccgcaatccttgtcttggctgacggcacgcttttcaaaggtagcgctatcggtgccgccggccatacggtcggcgaggtggtattcaataccgccatcaccggttaccaggagatcctgacggatccctcctataccaggcagatcgtcacactcacttatccgcacatcggcaatgtcggcgcgaattcggaagacaccgaatcccgcgccgtttttgcatccggcctgatcatccgcgatctgccgctgctgcacagcaacttccgcgccgaagattcgctgtccgattacctgaaaaagcacaatgtggtggcgatcgccgacatcgacacccgcaagctgacccgcatcctgcgcgagaagggcgcccaggccggctgcatcatggccggcgacatcgacgaggcgaaggcgctggagctggcgcgcggcttcggcagcatggccggccaggacctggccaaggtcgtcagctgccagaagccgtacgcctggaccgagaagcaatggaagctgggcgccggttaccaggtccaggcctccacccgcttccacgtggtggcctacgacttcggcgtcaagcacaacatcctgcgcatgctggccgaacgcggctgccagctgaccatcgtcccggcccagacgccggcggccgatgtgctggcgctgaatccgcacggcgtgttcctgtccaacggccccggcgatccggagccgtgcggctacgcgattgccgcgatccgcgacatcctggagaccaagctgccggtgttcggcatctgcctgggccaccagttgctgggcctggccaccggcgccgccacttccaagatgaagttcggccaccacggcgccaaccacccggtgcaggacctggataccggccgcgtgatgatcaccagccagaaccacggcttccaggtggatgagaccagcttgccggccaatgtccgcgtcacccaccgctcgctgttcgacggcacggtacagggcatcgcgctgaccgaccgcccggcgttctcgttccagggccacccggaagcgagcccggggccggaggacgtcgcctacctgttcgaccgcttcatcgcggcgatggcggaacggcagtaa

SEQ ID NO: 95096 - protein, 375 aa, Chromobacterium violaceum ATCC 12472
MSNLPAILVLADGTLFKGSAIGAAGHTVGEVVFNTAITGYQEILTDPSYTRQIVTLTYPHIGNVGANSEDTESRAVFASGLIIRDLPLLHSNFRAEDSLSDYLKKHNVVAIADIDTRKLTRILREKGAQAGCIMAGDIDEAKALELARGFGSMAGQDLAKVVSCQKPYAWTEKQWKLGAGYQVQASTRFHVVAYDFGVKHNILRMLAERGCQLTIVPAQTPAADVLALNPHGVFLSNGPGDPEPCGYAIAAIRDILETKLPVFGICLGHQLLGLATGAATSKMKFGHHGANHPVQDLDTGRVMITSQNHGFQVDETSLPANVRVTHRSLFDGTVQGIALTDRPAFSFQGHPEASPGPEDVAYLFDRFIAAMAERQ

SEQ ID NO: 95097 - DNA, 1074 bp, Porphyromonas gingivalis W83
  CDS (1)..(1074): transl_table=11
atgagagagcaaagaaaagcgacattgatattggacgatggtagccgtttcgaaggctattctttcggttgcgaacgtgctgtggccggagaggtcgttttcaatacggctatgaccggctatgtggagagtctgacggatccgagttatcgcggacaaatcatggttatgacctatcctttggtgggtaattatggcgttccgatgaaagcagctgagccaaacggcgtatcttgctttatggaaagcgacagaatacacatggaaggaatcgttgtgtccgactattcccattcttatagtcattggaatgctgtcgaaagccttggcgattggctcaaacgtgagcaggtattcggtctgacggggatcgacacgagggcattggccaagcacctccgcgaacacggttcgatgaaaggaaagataattctcgaaggaggcgaagacattggcttcgccgatccttacacagtcaatcaggtagcggaggcttcttgtcgtgaagtaatcgtctacggcactggaagcaaaaaggtggtactcgtcgattgtggagtgaaggacaacattattcgctcgcttctccgtgaagatataacgctctaccgtgtaccatgggattacgactttcatcgaatagcatacgacggtctcttcatcagcaacggcccgggcgaccccaatatgtgcagcgtcacagtggaacatattcgtcgggctgtggccggcgacaaacctatctgcggtatttgcatgggcaatcagcttttggcgaaagctgccggcgcaagcatcttcaagctcaaatacggacaccgcagtcacaaccagccggtacgtgaggtaggcactaataagtgctatataacgagccagaatcacggatttgctgtagatccggcatctctcggaagtgattgggaggagctttatatcaacctgaatgatggcacgaacgaaggtattcgccacaagagcaagcctttcttctctgcacagtttcatcccgaagcatgcggtggccctgtagatacaatgttcattttcgatgaattcttgaaaaacctctaa

SEQ ID NO: 95098 - protein, 357 aa, Porphyromonas gingivalis W83
MREQRKATLILDDGSRFEGYSFGCERAVAGEVVFNTAMTGYVESLTDPSYRGQIMVMTYPLVGNYGVPMKAAEPNGVSCFMESDRIHMEGIVVSDYSHSYSHWNAVESLGDWLKREQVFGLTGIDTRALAKHLREHGSMKGKIILEGGEDIGFADPYTVNQVAEASCREVIVYGTGSKKVVLVDCGVKDNIIRSLLREDITLYRVPWDYDFHRIAYDGLFISNGPGDPNMCSVTVEHIRRAVAGDKPICGICMGNQLLAKAAGASIFKLKYGHRSHNQPVREVGTNKCYITSQNHGFAVDPASLGSDWEELYINLNDGTNEGIRHKSKPFFSAQFHPEACGGPVDTMFIFDEFLKNL

SEQ ID NO: 95099 - DNA, 1134 bp, Wolinella succinogenes DSM 1740
  CDS (1)..(1134): transl_table=11
atgaaaaaagtctatctctacttcgccaacggtctctttttggaggccaagagttttggcgcctcaggcacgagcgtgggcgaaatcgtctttaacacctcgatgagcggctatcaggagatcgtcactgacccaagctatgcagggcagtttgtcaccttcacgatgccagagatcggaatcgttggaactaatgagcaggatatggagagcaggggggcattttgcaagggaatcttggtcaagcgctacaatgacaccccttccaatttccgctctcaagaatcgctttcagagtttttggagcgccatggcgtgatgggaatcaccgaaattgacacgcgctatctcaccaagatggttcgccaagagggcgcgatgatgatggtcgcctccacggaagtgagccaaaaggaggagcttcaaaagattcttcaatcctccccccacatccaagagatcaactacattgatgaggtgagcaccaaagagccctatcttcacgacaaaggattctttgattttgaggagatggactacaccaagccccagacaaaaaagaagattcttgcagtcgattttggaatcaagcgcaacatcctcaacggactcgttcaggcaggattactggtggaggtgattcctaatgattttgatccaaagagcgtgattgagcgttataagcagggtgaaatcggaggcgttttcctctccaatggtccgggagaccctgcagttttagaaaaagaggtcgccagcatcaaagagctcatgagtgcgggcgtgcccctctttgcaatctgcttggggcatcagcttctagcgcttgctcatggctatcccacctacaagctcaaatttggccaccatggcgggaatcaccccgtgaagaatctcttaagcggagaggtcgaaatcaccgcgcaaaatcacaactactctgtgcctgatgagattgaagagattgccgaggtcacctatcgcaacctttttgatggcaccatcgaggggctcaaatataaagagggcgtgatctattccgtccagcaccaccccgaagcttcccccggccctaaagaggcctcttctatctttaaaatctttgccaaaattgcctgcggagagagaatctaa

SEQ ID NO: 95100 - protein, 377 aa, Wolinella succinogenes DSM 1740
MKKVYLYFANGLFLEAKSFGASGTSVGEIVFNTSMSGYQEIVTDPSYAGQFVTFTMPEIGIVGTNEQDMESRGAFCKGILVKRYNDTPSNFRSQESLSEFLERHGVMGITEIDTRYLTKMVRQEGAMMMVASTEVSQKEELQKILQSSPHIQEINYIDEVSTKEPYLHDKGFFDFEEMDYTKPQTKKKILAVDFGIKRNILNGLVQAGLLVEVIPNDFDPKSVIERYKQGEIGGVFLSNGPGDPAVLEKEVASIKELMSAGVPLFAICLGHQLLALAHGYPTYKLKFGHHGGNHPVKNLLSGEVEITAQNHNYSVPDEIEEIAEVTYRNLFDGTIEGLKYKEGVIYSVQHHPEASPGPKEASSIFKIFAKIACGERI

SEQ ID NO: 95101 - DNA, 1155 bp, Gloeobacter violaceus PCC 7421
  CDS (1)..(1155): transl_table=11
atggcgcagcgaacggtggcgcgactggtgctggaggacggcacggcttttgagggctggtcgttcggggcgccgggtaccagtgtgggcgaggtggtcttcaataccggcatgaccggctatcaggaagtgctgaccgatcccagctactgcgggcagatcgttgccttcacgtaccccgaactgggcaacaccggcgtcaaccttgaagatgccgaatcggaccggccccaggtgcgcggggtgatcgcccacaacgtcgctgggcggcccagttcctggcgtgctacccagagtcttggggattacctgaaggaccacgccatcgtcgccatcgccagcatcgacacccgcgccctcacccgtcacctgcgcagccgcggggcaatgaacggcgccatctccacagaactctccaccgaggcgttgctcgcccgcctgcaggaggctcccgcgatgcaggggctcgatctggtgccccgggtgaccaccgccgctccctacacatggtcggaaagtaccgccgccgactggcttgccacgcgggccgccgcaggggaacggcccctgcgggtggtggccatcgacttcggcatcaagcacaacatcctgcgccgtctggccagctacggctgcgaagtgatcgtcgtaccggccgataccggtgtcgaggcgatcctcgcctatcgaccggacggcatttttctttccaatggcccgggcgacccggcggcggtgcgctacggcatcgagaccgtccagggattgctcaaaagccgcaagccgatgttcggcatctgtctgggccaccaaattctggccctggccctgggcggcgagacctacaaactcaagttcggacaccgcggcctcaaccagccggccagcttcaacaaccgcgtcgaaatcaccagccagaaccacggtttcgcggtagatgacgcctcgctggccggggcaaatatcgaaatcacccacctcaacctcaacgatcggaccgtagagggcctacgccaccgcgaactgccggtcttctcggtgcagtaccatcccgaggccagccccggcccccacgacgccgattacctgtttgcccaattcgtcgatctgatgcgcgaaaagccggcggatgccgccagcctagtcgagctatag

SEQ ID NO: 95102 - protein, 384 aa, Gloeobacter violaceus PCC 7421
MAQRTVARLVLEDGTAFEGWSFGAPGTSVGEVVFNTGMTGYQEVLTDPSYCGQIVAFTYPELGNTGVNLEDAESDRPQVRGVIAHNVAGRPSSWRATQSLGDYLKDHAIVAIASIDTRALTRHLRSRGAMNGAISTELSTEALLARLQEAPAMQGLDLVPRVTTAAPYTWSESTAADWLATRAAAGERPLRVVAIDFGIKHNILRRLASYGCEVIVVPADTGVEAILAYRPDGIFLSNGPGDPAAVRYGIETVQGLLKSRKPMFGICLGHQILALALGGETYKLKFGHRGLNQPASFNNRVEITSQNHGFAVDDASLAGANIEITHLNLNDRTVEGLRHRELPVFSVQYHPEASPGPHDADYLFAQFVDLMREKPADAASLVEL

SEQ ID NO: 95103 - DNA, 1194 bp, Rhodopseudomonas palustris CGA009
  CDS (1)..(1194): transl_table=11
atgaccaattcagcatcccatcccgcttggccggaccacaagccgaccgcgctgctcgtgcttgccgatggcaccgtgttcgaaggcttcggcctcggcgcagagggccacgccgttggcgaggtctgcttcaacaccgcgatgaccggctacgaggagatcctcaccgatccgtcctacgccgggcagctcatcaccttcaccttcccgcatatcggcaacgtcggcaccaacgacgaggatatcgagacggtgaacatggcggcgacgccgggcgcgcggggcgtgatcctgcgcagcgccatcaccgacccgtcgaactatcgctcgtcgcgccatctcgacgcctggctgaaggctcgtggcatcatcggcctgtcgggcatcgacacccgtgctctgactgcgctgatccgcagcaagggcatgcccaatgcggtgatcgcgcattcgcccaccggcgagttcgacctgcacgcgctgaaggaagaggcccgcgagtggcccggcctggaaggcatggacctggtgccgatggtcacctcggcccagcgcttcacctgggacgagacgccttgggcgtggggcgagagcttcggacggcaggacaagcccgagttcaacgtcgtcgcgattgactacggcatcaagcgcaacatcctgcggctgctggccggcgaaggctgcaaggtcaccgtcgtgcccgccaccacttcggccgaagacatcctggcgatgaagccggacggtgtgttcctgtcgaacggcccgggcgatccggccgcgaccggcaaatacgcggtgccggtgattcggaaggtgatcgagactggcgtgccgaccttcggcatctgcctcggacaccagatgctcggcctcgcgctcggcggcaagaccgtgaagatgcatcagggtcaccacggcgccaatcatccggtcaaggatctcaccaccggcaaggtcgagatcacctcaatgaaccacggcttcgcagtcgacaaatcgacgctgccggccaatgtgcagcagacccacatctcgctgttcgatgacagcaactgcggcatcgcgctggccgacaaaccggtgttctcggtgcagtaccaccccgaggcatcgcccggtccgcaggactcgcactatctgttccgccgcttcaccgatctgatgcgcgcgaagaaagccgccgcgtag

SEQ ID NO: 95104 - protein, 397 aa, Rhodopseudomonas palustris CGA009
MTNSASHPAWPDHKPTALLVLADGTVFEGFGLGAEGHAVGEVCFNTAMTGYEEILTDPSYAGQLITFTFPHIGNVGTNDEDIETVNMAATPGARGVILRSAITDPSNYRSSRHLDAWLKARGIIGLSGIDTRALTALIRSKGMPNAVIAHSPTGEFDLHALKEEAREWPGLEGMDLVPMVTSAQRFTWDETPWAWGESFGRQDKPEFNVVAIDYGIKRNILRLLAGEGCKVTVVPATTSAEDILAMKPDGVFLSNGPGDPAATGKYAVPVIRKVIETGVPTFGICLGHQMLGLALGGKTVKMHQGHHGANHPVKDLTTGKVEITSMNHGFAVDKSTLPANVQQTHISLFDDSNCGIALADKPVFSVQYHPEASPGPQDSHYLFRRFTDLMRAKKAAA

SEQ ID NO: 95105 - DNA, 1125 bp, Geobacter sulfurreducens PCA
  CDS (1)..(1125): transl_table=11
atgaaagcagtcctagcgctcgccgatgggcgcgtctttgaagggaaatcattcggtgccaccggcgaggccgtcggcgaggtggtcttcaacaccgccatgaccggctaccaggaggtcctgaccgatccttcctaccgtgggcaaatggtcaccatgacctatacccagatcggcaacaccggcatcaacccggaggacatcgagagcaagcagctctacctgtcgggcttcatcgtcaaggaataccacgattgctactccaactggcgtgccaccatgagcctcgacgcctatctcaaggagaacggcgtggtcggcatacaggggctcgatacccgggcccttacccggcacctgcgggacaagggagcccagaacggtgtcatctccaccgtggattcggaccacgaaagcctggtgaaaaaggcccgtgccgtgccgagcatggccggcctcgacctggcgaccggcgtctcctgcgacaagccctaccactggaccgagaagctctgggacctggaggccgggtacaccgccgcaacacctgacgagctgaagtacaaggtggtggcctacgatttcggcatcaagtacaacatcctccgctgcctcgtgtcggccggctgcgacgtgaccgtggtgcccgcaaccttcccggccgacgaggccctggccatgaacccggacggcattttcctcagcaacggccccggtgacccggagcccatgaccgccgtcatcgagaacatcaggaagttcgtgggcaagaagcccatcttcggcatctgcctcggtcaccagctcctgggcctggccctgggggggcagaccatgaagctcaagttcggcaaccacggctccaacctcccggtcatggacctggacacccgcagggtggagatcactgcccagaaccacggcttctcggtggatatcgtctcgctcggccacgcctgcgagctggcccacgagaacctgaacgaccagaccgttgaagggatgaagcacaaagacctcccgatcttttcggtccagcaccaccccgaggcatcgcccggcccccacgattcccactacctgttcgggcgcttcgtggagttgatggagaaggaaaaggcatag

SEQ ID NO: 95106 - protein, 374 aa, Geobacter sulfurreducens PCA
MKAVLALADGRVFEGKSFGATGEAVGEVVFNTAMTGYQEVLTDPSYRGQMVTMTYTQIGNTGINPEDIESKQLYLSGFIVKEYHDCYSNWRATMSLDAYLKENGVVGIQGLDTRALTRHLRDKGAQNGVISTVDSDHESLVKKARAVPSMAGLDLATGVSCDKPYHWTEKLWDLEAGYTAATPDELKYKVVAYDFGIKYNILRCLVSAGCDVTVVPATFPADEALAMNPDGIFLSNGPGDPEPMTAVIENIRKFVGKKPIFGICLGHQLLGLALGGQTMKLKFGNHGSNLPVMDLDTRRVEITAQNHGFSVDIVSLGHACELAHENLNDQTVEGMKHKDLPIFSVQHHPEASPGPHDSHYLFGRFVELMEKEKA

SEQ ID NO: 95107 - DNA, 1056 bp, Lactobacillus johnsonii NCC 533
  CDS (1)..(1056): transl_table=11
atgaaaagatatttaattcttgaagacggaactgcattttcgggacacggttttggtgctcccattactgctacaggggagctcggtattcaaacaagcaattttggatatcaggaagcaatttccgaccctgccaactttggtaagattttggcttttactactccaatgattggtggaagtggtattaatgcaatcgactatgaatcaattgatccgagtgtacgtggaataattgctaacgatattgcttttcatatttctgctaatccaacttttcaagatttaaatgattttctaaaagagaaaagaattccagcaatctacggtgttgatacccgcgctctagttcaaaaattgaagaataagcgagttattaaagcgtctattatggatacagatgatgcacatgctttcgatcaaatcaaggccctagttttaccaaaaaataaaacggcacaaatatctacaacgcatccttatgctgccccaaatattggcaaaactgtggctgtaattgatcttggtttaaagcattcactactgcgatccctttctttacgggaaattaatagcgtggttttaccatacaatgcatcaatttacgacattattaatcttcgagctgatgcaattgttatttctaatggaccaagtggagtagaagaagttgcaccatttttaaaaccagtatttgataagttttacgggaaattacctattttaggaattggcttaggctttttagcaattagtaattatttagacctagaactcttggacttaattccagcctataatggtagtaattttccagttattgaacaaactaataatcgaatttggcaaactgcaatgaatattgatcaactagtagtacctgatagtttatctttgaatctttcacgtaaatattttgatttaagatcggagttattagcaggctacagtatcaaaaaagataaagttttagcaactgcctttaatccagaaggctcaccaggtaattttgatgcagccagcatttatgatcagtttttgaatatgatggagtag

SEQ ID NO: 95108 - protein, 351 aa, Lactobacillus johnsonii NCC 533
MKRYLILEDGTAFSGHGFGAPITATGELGIQTSNFGYQEAISDPANFGKILAFTTPMIGGSGINAIDYESIDPSVRGIIANDIAFHISANPTFQDLNDFLKEKRIPAIYGVDTRALVQKLKNKRVIKASIMDTDDAHAFDQIKALVLPKNKTAQISTTHPYAAPNIGKTVAVIDLGLKHSLLRSLSLREINSVVLPYNASIYDIINLRADAIVISNGPSGVEEVAPFLKPVFDKFYGKLPILGIGLGFLAISNYLDLELLDLIPAYNGSNFPVIEQTNNRIWQTAMNIDQLVVPDSLSLNLSRKYFDLRSELLAGYSIKKDKVLATAFNPEGSPGNFDAASIYDQFLNMME

SEQ ID NO: 95109 - DNA, 1101 bp, Methanococcus maripaludis S2
  CDS (1)..(1101): transl_table=11
atgtacggaattttagttttggaagacggcacaattatccggggagaaggatttggtgcagagactgaagtcctcggtgaactcgtatttaacacttccatgaccggatacgttgaaatattaactgacccttcatacaaaggccagataattacaatgacgtatcctttagaaggaaactacggtgtcgaaaaggaatggtttgaaagcgatggaattaaagcagaaggattcgttgtaaaagatattactggaaaagaactcgacgaatttttaaaagaatacaatattccaggaatttcaggcgtagacacaagatacattacaagaaaaataagatcaaaaggggtcattagatcactcttaaaaacgtccaccaacccgataactaaagatgaagaaacagaattacttaaaaaagtagtagattatccagatatttcagaaattgaccttgttccagaagtatcaactaaagaaacagttatatacaacgcagaagatgaaaaaacaagatgtgttcttattgactgcggtgtaaaacagagcattgtagactgtctcgttgaaagaggatgcagtgttgtaaaagttccctacaactctaaaaaagaagaaattatatcatacaatccagactttgtactcgtgtcaaatggccctggagaccctgaaaacatgtctgaaacagtagaaaccgttaaaaatttaataggaatgcttccagttaccggaatttgtcttgggcaccagataattacaattgcacttggaggaaaaacatacaagttaaaattcggtcacaggggcggaaaccagccagtaaaagatgttgaatctggaaaagtatacatcacttcacaaaaccacgggtttgctactgacgataaaatagttccggcaggttctgaattgatgcacatgaacttaaacgacgataccgttgaaggaataagaaaacttgaatcaagtgacctcaaaaatacagtatggagtgttcagtaccacccagaagcagggcctggaccacatgatgcaagattcctctttgatgaaatggttgaacttggaattaaattcaaagcagaaaaagcaaactaa

SEQ ID NO: 95110 - protein, 366 aa, Methanococcus maripaludis S2
MYGILVLEDGTIIRGEGFGAETEVLGELVFNTSMTGYVEILTDPSYKGQIITMTYPLEGNYGVEKEWFESDGIKAEGFVVKDITGKELDEFLKEYNIPGISGVDTRYITRKIRSKGVIRSLLKTSTNPITKDEETELLKKVVDYPDISEIDLVPEVSTKETVIYNAEDEKTRCVLIDCGVKQSIVDCLVERGCSVVKVPYNSKKEEIISYNPDFVLVSNGPGDPENMSETVETVKNLIGMLPVTGICLGHQIITIALGGKTYKLKFGHRGGNQPVKDVESGKVYITSQNHGFATDDKIVPAGSELMHMNLNDDTVEGIRKLESSDLKNTVWSVQYHPEAGPGPHDARFLFDEMVELGIKFKAEKAN

SEQ ID NO: 95111 - DNA, 4164 bp, Drosophila melanogaster
  CDS (1)..(4164)
atggcctctacggactgttacctcgcactggaggatggcacagtgttgcccgggtactcctttggctacgttccctcggagaatgaatccaaagtgggttttggtggcgaggtggtcttccaaacgggcatggttggctacacggaggcgctcacggatcgatcgtacagtggtcagatcctggtgcttacctatccactgatcggtaactatggggtaccagcgccggatgaggacgagcacggactgccgctgcacttcgagtggatgaaaggcgtcgtccaggccaccgccttggtggtgggcgaggtggctgaagaggcatttcactggcgcaaatggaagacgctgcccgattggctgaagcagcacaaggtgcccggaattcaagacattgatactcgagccctgaccaaaaaactgagggagcagggaagcatgctaggcaagattgtctacgagaaaccgccggtcgaagggctgcccaagtccagtttcgtagatccgaacgtcaggaatttggccaaggagtgcagcgttaaggagcgacaagtgtacggtaatcccaatggcaagggaccacggatcgccattctggactgtggactgaagctcaaccagttgcgctgcctgctgcaacgtggcgcctcggtgaccttgctcccctggagcgctcgtctcgaggatgagcagttcgacgccctctttctgtctaacggacctggtaatccggagagctgcgaccagatcgtccaacaggtgagaaaagtgattgaggagggtcaaaagcccgtctttggaatatgtctgggtcaccagctgttagcgaaggcaatcggctgctctacttacaaaatgaagtacggcaatcgaggacacaatctgccctgcctgcaccgagcaactggacgttgcctgatgacgtcgcagaatcacggatacgcggtcgatttggagcagttgcccgacggctggtcggagctatttgtgaatgccaacgacggcaccaacgagggcattgtccatgccagcaagccctacttttcggttcagttccatccggagcatcatgctggaccgcaggacacggagttcctgttcgatgtctttatggagagcattcaacagaaggatttgaccattccgcagctgatcgagcagcgactgcgtccgactacgcctgccatagattcggctccagtgatgccgcgcaaagtcctaatcctgggatccggtggactgtccattggtcaggctggcgagtttgactactccggatcgcaggccatcaaggccatgagggaatcaaacattcaaacagtgctcatcaatccgaacatagccaccgttcagacctctaagggaatggccgacaagtgctacttccttcccctaacacctcactatgttgagcaggtgattaagtcggagcgtccgaacggagtactgctcacctttggcggccagaccgctctcaattgtggcgtgcaactggagcgagccggagttttctccaaatacaatgtccgcattttgggcacacccatccagtcgatcatcgagacggaggatcgcaagctctttgccgagcgggtcaacgagattggcgagcaggtggcgccatctgaggctgtgtactccgttgcccaggcactggatgcggccagtcgcttgggttatccggtgatggcccgtgctgccttctccctgggcggactgggttccgggttcgccaacaacgaggaggagctgcagagcctggcccaacaggcactggcccactcgagccaactaattgtggacaaatccctgaagggttggaaggaggtggagtacgaggtggtgcgcgatgcctacaacaactgcattaccgtatgcaacatggagaacttcgatcccctgggcatccacacgggcgagagtattgtggtggccccatcgcagaccctctcggatcgcgagtaccaaatgctccgcagcaccgccctgaaggttatccgtcactttggtgtcgttggcgagtgcaacattcagtacgccttgtgtccccattcggagcagtactacattatcgaggtgaacgcccgactgtcgcgcagctccgcgttggccagcaaggccaccggctatccactggcctatgtggccgccaagttggctttgggattgcccctgccagatatcaagaactcggtgacgggcaatacgacggcctgctttgagccatccctcgattactgtgtggtcaagattccacgctgggatttggccaaattcgtgcgggttagcaagcacattggcagctcgatgaaaagtgtcggtgaggtgatggccatcggtcgcaacttcgaggaagcgttccaaaaagccctgcgcatggtggacagcgatgtgcttggctttgatccggatgtggttccgcttaacaaggagcagctggccgagcagctttcggagccgacggatcgtcgtcccttcgtcattgccgctgctttgcaattgggcatgagccttagggagctgcatcaactaaccaatatcgattattggtttctggaaaagctggaaaggatcatcttactgcagtccctgctcacccgtaatggcagtcgaaccgatgccgctctgctgttgaaggccaagcgttttggtttttcggacaagcagatagctaagtacattaagagcacggagctggctgttcgtcaccagcggcaggagtttggcatccgcccgcatgtcaagcagatcgacacggtggccggcgaatggcccgccagtaccaactatctgtaccacacatataacggaagcgagcacgatgtggacttccccggcggacacactattgtggtgggctcgggcgtctatcgtatcggatcctcagtggagtttgattggtgtgccgtgggctgcctgcgcgaattgaggaagctacagcgacccaccatcatgattaactacaatcctgaaacggtttccaccgactacgatatgtgcgatcgcttgtatttcgaggagattagcttcgaggtggtcatggacatctacgagatggagaatagcgagggcatcattctgtccatgggcggccagctgcccaacaatatagccatggatctgcatcgccagcaggcgaaggtgttgggcacatcgccggagtccatcgactgtgccgaaaatcgatttaaattctcgcgcatgctggacaggaagggtatcttgcagccacgctggaaggagctgaccaacctacagtcggccatcgaattttgcgaggaggttggctatccctgtctggttaggccatcctatgtgctctccggtgcggccatgaatgtggcctattccaatcaggatctggagacatatctgaacgccgcctccgaggtgagtcgcgagcatccggttgtcatttcgaagttcctcaccgaggccaaggagatcgatgtggatgcagtggcatccgatggacgcatcctgtgcatggctgtttcggagcacgtggagaatgccggagtgcattcaggtgatgccacgctggttaccccaccgcaggatctgaatgcggagaccctggaggccattaaacggatcacatgcgatttggccagcgtactggatgtcaccggtcccttcaacatgcagctaattgccaagaacaacgagctgaaggtcatcgaatgcaatgtccgtgtgtcgcgatccttccccttcgtctccaagacgctggaccacgactttgtggccacggcgacgcgtgcgattgtgggactcgatgtggagccactggatgtgctccatggcgtcggcaaggtgggcgtcaaggtgccacagttcagtttctcgcggctcgcgggcgcggatgtacagctgggcgtcgagatggcctccaccggtgaggttgcctgcttcggggacaaccgctatgaggcgtatctcaaggccatgatgtccacgggcttccagatacccaagaacgccgtacttctctccattggcagtttcaagcacaagatggagctgctgccttccatacgggatctggccaagatgggttacaagctatacgcttccatgggcactggcgacttttatgccgaacacggagttaatgtgagtatatttatgtctgtgtgcttattgtatatcatgcaactttaa

SEQ ID NO: 95112 - protein, 1387 aa, Drosophila melanogaster
MASTDCYLALEDGTVLPGYSFGYVPSENESKVGFGGEVVFQTGMVGYTEALTDRSYSGQILVLTYPLIGNYGVPAPDEDEHGLPLHFEWMKGVVQATALVVGEVAEEAFHWRKWKTLPDWLKQHKVPGIQDIDTRALTKKLREQGSMLGKIVYEKPPVEGLPKSSFVDPNVRNLAKECSVKERQVYGNPNGKGPRIAILDCGLKLNQLRCLLQRGASVTLLPWSARLEDEQFDALFLSNGPGNPESCDQIVQQVRKVIEEGQKPVFGICLGHQLLAKAIGCSTYKMKYGNRGHNLPCLHRATGRCLMTSQNHGYAVDLEQLPDGWSELFVNANDGTNEGIVHASKPYFSVQFHPEHHAGPQDTEFLFDVFMESIQQKDLTIPQLIEQRLRPTTPAIDSAPVMPRKVLILGSGGLSIGQAGEFDYSGSQAIKAMRESNIQTVLINPNIATVQTSKGMADKCYFLPLTPHYVEQVIKSERPNGVLLTFGGQTALNCGVQLERAGVFSKYNVRILGTPIQSIIETEDRKLFAERVNEIGEQVAPSEAVYSVAQALDAASRLGYPVMARAAFSLGGLGSGFANNEEELQSLAQQALAHSSQLIVDKSLKGWKEVEYEVVRDAYNNCITVCNMENFDPLGIHTGESIVVAPSQTLSDREYQMLRSTALKVIRHFGVVGECNIQYALCPHSEQYYIIEVNARLSRSSALASKATGYPLAYVAAKLALGLPLPDIKNSVTGNTTACFEPSLDYCVVKIPRWDLAKFVRVSKHIGSSMKSVGEVMAIGRNFEEAFQKALRMVDSDVLGFDPDVVPLNKEQLAEQLSEPTDRRPFVIAAALQLGMSLRELHQLTNIDYWFLEKLERIILLQSLLTRNGSRTDAALLLKAKRFGFSDKQIAKYIKSTELAVRHQRQEFGIRPHVKQIDTVAGEWPASTNYLYHTYNGSEHDVDFPGGHTIVVGSGVYRIGSSVEFDWCAVGCLRELRKLQRPTIMINYNPETVSTDYDMCDRLYFEEISFEVVMDIYEMENSEGIILSMGGQLPNNIAMDLHRQQAKVLGTSPESIDCAENRFKFSRMLDRKGILQPRWKELTNLQSAIEFCEEVGYPCLVRPSYVLSGAAMNVAYSNQDLETYLNAASEVSREHPVVISKFLTEAKEIDVDAVASDGRILCMAVSEHVENAGVHSGDATLVTPPQDLNAETLEAIKRITCDLASVLDVTGPFNMQLIAKNNELKVIECNVRVSRSFPFVSKTLDHDFVATATRAIVGLDVEPLDVLHGVGKVGVKVPQFSFSRLAGADVQLGVEMASTGEVACFGDNRYEAYLKAMMSTGFQIPKNAVLLSIGSFKHKMELLPSIRDLAKMGYKLYASMGTGDFYAEHGVNVSIFMSVCLLYIMQL

SEQ ID NO: 95113 - DNA, 4512 bp, Strongylocentrotus purpuratus
  CDS (1)..(4512)
atggctcatcttacagcagtatctggatttctgaagaaaacttggtccctccctcgctaccttgctaacaagtccaggttcctctcgacaagttctagtcttcagaaagagaaacagaagcctacttcggctcatctgattctccaagatggtactacgttcaccggctattccttcggtcatcacaaatcagtggctggagagctggtcttcaacactggccttgtagggtacccagagtcactgaccgacccaagctacagaggtcaaatcctgacgttgacctatcccattgttggtaactatggagtaccagacaccaaggctagggatgaaaatggtctcatgaagcatgtagaatcagaaaagatacaggctacaggcatgttagtccaggactactcttaccactacagccactggaactctgtcaagtctctctcggaatggctcacagaggaagaggtaccagccctctatgggatcgataccaggatgctgacaaagaaagtcagggataagggtaccatcctatgcaagatagagtttgatggtgatcctatagagttcgataaccccaatgaaaggaacttgatggcagaggtctctaccaaggaggtgaagatctttggcaaggggaatccccataagattgtcaccgtggattgtggtatcaagcacaacatcattcgcagtctggtcaagagaggagctgaagttcatctagtaccatgggattatgactacaatcagattgaatatgatggtctgtttatatctaatggacccggtgatccagccctggccactgctgctatagataacctcaaacaggtattggctcaggagaatccaaaccccctgtttggtatctgtatgggaaatcaactgactggtttagctgctggtgccccttcctacaagctacctctcggtaacaggggccataaccaaccagtgatcaatatcttgactggtcaagcattcatcacatctcagaaccatggctttgctatagacagtgagaagttacccccagattggacaccaatcttcatcaacgccaatgatcaaactaatgagggtatcatgcataagacaaagccaatcttcacagcacagtttcatcctgaacataaaggaggtccgacagacacagagtttctatttgacaatttcatggacatggttaggagtggtaagaccatgaaagatctaacttctaacttgaccacatcgagcaagagagctgagaggactgaggtcaagaaggtactgatgctagggtctggaggattgtccatcggtcaagcgggagagtttgattactctggctctcaggctattaaggcactcaaggaggagaaggtcaagactatcctgatgaaccctaacatagcctctgtgcagaccaatgagtatggtgagaagcaggccgacagtgtctactttgtaccaatcactccagagtttgtcaccgatgtcatcaagagggagaaacctgatgggatcctgctctccatgggaggccagacagctctcaactgtggagtggagctctacaagagagggatcctgcaggagtatggagtacgggtgttgggtacacccattgaatccatcatggctacagaggatagacagacattcaatgataaactcatggagatcaatgagaagattgctccaagtgcagcggtggaaacagtatctgatgccattgatgcagccagaaagattggctatcctgtgatggttagggcagcatacgccctcggaggccttgggtcaggggtcgcagaggatgaggaagctctgcgggcgatagcgacaaggggtctagccttgtccaaccagctattgatagagcagtctctactaggatggaaggaggtagagtatgaggtcgttagagatgcttcagataactgtgtcactgtgtgcaacatggagaactttgatccacttggagttcacacaggtgattcgatagtcgttgctccgagccagactctatccaaccaggagtaccatatgctgagagaaacggcgatcaagtgcgtccgccatcttggtatcataggggagtgtaacatccagtatgctctcaatcctacttccctggagtactgcatcatcgaggtgaacgctaggctgtcgaggagctctgctttggcttctaaagctacagggtaccccttggcctttatcgccgccaaacttgccctggggatcagccttcctgatatcaagaacagcactacccaggccaccacagcctgctttgaacctagtctggactacatcgtcaccaagatccctcgttgggacctggaccgcttccatggtacctccaatcagattggcagcgccatgaagagtgtgggagaggtgatggccatcgggcgtacctttgaggagagtcttcagaaggcacttcgtatgatccacccttctatagacggcttcaccccagaccttcccagtggcaagaaactaccaggcaaactggaagacgagctgagagtaccgtctagcaaccgtatctatgccattgccaaggcatttcaagatggtttctcagttgataagatccatgatttgacgtccattgataagtggttcctacataagctggataaaatcaaagacatagatgatgagctgggagaattcaatgctcaaactgtaccccgtaccactctgctggaagccaaaggtgccggtttctctgacaaacagatcggcaagaagattggactccgagagaccgatgctaggaaactcagactttatcatgacattgctccgtgggtcaagcagattgatacaatggcagctgagtacccagctaagacaaactatctctactgcacttacaatggcatggaacatgacatttcatttgatgacagaggtacaatggttcttggatgtggcccatatcacataggtagcagtgttgagtttgactggtgtgcagtgtccagtatccggtcactccgtgagatgggccgtaagaccgtcgtggtcaaccacaaccctgagacggtcagcacagactttgatgagtgtgaccgtctttattttgaggagctgtcccgggagagggttctggatatctatcaacatgagggttgtaccggaatgatcatatccgtgggtggacagatacccaacaacctagcgttacctctctacaatgatggcgtcaacatcctgggtaccagccctctacagatccatgctgtggaagagaggtcaatcttctcagccattctggatgatctcggtgttgatcaagccccctggagagcccttgcatcactggacgaagctctggagtttgctgctagtgttggctatccatgtcttctcagaccttcatttgttctcagtgggtcagcaatgaatgttgcctttggcccagaggaactgaaaggattcttggaggaagctaccaatgtatcaaaggaacatcctgttgtcatcaccaagttcatagagggcgccagagaggtagagatggatgctgtggccaggaacggcaaggtgattgctcatgctgtgacagagcatgtggagaatgcaggagtacattcaggagatgctactctcatcctaccacctcatactcttactgatgaacaacagaggaaggtgagggacatgactgccaagattgctcaacgtttccagatctcagggccattcaacatgcagttcttagtcaagaatgatgaagtcaaggtgattgagtgcaatctgcgagcttctcgctcattcccgttcgtctccaagacaatcaactgtgatttcatcaacgtagcaaccaagatcatggtgggagaacatatagaccctagtctccttccaagcctcaagaacccatttgttccacagggatatgttggcatcaaggctccgatgttctcctggcccagactgcgtgatgctgatccgctgctcaggtgcgagatggcctcgacgggagaggtggcatgttttggtcccaatgttccgacagcattcctcaaagccttgctctccacaggattcaaggtgcctaagaagggcatcatgatcggtatacagaagaccttccaatctcagttccttcctaccgccatgaagttccaccagatggggtacgagttgtatgccactgaggcaacagcagcttacctggaggcccacaacattcctaccactaatgttggttggccactcgtcgacctacacgagaagagtgatgccacaaatgccaccaagttgatctatgagggtgatattgatctcgtcatcaaccttcccaatcataacaccaagtatgtcaaggacaacttccttatacgacgagctgctatcgactccgcagtccctctcttcaccaactttgaggtggtgaagttgtttgctgaagctctagatcatgtggggcagctggatgctacatccctcttccactacaagcgtcctacaggcaagacggacaaggtgataacgtcgtga

SEQ ID NO: 95114 - protein, 1503 aa, Strongylocentrotus purpuratus
MAHLTAVSGFLKKTWSLPRYLANKSRFLSTSSSLQKEKQKPTSAHLILQDGTTFTGYSFGHHKSVAGELVFNTGLVGYPESLTDPSYRGQILTLTYPIVGNYGVPDTKARDENGLMKHVESEKIQATGMLVQDYSYHYSHWNSVKSLSEWLTEEEVPALYGIDTRMLTKKVRDKGTILCKIEFDGDPIEFDNPNERNLMAEVSTKEVKIFGKGNPHKIVTVDCGIKHNIIRSLVKRGAEVHLVPWDYDYNQIEYDGLFISNGPGDPALATAAIDNLKQVLAQENPNPLFGICMGNQLTGLAAGAPSYKLPLGNRGHNQPVINILTGQAFITSQNHGFAIDSEKLPPDWTPIFINANDQTNEGIMHKTKPIFTAQFHPEHKGGPTDTEFLFDNFMDMVRSGKTMKDLTSNLTTSSKRAERTEVKKVLMLGSGGLSIGQAGEFDYSGSQAIKALKEEKVKTILMNPNIASVQTNEYGEKQADSVYFVPITPEFVTDVIKREKPDGILLSMGGQTALNCGVELYKRGILQEYGVRVLGTPIESIMATEDRQTFNDKLMEINEKIAPSAAVETVSDAIDAARKIGYPVMVRAAYALGGLGSGVAEDEEALRAIATRGLALSNQLLIEQSLLGWKEVEYEVVRDASDNCVTVCNMENFDPLGVHTGDSIVVAPSQTLSNQEYHMLRETAIKCVRHLGIIGECNIQYALNPTSLEYCIIEVNARLSRSSALASKATGYPLAFIAAKLALGISLPDIKNSTTQATTACFEPSLDYIVTKIPRWDLDRFHGTSNQIGSAMKSVGEVMAIGRTFEESLQKALRMIHPSIDGFTPDLPSGKKLPGKLEDELRVPSSNRIYAIAKAFQDGFSVDKIHDLTSIDKWFLHKLDKIKDIDDELGEFNAQTVPRTTLLEAKGAGFSDKQIGKKIGLRETDARKLRLYHDIAPWVKQIDTMAAEYPAKTNYLYCTYNGMEHDISFDDRGTMVLGCGPYHIGSSVEFDWCAVSSIRSLREMGRKTVVVNHNPETVSTDFDECDRLYFEELSRERVLDIYQHEGCTGMIISVGGQIPNNLALPLYNDGVNILGTSPLQIHAVEERSIFSAILDDLGVDQAPWRALASLDEALEFAASVGYPCLLRPSFVLSGSAMNVAFGPEELKGFLEEATNVSKEHPVVITKFIEGAREVEMDAVARNGKVIAHAVTEHVENAGVHSGDATLILPPHTLTDEQQRKVRDMTAKIAQRFQISGPFNMQFLVKNDEVKVIECNLRASRSFPFVSKTINCDFINVATKIMVGEHIDPSLLPSLKNPFVPQGYVGIKAPMFSWPRLRDADPLLRCEMASTGEVACFGPNVPTAFLKALLSTGFKVPKKGIMIGIQKTFQSQFLPTAMKFHQMGYELYATEATAAYLEAHNIPTTNVGWPLVDLHEKSDATNATKLIYEGDIDLVINLPNHNTKYVKDNFLIRRAAIDSAVPLFTNFEVVKLFAEALDHVGQLDATSLFHYKRPTGKTDKVITS

SEQ ID NO: 95115 - DNA, 6750 bp, Nasonia vitripennis
  CDS (1)..(6750)
atgaccgtgaaaagtaaggccgatgaggcacccaagtgctacctcatactcgaggatggcagcgtctttccgggcacgagcttcggcgctcacaaggaagtcgacggagagatcgtttttcaaacagggatggtcggatatcccgaatcgctgaccgacccgtcctactgcgagcagatcctggtgctgacgtatcccctgatcggcaattacggcgtaccgagccacgagaaggatgagaacgacttgccaagatggttcgagtcccacaagatatgggcagccggtctcgtggtcagcgagcactgcgacacaccgagtcactggcgtcagaccaagtcgctgtcggactggatgcgcgacgagggtatccccggaatccaaaaagtcgacacccgtgccctcactaagatcatccgagaaaagggcactatcctcggtagaatcgtccactcgctaccagcggacctcaagaccctaccggctgtcgtcgatcccaacagtcacaacctcgtcgccaaagtttcacgcgtgagtacatcgaaagcaacgttcaaccctaaaggttcgccgcgcatctgcgtcgtggattgtggtctcaagtacaaccagttgagatgcctaactgctcgtggtgctcgagtcgacgtcgttccctggaaccacaagatccaggaagagcagttcgatggtctgttcctcagcaacggacccggtgaccctagtatgtgcaaagagacccttgacaatctcaagaagatcctcgcctcggccaacaagaaacctatattcggcatctgtttggggcatcagctgttgtcactagcagctggatgcaaaagttacaaaatgagatacggtaatcgcggtcacaaccagccagccgtgcaccaaggcaccgaccggtgctacatgacctctcaaaaccacggtttcgccatcgatgctaccagtctgcccaaggactgggaagtcctcttcaccaatgccaacgaccaaagtaacgagggtatcgttcactcaaatctgccgtatttctcagtacagtttcacccagagcacacagctggtccccaggacctcgaatgcctcttcgacgtcttcctggacagcgtccgtgactcgatgaccgccaagtccggcaacagcgtcaagcagcgcttgcatcagaagctcgagtatcagccggagaagccggtgtcgttggattatcccaggaaggttttgattcttggctccggaggcctgagtataggacaagctggagagtttgattactcaggctcgcaggctatcaaggctctgaaggaggaaaacatccagacggttctaatcaatccgaacatcgccactgtccagacgtccaagggaatggcggacaaggtttacttcttgccgattttgcccgactacgtcgaacaggttattcaatctgagcgaccggacggtgtacttcttactttcggtggtcagacggccttgaattgcggtgtccagctgcaaagtcgtggaatcttcgagaagtacggggtcaagattttaggtaccccgattgagtcgataattgaaaccgaagaccggaagttgttcgccgatcgagtgaatgaaatcgacgagaaagtagcccccagttgtgctgtatactccatacaagaagccctcgaagctgctgagaagctgggctatccagtcatggcgagagcagccttttcgcttggtggtttgggctctggatttgccaataccccagaggagttgaaagctttggctcagcaagcgctcgctcactcttcacagttgatcattgataagtcgttgcaaggatggaaagagatcgaatacgaagtggttcgagatgcttacgacaactgcatcaccgtctgtaacatggagaacgtcgatccacttggtatccacacgggtgaatctatcgtagtagctccaagccagactctttcaaaccgagagtacaacatgctcaggacgacagcaattaaggtgatccggcatcttggcgtcgtcggagaatgtaacattcaatacgcgttaaatcctttctctgaggaattttatattatcgaagtcaacgccagactatccagaagttcagctcttgccagcaaggctactggttatccacttgcgtacgttgctgcaaagttggcgctaggtataccattacctgatatcaaaaacttagtaactggcaaaactaccgcttgcttcgagcctagtctggattactgtgtcgtcaagattcccagatgggatcttagcaaattccagagagtcagcacaaagattggcagttctatgaagagcgtgggagaagtcatggcgataggtcgctgcttcgaggaagctttccagaaggctttgagaatggtagacgaaaacgtcgtcggtttttgcccttatctgaaatctgtcaacgaggacgagctcgagaagcctacggacaagcgaatgttcgtcttggctgctgcaattaaggccggttataccaccgaaaaaatttaccagctaactaagatcgaccaatggtttcttgaaaaaatgcgtaatatcatcgtgtaccagaaccgtttagaagatctagagcagaccaagctcacgtacgaggtgttactaagagccaaacagcttggtttctccgataaacagattgctatggctgtgaaaagtaccgaactggctattcgcaagcaaagaaaggaaatgagcattcttccattcgtaaaacaaatagacactgttgctgctgaatggcctgctagcacaaattatctctatctaacatataatgggacgagccatgatttgggattccctgagggatacgtcatggtcattggttcgggcgtttaccgtatcggtagttcagtagagttcgattggtgcgccgttagttgtctgcgcgaattacgcaaccttggcaaaaagacaatcatggtgaattacaatccggagaccgtgagtacggactacgacatgagcgatcggctgtacttcgaggaaatctctttcgaggtggtgatggacatttacgaccaagaggcacctgaaggcataatcctctcaatgggcggacaactgccaaacaatatagccatggacctacatcgacaggaggcccgtatccttggcacctcgcccgaacaaatcgacggtgcagaaaaccggttcgagttctcgagaatgcttgacagaatcggagtcctacagccaaaatggagagaattgacgaatttggaagcagccgttgagttctgccgagacgttggctacccttgtcttgtacgtccttcttacgtactcagtggtgcagctatgaacgtggcccactctgacaacgacctacaaacttacctgaagagtgccgccagtgttagtaagaaacatcctgtagttatctccaagttcatacttgaagctaaggagatcgacgttgacgcagttgcttaccatggcaatattctttgcatggctgtgtccgagcacgtggagaacgctggtgttcactcgggagatgctactcttgtcacgccaccgcaagacattaatctggagactctagagaagatcaaaatcataacgaggcagatcgctcataatttggaggtcacgggaccgtttaatatgcaactcattgcaaagaacaacgaattaaaagtcatcgagtgtaacgttcgagtctcaagatcattcccgtttgtttcaaaaactttaaatcatgatttcgttgcaatggctactagattgattatgggagaacccgttgagcccgtcgacgtcctagcaggctgcggaaaagtcggagttaaagtgcctcaattctctttttcgagattaacaggtgctgaagttatgttgggagttgaaatggcgtcaactggtgaagtagcttgtttcggtgacaacaggtacgaagcgtatttaaagggcatgatgagcactggattccacattccagaaaaaggcattcttctatctattggtacctacaagcataaaacagagttgctgccgtccatcgcaaatcttcatagaatgggttacaagctttatgctagtatgggaacagcagatttttactcggagcataaaattgacgtgagtacattattttggtgtttggacgggactgcccccgatggtgtaaacggtcatctgcggaggcgacagacaagtctcgaggtatctttcggcaccagggaagctcaggttccagtcgagcttccagagaccggtggtgcagcgactcgctgctgtcgctatcagcgccaccgaagccgtaaccgccgttcgtcagctgatttcttcacatacacaattgcattatatctttcaaagattatgtgtatatacgtatatacagccatgctgttgctggatggcaaagctccgcgcatgaagacccacaccgactgcatgacatctcgtcgcctgttacgtctgcctggttttatcgacgtccacgtgcacgtgcgtgatcctggcgccacttacaaggaggacttcgcctcgtgcaccgccgcagctctcgccggtggtgtcactaccatcctggcaatgccgaacaccaatccggccatcgtggacaaagaagccttttccgtcgccaaggagcgcgcgaaagctggtgcccgatgcgattacgccctgtacgcgggcgcctcttctgagaattggtcttctatcaaggaaatcgctcctctcaccgcgggactcaagatgtacctgaacgaaaccttcacgacgctgcgtctcaacgatcttggtgtctggactaagcatttcgagaactggccgcataagtatccgatttgcgtgcacgctgagggtcagactactgcggctgtgctgttgatggccaatctgcacaacagaccgattcacgtgtgccatgtggcgaggaaagaggagattcagattattcgggcagccaaggagaagggtttggccgtaacgtgcgaagtttgtccgcatcatctattcctatgtcaagacgaccttgacagaatcggtcatggctggggcgaagttcgaccggtactgagcaccaaggaggacgtacaggcactttgggataacatggatattatcgatgttttcgctactgatcacgcccctcacactgtggaagaaaagtctcgggcatcgccaccaccaccaccaggtttcccgggtctggaaactgttctgcctctgctcttgaacgcggtgcacgaaggcaaactcgaaatggaggacatcatcgagaaattctaccgcaatccgaaaaagatcttcaacattccggatcagcccaacacttatgtcgaggtcgatttagatgaagaatggattgttccgaaatcgatgaacttcagtaaatccaagtggacgcccttcgctggtatgaaaattcgcggctcggttcaccgagttgtcctccgcggagaggtagcctacgttgaaggtcaagtgctggttaatcccggtttcggccaggactacagagaagctcagagaaatattaaacttgcggtacccgctgtacatccacctactgctgaaatcaccagtagacccagctcggcgctggataatttgctttcgcccaagaatttatttgattcattggtatccgccgtagatgcttacggaaatctgatccagcctgcgcccaagtcaacggtccactttgctccagactatatgccccagcaacgagtttcatcgcctttgccgtttagcaattcgactcattacaagagtgacagcaaccctaatttgattgtccaaccacacgtaccaacgacacttccacctgtaagccatgggcttactggacaccatgttctttccgtcgatatgttccagaaggaacaattgaaggaaatcttcgacattgctcatgacatgcgaaagagcatactcgctgacagatcattagatcatattctcaggggaaaagtgatggcttcgatgttctacgaagtaagcacgaggacatcttgcagttttgacgctgcgatgcaacgattgggtggtagagtcattcacatggacgaaaacaagtcatcggttaagaaaggagaaaccctcgaagattccgtcgcaattatggccggctacgctgacgtagtagtgcttagacattcagagcgcggcgcagtcaatagagcagctgtgcgctgtcgcaaacccttgatcaatgcaggtgatggtgtaggtgaacatcctactcaggcattactagacgtgttcaccatccgagaggaaatgggtaccgtgagaggtctcaccgtcacaatggtcggtgatttaaagcacggtagaaccgttcactctcttgcaaggttgttggcattgtatgaaaacgtacaattgcgctacgtcagtccgcccaacttgggtatgccggatgagattgtgaaatacgtggccagtaagggaattccccaggagaaagtcagtaggctcgaggatgttcttggagagaccgatatcctctatatgaccagaattcagcgagagcgatttgcctctcaagaagaatacgacaaggcatcgggacactttgtggtgacgccgcagttgatgtggcgcgccaagaataaaatgcgcgttatgcacccgctaccgcgcgtcgatgagatcagtccagagtttgacaacgacccgcgtgcggcatacttccgccaagctgagaacggcgtctacgtacgcatggccctcctcgccatggttctgggccgttgctaa

SEQ ID NO: 95116 - protein, 2249 aa, Nasonia vitripennis
MTVKSKADEAPKCYLILEDGSVFPGTSFGAHKEVDGEIVFQTGMVGYPESLTDPSYCEQILVLTYPLIGNYGVPSHEKDENDLPRWFESHKIWAAGLVVSEHCDTPSHWRQTKSLSDWMRDEGIPGIQKVDTRALTKIIREKGTILGRIVHSLPADLKTLPAVVDPNSHNLVAKVSRVSTSKATFNPKGSPRICVVDCGLKYNQLRCLTARGARVDVVPWNHKIQEEQFDGLFLSNGPGDPSMCKETLDNLKKILASANKKPIFGICLGHQLLSLAAGCKSYKMRYGNRGHNQPAVHQGTDRCYMTSQNHGFAIDATSLPKDWEVLFTNANDQSNEGIVHSNLPYFSVQFHPEHTAGPQDLECLFDVFLDSVRDSMTAKSGNSVKQRLHQKLEYQPEKPVSLDYPRKVLILGSGGLSIGQAGEFDYSGSQAIKALKEENIQTVLINPNIATVQTSKGMADKVYFLPILPDYVEQVIQSERPDGVLLTFGGQTALNCGVQLQSRGIFEKYGVKILGTPIESIIETEDRKLFADRVNEIDEKVAPSCAVYSIQEALEAAEKLGYPVMARAAFSLGGLGSGFANTPEELKALAQQALAHSSQLIIDKSLQGWKEIEYEVVRDAYDNCITVCNMENVDPLGIHTGESIVVAPSQTLSNREYNMLRTTAIKVIRHLGVVGECNIQYALNPFSEEFYIIEVNARLSRSSALASKATGYPLAYVAAKLALGIPLPDIKNLVTGKTTACFEPSLDYCVVKIPRWDLSKFQRVSTKIGSSMKSVGEVMAIGRCFEEAFQKALRMVDENVVGFCPYLKSVNEDELEKPTDKRMFVLAAAIKAGYTTEKIYQLTKIDQWFLEKMRNIIVYQNRLEDLEQTKLTYEVLLRAKQLGFSDKQIAMAVKSTELAIRKQRKEMSILPFVKQIDTVAAEWPASTNYLYLTYNGTSHDLGFPEGYVMVIGSGVYRIGSSVEFDWCAVSCLRELRNLGKKTIMVNYNPETVSTDYDMSDRLYFEEISFEVVMDIYDQEAPEGIILSMGGQLPNNIAMDLHRQEARILGTSPEQIDGAENRFEFSRMLDRIGVLQPKWRELTNLEAAVEFCRDVGYPCLVRPSYVLSGAAMNVAHSDNDLQTYLKSAASVSKKHPVVISKFILEAKEIDVDAVAYHGNILCMAVSEHVENAGVHSGDATLVTPPQDINLETLEKIKIITRQIAHNLEVTGPFNMQLIAKNNELKVIECNVRVSRSFPFVSKTLNHDFVAMATRLIMGEPVEPVDVLAGCGKVGVKVPQFSFSRLTGAEVMLGVEMASTGEVACFGDNRYEAYLKGMMSTGFHIPEKGILLSIGTYKHKTELLPSIANLHRMGYKLYASMGTADFYSEHKIDVSTLFWCLDGTAPDGVNGHLRRRQTSLEVSFGTREAQVPVELPETGGAATRCCRYQRHRSRNRRSSADFFTYTIALYLSKIMCIYVYTAMLLLDGKAPRMKTHTDCMTSRRLLRLPGFIDVHVHVRDPGATYKEDFASCTAAALAGGVTTILAMPNTNPAIVDKEAFSVAKERAKAGARCDYALYAGASSENWSSIKEIAPLTAGLKMYLNETFTTLRLNDLGVWTKHFENWPHKYPICVHAEGQTTAAVLLMANLHNRPIHVCHVARKEEIQIIRAAKEKGLAVTCEVCPHHLFLCQDDLDRIGHGWGEVRPVLSTKEDVQALWDNMDIIDVFATDHAPHTVEEKSRASPPPPPGFPGLETVLPLLLNAVHEGKLEMEDIIEKFYRNPKKIFNIPDQPNTYVEVDLDEEWIVPKSMNFSKSKWTPFAGMKIRGSVHRVVLRGEVAYVEGQVLVNPGFGQDYREAQRNIKLAVPAVHPPTAEITSRPSSALDNLLSPKNLFDSLVSAVDAYGNLIQPAPKSTVHFAPDYMPQQRVSSPLPFSNSTHYKSDSNPNLIVQPHVPTTLPPVSHGLTGHHVLSVDMFQKEQLKEIFDIAHDMRKSILADRSLDHILRGKVMASMFYEVSTRTSCSFDAAMQRLGGRVIHMDENKSSVKKGETLEDSVAIMAGYADVVVLRHSERGAVNRAAVRCRKPLINAGDGVGEHPTQALLDVFTIREEMGTVRGLTVTMVGDLKHGRTVHSLARLLALYENVQLRYVSPPNLGMPDEIVKYVASKGIPQEKVSRLEDVLGETDILYMTRIQRERFASQEEYDKASGHFVVTPQLMWRAKNKMRVMHPLPRVDEISPEFDNDPRAAYFRQAENGVYVRMALLAMVLGRC

SEQ ID NO: 95117 - DNA, 1389 bp, Magnaporthe grisea 70-15
  CDS (1)..(1389)
atggccgccgccacgaagacggcaccggcattccgtgccgctggtgctcttgcctctaacgcccggcctgccgccaagcagctgcgcttcgtcagcagcagccagcagcagcaatttgcccacggcagcaagggccgaaagatgcccgcccagcgatcacgagccaccgccccagttgctgggctcgatgcaaccttcaccattcgtgatggccccgtgttccacggtaccgcatacggcgccaactccaacatctctggtgaagccgtcttcaccacttcgctcgtgggctaccccgagtctatgacggacccctcataccgtggccaaatcctggttttcactcagccgctcattggcaactacggtgttccgtccaaggagcgtgacgagtacaacctgctcaagtacttcgagtccccccacattcagtgcgccggcgttgtcgtctcggatatcgccgagaagtacagccactggaccgccgttgagggtctgaacgagtggtgcgcccgcgaaggtgtgcccatcatctcgggcgttgacacccgtgctattgtcacccacctccgggagcaaggttcatctcttgctcgtatcaccattggtcaggagtacgatgccgacgaggacgagagcttcgttgaccccggcctgatcaaccttgtgaagcgtgtcagcaccaaggctccttttgtggtcgagtctcccgacccaacattccacattggcctgatcgactgtggtgtgaaggagaacatcctcaggagcttggtcagccgcggagcgtccgtgactgtcttcccgtacgactacccgatccacaaggtcgcctccaacttcgacggagtgttcatctccaacggacctggtgaccctactcactgccaggagaccatctacaaccttcgtaggctcatggagacatcccctgtccccattatgggtatttgcctgggccaccagctgcttgctctggctgttggggctcgcaccttgaagctcaagtacggcaaccgggcgcacaacatccccgcactcgacttgaccactggacaatgccacattaccagccagaaccacggttatgctgttgacacgagcaccctgcccagcgagttcattgagtactttgtgaaccttaacgacggcagtaatgagggtatgatgcacaagactcgcccgattttctccacgcagttccaccccgaggccaaaggaggcccaatggacagctccttcctctttgacaagtacctcgcaaacgtgaagatgttcaagaacagcgagaaggtcttcagggacaacaggccgtcgcagctcctgctcgacatcctgagcaaggagcgtgttggtgttgagcccacgcctctggcttccactgcatga

SEQ ID NO: 95118 - protein, 462 aa, Magnaporthe grisea 70-15
MAAATKTAPAFRAAGALASNARPAAKQLRFVSSSQQQQFAHGSKGRKMPAQRSRATAPVAGLDATFTIRDGPVFHGTAYGANSNISGEAVFTTSLVGYPESMTDPSYRGQILVFTQPLIGNYGVPSKERDEYNLLKYFESPHIQCAGVVVSDIAEKYSHWTAVEGLNEWCAREGVPIISGVDTRAIVTHLREQGSSLARITIGQEYDADEDESFVDPGLINLVKRVSTKAPFVVESPDPTFHIGLIDCGVKENILRSLVSRGASVTVFPYDYPIHKVASNFDGVFISNGPGDPTHCQETIYNLRRLMETSPVPIMGICLGHQLLALAVGARTLKLKYGNRAHNIPALDLTTGQCHITSQNHGYAVDTSTLPSEFIEYFVNLNDGSNEGMMHKTRPIFSTQFHPEAKGGPMDSSFLFDKYLANVKMFKNSEKVFRDNRPSQLLLDILSKERVGVEPTPLASTA

SEQ ID NO: 95119 - DNA, 6726 bp, Apis mellifera
  CDS (1)..(6726)
atgcataagcatgcggtcgaccttaatcgtacacacaaaatcgcctatcttctcctcgaagatggttcagtcttcccgggaagacatttcggcgcggagagaccggtcgatggtgaaatagttttccagactggtatggtgggttatctagagtcgcttacagatccttcctaccatgctcaaattctagtgctcacgtatccactggtcggtaattatggagtatttgcccatgaaacggatgaacataaaatcccatattggttcgaatcggatcaaatttgggccgctggtttggtggtcggtgaaatttgcgaaactccgagccattggcgtcaaatcaaaaccctgtccgaatggatgaaggaacaaaatattcctggcatatacgaaatcgacacgagagccttgacaaaaattattcgcgagaaaggcactctgttaggtagaatcgtgctcgatccgccttcgtccaatcccatccctccgataaaagatccgaacaaacgaaatctcgtcgcggaagttgttcagtccgcgcgaagaacgtacaacgccgccggttatcctcgcatatgtgtggtagactgcggtttaaagtacaatcaattgaggtgcttgattagtcgaggtgcccgattagacgtcgtggcttgggactacgatttaaagaatatcgattacgacggcttgtttctcagtaatggaccgggcgatccggccaaatgcgaggcgacgatcgacaacattcgatcgatcctcgaatcacgaacggggaaaccgatattcggcatctgcctcggtcatcaattactatgcattgccgccggttgcgtcacgtacaagatgaattacggaaatcgcggccacaatcaaccggttacgcatcgtgggacaggtcgttgctacatgactatgcagaatcatggattcgccgtggacgcgggccaattgccagccgattgggaaccactttttaccaacactaacgataacacgaacgaaggtgttatacacaccacactcccttacttctccgtacaattccatcccgagcactcggccgggccccaagatttggaatgcttgttcgatgtttttctggacgtcgtggtcgacaacgcgaaagggggacggctctccgtcaaagagagattggaacgggaattgagctttcgcggggacgagaattgtcccaaattgtccccacggccgaagaaggtgttgatcttggggtcgggcggcctcagcattggacaagcgggcgagttcgattactcgggatcgcaggcgatcaaagcgttgcgcgaggaatgcgtgcaaacgttgctcatcaatcccaatattgcgaccgtgcaaacgtccaaaggaatggcggataaagtttattttctgcccatcatacccgaatacgtggaacaagtgatacaatcggaacggccggatggtgtgctgttaacgttcggtgggcagacggctctgaattgcggcgtggagctcgagaagaacgggatattcaagaagtacaacgtgaaaattttagggacgccgatacaatcgatcatagagacggaggatagaaagattttcgcggagcgtatagcggagatcgacgagaaggtggcgcctagcgcagccgtgtactcgatccaggaggcgttagaggcggccgaaaaattaggatatcccgtgatggcgagggcggcattctccctgggcggtttgggatcaggcttcgccaattccgtgaaagaattgcgaaatcttgcccaacaggcgttcgctcattcgaatcaattgatcatcgataagtcgttaaaaggttggaaggaggtggagtacgaggtcgtgcgggatgcgtacgacaattgcatcacagtttgcaatatggaaaacgtcgatcccctcgggattcataccggggaatcgatcgtcgtcgctccaagccaaaccttgtccaacaaggaatacaatatgcttcgaacgacagctattaacgtgatcagacactttggcattgtcggcgagtgcaatattcaatacgcgctgaatccaaataccgaggaatattacataatcgaagtaaacgcaagattatctcgcagctcggctttagcaagcaaagcaacaggatatccattggcttacgtagccgcgaagctagctctcggtgtacgtttaccggatattcacaattccgttactggaaagacgacggcttgcttcgagcctagcctcgattattgcgttgttaagatacccagatgggatctaggcaaatttcatcgggtatgcaccaagatcggcagctccatgaagagcgtgggggaggttatggcgattggccggaaattcgaggaagcttttcaaaaagctctaaggatggtcgacgagaatattaacggtttcgatccttacgtgaaaacgccgaacgacgaggaactggagaaaccgacggacaaaagaatgttcgtgctcgcagcctctataaaagctggatacacgatcgaccgattgtacgagcttacgaagatagataaatggtttcttcacaagatgaaaaacatcatcgactattacttggtgttggagaataccgatcacacgaaacaattatcccacgatgtcctgctacgtgcgaagcagattggtttctcggacaagcaaattgcctccgtggttaaaagttcggaattggccgtcaggatacaaaggcaggagaataacataaggccgatggttaaacagatagacacggttgccgctgagtggccagccacgaccaattacctttatttaacttacaacggcaccgttcacgacgtcgagtttcctggcggttacacaatggtgataggatccggagtgtatcgaatcggtagctccgtggaattcgattggtgcgcggtcagttgtctgcgagagttgagaaatttggggcggaaaacgatcatggtgaattacaatccggaaacggtgagcaccgattacgacatgagcgatcgcttgtactttgaggagatatcgttcgaggtcgtgatggatatttacgatcacgagttccccgaggggataattttatcgatgggcggtcaattgcccaacaatatcgccatggatcttcacagacagcaagcaagaattctcggcacctcgccggaatccgtggacggggccgagaatcgtttcaagttttctcgtatgctggatggcattggtatttcccaacccaggtggaaagaattgaccaacttgaaatctgcgatcgaattttgcgaggaagtcggctacccctgcttggtacgcccttcctacgtgctgagcggtgcagcgatgaacgtggcccactcgaacaacgacctcgagtcgtacttgaagagcgcgagcgaggtgaacaaggagcacccggtcgtcatatccaagttcatcctcgaggcgaaggagatagacgtggacgcggtcgccttcgacgggattatactttgcatggccgtgtcggaacacgtggagaacgcgggcgttcattcgggcgacgccaccctggtcacccccccgcaggacatcaacgcggaaacgttgacgaaaatcaaaatgatgtcgaaggcaatcgccgcatccctcggcgtcaccggccccttcaacatgcaattgatcgccaaggacaacgagcttaaagtcatcgaatgtaacgtccgggtgtcgaggtctttcccctttgtatccaagactttggatcacgatttcgtggctatggccactagattgatcgtcggggaggccgtggaaccggtggatgtactcgccggatgcggcaaagtcggggttaaagttccacaattctccttctctcgtcttgcaggggctgacgtgatgttgggagtggagatggtgtccacgggggaggtagcttgtttcggggacaatcgatacgaagcttacttgaaagggataatgagcaccggttttcacataccccagagaggaatcttgctttcgataggaagtttcaaacacaagatggaactgttaccatctattcgcagtcttcataagatgggttataaattatacgctagtatgggtaccgcagatttctatactgaacacggtgtgaaggtagagcctgtgcaatggacgttcgagaacatcagcgtgaacgaggattcgagccctagcgaacttcgacacttggccgactttctgtcgaagaaacaattcgatcttgtgattaatttaccaatgaggaacggcggtgcgcgccgggtttccaatttcatgacgcacggataccgcacgaggaggctcgccgtcgattattccgttcctttgatcacggatgttaaatgtgctaaattgctcgttgaagctatgagaatgctcggcggacgtgcacctcgaatgaaaactcacacggattgtatgtcatcgcggacgatgattaaacttcccggcttgatcgatattcacgtgcacacgcgtgatccaggcgcagtgtacaaagaagatttcgcttcttgcacggccgccgcactcgccggaggtatcaccatgatctttgccatgcccaacacaaatcccgctgtcgtcgatcatcaatcgttcgctctggccaaagaacgcgccctttcgaacgcgagatgcgattacgcaatttacgtcggcgcctcgtccgacaatcacaacataacggccgaattagccccgttggcggccggtcttaaaatgtatctcaacgagactttcacgacactccgattgtccgatctcaccgtgtggatcaagcacttccaaagttggccaaagaagtatcccttgtgcgtgcacgccgagggccagacaaccgccgcgattctgttgctggccgggttgcataacaggcctatccacgtgtgccatgtagcacgaaaggaagagattcaaataatacgcgcggctaaggagaagggaatggcagtcacttgcgaggtgtgcccccatcatttgttcctgtgcgtggacgatctcgaacgtataggacatggccgaggccaagtgaggccattgttgggaacgaaggaggatcaacaagctctttggaataatttaaatataatcgattgcttcgccacggatcatgcaccccacacgttgcaagagaaatcgagcgagaaaccaccgcccggattcccaggcctcgaaactatgctcccgcttctattgactgcggtacacgaagggaaattaacgatagaagatattatagacaaactctatagaaatccgaaaaagatatttaacgtgccagatcaatcgaacacgtacatcgaggtggatctcgacgatgagtggacgattccggaggcgatgcctttcagcaaatcaaaatggacccctttcgcggggatgaaagttcgaggttctgttcatcgcgtagtgctgagaggggaggtcgcctacgtcgaggggcaagttcttgtaaatcctggcttcggccaggatattagagagattcaatcgaagatgaaagttcagacaattgtgaacgcgcccgtgatcgacgtaaccaccagtcgaccaaattcggcgttggacggccttttgtcgcccaactacgaaaagtacaacaattacatcgagcggataactgatatgtcggaagaggatcaaaacgacacgcgcgaacaatcgaaacttttaacgagccagcaacgcacaatctcgccccttcccatcagcagcgcgacgaaatacaaaagcgacagcaacccgaatctcctgttgaccgccccggtgccgccgatcacatcggcccacgtttgccacaatctagtcgggcacaacatcctgacggtggacattttcaacaaggacatgttaaaagatatatttaacctcgcggagatccttcgcagcgctgtcagaaaggaacgactgttggatcatattttgcgagggaaattattagctacgatcttctacgaggttagcacgaggacgtcttgcagtttcgcggctgctatgcaacgactcggaggaagcgtgatatacatggacggtacaacgtcgtcggtaaagaagggagaaactttggaagattctgtaataatgatggccggatacgcggatgtagtggtgcttcgacatccagagtctaccgccattgcgagagccgcccaacactgcagaaaacctttgctgaacgccggcgacggtattggggaacaccccactcaagcgttgctcgacattttcacgataagagacgagatcgggacggtgaatgggttgacgatcaccatggtcggcgacttgaagcatggtagaacggtccattctctcgcaagattattgacactgtacaacgttgaacttcgttacgtgtgcccggccggccttggtatgcccgaccatgtcgtcaagtacgtgtccgatcacgggatacgccaggacaattttgccacgctcgaagaagctcttcccgacaccgatgttctttacatgacacgcattcaagaagaacgtttcgcctcccaagaggagtacaaaaaagtttgcggacattttataataactccacagttaatgtcacgcgcgaaaaggaaaatggtggtgatgcatccgttgccacgagtattcgagatcagtacagagttcgacatggatccgcgtgctgcttactttcgacaagccgagaacggtgtctacgttcgaatggcacttttggcgatggttcttggacgcgcgtga

SEQ ID NO: 95120 - protein, 2241 aa, Apis mellifera
MHKHAVDLNRTHKIAYLLLEDGSVFPGRHFGAERPVDGEIVFQTGMVGYLESLTDPSYHAQILVLTYPLVGNYGVFAHETDEHKIPYWFESDQIWAAGLVVGEICETPSHWRQIKTLSEWMKEQNIPGIYEIDTRALTKIIREKGTLLGRIVLDPPSSNPIPPIKDPNKRNLVAEVVQSARRTYNAAGYPRICVVDCGLKYNQLRCLISRGARLDVVAWDYDLKNIDYDGLFLSNGPGDPAKCEATIDNIRSILESRTGKPIFGICLGHQLLCIAAGCVTYKMNYGNRGHNQPVTHRGTGRCYMTMQNHGFAVDAGQLPADWEPLFTNTNDNTNEGVIHTTLPYFSVQFHPEHSAGPQDLECLFDVFLDVVVDNAKGGRLSVKERLERELSFRGDENCPKLSPRPKKVLILGSGGLSIGQAGEFDYSGSQAIKALREECVQTLLINPNIATVQTSKGMADKVYFLPIIPEYVEQVIQSERPDGVLLTFGGQTALNCGVELEKNGIFKKYNVKILGTPIQSIIETEDRKIFAERIAEIDEKVAPSAAVYSIQEALEAAEKLGYPVMARAAFSLGGLGSGFANSVKELRNLAQQAFAHSNQLIIDKSLKGWKEVEYEVVRDAYDNCITVCNMENVDPLGIHTGESIVVAPSQTLSNKEYNMLRTTAINVIRHFGIVGECNIQYALNPNTEEYYIIEVNARLSRSSALASKATGYPLAYVAAKLALGVRLPDIHNSVTGKTTACFEPSLDYCVVKIPRWDLGKFHRVCTKIGSSMKSVGEVMAIGRKFEEAFQKALRMVDENINGFDPYVKTPNDEELEKPTDKRMFVLAASIKAGYTIDRLYELTKIDKWFLHKMKNIIDYYLVLENTDHTKQLSHDVLLRAKQIGFSDKQIASVVKSSELAVRIQRQENNIRPMVKQIDTVAAEWPATTNYLYLTYNGTVHDVEFPGGYTMVIGSGVYRIGSSVEFDWCAVSCLRELRNLGRKTIMVNYNPETVSTDYDMSDRLYFEEISFEVVMDIYDHEFPEGIILSMGGQLPNNIAMDLHRQQARILGTSPESVDGAENRFKFSRMLDGIGISQPRWKELTNLKSAIEFCEEVGYPCLVRPSYVLSGAAMNVAHSNNDLESYLKSASEVNKEHPVVISKFILEAKEIDVDAVAFDGIILCMAVSEHVENAGVHSGDATLVTPPQDINAETLTKIKMMSKAIAASLGVTGPFNMQLIAKDNELKVIECNVRVSRSFPFVSKTLDHDFVAMATRLIVGEAVEPVDVLAGCGKVGVKVPQFSFSRLAGADVMLGVEMVSTGEVACFGDNRYEAYLKGIMSTGFHIPQRGILLSIGSFKHKMELLPSIRSLHKMGYKLYASMGTADFYTEHGVKVEPVQWTFENISVNEDSSPSELRHLADFLSKKQFDLVINLPMRNGGARRVSNFMTHGYRTRRLAVDYSVPLITDVKCAKLLVEAMRMLGGRAPRMKTHTDCMSSRTMIKLPGLIDIHVHTRDPGAVYKEDFASCTAAALAGGITMIFAMPNTNPAVVDHQSFALAKERALSNARCDYAIYVGASSDNHNITAELAPLAAGLKMYLNETFTTLRLSDLTVWIKHFQSWPKKYPLCVHAEGQTTAAILLLAGLHNRPIHVCHVARKEEIQIIRAAKEKGMAVTCEVCPHHLFLCVDDLERIGHGRGQVRPLLGTKEDQQALWNNLNIIDCFATDHAPHTLQEKSSEKPPPGFPGLETMLPLLLTAVHEGKLTIEDIIDKLYRNPKKIFNVPDQSNTYIEVDLDDEWTIPEAMPFSKSKWTPFAGMKVRGSVHRVVLRGEVAYVEGQVLVNPGFGQDIREIQSKMKVQTIVNAPVIDVTTSRPNSALDGLLSPNYEKYNNYIERITDMSEEDQNDTREQSKLLTSQQRTISPLPISSATKYKSDSNPNLLLTAPVPPITSAHVCHNLVGHNILTVDIFNKDMLKDIFNLAEILRSAVRKERLLDHILRGKLLATIFYEVSTRTSCSFAAAMQRLGGSVIYMDGTTSSVKKGETLEDSVIMMAGYADVVVLRHPESTAIARAAQHCRKPLLNAGDGIGEHPTQALLDIFTIRDEIGTVNGLTITMVGDLKHGRTVHSLARLLTLYNVELRYVCPAGLGMPDHVVKYVSDHGIRQDNFATLEEALPDTDVLYMTRIQEERFASQEEYKKVCGHFIITPQLMSRAKRKMVVMHPLPRVFEISTEFDMDPRAAYFRQAENGVYVRMALLAMVLGRA

SEQ ID NO: 95121 - DNA, 1179 bp, Candida glabrata CBS 138
  CDS (1)..(1179)
atgtctcaagctactttcgaaatcaagaacggtccaagtttctcaggttattcctttggtgccgataagtctatcagtggtgaagccgtgttcaccacttctctcgttgggtacccggagtcgatgactgatccctcgtaccgtggtcagatcctggtgttcacacagccgctgattggtaactacggtgtgccctcgatggaggcgcgcgacgagtacaacttgctcaagcacttcgagtcgtcccacatacaggtcgccggtatagtcgttgctgactacgctgcgcagtactctcactggaccgctgtggagtccctgggcgactggtgcaagcgtgaaggtgttgctgcgatcactggtgtggacacccgtgaaatcgtgcagtacttgagggagcagggctcctcccagagccgtatactcgtggaaggctcggacacgcccaagttctacgactcgatggccacgcacctggtggcggaggtgtccaccaaggagaccctgtacgtgcccgccaagaaccccgtggccaacatcgcggtgatcgactgcggtgtcaaagtgaatatcatcagaagtctcgtggctaggggcgccaacgtaacgatattcccacacaacgctaggatacaggacgtcgctggtcaattcgacggtgtattcctatcgaatgggcctggcaacccggagacctgccacgagaccatcgagaacttgaaggagctgctggccaacgaggacttgcaacagctgcccatcttcggtatctgtctgggccaccagctgctggccttggcctccggcggcaagacacacaagctgcagtacggtaacagagcacacaacatcccagcaatggacctgaccacgggccaatgccacatcacatcccagaaccacggctacgcagtcgacccacaaacactcccacaagaagagtggaaaccatacttcataaacttgaacgaccaatccaacgaaggaatgatccacaccacaagacctatcttctcaacgcagttccacccagaggcaaagggtggccctctggacacaatgcctctgttcgacaagttcttcaacaacatcgagtgctacaagacccacctcagccagtccagctacagaatggtctcccagatcccagcaatcgacaaaaaggagatcatggcctag

SEQ ID NO: 95122 - protein, 392 aa, Candida glabrata CBS 138
MSQATFEIKNGPSFSGYSFGADKSISGEAVFTTSLVGYPESMTDPSYRGQILVFTQPLIGNYGVPSMEARDEYNLLKHFESSHIQVAGIVVADYAAQYSHWTAVESLGDWCKREGVAAITGVDTREIVQYLREQGSSQSRILVEGSDTPKFYDSMATHLVAEVSTKETLYVPAKNPVANIAVIDCGVKVNIIRSLVARGANVTIFPHNARIQDVAGQFDGVFLSNGPGNPETCHETIENLKELLANEDLQQLPIFGICLGHQLLALASGGKTHKLQYGNRAHNIPAMDLTTGQCHITSQNHGYAVDPQTLPQEEWKPYFINLNDQSNEGMIHTTRPIFSTQFHPEAKGGPLDTMPLFDKFFNNIECYKTHLSQSSYRMVSQIPAIDKKEIMA

SEQ ID NO: 95123 - DNA, 1230 bp, Kluyveromyces lactis NRRL Y-1140
  CDS (1)..(1230)
atgcctaatttcaaaagtactgctcctaaagctaaatttgccatttataataattcaaatccagattcggaatctgggtttgtcgagttccaaggctattccttcggtgctcctgtctcatgcagtggtgaagccgttttcaccacttctttagttggctatccggagtcgatgacagatccatcctataagggtcaaatcctcgtctttacgcaaccattaatcggtaactacggtgtgcctagtggagaagaacgtgatgactttaacctattgaagtacttggaatctcctcacattcacgtccgcggtattgttgttgctgagtatgcttggagatactctcactggactgctgttgaaagcttggcaacatggtgccaaagggaaaacgtcaccgccattggtggcattgatactcgtgccgttgttcaaattttgagagaacaagggtcatcaccttctacaattactgtgcaaggttcttttatccctaagccaatcaaaccagaaactgacttggttaagattgtctcgacaaagaaaccattctttgtgaaagcattgtcctcagtgaaaactccattcaacgttgctttgattgattgtggtgtcaaggaaaacattattagatgtttagtggaaagaggtgctaacgttactgttttcccatatgactacccaatcacatcagtagcaaaccagttcgacggtatcttcatttctaatggtccaggtgatcctgttcaatgtatggaatctactgttccagaattgaagaaattgttagagaccaataccttgcaagatttgccaatcttcggtatttgtctaggtcatcaattgttagctttggcatctggtggtaaaacaattaaactaggttatggtaatagagctcacaatatcccagcattggacttgaccactggtcaatgtcacattacttcacaaaatcatggatatgctgttgatgttgacactcttccagaatctgggttcaaacctttcttccaaaacttgaacgataagtccaatgaaggtatgattcatgtctcaaggccaatcttctcgactcaattccatccggaagctaagggaggcccgagagattctgctgtacttttcgacagatacttcgataacatgtcccagtatagagccttgaagggtccaaaagtcaagctaaccttaaatacttcatcattggcgactgagagagtattctaa

SEQ ID NO: 95124 - protein, 409 aa, Kluyveromyces lactis NRRL Y-1140
MPNFKSTAPKAKFAIYNNSNPDSESGFVEFQGYSFGAPVSCSGEAVFTTSLVGYPESMTDPSYKGQILVFTQPLIGNYGVPSGEERDDFNLLKYLESPHIHVRGIVVAEYAWRYSHWTAVESLATWCQRENVTAIGGIDTRAVVQILREQGSSPSTITVQGSFIPKPIKPETDLVKIVSTKKPFFVKALSSVKTPFNVALIDCGVKENIIRCLVERGANVTVFPYDYPITSVANQFDGIFISNGPGDPVQCMESTVPELKKLLETNTLQDLPIFGICLGHQLLALASGGKTIKLGYGNRAHNIPALDLTTGQCHITSQNHGYAVDVDTLPESGFKPFFQNLNDKSNEGMIHVSRPIFSTQFHPEAKGGPRDSAVLFDRYFDNMSQYRALKGPKVKLTLNTSSLATERVF

SEQ ID NO: 95125 - DNA, 1290 bp, Debaryomyces hansenii CBS767
  CDS (1)..(1290)
atgattagagtaattcaaccaccgttgattgcatctaaacaattattccgtcgttatttagctactggtggcacattcaccaacaaaacgtcgcaactagacagggctacattaacaattaaagatggtccagttttcagtggttattcatttggtgctaacaaaaatataagtggtgaagcagtttttacaacttcgttagttggatacccagaatcaatgacagatccatcttacaagggtcaaatcttgtgttttacccagccattaattggtaattatggggttccatcgtcgactcttaaagatgaatttaacttattgaagcacatggaatcgccaagtgttcaatgtattggtatagttgttgctgatgttgcattagagtattctcattggactgctgtcgaatctttacaacaatggtgtcaaagatctggtgtagctgccatttctggtgttgataccagacaacttgtttcttaccttagagaaaaggggtcttctttggctaagattacgattggcgaagaatacgatgcagatgaggatgccgcatttgaagatcctgggtctgtcaacttggtgcataaggtaagtactaaagctcctttccatatcagctgtccagaaaagtatgccaagggtcttcatattgcagttttagattgtggtgctaaagaaaatattttacgttgtttagtcgaaagaggagcatcattaactgttttcccttataattatccaatcgataaaatcgctaacaaatttgatggtatctttatttccaatggtccaggtgacccaacccattgttcaagtaccactgaaaatttagcaaagactatggaaaaataccatgatttgcctatctttggtatatgtttaggtcatcaattattagctttagcaagtggtgctagaaccatcaagatgaaatatggtaacagagcccacaatattcctgccttggacttaactactggtaaatgtcatattacttcccaaaatcatggttactctgttgacgctgaaacattagactctgactgggaaccatatttcacaaacttgaatgatttatccaatgaaggtatgaaacataagtcaaggcctattttctcaactcaattccatcctgaagccaagggtggtccattagataccgcattcttattcgacaaattcttcgaaaacattgaacaatacagagctactaatggcttaaacttaggtaacgttgatgatagcttattggtagatattttaccaaagggaagagtgctttaa

SEQ ID NO: 95126 - protein, 429 aa, Debaryomyces hansenii CBS767
MIRVIQPPLIASKQLFRRYLATGGTFTNKTSQLDRATLTIKDGPVFSGYSFGANKNISGEAVFTTSLVGYPESMTDPSYKGQILCFTQPLIGNYGVPSSTLKDEFNLLKHMESPSVQCIGIVVADVALEYSHWTAVESLQQWCQRSGVAAISGVDTRQLVSYLREKGSSLAKITIGEEYDADEDAAFEDPGSVNLVHKVSTKAPFHISCPEKYAKGLHIAVLDCGAKENILRCLVERGASLTVFPYNYPIDKIANKFDGIFISNGPGDPTHCSSTTENLAKTMEKYHDLPIFGICLGHQLLALASGARTIKMKYGNRAHNIPALDLTTGKCHITSQNHGYSVDAETLDSDWEPYFTNLNDLSNEGMKHKSRPIFSTQFHPEAKGGPLDTAFLFDKFFENIEQYRATNGLNLGNVDDSLLVDILPKGRVL

SEQ ID NO: 95127 - DNA, 1254 bp, Aspergillus nidulans FGSC A4
  CDS (1)..(1254)
atgatgttcagccgatttttcaaggcggtccccgccagggctccggccttttcatcccctttgcctgtctaccaggctcgcactatggctactgtccggaaccagaggcccgttgaaagggcaaccttcacgatccgagatggtcctatcttccacggaaaatctttcggtgcccgtaccaccatttccggtgaggcggtcttcaccacgtctttggtcggatatcccgaatctttgaccgacccctcctaccggggccagattctggttttcacccagcctttgattggaaactacggtgttccgtccaccgagagggaccgccatggtcttctcaagtactttgagtcgcccaatctccaggccgctggtgtcgtcgttgccgacgttgcggagcagtactctcactggaccgctgtacagagtcttggtgaatggtgcgcccgcgagggtgttcctgctatctctggcgtcgacactcgtgccattgtcacttacctccgcgagcagggttcctcccttgctcgtatcacagtgggtgaggagtatgatgctgatcaggatgaggctttcaccgatcctgaacagatccaccttgtccgtcaggtcagcaccaaggctcccttccacgtgagcgcagccgatcctcagtgtcatgttgccgtccttgactgcggtgtcaaggagaacatcctgcgtagcctggttagccgcggtgctagcattacggtgttccccttcgattatcccatccacaaggtcgctcaccacttcgatggcgtcttcatttccaacggccccggtgaccccacccactgccaggacaccacctaccaccttcgccgcctgatggagacttcgcaggttcccatctttggcatctgcttgggtcaccagctcttggcccttgctgctgatgcctctaccctgccttctgactggaagccctactttgtgaacttgaacgactcgagcaatgagggtatgatccacaagtctcgtcccatcttcagcacccaattccaccccgaggccaagggcggccctcttgactcctcgtacctcttcgacatctacatcgacagtgtcaagaagtacaagaacagtcaacttgccttccaccccagccgggagactattcccagtcctctcttggttgatctcctgccgaaggagcgtgtcgatgttgcccctactatcggtatgcagaacgttgctgctgcggcggccgctgcggctgctgctaccgcttag

SEQ ID NO: 95128 - protein, 417 aa, Aspergillus nidulans FGSC A4
MMFSRFFKAVPARAPAFSSPLPVYQARTMATVRNQRPVERATFTIRDGPIFHGKSFGARTTISGEAVFTTSLVGYPESLTDPSYRGQILVFTQPLIGNYGVPSTERDRHGLLKYFESPNLQAAGVVVADVAEQYSHWTAVQSLGEWCAREGVPAISGVDTRAIVTYLREQGSSLARITVGEEYDADQDEAFTDPEQIHLVRQVSTKAPFHVSAADPQCHVAVLDCGVKENILRSLVSRGASITVFPFDYPIHKVAHHFDGVFISNGPGDPTHCQDTTYHLRRLMETSQVPIFGICLGHQLLALAADASTLPSDWKPYFVNLNDSSNEGMIHKSRPIFSTQFHPEAKGGPLDSSYLFDIYIDSVKKYKNSQLAFHPSRETIPSPLLVDLLPKERVDVAPTIGMQNVAAAAAAAAAATA

SEQ ID NO: 95129 - DNA, 1293 bp, Candida albicans SC5314
  CDS (1)..(1293): transl_table=12
atgctttctgctactaagagatatttagcaactgctgctgctgctgctgctactaataccaccaccactagcaaagcgtttacaaatactacttcacaattaggtagagcaacattaactataaaagatggacctgttttcaatggttattcatttggtgccaatagaaatgtcagtggtgaagctgttttcaccacttcattagtaggatatcctgaaagtatgactgatccatcatatcgtggacaaattttatgttttactcaaccattaattggtaattatggtgttccttcaagcactgctaaagatcaatttaatttattgaaatatatggaatcaccaaaagttcaatgtattggtatagttgttgctgatgccgcattagaatatagtcattggacagcagtagaaagtttacaacaatggtgtaaacgttctggtgttgctgccataactggagttgatacaagacaattggtgagttatttaagagataaaggttcatcattggggagaattacgattggtgaagaatatgatgctgatgaagatgcggcatttgaagaccctggtgccattaatttagttcataaagtaaccaccaaggcaccatttcatattgcttgtccacctcaatattctaaagggattcatattgctgttttagattgtggagcaaaagaaaatattttgcgttgtcttgttgaaagaggtgcttcattaacagttttcccttatgattatcctattgataaaattgctaataaattcgatgggatatttatatctaatggtcctggtgatccaactcattgttctactacagtaaacaatttaaagaaaattataacaaatcatcaagatttaccaattttcggaatttgtttaggtcatcaattattggcattagctagtggtgctaaaactataaaattaaaatatggtaatagagctcataatatcccagctatagatttgatcacggggaattgtcatattacatcacaaaatcatggttatgccgttgatgctaatacattatcggaaaattggcaaccttatttcactaatttgaatgatttaagtaatgaaggtatgattcataaatatcaaccaattttttcaactcaatttcatccagaagctaaaggtggtccattagatacatcatttttatttgataagtttttcgataatataaatgtttataaaaaatcaaatggattgaatttaccaccagttgaaaatagtttattagttgatattttaccaaaagaaagagttgaatag

SEQ ID NO: 95130 - protein, 430 aa, Candida albicans SC5314
MLSATKRYLATAAAAAATNTTTTSKAFTNTTSQLGRATLTIKDGPVFNGYSFGANRNVSGEAVFTTSLVGYPESMTDPSYRGQILCFTQPLIGNYGVPSSTAKDQFNLLKYMESPKVQCIGIVVADAALEYSHWTAVESLQQWCKRSGVAAITGVDTRQLVSYLRDKGSSLGRITIGEEYDADEDAAFEDPGAINLVHKVTTKAPFHIACPPQYSKGIHIAVLDCGAKENILRCLVERGASLTVFPYDYPIDKIANKFDGIFISNGPGDPTHCSTTVNNLKKIITNHQDLPIFGICLGHQLLALASGAKTIKLKYGNRAHNIPAIDLITGNCHITSQNHGYAVDANTLSENWQPYFTNLNDLSNEGMIHKYQPIFSTQFHPEAKGGPLDTSFLFDKFFDNINVYKKSNGLNLPPVENSLLVDILPKERVE

SEQ ID NO: 95131 - DNA, 1305 bp, Candida albicans SC5314
  CDS (1)..(1305): transl_table=12
atgctttctgctaccaagagatatttagcaactgctgctactgctgctgctactgctactgctactaataccaccaccactagcaaagcgtttacaaatactacttcacaattaggtagagcaacattaactataaaagatggacctgttttcaatggttattcatttggtgccaatagaaatgtcagtggtgaagctgttttcaccacttcattagtaggatatcctgaaagtatgactgatccatcatatcgtggacaaattttatgttttactcaaccattaattggtaattatggtgttccttcaagcactgctaaagatcaatttaatttattgaaatatatggaatcaccaaaagttcaatgtattggtatagttgttgctgatgccgcattagaatatagtcattggacagcagtagaaagtttacaacaatggtgtaaacgttctggtgttgctgccataactggagttgatacaagacaattggtgagttatttaagagataaaggttcatcattggggagaattacgattggtgaagaatatgatgctgatgaagatgcggcatttgaagaccctggtgccattaatttagttcataaagtaaccaccaaggcaccatttcatattgcttgtccacctcaatattctaaagggattcatattgctgttttagattgtggagcaaaagaaaatattttgcgttgtcttgttgaaagaggtgcttcattaacagttttcccttatgattatcctattgataaaattgctaataaattcgatgggatatttatatctaatggtcctggtgatccaactcattgttctactacagtaaacaatttaaagaaaattataacaaatcatcaagatttaccaattttcggaatttgtttaggtcatcaattattggcattagctagtggtgctaaaactataaaattaaaatatggtaatagagctcataatatcccagctatagatttgatcacggggaattgtcatattacatcacaaaatcatggttatgccgttgatgctaatacattatcggaaaattggcaaccttatttcactaatttgaatgatttaagtaatgaaggtatgattcataaatatcaaccaattttttcaactcaatttcatccagaagctaaaggtggtccattagatacatcatttttatttgataagtttttcgataatataaatgtttataaaaaatcaaatggattgaatttaccaccagttgaaaatagtttattagttgatattttaccaaaagaaagagttgaatag

SEQ ID NO: 95132 - protein, 434 aa, Candida albicans SC5314
MLSATKRYLATAATAAATATATNTTTTSKAFTNTTSQLGRATLTIKDGPVFNGYSFGANRNVSGEAVFTTSLVGYPESMTDPSYRGQILCFTQPLIGNYGVPSSTAKDQFNLLKYMESPKVQCIGIVVADAALEYSHWTAVESLQQWCKRSGVAAITGVDTRQLVSYLRDKGSSLGRITIGEEYDADEDAAFEDPGAINLVHKVTTKAPFHIACPPQYSKGIHIAVLDCGAKENILRCLVERGASLTVFPYDYPIDKIANKFDGIFISNGPGDPTHCSTTVNNLKKIITNHQDLPIFGICLGHQLLALASGAKTIKLKYGNRAHNIPAIDLITGNCHITSQNHGYAVDANTLSENWQPYFTNLNDLSNEGMIHKYQPIFSTQFHPEAKGGPLDTSFLFDKFFDNINVYKKSNGLNLPPVENSLLVDILPKERVE

SEQ ID NO: 95133 - DNA, 1428 bp, Ustilago maydis 521
  CDS (1)..(1428)
atgctcgctcctatccgcaactcgatgctccagcgcgctggcgctcgcttgatgcgacttggcagtatccgctcgctcgctacacacgcttctgctgcgcccatcacctataccgaggctcccgcatccaagcctgctaccttgcacctcaagactggcgaggccttcactggtcgctcgttcggggctcctcgcagcgtgtttggtgaaacagtgttcaccacctcgattacctcgtacaccgagtcgctcactgatccatcgtaccaggggcagatcctcacttttactcagcctctcatgggcaactatggtgtgcccgacaacggaagcggacagtcgcctgtcgagcacccggctgatgtcgacgtgggtgccttcctcgagtccaacaaggtccaagctgccggcgtggttgtttcgaaccttgccgagcgcttttcgcactaccttgccaaagagtcgctcgccacctggtgtgctcgtcacaacgtccccggtatctttggcgtcgacactcgtgccatcacgtcgctcctacgagaccagggttctacgctcggcgccatccttgttggcgatggccacgacaaagcgcccgctgtgggtgactacgttgatcctatggccgagaacctgatcgccaaggtgtcgaccaagcagccgtatgtgctccaccctgtcggcggtgccaaggctgcgcgagcgcacgttgcactgatggactttggctgcaaggccaacatcctccgatctctgctccgccgtggtgcttcggtgacggtgctgccatggaactttgacttcaacaaggtgcgcgatggattcgacggtctgttcctctccaacggaccggggtctccgtactcgatcgaaccggctctcgacatggcacgcaaggcgatcgccgaatgggaccgaccgatctttggcatctgcatgggcaaccaagtgatcggtatcgccgctggtgtcgaggcgtaccgcatgaagtttggcaatcgaggtcacaaccagcccgtcgtagcactcaagtcggcaggaaactttgtgaagcgcggtcgtgtctacatcacctcgcagaaccacgggtacgctctcaccccggacgagtccaagtggccggaaggatggcagccctggttcgtcaatgcgaacgattcgtcggtcgaaggcatcatcaggacgcagttgaacgaacaacgcgccatggtctggggtgtgcagttccacccggaacacgccggtgggcccgaggacaccaacggtatctttgaagactttgtcgaggaggtcgtcaggatcaagcgtagccagggcagggatgtcggcgccggtctgcccgagcatatgcacgtcaaccagggcgctcctgctttccccgctcacgagttcggcgtggttggtcagagccctgctcacctttag

SEQ ID NO: 95134 - protein, 475 aa, Ustilago maydis 521
MLAPIRNSMLQRAGARLMRLGSIRSLATHASAAPITYTEAPASKPATLHLKTGEAFTGRSFGAPRSVFGETVFTTSITSYTESLTDPSYQGQILTFTQPLMGNYGVPDNGSGQSPVEHPADVDVGAFLESNKVQAAGVVVSNLAERFSHYLAKESLATWCARHNVPGIFGVDTRAITSLLRDQGSTLGAILVGDGHDKAPAVGDYVDPMAENLIAKVSTKQPYVLHPVGGAKAARAHVALMDFGCKANILRSLLRRGASVTVLPWNFDFNKVRDGFDGLFLSNGPGSPYSIEPALDMARKAIAEWDRPIFGICMGNQVIGIAAGVEAYRMKFGNRGHNQPVVALKSAGNFVKRGRVYITSQNHGYALTPDESKWPEGWQPWFVNANDSSVEGIIRTQLNEQRAMVWGVQFHPEHAGGPEDTNGIFEDFVEEVVRIKRSQGRDVGAGLPEHMHVNQGAPAFPAHEFGVVGQSPAHL

SEQ ID NO: 95135 - DNA, 6597 bp, Tribolium castaneum
  CDS (1)..(6597)
atgactaaaagtgacgaaagacacacttgttttcttctcctcgaggatgggactgtactaccgggtgaatcgtttggggctcgaaaccaaatcgatggggaagttgttttccagactgggatggtcggttaccccgaatccctaaccgaccccagctaccatgcccagatcctggtcctcacataccccctcgtgggtaattacggtgtccccaaagcggtcgaagacccgcacgggttgccctattttttcgaatcgcaccggatttgggccgctggtctcgtcgtgggtgaacactgcgacaatccgagccattggcacaacttcaggacactttccgactggatgaagtcggaaaatgtccccgggatccaagggattgacactagggccttgaccaagaaaattcgcgaaaaggggacgattttgggccggattgtttatagtttgcccattgtgaccgaaaatttgaaaattgttgaccccaatttgaggaatttggtcgaggaagtgtcagttaagaaaattgtgacgtataattccggggggagtcccaggatttgtgccgttgattgcggcttgaaatacaatcaaattcgctgtttggttaatagaggggctcgggttgatttggtaccatgggaccacaaactcaatatcaacgactatgatggtctttttctcagcaatggtcctggggacccaaccatgtgccaggtcactatcaataacatcaaagacgtgattaagggaccaacaattaaaccgatttttggtatttgtctcggtcaccaactcctttcagtggccattgggtgcaaaagctacaaaatgaagtatggtaatcgtggtcacaaccaaccatgcacccatcatggtaccaaccggtgttacatgacctcgcaaaaccacggttttgccatcaatacggagacacttcccaacgactgggaaatcctcttcacgaatgctaacgacaagaccaacgaaggaataattcactcaaaactgccgtttttcagcgtacagttccaccccgaacacacagctgggccccaggaccttgaatgcctcttcgacgtgttcctggacctggttaagaaccccaaccagacagctaagactctccttacccaaaaactaacctattcgggcacccctcagttgcccgaacgccccaaaaaagtgctaataataggttccgggggcctttccatcggccaagcgggcgagtttgactattccggctcccaggccattaaagcccttcgtgaggaaaacatccaaactgttttgatcaaccccaacatcgccacagtccaaacctccaaaggtttagccgacaaagtctacttcttgcctctagtacccgactacgtggagcaagtcattcgagtcgagcgccccggaggcgtgctgttaaccttcggggggcaaacgggcctcaactgtggggtcgagctccaaaaagccggcatcttcgacaagtacaacatccaaattctggggacccccatccaggctataatcgatacggaagaccggaagatcttcaccgaacgtattgccgccattggggagaaggtggcccccagcatggcggcgcactccgtggaggaggctctggaggcggccgagcaactggggtacccggtcatggcccgcgctgccttttccctaggcggacttgggtcgggcttcgccaatagtaaggacgaacttaagactttggccgtccaggctttggcccactcgagtcaattgatcatcgacaagtcgctcaaaggctggaaggaggtggagtacgaggtggtgcgggacgccttcgacaactgcatcacggtgtgcaacatggagaacgtcgaccctttggggatacacaccggggagtcgattgtggtcgcccccagccagaccctttcgaaccgggagtacaacatgctgcgcaccaccgccattaaggtgattcggcacttcggggtcatcggcgagtgcaacatccagtacgccgtcaatcccaactccgaggagttctacatcatcgaggttaatgctaggttatcgcgaagctcggccctggccagtaaagccacagggtaccccctagcctacatcgcggccaagctggccttgggggtacccctccctgagatcaataattccgtgactggggtcacaactgcgtgttttgagccaagtcttgactactgcgtcgtcaaaatcccccgctgggacttgcacaagttctcccgcgtcagtaccaaaatcggaagttcgatgaaaagtgtgggggaggtgatggcaatcgggcgcaagttcgaagaagcgttccagaaggccttgcgcatggttgacgagaacgtgatggggtttgacccctatctcaaggacgttaacgacgaggagttgaaggaacccaccgacaagaggatgtttgtggtggcggcggccctcaagaaaggctattcggtcgataggctgtacgacttgaccaaaatcgaccgctggtttttggagaagatgaagaagatcgtcgactggaccacgttcctcgaaaccatagaccagctgcacttgtcgcatgatattttactgaaggccaaacaaatcgggttctccgataaacagattgcgacagcagtcaagagtaccgaactggccatcaggaagcaacgcgaggagttcgggatcaagccatacgtcaagcagatagacacagtggcggcggaatggcccgccaccaccaactacctctacctaacctacaacgcctttgagcacgacttgaccttcgaggaaaaacacaccatggtcataggatcgggggtttaccgcatcgggagctccgtggagttcgactggtgcgcagtcgggtgcctccgggagttgcgccgcttgggccgcaagacaatcatgatcaactacaaccccgaaaccgtcagcaccgactacgacatgtcggaccgcctctactttgaagaaatctcctttgaagtggtcatggacatctacaacatcgaggaccctgtcgggatcatactgtcaatgggcggccaactccccaacaacatcgccatcgacctccaccggcagcaagcccgcatcttgggcacgtcccccgactccatcgacggcgccgagaaccgcttcaaattctcgcggatgttggaccggatcgggatcatgcagccgcgttggaaggaactcactaacctcaaatcggcgatcgagttctgcgaagaagtggggtacccgtgcctggtgcgcccctcctacgtgctcagcggcgccgccatgaacgttgcccactccaaccaggacttggagacgtacctgaacgccgctagcgacgtctccaaggagcacccagtcgtcatctcgaagttcatcctcgagtcgaaggagatcgacgtcgatgcggtggcctgcgacggcgttatcctctgcatggcggtgtcggagcacgtggagaacgccggggtgcactccggggacgccacactcgttaccccgccgcaggacatcaacgacgagactctgggcaagatcacgcagatctgcaaggccattgcggcctcgctggaggtgactgggcccttcaacatgcaactgatcgccaaggacaatgatctgaaagtgatcgagtgtaacgtgcgcgtttcgcgttccttcccctttgtttccaaaaccctagaccatgattttgtggcgatggccactcgggtgatggttggggagctggtccagcccgtggatgtgctctcggggtgcggcaaagtgggggttaaggtgccccagttttcgttttcgcggctcgcgggcgccgattttatgctgggggtggagatggcgtccactggggaggtggcctgttttggggataatcggtacgaggcgtacttgaaggccatgatgagtactgggtttagcgtccccgaaaaatcgattctgctgtcaattgggagtttcaagcataaaatggagctgctgcccagcatgagagtgttgcaaaagatggggtacaagttgtatgcaagtttgggcaccgctgacttttacaacgagcatggagttaaggtcgagtcggtacaatggactttcgagaacattgatgccataacgagccaaggggagctcaagcacttggcggagtttttgtcaaagaaacagtttgacttggttatcaacctccccatgcgcaatggcggcgctcggagagtgtcctccttcatgacccacgggtacaggacccggcgcctggccatcgactactccatcccgctcgtgaccgacgtcaaatgcaccaaactcctggtggaggctctgagacgcattgggaccgcgccccccatgaaaacccacactgactgcatgtcttcgcgccgtttggtcaaactaccgggccttattgacacccacgtccacgtgcgtgaacccggggccacccacaaggaggactacgcctcctgcacggccgcagccctcgctggcggcgtcaccatgatttgcgcgatgcccaacactaacccggccgtcaccaaccaggaaaccctaacccttgtggagaacctggcgcggaaaaacgcccggtgtgactatgccatctacatgggggcctcctcagacaactactccgcgatcccggagctcgccccccaggtcgcaggcctcaaaatgtacctcaatgagaccttcaccacgttgagacttaacgatctcaacacctggaccaagcacttggctaattggccgaaaaaagccccgatttgtgtgcatgccgaggggcaaaccacggccgctgttatcctgatggcgagtttgcaaaaccggccaatccacatctgtcacgtggcccggaaagaggaaatcttgatcatcaaagcggccaaggaaaaaggcttgaacataacctgtgaggtttgcccccaccacctttttctctcgactgaagatgtcaaaaccttgggggtgtgtaaaagtcaggttcggcctgttctaatgtcaccagaggaccaacaagccctttgggataacttacacgtgattgactgctttgccaccgaccatgccccccacactttggaggagaagaccagttcgagccctcccccaggcttccccgggctggagacaatcctcccgttgctcctgaacgccgttaacgagaacaaactgactattgacgacatcgtcaccaagttctaccgcaaccccaagaagattttcaatttgccggaccaaccaaacacttacgttgaaatcgacctggacgaggagtggacgattccagaggctaccacttacagtaaggctaagtggaccccgttcgctggccgcaaggtcaagggagccgtccaccgcgtggtgctccgtggagaggtggctttcgtcgacggccagatcctggtgcagcccgggtttgggcaaaacgtgcgcacgtgggacaaaaagaccttcgacgaggtcatagcccctcccaccgtcaccactggggagtacaacgacgggcagaccaacgagattttcaagaagttgctgtcagggggtggcaaagtgcacttctctgccaccaacgagctgcacgtggacagccggctgggggtgacctcgcccacgcccgtggggccccggatccgcactggtagtttctcccaaatggagcagatgcatcacagtcttgccaacaagcatattctttcggtggatatgtttacgaaagaccagctcaatgatattttcaacttggcgcaaacttttcgcgttaatgtcagtaaggagcgggctgttgatcatatcttgaaggggaaagtcatggcgtcgattttctacgaggttagcactcggaccagttgcagtttcgcggctgccatgcagaggttgggcggtggggtgatttatatggacgagacgagttcgtcggtgaagaaaggggagactttggaggactcggttgctgtgatggcggggtatgccgatgtggtggtgttgaggcatccgacgcctggctcggttatgcgggcgtcccaccactgccgcaagcccctcatcaacgccggcgacggagtcggcgagcaccccagccaagccctcctcgatattttcacaattcgagaggagatcggcactgtgaacggcctcaccattaccctagttggtgatttgaaaaacgggcgcactgttcattcccttgcacgtttgctgacactgtacaacgtgcagctgcgttacgtaagccccccgagcttgaaaatgccgagtcatatcaccagcttcgtggcctccaaaggcataccccagaacgagcacagtacccttgaggaggtactgccggacacggacgtactgtacatgactcgcatccagagagaacggtttagctcacaagaggagtacgacaaggcctgtggccactttatcgtaactccgcaactgatgacgagggcgaagaggaaaatggtggtgcttcaccccctgcccagggtgttcgaaatcagcccggagtttgacacggacccccgggcggcctatttcaggcaggcggagtgcgggatgtatgtcagaatggcgctcctagccatggttttagggaagtgttaa

SEQ ID NO: 95136 - protein, 2198 aa, Tribolium castaneum
MTKSDERHTCFLLLEDGTVLPGESFGARNQIDGEVVFQTGMVGYPESLTDPSYHAQILVLTYPLVGNYGVPKAVEDPHGLPYFFESHRIWAAGLVVGEHCDNPSHWHNFRTLSDWMKSENVPGIQGIDTRALTKKIREKGTILGRIVYSLPIVTENLKIVDPNLRNLVEEVSVKKIVTYNSGGSPRICAVDCGLKYNQIRCLVNRGARVDLVPWDHKLNINDYDGLFLSNGPGDPTMCQVTINNIKDVIKGPTIKPIFGICLGHQLLSVAIGCKSYKMKYGNRGHNQPCTHHGTNRCYMTSQNHGFAINTETLPNDWEILFTNANDKTNEGIIHSKLPFFSVQFHPEHTAGPQDLECLFDVFLDLVKNPNQTAKTLLTQKLTYSGTPQLPERPKKVLIIGSGGLSIGQAGEFDYSGSQAIKALREENIQTVLINPNIATVQTSKGLADKVYFLPLVPDYVEQVIRVERPGGVLLTFGGQTGLNCGVELQKAGIFDKYNIQILGTPIQAIIDTEDRKIFTERIAAIGEKVAPSMAAHSVEEALEAAEQLGYPVMARAAFSLGGLGSGFANSKDELKTLAVQALAHSSQLIIDKSLKGWKEVEYEVVRDAFDNCITVCNMENVDPLGIHTGESIVVAPSQTLSNREYNMLRTTAIKVIRHFGVIGECNIQYAVNPNSEEFYIIEVNARLSRSSALASKATGYPLAYIAAKLALGVPLPEINNSVTGVTTACFEPSLDYCVVKIPRWDLHKFSRVSTKIGSSMKSVGEVMAIGRKFEEAFQKALRMVDENVMGFDPYLKDVNDEELKEPTDKRMFVVAAALKKGYSVDRLYDLTKIDRWFLEKMKKIVDWTTFLETIDQLHLSHDILLKAKQIGFSDKQIATAVKSTELAIRKQREEFGIKPYVKQIDTVAAEWPATTNYLYLTYNAFEHDLTFEEKHTMVIGSGVYRIGSSVEFDWCAVGCLRELRRLGRKTIMINYNPETVSTDYDMSDRLYFEEISFEVVMDIYNIEDPVGIILSMGGQLPNNIAIDLHRQQARILGTSPDSIDGAENRFKFSRMLDRIGIMQPRWKELTNLKSAIEFCEEVGYPCLVRPSYVLSGAAMNVAHSNQDLETYLNAASDVSKEHPVVISKFILESKEIDVDAVACDGVILCMAVSEHVENAGVHSGDATLVTPPQDINDETLGKITQICKAIAASLEVTGPFNMQLIAKDNDLKVIECNVRVSRSFPFVSKTLDHDFVAMATRVMVGELVQPVDVLSGCGKVGVKVPQFSFSRLAGADFMLGVEMASTGEVACFGDNRYEAYLKAMMSTGFSVPEKSILLSIGSFKHKMELLPSMRVLQKMGYKLYASLGTADFYNEHGVKVESVQWTFENIDAITSQGELKHLAEFLSKKQFDLVINLPMRNGGARRVSSFMTHGYRTRRLAIDYSIPLVTDVKCTKLLVEALRRIGTAPPMKTHTDCMSSRRLVKLPGLIDTHVHVREPGATHKEDYASCTAAALAGGVTMICAMPNTNPAVTNQETLTLVENLARKNARCDYAIYMGASSDNYSAIPELAPQVAGLKMYLNETFTTLRLNDLNTWTKHLANWPKKAPICVHAEGQTTAAVILMASLQNRPIHICHVARKEEILIIKAAKEKGLNITCEVCPHHLFLSTEDVKTLGVCKSQVRPVLMSPEDQQALWDNLHVIDCFATDHAPHTLEEKTSSSPPPGFPGLETILPLLLNAVNENKLTIDDIVTKFYRNPKKIFNLPDQPNTYVEIDLDEEWTIPEATTYSKAKWTPFAGRKVKGAVHRVVLRGEVAFVDGQILVQPGFGQNVRTWDKKTFDEVIAPPTVTTGEYNDGQTNEIFKKLLSGGGKVHFSATNELHVDSRLGVTSPTPVGPRIRTGSFSQMEQMHHSLANKHILSVDMFTKDQLNDIFNLAQTFRVNVSKERAVDHILKGKVMASIFYEVSTRTSCSFAAAMQRLGGGVIYMDETSSSVKKGETLEDSVAVMAGYADVVVLRHPTPGSVMRASHHCRKPLINAGDGVGEHPSQALLDIFTIREEIGTVNGLTITLVGDLKNGRTVHSLARLLTLYNVQLRYVSPPSLKMPSHITSFVASKGIPQNEHSTLEEVLPDTDVLYMTRIQRERFSSQEEYDKACGHFIVTPQLMTRAKRKMVVLHPLPRVFEISPEFDTDPRAAYFRQAECGMYVRMALLAMVLGKC

SEQ ID NO: 95137 - DNA, 1140 bp, Prochlorococcus marinus str. AS9601
  CDS (1)..(1140): transl_table=11
atgattaatccatataagaaaaacgcgaaattagttttaagtaatggtattgtatttccgggattcttttttggtgcttctggtactgcagttggtgaaatagtttttaatacgggaatgaccggatatcaggaagttattactgatcctagttattatggacaaattttaacgtttacttatccagagattggaaatactggtattaattttgaagattcagaatccaatattaatatcaaaggtataattgttagaaatttttcatctaataacagcaattggagatctaaaaagaattttaatcaatggttagtggagaaaaatatcattggtctatacggaattgatacaagggctcttgttaagattttaagatctactggcgcaatgaatggagttattacctctctagataaaactgatgaaagttgtttaaagataattcaggatacaccaaagatggagggattaaatttatcaaaagttgtttcaacaaagcaacaatatttatggaatagtcatacacaaacagtttttgatttaagaaaaagatatgatgaatcttctaaaaagttaaaaatagtggcaattgattttggaattaaaaattcaattttaaatagactcgtatcccatggttgtgaagttttggttttaccttctcgatcttctctaaatgatgtcctgtctaacaagccggatggtatatttttctcaaatggtccaggcgatccttctactgtttctgaaggtatagacctagcaaaatcactcatagaatatggtgaaattcctatgtttggtatatgccttggccaccaaatatttggattagcactaggtggctcaacttataaattatcttttggccatcgtggtttaaatcacccttgtggtcaaaataacaagatagagataactagtcagaaccacggttttgctattgatcctaattctctaccaaagaatttagttagaataacccattacaaccttaacgataatactgtggctggcctagaagttaataataagccaatatttagtgtgcaatatcatccagaagcaggacctggcccacatgattcagattatttatttaaaaaatttgtttctctaatgttagaaagatgttga

SEQ ID NO: 95138 - protein, 379 aa, Prochlorococcus marinus str. AS9601
MINPYKKNAKLVLSNGIVFPGFFFGASGTAVGEIVFNTGMTGYQEVITDPSYYGQILTFTYPEIGNTGINFEDSESNINIKGIIVRNFSSNNSNWRSKKNFNQWLVEKNIIGLYGIDTRALVKILRSTGAMNGVITSLDKTDESCLKIIQDTPKMEGLNLSKVVSTKQQYLWNSHTQTVFDLRKRYDESSKKLKIVAIDFGIKNSILNRLVSHGCEVLVLPSRSSLNDVLSNKPDGIFFSNGPGDPSTVSEGIDLAKSLIEYGEIPMFGICLGHQIFGLALGGSTYKLSFGHRGLNHPCGQNNKIEITSQNHGFAIDPNSLPKNLVRITHYNLNDNTVAGLEVNNKPIFSVQYHPEAGPGPHDSDYLFKKFVSLMLERC

SEQ ID NO: 95139 - DNA, 1140 bp, Prochlorococcus marinus str. MIT 9515
  CDS (1)..(1140): transl_table=11
atgaatcatccttttaagaaaaatgcaaaacttgttttaagtaacgggactactttttctggttattcatttggtgccgtcggtacaactctaggcgaaattgtttttaatactggtatgactggttatcaagaagtaataacggatccaagttattttggtcaaatactaacatttacatatcctgagataggaaatacaggaattaatttcgaagattctgaatcagacaactgtgttaaaggattaatagttcgtaattactcaaataataatagtaattggagatcccaaataagcctaaatcagtggctgattgataataatattattggactttatggagttgatacgagagcacttgtcaaaattttaagatctaacggttcgatgaatggtcttataacttcagaaaataataatttagatagttgtcttaagcttatttctaatgctccggatatgaatggtttaaatttatcaagagaagtttcaacaaagaataattatttttggaaagagaccactaagacaagttttgatataagaaaaaaggatattggtacaaaaaataaattaaaaattgtggcaattgattttggtatcaaaaaatcaattcttaatagattagtttcacatggatgtgaggtattggtattgccttcacattcttcttttgaagatgttttaggcaataatcctgatgggatatttttttcgaatggtccaggtgatccttctactgttcttgatgggattaatttagctaaatcactaataaattatggaaaaattcctatgtttggaatttgtcttggtcatcaaatttttggtttggcattaggaggggaaacatataaattaccttttggacatcgtggtttaaatcatccctgtgggatgaataataatgttgaaataacgagtcagaatcatggttttgccatagatccaaattccttatcaaatgaaattgttgaaataactcatcttaaccttaatgataaaactgtcgctggattgaaacttaaaaataagcctatatttagtgttcaatatcacccagaggcaagcccgggacctcacgactcagattatttatttgaaaattttgtttctctaatgttagaaagatgttga

SEQ ID NO: 95140 - protein, 379 aa, Prochlorococcus marinus str. MIT 9515
MNHPFKKNAKLVLSNGTTFSGYSFGAVGTTLGEIVFNTGMTGYQEVITDPSYFGQILTFTYPEIGNTGINFEDSESDNCVKGLIVRNYSNNNSNWRSQISLNQWLIDNNIIGLYGVDTRALVKILRSNGSMNGLITSENNNLDSCLKLISNAPDMNGLNLSREVSTKNNYFWKETTKTSFDIRKKDIGTKNKLKIVAIDFGIKKSILNRLVSHGCEVLVLPSHSSFEDVLGNNPDGIFFSNGPGDPSTVLDGINLAKSLINYGKIPMFGICLGHQIFGLALGGETYKLPFGHRGLNHPCGMNNNVEITSQNHGFAIDPNSLSNEIVEITHLNLNDKTVAGLKLKNKPIFSVQYHPEASPGPHDSDYLFENFVSLMLERC

SEQ ID NO: 95141 - DNA, 1155 bp, Prochlorococcus marinus str. NATL1A
  CDS (1)..(1155): transl_table=11
atgttttttgatactgatagctctgcaattttgttattagaggatgggacatattttgaaggattatcttttggtgcggttggaactatttctggtgaagtcgtatttaatacaggtatgacaggttatcaggaggtcattactgatccaagttattttggtcaacttattacgtttacctatccagagattggaaatactggagtcaattatgaggataatgaatcatcacatccttcagttaaaggtgtgatagctcgtcaaatatccaaaactcccagtaactggagacatgaaatttcgttcgaaaattggttaaaggatgaaaatgttgttggaattcatggaatagatacaagattacttgttagacatataagagagtcaggttctttgaatggaattatttcatcagagtcaaaatattcaatcgctgaattattttcacttttaaaaaaatctccttcaatgagtggtcttaatcttgtcgataaagtaacaacaaaaagtgcttttaatgctaattcaagttgtcctgttgcatttgatatgagaattaaaaatactcaaacaattccatacaaagttgttgctatagattttgggataaagcaatcgatattggatcgattagttgctcatggttgtgaagtaactgtcttgcctgcaagtgctgaaatgaccgatgtattagctttatcccctgaaggtgtttttctttccaatggtcctggtgatccttccaccgtcgatagtggtattaatcttgctaaagatttaatagaatataaaaaactacctgtttttggaatctgcttaggccatcaaatccttggattggctttaggtggtaaaacttttaaactttcttatggacatagaggactaaatcatccatgtggattgaacggaaaagttgaaattactagtcaaaaccatggatttgctttgaattcagaatctttaaattccgagaaaataaaaatcaccagattaaatttaaacgaccaaacagtcgctgctatttctgttattgataggcctttctttggtgttcagtatcaccccgaagcgagccctggtcctcatgatgctgatcatcattttaatcatttcgtaaccttaatagaagaacgacgaagaatcgtggattaa

SEQ ID NO: 95142 - protein, 384 aa, Prochlorococcus marinus str. NATL1A
MFFDTDSSAILLLEDGTYFEGLSFGAVGTISGEVVFNTGMTGYQEVITDPSYFGQLITFTYPEIGNTGVNYEDNESSHPSVKGVIARQISKTPSNWRHEISFENWLKDENVVGIHGIDTRLLVRHIRESGSLNGIISSESKYSIAELFSLLKKSPSMSGLNLVDKVTTKSAFNANSSCPVAFDMRIKNTQTIPYKVVAIDFGIKQSILDRLVAHGCEVTVLPASAEMTDVLALSPEGVFLSNGPGDPSTVDSGINLAKDLIEYKKLPVFGICLGHQILGLALGGKTFKLSYGHRGLNHPCGLNGKVEITSQNHGFALNSESLNSEKIKITRLNLNDQTVAAISVIDRPFFGVQYHPEASPGPHDADHHFNHFVTLIEERRRIVD

SEQ ID NO: 95143 - DNA, 1140 bp, Prochlorococcus marinus str. MIT 9303
  CDS (1)..(1140): transl_table=11
atgattgcttcatcgcgaaattcggcgctcttggtgcttgctgatggcacggtgcttgagggggaggcctttggtcatcgcggtgccgcgatgggcgaggtggttttcaacaccggcatgacgggttaccaggaagtacttacagatcccagttactccggtcagttggtcacattcacctatccagagttgggcaacacaggcgtaaatcttgatgatcaagaatcatcccggcctcatgcaaggggtgtcatcgcccgtcaactctccccaacgccgagcagttggcgttgccaacagtcgctgcagacttggcttgaggagcaaagagttgttggtatctcaggtgttgataccagggcgcttgtgagacatctgcgcgaggtcggagccatgaatggcgtcataagcagcgatggttccacccctaagcagttgatggaactgttgcagcaggctccatcgatggagggattaaaccttgcagatcaggtttcaacgaaagatccatacagctggagatcgacttgtgctgtgggctttgatcaaaggttgaagcgacacattgattcgccctatcgcgttgtcgcgattgatttcggtatcaagcgggccatactcgaccgtttggtcgctcacggttgtgaggtcaccgtcctgccggccagttccgatttagccaccgtgttgagttcacaacccgagggcgtatttctatctaatggacctggtgaccctgctgccgtgactggtggtattgccctggttaaagatcttctcaataaggttgatatccccctgtttggtatttgcctaggtcatcagattattgggcttgccatgggtggccgaactttcaaattggcctatggccatcgcgggctcaaccatccctgcggcacaacggggcaggtggagatcaccagtcaaaaccatggattcgcacttgacgcctcgtctctgtcacaggtcagcgtggttgtgacccatctcaatctcaatgaccgcactgttgccgcgatagcgcatcgggatcgacctgtttttggtgtgcaataccacccggaggcgagtcctggtcctcatgatgcagaccaccacttcgctcactttgttgagctgatggcagatcgtcgctaa

SEQ ID NO: 95144 - protein, 379 aa, Prochlorococcus marinus str. MIT 9303
MIASSRNSALLVLADGTVLEGEAFGHRGAAMGEVVFNTGMTGYQEVLTDPSYSGQLVTFTYPELGNTGVNLDDQESSRPHARGVIARQLSPTPSSWRCQQSLQTWLEEQRVVGISGVDTRALVRHLREVGAMNGVISSDGSTPKQLMELLQQAPSMEGLNLADQVSTKDPYSWRSTCAVGFDQRLKRHIDSPYRVVAIDFGIKRAILDRLVAHGCEVTVLPASSDLATVLSSQPEGVFLSNGPGDPAAVTGGIALVKDLLNKVDIPLFGICLGHQIIGLAMGGRTFKLAYGHRGLNHPCGTTGQVEITSQNHGFALDASSLSQVSVVVTHLNLNDRTVAAIAHRDRPVFGVQYHPEASPGPHDADHHFAHFVELMADRR

SEQ ID NO: 95145 - DNA, 1044 bp, Clostridium difficile 630
  CDS (1)..(1044): transl_table=11
atgaaggggaaattaattttagaagatggaacagtatttgaaggaaaagcatttggatatctaaaggaagctattggagaagttgtatttaatacttcaatggctgggtatggagaactattgacagatgcaacttattatggacaaatagttactatgacttatccacttataggaaactatggaataaatttagaagatgttgaatcaaataaggtgcaagtaaaaggacttattgtaagagaaaaaagtgataacccaaataattttagatgtgaaatggatatagacacatatctaaagcaaaataaggtaataggacttgaaggaatagatacaagagcattaactaaaattattagaaacaatggaactaagagaggaattataactttagaaaatgtatcattacaagatgttcagtctaaattagaagagcattgtaacaaagattcagtaaaaaatgttacaagaaaagaaattgaaaatataaaaggtactggagctaaagttgtagttatagactttggtgttaaaaatagtgtactagagtctcttaaggcttgtaactgtgatataactatagtaccagcaatgactacagtagaagaaattttaaatataaatcctgacttaatcttattatctaatggcccaggaaatccagaggatataaatgatatagttgaaaatataaaaaaattaataggcaaaaagccattgacaggaataggtttaggacatcaaattttagcattggcattaggaggaaagacttcaaagcttgtatttggacatagaggagctaatcacccagttaaatgtttagaaactggaaaggtatttataacttctcaaaatcatggatataatgtttcagaaatgccagaaaatacagaagtaactcacataaatttaaatgacaatactatagaaggaatgagacataaggaattaccaatatatagtgttcagtacattccagaatacacaacaaaagaagatttagattgtatatttaataaattcttagcattaatatag

SEQ ID NO: 95146 - protein, 347 aa, Clostridium difficile 630
MKGKLILEDGTVFEGKAFGYLKEAIGEVVFNTSMAGYGELLTDATYYGQIVTMTYPLIGNYGINLEDVESNKVQVKGLIVREKSDNPNNFRCEMDIDTYLKQNKVIGLEGIDTRALTKIIRNNGTKRGIITLENVSLQDVQSKLEEHCNKDSVKNVTRKEIENIKGTGAKVVVIDFGVKNSVLESLKACNCDITIVPAMTTVEEILNINPDLILLSNGPGNPEDINDIVENIKKLIGKKPLTGIGLGHQILALALGGKTSKLVFGHRGANHPVKCLETGKVFITSQNHGYNVSEMPENTEVTHINLNDNTIEGMRHKELPIYSVQYIPEYTTKEDLDCIFNKFLALI

SEQ ID NO: 95147 - DNA, 1128 bp, Desulfovibrio vulgaris subsp. vulgaris str. Hildenborough
  CDS (1)..(1128): transl_table=11
atgagagcattgctggcactggaagacggcttcgtgcttgagggacgttccttcaccggccccggcgagacggggggcgaggcgatcttcaacaccggcatgaccggctatcaggaagtccttacggatccttcctacgcagggcagatggtctgcatgacctatccgctggtgggcaactatggcgttacccgcgaggacatggaatcgggcaaggtgcacgtcgaggcgttcatcgtcaaggaatgctgcaaggtgccctccaactggcgttccgagatatcgctgcccgactacctcaagcggcacggcgtgatgggcatcgaaggcatcgacacgcgggcactcacgcgccatctgcgcatccacggtgccatgcggggcgtcatctccacgcaggagaccgacccggcgcgtcttgtcgaacgcgctcgtgccctgccgtccatggaggggcagaacctcgtcacccgcgtcgcccccgcagccccctatcgctgggacggtgagcgtccgcaggccgtgaccctcgaacccggcggttgcgcatgggtcggcaaggggccgcgtctcgtggtgtacgacttcggcatcaagtggaacatcctgcgccttctcgcccagcagggcttcgacatgctggttgtgcccccgtccttcaaggccgctgacgtggcggcggtgggcgcacaggccgtctttctctccaacggccccggcgacccggcaacactgaaggatgagatcgccgaaatcgcgaagctggcgcagacctaccccacggcgggcatctgtctcgggcatcagcttctcggccatgcccttggcgggcgcaccatgaagctcaagttcggtcatcatggctgcaaccaccccgtgaaggacctcaccacggggcgcatcgagatatcttcacagaatcacggcttctgcgtggacatcgacagcctcactgacgtagaaatcacccatgtgaacctcaacgacggcacccttgagggattcgcccataagacgaagcccgtcatcgccgtccagcaccaccccgaggcgagccccggccccaacgacagccggtacttcttcgcccggttcaggaacatggtgcgtgaggcggcaggctgctaa

SEQ ID NO: 95148 - protein, 375 aa, Desulfovibrio vulgaris subsp. vulgaris str. Hildenborough
MRALLALEDGFVLEGRSFTGPGETGGEAIFNTGMTGYQEVLTDPSYAGQMVCMTYPLVGNYGVTREDMESGKVHVEAFIVKECCKVPSNWRSEISLPDYLKRHGVMGIEGIDTRALTRHLRIHGAMRGVISTQETDPARLVERARALPSMEGQNLVTRVAPAAPYRWDGERPQAVTLEPGGCAWVGKGPRLVVYDFGIKWNILRLLAQQGFDMLVVPPSFKAADVAAVGAQAVFLSNGPGDPATLKDEIAEIAKLAQTYPTAGICLGHQLLGHALGGRTMKLKFGHHGCNHPVKDLTTGRIEISSQNHGFCVDIDSLTDVEITHVNLNDGTLEGFAHKTKPVIAVQHHPEASPGPNDSRYFFARFRNMVREAAGC

SEQ ID NO: 95149 - DNA, 1044 bp, Picrophilus torridus DSM 9790
  CDS (1)..(1044): transl_table=11
atgtatagatatttaatacttgaggacggcactgtatataaaggaactgcctatggctatgagggcgagacccacggtgagcttgtttttacaacatccatgtccggatatttagagaccataaccgatccatcatatgctggtcagatactaatattcgcgtatccagagatagcaaattatccgctgagctatgaatcaatggagtctgacagaatccaggtctctggtttgattacaagggatgcacatgctgagatgccggccggcaatcttggcatcagctttgatgagttcatgaggatgaataaagttccaggaatagatggcatagacacgagacacctggttgaaaagataagaagaaaaggtgttatgaaggcctggattagaaacacagaaaaaatgcccgatgatttccctgatacaatgagtgaaaatcttgttggccttgtttcaagaaagagggcgagctttgtaaaatcaggttcaaagaggatactttttatcgatgttggaacaaagaactcacttataaataacctggcaaaaattgcatcgctgcacattgtgccatacaactatgattttgattcaataaaggatgattatgacatgatctttataccgaatggccccggggatcctgcacatgaatcacttgatgaactaagagattttataaaaagatcatttggaagcatcccggtgactggtgtttgccttggaaaccagatcatagcactggcggctggtgcaagaacagaaaagatgaagtttggccatcgcggtgtgaatcacgccgtaacaaatggggataaaatatacataacatcgcataaccatggatacgccgtttcaagggattcattaaatggcacaggactaaggctggccggctgggatattaatgatggaactgttgaaatgcttgagggcgatgagttaaaaaccttttcagttcagtttcatcctgaggcgcatcccggtccatacgatggcgaatggttttttggaaggttaagggagatgcttggtgattga

SEQ ID NO: 95150 - protein, 347 aa, Picrophilus torridus DSM 9790
MYRYLILEDGTVYKGTAYGYEGETHGELVFTTSMSGYLETITDPSYAGQILIFAYPEIANYPLSYESMESDRIQVSGLITRDAHAEMPAGNLGISFDEFMRMNKVPGIDGIDTRHLVEKIRRKGVMKAWIRNTEKMPDDFPDTMSENLVGLVSRKRASFVKSGSKRILFIDVGTKNSLINNLAKIASLHIVPYNYDFDSIKDDYDMIFIPNGPGDPAHESLDELRDFIKRSFGSIPVTGVCLGNQIIALAAGARTEKMKFGHRGVNHAVTNGDKIYITSHNHGYAVSRDSLNGTGLRLAGWDINDGTVEMLEGDELKTFSVQFHPEAHPGPYDGEWFFGRLREMLGD

SEQ ID NO: 95151 - DNA, 1089 bp, Propionibacterium acnes KPA171202
  CDS (1)..(1089): transl_table=11
gtgagcagacgcaccctgttattggccgacgggacaagctaccagggcgaggctttcggggccgatcgtgaggtgagtgccgaggtcgtcttcactaccggcatgaccggctaccaggaaactttgaccgaccagtcctataacggacaaatcgtcaccttcacctacccccttattggcaattgcggaatcaaccgtgatgatatggagtcgctattcccgacgaccgccggggtcatctgccgcgaggtgccgcgactggctagcaactggcgcaatcggcgtagccttggcgaatttctcaccacccacggcatccctggtctggctgggattgatactcgtgctttggtgcgtcggttgcgcaccgcgggagtcatgaagggtgtgttgctggcccctgacgctgatctcgacgctgagctggggaagttgcgaaacatccacttgcctaccgaccagatcgcccaggtgtccacccgcaccgcctacccgtcacccttgggcgggcgcagtgtggtgctcttcgacttcggtcttaagcactccatcttgcgggagctgagcaggcgaggttgtgccgtgaccgttgtgccgtggaacatctcagccgatcgggtgcgggccctggcgcccgacggcatcatgctttctaacggccccggggacccgaaatccatcccgggggtacaggatgtggtgcgagaactgcaggaggagtacccggtcttcggtatttgcatgggccatcagatctttgctctggctaacggtgccgatacctataagctgcgtttcggccatcgcggcttcaaccaccccgtccgcgagctgtcgaccggtcggatcgacttcaccagccagaaccacggctacgtcgttgatcccgaatcggtgtccggcaccgagttggaggtgacccacatcgagattaatgatgagaccgtcatgggtgtgcgtcatacccgactcggttctttttcggtgcagtaccaccccgacgccgccgctggacctcacgatgccgctcacgtcttcgacgactttgtcgctctcatggacgccaatcacactggaggccagaactga

SEQ ID NO: 95152 - protein, 362 aa, Propionibacterium acnes KPA171202
MSRRTLLLADGTSYQGEAFGADREVSAEVVFTTGMTGYQETLTDQSYNGQIVTFTYPLIGNCGINRDDMESLFPTTAGVICREVPRLASNWRNRRSLGEFLTTHGIPGLAGIDTRALVRRLRTAGVMKGVLLAPDADLDAELGKLRNIHLPTDQIAQVSTRTAYPSPLGGRSVVLFDFGLKHSILRELSRRGCAVTVVPWNISADRVRALAPDGIMLSNGPGDPKSIPGVQDVVRELQEEYPVFGICMGHQIFALANGADTYKLRFGHRGFNHPVRELSTGRIDFTSQNHGYVVDPESVSGTELEVTHIEINDETVMGVRHTRLGSFSVQYHPDAAAGPHDAAHVFDDFVALMDANHTGGQN

SEQ ID NO: 95153 - DNA, 1164 bp, Leifsonia xyli subsp. xyli str. CTCB07
  CDS (1)..(1164): transl_table=11
gtgaggggtgacatgagcgcattcgaacctgcggtcctcgtcctcgaagacggaaagcgctacgtgggccgggcctacggcgcgcgtgggcggacgctcggcgaggtcgtgttcgcgaccgggatgaccggctaccaggagacgctgaccgacccgtcgtacgcgggccagatcgtgctcatgacggcgccgcacatcggcaacaccggcacgaacgacgaggatatggagtcgcgacagatctgggtggcggggttcgtcgtccgcgagccgagccgcgtcgtctcgaacttccgcgcgcagcgcagcctggacgacgacctgcaggcgcagggcgtggtgggcatcagcgggatcgacacgcgcgccgtgacccgccacatccggtcggccggcgcaatgcgcgccggtgtgttctcgggggaggacttcgggctgagcgacagcgagcagctcgacctggtgctcaccgggtcgaagatggccggccgcaacctctcggccgaggtctcgaccgtcgagccgtacacggtgccggcggtcggtgagcggatcggctcggtggcggtgctcgacctcggcgtcaagaagtcgacgctcgacaacctcgccggacgcgggctcgacgtgcatgtgctcccgcagcaggtgtcggcgcaggatgtgctgagcctgaacccgacagcgctgttcttctccaacggccccggcgacccgcaggcctccgacaagcacgtcgcgctcctccaggagacgctgcgggccggtctgccctacttcggcatctgcttcggcaaccagctgctcggccgcgcgctcggcctcggcacgtacaagctgccgttcgggcaccgcgggatcaaccaaccggtgctcgacaagcgcacgggccgcgtggagatcaccgcgcagaaccacggcttcgcggtcgaggcgccgcgggaggggaccttcgcctcgcccgccggcttcgggcaggtcgaggtgagccacatcagcctcaacgacaacgttgtcgaggggctcaactgcctcgaccttccggcgttcagcgtgcagtaccatccagaggcggcggcgggaccgaacgacgccaactacttgttcgaccggtttctcaccatgatcaaggatcgcaccgcaacccaggaaggctccgactga

SEQ ID NO: 95154 - protein, 387 aa, Leifsonia xyli subsp. xyli str. CTCB07
MRGDMSAFEPAVLVLEDGKRYVGRAYGARGRTLGEVVFATGMTGYQETLTDPSYAGQIVLMTAPHIGNTGTNDEDMESRQIWVAGFVVREPSRVVSNFRAQRSLDDDLQAQGVVGISGIDTRAVTRHIRSAGAMRAGVFSGEDFGLSDSEQLDLVLTGSKMAGRNLSAEVSTVEPYTVPAVGERIGSVAVLDLGVKKSTLDNLAGRGLDVHVLPQQVSAQDVLSLNPTALFFSNGPGDPQASDKHVALLQETLRAGLPYFGICFGNQLLGRALGLGTYKLPFGHRGINQPVLDKRTGRVEITAQNHGFAVEAPREGTFASPAGFGQVEVSHISLNDNVVEGLNCLDLPAFSVQYHPEAAAGPNDANYLFDRFLTMIKDRTATQEGSD

SEQ ID NO: 95155 - DNA, 1155 bp, Desulfotalea psychrophila LSv54
  CDS (1)..(1155): transl_table=11
atgtggccacaaaagagggaagaagtaatgaaagcaattatcgctttagaagacggcactatttttgaaggtaaatcgttcaccggtcgcggagaggcaattggtgaaatcgtatttaacacttctatgagtggttatcaggaaatactcacggatccatcctacaccggtcagatagttacaatgacctatcccatgatcggtaactatgggatcaaccctgaagatatggaatcttcttcggtgcatccaaaggcatttcttgtaaaagaatacaacgctttcccatcaaactatcgttcaacccagcctctcgcccagttcctggaaacatacggagtccttggcgtagagggatttgacaccagggccctggttcgacacatccgtaaggccggtgccatgaaaggtatcgtctccaccgaagaccttgaccatgcatctcttgttaagaaggctcaggagtggacaggcctcgtcggtcaaaacatggttgaacgggtttcctgcgaaaagccctatggctgggccgacaatatgcctctcagcggcagcaacttcagcacagcaaagtctgcggataataacgaaaaagcatttaaggttgtagcctttgactttggcatcaagtacaaccaactgcgcatccttgcagagaaaggttgccaggtacaggtagtacctgccacaaccagcgcccaggcagtgcttgacatgaatcccgatggcattttcctctccaacggccccggcgatccggaaggcgttgagggcgttgttgacaccatccgtgaactgctcggcaaaaaaccaatctttggcatctgccttggtcaccaaatactcggcctggcctatggagcccgtagctacaagctcaagtttggtcatcgcggcggcaatcagccggtaaagaatttagaaacaggcaaggtagaaatcacctcccagaatcatggtttctgcattgacacgacaagcctgaacgaggaggatgtaaaaatcactcacatcaacctcaacgacaattccgttgaaggaatgcgtcaccgaaaattccctgctttctcagtacaatatcacccagaacatgcacctggtccacacgatgcgacctacctcttcgatgaattcatcgagatgatgcagcagtag

SEQ ID NO: 95156 - protein, 384 aa, Desulfotalea psychrophila LSv54
MWPQKREEVMKAIIALEDGTIFEGKSFTGRGEAIGEIVFNTSMSGYQEILTDPSYTGQIVTMTYPMIGNYGINPEDMESSSVHPKAFLVKEYNAFPSNYRSTQPLAQFLETYGVLGVEGFDTRALVRHIRKAGAMKGIVSTEDLDHASLVKKAQEWTGLVGQNMVERVSCEKPYGWADNMPLSGSNFSTAKSADNNEKAFKVVAFDFGIKYNQLRILAEKGCQVQVVPATTSAQAVLDMNPDGIFLSNGPGDPEGVEGVVDTIRELLGKKPIFGICLGHQILGLAYGARSYKLKFGHRGGNQPVKNLETGKVEITSQNHGFCIDTTSLNEEDVKITHINLNDNSVEGMRHRKFPAFSVQYHPEHAPGPHDATYLFDEFIEMMQQ

SEQ ID NO: 95157 - DNA, 1128 bp, Mannheimia succiniciproducens MBEL55E
  CDS (1)..(1128): transl_table=11
atgtctgaacctgcaattcttgtattggcagatggcagtatttttcgcggcacctctatcggcgctgcggggcacacgatcggcgaagtggtatttaatacctcaatgaccggttatcaggaaattcttaccgacccttcttattttaaacaaatcgtcactctgacttacccgcatatcggcaacaccggtacaaattccgaagatctcgaaagcaacggcgtgtatgccgcaggcttaattattcgcgacttaccgatgattcacagcaatttccgcgccaatcaaagtctgtcggattatttaaaagacaataacgtagttgccattgcggatatcgatacccgtcgcttaacccgtttattgcgggataaaggcgccatggcgggctgcattatgagcggcgaagttgacgagcaaaaagctctcgaactagccttgagtttcggctctatggcgggtaaagatttagcccaggaagtcacggcacagcaaagttaccgttggacacaaggcgaatgggtgttgggcaaaggttatgcggaacaacaaaacgcatcgttcaatgtggtggcctatgacttcggagtgaaacataatattttacgaatgcttgccgaacgcggctgtaaattaaccgtggtgccggcaaaaacatccgctgaagaagtgcttgcgctgaatccggacggtattttcttatctaacggccccggcgatccggaaccctgcgattacgcaatcagcgccattcaaaccttattagccactaaaaaaccgattttcggtatttgtttaggccatcaattgttaggtttagcaagcggcggcaaaaccaaaaaaatggcattcggacaccatggtgccaaccatccggtacaggatttagatacgcaaaaagtgatgatcactagccaaaaccatgggtttgaagtggatgaacacagcctgcccgccaatgtgcgcgtcactcaccgttcattattcgacaattccgtacaaggcatcgaactgaccgaccaaccggcattcagtttccagggccacccggaagccagcccggggccgcatgatgtggcttatttatttgataaatttatcgatgccatgaaacaggccaaggcttaa

SEQ ID NO: 95158 - protein, 375 aa, Mannheimia succiniciproducens MBEL55E
MSEPAILVLADGSIFRGTSIGAAGHTIGEVVFNTSMTGYQEILTDPSYFKQIVTLTYPHIGNTGTNSEDLESNGVYAAGLIIRDLPMIHSNFRANQSLSDYLKDNNVVAIADIDTRRLTRLLRDKGAMAGCIMSGEVDEQKALELALSFGSMAGKDLAQEVTAQQSYRWTQGEWVLGKGYAEQQNASFNVVAYDFGVKHNILRMLAERGCKLTVVPAKTSAEEVLALNPDGIFLSNGPGDPEPCDYAISAIQTLLATKKPIFGICLGHQLLGLASGGKTKKMAFGHHGANHPVQDLDTQKVMITSQNHGFEVDEHSLPANVRVTHRSLFDNSVQGIELTDQPAFSFQGHPEASPGPHDVAYLFDKFIDAMKQAKA

SEQ ID NO: 95159 - DNA, 1125 bp, Legionella pneumophila subsp. pneumophila str. Philadelphia 1
  CDS (1)..(1125): transl_table=11
ttgagtatattcatgattaataaatcagcaattttagctttagctgatggcactgtttatgagggcctgtcagtaggggccagtggtgattctgttggtgagttggtttttaacacgtcaatgactggctatcaggaaatgcttactgatccttcgtatgccagacaaataattaccttaactactgctcatgtgggaaataccggttgtaacatggaggacatggagtccacaaaagtctgggcagccggcctcgtcatgagaaactgcactgcaatccctagcaattacagagctgaacaatccttcccagactggttaagtaaaaatggagtagttgcaatttctggcattgatacgcgcgcgcttacactgaaattgcgtgagaagggttctatcggagcctgtattagcaccaatgtggagaaacctgaaattgttgtggcaaaggctaaatcctttgcagggcttcagggtgcagatttggctttagaggttacaagacaaacgatagagcgttggcatgaaggtcggggaatgtggagtctagacaaacagcctcaacagcttcatgttgttgcctatgattttggtgtaaaacataatattttacgtatcttacatgataagggatgccatattactatagtccctgctaaaacttctgcagaagaggttttagccatgaatcctaatggtgtctttttatccaatggaccgggtgatccccaagcatgcgattatgccatcaaagcaacacaggtgtttttagacaataatattcctttatttggtatatgccttgggtttcagattttggctttggcatgtggtggtattactaaaaaaatgaaatttggacatcatggttccaatcatcctgtagttgaaacaactggcaaaaaacgtgtttttataacaagtcaaaatcatggttttgctgtagatgaggattcattgcccaattgcctggaagttacgcatcgttcattatttgataacagtttacagggaataaggcacaaaacaaaaccggcatttggttttcaaggccatccagaagcaagccctgggccacatgatatagatattttatttaatgaatttttaaatctgatgaaataa

SEQ ID NO: 95160 - protein, 374 aa, Legionella pneumophila subsp. pneumophila str. Philadelphia 1
MSIFMINKSAILALADGTVYEGLSVGASGDSVGELVFNTSMTGYQEMLTDPSYARQIITLTTAHVGNTGCNMEDMESTKVWAAGLVMRNCTAIPSNYRAEQSFPDWLSKNGVVAISGIDTRALTLKLREKGSIGACISTNVEKPEIVVAKAKSFAGLQGADLALEVTRQTIERWHEGRGMWSLDKQPQQLHVVAYDFGVKHNILRILHDKGCHITIVPAKTSAEEVLAMNPNGVFLSNGPGDPQACDYAIKATQVFLDNNIPLFGICLGFQILALACGGITKKMKFGHHGSNHPVVETTGKKRVFITSQNHGFAVDEDSLPNCLEVTHRSLFDNSLQGIRHKTKPAFGFQGHPEASPGPHDIDILFNEFLNLMK

SEQ ID NO: 95161 - DNA, 1146 bp, Burkholderia pseudomallei K96243
  CDS (1)..(1146): transl_table=11
gtgttgccgtctttttctcccgctttgctcgcactcgccgacggcacggtctttcgtggttattcgatcggcgcggccggccatacgatcggcgaagtcgtgttcaacaccgcgatcaccggctatcaggaaatcctgacggatccgagctatgcgcgccagatcgtcacgctgacctatccgcacatcggcaacgtcggcgtgaacgccgaggacgtcgaagcgacgaaagtccatgccgccggcctcatcgtgcgcgatttgcccgcgctcgcgtcgaacttccggatggcgcgcacgctcggcgattacctgcgcgacgaaggcgtcgtcgcgatcgcgggcatcgacacccgcaagctgacccgcatcctgcgcgacaagggcgcgcagaacggctgcatcctgacgggctccgacgacgaaacgaaggcgctcgcgctcgcgcgctcgttcccgggcctcgcggggatggacctcgcgaaggtcgtctcgacggccaagccgttcgagtggaagcagacggaatggcgcctcggcagcggctacgggatgcaggagacgccgcgctaccgcgtcgtcgcgttcgatttcggcgtgaaatacaacatcctgcgcatgctcgccgagcgcggctgccacgtgagcgtgctgcccgcgcaatcgagcgcggccgacgcgctcgcgctcaatccggacggcatcttcctgtcgaacggcccgggcgatccgcagccgtgcgactacgcgatcgccgcgacccgggagttcatcgagcgcggcgtgccgaccttcggcatctgcctcggccaccagatcatgggcctcgcgctcggcgcgaagacgctcaagatgaagacgggccatcacggcgcgaaccatccggtgaaggatctcgcgaacggccgtgtcgtgatcacgtcgcaaaaccacggcttcgcggtcgacgccgattcgctgcccgcgaacgcgcgcgcgacgcacgtgtcgctgttcgacggcacgctgcagggcttcgagctgaccgacaagcccgcgttctgcttccaggggcacccggaggcgtcgcccggcccgcacgacatcggctatctgttcgaccgcttcaccgcgctgatggacgcggcgaaggcgcgcagcgcctga

SEQ ID NO: 95162 - protein, 381 aa, Burkholderia pseudomallei K96243
MLPSFSPALLALADGTVFRGYSIGAAGHTIGEVVFNTAITGYQEILTDPSYARQIVTLTYPHIGNVGVNAEDVEATKVHAAGLIVRDLPALASNFRMARTLGDYLRDEGVVAIAGIDTRKLTRILRDKGAQNGCILTGSDDETKALALARSFPGLAGMDLAKVVSTAKPFEWKQTEWRLGSGYGMQETPRYRVVAFDFGVKYNILRMLAERGCHVSVLPAQSSAADALALNPDGIFLSNGPGDPQPCDYAIAATREFIERGVPTFGICLGHQIMGLALGAKTLKMKTGHHGANHPVKDLANGRVVITSQNHGFAVDADSLPANARATHVSLFDGTLQGFELTDKPAFCFQGHPEASPGPHDIGYLFDRFTALMDAAKARSA

SEQ ID NO: 95163 - DNA, 1137 bp, Methylococcus capsulatus str. Bath
  CDS (1)..(1137): transl_table=11
ttgaaaactcccgcgctgctcgctcttgacgacggtaccgtgtttcgtggctacgcgatcggggccgagggggcatcggtgggcgaggtggtgttcaatacctcgatcaccggctaccaggaaatcctcaccgatccgtcctacgcgcggcagatcgtcgcgctgacctatccccacatcggcaacaccggcatcaacgaagaagacaccgaatctaccggcattttcgccagcggattggtgatccgtgatctgccgctgcgggccagcaactggcggtgcgagcgccggctcgacgaatacctgcgccagcgcggcgtggtcggcattgccggcctggatacccgccggctgacccgtatcctgcgcgacaagggggcccagcgcggttgcatcgcagccggcaacggcctggatgccgacgctgcggtggcgatggcccggggttttcccggattgcagggtatggatctggctcaggtcgtcaccaccccgcagcgctatgagtggaccgaaggcagctggcggttcggcgccgagccggtacagtcaggtcaaggcggtttccatgtcgtcgcgtacgatttcggagtcaagcgaaacatcctgcgactgctcgcggatcgaggctgccgggtcaccgtggtacccgcccggacgccggcagcggaagcgttggcgctcaaacccgacggcttgttcctatcgaacggtcctggtgatccggagccttgcgactacgccgttgcggcgatccgggaattcctggacaccggcattccggttttcggcatctgcctggggcatcagttgctggccctcgcggcgggcgcgcgcacgtcgaagatgaagttcggccatcacggcgccaaccatccggtgcaggacctgagcaccggccgggtcgtgatcaccagccagaaccacggtttcgccgtggaggaggccagcctgccggcgaacgtgagaccgacccaccgctcgctgttcgacggcagtctgcagggcatcgaattcaccgatcgttctgccttcagtttccaagggcatccggaagccagtcctggcccgcacgatctgtgcgacctgttcgaccgcttcgtcggcgccatgagagccgcccgcaaccgccattaa

SEQ ID NO: 95164 - protein, 378 aa, Methylococcus capsulatus str. Bath
MKTPALLALDDGTVFRGYAIGAEGASVGEVVFNTSITGYQEILTDPSYARQIVALTYPHIGNTGINEEDTESTGIFASGLVIRDLPLRASNWRCERRLDEYLRQRGVVGIAGLDTRRLTRILRDKGAQRGCIAAGNGLDADAAVAMARGFPGLQGMDLAQVVTTPQRYEWTEGSWRFGAEPVQSGQGGFHVVAYDFGVKRNILRLLADRGCRVTVVPARTPAAEALALKPDGLFLSNGPGDPEPCDYAVAAIREFLDTGIPVFGICLGHQLLALAAGARTSKMKFGHHGANHPVQDLSTGRVVITSQNHGFAVEEASLPANVRPTHRSLFDGSLQGIEFTDRSAFSFQGHPEASPGPHDLCDLFDRFVGAMRAARNRH

SEQ ID NO: 95165 - DNA, 1218 bp, Anaplasma marginale str. St. Maries
  CDS (1)..(1218): transl_table=11
gtggcggcaccatatgaacataacaccagaaaatgcatattaaaatctacaaataacccgttaacttttgtcaggttttgtactacaataccggggtttttgttttcgttactagccatgatatatggccgtcatgatgcagtgctggtgctgtcggatggtcgccactttttcggtacatccctgggaaaaaggcaagactgcgtaggtgaggtgtgcttcactacagggttcactggctatcaatataccataactgacccgtcatttgccgggcagatagtggttttttcctttccgcatataggaaatgtaggcgtcaatagcagagatttcgaatgtgagcatgtgctcgcaaggggcatagtggtcagggaaatgtcccacgcgtctcacgtatcttcattggctgacctaaactcctggatggaagccagcggagttagcggaatatcgggagttgatacccgggcgcttaccttgcatttgcgtgagcatggttcacaaaacggggtaatacactgctttgacgacccggatctgctagatttacagaagctgaaaagcgctgccatggcgcccacagtgcccactgtagctactgaactccctcatttaaagagtcatcaggtttcgcataccggtttgaggatctgtgtcatagatgtaggagcaaagcgtggaataatgcagacgttatctacccttggatgcgctatacacgttgtagcggcaagggacgatttcgtgacgcaaattatggatttgcgcccacaggggatagtaatctccaacggtcctggtgaccctcacgccgtcccaactgacacaatagaacagttgcgcgtcctactgcagcaaggaataccaatgctcgggatatgtctaggacaccaactactagctattgccataggagcaaaaaccgtcaaaatgcggcacggccaccggggaagcaaccatccggtatacaacgtcgcaaccaaggctgttgaggtaaccagccaaaaccatgggtttgccgtagacgcgcagactttaccagaaaatgcggaagtcacccatatatcattgttcgatggcacaatagagggcatgaaattgctagatcgtccggtactttctgtgcagtatcacccagaagggcaccccggtccgcatgattcgcattacatattcagagatttcgtaaaccttgctagagcctatagatggtga

SEQ ID NO: 95166 - protein, 405 aa, Anaplasma marginale str. St. Maries
MAAPYEHNTRKCILKSTNNPLTFVRFCTTIPGFLFSLLAMIYGRHDAVLVLSDGRHFFGTSLGKRQDCVGEVCFTTGFTGYQYTITDPSFAGQIVVFSFPHIGNVGVNSRDFECEHVLARGIVVREMSHASHVSSLADLNSWMEASGVSGISGVDTRALTLHLREHGSQNGVIHCFDDPDLLDLQKLKSAAMAPTVPTVATELPHLKSHQVSHTGLRICVIDVGAKRGIMQTLSTLGCAIHVVAARDDFVTQIMDLRPQGIVISNGPGDPHAVPTDTIEQLRVLLQQGIPMLGICLGHQLLAIAIGAKTVKMRHGHRGSNHPVYNVATKAVEVTSQNHGFAVDAQTLPENAEVTHISLFDGTIEGMKLLDRPVLSVQYHPEGHPGPHDSHYIFRDFVNLARAYRW

SEQ ID NO: 95167 - DNA, 1146 bp, Azoarcus sp. EbN1
  CDS (1)..(1146): transl_table=11
gtgactgcttccccgcccgccctactagcgcttgccgacgggacggtattttttggcaagggagtcggtgcggccggcagcacggtcggtgaggtggtgttcaacacctcgatgtccggttatcaggaaatcctcaccgacccgagctactgccgccagatcgtaacgctgacttatccgcatatcggcaacaccggcatcaatcgggaagacgtcgaagcagggcgtgttcatgccgcaggtctggtgatccgcgacctgccgatactgccgtcgaacttccgcatggaccagactctcgatgcctatctcaaggccgagaacatcgtcgcgattgcggggatcgacacccgcaagctgacgcgtgtgctgcgcgaaaaaggcgcgcaaggcggctgcatcgtcactgcggccgacggtgccaccttgaatcccgatgcggcgatcgccgcggctcgtgcgttccccggtcttgcgggcatggacctggccaaggtcgtctgtgtcgaaagtccgtatcaatggaccgagggcgagtgggcgctcggcagcggctacggcgagcggggagacgggcgctaccacgtcgtcgcgtacgattacggcgtcaagcgcaacattctgcggatgctcgcgagccggggctgcaggctcaccgttgtccctgcgcagacgccggctgcggaagtcttcgcgctcgatgccgatggcgtttttctgtcgaacggtccgggggatccgggcgcctgcgattatgcgatcgcggcagtgcgcagtttcctcgagcgcggcatcccgaccttcggcatctgcctgggccagcagctgatggcgctcgcggccggcgccaggacggtcaagatgaagttcggccaccatggcgcgaaccatccggtcaaggatctcgaatccgggcaggtcctgatcaccagccagaaccacggcttcgcggtcgatcccgatacgctcccggggaatgtgcgcacgacgcatgtgtcgctgttcgacggcagcctgcaggggctcgcctggaacgacgtgccggcgttctgctttcagggacatcccgaagcgagtccggggccgcacgacgtgtcatacctgttcgaccgtttcatcaggatgctcgagacgcgcgccaagtaa

SEQ ID NO: 95168 - protein, 381 aa, Azoarcus sp. EbN1
MTASPPALLALADGTVFFGKGVGAAGSTVGEVVFNTSMSGYQEILTDPSYCRQIVTLTYPHIGNTGINREDVEAGRVHAAGLVIRDLPILPSNFRMDQTLDAYLKAENIVAIAGIDTRKLTRVLREKGAQGGCIVTAADGATLNPDAAIAAARAFPGLAGMDLAKVVCVESPYQWTEGEWALGSGYGERGDGRYHVVAYDYGVKRNILRMLASRGCRLTVVPAQTPAAEVFALDADGVFLSNGPGDPGACDYAIAAVRSFLERGIPTFGICLGQQLMALAAGARTVKMKFGHHGANHPVKDLESGQVLITSQNHGFAVDPDTLPGNVRTTHVSLFDGSLQGLAWNDVPAFCFQGHPEASPGPHDVSYLFDRFIRMLETRAK

SEQ ID NO: 95169 - DNA, 1167 bp, Silicibacter pomeroyi DSS-3
  CDS (1)..(1167): transl_table=11
atggcccagaaccccctgtccaagcccaccgcatgcctggttctggccgatggaacagtgttttacggcaccggcttcggcgccaccggccagaccgtggccgagctgtgcttcaacacggcgatgaccggctatcaagagatcatgaccgatccctcttatgcgggccagatcgtgaccttcaccttcccccatatcggcaatgtaggcgtcacccccgaagatgacgaaacaaccgatccggttgccgccggcatggtggtgaaatgggacccgaccgctgcctcgaactggcgcgccgccgaagagctcaagggctggctggcccggcgcggtcgcatcgccatcggtggtgtcgatacccgccgcctgacccgcgccatccgtcagcagggcgcgccgcatgtggccctggcccacgatcccgaaggtaagttcgatctggccgccctgattgccgccgcgcgcggctttgccgggctcgaaggcatggacctggccaaggacgtcacctgtgcccaaagctatcgctgggacgagatgcgctgggcctggcccgagggttatgcccggcaggaggcgcccaagcacaaggttgtcgccatcgactatggtgccaagcgcaatatcctgcgctgccttgcctcgtcgggctgtgacgtgaccgtgctgcccgccacggccaccgcggccgaggtgctggcccatgcacccgacggcgtgttcctgtccaacggtcccggcgacccggcagcgacaggtgaatatgccgtgccgatgatccgcgagatcctcgataccacttccctgcccgtctttggcatctgcctgggacaccagatgctggcgctggcgcttggcggccgcaccgtcaagatgaaccacggccatcacggtgccaaccacccggtcaaggacctggaaaccggcaaggtcgagatcacctcgatgaaccacggctttgccgtggatgcgcaaagcctgcccgagggggtggtggaaacccaccgctcgctgtttgacggctccaactgcggcatccgcatgagcgagcggcctgtcttctcggtgcagtatcaccccgaggccagcccgggcccgcaggacagcttctatctgttcgaacgctttgccgcggcaatggatgcgcaaaaagcggaagtctga

SEQ ID NO: 95170 - protein, 388 aa, Silicibacter pomeroyi DSS-3
MAQNPLSKPTACLVLADGTVFYGTGFGATGQTVAELCFNTAMTGYQEIMTDPSYAGQIVTFTFPHIGNVGVTPEDDETTDPVAAGMVVKWDPTAASNWRAAEELKGWLARRGRIAIGGVDTRRLTRAIRQQGAPHVALAHDPEGKFDLAALIAAARGFAGLEGMDLAKDVTCAQSYRWDEMRWAWPEGYARQEAPKHKVVAIDYGAKRNILRCLASSGCDVTVLPATATAAEVLAHAPDGVFLSNGPGDPAATGEYAVPMIREILDTTSLPVFGICLGHQMLALALGGRTVKMNHGHHGANHPVKDLETGKVEITSMNHGFAVDAQSLPEGVVETHRSLFDGSNCGIRMSERPVFSVQYHPEASPGPQDSFYLFERFAAAMDAQKAEV

SEQ ID NO: 95171 - DNA, 1176 bp, Synechococcus elongatus PCC 6301
  CDS (1)..(1176): transl_table=11
atggttcggatctcgggcttttgctgcgctatgtcccttgctgaacgccaagctgctctgctcgtcttggctgacggatccgtattccatggttacgcctgcggggcggcgggaacggtcatcggtgaagttgtcttcaacaccggcatgaccggctatcaagaagtgctgacagacccgagctactgtgggcagattgtcagctttacctatcccgagctgggcaacaccggggtcaaccccgaagacgaagagtctgcccggcctcaagtcagcggcttgattgctcgtaatgttgctcgccgccacagcaactggcgggccgatcgctccctgcctgactatttgcaacagcacaacattgttggcatctacggcatcgacacccgcgccctcacgcaacatttgcgatcgacgggggcgatgaatggcggcatctccacaactattttggatcctgaagaactctgggcagaagtcaaagccgccccatccatggaagggttgaatttggtcgatcaagtcacgaccgatcgcccctacgagtggcaaactcccaccagtcaaacctgggaatttattgaagggccaaccacagagtccctgacagttgtcgccatcgacttcggcgtgaagcgcaatatcctgcgccgcttggccagctatggttgccgtgtgatcgtggttccggccgatacgccgatcgaagaaatcctgcggcacgagccagatggtgtctttctctccaatggccctggcgatccagccacggtcaaaaatgggatcagcaccgcccaagcactcctgcaaactggactgccgttgtttgggatttgcctcgggcaccagattctggggtcagccttgggggctcaaaccttcaagctcaagtttggccaccgggggctcaaccacccctgtggcttgtcccagcaggtcgagatcaccggccaaaaccacggctttgcgatcgcggcggactccttagggccggatgtggaagtcacccacctcaacctcaacgatcgcacggtagcggggttacgacaccgccatctgcccgtcttctcggtccagtatcaccccgaagccagcccagggccccatgattctgactatctgtttgagcagtttgtggctttaatgcgcgatcgccaacccactccagtggcttag

SEQ ID NO: 95172 - protein, 391 aa, Synechococcus elongatus PCC 6301
MVRISGFCCAMSLAERQAALLVLADGSVFHGYACGAAGTVIGEVVFNTGMTGYQEVLTDPSYCGQIVSFTYPELGNTGVNPEDEESARPQVSGLIARNVARRHSNWRADRSLPDYLQQHNIVGIYGIDTRALTQHLRSTGAMNGGISTTILDPEELWAEVKAAPSMEGLNLVDQVTTDRPYEWQTPTSQTWEFIEGPTTESLTVVAIDFGVKRNILRRLASYGCRVIVVPADTPIEEILRHEPDGVFLSNGPGDPATVKNGISTAQALLQTGLPLFGICLGHQILGSALGAQTFKLKFGHRGLNHPCGLSQQVEITGQNHGFAIAADSLGPDVEVTHLNLNDRTVAGLRHRHLPVFSVQYHPEASPGPHDSDYLFEQFVALMRDRQPTPVA

SEQ ID NO: 95173 - DNA, 1086 bp, Bacillus clausii KSM-K16
  CDS (1)..(1086): transl_table=11
atgaataaactgcttgttcttgaagacggtacagttttaagaggagaaggatttggcgctgatgtcgaaatgagcggggaagtcgtcttcaatacgggcatgactggctaccaagaaattatgtctgatccctcttattgcgggcaaatcgtcatgctgacctatccgctaattggcaattatggcattaaccgcgacgattttgaatcactgcaaccagcgattgccggattgattgtgcgtgaaatcgagcacgaaccaagccattggcgcaaacaagaatcgctgcacgacctacttgccgccaaaggcattcctgggattgctggcattgatacacgcatgttaacaagaaaaattcgcgcacatggcacacgccgtggccgcatttgcgatcttgatgtagacgtcgaacaagtggcaaggggtttgcgggaaagcaagccgcttactgaccaagttgcccgtgtatcaacgaatactgcttaccatgtaccagggaaaggcatgcgggttgctttaatcgattgcggcatgaaacatggtattctgcaatcactcatcgaccgccattgtgatgtcgtcgttgtcccttacaatacaggtgcagatgagattaagcgccttggcgtcgatggtgtgcttgtttcaaatggaccaggcgacccagaaaatgtccctgagacagtggaaacagtcaagcaactgcttggcgatatccctcttttcggcatttgcttaggccaccaattgctggcgcttgcttgtggagcgacgacgagcaagatgacatttggccaccgtggttccaaccaccccgtacgggagctcgctactggacgaattgacattaccgcccaaaaccacggctatacagtcgatgctgggtcattggaagggactgcgctcaagctcacacatgtggctgtcaatgatggctccgttgaaggccttcgccataaagaagggcatgcatttagcgtacagtatcatccagaagcatcgcctggccctcatgacgccagccatttatttgatacgtttatccacatgatgaccgaaaaaaaaggaaaagtttacgcataa

SEQ ID NO: 95174 - protein, 361 aa, Bacillus clausii KSM-K16
MNKLLVLEDGTVLRGEGFGADVEMSGEVVFNTGMTGYQEIMSDPSYCGQIVMLTYPLIGNYGINRDDFESLQPAIAGLIVREIEHEPSHWRKQESLHDLLAAKGIPGIAGIDTRMLTRKIRAHGTRRGRICDLDVDVEQVARGLRESKPLTDQVARVSTNTAYHVPGKGMRVALIDCGMKHGILQSLIDRHCDVVVVPYNTGADEIKRLGVDGVLVSNGPGDPENVPETVETVKQLLGDIPLFGICLGHQLLALACGATTSKMTFGHRGSNHPVRELATGRIDITAQNHGYTVDAGSLEGTALKLTHVAVNDGSVEGLRHKEGHAFSVQYHPEASPGPHDASHLFDTFIHMMTEKKGKVYA

SEQ ID NO: 95175 - DNA, 1083 bp, Bacillus clausii KSM-K16
  CDS (1)..(1083): transl_table=11
atgaaaggctcgatcgtattggaaacgggagaaacatttgtaggtaactggcatggcgaacctaagcaagttgaaggcgaaattgtcttctttactggcatgacaggttatcaagaagtgataactgatccatcatttaaaggacaaatcgtcgtgtttacgtacccgttgatcggaaattacggcgttaatgaaagtgattttgaaagcagcaagccgcaagtcgaaggcgtcattgtttgcgaagctgccagtgacccatcacattggaaaatgaaaaaaagcgttgtcgactacttaagtgaacaccgcattccatatatgtcaggggtagatacacgggcaattgtgaaacgaattcgccaacatggagacatgcgtgcagtattgacgactgattcccgaaatgccaatgtccaggagacgaggcttttgtctgataagtttgttgttgccgatgtgagcgtcacagaacctgtcgtttacaacgccacaggcacaacccatattgccgtactagactatggctgtaaacaatcaatcattcgttcacttgtcaaaaaaggcgcgaaagtgacgcagcttccatacaacacagattttgctgtgctcgaagcacttaaaccggacggtgtccttctctcaaatggacctggaaatccaaagcagctgcaagctttgttgccagacattaaaaaggtggcggaaacgtttccgacgctaggcatttgcttaggccaccagttgcttgcattggcttacggaggggacacacaaaagctccgattcggccatcgcggcgcaaaccagccggtgcttgacagctgcacagggcgtgtgtgtatgacttcgcaaaaccatagttatgtagtgacagaagaatcgctcgcttcatcgatccttgaacctcgtttttacaacattaatgatcgatcgatcgaaggcctcgttcatccgaaacggccagtcatgagcatccagtttcatccggaagcaagcccaggtccagtcgattcgactgaaatctttgatgcgtttttggcgccgcttttaagcaaagggagagatcaccaatatgcgtaa

SEQ ID NO: 95176 - protein, 360 aa, Bacillus clausii KSM-K16
MKGSIVLETGETFVGNWHGEPKQVEGEIVFFTGMTGYQEVITDPSFKGQIVVFTYPLIGNYGVNESDFESSKPQVEGVIVCEAASDPSHWKMKKSVVDYLSEHRIPYMSGVDTRAIVKRIRQHGDMRAVLTTDSRNANVQETRLLSDKFVVADVSVTEPVVYNATGTTHIAVLDYGCKQSIIRSLVKKGAKVTQLPYNTDFAVLEALKPDGVLLSNGPGNPKQLQALLPDIKKVAETFPTLGICLGHQLLALAYGGDTQKLRFGHRGANQPVLDSCTGRVCMTSQNHSYVVTEESLASSILEPRFYNINDRSIEGLVHPKRPVMSIQFHPEASPGPVDSTEIFDAFLAPLLSKGRDHQYA

SEQ ID NO: 95177 - DNA, 1125 bp, Ehrlichia ruminantium str. Welgevonden
  CDS (1)..(1125): transl_table=11
atgtctcaaataaaaaactatttaaacgctatcctaatgctatctgatggaaaatatttccttggaaaatctataggaaacaaatctaatgctgtaggggaagtatgttttactacttcaatgacaggatatcaacatactataacagatccatcatttgcaggccaaataatcacatttacttttcctcacattggcaacattggaataaataaagaagactttgaaaacactcaagtactagcacatggaattgttgtgaaaacaatatcagaagattcccattcaagttcttactcaaacttagaaaattggatgatagaaaataaaataactggaatatctgaaatcgatactagagcattaacacgtcacttaagaaactatggatcacaaaatggaattatacatcatttccatgacatgaattcattaaatctaaaagagttacaaaatacagcatctcaatacaattatgtaaatcattgtcaatcaatttcacaagcttttataagtgattacaatcaagaaccaaagtacaagaccttatacaacatagtagttattaattttggagtaaagtccagtatattaaatgctttatctaatataggatgcaaagtacatatagtaccaggtcatgaatttaatttaatagataaaatattatcattcaatccagatggcatagtattatcaaatggtccaggagatccatctgcaatttctgaacatactatacaacaaattagaagtataatagaattaaaggtaccaacattaggaatctgtctagggcaccaactaattgcactagcattaggtgcacaagttaaaaaaatgttatttggacatagaggaagtaaccatccagtatataataaaatgctcaataacatagaaattactagtcagaaccacggatttaccatagatgaaaactcattatcttcaaacatacaaataactcacacatctctgtttgataacacaattgaaggtattaaagtagaaaattatcccattatttcagtacagtatcatcctgaaggcagtccaggacctaatgatacaaagtacatattagaagattttgttaatttaatacaggaaaaaactgtataa

SEQ ID NO: 95178 - protein, 374 aa, Ehrlichia ruminantium str. Welgevonden
MSQIKNYLNAILMLSDGKYFLGKSIGNKSNAVGEVCFTTSMTGYQHTITDPSFAGQIITFTFPHIGNIGINKEDFENTQVLAHGIVVKTISEDSHSSSYSNLENWMIENKITGISEIDTRALTRHLRNYGSQNGIIHHFHDMNSLNLKELQNTASQYNYVNHCQSISQAFISDYNQEPKYKTLYNIVVINFGVKSSILNALSNIGCKVHIVPGHEFNLIDKILSFNPDGIVLSNGPGDPSAISEHTIQQIRSIIELKVPTLGICLGHQLIALALGAQVKKMLFGHRGSNHPVYNKMLNNIEITSQNHGFTIDENSLSSNIQITHTSLFDNTIEGIKVENYPIISVQYHPEGSPGPNDTKYILEDFVNLIQEKTV

SEQ ID NO: 95179 - DNA, 1095 bp, Dehalococcoides ethenogenes 195
  CDS (1)..(1095): transl_table=11
atgacaaatacagcatacctggtactggaggacggaacagtattcagcggcaaaagcttcggggcggaaactgaagccataggcgaagtggtctttaataccagcatgaacggatatcaggaaatgctgactgacccttcgtataccggccagattattgtccccacttaccctcttatcggcaactacggggtaaacccctttgataatgaatccgcctgcatcagggcaaccgcctttggggtacatgaggaatgcctgctgccaaaccactaccagaataaccaaaccattcactcctttctggaagaatccggcatacccggcataagcggcatagatacccgcgccattacccgtaagctgcgctctgccggggtaatgaggggcatgataaccactaccaaaacccctgaagaagcccttaaaactatccgcagcgcacctgactacgggcagattgactttgtacgcaagataagcactccttcagcctacgaatggcaaaaggaaaaaccctcttttgccgggtttcatatagcggtgctggactgcgggcttaagtactctatacttaaccagctgaaatcccacggctgcaaagtaactgttttgccctgcactgccagcccgcaagacatagatgcccttaatccagacggggtgcttctttcacccggccccggcaacccggaactgctggactatctggtaaatacagtcagatacgcctgtgaaaaatacccggtcatgggcatctgtctgggaaaccagctgataggcaaagccttcggggctaaaacattcaagctgaagttcggccaccggggcggaaaccacccggttaaagaccttgccagcggtcgggtatatataacctcgcaaaatcacggctactcccttgaccccgccaccctgaaagaagggctggaggtcagccacataaacctgaatgacggcacggtggaagggcttcgccaccgcgaactgccggtgttctccatacagtaccactccgaagcttcacccggaccgatggattccacctacctgttcaaacagtttgtggaaatgataaaacaaaccaaaaagtag

SEQ ID NO: 95180 - protein, 364 aa, Dehalococcoides ethenogenes 195
MTNTAYLVLEDGTVFSGKSFGAETEAIGEVVFNTSMNGYQEMLTDPSYTGQIIVPTYPLIGNYGVNPFDNESACIRATAFGVHEECLLPNHYQNNQTIHSFLEESGIPGISGIDTRAITRKLRSAGVMRGMITTTKTPEEALKTIRSAPDYGQIDFVRKISTPSAYEWQKEKPSFAGFHIAVLDCGLKYSILNQLKSHGCKVTVLPCTASPQDIDALNPDGVLLSPGPGNPELLDYLVNTVRYACEKYPVMGICLGNQLIGKAFGAKTFKLKFGHRGGNHPVKDLASGRVYITSQNHGYSLDPATLKEGLEVSHINLNDGTVEGLRHRELPVFSIQYHSEASPGPMDSTYLFKQFVEMIKQTKK

SEQ ID NO: 95181 - DNA, 1080 bp, Ehrlichia ruminantium str. Welgevonden
  CDS (1)..(1080): transl_table=11
atggaaaatatttcccttggaaaatctataggaaacaaatctaatgctgtaggggaagtatgttttactacttcaatgacaggatatcaacatactataacagatccatcatttgcaggccaaataatcacatttacttttcctcacattggcaacattggaataaataaagaagactttgaaaacactcaagtactagcacatggaattgttgtgaaaacaatatcagaagattcccattcaagttcttactcaaacttagaaaattggatgatagaaaataaaataactggaatatctgaaatcgatactagagcattaacacgtcacttaagaaactatggatcacaaaatggaattatacatcatttccatgacatgaattcattaaatctaaaagagttacaaaatacagcatctcaatacaattatgtaaatcattgtcaatcaatttcacaagcttttataagtgattacaatcaagaaccaaagtacaagaccttatacaacatagtagttattaattttggagtaaagtccagtatattaaatgctttatctaatataggatgcaaagtacatatagtaccaggtcatgaatttaatttaatagataaaatattatcattcaatccagatggcatagtattatcaaatggtccaggagatccatctgcaatttctgaacatactatacaacaaattagaagtataatagaattaaaggtaccaacattaggaatctgtctagggcaccaactaattgcactagcattaggtgcacaagttaaaaaaatgttatttggacatagaggaagtaaccatccagtatataataaaatgctcaataacatagaaattactagtcagaaccacggatttaccatagatgaaaactcattatcttcaaacatacaaataactcacacatctctgtttgataacacaattgaaggtattaaagtagaaaattatcccattatttcagtacagtatcatcctgaaggcagtccaggacctaatgatacaaagtacatattagaagattttgttaatttaatacaggaaaaaactgtataa

SEQ ID NO: 95182 - protein, 359 aa, Ehrlichia ruminantium str. Welgevonden
MENISLGKSIGNKSNAVGEVCFTTSMTGYQHTITDPSFAGQIITFTFPHIGNIGINKEDFENTQVLAHGIVVKTISEDSHSSSYSNLENWMIENKITGISEIDTRALTRHLRNYGSQNGIIHHFHDMNSLNLKELQNTASQYNYVNHCQSISQAFISDYNQEPKYKTLYNIVVINFGVKSSILNALSNIGCKVHIVPGHEFNLIDKILSFNPDGIVLSNGPGDPSAISEHTIQQIRSIIELKVPTLGICLGHQLIALALGAQVKKMLFGHRGSNHPVYNKMLNNIEITSQNHGFTIDENSLSSNIQITHTSLFDNTIEGIKVENYPIISVQYHPEGSPGPNDTKYILEDFVNLIQEKTV

SEQ ID NO: 95183 - DNA, 1134 bp, Neisseria gonorrhoeae FA 1090
  CDS (1)..(1134): transl_table=11
atgaacacccccgccctcctcgtcctcgctgacggcagcgtattccacggcacatcaatcggttacgaaggttcggcttccggcgaagtcgtgttcaatacttcgatgaccggctatcaggaaatcctgaccgacccgtcctactgcaaacaaatcgttaccctcacctacccccacatcggcaataccggcaccaacgccgaagatgaagaaagccgcagcgtttacgccgcaggcctgattatccgcgacctgccgctcttgcacagcagcttccgcgcctccgaaagcctgcacgactatttggtacgcaacgaaaccgtcgccatcgccgacatcgacacccgccgcctgaccatgctgttgcgcgaaaaaggcgcgcaaggcggcgcgattctgacaggtgcggatgccaccgttgaaaaagcgcaagaactcatcgccgcgttcggcagcatggtcggcaaagatttggcaaaagaagtttcctgcacggaaacttacgaatggacggaaggcgaatgggaattgggcaaaggtttcgttacccctgacaaacagccttaccacgtcgtcgcctacgatttcggcgtgaaaaccaacatcctgcgtatgctcgcctcgcgcggctgccgcctgaccgtcgtccccgcacaaacgagcgcggaagacgtgttggcactcaatcccgacggcgtgttcctgtccaacggccccggcgaccccgagccttgcacctacgccatcgaagccgtgcaaaaactgatggaaagcggcaaaccgattttcggcatctgcttgggacaccagctcatcagcctcgccatcggcgcgaaaaccctgaaaatgcgcttcagccaccacggtgcgaaccatcctgtgcaagatttggacagcggcaaagtcgtcattaccagccaaaaccacggtttcgccgtcgatgccgacaccctgcccgccaacgcacgcattacccacaaatccttgttcgacaataccttgcaaggcatcgagctgaccgacaaacccgtgttctgtttccaaggacaccccgaagccagcccgggtccgcaagatgtcggctatttgttcgacaaattcattggcaatatgaaggctgcaaaacaagcataa

SEQ ID NO: 95184 - protein, 377 aa, Neisseria gonorrhoeae FA 1090
MNTPALLVLADGSVFHGTSIGYEGSASGEVVFNTSMTGYQEILTDPSYCKQIVTLTYPHIGNTGTNAEDEESRSVYAAGLIIRDLPLLHSSFRASESLHDYLVRNETVAIADIDTRRLTMLLREKGAQGGAILTGADATVEKAQELIAAFGSMVGKDLAKEVSCTETYEWTEGEWELGKGFVTPDKQPYHVVAYDFGVKTNILRMLASRGCRLTVVPAQTSAEDVLALNPDGVFLSNGPGDPEPCTYAIEAVQKLMESGKPIFGICLGHQLISLAIGAKTLKMRFSHHGANHPVQDLDSGKVVITSQNHGFAVDADTLPANARITHKSLFDNTLQGIELTDKPVFCFQGHPEASPGPQDVGYLFDKFIGNMKAAKQA

SEQ ID NO: 95185 - DNA, 1137 bp, Pseudomonas fluorescens Pf-5
  CDS (1)..(1137): transl_table=11
ttgactaagccagccatactcgcccttgctgatggcagcatttttcgtggcgaagccattggagccgacggtcaaaccgttggtgaggtggtgttcaacaccgcaatgaccggctatcaggaaatccttaccgatccttcctacgcccagcaaatcgttaccctgacttatccccacatcggcaacaccggcaccacgccggaagatgccgagtccgaccgtgtgtggtcggctggcctggtcatccgtgacctgccgctggtggccagcaactggcgtaacaccctgtctctgtccgattacctgaaagccaacaacgtggtggcaatcgctggtatcgacacccgtcgcctgacccgcatcctgcgtgagaaaggtgcacagaacggctgcatcatggccggtgacaacatttccgaagaagcggcgatcgcagcagcgcgcggcttccctggcctcaaaggcatggacctggcgaaagtcgtcagcaccaaggaaagctacgagtggcgttcgactgtctgggatctgaagaccgacagccacgccaccatcgaggcttccgagctgccgtatcacgtggttgcctacgactacggggtcaagctgaatatcctgcgcatgctggtggagcgcggttgccgcgtcaccgtggtgcctgcccagaccccagcgagcgatgtgctggctctcaagcctgacggtgtgttcctgtccaacggcccaggtgaccccgagccttgcgactacgccatcaaggcgatcaaggaaatcctcgaaaccgagattccggtgttcggtatctgcctgggtcaccaactgctggccctggcctctggtgccaagaccctgaaaatgggccacggccaccacggtgccaaccacccggtccaggacctggacagcggcgtggtcatgatcaccagccagaaccacggttttgcggtggatgaagccacgctgccgggcaacgtccgggcgatccacaagtcgctgttcgacggcaccctgcagggtatcgagcgtaccgacaagagcgcgttcagcttccagggccacccggaagccagcccgggcccgaacgatgtggcgccgctgttcgaccgcttcatcaacgagatggccaagcgacgctaa

SEQ ID NO: 95186 - protein, 378 aa, Pseudomonas fluorescens Pf-5
MTKPAILALADGSIFRGEAIGADGQTVGEVVFNTAMTGYQEILTDPSYAQQIVTLTYPHIGNTGTTPEDAESDRVWSAGLVIRDLPLVASNWRNTLSLSDYLKANNVVAIAGIDTRRLTRILREKGAQNGCIMAGDNISEEAAIAAARGFPGLKGMDLAKVVSTKESYEWRSTVWDLKTDSHATIEASELPYHVVAYDYGVKLNILRMLVERGCRVTVVPAQTPASDVLALKPDGVFLSNGPGDPEPCDYAIKAIKEILETEIPVFGICLGHQLLALASGAKTLKMGHGHHGANHPVQDLDSGVVMITSQNHGFAVDEATLPGNVRAIHKSLFDGTLQGIERTDKSAFSFQGHPEASPGPNDVAPLFDRFINEMAKRR

SEQ ID NO: 95187 - DNA, 1233 bp, Psychrobacter arcticus 273-4
  CDS (1)..(1233): transl_table=11
ttgaattcatcgacagaaatacaagcaattttggcactagcggacggtacgatttttcgtggtattagtatcggcagccttggtcatcgtgtcggtgaggtggttttcaatacagccatgacagggtatcaagaaatcctaaccgacccaagctacgcgcgtcagctcgtgaccctcacctacccgcatatcggtaataccggtaccaacgctgaagatgtcgagtctggcaatggccataaagtgtgggctgacggtcttatcattcgtgatgcgaccatggtgacctcaaacttccgtcattcagaatcactgagcgattatctacaaaatcataacaccgtcgccatcgctgatattgatacgcgccaattgactcgcctgttacgtgataaaggcgcacaaaatggatgtatcatgaccgcctctaatggcgagactatcagtagtgatgacgagcaacaagccattaaactggcgcaagagtttgctggtattgaaggtatggacttggcaaaagaatgctgtacgccaaccacgtttgaatggacagccggtagctgggatttatccgatactctacttaatcgcgatatagctggtagccatgatagtggtacgggcggcttctttaagcatttgggcacgcatattgaagcaaaatacaatgtcgttgcttatgacttcggtagcaaaaccaatatcctacgtatgctagtagaccgcggctgtcatgtaaccgtcgtgccagcgcaaacgcctatcgcagatgtgctagcgatgaatccagacggtatattcttatcaaatggtcctggcgaccctgctgcttgtgattacgctatcgatgcggtacgtcatatcattgaagagacaaatattccgacctttggtatttgcttaggtcatcagctgattggtcttgccagcggtgcaaacaccataaaaatgaaaactggtcatcatggcgctaaccatcccgtccaagatttggcaaccggcaccgtcatgattaccagtcagaaccatggttttgcagtcgatgaagacacgctaccagagaatgttaagtctactcatcgctcattatttgatggtactaaccaaggtatcgagctgaccaataagccagtatttagcttccaaggtcacccagaagccagccctggcccgcatgatgccgcgccattatttgataagtttgcagacatgctagcagcagctaaagcttaa

SEQ ID NO: 95188 - protein, 410 aa, Psychrobacter arcticus 273-4
MNSSTEIQAILALADGTIFRGISIGSLGHRVGEVVFNTAMTGYQEILTDPSYARQLVTLTYPHIGNTGTNAEDVESGNGHKVWADGLIIRDATMVTSNFRHSESLSDYLQNHNTVAIADIDTRQLTRLLRDKGAQNGCIMTASNGETISSDDEQQAIKLAQEFAGIEGMDLAKECCTPTTFEWTAGSWDLSDTLLNRDIAGSHDSGTGGFFKHLGTHIEAKYNVVAYDFGSKTNILRMLVDRGCHVTVVPAQTPIADVLAMNPDGIFLSNGPGDPAACDYAIDAVRHIIEETNIPTFGICLGHQLIGLASGANTIKMKTGHHGANHPVQDLATGTVMITSQNHGFAVDEDTLPENVKSTHRSLFDGTNQGIELTNKPVFSFQGHPEASPGPHDAAPLFDKFADMLAAAKA

SEQ ID NO: 95189 - DNA, 1152 bp, Colwellia psychrerythraea 34H
  CDS (1)..(1152): transl_table=11
ttggctacatctgctattttagtgcttgaagacggcactgtttttaaaggcaccgcaattggtgcacaagggtcggctgttggggaggtggtatttaacacttctatgacaggttatcaggaaatccttaccgatccatcatatgcagagcaaattattaccctgacttacccgcacataggtaacacaggtactaatagcgaagataaagagtcaaatagcattgttgctaaaggcttggttattcgtgatttgccattacttgctagtaactttcgaaatgaacaaaatttaagtgattacttaattgctcataacattttaggtatcgcggatattgatacacgtaaattaacacgaattttgcgtgagaaaggtgcacaaaatggctgtatcttaacacttgatgatagcagcgatgagagcttacaggctgacgcactaacacaagcaaaagcattccctggccttaaaggcatggatttagctaaagtagtctctactaaagaacagtatcagtggacagatggtagctgggagcttggtaaaggtttcactaagccagacaatcttgagttccacgttgtagcctatgattttggcgctaaacacaacatcttgcgtatgttagttgaccgtggttgtaaattaaccgtagtaccagcacaaacaccagcaagtgaagttattgcgatgaaccctgatggaattttcttatcaaatggacctggtgacccagagccatgtgactatgcaatttctgctatccagtctttcctagaaacagaaatacctgtttttggtatttgtttaggtcatcaattacttggcctagcaagtggcgcaagcacagtgaaaatgaagtttggtcatcacggtgctaaccacccggtgaaagacttcgcacgtgacgtagtaatgattactgcacaaaaccacggctttgcagttaacgaagaaaacttaccaagtaacttaacggttacccataaatcattatttgatgattcattgcaaggtattcatcgtacagataaaccagcatttagcttccaaggtcatcctgaagcaagccctggtccacacgatgcagcgccattatttgatcacttcatcgatttgatcaaaacctacaaatcaaacaacgcttaa

SEQ ID NO: 95190 - protein, 383 aa, Colwellia psychrerythraea 34H
MATSAILVLEDGTVFKGTAIGAQGSAVGEVVFNTSMTGYQEILTDPSYAEQIITLTYPHIGNTGTNSEDKESNSIVAKGLVIRDLPLLASNFRNEQNLSDYLIAHNILGIADIDTRKLTRILREKGAQNGCILTLDDSSDESLQADALTQAKAFPGLKGMDLAKVVSTKEQYQWTDGSWELGKGFTKPDNLEFHVVAYDFGAKHNILRMLVDRGCKLTVVPAQTPASEVIAMNPDGIFLSNGPGDPEPCDYAISAIQSFLETEIPVFGICLGHQLLGLASGASTVKMKFGHHGANHPVKDFARDVVMITAQNHGFAVNEENLPSNLTVTHKSLFDDSLQGIHRTDKPAFSFQGHPEASPGPHDAAPLFDHFIDLIKTYKSNNA

SEQ ID NO: 95191 - DNA, 1158 bp, Dechloromonas aromatica RCB
  CDS (1)..(1158): transl_table=11
gtgtcactgctgccctcattcacacccgccattctcgccctcgccgacggaacggttttcaagggccaatccatcggcgctgatggcgtaaccagtggcgaagtggtgttcaacaccgccatgtccggctatcaggaaatccttaccgatccgtcctattgccgccagatcgtcaccctgacttacccgcatatcggcaacaccggttgcaatgcggaggattttgaatccaatgccaactacgccgccggcctggtcattcgcgacctgccgctggtcgcctcgaactggcgtacccaggacgacctgtcgtcctacctgaaaaagcacggcatcgtggccatcgccggtatcgacacccgcaagctgacgcgcattctgcgtgaaaagggcgcccaggctggttgcattctcgccggtgaagtcgatgagtccaaggccctggccatggcgcgtgctttccccggtctgaacggcatggacctggccaaggtagtttcagccaaggaggtctatccctggaccgaggccgagtggaccctgaaaggctacaaggctgccgctgagccgcgtttccatgttgttgcctacgactttggcgtcaagcgcaatatcctgcgcatgctggccgagcgcggctgccgcctgaccgtggtaccggcgcagacgccggctgccgacgtgctggccatgaagccggacggcgtgttcctgtccaacggccccggcgatccggagccttgcgattacgccattgccgccatccgtgaattcctcgagcgcggcgtgccgacgttcggcatctgccttggccaccagttgctggccctggcctccggcgccaagacggcgaagatgaaattcggtcaccacggtgcgaaccacccggtcaaggacctggatagcggccaggtgctgatcaccagccagaaccacggttttgcggcggacatcgattcgctgccggccaacctgcgggttacccatgtctcgctgttcgatggttccctgcaaggcatcgcccgcactgacgtgccggccttctccttccaggggcaccccgaagccagcccgggtccgcacgatgtggcctacctgtttgaccgcttcctcgacaccatgacgcgtggcgttgccgcgctgcagccggcgaaataa

SEQ ID NO: 95192 - protein, 385 aa, Dechloromonas aromatica RCB
MSLLPSFTPAILALADGTVFKGQSIGADGVTSGEVVFNTAMSGYQEILTDPSYCRQIVTLTYPHIGNTGCNAEDFESNANYAAGLVIRDLPLVASNWRTQDDLSSYLKKHGIVAIAGIDTRKLTRILREKGAQAGCILAGEVDESKALAMARAFPGLNGMDLAKVVSAKEVYPWTEAEWTLKGYKAAAEPRFHVVAYDFGVKRNILRMLAERGCRLTVVPAQTPAADVLAMKPDGVFLSNGPGDPEPCDYAIAAIREFLERGVPTFGICLGHQLLALASGAKTAKMKFGHHGANHPVKDLDSGQVLITSQNHGFAADIDSLPANLRVTHVSLFDGSLQGIARTDVPAFSFQGHPEASPGPHDVAYLFDRFLDTMTRGVAALQPAK

SEQ ID NO: 95193 - DNA, 1251 bp, Thermobifida fusca YX
  CDS (1)..(1251): transl_table=11
gtgagcaccagtcaccacgccccagcagccgtccgcctgcccaccgcagcagcggacgcccagcgccagagcgaccagacaaccaccatgcccgcagaggggaacaagaacgtgcaggtacccgcgatcctggtcctggaggacggccgagtcttccacggggtctccttcggtgcagaaggggagaccttcggtgaaatcgtgttccacaccggaatgaccggataccaggaggtcctcaccgacccctcctaccaccgccagatcgtggtgatgaccgcaccgcacatcggcaacacgggggtcaacgacgacgacgccgaatcccaccggatctgggtgtccggatacgtcgtccgcgaaccctcccgcatcgtctcgaactggcgggcccagcgcaccctcgaagaggaactgcgccgccaaggagtcgtcggcatcgccctctccggcacccgggcgctcacccgccacctgcgcgacaagggtgtgatgcgcgccgccatcagcaccgtggaaaccgacccggacaagctgcgggaacgcgtcctcgccagcccgcagatggtcggcgcgaacctggccggagaggtcaccaccgccgagccgtacacggtccgcccgccggacggcgtccccgtccgcttcaccgtcgcagcggtcgacctcggcatcaaagcgatgaccccgcagcggctcgccgaacgcggctgcgaagtgcgggtgctgcctgcccacaccacggccgagcagatcctcgccctcaacccggacggcgtgttcttcagcaacggccccggcgaccctgccgccgccgacgccgtggtggagaccatgcgcggcatcctggacgcgggcaccccgctgctcggcatctgcttcggcaaccagatcctgggacgcgccctcggcctggagacctacaagctgcccttcggccaccgcggcgccaaccacccggtccgcgagacccggaccgggcgcgtctacatcaccagccagaaccacggattcgcggtccgcgcgcccctcgacggcccgttcgacactccctacggccgcgccgaagtgagctacatcggcctcaacgacggcgtggtggaaggactgcggctgctcgaccgccccgcgctcagcacccagttccacccggaggccgcctccgggccccacgacgccgcggacgtgttcgacaccttcgtggagatgatgaccgcccaccggcaggcccgcgaggccgcgcgcgcctga

SEQ ID NO: 95194 - protein, 416 aa, Thermobifida fusca YX
MSTSHHAPAAVRLPTAAADAQRQSDQTTTMPAEGNKNVQVPAILVLEDGRVFHGVSFGAEGETFGEIVFHTGMTGYQEVLTDPSYHRQIVVMTAPHIGNTGVNDDDAESHRIWVSGYVVREPSRIVSNWRAQRTLEEELRRQGVVGIALSGTRALTRHLRDKGVMRAAISTVETDPDKLRERVLASPQMVGANLAGEVTTAEPYTVRPPDGVPVRFTVAAVDLGIKAMTPQRLAERGCEVRVLPAHTTAEQILALNPDGVFFSNGPGDPAAADAVVETMRGILDAGTPLLGICFGNQILGRALGLETYKLPFGHRGANHPVRETRTGRVYITSQNHGFAVRAPLDGPFDTPYGRAEVSYIGLNDGVVEGLRLLDRPALSTQFHPEAASGPHDAADVFDTFVEMMTAHRQAREAARA

SEQ ID NO: 95195 - DNA, 1155 bp, Prochlorococcus marinus str. NATL2A
  CDS (1)..(1155): transl_table=11
atgttttttgatactgatagctctgcaattttgttattagaggatgggacatattttgaaggattatcttttggtgcggttggaactatttctggtgaagtcgtatttaatacaggtatgacaggttatcaggaggtcattactgatccaagttattatggtcaacttattacgtttacctatccagagattggaaatactggagtaaattatgaggataatgaatcatcgcatccctcagttaaaggtgtgatagctcgtcaaatatccaaaactcccagtaactggagacatgaaatttcgtttgaaaattggttaaacgatgaaaaagttgttggaattcatggaatagatacaagatcacttgttaggcatataagagagtcaggttctttgaatggaattatttcatcagagtcaaaatattcaatcgctgaattattttcacttttaaaaaaatctccttcaatgagtggtcttaatcttgtcgataaagtaacaacaaaaagagcttttaatgctaattcaagttgtcctgttgcatttgatatgagaattaaaaatactcaaacaattccatacaaagttgttgctatagattttgggataaagcaatcgatattggatcgactagttgcccatggttgtgaagtaactgtcttgcctgcaagtgctgaaatgaccgatgtattagctttatcccctgaaggtgtttttctttccaatggtcctggtgatccttccaccgtccatagtggtattaatcttgctaaagatttaattgaatataaaaaactacctgtttttggaatctgcttaggccatcaaatccttggattggctttaggtggtaaaacttttaaactttcttatggacatagaggactaaatcatccatgtggattgaacggaaaagttgaaattactagtcaaaaccatggatttgctttgaattcagaatctttaaattccgagaaaataaaaatcaccagattaaatttaaacgaccaaacagttgctgctatttctgttattgataggcctttctttggtgttcaatatcaccccgaagcgagccctggtcctcatgatgctgatcatcattttaatcatttcgtaaccttaatagaagaacgacgaagaatcgtggattaa

SEQ ID NO: 95196 - protein, 384 aa, Prochlorococcus marinus str. NATL2A
MFFDTDSSAILLLEDGTYFEGLSFGAVGTISGEVVFNTGMTGYQEVITDPSYYGQLITFTYPEIGNTGVNYEDNESSHPSVKGVIARQISKTPSNWRHEISFENWLNDEKVVGIHGIDTRSLVRHIRESGSLNGIISSESKYSIAELFSLLKKSPSMSGLNLVDKVTTKRAFNANSSCPVAFDMRIKNTQTIPYKVVAIDFGIKQSILDRLVAHGCEVTVLPASAEMTDVLALSPEGVFLSNGPGDPSTVHSGINLAKDLIEYKKLPVFGICLGHQILGLALGGKTFKLSYGHRGLNHPCGLNGKVEITSQNHGFALNSESLNSEKIKITRLNLNDQTVAAISVIDRPFFGVQYHPEASPGPHDADHHFNHFVTLIEERRRIVD

SEQ ID NO: 95197 - DNA, 1137 bp, Ralstonia eutropha JMP134
  CDS (1)..(1137): transl_table=11
gtgttaccgtctttcccgtccgccattctcgcgcttgcagacggcacggtctttcgtggctattccatcggcgcttccggccataccatcggcgaagtggtgttcaacaccgccatcaccggttatcaggaaatcctcaccgacccgagctattcccggcagatcgtcacgctgacgtatccgcacatcgggaattacggtgtcaaccgtgaggatgttgaagccacgaaagtccatgccgccggcctgatcatcaaggatctgccgattctggcctcgaatttccgcaaggagcatacgctcggccattacctgaagcaggaaaaggtcgtcgccattgccggcatcgatacccgcaagctgacccgcatcctgcgcgagaagggcgcccagaacggctgcatcctggctggcgaggacaacgtccagaaggccatcgacctggcgcgctcgttccccggcctggctggcatggacctggccaaggtggtgtcggtcaaggagccgtatgactggacgcagtcggagtgggaactcggccagggctacggcaagcaggacaagccgcagttccacgtggtcgcctatgactacggcgtcaagttcaatatcctgcgcatgctggccgagcgcggctgcaaggtgacggtgctgccggcgcaggccactgcggccgacgccctggcgctgaatccggatggcgtgttcctgtccaacggccccggcgatccggaaccgtgcgactacgcgatcaaggccacgcgcgaattcatcgagcgcggcatcccgaccttcggcatctgcctgggccaccagatcatggcgctggccatcggtgccaagacgctgaagatgaaggccggccaccacggcgccaaccatccggtcaaggatctcgatgacggtcgcgtgatgatcacgtcgcagaaccacggctttgctgtggatgcggaaacgctgccggccaatgcgcgcgcgacgcacgtgtctctgttcgatggcacgctgcagggctttgcgctgaccgacaagccggcattctgcttccagggccacccggaagcgtcgcctggcccgcacgacgtggcttacctgttcgaccgcttcacgaagatgatggcggacgcgcgcaagtaa

SEQ ID NO: 95198 - protein, 378 aa, Ralstonia eutropha JMP134
MLPSFPSAILALADGTVFRGYSIGASGHTIGEVVFNTAITGYQEILTDPSYSRQIVTLTYPHIGNYGVNREDVEATKVHAAGLIIKDLPILASNFRKEHTLGHYLKQEKVVAIAGIDTRKLTRILREKGAQNGCILAGEDNVQKAIDLARSFPGLAGMDLAKVVSVKEPYDWTQSEWELGQGYGKQDKPQFHVVAYDYGVKFNILRMLAERGCKVTVLPAQATAADALALNPDGVFLSNGPGDPEPCDYAIKATREFIERGIPTFGICLGHQIMALAIGAKTLKMKAGHHGANHPVKDLDDGRVMITSQNHGFAVDAETLPANARATHVSLFDGTLQGFALTDKPAFCFQGHPEASPGPHDVAYLFDRFTKMMADARK

SEQ ID NO: 95199 - DNA, 1095 bp, Dehalococcoides sp. CBDB1
  CDS (1)..(1095): transl_table=11
atgacgaatacagcatacatggtactggaggacggaacagtatttaccggcaaaagcttcggagcggaaactgaagctataggcgaagtagtcttcaataccagcatgaacggatatcaggaaatgctgaccgacccttcgtataccggccagattatcgtccccacttacccccttataggtaattacgggataaacccctttgataatgaatctgcctgcatcagagcaactgcctttgcagtccatcaggaatgccgccagcccagccactaccaaagcacccaaacggttcattcctttctggaaaaagctggcatacccggcataagcggtcttgatacccgtgccattacccgcaaactgcgcttagccggggtaatgaggggcatggtaaccagtaccaaaacacctgaagaagccctgaaaattatccgcaatacgcctgactacggacagattgattttgtacgcaaaataagcacaccctcaccatatgaatggcagaaagaaaagccctcttttgccggcttccatgtagcagtactggactgcgggcttaagtattccatacttaaccagcttaaatcccacggctgcaaggtaaccgtgttgccctgcaccaccagccccaaagaaattgacacacttaatcctgacggcatagttctttcgcccggccccggcaaccccgaactgctggactatctgataaccaccgtcagacatgtgtgcgaaaaataccccgtcatgggcatctgtcttggcaaccagctgattggcagagccttcggtgccaaaacatttaaactgaaattcggacaccggggtggaaaccacccggtcaaagaccttgagagcggacgggtgtatataacctcgcaaaaccacggctactccattgaccctgtcaccctgaaaaatgacctgaaagtcagtcaccttaacctgaatgacggtactgtggaggggcttcgccaccgtgaactgcccgtattctctatccagtatcactctgaggcctcacccggcccgatggattccacttatctgtttaagcagtttgtggaaatgataaagcaaaccaaaaagtaa

SEQ ID NO: 95200 - protein, 364 aa, Dehalococcoides sp. CBDB1
MTNTAYMVLEDGTVFTGKSFGAETEAIGEVVFNTSMNGYQEMLTDPSYTGQIIVPTYPLIGNYGINPFDNESACIRATAFAVHQECRQPSHYQSTQTVHSFLEKAGIPGISGLDTRAITRKLRLAGVMRGMVTSTKTPEEALKIIRNTPDYGQIDFVRKISTPSPYEWQKEKPSFAGFHVAVLDCGLKYSILNQLKSHGCKVTVLPCTTSPKEIDTLNPDGIVLSPGPGNPELLDYLITTVRHVCEKYPVMGICLGNQLIGRAFGAKTFKLKFGHRGGNHPVKDLESGRVYITSQNHGYSIDPVTLKNDLKVSHLNLNDGTVEGLRHRELPVFSIQYHSEASPGPMDSTYLFKQFVEMIKQTKK

SEQ ID NO: 95201 - DNA, 1140 bp, Thiobacillus denitrificans ATCC 25259
  CDS (1)..(1140): transl_table=11
ttgtcacgtgcccagcccgccatcctcgttctcgccgacggttcggtatttcgtggccggtcgatcggcgccgacggcatcacgaccggcgaagtcgtgttcaataccgctctcaccgggtaccaggaaattctgaccgatccgtcgtactcgcggcagatcgtgacgctgacctatccgcacatcggcaacaccggcgtcaatcccgaagacgtcgaggcggggcgcatccatgccgcgggcctcgtggtgcgcgacgttccgcgtcgccactcgaatttccgctctgccgagtcgctgagcgactatctcgcgagccagaacatcgtcggtatcgccgacatcgacacccgacgcctgacccgcatcctgcgcgagaagggcgcgcagagcggctgcgtgatggccggcggggtcgacgagagcaaggcgctcgaggcggcgcgcgcattcccggggctcgccgggatggatctcgccaaggtggtcaccgcgcccgcgatgtacgaatggcacgaaaccgaatggcggctcggccgcggttacggccaggtgagcgagccgcgttaccacgtcgtgggtttcgactacggggtcaagcgcaacatcctgcgcatgctcgccgagcgcggttgccgcgtcacggttctgcccgctaccgccacggcggccgaagcgctcgcgctgaagcctgacgggattttcctgtccaacggccccggcgaccccgagccctgcgactacgcgatccgggcgatcggcgaactggtcggcgcaggcgtaccgacctttgggatttgcctcggccatcaactgctcgcgctcgcctccggcgcgaagaccgtgaagatgaaatttggccatcacggcgcgaaccacccagtcaaggatctcgacagcgggcgcgtcacgatcacgagccagaaccacggctttgcggtggaccccgcgacgcttccggccaatctgcgcagcacgcatgtctcgttgtttgacggctcgctgcagggcctcgcgcgcaccgacgcgcccgcgttcagctttcagggccaccccgaagccgcccccggtccccacgacctgagctacctgttcgatcgatttatccagctgatggccgaccgtgccgcagtacactga

SEQ ID NO: 95202 - protein, 379 aa, Thiobacillus denitrificans ATCC 25259
MSRAQPAILVLADGSVFRGRSIGADGITTGEVVFNTALTGYQEILTDPSYSRQIVTLTYPHIGNTGVNPEDVEAGRIHAAGLVVRDVPRRHSNFRSAESLSDYLASQNIVGIADIDTRRLTRILREKGAQSGCVMAGGVDESKALEAARAFPGLAGMDLAKVVTAPAMYEWHETEWRLGRGYGQVSEPRYHVVGFDYGVKRNILRMLAERGCRVTVLPATATAAEALALKPDGIFLSNGPGDPEPCDYAIRAIGELVGAGVPTFGICLGHQLLALASGAKTVKMKFGHHGANHPVKDLDSGRVTITSQNHGFAVDPATLPANLRSTHVSLFDGSLQGLARTDAPAFSFQGHPEAAPGPHDLSYLFDRFIQLMADRAAVH

SEQ ID NO: 95203 - DNA, 1167 bp, Anabaena variabilis ATCC 29413
  CDS (1)..(1167): transl_table=11
atgcccctgtctgacgcaatacctgctctccttgtcttggcagatggaactgcttaccgtggttggtctttcggtgcgacgggaaccaccattggcgaagtcgtcttcaacaccggtatgactggctatcaagaagtattgactgaccctagttactgcggacagattgtcgtgtttacctatcccgaattggggaatacaggcgttaatcctgaagacgaagaatcagcacgtccccaagtgcggggtgcgatcgcccgaaatatttgtcataaaccgagtaactggcgatcggcacaatccttacccgactacctcaaacagcaccaaatccccggtatctttggtatagatacccgcgccctcactcgcaaaattcggatgtacggagccatgaacggcggcatctccacagaaattttggatgaagcggagttgttagaacaggtacaagcagctcccaacatggcaggcttaaatctagtccgggaagttaccacctctacagtttacgaatggtcagatcccacaacagcagtttgggaatttaacccagagggtacagtaaataatggggaatccttgacagttgtcgccctagattttggtgttaaacgcaatatattacgtcgtttagccagttatggttgccgagtcattgttgtacctgccgatacatcaccagaagcaatcctaaaatacaatccagatggtattttcctctcgaacggccctggtgacccctcggcagttacagaaggtattaccacagccaaagtattgctcgaaagtgaaaaacccattttcggtatttgtatgggacaccaaattttgggtcacgccttgggagcagaaacctttaagctgaaatttggacatcggggtttaaatcaaccagcaggtttacaacaacgggtagaaatcaccagccaaaaccacagctttgccattgacccagattctttacctgaggcagttgtggaaatcagccacctcaatttaaacgatcgcactgttgccggtctgcgccacaaatctctacctatcttttcagtacagtaccacccagaagccagccctggtcctcacgatgctgattacttgtttgcccagtttgttcatcaaatgcggacaacaaaacaagccactacagcagaagtgagttaa

SEQ ID NO: 95204 - protein, 388 aa, Anabaena variabilis ATCC 29413
MPLSDAIPALLVLADGTAYRGWSFGATGTTIGEVVFNTGMTGYQEVLTDPSYCGQIVVFTYPELGNTGVNPEDEESARPQVRGAIARNICHKPSNWRSAQSLPDYLKQHQIPGIFGIDTRALTRKIRMYGAMNGGISTEILDEAELLEQVQAAPNMAGLNLVREVTTSTVYEWSDPTTAVWEFNPEGTVNNGESLTVVALDFGVKRNILRRLASYGCRVIVVPADTSPEAILKYNPDGIFLSNGPGDPSAVTEGITTAKVLLESEKPIFGICMGHQILGHALGAETFKLKFGHRGLNQPAGLQQRVEITSQNHSFAIDPDSLPEAVVEISHLNLNDRTVAGLRHKSLPIFSVQYHPEASPGPHDADYLFAQFVHQMRTTKQATTAEVS

SEQ ID NO: 95205 - DNA, 1077 bp, Streptococcus agalactiae A909
  CDS (1)..(1077): transl_table=11
atgaagcgtctattattattggaagatggtagtgtgtttgagggtgaggctttcggagcggatgtagaaacaagtggtgaaattgtttttagtacaggaatgacagggtatcaagaatctataacagatcaatcttacaacggtcaaatcattacttttacttatcctcttattggaaattatgggataaatcgagacgattacgaatctattagaccaacatgtaagggagtaattgtttatgaatgggcagagtatccaagtaactggcgtcaacagatgacacttgatgaatttttaaaattaaaaggaatacctggaatttcaggtatagatactcgagcattaacaaaaattattcgaaaacatggaacaatgaaagcttgtttaataaacgagggaaattctattcatgaagcactagaaaaccttcaaaaaagtgttcttttaaataatcaaattgaacaagtatcaaccaaattagcttatgcttcgcctggagttggcaaaaatattgtattagttgactttggtttaaaacattctattctaagagaactgtcacaacgtcaatgtcatattacagtcgtccctcatactacgacagcgcaagaaatcttaaatctcaatccagatggagtactcttatctaacggccctgggaacccagaacaattaccgaatgctttacaaatgatccaagaaattcaaggtaaaattccaatttttggtatttgtatgggacatcaactatttgctaaagccaatggtgcaaagacttataaaatgacttttggtcatcgaggttttaaccatgctgttcgtcatttgcaaacaggacaggttgattttacaagtcaaaatcatggttatgctgtctcgagagaagatttccctgaggctctcttcattacacatgaagagattaatgataaaaccgtcgaaggtgttcgacataaatactatcctgccttttcagtgcagtttcacccagatgcagcaccagggccgcatgatacatcttatctttttgatgaatttattaatatgattgatgatttccagcaaaaaagctag

SEQ ID NO: 95206 - protein, 358 aa, Streptococcus agalactiae A909
MKRLLLLEDGSVFEGEAFGADVETSGEIVFSTGMTGYQESITDQSYNGQIITFTYPLIGNYGINRDDYESIRPTCKGVIVYEWAEYPSNWRQQMTLDEFLKLKGIPGISGIDTRALTKIIRKHGTMKACLINEGNSIHEALENLQKSVLLNNQIEQVSTKLAYASPGVGKNIVLVDFGLKHSILRELSQRQCHITVVPHTTTAQEILNLNPDGVLLSNGPGNPEQLPNALQMIQEIQGKIPIFGICMGHQLFAKANGAKTYKMTFGHRGFNHAVRHLQTGQVDFTSQNHGYAVSREDFPEALFITHEEINDKTVEGVRHKYYPAFSVQFHPDAAPGPHDTSYLFDEFINMIDDFQQKS

SEQ ID NO: 95207 - DNA, 1071 bp, Streptococcus agalactiae A909
  CDS (1)..(1071): transl_table=11
atggcaaaaaaattgttaattctagaggatggtacggtttttgaaggactatcctttggttcatctcttgatgtaactggcgaattagttttttgtacggggaataccggctatcaggaaataataacgaatccttcacataatggaaaaattttagtttttacctcaccgctaataggaaattatggtattcatcgcagttactctgaagccattattcccacttgtttaggagttgttgttgcagagtattccagatgtgtaagtagcgatactagcaagatgaatctagatgaatttttgaaaatgaaaaaggttcctgcaatgtcgggggtcgatacaaggtatttgatgcaagttattaaagaaaaaggatttgtaaaagctactttagcagaagcaggtgatgttttatcacatttacaagatcaattaatagcgacagtattaccgacaaataatgtggaacaagtttcgacaaaaacagcttatccgtcgcctgctagcggccgaaatattgttgtacttgattttggccttaaacattctattttgagagaattgtctaaacgtcagtgtgacgtgactgtcattccctacaatacgtctttagaaggtattaaaaatctatacccagaaggtatcatattatctaatggtccggggaatccagaaaagcttcaggaagtcttaaacactattaaagaattacaaaaatctgttcctatgttaggcattggtttggggcatcaattaattgccatggcaaatggtgcagaaattatgagactcccagttgctaagaaggggccaaattatcccatgagagatattgctacgggtcgtttagaaacagttagtcagtttaatcattttaccgttaaccggctaaatcttccgcatgatttactggtaacacacgaaggtttgaatgatcaagagattgttgctctaaggcaccgctcatttccagtgatgtctgtgcaattttacccagaggctgctccaggccctcatgatgtgacctatttttttgatgaatttttagaaatgattggatcacgcgcttaa

SEQ ID NO: 95208 - protein, 356 aa, Streptococcus agalactiae A909
MAKKLLILEDGTVFEGLSFGSSLDVTGELVFCTGNTGYQEIITNPSHNGKILVFTSPLIGNYGIHRSYSEAIIPTCLGVVVAEYSRCVSSDTSKMNLDEFLKMKKVPAMSGVDTRYLMQVIKEKGFVKATLAEAGDVLSHLQDQLIATVLPTNNVEQVSTKTAYPSPASGRNIVVLDFGLKHSILRELSKRQCDVTVIPYNTSLEGIKNLYPEGIILSNGPGNPEKLQEVLNTIKELQKSVPMLGIGLGHQLIAMANGAEIMRLPVAKKGPNYPMRDIATGRLETVSQFNHFTVNRLNLPHDLLVTHEGLNDQEIVALRHRSFPVMSVQFYPEAAPGPHDVTYFFDEFLEMIGSRA

SEQ ID NO: 95209 - DNA, 1161 bp, Pseudomonas fluorescens PfO-1
  CDS (1)..(1161): transl_table=11
atgcgttatttacgggaggtcttcttgactaagccagccatactcgcccttgctgatggcagcatttttcgcggcgaagccattggagccgacggtcagaccgttggtgaggtggtgttcaacaccgcaatgaccggctatcaggaaatccttaccgatccttcctacgcccaacagatcgttaccctgacttacccgcacatcggcaacaccggcaccacgccggaagacgccgagtccgatcgcgtctggtccgctggcctggtcattcgtgacctgccgctggtagcgagcaactggcgtaacacgatgtccctgtccgattacctgaaagccaacaatgttgtggcgatcgccggtatcgacacccgccgcctgacccgcatcctgcgtgaaaaaggcgcacagaacggctgcatcatggccggcgacaacatctccgaagaggcggccatcgccgcggcgcaaggcttcccgggcctgaagggcatggatctggcgaaagtcgtcagcaccaagacccaatacgaatggcgctccactgtctgggatctgaaaaccgacagccacgcgaccatcgaagcctccgagctgccttaccacgtggttgcctacgactacggcgtcaaggtcaacatcctgcgcatgttggtcgagcgcggctgccgcgtcactgtcgttccggcacagaccccggcggccgacgtgctggccttgaagccggacggcgtgttcctgtccaacggtcctggtgatccggagccttgcgactacgcgatccaagcgatcaaggaagtgctggaaaccgaaattccagtcttcggcatctgcctcggtcaccagctgctggctctggcctccggcgccaagaccctgaaaatgggccacggccaccacggtgccaaccacccggtgcaggatctggacactggcgtcgtgatgatcaccagccagaaccacggtttcgcggttgacgaagaaaccctgccagccaacgtccgcgcgatccataaatcgctgttcgacggcaccctgcaaggcatcgagcgcaccgacaagagcgcgttcagcttccagggtcaccctgaggcgagcccgggcccgaacgatgtggcccctctgtttgaccgcttcatcaacgagatggccaagcgacgctaa

SEQ ID NO: 95210 - protein, 386 aa, Pseudomonas fluorescens PfO-1
MRYLREVFLTKPAILALADGSIFRGEAIGADGQTVGEVVFNTAMTGYQEILTDPSYAQQIVTLTYPHIGNTGTTPEDAESDRVWSAGLVIRDLPLVASNWRNTMSLSDYLKANNVVAIAGIDTRRLTRILREKGAQNGCIMAGDNISEEAAIAAAQGFPGLKGMDLAKVVSTKTQYEWRSTVWDLKTDSHATIEASELPYHVVAYDYGVKVNILRMLVERGCRVTVVPAQTPAADVLALKPDGVFLSNGPGDPEPCDYAIQAIKEVLETEIPVFGICLGHQLLALASGAKTLKMGHGHHGANHPVQDLDTGVVMITSQNHGFAVDEETLPANVRAIHKSLFDGTLQGIERTDKSAFSFQGHPEASPGPNDVAPLFDRFINEMAKRR

SEQ ID NO: 95211 - DNA, 1164 bp, Rhodobacter sphaeroides 2.4.1
  CDS (1)..(1164): transl_table=11
atggccgcagccagccccaccgacaagcccactgcctgcctcgcgctcgccgatggcaccatcttctacggcaggggcttcggcgcccggggcgagacggtggccgagctcgtcttcaacaccgccatgaccggctatcaggagatcatgaccgatccctcctatgcggggcagatcgtgactttcaccttcccgcatgtgggcaatgtgggcgtgacccccgaggacgacgagacggccgagccggtcgccgccggcatggtggtgaagtgggacccgaccgaaccctcgaactggcgcgcgacctcggagctcacccaatggctcgaggccaagggccggatcggcgtgggcggcatcgacacgcggcgcctcacccgggcgatccgccagcagggcgcgccgcatgtggcgctggcccacgatcccgaaggccgcttcgacatcggagcgctggtggccaaggcccgcggctggcgcgggctcgtcggtctcgacctcgccaaggacgtgacctgcgcccagagctaccgctgggacgagatgcggtgggcctggcccgagggctaccggtcgcgcagcgagccggggctgaaggtcgtggccatccactacggcgccaagccccacatcctgcgctggctcgcctcaggggactgccacgtgaccgagctccccgcgacggccacggccgaggacgtgctggcgctgaacccggacggggtgttcctctcgaacggcccgggcgatccggcggcgaccggcgcctatgcggtgccgatgatccagggcgtgctcgcacgggacatgccgctcttcggcatctgcctcggccaccagatgctggccctcgcgctcggggcgaagaccgtcaagatgaaccacggccaccacggcgcgaaccatccggtgaaggatctcgagaccggcaaggtcgagatcacctcgatgaaccacggcttcacggtcgacagccagacgctgcccgccggcgtgaaggaaacccatgtgagcctcttcgacggctcgaactgcgggatccgggtcgaggatcggccggtcttctcggtgcagtatcatcccgaggcgagccccggcccgcaggacagctattatctcttcgatcggttcgccgcggccatgcgcgcccgccgcgcggcctga

SEQ ID NO: 95212 - protein, 387 aa, Rhodobacter sphaeroides 2.4.1
MAAASPTDKPTACLALADGTIFYGRGFGARGETVAELVFNTAMTGYQEIMTDPSYAGQIVTFTFPHVGNVGVTPEDDETAEPVAAGMVVKWDPTEPSNWRATSELTQWLEAKGRIGVGGIDTRRLTRAIRQQGAPHVALAHDPEGRFDIGALVAKARGWRGLVGLDLAKDVTCAQSYRWDEMRWAWPEGYRSRSEPGLKVVAIHYGAKPHILRWLASGDCHVTELPATATAEDVLALNPDGVFLSNGPGDPAATGAYAVPMIQGVLARDMPLFGICLGHQMLALALGAKTVKMNHGHHGANHPVKDLETGKVEITSMNHGFTVDSQTLPAGVKETHVSLFDGSNCGIRVEDRPVFSVQYHPEASPGPQDSYYLFDRFAAAMRARRAA

SEQ ID NO: 95213 - DNA, 1089 bp, Carboxydothermus hydrogenoformans Z-2901
  CDS (1)..(1089): transl_table=11
ttgccaaaagggatactgattttagaagacggatcttgctatgaaggagaaatttacgggtatgttggggaaaattatggggaagtagtttttaatacgggaatgaccggctatcaggaaatattaaccgatccttcctatgccggacaaatagttgtcatgacttatccattaattggtaattacggttttatacccgaagataaggaacgggaaaaaagctttgtacgcgggctggtggtccgggaattgtgcgattttcccagtaactggcgccaaaaagagcgattagaacactttcttaatgaggaaaaaattgttactttagcgggggtagatacccgggaaattacaaagaaattacgcttgtacggagttatgaaaggaatcatttcagcttttccggaaaaaagggcggaatatcaggaaaaagttaaattagttccagatatttccggacaaaaacttgcctatcaggtggcgggagacgaggttcttcattatccaggccaaaaaccgcgggttgtacttgttgactatggcgcaaaaaatagtattttgcaatcgttgttaaaaaggggagcagaggtttttgttgtgcctcctctaatgcctgctgagcaaatattagccttagctccccagggggtagtgctttctaacggccctggtgatccggcggatttacaggaaagtatttttatcatcaggcaattaattggcaagcttcccattttaggaatatgtcttggacatcaacttttagctttggcccacggagctcaaacctacaaattaaaatttggccacaggggtagcaatcatccggtaattgaaacggaaagtaagagagttttcataacttctcataaccacggttttgctgtgcgggaagaaagcttaattggaaccggtcttgagatctggtttcgcaacttaaatgataataccattgaaggcctgcgaagtagatatagtaaaattctttcggtacagtttcatccggaggcggcaccgggacccaatgatgcagactttatttttgatttgtttttagaaatgattgacaagggggacagctatgcctaa

SEQ ID NO: 95214 - protein, 362 aa, Carboxydothermus hydrogenoformans Z-2901
MPKGILILEDGSCYEGEIYGYVGENYGEVVFNTGMTGYQEILTDPSYAGQIVVMTYPLIGNYGFIPEDKEREKSFVRGLVVRELCDFPSNWRQKERLEHFLNEEKIVTLAGVDTREITKKLRLYGVMKGIISAFPEKRAEYQEKVKLVPDISGQKLAYQVAGDEVLHYPGQKPRVVLVDYGAKNSILQSLLKRGAEVFVVPPLMPAEQILALAPQGVVLSNGPGDPADLQESIFIIRQLIGKLPILGICLGHQLLALAHGAQTYKLKFGHRGSNHPVIETESKRVFITSHNHGFAVREESLIGTGLEIWFRNLNDNTIEGLRSRYSKILSVQFHPEAAPGPNDADFIFDLFLEMIDKGDSYA

SEQ ID NO: 95215 - DNA, 1143 bp, Burkholderia sp. 383
  CDS (1)..(1143): transl_table=11
ttgccgtcttttactcccgccttgcttgcactcgccgacggcacggtctttcgtggttattcgatcggggccgaaggccacacgatcggcgaagtcgtgttcaataccgcgatcaccggctatcaggaaatcctgactgatccgagctactcgcgccagatcgtcacgctcacctatccgcatatcggcaacgtcggcgtcaacgccgaagacgtcgaagccacgaaagtccatgccgccggcctgatcatccgtgatctgccctcgctcgcctcgaacttccgcatggaccgcacgctcggcgattacctgcgcgacgaaggcgtcgtcgcgatcgccggcatcgacacccgcaagctgacccgtatcctgcgcgacaagggcgcgcagaacggctgcatcctgacgggttcggacgacgaagcgaaggcgatcgagctcgcacgctcgttcccgggtctcgcgggcatggatctcgcgaaggtcgtgtcgaccacgaagccgttcgagtggaagcagaccgaatggcgtctcgaaggcggctacggcatgcaggaagcgccgaagtaccgcgtcgtcgcatacgatttcggcgtcaagtacaacatcctgcgcatgctcgcggagcgcggctgccacgtaacggtgctgccggcgcaggcgagcgcggaagatgcgctcgcgctgaatccggacggcgtgttcctgtcgaacggccctggcgatccggagccgtgtgactacgcgatcgcggccacgaagcaattcatcgagcgcggcgtgccgaccttcggcatctgcctgggtcaccagatcatgggcctcgcggtcggcgcgaagacgctgaagatgaagaccggccaccacggcgcgaaccacccggtgaaggatctcggcgacggccgcgtggtgatcacgtcgcagaaccacggcttcgcggtcgatgcggattcgctgccggccaacgcgcgcgtgacgcacgtgtcgctgttcgacggcacgctgcagggcttcgagctgaccgacaagccggcattctgcttccagggccacccggaagcgtcgcccggcccgcacgacatcggctacctgttcgaccgtttcaccgcgctgatggacgcggcgaagcagcgcaacgcttaa

SEQ ID NO: 95216 - protein, 380 aa, Burkholderia sp. 383
MPSFTPALLALADGTVFRGYSIGAEGHTIGEVVFNTAITGYQEILTDPSYSRQIVTLTYPHIGNVGVNAEDVEATKVHAAGLIIRDLPSLASNFRMDRTLGDYLRDEGVVAIAGIDTRKLTRILRDKGAQNGCILTGSDDEAKAIELARSFPGLAGMDLAKVVSTTKPFEWKQTEWRLEGGYGMQEAPKYRVVAYDFGVKYNILRMLAERGCHVTVLPAQASAEDALALNPDGVFLSNGPGDPEPCDYAIAATKQFIERGVPTFGICLGHQIMGLAVGAKTLKMKTGHHGANHPVKDLGDGRVVITSQNHGFAVDADSLPANARVTHVSLFDGTLQGFELTDKPAFCFQGHPEASPGPHDIGYLFDRFTALMDAAKQRNA

SEQ ID NO: 95217 - DNA, 1161 bp, Synechococcus sp. CC9605
  CDS (1)..(1161): transl_table=11
atgacctgcggcggcccttcgatgcccgattccccatcagacaaggcttatctcgtccttgccgatggcacggttctcaccggtgtcggcttcggccatcgcggcaccaccatcggtgaggtggtgttcaacaccggcatgaccggatatcaggaggtgttaacggacccctcctacgccgggcagctggtgagcttcacctatcccgaacttggcaacactggggtcaatgctgacgaccaggaagctgatcgcccccatgcccgtggcgtgattgctcggcagctggtcccattgcccagcaactggcgctgtgaacagacccttgagagctggatgcagacccatcagctggtgggcatcagcggtttggacacccgcgctttggtgcggcatctgcgtgaagttggggcgatgaatggtgtgatcagcagtgatggccagaccccggcgcagttgctggagctcctgaagcaggccccgtcgatgcagggtctgaacttggcggaccgcgtcaccaccaagcagccttaccagtggaaccaggcctgctctgtgggcttcgatcaacgcttgcagcgccgcagcgacgcgcccttccgcgttgtcgccatcgatttcggcatcaagcgcgccattctcgatcgcctcgttgcccacggctgtgatgtcacggttctgccggcagacacggatctggccacggttcgctcccatcgcccggatggtgtcttcctgtccaacggccctggcgacccggcggctgtgagccagggcattgctctggccaagtcattgctggacgagtccgatctgccgctgttcgggatctgtctggggcatcagattcttggtttggccctcggtggcgagaccttcaagctcccctatggccatcgtggtttgaaccacccctgtggcaccacaggccaggttgagatcaccagtcagaaccacggttttgccctgtccgccgactccctggaccaaggcgtcgtggacgtcacccatttcaatctgaacgaccgcaccgtggcggcgattgctcaccgccagaagcccgttttcggggtgcaataccacccggaagccagtccgggcccccatgatgcggatcatcatttcggccgctttgtgacgctgatggccgatcgccgttga

SEQ ID NO: 95218 - protein, 386 aa, Synechococcus sp. CC9605
MTCGGPSMPDSPSDKAYLVLADGTVLTGVGFGHRGTTIGEVVFNTGMTGYQEVLTDPSYAGQLVSFTYPELGNTGVNADDQEADRPHARGVIARQLVPLPSNWRCEQTLESWMQTHQLVGISGLDTRALVRHLREVGAMNGVISSDGQTPAQLLELLKQAPSMQGLNLADRVTTKQPYQWNQACSVGFDQRLQRRSDAPFRVVAIDFGIKRAILDRLVAHGCDVTVLPADTDLATVRSHRPDGVFLSNGPGDPAAVSQGIALAKSLLDESDLPLFGICLGHQILGLALGGETFKLPYGHRGLNHPCGTTGQVEITSQNHGFALSADSLDQGVVDVTHFNLNDRTVAAIAHRQKPVFGVQYHPEASPGPHDADHHFGRFVTLMADRR

SEQ ID NO: 95219 - DNA, 1125 bp, Geobacter metallireducens GS-15
  CDS (1)..(1125): transl_table=11
atgaaagcagtcctagcgctcgctgatgggcgcatttttgaagggaaatcgttcggagccaccggcgaggcgactggcgaggtggtcttcaataccgccatgaccggctaccaggaggttttgaccgatccctcctatcgggggcagatggtcaccatgacctacacccagatgggcaacaccggcattaatccggaggatatcgagagcaagcagctctacctctcgggtttcatcgtcaaggagtaccacgactgctactccaactggcgggccaccatgagcctagacgcctatctgaaggagaacggcgtggtggggatccaggggctcgacacccgggcgctcaccagacatctgcgggacaagggggcccagaacgggatcatctctaccgtcgatttcgaccacgagagcctcgtaaagaaagcacgggccgtgccgagcatggccggtctcgacctcgcctccggcgtcacctgcgataagccctaccattggaccgaaaagctctgggacctggaggcagggtataacgctgcgaaacaggaagacttgaagtacaaggtggtggcctacgatttcggcatcaagtacaacatcctccgctgcctcgtctcggccggctgcgacgtgactgttgtccccgccaccttcccggcggaggaggccctggccatgaaccctgacggtatcttcctcagcaacggtcccggcgatccggagcccatgaccaccgtcatcgagaacatcaggaaattcgtgggcaagaagcccatcttcggcatctgtctcggccaccagctcctggggcttgccctcggcggcaagactatgaaactcaagttcggcaaccacggctccaacctgccggtcatggatatggatacccggaaggttgaaataaccgcccagaaccatggcttctcagtggatattgtgtcactgggacatgcctgcgagttggcccacgagaacctgaacgatcagaccgtggaggggatgaagcacaaggatctccccatcttctcggtccagcaccacccggaggcatcgcccggtccccatgactcccactatctgttcgggcggttcgtggaactgatggagaaacataaatcgtag

SEQ ID NO: 95220 - protein, 374 aa, Geobacter metallireducens GS-15
MKAVLALADGRIFEGKSFGATGEATGEVVFNTAMTGYQEVLTDPSYRGQMVTMTYTQMGNTGINPEDIESKQLYLSGFIVKEYHDCYSNWRATMSLDAYLKENGVVGIQGLDTRALTRHLRDKGAQNGIISTVDFDHESLVKKARAVPSMAGLDLASGVTCDKPYHWTEKLWDLEAGYNAAKQEDLKYKVVAYDFGIKYNILRCLVSAGCDVTVVPATFPAEEALAMNPDGIFLSNGPGDPEPMTTVIENIRKFVGKKPIFGICLGHQLLGLALGGKTMKLKFGNHGSNLPVMDMDTRKVEITAQNHGFSVDIVSLGHACELAHENLNDQTVEGMKHKDLPIFSVQHHPEASPGPHDSHYLFGRFVELMEKHKS

SEQ ID NO: 95221 - DNA, 1128 bp, Desulfovibrio desulfuricans G20
  CDS (1)..(1128): transl_table=11
atgagagcgctgctggcccttgaagacggcttcgtactggaaggccgttcctttaccggccccggagagacgggtggtgaggtgattttcaacaccggcatgaccggctatcaggaagtgctgacggatccttcgtatgcggggcagatggtctgcatgacctatccgcttatcggcaactacggagtgacccgcgaagacgtggaatccggcaaggtgcacgttgaggcgttcattgttaaggaatgctgcaaggtgccctccaactggcgttccgtggcgtcgcttcccgattatctcaagcgtaacggtattatgggcatcgaaggcatagacacccgcgcccttacccgtcatctgcgcatgcacggagccatgcggggcattatctccactgcggagaccgatcccgcggcgctggtgcagcgggcaaaagacctgccgtccatggaaggccagaatctggttgtgcgcgtggcacccgaaagcccttaccgctgggacggcgaacgccctcagaaagtgactctgcaggacggggtgtacgcatggccgggcaaggggccgcgtgtggtggtctatgacttcggcatcaaatggaatattctgcgcctgcttgccgcagaaggactggacctgcttgtggtgccgccttcttttaccgcgcaggacgtgcagcgttgcggtgccgaggccgtgttcctttccaacggtcccggagacccggcaacgctgaaggctgaaatagccgaaatcgcaaaactgaccgacatgatgcccgtggccggcatctgtctggggcatcagctgctcgggcatgcgctgggcggtaccacgcgcaagcttaaattcgggcaccacggctgcaacagcccggtgaaggacctgacaacggggcgcatagaagtctcttcgcaaaaccacgggttctgtgtagagttggatgcagttcccgatgtgcgtgtgacccatgtgaacctgaatgacaatacgcttgagggtttcgagcataccgtcaaaccggtcatttcggtgcagcaccaccccgaagccagcccgggacccaacgacagccactacttcttcggcaggttccgcaaactgctgcgcgaacatctgggaaagtag

SEQ ID NO: 95222 - protein, 375 aa, Desulfovibrio desulfuricans G20
MRALLALEDGFVLEGRSFTGPGETGGEVIFNTGMTGYQEVLTDPSYAGQMVCMTYPLIGNYGVTREDVESGKVHVEAFIVKECCKVPSNWRSVASLPDYLKRNGIMGIEGIDTRALTRHLRMHGAMRGIISTAETDPAALVQRAKDLPSMEGQNLVVRVAPESPYRWDGERPQKVTLQDGVYAWPGKGPRVVVYDFGIKWNILRLLAAEGLDLLVVPPSFTAQDVQRCGAEAVFLSNGPGDPATLKAEIAEIAKLTDMMPVAGICLGHQLLGHALGGTTRKLKFGHHGCNSPVKDLTTGRIEVSSQNHGFCVELDAVPDVRVTHVNLNDNTLEGFEHTVKPVISVQHHPEASPGPNDSHYFFGRFRKLLREHLGK

SEQ ID NO: 95223 - DNA, 1140 bp, Prochlorococcus marinus str. MIT 9312
  CDS (1)..(1140): transl_table=11
atgattaattcctataagaaaaatgcaaaattagttttaagtaatggattgatatttcctggattttcttttggatattcgggaactgctgttggcgaaatagtatttaatactggaatgactgggtatcaggaggttattactgatccaagttattacggacaaatattaacattcacttatccagaagttggaaatactggtattaatactgaagattcagaatcaagtatttgtgttaaaggaataattgttagaaattattcaacaaataatagtaattggagatccctgaagaattttaatgaatggttagttgaaaaaaaaattattggtctttatggaattgatacacgagctcttgttaaaattttaagatctaatggttcgatgaatgcggttcttacctctgaagaaagaactttagacaattgcttagaaataataaatgaaacgccaaaaatggagggcttgaatttatcaaaagaagtttctacaaagcaacaatatttatggcggaatcctacaggaacagattttgatgttagaaaaagatattctgaaaatactaataaactaaaagtagtagcaattgattttggaataaaaaaatcaattttaaatagactagtttctcatggttgtgaaattttagttttaccttcaagttcttcattgaaagatgttatatcaaataagccggatggtatattcttctcaaatggtccaggagatccttcttctgttactgaaggtatagatttagcaagatcacttattgaatatggtgaaatacctatgtttggaatttgccttggccatcaaatatttggaatagccctaggaggttctacttataaactaccttttggacatcgtggtctaaatcatccttgtggaatcaataatcaaattgagataacaagtcagaatcatggttttgctcttgaccctaattctctctcaaaggacatagtcaaaatcactcactataaccttaacgataatactgttgcaggattggaagttaataataagccaatttttagtgttcagtatcatccagaagcaggacctggtccacatgactctgattatttatttaaaaaatttgtttctctaatgttagaaagatgttga

SEQ ID NO: 95224 - protein, 379 aa, Prochlorococcus marinus str. MIT 9312
MINSYKKNAKLVLSNGLIFPGFSFGYSGTAVGEIVFNTGMTGYQEVITDPSYYGQILTFTYPEVGNTGINTEDSESSICVKGIIVRNYSTNNSNWRSLKNFNEWLVEKKIIGLYGIDTRALVKILRSNGSMNAVLTSEERTLDNCLEIINETPKMEGLNLSKEVSTKQQYLWRNPTGTDFDVRKRYSENTNKLKVVAIDFGIKKSILNRLVSHGCEILVLPSSSSLKDVISNKPDGIFFSNGPGDPSSVTEGIDLARSLIEYGEIPMFGICLGHQIFGIALGGSTYKLPFGHRGLNHPCGINNQIEITSQNHGFALDPNSLSKDIVKITHYNLNDNTVAGLEVNNKPIFSVQYHPEAGPGPHDSDYLFKKFVSLMLERC

SEQ ID NO: 95225 - DNA, 1176 bp, Synechococcus elongatus PCC 7942
  CDS (1)..(1176): transl_table=11
atggttcggatctcgggcttttgctgcgctatgtcccttgctgaacgccaagctgctctgctcgtcttggctgacggatccgtattccatggttacgcctgcggggcggcgggaacggtcatcggtgaagttgtcttcaacaccggcatgaccggctatcaagaagtgctgacagacccgagctactgtgggcagattgtcagctttacctatcccgagctgggcaacaccggggtcaaccccgaagacgaagagtctgcccggcctcaagtcagcggcttgattgctcgtaatgttgctcgccgccacagcaactggcgggccgatcgctccctgcctgactatttgcaacagcacaacattgttggcatctacggcatcgacacccgcgccctcacgcaacatttgcgatcgacgggggcgatgaatggcggcatctccacaactattttggatcctgaagaactctgggcagaagtcaaagccgccccatccatggaagggttgaatttggtcgatcaagtcacgaccgatcgcccctacgagtggcaaactcccaccagtcaaacctgggaatttattgaagggccaaccacagagtccctgacagttgtcgccatcgacttcggcgtgaagcgcaatatcctgcgccgcttggccagctatggttgccgtgtgatcgtggttccggccgatacgccgatcgaagaaatcctgcggcacgagccagatggtgtctttctctccaatggccctggcgatccagccacggtcaaaaatgggatcagcaccgcccaagcactcctgcaaactggactgccgttgtttgggatttgcctcgggcaccagattctggggttagccttgggggctcaaaccttcaagctcaagtttggccaccgggggctcaaccacccctgtggcttgtcccagcaggtcgagatcaccagccaaaaccacggctttgcgatcgcggcggactccttagggccggatgtggaagtcacccacctcaacctcaacgatcgcacggtagcggggttacgacaccgccatctgcccgtcttctcggtccagtatcaccccgaagccagcccagggccccatgattctgactatctgtttgagcagtttgtggctttaatgcgcgatcgccaacccactccagtggcttag

SEQ ID NO: 95226 - protein, 391 aa, Synechococcus elongatus PCC 7942
MVRISGFCCAMSLAERQAALLVLADGSVFHGYACGAAGTVIGEVVFNTGMTGYQEVLTDPSYCGQIVSFTYPELGNTGVNPEDEESARPQVSGLIARNVARRHSNWRADRSLPDYLQQHNIVGIYGIDTRALTQHLRSTGAMNGGISTTILDPEELWAEVKAAPSMEGLNLVDQVTTDRPYEWQTPTSQTWEFIEGPTTESLTVVAIDFGVKRNILRRLASYGCRVIVVPADTPIEEILRHEPDGVFLSNGPGDPATVKNGISTAQALLQTGLPLFGICLGHQILGLALGAQTFKLKFGHRGLNHPCGLSQQVEITSQNHGFAIAADSLGPDVEVTHLNLNDRTVAGLRHRHLPVFSVQYHPEASPGPHDSDYLFEQFVALMRDRQPTPVA

SEQ ID NO: 95227 - DNA, 1170 bp, Rhodospirillum rubrum ATCC 11170
  CDS (1)..(1170): transl_table=11
atgtccacgccctcgcacactcccaagccccccggggccacggccgttctggcgcttgccgatggcacgctcttctggggccgaggcgtgggcgccttgggcgaagtggtcggcgaggtctgcttcaacacggcgatgaccggctatcaggaagtgatgaccgatccgtcctatgccgggcagatcgtcaccttctgctttccccatatcggcaatgtcggcaccaacgccgaggatatcgaaagcaccgtccccgccgcccgcggttgcgtgctgcgcgccgacatcaccgaaccggccaattggcgggccaccggcgccttgaacggctggctggcggcgcgcggccttgtcggcatcagcggcgtcgatacccgccagctgacccggcgcatccgcgaccttggcgcccccagcggggtgatcgcccatgccgccgacggcgttttcgacatccccgccctggtggccaaggcgcaaggctggcccgggctcgagggcatggatctcgccgccgaggtcacctgcacccagacctacgcctgggacgagaccctgtggtcgctggacggcggctatggacggttgagcgatcctcgcttccatgtggtggccatcgactacggcgccaagcgcaatatcttgcgcaatctggcctcgctgggctgcaaggtcaccgtcgtgccggcccagaccacccttgacgaggtgatggcccatcagcccgacggcatcttcctgtcgaacggcccgggcgacccggcggccaccggaacctatgcggtgccggtgatcaaacagctgatcgagaccggcaagccgctgtttggcatttgcctgggccatcagatgctggccctggccctgggggcgacgacctataagatggccaccggccatcgcggggccaaccacccggtgaaggatcacaccaccggcaaggtcgaaatcacctcgatgaaccatggctttgccgtggatcgggccagcctgcccgccggcgtcaccgaaacccacaccagtttgtttgacaatgtccttgaagggctggccgtcgatggcaagccggtgttttcggtgcaataccacccggaagcctcgcccggccccgaggacagccactatctgttcaagcgcttcgtcgatctgatggacgcccgccgcgtctga

SEQ ID NO: 95228 - protein, 389 aa, Rhodospirillum rubrum ATCC 11170
MSTPSHTPKPPGATAVLALADGTLFWGRGVGALGEVVGEVCFNTAMTGYQEVMTDPSYAGQIVTFCFPHIGNVGTNAEDIESTVPAARGCVLRADITEPANWRATGALNGWLAARGLVGISGVDTRQLTRRIRDLGAPSGVIAHAADGVFDIPALVAKAQGWPGLEGMDLAAEVTCTQTYAWDETLWSLDGGYGRLSDPRFHVVAIDYGAKRNILRNLASLGCKVTVVPAQTTLDEVMAHQPDGIFLSNGPGDPAATGTYAVPVIKQLIETGKPLFGICLGHQMLALALGATTYKMATGHRGANHPVKDHTTGKVEITSMNHGFAVDRASLPAGVTETHTSLFDNVLEGLAVDGKPVFSVQYHPEASPGPEDSHYLFKRFVDLMDARRV

SEQ ID NO: 95229 - DNA, 1086 bp, Moorella thermoacetica ATCC 39073
  CDS (1)..(1086): transl_table=11
gtgccagtgcgcgggtttttggtgctggaggacggaacggtatatagcggcgaggcctttggttaccccggccgctctcacggggaggtcgttttcaataccagcatgaccggttatcaagagatcctgaccgacccctcctattgcggccagattgtagccctgacctaccccctgatcggcaactacggcattaacgatgaggatctcgagtcggatggcccccgggtagccggcttcgtcgtccatgaagcctgcccgcggcccagcaactggcggtcaacgggtagccttgatcattacctccgggaaaaccgcatcccggccctgcaaggggtggatacccgcgccctcacaaggcacctgcgccgacggggcaccatgcggggcatcctggccacgggcgaggtggatttggaggaaatcaaggccctggccgctacccggccggccctgagcggcgccaaactggtaccggcggttaccaatgccaagccgtataccgtcgagggagggccgcgccgggtagttctctataatttcggcgtcaaggagaatatcatccgctggctgcgccgggagggatgcaccgttaccgtcatgccggcccgaagtacagcagccgctattctggccctcaaccccgaaggggtggtcgtttccaatggcccgggcgaccccaaggacgttccctacggtgtggccaccgtccgggaactactgggccgggtaccactgatgggcatttgcctgggccaccagctcctggctctggccctgggaggcgatacctacaaactccccttcggccaccgcggcggcaaccacccggttaaggatttaagcaccggtcgggtctatattacctcccagaaccatggttacgccgtccgggctgactccctgccgacaggggcggtcgtctcccatatcaacctcaacgacggcacggtggaaggcctgcgccatcgggagttgcccgccttctccgtgcagtatcaccccgaatcctcgccgggaccgacggattccgagtacctcttccacgaatttatcaggctggtagacgaacaccgggggcaataa

SEQ ID NO: 95230 - protein, 361 aa, Moorella thermoacetica ATCC 39073
MPVRGFLVLEDGTVYSGEAFGYPGRSHGEVVFNTSMTGYQEILTDPSYCGQIVALTYPLIGNYGINDEDLESDGPRVAGFVVHEACPRPSNWRSTGSLDHYLRENRIPALQGVDTRALTRHLRRRGTMRGILATGEVDLEEIKALAATRPALSGAKLVPAVTNAKPYTVEGGPRRVVLYNFGVKENIIRWLRREGCTVTVMPARSTAAAILALNPEGVVVSNGPGDPKDVPYGVATVRELLGRVPLMGICLGHQLLALALGGDTYKLPFGHRGGNHPVKDLSTGRVYITSQNHGYAVRADSLPTGAVVSHINLNDGTVEGLRHRELPAFSVQYHPESSPGPTDSEYLFHEFIRLVDEHRGQ

SEQ ID NO: 95231 - DNA, 1146 bp, Burkholderia thailandensis E264
  CDS (1)..(1146): transl_table=11
gtgttgccgtctttttctcccgctttgctcgcactcgccgacggcacggtctttcgtggttattcgatcggcgcggccggccatacgatcggcgaagtcgtgttcaacaccgccatcaccggctatcaggaaatcctcacggatccgagctatgcgcgccagatcgtcacgctgacctatccgcacatcggcaacgtcggcgtgaacgccgaggacgtcgaggcgacgaaagtccatgccgccggccttatcgtgcgcgatctgcccgcgctggcgtctaacttccggatggagcgcacgctcggcgattatctgcgcgacgaaggcgtcgtcgcgatcgcgggcatcgacacccgcaagctgacccgcatcctgcgcgacaagggcgcgcaaaacggctgcatcctgacgggttccgatgacgaaacgaaggcgctcgcgctcgcgcgctcgttcccggggctcgcggggatggatctcgcgaaggtcgtgtcgacgacgaagccgttcgagtggaggcagaccgagtggcgcctcggtagcggctacggcatgcaggaggcgcctcgctaccgcgtcgtcgcgttcgacttcggcgtcaaatacaacatcctgcgcatgctcgccgagcgcggctgccacgtgaccgtgctgcccgcgcaatcgagcgcggccgaagcgctcgcgctcaatccggacggcatcttcctgtccaacggcccgggcgatccggagccgtgcgactacgcgatcgccgcgacgaaggagttcatcgagcgcggcgtgccgaccttcggcatctgcctcggccaccagatcatgggcctcgcgctcggggcgaagacgctcaagatgaagacgggccaccacggcgcgaaccatccggtgaaggatctcgcgaacggccgcgtcgtgatcacgtcgcagaaccacggtttcgcggtcgacgccgattcgctgcccgcgaacgcgcgcgcgacgcacgtgtcgctgttcgacggcacgctgcaaggcttcgagctgaccgacaagcccgcgttctgcttccaggggcacccggaagcgtctcccggcccgcacgacatcggctatctgttcgaccgcttcaccgcgctgatggacgcggcgaaggcgcgcagcgcctga

SEQ ID NO: 95232 - protein, 381 aa, Burkholderia thailandensis E264
MLPSFSPALLALADGTVFRGYSIGAAGHTIGEVVFNTAITGYQEILTDPSYARQIVTLTYPHIGNVGVNAEDVEATKVHAAGLIVRDLPALASNFRMERTLGDYLRDEGVVAIAGIDTRKLTRILRDKGAQNGCILTGSDDETKALALARSFPGLAGMDLAKVVSTTKPFEWRQTEWRLGSGYGMQEAPRYRVVAFDFGVKYNILRMLAERGCHVTVLPAQSSAAEALALNPDGIFLSNGPGDPEPCDYAIAATKEFIERGVPTFGICLGHQIMGLALGAKTLKMKTGHHGANHPVKDLANGRVVITSQNHGFAVDADSLPANARATHVSLFDGTLQGFELTDKPAFCFQGHPEASPGPHDIGYLFDRFTALMDAAKARSA

SEQ ID NO: 95233 - DNA, 1206 bp, Syntrophus aciditrophicus SB
  CDS (1)..(1206): transl_table=11
ttgagaaatagccggcgttcaaacaatgaggaacaacacgacatgaccctgctgagaaaacagaaacccgcgctcctggttctggaagacgggtgtgtctttcggggagaagccttcgcgggtgagggcgaagtcctgggagaggtcgtcttcaataccgggatgacgggctaccaggaggttctgaccgatccatcctacaaggggcagatcgtcgccatgacctatccgctgatcggcaactacgggatcaatcccgaggatatggaagcagcgggaatttctctggaggggtttatcgtccgggaatattcggatttcccgagtaactggcgatcccggcagagcctgaagacctttatggaatcccagggcaagctgggtgtcgagggactggactgccgcgccctgacacggcgtcttcgcgtttccggggcgatgcgcggcattctgaccacggaaatccaggacgtggagattctgctccagcgggtgcgggcatatcccggtcttgtcgggcaggacctggtcaggaccgtaacgtgtcaagagccgtaccgatgggtgcgcgggagcgttcagccggctgaccgggaccggaggccggaggaaggcaagaatctccgggtggtcgttctggattgcggcgtcaaatacaatatcctgcgctgtctggaggcggaaggctgcgaggtgatcgtcgtccccgcctgctcttccgatgaacagattctgtcctggtctcctgacgggctgctcctgtccaacggtccgggcgatccggctgcactgccttatatcgtggccaccgtccggcaattgctggggaaagttccgatcttcggcatctgcctgggacatcagatcctgggacaggctgtcggcggccgcaccgaaaaattgaagttcggccatcacgggatcaatcaaccggtgaaacaccgcctgtcgggccgggtggaaatcacctcccagaatcacggatttgtcgttgtgccggaatcccttcccgcggatctggaaaaaacgcatgacaatctcaatgacgggacatcggaaggaatcgcttatccgtctctgggggcgttcagcgtccagtatcaccccgaagcggcgccggggccgcaggatgcatcctatcttttcaaacagtttgtaaaactaatcacatcagagaagggaaacaagcttaggaccccttcctga

SEQ ID NO: 95234 - protein, 401 aa, Syntrophus aciditrophicus SB
MRNSRRSNNEEQHDMTLLRKQKPALLVLEDGCVFRGEAFAGEGEVLGEVVFNTGMTGYQEVLTDPSYKGQIVAMTYPLIGNYGINPEDMEAAGISLEGFIVREYSDFPSNWRSRQSLKTFMESQGKLGVEGLDCRALTRRLRVSGAMRGILTTEIQDVEILLQRVRAYPGLVGQDLVRTVTCQEPYRWVRGSVQPADRDRRPEEGKNLRVVVLDCGVKYNILRCLEAEGCEVIVVPACSSDEQILSWSPDGLLLSNGPGDPAALPYIVATVRQLLGKVPIFGICLGHQILGQAVGGRTEKLKFGHHGINQPVKHRLSGRVEITSQNHGFVVVPESLPADLEKTHDNLNDGTSEGIAYPSLGAFSVQYHPEAAPGPQDASYLFKQFVKLITSEKGNKLRTPS

SEQ ID NO: 95235 - DNA, 1266 bp, Frankia sp. CcI3
  CDS (1)..(1266): transl_table=11
gtgagcactcccaccacgacgccgacgcgagcggtcctgatgctggaggacggtcgcagcttcgtcggcgaggcgtacggggcgatcggcgagaccttcggcgaggccgtgttctccaccgggatgaccggctaccaggagacgctgagcgatccgtcgttccacggccaagtcgtcatcatgaccgccccgcacatcggcaacaccggcgtcaacgacgaggactacgagtccgagcggatccaggtcgccgggttcgtcgtgcgtgaccccgcccggcgggcctccaactggcgcgcccggggcacgctcgacgacgagctggccgcggccggtgtggtggggatcagcgggatcgacacccgggcgctgacccgtcacctgcgtgagctcggctcgatgcggtgcgggatcagcagcgtgctcgacgccgacgccgacgccgacgccgacggtggcccggtcggcccgggcccgggttccggcgcggacggcgagcgggcggcggcgctcgacgccctgctcgaccgggtccgcgcctccccggagatgctcggcgcggatctcgcgccccgggtctccacccctaccccctatgtggtggaggcggtggcgggcgccgcgctgttcaaggtcgccgcgctcgatctcggcatcaagcgcgcgacgccggccgccatggccgcgctgggctgcgaggtgcatgtgctgccggcccgcaccaccggcgaacagctgctggcgctggaaccggacggggtgttcctgtcgaacggtcccggcgatccggcggcggcggactatgcggttgacgcgctgcggacggtgctgcgggccggtgtcccggtgttcgggatctgtttcgggcaccagctgctggcccgcgctcttggcttcgagacgtacaagctcacctacggccaccgcggcgtgaaccagccggtcggggatatggcgaccgggcggatcgcggtcaccagccagaaccacggcttcgccgtgcgggcgccgctcaccggggtgaccgacaccccgttcggccgggtggtggtcagccaccgcggcctcaacgacaacgtcgtcgagggattggagtgtctggacgtgccggccttcagcgtgcagttccatccggaggccgcgccggggccgcatgatgcctccccgttgttcgagcggttccgcgctttgatggcggacacccgggagggtggccgggagcggagtgagcgatctgtgcgggaggccggtcatgccgaagcatga

SEQ ID NO: 95236 - protein, 421 aa, Frankia sp. CcI3
MSTPTTTPTRAVLMLEDGRSFVGEAYGAIGETFGEAVFSTGMTGYQETLSDPSFHGQVVIMTAPHIGNTGVNDEDYESERIQVAGFVVRDPARRASNWRARGTLDDELAAAGVVGISGIDTRALTRHLRELGSMRCGISSVLDADADADADGGPVGPGPGSGADGERAAALDALLDRVRASPEMLGADLAPRVSTPTPYVVEAVAGAALFKVAALDLGIKRATPAAMAALGCEVHVLPARTTGEQLLALEPDGVFLSNGPGDPAAADYAVDALRTVLRAGVPVFGICFGHQLLARALGFETYKLTYGHRGVNQPVGDMATGRIAVTSQNHGFAVRAPLTGVTDTPFGRVVVSHRGLNDNVVEGLECLDVPAFSVQFHPEAAPGPHDASPLFERFRALMADTREGGRERSERSVREAGHAEA

SEQ ID NO: 95237 - DNA, 1176 bp, Novosphingobium aromaticivorans DSM 12444
  CDS (1)..(1176): transl_table=11
atggccgaccccgcactttcgcacgcgcctcaaccagatggcgcgacgggagtccttgtacttgccgatgggtctgttgcctggggacgtggatttggcgctgctggtgcggccgttggcgaggtgtgcttcaacaccgcgatgaccggataccaggaagtgatgaccgatccgtcctatgcgggacaggtcgtcaccttcacttttccgcacatcggcaacgtcggcaccaatccggacgacatggaaagccatgacacgccgggcgccgtgggctgcgtggtgcgcgaggacgtgaccgcgcccgccaacttccgcgctgccggcaccttccagcagtggatggagcagcagggcaagatcggcatctccggcctcgacacccgcgcgctgacgcgccgtatccgcctttcaggcgcgccgaacgcggtgatcgcgcacgatccgaagggccagttcgacattcccgcgctgatcgaacgcgcgcggtcctggcccggtctcgaaggcatggaccttgcccgcgtcgttacacgcgacgggcaggaagcctgggaaggctcggtctggcatctgggcgagggcttcaccaagccccaaggcactggccgtccgcacgtcgtcgccatggatttcggcgcgaaggacaacattttccgcaatctggtgaaggccggcgcggacgtgacgatcgtgcccgccgaaaccagcctcgagacgatcctttcgctcaagcccgcaggcgtgttcctgtcgaacggtccgggcgacccggcggcgaccggcgcctacgccgtgccggtgatccagaagctgctcgagatggacatgccggttttcggcatctgcctcggccaccagatgctggcgctcgccgccggtgcacgcaccaccaagatgcaccagggccaccgcggtgcgaaccacccggtcaagcgcatcgaggacggcgtcgtcgagatcacctcgatgaaccacggctttgctgtcgacaacgcgccgggcgcgctgggcgacaaggtgatcgaaactcacgtctcgctgttcgacggctcgaactgcggtatcgcggtcaagggcaagaaggcgttcggcgtgcaataccacccggaagcttcgcccggcccgcaggacagtttctacctgttcgagaagtttgtagcgtcgctcgtttga

SEQ ID NO: 95238 - protein, 391 aa, Novosphingobium aromaticivorans DSM 12444
MADPALSHAPQPDGATGVLVLADGSVAWGRGFGAAGAAVGEVCFNTAMTGYQEVMTDPSYAGQVVTFTFPHIGNVGTNPDDMESHDTPGAVGCVVREDVTAPANFRAAGTFQQWMEQQGKIGISGLDTRALTRRIRLSGAPNAVIAHDPKGQFDIPALIERARSWPGLEGMDLARVVTRDGQEAWEGSVWHLGEGFTKPQGTGRPHVVAMDFGAKDNIFRNLVKAGADVTIVPAETSLETILSLKPAGVFLSNGPGDPAATGAYAVPVIQKLLEMDMPVFGICLGHQMLALAAGARTTKMHQGHRGANHPVKRIEDGVVEITSMNHGFAVDNAPGALGDKVIETHVSLFDGSNCGIAVKGKKAFGVQYHPEASPGPQDSFYLFEKFVASLV

SEQ ID NO: 95239 - DNA, 1098 bp, Anaplasma phagocytophilum HZ
  CDS (1)..(1098): transl_table=11
atgaccagcgaatttcataatgcggttattgtactgtctgatgggcggtattttttcggaagatcactcggtaagaggactgactgcgttggagaggtgtgcttcactaccggagtcacaggatatcagtatactattactgatccttcctttgccggtcagatcgtcacgttcacgtttcctcacatagggaatgtcgggataaatagcaaggattttgagtgtgagcaggtcttggctaagggcatagtagttagggagatatccggtgcgtcgcatgtatcttcacatatagatcttaactcttggatagagcaaaataatttcaccgggatatctggtgtagacaccagggcgttagccatacacttgcgcgagaatggtacactaggtggagtcatacatcacttcgacgatataggtgcggtgcacatacaggaattacaaaatgtggcacgtacgcataaaaagtcgctggcaactgagctccctcaccttatggatcatagccatcatgttgatgggcacagtgtttgcgtcattgattttggtgcaaaacatggaatatttagcgccttgactagaatagggtgcgctgttcatgtggtagccgcgcagaatgactttgcagccagagccttgtcactaaaacccagaggcatagtaatatcaaatggccctggagatcccgcagatataagtgaccccgttatggaccaattacgcgtgcttatagattctggaatccctgttttgggcatatgtttgggacatcaacttatagcaaaggctcttggagccaaaactattaagatgcaccatggtcataggggaagcaaccatccagtatatagcctggaaactaagtctgtagaagtcactagccaaaaccatgggtataccgttgacgccagtactttgcccgataacatagaggtcacacacatatcactttttgatggcaccgtagagggaatcaagatgaccaatcgtcctgtgctttcggtgcaatatcatccagagggttgcccaggacctaacgattcgcactatattttcagaaagtttgccgatttgatcacatctgcacacgcataa

SEQ ID NO: 95240 - protein, 365 aa, Anaplasma phagocytophilum HZ
MTSEFHNAVIVLSDGRYFFGRSLGKRTDCVGEVCFTTGVTGYQYTITDPSFAGQIVTFTFPHIGNVGINSKDFECEQVLAKGIVVREISGASHVSSHIDLNSWIEQNNFTGISGVDTRALAIHLRENGTLGGVIHHFDDIGAVHIQELQNVARTHKKSLATELPHLMDHSHHVDGHSVCVIDFGAKHGIFSALTRIGCAVHVVAAQNDFAARALSLKPRGIVISNGPGDPADISDPVMDQLRVLIDSGIPVLGICLGHQLIAKALGAKTIKMHHGHRGSNHPVYSLETKSVEVTSQNHGYTVDASTLPDNIEVTHISLFDGTVEGIKMTNRPVLSVQYHPEGCPGPNDSHYIFRKFADLITSAHA

SEQ ID NO: 95241 - DNA, 1107 bp, Desulfitobacterium hafniense Y51
  CDS (1)..(1107): transl_table=11
ttgcaggctgcattagtattagaaaccggaaaaatattcatgggagagtcctttggcgccggtggtgaaattcggggagaggtggttttcaatacaggaatgaccggctatcaggaagtcctcaccgatccttcctataagggacagatggtatgcatgacctatccgctgatcggtaactacggcatcaattccttagataatcagtccccacagatccaggtccagggatttatcgtcaaagaagcagcgcgtaatccccatcattggcaactggaaaagaatatctccagagccttggctcaggcaggggttgtcggaatcaagggtatcgatacccgggccttaacccgcattatccgggagcatggcgtgttgcggggaatgattaccacagagcttggggagctggaccaaaaagcactggagctgaagaactgggagattcctcaggatgcagtggctcaggtgagcaccagggagatctacaagctgccgcccctgggcaaaacggattcccggaagcctttccatgtggtggtgatggactttggtattaaaggcagtattctcagggccatgcaggaagaaggctatgccctgactgtggttccttactctgcttctgctcaggagattattgctctgaaaccggatggtgttttcctctccaatggccccggggaccctaaggatgtggcggttggaattaagaccattggcggattcgttaataaactgcctgtctttgggatttgcctcgggcatcagctcctgaccttagctttaggcggggatacctataagcttaaatacgggcatcggggaggtaaccagcctgttcaggacttacgcacgaaaaaagtccatatcacttcccaaaatcatggctatgccgtggctgaggggagtttggccgatacccttctggaagtcacccatctcaatttgaatgatcagaccgtggagggtgtccggcataaggagctcccggtattttccgtgcagtatcacccggaggccggaccgggccctaatgactcactctatctttttaaagagttttccaccttgatgacggaatggaggatacatcatgccacttaa

SEQ ID NO: 95242 - protein, 368 aa, Desulfitobacterium hafniense Y51
MQAALVLETGKIFMGESFGAGGEIRGEVVFNTGMTGYQEVLTDPSYKGQMVCMTYPLIGNYGINSLDNQSPQIQVQGFIVKEAARNPHHWQLEKNISRALAQAGVVGIKGIDTRALTRIIREHGVLRGMITTELGELDQKALELKNWEIPQDAVAQVSTREIYKLPPLGKTDSRKPFHVVVMDFGIKGSILRAMQEEGYALTVVPYSASAQEIIALKPDGVFLSNGPGDPKDVAVGIKTIGGFVNKLPVFGICLGHQLLTLALGGDTYKLKYGHRGGNQPVQDLRTKKVHITSQNHGYAVAEGSLADTLLEVTHLNLNDQTVEGVRHKELPVFSVQYHPEAGPGPNDSLYLFKEFSTLMTEWRIHHAT

SEQ ID NO: 95243 - DNA, 1164 bp, Saccharophagus degradans 2-40
  CDS (1)..(1164): transl_table=11
ttgacgagtgggcatttgttaaacgtggcattacggcctgccattctggttttggcggacggtagtgtttttcgtggtacagcgataggcgctgatggcgattctgttggtgaagtggtgtttaacactgcaatgacgggttaccaggaaattctcaccgatccttcctatgcgaagcaaatcgtgactcttacataccctcatatcggtaacacgggcacaacttccgaagacgacgagtgcagtaatgtctgggcgtctggtttagttattcgtgatatgacaatggtatcgagtaatttccgcagcgagcaaaccctagaagactttttgaagtctaaaaatatcgtaggtatagccgacatagacacacgccgtttaacgcgaattcttcgcgataaaggtgctcaaagcggttgtattatggctggcgaagtggacgaagacattgcacttgctaaagctaaagcgtttgccggtttgcagggcatggatttagcaaaagttgtgtctaccgaaaaggcttacccttggactgccggctcttggcagctaggcaaaggctttggcggtttgccagaaggcgatcgctttaaagtagtggcatacgattttggtgctaaagccaatattctgcgtatgttggtagatcgcggttgtgagcttaccgttgtgcctgcgcaaacaccggctgccgatgtactagccatgaaccctgatggtgtgttcctttctaatggcccaggcgaccccgagccatgcgactacgctattgaagcaattaaaacgctgctagataaaaatattcctctatttggtatttgccttggccaccagttgttggcgttggcgagtggcgcaaaaacagtaaaaatgaaatttggccaccacggcgcgaaccaccctgtgcaagatttaaaaacgggcaaggtaatgatcaccagtcagaaccacggttttgctgcggatgaagcatcgttgcctagcaatatagttgctacccataagtcattgtttgatggctcgctgcagggtattgaacgcacagacaagcgcgcattcagcttccaagggcacccagaagcaagccctggcccgcatgatgctgccgaactgtttgaccattttattgatttgatgaatgaagcaaaaagcgagatgtaa

SEQ ID NO: 95244 - protein, 387 aa, Saccharophagus degradans 2-40
MTSGHLLNVALRPAILVLADGSVFRGTAIGADGDSVGEVVFNTAMTGYQEILTDPSYAKQIVTLTYPHIGNTGTTSEDDECSNVWASGLVIRDMTMVSSNFRSEQTLEDFLKSKNIVGIADIDTRRLTRILRDKGAQSGCIMAGEVDEDIALAKAKAFAGLQGMDLAKVVSTEKAYPWTAGSWQLGKGFGGLPEGDRFKVVAYDFGAKANILRMLVDRGCELTVVPAQTPAADVLAMNPDGVFLSNGPGDPEPCDYAIEAIKTLLDKNIPLFGICLGHQLLALASGAKTVKMKFGHHGANHPVQDLKTGKVMITSQNHGFAADEASLPSNIVATHKSLFDGSLQGIERTDKRAFSFQGHPEASPGPHDAAELFDHFIDLMNEAKSEM

SEQ ID NO: 95245 - DNA, 1131 bp, Methylobacillus flagellatus KT
  CDS (1)..(1131): transl_table=11
ttgccgcaaaccccagccgtacttgtgctcgcagacgggacagtgttcaggggcatttcaatcggtgccttgggtgagactgtgggggaggtggtattcaacacctccattaccgggtatcaggagattctcaccgacccatcctataccaaacagattgtgacattgacttacccgcatatcggcaatgtcggcgtgaatgccgaggatgtcgaatctgggcgtgtctatgcaagcgggcttgtcattcgcgacctgccattgctgagcagtagctggcgcagtgagaaatccttatctgaatacttggtcgaaaataacgtagtggccatcgctgacattgacacgcgcaagttgacccggatcttgcgcgaaaagggtgctcaagcaggctgcatcatcgcaggcgaagttgatgaggcgcgcgcgctggagttggcgcgcagctttcctgggctggccggcatggacttggcaaaagtggtcagcaggaaggatgccggcacgttcgcgctgggcgaatggaaactgggctcgggctatgccgctcaggatcaggccaggtttcatgtggtggcgttcgactatggggtcaagcataacatcctgcgcatgctggtggagcgcggttgcaaagtcaccatcctgcctgcccaggcgacagccgaagaggcactggcactgcgtccagacggcgtttttctttccaacggcccgggagatcccgagccttgtgattatgccatcaaggccatcagcaatgtggtggactccggcatcccagtattcggtatttgcctgggacaccagctgctggctcttgcgagcggtgctaaaaccgtcaagatgaagtttggtcatcatggcgccaaccacccggtgcaggacctggacgacaagcgtgtattcatcaccagccagaaccatggctttgcagtcgatccagaaagtctgcccgctaatctcaagcctacccatgtttccttgttcgatggcagtctgcaagggatcgcccgtaccgacaagcctgcgttcagcttccagggtcaccccgaagccagcccgggcccgaatgagatgagctatctttttgaccgcttcatcaacctgatgggacagcaaaagcaataa

SEQ ID NO: 95246 - protein, 376 aa, Methylobacillus flagellatus KT
MPQTPAVLVLADGTVFRGISIGALGETVGEVVFNTSITGYQEILTDPSYTKQIVTLTYPHIGNVGVNAEDVESGRVYASGLVIRDLPLLSSSWRSEKSLSEYLVENNVVAIADIDTRKLTRILREKGAQAGCIIAGEVDEARALELARSFPGLAGMDLAKVVSRKDAGTFALGEWKLGSGYAAQDQARFHVVAFDYGVKHNILRMLVERGCKVTILPAQATAEEALALRPDGVFLSNGPGDPEPCDYAIKAISNVVDSGIPVFGICLGHQLLALASGAKTVKMKFGHHGANHPVQDLDDKRVFITSQNHGFAVDPESLPANLKPTHVSLFDGSLQGIARTDKPAFSFQGHPEASPGPNEMSYLFDRFINLMGQQKQ

SEQ ID NO: 95247 - DNA, 1176 bp, Burkholderia xenovorans LB400
  CDS (1)..(1176): transl_table=11
gtgttccccaaggagtctcccgtgttgccgtcattttctcccgctctgctcgcgctcgccgacggcacggtctttcgtggttactcgatcggcgcccccgggcataccatcggcgaagtcgtgttcaacaccgctatcaccggctatcaggaaatcctgactgacccgagctacgcgcgccagatcgtgaccctcacgtatccgcatatcggcaacgtcggcgtgaatgccgaagacgtcgaagcggcgaaagtccatgccgccggcctgatcattcgtgatctgccggttctcgcgtcgaacttccgcatggagcgcacgctccagcaatacctgcaggacgaaggcgtggtcgccatcgccggcctcgatacccgcatgctgacccgcgttctgcgcgacaagggcgcgcagaacggcgcgatcctcgccggttcggacgatgaagctcgcgccatcgaactcgctcgctcgttcccgggcctttcgggcatggacctcgcgaaggtcgtgtcgacgaaggagtcctatgaatggacccagaccgaatggcggctgggcagcggctacggcacgcagaatgcgccgaagtaccgcgtggtggcgttcgactacggcgtcaagtacaacatcctgcgcatgctcgccgaacgcggctgtcacgtcaccgtgctgccggcggaagcttccgccgccgacgcgctggcactcaatccggacggcgtcttcctgtcgaacggcccgggcgatccggaaccgtgcgactacgcgatccgcgccacgaaggaactgatcgaccgcggcattccgaccttcggcatctgcctcggccatcagatcatgggcctcgcggtcggcgccaaaaccatgaagatgaagaccggccaccacggcgcgaaccatccggtgaaagatctggacgacggccgcgtggtgatcacgtcgcagaaccacggcttcgcggtcgatgccgacacgctgcccgccaatgcccgcgtcacgcatgtttcgctgttcgacggcacgctgcagggcttcacgctgaccgacaagccggcgttctgcttccagggtcacccggaagcgtcgcccggtccgcatgacatcgcctatctgttcgaccgcttcacggcgttgatggacacgaagaaggccggcaagaccgcagcggcataa

SEQ ID NO: 95248 - protein, 391 aa, Burkholderia xenovorans LB400
MFPKESPVLPSFSPALLALADGTVFRGYSIGAPGHTIGEVVFNTAITGYQEILTDPSYARQIVTLTYPHIGNVGVNAEDVEAAKVHAAGLIIRDLPVLASNFRMERTLQQYLQDEGVVAIAGLDTRMLTRVLRDKGAQNGAILAGSDDEARAIELARSFPGLSGMDLAKVVSTKESYEWTQTEWRLGSGYGTQNAPKYRVVAFDYGVKYNILRMLAERGCHVTVLPAEASAADALALNPDGVFLSNGPGDPEPCDYAIRATKELIDRGIPTFGICLGHQIMGLAVGAKTMKMKTGHHGANHPVKDLDDGRVVITSQNHGFAVDADTLPANARVTHVSLFDGTLQGFTLTDKPAFCFQGHPEASPGPHDIAYLFDRFTALMDTKKAGKTAAA

SEQ ID NO: 95249 - DNA, 1098 bp, Methanococcoides burtonii DSM 6242
  CDS (1)..(1098): transl_table=11
atgatggatgcagtaataggattagaagatggaacgtttttaaaaggtaccggtttcggtgctgaaggtatcgtttgcggagagcttgttttcactactcagtacacaggttatgaggaatcactgacagacccttcatacagcggtcagatcttgatgttcacatatcctcttatcggaaattatggggtcaatgatgagacctttcagtccgacggtgtaaaggtcgagggccttgttgtaagggaagcatgtcggtctccaagtcaccaccaatccatgcgtaatatctacaagctgatggaagatgagggaaagcccggaatatccggagttgacactcgtatgctcaccatcggtactagagagcatggtaccatgcgtgctgcacttatcaatggcagtgacgatggtgaagaggctgtaaggctggcgagagcacagccggatatatccagtctcgacctgatctcaagggttacctgcaaagaaccctacatcataaaaagtcaggtcaataccgatgacaagaaaaatgtcgtacttatcgacctcggtatgaaaaagaatatttctacaagtctattgaacagaggcattgatgttacagtggtaccagctaccacacccgcttctgtaattcaggaatttgatcctgatcttttattcctgtccaacggaccaggtgacccacaaaatgcaaacgcagccatagacgcagtaaaagaaatggcaggaactgttcctattgcaggaatatgccttggtcatcagatcattgcaagggcacttggagctgacacatacaagctcaagttcggacaccgcggagcaaaccagccggtcaaggaccttgaaacaggaattgtacacataacttcacagaatcacggattcgctgtggaaggagattccttcgatgacactgatgtaattgtcacacagatcaataccaatgacaggaccgtggaaggtatcgagcagaaggacctcgatatattcagtgttcagtatcatccggaagcacatgccggtccgagagatacagagaagatcttctttggaaaggtcatgaaagctatgggaggcagggtataa

SEQ ID NO: 95250 - protein, 365 aa, Methanococcoides burtonii DSM 6242
MMDAVIGLEDGTFLKGTGFGAEGIVCGELVFTTQYTGYEESLTDPSYSGQILMFTYPLIGNYGVNDETFQSDGVKVEGLVVREACRSPSHHQSMRNIYKLMEDEGKPGISGVDTRMLTIGTREHGTMRAALINGSDDGEEAVRLARAQPDISSLDLISRVTCKEPYIIKSQVNTDDKKNVVLIDLGMKKNISTSLLNRGIDVTVVPATTPASVIQEFDPDLLFLSNGPGDPQNANAAIDAVKEMAGTVPIAGICLGHQIIARALGADTYKLKFGHRGANQPVKDLETGIVHITSQNHGFAVEGDSFDDTDVIVTQINTNDRTVEGIEQKDLDIFSVQYHPEAHAGPRDTEKIFFGKVMKAMGGRV

SEQ ID NO: 95251 - DNA, 1149 bp, Ralstonia metallidurans CH34
  CDS (1)..(1149): transl_table=11
gtgttaccgtcttttccgtccgccatcctcgcgcttgcagacggcacggtctttcgtggctattccatcggcgcttccggccatacgatcggcgaagtggtgttcaacaccgctatcaccggttatcaggaaatcctcaccgacccgagctattcccggcagatcgtcacgctgacgtatccgcatatcggcaattacggcgtcaaccctgaggatgtagaagccacgaaagtccatgccgccggcctgatcatcaaagatctgccgattctggcctcgaacttccgcaaggaacatacccttgcccactacctgaagcaggaaaaggtcgtggcgatcgcgggcatcgacacccgcaagctgacccgtatcctgcgcgagaagggcgcccagaacggctgcatcctggctggcgaggacaatgtccagaaggccatcgacctggcgcgctcgttcccgggcctggcaggcatggacctggccaaggtcgtctccgtcaaggagccgtatgagtggacccagaccgagtggaagctcggcgaaggctacggcaagcaggacaagccgcagttccacgtggtcgctttcgacttcggcgtcaagttcaacatcctccgcatgctggccgaacgcggctgcaaggtgaccgtgctgccggcgcaagccagtgcggccgacgccctggcgctgaatccggacggtatcttcctgtcgaacggccctggcgacccggagccgtgcgactacgcgatcgccgccacgcgtgagttcattgctcgcggtatcccgaccttcggcatctgcctgggccaccagatcatggccctggccgtcggtgccaagacgctcaagatgagcacgggccaccatggcgccaaccatccggtcaaggaccatgatgatggtcgtgtggtgattacgtcgcagaaccacggcttcgcagtcgatgcatcgacgctgccggccaacgcccgcgtcacgcacacgtctctgttcgacggcacgctgcaaggctttgcgctgacggacaagccggccttctgcttccagggtcacccggaagcgtcgccgggcccgcacgacatcgcgtacctgttcgaccgcttcaccaagctgatgcaggacgcccgcgccaaggccgctgcctga

SEQ ID NO: 95252 - protein, 382 aa, Ralstonia metallidurans CH34
MLPSFPSAILALADGTVFRGYSIGASGHTIGEVVFNTAITGYQEILTDPSYSRQIVTLTYPHIGNYGVNPEDVEATKVHAAGLIIKDLPILASNFRKEHTLAHYLKQEKVVAIAGIDTRKLTRILREKGAQNGCILAGEDNVQKAIDLARSFPGLAGMDLAKVVSVKEPYEWTQTEWKLGEGYGKQDKPQFHVVAFDFGVKFNILRMLAERGCKVTVLPAQASAADALALNPDGIFLSNGPGDPEPCDYAIAATREFIARGIPTFGICLGHQIMALAVGAKTLKMSTGHHGANHPVKDHDDGRVVITSQNHGFAVDASTLPANARVTHTSLFDGTLQGFALTDKPAFCFQGHPEASPGPHDIAYLFDRFTKLMQDARAKAAA

SEQ ID NO: 95253 - DNA, 1122 bp, Acidobacteria bacterium Ellin345
  CDS (1)..(1122): transl_table=11
gtggaagcaatccttgcgctggaagatggccgcgtcttccgaggcaaaggttacggagcagcaagcgagtgtatcggggaagtagtttttaatacttccataaccggctatcaggaaatcttcactgatccttcctacgccggccagatcgtcgttcttgccaacccacaaattggcaactacgggacgaatcccgaagatgaagaggccgtaaagccttacattgagggtctgatcgtgcgcgagttctcgaaggtcacctcgaactggcgctcatccgacgatgccaacgattaccttgagcgccacaacgtccccgttctcgccgagatcgatacccgcgccttggtgcgccatctgcgcgacaacggcgtgatgcgcggcgtgatttctacaaccgaaaaagacgtcgcgaagctcgttgccaaagcgaagtcgattccgaagatggatggcaccgacctcgcgaaggtcgtaacgaccccgaagctctacaactgggccaaagggccgatcgaaatcggcaagcccacggagatcgcacagccgcgacacaaggtcgtggcttacgacttcggcatcaagcacaacatcctgcgcatgctgacgggatcgtgctgcgatgtgaccgtggttccggcgcagacgtcggcggaagacgtgctcgccatgaagcccgacggtgtgttcctgtcgaacgggcccggcgatcccgagcctgtcacttacgcgcagaagagcattcaaggcctgatgggtcgcgtgccagtcttcggcatctgtctcggacatcaactcgtcggtctggcgcttggtggtaagacctacaagcttaagttcggtcaccatggcggcaatcatccggtgaagaacaacaccaccggcaaagtcgagatcacagcgcacaatcacaacttcgcggtcgatcccgattcgctcaagcagagcgaagtcgaactgacgcacgtggacctgaacgacaacacgcttgaaggtctgcggcaccgatcgctgccgttgttcagtgtgcagtaccacccggaggcttcgcccgggccgcacgattcgcattatctcttcggtgacttcgtgaagatgatggacgagtggaaagggaagtag

SEQ ID NO: 95254 - protein, 373 aa, Acidobacteria bacterium Ellin345
MEAILALEDGRVFRGKGYGAASECIGEVVFNTSITGYQEIFTDPSYAGQIVVLANPQIGNYGTNPEDEEAVKPYIEGLIVREFSKVTSNWRSSDDANDYLERHNVPVLAEIDTRALVRHLRDNGVMRGVISTTEKDVAKLVAKAKSIPKMDGTDLAKVVTTPKLYNWAKGPIEIGKPTEIAQPRHKVVAYDFGIKHNILRMLTGSCCDVTVVPAQTSAEDVLAMKPDGVFLSNGPGDPEPVTYAQKSIQGLMGRVPVFGICLGHQLVGLALGGKTYKLKFGHHGGNHPVKNNTTGKVEITAHNHNFAVDPDSLKQSEVELTHVDLNDNTLEGLRHRSLPLFSVQYHPEASPGPHDSHYLFGDFVKMMDEWKGK

SEQ ID NO: 95255 - DNA, 1161 bp, Silicibacter sp. TM1040
  CDS (1)..(1161): transl_table=11
atggtcgaaaccgtttcgccgaagccaaccgcctgcctggcccttgcagatggcaccgtgttctatggacacgggtttggcgccaccgggcgatgcgtggccgagctgtgctttaacaccgcaatgaccggctatcaggaaatcatgaccgacccttcctatgcaggtcaggtcgtcaccttcaccttcccccacatcggcaacaccggcgtcacccccgaggatgacgaaaccgccgacccggtggccgcaggcatggtggtgaaatgggatccgacgctgtcctccaactggcgcgccaccgaagagctgaagtcctggctcacccgcacgggccgcatcgccatcggcggcgtggacacccgccgtctgactcgcgcgatccgccagcagggcgcgccgcatgtggcgatggagcataacccggacgggaatttcgatcttgaggcgctggtcgccgccgcccgcgcctggcccggccttgagggcatggacctcgccaaggacgtgacctgcgcgcagtcctaccgctgggatgagatgcgttgggcctggcccgagggctacacccgtcaggaagagcccaagcacaaggtggtcgccatcgactatggtgccaagcgcaacatcctgcgctgcctcgcctcggcgggctgcgatgtcaccgtgctgccggccaccgcaacctcggaagaggtactggcccatggccctgatggtgtgttcctctccaatggccccggcgacccggccgcaaccggcgcatacgctgtgccgatgatcaaggaaatcctggataagaccgacttgccggtctttgggatctgtctgggccaccagatgctcgcactcgctttgggggccaagaccaccaagatgaaccacggccaccacggcgccaaccacccggtcaaggaacacggcaccggcaaggtggagatcacgtcgatgaaccacggctttgcagtggatgctcaaaccctgcccgagggcgtcgaagagacccatgtctcgctgtttgacggctccaactgcggcattcgcatgaccgatcgcccggtctactccgtgcagcaccaccccgaggccagccccggcccgcaggacagtttctatctgttcgagcgctttgcagaggcgatggccgcgcgcaaggcctga

SEQ ID NO: 95256 - protein, 386 aa, Silicibacter sp. TM1040
MVETVSPKPTACLALADGTVFYGHGFGATGRCVAELCFNTAMTGYQEIMTDPSYAGQVVTFTFPHIGNTGVTPEDDETADPVAAGMVVKWDPTLSSNWRATEELKSWLTRTGRIAIGGVDTRRLTRAIRQQGAPHVAMEHNPDGNFDLEALVAAARAWPGLEGMDLAKDVTCAQSYRWDEMRWAWPEGYTRQEEPKHKVVAIDYGAKRNILRCLASAGCDVTVLPATATSEEVLAHGPDGVFLSNGPGDPAATGAYAVPMIKEILDKTDLPVFGICLGHQMLALALGAKTTKMNHGHHGANHPVKEHGTGKVEITSMNHGFAVDAQTLPEGVEETHVSLFDGSNCGIRMTDRPVYSVQHHPEASPGPQDSFYLFERFAEAMAARKA

SEQ ID NO: 95257 - DNA, 1125 bp, Myxococcus xanthus DK 1622
  CDS (1)..(1125): transl_table=11
atgacgaagcgggcagtgctcgccctggcggatggcaccacgttcgaaggccgtgcgtttggcgcggtgggcgaaacggtgggtgaagtggtgttcaacacgaccatgtacggttaccaggaggtcctcacggacccctcgtacgtgggccagattgtcaccatgtcgtacccggagattggcaacgtcggcgccaacccggaggacgaggagggctcccgggtgcacgcggtgggcatggtggtgcgcgccctcagcgagcagccgtccaactggcgcgcgaaggagtcgctggacgcgtacctgaagcgcaacggcgtcgccggcatcgagggcatcgacacccgccgcctggtgcgccacctgcgcacgcatggcgcgcagatgggcgtcatctccagcgagggcctgtcccccctggccctggtggagcgtgcccgctccgcgcgcggcatggagggcctggacctggccacgggcgtgtccacgaaggaggcctacaccttcacccagccctcgccggacgtcttcaccggcttgggagaggtgcgggtgccggccgagccccgcttcgacgtggtggcctatgactacggtctgaagaagtcgatgctgcacttcctggtggatgtgggctgccgcgtgacggtggtgccggccaacacctcggcggaagaggtgctggcgcgcaagccgaacggcgtcttcctggccaacggccctggagatccggcggcggtgaagggcgcggaccgcaccgtggcggcgctgctgggcaaggtgccggtgttcggcatctgcctggggcatcaaatcatggcgctggccctgggcggccggacgtacaagatgaagtttggccaccggggcggaaaccagccggtgaaggacctcacgacgggcaaggtggaaatcaccgcgcagaaccacggcttcgccgtggatgacgccagcctcaagggcctggccgtcgtaacgcacatcaacctcaacgacggcacggtggagggcctggccgtcccggacgcgcgggccttcagcgtgcagtaccaccccgaggcctcgcccggcccccatgacgcgcgctatctcttcgacaggttcgcgaagctgatggcggggtag

SEQ ID NO: 95258 - protein, 374 aa, Myxococcus xanthus DK 1622
MTKRAVLALADGTTFEGRAFGAVGETVGEVVFNTTMYGYQEVLTDPSYVGQIVTMSYPEIGNVGANPEDEEGSRVHAVGMVVRALSEQPSNWRAKESLDAYLKRNGVAGIEGIDTRRLVRHLRTHGAQMGVISSEGLSPLALVERARSARGMEGLDLATGVSTKEAYTFTQPSPDVFTGLGEVRVPAEPRFDVVAYDYGLKKSMLHFLVDVGCRVTVVPANTSAEEVLARKPNGVFLANGPGDPAAVKGADRTVAALLGKVPVFGICLGHQIMALALGGRTYKMKFGHRGGNQPVKDLTTGKVEITAQNHGFAVDDASLKGLAVVTHINLNDGTVEGLAVPDARAFSVQYHPEASPGPHDARYLFDRFAKLMAG

SEQ ID NO: 95259 - DNA, 1164 bp, Mycobacterium sp. MCS
  CDS (1)..(1164): transl_table=11
gtgagcaacacgagcgagacgcgaagcggatcgcgcatcgatggggccgtggcccttctcgtcctggaggacgggcgggtcttcaccggggtgccctacggggccgtcgggcagacactcggtgaggcggtgttctcgaccgggatgtcgggataccaggagactctcaccgaccccagttactacggccagatcgtggtcgcgaccgcaccgcagatcggcaacacgggctggaaccacgaagacgccgagagccgcgacgacaggatctgggtcgccggctacgccgtccgcgacccgtcgccgcgcgcctcgaactggcgcgccaccggcaccctcgacgaggaactggtccgccagggcgtcgtcggcatcgccggtatcgacacccgcgcgctggtgcgccatctgcgcacccgcggcgccatgaaggcgggcatcttcagcggcgacgagtccgccgcaccgatgtcggaactgctcgaacgcgtccgcagccaaccgggcatgctcggcgcgagcctggcggacaaggtcagcaccgacgatgtctacatcgtggaacccgaaggggcccaccggttcaccgtcgcggcgatcgacctcggcatcaagaccaacaccccgcgcaacttcgcgcggcgcggcatccgcagccatgtgctgcccgcccgggccaccttcgagcagatcgccgacctcaaacccgacggggtgttcctgtccaacgggccgggcgatccggcggcggccgaccatgtcgtcgaggtcacccgggaggtgctgggcgccggcatcccgctgttcggcatctgcttcggcaaccagatcctcggccgggctctgggccggggcacctacaagatggtgttcggtcaccgcggcatcaacgtgccggtgatggaccacgcgaccggtcgcgtcgcgatcaccgcgcagaaccacggtttcgcgctcgaaggcgaagcgggtgaacgtttcgacaccccgttcggggcggccgtcgtcagccacacctgcgccaacgacggggtcgtcgaaggcgtaaaactcgtcaacgggcgggccttctcggtgcagtaccacccggaggccgcggccggcccgcacgatgcgaactatctgttcgaccagttcgtcgaccagatgtcggaggagaagtaa

SEQ ID NO: 95260 - protein, 387 aa, Mycobacterium sp. MCS
MSNTSETRSGSRIDGAVALLVLEDGRVFTGVPYGAVGQTLGEAVFSTGMSGYQETLTDPSYYGQIVVATAPQIGNTGWNHEDAESRDDRIWVAGYAVRDPSPRASNWRATGTLDEELVRQGVVGIAGIDTRALVRHLRTRGAMKAGIFSGDESAAPMSELLERVRSQPGMLGASLADKVSTDDVYIVEPEGAHRFTVAAIDLGIKTNTPRNFARRGIRSHVLPARATFEQIADLKPDGVFLSNGPGDPAAADHVVEVTREVLGAGIPLFGICFGNQILGRALGRGTYKMVFGHRGINVPVMDHATGRVAITAQNHGFALEGEAGERFDTPFGAAVVSHTCANDGVVEGVKLVNGRAFSVQYHPEAAAGPHDANYLFDQFVDQMSEEK

SEQ ID NO: 95261 - DNA, 1110 bp, Rubrobacter xylanophilus DSM 9941
  CDS (1)..(1110): transl_table=11
ttggagtacggacgtaacagggccctgctcgtcctggaggacggggcggtcttcgagggctggaccttcgccggggagggcgaggcggccggggaggtggtcttcaccaccagcatggtcggctaccaggagaccataaccgacccctcctaccgggggcagatagtggtcttcacctaccccctcatcgggaactacggcgtgatcccgggggacgaggagtccccgcgggtgcagcccgcggcggtggtggtgcgcgagtacaccccctaccacagcaactgggccagcgagcgctcgctggccgcgctgctctcggaggcgggcgtgccggggatagagggcgtggacacccgggccctgacgcgccacatccgggacaagggggcgatgcggggtgtgatctccacgctggagcgcgacgtggcggccttgagggagcgcgcccgggcgcacccgccgatggtggggctggacctcgcctcctcgagctcggagctctccgagcccaccctgctgccggcgctcggggaggagcgctgccgggtggtggccctcgactacggggtgaagcagtccatctaccgggagctgcggcggcgcggggccgcggtgcttgcgctcccgggcggcgaggggttggaggaggcgctggaggagggggccgacgggctgttcatctccaacggcccgggcgacccggcggccctggaccgggcggtggagcgcctccgcccggtgctcggcgaggtgcccaccttcgggatctgcctcggccaccagctgctcgggctagcgctcggctgcgagacctacaagatgcccttcgggcaccacggggcgaaccacccggtgaggaacctggagacggggaggatcgagatcaccagccagaaccacggcttcgccctgcgggaggagtcgctgccggagggcgtgaggctcacccaccgcaacctctacgacggcacggtggaggggatagagcacgcggggctgcgggcctggagcgtccagtaccaccccgagtccagccccgggccgcgcgactccggctacctgttcgacgcgttcgtgcagaggatctccgagaacgaggaaaggggttag

SEQ ID NO: 95262 - protein, 369 aa, Rubrobacter xylanophilus DSM 9941
MEYGRNRALLVLEDGAVFEGWTFAGEGEAAGEVVFTTSMVGYQETITDPSYRGQIVVFTYPLIGNYGVIPGDEESPRVQPAAVVVREYTPYHSNWASERSLAALLSEAGVPGIEGVDTRALTRHIRDKGAMRGVISTLERDVAALRERARAHPPMVGLDLASSSSELSEPTLLPALGEERCRVVALDYGVKQSIYRELRRRGAAVLALPGGEGLEEALEEGADGLFISNGPGDPAALDRAVERLRPVLGEVPTFGICLGHQLLGLALGCETYKMPFGHHGANHPVRNLETGRIEITSQNHGFALREESLPEGVRLTHRNLYDGTVEGIEHAGLRAWSVQYHPESSPGPRDSGYLFDAFVQRISENEERG

SEQ ID NO: 95263 - DNA, 1200 bp, Mesorhizobium sp. BNC1
  CDS (1)..(1200): transl_table=11
atggcatcaaccgcgccttggagtgaaaccaggccgacggcacttctggtcctggccgacggcacggtgatcgagggccgaggcctgggtgcggccggctcggcggtgggcgaggtgtgcttcaacactgccttgaccggatatcaggagattctcaccgacccgtcctatgcgggccagatcgtcaccttcaccttcccgcatatcgggaatgtgggcaccaatgacgaggatatcgaggatctcaatcccgccgcgcgcgccggtgctgtcggcgcgatcttcaaggccgacgtcaccgatccgtccaactaccgcgcgggagagcatcttgaccgctggctgaagcggcgcggtatcgtggcgcttgccggcatcgacacgcgcgcgctcacctccctccttcgcgagaaaggcgctgccaatgccgttatcgcccacgcgccggacgggcgcttcgatgtggaagcgctgaagaaggaagccagcgaatggggtggtcttgtagggctcgatctggccaaggtcgtcacctccggccagtcgtccacttggactgagaccccctgggtctggagcgagggctatgccgaggcccgcgagacgccctatcacatcgtcaccgtcgattacggcgtgaagcgcaatatcctgcgaatgctgtccagcctgggcgcaaaggtcaccgtcgtgccggccaccgcttccgccgaggatattctggccatgcggcctgacggcgtgttcctgtcgaacggccccggcgatcctgcggccacgggcgcatacgccgtgcccatgatccgtgaattgctcaagacggagaccccggttttcggcatttgcctgggccatcaaatgttggctctggcgctgggcgccaggacggtcaaaatgcatcagggccatcacggcgccaatcaccccgtcaaggatttcaccaccggcaaggtggaaatcgtgtccatgaatcacggctttgccgtcgatagcgatagcctgccggaaggagtggaggagacgcatgtctcccttttcgacggctccaattgcggcatcagcctcgccggccggccggttttctcggtgcagcatcatccggaagcctcccccggcccgcaggactcgcattaccttttccgccgattcatcaatctggtgcgcgagaagaagggcgagccggcgctggcagagcgctga

SEQ ID NO: 95264 - protein, 399 aa, Mesorhizobium sp. BNC1
MASTAPWSETRPTALLVLADGTVIEGRGLGAAGSAVGEVCFNTALTGYQEILTDPSYAGQIVTFTFPHIGNVGTNDEDIEDLNPAARAGAVGAIFKADVTDPSNYRAGEHLDRWLKRRGIVALAGIDTRALTSLLREKGAANAVIAHAPDGRFDVEALKKEASEWGGLVGLDLAKVVTSGQSSTWTETPWVWSEGYAEARETPYHIVTVDYGVKRNILRMLSSLGAKVTVVPATASAEDILAMRPDGVFLSNGPGDPAATGAYAVPMIRELLKTETPVFGICLGHQMLALALGARTVKMHQGHHGANHPVKDFTTGKVEIVSMNHGFAVDSDSLPEGVEETHVSLFDGSNCGISLAGRPVFSVQHHPEASPGPQDSHYLFRRFINLVREKKGEPALAER

SEQ ID NO: 95265 - DNA, 1098 bp, Cytophaga hutchinsonii ATCC 33406
  CDS (1)..(1098): transl_table=11
atgaaactccacgaacaaaaagaagcatatttaatgcttgaagatggtacctggtacaaaggtattgcagttggtaaaatcgggactacatcaggcgagatttgtttcaatacagggatgacagggtatcaggaaatttataccgatccgtcgtattatgggcaaatcattgtaaacactacaagccatattggaaattatggtgttaaagaagacgaacaggaatctgccggtgttaaattcagcggattggtttgcagaaatttttcagaaatgttttcacggaaggacggcgatggatcacttcaggcttacttcgagaaaaataatattgtaggtatcagcgatgttgatacacgtgaactggttcgttatatccgttctaaaggaacaatgaatgcagtgatttcttctgaaattttagatgtggaaaaactgaaagaagaagttaaaaaggttccttctatgaaaggccttgaactttcaagcagagtttctactaaagaaagttatttcttaggaaatccggatgctaaatacaaagtggctgtattggatcttggtgttaaaaccaacattttaaaaaaccttacagacagagattgttacttaaaagtattcccggctaagacaacctatgctgaaatgaagcaatggtcaccaaatggttattttatttctaatgggcctggtgacccagctgtaacaagctatgcaattgatacggtaaaaaatattttatctgaaaacagaccgatgtttggaatttgcctggggcatcagatcttagcggaagcaaatggtattccgacatataaaatgccaaatggccacagaggtttgaatcatccggtaaaaaacttaatttcgggtttgtctgaagtgacttctcaaaatcacggatttgcagtggatgcaaatgcagtgcctaaggacagcaatgttgagatcacacacataaacttaaatgataatacagtagaaggtattcggttgaaagataagaatgcattctctgtacagtatcaccctgagtcttctccggggccacatgattccagatacttatttgatcaatttgtatcaaacttaaactag

SEQ ID NO: 95266 - protein, 365 aa, Cytophaga hutchinsonii ATCC 33406
MKLHEQKEAYLMLEDGTWYKGIAVGKIGTTSGEICFNTGMTGYQEIYTDPSYYGQIIVNTTSHIGNYGVKEDEQESAGVKFSGLVCRNFSEMFSRKDGDGSLQAYFEKNNIVGISDVDTRELVRYIRSKGTMNAVISSEILDVEKLKEEVKKVPSMKGLELSSRVSTKESYFLGNPDAKYKVAVLDLGVKTNILKNLTDRDCYLKVFPAKTTYAEMKQWSPNGYFISNGPGDPAVTSYAIDTVKNILSENRPMFGICLGHQILAEANGIPTYKMPNGHRGLNHPVKNLISGLSEVTSQNHGFAVDANAVPKDSNVEITHINLNDNTVEGIRLKDKNAFSVQYHPESSPGPHDSRYLFDQFVSNLN

SEQ ID NO: 95267 - DNA, 1161 bp, Rhodococcus sp. RHA1
  CDS (1)..(1161): transl_table=11
atgagcggctacgacaccgactctgcagtactggtcctcgaggacggacgggcattccggggcaccacgttcggtgccgtcggccagacactcggtgaggccgtcttcagcaccggcatgaccggctaccaggagaccctcaccgaccccagttaccaccgccagatcgtcgtggccaccgcgccgcagatcggcaacacgggatggaatgacgaggacgacgaatccgtcggccccaccggcagcagcgccgaggcgaagatctgggtcgccgggtacgtcgtccgcgaccccgcccgccgcacctccagctggcgcgccaccggctccctgcaggacgagctcgtgaagcagggcgtcgtcgggatcgccggcatcgacacccgcgcactggtccgccacctgcgtacccgcggctcgatgcgtgccggggtgttctccggtgacgcactggccgacaccgacgtgctgctcgaccgcgtgaagagccagccgtcgatgctcggcgcggatctcgccggcgaggtcagcaccaccagcgggtacgtcgtcgaaccgaccgggggagacgcgcgcttcaccgtcgcggcaatcgacctcggtatcaagaccaacaccccccgcatgttcgccgagcgcggcatccgggtgcacgtgctcccgtccaacgcgacgctcgagcagatcctcgacctgaaggccgacggcgtcttcctctccaacggtcccggcgacccggcgaccgccgacggcgccgtgcacctcaccaaggaagtcatcgggcagggcctgcccttgttcggcatctgcttcggcaaccagatcctcgggcgtgctctcggtctcggcacctacaagatgaagttcggtcaccggggcatcaacatcccggtcgtcgaacacgagacgggacgcatcgcgatcaccgcgcagaaccacgggttcgcgctcgagggcgaggccgggcaggagttcgatactccgttcggcaaggccgtgatcagccacacctgcgccaacgacggtgccgtcgagggggtccgcctgctcgacggatccgcgttctcggtgcagtaccaccccgaggccgcggcgggcccgcacgacgccgcgtacctgttcgaccgcttcaccagcctgctcgagggagtcaagaactaa

SEQ ID NO: 95268 - protein, 386 aa, Rhodococcus sp. RHA1
MSGYDTDSAVLVLEDGRAFRGTTFGAVGQTLGEAVFSTGMTGYQETLTDPSYHRQIVVATAPQIGNTGWNDEDDESVGPTGSSAEAKIWVAGYVVRDPARRTSSWRATGSLQDELVKQGVVGIAGIDTRALVRHLRTRGSMRAGVFSGDALADTDVLLDRVKSQPSMLGADLAGEVSTTSGYVVEPTGGDARFTVAAIDLGIKTNTPRMFAERGIRVHVLPSNATLEQILDLKADGVFLSNGPGDPATADGAVHLTKEVIGQGLPLFGICFGNQILGRALGLGTYKMKFGHRGINIPVVEHETGRIAITAQNHGFALEGEAGQEFDTPFGKAVISHTCANDGAVEGVRLLDGSAFSVQYHPEAAAGPHDAAYLFDRFTSLLEGVKN

SEQ ID NO: 95269 - DNA, 1155 bp, Trichodesmium erythraeum IMS101
  CDS (1)..(1155): transl_table=11
atgtcaatctcagctcaacctgctttactcgtcttagcagatggaacctcttactgtggcttatctttcggtgctcccggaaccaccataggagaagtagtatttaacacaggaatgactggttatcaagaagttctcacagacccaagttattgcgggcaaatagttacttttacctacccagagttgggaaacacaggagttaactctgaagatgaagagtccaacaaaccacagattcaaggtgcgatcgctcgaaatatttgtccacgtcctagtaactggcgttctactaagtccttaccagaatatctacaagagcataaaattcaaggaatttacggtgtagatacccgcgctttgactcggaaaattcggactgtaggagcaatgaatggagcaatttctacagaaattctcaatccaactgaattgctagaacaagttcagtttgctcctagcatggcaggattaaatttagttcagaaagtaacaactaaagaaacttatcaatggtctgaaccaacaaacccagactgggagtttaacctttctgtctctggtaatacaggagaaaaatttacagttgtggccattgactttggagtgaaaaaaaatatccttcgacgtttagctagttatggttgtcaagtcatagttgttcctgccgatacaccaccagaagaaattctcaagcataatcctgatggaattttcctttctaatggaccgggagacccttctgcagtgagggaaggtattgaaactactaaagagttgctaaaatcatctaaacctgtatttggtatttgcatgggacatcaggttctcggtctagccttgggagcagacacttttaagctaaaatttggtcatcggggtcttaatcaaccagcaggtttgcaacaacgagtagaaattactagtcaaaatcatggatttgccattaatgcagattctttagtggctgaattagaaattacccatctcaacttgaacgaccaaactgtagccggtctaaggcataaatctttacccttattctcagtacagtaccacccggaagcaagtcccggccctcatgacgctgattatttgtttgaacgtttcgttcaagcaatgaaagatactcgcaaagttaaagctttgagttga

SEQ ID NO: 95270 - protein, 384 aa, Trichodesmium erythraeum IMS101
MSISAQPALLVLADGTSYCGLSFGAPGTTIGEVVFNTGMTGYQEVLTDPSYCGQIVTFTYPELGNTGVNSEDEESNKPQIQGAIARNICPRPSNWRSTKSLPEYLQEHKIQGIYGVDTRALTRKIRTVGAMNGAISTEILNPTELLEQVQFAPSMAGLNLVQKVTTKETYQWSEPTNPDWEFNLSVSGNTGEKFTVVAIDFGVKKNILRRLASYGCQVIVVPADTPPEEILKHNPDGIFLSNGPGDPSAVREGIETTKELLKSSKPVFGICMGHQVLGLALGADTFKLKFGHRGLNQPAGLQQRVEITSQNHGFAINADSLVAELEITHLNLNDQTVAGLRHKSLPLFSVQYHPEASPGPHDADYLFERFVQAMKDTRKVKALS

SEQ ID NO: 95271 - DNA, 1140 bp, Synechococcus sp. CC9311
  CDS (1)..(1140): transl_table=11
atgaccgctcctaacccattcacagcgcgtctggttctgcaggacggcacagttctcgaaggttttgcctgcggtcagcgcggcagcgtgattggcgaggtggtgttcaacaccgggatgacgggataccaagaggttttgacggatcccagttactcaggccagctcattacctttacgtatccggaaataggcaatacgggtgttaacccagatgatcaagaggcggatcagcctcatgcccgtggattgatcgtgaggcagttggccccacaagcgagcaactggcgcagccaacaatctcttcctgaatggatggagcaaaacggtgtgatcggaattcacggtgtcgatacccgcgctctggtgaggcatctgcgcgagttgggccccatgaacggtgtgatcagcagcgatggtcgcccggcgcttgagcttttagaggaattgaagcaagccccttcgatggaggggctcaacctggctgatcaggtgacgacttccactgcatacagctggaccaagccttgcaatgtcacgtttgaccaacggtttcagacgagtcctgcacgcccttatcgagttgtagccattgatttcggaattaagcgagccatccttgaacgtctggtgagccatggctgtgacctaacggttttgcccgccaacaccgatatcaacaccgtgctttcccacgaaccagaaggtgtttttctgtccaacggacctggcgatccagcggctgtgcaatcaggcatcacactggccagcagcttgctggaacacaggcagctgccgatgtttgggatctgtctggggcatcaaattctgggattggccctcgggggcacaacgttcaagttggcgtatggccatcggggcctcaaccacccatgtggcagcacaggtcaggtggaaatcacaagtcaaaaccatggttttgctcttgacgcagcttcattgccttcagagaccgtagaaatcactcacttcaacttgaacgaccgcaccgtggcggcattggcccatcgaactcaaccggtgtttggcgttcaatatcaccctgaagcaagcccaggcccccatgatgccgaccatcatttcgcccgatttgctcgcttgatggctgatcgccgttga

SEQ ID NO: 95272 - protein, 379 aa, Synechococcus sp. CC9311
MTAPNPFTARLVLQDGTVLEGFACGQRGSVIGEVVFNTGMTGYQEVLTDPSYSGQLITFTYPEIGNTGVNPDDQEADQPHARGLIVRQLAPQASNWRSQQSLPEWMEQNGVIGIHGVDTRALVRHLRELGPMNGVISSDGRPALELLEELKQAPSMEGLNLADQVTTSTAYSWTKPCNVTFDQRFQTSPARPYRVVAIDFGIKRAILERLVSHGCDLTVLPANTDINTVLSHEPEGVFLSNGPGDPAAVQSGITLASSLLEHRQLPMFGICLGHQILGLALGGTTFKLAYGHRGLNHPCGSTGQVEITSQNHGFALDAASLPSETVEITHFNLNDRTVAALAHRTQPVFGVQYHPEASPGPHDADHHFARFARLMADRR

SEQ ID NO: 95273 - DNA, 1161 bp, Shewanella sp. MR-4
  CDS (1)..(1161): transl_table=11
atggaggtcgcgttgacaaagtctgccttactcgtactcgaagatggaaccgtattcactggcacagcgataggtgccgatggtctctctgttggtgaagttgtttttaacacttcgatgactggataccaagaaattttaactgatccctcttattcacgccagattgtaactttaacctacccccacattggtaatactggtaccaataatgaagacgtcgaatccaatggggttcatgcttgtggtttaatcattcgcgatcttccgcttatagcaagtagtttccgtaatcaacaaactctcagcgattatctcaaagcaaacaatgttgttggcatagcagatatcgatactcgtaaattaactcgaatcctccgtgaaaaaggtgcccaagcgggttgcatcatggcgggtgctgacttagatgaagccaaagcacttgctgctgctaaagccttcccgggtttaaagggcatggatttagcgaaagaagtgactaccgagacggcctatcaatggcgtaaaggtagttggcgtttggtgggcggtttgcctgaagacacgccagctgaagcgctgaagtacaaagtggttgcctatgactacggcgttaagcaaaacatcctgcgcatgttggttgaccgtggctgtgatgtcacagtggttcctgcaaaaacatcggctgctgaagtgttagcgatgaacccagacggtgtgttcctctctaacggccctggtgacccagagccatgtgattacgccatcgaagcgattcaacaaatcctgaaaaccgatacgccgatttttggtatctgtttaggccaccaattactggcattggcatcaggcgcgaaaaccttaaagatgaagtttggtcaccacggtgctaaccacccagtgagcaatatcgaaaaaggtaacgtgatgatcaccagccaaaaccacggttttgctgccgatgaagccacattacctgccaatatcaaagtgacccacaagtcactgttcgatggttcactgcaaggtatccatctgacggacaaacctgcgttcagcttccaaggtcaccctgaagcgagccctggtccgaacgatgcggccccactgttcgatcactttatcgagcttattgaacaataccgtcagaacgctaagtaa

SEQ ID NO: 95274 - protein, 386 aa, Shewanella sp. MR-4
MEVALTKSALLVLEDGTVFTGTAIGADGLSVGEVVFNTSMTGYQEILTDPSYSRQIVTLTYPHIGNTGTNNEDVESNGVHACGLIIRDLPLIASSFRNQQTLSDYLKANNVVGIADIDTRKLTRILREKGAQAGCIMAGADLDEAKALAAAKAFPGLKGMDLAKEVTTETAYQWRKGSWRLVGGLPEDTPAEALKYKVVAYDYGVKQNILRMLVDRGCDVTVVPAKTSAAEVLAMNPDGVFLSNGPGDPEPCDYAIEAIQQILKTDTPIFGICLGHQLLALASGAKTLKMKFGHHGANHPVSNIEKGNVMITSQNHGFAADEATLPANIKVTHKSLFDGSLQGIHLTDKPAFSFQGHPEASPGPNDAAPLFDHFIELIEQYRQNAK

SEQ ID NO: 95275 - DNA, 1161 bp, Shewanella sp. MR-7
  CDS (1)..(1161): transl_table=11
atggaggtcgcgttgacaaagtctgccttactcgtactcgaagatggaaccgtattcactggcacagcgataggtgccgatggtctctctgttggtgaagttgtttttaacacttcgatgactggataccaagagattttaactgatccctcttattcacgccagattgtaactttaacctacccccacattggtaatactggtaccaataatgaagacgtcgaatccaatggggttcatgcttgtggtttaatcattcgcgatcttccgcttatagcaagtagcttccgtaatcaacaaactctcagcgattatctcaaagcaaacaatgttgttggcatcgcagatatcgatactcgtaaattaactcgaatcctccgtgaaaaaggtgcccaagcgggttgcatcatggcgggtgctgacttagatgaagccaaagcacttgctgctgctaaagcttttcctggtttaaagggcatggatttagcgaaagaagtgactaccgagacggcctatcaatggcgtaaaggtagttggcgtttggtgggcggtttgcctgaagacacgccagctgaagcgcttaagtacaaagtggttgcctatgactacggcgttaagcaaaacatcctgcgcatgttggttgaccgtggctgtgatgtcacagtggttcctgcaaaaacatcggctgctgacgtgttagcgatgaacccagacggtgtgttcctctctaacggccctggtgacccagagccatgtgattacgccatcgaagcgattcaacaaatcctgaaaaccgatacgccgattttcggtatctgtttaggccaccaattactggcattggcatcaggcgcgaaaaccttaaagatgaagtttggtcaccacggtgctaaccacccagtgagcaatatcgaaaaaggtaacgtgatgatcaccagccaaaaccacggttttgctgccgatgaagccacattacctgccaatatcaaagtgactcacaagtcactgttcgatggttcactgcaaggtatccatctgacggacaaacctgcgttcagcttccaaggtcaccctgaagcgagccctggtccgaacgatgcggccccactgttcgatcactttatcgagcttattgaacaataccgtcagaacgctaagtaa

SEQ ID NO: 95276 - protein, 386 aa, Shewanella sp. MR-7
MEVALTKSALLVLEDGTVFTGTAIGADGLSVGEVVFNTSMTGYQEILTDPSYSRQIVTLTYPHIGNTGTNNEDVESNGVHACGLIIRDLPLIASSFRNQQTLSDYLKANNVVGIADIDTRKLTRILREKGAQAGCIMAGADLDEAKALAAAKAFPGLKGMDLAKEVTTETAYQWRKGSWRLVGGLPEDTPAEALKYKVVAYDYGVKQNILRMLVDRGCDVTVVPAKTSAADVLAMNPDGVFLSNGPGDPEPCDYAIEAIQQILKTDTPIFGICLGHQLLALASGAKTLKMKFGHHGANHPVSNIEKGNVMITSQNHGFAADEATLPANIKVTHKSLFDGSLQGIHLTDKPAFSFQGHPEASPGPNDAAPLFDHFIELIEQYRQNAK

SEQ ID NO: 95277 - DNA, 1161 bp, Alkalilimnicola ehrlichei MLHE-1
  CDS (1)..(1161): transl_table=11
ttgcgcgcgcaaccaggaggtctcttgagcacgcccgctattctcgtactggaggacggcacggtttttcgcggccggtccatcggggtggacggcctggtgaccggtgaggtggtgttcaataccgccatgaccggctatcaggagatcgccaccgatccttcctacacgcggcagatcgtcaccctgacctacccccatatcggtaacaccggcaccaatgaggtggatccggagagcagcggggcgcgcctggccgggctggtggtgcgcgacgtgcccccgcgcatgagcaactggcgggccaccggggacctctccggctggctcagcgagcagggcgtagtgggcatcgccggcatcgacacccggaagctcacccgtctgctgcgcgagcagggcagcaagaacgcctgcctgatggcgggcgaggtggacgaggacaaggcgctggccgccgcccgcgagttccccggcctgaagggcatggatctggccaccgatgccggcaccgaggtgccctacgaatggcgtcgcggcagctgggccctgggtatgggggtcagcgatgcgggcgaccagccggcggaccgcttccacgtcgtggcctgggactacgggatcaagcacaacatcctgcgcatgctggcggatcgcggctgccgggtgaccgtggtgccaccgcgcaccagcgccgacgaggtgctgggtatgaacccggacggggtctttctctccaacgggcccggcgatcccgagccgttggggtatgccattgaggcgatccgccaggtggtggaggccggtcgacccaccttcggcatctgcctgggccaccagttgctcggcctggccagcggtgcccgcaccgtgaagatgaagttcggtcaccacggggccaaccacccggtacaggacctggataccggccgggtgatgatctccagtcagaaccacggcttcgcggtggacgaggacagcctgccggacaacctccgggccacccaccggtcgctgttcgacggttcgttgcagggcgtggcccggaccgaccggccggccttcagcttccagggacacccggaggcgggccccgggccgcgggacgtgcaaccgctgttcgaccggttcattgacctgatggcggccgagggccgctga

SEQ ID NO: 95278 - protein, 386 aa, Alkalilimnicola ehrlichei MLHE-1
MRAQPGGLLSTPAILVLEDGTVFRGRSIGVDGLVTGEVVFNTAMTGYQEIATDPSYTRQIVTLTYPHIGNTGTNEVDPESSGARLAGLVVRDVPPRMSNWRATGDLSGWLSEQGVVGIAGIDTRKLTRLLREQGSKNACLMAGEVDEDKALAAAREFPGLKGMDLATDAGTEVPYEWRRGSWALGMGVSDAGDQPADRFHVVAWDYGIKHNILRMLADRGCRVTVVPPRTSADEVLGMNPDGVFLSNGPGDPEPLGYAIEAIRQVVEAGRPTFGICLGHQLLGLASGARTVKMKFGHHGANHPVQDLDTGRVMISSQNHGFAVDEDSLPDNLRATHRSLFDGSLQGVARTDRPAFSFQGHPEAGPGPRDVQPLFDRFIDLMAAEGR

SEQ ID NO: 95279 - DNA, 1161 bp, Hyphomonas neptunium ATCC 15444
  CDS (1)..(1161): transl_table=11
atggactcagccactggtgccttggcccttgaagatggtacgattttcgcgggtttcggggctggggctgccggtatcaaagtgggggagctctgcttcaacacggcgattaccggctatcaggaaatactgacagacccgtcttatgcgtcccagctggtgctgtttaccttcccgcatatcggaaatgtcggcgcaaatgccgaagatcacgaagaatccaccgttgaagcagccgacgccgcccgcggcgccatcttccgcgagccgatcaccgcgccctccaactggcgctcgaccgaagatttcggcgtctggctcgcccggcgcggcatcatcggcctctccggcatcgatacgcgcgcgctgaccaagcgcatccgcgaaaaaggcatgcccaaggccgccatctgccacaagccggacggaaagatcgactttgacgcgcttgtcgaactcgcccgcagctggaatggcctcgacggggcagaccttgccgatgtcgtcgaccaggacgcccctttcgagcataccgaaggtctctggcaggccgccaccggccaccagaccgcgctcgccaatgccgaattccacgtcgccgtcatcgatttcggcgtgaagaaaaatatcctgcgcaatctcgccagcgccggcgcccgcgccacggtcgtcaatggcaatgtcagcgctgaggaagtcctcgccctgaaacccgatggcatcgtcttcgccaacggccctggcgacccggccgccaccttcgagcgttccggcgaaatgatcaaaaccctcgtcgcctcgggcctgcccatcctcggcatctgccttggccaccagctccttggtctcgccctcggcgccaagaccaaaaagatggcgcagggccaccacggcgccaaccaccccgtcaaggacctcgccaccggcaaggtcgagatcgtctcgatgaaccacggcttcacggttgatcccgacacgcttccccctggcgtggaggagagccaccgctccctcttcgacggcacaaattccggcctcgcggtcaaaggcaaaccgatcatctcggtccagcaccaccccgaagcctcccccggcccgcaagacagcttctacctcttcacccgcttcgcgggcctgatgcgggactatcgcgcgaaataa

SEQ ID NO: 95280 - protein, 386 aa, Hyphomonas neptunium ATCC 15444
MDSATGALALEDGTIFAGFGAGAAGIKVGELCFNTAITGYQEILTDPSYASQLVLFTFPHIGNVGANAEDHEESTVEAADAARGAIFREPITAPSNWRSTEDFGVWLARRGIIGLSGIDTRALTKRIREKGMPKAAICHKPDGKIDFDALVELARSWNGLDGADLADVVDQDAPFEHTEGLWQAATGHQTALANAEFHVAVIDFGVKKNILRNLASAGARATVVNGNVSAEEVLALKPDGIVFANGPGDPAATFERSGEMIKTLVASGLPILGICLGHQLLGLALGAKTKKMAQGHHGANHPVKDLATGKVEIVSMNHGFTVDPDTLPPGVEESHRSLFDGTNSGLAVKGKPIISVQHHPEASPGPQDSFYLFTRFAGLMRDYRAK

SEQ ID NO: 95281 - DNA, 1254 bp, Rhizobium leguminosarum bv. viciae 3841
  CDS (1)..(1254): transl_table=11
atggcgacgagcgcgacaacgcgcccacctgccggaaacgggatgaagatgaccgcgacagcaccctggacaatcgaaaagccgaccgccctgctcgttcttgccgacggcacggtcatcgaaggcaagggcatcggcgccaccggcaaggtgccggccgaagtggtcttcaacacagcgctcaccggctacgaggagatcctgacggacccctcctatctcggccagatcgtcaccttcaccttcccgcatatcggcaatatcggcaccaatgatgaagacatcgaggatctgacgcctgccgcccgccacggcgccgtcggcgtcatcttcaaggccgacatcactgagccctcgaactaccgcgccgccaagcacctcgaccaatggctgaaggcccgcggcgtcatcggtctctgcggcatcgacacccgtgcactgaccgcctggatccgtgagaacggcgctccgaacgcggtgatcgcccacgatccgaacggcgtcttcgacatcgagacgctgaaggccgaagccaaagcctggagtggccttgaaggtctcgacctcgccaagatcgcctcgtcgggccagtcctcgcaatggaccgaaacgccgtgggtatggaatgaaggttacggtgaactcaaggcgacagacgcgaaataccacgtcgtctgcctcgattacggcgtcaagcgcaacatcctgcgcctgtttgccggcctcgactgcaaggtaaccgtcgtgccggccgcaacgagcgccgaagacgtgctcgccatgcagccggacggcatcttcctgtcgaacggcccgggcgatccggcggcaaccggcgactatgccgtgcctgtgatcaagacactgatcaagaccgatatcccggtcttcggcatctgcctcggccaccagatgctgggcctggcactcggtgcgaagaccgagaagatgcatcagggccatcacggcgccaaccaccccgtcaaggaccatacgaccggcaaggtcgagatcgtctcgatgaaccacggcttcgcggtcgactcgaagtcgctgccggatggcgttgaagagactcatatttcgcttttcgacggcaccaattgcggcctgcgcgtcctcggcaagcaggtcttctccgtccagcaccatccggaagcctctccaggcccgcaggacagccactacctcttccgccgcttcatcaacatggtgcgcgagaagaagggcgaaccggcgctcgccgaacgctga

SEQ ID NO: 95282 - protein, 417 aa, Rhizobium leguminosarum bv. viciae 3841
MATSATTRPPAGNGMKMTATAPWTIEKPTALLVLADGTVIEGKGIGATGKVPAEVVFNTALTGYEEILTDPSYLGQIVTFTFPHIGNIGTNDEDIEDLTPAARHGAVGVIFKADITEPSNYRAAKHLDQWLKARGVIGLCGIDTRALTAWIRENGAPNAVIAHDPNGVFDIETLKAEAKAWSGLEGLDLAKIASSGQSSQWTETPWVWNEGYGELKATDAKYHVVCLDYGVKRNILRLFAGLDCKVTVVPAATSAEDVLAMQPDGIFLSNGPGDPAATGDYAVPVIKTLIKTDIPVFGICLGHQMLGLALGAKTEKMHQGHHGANHPVKDHTTGKVEIVSMNHGFAVDSKSLPDGVEETHISLFDGTNCGLRVLGKQVFSVQHHPEASPGPQDSHYLFRRFINMVREKKGEPALAER

SEQ ID NO: 95283 - DNA, 1137 bp, Pseudomonas aeruginosa UCBPP-PA14
  CDS (1)..(1137): transl_table=11
ttgactaagccagccatacttgcacttgccgacggcagcatttttcgcggtgaagccatcggtgccgacggccagaccgttggcgaggtggtgttcaacaccgccatgaccggctaccaggaaatccttaccgatccttcctacgcccagcagatcgtcaccctgacctacccgcacatcggcaataccggtaccaccccggaagacgccgaggccaaccgcgtctgggccgccggcctgatcatccgcgacctgccgctgatcgccagcaactggcgcagcaagcagtcgctgcctgactacctgaaagccaacggcaccgtcgccatcgccggcatcgatacccgtcgcctgacccgcatcctccgcgagaagggttcgcagaacggctgcatcctggctggtgccgacgctaccgaggaacgcgcgctggagctggctcgcgccttccccggcctgaagggcatggacctggccaaggaggtcaccaccgccgagcgctacgagtggcgctccagcgtctggagcctggaaagcgacagtcatccggagatcccggccggtgaactgccgtatcacgtggtggcctacgactacggcgtgaagctgaacatcctacgcatgctggtggcgcgcggctgccgcctgaccgtggtgccggcgcagacaccggccagcgaagtgctggcgctgaaccctgacggcatcttcctttccaacggccccggcgaccccgaaccgtgcgactacgcgatccaggcgatccgcgaattcctcgataccgagatcccggtgttcggcatctgcctcggccatcagttgctggccctggcctctggcgccaagaccctgaagatgggccacgggcaccacggcgccaaccacccggtgcaggacctggacagcggcgtggtgatgatcaccagccagaaccacggtttcgcggtcgacgagagcaccctgccggacaacctgcgagccactcacaagtcgctgttcgacggtaccctgcagggtatcgagcgcaccgacaaggtcgctttcagcttccagggccaccccgaggcgagccccggtccgcatgacgtcgccccgctgttcgaccgcttcatctcggcgatggccgagcgtcgctga

SEQ ID NO: 95284 - protein, 378 aa, Pseudomonas aeruginosa UCBPP-PA14
MTKPAILALADGSIFRGEAIGADGQTVGEVVFNTAMTGYQEILTDPSYAQQIVTLTYPHIGNTGTTPEDAEANRVWAAGLIIRDLPLIASNWRSKQSLPDYLKANGTVAIAGIDTRRLTRILREKGSQNGCILAGADATEERALELARAFPGLKGMDLAKEVTTAERYEWRSSVWSLESDSHPEIPAGELPYHVVAYDYGVKLNILRMLVARGCRLTVVPAQTPASEVLALNPDGIFLSNGPGDPEPCDYAIQAIREFLDTEIPVFGICLGHQLLALASGAKTLKMGHGHHGANHPVQDLDSGVVMITSQNHGFAVDESTLPDNLRATHKSLFDGTLQGIERTDKVAFSFQGHPEASPGPHDVAPLFDRFISAMAERR

SEQ ID NO: 95285 - DNA, 1086 bp, Pediococcus pentosaceus ATCC 25745
  CDS (1)..(1086): transl_table=11
atgaaacgttatttaattttggaagacggtactacatatgaaggaaaggcgattggagccaatcgtgaaagtattggagagctagtttttaatactgggatgtcaggatatcaagaatcgattaccgaccaatcatataatgggcaaattttaatgtttacctatccgttaatcggaaattatggcgttaatcgagatgatttagaatccgttaagtcaagttgctttggagtagtagtccatgaggtggcacgtcgagcaagtaattggcaaatgaatatgagctttgaagagtttttagcatatcaagatttgcccggtattagtggagtggacacgcgagcaattactcgacatattcgcgaacatggagcgatgaaagcagccttagttaatgaaatttcagacgctaagtttgaaaaatttcatgcaactgatttgatacaaaatcaaattgaaattagctcaactcatagtccgtaccctaatccagccaacggtcgtaaagtcgtagtaattgattttggactcaagtattccatcctacgtgaacttgctcgtcgcgactgcaacgtaatggtacttccatataatgctacggcaaaagaagttttagcttgcaatccggatggggtgatgtttactaatggacctggtgatccggaatcaatggatgaaagtgttctagaaatgattcgcacagtggaggctgcggttccagtctttgggatttgtatgggacaccaactttttgccctagcaaatggtgctaagacaactaagatgaaatttggacatcgcggttttaaccatccagttcgcaacttagcaacgggacgaattgatttaacttcccaaaaccatggttatgcggtcgaacgtgcttccattgcaaacactgaccttgaaattacccacgaagaaattaatgacgaaaccgttgaaggactcagacataaacaatataaggctttttccgttcaattccatccagatgctgcaccgggtcctcatgatgcggactacctttttgatgattttatggaaatgattgatgaagctaaacaaacccaggaggacaagtaa

SEQ ID NO: 95286 - protein, 361 aa, Pediococcus pentosaceus ATCC 25745
MKRYLILEDGTTYEGKAIGANRESIGELVFNTGMSGYQESITDQSYNGQILMFTYPLIGNYGVNRDDLESVKSSCFGVVVHEVARRASNWQMNMSFEEFLAYQDLPGISGVDTRAITRHIREHGAMKAALVNEISDAKFEKFHATDLIQNQIEISSTHSPYPNPANGRKVVVIDFGLKYSILRELARRDCNVMVLPYNATAKEVLACNPDGVMFTNGPGDPESMDESVLEMIRTVEAAVPVFGICMGHQLFALANGAKTTKMKFGHRGFNHPVRNLATGRIDLTSQNHGYAVERASIANTDLEITHEEINDETVEGLRHKQYKAFSVQFHPDAAPGPHDADYLFDDFMEMIDEAKQTQEDK

SEQ ID NO: 95287 - DNA, 1092 bp, Oenococcus oeni PSU-1
  CDS (1)..(1092): transl_table=11
atggtcaaacgctaccttcttttggagaatggttcgatatattccggtcagggatttggttctcttaaaaaagccaaaggggaattggtttttaatacagggatggctggttatcaggagacgattaccgatccttcctatcatggtcagataattgtctttacttatccactaattggtaattatggaattaatcgtgatgattttgaaagtcttaatccaacggcctcggcgatcgtagttcatgaactagccaggcggccaagcaactggcgtatggatatgtctttaggccagtgggctgaaaatgttgggatgccgattatcagtgggatcgatacacgagctttgaccaaagagatcagagagttcggtgttatgaaggcttgtattattgatcaggtaaacgatagtagtttaaaggaattacaagccagtcgtttttcagaccaacaagttaaagaggttgccagtcggaccgcctaccagggcccttccaatggaccaacgatcgccgtgattgattttggtctgaagaattccattttgttttctttggcaaaacggcattgcaatgtaattgtttttccaccggacacctcggcaaaaattgttttaaatgccaatccggatggagtcttgctatccaacggaccagggaatcccgattcggtagcttatgctcttccattgattaaaagattgcaggaagcaaaaccactgtttggaatttgcttaggccaccagctttttgctctggccaatggagcttcaacttataagatgaaattcggtcatcgtggttttaatcatgcggttagatcgattgattccaaacgtttggattttacggcccaaaatcatggttatgccgttgatgaaaaatccctagcgaacaccgatctactggtcacttacagagaggtcaacgatcaaactattgaaggattgaagtcaactaaatatccggccttttcggttcagtttcatccggatgctgctcctggaccccacgatacagactatctttatgacgattttattcagttgattaacgaaaacaaagggagacaaaatgccaaaaagagctga

SEQ ID NO: 95288 - protein, 363 aa, Oenococcus oeni PSU-1
MVKRYLLLENGSIYSGQGFGSLKKAKGELVFNTGMAGYQETITDPSYHGQIIVFTYPLIGNYGINRDDFESLNPTASAIVVHELARRPSNWRMDMSLGQWAENVGMPIISGIDTRALTKEIREFGVMKACIIDQVNDSSLKELQASRFSDQQVKEVASRTAYQGPSNGPTIAVIDFGLKNSILFSLAKRHCNVIVFPPDTSAKIVLNANPDGVLLSNGPGNPDSVAYALPLIKRLQEAKPLFGICLGHQLFALANGASTYKMKFGHRGFNHAVRSIDSKRLDFTAQNHGYAVDEKSLANTDLLVTYREVNDQTIEGLKSTKYPAFSVQFHPDAAPGPHDTDYLYDDFIQLINENKGRQNAKKS

SEQ ID NO: 95289 - DNA, 1086 bp, Leuconostoc mesenteroides subsp. mesenteroides ATCC 8293
  CDS (1)..(1086): transl_table=11
atgaaaaaacgctacttattattagaaaatggatcagtatatgaaggggaagcttttggtgctgatgttgatatcatggccgagttagtttttaatactggtatgtccggatatcaagaatcaattacagatttatcataccgaggtgaaattattgtatttacttacccactaatcggtaattacggggttaatcgtgatgactttgaaagtttgcgaccagctgcatctgcgattgtggtgcacgaaatcgctcgacgaccaagcaattggcgcaaaacaatgagtttgcctgaatgggcagaaaaaactggaatgcccggtataacgggcattgatacgcgcgctttaacaaaagagttacgtaatcagggttccatgaaagcagcgcttgttgatgaaataactgacgaagtcgttgcgagactaaaagcgttcgaaacatcgaaaacaatggttgcagatgcaacaacaaagacacagtatcaaaacccaactgatggtgtatcaatcgcgctcattgattttggactgaaaaattcaattcttcgctcgcttgccaagcgcggtgttaacgtgatggtatttcctgctaatgtggacgcagaaacagtattggcagcgaaccctgacggtatcttattgtcgaatggacctggtgatcccaaagatgtaaaatatgccattccaacaattcagaagctacaaaagcatttaccgttaatgggcatttgcttgggacatcagctgttcgcaatcgccaatggtgcagaaacttacaaaatgaaattcggtcatcgtggttttaatcatgccgtgcgtacgatttccaaagcgagattagactttacgtcacaaaatcacggctacgcagtagaacgagcaagcttagagaaaacagatctagttgtgacacacgaggaaattaatgatcagactgttgaaggtgttcgtctaaaaggctacaatgctttctctgttcaattccacccagatgcagcacctggtccacacgatgctgaatatttatttgatgaatttttggatatgatagctgattcaaagaaggagactacaaatgcctaa

SEQ ID NO: 95290 - protein, 361 aa, Leuconostoc mesenteroides subsp. mesenteroides ATCC 8293
MKKRYLLLENGSVYEGEAFGADVDIMAELVFNTGMSGYQESITDLSYRGEIIVFTYPLIGNYGVNRDDFESLRPAASAIVVHEIARRPSNWRKTMSLPEWAEKTGMPGITGIDTRALTKELRNQGSMKAALVDEITDEVVARLKAFETSKTMVADATTKTQYQNPTDGVSIALIDFGLKNSILRSLAKRGVNVMVFPANVDAETVLAANPDGILLSNGPGDPKDVKYAIPTIQKLQKHLPLMGICLGHQLFAIANGAETYKMKFGHRGFNHAVRTISKARLDFTSQNHGYAVERASLEKTDLVVTHEEINDQTVEGVRLKGYNAFSVQFHPDAAPGPHDAEYLFDEFLDMIADSKKETTNA

SEQ ID NO: 95291 - DNA, 1128 bp, Solibacter usitatus Ellin6076
  CDS (1)..(1128): transl_table=11
ttgaacactgcaatcctcgccctggaagacggcagcgtcttcgagggccggagttttggtgcgcccacagagcggagcggggaagttgtcttcaataccgctctcaccggataccaggaagtctttaccgacccttcgtattccggccagattgtcatcctgaccaacccccaaatcgggaactacggcaccagttcgcgcgacaacgaatccaaggggccgtacatcgaagggctggttgtccgcgagttctcctcgatcgcgagcaactggcgatcggattcgtcggccgatcgctttctcgccaactccggagtcccgatcgtcagcgatctggatacgcgcgcgctggtgcgtcacctgcgcacccgcggtgtgatgcgcggcgtgctttccgccgtggaaagcgacgcgcagaagctggtcgaaaaagcacgcaacattccgaccatgaccggcctcgatctcgccagccgcgtgaccaccgccgagcgctacgagtggaccaagacggtggaacagtgctcgccctccgacctggtcggcaagaccgcggagccgctctataacgtggtggcctacgatttcggcatcaagcacaacattctgcgccgcctggtccacgcaggctgccgcgttaccgtggtccccgcgctcaccagcgccgaagatgtgctcgcgctgaaccccgacggcatcttcctctcgaacgggccgggcgaccccgaaccgctggttccgcaggtcaacaacattcgcaagctgattggaaagaagcccattttcggcatctgcctgggtaaccagctcctcgggctcgccatgggcggcaagacgtacaagctgaagttcggacatcgcggcgccaaccacccggtgcgcaacgaaatcaccaagcgcgtcgagatcacttcgcacaatcacggcttcgcggtggatcccgattcgctcaatctcaacgaagtggaaatcacccacgtgaacctgaacgatcagacgctcgaaggcttccgtcatcgcagccacccggtcttctgcgtgcaatatcacccggaggccgcgcccgggccgcacgattcgcactacctattcgacgatttcaccaggctcatgcgggaggcgaaataa

SEQ ID NO: 95292 - protein, 375 aa, Solibacter usitatus Ellin6076
MNTAILALEDGSVFEGRSFGAPTERSGEVVFNTALTGYQEVFTDPSYSGQIVILTNPQIGNYGTSSRDNESKGPYIEGLVVREFSSIASNWRSDSSADRFLANSGVPIVSDLDTRALVRHLRTRGVMRGVLSAVESDAQKLVEKARNIPTMTGLDLASRVTTAERYEWTKTVEQCSPSDLVGKTAEPLYNVVAYDFGIKHNILRRLVHAGCRVTVVPALTSAEDVLALNPDGIFLSNGPGDPEPLVPQVNNIRKLIGKKPIFGICLGNQLLGLAMGGKTYKLKFGHRGANHPVRNEITKRVEITSHNHGFAVDPDSLNLNEVEITHVNLNDQTLEGFRHRSHPVFCVQYHPEAAPGPHDSHYLFDDFTRLMREAK

SEQ ID NO: 95293 - DNA, 1134 bp, Magnetococcus sp. MC-1
  CDS (1)..(1134): transl_table=11
atgcagcaatccaatcaaggccgcgcggttttggttctagaagacggcacccgttttgatgggcgctcccttggtgcccaaactgaacaggtaggggaggtctgttttaacacctccatgaccgggtatcaggagattatgagcgatccctcctatgcgggacagatcgtcaccatgacctatacccaaattggtaatgtgggcatcaacccagaggatatggagtcccgacgcccctggattcgcggctttattgtcaaggaatccgcccgccgcttcagtagctggcgggctcaggagagtctgtcggtctttttaacccgccataatattcccgcgattgaaggcattgatacccgcgccttggtttcgcacctgcgggataaaggggccatgcgcggggtgctctctaccctggattttaataccgaaaacttgattgccaaagccaagagctttcccggattggcggggatggatcttaccggggaggtcagttgccaaacaccctacccttggcaacaggggctgtgggacttggaacagggctaccggcagatcgaaagcgggagcaaccgcaagcgggtaacggtgatggactttggggtcaagcacaacatcctgcgcggtttggtgcaggcgggttgtgaccttaccgtggtgcccaccgataccccagccgaaaaaatcctggcgggcaaccccgacggtattttcctctccaatggccccggcgaccctgatgctgtcaaacacggcgtgcgtaccatccgcgccttgttagagaccaaaatccccatctttggtatctgtctgggccaccaaatgctctgcttggccctgggtgcgcagaccttaaagatgaaatttggtcatcgtggtggtaaccatccggtgcaaaacctctccaccggtgtggtggaagtcaccagtcagaaccatggttttgtggtttcagatagcgcactgcccgacacgctggaggtaacccatcgctccctgtttgatggcagtgtggaaggggtgcgcatgaaggataagccggtcttctcggtgcagtatcaccccgaggccagccccggcccccacgatgcccactacctgttcaaacagttcgccgatctgatgcgctaa

SEQ ID NO: 95294 - protein, 377 aa, Magnetococcus sp. MC-1
MQQSNQGRAVLVLEDGTRFDGRSLGAQTEQVGEVCFNTSMTGYQEIMSDPSYAGQIVTMTYTQIGNVGINPEDMESRRPWIRGFIVKESARRFSSWRAQESLSVFLTRHNIPAIEGIDTRALVSHLRDKGAMRGVLSTLDFNTENLIAKAKSFPGLAGMDLTGEVSCQTPYPWQQGLWDLEQGYRQIESGSNRKRVTVMDFGVKHNILRGLVQAGCDLTVVPTDTPAEKILAGNPDGIFLSNGPGDPDAVKHGVRTIRALLETKIPIFGICLGHQMLCLALGAQTLKMKFGHRGGNHPVQNLSTGVVEVTSQNHGFVVSDSALPDTLEVTHRSLFDGSVEGVRMKDKPVFSVQYHPEASPGPHDAHYLFKQFADLMR

SEQ ID NO: 95295 - DNA, 1122 bp, Mycobacterium avium 104
  CDS (1)..(1122): transl_table=11
gtgagtggcaaggcgcaactggtgctcgaggacggccgcgtcttcaccggcacaccgttcggggcgatcggccaaaccctgggcgaggccgtgttttccaccggcatgtccggctaccaggagacgttgaccgaccccagctaccaccgccagatcgtggtggccaccgcgccgcagatcggcaataccggctggaacggcgaggacgccgagagccgcggcgacaagatctgggtggccggctacgcggtgcgcgacccgtcgccgcgcgtgtccaactggcgcgccaccggaagcctggaggacgagctgatccgccagcgcatcgtgggcatcgctcgcatcgacacccgcgcggtggtgcgccacctgcggacccgcggttcgatgaaggcgggggtgttctccggtgacgccctggccgatccggacgaactggtgcagcgggtgcgcggccagcagtccatgctgggcgccgacctggccggcgaggtcagcacgccggacgcctacatcgtggaacccgaagggccgccgcggtttaccgtcgccgccctggacctgggcatcaaaaccaacacgccgcgcaacttcgcccgtcgcggcatccgcagccacgtgctgccctcgtcggcgaccttcgagcagatcgccgacctcaggccggacggcgtgttcctgtccaacgggcccggcgaccccgccaccgccgaccacatcgtggcggtcacccgcgaggtgctgggcgccggaatcccattgttcggcatctgtttcggcaaccagatcctgggccgggcgctgggcctgtccacctacaagatggtgttcggtcaccgcggcatcaacatcccggtgatcgaccacgccaccgggcgggtggcggtgaccgcgcagaaccacggcttcgcgctgcagggcgaggccggccaggccttcgacacgccgttcggcgcggcggtggtcagccacacctgcgccaacgacggggtggtggagggcgtgaaactcgctgacggacgggcattttcggtgcagtaccacccggaggcggcggccggcccgcacgacgcgaactacctcttcgaccaattcatcgagctgatggaaggggaccgctag

SEQ ID NO: 95296 - protein, 373 aa, Mycobacterium avium 104
MSGKAQLVLEDGRVFTGTPFGAIGQTLGEAVFSTGMSGYQETLTDPSYHRQIVVATAPQIGNTGWNGEDAESRGDKIWVAGYAVRDPSPRVSNWRATGSLEDELIRQRIVGIARIDTRAVVRHLRTRGSMKAGVFSGDALADPDELVQRVRGQQSMLGADLAGEVSTPDAYIVEPEGPPRFTVAALDLGIKTNTPRNFARRGIRSHVLPSSATFEQIADLRPDGVFLSNGPGDPATADHIVAVTREVLGAGIPLFGICFGNQILGRALGLSTYKMVFGHRGINIPVIDHATGRVAVTAQNHGFALQGEAGQAFDTPFGAAVVSHTCANDGVVEGVKLADGRAFSVQYHPEAAAGPHDANYLFDQFIELMEGDR

SEQ ID NO: 95297 - DNA, 1149 bp, Mycobacterium smegmatis str. MC2 155
  CDS (1)..(1149): transl_table=11
atgacgcgcaatggaaagcggggcggcgagaaggccgtcctggtgcttgaggacggtcgcgtcttcaccggggtctcgttcggggcggtcgggcagacgctcggcgaggcggtgttctccaccggcatgtcgggctaccaggagacgctcaccgacccgagctactacgggcagatcgtggtggccaccgcgccgcagatcggcaacaccggctggaacgacgaggacggcgaaagccgcggcgacaagatctgggtcgcgggttacgcagtgcgtgacccctcgccgcgcgcgtcgaactggcgcgccacccgcaccctcgacgacgaactggtcgcccagggcatcgtcggcatcgcgggcatcgacacccgcgcggtggtgcggcacctgcgcacgcgtgggtcgatgaaggccggggtcttttcgggcgacgccctcgccgatgtcgacgcgctgctcgaacgcgtgcgcaaccagccgtccatgctgggcgcggatctggcgggcaaggtcacgaccggccagacctacgtcgtcgatcccgatggcgaccaccgcttcacggtcgcggccgtcgacctgggcatcaagaccaacacgccgcgcaacttcgcgcgccgcggtgtgcgcacgcacgtcctgcccgcgtcggcgacgttcgaccagatcgccgacttcaagcccgacggcgtgttcctgtccaacgggcctggcgacccggccaccgccgaccacatcgtcgaggtgacccgcgaggtgctgggcgccggaatcccgttgttcggcatctgcttcggcaaccagatcctgggccgcgcgctgggccggtccacctacaagatggtcttcgggcaccgcgggatcaacatcccggtggtcgaccacatcaccgggcgtgtcgcgatcaccgcgcagaaccacggcttcgcgctggaaggcgaggccggcgagaagttcgacacgccgttcggcaccgccgaggtcagccacacgtgcgccaacgacggtgtggtcgaaggtgtccgcctggtcaacggcaaggcgttctcggtgcagtaccaccccgaggccgcgggcggcccgcacgacgcggagtacctgttcgaccagttcatcgacctgatggcgggggagcaccactcgtga

SEQ ID NO: 95298 - protein, 382 aa, Mycobacterium smegmatis str. MC2 155
MTRNGKRGGEKAVLVLEDGRVFTGVSFGAVGQTLGEAVFSTGMSGYQETLTDPSYYGQIVVATAPQIGNTGWNDEDGESRGDKIWVAGYAVRDPSPRASNWRATRTLDDELVAQGIVGIAGIDTRAVVRHLRTRGSMKAGVFSGDALADVDALLERVRNQPSMLGADLAGKVTTGQTYVVDPDGDHRFTVAAVDLGIKTNTPRNFARRGVRTHVLPASATFDQIADFKPDGVFLSNGPGDPATADHIVEVTREVLGAGIPLFGICFGNQILGRALGRSTYKMVFGHRGINIPVVDHITGRVAITAQNHGFALEGEAGEKFDTPFGTAEVSHTCANDGVVEGVRLVNGKAFSVQYHPEAAGGPHDAEYLFDQFIDLMAGEHHS

SEQ ID NO: 95299 - DNA, 1137 bp, Nocardioides sp. JS614
  CDS (1)..(1137): transl_table=11
gtgacgagggcgatcctcgtcctggaggacggccgcagcttccagggcgagtcgtacggcgccgagggggagaccttcggcgaggcggtcttcaacaccggcatgaccggctaccaggagacgctgaccgacccgtcctaccaccgccaggtcgtggtgatgaccgcgccccacatcggcaacacgggcgtcaacgacgaggacccggagagccgccggatctgggtggcgggctacgtcgtccgcgaccccgcccggcgctcctcgagctggcgctcacggcgcacgctcgacgacgagctgcgcgagcagggggtcgtcggcatctccgacatcgacacccgcgcgctgacccggcacctgcgtgaacggggcgcgatgcgggtcgggatctcctcgacggagaccgacccggccgtgctcctcgagcgggtccgggcgtccgagccgatgagcggagccgagctcgcctcggaggtctccacgcaggaggcgtacgtcgtgccggcgatcggggagcggcgctacaccgtcgccgcgctcgacctcggcatcaagtcgatgaccccgcaccggatggccgagcgcggcatcgaggtgcacgtgctgcccgcgaccgcgagcctggcggacatcaacgcggtgtcgccggacgggctgttctactccaacggccccggcgacccggccgccacgacgcaccaggtcgacgtgctccagggagcgctcgcccaggggctgccgtacttcggcatctgcttcggcaaccagctgttcggtcgcgcgctcggcttcggcacctacaagctcaagtacggccaccgcggcatcaaccagccggtcatggaccgcacgaccgggaaggtcgaggtcaccgcgcacaaccacgggttcgcggtcgacgcgccgctgtcgggtagcaccaccacgccgtacggcgaggcctcggtcagccacgtctgcctcaacgacgacgtcgtcgagggtctcgagctgcgcgacggcgccggggcgctccgggccttctcggtccagtaccaccccgaggctgcggccgggccgcacgacgccgcctacctgttcgaccgtttcgtcgacctgatgtccggagaccaccactcgggagaggaggcctga

SEQ ID NO: 95300 - protein, 378 aa, Nocardioides sp. JS614
MTRAILVLEDGRSFQGESYGAEGETFGEAVFNTGMTGYQETLTDPSYHRQVVVMTAPHIGNTGVNDEDPESRRIWVAGYVVRDPARRSSSWRSRRTLDDELREQGVVGISDIDTRALTRHLRERGAMRVGISSTETDPAVLLERVRASEPMSGAELASEVSTQEAYVVPAIGERRYTVAALDLGIKSMTPHRMAERGIEVHVLPATASLADINAVSPDGLFYSNGPGDPAATTHQVDVLQGALAQGLPYFGICFGNQLFGRALGFGTYKLKYGHRGINQPVMDRTTGKVEVTAHNHGFAVDAPLSGSTTTPYGEASVSHVCLNDDVVEGLELRDGAGALRAFSVQYHPEAAAGPHDAAYLFDRFVDLMSGDHHSGEEA

SEQ ID NO: 95301 - DNA, 1143 bp, Azoarcus sp. BH72
  CDS (1)..(1143): transl_table=11
gtgactgctttcccgcccgcccttcttgcgcttgccgacgggaccgtcttctacggcaagggtatcggagcggtaggcagcacggttggcgaagttgttttcaatacctccatgtcgggctaccaggaaatcctgaccgacccgagctattgccgccagatcgtgacgcttacctatccgcacatcggcaacaccggcgtcaatcgcgaggacgtcgaggctgaccgtgtgcacgcggccgggctggtcattcgcgaccttcccatcctgccgtccaacttccgcatggatcagcgcctcgacgcctacctcaaggccgagaacgtcgtggcgattgccggtctcgatacccgcaagctcacgcgcatcctgcgcgagaagggtgcgcaggccggctgcatcgtcacggcggccgacggcgcgcagctcaatgccgaagcggcggtggccgaggcgcgcgcctttcccgggctggccggcatggacctcgcaaaggtcgtcagtgccaaggaggcttatccctggcaggaaggcgagtgggtgcttggtgaaggctatgtggcccaaaccgagccgcgtttccatgtcgtggcctacgatttcggcgtcaagcgcaacatcctgcgcatgctggcgcagcgcggttgccgtctgacggtggtgcccgcccagacgccggccaccgtcgtgctcgggctgaagccggacggcgtgttcctgtccaacggtcctggcgatccggagccctgcgattacgcgatcgaggcgatccgcgaaatcctcgccgcacgcgtgcccaccttcggcatctgtctcggccaccagttgctggcgcttgcctcgggcggacgtaccgtcaagatgaaggcggggcaccacggtgccaaccatccggtgaaggacgtcgatagcggtcaggtcctgatcaccagtcagaaccacggtttcgcggtcgatgtcgccaacctgccgtccagtctgcgcgtcacccacgtgtcgctgttcgacggctccaaccagggtatcgcccgtaccgacgtgccggccttctccttccaggggcacccggaggcgagccccggcccgcacgacgtcgcctacctgttcgaccgcttcatcggcttgatggaagcggccaagtaa

SEQ ID NO: 95302 - protein, 380 aa, Azoarcus sp. BH72
MTAFPPALLALADGTVFYGKGIGAVGSTVGEVVFNTSMSGYQEILTDPSYCRQIVTLTYPHIGNTGVNREDVEADRVHAAGLVIRDLPILPSNFRMDQRLDAYLKAENVVAIAGLDTRKLTRILREKGAQAGCIVTAADGAQLNAEAAVAEARAFPGLAGMDLAKVVSAKEAYPWQEGEWVLGEGYVAQTEPRFHVVAYDFGVKRNILRMLAQRGCRLTVVPAQTPATVVLGLKPDGVFLSNGPGDPEPCDYAIEAIREILAARVPTFGICLGHQLLALASGGRTVKMKAGHHGANHPVKDVDSGQVLITSQNHGFAVDVANLPSSLRVTHVSLFDGSNQGIARTDVPAFSFQGHPEASPGPHDVAYLFDRFIGLMEAAK

SEQ ID NO: 95303 - DNA, 1134 bp, Neisseria meningitidis FAM18
  CDS (1)..(1134): transl_table=11
atgagcacccccgccctcctcgtcctcgctgacggcagcgtattccacggcacatcaatcggttacgaaggttcgacttccggcgaagtcgtgttcaatacttcgatgaccggctatcaggaaatcctgaccgacccgtcctactgcaaacaaatcgttaccctcacctacccccacatcggcaacaccggcaccaacgccgaagatgaagaaagccgcagcgtttacgccgccggcctgattatccgcgacctgccgctcttgcacagcaacttccgtgcctccgaaagcctgcacgactatttggtacgcaacaaaaccgtcgccatcgccgacatcgacacccgccgcctgaccacgctgttgcgtgaaaaaggcgcgcaaggcggcgcgatcttgaccggcgcggatgctacggttgaaaaagcgcaagaactcatcgccgcgttcggcagtatggtcggcaaagacttggcaaaagaagtttcctgcacggaaacttacgaatggacggaaggcgaatgggaattgggcaagggtttcgttacccctgacgaacagccttaccacgtcgtcgcctacgatttcggcgtgaaaaccaacatcctgcgtatgctcgcctcgcgcggctgccgcctgaccgtcgtccccgcccaaacgagcgcacaagacgtgttggcactcaatcccgacggcgtgttcctgtccaacggccccggcgaccccgagccttgcacctacgccatcgaagccgtgcaaaaactgatggaaagcggcaaaccgattttcggcatctgcttgggacaccagctcatcagcctcgctatcggcgcgaaaaccctgaaaatgcgcttcagccaccacggtgcgaaccaccctgtgcaagatttggacagcggcaaagtcgtcatcaccagccaaaaccacggttttgccgttgatgccgacaccctgcccgctaacgcacgcattacccacaaatccttgtttgacaacactttgcaaggcatcgagctgaccgacaaacctgtgttctgcttccaaggccaccccgaagccagccccggtccgcaagatgtcggctatttgtttgacaaattcattggcaatatgaaagcggcaaaacgggcataa

SEQ ID NO: 95304 - protein, 377 aa, Neisseria meningitidis FAM18
MSTPALLVLADGSVFHGTSIGYEGSTSGEVVFNTSMTGYQEILTDPSYCKQIVTLTYPHIGNTGTNAEDEESRSVYAAGLIIRDLPLLHSNFRASESLHDYLVRNKTVAIADIDTRRLTTLLREKGAQGGAILTGADATVEKAQELIAAFGSMVGKDLAKEVSCTETYEWTEGEWELGKGFVTPDEQPYHVVAYDFGVKTNILRMLASRGCRLTVVPAQTSAQDVLALNPDGVFLSNGPGDPEPCTYAIEAVQKLMESGKPIFGICLGHQLISLAIGAKTLKMRFSHHGANHPVQDLDSGKVVITSQNHGFAVDADTLPANARITHKSLFDNTLQGIELTDKPVFCFQGHPEASPGPQDVGYLFDKFIGNMKAAKRA

SEQ ID NO: 95305 - DNA, 1173 bp, Acidovorax sp. JS42
  CDS (1)..(1173): transl_table=11
gtgcttttgtctctcaagggaaccttcccgcccgccatcctggcgctcgcagacggcacggtctttatcggtaactcgatcggtgccgccggcaccacggtcggcgaagtggtcttcaataccgccatcaccggctaccaggaaattctcacggaccccagctactgccagcagatcgtcaccctgacgtatccgcacatcggcaactacggcgtcaacgcagaggatatcgaggctgaaaaagtccacgccgcaggcctcatcatcaaggacctgccgctgctggccagcaacttccgcatgaccgagacgctgcccgagtacctcgtgcgtgccaagacggtggccatcgccaacatcgacacccgtaaactgacccgcctgctgcgcacccagggcgcgcaaaatggcgccatcgtcggcttggcggctggcgaggccgtgacccaggcgcgcatcgacgaagccgtggccgcggcgaaggcggcgcccaacatgaacgggctggatctggccaaggtcgtgaccacgcgtgccgcgtacgcctgggaccagactgagtggaagctgggcgaaggctacggcacgcagacggccccgcgctttcacgtcgtggcctatgactatggcgtgaagctgaacatcctgcgcatgctggccgaacgcggctgcaggctcaccgtggtgcccgcgcagaccccggcggcagaggtgctggccatgaatcccgatggcgtgttcctgtccaacggcccgggcgacccggcggcctgcgactacgcgatcacggcagtcaagcagatcatcgacagcggcgtacctaccttcggcatctgcctgggccaccagatcatggcgctggccagtggcgccaggactttcaagatggacaacagccaccatggcgcaaaccaccctgtgaaggacttggacagcggccgggtaagcatcaccagccagaaccacggtttcgcggtggacatggcatcgctgccggccaccttgcgcgccacgcacatcagcctgttcgacggcacgctgcagggcctggaacacaaggacaagccggccttctgcttccaggggcaccccgaggcgtcacccggtccgcacgacattgcctacctgttcgaccgcttcaccactctgatgcaggccgccaaggcccagtaa

SEQ ID NO: 95306 - protein, 390 aa, Acidovorax sp. JS42
MLLSLKGTFPPAILALADGTVFIGNSIGAAGTTVGEVVFNTAITGYQEILTDPSYCQQIVTLTYPHIGNYGVNAEDIEAEKVHAAGLIIKDLPLLASNFRMTETLPEYLVRAKTVAIANIDTRKLTRLLRTQGAQNGAIVGLAAGEAVTQARIDEAVAAAKAAPNMNGLDLAKVVTTRAAYAWDQTEWKLGEGYGTQTAPRFHVVAYDYGVKLNILRMLAERGCRLTVVPAQTPAAEVLAMNPDGVFLSNGPGDPAACDYAITAVKQIIDSGVPTFGICLGHQIMALASGARTFKMDNSHHGANHPVKDLDSGRVSITSQNHGFAVDMASLPATLRATHISLFDGTLQGLEHKDKPAFCFQGHPEASPGPHDIAYLFDRFTTLMQAAKAQ

SEQ ID NO: 95307 - DNA, 1239 bp, Magnetospirillum magnetotacticum MS-1
  CDS (1)..(1239): transl_table=11
atgctgcaagacgaacccgcgaccctgcgcgccgatcctgcgcgtaccaacccggaaccctggagcgaaccgctcgtcacggctcttctcgtgctcgccgacggcaccgtgctcgaaggctacggcatcggccagaccggcctcgccgacggcgaggtttgtttcaacacggcgatgacgggctatcaggagatcctgaccgatccgtcctatgccgggcagatcgtcaccttcaccttcccgcatatcggcaatgtcggcaccaacgacgaggatctcgagagcctcgaggcggccccggcctccggcgtgcgcggggcggtgatcgcctcggcggtgaccaagccctcgaactggcgctcctcctcgcatctcgacggctggctgaaggcccgcggcatcgtcggcatcaccggcatcgacacgcgggcgctgacggcgctgattcgcgacaacggcatgccgaacgcggtgatcgccaacgacccgcagggccaattcgaccgcgaggcgctcaagaagcgcgcggcggcgctcgcgccgatggagggcctcgacctcgtgcccccggtgacctcccgcgaaaccaccgcctggaccgagaccgtctgggcggtgaagggcggctacggctcccgggcgccgggccaggacctcaaggtggtcgccatcgattacggcgtgaagcgcaacatcctgcgcctcctggccgaggccggctgcgacgtcaccgtggtgcccgccaccaccaaggccgaggacatcctggcgatgaagccggacggcgtgttcctctccaacggtcccggcgatccggcggcgaccggcgaatatgccgtgccggtgatccgcaggctcctggacgagaaggtgccgaccttcggcatctgcctcggccaccagctcatgggcctcgccctcggcgggcgcacggtgaagatgggccagggccatcacggcgcgaaccatccggtgaaggaccacaccaccggcaaggtcgagatcgtctcgatgaatcacggcttcgccgtcgatccgcagagcctgcccgagacggcggtcgaaacccacgtctcgctgttcgacggctcgaattgcggcctgtcgctcaccgaccgtccggccttctcggtgcagcaccacccggaggcctcgccgggcccgcgcgacagccattacctgttcgagcgcttcgtgaagctgatgcgcgagaaccggccggagaccgtgcggtcgtaa

SEQ ID NO: 95308 - protein, 412 aa, Magnetospirillum magnetotacticum MS-1
MLQDEPATLRADPARTNPEPWSEPLVTALLVLADGTVLEGYGIGQTGLADGEVCFNTAMTGYQEILTDPSYAGQIVTFTFPHIGNVGTNDEDLESLEAAPASGVRGAVIASAVTKPSNWRSSSHLDGWLKARGIVGITGIDTRALTALIRDNGMPNAVIANDPQGQFDREALKKRAAALAPMEGLDLVPPVTSRETTAWTETVWAVKGGYGSRAPGQDLKVVAIDYGVKRNILRLLAEAGCDVTVVPATTKAEDILAMKPDGVFLSNGPGDPAATGEYAVPVIRRLLDEKVPTFGICLGHQLMGLALGGRTVKMGQGHHGANHPVKDHTTGKVEIVSMNHGFAVDPQSLPETAVETHVSLFDGSNCGLSLTDRPAFSVQHHPEASPGPRDSHYLFERFVKLMRENRPETVRS

SEQ ID NO: 95309 - DNA, 1206 bp, Magnetospirillum magnetotacticum MS-1
  CDS (1)..(1206): transl_table=11
atgccgaaccaaaacgggaccgcaccgaagcccagcagccaggtgccgacctttgacgcgccgcgccccccgggcgcgaccggggctctggtcctggccgacggcaccgtgctgtggggcaaggggatcggggctgcgggctccaatgtgggcgaagtggtgttcaccaccggcatgaccggatatcaggagacgctcaccgatccgtccttcgccggtcaggtcatcaccttcaccttcccccatgtgggcaatgtgggcaccaataccgaggatctggagaccaccactgcggccgcgcgcggcctgatcttgcgggccgacatcaccgaccccgccaactggcgctcggccaagcatctggattcctggctgaagtccaacaacatcgtgggcctgtgcggcatcgacacccgcgcgctcacccggcgcatccgcacgaagggcgcgcccaacggcgtcatcgtcaatgcccccgacggcgaattcgatctgcccggcctgtgggccaaggccgcgggctggccgggcctggaaggcatggatctggcgctggacgtcacctgtgcccagtcctattcctgggacgagaccgagtggcgcttgcgcggcggctatggtcgtcaggacaagccccgctttcacgtcgtcgccatcgacttcggcgccaagcgcaatatcctgcgctgtctggccgagaccggctgcaaggtcaccgtgctgcctgccgaagccactgccgagcaggtgctggcactcaaccccgatggcgtgttcctgtccaacggccccggcgatccggcggccactggcaaatacgccgttcccatgatccagggcgtcatcaagtcgggcaagccgctgttcggcatctgtctcggccatcagatgctgggcctggccctgggcgccaagaccttcaagatggacaccggccaccgcggcgccaaccacccggtcaaggacctggaaaccggcaaggtggagatcaccagccagaatcacggcttcgtggtggacgagaagagccttccggctggcgtcaaggtcacccaccgctcgctgttcgacggctcggtggaaggcatcgcgctggagggtaagccggtcttctccgtccaataccaccctgaggccagccccggcccccaggacgcccattacctgttcgagcgcttcgtgggcttgatggagaagcggggctaa

SEQ ID NO: 95310 - protein, 401 aa, Magnetospirillum magnetotacticum MS-1
MPNQNGTAPKPSSQVPTFDAPRPPGATGALVLADGTVLWGKGIGAAGSNVGEVVFTTGMTGYQETLTDPSFAGQVITFTFPHVGNVGTNTEDLETTTAAARGLILRADITDPANWRSAKHLDSWLKSNNIVGLCGIDTRALTRRIRTKGAPNGVIVNAPDGEFDLPGLWAKAAGWPGLEGMDLALDVTCAQSYSWDETEWRLRGGYGRQDKPRFHVVAIDFGAKRNILRCLAETGCKVTVLPAEATAEQVLALNPDGVFLSNGPGDPAATGKYAVPMIQGVIKSGKPLFGICLGHQMLGLALGAKTFKMDTGHRGANHPVKDLETGKVEITSQNHGFVVDEKSLPAGVKVTHRSLFDGSVEGIALEGKPVFSVQYHPEASPGPQDAHYLFERFVGLMEKRG

SEQ ID NO: 95311 - DNA, 1092 bp, Listeria monocytogenes str. 4b H7858
  CDS (1)..(1092): transl_table=11
atgacaaagcgaattttaatgctagaagatggcaattattttatcggtgatgcgattggtagtgaaaaagaaaccattggtgaagttgtcttcaatactggaatgactggctaccaagaaacaatcactgacccttcgtactatggtcaaattattacttttacgtatccacttgttggaaattacggtgtgaaccgcgacgattttgaatctatcaatcctgctgtgaaaggggttgtggttcgtgaagctgcagaattcccttccaactggcgcaatcaaattactttagatgattttttgaaagaaaaaggcatcccgggaatcgcgggaattgatacgcgtaaactaacgaaactaattcgtaaagaaggaacgttaaaaggcattttagcagcagaaactgcaaacaaagaggaattgctacaccacttgcgctctgtacgtttgccagtcgatcaagtacatgaagtttcctctgctaaagcatttgcaagcccaggagatggtaaacgagtggtgcttgttgattatggtgtgaaaagttcaattttacgggaactgaataaacgtaactgttacgtgacggttgttccttacaacacaacagccgaagaaattcttgcaatgcatccggatggcgtgatgttatccaatggacctggggatccgaaagatgtgccagaagcattagaaatgatacgcggcattcaaggcaagctcccactattcggaatttgcttagggcaccaactgtttgcacttgcgaacggagcagatacatttaaactgaaattcgggcatcgtggcgcgaatcatccggtgaaagaactagccactggacgtgttgatttcactgcacaaaaccacggttacgcagtagaaaaagattcacttattggaacagatttaaaagtaacacacattgaattaaatgatgaaacggtagaagggctggcacataaagaatatccagcctatacagtacaatatcacccagaagcaaacccaggaccaagtgacgtcaactacttatttgatgaatttatggaaatgatgaatgggaaagaggagggtgaactacatgcctaa

SEQ ID NO: 95312 - protein, 363 aa, Listeria monocytogenes str. 4b H7858
MTKRILMLEDGNYFIGDAIGSEKETIGEVVFNTGMTGYQETITDPSYYGQIITFTYPLVGNYGVNRDDFESINPAVKGVVVREAAEFPSNWRNQITLDDFLKEKGIPGIAGIDTRKLTKLIRKEGTLKGILAAETANKEELLHHLRSVRLPVDQVHEVSSAKAFASPGDGKRVVLVDYGVKSSILRELNKRNCYVTVVPYNTTAEEILAMHPDGVMLSNGPGDPKDVPEALEMIRGIQGKLPLFGICLGHQLFALANGADTFKLKFGHRGANHPVKELATGRVDFTAQNHGYAVEKDSLIGTDLKVTHIELNDETVEGLAHKEYPAYTVQYHPEANPGPSDVNYLFDEFMEMMNGKEEGELHA

SEQ ID NO: 95313 - DNA, 1098 bp, Bacillus cereus G9241
  CDS (1)..(1098): transl_table=11
atgaaaagacaacttatcttagaagatggaacagtattaattggaacaggtttcggaggagaaattgaaaagtcaggtgaggttgtatttacaacaggaatgactggatatcaagaaacattatctgatccatcatattgcggtcaaatcgtgacattcacgtacccattaatcggaaactacggcatcaaccgtgacgattttgaatcaattcatccttctgtaaatggtttaatcgtaaacgaaatttgtgatcatccatcaaacttccgtaatgaaatttcgttaaatgactacttaaaagaaagaaacatcccaggattagcagggattgatacgagaaaattaacgagaaaaattcgtcaatacggtacattacgcggacgcctttgtaacatggacgcagatgtagaatacatcgtgagccaattaaaagcgacagtatttacagatcatgtaaaacgcgtatcaacgaaagacccatacccaagcccaggccgcggacatcgcgttgtacttgtagacttcggtatgaaacatggtattttaagagaattaaataaacgtgattgtgatgtaattgtagttccttacaacacgacagctgaagaaattttacgccttagcccagatggaattatgttaagtaacggacctggggatccaaaagatgtaccagaagcaattgaaatgttaaaagacattatcggtaaagttcctttattcggaatttgcctaggacatcaattgttcgcgctagcatctggtgcgaatacaagtaaattgaaattcggtcaccgtggtttaaaccatccagtaaaacatcttgcaactggaaaagtagcaattacatctcaaaaccatggttacgcagtagaagaagagtcagttaaaaatacagaacttgaaattacacatgttgctttaaatgatggaacagtagaaggtcttcgtcataagaagttcccagcatttacagtacaataccatccagaagcttctgcaggaccagaagatgcaaacgatttattcgaagatttcttagcaatgattgaaaacttcaagaaagaaggggaagagttatgccaaaacgcctag

SEQ ID NO: 95314 - protein, 365 aa, Bacillus cereus G9241
MKRQLILEDGTVLIGTGFGGEIEKSGEVVFTTGMTGYQETLSDPSYCGQIVTFTYPLIGNYGINRDDFESIHPSVNGLIVNEICDHPSNFRNEISLNDYLKERNIPGLAGIDTRKLTRKIRQYGTLRGRLCNMDADVEYIVSQLKATVFTDHVKRVSTKDPYPSPGRGHRVVLVDFGMKHGILRELNKRDCDVIVVPYNTTAEEILRLSPDGIMLSNGPGDPKDVPEAIEMLKDIIGKVPLFGICLGHQLFALASGANTSKLKFGHRGLNHPVKHLATGKVAITSQNHGYAVEEESVKNTELEITHVALNDGTVEGLRHKKFPAFTVQYHPEASAGPEDANDLFEDFLAMIENFKKEGEELCQNA

SEQ ID NO: 95315 - DNA, 1146 bp, Burkholderia vietnamiensis G4
  CDS (1)..(1146): transl_table=11
gtgttgccgtctttttcccccgccttgcttgcactcgccgacggcacggtctttcgtggttattcgatcggggccgaaggccatacgatcggtgaagtcgtgttcaacaccgcgattaccggctatcaggaaatcctgactgatccgagttacgcgcgccagatcgtcacgctcacctacccgcatatcggcaacgtcggtgtcaacgccgaagacgtcgaagccacgaaagtccatgccgccgggctgatcatccgcgatctgccgacgctcgcctcgaacttccgcaaggagcgcacgctcggcgattacctgcgcgacgaaggcgtcgtcgcaatcgccggcatcgatacgcgcaagctgacgcgcatcctgcgcgacaagggcgcgcagaacggctgcatcctcgccggctcggacgacgaagcaaaggccgtcgaactcgcgcgctcgttccccggcctggccggcatggacctcgcgaaggtcgtgtcgaccgccaagccgttcgaatggaagcagaccgaatggcgtctcggcagcggctacggcatgcagcaggcgccgaagtaccgcgtggtcgcctatgacttcggcgtcaagtacaacatcctgcgcatgctcgccgagcgcggctgccacgtgacggtgctgccggcccaggcgagcgccgccgacgcactcgcgctgaatccggacggcatcttcctgtcgaacggccccggcgatccggagccgtgcgactacgcgatcgcggcggccagggaattcatcgagcgcggcgtgccgaccttcggcatctgcctcggccatcagatcatgggcctcgcggtcggcgcgaagacgctgaagatgaagacgggccaccacggcgcgaaccacccggtgaaggatctcggcgacggtcgcgtggtgatcacgtcgcagaaccacggcttcgcggtcgatgcggattcgctgcccgcgaacgcgcgcgtgacccacgtgtcgctgttcgacggcacgctgcagggcttcgagctgaccgacaagccggcgttctgcttccagggccacccggaagcgtcgcccggcccgcacgacatcgcgtacctgttcgaccgtttcaccgcactgatggacgcggcgaagcagcgcagcgcctga

SEQ ID NO: 95316 - protein, 381 aa, Burkholderia vietnamiensis G4
MLPSFSPALLALADGTVFRGYSIGAEGHTIGEVVFNTAITGYQEILTDPSYARQIVTLTYPHIGNVGVNAEDVEATKVHAAGLIIRDLPTLASNFRKERTLGDYLRDEGVVAIAGIDTRKLTRILRDKGAQNGCILAGSDDEAKAVELARSFPGLAGMDLAKVVSTAKPFEWKQTEWRLGSGYGMQQAPKYRVVAYDFGVKYNILRMLAERGCHVTVLPAQASAADALALNPDGIFLSNGPGDPEPCDYAIAAAREFIERGVPTFGICLGHQIMGLAVGAKTLKMKTGHHGANHPVKDLGDGRVVITSQNHGFAVDADSLPANARVTHVSLFDGTLQGFELTDKPAFCFQGHPEASPGPHDIAYLFDRFTALMDAAKQRSA

SEQ ID NO: 95317 - DNA, 1152 bp, Crocosphaera watsonii WH 8501
  CDS (1)..(1152): transl_table=11
atgattatggcaatggcaaagggtcaacccgctttattagtgttagctgacggaacaacttttgaagggttatccttcggtgcgaaaggaacaacggtgggagaggtagtatttaacacaggaatgacaggatatcaagaagttttgacagatcccagttattgtggccagattgtgacctttacctatcctgagttgggtaatacaggggttaaccccgatgatgaagaatctgaaaaaccccaggttaaaggggtgatcgctcgtaacataacttatcgtcctagtaattggcgatcgactgaatctttacctgactatttaattcgtcataatattatcggtatttatggcatcgataccagggcattaacccgtaaaattcgttctgtgggggcgataaatgggattatctctacagaaaccttggacaaaggcgaactcttgcgtcaagtccaatcagccccttctatggcaggattaaatctggttaaggaagtcacaaccagggaaatctatgaatggtcaacccccacggatagtcattggaactttaatactaacaacggtgagacttctcaagaaggtttaacggtagtggccattgattttggggtcaagcgcaacattttacgacgcttagctagttatggctgcaaaattattgtggttcctgctgatactcctcctgaagacattttaaagtacaaccctgatggtattttcttatccaatggtccgggagatccttctgccgtaacagaaggggtgagtacggttaaagctttaattgaacaaggaaaacccacctttggcatttgtatgggacaccaaattttagggctatctttgggagcggaaacctttaagttaaagtttggccatcgaggtttaaatcaaccctgtgggctaaaagaaaaggtggaaattaccagtcaaaatcatggttttgcggtaacggaaaagtccttagatgcagaggtggaaattacccatcttaatctcaacgatcgcacagtggctggtttatcccataaaaatttacctttcttctccgtacaataccatcccgaagctagtcccggtccccacgatgcagactatttatttgagaagtttgttaatttgatgaaggaaaataaggggcaataa

SEQ ID NO: 95318 - protein, 383 aa, Crocosphaera watsonii WH 8501
MIMAMAKGQPALLVLADGTTFEGLSFGAKGTTVGEVVFNTGMTGYQEVLTDPSYCGQIVTFTYPELGNTGVNPDDEESEKPQVKGVIARNITYRPSNWRSTESLPDYLIRHNIIGIYGIDTRALTRKIRSVGAINGIISTETLDKGELLRQVQSAPSMAGLNLVKEVTTREIYEWSTPTDSHWNFNTNNGETSQEGLTVVAIDFGVKRNILRRLASYGCKIIVVPADTPPEDILKYNPDGIFLSNGPGDPSAVTEGVSTVKALIEQGKPTFGICMGHQILGLSLGAETFKLKFGHRGLNQPCGLKEKVEITSQNHGFAVTEKSLDAEVEITHLNLNDRTVAGLSHKNLPFFSVQYHPEASPGPHDADYLFEKFVNLMKENKGQ

SEQ ID NO: 95319 - DNA, 1056 bp, Exiguobacterium sibiricum 255-15
  CDS (1)..(1056): transl_table=11
gtgaaaggaacaggggcattaacattagcggatggacatgtatatccaggtgaattgattggttcctcgtccgttcaaggagaagttgtatttttcacgggaatgaccggttatcaagaagtattgaccgatccttcctaccggggacaaatcatcgtttttacctacccgctcattggacaatacggaatttcagaacaggattcagaaagccgtcagattcaagtatccggtgtagtcgttcagaccttagcgaacaacggattacggtcagacttggcggattggttggcagcatcggatatcccagttttaacacaagtcgatacacgggcattggtccatcatttacgcaatcagggggatcagatcggtatcctcacatgcgggacatcatctgttcaggaacagtcgaacttgattgccaccgtctcgatcaaacagccggaggtttatccaaccgattacgaggccggacatatcgtgtgtctcgattacggggtgaaaaaatcgatgattgaagccttgcaggagcgtcagatgaaagtgacggtcgtgccgttcgatacaccgaaaacagtcatcgatgaattaaagcctgacgggttacttttttcgaatggacccggagatccgagccaactcgatcacttgattccagaaatcaataaactggcacttgcctatccgacgcttggcatctgcatggggcatcaactgattgccaaggccttcggatgtcgaatcgaaaagcaacaccatggtcaccgtggggcaaatcatccggtccgtcagttgaaaaccggacgtgtcttcatgacatcacaaaatcatggttatgtcgttcaagcggacagcgtgcaaaattctgaactgaacgtcgcttatgaacatatcaatgacggctcgattgaaggactgcttcatccgacgcatcctattttgacggttcagtttcacccggaagctcatcccggtccactggaagcgatggtgatatttgatcaattcgtagcgggcatcttaaagcaggaggtagcatatgcaggaagttaa

SEQ ID NO: 95320 - protein, 351 aa, Exiguobacterium sibiricum 255-15
MKGTGALTLADGHVYPGELIGSSSVQGEVVFFTGMTGYQEVLTDPSYRGQIIVFTYPLIGQYGISEQDSESRQIQVSGVVVQTLANNGLRSDLADWLAASDIPVLTQVDTRALVHHLRNQGDQIGILTCGTSSVQEQSNLIATVSIKQPEVYPTDYEAGHIVCLDYGVKKSMIEALQERQMKVTVVPFDTPKTVIDELKPDGLLFSNGPGDPSQLDHLIPEINKLALAYPTLGICMGHQLIAKAFGCRIEKQHHGHRGANHPVRQLKTGRVFMTSQNHGYVVQADSVQNSELNVAYEHINDGSIEGLLHPTHPILTVQFHPEAHPGPLEAMVIFDQFVAGILKQEVAYAGS

SEQ ID NO: 95321 - DNA, 1089 bp, Exiguobacterium sibiricum 255-15
  CDS (1)..(1089): transl_table=11
atgtctaaacggacgttgattttagaggatggaatggtatttgaaggagaagcgtttggttcaagcgaggtgacgatgggagaggtggtcttccagaccgggatgaccggataccaggagatgttatccgatccgtcttactgcgatcaaatgattgtgttaacgaatccgttgatcggcaactatggaatgaaccgcgacgactatgaaacgacccgaccgcttgcgaaagcactgattgtccgggaagtctgtcatacgccatcgaacttccgctcgcagacatctcttgcgacggctttggaagaattcaacattcccggcttaaccggcatcgatacgcggcaattgacgcggcatctgcggtcaaagggtgttatgcggggactgctcgttgacggtacgtacgatttgaccgagcaactggagcggctcaagcaaatggcgcttgcgaccgatcaggtcaaacgggcttcgacggaacgggcctatgtcattccgggtgccggtccgagaatcgtcctggtcgatttcggcgcgaaactgggcattatccgcgagctcgtccgacgcggctgtgaagtcgtcgtcgtcccgcacgacgtgacggcaaaagacgtcttgcgttacatgccggacggtgtcatgttatcaaacggtcccgggaatccaaaagatgttccgaccgccattcccttgattcaggaactgacgggacaagttgtcatcttcggcatctgtctcggtcatcaactgattgccttagcacatggcgcagacacatttaagctgccgttcggtcaccggggagcgaatcatccggtcgaagatcttcggacgggacaagtcagcatcacctcacaaaatcatgggtatgccgtggaggaccagtcgcttgccggattgaatctcaagctgacgcaccgggcgatcaatgatggaaccgtcgaaggaatccgccatacgacacatcccgtcttttcggtccaatatcatccagaagcttctcccggaccgatggatgccaacgatttattcgatcagtttttaacagaaatcacgaaccaacaggaggtctctcatgcctaa

SEQ ID NO: 95322 - protein, 362 aa, Exiguobacterium sibiricum 255-15
MSKRTLILEDGMVFEGEAFGSSEVTMGEVVFQTGMTGYQEMLSDPSYCDQMIVLTNPLIGNYGMNRDDYETTRPLAKALIVREVCHTPSNFRSQTSLATALEEFNIPGLTGIDTRQLTRHLRSKGVMRGLLVDGTYDLTEQLERLKQMALATDQVKRASTERAYVIPGAGPRIVLVDFGAKLGIIRELVRRGCEVVVVPHDVTAKDVLRYMPDGVMLSNGPGNPKDVPTAIPLIQELTGQVVIFGICLGHQLIALAHGADTFKLPFGHRGANHPVEDLRTGQVSITSQNHGYAVEDQSLAGLNLKLTHRAINDGTVEGIRHTTHPVFSVQYHPEASPGPMDANDLFDQFLTEITNQQEVSHA

SEQ ID NO: 95323 - DNA, 1200 bp, Xylella fastidiosa Dixon
  CDS (1)..(1200): transl_table=11
gtgttcgagctttcctgcaacctgatttcaggcggcggcatcggtgtcccaggcagccagagcgagactccacccgtgacagaacccgcaatcctagttctcgaagacggtaccgtattcgagggcgatgctgtaggcgctaatgggctttccgttggtgaggtggtatttaacacagccctcactggttatcaggagatcctgaccgatccttcgtatgcgtaccaattggtcaccctgacttatccgcatattggcaatacgggttgtaccgatcaggatgatgaggcgaataaggtatgggcggctgggctgattgtgcgggatgtgccgcgtcgtccaagcaattggcgcagtcagatttcgttgtcagattggttggccgcacgcggtgtggttgctattgctgggatcgatacgcgcaaactgacccgtattcttcgtgagaaaggcgctcagcatggtgcgttgatggctggtgagattgatgttggcaaggctcaggatgcggcccgtcaatttgcaggtatcaaaggtatggatttagccaaagtggtcagtaccaaacaggggtattcttggtacgaaggccagcttgacttggatcgtaacgaattcaagcgcgccgcgccgcaatatgaggttgtggcctatgattacggtgtgaagctcaatattctgcggatgttggcggagcgtggttgtgatcttacagtggtgcctgcgcagactccggctgacgaggtgttggcgctctgcccggatggggtgtttctttccaatggcccaggtgatccagagccttgtgattatgccgttgcggcgattaagacgttcatcatgcgacgggttccaatcttcggtatttgtttgggtcatcagttgctggcccaggctgttggtgccagggtcgtcaaaatgagccatggtcaccatggtgcgaatcatccggtgcaggacttgcgcagcgggcgggtaatgattacgtcgcagaatcatggctttgctgttgacgaggcaacgttgccaaacaatgtcagggtgacgcatcgttcgttgttcgacgggaccaatcaggggattgagttgcttgatgtgccggcattctcgtttcaagggcatccggaggcttcccctggtccgcacgatgttgatgtgttgtttgacaggttcattacaatgatggcggctcaatcctga

SEQ ID NO: 95324 - protein, 399 aa, Xylella fastidiosa Dixon
MFELSCNLISGGGIGVPGSQSETPPVTEPAILVLEDGTVFEGDAVGANGLSVGEVVFNTALTGYQEILTDPSYAYQLVTLTYPHIGNTGCTDQDDEANKVWAAGLIVRDVPRRPSNWRSQISLSDWLAARGVVAIAGIDTRKLTRILREKGAQHGALMAGEIDVGKAQDAARQFAGIKGMDLAKVVSTKQGYSWYEGQLDLDRNEFKRAAPQYEVVAYDYGVKLNILRMLAERGCDLTVVPAQTPADEVLALCPDGVFLSNGPGDPEPCDYAVAAIKTFIMRRVPIFGICLGHQLLAQAVGARVVKMSHGHHGANHPVQDLRSGRVMITSQNHGFAVDEATLPNNVRVTHRSLFDGTNQGIELLDVPAFSFQGHPEASPGPHDVDVLFDRFITMMAAQS

SEQ ID NO: 95325 - DNA, 1080 bp, Streptococcus suis 89/1591
  CDS (1)..(1080): transl_table=11
atgtcaaaaagacgtttaattttggaaaatggcactatttttgagggggaggccttcggtgctgatattgatgtgactggtgagttggttttctcaactgggatgacaggttatcaggaatccatcacggaccagtcttataatggtcagattttaacctttacctatcccttggtaggaaattacgggattaaccgtgatgatttcgagtcgatcaaaccgacttgtaagggagtggttgttagcgagtgggctcgtcgagcaagtaattggcgtaaccagatgactttggatgaatttttaaaggctaagaaaattccagcaatttctggaattgacacacgcgccctaactaaaattattcgtcagcacgggaccatgaaggcgacattggcaaatgttggtgattccgttgagcatttgacagaccagttgagagcgactgttttgccaaccaacaacatccagcaagtatcgacaaaaacagcctatcctgcacctggagttggacgtagtgttgttttggttgattttggattgaaacattctattcttagagagttagccaagcgtgattgcaatgtgacagttgtcccttatgatacgactgctgaagaaattcttgccctcaatccagacggtgtcatgctttcaaacggtcctggtaacccagatgatgttccagaagctttggacatgattcggggcattctcggaaaaattccaatttttggtatctgtatggggcaccaactctttgctaaagcaaatggggcaacgacttataaaatgaagtttggtcaccgtggtttcaaccatgctgttcgtgaaattgcgacaggtcgagtggactttaccagtcagaaccacggttatgcagtggctcgtgaagatttacctgaatgtttaatgattactcatgaagaaatcaatgacaaatcagtagaaggggtacgccacaagtactatccaggtttctctgttcaattccacccagatgctgcacctggtccacatgatgccagctatttgtttgacgaatttatggaattgatggattcgtttaaaaaagggcagtaa

SEQ ID NO: 95326 - protein, 359 aa, Streptococcus suis 89/1591
MSKRRLILENGTIFEGEAFGADIDVTGELVFSTGMTGYQESITDQSYNGQILTFTYPLVGNYGINRDDFESIKPTCKGVVVSEWARRASNWRNQMTLDEFLKAKKIPAISGIDTRALTKIIRQHGTMKATLANVGDSVEHLTDQLRATVLPTNNIQQVSTKTAYPAPGVGRSVVLVDFGLKHSILRELAKRDCNVTVVPYDTTAEEILALNPDGVMLSNGPGNPDDVPEALDMIRGILGKIPIFGICMGHQLFAKANGATTYKMKFGHRGFNHAVREIATGRVDFTSQNHGYAVAREDLPECLMITHEEINDKSVEGVRHKYYPGFSVQFHPDAAPGPHDASYLFDEFMELMDSFKKGQ

SEQ ID NO: 95327 - DNA, 1122 bp, Croceibacter atlanticus HTCC2559
  CDS (1)..(1122): transl_table=11
atgagatatcaagatcataaacccgcattaattttattggcagatggcaccatttttcatggtaaatctgtaggaaacgtagaaggcaccacttttggcgaagtgtgctttaatactggtatgactggttaccaagaaatctttacagacccatcttattttggtcagattatggtaactaccaatgctcatattggtaactacggtactttttctgatgatgtagaaagtgacgatattaaaattgctggcttagtttgccgtaattttagttataatttttcaagacaacgtagtgatatgtctcttgagcagtttttaaaagaaaacaacttattatctatctcgaacgtagacactcgtgctcttgttgcatacataagagataatggcgctatgaatgctgtaatttcaacacgtgtaaatgaaatagacgctcttaaaaaagaattggcagaagttcctacaatggctggtttagagcttgcatctaaggtgtctactaaagagccgtattttattggagagaaagatgcaaaatataaaatcgctgctttagacattggagtaaagaaaaacatacttagaaacttagctaaaagagattgttacgttaaggtttttccatacaattctacatacgaggagatgagtaaatttaatccagacggatatttcttgtctaatggacctggagatccagaaccattaaaagatgccataattttagctaagataattattgaaaagaacaaacctttgtttggtatttgtttagggcatcaagttataggattggcaattggagtttcaacctataaaatgcataatggtcatcgtggaataaatcatcctattaaaaaccttacttcgggtaaaggagaaattacatctcaaaaccatgggttcgcgattaatattgaggaagcagaaaatcatccagatatcgaagttactcatcgccatctcaatgataatactattgcaggcttaaaacataaatctaaaaactgcttttctgtacaataccatccagaagcaagtccaggtccaaatgacgcgacatatttgtttgatgattttattacattaatagaaaattcaaaaccagtaactgcttaa

SEQ ID NO: 95328 - protein, 373 aa, Croceibacter atlanticus HTCC2559
MRYQDHKPALILLADGTIFHGKSVGNVEGTTFGEVCFNTGMTGYQEIFTDPSYFGQIMVTTNAHIGNYGTFSDDVESDDIKIAGLVCRNFSYNFSRQRSDMSLEQFLKENNLLSISNVDTRALVAYIRDNGAMNAVISTRVNEIDALKKELAEVPTMAGLELASKVSTKEPYFIGEKDAKYKIAALDIGVKKNILRNLAKRDCYVKVFPYNSTYEEMSKFNPDGYFLSNGPGDPEPLKDAIILAKIIIEKNKPLFGICLGHQVIGLAIGVSTYKMHNGHRGINHPIKNLTSGKGEITSQNHGFAINIEEAENHPDIEVTHRHLNDNTIAGLKHKSKNCFSVQYHPEASPGPNDATYLFDDFITLIENSKPVTA

SEQ ID NO: 95329 - DNA, 1161 bp, Sulfitobacter sp. EE-36
  CDS (1)..(1161): transl_table=11
atgaccgcgaccacatcacctcgtccgactgcctgcctggcgctagcggacggatcgattttctacggcatgggctttggcgcaacgggagagaccgtggccgagctttgctttaatacagcgatgacgggctatcaggaaatcatgaccgacccgtcctacgcggggcagatcgtgacctttaccttcccccacatcggcaacaccggcaccaaccccgaagatgacgaaaccggcgatccggtagcagcggggatggttgtcaaatggatgcccaccgacccgagcaactggcgttcggtccagccgttgtccgaatggctggcatcgcgcggacgcatcgcgattggtggtattgatacacgccgcctgacccgcgccatccggcagcaaggggcccctcacgcggcattggcgcataatcctgacggcgttttcgacgtcgaagcgctggtcgctgcggcacgcggtttcgcgggcctggaaggcatggatctagcgaaagatgtcagctgcaaacaatcctaccgctggaatgaaatgcggtgggcttggcccgacggctatactgcgcaggaaaacgctcctcataaagtggtcgcgatcgactacggtgccaagcgcaacatcctgcgctgccttgcctcggccggctgcgacgtcacggtgctgcccgcctctgccacgtatgaagatgtgatggcgcataatcctgacggtgttttcctgtcaaacggccccggcgatccggcggcgaccggcgtgtatgccgtgccgatgatcaaggatgtcatcgaaaagacagagcttccggttttcggcatttgccttggccaccagatgcttgcgctggctcttggcgggcagacggtcaagatgggtcacggtcaccacggtgcgaaccaccccgttaaggacattgataccggcaaggtcgaaatcacctcgatgaaccatggttttgccgtcgatgcgcaaagcctgccaagcggagtggttgaaacgcatcagtcgctgtttgacggctccaactgcggcatccggatggaggggcggcccgtctggtccgttcagcaccatcccgaagcgagccccggcccgcaagacagtttctatctgtttgaacgctttgccgcggcgatggcagagcgggccagctaa

SEQ ID NO: 95330 - protein, 386 aa, Sulfitobacter sp. EE-36
MTATTSPRPTACLALADGSIFYGMGFGATGETVAELCFNTAMTGYQEIMTDPSYAGQIVTFTFPHIGNTGTNPEDDETGDPVAAGMVVKWMPTDPSNWRSVQPLSEWLASRGRIAIGGIDTRRLTRAIRQQGAPHAALAHNPDGVFDVEALVAAARGFAGLEGMDLAKDVSCKQSYRWNEMRWAWPDGYTAQENAPHKVVAIDYGAKRNILRCLASAGCDVTVLPASATYEDVMAHNPDGVFLSNGPGDPAATGVYAVPMIKDVIEKTELPVFGICLGHQMLALALGGQTVKMGHGHHGANHPVKDIDTGKVEITSMNHGFAVDAQSLPSGVVETHQSLFDGSNCGIRMEGRPVWSVQHHPEASPGPQDSFYLFERFAAAMAERAS

SEQ ID NO: 95331 - DNA, 1113 bp, Roseovarius nubinhibens ISM
  CDS (1)..(1113): transl_table=11
ttggccctcgcagacgggtcgattttctacggctacggttttggcgccaccggcgtgaccacggccgagctttgcttcaacaccgcgatgaccggctatcaggagatcatgaccgatccctcctatgccgggcagatcgtgaccttcaccttcccccatatcggcaacaccggcgtcaatcccgaggatgacgaaaccgccgatccggtcgccgccggcatggtggtgaaatgggacccgacccagccgtcgaactggcgcgccaccgagacgctctcggactggctggccaagcggggccgcatcgccatcggtgggctcgacacccgtcgcctcacccgcgccatccgccagcagggcgcaccgcatgtggcgctcgcccatgatcccgacggcaatttcgacaccgatgcgctggttgaacaggcccgcgctttccccggcctcgaagggctcgatctggcgctcgacgtgacctgcagccagagctaccgctgggatgaaatgcgctgggcctggcccgatggctacccgcgtcagaccgcgcccaagcacaaggtcgtggccattgatttcggcgccaaacgcaacatcctgcgctgcctcgcctcggcgggctgcgatgtgaccgtgctgcccgccaccgccaccgccgccgaggtgctggcgcatgagcccgacggcgtcttcctgtcgaacggccccggcgacccggccgccaccggcgcctatgcggtgccgatgatcaaaggcgtgctcgaggccggcaagccgatgttcggcatctgcctcggtcatcagatgctcgccctggcgctcggtgccaagacgatcaagatgaaccacggccaccacggtgccaaccacccggtcaaggacaacgagaccggcaaggtcgagatcacgtcgatgaaccacggctttgccgtcgacagccagaccctgcccaagggcgtgatcgagacccatatctcgctctttgacgggtcgaactgtggcatccggatggaagaccgcccggtgttctcggttcagcaccaccccgaagcgagccccggcccgcaggacagtttctacctctttgaacgcttcgccgcctccatggctggctga

SEQ ID NO: 95332 - protein, 370 aa, Roseovarius nubinhibens ISM
MALADGSIFYGYGFGATGVTTAELCFNTAMTGYQEIMTDPSYAGQIVTFTFPHIGNTGVNPEDDETADPVAAGMVVKWDPTQPSNWRATETLSDWLAKRGRIAIGGLDTRRLTRAIRQQGAPHVALAHDPDGNFDTDALVEQARAFPGLEGLDLALDVTCSQSYRWDEMRWAWPDGYPRQTAPKHKVVAIDFGAKRNILRCLASAGCDVTVLPATATAAEVLAHEPDGVFLSNGPGDPAATGAYAVPMIKGVLEAGKPMFGICLGHQMLALALGAKTIKMNHGHHGANHPVKDNETGKVEITSMNHGFAVDSQTLPKGVIETHISLFDGSNCGIRMEDRPVFSVQHHPEASPGPQDSFYLFERFAASMAG

SEQ ID NO: 95333 - DNA, 1158 bp, Oceanicola batsensis HTCC2597
  CDS (1)..(1158): transl_table=11
atgccccaatcacatcacgacaaaccgaccgcctgcctggctcttgccgatgggacggtcttcatgggccgcggtttcggcgccaccggcgtcacggtggccgaactctgcttcaacacggcgatgaccggctatcaggagatcatgaccgacccctcctacgccggccagatcgtgaccttcaccttcccgcatatcggcaatgtcggcgtcacgcccgaggatgacgagacggccgatccggtcgccgacggcatggtggtccgctggaacccgaccgaaccctcgaactggcgggcgacgagccggctgtccgactggctcgcctcgcgcggacggatcgccatcggcggcgtcgatacgcgccgcctgacccgcgccatccgggcgcagggtgcgccgcatgccgccctcgcccacgatcccgagggcaacttcgacatcgaggctctggtggccagggcccgggacttctccggtctcgtggggctcgacctggcgaagaaggtcacctgcgtgcagagctatcgctggaacgagaccaggtgggcctggcccgacgggttcggccggcagaccgcggcgcgtcacaaggtcgtggcggtcgactatggcgcgaaacgcaatatcctgcgctgcctcgcctcgtccggctgcgacgtcacggtcctgcccgccacggcgacgaccgaggatgttctcgcccacaatcccgacggcatcttcctgtcgaacgggccgggcgatccggcggcgaccggcgcctatgccgtgccgatgatccgcggcgtgatggacaggaccgacctgccgatcttcggcatctgcctcggtcaccagatgctgggccttgcgctcggcgcccggacggtcaagatgaaccacggccaccacggggcgaaccacccggtgaaggacatggagaccggcaaggtcgagatcacctcgatgaaccacggcttcgccgtcgacagccagtcgcttccggccgatgtcaaggaaacccacgtctcgctcttcgacggatcgaactgcggcatccgcatgaccgaccggcccgtcttctccgtgcagtaccaccccgaggccagccccggaccgcaggacagcttctatcttttcgagcggttcgccgcctcgatggacgcccgcgcatga

SEQ ID NO: 95334 - protein, 385 aa, Oceanicola batsensis HTCC2597
MPQSHHDKPTACLALADGTVFMGRGFGATGVTVAELCFNTAMTGYQEIMTDPSYAGQIVTFTFPHIGNVGVTPEDDETADPVADGMVVRWNPTEPSNWRATSRLSDWLASRGRIAIGGVDTRRLTRAIRAQGAPHAALAHDPEGNFDIEALVARARDFSGLVGLDLAKKVTCVQSYRWNETRWAWPDGFGRQTAARHKVVAVDYGAKRNILRCLASSGCDVTVLPATATTEDVLAHNPDGIFLSNGPGDPAATGAYAVPMIRGVMDRTDLPIFGICLGHQMLGLALGARTVKMNHGHHGANHPVKDMETGKVEITSMNHGFAVDSQSLPADVKETHVSLFDGSNCGIRMTDRPVFSVQYHPEASPGPQDSFYLFERFAASMDARA

SEQ ID NO: 95335 - DNA, 1143 bp, Prochlorococcus marinus str. MIT 9211
  CDS (1)..(1143): transl_table=11
atgaattattcttctaaagatgatgcgattttggttttatctgatggcactttgcttgaaggaaagccctttggattcaagggaactgttcttggagagatagtattcaatactggtttaactggttaccaagaggtcttgactgatcctagttatcatggacagctggttacctttacttatccagagcttggaaatactggcgttaatcctgaggatcaagaagctgattctccttttgtcaaaggagtaatagcaaggcaaataattaataaacctagtagctggcgtgctaagagcaatctcgcggattggctcgaaaaacagaaggttataggtatacatggtgtagatacaagatcattagttagacacttaagagagtatggaaccatgaatgctgctatctctacagatggcaaattcacccctttgcagttattgaaaaaacttcaagatgttccttctatggaaggactgaatttggcagaaaaggttacaacgcaaaaagcttataaatggaaagaaaatacagctgctggctttgataaaagagaaattaatcagacatcggcatcttttaaggtggctgcaatagattttggaattaagagatcaatacttaacaggttggttgcttttggatgtgaggtgaatgtcttgccagcgagtataaatttttctgaagtaataaagctgtgtcctgaaggtgtttttcttagtaatgggccaggtgaccctgcggcagtaactaaaggcattgctttggccaaaaaattaattgaagaaacagaaattcctctttttggtatttgtctagggcatcagattttaggcttagcccttggtgcgaaaaccttcaagctcccttatggccatagaggacttaatcacccatgtggtgcaaatggtcaaatagaaattacaagtcaaaatcatggttttgctatcgatgcctcatctttaaatcctaatttggttgaaataacccatttaaatcttaatgacagaactgttgcgggttttgcaatgcttaacaagcctgttttcggaatccaatatcatcctgaagctagtccaggcccccatgatgctgattatcatttcgaacgttttgttgcacaaatgtcagaacgtcgttga

SEQ ID NO: 95336 - protein, 380 aa, Prochlorococcus marinus str. MIT 9211
MNYSSKDDAILVLSDGTLLEGKPFGFKGTVLGEIVFNTGLTGYQEVLTDPSYHGQLVTFTYPELGNTGVNPEDQEADSPFVKGVIARQIINKPSSWRAKSNLADWLEKQKVIGIHGVDTRSLVRHLREYGTMNAAISTDGKFTPLQLLKKLQDVPSMEGLNLAEKVTTQKAYKWKENTAAGFDKREINQTSASFKVAAIDFGIKRSILNRLVAFGCEVNVLPASINFSEVIKLCPEGVFLSNGPGDPAAVTKGIALAKKLIEETEIPLFGICLGHQILGLALGAKTFKLPYGHRGLNHPCGANGQIEITSQNHGFAIDASSLNPNLVEITHLNLNDRTVAGFAMLNKPVFGIQYHPEASPGPHDADYHFERFVAQMSERR

SEQ ID NO: 95337 - DNA, 1179 bp, Erythrobacter sp. NAP1
  CDS (1)..(1179): transl_table=11
atggcttctgctccctctcgtcctgcgcagccaaaaggtgcgacgggttgtcttgtcctggccgacggaacggtcgtctggggcaagggctttggcgctgtcggcgatgcggtgggcgaggtctgcttcaacaccgcgatgaccggctaccaggaggtgatgaccgatccctcgtatgacagccagatcgtcaccttcactttcccgcatatcggcaatgtcggcgcgaacgaggaagacgtggagagccgcgggctcggcgcggtaggctgcatcgttcgcgaggaagtgaccccgcattccagtttccgcgcgcgcgacgaattcgttcagtggatggcgggccacggcaagatcggactgtcgggcgtcgacacccgtgcgcttacccgccgtattcgcctgaatggcgctccgaacgcggtgattgcgcattcgccgtcgggtgagttcgacatcgacgcattgctgaccaaggctcaggactggagcgggctcgaggggcttgacctcgtccccaacgtctcacgcgaagcggcggaggattggaagggtggtcactggcagctcggcttcggctatgtcgagggcacgtcggatcgtccgcacgtagtcgcgatcgattatggcgcgaaggacaacatcttccgcaaccttgtgaaggcgggggcaaaggtgacagtcgtgcccgctcgcaccagctttgacgacatcatggccttaaagcccgatggcgtgttcctctccaacggtccgggcgacccagcggcgacaggcgagtatgcggtgccggtgatcaaggcgctgctcgatgcggatatgccgatctttggcatctgcctcggccaccagatgctcgcgctcgcagcaggcgcgaagaccaccaagatgcaccagggccaccgcggcgcgaaccatcccgtgcagcgcgttggtgagagctggggtgagacgagcggcctcgtcgagatcaccagcatgaaccacggattcgcggtcgatgcggacaccttgcccgacacactcgaacagacccatgtgagcttgttcgacggctcgaactgcgggattgcggtaaagggcaagaacgcgttcggtgtgcagtatcacccggaggcgagtccggggccgcaggatagcttttacctgttcgagaagtttgtcggggggctagggtga

SEQ ID NO: 95338 - protein, 392 aa, Erythrobacter sp. NAP1
MASAPSRPAQPKGATGCLVLADGTVVWGKGFGAVGDAVGEVCFNTAMTGYQEVMTDPSYDSQIVTFTFPHIGNVGANEEDVESRGLGAVGCIVREEVTPHSSFRARDEFVQWMAGHGKIGLSGVDTRALTRRIRLNGAPNAVIAHSPSGEFDIDALLTKAQDWSGLEGLDLVPNVSREAAEDWKGGHWQLGFGYVEGTSDRPHVVAIDYGAKDNIFRNLVKAGAKVTVVPARTSFDDIMALKPDGVFLSNGPGDPAATGEYAVPVIKALLDADMPIFGICLGHQMLALAAGAKTTKMHQGHRGANHPVQRVGESWGETSGLVEITSMNHGFAVDADTLPDTLEQTHVSLFDGSNCGIAVKGKNAFGVQYHPEASPGPQDSFYLFEKFVGGLG

SEQ ID NO: 95339 - DNA, 1155 bp, Synechococcus sp. RS9917
  CDS (1)..(1155): transl_table=11
atgactgtggctgattcaggcgctcaggccagagcgacggcgcgactggtgctggccgatggcaccgtgtttgaagggctggcctgcggtgcccggggctcggtggtgggcgaggtggtgttcaacaccggcatgaccggctatcaggaggtgctgaccgaccccagttatgccggccagctggtcacctttacctatcccgaactgggcaacaccggcgtcaaccctgaggatcaggaggcggagaagccccacgcccttgggctgatcgcccggcagctggcgccccgtcccagcaactggcgctgccatcagccgctacccgactggctcgatgcccacggggtggtgggcattcatggcatcgacacgcgggccctggtgcgtcatctgcgcgagaccggcgccatgaatggcgtcatcagcagtgatggtcagtcaccccaggccttgctcgacaccgtgcgctccgccccgtcgatgcaggggttgaacctggccgatcaggtctccaccgagcagccctacacctggacaagcgcctgctcggccgcctttgatcaacgcttgcagccgtcgccctcccagcggtatcgcgtggtggcgatcgatttcggcatcaagcgggcgattctcgatcgcttggtgggccatggctgcgaggtgaccgtgatgccggccgatgttgatctggccacggtgctggcccaacagcccgaaggggtgttcctctccaacggccccggtgatcccgccgctgtgaccaacggcattgccctggcccgcgggttgctggcggagaagaccctgccgttgttcgggatctgtctcggccatcagatcctcggcctcgccctggggggctcctccttcaaactcacctacggccatcgcggtctgaaccatccgtgcggcaccaccgggcaggtggaaatcaccagccagaaccatggcttcgccctcgatgctgcatcgctcgaccctgaggcgatcgccatcacccacctcaacctgaacgaccgcaccgtggcggccatggcccatcgtcatcaaccggttttcggggtgcagtaccacccggaagccagtccaggccctcacgatgccgatcatcacttcgctcgatttgtggcgttgatggcggaacagcgctga

SEQ ID NO: 95340 - protein, 384 aa, Synechococcus sp. RS9917
MTVADSGAQARATARLVLADGTVFEGLACGARGSVVGEVVFNTGMTGYQEVLTDPSYAGQLVTFTYPELGNTGVNPEDQEAEKPHALGLIARQLAPRPSNWRCHQPLPDWLDAHGVVGIHGIDTRALVRHLRETGAMNGVISSDGQSPQALLDTVRSAPSMQGLNLADQVSTEQPYTWTSACSAAFDQRLQPSPSQRYRVVAIDFGIKRAILDRLVGHGCEVTVMPADVDLATVLAQQPEGVFLSNGPGDPAAVTNGIALARGLLAEKTLPLFGICLGHQILGLALGGSSFKLTYGHRGLNHPCGTTGQVEITSQNHGFALDAASLDPEAIAITHLNLNDRTVAAMAHRHQPVFGVQYHPEASPGPHDADHHFARFVALMAEQR

SEQ ID NO: 95341 - DNA, 1215 bp, Synechococcus sp. WH 5701
  CDS (1)..(1215): transl_table=11
atgatcgattcacccgacatcccccccttgagcgctgcagccccggcttcggccagcaccaccgagcccgccagcggcagcccggccgccaacgaggccgtgctggtgctggcggatggcaccctgctgcggggcacggccttcggggcgcggggcaccgccatcggtgaagtggttttcaacaccggcatgacggggtatcaggaggtgatgaccgatcccagctactccggtcagctggtgaccttcacctatccggaactgggcaacaccggtgtcaacccggaggatcaggaggccgaggccccccatgtgcgcggcgtgatcgcccgccagctggcgcccgcccccagcagctggcgcagccggggcgacctgccgagctggctggcctcccatggggtggtgggcatcgccggagtggacacccgcgccctggtgcgccacctgcgcgagcggggggccatgaacggcgtgatcagcagtgatggcaccgccccccgcgagctgctggagctggtgcgccgcagcccctcgatggaggggctgaacctggccgcgagggtgaccgcccccagcgcttatctctggcagcaactgtgcgccaccggcttcgatcagcgcctgcaaccgtcgccggagcggccctatcgggtggtggcgatcgatttcggcatcaagcgggccatcctcgagcggctcacggcccatggctgcacggtcacggtgcttcccgccagcagcaccatcgccgaggtgctggcgctggagccggagggggtgttcctctccaacggcccgggcgatccggcggcggtggcggaaggcatcgccctggccagggatctgctcggtcaggccgatctgccggtgttcggcatctgcctgggccaccagatcctgggcctggccctgggcggcagcaccttcaaactcggctacggccaccgcgggctgaaccatccctgcggcggcgagggcctggtggagatcaccagccagaaccatggcttcgcgatcgaggccagctcactgcccgaggacctggtggaggtcacccactacaacctcaacgaccgcaccgtggcggccctgcgccatcgccttcagccggtgttcggcgtgcagtaccacccagaggccagccccgggccccacgacgcggatcaccacttcggccgtttcgtgcgactgatggccgagcgacgcccctga

SEQ ID NO: 95342 - protein, 404 aa, Synechococcus sp. WH 5701
MIDSPDIPPLSAAAPASASTTEPASGSPAANEAVLVLADGTLLRGTAFGARGTAIGEVVFNTGMTGYQEVMTDPSYSGQLVTFTYPELGNTGVNPEDQEAEAPHVRGVIARQLAPAPSSWRSRGDLPSWLASHGVVGIAGVDTRALVRHLRERGAMNGVISSDGTAPRELLELVRRSPSMEGLNLAARVTAPSAYLWQQLCATGFDQRLQPSPERPYRVVAIDFGIKRAILERLTAHGCTVTVLPASSTIAEVLALEPEGVFLSNGPGDPAAVAEGIALARDLLGQADLPVFGICLGHQILGLALGGSTFKLGYGHRGLNHPCGGEGLVEITSQNHGFAIEASSLPEDLVEVTHYNLNDRTVAALRHRLQPVFGVQYHPEASPGPHDADHHFGRFVRLMAERRP

SEQ ID NO: 95343 - DNA, 1146 bp, Synechococcus sp. WH 7805
  CDS (1)..(1146): transl_table=11
atgatgacagcctcatccgtgaacccggcgatgctgatgctcgctgatggaaccgtgtttcaaggtctggcctgtggagcggttggcagtgccgtgggtgaggtggtcttcaacacggggatgaccggttatcaggaagtgatgacggatcccagctattccggacagctggtcacattcacctatcccgagctgggcaacaccggtgtgaatgatcacgatcaggaggcagaccatgcccacgtgcgtgggttgatcgcccgtcagctctctccggtctccagcagctggcgatccactcagagcctgcaggcctggctggaacagcaaggtgtcgttggtattcaggggatcgacacgcgtgccctggtgcgccacctgcgtgaaacaggagcgatgaatggaatcatcagttcctccggacgttctccagccgatctgagggaggagcttcgtgctgctccttcaatggaggggctcaatcttgctgatcgggtgacaacgcagaccccctacacctgggaaaagccctgcagcgttgcgttcgaccgtcgtctgcaatccagccgatctgaacggccttatcgcgtcgtggcgattgatttcgggatcaaacgggccatcctcgaccgccttgtgagtcatggttgcgctgtcacggtggtcccggcctcggtggatttgaacaccgtgctcgcccatgagccggagggggtcttcctgtccaacgggcccggtgaccccgcggccgtgacccatggcatcgatctggcccgtggccttcttgagcatcaagccctgcctttgtttggaatctgcctcggtcatcagattctcggcttggcgctcggtggtgagacgttcaagctcgggtacggccatcgcggactcaaccatccctgcggtacatccggtcaggtggagatcaccagccagaaccatggcttcgctctggatgcctcaagccttccccaggacaaggtggagatcactcatctgaatctcaacgaccgcacagttgcggcgattgcccatcgtcatcagccggtcttcagtgttcagtaccacccagaagccagtcctggaccccatgatgcggatcatcatttttcccgattcgtgacactgatgtcggatcgccgctga

SEQ ID NO: 95344 - protein, 381 aa, Synechococcus sp. WH 7805
MMTASSVNPAMLMLADGTVFQGLACGAVGSAVGEVVFNTGMTGYQEVMTDPSYSGQLVTFTYPELGNTGVNDHDQEADHAHVRGLIARQLSPVSSSWRSTQSLQAWLEQQGVVGIQGIDTRALVRHLRETGAMNGIISSSGRSPADLREELRAAPSMEGLNLADRVTTQTPYTWEKPCSVAFDRRLQSSRSERPYRVVAIDFGIKRAILDRLVSHGCAVTVVPASVDLNTVLAHEPEGVFLSNGPGDPAAVTHGIDLARGLLEHQALPLFGICLGHQILGLALGGETFKLGYGHRGLNHPCGTSGQVEITSQNHGFALDASSLPQDKVEITHLNLNDRTVAAIAHRHQPVFSVQYHPEASPGPHDADHHFSRFVTLMSDRR

SEQ ID NO: 95345 - DNA, 1134 bp, Pseudoalteromonas tunicata D2
  CDS (1)..(1134): transl_table=11
ttgactatatccgctttgttagtcctagaagacggcacagtgttccgcggtactgcgataggggctgaaggtatttcagtcggtgaagtagtatttaatacatcaatgacaggctatcaggagattatcactgatccctcatatgcggaacaaatcgtaaccctgacttacccacatatcggtaatacgggcactaacagcgaagacgaagaagcgaataaaatctgggctaaaggcctagttattcgtgatttgccactgctagcgagtaatttccgtaatgagcaatcattagatgaatatttaaaagctcgcaatatcctagggattgcagacattgatacccgtaaattaacacgtatcttacgtgataaaggggctcaaaatggctgtattatcgctggtgaaattgatgaagcgaaagctttagaagctgcaaaagcattcccaggtttaaaaggaatggatcttgccaaagtggtttcaaccactgagcaatatcaatggaatgaaggcagttggcaactaggtcaaggatttaagacacttgctgacgctgatgcaaagttccacgttgtagcgtatgattttggtgttaaacgtaatattttacgtatgttagttgaccgcggttgtaaattaacggttgtgcctgcccaaacgtctgctgctgacgtattagccttaaatccagatggtattttcttatcaaatggcccaggtgatccagctccatgtacttatgctattgaagcaattaaagcatttttagaaactgacacgccaatttttgggatctgtttaggtcaccaattactagctcttgcgtcgggtgcacaaacggtaaaaatgaagtttggccatcacggtggtaaccaccctgtaaaagatttagatcgtggtgtcgtgatgattactgcacaaaaccatggttttgctgccgaagaatcaacgctaccagacacgttacgtgcaacgcataaatcattgtttgatggcactttgcaaggtattcatcgtacagataaacctgcatttagcttccaaggtcatccagaagcgagcccaggcccgcatgatgctgcgccgttatttgatcacttcatcgatttgatgcaagaacgtaaacactaa

SEQ ID NO: 95346 - protein, 377 aa, Pseudoalteromonas tunicata D2
MTISALLVLEDGTVFRGTAIGAEGISVGEVVFNTSMTGYQEIITDPSYAEQIVTLTYPHIGNTGTNSEDEEANKIWAKGLVIRDLPLLASNFRNEQSLDEYLKARNILGIADIDTRKLTRILRDKGAQNGCIIAGEIDEAKALEAAKAFPGLKGMDLAKVVSTTEQYQWNEGSWQLGQGFKTLADADAKFHVVAYDFGVKRNILRMLVDRGCKLTVVPAQTSAADVLALNPDGIFLSNGPGDPAPCTYAIEAIKAFLETDTPIFGICLGHQLLALASGAQTVKMKFGHHGGNHPVKDLDRGVVMITAQNHGFAAEESTLPDTLRATHKSLFDGTLQGIHRTDKPAFSFQGHPEASPGPHDAAPLFDHFIDLMQERKH

SEQ ID NO: 95347 - DNA, 1140 bp, Photobacterium sp. SKA34
  CDS (1)..(1140): transl_table=11
ttgagcaaatctgcgctattagtccttgaagatgggactgtgttccgcggcgtgtccattggagcagatggttcggccgttggtgaagtcgtttttaatacttcgatgacggggtatcaggaaattctcactgacccttcctactcacaacagatcgttacccttacttatccccacattggcaataccggtactaataccgaagacgaagaatccacggcaattcatgcacaaggtctggttattcgtgatctccctcttatcgcttcaaacttccgctctgaacaatctctttctgattacctaaaatcacaaaatatcgttggtatcgctgatatcgatacccgtaagctaacccgtattcttcgtgaaaagggtgcgcaaaacggttgtatcgttgcaggtaataacatcgatgaaggttttgcacttgagcaagcaaaagcatttccaggcctgaaaggcatggatttagcaaaagaagtgacaacaagcgaaacatacagttggaagcaaggttcttggacattagagaacggcttaccagaagctcaagaagataaagagctgccttaccacgtagtcgcttatgactttggtgctaaacgtaacatcttacgtatgctggttgatcgtggttgtcgtttaacggttgttcctgcacaaacatcagcagaagacgtccttgcgctaaatccagatggcgtattcctatcaaatggccctggcgacccagagccatgtacttacgcgattgaagcaactaaaacattccttgataaaaacattccaatctttggaatttgtttaggtcaccaaattcttgccttagcaagtggtgcaaagacagtgaaaatgaagtttggtcaccacggtgctaaccatccagttaaagatttagatcgtgatgttgtgatgatcaccagccagaaccacggttttgctgctgacgaagcaacgttacctgaaaacttacgtgcgacacacaaatccctgtttgatggctcgctacaaggtattcatcgtaccgacaagcctgcattcagtttccaaggccacccagaagcgagccctggtccacatgatgcagcaccattatttgatcactttatcgaattaattaagaaacacagcgcctaa

SEQ ID NO: 95348 - protein, 379 aa, Photobacterium sp. SKA34
MSKSALLVLEDGTVFRGVSIGADGSAVGEVVFNTSMTGYQEILTDPSYSQQIVTLTYPHIGNTGTNTEDEESTAIHAQGLVIRDLPLIASNFRSEQSLSDYLKSQNIVGIADIDTRKLTRILREKGAQNGCIVAGNNIDEGFALEQAKAFPGLKGMDLAKEVTTSETYSWKQGSWTLENGLPEAQEDKELPYHVVAYDFGAKRNILRMLVDRGCRLTVVPAQTSAEDVLALNPDGVFLSNGPGDPEPCTYAIEATKTFLDKNIPIFGICLGHQILALASGAKTVKMKFGHHGANHPVKDLDRDVVMITSQNHGFAADEATLPENLRATHKSLFDGSLQGIHRTDKPAFSFQGHPEASPGPHDAAPLFDHFIELIKKHSA

SEQ ID NO: 95349 - DNA, 1188 bp, Oceanospirillum sp. MED92
  CDS (1)..(1188): transl_table=11
ttgcacgtatcgtttctgatttttgttgttgcgaatttacgcggggaggttcaattggcgagaccagccattcttgctcttgaggacggaagtattttcaagggcttagccattggcgcagacggtctgtctagcggcgaggttgtatttaatacctctatgacgggttaccaggaaattttgacagatccatcttactgccgtcagattgtaaccctgacttatccacatattggtaatacaggtacaaactctgaggacgaagaatcgtcccgtacttgggtagctggcctggttatccgtgatctgccattagttgcgagtaatttccgtaacgaaaaaaatcttgatcagtatcttaaagacaacaatatcgttggtattgcagatattgatacgcgccgtctgactcgccttttacgtgagaaaggttcattgaacggctgcatcatggctggcgagattgatgaatctaaagcgctggatgaggctaaagccttcccaggcctgaaaggtatggatctggcgcaggttgtaacgactgaatctacctatgaatggaactcttctacatggcagctgggcgctggtcatgaagataagaatccttctgatcaggaattccacgttgttgcatatgattatggtgttaaacgcaacatcctgcgtatgctggttgaacgtggctgtaagattactgttgtgccggcgaaaacacctgcttctgaggttctggcgctgaatccagatggcgtattcctgtcgaatggtcctggtgatccagaaccatgtgattatgcgatcgaagcaatccaggagatctgtaaaacagatctgcctgtttttggtatctgcttgggtcatcagcttctggcactggcttctggtgctaaaacagtaaaaatgaagttcggccatcatggtgctaaccacccggttcaggatctggatggtaaacaggtaatgattacttctcagaaccacggctttgcagttgatgaagatgcgctgcctgaaaatgtgcgcgctacccataagtcactgtttgatggttctttgcagggtattgaacgtaccgaccgtgctgcattcagcttccagggacaccctgaagcaagcccaggtccacacgatgtggcgcctctgtttgatcgctttattgcggatatgcgtgcagctaaggcttga

SEQ ID NO: 95350 - protein, 395 aa, Oceanospirillum sp. MED92
MHVSFLIFVVANLRGEVQLARPAILALEDGSIFKGLAIGADGLSSGEVVFNTSMTGYQEILTDPSYCRQIVTLTYPHIGNTGTNSEDEESSRTWVAGLVIRDLPLVASNFRNEKNLDQYLKDNNIVGIADIDTRRLTRLLREKGSLNGCIMAGEIDESKALDEAKAFPGLKGMDLAQVVTTESTYEWNSSTWQLGAGHEDKNPSDQEFHVVAYDYGVKRNILRMLVERGCKITVVPAKTPASEVLALNPDGVFLSNGPGDPEPCDYAIEAIQEICKTDLPVFGICLGHQLLALASGAKTVKMKFGHHGANHPVQDLDGKQVMITSQNHGFAVDEDALPENVRATHKSLFDGSLQGIERTDRAAFSFQGHPEASPGPHDVAPLFDRFIADMRAAKA

SEQ ID NO: 95351 - DNA, 1119 bp, Flavobacteria bacterium BBFL7
  CDS (1)..(1119): transl_table=11
atgagttatttaaataaaaaggatgctgttattttgttagcagacggtacgatatttcatggtaaggcgatagatgacggtggtactgctactggagaaatctgtttcaatacaggaatgtctggatatcaagaagtatttacagatccttcttatactggtcaaatcatggttactaccaatgcccatattggtaattatggtataactgacgatgatgcagaatcaaattctgtaaaaattgcgggattaatctgtaaaaacttctctgaagagttttctcgacctgctgctcaatcagatctttttgcgtatttgaaaaaaaagaatcttgttatattgtctgatgtagatacacgagcattagtccgatatatcagagatcatggtgcacaaaacgctataatttctacagatgttgaagatatgcaatctttaaaaagaaaattggaagatgtgcctagtatgaaaggattagagttagcttctaaggtttcatgtaaagaaccttatttctatggagacgaaaatgcaaaatatagaattgctgcgctagatttaggaattaaaagtaatattttacgcaatttggcttctagaaatacatacataaaagtttttccttataattcttcatttgaagaaatggcttcttttaatcctgatggttattttatatccaatggtcctggtgatccagaacctttagaagctgcgattaaaactgctagtgagattatagagtctaatagtccgttatttgggatttgcttaggtcatcaggtaatagccttagccatgggtgtttccacttataagatgcataatggccatagaggtatcaatcatcctatcaaaaatcttattactggtaaaggtgagatcacatctcaaaatcacggttttgcgattaataaatctcaagccatcgctaatgataatattgaaataacccatcttcatttaaatgatgataccgttgcaggtatacgtttaaaagataagccttgcttttctgttcaatatcatccagaagcaggtccaggccctaatgacgcaacctacctttttgatcaatttatcgatttaattaaaaattctaaaaaacatacagcatga

SEQ ID NO: 95352 - protein, 372 aa, Flavobacteria bacterium BBFL7
MSYLNKKDAVILLADGTIFHGKAIDDGGTATGEICFNTGMSGYQEVFTDPSYTGQIMVTTNAHIGNYGITDDDAESNSVKIAGLICKNFSEEFSRPAAQSDLFAYLKKKNLVILSDVDTRALVRYIRDHGAQNAIISTDVEDMQSLKRKLEDVPSMKGLELASKVSCKEPYFYGDENAKYRIAALDLGIKSNILRNLASRNTYIKVFPYNSSFEEMASFNPDGYFISNGPGDPEPLEAAIKTASEIIESNSPLFGICLGHQVIALAMGVSTYKMHNGHRGINHPIKNLITGKGEITSQNHGFAINKSQAIANDNIEITHLHLNDDTVAGIRLKDKPCFSVQYHPEAGPGPNDATYLFDQFIDLIKNSKKHTA

SEQ ID NO: 95353 - DNA, 1143 bp, marine gamma proteobacterium HTCC2207
  CDS (1)..(1143): transl_table=11
gtgaattcccagactcaccgggaagccgtacttgcgctagcagacggaacaattttcagaggaactgccatcggttcggatggaatctctgttggtgaagtagtcttcaatactgccctcactgggtatcaagaaattcttactgatccctcatacgctcaacaaatcgttaccttaacctatccccatatcggcaatgtcggcgtcaacgacgaagatgctgagtcggatagaatctgggcgtctggtttggtgattcgtgacttacctttggtgttgtcaaatttccgcagccagcaagcactagatgactatctcaaggacagcaatatccttggaatagcggatatagacacgcgtaagctgacacgcattctgcgtgaaactggtgctcagaacggctgtattatggctggtgatgtggacgatgagactgccctagcagcagctcgtggttttgctggtctcaaaggtatggacctcgcaaaagaggtcactaccgaaaccacctaccaatggtctgagcatagttgggagctgggcgaaggtcataagcctcaggatccagccacgaccaaatacaaagtggttgcctacgactttggtgtgaagcgcaatatcctgcgcatgttggttgatctgaactgtgaactgattgttgttccggcgaaaacccctgccagcgaagtcttggccatgcagccagacggaattttcctctccaatggcccaggcgatccagaaccctgtgactacgccatagatgcgatccgcgaaattctcgaaaccgatattccggtttttggaatctgcttgggccatcagctgttggcactggcctcaggtgccaaaacggtgaagatgaagtttggtcaccacggcgccaaccacccagttgaagatctcgccggcaatgttgtgatgatcaccagtcagaatcatggttttgccgtggatgaagagaatcttcctgctaacctgatcgccacgcatcgctcattgtttgacggtagcctgcagggtgtccagcgcacggataagcctgcattcagcttccagggtcaccctgaagctagccccggcccacacgatgcagcatccctatttgaccactttataaagttaatggaagatcgacgctag

SEQ ID NO: 95354 - protein, 380 aa, marine gamma proteobacterium HTCC2207
MNSQTHREAVLALADGTIFRGTAIGSDGISVGEVVFNTALTGYQEILTDPSYAQQIVTLTYPHIGNVGVNDEDAESDRIWASGLVIRDLPLVLSNFRSQQALDDYLKDSNILGIADIDTRKLTRILRETGAQNGCIMAGDVDDETALAAARGFAGLKGMDLAKEVTTETTYQWSEHSWELGEGHKPQDPATTKYKVVAYDFGVKRNILRMLVDLNCELIVVPAKTPASEVLAMQPDGIFLSNGPGDPEPCDYAIDAIREILETDIPVFGICLGHQLLALASGAKTVKMKFGHHGANHPVEDLAGNVVMITSQNHGFAVDEENLPANLIATHRSLFDGSLQGVQRTDKPAFSFQGHPEASPGPHDAASLFDHFIKLMEDRR

SEQ ID NO: 95355 - DNA, 1110 bp, delta proteobacterium MLMS-1
  CDS (1)..(1110): transl_table=11
atgaaagcatgcatcgcccttgaagacgggactgtttttgacgggacctcctttaccggccacggcgagaccaccggcgaagttgttttcaataccgggatgagcggttaccaggagctgctgagcgatccttcctacaaaggccagatcgtcaccatgacttacccgttgatcggcaattacggggtcaacgaagaggacatggagtcggcccgggtccagccggaggcctttattgtccgcgaatactgccctttccccagtaatttccgggccaccgcgaccctggcccaattgctgcaaaaatacggtattctggggattgaaggggtggacacccgggccctgacccgccatatccgcaccgccggcgccatgaagggcattgtctccaccgaagatctggaccacgcctcactggtggccaaggcccaggccgcccccggcctggtgggccgcgatctggtccgggaggtaagctgcagcgaaccctatgtctggaccgccaccggtcccaggccgggacgcgatttcaccggcgccactgccggtcgccaccgggtggtggccattgattacgggcttaaatacaatcaactgcgaatgctggccgagcgcggctgccaggtccaggtggtcccctgcgacaccgacgccgagaccatactggcccagaaccccgatggcatctttctgtccaacggccccggcgaccccagcggcattcccggtgtcatcgacaccatccggcagttgctcggccggaaaccgatctttggcatttgtctgggcaaccagttgctgggcttggcttacggcggcaaaacctataaacttaagttcggccaccgtggcatcaatcagccggtcaaggatctgaccaccggccgggtggagatcacctcccagaaccacgggttctgcctcgatatgaccagtctcgatgaagccgaggtcgaattgacccatatcaatttaaacgacaactcggtggaaggaatccgccaccgccgctatccggccttttccgtgcagtatcacccggaaaacgccccgggcccccgcgacgcggtctatctttttgaccgcttcgtacagatgatgaactga

SEQ ID NO: 95356 - protein, 369 aa, delta proteobacterium MLMS-1
MKACIALEDGTVFDGTSFTGHGETTGEVVFNTGMSGYQELLSDPSYKGQIVTMTYPLIGNYGVNEEDMESARVQPEAFIVREYCPFPSNFRATATLAQLLQKYGILGIEGVDTRALTRHIRTAGAMKGIVSTEDLDHASLVAKAQAAPGLVGRDLVREVSCSEPYVWTATGPRPGRDFTGATAGRHRVVAIDYGLKYNQLRMLAERGCQVQVVPCDTDAETILAQNPDGIFLSNGPGDPSGIPGVIDTIRQLLGRKPIFGICLGNQLLGLAYGGKTYKLKFGHRGINQPVKDLTTGRVEITSQNHGFCLDMTSLDEAEVELTHINLNDNSVEGIRHRRYPAFSVQYHPENAPGPRDAVYLFDRFVQMMN

SEQ ID NO: 95357 - DNA, 1110 bp, delta proteobacterium MLMS-1
  CDS (1)..(1110): transl_table=11
atgaaagcatgcatcgcccttgaagacgggactgtttttgacgggacctcctttaccggccacggcgagaccaccggcgaagttgttttcaataccgggatgagcggttaccaggagctgctgagcgatccttcctacaaaggccagatcgtcaccatgacttacccgttgatcggcaattacggggtcaacgaagaggacatggagtcggcccgggtccagccggaggcctttattgtccgcgaatactgccctttccccagtaatttccgggccaccgcgaccctggcccaattgctgcaaaaatacggtattctggggattgaaggggtcgacacccgggccctgacccgccatatccgcaccgccggcgccatgaagggcattgtctccaccgaagatctggaccacgcctcactggtggccaaggcccaggccgcccccggcctggtgggccgcgatctggtccgggaggtaagctgcagcgaaccctatgtctggaccgccaccggtcccaggccgggacgcgatttcaccggcgccactgccggtcgccaccgggtggtggccattgattacgggcttaaatacaatcaactgcgaatgctggccgagcgcggctgccaggtccaggtggtcccctgcgacaccgacgccgagaccatactggcccagaaccccgatggcatctttctgtccaacggccccggcgaccccagcggcattcccggtgtcatcgacaccatccgacaactgctcggccggaaaccgatctttggcatttgtctgggcaaccagttgctgggcttggcttacggcggcaaaacctataaacttaagttcggccaccgtggcatcaatcagccggtcaaggatctgaccaccggccgggtggagatcacctcccagaaccacgggttctgcctcgatatggccagtctcgatgaagccgaggtcgaattgacccatatcaatttaaacgacaactcggtggaaggaatccgccaccgccgctatccggccttttccgtgcagtatcacccggaaaacgccccgggcccccgcgacgcggtctatctttttgaccgcttcgtacagatgatgaactga

SEQ ID NO: 95358 - protein, 369 aa, delta proteobacterium MLMS-1
MKACIALEDGTVFDGTSFTGHGETTGEVVFNTGMSGYQELLSDPSYKGQIVTMTYPLIGNYGVNEEDMESARVQPEAFIVREYCPFPSNFRATATLAQLLQKYGILGIEGVDTRALTRHIRTAGAMKGIVSTEDLDHASLVAKAQAAPGLVGRDLVREVSCSEPYVWTATGPRPGRDFTGATAGRHRVVAIDYGLKYNQLRMLAERGCQVQVVPCDTDAETILAQNPDGIFLSNGPGDPSGIPGVIDTIRQLLGRKPIFGICLGNQLLGLAYGGKTYKLKFGHRGINQPVKDLTTGRVEITSQNHGFCLDMASLDEAEVELTHINLNDNSVEGIRHRRYPAFSVQYHPENAPGPRDAVYLFDRFVQMMN

SEQ ID NO: 95359 - DNA, 1131 bp, Oceanobacter sp. RED65
  CDS (1)..(1131): transl_table=11
ttgtcaaagccagctattcttgcgctcgaagacggaagcattttcaaaggcaccgctattggtgcagatggtcattctgttggggaggtagtctttaatacctccatgacaggttaccaggaaattcttaccgacccttcttattgccgccaaatcgttactcttacatacccccatatcggaaactacggaaccacttcagaagatgctgaatgtgaccaaatctgggcttctggcctagttatccgcgacttaccacttgtcgcaagtaacttccgtagtgaacaagcgctagatgaatacttgcgtcagcgcaatgtagtggccatcgccgacattgatacacgacgtttaacccgtatccttcgtgagaagggcagcctgaacggttgcgtgatggccggtgacgatgtggatacagataaggcactagagcttgccaaaggttttgccggactcaaaggcatggaccttgccaaagaagttactacagacaaaacctacacttggaatgaaaccagctggcagcttggtgtaggccacgagaagaaagagggtggtcagtttaaagtcgttgcttatgactatggcgtcaaacgcaatattttgcgcatgctggtggatcgtgactgcgagttaacggttgtgcctgcgcaaaccccagccaaagacgtattggctatgaatcctgatggtatcttcctgtcaaatggacctggtgacccagagccatgtgactatgccattgcagcaatcaaagagatattggaaaccgatattcctgtatttggtatctgcctaggtcaccaattgttggcgctcgcttctggtgccaagactgaaaaaatgggccatggccaccacggtggtaaccacccagtacaaaacttagaagacaaaacagtgatgattacggcgcaaaaccatggttttgcggtatcagaaaccggtattcccgataatctaacggtgacgcacaagtcattgttcgacggcactacccaagggattcatcgcacggacaagcctgcgtttagcttccaaggtcacccagaagcgagccctggtccgcacgatgctgcaccgctgttcgatcattttattgaattaatgcaagcccgcaaagcttag

SEQ ID NO: 95360 - protein, 376 aa, Oceanobacter sp. RED65
MSKPAILALEDGSIFKGTAIGADGHSVGEVVFNTSMTGYQEILTDPSYCRQIVTLTYPHIGNYGTTSEDAECDQIWASGLVIRDLPLVASNFRSEQALDEYLRQRNVVAIADIDTRRLTRILREKGSLNGCVMAGDDVDTDKALELAKGFAGLKGMDLAKEVTTDKTYTWNETSWQLGVGHEKKEGGQFKVVAYDYGVKRNILRMLVDRDCELTVVPAQTPAKDVLAMNPDGIFLSNGPGDPEPCDYAIAAIKEILETDIPVFGICLGHQLLALASGAKTEKMGHGHHGGNHPVQNLEDKTVMITAQNHGFAVSETGIPDNLTVTHKSLFDGTTQGIHRTDKPAFSFQGHPEASPGPHDAAPLFDHFIELMQARKA

SEQ ID NO: 95361 - DNA, 1140 bp, Synechococcus sp. RS9916
  CDS (1)..(1140): transl_table=11
atgacttccgccaccccaacggtcccagcggtgctggtgcttgccgatggcactgtgtttgagggactggcatgtggcagccgcggcagcgtggtgggtgaagtggtcttcaacaccgggatgaccggctaccaggaggtgctcaccgatcccagttattccggtcagctggtcaccttcacctatccggagctgggcaataccggtgtcaatgccgaggatcaggaggccgatgtgcctcacgcccgaggtctgatcgctcgccagctcgcgcccctgccaagcaattggcggtgttcgcagaccttgccggagtggcttgatcagcatggtgttgtgggtatccatggcatcgatacccgtgcattggtgcgccatctgcgcgacaccggagccatgaatggcgtgatcagctcggatggtcgctccccccaggtgctgttggaggagctgaaatcggcaccctccatgcagggcctcaacctcgctgatcgggttagtacggcggagccttacacctggacctcagcgtgtgccgccagctttgatcagcggctcaagccccgccccgagcatccctatcgcgttgttgcgatcgatttcgggatcaaacgcgccatccttgatcgcctggtcggccatggctgcgaggtgactgtgctgccagcatccagctcccttgagaccgtgctctcccatgagccggaaggcgttttcctgtccaacggacctggagacccctcagcggtcaccggaggcattgccctggccaaggatttggtggagcacaagtcactgcccctgtttggtatttgcctgggccaccagatccttggtcttgccatgggtggcaccaccttcaagctggattttggtcatcgcggcctcaatcacccatgcggcaccactggacaggtggaaatcactagccagaaccatggttttgccattgatgcccagacactgccggccagtgttgaggtgacccatctcaacctcaacgaccgcaccgtggcggcgatggcccatcgcgagcagcctctctttggggtgcagtatcacccagaagccagccctggcccccatgatgccgatcatcacttcggccgttttgttgctcttatggcagaacgtcgctga

SEQ ID NO: 95362 - protein, 379 aa, Synechococcus sp. RS9916
MTSATPTVPAVLVLADGTVFEGLACGSRGSVVGEVVFNTGMTGYQEVLTDPSYSGQLVTFTYPELGNTGVNAEDQEADVPHARGLIARQLAPLPSNWRCSQTLPEWLDQHGVVGIHGIDTRALVRHLRDTGAMNGVISSDGRSPQVLLEELKSAPSMQGLNLADRVSTAEPYTWTSACAASFDQRLKPRPEHPYRVVAIDFGIKRAILDRLVGHGCEVTVLPASSSLETVLSHEPEGVFLSNGPGDPSAVTGGIALAKDLVEHKSLPLFGICLGHQILGLAMGGTTFKLDFGHRGLNHPCGTTGQVEITSQNHGFAIDAQTLPASVEVTHLNLNDRTVAAMAHREQPLFGVQYHPEASPGPHDADHHFGRFVALMAERR

SEQ ID NO: 95363 - DNA, 1140 bp, Vibrio sp. Ex25
  CDS (1)..(1140): transl_table=11
ttgggtaaattagcactgttagtcctagaagatgggacagtgttccacggagtgtccataggggcagatggtatttccgttggtgaagtcgtttttaatacctcgatgacggggtatcaagaaatcctcactgatccttcctattctcagcaaatcgtcacccttacttatcctcacattggcaataccggaaccacttccgaagatgaagaatcctcttccattcatgcacaaggccttgtgattcgcgatcttcctcttatcgcttctaacttccgtaatgaacaatccctctctgattaccttaagtctcaaaatatcgttggcatcgctgatattgatacgcgaaagctcactcgtatcttgcgtgaaaaaggtgctcaaaacggttgtatttttgcgggtaataacctagatgaagctttggctctagcgaaagcaaaagaattcccaggcttaaaaggaatggaccttgcaaaagaagttacaacgaaagaagcgtatcaatggaaacaaggttcgtggacgcttgaaggtggacttccagaggcgaaagatgacagcgagctgccataccacgtcgttgcttacgacttcggcgcaaaacgcaacatcctacgaatgttggttgaccgcggttgccgcttaacggttgttcctgctgaaacgtcagcggaagaagtgcttgcgatgaacccggacggtgttttcctatcaaatggccctggtgatccagaaccatgtacttacgcgattgaagcgacaaaagtattcctagaaaaaggcttacctatcttcggtatctgtttaggtcaccaaatccttgcgttagcgtcaggtgcacaaaccgtgaaaatgaagtttggtcaccatggtgcaaaccacccagtaaaagatttagagcgtaacgttgttatgatcacttcgcaaaaccacggctttgcggcagatgaagcaacgttaccggaaaacttacgtgctactcacgtatcgttatttgatggctctttgcaaggtattcaccgcacagacaagccagcatttagcttccaaggtcacccagaagcgagcccaggtccacatgacgcggcaccgctatttgaccactttatcgaactaatcaaaaaacacagcgcttaa

SEQ ID NO: 95364 - protein, 379 aa, Vibrio sp. Ex25
MGKLALLVLEDGTVFHGVSIGADGISVGEVVFNTSMTGYQEILTDPSYSQQIVTLTYPHIGNTGTTSEDEESSSIHAQGLVIRDLPLIASNFRNEQSLSDYLKSQNIVGIADIDTRKLTRILREKGAQNGCIFAGNNLDEALALAKAKEFPGLKGMDLAKEVTTKEAYQWKQGSWTLEGGLPEAKDDSELPYHVVAYDFGAKRNILRMLVDRGCRLTVVPAETSAEEVLAMNPDGVFLSNGPGDPEPCTYAIEATKVFLEKGLPIFGICLGHQILALASGAQTVKMKFGHHGANHPVKDLERNVVMITSQNHGFAADEATLPENLRATHVSLFDGSLQGIHRTDKPAFSFQGHPEASPGPHDAAPLFDHFIELIKKHSA

SEQ ID NO: 95365 - DNA, 1137 bp, Alteromonadales bacterium TW-7
  CDS (1)..(1137): transl_table=11
ttgactaaatccgctctgttagtcctagaagacggcacagtgtttcgcggtactgcaatcggcgctgacggcatgtcagtcggtgaagtggtattcaatacgtctatgactggttatcaagaaattttgactgacccttcgtacgcggaacaaatcgtaactttgacgtacccacatatcggtaatacgggtaccaacagcgaagacgaagaagcgaatcaaatatgggctaaaggcctagtgatccgtgatttgccactgctagcaagtaactttcgtaacgagcaatcgttagatgattacttgaaagaacgtaatattttaggtattgcggacatcgacaccagaaagctaacacgtattttgcgcgacaaaggcgctcaaaatggttgtattattgctggtgacgaactagacgaacaaaaagcgctacaagccgcgcaagccttcccaggcttaaaaggtatggatttagcaaaagttgtctcaaccaaggaaaattttgagtggcgcgaatcaagctggacattaggcgaggggtttaaaaccttagataccgccgatgaaaagtttcatgttgtagcctatgacttcggtgttaagcgtaatatattacgtatgcttgttgaccgtggttgtaaacttaccgtagtacctgcacaaactagtgctgctgacgtactcgcattaaaccccgatggtattttcttatctaatggccctggcgatcctgagccatgtacatacgcaattgacgcgataaaatcatttttagaaaccgacacacccatttttggtatttgtttaggtcaccagttattagcgcttgcttcaggtgctaaaacagaaaaaatgaaatttggccatcatggtggtaaccacccagttaaagatctagaccgcgatgtagtgatgatcacagcgcaaaaccatggttttgcagcccaagaatcaagcctaccaagcacgcttcgtgcaacacacaaatcactgtttgacggtacgcttcagggtattcatcgtacagataagccagcatttagttttcagggtcaccctgaggcaagtcctggcccgcatgatgcagccccattatttgaccacttcatcgatttgatgcaagcgcgtaaacactaa

SEQ ID NO: 95366 - protein, 378 aa, Alteromonadales bacterium TW-7
MTKSALLVLEDGTVFRGTAIGADGMSVGEVVFNTSMTGYQEILTDPSYAEQIVTLTYPHIGNTGTNSEDEEANQIWAKGLVIRDLPLLASNFRNEQSLDDYLKERNILGIADIDTRKLTRILRDKGAQNGCIIAGDELDEQKALQAAQAFPGLKGMDLAKVVSTKENFEWRESSWTLGEGFKTLDTADEKFHVVAYDFGVKRNILRMLVDRGCKLTVVPAQTSAADVLALNPDGIFLSNGPGDPEPCTYAIDAIKSFLETDTPIFGICLGHQLLALASGAKTEKMKFGHHGGNHPVKDLDRDVVMITAQNHGFAAQESSLPSTLRATHKSLFDGTLQGIHRTDKPAFSFQGHPEASPGPHDAAPLFDHFIDLMQARKH

SEQ ID NO: 95367 - DNA, 1140 bp, marine gamma proteobacterium HTCC2143
  CDS (1)..(1140): transl_table=11
ttgacagtaccagccatacttgccctagaggatggtagtattttccggggagtcgccattggtgccaccggacattcagtcggagaagtggtttttaataccgccatgactggctaccaggaaattttgactgacccctcttacgcgcgtcaaataatcacgttaacgtaccctcatataggtaacacgggaacgaatagcgaagacgaagaggctgccgatatctggtctgctggacttgtcatccgcgaccttccactgttggctagtagttttcgcaacgagcagtcgctgcaggattacttagtagcccgtaatgttatcggcatagcagatatcgatactcgtcggctcacccgaattctgcgggacaaaggtgcacagaacggctgcataatggccggtgacatcgacgaagaggcggcaatgaggtatgcgaaaggattcgacggcctcaagggcatggatctcgcaaaagtcgtttcgacaaccagcgaatacacatggcaacagggtagttgggactcagagcgtgagcaaagctacagggaatacagtgataatgactgtgattaccacgttgttgcttatgactttggtgtaaagcgcaatatattgagaatgttggttgaccgcggttgcaggttgacggttgtgccggcgcagacctcggctgccgacgtattggcgatgaaccccgacggcgtctttttatctaatggtcctggtgatcctgagccctgtacttacgcggtagaggcaattcagtgcttacttgaaaccgacattcctgtttttggaatttgcttggggcaccaattattggctattgcctcgggtgccaagacggtaaaaatgaaatttggtcatcatggggcgaaccacccagttcagaatttagaagatggcaccgtgttgattaccagtcagaatcatggcttcgccgccgatgagtcgactcttcctgataatctgcgagtgactcataaatcactgtttgatggttctcttcaaggcattcatcgaaccgataaagcagccttcagctttcaaggccacccggaagccagtccaggccctcacgatgccgcgccattgtttgaccattttattgagttaattcggcagcgcttgaattaa

SEQ ID NO: 95368 - protein, 379 aa, marine gamma proteobacterium HTCC2143
MTVPAILALEDGSIFRGVAIGATGHSVGEVVFNTAMTGYQEILTDPSYARQIITLTYPHIGNTGTNSEDEEAADIWSAGLVIRDLPLLASSFRNEQSLQDYLVARNVIGIADIDTRRLTRILRDKGAQNGCIMAGDIDEEAAMRYAKGFDGLKGMDLAKVVSTTSEYTWQQGSWDSEREQSYREYSDNDCDYHVVAYDFGVKRNILRMLVDRGCRLTVVPAQTSAADVLAMNPDGVFLSNGPGDPEPCTYAVEAIQCLLETDIPVFGICLGHQLLAIASGAKTVKMKFGHHGANHPVQNLEDGTVLITSQNHGFAADESTLPDNLRVTHKSLFDGSLQGIHRTDKAAFSFQGHPEASPGPHDAAPLFDHFIELIRQRLN

SEQ ID NO: 95369 - DNA, 1194 bp, marine gamma proteobacterium HTCC2080
  CDS (1)..(1194): transl_table=11
gtgactctttatgacagccgtgcgggccttgctgactgggagatgaatgtgtcaaacaccgctatcctcgcactagaagatggcacgatttttcgcggtgcttctgtgggtgcagaaggccagactaccggtgaggtggtatttaataccgctatgactggttatcaggaaattcttactgatccttcctacgcgcgacagattgtaactttaacttacccccatattggcaacacgggcgtgacctctgaagatgcggagtcgtcgggtgttcatgctgcagggctcgtgatacgagatctgcctctggttgccagcagctggcgcagtgagcaaagcctctctagttatctgtctggggagggcgtcgtggccattgctgatatcgatacgcgaaaactgacacggattctccgagataaaggtgccttgagtggctgtatcgtggcgggtgaagatcccgacgtagacgctgctctggctcaggctcgtggtttttccgggcttgtgggtatggatttggcgaaagaagtcaccacgcaggcgccctacacttgggaggaggggagctggcaatggggcggagatcagcgtccggcaccgtcttccaatttttccgttgtggcgctagatttcggcgttaagaggaatatcttaagaatgctggttgatcgaggttgttctctaaccgtacttccagctgagtctgacattgaaactgtttgtgcttatgcgcctgacggtatctttctgtctaatggtcccggagatccagagccttgcgattacgcgatcgaactcgcgcgtgctgcgatggcgcgtggaattccacttttcggtatctgtttggggcaccagattatggccttagcgagtggggctaatactgagaaaatgaaattcggtcaccacggcgcgaatcacccggtgcaaaagctcgccgatggcgccgtaatggtgacgagtcagaaccatggttttacggtctctgaacaggggttgccagagaccttaagtgtcactcacaggtcgctctttgatgggtccattcaaggtatagcccgcaacgacgtgcctgcttacagctttcagggccatcctgaagcaagtcccggtccacgagacgctgggcagttgttcgccccttttatacgcgccatgaaagatcggcgagccgagcaggagggcggttga

SEQ ID NO: 95370 - protein, 397 aa, marine gamma proteobacterium HTCC2080
MTLYDSRAGLADWEMNVSNTAILALEDGTIFRGASVGAEGQTTGEVVFNTAMTGYQEILTDPSYARQIVTLTYPHIGNTGVTSEDAESSGVHAAGLVIRDLPLVASSWRSEQSLSSYLSGEGVVAIADIDTRKLTRILRDKGALSGCIVAGEDPDVDAALAQARGFSGLVGMDLAKEVTTQAPYTWEEGSWQWGGDQRPAPSSNFSVVALDFGVKRNILRMLVDRGCSLTVLPAESDIETVCAYAPDGIFLSNGPGDPEPCDYAIELARAAMARGIPLFGICLGHQIMALASGANTEKMKFGHHGANHPVQKLADGAVMVTSQNHGFTVSEQGLPETLSVTHRSLFDGSIQGIARNDVPAYSFQGHPEASPGPRDAGQLFAPFIRAMKDRRAEQEGG

SEQ ID NO: 95371 - DNA, 1149 bp, Escherichia coli B
  CDS (1)..(1149): transl_table=11
ttgattaagtcagcgctattggttctggaagacggaacccagtttcacggtcgggccataggggcaacaggttcggcggttggggaagtcgttttcaatacttcaatgaccggttatcaagaaatcctcactgatccttcctattctcgtcaaatcgttactcttacttatccccatattggcaatgtcggcaccaatgacgccgatgaagaatcttctcaggtacatgcacaaggtctggtgattcgcgacctgccgctgattgccagcaacttccgtaataccgaagacctctcttcttacctgaaacgccataacatcgtggcgattgccgatatcgatacccgtaagctgacgcgtttactgcgcgagaaaggcgcacagaatggctgcattatcgcgggcgataacccggatgcggcgctggcgttagaaaaagcccgcgcgttcccaggtctgaatggcatggatctggcaaaagaagtgaccaccgcagaagcctatagctggacacaagggagctggacgttgaccggtggcctgccagaagcgaaaaaagaagacgagctgccgttccacgtcgtggcttatgattttggtgccaagcgcaacatcctgcggatgctggtggatagaggctgtcgcctgaccatcgttccggcgcaaacttctgcggaagatgtgctgaaaatgaatccagacggcatcttcctctccaacggtcctggcgacccggccccgtgcgattacgccattaccgccatccagaaattcctcgaaaccgatattccggtattcggcatctgtctcggtcatcagctgctggcgctggcgagcggtgcgaagactgtcaaaatgaaatttggtcaccacggcggcaaccatccggttaaagatgtggagaaaaacgtggtaatgatcaccgcccagaaccacggttttgcggtggacgaagcaatattacctgcaaacctgcgtgtcacgcataaatccctgttcgacggtacgttacagggcattcatcgcaccgataaaccggcattcagcttccaggggcaccctgaagccagccctggtccacacgacgccgcgccgttgttcgaccactttatcgagttaattgagcagtaccgtaaaaccgctaagtaa

SEQ ID NO: 95372 - protein, 382 aa, Escherichia coli B
MIKSALLVLEDGTQFHGRAIGATGSAVGEVVFNTSMTGYQEILTDPSYSRQIVTLTYPHIGNVGTNDADEESSQVHAQGLVIRDLPLIASNFRNTEDLSSYLKRHNIVAIADIDTRKLTRLLREKGAQNGCIIAGDNPDAALALEKARAFPGLNGMDLAKEVTTAEAYSWTQGSWTLTGGLPEAKKEDELPFHVVAYDFGAKRNILRMLVDRGCRLTIVPAQTSAEDVLKMNPDGIFLSNGPGDPAPCDYAITAIQKFLETDIPVFGICLGHQLLALASGAKTVKMKFGHHGGNHPVKDVEKNVVMITAQNHGFAVDEAILPANLRVTHKSLFDGTLQGIHRTDKPAFSFQGHPEASPGPHDAAPLFDHFIELIEQYRKTAK

SEQ ID NO: 95373 - DNA, 1324 bp, Arabidopsis thaliana
  CDS (7)..(1293)
atggccatggcaacaaggactctaggctttgttttgcctacgagcttatcttcccagccttccttcgaccgtcgcggcggtggatttagggtttctgtcatccgttgctccacttctccactcacttttcccacttctggtgttgtggagaaaccttggacttcgtacaatgctaggcttgtgttagaagatggttctatctggcctgctaagtcttttggtgctcctggaacccgtattgctgaattggtgtttaacacttccttgacagggtatcaagaaattttaactgatcctagttatgctgggcagtttgtgctaatgacaaacccacaaattggtaatactggtgtcaatcctgatgatgaagaatctgggcaatgctttcttactggtttggtgataagaaacctaagcattagtacctcaaactggagatgcacgaagacacttgctgattatctaaccgaaagggacatcatgggagtttatgatcttgacactcgagcaataacccgtcggttaagagaagatggtagtcttatcggggtgttgagcacagaacagtccaaaacagatgatgaacttctgcaaatgtctcgttcatgggatatcgtaggtattgatctaataagtgatgtttcatgtaaatctccctatgaatgggttgacaaaacaaacgctgaatgggatttcaacacgaattcacgagatgggaaatcctacaaagttattgcttacgattttggaatcaagcaaaacatcctaagacgcctttcatcttacggatgtcaaatcactgttgttccgtccacatttccagctgccgaggcgctgaaaatgaatccagatgggattttgttcagcaacggtcctggagacccttctgctgtgccatatgctgttgagacagttaaagagcttctcggtaaagtccctgtttacggaatctgtatgggccatcagttgcttggtcaagctttggggggtaaaaccttcaagatgaagtttggtcatcatggaggaaaccacccagttcgtaacaacagaactggtcaggtggagatcagtgctcagaatcacaactatgcggttgatccagcttcacttcccggaggcgtagaagtaacacatgtcaatctcaatgatggaagctgtgcgggtctatctttcccggaaatgaatgttatgtcactccagtaccaccctgaagcctcccctggacctcacgactctgataacgcatttagagagttcatagagcttatgaagagatcgaaacaaagctcctgatcaatgagaagtactctttgtttttgtacgt

SEQ ID NO: 95374 - protein, 428 aa, Arabidopsis thaliana
MATRTLGFVLPTSLSSQPSFDRRGGGFRVSVIRCSTSPLTFPTSGVVEKPWTSYNARLVLEDGSIWPAKSFGAPGTRIAELVFNTSLTGYQEILTDPSYAGQFVLMTNPQIGNTGVNPDDEESGQCFLTGLVIRNLSISTSNWRCTKTLADYLTERDIMGVYDLDTRAITRRLREDGSLIGVLSTEQSKTDDELLQMSRSWDIVGIDLISDVSCKSPYEWVDKTNAEWDFNTNSRDGKSYKVIAYDFGIKQNILRRLSSYGCQITVVPSTFPAAEALKMNPDGILFSNGPGDPSAVPYAVETVKELLGKVPVYGICMGHQLLGQALGGKTFKMKFGHHGGNHPVRNNRTGQVEISAQNHNYAVDPASLPGGVEVTHVNLNDGSCAGLSFPEMNVMSLQYHPEASPGPHDSDNAFREFIELMKRSKQSS

SEQ ID NO: 95375 - DNA, 1089 bp, Lactobacillus reuteri
  CDS (1)..(1089): transl_table=11
atgaaacgatatttaattctagaagatggtactgtctataccggcgagggttttggcgctaccaaggcaactcttggtgaggttgtcttcacaacagggatggtcggctatcaagaagcaattaccgatcaatcatttgccaatcagattttagtctttaccaatcctctcatcggtaactatgggattaatagtgaagataacgaaacattgtatccccaaatcaagggcgtaatttgtcatcatgtcgctcgtgttcccagcaactggcgcatgactgactcgctccctaatttcttagcaaagcaccacattcctggcctccaaggaattgatacacgtgaactagtccgtaagcttcgtcaatatggaacattgcgcggaattatgaccgataatgttaccgatatcaaagataagcttgaacagttaaaacaaacttcgccaacccagaacattattagcaaagtatctactaaagaatcctacgctaatccgggaactaagcgaactgttgttgttcttgacttcggaatgaaaaatagcattctccgtgaattaaataaaagaaactgcaatgcaattgtccttccttataacgcctcgatcagtgaaataatggtgttcaatccagacggcatcctcctttcgaacggtcctggtgatccacttgaaatgacaactattgcggaaactgtcgcagaattagaaaaacatgtgcccattttcggcatttgcatgggccatcaaatctttgccctagctaatggtgccaaaacttataagatgaaatttggtcaccgcggttttaaccatcctgtccgtaatcttaaaacaggaaaaatcgcatttacctctcaaaatcacggttttgcggttgatccatcctccattgatgatactgacctccaaatcacccaccttgaagtgaacgatggcacggttgaaggactccagcattcaaagtatcctgcattttccgttcagttccatccagacgctgcgccaggaccccacgatgctgaacagctttttgataaattcatggcattaattgacagtaataaggaggttctcacctatgcctaa

SEQ ID NO: 95376 - protein, 362 aa, Lactobacillus reuteri
MKRYLILEDGTVYTGEGFGATKATLGEVVFTTGMVGYQEAITDQSFANQILVFTNPLIGNYGINSEDNETLYPQIKGVICHHVARVPSNWRMTDSLPNFLAKHHIPGLQGIDTRELVRKLRQYGTLRGIMTDNVTDIKDKLEQLKQTSPTQNIISKVSTKESYANPGTKRTVVVLDFGMKNSILRELNKRNCNAIVLPYNASISEIMVFNPDGILLSNGPGDPLEMTTIAETVAELEKHVPIFGICMGHQIFALANGAKTYKMKFGHRGFNHPVRNLKTGKIAFTSQNHGFAVDPSSIDDTDLQITHLEVNDGTVEGLQHSKYPAFSVQFHPDAAPGPHDAEQLFDKFMALIDSNKEVLTYA

SEQ ID NO: 95377 - DNA, 1296 bp, Medicago truncatula
  CDS (1)..(1296)
atggcgacaaaagctttggccttcaccctatctctcaatgactgctttggttccaaatcgccacacactgcttcaaaagtttccgttttctctgtcagatgttccactggtaatggagaaaggccatggaaaaattcagatgctagacttgtgctagaagatggttcaatttggaaagctaaatcatttggtgcttcaggaacccaagttggtgaagttgttttcaatacatcattgactgggtatcaagaaattttaactgatcctagttatgctggacagtttgttctcatgacaaatccgcatattgggaatactggcataaattttgatgacgaggaatcaacgcagtgctttctttctggtctagtaattagaagtttgagtatcagcacctcaaattggagatgcgagaaagatttaggcgattacttaacagaaaggaatgtcatgggaatttatgatgttgatacacgggcaatcacacgcagattacgagaagatggaagccttattggtgttttgagcaccgacaattccaaaacagacgaggaattgctccagatgtctaaatcatgggatattgtcggtattgatctaataagtggagtatcgtgcaaatctccacatgaatggattgatagaacaagagaagaatgggagtttagctctagtgaagggcctagagacactttccatgtagttgcttacgattttggaatcaaacataatatacttaggcggctagcatcttatggctgtaaaatcactgttgtgccatctacatggccagcttctgaaactttgaagttaaatccagatggcgtgcttttcagcaacggccctggagatccatctgctgttccttacgctgttgagacagtaaagaatattattggtaaggtgcctgtttttgggatttgcatgggacatcaattgctaggccaggctttaggaggcacgacctacaagatgaaatttggtcaccatggaggaaatcatcctgttcgtaaccttcgaactggtcgtgttgaaattagttctcagaaccacaactatgcggttgaccctgctacactgcctaaaggagtagaggttactcatatcaatcttaacgacagtagttgtgctggccttgctttccctgctcgaaaagttgtgtctcttcaataccaccctgaagcatcccctggacctcatgattctgacaacgcttttaaggagtttgtagagctaatgaagcaagggaaaagcaaaacatcgaatgaaaacctacaccaactacaatcggtgtag

SEQ ID NO: 95378 - protein, 431 aa, Medicago truncatula
MATKALAFTLSLNDCFGSKSPHTASKVSVFSVRCSTGNGERPWKNSDARLVLEDGSIWKAKSFGASGTQVGEVVFNTSLTGYQEILTDPSYAGQFVLMTNPHIGNTGINFDDEESTQCFLSGLVIRSLSISTSNWRCEKDLGDYLTERNVMGIYDVDTRAITRRLREDGSLIGVLSTDNSKTDEELLQMSKSWDIVGIDLISGVSCKSPHEWIDRTREEWEFSSSEGPRDTFHVVAYDFGIKHNILRRLASYGCKITVVPSTWPASETLKLNPDGVLFSNGPGDPSAVPYAVETVKNIIGKVPVFGICMGHQLLGQALGGTTYKMKFGHHGGNHPVRNLRTGRVEISSQNHNYAVDPATLPKGVEVTHINLNDSSCAGLAFPARKVVSLQYHPEASPGPHDSDNAFKEFVELMKQGKSKTSNENLHQLQSV

SEQ ID NO: 95379 - DNA, 5601 bp, Aspergillus oryzae
  CDS (1)..(5601)
atggatctcaccagtggcgctgtgatcccccccgcctcgtctcgagtacgtggcggcagcgggaagctgttcgctctcgagctcgaggatggcactgtctaccagggttacagctttggcgctgagaagagcgtggcaggagagctggttttccagactggcatggtaggttacccggagtcagtgactgacccctcctatcgtggccagatcctggtcgtcactttccccttggtgggcaactatggtgttccctctcgggagaccatggacgagttgttgaagacattaccaaaatactttgagtctactgagattcacattgcggcactcgtcgttgccacctacgccggagaggactactcacacttccttgctgagtcctccctaggacaatggctcaaggaacagggtgttcctgccatgcacggagtcgacacccgtgctctgacaaagcgcatccgtcagaagggtagcatgcttggccgcatgctgctccagaagtccgatgaaacattggaggaggctccagtggacaaggacagctggaggtcgtacttcgagcagactgagtgggttgacccgaataagaagaacctcgtgagcgaagtctccattcgggaaccacgtcttttctcccctcctgaggatgttgctctcaaacatccttctggtcgtccggttcgcgttctgtgcttggacgttggtctgaaattcaaccagctgcgctgcctgcttgctcggggcgttgaagtcttggtcgtcccttgggactatgacttccccacccttgccggcaaggactacgatggtctctttgtctccaacggtcctggtgaccctgccacactgaccactacggttaacaacctgtcaaagaccctcaaggaggcacggacacctgtgttcggtatctgtctgggtcatcagttgattgcccgctctgtcggtgctcagaccttgaagatgaagttcggtaaccgtggtcacaatatcccttgcacgagcatggtgaccggcaagtgtcacatcacctctcagaaccacggttatgccgtcgattccacaagcctccccgaggactgggaggagctgtttgtgaatgccaatgatggcagtaacgaaggtatccggcacaccagccgtccgttcttcagtgtccagttccaccccgagagcactcctggtcctagggataccgagtatctcttcgatgtgttcatcaacagcatcaaggatactctgacatccccagaagctatcaacaaccccgttaccttcccaggtggtaccatggaagagaacatcaaagcctctcctcgtgtctccgtcaagaaggttttgattttgggaagcggtggtcttagcattggtcaagctggagaattcgattactccggaagtcaggctatcaaggccttgaaggaagagggaatctacactgtcctgattaacccgaacattgccaccattcagacctccaagggattggcggacaaggtgtatttccttcctgtgaatgcggatttcgtgcgaaaggttatcaagcacgagcggcccgatgccatctacgtcacttttggtggccagaccgcgctgcaagtcggtatccagctcaaggacgagtttgagtcccttggtgtcaaggttctgggtacaccaatcgatactatcatcaccactgaggatcgtgagctctttgctcgtagcatggactcgattaacgagaaatgtgccaagtcggcttcggcatccaacctcgaggaggccctccgagtcgtggaagatatcaaatttcctgtcatcgtccgtgctgcttacgctctcggaggtctcggcagtggtttcgccaataacatggaggagctgaaggacctttgcacaaaggcgtttgccgccagtccccaggtcttgattgagaagagtatgaagggctggaaggaaatcgagtacgaggttgtccgtgacgccagagacaactgtatcaccgtttgtaacatggaaaacttcgatcctctcggtatccataccggtgactccattgttgttgcaccgtcgcagactctctctgatgaggattacaacatgctgcgtacaaccgctgtcaatgttatccgtcatcttggcgttgttggagagtgcaatatccaatatgcgctcaacccattctcgaaggagtactgcatcattgaagtgaatgctcgtctgtcaagatcctctgctcttgcttcaaaggctactggttatcctcttgctttcattgcggccaagcttggtttgggcattcctctaaatgagatcaagaactctgttaccaaggtcacttgcgcttgcttcgagccttcccttgactactgcgttgtgaagattccccgctgggatcttaagaagttcactcgtgtgtctactcagcttggctcctctatgaagagtgttggtgaagtcatgagcattggacgaaccttcgaggaagcgattcagaaggccattcgttccgttgatttccacaatcttggtttcaacgagaccagtgcacttatgtccatcaagggcgaactgcaaactccatccgatcaacgtttgttcgccatcgccaatgcaatggccgctggatatagcgtcgatgacatctggaaattaacccagatcgataagtggttccttagcagacttaagggtctcagtgactttagcaagcttatgtctactcataatgccaccactgttcccagacctcttattcgacaggccaagcagctgggtttctccgatcgtcaacttgccaagttccttagctccaacgagctagccatccgtcgcatgcgtgttgaagctggcattatccctattgtcaagcagattgataccgttgctgctgagttcccctcggtaacgaactatctgtatcttacttacaatgcctctgagcatgacgttgccttcgacgataagggtatcatggtcttgggatctggtgtttacagaattggttcctccgtcgagttcgactggtgctctgtccgtactatccgtacgctccgtgaacagggctacaaaaccgtcatggtcaactataaccctgaaaccgttagtacagattatgacgaggccgatcgcttgtactttgagaacattaacttggagactgtcttggatatctaccagttggaatcctccagcggtgttatcatgtccatgggtggtcagactccaaacaacatcgccctgcctctccaccgtctcaatgtccgcattctcggaacctctcctgagatgatcgacggagctgagaacagatacaagttctcgcgtatgctcgaccgtatcggtgtcgatcagccggcgtggaaggagcttactagcatcgaggaagcaaccggcttctgcgacaaagttggctaccctgtgcttgtccgaccctcctatgtgctttcaggagctgccatgaacactgtctactctgagcatgatcttgctagctatcttaaccaagccgctgaggtttcgcgcgagcatcctgttgttatcaccaagtacattgagaatgccaaggagattgagatggacgctgtggcacttaacggtaccatggttggacattttatctccgagcacgtcgagaatgctggtgtccactcgggtgacgccacattgatcttgcccccccaggatctggacccggagaccgtccggcgcatcgaggaggctactaggaagatcggtaatgcccttaatgtcactggtccttacaacatccaattcatcgcaaaggacaatgatatcaaggtcatcgaatgtaacgtcagagcttctcgttccttcccattcgtttccaaagtcatgggagtcgacctcattgagatggccaccaaggcgatgctcggtgttcccttccaggaataccctcctgtcagtgttcctaaggactatgttggcgtgaaggtgccccagttctccttctcccgtctctctggagccgatcccgtcttgggtgtcgagatggcctccaccggtgaagttgcttccttcggccgcgacaagtacgaagcttatctcaaggcacttttgtcgactggtttccgcctgccgaagcgcaatgtgctgttctctatcggttcatacaaagagaaactcgagatgttaccatcaattcgcaagctgcaccagattgggttcaacctctttgctacctctggtaccgccgatttcctgaaggagaacggtgtccctgttaagtacctcgagatcctgccaggccaagaggatgaactcaagtccgagtactcgctcactcagcacttgtcgaacaacctcatcgacctctacatcaatttgccgtctagcaaccgattcaggcgccctgccaactatatgagtaagggttaccgtactcgccgaatggcggttgactaccaaacccccttggtcaccaatgtcaagaacgccaagatcctgattgaagctattgctcgtcactatgacctggccgtccagaccattgattaccagaccagccatcgcactgtcacccttcctggcttgatcaacgttgccgctttcgtgcccggcctcatgactcctggctccaaggacttcgagcctgtcggtgaacttggacctcccttgtatcccaccgtctcgcaaacttcctctcctctgcatgaaatgctctcccggtcaactttcagacagaagcatgtgctctctgtcggccagttcactcgtgccgacctacacttgctcttcactgtggctcaagagatgcgtcttggggttcaacgccagggcgtcctcgatgttctgaagggccgtgtcctttgtaccctcttttatgagccttcgaccagaacgtcggcttcatttgacgctgctatgcagcgtctgggaggacgtaccattgccatctctacggaacattcttcgacaaagaagggtgagaccttgcaagataccctccgaaccctcggctgctacggagacgctgtcgttctccgccaccctgacccggccagcactgaagtcgctgccaagttctcccccgttcccgtcatcaacggtggaaatggaagtgtcgagcaccccacgcaggcattccttgatctcttcaccatccgcgaagaactgggaactgttactggcttgacgattaccttcactggtgacctgagatatggtcgcaccgtccattctctcattaagctgctccagttctacgacgtgcgggtgcagctcgtcgcccctaaggatttgtccttgccggaagaggttcgtcagcaagttattgcttctggccagctggttgtggagtccgaggaattgactccggagattgttgcccgctccgacgttttgtactctacgcgcgtccagaaggagcgtttcgccgacctggagcagtatgagcgtctcaagaacagcttcgtcatcgacaatgctcttctcaagcacgctaagagccacatggttgtgatgcaccccttgcccagaaatgcggagattgcggaggaggtcgacttcgaccagcgggcggcttatttcagacagatgagatatggcctctactgtcgcatggctttgcttgcattgattctggcgccttag

SEQ ID NO: 95380 - protein, 1866 aa, Aspergillus oryzae
MDLTSGAVIPPASSRVRGGSGKLFALELEDGTVYQGYSFGAEKSVAGELVFQTGMVGYPESVTDPSYRGQILVVTFPLVGNYGVPSRETMDELLKTLPKYFESTEIHIAALVVATYAGEDYSHFLAESSLGQWLKEQGVPAMHGVDTRALTKRIRQKGSMLGRMLLQKSDETLEEAPVDKDSWRSYFEQTEWVDPNKKNLVSEVSIREPRLFSPPEDVALKHPSGRPVRVLCLDVGLKFNQLRCLLARGVEVLVVPWDYDFPTLAGKDYDGLFVSNGPGDPATLTTTVNNLSKTLKEARTPVFGICLGHQLIARSVGAQTLKMKFGNRGHNIPCTSMVTGKCHITSQNHGYAVDSTSLPEDWEELFVNANDGSNEGIRHTSRPFFSVQFHPESTPGPRDTEYLFDVFINSIKDTLTSPEAINNPVTFPGGTMEENIKASPRVSVKKVLILGSGGLSIGQAGEFDYSGSQAIKALKEEGIYTVLINPNIATIQTSKGLADKVYFLPVNADFVRKVIKHERPDAIYVTFGGQTALQVGIQLKDEFESLGVKVLGTPIDTIITTEDRELFARSMDSINEKCAKSASASNLEEALRVVEDIKFPVIVRAAYALGGLGSGFANNMEELKDLCTKAFAASPQVLIEKSMKGWKEIEYEVVRDARDNCITVCNMENFDPLGIHTGDSIVVAPSQTLSDEDYNMLRTTAVNVIRHLGVVGECNIQYALNPFSKEYCIIEVNARLSRSSALASKATGYPLAFIAAKLGLGIPLNEIKNSVTKVTCACFEPSLDYCVVKIPRWDLKKFTRVSTQLGSSMKSVGEVMSIGRTFEEAIQKAIRSVDFHNLGFNETSALMSIKGELQTPSDQRLFAIANAMAAGYSVDDIWKLTQIDKWFLSRLKGLSDFSKLMSTHNATTVPRPLIRQAKQLGFSDRQLAKFLSSNELAIRRMRVEAGIIPIVKQIDTVAAEFPSVTNYLYLTYNASEHDVAFDDKGIMVLGSGVYRIGSSVEFDWCSVRTIRTLREQGYKTVMVNYNPETVSTDYDEADRLYFENINLETVLDIYQLESSSGVIMSMGGQTPNNIALPLHRLNVRILGTSPEMIDGAENRYKFSRMLDRIGVDQPAWKELTSIEEATGFCDKVGYPVLVRPSYVLSGAAMNTVYSEHDLASYLNQAAEVSREHPVVITKYIENAKEIEMDAVALNGTMVGHFISEHVENAGVHSGDATLILPPQDLDPETVRRIEEATRKIGNALNVTGPYNIQFIAKDNDIKVIECNVRASRSFPFVSKVMGVDLIEMATKAMLGVPFQEYPPVSVPKDYVGVKVPQFSFSRLSGADPVLGVEMASTGEVASFGRDKYEAYLKALLSTGFRLPKRNVLFSIGSYKEKLEMLPSIRKLHQIGFNLFATSGTADFLKENGVPVKYLEILPGQEDELKSEYSLTQHLSNNLIDLYINLPSSNRFRRPANYMSKGYRTRRMAVDYQTPLVTNVKNAKILIEAIARHYDLAVQTIDYQTSHRTVTLPGLINVAAFVPGLMTPGSKDFEPVGELGPPLYPTVSQTSSPLHEMLSRSTFRQKHVLSVGQFTRADLHLLFTVAQEMRLGVQRQGVLDVLKGRVLCTLFYEPSTRTSASFDAAMQRLGGRTIAISTEHSSTKKGETLQDTLRTLGCYGDAVVLRHPDPASTEVAAKFSPVPVINGGNGSVEHPTQAFLDLFTIREELGTVTGLTITFTGDLRYGRTVHSLIKLLQFYDVRVQLVAPKDLSLPEEVRQQVIASGQLVVESEELTPEIVARSDVLYSTRVQKERFADLEQYERLKNSFVIDNALLKHAKSHMVVMHPLPRNAEIAEEVDFDQRAAYFRQMRYGLYCRMALLALILAP

SEQ ID NO: 95381 - DNA, 1086 bp, uncultured archaeon GZfos14B8
  CDS (1)..(1086): transl_table=11
atgaaagcaattctcgcacttgaagatggaaccgtagtagagggagaaggttggggcgcagaaggcaccgcattaggcgaactcgtatttgcaaccccgtttacgggttacgaagaagcactgactgacccttcgtataagggacagatattaatgcccacttacccgctcatcgggaactacggtgtgagcggtgctaaattccaatcggaagggataaaagtagaaggcttcgtggtaagggagaaatgcgattttccttcgcattataaaattaagcgcagtatagaccaatttttgagagaagaaggagtgccgggaatatgcgaaatagatacaaggatgctgacgataaaaacgagacaatacggcatgatgaaagcatgtttgaaagtggtagaagattgcagtgaagatgaaaatgcgaatgctttagaacttgcaaaaactcaacccgatatctcggagcttgatttgatagagcaggttacgtgcgagaaacattataggataaaagggaagggaagaaggatagcagtacttgatctgggtgtgaagaggaacatactgaagaacttagcaaaaagggatttggacattttcgtgtttccagcaaacgctgaggaatcggaaataagggattcagaaccagatgctttgctgctttcaaacggacctggtgacccaaagagaggaaaaaatgcgatgagtgtggtaaaaaatttcgccggtgagatacctattttcggtatttgtcttggcttacagataatagcgcttgctctcggttgcgacacgtataaactaaaattcgggcatcggggtgcgaaccagcccgtgaaggacatcaaaagcgggcgtgtgtacataacggcacagaatcatggttttgcagttgataaagactcgatggacggtatagcggaactaacgcagataaatgcgaatgatgatacagttgaaggcttcgaggaccattatctgggcataaaatgtgtgcagtatcatccggaagcgagtccaggtccgtgggatacggagaagatgttctttgaaaacttttttgcaagcaaaaacctttactaa

SEQ ID NO: 95382 - protein, 361 aa, uncultured archaeon GZfos14B8
MKAILALEDGTVVEGEGWGAEGTALGELVFATPFTGYEEALTDPSYKGQILMPTYPLIGNYGVSGAKFQSEGIKVEGFVVREKCDFPSHYKIKRSIDQFLREEGVPGICEIDTRMLTIKTRQYGMMKACLKVVEDCSEDENANALELAKTQPDISELDLIEQVTCEKHYRIKGKGRRIAVLDLGVKRNILKNLAKRDLDIFVFPANAEESEIRDSEPDALLLSNGPGDPKRGKNAMSVVKNFAGEIPIFGICLGLQIIALALGCDTYKLKFGHRGANQPVKDIKSGRVYITAQNHGFAVDKDSMDGIAELTQINANDDTVEGFEDHYLGIKCVQYHPEASPGPWDTEKMFFENFFASKNLY

SEQ ID NO: 95383 - DNA, 1086 bp, uncultured archaeon GZfos14B8
  CDS (1)..(1086): transl_table=11
atgaaagcaattctcgcacttgaagatggaaccgtagtagaaggagaaggttggggcgcagaaggaaccgcattaggcgaactcgtatttgcaaccccgtttacgggttacgaagaagctctgaccgacccttcgtataagggccagatattaatgcccacatatccgctcatcgggaattatggcgtgagcggtgctaaattccaatcggaagggataaaagtagaaggtttcgtggtaagggagaaatgcgattttccttcgcattataaaattaagcgaagtgtagaccaatttttgagagaagaaggagtgccgggaatatgcgaaatagatacgaggatgctgacgataaaaacgaggcaatacggcacgatgaaagcgtgcttgaaagtggtagaggattacagtgaagatgaaaatgcgaatgctttagaactcgcaaaaactcaacccgatatctcggagcttgatttggtagagcaggttacgtgcgaggaatattacaggataaaagggaagggaaaaaggatagcagtacttgatctgggtgtgaagaggaacatactaaagaacttagcagaaagggatttggacatttttgtgttcccggcaaacatcgaggaatccgagataagaagtttggaacccgacgctttgctgctttcaaacggacccggtgacccgaagcgggggaaaaatgcaatgagagtggtaaaaaatttcgcgggtgtgatacccattttcggtatttgtcttggcttacagataatagcgcttgcgcttggttgcgacacgtataaactaaaattcgggcatcggggtgcgaaccagcccgtgaaggacctcaaaagtgggcgtgtgtacataacggcacagaatcatggttttgcagttgataaagactcgatggacggtgtagcggaactaacgcagctaaatgcgaatgatgatacagttgaaggctttgaggatcattatctgggcataaaatgtgtgcaatatcacccagaggcaagtcccggcccgtgggatacggagaagatgttctttgaaaacttttttgcaagcaaaaacctttactaa

SEQ ID NO: 95384 - protein, 361 aa, uncultured archaeon GZfos14B8
MKAILALEDGTVVEGEGWGAEGTALGELVFATPFTGYEEALTDPSYKGQILMPTYPLIGNYGVSGAKFQSEGIKVEGFVVREKCDFPSHYKIKRSVDQFLREEGVPGICEIDTRMLTIKTRQYGTMKACLKVVEDYSEDENANALELAKTQPDISELDLVEQVTCEEYYRIKGKGKRIAVLDLGVKRNILKNLAERDLDIFVFPANIEESEIRSLEPDALLLSNGPGDPKRGKNAMRVVKNFAGVIPIFGICLGLQIIALALGCDTYKLKFGHRGANQPVKDLKSGRVYITAQNHGFAVDKDSMDGVAELTQLNANDDTVEGFEDHYLGIKCVQYHPEASPGPWDTEKMFFENFFASKNLY

SEQ ID NO: 95385 - DNA, 1698 bp, Nicotiana tabacum
  CDS (41)..(1339)
ggcacgagctcgtgccgaattcggcacgagagaaagcgctatggattgttcgattaggattcagaatccgttgtccaccacgacaataaccagcgcattgttttctaataaaaagtctgcaaattttagggttttcaccgttggatgttcttctaaaatcctttcctctgatggtgcaccatctggtctggttgaaagaccatggaaggtagcagatgctagacttgttctcgaggatggttcaatttggaaggccaaatcatttggtgcttctggaacccaagttggagaagttgtttttaatacatccttaactgggtatcaggagatccttactgatcccagttatgcaggccagtttgtcttgatgacgaaccctcatatcgggaatactggggtcaattttggcgatgaagaatcgatgcagtgctttcttgcaggattagtcattagaagtttaagcatcagcacctcaaattggagatgcaaagagacacttgatgagtatttggctaaaaggaacatcatgggtatatatgatgtagacactcgcgcaattacgcgaagattgagacaagacggaagcctcattggagtcctgagcacggaaaattcaaaaactgatgaagaacttctcgaaatgtctcgtacatgggacattgtgggtgtggatttaatcagtggtgtttcatgcaaatctccttatgaatgggttgatagaacagcctcagattgggattttaatgataatggaagaaataaagaaacttttaatgttgttgcatatgattttggaatcaagcataatatacttcggcgcttagcatcctatggctgtaaaatcactgttgttccttcaacatggccagcgtctgaaactctaaagatgaaacccgatggggttctcttcagcaatgggccaggagatccctctgcagttccctatgcagttgaagcggtaaaagaacttattggaaaaattcctgtttttggcatttgtatgggtcaccagttacttggtcaagcattggggggtaagacattcaaaatgaaatttggtcatcatggaggaaaccatcctgttcgaaaccttcgaaatggctgcgtcgagatcagtgctcagaatcacaactacgctgttgaccctgagtctcttccagaaggtgtagaggtgactcatgtaaatttaaatgatggaagctgtgctggtcttgcctcctttaaaatgaagctgatgtcacttcaataccatcccgaagcatctccaggacctcatgattcagatcctgtattcggggaatttatacaactcatgaagcaagaaaaagtgaaggcataagccaattgccctgaagagcctgaagcaacagtcatgtttgaaggaaccacattccggaaaagagaatttcgatgagacttgagtcagagcaatctgtcgtgctgcacctcttcttgccataaatcaagtttgagcaattcgtcgagctgcacctctttgcaattatatcgatggatatatatgtatggttctaattttgttcaagttgcggctgcgcctttatctagtctaaagacataatactaaatttatttggtgtgtgtaatagtactctgtggtatggaacttgtaataatacacttgtttccatcttaagcaaagattcacttagcttttgataaaaaaaaaaaaaaaaaaaa

SEQ ID NO: 95386 - protein, 432 aa, Nicotiana tabacum
MDCSIRIQNPLSTTTITSALFSNKKSANFRVFTVGCSSKILSSDGAPSGLVERPWKVADARLVLEDGSIWKAKSFGASGTQVGEVVFNTSLTGYQEILTDPSYAGQFVLMTNPHIGNTGVNFGDEESMQCFLAGLVIRSLSISTSNWRCKETLDEYLAKRNIMGIYDVDTRAITRRLRQDGSLIGVLSTENSKTDEELLEMSRTWDIVGVDLISGVSCKSPYEWVDRTASDWDFNDNGRNKETFNVVAYDFGIKHNILRRLASYGCKITVVPSTWPASETLKMKPDGVLFSNGPGDPSAVPYAVEAVKELIGKIPVFGICMGHQLLGQALGGKTFKMKFGHHGGNHPVRNLRNGCVEISAQNHNYAVDPESLPEGVEVTHVNLNDGSCAGLASFKMKLMSLQYHPEASPGPHDSDPVFGEFIQLMKQEKVKA

SEQ ID NO: 95387 - DNA, 1389 bp, Oryza sativa
  CDS (1)..(1389)
atggcggcgcctccggccacggcctccgcgccctccctgcgcccgtccgcggccagcccacgcgccgccgccgctcggtcggtcgccgtcccctcagggcctcgcaccgtcggcccgaggcgagacgggggccgcttcctcggcgtccgtgctgccaaggctgtcagtggcgtgcagagtggtaccgtggtggatgatggagtgcaaagaccatggaagctcagcgatgctcggctcgttcttgaggatggttcagtttggaaggccaagtcttttggtgcttcaggaacacaagttggtgaagtggtatttaatacatctttgacagggtatcaagagattttgactgatccaagctatgctggtcaatttgtcctcatgaccaacccacatattggaaacactggtgttaatcctgatgatgaagaatcgaaccgatgtttccttgctggtctgatcataaggaatctaagcatatgtacatccaactggcgatgcacagaaacacttgaagagtatctgatgaagagaaacattatgggaatatatgatgtggacacacgcgccataacacggagattacgagaagatggtagtctaattggtgtcttaagtactgatcaatctcggaccgatgatgagttgttggaaatggcaaaaaattggaaaattgttggtgttgatttgattagtggtgtcacatgcgatgctccatatgaatggtcagacaagactgattcagagtgggaattcaagaagggtcaatcgactgaaagttttcatgtggtcgcatacgattttggaatcaagcacaatattttgagacgtttgacgtcatatggatgcaagataactgttgttccagccaattggcctgcttctgaggtacttaacttgaagcctgatggtgtgttttttagcaatggtcctggagatccagctgcagttccatatgctgtgaagacagtacaagaaataatagggaaggttcctgtgtttggcatctgtatgggccaccaattgattgggcaagctcttggtgggaagacatttaaaatgaagtttggtcatcatggaggaaatcatcctgtttgtgaccttcgaagtggacgtgtcgacataagtgcacaagctgttaggtatatccaatttaatcaactactccctccgtttcacaataaccataattatgctgttgacccagagtcacttccagaaggggtgaaagtaacacatatcaatctcaacgataatagctgtgccggccttcagtaccctaagatgaaacttttgtctcttcagtaccatccagagtcctcacccgggccgcatgattctgacttggcttttggtgaatttatagagatgatgaagaacaacagattgtga

SEQ ID NO: 95388 - protein, 462 aa, Oryza sativa
MAAPPATASAPSLRPSAASPRAAAARSVAVPSGPRTVGPRRDGGRFLGVRAAKAVSGVQSGTVVDDGVQRPWKLSDARLVLEDGSVWKAKSFGASGTQVGEVVFNTSLTGYQEILTDPSYAGQFVLMTNPHIGNTGVNPDDEESNRCFLAGLIIRNLSICTSNWRCTETLEEYLMKRNIMGIYDVDTRAITRRLREDGSLIGVLSTDQSRTDDELLEMAKNWKIVGVDLISGVTCDAPYEWSDKTDSEWEFKKGQSTESFHVVAYDFGIKHNILRRLTSYGCKITVVPANWPASEVLNLKPDGVFFSNGPGDPAAVPYAVKTVQEIIGKVPVFGICMGHQLIGQALGGKTFKMKFGHHGGNHPVCDLRSGRVDISAQAVRYIQFNQLLPPFHNNHNYAVDPESLPEGVKVTHINLNDNSCAGLQYPKMKLLSLQYHPESSPGPHDSDLAFGEFIEMMKNNRL

SEQ ID NO: 95389 - DNA, 1212 bp, Medicago sativa
  CDS (1)..(1212)
atgtttggcagcaagccgtatcaagccaaaacccagccagcccaggaggttgttttgactactcaggaatcccttcctgccccgaagaaggccattctggtccttgccgacggtagtgtgtttcgtggtaccgctattggtgccgagggtttatctgttggtgaggtggtgttcaacaccgcgatcaccggttaccaggaaatccttaccgacccatcctatgcccagcaaatcgttaccctgacttacccccatatcggaaataccggtaccaacactgaagacgaagaatgtgagcgcatttgggctactggcctggtgattcgcgacttgccgctactggcgagcaacttccgtaatcaggaaagcctctctgactatctgaaagcgcgcaacgtaatcggcattgctgacattgatactcgtcgcctgacccgcttgttgcgtgacaaaggtgcacaaaacggttgcctgatggctggtgatgatgttgatgaagccaaggctctcgctgcagcaaaagccttcggtggtttgaaaggtctggacctggccaaagaggtgactgttagcgagtcctacagctggaatgaaagcagctggaaattgggcgagggtcacacagcgctgactggcgcgaaaaaatttaaagtggttgcctacgacttcggtgtcaagcgcaatatcctgcgtatgttggcagatcgcggttgcgacctgactgttgttcctgcaaaaactaccgccgcagaagtgttggcgttgaatccggatggtattttcctttccaatggccctggtgatcctgagccatgtacttacgccattgacgctatcaaagctttccttgaaaccgatattccggtattcggaatttgccttgggcatcaactgctggcgctggcatccggtgcccaaacgatcaagatgaaatttggccatcacggcggcaaccatccggtacaaaacctggataccaaacgtgtgttgattactgcccaaaaccacggttttgctgtggaagaaagcagcttgcctgcgaatctgcgtgcgacccacaaatcgctgttcgacggttctttgcaaggtatccatcgcactgataagcccgcgttcagcttccaggggcaccctgaagcaagccccggcccacacgaagccgatactttgttcgaccactttattgaattgatgcaagcccgtaagggctaa

SEQ ID NO: 95390 - protein, 403 aa, Medicago sativa
MFGSKPYQAKTQPAQEVVLTTQESLPAPKKAILVLADGSVFRGTAIGAEGLSVGEVVFNTAITGYQEILTDPSYAQQIVTLTYPHIGNTGTNTEDEECERIWATGLVIRDLPLLASNFRNQESLSDYLKARNVIGIADIDTRRLTRLLRDKGAQNGCLMAGDDVDEAKALAAAKAFGGLKGLDLAKEVTVSESYSWNESSWKLGEGHTALTGAKKFKVVAYDFGVKRNILRMLADRGCDLTVVPAKTTAAEVLALNPDGIFLSNGPGDPEPCTYAIDAIKAFLETDIPVFGICLGHQLLALASGAQTIKMKFGHHGGNHPVQNLDTKRVLITAQNHGFAVEESSLPANLRATHKSLFDGSLQGIHRTDKPAFSFQGHPEASPGPHEADTLFDHFIELMQARKG

SEQ ID NO: 95391 - DNA, 1116 bp, Aquifex aeolicus
  CDS (1)..(1116): transl_table=11
atgcggaaaactgccattttggcgcttgaggacggttcttactttgtcggttattcctttggggctgaaggagaaacaggcggagaactcgtattcaacacatccatgacgggatatcaggaaatcctcacagacccttcctacaagggacagatagtcgtaatgacctacactcagataggaaactacggcgtgaacgatgaagatattgagagcaaaagcgttcaggtgaacggatttgtagtaaaggaagccttcttcaggtactcaaactggagggcaaaaaagagcttagacgaatacctgaaggaaaacaacgtagtcggaatatacgggatagacacgagggcacttgttaaaaagataagggaaaaggggagtatgaaaggtgttatctcaacggtggaaaaagacccaaaaaagctcgttcagaaggcaagagaactgcctgacatttctgaacagaacctcgtggaagaagtttccgctaaagatatttactactggaatcagggagattatgacccgaggagaggattcctatacagagaaaatgaaaaacctctcgtagcggtaatagactttggtgtaaagtttaacattttaaggagactcgttagtgaaggggcaaaggttgtcgtagttcctcccgaaaatgcaaaagaagccattgagaagataaatccagacgctatatttctatcaaacggtcctggggatccagaaagagttatatcaggaataagactcactcgcgagtacatggaaaagaaacccataatggggatatgcttgggttgtcaaattatcggtcttgccctcggcgggaaaacctataaactcaagttcgggcatcacggaggaaatcatcctgtaaaagacctaagaacgggaaagatagagataaccgctcagaatcacaattttgcaattgaccctgaaagcttgccggaagatgttgaagttacccacttaaatctcctggacaacactgttgaaggaataaaacacaagcaccttcccatattcgccgttcagtaccaccccgaaaactctcccggccctcatgactcttactacttatttaaagaattcgttaaaatggctcagggatga

SEQ ID NO: 95392 - protein, 371 aa, Aquifex aeolicus
MRKTAILALEDGSYFVGYSFGAEGETGGELVFNTSMTGYQEILTDPSYKGQIVVMTYTQIGNYGVNDEDIESKSVQVNGFVVKEAFFRYSNWRAKKSLDEYLKENNVVGIYGIDTRALVKKIREKGSMKGVISTVEKDPKKLVQKARELPDISEQNLVEEVSAKDIYYWNQGDYDPRRGFLYRENEKPLVAVIDFGVKFNILRRLVSEGAKVVVVPPENAKEAIEKINPDAIFLSNGPGDPERVISGIRLTREYMEKKPIMGICLGCQIIGLALGGKTYKLKFGHHGGNHPVKDLRTGKIEITAQNHNFAIDPESLPEDVEVTHLNLLDNTVEGIKHKHLPIFAVQYHPENSPGPHDSYYLFKEFVKMAQG

SEQ ID NO: 95393 - DNA, 1077 bp, Archaeoglobus fulgidus
  CDS (1)..(1077): transl_table=11
atgaaggccgctttggctttggaggatgggacgtatctcgaaggtaaggccttcggggcggagaggggtgggctgggcgagatagtcttctgcacctccatgacgggctacgttgaagctctaactgacccaagctacaaggggcagattctgatgatgacctacccgctcataggcaactacggagtgaacagggaagattttgagagcgatggggtcaaggttgagggatttgtggttaaggagctctgcaagaatccgagcaactggagaagcgagatgagcgttgatgagctgctgaagcagtacgacgttccggggatagagggagttgacacaagaatgcttaccagaaagataagaatttacggctccatgaaggctgcaattggcataggggacgttgacagggagaagcttgtcagaaaggcggttgagcagccctttataagcgacattgaccttgtggataaggtctgcgtgaaggaggcaaagaggtttgagtcagatggcgatttggaggttgtgcttgtagattgcggggttaagatgagcatagtcaggcagctgctgaagaggggcgtgaatctcacagttgtcccttacgattttcctgcagaaaagattaaggagatgaatccagacggagttttcatctccaacggtcctggggatccggcaagggttaagcccacaatcgagacgataaggaagctcgccgggcagattccgatggcgggcatatgccttggccatcaacttacagcccttgctcttggggcaaagaccttcaagctcaagtttggccaccacggcagtaaccagccagtaaaggattttgagacggggagagttttcatctccagccagaaccacaactttgccgttgacacaaaaaccctccccaaggagtttgaggtcacacaaatcaacctgaacgaccacacggttgaggggatggttcacaaggatttcccgctcataactgttcagtatcaccccgaagcggggccgggcccccatgacacctacttcttcttcgacaggtatgtggatatgctgagagaatacaggtga

SEQ ID NO: 95394 - protein, 358 aa, Archaeoglobus fulgidus
MKAALALEDGTYLEGKAFGAERGGLGEIVFCTSMTGYVEALTDPSYKGQILMMTYPLIGNYGVNREDFESDGVKVEGFVVKELCKNPSNWRSEMSVDELLKQYDVPGIEGVDTRMLTRKIRIYGSMKAAIGIGDVDREKLVRKAVEQPFISDIDLVDKVCVKEAKRFESDGDLEVVLVDCGVKMSIVRQLLKRGVNLTVVPYDFPAEKIKEMNPDGVFISNGPGDPARVKPTIETIRKLAGQIPMAGICLGHQLTALALGAKTFKLKFGHHGSNQPVKDFETGRVFISSQNHNFAVDTKTLPKEFEVTQINLNDHTVEGMVHKDFPLITVQYHPEAGPGPHDTYFFFDRYVDMLREYR

SEQ ID NO: 95395 - DNA, 1098 bp, Bacillus anthracis
  CDS (1)..(1098): transl_table=11
atgaaaagacaacttatcttagaagatggaacagtattaattggaacaggtttcggaggagaaatcgaaaagtcaggtgaggttgtatttacaacaggaatgactggatatcaagaaacattatctgatccatcatattgcggtcaaattgtaacattcacgtacccactaatcggaaactacggcatcaaccgtgatgattttgaatcgattcacccatctgtaaatggtttaatcgtaaatgaaatttgtgatcacccatcaaatttccgtaacgaaatttcgttaaatgactacttaaaagaaagaaacatcccaggattagcagggattgatacgagaaaattaacgagaaaaattcgtcaatacggtacattacgcggacgcctatgtaacatggatgcagatgtagagtacatcgtgagtcaattaaaagcgacagtatttacagatcatgtaaaacgcgtatcaacgaaagatccatatccaagcccaggccgcggacatcgcgtcgtactagtagacttcggtatgaaacatggtattttacgagaattaaataaacgtgattgtgatgtaattgtagttccttacaacacaacagccgaagaaattttacgccttagtccagatggaattatgttaagtaacggacctggggatccaaaagatgtaccagaagcaattgaaatgttaaaagacattatcggtaaagttcctttattcggaatttgcctaggacatcaattgttcgctctagcatctggtgcgaatacaagtaagttaaaattcggtcaccgtggtttaaaccatccagtaaaaaatattgcaactggaaaagtagcaattacatctcaaaaccatggttacgcagtagaagaagaatcagttgaaaatacagagcttgaaattacacatgttgctttaaatgatggaacagtagaaggtcttcgtcataagaagtttccagcatttacagttcaataccatccagaagcttcagcaggaccagaagatgcaaatgatttattcgaagatttcttaacaatgattgaaaacttcaagaaagaaggggaagagttatgccaaaacgcctag

SEQ ID NO: 95396 - protein, 365 aa, Bacillus anthracis
MKRQLILEDGTVLIGTGFGGEIEKSGEVVFTTGMTGYQETLSDPSYCGQIVTFTYPLIGNYGINRDDFESIHPSVNGLIVNEICDHPSNFRNEISLNDYLKERNIPGLAGIDTRKLTRKIRQYGTLRGRLCNMDADVEYIVSQLKATVFTDHVKRVSTKDPYPSPGRGHRVVLVDFGMKHGILRELNKRDCDVIVVPYNTTAEEILRLSPDGIMLSNGPGDPKDVPEAIEMLKDIIGKVPLFGICLGHQLFALASGANTSKLKFGHRGLNHPVKNIATGKVAITSQNHGYAVEEESVENTELEITHVALNDGTVEGLRHKKFPAFTVQYHPEASAGPEDANDLFEDFLTMIENFKKEGEELCQNA

SEQ ID NO: 95397 - DNA, 1095 bp, Bacillus caldolyticus
  CDS (1)..(1095): transl_table=11
atgaaacggcagctgattttagaagatggttcgttttttgtcggcgaacggtttggcagcttgaaagagacgaccggggaagtcgtctttaacaccggcatgaccggataccaagaaattttgtccgatccatcgtattgcgggcaaatcgtgacgatgacatatccattgatcggcaactacggcatcaaccgcgacgactttgaagcgatccgcccgcatgtgcacgggttcatcgtcaaagaagcgtgcgtgaagccgtccaactggcgcggagaactgacgttggacgagtatttgaaagaaaaaggcatccctggcctttccggcatcgacacgcgcaaactgacgcgccttatccgccaatacggaacgttaaaagggatgatctgtgggctagatgtcgatccggtggaagcagcagccaagctgcgggcgatggagtggccgcgcgaccaagtgcggcgcgtctcaacgaaaagcgcctacccaagcccggggcgcggtgagcgcatcgtcttgattgatttcgggatgaaacacggcattttgcgcgaactgaacaagcgaaattgcgatgtgatcgtcttgccgtacaacgccaccgctgaagaggtgctcggctggcatccggatggggtcatgctttccaatggaccgggcgacccgaaagacgtgccggaagcgatcgagatgatccgcgggattctcggcaaagtgccgctctttggcatctgcctcggccatcagctgttcgcgttggcgtgcggcgcgaataccgagaaaatgaaattcggccatcgcggctcgaaccatccggtcaaagacttgcgcaccggcaaagtcgccatcacgtcgcaaaaccatggctataccgtcacgcacgagtcgctttctggcacccggcttgaggtgacgcatatcgccttaaatgacggcacggtcgaagggctccgtcatttggacgttccggcgtttacggtgcagtatcatccggaagcgtcgccggggccagaagatgccaatccgctgtttgacgagtttttggcgctcatccgcgagttcaacaagaaaggagaagtcatccatgcctaa

SEQ ID NO: 95398 - protein, 364 aa, Bacillus caldolyticus
MKRQLILEDGSFFVGERFGSLKETTGEVVFNTGMTGYQEILSDPSYCGQIVTMTYPLIGNYGINRDDFEAIRPHVHGFIVKEACVKPSNWRGELTLDEYLKEKGIPGLSGIDTRKLTRLIRQYGTLKGMICGLDVDPVEAAAKLRAMEWPRDQVRRVSTKSAYPSPGRGERIVLIDFGMKHGILRELNKRNCDVIVLPYNATAEEVLGWHPDGVMLSNGPGDPKDVPEAIEMIRGILGKVPLFGICLGHQLFALACGANTEKMKFGHRGSNHPVKDLRTGKVAITSQNHGYTVTHESLSGTRLEVTHIALNDGTVEGLRHLDVPAFTVQYHPEASPGPEDANPLFDEFLALIREFNKKGEVIHA

SEQ ID NO: 95399 - DNA, 1098 bp, Bacillus cereus
  CDS (1)..(1098): transl_table=11
atgaaaagacaacttatcttagaagatggaacagtattaattggaacaggtttcggaggagaaatcgaaaagtcaggtgaggttgtatttacaacaggaatgactggatatcaagaaacattatctgatccatcatattgcggtcaaattgtaacattcacgtacccattaatcggaaactacggcatcaaccgtgacgattttgaatcgattcacccatctgtaaatggtttaatcgtaaatgaaatttgtgatcacccatcaaacttccgtaacgaaatttcgttaaatgactacttaaaagaaagaaagatcccaggattagcagggattgatacgagaaaattaacgagaaaaattcgtcaatacggtacattacgcggacgcctatgtaacatggatgcagatgtagagtacatcgtgagtcaattaaaagcgacagtatttacagatcatgtaaaacgcgtatcaacgaaagatccatatccaagcccaggccgcggacatcgtgttgtattagtagacttcggtatgaaacatggtattttaagagaattaaataaacgtgattgtgatgtaattgtagttccttacaacacgacagctgaagaaattttacgccttagcccagatggaattatgttaagtaacggacctggggatccaaaagatgtaccagaagcaattgaaatgttaaaagacattatcggtaaagttcctttattcggaatttgcctaggacaccaactattcgctttagcatctggtgcgaatacaagtaagttaaaattcggtcaccgtggtttaaaccatccagtaaaaaatattgcaactggaaaagtagcaattacatctcaaaaccatggttacgcagtagaagaagaatcagttgaaaatacagaacttgaaattacacatgttgctttaaatgatggaacagtagaaggtcttcgtcataagaagttcccagcatttacagttcaataccatccagaagcttcagcaggaccagaagatgcaaatgatttattcgaagatttcttaacaatgattgaaaacttcaagaaagaaggggaagagttatgccaaaacgcctag

SEQ ID NO: 95400 - protein, 365 aa, Bacillus cereus
MKRQLILEDGTVLIGTGFGGEIEKSGEVVFTTGMTGYQETLSDPSYCGQIVTFTYPLIGNYGINRDDFESIHPSVNGLIVNEICDHPSNFRNEISLNDYLKERKIPGLAGIDTRKLTRKIRQYGTLRGRLCNMDADVEYIVSQLKATVFTDHVKRVSTKDPYPSPGRGHRVVLVDFGMKHGILRELNKRDCDVIVVPYNTTAEEILRLSPDGIMLSNGPGDPKDVPEAIEMLKDIIGKVPLFGICLGHQLFALASGANTSKLKFGHRGLNHPVKNIATGKVAITSQNHGYAVEEESVENTELEITHVALNDGTVEGLRHKKFPAFTVQYHPEASAGPEDANDLFEDFLTMIENFKKEGEELCQNA

SEQ ID NO: 95401 - DNA, 1089 bp, Bacillus halodurans
  CDS (1)..(1089): transl_table=11
atgaaaagacagctcattttagaagatggtagcgtgtttgtaggaaaagggtttggtagcgatcgagaaatgtcaggagaagtggtatttaacacgggaatgacaggatatcaagagatgctttccgatccgtcttattgcggacaaattgtgacattaacatacccgctgattggaaattatggaattaaccgcgacgactttgaatcgatgaatccagcgatacacgggttaatcgtcaaagaagcatgtgacattccgagcaactggagaagtgaagaatcattagactccctgttaaaagcgaagcaaattcctggactatctgggatcgacactcgaaagctcacccgcttgattcggatgcacggtacgttaaaaggccagctctgcccacttgatgtagacgtagagcaaatcgttcaggagttgaaagcaacaccaacaccgaccgatcaagtgtcgcgcgtctcaacgagagatccataccacgtaccaggccctggtaagcgcgttgtcctcgttgattatggaatgaagcataacattttacaggagctcatccgccgcaattgtgaagtgtttgttgtgccttaccacacatcagcagaagaggtgctccgcttagggcctgacggcgtcctgttaagcaacggaccaggaaacccagaggacgtatctgagggagtagaaatgatccgcaacctattaggaaaagttccgctgtttggtatttgcctcggtcatcaactgttcgcacttgcttgcggagcaaaaacagaaaagcttcgcttcgggcatcgcggctcgaaccaccctgtgcgtgaacggagtacgggattgatcgaaattacggcacaaaatcatggctatacggtaacggaaggttcacttgtgaatacggatttaatcgttacccatgaagcagtgaatgacggaacaattgaaggattggcacacaaagtacatccagcgttcagcgttcagtaccacccggaggcatcaccaggaccggaagattcaaacgtgctattcgatcgttttattaagctgatggaatcaaacaagcatcgggcgctcacggtataa

SEQ ID NO: 95402 - protein, 362 aa, Bacillus halodurans
MKRQLILEDGSVFVGKGFGSDREMSGEVVFNTGMTGYQEMLSDPSYCGQIVTLTYPLIGNYGINRDDFESMNPAIHGLIVKEACDIPSNWRSEESLDSLLKAKQIPGLSGIDTRKLTRLIRMHGTLKGQLCPLDVDVEQIVQELKATPTPTDQVSRVSTRDPYHVPGPGKRVVLVDYGMKHNILQELIRRNCEVFVVPYHTSAEEVLRLGPDGVLLSNGPGNPEDVSEGVEMIRNLLGKVPLFGICLGHQLFALACGAKTEKLRFGHRGSNHPVRERSTGLIEITAQNHGYTVTEGSLVNTDLIVTHEAVNDGTIEGLAHKVHPAFSVQYHPEASPGPEDSNVLFDRFIKLMESNKHRALTV

SEQ ID NO: 95403 - DNA, 1095 bp, Bacillus subtilis
  CDS (1)..(1095): transl_table=11
atgaagagacgattagtactggaaaacggagcggtattcgagggagaagctttcggaagcttagaacacaacatgggagaagtcgtttttaatactgggatgacaggctatcaggaaattttatctgatccttcttactgcggacagatcgtaacattaacatacccgcttatcggaaattacggcattaaccgtgatgattttgaatccattaccccttttgtcaaagggctgatcatcaaagaattatgtgagctgccttccaactggcgttcagcatacaccttagacgagtatttaaaaatgaaaaacattcccggactccagggaattgatacaaggaagctgacaagaatgatccgcacggcaggcgcgctaaaaggaacattcgcttcatctgatgaagatatcgaagcagtgctgaaaagactgaacgaaacggaattgccaagaaatcaagtatcccaagtatcagcaaaaacagcatatccgagcccgggaagaggcaaacgcattgtcttggttgacttcggcatgaaacacgggattctaagagagctgaacaaacggaaatgtgacgtcatcgttgtgccttacaacattacagcggaagaggtgcttcagctgaaaccggacggtatcatgctttctaacggacctggagacccgaaggatgtgcctgaagcgattgaaatgattaaaggtgttcttggaaaagtgccattattcggaatatgtctcggccaccaattattcgcgctggcgtgcggggcgaatactgaaaaaatgaaattcggccacaggggctcaaaccacccggtaaaagagctggctacaggaaaagttgccttaacatctcaaaaccatggatatacagtttcgtctatcagtaaaacagaactggaagtgacgcatatcgcaattaacgacgatacgattgaagggctgaagcataaaacattgccggcatttacggttcaatatcatcccgaagcctcacctggtcctgaggatgccaaccatctatttgacagattcatcgaaatgatcgaaacaacagagaaagaaggggaagcggtatgccaaaacgcgtag

SEQ ID NO: 95404 - protein, 364 aa, Bacillus subtilis
MKRRLVLENGAVFEGEAFGSLEHNMGEVVFNTGMTGYQEILSDPSYCGQIVTLTYPLIGNYGINRDDFESITPFVKGLIIKELCELPSNWRSAYTLDEYLKMKNIPGLQGIDTRKLTRMIRTAGALKGTFASSDEDIEAVLKRLNETELPRNQVSQVSAKTAYPSPGRGKRIVLVDFGMKHGILRELNKRKCDVIVVPYNITAEEVLQLKPDGIMLSNGPGDPKDVPEAIEMIKGVLGKVPLFGICLGHQLFALACGANTEKMKFGHRGSNHPVKELATGKVALTSQNHGYTVSSISKTELEVTHIAINDDTIEGLKHKTLPAFTVQYHPEASPGPEDANHLFDRFIEMIETTEKEGEAVCQNA

SEQ ID NO: 95405 - DNA, 1224 bp, Bifidobacterium longum
  CDS (1)..(1224): transl_table=11
gtgagccagaacgagtccgggaccatcgcaattccgatgtatgacaaggacgatgcagtcctcgttttggaagacggacaggtatatgtggggaagccatacggcgcccttggcgagacgaccggtgagatcgtcttcgccaccggtatgaccggataccaagagacgctcaccgatccgagctacgatcgccagatcgttgtgcagacgttcccgcacatcggcgataccggcgtcaacagcgaagaccctgagtcctcccgcatctgggttgccggatacattgtgcgtgatccctctccgaacgtgagcaactggcgtgccgaaggcagcctggacgacgacctcgccaagaacggcatcgtcggcctgagccacatcgacacccgcaagctggtgcgccacttgcgttccgcaggcgtgatgcgcgccggcatcttctccggcgacgccctgaccgatcaggccaccggcgcgctcaagaccatcgagcagctgctcgaagacgtcaagaacaccccgcagatgcagggtctgagcctgtacgacgaggtgtccaccaaggagacctacaccatcgaaccgtgcggcgagtacgaaggcaaggagccgctgtacaccgtggccgctgtggacctcggcatcaagggcatgaccccgcaccgcatggccgaacgcggctgccgcgtgcacgtggtgccctccaccatcaccttcgccgaaatcgagaacctgaacccggacggcgtcttcttctccaacggcccgggcgacccggaacaggccggtcccgaaatcgagctgctgcgccaggtacttgacgccggctacccgttcttcggcatctgctttggcaaccagctgctcggccgcgcactcggcttcggcacctacaagctcaagttcggccaccgcggcatcaaccagccggtcaaggatctgaccaccggcaaggtcgaggtcaccgcccacaaccacggcttcgcggtcgacgccccgatcggcaagcaggtcgacgcgccgtttgaaaacggcaagtacggcaaggtgttcgtctcccacatcgatctgaacgacgacgtggtcgaaggcctgcagtgcgtggacatccccgcattctccgtgcagtaccacccggaggccgcagcaggcccgcacgatgcggcctacctgttcgaccgtttctgcgaacttatgaagaacaactccaaggaaggtaagtga

SEQ ID NO: 95406 - protein, 407 aa, Bifidobacterium longum
MSQNESGTIAIPMYDKDDAVLVLEDGQVYVGKPYGALGETTGEIVFATGMTGYQETLTDPSYDRQIVVQTFPHIGDTGVNSEDPESSRIWVAGYIVRDPSPNVSNWRAEGSLDDDLAKNGIVGLSHIDTRKLVRHLRSAGVMRAGIFSGDALTDQATGALKTIEQLLEDVKNTPQMQGLSLYDEVSTKETYTIEPCGEYEGKEPLYTVAAVDLGIKGMTPHRMAERGCRVHVVPSTITFAEIENLNPDGVFFSNGPGDPEQAGPEIELLRQVLDAGYPFFGICFGNQLLGRALGFGTYKLKFGHRGINQPVKDLTTGKVEVTAHNHGFAVDAPIGKQVDAPFENGKYGKVFVSHIDLNDDVVEGLQCVDIPAFSVQYHPEAAAGPHDAAYLFDRFCELMKNNSKEGK

SEQ ID NO: 95407 - DNA, 1191 bp, Bradyrhizobium japonicum
  CDS (1)..(1191): transl_table=11
atgacacaacatgacaacgatcccgcctggccggaccataaaccgaccgcgctcctcgtgctcgccgatggcacggtgctcgaaggcttcggtctcggcgccgaaggccacgccgtcggtgaagtctgcttcaacaccgcgatgaccggttatgaggagatcctcaccgatccctcctatgccggccagctcatcaccttcaccttcccgcatatcggcaatgtcggtaccaacgaggaagacatcgagacggtgaacatggccgcgacgccgggcgcgcgcggcgtgatcctgcgcaccgccatcaccgatccctcgaactaccgcgccaccaagcatctcgacgcctggctgaaggcgcgcggcatcatcggcctctccggcatcgacacccgcgcgctgaccgcgctgatccgcagcaagggcatgcccaatgccgtgatcgcgcatgccaggaacggcgagttcgacctgcatggtctgaaggaagaagcccgcgaatggccgggactcgagggcatggacctcgtgccgatggtcacctccggccagcgcttcacctgggacgagacgccgtggctctgggacaagggctttggccagcaggacaagaccgagttcaacgtcgtcgccatcgactacggcatcaagcgcaacattttgcgcctgctcgccggcgtcggctgcaaggtgacggtggtgccggcaacgacgtcagccgaagatatcctggcgatgaagccggacggcgtgttcctgtcgaacggcccgggcgatccggccgcgaccggcaaatatgccgtgcctgtcatccgggacgtcatcaagtcgggcacgccgaccttcgggatttgtcttggccaccagatgctcggcctcgccgtcggcgccaagaccaagaagatgcatcagggccaccacggcgccaatcatcccgtgaaggacgagaccaccggcaaggtcgagatcacctcgatgaaccacggcttcgcggtggacgagaagacgctgccgaagggtgcgacgcagacccacatctcgctgttcgacggctccaattgcggcatccagctcgacggcaagccggtgttctcggtgcagtaccaccccgaggcttcgccgggcccgcgcgactcgcactacctgttccagcgcttcgccgagctgatgcggcagaagaagagcgcgtaa

SEQ ID NO: 95408 - protein, 396 aa, Bradyrhizobium japonicum
MTQHDNDPAWPDHKPTALLVLADGTVLEGFGLGAEGHAVGEVCFNTAMTGYEEILTDPSYAGQLITFTFPHIGNVGTNEEDIETVNMAATPGARGVILRTAITDPSNYRATKHLDAWLKARGIIGLSGIDTRALTALIRSKGMPNAVIAHARNGEFDLHGLKEEAREWPGLEGMDLVPMVTSGQRFTWDETPWLWDKGFGQQDKTEFNVVAIDYGIKRNILRLLAGVGCKVTVVPATTSAEDILAMKPDGVFLSNGPGDPAATGKYAVPVIRDVIKSGTPTFGICLGHQMLGLAVGAKTKKMHQGHHGANHPVKDETTGKVEITSMNHGFAVDEKTLPKGATQTHISLFDGSNCGIQLDGKPVFSVQYHPEASPGPRDSHYLFQRFAELMRQKKSA

SEQ ID NO: 95409 - DNA, 1224 bp, Brucella suis
  CDS (1)..(1224): transl_table=11
atgactgaaacgaccccgaaaacagcaccctggaccgttcagaagcgaaccgccgttctcgtcctcgccgatggaaccgtgatcgaaggcaagggcctgggcgcgaccggcgcggttgaggccgaagtcgtcttcaacaccgcgctcaccggctatgaggaaatactgaccgacccgtcctatgccggacagatcgtcaccttcactttcccacatatcggcaatgtcggcgccaatgccgaagatatcgaagatctgacacccgccaaccgccacggcgcagtcggcgcgatcttcaaggcagacatcaccgcaccctcgaatttccgtgccgcagaagacctcgatagctggctcaagcatcgcggaatcattgcgcttgccggcatcgacacccgcgccctcaccgccctcatccgcgagcgcggcgcgcaaaacgccgttatcgcgcatgacccgaacggaaatttcgatctcgacgccctgaaagcgcgcgccgccaactggtgcggccttgaaaatctcgatctcgccaaggatgtcaccatcggccagagcctcgtctggaaggaactgccatggacactccaggacggctatggcgaacaggacgcaccgcaatatcacgtcgtcgctctcgatttcggtgtgaagcgcaatattctgcgccttctgaccgggcttggcgcaaaggtcacggttttaccggccacggcaacagccgaagacgttctggcgcataatcccgatggcgttttcctgtccaatggtcccggcgatccggcggcaacgggcgaatatgccgtgccgaccatcggcaagctggtggaaaccggcattccccttttcggcatctgcctcggccaccagatgctggcgctggcgctcggcggacgcacggaaaagatgcatcagggacatcacggtgcaaaccacccggtgaaggattatacgaccggcaaggtggaaatcgtctcgatgaatcacggtttcgcagttgattcggactcgctgccggaaaatgtcgaggaaacccatgtgtcgctcttcgacggcaccaattgcggcctgcgtgtcgtcggcaagccagtcttctccgtgcagcatcacccggaagcctcccccggcccgcaggattcgcactatctgttccgccggttcatcaatctcatccgcgagaggaaaggccaggctcctctgccggagcgcgaacaggctgcctga

SEQ ID NO: 95410 - protein, 407 aa, Brucella suis
MTETTPKTAPWTVQKRTAVLVLADGTVIEGKGLGATGAVEAEVVFNTALTGYEEILTDPSYAGQIVTFTFPHIGNVGANAEDIEDLTPANRHGAVGAIFKADITAPSNFRAAEDLDSWLKHRGIIALAGIDTRALTALIRERGAQNAVIAHDPNGNFDLDALKARAANWCGLENLDLAKDVTIGQSLVWKELPWTLQDGYGEQDAPQYHVVALDFGVKRNILRLLTGLGAKVTVLPATATAEDVLAHNPDGVFLSNGPGDPAATGEYAVPTIGKLVETGIPLFGICLGHQMLALALGGRTEKMHQGHHGANHPVKDYTTGKVEIVSMNHGFAVDSDSLPENVEETHVSLFDGTNCGLRVVGKPVFSVQHHPEASPGPQDSHYLFRRFINLIRERKGQAPLPEREQAA

SEQ ID NO: 95411 - DNA, 1164 bp, Buchnera aphidicola subsp
  CDS (1)..(1164): transl_table=11
atggagggtgttttgagccaattagcagtactggttttagaagatgggactaaatttcatggacgagctattggagctaaaggaataactgtaggcgaagttgtttttaatacatcaatcactggttatcaagaaataataactgatccttcttattcacatcaaattgtgacattaactcatcctcatattggtaatgttggtactaattctaatgatgaagaatcatccaaaatttacattaaaggtcttattatccgtgatttatcactcactgcaagtaattaccgaaataaaaaaagtttttcttcctatttaaaagaaaacaatattattgcaatatcggatattgatacaagaaaattaacacgtattttgcgtaccaaaggttcacaaaatggatgtattatagaagataaaaaacaaaattattctatagcatataacaaagctaaaaattttattagtttacaagatttagatttagcaaaaaaagtatccactaaatctatttataattgggatcaaggtagttttacttttaaaaaaaataattttttttctataaacaaacaaaaatttttatttcatgtcgttgtttatgattttggagtaaaaagaaatatacttcgtatgcttgtagatagaggctgttatttaacggtcgtcccagctataactgatcctaaaactgtattaaatttatctccagacggtatttttttatctaatggaccaggtgacccgagaccttgcgattacgctattcatgcaattcaatatttcttaaaaactaatattcctatttttgggatatgtttaggacatcagctacttgccttagctagtggagctaaaattgttaaaatgaaatttgggcatcatggaggcaaccatcctgttaaggatattaaaaacaaccgagtaattataacatctcaaaatcacagttttactgtagatactgaaaacttacccaataatatagaaattacacatagttcgcttttcgatggaacattacaaggactatccttaactaataaatcagcttttagttttcaaggtcatccagaagcaagtcccggaccacatgatgcttcatatttgtttgattatttcattaaattaatcgtttctcaaaaaactacactcagtaattaa

SEQ ID NO: 95412 - protein, 387 aa, Buchnera aphidicola subsp
MEGVLSQLAVLVLEDGTKFHGRAIGAKGITVGEVVFNTSITGYQEIITDPSYSHQIVTLTHPHIGNVGTNSNDEESSKIYIKGLIIRDLSLTASNYRNKKSFSSYLKENNIIAISDIDTRKLTRILRTKGSQNGCIIEDKKQNYSIAYNKAKNFISLQDLDLAKKVSTKSIYNWDQGSFTFKKNNFFSINKQKFLFHVVVYDFGVKRNILRMLVDRGCYLTVVPAITDPKTVLNLSPDGIFLSNGPGDPRPCDYAIHAIQYFLKTNIPIFGICLGHQLLALASGAKIVKMKFGHHGGNHPVKDIKNNRVIITSQNHSFTVDTENLPNNIEITHSSLFDGTLQGLSLTNKSAFSFQGHPEASPGPHDASYLFDYFIKLIVSQKTTLSN

SEQ ID NO: 95413 - DNA, 1167 bp, Caulobacter crescentus
  CDS (1)..(1167): transl_table=11
atgtcccaagaccttctccccggcgtcactggcgttctggccctggccgatggcgccatcctgcaaggcgtgggctgcggcgcggtcggcgacgcggtcggcgaggtgtgcttcaacaccgccatgaccggctatcaggagatcctgaccgacccgtcctacatggcccagatcgtggccttcaccttcccgcacgtcggcaatgtcggggtgaacggcgaagacgtcgagcagatcaccggcgtggccgagacggccgcccgcggcgccctgttccgcgacgtgcccaccgtccaggccaactggcgcgccgatggcgacttcgacgcctggatgaaggcgcgcggcgtggtgggtctggcgggtgtcgacacccgcgccctgacccgcaagatccgcgaaaccggcatgccgcacggcgtcatcgcccattcgcccgacggccagttcgacctcgccgccctggtcgccaaggccaaggcctgggcgggcctcgaaggcctcgacctggccaaggacgcctcgacgacccagaccttcacctgggacgagggtctgtggtcgtggccggaaggctacgccaagctggacaagcccaagtacgaggtcgtggtcatcgactacggcgtcaagcgcaacatcctgcgcgccctggcccatgtcggcgcccgcgccacggtggtgccggcctcgaccagcgccgaagacatcctggcccgcaaccctgacggtgtgatgctgagcaacggcccgggcgacccggccgccaccggccagtacgccgtgcccgagatccagaagctggtcgccagcggcaagccggtgttcggcatttgcctgggccaccagatgctggccctggcgctgggcgccaagaccgtgaagatggaacagggccaccacggcgccaaccacccggtcaaggacctgaccaccggcaaggtcgagatcgtctcgatgaaccacggcttcaccgtcgacaccgcctccctgcccgccccggtcaaggagacccacgtctcgctgttcgacggcaccaacgccggcatcgccctggacggcaagccggtgttctcggtgcagcaccaccccgaagcgtctccggggccgacggacagcctgtacctgttcgagcggttcgcgggcctgatggacgcggcgaagtaa

SEQ ID NO: 95414 - protein, 388 aa, Caulobacter crescentus
MSQDLLPGVTGVLALADGAILQGVGCGAVGDAVGEVCFNTAMTGYQEILTDPSYMAQIVAFTFPHVGNVGVNGEDVEQITGVAETAARGALFRDVPTVQANWRADGDFDAWMKARGVVGLAGVDTRALTRKIRETGMPHGVIAHSPDGQFDLAALVAKAKAWAGLEGLDLAKDASTTQTFTWDEGLWSWPEGYAKLDKPKYEVVVIDYGVKRNILRALAHVGARATVVPASTSAEDILARNPDGVMLSNGPGDPAATGQYAVPEIQKLVASGKPVFGICLGHQMLALALGAKTVKMEQGHHGANHPVKDLTTGKVEIVSMNHGFTVDTASLPAPVKETHVSLFDGTNAGIALDGKPVFSVQHHPEASPGPTDSLYLFERFAGLMDAAK

SEQ ID NO: 95415 - DNA, 1101 bp, Chlorobium tepidum
  CDS (1)..(1101): transl_table=11
atgcaggaaatacccgcaattctggttcttgaaaacggctcggtctatcgcggcaccgcctttggccatgctggtgaagcgacaggcgaagtggttttcaacacctcgctgaccggctatcaggaaattctgaccgatccgtcctacaccggacagatggtggttatgacctacccgctcattggcaactatggcattacgccgaacgataacgagtcgaagaaaatctgggcttcggcgctgattgtgcgtgaagcctccaacgtttacagcaactacgaatcgacccgcagcctcgacgcgacactcaaagaggctggcgtgatggggcttgccggcatcgatacccgaaagctggtgagagagattcgccagaaaggcgcgatgcgggcggtgatttcgaccttgtgcgatgacgtcgcggcgctcaaggcgcaggcggcggccattcccgagatgaccggcctcgacctggtgcagcgcgtcaccaccggagagcgctacacggtggacaatcccgacgccaaatatcacgtcgtcgctttcgactatggcattaagaccaacatcatccgccagctcaacgccgaggggtgcaaggtcacggtggtcaacgccaaaaccaccgctgacgaggtgctcgccatgaatcccgatggcatctttctctcgaacggccctggcgatccttttgcggtcacttacgccatcgacaccatccgggagctggccgcacggaacagcacgttgccgatcttcggcatctgccttggtcaccagttgctttcgctcgcgttcggagcgaagacctacaagctcaagtttggccatcacggcgcgaatcatccggtaaagaacctcttgagcaacacgatcgagatcacctcgcagaaccacggctttgccgtcgaaatggagagtctgccgggtgagctggagctgactcacaagaatctctacgacatgaccgtcgagggtatccgccaccgcgagctgccctgcttctcggtgcagtaccaccccgaagccgctcccggcccgcacgactcgcactacctcttcaaagagttcaccgaactcatggagaggttgaaaaactga

SEQ ID NO: 95416 - protein, 366 aa, Chlorobium tepidum
MQEIPAILVLENGSVYRGTAFGHAGEATGEVVFNTSLTGYQEILTDPSYTGQMVVMTYPLIGNYGITPNDNESKKIWASALIVREASNVYSNYESTRSLDATLKEAGVMGLAGIDTRKLVREIRQKGAMRAVISTLCDDVAALKAQAAAIPEMTGLDLVQRVTTGERYTVDNPDAKYHVVAFDYGIKTNIIRQLNAEGCKVTVVNAKTTADEVLAMNPDGIFLSNGPGDPFAVTYAIDTIRELAARNSTLPIFGICLGHQLLSLAFGAKTYKLKFGHHGANHPVKNLLSNTIEITSQNHGFAVEMESLPGELELTHKNLYDMTVEGIRHRELPCFSVQYHPEAAPGPHDSHYLFKEFTELMERLKN

SEQ ID NO: 95417 - DNA, 1056 bp, Clostridium acetobutylicum
  CDS (1)..(1056): transl_table=11
atgaaaggcataatatatttagaagatggaacagttttttatggaacaggatttggaaaagagggaaatgaatttggtgaaattgtatttaacacttcaatgacaggatatcaagagatattaacagacccttcctatgctggccaaataataaatatgacatatcctttaataggaaactatggagtaaatgaatcggttaatcaatcaaaatgtgtgtatgcgaaaggatttattgttaaaaatatagatgaaaatccatcgaattatactagtgaaataaatatagatcagatgctaaaaaacatgggagtagttggagtttttggtgtggatacaagaagtataacaaagaagataagaagttatggtactatgaaatgcataatttcaaatggagaattatcaattgaagagttgaagaaaatgatggatgcctccaatatagtagatgattatgttaatactgtaagtaccaaagaaataattcatattgctggaaacggaaataaagtagcagtaatggattttggaattaaaaatgatataattgaaaatttaaaagagagacagtgtgatataactatattcccttatgataccgactataatgaaattttaaacattaatcctgatgggattttcttaagtaacggaccaggggatcctaaatctataccagaagctattgaaaatgttaaaaaacttataggaaaacgtcctatgtttggtatatgtttaggacatcaaataatagcacttgcatcaggaggaaatacctacaaattgaaatatggtcatagaggcggaaatcatggtatttatgatgtacaaagagataaagcatatataacagcacaaaaccatggatatgcggtagatgaagaaagtgtattagaaaatggtatgataataacgcacagaaatttaaatgatggcactgtagaaggaatgaagcataaaagtattccactgttttcagtacaatttcatcctgaaggtgcgccaggaccaacagatacaacttacttattcgaccaatttgtaaacttatga

SEQ ID NO: 95418 - protein, 351 aa, Clostridium acetobutylicum
MKGIIYLEDGTVFYGTGFGKEGNEFGEIVFNTSMTGYQEILTDPSYAGQIINMTYPLIGNYGVNESVNQSKCVYAKGFIVKNIDENPSNYTSEINIDQMLKNMGVVGVFGVDTRSITKKIRSYGTMKCIISNGELSIEELKKMMDASNIVDDYVNTVSTKEIIHIAGNGNKVAVMDFGIKNDIIENLKERQCDITIFPYDTDYNEILNINPDGIFLSNGPGDPKSIPEAIENVKKLIGKRPMFGICLGHQIIALASGGNTYKLKYGHRGGNHGIYDVQRDKAYITAQNHGYAVDEESVLENGMIITHRNLNDGTVEGMKHKSIPLFSVQFHPEGAPGPTDTTYLFDQFVNL

SEQ ID NO: 95419 - DNA, 1050 bp, Clostridium perfringens
  CDS (1)..(1050): transl_table=11
atgaaagcaaagcttatattagaaaatggcgtagtatttgaaggtaaagcctttggatatttaaaggagtgcgttggagaggtagttttcaacacaggaatgacaggatatcaggaggttttaactgacccttcttattatggacaaatagtaactatgacttatcccctaataggtaactatggaattaacttagaggatttagaatctaaggaacctaaagtaaggggattcatagtgagagaaaaatgtcagtatccaaataattttagatgtgaattagagcttgaaacttacttagctcaaaataaggttttaggattagatggtatagacacaagagccttaacaaaaatcttaagaaataatgggacaatgaagggaattatagttttagataattcaaacttagaagatgttaaagataagttagaagctttctcaaatagagatgcagtttcaatagtttcaactaatgaaaaatatgagatctcaggagaaggaaagaaagtagctataatcgactttggaataaagcaaaacattattagaaactttgtaaaaagaggatgtaatgttacagtattcccttatgactttaaggcagaagaagttttagaaataaatccagacttagtatttttatcaaatggacctggagacccagaggatatgggagaagcagtaaatgagataaagaaaatagttgggaagaaaccaatagtaggaatttgtttaggacatcaattattagctttaaccttaggtggagaaactaagaagcttaagtttggtcatagaggatgtaatcatccagttaaagatttaataaataatagagttcatataacatcacaaaatcatggatactatgttgctactttaccagaaaatatggaaataactcatgtaagtatgaatgatggaacagttgagggaatgaaacataaagaattaccaatattctcagttcaatttcacccagaagcatgtccaggaccaaaggatagcgaatacatttttgatgagtttatgaagtatgcactataa

SEQ ID NO: 95420 - protein, 349 aa, Clostridium perfringens
MKAKLILENGVVFEGKAFGYLKECVGEVVFNTGMTGYQEVLTDPSYYGQIVTMTYPLIGNYGINLEDLESKEPKVRGFIVREKCQYPNNFRCELELETYLAQNKVLGLDGIDTRALTKILRNNGTMKGIIVLDNSNLEDVKDKLEAFSNRDAVSIVSTNEKYEISGEGKKVAIIDFGIKQNIIRNFVKRGCNVTVFPYDFKAEEVLEINPDLVFLSNGPGDPEDMGEAVNEIKKIVGKKPIVGICLGHQLLALTLGGETKKLKFGHRGCNHPVKDLINNRVHITSQNHGYYVATLPENMEITHVSMNDGTVEGMKHKELPIFSVQFHPEACPGPKDSEYIFDEFMKYAL

SEQ ID NO: 95421 - DNA, 1203 bp, Corynebacterium efficiens
  CDS (1)..(1203): transl_table=11
gtgagtaatgaaaccaatgcgaacagcaccgattcccgccagggcgtgaccaacatcggttccgtccctgcctacctggtgctggcagacggccgtaccttcaagggcttcggcttcggagccatcggcaccaccctgggcgaggctgtcttcaccacagccatgaccggttaccaggagaccatgaccgacccgtcctaccaccgccagatcgtggttgccaccgcaccgcagatcggcaacaccgggtggaacgaggaggacaatgagtcccacgacggatcgatctgggtggccggtctggtcatccgcgacctcgccgtccgtgtctccaactggcgcgccaccaccaccctccaggaggagatggccaagcagggtgtggtgggcatcggcggcatcgacacccgcgcgctggtacgccacatccgcaatgagggtgcagtcccggccggtatcttctccggcgcggatgccgagcgtcccatcgaggagctcgtggagatcgtgaagtcccagccgtcgatggtcggcgccaacctcgccgtcgaggtctccgtcgataagccctatgtcatcgaggctgagggcgaagcccgtcacaccgtggtcgcctatgacctgggcatcaagcagaacaccccacgccgcttcgccgcccgcggcgtgcgcaccgtgatcgtgcccgcggagacccccttcgaggagatcaagcagtacaacccctccggtgtgttcatctccaacggccccggtgacccggcggccgctgacatcatggtcaacatcgtccgtgaggtcctcgccgccgatatcccgttcttcggtatctgcttcggcaaccagatcctcggccgcgccttcggcatggagacctacaagctgaagttcggtcaccgtggcatcaatgtaccggtcaagaaccacatcaccggcaagatcgacatcaccgcccagaaccatggtttcgccctcaagggtgaggccggccaggagttcgagaccgatttcggcaccgccgtggtcacccacacctgtctcaatgacggagtcgtcgagggtgtcgccctgaagtcgggtcgcgcctattccgtccagtaccacccggaggccgccgcaggccccaacgatgcaagcccactgttcgaccagttcgtcgcactgatggatgaagactccgagaaccagaaggaagaggcgtaa

SEQ ID NO: 95422 - protein, 400 aa, Corynebacterium efficiens
MSNETNANSTDSRQGVTNIGSVPAYLVLADGRTFKGFGFGAIGTTLGEAVFTTAMTGYQETMTDPSYHRQIVVATAPQIGNTGWNEEDNESHDGSIWVAGLVIRDLAVRVSNWRATTTLQEEMAKQGVVGIGGIDTRALVRHIRNEGAVPAGIFSGADAERPIEELVEIVKSQPSMVGANLAVEVSVDKPYVIEAEGEARHTVVAYDLGIKQNTPRRFAARGVRTVIVPAETPFEEIKQYNPSGVFISNGPGDPAAADIMVNIVREVLAADIPFFGICFGNQILGRAFGMETYKLKFGHRGINVPVKNHITGKIDITAQNHGFALKGEAGQEFETDFGTAVVTHTCLNDGVVEGVALKSGRAYSVQYHPEAAAGPNDASPLFDQFVALMDEDSENQKEEA

SEQ ID NO: 95423 - DNA, 1185 bp, Deinococcus radiodurans
  CDS (1)..(1185): transl_table=11
atgattcgcaaagaacgcgccattctggctctggaagacggcaccgtgtaccgtggctacgcttttgggtaccgcggcgagaccgtcggtgaagtggtgttcaacacctccatgaccggctaccaggaaatcatgaccgatccctcgtacaacgggcagatcgtgaccatcacttacccgcacgtcggcaactacggcgtcgccatctacgacatggagagcaacaagccgtatgtgcgcggcttcatctcgcgcgagttcagcggcgagtactccaactaccgcgcccagcagtcgctcgaagcgtttatgcagcagtacggcgtcgtgtctatccagggcatcgacacccgcgccctggtgcggcgcctgcgctcgggtggtgtggtcaagggcgtgattgcccaccgcagcttcacccaccccgaagacccctacggcgagttcacccccgccgaggagcagatctacgtgcagcgggcgcgtgaccatcaggacatcgacgggtttgatatgaccaaggaagtcaccaccgcgctgccctacgccttccctacgctgcgccagggcaagcgcgtggtgctgatggatttcggcatcaagcacaccatcatcgagcggctggccgaagtcggcatcgaacccatcgtggtcccggcgcacaccaccccggcgcagatcatggcgctgcaaccgcacggcctgttcctcagcaacggccccggcgaccccgccccgctggaatacgcccacaagactgcctgggaaatgatgggactgctccccaccttcggcatctgcctgggccaccagattctgggcctcgcggcgggcggacagaccttcaagatgaagttcgggcaccggggcggcaaccagccggtcaagaacctgctcaccggcaatgtagagatcaccagccagaaccacggctacgctgtagatctagacagcattcccaacggcgctttcgtcgccactcacgtgaacctcaacgacgggacgctcgaaggcatggcccacagccgttatccggtgttcagtgtgcagtaccaccccgaggcttcgcctggtcctcatgacagccgctaccttttcgaccgcttcatcgaggagattgacgccttcgacggaggcaacggtacccccattattaaggccaatcctgggcgtttgggggtttga

SEQ ID NO: 95424 - protein, 394 aa, Deinococcus radiodurans
MIRKERAILALEDGTVYRGYAFGYRGETVGEVVFNTSMTGYQEIMTDPSYNGQIVTITYPHVGNYGVAIYDMESNKPYVRGFISREFSGEYSNYRAQQSLEAFMQQYGVVSIQGIDTRALVRRLRSGGVVKGVIAHRSFTHPEDPYGEFTPAEEQIYVQRARDHQDIDGFDMTKEVTTALPYAFPTLRQGKRVVLMDFGIKHTIIERLAEVGIEPIVVPAHTTPAQIMALQPHGLFLSNGPGDPAPLEYAHKTAWEMMGLLPTFGICLGHQILGLAAGGQTFKMKFGHRGGNQPVKNLLTGNVEITSQNHGYAVDLDSIPNGAFVATHVNLNDGTLEGMAHSRYPVFSVQYHPEASPGPHDSRYLFDRFIEEIDAFDGGNGTPIIKANPGRLGV

SEQ ID NO: 95425 - DNA, 1131 bp, Desulfovibrio vulgaris
  CDS (1)..(1131): transl_table=11
atgagagctttcctggccctggaagacggcttcgtgcttgaggggcgctcgttcaccggtcgcggcgaatcgggcggcgaggtcatcttcaataccgggatgacgggctatcaggaggtccttacggacccctcgtacgccgggcagatggtctgcatgacctaccctctcatcggcaactacggcgtgacggccgaagacatggaatccggcaaggtccatgtggaagccttcatcgtcaaggaatgttgcaggacgccctccaactggcgggctataatgtcgctgcccgactatctggcgcagcacggggtgatgggcatagagggcatcgacacccgcgcccttacccggcacctgcgcatcaacggcgccatgcgcggcatcatctccaccgagacggacgaccgtgacgaactggtgcgccgcgcccgcgccctgcccaccatggaaggccagaacctggtcaccagggtggcccccgccacgccctaccgctgggacggcacccgcccccagccggtgcaactggccgcagacggcgcctacgcctggcccggcaccggtccgcgcctggtggtgtacgactacggcatcaagtggaacatcctgcgcctgctcaccgaccagggcttcgacctgctggtggtgccgccgtcgttcacggccatgcaggtggcggccagcggcgccgaagcggtgttcctgtccaacggccccggcgacccggccacccttaccgacgaagtgcgcgaaatccgcgtgatgaccgaacgcatgccggtggcgggcatctgccttggccaccagttgctgggacacgcccttggcggcaccacccacaagctgaagttcggccaccacgggtgcaaccacccggtcaaggacctggtgaccgggcacatcgaaatctcttcgcaaaatcacgggttctgcgtggacatagagagcgtgcccgacgtagaaataacccatgtgaacctgaacgacggcacgctggaagggtttgcccacaagaccaggcccatcctggccgtgcagcaccacccggaagcaagccccggccccaccgacagccggtacttcttcgcccggttcaggggcatggtgcgagaggccgtgggccgctag

SEQ ID NO: 95426 - protein, 376 aa, Desulfovibrio vulgaris
MRAFLALEDGFVLEGRSFTGRGESGGEVIFNTGMTGYQEVLTDPSYAGQMVCMTYPLIGNYGVTAEDMESGKVHVEAFIVKECCRTPSNWRAIMSLPDYLAQHGVMGIEGIDTRALTRHLRINGAMRGIISTETDDRDELVRRARALPTMEGQNLVTRVAPATPYRWDGTRPQPVQLAADGAYAWPGTGPRLVVYDYGIKWNILRLLTDQGFDLLVVPPSFTAMQVAASGAEAVFLSNGPGDPATLTDEVREIRVMTERMPVAGICLGHQLLGHALGGTTHKLKFGHHGCNHPVKDLVTGHIEISSQNHGFCVDIESVPDVEITHVNLNDGTLEGFAHKTRPILAVQHHPEASPGPTDSRYFFARFRGMVREAVGR

SEQ ID NO: 95427 - DNA, 1170 bp, Haemophilus ducreyi
  CDS (1)..(1170): transl_table=11
atgttcaaccctgcaatacttgttcttgctgatggcagtacgttttatggcaaatctataggctatcaagccgtttcggcctacagcattggtgaagtcgtatttaatactgcaatgactggctaccaagaaattctcactgatccctcctacgcaaaacaaatcgtcacactcacttacccccatattggcaatactggtacaaatgatgaagataatgaatcaaatcaaatttatgcatcaggtttaatcattcgagatctaccacttctccacagtaactttcgtgcaacttcttctctctctgactaccttattcaacacaacattattgcgattgccgatatcgatacacgccgtctaactcgaattttacgcgaaactggctcacaagcgggctgtatctatataccaaacgaaaatgaatcattagcacaagcggtcgaaaaagctcaagatcttgcaaaaagttttggctctatggctggtaaagatttagcgaaggaagttacctgccaacaccgttatgaatggcaagaaggtatttggcacttaccaactaataatgcaggtaaaccttttaatctccaaacaacaccgacatttcatgtcgttgcttatgattttggcataaaacaaaatatcttacgaatgcttgccgaacgtggttgtaaaattactgttgttccggcgcaaacctccgcagaagatatcctagcacttaatcctgatggtatctttctttctaatggcccgggtgatcctgaaccttgtacttatgctattcaatcaattcgccagctactcaatacccaaaaaccgatctttggcatctgcttagggcatcaactattaggtttagccgttggcgcaaaaacacgaaaaatggcttttggacatcatggtgctaatcacccagtccaagacttaaaaacagaacacgttttaatcacaagccaaaatcacggttttgaaatagacgaatatagtttgcctgaaaatgtcatagtcacccatcgatctctttttgataattcagtacaaggcattgaactgactaaccaagtcgcctttagtttccaaggccacccagaagcgaatccagggccacaagatgttgcttatttatttgataaatttattaacgcagtgcaagcaaccaaagcataa

SEQ ID NO: 95428 - protein, 389 aa, Haemophilus ducreyi
MFNPAILVLADGSTFYGKSIGYQAVSAYSIGEVVFNTAMTGYQEILTDPSYAKQIVTLTYPHIGNTGTNDEDNESNQIYASGLIIRDLPLLHSNFRATSSLSDYLIQHNIIAIADIDTRRLTRILRETGSQAGCIYIPNENESLAQAVEKAQDLAKSFGSMAGKDLAKEVTCQHRYEWQEGIWHLPTNNAGKPFNLQTTPTFHVVAYDFGIKQNILRMLAERGCKITVVPAQTSAEDILALNPDGIFLSNGPGDPEPCTYAIQSIRQLLNTQKPIFGICLGHQLLGLAVGAKTRKMAFGHHGANHPVQDLKTEHVLITSQNHGFEIDEYSLPENVIVTHRSLFDNSVQGIELTNQVAFSFQGHPEANPGPQDVAYLFDKFINAVQATKA

SEQ ID NO: 95429 - DNA, 1137 bp, Helicobacter hepaticus
  CDS (1)..(1137): transl_table=11
atgagcattcttaaagaagcatatctgtattttgcgaatggattattctttaaggcgcaaagctttggcagtgatgggacttttgtaggtgaagttgtatttaatacctctatgagtggttatcaagaagttattactgacccaagttattcagggcagtttattgtttttagtatgccagagattggtattgtgggtgtaaataaccaagatagcgaatctccccgagccgcttgcacaggcgttattctttcttcatacaatgattttgtctctaattttcgctccgaacaaagccttagcacatatcttaaagaacataatattatgggcatatgtggggtggatacacgcaatttaattaaaatgctcactacacaaggcgcgatgatgatgatagcttctacgcaaattactcaagagagtgagctcaaagcaagtctaagtcgcacacctcctatccaagatataaactttataaaagaagtatccacaaaaacatcttatgtgcacacagattctacatttgattttacacattttgcttatggcacatctccaaactttaaggcaaaagtcgttgcgattgattttggtgcaaaacgtaatattcttaatgaacttgtagcagtgggactagaggtagaggttattccccatagttttagtgcagcggaaattttatcgcgttttaaagcgggggagatccaaggagtttttttatctaatggaccaggtgatccgttggtgttacataacgagattgagcaaattaagcagcttattcaatcagatattcctatttttggcatttgtttaggacatcagcttctttctatcgcacacggctttcctacatataaactaaagtttggtcatcacggaagcaaccatcctattaagaatctccaaagcggggcagtagaaattacagcacaaaatcataattattgtgtgccagaatctattgcacaaattgccactattacacatcgtaatttatttgataatacgattgaaggcgtgcgctacaaagataaacctatattttcagtgcaacatcacccagaggcaagtccaggaccaagagaagcacgcattctttttgaagaatttgccaaactctgttgtaaataa

SEQ ID NO: 95430 - protein, 378 aa, Helicobacter hepaticus
MSILKEAYLYFANGLFFKAQSFGSDGTFVGEVVFNTSMSGYQEVITDPSYSGQFIVFSMPEIGIVGVNNQDSESPRAACTGVILSSYNDFVSNFRSEQSLSTYLKEHNIMGICGVDTRNLIKMLTTQGAMMMIASTQITQESELKASLSRTPPIQDINFIKEVSTKTSYVHTDSTFDFTHFAYGTSPNFKAKVVAIDFGAKRNILNELVAVGLEVEVIPHSFSAAEILSRFKAGEIQGVFLSNGPGDPLVLHNEIEQIKQLIQSDIPIFGICLGHQLLSIAHGFPTYKLKFGHHGSNHPIKNLQSGAVEITAQNHNYCVPESIAQIATITHRNLFDNTIEGVRYKDKPIFSVQHHPEASPGPREARILFEEFAKLCCK

SEQ ID NO: 95431 - DNA, 1128 bp, Helicobacter pylori J99
  CDS (1)..(1128): transl_table=11
atggtctctctctatttagaaaacgggctttttttgcaagcgcaaagttttggggctagcggcacgcaagtgggcgagcttgtttttaacacttctatgagcggctatcaagaagtcattagcgaccccagctataaggggcaattcgtggtttttagcatgcctgaaattggggttgtgggcgctaatcctaaagatgatgaatcctttttttcatgcgcaggggttttagcgcgccattacaacgaatttttttctaactcaagggcggattctagcttgagcacttatttgaaaaagcgtggcgttttagggattagtggggttgataccaggagtttgattaaaaccttacgccaccatgggtgcttgatgatgatagcttccacgatcgagcatgacagaaacaagcttgaagaggttttaaaaaacgcccctaaaatttctcactcccccttagtgtctagcgtttccacgccaaaaatcatcacgcaccagcgtgctacttttgatttcaacaccctagattacaagccttttgatgaaaaaattccgcataaaattatcgccgtgctagactttggggctaagggcaacattttaaacgagcttcaaaatgtggggttaaaagcccttatttacccgcaccacactaaagctaacgagctgattaaggcctatgaaaaaaaagaaattagcgggatttttctctctaatgggccaggcgatcctttaagcttgcagcaagaaattggagaaatcaaacgactcattaacgctaaaatccccatgtttggcatttgcttagggcatcaattgctctctatcgcgcaaggctaccctacttataagctcaaatttggccatcatgggagcaaccaccccgttaaaaacctagaaacaaacgctgttgaaatcaccgcacaaaaccacaactattgcgtccctgaagaaattgaagagatcgctactatcacgcaccgcaatctttttgacaacaccattgagggcgtgcgttataaaaacgctcccatcatctctgtccagcaccacccagaaagcagcccaggccctaaagagagccactatatttttaaggaatttgtgggattgctagagggcttttag

SEQ ID NO: 95432 - protein, 375 aa, Helicobacter pylori J99
MVSLYLENGLFLQAQSFGASGTQVGELVFNTSMSGYQEVISDPSYKGQFVVFSMPEIGVVGANPKDDESFFSCAGVLARHYNEFFSNSRADSSLSTYLKKRGVLGISGVDTRSLIKTLRHHGCLMMIASTIEHDRNKLEEVLKNAPKISHSPLVSSVSTPKIITHQRATFDFNTLDYKPFDEKIPHKIIAVLDFGAKGNILNELQNVGLKALIYPHHTKANELIKAYEKKEISGIFLSNGPGDPLSLQQEIGEIKRLINAKIPMFGICLGHQLLSIAQGYPTYKLKFGHHGSNHPVKNLETNAVEITAQNHNYCVPEEIEEIATITHRNLFDNTIEGVRYKNAPIISVQHHPESSPGPKESHYIFKEFVGLLEGF

SEQ ID NO: 95433 - DNA, 1074 bp, Lactococcus lactis subsp
  CDS (1)..(1074): transl_table=11
atgagcaaaagacttttaattttagaagacggaaccatttttgagggagaatcccttggtgcaaacttggatgttacaggtgaacttgtctttaatacaggaatgacaggctatcaagaatcaatcactgaccaatcatacaacggacaaattttgactttcacttatccaattgttggaaattatggcgtcaatcgagatgattatgaatcaattcatccaacctgtaaagccgtagttgttcatgaagcagcgtgccgtccttcgaactggcggatgcaaatgtcttttgatgaatttttaaaagcaaaaaatattcctggaattacaggtgtggatactcgagcgattactaaaattgttcgagaacacggcactatgaaggcctcacttgtacaagcaagagatgaagtagagcatcaaatgagccaacttcaagcgacagtattaccaacaaatcaagttgaaacaagtagtacaacgaccgcttatccatcaccaaatacaggcagaaaagttgtcgttgttgactttggcttgaaacatagtatcctacgggaactttcaaaacgggaatgtaatctcaccgttgtcccatacaacaccagtgctcaagaaattttggaaatggaacctgatggtgtcatgttgactaatggccctggtgacccaacagatgtaccagaagcaattgaaatgattaaagaaattcaaggtaaaattccaattttcggtatttgcttaggtcatcaattatttagtcttgcaaatggagcaaaaacctacaaaatgaaatttggacaccgtggatttaaccatgccgttcgtgaaattgcaacaggacgaattgacttcacctcacaaaatcatggatatgccgtttcatcagaaaacttacctgaagacctaatgattacccatgttgaaatcaatgacgactcagttgaaggagtgcgtcacaaacacttcccagctttttcagtccaatttcacccagacgcagctcctgggcctcacgatgccagctatctttttgatgatttcatggatctcatggataacttcaaaaaatag

SEQ ID NO: 95434 - protein, 357 aa, Lactococcus lactis subsp
MSKRLLILEDGTIFEGESLGANLDVTGELVFNTGMTGYQESITDQSYNGQILTFTYPIVGNYGVNRDDYESIHPTCKAVVVHEAACRPSNWRMQMSFDEFLKAKNIPGITGVDTRAITKIVREHGTMKASLVQARDEVEHQMSQLQATVLPTNQVETSSTTTAYPSPNTGRKVVVVDFGLKHSILRELSKRECNLTVVPYNTSAQEILEMEPDGVMLTNGPGDPTDVPEAIEMIKEIQGKIPIFGICLGHQLFSLANGAKTYKMKFGHRGFNHAVREIATGRIDFTSQNHGYAVSSENLPEDLMITHVEINDDSVEGVRHKHFPAFSVQFHPDAAPGPHDASYLFDDFMDLMDNFKK

SEQ ID NO: 95435 - DNA, 1095 bp, Lactobacillus plantarum
  CDS (1)..(1095): transl_table=11
atgaaacgatacttagtacttgaagatggtacgatttaccccggcacggggtttggtgcgacaacggccacggttggtgaattagtctttaataccggcatgagtggttatcaagagtcgatcacagaccagtcttataatggcgaaatcttgatgtttacgtatcctttgattggaaattacggcattaatcgggatgaccatgagtcaatcaagccaacttgtaagggcgttgttgttcacgaagttgcccgacgagccagtaattggcgtaatgctcagtcgttggacgattatctaaaacagaatgcgattcctggcattatggatattgatacgcgggcggtcactaaacatatccgaacgaagggcgcgatgaaggccaccatcgtcgataacgtcttaccagatacggttgaccggctcaaagtcacggaattaaatcgggccgttgttgcccagagctcaacgaataacgcctatcccaacccagcgacaggtcccaacgtggtcgtcgtcgactttgggttgaagcattcgattttacgcgaattagcaaagcgtcaatgtaacttgacggtgttgccgtacaataccacggcgagtgaaatcatggctttgaatccggatggtgtgatgttgacgaacggccctggtgatcccaaagatgttccgggagccttagagatgatcagagaagtggaaaaacatgtgccgctatttggaatttgtctcggacatcaactttttgcgctagcaaacggtgcggacacgttcaagatgaagttcggacatcgtggatttaaccatcccgttcgtgagattgcaactgggcggattgattttacgtcgcaaaaccatggttacgcggtggatcgggattcattagcgcagactgacttgttaatcacccatgaggagattaatgatggtaccgtggaaggcttgcggcatcgcgactacgcggccttttccgtgcaatatcatccggacgcagcgccgggtcctcacgatgctgatcatatttttgacgaatttattgatttgatggcggctaatcaagcaacccagaaaggaagccaattcaatgcctaa

SEQ ID NO: 95436 - protein, 364 aa, Lactobacillus plantarum
MKRYLVLEDGTIYPGTGFGATTATVGELVFNTGMSGYQESITDQSYNGEILMFTYPLIGNYGINRDDHESIKPTCKGVVVHEVARRASNWRNAQSLDDYLKQNAIPGIMDIDTRAVTKHIRTKGAMKATIVDNVLPDTVDRLKVTELNRAVVAQSSTNNAYPNPATGPNVVVVDFGLKHSILRELAKRQCNLTVLPYNTTASEIMALNPDGVMLTNGPGDPKDVPGALEMIREVEKHVPLFGICLGHQLFALANGADTFKMKFGHRGFNHPVREIATGRIDFTSQNHGYAVDRDSLAQTDLLITHEEINDGTVEGLRHRDYAAFSVQYHPDAAPGPHDADHIFDEFIDLMAANQATQKGSQFNA

SEQ ID NO: 95437 - DNA, 1092 bp, Leptospira interrogans
  CDS (1)..(1092): transl_table=11
ttgatgaaagcattcttagttcttgataacggaacaatcttcgaaggtgaatccttcggctatgaaactgaatccgttggagagattgtctttaatacttctatggcgggttatcaagagattttaacggacccttcgtattgtaatcagatcattacactgacttatcctatgatcggaaattacggaatccatcctgataacatggaatcttctaaaattcaagccagcggtttaatcgttaaagaatacgtagatctaccttctaactttaaatccgaaaaaacgttatctcagtttttaaaagaatataaaattccagccattcaggggatagacactcgtaaattgacccggtttatacgcacaaacggttctcccaatggtggaatttttgtggcttcggaatattctccttcttttttagaaaaggtaaaatcatttccaggaatcatcaacgcagatctagctaaggtagtaactacttccagtaaatatatctttggaactcacactggtaaaaaatttaaactcgcagtatatgactatggcgtgaaaacaaacatactacgtcttttagatgcgaatggttttgcagtaacagtttatccagcaaaaactccttcagaagaaattatgaaagaaggaaccgacgcattttttctttctaatggccctggagaccccgcccccttagattacgcgattgcttcaactcaaaagattatggaaaaaagatatcctctttttggaatctgcctgggtcatcaaatcattggactttctttaggaaaaaaaacggaaaagatgaaattcggtcatagaggtggaaaccaaccggtcaaaaatcttgagactggtcaggtagaaattacttcgcaaaatcatggttttgcggtaatagacgaccagaaacaggatgaaccaatttcttttctgaacctaaacgatcatactgtagaaggaattttaaaatccggttatcctctattgaccgttcagtatcatccggaaagtgctcctggtccaaacgattcacggtatctatttcaaaaattttatgatttagtagaaaaaacaaaaaaaggttaa

SEQ ID NO: 95438 - protein, 363 aa, Leptospira interrogans
MMKAFLVLDNGTIFEGESFGYETESVGEIVFNTSMAGYQEILTDPSYCNQIITLTYPMIGNYGIHPDNMESSKIQASGLIVKEYVDLPSNFKSEKTLSQFLKEYKIPAIQGIDTRKLTRFIRTNGSPNGGIFVASEYSPSFLEKVKSFPGIINADLAKVVTTSSKYIFGTHTGKKFKLAVYDYGVKTNILRLLDANGFAVTVYPAKTPSEEIMKEGTDAFFLSNGPGDPAPLDYAIASTQKIMEKRYPLFGICLGHQIIGLSLGKKTEKMKFGHRGGNQPVKNLETGQVEITSQNHGFAVIDDQKQDEPISFLNLNDHTVEGILKSGYPLLTVQYHPESAPGPNDSRYLFQKFYDLVEKTKKG

SEQ ID NO: 95439 - DNA, 1092 bp, Listeria innocua
  CDS (1)..(1092): transl_table=11
atgacaaagcgaattttaatgctagaagatggcaattactttatcggtgatgcaattggtagtgaaaaagaaacaatcggtgaagttgtttttaatacgggaatgactggctaccaagaaacaatcacagacccttcatattatgggcaaattatcacttttacgtatccacttgttggaaactacggtgtgaaccgcgatgattttgaatccattaatccagctgttaaaggagtcgttgtgcgtgaagccgcagagtatccatccaactggcgcaaccaaattactttaaatgaatttttaaaagaaaaaggcattcctggaatcgcgggaattgatacgcgtaaattaacgaaattaattcgtaaagaaggcacgctaaaaggaattttatcagcagcaacagcagacaaagaggaattgctacaccatcttcgttctgtacgcttgcctgttgaccaagtacatgaagtatcttcggctaaagcttttgcaagtccaggcgatggtaaacgagttgtccttgtggattatggtgtgaaaagctcgattttacgagaactgaataaacgtaattgttatgtgacggttgttccttataatacaactgccgaagaaatccttgccatgcatccagatggcgtgatgttatcaaacggacctggtgacccgaaagacgtacccgaagcgctagaaatgattcgcggtattcaaggtaaactgccattatttggaatctgcttagggcaccaactatttgcactagcaaacggagcagatacgtttaaattgaagttcggtcaccgtggcgcgaatcatccagtaaaagaactagcaaccggccgcgttgacttcactgcgcaaaatcacggttatgcggtagaaaaggaatcgcttatcggcactgatttaaaagtaacgcatattgaattaaacgatgaaacagtggaaggccttgcacacaaggaataccaagcgtataccgtacaatatcatccagaagcaaacccaggtccaagtgacgttaactacttgtttgacgaatttatggaaatgatgaatgtgaaagaggagggtgaattacatgcctaa

SEQ ID NO: 95440 - protein, 363 aa, Listeria innocua
MTKRILMLEDGNYFIGDAIGSEKETIGEVVFNTGMTGYQETITDPSYYGQIITFTYPLVGNYGVNRDDFESINPAVKGVVVREAAEYPSNWRNQITLNEFLKEKGIPGIAGIDTRKLTKLIRKEGTLKGILSAATADKEELLHHLRSVRLPVDQVHEVSSAKAFASPGDGKRVVLVDYGVKSSILRELNKRNCYVTVVPYNTTAEEILAMHPDGVMLSNGPGDPKDVPEALEMIRGIQGKLPLFGICLGHQLFALANGADTFKLKFGHRGANHPVKELATGRVDFTAQNHGYAVEKESLIGTDLKVTHIELNDETVEGLAHKEYQAYTVQYHPEANPGPSDVNYLFDEFMEMMNVKEEGELHA

SEQ ID NO: 95441 - DNA, 1092 bp, Listeria monocytogenes serotype 4b
  CDS (1)..(1092): transl_table=11
atgacaaagcgaattttaatgctagaagatggcaattattttatcggtgatgcgattggtagtgaaaaagaaaccattggtgaagttgtcttcaatactggaatgactggctaccaagaaacaatcactgacccttcgtactatggtcaaattattacttttacgtatccacttgttggaaattacggtgtgaaccgcgacgattttgaatctatcaatcctgctgtgaaaggggttgtggttcgtgaagctgcagaatttccttccaactggcgcaatcaaattactttagatgaatttttgaaagaaaaaggcatcccgggaatcgcgggaattgatacgcgtaaactaacgaaactaattcgtaaagaaggaacgttaaaaggcattttagcagcagaaactgcaaacaaagaggaattgctacaccacttgcgctctgtacgtttgccagtcgatcaagtacatgaagtttcctctgctaaagcatttgcaagcccaggagatggtaaacgagtggtgcttgttgattatggtgtgaaaagttcaattttacgggaactgaataaacgtaactgttacgtgacggttgttccttacaacacaacagccgaagaaattcttgcaatgcatccggatggcgtgatgttatccaatggacctggggatccgaaagatgtgccagaagcattagaaatgatacgcggcattcaaggcaagctcccactattcggaatttgcttagggcaccaactgtttgcacttgcgaacggagcagatacatttaaactgaaattcgggcatcgtggcgcgaatcatccggtgaaagaactagccactggacgtgttgatttcactgcacaaaaccacggttacgcagtagaaaaagattcacttattggaacagatttaaaagtaacacacattgaattaaatgatgaaacggtagaagggctggcacataaagaatatccagcctatacagtacaatatcacccagaagcaaacccaggaccaagtgacgtcaactacttatttgatgaatttatggaaatgatgaatgggaaagaggagggtgaactacatgcctaa

SEQ ID NO: 95442 - protein, 363 aa, Listeria monocytogenes serotype 4b
MTKRILMLEDGNYFIGDAIGSEKETIGEVVFNTGMTGYQETITDPSYYGQIITFTYPLVGNYGVNRDDFESINPAVKGVVVREAAEFPSNWRNQITLDEFLKEKGIPGIAGIDTRKLTKLIRKEGTLKGILAAETANKEELLHHLRSVRLPVDQVHEVSSAKAFASPGDGKRVVLVDYGVKSSILRELNKRNCYVTVVPYNTTAEEILAMHPDGVMLSNGPGDPKDVPEALEMIRGIQGKLPLFGICLGHQLFALANGADTFKLKFGHRGANHPVKELATGRVDFTAQNHGYAVEKDSLIGTDLKVTHIELNDETVEGLAHKEYPAYTVQYHPEANPGPSDVNYLFDEFMEMMNGKEEGELHA

SEQ ID NO: 95443 - DNA, 1107 bp, Methanosarcina acetivorans
  CDS (1)..(1107): transl_table=11
atgaaagcagtactaggattagaagacggaacagttattaggggcaccggttttggtgccgaaggcacagcttgcggcgaacttgtttttaccactcaattcacgggatatgaggaggctctgactgacccttcctacaaaggccagattttaatgttcacctaccctctgatagggaattacggtgtcagtggggagcgtttccaatccgacaacatccatgcggaggggcttgttgtccgggaagcctgcaaaaaaccctatcactacaaatccacccgttcaattcaccagtttttggaggacgagggaaaaccggggatcgaaggtgtggatacccgtatgctcaccataggggcaagggagcgcgggaccatgcgtgctgccctgattacaggcagtgatgatggggaagaggccgttaaagtggcaaggaatttcccccagataacggatgaggaacttatcgcccgcgtaacatgcaaagaaccccacttcatccctggagcggagtgcgcctggaaaggcagcggcaaacccaaacacgcggttgtggtcgacctcggcataaagaggaacatcataaacaacctgcataaaaggggaattgacctcaccctggtccctgcaaccacaaaaccgaaggaaattgcaggtttcgagcctgatctactttttatctcaaacgggccaggagacccggaaaaggcaaccgatgcaatcaatgcggtaaaggcttttgcaggcacgattccggtagccgggatttgtttcgggcaccagattatctctcttgctatgggagccaggacttacaagcttaagttcggacacaggggaggaaaccagccggtaaaggacctgattgaaaacaagattttcataagctcccagaaccacgggtatgccgttgatgcggattcccttgaagggaccggcctttatgtgaagtacctgaacgcaaacgacaaaaccgttgaaggagtatcccacaaagacctggacattttcagtgtgcagttccaccccgaagcccaggcaggacctatggataccgaagaaacatttttcggcaaggttgtaaaggtcctcggaggggatctctga

SEQ ID NO: 95444 - protein, 368 aa, Methanosarcina acetivorans
MKAVLGLEDGTVIRGTGFGAEGTACGELVFTTQFTGYEEALTDPSYKGQILMFTYPLIGNYGVSGERFQSDNIHAEGLVVREACKKPYHYKSTRSIHQFLEDEGKPGIEGVDTRMLTIGARERGTMRAALITGSDDGEEAVKVARNFPQITDEELIARVTCKEPHFIPGAECAWKGSGKPKHAVVVDLGIKRNIINNLHKRGIDLTLVPATTKPKEIAGFEPDLLFISNGPGDPEKATDAINAVKAFAGTIPVAGICFGHQIISLAMGARTYKLKFGHRGGNQPVKDLIENKIFISSQNHGYAVDADSLEGTGLYVKYLNANDKTVEGVSHKDLDIFSVQFHPEAQAGPMDTEETFFGKVVKVLGGDL

SEQ ID NO: 95445 - DNA, 1065 bp, Methanococcus jannaschii
  CDS (1)..(1065): transl_table=11
atggaggcagtgttaatcttagaggacggaacaattttaaaaggaaaaggttttggagcagagaaagaggtttttggagaattagtttttacaacagttatgactggttatgttgaagttttaacagacccttcatataaagggcaaatagttatgatgacttatccattagaagggaattatggagttaaaaaggattggtttgagtcagatgggataaaggcagagggttttgttgttagagaggtaacaagtaaagctttagatgactttttaaaggagtatgatatcccaggaattcaagatattgatacaagattcttaacaagaaagattagggataaaggagttgttaaaagctgtttaaaggttgctgaagaaataagtgatgatgaaatatctgaattattggagagagttaaaagatacagtgatatatcagatattgatttagttcctttagtttcaacaaaagaaccaaaaattcataaaacagctaacccaaaggcaagatgtgttttaattgattgtggagttaaattgaatattataagaagtttagttcaaagaaactgtgaagttattcaagtcccatacaacacaaagtatgatgaaatcttagaatacaaaccagattttgttttaatctccaatggcccaggagacccagcaagattaaaagaagttattaaaaatattaaaaacttaattggtgttgtcccaataacaggaatttgtttaggtaatcaacttttatccttagcatttggtggagaaacatacaagatgaagtttgggcataggggaggaaaccagccagttaaagatttaaaaacacaaaaagtttatataacctcccaaaaccatggatttgctgttagaaaggagagcttaccagatgatgtagaagttagctttataaatctaaacgatatgactgttgaaggtattaggcataaggatttaccaatattctcagttcaattccacccagaggcaagaccaggacctcatgacacaatgtttttattcgatgagatgattaagctgaaggataggaaataa

SEQ ID NO: 95446 - protein, 354 aa, Methanococcus jannaschii
MEAVLILEDGTILKGKGFGAEKEVFGELVFTTVMTGYVEVLTDPSYKGQIVMMTYPLEGNYGVKKDWFESDGIKAEGFVVREVTSKALDDFLKEYDIPGIQDIDTRFLTRKIRDKGVVKSCLKVAEEISDDEISELLERVKRYSDISDIDLVPLVSTKEPKIHKTANPKARCVLIDCGVKLNIIRSLVQRNCEVIQVPYNTKYDEILEYKPDFVLISNGPGDPARLKEVIKNIKNLIGVVPITGICLGNQLLSLAFGGETYKMKFGHRGGNQPVKDLKTQKVYITSQNHGFAVRKESLPDDVEVSFINLNDMTVEGIRHKDLPIFSVQFHPEARPGPHDTMFLFDEMIKLKDRK

SEQ ID NO: 95447 - DNA, 1086 bp, Methanopyrus kandleri
  CDS (1)..(1086): transl_table=11
ttgagggcggcactcgcgcttgaggatgggacgatagtacatggcgaacttttcgggagtccgcgcgaggccgaaggggaagtcgtgtttaacacttctcacactggcttccaggaagctctgacagatccgtcctaccgcggacagatcctaatcatgacgttcccgatgcaaggcaactatgggatcttaccggaagtcggcgagtccgacagggtgcaagtggagggcttcgtcgtgcggtacctccacgatggtcccatccatccgcgcgccgaaatcacattggacgaattcctccaggaccacggcgtcccggggatcgcgggcgtcgacacgcggatgctgacgaggaaaatccggacggagggtgccatgagaggggttctggtaccctacgaaccggacgaccaaccttccgatgaagaactactggagcgagtgcgggaagttccccatatctcggagatggatctggtgccgcaggtctcggtccgtgaggaataccggttctccgacggaaaaccggagatcgtggtcatagattgcggtgtgaagcggagcatactgcgtgagctggccaaacgcggcgccggcgttaccgtagtcccgtacgacacttcggcccaggagataatggacatcgatcccgacggtgtcgtagtatccaacggaccgggcgaccccaaacgcgtcagggagaccgtggaaacggtccgtgaactgataggtcaggttccattgatgggtatatgtcttggcaaccaaatcctcggactcgccgaggggggcgatactttcaagctgaagttcgggcaccgtggcgcgaaccagcccgtcaaggatcttgataaggatagagtctacatcacttcccagaaccatggattcgcactggatccggacagtctcagagacacgcccttgagagtccgctgggttaacgtcaacgacggtacggtcgaaggcgtcgttcacacggacgccccggcgttttccgtgcagttccacccggaggcagggcccggtccttgggataccaagtgggtgttcgacgagttcctggccatgtgtcgcgaacactga

SEQ ID NO: 95448 - protein, 361 aa, Methanopyrus kandleri
MRAALALEDGTIVHGELFGSPREAEGEVVFNTSHTGFQEALTDPSYRGQILIMTFPMQGNYGILPEVGESDRVQVEGFVVRYLHDGPIHPRAEITLDEFLQDHGVPGIAGVDTRMLTRKIRTEGAMRGVLVPYEPDDQPSDEELLERVREVPHISEMDLVPQVSVREEYRFSDGKPEIVVIDCGVKRSILRELAKRGAGVTVVPYDTSAQEIMDIDPDGVVVSNGPGDPKRVRETVETVRELIGQVPLMGICLGNQILGLAEGGDTFKLKFGHRGANQPVKDLDKDRVYITSQNHGFALDPDSLRDTPLRVRWVNVNDGTVEGVVHTDAPAFSVQFHPEAGPGPWDTKWVFDEFLAMCREH

SEQ ID NO: 95449 - DNA, 1131 bp, Mycobacterium bovis
  CDS (1)..(1131): transl_table=11
ttgagcaaagccgtattggtcctcgaagacggccgggtgttcaccggcaggccgttcggcgcgaccggacaagcgctcggggaggccgtgttttccaccggcatgtccggttatcaggagacgctgaccgatcccagctatcaccgtcagatcgtggtggccaccgcgccgcagatcggcaacaccggctggaacggcgaggactccgaaagccgaggggagcggatctgggtcgccggttacgcggtgcgcgacccgtcgccgcgcgcgtccaactggcgcgccaccggcacgttggaagacgaactcatccgccagcgcatcgtcgggatcgccggcatcgacacccggggcgtggtgcgccatctgcgcagccgcgggtcgatgaaggcgggggtgttctccgacggggcgctggccgagcctgccgacttgatcgcgcgggtgcgagcacaacagtcgatgctgggcgccgatctggccggcgaggtcagcaccgcggagccgtatgtcgtcgaacccgacgggccaccgggtgtttcgaggttcaccgtggccgccctagatcttggtatcaagaccaacactccgcgtaacttcgcccggcgcgggattcgctgccatgtgctgccggcatcgaccaccttcgagcagatcgccgaactcaacccgcatggcgtgttcttgtccaacggccccggcgacccggccaccgccgatcacgtcgtcgcgcttacccgcgaggtgctgggcgccggaatcccgttgttcggcatctgtttcggcaaccagatcctgggccgcgcgctgggcctgtcgacctacaagatggtgtttgggcaccgcggcatcaacatcccggtcgtcgaccacgccaccggtcgggtggcggtgaccgcgcaaaaccatggcttcgcccttcagggggaggcgggccaatccttcgccaccccgttcggtcccgcggtggtcagccacacctgcgccaacgacggtgtggtcgaaggcgtcaagctcgttgacgggcgggcgttttcggtgcaataccacccggaagccgccgccggcccgcacgatgccgagtacctgttcgaccagttcgtggagctgatggcaggggagggccgctag

SEQ ID NO: 95450 - protein, 376 aa, Mycobacterium bovis
MSKAVLVLEDGRVFTGRPFGATGQALGEAVFSTGMSGYQETLTDPSYHRQIVVATAPQIGNTGWNGEDSESRGERIWVAGYAVRDPSPRASNWRATGTLEDELIRQRIVGIAGIDTRGVVRHLRSRGSMKAGVFSDGALAEPADLIARVRAQQSMLGADLAGEVSTAEPYVVEPDGPPGVSRFTVAALDLGIKTNTPRNFARRGIRCHVLPASTTFEQIAELNPHGVFLSNGPGDPATADHVVALTREVLGAGIPLFGICFGNQILGRALGLSTYKMVFGHRGINIPVVDHATGRVAVTAQNHGFALQGEAGQSFATPFGPAVVSHTCANDGVVEGVKLVDGRAFSVQYHPEAAAGPHDAEYLFDQFVELMAGEGR

SEQ ID NO: 95451 - DNA, 1134 bp, Neisseria gonorrhoeae
  CDS (1)..(1134): transl_table=11
atgaacacccccgccctcctcgtcctcgctgacggcagcgtattccacggcacatcaatcggttacgaaggttcggcttccggcgaagtcgtgttcaatacttcgatgaccggctatcaggaaatcctgaccgatccgtcctactgcaaacaaatcgttaccctcacctatccgcacatcggcaataccggcaccaacgccgaagatgaagaaagccgcagcgtttacgccgcaggcctgattatccgcgacctgccgctcttgcacagcaacttccgcgcctccgaaagcctgcacgactatttggtacgcaacgaaaccgtcgccatcgccgacatcgacacccgccgcctgaccatgctgttgcgcgaaaaaggcgcgcaaggcggcgcgattctgacaggtgcggatgccaccgttgaaaaagcgcaagaactcatcgccgcgttcggcagcatggtcggcaaagatttggcaaaagaagtttcctgcacggaaacttacgaatggacggaaggcgaatgggaattgggcaaaggtttcgttacccctgacaaacagccttaccacgtcgtcgcctacgatttcggcgtgaaaaccaacatcctgcgtatgctcgcctcgcgcggctgccgcctgaccgtcgtccccgcacaaacgagcgcggaagacgtgttggcactcaatcccgacggcgtgttcctgtccaacggccccggcgaccccgagccttgcacctacggcatcgaagccgtgcaaaaactgatggaaagcggcaaaccgattttcggcatctgcttgggacaccagctcatcagcctcgccatcggcgcgaaaaccctgaaaatgcgcttcagccaccacggtgcgaaccatcctgtgcaagatttggacagcggcaaagtcgtcattaccagccaaaaccacggtttcgccgtcgatgccgacaccctgcccgccaacgcacgcattacccacaaatccttgttcgacaataccttgcaaggcatcgagctgaccgacaaacccgtgtcctgtttccaaggacaccccgaagccagcccgggtccgcaagatgtcggctatttgtccgacaaattcattggcaatatgaaggctgcaaaacaagcataa

SEQ ID NO: 95452 - protein, 377 aa, Neisseria gonorrhoeae
MNTPALLVLADGSVFHGTSIGYEGSASGEVVFNTSMTGYQEILTDPSYCKQIVTLTYPHIGNTGTNAEDEESRSVYAAGLIIRDLPLLHSNFRASESLHDYLVRNETVAIADIDTRRLTMLLREKGAQGGAILTGADATVEKAQELIAAFGSMVGKDLAKEVSCTETYEWTEGEWELGKGFVTPDKQPYHVVAYDFGVKTNILRMLASRGCRLTVVPAQTSAEDVLALNPDGVFLSNGPGDPEPCTYGIEAVQKLMESGKPIFGICLGHQLISLAIGAKTLKMRFSHHGANHPVQDLDSGKVVITSQNHGFAVDADTLPANARITHKSLFDNTLQGIELTDKPVSCFQGHPEASPGPQDVGYLSDKFIGNMKAAKQA

SEQ ID NO: 95453 - DNA, 1134 bp, Neisseria meningitidis serogroup B
  CDS (1)..(1134): transl_table=11
atgagcacccccgccctcctcgtcctcgctgacggcagcgtatttcacggcacatcaatcggttacgaaggttcgacttccggcgaagtcgtgttcaatacttcgatgaccggctatcaggaaatcctgaccgacccgtcctactgcaaacaaatcgttaccctcacctacccacacatcggcaacaccggcaccaacgccgaagatgaagaaagccgcagcgtttatgccgccggcctgattatccgcgacctgccgctcttgcacagcaacttccgcgcctccgaaagcctgcacgactatctggtacgcaacaaaaccgtcgccatcgccgacatcgacacccgccgcctgaccacgctgttgcgcgaaaaaggcgcgcaaggcggtgcgattctgaccggtgcggatgccacaatcgaaaaagcgcaagaactcatcgccgcgttcggcagcatggtcggaaaagatttggcaaaagaagtttcctgcacggaaacttacgaatggacggaaggcgaatgggcattgggcaagggtttcgttacccctgacgaacagccttaccacgtcgtcgcctacgatttcggcgtgaaaaccaacatcctgcgtatgctcgcctcgcgcggctgccgcctgaccgtcgtccccgcccaaacgagcgcggaagacgtgttggcactcaaccctgacggcgtattcctatccaacggccccggcgaccccgagccttgcacctacgccatcaaagccgtacaaaaactgatagaaagcggcaaaccgatttttggcatttgcttgggacaccagctcatcagcctcgccatcggcgcgaaaaccctgaaaatgcgcttcagccaccacggtgcgaaccaccctgtgcaagatttggacagcggcaaagtcgtcatcaccagccaaaaccacggttttgccgttgatgccgacaccctgcccgctaacgcacgcattacccacaaatccttgtttgacaacactttgcaaggcatcgagctgaccgacaaacctgtgttctgcttccaaggccaccccgaagccagccccggtccgcaagatgtcggctatttgtttgacaaattcattggcaatatgaaagcggcaaaacgggcataa

SEQ ID NO: 95454 - protein, 377 aa, Neisseria meningitidis serogroup B
MSTPALLVLADGSVFHGTSIGYEGSTSGEVVFNTSMTGYQEILTDPSYCKQIVTLTYPHIGNTGTNAEDEESRSVYAAGLIIRDLPLLHSNFRASESLHDYLVRNKTVAIADIDTRRLTTLLREKGAQGGAILTGADATIEKAQELIAAFGSMVGKDLAKEVSCTETYEWTEGEWALGKGFVTPDEQPYHVVAYDFGVKTNILRMLASRGCRLTVVPAQTSAEDVLALNPDGVFLSNGPGDPEPCTYAIKAVQKLIESGKPIFGICLGHQLISLAIGAKTLKMRFSHHGANHPVQDLDSGKVVITSQNHGFAVDADTLPANARITHKSLFDNTLQGIELTDKPVFCFQGHPEASPGPQDVGYLFDKFIGNMKAAKRA

SEQ ID NO: 95455 - DNA, 1101 bp, Oceanobacillus iheyensis
  CDS (1)..(1101): transl_table=11
atgaagaagcgtaaattaatactagaagatggaactgtttttaatgggacagcgtttggaagtgatgccgaatcaagtggtgagattgtatttaatactggaatgacaggttatcaagaagtcatcacagatcctagttattgtggtcaattcgttacattaacttatcctttaattggaaattatggcattaatcgcgatgattttgaaacagtgacaccatttattcatggtcttgttgtaaaagagtatagtgaatttccatctaactttcgaaatgaggagactttagatgagtttttacaagctcataatattcctggaattgcaaatattgatacacggaagctcactcgaatcatacgtaagcacggtacaatgcgagcagtaatggtcgatgagcagaaaaatgagcaacacgttatagaacaattaagacttgctgaaatgcctcgagaccaggtgaaacgaacttcgaccattaaaccatatgttgtaccaggaagagggctacgagtagtaatggttgatttcggtgcaaagcatgggattctaagagaattaacaagacgtgactgtcatatcaccgttgtccctcataactatagtgcggaagcaatcttacgattaaaaccagatggaattatgttgacgaatggacctggggatccaaaagatgttccagaagcaattgaaatgataaaacaacttctcggccaaatccctatattcggcatttgccttggacatcaattgctggcattggcttgtggagcagatacggaaaaaatgaaattcggtcaccggggagcgaatcatccagtaaaggatttactagccggaaaaacgtatttaacatcacaaaaccatagctatgcagttaacgtttcgtcgctagttaacacagatctcgaattaacgcagatcgctttaaatgatgatacggtagaaggaattcgccatactgccttcccggcattttcagttcaatatcatccagaagcatcaccaggaccggaggatacgaatttcttatttgatgagtttttaaacctgattaaggctagcaaagtgaaacaaggaggagaagtatatgcctaa

SEQ ID NO: 95456 - protein, 366 aa, Oceanobacillus iheyensis
MKKRKLILEDGTVFNGTAFGSDAESSGEIVFNTGMTGYQEVITDPSYCGQFVTLTYPLIGNYGINRDDFETVTPFIHGLVVKEYSEFPSNFRNEETLDEFLQAHNIPGIANIDTRKLTRIIRKHGTMRAVMVDEQKNEQHVIEQLRLAEMPRDQVKRTSTIKPYVVPGRGLRVVMVDFGAKHGILRELTRRDCHITVVPHNYSAEAILRLKPDGIMLTNGPGDPKDVPEAIEMIKQLLGQIPIFGICLGHQLLALACGADTEKMKFGHRGANHPVKDLLAGKTYLTSQNHSYAVNVSSLVNTDLELTQIALNDDTVEGIRHTAFPAFSVQYHPEASPGPEDTNFLFDEFLNLIKASKVKQGGEVYA

SEQ ID NO: 95457 - DNA, 1158 bp, Pasteurella multocida
  CDS (1)..(1158): transl_table=11
atgtctgaaccagcaattttggtattggctgatgggagtgttttccatggcacctctattggagcaaaaggccacaccgtaggcgaagtggtgtttaataccgctatgacaggctatcaggaaattctaacggacccttcttattttcgacaaatcgtcaccttaacttatcctcacatcggcaataccggtacaaatctagaagattgcgaagcgaatcacgtttatgcctcagggctgattattcgcgatttacccttattacacagcaatttccgttcatccatgagtttgcgtgattatcttcaaacccataatgtggttgctattgcggatatcgacacacgccgtttaacccgtattttacgtgataaaggtgcgcaagcgggttgtatcatgaccggtgagattgatgaagccaaagcccttgagttagcgaaaagttttgggtctatggcgggcaaagatcttgcgcaagaagtgagtacgggtgaaatttttacttggacatcaggtcaatggcaattgggtaaagggtttattgaacaaacccaagcggaatttaatgtggtggcttatgactttggtgtcaaacacaatattttaagaatgctcgctgagcgtggttgcaaaatcaccgttgtaccggcaaaaaccagtgcagagcaagtgttagcattaaatccagatggcattttcttgtctaatggaccaggcgatccggaaccttgtgattatgccatttccgctattcaaaccttattagcctcaaagaaacccatttttggtatttgtttaggtcatcagttattaggtttagccgcaggtggtaaaactaaaaaaatggcatttgggcatcatggtgctaatcaccccgtacaagatttgaatacacaaaaagtgtttatcacgagtcaaaatcatggttttgaagtagatgaagctagcttaccaagtcatgtgcgtgtgacacatcgttcattatttgacaattctgtacagggtattgaactcagtgatcagtctgcgttttctttccaagggcaccctgaggcgagtccaggtccaaatgatgtggcttatttatttgataaatttattaatgaaatgcgcaaggcaaatttaagtcagttatcgacttatgtcgcgcaccattag

SEQ ID NO: 95458 - protein, 385 aa, Pasteurella multocida
MSEPAILVLADGSVFHGTSIGAKGHTVGEVVFNTAMTGYQEILTDPSYFRQIVTLTYPHIGNTGTNLEDCEANHVYASGLIIRDLPLLHSNFRSSMSLRDYLQTHNVVAIADIDTRRLTRILRDKGAQAGCIMTGEIDEAKALELAKSFGSMAGKDLAQEVSTGEIFTWTSGQWQLGKGFIEQTQAEFNVVAYDFGVKHNILRMLAERGCKITVVPAKTSAEQVLALNPDGIFLSNGPGDPEPCDYAISAIQTLLASKKPIFGICLGHQLLGLAAGGKTKKMAFGHHGANHPVQDLNTQKVFITSQNHGFEVDEASLPSHVRVTHRSLFDNSVQGIELSDQSAFSFQGHPEASPGPNDVAYLFDKFINEMRKANLSQLSTYVAHH

SEQ ID NO: 95459 - DNA, 1137 bp, Pseudomonas syringae pv
  CDS (1)..(1137): transl_table=11
ttgactaagccagccatactcgcccttgctgatggcagcatttttcgcggcgaagccattggagccgacggtcaaaccgttggtgaggtggtgtttaacaccgcaatgacaggctatcaggaaattcttaccgatccttcctacgcccagcagatcgttaccctgacttacccgcacatcggcaacaccggtactacacctgaagacgccgagtcggatcgtgtctggtcagcgggtctggtcatccgtgacctgccgctggttgccagtaactggcgcaacaagatgtcccttggtgattacctgaaagccaataatgtcgttgccatcgctggcatcgacacgcgtcgcctgacccgcattctgcgtgagaaaggcgcccagaacggttgcatcatggcaggggacaacatttccgaagaggcagccatcgccgccgctcgcgggttccctggcctcaagggcatggacctggcgaaggaagtcagcaccaaggacacctacgagtggcgccacagtgtctggaacctgcagaccgacagccaccccgaaatcgccgcttccgagctgccttatcacgtggttgcctacgattacggcgtcaaggtcaacatcctgcgtatgctggtcgagcgcggttgccgggtgacggtagtgcctgcgcaaacgcctgccagcgaagtgcttgcctacaagccggacggtgttttcctgtccaacggccctggcgaccctgagccatgcgactacgccatcaaggcgatcaagcaagtgctggaaaccgaagtgccagtattcggcatctgccttggtcaccagttgctggcgctggctgcgggtgccaagaccgtgaaaatgggccatggccaccacggtgcaaaccacccggttcaggatctggacaccggcgttgtaatgatcaccagtcagaaccacggttttgcggttgatgaatcgacgttgccgggcaacgttcgcgctatccacaagtcgctgttcgacggcaccctgcaaggtatcgagctgactgacaagagcgcgttcagcttccagggtcaccctgaagcaagcccaggcccgaacgatgtagcgcccctgtttgaccgctttatcgacgccatggccaagcgacgctga

SEQ ID NO: 95460 - protein, 378 aa, Pseudomonas syringae pv
MTKPAILALADGSIFRGEAIGADGQTVGEVVFNTAMTGYQEILTDPSYAQQIVTLTYPHIGNTGTTPEDAESDRVWSAGLVIRDLPLVASNWRNKMSLGDYLKANNVVAIAGIDTRRLTRILREKGAQNGCIMAGDNISEEAAIAAARGFPGLKGMDLAKEVSTKDTYEWRHSVWNLQTDSHPEIAASELPYHVVAYDYGVKVNILRMLVERGCRVTVVPAQTPASEVLAYKPDGVFLSNGPGDPEPCDYAIKAIKQVLETEVPVFGICLGHQLLALAAGAKTVKMGHGHHGANHPVQDLDTGVVMITSQNHGFAVDESTLPGNVRAIHKSLFDGTLQGIELTDKSAFSFQGHPEASPGPNDVAPLFDRFIDAMAKRR

SEQ ID NO: 95461 - DNA, 1116 bp, Pyrococcus furiosus
  CDS (1)..(1116): transl_table=11
atgggggtgcacaaaaaagggtacttagttttggaagatggctcagtgatagaagggaaggcctttggtgcagaaacgattcgatatggggaagtagtcttcacaacggcaatggtgggatatccagaatccctaactgatccttcatataaaggccaaatcttaattgcaacaaatcccttaatgggaacttatggagtttcatcaaaaagtctaaaagaacatggactgcctctacattacgaatcggactcaattaaggtagaaggatttgttatatcttttctaatgaggcctaatcactggagcagcgaaatgactctagatgaatggttaaggagggagggcgttccagggctctatggagttgatactagagccttagtcaagaagattagagaggagggtgtaatgagaggagcaatagtcacaacagaaacagatttagaagaaattttagagaatattagaaaaataagctatgaaagtaccaatttcgttgaacttgtatcgccaaaaaacccaattgtacacacaccaaaaaatgtcaaattcagagttgtggttcttgatttgggagtgaagtttggtattcttagagagttactcaagaggggaattgaagttgttagaattccatggaattgggacatattggaggcctattactcctacaacgcagatggcatattcataagcaatgggcctggaaatcctaccctcttaaaagaagttgctaagaggattagaaaggcattcaatgaagaaattccgatgatgggaatatgccttggccaacaacttttagccttagcagatggggcagaaatatacaagcttaaatacggtcatagagggattaacaaacctgttaaagatttagagagtggaaaagcatttgttactactcaaaatcatggctatgcaattgttcctgaaagcctaaatgagtttaaggtatggatggtaaacctagatgataactctgtagagggaataaaacacgaaagtttacctattatagctacccaatatcatcccgaggcttctcctggcccctgggattcattgtgggtttttgatgaatttgtaaagattttggaggggagaaaatga

SEQ ID NO: 95462 - protein, 371 aa, Pyrococcus furiosus
MGVHKKGYLVLEDGSVIEGKAFGAETIRYGEVVFTTAMVGYPESLTDPSYKGQILIATNPLMGTYGVSSKSLKEHGLPLHYESDSIKVEGFVISFLMRPNHWSSEMTLDEWLRREGVPGLYGVDTRALVKKIREEGVMRGAIVTTETDLEEILENIRKISYESTNFVELVSPKNPIVHTPKNVKFRVVVLDLGVKFGILRELLKRGIEVVRIPWNWDILEAYYSYNADGIFISNGPGNPTLLKEVAKRIRKAFNEEIPMMGICLGQQLLALADGAEIYKLKYGHRGINKPVKDLESGKAFVTTQNHGYAIVPESLNEFKVWMVNLDDNSVEGIKHESLPIIATQYHPEASPGPWDSLWVFDEFVKILEGRK

SEQ ID NO: 95463 - DNA, 1197 bp, Rhizobium loti
  CDS (1)..(1197): transl_table=11
atgacgcccgcctgggccaccgaaaagccgaccgcccttctggtgctggccgacggcaccgtcatcgagggtcggggcctcggcgccaccggttccgccgtcgccgaagtctgcttcaacaccgcgctcaccggctaccaggagatcctcaccgacccgtcctatgccggccagatcgtcaccttcaccttcccgcatatcggcaatatcggcaccaatggcgaggacatcgaggacctcaatccggccgcccgcgccggcgctgtcggcgccgtgttcaaggccgatgtcaccaacccgtccaactaccgcgccgccggccacctcgaccagtggctgaagaagcgcggcatcgtcgcactctcgggcatcgacacccgcgcgctgaccgcgctgatccgcgaaaagggcatgcccaatgccgtcatcgcgcatgcgccggacggtgtcttcgacctcgacgatctgaagcaacgcgccgccgcatggtcgggcctgatcgggctcgacctcgccaaggaagtcacgtcgggccagtcctcggtctggcgcgagacgccttgggtgtggaacgaaggttttggcgagcaggccgagccgtcgctgcacgtcgtggccatcgactacggcgtcaagcgcaacatattgcgcctgcttgccggcctcggcgccaaggtgactgtcgttccggcaaacaccggttcggaagaaatcctcgccatgcagcccgacggcatcttcctctccaacggccccggcgacccggaagccaccggcgactatgccgtgccggtcatccaggatctgctgaagaccgacattccggtgttcggcatctgcctcggccaccagatgctggcgctggcgctgggcggcaggaccgccaagatgcaccagggccatcacggcgccaaccatccggtcaaggaccacaccaccggcaaggtcgagatcgtctcgatgaaccacggctttgccgtcgacgccgactcgctgccagagggcgtcgaggaaacccatgtctcgctgttcgacggctcgaactgcggcatcgcgctcaccggccgtccggtgttctcggtccagcatcaccccgaagcctcgcccggcccacaggattcccactatctgttccgccgcttcgtcaacctgatccgcgagaagcgcggcgaggaacagctggccgagcgggtctga

SEQ ID NO: 95464 - protein, 398 aa, Rhizobium loti
MTPAWATEKPTALLVLADGTVIEGRGLGATGSAVAEVCFNTALTGYQEILTDPSYAGQIVTFTFPHIGNIGTNGEDIEDLNPAARAGAVGAVFKADVTNPSNYRAAGHLDQWLKKRGIVALSGIDTRALTALIREKGMPNAVIAHAPDGVFDLDDLKQRAAAWSGLIGLDLAKEVTSGQSSVWRETPWVWNEGFGEQAEPSLHVVAIDYGVKRNILRLLAGLGAKVTVVPANTGSEEILAMQPDGIFLSNGPGDPEATGDYAVPVIQDLLKTDIPVFGICLGHQMLALALGGRTAKMHQGHHGANHPVKDHTTGKVEIVSMNHGFAVDADSLPEGVEETHVSLFDGSNCGIALTGRPVFSVQHHPEASPGPQDSHYLFRRFVNLIREKRGEEQLAERV

SEQ ID NO: 95465 - DNA, 1206 bp, Rhizobium meliloti
  CDS (1)..(1206): transl_table=11
atgaccgcgacacccgcatggacaatccagaaacccactgccctgctcgttctggccgacggcacggtgatcgaaggcaagggcatcggcgcgaccgggacggttcaggccgaggtctgtttcaacacggcgttgaccggttaccaggaaatcctgaccgacccctcctatctcgggcagatcgtcacgttcacctttccgcatatcggcaatatcggcgccaatgacgaggacatcgaggatctgacgcctgccgcccgccacggtgccgtcggcgtcatcttcaaggccgacatcaccgagccttccaactaccgcgcagccaagcacctcgacgcctggctgaaggcgcgcggcatcatcgggctctgcggcatcgacacccgggcgctgacggcctggatccgcgaaaacggcatgcctaacgccgtcatcgcccacgacccggcaggcgtcttcgacgtcgaggcgctgaaagccgaggcaaaggcctggagcggcctcgagggcctcgatctcgccaaggtcgccacttccggccagtcctaccgctggaacgagaagccctgggtctggaacgagggctactcgacgctgggcgagaccgacgccgcttatcacgtcgtggctctcgactacggcgtcaagcgcaacatcctccgcctcttcgccggcctgaactgccgtgtcaccgtcgtccccgcccagacgagcgccgaggaagtcctggcgctcaagccggacggcatcttcctgtcgaacggcccgggcgacccggccgcgacgggcgaatatgccgtgccggtcatccaggaccttctcaagacggatatcccggtcttcggcatatgcctcggccaccagatgctggcactggcgctcggtgccaggaccgagaagatgcaccagggacaccacggcgccaaccacccggtcaaggaccacaccaccggcaaggtcgagatcgtttcgatgaaccacggcttcgcggtcgatgcgaactcgcttccgcaaggtgttgaacagactcacatctcgctcttcgacggcaccaattgcggcttgcgcgtcgacggcagaccggtcttctccgtccagcatcacccggaagcatcgccaggcccgcaggacagccattatctcttccgccgcttcctgaatctcattcgcgagaagaaaggcgaaccggcactcgccgagcgctga

SEQ ID NO: 95466 - protein, 401 aa, Rhizobium meliloti
MTATPAWTIQKPTALLVLADGTVIEGKGIGATGTVQAEVCFNTALTGYQEILTDPSYLGQIVTFTFPHIGNIGANDEDIEDLTPAARHGAVGVIFKADITEPSNYRAAKHLDAWLKARGIIGLCGIDTRALTAWIRENGMPNAVIAHDPAGVFDVEALKAEAKAWSGLEGLDLAKVATSGQSYRWNEKPWVWNEGYSTLGETDAAYHVVALDYGVKRNILRLFAGLNCRVTVVPAQTSAEEVLALKPDGIFLSNGPGDPAATGEYAVPVIQDLLKTDIPVFGICLGHQMLALALGARTEKMHQGHHGANHPVKDHTTGKVEIVSMNHGFAVDANSLPQGVEQTHISLFDGTNCGLRVDGRPVFSVQHHPEASPGPQDSHYLFRRFLNLIREKKGEPALAER

SEQ ID NO: 95467 - DNA, 1161 bp, Shewanella oneidensis
  CDS (1)..(1161): transl_table=11
atggaggtcgcgttgacaaagtctgccttactcgtactcgaagatggaaccgtattcactggcacagcgataggtgccgatggtctctcagttggtgaagttgtttttaacacttcgatgacgggataccaagaaattttaactgatccctcttattcacgccaaatagtaactttaacctacccccacattggtaatactggtaccaataatgaagacgtcgaatccaatggggttcatgcttgtggtttaatcattcgcgatcttccgctcatagcaagtagtttccgtaatcaacaaaacctcagcgattatctcaaagcaaacaacgttgttggcatcgcagatatcgatactcgtaaattaactcgaatcctccgtgaaaaaggtgcccaagcgggttgcatcatggcgggtgctgacttagatgaagttaaagcccttgcagcggctaaagccttccccggtttgaaaggtatggatttagcgaaagaggttactaccgacaaagcatacccatggcgtaaaggtagctggcgtttagtgggcggtttgcctgccgatactccagcagaagcgcttaaatacaaagtggttgcctacgactacggtgtgaagcaaaacattctacgcatgttggttgaccgtggctgcgacgtcactgtcgttccggctaaaacacctgcgtcggaagtgttagcgatgaacccagacggggtgtttctctctaacggccctggtgacccagagccttgtgattacgcgattgaagcgattcaacaaatcctgaaaaccgatacgccgattttcggtatctgtttaggccaccagttactggcattggcatcaggcgcgaaaaccttaaagatgaagtttggtcaccacggtgcaaaccaccctgtgagcaatatcgaaaaaggtaacgttatgatcaccagccaaaaccatggttttgctgctgatgaagccacattacccgccaatatcaaagtgacccataagtcactgttcgatggttcattgcaaggtatccatctgacggacaaacctgcgttcagcttccaaggccaccctgaagcgagccctggtccgaacgatgcggccccactgttcgatcactttatcgagctcattgaacactatcgtcagaacgctaagtaa

SEQ ID NO: 95468 - protein, 386 aa, Shewanella oneidensis
MEVALTKSALLVLEDGTVFTGTAIGADGLSVGEVVFNTSMTGYQEILTDPSYSRQIVTLTYPHIGNTGTNNEDVESNGVHACGLIIRDLPLIASSFRNQQNLSDYLKANNVVGIADIDTRKLTRILREKGAQAGCIMAGADLDEVKALAAAKAFPGLKGMDLAKEVTTDKAYPWRKGSWRLVGGLPADTPAEALKYKVVAYDYGVKQNILRMLVDRGCDVTVVPAKTPASEVLAMNPDGVFLSNGPGDPEPCDYAIEAIQQILKTDTPIFGICLGHQLLALASGAKTLKMKFGHHGANHPVSNIEKGNVMITSQNHGFAADEATLPANIKVTHKSLFDGSLQGIHLTDKPAFSFQGHPEASPGPNDAAPLFDHFIELIEHYRQNAK

SEQ ID NO: 95469 - DNA, 1101 bp, Staphylococcus aureus
  CDS (1)..(1101): transl_table=11
atgcaaagcaaacgttatctagtgttagaagacggttctttttacgaaggctaccgtttaggatctgataacttaactgtaggagaaattgtatttaatacagcgatgacaggttatcaagaaactatttcagatccatcatatacaggtcagatcattacttttacgtatccattaatcggtaattatggtatcaatagagacgattttgaatcattagtacctacattaaacggtattgtagtgaaagaagcgagtgcgcatccaagtaattttagacagcaaaagacacttcatgacgttttagaattgcatcaaattccagggattgcaggtgttgatacaagaagtattacgcgtaaaattcgacaacacggtgtgttaaaagctggttttactgatcgaaaagaagatattgatcaacttgtcaaacatttacaacaagtagaattacctaaaaacgaagtagaaatcgtttcgactaaaacaccgtatgtttcgacaggtaaggatctaagtgtcgtacttgtagactttggtaagaagcaaaatattgttcgagaattaaacgtcagaggttgtaacgtcacagttgtaccatatacaactactgccgaagaaattttagcaatggctccagatggcgttatgctatcaaacggaccaggtaatcctgaagttgtagaatgtgcgattctaatgattcaaggaattttagggaaaattccgttctttggtatctgtctaggacatcaactttttgcattatctcaaggagcaagctcatttaaaatgaagtttggtcatcgtggtgcgaaccatccagttaaaaatttagagactggaaaagttgatattacgagtcaaaaccatggatatgcaatagatatagattcgttaaaaagtactgatttagaagttactcatcttgcattaaatgatggtactgtagaaggtttaaaacataaaacattaccagcattttctgttcaataccatcctgaagcaaatccaggaccgtcagattcaaactatctatttgatgattttgtagcaatgatgactaattttaaggaaaaggagcgtcatatcaatgcctaa

SEQ ID NO: 95470 - protein, 366 aa, Staphylococcus aureus
MQSKRYLVLEDGSFYEGYRLGSDNLTVGEIVFNTAMTGYQETISDPSYTGQIITFTYPLIGNYGINRDDFESLVPTLNGIVVKEASAHPSNFRQQKTLHDVLELHQIPGIAGVDTRSITRKIRQHGVLKAGFTDRKEDIDQLVKHLQQVELPKNEVEIVSTKTPYVSTGKDLSVVLVDFGKKQNIVRELNVRGCNVTVVPYTTTAEEILAMAPDGVMLSNGPGNPEVVECAILMIQGILGKIPFFGICLGHQLFALSQGASSFKMKFGHRGANHPVKNLETGKVDITSQNHGYAIDIDSLKSTDLEVTHLALNDGTVEGLKHKTLPAFSVQYHPEANPGPSDSNYLFDDFVAMMTNFKEKERHINA

SEQ ID NO: 95471 - DNA, 1143 bp, Streptomyces avermitilis
  CDS (1)..(1143): transl_table=11
atgacgacctccaccaggggagctgccaaggttcccgccgtactcgtcctggaggacggccggacgttccgcggccgcgcctacggggccgtgggggtgaccttcggcgaggccgtgttctccaccgggatgaccggctaccaggagaccctcaccgacccgtcgtaccaccgccaggtcgtcgtgatgaccgccccgcacgtcggcaacaccggcgtcaacgacgaggaccccgagtcgaagcggatctgggtctccggctacgtcgtacgcgaccccgcgcgcgtgccctccaactggcgctcccggcgctcgctggacgaggagctgcgccaccagggtgtcgtcggcatcagcggcatcgacacccgtgcgctcacccgccacctgcgcgagagcggcgccatgcgcgtcggcatcttctccggcagcgcgctgccggacgagggcacgatgctcgccgaggtgcgccaggcgcccgagatgaagggcgcgaacctcgccgccgaggtcgccaccaaggagacgtacgtcgtccccgcgatcggcgcgaagcgcttcaccgtcgccgccgtcgacctgggcatcaagggcatgaccccgcaccgcatggccgagcgcggcatcgaggtgcacgtcctgcccgcgacggccacggccgaggacgtgtacgccgtgaaccccgacggcgtgttcttctccaacggccccggcgacccggcgaccgcagacggcccggtggccgtcatgcgggaagtgctcgcccgtaagacccccctcttcggcatctgcttcggcaaccagatcctgggccgcgcgctcggcttcggcacctacaagctgaagtacggccaccgcgggatcaaccagccggtgcaggaccgtacgaccggcaaggtcgaggtcaccgcgcacaaccacggcttcgccgtcgacgccccgctcgaccaggtgtccgacaccccctacggccgcgccgaggtctcccacgtctgcctcaatgacaacgtggtggagggcctccagctgctcgaccagccggccttcagcgtccagtaccaccccgaagcggcagcgggcccgcacgacgccgcctacctgttcgaccgcttcgtatccctgatggagggccagcgtgcctaa

SEQ ID NO: 95472 - protein, 380 aa, Streptomyces avermitilis
MTTSTRGAAKVPAVLVLEDGRTFRGRAYGAVGVTFGEAVFSTGMTGYQETLTDPSYHRQVVVMTAPHVGNTGVNDEDPESKRIWVSGYVVRDPARVPSNWRSRRSLDEELRHQGVVGISGIDTRALTRHLRESGAMRVGIFSGSALPDEGTMLAEVRQAPEMKGANLAAEVATKETYVVPAIGAKRFTVAAVDLGIKGMTPHRMAERGIEVHVLPATATAEDVYAVNPDGVFFSNGPGDPATADGPVAVMREVLARKTPLFGICFGNQILGRALGFGTYKLKYGHRGINQPVQDRTTGKVEVTAHNHGFAVDAPLDQVSDTPYGRAEVSHVCLNDNVVEGLQLLDQPAFSVQYHPEAAAGPHDAAYLFDRFVSLMEGQRA

SEQ ID NO: 95473 - DNA, 1143 bp, Streptomyces coelicolor
  CDS (1)..(1143): transl_table=11
atgacgacctccaccaggggagcccaccggactcccgccgtactcgtcctggaggacggccggatcttccgaggccgtgcctacggggccgtgggggccaccttcggcgaagccgtgttctccaccggcatgaccggctaccaggagaccctcaccgacccgtcgtaccaccgccaggtcgtcgtgatgaccgccccgcacgtcgggaacaccggcatcaacgacgaggacatggagtccaggaggatctgggtctccggctacgtcgtgcgcgaccccgcgcgcgtgccgtccaactggcgctcgacgcgctccctcgaccaggaactggccgcccagggcgtcgtcggcatctccggcatcgacacccgtgccctcacccgccacctgcgcgagcgcggcgccatgcgggtcggcatcttctccggcaacgcgctgcccgacgagggcaccatgctcgccgaggtccgccagacccccgagatgagcggcgccgacctgtccgccgaggtcgccaccaccgaggcgtacgtcgtcccggcgatcggtgagaagaagttcaccgtcgccgccgtcgacctcggcatcaagggcatgaccccgcaccgcatggccgagcgcggcatcgaggtgcacgtgctgcccgccacggccacggtcgacgacgtctacgccgtcgagccggacggcgtgttcttctccaacggccccggcgaccccgccaccgccgaccacccggtctccgtgatgcagggcgtcctggagcgcggcaccccgctcttcggcatctgcttcggcaaccagatcctgggccgcgccctcggcttcggcaccttcaagctgaagtacggccaccgcggcatcaaccagcccgtgcaggaccgtacgaccggcaaggtcgaggtgaccgcgcacaaccacggattcgccgtcgacgccccgctcgaccaggtgtccgacaccccctacggccgcgccgaggtctcccacgtctgcctcaacgacaacgtggtggaggggctccagctcctcgaccggccggccttcagcgtccagtaccaccccgaagcggcagccggcccgcacgacgccgcctacctgttcgaccgcttcgtgaacctcatggagggccagcgtgcctaa

SEQ ID NO: 95474 - protein, 380 aa, Streptomyces coelicolor
MTTSTRGAHRTPAVLVLEDGRIFRGRAYGAVGATFGEAVFSTGMTGYQETLTDPSYHRQVVVMTAPHVGNTGINDEDMESRRIWVSGYVVRDPARVPSNWRSTRSLDQELAAQGVVGISGIDTRALTRHLRERGAMRVGIFSGNALPDEGTMLAEVRQTPEMSGADLSAEVATTEAYVVPAIGEKKFTVAAVDLGIKGMTPHRMAERGIEVHVLPATATVDDVYAVEPDGVFFSNGPGDPATADHPVSVMQGVLERGTPLFGICFGNQILGRALGFGTFKLKYGHRGINQPVQDRTTGKVEVTAHNHGFAVDAPLDQVSDTPYGRAEVSHVCLNDNVVEGLQLLDRPAFSVQYHPEAAAGPHDAAYLFDRFVNLMEGQRA

SEQ ID NO: 95475 - DNA, 1089 bp, Streptococcus mutans
  CDS (1)..(1089): transl_table=11
atgggaaaaagacttttaatattagaagatggaacaatttttgaaggacaggcttttggagcagaccttgatgtaaccggtgagattgtctttaatactggtatgacaggttatcaggaatctatcactgatcagtcttacaatggtcagattttgacatttacctatccgcttgttggcaactatggaattaatcgtgatgattatgaaagtattaaacccacttgtaagggagttgtcgtttcagaaaatgcacgtcgggctaataattggcgcaagcagatgaccttggatgaatttttgaaatcaaaaaacattccaggtatttctgggattgatacacgagcactgaccaaaattattcgtcatcatggaacaatgaaggcaactctggctaatgagggtgactctattgagcatctacaagatcaattacgtgcgactgttcttccaacaaataatattgaacaggtatcaactaaaaccgcttatccagctccgggtgttgggaaaaatattgttttggttgatttcggactgaaacattctatcttacgtgaattttcaaaacgtaattgtaatgtaactgttgttccttataatacgacggctcaagagattttaaatttaaacccagatggtatcatgctgtcaaatggaccgggaaatcctcaagatgttccggaagctttagagatgattcgcggtgtacaaggtaaaattccaatttttggtatttgtatggggcatcaactttttagtttggcaaatggtgccagtacctacaagatgaaattcggtcatcgtggttttaatcatgcggtgcgtgaaattgcaacaggacgtattgattttaccagtcaaaatcatggttatgctgtttcgcgtgataatttaccagaggagcttattattacgcacgaagaaattaatgataaatcaattgaaggtgtacgtcatcgatactaccccgctttctctgttcagtatcatccagatgctgcgccgggaccacatgacgcttcttatctctttgatgaatttttagaattaattgatgcttttcaattggaaaaagctagcaagtga

SEQ ID NO: 95476 - protein, 362 aa, Streptococcus mutans
MGKRLLILEDGTIFEGQAFGADLDVTGEIVFNTGMTGYQESITDQSYNGQILTFTYPLVGNYGINRDDYESIKPTCKGVVVSENARRANNWRKQMTLDEFLKSKNIPGISGIDTRALTKIIRHHGTMKATLANEGDSIEHLQDQLRATVLPTNNIEQVSTKTAYPAPGVGKNIVLVDFGLKHSILREFSKRNCNVTVVPYNTTAQEILNLNPDGIMLSNGPGNPQDVPEALEMIRGVQGKIPIFGICMGHQLFSLANGASTYKMKFGHRGFNHAVREIATGRIDFTSQNHGYAVSRDNLPEELIITHEEINDKSIEGVRHRYYPAFSVQYHPDAAPGPHDASYLFDEFLELIDAFQLEKASK

SEQ ID NO: 95477 - DNA, 1080 bp, Streptococcus pneumoniae
  CDS (1)..(1080): transl_table=11
atgacaaaaagaattctagtattagaagatggcacagtttttgaaggcaaggccttcggagcagatattgatgtaacaggcgaaatcgtctttaatacagggatgaccggctaccaagaatccattacagaccagtcttataatggacaaatcttgacctttacttatcctttggtaggaaattatggtattaatcgtgatgattatgaatccattattccaacttgtaagggagtcgttgtttttgaagaagcgcgtagagctagcaactggcgcaaccaaatgaccttggatgaatttttgaaagccaagaaaattccagggatttcaggaattgatacgcgtgctcttaccaagattatccgtaagcatggtactatgcgtgcaaccttgacccatgttggggacagtatggaccatgtgacggaccagctccaagcaacagttttaccgacagacaatatcaaacaggtttctactaaaacgtcttatccagctccaggagttggtttgagcgtggtgctagtggactttggtctcaagcactcaatcctacgtgaactttctaaacgcaactgtaacgtgacagttgttccttattcgacaacggctgaagaaattctccatctcaatcctgacggagttatgttgtcaaatggtccaggtaacccagaagacgttccacaagcactcgacatgattcgcggtgtacaaggaaaaattccaatctttggtatttgtatgggacaccaactctttgcaatggcaaacggggctaagacctataagatgaagtttggccaccgtggattcaaccatgcggtacgtgaaatcgcaacaggacgagtagacttcaccagccagaaccatggttatgcagtcagccgcgaggatttgccagagcacttgattattacccacgaagaaatcaatgacaagtcagtggaaggtgtgcgccacagataccaacctgctttctctgttcaataccacccagatgcagctcctgggccacacgacgctagctacctatttgacgagtttatcgagatgatggaagtttttaaacaatcaaactaa

SEQ ID NO: 95478 - protein, 359 aa, Streptococcus pneumoniae
MTKRILVLEDGTVFEGKAFGADIDVTGEIVFNTGMTGYQESITDQSYNGQILTFTYPLVGNYGINRDDYESIIPTCKGVVVFEEARRASNWRNQMTLDEFLKAKKIPGISGIDTRALTKIIRKHGTMRATLTHVGDSMDHVTDQLQATVLPTDNIKQVSTKTSYPAPGVGLSVVLVDFGLKHSILRELSKRNCNVTVVPYSTTAEEILHLNPDGVMLSNGPGNPEDVPQALDMIRGVQGKIPIFGICMGHQLFAMANGAKTYKMKFGHRGFNHAVREIATGRVDFTSQNHGYAVSREDLPEHLIITHEEINDKSVEGVRHRYQPAFSVQYHPDAAPGPHDASYLFDEFIEMMEVFKQSN

SEQ ID NO: 95479 - DNA, 1092 bp, Symbiobacterium thermophilum
  CDS (1)..(1092): transl_table=11
ttggaggacgggacgctcttcgcgggcgcgggcttcggcgcgccggccgtgcaggccggcgaggtggtgttcaacacgggcatgaccggctaccaggaggtcgtgaccgacccgtcttattacggccagatcgtcgtgatgacctaccccctgatcggcaactacggcgtcaccgccgcggacggcgagtcccggcagccgtggatcaggggtcttgttgtgaaagagctctgcgaccggccgagccactggcaggccgtcgggagcctttctgactatctggcgggctgcggggtgccgatcctggccggtctcgacacccgggcgctcacgcgccacctgcgcagccacgggaccatgcgcggggtcatcgccacgctccccgaaggcgcggagcccggtccggcccaggtggcggcctgggtggagacggcccgggcgttccggctggagggcgcggtgcgctccgtcgcgaccgcggcgccctaccgcatccccgggccaggcccgcgggtggtcgccgtggacttcggcgccaaggagaacatcctgcgggaactgacggcgcgcggctgcgacgtgacggtggtgcccgccacggcgtccgcggaggaggtcctgtccctgcggccggagggcgtggtgctcaccaacggtccgggcgctcccaccgacgtgcccgaggcggtggagatggtgcgcggcctgctgtcgcaaggcgacctgccgatcttcggcatctgcctcggccaccagatcgccgccctggccctgggggccaccacctacaagctcccctacggccaccgaggggccaaccaccctgtgaaggagctggccacgggccggatccacatcaccagccagaaccacggctacgcggtggcggcggagagcctgccgcccgaggtggaggtgacccacgtctcgctccacgacggcaccgtggaggggctcgcccaccggcgccttccgctcttcaccgtgcagtaccacccggaggcctgccccggtccccgggagaaccgctacctgttcgaccgcttcctggccctggtggaccggagcgcggtctcgacccggacggcgtga

SEQ ID NO: 95480 - protein, 363 aa, Symbiobacterium thermophilum
MEDGTLFAGAGFGAPAVQAGEVVFNTGMTGYQEVVTDPSYYGQIVVMTYPLIGNYGVTAADGESRQPWIRGLVVKELCDRPSHWQAVGSLSDYLAGCGVPILAGLDTRALTRHLRSHGTMRGVIATLPEGAEPGPAQVAAWVETARAFRLEGAVRSVATAAPYRIPGPGPRVVAVDFGAKENILRELTARGCDVTVVPATASAEEVLSLRPEGVVLTNGPGAPTDVPEAVEMVRGLLSQGDLPIFGICLGHQIAALALGATTYKLPYGHRGANHPVKELATGRIHITSQNHGYAVAAESLPPEVEVTHVSLHDGTVEGLAHRRLPLFTVQYHPEACPGPRENRYLFDRFLALVDRSAVSTRTA

SEQ ID NO: 95481 - DNA, 1062 bp, Thermoplasma acidophilum
  CDS (16)..(1062): transl_table=11
gtggaaaaggttgaaatgaagcgatacttgatcaccagcgacgggaccgtgatagcaggttatggttacggttcccccgtcacagggtatggagagcttgttttcaccacctcgatgaccggttatctcgagagtatgacggatccgtcatacgtgggccagatcctcgtgtttgcgtcgcctacgatagcgaattacgaactgcgcaagggcgtgatggagagcgacagggtgaaggtatctggcatcgtgaccagggacgctcacataaacatgccggccgggacccttggcctggacttcgaccgttttctgagggacgaggggataccggccatagacggggttgacaccaggcttcttgtgcggaagataaggcagggcggcgtcctcagggcatacatagcggacgatcctcagggccattctgatttccccgatcccatgtccgagaatcttgttgccagggccgttgacgccaggggcgtgaagaacatcaggggtaaaggcgaaaggaggatacttttcatcgatcttggttcgaagaaaacgctgagagatatgatgctggaacacttctccctgataatggcttctgcggattccgatcttgatgccatcgataaatacgatgccatattcgtgtccaacgggcccggcgatcccgatcatccgtcgctgaggccggtggtgaattttctgaagaggaacataggcgtgaagccaatcttcggaatatgcttcgggctgcagataatagcgctggcatacggatcgaagacgtacaagatgaagttcggccacaggggatcgaaccatgcggtcacggatgggaaccgcatatacgtaacgacgcacaaccacgggtacgccgtggacccggataccgtgagggacttccatgtcagggagcgcgacataaacgacggcacaatcgagatgatcgaggacgggatgatgatggccgtgcagtaccatccggaagcttcgcccggtccgcacgacaccaggtggttcttttctgagatgaggaggaggacggaggatgccgcgaagggatga

SEQ ID NO: 95482 - protein, 348 aa, Thermoplasma acidophilum
MKRYLITSDGTVIAGYGYGSPVTGYGELVFTTSMTGYLESMTDPSYVGQILVFASPTIANYELRKGVMESDRVKVSGIVTRDAHINMPAGTLGLDFDRFLRDEGIPAIDGVDTRLLVRKIRQGGVLRAYIADDPQGHSDFPDPMSENLVARAVDARGVKNIRGKGERRILFIDLGSKKTLRDMMLEHFSLIMASADSDLDAIDKYDAIFVSNGPGDPDHPSLRPVVNFLKRNIGVKPIFGICFGLQIIALAYGSKTYKMKFGHRGSNHAVTDGNRIYVTTHNHGYAVDPDTVRDFHVRERDINDGTIEMIEDGMMMAVQYHPEASPGPHDTRWFFSEMRRRTEDAAKG

SEQ ID NO: 95483 - DNA, 1179 bp, Thermotoga maritima
  CDS (1)..(1179): transl_table=11
atgtccaaaaaagcacttctcgctttagaagacggttcgtttttttttggacagagtctgggtgcagagggtgaaacttttggtgaactggtcttcaacacgggaatgacaggctatcaggaagtcctcaccgatccctcctacaccggtcagatcgtcgtcatgacctacccggaaataggaatctacggagtgaacgacgaagacgtagaatcagatggaataaaagttgccggttttgttgtctacagaagcgtggataccccttccaactggagagccaccatgtctttccccgattacttgaaaaagtacaacatcgtggccatagaaggagtggacaccagagcactcaccaggaaaattcgagtgaaaggtgctatgaaaggtgccatatcgaccgttgatctcgatccggattcccttgtaaaacgggtgaaagaaagccccagtatcgttggaagggatttagccggtcttgtttcaccgaaggaagtcatcgtagaaaacccggaaggagatttctcagtggtggtactcgattccggtgtcaaatggggtattctcagagacctgaagagagtgggagcaaaagtgatgagagttccttacagtgttgatatagacgacatcaaaaagctgaatcccgacggtgttctgatctcgaacggtcccggtgatcccgccgcccttttgaaaaccatcagattgatcaaagaccttctgaaagaagaaattccactcgcggggatctgccttgggcatcagctccttggcctcgccgttggtggaaggacttacaagatgaaattcggtcacagaggcatcaaccatcccgttaaagatctgagaaccggtcgtgttctgatcacaacgcacaaccacggcttcgctgtggatccaaagagtttcggccttccagaactgggaagcgaggatcaggacgcgaacgttctcacgaaaaatcttcagaagatatccgtcctcgaaggaatcagtcctcagggaataaaagtcgagatcacccacatctccctgaacgacggaacgatggaaggaatgaggctggttgattatccagccttttctgttcaatatcaccctgaagcctctcccggacctcacgatgccaagtacttcttcgaagaattcaaacgcctcataaaggaggtaaggtaa

SEQ ID NO: 95484 - protein, 392 aa, Thermotoga maritima
MSKKALLALEDGSFFFGQSLGAEGETFGELVFNTGMTGYQEVLTDPSYTGQIVVMTYPEIGIYGVNDEDVESDGIKVAGFVVYRSVDTPSNWRATMSFPDYLKKYNIVAIEGVDTRALTRKIRVKGAMKGAISTVDLDPDSLVKRVKESPSIVGRDLAGLVSPKEVIVENPEGDFSVVVLDSGVKWGILRDLKRVGAKVMRVPYSVDIDDIKKLNPDGVLISNGPGDPAALLKTIRLIKDLLKEEIPLAGICLGHQLLGLAVGGRTYKMKFGHRGINHPVKDLRTGRVLITTHNHGFAVDPKSFGLPELGSEDQDANVLTKNLQKISVLEGISPQGIKVEITHISLNDGTMEGMRLVDYPAFSVQYHPEASPGPHDAKYFFEEFKRLIKEVR

SEQ ID NO: 95485 - DNA, 1176 bp, Thermus thermophilus
  CDS (1)..(1176): transl_table=11
atggctggagtgaaggagcgcgccgttttggtcctggaagacgggaccgtctaccacggctacgccttcggcgcccgggggaagacggtgggggaggtggtcttcaacaccgcccagaccggctaccaggagatcatgaccgatcccagctaccacgggcagatcgtggtcatgacctacccccaccagggcaactacggggtgaacgtctacgacatgcagtccaaccgcccctgggtgaggggctttgtggccaaggagttcagccgcgtggcctccaacccccgggcccagcagaccatcggggagttcatggagttctacggggtggtggggattgagggcatagacacgagggccctggtgcggaagatccgggaaggcggggtgctgaaggggaccatcgcccacgcgagcctcttcggcgctcccgaccacgccttcacccaggaggagctcgaggccctgcgccgggaggcccaggcctggacggacattgacggtcgggacatgacccctgaggtctccacccccctgccctacgcctggcccaccctgaagtcggggcggcgcatcgtggttatggacttcggcatcaagcacgctatcgtggagaacctggccgccctcggctttgaggtcattgtggtccccgggaagaccccggcccaccagatcatggccttggagccccatggcctcctcatctccaacgggcccggcgaccccaccatgccccgctacgcccacgagaccatctggaagctcatggggcttctgcccaccttcggcatctgcctggggcaccagcttctggccctcgcggcgggagggcggaccttcaagatgaagttcggccaccggggggcgaaccacccggtgaagaacctgcagacggggaagattgagatcaccagccagaaccacggctacgccgtggacattgactccctcaaggacttccgccccacccacgtgaacctgaacgacgggaccctcgagggcatggcccacgcccgctaccccgtcttctccgtccagtaccaccccgaggccgccccgggcccccacgacgccctctacctcttccgccgcttcctggaggaggtggaggccttccacggggccacggggcttcccgtggagaagcaacgggcggaccagcacgggatctaa

SEQ ID NO: 95486 - protein, 391 aa, Thermus thermophilus
MAGVKERAVLVLEDGTVYHGYAFGARGKTVGEVVFNTAQTGYQEIMTDPSYHGQIVVMTYPHQGNYGVNVYDMQSNRPWVRGFVAKEFSRVASNPRAQQTIGEFMEFYGVVGIEGIDTRALVRKIREGGVLKGTIAHASLFGAPDHAFTQEELEALRREAQAWTDIDGRDMTPEVSTPLPYAWPTLKSGRRIVVMDFGIKHAIVENLAALGFEVIVVPGKTPAHQIMALEPHGLLISNGPGDPTMPRYAHETIWKLMGLLPTFGICLGHQLLALAAGGRTFKMKFGHRGANHPVKNLQTGKIEITSQNHGYAVDIDSLKDFRPTHVNLNDGTLEGMAHARYPVFSVQYHPEAAPGPHDALYLFRRFLEEVEAFHGATGLPVEKQRADQHGI

SEQ ID NO: 95487 - DNA, 1071 bp, Thermoanaerobacter tengcongensis
  CDS (1)..(1071): transl_table=11
atgaaaggctatttgaaacttgaggatggaagtatatttgaaggtgagttaataagcaaaaacaaaaaaggatatggagaggttgtttttaccacagggatgacaggctatcaagaagccataacagatccttcctatgcaggccaaatagttgtcatgacataccctttaatagggaattacggtattaacaaatacgactttcaatcagaaaagcctcatataaggggatttgtggtacgggaatattgcgataagcctagcaatttccaaagtgaggagtcgcttttgagctatcttgataaccacaacataccagtattatcgggaattgatacaagggctttgacaaaaaagcttagagaaaatggaactatgagaggaattataacttataatcctgaggacaatatagaatttgaccagacaaatcttttggaagaagtttctacgaaaaagccgtatcgtatagcaggtattggtccaaaacttgcttttattgaccttggtacaaaaaagggcattttaaaaatgctaaattcagttggatttgacatttatgtgtttccttacaatgcaagttatgatgatgttatgcaaataaatcccgatgcaatatttctttcaaatggaccaggagaccctaaagatgcagttgatgcaatagaacttactaaacactttataggtatgaaacctgtgctggggatatgcttagggcatcaaataatagcccttgctcttggatgcaatacagtaaagatgaaatttggccacagaggtgcaaatcaacctgttaaagatttgctgacaaataaagactatataacttctcaaaaccacggatacgctgttgaagaggagtcaatagataaagacaagataactgtaacccacataaacttaaacgatggaacagtagaaggcattatgcataagtttctgccagttttttctgtacagtatcatcctgaggcatgtcctggtcctcgtgattcaacagatatttttgataaatttatggatatagtcatggtttacaaaaggaggttttattttgccgaagtataa

SEQ ID NO: 95488 - protein, 356 aa, Thermoanaerobacter tengcongensis
MKGYLKLEDGSIFEGELISKNKKGYGEVVFTTGMTGYQEAITDPSYAGQIVVMTYPLIGNYGINKYDFQSEKPHIRGFVVREYCDKPSNFQSEESLLSYLDNHNIPVLSGIDTRALTKKLRENGTMRGIITYNPEDNIEFDQTNLLEEVSTKKPYRIAGIGPKLAFIDLGTKKGILKMLNSVGFDIYVFPYNASYDDVMQINPDAIFLSNGPGDPKDAVDAIELTKHFIGMKPVLGICLGHQIIALALGCNTVKMKFGHRGANQPVKDLLTNKDYITSQNHGYAVEEESIDKDKITVTHINLNDGTVEGIMHKFLPVFSVQYHPEACPGPRDSTDIFDKFMDIVMVYKRRFYFAEV

SEQ ID NO: 95489 - DNA, 1038 bp, Thermoplasma volcanium
  CDS (1)..(1038): transl_table=11
atgaaaaaatacctagttatggaagatggaaccgtcttatctggtcaaggctatggttcttacaaagaggcatatggcgaacttgtttttaccacatctatgacaggatacctcgaaactttaacagatccttcgtatgtaggtcagatgcttgtattcgcctctccaaccattgctaactatgcccttgaaatgggaaaaatggaatctaatggagtaaaagtttcggcgttaattacaaaggacgcgcatatagagcttaaaaagggaggctacggtagagagttcgacgaatttcttaaagagcaaggtattcctgggatagatggaatagatactaggatgctcgttagaaagattagggcaaatggagtgttaaggtcatacgttgttaatgatccttcccattctcttgatttcccagatccaatgaacgatgatctagtatctaaggctgtgccgcatcatgatccagtttttgtaaaaggagaggaaggcgggacagtactcttcatagacttaggaagtaagaataccctgaaggagctgatgcttcaaaacttctcacttatagttgtagataaacaaacgaatttagatgaaattgaaggttatgacgcaatattcgtttcgaacggcccaggcgatccatcgcatccttcactatccaatgttataaagttcctctcccataatataggggtaaaaccgttgttcggaatctgttttggtcttcaggcaatatccttggcttatggtgcaaaaacttataagatgaaatttggccatcgaggttccaatcacgctgtcacagatggcactcattcatatgtgacaacgcataaccatgggtacgctgtcgatggatcaacggtaaaggactttaaagtgataggatgggatgcaaacgatggcacagtcgagattatagaaggcgatgatatgtttgcagtccaatttcatccggaggcttctccaggaccacacgatacgaggtggttctttggtgaaatgaagaggaggatcggatatgcctaa

SEQ ID NO: 95490 - protein, 345 aa, Thermoplasma volcanium
MKKYLVMEDGTVLSGQGYGSYKEAYGELVFTTSMTGYLETLTDPSYVGQMLVFASPTIANYALEMGKMESNGVKVSALITKDAHIELKKGGYGREFDEFLKEQGIPGIDGIDTRMLVRKIRANGVLRSYVVNDPSHSLDFPDPMNDDLVSKAVPHHDPVFVKGEEGGTVLFIDLGSKNTLKELMLQNFSLIVVDKQTNLDEIEGYDAIFVSNGPGDPSHPSLSNVIKFLSHNIGVKPLFGICFGLQAISLAYGAKTYKMKFGHRGSNHAVTDGTHSYVTTHNHGYAVDGSTVKDFKVIGWDANDGTVEIIEGDDMFAVQFHPEASPGPHDTRWFFGEMKRRIGYA

SEQ ID NO: 95491 - DNA, 1362 bp, Trichoderma virens
  CDS (1)..(1362)
atgttctctaagctggcagctaattttgcccaacgagcggctggctctgccgcgggcaccactcgccgggtggctttccagacgcgattcgtgtccagccagacacttgccaatggcagcaagggcagggcaattcctttccagaagcctgggtctgttcccgccacgtttaccattcgagatggtcccgtcttccgcggcaaggccttcggcgccaatgccaacatctctggcgaagctgtctttaccacgtctctggttggctaccccgagtccatgacggacccctcctaccgtggccagattcttgtcttcacccagcccctgattggcaactatggcgttccctccaacgagcgcgacgagtacaacctcctcaagtactttgagtctccccacatccagtgtgccggtgttgtcgtctccgatgtcgccctcaactacagccactggaccgctgtcgagagtctgagcgagtggtgtgcccgtgaggcgtccccgccatctccggcgtccgatactcgagccattgtcacccacctccgagagcagggttcatccctcgctaggatctctattggtgacgagtacgacgctgatgaggatgagagcttcgtcgaccctggccagatcaacctggtcaagcgagtcagcaccaaggctccctttgtgattgaatcccctggcgctgacctccacgtcgccctcatcgactgcggtgtcaaggagaacatcctccgccagttggtcagccgaggtgcctcgctcacggtcttcccctacaactacccgatccacaaggtggccgatcactttgacggagtcttcatctccaacggccccggtgacccaatccactgccaggagaccgtctacaaccttgcccgcctgatggagacgtcttccatccccatcatgggcatctgtctcggccaccagctcctcgccatggccgtcggcgccaagaccatcaagatgaagtacggcaaccgagcccacaacatccccgccctggacttgaccaccggccagtgccacatcaccagccagaaccatggatacgccgtcgacgccagcaccctgcccaacgactttaaggagtactttgtcaacctcaacgacggcagcaacgagggaatgatgcacaggacccgccccatcttctcgacccagttccaccccgaggccaagggcggccccatggacagctcctatctctttgagaagtacctcgagaacgtccgcgctgccaagagtgctcagcgcgtctacaaggacaaccgacccagccagtacgtcctcgacgtcctgagcaaggagcgtgtgggcgtcgagcctgttcctcttgtcggctttgcttaa

SEQ ID NO: 95492 - protein, 453 aa, Trichoderma virens
MFSKLAANFAQRAAGSAAGTTRRVAFQTRFVSSQTLANGSKGRAIPFQKPGSVPATFTIRDGPVFRGKAFGANANISGEAVFTTSLVGYPESMTDPSYRGQILVFTQPLIGNYGVPSNERDEYNLLKYFESPHIQCAGVVVSDVALNYSHWTAVESLSEWCAREASPPSPASDTRAIVTHLREQGSSLARISIGDEYDADEDESFVDPGQINLVKRVSTKAPFVIESPGADLHVALIDCGVKENILRQLVSRGASLTVFPYNYPIHKVADHFDGVFISNGPGDPIHCQETVYNLARLMETSSIPIMGICLGHQLLAMAVGAKTIKMKYGNRAHNIPALDLTTGQCHITSQNHGYAVDASTLPNDFKEYFVNLNDGSNEGMMHRTRPIFSTQFHPEAKGGPMDSSYLFEKYLENVRAAKSAQRVYKDNRPSQYVLDVLSKERVGVEPVPLVGFA

SEQ ID NO: 95493 - DNA, 1128 bp, Xanthomonas campestris pv
  CDS (1)..(1128): transl_table=11
gtgacccaacccgcaatccttgtcctcgaagacggcaccgtgttcgagggcgaatccgtaggcgccaacgggctatccgtcggcgaagtggtgttcaacaccgccatgaccggttaccaggaagtcctgaccgatccgtcctacgcccgccagatggtcacgctgacctatccgcatatcggcaacaccggtttcaacgatcaggacgacgaggccaagcaggtgtgggccgccggcctgatcgtgcgcgatgtgccgcgccgccccagcagctggcgcaatcaggtggcgctgccggcttggttgcagacccgcggcgtggtggccatctccggcatcgacacccgcaagttgacccgtctgctgcgcgagaagggtgcgcagaacggtgcactgatggccggcgagatcgatgtcgaaaaggcattggaagccgcgcgcaagttccccggcctgaagggcatggacctggccaaggtggtctccaccgaaaccacctatcagtggcaggaaggtcagctggacctaaacgcgaacgccttcgtgcaggccgagctgaagttcaaggtcgtggcctacgactacggcgtcaagatcaacatcctgcgcatgctggccgagcgcggctgcgacgtcaccgtggtgccggcacgcacgccggtggccgaggtgctggcgatgcagcccgacggcgtgttcctgtccaacggcccgggcgacccggagccctgcgattacgccatcagcgcgatccaggagttgatcgccaagaaggtacccaccttcggcatctgcctgggccaccagttgctggcgctcgccgccggcgccaagacggtcaagatggctaccggccaccacggcgcgaatcaccccgtgcaggatctggatggcggccgggtgatgatcacctcgcagaaccatggctttgcggtggatgagaccacgttgccggccaacgtgcgggtgacccatcgctcgctgttcgatggcaccaaccagggcatcgccctgaccgacgcgccggcattctcgttccagggccacccggaagcctcgccgggcccgcgcgatgtcgggccgttgttcgatcggtttgtcgcatcgatggccgaggcgaagtcttga

SEQ ID NO: 95494 - protein, 375 aa, Xanthomonas campestris pv
MTQPAILVLEDGTVFEGESVGANGLSVGEVVFNTAMTGYQEVLTDPSYARQMVTLTYPHIGNTGFNDQDDEAKQVWAAGLIVRDVPRRPSSWRNQVALPAWLQTRGVVAISGIDTRKLTRLLREKGAQNGALMAGEIDVEKALEAARKFPGLKGMDLAKVVSTETTYQWQEGQLDLNANAFVQAELKFKVVAYDYGVKINILRMLAERGCDVTVVPARTPVAEVLAMQPDGVFLSNGPGDPEPCDYAISAIQELIAKKVPTFGICLGHQLLALAAGAKTVKMATGHHGANHPVQDLDGGRVMITSQNHGFAVDETTLPANVRVTHRSLFDGTNQGIALTDAPAFSFQGHPEASPGPRDVGPLFDRFVASMAEAKS

SEQ ID NO: 95495 - DNA, 1236 bp, Saccharomyces cerevisiae
  CDS (1)..(1236)
atgtcctccgctgcaacaaaagctactttctgtatccaaaatggtccttcctttgaaggtatatcttttggtgcaaacaaatctgttgctggtgaaacagttttcactacttctctggttggttacccagagtccatgactgatccttcctaccgtggtcagatattagtcttcacgcaacccttgattggtaactacggtgtcccatccggcgaagcccgcgatgaatacaatttactgaagtattttgaatctccgcatatacatgtggtcggcatcgttgtcgctgaatatgcttatcaatattcgcattggaccgctgttgaatctctggcacaatggtgtcagagagaaggtgttgctgctattactggcgtagacacccgtgaactagtgcaatacttgagggaacaaggttcttctttgggccgtattacgttggctgatcatgaccctgtcccctacgtgaatcccatgaaaactaacttggttgctcaagtcaccacaaaaaagcctttccacgtctctgccttacctgggaaggctaaggcaaatgtggctcttattgactgtggtgttaaagaaaacattatcagatgcctagtcaaaagaggtgccaatgtaactgttttcccctatgattacagaattcaagatgttgcttctgaattcgacggtattttcttatccaatggaccaggcaacccagaactatgccaagctacaatttccaacgtcagggaattactaaataaccctgtttatgactgtatccctatttttgggatttgtctaggccatcaactcttggctctggcctccggtgcctctactcacaaattgaaatatggtaatagggctcacaacatccctgccatggatttgactaccggccagtgccacattacatctcaaaatcatggctatgcagttgatcctgagaccctaccaaaggaccaatggaaaccttattttgttaatttaaacgacaaatcaaacgaaggcatgatacaccttcaaagacccatattttctacccaatttcacccagaggcaaaaggtggtcccttagacacagctattctttttgacaaattcttcgataatatagaaaaataccaattacaatctcaggcaaaaagttcaatctcactaaaagtaacatacagtaccgataaatcgagattgcagagtataaatgttactaagttggccaaggaaagagtgttgttctaa

SEQ ID NO: 95496 - protein, 411 aa, Saccharomyces cerevisiae
MSSAATKATFCIQNGPSFEGISFGANKSVAGETVFTTSLVGYPESMTDPSYRGQILVFTQPLIGNYGVPSGEARDEYNLLKYFESPHIHVVGIVVAEYAYQYSHWTAVESLAQWCQREGVAAITGVDTRELVQYLREQGSSLGRITLADHDPVPYVNPMKTNLVAQVTTKKPFHVSALPGKAKANVALIDCGVKENIIRCLVKRGANVTVFPYDYRIQDVASEFDGIFLSNGPGNPELCQATISNVRELLNNPVYDCIPIFGICLGHQLLALASGASTHKLKYGNRAHNIPAMDLTTGQCHITSQNHGYAVDPETLPKDQWKPYFVNLNDKSNEGMIHLQRPIFSTQFHPEAKGGPLDTAILFDKFFDNIEKYQLQSQAKSSISLKVTYSTDKSRLQSINVTKLAKERVLF

SEQ ID NO: 95497 - DNA, 1080 bp, Bacillus halodurans
  CDS (1)..(1080): transl_table=11
gtgaaggcatatttagtattagcgacaggggaaacatttgctggagagatcgcgaatgcaaaagaggatgtatatggagaggttgttttctttacgggaatgactggctaccaagaggtgttaagtgatccatcgtttaaagggcagctagttgtcttcacataccctcttatcgggaattacgggatcaatgcttcagattttgaaagcaaggagccacaagccgctgggcttatcgttagtgaacaatcggaagaaggacaccattatgaagcgactcaatcgttgcagcaattttgtgatcagcaccagcttccgctactaacaggcattgatacgagagctgtcgtgaaacgaattcgtgagcaaggtgatatgcctgcggtcatcacgaccgacctttcccgtgtgtcatttgaagagtgggtgcccctgtctgagcgggcgttagtggatgaagtgtcaacgaaaaaagtagagacgtttgaagggaacggtcctcacattgttttaattgattacgggtttaaacaatcgatcttaaattctttactaaaacgtgattgtcaggtgacgattgttccctacgatgtttcgtttgaagtggtgcaagaattaaatccagatggtctcttattttcgaacggtccaggagatccaaagcaaatcgaggatcggcttccgactatctatcgccttgcatcgacctatccgagtctcgggatttgccttggacaccagttgctcgccttagcctttggtgcagacacggagaagctccgtttcggtcatcggggagcgaaccaacccgtgatcaacctgaagtcgaatcgtgtgtatatgacgtcacaaaaccatagttacgtcgtgaaggaagactcactccaacgaacggattgggacgctacgtttaaaaatattaatgacggttccattgaggggttaacccacaaatatttaccgattcagacggttcaattccacccagaggctcatccagggccaagtgacagtgacgaaatttttcactcattcatcgatgatgtagcagcaaaggggagagagaaaacctatgcctaa

SEQ ID NO: 95498 - protein, 359 aa, Bacillus halodurans
MKAYLVLATGETFAGEIANAKEDVYGEVVFFTGMTGYQEVLSDPSFKGQLVVFTYPLIGNYGINASDFESKEPQAAGLIVSEQSEEGHHYEATQSLQQFCDQHQLPLLTGIDTRAVVKRIREQGDMPAVITTDLSRVSFEEWVPLSERALVDEVSTKKVETFEGNGPHIVLIDYGFKQSILNSLLKRDCQVTIVPYDVSFEVVQELNPDGLLFSNGPGDPKQIEDRLPTIYRLASTYPSLGICLGHQLLALAFGADTEKLRFGHRGANQPVINLKSNRVYMTSQNHSYVVKEDSLQRTDWDATFKNINDGSIEGLTHKYLPIQTVQFHPEAHPGPSDSDEIFHSFIDDVAAKGREKTYA

SEQ ID NO: 95499 - DNA, 6675 bp, Drosophila melanogaster
  CDS (1)..(6675)
atggcctctacggactgttacctcgcactggaggatggcacagtgttgcccgggtactcctttggctacgttccctcggagaatgaatccaaagtgggttttggtggcgaggtggtcttccaaacgggcatggttggctacacggaggcgctcacggatcgatcgtacagtggtcagatcctggtgcttacctatccactgatcggtaactatggggtaccagcgccggatgaggacgagcacggactgccgctgcacttcgagtggatgaaaggcgtcgtccaggccaccgccttggtggtgggcgaggtggctgaagaggcatttcactggcgcaaatggaagacgctgcccgattggctgaagcagcacaaggtgcccggaattcaagacattgatactcgagccctgaccaaaaaactgagggagcagggaagcatgctaggcaagattgtctacgagaaaccgccggtcgaagggctgcccaagtccagtttcgtagatccgaacgtcaggaatttggccaaggagtgcagcgttaaggagcgacaagtgtacggtaatcccaatggcaagggaccacggatcgccattctggactgtggactgaagctcaaccagttgcgctgcctgctgcaacgtggcgcctcggtgaccttgctcccctggagcgctcgtctcgaggatgagcagttcgacgccctctttctgtctaacggacctggtaatccggagagctgcgaccagatcgtccaacaggtgagaaaagtgattgaggagggtcaaaagcccgtctttggaatatgtctgggtcaccagctgttagcgaaggcaatcggctgctctacttacaaaatgaagtacggcaatcgaggacacaatctgccctgcctgcaccgagcaactggacgttgcctgatgacgtcgcagaatcacggatacgcggtcgatttggagcagttgcccgacggctggtcggagctatttgtgaatgccaacgacggcaccaacgagggcattgtccatgccagcaagccctacttttcggttcagttccatccggagcatcatgctggaccgcaggacacggagttcctgttcgatgtctttatggagagcattcaacagaaggatttgaccattccgcagctgatcgagcagcgactgcgtccgactacgcctgccatagattcggctccagtgatgccgcgcaaagtcctaatcctgggatccggtggactgtccattggtcaggctggcgagtttgactactccggatcgcaggccatcaaggccatgagggaatcaaacattcaaacagtgctcatcaatccgaacatagccaccgttcagacctctaagggaatggccgacaagtgctacttccttcccctaacacctcactatgttgagcaggtgattaagtcggagcgtccgaacggagtactgctcacctttggcggccagaccgctctcaattgtggcgtgcaactggagcgagccggagttttctccaaatacaatgtccgcattttgggcacacccatccagtcgatcatcgagacggaggatcgcaagctctttgccgagcgggtcaacgagattggcgagcaggtggcgccatctgaggctgtgtactccgttgcccaggcactggatgcggccagtcgcttgggttatccggtgatggcccgtgctgccttctccctgggcggactgggttccgggttcgccaacaacgaggaggagctgcagagcctggcccaacaggcactggcccactcgagccaactaattgtggacaaatccctgaagggttggaaggaggtggagtacgaggtggtgcgcgatgcctacaacaactgcattaccgtatgcaacatggagaacttcgatcccctgggcatccacacgggcgagagtattgtggtggccccatcgcagaccctctcggatcgcgagtaccaaatgctccgcagcaccgccctgaaggttatccgtcactttggtgtcgttggcgagtgcaacattcagtacgccttgtgtccccattcggagcagtactacattatcgaggtgaacgcccgactgtcgcgcagctccgcgttggccagcaaggccaccggctatccactggcctatgtggccgccaagttggctttgggattgcccctgccagatatcaagaactcggtgacgggcaatacgacggcctgctttgagccatccctcgattactgtgtggtcaagattccacgctgggatttggccaaattcgtgcgggttagcaagcacattggcagctcgatgaaaagtgtcggtgaggtgatggccatcggtcgcaacttcgaggaagcgttccaaaaagccctgcgcatggtggacagcgatgtgcttggctttgatccggatgtggttccgcttaacaaggagcagctggccgagcagctttcggagccgacggatcgtcgtcccttcgtcattgccgctgctttgcaattgggcatgagccttagggagctgcatcaactaaccaatatcgattattggtttctggaaaagctggaaaggatcatcttactgcagtccctgctcacccgtaatggcagtcgaaccgatgccgctctgctgttgaaggccaagcgttttggtttttcggacaagcagatagctaagtacattaagagcacggagctggctgttcgtcaccagcggcaggagtttggcatccgcccgcatgtcaagcagatcgacacggtggccggcgaatggcccgccagtaccaactatctgtaccacacatataacggaagcgagcacgatgtggacttccccggcggacacactattgtggtgggctcgggcgtctatcgtatcggatcctcagtggagtttgattggtgtgccgtgggctgcctgcgcgaattgaggaagctacagcgacccaccatcatgattaactacaatcctgaaacggtttccaccgactacgatatgtgcgatcgcttgtatttcgaggagattagcttcgaggtggtcatggacatctacgagatggagaatagcgagggcatcattctgtccatgggcggccagctgcccaacaatatagccatggatctgcatcgccagcaggcgaaggtgttgggcacatcgccggagtccatcgactgtgccgaaaatcgatttaaattctcgcgcatgctggacaggaagggtatcttgcagccacgctggaaggagctgaccaacctacagtcggccatcgaattttgcgaggaggttggctatccctgtctggttaggccatcctatgtgctctccggtgcggccatgaatgtggcctattccaatcaggatctggagacatatctgaacgccgcctccgaggtgagtcgcgagcatccggttgtcatttcgaagttcctcaccgaggccaaggagatcgatgtggatgcagtggcatccgatggacgcatcctgtgcatggctgtttcggagcacgtggagaatgccggagtgcattcaggtgatgccacgctggttaccccaccgcaggatctgaatgcggagaccctggaggccattaaacggatcacatgcgatttggccagcgtactggatgtcaccggtcccttcaacatgcagctaattgccaagaacaacgagctgaaggtcatcgaatgcaatgtccgtgtgtcgcgatccttccccttcgtctccaagacgctggaccacgactttgtggccacggcgacgcgtgcgattgtgggactcgatgtggagccactggatgtgctccatggcgtcggcaaggtgggcgtcaaggtgccacagttcagtttctcgcggctcgcgggcgcggatgtacagctgggcgtcgagatggcctccaccggtgaggttgcctgcttcggggacaaccgctatgaggcgtatctcaaggccatgatgtccacgggcttccagatacccaagaacgccgtacttctctccattggcagtttcaagcacaagatggagctgctgccttccatacgggatctggccaagatgggttacaagctatacgcttccatgggcactggcgacttttatgccgaacacggagttaatgtggaatccgtgcagtggacattcgacaagacgactcccgatgacatcaacggtgagctgagacacctggccgagttcctggccaacaagcagttcgacctggtcatcaacctcccgatgagcggcgggggtgccaggcgggtctcctcgttcatgacccatggctaccgcacccgtcgcctggccgtggactactccattccgctggtgaccgatgtgaagtgcaccaagcttctggtagaatcaatgcgaatgaacggtggcaagccgccaatgaagacgcacacggattgtatgacctcgcgtagaattgtgaagctgccgggcttcatcgatgtgcatgtgcatttgcgggagccgggagccacgcacaaggaggactttgccagtggaacagcagccgctctggctggcggcgtgaccctcgtgtgcgccatgcccaatacaaatccctcgatcgtggacagagagacgttcacccagttccaggagctggccaaagcgggagctcgatgcgactatgccctgtatgtgggggcctcggatgacaattgggcgcaggtcaacgagctggccagtcatgcgtgtggccttaagatgtacttaaacgacactttcggcaccctaaaactgagcgacatgaccagctggcagaggcatctcagccactggcccaagcggtctcccatcgtttgtcatgcggagaggcagagcacagcggctgtgattatgctggcccatcttctcgaccgttcggttcacatctgccatgtggcgcgaaaggaggagatccaattgattcgttccgccaaggaaaagggcgtcaaggtgacctgcgaggtgtgcccccatcacttgttcctcagcaccaaggatgtggagcgtttgggtcacggaatgtccgaggtaaggccattgctctgctcaccggaggatcaagaggctctgtgggagaatattgattacatcgatgtatttgccaccgatcacgcgccacacacactggccgagaaacgttcggagcgtccaccgcctggatttccgggcgtggagaccattctgccgctcctcctgcaggctgttcacgagggtcgtttgacgatggaggacatcaagaggaagttccatcgcaatccaaaaatcatcttcaacctgccggatcaggcgcagacctacgtggaggtggatctcgacgaggagtggaccataacgggcaatgagatgaagagcaagtccggctggacaccatttgagggcaccaaggtcaagggacgcgtccaccgggtggttcttcgcggcgaggtggccttcgtcgatggccaagtgttggtgcagcccggcttcgggcagaatgtgcgccccaaacagagtccattggcgtcggaggcatcacaggatctgctgcccagcgacaacgatgccaatgacacctttacccgcctcctcacctccgaaggacccggtggaggcgtacatggaatatcgaccaaggtgcactttgtggacggagccaacttcctgcgccccaactcgccatccccacgcatccgtctggattccgccagcaacaccacgctgcgggaatacttgcagcgcactaccaactcaaatccggtggcccactcgctaatgggcaagcacatccttgccgttgacatgttcaacaaagatcacctcaacgacatctttaacctggcacagctgctcaagctgcggggtacgaaggatcgtccggtggacgagctgctgccaggcaagatcatggccagtgtgttttacgaggtcagcacgcggacgcagtgcagctttgcagctgccatgctgcgtttgggagggcgagtgatcagcatggacaacatcacgtcgtcggtgaagaagggcgagagcctggaggacagcatcaaggttgtgtccagctatgccgacgtcgtggtgctccgtcatccatcgcccggagctgtagcgcgcgcagcgaccttctcccgaaagccgcttatcaatgccggcgatggcgtcggtgagcatcccacgcaggcgctgctggacatcttcaccatccgcgaggagtttggcactgtgaacgggctgaccatcaccatggtgggcgacttgaagaacggacggaccgtgcactcgctggcccgcctgctgaccctgtacaatgtgaacctgcagtatgtggcgccgaatagcctgcagatgcccgatgaggtcgtccagttcgtccatcagcgcggcgtcaagcagttatttgcacgcgacctaaagaatgtgctgcccgacacggatgtgctctacatgactcgcattcagcgcgagcgttttgataacgtggaagattacgagaagtgctgtggccatctggtgttgacgcccgagcatatgatgcgggccaagaagcgttcgattgttctgcatccgctgccgcgtctgaacgagatcagccgggagatcgactcggacccaagggccgcctacttccggcaggcggagtacggcatgtacatccgtatggccttgctggccatggtcgttggtggacgcaatacggcgctctag

SEQ ID NO: 95500 - protein, 2224 aa, Drosophila melanogaster [sequence omitted]

SEQ ID NO: 95501 - DNA, 8250 bp, Saccharomyces cerevisiae
  CDS (1232)..(7876)
catatatactcattctttagaaataggttttcgtactcaatatttaagaaggtaattaagcattaaaaggattttttttttttaaccttgattagtaacattgtgatatacatttgcctacgtacatttctgatgtcctaagatttctttctttttttcggtcccttaaagacaaccgaatctctctacgataatgtacgacatacaatgtccaaaatggtgctttcgtcatcgtcaacgccattagtacattgtccctcttttcgtgaaaaatgaaaaatcttggttatttgcagtgtacatggaatatggactttttttttttctctgtggcccgccggtgttctccgatgaatattaaaagaaatgtcacacaaacgcaatgactcttttttccctggccttgaaaaaaaaaaaaacggtaaaaaagtaggacaaatggtatggacaaaaagtataaatactttgacaaaatccccactcatcgattttactcagagagagaatcctctctttccttctctattttgctcaattagtataatatcatatctagtatgttttaactacaccaattttctttcaaattatcgtctttcctaatggtcttgtatttttatcttattcttgattgtagaaaataaaaaacctgtcgacaacaaccacaaacaaaaggtttcctgaacattttctctacggaagcacttgagaaagaattgaggaataccgctatatctagccaaaaaaacttataaatacttctactcttttgttaaagactcaccacgttcaactttgaattgaaagaaaaaggaaacattataatccgttagcattcaaatttgagtatgttttttatgattacttttgagaagccttaatgttgccatctattcagaccatgcgatgccagtcgcaatatcagtgggcgcgtattttagtatctgggcgtggaaaatagaagccgtttgactctgcgatgatgtcgtttttcattacctggaataggaaagaaaaaaaagaaagaaaaaaaaaagaaaagaatcgcaattgatagagatcttcatggcacgaaagcaaatcaatctcttcaattagttctgattttatatcggcatctggcttgaacgatcaacaattactaacattaatattaacgacgatagaaatccataactaattgcagcatacaacacataaaccttacctaatagaatataacaatcataatatggccactattgctcccactgctccaatcacccctccaatggaatctacgggtgaccgtctggttacgttggaacttaaggacggcacggtcttacaaggttattcatttggtgctgagaaatccgtcgctggtgaattagttttccaaactggtatggttggttatcctgaatctgtgaccgatccatcttatgaaggccagatcttagtcatcacttacccattggtaggcaattatggtgtcccagatatgcacttgagagatgaattggtcgaagaattgccaagatattttgaaagtaatagaatccatattgccggtttagttatttctcactataccgacgagtactctcattatcttcgtaaatcttccttaggtaaatggttacaaaatgaagggatcccagctgtttatggtgttgatacaagatcattgaccaagcatttgagagatgcaggttcaatgttgggtaggttgtctttggaaaaaagcggctctgacagaaccatctccagatcttcctcttggagaagtgcgtttgatgttcctgaatgggtggatccaaatgttcaaaacctagtttctaaggtctccatcaatgaacctaaattgtacgttcctccagcagacaataagcacatcgaattgcaaaccggacccgatggtaaagttttaaggattctagccattgacgtgggtatgaaatacaatcaaattcgttgttttatcaaaaggggtgtagaattgaaagttgttccatggaactacgatttcactaaagaagattatgatggtctgtttatttcaaatggtccaggtgatccatctgttctagatgatctatctcaaagattgtcaaatgtcctggaggctaaaaagacgccagtattcggtatttgtctcggtcatcaattgatagcaagagctgccggtgcatccaccctaaaactaaaatttggtaaccgtggtcataacataccttgtacatcaactataagtggtcgttgttacataacatctcaaaaccatgggttcgctgtggatgttgacactctaacttccggatggaagccattgtttgttaacgcgaatgatgactctaacgaaggtatctatcattctgaattaccttatttttccgtccaattccatccagaatccacacctggcccaagagatacagaattcttgtttgacgtttttatccaagcagttaaagaattcaagtatacacaagtgttgaaaccaatcgctttcccaggtggcctattagaggataacgttaaggcacaccctagaatcgaagcgaagaaggttctagttctcggttctggtggtttgtccatcggtcaagctggtgaatttgactactctggttctcaagccatcaaagctttgaaagaagaaggtatctatacaattttaattaatccaaacattgctaccatccaaacttcgaaagggttggctgataaggtttattttgttcctgttactgcagagttcgtgagaaaagttattttacatgaaaggccggacgccatttatgtgacatttggtggacaaactgctttatctgttggtatagccatgaaagatgaatttgaggcgttaggagttaaagtattgggtactccaatcgatactattattaccacggaagaccgtgaactcttcagtaatgccattgacgaaattaatgaaaaatgtgcgaaatctcaagctgctaattcagtggacgaggcattggccgctgtcaaggagatcggtttcccagttattgtacgtgctgcatatgcattgggaggtttaggttccggtttcgctaataatgaaaaagaattggttgatctatgtaatgttgcattttcatcctcacctcaagttttagtcgagaaatctatgaaaggttggaaagaagtcgaatatgaagttgttcgtgatgcttttgacaactgtattactgtttgtaatatggaaaattttgatccactaggtattcacaccggtgattccatcgttgtagccccatctcaaactttatctgatgaagattacaatatgttaagaactactgctgttaatgttattagacacttaggtgttgttggtgaatgtaatatccaatatgctttaaatcccgtttctaaggattattgcatcattgaagttaatgcgcgtttgtcacgttcctctgctttagcttctaaggctactggttacccattggcctacactgcggctaagttaggtttgaatatcccattaaatgaagttaagaattccgtcacaaaatccacatgtgcttgttttgaaccttctctagactactgtgttgtcaaaatgccaagatgggatttgaagaagttcaccagagtttctaccgaattatcttcatcaatgaaatctgttggtgaagttatgagcatcggtagaaccttcgaagaagctattcaaaaagctatcagatccacagaatatgctaacctcggattcaatgagacagatctagatatcgacattgattacgagttgaacaaccctacggatatgcgtgtcttcgccattgcaaatgcttttgctaagaagggatattctgttgataaagtctgggaaatgactagaattgataagtggtttttaaacaaactgcacgatttggtccaatttgctgagaaaattagttcatttggtactaaagaggaattaccttccttagttttaagacaggctaagcagttaggttttgatgacagacagattgcaagatttttggattccaacgaagttgccatccgtagattaagaaaagaatatggaattacaccatttgtcaaacaaattgatacagttgccgctgaattccccgcttacacgaactatttatacatgacatacaatgctgactcacacgatttatcctttgatgaccacggtgttatggtcttgggttctggtgtttaccgtatcggttcttctgtcgaatttgattggtgtgctgttactgcagttagaacattacgtgccaacaatatcaaaactatcatggtcaactataatccagaaactgtttccacagattatgatgaggctgatagactatactttgaaaccatcaaccttgaaagagttttggatatttacgagattgaaaactcaagcggtgttgtcgtatcaatgggtggtcaaacttccaacaacatcgccatgactttacatcgtgaaaatgtaaagattcttggtacatcccctgacatgattgattctgctgaaaaccgttacaagttctctcgtatgttggatcaaattggtgttgaccaaccagcttggaaagaattgacatccatggacgaagctgaatcttttgccgaaaaggtgggttatccagttttggtacgtccatcttatgtgttatccggtgccgccatgaatactgtttattctaaaaacgatttggaatcctacttaaaccaagccgtcgaagtttcacgtgattatcctgttgttatcactaaatatattgaaaacgcaaaggagattgaaatggatgcagttgcaagaaatggtgaattggttatgcatgttgtctctgagcatgttgaaaatgcaggtgtccactcgggtgatgcaacattaatcgttccacctcaagatttggctcctgaaactgtggatagaattgttgtcgccactgctaaaattggtaaggctttgaaaattacaggtccatacaacatccaattcattgcaaaggacaatgaaatcaaggtcatagaatgtaatgttcgtgcttcgagatctttcccattcatttcaaaggttgttggcgtcaatctgattgaattggcaacaaaggccataatgggtttgcctttgacgccttatcctgttgaaaaattaccagatgattatgtcgccgttaaagtaccacaattctctttcccacgtttagcaggagctgatccagtcttaggtgttgaaatggcctctactggtgaagtcgctacttttggccactcgaagtatgaagcatacttaaagtctttgttggcaaccggcttcaaacttccaaagaagaatattttattgtctattggttcttacaaggaaaaacaagaattgctttcttccgtacaaaaactatacaacatgggatataaattatttgcaacatcaggtactgctgactttttatctgaacatggtattgccgtccaatatctggaggttttaaacaaggatgatgatgatcaaaaatcagaatactcacttactcaacatttggctaataatgaaattgacctttacatcaacttgccttctgccaacaggttccgtcgtcctgcatcctatgtttcaaaggggtataaaacacgtcgtttggctgtcgattattcggttccgttggttactaacgttaaatgtgcaaaattgttgattgaagccatttcaagaaatatcactttagatgtttctgaacgtgatgcacaaacttcccacagaactattaccttacctggtttaatcaatatcgcaacttatgttccgaatgcatcccatgttatcaaaggcccagctgaactgaaggagaccacacgtctatttttggaatccggttttacatactgtcaattgatgcccagatccatcagcggacctgttattactgacgttgcatccttgaaggccgcaaactctgtttcccaagattcatcttacactgacttttctttcactattgctggtacagcacacaatgctcatagtgttacgcaatctgctagcaaagtgacagcattgtttttgcccctacgtgaattaaagaacaagatcacagcagtagctgaacttctgaatcagtggccaactgaaaagcaagtgattgcagaagctaaaactgcagatttggcatcggttttattgttaacctcccttcaaaacagatctattcacattactggtgtttcgaataaggaagatttagctttgatcatgacggtcaaggcaaaagaccctagagtgacttgtgatgtcaatatttattctttgtttattgcccaagatgactatccggaggcagttttcttgcctactaaggaagatcaagagtttttctggaacaaccttgatagtatcgatgctttctctgtcggtgctcttcctgtcgccttggcaaatgtcacaggtaacaaggttgatgttggtatgggtatcaaagattcattaccactattgttggctgctgttgaagaaggtaaattaaccattgatgatatcgtccttcgtctgcatgacaatcccgctaaaattttcaacatccctactcaggactcagttgtcgaaattgatttggattattctttcagacgtaataagagatggtcaccattcaacaaagatatgaacggtggtattgagcgtgttgtctataatggcgaaacattagttttgagcggtgaattagtttcaccaggcgccaaaggaaaatgcattgttaatccaagtccagcttccataactgcttccgcagagctccaatctactagtgctaaaagaaggttctcgatcacggaagaagcaatcgctgataatttagatgccgcggaggatgcaattccagaacagcctttggaacaaaaattgatgtcttcaaggccaccaagagaacttgttgctccaggcgccatccagaatttgatccgtagtaacaatccattccgcggaagacatatattgtctatcaaacaattcaaacgttctgatttccatgtgttgtttgctgttgcacaagaactaagggcagctgtcgcaagagaaggtgtcttagatttaatgaaaggccacgttattactacaattttctttgaaccatctactcgtacttgttcttcattcattgctgctatggaacgtttgggtggtagaattgtaaatgttaatccattggtgtcttctgtcaagaaaggtgaaacccttcaagatactatcagaactttggcttgttacagtgatgccattgtcatgcgtcattcagaagaaatgtctgttcatatcgccgctaaatattctcctgttccaattattaatggtggtaatggttctcgcgagcatcctacgcaggccttcttggatttgtttacgattcgtgaagaaatcggtactgttaatggtattactgttactttcatgggtgatctcaaacatggtagaaccgtacattcattgtgtcgtttgttaatgcactatcaagtcagaattaatcttgtttctcctccggaattgaggttaccagaaggattaagagaagagctaagaaaagctggcttacttggtgttgagagcattgaattaacccctcatatcatctcaaagaccgatgttctgtattgtacaagggtccaagaagaaagattcaatagccctgaagaatatgcacgtctgaaggatacttatatcgtggacaacaagatcttggcacacgccaaagaaaatatggctatcatgcatccattgcctcgtgtaaatgaaatcaaagaggaagtggactacgatcatcgtgctgcttacttcagacaaatgaagtatggtttgttcgtcagaatggctttgttggccatggtcatgggtgttgatatgtgaatgataagagacctatccgtattttaaatttataatctattattaaacttttttaaccaatatttttatttgtatattacactcaataatatgatttcccaaagtcgagtttttatttaaaacaaaagatggaatgattttgtaaacaaattttcttgaggaaacaaaaaatgtttaaggcataggagttgaaggtaatctcgttccttttgtctagttttcatcctgagctcttgaattttacctgaattttcccgcgacggtaagaactttaagggtctaaaaaagtaagttcagaaaactataacagctatatatcacaaaatgcatacctgatgcatacacagtaaggaggtaacatcaggtccgtggat

SEQ ID NO: 95502 - protein, 2214 aa, Saccharomyces cerevisiae
MATIAPTAPITPPMESTGDRLVTLELKDGTVLQGYSFGAEKSVAGELVFQTGMVGYPESVTDPSYEGQILVITYPLVGNYGVPDMHLRDELVEELPRYFESNRIHIAGLVISHYTDEYSHYLRKSSLGKWLQNEGIPAVYGVDTRSLTKHLRDAGSMLGRLSLEKSGSDRTISRSSSWRSAFDVPEWVDPNVQNLVSKVSINEPKLYVPPADNKHIELQTGPDGKVLRILAIDVGMKYNQIRCFIKRGVELKVVPWNYDFTKEDYDGLFISNGPGDPSVLDDLSQRLSNVLEAKKTPVFGICLGHQLIARAAGASTLKLKFGNRGHNIPCTSTISGRCYITSQNHGFAVDVDTLTSGWKPLFVNANDDSNEGIYHSELPYFSVQFHPESTPGPRDTEFLFDVFIQAVKEFKYTQVLKPIAFPGGLLEDNVKAHPRIEAKKVLVLGSGGLSIGQAGEFDYSGSQAIKALKEEGIYTILINPNIATIQTSKGLADKVYFVPVTAEFVRKVILHERPDAIYVTFGGQTALSVGIAMKDEFEALGVKVLGTPIDTIITTEDRELFSNAIDEINEKCAKSQAANSVDEALAAVKEIGFPVIVRAAYALGGLGSGFANNEKELVDLCNVAFSSSPQVLVEKSMKGWKEVEYEVVRDAFDNCITVCNMENFDPLGIHTGDSIVVAPSQTLSDEDYNMLRTTAVNVIRHLGVVGECNIQYALNPVSKDYCIIEVNARLSRSSALASKATGYPLAYTAAKLGLNIPLNEVKNSVTKSTCACFEPSLDYCVVKMPRWDLKKFTRVSTELSSSMKSVGEVMSIGRTFEEAIQKAIRSTEYANLGFNETDLDIDIDYELNNPTDMRVFAIANAFAKKGYSVDKVWEMTRIDKWFLNKLHDLVQFAEKISSFGTKEELPSLVLRQAKQLGFDDRQIARFLDSNEVAIRRLRKEYGITPFVKQIDTVAAEFPAYTNYLYMTYNADSHDLSFDDHGVMVLGSGVYRIGSSVEFDWCAVTAVRTLRANNIKTIMVNYNPETVSTDYDEADRLYFETINLERVLDIYEIENSSGVVVSMGGQTSNNIAMTLHRENVKILGTSPDMIDSAENRYKFSRMLDQIGVDQPAWKELTSMDEAESFAEKVGYPVLVRPSYVLSGAAMNTVYSKNDLESYLNQAVEVSRDYPVVITKYIENAKEIEMDAVARNGELVMHVVSEHVENAGVHSGDATLIVPPQDLAPETVDRIVVATAKIGKALKITGPYNIQFIAKDNEIKVIECNVRASRSFPFISKVVGVNLIELATKAIMGLPLTPYPVEKLPDDYVAVKVPQFSFPRLAGADPVLGVEMASTGEVATFGHSKYEAYLKSLLATGFKLPKKNILLSIGSYKEKQELLSSVQKLYNMGYKLFATSGTADFLSEHGIAVQYLEVLNKDDDDQKSEYSLTQHLANNEIDLYINLPSANRFRRPASYVSKGYKTRRLAVDYSVPLVTNVKCAKLLIEAISRNITLDVSERDAQTSHRTITLPGLINIATYVPNASHVIKGPAELKETTRLFLESGFTYCQLMPRSISGPVITDVASLKAANSVSQDSSYTDFSFTIAGTAHNAHSVTQSASKVTALFLPLRELKNKITAVAELLNQWPTEKQVIAEAKTADLASVLLLTSLQNRSIHITGVSNKEDLALIMTVKAKDPRVTCDVNIYSLFIAQDDYPEAVFLPTKEDQEFFWNNLDSIDAFSVGALPVALANVTGNKVDVGMGIKDSLPLLLAAVEEGKLTIDDIVLRLHDNPAKIFNIPTQDSVVEIDLDYSFRRNKRWSPFNKDMNGGIERVVYNGETLVLSGELVSPGAKGKCIVNPSPASITASAELQSTSAKRRFSITEEAIADNLDAAEDAIPEQPLEQKLMSSRPPRELVAPGAIQNLIRSNNPFRGRHILSIKQFKRSDFHVLFAVAQELRAAVAREGVLDLMKGHVITTIFFEPSTRTCSSFIAAMERLGGRIVNVNPLVSSVKKGETLQDTIRTLACYSDAIVMRHSEEMSVHIAAKYSPVPIINGGNGSREHPTQAFLDLFTIREEIGTVNGITVTFMGDLKHGRTVHSLCRLLMHYQVRINLVSPPELRLPEGLREELRKAGLLGVESIELTPHIISKTDVLYCTRVQEERFNSPEEYARLKDTYIVDNKILAHAKENMAIMHPLPRVNEIKEEVDYDHRAAYFRQMKYGLFVRMALLAMVMGVDM

SEQ ID NO: 95503 - DNA, 1422 bp, Oryza sativa
  CDS (1)..(1422)
atggcggcgcctccggccacggcctccgcgccctccctgcgcccgtccgcggccagcccacgcgccgccgccgctcggtcggtcgccgtcccctcagggcctcgcaccgtcggcccgaggcgagacgggggccgcttcctcggcgtccgtgctgccaaggctgtcagtggcgtgcagagtggtaccgtggtggatgatggagtgcaaagaccatggaagctcagcgatgctcggctcgttcttgaggatggttcagtttggaaggccaagtcttttggtgcttcaggaacacaagttggtgaagtggtatttaatacatctttgacagggtatcaagagattttgactgatccaagctatgctggtcaatttgtcctcatgaccaacccacatattggaaacactggtgttaatcctgatgatgaagaatcgaaccgatgtttccttgctggtctgatcataaggaatctaagcatatgtacatccaactggcgatgcacagaaacacttgaagagtatctgatgaagagaaacattatgggaatatatgatgtggacacacgcgccataacacggagattacgagaagatggtagtctaattggtgtcttaagtactgatcaatctcggaccgatgatgagttgttggaaatggcaaaaaattggaaaattgttggtgttgatttgattagtggtgtcacatgcgatgctccatatgaatggtcagacaagactgattcagagtgggaattcaagaagggtcaatcgactgaaagttttcatgtggtcgcatacgattttggaatcaagcacaatattttgagacgtttgacgtcatatggatgcaagataactgttgttccagccaattggcctgcttctgaggtacttaacttgaagcctgatggtgtgttttttagcaatggtcctggagatccagctgcagttccatatgctgtgaagacagtacaagaaataatagggaaggttcctgtgtttggcatctgtatgggccaccaattgattgggcaagctcttggtgggaagacatttaaaatgaagtttggtcatcatggaggaaatcatcctgtttgtgaccttcgaagtggacgtgtcgacataagtgcacaagctttccgtattactggtgttgggagaggtgctggacttctcgctgtgacacttcctgatgaaaacttggagcttctgagaaaccataattatgctgttgacccagagtcacttccagaaggggtgaaagtaacacatatcaatctcaacgataatagctgtgccggccttcagtaccctaagatgaaacttttgtctcttcagtaccatccagagtcctcacccgggccgcatgattctgacttggcttttggtgaatttatagagatgatgaagaacaacagattgtga

SEQ ID NO: 95504 - protein, 473 aa, Oryza sativa
MAAPPATASAPSLRPSAASPRAAAARSVAVPSGPRTVGPRRDGGRFLGVRAAKAVSGVQSGTVVDDGVQRPWKLSDARLVLEDGSVWKAKSFGASGTQVGEVVFNTSLTGYQEILTDPSYAGQFVLMTNPHIGNTGVNPDDEESNRCFLAGLIIRNLSICTSNWRCTETLEEYLMKRNIMGIYDVDTRAITRRLREDGSLIGVLSTDQSRTDDELLEMAKNWKIVGVDLISGVTCDAPYEWSDKTDSEWEFKKGQSTESFHVVAYDFGIKHNILRRLTSYGCKITVVPANWPASEVLNLKPDGVFFSNGPGDPAAVPYAVKTVQEIIGKVPVFGICMGHQLIGQALGGKTFKMKFGHHGGNHPVCDLRSGRVDISAQAFRITGVGRGAGLLAVTLPDENLELLRNHNYAVDPESLPEGVKVTHINLNDNSCAGLQYPKMKLLSLQYHPESSPGPHDSDLAFGEFIEMMKNNRL

SEQ ID NO: 95505 - DNA, 1341 bp, Oryza sativa
  CDS (1)..(1341)
atggcggcgcctccggccacggcctccgcgccctccctgcgcccgtccgcggccagcccacgcgccgccgccgctcggtcggtcgccgtcccctcagggcctcgcaccgtcggcccgaggcgagacgggggccgcttcctcggcgtccgtgctgccaaggctgtcagtggcgtgcagagtggtaccgtggtggatgatggagtgcaaagaccatggaagctcagcgatgctcggctcgttcttgaggatggttcagtttggaaggccaagtcttttggtgcttcaggaacacaagttggtgaagtggtatttaatacatctttgacagggtatcaagagattttgactgatccaagctatgctggtcaatttgtcctcatgaccaacccacatattggaaacactggtgttaatcctgatgatgaagaatcgaaccgatgtttccttgctggtctgatcataaggaatctaagcatatgtacatccaactggcgatgcacagaaacacttgaagagtatctgatgaagagaaacattatgggaatatatgatgtggacacacgcgccataacacggagattacgagaagatggtagtctaattggtgtcttaagtactgatcaatctcggaccgatgatgagttgttggaaatggcaaaaaattggaaaattgttggtgttgatttgattagtggtgtcacatgcgatgctccatatgaatggtcagacaagactgattcagagtgggaattcaagaagggtcaatcgactgaaagttttcatgtggtcgcatacgattttggaatcaagcacaatattttgagacgtttgacgtcatatggatgcaagataactgttgttccagccaattggcctgcttctgaggtacttaacttgaagcctgatggtgtgttttttagcaatggtcctggagatccagctgcagttccatatgctgtgaagacagtacaagaaataatagggaaggttcctgtgtttggcatctgtatgggccaccaattgattgggcaagctcttggtgggaagacatttaaaatgaagtttggtcatcatggaggaaatcatcctgtttgtgaccttcgaagtggacgtgtcgacataagtgcacaaaaccataattatgctgttgacccagagtcacttccagaaggggtgaaagtaacacatatcaatctcaacgataatagctgtgccggccttcagtaccctaagatgaaacttttgtctcttcagtaccatccagagtcctcacccgggccgcatgattctgacttggcttttggtgaatttatagagatgatgaagaacaacagattgtga

SEQ ID NO: 95506 - protein, 446 aa, Oryza sativa
MAAPPATASAPSLRPSAASPRAAAARSVAVPSGPRTVGPRRDGGRFLGVRAAKAVSGVQSGTVVDDGVQRPWKLSDARLVLEDGSVWKAKSFGASGTQVGEVVFNTSLTGYQEILTDPSYAGQFVLMTNPHIGNTGVNPDDEESNRCFLAGLIIRNLSICTSNWRCTETLEEYLMKRNIMGIYDVDTRAITRRLREDGSLIGVLSTDQSRTDDELLEMAKNWKIVGVDLISGVTCDAPYEWSDKTDSEWEFKKGQSTESFHVVAYDFGIKHNILRRLTSYGCKITVVPANWPASEVLNLKPDGVFFSNGPGDPAAVPYAVKTVQEIIGKVPVFGICMGHQLIGQALGGKTFKMKFGHHGGNHPVCDLRSGRVDISAQNHNYAVDPESLPEGVKVTHINLNDNSCAGLQYPKMKLLSLQYHPESSPGPHDSDLAFGEFIEMMKNNRL

SEQ ID NO: 95507 - DNA, 1341 bp, Zea mays
  CDS (1)..(1341)
atggcggcgcctccggccacggctgccgcggcctcccggtgtctctctggtgccaagtcgtgccgggctgctgagcggagctccagctcgtttgccgtctcggcgccttctactggcctccggcaaagtaggagccgcgtcctcagcgtccgtgccaaggttgccactggcgtgcagagagccagcactgtggatgatggagcgaaaaggccgtggaagctcagtgatgctcgtcttgtcctggaagatggttcagtgtggagggccaagtcttttggcgcttcaggaacacaagtcggtgaagttgttttcaacacatcactgacaggctatcaggagattttgacagatccaagctatgctggtcaatttgtcctgatgaccaatccccatattggtaacactggcgttaatcctgacgatgaagaatcaaaccaatgttttcttggtggccttatcataagaaatctaagcatatgtacttccaactggcgatgcaaagaaacacttgaagagtatctgactaagaggaacatcatgggaatatatgacgtggatacacgtgctataacacgaagattaagagaagacggcagtcttattggtgtcttgagtactgatcagtctcagacagacaatgagttgttggaaatggccaaaaagtggaaaattgttggagttgatttgattagtggtgtcacatgtgatgctccatatgaatggttggacaagactgactcagaatgggagttcaagagggatcagtcaagtgaaacttttcatgtggttgcctatgactttggtatcaaacataatattttgagacgattggcatcatatggatgcaaaataacagttgttccagcaaattggcctgcttcagaggtactcaatttgaagcctaatggtgttctttttagcaatggtcctggagatccagctgcagttccctatgctgtgaagacagtacaagacataattggaaaggttcctgttttcggcatctgtatgggccaccaattgattgggcaggcgcttggtgggaagacatttaaaatgaaatttggtcatcatggtgggaatcaccctgtctgtgatctccgtagtgggcgtgtagacataagtgcacagaaccataactacgcagttgacccagaatcacttccagaaggagcagaagtaactcacgtcaatctcaacgacaatagttgtgctggccttcagtacgccaagatgaagcttgtgtctctccagtaccatcctgagtcttccccaggtccgcatgattccgacacagccttcggtgagtttatagagctcatgaagagcaacagattgtga

SEQ ID NO: 95508 - protein, 446 aa, Zea mays
MAAPPATAAAASRCLSGAKSCRAAERSSSSFAVSAPSTGLRQSRSRVLSVRAKVATGVQRASTVDDGAKRPWKLSDARLVLEDGSVWRAKSFGASGTQVGEVVFNTSLTGYQEILTDPSYAGQFVLMTNPHIGNTGVNPDDEESNQCFLGGLIIRNLSICTSNWRCKETLEEYLTKRNIMGIYDVDTRAITRRLREDGSLIGVLSTDQSQTDNELLEMAKKWKIVGVDLISGVTCDAPYEWLDKTDSEWEFKRDQSSETFHVVAYDFGIKHNILRRLASYGCKITVVPANWPASEVLNLKPNGVLFSNGPGDPAAVPYAVKTVQDIIGKVPVFGICMGHQLIGQALGGKTFKMKFGHHGGNHPVCDLRSGRVDISAQNHNYAVDPESLPEGAEVTHVNLNDNSCAGLQYAKMKLVSLQYHPESSPGPHDSDTAFGEFIELMKSNRL

SEQ ID NO: 95509 - DNA, 1275 bp, Brassica napus
  CDS (1)..(1275)
atggcggctacgacgactctgggctttgttctaccgactggtgtatctcgccgtcgcggtggcttcagggtttcactgatccgatgctccgcttctcctctcactaactccaccgcctctggccttgtggagaagccttgggattcatataacgctaggcttgtgttagaagacggctctatctggcctgctaagtcatttggtgctcctggaacccgtgttgctgaattggtctttaacacctccttgacagggtatcaagagattctgactgatcctagttatgccgggcagtttgtgctaatgacaaacccacagattggtaacaccggtgtgaatctcgatgatgaagagtctgagcaatgctttcttgctggtttggtcataagaagtctaagcatcagtacctcaaactggagatgtactaagacacttgctgactatctaaccgaaaggaacctcatgggagtttatgatcttgacactcgagcgataacacgtcggttaagagaagaaggtagtcttaacggtgtgctgagcacagaacaaaccaaaacagacgaagagcttctgcaaatgtcccgttcgtgggatattgtaggtattgatctgataagtgatgtttcatgcaaatctccctacgagtgggtcgacaaaacagaccctgaatgggatttcaactcgaattcacgcgacggggaaacctacagagttattgcttatgactttggcatcaagcataacatcctgagacgcctatcctcctacggatgtcaaatcaccgttgtcccgtcgacatttccagcttccgaggcgcttaaaatgaatccagacgggattctgttcagcaacggacctggagacccttctgctgtgccgtatgctgtggagacggtcaaagagcttctcggtaaagctcctgtgtacggaatctgtatgggtcatcagttgctgggacaagctttgggtggtaaaaccttcaagatgaagtttggtcatcatggaggaaaccacccggttcgtaataacagaactggccaggtggagatcagtgctcagaaccacaactatgcggttgacccagcttcacttcccggaggggtagaagtgacacatgtcaatctcaatgatggaagctgtgcgggtctatctttcccggccatgaatgtcatgtctctccagtaccaccctgaagcctcccctggacctcacgactctgacaacgcgtttagagagttcatagagcttatgaagaggtcgaagcaaagctcctaa

SEQ ID NO: 95510 - protein, 424 aa, Brassica napus
MAATTTLGFVLPTGVSRRRGGFRVSLIRCSASPLTNSTASGLVEKPWDSYNARLVLEDGSIWPAKSFGAPGTRVAELVFNTSLTGYQEILTDPSYAGQFVLMTNPQIGNTGVNLDDEESEQCFLAGLVIRSLSISTSNWRCTKTLADYLTERNLMGVYDLDTRAITRRLREEGSLNGVLSTEQTKTDEELLQMSRSWDIVGIDLISDVSCKSPYEWVDKTDPEWDFNSNSRDGETYRVIAYDFGIKHNILRRLSSYGCQITVVPSTFPASEALKMNPDGILFSNGPGDPSAVPYAVETVKELLGKAPVYGICMGHQLLGQALGGKTFKMKFGHHGGNHPVRNNRTGQVEISAQNHNYAVDPASLPGGVEVTHVNLNDGSCAGLSFPAMNVMSLQYHPEASPGPHDSDNAFREFIELMKRSKQSS

SEQ ID NO: 95511 - DNA, 1341 bp, Zea mays
  CDS (1)..(1341)
atggcggcgcctccggccacggctcccgcgaccgcccggtgtctgtccgtcgccaagtcgtgctgggctgccgagcggagctccagctcgtttgtcctctcggctcctgcgactggcctccggcaaagtgggagccgcgtcctcagcatccgtgccaaggttgccactggcctgcagagggcctgcattgcggatgatggagcggaaaggccgtggaagctcagtgatgctcgtcttgtcctggaagatggatcagtgtggacggccaagtcttttggtgcttcaggaacacaagttggtgaagctgttttcaacacatcactgacaggctatcaggagattttgaccgatccaagttatgctggtcagtttgtcctaatgaccaatcctcatattgggaacactggcgttaatcctgatgatgaagaatcaaaccaatgttttcttggtggcttaatcataagaaatctaagcatatgtacttccaactggcgatgcaaagaaacacttgaaaagtatctgactaagaggaacatcatgggaatatatgatgtggatacacgtgctataacacgaagattaagagaagatggtagtcttattggtgtcttgagtactgatcagtctctgacagacaatgagttgttagaaatggcccaaaagtggaaaattgttggagttgatttgattagtggtgtcacatgtgatgctccatatgaatggtcggacaagactgattcagaatgggagtttaagagggatccgtcaagtgaaacttttcatgtggttgcctacgactttggtatcaagcataatattttgagacgattgacatcatatggatgcaaaataacagttgttccagcaaattggcctgcttcagaggtactcaatttgaagcctaatggtgttctttttagcaatggtcctggggatccagctgcagttccctatgctgtgaagacggtacaggaaataattgggaaggttcctgtttttggcatctgtatgggccaccaattgattgggcaggctcttggtgggaagacatttaaaatgaaatttggacatcatggcgggaatcaccctgtctgtgatctccgtagtggacgtgtagacataagtgcacagaaccataactacgcagttgacccagaatcactcccagaaggagcaaaagtaactcacgtcaatctcaacgataatagttgcgctggcctccagtactccaagatgaagcttatgtctctccagtaccatcccgagtcttcccctggtccgcatgactccgacacagccttcggcgagtttatagagctcatgaagagcaacagattgtaa

SEQ ID NO: 95512 - protein, 446 aa, Zea mays
MAAPPATAPATARCLSVAKSCWAAERSSSSFVLSAPATGLRQSGSRVLSIRAKVATGLQRACIADDGAERPWKLSDARLVLEDGSVWTAKSFGASGTQVGEAVFNTSLTGYQEILTDPSYAGQFVLMTNPHIGNTGVNPDDEESNQCFLGGLIIRNLSICTSNWRCKETLEKYLTKRNIMGIYDVDTRAITRRLREDGSLIGVLSTDQSLTDNELLEMAQKWKIVGVDLISGVTCDAPYEWSDKTDSEWEFKRDPSSETFHVVAYDFGIKHNILRRLTSYGCKITVVPANWPASEVLNLKPNGVLFSNGPGDPAAVPYAVKTVQEIIGKVPVFGICMGHQLIGQALGGKTFKMKFGHHGGNHPVCDLRSGRVDISAQNHNYAVDPESLPEGAKVTHVNLNDNSCAGLQYSKMKLMSLQYHPESSPGPHDSDTAFGEFIELMKSNRL

SEQ ID NO: 95513 - DNA, 1317 bp, Glycine max
  CDS (1)..(1317)
atggcgacaaaagctttgtccttcgctctgtctctcaatgacctcaccaataaccacttctcttccaatacgccacacaccgccgccaaagtttccgtctttaccgtcaaatgctcttcttcgggtggtggagagaggccttggaagaattcagatgctagacttgtgcttgaagatggttcaatttggaaagcaaaatcgtttggtgcttcggggactcaagttggcgaagttgttttcaatacatcattgacagggtatcaagaaattttgacagatcctagttatgctggccagtttgtgctcatgacaaatccacatattgggaacactggcataaattttgatgatgaggaatcaatacagtgtttccttgctggtcttgtaattagaagtttgagtatcagtacctctaactggagatgtaagaaggatctgggggattacttggccgaaaggaatatcatgggaatttatgatgttgatactcgtgcaatcacgcgccggttgcgtcaagatggcagtcttattggtgttttgagcactgacaattccaaaaaggatgaggaactgcttcacatgtctaagtcatggaacattgttggtaaggatctaataagtggagtatcatgcaaaactccacatgaatgggttgataaaacaaaacaacaatgggagtttagtaaagtgcctggagaggctttccatgtagttgcttatgattttggaatcaagcataatatacttaggcgcctagcatcttatggctgcaaaatcactgttgtgccatgtacatggtcagcatcagaaactttgaagatgaagccagacggggttcttttcagcaatggccctggagatccgtctgctgttccttatgccgttgaaacagtgaagaatattatcggaaaggtgcctgtttttggaatttgcatgggccatcaattgctaggccaggctttaggaggtaaaaccttcaagatgaaatttggtcaccatggaggaaatcaccctgttcgtaaccttcgaagtggccatgttgaaattagtgcccagaaccacaactatgctgttgaccctgccacactgccggaaggagtggaggttactcatatcaatctaaatgatggaagttgtgctggtcttgctttccccgctcaacaacttatgtctcttcaataccaccctgaagcatcccctggacctcatgattctgactatgcttttagggagtttgtagagctaatgaagcaaggaaaaaacagaacaaaagaaagtctacaccaactatcagcagcacaggctttggatgcataa

SEQ ID NO: 95514 - protein, 438 aa, Glycine max
MATKALSFALSLNDLTNNHFSSNTPHTAAKVSVFTVKCSSSGGGERPWKNSDARLVLEDGSIWKAKSFGASGTQVGEVVFNTSLTGYQEILTDPSYAGQFVLMTNPHIGNTGINFDDEESIQCFLAGLVIRSLSISTSNWRCKKDLGDYLAERNIMGIYDVDTRAITRRLRQDGSLIGVLSTDNSKKDEELLHMSKSWNIVGKDLISGVSCKTPHEWVDKTKQQWEFSKVPGEAFHVVAYDFGIKHNILRRLASYGCKITVVPCTWSASETLKMKPDGVLFSNGPGDPSAVPYAVETVKNIIGKVPVFGICMGHQLLGQALGGKTFKMKFGHHGGNHPVRNLRSGHVEISAQNHNYAVDPATLPEGVEVTHINLNDGSCAGLAFPAQQLMSLQYHPEASPGPHDSDYAFREFVELMKQGKNRTKESLHQLSAAQALDA

SEQ ID NO: 95515 - DNA, 1317 bp, Glycine max
  CDS (1)..(1317)
atggagacaaaagctttgtccttcgctctgtctctcaatgacctcaccaacaaccgcttcacttccaatacgccacatgctgccgccaaagtttccgtctttaccgtcagatgctcttcttcgggtagtggagagaggccttggaagaattcagatgctagacttgtgcttgaagatggttcaatttggagagcaaaatcgtttggtgcttcagggacccaagttggcgaggttgttttcaatacatcattgacagggtatcaagaaattttgactgatcctagttatgctggccagtttgtgctcatgacaaacccacatattgggaatactggcataaattttgatgatgaggaatcaatacagtgtttccttgctggacttgtaattagaagtttgagtatcagtacctctaactggagatgtaagaaggatctgggggattacttagccgaaaggaatatcatgggaatttatgatgttgatactcgtgcaatcacgcgccggttgcgtcaagatggcagtcttattggtgtcttgagcactgacaattccaaaaaggatgaggaactgcttcacatgtctaagtcatggaacattgttggtaaggatctaataagtggagtatcatgcaaaactccacatgaatgggttgataaaacaaaacaacaatgggagtttagtaaagtgcctggagaggctttccatgtagttgcttatgattttggaatcaagcataatatacttaggcgcctagcatcttatggctgcaaaatcactgttgtgccatgtacatggtcagcatcagaaactttgaagatgaagccagacggggttcttttcagcaatggccctggagatccgtctgctgttccttatgccgttgaaacagtgaagaatattatcggaaaggtgcctgtttttggaatttgcatgggccatcaattgctaggccaggctttaggaggtaaaaccttcaagatgaaatttggtcaccatggaggaaatcaccctgttcgtaaccttcgaagtggccatgttgaaattagtgcccagaaccacaactatgctgttgaccctgccacactgccggaaggagtggaggttactcatatcaatctaaatgatggaagttgtgctggtcttgctttccccgctcaacaacttatgtctcttcaataccaccctgaagcatcccctggacctcatgattctgactatgcttttagggagtttgtagagctaatgaagcaaggaaaaaacagaacaaaagaaagtctacaccaactatcagcagcacaggctttggatgcataa

SEQ ID NO: 95516 - protein, 438 aa, Glycine max
METKALSFALSLNDLTNNRFTSNTPHAAAKVSVFTVRCSSSGSGERPWKNSDARLVLEDGSIWRAKSFGASGTQVGEVVFNTSLTGYQEILTDPSYAGQFVLMTNPHIGNTGINFDDEESIQCFLAGLVIRSLSISTSNWRCKKDLGDYLAERNIMGIYDVDTRAITRRLRQDGSLIGVLSTDNSKKDEELLHMSKSWNIVGKDLISGVSCKTPHEWVDKTKQQWEFSKVPGEAFHVVAYDFGIKHNILRRLASYGCKITVVPCTWSASETLKMKPDGVLFSNGPGDPSAVPYAVETVKNIIGKVPVFGICMGHQLLGQALGGKTFKMKFGHHGGNHPVRNLRSGHVEISAQNHNYAVDPATLPEGVEVTHINLNDGSCAGLAFPAQQLMSLQYHPEASPGPHDSDYAFREFVELMKQGKNRTKESLHQLSAAQALDA

SEQ ID NO: 95517 - DNA, 1341 bp, Zea mays
  CDS (1)..(1341)
atggcggcgcctccggccacggctcacgcggcctcccggtgtctctccggtgccaagtcgtaccaggctgctgagcggagctccagcccggttgccatctcggagccttcaactggcctccggcaaaataggagccgcgtcctcagcgtccgtgccaaggttgccacaggcgtgcagacagccagcactgtggatgatggagcgaaaaggccgtggaagcacaatgatgctcgtcttgtcctggaagatggttcagtgtggagggccaagtcttttggcgcttcaggaacacaagtcggtgaagttgttttcaacacatcactgacaggctatcaggagattttgacagatccaagctatgctggtcaatttgtcctgatgaccaatccccatattggtaacactggcgttaatcctgacgatgaagaatcaaaccaatgttttcttggtggccttatcataagaaatctaagcatatgtacttccaactggcgatgcaaagaaacacttgaagagtatctgactaagaggaacatcatgggaatatatgacgtggatacacgtgctataacacgaagattaagagaagacggcagtcttattggtgtcttgagtactgatcagtctcagacagacaatgagttgttggaaatggccaaaaagtggaaaattgttggagttgatttgattagtggggtcacatgtgatgctccatatgaatggttggacaagactgactcagaatggaagctcaagagggatcagtcaagtgaaacttttcatgtggttgcctatgactttggtatcaaacataatattttgagacgattggcatcatatggatgcaaaataacagttgttccagcaaattggcctgcttcagaggtactcaatttgaagcctaatggtgttctttttagcaatggtcctggagatccagctgcagttccctatgctgtgaagacagtacaagaaataattggaaaggttcctgttttcggcatctgtatgggccaccaattgattgggcaggcgcttggtgggaagacatttaaaatgaaatttggtcatcatggtgggaatcaccctgtctgtgatctccgtagtggacgtgtagacataagtgcacagaaccataactacgcagttgacccagaatcacttccagaaggagcagaagtaactcacgtcaatctcaacgacaatagttgtgctggccttcagtacgccaagatgaagcttgtgtctctccagtaccatcctgagtcttccccaggtccgcatgattccgacacagccttcggtgagtttatagagctcatgaagagcaacagattgtga

SEQ ID NO: 95518 - protein, 446 aa, Zea mays
MAAPPATAHAASRCLSGAKSYQAAERSSSPVAISEPSTGLRQNRSRVLSVRAKVATGVQTASTVDDGAKRPWKHNDARLVLEDGSVWRAKSFGASGTQVGEVVFNTSLTGYQEILTDPSYAGQFVLMTNPHIGNTGVNPDDEESNQCFLGGLIIRNLSICTSNWRCKETLEEYLTKRNIMGIYDVDTRAITRRLREDGSLIGVLSTDQSQTDNELLEMAKKWKIVGVDLISGVTCDAPYEWLDKTDSEWKLKRDQSSETFHVVAYDFGIKHNILRRLASYGCKITVVPANWPASEVLNLKPNGVLFSNGPGDPAAVPYAVKTVQEIIGKVPVFGICMGHQLIGQALGGKTFKMKFGHHGGNHPVCDLRSGRVDISAQNHNYAVDPESLPEGAEVTHVNLNDNSCAGLQYAKMKLVSLQYHPESSPGPHDSDTAFGEFIELMKSNRL

SEQ ID NO: 95519 - DNA, 1341 bp, Zea mays
  CDS (1)..(1341)
atggcggcgcctccggccacggctcccgcgaccgcccgatgtctgtccgtcgccaagtcgtgctgggctgccgagcggagctccagctcgtttgtcctctcggctcctgcgactggcctccggcaaagtgggagccgcgtcctcagcatccgtgccaaggttgccactggcctgcagagggcctgcattgcggatgatggagcggaaaggccgtggaagctcagtgatgctcgtcttgtcctggaagatggatcagtgtggacggccaagtcttttggtgcttcaggaacacaagttggtgaagttgttttcaacacatcactgacaggctatcaggagattttgaccgatccaagttatgctggtcagtttgtcctaatgaccaatcctcatattgggaacactggcgttaatcctgatgatgaagaatcaaaccaatgttttcttggtggcttaatcataagaaatctaagcatatgtacttccaactggcgatgcaaagaaacacttgagaagtatctgattaagaggaacatcatgggaatatatgatgtggatacacgtgctataacacgaagattaagagaagatggtagtcttattggtgtcttgagtactgatcagtctctgacagacaatgagttgttagaaatggcccaaaagtggaaaattgttggagttgatttgattagtggtgtcacatgtgatgctccatatgaatggtcggacaagactgattcagaatgggagtttaagagggatccgtcaagtgaaacttttcatgtggttgcctacgactttggtatcaagcataatattttgagacgattgacatcatatggatgcaaaataacagttgttccagcaaattggcctgcttcagaggtactcaatttgaagcctaatggtgttctttttagcaatggtcctggggatccagctgcagttccctatgctgtgaagacggtacaggaaataattgggaaggttcctgtttttggcatctgtatgggccaccaattgattgggcaggctcttggtgggaagacatttaaaatgaaatttggacatcatggcgggaatcaccctgtctgtgatctccgtagtggacgtgtagacataagtgcacagaaccataactacgcagttgacccagaatcactcccagaaggagcaaaagtaactcacgtcaatctcaacgataatagttgcgctggcctccagtactccaagatgaagcttatgtctctccagtaccatcccgagtcttcccctggtccgcatgactccgacacagccttcggcgagtttatagagctcatgaagagcaacagattgtaa

SEQ ID NO: 95520 - protein, 446 aa, Zea mays
MAAPPATAPATARCLSVAKSCWAAERSSSSFVLSAPATGLRQSGSRVLSIRAKVATGLQRACIADDGAERPWKLSDARLVLEDGSVWTAKSFGASGTQVGEVVFNTSLTGYQEILTDPSYAGQFVLMTNPHIGNTGVNPDDEESNQCFLGGLIIRNLSICTSNWRCKETLEKYLIKRNIMGIYDVDTRAITRRLREDGSLIGVLSTDQSLTDNELLEMAQKWKIVGVDLISGVTCDAPYEWSDKTDSEWEFKRDPSSETFHVVAYDFGIKHNILRRLTSYGCKITVVPANWPASEVLNLKPNGVLFSNGPGDPAAVPYAVKTVQEIIGKVPVFGICMGHQLIGQALGGKTFKMKFGHHGGNHPVCDLRSGRVDISAQNHNYAVDPESLPEGAKVTHVNLNDNSCAGLQYSKMKLMSLQYHPESSPGPHDSDTAFGEFIELMKSNRL

SEQ ID NO: 95521 - DNA, 20 bp, Artificial sequence
  primer
atgtggttgattcggcggcg

SEQ ID NO: 95522 - DNA, 24 bp, Artificial sequence
  primer
ttaaccggcgacttctgccttttg

SEQ ID NO: 95523 - protein, 530 aa, Artificial sequence
  consensus sequence
  Variant (2)..(2): Xaa in position 2 is any amino acid
  Variant (4)..(4): Xaa in position 4 is any amino acid
  Variant (7)..(7): Xaa in position 7 is any amino acid
  Variant (8)..(19): Xaa in position 8 to 19 is any or no amino acid
  Variant (21)..(23): Xaa in position 21 to 23 is any amino acid
  Variant (25)..(29): Xaa in position 25 to 29 is any amino acid
  Variant (30)..(37): Xaa in position 30 to 37 is any or no amino acid
  Variant (40)..(40): Xaa in position 40 is any amino acid
  Variant (43)..(43): Xaa in position 43 is any amino acid
  Variant (45)..(46): Xaa in position 45 to 46 is any amino acid
  Variant (52)..(53): Xaa in position 52 to 53 is any amino acid
  Variant (59)..(60): Xaa in position 59 to 60 is any amino acid
  Variant (62)..(65): Xaa in position 62 to 65 is any amino acid
  Variant (67)..(67): Xaa in position 67 is any amino acid
  Variant (69)..(70): Xaa in position 69 to 70 is any amino acid
  Variant (73)..(73): Xaa in position 73 is any amino acid
  Variant (75)..(78): Xaa in position 75 to 78 is any amino acid
  Variant (79)..(95): Xaa in position 79 to 95 is any or no amino acid
  Variant (97)..(97): Xaa in position 97 is any amino acid
  Variant (99)..(104): Xaa in position 99 to 104 is any amino acid
  Variant (105)..(114): Xaa in position 105 to 114 is any or no amino acid
  Variant (116)..(123): Xaa in position 116 to 123 is any amino acid
  Variant (124)..(126): Xaa in position 124 to 126 is any or no amino acid
  Variant (128)..(129): Xaa in position 128 to 129 is any amino acid
  Variant (130)..(134): Xaa in position 130 to 134 is any or no amino acid
  Variant (136)..(138): Xaa in position 136 to 138 is any amino acid
  Variant (140)..(150): Xaa in position 140 to 150 is any amino acid
  Variant (154)..(154): Xaa in position 154 is any amino acid
  Variant (156)..(159): Xaa in position 156 to 159 is any amino acid
  Variant (161)..(162): Xaa in position 161 to 162 is any amino acid
  Variant (164)..(185): Xaa in position 164 to 185 is any amino acid
  Variant (186)..(223): Xaa in position 186 to 223 is any or no amino acid
  Variant (225)..(242): Xaa in position 225 to 242 is any amino acid
  Variant (243)..(276): Xaa in position 243 to 276 is any or no amino acid
  Variant (278)..(278): Xaa in position 278 is any amino acid
  Variant (280)..(280): Xaa in position 280 is any amino acid
  Variant (282)..(282): Xaa in position 282 is any amino acid
  Variant (283)..(283): Xaa in position 283 is any or no amino acid
  Variant (286)..(287): Xaa in position 286 to 287 is any amino acid
  Variant (289)..(291): Xaa in position 289 to 291 is any amino acid
  Variant (293)..(296): Xaa in position 293 to 296 is any amino acid
  Variant (298)..(298): Xaa in position 298 is any amino acid
  Variant (300)..(305): Xaa in position 300 to 305 is any amino acid
  Variant (306)..(313): Xaa in position 306 to 313 is any or no amino acid
  Variant (315)..(317): Xaa in position 315 to 317 is any amino acid
  Variant (318)..(318): Xaa in position 318 is any or no amino acid
  Variant (321)..(323): Xaa in position 321 to 323 is any amino acid
  Variant (331)..(347): Xaa in position 331 to 347 is any amino acid
  Variant (348)..(353): Xaa in position 348 to 353 is any or no amino acid
  Variant (355)..(355): Xaa in position 355 is any amino acid
  Variant (360)..(360): Xaa in position 360 is any amino acid
  Variant (364)..(367): Xaa in position 364 to 367 is any amino acid
  Variant (369)..(369): Xaa in position 369 is any amino acid
  Variant (371)..(372): Xaa in position 371 to 372 is any amino acid
  Variant (374)..(374): Xaa in position 374 is any amino acid
  Variant (376)..(378): Xaa in position 376 to 378 is any amino acid
  Variant (381)..(381): Xaa in position 381 is any amino acid
  Variant (383)..(383): Xaa in position 383 is any amino acid
  Variant (385)..(385): Xaa in position 385 is any amino acid
  Variant (388)..(394): Xaa in position 388 to 394 is any amino acid
  Variant (395)..(403): Xaa in position 395 to 403 is any or no amino acid
  Variant (406)..(406): Xaa in position 406 is any amino acid
  Variant (408)..(423): Xaa in position 408 to 423 is any amino acid
  Variant (424)..(434): Xaa in position 424 to 434 is any or no amino acid
  Variant (438)..(438): Xaa in position 438 is any amino acid
  Variant (440)..(453): Xaa in position 440 to 453 is any amino acid
  Variant (454)..(486): Xaa in position 454 to 486 is any or no amino acid
  Variant (488)..(488): Xaa in position 488 is any amino acid
  Variant (490)..(492): Xaa in position 490 to 492 is any amino acid
  Variant (493)..(493): Xaa in position 493 is any or no amino acid
  Variant (495)..(504): Xaa in position 495 to 504 is any amino acid
  Variant (505)..(510): Xaa in position 505 to 510 is any or no amino acid
  Variant (512)..(512): Xaa in position 512 is any amino acid
  Variant (517)..(517): Xaa in position 517 is any amino acid
  Variant (521)..(521): Xaa in position 521 is any amino acid
  Variant (523)..(526): Xaa in position 523 to 526 is any amino acid
  Variant (528)..(529): Xaa in position 528 to 529 is any amino acid
LXLXDGXXXXXXXXXXXXXGXXXGXXXXXXXXXXXXXGEXVFXTXXTGYQEXXTDPSYXXQXXXXTXPXXGNXGXXXXXXXXXXXXXXXXXXXXXDXEXXXXXXXXXXXXXXXXGXXXXXXXXXXXSXXXXXXXLXXXLXXXXXXXXXXXDTRXLXXXXRXXGXXXXXXXXXXXXXXXXXXXXXXXXXXXXXXXXXXXXXXXXXXXXXXXXXXXXXXXXXXXXVXXXXXXXXXXXXXXXXXXXXXXXXXXXXXXXXXXXXXXXXXXXXXXXXXXXXDXGXKXXILXXLXXXGXXXXVXPXXXXXXXXXXXXXXPXXXXDGXXXSNGPGDPXXXXXXXXXXXXXXXXXXXXXXXPXFGICXGHQXXXXAXGXXTXKXXXGHXGXNXPVXXXXXXXXXXXXXXXXITXQXXXXXXXXXXXXXXXXXXXXXXXXXXXNHGXAXXXXXXXXXXXXXXXXXXXXXXXXXXXXXXXXXXXXXXXXXXXXXXXLXDXXXXGXXXXXXXXXXXXXXXXQXHPEAXPGPXDXXXXFXXF

SEQ ID NO: 95524 - protein, 37 aa, Artificial sequence
  protein pattern
  Variant (2)..(2): Xaa in position 2 is any or no amino acid
  Variant (4)..(4): Xaa in position 4 is any or no amino acid
  Variant (6)..(6): Xaa in position 6 is any amino acid
  Variant (8)..(9): Xaa in position 8 to 9 is any amino acid
  Variant (10)..(10): Xaa in position 10 is Ala, Ser, Thr or Val
  Variant (13)..(13): Xaa in position 13 is any amino acid
  Variant (15)..(16): Xaa in position 15 to 16 is any amino acid
  Variant (17)..(17): Xaa in position 17 is Ser or Thr
  Variant (22)..(23): Xaa in position 22 to 23 is any amino acid
  Variant (25)..(25): Xaa in position 25 is any amino acid
  Variant (26)..(26): Xaa in position 26 is Ile, Leu, Met or Val
  Variant (27)..(28): Xaa in position 27 to 28 is any amino acid
  Variant (30)..(30): Xaa in position 30 is any amino acid
  Variant (31)..(31): Xaa in position 31 is Ala, Pro, Thr or Val
  Variant (32)..(33): Xaa in position 32 to 33 is any amino acid
  Variant (35)..(36): Xaa in position 35 to 36 is any amino acid
EXVXFXTXXXGYXEXXXDPSYXXQXXXXTXXXXGXXG

SEQ ID NO: 95525 - protein, 24 aa, Artificial sequence
  protein pattern
  Variant (2)..(4): Xaa in position 2 to 4 is any amino acid
  Variant (5)..(7): Xaa in position 5 to 7 is any or no amino acid
  Variant (11)..(11): Xaa in position 11 is any amino acid
  Variant (12)..(12): Xaa in position 12 is Ile or Leu
  Variant (13)..(13): Xaa in position 13 is Thr or Val
  Variant (14)..(15): Xaa in position 14 to 15 is any amino acid
  Variant (16)..(16): Xaa in position 16 is Ile or Leu
  Variant (18)..(19): Xaa in position 18 to 19 is any amino acid
  Variant (21)..(21): Xaa in position 21 is Ala, Ser, Thr or Val
  Variant (22)..(23): Xaa in position 22 to 23 is any amino acid
  Variant (24)..(24): Xaa in position 24 is Ala, Gly, Ser or Val
IXXXXXXDTRXXXXXXRXXGXXXX

SEQ ID NO: 95526 - protein, 11 aa, Artificial sequence
  protein pattern
  Variant (2)..(2): Xaa in position 2 is Ile, Leu or Val
  Variant (3)..(3): Xaa in position 3 is Phe, Leu, Met or Val
  Variant (4)..(4): Xaa in position 4 is Phe, Ile or Leu
  Variant (10)..(10): Xaa in position 10 is Asp or Asn
GXXXSNGPGXP

SEQ ID NO: 95527 - DNA, 312 bp, Synechocystis sp.
  CDS (1)..(312): transl_table=11
atgggtgcaatttattccgtcaatttagtcaatccagctacgggcagtgatgtcaccattgaggtggcggaggatgagttaattctagaagcggcggaaaatcagggattggatttgccctattcctgtcgggcagcttcctgtgtggcctgtgccggtcgtttgctggaggggacggttgagcatacggataaaggctccgatttcctcaagccggaggagttggcggcgggttgtgtgttgctctgtgcggcctatgccacttctgattgcaaaattcttactcaccaagaggaagcgttgtttggttaa

SEQ ID NO: 95528 - protein, 103 aa, Synechocystis sp.
MGAIYSVNLVNPATGSDVTIEVAEDELILEAAENQGLDLPYSCRAASCVACAGRLLEGTVEHTDKGSDFLKPEELAAGCVLLCAAYATSDCKILTHQEEALFG

SEQ ID NO: 95529 - DNA, 300 bp, Arabidopsis thaliana
  CDS (1)..(300)
atgtcggcggtatacaaggtcaagctcttaggacctgatggtcaagaagatgagtttgaggttcaagatgatcagtacatcttggatgcagctgaagaggcaggagttgacttgccttactcttgcagagccggtgcgtgttctacttgcgcgggtcagattgtgtccggcaacgttgaccagtcggatggttcgtttctcgaggatagccacttggagaagggttatgttttgacttgtgtggcttacccacagtctgactgtgtgatccatacccacaaggaaactgaactcttctaa

SEQ ID NO: 95530 - protein, 99 aa, Arabidopsis thaliana
MSAVYKVKLLGPDGQEDEFEVQDDQYILDAAEEAGVDLPYSCRAGACSTCAGQIVSGNVDQSDGSFLEDSHLEKGYVLTCVAYPQSDCVIHTHKETELF

SEQ ID NO: 95531 - DNA, 671 bp, Glycine max
  CDS (66)..(509)
tttttccacaagctgttattgttatctatcacaagaacaagcagcattagcaaccaagcaagagaatggcgacgacagcagccttgtgcggcactatgatgagcagctccttcctgaggagaaaagcagtggtcacaagcctgaaggcattccccaatgctaacgcagtgtttggtgtaaagggtggacgtggaggtggtgtgactgccatggctagcttcaaggtgaagctgataaccccagagggagagaaagaatttgaatgcccagatgatgtatacattcttgaccaggcagaggaggaagggcttgagcttccctactcatgcagggctggttcttgctctgtgtgtgctggcaaagttgtatctggcaaagttgacaattcagatgccaccttccttgaggatgaacaattagaagcaggatttactctcacctgtgttgcttaccccacctcagacgttgtcattgaaacccacaaggaggaagacctctctgctgcttaactttcttcctttctcaccaacatattatgcattcatgagcattcattacttccacctgtagtagcaactgaacttcattgttgtattgtaactctataataatctttccttactggttttgcacacaatggttcaataacaactctcattttccttgatact

SEQ ID NO: 95532 - protein, 147 aa, Glycine max
MATTAALCGTMMSSSFLRRKAVVTSLKAFPNANAVFGVKGGRGGGVTAMASFKVKLITPEGEKEFECPDDVYILDQAEEEGLELPYSCRAGSCSVCAGKVVSGKVDNSDATFLEDEQLEAGFTLTCVAYPTSDVVIETHKEEDLSAA

SEQ ID NO: 95533 - DNA, 743 bp, Zea mays subsp. mays
  CDS (137)..(568)
atttttcttccgcacgcatccctcgccgcctcgcgcctgcaccggagaatcggtcccattgcccgcgaacctgcgtgtgtgaggtatcgaacaccccaagatggcaactttcgcctcaccactcctctgcaacttcatggccatcgaacagaagaacgcgcctcagctgaccaacagcagaaagccgtccctgcgcctgagcttcccaacgacaaggagcatgccaacattgccgttgccgtgcttcagagcgaggccagactggcgcgtcgccgccgtctacaaggtgaagctcatcggccccgaaggacaggagagcgtgatccaagtgccagaggacagctacatcctggacgcggccgaggaggccggtatagacctgccctactcctgccgcgctggtgcgtgctccacgtgcgccggcaaggtgctggagggctccgtcgaccaggcggaccagtcgttcctggacgacgcgcaggtcggtgccgggtatgcgctcacctgcgtcgcgtacccgacgtctgactgcgtcatccagacgcacagggaggccgacctgtactaggcagcccagtcccacgcgtaaccggatcaacgactgtgcacttccatagctcccattcggattcgatcttgagttcttgacactgattcgcacttgtgcttttgtccttgcaggtagctggaactagtagtgcattctttaatcgttattgttcaagtgtaggttgctttggttt

SEQ ID NO: 95534 - protein, 143 aa, Zea mays subsp. mays
MAIEQKNAPQLTNSRKPSLRLSFPTTRSMPTLPLPCFRARPDWRVAAVYKVKLIGPEGQESVIQVPEDSYILDAAEEAGIDLPYSCRAGACSTCAGKVLEGSVDQADQSFLDDAQVGAGYALTCVAYPTSDCVIQTHREADLY

SEQ ID NO: 95535 - DNA, 770 bp, Zea mays subsp. mays
  CDS (149)..(607)
gcgcttcagcagcagcggcttccactgtagtcccaagccggcgtgaccattccaaatcttccgcacccatctctcgccgcctcgcctgcaccggagactggccctagtgcccgcgcgcctgcgaggtatcgaacacccaaagatggcaatggcaaccttcacatcatccccagttctctgcagcttcaggaccatcgaacagaagaaggcccctctgctgaacaacagcacaaaacggccgcttcacttgggcttcccaaggagcgtgccgacgtcgccgagcttgagagagaggctagacctgcgcgtcgccgctgtctacaaggtgaagctcctcggccccgaagggcaggagagcgtgctcgacgtgccagaggacagctacatcctggacgcggccgaggaggccggtctcgacctgccctactcctgccgcgccggcgcgtgctccacgtgcgccggcaagctcctggagggctccgtcgaccaggcagaccagtcgttcctcgacgaggcgcaggtcggtgccgggtacgcgctcacctgcgtcgcgtacccgacgtctgactgcgtcatccagacgcacagggaggaagacttgtactagcccgggccggtccccgggcatggatcaacccagggccggccctgagggtgtgcagggtatgccaccgctcagggcccccaatatcagtagggccccgtatgtctagataatgtccaaatacatatatgttacaggtaaatctatattctcgtttttttgttgt

SEQ ID NO: 95536 - protein, 152 aa, Zea mays subsp. mays
MATFTSSPVLCSFRTIEQKKAPLLNNSTKRPLHLGFPRSVPTSPSLRERLDLRVAAVYKVKLLGPEGQESVLDVPEDSYILDAAEEAGLDLPYSCRAGACSTCAGKLLEGSVDQADQSFLDEAQVGAGYALTCVAYPTSDCVIQTHREEDLY

SEQ ID NO: 95537 - DNA, 462 bp, Oryza sativa (japonica cultivar-group)
  CDS (1)..(462)
atggcgacgtgcacacttgcaacttcatgtgtgtccttgagcaatgctagaactcaggcctccaaggtggcggcggtcaagagcccggcatctctaagcttcttcagccaaggcatgcagtttccaagcctgaaggcctcctccaagaagcttgacgtctcggcaatggctacctacaaggttaagctcatcacaccagaagggcaagagcacgagttcgaggctccggatgacacctacatccttgatgccgccgagaccgctggagtagagcttccctactcatgccgtgctggagcatgctctacctgtgccggtaagatcgaggctggctccgtcgaccagtcggatggatcattccttgatgatgcgcagcaggaagaaggctatgtgctgacatgtgtctcctaccctaagtccgactgcgtcatccatactcacaaggaaggagacctttactaa

SEQ ID NO: 95538 - protein, 153 aa, Oryza sativa (japonica cultivar-group)
MATCTLATSCVSLSNARTQASKVAAVKSPASLSFFSQGMQFPSLKASSKKLDVSAMATYKVKLITPEGQEHEFEAPDDTYILDAAETAGVELPYSCRAGACSTCAGKIEAGSVDQSDGSFLDDAQQEEGYVLTCVSYPKSDCVIHTHKEGDLY

SEQ ID NO: 95539 - DNA, 447 bp, Oryza sativa (japonica cultivar-group)
  CDS (1)..(447)
atggcaactgcaactgctccgagattgtgctttcctaaacccggcgcggccattgctccggcgaccaagagcccttccttcattggttacgcaaagcaaacattgaacatgtcaggcctaaggatctccaacaagttcagggtgtccgcgacagcggtgcacaaggtaaagcttataggcccggacggtgtcgagcacgagtttgaagcccctgaagatacctacattctcgaggccgctgaaactgccggggtggagctgccattctcatgccgtgctggatcatgctccacatgtgcgggtaagatgtcatcgggagaagttgatcagtcggaaggatccttcctcgacgagaaccagatgggcgagggatacgttctgacatgcatttcgtaccctaaggcggattgcgtcattcacacccacaaggaggaagaactctactag

SEQ ID NO: 95540 - protein, 148 aa, Oryza sativa (japonica cultivar-group)
MATATAPRLCFPKPGAAIAPATKSPSFIGYAKQTLNMSGLRISNKFRVSATAVHKVKLIGPDGVEHEFEAPEDTYILEAAETAGVELPFSCRAGSCSTCAGKMSSGEVDQSEGSFLDENQMGEGYVLTCISYPKADCVIHTHKEEELY

SEQ ID NO: 95541 - DNA, 468 bp, Arabidopsis thaliana
  CDS (1)..(468)
atggcgactgtacgaatctcctccactagcatgaccaaggccgttcttagaagccagacaaccaacaagctcattactaacaagagctacaacttatctgttggatcaacgaaaagggtttcgagatcttttggtttgaaatgctcagcgaattctggtggtgctacgatgtcggcggtatacaaggtcaagctcttaggacctgatggtcaagaagatgagtttgaggttcaagatgatcagtacatcttggatgcagctgaagaggcaggagttgacttgccttactcttgcagagccggtgcgtgttctacttgcgcgggtcagattgtgtccggcaacgttgaccagtcggatggttcgtttctcgaggatagccacttggagaagggttatgttttgacttgtgtggcttacccacagtctgactgtgtgatccatacccacaaggaaactgaactcttctaa

SEQ ID NO: 95542 - protein, 155 aa, Arabidopsis thaliana
MATVRISSTSMTKAVLRSQTTNKLITNKSYNLSVGSTKRVSRSFGLKCSANSGGATMSAVYKVKLLGPDGQEDEFEVQDDQYILDAAEEAGVDLPYSCRAGACSTCAGQIVSGNVDQSDGSFLEDSHLEKGYVLTCVAYPQSDCVIHTHKETELF

SEQ ID NO: 95543 - DNA, 447 bp, Arabidopsis thaliana
  CDS (1)..(447)
atggatcaagtactctactcctcttacatcataaaaatccctgtaatatcacgaatatcaccatcacaagctcaacttacgaccaggctcaataacacgacttattttggcttgtcatcgtcgagaggcaattttgggaaggtgtttgcaaaagagtctcgtaaagtgaaactgattagtccggaaggtgaggagcaagagatagaaggaaacgaagattgttgcatacttgagtctgcggagaacgcgggacttgaactgccatactcgtgtaggtcagggacttgtgggacatgttgtggaaagttggtgtcagggaaagtggatcagtcactagggtcctttcttgaggaagagcagattcaaaaaggttacatcctcacgtgtatcgcacttccactagaagattgtgttgtttacactcacaaacaatccgatcttatatga

SEQ ID NO: 95544 - protein, 148 aa, Arabidopsis thaliana
MDQVLYSSYIIKIPVISRISPSQAQLTTRLNNTTYFGLSSSRGNFGKVFAKESRKVKLISPEGEEQEIEGNEDCCILESAENAGLELPYSCRSGTCGTCCGKLVSGKVDQSLGSFLEEEQIQKGYILTCIALPLEDCVVYTHKQSDLI

SEQ ID NO: 95545 - DNA, 321 bp, Synechocystis sp. PCC 6803
  CDS (1)..(321): transl_table=11
atggttaacacctacaccgccgaaatccaacaccagggtcagacctataccatctccgttcccgaggataaaacggtgctccaagcggcggatgatgaggggatacaactacctacttcctgtggcgctggggtttgcactacctgtgcggcgttaatcaccgaaggcacagcggagcaggctgacggcatgggagtttcagcggaactacaggctgagggatatgctctactttgtgtagcctatccccgctcagatttgaaaattatcaccgaaaaagaagacgaagtttatcagcggcagttcggcggccaaggttag

SEQ ID NO: 95546 - protein, 106 aa, Synechocystis sp. PCC 6803
MVNTYTAEIQHQGQTYTISVPEDKTVLQAADDEGIQLPTSCGAGVCTTCAALITEGTAEQADGMGVSAELQAEGYALLCVAYPRSDLKIITEKEDEVYQRQFGGQG

SEQ ID NO: 95547 - DNA, 315 bp, Nostoc sp. PCC 7120
  CDS (1)..(315): transl_table=11
atgtctaagacttacaccgttgagattctccaccaaggtaaaacccacactttacaggttcctgaagataaaactattttatcagttgcagatgaacaagggttagatttacctagttcttgccatgctggtgtttgtacaacttgcgctggtcaaattattaccggaactgtagatcaaagtgatggtatgggggttagcccagaactacaacaacaaggttacgcattgctttgtgtagcctatcctcgttccgatttgaaaattgaaaccgaaaaagaagatactgtttatcaaatgcaattcggtaagtaa

SEQ ID NO: 95548 - protein, 104 aa, Nostoc sp. PCC 7120
MSKTYTVEILHQGKTHTLQVPEDKTILSVADEQGLDLPSSCHAGVCTTCAGQIITGTVDQSDGMGVSPELQQQGYALLCVAYPRSDLKIETEKEDTVYQMQFGK

SEQ ID NO: 95549 - DNA, 327 bp, Thermosynechococcus elongatus BP-1
  CDS (1)..(327): transl_table=11
atgacccaaacctttcgtgttgagattctgcaccaaggacaaacctacacttttgaagccagtgccgataaacccctcctgcgatcggccaccgctgccggaattgatcttccgagttcctgcaatgccggggtatgtaccacctgtgcggcccaaattcaggagggtaccgtggatcacggagatgcaatggggctgagtcccgaactgcgggaaaaaggctatgtcctcctctgtgtggcccgcccttgctcagatttgaaattgatctctgaaaaagaggaggaggtctataacttccaatttggtcagttccagaaagcgtag

SEQ ID NO: 95550 - protein, 108 aa, Thermosynechococcus elongatus BP-1
MTQTFRVEILHQGQTYTFEASADKPLLRSATAAGIDLPSSCNAGVCTTCAAQIQEGTVDHGDAMGLSPELREKGYVLLCVARPCSDLKLISEKEEEVYNFQFGQFQKA

SEQ ID NO: 95551 - DNA, 327 bp, Thermosynechococcus elongatus BP-1
  CDS (1)..(327): transl_table=11
atgacaaagcgagatcacaacaaggtctataatgtcactttggtcaatgaagaaagaggcctaaataaaactattcgtgttcatgccgacgagtacattctcgatgctgctgaagcccagggtattcctctgccctactcctgccgtgctggcgcctgcgtcaactgcgctggccgcatcatcaaaggtactgtggaccagtcagatcactcctttttgaaacctaaggagctggatgctggctttgtgctgctgtgtgcagcctatcccacatcggattgcgtcatctcaacccacgaagaagacaatttgctgaacttagcttag

SEQ ID NO: 95552 - protein, 108 aa, Thermosynechococcus elongatus BP-1
MTKRDHNKVYNVTLVNEERGLNKTIRVHADEYILDAAEAQGIPLPYSCRAGACVNCAGRIIKGTVDQSDHSFLKPKELDAGFVLLCAAYPTSDCVISTHEEDNLLNLA

SEQ ID NO: 95553 - DNA, 300 bp, Prochlorococcus marinus subsp. marinus str. CCMP1375
  CDS (1)..(300): transl_table=11
atggcttcttataaagtcaccctcgtaagcgaaagtgagggtttgaatcaaaccattgaggtccctgatgatcagtacattctcgatgctgcagaggagcaagggattgatctcccttattcatgtagagcaggtgcttgttctacttgcgcaggaaaaataacctctgggagtgtagatcaatctgatcaaagctttttggatgatgaccagcttgaagctggatttgttttgacttgtgtcgcttatccaacttctgacgtgaccattacaactcacgccgaagaagagctttactaa

SEQ ID NO: 95554 - protein, 99 aa, Prochlorococcus marinus subsp. marinus str. CCMP1375
MASYKVTLVSESEGLNQTIEVPDDQYILDAAEEQGIDLPYSCRAGACSTCAGKITSGSVDQSDQSFLDDDQLEAGFVLTCVAYPTSDVTITTHAEEELY

SEQ ID NO: 95555 - DNA, 300 bp, Prochlorococcus marinus subsp. pastoris str. CCMP1986
  CDS (1)..(300): transl_table=11
atggcttcttacaaagttacacttatcagtgaaagtgaaggtctcaattctacgattgaagtacctgatgatcagtacattttagatgctgctgaagaacagggtgtcgatctaccatattcttgtagagcaggagcttgttctacatgtgcaggtaaaatcacatcaggaactgttgatcaatcagaccaaagttttttagatgatgatcaattagaggctggttttgtccttacttgtgttgcatatccatcttcagatgtaacaattactactcatgctgaagaagagctctattaa

SEQ ID NO: 95556 - protein, 99 aa, Prochlorococcus marinus subsp. pastoris str. CCMP1986
MASYKVTLISESEGLNSTIEVPDDQYILDAAEEQGVDLPYSCRAGACSTCAGKITSGTVDQSDQSFLDDDQLEAGFVLTCVAYPSSDVTITTHAEEELY

SEQ ID NO: 95557 - DNA, 300 bp, Prochlorococcus marinus str. MIT 9313
  CDS (1)..(300): transl_table=11
atggcttcctacaaagtcaccttgatcagcgagagcgagggcctgaacaagaccattgaggttcccgatgatcagtacatccttgatgctgctgaagagcagggcatcgacctgccctattcctgtcgtgctggggcctgctccacatgtgcaggcaagctcacaggtggttctgtggaccagtctgatcagagcttcctcgatgacgatcagcttgaagctggtttcgtgttgacctgcgttgcttatccaacctctgattgcaccatcaagacccatgctgaggaagagctctattga

SEQ ID NO: 95558 - protein, 99 aa, Prochlorococcus marinus str. MIT 9313
MASYKVTLISESEGLNKTIEVPDDQYILDAAEEQGIDLPYSCRAGACSTCAGKLTGGSVDQSDQSFLDDDQLEAGFVLTCVAYPTSDCTIKTHAEEELY

SEQ ID NO: 95559 - DNA, 366 bp, Prochlorococcus marinus str. MIT 9313
  CDS (1)..(366): transl_table=11
atgacatcccttcacaagatcacaatccaccaccgccaagcaggccgcacaattacttttgatgtgccagatggggaatatattctgcgctctttcgagtcacgtggagagcagctgcctttttcatgcagaaatggctgttgcacaacatgcgccgtaagaattttatctggcgagatggatcaaacggctggtattggcctttcaaaagaaatgcgcgacaaaggatatgggctgctttgcgtggcaagagcaactggagatctagaagttgagactcaggatgaggatgaggtctacgaaatgcagttcggcaaagatttggggagcattaaatctaaagcaggcagcccttttgatctataa

SEQ ID NO: 95560 - protein, 121 aa, Prochlorococcus marinus str. MIT 9313
MTSLHKITIHHRQAGRTITFDVPDGEYILRSFESRGEQLPFSCRNGCCTTCAVRILSGEMDQTAGIGLSKEMRDKGYGLLCVARATGDLEVETQDEDEVYEMQFGKDLGSIKSKAGSPFDL

SEQ ID NO: 95561 - DNA, 282 bp, Synechococcus sp. WH 8102
  CDS (1)..(282): transl_table=11
atggcctcctacaagatcagcatcgaaggtggttccacctttgagtgcgccgatgacgtgtacatcctcgacgccgctgaagaagccggtgtggatctgccctactcctgccgagctggagcctgctccacctgtgccggcaaggtcctgagtggttctgttgaccagaccgaccagagcttcctggacgacgatcagatcggccagggatttgccctgctctgcgtcagctatcccaccagcgactgcagcattaaggccaacgccgaggacgacctctga

SEQ ID NO: 95562 - protein, 93 aa, Synechococcus sp. WH 8102
MASYKISIEGGSTFECADDVYILDAAEEAGVDLPYSCRAGACSTCAGKVLSGSVDQTDQSFLDDDQIGQGFALLCVSYPTSDCSIKANAEDDL

SEQ ID NO: 95563 - DNA, 294 bp, Gloeobacter violaceus PCC 7421
  CDS (1)..(294): transl_table=11
atggcaacttacaaagtaaccctggtcacccccagtggcaaaaaagagatcgactgtcccagtgatgagtacatcctggatgcagccgagcgccagggcctggacctgcccttctcctgccgcgcgggcgcctgctcgacctgtgccggcaagatggtgagcgggacgatcgatcagggcgatcagtcttttctggatgacgaccagattgcagcgggttatgtactgacttgcgtcgcttacccgacctccaactgctcgatcgaaacccacaaagaagacgaactctactag

SEQ ID NO: 95564 - protein, 97 aa, Gloeobacter violaceus PCC 7421
MATYKVTLVTPSGKKEIDCPSDEYILDAAERQGLDLPFSCRAGACSTCAGKMVSGTIDQGDQSFLDDDQIAAGYVLTCVAYPTSNCSIETHKEDELY

SEQ ID NO: 95565 - DNA, 420 bp, Gibberella zeae PH-1
  CDS (1)..(420)
atgcggtcgattgatccagttggcaatgttgctggcgttgtccaccgcacagcgttgccccgaatcagcattgctatctcagacatcgctataggcctactccgcttattgatattccaccaatctctcaacatgtcctacaaagtcactataaaaacccccaacgaagattacaccttcaactgcggcagtgatgagtatatcttggatgttgcagaaagcaacggcatcaaattgccttattcctgtcgcgcgggggtttattcttcttgtgctggaaaactggtttctggaacaattcagcaagatgatcaagacttcctagattctgatcaggtagaggcgggttacgtcctactctgcatcgcttacccaactagcgattgcatcatcaaggccaatgcggaagatgaactctaa

SEQ ID NO: 95566 - protein, 139 aa, Gibberella zeae PH-1
MRSIDPVGNVAGVVHRTALPRISIAISDIAIGLLRLLIFHQSLNMSYKVTIKTPNEDYTFNCGSDEYILDVAESNGIKLPYSCRAGVYSSCAGKLVSGTIQQDDQDFLDSDQVEAGYVLLCIAYPTSDCIIKANAEDEL

SEQ ID NO: 95567 - DNA, 300 bp, Prochlorococcus marinus str. MIT 9301
  CDS (1)..(300): transl_table=11
atggcttcttacaaagttactctcatcagcgaaggtgaaggtctcaattcaactattgaggtacctgatgaccaatacatcctcgatgcggctgaagaacaaggtattgaccttccttactcctgcagagctggtgcatgttcaacatgtgctggaaaagttacttcaggtagtgttgatcagtctgatcaaagtttcttggatgacgaccaactagaagctggttttgttcttacttgtgttgcttatccaacatctgacgtaacaattacaactcatgctgaggaagaattgtactaa

SEQ ID NO: 95568 - protein, 99 aa, Prochlorococcus marinus str. MIT 9301
MASYKVTLISEGEGLNSTIEVPDDQYILDAAEEQGIDLPYSCRAGACSTCAGKVTSGSVDQSDQSFLDDDQLEAGFVLTCVAYPTSDVTITTHAEEELY

SEQ ID NO: 95569 - DNA, 300 bp, Prochlorococcus marinus str. NATL2A
  CDS (1)..(300): transl_table=11
atgacatcttttcagatcacttttattaatgaattaagtggtttaaaagaaattattgatattccagatgacaaatatatccttgatgccgcgtgtgagcaaaatattgagcttcctgcctcatgtagagaaggaacttgttcgacttgtgttgctaaactagaaaaaggcaatgttgatcaacaagatcaaagttttttggatgatgatcaaatagaaaaagggtatattttgatttgcaaggcttatccactctctgattgcataatacggacacatgctgaggatcaattgtattga

SEQ ID NO: 95570 - protein, 99 aa, Prochlorococcus marinus str. NATL2A
MTSFQITFINELSGLKEIIDIPDDKYILDAACEQNIELPASCREGTCSTCVAKLEKGNVDQQDQSFLDDDQIEKGYILICKAYPLSDCIIRTHAEDQLY

SEQ ID NO: 95571 - DNA, 315 bp, Anabaena variabilis ATCC 29413
  CDS (1)..(315): transl_table=11
atgtctaaaacatacaccgttgagattctccaccaaggcaaaacccacactttacaagttcctgaagacaaaaccattttatcagttgcagatgaacaagggctagatttacctagttcttgccatgctggtgtttgtacaacttgtgctggtcaaattattaccggaactgtagatcaaactgatggtatgggggttagcccagaactacaacaacaaggttacgcattactttgtgtagcttatcctcgttccgatttgaaaattgaaaccgaaaaagaagacactgtttatcaaaagcaattcggtaagtaa

SEQ ID NO: 95572 - protein, 104 aa, Anabaena variabilis ATCC 29413
MSKTYTVEILHQGKTHTLQVPEDKTILSVADEQGLDLPSSCHAGVCTTCAGQIITGTVDQTDGMGVSPELQQQGYALLCVAYPRSDLKIETEKEDTVYQKQFGK

SEQ ID NO: 95573 - DNA, 321 bp, Anabaena variabilis ATCC 29413
  CDS (1)..(321): transl_table=11
atgacagtttatcaagtccgacttataaatagtgcgatcgcattagattgcattatctcagtaccagacgatcaatatattctggatatagccgcagaggctggtattcgcttaccatcgggatgcaaacagggagactgttctgcttgtgttgccaaacttattagtggtgaagttgaccaaagtgagcaacaatttttgcgtcctgatgaaattcagcaaggctacgttgtcacctgcgttacttatcccttatcagattgcactttagaaactcatcaagagcaagttttgtataattcctcactttaccaaccttga

SEQ ID NO: 95574 - protein, 106 aa, Anabaena variabilis ATCC 29413
MTVYQVRLINSAIALDCIISVPDDQYILDIAAEAGIRLPSGCKQGDCSACVAKLISGEVDQSEQQFLRPDEIQQGYVVTCVTYPLSDCTLETHQEQVLYNSSLYQP

SEQ ID NO: 95575 - DNA, 306 bp, Rubrobacter xylanophilus DSM 9941
  CDS (1)..(306): transl_table=11
ttgcagtccgggacgcctgagagcggggaggcgggcttgagcgagagccacagggtgacgttcaagaagagcggggtgaccatagaggtcgccgaggacgagtacatcctggagaaggccgaggaggcggggctggacctgccctacgactgccgcagcggcacctgcaccacctgcatgcagcggtgcctggagggggaggtggaccaggatcttgcgtttgccatctccgaggaggagctcgaggagggctaccggctcatctgcatcggcagccccctctccgacgtcgtgctcgacgcctag

SEQ ID NO: 95576 - protein, 101 aa, Rubrobacter xylanophilus DSM 9941
MQSGTPESGEAGLSESHRVTFKKSGVTIEVAEDEYILEKAEEAGLDLPYDCRSGTCTTCMQRCLEGEVDQDLAFAISEEELEEGYRLICIGSPLSDVVLDA

SEQ ID NO: 95577 - DNA, 303 bp, Trichodesmium erythraeum IMS101
  CDS (1)..(303): transl_table=11
atggctacatacaaagttactctgattaatgaagaagaaggaattaaccaaacttttgattgtccagatgatgagtatattcttgatgcagcagaagaacaaggcttagatttaccctactcctgtcgtgcaggtgcttgttctagttgtactggtaaaatagagtctggaacaatagatcaagcagaccaatctttcttagatgatgaccagatgacagcaggatatatattaacttgtgtagcttatcctacttctgattgtactattcgaactcatcaagaagaaggaattgcatcatag

SEQ ID NO: 95578 - protein, 100 aa, Trichodesmium erythraeum IMS101
MATYKVTLINEEEGINQTFDCPDDEYILDAAEEQGLDLPYSCRAGACSSCTGKIESGTIDQADQSFLDDDQMTAGYILTCVAYPTSDCTIRTHQEEGIAS

SEQ ID NO: 95579 - DNA, 297 bp, Trichodesmium erythraeum IMS101
  CDS (1)..(297): transl_table=11
atgccaaattacaaagtcactttaaaaactccagatggaaatagcacaattattgaagttcctgatgatcagtatattcttgaagaagcagaagagcaaggcttagatttacccttctcctgtcgtgcaggtgcttgttctacttgtgctggtaaagtagtgtctggaaaagtagaccaatcagatcaatctttcttagatgatgaccagatggcagcaggatatgtattaacttgtgtagcttatcctacttctgattgtattattgaaactcacaaagaagaagcactttactaa

SEQ ID NO: 95580 - protein, 98 aa, Trichodesmium erythraeum IMS101
MPNYKVTLKTPDGNSTIIEVPDDQYILEEAEEQGLDLPFSCRAGACSTCAGKVVSGKVDQSDQSFLDDDQMAAGYVLTCVAYPTSDCIIETHKEEALY

SEQ ID NO: 95581 - DNA, 300 bp, Phaeodactylum tricornutum
  CDS (1)..(300): transl_table=11
atggttacttacaaagtgacattattaagtgaagaacatgatatcaatacaacaattgattgtaatgatgatgtatttgttttagatgctgctgaagagcaaggtattgaattaccttattcatgtcgcgcaggtgcatgctctacttgtgctggtaaagtaacagctggtgaaatcgatcaatcagaacaaacatttttagatgatgatcaggttgaagctggttttgtattaacttgtattgcatacccgaaatcagattgtacaatttcagtacatcaagaagatgaattatattaa

SEQ ID NO: 95582 - protein, 99 aa, Phaeodactylum tricornutum
MVTYKVTLLSEEHDINTTIDCNDDVFVLDAAEEQGIELPYSCRAGACSTCAGKVTAGEIDQSEQTFLDDDQVEAGFVLTCIAYPKSDCTISVHQEDELY

SEQ ID NO: 95583 - DNA, 342 bp, Nostoc punctiforme PCC 73102
  CDS (1)..(342): transl_table=11
atggcagtttatcaagtccgatttatcaatcctacacttggattagatcgcaccattgcagtgccagacgatcaatatattctcgatatagcagaagatgctggtatccgcctaccatctgggtgcaaacaaggcgaatgttctgtctgtattgcgaaactcattagcggtgaagttaatcaaagcgagcagaaatttctgcgcccaagtgaaatacaagctgcttatgttgttacttgtgtaacttaccccttgtctaattgcactttagaaacccatcaagaacaagtcttatataagtcagccctttactataagcctgagtctggaaaatctgattaa

SEQ ID NO: 95584 - protein, 113 aa, Nostoc punctiforme PCC 73102
MAVYQVRFINPTLGLDRTIAVPDDQYILDIAEDAGIRLPSGCKQGECSVCIAKLISGEVNQSEQKFLRPSEIQAAYVVTCVTYPLSNCTLETHQEQVLYKSALYYKPESGKSD

SEQ ID NO: 95585 - DNA, 300 bp, Nostoc punctiforme PCC 73102
  CDS (1)..(300): transl_table=11
atgccaacttataaagtgacactaattaacgaggctgaagggctgaacacaacccttgatgttgaggacgatacctatattctagacgcagctgaagaagctggtattgacctgccctactcttgccgcgctggtgcttgctctacttgtgcaggtaaactcgtatcaggtaccgtcgatcaaggcgatcaatcattcttagatgacgatcaaatagaagctggatatgtactgacctgtgttgcttacccaacttctaatgtcacgatcgaaactcacaaagaagaagaactctattaa

SEQ ID NO: 95586 - protein, 99 aa, Nostoc punctiforme PCC 73102
MPTYKVTLINEAEGLNTTLDVEDDTYILDAAEEAGIDLPYSCRAGACSTCAGKLVSGTVDQGDQSFLDDDQIEAGYVLTCVAYPTSNVTIETHKEEELY

SEQ ID NO: 95587 - DNA, 300 bp, Nostoc punctiforme PCC 73102
  CDS (1)..(300): transl_table=11
atggcaacttataaagtcacattaaagactccagatgaagaaaaaactattgaagtttctgaagatgattacatcttagagatcgctaacgaagaaaatgacatggacttgccttattcatgtaatgctggttcttgctcaacctgcgctggtaagctgatttcaggtacagttgaccaatcagatcaaaacttcttagacgacgatcaaatagacgcaggatgggttctcacctgcgttgccaagccaacttctgactgtgtaatcctaaccaatcaagaagatgagcttaacggttaa

SEQ ID NO: 95588 - protein, 99 aa, Nostoc punctiforme PCC 73102
MATYKVTLKTPDEEKTIEVSEDDYILEIANEENDMDLPYSCNAGSCSTCAGKLISGTVDQSDQNFLDDDQIDAGWVLTCVAKPTSDCVILTNQEDELNG

SEQ ID NO: 95589 - DNA, 369 bp, Crocosphaera watsonii WH 8501
  CDS (1)..(369): transl_table=11
atgagttgttatcacaccattcgcattcgtcatcgtcaagttaatcgagaatataacctagaagtgcctgatgatcgctacatccttcatagtgcagaagctcaagggcatgaactccctttttcctgccgtaatggagcttgtaccgcttgtgctgtacgtattttatcaggagaagttgaccaacccgaagcagtaggcttgtcccctgaactgagaaaaaaaggttatgctctgttatgtgttagttatgctcaatcagacttagaagtagaaacccaagacgaagatgaagtgtatgaactacaatttggacgctactttggtaagggaaaagttaaattaggattccccatagacgatgattaa

SEQ ID NO: 95590 - protein, 122 aa, Crocosphaera watsonii WH 8501
MSCYHTIRIRHRQVNREYNLEVPDDRYILHSAEAQGHELPFSCRNGACTACAVRILSGEVDQPEAVGLSPELRKKGYALLCVSYAQSDLEVETQDEDEVYELQFGRYFGKGKVKLGFPIDDD

SEQ ID NO: 95591 - DNA, 321 bp, Crocosphaera watsonii WH 8501
  CDS (1)..(321): transl_table=11
atgagtcaaactaacggttctttccaagtcacattaattaaccccaaacgcagcttaaatcaaactatcagggtttcctcagaagactatattcttgatattgcagaaatcaaaggcgttaaacatccggcttcttgtcgtgctgcctcttgttttgattgtttgggtaaacttatttctggaaaatttgaacaaacagaaaaggctgaatcctttctgagaccagacgaattagatcaaggatatgtattactttgtgcttgttctcctacatctgactgcaccattttaacccatcaagaagaagaatatttagtttaa

SEQ ID NO: 95592 - protein, 106 aa, Crocosphaera watsonii WH 8501
MSQTNGSFQVTLINPKRSLNQTIRVSSEDYILDIAEIKGVKHPASCRAASCFDCLGKLISGKFEQTEKAESFLRPDELDQGYVLLCACSPTSDCTILTHQEEEYLV

SEQ ID NO: 95593 - DNA, 300 bp, Crocosphaera watsonii WH 8501
  CDS (1)..(300): transl_table=11
atggcaacttacaaagttacattaataaacgaagcagaaggaatcaacaccaccctggaagtacctgaagatgagtacattctcgatgtggcagaagaacaaggtattgagttaccttattcttgccgtgctggtgcttgttctagctgtgctggtaaaatcactgctggtggcgtagatcagggtgatcagtctttcttagatgacgatcaaatcgaagcaggatacgttttaacctgtgttgcttatcctacttctgattgtacaatcgagactcatcaagaagaagcactgtattaa

SEQ ID NO: 95594 - protein, 99 aa, Crocosphaera watsonii WH 8501
MATYKVTLINEAEGINTTLEVPEDEYILDVAEEQGIELPYSCRAGACSSCAGKITAGGVDQGDQSFLDDDQIEAGYVLTCVAYPTSDCTIETHQEEALY

SEQ ID NO: 95595 - DNA, 300 bp, Crocosphaera watsonii WH 8501
  CDS (1)..(300): transl_table=11
atggtaacttatcaagttactctcattaatgaagcagaagggataaatgtaaccattgaagtccctgaagatgagtacatcctagatgtagcagaagatcaaggtattgacttaccttactcctgtcgtgctggtgcctgttctgcctgtgctggtaaagttacttctggtagcgtagatcaaggtgatcagtctttcttagatgatgagcaaatcgaagcaggatatattttaacctgtgttgcttatcctacttctgattgcaccatcgaaactaaccacgaagaatcattatattaa

SEQ ID NO: 95596 - protein, 99 aa, Crocosphaera watsonii WH 8501
MVTYQVTLINEAEGINVTIEVPEDEYILDVAEDQGIDLPYSCRAGACSACAGKVTSGSVDQGDQSFLDDEQIEAGYILTCVAYPTSDCTIETNHEESLY

SEQ ID NO: 95597 - DNA, 300 bp, Synechococcus sp. RS9917
  CDS (1)..(300): transl_table=11
atggcttcctacaaggtcactctgatcaatgagagcgaaggtctgaacaagaccatcgaggtgcccgatgatcagtacatcctcgacgccgctgaagagcagggaatcgatctgccctattcctgccgtgccggtgcctgctccacctgcgccggcaagatcaccgctggcaccgtggatcagtccgatcagagctttctggatgatgaccagatcgaagctggtttcgtgctgacctgcgtggcttatcccacctccgactgcaccatcaagacccacgccgaagaagagctctattga

SEQ ID NO: 95598 - protein, 99 aa, Synechococcus sp. RS9917
MASYKVTLINESEGLNKTIEVPDDQYILDAAEEQGIDLPYSCRAGACSTCAGKITAGTVDQSDQSFLDDDQIEAGFVLTCVAYPTSDCTIKTHAEEELY

SEQ ID NO: 95599 - DNA, 300 bp, Synechococcus sp. WH 5701
  CDS (1)..(300): transl_table=11
atggcttcctacaaggtcaccctcatcaacgagagcgagggactcaacaagaccatcgaggttcccgacgatcagtacatcctcgatgccgctgaggagcagggaatcgatctgccttactcctgccgtgctggagcctgctccacctgcgccggcaagctcaccaccggcaccgtcgaccagtcggaccagagcttcctcgacgacgaccagatcgaagccggtttcgtgctgacctgtgtggcttaccccacctctgactgcaccatcaagacccacgccgaagaagagctctattga

SEQ ID NO: 95600 - protein, 99 aa, Synechococcus sp. WH 5701
MASYKVTLINESEGLNKTIEVPDDQYILDAAEEQGIDLPYSCRAGACSTCAGKLTTGTVDQSDQSFLDDDQIEAGFVLTCVAYPTSDCTIKTHAEEELY

SEQ ID NO: 95601 - DNA, 315 bp, Cyanothece
  CDS (1)..(315): transl_table=11
atgaaaactttcaaacaaaagaataaagaaacaggcaaaaaagaagagattgctgaaatcgatgtaaccctagaagttcctgaagatgtttatatcttcgatgctgctgaagaagaaggtcttgatcttccctcttcctgtcgttctggggcctgttcgagttgtgtgggacgcatcgttgaaggagaagttgatcaagaagatcaaagctttctcgatgatgaacaagtggaaaaaggatgggtgttactttgtgttgcttatcctcgttctaactgcaccattaaaactcaccaggaagcttatttggcataa

SEQ ID NO: 95602 - protein, 104 aa, Cyanothece
MKTFKQKNKETGKKEEIAEIDVTLEVPEDVYIFDAAEEEGLDLPSSCRSGACSSCVGRIVEGEVDQEDQSFLDDEQVEKGWVLLCVAYPRSNCTIKTHQEAYLA

SEQ ID NO: 95603 - DNA, 474 bp, Helianthus annuus
  CDS (1)..(474)
atgtcgtcattcacacttcctacccaaaccatggtcagaacctcaccccaaaccatggtcaaaaccgcaccacaaaccattgtcagtgctttcttaaagtacccatccacccttccgacggttaagagtatctcaaaaacctttggcttaaaatccggctcttcttttaggacaactgcgatggctacatacagggttaaactcgtgacacctgatggtgaacacgaatttgatgcacctgatgattgttacattcttgactcagctgaggctgcgggaattgagctgccatactcttgcagggcgggtgcatgctcaacatgtgccggaaagctgcatactggtgctgttgaccaatctgatgggtcgtttcttgacgacaaccaaatgaaagagggttacttgttgacttgcatttcatacccgactggtgattgtgttgttcacacacacgaagaaggtgatctttactga

SEQ ID NO: 95604 - protein, 157 aa, Helianthus annuus
MSSFTLPTQTMVRTSPQTMVKTAPQTIVSAFLKYPSTLPTVKSISKTFGLKSGSSFRTTAMATYRVKLVTPDGEHEFDAPDDCYILDSAEAAGIELPYSCRAGACSTCAGKLHTGAVDQSDGSFLDDNQMKEGYLLTCISYPTGDCVVHTHEEGDLY

SEQ ID NO: 95605 - DNA, 435 bp, Nicotiana tabacum
  CDS (1)..(435)
atggccagtatttcaggtaccatggttagcacctctttcctcccaaggaaaccagtagtgactagcctgaaagccataccaaatgttgggcaagctctctttggtcttaaatctgagaggggtggtaggattacttgcatggccagttacaaagtgaagcttattacaccagagggaacagttgagtttgattgtccagatgatgtttacattcttgaccaagctgaggaagagggacatgagcttccttacagttgcagagctggttcttgctcttcttgtgctggaaaagttacaggtggaaatattgatcagtctgatggaaactttcttgatgatgaccaaatggctgatggatttgtgctaacctgtgttgcttacccacagtctgatgttactattgagacccataaggaggaggagctcactggctaa

SEQ ID NO: 95606 - protein, 144 aa, Nicotiana tabacum
MASISGTMVSTSFLPRKPVVTSLKAIPNVGQALFGLKSERGGRITCMASYKVKLITPEGTVEFDCPDDVYILDQAEEEGHELPYSCRAGSCSSCAGKVTGGNIDQSDGNFLDDDQMADGFVLTCVAYPQSDVTIETHKEEELTG

SEQ ID NO: 95607 - DNA, 423 bp, Zea mays
  CDS (1)..(423)
atggccgccaccgccctgagcatgagcatcctccgcgcgccgccgccctgcttctcgtccccactcaggctcagggtcgcggttgccaagccgctggcggcccccatgcggcgccagctgctgcgcgcgcaggccacctacaacgtgaagctgatcacgccggagggggaggtggagctgcaggtgcccgacgacgtctacatactggacttcgccgaggaggaaggcatcgacctgcccttctcctgccgcgcggggtcctgctcctcctgcgccggcaaggtcgtctccggctccgtcgaccagtccgaccagagcttcctcaacgacaaccaggtcgccgacggctgggtgctcacctgcgctgcgtaccccacctccgacgtcgtcatcgagacgcacaaggaggatgacctcctataa

SEQ ID NO: 95608 - protein, 140 aa, Zea mays
MAATALSMSILRAPPPCFSSPLRLRVAVAKPLAAPMRRQLLRAQATYNVKLITPEGEVELQVPDDVYILDFAEEEGIDLPFSCRAGSCSSCAGKVVSGSVDQSDQSFLNDNQVADGWVLTCAAYPTSDVVIETHKEDDLL

SEQ ID NO: 95609 - DNA, 345 bp, Synechococcus sp
  CDS (1)..(345): transl_table=11
atggaggaggacacaatgactactacttacaaagttcgtctgattaaaggcaaaaaaaatcaacccccagaaatggatgtcacccttgaagttccagaggatgagtatatccttagtgtcgctgaagatgaaggacttgacttaccttcttcttgtaaatctggggcctgttctagctgcgttggtagaatcgtagaaggaaccgtaaatcaagaagatcaaagctttttggatgacgaattaatcgaaaaaggatgggtcctcctatggttgcttatcccacttccgattgtaccattaaaacccaccaagaagcctatcttccttaagatagttgatagttga

SEQ ID NO: 95610 - protein, 114 aa, Synechococcus sp
MEEDTMTTTYKVRLIKGKKNQPPEMDVTLEVPEDEYILSVAEDEGLDLPSSCKSGACSSCVGRIVEGTVNQEDQSFLDDELIEKGWVLLWLLIPLPIVPLKPTKKPIFLKIVDS

SEQ ID NO: 95611 - DNA, 447 bp, Medicago truncatula
  CDS (1)..(447)
atggccaccaccacagcagccctatcaggaaccatggtgagcacctccttcatcaggaggcagccaatgaacacaagcctaacagcattccctaacgtgggtcaaactctatttggtgtgaaggccggacgtggaagtcgtatcactgccatggccacttacaaggtgaagctcattaccccagatggaactaaagaacttacctgcccggataatgagtacattcttgacgtagccgaggaacaaggcatcgatcttccttactcatgcagggctggtgcttgctcttcatgtgctgcaaaagttgtagaaggggaagtggataattcagataatagcttccttgatgatgatcaattaagtgctgggtttgttctcacatgtgttgcttaccctcgttccgaccttgttattgagacacacaaggaggaagatcttgtttcttaa

SEQ ID NO: 95612 - protein, 148 aa, Medicago truncatula
MATTTAALSGTMVSTSFIRRQPMNTSLTAFPNVGQTLFGVKAGRGSRITAMATYKVKLITPDGTKELTCPDNEYILDVAEEQGIDLPYSCRAGACSSCAAKVVEGEVDNSDNSFLDDDQLSAGFVLTCVAYPRSDLVIETHKEEDLVS

SEQ ID NO: 95613 - DNA, 453 bp, Citrus sinensis
  CDS (1)..(453)
atgacgactgtgacacttagcgccccgtgcatggttaaagctgcacccagaaatcaactatcaaggaacttaatcaagagcccaacctcacttccatctgttaagggcatctccaagacctttggcctgaaatgctctcccaatttccaagcatcaatggctgtctacaagattaagctgattggaccaatgggtgaagagcatgagtttgaggcccaggaagaccagtacatcctcgatgcagctgaggaagcaggagtcgacctgccctattcctgccgcgctggtgcttgctcgacgtgtgctgggaagttggtgtctggttcagttgaccagtcagatggttccttcctcgatgacaatcaaatggaggctggttatctgctgacttgcatttcatacccgacttcagattgcgtgattcagtctcacaaggaagaagagctttgctga

SEQ ID NO: 95614 - protein, 150 aa, Citrus sinensis
MTTVTLSAPCMVKAAPRNQLSRNLIKSPTSLPSVKGISKTFGLKCSPNFQASMAVYKIKLIGPMGEEHEFEAQEDQYILDAAEEAGVDLPYSCRAGACSTCAGKLVSGSVDQSDGSFLDDNQMEAGYLLTCISYPTSDCVIQSHKEEELC

SEQ ID NO: 95615 - DNA, 615 bp, Nicotiana tabacum
  CDS (25)..(459)
gagagcaaagaaaaaattgtaaaaatggccagtatttcaggtaccatggttagcacctctttccttccgaggaaaccagtagtgactagcctgaaagccataccaaatgttgggcaagctctctttggtcttaaatctgagaggggtggtaggattacttgcatggccagttacaaagtgaagcttattacaccagagggaacagttgagtttgattgtccagatgatgtttacattcttgaccaagctgaggaagagggacatgagcttccttacagttgcagagctggttcttgctcttcttgtgctggaaaagttacaggtggaaatgttgatcagtctgatggaaactttcttgatgatgaccaaatggctggtggatttgtgctaacctgtgttgcttacccacagtctgatgttactattgagacccataaggaggaggagctcactggctaagcccctctcattatttcaaaaaacactttaatctgtttgatgagcatttaatttcatatgtaactcttttgttatcataaaagatgcaatgttgcaacttcaagtcaatgactttgatttgcttagtaaaaaaaaaaaaaaaaaaaaaaaaaaaaa

SEQ ID NO: 95616 - protein, 144 aa, Nicotiana tabacum
MASISGTMVSTSFLPRKPVVTSLKAIPNVGQALFGLKSERGGRITCMASYKVKLITPEGTVEFDCPDDVYILDQAEEEGHELPYSCRAGSCSSCAGKVTGGNVDQSDGNFLDDDQMAGGFVLTCVAYPQSDVTIETHKEEELTG

SEQ ID NO: 95617 - DNA, 498 bp, Oryza sativa subsp
  CDS (1)..(498)
atggcaaccatgcctgctcctgtagcgacatgcttcgtccctgccacatcgggcgtcaggtgcagggcattctccacgccgatcaccaattatagcgcacggggcgtcgtcgctgatcccccgaagctgctgagtcgtccggggaacctgcagctaacgtcgggcggcgcgcggttctccggcaggttcagggcgtccgcggcggccgtgcacaaggtgaagctcatcgggccggacggcgcggagagcgagctcgaggtgcccgaggacacctacgtcctcgacgccgccgaggaggccggcctggagctgccttactcgtgccgggccggctcgtgctccacgtgcgccggcaagctggcctccggcgaggtcgaccagtcggacgggtcgttcctggccgacgagcagatcgagcaggggtacgtgctcacgtgcatctcgtaccccaagtcggactgcgtcatctacacccacaaggaagaggaggtgcactag

SEQ ID NO: 95618 - protein, 165 aa, Oryza sativa subsp
MATMPAPVATCFVPATSGVRCRAFSTPITNYSARGVVADPPKLLSRPGNLQLTSGGARFSGRFRASAAAVHKVKLIGPDGAESELEVPEDTYVLDAAEEAGLELPYSCRAGSCSTCAGKLASGEVDQSDGSFLADEQIEQGYVLTCISYPKSDCVIYTHKEEEVH

SEQ ID NO: 95619 - DNA, 453 bp, Zea mays
  CDS (1)..(453)
atggccgctgcctcagcttcgcttctccacctcgcgaccccgaccctgactcgctccactcgcctcgccgtccgcctccccagcgcccagctgtcgcgctggccatcgggggcacgcatcgccgccgcgcagccgccgcgggcgtacaaggtgacgatcgagcacggcggcgagtcgcgggtggtggaggtggaggaggacgagacgatcctgtcccgcgcgctggacgagggcctggacgtgccgcacgactgcaagctcggcgtgtgcatgacgtgcccggcgcggctggtctccgggacggtggaccagagcgacggcatgctcagcgacgacgtcgtcgcgcgggggtacgcgctgctctgcgccgcgtacccgcgctccgactgcaccatccgcgtcatccccgaggacgagctgctcaaggtccagctcgccaccgccgacgactga

SEQ ID NO: 95620 - protein, 150 aa, Zea mays
MAAASASLLHLATPTLTRSTRLAVRLPSAQLSRWPSGARIAAAQPPRAYKVTIEHGGESRVVEVEEDETILSRALDEGLDVPHDCKLGVCMTCPARLVSGTVDQSDGMLSDDVVARGYALLCAAYPRSDCTIRVIPEDELLKVQLATADD

SEQ ID NO: 95621 - DNA, 571 bp, Helianthus annuus
  CDS (17)..(445)
acttaccaccagaaccatggcagccgcaaccaccaccctcaccggcaccatggccagcacctccttcctccgcccccaacccaccacctccatgaaaccatccgtcatgttcggcctcaagtcctctaaccgcggtggagtgaccatgatggccacctacaaggtcaccctgatcacacccgaaggaaagactgagttcgactgcgctgatgatacctacattcttgaccattgtgaagatgctggtattgatttaccatactcatgcagggccggttcttgctcctcatgcacaggaaaagttatctccggcaccgttgaccagtctgaccagagttttcttgatgatgaccagattgaagctgggtgggtgctcacttgtgtggcttatccaactagtgatgttgttatcgagacccacaaggaggaggagatgactggttaactttttttttttttatagatttgtattgaagatgaattgaatgaatgcctttacattaagtcagttttcatcgaaatgttaaattttgttatgttttaataaaaaaaaaaagaaagaaaaaattcc

SEQ ID NO: 95622 - protein, 142 aa, Helianthus annuus
MAAATTTLTGTMASTSFLRPQPTTSMKPSVMFGLKSSNRGGVTMMATYKVTLITPEGKTEFDCADDTYILDHCEDAGIDLPYSCRAGSCSSCTGKVISGTVDQSDQSFLDDDQIEAGWVLTCVAYPTSDVVIETHKEEEMTG

SEQ ID NO: 95623 - DNA, 465 bp, Arabidopsis thaliana
  CDS (1)..(465)
atggcgactcttcctctcccgactcaaacttctacaatctctccccctaaaccttatctctccaattccttctccttccaagtccgtaacacagcactctcaacagcaacaaaccgccggaactttctcaccaccggaaggatcgtagctcgggcttataaagtggtggtggagcacgacggaaagacgactgaattggaagttgaaccagacgagacgattctatctaaggctcttgactctggccttgacgttccctacgactgcaatctcggtgtttgtatgacttgtccggcgaaactcgtgaccggaacggtggatcaaagtggtgggatgctaagtgatgatgtggttgaacgtggctacacgcttctatgtgcttcgtatccaacttctgattgtcacattaagatgatccctgaggaagaactcttgtctctccagctcgccactgccaacgactaa

SEQ ID NO: 95624 - protein, 154 aa, Arabidopsis thaliana
MATLPLPTQTSTISPPKPYLSNSFSFQVRNTALSTATNRRNFLTTGRIVARAYKVVVEHDGKTTELEVEPDETILSKALDSGLDVPYDCNLGVCMTCPAKLVTGTVDQSGGMLSDDVVERGYTLLCASYPTSDCHIKMIPEEELLSLQLATAND

SEQ ID NO: 95625 - DNA, 456 bp, Triticum aestivum
  CDS (1)..(456)
atgtcaactgccactgctccaggagtgtcctttgctaaatccggggctggttcccgggccgttgctccggcgatcaggagcgcttccttcatcggttacgccaagcaaccaccaaacttgtcttgcctaaggatgtcaaacaagttcagggtgtctgctgcggccgtgcacaaggtgaagctcataagcccggacggtgaagagcatgagtttgaggcccctgaagacacctacattcttgaggcagctgaaaatgccggagtggagctgccattctcctgccgcgccggatcgtgctccacatgcgcgggcaagatgactaccggggaggtcgatcagtcggagggctccttccttgatgagaaccagatgggcgaggggtaccttctgacctgcatctcataccccaaggcagattgcgtcattcaaacccaccaagaggaggaactctactaa

SEQ ID NO: 95626 - protein, 151 aa, Triticum aestivum
MSTATAPGVSFAKSGAGSRAVAPAIRSASFIGYAKQPPNLSCLRMSNKFRVSAAAVHKVKLISPDGEEHEFEAPEDTYILEAAENAGVELPFSCRAGSCSTCAGKMTTGEVDQSEGSFLDENQMGEGYLLTCISYPKADCVIQTHQEEELY

SEQ ID NO: 95627 - DNA, 435 bp, Solanum tuberosum
  CDS (1)..(435)
atggctagtatttctggtaccatgattagcacttctttcctgccaagaaagccagttgtgactagcctcaaagccatatcaaatgttggtgaagctctttttggtcttaaatctggtagaaatgggaggattacttgcatggccagttacaaagtgaagcttattacaccagatggacctattgaatttgaatgcccagatgatgtctacattcttgaccaagctgaggaagaaggacatgatcttccttactcatgcagggctggttcttgctcatcttgtgctggaaaagttactgctggaactgttgatcagtctgatggaaagttccttgatgatgaccaagaagctgcaggatttgtgctcacttgtgttgcttacccaaagtgtgatgttaccattgagactcacaaggaggaggagcttactgcttaa

SEQ ID NO: 95628 - protein, 144 aa, Solanum tuberosum
MASISGTMISTSFLPRKPVVTSLKAISNVGEALFGLKSGRNGRITCMASYKVKLITPDGPIEFECPDDVYILDQAEEEGHDLPYSCRAGSCSSCAGKVTAGTVDQSDGKFLDDDQEAAGFVLTCVAYPKCDVTIETHKEEELTA

SEQ ID NO: 95629 - DNA, 315 bp, Anabaena variabilis
  CDS (16)..(315): transl_table=11
gagaggattacggaaatggcaacttttaaagttacattgatcaacgaagcagaaggaaccagcaacacaattgacgttcctgatgatgagtatattttagacgctgccgaagaacagggttatgacctacccttttcctgtcgtgcaggtgcttgctccacctgcgccggtaaactagtatccggtactgttgaccagtctgaccaatcattcttggatgacgatcaaatcgaagctggatatgtattgacctgtgttgcttatccaacctctgatgtaaccatccaaacccacaaagaagaagacctctactaa

SEQ ID NO: 95630 - protein, 99 aa, Anabaena variabilis
MATFKVTLINEAEGTSNTIDVPDDEYILDAAEEQGYDLPFSCRAGACSTCAGKLVSGTVDQSDQSFLDDDQIEAGYVLTCVAYPTSDVTIQTHKEEDLY

SEQ ID NO: 95631 - DNA, 447 bp, Arabidopsis thaliana
  CDS (1)..(447)
atggcttccactgctctctcaagcgccatcgtcggaacttcattcatccgtcgttccccagctccaatcagtctccgttcccttccatcagccaacacacaatccctcttcggtctcaaatcaggcaccgctcgtggtggacgtgtcacagccatggctacatacaaggtcaagttcatcacaccagaaggtgagctagaggttgagtgtgacgacgacgtctacgttcttgatgctgctgaggaagctggaatcgatttgccttactcttgccgtgctggttcttgttcgagctgtgctggtaaagttgtgtctggatctgttgatcagtctgaccagagtttccttgatgatgaacagattggtgaagggtttgttctcacttgtgctgcttaccctacctctgatgttaccattgaaacccacaaagaagaagacattgtttaa

SEQ ID NO: 95632 - protein, 148 aa, Arabidopsis thaliana
MASTALSSAIVGTSFIRRSPAPISLRSLPSANTQSLFGLKSGTARGGRVTAMATYKVKFITPEGELEVECDDDVYVLDAAEEAGIDLPYSCRAGSCSSCAGKVVSGSVDQSDQSFLDDEQIGEGFVLTCAAYPTSDVTIETHKEEDIV

SEQ ID NO: 95633 - DNA, 682 bp, Zea mays
  CDS (39)..(491)
ccggccgccacaccaccccgaccggaccctccacaacaatggccaccgtcctgggcagcccccgcgcgccggccttcttcttctcgtcgtcctccctccgcgccgcgccggcgcctaccgccgtggcgctgcctgcggccaaggtgggcatcatgggccgtagcgccagcagcaggcgcaggctgcgcgcgcaggccacctacaacgtgaagctgatcacgccagagggggaggtggagctgcaggtgcccgacgacgtgtacatcctggaccaggccgaggaggacggcatcgacctgccctactcctgccgcgcggggtcctgctcctcgtgcgccggcaaggtcgtctccggctccgtggaccagtccgaccagagctacctcgacgacggccagatcgccgacggctgggtgctcacctgccacgcctaccccacctctgacgtcgtcatcgagacgcacaaggaggaggagctcaccggcgcataatcattcatgcccatctatgtctatctctatctctgtgggtcgttgtgtgtaatttgagtacgcgcgtacacgtactgtactgcttttgtttcatttgagagcactgttcatgtaagcgtggagttgccctgccatcgtctctctctctctccatctctactatttccaatgttgagttacgttatttgtcc

SEQ ID NO: 95634 - protein, 150 aa, Zea mays
MATVLGSPRAPAFFFSSSSLRAAPAPTAVALPAAKVGIMGRSASSRRRLRAQATYNVKLITPEGEVELQVPDDVYILDQAEEDGIDLPYSCRAGSCSSCAGKVVSGSVDQSDQSYLDDGQIADGWVLTCHAYPTSDVVIETHKEEELTGA

SEQ ID NO: 95635 - DNA, 447 bp, Mesembryanthemum crystallinum
  CDS (1)..(447)
atggcagcaacaacagcagcactctcaggcgccaccatgagcaccgcctttgccccaaagacgccacccatgacagcggctctccccaccaacgtgggccgggccttgttcgggctcaagtcatctgctagcagaggaagagtcacagcaatggcagcatacaaagtcaccctagtgacaccagagggcaagcaggagctggagtgtcccgatgatgtctacatcctcgacgccgccgaggaggccggcattgatctgccatactcgtgtcgtgccgggtcgtgttcgtcttgcgccgggaaggtgacatccgggtcagtgaaccaggatgatgggagcttccttgatgatgatcagattaaggaaggttgggttttgacctgtgttgcttaccctactggggatgttactattgagacccacaaggaagaggagctcactgcttaa

SEQ ID NO: 95636 - protein, 148 aa, Mesembryanthemum crystallinum
MAATTAALSGATMSTAFAPKTPPMTAALPTNVGRALFGLKSSASRGRVTAMAAYKVTLVTPEGKQELECPDDVYILDAAEEAGIDLPYSCRAGSCSSCAGKVTSGSVNQDDGSFLDDDQIKEGWVLTCVAYPTGDVTIETHKEEELTA

SEQ ID NO: 95637 - DNA, 450 bp, Pisum sativum
  CDS (1)..(450)
atggcaaccacaccagctttgtatggaactgctgtcagcacttccttcctcaggactcagccaatgccaatgtcagtcaccaccacaaaagcattttccaatggctttctcggtttgaaaaccagtctcaaacgtggagatcttgcagttgctatggcttcttacaaagtgaaactagttacaccagatggaactcaagagtttgaatgtccaagtgatgtttacattcttgaccatgctgaagaagttggaattgatcttccttactcatgcagagctggctcttgttcttcatgtgctggtaaagttgttggcggtgaagttgatcaatctgatggttctttccttgatgatgaacagattgaagctggttttgttcttacttgtgttgcttatcctacctctgatgttgttattgagactcacaaggaagaagatctcactgcttaa

SEQ ID NO: 95638 - protein, 149 aa, Pisum sativum
MATTPALYGTAVSTSFLRTQPMPMSVTTTKAFSNGFLGLKTSLKRGDLAVAMASYKVKLVTPDGTQEFECPSDVYILDHAEEVGIDLPYSCRAGSCSSCAGKVVGGEVDQSDGSFLDDEQIEAGFVLTCVAYPTSDVVIETHKEEDLTA

SEQ ID NO: 95639 - DNA, 300 bp, Plectonema boryanum
  CDS (1)..(300): transl_table=11
atgcctagttttaaggtcacattaatcaacgaaactgaagggctgaacaccacgatcgaagtacctgatgatgagtacatcttagatgcggctgaagagcaaggcattgacttgccttactcctgccgtgcaggtgcttgctcaacctgtgcaggtaagatcactgctggaactgttgaccaatctgatcagtcgttcttggatgatgatcaaattcaagcaggttatgtgttgacctgtgtggcttaccccacatcggactgcacgatcttgactcaccaagaagaagatctctactag

SEQ ID NO: 95640 - protein, 99 aa, Plectonema boryanum
MPSFKVTLINETEGLNTTIEVPDDEYILDAAEEQGIDLPYSCRAGACSTCAGKITAGTVDQSDQSFLDDDQIQAGYVLTCVAYPTSDCTILTHQEEDLY

SEQ ID NO: 95641 - DNA, 435 bp, Solanum lycopersicum
  CDS (1)..(435)
atggctagtatttctggtacaatgattagcacttctttccttccaagaaagccagctgtgactagcctcaaagccatatcaaatgttggtgaagctttgtttggtcttaaatctggtagaaatgggaggattacttgcatggccagttacaaagtgaagcttattacaccagaaggacctattgaatttgaatgcccagatgatgtttacattcttgaccaagctgaggaagaaggacatgaccttccttactcatgcagggctggttcttgctcatcttgtgctggaaaagttactgctggaagtgttgatcagtctgatggaaacttccttgatgaggaccaagaagctgctggatttgtgcttacttgtgttgcttacccaaagggtgatgttaccattgagactcacaaggaggaggagcttactgcttaa

SEQ ID NO: 95642 - protein, 144 aa, Solanum lycopersicum
MASISGTMISTSFLPRKPAVTSLKAISNVGEALFGLKSGRNGRITCMASYKVKLITPEGPIEFECPDDVYILDQAEEEGHDLPYSCRAGSCSSCAGKVTAGSVDQSDGNFLDEDQEAAGFVLTCVAYPKGDVTIETHKEEELTA

SEQ ID NO: 95643 - DNA, 444 bp, Spinacia oleracea
  CDS (1)..(444)
atggcagcaaccaccacaacaatgatgggcatggccaccacctttgtcccaaaaccccaagcaccaccaatgatggcggcgcttccatccaacaccggccgctctttgttcggactcaagaccggtagccgtggcggaaggatgacaatggctgcctacaaggtaaccttggtaacacccaccggtaacgtagagtttcaatgcccagacgatgtttacatcttggatgctgctgaagaagaaggcattgacttgccttactcatgcagagctgggtcgtgctcttcatgcgccggaaagcttaagacaggtagtcttaaccaagatgatcagagttttttggatgacgatcagatcgatgaaggatgggttcttacctgtgctgcttaccctgttagtgatgttactattgagacccacaaggaagaggagcttactgcctaa

SEQ ID NO: 95644 - protein, 147 aa, Spinacia oleracea
MAATTTTMMGMATTFVPKPQAPPMMAALPSNTGRSLFGLKTGSRGGRMTMAAYKVTLVTPTGNVEFQCPDDVYILDAAEEEGIDLPYSCRAGSCSSCAGKLKTGSLNQDDQSFLDDDQIDEGWVLTCAAYPVSDVTIETHKEEELTA

SEQ ID NO: 95645 - DNA, 447 bp, Arabidopsis thaliana
  CDS (1)..(447)
atggcttccactgctctctccagcgcaatcgtaagcacctctttcctccgccgtcaacagacaccaatcagcctcagatccctcccgtttgccaacacacaatctctcttcggcctcaaatcttccaccgctcgcggcggccgcgtcacggccatggctacctacaaggtcaagttcatcacacctgagggagaacaagaggtcgaatgcgaagaagatgtctacgtcctcgacgctgctgaggaagccggactcgacttgccctactcatgccgtgccggttcttgctcaagttgcgccgggaaagtcgtctctggttctattgaccagtcggaccagagcttcttagacgatgaacagatgagtgagggctatgtcttgacctgtgtggcttatccgacttctgatgtcgtcatcgaaacccacaaagaagaagccattatgtaa

SEQ ID NO: 95646 - protein, 148 aa, Arabidopsis thaliana
MASTALSSAIVSTSFLRRQQTPISLRSLPFANTQSLFGLKSSTARGGRVTAMATYKVKFITPEGEQEVECEEDVYVLDAAEEAGLDLPYSCRAGSCSSCAGKVVSGSIDQSDQSFLDDEQMSEGYVLTCVAYPTSDVVIETHKEEAIM

SEQ ID NO: 95647 - DNA, 300 bp, Plectonema boryanum
  CDS (1)..(300): transl_table=11
atggctacttaccaagttcgactgatcaacaaaaagcgcaacctcgacatcacacttcctgtcgatgaagatacgacagttttagaagctgcggaagaggcagaactcgacttgccgttctcttgccattctggcgcgtgctcaagctgtgtgggtaaagttgtcgaaggagaaattaaccaagacgatcaaaccttcctcgatgaggaacaagttgctaaagggtttgtcttgctctgtgtgacttatcctcgcaccgattgtacgattcgcactcatcaagaagcttacctagtttag

SEQ ID NO: 95648 - protein, 99 aa, Plectonema boryanum
MATYQVRLINKKRNLDITLPVDEDTTVLEAAEEAELDLPFSCHSGACSSCVGKVVEGEINQDDQTFLDEEQVAKGFVLLCVTYPRTDCTIRTHQEAYLV

SEQ ID NO: 95649 - DNA, 318 bp, Synechococcus sp
  CDS (1)..(318): transl_table=11
atggctacctatcaagtcgaagtcatctatcagggtcagtcccaaaccttcacggctgactcagatcaaagtgttttggactcagcgcaagctgcgggcgttgatctgccggcctcttgcttaactggagtctgtacaacctgtgccgcgcggattctcagcggtgaagtggatcagccagatgccatgggggtagggcccgagcctgctaagcagggctacaccttactctgtgtggcctatccgcgatcggacctgaagatcgagactcataaggaagacgaactctacgccctgcaatttggtcagcccggctga

SEQ ID NO: 95650 - protein, 105 aa, Synechococcus sp
MATYQVEVIYQGQSQTFTADSDQSVLDSAQAAGVDLPASCLTGVCTTCAARILSGEVDQPDAMGVGPEPAKQGYTLLCVAYPRSDLKIETHKEDELYALQFGQPG

SEQ ID NO: 95651 - DNA, 459 bp, Zea mays
  CDS (1)..(459)
atgtcgaccagcacattcgctacttcctgcacgctgttgggcaatgttagaacaacgcaggcctcccagacagcggtgaagagcccttcgtctctaagcttcttcagccaagttacgaaggttccaagcctgaagacctccaagaaactggatgtctccgccatggctgtatacaaggtgaagcttgtcgggcctgaaggtgaagagcacgagtttgatgctccagacgacgcctacatccttgacgctgccgagactgccggtgtggagttgccatactcgtgccgtgctggggcttgctccacctgtgccggcaaaatcgagtctggttcggttgaccagtcggatgggtccttccttgatgacgggcagcaggaggaaggttatgtgctgacatgcgtctcctacccaaagtccgactgcgtcatccacacccacaaggaaggcgacctgtactag

SEQ ID NO: 95652 - protein, 152 aa, Zea mays
MSTSTFATSCTLLGNVRTTQASQTAVKSPSSLSFFSQVTKVPSLKTSKKLDVSAMAVYKVKLVGPEGEEHEFDAPDDAYILDAAETAGVELPYSCRAGACSTCAGKIESGSVDQSDGSFLDDGQQEEGYVLTCVSYPKSDCVIHTHKEGDLY

SEQ ID NO: 95653 - DNA, 408 bp, Zea mays
  CDS (1)..(408)
atggccaccgtcctgagcagcccccgcgcgccggccttctccttctccctccgcgccgcgccagccactaccgtggccatgacccgtggcgccagcagcaggctgcgcgcgcaggccacctacaacgtgaagctcatcacgccggagggggaggtggagctgcaggtgcccgacgacgtctacatcctggactacgccgaggaggaaggcatcgacctgccctactcctgccgcgcggggtcctgctcctcctgcgccggcaaggtcgtctccggctccctcgaccagtccgaccagagcttcctcgacgacagccaggtcgccgacggctgggtgctcacctgcgttgcgtaccccacctccgacgtcgtcatcgagacacacaaggaggacgaccttatctcctaa

SEQ ID NO: 95654 - protein, 135 aa, Zea mays
MATVLSSPRAPAFSFSLRAAPATTVAMTRGASSRLRAQATYNVKLITPEGEVELQVPDDVYILDYAEEEGIDLPYSCRAGSCSSCAGKVVSGSLDQSDQSFLDDSQVADGWVLTCVAYPTSDVVIETHKEDDLIS

SEQ ID NO: 95655 - DNA, 468 bp, Zea mays
  CDS (1)..(468)
atgtcgactgccaccgccccaagattgcccgctcccagatccggggcaagctatcactatcagacgaccgcggctccggcggccaacaccctctccttcgccggccacgcgaggcaggcggcccgcgcgtccgggccacggctgtccagcaggttcgtggcgtccgcggcggccgtgctgcacaaggtgaagctggtcggcccggacgggacggagcacgagttcgaggcccccgacgacacctacatcctcgaggcggccgagaccgccggggtggagctgcccttctcctgccgcgccgggtcctgctccacctgcgccgggaggatgtcggccggcgaggtcgaccagtcggaggggtccttcctcgacgacggccagatggccgaggggtacctcctcacctgcatctcctaccccaaggcagactgcgtcatccacacccacaaggaggaggacctgtactag

SEQ ID NO: 95656 - protein, 155 aa, Zea mays
MSTATAPRLPAPRSGASYHYQTTAAPAANTLSFAGHARQAARASGPRLSSRFVASAAAVLHKVKLVGPDGTEHEFEAPDDTYILEAAETAGVELPFSCRAGSCSTCAGRMSAGEVDQSEGSFLDDGQMAEGYLLTCISYPKADCVIHTHKEEDLY

SEQ ID NO: 95657 - DNA, 300 bp, Anabaena sp
  CDS (1)..(300): transl_table=11
atggctagctaccaagttagattgatcaacaagaaacaagacatcgatactaccatcgagattgatgaagaaaccacaattttagatggcgcagaagaaaatggtattgaattacctttctcttgccattctggttcttgttctagctgtgtaggcaaagttgttgaaggtgaagttgaccaatctgatcaaatcttcttagatgatgaacagatgggtaaaggcttcgctctactttgtgttacttaccctcgttccaactgcacaattaagacccaccaagaaccgtaccttgcttaa

SEQ ID NO: 95658 - protein, 99 aa, Anabaena sp
MASYQVRLINKKQDIDTTIEIDEETTILDGAEENGIELPFSCHSGSCSSCVGKVVEGEVDQSDQIFLDDEQMGKGFALLCVTYPRSNCTIKTHQEPYLA

SEQ ID NO: 95659 - DNA, 300 bp, Fremyella diplosiphon
  CDS (1)..(300): transl_table=11
atggctacctaccaagttagattgatcaacaaaaaagaagatctcgacagcacaattgagattgatgaagatacaaccatcctcgaaggagcagcagaaaacggtattgaactacccttctcttgccactctggatcttgctctagctgtgtaggtaaggttgtagaaggtgaagttgatcaatctgatcaaatcttcttagatgacgagcaaatgtctaagggatttgctttactatgtgttacctatccccgttctaactgcacaatcaagactcaccaagaaccatatcttgtataa

SEQ ID NO: 95660 - protein, 99 aa, Fremyella diplosiphon
MATYQVRLINKKEDLDSTIEIDEDTTILEGAAENGIELPFSCHSGSCSSCVGKVVEGEVDQSDQIFLDDEQMSKGFALLCVTYPRSNCTIKTHQEPYLV

SEQ ID NO: 95661 - DNA, 300 bp, Anabaena variabilis
  CDS (1)..(300): transl_table=11
atgaccacttatcaagtgagattgattaataaaaagagagcgatcgacattactattcctgttgacgaaaataccacaattctagatgccgcagaacaacaagacatagagttacccttttcctgtcaatctgggtcttgctctagttgcgttgctaaagtggttgagggtgaagttgatcagtccgaacaagtatttctcgatgaagagcaaatggctaaaggatttattgtcctgtgtgtctcctatccccgttctgactgcacaattcgcactcatcaagaaccctatttagtttga

SEQ ID NO: 95662 - protein, 99 aa, Anabaena variabilis
MTTYQVRLINKKRAIDITIPVDENTTILDAAEQQDIELPFSCQSGSCSSCVAKVVEGEVDQSEQVFLDEEQMAKGFIVLCVSYPRSDCTIRTHQEPYLV

SEQ ID NO: 95663 - DNA, 435 bp, Capsicum annuum
  CDS (1)..(435)
atggctagtgtctcagctaccatgattagtacctccttcatgccaagaaaaccagctgtgacaagccttaaacccatcccaaacgttggggaagcactgtttgggcttaaatcagcaaatggtggcaaagtcacttgcatggcttcatacaaagtgaaacttatcacacctgacggaccaatagaatttgattgcccagataatgtgtacattcttgatcaagctgaggaagcaggacatgatcttccttattcgtgcagggcaggttcttgctcatcttgtgctggtaaaattgctggtggagctgttgatcaaactgatggcaactttcttgatgatgaccaattagaggagggatgggtgctaacttgtgttgcttatccacagtctgatgttactattgagactcacaaagaggcagaactcgtgggctaa

SEQ ID NO: 95664 - protein, 144 aa, Capsicum annuum
MASVSATMISTSFMPRKPAVTSLKPIPNVGEALFGLKSANGGKVTCMASYKVKLITPDGPIEFDCPDNVYILDQAEEAGHDLPYSCRAGSCSSCAGKIAGGAVDQTDGNFLDDDQLEEGWVLTCVAYPQSDVTIETHKEAELVG

SEQ ID NO: 95665 - DNA, 421 bp, Chlamydomonas reinhardtii
  CDS (2)..(382)
aatggccatggctatgcgctccaccttcgccgcccgcgttggcgctaagcccgctgtccgcggtgctcgccccgccagccgcatgagctgcatggcctacaaggtcaccctgaagaccccttcgggcgacaagaccattgagtgccccgctgacacctacatcctggacgctgctgaggaggccggcctggacctgccctactcttgccgcgctggtgcttgctccagctgcgccggcaaggtcgctgccggcaccgtcgaccagtcggaccagtccttcctggacgatgcccagatgggcaacggcttcgtgctgacctgcgtggcctaccccacctcggactgcaccatccagacccaccaggaggaggccctgtactaagcgctttcgccatctgcgggggtcgcaggctagaactgg

SEQ ID NO: 95666 - protein, 126 aa, Chlamydomonas reinhardtii
MAMAMRSTFAARVGAKPAVRGARPASRMSCMAYKVTLKTPSGDKTIECPADTYILDAAEEAGLDLPYSCRAGACSSCAGKVAAGTVDQSDQSFLDDAQMGNGFVLTCVAYPTSDCTIQTHQEEALY

SEQ ID NO: 95667 - DNA, 438 bp, Physcomitrella patens
  CDS (1)..(438)
  misc_feature (196)..(196): n is a, g, c or t
  misc_feature (220)..(220): n is a, g, c or t
  misc_feature (412)..(412): n is a, g, c or t
atggccgccgcagctatgaccagcattgtgcctgtggcatccattgcccccgtctccaaggtcgccaacgtgcgcccctcgtcggtgtccgtggcgaaagctttcggtttgaaaagcaggagcatgggccgccttacctgcatggccacctacaaggtcaccttcctggacggggagactggagcggaaaatgtcntcgaatgctctgacgaggagtacntgctggatgccgctgaaagggccggaatggacctgccttactcctgccgtgccggagcttgctcctcttgcgccggtataatcaaggccggagaggttgaccagagtgaccagagttttttggatgactctcagattgatgatggtttcgtgctgacctgcgtggcttacccagccagcgactgcatcatcntcacccaccaggaggagaacatgtag

SEQ ID NO: 95668 - protein, 145 aa, Physcomitrella patens
  misc_feature (66)..(66): The Xaa at location 66 stands for Ile, Leu, Phe, or Val.
  misc_feature (74)..(74): The Xaa at location 74 stands for Leu, Met, or Val.
  misc_feature (138)..(138): The Xaa at location 138 stands for Ile, Leu, Phe, or Val.
MAAAAMTSIVPVASIAPVSKVANVRPSSVSVAKAFGLKSRSMGRLTCMATYKVTFLDGETGAENVXECSDEEYXLDAAERAGMDLPYSCRAGACSSCAGIIKAGEVDQSDQSFLDDSQIDDGFVLTCVAYPASDCIIXTHQEENM

SEQ ID NO: 95669 - DNA, 297 bp, Synechococcus elongatus
  CDS (1)..(297): transl_table=11
atggcaacctacaaagtaacgctagtgcgtcctgatggaagcgaaacaacaattgacgtgcccgaagatgagtacattctggatgtggccgaagagcaaggcctagacttgcccttctcctgccgtgctggtgcttgctccacctgtgccggtaagctcctggaaggagaagtggatcagtcggatcagtccttcttggatgatgaccaaattgagaagggctttgtgcttacctgtgtagcctatccccgttctgactgcaaaatcctcaccaaccaagaggaagagctttactaa

SEQ ID NO: 95670 - protein, 98 aa, Synechococcus elongatus [sequence omitted]

SEQ ID NO: 95671 - DNA, 294 bp, Synechocystis sp
  CDS (1)..(294): transl_table=11
atggcatcctataccgttaaattgatcacccccgatggtgaaagttccatcgaatgctctgacgatacctatatcctcgatgctgcggaagaagctggcctagacctgccctattcctgccgtgctggggcttgctccacctgtgccggtaagatcaccgctggtagtgttgaccaatccgatcagtctttcttggatgatgaccaaattgaagctggttatgttttgacctgtgtagcttatcccacctccgattgcaccattgaaacccacaaagaagaagacctctactaa

SEQ ID NO: 95672 - protein, 97 aa, Synechocystis sp
MASYTVKLITPDGESSIECSDDTYILDAAEEAGLDLPYSCRAGACSTCAGKITAGSVDQSDQSFLDDDQIEAGYVLTCVAYPTSDCTIETHKEEDLY

SEQ ID NO: 95673 - DNA, 432 bp, Triticum aestivum
  CDS (1)..(432)
atggccgccgcactgagcctccgcgcgcccttctccctgcgcgccgtggcgccaccggcgccccgcgtggccctcgcgcccgcggccctcagcctcgccgccgccaagcaggtgcggggagccaggctccgcgcccaggcgacgtacaaggtgaagctggtgacgcccgagggcgaggtggagctggaggtccccgatgacgtctacatcctcgaccaggccgaggaggaggggatcgacctgccctactcctgccgcgccggctcctgctcctcctgcgccggcaagttggtgtccggcgagatcgaccagtccgaccagagcttcctcgacgacgaccagatggaggcagggtgggtgctcacctgccacgcctaccccaagtccgacatcgtcatcgagacccacaaggaggaggagctcaccgcataa

SEQ ID NO: 95674 - protein, 143 aa, Triticum aestivum
MAAALSLRAPFSLRAVAPPAPRVALAPAALSLAAAKQVRGARLRAQATYKVKLVTPEGEVELEVPDDVYILDQAEEEGIDLPYSCRAGSCSSCAGKLVSGEIDQSDQSFLDDDQMEAGWVLTCHAYPKSDIVIETHKEEELTA

SEQ ID NO: 95675 - DNA, 444 bp, Oryza sativa
  CDS (1)..(444)
atggctgccgccgccgcttcgctgctccacctcgccacctccgcctgctccccgccgcgcgtcaggctcgtcggccccaccaccggccggagatcgccgctgcgcgcggctccggcgccgccgccgccgcgggcgtacaaggtgacgatcgagcacggcggcgagtcgcgggtggtggaggtggaggagggcgagaccatcctgtcgcgggcgctcgacgagggcatcgacgtgccgcacgactgcaagctcggcgtgtgcatgacgtgcccggcgcgcctcgtcgccggcgaggtggaccagagcgacggcatgctcagcgacgacgtcgtggcgcagggctacgcgctgctctgcgcctcctacccgcgctccgactgcaccatccgcgtcatccccgaggacgagctgctcaaggtccagctcgccaccgccgacgactga

SEQ ID NO: 95676 - protein, 147 aa, Oryza sativa
MAAAAASLLHLATSACSPPRVRLVGPTTGRRSPLRAAPAPPPPRAYKVTIEHGGESRVVEVEEGETILSRALDEGIDVPHDCKLGVCMTCPARLVAGEVDQSDGMLSDDVVAQGYALLCASYPRSDCTIRVIPEDELLKVQLATADD

SEQ ID NO: 95677 - DNA, 459 bp, Oryza sativa
  CDS (1)..(459)
atggcaacaactaccgtcaccacaccaattctctgcaacctcagcgccaagccacgcgacaccctgcgcctgccgacgacgcgttcgccgaacgacggcacgaggcgaacgacgctccacctgagctcgtcaagagcccgcggcgacttgatccgcgccgccgccgccgtctacacggtgaagctcatcgggccggaggggcaggagagcgtgatcaaggtgccggaggacacctacatcctggacgcggccgaggaagccggcgtcgacctgccctactcgtgccgcgccggcgcgtgctccacctgcgccggcaaggtcgtcgagggcggcgtcgaccagtcggaccagtcgttcctcgacgacgcccaggtcggcgccggctacgtgctcacctgcgtcgcgtacccgaccgccaacagcgtcatccagacgcacaaggaggcagacctgtattag

SEQ ID NO: 95678 - protein, 152 aa, Oryza sativa
MATTTVTTPILCNLSAKPRDTLRLPTTRSPNDGTRRTTLHLSSSRARGDLIRAAAAVYTVKLIGPEGQESVIKVPEDTYILDAAEEAGVDLPYSCRAGACSTCAGKVVEGGVDQSDQSFLDDAQVGAGYVLTCVAYPTANSVIQTHKEADLY

SEQ ID NO: 95679 - DNA, 420 bp, Oryza sativa
  CDS (1)..(420)
atggcggcgacggcactgagcagccaggtccggttgccgatgtccctgcgggtggcgacggcgccggcgccggcgcgcgtgtcggtgctgccggcgagcaacaagctgggagacaggctgcggatgcaggcgacgtacaacgtgaagctgatcacaccggacggcgaggtggagctgcaggtgccggacgacgtgtacatcctggaccaggcggaggaggaagggatcgacctgccttactcctgccgcgcgggctcctgctcctcctgcgccggcaaggtggtctccggcgagatcgaccagtccgaccagagcttcctcgacgacgaccaggttgccgccggctgggtcctcacctgccacgcctaccccaagtccgacgtcgtcatcgagacccacaaggaggacgacctcatctaa

SEQ ID NO: 95680 - protein, 139 aa, Oryza sativa
MAATALSSQVRLPMSLRVATAPAPARVSVLPASNKLGDRLRMQATYNVKLITPDGEVELQVPDDVYILDQAEEEGIDLPYSCRAGSCSSCAGKVVSGEIDQSDQSFLDDDQVAAGWVLTCHAYPKSDVVIETHKEDDLI

SEQ ID NO: 95681 - DNA, 444 bp, Oryza sativa
  CDS (1)..(444)
atggccaccacagcagctctatccggaaccatggtgagcacctccttcatgaggaggcaacctatgaccaccacaagcctaaagacattccccaacgttggtgaagctctttttggtctgaaaagtggacgaggtggtcgtgtcacttgcatggcctcgtacaaggtgaagctcataaccccagaaggagaagtggagtttgaatgcccagatgatgttttcattgttgacaaggcagaggacgaaggcattgaacttccctactcgtgcagggccggttcttgcgtttcctgtgttggcaaaattgtggaaggtaacgtggaccagtcagatggtagcttccttgatgatgagcaaatagatagtggctgggttctcacctgtgttgctcaacctaggtcagacgttgtcattgagacacacaaggagggagagatcgaatga

SEQ ID NO: 95682 - protein, 147 aa, Oryza sativa
MATTAALSGTMVSTSFMRRQPMTTTSLKTFPNVGEALFGLKSGRGGRVTCMASYKVKLITPEGEVEFECPDDVFIVDKAEDEGIELPYSCRAGSCVSCVGKIVEGNVDQSDGSFLDDEQIDSGWVLTCVAQPRSDVVIETHKEGEIE

SEQ ID NO: 95683 - DNA, 459 bp, Brassica napus
  CDS (1)..(459)
atggcaaccgttcaagtttctaccactagcatgacttgtaaggcggttcttagaagccagcccaccaacaggcccatcactaacaaactctcccttggatcagtcaacaaagtctcgagatcctttggcttgaaatgctcagccaactctggtgccaccatgtcagcagtgtacaaggtcaagctcatcggacccgatggccaagcaaacgagtttgaggtcccagacgaccagtacatattggatgcagctgaagaagctggagttgacttgccttactcttgcagagccggtgcctgttccacctgcgccggtaagatcgagaaaggtcaagttgaccagggtgatggttcgtttcttgaggatcatcactttgagaaaggttatgtcttgacttgtgtggcttacccgcagtctgactgtgtcatccatacccacaaagaagatgaactcttctaa

SEQ ID NO: 95684 - protein, 152 aa, Brassica napus
MATVQVSTTSMTCKAVLRSQPTNRPITNKLSLGSVNKVSRSFGLKCSANSGATMSAVYKVKLIGPDGQANEFEVPDDQYILDAAEEAGVDLPYSCRAGACSTCAGKIEKGQVDQGDGSFLEDHHFEKGYVLTCVAYPQSDCVIHTHKEDELF

SEQ ID NO: 95685 - DNA, 465 bp, Brassica napus
  CDS (1)..(465)
atggctacagtgcgagtctcttctactagcatgactaaggcggttcttagaagccaaccaaccaacaagctcatcactaacaagagccagcatgtctccgttggatcagtcaataaagtctccagatcctttggcttgaaatgctcagcttattctggtgcaacaatgtcagcagtatacaaagtcaagctcattggacccgacggacaagaaaacgagtttgatgttcaagacgaccagtacatattggatgcggctgaagaagcaggagttgacttgccttactcttgcagagctggtgcgtgttccacctgtgccggtaagatcgagaaaggccaagtagaccagtctgatggttcctttcttgaggatgatcacatggacaaaggttatgtcttgacttgtgtggcttacccgcagtctgactgtgtgatccatacccacaaggaaactgaactcttctaa

SEQ ID NO: 95686 - protein, 154 aa, Brassica napus
MATVRVSSTSMTKAVLRSQPTNKLITNKSQHVSVGSVNKVSRSFGLKCSAYSGATMSAVYKVKLIGPDGQENEFDVQDDQYILDAAEEAGVDLPYSCRAGACSTCAGKIEKGQVDQSDGSFLEDDHMDKGYVLTCVAYPQSDCVIHTHKETELF

SEQ ID NO: 95687 - DNA, 432 bp, Triticum aestivum
  CDS (1)..(432)
atggccgccgcactgagcctccgcgcgcccttctccgtgcgcgccgtggcgccaccggcgccccgcgtggccctggcgcccgcggccctcagcctcgccgccgccaagcaggtgcggggagccaggctccgcgcgcaggcgacgtacaaggtgaagctggtgacgcccgagggcgaggtggagctggaggtccccgacgacgtctacatcctcgaccaggccgaggaggaggggatcgacctgccctactcctgccgcgccggctcctgctcctcctgcgccggcaagttggtgtccggcgagatcgaccagtccgaccagagcttcctcgacgacgaccagatggaggccgggtgggtgctcacctgccacgcctaccccaagtccgacatcgtcatcgagacccacaaggaggaggagctcaccgcataa

SEQ ID NO: 95688 - protein, 143 aa, Triticum aestivum
MAAALSLRAPFSVRAVAPPAPRVALAPAALSLAAAKQVRGARLRAQATYKVKLVTPEGEVELEVPDDVYILDQAEEEGIDLPYSCRAGSCSSCAGKLVSGEIDQSDQSFLDDDQMEAGWVLTCHAYPKSDIVIETHKEEELTA

SEQ ID NO: 95689 - DNA, 453 bp, Zea mays
  CDS (1)..(453)
atggccaccgtcctaggcagcccccgcgcgccggccttcttcttctcgccgtcctccctccgtgccgcgccggcgcccaccgccgtggcgctgcctgcggccaaggtgggcatcatgggccgtagcgccagcagcaggggcaggctgcgcgcgcaggccacctacaacgtgaagctgatcacgccggagggggaggtggagctgcaggtgcccgacgacgtgtacatcctggaccaggccgaggaggacggcatcgacctgccctactcctgccgcgcggggtcctgctcctcctgcgccggcaaggtcgtctccggctccgtggaccagtccgaccagagctacctcgacgacggccagatcgccgccggctgggtgctcacctgccacgcctaccccacctctgacgtcgtcatcgagacgcacaaggaggaggagctcaccggcgcataa

SEQ ID NO: 95690 - protein, 150 aa, Zea mays
MATVLGSPRAPAFFFSPSSLRAAPAPTAVALPAAKVGIMGRSASSRGRLRAQATYNVKLITPEGEVELQVPDDVYILDQAEEDGIDLPYSCRAGSCSSCAGKVVSGSVDQSDQSYLDDGQIAAGWVLTCHAYPTSDVVIETHKEEELTGA

SEQ ID NO: 95691 - DNA, 468 bp, Zea mays
  CDS (1)..(468)
atggcaactttcgcctcaccactcctctgcaacttcatggccatagaacagaagaacgcgcctcagctgaccaacagcagaaagccgtccccgcgcctgagcttcccaacgacaaggagcatgccaacattgccgttgccgggcttcagagcgaggccagactggcgcgtcgccgccgtctacaaggtgaagctcattggccccgaaggacaggagagcgtgatccaagtgccagaggacagctacatcctggacgcggccgaggaggccggtatagacctgccctactcctgccgcgctggtgcgtgctccacgtgcgccggcaaggtactggagggctccgtcgaccaggcggaccagtcgttcctggacgacgcgcaggtcggtgccgggtatgcgctcacctgcgtcgcgtacccgacgtctgactgcgtcatccagacgcacagggaggccgacctgtactag

SEQ ID NO: 95692 - protein, 155 aa, Zea mays
MATFASPLLCNFMAIEQKNAPQLTNSRKPSPRLSFPTTRSMPTLPLPGFRARPDWRVAAVYKVKLIGPEGQESVIQVPEDSYILDAAEEAGIDLPYSCRAGACSTCAGKVLEGSVDQADQSFLDDAQVGAGYALTCVAYPTSDCVIQTHREADLY

SEQ ID NO: 95693 - DNA, 465 bp, Zea mays
  CDS (1)..(465)
atggcaatggcaaccttcacatcatccccagttctctgcagcttcaggaccatcgaacagaagaaggcccctctgctgaacaacagcacaaaacggccgcttcacttgggcttcccaaggagcgtgccgacgtcgccgagcttgagagagaggctagacctgcgcgtcgccgctgtctacaaggtgaagctcctcggccccgaagggcaggagagcgtgctcgacgtgccagaggacagctacatcctggacgcggccgaggaggccggtctcgacctgccctactcctgccgcgccggcgcgtgctccacgtgcgccggcaagctcctggagggctccgtcgaccaggcagaccagtcgttcctcgacgaggcgcaggtcggtgccgggtacgcgctcacctgcgtcgcgtacccgacgtctgactgcgtcatccagacgcacagggaggaagacttgtactag

SEQ ID NO: 95694 - protein, 154 aa, Zea mays
MAMATFTSSPVLCSFRTIEQKKAPLLNNSTKRPLHLGFPRSVPTSPSLRERLDLRVAAVYKVKLLGPEGQESVLDVPEDSYILDAAEEAGLDLPYSCRAGACSTCAGKLLEGSVDQADQSFLDEAQVGAGYALTCVAYPTSDCVIQTHREEDLY

SEQ ID NO: 95695 - DNA, 447 bp, Zea mays
  CDS (1)..(447)
atggcgacggctgctgctgctgcaacagcgatgtgctccgttccaggcccgagcggcagcatgcggcgccgggcattctgcacatggaaaaaagccgatgctccgcgcgtcgcttcttcttccgtcgcgcgggtcgtcagggcgtccgcggcggccgtgcacagggtgaagctggtcgggcccgacgggtcggagagcgagctggaggtggccgaggacacctacgtcctcgacgccgcggaggaggccgggctggagctgccctactcgtgccgtgccgggtcgtgcgcgacgtgcgcggggaagctggcgtccggcgaggtggaccagtcggaggggtcgttcctggacgacgcgcagagggccgaggggtacgtgctcacctgcgtctcctaccccagggcggactgcgtcatctacacccacaaggaggaggaagtgcactag

SEQ ID NO: 95696 - protein, 148 aa, Zea mays
MATAAAAATAMCSVPGPSGSMRRRAFCTWKKADAPRVASSSVARVVRASAAAVHRVKLVGPDGSESELEVAEDTYVLDAAEEAGLELPYSCRAGSCATCAGKLASGEVDQSEGSFLDDAQRAEGYVLTCVSYPRADCVIYTHKEEEVH

SEQ ID NO: 95697 - DNA, 471 bp, Brassica napus
  CDS (1)..(471)
atggcgacttttcaaatctcttccactagcatgaccaccaaggcggttctcagaacccagccgaccaacaagctcatcgctaacaatagcccacaagtctccgttggatccgtcaagaaagtctcgagatcctttggcttgaaatgctcagccaattcaggtgccaccatgatgtcagccgtgtacaaggtcaagctcataggaccagaaggcgaagaacacgagttcgacgttcaggacgaccagttcatattggacgcagctgaagaggcgggagtggacttgccttactcttgcagagccggagcgtgttccacctgcgccggtcagatcgtgaaaggacaagttgatcagtctgagggatcgtttcttgaggatgatcacttggagaaaggttttgtcttgacttgtgtggcttacccgcagtcagactgtgtgatccatacccacaaagaaactgaactcttctaa

SEQ ID NO: 95698 - protein, 156 aa, Brassica napus
MATFQISSTSMTTKAVLRTQPTNKLIANNSPQVSVGSVKKVSRSFGLKCSANSGATMMSAVYKVKLIGPEGEEHEFDVQDDQFILDAAEEAGVDLPYSCRAGACSTCAGQIVKGQVDQSEGSFLEDDHLEKGFVLTCVAYPQSDCVIHTHKETELF

SEQ ID NO: 95699 - DNA, 447 bp, Brassica napus
  CDS (1)..(447)
atggcctccacagctctctcaagcgccatcgtcggaacatccttcctccgccgtcaaacatctcccatcagtctccgttccctccccttagccaacactcagaccctcttcggtctcaagtcaggaaccgcacgtggtggacgcgtcacagccatggctacatacaaggtcaagttcatcactccagaaggagagcaagaggttgagtgcgacgacgacgtttacgtcctcgacgctgcggaggaagccgggatcgacttgccttactcttgccgtgccggttcttgctcgagctgtgcaggtaaagttgtgtctggttctgttgaccagtctgaccagagtttcctcgatgatgaccagattgctgaagggtttgttctcacttgtgcggcttatcctacttctgatgttaccattgagacccacagagaagatgacattgtttaa

SEQ ID NO: 95700 - protein, 148 aa, Brassica napus
MASTALSSAIVGTSFLRRQTSPISLRSLPLANTQTLFGLKSGTARGGRVTAMATYKVKFITPEGEQEVECDDDVYVLDAAEEAGIDLPYSCRAGSCSSCAGKVVSGSVDQSDQSFLDDDQIAEGFVLTCAAYPTSDVTIETHREDDIV

SEQ ID NO: 95701 - DNA, 447 bp, Brassica napus
  CDS (1)..(447)
atggcctcaacagctctctcaagcgccatcgtcggaacatccttcattcgtcgtcaaacagctcctatcagcctccgttccctccccttagccaacactcaatccctcttcggtctcaaatcaggcaccgcacgtggtggacgcgtcatcgccatggctacatacaaggtcaagttcatcactcctgaaggagagcaagaggttgagtgcgacgacgacgtctacgtcctagacgctgctgaggaagccggaatcgacttgccttactcttgccgtgctggttcctgctcgagctgtgcaggtaaagttgtgtctggatctgttgaccagtctgaccagagtttcctcgatgatgaccagattgcggaaggattcgttctcacttgtgcggcttatcctacttctgatgttaccattgagacccacagagaagatgacattgtttaa

SEQ ID NO: 95702 - protein, 148 aa, Brassica napus
MASTALSSAIVGTSFIRRQTAPISLRSLPLANTQSLFGLKSGTARGGRVIAMATYKVKFITPEGEQEVECDDDVYVLDAAEEAGIDLPYSCRAGSCSSCAGKVVSGSVDQSDQSFLDDDQIAEGFVLTCAAYPTSDVTIETHREDDIV

SEQ ID NO: 95703 - DNA, 471 bp, Brassica napus
  CDS (1)..(471)
atggcgacttttcaaatctcttccactagcatgaccaccaaggcggttctcagaacccagccgaccaacaagctcatcgctaacaatagcccacaagtctccgttggatccgtcaagaaagtctcgagatcctttggcttgaaatgctcagccaattctggtgccaccatgatgtcagctgtatacaaggtcaagctcataggacccgaaggcgaagaacacgagttcgaggttcaggacgaccagttcatattggacgcagctgaagaggcaggagttgacttgccttactcttgcagagccggagcctgttccacctgcgccggtcagatcgtgaaaggccaagttgaccagtctgaaggttcgtttcttgaggatgatcacttggagaaaggttttgtcttgacatgtgtggcttacccgcagtcggactgtgtgatccatacccacaaggaaactgaactcttctaa

SEQ ID NO: 95704 - protein, 156 aa, Brassica napus
MATFQISSTSMTTKAVLRTQPTNKLIANNSPQVSVGSVKKVSRSFGLKCSANSGATMMSAVYKVKLIGPEGEEHEFEVQDDQFILDAAEEAGVDLPYSCRAGACSTCAGQIVKGQVDQSEGSFLEDDHLEKGFVLTCVAYPQSDCVIHTHKETELF

SEQ ID NO: 95705 - DNA, 447 bp, Brassica napus
  CDS (1)..(447)
atggcctcaaccgctctctcaagcgccatcgtcggaacatccttcctccgccgtcagacagctcctatcagcctccgttccctcccctcagccaacactcaatccctcttcggtctcaaatcaggcaccgcacgcggcggacgcgtcaccgccatggctacatacaaggtcaagttcatcactccagaaggtgagcaagaggttgagtgcgacgacgacgtctacgtcctcgacgctgcggaggaagccgggatcgacttgccttactcttgccgtgctggttcgtgctcaagctgtgccggcaaagttgtgtctggatctgttgaccagtctgaccagagtttcctcgatgatgaccagattgctgaagggtttgttctcacttgtgcggcttatcctacctctgatgttaccattgagacccacagagaagatgacattgtttaa

SEQ ID NO: 95706 - protein, 148 aa, Brassica napus
MASTALSSAIVGTSFLRRQTAPISLRSLPSANTQSLFGLKSGTARGGRVTAMATYKVKFITPEGEQEVECDDDVYVLDAAEEAGIDLPYSCRAGSCSSCAGKVVSGSVDQSDQSFLDDDQIAEGFVLTCAAYPTSDVTIETHREDDIV

SEQ ID NO: 95707 - DNA, 435 bp, Brassica napus
  CDS (1)..(435)
atggcgactcttcctctccctcaaatctccacaatctctccccctaaaccttatctatccaacaccttctccttcccgttacggaacgtgagtctctcgacaagaaaccgcctggttgctcgttcgtataaagtggtggtggagcaggacggaaagacgacggaactggaggttgaaccggacgagactattttatcgaaggctcttgagtcggggatggacgtgccgtacgactgcaatctcggcgtttgtatgacttgtccggcgaaactcgtgaccggaacggttgatcagagcgacgggatgcttagcgaagatgtggtggaacgtggctacgcgcttctgtgcgcttcgtatccaacttctgattgtcacattaagatgatccctgaggaagagctcttgtctctacagctcgcaacagctaacgactaa

SEQ ID NO: 95708 - protein, 144 aa, Brassica napus
MATLPLPQISTISPPKPYLSNTFSFPLRNVSLSTRNRLVARSYKVVVEQDGKTTELEVEPDETILSKALESGMDVPYDCNLGVCMTCPAKLVTGTVDQSDGMLSEDVVERGYALLCASYPTSDCHIKMIPEEELLSLQLATAND

SEQ ID NO: 95709 - DNA, 465 bp, Brassica napus
  CDS (1)..(465)
atggctacagtgcgagtctcttccactagcatgactaaggcggttcgtagaagccaaccaaccaacaagctcaccactaacaagagccagcatgtctccgttggatcagtcaataaagtctccagatcctttggcttgaaatgctcagcttattctggtgcaacaatgtcagcagtatacaaagtcaagctcattggacccgacggacaagaaaacgagtttgatgttcaagacgaccagtacatattggatgcggctgaagaagcaggagttgacttgccttactcttgcagagctggtgcgtgttccacctgcgctggtaatatcgagaaaggccaagttgaccagtctgatggttcctttcttgaggatgatcacatggacaaaggttatgtcttgacttgtgtggcttacccgcagtctgactgtgtgatccatacccacaaggaaactgaactcttctaa

SEQ ID NO: 95710 - protein, 154 aa, Brassica napus
MATVRVSSTSMTKAVRRSQPTNKLTTNKSQHVSVGSVNKVSRSFGLKCSAYSGATMSAVYKVKLIGPDGQENEFDVQDDQYILDAAEEAGVDLPYSCRAGACSTCAGNIEKGQVDQSDGSFLEDDHMDKGYVLTCVAYPQSDCVIHTHKETELF

SEQ ID NO: 95711 - DNA, 447 bp, Brassica napus
  CDS (1)..(447)
atggcgtccactgctctctccagcgtcaccgtaagcacacccttcctccgccgccagcagacaccaaacagcctcagatctctcccggcggccaacacacaatccctcttcggcctcaaatcctcgacctctcgcggcggccgcgtcacagccatggctacctacaaggtgaagttcataacaccagatggagagaaggaagtggagtgcgacggtgacacgtacgtcctcgacgcggcggaggagtccggactcgacttgccgtactcgtgccgtgcgggagcttgctcgagctgcgccgggaaaatagtctctggctcggttgaccagtcggaccagagctttttagacgatggccagatcagcgaagggtttgttctcacgtgcattgctctcccaacttctgatgtcgttattgaaacccataaagaagacgccatgatttaa

SEQ ID NO: 95712 - protein, 148 aa, Brassica napus
MASTALSSVTVSTPFLRRQQTPNSLRSLPAANTQSLFGLKSSTSRGGRVTAMATYKVKFITPDGEKEVECDGDTYVLDAAEESGLDLPYSCRAGACSSCAGKIVSGSVDQSDQSFLDDGQISEGFVLTCIALPTSDVVIETHKEDAMI

SEQ ID NO: 95713 - DNA, 456 bp, Brassica napus
  CDS (1)..(456)
atggcgactcttcctctccctataaccactacaatctctctccctaaaccctgcatatccaactccttctccttcccgtttcggaacgtgagtctctcgacaagaactcgccggatgtatctcaccggaggagtcgtttctcggtcgtataaagtggtggtggagcaggacggaaagacgacggaactggaggttgaaccggacgagactattttatcgaaggctcttgaatcggggatggacgtgccgtacgactgcaatctcggcgtgtgtatgacttgtccggcgaaactcgtgaccggaacggtggatcagagcgacgggatgctaagcgaagatgtggtggaacgtggctacgcgcttctatgcgcgtcttatccaacttctgattgtcacattaagatgatccctgaggaagagctcttgtctctacagctcgcaacagctaacgactaa

SEQ ID NO: 95714 - protein, 151 aa, Brassica napus
MATLPLPITTTISLPKPCISNSFSFPFRNVSLSTRTRRMYLTGGVVSRSYKVVVEQDGKTTELEVEPDETILSKALESGMDVPYDCNLGVCMTCPAKLVTGTVDQSDGMLSEDVVERGYALLCASYPTSDCHIKMIPEEELLSLQLATAND

SEQ ID NO: 95715 - DNA, 447 bp, Brassica napus
  CDS (1)..(447)
atggcctcaacagctctctcaagcgccatcgtcggaacatccttcattcgtcgtcaaacagctcctatcagcctccgctccctccccttagccaacactcaatccctcttcggtctcaaatcaggcaccacacatggtggacgcgtcattgccatggctacatacaaggtccagttcatcactcctgaaggagagcaagaggttgagtgcgacgacgacgtctacgtccttgacgctgctgaggaagccggaatcgacttgccttactcttgccgtgctggttcctgctcgagctgtgcaggtaaatttgtgtctggatctgttgaccagtctgaccagagtttcctcgatgatgaccaaattgcggaaggattctttctcacttgtgcggcttatcctactttcgatgttaccattgagacccacagagaagatgacattgtttaa

SEQ ID NO: 95716 - protein, 148 aa, Brassica napus
MASTALSSAIVGTSFIRRQTAPISLRSLPLANTQSLFGLKSGTTHGGRVIAMATYKVQFITPEGEQEVECDDDVYVLDAAEEAGIDLPYSCRAGSCSSCAGKFVSGSVDQSDQSFLDDDQIAEGFFLTCAAYPTFDVTIETHREDDIV

SEQ ID NO: 95717 - DNA, 438 bp, Glycine max
  CDS (1)..(438)
atggcgaccacaggcgctttgtgtggcactatgttgaacacctccttcctgaagaggcaggcatcagtgaacatgacaagcttcaaggctaacgctgctgtctttggtgtaaaaggaggacgaggaggtcgtgtgagggccatggcaacttacaaggtgaagctgataactccagagggagagcaagaatttgaatgcccagatgatatatacattcttgatcaggcagaggaaaatggcattgatcttccctactcatgcagggctggttcttgctctgcatgtgctgccaaagttgtgagtggcaaactggaccagtcagatggtagcttccttgatgacgaccaaattgatgcaggatttgttctcacctgcgttgcttaccccacctcagatattgtcattgagactcacagggaggaagagctcactgcttaa

SEQ ID NO: 95718 - protein, 145 aa, Glycine max
MATTGALCGTMLNTSFLKRQASVNMTSFKANAAVFGVKGGRGGRVRAMATYKVKLITPEGEQEFECPDDIYILDQAEENGIDLPYSCRAGSCSACAAKVVSGKLDQSDGSFLDDDQIDAGFVLTCVAYPTSDIVIETHREEELTA

SEQ ID NO: 95719 - DNA, 465 bp, Glycine max
  CDS (1)..(465)
atggcagcagtgaatatgtccactgtgagacttccaagagcttccttgtctggaacgacaccagctaggagatcttgtgctctcatcaagaatccatcatctttgaggtctgtgaagaacgtgtctaaagtatttggattgaaatcatcttcctttagagtgtcagcgatggcggtatataaagtgaagctgattggaccggacggtgaagagaatgaatttgaagcccctgatgacacttacattctggatgcagctgaaaatgctggagtggagctaccttactcatgcagagctggagcatgctctacttgtgctggccatgttgtttcaggctctgtggatcaagcagatcaatcctttcttgatgaccatcaaatcgaaaagggttaccttctgacatgtgtctcatacccgaaatcagattgtgtgattcacacccacaaggaggaagatctcgtctag

SEQ ID NO: 95720 - protein, 154 aa, Glycine max
MAAVNMSTVRLPRASLSGTTPARRSCALIKNPSSLRSVKNVSKVFGLKSSSFRVSAMAVYKVKLIGPDGEENEFEAPDDTYILDAAENAGVELPYSCRAGACSTCAGHVVSGSVDQADQSFLDDHQIEKGYLLTCVSYPKSDCVIHTHKEEDLV

SEQ ID NO: 95721 - DNA, 456 bp, Glycine max
  CDS (1)..(456)
atggcaaccttgtctactaatcattgcacattacaaactgcaagcaaaaatccatccattgttgccaccatagtgaagtgtccttcttctttaaggtctgtgaagagcgtttccagatctttcggcttgaagtcggcctcttcatttagagtcactgccatggcttcttacaaggttaagctgattggcccagatggaacagagaacgagttcgaagccactgacgatacttacatcttagatgcagcagagagtgctggagttgaacttccttactcatgccgagctggagcatgctccacctgtgctgggaagattgtttctggttctgtggaccagtccgatggctcattcctcgatgacaaccaactgaaggaaggctttgttcttacctgtgtctcctatccaactgcagactgtgtaattgaaactcacaaggaaggagatctctactga

SEQ ID NO: 95722 - protein, 151 aa, Glycine max
MATLSTNHCTLQTASKNPSIVATIVKCPSSLRSVKSVSRSFGLKSASSFRVTAMASYKVKLIGPDGTENEFEATDDTYILDAAESAGVELPYSCRAGACSTCAGKIVSGSVDQSDGSFLDDNQLKEGFVLTCVSYPTADCVIETHKEGDLY

SEQ ID NO: 95723 - DNA, 468 bp, Glycine max
  CDS (1)..(468)
atggcaaccttgtcaactgtgaaggtttccccccattgcatgtttcaaacagcaagcaaaaatccatccactgttgccaccacaatgaagtgcccttcttcttttgggtctgtgaagagcatttccagatcttttggcttgaagtcatcctcttcatttagagtcactgccatggcttcttacaaggttaagctgattggcccagatggaacagagaacgagtttgaagccactgacgatacttacatcttagatgcagcagagagtgctggagttgaacttccttactcttgccgagccggagcatgctctacctgtgctgggaagattgttgctggttctgtggaccagtctgatggctcattcctcgatgacaaccaactgaaggaaggctttgtgcttacttgtgtctcctatccaactgcagactgtgtaattgaaactcacaaggaaggagatctctattga

SEQ ID NO: 95724 - protein, 155 aa, Glycine max
MATLSTVKVSPHCMFQTASKNPSTVATTMKCPSSFGSVKSISRSFGLKSSSSFRVTAMASYKVKLIGPDGTENEFEATDDTYILDAAESAGVELPYSCRAGACSTCAGKIVAGSVDQSDGSFLDDNQLKEGFVLTCVSYPTADCVIETHKEGDLY

SEQ ID NO: 95725 - DNA, 444 bp, Glycine max
  CDS (1)..(444)
atggcaagccttcagttaacaacaacacccttcactcttttgagacaacaaaggcagcaccccacaaagaagaagtccactgcttctcagctgaaccctcctcggccacgtcccctcagagtgagtgtgaggtcctataaagtggtgattgagcacgatggagagtccactgaggtggaggttgaacctgacgagaccattctgtcaaaggcattggactctggcttgtctgtgcctcatgattgcaagcttggagtctgcatgacatgccctgctcgcctcattagtggatctgttgatcagagtgatggaatgctaagtgatgatgtggtggagcgtggctatgcactcttgtgtgcagcctaccctcaatccgattgtcatattaagattatccccgaggatgagctattgtctttgcagttagccacagccaatgactag

SEQ ID NO: 95726 - protein, 147 aa, Glycine max
MASLQLTTTPFTLLRQQRQHPTKKKSTASQLNPPRPRPLRVSVRSYKVVIEHDGESTEVEVEPDETILSKALDSGLSVPHDCKLGVCMTCPARLISGSVDQSDGMLSDDVVERGYALLCAAYPQSDCHIKIIPEDELLSLQLATAND

SEQ ID NO: 95727 - DNA, 438 bp, Glycine max
  CDS (1)..(438)
atggcgaccacaggcgctttgtgtggcactatgttgaacacctccttcctgaagaggcaggcatcagtgaacatgacaagcttcaaggctaacgctgctgtctttggtgtaaaaggaggacgaggaggtcgtgtgagggccatggcaacttacaaggtgaagctgataactccagagggagagcaagaatttgaatgcccagatgatatatacattcttgatcaggcagaggaaaatggcattgatcttccctactcatgcagggctggttcttgctctgcatgtgctgccaaagttgtgagtggcaaactggaccagtcagatggtagcttccttgatgacgaccaaattgatgcaggatttgttctcacctgcgttgcttaccccacctcagatattgtcattgagcctcacagggaggaagagctccctgcttaa

SEQ ID NO: 95728 - protein, 145 aa, Glycine max
MATTGALCGTMLNTSFLKRQASVNMTSFKANAAVFGVKGGRGGRVRAMATYKVKLITPEGEQEFECPDDIYILDQAEENGIDLPYSCRAGSCSACAAKVVSGKLDQSDGSFLDDDQIDAGFVLTCVAYPTSDIVIEPHREEELPA

SEQ ID NO: 95729 - DNA, 465 bp, Glycine max
  CDS (1)..(465)
atggcagcattgaatatgtccactgtgagacttccaagagcttccttgtctggaacgacaccagctaggagatcttgtgctctcatcaagaatccatcatctttgaggtctgtgaagaacgtgtctaaagtatttggattgaaatcatcttcctttagagtgtcagcgatggcggtatataaagtgaagctgattggaccagacggtgaagagaatgaatttgaagcccctgatgacacttacattctggatgcagctgaaaatgctggagtggagctaccttactcatgcagagctggagcatgctctacttgtgctggccatgttgtttcaggctctgtggatcaagcagatcaatcctttcttgatgaccatcaaatcaaaaagggttaccttctgacatgtgtctcatacccgaaatcagattgtgtgattcacacccacaaggaggaagatctcgtctag

SEQ ID NO: 95730 - protein, 154 aa, Glycine max
MAALNMSTVRLPRASLSGTTPARRSCALIKNPSSLRSVKNVSKVFGLKSSSFRVSAMAVYKVKLIGPDGEENEFEAPDDTYILDAAENAGVELPYSCRAGACSTCAGHVVSGSVDQADQSFLDDHQIKKGYLLTCVSYPKSDCVIHTHKEEDLV

SEQ ID NO: 95731 - DNA, 435 bp, Glycine max
  CDS (1)..(435)
atggccaccacagcagctctatccggaaccatggtgagcacctccttcatgaggaagcaacctatgacgaccaagagcctaaagacattccccaacgctctttttggtctgaaaggtggacgaggtggtcgtgtaacttgcatggcctcgtacaaggtgaagctcataaccccagaaggagaagtggagtttgaatgcccagatgatgttttcattgttgacaaggctgaggaagaaggcattgaacttccctactcgtgcagggctggttcttgcgtttcatgtgttgggaaaattgtgaaaggtgacgtggaccagtcagatggtagcttccttgatgatgaacaaatagaaagtggatgggttctcacctgtgttgctctacctaggtcagacgttgtcattgagacacacaaggatggagagatcgaatga

SEQ ID NO: 95732 - protein, 144 aa, Glycine max
MATTAALSGTMVSTSFMRKQPMTTKSLKTFPNALFGLKGGRGGRVTCMASYKVKLITPEGEVEFECPDDVFIVDKAEEEGIELPYSCRAGSCVSCVGKIVKGDVDQSDGSFLDDEQIESGWVLTCVALPRSDVVIETHKDGEIE

SEQ ID NO: 95733 - DNA, 444 bp, Glycine max
  CDS (1)..(444)
atggcgacgacagcagccttgtgcggcactatgatgagcaggtccttcctgaggagaaaagcagtggtcacaagcctgaaggcattccccaatgctaacgcagggttgggtgtaaagggtggacgtggaggtggtgtgactgccatggctagcttcaaggtgaggctgataaccccagagggagagaaagaatttgaatgcccagatgatgtatacattcttgaccatgcagaggaggaagggcttgagcttacctactcatgcagggctggctcttgctctgtgtgtgctggcaaaggtgtatgtggcaaagttgacaattcagatgccaccttccttgaggatgaacaattacaagcacgatctactctcaactgtgtagcttaccacacctcagacgttgtcattgaaacccacgacgaggaagacctctctgctgcttaa

SEQ ID NO: 95734 - protein, 147 aa, Glycine max
MATTAALCGTMMSRSFLRRKAVVTSLKAFPNANAGLGVKGGRGGGVTAMASFKVRLITPEGEKEFECPDDVYILDHAEEEGLELTYSCRAGSCSVCAGKGVCGKVDNSDATFLEDEQLQARSTLNCVAYHTSDVVIETHDEEDLSAA

SEQ ID NO: 95735 - DNA, 447 bp, Brassica napus
  CDS (1)..(447)
atggcctccacagctatctcaagcgtcatcgtcggaacatccttcctccgccgtcaaacatctcccatcagcctccgttccctccccttagccaacactcagaccctcttcggcctcaagtcaggaaccgcacgtggtggacgcgtcacagccatggctacatacaaggtcaagttcatcactcccgaaggagagcaagaggttgagtgcgacgacgacgtttacgtcctcgacgctgctgaggaagccgggatcgacttgccttactcttgccgtgccggttcttgctcgagctgtgcaggtaaagttgtgtctggttttgttgaccagtctgaccagagtttcctcgatgatgaccagattgctgcagggtttgttctcacctgtgcggcttatcctacttctgatgttaccattgagacccacagagaagatgacattgtttaa

SEQ ID NO: 95736 - protein, 148 aa, Brassica napus
MASTAISSVIVGTSFLRRQTSPISLRSLPLANTQTLFGLKSGTARGGRVTAMATYKVKFITPEGEQEVECDDDVYVLDAAEEAGIDLPYSCRAGSCSSCAGKVVSGFVDQSDQSFLDDDQIAAGFVLTCAAYPTSDVTIETHREDDIV

SEQ ID NO: 95737 - DNA, 453 bp, Zea mays
  CDS (1)..(453)
atggccgctgccttagcttcgcttctccacctcgcgaccccgaccctgactcgctccactcacctcgccgtccgcctccccagcgcccagctgccgcgctggccatcgggggcacgcatcgccgccgcgcagccgccgcgggcgtacaaggtgacgatcgagcacggcggcgagtcgcgggtggtggaggtggaggaggacgagacgatcctgtcccgcgcgctggacgagggcctggacgtgccgcacgactgcaagctcggcgtgtgcatgacgtgcccggcgcggctggtctccgggacggtggaccagagcgacggcatgctcagcgacgacgtcgtcgcgcgggggtacgcgctgctctgcgccgcgtacccgcgctccgactgcaccatccgcgtcatccccgaggacgagctgctcaaggtccagctcgccaccgccgacgactga

SEQ ID NO: 95738 - protein, 150 aa, Zea mays
MAAALASLLHLATPTLTRSTHLAVRLPSAQLPRWPSGARIAAAQPPRAYKVTIEHGGESRVVEVEEDETILSRALDEGLDVPHDCKLGVCMTCPARLVSGTVDQSDGMLSDDVVARGYALLCAAYPRSDCTIRVIPEDELLKVQLATADD

SEQ ID NO: 95739 - DNA, 21 bp, Artificial sequence
  primer
atgggtgcaatttattccgtc

SEQ ID NO: 95740 - DNA, 21 bp, Artificial sequence
  primer
ttaaccaaacaacgcttcctc

SEQ ID NO: 95741 - protein, 100 aa, Artificial sequence
  consensus sequence
  Variant (2)..(2): Xaa in position 2 is any amino acid
  Variant (4)..(7): Xaa in position 4 to 7 is any amino acid
  Variant (8)..(10): Xaa in position 8 to 10 is any or no amino acid
  Variant (12)..(18): Xaa in position 12 to 18 is any amino acid
  Variant (19)..(24): Xaa in position 19 to 24 is any or no amino acid
  Variant (26)..(27): Xaa in position 26 to 27 is any amino acid
  Variant (30)..(31): Xaa in position 30 to 31 is any amino acid
  Variant (33)..(33): Xaa in position 33 is any amino acid
  Variant (35)..(36): Xaa in position 35 to 36 is any amino acid
  Variant (38)..(39): Xaa in position 38 to 39 is any amino acid
  Variant (42)..(42): Xaa in position 42 is any amino acid
  Variant (48)..(48): Xaa in position 48 is any amino acid
  Variant (50)..(51): Xaa in position 50 to 51 is any amino acid
  Variant (53)..(53): Xaa in position 53 is any amino acid
  Variant (55)..(58): Xaa in position 55 to 58 is any amino acid
  Variant (60)..(60): Xaa in position 60 is any amino acid
  Variant (64)..(64): Xaa in position 64 is any amino acid
  Variant (66)..(67): Xaa in position 66 to 67 is any amino acid
  Variant (68)..(69): Xaa in position 68 to 69 is any or no amino acid
  Variant (72)..(78): Xaa in position 72 to 78 is any amino acid
  Variant (80)..(81): Xaa in position 80 to 81 is any amino acid
  Variant (83)..(83): Xaa in position 83 is any amino acid
  Variant (85)..(86): Xaa in position 85 to 86 is any amino acid
  Variant (89)..(89): Xaa in position 89 is any amino acid
  Variant (92)..(93): Xaa in position 92 to 93 is any amino acid
  Variant (95)..(95): Xaa in position 95 is any amino acid
  Variant (96)..(96): Xaa in position 96 is any or no amino acid
  Variant (99)..(99): Xaa in position 99 is any amino acid
YXVXXXXXXXGXXXXXXXXXXXXXDXXILXXAXEXXGXXLPXSCRAGXCXXCXGXXXXGXVDQXDXXXXFLXXXXXXXGXXLXCXXYPXSDXXIXXTHXE

SEQ ID NO: 95742 - protein, 31 aa, Artificial sequence
  protein pattern
  Variant (2)..(2): Xaa in position 2 is any or no amino acid
  Variant (4)..(4): Xaa in position 4 is any amino acid
  Variant (5)..(5): Xaa in position 5 is any or no amino acid
  Variant (7)..(8): Xaa in position 7 to 8 is any amino acid
  Variant (11)..(11): Xaa in position 11 is any amino acid
  Variant (14)..(14): Xaa in position 14 is His, Lys or Arg
  Variant (15)..(15): Xaa in position 15 is Ala, Asn or Ser
  Variant (16)..(16): Xaa in position 16 is Ala or Gly
  Variant (17)..(17): Xaa in position 17 is Ala, Ser, Thr or Val
  Variant (18)..(18): Xaa in position 18 is any amino acid
  Variant (19)..(19): Xaa in position 19 is Ala, Gly, Ser, Thr or Val
  Variant (20)..(20): Xaa in position 20 is Ala, Asn, Ser, Thr or Val
  Variant (22)..(22): Xaa in position 22 is Ala, Cys, Thr or Val
  Variant (23)..(23): Xaa in position 23 is Ala, Gly or Val
  Variant (24)..(24): Xaa in position 24 is any amino acid
  Variant (25)..(25): Xaa in position 25 is Phe, Ile, Leu, Met or Val
  Variant (26)..(27): Xaa in position 26 to 27 is any amino acid
  Variant (29)..(29): Xaa in position 29 is any amino acid
  Variant (30)..(30): Xaa in position 30 is Ile, Leu or Val
  Variant (31)..(31): Xaa in position 31 is Asp, Glu, Asn or Gln
AXEXXGXXLPXSCXXXXXXXCXXXXXXGXXX

SEQ ID NO: 95743 - protein, 24 aa, Artificial sequence
  protein pattern
  Variant (2)..(2): Xaa in position 2 is Phe, Trp or Tyr
  Variant (3)..(3): Xaa in position 3 is any amino acid
  Variant (5)..(5): Xaa in position 5 is any amino acid
  Variant (7)..(7): Xaa in position 7 is any amino acid
  Variant (8)..(8): Xaa in position 8 is Ala or Ser
  Variant (9)..(9): Xaa in position 9 is any amino acid
  Variant (10)..(10): Xaa in position 10 is Ala or Pro
  Variant (11)..(12): Xaa in position 11 to 12 is any amino acid
  Variant (14)..(15): Xaa in position 14 to 15 is any amino acid
  Variant (17)..(20): Xaa in position 17 to 20 is any amino acid
  Variant (22)..(22): Xaa in position 22 is Ala, Asp, Glu, Gly or Thr
  Variant (23)..(23): Xaa in position 23 is Ala, Asp, Glu, Gly, Asn, Gln, Ser or Thr
  Variant (24)..(24): Xaa in position 24 is Ile, Leu, Met or Val
GXXLXCXXXXXXDXXIXXXXEXXX

SEQ ID NO: 95744 - DNA, 561 bp, Synechocystis sp.
  CDS (1)..(561): transl_table=11
atgcgtatttacggcaatcgcctcctgaaaaccctaccggggcaacagactagacctaccacagggaaagtccgcctggcattattcaacatttggcggggagaaattcagcactgccactggttggacctctgtgcgggcaatggcaccctgggggctgaggccctgtgtcgggacgcggacaaagtagtggcgatcgagcagtctgccaaagtttgcaccatcatcaaagaaaattggcaaaaactagcgaagcctgggcaacaatggtcagttttgcggggagatgtgctgaaattgctcccaagcttggcaggacaaacctttgaccgcatttactttgatcccccctatggcagtggactatacaaccctgttttaaccctggtgggggaattgcaaattctcagccccactggagaaatggcagtggaatatgaccgacaccattggcagccaccggagcagattgctgggttggaattaatgcgtcaaaaaaaatatgggttgagcaatttagctttttattggcgggagcaaggggaagctttgccgatatag

SEQ ID NO: 95745 - protein, 186 aa, Synechocystis sp.
MRIYGNRLLKTLPGQQTRPTTGKVRLALFNIWRGEIQHCHWLDLCAGNGTLGAEALCRDADKVVAIEQSAKVCTIIKENWQKLAKPGQQWSVLRGDVLKLLPSLAGQTFDRIYFDPPYGSGLYNPVLTLVGELQILSPTGEMAVEYDRHHWQPPEQIAGLELMRQKKYGLSNLAFYWREQGEALPI

SEQ ID NO: 95746 - DNA, 573 bp, Chlamydia trachomatis D/UW-3/CX
  CDS (1)..(573): transl_table=11
ttgaaaattctttctggtaaattcaaagggaagtctttaaagactttttctaatccctctgttcgtcctacttgtggtgtggtgaaggaggctgtttttaatatttgtgccaatcatatagttggcgcacggtttttggatttgtttgcaggatctggatctatgggctttgaagctattagtagaggcgcagaatctgctacatttgtagattcctctgttgaagccgtgcgtttaattcgagctaatcttgctttgttagatagcaatttgcctgttcatatcctgaagcaagacgttcgttcagcgttgctacgcttaggtaaacagaatcgttcttttgatatcgtttatatagatcctccttatgctttggagaacgcgtttcttcaagaggttttatcgtacgttgtacaacaaagcctattagaaccggatgggattctctttttagagaacgcgtctccgcaagagattctagtacagggattagagcttcggaaacgtagaaaatctggggggacttttctttcagaatacattcagcaagagaactcggctcattctacataa

SEQ ID NO: 95747 - protein, 190 aa, Chlamydia trachomatis D/UW-3/CX
MKILSGKFKGKSLKTFSNPSVRPTCGVVKEAVFNICANHIVGARFLDLFAGSGSMGFEAISRGAESATFVDSSVEAVRLIRANLALLDSNLPVHILKQDVRSALLRLGKQNRSFDIVYIDPPYALENAFLQEVLSYVVQQSLLEPDGILFLENASPQEILVQGLELRKRRKSGGTFLSEYIQQENSAHST

SEQ ID NO: 95748 - DNA, 567 bp, Lactococcus lactis subsp. lactis Il1403
  CDS (1)..(567): transl_table=11
ttgaaattttgtgatataattattttcatgagagtagtttcaggaaattatggcggaagaccgctgaaaacattggcaggaaaaacaacaagaccaaccaccgataaagttaaaggagccatttttaatatgattggcccttattttgaagggggacgtgttcttgatttatttgcaggctcaggtagtttggcaattgaagccatttcaagaggaatggatcacgccattcttgtcgaaaaagacagagcagctcaacaagtcattttggaaaatatcaagatgaccaaagagcctgaaaaatttcaattattaaaaatgtcagcagaacgagtcttatcaaacttgtcagagacttttgatttagtcctcttagacccaccttatgctaaagaacaaattgttgaaaacttagaacttttgcaagagaaaaaacgactgacagaaaatgtaattgtcgtctgtgaaacagacaaggaagttgaactccctgaccaaattgggaaattagagctgaccagacaaaaaacttacggaatttctaaaatttcaatttatgaattttga

SEQ ID NO: 95749 - protein, 188 aa, Lactococcus lactis subsp. lactis Il1403
MKFCDIIIFMRVVSGNYGGRPLKTLAGKTTRPTTDKVKGAIFNMIGPYFEGGRVLDLFAGSGSLAIEAISRGMDHAILVEKDRAAQQVILENIKMTKEPEKFQLLKMSAERVLSNLSETFDLVLLDPPYAKEQIVENLELLQEKKRLTENVIVVCETDKEVELPDQIGKLELTRQKTYGISKISIYEF

SEQ ID NO: 95750 - DNA, 561 bp, Chlamydia muridarum Nigg
  CDS (1)..(561): transl_table=11
ttgaaaattcttgctggtaaattcaaagggaagtctttaaagactttttctaatcctgctgttcgcccaactagtggtgttgtaaaagaggctgttttcaatatttgtgcaaatcacatagttggtgcacgatttttagatttgtttgcagggtctggatctatggggtttgaggccatcagtagaggggcaggctctgtaacatttgtggattcttctgtagatgcgattcggttaattcgagccaatcttgctttattggacaacaatttacccgtccatattcttaagcaagatgttcgttccgctcttctgcgactcggtaaacagaaacgggcttttgatgtgatttatgtggatcctccctattctttagagaatgcatttcttcaagaggtcttgtcgtatgttgtgcaacaatcactattggatcctgagggcattctttttttagaaaatgctgatacccaagagattatagtgaaagggttagagctccggaaacgtagaaaatctggagggacttttcttgctgagtatgtcttggaaagggaagcatag

SEQ ID NO: 95751 - protein, 186 aa, Chlamydia muridarum Nigg
MKILAGKFKGKSLKTFSNPAVRPTSGVVKEAVFNICANHIVGARFLDLFAGSGSMGFEAISRGAGSVTFVDSSVDAIRLIRANLALLDNNLPVHILKQDVRSALLRLGKQKRAFDVIYVDPPYSLENAFLQEVLSYVVQQSLLDPEGILFLENADTQEIIVKGLELRKRRKSGGTFLAEYVLEREA

SEQ ID NO: 95752 - DNA, 540 bp, Streptococcus pneumoniae TIGR4
  CDS (1)..(540): transl_table=11
atgaaaatcgtatcaggaatctatgggggacgtcccctcaagacactagaaggcaagacgacaagacctacttcggataaggttaggggagccatttttaacatgattggtccctactttgaagtgggacgagtcttggacctttatgcaggtagtggtggtttatctatcgaagcagtatcgcgtggcatgtccagtgctgttttggtggagcgagaccgtaaggctcagaccatcgtggctgaaaatatccagatgaccaaggaagttggaaaatttcaactcctcaagatggatgcagaaagggcattggaacaggtatctggggaatttgacctcgttttcttagaccctccctatgccaaggaacaaatcgtagcagatattgaaaaaatggctgagagagagcttttttctgaagatgttatggttgtgtgcgagacggataaagccgttgaacttccagaagaaattgcctgtctgggtatctggaaggaaaagatttatggaattagtaaggtgacagtctatgtcagataa

SEQ ID NO: 95753 - protein, 179 aa, Streptococcus pneumoniae TIGR4
MKIVSGIYGGRPLKTLEGKTTRPTSDKVRGAIFNMIGPYFEVGRVLDLYAGSGGLSIEAVSRGMSSAVLVERDRKAQTIVAENIQMTKEVGKFQLLKMDAERALEQVSGEFDLVFLDPPYAKEQIVADIEKMAERELFSEDVMVVCETDKAVELPEEIACLGIWKEKIYGISKVTVYVR

SEQ ID NO: 95754 - DNA, 561 bp, Chlamydophila pneumoniae AR39
  CDS (1)..(561): transl_table=11
gtgagaattttagcaggtaagtacaaagggaaatccttaaaaacattttctaatccacatatccgacctacttcaggtttagtgaaagaagcgtttttcagtatctgtagggaagatatagaaggggctgcttttttagatctttttgccgggatgggagcgataggttttgaagccctaagtcgtggagctgcttctgtcgtattcgtggacatctctataaaagcaatacaattaatacacacaaatagtgctttactcggagaacaacttcctgtcgtcatctttagacaagatgctcaatcggcaattcaaagacttatcaaacaaaagagatcctttgatctaatctatatagatcctccttacgaactttgtaattgttacgtagaaacccttttacagaagattgtttcgggaaacatcctgaatcctgaagggactctattcctagagaatgcctccgatgaagagattgcttgtgaaggtttgaccctaaggcgaagaagaaaacttgggaaaacatatcttgctgagtatattgtggaaaaggacccttaa

SEQ ID NO: 95755 - protein, 186 aa, Chlamydophila pneumoniae AR39
MRILAGKYKGKSLKTFSNPHIRPTSGLVKEAFFSICREDIEGAAFLDLFAGMGAIGFEALSRGAASVVFVDISIKAIQLIHTNSALLGEQLPVVIFRQDAQSAIQRLIKQKRSFDLIYIDPPYELCNCYVETLLQKIVSGNILNPEGTLFLENASDEEIACEGLTLRRRRKLGKTYLAEYIVEKDP

SEQ ID NO: 95756 - DNA, 555 bp, Nostoc sp. PCC 7120
  CDS (1)..(555): transl_table=11
atgagtctaaaaatttacgggaatcgccagattaaaactttaccagggcaagaaaccagacccaccactgggagggttagggaagctgtttttaatatttggcagggagaaatagaagggtatcgctggctagatttgtgcgccgggaatggttcaatgggtgcagaggctttgtgtcgaggtgctagcttggtggtcggaattgaaaaatcaagccgagcctgtgcaattatccaagagaattggcagcgcatagccaataacgaacaacaatggcgaatattgcgtggagatgtcgttcagcagttaaaaaacttatcagggcagcaattcgacagaatttattttgatccgccctatgctagtggattatatcagccagtgttagaggcgatcgctcaccatcaattattagatccaagtggggaaatagcgatcgaacataatccccaagggtgggtagatatattaattcctgactgggaaatttgccgccaaaaagtctacggtaacacggcgcttactttttatcgaagcgaggaattaggggcgtag

SEQ ID NO: 95757 - protein, 184 aa, Nostoc sp. PCC 7120
MSLKIYGNRQIKTLPGQETRPTTGRVREAVFNIWQGEIEGYRWLDLCAGNGSMGAEALCRGASLVVGIEKSSRACAIIQENWQRIANNEQQWRILRGDVVQQLKNLSGQQFDRIYFDPPYASGLYQPVLEAIAHHQLLDPSGEIAIEHNPQGWVDILIPDWEICRQKVYGNTALTFYRSEELGA

SEQ ID NO: 95758 - DNA, 549 bp, Thermosynechococcus elongatus BP-1
  CDS (1)..(549): transl_table=11
atgcctttgcgaatttcgggccagcgatcgctcaaaacccttcccggtcaccgtacccgtcccacaagtgccaaagttcgccaagcgattttcaatatctggcagggtcgcctacagggatgttgctggctagatttatgtgctggtaccggtgcaatgggagcggaagccctactgcgcggtgcccagtgggtagtgggtattgagcagtctccccaagcctgccaaatcattcgtgaaaactggtcagcccttgcccaaccccatcagcgcaccctggttttgcggggggatgtgcgccagaagttgcctcaagtcccgatgccgcagtttgacttgatttactttgatcccccctacaatagtgatttatatctacccgttctccagttgctttggcaggaggagcgtctcaatcctaagggggaaattgccgttgagtgtcgcacaaaaaatccacccgatctagaggggattctggcgatcggctggcagcagcaacgcactaaaacctatggcagcacaatggtcatttttctgagccgttag

SEQ ID NO: 95759 - protein, 182 aa, Thermosynechococcus elongatus BP-1
MPLRISGQRSLKTLPGHRTRPTSAKVRQAIFNIWQGRLQGCCWLDLCAGTGAMGAEALLRGAQWVVGIEQSPQACQIIRENWSALAQPHQRTLVLRGDVRQKLPQVPMPQFDLIYFDPPYNSDLYLPVLQLLWQEERLNPKGEIAVECRTKNPPDLEGILAIGWQQQRTKTYGSTMVIFLSR

SEQ ID NO: 95760 - DNA, 540 bp, Streptococcus agalactiae 2603V/R
  CDS (1)..(540): transl_table=11
atgagagtagtagcaggaacatttggagggcgtcctttaaaaacgcttgatggaaaaacaactcgtccaacaactgataaggttaaaggcgctatttttaatatgattggtcctttttttgaaggtggtcgtgttttagaccttttttctggcagtggtagcttagctattgaggcgatctcaaggggaatggaccaagctgtcctagttgaaaaagataggcgtgcgcaggtcgttattcaagaaaatattgcaatgactaagagtccggagcaatttcaattattaaaaatggaagccaaccgtgctttagaacaattaacgggacaatttgatttggtcttgttggacccgccatatgctaaggaagaaattgtaaagcaaatccaaatcatggatagcaagggtttattaggcgatgatatcatgattgcttgtgaaacggacaaatcagttgatttacctgaagaaattgcttcttttgggatatggaaacagaaaatttatggcatttctaaagtaacggtctacgttcgttag

SEQ ID NO: 95761 - protein, 179 aa, Streptococcus agalactiae 2603V/R
MRVVAGTFGGRPLKTLDGKTTRPTTDKVKGAIFNMIGPFFEGGRVLDLFSGSGSLAIEAISRGMDQAVLVEKDRRAQVVIQENIAMTKSPEQFQLLKMEANRALEQLTGQFDLVLLDPPYAKEEIVKQIQIMDSKGLLGDDIMIACETDKSVDLPEEIASFGIWKQKIYGISKVTVYVR

SEQ ID NO: 95762 - DNA, 753 bp, Streptococcus agalactiae NEM316
  CDS (1)..(753): transl_table=11
atggtgtcagcgctacttaagtttgattttagcgttgtaaggcataatatggctattaaacttaataataattttttaatcattatgggaacctcgtttctcttactgctagcttatcatatcaaaaaagaaggaaaagaggtactatcttctctgtttgttataagcaatttttttgataactctaccttattttttgttataatagtggttatgagagtagtagcaggaacatttggagggcgtcctttaaaaacgcttgatggaaaaacaactcgtccaacaactgacaaggttaaaggcgctatttttaatatgattggtcctttttttgaaggtggtcgtgttttagaccttttttctggcagtggtagcttagctattgaggcgatctcaaggggaatggaccaagctgtcctagttgaaaaagacaggcgtgcgcaggtcgttattcaagaaaatattgcaatgactaagagtccggagcaatttcaattattaaaaatggaagccaaccgtgctttagaacaattaacgggacaatttgatttggtcttgttggacccgccatatgctaaggaagaaattgtaaagcaaatccaaatcatggatagcaagggtttattaggcgatgatatcatgattgtttgtgaaacggacaaatcagttgatttacctgaagaaattgcttcttttgggatatggaaacagaaaatttatggcatttctaaagtaacggtctacgttcgttag

SEQ ID NO: 95763 - protein, 250 aa, Streptococcus agalactiae NEM316
MVSALLKFDFSVVRHNMAIKLNNNFLIIMGTSFLLLLAYHIKKEGKEVLSSLFVISNFFDNSTLFFVIIVVMRVVAGTFGGRPLKTLDGKTTRPTTDKVKGAIFNMIGPFFEGGRVLDLFSGSGSLAIEAISRGMDQAVLVEKDRRAQVVIQENIAMTKSPEQFQLLKMEANRALEQLTGQFDLVLLDPPYAKEEIVKQIQIMDSKGLLGDDIMIVCETDKSVDLPEEIASFGIWKQKIYGISKVTVYVR

SEQ ID NO: 95764 - DNA, 603 bp, Pseudomonas putida KT2440
  CDS (1)..(603): transl_table=11
atgccaagatccacccctcccgcccgcccgcaagcgggccaaagcaagggccagggccacctgcgcatcatcgccggcgaatggcgcagccgccgcctggcggtgccggaaggcgaaggcctgcggccaacgcctgaccgcgtgcgggaaaccgtattcaactggctggccccctacatcgagggcgcccgcgtgctggacgccttcaccggtagtggtgccctggtgctcgaagccctgtcccgtggggccgaggacgccgtggcgctggacagcaaccctgcggccatcgccaacctgaagaacaacctcgaaatcctgcgctgccctcgcgggcaaatcctgcaaaccgacgccctgcgctacctgcaaggcccggccaagcagcagttcgatgtcgtgttcctcgacccgccgttccatcaggacctgctggccaacacctgcaacatgctggagcagaatcagtggctgggcgagcaggcatgggtctacaccgaaagcgaagcggcaccctcgaccttgcagctgccgggcaactggcgcctgcaccgcgagaagaagaccggccaggtgcactacgcactctggcagcggggctga

SEQ ID NO: 95765 - protein, 200 aa, Pseudomonas putida KT2440
MPRSTPPARPQAGQSKGQGHLRIIAGEWRSRRLAVPEGEGLRPTPDRVRETVFNWLAPYIEGARVLDAFTGSGALVLEALSRGAEDAVALDSNPAAIANLKNNLEILRCPRGQILQTDALRYLQGPAKQQFDVVFLDPPFHQDLLANTCNMLEQNQWLGEQAWVYTESEAAPSTLQLPGNWRLHREKKTGQVHYALWQRG

SEQ ID NO: 95766 - DNA, 558 bp, Bradyrhizobium japonicum USDA 110
  CDS (1)..(558): transl_table=11
ttgcgcgtcgtcggcggtcgcttgaaggggcgtaatctcgcctcaccgtcctcgcgcgacatccgccccacggcggaccgcctgcgcgagtccgtgttcaacatcctcgtgcacgcctatgacgatccgatcgaggacgcgcgcgtgctcgatctcttcgcgggcaccggcgcgctcggcatcgaggcgtcttcgcgcggcgcgaagttcgtgctgttcgtcgacaacggtgcggaggcgcgggcgttgttgcgcaacaatgtagaatcgctcggcctcggcggggtgacaaaagtctatcgccgcgatgcgaccgatctcggcccggcgcatcccgtcgagccgttctcgctggtgttcctcgatccgccctatggcaggggacttgcggagaaggcgcttgtgagcttgcgcgacggcggctggctgacaccgggcgcgctgctggtggtggaagaggccaaggccgcgcagtttacggcgcctgaaggtttcgaggagctggagcggcgcgcctatgacgacacggagttcgtgtttttgaagcgcaacgcttaa

SEQ ID NO: 95767 - protein, 185 aa, Bradyrhizobium japonicum USDA 110
MRVVGGRLKGRNLASPSSRDIRPTADRLRESVFNILVHAYDDPIEDARVLDLFAGTGALGIEASSRGAKFVLFVDNGAEARALLRNNVESLGLGGVTKVYRRDATDLGPAHPVEPFSLVFLDPPYGRGLAEKALVSLRDGGWLTPGALLVVEEAKAAQFTAPEGFEELERRAYDDTEFVFLKRNA

SEQ ID NO: 95768 - DNA, 564 bp, Lactobacillus plantarum WCFS1
  CDS (1)..(564): transl_table=11
atgcgaattgtagcaggagactttggtggtcggcggctcaaagccgtgccaggcatgcaaactcggccgacgacggacaaggttaaagaagctgtttttaatattattggcccctatttcgatggtgggcagtccctagacttatttgctgggagcggtggcttgagtatcgaagctgtatcacgcggagtggctcgggccgtcttgattgatcggcagtatcaagccatcaagacgatcaaggataacattgccgttacaaaggtccccgaacgatttgaagttatcaaaggcgatgctgagcgtattttggaccgattagcatcccaagatgaacactttgattgggtgtttttagacccaccctatgccaagcaacagattgtgaaggatattcagcattgtgatgcactaggattgctgaatccgggttgccgggtcatttgtgagacggatacgaatgcgaacttgccaacggtcttacccggatttgaattgatcagacaacaagattacggtattacggtcattaccatttaccaaaaagtaacggaggtcgggtaa

SEQ ID NO: 95769 - protein, 187 aa, Lactobacillus plantarum WCFS1
MRIVAGDFGGRRLKAVPGMQTRPTTDKVKEAVFNIIGPYFDGGQSLDLFAGSGGLSIEAVSRGVARAVLIDRQYQAIKTIKDNIAVTKVPERFEVIKGDAERILDRLASQDEHFDWVFLDPPYAKQQIVKDIQHCDALGLLNPGCRVICETDTNANLPTVLPGFELIRQQDYGITVITIYQKVTEVG

SEQ ID NO: 95770 - DNA, 555 bp, Enterococcus faecalis V583
  CDS (1)..(555): transl_table=11
atgcgtgttatttctggagaatatggtggccggcgcttgaaagcgttagatggcgacaatactaggcccacaacagataaagtaaaagaatctatttttaatatgattggtccatatttcgatggcggaatggcgctggatttatattcaggaagtggcgggttagcgattgaagccgtttctcgtggaatggacaaaagtatttgtattgaaaagaattttgctgcactaaaagtaattaaagaaaatattgcgattacaaaagaaccagaaaaatttgaagttagaaaaatggatgctaatcgtgccttagaacagttttatgaagagaagttacaatttgatttggtcttattggatccgccctatgccaaacaagaaattgtttcacaattagaaaagatgttagaacggcagttattaacaaacgaagccgttatcgtttgtgaaacagataaaactgtcaaattaccggaaacgattggtacactaaaaaaaacaagagaaaccgtttacggaatcactcaagtaacgatttatcgtcaggaggcgtaa

SEQ ID NO: 95771 - protein, 184 aa, Enterococcus faecalis V583
MRVISGEYGGRRLKALDGDNTRPTTDKVKESIFNMIGPYFDGGMALDLYSGSGGLAIEAVSRGMDKSICIEKNFAALKVIKENIAITKEPEKFEVRKMDANRALEQFYEEKLQFDLVLLDPPYAKQEIVSQLEKMLERQLLTNEAVIVCETDKTVKLPETIGTLKKTRETVYGITQVTIYRQEA

SEQ ID NO: 95772 - DNA, 570 bp, Chlamydophila caviae GPIC
  CDS (1)..(570): transl_table=11
gtgaaaattcttgcaggcaaatataaagggaagtctttaaaaattttttctaacccttcagtgcgtcctacgtgtggggtagtcaaagaggctgtttttaatatttgcgcggcttatattgaggatgccacatttttagatctcttttctggagtaggatccgtaggttttgaagctttaagccgaggagcttcttcagtgactttcgtagattcctctgcacaatctgtacgtttaattcgggcaaatagccaattattgcatccagatttgccagttaccattatgaaacaagaagcaagatccgcgattcagagactgactaaaaaaggtatgtccttcgatcttatttacatagatcctccctataatcttgaaaatcgctatcttgcagcagtattaagcgatatcgttttcggcaagattttggataaggaaggcttactatttttagaaaatgcttcagtagaacctattcttgttgaaggcttagtcttgaagcgtagaagaaaattagggggaacatttttatcggaatatatccttgacgatagttcgtgttcgctttaa

SEQ ID NO: 95773 - protein, 189 aa, Chlamydophila caviae GPIC
MKILAGKYKGKSLKIFSNPSVRPTCGVVKEAVFNICAAYIEDATFLDLFSGVGSVGFEALSRGASSVTFVDSSAQSVRLIRANSQLLHPDLPVTIMKQEARSAIQRLTKKGMSFDLIYIDPPYNLENRYLAAVLSDIVFGKILDKEGLLFLENASVEPILVEGLVLKRRRKLGGTFLSEYILDDSSCSL

SEQ ID NO: 95774 - DNA, 603 bp, Prochlorococcus marinus subsp. marinus str. CCMP1375
  CDS (1)..(603): transl_table=11
ttgaaaagtcagcttcgtttaataggtggcagaaaacttaaaagtcccattggtgatttagttaggcctactacagctcgagttagggaagccctaatgaatatccttaaagaagatattgagaactccaactggctagatctttatagtggtagtggtgcaattgggtgtgaagcaattcaacgaggagcaaatactgttgttgcaatagaacaaaataaaaaaatatatcaactatgtgaaaataatctttcagttgtttccaaagccaataaaaaagaagtatctgttcaagtgataaattccgacgttaataaatttctcaaaagtggttttaaaaactacattcaaaaatcacctaagaaattacattcaaaagatttttattttgattatatttatatagatcccccttacaaaaaagatccttattattatattttagaaaatcttcttttaggtaattgggttgtcagtaaatgcctagcaatctgtgagttttctttagaaaagggcatagatgtcccgcccagatggattactaaagatcagaaaagctatgggagcactggattactttttctcactcccaatctgggatag

SEQ ID NO: 95775 - protein, 200 aa, Prochlorococcus marinus subsp. marinus str. CCMP1375
MKSQLRLIGGRKLKSPIGDLVRPTTARVREALMNILKEDIENSNWLDLYSGSGAIGCEAIQRGANTVVAIEQNKKIYQLCENNLSVVSKANKKEVSVQVINSDVNKFLKSGFKNYIQKSPKKLHSKDFYFDYIYIDPPYKKDPYYYILENLLLGNWVVSKCLAICEFSLEKGIDVPPRWITKDQKSYGSTGLLFLTPNLG

SEQ ID NO: 95776 - DNA, 603 bp, Synechococcus sp. WH 8102
  CDS (1)..(603): transl_table=11
ttgcgcctgatcagtggccgacgactgctcagcccccgtggaagcggaactagaccgacaacatcccgcgtgcgggaagcggtgatgaacattgttcgtccacggttgctggactgccgctggctggacctctgtagtggaagtggcgtcatggcctgcgaggcaatcgaacgcggggctcgttcggtgaccgctgtggaaaaagacccgcgctgcgccagcatctgcgaacgcaatctcatggaagttgcccagtcaggctcaaggcgtgccgacgtgaccgtcgtgaaacgcgacctgatgatctggcttcaacaggactggagacaggaggggtttgatttgatttatttcgatcctccctatgacggagggctttactcaaaaacactctcactcctggcaaaccaggaatggctccgacctgatggtttattgatctgtgaacatccttccgatcaaccacttgatccgggggggcaatggaccgtgatggatcgtcgtcgctacggcagcagttcgctggtgatgatcagccgcccagagcgctgccgccgcgacggtactgattccaggcagccacgaacagacccagaagcgtga

SEQ ID NO: 95777 - protein, 200 aa, Synechococcus sp. WH 8102
MRLISGRRLLSPRGSGTRPTTSRVREAVMNIVRPRLLDCRWLDLCSGSGVMACEAIERGARSVTAVEKDPRCASICERNLMEVAQSGSRRADVTVVKRDLMIWLQQDWRQEGFDLIYFDPPYDGGLYSKTLSLLANQEWLRPDGLLICEHPSDQPLDPGGQWTVMDRRRYGSSSLVMISRPERCRRDGTDSRQPRTDPEA

SEQ ID NO: 95778 - DNA, 555 bp, Chromobacterium violaceum ATCC 12472
  CDS (1)..(555): transl_table=11
atgagtcagacacgtaataaggtcagaatcatcggcggcgactaccgtcgccgcctgttgcccttccccgaggccgaaggcctgcgcccgacgcccgatcgcgtgcgcgagacgctgttcaactggctgggccaggatctgtacggcaagagttgcctggacctgttcgccggcagcggcgcgctcggcttcgaagccgcgtcgcgggcggcccgccgggtggtgatggtggaaaagtcgcgcaaggttcacgaggcgctgcaggccaatcgccgtttgctgcaagccggcgcgatcgacgtggtcgccggcgacgcgctgctgtatttgaagagcagccgcgaatccttcgatgtgatcttcctggatccgccctacgattctgatctgctgcagcaggcgctgccgctggcgctggcgcgcctgtcggaagagggcgtgctttacgtcgaggccaggcagtggccggatgcgttgccggacggcgtggagacgctgcgccgcgacaaggccggcatggtccagtacggcctgctgggccgcagcgcgcagtag

SEQ ID NO: 95779 - protein, 184 aa, Chromobacterium violaceum ATCC 12472
MSQTRNKVRIIGGDYRRRLLPFPEAEGLRPTPDRVRETLFNWLGQDLYGKSCLDLFAGSGALGFEAASRAARRVVMVEKSRKVHEALQANRRLLQAGAIDVVAGDALLYLKSSRESFDVIFLDPPYDSDLLQQALPLALARLSEEGVLYVEARQWPDALPDGVETLRRDKAGMVQYGLLGRSAQ

SEQ ID NO: 95780 - DNA, 573 bp, Gloeobacter violaceus PCC 7421
  CDS (1)..(573): transl_table=11
atgagcctgcgtatctacggcaaccgcttgctgcgcaccccgggcggactcgatacccggcctactttagggcgggtgcgcacggccgtcttcggtcgctggcacggccgggtggaaggctgccattggctcgatctgtgcgccggggcgggcacgatgggggccgaagccctggcgcgcggcgcggcagaggcaatcgggatcgagcaggcggccggggcggcgcgcatcgccgcggccaactgggacaagatcgcccccggcctcgggacgatccacaaaacggacgcgcttaccggtgtcgcccgtctggcaaagcagggccgggtgttcgatctcatctacttcgacccgccttaccgtggggagctttacctgccggtactggaggcggtcgttgcctgcgggttgctggccgacgacggcgaactggctgccgagcacggcgaagatttgccggatttgcccgaggccgtgggttctctggtgcgactcgatcggcgggtctacggcggtacggtggtaagctactacggttttttgggcgcggcggcgagcaactcctgcgggtga

SEQ ID NO: 95781 - protein, 190 aa, Gloeobacter violaceus PCC 7421
MSLRIYGNRLLRTPGGLDTRPTLGRVRTAVFGRWHGRVEGCHWLDLCAGAGTMGAEALARGAAEAIGIEQAAGAARIAAANWDKIAPGLGTIHKTDALTGVARLAKQGRVFDLIYFDPPYRGELYLPVLEAVVACGLLADDGELAAEHGEDLPDLPEAVGSLVRLDRRVYGGTVVSYYGFLGAAASNSCG

SEQ ID NO: 95782 - DNA, 555 bp, Clostridium difficile 630
  CDS (1)..(555): transl_table=11
ttgagagtaatttcaggaaaagcgagaggattaaaactaaatactccaaaaaatgaagatgtaaggccaactacagatagagtaaaagagtctctatttaatatgataaattcatatataatggaaagtgaagttctggatttatttgctgggactggttctttaggaatagagtgcttatctaggggtgccaagtcatgtacttttgtagatatcagtaaggaaagcatagatattgttaagtccaatataaaaaaggcaagagttgaaagtgaaagtattattttaaaccttgattttaagactgcaatagataaacttaaattacaaaatagtaaatttgacataatttttatggaccctccgtattataaaaatatgtttatagaagctattgaaaaaattgataattctaatctattgaacgaagatggaataatagttgtagaacatgatacgaatgatttatttccagataagatatgtaaattggagaaaactagagataagaaatatggaaatactacattaactttttataagatggaggcataa

SEQ ID NO: 95783 - protein, 184 aa, Clostridium difficile 630
MRVISGKARGLKLNTPKNEDVRPTTDRVKESLFNMINSYIMESEVLDLFAGTGSLGIECLSRGAKSCTFVDISKESIDIVKSNIKKARVESESIILNLDFKTAIDKLKLQNSKFDIIFMDPPYYKNMFIEAIEKIDNSNLLNEDGIIVVEHDTNDLFPDKICKLEKTRDKKYGNTTLTFYKMEA

SEQ ID NO: 95784 - DNA, 597 bp, Candidatus Protochlamydia amoebophila UWE25
  CDS (1)..(597): transl_table=11
atgttgagtgattcctttatgtatatcattacaggactatatcgccataaacgcttagtaactcctaaagacgatttaacacgtccaacagctagtcgcttaagagaagctctttttaacatttgtcaaaactttattgaagaagcagcatttcttgatttatttgctggatcaggagcgataggatttgaagctttaagtcgaggagccaaatcagcaacctttattgattccagcaaagaagccttaaaatgtcagcaaaaaaatgcctctcttttaggagtcgaacaacaatgtcaactattatatggagaagtatttactcttttagaatacctcaaaaaacaacaaaaacgttttaatatcatttttgccgatcctccctatgctaaacaggtctatgcaaatgagccttcttatagcgagaaaattatccgttgcatcgatacaagtgacttactagcagaaaaaggaactctttttattgaagaagacagtcgtttttcccctcaattgaacgatttaaaaaaacttcaactcattaatagcagaaaaatagggcattcttctctacaacgttattcattcataaactag

SEQ ID NO: 95785 - protein, 198 aa, Candidatus Protochlamydia amoebophila UWE25
MLSDSFMYIITGLYRHKRLVTPKDDLTRPTASRLREALFNICQNFIEEAAFLDLFAGSGAIGFEALSRGAKSATFIDSSKEALKCQQKNASLLGVEQQCQLLYGEVFTLLEYLKKQQKRFNIIFADPPYAKQVYANEPSYSEKIIRCIDTSDLLAEKGTLFIEEDSRFSPQLNDLKKLQLINSRKIGHSSLQRYSFIN

SEQ ID NO: 95786 - DNA, 573 bp, Desulfovibrio vulgaris subsp. vulgaris str. Hildenborough
  CDS (1)..(573): transl_table=11
atgcgtatcatcgcgggtgcctatggcgggcgccttctcaagacggtagaggggccgggctacagaccggccatgtcgcgggtgcgcgaatcgttgttctcgatgctctcgtcccgtggtgtggtgtgggctggcagccgggttctcgacctgttcgccggaagcggaagtctggccttcgaggccttgagtcgtggcgctgatgaggcgtggttcgtggaactcaacgcgaaggcggcggcgtgcatcgagaagaacgccacctcgctgggcatcgaaccgcaacgctggcgagtgctcgccgaggacatcacgaaagtgctcggcaggcgggccgctgcgccgttcgatgtggtcttcatagaccccccctatggcgaggggcggctcgcgccgaccatcagactcatgatgcgcagccgctggctggccccggaaggggtcgtcgtcgcagaggtggaggcggggctggcgttcgacgccgaaaccgtccacgacggtcttgaggtcatcgccgacagaacctacggacagacgaggatcgtcatatggacgacgaaagaggcaagctag

SEQ ID NO: 95787 - protein, 190 aa, Desulfovibrio vulgaris subsp. vulgaris str. Hildenborough
MRIIAGAYGGRLLKTVEGPGYRPAMSRVRESLFSMLSSRGVVWAGSRVLDLFAGSGSLAFEALSRGADEAWFVELNAKAAACIEKNATSLGIEPQRWRVLAEDITKVLGRRAAAPFDVVFIDPPYGEGRLAPTIRLMMRSRWLAPEGVVVAEVEAGLAFDAETVHDGLEVIADRTYGQTRIVIWTTKEAS

SEQ ID NO: 95788 - DNA, 543 bp, Staphylococcus aureus subsp. aureus MSSA476
  CDS (1)..(543): transl_table=11
atgcgcgtcattgcaggtaaacataaaagtaaagctttagaaagtatggaaggccgtaatacgagaccaactatggataaagttaaagaaggtatctttaatagtttatatgatgtgtcaggtataggtttagatttatttgcaggaagtggggcgcttggaatagaagcactctctcgaggtatggataaggtaatctttgttgatcaaaattttaaagctgtaaaagttattaaatcaaatcttgcgaatttggatttagaggcacaatctgaagtttataaaaataatgcagatagagctttaaaagcattgtcaaaacgggatattcaatttgatgtcattttcttagatccaccttataataaaggtctcattgataaagctttaaaactaatttcagagtttaatttattgaaagaaaatggtatcatcgtttgtgaatttagcaatcatgaagaaatagactatcaaccgtttaatatgattaaacgttaccattatgggttgacagacacattgttattagaaaagggagaatag

SEQ ID NO: 95789 - protein, 180 aa, Staphylococcus aureus subsp. aureus MSSA476
MRVIAGKHKSKALESMEGRNTRPTMDKVKEGIFNSLYDVSGIGLDLFAGSGALGIEALSRGMDKVIFVDQNFKAVKVIKSNLANLDLEAQSEVYKNNADRALKALSKRDIQFDVIFLDPPYNKGLIDKALKLISEFNLLKENGIIVCEFSNHEEIDYQPFNMIKRYHYGLTDTLLLEKGE

SEQ ID NO: 95790 - DNA, 579 bp, Symbiobacterium thermophilum IAM 14863
  CDS (1)..(579): transl_table=11
gtgcgtgtcatcacaggatcggcgaagggccggccgctgaagaccgtcaagagccgcgccgtccggcccaccagcgaccgggtgaaggagtcgctgtttaacatcatcgggtcccgggtggtggatgcggacttcctggacctgtttgccggatcgggcgctgtgggcatcgaggcgctgagccgcggcgcccgtgcctgcgtgtttgtcgaattgcagaccgcccacctgaaggtggtggcggacaacctgaggacgacaggactggccgggcgggcggagctgatccgccgggacgcccgcgccgctctggtcgatctggcccaccgcggccgccggttcgacttcatcttcgtcgatccgccctatgggcaggacctggtgccggcggtgctggcgctgatcgatggtcacggcgtgctggccgaggacggctgggtgatctgcgagcaccacgccaaggacccggtcccggcggcagcaggaggtctgtatcggttcagggaagtactgtttggtgaaacgatgctatccatctatcgggctgacgcccgtgatgccggggggcagaattcgtga

SEQ ID NO: 95791 - protein, 192 aa, Symbiobacterium thermophilum IAM 14863
MRVITGSAKGRPLKTVKSRAVRPTSDRVKESLFNIIGSRVVDADFLDLFAGSGAVGIEALSRGARACVFVELQTAHLKVVADNLRTTGLAGRAELIRRDARAALVDLAHRGRRFDFIFVDPPYGQDLVPAVLALIDGHGVLAEDGWVICEHHAKDPVPAAAGGLYRFREVLFGETMLSIYRADARDAGGQNS

SEQ ID NO: 95792 - DNA, 567 bp, Bacillus licheniformis ATCC 14580
  CDS (1)..(567): transl_table=11
atgagagtgatttctgggacgtataagggacgtgccttaaaggcggttcccggcacgtcgacaaggccgacgaccgataaagtaaaggaatccatctttaatatggtcggcccgtattttgaaggcggcaccggccttgatctgtacgcgggaagcggcggattgggcattgaagcgctgtcgcggggatttgaccgcttcatttttgtcgaccgggattttaaagcgattcaaaccgtgaaaggaaatttgaaaacgctgggcttagaaaagtgcgccgaagtgtacagaaatgacgcagaacgggctctgcatgcactggtgaaaaggggcgcaagctttgatgccgtctttttggacccgccatatcgagagcaaaagctggaagcgcttttatcgatcattgatgaagcggatatgctgactgaaagagggtttattgtggctgagcatgcgaaggaagtcatgctgccggatgcggcgggcggacttcagcttgcccggcaggaaatatacggcttaacaggcgtgaccatatacagaaagagagggaatggggatggctag

SEQ ID NO: 95793 - protein, 188 aa, Bacillus licheniformis ATCC 14580
MRVISGTYKGRALKAVPGTSTRPTTDKVKESIFNMVGPYFEGGTGLDLYAGSGGLGIEALSRGFDRFIFVDRDFKAIQTVKGNLKTLGLEKCAEVYRNDAERALHALVKRGASFDAVFLDPPYREQKLEALLSIIDEADMLTERGFIVAEHAKEVMLPDAAGGLQLARQEIYGLTGVTIYRKRGNGDG

SEQ ID NO: 95794 - DNA, 552 bp, Bacillus clausii KSM-K16
  CDS (1)..(552): transl_table=11
atgagggttattgccggtgaagcacggggcttacagttaaaagctgttcctggaaaaacaacacggccgacgacagataaagtaaaagaagcgatgttcaatatcattggcccttattttgatggagggaaggcgttagacctttatgcaggtagcggtgctttagggatcgaggcgctgagcagggggatggaatcatgcatttttgttgaccagaacaagcaagcaattgcaacaatccacgctaatttaagccgtaccggctatacagataaagcagaagtataccgcaacgatagcttgcgcgctttaaaagcagtcggtaaacgagatgtcgcctttgagctgattttgttagatcccccgtatgccaagcaacaaatcgcgacgatttttggcttgattgacgactaccatttgcttgcaccagcaggcgtaacagtttgtgaaacagcgctacatatacagttgccagacacagcagggcctttaataaaagagcgggaagaatgctatggcgatacaaaactaacggtttacaagaagggttga

SEQ ID NO: 95795 - protein, 183 aa, Bacillus clausii KSM-K16
MRVIAGEARGLQLKAVPGKTTRPTTDKVKEAMFNIIGPYFDGGKALDLYAGSGALGIEALSRGMESCIFVDQNKQAIATIHANLSRTGYTDKAEVYRNDSLRALKAVGKRDVAFELILLDPPYAKQQIATIFGLIDDYHLLAPAGVTVCETALHIQLPDTAGPLIKEREECYGDTKLTVYKKG

SEQ ID NO: 95796 - DNA, 543 bp, Staphylococcus epidermidis RP62A
  CDS (1)..(543): transl_table=11
atgcgtgtaattgcgggtaagcataaaagtaaagcgctagaaagtttagaggggcgaaatactcgtccaactatggataaagttaaagaaggtatttttaatagtttatatgatgtttctggtttaggattagacttatttgccggtagtggtgcacttggcattgaagcattatcccgtggtatggataaaatgatttttgtagatcaaaattttaaagcggtcaaggttataaaagctaatcttaatcaattagatttaatgtcacaagctgaagtctataaaaataatgctgacagagcacttaaagcacttgctaaacgagaaatacaattcgatgttatctttttagacccaccttataataaagggcttataaatgaggcgatttctcgtatagcagagtttaacttattaaaagaaaatggtattatcgtttgtgagtttagtcataatgaagaaataacaattgcgccatttcaaatgattaagcgttatcattatggtttgacagatactttgttacttgaaaaaggagaataa

SEQ ID NO: 95797 - protein, 180 aa, Staphylococcus epidermidis RP62A
MRVIAGKHKSKALESLEGRNTRPTMDKVKEGIFNSLYDVSGLGLDLFAGSGALGIEALSRGMDKMIFVDQNFKAVKVIKANLNQLDLMSQAEVYKNNADRALKALAKREIQFDVIFLDPPYNKGLINEAISRIAEFNLLKENGIIVCEFSHNEEITIAPFQMIKRYHYGLTDTLLLEKGE

SEQ ID NO: 95798 - DNA, 645 bp, Ralstonia eutropha JMP134
  CDS (1)..(645): transl_table=11
atgaattcgcgtacccgatctccatcgcccgccgcgagcgggcgatcgtcttctccggcgccgcgccaggcgccgtcccaggtccgtatcatcggtggccgctggaagcgcacgttgctgcccgtccccgacgcgcaaggcttgcggccgacgcccgaccgcgtgcgggaaaccctgtttaactggctgggccaggacttggccgggttgtattgcctggacctgtttgcgggctcgggcgcactcggtttcgaagcggcctcccgcggtgccgaagccgtcacgctggtggaattcaacccgcgtgtcgccaagcagttgcgcgacaaccaataccggctcgatgccgcgcacattcgcgtcgtgcagggtgatgccttcgcgattgccgcgcagatgccggatgccagcttcgacgtgatttttttggatccgccgttcgccgaagactggctgcggcccgcccttgagcacgccgcgcggctgctgcgccctggcggcgcggtgtacgtggagacggatcgttccctgactggtgccgatgcaccggtgcctgcgtcgctggagatcgtccgccaggcgcgggccggtgcggtgcacttccatctcctgcagcaccgcggcgccgaggggggcgctgcgtaa

SEQ ID NO: 95799 - protein, 214 aa, Ralstonia eutropha JMP134
MNSRTRSPSPAASGRSSSPAPRQAPSQVRIIGGRWKRTLLPVPDAQGLRPTPDRVRETLFNWLGQDLAGLYCLDLFAGSGALGFEAASRGAEAVTLVEFNPRVAKQLRDNQYRLDAAHIRVVQGDAFAIAAQMPDASFDVIFLDPPFAEDWLRPALEHAARLLRPGGAVYVETDRSLTGADAPVPASLEIVRQARAGAVHFHLLQHRGAEGGAA

SEQ ID NO: 95800 - DNA, 573 bp, Thiobacillus denitrificans ATCC 25259
  CDS (1)..(573): transl_table=11
gtgctcgctaagcaggccgcgccgaagcgcgcgcacggcgccgccaatcgcgtccgcatcgtcggcggacgctatcgcagccggctgctcgcgtttcccgacggcaccggcttgcgaccaacgcccgaccgcgtgcgcgaaaccctgttcaactggctgggacaggatctggcgggctggcgctgcgtcgacctgttcgccggcagcggcgcgctcggtttcgaagccgcttcgcgcggcgccgcgcgtgtgctgatgatcgagcgcgacgcgaacgcggtcgccgcgttggagaagaaccgcggcgcgctcggcgccgcggtcgacatcgtccgcgccgacgcgctcgcctggctcggtggcaaccgcgaaaccttcgatctcgccttcgtcgatccgcccttcgacagcgacatggcggcgttggcgctcgccggccttgcgccgcatatcgcatcgggcggatacgtctacgtcgagcagggggcggagacggccgttccgccggggttcgtcgtccaccgcagcgggcgcgccggacgttcgcatttcgcgctgctcatgaaggaatag

SEQ ID NO: 95801 - protein, 190 aa, Thiobacillus denitrificans ATCC 25259
MLAKQAAPKRAHGAANRVRIVGGRYRSRLLAFPDGTGLRPTPDRVRETLFNWLGQDLAGWRCVDLFAGSGALGFEAASRGAARVLMIERDANAVAALEKNRGALGAAVDIVRADALAWLGGNRETFDLAFVDPPFDSDMAALALAGLAPHIASGGYVYVEQGAETAVPPGFVVHRSGRAGRSHFALLMKE

SEQ ID NO: 95802 - DNA, 555 bp, Anabaena variabilis ATCC 29413
  CDS (1)..(555): transl_table=11
atgagtctaaaaatttacgggaatcgccaaattaaaactttaccagggcaagaaaccagacccaccactgggagggtgagggaagctgtttttaatatttggcagggagaaatagaagggtgtcgctggctagatttgtgcgccggtaacggttcaatgggtgcagaggctttgtgtcgaggtgctagcttggtggtcggaattgaaaaatcaagccgagcctgtgcaattatccaagaaaactggcagcgcatagccaataacgaacaaaaatggcgagtattgcgcggagatgtccttcagcaattaaaaaacttatcagggcagcaattcgacagaatttattttgacccaccctatgctagtggattatatcagccagtgctagaggcgatcgctctttatcaattattagatccaagtggggaaatagcgatcgaacataatccccaaggatgggtagatatattaattcctaactgggaaatttgccgccagaaagtctacggtaacacggcgcttactttttatcgcagcgaggaattaggggggtag

SEQ ID NO: 95803 - protein, 184 aa, Anabaena variabilis ATCC 29413
MSLKIYGNRQIKTLPGQETRPTTGRVREAVFNIWQGEIEGCRWLDLCAGNGSMGAEALCRGASLVVGIEKSSRACAIIQENWQRIANNEQKWRVLRGDVLQQLKNLSGQQFDRIYFDPPYASGLYQPVLEAIALYQLLDPSGEIAIEHNPQGWVDILIPNWEICRQKVYGNTALTFYRSEELGG

SEQ ID NO: 95804 - DNA, 621 bp, Synechococcus sp. CC9605
  CDS (1)..(621): transl_table=11
atgagcggtggcgggcaactgcgccttagcggggggcgacggctgctgagccccgggggtcgcacggctcggcccaccacctctagggtgcgggaagcggtgatgaatatcctcgccccgcacctgcaggactgccgctggctcgacctctgcagcggcagcggcgtgatgggctgtgaggccctgcaacggggggcacgctgtgtggtggccgttgatctagacccgcaatgcatccgcgtgagccgcatcaacctcagtgcagtggcggcaagccgttcaccggctcctgaaatccgcactgaacggcgggaactgatcacatggctacgcaaggactggaaccaggagcccttcgacatcgtttatttcgaccctccctacgaccagggcctctacgaaccctgcttgatcgccctcgccgaggggaattggcttcaccaggattctctggtggtgtgtgaacatcgctccaacctgaatccagaaccgggctcaggttggacggtggtggatcaacgccgctacggcatcagcagcgtgatgatgctcagccccccagagcgctgccaccacggcggtactgattccatgccgccacgaacagacccaaaagtgtga

SEQ ID NO: 95805 - protein, 206 aa, Synechococcus sp. CC9605
MSGGGQLRLSGGRRLLSPGGRTARPTTSRVREAVMNILAPHLQDCRWLDLCSGSGVMGCEALQRGARCVVAVDLDPQCIRVSRINLSAVAASRSPAPEIRTERRELITWLRKDWNQEPFDIVYFDPPYDQGLYEPCLIALAEGNWLHQDSLVVCEHRSNLNPEPGSGWTVVDQRRYGISSVMMLSPPERCHHGGTDSMPPRTDPKV

SEQ ID NO: 95806 - DNA, 570 bp, Desulfovibrio desulfuricans G20
  CDS (1)..(570): transl_table=11
atgaaaataataagcggagagtacggcggacgtactctgaaaacaacagtcggccccggttaccggccagccatggcaaaagtacgcaaggcccttttctccatgctggaggcacggggagtgcactggtcagaatgccgggtgctggatctttttgccggaagcggcagctgcggatttgaagccttaagtcgcggggcggctgaagggtggtttgtggaaagcaatcctgcggcggtcaaggttatccgcagcaatgcggagctgctgaaagtggaagccgcccgctggcaggtatttcatgaagatgtgagcaagttcctgagggttgcccctgcgcgcgcctttgatgttgtcttcatcgacccgccttatggcaaaaactttgtttctccggcggccaccgctctgctgcgcaaccgctggcttgctcctgaagccatgatcgtggcggaagctgaggccgcagtatcagaactgccggaagtcgacagccgtcttgaacttctggtcaacagaacttacggacagacaaggattctcatatggggtcaactgacggaaaaatag

SEQ ID NO: 95807 - protein, 189 aa, Desulfovibrio desulfuricans G20
MKIISGEYGGRTLKTTVGPGYRPAMAKVRKALFSMLEARGVHWSECRVLDLFAGSGSCGFEALSRGAAEGWFVESNPAAVKVIRSNAELLKVEAARWQVFHEDVSKFLRVAPARAFDVVFIDPPYGKNFVSPAATALLRNRWLAPEAMIVAEAEAAVSELPEVDSRLELLVNRTYGQTRILIWGQLTEK

SEQ ID NO: 95808 - DNA, 555 bp, Synechococcus elongatus PCC 7942
  CDS (1)..(555): transl_table=11
atgagcatccgtctttcgggccggcgatcgctgcaaacccctgcaggtttgggaacccgaccgaccccttcccgggtacgcaacgctatcttcaacgtctggcaatttgcagttcctgactgccgttggctcgatctctgtgccggcagcggcgctatgggtggcgaggcactcctccgaggggccagcgtggtgtggggcattgagcagtctgcccaggcctgtcgggcgatcgcccagaactggcagaaattacaggcgcctgatcaagaagtacggctgttaaaaggggagatctgtcgcctgctggctagtctggatgccccagcctttgacttgatctacttcgacccgccctacgacggtgatctgtacgaacccgtcctggctctcttagcggagcgatcgctcttgcacgagcagggagagattgctgttgagcatcgtcccgatcgggcgatcgcccttcctcccaattttgaactcaagcaatgccgtcgctacggcagtacggcagtcagcctgatcacttgggctgttccccagaaggactaa

SEQ ID NO: 95809 - protein, 184 aa, Synechococcus elongatus PCC 7942
MSIRLSGRRSLQTPAGLGTRPTPSRVRNAIFNVWQFAVPDCRWLDLCAGSGAMGGEALLRGASVVWGIEQSAQACRAIAQNWQKLQAPDQEVRLLKGEICRLLASLDAPAFDLIYFDPPYDGDLYEPVLALLAERSLLHEQGEIAVEHRPDRAIALPPNFELKQCRRYGSTAVSLITWAVPQKD

SEQ ID NO: 95810 - DNA, 579 bp, Moorella thermoacetica ATCC 39073
  CDS (1)..(579): transl_table=11
atgttacggattatagccggcgaggcccgtggccgccgtttagggacgcccaggggccggaccaccaggcctacgagtgaccgggtacgggaagccctgtttaatatcctcggcaatcgggttattgacagcctgttcctggatctttttgccggttcgggggccgtggggctggaggccttgagccggggcgcccgtagggtcgtttttgtcgaaaataatcgccaggccttaaaatgcctcacggcaaatataaaggctaccggcctggagggcagggggcaggtgatggctcttgacgccaggcgggctctcgttaccctggccaggcgcagggagacctttgacctgatttttagcgaccccccctatcgccagggatggggggagttgattctgccggcagtcatccccgtcctggctcccggcggcctggttattctggaaacggcagttaccgaagccggaccggccataaccggtctggaaataattgcagttaggatttacggtgatacagctttaaatttttacaaaagggcaggagggctggctgttggagtttatgactctgattga

SEQ ID NO: 95811 - protein, 192 aa, Moorella thermoacetica ATCC 39073
MLRIIAGEARGRRLGTPRGRTTRPTSDRVREALFNILGNRVIDSLFLDLFAGSGAVGLEALSRGARRVVFVENNRQALKCLTANIKATGLEGRGQVMALDARRALVTLARRRETFDLIFSDPPYRQGWGELILPAVIPVLAPGGLVILETAVTEAGPAITGLEIIAVRIYGDTALNFYKRAGGLAVGVYDSD

SEQ ID NO: 95812 - DNA, 573 bp, Syntrophus aciditrophicus SB
  CDS (1)..(573): transl_table=11
atgagaatcatcggggggcaggcaaaaggcagacgcattgctgtccccccgggatatgccgtccggccgacatccgaccggatcaaggaagctctgttcaatatcctggggccggtggagggtcaagagtttctcgatctttacgccggaaccggaaatgtgggaatggaagcactgagccgtggcgccgacgtggttgtttttgttgaaaagataagcgttctcgtgacatctctcaagaggaatcttgaacagttcggtttccagggacggtaccgaatttttcggatggaagtcgaaaaagccgtcgcacacctggctgagggtgggatgtgtttcgatttgatctttgcagatccgccatacagaaaggggtttgttgacagaacaatcggcttgattaaagattacccgtcaattttgaggaaagacggcatgctggttcttcagcacgcggcgaatgaaacaattgaaataaaagaggatatggcactggatgtggtcgacgtgaggaggtatggggataccctcctgacatttttgaatattcaaaataaagtagaaaggggatga

SEQ ID NO: 95813 - protein, 190 aa, Syntrophus aciditrophicus SB
MRIIGGQAKGRRIAVPPGYAVRPTSDRIKEALFNILGPVEGQEFLDLYAGTGNVGMEALSRGADVVVFVEKISVLVTSLKRNLEQFGFQGRYRIFRMEVEKAVAHLAEGGMCFDLIFADPPYRKGFVDRTIGLIKDYPSILRKDGMLVLQHAANETIEIKEDMALDVVDVRRYGDTLLTFLNIQNKVERG

SEQ ID NO: 95814 - DNA, 597 bp, Neorickettsia sennetsu str. Miyayama
  CDS (1)..(597): transl_table=11
atgcgtgttatttctggtaaatacaaagagaggaagataggtcttataaaaggtgtcgaaattagacccaccatgggaaaagtgcgtgaagcgctttttaacatcatcttacacgcgcgttttgtgacaaaattaccagaagagactcactttcttgatctttttacaggtacaggttctgttagtatagaagcactttctagaggttttgccagtgttacagcaattgatattgatacgcggtgcatatatgcgaatctcgagaaaatggctatccatgataaaatcaccgtcattagcagggatatagtaaagctagaggagtcaggcaaacgatatgatgtcgtattcatggatcctccatataacgagaaaacacataaatatcgtgcatctcagataactgagaagagttttacagggcttcatgaacgtggttggctttgtgatggaagtattgttattctagagaaacacaggaaagagatattcgaattaaagcatcgtgcctttgagctgattgattcaagaagatatggaatgtcagagttgctaacattcatttatagaggctttgattcgctaccaaaagagtag

SEQ ID NO: 95815 - protein, 198 aa, Neorickettsia sennetsu str. Miyayama
MRVISGKYKERKIGLIKGVEIRPTMGKVREALFNIILHARFVTKLPEETHFLDLFTGTGSVSIEALSRGFASVTAIDIDTRCIYANLEKMAIHDKITVISRDIVKLEESGKRYDVVFMDPPYNEKTHKYRASQITEKSFTGLHERGWLCDGSIVILEKHRKEIFELKHRAFELIDSRRYGMSELLTFIYRGFDSLPKE

SEQ ID NO: 95816 - DNA, 615 bp, Burkholderia xenovorans LB400
  CDS (1)..(615): transl_table=11
atgccccgttccgcaccttcgcgcgcccaaggcgcttcatccaaaggcggcaagccgcacgccatccgtatcataggcggcgactggaaacgcacgccgctgcccgtgctcgatctcgacggcttgcgccccacgcccgatcgcgtgcgcgagacgctattcaactggctcggccagaatctggagggccagcgctgtctcgatctgttcgccggcagcggcgcgctcggcttcgaggcggcgtcgcgcggcgcggcccgggtattgatggtggagcgcaatgcgcgggccgccggccagttgcgcgccaaccaggaacgcctgtcggcgcgcacgatcgaaatcgctgaagccgacggtttgcgccttgccgcgagtctcgcgcccggatcgttcgacgtggtgtttctcgacccgccgttcggcacggatctgctcggcaaagcccttgcgctggcggcgccgctagtgagcgctaacggatttctgtatgtggaagcgggagaggcgctcgaactcgagggtaacgagacgctcgccggctgggaaatcgtgcggcaaggtaaagcgggcgctgtccactttcatttgctgcagcgcgaaaataaggaataa

SEQ ID NO: 95817 - protein, 204 aa, Burkholderia xenovorans LB400
MPRSAPSRAQGASSKGGKPHAIRIIGGDWKRTPLPVLDLDGLRPTPDRVRETLFNWLGQNLEGQRCLDLFAGSGALGFEAASRGAARVLMVERNARAAGQLRANQERLSARTIEIAEADGLRLAASLAPGSFDVVFLDPPFGTDLLGKALALAAPLVSANGFLYVEAGEALELEGNETLAGWEIVRQGKAGAVHFHLLQRENKE

SEQ ID NO: 95818 - DNA, 561 bp, Acidobacteria bacterium Ellin345
  CDS (1)..(561): transl_table=11
atgcggatcatctccgggaaatttcgcagccgttcgttgaagacgccgcaaggcatggacgtccgcccatcctccgaccgcctccgcgaaacgttgttcaacgtcctcgcctccggctaccaactcgaagactcccgctggatcgatttatttgccggaactggtgctgtcggactggaagctctcagccgcggtgctggatacatctactttgtggagaaagcgccgaagatcgcgcgcattacgcaggagaacgtgaaaagtcttgatgcgcaagatcaagccgaggttcttaccagcgatgccaacgcaggattgcgccaattggagggaatcgatccggtggactatgtatttctcgatccgccgtatcgcgaagagggcgcgtatctcggagtgctgcgaattctcagcgactctccgctgctcaagccaagcgcgatcgtcatcgccgaacacaccaagcacttcgatcccggcgacggcgtcggtgcactccagcgctaccgctcgctgaagcagggcgacgccgtgctgagcttctatcgccgagctacataa

SEQ ID NO: 95819 - protein, 186 aa, Acidobacteria bacterium Ellin345
MRIISGKFRSRSLKTPQGMDVRPSSDRLRETLFNVLASGYQLEDSRWIDLFAGTGAVGLEALSRGAGYIYFVEKAPKIARITQENVKSLDAQDQAEVLTSDANAGLRQLEGIDPVDYVFLDPPYREEGAYLGVLRILSDSPLLKPSAIVIAEHTKHFDPGDGVGALQRYRSLKQGDAVLSFYRRAT

SEQ ID NO: 95820 - DNA, 567 bp, Rhodococcus sp. RHA1
  CDS (1)..(567): transl_table=11
gtgactcggatcatcgcgggactcgcgggcggtcgacgcctgcgagtcccgccgagcgggacccggcccacctcggaccgggtccgcgaggcattgttcagcgccctgcacagccggatggatctcgaaggcgcgtccgtcctcgacctctacgcggggtcgggggcgctcggcctggaggcgctctcccggggtgcggaccgcgtcgtcctcgtcgagtccgactcgaaagcggcgggcatcatcaagcacaacgtgacgacggtcggtctgccgggagcggaagtgcgcggcgctccggtggcggcggtgctcgcgggcaccgccgaccggccgtacgacctggtgatggcggatccgccgtacgccgtcgacgacgaggcggtacagacggtgctcggccacctccgggtcaacggctgggtcggcgacggctcgatcgtggtgctcgagcggtcgtcgaggtcacccgagacagcctggcccgagggcttcgcgcccgtcaaggcgaagaagtacggcgaggcgagaatcgaattggcgacctgctacggtctggactcatga

SEQ ID NO: 95821 - protein, 188 aa, Rhodococcus sp. RHA1
MTRIIAGLAGGRRLRVPPSGTRPTSDRVREALFSALHSRMDLEGASVLDLYAGSGALGLEALSRGADRVVLVESDSKAAGIIKHNVTTVGLPGAEVRGAPVAAVLAGTADRPYDLVMADPPYAVDDEAVQTVLGHLRVNGWVGDGSIVVLERSSRSPETAWPEGFAPVKAKKYGEARIELATCYGLDS

SEQ ID NO: 95822 - DNA, 549 bp, Trichodesmium erythraeum IMS101
  CDS (1)..(549): transl_table=11
atgaatttaagaatatatggtaaccgtcagttaaaaactttaccaggaatggaaattcgaccaactttggctaaggtgcgagaagcagtctttaatatctggcaaaataatatagatggatgtcgatggctcgatatatgtgctggtgtaggttctatgggagcagaagctttatgtagaggagcatccatagcgatcgctatggaacaatatagccctgcttgtactttaattcgccaaaattggcaactggtggctagttcatcccaggaatttcaggttttgcggggagatgttttaaaacggttaaaagttttagtgggccagaagtttgatttgatttattttgatcccccctatactagtaatttatatcaaccagtattggaggcgatcgctcaatatcaacttctagggctaaccagcgagctagcagtagaacattgtcccaaaatatggccagttaaatctattcccaatttagaaatttgtcggcagaaagtctatggcaatacagctttgactttctttcgtctttttcagaactga

SEQ ID NO: 95823 - protein, 182 aa, Trichodesmium erythraeum IMS101
MNLRIYGNRQLKTLPGMEIRPTLAKVREAVFNIWQNNIDGCRWLDICAGVGSMGAEALCRGASIAIAMEQYSPACTLIRQNWQLVASSSQEFQVLRGDVLKRLKVLVGQKFDLIYFDPPYTSNLYQPVLEAIAQYQLLGLTSELAVEHCPKIWPVKSIPNLEICRQKVYGNTALTFFRLFQN

SEQ ID NO: 95824 - DNA, 618 bp, Synechococcus sp. CC9311
  CDS (1)..(618): transl_table=11
gtgagcggcctgctacgtctcagtggaggccgtcgcttacgcagtcctgttgggacgagcaccagaccaaccgcagcacgtgttcgcgaagcagtgatgaacatgctcgcctcagagctgcagggtgcctcctggctcgacctttgcagcggcagcggcgtcatgggctgcgaagcgatcgaacgcggcgtgagcagggtgtgggccgtggaaaaggatcccaaaacagcgtccgtctgccgagacaatctcgtgctgatcgctggaggacgatcaccatctccagccattgaagtgatccgtcgagatctggtgagctggcttaaaacgggccgtccaagttccctgcccgccttcgatgtcgtctatttcgatcctccctatggatcagacctttatgaacccaccttgcttgcattgcttgagggcaactgggtcagcatccggggattagtgatttgtgaacacgctcaccataaaaaattgaccgcaccgtcttcctggagggtggtggatcaacgaaggtatggaacaagcgccctcttgctgctcagccctccagagcactaccccggcggtactgattccaagcggcaacaaacaaccccatcagggtga

SEQ ID NO: 95825 - protein, 205 aa, Synechococcus sp. CC9311
MSGLLRLSGGRRLRSPVGTSTRPTAARVREAVMNMLASELQGASWLDLCSGSGVMGCEAIERGVSRVWAVEKDPKTASVCRDNLVLIAGGRSPSPAIEVIRRDLVSWLKTGRPSSLPAFDVVYFDPPYGSDLYEPTLLALLEGNWVSIRGLVICEHAHHKKLTAPSSWRVVDQRRYGTSALLLLSPPEHYPGGTDSKRQQTTPSG

SEQ ID NO: 95826 - DNA, 579 bp, Alkalilimnicola ehrlichei MLHE-1
  CDS (1)..(579): transl_table=11
ttgagcgggcaccttcggatcatcggcggcgcctggcgggggcgccggctggcggtgccccgcggcccggatctgcgacccaccggcgatcgtatccgcgagacgctgttcaactgggtgcaggcgcggatccccggtgcccgttgtctcgacctctttgccggtagcggtgtcctgggcctggaggccctttcccggggggcggccgaggtggtcttcgtggaacgcaatgcgcgggtagcggcggcgttgcgcgcgcagttgcaggtcctggacgcggcggagcgtggccgcgtggtcccgaccgatgcattgcgttttctcgccggaccggtacaaagtatggatatcgtctttctggatccgccctttcgcgccagcctgggggaggccgccatgcagcttatcgccgagcggcaatggctggtgccgggcgggcggctctatctggagagcgatgcccaccagcctccgccggcgctgccggcgggctggtcggtccagcgcgagaagcgggccggcggggtgcgttacgccctgatcagcccggaagagcctggacgccaaaaatcagaataa

SEQ ID NO: 95827 - protein, 192 aa, Alkalilimnicola ehrlichei MLHE-1
MSGHLRIIGGAWRGRRLAVPRGPDLRPTGDRIRETLFNWVQARIPGARCLDLFAGSGVLGLEALSRGAAEVVFVERNARVAAALRAQLQVLDAAERGRVVPTDALRFLAGPVQSMDIVFLDPPFRASLGEAAMQLIAERQWLVPGGRLYLESDAHQPPPALPAGWSVQREKRAGGVRYALISPEEPGRQKSE

SEQ ID NO: 95828 - DNA, 531 bp, Solibacter usitatus Ellin6076
  CDS (1)..(531): transl_table=11
atgcggatcatcgcgggagaataccgatcgaggaagctgaagagccttccgggggacgcaacgcggcccacgtcggaccggctgcgcgagacgattttcgatattctgcagacgcggatcgaaggcgccgtgttcgtggacgcatacgcgggcacgggcgcggtggggatcgaggctttgagccggggagcgcggcatgtgttcttcctggagaagaatcgcgcggcgctggatgcgatccgggagaatctggcgagtttgaaggcggagcggcgggccactgtgtacgcgggtgccgtgctggtgacactggagcggtgccgtacggcggacatcgtgtttctggatccgccgtacgatcaggagcgggagtacgcggcggcgctggagttgctgggggccgatcctccggcgctggtgatcgtgcagcacacattccggttcaaactcggggaggcgtacggggggctcgggaggactcgggtgctgaagcagggggacaatgcgctgagcttttatgcgccggggtag

SEQ ID NO: 95829 - protein, 176 aa, Solibacter usitatus Ellin6076
MRIIAGEYRSRKLKSLPGDATRPTSDRLRETIFDILQTRIEGAVFVDAYAGTGAVGIEALSRGARHVFFLEKNRAALDAIRENLASLKAERRATVYAGAVLVTLERCRTADIVFLDPPYDQEREYAAALELLGADPPALVIVQHTFRFKLGEAYGGLGRTRVLKQGDNALSFYAPG

SEQ ID NO: 95830 - DNA, 588 bp, Magnetococcus sp. MC-1
  CDS (1)..(588): transl_table=11
atgctcaaactcaccggtggtcagtggcgggggcgtgccttagagacccctaaagatcaacaggtgcggcctaccacggtgatggcccgtgaggcgctgtttaatatcttgcagcaagaggtggtgggctgtcgttggttggagctctatgccggtagtggcattatggcgcttgaggcgctttcgcgaggggcgcactcggcggtattgatggagcgggccccggcggcattggctttaatccaacgcaatattgataaagtaggggcagaaaaccagtgctacctgttacggggcgaggctgaccgtgccagcagttttagcatacttcagaaaaaattagagaaacgctttcctgaagggtggcgtgccgatatgatctttatggaccccccgtatgggaaagggttggtgagtatcaccctggagcggcttgctcaatgggaagcactgcaagggcatacccctttgattgtggctgagcatgagccagaagccgagattgcttggcagggcagcccatggcatatcgtgcagcagcgccgttatgggcagtcggtgctcacctttttgggtgggccgtcctaa

SEQ ID NO: 95831 - protein, 195 aa, Magnetococcus sp. MC-1
MLKLTGGQWRGRALETPKDQQVRPTTVMAREALFNILQQEVVGCRWLELYAGSGIMALEALSRGAHSAVLMERAPAALALIQRNIDKVGAENQCYLLRGEADRASSFSILQKKLEKRFPEGWRADMIFMDPPYGKGLVSITLERLAQWEALQGHTPLIVAEHEPEAEIAWQGSPWHIVQQRRYGQSVLTFLGGPS

SEQ ID NO: 95832 - DNA, 597 bp, Nocardioides sp. JS614
  CDS (1)..(597): transl_table=11
gtgacccggatcatcggaggccgggcaggcggccgccggatcaacacgccccggggggccgccacccggccgaccagcgaccgggtgcgcgaggcgctgttctccgcgatcgagtcgtggtgcggctcgctgcacgggctccgcgtcctcgacctgtacgccgggtccggggcggtcggcctggaggcgtggtcgcgcggcgccgaggccgtcaccctggtggagtccgaccgccgcaccgccgccctcgtctcggacaacgcccgcacgctcgggttcgccggcgcggacgtcgtggccgcgtcggtcgccacggtgctggcccggggcgcggcggcgccgtacgacgtcgtgttcctggacccgccctatcccctcgaggacgccgccctcggcggcgacctcgcgctgctggtcgcgcacggctggctggccgccggggcgctggtggtcgtcgagcggtcctcgcggagcccggagccgagctggccggccggcctgtccggcacccgccacaagcgctacggcgagacgacgctctggtacgcccaggagggccggccgccggatcagccgacggcggccgggaggcggtag

SEQ ID NO: 95833 - protein, 198 aa, Nocardioides sp. JS614
MTRIIGGRAGGRRINTPRGAATRPTSDRVREALFSAIESWCGSLHGLRVLDLYAGSGAVGLEAWSRGAEAVTLVESDRRTAALVSDNARTLGFAGADVVAASVATVLARGAAAPYDVVFLDPPYPLEDAALGGDLALLVAHGWLAAGALVVVERSSRSPEPSWPAGLSGTRHKRYGETTLWYAQEGRPPDQPTAAGRR

SEQ ID NO: 95834 - DNA, 549 bp, Nostoc punctiforme PCC 73102
  CDS (1)..(549): transl_table=11
atgagcctgagaatttacggtaatcgccagctaaaaactttaccaggaaaagaaactagacctaccagtgcgcgggtaagagaggcagtctttaatatttggcagggagaaattgcaggttgtcgctggctagatttgtgcgccggtactggttcaatgggcgcagaggctttgtgtagaggagctagcctagcagtgggaattgaacaatccagccgagcctgtgccaccatccaacaaaattggcagcaggtagctaatgccgacgagcaagaatttcgggtattgcggggagatattacgcagcagttaaagactttatcaggcaagcaattcgatagaatttactttgatccaccttatgccagtggattgttccaaccagtattagaagcgatcgctcactatcaacttttagatcctagtggcgaaatcgcagttgaacacgcctcacaaggttggacaccgccagagattccctcttgggaaatttgccgcgagaaggtttacggcaacacatcacttactttctacagaattgtgcaatga

SEQ ID NO: 95835 - protein, 182 aa, Nostoc punctiforme PCC 73102
MSLRIYGNRQLKTLPGKETRPTSARVREAVFNIWQGEIAGCRWLDLCAGTGSMGAEALCRGASLAVGIEQSSRACATIQQNWQQVANADEQEFRVLRGDITQQLKTLSGKQFDRIYFDPPYASGLFQPVLEAIAHYQLLDPSGEIAVEHASQGWTPPEIPSWEICREKVYGNTSLTFYRIVQ

SEQ ID NO: 95836 - DNA, 555 bp, Magnetospirillum magnetotacticum MS-1
  CDS (1)..(555): transl_table=11
atgcgcatcgtcgccggtcttcataagggccgccgcctggaggcaccctcgggccgcgatacgcggcccaccgccgaccgggtgcgccaggccctgttcgacatgctgatgcattccgatcgggtggagatggagggcgcccgcgtggtggacgccttcgccgggtcgggcgcgttgggcctcgaagccctgtcgcgcggcgcggaccatgcctgtttcctcgaactggcggcccagcctctggccgccatctacgccaatatcaagaccctgaaggtggagggccaaaccaaggtggtgcgcgccgatgccgccaagccgcccgttgccccccatgcctgcaccctggccttcctcgatccgccctatcattcgggcctcgccgtgccctgcctcgaaggcctcgccgccaagggttggctggaggacggcgccctggtggtggtggaagtggccgccgacgaagcctttgccccgcctgccggtttcgatgcggtggaggaaaggccgcgcggcgccgcaaggctggtgtttttgctctttcgttcggagtga

SEQ ID NO: 95837 - protein, 184 aa, Magnetospirillum magnetotacticum MS-1
MRIVAGLHKGRRLEAPSGRDTRPTADRVRQALFDMLMHSDRVEMEGARVVDAFAGSGALGLEALSRGADHACFLELAAQPLAAIYANIKTLKVEGQTKVVRADAAKPPVAPHACTLAFLDPPYHSGLAVPCLEGLAAKGWLEDGALVVVEVAADEAFAPPAGFDAVEERPRGAARLVFLLFRSE

SEQ ID NO: 95838 - DNA, 585 bp, Crocosphaera watsonii WH 8501
  CDS (1)..(585): transl_table=11
atgagaatctatggaaatcgactactaaaaacattaccaggggagttaacccgtcccacttcagctaaggtgagagaagcattatttaatatttggcaaggggaagttactgggtgtcgttggttagatttatgtgcaggaaacggggcaatgggggcagaagcattatgtcgtgacgcttctgttgttattggcgttgaaaagtatggcaaagcttgtaaaattattcatgaaaattggcaaaaaatagcgagtgagcaacaagattttcgccttattaaaggagatattttaaaagtattaaagaatttagaaggtcaacaatttgatcttatttattttgatccaccctatcaaagtggtctgtataaacctattttagaattaattgttaatcataacttgttacatgaacaaggagaaatagctgtagaacataaccctaaattttggcaagcaacagctataataggattaaaaatggttcgagaaaaatcttatggtaacaccagtttaaccttttactctgatcacaaatcacctattggtgggcaatatatgagagacgaagcagagcagaattaa

SEQ ID NO: 95839 - protein, 194 aa, Crocosphaera watsonii WH 8501
MRIYGNRLLKTLPGELTRPTSAKVREALFNIWQGEVTGCRWLDLCAGNGAMGAEALCRDASVVIGVEKYGKACKIIHENWQKIASEQQDFRLIKGDILKVLKNLEGQQFDLIYFDPPYQSGLYKPILELIVNHNLLHEQGEIAVEHNPKFWQATAIIGLKMVREKSYGNTSLTFYSDHKSPIGGQYMRDEAEQN

SEQ ID NO: 95840 - DNA, 555 bp, Oceanicola batsensis HTCC2597
  CDS (1)..(555): transl_table=11
atgcggatcgtcggaggcgcgttccgcggccggcgcttggccacgctcggcaagggggatgcgggcgctcatctgcggccgaccgcggatcgtgtccgcgagagcctcttctcgatgctggcgggcggccggttcggagaccccgtgtccggtgttcaagtcctggacctttttgccggcaccggggccctggggctcgaggccctgtcgcgcggcgccgcgcatgccgtcttcgtcgacgacggccgcgtggcgcagaagctcctgtcggagaacatcggcgccctggacctggccgatcgcgcccgcctgctccgcacatccgccctccgcctgcccgaagcgtcggcaccggccgggctggtctttctcgatccgccctacggcaaggacctgggcggccgggccctgggcgtcgcccggacccgcggctggatcgcgcccggcgcccttgtcgtctgggaggaacggggcccccaggaggcccccgagggcttttcgccgctggaacacaagcgctatggcgacacggtgattaccctgttgcgggggtga

SEQ ID NO: 95841 - protein, 184 aa, Oceanicola batsensis HTCC2597
MRIVGGAFRGRRLATLGKGDAGAHLRPTADRVRESLFSMLAGGRFGDPVSGVQVLDLFAGTGALGLEALSRGAAHAVFVDDGRVAQKLLSENIGALDLADRARLLRTSALRLPEASAPAGLVFLDPPYGKDLGGRALGVARTRGWIAPGALVVWEERGPQEAPEGFSPLEHKRYGDTVITLLRG

SEQ ID NO: 95842 - DNA, 603 bp, Prochlorococcus marinus str. MIT 9211
  CDS (1)..(603): transl_table=11
ttgaaaggtagcctaaggctattaggagggatgaaaatcaatagtccttcaggccttcatacaagaccaacaacatctattgttagagaagcagtaatgaatatggttggagagaaaataaacaattgcaattggcttgatctatgcagcggtagtggaataatgggctgtgaagctttacaaagaggtgcaaaaactgttatagcagttgaattaaatagtaatgctgcaagagtttgcaaatcaaacctttctcttgtatcggaaaggaagcaaaccagcagtaactttgaagtaattaattctgatgtaattacatggctaaaagaagggtttgaaagccatataattaaatccaaacaaactatgaaagctaatctaaataaatttgactttgtttattttgacccaccttacaaagcaaagatttattcttccgtacttgaaaacttgatcaatggaaagtggttgcaaaaaaaatcattagtaatttgtgaattctccaaaagttcatttctagaaatttctgaaagttggactattacaaataaaagacactatgggaagagctctttaattttccttactcccaatctggcatag

SEQ ID NO: 95843 - protein, 200 aa, Prochlorococcus marinus str. MIT 9211
MKGSLRLLGGMKINSPSGLHTRPTTSIVREAVMNMVGEKINNCNWLDLCSGSGIMGCEALQRGAKTVIAVELNSNAARVCKSNLSLVSERKQTSSNFEVINSDVITWLKEGFESHIIKSKQTMKANLNKFDFVYFDPPYKAKIYSSVLENLINGKWLQKKSLVICEFSKSSFLEISESWTITNKRHYGKSSLIFLTPNLA

SEQ ID NO: 95844 - DNA, 636 bp, Synechococcus sp. RS9917
  CDS (1)..(636): transl_table=11
gtgaaccggaagggtggtgcgagagctcagctgcgactgagcagcggtcgacggctccagagcccacgcggccccgaaacccgtccgaccacaggactggtgcgcgccgccgtgatgaacaggctcgccccgcgtctgcacggctgccattggctcgatctgtgcagcggcagcggcgtgatggcatgcgaagcgatcgaacgaggggcctcccgcgtggtggcgatcgaacgtcatcgcggcacggccgcgatctgccgaaccaacctggacaccatcgcctcaggcgtggatccagcccccacagtgcaggtggtgagcgccgatctgatccattggctgaaccgaggccgccccagcgacgatcccggcttcgatctggtctatttcgaccctccttacgccgccaggctctacagcccaggcctggaggcgctgcgctgcggcgcatggctacggccgggggctctggtgatctgcgagcacgccagccacgatccccccactgtggaagggagctgggatctgattgatcgaaggcgctacggcagctgtggcgtgctggtgctcagcctcccagagcactgccccggcggtactgattccaggccgccacaaacagaccgagcagggtga

SEQ ID NO: 95845 - protein, 211 aa, Synechococcus sp. RS9917
MNRKGGARAQLRLSSGRRLQSPRGPETRPTTGLVRAAVMNRLAPRLHGCHWLDLCSGSGVMACEAIERGASRVVAIERHRGTAAICRTNLDTIASGVDPAPTVQVVSADLIHWLNRGRPSDDPGFDLVYFDPPYAARLYSPGLEALRCGAWLRPGALVICEHASHDPPTVEGSWDLIDRRRYGSCGVLVLSLPEHCPGGTDSRPPQTDRAG

SEQ ID NO: 95846 - DNA, 576 bp, Synechococcus sp. WH 5701
  CDS (1)..(576): transl_table=11
gtgagcctgaggctgagtggcgggcgcaaactgctcagtccgcaagggcagcaggcacgccccaccagctccagggtgcggctggcggtgctcaacctgctggcgagtgaactgactggttgccgctggctcgatctctgctgcggcagcggtgtgatgagctgcgaagccctgcaacgttgcgcccagcgggtggtggccgtggatcacgaccgaaccaccctcagcatcgcccggcgcaatctggaggccgtcaaggccggcgtgaatccagcctgcgacctgcgggtgatcagggctgggctacctcagtggctgtgccaaagcccagggcaacagctgggggaggaagctgcaggtggcttcgatctgatctacgccgatcccccctacgcatcggagctctacgccccgatcgccgagggggtagccgcctcgggctggctggctgaggggggacgcctgctgtgggaatgctcaagcgacgcatacccggacattcctcgaggctggcacctgagcgatcgacgccgctatggcagttgtgggctgatggttctggtgcctgaggcctga

SEQ ID NO: 95847 - protein, 191 aa, Synechococcus sp. WH 5701
MSLRLSGGRKLLSPQGQQARPTSSRVRLAVLNLLASELTGCRWLDLCCGSGVMSCEALQRCAQRVVAVDHDRTTLSIARRNLEAVKAGVNPACDLRVIRAGLPQWLCQSPGQQLGEEAAGGFDLIYADPPYASELYAPIAEGVAASGWLAEGGRLLWECSSDAYPDIPRGWHLSDRRRYGSCGLMVLVPEA

SEQ ID NO: 95848 - DNA, 630 bp, Synechococcus sp. RS9916
  CDS (1)..(630): transl_table=11
gtgagcagcgcaggccaggggcagctgcggctcaccggtggccgcaaactgcgcagcccccgcggcaacggcacccgtcccaccaccgcccgggtccgcgaagccgtgatgaacatcctcgcgccccagctgcatggagcccattggctcgacctttgcagcggcagcggcgtgatgggctgtgaggcccttcaacggggggccaagcgggtggtggcgctcgagcaagaccgcccgacggcagccatctgccgcaacaacctggaagccactgccgcgggccagagggccatgcccacggtgatggtggtgcagcgagacctgatcagctggcttcagcgaggaaagcccaacgatgaccctggctttgatctggtctatttcgatccgccctatgcctcagggctttacagccgcggcctggacgccttgatcgatggtgaatggctgcagcccaatgcacttgtgctgtgtgagcacgccaaacaccaaaaacccgccaccccagacggatggcgggaagaggattgccgttcctacggcagcagtgcggtgctgtttctcagccccccagagcgctgccccggcggtactggttccatgcggcgacaaacagacccagaagggtga

SEQ ID NO: 95849 - protein, 209 aa, Synechococcus sp. RS9916
MSSAGQGQLRLTGGRKLRSPRGNGTRPTTARVREAVMNILAPQLHGAHWLDLCSGSGVMGCEALQRGAKRVVALEQDRPTAAICRNNLEATAAGQRAMPTVMVVQRDLISWLQRGKPNDDPGFDLVYFDPPYASGLYSRGLDALIDGEWLQPNALVLCEHAKHQKPATPDGWREEDCRSYGSSAVLFLSPPERCPGGTGSMRRQTDPEG

SEQ ID NO: 95850 - DNA, 630 bp, Desulfovibrio gigas
  CDS (1)..(630): transl_table=11
atgcgggttgtttctggaatctatcgtggtcgggccatccgcaccgtggacgccgaaggcatgcgcccggcaacacagaaggtgcgggaggccctgttctccgccctggcggcccgcggggtggagtgggaaggggcccgggtgctggatctgtttgccggctcgggcagcctgggcctggaagccctgagccgcggtgcggcggaagccgtgtttgtggagctgcaccggccggcggccaagggcattctggccacctgcaaggattttggtgtgccggcgggcagggcccaggtgcttgccgaggacgtgctgacgtttctgacccggggcaacagcgcgcgcagggggttcgatgtgtgtttcatcgatcccccgtaccacaagaacttgctgccgccggctgtggctgccgtggctgcccacggctgggtgcatgaggacggctttcttgtggcggaagtggaaacccgggttgaactgccgcacccgcccgaatcgcaacactgggcgctgtgcttcgaccgcgcctacgggcagaccaggattttgatatggacacacacgcccccgcagccgacgccggacgcagacgcgtcgccatctatcccggcaccttcgatcccctga

SEQ ID NO: 95851 - protein, 209 aa, Desulfovibrio gigas
MRVVSGIYRGRAIRTVDAEGMRPATQKVREALFSALAARGVEWEGARVLDLFAGSGSLGLEALSRGAAEAVFVELHRPAAKGILATCKDFGVPAGRAQVLAEDVLTFLTRGNSARRGFDVCFIDPPYHKNLLPPAVAAVAAHGWVHEDGFLVAEVETRVELPHPPESQHWALCFDRAYGQTRILIWTHTPPQPTPDADASPSIPAPSIP

SEQ ID NO: 95852 - DNA, 20 bp, Artificial sequence
  primer
atgcgtatttacggcaatcg

SEQ ID NO: 95853 - DNA, 20 bp, Artificial sequence
  primer
ctatatcggcaaagcttccc

SEQ ID NO: 95854 - protein, 195 aa, Artificial sequence
  consensus sequence
  Variant (2)..(8): Xaa in position 2 to 8 is any amino acid
  Variant (9)..(13): Xaa in position 9 to 13 is any or no amino acid
  Variant (17)..(19): Xaa in position 17 to 19 is any amino acid
  Variant (21)..(24): Xaa in position 21 to 24 is any amino acid
  Variant (27)..(35): Xaa in position 27 to 35 is any amino acid
  Variant (36)..(43): Xaa in position 36 to 43 is any or no amino acid
  Variant (47)..(48): Xaa in position 47 to 48 is any amino acid
  Variant (50)..(50): Xaa in position 50 is any amino acid
  Variant (52)..(55): Xaa in position 52 to 55 is any amino acid
  Variant (58)..(59): Xaa in position 58 to 59 is any amino acid
  Variant (62)..(77): Xaa in position 62 to 77 is any amino acid
  Variant (78)..(80): Xaa in position 78 to 80 is any or no amino acid
  Variant (82)..(106): Xaa in position 82 to 106 is any amino acid
  Variant (107)..(127): Xaa in position 107 to 127 is any or no amino acid
  Variant (130)..(133): Xaa in position 130 to 133 is any amino acid
  Variant (137)..(181): Xaa in position 137 to 181 is any amino acid
  Variant (182)..(194): Xaa in position 182 to 194 is any or no amino acid
LXXXXXXXXXXXXRPTXXXVXXXXFNXXXXXXXXXXXXXXXXXLDLXXGXGXXXXEAXXRGXXXXXXXXXXXXXXXXXXXNXXXXXXXXXXXXXXXXXXXXXXXXXXXXXXXXXXXXXXXXXXXXXXFDXXXXDPPXXXXXXXXXXXXXXXXXXXXXXXXXXXXXXXXXXXXXXXXXXXXXXXXXXXXXXXXXXG

SEQ ID NO: 95855 - protein, 26 aa, Artificial sequence
  protein pattern
  Variant (4)..(4): Xaa in position 4 is any amino acid
  Variant (5)..(5): Xaa in position 5 is Ala or Ser
  Variant (7)..(7): Xaa in position 7 is any amino acid
  Variant (9)..(10): Xaa in position 9 to 10 is any amino acid
  Variant (11)..(11): Xaa in position 11 is Ala, Gly or Ser
  Variant (12)..(12): Xaa in position 12 is any amino acid
  Variant (15)..(16): Xaa in position 15 to 16 is any amino acid
  Variant (18)..(18): Xaa in position 18 is Ala, Asp or Gly
  Variant (19)..(24): Xaa in position 19 to 24 is any amino acid
  Variant (25)..(25): Xaa in position 25 is Ile, Leu or Val
  Variant (26)..(26): Xaa in position 26 is Asp or Glu
LDLXXGXGXXXXEAXXRXXXXXXXXX

SEQ ID NO: 95856 - protein, 17 aa, Artificial sequence
  protein pattern
  Variant (2)..(2): Xaa in position 2 is any amino acid
  Variant (3)..(4): Xaa in position 3 to 4 is any or no amino acid
  Variant (7)..(7): Xaa in position 7 is Ala or Thr
  Variant (8)..(8): Xaa in position 8 is any amino acid
  Variant (9)..(9): Xaa in position 9 is Ala, Asp, Gly, Gln or Ser
  Variant (10)..(10): Xaa in position 10 is any amino acid
  Variant (11)..(11): Xaa in position 11 is Ile, Leu or Val
  Variant (12)..(12): Xaa in position 12 is Lys or Arg
  Variant (13)..(13): Xaa in position 13 is any amino acid
  Variant (14)..(14): Xaa in position 14 is Ala, Gly, Ser or Thr
  Variant (15)..(15): Xaa in position 15 is Ile, Leu, Met or Val
  Variant (16)..(16): Xaa in position 16 is Phe, Leu or Met
  Variant (17)..(17): Xaa in position 17 is Asp, Gly, Asn or Ser
GXXXRPXXXXXXXXXXX

SEQ ID NO: 95857 - DNA, 1803 bp, Synechocystis sp.
  CDS (1)..(1803): transl_table=11
atggcattaatcgttcaaaaatttggcggcacttccgttggcactgtggagcgtattcaagcggtggcccaacgcattaaacgaactgtgcagggaggcaactccctggtggtggtggtgtcggccatgggaaaaagcaccgatgtgttagtggatttagcccaacagatttcccccaatccctgtcgccgggagatggatatgttactttccaccggggaacaggtatccattgctttgctgagtttagccttgcaggaaatagaccagcccgccatttccctcaccggagcccaggtgggcatcgtcaccgaggccgaacatagccgggcccgcattctagaaattcgtcccgatcgcctggagcaccatttaagggaagggaaagtggtggtagtggctggtttccagggcatcagtagcgtagaacatctagaaattactaccctgggacggggcggctcagacacctctgccgtggccctggcggcggcattgaaagcggatttttgcgaaatttacaccgacgtaccgggtattctcaccactgatccccgtttagtgccggaagcccaactgatggcggaaatcacctgtgacgagatgttggaattagccagtctgggggcgaaagtactccatccccgggcggtggaaattgcccgcaattatggcattcccttggtggtgcgttccagttggagtgatgaaccgggcacaaaagtagtggctcccccggtgcaaaaccgttccctggtagggcttgaaattgccaaggcagtggatggggtggaatacgacgccgatcaagccaaagtcgctctgttgcgagtgcccgatcgccctggggtggcatcaaaattatttcgggatattgcccaacaacaggtggacattgatttaattattcaatccatccatgacggcaacagtaatgacattgctttcactgttgtcaaagatttactcaatacagcggaagccgttaccagcgccattgccccggccctacgcagttaccccgaagcggatcaggaagcggaaattattgtcgaaaaaggcatcgctaaaattgccattgccggagccggtatgatcggtcgtcctggcatcgccgccaaaatgttcaaaactttggccgatgtgggggtcaacattgaaatgatttccacttcggaagtgaaagttagttgtgttattgatcaacgggacgcagaccgggcgatcgccgctttatccaatgcttttggggtaactttatctccgccgaaaaaccaaacggacacttcccatttaccagcggtgcggggggtagccctggaccaagaccaggcccaaattgccattcgccacgtacccgatcgccctggcatggcagcccaactgttcaccgccctagcagaagccaacatcagtgtggacatgattatccaatcccaacgctgtcgcattaatcaaggcaccccctgccgggacattgcttttatggtggcggaaggggatagcagtcaggctgaggcgattttgcaacccctgatcaaagattggctcgatgcggccatagttgtgaacaaagccattgccaaagtcagcattgtcggttccggcatgattggccatccgggggtggcggcccacttctttgctgccctggcccaggaaaatatcaacattgaaatgattgccacgtcggaaatcaaaatcagttgtgtggtgccccaggatcggggagtggatgctttgaaagctgcccacagcgcctttaacttagctggcacgaaaaccgtcactgttccagcttaa

SEQ ID NO: 95858 - protein, 600 aa, Synechocystis sp.; identical to SEQ ID NO: 83862

SEQ ID NO: 95859 - DNA, 1239 bp, Bacillus halodurans C-125
  CDS (1)..(1239): transl_table=11
atgtcaatcattgtacagaagtatggaggcacgtctgttggctccgttcaacgaattgaacatgtagcgaaccggatcatcgcaacggctgcttcaggaaagaaagtcgttgttgtcgtatcagcaatgggaaagacgacagatgagttagttggattagcgagcgaaattacagacgaaccgcgaaagcgtgaaatggatatgctcctagcaacaggagagcaagtgacgattgcgcttttggcgatggccctacataaacggggacaggaagcgacatcgcttacgggctggcaagctgggatgatcacagaatcacaccatgggaacgctcggattttggaagtggagagagcgcggatggatgaattactagataaagtccacgttgtgatcgtcgcaggttttcaaggaatcgatcaacaaggagagatcatgaccctcggcagaggcggatcagatacgtcggcagtcgcgattgccgcagctctcaaggccgaacgatgcgaaatttatacagatgtgacaggtgtatttacaacagaccctcgggtcgtgaaacaagcgcgcaagcttcaaacgatttcatatgatgagatgcttgaaatggcgaacctaggggcaagtgtccttcatccacgagcggttgaatttgcaaaaaattatgagattccgttacttgtcgcctcgagcatggtagatgagccaggaacaatgatagaggaggaaggaacaatggaacaaaatttactagtacgcggcattgcctttgaaaatgatgtgacaaaagtaacggtgcacgggttaccaaatgaaatccacacactcccgaccctattcgcccatttgtcggctgcggggattaatgtagatatcattatccaaaatcaaacagattcaggaatggcgatttccttctcgattacgcaaagctcattaaaagaaacactcgctcgcctagaagaattaaaaggggaactgtcgtttcaaggcatcgattatgaagaagagttggcaaaggtgtcaattgtcggctctgggatggtatccaatccaggagtagcagcaaaaatgttcgaaattcttgcagccaatgacatcgcgatcaaaatggtaagtacatcggaaataaaagtgtctgctgttattgatgaggagttaatggtgttggcggttgaaatgctccatgagcaatttaagcttcatgaagaggagcctgctgttgctgttaaagtttaa

SEQ ID NO: 95860 - protein, 412 aa, Bacillus halodurans C-125
MSIIVQKYGGTSVGSVQRIEHVANRIIATAASGKKVVVVVSAMGKTTDELVGLASEITDEPRKREMDMLLATGEQVTIALLAMALHKRGQEATSLTGWQAGMITESHHGNARILEVERARMDELLDKVHVVIVAGFQGIDQQGEIMTLGRGGSDTSAVAIAAALKAERCEIYTDVTGVFTTDPRVVKQARKLQTISYDEMLEMANLGASVLHPRAVEFAKNYEIPLLVASSMVDEPGTMIEEEGTMEQNLLVRGIAFENDVTKVTVHGLPNEIHTLPTLFAHLSAAGINVDIIIQNQTDSGMAISFSITQSSLKETLARLEELKGELSFQGIDYEEELAKVSIVGSGMVSNPGVAAKMFEILAANDIAIKMVSTSEIKVSAVIDEELMVLAVEMLHEQFKLHEEEPAVAVKV

SEQ ID NO: 95861 - DNA, 1296 bp, Agrobacterium tumefaciens str. C58; identical to SEQ ID NO: 83855
  CDS (1)..(1296): transl_table=11

SEQ ID NO: 95862 - protein, 431 aa, Agrobacterium tumefaciens str. C58; identical to SEQ ID NO: 83856

SEQ ID NO: 95863 - DNA, 2463 bp, Salmonella typhimurium LT2; identical to SEQ ID NO: 651
  CDS (1)..(2463): transl_table=11

SEQ ID NO: 95864 - protein, 820 aa, Salmonella typhimurium LT2; identical to SEQ ID NO: 652

SEQ ID NO: 95865 - DNA, 1821 bp, Nostoc sp. PCC 7120
  CDS (1)..(1821): transl_table=11
atggcgcttatagttcagaagtttggtggttcatctgtcggttcagtagaacgtattcaagcagtggcacagcgtgtctacaaaacagtgaaagcaggaaattcactggttgtagtggtttctgcaatgggcaaaaccaccgatggactcgtcaaactagctaatgaaatttctcgcaatcctaatcgtcgggaaatggatatgttactgtccacaggggaacaagtcaccattgctctactcagtatggcattgcaagaacttggacaaccagcgatttccatgactggcgctcaagtaggaattgtgacagaagctgaacacacccgcgccagaattttacacatcgaaactgaacgagtagaaggccatattaaggaaggtaaggtagtggtagtagctggttttcaagggatatccagcaacggctcactagaaatcaccactctagggcgcggtggttccgatacatcagccgtggctttagcagcagcattacaggcggatttctgtgaaatttatacagatgtgccaggaattttaactacagacccccgcatagtgcctgaagcccagttaatgggtgaaatcacctgtaatgaaatgctggagttggcaagtttaggggcaaaagtgttacatccccgtgcggtggaaattgcccgtaactatgggatgcctttggtagtcaaatctagctggacagatgatcctggtacgtgggtaactacaccaaaaccccaagggcgatcgctcatcaatttagaactagcccggccagtggatgatgtagaacttgatacagaccaagctaaagtcgctctgttacgcgtacccgataaaccaggagtagcagcaaaattatttggggaaatttcccgtcaaaaagtagacgtagatttaattattcaatcaatccatgaaggtaacagtaacgacatcgcctttactgtcaccacacctatattaaaacgagcagaagccgtagccgccgcgattgccccatccctccgcagtccatctcatcccaaatcagacgaggctgaggtgatggtagaacaaaacattgccaaagtcagtattgctggtgcagggatgatcggccgtcctggggtagctgcccaaatgttcgccaccttagccgaagccggggtaaacattcaaatgatttccaccagcgaagtcaaagttagttgtgttattgatgcccaagacggcgatcgcgctatcattgccctccgcaaagcctttgaaatcgaaacccctctccactcacaactccccacgccctcttccctctccactcacaactcccctcccgttcgcggtgtcgccttagacttaaaccaagcccggctggctattcgtcaagtcccagaccgtccagggatggcggcgcagttgtttggtattctctcccagcacaatatcagcgtagacatgatcattcagtctcaacgttgtcgcattgttgatggtgttccccgtcgggatattgcttttacagtcccccgcatggatggggaaactgcccaaaaattgctctgtcaagtagccccagagttgggttggggtgatgtggttttggatagtgcgatcgctaaagttagtattgtcggtgcggggatggtaggtcaaccaggtgtagccgccaaaatgtttgaagcattagctaaacaccaaatcaacattcaaatgattgccacctccgaaattaaaattagctgtgttgtctctcaagaacaaggtgtacaagctttacaagttattcacactgcttttgagttagcaggtaccgagaaatttgttgtacctgcgtag

SEQ ID NO: 95866 - protein, 606 aa, Nostoc sp. PCC 7120
MALIVQKFGGSSVGSVERIQAVAQRVYKTVKAGNSLVVVVSAMGKTTDGLVKLANEISRNPNRREMDMLLSTGEQVTIALLSMALQELGQPAISMTGAQVGIVTEAEHTRARILHIETERVEGHIKEGKVVVVAGFQGISSNGSLEITTLGRGGSDTSAVALAAALQADFCEIYTDVPGILTTDPRIVPEAQLMGEITCNEMLELASLGAKVLHPRAVEIARNYGMPLVVKSSWTDDPGTWVTTPKPQGRSLINLELARPVDDVELDTDQAKVALLRVPDKPGVAAKLFGEISRQKVDVDLIIQSIHEGNSNDIAFTVTTPILKRAEAVAAAIAPSLRSPSHPKSDEAEVMVEQNIAKVSIAGAGMIGRPGVAAQMFATLAEAGVNIQMISTSEVKVSCVIDAQDGDRAIIALRKAFEIETPLHSQLPTPSSLSTHNSPPVRGVALDLNQARLAIRQVPDRPGMAAQLFGILSQHNISVDMIIQSQRCRIVDGVPRRDIAFTVPRMDGETAQKLLCQVAPELGWGDVVLDSAIAKVSIVGAGMVGQPGVAAKMFEALAKHQINIQMIATSEIKISCVVSQEQGVQALQVIHTAFELAGTEKFVVPA

SEQ ID NO: 95867 - DNA, 1278 bp, Streptomyces coelicolor A3(2)
  CDS (1)..(1278): transl_table=11
gtgggccttgtcgtgcagaagtacggaggctcctccgtagccgatgccgagggcatcaagcgcgtcgccaagcggatcgtggaagcgaagaagaacggcaaccaggtggtcgccgtcgtttccgcgatgggcgacacgacggacgagctgatcgatctcgccgagcaggtttccccgatccctgccgggcgtgaactcgacatgctgctgaccgccggggagcgtatctccatggcgctgctggccatggcgatcaaaaacctgggccacgaggcccagtcgttcaccggcagccaggccggagtcatcaccgactcggtccacaacaaggcccggatcatcgacgtcacaccgggtcgcatccgcacctcggtcgacgagggcaacgtggccatcgtggccggcttccagggcgtcagccaggacagcaaggacatcaccacgctgggccgcggcgggtccgacaccacggccgtcgccctcgccgccgcgctcgacgcggacgtctgcgagatctacaccgacgtcgacggcgtgttcaccgccgacccgcgcgtggtgccgaaggcgaagaagatcgactggatctccttcgaggacatgctggagctcgctgcctccggctccaaggtgctgctccaccgttgcgtggagtacgcccgccggtacaacatcccgattcacgtgcggtccagcttcagcggactccagggcacgtgggtcagcagcgagccgatcaagcaaggggaaaagcacgtggagcaggccctcatctccggagtcgcgcacgacacctccgaggccaaggtcacggtcgtcggggtgcccgacaagccgggcgaggcggccgcgatcttccgcgccatcgccgacgcccaggtcaacatcgacatggtcgtgcagaacgtgtccgccgcctccacgggcctgacggacatctcgttcacgctccccaagagcgagggccgcaaggccatcgacgcgctggagaagaaccgcccgggcatcggcttcgactcgctgcgctacgacgaccagatcggcaagatctcgctggtcggcgccggtatgaagagcaatccgggcgtcaccgccgacttcttcaccgcgctctccgacgccggggtgaacatcgagctgatctcgacctccgagatccgcatctcggtcgtcacccgcaaggacgacgtgaacgaggccgtgcgcgccgtgcacaccgccttcgggctcgactccgacagtgacgaggccgtggtctacgggggcaccgggcgctga

SEQ ID NO: 95868 - protein, 425 aa, Streptomyces coelicolor A3(2)
MGLVVQKYGGSSVADAEGIKRVAKRIVEAKKNGNQVVAVVSAMGDTTDELIDLAEQVSPIPAGRELDMLLTAGERISMALLAMAIKNLGHEAQSFTGSQAGVITDSVHNKARIIDVTPGRIRTSVDEGNVAIVAGFQGVSQDSKDITTLGRGGSDTTAVALAAALDADVCEIYTDVDGVFTADPRVVPKAKKIDWISFEDMLELAASGSKVLLHRCVEYARRYNIPIHVRSSFSGLQGTWVSSEPIKQGEKHVEQALISGVAHDTSEAKVTVVGVPDKPGEAAAIFRAIADAQVNIDMVVQNVSAASTGLTDISFTLPKSEGRKAIDALEKNRPGIGFDSLRYDDQIGKISLVGAGMKSNPGVTADFFTALSDAGVNIELISTSEIRISVVTRKDDVNEAVRAVHTAFGLDSDSDEAVVYGGTGR

SEQ ID NO: 95869 - DNA, 1800 bp, Thermosynechococcus elongatus BP-1
  CDS (1)..(1800): transl_table=11
atgggactgattgtacaaaagtatggcggcacatccgtcggtagtgtcgagcgcatccaagcggtagcccgcagggtcaaggcaacggtagcagcaggacatcaggtcgtggtggtggtctcggccatgggcaaaaccacggatagcttggtgcaactggcctatgccattagcgatcgccccagtcagcgggaaatggatatgctgctgtcgacgggggaacaagtctcgatcgccctattgacgatggctctccatgccttgggggaacccgctatctcccttaccggcgcccaagtgggaattgtgactgaaccggcccacacccgtgcccgcattctccacattgagacccagcgcctcgaacggcacctcaaagcaggacaagtagtggttgtggccggctttcaggggattactgctgccactgattttgaggtcaccacccttgggcgtggcgggtcggatacgtcggctgtggctttggcggcagctctacgggcggattgctgtgaaatttacaccgatgtccccggcattttaactgcggatccccgactagtgcccaatgcccaactcatgagcgaaattacctgcgatgaaatgttggagttggccagcctaggggcaaaggtcttgcacccccgcgcggtggagattgcccgcaactatggtgtcgatttggtggtgcgctccagttggacggatgatccgggtacccgcgtcatcgccccagcacggccgccgcgtcccgtggaaaaccttgaactgggcaagcccgtggatggcgtagccctggacacggatcaggcaaaggtggcactcctgcgggtggccgatcgccccggtgttgcggcacagctttttggcgaactggcccggcaaaaccttgatgtggatttgattatccaatccatccacgaagggcaaacgaatgatattgccttcacagtccaaaagagtgttctcaaacaagccgaagccattgccgtggccttttatccccgcttgagcccccgggttgaagagacggatgtgctagtggatgccgatattgccaaggtgagtattaccggcgctggcatgattggccgaccgggggtggccgctcagatgttctcggccttggcggcagcgggtattaacctgcaaatgatttccacctctgaagtcaatgtcagttgtacagtggccgctgcggatgccggtcgagccattgccgttctctcccaaacctttgatgtggaagccgccaccactgtccctcaaaacccccctgctgccccaccggtgcggggcgttgcccttgatcccaagcaggcgcggattgccattcgggatgtgcccgatcgccctggtatggcggcagcaattttccagacccttgccgatgcggccattagcgtcgatatgattatccaatcccagcgatcgcgctccctgggaggtgtgatgacccgcgacattgcctttacagtcgcctctaccgatgccgaggacgctacggaactgctccgaaaagtccaggcccaattgggctacggtgacgtcctcgtcgacaccgcaatcgccaaagtgagcattgtcggtgtagggatgatccaccgcccggggatcgctgcccaaatgtttgctgcccttgcccgtgaaaacatcaacattcaaatgattgccacctcagaaattcgcgtcagttgtgtcgtggcagaatcagagggggtgcgggcgctgcgggcggtgcatagggcctttgggctggatggggaggcacccgtcgccattcccgatgtcggtaaatag

SEQ ID NO: 95870 - protein, 599 aa, Thermosynechococcus elongatus BP-1
MGLIVQKYGGTSVGSVERIQAVARRVKATVAAGHQVVVVVSAMGKTTDSLVQLAYAISDRPSQREMDMLLSTGEQVSIALLTMALHALGEPAISLTGAQVGIVTEPAHTRARILHIETQRLERHLKAGQVVVVAGFQGITAATDFEVTTLGRGGSDTSAVALAAALRADCCEIYTDVPGILTADPRLVPNAQLMSEITCDEMLELASLGAKVLHPRAVEIARNYGVDLVVRSSWTDDPGTRVIAPARPPRPVENLELGKPVDGVALDTDQAKVALLRVADRPGVAAQLFGELARQNLDVDLIIQSIHEGQTNDIAFTVQKSVLKQAEAIAVAFYPRLSPRVEETDVLVDADIAKVSITGAGMIGRPGVAAQMFSALAAAGINLQMISTSEVNVSCTVAAADAGRAIAVLSQTFDVEAATTVPQNPPAAPPVRGVALDPKQARIAIRDVPDRPGMAAAIFQTLADAAISVDMIIQSQRSRSLGGVMTRDIAFTVASTDAEDATELLRKVQAQLGYGDVLVDTAIAKVSIVGVGMIHRPGIAAQMFAALARENINIQMIATSEIRVSCVVAESEGVRALRAVHRAFGLDGEAPVAIPDVGK

SEQ ID NO: 95871 - DNA, 1257 bp, Shewanella oneidensis MR-1
  CDS (1)..(1257): transl_table=11
gtgctcgaaaaacgaaagcttagtggtagcaagctttttgtgaagaagtttggtggcacttcggtgggttcaattgaacgtatcgaagtggttgccgaacagattgcaaagtccgctcacagtggtgagcagcaagtattagttctttctgctatggcaggggagacaaataggctatttgcgctagcagcgcaaatcgatccccgcgcgagtgctcgggaactcgatatgttggtctcaacgggtgagcaaattagtattgcgttgatggcgatggcgttgcagcgtcgcggtatcaaggcaagatcgctcactggcgatcaagtgcaaatccatacaaatagtcagtttggtcgtgccagtattgagagcgtcgatacggcgtacttaacgtccttgctcgaacaaggcattgtgccgattgtggcagggtttcaagggatcgatcctaatggcgatgtcacaaccttaggtcgtggtggttccgatacgacggctgtagcgctcgccgcagcgttaagagccgatgaatgccagatatttaccgatgtttcaggggtgtttactacagacccaaatatcgatagtagcgcaaggcgtctggatgtgattggctttgacgtcatgcttgaaatggcaaagttaggcgctaaagtacttcatcctgattctgttgaatatgcacagcgttttaaagtaccgcttcgggtgttgtcgagtttcgaagctgggcaaggtacattaattcaatttggtgatgaatctgagcttgcgatggccgcatctgtacaaggtattgcgatcaacaaagccttagcaacgttgaccatcgaaggtttgttcaccagcagtgagcgttaccaagcactattggcttgtttggcccgactggaggtagatgttgaatttatcactcctttgaaattgaatgaaatttctcctgttgagtcagtcagtttcatgttagccgaagctaaagtggatattttattgcacgagcttgaggttttaagcgaaagtcttgatctagggcaattgattgttgagcgccaacgtgcaaaagtgtctttagttggcaaaggtttacaggcaaaagttggattattgactaagatgttagatgtattgggtaacgaaacaattcatgctaagttactttcgacatcggagagtaaattgtcaactgtgatcgatgaaagggacttgcacaaggcggttcgggcgttgcatcatgctttcgagctaaataaggtgtaa

SEQ ID NO: 95872 - protein, 418 aa, Shewanella oneidensis MR-1
MLEKRKLSGSKLFVKKFGGTSVGSIERIEVVAEQIAKSAHSGEQQVLVLSAMAGETNRLFALAAQIDPRASARELDMLVSTGEQISIALMAMALQRRGIKARSLTGDQVQIHTNSQFGRASIESVDTAYLTSLLEQGIVPIVAGFQGIDPNGDVTTLGRGGSDTTAVALAAALRADECQIFTDVSGVFTTDPNIDSSARRLDVIGFDVMLEMAKLGAKVLHPDSVEYAQRFKVPLRVLSSFEAGQGTLIQFGDESELAMAASVQGIAINKALATLTIEGLFTSSERYQALLACLARLEVDVEFITPLKLNEISPVESVSFMLAEAKVDILLHELEVLSESLDLGQLIVERQRAKVSLVGKGLQAKVGLLTKMLDVLGNETIHAKLLSTSESKLSTVIDERDLHKAVRALHHAFELNKV

SEQ ID NO: 95873 - DNA, 1236 bp, Pseudomonas putida KT2440
  CDS (1)..(1236): transl_table=11
atggcgttgatcgtacagaaatttggcggcacctctgtcggttccatcgagcggatcgagcaggtagccgaaaaggtcaagaaacaccgtgaagcgggcgacgacctggtggttgtgctgtcggccatgagcggtgaaaccaatcgcctgatcgacctggccaagcagatcaccgatcagccggttcctcgtgaactggacgtgatcgtgtcgacgggtgagcaggtcaccattgccctgctgaccatggccttgatcaagcgtggtgtgccagcggtgtcctacaccggcaaccaggtgcgtattctcaccgacagctcgcacaacaaggcgcgcattctgcaaatcgacgaccagaagattcgtgccgacctcaaggaaggccgcgtggtcgtggttgcaggcttccagggcgtcgacgagcacggcagcatcactaccctgggtcgtggtggctctgataccaccggcgtggccctggcggcggcgctgaaggctgatgagtgccagatctacactgatgttgatggcgtctacaccaccgacccgcgcgtcgtgccacaggcccgtcgcctggagaagatcaccttcgaagagatgctggaaatggccagccttggttccaaggtgctgcagatccgttcggtggagttcgccggcaagtacaacgttccgctgcgcgtgctgcacagcttcaaggagggtccgggtaccctcattaccattgatgaagaggaatccatggaacagccgatcatttccggtatcgccttcaaccgtgatgaagcaaagctgaccattcgcggcgtgccggataccccgggcgtggccttcaagatcctcggcccgatcagcgcttcgaacatcgaagtcgacatgatcgtgcagaacgttgcgcacgataacaccaccgacttcaccttcaccgtgcaccgcaatgagtacgagaaggcgcagagcgtgctggaaaacaccgcgcgcgaaatcggtgcccgtgaagtgatcggcgacaccaagatcgccaaggtctcgatcgtcggcgtcggcatgcgttcgcacgccggtgttgccagctgcatgttcgaagccctggccaaggagagcatcaacatccagatgatctccacttccgagatcaaggtttcggtggtgctcgaagagaagtacctggagctggccgtacgcgcgctgcataccgcgttcgatctggatgctcctgcccgacagggcgagtaa

SEQ ID NO: 95874 - protein, 411 aa, Pseudomonas putida KT2440
MALIVQKFGGTSVGSIERIEQVAEKVKKHREAGDDLVVVLSAMSGETNRLIDLAKQITDQPVPRELDVIVSTGEQVTIALLTMALIKRGVPAVSYTGNQVRILTDSSHNKARILQIDDQKIRADLKEGRVVVVAGFQGVDEHGSITTLGRGGSDTTGVALAAALKADECQIYTDVDGVYTTDPRVVPQARRLEKITFEEMLEMASLGSKVLQIRSVEFAGKYNVPLRVLHSFKEGPGTLITIDEEESMEQPIISGIAFNRDEAKLTIRGVPDTPGVAFKILGPISASNIEVDMIVQNVAHDNTTDFTFTVHRNEYEKAQSVLENTAREIGAREVIGDTKIAKVSIVGVGMRSHAGVASCMFEALAKESINIQMISTSEIKVSVVLEEKYLELAVRALHTAFDLDAPARQGE

SEQ ID NO: 95875 - DNA, 1758 bp, Prochlorococcus marinus subsp. marinus str. CCMP1375
  CDS (1)..(1758): transl_table=11
atgactcttctggtgcaaaaatttggtggcacctctgtaggcaatgtggagcgcattcaagctgttgctaaaagaattgcattatgcaaagaagaagggaatcagcttgtaattgttgtctcagctatgggtaatagcacagatgagcttacaaaattagccttatcaataagcggcaatccaccatcaagagaaatggatatgttgctctcgacaggagagcaagtaaccatagcgctgctctcaatagctctgaacaaaattggcatacctgcaacatcaatgacaggagcacaggttggaataattaccgaatcagctcatggccgagcgcgcattcttgaaatcaaaaccgagaggattaaggaacttttaaatgctggtcagatagttgtggtcgcagggtttcaaggaaccagccttagtagtgggaaaactgctgagattactactctaggcagaggtggttcggatacatctgcagtagcacttgcatcagctctagaagctgatgcgtgtgaaatttatacagatgttccaggagtcttaactacagatcctcgtttagtgcatgacgcgaagctcatgaaaacggttagttgtgatgaaatgcttgaattagccagtctaggagctgcagttttacacccaagagcagttgaaatagcaagaacttatggtgtgaacttaattgttagatcaagctggaagaatgaacctggaacaactcttacaagccaagccaagcaatccatagtgagaggaggcctagaactaagcaggcctgtaaatggtattgaacttattgaacaccaagccgtaataggcctttcacatgttcctgatcagccaggtattgcagcagacttatttgaaacactatcaaaaggaggcgtcaatgttgatttaatcatccaatcaactcatgaaggcaatagcaatgacatcactttcacagtttccgaacaaaatttaccgacagcaaaattactctgtgaaaaactaattaaaaagctaggtggagaattaactactcaaaagcaaatgtctaaattgagtattcgaggagcaggaataatgggaagaccaggcattgcagcaaaattttttgaaacattatcaaagtcaggaatcaatttaagactaatagcaactagtgaagtaaaagtaagttgtgtaataaattccgaatttggtactaaaggattaaaagttactagtaaagcctttgatctcaaaaataatcaaattcaaatcaatccaacgattgattgtattaatgaaccagaagttcgaggtgttgctttagatccaaatcaagtacaagttagtgttgtcaatgttcccgatgtaccaggttcagctggaacattatgtagatcttttgctgactctggtatcattctggacacgattgttcaatcggaaagaaaaggtgatgctaacggcaaaattatcagttttaccctgaacaaaagtgatagagaaaatgcagattctgctttgacacctcttttgagaaagtggcctaatgcatatatgaaagatggcgcggcaatcgcccgtattagtgctgtaggagcaggaatgcctgctagcataggaacagcaggcagaatgtttagagcattagcaaataaaaaaattaatatcaaaatgattgcgactagtgaaattaggactacttgcatcattgctgaaaaagatggaaatcatgcacttgaagcagttcatacattctttaaattaaatgcgtaa

SEQ ID NO: 95876 - protein, 585 aa, Prochlorococcus marinus subsp. marinus str. CCMP1375
MTLLVQKFGGTSVGNVERIQAVAKRIALCKEEGNQLVIVVSAMGNSTDELTKLALSISGNPPSREMDMLLSTGEQVTIALLSIALNKIGIPATSMTGAQVGIITESAHGRARILEIKTERIKELLNAGQIVVVAGFQGTSLSSGKTAEITTLGRGGSDTSAVALASALEADACEIYTDVPGVLTTDPRLVHDAKLMKTVSCDEMLELASLGAAVLHPRAVEIARTYGVNLIVRSSWKNEPGTTLTSQAKQSIVRGGLELSRPVNGIELIEHQAVIGLSHVPDQPGIAADLFETLSKGGVNVDLIIQSTHEGNSNDITFTVSEQNLPTAKLLCEKLIKKLGGELTTQKQMSKLSIRGAGIMGRPGIAAKFFETLSKSGINLRLIATSEVKVSCVINSEFGTKGLKVTSKAFDLKNNQIQINPTIDCINEPEVRGVALDPNQVQVSVVNVPDVPGSAGTLCRSFADSGIILDTIVQSERKGDANGKIISFTLNKSDRENADSALTPLLRKWPNAYMKDGAAIARISAVGAGMPASIGTAGRMFRALANKKINIKMIATSEIRTTCIIAEKDGNHALEAVHTFFKLNA

SEQ ID NO: 95877 - DNA, 1761 bp, Prochlorococcus marinus subsp. pastoris str. CCMP1986
  CDS (1)..(1761): transl_table=11
atggctttattaatcaaaaaatttggcggcacatcggttgaagatatcacaaaaattaaggcgattgcacaaagtattattcaaagtaaagaagctggaaatgatatcgtcgtagttgtatctgcaatgggtcattctacagatcacttaaataagttagcagaatcaatcagcaaaaatcccaatagccgagaattagatatgctcctctctacaggggagcaagtaactatggcacttctatcaatgtcattaaatgaatatgggattcctgcaatatctttgacaggtagccaagtgggaattgttactgaatcaattcatggaaaagcgagaattctagatatcaaaacagaacgcatacaaaactatattaatcaaggttatgtagtagtagttgcagggtttcaaggctcaacgcttagtcatactggatcaatggaaatcacaactttgggaagagggggttcagatacttcagcagtagcactatccacagcattaggtgcagaaacttgcgagatatatacagatgttcctggagttcttaccactgatccaagaattgtacctaatgcaaaattgttagatattattagttgtgaagagatgctagaacttgcgagtgtgggtgcttcagtacttcatccaagagctgtagaaattgctcgcaattatggaattaaattatatgtaaaatcgagccaagccctctcaaatggcactcttctacatagcaaaattaaaccattagctttaaaaagaggagggttagaattaacaaaaactgttaatagtcttgaagtattagaaaagcaaaccgtatttagtatttccaaactccctgacagacctggaattgcagctcaaatatttgaaaccttgtctaaagcgaacattaatgttgatttaataatccaagctacacatgatgggaagagtaatgatattgcatttacagttaatgattttgagttaaccaaaacaattgatcaatgtaaattaataacaaaacaattaggtggcgaatatgatttcaaaaaaaatatgactaaattaagtattcaaggagctggaataatggggagaccaagtgtatcagctgatttatttgatactttattccaagcaaacataaatgtaagattaatagctaccagcgaaatcaaagtcagctgcgtaattgatattgaaaatatttcaaaagctattagatttgtcagtgaaaaatttaaattatctgataaacaaatatttattaacccagtaattgagagtgaagatcagcctgaggtaagaggaattgcattagataaaaatcaagttcaagttagcattaggaacctacctgataaacctggggtggcagcttcaatatgtttagctctcgcagagaataatttaatttttgatactattgtgcaatctgaaaggttaacatctttaaaaaccaaagacataagtttcaccatgagcaagcaagatagagaaagagctaatacaattttccactctttaacaaaaaaattggcaggatcattcatcgaagatggaccagctatagctaaagtaagcacagttggagctggaatggcatttaaggttggaacagctgggaaaatttttagagcacttgctaataaaaatattaatattgaaatgattgctacaagtgaaataagaacttcttgtatcgtcttagaacaagattgtgaccaagcagttaatgcaattcattcttattttcaattagataaataa

SEQ ID NO: 95878 - protein, 586 aa, Prochlorococcus marinus subsp. pastoris str. CCMP1986
MALLIKKFGGTSVEDITKIKAIAQSIIQSKEAGNDIVVVVSAMGHSTDHLNKLAESISKNPNSRELDMLLSTGEQVTMALLSMSLNEYGIPAISLTGSQVGIVTESIHGKARILDIKTERIQNYINQGYVVVVAGFQGSTLSHTGSMEITTLGRGGSDTSAVALSTALGAETCEIYTDVPGVLTTDPRIVPNAKLLDIISCEEMLELASVGASVLHPRAVEIARNYGIKLYVKSSQALSNGTLLHSKIKPLALKRGGLELTKTVNSLEVLEKQTVFSISKLPDRPGIAAQIFETLSKANINVDLIIQATHDGKSNDIAFTVNDFELTKTIDQCKLITKQLGGEYDFKKNMTKLSIQGAGIMGRPSVSADLFDTLFQANINVRLIATSEIKVSCVIDIENISKAIRFVSEKFKLSDKQIFINPVIESEDQPEVRGIALDKNQVQVSIRNLPDKPGVAASICLALAENNLIFDTIVQSERLTSLKTKDISFTMSKQDRERANTIFHSLTKKLAGSFIEDGPAIAKVSTVGAGMAFKVGTAGKIFRALANKNINIEMIATSEIRTSCIVLEQDCDQAVNAIHSYFQLDK

SEQ ID NO: 95879 - DNA, 1788 bp, Prochlorococcus marinus str. MIT 9313
  CDS (1)..(1788): transl_table=11
atggcgttgctggtgcaaaaattcggcggatcatccgtcggcaacgtcgagcgcatccaagccgtcgctgagcggattgcgaccagcaaagatctcggccacgacctagtgattgtggtatccgctatgggccaaaccactgatgagctcacagccctagcgaaagtgatcagcagcaatccccctcaacgggaaatggacatgctgctagccaccggagaacaggtttcgatctccttgctttcaatggcactgcatgaactgggtataccagccatttcgatgactggagcccaagtgggcatcgtgacagagtctgcctatggccgcgctcgaatcctagacgtccgcactgagcgcctgcaatccctgttgagcactggcaaggtggtagtcgtagcaggcttccagggcacaagcctgagcagcgttggcaccgcagagatcaccaccctcggccgcggtggttcagatacatctgcagttgccatagcagccgccctaggagcagatgcctgcgagatctacaccgatgtaccaggagtgctcacaagtgatccacgtcaggtcagcgatgcccaactgatgcaagaagtgagttgcgacgagatgcttgagctggccagtctgggcgcctccgtgttgcacccccgtgcagtcgagatcgcccgcaactttggagtcgccctggtcgtgcgttctagctggagcaacgaagccggaaccaagctcacaagcaaatcaaagcgccccatcggtcgagaaggtctagagcttggtcggcctgtggatggcgttgaacttgccgaaggtcaagcggtgatcgccctctctcacgtgccagatcaaccgggtgtcgcagccacactttttgaaaacctctctagcgatggcgtgaatgtggacctaatcatccaatcaacccatgaaggcaacagcaatgacattgccttcacagtggccgaagccgacttagcgaaagcccactcactttgcgaagggctgcttaaaagcgtcggtggccaactctcagctgaagccggaatgagcaaactaagcatcagcggagcaggaatcatgggacgccccggtatcgccgcaagccttttcgacacgatctcacgggcaggaatcaacctacggctgatcgccaccagtgaggtgaaagtcagctgcgtcatcgatgcaacgctgggaagcaaagccctgcgtgcagtcagcacagcctttgaactcagcgacagccaagtacgcatcaatcctttgggcaacggcaaaggtgaaccagaagttcgaggggtagcactcgatcaaggtcaggcccagctaagtgtgcgaggggtgccgaatcggcctgggacagcagcagctctttgttcagcgatggcagaggcaggaatcagcctcgatgcgattgtgcaatcggagcgacaacatgacgatggaagccgggatatcagcttcaccctcaagcgcgatgagcgagagcaagccaataagactcttgcccccctacttgcgcaatggccaggagccaatctggaagacggtcctgcaatcgcccgggtgagcgcagtgggtgcaggcatgcccgccaccgcaggtacagcagggcggatgttccgagctctcgcagatgcaaagatcaatatcgccatgatcgccaccagtgaaatccgcacaagttgcgtggtggctgaacccgatggggtcaaggcgctgcaatcagtgcataaaggctttgggctgggtgaagaagctgatcatccagtgcaaagcaactcgtaa

SEQ ID NO: 95880 - protein, 595 aa, Prochlorococcus marinus str. MIT 9313
MALLVQKFGGSSVGNVERIQAVAERIATSKDLGHDLVIVVSAMGQTTDELTALAKVISSNPPQREMDMLLATGEQVSISLLSMALHELGIPAISMTGAQVGIVTESAYGRARILDVRTERLQSLLSTGKVVVVAGFQGTSLSSVGTAEITTLGRGGSDTSAVAIAAALGADACEIYTDVPGVLTSDPRQVSDAQLMQEVSCDEMLELASLGASVLHPRAVEIARNFGVALVVRSSWSNEAGTKLTSKSKRPIGREGLELGRPVDGVELAEGQAVIALSHVPDQPGVAATLFENLSSDGVNVDLIIQSTHEGNSNDIAFTVAEADLAKAHSLCEGLLKSVGGQLSAEAGMSKLSISGAGIMGRPGIAASLFDTISRAGINLRLIATSEVKVSCVIDATLGSKALRAVSTAFELSDSQVRINPLGNGKGEPEVRGVALDQGQAQLSVRGVPNRPGTAAALCSAMAEAGISLDAIVQSERQHDDGSRDISFTLKRDEREQANKTLAPLLAQWPGANLEDGPAIARVSAVGAGMPATAGTAGRMFRALADAKINIAMIATSEIRTSCVVAEPDGVKALQSVHKGFGLGEEADHPVQSNS

SEQ ID NO: 95881 - DNA, 1803 bp, Synechococcus sp. WH 8102
  CDS (1)..(1803): transl_table=11
atggccctcctggtgcagaagttcggcggcacctccgtcggcagtgtcgagcgcatccaggcggtcgccgagcggatcagccgcagccgcgaggagggccacgacgtggtggtggtggtgtcggccatgggccacaccaccgatgaactcaccggactggcggccgccatcaccgacaccccacagcaacgggagatggacatgctgctggccagcggcgagcaggtgtccattgccctgctggccatggccctgaaccaacaaggggttgctgctgtctcgatgacagggccccaggtgggcatcgtgaccgaatccactcacggccgggcccgcatcctcgagatccgcaccgatcgcatccgcggccacttggccgatggccgtgtggtggtggtggccggcttccagggcaccagcagcggcattggcggtgtggcggagatcaccaccttgggccgcggcggctccgacacctccgccgtcgccctggcggcagccttgaacgccgatgcctgtgagatctacaccgatgtgccgggggtgctcagcaccgatccccgcaaggtggctgatgcccagctgatggatgagatcagctgcgatgaaatgctcgagctggccagcctcggtgcttctgtgctgcatccccgggcggtggagatcgcccgcaattacggcgtgctgatggtggtgcgctccagctggagcgaagcccccggcacccgcctcaccagccgccgcggccggccgctcaaccagaccgggctcgaactgggcagccctgtcgatggcgtggagcagatggaccatcaagcggtgatcgcgctgtcgcacatccccgatcaacccggcattgccgcccgcctgttcgaaaccctctcgggtgctggcatcaacgtggatctgatcatccagtccacccacgagggcagcagcaacgacatcaccttcaccgtggcggaagctgatctggaggccgcccgcagcgtcagccagaccgtgctggacagccttggtggcgagctggccgctgaaggcggcatgaccaagctgagcatcagtggcgccggaatcatggggcgcccaggcatcgccgccggcttattccactgcctctcacagcagggcatcaacctgcgcctgatcgccacgagcgaagtgaaggtgagctgcgtgatcgatgccgactccggccgcaaggcgcttcaggcggtgcaggaggccttcgatgtggcggacgcgcaggtggagctcaaccccgatctgagcattagcgacgtgccagaagtgcgcggggttgccctcgatcgtgaccaggcccagctatctgtccggcacgtaccagaccgccccggcaccgccgctgccctttgttccgccctggcggaacggggaatcagcctcgatgccatcgtccaatcggagcgtcaacacacggacggctcgcgtgacatcagtttcatcctgcgcaaggaggaccgcagccgcgctgatgtggccctggcaccgctgctggcgcaatggcccggagcggcattggaagagggcgaatcaatcgcccgggtgagcgccgtcggcgccggcatgcccgccaccccgggaacagccggccggatgttccgtgccctggccgatgccggcatcaacatcgccttgatcgccaccagcgagatccgcaccagctgcgtggtggccgaacaggacggtgtggcagccctgcaggccgttcacgccggcttcggcttggggggccaggagcagcacaccgctcagggcagtgcctcccccctcgacagctga

SEQ ID NO: 95882 - protein, 600 aa, Synechococcus sp. WH 8102
MALLVQKFGGTSVGSVERIQAVAERISRSREEGHDVVVVVSAMGHTTDELTGLAAAITDTPQQREMDMLLASGEQVSIALLAMALNQQGVAAVSMTGPQVGIVTESTHGRARILEIRTDRIRGHLADGRVVVVAGFQGTSSGIGGVAEITTLGRGGSDTSAVALAAALNADACEIYTDVPGVLSTDPRKVADAQLMDEISCDEMLELASLGASVLHPRAVEIARNYGVLMVVRSSWSEAPGTRLTSRRGRPLNQTGLELGSPVDGVEQMDHQAVIALSHIPDQPGIAARLFETLSGAGINVDLIIQSTHEGSSNDITFTVAEADLEAARSVSQTVLDSLGGELAAEGGMTKLSISGAGIMGRPGIAAGLFHCLSQQGINLRLIATSEVKVSCVIDADSGRKALQAVQEAFDVADAQVELNPDLSISDVPEVRGVALDRDQAQLSVRHVPDRPGTAAALCSALAERGISLDAIVQSERQHTDGSRDISFILRKEDRSRADVALAPLLAQWPGAALEEGESIARVSAVGAGMPATPGTAGRMFRALADAGINIALIATSEIRTSCVVAEQDGVAALQAVHAGFGLGGQEQHTAQGSASPLDS

SEQ ID NO: 95883 - DNA, 1806 bp, Gloeobacter violaceus PCC 7421
  CDS (1)..(1806): transl_table=11
gtgggcctcatcgttcagaagtacggcggcacatcggtgggcagcgccgaacggatgcgctcggtggccgagcgcatcgcccgcacccaccgccagggacacgatctggtcgtggtcgtctcggcgatgggccacaccaccgacgccctggtcaaaatggcctgcgagatgcacggcgagccggacccgcgcgagatggacatgctgctcaccaccggcgagcagcagagcgtggcgctcttgaccatggcgctgcacgccttgggttgcaaggcgatttcgctgaccggtgcccaggtgggtgtcgtcaccgaacccaaccacacccgggcacgcatccgcagggtgcagacaggccgcatcaacgagcttctggctgccgggtacgtgctggtggtggccggctttcagggcatctgccactcgcgcttctgggaaattacgacgctgggccggggcgggtccgacaccagcgccgtggctctcgcggccgtgctcaaggccaaccgctgcgaaatttataccgacgtgccgggggtactgaccaccgatccgcgcctggtgggcgatgccgccttgctcgaggaaatcaccagcgaggagatgctggaattggcgagcctgggtgcccaggtgctccatccgcgcgccgtcgagattgcccgcaactacgcggtgccgttggtggtgcgctccagttggagcgacgcccccggtacgattgtgctctcgccccgtctgccggtggaccgggccatcgacaatctggagaccgagcggccggtagacgccgtctacatcgacaaccatcaggcaaaaattgcgctgttgcgcgttccggaccgtcccggtgtggcggcggccctttttgggcacctggccaaggcggggatcgatgtggacctgattatccagtccatccaccacccgaatgctccggaacccaccaacgacattgcctttacggtccagcgctcggatctggccgctgcggtcgccacgagcgaaacggccgccgccgcgctgggcggttgcgcggtggtggtggacccggtgcccaccaaagtgagcatccgcggcgccgggatcatcggacgaccgggtgtggtcgcccagatgttcaaagccctagccgaggcgcggatcaatatccagatgatttcgacttccgaaaccagcctcagctgcgtgattgcaggcgagcaggccgagaaggcgggcgaggtgctctgtggccagttcggcctgcgcgcgccggtctacgaggaaccgccggtggtgagcggcgcgcggccggtcgcccaggcggtgcgcggcgtagccctcgacaccaatcaagcccaggtagcgattttgcagatacccgaccggcccggggtggcggcggagatctttcagtgtctggcccaagaagggattgccgtcgacatgatcgtccaatcgcagcgcggggccgacaccaacgacatcggctttacggtcagccgctccgccgtgcgcgcggcccaacgcgccctcgcttctttgtgcatgggcttcgcaggctgtggcggggtggtcgtgcgcgaatcggtggccaaactcagcctggtgggagcgggcatcgtcggcaccccgggggtggccgcccgcatgttcgagacgcttgcgagtctcggcaccaacatcgagatgatctccacctcgactatcaaggtgagctgcatcgtggaggctgcttgctgcgaagcgtctctccaggcggtgcaccgggccttcggcctgggtagcggggcgatggtcgcggtggaaggccgcagcagctag

SEQ ID NO: 95884 - protein, 601 aa, Gloeobacter violaceus PCC 7421
MGLIVQKYGGTSVGSAERMRSVAERIARTHRQGHDLVVVVSAMGHTTDALVKMACEMHGEPDPREMDMLLTTGEQQSVALLTMALHALGCKAISLTGAQVGVVTEPNHTRARIRRVQTGRINELLAAGYVLVVAGFQGICHSRFWEITTLGRGGSDTSAVALAAVLKANRCEIYTDVPGVLTTDPRLVGDAALLEEITSEEMLELASLGAQVLHPRAVEIARNYAVPLVVRSSWSDAPGTIVLSPRLPVDRAIDNLETERPVDAVYIDNHQAKIALLRVPDRPGVAAALFGHLAKAGIDVDLIIQSIHHPNAPEPTNDIAFTVQRSDLAAAVATSETAAAALGGCAVVVDPVPTKVSIRGAGIIGRPGVVAQMFKALAEARINIQMISTSETSLSCVIAGEQAEKAGEVLCGQFGLRAPVYEEPPVVSGARPVAQAVRGVALDTNQAQVAILQIPDRPGVAAEIFQCLAQEGIAVDMIVQSQRGADTNDIGFTVSRSAVRAAQRALASLCMGFAGCGGVVVRESVAKLSLVGAGIVGTPGVAARMFETLASLGTNIEMISTSTIKVSCIVEAACCEASLQAVHRAFGLGSGAMVAVEGRSS

SEQ ID NO: 95885 - DNA, 1218 bp, Geobacter sulfurreducens PCA
  CDS (1)..(1218): transl_table=11
atggcactggtggtccagaaatacggcggcacctcgatggggtccatcgagcgcatccgcaatgttgccaaacgggtcgccaagacctatgacgccggaaacgatatggttgttgtcgtttccgccatgtcgggagaaaccaacaagctcgtggccctcgccaatgagatttgcgaattcccggatacccgcgaatatgatgtgctggtggcgtcgggcgagcaggtctccatagctctccttgccatgtgcctcaagtcgatgggctacaaggccaagtcatatcatggctggcagatacccattatcactgacagcgctttcagcaaggctcgaatcgagagcatcgacgacaccaaggtgcgcgctgaccttaaagacggctccattgtcattgtcgccggtttccagggcgtcgacaaagatggcaatatcactactctgggccgtggtggctccgatacctcggcggttgccgtagctgccgccttcaaagcggatgtgtgcgagattttcaccgacgtggacggcgtttataccactgatccgaatatttgccaggatgcccggaaaattgagaaggtatcctatgatgagatgctggaactcgcctcgctcggggcgaaggttcttcagatccgttccgtagaatttgcgaagaagtacaatgtggacgttcatgtccgctccagcttcaatgaaaatccagggaccatggttaccaaggaggataaggatatggaagcagttctcgtttcgggaatcgcctacgacaagaacgaagcaaaaattgccgtgatgggggtacccgacaaaccgggaatcgccgccaaaattctgtcgcccctttccgacgccaatatatcggtcgatatgattgtccagaatgtaagcgggggtgacctgaccgatttcaccttcactgttaccaaggcagatttcaagaaagccctcgccatcaccaaggaagtggccaaggagatcagtgccaaagaggtggcagaggacgaaaacatttcaaaaatatccatcgttggtgtcggcatgcggagccatgcgggggttgccaccaaaatgttccagacccttgccaaggaagggatcaacatccagatgatctccacttctgaaatcaaggtttcggtcattgttgacgcaaaatacaccgaactggccgttcgggtgcttcacgaagcgttcggactctccggcaaataa

SEQ ID NO: 95886 - protein, 405 aa, Geobacter sulfurreducens PCA
MALVVQKYGGTSMGSIERIRNVAKRVAKTYDAGNDMVVVVSAMSGETNKLVALANEICEFPDTREYDVLVASGEQVSIALLAMCLKSMGYKAKSYHGWQIPIITDSAFSKARIESIDDTKVRADLKDGSIVIVAGFQGVDKDGNITTLGRGGSDTSAVAVAAAFKADVCEIFTDVDGVYTTDPNICQDARKIEKVSYDEMLELASLGAKVLQIRSVEFAKKYNVDVHVRSSFNENPGTMVTKEDKDMEAVLVSGIAYDKNEAKIAVMGVPDKPGIAAKILSPLSDANISVDMIVQNVSGGDLTDFTFTVTKADFKKALAITKEVAKEISAKEVAEDENISKISIVGVGMRSHAGVATKMFQTLAKEGINIQMISTSEIKVSVIVDAKYTELAVRVLHEAFGLSGK

SEQ ID NO: 95887 - DNA, 1167 bp, Wolbachia endosymbiont of Drosophila melanogaster
  CDS (1)..(1167): transl_table=11
atggacaaaataatcataaaaaaatttggtgggacttcgctaactgatttaaaccgagttgcaaatttgataaaaaacgatattgagaaaggttgtaatgtaatcgttgttgtatctgctgttgcaggatttactgaccaaatggtttttcaggctaggcaaatctcaaatttaagttatagacaagagttatcagagtatgacgttatgctttcagcaggagaacaaatctcttgcggtctattagctatcactctccaatcgatcggagttaatgctaaatcgtggcttgcctggcagttaccaattgtaactgatgatttttattctgagtctaaaataaaaacaataaagattgaacgtgtgaaaagatcttttgctgagggttatactgctgcgatcattgctggttttcagggtataaatgatgatagaatcactacttttggaagaggaggctctgatatatcagcagttgccttcgcggtagcctttggtgttagaacttgcgaaatttttactgatattgatggaatatatacagcagacccgagaattgttccaaaggcacgcaagctcaaatttatctcttacgatgaaatgttggaaatgtcgtcatctggtgctaaaatactgcataatcgttcagtacaacttgcaatgaaacataacattaaagtgcaagtgctatccacttttaaggaagtagaaggcaccacagtgctacacaaaagggatgtactagagagatacttaattactggaataacttatagcactaatgaagctcttgtaactttcactaaccttgcaaataacttgcgtactttaagagatatagcaggagcaaacgttaaaattgatatgatacatgggtcaagttttgttatctccaaatttgatattgatttaatggaaaagttactgaataagaatgaaaattatgctataaacgataatgtagctaaaatttcaataattggtattggtgttatgtctaacactgaagtgatgcaccgcacactcaaggttttaagcgaaaaaaagatagaaatacttgctatcacaacatctgaaatcaaaatcagtataattgttcaaaaagaatgcgctgtagctttagtcaaagatttacatactgagtatgagcttgatatgcagcactag

SEQ ID NO: 95888 - protein, 388 aa, Wolbachia endosymbiont of Drosophila melanogaster
MDKIIIKKFGGTSLTDLNRVANLIKNDIEKGCNVIVVVSAVAGFTDQMVFQARQISNLSYRQELSEYDVMLSAGEQISCGLLAITLQSIGVNAKSWLAWQLPIVTDDFYSESKIKTIKIERVKRSFAEGYTAAIIAGFQGINDDRITTFGRGGSDISAVAFAVAFGVRTCEIFTDIDGIYTADPRIVPKARKLKFISYDEMLEMSSSGAKILHNRSVQLAMKHNIKVQVLSTFKEVEGTTVLHKRDVLERYLITGITYSTNEALVTFTNLANNLRTLRDIAGANVKIDMIHGSSFVISKFDIDLMEKLLNKNENYAINDNVAKISIIGIGVMSNTEVMHRTLKVLSEKKIEILAITTSEIKISIIVQKECAVALVKDLHTEYELDMQH

SEQ ID NO: 95889 - DNA, 1761 bp, Prochlorococcus marinus str. AS9601
  CDS (1)..(1761): transl_table=11
atggctttactagtaaaaaaatttggcggtacttctatcggtgatataaaaaaaattaaaaatattgcaagtagcatttgtcaaagtaaagaagcaggtaatgaaattgtcgtagttgtctctgcgatggggcaaactacagatgatttaaattgtttagcggaatcaattagtaaaaatcctaatcgaagagaattggatatgcttctctcaactggagagcaagtaaccatagctcttctatcaatggcattaaacgaatgcggaatacctgcaatttcaatgactggtagccaggttggaattattactgaatcaattcatgggaaagcgagaattctggatattaaaacagaaaggatccaaaattatttaaatcagggttttgtagttgtagtggctggatttcaaggaacaacattaagccatacgggttcaatggaaattacaactttgggtagaggtggttcagatacttccgcggtagctttatcaacagctttaggagctgagacttgcgaaatttatacagacgttccaggggttcttactactgatccacggattgttcctaatgcaaaactcttagatgaaattagctgtgaggaaatgcttgaacttgcaagcgtcggtgcttcagttctccatccaagagcagtagaaattgctcgcaattatggaattaaattgtgtgtcaaatcaagccaaagtgactccagtgggactctcctagaaagtcaaatccaacctctcccactaaaaagaggaagcttagaattaacaaaaacagtcaatagtcttgaagtattagaaaaccaagcagtattcagtctctcaaatatacctgataggcctgggattgctgcgcaaatatttgaaaaactttcagaagcaagtattaacgtagatttaataatacaagcgacaaatgatggaaataaaaacgatattacatttactgttggtgaattagaagtacaaaaaactgcagaacaatgtgaacttataactagtcaattagggggagaatttaacttaaaaaccaacatgacaaaattaagtattcaaggagcaggcattatgggcagacctagtgtttcagctgatttatttgacactttatctcaagcgaatataaacgttaggttaatagctactagtgaaattaaagtcagctgtgtaattgaagttaataatataccaaaagctattagatttgttgctgagaaatttaagttatcagaaacacaaatatttgttaatccaatcaatgaaaaacaagatcaacctgaagtaagaggaattgcattagatagaaaccaagttcaggtaagctttcgaaaactgcctgatcgtccaggtgtagcagcatcgatatgtttagcattagctgaaaataatttacttatcgatactattgttcagtctgaaagaatttccactttaaaaactaaggatattagtcttacaatgaataaacaagatagagataaagctaacttagtttttgaggccttaacaaaaaaattacccggatcatacgttgaagatggccctgctatagcaaaagtaagtactgtaggagcgggaatggcatttaaggttggaaccgctggaaaaatatttagagcattggctgaccaaaatatcaatattgaaatgattgccactagtgaaattaggacttcatgtattgtcttagaaaaagattgtgacaaagcagttaatgcgattcataatcatttcgaattagaaaaataa

SEQ ID NO: 95890 - protein, 586 aa, Prochlorococcus marinus str. AS9601
MALLVKKFGGTSIGDIKKIKNIASSICQSKEAGNEIVVVVSAMGQTTDDLNCLAESISKNPNRRELDMLLSTGEQVTIALLSMALNECGIPAISMTGSQVGIITESIHGKARILDIKTERIQNYLNQGFVVVVAGFQGTTLSHTGSMEITTLGRGGSDTSAVALSTALGAETCEIYTDVPGVLTTDPRIVPNAKLLDEISCEEMLELASVGASVLHPRAVEIARNYGIKLCVKSSQSDSSGTLLESQIQPLPLKRGSLELTKTVNSLEVLENQAVFSLSNIPDRPGIAAQIFEKLSEASINVDLIIQATNDGNKNDITFTVGELEVQKTAEQCELITSQLGGEFNLKTNMTKLSIQGAGIMGRPSVSADLFDTLSQANINVRLIATSEIKVSCVIEVNNIPKAIRFVAEKFKLSETQIFVNPINEKQDQPEVRGIALDRNQVQVSFRKLPDRPGVAASICLALAENNLLIDTIVQSERISTLKTKDISLTMNKQDRDKANLVFEALTKKLPGSYVEDGPAIAKVSTVGAGMAFKVGTAGKIFRALADQNINIEMIATSEIRTSCIVLEKDCDKAVNAIHNHFELEK

SEQ ID NO: 95891 - DNA, 1761 bp, Prochlorococcus marinus str. MIT 9515
  CDS (1)..(1761): transl_table=11
atggctttattaatcaaaaaatttggcggcacttcggttggtgacattacaaaaattaaggctattgcgcaaagtattgctcaaagtaaagaagctgggaatgatatcgtcgtagttgtatctgcaatgggcaactctacagataaattaaataaattagcagaatcaatcagcaaaaatccaaataggcgggaattagacatgctcctctctacaggtgagcaagtatctatggcacttctatcaatgtcattaaacgaatatgggatccctgcaatatctatgaccggtagccaagttggcattattactgaatctattcatgggaaagcaagaattctagatatcaaaacagaacgtataaaaaattatattaatcaaggttatgttgtggttattgctggttttcaaggttcaactcttagtcatacaggaacaacggaaatcacaactttgggcaggggcggttcagatacttcagcagtagccctttccacagcattaggtgcagaaacttgcgagatatatacagatgttcctggagttcttacaactgacccaaggatagtatctgatgcgaaattattagatgttataagttgtgaagagatgctagaactcgcaagtgttggtgcatcagtactccatccaagagctgtagaaattgctcgcaattatggaataaaattatatgttaaatctagtcaaaccctctcaaagggcactcttctacatagcaacattaagcctttggctctcaaaagaggagggttagaattaacaaaaaccgttaatagtcttgaagtattagaaaaacaaatcgtttttagtatttccaaactacctgataggcctggaattgcagctcaaatatttgaaaccttgtctgaagcaagcatcaatgttgatttaataatccaagctacacatgatggaaatagtaatgacatcgcatttaccgttaatcaatttgatttaaccaaaacgattgagcaatgtaaattaataacaaatcaattaggtggggaatataatttcaaaacaaatatgacaaagttaagtattcaaggcgctgggataatgggaagaccaagtgtctcggctgatttatttgatactctatcccaagcaaacataaatgtaagattaatagcaacaagcgaaatcaaagtcagctgcgtaatcgacatagataatattccaaaagctataagatttgtaggtgaaaaatttaaattatctgataaacaaatatttattaatccactttttgaaagagaggatcaacccgaagtcagaggaattgcattagataaaaatcaagttcaagttagctttcgaaacctaccggataaacctggtgttgcagcttcgatatgtttagctctagcagagagtaatttaatttttgatactattgttcaatctgaaagcttaacatctttcaaaactaaagatataagttttactatgaataaacaagacagagcaagagctaataaaattttttactctttaacaaaaaaattatcaggagcattcgttgaagatggacctgcgattgccaaagtaagcacagttggagctggaatggcatctaaggtcggaacagcagggaaaatatttagagcacttgctaataaaaacattaatattgaaatgattgccacaagtgaaatcagaacttcttgtattgtcttagaaaaggattgtgaccaagcagtaaatgctattcattcttatttcgaattagataaataa

SEQ ID NO: 95892 - protein, 586 aa, Prochlorococcus marinus str. MIT 9515
MALLIKKFGGTSVGDITKIKAIAQSIAQSKEAGNDIVVVVSAMGNSTDKLNKLAESISKNPNRRELDMLLSTGEQVSMALLSMSLNEYGIPAISMTGSQVGIITESIHGKARILDIKTERIKNYINQGYVVVIAGFQGSTLSHTGTTEITTLGRGGSDTSAVALSTALGAETCEIYTDVPGVLTTDPRIVSDAKLLDVISCEEMLELASVGASVLHPRAVEIARNYGIKLYVKSSQTLSKGTLLHSNIKPLALKRGGLELTKTVNSLEVLEKQIVFSISKLPDRPGIAAQIFETLSEASINVDLIIQATHDGNSNDIAFTVNQFDLTKTIEQCKLITNQLGGEYNFKTNMTKLSIQGAGIMGRPSVSADLFDTLSQANINVRLIATSEIKVSCVIDIDNIPKAIRFVGEKFKLSDKQIFINPLFEREDQPEVRGIALDKNQVQVSFRNLPDKPGVAASICLALAESNLIFDTIVQSESLTSFKTKDISFTMNKQDRARANKIFYSLTKKLSGAFVEDGPAIAKVSTVGAGMASKVGTAGKIFRALANKNINIEMIATSEIRTSCIVLEKDCDQAVNAIHSYFELDK

SEQ ID NO: 95893 - DNA, 1767 bp, Prochlorococcus marinus str. NATL1A
  CDS (1)..(1767): transl_table=11
atggcattgctggttcaaaaatttggcggcacctctctaggaagtattgagcgcataaaagctgtcgcgcaaagaatcaaatcaagtaaagaaaaaggtgctgatctagtagttgttgtgtcggccatgggacatcaaactgatgagttaacacggctagcgtcagaaataactgttgatcctcctcatagagaaatggatatgctcctctcaactggggagcaagtttcaatatcattattaacaatggccctgaacgaattgggcacaccagcaatctctttgactggaactcaagctggaattatcacagaatcagctcatggaagagccagaatcctcgagataaggacagaacgaataaaaaatctcttagaccaaggtcaaaccatagttattgctggattccaaggaacaactcttggcataggaggaattgctgaaattacaactttaggtagaggaggttcagatacttctgcagtagctctagcggcatcgcttgaagctgctacatgtgaaatttataccgatgttcctggcgtacttacaactgacccaagaattgtgaaaaatgcaaaattaatgaaaagtattagttgtgatgaaatgttagaacttgccagccttggcgcagctgttttacatcctcgagcagttgaaatagcaagaaatttcggcgtaactctcgtcgttaaatccagttgggacaaccttgatggaaccactctaactagtaataagaagcctgacttttctcaaggtggaatagaacatcaaagtcctgtcgatggattagaacttcttgagaatcaagcagtcgtagctttatctaatattccagatcgtccaggaattgctgcggaactttttgaatctttatcagagggtggggtgaatgtcgatctcattattcaagcgacacatcaaattgactctaacgacatcacttttactattgctgaaaatgaattacataatgcactaactcaatgtaaaaaactcgttaatactattggaggtgatatctcttttcaaaaagatctgactaaactaagtatttatggagctgggataatgggaaggcctggaatagcgtcatcgctattccaaattctatctgactctggtattaatataagactaatcgcaactagtgaagtcaaagtcagttgtgttattgatgcagaattagggaaaaaagcactacgtaatgtaagcgaagttttcaagctcactgataaacaaattaccgtgaatcctacgattgaaaataataacgagccagaagtaaggggaatagctttagataaagatcaaatacaaattagcgtgaagaatgtgccagataaaccagggactgcctcatcaatatgttccactttagctgagaaaaatatcagcttagatactatagttcaatctgaaagaaagcataaagataaaaccaaagatatcagcttcactttaaagaaaaatgatagaagcgatgctaaatatgcattaaaagaattgattgaaaattggaaaggagcaaaactcgaagaaggagagtcaatagtacgaattagcgcagtaggttctggaatgccttttacaaaaggaacagccggtaaaatttttagagcactagcaaatcaaaaaatcaacatagaaatgatcgccacaagtgaaataagaacaacttgtattatctcagaaaaatatggtgaaaaagcattaaatgaaattcattcttgctttaaattaggaaaaaataaaagctaa

SEQ ID NO: 95894 - protein, 588 aa, Prochlorococcus marinus str. NATL1A
MALLVQKFGGTSLGSIERIKAVAQRIKSSKEKGADLVVVVSAMGHQTDELTRLASEITVDPPHREMDMLLSTGEQVSISLLTMALNELGTPAISLTGTQAGIITESAHGRARILEIRTERIKNLLDQGQTIVIAGFQGTTLGIGGIAEITTLGRGGSDTSAVALAASLEAATCEIYTDVPGVLTTDPRIVKNAKLMKSISCDEMLELASLGAAVLHPRAVEIARNFGVTLVVKSSWDNLDGTTLTSNKKPDFSQGGIEHQSPVDGLELLENQAVVALSNIPDRPGIAAELFESLSEGGVNVDLIIQATHQIDSNDITFTIAENELHNALTQCKKLVNTIGGDISFQKDLTKLSIYGAGIMGRPGIASSLFQILSDSGINIRLIATSEVKVSCVIDAELGKKALRNVSEVFKLTDKQITVNPTIENNNEPEVRGIALDKDQIQISVKNVPDKPGTASSICSTLAEKNISLDTIVQSERKHKDKTKDISFTLKKNDRSDAKYALKELIENWKGAKLEEGESIVRISAVGSGMPFTKGTAGKIFRALANQKINIEMIATSEIRTTCIISEKYGEKALNEIHSCFKLGKNKS

SEQ ID NO: 95895 - DNA, 1788 bp, Prochlorococcus marinus str. MIT 9303
  CDS (1)..(1788): transl_table=11
atggcgttgctggtgcaaaaattcggcgggtcatccgtcggcaacgtcgagcgcatccaagccgtcgctgagcggattgcgaccagcaaagatctcggccacgacctggtgattgtggtatccgctatgggccaaaccactgatgaactcacagccctagcgaaagtgatcagcagcaatccccctcaacgggaaatggacatgctgctagccacgggagaacaggtttcgatctccttgcttgcaatggcactgcatgaactgggtataccagccatttcgatgactggagcccaagtgggcatcgtgacagagtctgcctatggccgcgctcggatcctcgacgtccgcactgagcgcctgcaatccctattgagcactggcaaggtggtagtcgtagcaggcttccagggcacaagcctgagcagcgttggcaccgcagagatcaccaccctcggccgcggtggttcagatacatctgcagttgccatagcagccgccctaggagcagatgcctgcgagatctacaccgatgtaccaggagtactcacaagtgatccacgtcaggtaagcgatgcccaactgatgcaagaagtgagttgcgacgagatgcttgaactggccagtctgggcgcctccgtgttgcacccccgtgcggtcgagatcgcccgcaactttggagtcgccctggtcgtgcgttctagctggagcaacgaagccggaaccaagctcacaagcaaatcaaagcgccccctcggtcgagaaggtctagagcttggtcggcctgtggatggcgttgaacttgccgaaggtcaagcggtgatcgccctctctcacgtgccagatcaaccgggtgtcgcagccacactttttgagaacctctctagcgatggcgtgaatgtggacctaatcatccaatcaacccatgacggcaacagcaatgacattgccttcacagtggccgaagccgacttagcaaaagcccactcactttgcgaagggctgcttaaaaccgtcggtggccaactctcagctgaagccggaatgagcaaactaagcatcagcggagcaggaatcatgggacgccccggtatcgccgcaagccttttcgacacgatctcacgggcaggaatcaacctacggctgatcgcgacgagtgaggtgaaagtcagctgcgtaatcgatgcaacgctgggcagcaaagccctgcgtgcagtcagcacagcctttgaactcagcgacagccaagtacgcatcaatccattggtcaacggcaaaggtgaaccagaggttcgaggggtagcactcgatcaaggtcaggcccagctaagtgtgcgaggggtgccgaatcggcctgggacagcagcagctctttgttcagcgatggcagaggcaggaatcagcctcgatgcgatcgtgcaatcggagcgacaacatgacgatggaagccgggatatcagcttcaccctgaagcgcgatgagcgagagcaagccaataagactcttgcccccctacttgcgcaatggccaggagccaatctggaagacggtcctgcaatcgcccgggtgagcgcagtgggtgcaggcatgcccgccaccgcaggaacagcagggcggatgttccgagctctcgcagatgcaaagatcaatatcgccatgatcgccaccagtgaaatccgcacaagttgcgtggtggctgaacccgatggggtcaaggcgctgcaatcagtgcataaaggctttgggctgggtgaagagactggtcatccagtacaaagcaactcctaa

SEQ ID NO: 95896 - protein, 595 aa, Prochlorococcus marinus str. MIT 9303
MALLVQKFGGSSVGNVERIQAVAERIATSKDLGHDLVIVVSAMGQTTDELTALAKVISSNPPQREMDMLLATGEQVSISLLAMALHELGIPAISMTGAQVGIVTESAYGRARILDVRTERLQSLLSTGKVVVVAGFQGTSLSSVGTAEITTLGRGGSDTSAVAIAAALGADACEIYTDVPGVLTSDPRQVSDAQLMQEVSCDEMLELASLGASVLHPRAVEIARNFGVALVVRSSWSNEAGTKLTSKSKRPLGREGLELGRPVDGVELAEGQAVIALSHVPDQPGVAATLFENLSSDGVNVDLIIQSTHDGNSNDIAFTVAEADLAKAHSLCEGLLKTVGGQLSAEAGMSKLSISGAGIMGRPGIAASLFDTISRAGINLRLIATSEVKVSCVIDATLGSKALRAVSTAFELSDSQVRINPLVNGKGEPEVRGVALDQGQAQLSVRGVPNRPGTAAALCSAMAEAGISLDAIVQSERQHDDGSRDISFTLKRDEREQANKTLAPLLAQWPGANLEDGPAIARVSAVGAGMPATAGTAGRMFRALADAKINIAMIATSEIRTSCVVAEPDGVKALQSVHKGFGLGEETGHPVQSNS

SEQ ID NO: 95897 - DNA, 1761 bp, Prochlorococcus marinus str. MIT 9301
  CDS (1)..(1761): transl_table=11
atggctttactagtaaaaaaatttggcggtacttctgtaggtgatattagaaaaattaaaaatattgcaagtagcatctgtcaaagtaaagaagcaggaaatgaaattgtcgtagttgtctctgcaatggggcaaactacagatgatttaaattgtttagcggaatcaattagtaaaaatcctaatcgaagagaattggatatgcttctctcaactggagagcaagtaaccatagctcttctctcaatggcattaaacgaatacggaatacctgcaatttcaatgaccggtagccaggttggaattattactgaatcaattcacgggaaagcgagaattctggatattaaaacagaaaggatccaaaattatataaatcaaggttttgtagttgtagtagctggatttcaaggaacaaccttaagccatacgggttcaatggaaattacaactttgggtagaggtggttcagatacttcggcagtagctttatcaacagctttaggagctgagacgtgcgaaatttatacagacgttccaggggttcttactactgatccaagaattgtgcctaatgcaaaactcttagatgaaattagctgcgaggaaatgcttgaacttgcaagtgtcggtgcgtcagttctgcatccaagagcagtagaaattgctcgcaattatggaattaaattgtgtgtcaaatcaagccaaagtgactcaagtgggactctcctagaaagtcaaatcaaagctctcccgctaaaaagaggaagcttagaattaacaaaaacagtcaatagtcttgaggtattagaaaaccaggcagtattcagtctctcaaatattcctgataggcctgggattgctgcacaaatatttgaaaaactttcagaagcaagtattagtgtagatttaataatacaagcgacaaatgatgggaataaaaacgatattacatttactgttagtgaattagaagttaaaaagactgcagaacaatgtgaacttataactagtcaattaggaggagaatataacttaaaaacaaacatgactaaattaagtattcaaggagcaggcattatgggcagacctagtgtttcagctgatttatttgatactttatctcaagcgaatatcaatgtcaggttaatagctactagtgaaattaaagtcagctgtgtaattgaaatcaataatataccaaaagctattagatttgttgctgagaaatttaagttatcagatacacaaatatttgttaatccaatcaataaaaaacaagatcaacctgaagtaagaggaattgcattagataaaaaccaagttcaagtaagttttcgaaaactgcctgatcgtccaggtgtagcagcatcgatatgtttagcattagctgaaaataatttacttatcgacactatcgttcagtctgaaagaatttcctctttaaaaactaaggatattagtcttacaatgaataaacaagatagagaaaaagctaacttagtttttgaggccttaacaaaaaaattacccggatcatacattgaagatggccctgctatagccaaagtaagtactgtaggagcgggaatggcatttaaggttggaacggctggaaaaatatttagagcattagctgaccaaaaaatcaatattgaaatgattgccactagtgaaatcaggacttcatgtattgtcttagaaaaagattgcgacaaagcagttaatgcgattcataatcatttcgaattagacaaataa

SEQ ID NO: 95898 - protein, 586 aa, Prochlorococcus marinus str. MIT 9301
MALLVKKFGGTSVGDIRKIKNIASSICQSKEAGNEIVVVVSAMGQTTDDLNCLAESISKNPNRRELDMLLSTGEQVTIALLSMALNEYGIPAISMTGSQVGIITESIHGKARILDIKTERIQNYINQGFVVVVAGFQGTTLSHTGSMEITTLGRGGSDTSAVALSTALGAETCEIYTDVPGVLTTDPRIVPNAKLLDEISCEEMLELASVGASVLHPRAVEIARNYGIKLCVKSSQSDSSGTLLESQIKALPLKRGSLELTKTVNSLEVLENQAVFSLSNIPDRPGIAAQIFEKLSEASISVDLIIQATNDGNKNDITFTVSELEVKKTAEQCELITSQLGGEYNLKTNMTKLSIQGAGIMGRPSVSADLFDTLSQANINVRLIATSEIKVSCVIEINNIPKAIRFVAEKFKLSDTQIFVNPINKKQDQPEVRGIALDKNQVQVSFRKLPDRPGVAASICLALAENNLLIDTIVQSERISSLKTKDISLTMNKQDREKANLVFEALTKKLPGSYIEDGPAIAKVSTVGAGMAFKVGTAGKIFRALADQKINIEMIATSEIRTSCIVLEKDCDKAVNAIHNHFELDK

SEQ ID NO: 95899 - DNA, 1254 bp, Herminiimonas arsenicoxydans
  CDS (1)..(1254): transl_table=11
atggctttaatagttcacaaatacggcggcacatcgatgggctctaccgagcgcatcaagaatgttgccagacgcgtcgccaaatggcatgacgctggttatcaaatcgtggtggtgccatcggccatgtccggcgaaaccaatcgtttgatcggcttggccaaggagttgatgccgcatccgaatccgcgcgaactcgacatgctggcttcgactggagagcaggtttccgtcgccttgctggcgatggcgctgcattccatcggcaaggaagccgtgtcgtatactggctggcaggctggcatcaaaaccgactccgcctttaccaaggcacgcatacaatcgatcgatgacgtgaaggtgaagaaggatctggatgccggccgtatcgtgatcattaccggtttccagggtgtggatgaagatggcaatatcgccacgctgggacgcggcggttcggatacgtcggcggttgcggttgcggtcgcgcttgaggcgaaggaatgcctgatctataccgatgtggatggcgtctatacgaccgatccgcgcgtagtgtcggaagcacgtcgcctgaataccgtcacatttgaagagatgctcgaaatggcgtcgctaggctcgaaagtgctgcagatacgctcagtcgaatttgccggcaattacaagatgccgacgcgcgtattgtcgtcgctgaccgaccccatgatgtcgctggaagaagaagcaaaatccggcaccctgatttcgtttgaggaagatacaaagatggaacaagccgctattaccggtattgcatttagtcgcgatgaagcaaaaatcaccgttctgggcgtaccggatcgtcctggtatcgcttaccagattctcggccctatcgctgcagcgaatattgaagtcgacatgattatccaaaatcagtcggtagacggcaagacggactttaccttcaccgtaccgcgcgccgattacgccaaggcagtggatgtgctcaatgacagcgtcaaggcacatatcggtgctgccagtattcagggcgacaccaaggtgtcaaaagtgtccgtggtcggcgtcggcatgcgcagccatgtcggcatcgcatcgcaaatgttccgtaccttgtcggaagagggcatcaacatccagatgatctcaacttcggaaatcaagatttctgttttgatcgacgagaagtacatggaattggcagtgcgcgcattgcacaagacctttgatctggaaaaaagcaattaa

SEQ ID NO: 95900 - protein, 417 aa, Herminiimonas arsenicoxydans
MALIVHKYGGTSMGSTERIKNVARRVAKWHDAGYQIVVVPSAMSGETNRLIGLAKELMPHPNPRELDMLASTGEQVSVALLAMALHSIGKEAVSYTGWQAGIKTDSAFTKARIQSIDDVKVKKDLDAGRIVIITGFQGVDEDGNIATLGRGGSDTSAVAVAVALEAKECLIYTDVDGVYTTDPRVVSEARRLNTVTFEEMLEMASLGSKVLQIRSVEFAGNYKMPTRVLSSLTDPMMSLEEEAKSGTLISFEEDTKMEQAAITGIAFSRDEAKITVLGVPDRPGIAYQILGPIAAANIEVDMIIQNQSVDGKTDFTFTVPRADYAKAVDVLNDSVKAHIGAASIQGDTKVSKVSVVGVGMRSHVGIASQMFRTLSEEGINIQMISTSEIKISVLIDEKYMELAVRALHKTFDLEKSN

SEQ ID NO: 95901 - DNA, 1803 bp, Synechococcus sp. WH 7803
  CDS (1)..(1803): transl_table=11
atggccctgctggtgcagaagttcggcggcacctccgttggcagcgtggagcgcattcaggcggtggcccggcgcatcgccgcctgcaaggaggacggcaacgacctggtgatcgtggtctcggccatgggccacaccaccgatgaactcaccgccaaggcccgcgccatcagcagcaacccgccccagcgagaaatggacatgctgctggccaccggcgaacaggtgtccatcgccctgctctcgatggccctgcatgccctgggcgtgccagcgatctcgatgaccggcgcccaggtgggcatcgtcaccgaatcagcccacggccgcgcccgcatcctcgatgtgcgtaccgaccgtttgcgcagccgcctggcggaagggcaggtggtggtggtggccggcttccagggcaccagccagagcagcggtggcaccgctgagatcaccaccctgggccgtgggggctcggacacctcagcggtggccctggccgcagccctcggcgccgatgcctgcgagatctacaccgatgtgcccggcgtgctcaccaccgacccgcgcaaggtggccgatgcccagctgatgccggaggtgagctgcgatgaaatgctcgagctcgccagcctcggcgccgccgtgctccatccccgcgccgtggagatcgcccgcaactacggcgtcaccatggtggtgcgctccagctggagcgaagacgccggcaccaccctcaccagccgcagtgcccggcccatcggccgcgatggtctggagctgggccggcccgtcgatggcgccgaactggtggaagggcaggcggtgctggcgctctcgcacgtgtcggatcaaccgggcgtggccgcccagctgtttgaaagcctctccgccggtggggtgaatgtggatctgatcatccagtccacccacgagggcaacagcaacgacatcaccttcaccgtggccgaatccgagctcgagaaggcccgcggcatctgcgccgaccagctgcaaaccctgggcggtgagctggtggcggaagccggcatgagcaagctcagcatcagcggcgccgggatcatgggccgccccggcatcgccgccggcctgttccagaccctctcgcgggtgggcatcaacctgcgcctgatcgccaccagcgaagtgaaggtgagctgcgtggtggaggcgtccgccggtgccaaggccctgcaggccacccaggacgcttttgagctcgagagcgatctgatcagcctcaaccccctgcccagcggcgaaggcgatccggaagtgcgcgggattgccctcgacagggatcaggcccaggtgagcgtgcgccacgtgcccgacaaacccggtaccgccggtgccctctgcaacgccctggccgatgcgggcatcagcctcgatggcatcgtgcagtcggagcggcagcatgctgatggcagccgcgacatcagcttcacgctcaagcgcgacgaccgcgccgccgccgatcgcgccctctcccacctgctggcccaatggcccggcgccctgcttgaggatggacccgccattgcccgcgtcagcgccgtgggtgcgggcatgccggcaacggccggcaccgctgggcgcatgttccgctacctggcggacgccggcgtgaacatcgagatgatcgccaccagcgaaatccgcaccagctgtgtggtggccgaaagcgatggcatcgctgcgcttcaagccgtgcacaccgggttcgagctgggcggcagcacccgccatcaggcccagggaacggaatcgcctttggagagctga

SEQ ID NO: 95902 - protein, 600 aa, Synechococcus sp. WH 7803
MALLVQKFGGTSVGSVERIQAVARRIAACKEDGNDLVIVVSAMGHTTDELTAKARAISSNPPQREMDMLLATGEQVSIALLSMALHALGVPAISMTGAQVGIVTESAHGRARILDVRTDRLRSRLAEGQVVVVAGFQGTSQSSGGTAEITTLGRGGSDTSAVALAAALGADACEIYTDVPGVLTTDPRKVADAQLMPEVSCDEMLELASLGAAVLHPRAVEIARNYGVTMVVRSSWSEDAGTTLTSRSARPIGRDGLELGRPVDGAELVEGQAVLALSHVSDQPGVAAQLFESLSAGGVNVDLIIQSTHEGNSNDITFTVAESELEKARGICADQLQTLGGELVAEAGMSKLSISGAGIMGRPGIAAGLFQTLSRVGINLRLIATSEVKVSCVVEASAGAKALQATQDAFELESDLISLNPLPSGEGDPEVRGIALDRDQAQVSVRHVPDKPGTAGALCNALADAGISLDGIVQSERQHADGSRDISFTLKRDDRAAADRALSHLLAQWPGALLEDGPAIARVSAVGAGMPATAGTAGRMFRYLADAGVNIEMIATSEIRTSCVVAESDGIAALQAVHTGFELGGSTRHQAQGTESPLES

SEQ ID NO: 95903 - DNA, 1218 bp, Leptospira interrogans serovar Copenhageni str. Fiocruz L1-130
  CDS (1)..(1218): transl_table=11
atgacaaatataatcgttcaaaaatacggcggaacttccgtgggtactccggaaagaatccagaacgttgcaaaaagaatcaaatcctatcatgataaaggtcaacaagtggcggttatagtttccgcaatgggacataccacagacgaactcgttgacctcgcagcgaaaatttcttctaatccgcctaaacgtgaaatggacatgttactttctacgggcgaacagatttccactgcactcctcgctatggctctttgggaaatcggagttccggccacttcttttacaggttctcagatcaaacttcttacggacggaaatttctccaatgcaaagatcaaaatgatcgatcgatccagaatcgattctgcgttgaacgaaggtaaggtggttatcattgctggttttcagggaatagacgcggaagaaaatatcacaactttaggaagaggtggttccgacacttctgctgtcgcagtcgctgccattttaggtgcaaaagaatgtgagatttatacggacgtagatggagtttacaccgccgatccaagagttgttcccagcgctaaaaaacataaacaaattacttacgaagaaatgctcgaactggcgagtttaggagcgggtgttctccattccagaagtgtggaacttgggatgaattacgacgtggtcattcatgttcgttctagtttcaacgataatataggaacgcttgtagtgagcgaggataagattatggaaaaattaaaagtgagcggcgttactgctaaaaacgatcaagcaagaattacaatcgcaggagttccagataaacctggtttagccgcaggactttttggcgaactaagctctaaacatattcttgtagatatgatcgtccaatcttctccgcataacggcattaatacgatttcctttacaattcctaaaaaagatgttcacgaagcaaaaccgattcttgaaggattttcaaagtcgcataacgcaaaggaaccagagatcaacgaaaatatcgcgatcgtttctgcggtcggagtaggtatgaaatcgcacgtaggtgttgcagcgggaatgttcaaagcacttgccgacaacggaatcaacatagaaatgatttctacttcagaaatcaaaatctcttgtgtaattgcagaaagtcaggctaaaatcgcagttaataaaattcacgacgtatttggtctttcttcttaa

SEQ ID NO: 95904 - protein, 405 aa, Leptospira interrogans serovar Copenhageni str. Fiocruz L1-130
MTNIIVQKYGGTSVGTPERIQNVAKRIKSYHDKGQQVAVIVSAMGHTTDELVDLAAKISSNPPKREMDMLLSTGEQISTALLAMALWEIGVPATSFTGSQIKLLTDGNFSNAKIKMIDRSRIDSALNEGKVVIIAGFQGIDAEENITTLGRGGSDTSAVAVAAILGAKECEIYTDVDGVYTADPRVVPSAKKHKQITYEEMLELASLGAGVLHSRSVELGMNYDVVIHVRSSFNDNIGTLVVSEDKIMEKLKVSGVTAKNDQARITIAGVPDKPGLAAGLFGELSSKHILVDMIVQSSPHNGINTISFTIPKKDVHEAKPILEGFSKSHNAKEPEINENIAIVSAVGVGMKSHVGVAAGMFKALADNGINIEMISTSEIKISCVIAESQAKIAVNKIHDVFGLSS

SEQ ID NO: 95905 - DNA, 1269 bp, Thermus thermophilus HB27
  CDS (1)..(1269): transl_table=11
gtgctaacattctctttcaaaccgcccgggggggcggggaaggagggaagcgtggccctggtggttcagaagtacggcggcacctccgtgggcgacctggagcgcatccacaaggtggcccagcgcatcgcccactaccgcgagaaggggcatcggcttgcggtggtggtctcggccatggggcacaccaccgacgagctcatcgccttggccaagcgggtgaacccgagacctccctttcgcgagctggacctcctcaccaccaccggggagcaggtctccgtggccctcctctccatgcagctttgggccatggggatccccgccaagggcttcgtccagcaccagatcggcatcaccaccgacgggcgctacggggacgcccggatcctcgaggtgaacccggcccgcatccgggaggccctggagcagggctttgtggcggtgatcgcgggcttcatgggcaccaccccggaaggggagatcaccaccttgggccggggagggtcggacaccaccgccgtggccatcgccgccgccctcggggccaaggagtgcgagatctacacggacacggagggggtctacaccacggacccccacctgatccccgaggcgaggaagctttccgtcatcggctacgaccagatgctggagatggccgctttgggggccagggtcctccacccccgggcggtctactacgccaagcgctacggggtggtcctccacgtgcgctctagcttctcctacaaccccggtaccctggtgaaggaggtcgccatggagatggacaaggcggtgacgggcgtggccttggacctggaccacgcccagatcgggcttatcggcatcccggaccagccgggcatcgcggccaaggtcttccaggctttggccgagcggggcatcgccgtggacatgatcatccagggggttcccggccacgacccctcgaggcagcagatggccttcacggtgaagaaggacttcgcccaggaggccctggaggctttggagcccgtcctcgccgagatcgggggcgaggccatcttgaggccagacatcgccaaggtctccatcgtgggcgtgggcctcgcctccaccccggaggtccccgccaagatgttccaggcggtggcctccaccggggccaacattgagatgatcgccaccagcgaggtgcgcatctccgtgatcatccccgccgagtacgccgaggcggcgcttagggccgtccaccaggcttttgagctggacaaggcctga

SEQ ID NO: 95906 - protein, 422 aa, Thermus thermophilus HB27
MLTFSFKPPGGAGKEGSVALVVQKYGGTSVGDLERIHKVAQRIAHYREKGHRLAVVVSAMGHTTDELIALAKRVNPRPPFRELDLLTTTGEQVSVALLSMQLWAMGIPAKGFVQHQIGITTDGRYGDARILEVNPARIREALEQGFVAVIAGFMGTTPEGEITTLGRGGSDTTAVAIAAALGAKECEIYTDTEGVYTTDPHLIPEARKLSVIGYDQMLEMAALGARVLHPRAVYYAKRYGVVLHVRSSFSYNPGTLVKEVAMEMDKAVTGVALDLDHAQIGLIGIPDQPGIAAKVFQALAERGIAVDMIIQGVPGHDPSRQQMAFTVKKDFAQEALEALEPVLAEIGGEAILRPDIAKVSIVGVGLASTPEVPAKMFQAVASTGANIEMIATSEVRISVIIPAEYAEAALRAVHQAFELDKA

SEQ ID NO: 95907 - DNA, 1257 bp, Bartonella quintana str. Toulouse
  CDS (1)..(1257): transl_table=11
atggcgcggattgttatgaaatttggcggaacatctgtcgcaaacattgagcgtattcataatgttgcacggcatatcaaaagagaggtagatgcaggcaatgaggttgcggttgtggtatccgcaatggccggtaaaaccaatgagcttgttcagtggacgcgtgatgcttcaccaatgcataaagatgctgacgaatatgatgtggttgttgcttctggtgaacaaataacggcgggtttgttagctctgaaattgcaagcaatgggagtaaatgctcgttcatggcttggttggcaaattcctattcacactgataatgtacatggtagtgcacgtattacagatattaatggatcttttttaatacagcgttttcaggaaggccaagtagcagttatcgctggttttcagggattagcgccagataatcggatttctactttagggcgtggtggatcagatacaagtgctgttgcaatagcggcagctgtacaggcggatcgctgtgatatttatacagatgtggacggtgtttatacaactgatccacgcatagaacctaaggcacgtcttttaccaaaagtggcttttgaagaaatgttggaaatggcttctcttggggcaaaagttttacaggttcgttctgttgaattggctatggttcataaagtccgtactttcgtgcgctcaagttttgaggatcccgatgcgttaggcatggatgatccaataaattcttctggaacacttatttgcgatgaggatgaaatcttggaacaacaaaatgttactggtattgcttttgctaaggatgaagcgcaaatttcacttcgccgacttgctgatcgtccagggatctctgcagcaatttttggacccttggctgaagagcgaattaatgttgatatgattgtgcaaaatatttctgaagatggctcaaaaaccgatatgacttttactgtaccatcagtagatgtcgaaaaagctgttacacttcttgagaaaaatcgtaaagagattgggtttgacgttctccaatttgaaagaaatcttgccaaggtgtctgttattggtattggaatgcgtagccatgcaggtgttgcggctacagcatttaaggctctatctgaaaaaggtattaatattcaagcaattacgacttcagagattaagatttctattttgattgatcacgcttacactgaacttgcggttagaacattacatgctctctatggacttgataagggataa

SEQ ID NO: 95908 - protein, 418 aa, Bartonella quintana str. Toulouse
MARIVMKFGGTSVANIERIHNVARHIKREVDAGNEVAVVVSAMAGKTNELVQWTRDASPMHKDADEYDVVVASGEQITAGLLALKLQAMGVNARSWLGWQIPIHTDNVHGSARITDINGSFLIQRFQEGQVAVIAGFQGLAPDNRISTLGRGGSDTSAVAIAAAVQADRCDIYTDVDGVYTTDPRIEPKARLLPKVAFEEMLEMASLGAKVLQVRSVELAMVHKVRTFVRSSFEDPDALGMDDPINSSGTLICDEDEILEQQNVTGIAFAKDEAQISLRRLADRPGISAAIFGPLAEERINVDMIVQNISEDGSKTDMTFTVPSVDVEKAVTLLEKNRKEIGFDVLQFERNLAKVSVIGIGMRSHAGVAATAFKALSEKGINIQAITTSEIKISILIDHAYTELAVRTLHALYGLDKG

SEQ ID NO: 95909 - DNA, 1281 bp, Acinetobacter sp. ADP1
  CDS (1)..(1281): transl_table=11
atggcattaatcgttcaaaaatatggcggtacttctatgggtactcccgagcgcattttaaatgttgctcgtcgtgtgaagcgctggcatgatcacggccacaaagtggttgtggttgtatcagcgatgagtggcgaaaccaatcgcctacttgctctcgcgaaagccattaccgatacccctgatccgcgtgaactcgaccagatggtctctacaggcgaacaggtgacgatttcaatgttagcaatggcactcaattcgattggtgtagaagctaaatcatatacaggtcgtcaagttggtattaaaacagacagcgcatataacaaagcacgtattgaagcgattgataccgatgtcatgaccaaagatctggatgctgggcgtgtactggttgttgcaggctttcaaggtgtagatgaagaaggtaatacaaccaccctaggtcgtggtggatcagacactacaggtgttgcacttgcagcagcgctcaaagcagatgaatgccagatctacactgacgttgatggcgtatatactaccgatccacgcgttgcacctaaagccaaaaaagttgatcgtatttcatttgaagaaatgttagaaatggcttctttaggttctaaagttcttcaaattcgctctgttgagtttgctggcaaatatcaagtgccactgcgcgtattatcaagctttgataatgacaatgatggtgcatttgatgaagaatttaaacaaaacgtaggtacgttaattacaactgaggcggaagatacaatggaacaaccgattatctctggtatcgcatttaatcgtgacgaagcaaaattaaccatcctgggtgttccagatgagccaggtattgccgctaaaattttggttccaattagtgctgccaacatcgaagttgacatgatcgtacaaaatgtcgaagaagatggaacaacggattttacatttacggtaaaccgtggcgacttggcaaaagcaaagaaaatccttgaagaaactgcttcaaatatcggtgctcgtgaagtttcaacacgtgatgatattgtcaaagtttcaattgtgggtgtaggtatgcgctcacatgcaggtgttgcgagtaaaatgtttatggctttggccgaagaaagcatcaacattttgatgatttcgacttctgaaattaaggtttcagtactcatcgaagaaaattatctagagcttgctgttcgtacactccatactgcgtttggtttggatcgtgaacatggcgaaagcagtgcacgtgcttaa

SEQ ID NO: 95910 - protein, 426 aa, Acinetobacter sp. ADP1
MALIVQKYGGTSMGTPERILNVARRVKRWHDHGHKVVVVVSAMSGETNRLLALAKAITDTPDPRELDQMVSTGEQVTISMLAMALNSIGVEAKSYTGRQVGIKTDSAYNKARIEAIDTDVMTKDLDAGRVLVVAGFQGVDEEGNTTTLGRGGSDTTGVALAAALKADECQIYTDVDGVYTTDPRVAPKAKKVDRISFEEMLEMASLGSKVLQIRSVEFAGKYQVPLRVLSSFDNDNDGAFDEEFKQNVGTLITTEAEDTMEQPIISGIAFNRDEAKLTILGVPDEPGIAAKILVPISAANIEVDMIVQNVEEDGTTDFTFTVNRGDLAKAKKILEETASNIGAREVSTRDDIVKVSIVGVGMRSHAGVASKMFMALAEESINILMISTSEIKVSVLIEENYLELAVRTLHTAFGLDREHGESSARA

SEQ ID NO: 95911 - DNA, 1287 bp, Leifsonia xyli subsp. xyli str. CTCB07
  CDS (1)..(1287): transl_table=11
atggctttgatcgtgcagaaattcggcggctcgtccgtctccgacgccgaatccatcaagcgcgtcgccaagcggatcgtcgagacccgcaaggccggaaacgaagtcgttgtcgccgtctccgcgatgggggacaccaccgatgagctggtcgacctcgcacacgaggtcacgccgatcccggccccccgcgaactcgacatgctgcttaccgcgggcgagcgcatctcgatggcgctcctcgcgatggcgatcaagagcatgggctccgatgcccggtcgttcaccggcagccaggcgggcatgatcaccgacgcggtgcatggctccgcgcgcatcgtggacgtgacgcccggccgtatccaggacgccctctccgagggggccatcgcgatcgtcgcgggcttccagggcttcagccgggagtcccgcgacatcacgacgctcggacgcggcggctccgacaccaccgccgtcgcgctcgccgtcgcgctcggcgccgaggtctgcgagatctacacggatgtggatggcgtgttcacctccgacccccggcaggttccgctcgcgcgcaagatcgaccgcatcaccagcgaggagatgctggagctggcggcggcaggcgcgaaggtcctgcacattcgcgcggtggagtacgcccgccgccacgacgtgactctgcacgtgcgctcctcgttctcgaaccgggagggcacgtatgtcctcaacgaagcagccgcggcggccgccgcgaagaaggatggaattgtggaagagcccatcatcgccggagtcgccaccgatctgagcgaggcgaagatcaccgttgtcggcgttcccgacgtccctggcaaggcggcgcagatcttcaagatcgtcgccaaggcgaacgccaacgtggacatgatcgtgcagaacgtctccgcggcggccaccagcctgaccgacatctcgttcacgctgccgaagtcggaggggcagcgcgtgctgaccgccctgacggcggagaagtacgaagtcggcttccagtcgctccagtacgacgaccagatcggcaagctcgccctggtcggcgccgggatgcgcaccaacaccggtgtctcggccaagctcttcgaggccctcttcgacgccggcatcaacatcgagatgatctccaccagcgagatccgcatctcggtcgtgacctgcgccgacaccgtggcggaggccgctcgtgtcgtccacagcgccttcaggctcgacggcgaccagcaggccatcgtctacgccggcaccggccgctga

SEQ ID NO: 95912 - protein, 428 aa, Leifsonia xyli subsp. xyli str. CTCB07
MALIVQKFGGSSVSDAESIKRVAKRIVETRKAGNEVVVAVSAMGDTTDELVDLAHEVTPIPAPRELDMLLTAGERISMALLAMAIKSMGSDARSFTGSQAGMITDAVHGSARIVDVTPGRIQDALSEGAIAIVAGFQGFSRESRDITTLGRGGSDTTAVALAVALGAEVCEIYTDVDGVFTSDPRQVPLARKIDRITSEEMLELAAAGAKVLHIRAVEYARRHDVTLHVRSSFSNREGTYVLNEAAAAAAAKKDGIVEEPIIAGVATDLSEAKITVVGVPDVPGKAAQIFKIVAKANANVDMIVQNVSAAATSLTDISFTLPKSEGQRVLTALTAEKYEVGFQSLQYDDQIGKLALVGAGMRTNTGVSAKLFEALFDAGINIEMISTSEIRISVVTCADTVAEAARVVHSAFRLDGDQQAIVYAGTGR

SEQ ID NO: 95913 - DNA, 1230 bp, Bacillus licheniformis ATCC 14580
  CDS (1)..(1230): transl_table=11
atgggtctcatcgtccaaaaatttggcggaacttccgtagggtcagtggaaaaaatattgaatgtcgcataccgcgtcatcgaagaaaaacagcgcggtcatgatgttgtcgtcgtcgtttcggcgatgggcaaatcgacggactccctcgtcgcgcttgccaaggaaatcaccgagcagccgagcagcagggaaatggacatgctgctgacaacaggagagcaggtgacgatttcgctgttgacaatggctttgcagaacaaggggtatgatgcggtttcctatacaggctggcaggccggcatcgaaaccgaaaatattcacggcaacgcaagaattacgaacattgatacagccaagctgaaagagcgcctgaatgaagggaaaatcgccgttgtcgccggattccagggcgtcacagcggaaggcgaaatcacaacgctcggcagaggcggatcagatacgacagccgttgccctcgcagcagccctgaaagctgataaatgcgacatttacaccgatgtgccgggggttttcacgacggatccccgctatgtgaaaacagcgcggaagctggccggaatctcctacgatgaaatgctggagcttgccaatcttggagcaggcgtccttcatccgagagctgttgaatttgcgaaaaactaccaggtgcctttggaagtccgttcaagcaccgaaaaagaagccggcacattaatcgaggaggaatcatcaatggaacagaatttaatcgtaagaggcattgcatttgaagatcagatcacacgcgtgaccgtatgcggcctggcgagcggcctgacgacgctgtcaacgatttttacaacgctcgccaaacagaacatcaacgttgacatcatcattcaatcggtgacaggcacaagcaaaacgtcgatttctttctcagtgaaaacggaagacttaaaacggacggttgaagttctcgaagaatacaaagacgcgctcgactatgaacagattgaaacggaaaacaggcttgccaaagtgtcgatcgtcggttctggcatgatctccaacccgggagtagcagcggaaatgttcgctgtgctggcggaaaaaaacatccaggtcaaaatggtcagcacatccgaaatcaaagtttcgactgtcgtcaacgaaggcgatatggtgaaagccgttgaagcgctgcatgatgcttttgaactgtcgaagcagacagcagtcatttaa

SEQ ID NO: 95914 - protein, 409 aa, Bacillus licheniformis ATCC 14580
MGLIVQKFGGTSVGSVEKILNVAYRVIEEKQRGHDVVVVVSAMGKSTDSLVALAKEITEQPSSREMDMLLTTGEQVTISLLTMALQNKGYDAVSYTGWQAGIETENIHGNARITNIDTAKLKERLNEGKIAVVAGFQGVTAEGEITTLGRGGSDTTAVALAAALKADKCDIYTDVPGVFTTDPRYVKTARKLAGISYDEMLELANLGAGVLHPRAVEFAKNYQVPLEVRSSTEKEAGTLIEEESSMEQNLIVRGIAFEDQITRVTVCGLASGLTTLSTIFTTLAKQNINVDIIIQSVTGTSKTSISFSVKTEDLKRTVEVLEEYKDALDYEQIETENRLAKVSIVGSGMISNPGVAAEMFAVLAEKNIQVKMVSTSEIKVSTVVNEGDMVKAVEALHDAFELSKQTAVI

SEQ ID NO: 95915 - DNA, 1230 bp, Methylococcus capsulatus str. Bath; identical to SEQ ID NO: 83931
  CDS (1)..(1230): transl_table=11

SEQ ID NO: 95916 - protein, 409 aa, Methylococcus capsulatus str. Bath; identical to SEQ ID NO: 83932

SEQ ID NO: 95917 - DNA, 1794 bp, Synechococcus elongatus PCC 6301; identical to SEQ ID NO: 83933
  CDS (1)..(1794): transl_table=11

SEQ ID NO: 95918 - protein, 597 aa, Synechococcus elongatus PCC 6301; identical to SEQ ID NO: 83934

SEQ ID NO: 95919 - DNA, 1218 bp, Dehalococcoides ethenogenes 195
  CDS (1)..(1218): transl_table=11
atggcagttgtagttcataaatacggcggcacttcggttggtgatgccgaaaggattaaacacgtagccaagcggattattgccgcccgccagaagggcagcgatgtggtggcggtggtttcggctatgggagatactaccgatgacctgattgcccttgcccacaagctgaatgactgtcccgaaccgcgggagatggacgttttactgtctaccggtgaaatagtctccagcacccttttggccatggcgcttaaaaacatggggcaggatgctatcagcctttcaggccagcaggcaggtatccgtacggattcggctcattcaaaagcccgcattaccggcattgaccccaagcgtattcatgatgaactggctaaagggcgggtggtaattgtggccggttttcagggcgtgtcagactgtcaggacgtaaccaccctggggcggggcggttctgatactacggcggttgctctggcggccagtttgggtgccagtatatgtgagcgttatacagacgtggacggcgtttataccgctgacccccgcctgataccggatgcccggcggcttgcggaaataagttatgaagaaatgctggaactttcatcttacggggctaagataatgcacccccgggcggtggaaataggccaggtgtacaatatacccattctggtagcgtccagctttaatgaaaatcccggcacactgatacatggaggggaaaatatggaaatacgaaacagggtcagcggaatagcccatgattttgaggttgccaagataaccatactcggggtgcctgacaagccgggcatagcggccggtctttttgccccgctggccaaagccggagtcagcgtggacaccatcgtccagaactccagccaggaccatataacagacctgacctttacggttaccaagtcagatttgggcaaggcgctggaggttatcggccctattgccaaggatattcaggcccgggaagtgctgagtgattccaggataggcaaagtcagcattatcggcaccggcatgttaaatgcacccggttatgccgcccgcatgttcaaagctttgtcagatgccggaataaatattttgcttatttccacctcggaaatacgtataacctgcattatagaagaagacaaggtaaaagatgcggttaaggctatacacaaggcctttgagatggaaaaagactag

SEQ ID NO: 95920 - protein, 405 aa, Dehalococcoides ethenogenes 195
MAVVVHKYGGTSVGDAERIKHVAKRIIAARQKGSDVVAVVSAMGDTTDDLIALAHKLNDCPEPREMDVLLSTGEIVSSTLLAMALKNMGQDAISLSGQQAGIRTDSAHSKARITGIDPKRIHDELAKGRVVIVAGFQGVSDCQDVTTLGRGGSDTTAVALAASLGASICERYTDVDGVYTADPRLIPDARRLAEISYEEMLELSSYGAKIMHPRAVEIGQVYNIPILVASSFNENPGTLIHGGENMEIRNRVSGIAHDFEVAKITILGVPDKPGIAAGLFAPLAKAGVSVDTIVQNSSQDHITDLTFTVTKSDLGKALEVIGPIAKDIQAREVLSDSRIGKVSIIGTGMLNAPGYAARMFKALSDAGINILLISTSEIRITCIIEEDKVKDAVKAIHKAFEMEKD

SEQ ID NO: 95921 - DNA, 1206 bp, Staphylococcus aureus subsp. aureus COL
  CDS (1)..(1206): transl_table=11
atggtaacaagaagtgtgttgaaatttggcggatcatccgtcagtgattttacaaaattaaaaaggatcgctgaaatgttaaaggagcgagtcaatcaagatgaacaattaattgtcgttgtaagtgctatgggtaacacaacagatcaattaatgacgaatgtatcaaccttgactaaagcaccaaaacaacaagaactggcattattattgacaaccggagagcaacaaactgtatcttatttatcaatggtattaaatgatatcggtatgaatgccaaagcaatgactggctatcaagcgggtattaaaaccattggccatcatttaaaaagtaaaattgctcaaattaatcctcaaacatttgaacaagcctttcaagaaaacgatattttagtagttgctggatttcaaggcatcaatgaacatcaggaattaacaactttaggcagaggtggttctgatacgaccgctgtggcacttgctgttagtaatcaaataccttgtgaaatttataccgacgttgatggtgtgtatgccactgacccaagacttttaccaaaggctaaacgactagacatcgtctcatatgaagaaatgatggaaatgagcgctttaggtgctggtgtacttgaaacaagaagtgttgaattagctaaaaactataatatccctttatatttaggaaaaactttatcgaacgtgaaaggaacatggattatgtcaaatgaagaaatattagagaaaaaagcagttactggtgtggctttggataaacatatgatgcatgtaacaattagttatcccctacctgacaatcagctacttacccaactatttacggaacttgaagaaggtgctgtaaatgttgatatgatttcacaaatcgtcaacttggatgggctacaactatccttcacgattaaagatagtgattttcatcaaatttctatgattcttgaaacattaaagaatcaatatgaagcattagcttataaaatcaatgagcattatgtcaaaatttcattaattggctcaggcatgcgtgatatgtcaggtgtggcatcaaaagcatttttgacattaattgaaaataatatacctttctaccaaacaacaacatctgaaataagtatttcatacgtcattgatgattttaatgggcaacaagcggtagaaaaactatatgacgcatttaacatttaa

SEQ ID NO: 95922 - protein, 401 aa, Staphylococcus aureus subsp. aureus COL
MVTRSVLKFGGSSVSDFTKLKRIAEMLKERVNQDEQLIVVVSAMGNTTDQLMTNVSTLTKAPKQQELALLLTTGEQQTVSYLSMVLNDIGMNAKAMTGYQAGIKTIGHHLKSKIAQINPQTFEQAFQENDILVVAGFQGINEHQELTTLGRGGSDTTAVALAVSNQIPCEIYTDVDGVYATDPRLLPKAKRLDIVSYEEMMEMSALGAGVLETRSVELAKNYNIPLYLGKTLSNVKGTWIMSNEEILEKKAVTGVALDKHMMHVTISYPLPDNQLLTQLFTELEEGAVNVDMISQIVNLDGLQLSFTIKDSDFHQISMILETLKNQYEALAYKINEHYVKISLIGSGMRDMSGVASKAFLTLIENNIPFYQTTTSEISISYVIDDFNGQQAVEKLYDAFNI

SEQ ID NO: 95923 - DNA, 1218 bp, Neisseria gonorrhoeae FA 1090
  CDS (1)..(1218): transl_table=11
atggcgttaatcgtacataaatacggcggcacatccgtaggctcgcccgagcgcattaaaaacgtggccaaacgtgtcgctaaagcccgcgccgaaggacacgatatcgtcgtcgtcgtatccgccatgagcggcgaaaccaaccgtctggttgcgttggcgcacgaaatgcaggagcatcccgatccgcgcgagctggacgtcgtcttagctaccggcgaacaagtaaccatcggccttttggcaatggcattgaaggatatcggcgtggatgccaaaagctacacaggctggcaggtctccctcaaaaccgataccgcccacaccaaagcccgcatagaaagcattgatgacgaaaaaatgcgcgccgacctcgccgccggcaaagtcgtcatcgttgccggcttccaaggcatcagcagtgaaggcaatatttccacgctaggacgcggcggttccgacacttccgccgttgcgcttgccgcagccctcaaagcggacgaatgccaaatctataccgacgtagacggcgtttacaccaccgacccccgcgtcgtacccgaagcgcgccgtatggatacggttacatttgaagaaatgatcgaactggccagcctcggttcgaaagttttgcaaatccgttcagtagaattcgccggaaaatacaaagtgcgcctgcgcgtactgagcagcctgcaagacggcggcaacggcaccttaattacctttgaagaggacgacaacatggaaagagctgccgtaaccggtatcgcattcgataaaaaccaagcccgcatcaacgtgcgcggtgtgcccgataagcccggcgtcgcctatcagattttgggcgcggtcgcagatgccaacatcgaagtcgatatgattatccaaaatgtcggcagcgaaggcacaaccgatttttctttcaccgtaccgcgcggcgattacaaacagactttggaaatcctgtcggaacgtaaagacagtatcggcgcagcttctatcgacggcgacgacaccgtgtgcaaagtctccgcagtcggtttgggtatgcgttcgcacgtcggcgtagccgccaaaatcttccgcacgctcgccgaagagggcatcaacatccaaatgatttccacctccgaaatcaaagtttccgtattgattgacgaaaaatacatggaactggcaaccagggtattgcataaagcctttgatttgggctga

SEQ ID NO: 95924 - protein, 405 aa, Neisseria gonorrhoeae FA 1090
MALIVHKYGGTSVGSPERIKNVAKRVAKARAEGHDIVVVVSAMSGETNRLVALAHEMQEHPDPRELDVVLATGEQVTIGLLAMALKDIGVDAKSYTGWQVSLKTDTAHTKARIESIDDEKMRADLAAGKVVIVAGFQGISSEGNISTLGRGGSDTSAVALAAALKADECQIYTDVDGVYTTDPRVVPEARRMDTVTFEEMIELASLGSKVLQIRSVEFAGKYKVRLRVLSSLQDGGNGTLITFEEDDNMERAAVTGIAFDKNQARINVRGVPDKPGVAYQILGAVADANIEVDMIIQNVGSEGTTDFSFTVPRGDYKQTLEILSERKDSIGAASIDGDDTVCKVSAVGLGMRSHVGVAAKIFRTLAEEGINIQMISTSEIKVSVLIDEKYMELATRVLHKAFDLG

SEQ ID NO: 95925 - DNA, 1272 bp, Thermobifida fusca YX; identical to SEQ ID NO: 83939
  CDS (1)..(1272): transl_table=11

SEQ ID NO: 95926 - protein, 423 aa, Thermobifida fusca YX; identical to SEQ ID NO: 83940

SEQ ID NO: 95927 - DNA, 1767 bp, Prochlorococcus marinus str. NATL2A
  CDS (1)..(1767): transl_table=11
atggcattgctggttcaaaaatttggcggcacttctctaggaagcattgagcgcataaaagctgtcgcgcaaagaatcaaatcaagtaaagaaaaaggtgatgatctagtagttgttgtgtcggccatgggacatcaaactgatgagttaacacggctagcatcagaaataactgttgatcctcctcatagagaaatggatatgctcctctcaactggggagcaagtttcaatatcattattaacaatggccctgaacgaattgggcacaccagcaatctctttgactggaactcaagctggaattatcacagaatcagctcatggaagagccagaatcctcgagataaggacagaacgaataaaaaatctcttagaccaaggtcaaaccatagttattgctggattccaaggaacaactcttggcataggaggaattgctgaaattacaactttaggtagaggaggttcagatacttctgcagtagctctagcggcatcgcttgaagctgctaaatgtgaaatttataccgatgttcctggcgtacttacaactgacccaagaattgtgaaaaatgcaaaattaatgaaaagtattagttgtgatgaaatgttagaattggccagccttggagcagctgttttacatcctcgagcagttgaaatagcaagaaatttcggcgtaactcttgtcgttaaatccagttgggacaaccttgatggaaccactctaactagtaataagaagcctgacttttctcaaggtggaatagaacatcgaagtcctgtcgatggattagaacttcttgagaatcaagctgtagtagctttatctaatattccagatcgtccaggaattgctgcggaactttttgaatctctatcagagggtggggtgaatgtcgatctcattattcaagcgacacatcagatcgactctaacgacatcacttttactgttgctgaaaatgaattacataatgcactaactcaatgtaaaaaactcgttaatactattggaggtgatatctcttttcaaaaagatctgactaaactaagtatttatggagctgggataatgggaaggcctggaatagcctcatcgctattccaaattctatctgactctggtattaatatcagactaatcgcaactagtgaagtcaaagtcagttgtgttattgatgcagaattagggaaaaaagcactacgtaatgtaagcgaagttttcaagctcactgataaacaaattaccgtgaatcctacgattgaaaataataacgagccagaagtaaggggaatagctttagataaagatcaaatacaaattagcgtgaagaatgttccagataaaccagggactgcctccacaatatgttccactttagctgagaaaaatatcagcttagatactatagttcaatctgaaagaaagcataaagataaaaccaaagatatcagcttcactttaaagaaaaatgatagaagcgatgctaaatatgcattaaaagaattgattggcaattggaaaggatcaaacctcgaagaaggagagtcaatagtacgaattagcgcagtaggttctggaatgccttttacaaaaggaacagccggtaaaatttttagagcactagcaaatcaaaaaatcaacatagaaatgatcgccaccagtgaaataagaacaacttgtattatctcagaaaaatatggtgaaaaagcattaaatgaaattcattcttgctttaaattaggaaaaaatgaaagctaa

SEQ ID NO: 95928 - protein, 588 aa, Prochlorococcus marinus str. NATL2A
MALLVQKFGGTSLGSIERIKAVAQRIKSSKEKGDDLVVVVSAMGHQTDELTRLASEITVDPPHREMDMLLSTGEQVSISLLTMALNELGTPAISLTGTQAGIITESAHGRARILEIRTERIKNLLDQGQTIVIAGFQGTTLGIGGIAEITTLGRGGSDTSAVALAASLEAAKCEIYTDVPGVLTTDPRIVKNAKLMKSISCDEMLELASLGAAVLHPRAVEIARNFGVTLVVKSSWDNLDGTTLTSNKKPDFSQGGIEHRSPVDGLELLENQAVVALSNIPDRPGIAAELFESLSEGGVNVDLIIQATHQIDSNDITFTVAENELHNALTQCKKLVNTIGGDISFQKDLTKLSIYGAGIMGRPGIASSLFQILSDSGINIRLIATSEVKVSCVIDAELGKKALRNVSEVFKLTDKQITVNPTIENNNEPEVRGIALDKDQIQISVKNVPDKPGTASTICSTLAEKNISLDTIVQSERKHKDKTKDISFTLKKNDRSDAKYALKELIGNWKGSNLEEGESIVRISAVGSGMPFTKGTAGKIFRALANQKINIEMIATSEIRTTCIISEKYGEKALNEIHSCFKLGKNES

SEQ ID NO: 95929 - DNA, 1251 bp, Ralstonia eutropha JMP134
  CDS (1)..(1251): transl_table=11
atggctctcatcgttcacaaatacggcggcacttcgatgggttccacggaacgcatcaagaatgtcgccaagcgcgtggccaagtggcaccgcgccggtcaccgcgtagtcgtggtgccttcggccatgtcaggcgaaaccaatcgcctgctgggactcgccaaggaaatttcggcacagccggacccgcgtgaactggacatgctcgcctcgaccggcgaacaggccagcgtcgcgctgctggccatcgcgctgcatggcgaaaacatcgacgcggtcagctacacgggctggcaggtgccggtgaagaccgactcgtcctacaccaaggcgcgtatcgagtcgatcgacgacgagcgcatcctcggcgatctcgatgcgggccgcgtggtggtgatcaccggcttccagggcatcgacgacgacggcaacatcacgacgctgggccgtggcggctcggatacctcggctgtggctatcgccgccgcgatcgaggccgatgagtgcctgatctacaccgacgtggacggcgtctacacgaccgatccgcgtgtagtggaagacgcgcgccggctggacaagattaccttcgaagagatgctggaaatggccagcctcggctccaaggtgctgcagatccgctccgtggagttcgccggcaagtaccgcgtgaagacccgcgtactgtcgtcgctgaccgacccgcttatgccgctcgagaacgaaatcaactcgggcacgctgatcacttttgaggaagattccaacatggaagccgccgttatctcgggcatcgccttcgcccgtgacgaagccaagatcaccgttctgggcgtgccggacaagccgggcatcgcgtaccagatcctgggcccggtcgccgacgccaacatcgacgtcgacatgatcatccagaaccagtcggtggacggtaagaccgacttcacattcaccgtgccgcgcggcgactaccagcgtacgctgacgctcctgacggacagcgtcaagccgcacgtcggtgccgccaacgtttcgggcgacccgaaggtgtcgaaggtgtcggtggtgggcgtgggcatgcgctcgcacgtgggcgtcgccagcaagatgttccgcacgctgtcggaagagggcatcaacatccagatgatctccacctcggaaatcaagatctcggtgctgatcgacgaaaagtacatggaactcgccgtgcgcgcactgcacaaggcgttcgaactggaacaggcctga

SEQ ID NO: 95930 - protein, 416 aa, Ralstonia eutropha JMP134
MALIVHKYGGTSMGSTERIKNVAKRVAKWHRAGHRVVVVPSAMSGETNRLLGLAKEISAQPDPRELDMLASTGEQASVALLAIALHGENIDAVSYTGWQVPVKTDSSYTKARIESIDDERILGDLDAGRVVVITGFQGIDDDGNITTLGRGGSDTSAVAIAAAIEADECLIYTDVDGVYTTDPRVVEDARRLDKITFEEMLEMASLGSKVLQIRSVEFAGKYRVKTRVLSSLTDPLMPLENEINSGTLITFEEDSNMEAAVISGIAFARDEAKITVLGVPDKPGIAYQILGPVADANIDVDMIIQNQSVDGKTDFTFTVPRGDYQRTLTLLTDSVKPHVGAANVSGDPKVSKVSVVGVGMRSHVGVASKMFRTLSEEGINIQMISTSEIKISVLIDEKYMELAVRALHKAFELEQA

SEQ ID NO: 95931 - DNA, 1815 bp, Anabaena variabilis ATCC 29413
  CDS (1)..(1815): transl_table=11
atggcgcttatagttcagaagttcggtggttcatctgtcggttcagtagaacgtattcaagcagtggcacagcgtgtctacaaaacagtgaaagcaggaaattcgctggttgtagtggtttctgcaatgggcaaaaccaccgatggactcgtcaaactagccaatgaaatttctcgcaaccctaatcgtcgggaaatggatatgttactctccacaggggaacaagtcaccattgccctacttagtatggcattgcaagaacttggacaaccagcgatttccatgactggcgctcaagtaggaattgtgacagaagctgaacacacccgcgccagaattttacacatcgaaactgaacgagtagaaggccatattcaggaaggtaaagtagttgtagtagctggttttcaagggatatccagcaatggctcactagaaatcaccactttgggacgtggtggttccgatacatcagctgtagctttggcagcagcattacaggcagatttttgtgaaatttatacagacgtaccaggaattttaactacagacccccgcatagtgccggaagcccagttaatgggtgaaatcacctgtaatgaaatgctggagttggcaagtttaggggcaaaagtgttacatccccgtgcggtggaaattgcccgtaactatgggatgcctttagtagtcaaatctagctggacggatgaccctggtacttgggtaactacaccaaaaccccaagggcgatcgctcatcaatttagaactagcccggccggtggatgatgtagaacttgatacagaccaagcgaaagtcgctctgttacgcgtacccgataaaccaggagtagcagcaaaattatttggggaaatttcccgtcaaaaagtagacgtagatttaattattcaatcaatccatgaaggtaacagtaacgacatcgcctttactgttaccacacctatattaaaacgagcagaagccgtagccgccgcgatcgccccatccctccgcagtccatctcatcccaaatcagacgaagctgaggtgatggtagaacaaaacattgccaaagtcagtattgctggtgcagggatgatcggccgtcctggggtagccgccaaaatgttcaccaccttagccgaagctggcgtaaacattcaaatgatttccaccagcgaagtcaaagttagttgtgttattgatgcccaagacggcgatcgcgctatcatcgccctccgcaaagcctttgaaatcgaaacccctctccactcccccactccccctaccctctccactcacaactcccctcccgttcgcggtgtcgccttagacttaaaccaagcccgtctagctattcgtcaagtcccagaccgtccagggatggcggcgcagttgtttggtattctcgcccagaacaatatcagcgtagacatgattattcagtctcaacgttgtcgcattgttgatggtgttccccgtcgggatattgcttttacagtcccccgcatggatggggaaactgcccaaaaattgctgtgtcaagtagccccagagttgggttggggtgatgtggttttggatagtgcgatcgctaaagttagtattgtcggtgctggaatggtaggtcaaccaggtgtagccgccaaaatgtttgaagcattagctaaacaccaaatcaatattcaaatgattgccacttccgaaattaaaatcagctgtgttgtctctcaagaacaaggtgtacaagctttacaagttattcacaccgcttttgagttagcaggtaccgagaaatttgttgtacctgtgtag

SEQ ID NO: 95932 - protein, 604 aa, Anabaena variabilis ATCC 29413
MALIVQKFGGSSVGSVERIQAVAQRVYKTVKAGNSLVVVVSAMGKTTDGLVKLANEISRNPNRREMDMLLSTGEQVTIALLSMALQELGQPAISMTGAQVGIVTEAEHTRARILHIETERVEGHIQEGKVVVVAGFQGISSNGSLEITTLGRGGSDTSAVALAAALQADFCEIYTDVPGILTTDPRIVPEAQLMGEITCNEMLELASLGAKVLHPRAVEIARNYGMPLVVKSSWTDDPGTWVTTPKPQGRSLINLELARPVDDVELDTDQAKVALLRVPDKPGVAAKLFGEISRQKVDVDLIIQSIHEGNSNDIAFTVTTPILKRAEAVAAAIAPSLRSPSHPKSDEAEVMVEQNIAKVSIAGAGMIGRPGVAAKMFTTLAEAGVNIQMISTSEVKVSCVIDAQDGDRAIIALRKAFEIETPLHSPTPPTLSTHNSPPVRGVALDLNQARLAIRQVPDRPGMAAQLFGILAQNNISVDMIIQSQRCRIVDGVPRRDIAFTVPRMDGETAQKLLCQVAPELGWGDVVLDSAIAKVSIVGAGMVGQPGVAAKMFEALAKHQINIQMIATSEIKISCVVSQEQGVQALQVIHTAFELAGTEKFVVPV

SEQ ID NO: 95933 - DNA, 1221 bp, Carboxydothermus hydrogenoformans Z-2901
  CDS (1)..(1221): transl_table=11
ttgttagtagttcagaaatacggcggcagttccgtggcaaatcctgaaagaataaaaaatgtggcgcgaagggttgccgaatactatcgggcagggcaccgggtggcggtggtggtttctgccatgggggataccaccgacgaacttttagatcttatgggagaaataagtccaaaccctccggcccgggaaatcgatatgcttttatctacgggggaacaggtttccgttgctctcttggctatggctttacacgaactgggggtacccgcccggtcttttaccgggttgcaggccggtatttataccgatgaagtacacaccaaagcgcggattaccgaaattaaaccggaaagggttatcgcttgtttaaattccggtaaggtagctgtggtggccggctttcagggagtaaatcgagagggcgatattaccaccctcggccgtggaggaagcgacaccacggcggtggcgctggcggcggccctgaaggccgatatttgcgagatttataccgacgtggacggggtttatacggcagatccccggatcgtgcccgatgcccggaaaattaaagagatatcctacgaggaaatgttagaactggcaagtttaggggcggtggttttgcaaccccgctcggtcgattttgcccggaattataaagttgaagtccatgtaaggtcaagctttaattataacgaaggtacggttttaaaggaggaaagagatttggagaaaaagggtgttgttacgggagttgcccatgataaaaatgtggttaaaatcggggtttttggtgttcccgatcagcccggggtggcatatcgcttgttttccgaattggctgcccataacattaacgttgatatgattatccagagtgcaggaaaagaagaaggacaaaacgatatatcttttactataggaaaaaatgacctggcaaaaactgtggaaattttggaagatgtagtcaaaaagctttccgccagagggtatacttatgatgaaaaggtggccaaggtgtcgattgttggcgctggtatggttacctatcccggggtagcggctaagatgtttgaagccctttatgaagaaaatatcaatattcagatgatcagcacttccgaaataaaggtttcctgcattattgcggaagatgcggtggaaagagcggtaaatgccatccataaaaaatttgaactcggtaatggggtataa

SEQ ID NO: 95934 - protein, 406 aa, Carboxydothermus hydrogenoformans Z-2901
MLVVQKYGGSSVANPERIKNVARRVAEYYRAGHRVAVVVSAMGDTTDELLDLMGEISPNPPAREIDMLLSTGEQVSVALLAMALHELGVPARSFTGLQAGIYTDEVHTKARITEIKPERVIACLNSGKVAVVAGFQGVNREGDITTLGRGGSDTTAVALAAALKADICEIYTDVDGVYTADPRIVPDARKIKEISYEEMLELASLGAVVLQPRSVDFARNYKVEVHVRSSFNYNEGTVLKEERDLEKKGVVTGVAHDKNVVKIGVFGVPDQPGVAYRLFSELAAHNINVDMIIQSAGKEEGQNDISFTIGKNDLAKTVEILEDVVKKLSARGYTYDEKVAKVSIVGAGMVTYPGVAAKMFEALYEENINIQMISTSEIKVSCIIAEDAVERAVNAIHKKFELGNGV

SEQ ID NO: 95935 - DNA, 1806 bp, Synechococcus sp. CC9605
  CDS (1)..(1806): transl_table=11
atggccctcctggtgcagaaattcgggggcacctccgtcggcagcgtggaacgcatcagggcggtggctgatcggatcggacgttgccgtgaggaagggcacgacgtggtcgttgtggtctccgctatgggccacaccaccgatgaattaacgggtctggccaacgccatcacctctgcccccacccagcgggagatggacatgctgttggccagtggcgaacaggtgtcgatcgccttgctggcgatggccttgaacgcccagggggtcagtgcgacatcgatgaccggtccacaggtgggcatcgccacggaatccacccatggccgggcccggatccttgggattcgcaccgaccgaatccgcaaccgcctcgcagctggccaggtggtggtggttgctggtttccagggcaccagcaccagcagcgatggcctcaacgaaatcaccaccctcgggcgcggaggctccgacacttctgctgtcgccctggcggcggccctgggtgccgatgcctgcgagatctacaccgacgttccgggtgtgctcagcaccgatccgcgcaaagtgtccgatgcccagctgatggagacgatcagctgcgacgaaatgctggaactcgccagccttggggcctccgtgctgcatcccagggccgttgaaatcgcccgaaactacggcgtgaaccttgtggtgcgctccagctggagcgatgcccccggcacccggatcaccagccgttcagcccgtccgatcagcagcagtggcctggagctcggcagtcccgtggatgggatggaggaagtggacggacaggccgtgctcgccctctcccagattcccgatcagcctgggattgccgcacgactgtttgaaaccctctctgaggcaggaatcaatgtggacctgatcattcaggccacccatgagggcagcagcaacgacatcaccttcacggtgtcggaagcggatctcgagctggcccgccctgtctgccagaaggtgctggatcaactgggcggcgatctggcctccgaaggagggctaacgaagctcagcatcagcggggccggaatcatggggcgccctggaattgccgccggcctgttcaagtgcttgtgtcagcagggcatcaacctgcgcctgatcgccaccagtgaggtgaaggtgagctgcgtgatcgactccggcgccggcagcaaggcggttcaagccgtgcaagaggccttcgccctggaggactcgcaaatccgcatcaaccccaccgacaacggcagcggggaaccagaagtgcgcggcgtcgccctcgaccgcgaccaggtgcaactgagtgttcgccacgtgcccgatcgtcccggcaccgcagcagcgctgtgttcagccctggcagacaacagcatcagcctcgatgcgatcgttcaatcggaacgtcagcacagcgacggatcgcgggacatcaccttcatcctgcgcaaagacgaccgtgcccgcgccgatgtggccctggcacctctgctggcccagtggcccggtgctgccctggaggacggcgaagccattgcccgggtgagtgctgtgggcgcgggaatgccggcaacgccagggacggcagggcgcatgttccgtgcgctggcggatgcaggcatcaacattggcctgatcgccaccagcgaaatcagaaccagctgtgtggtggccgaagatgctggcgttcaagcgctccaggtggtgcacgccggattcggactgggaggtgaagagcgtcacaccgcccaaggcaccgcttcaccgcacgaccccgactaa

SEQ ID NO: 95936 - protein, 601 aa, Synechococcus sp. CC9605
MALLVQKFGGTSVGSVERIRAVADRIGRCREEGHDVVVVVSAMGHTTDELTGLANAITSAPTQREMDMLLASGEQVSIALLAMALNAQGVSATSMTGPQVGIATESTHGRARILGIRTDRIRNRLAAGQVVVVAGFQGTSTSSDGLNEITTLGRGGSDTSAVALAAALGADACEIYTDVPGVLSTDPRKVSDAQLMETISCDEMLELASLGASVLHPRAVEIARNYGVNLVVRSSWSDAPGTRITSRSARPISSSGLELGSPVDGMEEVDGQAVLALSQIPDQPGIAARLFETLSEAGINVDLIIQATHEGSSNDITFTVSEADLELARPVCQKVLDQLGGDLASEGGLTKLSISGAGIMGRPGIAAGLFKCLCQQGINLRLIATSEVKVSCVIDSGAGSKAVQAVQEAFALEDSQIRINPTDNGSGEPEVRGVALDRDQVQLSVRHVPDRPGTAAALCSALADNSISLDAIVQSERQHSDGSRDITFILRKDDRARADVALAPLLAQWPGAALEDGEAIARVSAVGAGMPATPGTAGRMFRALADAGINIGLIATSEIRTSCVVAEDAGVQALQVVHAGFGLGGEERHTAQGTASPHDPD

SEQ ID NO: 95937 - DNA, 1851 bp, Synechococcus elongatus PCC 7942
  CDS (1)..(1851): transl_table=11
atggcgatcgcgctcactgataaggtgagaaacgggcgtgctgctgatcacattgttatggctttgattgttcaaaaatacggcggaacctcggttggcagcgtcgaacggatcacggcggttgcccaacgcattgcccagacggttgctgctggcaatcaagtcgtggtcgtagtttcggccatgggtcacagcacggatgagctgctgaagctggccaatgcgatcagtgctaatcctagtcgccgcgaattggacatgctgctggcgacgggcgaacaagtctcgatcgcgctgttgagtatggccctacatgaacagggctgcgacgcgatttcgatgaccggcgcgcaggttgggatcatcacagaagcacatcacagccgtgcccgaattctggaaattgatccgcagcggctgcaaagccaactcgatgccggtcgggtggttgtcgtcgcggggttccaaggcattgcgtctagcgatcgcacagcgctgacggaaattacgacactgggacggggcggttccgatacgtcagccgtcgctttggccgcagctctcaacgccgatcgctgcgaaatctataccgatgtccccggcatcctgaccacggatccgcgcttggtacccgaagcgcatttgctcgaagagatcacttgcgacgaaatgctagagctggccagcttaggtgcgagtgtacttcaccctcgtgccgtagaaattgcccgcaactatggcgtccgtttggtcgtgcgcagcagttggacgcaggaaccggggacgggtgtcgttgcgccaccacgccgcagcgatcgctcgttgcaagggctcgaaattggtcgccccgtcgatggcctggcgttagatacggatcaggccaaagtggcattgctgcatgtgcccgatcgccccgggattgctgccagcctgtttggcgaaatggcgcagcgcggcgtcaatgttgatttgatcatccagtcgattcacgaaggcaatagcaacgacatctctttcacggtcagccaagcggatctggagaaggcagaagcgggcaccacccaactgctcgcggatctgggtggcgaacaacagtcggaagccgctgtcgccaaagtcagtatcagcggcgttgggatcgtcggtcgccccggcattgcggctcagatgttcagcgctttggcgcagggcggcatcaacattcagatgatctcgacctctgaagtcaaagtgagctgtgtgattgcggcagcggatcagcaacgggcgatcgcagccttgcaagagagctttgaactggaagaggcgatcgcagccactgctaccgatgcctgtacgaccgatttacctgcagtgcgcggcgtggccctcgatcgcgaccaagcccgtttggcgattctcaatgtgccagatctaccggggatggcggctacgatcttccaaattctggccgatcgccaaatcagcgttgacatgattatccaatcacagcgcggccgcatccacaacggtcagccctgtcgtgacattgcctgcacgctgccaccggctgatgccgagctagcggcggcagcgctacaagcctttgcggatcaacacggctgcagcctggaaattcagactgagattgctaaggtcagcattgtcggttcggggatggtgcaacaacctggggtagcagcacagatgtttgcagccttagccaaccacggcatcaatatccacatgattgccacatcggaaattaaggtcagttgcatcgtggatgccagccaagcggttgaggctttgcaaaccgttcatgcagcttttggtctcgcaagcgatcgccggattgaagtgcctgcctag

SEQ ID NO: 95938 - protein, 616 aa, Synechococcus elongatus PCC 7942
MAIALTDKVRNGRAADHIVMALIVQKYGGTSVGSVERITAVAQRIAQTVAAGNQVVVVVSAMGHSTDELLKLANAISANPSRRELDMLLATGEQVSIALLSMALHEQGCDAISMTGAQVGIITEAHHSRARILEIDPQRLQSQLDAGRVVVVAGFQGIASSDRTALTEITTLGRGGSDTSAVALAAALNADRCEIYTDVPGILTTDPRLVPEAHLLEEITCDEMLELASLGASVLHPRAVEIARNYGVRLVVRSSWTQEPGTGVVAPPRRSDRSLQGLEIGRPVDGLALDTDQAKVALLHVPDRPGIAASLFGEMAQRGVNVDLIIQSIHEGNSNDISFTVSQADLEKAEAGTTQLLADLGGEQQSEAAVAKVSISGVGIVGRPGIAAQMFSALAQGGINIQMISTSEVKVSCVIAAADQQRAIAALQESFELEEAIAATATDACTTDLPAVRGVALDRDQARLAILNVPDLPGMAATIFQILADRQISVDMIIQSQRGRIHNGQPCRDIACTLPPADAELAAAALQAFADQHGCSLEIQTEIAKVSIVGSGMVQQPGVAAQMFAALANHGINIHMIATSEIKVSCIVDASQAVEALQTVHAAFGLASDRRIEVPA

SEQ ID NO: 95939 - DNA, 1218 bp, Moorella thermoacetica ATCC 39073; identical to SEQ ID NO: 83949
  CDS (1)..(1218): transl_table=11

SEQ ID NO: 95940 - protein, 405 aa, Moorella thermoacetica ATCC 39073; identical to SEQ ID NO: 83950

SEQ ID NO: 95941 - DNA, 1227 bp, Methylobacillus flagellatus KT
  CDS (1)..(1227): transl_table=11
atggcacttatcgtacagaaatatggcggcacttcggtcgccaatccagagcgcatcggcaatgtcgcccgccgcgtggcgcgccacaaggcgcttgggcagcaggtcgtggtcgtggtttccgccatgtcaggcgaaaccaaccgcctgatcagcctagccaaggaagtgatgcccaaccccgacccacgcgaactggatgtgctggtctccaccggagaacaggtcaccatcgccctgctctccatggcgctcatggagcttggcgtcaaggccaaaagctacacgggtggccaagtcagcatcgtcaccgatagcgcccacaccaaggcgcgcatcctcaagatcgatgaagagcgcatccgcaaggacctcgatgccggctatgtcgtcgtcgtcgccggtttccagggcgtggatgagcaaggcaacatcaccacgctgggcaggggcggctcggacaccaccggcgtcgcgctggcagccgcgctcaaggctgacgagtgccagatatataccgatgtcgatggcgtctacaccaccgatccacgcatcgttcccgaggcgcgccgactcagatcggtcaccttcgaggaaatgctggaaatggccagcctgggctccaaggtgctgcaaatccgttcagtcgagtttgcaggcaagtacaaggtcaaactgcgcgtgctttccagcttcgaggaagaaggcgaaggcacgctgattacttttgaggacgacaaagacatggaacaacctgtaatatcaggcatcgccttcaaccgcgacgaagccaaaatcaccgtactgggcgtgccagaccgtccaggcattgcctatcaaatcctgggcccagtggcagacgccaacatcgacgtcgacatcattattcagaacgtcggcgcagatggcaccactgacttcacattcaccgtccataaaaacgacctgcaaaaagcattgaatatcctgcgtgagaaagtacagcctcacaccggtgcccgtgaaatcattggcgacgacaaaacagccaaggtttccgtcgttggcgttggcatgcgctcgcacgtcggcatcgccagccagatgttccgtaccctggccgaagagggcatcaacatccagatgatctccacttccgaaatcaagatctctgtcgttatcgacgagaaatacatggaattggccgtacgcgtcctgcacaaggctttcgggctggaagaagtttaa

SEQ ID NO: 95942 - protein, 408 aa, Methylobacillus flagellatus KT
MALIVQKYGGTSVANPERIGNVARRVARHKALGQQVVVVVSAMSGETNRLISLAKEVMPNPDPRELDVLVSTGEQVTIALLSMALMELGVKAKSYTGGQVSIVTDSAHTKARILKIDEERIRKDLDAGYVVVVAGFQGVDEQGNITTLGRGGSDTTGVALAAALKADECQIYTDVDGVYTTDPRIVPEARRLRSVTFEEMLEMASLGSKVLQIRSVEFAGKYKVKLRVLSSFEEEGEGTLITFEDDKDMEQPVISGIAFNRDEAKITVLGVPDRPGIAYQILGPVADANIDVDIIIQNVGADGTTDFTFTVHKNDLQKALNILREKVQPHTGAREIIGDDKTAKVSVVGVGMRSHVGIASQMFRTLAEEGINIQMISTSEIKISVVIDEKYMELAVRVLHKAFGLEEV

SEQ ID NO: 95943 - DNA, 1815 bp, Trichodesmium erythraeum IMS101; identical to SEQ ID NO: 83967
  CDS (1)..(1815): transl_table=11

SEQ ID NO: 95944 - protein, 604 aa, Trichodesmium erythraeum IMS101; identical to SEQ ID NO: 83968

SEQ ID NO: 95945 - DNA, 1818 bp, Synechococcus sp. CC9311
  CDS (1)..(1818): transl_table=11
atggccctgctggtgcagaagttcggcggcacgtccgtcggcagtgtggaacgcctgcagaccgtcgcccggcgaatcgccgactgcaaagaagacggcaatgatctggtgattgtggtgtcggccatgggccacaccacagacgagctcaccgccaaggccaaagcgatcagctccgatccgccgcagcgggagatggacatgttgctttccacaggagaacaggtctcgatcgccctgctctcgatggccctgcatgaactgggggtaccagctgtttcgatgaccggagcccaagtgggaatcgtgactgaatccgcccatggcagagcccgcatcctcgatgtgcgcaccgaccggctacgcgcccggcttgcagaaggacaagtcgtggtggttgctggcttccaaggcaccagcctcagcagtggcggaaccgccgaaatcaccaccctgggccgcggaggttcagacacatcagccgtagccctagcagcagccctgggtgcggatgcctgcgagatcttcaccgacgtgccaggagtgctcaccaccgatccgcgcaaggtggccaatgcccaactgatgccacaagtgagctgcgatgaaatgctcgaactcgccagcctgggtgcagcggtgctccacccccgtgctgttgagatcgcccgcaactacggcgtgaagatggtggttcgatccagctggagcgatgcaccaggcaccacgcttaccagtcgcaatgccaaaccgatcggccgcgaggggctggaacttggtcgtcctgttgatggcgtggagctcctcgaagatcaagccgtgctggccctctcccacgtgcctgatcagccaggggttgctgctcgcttgttcgaaagcctgtctgcaggcggcgtgaacgtggacctgatcattcaggccacccatgagggcagcagcaacgacatcaccttcaccgtggcggaaacggatctcgaacaagcccgcagcatctgcaccacgctggtggacagcctcggcggcatccttagctctgacggaggcatgagcaagctgagtatcaggggcgctgggatcatggggcgccccgggatcgccgcaggcttgttcgacacgctctcgcgagaggggatcaacctgcgcttgatcgctaccagcgaagtgaaagtgagctgcgtggtggaagcttccatgggcagcaaagctttgcaagctgctcaacaggcctttgagctgagcacacaacagcaacacatcaaccctcctgccagcggagagggtgagcccgaggtgaggggcgtcgccctggatcgtgatcaggcgcaacttagcgttcgccatgtacctgaccgaccggggatggcgggttccctctgttcagcgctcgccgatgctggcatcagccttgatgccatcgtccaatccgaacgccagcacggcgatggcagccgtgacatcagcttcatcgtgaaacgcgaggaccgcgctgcctctgatcaagctctagcgccgctccttgcccaatggcccggtgccgttctcgaagatgggcctgcaattgcccgcgtcagcgcaatcggtgctgggatgcctgccaccgcagggacagctgggcgcatgttccgcttccttgccgaagctgacgtaaacatcgaattgatcgccaccagcgaaatcaggaccagttgcgtcgtggccgaatccgatggaatcaaagcccttgaagccgtccatgccggcttccaactcggcggatctgaatcccatcaagcacagggcacagaatctcctcttgagttagaagcctttaaaccctga

SEQ ID NO: 95946 - protein, 605 aa, Synechococcus sp. CC9311
MALLVQKFGGTSVGSVERLQTVARRIADCKEDGNDLVIVVSAMGHTTDELTAKAKAISSDPPQREMDMLLSTGEQVSIALLSMALHELGVPAVSMTGAQVGIVTESAHGRARILDVRTDRLRARLAEGQVVVVAGFQGTSLSSGGTAEITTLGRGGSDTSAVALAAALGADACEIFTDVPGVLTTDPRKVANAQLMPQVSCDEMLELASLGAAVLHPRAVEIARNYGVKMVVRSSWSDAPGTTLTSRNAKPIGREGLELGRPVDGVELLEDQAVLALSHVPDQPGVAARLFESLSAGGVNVDLIIQATHEGSSNDITFTVAETDLEQARSICTTLVDSLGGILSSDGGMSKLSIRGAGIMGRPGIAAGLFDTLSREGINLRLIATSEVKVSCVVEASMGSKALQAAQQAFELSTQQQHINPPASGEGEPEVRGVALDRDQAQLSVRHVPDRPGMAGSLCSALADAGISLDAIVQSERQHGDGSRDISFIVKREDRAASDQALAPLLAQWPGAVLEDGPAIARVSAIGAGMPATAGTAGRMFRFLAEADVNIELIATSEIRTSCVVAESDGIKALEAVHAGFQLGGSESHQAQGTESPLELEAFKP

SEQ ID NO: 95947 - DNA, 1473 bp, Solibacter usitatus Ellin6076
  CDS (1)..(1473): transl_table=11
ttgaaagatctcctggtaatgaagttcggcggcaccagcgtgggcagcgccgagagaatgaaagtggcggcgcaacttgccgcccaggaacagaaaaagcggccggtggcgatcgtggtgtcggcgatgagcaaggtcaccgacctgctgctggataccatgcggcacgccgaagccggcgatcgcgcgggaatggagcgcaatctcaacctgttgcgcgagcgccacgagcaggcctgccgggagttgctgccggcctccgaacagggggcggtgctggccaaacttcacgacgtgatcgacgagttcgagcgcatcgtcaacggcatggcgatgctcggcgagcgtccgccgcggtcggtagacgaggccgtcgcggtgggagagcggctcacggtggtcctggtgagcgagcacttgcgcgtcagcgggacgccctcggtggcggtcaacgcgcgcgacgtggtggtgacggacgcggtcttcggtaatgcttcgccgttgatggagcccacgcgtgtgaaggctcgcgccacactccggccgcaattggagcagggactgctgccggtgatcacgggattcaacggcgccacggcggacgggcgtccgaccacgctgggccgcggcggcagcgacttttcggcgtcgattgtggcggcggcgctggacgcgagcgaattgtggatctggaccgacgtggatggcatcatgagcgcggatccgcgcctggtgccggatgcgcaggtgctcgaagagatcacctacgcggaggccgcggaactggcctacaacggcgccaaggtgctgcatccgcgaacgttggcgccgctggtggagaaggcgatcccggtctggagcaagaacagcttcgcgccggagaagccgggtaccaagatcgtgccctccatggcggtggagcatggggcgcgcgcggtggccagtatgcgcaatgtggcgctggtctcgctgaccccggcaagtcccgaagtgaacggcgtgcaggtactggcgcgggcgctcgaagccatcgctcgggcggacgtggaagtgctcgtattgaccagttccagctaccggcagaatttctgcgtgctggtgcgggaagacgagttggaccgctcggtgcaggcgctggaatccgccctggcgctggaacttgcgcaccactatgtacatccaatagaagtagatcgtaacgtgggactgctggccgccgtgggcgagggcatgcaggggaagcccggcctggcgggtcgcattttcactgccatctcacgggtgcaggtgaacatcatcgccatcgcgcagggttccagtgagttgacgatcgcggttgtggttcgccgcgaaggcctggagaaggccgtcaaagcggtgcacgcggagtgcggattagggatgcgtccaccggtgccggtgtttccctttggggcctccgaaggacgggcgcagcgtccgacaaagcggtag

SEQ ID NO: 95948 - protein, 490 aa, Solibacter usitatus Ellin6076
MKDLLVMKFGGTSVGSAERMKVAAQLAAQEQKKRPVAIVVSAMSKVTDLLLDTMRHAEAGDRAGMERNLNLLRERHEQACRELLPASEQGAVLAKLHDVIDEFERIVNGMAMLGERPPRSVDEAVAVGERLTVVLVSEHLRVSGTPSVAVNARDVVVTDAVFGNASPLMEPTRVKARATLRPQLEQGLLPVITGFNGATADGRPTTLGRGGSDFSASIVAAALDASELWIWTDVDGIMSADPRLVPDAQVLEEITYAEAAELAYNGAKVLHPRTLAPLVEKAIPVWSKNSFAPEKPGTKIVPSMAVEHGARAVASMRNVALVSLTPASPEVNGVQVLARALEAIARADVEVLVLTSSSYRQNFCVLVREDELDRSVQALESALALELAHHYVHPIEVDRNVGLLAAVGEGMQGKPGLAGRIFTAISRVQVNIIAIAQGSSELTIAVVVRREGLEKAVKAVHAECGLGMRPPVPVFPFGASEGRAQRPTKR

SEQ ID NO: 95949 - DNA, 1266 bp, Mycobacterium avium 104
  CDS (1)..(1266): transl_table=11
gtggcgctcgtcgtgcagaagtacggcggatcctcggtggccaacgccgatcggatccggcgcgtggccgagcgcatcgtcgccaccaagaagcagggcaacgacgtggtggtcgtcgtctccgcgatgggtgacaccaccgacgacctcatggacctggcccagcaggtgtgtccggccccgccgccgcgcgaactggacatgctgctgaccgccggcgagcggatctccaacgcgctggtggcgatggcgatcgagtcgctaggcgcccaggcgcgttcgttcaccggctcgcaggccggggtgatcaccaccggcacgcacggcaacgccaagatcatcgacgtcacgccgggacggctgcaggccgcgctggacgagggccgcatcgtgctggtggccgggttccagggcgtcagccaggacacccgggacgtcaccacgctgggccgcggcggctcggacaccacggccgtcgccctggccgcggcgctgggcgccgacgtctgcgagatctacaccgacgtcgacggcatcttctccgccgaccccaggatcgtgcacaacgcccgcaagctggacacggtgaccttcgaggagatgctcgagatggcggcttgcggcgccaaggtcttgatgctgcgctgcgtggaatatgcccgccgctacaacattccggtgcatgtccggtcctcgtactcggacaagaaaggcaccgtcgtcgtcggatcgatcaaggacaagcccatggaagaccccatcctgaccggagtcgcgcacgaccgcagcgaggccaaggtgaccgtcgtcggcatccccgacattcccggctatgcggcgcgggtgttccgggccgtcgccgacgccgacgtcaacatcgacatggtgctgcagaacgtctccaaggtcgaggacggcaagaccgacatcaccttcacctgctcgcgcgaggccgggcccaccgcggtggccaagctggacgcgctgaaggacgagatcgggttcacccagttgctctacgacgaccacatcggcaaggtgtcgctgatcggggccggcatgcgcagccacccgggcgtcaccgccaccttctgtgaggcgctggcgcaggtgggcgtcaacatcgagctgatctccacctccgagatccggatctcggtgctgtgccgcgacacggaactggacaaggccgtcgtggcgttgcacgaggcgttcgggctcggcggcgcggagaccgccacggtgtatgcggggacgggcagatag

SEQ ID NO: 95950 - protein, 421 aa, Mycobacterium avium 104
MALVVQKYGGSSVANADRIRRVAERIVATKKQGNDVVVVVSAMGDTTDDLMDLAQQVCPAPPPRELDMLLTAGERISNALVAMAIESLGAQARSFTGSQAGVITTGTHGNAKIIDVTPGRLQAALDEGRIVLVAGFQGVSQDTRDVTTLGRGGSDTTAVALAAALGADVCEIYTDVDGIFSADPRIVHNARKLDTVTFEEMLEMAACGAKVLMLRCVEYARRYNIPVHVRSSYSDKKGTVVVGSIKDKPMEDPILTGVAHDRSEAKVTVVGIPDIPGYAARVFRAVADADVNIDMVLQNVSKVEDGKTDITFTCSREAGPTAVAKLDALKDEIGFTQLLYDDHIGKVSLIGAGMRSHPGVTATFCEALAQVGVNIELISTSEIRISVLCRDTELDKAVVALHEAFGLGGAETATVYAGTGR

SEQ ID NO: 95951 - DNA, 1275 bp, Nocardioides sp. JS614
  CDS (1)..(1275): transl_table=11
gtgggcattgtcgtccagaagtacggcggatcgtcggtcgcggacgccgccggcatcaagcgggtggcccagcggatcgtcaacacccgcaaggccggccacgacgtcgtcgtggtcgtctcggccatgggagacgagaccgacaacctgcgcgatctcgccgagcaggtgacgccgctgccgccgccgcgggagctggacatgctgctgaccgccggcgagcggatctcgatggcgctggtcgcgatggccatcgccgcgctcgggcacgaggcgaagtcgttcaccggctcgcaggcgggcgtgatcaccgactccgcccacggcaaggcgaagatcatcgacatcacgccgggccggatcgagaaggccctcaaggacggcgccatcgcgatcgtcgccggcttccagggcgtctcccaggacaccaaggacgtcaccacgctcggccgcggcgcctcggacacgaccgcggtcgcgctcgccgccgcgctcggtgccgaggtctgcgagatctacagcgacgtcgacggcgtcttcaccgcggacccccggatcgtgcccgcggcccgcaagctcgcccgggtctcgaccgaggagatgctggagatggcggcctcgggcgccaagatcctgcacctgcggtgcgtcgagtacgcccgccgttacgacatgccgatccatgtgcgctcctccttcagccagaaggaaggcacctgggtcatcccggacagcaaggcaggagaggacgagatggagcaggcgatcatcgccggcgtcgcccacgaccggagcgaggccaagatcaccgtggtcggcgtgccggacaaggtcggcgaggcggcccggatcttcgaggcgctggccgcgaccgaggtcaacctcgacatggtcgtccagaacgtctccgcggcggccaccggcctgaccgacatctccttcacgctgccgcgcgcggacgggcagagcgcgatgggcgccctggcgcggatccaggacgaggtcggctacgacaagctgctctacgacgaccagatcggcaaggtctcgctgatcggggcgggcatgcgctcccaccccggcatcaccgcgcgcttcttcgcctcactcgccgcggcgggcgtcaacatcgagatgatctccacctccgagatccggatctcggtgatcgtcgacgaggcccaggtcgacgaggcggtgcgcgccacgcacaccgcgttcgacctcgacgccgaagaggtcgaggcggtcgtgtacggcgggaccggtcgatga

SEQ ID NO: 95952 - protein, 424 aa, Nocardioides sp. JS614
MGIVVQKYGGSSVADAAGIKRVAQRIVNTRKAGHDVVVVVSAMGDETDNLRDLAEQVTPLPPPRELDMLLTAGERISMALVAMAIAALGHEAKSFTGSQAGVITDSAHGKAKIIDITPGRIEKALKDGAIAIVAGFQGVSQDTKDVTTLGRGASDTTAVALAAALGAEVCEIYSDVDGVFTADPRIVPAARKLARVSTEEMLEMAASGAKILHLRCVEYARRYDMPIHVRSSFSQKEGTWVIPDSKAGEDEMEQAIIAGVAHDRSEAKITVVGVPDKVGEAARIFEALAATEVNLDMVVQNVSAAATGLTDISFTLPRADGQSAMGALARIQDEVGYDKLLYDDQIGKVSLIGAGMRSHPGITARFFASLAAAGVNIEMISTSEIRISVIVDEAQVDEAVRATHTAFDLDAEEVEAVVYGGTGR

SEQ ID NO: 95953 - DNA, 1269 bp, Acidovorax sp. JS42
  CDS (1)..(1269): transl_table=11
atggcactgatcgttcataaatacggcggcacctcgatgggctccaccgagcgcatccgcaatgtcgccaagcgcgtggccaagtgggcgcgggccggccaccagatggtggtggtacccagcgccatgagtggcgagaccaaccgcctgctgggcctggccaaggagctcacgccctcgcgtattacctccgcctaccaccgcgagctcgacatgctggccgccacgggtgagcaggcctcgtcggccctgctggccatcgcgctgcaggccgaaggcatggagtcggtgagctacgccggctggcaggtgcccgtgcgcaccgacagcagctacaccaaggcgcgcatcgagtccatcgacgacaagcgcgtgcgcgccgacctggacgcgggcaaggtcgtcatcgtcacgggcttccagggcatcgacgagggcggcaacatcaccacgctgggccgcggcggctccgacacctcggccgtcgccatcgccgccgcgatgaaggcgcacgaatgcctgatctacaccgacgtggatggcgtgtacaccaccgacccgcgcgtggtgcccgaggcgcggcgcctgacgacgctgagcttcgaagaaatgctggagatggccagcctgggcagcaaggtgctgcagatccgttcggtggaatttgccggcaagtacaaggtgccgctgcgcgtgctctccagcttcacgtcctgggacatcgacatcaacgaggaagccaagtccggcaccctgatcacctttgaggaagacgaacaaatggaaaaagccgtcgtatccggcatcgctttcacccgcgacgaagccaagatctccgtgatcggcgtgcccgacacccccggtatcgcctaccagatcctgggcgcggtggctgatgccaacatcgatgtggatgtcatcatccagaacatgggcaaggaagggaagaccgacttcagcttcacggtgaatcggaatgactaccaacgcaccatcgatctgttgaaagacaaggtgctgccccaactgggcgccgaggaaatcgtgggcgatgccaagatcgcgaaggtcagcatcgtcggcatcggcatgcgcagccatgtgggcgtggccagcaagatgttccgcgcgctgagcgaagagggcatcaacatcaagatgatctccacgtcggaaatcaagacctccgtggtgatcgacgagaagtacgtggaactggccgtgcgtacgctgcacaaggcgttcgagctggaccaggctgccgcctga

SEQ ID NO: 95954 - protein, 422 aa, Acidovorax sp. JS42
MALIVHKYGGTSMGSTERIRNVAKRVAKWARAGHQMVVVPSAMSGETNRLLGLAKELTPSRITSAYHRELDMLAATGEQASSALLAIALQAEGMESVSYAGWQVPVRTDSSYTKARIESIDDKRVRADLDAGKVVIVTGFQGIDEGGNITTLGRGGSDTSAVAIAAAMKAHECLIYTDVDGVYTTDPRVVPEARRLTTLSFEEMLEMASLGSKVLQIRSVEFAGKYKVPLRVLSSFTSWDIDINEEAKSGTLITFEEDEQMEKAVVSGIAFTRDEAKISVIGVPDTPGIAYQILGAVADANIDVDVIIQNMGKEGKTDFSFTVNRNDYQRTIDLLKDKVLPQLGAEEIVGDAKIAKVSIVGIGMRSHVGVASKMFRALSEEGINIKMISTSEIKTSVVIDEKYVELAVRTLHKAFELDQAAA

SEQ ID NO: 95955 - DNA, 1857 bp, Nostoc punctiforme PCC 73102
  CDS (1)..(1857): transl_table=11
atggcgctcatagttcagaaatacggtggtacatctgtcggttcagtggaacgcattcaagctgtcgcacagcgtgtttataaaactgtccaagctggaaactctctggtagtagtggtttcagcaatgggcaaaaccaccgatggactcgtcaaactagctaatgaaatttctcccaatccaaaccgccgggaaatggatatgctgctttccactggcgaacaagtaaccatcgccttactcagcatggctttgcaggaactcggacaaccagcaatttctatgactggcgctcaggtaggaattgttaccgaagctgaacacagccgcgctcggattttgcatattgacactactcgcctctgtcgccacataaatgcaggtaaagtagttgttgtagcagggttccaaggcacatccagcaccggggaaatggaaattacaactttggggcgcggtggttctgacacttctgcggtagcgatcgcagccgcattaagagctaacttttgtgaaatttatacagatgttccagggattctaactacagacccccgtttagttgccgaagcccagttgatggatgacatcacctgcgatgaaatgttggaactagctagcttgggcgcaaaagtgttgcatccccgtgctgtagaaattgctcgtaactatggtgttcccctggtagttaggtctagctggacggatcaaccaggtacttgggtgacatcagccaaaccccaagggcgatcgctaatcaatctagaaattgcccgtccggtggatgctgtagaatttgacactgaccaagcaaaggtggctttgttgcgcgtacccgataaaccaggtgtagcagccaggttatttggcgaaatttcccgacaaaaagtagatgtagatttgattattcagtcaattcatgaaggtaacagtaatgacattgcttttactgtcaccaccccaatcttaaaacgggcagaagcagtagccgcagcgatcgctccagcactgagaaatccatctaaccccaaatctgatgaagccgaggtaatgctggaacataacattgccaaagtcagcatcgcaggcgcaggaatgattggccgtcccggtgtggctgcaaaaatgtttgccactttagcagaagctggcgtgaatattcaaatgatttccaccagcgaagtcaaagtaagttgcgtagtcgatgctgccgaatgcgatcacgccgttttagcactccgcactgcctttgaaatagaagcaggggagcaggggagcaggggagcaggggagagtgcatgtatagattcccctccgcccctttgcccctccgcccccctgcccaattgtcctcccgttcgcggtgttgctttagatttgaatcaagcgcgtctcgctattcgccaattaccagatcgtccggggatggcggcgaagttatttggattattagcgcagcataatatcagcgttgacatgattattcaatctcagcgctgtcgggtgattgatggcgttcctaggcgagatattgcttttacagtctcgcggatagacgcggaaagcgcaaaaaaaatgcttactcaagtagcggcagagttaggatggggtgaagttgttttagatagtgcgatcgctaaagtgagtattgttggtgcaggtatggtaggacaaccaggtgttgctgccaaaatgtttgaagcgctagcccagcaccaaattaatattcaaatgattgccacctcagaaataaaaattagttgtgtcgtagcacaagagcaaggtgttaaagctttgcaagccattcatgccgcttttggactagctggtagtgagaaagtagtcgtgccagcataa

SEQ ID NO: 95956 - protein, 618 aa, Nostoc punctiforme PCC 73102
MALIVQKYGGTSVGSVERIQAVAQRVYKTVQAGNSLVVVVSAMGKTTDGLVKLANEISPNPNRREMDMLLSTGEQVTIALLSMALQELGQPAISMTGAQVGIVTEAEHSRARILHIDTTRLCRHINAGKVVVVAGFQGTSSTGEMEITTLGRGGSDTSAVAIAAALRANFCEIYTDVPGILTTDPRLVAEAQLMDDITCDEMLELASLGAKVLHPRAVEIARNYGVPLVVRSSWTDQPGTWVTSAKPQGRSLINLEIARPVDAVEFDTDQAKVALLRVPDKPGVAARLFGEISRQKVDVDLIIQSIHEGNSNDIAFTVTTPILKRAEAVAAAIAPALRNPSNPKSDEAEVMLEHNIAKVSIAGAGMIGRPGVAAKMFATLAEAGVNIQMISTSEVKVSCVVDAAECDHAVLALRTAFEIEAGEQGSRGAGESACIDSPPPLCPSAPLPNCPPVRGVALDLNQARLAIRQLPDRPGMAAKLFGLLAQHNISVDMIIQSQRCRVIDGVPRRDIAFTVSRIDAESAKKMLTQVAAELGWGEVVLDSAIAKVSIVGAGMVGQPGVAAKMFEALAQHQINIQMIATSEIKISCVVAQEQGVKALQAIHAAFGLAGSEKVVVPA

SEQ ID NO: 95957 - DNA, 1215 bp, Listeria monocytogenes str. 1/2a F6854; identical to SEQ ID NO: 83983
  CDS (1)..(1215): transl_table=11

SEQ ID NO: 95958 - protein, 404 aa, Listeria monocytogenes str. 1/2a F6854; identical to SEQ ID NO: 83984

SEQ ID NO: 95959 - DNA, 1800 bp, Crocosphaera watsonii WH 8501
  CDS (1)..(1800): transl_table=11
atggctctaattgtccaaaaatacggaggaacctccgtcgggtcggtggaacgggttcaaagcgttgcccaacgcatccatagaaccgttcaacaagggaatacagtggttgtggttgtctctgctatgggcaaaaccacagatactttggttaatttagcacaggaaattaccgccaacccttcccgacgagagatggatatgttactgtccacgggggaacaggtaaccattgccttgatgactatggccctacaagaaataggacaaccagctatctctctaactggcgcccaggtaggtattgtcaccgaagccgaatatagtcgggcccgtattctttccattaaacccgatcgcatcaaacgtcatcttgatcaagctcaagtagtagttgtagcagggtttcaaggggttagttcccgagaaaatttagaaatcacaaccctcggccgtgggggatctgatacctccgcagtagctctcgctgctgccctgaaagcgaatttttgtgagatatacaccgatgttcctggaattttgaccacagatccccgtctcgtcccctcagcgagattaatggaagaaattacctgcgatgaaatgttagaattagctagtttaggagcaaaagttctgcaccccagagccgtagaaattgctcgtaattatggggttagtttggtggtacgttccagttggagtgatgcgccgggtactcgtgtagtttcccccatccccaaacccagatccttagaaggtttagaaattactaaagcagtggatggggtagagtatgacggagatcagggtaaaatttccttgttacgggttcccgatcgcccaggtattgcggcccgtttatttggagaaatagcccatcaacaggtagatgtagacttaattattcaatctatccacgaaggcaatagtaatgatattgcctttactgtggtcaaaaatatcttaagcaaagccgaggcagtaacagaagcgatcgcccctgctctgcggagtaccccttctaaccccaccgaagcagaggtaatgatagaaacaggggtggcaaaaatttctattgcaggtgctggaatgattggcaggccagggatcgcagcaaaaatgtttaaaaccttagctgaggccaatattaacattgagatgatctctacctcagaagtgaaggttagttgtgtggtagccaaagaagacggcgatcgaggcataaaagtcttatgtgaagcgtttgatgtgcaattatcccctaaccccgtcgcttcccaaaccgtggccttagctcctccggtgcgtggtgtggccctagatatgaaacaggcacaaattgctattcgtcatgttcaggataaaccaggtatggcggccagcatttttggggtattggctgaaaataatattagtgtggataccattattcaatctcagcgttgtcgtattttagcaggaaagcccacccgtgacattgcctttactgtagctcaagtcgacgttgaagcggcttgtagagctttaaataacctttctgatggctttgatcaggtggtaattgatgaagatattgctaaagtgagtattgtgggtgctggtatgatcggacaacctggggttgctgctaagttttttggggctttggctcaggaaaagataaacatcaaaatgattgctacttctgagataaaaattagttgcgtagtccccaaagaagaaggggtaaaggctttaaaatatgttcatgatgcttttgagttggccggtgtcgaaacagtggaagttcctgcctaa

SEQ ID NO: 95960 - protein, 599 aa, Crocosphaera watsonii WH 8501
MALIVQKYGGTSVGSVERVQSVAQRIHRTVQQGNTVVVVVSAMGKTTDTLVNLAQEITANPSRREMDMLLSTGEQVTIALMTMALQEIGQPAISLTGAQVGIVTEAEYSRARILSIKPDRIKRHLDQAQVVVVAGFQGVSSRENLEITTLGRGGSDTSAVALAAALKANFCEIYTDVPGILTTDPRLVPSARLMEEITCDEMLELASLGAKVLHPRAVEIARNYGVSLVVRSSWSDAPGTRVVSPIPKPRSLEGLEITKAVDGVEYDGDQGKISLLRVPDRPGIAARLFGEIAHQQVDVDLIIQSIHEGNSNDIAFTVVKNILSKAEAVTEAIAPALRSTPSNPTEAEVMIETGVAKISIAGAGMIGRPGIAAKMFKTLAEANINIEMISTSEVKVSCVVAKEDGDRGIKVLCEAFDVQLSPNPVASQTVALAPPVRGVALDMKQAQIAIRHVQDKPGMAASIFGVLAENNISVDTIIQSQRCRILAGKPTRDIAFTVAQVDVEAACRALNNLSDGFDQVVIDEDIAKVSIVGAGMIGQPGVAAKFFGALAQEKINIKMIATSEIKISCVVPKEEGVKALKYVHDAFELAGVETVEVPA

SEQ ID NO: 95961 - DNA, 1236 bp, Roseovarius nubinhibens ISM
  CDS (1)..(1236): transl_table=11
atgcccgttctcgtgatgaaattcggcggcacatccgtcgccaatctcgaccgcatccgccgcgccgccaaacgtgtgggcgtcgaggtggccaagggctatgacgtgatcgtcatcgtctcggccatgtcgggcaagaccaacgagctggtgggctgggtgggcgagacctcgccgctctatgacgcccgcgaatatgacgcggtggtcagctcgggcgagaatgtgaccgccggtctcatggcgctcaccttgcaggaaatggacgtgccggcgcgcagctggcagggctggcaagtgccggtcaagacgacctcggcccattccgccgcccgcatcgaagagatccccaccgacaacatcaccgccaagtttggcgaaggcatgcgcgtcgccgtggtcgcgggctttcagggcgtgagccccgagggccgcatcaccacgctgggccggggcggctcggacaccactgccgtggcctttgccgccgctttcgacgccgaacgctgtgacatctacaccgatgtcgacggggtctataccaccgatccgcgcatcgcgtcgaaggcgcgcaagctcgacaagatcgcctttgaggaaatgctggaactggcctcgctcggggccaaggtattgcagacccgctcggtcgagctggcgatgcgctataatgtcaaactgcgcgtgctgagcagtttcgaggaacaatctgacgcggccgggacgctggtctgcgatgaggaggaaatcatggaatctaatgtcgtaagcggcatcgcctattcgcgggacgaggccaagatgaccctcatctcggtcgccgaccggcccggcatcgccgccgccatcttcggcccgctctccgaggccggggtgaatgtcgatatgatcattcagaacatcgccgaagaaggtcgcaccgacatgaccttctcctgccccaccgatcaggtgaaacgcgccgaaaaggccatggcggatgccaaggcccggggcgacatcaactatcacgatctggtggccgacaccgatgtcgccaaagtctccgccgtgggcatcggcatgcgcagccagtcgggcgtcgccgccaagatgttcaagacgctctccgacgaaggcgtcaacatcaaggtcatcgcgacctccgagatcaagatttcggtgctgatagaccgcaaatacatggagctcgccgtgcaggcgctgcatgacgcgttcgagctcgacaaggcctga

SEQ ID NO: 95962 - protein, 411 aa, Roseovarius nubinhibens ISM
MPVLVMKFGGTSVANLDRIRRAAKRVGVEVAKGYDVIVIVSAMSGKTNELVGWVGETSPLYDAREYDAVVSSGENVTAGLMALTLQEMDVPARSWQGWQVPVKTTSAHSAARIEEIPTDNITAKFGEGMRVAVVAGFQGVSPEGRITTLGRGGSDTTAVAFAAAFDAERCDIYTDVDGVYTTDPRIASKARKLDKIAFEEMLELASLGAKVLQTRSVELAMRYNVKLRVLSSFEEQSDAAGTLVCDEEEIMESNVVSGIAYSRDEAKMTLISVADRPGIAAAIFGPLSEAGVNVDMIIQNIAEEGRTDMTFSCPTDQVKRAEKAMADAKARGDINYHDLVADTDVAKVSAVGIGMRSQSGVAAKMFKTLSDEGVNIKVIATSEIKISVLIDRKYMELAVQALHDAFELDKA

SEQ ID NO: 95963 - DNA, 1767 bp, Prochlorococcus marinus str. MIT 9211
  CDS (1)..(1767): transl_table=11
atggttcttctggtgcaaaaatttgggggcacctctgtaggaagtgtggagcgaattcaatcagtcgctcaaagaattgcactttgcaaagaccaaggttttgaacttgtaatagttgtctctgcaatgggcaaagccaccgatgagctaacccaactcgcacaagaaattagtcacaaggctcccaaaagagaaatggatatgcttcttgccacaggagaacaagtatctattgctctactatcaatagccctcaatgaaataggcatcccagcaacatcaatgacaggagcacaagttggcattgtgactgaatcatcccatggtcgagcaagaattcttgagatcaaaactgcacgaattgaaaatctactaagccaggggcaagtcgtagttgtagcagggtttcaaggtacaagcttaggtagcggaggaacagcagaaataaccactttagggagaggaggatcagacacctctgccgtggcactggcagcagcactgcatgcagatgcatgcgaaatctatacagatgttccaggagttctaactactgatcctcgcaaagttccaaatgcgcaattaatgaatagcatcagttgtgatgaaatgcttgagttagcaagtcttggagcagctgtcttgcacccaagagcagtagaaatagcgcgaaactatggcatcaaacttgttgtacgttcaagctgggatgaaacaccaggaacaaccataacaagtcaagggaatagagaaataggcaaagaagggttagagctaggtcgtcctgtgacaggggttgaattagttgagaaccaagctgttctagggcttgctcacattcctgataaacctggaattgcggcagatttatttgaaactctttccaaggggggggtaaatgtagatctgataatccaatcaactcatgaaggcaatagtaatgacatcacctttactgtcgctgaagaagaattatctctagcaaaagccctatgcaagcaattcattaataagtttggaggtgaactatctactcaaagtgaaatgagcaaattaagtattcgaggtgccggaattatgggaaggccaggcatagcagcaaagttattcgagacaatctccaaagcgggaattaatttaaggcttattgctactagcgaagtgaagttaagctgtgttattgattctggaatgggatgcaaagcacttagagctgttagcgaagcatttgaaattaaaaaagatcacattcacattaatcccgaaatttgtaatttagaagagccagaagtgagaggagttgctttagatacaaatcaagctcaaatgagtgtaataaatgttcctgatattcctggaactgctgcaactctttgtagagcgttaacagagtctggtattagcttagatacaattgtgcaatcagaaagaaaacataaaaaaggtggtcgcaatattagtttcacccttcacaaagaagatcgtgagaagctcaataaagttcttttgccactattgaaaacttggcatgaggcgtatttacaagatggaaaagcaattgctcgtatcagttcagttggtgcagggatgccagcaactattggaactgcagctcgaatgtttagggccctagccaatgcagaaattaatatagaaatgatcgcaactagtgaaattcgaactacttgtatagtttctgagagctatggaaccaaagctctccaagcagtacatgaattctttcaattaaatgaaagcgataaataa

SEQ ID NO: 95964 - protein, 588 aa, Prochlorococcus marinus str. MIT 9211
MVLLVQKFGGTSVGSVERIQSVAQRIALCKDQGFELVIVVSAMGKATDELTQLAQEISHKAPKREMDMLLATGEQVSIALLSIALNEIGIPATSMTGAQVGIVTESSHGRARILEIKTARIENLLSQGQVVVVAGFQGTSLGSGGTAEITTLGRGGSDTSAVALAAALHADACEIYTDVPGVLTTDPRKVPNAQLMNSISCDEMLELASLGAAVLHPRAVEIARNYGIKLVVRSSWDETPGTTITSQGNREIGKEGLELGRPVTGVELVENQAVLGLAHIPDKPGIAADLFETLSKGGVNVDLIIQSTHEGNSNDITFTVAEEELSLAKALCKQFINKFGGELSTQSEMSKLSIRGAGIMGRPGIAAKLFETISKAGINLRLIATSEVKLSCVIDSGMGCKALRAVSEAFEIKKDHIHINPEICNLEEPEVRGVALDTNQAQMSVINVPDIPGTAATLCRALTESGISLDTIVQSERKHKKGGRNISFTLHKEDREKLNKVLLPLLKTWHEAYLQDGKAIARISSVGAGMPATIGTAARMFRALANAEINIEMIATSEIRTTCIVSESYGTKALQAVHEFFQLNESDK

SEQ ID NO: 95965 - DNA, 1803 bp, Synechococcus sp. RS9917
  CDS (1)..(1803): transl_table=11
atggccctgctggtgcagaagttcggcggcacctccgtcggcagcgtggagcgcatccaggcggtggcccgccgcatcgccaaccgccgcgacgaagggcatgacctggtgatcgtggtgtcggcgatgggccacaccactgatgagctcacggccaaagcccgggccctctgcagcaacccgccccagcgggagatggacatgctgctcgccaccggcgaacaggtgtcgattgccctgctctccatggccctgcatgccctcggcgttccagcgatgtccatgaccggcgcccaggtgggcatcgtcaccgaatcggcccatggccgggcccgcatcctcgacgtgcgcaccgatcgcctgcgcagccgcctcggtgatgggcaggtggtggtggtggccggttttcagggcaccagtcaaagcagtggcggcaccgccgaaatcaccaccctcggacgcggcggctccgacacctccgccgtggccctcgccgccgccctcggcgccgatgcctgcgagatctacaccgatgtgcccggcgtgctcaccaccgatccacgcaaggtggccgacgcccagctgatggagcagatcagctgcgacgagatgctcgaactggccagcctcggcgccgccgtgcttcacccccgcgccgtggagatcgcccgcaactacggcgtcaccctggtcgtgcgctccagctggagcgaggaacccggcaccaccctcaccagccgcagtgcccggccgatcggccgcgaaggcctggaactgggccgtcctgtggatggtgcggagctggtggagcggcaggccgtgctcgccctctcccacgtgcccgatcagcccggcgtcgccgcccgcctgttcgaagccctctccgccggcgaggtgaatgtggatctgatcattcaggccacccacgagggcaacagcaacgacatcaccttcacggtggcggaaacggatctggagagtgcccgcaggatctgcaccgatctcgtcgacgccatgggcggcgagctggtggccgagggcggcatgagcaagctgagcatcagtggcgctgggatcatggggcgccccggcattgccgccggcctgttcgacaccctgtcgcggcagggcatcaacctgcgtctgatcgccaccagcgaagtgaaggtgagctgcgtgatcgctgccgccatgggcggcaaggcgctgcgggccgccagcgaagccttcgagttgtcggagcggcaactgcagatcaacccccccgcctccggcgccggcgagccggaggtgcggggtgtcgcccttgatcgcgaccaggcccaggtgagcgtgcgccatgtgcccgacaggcccggcaccgccgcagccctctgctcagccctggccgacgcgggcatcagcgtggatgcgatcgtgcagtcggagcggcaacacgcggatggcagccgcgacatcagcttcacgctcaaacgcgaggatcgagccgctgccgaccaggccctcggctccctgctggcccagtggcctggagccttactggaagatggcccggccatcgcccgggtcagcgccgtgggcgccggcatgcccgccaccgccgggacggcgggccgcatgttccgctatctggccgaggccggcctcaacatcgaactgatcgccaccagtgagatccgcaccagttgtgtggtggcggaagcggatggggtggcggccctgcaagcggtgcatgctggcttcggcctcgggggcgccgttcggcatgcagcccagggcacggcatcacccttggactcatga

SEQ ID NO: 95966 - protein, 600 aa, Synechococcus sp. RS9917
MALLVQKFGGTSVGSVERIQAVARRIANRRDEGHDLVIVVSAMGHTTDELTAKARALCSNPPQREMDMLLATGEQVSIALLSMALHALGVPAMSMTGAQVGIVTESAHGRARILDVRTDRLRSRLGDGQVVVVAGFQGTSQSSGGTAEITTLGRGGSDTSAVALAAALGADACEIYTDVPGVLTTDPRKVADAQLMEQISCDEMLELASLGAAVLHPRAVEIARNYGVTLVVRSSWSEEPGTTLTSRSARPIGREGLELGRPVDGAELVERQAVLALSHVPDQPGVAARLFEALSAGEVNVDLIIQATHEGNSNDITFTVAETDLESARRICTDLVDAMGGELVAEGGMSKLSISGAGIMGRPGIAAGLFDTLSRQGINLRLIATSEVKVSCVIAAAMGGKALRAASEAFELSERQLQINPPASGAGEPEVRGVALDRDQAQVSVRHVPDRPGTAAALCSALADAGISVDAIVQSERQHADGSRDISFTLKREDRAAADQALGSLLAQWPGALLEDGPAIARVSAVGAGMPATAGTAGRMFRYLAEAGLNIELIATSEIRTSCVVAEADGVAALQAVHAGFGLGGAVRHAAQGTASPLDS

SEQ ID NO: 95967 - DNA, 1806 bp, Synechococcus sp. WH 5701
  CDS (1)..(1806): transl_table=11
atggccctgctggttcagaaattcgggggaacctccgttggcagcgtggagcggatccaggcggtggcgcagcgaatcgccgccagccgcgagcggggtcacgacctggtgatcgtggtctcggccatgggccacaccaccgatgaactcaccgccctggcgcgggcactctgccctgagcccccccagcgggagatggacatgctgctggccacgggcgagcaggtgtcgatcgccctgctggcgatggccctgcacagcatcggcgtgccggccgtgtcgatgacgggaccgcaggtgggcatcgtgaccgaatcggcccacggccgcgcccgcatcctcgaggtgcgcaccgagcggctgcgcaaacggctcgaggagggccaggtggtggtggtggccggcttccagggcaccagcagcggcagtgccggcacgcccgagatcaccaccctgggccggggcggctccgacacctctgccgtggccctggccgcggccctcggggccgacgcttgcgagatctacaccgatgtgcccggagtgctcaccaccgacccgcgccaggtgagcgatgcccagttgatggaggaggtgagctgcaacgagatgctggagctggccagccttggcgcggcggtgctgcatccccgcgcggtcgagatcgcccgcaactacggcgtgcccctggtggtgcgctccagctggagcgacgcccccggcacccggctcaccagcggcaggccccgaccgatcggcagtgaggggctggagctgggccgtccggtggacggggcggatctggagaaccagcaggcggtgctggccctcacccgggtgcccgaccaccccggggtggccgccctgctgttcgaggctctctccgcggcggggctgaacgtggatctgatcgtgcaggccacccatgtcggcgccagcaacgacatcgccttcaccctctcggagagccagctggagggcgcccgagaggtctgccggagcctgctccaggagctggcggtggaggagagcgccctgagcacccaggcggggctggccaagctgagcatttccggggccgggatcatggggcggccaggcatcgccgctcgcctgttcgacaccctggcccgctacggcatcaacctgcgcatgatcgccaccagtgaagtgaaggtgagctgcctggtggagggcagccagggtgcgcgggccctgcgtgccgccgccgaggtgttcgaactgcaggagcaccagctgcgccagaacccgctcccctgcgacgtgagcgatccggcggtgcgcggcgtggccctcgaccgcaaccaggcccaggtggtggtccgccaggttcccgaccgccccggcacggccgcagccgtctgccgggccctggccgacgccggcatcagcctcgacaccatcgtccagtcggagcgcacccacggctccggcccgcagctcagccgcgacatgagcttcaccctgcgacgcgacgatctcaaccgagcccgcggcgccctgcaaccggtgctcgccccctggcccgaggctcgcttcgaggaaggcctggccatcgcacgggtgagcgccgtgggctcgggcatgccctgcacccccggcaccgccgcccgcatgttccgggccctggcggaagccggggtgaacatcgagatgatcgccaccagcgagatccgcaccagctgtgtggtggcggaagccgatggggtcaaagccctgcaggcggtgcatgcctgcttccagctgggtgacagcaccagctacacgctggaggccacggcctag

SEQ ID NO: 95968 - protein, 601 aa, Synechococcus sp. WH 5701
MALLVQKFGGTSVGSVERIQAVAQRIAASRERGHDLVIVVSAMGHTTDELTALARALCPEPPQREMDMLLATGEQVSIALLAMALHSIGVPAVSMTGPQVGIVTESAHGRARILEVRTERLRKRLEEGQVVVVAGFQGTSSGSAGTPEITTLGRGGSDTSAVALAAALGADACEIYTDVPGVLTTDPRQVSDAQLMEEVSCNEMLELASLGAAVLHPRAVEIARNYGVPLVVRSSWSDAPGTRLTSGRPRPIGSEGLELGRPVDGADLENQQAVLALTRVPDHPGVAALLFEALSAAGLNVDLIVQATHVGASNDIAFTLSESQLEGAREVCRSLLQELAVEESALSTQAGLAKLSISGAGIMGRPGIAARLFDTLARYGINLRMIATSEVKVSCLVEGSQGARALRAAAEVFELQEHQLRQNPLPCDVSDPAVRGVALDRNQAQVVVRQVPDRPGTAAAVCRALADAGISLDTIVQSERTHGSGPQLSRDMSFTLRRDDLNRARGALQPVLAPWPEARFEEGLAIARVSAVGSGMPCTPGTAARMFRALAEAGVNIEMIATSEIRTSCVVAEADGVKALQAVHACFQLGDSTSYTLEATA

SEQ ID NO: 95969 - DNA, 1803 bp, Synechococcus sp. WH 7805
  CDS (1)..(1803): transl_table=11
atggctctgctggtgcagaaatttggcggcacctccgttggcagcgttgagcgcattcaggccgttgcccagcgcatcgccgcctgcaaggaagacggcaatgacctcgtgatcgtggtgtcggccatgggccacaccaccgatgaactcaccgccaaagctcgtgccatcaacagcaacccgccccagcgggagatggacatgctgctggccactggcgaacaggtgtccatcgccctgctgtcgatggctctgcacgccctaggcgtgccagcggtctcgatgaccggctcccaggtcggcatcgtcaccgagtcagcccatggccgggcccgcatcctcgatgtacgcaccgaccgtctgcgcagccgcctggccgaagggcaggtggtggtggtggccggctttcagggcaccagcctgagcagtggcggcaccgccgagatcaccaccctgggccgcggtggctcagacacctcggcggtagccctggcggcagccctcggcgccgacgcctgtgagatctacaccgatgtacccggagtcctcaccaccgacccgcgcaaggtggtggatgctcagctcatgccggaggtgagctgcgatgaaatgctcgagctggccagcctcggggctgccgtcctccatccccgcgccgtggagatcgcccgaaactatggcgtcaccatggtggtgcgctccagctggagcgatgacgccggaaccaccctgaccagccgcagcgcccagcccattggacgcgagggactggaactggggcggccggtggatggagccgaattggtagaagagcaagcggtgctggctctttctcatgtgccggatcaacccggcgtggccgcccaactcttcgaaagcctctccaaaggcggggtgaatgtggacctgatcatccagtccacccacgagaacaacagcaacgacatcactttcaccgtggccgaatccgaactggataaggcccgctgcatctgcaacgcccagctccaaaccctgggcggtgatctcgttgcagaagccggcatgagcaaactcagcatcagcggcgcggggatcatgggtcggcccggcatcgccgccggcctgttccagaccttgtcacgggtcggcatcaatctgcgtttaatcgccaccagcgaagtgaaggtgagctgcgtgatcgaggcatccgccggtgctaaggccctgcaagccacccaggaagcgttcgaactcgacagcgctctgatcagccttaatcccctgcccagcggcgagggcgaaccggaagtgcgtggtgtggccttggacagggatcaggcccaggtgagcgtgcgacacgtgcctaacaaacccggcaccgccggtgctctctgccatgccttggcggacgcaggcatcagcctcgatggcatcgtgcagtcggagcgacagcacgccgatggcagccgcgacatcagcttcacgctcaagcgtgacgaccgcgcagccgccgatcgcgccctgagaggcctgctggcccaatggcccggagcactgctggaggatggtcccgccattgcccgcgtcagcgccgtgggtgcggggatgccggcaacggccggcaccgctggacgcatgttccgctatctggcggacgcggggctgaacattgagatgatcgccaccagcgaaattcgcaccagttgcgttgtggctgagtccgacggcattgccgcccttcgggctgtccataccggattccagctgggtggatcaacccaccacgaagcccagggaacggaatcacctctggagaaataa

SEQ ID NO: 95970 - protein, 600 aa, Synechococcus sp. WH 7805
MALLVQKFGGTSVGSVERIQAVAQRIAACKEDGNDLVIVVSAMGHTTDELTAKARAINSNPPQREMDMLLATGEQVSIALLSMALHALGVPAVSMTGSQVGIVTESAHGRARILDVRTDRLRSRLAEGQVVVVAGFQGTSLSSGGTAEITTLGRGGSDTSAVALAAALGADACEIYTDVPGVLTTDPRKVVDAQLMPEVSCDEMLELASLGAAVLHPRAVEIARNYGVTMVVRSSWSDDAGTTLTSRSAQPIGREGLELGRPVDGAELVEEQAVLALSHVPDQPGVAAQLFESLSKGGVNVDLIIQSTHENNSNDITFTVAESELDKARCICNAQLQTLGGDLVAEAGMSKLSISGAGIMGRPGIAAGLFQTLSRVGINLRLIATSEVKVSCVIEASAGAKALQATQEAFELDSALISLNPLPSGEGEPEVRGVALDRDQAQVSVRHVPNKPGTAGALCHALADAGISLDGIVQSERQHADGSRDISFTLKRDDRAAADRALRGLLAQWPGALLEDGPAIARVSAVGAGMPATAGTAGRMFRYLADAGLNIEMIATSEIRTSCVVAESDGIAALRAVHTGFQLGGSTHHEAQGTESPLEK

SEQ ID NO: 95971 - DNA, 1803 bp, Synechococcus sp. RS9916
  CDS (1)..(1803): transl_table=11
atggccctgctggtgcagaaattcggcggcacctccgtggcggatgtggagcgcattcaggcggtggcccgtcgcattgccgccagcaaggaggacggccacgatctggtgatcgtggtgtcggccatgggccacaccaccgacgaactcaccagcaaggcccgggcgatcagcagcaacccgccccagcgggagatggacatgctgctggccaccggcgagcaggtgtcgatcgctctgctctccatggcgctcaacaccctgggcatcccggccgtctccatgaccggtcctcaggtgggcatcgtgaccgaatccgcccatggccgggcccgcatcctggaggtgcgcaccgaccgtctacgcagtcgcctcactgaaggccaagtggtggtggtcgccggtttccagggcaccagccaaagcagcggtggcaccgccgagatcaccaccctggggcgaggcggatccgacacctcagccgtggccttggccgcggccctcggcgcagatgcctgtgagatctacaccgatgtgccgggggtgctcaccactgacccgcgcaaggtggcggatgcccagctgatgcctgaggtgagctgcgacgaaatgctggagctggccagcttgggagctgcggtgctgcacccccgcgccgtggagattgcccgcaactatggggtgacgctggtggtgcgctccagctggagtgatgagcccggcaccacactcaccagccgcagtgcccggccgattggccgcgagggcctggaactggggcggccggtggatggcgccgacctggtggaggggcaagcggtgctggccctctctcatgtgccggatcaacccggcgtcgccgctcaactgtttgaagccctgtcagccggcggcgtgaatgtggacctaatcattcaggccacccacgaaggcagcagcaacgacatcaccttcaccgtggccgaggcggatctggagcaggcccgcagcatctgcgccagccttctggacgactggggcggtcaactggtggccgaaggcggcatgagcaagctgagcatcaatggcgccggcatcatgggccgacccggcatcgccgctggcctgttcgacaccctgtcccgagaggggatcaacctccggctgattgccaccagcgaggtgaaggtgagctgtgtgatcgacgccgaccaaggcgcaaaggctcttcgagccgtgaccacagcctttgaactcaacgatcagcaggtgcatctgaatccaccggcatcgggcgcggacgaccccgaagtgcgcggtgtcgctctcgaccgcgaccaggcccaggtgagcgtgcgccacgtgcccgacaagcccggcacagccgcctctctttgctcagccctggccgatgccggcatcagccttgattcgatcgtgcagtcggaacggcaacacgccgacggcagccgcgacatcagcttcaccctcaaacgcgaggatcgcggccgtgctgatcaggccctggcaccgctgctggcgcaatggcccggagcgcaactggaagatggtccagcgattgcccgggtgagtgcagttggtgccggcatgccagccacagcaggcacagccgctcgcatgttccggacgctcgcggatgcagggctcaacatcgaactgatcgccaccagcgaaatccgcaccagctgcgtggtggcggaagacgatggagtggccgcgctgcaggcggtgcatgccggttttggcttgggaggcaacacgattcaccaggcccagggcaccgaatcaccgctcgacgcctga

SEQ ID NO: 95972 - protein, 600 aa, Synechococcus sp. RS9916
MALLVQKFGGTSVADVERIQAVARRIAASKEDGHDLVIVVSAMGHTTDELTSKARAISSNPPQREMDMLLATGEQVSIALLSMALNTLGIPAVSMTGPQVGIVTESAHGRARILEVRTDRLRSRLTEGQVVVVAGFQGTSQSSGGTAEITTLGRGGSDTSAVALAAALGADACEIYTDVPGVLTTDPRKVADAQLMPEVSCDEMLELASLGAAVLHPRAVEIARNYGVTLVVRSSWSDEPGTTLTSRSARPIGREGLELGRPVDGADLVEGQAVLALSHVPDQPGVAAQLFEALSAGGVNVDLIIQATHEGSSNDITFTVAEADLEQARSICASLLDDWGGQLVAEGGMSKLSINGAGIMGRPGIAAGLFDTLSREGINLRLIATSEVKVSCVIDADQGAKALRAVTTAFELNDQQVHLNPPASGADDPEVRGVALDRDQAQVSVRHVPDKPGTAASLCSALADAGISLDSIVQSERQHADGSRDISFTLKREDRGRADQALAPLLAQWPGAQLEDGPAIARVSAVGAGMPATAGTAARMFRTLADAGLNIELIATSEIRTSCVVAEDDGVAALQAVHAGFGLGGNTIHQAQGTESPLDA

SEQ ID NO: 95973 - DNA, 1236 bp, marine gamma proteobacterium HTCC2143; identical to SEQ ID NO: 84001
  CDS (1)..(1236): transl_table=11

SEQ ID NO: 95974 - protein, 411 aa, marine gamma proteobacterium HTCC2143; identical to SEQ ID NO: 84002

SEQ ID NO: 95975 - DNA, 1236 bp, Pseudomonas putida GB-1; identical to SEQ ID NO: 84007
  CDS (1)..(1236): transl_table=11

SEQ ID NO: 95976 - protein, 411 aa, Pseudomonas putida GB-1; identical to SEQ ID NO: 84008

SEQ ID NO: 95977 - DNA, 1284 bp, Streptomyces griseus
  CDS (1)..(1284): transl_table=11
gtgactacgcagggcagccgtcccacgggcgacgtggtggtccagaagtacggcggcagttcgctcgccaccgtgtcccaggtacgtcaggtcgccgaccgggtcggcgcgctcgcccgctccgggcggcgggtggtggtcgtggtctccgcacagggcgacaccaccgacgagctggtcggccgggcggaggcggtcaacccgcggccggcgggccacgaactcgaccagttgctcgccaccggcgagaccgcctccgcggcgctgatggcgatggccctccagcggggcggactggcggcgaccgcgctgtccggcgcccgcagcggcgtgctcgccaccgggccgcacggcgcgggggtcatcgtcgcggtcgacaccgaccagttgcgcacgctcctggacgccgggcggaccgtggtgctcgccggtttccagggcgtcaccgccgagggcgacatcatcacgctcggccgcggcggttcggacaccacggccgtcgcggtcgcggccgaactgcgctccggccactgcgagatctacagcgacgtgcccggcgtgttcaccgctgacccgcgcgtcgtccccgacgcccggctcatgcccgacatcgacatcgacgtgatgaccgagatggccttcgccggagcccgggtcatgcacgcgcgggccgtcgaactggccgccctctacgacgtcgacatcctcgtgggccggtcgacggccacgcggaccggcacccgtatccatcgacgagacggaaacgacatgcttgaggacaggacggcggtgtcggccgtcgtccacgacgccgacatcgcccggatcaccctgcgcacccacgacacccccgacccctccgccgacgtcttccggttcctggcgaaggagtccatccccgccgacatgaccacggtctcctccgcgcccgacggcggcttctcgctcggtttcacggtgcgccgctcgcacgcggcggacgtcgggcggtcgttcagcgacctcatggccccgcgcccgcacggggtcgaggtcgaggaccaggtcgccaaggtctcgatcgtcggccagggcctgctcagccggcccgagtacgcgtcccggatgctggcctcgctcgtcggctccggcatcagcgcccggtcgctgaccgcgtcccagctgcgggtctcggtgacggtgccccgctccgacgcggtccgcgcggtgggcctgctgcacagcgagttcggcctcggcgccgaggcgggcgcggtgcccgcaagcctgactccccggccctga

SEQ ID NO: 95978 - protein, 427 aa, Streptomyces griseus
MTTQGSRPTGDVVVQKYGGSSLATVSQVRQVADRVGALARSGRRVVVVVSAQGDTTDELVGRAEAVNPRPAGHELDQLLATGETASAALMAMALQRGGLAATALSGARSGVLATGPHGAGVIVAVDTDQLRTLLDAGRTVVLAGFQGVTAEGDIITLGRGGSDTTAVAVAAELRSGHCEIYSDVPGVFTADPRVVPDARLMPDIDIDVMTEMAFAGARVMHARAVELAALYDVDILVGRSTATRTGTRIHRRDGNDMLEDRTAVSAVVHDADIARITLRTHDTPDPSADVFRFLAKESIPADMTTVSSAPDGGFSLGFTVRRSHAADVGRSFSDLMAPRPHGVEVEDQVAKVSIVGQGLLSRPEYASRMLASLVGSGISARSLTASQLRVSVTVPRSDAVRAVGLLHSEFGLGAEAGAVPASLTPRP

SEQ ID NO: 95979 - DNA, 2526 bp, Oryza sativa subsp
  CDS (1)..(2526)
atgtggagcctcgccgtcgcgagcccgcaccccgccgccgccttcgccgcggcccgtccccgccgccgccctcgccccgccgccgccccctcccacagaggtgtgaatccgcagcggtggcgatgtgagaagactcaggcatggtcgttttggagctctctgagggccagcgaccttccaggaggactttatggggatgtttcgaagaatatgctcaagccagctgctgctgtttcagttgagcaagctgaagctagtgctcaccttccaaaaggtgacatgtggtctgtgcataaatttggtgggacctgcatgggaacctcccagaggattcagaatgtggctgacataatccttcgcgacccttctgagaggaaactggttgttgtgtctgcaatgtctaaagtcactgacatgatgtacaaccttgtaaataaggctcaatcaagggatgattcttatatcactgcacttgatgaagttttcgagaagcatatggcagcagcaaaggatctgcttggaggagaggaccttgcaagattcttatctcagttgcacgcggatgtcagtaacctaaaagcaatgcttcgtgcaatttgcatagctgggcatgccacggagtctttctcagattttgttgttggacatggagagatatggtcagctcaattgttgtcatttgccataaagaagtctggaaccccttgcagttggatggacacacgagaagttttagttgtaaatcctacaggttccaaccaagtagatcctgactatttggaatctgagaaacgacttgagaaatggttcgctcgacagccagctgagacaataattgctactgggtttattgcgagtacacctgaaaacattcctacaaccttgaaaagagatggaagtgatttctctgcagccataattggttcacttgttaaggctggtcaggtcactatctggactgatgttgatggggtctttagtgcagatcccagaaaagttagcgaggctgtcatattaagcactttatcatatcaggaggcgtgggaaatgtcgtattttggggcaaatgtattacatccgcgtaccatcatacctgtgatgaaatacaatattccaattgttataagaaatatgttcaatatttctgcccctggtaccatgatctgccagcagcctgcgaatgaaagtggtgatttggaggcttgcgtcaaagcatttgcaactatagataaattgtctcttgttaacgttgaaggaactggaatggctggtgttcctggtactgcaagtgccatatttggtgctgtgaaggatgttggagctaatgttatcatgatatcgcaggctagtagtgaacactccgtatgctttgctgtaccagaaaaggaagttgctgcagtttctgcagctttgcatgtcaggttccgtgaagcattatctgcaggcaggctatctaaggtcgaagtcattcataattgtagcatccttgctgctgtcggcctgaagatggcaagtactcctggggtcagtgcaaccctttttgatgcacttgcaaaggcaaatattaatgtaagggcaatagctcaaggttgtagtgagtacaacatcactgttgtattgaagcaagaggactgcgtaagggctctgagagctgctcactcaaggttcttcctctccaaaaccacacttgctgtcggaattattggacctgggttgattggtcgtactctccttaaccagctgaaggatcaggctgcagttcttaaggaaaatatgaacattgatctgcgtgtcatgggaatcactggttcgaggacaatgtatttgaaacttaggactctacaacgtgcatcatatacccattacttctatgaagcaactgttggtgctggccttcctatcattagcactctgcgtggtctcctggaaacaggtgacaagatattgcgtattgaggggatcttcagtggaacattgagttacattttcaacaattttgaaggaacaagaactttcagtgatgttgtttctgaagcaaaagaggctggatacactgaacctgatccaagagatgatctgtctggaactgatgtagccagaaaggtaataattcttgctagggaatctggattgaagcttgagctttctgatattcctgtaaggagtcttgtgccggaggcattgagatcctgttcaacagctgatgaatacatgcaaaagttaccatcctttgaccaggactgggcaagagagagtaaagatgctgaagctgccggagaagttttgcggtatgttggagtggtggatttggtgaacaaggagggtcaggtcgagctgcggaggtacaagaaggaccacccgttcgcgcagctatctggttccgacaacatcatcgccttcacgacgtcaagatacaaggagcaaccgctgatcgtgcgaggcccgggcgccggtgcagaggtgaccgcaggaggtgtcttcagtgacatactacggctggcctcctacctaggcgctccctcataa

SEQ ID NO: 95980 - protein, 841 aa, Oryza sativa subsp
MWSLAVASPHPAAAFAAARPRRRPRPAAAPSHRGVNPQRWRCEKTQAWSFWSSLRASDLPGGLYGDVSKNMLKPAAAVSVEQAEASAHLPKGDMWSVHKFGGTCMGTSQRIQNVADIILRDPSERKLVVVSAMSKVTDMMYNLVNKAQSRDDSYITALDEVFEKHMAAAKDLLGGEDLARFLSQLHADVSNLKAMLRAICIAGHATESFSDFVVGHGEIWSAQLLSFAIKKSGTPCSWMDTREVLVVNPTGSNQVDPDYLESEKRLEKWFARQPAETIIATGFIASTPENIPTTLKRDGSDFSAAIIGSLVKAGQVTIWTDVDGVFSADPRKVSEAVILSTLSYQEAWEMSYFGANVLHPRTIIPVMKYNIPIVIRNMFNISAPGTMICQQPANESGDLEACVKAFATIDKLSLVNVEGTGMAGVPGTASAIFGAVKDVGANVIMISQASSEHSVCFAVPEKEVAAVSAALHVRFREALSAGRLSKVEVIHNCSILAAVGLKMASTPGVSATLFDALAKANINVRAIAQGCSEYNITVVLKQEDCVRALRAAHSRFFLSKTTLAVGIIGPGLIGRTLLNQLKDQAAVLKENMNIDLRVMGITGSRTMYLKLRTLQRASYTHYFYEATVGAGLPIISTLRGLLETGDKILRIEGIFSGTLSYIFNNFEGTRTFSDVVSEAKEAGYTEPDPRDDLSGTDVARKVIILARESGLKLELSDIPVRSLVPEALRSCSTADEYMQKLPSFDQDWARESKDAEAAGEVLRYVGVVDLVNKEGQVELRRYKKDHPFAQLSGSDNIIAFTTSRYKEQPLIVRGPGAGAEVTAGGVFSDILRLASYLGAPS

SEQ ID NO: 95981 - DNA, 1266 bp, Corynebacterium glutamicum
  CDS (1)..(1266): transl_table=11
atggccctggtcgtacagaaatatggcggatcctcgcttgagagtgcggaacgcattagaaacgtcgctgaacggatcgttgccaccaagaagacgggaaatgatgtcgtggttgtctgctccgcaatgggagacaccacggatgaacttctagaacttgcagcggcagtgaatcccgttccgccagcgcgtgaaatggatatgctcctgactgctggtgagcgtatttctaacgctctcgtcgccatggctattgagtcccttggagcagaagcccaatctttcacgggctctcaggctggtgtgctcaccaccgagcgtcacggaaacgcacgcattgttgatgtcactccaggtcgtgtgcgtgaagcactcgatgagggcaagatctgcattgttgctggtttccagggtgttaataaagaaacccgcgatgtcaccacattgggtcgtggtggttctgacaccactgcagttgcgttggcagctgctttgaacgctgatgtgtgtgagatttactccgacgttgacggtgtgtataccgctgacccgcgcatcgttcctaatgcacagaagctggaaaagctcagcttcgaagaaatgctggaactagctgctgttggctccaagattttggtgctgcgcagtgttgaatacgctcgtgcattcaatgtgccacttcgcgtacgctcatcttatagtaatgatcccggcactttgattgccggctctatggaggatattcctgtggaagaagcagtccttaccggtgtcgcaaccgacaagtccgaagccaaagtaaccgttctgggtatttccgataagccaggcgaggctgcgaaggttttccgtgcgttggctgatgcagaaatcaacattgacatggttctgcagaacgtctcttctgtagaggacggcaccaccgacatcaccttcacctgccctcgttccgacggccgccgcgcgatggagatcttgaagaagcttcaggttcagggcaactggaccaatgtgctttacgacgaccaggtcggcaaagtctccctcgtgggtgctggcatgaagtctcacccaggtgttaccgcagagttcatggaagctctgcgcgatgtgaacgtgaacatcgttttgatttccacgtctgagattcgtatttccgtgctgatccgtgaagatgatctggatgctgctgcacgtgcattgcatgagcagttccagctgggcggcgaagacgaagccgtcgtttatgcaggcaccggacgctaa

SEQ ID NO: 95982 - protein, 421 aa, Corynebacterium glutamicum
MALVVQKYGGSSLESAERIRNVAERIVATKKTGNDVVVVCSAMGDTTDELLELAAAVNPVPPAREMDMLLTAGERISNALVAMAIESLGAEAQSFTGSQAGVLTTERHGNARIVDVTPGRVREALDEGKICIVAGFQGVNKETRDVTTLGRGGSDTTAVALAAALNADVCEIYSDVDGVYTADPRIVPNAQKLEKLSFEEMLELAAVGSKILVLRSVEYARAFNVPLRVRSSYSNDPGTLIAGSMEDIPVEEAVLTGVATDKSEAKVTVLGISDKPGEAAKVFRALADAEINIDMVLQNVSSVEDGTTDITFTCPRSDGRRAMEILKKLQVQGNWTNVLYDDQVGKVSLVGAGMKSHPGVTAEFMEALRDVNVNIVLISTSEIRISVLIREDDLDAAARALHEQFQLGGEDEAVVYAGTGR

SEQ ID NO: 95983 - DNA, 1272 bp, Streptomyces albulus
  CDS (1)..(1272): transl_table=11
gtgggccttgtcgtgcagaagtacggcggctcatccgttgcggatgccgagggcatcaagcgcgttgccaagcgaatcgtcgaggccaagaagaacggcaaccaggttgtcgtcgtggtctcggcgatgggcgacacgacggacgagctgatcgatctcgcgcaggaagtgtccccgatcccgtcgggacgcgagttcgacatgctgctgaccgccggagagcggatctccatggccctgctggcgatggcgatcaaaaacctcggccatgaggcgcagtccttcaccggtagccaggccggtgtgatcactgactccgtgcacaacaaggcacggatcatcgatgtcacgccgggccgcatcaaggcgtccctcgacgagggcaacatcgccatcgtcgccggattccagggcgtgtcccaggacaagaaggacatcacgacgctcgggcgcggtggttcggacaccaccgcggtggcgctcgccgccgccctgaacgccgatgtctgcgagatctacaccgacgtcgacggcgtcttcaccgccgacccgcgggtcgtgaagaaggcccggaagatcgagtggatctccttcgaggacatgctggagctggccagctccggctccaaggtgctgctgcaccgctgcgtcgagtacgcacgccgttacaacatcccgatccacgtccgctcctccttctcggggctgcagggcacatgggtcagcaacgaaccgcaaggggacaggccgatggaacaggcgatcatctcgggcgtcgcacacgacacctccgaggcgaaggtcacggtcgtcggggtcccggacaagccgggcgaggccgcgcggatcttccgtgccatcgccgactccgaggtcaacatcgacatggtcgtccagaacgtgtcggcggcctccaccggtctgacggacatctccttcacgctgccgaaggccgagggccgcaaggccgtcgccgcgctggagaagacccgggccgcggtcggcttcgactcgctccgctacgacgaccagatcgccaagatctcgctggtcggcgcgggcatgaagaccaaccccggcgtcaccgcgacgttcttcgaggcgctgtcgaacgcgggcgtgaacatcgagctcatctcgacctccgagatccgcatctcggtcgtcacccgtgccgatgacgtcaacgaggccgtccaggcggtgcacagcgccttcggcctcgacagtgagaccgacgaagcagtcgtctacggcggcaccgggcgatga

SEQ ID NO: 95984 - protein, 423 aa, Streptomyces albulus
MGLVVQKYGGSSVADAEGIKRVAKRIVEAKKNGNQVVVVVSAMGDTTDELIDLAQEVSPIPSGREFDMLLTAGERISMALLAMAIKNLGHEAQSFTGSQAGVITDSVHNKARIIDVTPGRIKASLDEGNIAIVAGFQGVSQDKKDITTLGRGGSDTTAVALAAALNADVCEIYTDVDGVFTADPRVVKKARKIEWISFEDMLELASSGSKVLLHRCVEYARRYNIPIHVRSSFSGLQGTWVSNEPQGDRPMEQAIISGVAHDTSEAKVTVVGVPDKPGEAARIFRAIADSEVNIDMVVQNVSAASTGLTDISFTLPKAEGRKAVAALEKTRAAVGFDSLRYDDQIAKISLVGAGMKTNPGVTATFFEALSNAGVNIELISTSEIRISVVTRADDVNEAVQAVHSAFGLDSETDEAVVYGGTGR

SEQ ID NO: 95985 - DNA, 1272 bp, Streptomyces sp
  CDS (1)..(1272): transl_table=11
gtgggccttgtcgtgcagaagtacggaggctcctccgtagccgatgccgagggcatcaagcgggtcgccaagcgagtcgtcgacgccaagaggaacggcaaccaggtggttgtcgtggtgtccgcgatgggcgacacgacggacgagttgatagatctcgccgagcaggtctcaccgatccctgccggccgtgagttcgacatgctgctgaccgccggcgagcggatctccatggccctgctggcgatggcgatcaagaacctgggccacgaggcccagtcgttcacgggcagccaggccggtgtcatcaccgactcggtccacaacaaagcgcgcatcatcgacgtcacgccgggccgcatccggacctcgatcgacgagggcaacatcgccatcgtcgccgggttccagggcgtgagccaggagggcaagaacatcaccaccctcggccgcggcgggtcggacacgaccgccgtcgcgctggccgccgcgctggacgccgaggtctgtgagatctacaccgacgtcgacggcgtcttcaccgcggacccccgggtcgtgaagaaggcgaagaagatcgactggatctccttcgaggacatgctggagctggccgcgtccggctccaaggtgctgctgcaccgctgcgtcgagtacgcacgccgttacaacatcccgatccacgtccgctcgtccttctccggactgcgcggcacctgggtcagcaacgagccgcaaggggaccagaaggtggagcacgcgatcatctccggagtcgcccacgacgtctcggaggccaaggtcaccgtcgtcggcgtcccggacaagccgggcgaggcggccgcgatcttccgcgccatcgccaacgccgaggtcaacatcgacatggtggtgcagaacgtctccgccgcgtcgaccggcctgacggacatctccttcaccctccccaaggccgagggccgcaaggccatcgacgccctggagcgggccaagggctccatcggcttcgagtcgctgcgctacgacgaccagatcgccaagatctccctggtcggcgccggtatgaagaccaacccgggcgtcaccgccggcttcttcgaggcgctctccgacgcgggcgtgaacatcgagctgatctcgacctccgagatccgcatctccgtggtcacgcgggccgacgacgtcaacgaggccgtgcgcgccgtgcacaccgccttcggtctcgacagcgactccgacgaggccgtcgtctacggaggcaccggccgatga

SEQ ID NO: 95986 - protein, 423 aa, Streptomyces sp
MGLVVQKYGGSSVADAEGIKRVAKRVVDAKRNGNQVVVVVSAMGDTTDELIDLAEQVSPIPAGREFDMLLTAGERISMALLAMAIKNLGHEAQSFTGSQAGVITDSVHNKARIIDVTPGRIRTSIDEGNIAIVAGFQGVSQEGKNITTLGRGGSDTTAVALAAALDAEVCEIYTDVDGVFTADPRVVKKAKKIDWISFEDMLELAASGSKVLLHRCVEYARRYNIPIHVRSSFSGLRGTWVSNEPQGDQKVEHAIISGVAHDVSEAKVTVVGVPDKPGEAAAIFRAIANAEVNIDMVVQNVSAASTGLTDISFTLPKAEGRKAIDALERAKGSIGFESLRYDDQIAKISLVGAGMKTNPGVTAGFFEALSDAGVNIELISTSEIRISVVTRADDVNEAVRAVHTAFGLDSDSDEAVVYGGTGR

SEQ ID NO: 95987 - DNA, 1266 bp, Streptomyces clavuligerus
  CDS (1)..(1266): transl_table=11
gtggcgctcgtagtccagaagtacggcggatcgtcgttggagagcgctgatcggatcaagcgcgtggccgagcggatcgtggccacgaaaaaggccgggaacgaggtggtggtggtctgctcggcgatgggcgacaccaccgacgaactgctcgacctggcccagcaggtgaacccggttccgccggagcgggagatggacatgctgctcaccgcgggtgagcgtatctccaacgcgctggtcgcgatggccatctccgcccagggcgcgcaggcctggtcgttcaccggatcgcaggcgggggtggtgaccacggccgtgcacggcaacgcgcggatcatcgacgtcaccccgagccgggtcagcgaagcactggaacagggttacgtcgcgctggtcgccgggttccagggcgtggcgcaggacaccaaggacatcaccacgctcggccgcggtggctcggacaccaccgcggtggcgctggccgcggcgctcaacgccgacgtgtgcgagatctactccgatgtggacggtgtgtactcggccgacccccgcatcgtgccggacgcgcgcaagctggattccgtgccgtacgaggaaatgctggagctcgcggcgagcggctcgaagatcctgcacctgcggtcggtggagtacgcgcggcgctacggcgtgccgatccgagtccgttcttcctacagtgacaagccgggcacgacggtgaccggatcgatcgaggagatccccgtggaacaagcgttgatcaccggtgtggcgcacgaccgctccgaagccaagatcacggtgaccggggtgccggaccacgccggtgccgccgcccggatcttccgggtgatcgccgacgccgagatcgacatcgacatggtgctgcagaacgtttccaacacctcgtcggggcgcacggacatcaccttcacgctgtcgaaggccaacggccccaaggcggtcgcgtcgctggagaagatcaaggaggagctgggcttctcctcggtgctctacgacgaccacgtcggcaaggtctccctggttggcgccggcatgcgctcgcaccccggggtcaccgccaccttctgcgaagccctgtccaaggtcggggtgaacatcgagatcatcaacacctccgagatccgcatctccgtgctgatccgggacgcgcagctcgacgacgcggtgcgcgccatccatgacgcattcgaactgggcggcgacgaagaagccgtcgtctacgcgggaagtgggcggtag

SEQ ID NO: 95988 - protein, 421 aa, Streptomyces clavuligerus
MALVVQKYGGSSLESADRIKRVAERIVATKKAGNEVVVVCSAMGDTTDELLDLAQQVNPVPPEREMDMLLTAGERISNALVAMAISAQGAQAWSFTGSQAGVVTTAVHGNARIIDVTPSRVSEALEQGYVALVAGFQGVAQDTKDITTLGRGGSDTTAVALAAALNADVCEIYSDVDGVYSADPRIVPDARKLDSVPYEEMLELAASGSKILHLRSVEYARRYGVPIRVRSSYSDKPGTTVTGSIEEIPVEQALITGVAHDRSEAKITVTGVPDHAGAAARIFRVIADAEIDIDMVLQNVSNTSSGRTDITFTLSKANGPKAVASLEKIKEELGFSSVLYDDHVGKVSLVGAGMRSHPGVTATFCEALSKVGVNIEIINTSEIRISVLIRDAQLDDAVRAIHDAFELGGDEEAVVYAGSGR

SEQ ID NO: 95989 - DNA, 1266 bp, Corynebacterium crenatum
  CDS (1)..(1266): transl_table=11
gtggccctggtcgtacagaaatatggcggttcctcgcttgagagtgcggaacgcattagaaacgtcgctgaacggatcgttgccaccaagaaggctggaaatgatgtcgtggttgtctgctccgcaatgggagacaccacggatgagcttctagaacttgctgcggcagtgaatcccgttccgccagctcgtgaaatggatatgctcctgactgctggtgagcgtatttctaacgctctcgtcgccatggctattgagtccctgggtgcagaggctcaatctttcacgggttctcaggctggtgtgctcaccaccgagcgtcacggaaacgcacgcattgttgatgtcactccaggtcgtgtgcgtgaagcactcgatgagggcaagatctgcattgttgctggtttccagggtgtcaataaggaaacccgcgatgtcaccacgttgggtcgcggtggttctgataccactgcagttgcattggcagctgctctgaacgctgatgtgtgtgagatttactcagatgttgacggcgtgtacaccgctgacccgcgcatcgttcctaatgctcagaagctggaaaagctcagcttcgaagaaatgctggaacttgctgctgttggctccaagattttggtgctacgcagtgttgaatacgctcgtgcattcaatgtgccacttcgcgtacgctcgtcttatagcaatgatcccggcactttgattgccggctctatggaggatattcctgtggaagaagcagtccttaccggtgtcgcaaccgacaagtccgaagccaaagtaaccgttctgggtatttccgataagccaggcgaggctgcgaaggttttccgtgcgttggctgatgcagaaatcaacattgacatggttctgcagaacgtctcctctgtggaagacggcaccaccgacatcacgttcacctgccctcgctctgacggacgccgtgcgatggagatcttgaagaagcctcaggttcagggcaactggaccaatgtgctttacgacgaccaggtcggcaaagtctccctcgtgggtgcgggcatgaagtctcacccaggtgttaccgcagagttcatggaagctctgcgcgatgtcaacgtgaacatcgaattgatttccacctctgagatccgcatttccgtgctgatccgtgaagatgatctggatgctgctgcacgtgcactgcacgagcagttccagctgggcggcgaagacgaagccgtcgtttatgcaggcaccggacgctaa

SEQ ID NO: 95990 - protein, 421 aa, Corynebacterium crenatum
MALVVQKYGGSSLESAERIRNVAERIVATKKAGNDVVVVCSAMGDTTDELLELAAAVNPVPPAREMDMLLTAGERISNALVAMAIESLGAEAQSFTGSQAGVLTTERHGNARIVDVTPGRVREALDEGKICIVAGFQGVNKETRDVTTLGRGGSDTTAVALAAALNADVCEIYSDVDGVYTADPRIVPNAQKLEKLSFEEMLELAAVGSKILVLRSVEYARAFNVPLRVRSSYSNDPGTLIAGSMEDIPVEEAVLTGVATDKSEAKVTVLGISDKPGEAAKVFRALADAEINIDMVLQNVSSVEDGTTDITFTCPRSDGRRAMEILKKPQVQGNWTNVLYDDQVGKVSLVGAGMKSHPGVTAEFMEALRDVNVNIELISTSEIRISVLIREDDLDAAARALHEQFQLGGEDEAVVYAGTGR

SEQ ID NO: 95991 - DNA, 1266 bp, Nocardia lactamdurans
  CDS (1)..(1266): transl_table=11
gtggcgctcgtagtccagaagtacggcggatcgtcgttggagagcgctgatcggatcaagcgcgtggccgagcggatcgtggccacgaaaaaggccgggaacgaggtggtggtggtctgctcggcgatgggcgaaaccaccgacgaactgctcgacctggcccagcaggtgaacccggttccggccggagcggagatggacatgctgctcaccgcgggtgacggtatctccaacgcgctggtcgcgatggccatctccgcccagggcgcgcaggcctggtcgttcaccggatcgcaggcgggggtggtgaccacggccgtgcacggcaacgcgcggatcatcgacgtcaccccgagccgggtcagcgaacgactggaacagggttacgtcgcgctggtcgccgggttccagggcgtggcgcaggacaccaaggacatcaccacgctcggccgcggtggctcggacaccaccgcggtggcgctggccgcggcgctcaacgccgacgtgtgcgagatctactccgatgtggacggtgtgtactcggccgacccccgcatcgtgccggacgcgcgcaagctggattccgtgccgtacgaggaaatgctggagctcgcggcgagcggctcgaagatcctgcacctgcggtcggtggagagcgcgcggcgctacggcgtgccgatccgagtccgttcttcctacagtgacaagccgggcacgacggtgaccggatcgatcgaggagatccccgtggaacaagcgttgatcaccggtgtggcgcacgaccgctccgaagccaagatcacggtgaccggggtgccggaccacgccggtgccgccgcccggatcttccgggtgatcgccgacgccgagatcgacatcgacatggtgctgcagaacgtttccaacacctcgtcggggcgcacggacatcaccttcacgctgtcgaaggccaacggccccaaggcggtcgcgtcgctggagaagatcaaggaggagctgggcttctcctcggtgctctacgacgaccacgtcggcaaggtctccctggttggcgccggcatgcgctcgcaccccggggtcaccgccaccttctgcgaagccctgtgcaaggtcggggtgaacatcgagatcatcaacacctccgagatccgcatctccgtgctgatccgggacgcgcagctcgacgacgcggtgcgcgccatccatgacgcattcgaactgggcggcgacgaagaagccgtcgtctacgcgggaagtgggcggtag

SEQ ID NO: 95992 - protein, 421 aa, Nocardia lactamdurans
MALVVQKYGGSSLESADRIKRVAERIVATKKAGNEVVVVCSAMGETTDELLDLAQQVNPVPAGAEMDMLLTAGDGISNALVAMAISAQGAQAWSFTGSQAGVVTTAVHGNARIIDVTPSRVSERLEQGYVALVAGFQGVAQDTKDITTLGRGGSDTTAVALAAALNADVCEIYSDVDGVYSADPRIVPDARKLDSVPYEEMLELAASGSKILHLRSVESARRYGVPIRVRSSYSDKPGTTVTGSIEEIPVEQALITGVAHDRSEAKITVTGVPDHAGAAARIFRVIADAEIDIDMVLQNVSNTSSGRTDITFTLSKANGPKAVASLEKIKEELGFSSVLYDDHVGKVSLVGAGMRSHPGVTATFCEALCKVGVNIEIINTSEIRISVLIRDAQLDDAVRAIHDAFELGGDEEAVVYAGSGR

SEQ ID NO: 95993 - DNA, 1266 bp, Amycolatopsis mediterranei
  CDS (1)..(1266): transl_table=11
gtggccctcgtggtccagaagtacggcggatcgtcgctggaaagtgccgaccggatcaagcgcgtggcggagcggatcgtcgcgacgaagaaggcgggcaacgacgtcgtcgtcgtctgctcggcgatgggtgacaccaccgacgagctgctcgacctggcgcagcaggtcaacccggcgccgccggagcgggagatggacatgctgctcaccgccggtgagcgcatctcgaactcgctggtcgcgatggcgatcgcggcccagggcgccgaggcgtggtcgttcaccggttcgcaggccggcgtcgtcacgacgtcggtgcacggcaacgcgcgcatcatcgacgtcacgccgagccgggtcaccgaggcgctcgaccaggggtacatcgcgctggtggcgggcttccagggcgtcgcgcaggacaccaaggacatcaccacgctgggccgcggcggctcggacaccaccgccgtcgcgctggccgccgcgctgaacgccgacgtctgcgagatctactccgatgtggacggtgtgtacacggcggacccgcgggtggtgccggacgcgaagaagctcgacaccgtcacgtacgaagagatgctcgagctcgccgcgagcgggtcgaagatcctgcacctgcgttcggtcgagtacgcgcgccgctacggcgtcccgatccgagtccgttcttcctacagcgacaagccgggcacgacggtgaccggttctatcgaggagatccccgtggaacaagccctgatcaccggtgtggcgcacgaccgctccgaagccaagatcacggtcaccggggtgccggaccacaccggcgccgcggcccggatcttccgcgtgatcgccgacgccgagatcgacatcgacatggtgctgcagaacgtgtccagcaccgtctccggccgcacggacatcacgttcacgctgtcgaaggccaacggcgccaaggccgtcaaggaactggagaaggtccaggcggagatcggcttcgagtcggtcctctacgacgaccacgtcggcaaggtgtcggtggtcggcgccgggatgcgctcgcacccgggtgtcacggcgacgttctgcgaagcgctggccgaggccggcgtcaacatcgaaatcatcaacacctcggagatccgcatttcggtgctgatccgcgacgcgcagctcgacgacgccgtgcgcgcgatccacgaggcattcgaactcggcggcgacgaagaagccgtcgtctacgcggggagtggtcgctga

SEQ ID NO: 95994 - protein, 421 aa, Amycolatopsis mediterranei
MALVVQKYGGSSLESADRIKRVAERIVATKKAGNDVVVVCSAMGDTTDELLDLAQQVNPAPPEREMDMLLTAGERISNSLVAMAIAAQGAEAWSFTGSQAGVVTTSVHGNARIIDVTPSRVTEALDQGYIALVAGFQGVAQDTKDITTLGRGGSDTTAVALAAALNADVCEIYSDVDGVYTADPRVVPDAKKLDTVTYEEMLELAASGSKILHLRSVEYARRYGVPIRVRSSYSDKPGTTVTGSIEEIPVEQALITGVAHDRSEAKITVTGVPDHTGAAARIFRVIADAEIDIDMVLQNVSSTVSGRTDITFTLSKANGAKAVKELEKVQAEIGFESVLYDDHVGKVSVVGAGMRSHPGVTATFCEALAEAGVNIEIINTSEIRISVLIRDAQLDDAVRAIHEAFELGGDEEAVVYAGSGR

SEQ ID NO: 95995 - DNA, 2460 bp, Serratia marcescens; identical to SEQ ID NO: 775
  CDS (1)..(2460): transl_table=11

SEQ ID NO: 95996 - protein, 819 aa, Serratia marcescens; identical to SEQ ID NO: 776

SEQ ID NO: 95997 - DNA, 1236 bp, Bacillus sp
  CDS (1)..(1236): transl_table=11
gtgggattaattgtccaaaagtttggcggaacatctgttggctccgttgagcgcatcttaaacgttgccaatcgggtaattgaagaaaaaaagaacggaaatgacgttgttgtggttgtttctgcaatggggaagacaacagatgagcttgtcgatttagcaaaacaaatttcagcacatccaccaaagcgcgaaatggatatgcttcttacaaccggagagcaagtgacgatttcgcttttggctatggcattgaatgaaaaaggctatgaggccatttcctatactggatggcaggcaggaattacaactgaacctgtttttgggaacgcgagaatattaaatatcgaaaccgaaaaaattcaaaaacagctaaacgaaggaaaaattgtcgtagttgccggcttccaaggtattgatgagcacggagaaattacgactcttgggagaggcggatccgatactacggctgtagcacttgctgcggctttgaaagccgaaaaatgtgatatttacaccgatgttactggagtttttactacagatccgcgctatgtaaagtcggctaggaagcttgcttctatttcatatgatgaaatgcttgaacttgcgaatcttggtgcgggcgtccttcatccaagagcagtagaatttgcgaaaaattacggaattactttggaggtgcgctccagtatggaacgagaagaagggacgatcattgaggaggaagtaacaatggaacaaaatcttgttgtccggggagtagcttttgaagatgaaatcactcgagtaacagtttttggattgccaaactcattaacgagtttatctactatttttacgacacttgctcaaaatcgcattaatgttgatatcatcatccaaagtgcaactgatgctgaaacaacaaatttatctttttccataaagagcgacgatttagaagaaacaatggccgtcctcgaaaacaataaaaatttgcttaactaccaagggattgaatcggaaacgggattagcaaaagtatcgattgtcggttcaggaatgatctctaaccctggagtcgcagctaaaatgtttgaagtgcttgctttaaatggaatccaagtgaaaatggtcagcacttcagaaataaaagtatcgacggttgttgaagaaagccagatgatcaaggcagtagaagcgcttcatcaagcatttgaactgtcgggatccgctgttaaatcggaacgctaa

SEQ ID NO: 95998 - protein, 411 aa, Bacillus sp
MGLIVQKFGGTSVGSVERILNVANRVIEEKKNGNDVVVVVSAMGKTTDELVDLAKQISAHPPKREMDMLLTTGEQVTISLLAMALNEKGYEAISYTGWQAGITTEPVFGNARILNIETEKIQKQLNEGKIVVVAGFQGIDEHGEITTLGRGGSDTTAVALAAALKAEKCDIYTDVTGVFTTDPRYVKSARKLASISYDEMLELANLGAGVLHPRAVEFAKNYGITLEVRSSMEREEGTIIEEEVTMEQNLVVRGVAFEDEITRVTVFGLPNSLTSLSTIFTTLAQNRINVDIIIQSATDAETTNLSFSIKSDDLEETMAVLENNKNLLNYQGIESETGLAKVSIVGSGMISNPGVAAKMFEVLALNGIQVKMVSTSEIKVSTVVEESQMIKAVEALHQAFELSGSAVKSER

SEQ ID NO: 95999 - DNA, 1224 bp, Bacillus stearothermophilus
  CDS (1)..(1224): transl_table=11
atgggaattatcgtacaaaaatttggcggaacgtctgttggttccatcgaaagaattcaacatgtggcgaatcgggtgattgaggaagtccaaaagggaaatgacgttgtcgttgttgtttcggcaatgggaaaaacgaccgatgagcttgtcaacttagcgaaacaaatttccaatcatcctagcaagcgggaaatggatatgcttctttcgacgggagaacaagtgagcattgcgcttcttgcaatgtcgcttcatgaaaaaggatataaagctgtttcgttgacaggatggcaagcgggaattacgacggaagaaatgcacggcaatgcccgcattatgaacatagatacaacgagaatccgccgctgccttgacgaaggggcgattgtgatcgttgctgggtttcaaggagtgacggaaacaggggagatcaccacgctcggccgtggcggttctgatacgacggcggtggcgctggctgcggcgttaaaagcagagaagtgcgatatttatacggacgtaaccggcgtgtttacgaccgacccacgttatgtaaaaacagcaagaaaaataaaagagatttcctatgatgaaatgcttgagttagccaatttaggggcaggagtattgcatccgcgcgccgttgaatttgcgaaaaactatgaagtgccgctggaagtgcgttcgagcatggaaaacgaaagaggaacgatggtaaaggaggaagtttcgatggagcagcatttaatcgtacggggaattgcatttgaagatcaagtaacgagagtgacagtggtaggaatcgaaaagtatttacagtcagttgccaccatttttacggcgcttgccaatcgtggcatcaatgtagatattattattcaaaatgcgacgaattccgaaacagcgtctgtttctttttcgattcgcacggaagatttgccggaaacgcttcaagtgctgcaagcgctggaaggcgccgacgttcactatgaaagcggcttggcgaaagtatcgatcgttggctctggcatgatttcaaatccgggggtggcggcgcgcgtgtttgaagtattggcggatcaaggaattgaaatcaaaatggtcagcatatcagaaattaaaatttccacggtcattgacgaaaaatatatggtttcggccgtcgaggagcttcacgaagcattcgggcttgccgaagaagcggcagcggtgcgctcgtaa

SEQ ID NO: 96000 - protein, 407 aa, Bacillus stearothermophilus
MGIIVQKFGGTSVGSIERIQHVANRVIEEVQKGNDVVVVVSAMGKTTDELVNLAKQISNHPSKREMDMLLSTGEQVSIALLAMSLHEKGYKAVSLTGWQAGITTEEMHGNARIMNIDTTRIRRCLDEGAIVIVAGFQGVTETGEITTLGRGGSDTTAVALAAALKAEKCDIYTDVTGVFTTDPRYVKTARKIKEISYDEMLELANLGAGVLHPRAVEFAKNYEVPLEVRSSMENERGTMVKEEVSMEQHLIVRGIAFEDQVTRVTVVGIEKYLQSVATIFTALANRGINVDIIIQNATNSETASVSFSIRTEDLPETLQVLQALEGADVHYESGLAKVSIVGSGMISNPGVAARVFEVLADQGIEIKMVSISEIKISTVIDEKYMVSAVEELHEAFGLAEEAAAVRS

SEQ ID NO: 96001 - DNA, 1227 bp, Bacillus subtilis
  CDS (1)..(1227): transl_table=11
atgggtcttattgtacaaaaattcggaggcacttccgtcggctcagtcgaaaaaattcaaaatgcggcaaaccgcgcaattgcagaaaaacagaaaggccatcaagtcgttgtcgtcgtttcagcaatgggaaaatccactgacgaattggtcagccttgcaaaagctatttctgaccagccgagcaaacgcgaaatggatatgctgctggcgacaggcgagcaggtcacgatttcactcctttcaatggcattgcaggaaaaaggctatgacgctgtgtcttatactggctggcaggcgggaatccgtacggaggccattcacggaaacgccagaattacagatatcgacacttcggttttagcagaccagcttgaaaaaggaaaaattgtcattgttgcaggattccaaggcatgacagaggattgtgaaattacgacattgggccggggcggttcagatacaacagcagttgctttggctgccgctttaaaagctgataaatgtgacatatacacagacgtgccaggcgtgtttacaaccgatccgcgctatgtgaaatcagcgagaaaacttgagggcatctcatacgatgaaatgcttgagcttgccaatttaggcgccggtgttcttcatccgagagcagttgagttcgcgaaaaattaccaagtgccgttagaagtgcgttcaagtacagaaaccgaagcgggaacattaattgaggaggaatcatccatggaacagaatttaattgtcagaggcattgcatttgaagatcaaatcacaagagtaaccatttacgggctgactagcggcctgacaactttgtctactatttttacaacacttgccaaaagaaacataaacgtggatatcattatccaaacgcaggccgaggacaagactggaatttccttctctgtcaaaacagaagatgcagaccaaaccgttgcggtgcttgaagagtataaagacgcgctggaatttgagaaaatcgagacagaaagcaaattggctaaagtatctattgttggatccggcatggtctcaaatcccggtgtagcggctgaaatgtttgctgtactggcgcaaaaaaacattttaatcaaaatggtcagcacatctgaaatcaaagtgtcaacagtcgtaagcgaaaatgacatggtgaaagcagtcgagtcgcttcacgatgcatttgagctttcaaaacacccttcagctgtgtaa

SEQ ID NO: 96002 - protein, 408 aa, Bacillus subtilis
MGLIVQKFGGTSVGSVEKIQNAANRAIAEKQKGHQVVVVVSAMGKSTDELVSLAKAISDQPSKREMDMLLATGEQVTISLLSMALQEKGYDAVSYTGWQAGIRTEAIHGNARITDIDTSVLADQLEKGKIVIVAGFQGMTEDCEITTLGRGGSDTTAVALAAALKADKCDIYTDVPGVFTTDPRYVKSARKLEGISYDEMLELANLGAGVLHPRAVEFAKNYQVPLEVRSSTETEAGTLIEEESSMEQNLIVRGIAFEDQITRVTIYGLTSGLTTLSTIFTTLAKRNINVDIIIQTQAEDKTGISFSVKTEDADQTVAVLEEYKDALEFEKIETESKLAKVSIVGSGMVSNPGVAAEMFAVLAQKNILIKMVSTSEIKVSTVVSENDMVKAVESLHDAFELSKHPSAV

SEQ ID NO: 96003 - DNA, 2763 bp, Zea mays; identical to SEQ ID NO: 779
  CDS (1)..(2763)

SEQ ID NO: 96004 - protein, 920 aa, Zea mays; identical to SEQ ID NO: 780

SEQ ID NO: 96005 - DNA, 1266 bp, Corynebacterium efficiens
  CDS (1)..(1266): transl_table=11
gtggccctagtcgtacagaaatatggcggttcctcactggagagtgcggaacgcatccggaatgttgctgaacggattgttgccaccaagaaggccggaaatgatgtcgtcgtggtctgttccgcgatgggcgacaccaccgatgaactccttgatcttgccgcggccgtcaacccggttccacccgcccgtgagatggatatgctcctgaccgccggcgagcggatctcgaacgcactggtggccatggccattgaatccctcggcgccgaggcccagtcgttcaccggttcccaggccggtgtgctcaccaccgaacgtcacggcaacgcccggatcgtggatgtcaccccggggcgtgtgcgtgaggcgctcgatgagggcaagatctgcatcgtcgccggtttccagggtgtgaacaaggaaacccgtgatgtgaccacgctaggtcgcggcggttccgataccacggcagttgcgctggcggcagcgctcggggccgatgtctgcgagatctactccgatgtggatggtgtctacaccgctgatccccgcatcgtccccaatgcacagaagctggagcgcctctccttcgaggagatgctggaactggcggccgtcggttccaagatcctggtgctgcgcagcgttgagtatgcccgtgcattcaatgttccgatgcgcgtccgttcgtcctatagcaatgaccccggcaccctgatcgccggttcgatggaggatattcctatggaagaagcagttctcaccggtgtagccaccgacaagtccgaggccaaggtcaccgttctgggtatccccgacaagccgggtgaggccgccaaggtcttccgtgcgcttgccgacgccgagatcaacatcgacatggtcctgcagaacgtctcctccgtcgaggacggcaccaccgacatcactttcacctgcccccggtccgacggaccacgcgccatggagctgctcaagaagatgcagcagcagggtgactggaccaacgtgctctacgacgatcaggtgggtaaggtctcactcgtcggcgccggcatgaagtcccacccgggtgtcaccgccgagttcatggaggctctccgtgacgtcaacgtcaacgtcgaactgatctccacctccgagatccgcatctccgtgctcatccgtgaggatgacctggataagtccgcgaaggcactgcacgagaagttccagctcggtggcgatgaggaagccaccgtctacgccggcaccgggcgttaa

SEQ ID NO: 96006 - protein, 421 aa, Corynebacterium efficiens
MALVVQKYGGSSLESAERIRNVAERIVATKKAGNDVVVVCSAMGDTTDELLDLAAAVNPVPPAREMDMLLTAGERISNALVAMAIESLGAEAQSFTGSQAGVLTTERHGNARIVDVTPGRVREALDEGKICIVAGFQGVNKETRDVTTLGRGGSDTTAVALAAALGADVCEIYSDVDGVYTADPRIVPNAQKLERLSFEEMLELAAVGSKILVLRSVEYARAFNVPMRVRSSYSNDPGTLIAGSMEDIPMEEAVLTGVATDKSEAKVTVLGIPDKPGEAAKVFRALADAEINIDMVLQNVSSVEDGTTDITFTCPRSDGPRAMELLKKMQQQGDWTNVLYDDQVGKVSLVGAGMKSHPGVTAEFMEALRDVNVNVELISTSEIRISVLIREDDLDKSAKALHEKFQLGGDEEATVYAGTGR

SEQ ID NO: 96007 - DNA, 1218 bp, Thermus thermophilus
  CDS (1)..(1218): transl_table=11
gtggccctggtggttcagaagtacggcggcacctccgtgggcgacctggagcgcatccacaaggtggcccagcgcatcgcccactaccgcgagaaggggcatcggcttgcggtggtggtctcggccatggggcacaccaccgacgagctcatcgccttggccaagcgggtgaacccgagacctccctttcgcgagctggacctcctcaccaccaccggggagcaggtctccgtggccctcctctccatgcagctttgggccatggggatccccgccaagggcttcgtccagcaccagatcggcatcaccaccgacgggcgctacggggacgcccggatcctcgaggtgaacccggcccgcatccgggaggccctggaccagggctttgtggcggtgatcgcgggcttcatgggcaccaccccggaaggggagatcaccaccttgggccggggagggtcggacaccaccgccgtggccatcgccgccgccctcggggccaaggagtgcgagatctacacggacacggagggggtctacaccacggacccccacctgatccccgaggcgaggaagctttccgtcatcggctacgaccagatgctggagatggccgctttgggggccagggtcctccacccccgggcggtctactacgccaagcgctacggggtggtcctccacgtgcgctccagcttctcctacaaccccggtaccctggtgaaggaggtcgccatggagatggacaaggcggtgacgggcgtggccttggacctggaccacgcccagatcgggcttatcggcatcccggaccagccgggcatcgcggccaaggtcttccaggccctggccgagcggggcatcgccgtggacatgatcatccagggggttcccggccacgacccctcgaggcagcagatggccttcacggtgaagaaggacttcgcccaggaggccctggaggctttggagcccgtcctcgccgagatcgggggcgaggccatcttgaggccggacatcgccaaggtctccatcgtgggcgtgggcctcgcctccaccccggaggtccccgccaagatgttccaggcggtggcctccaccggggccaacattgagatgatcgccaccagcgaggtgcgcatctccgtgatcatccccgccgagtacgccgaggcggcgcttagggccgtccaccaggcttttgagctggacaaggcctga

SEQ ID NO: 96008 - protein, 405 aa, Thermus thermophilus
MALVVQKYGGTSVGDLERIHKVAQRIAHYREKGHRLAVVVSAMGHTTDELIALAKRVNPRPPFRELDLLTTTGEQVSVALLSMQLWAMGIPAKGFVQHQIGITTDGRYGDARILEVNPARIREALDQGFVAVIAGFMGTTPEGEITTLGRGGSDTTAVAIAAALGAKECEIYTDTEGVYTTDPHLIPEARKLSVIGYDQMLEMAALGARVLHPRAVYYAKRYGVVLHVRSSFSYNPGTLVKEVAMEMDKAVTGVALDLDHAQIGLIGIPDQPGIAAKVFQALAERGIAVDMIIQGVPGHDPSRQQMAFTVKKDFAQEALEALEPVLAEIGGEAILRPDIAKVSIVGVGLASTPEVPAKMFQAVASTGANIEMIATSEVRISVIIPAEYAEAALRAVHQAFELDKA

SEQ ID NO: 96009 - DNA, 2766 bp, Oryza sativa; identical to SEQ ID NO: 793
  CDS (1)..(2766)

SEQ ID NO: 96010 - protein, 921 aa, Oryza sativa; identical to SEQ ID NO: 794

SEQ ID NO: 96011 - DNA, 2361 bp, Oryza sativa; identical to SEQ ID NO: 84029
  CDS (1)..(2361)

SEQ ID NO: 96012 - protein, 786 aa, Oryza sativa; identical to SEQ ID NO: 84030

SEQ ID NO: 96013 - DNA, 25 bp, Artificial sequence
  primer
atggcattaatcgttcaaaaatttg

SEQ ID NO: 96014 - DNA, 20 bp, Artificial sequence
  primer
ttaagctggaacagtgacgg

SEQ ID NO: 96015 - protein, 693 aa, Artificial sequence
  consensus sequence
  Variant (2)..(4): Xaa in position 2 to 4 is any amino acid
  Variant (6)..(6): Xaa in position 6 is any amino acid
  Variant (8)..(8): Xaa in position 8 is any amino acid
  Variant (11)..(11): Xaa in position 11 is any amino acid
  Variant (13)..(17): Xaa in position 13 to 17 is any amino acid
  Variant (18)..(18): Xaa in position 18 is any or no amino acid
  Variant (20)..(20): Xaa in position 20 is any amino acid
  Variant (21)..(21): Xaa in position 21 is any or no amino acid
  Variant (24)..(31): Xaa in position 24 to 31 is any amino acid
  Variant (32)..(32): Xaa in position 32 is any or no amino acid
  Variant (34)..(37): Xaa in position 34 to 37 is any amino acid
  Variant (38)..(38): Xaa in position 38 is any or no amino acid
  Variant (44)..(46): Xaa in position 44 to 46 is any amino acid
  Variant (48)..(49): Xaa in position 48 to 49 is any amino acid
  Variant (51)..(53): Xaa in position 51 to 53 is any amino acid
  Variant (55)..(60): Xaa in position 55 to 60 is any amino acid
  Variant (61)..(116): Xaa in position 61 to 116 is any or no amino acid
  Variant (118)..(119): Xaa in position 118 to 119 is any amino acid
  Variant (122)..(122): Xaa in position 122 is any amino acid
  Variant (124)..(124): Xaa in position 124 is any amino acid
  Variant (126)..(128): Xaa in position 126 to 128 is any amino acid
  Variant (131)..(135): Xaa in position 131 to 135 is any amino acid
  Variant (137)..(139): Xaa in position 137 to 139 is any amino acid
  Variant (141)..(144): Xaa in position 141 to 144 is any amino acid
  Variant (146)..(147): Xaa in position 146 to 147 is any amino acid
  Variant (149)..(149): Xaa in position 149 is any amino acid
  Variant (151)..(152): Xaa in position 151 to 152 is any amino acid
  Variant (154)..(154): Xaa in position 154 is any amino acid
  Variant (156)..(159): Xaa in position 156 to 159 is any amino acid
  Variant (161)..(165): Xaa in position 161 to 165 is any amino acid
  Variant (166)..(166): Xaa in position 166 is any or no amino acid
  Variant (170)..(181): Xaa in position 170 to 181 is any amino acid
  Variant (182)..(183): Xaa in position 182 to 183 is any or no amino acid
  Variant (185)..(189): Xaa in position 185 to 189 is any amino acid
  Variant (190)..(193): Xaa in position 190 to 193 is any or no amino acid
  Variant (199)..(204): Xaa in position 199 to 204 is any amino acid
  Variant (205)..(210): Xaa in position 205 to 210 is any or no amino acid
  Variant (221)..(221): Xaa in position 221 is any amino acid
  Variant (225)..(225): Xaa in position 225 is any amino acid
  Variant (230)..(230): Xaa in position 230 is any amino acid
  Variant (232)..(233): Xaa in position 232 to 233 is any amino acid
  Variant (235)..(235): Xaa in position 235 is any amino acid
  Variant (241)..(241): Xaa in position 241 is any amino acid
  Variant (244)..(244): Xaa in position 244 is any amino acid
  Variant (246)..(246): Xaa in position 246 is any amino acid
  Variant (250)..(250): Xaa in position 250 is any amino acid
  Variant (252)..(253): Xaa in position 252 to 253 is any amino acid
  Variant (255)..(263): Xaa in position 255 to 263 is any amino acid
  Variant (268)..(268): Xaa in position 268 is any amino acid
  Variant (270)..(271): Xaa in position 270 to 271 is any amino acid
  Variant (273)..(274): Xaa in position 273 to 274 is any amino acid
  Variant (277)..(278): Xaa in position 277 to 278 is any amino acid
  Variant (280)..(280): Xaa in position 280 is any amino acid
  Variant (283)..(283): Xaa in position 283 is any amino acid
  Variant (285)..(292): Xaa in position 285 to 292 is any amino acid
  Variant (294)..(294): Xaa in position 294 is any amino acid
  Variant (297)..(301): Xaa in position 297 to 301 is any amino acid
  Variant (302)..(313): Xaa in position 302 to 313 is any or no amino acid
  Variant (316)..(348): Xaa in position 316 to 348 is any amino acid
  Variant (349)..(359): Xaa in position 349 to 359 is any or no amino acid
  Variant (361)..(361): Xaa in position 361 is any amino acid
  Variant (363)..(365): Xaa in position 363 to 365 is any amino acid
  Variant (367)..(375): Xaa in position 367 to 375 is any amino acid
  Variant (378)..(378): Xaa in position 378 is any amino acid
  Variant (380)..(380): Xaa in position 380 is any amino acid
  Variant (381)..(382): Xaa in position 381 to 382 is any or no amino acid
  Variant (384)..(391): Xaa in position 384 to 391 is any amino acid
  Variant (392)..(591): Xaa in position 392 to 591 is any or no amino acid
  Variant (593)..(605): Xaa in position 593 to 605 is any amino acid
  Variant (607)..(621): Xaa in position 607 to 621 is any amino acid
  Variant (622)..(631): Xaa in position 622 to 631 is any or no amino acid
  Variant (633)..(633): Xaa in position 633 is any amino acid
  Variant (636)..(636): Xaa in position 636 is any amino acid
  Variant (639)..(642): Xaa in position 639 to 642 is any amino acid
  Variant (644)..(648): Xaa in position 644 to 648 is any amino acid
  Variant (650)..(651): Xaa in position 650 to 651 is any amino acid
  Variant (653)..(657): Xaa in position 653 to 657 is any amino acid
  Variant (660)..(661): Xaa in position 660 to 661 is any amino acid
  Variant (663)..(663): Xaa in position 663 is any amino acid
  Variant (664)..(665): Xaa in position 664 to 665 is any or no amino acid
  Variant (670)..(671): Xaa in position 670 to 671 is any amino acid
  Variant (673)..(682): Xaa in position 673 to 682 is any amino acid
  Variant (684)..(687): Xaa in position 684 to 687 is any amino acid
  Variant (689)..(690): Xaa in position 689 to 690 is any amino acid
  Variant (692)..(692): Xaa in position 692 is any amino acid
MXXXVXKXGGXSXXXXXXIXXVAXXXXXXXXXGXXXXXVVSAMXXXTXXLXXXAXXXXXXXXXXXXXXXXXXXXXXXXXXXXXXXXXXXXXXXXXXXXXXXXXXXXXXXXXXXXXXPXXREXDXLXXXGEXXXXXLXXXAXXXXGXXAXSXXGXQXXXXTXXXXXXARIXXXXXXXXXXXXXXGXXXXXXXXXAGFQGXXXXXXXXXXXXTTLGRGGSDTXAVAXAAALXAXXCXIYTDVXGVXTXDPRXVXXAXXXXXXXXXEMLEXAXXGXXVLXXRXVEXAXXXXXXXXVXSSXXXXXXXXXXXXXXXXXGTXXXXXXXXXXXXXXXXXXXXXXXXXXXXXXXXXXXXXXXXXXXXGXAXXXFXXXXXXXXXVDXIXXXQXXXXXXXXXXXXXXXXXXXXXXXXXXXXXXXXXXXXXXXXXXXXXXXXXXXXXXXXXXXXXXXXXXXXXXXXXXXXXXXXXXXXXXXXXXXXXXXXXXXXXXXXXXXXXXXXXXXXXXXXXXXXXXXXXXXXXXXXXXXXXXXXXXXXXXXXXXXXXXXXXXXXXXXXXXXXXXXXXXXXXXXXXXXXXXXXXXXXXXXXXXXXXXXXFXXXXXXXXXXXXXLXXXXXXXXXXXXXXXXXXXXXXXXXSXVGXGMXXXXGXXXXXFXXLXXXXXNIXXIXXXTSEIXXSXXXXXXXXXXAXXXXHXXFXL

SEQ ID NO: 96016 - protein, 35 aa, Artificial sequence
  protein pattern
  Variant (2)..(2): Xaa in position 2 is Phe, Trp or Tyr
  Variant (3)..(3): Xaa in position 3 is Ser or Thr
  Variant (5)..(5): Xaa in position 5 is Ile or Val
  Variant (6)..(6): Xaa in position 6 is Asp, Pro or Thr
  Variant (8)..(8): Xaa in position 8 is Ile or Val
  Variant (9)..(9): Xaa in position 9 is any amino acid
  Variant (10)..(10): Xaa in position 10 is Ser or Thr
  Variant (11)..(11): Xaa in position 11 is Ala, Cys, Ser or Thr
  Variant (15)..(15): Xaa in position 15 is any or no amino acid
  Variant (17)..(18): Xaa in position 17 to 18 is any amino acid
  Variant (19)..(19): Xaa in position 19 is any or no amino acid
  Variant (21)..(25): Xaa in position 21 to 25 is any amino acid
  Variant (26)..(26): Xaa in position 26 is Ile, Leu, Met or Val
  Variant (27)..(27): Xaa in position 27 is Pro, Ser or Thr
  Variant (28)..(28): Xaa in position 28 is any amino acid
  Variant (29)..(29): Xaa in position 29 is Ala, Asp, Glu, Asn or Gln
  Variant (31)..(32): Xaa in position 31 to 32 is any amino acid
  Variant (34)..(34): Xaa in position 34 is Leu or Met
  Variant (35)..(35): Xaa in position 35 is Ala or Ser
IXXDXXGXXXXDPRXVXXXAXXXXXXXXXEXXEXX

SEQ ID NO: 96017 - protein, 41 aa, Artificial sequence
  protein pattern
  Variant (2)..(2): Xaa in position 2 is any amino acid
  Variant (4)..(4): Xaa in position 4 is any amino acid
  Variant (5)..(5): Xaa in position 5 is any or no amino acid
  Variant (7)..(8): Xaa in position 7 to 8 is any amino acid
  Variant (9)..(9): Xaa in position 9 is any or no amino acid
  Variant (12)..(13): Xaa in position 12 to 13 is any amino acid
  Variant (14)..(14): Xaa in position 14 is Ser or Thr
  Variant (15)..(15): Xaa in position 15 is any amino acid
  Variant (16)..(16): Xaa in position 16 is Ala, Gly, Ser or Thr
  Variant (18)..(18): Xaa in position 18 is Leu, Met or Val
  Variant (19)..(19): Xaa in position 19 is Ala, Ser or Thr
  Variant (20)..(20): Xaa in position 20 is Ile, Leu or Met
  Variant (21)..(21): Xaa in position 21 is any amino acid
  Variant (22)..(22): Xaa in position 22 is Ile or Leu
  Variant (23)..(25): Xaa in position 23 to 25 is any amino acid
  Variant (26)..(26): Xaa in position 26 is Asp, Gly or Asn
  Variant (27)..(28): Xaa in position 27 to 28 is any amino acid
  Variant (29)..(29): Xaa in position 29 is Ala, Ser or Val
  Variant (30)..(30): Xaa in position 30 is any amino acid
  Variant (31)..(31): Xaa in position 31 is Ala, Gly or Ser
  Variant (32)..(33): Xaa in position 32 to 33 is any amino acid
  Variant (34)..(34): Xaa in position 34 is Ala, Gly or Gln
  Variant (35)..(35): Xaa in position 35 is any amino acid
  Variant (36)..(36): Xaa in position 36 is Gln or Arg
  Variant (37)..(38): Xaa in position 37 to 38 is any amino acid
  Variant (39)..(39): Xaa in position 39 is Ile, Leu, Met or Val
  Variant (40)..(40): Xaa in position 40 is any amino acid
  Variant (41)..(41): Xaa in position 41 is Ala or Thr
EXDXXLXXXGEXXXXXLXXXXXXXXXXXXXXXXXXXXXXXX

SEQ ID NO: 96018 - protein, 18 aa, Artificial sequence
  protein pattern
  Variant (10)..(10): Xaa in position 10 is Ser or Thr
  Variant (14)..(14): Xaa in position 14 is any amino acid
  Variant (15)..(16): Xaa in position 15 to 16 is any or no amino acid
  Variant (18)..(18): Xaa in position 18 is Ala or Leu
TLGRGGSDTXAVAXXXAX

SEQ ID NO: 96019 - protein, 27 aa, Artificial sequence
  protein pattern
  Variant (2)..(2): Xaa in position 2 is Ala or Ser
  Variant (3)..(3): Xaa in position 3 is any amino acid
  Variant (4)..(4): Xaa in position 4 is Ile or Val
  Variant (5)..(5): Xaa in position 5 is Leu or Met
  Variant (6)..(7): Xaa in position 6 to 7 is any amino acid
  Variant (8)..(8): Xaa in position 8 is Asp or Arg
  Variant (9)..(9): Xaa in position 9 is Ala, Cys or Ser
  Variant (12)..(12): Xaa in position 12 is any amino acid
  Variant (14)..(23): Xaa in position 14 to 23 is any amino acid
  Variant (24)..(26): Xaa in position 24 to 26 is any or no amino acid
GXXXXXXXXVEXAXXXXXXXXXXXXXS

SEQ ID NO: 96020 - protein, 24 aa, Artificial sequence
  protein pattern
  Variant (2)..(4): Xaa in position 2 to 4 is any amino acid
  Variant (5)..(6): Xaa in position 5 to 6 is any or no amino acid
  Variant (9)..(9): Xaa in position 9 is Ser or Thr
  Variant (11)..(11): Xaa in position 11 is Leu, Met or Val
  Variant (12)..(12): Xaa in position 12 is Ala, Glu, Gly or Ser
  Variant (13)..(13): Xaa in position 13 is Asp, Asn, Ser or Thr
  Variant (14)..(14): Xaa in position 14 is any amino acid
  Variant (15)..(15): Xaa in position 15 is Ala, Asp, Glu, Gln or Ser
  Variant (16)..(16): Xaa in position 16 is any amino acid
  Variant (17)..(17): Xaa in position 17 is Phe, Ile, Leu, Met or Val
  Variant (18)..(19): Xaa in position 18 to 19 is any amino acid
  Variant (22)..(23): Xaa in position 22 to 23 is any amino acid
  Variant (24)..(24): Xaa in position 24 is Ile, Leu, Met or Val
VXXXXXGGXSXXXXXXXXXVAXXX

SEQ ID NO: 96021 - protein, 19 aa, Artificial sequence
  protein pattern
  Variant (2)..(2): Xaa in position 2 is Ala, Ile, Leu or Val
  Variant (4)..(4): Xaa in position 4 is any or no amino acid
  Variant (8)..(8): Xaa in position 8 is any or no amino acid
  Variant (10)..(10): Xaa in position 10 is any amino acid
  Variant (11)..(11): Xaa in position 11 is any or no amino acid
  Variant (13)..(13): Xaa in position 13 is Asp or Asn
  Variant (14)..(14): Xaa in position 14 is any amino acid
  Variant (16)..(18): Xaa in position 16 to 18 is any amino acid
VXVXSAMXGXXTXXLXXXA

SEQ ID NO: 96022 - DNA, 1503 bp, Saccharomyces cerevisiae; identical to SEQ ID NO: 8769
  CDS (1)..(1503)

SEQ ID NO: 96023 - protein, 500 aa, Saccharomyces cerevisiae; identical to SEQ ID NO: 8770

SEQ ID NO: 96024 - DNA, 1712 bp, Glycine max; identical to SEQ ID NO: 15536
  CDS (25)..(1533)

SEQ ID NO: 96025 - protein, 502 aa, Glycine max; identical to SEQ ID NO: 15537

SEQ ID NO: 96026 - DNA, 1984 bp, Sorghum bicolor; identical to SEQ ID NO: 15538
  CDS (202)..(1710)

SEQ ID NO: 96027 - protein, 502 aa, Sorghum bicolor; identical to SEQ ID NO: 15539

SEQ ID NO: 96028 - DNA, 1913 bp, Zea mays subsp. mays; identical to SEQ ID NO: 70048
  CDS (158)..(1687)

SEQ ID NO: 96029 - protein, 509 aa, Zea mays subsp. mays; identical to SEQ ID NO: 70049

SEQ ID NO: 96030 - DNA, 1875 bp, Triticum aestivum; identical to SEQ ID NO: 15546
  CDS (101)..(1630)

SEQ ID NO: 96031 - protein, 509 aa, Triticum aestivum; identical to SEQ ID NO: 15547

SEQ ID NO: 96032 - DNA, 1581 bp, Emericella nidulans, Aspergillus nidulans
  CDS (1)..(1581)
atggccgcaagctcttccctcgaccacttgtccaaccgtatgaagctggagtggcactccaagctgaatactgagatggtgccggcgaagaacttccgccgtacatccatcatctgtaccatcggtcccaagacaaactccgttgagaaaatcaatgccctccgcagagccggtctcaatgtcgttcgcatgaacttttctcacggttcatacgagtaccaccaatcagttatcgaccacgctcgggaagccgaaaagcaggcagctggccgccccgttgccattgctctggacaccaaaggacccgagatccgtaccggaaacaccgtaggtgacaaggacatcccaatcaaggctggccatgagatgaacatcagcaccgatgagcaatatgccaccgcatccgacgaccagaacatgtatgtcgattacaagaacatcaccaaggtgatttctgccggcaagctcatctatgtcgatgacggtatcctttcatttgaggttcttgaagttgtagatgacaagaccctgcgcgtccgatgccttaacaacggcaacatctcttcccgcaagggtgtcaaccttcccggtaccgacgtagacttgcccgctctttcagagaaggacatcagcgatctgaagtttggtgtcaagaacaaggtcgacatggttttcgcttccttcatccgtcgtggcagcgacatccgccacatccgtgaggtgttgggtgaagagggccgagagattcagatcatcgccaagattgagaaccaacaaggtgtcaacaatttcgacgagattctggaagagaccgacggtgtcatggtcgcccgtggtgaccttggtatcgagatccccgctcccaaggtgttcatcgcccagaagatgatgatcgccaagtgtaacatcaagggcaagcccgtcatttgtgccactcagatgcttgagtccatgacatataaccctcgtcccactcgtgctgaggtgtccgatgtggccaacgctgttctcgacggtgccgactgtgtcatgctttctggagagactgccaagggtaactacccttgcgaggctgtcacgatgatgtctgagacctgcctcctcgccgaggttgccattcctcacttcaacgtcttcgacgagctgcgaaacctggcccctcgtcccaccgacactgttgaatccatcgccatggctgctgtgagtgccagtcttgaactgaacgccggcgccattgtggtcctcaccactagtggaaacactgcccgtatgatctccaagtaccgccccgtttgccccatcatcatggtttctcgcaaccctgctgctacaaggtactcccacctgtaccgtggtgtctggcccttctacttccccgagaagaagcccgacttcaacgtcaagatctggcaggaggatgtcgaccgtcgcctcaagtggggtatcaaccacggtctcaagctcggtatcatcaacaagggcgacaacatcgtctgtgttcagggctggcgcggcggtatgggccacactaacactgtccgtgtggtccctgctgaggagaacctcggactttctgagtaa

SEQ ID NO: 96033 - protein, 526 aa, Emericella nidulans, Aspergillus nidulans
MAASSSLDHLSNRMKLEWHSKLNTEMVPAKNFRRTSIICTIGPKTNSVEKINALRRAGLNVVRMNFSHGSYEYHQSVIDHAREAEKQAAGRPVAIALDTKGPEIRTGNTVGDKDIPIKAGHEMNISTDEQYATASDDQNMYVDYKNITKVISAGKLIYVDDGILSFEVLEVVDDKTLRVRCLNNGNISSRKGVNLPGTDVDLPALSEKDISDLKFGVKNKVDMVFASFIRRGSDIRHIREVLGEEGREIQIIAKIENQQGVNNFDEILEETDGVMVARGDLGIEIPAPKVFIAQKMMIAKCNIKGKPVICATQMLESMTYNPRPTRAEVSDVANAVLDGADCVMLSGETAKGNYPCEAVTMMSETCLLAEVAIPHFNVFDELRNLAPRPTDTVESIAMAAVSASLELNAGAIVVLTTSGNTARMISKYRPVCPIIMVSRNPAATRYSHLYRGVWPFYFPEKKPDFNVKIWQEDVDRRLKWGINHGLKLGIINKGDNIVCVQGWRGGMGHTNTVRVVPAEENLGLSE

SEQ ID NO: 96034 - DNA, 1524 bp, Oryza sativa; identical to SEQ ID NO: 15558
  CDS (1)..(1524)

SEQ ID NO: 96035 - protein, 507 aa, Oryza sativa; identical to SEQ ID NO: 15559

SEQ ID NO: 96036 - DNA, 1629 bp, Yarrowia lipolytica
  CDS (1)..(1629)
atgatttacaccgccaattcgtccccttccaccaacctgcagtggctcagtaccctgaacacggatgacattcccaccaagaactaccgaaagtcgtccatcattggtactatcggtcccaacacaaactccgccgagatgatctccaagcttcgacaagctggtctcaacattgttcgaatgaacttctcccacggctcgtacgagtaccaccagtccgtcattgagaacgcccgagagtccgagcagcggttccgaggccgacccctagccattgctctcgacaccaagggccccgagatccgaaccggtgtcaccaaggacgacaaggactgggacgtcaaggccggccatgtcatgctcttctccaccaaccccaagtacaaggaccagtgcgacgataagatcatgtacattgactacaccaacattgtcaagcagattgacattggcaagatcatcttcgttgacgacggtgttctgtccttcaaggttctcgagaagattgacggcgagaccctcaaggtcgagactctcaacaacggtaagatctcttctcgaaagggtgtcaacctccctggcaccgatgtcgatctccccgctctgtccgagaaggacaaggccgatctcaagtttggtgttgagcacggtgtcgacatgatttttgcctctttcgtccgaaccgccaacgacgtccaggccatccgagacgtgctcggcgagaagggcaagggcatccaggtcatctccaagattgagaaccagcagggtgtcaacaactttgacgagattctgaaggagaccgacggtgtcatggttgcccgaggagacttgggtatcgagatccccgccccccaggttttcattgcccagaagcagctgatcgccaagtgtaacctggccggaaagcccgtcatctgtgccacccagatgctcgattccatgacctacaacccccgacccacccgagccgaggtctctgatgtcggtaacgccgtccttgatggtgctgactgtgtcatgctgtctggtgagacggccaagggaacctaccccattgagtccgtcaagatgatgcacgagacctgtctggttgccgagaaggccattgcctatgctcctctgttcaatgagatgcgaaccctgactgtccgacccaccgagaccgtcgagaccattgctatctccgccgtgtctgcttctttcgagcagcaggcccgagctattattgtgctgtccacatcgggaacctccgcccgactgtgttccaagtatcgacccaactgtcccattcttatggtgactcgaaacgcacaggccgctcgattctcccatctgtaccgaggcgtctaccccttcatctaccacaaggcccgagcttccaaccctgccgagtggcagcacgatgttgaggagcgactcaagtggggtatggacgaggctgttgctcttggtattcttaacaagggcgatgttgttgtcgccatccagggatggaccggtggtctggccacaccaacactctccgagttctcgagtgtgtctaaactttttaacacaaacctattagattataaaacatacagcatggtgattaagtcggtgaacggaggggttttgtacaagtag

SEQ ID NO: 96037 - protein, 542 aa, Yarrowia lipolytica
MIYTANSSPSTNLQWLSTLNTDDIPTKNYRKSSIIGTIGPNTNSAEMISKLRQAGLNIVRMNFSHGSYEYHQSVIENARESEQRFRGRPLAIALDTKGPEIRTGVTKDDKDWDVKAGHVMLFSTNPKYKDQCDDKIMYIDYTNIVKQIDIGKIIFVDDGVLSFKVLEKIDGETLKVETLNNGKISSRKGVNLPGTDVDLPALSEKDKADLKFGVEHGVDMIFASFVRTANDVQAIRDVLGEKGKGIQVISKIENQQGVNNFDEILKETDGVMVARGDLGIEIPAPQVFIAQKQLIAKCNLAGKPVICATQMLDSMTYNPRPTRAEVSDVGNAVLDGADCVMLSGETAKGTYPIESVKMMHETCLVAEKAIAYAPLFNEMRTLTVRPTETVETIAISAVSASFEQQARAIIVLSTSGTSARLCSKYRPNCPILMVTRNAQAARFSHLYRGVYPFIYHKARASNPAEWQHDVEERLKWGMDEAVALGILNKGDVVVAIQGWTGGLATPTLSEFSSVSKLFNTNLLDYKTYSMVIKSVNGGVLYK

SEQ ID NO: 96038 - DNA, 1883 bp, Brassica napus; identical to SEQ ID NO: 15560
  CDS (119)..(1651)

SEQ ID NO: 96039 - protein, 510 aa, Brassica napus; identical to SEQ ID NO: 8816

SEQ ID NO: 96040 - DNA, 1903 bp, Brassica napus; identical to SEQ ID NO: 16301
  CDS (122)..(1618)

SEQ ID NO: 96041 - protein, 498 aa, Brassica napus; identical to SEQ ID NO: 8854

SEQ ID NO: 96042 - DNA, 2063 bp, Glycine max; identical to SEQ ID NO: 15566
  CDS (192)..(1700)

SEQ ID NO: 96043 - protein, 502 aa, Glycine max; identical to SEQ ID NO: 8880

SEQ ID NO: 96044 - DNA, 2067 bp, Triticum aestivum; identical to SEQ ID NO: 15570
  CDS (115)..(1659)

SEQ ID NO: 96045 - protein, 514 aa, Triticum aestivum; identical to SEQ ID NO: 8828

SEQ ID NO: 96046 - DNA, 1825 bp, Helianthus annuus; identical to SEQ ID NO: 15574
  CDS (128)..(1624)

SEQ ID NO: 96047 - protein, 498 aa, Helianthus annuus; identical to SEQ ID NO: 8834

SEQ ID NO: 96048 - DNA, 2075 bp, Zea mays; identical to SEQ ID NO: 15576
  CDS (198)..(1739)

SEQ ID NO: 96049 - protein, 513 aa, Zea mays; identical to SEQ ID NO: 8894

SEQ ID NO: 96050 - DNA, 1413 bp, Klebsiella pneumoniae subsp. pneumoniae MGH 78578; identical to SEQ ID NO: 15584
  CDS (1)..(1413): transl_table=11

SEQ ID NO: 96051 - protein, 470 aa, Klebsiella pneumoniae subsp. pneumoniae MGH 78578; identical to SEQ ID NO: 15585

SEQ ID NO: 96052 - DNA, 1443 bp, Klebsiella pneumoniae subsp. pneumoniae MGH 78578; identical to SEQ ID NO: 26438
  CDS (1)..(1443): transl_table=11

SEQ ID NO: 96053 - protein, 480 aa, Klebsiella pneumoniae subsp. pneumoniae MGH 78578; identical to SEQ ID NO: 26439

SEQ ID NO: 96054 - DNA, 1557 bp, Xanthobacter autotrophicus Py2; identical to SEQ ID NO: 8651
  CDS (1)..(1557): transl_table=11

SEQ ID NO: 96055 - protein, 518 aa, Xanthobacter autotrophicus Py2; identical to SEQ ID NO: 8652

SEQ ID NO: 96056 - DNA, 1533 bp, Oryza sativa (japonica cultivar-group); identical to SEQ ID NO: 8809
  CDS (1)..(1533)

SEQ ID NO: 96057 - protein, 510 aa, Oryza sativa (japonica cultivar-group); identical to SEQ ID NO: 8810

SEQ ID NO: 96058 - DNA, 1536 bp, Oryza sativa (japonica cultivar-group); identical to SEQ ID NO: 8381
  CDS (1)..(1536)

SEQ ID NO: 96059 - protein, 511 aa, Oryza sativa (japonica cultivar-group); identical to SEQ ID NO: 8382

SEQ ID NO: 96060 - DNA, 1713 bp, Oryza sativa (japonica cultivar-group); identical to SEQ ID NO: 8383
  CDS (1)..(1713)

SEQ ID NO: 96061 - protein, 570 aa, Oryza sativa (japonica cultivar-group); identical to SEQ ID NO: 8384

SEQ ID NO: 96062 - DNA, 1584 bp, Oryza sativa (japonica cultivar-group); identical to SEQ ID NO: 8385
  CDS (1)..(1584)

SEQ ID NO: 96063 - protein, 527 aa, Oryza sativa (japonica cultivar-group); identical to SEQ ID NO: 8386

SEQ ID NO: 96064 - DNA, 1584 bp, Oryza sativa (japonica cultivar-group); identical to SEQ ID NO: 8813
  CDS (1)..(1584)

SEQ ID NO: 96065 - protein, 527 aa, Oryza sativa (japonica cultivar-group); identical to SEQ ID NO: 8814

SEQ ID NO: 96066 - DNA, 1437 bp, Mesorhizobium loti MAFF303099; identical to SEQ ID NO: 8389
  CDS (1)..(1437): transl_table=11

SEQ ID NO: 96067 - protein, 478 aa, Mesorhizobium loti MAFF303099; identical to SEQ ID NO: 8390

SEQ ID NO: 96068 - DNA, 1626 bp, Thermoplasma volcanium GSS1
  CDS (1)..(1626): transl_table=11
atgaagaccaagatcgtagcaacggtaggacctgcaagtgaagatccgtcgatacttaagcaaatggtaaaaaatggattatccttaatcagaatcaactccgcacacgctgaaatttcctatgtagcaaaaatagtaaaagagatgcgcgatataaatccagatgtaggtgtaatggtcgatctcaagggcccagagcttaggactggaacctttcctggcggttcactgcgcatatctaaaggaaataaatacaccataggaaaagaaatcacgctgaataatgaaaaagccattggaaatattcagactggcgacaaagtcctgatgagcgatggtgaggtggaatttaccgttgatagcacttcgcctatagtgctaatagcagaaaatgatggtgttctacgagacaggagcagagtgaatgtccctgggagatacgttgaaattgggtccataaccgaaagagataagagtttcgtaattgagggtataaaacaaggcgtagacttctttgccttatctttcgtacaaaatgctgaaaatgtgaacagccttagggatttcataatagagaatggcggtaaccagtacataatagcgaaaattgagacaaagagcggccttgataacattgagagcatagttcaggcatcagacggaataatggtagcgagaggcgatctcggagtcgaactccccctgaaagaagttgttatggcgcagaagaagataataaagatctctcatgaggatggggatttcacaatagtcgctacacaggtactggagtctatggttaacaatgcatttccaacaagggcggagatatcagatataaccaatgctataatagacaatgccgatgccctcatgctgtctgaagagagtgcgataggcaaatacccagcacttgctgtacagacactgcgtgacgtatccgattatgtggaaaatctcgttgattttcaatcgtcttacacctttaaaggcaacaaaatagcttattcagtcgcgaaggcagcaaaagtgctttccgatgatataaacagcaatggaattgttgcactgacacacaccggatcgactgtaaaaatgatctcttcgcttaggccaaaggcgctggtctatgctgggactgttgatgactcgctgtctaggaagcttaatatttacttcggagttgttcctctgcatctaaaaagagattcagaatctctcagttttgccgatctgacagaatacatcttaaaatctgcatttttcaagagtggggataagatcgtagtaacaagcggcgatccgtattttacctttggcggcacgaatgacgtccgtgttatggctataggtgaattcctgggccgtggatatcctcaaggcaaagatgccttcggaacagcaacatacgggaaaaatggaaatattctaatttcaaatagcaaggatgtacctgacgggaacttcgacgcgtatatatttacggctgatgtaaagccatcagaagttaaaaagatcaacggtaaaactgcggtttttaaaacgaggcttgcaaggaccatcaacgaaggtgagaggatctatatagatggaaatacaggtataatattaaaatatgaaaaataa

SEQ ID NO: 96069 - protein, 541 aa, Thermoplasma volcanium GSS1
MKTKIVATVGPASEDPSILKQMVKNGLSLIRINSAHAEISYVAKIVKEMRDINPDVGVMVDLKGPELRTGTFPGGSLRISKGNKYTIGKEITLNNEKAIGNIQTGDKVLMSDGEVEFTVDSTSPIVLIAENDGVLRDRSRVNVPGRYVEIGSITERDKSFVIEGIKQGVDFFALSFVQNAENVNSLRDFIIENGGNQYIIAKIETKSGLDNIESIVQASDGIMVARGDLGVELPLKEVVMAQKKIIKISHEDGDFTIVATQVLESMVNNAFPTRAEISDITNAIIDNADALMLSEESAIGKYPALAVQTLRDVSDYVENLVDFQSSYTFKGNKIAYSVAKAAKVLSDDINSNGIVALTHTGSTVKMISSLRPKALVYAGTVDDSLSRKLNIYFGVVPLHLKRDSESLSFADLTEYILKSAFFKSGDKIVVTSGDPYFTFGGTNDVRVMAIGEFLGRGYPQGKDAFGTATYGKNGNILISNSKDVPDGNFDAYIFTADVKPSEVKKINGKTAVFKTRLARTINEGERIYIDGNTGIILKYEK

SEQ ID NO: 96070 - DNA, 1437 bp, Pyrococcus abyssi GE5
  CDS (1)..(1437): transl_table=11
gtgattgccatgaggcttcctgatcacaagacaaagatagttgcaacaatagggcccgccacaagctctaggaatatgataaagaagctaatagaaaacggtgtgagcgttgtgaggctcaacttctctcacggtagctttgaggagcatgcaaaggtcatagagaaagtcagggatatatcacaaaagcttgacagaagggttgcaatattggccgacctcccaggattgaagattagagtgggcgagataaagggagggtacgtagagcttaagagaggtgagaaggtagttttgactacgagagatgttgttggggatgaaactacgattcccgtagagtacaaggacttcccaagattagtctccaagggcgacgtcatatacctaagtgacggttacatcgttcttagggttgaagaggtaaggggtcaagacgttgaggcagttgtcgtctctggtggaaaactgttctcaagaaagggaataaacattccaaaggcctacctaccagtggaggcagtaactcccagggacatggagataataaagttcgccatcgagcagggagttgatgcaataggcttaagctttgttggaagcgtttatgacgttctcaaggttaaaagtttcctcgagaagaatgatgccgaggacgtcttcgttatttcaaagatagaaagaccggacgcagtcaggaacttcgatgaaatcctgaaggcttcagatggcatcatgatagctagaggtgatcttggggttgagatgccgatagaaagattgccaatacttcagaaggagcttataagaaaggcaaacacggagggtaagccagtaataacagctactcagatgttagtttcaatgacggccgaaaaggttccaaccagagctgaagttacggacgttgccaacgcgatacttgacggaacagacgcggtcatgctctctgaggagaccgcgattggaaaattcccaatcgatgccgtcaagatgatggcaaagatagccaaggtcaccgaggagtacagggagagctttggaatgtcgaggctcagggaactcgtggaggatgggacaagggggacaataaaggaggcaatagcgagaagcataatagatgcgctctgcaccctaaacataaagtacatactaacccccactagaacgggcaggacggcaaggctcatctcgaggtttaagccaaagcagtggatatttgggttctccactaacgaaagggtttgcaacaacttgatgttcagctatggagtttatgcgttctgtctcgaggagggcttcgatgagagggacataataaggctaattaagggacttggactggttgagagtgacgacatagtgctgatgaccgagggtaagccaatagagaagaccatgggaacgaactccatcaagatattccagatagcgtga

SEQ ID NO: 96071 - protein, 478 aa, Pyrococcus abyssi GE5
MIAMRLPDHKTKIVATIGPATSSRNMIKKLIENGVSVVRLNFSHGSFEEHAKVIEKVRDISQKLDRRVAILADLPGLKIRVGEIKGGYVELKRGEKVVLTTRDVVGDETTIPVEYKDFPRLVSKGDVIYLSDGYIVLRVEEVRGQDVEAVVVSGGKLFSRKGINIPKAYLPVEAVTPRDMEIIKFAIEQGVDAIGLSFVGSVYDVLKVKSFLEKNDAEDVFVISKIERPDAVRNFDEILKASDGIMIARGDLGVEMPIERLPILQKELIRKANTEGKPVITATQMLVSMTAEKVPTRAEVTDVANAILDGTDAVMLSEETAIGKFPIDAVKMMAKIAKVTEEYRESFGMSRLRELVEDGTRGTIKEAIARSIIDALCTLNIKYILTPTRTGRTARLISRFKPKQWIFGFSTNERVCNNLMFSYGVYAFCLEEGFDERDIIRLIKGLGLVESDDIVLMTEGKPIEKTMGTNSIKIFQIA

SEQ ID NO: 96072 - DNA, 1437 bp, Pyrococcus horikoshii OT3
  CDS (1)..(1437): transl_table=11
gtgagaaggatgaagcttccctcccataaaacaaagattgtcgcaacgatagggccggcaactaactcgaaaaaaatgatcaaaaaattaattgaagctggcatgaacgttgcaagaataaacttttctcatggcacattcgaagagcatgcaaagatcatagagatggtgagggaacagtcacagaagttagataggagagttgcaatattagccgaccttcccggactgaagattagggttggggagataaaggggggatatgtggaacttgaaagaggggagaaagttactttgacaacaaaagatattgagggagatgaaacaacgatccccgtagaatataaggatttcccaaagcttgtatctaagggagatgtgatatacctaagcgatggctatatagtgttaagagtcgaagatgtaaaggagaatgaagttgaagcagtagttatttctggtggaaaactcttctcgaggaaagggataaacattccaaaggcctatcttcccgttgaagctataactccaagagatatagagataatgaagttcgcaatcgaacatggcgtcgatgcaataggactcagctttgttggaaacgtttacgatgtactaaaagcgaagagctttttggagagaaatggcgcaggtgacaccttcgttatagctaagatcgaaagacccgatgctgttagaaacttcaatgaaattctaaatgccgctgacgggattatgatagccaggggtgatctaggggttgagatgccaatagaacaacttccaattctccagaagaggttaattaggaaagccaacatggaaggaaagcctgtaattacggcaacccagatgctcgtttccatgacaatggaaaaagtcccaacaagagctgaagttacagacgttgccaatgcaatactagatggaaccgatgccgttatgttgtctgaagaaacagcagttggaaaattcccgattgaggccgtcgagatgatggcaaggatagcgaaagtaactgaggaatatagggaaagctttgggataaccagaatgcgagagttcctggaaggaacgaagaggggaacgataaaggaggcgataaccaggagtatcattgatgccatctgcactataggtataaagttcatattgacgccaactaaaacgggtagaacggcaagattgatctccagatttaagccaaagcagtggatacttgcattctctacgagggagaaagtttgcaataacctaatgttcagctatggagtgtatccattctgtatggaggaagggttcaatgagaatgacattgttaggttaataaagggactaggattggttggaagcgatgacatagttttgatgacggaaggtaagccgatagagaaaaccgttgggactaattcaataaagatattccaaatagcgtga

SEQ ID NO: 96073 - protein, 478 aa, Pyrococcus horikoshii OT3
MRRMKLPSHKTKIVATIGPATNSKKMIKKLIEAGMNVARINFSHGTFEEHAKIIEMVREQSQKLDRRVAILADLPGLKIRVGEIKGGYVELERGEKVTLTTKDIEGDETTIPVEYKDFPKLVSKGDVIYLSDGYIVLRVEDVKENEVEAVVISGGKLFSRKGINIPKAYLPVEAITPRDIEIMKFAIEHGVDAIGLSFVGNVYDVLKAKSFLERNGAGDTFVIAKIERPDAVRNFNEILNAADGIMIARGDLGVEMPIEQLPILQKRLIRKANMEGKPVITATQMLVSMTMEKVPTRAEVTDVANAILDGTDAVMLSEETAVGKFPIEAVEMMARIAKVTEEYRESFGITRMREFLEGTKRGTIKEAITRSIIDAICTIGIKFILTPTKTGRTARLISRFKPKQWILAFSTREKVCNNLMFSYGVYPFCMEEGFNENDIVRLIKGLGLVGSDDIVLMTEGKPIEKTVGTNSIKIFQIA

SEQ ID NO: 96074 - DNA, 1533 bp, Arabidopsis thaliana; identical to SEQ ID NO: 8391
  CDS (1)..(1533)

SEQ ID NO: 96075 - protein, 510 aa, Arabidopsis thaliana; identical to SEQ ID NO: 8392

SEQ ID NO: 96076 - DNA, 1494 bp, Arabidopsis thaliana; identical to SEQ ID NO: 8393
  CDS (1)..(1494)

SEQ ID NO: 96077 - protein, 497 aa, Arabidopsis thaliana; identical to SEQ ID NO: 8394

SEQ ID NO: 96078 - DNA, 1533 bp, Arabidopsis thaliana; identical to SEQ ID NO: 8395
  CDS (1)..(1533)

SEQ ID NO: 96079 - protein, 510 aa, Arabidopsis thaliana; identical to SEQ ID NO: 8396

SEQ ID NO: 96080 - DNA, 1479 bp, Arabidopsis thaliana; identical to SEQ ID NO: 8397
  CDS (1)..(1479)

SEQ ID NO: 96081 - protein, 492 aa, Arabidopsis thaliana; identical to SEQ ID NO: 8398

SEQ ID NO: 96082 - DNA, 1533 bp, Arabidopsis thaliana; identical to SEQ ID NO: 8399
  CDS (1)..(1533)

SEQ ID NO: 96083 - protein, 510 aa, Arabidopsis thaliana; identical to SEQ ID NO: 8400

SEQ ID NO: 96084 - DNA, 1740 bp, Arabidopsis thaliana; identical to SEQ ID NO: 8401
  CDS (1)..(1740)

SEQ ID NO: 96085 - protein, 579 aa, Arabidopsis thaliana; identical to SEQ ID NO: 8402

SEQ ID NO: 96086 - DNA, 1497 bp, Arabidopsis thaliana; identical to SEQ ID NO: 8403
  CDS (1)..(1497)

SEQ ID NO: 96087 - protein, 498 aa, Arabidopsis thaliana; identical to SEQ ID NO: 8404

SEQ ID NO: 96088 - DNA, 1533 bp, Arabidopsis thaliana; identical to SEQ ID NO: 8405
  CDS (1)..(1533)

SEQ ID NO: 96089 - protein, 510 aa, Arabidopsis thaliana; identical to SEQ ID NO: 8406

SEQ ID NO: 96090 - DNA, 1413 bp, Vibrio cholerae O1 biovar eltor str. N16961; identical to SEQ ID NO: 15602
  CDS (1)..(1413): transl_table=11

SEQ ID NO: 96091 - protein, 470 aa, Vibrio cholerae O1 biovar eltor str. N16961; identical to SEQ ID NO: 15603

SEQ ID NO: 96092 - DNA, 1446 bp, Vibrio cholerae O1 biovar eltor str. N16961; identical to SEQ ID NO: 26456
  CDS (1)..(1446): transl_table=11

SEQ ID NO: 96093 - protein, 481 aa, Vibrio cholerae O1 biovar eltor str. N16961; identical to SEQ ID NO: 26457

SEQ ID NO: 96094 - DNA, 1461 bp, Vibrio cholerae O1 biovar eltor str. N16961
  CDS (1)..(1461): transl_table=11
atgtgtaaaaccaaaattgtggccactttaggccctgctagccaaactcgtgaaactttgactcaactcatccaagctggcgtgaacgtggttcgcttgaacttttctcacggcagcgctgaagaacacattgctcgcgcggaaatggtgcgtgagatcgcgcagcagctcaatgtgagcgttggcgtactggttgatctacaaggccctaaaattcgtatcgcttgctttgcagaaggcgcgattcaactctctgcaggcgacacatttattcttgatggccatttagatggtcaagccggtacgcaagagcgcgtgggtttagactacccagaactaattgatgatctaaacgtaggcaacatcctgctcctcgatgatggccgcattcaactggaagtcacggccgtcgatatgcaagctcgccttgttcacaccatcgcactcaatagtggcaaactgtccaaccgtaaaggcattaacttgcttggcggcggtctttccgctccggctctcacagaaaaagacaagctcgacattattactgcggcggagctgcaagccgacttcttagccgtctctttcccacgcaatgcggaagatattgaatacgcgcgccaactcgccactcaagcaggctgccatgcgcacattgtcgccaaagttgagcgcgcagaagtggtagccagtgaagaagcgatggacagcgttattcgcgcgtctgatgtgatcatggtggcgcggggtgatttgggcgtggaaattggtgatgctcgtttgccaagcgtacaaaaagcgctgatcgcgcgtgctaagcacttaggtaaacctgtcatcaccgccacgcaaatgatggaatcgatgatcgaaaacccactgccgacacgcgcagaagtcttggatgtcgcgaatgcggtgattgatggtactgatgcgatcatgctttctgcggaatcggccgcgggacgctaccctgtggaaacagtgcaagccatggtgcgcatcgcccaaggggttgagcacgaaactcactgtgcgcaaaattgttgggatgcgctacaacatctgtgcagcgatgcgggcaaaagctttgctctgtcatcgatgatttcagcatccaaagtcaataaagatctcggtgttgcgattgtgactgagcaaggtgaaacgccgcttttgatgtcacgctgtcaaagccaagccaccatttgggcggtgtctgataaacctgcgctactgcgtaagcttgctattttgcgtggtgtcacaccgacctatttcccacatttagataagcaaggtgatattgcgactcagctgattcatttgctgcgtaaacccgcacaagagaaaaaaatcgcctcgattttggtcactcaactggaatcggtcgaaggggttggtcacgtcaacgtgtgccgactactgaatttggcgcagcaggaagccctgttcgcctaa

SEQ ID NO: 96095 - protein, 486 aa, Vibrio cholerae O1 biovar eltor str. N16961
MCKTKIVATLGPASQTRETLTQLIQAGVNVVRLNFSHGSAEEHIARAEMVREIAQQLNVSVGVLVDLQGPKIRIACFAEGAIQLSAGDTFILDGHLDGQAGTQERVGLDYPELIDDLNVGNILLLDDGRIQLEVTAVDMQARLVHTIALNSGKLSNRKGINLLGGGLSAPALTEKDKLDIITAAELQADFLAVSFPRNAEDIEYARQLATQAGCHAHIVAKVERAEVVASEEAMDSVIRASDVIMVARGDLGVEIGDARLPSVQKALIARAKHLGKPVITATQMMESMIENPLPTRAEVLDVANAVIDGTDAIMLSAESAAGRYPVETVQAMVRIAQGVEHETHCAQNCWDALQHLCSDAGKSFALSSMISASKVNKDLGVAIVTEQGETPLLMSRCQSQATIWAVSDKPALLRKLAILRGVTPTYFPHLDKQGDIATQLIHLLRKPAQEKKIASILVTQLESVEGVGHVNVCRLLNLAQQEALFA

SEQ ID NO: 96096 - DNA, 1755 bp, Bacillus halodurans C-125; identical to SEQ ID NO: 15604
  CDS (1)..(1755): transl_table=11

SEQ ID NO: 96097 - protein, 584 aa, Bacillus halodurans C-125; identical to SEQ ID NO: 15605

SEQ ID NO: 96098 - DNA, 1440 bp, Pasteurella multocida subsp. multocida str. Pm70; identical to SEQ ID NO: 8409
  CDS (1)..(1440): transl_table=11

SEQ ID NO: 96099 - protein, 479 aa, Pasteurella multocida subsp. multocida str. Pm70; identical to SEQ ID NO: 8410

SEQ ID NO: 96100 - DNA, 1473 bp, Neisseria meningitidis MC58; identical to SEQ ID NO: 26460
  CDS (1)..(1473): transl_table=11

SEQ ID NO: 96101 - protein, 490 aa, Neisseria meningitidis MC58; identical to SEQ ID NO: 26461

SEQ ID NO: 96102 - DNA, 1740 bp, Halobacterium sp. NRC-1; identical to SEQ ID NO: 8411
  CDS (1)..(1740): transl_table=11

SEQ ID NO: 96103 - protein, 579 aa, Halobacterium sp. NRC-1; identical to SEQ ID NO: 8412

SEQ ID NO: 96104 - DNA, 1443 bp, Campylobacter jejuni subsp. jejuni NCTC 11168; identical to SEQ ID NO: 8413
  CDS (1)..(1443): transl_table=11

SEQ ID NO: 96105 - protein, 480 aa, Campylobacter jejuni subsp. jejuni NCTC 11168; identical to SEQ ID NO: 8414

SEQ ID NO: 96106 - DNA, 1443 bp, Escherichia coli O157:H7 EDL933; identical to SEQ ID NO: 15614
  CDS (1)..(1443): transl_table=11
  misc_feature (850)..(850): r is g or a

SEQ ID NO: 96107 - protein, 480 aa, Escherichia coli O157:H7 EDL933; identical to SEQ ID NO: 15615
  misc_feature (284)..(284): The Xaa at location 284 stands for Ala, or Thr.

SEQ ID NO: 96108 - DNA, 1449 bp, Deinococcus radiodurans R1; identical to SEQ ID NO: 8415
  CDS (1)..(1449): transl_table=11

SEQ ID NO: 96109 - protein, 482 aa, Deinococcus radiodurans R1; identical to SEQ ID NO: 8416

SEQ ID NO: 96110 - DNA, 1506 bp, Xylella fastidiosa 9a5c; identical to SEQ ID NO: 8417
  CDS (1)..(1506): transl_table=11

SEQ ID NO: 96111 - protein, 501 aa, Xylella fastidiosa 9a5c; identical to SEQ ID NO: 8418

SEQ ID NO: 96112 - DNA, 1455 bp, Chlamydophila pneumoniae J138
  CDS (1)..(1455): transl_table=11
atgatcacacgcactaaaattatttgcactatagggccagcaacgaatagtccagagatgttagcaaaacttctagatgctgggatgaacgtagcaagattaaatttcagtcatgggagtcacgaaactcatggacaggctattggatttctcaaggagttaagggagcagaagcgggttcctttagcaattatgctagatactaaggggcctgaaattcgtttagggaatattcctcagccaatttcggtttctcagggacaaaagcttcgtctggtaagtagtgatatcgatgggagtgctgaagggggagtgtctctctatcctaaggggatatttccctttgttcctgagggtgctgatgttttaatagatgatggctacattcatgctgttgttgtctcttcagaggctgattctttagaattagagtttatgaacagtggccttctcaagtctcataaatctttgagtatccgaggtgttgatgttgctcttccctttatgacagagaaagatattgcggatcttaagtttggggtagagcagaatatggatgtgaatgctgcatcttttgtgcgctacggtgaagatattgaaactatgcgcaagtgtttagcagacttaggcaatcctaagatgcccatcattgcaaaaatagaaaatcgtttaggggtagaaaatttctctaagattgccaagcttgcggatggaattatgattgctagaggagatttaggaatcgagctttctgtcgttgaagtcccaaatttgcaaaagatgatggctaaggtttctagagaaacaggtcacttctgtgtgactgcaacgcagatgctagaatctatgattcgcaatgtcttacctacacgagctgaagtctctgatattgccaatgcaatttatgatggttcttcagcagtgatgttgtcaggggaaactgcatctggagcccatcccgtggctgccgtgaaaatcatgcgttctgtgattttagaaacagaaaagaatctctcccatgattcattcttaaaattagacgatagcaatagcgctcttcaggtgtccccctatctctcagccattggattggcaggcattcagattgcagaaagggcagacgccaaagctcttattgtttatacagaatcaggaagttctccgatgtttctctctaaatatcgtccgaaattccctatcattgccgtgactccaagcacttctgtttactatcgcctagctttggaatggggggtctatcctatgcttacccaggaaagtgatcgcgctgtatggagacatcaggcctgtatttatggcatagaacagggcattctctctaattatgatcggattcttgtgcttagcagaggagcctgtatggaagaaacaaataatcttaccctgacaatagtgaatgatattttgactgggtcggaatttcctgaaacctag

SEQ ID NO: 96113 - protein, 484 aa, Chlamydophila pneumoniae J138
MITRTKIICTIGPATNSPEMLAKLLDAGMNVARLNFSHGSHETHGQAIGFLKELREQKRVPLAIMLDTKGPEIRLGNIPQPISVSQGQKLRLVSSDIDGSAEGGVSLYPKGIFPFVPEGADVLIDDGYIHAVVVSSEADSLELEFMNSGLLKSHKSLSIRGVDVALPFMTEKDIADLKFGVEQNMDVNAASFVRYGEDIETMRKCLADLGNPKMPIIAKIENRLGVENFSKIAKLADGIMIARGDLGIELSVVEVPNLQKMMAKVSRETGHFCVTATQMLESMIRNVLPTRAEVSDIANAIYDGSSAVMLSGETASGAHPVAAVKIMRSVILETEKNLSHDSFLKLDDSNSALQVSPYLSAIGLAGIQIAERADAKALIVYTESGSSPMFLSKYRPKFPIIAVTPSTSVYYRLALEWGVYPMLTQESDRAVWRHQACIYGIEQGILSNYDRILVLSRGACMEETNNLTLTIVNDILTGSEFPET

SEQ ID NO: 96114 - DNA, 1419 bp, Mycobacterium leprae TN; identical to SEQ ID NO: 15618
  CDS (1)..(1419): transl_table=11

SEQ ID NO: 96115 - protein, 472 aa, Mycobacterium leprae TN; identical to SEQ ID NO: 15619

SEQ ID NO: 96116 - DNA, 1359 bp, Sulfolobus solfataricus P2; identical to SEQ ID NO: 15620
  CDS (1)..(1359): transl_table=11

SEQ ID NO: 96117 - protein, 452 aa, Sulfolobus solfataricus P2; identical to SEQ ID NO: 15621

SEQ ID NO: 96118 - DNA, 1419 bp, Clostridium acetobutylicum ATCC 824; identical to SEQ ID NO: 15622
  CDS (1)..(1419): transl_table=11

SEQ ID NO: 96119 - protein, 472 aa, Clostridium acetobutylicum ATCC 824; identical to SEQ ID NO: 15623

SEQ ID NO: 96120 - DNA, 1440 bp, Agrobacterium tumefaciens str. C58; identical to SEQ ID NO: 8419
  CDS (1)..(1440): transl_table=11

SEQ ID NO: 96121 - protein, 479 aa, Agrobacterium tumefaciens str. C58; identical to SEQ ID NO: 8420

SEQ ID NO: 96122 - DNA, 1317 bp, Sulfolobus tokodaii str. 7; identical to SEQ ID NO: 8421
  CDS (1)..(1317): transl_table=11

SEQ ID NO: 96123 - protein, 438 aa, Sulfolobus tokodaii str. 7; identical to SEQ ID NO: 8422

SEQ ID NO: 96124 - DNA, 1440 bp, Sinorhizobium meliloti 1021; identical to SEQ ID NO: 16345
  CDS (1)..(1440): transl_table=11

SEQ ID NO: 96125 - protein, 479 aa, Sinorhizobium meliloti 1021; identical to SEQ ID NO: 16346

SEQ ID NO: 96126 - DNA, 1431 bp, Caulobacter crescentus CB15; identical to SEQ ID NO: 8423
  CDS (1)..(1431): transl_table=11

SEQ ID NO: 96127 - protein, 476 aa, Caulobacter crescentus CB15; identical to SEQ ID NO: 8424

SEQ ID NO: 96128 - DNA, 1443 bp, Salmonella enterica subsp. enterica serovar Typhi str. CT18; identical to SEQ ID NO: 8375
  CDS (1)..(1443): transl_table=11

SEQ ID NO: 96129 - protein, 480 aa, Salmonella enterica subsp. enterica serovar Typhi str. CT18; identical to SEQ ID NO: 8376

SEQ ID NO: 96130 - DNA, 1758 bp, Listeria monocytogenes EGD-e; identical to SEQ ID NO: 8425
  CDS (1)..(1758): transl_table=11

SEQ ID NO: 96131 - protein, 585 aa, Listeria monocytogenes EGD-e; identical to SEQ ID NO: 8426

SEQ ID NO: 96132 - DNA, 1431 bp, Nostoc sp. PCC 7120; identical to SEQ ID NO: 15630
  CDS (1)..(1431): transl_table=11

SEQ ID NO: 96133 - protein, 476 aa, Nostoc sp. PCC 7120; identical to SEQ ID NO: 15631

SEQ ID NO: 96134 - DNA, 1770 bp, Nostoc sp. PCC 7120; identical to SEQ ID NO: 8427
  CDS (1)..(1770): transl_table=11

SEQ ID NO: 96135 - protein, 589 aa, Nostoc sp. PCC 7120; identical to SEQ ID NO: 8428

SEQ ID NO: 96136 - DNA, 1440 bp, Ralstonia solanacearum GMI1000; identical to SEQ ID NO: 26476
  CDS (1)..(1440): transl_table=11

SEQ ID NO: 96137 - protein, 479 aa, Ralstonia solanacearum GMI1000; identical to SEQ ID NO: 26477

SEQ ID NO: 96138 - DNA, 1419 bp, Ralstonia solanacearum GMI1000
  CDS (1)..(1419): transl_table=11
atgcaacgttccagccatgccaagatcgtcgccacgctgggtccggccagcgacgaccacgccacgatcgaagcgctcgcgcgtgcgggcgcggatgtcttccgcctgaatttcagccacggcgcgcatgccgatcatcaacggcggctcgaacggatccgcgcggtggaggccgcgctcggccggcccctcggtgtgctgctcgatctgcaaggccccaagctgcgcgtgggcaccttcgccgagggccgggtgcggctggacgatggcgcgccattccggctcgacctggagaccggccgccccggcgacgcgacgcgcgtcgcgctgccgcatccggaaatcttcgcggccatccggcccggcgtggcgctgctgctggacgacggcaagctgcggctcgaagtcgtggcctgcggcccggaccacgccgagacgcgcgtcgtcaacggcggcatgctgtccgaccgcaagggcgtcaacgtgccgggcgtggtgctgcccctgtcggcgctgacggagaaggaccgcgccgacctggccttcggcctggcgctcggtgtcgactggatcgcgctgtcgttcgtgcagcgcgccgccgacatcgccgagatccggcagctcgtgcacggccgcgcgggcattgtcgccaagctggaaaagccggccgccatcgacagcctggatgccatcctggccgagacggacgcggtgatggtcgcgcggggcgacctgggcgtcgagctgccggccgagcaggtgcccgccatccagaagcgcatcgtgcgggcctgccgccggctgggcaagccggtcatcgtggccacgcagatgctggagtcgatgatcggcgcgccggtgcccacccgcgccgaggcctcggacgtggccactgccgtctacgatggcgccgatgcggtcatgctgtccgccgagaccgcttccggccagttcccggtcgaagccgtcgccatgatgcggcggatcatcgcgcagaccgaagccgacccgcactatcgcgccgccatcgacgcctcgcacacgccgcccggcgccaatacgccggatgcgatcggctgcgccgcgcactcggtggccggcctgctggacgtggcggccatggttgcctacacgagctcgggcgcctcggcgctgcgcatggcgcgcgagcggccccgcgccgccatcctgggcatgacgccgcgcccggaaaccgcgcgccggctggcgctggtgtggggcgtccatccggtgatctgcgacggcgtgctcgacgtcgaggcgatgaccgacgtggcgcggcagacggccgtgcagcggcggttcgcgcaagcggggcagaccctcgtcatcgcggcgggcctgccattcggcacgccgggatcgaccaacctgctgcgcatcgcgcaggtggaatga

SEQ ID NO: 96139 - protein, 472 aa, Ralstonia solanacearum GMI1000
MQRSSHAKIVATLGPASDDHATIEALARAGADVFRLNFSHGAHADHQRRLERIRAVEAALGRPLGVLLDLQGPKLRVGTFAEGRVRLDDGAPFRLDLETGRPGDATRVALPHPEIFAAIRPGVALLLDDGKLRLEVVACGPDHAETRVVNGGMLSDRKGVNVPGVVLPLSALTEKDRADLAFGLALGVDWIALSFVQRAADIAEIRQLVHGRAGIVAKLEKPAAIDSLDAILAETDAVMVARGDLGVELPAEQVPAIQKRIVRACRRLGKPVIVATQMLESMIGAPVPTRAEASDVATAVYDGADAVMLSAETASGQFPVEAVAMMRRIIAQTEADPHYRAAIDASHTPPGANTPDAIGCAAHSVAGLLDVAAMVAYTSSGASALRMARERPRAAILGMTPRPETARRLALVWGVHPVICDGVLDVEAMTDVARQTAVQRRFAQAGQTLVIAAGLPFGTPGSTNLLRIAQVE

SEQ ID NO: 96140 - DNA, 1437 bp, Brucella melitensis 16M; identical to SEQ ID NO: 8429
  CDS (1)..(1437): transl_table=11

SEQ ID NO: 96141 - protein, 478 aa, Brucella melitensis 16M; identical to SEQ ID NO: 8430

SEQ ID NO: 96142 - DNA, 1716 bp, Arabidopsis thaliana; identical to SEQ ID NO: 8433
  CDS (1)..(1716)

SEQ ID NO: 96143 - protein, 571 aa, Arabidopsis thaliana; identical to SEQ ID NO: 8434

SEQ ID NO: 96144 - DNA, 1584 bp, Arabidopsis thaliana; identical to SEQ ID NO: 8435
  CDS (1)..(1584)

SEQ ID NO: 96145 - protein, 527 aa, Arabidopsis thaliana; identical to SEQ ID NO: 8436

SEQ ID NO: 96146 - DNA, 1791 bp, Arabidopsis thaliana; identical to SEQ ID NO: 8437
  CDS (1)..(1791)

SEQ ID NO: 96147 - protein, 596 aa, Arabidopsis thaliana; identical to SEQ ID NO: 8438

SEQ ID NO: 96148 - DNA, 1584 bp, Arabidopsis thaliana; identical to SEQ ID NO: 8439
  CDS (1)..(1584)

SEQ ID NO: 96149 - protein, 527 aa, Arabidopsis thaliana; identical to SEQ ID NO: 8440

SEQ ID NO: 96150 - DNA, 1434 bp, Pyrococcus furiosus DSM 3638; identical to SEQ ID NO: 8441
  CDS (1)..(1434): transl_table=11

SEQ ID NO: 96151 - protein, 477 aa, Pyrococcus furiosus DSM 3638; identical to SEQ ID NO: 8442

SEQ ID NO: 96152 - DNA, 1428 bp, Fusobacterium nucleatum subsp. nucleatum ATCC 25586; identical to SEQ ID NO: 8443
  CDS (1)..(1428): transl_table=11

SEQ ID NO: 96153 - protein, 475 aa, Fusobacterium nucleatum subsp. nucleatum ATCC 25586; identical to SEQ ID NO: 8444

SEQ ID NO: 96154 - DNA, 1752 bp, Thermoanaerobacter tengcongensis MB4; identical to SEQ ID NO: 8445
  CDS (1)..(1752): transl_table=11

SEQ ID NO: 96155 - protein, 583 aa, Thermoanaerobacter tengcongensis MB4; identical to SEQ ID NO: 8446

SEQ ID NO: 96156 - DNA, 1437 bp, Streptomyces coelicolor A3(2); identical to SEQ ID NO: 8447
  CDS (1)..(1437): transl_table=11

SEQ ID NO: 96157 - protein, 478 aa, Streptomyces coelicolor A3(2); identical to SEQ ID NO: 8448

SEQ ID NO: 96158 - DNA, 1431 bp, Streptomyces coelicolor A3(2); identical to SEQ ID NO: 8449
  CDS (1)..(1431): transl_table=11

SEQ ID NO: 96159 - protein, 476 aa, Streptomyces coelicolor A3(2); identical to SEQ ID NO: 8450

SEQ ID NO: 96160 - DNA, 1434 bp, Methanosarcina mazei Go1; identical to SEQ ID NO: 15650
  CDS (1)..(1434): transl_table=11

SEQ ID NO: 96161 - protein, 477 aa, Methanosarcina mazei Go1; identical to SEQ ID NO: 15651

SEQ ID NO: 96162 - DNA, 1527 bp, Xanthomonas campestris pv. campestris str. ATCC 33913; identical to SEQ ID NO: 15652
  CDS (1)..(1527): transl_table=11

SEQ ID NO: 96163 - protein, 508 aa, Xanthomonas campestris pv. campestris str. ATCC 33913; identical to SEQ ID NO: 15653

SEQ ID NO: 96164 - DNA, 1761 bp, Oceanobacillus iheyensis HTE831; identical to SEQ ID NO: 8457
  CDS (1)..(1761): transl_table=11

SEQ ID NO: 96165 - protein, 586 aa, Oceanobacillus iheyensis HTE831; identical to SEQ ID NO: 8458

SEQ ID NO: 96166 - DNA, 1530 bp, Bifidobacterium longum NCC2705; identical to SEQ ID NO: 8459
  CDS (1)..(1530): transl_table=11

SEQ ID NO: 96167 - protein, 509 aa, Bifidobacterium longum NCC2705; identical to SEQ ID NO: 8460

SEQ ID NO: 96168 - DNA, 1437 bp, Brucella suis 1330; identical to SEQ ID NO: 16373
  CDS (1)..(1437): transl_table=11

SEQ ID NO: 96169 - protein, 478 aa, Brucella suis 1330; identical to SEQ ID NO: 16374

SEQ ID NO: 96170 - DNA, 1413 bp, Shigella flexneri 2a str. 301; identical to SEQ ID NO: 15660
  CDS (1)..(1413): transl_table=11

SEQ ID NO: 96171 - protein, 470 aa, Shigella flexneri 2a str. 301; identical to SEQ ID NO: 15661

SEQ ID NO: 96172 - DNA, 1437 bp, Leptospira interrogans serovar Lai str. 56601; identical to SEQ ID NO: 8463
  CDS (1)..(1437): transl_table=11

SEQ ID NO: 96173 - protein, 478 aa, Leptospira interrogans serovar Lai str. 56601; identical to SEQ ID NO: 8464

SEQ ID NO: 96174 - DNA, 1440 bp, Shewanella oneidensis MR-1; identical to SEQ ID NO: 8371
  CDS (1)..(1440): transl_table=11

SEQ ID NO: 96175 - protein, 479 aa, Shewanella oneidensis MR-1; identical to SEQ ID NO: 8372

SEQ ID NO: 96176 - DNA, 1503 bp, Streptococcus mutans UA159
  CDS (1)..(1503): transl_table=11
atgaataaacgcgtaaaaattgttgcaactttaggtccagcggtagaaatccgtggtggtaaaaaatttggtgaagatggctattggggtgaaaagcttgatgttgaagcttcagcagcaaaaattgctgaattgattacagaaggagccaatgtttttcgttttaacttttcacatggtgaccatgctgagcaaggtgaacgtatggcgactgtacgtcgcgcggaagaattggcacgtcaaaaggttggattccttcttgatactaaaggacctgaaatgcgtacagaattgtttgcagatggtgtcaaagaatatgaatataagactggtgataaacttcgtatagcaactaaacaaggcattgaatcaactaaggatgtcattgctttaaatgttgcaggcggtcttgatatttatgatgatgttgctgtcggtcagactattcttattgatgatgggaaacttggccttacagtaaccgctaaagatattacaactcgcgagtttgaagtaaccgttgaaaatgatggcattattgctaaacaaaaaggtgtcaatattcctaatactaaaattcctttcccagcacttgctgagcgtgataatgcagatattcgctttggtttggaacaaggtcttaactttattgctatttcttttgttcgtactgctaaggatgttaatgaagttcgtcaaatttgtaaagaaacaggtaacgagcacgtaaaactttttgctaaaattgaaaatcaacaaggtattgataacattgatgaaatcattgatgcagctgacggtatcatgattgctcgcggtgacatgggtattgaagtgccgtttgaaatggttccagtttatcaaaaaatgattatcacgaaagttaatgcagcagggaagtcagctatcacagcaacaaatatgcttgaaacaatgactgacaaaccacgtgcaacacgttccgaagtctctgatgtctttaatgctgtcattgatggtactgatgcaacaatgctttctggtgaatcagctaatggtaagtatccagttgaagctgttcgtaccatggcaacaattgataagaatgctcaaacacttcttaatgaatatggccgtttgaattcagataatttgccacgtaccaacaagactgaggttgtcgcttcagctgttaaagatgcgactaaatcaatggatattaaattggttgttacaattacagaatctggtaacacagctcgtttaatttcaaaataccgtccggatgcagatatcttagctttaacatttgatgaaaaagtccaaaaatcattgatgattaactggggagttattccaatcttaacagaaaaacctgcatctactgatgatatgtttgaaattgcagaaaaagcagctcttaaatcaggtttggtagagtctggtgacaacatcgttattgttgctggtgtaccggttggatctggtggtaccaatactatgcgtgttcgtaccgttcaataa

SEQ ID NO: 96177 - protein, 500 aa, Streptococcus mutans UA159
MNKRVKIVATLGPAVEIRGGKKFGEDGYWGEKLDVEASAAKIAELITEGANVFRFNFSHGDHAEQGERMATVRRAEELARQKVGFLLDTKGPEMRTELFADGVKEYEYKTGDKLRIATKQGIESTKDVIALNVAGGLDIYDDVAVGQTILIDDGKLGLTVTAKDITTREFEVTVENDGIIAKQKGVNIPNTKIPFPALAERDNADIRFGLEQGLNFIAISFVRTAKDVNEVRQICKETGNEHVKLFAKIENQQGIDNIDEIIDAADGIMIARGDMGIEVPFEMVPVYQKMIITKVNAAGKSAITATNMLETMTDKPRATRSEVSDVFNAVIDGTDATMLSGESANGKYPVEAVRTMATIDKNAQTLLNEYGRLNSDNLPRTNKTEVVASAVKDATKSMDIKLVVTITESGNTARLISKYRPDADILALTFDEKVQKSLMINWGVIPILTEKPASTDDMFEIAEKAALKSGLVESGDNIVIVAGVPVGSGGTNTMRVRTVQ

SEQ ID NO: 96178 - DNA, 1539 bp, Drosophila melanogaster; identical to SEQ ID NO: 15666
  CDS (1)..(1539)

SEQ ID NO: 96179 - protein, 512 aa, Drosophila melanogaster; identical to SEQ ID NO: 15667

SEQ ID NO: 96180 - DNA, 1503 bp, Streptococcus agalactiae NEM316; identical to SEQ ID NO: 16383
  CDS (1)..(1503): transl_table=11

SEQ ID NO: 96181 - protein, 500 aa, Streptococcus agalactiae NEM316; identical to SEQ ID NO: 16384

SEQ ID NO: 96182 - DNA, 1455 bp, Pseudomonas putida KT2440; identical to SEQ ID NO: 15668
  CDS (1)..(1455): transl_table=11

SEQ ID NO: 96183 - protein, 484 aa, Pseudomonas putida KT2440; identical to SEQ ID NO: 15669

SEQ ID NO: 96184 - DNA, 1416 bp, Pseudomonas putida KT2440; identical to SEQ ID NO: 15670
  CDS (1)..(1416): transl_table=11

SEQ ID NO: 96185 - protein, 471 aa, Pseudomonas putida KT2440; identical to SEQ ID NO: 15671

SEQ ID NO: 96186 - DNA, 1629 bp, Escherichia coli CFT073; identical to SEQ ID NO: 15672
  CDS (1)..(1629): transl_table=11

SEQ ID NO: 96187 - protein, 542 aa, Escherichia coli CFT073; identical to SEQ ID NO: 15673

SEQ ID NO: 96188 - DNA, 1413 bp, Vibrio vulnificus CMCP6; identical to SEQ ID NO: 15674
  CDS (1)..(1413): transl_table=11

SEQ ID NO: 96189 - protein, 470 aa, Vibrio vulnificus CMCP6; identical to SEQ ID NO: 15675

SEQ ID NO: 96190 - DNA, 1755 bp, Clostridium tetani E88; identical to SEQ ID NO: 15676
  CDS (1)..(1755): transl_table=11

SEQ ID NO: 96191 - protein, 584 aa, Clostridium tetani E88; identical to SEQ ID NO: 15677

SEQ ID NO: 96192 - DNA, 1761 bp, Lactobacillus plantarum WCFS1; identical to SEQ ID NO: 15678
  CDS (1)..(1761): transl_table=11

SEQ ID NO: 96193 - protein, 586 aa, Lactobacillus plantarum WCFS1; identical to SEQ ID NO: 15679

SEQ ID NO: 96194 - DNA, 1422 bp, Tropheryma whipplei str. Twist; identical to SEQ ID NO: 15680
  CDS (1)..(1422): transl_table=11

SEQ ID NO: 96195 - protein, 473 aa, Tropheryma whipplei str. Twist; identical to SEQ ID NO: 15681

SEQ ID NO: 96196 - DNA, 1413 bp, Vibrio parahaemolyticus RIMD 2210633; identical to SEQ ID NO: 15682
  CDS (1)..(1413): transl_table=11

SEQ ID NO: 96197 - protein, 470 aa, Vibrio parahaemolyticus RIMD 2210633; identical to SEQ ID NO: 15683

SEQ ID NO: 96198 - DNA, 1434 bp, Coxiella burnetii RSA 493; identical to SEQ ID NO: 8475
  CDS (1)..(1434): transl_table=11

SEQ ID NO: 96199 - protein, 477 aa, Coxiella burnetii RSA 493; identical to SEQ ID NO: 8476

SEQ ID NO: 96200 - DNA, 1431 bp, Streptomyces avermitilis MA-4680; identical to SEQ ID NO: 8477
  CDS (1)..(1431): transl_table=11

SEQ ID NO: 96201 - protein, 476 aa, Streptomyces avermitilis MA-4680; identical to SEQ ID NO: 8478

SEQ ID NO: 96202 - DNA, 1437 bp, Streptomyces avermitilis MA-4680; identical to SEQ ID NO: 26528
  CDS (1)..(1437): transl_table=11

SEQ ID NO: 96203 - protein, 478 aa, Streptomyces avermitilis MA-4680; identical to SEQ ID NO: 26529

SEQ ID NO: 96204 - DNA, 1446 bp, Chlamydophila caviae GPIC; identical to SEQ ID NO: 15688
  CDS (1)..(1446): transl_table=11

SEQ ID NO: 96205 - protein, 481 aa, Chlamydophila caviae GPIC; identical to SEQ ID NO: 15689

SEQ ID NO: 96206 - DNA, 1758 bp, Bacillus cereus ATCC 14579; identical to SEQ ID NO: 15690
  CDS (1)..(1758): transl_table=11

SEQ ID NO: 96207 - protein, 585 aa, Bacillus cereus ATCC 14579; identical to SEQ ID NO: 15691

SEQ ID NO: 96208 - DNA, 1491 bp, Nitrosomonas europaea ATCC 19718; identical to SEQ ID NO: 8479
  CDS (1)..(1491): transl_table=11

SEQ ID NO: 96209 - protein, 496 aa, Nitrosomonas europaea ATCC 19718; identical to SEQ ID NO: 8480

SEQ ID NO: 96210 - DNA, 1527 bp, Mycoplasma gallisepticum R
  CDS (1)..(1527): transl_table=4
atgaataagaaacataaagatttcgatttaaactttttaaaaaagacaaagatagtagccacttgtggtccttcaattacatataaactatttagtttagctgatcttgaagatccatcaaaacaagagatcgtgcaaaaagctaaggaaaatttaagacaactgttcttaaatggtgtgagcacagtccgtttaaacttttctcacggaaatcaagaagagcaagctgtaagaatgatcttagctagaagtgtggctaatgaattaaacttaccaatctcaattatgcttgacactaacggtcctgagatcagattaaatcagatctcagaaacagacaataccgttaaaaaagatcagatcgttaagatctatactaatcgcgagatcgttggtaatgccactgagttttctgtctcagattcatctaagaaatacaatatggctaaagatgtttctttaggttcgatcgttttagttgatgatgggaaattaaccttacaagtaattgaggtggctgaagacttttcatacattagagcaatcgctaaaaatgaacataagatcatcaccaaaaagcgtatcaacttaccaaatgctaaatattcgatcccattcttatcacaaaaagattacaacgatattacctttggtctaaagaataaagttgattatattgcagcatcatttgttaatagtgctgatgatatctatgagattaaagcgatcttaaaacaatatggaatggaacacgttcaagtgatcgctaaggttgaaacacgtcacgcaatcaaaaatcttgatgagattattgatgttagtgatggtgtgatggtggctagaggtgatcttggtttagagatcccttattatgaagtaccttactgggaaaaatacattattaaagcttgccgttttaagaataaacgtgtgatcgtagccacccaaatgttagattcactagaaaaaaacgttcaaccaactcgtgctgaagtaactgatgtcttctttgctgttgaacgtggttgtgatgcaacgatgttatcaggtgaaacagcgaatgggatgtatccgattattgctgttgaaacaatgaaaaagatcaacaagcaatcagaactattgtttgactacaaacgtgcaattactcactatttcccaatgacagatgtatgtaagaccgcttttggtgaaagagtcttagatatagctaaaaagatctgtccaaatcgtgagattgaaaacgaagatttctcaacccacttcttagtgcattttaccaacaaccgtgaagagatctttgctttatctaatgctaagttggctgctagtgtaattattgttactgatgatcaaaacgtatatacaggtcatggtgttgattatggggtgttcacttataaggtggatgatcttacaaaagcattaagtaattaccaactagttgctaagaaagcaatcttacactattcagaactatttgaaattaaaccagataataagactaactttgtattactaaaataa

SEQ ID NO: 96211 - protein, 508 aa, Mycoplasma gallisepticum R
MNKKHKDFDLNFLKKTKIVATCGPSITYKLFSLADLEDPSKQEIVQKAKENLRQLFLNGVSTVRLNFSHGNQEEQAVRMILARSVANELNLPISIMLDTNGPEIRLNQISETDNTVKKDQIVKIYTNREIVGNATEFSVSDSSKKYNMAKDVSLGSIVLVDDGKLTLQVIEVAEDFSYIRAIAKNEHKIITKKRINLPNAKYSIPFLSQKDYNDITFGLKNKVDYIAASFVNSADDIYEIKAILKQYGMEHVQVIAKVETRHAIKNLDEIIDVSDGVMVARGDLGLEIPYYEVPYWEKYIIKACRFKNKRVIVATQMLDSLEKNVQPTRAEVTDVFFAVERGCDATMLSGETANGMYPIIAVETMKKINKQSELLFDYKRAITHYFPMTDVCKTAFGERVLDIAKKICPNREIENEDFSTHFLVHFTNNREEIFALSNAKLAASVIIVTDDQNVYTGHGVDYGVFTYKVDDLTKALSNYQLVAKKAILHYSELFEIKPDNKTNFVLLK

SEQ ID NO: 96212 - DNA, 1431 bp, Rhodopirellula baltica SH 1; identical to SEQ ID NO: 15692
  CDS (1)..(1431): transl_table=11

SEQ ID NO: 96213 - protein, 476 aa, Rhodopirellula baltica SH 1; identical to SEQ ID NO: 15693

SEQ ID NO: 96214 - DNA, 1440 bp, Wigglesworthia glossinidia endosymbiont of Glossina brevipalpis; identical to SEQ ID NO: 8481
  CDS (1)..(1440): transl_table=11

SEQ ID NO: 96215 - protein, 479 aa, Wigglesworthia glossinidia endosymbiont of Glossina brevipalpis; identical to SEQ ID NO: 8482

SEQ ID NO: 96216 - DNA, 1467 bp, Candidatus Blochmannia floridanus; identical to SEQ ID NO: 8483
  CDS (1)..(1467): transl_table=11

SEQ ID NO: 96217 - protein, 488 aa, Candidatus Blochmannia floridanus; identical to SEQ ID NO: 8484

SEQ ID NO: 96218 - DNA, 1443 bp, Bordetella bronchiseptica RB50; identical to SEQ ID NO: 8485
  CDS (1)..(1443): transl_table=11

SEQ ID NO: 96219 - protein, 480 aa, Bordetella bronchiseptica RB50; identical to SEQ ID NO: 8486

SEQ ID NO: 96220 - DNA, 1455 bp, Synechococcus sp. WH 8102
  CDS (1)..(1455): transl_table=11
atgggccagttcgatcagaaccgtcggaccaagatcgtggccaccatcggtccagccacggaaagttccgagcgaatcaaggaactggttcaggctggagccaccacctttcggttgaatttctcccacggcgaccacagcgagcatgcggcgcggatttcgaccatccgccaggtgtctgaagagctcgggatcaacatcggcatccttcaagacctgcagggaccaaaaatccgcctgggccgttttgctgagggaccgatcacccttgccaatggcgacagcttctccctgacgtccaggccggtgagttgcaaccaatccatcgccaccgtcacctacgacaaactcgctgacgaagtcaccgcaggaagccgcatccttctcgacgacggccgcgttgagatgaaagtcgagcaggtggatcaggctgaacagaccctgcactgcaccgtcaccgttggcggtgttctctccaacaacaaaggagtgaacttccccgacgtgcagctgtccgtccgcgctctgacggacaaggacaaggtggatctggaattcggtctctcccagggggtcgactgggtggccctgagcttcgtacgcaacccctccgacatggaggaaatccgtggtctgatccgtgagcatggccacgagacccccgtcgtcgccaagattgagaagtttgaggccatcgaccagatcgatgccatccttcccctgtgcgatggcgtgatggtcgccaggggtgacctgggggtagagatgcccgctgaggaggttcctcttctgcagaaggaattgatccggaaagccaacagcctgggcattccgatcatcacggccacccagatgctggattcgatggcctccagcccgcgacccacccgcgctgaagtgagcgatgtggccaacgccattttggatggcaccgatgcagtgatgctctccaacgaaacggccgtcggcgatttcccggtggaagccgttcaaacgatggcgaccatcgcctgccggatcgaaaaggattatccccagcgttccgttgacagccatctggccagcacggtgccgaatgccctgagtggcgccgtcagcaccatcgccagtcagctgaacgcctcggcgatccttcctctcaccaaaagcggagcgacggctaagaacgtcagcaagttccgtcccgcatcgccgattctggccattacccctgatccaaccgtggcctgccgtctgcaactggtttggggagtgaagccgctggtgatcccgcagcacgaactcaccactcacacgttccttgccgcgatgacccaggccaaaacaatggggcttctgaaggaaggtgatctggtcgttcagacggccgggacccacacgggtgtctccggttccaccgatctggtcaaggtgggcatcgtcagttcagaggaagcacccgtcaacatgatctga

SEQ ID NO: 96221 - protein, 484 aa, Synechococcus sp. WH 8102
MGQFDQNRRTKIVATIGPATESSERIKELVQAGATTFRLNFSHGDHSEHAARISTIRQVSEELGINIGILQDLQGPKIRLGRFAEGPITLANGDSFSLTSRPVSCNQSIATVTYDKLADEVTAGSRILLDDGRVEMKVEQVDQAEQTLHCTVTVGGVLSNNKGVNFPDVQLSVRALTDKDKVDLEFGLSQGVDWVALSFVRNPSDMEEIRGLIREHGHETPVVAKIEKFEAIDQIDAILPLCDGVMVARGDLGVEMPAEEVPLLQKELIRKANSLGIPIITATQMLDSMASSPRPTRAEVSDVANAILDGTDAVMLSNETAVGDFPVEAVQTMATIACRIEKDYPQRSVDSHLASTVPNALSGAVSTIASQLNASAILPLTKSGATAKNVSKFRPASPILAITPDPTVACRLQLVWGVKPLVIPQHELTTHTFLAAMTQAKTMGLLKEGDLVVQTAGTHTGVSGSTDLVKVGIVSSEEAPVNMI

SEQ ID NO: 96222 - DNA, 1407 bp, Chromobacterium violaceum ATCC 12472
  CDS (1)..(1407): transl_table=11
atgcttcgcaataccaaaatactcgccacgctcggcccctcctccagcgccccggaaaaaatcctggaactggcccgttccggggtcaacatcttccggctcaacatgagccacggcagccatgacgaccatcgcgcgcgcctggcggccatccgcgccgccgaaaaaacgctggatcgcccgatcggcgtgctggtggacctgcagggccccaagctgcgcatcggcaagtttccgcaaccaaccacggtgaaaaccggcgaccgctacgaattcgtgctggatgaaacggaaggcaatgccgaacgcgccaccctgccgcacccggaagcgttcgaggcgctggagcccggccacctgatcctggtgaacgacggcaagctcgccttcgaagtggcggaaatgcatccgcgccgcatcgtcacccgcgtcaccgtcggcggggaactgtccagcaacaagggcttcaacctgcctcacaccgtgctgccgctgtcggccatcaccggcaaggaccgcaaggacgcggagttcgcgctggaagagggcgccgactgggtggcgatgtccttcgtccagaccgcggccgacgtcaaggcgctgcgcgacatcgtcggcaaacgcgtcggcatcgtcgccaagatcgaaaaaccgtcggcggtggacgatctggaagccatcgccgagctggccgacggcgtgatggtggcgcgcggcgacctgggcgtggagctgccgccggaagacgtgccggtggtgcagcgccgcatcgtccaccactgccgccacctgggccgcccggtgatcgtggccacccagatgctggaatcgatgatcaccgcgccgaccccgacccgcgccgaggccaacgacgtggccaccgccgtctacgaaggcgcggacgcggtgatgctgtcggccgaaaccgccgccggccagtacccgctggaggcggtgcagatcatggaccgcatcatccgccgcgtggagaacgcgcccgactaccgcaaggtgatggcgctggattacagcgccgccgacgagccggaccgcaccgacgccatcgccgcctgcgtgcgcaaggtcagcaccctgctgccggtcaccgtggccgtcgccttcaccaccagcggcgccagctgtctgtcgctggcgcgcgagcgcccgtccacccccatcctgggcatctcgcccaggctggaaaccgcgcgccgcctgaccctggtgtggggcgtggtcgcctaccacggcccggacgccgagaacctggaagacatggtggtgaagaccaccttctgcgccaccaagctcagcctggccgagcagggcaagccgatggtgatcatcgccggcgtgcccttcggcacccccggctccaccaacctgctgcgcatcgtctatccataa

SEQ ID NO: 96223 - protein, 468 aa, Chromobacterium violaceum ATCC 12472
MLRNTKILATLGPSSSAPEKILELARSGVNIFRLNMSHGSHDDHRARLAAIRAAEKTLDRPIGVLVDLQGPKLRIGKFPQPTTVKTGDRYEFVLDETEGNAERATLPHPEAFEALEPGHLILVNDGKLAFEVAEMHPRRIVTRVTVGGELSSNKGFNLPHTVLPLSAITGKDRKDAEFALEEGADWVAMSFVQTAADVKALRDIVGKRVGIVAKIEKPSAVDDLEAIAELADGVMVARGDLGVELPPEDVPVVQRRIVHHCRHLGRPVIVATQMLESMITAPTPTRAEANDVATAVYEGADAVMLSAETAAGQYPLEAVQIMDRIIRRVENAPDYRKVMALDYSAADEPDRTDAIAACVRKVSTLLPVTVAVAFTTSGASCLSLARERPSTPILGISPRLETARRLTLVWGVVAYHGPDAENLEDMVVKTTFCATKLSLAEQGKPMVIIAGVPFGTPGSTNLLRIVYP

SEQ ID NO: 96224 - DNA, 1422 bp, Gloeobacter violaceus PCC 7421; identical to SEQ ID NO: 15698
  CDS (1)..(1422): transl_table=11

SEQ ID NO: 96225 - protein, 473 aa, Gloeobacter violaceus PCC 7421; identical to SEQ ID NO: 15699

SEQ ID NO: 96226 - DNA, 1818 bp, Gloeobacter violaceus PCC 7421; identical to SEQ ID NO: 8487
  CDS (1)..(1818): transl_table=11

SEQ ID NO: 96227 - protein, 605 aa, Gloeobacter violaceus PCC 7421; identical to SEQ ID NO: 8488

SEQ ID NO: 96228 - DNA, 1410 bp, Photorhabdus luminescens subsp. laumondii TTO1; identical to SEQ ID NO: 15702
  CDS (1)..(1410): transl_table=11

SEQ ID NO: 96229 - protein, 469 aa, Photorhabdus luminescens subsp. laumondii TTO1; identical to SEQ ID NO: 15703

SEQ ID NO: 96230 - DNA, 1488 bp, Vibrio vulnificus YJ016; identical to SEQ ID NO: 15704
  CDS (1)..(1488): transl_table=11

SEQ ID NO: 96231 - protein, 495 aa, Vibrio vulnificus YJ016; identical to SEQ ID NO: 15705

SEQ ID NO: 96232 - DNA, 1422 bp, Corynebacterium diphtheriae NCTC 13129; identical to SEQ ID NO: 26550
  CDS (1)..(1422): transl_table=11

SEQ ID NO: 96233 - protein, 473 aa, Corynebacterium diphtheriae NCTC 13129; identical to SEQ ID NO: 26551

SEQ ID NO: 96234 - DNA, 1434 bp, Rhodopseudomonas palustris CGA009; identical to SEQ ID NO: 8491
  CDS (1)..(1434): transl_table=11

SEQ ID NO: 96235 - protein, 477 aa, Rhodopseudomonas palustris CGA009; identical to SEQ ID NO: 8492

SEQ ID NO: 96236 - DNA, 1770 bp, Lactobacillus johnsonii NCC 533; identical to SEQ ID NO: 15708
  CDS (1)..(1770): transl_table=11

SEQ ID NO: 96237 - protein, 589 aa, Lactobacillus johnsonii NCC 533; identical to SEQ ID NO: 15709

SEQ ID NO: 96238 - DNA, 1488 bp, Bdellovibrio bacteriovorus HD100; identical to SEQ ID NO: 8493
  CDS (1)..(1488): transl_table=11

SEQ ID NO: 96239 - protein, 495 aa, Bdellovibrio bacteriovorus HD100; identical to SEQ ID NO: 8494

SEQ ID NO: 96240 - DNA, 1416 bp, Treponema denticola ATCC 35405; identical to SEQ ID NO: 8495
  CDS (1)..(1416): transl_table=11

SEQ ID NO: 96241 - protein, 471 aa, Treponema denticola ATCC 35405; identical to SEQ ID NO: 8496

SEQ ID NO: 96242 - DNA, 1437 bp, Mycoplasma mycoides subsp. mycoides SC str. PG1; identical to SEQ ID NO: 15712
  CDS (1)..(1437): transl_table=4

SEQ ID NO: 96243 - protein, 478 aa, Mycoplasma mycoides subsp. mycoides SC str. PG1; identical to SEQ ID NO: 15713

SEQ ID NO: 96244 - DNA, 1344 bp, Methanococcus maripaludis S2; identical to SEQ ID NO: 15716
  CDS (1)..(1344): transl_table=11

SEQ ID NO: 96245 - protein, 447 aa, Methanococcus maripaludis S2; identical to SEQ ID NO: 15717

SEQ ID NO: 96246 - DNA, 1656 bp, Nasonia vitripennis; identical to SEQ ID NO: 15718
  CDS (1)..(1656)

SEQ ID NO: 96247 - protein, 551 aa, Nasonia vitripennis; identical to SEQ ID NO: 15719

SEQ ID NO: 96248 - DNA, 1587 bp, Magnaporthe grisea 70-15; identical to SEQ ID NO: 8497
  CDS (1)..(1587)

SEQ ID NO: 96249 - protein, 528 aa, Magnaporthe grisea 70-15; identical to SEQ ID NO: 8498

SEQ ID NO: 96250 - DNA, 1623 bp, Gibberella zeae PH-1; identical to SEQ ID NO: 8499
  CDS (1)..(1623)

SEQ ID NO: 96251 - protein, 540 aa, Gibberella zeae PH-1; identical to SEQ ID NO: 8500

SEQ ID NO: 96252 - DNA, 1554 bp, Apis mellifera; identical to SEQ ID NO: 15722
  CDS (1)..(1554)

SEQ ID NO: 96253 - protein, 517 aa, Apis mellifera; identical to SEQ ID NO: 15723

SEQ ID NO: 96254 - DNA, 1515 bp, Candida albicans SC5314; identical to SEQ ID NO: 8501
  CDS (1)..(1515): transl_table=12

SEQ ID NO: 96255 - protein, 504 aa, Candida albicans SC5314; identical to SEQ ID NO: 8502

SEQ ID NO: 96256 - DNA, 1587 bp, Ustilago maydis 521; identical to SEQ ID NO: 8503
  CDS (1)..(1587)

SEQ ID NO: 96257 - protein, 528 aa, Ustilago maydis 521; identical to SEQ ID NO: 8504

SEQ ID NO: 96258 - DNA, 1590 bp, Cryptococcus neoformans var. neoformans B-3501A; identical to SEQ ID NO: 15728
  CDS (1)..(1590)

SEQ ID NO: 96259 - protein, 529 aa, Cryptococcus neoformans var. neoformans B-3501A; identical to SEQ ID NO: 15729

SEQ ID NO: 96260 - DNA, 1719 bp, Cryptococcus neoformans var. neoformans B-3501A; identical to SEQ ID NO: 15730
  CDS (1)..(1719)

SEQ ID NO: 96261 - protein, 572 aa, Cryptococcus neoformans var. neoformans B-3501A; identical to SEQ ID NO: 15731

SEQ ID NO: 96262 - DNA, 1560 bp, Encephalitozoon cuniculi GB-M1; identical to SEQ ID NO: 15732
  CDS (1)..(1560)

SEQ ID NO: 96263 - protein, 519 aa, Encephalitozoon cuniculi GB-M1; identical to SEQ ID NO: 15733

SEQ ID NO: 96264 - DNA, 1539 bp, Tribolium castaneum; identical to SEQ ID NO: 15734
  CDS (1)..(1539)

SEQ ID NO: 96265 - protein, 512 aa, Tribolium castaneum; identical to SEQ ID NO: 15735

SEQ ID NO: 96266 - DNA, 1611 bp, Tribolium castaneum; identical to SEQ ID NO: 15736
  CDS (1)..(1611)

SEQ ID NO: 96267 - protein, 536 aa, Tribolium castaneum; identical to SEQ ID NO: 15737

SEQ ID NO: 96268 - DNA, 1674 bp, Tribolium castaneum; identical to SEQ ID NO: 15738
  CDS (1)..(1674)

SEQ ID NO: 96269 - protein, 557 aa, Tribolium castaneum; identical to SEQ ID NO: 15739

SEQ ID NO: 96270 - DNA, 1593 bp, Tribolium castaneum; identical to SEQ ID NO: 15740
  CDS (1)..(1593)

SEQ ID NO: 96271 - protein, 530 aa, Tribolium castaneum; identical to SEQ ID NO: 15741

SEQ ID NO: 96272 - DNA, 1791 bp, Prochlorococcus marinus str. MIT 9515
  CDS (1)..(1791): transl_table=11
atgtcgaatattgatttaaaaagaagaacaaaaattgtagcaacaattggaccagctactcagtctgaagaagtaattactgatcttataaaggctggggtaacaacattccgattaaatttttcccatggcgatcataaagatcatgaagaaaggattaaaactataagaaaagtttctaaaaatcttgatctagatgtaggaatactacaagatctgcaaggacctaaaataagactaggaagatttaaagatggtcccgttaaagtaaaaaaaggagataaatttacattgacttctaacgaagttgaatgcactaaaagtattgcaaacgttacttataatagactcgcgcaggaagttaccgaaggcaaaagaatattattagacgatggtaaaattgaaatgattgttgaaaaggttgacttaccaaataatttattaaagtgtaaagtaactgtcggtggggtactttctaacaataaaggagttaattttccagatgtgcaattatcggtaaaagctttaactgataaagatatagatgatcttgaatttggattaaccgctggagtagattggatagctctaagttttgtaagaaacccctcagatattaatgaaataaaaaatttaataaataagagtgggcaatcaatacctgtgatagcaaaaattgaaaaatttgaagcaatagatcaaatagattcaatactacccttgtgtgatggagttatggttgcaagaggagatttaggagttgaaatgccagcggaggaagttccacttttacaaaaagagttaataaggaaagctaatacatttgggatccctataatcacggctacacaaatgcttgactccatggcatcaaatcccagaccaacacgagcggaagttagtgatgtggctaacgcaattcttgatgggactgatgcagttatgctctcaaatgaaactgccgtaggtgactatcctgtagaggctgttgaaactatggctactattgccagaagaattgaaagagattatccattaaaagcaatcgagagtaatctgcctagtactatcccaaatgcaataagtgctgcagtaagcaatattgcgaggcagcttgacgctggagcaataattcctttaactaaatcaggatccacagcacgtaatgtaagtaagttcagaccacctactcctatccttgccacgactactgagaagagtgtcgcaagaagattacaacttgtgtggggagtgacaccattattagtaaaatctgacgatagaacagcaagaacatttagtattgcaatgcaaatagctcaagaaatggggattcttaagcaaggagacttagtagtacaaactgctggaactttgacaggaataagtggatctactgaccttataaaagttggcctagtaagaaaagtgataacccgaggaatatcaattggagaaataggtgttacaggtaaagcgagaaatatagaaacaagtcttgatttatcattaataactcacggtgaaatattatttgtatctaagaatctattaaaagatttaccttactcaaaaaaaatcacaggcatcgttactgatgaaactgttgatgaatgttataagatttttaaaaaaaataaaattaaaatatcttcaatttgtaatttatctactattgataatcaggtaacaaatggtgatgtaataacactacaacttaatgaaggagtaatttatatgggacagatagaggaagatgaagaggcactagacagatataaatatgtctag

SEQ ID NO: 96273 - protein, 596 aa, Prochlorococcus marinus str. MIT 9515
MSNIDLKRRTKIVATIGPATQSEEVITDLIKAGVTTFRLNFSHGDHKDHEERIKTIRKVSKNLDLDVGILQDLQGPKIRLGRFKDGPVKVKKGDKFTLTSNEVECTKSIANVTYNRLAQEVTEGKRILLDDGKIEMIVEKVDLPNNLLKCKVTVGGVLSNNKGVNFPDVQLSVKALTDKDIDDLEFGLTAGVDWIALSFVRNPSDINEIKNLINKSGQSIPVIAKIEKFEAIDQIDSILPLCDGVMVARGDLGVEMPAEEVPLLQKELIRKANTFGIPIITATQMLDSMASNPRPTRAEVSDVANAILDGTDAVMLSNETAVGDYPVEAVETMATIARRIERDYPLKAIESNLPSTIPNAISAAVSNIARQLDAGAIIPLTKSGSTARNVSKFRPPTPILATTTEKSVARRLQLVWGVTPLLVKSDDRTARTFSIAMQIAQEMGILKQGDLVVQTAGTLTGISGSTDLIKVGLVRKVITRGISIGEIGVTGKARNIETSLDLSLITHGEILFVSKNLLKDLPYSKKITGIVTDETVDECYKIFKKNKIKISSICNLSTIDNQVTNGDVITLQLNEGVIYMGQIEEDEEALDRYKYV

SEQ ID NO: 96274 - DNA, 1458 bp, Prochlorococcus marinus str. NATL1A
  CDS (1)..(1458): transl_table=11
atgaaaatactcgacctagccagaaggaccaagattgtagctacgataggacccgcaactgagagtgcgagtcaaataagcaagttagtagaggccggtgcaactactttccgtctaaattttagtcatggtgatcatgaagaacatgctcaaagaataaaaacaattagaaaagtttctgacgatctaggcattcacataggaatccttcaggatcttcaggggcctaagattagacttggtagatttaaaaatggcccagttaatgtcaaaaatggcgataaatttattcttacatcgaaaaatattgaatgtaatcaggaccaagcaaatgtcacttacgacaagctagctgaagaagtaaatgttggaaatcgaattctgttggatgatggaagggtagagatgaaagttgaagaagtagatataaaagaacaaagattaatttgttcaataactgtgggtggggttctatctaataacaaaggagttaatttccctgatgttcaactctccataagggctttaacagacaaagataaaaaagatctagcatttggtttaaaacaaggtgttgattgggtagcactaagttttgtaagaaatccttctgatttaatagaaataaaagatttaattagaaatcatggatatgacactccagtagttgcgaagatagaaaaatttgaagcaattgatcaaatagacgctgtcttaaaattatgtgatggagtcatggttgctagaggtgatctcggtgtagagatgccagcagaagaagttccactattacaaaaacaacttatcaaaaaggcaaacagccttggcataccaataattacagccacacaaatgcttgattcaatggcctcaagcccaaggcctacaagagcagaggtgagtgatgttgcaaatgcaatactcgatggcacggatgctgtaatgctctcaaatgagactgcagtgggtgattatcccattgaggctgtggcgactatggctactattgcgaaaagaatcgaacgagattatccacaaaaagcattagaaagtcatcttccaagcactattccaaatgctattagtgcggctgtaagcagtattgctagacaaataaacgctgccgcaataatacctttaactaaaagtggtgctaccgccaaaaacgtaagcaagtttagacctcccactccagtattagcagtaactaatgaaaagagtgttgccagcacacttcaacttgtctggggagtaacgccccttctaatagaaaatcaaacaagcacatcaaaaacatttgttgatgccatgaatatggccaaaaaaatgaaaatcctcaagcaaggagatcttgttgttgagacagctggaacactatcaggggtaagtgggtcaacagacttggtaaaggttgggatagttagttcagaagatgaaaatgaatctttatttatctaa

SEQ ID NO: 96275 - protein, 485 aa, Prochlorococcus marinus str. NATL1A
MKILDLARRTKIVATIGPATESASQISKLVEAGATTFRLNFSHGDHEEHAQRIKTIRKVSDDLGIHIGILQDLQGPKIRLGRFKNGPVNVKNGDKFILTSKNIECNQDQANVTYDKLAEEVNVGNRILLDDGRVEMKVEEVDIKEQRLICSITVGGVLSNNKGVNFPDVQLSIRALTDKDKKDLAFGLKQGVDWVALSFVRNPSDLIEIKDLIRNHGYDTPVVAKIEKFEAIDQIDAVLKLCDGVMVARGDLGVEMPAEEVPLLQKQLIKKANSLGIPIITATQMLDSMASSPRPTRAEVSDVANAILDGTDAVMLSNETAVGDYPIEAVATMATIAKRIERDYPQKALESHLPSTIPNAISAAVSSIARQINAAAIIPLTKSGATAKNVSKFRPPTPVLAVTNEKSVASTLQLVWGVTPLLIENQTSTSKTFVDAMNMAKKMKILKQGDLVVETAGTLSGVSGSTDLVKVGIVSSEDENESLFI

SEQ ID NO: 96276 - DNA, 1761 bp, Clostridium difficile 630; identical to SEQ ID NO: 8505
  CDS (1)..(1761): transl_table=11

SEQ ID NO: 96277 - protein, 586 aa, Clostridium difficile 630; identical to SEQ ID NO: 8506

SEQ ID NO: 96278 - DNA, 1416 bp, Herminiimonas arsenicoxydans; identical to SEQ ID NO: 8507
  CDS (1)..(1416): transl_table=11

SEQ ID NO: 96279 - protein, 471 aa, Herminiimonas arsenicoxydans; identical to SEQ ID NO: 8508

SEQ ID NO: 96280 - DNA, 1437 bp, Burkholderia vietnamiensis G4; identical to SEQ ID NO: 8509
  CDS (1)..(1437): transl_table=11

SEQ ID NO: 96281 - protein, 478 aa, Burkholderia vietnamiensis G4; identical to SEQ ID NO: 8510

SEQ ID NO: 96282 - DNA, 1455 bp, Dichelobacter nodosus VCS1703A; identical to SEQ ID NO: 8377
  CDS (1)..(1455): transl_table=11

SEQ ID NO: 96283 - protein, 484 aa, Dichelobacter nodosus VCS1703A; identical to SEQ ID NO: 8378

SEQ ID NO: 96284 - DNA, 1461 bp, Leptospira interrogans serovar Copenhageni str. Fiocruz L1-130; identical to SEQ ID NO: 70200
  CDS (1)..(1461): transl_table=11

SEQ ID NO: 96285 - protein, 486 aa, Leptospira interrogans serovar Copenhageni str. Fiocruz L1-130; identical to SEQ ID NO: 70201

SEQ ID NO: 96286 - DNA, 1425 bp, Thermus thermophilus HB27; identical to SEQ ID NO: 8511
  CDS (1)..(1425): transl_table=11

SEQ ID NO: 96287 - protein, 474 aa, Thermus thermophilus HB27; identical to SEQ ID NO: 8512

SEQ ID NO: 96288 - DNA, 1410 bp, Desulfovibrio vulgaris subsp. vulgaris str. Hildenborough; identical to SEQ ID NO: 26590
  CDS (1)..(1410): transl_table=11

SEQ ID NO: 96289 - protein, 469 aa, Desulfovibrio vulgaris subsp. vulgaris str. Hildenborough; identical to SEQ ID NO: 26591

SEQ ID NO: 96290 - DNA, 1452 bp, Mycoplasma mobile 163K
  CDS (1)..(1452): transl_table=4
atgaatgtattagaaaaagaaaaaggtgttaatcttactgataaaagatcaaaaatgatcgctacaattggtccatcttcacaaaataaagaaattttaaaacaaatgatgttgaaaggtatgactacagttagagccaattttagccatggagatcatgcagaacaactaaataaatttgttttagcaaaagaagtagcaaaagaactaaatttaccaatgtctcttatgttagacactaaaggtcctgaaattagagttggaaaaatgaaagatggatctcaaaaaattgaagtagggaaaattattaccgttttaacagatgaagtttcatacaaaacttttgaaggaattccaactaaatttacagtttcacatagaatggataaagatgttaaagttggaagctacattttatttgatgatggaaaattaactactattgttacaggtgtaaaatcaggaattgtcgaagtaaaaacaattaattcacatgttttaaaatcaaataaaagaattaatattccaggagctcaattatcattagaatttttaagtaaaaaagataaagaagatattatctttggaattaaaaatgatgtaaattatattgctgcttcatttgttaattcgaaacaagatgttcttgatttaagaaaattattaaaagataataatggagaacatattcaaattatttcaaaaattgaatctgtatttggaattgaaaatattgatgaaattattgaagctagtgatggaatcatgatcgcaagaggagatttaggattagaaattccttattttgaagttcctttttatgaaaaacaaattattagaaaatgtcgtaatgttggtaaaccagttattgttgcaactcaaatgcttgattcaatggaaaaactacctcaaccaactagagcagaagttagtgatgtttactgggcaacagaattaggagcagatgcaactatgctttcaggagaaagtgcaaatggagatttccctgttgaatcagttgaagttatgtcaacaattaatcgtcgtgcagaaaaagaattttacaataaattatactatcctgcacatttagaaactttaattcaaaatccggttggagttcactcgaaattagcttctgaagttgcacttaaagtaatgaatggagattataaattttcagttattctttcagaaacaggaagattattaaaagaaattgcacgttttagacctaatacagttattatcggagttattaacaatgataaattaattcatggatttggaattacacacagtgtgtttatgagtgtagattcaaaagcagtaaaaagtgaaattgaaaaaaatcttactaaagcaagggaagttttaaaaccatttttccctaaaaaaggtgacaaatatttagttgttgaaaataataaaatttcagaatatatttattaa

SEQ ID NO: 96291 - protein, 483 aa, Mycoplasma mobile 163K
MNVLEKEKGVNLTDKRSKMIATIGPSSQNKEILKQMMLKGMTTVRANFSHGDHAEQLNKFVLAKEVAKELNLPMSLMLDTKGPEIRVGKMKDGSQKIEVGKIITVLTDEVSYKTFEGIPTKFTVSHRMDKDVKVGSYILFDDGKLTTIVTGVKSGIVEVKTINSHVLKSNKRINIPGAQLSLEFLSKKDKEDIIFGIKNDVNYIAASFVNSKQDVLDLRKLLKDNNGEHIQIISKIESVFGIENIDEIIEASDGIMIARGDLGLEIPYFEVPFYEKQIIRKCRNVGKPVIVATQMLDSMEKLPQPTRAEVSDVYWATELGADATMLSGESANGDFPVESVEVMSTINRRAEKEFYNKLYYPAHLETLIQNPVGVHSKLASEVALKVMNGDYKFSVILSETGRLLKEIARFRPNTVIIGVINNDKLIHGFGITHSVFMSVDSKAVKSEIEKNLTKAREVLKPFFPKKGDKYLVVENNKISEYIY

SEQ ID NO: 96292 - DNA, 1668 bp, Picrophilus torridus DSM 9790
  CDS (1)..(1668): transl_table=11
atgtcaaggacaaagttaatagcaacaataggccctgcaagtgaatcaatggaaattataaaaaaaatggcaaatcttgggctttcatgcataaggataaatacagcacatattgaaaatggatacataacaaaagtagcaaaaatggttgatgatgttaataaatcagagggcacatatataggattaatggtggatttaaaggggccagagttaagaactggtaaattcaaggacggctcatttaaaatagattataataaaaagtataaaatatcatacaataaaaatgacaaccctgacatattaataaattataatatatcggatttcatagacgataaaacattaatagcaatgagcgatggaaagttaagattttccgttgattctgtaaacggcgatataataaacgttacatcccttgattcaggctctttaagggacaactcaagagtcaatgttccagggaagttgttaaggctcggaagcctgacggaccgagacaggatgttcatagaggagggcataaaaaacaatgtaaacttctatgcattatcatttgttcaatcaagggagaacataaacgagctccaggattatctctttgaaaggaactgcgatgcacagttaatatcaaagatagagacaaagagcggctatgataacatcgatgagatagcaagggcctctgattttataatggttgcccggggcgatcttggcgttgagatgccgttgaaggaggttacaatagcacagaagaaaattatagatgaatcaagaaagtatgcaacaccgacaatagttgcaacgcagatgcttgaatccatggttaacaacgattcaccaacaagggccgaggtctctgatataacaaatgcaataattgacggaactgacgcattgatgctatccgaggaaaccgccataggaaggtatcctgtcgaggccataggctatttaagcagcatatcagactatgtcgattccatggagataaaatacaaggaacctgaaagctttgcctttgacaaggtggcatttgccatatccaagggattaaagatgatatctgactacacaaacgttgattctattgttgcattcacaaggtctggattcaccgcaaggctggtatcatcaatgaggccagggaagatgatatactccgttgtttcaagcgatttccttgcaaggtcattaaaccttttaaaaagcgttgttcctgtaaaaatcgatgaatcaatgaagtcaaaggaaatatacgatatactcgttgatataaacaggagcaataagataagaccgggcaaaaaggtgcttgttgtttcaggctctccatactttgtcttcggcggcacaaacgagataaggcttgtaaccatgggaaaattcataggccgtggatatcctgttggtaacagcttctcaggttactatgagcccgatggctctggggatataataatacttgataaatatataaaaaactttgattacaaaaaatacaaatgcgttataataaaaggcaatgtaagcgatacaataaaaaacctattctatgaaaataagatacttttattgtacaacactgaattcgacgctgaattaaatgagaaaacatttctaaacatagacggtgatacaggaataataacagcataa

SEQ ID NO: 96293 - protein, 555 aa, Picrophilus torridus DSM 9790
MSRTKLIATIGPASESMEIIKKMANLGLSCIRINTAHIENGYITKVAKMVDDVNKSEGTYIGLMVDLKGPELRTGKFKDGSFKIDYNKKYKISYNKNDNPDILINYNISDFIDDKTLIAMSDGKLRFSVDSVNGDIINVTSLDSGSLRDNSRVNVPGKLLRLGSLTDRDRMFIEEGIKNNVNFYALSFVQSRENINELQDYLFERNCDAQLISKIETKSGYDNIDEIARASDFIMVARGDLGVEMPLKEVTIAQKKIIDESRKYATPTIVATQMLESMVNNDSPTRAEVSDITNAIIDGTDALMLSEETAIGRYPVEAIGYLSSISDYVDSMEIKYKEPESFAFDKVAFAISKGLKMISDYTNVDSIVAFTRSGFTARLVSSMRPGKMIYSVVSSDFLARSLNLLKSVVPVKIDESMKSKEIYDILVDINRSNKIRPGKKVLVVSGSPYFVFGGTNEIRLVTMGKFIGRGYPVGNSFSGYYEPDGSGDIIILDKYIKNFDYKKYKCVIIKGNVSDTIKNLFYENKILLLYNTEFDAELNEKTFLNIDGDTGIITA

SEQ ID NO: 96294 - DNA, 1758 bp, Bacillus thuringiensis serovar konkukian str. 97-27; identical to SEQ ID NO: 15754
  CDS (1)..(1758): transl_table=11

SEQ ID NO: 96295 - protein, 585 aa, Bacillus thuringiensis serovar konkukian str. 97-27; identical to SEQ ID NO: 15755

SEQ ID NO: 96296 - DNA, 1413 bp, Erwinia carotovora subsp. atroseptica SCRI1043; identical to SEQ ID NO: 15756
  CDS (1)..(1413): transl_table=11

SEQ ID NO: 96297 - protein, 470 aa, Erwinia carotovora subsp. atroseptica SCRI1043; identical to SEQ ID NO: 15757

SEQ ID NO: 96298 - DNA, 1437 bp, Mesoplasma florum L1; identical to SEQ ID NO: 15758
  CDS (1)..(1437): transl_table=4

SEQ ID NO: 96299 - protein, 478 aa, Mesoplasma florum L1; identical to SEQ ID NO: 15759

SEQ ID NO: 96300 - DNA, 1434 bp, Propionibacterium acnes KPA171202; identical to SEQ ID NO: 8521
  CDS (1)..(1434): transl_table=11

SEQ ID NO: 96301 - protein, 477 aa, Propionibacterium acnes KPA171202; identical to SEQ ID NO: 8522

SEQ ID NO: 96302 - DNA, 1467 bp, Leifsonia xyli subsp. xyli str. CTCB07; identical to SEQ ID NO: 8523
  CDS (1)..(1467): transl_table=11

SEQ ID NO: 96303 - protein, 488 aa, Leifsonia xyli subsp. xyli str. CTCB07; identical to SEQ ID NO: 8524

SEQ ID NO: 96304 - DNA, 1746 bp, Desulfotalea psychrophila LSv54; identical to SEQ ID NO: 8525
  CDS (1)..(1746): transl_table=11

SEQ ID NO: 96305 - protein, 581 aa, Desulfotalea psychrophila LSv54; identical to SEQ ID NO: 8526

SEQ ID NO: 96306 - DNA, 1434 bp, Borrelia garinii PBi; identical to SEQ ID NO: 8527
  CDS (1)..(1434): transl_table=11

SEQ ID NO: 96307 - protein, 477 aa, Borrelia garinii PBi; identical to SEQ ID NO: 8528

SEQ ID NO: 96308 - DNA, 1755 bp, Symbiobacterium thermophilum IAM 14863; identical to SEQ ID NO: 8529
  CDS (1)..(1755): transl_table=11

SEQ ID NO: 96309 - protein, 584 aa, Symbiobacterium thermophilum IAM 14863; identical to SEQ ID NO: 8530

SEQ ID NO: 96310 - DNA, 1758 bp, Bacillus licheniformis ATCC 14580; identical to SEQ ID NO: 15768
  CDS (1)..(1758): transl_table=11

SEQ ID NO: 96311 - protein, 585 aa, Bacillus licheniformis ATCC 14580; identical to SEQ ID NO: 15769

SEQ ID NO: 96312 - DNA, 1581 bp, Mannheimia succiniciproducens MBEL55E; identical to SEQ ID NO: 8531
  CDS (1)..(1581): transl_table=11

SEQ ID NO: 96313 - protein, 526 aa, Mannheimia succiniciproducens MBEL55E; identical to SEQ ID NO: 8532

SEQ ID NO: 96314 - DNA, 1467 bp, Methylococcus capsulatus str. Bath; identical to SEQ ID NO: 8535
  CDS (1)..(1467): transl_table=11

SEQ ID NO: 96315 - protein, 488 aa, Methylococcus capsulatus str. Bath; identical to SEQ ID NO: 8536

SEQ ID NO: 96316 - DNA, 1449 bp, Azoarcus sp. EbN1; identical to SEQ ID NO: 15772
  CDS (1)..(1449): transl_table=11

SEQ ID NO: 96317 - protein, 482 aa, Azoarcus sp. EbN1; identical to SEQ ID NO: 15773

SEQ ID NO: 96318 - DNA, 1446 bp, Silicibacter pomeroyi DSS-3; identical to SEQ ID NO: 16485
  CDS (1)..(1446): transl_table=11

SEQ ID NO: 96319 - protein, 481 aa, Silicibacter pomeroyi DSS-3; identical to SEQ ID NO: 16486

SEQ ID NO: 96320 - DNA, 1755 bp, Bacillus clausii KSM-K16; identical to SEQ ID NO: 8537
  CDS (1)..(1755): transl_table=11

SEQ ID NO: 96321 - protein, 584 aa, Bacillus clausii KSM-K16; identical to SEQ ID NO: 8538

SEQ ID NO: 96322 - DNA, 1437 bp, Thermococcus kodakarensis KOD1; identical to SEQ ID NO: 15776
  CDS (1)..(1437): transl_table=11

SEQ ID NO: 96323 - protein, 478 aa, Thermococcus kodakarensis KOD1; identical to SEQ ID NO: 15777

SEQ ID NO: 96324 - DNA, 1458 bp, Bacteroides fragilis NCTC 9343; identical to SEQ ID NO: 15778
  CDS (1)..(1458): transl_table=11

SEQ ID NO: 96325 - protein, 485 aa, Bacteroides fragilis NCTC 9343; identical to SEQ ID NO: 15779

SEQ ID NO: 96326 - DNA, 1446 bp, Chlamydophila abortus S26/3; identical to SEQ ID NO: 8541
  CDS (1)..(1446): transl_table=11

SEQ ID NO: 96327 - protein, 481 aa, Chlamydophila abortus S26/3; identical to SEQ ID NO: 8542

SEQ ID NO: 96328 - DNA, 1434 bp, Corynebacterium glutamicum ATCC 13032; identical to SEQ ID NO: 8543
  CDS (1)..(1434): transl_table=11

SEQ ID NO: 96329 - protein, 477 aa, Corynebacterium glutamicum ATCC 13032; identical to SEQ ID NO: 8544

SEQ ID NO: 96330 - DNA, 1452 bp, Colwellia psychrerythraea 34H; identical to SEQ ID NO: 8547
  CDS (1)..(1452): transl_table=11

SEQ ID NO: 96331 - protein, 483 aa, Colwellia psychrerythraea 34H; identical to SEQ ID NO: 8548

SEQ ID NO: 96332 - DNA, 1434 bp, Dechloromonas aromatica RCB; identical to SEQ ID NO: 8549
  CDS (1)..(1434): transl_table=11

SEQ ID NO: 96333 - protein, 477 aa, Dechloromonas aromatica RCB; identical to SEQ ID NO: 8550

SEQ ID NO: 96334 - DNA, 1431 bp, Thermobifida fusca YX; identical to SEQ ID NO: 8551
  CDS (1)..(1431): transl_table=11

SEQ ID NO: 96335 - protein, 476 aa, Thermobifida fusca YX; identical to SEQ ID NO: 8552

SEQ ID NO: 96336 - DNA, 1458 bp, Prochlorococcus marinus str. NATL2A; identical to SEQ ID NO: 16501
  CDS (1)..(1458): transl_table=11

SEQ ID NO: 96337 - protein, 485 aa, Prochlorococcus marinus str. NATL2A; identical to SEQ ID NO: 16502

SEQ ID NO: 96338 - DNA, 1434 bp, Methanosarcina barkeri str. Fusaro; identical to SEQ ID NO: 8553
  CDS (1)..(1434): transl_table=11

SEQ ID NO: 96339 - protein, 477 aa, Methanosarcina barkeri str. Fusaro; identical to SEQ ID NO: 8554

SEQ ID NO: 96340 - DNA, 1434 bp, Thiobacillus denitrificans ATCC 25259; identical to SEQ ID NO: 8555
  CDS (1)..(1434): transl_table=11

SEQ ID NO: 96341 - protein, 477 aa, Thiobacillus denitrificans ATCC 25259; identical to SEQ ID NO: 8556

SEQ ID NO: 96342 - DNA, 1431 bp, Anabaena variabilis ATCC 29413; identical to SEQ ID NO: 15790
  CDS (1)..(1431): transl_table=11

SEQ ID NO: 96343 - protein, 476 aa, Anabaena variabilis ATCC 29413; identical to SEQ ID NO: 15791

SEQ ID NO: 96344 - DNA, 1770 bp, Anabaena variabilis ATCC 29413; identical to SEQ ID NO: 8557
  CDS (1)..(1770): transl_table=11

SEQ ID NO: 96345 - protein, 589 aa, Anabaena variabilis ATCC 29413; identical to SEQ ID NO: 8558

SEQ ID NO: 96346 - DNA, 1752 bp, Carboxydothermus hydrogenoformans Z-2901; identical to SEQ ID NO: 8561
  CDS (1)..(1752): transl_table=11

SEQ ID NO: 96347 - protein, 583 aa, Carboxydothermus hydrogenoformans Z-2901; identical to SEQ ID NO: 8562

SEQ ID NO: 96348 - DNA, 1437 bp, Burkholderia sp. 383
  CDS (1)..(1437): transl_table=11
atgcagcgcgccaccaagatagtcgccacgatcggcccggcttccagttcgccggagattctgctgcagatgatgcaggcgggcctcgacgtcgtgcggctcaatttttcgcacggcacggccgacgatcaccgccagcgcgccgagatggtgcgcgaggccgcccgcaaggtcggccgcgagatcgcgatcatggccgacctccagggcccgaagatccgcgtcggcaagttcgagaacggcaagacgacgctcgagccgggccaggccttcatcctcgacgcgggctgcgagctgggtaacgacgaacgcgtcggcctcgactacaaggaactgccgcgcgacctgcgcacgggcgacctgctgctgctgaacgacggcctgatcgtgctgaccgtcgagcgcgtgctcggcgacgagatccacacgatcgtcaaggtgggcggcgagctgtcgaacaacaagggcatcaaccgccagggcggcggcctgtcggcgcccgcgctgaccgcgaaggacatggaagacatccgcaccgcgatgtcgctcggcgcggacctggtggcggtgtcgttcccgaagaacgcgaccgacatggaaatggcgcgccagctcgcgaacatcgcgggcgcgccgtacggcatcaagccgaaaatgatcgcgaagatcgagcgcgcggaagcgatcccggcgctgcaaagcattctcgacgcgtccgacggcatcatggtcgcgcgtggcgacctcgcggtggaagtgggcaacgcggccgtgccggcactgcagaagcggatgatccggatggcgcgcgagtcgaacaagctcgtgatcaccgcgacgcagatgatggaatcgatgatccacgcacccgtgccgacccgcgcggaagtgtcggacgtcgcgaacgcggtgctcgacggcaccgacgcggtgatgctgtcggccgagacggccgccggcaagtatccggtcgtgacgatcgagacgatggcggccgtgtgcgtcgaggcggaaaagtcggagcacgtcgagctggacaaggatttcctcgaccgcacgttcacgcggatcgaccagtcgatcgcgatgggcgcgctgttcaccgcgtaccacctgggtgcgaaggcgatcatcgcgctgaccgaatcgggcgcgaccgcgctgtggatgtcgcgccactacacgcacgtgccgatctttgcgctgacgccgcgcgtcggcagcgagcgcacgatggcgctgtaccgcaacgtgacgccgctgcacgtcgacttcaacagcgaccgcgactcggcgctgcaggcggcgctcgagatcgtcgtcaagcagggctacgtgcagcacggcgacatggtcgtgctgaccgtcggcgagccgatggggcaggcgggtggcaccaacacgctgaagatcgtgcgggtcggcgagcactattga

SEQ ID NO: 96349 - protein, 478 aa, Burkholderia sp. 383
MQRATKIVATIGPASSSPEILLQMMQAGLDVVRLNFSHGTADDHRQRAEMVREAARKVGREIAIMADLQGPKIRVGKFENGKTTLEPGQAFILDAGCELGNDERVGLDYKELPRDLRTGDLLLLNDGLIVLTVERVLGDEIHTIVKVGGELSNNKGINRQGGGLSAPALTAKDMEDIRTAMSLGADLVAVSFPKNATDMEMARQLANIAGAPYGIKPKMIAKIERAEAIPALQSILDASDGIMVARGDLAVEVGNAAVPALQKRMIRMARESNKLVITATQMMESMIHAPVPTRAEVSDVANAVLDGTDAVMLSAETAAGKYPVVTIETMAAVCVEAEKSEHVELDKDFLDRTFTRIDQSIAMGALFTAYHLGAKAIIALTESGATALWMSRHYTHVPIFALTPRVGSERTMALYRNVTPLHVDFNSDRDSALQAALEIVVKQGYVQHGDMVVLTVGEPMGQAGGTNTLKIVRVGEHY

SEQ ID NO: 96350 - DNA, 1485 bp, Synechococcus sp. CC9605; identical to SEQ ID NO: 26640
  CDS (1)..(1485): transl_table=11

SEQ ID NO: 96351 - protein, 494 aa, Synechococcus sp. CC9605; identical to SEQ ID NO: 26641

SEQ ID NO: 96352 - DNA, 1443 bp, Geobacter metallireducens GS-15; identical to SEQ ID NO: 8563
  CDS (1)..(1443): transl_table=11

SEQ ID NO: 96353 - protein, 480 aa, Geobacter metallireducens GS-15; identical to SEQ ID NO: 8564

SEQ ID NO: 96354 - DNA, 1413 bp, Desulfovibrio desulfuricans G20
  CDS (1)..(1413): transl_table=11
atgagaacgaaaataatcgcaacagtgggccctgcctcttcgggccgggaaaccctctcacggctgattcaggccggagtacgcatattccggctcaatttttcacatggtgacgcctcgcagtttgttgatttgattgctctcatgcgacagctggaggcggaataccagacacccataaccctgctgcaggatctttccggccctaaaatccgtataggtgaactgccggacggcgccctgacgctggcaaaggacgaccgtatcctgctgggcattcccggcaaggcggcggcagacggattacccttcgttccgttcacgcacaagacaattcttgacggcatggaaccgggcgacagggtggtgctgagcgacggcggactgcagttccatgtggaaagcaaggtcggccccgatctgttctgtctggtggcaaacaacagcggtatcataacctcgcgcaagggccttgccctgccgggcaagcctatccacctggccgccctgaccgaaaaagacaaaaaagatctgcaggacgggctgcgcatgggcgtggatgccgtggcgctttcgtttgtgcagacgcccgaagatgtggccgaagccaaggcactcatcaaggcggcaggccgcaacgtgcctgtaattgccaaactggaacggcgcaacgccgtggacaggctggaagaaattctggaagtgacagacattgtcatggtggcccgcggcgatctgggtgtggaatgccccctgcccgagctgcccgccatgcagaagcgcatcatccgcgcctgcaaccgcaaggcaaaaccggttatcgttgccacgcagatgctgctttccatggtcaacagccccagccccacccgcgccgaaaccactgacgtggccaacgcggtgctggacggtgccgactgcgtgatgctgtcggaagaaacggccatgggcaacttccctgtggagacggttcagttcatgcggcagatagtccgcgcggccgaagagctgcatctggagcagtcttctgtgctgcccccgcttgatgagcagaagacacctgattttctggcctattccgcatgtctgctggccgacaagacctgcgcgggtgccatcgtggcacacagcatgtccggcagcgcggcacgggtgctatccgcccgcagaccccgtcagaccatccatgcgcttactcccgatgacgaagcgctgcgcttcctcaacttttcatggggcgtatggccccacaaggttgatgaaacactgccgggtcatcttgagcgtgccgaactctttgtggacaacgcgccgcagtttgaagacggggccgaagtggtgataacagcaggacagcccaagcccggtgaaaaaccccgcggcaccaacctggtaaaaatatacagaaaatag

SEQ ID NO: 96355 - protein, 470 aa, Desulfovibrio desulfuricans G20
MRTKIIATVGPASSGRETLSRLIQAGVRIFRLNFSHGDASQFVDLIALMRQLEAEYQTPITLLQDLSGPKIRIGELPDGALTLAKDDRILLGIPGKAAADGLPFVPFTHKTILDGMEPGDRVVLSDGGLQFHVESKVGPDLFCLVANNSGIITSRKGLALPGKPIHLAALTEKDKKDLQDGLRMGVDAVALSFVQTPEDVAEAKALIKAAGRNVPVIAKLERRNAVDRLEEILEVTDIVMVARGDLGVECPLPELPAMQKRIIRACNRKAKPVIVATQMLLSMVNSPSPTRAETTDVANAVLDGADCVMLSEETAMGNFPVETVQFMRQIVRAAEELHLEQSSVLPPLDEQKTPDFLAYSACLLADKTCAGAIVAHSMSGSAARVLSARRPRQTIHALTPDDEALRFLNFSWGVWPHKVDETLPGHLERAELFVDNAPQFEDGAEVVITAGQPKPGEKPRGTNLVKIYRK

SEQ ID NO: 96356 - DNA, 1785 bp, Synechococcus elongatus PCC 7942; identical to SEQ ID NO: 70240
  CDS (1)..(1785): transl_table=11

SEQ ID NO: 96357 - protein, 594 aa, Synechococcus elongatus PCC 7942; identical to SEQ ID NO: 70241

SEQ ID NO: 96358 - DNA, 1437 bp, Rhodospirillum rubrum ATCC 11170; identical to SEQ ID NO: 8567
  CDS (1)..(1437): transl_table=11

SEQ ID NO: 96359 - protein, 478 aa, Rhodospirillum rubrum ATCC 11170; identical to SEQ ID NO: 8568

SEQ ID NO: 96360 - DNA, 1749 bp, Moorella thermoacetica ATCC 39073; identical to SEQ ID NO: 8569
  CDS (1)..(1749): transl_table=11

SEQ ID NO: 96361 - protein, 582 aa, Moorella thermoacetica ATCC 39073; identical to SEQ ID NO: 8570

SEQ ID NO: 96362 - DNA, 1695 bp, Burkholderia thailandensis E264; identical to SEQ ID NO: 26644
  CDS (1)..(1695): transl_table=11

SEQ ID NO: 96363 - protein, 564 aa, Burkholderia thailandensis E264; identical to SEQ ID NO: 26645

SEQ ID NO: 96364 - DNA, 1428 bp, Syntrophus aciditrophicus SB; identical to SEQ ID NO: 8571
  CDS (1)..(1428): transl_table=11

SEQ ID NO: 96365 - protein, 475 aa, Syntrophus aciditrophicus SB; identical to SEQ ID NO: 8572

SEQ ID NO: 96366 - DNA, 1416 bp, Frankia sp. CcI3; identical to SEQ ID NO: 8573
  CDS (1)..(1416): transl_table=11

SEQ ID NO: 96367 - protein, 471 aa, Frankia sp. CcI3; identical to SEQ ID NO: 8574

SEQ ID NO: 96368 - DNA, 1455 bp, Novosphingobium aromaticivorans DSM 12444; identical to SEQ ID NO: 8575
  CDS (1)..(1455): transl_table=11

SEQ ID NO: 96369 - protein, 484 aa, Novosphingobium aromaticivorans DSM 12444; identical to SEQ ID NO: 8576

SEQ ID NO: 96370 - DNA, 1437 bp, Francisella tularensis subsp. holarctica; identical to SEQ ID NO: 8577
  CDS (1)..(1437): transl_table=11

SEQ ID NO: 96371 - protein, 478 aa, Francisella tularensis subsp. holarctica; identical to SEQ ID NO: 8578

SEQ ID NO: 96372 - DNA, 1734 bp, Desulfitobacterium hafniense Y51; identical to SEQ ID NO: 8579
  CDS (1)..(1734): transl_table=11

SEQ ID NO: 96373 - protein, 577 aa, Desulfitobacterium hafniense Y51; identical to SEQ ID NO: 8580

SEQ ID NO: 96374 - DNA, 1443 bp, Saccharophagus degradans 2-40; identical to SEQ ID NO: 8581
  CDS (1)..(1443): transl_table=11

SEQ ID NO: 96375 - protein, 480 aa, Saccharophagus degradans 2-40; identical to SEQ ID NO: 8582

SEQ ID NO: 96376 - DNA, 1443 bp, Methylobacillus flagellatus KT; identical to SEQ ID NO: 8583
  CDS (1)..(1443): transl_table=11

SEQ ID NO: 96377 - protein, 480 aa, Methylobacillus flagellatus KT; identical to SEQ ID NO: 8584

SEQ ID NO: 96378 - DNA, 1437 bp, Burkholderia xenovorans LB400; identical to SEQ ID NO: 16531
  CDS (1)..(1437): transl_table=11

SEQ ID NO: 96379 - protein, 478 aa, Burkholderia xenovorans LB400; identical to SEQ ID NO: 16532

SEQ ID NO: 96380 - DNA, 1434 bp, Methanococcoides burtonii DSM 6242
  CDS (1)..(1434): transl_table=11
atgaatctgccggaccacaagaccaagatcgtatgtactataggacctgcttcttcttcggaagaaatgctgcgtgagcttatctttgcaggaatgaacgtggcgaggatcaacttctcgcatggcagtttcgaggaccatagtaaagttatccggctgattaaaaagctgtgtgatgagctcaacgttattgtttcggtgatggcagaccttccgggaccaaagattcgtgtaggcgagataaaagattcccctataaatttacagaagggggataaggtgaaactgaccactaaaaggatcgtaggttcaaaggaccttattccggtggactttgataagcttccttactgtatcgccaaaaaatctgatgtttatttcaatgatggtttcattcagatgaggtgcagtggcatttgtagcaatgaggctgaatgtgaagtgatcgtaggtggtcagctctcatctcacaagggcgtgaatcttcccggtatcgatcttttacttgaccccgtcaccgaaaaggaccttaagatcctggattttgcattggatgagggggtgaactgcttcagtgtctcgttcatcgagcagggttccgacatacagaagataagggaccatgctactaaaaagggaaggtcagtattccttgtggcgaagatcgaaagaggtcattcggttgggaatatcgatgacatcatggaagctaccgatgccttgatgatagcacgtggtgatcttggagtggaaattccaatagaggaagttcccatcgtacagaaagaactgatacataaggccaatcttcgtggaatgccggtgataaccgctacgcacatgctcgaatccatgaccgataacgtgcgaccaacacgtgcagaagctacggatgttgcaaatgctattcttgatggcaccgatgctatcatgctttccggagaaaccgcagttggtaagtatccgttggaggccgttcatacgatggtcaggatcgcaaggaagactgaagcatggcgtgatagtacaggtaacggaatgggcaacatcaggaacgccattggtgagactgagatgggtataagtgatgtcatttcattgcaggtatatgatgctattcgtaaattatccatagaactcgttgtgacacccactcactccggggctaccccaagacgtatttcacgttttaagccggataactggataatagccatgagccatgttgagcttacctgtgaacaacttgcatattcctatggtgtctatccaatttctgtatctgatagcagtgaagatcttgaaaagaaaatgcttggtgccctcctgtccagagggattggaaagtccggcaacacgatcgttctgacacaaggctcttccggcggcaccaatctactgaaaataatagagcttgatcagttggtcgagtga

SEQ ID NO: 96381 - protein, 477 aa, Methanococcoides burtonii DSM 6242
MNLPDHKTKIVCTIGPASSSEEMLRELIFAGMNVARINFSHGSFEDHSKVIRLIKKLCDELNVIVSVMADLPGPKIRVGEIKDSPINLQKGDKVKLTTKRIVGSKDLIPVDFDKLPYCIAKKSDVYFNDGFIQMRCSGICSNEAECEVIVGGQLSSHKGVNLPGIDLLLDPVTEKDLKILDFALDEGVNCFSVSFIEQGSDIQKIRDHATKKGRSVFLVAKIERGHSVGNIDDIMEATDALMIARGDLGVEIPIEEVPIVQKELIHKANLRGMPVITATHMLESMTDNVRPTRAEATDVANAILDGTDAIMLSGETAVGKYPLEAVHTMVRIARKTEAWRDSTGNGMGNIRNAIGETEMGISDVISLQVYDAIRKLSIELVVTPTHSGATPRRISRFKPDNWIIAMSHVELTCEQLAYSYGVYPISVSDSSEDLEKKMLGALLSRGIGKSGNTIVLTQGSSGGTNLLKIIELDQLVE

SEQ ID NO: 96382 - DNA, 1440 bp, Ralstonia metallidurans CH34; identical to SEQ ID NO: 8585
  CDS (1)..(1440): transl_table=11

SEQ ID NO: 96383 - protein, 479 aa, Ralstonia metallidurans CH34; identical to SEQ ID NO: 8586

SEQ ID NO: 96384 - DNA, 1419 bp, Ralstonia metallidurans CH34
  CDS (1)..(1419): transl_table=11
atgcgccgcaaccgcaacgccaagatcgtcgccacgctcggcccgtccagttccgacaaggacaccatccgccggctgttcgccgccggtgtcgatgtctttcgcctgaacttcagtcacggcgacgaggcggcgcatcgggccagcttcgccatcctgcgtgaactcgagcgcgaggccggccgcccgattggcatcctggccgacctgcagggtccgaagctgcgcgtgggcactttcgccgcgggttcggtgatgctggacgaatcgcagccgttccgcctcgagctcgacacggcgccgggtgacgcgcgccgcgtcggcctgccgcatccggagatcttcgcggcgctggcgccgggcgccgaactgctgctcgacgacggcaagctgcggctgatcgtcgaacgctgcggcgccgacttcgccgatacgcgcgtggtggccggcggcaagctgtccgatcgcaagggcgtcaacgtgcccggcgtgctgctacccatcagcgcactgaccgccaaggaccggcgcgatctggcgctggcgctggacctcggtgcggactggatcgccctgtcgttcgtgcagcggcccgaagacgtcgtcgaggcgcgaaagctgatcggcgaacgcgcggccatcgttgcgaagctcgagaagccgtcggcggtcgaacaactggaagccatcgccgaatgcgccgacgccgtgatggtggcgcgcggtgacctgggcgtggagttgccggccgagcgcgtgcccgggatacagaaacgcatcctccgcacctgccgccggctcggacggccggtgatcgtggccacgcagatgcttgaatcgatggtgacgagcccggtgcctacgcgcgccgaggcctcggacgtggccactgcgatctacgacggcgccgacgcggtcatgttgtccgccgaatccgctgccggccgctatccggtcgaggcggtggacatgatgagccgcctgatcaccgaagtggagggcgatccgcagtacctgcagctgatgaacgcgtcgcgcccgagcgcgccggctggcgcgggtgccgccgacgccgtgtgctgcgccgtgcgccatgccgtcgcgctgatgcatgcgagcgccatcgtctgctacacgagctcgggccacaccagcctgcgtgtcgcccgtgagcgtcccgaggcgccggtactgagcctgacgccgcatttgcgcgtcgcgcgccgcatggcgctcgcctggggcatccactcggtgcacatcgaggacgtggccgatgtcgatcagatgaccgcgaaagcctgcgcggtcgcctgccaggaaggattcgcccagggcgggcagaccctcgtcgtcattgccggcgtgccgttcggcacgcccggcacgacgaatctcatgcgcatcgcgacggtgtga

SEQ ID NO: 96385 - protein, 472 aa, Ralstonia metallidurans CH34
MRRNRNAKIVATLGPSSSDKDTIRRLFAAGVDVFRLNFSHGDEAAHRASFAILRELEREAGRPIGILADLQGPKLRVGTFAAGSVMLDESQPFRLELDTAPGDARRVGLPHPEIFAALAPGAELLLDDGKLRLIVERCGADFADTRVVAGGKLSDRKGVNVPGVLLPISALTAKDRRDLALALDLGADWIALSFVQRPEDVVEARKLIGERAAIVAKLEKPSAVEQLEAIAECADAVMVARGDLGVELPAERVPGIQKRILRTCRRLGRPVIVATQMLESMVTSPVPTRAEASDVATAIYDGADAVMLSAESAAGRYPVEAVDMMSRLITEVEGDPQYLQLMNASRPSAPAGAGAADAVCCAVRHAVALMHASAIVCYTSSGHTSLRVARERPEAPVLSLTPHLRVARRMALAWGIHSVHIEDVADVDQMTAKACAVACQEGFAQGGQTLVVIAGVPFGTPGTTNLMRIATV

SEQ ID NO: 96386 - DNA, 1467 bp, Ralstonia metallidurans CH34; identical to SEQ ID NO: 16533
  CDS (1)..(1467): transl_table=11

SEQ ID NO: 96387 - protein, 488 aa, Ralstonia metallidurans CH34; identical to SEQ ID NO: 16534

SEQ ID NO: 96388 - DNA, 1530 bp, Acidobacteria bacterium Ellin345; identical to SEQ ID NO: 8587
  CDS (1)..(1530): transl_table=11

SEQ ID NO: 96389 - protein, 509 aa, Acidobacteria bacterium Ellin345; identical to SEQ ID NO: 8588

SEQ ID NO: 96390 - DNA, 1434 bp, Myxococcus xanthus DK 1622; identical to SEQ ID NO: 8591
  CDS (1)..(1434): transl_table=11

SEQ ID NO: 96391 - protein, 477 aa, Myxococcus xanthus DK 1622; identical to SEQ ID NO: 8592

SEQ ID NO: 96392 - DNA, 1434 bp, Rubrobacter xylanophilus DSM 9941; identical to SEQ ID NO: 8593
  CDS (1)..(1434): transl_table=11

SEQ ID NO: 96393 - protein, 477 aa, Rubrobacter xylanophilus DSM 9941; identical to SEQ ID NO: 8594

SEQ ID NO: 96394 - DNA, 1437 bp, Mesorhizobium sp. BNC1; identical to SEQ ID NO: 8595
  CDS (1)..(1437): transl_table=11

SEQ ID NO: 96395 - protein, 478 aa, Mesorhizobium sp. BNC1; identical to SEQ ID NO: 8596

SEQ ID NO: 96396 - DNA, 1413 bp, Cytophaga hutchinsonii ATCC 33406; identical to SEQ ID NO: 8597
  CDS (1)..(1413): transl_table=11

SEQ ID NO: 96397 - protein, 470 aa, Cytophaga hutchinsonii ATCC 33406; identical to SEQ ID NO: 8598

SEQ ID NO: 96398 - DNA, 1404 bp, Clostridium perfringens ATCC 13124; identical to SEQ ID NO: 15822
  CDS (1)..(1404): transl_table=11

SEQ ID NO: 96399 - protein, 467 aa, Clostridium perfringens ATCC 13124; identical to SEQ ID NO: 15823

SEQ ID NO: 96400 - DNA, 1419 bp, Rhodococcus sp. RHA1; identical to SEQ ID NO: 16543
  CDS (1)..(1419): transl_table=11

SEQ ID NO: 96401 - protein, 472 aa, Rhodococcus sp. RHA1; identical to SEQ ID NO: 16544

SEQ ID NO: 96402 - DNA, 1473 bp, Rhodococcus sp. RHA1; identical to SEQ ID NO: 8599
  CDS (1)..(1473): transl_table=11

SEQ ID NO: 96403 - protein, 490 aa, Rhodococcus sp. RHA1; identical to SEQ ID NO: 8600

SEQ ID NO: 96404 - DNA, 1512 bp, Rhodococcus sp. RHA1; identical to SEQ ID NO: 15824
  CDS (1)..(1512): transl_table=11

SEQ ID NO: 96405 - protein, 503 aa, Rhodococcus sp. RHA1; identical to SEQ ID NO: 15825

SEQ ID NO: 96406 - DNA, 1764 bp, Trichodesmium erythraeum IMS101; identical to SEQ ID NO: 8603
  CDS (1)..(1764): transl_table=11

SEQ ID NO: 96407 - protein, 587 aa, Trichodesmium erythraeum IMS101; identical to SEQ ID NO: 8604

SEQ ID NO: 96408 - DNA, 1440 bp, Shewanella sp. MR-4; identical to SEQ ID NO: 8605
  CDS (1)..(1440): transl_table=11

SEQ ID NO: 96409 - protein, 479 aa, Shewanella sp. MR-4; identical to SEQ ID NO: 8606

SEQ ID NO: 96410 - DNA, 1455 bp, Alkalilimnicola ehrlichei MLHE-1; identical to SEQ ID NO: 8607
  CDS (1)..(1455): transl_table=11

SEQ ID NO: 96411 - protein, 484 aa, Alkalilimnicola ehrlichei MLHE-1; identical to SEQ ID NO: 8608

SEQ ID NO: 96412 - DNA, 1440 bp, Rhizobium leguminosarum bv. viciae 3841; identical to SEQ ID NO: 8611
  CDS (1)..(1440): transl_table=11

SEQ ID NO: 96413 - protein, 479 aa, Rhizobium leguminosarum bv. viciae 3841; identical to SEQ ID NO: 8612

SEQ ID NO: 96414 - DNA, 1434 bp, Pseudomonas aeruginosa UCBPP-PA14; identical to SEQ ID NO: 16547
  CDS (1)..(1434): transl_table=11

SEQ ID NO: 96415 - protein, 477 aa, Pseudomonas aeruginosa UCBPP-PA14; identical to SEQ ID NO: 16548

SEQ ID NO: 96416 - DNA, 1452 bp, Pseudomonas aeruginosa UCBPP-PA14; identical to SEQ ID NO: 8613
  CDS (1)..(1452): transl_table=11

SEQ ID NO: 96417 - protein, 483 aa, Pseudomonas aeruginosa UCBPP-PA14; identical to SEQ ID NO: 8614

SEQ ID NO: 96418 - DNA, 1434 bp, Oenococcus oeni PSU-1; identical to SEQ ID NO: 8617
  CDS (1)..(1434): transl_table=11

SEQ ID NO: 96419 - protein, 477 aa, Oenococcus oeni PSU-1; identical to SEQ ID NO: 8618

SEQ ID NO: 96420 - DNA, 1413 bp, Solibacter usitatus Ellin6076; identical to SEQ ID NO: 8619
  CDS (1)..(1413): transl_table=11

SEQ ID NO: 96421 - protein, 470 aa, Solibacter usitatus Ellin6076; identical to SEQ ID NO: 8620

SEQ ID NO: 96422 - DNA, 1710 bp, Magnetococcus sp. MC-1; identical to SEQ ID NO: 15840
  CDS (1)..(1710): transl_table=11

SEQ ID NO: 96423 - protein, 569 aa, Magnetococcus sp. MC-1; identical to SEQ ID NO: 15841

SEQ ID NO: 96424 - DNA, 1419 bp, Mycobacterium smegmatis str. MC2 155; identical to SEQ ID NO: 26690
  CDS (1)..(1419): transl_table=11

SEQ ID NO: 96425 - protein, 472 aa, Mycobacterium smegmatis str. MC2 155; identical to SEQ ID NO: 26691

SEQ ID NO: 96426 - DNA, 1464 bp, Nocardioides sp. JS614; identical to SEQ ID NO: 26692
  CDS (1)..(1464): transl_table=11

SEQ ID NO: 96427 - protein, 487 aa, Nocardioides sp. JS614; identical to SEQ ID NO: 26693

SEQ ID NO: 96428 - DNA, 1443 bp, Azoarcus sp. BH72; identical to SEQ ID NO: 8625
  CDS (1)..(1443): transl_table=11

SEQ ID NO: 96429 - protein, 480 aa, Azoarcus sp. BH72; identical to SEQ ID NO: 8626

SEQ ID NO: 96430 - DNA, 1437 bp, Acidovorax sp. JS42; identical to SEQ ID NO: 8627
  CDS (1)..(1437): transl_table=11

SEQ ID NO: 96431 - protein, 478 aa, Acidovorax sp. JS42; identical to SEQ ID NO: 8628

SEQ ID NO: 96432 - DNA, 1770 bp, Nostoc punctiforme PCC 73102
  CDS (1)..(1770): transl_table=11
atgcaattaagagattctctgcgccggacaaaaattgtcgctactattggccccgccactagtagtcctgaaatgctcaaggcgattattgaagcgggagccacgacgctacggctaaacttctcccacggaactcatgccgaccatcagcgtagtattcgcttaattcggcaaaccgcttttgaattaaatcaaccagtggctattctccaagacttgcagggcccaaaaattcgcttggggaagtttgacaacgggtctatagttttggcaaaaggcgatcgcttcaccttgacaaaccgtccggtggtaggtacgcaggaaattagctgcgtcacctacgattatttagccgaagaagtcccagttggtgcaaaaatcctcctcgatgatggacgagtagaaatggtcgtggaggagattaaccgagacaaaggtgatttgcattgtcgcattaccgtgcctggtaaactttctaacaacaaaggtgtaaactttcccggcgtttacctgtcaattaaggcaatgaccgacaaagaccgagaggatctgatgtttggtctagatcaaggtgtagattgggtggcactttcctttgtccgcaatccgcaggacatgatcgaaattaaagaactaatttctagtacaggcaagcaagtgccagtggttgccaaaattgaaaaacatgaagccattgaacaaatggaggcagttctggctttgtgtgatggcgtgatggttgccagaggtgatttaggcgtagaattgcccgcagaagatgttccggtactccaaaagcggctaattgctacagcaaatcgcttagggattcccatcatcaccgccacccaaatgttagacagcatggtgagcaatccccgtcccactcgcgcggaagtgtcagatgtggcaaacgcgattttagatggcacagacgcggtgatgctctccaatgaaaccgccgtcggtagcttccctgtagaagcagtagcgacaatggcgcggattgccgagcggatggagcaggaagaagcccaacacttaaacttgcgttccgtgagagattcccggcgctccattcctaatgcgattagtcaagctgtaggtcaaattgccgaacaactaggtgcagctgcaattatgaccttaacgcaaactggggcaactgctcgcaatgtctctaagttccgtcccaatacaccgattttggctgttaccccccatgtgaatgtagcgcggcagctacaaatggtgtggggagtaaaaccgctattggtgctaggattaccttccactggtcagaccttccaagctgcgattaatgtggctcaggagttgaagttactgtcggagggagatttagtagtaatgactgctggcacactccagggaatttccggctccacagatttgattaaggttgaggtggtgacggcggtattaggtcacggaattggattaggacaaggtttagtgagtggtcgcgcacgggtagctaatactggcatggatgttagtaactttaatcctggagacatattagttgcaccgcgcactagtgccgattttgtcgaggctattcgtaaatctgcggggattattacggaagaggaaagtctcacaagtcatgctgccgttattggcttacgtctcggcgtgccagtgattgttggcgtgaagcaggcaacgcaggtgattcgcgatggagcgattataacgctggatctgcaacggggtttgatttactctggggcagtgagaacgccttag

SEQ ID NO: 96433 - protein, 589 aa, Nostoc punctiforme PCC 73102
MQLRDSLRRTKIVATIGPATSSPEMLKAIIEAGATTLRLNFSHGTHADHQRSIRLIRQTAFELNQPVAILQDLQGPKIRLGKFDNGSIVLAKGDRFTLTNRPVVGTQEISCVTYDYLAEEVPVGAKILLDDGRVEMVVEEINRDKGDLHCRITVPGKLSNNKGVNFPGVYLSIKAMTDKDREDLMFGLDQGVDWVALSFVRNPQDMIEIKELISSTGKQVPVVAKIEKHEAIEQMEAVLALCDGVMVARGDLGVELPAEDVPVLQKRLIATANRLGIPIITATQMLDSMVSNPRPTRAEVSDVANAILDGTDAVMLSNETAVGSFPVEAVATMARIAERMEQEEAQHLNLRSVRDSRRSIPNAISQAVGQIAEQLGAAAIMTLTQTGATARNVSKFRPNTPILAVTPHVNVARQLQMVWGVKPLLVLGLPSTGQTFQAAINVAQELKLLSEGDLVVMTAGTLQGISGSTDLIKVEVVTAVLGHGIGLGQGLVSGRARVANTGMDVSNFNPGDILVAPRTSADFVEAIRKSAGIITEEESLTSHAAVIGLRLGVPVIVGVKQATQVIRDGAIITLDLQRGLIYSGAVRTP

SEQ ID NO: 96434 - DNA, 1431 bp, Nostoc punctiforme PCC 73102
  CDS (1)..(1431): transl_table=11
atgcgtcgaaccaaaatcatttgtactgttgggcccgctacatctgcacccgaaaatctgcgaggcttggtagaagctggaatgaatgtggcgcggctgaatttttcccacggcgcttacgaattccatgcccaaactgctcactatctcagacaaattagtaatgagcagcaaaagccgatcgcaattatgcaagacctctgtggtcccaagattcgtttgggaactttaccaccggaagggttaaatttagaagctggtactgaagttacttttgttttgcaagaaaagggtgagagtattgacgaactccccctaccattgccgactctgttcgcaatggtgcgaccaggtgaaccgattttaattaatgatggtcgcgtcaagttaattgttaccgatcgcgatgccgatcgcattcgcgcccaagtgaaaactggcgggttaatttccacacataaaggagtaaatctaccacaaactcctttacctgttagttccatcaccgaaaaagacttactggatctacgctttgggattcagttgggtgtagattgggtagcggtgtccttcgtgcaatcaccacaagacttagaacccgccaagcgcatgattgaagcggctggtgcttccatccgcttaattgccaaaatcgaaagagcagaagcactagaaaactttgattccattctgaaagttgccgacgcaattatgattgcccgtggcgatttaggggtggaagtgccaattcacgaagtacccctcattcaaaaagatattattcgccgttgcaatcgtgctggcaaaccggtgattacagccacccaaatgctagagtcgatgattagcgcccccgatcccacccgcgccgaagcaactgatgttgccaactccatcttagatggtacggatgcggtaatgctctctggtgaaacagctgtcggacaatatcccatcgccgccgtccagatgatgcacaacatcgccgtgcggacagaacaggctctagatgagggtagtaaacatgcttggtgtcatgaagcaggcagtcttagcgttaccgaatctgtagcagaatctgtgtgtcgcatcgcttatgaaacaggttcacgggcaattctctgtaacacttcatcaggaaatacagcgagaatggtgtctaaatatcggccgacttctcccattattgccctcacctccgatatcaccgcttatcgccaactagcgctttcttggggtgtggaagctttgctgatcccaccagtccaccatgctgaagagatgtttaccaatgtggtgaacacagttgtagatatgggtctagccaataagggcgataaagtagtgattacctctggtgttccaattggtaaatcgggcacaactagtttaatcaaagtgcattccattggacagccaatatccgcataa

SEQ ID NO: 96435 - protein, 476 aa, Nostoc punctiforme PCC 73102
MRRTKIICTVGPATSAPENLRGLVEAGMNVARLNFSHGAYEFHAQTAHYLRQISNEQQKPIAIMQDLCGPKIRLGTLPPEGLNLEAGTEVTFVLQEKGESIDELPLPLPTLFAMVRPGEPILINDGRVKLIVTDRDADRIRAQVKTGGLISTHKGVNLPQTPLPVSSITEKDLLDLRFGIQLGVDWVAVSFVQSPQDLEPAKRMIEAAGASIRLIAKIERAEALENFDSILKVADAIMIARGDLGVEVPIHEVPLIQKDIIRRCNRAGKPVITATQMLESMISAPDPTRAEATDVANSILDGTDAVMLSGETAVGQYPIAAVQMMHNIAVRTEQALDEGSKHAWCHEAGSLSVTESVAESVCRIAYETGSRAILCNTSSGNTARMVSKYRPTSPIIALTSDITAYRQLALSWGVEALLIPPVHHAEEMFTNVVNTVVDMGLANKGDKVVITSGVPIGKSGTTSLIKVHSIGQPISA

SEQ ID NO: 96436 - DNA, 1443 bp, Bifidobacterium longum DJO10A
  CDS (1)..(1443): transl_table=11
atgcgtaaagccaagatcgtagacaccatcggtccttccaccgaggattacgacaacctcctgaagctcgttgaagctggtatggacgttgctcgtctgaaccgctcccacggcacccccgaggatcacctcaaggtctacaacaacgtgcgcaaggccagcgaagccactggtcgcaacgttgccgcgctcgttgatttgcagggcccgaagattcgctgcggttggttcaagaagaacgccgatggcgaagacaaggttcagctgcagctcggccaggaattcgtcatcaccactgatgacgtcgagggcgacgagcacatcacctccaccaccttcaagggcctgccgggcgattgccacccgggcgacccgatcctgatcgacgacggcaaggtccgtcttgaggtcaccaaggtcgagggcaacaacgtgtacaccaaggtcgtcgtggccggtcctgtgtcctcccacaagggcatcaacctgccgggcgtcgccgtctccctgccggctctgaccgagaaggatgaggccgacctgcgttgggccatccgcaccggtgccgacgtcatcgccatgtccttcgtgcgtttcgccaccgacatcgaccgcgcccacgagatcatggacgaggaaggccgtcgcatcccgatcatcgccaagatcgagaagccgcaggctctggagaacctcgaagagatcgtcaagaccttcgacggcgtcatggccgcccgtggcgacatggccgttgagtgcccgctggaagaggtcccgctggccactaagcgcatcatcgagctggctcgccaatacgccaagccggtcatcgtggctaccgaagtcctcggctccatggtgaactccccggttccgactcgtgcagaggcttccgactgcgccaacgccatcctcgacggctccgacgccaccatgacctccaacgagaccgccgttggtaagtacccggatgtgaccgtggccaccatggcccgtatctccggctacgccaccgaccacggcttcgaccgcatcccggagctcaagaaccttgacatgtcctccaccggcgctgtctcctccgccgctgtggacctggccgacaagctcaacgccaaggccatcgttgcttacacccagaccggcgccaccgtgcaccgcgtctcccgtgagcgtccggccgccccgatctacggcctgaccagcaacgagcacacctaccactggctggctctgtcctggggcaccgaagccttcctgctcaaggaggactaccacgacaagtcccgcaaggatctcatgatctacacggacaaggtcctcaaggatgccggcaaggttgctgacggcgacaagatcgtcatcctgagctctgctcagggcgagcaccagccgggccgcactgactccatctacgtgcacaccgttggcgcttgcgactga

SEQ ID NO: 96437 - protein, 480 aa, Bifidobacterium longum DJO10A
MRKAKIVDTIGPSTEDYDNLLKLVEAGMDVARLNRSHGTPEDHLKVYNNVRKASEATGRNVAALVDLQGPKIRCGWFKKNADGEDKVQLQLGQEFVITTDDVEGDEHITSTTFKGLPGDCHPGDPILIDDGKVRLEVTKVEGNNVYTKVVVAGPVSSHKGINLPGVAVSLPALTEKDEADLRWAIRTGADVIAMSFVRFATDIDRAHEIMDEEGRRIPIIAKIEKPQALENLEEIVKTFDGVMAARGDMAVECPLEEVPLATKRIIELARQYAKPVIVATEVLGSMVNSPVPTRAEASDCANAILDGSDATMTSNETAVGKYPDVTVATMARISGYATDHGFDRIPELKNLDMSSTGAVSSAAVDLADKLNAKAIVAYTQTGATVHRVSRERPAAPIYGLTSNEHTYHWLALSWGTEAFLLKEDYHDKSRKDLMIYTDKVLKDAGKVADGDKIVILSSAQGEHQPGRTDSIYVHTVGACD

SEQ ID NO: 96438 - DNA, 1401 bp, Actinobacillus pleuropneumoniae serovar 1 str. 4074; identical to SEQ ID NO: 8629
  CDS (1)..(1401): transl_table=11

SEQ ID NO: 96439 - protein, 466 aa, Actinobacillus pleuropneumoniae serovar 1 str. 4074; identical to SEQ ID NO: 8630

SEQ ID NO: 96440 - DNA, 1428 bp, Fusobacterium nucleatum subsp. vincentii ATCC 49256; identical to SEQ ID NO: 15846
  CDS (1)..(1428): transl_table=11

SEQ ID NO: 96441 - protein, 475 aa, Fusobacterium nucleatum subsp. vincentii ATCC 49256; identical to SEQ ID NO: 15847

SEQ ID NO: 96442 - DNA, 1749 bp, Exiguobacterium sibiricum 255-15; identical to SEQ ID NO: 15850
  CDS (1)..(1749): transl_table=11

SEQ ID NO: 96443 - protein, 582 aa, Exiguobacterium sibiricum 255-15; identical to SEQ ID NO: 15851

SEQ ID NO: 96444 - DNA, 1569 bp, Kineococcus radiotolerans SRS30216; identical to SEQ ID NO: 8633
  CDS (1)..(1569): transl_table=11

SEQ ID NO: 96445 - protein, 522 aa, Kineococcus radiotolerans SRS30216; identical to SEQ ID NO: 8634

SEQ ID NO: 96446 - DNA, 1467 bp, Xylella fastidiosa Ann-1
  CDS (1)..(1467): transl_table=11
atgtctgaacgccagcgccgtaccaggattcttgccactcttgggccagcgacagatccgcccggtgtgcttgatgcgctgtttaaggcgggagttaatgtggtgcggctgaatttcagccatggcgatgtttcggatcaggccaggcgtgttgctgaagtgcgtgcggcggcggcgcatgtgggcgttgagattggcattcttgcggatctacccggtccgaagatccgtattggacgttttaccggggggaaagtgcggcttgtggctggtgcgcgctttgatctgcttgccgatagcaatgcgtcgctgggggatgcgactcaagttggggtcagttatctggggttgccgcaggatgtcgccgccggagatgtgttgttactggatgatgggctcatgcaattgcaagtggtgcaagtgcagggtgcgcggattgtgacgacggttcttaacgatggtgtgttgtccgaccgtaaggggctgaataagcaaggcggcggtttgtcgctgggtgcgctgacggatcgtgatcgcgaactgattcgtatcgttgccaggatggggatcgactttattgcagtttcgttttgtcgtcatgctgaagagatgcatgaggcacgtcgcattgctcgggagtgcggctgtgatgctgcgttggtgtctaagatcgagcgtgctgaggctatcgtgaatctcgccgagattgttgcggcttcggatgtggtgatggttgcgcgtggtgatttaggtgtggagattggtgacgctcaattgccgggcttgcaaaaaaagatcatcaaagaagcgttgttacagaacaaggtggtgattactgccacgcagatgctgcaatcaatggttgaaagtccgatgccgacccgtgctgaggtgctggatgtggccaatgcggtgattgatgggaccgatgcggtgatgctgtcggctgaaacggcgacaggtgattatccagtcaaggcagtagaggcgatggcgcgtatctgtctgggagcggaacaccagtttgagtttgatactgattatgagatggcgcagcgtaatttgcagcgtgcagatcatgcgattgcaatggcaacgatgttcttatctgagcacatttgccttggtggtgtggttgcgttgacggagtccggtacgacgccgcggtttctctcgcggttccggtcgcacgtcccgatctatgcgtttacgcgtcacgaggatgtgcggcggcgcatggttctgatgcgtggtgtatttccgatgcgttttgacagccgtggtttgacgccgcgtgaggcagctagggcgacaatccgtcttttggtggaatgtggttgtatgagtccgggtgatcgtgtggtgttcacgagcggcgagcatatggaaacgcttggcgcaaccaatacactgcgtttacttgaagtaggcgctgatgggtgtgtcagtggtttgtgggaactctaa

SEQ ID NO: 96447 - protein, 488 aa, Xylella fastidiosa Ann-1
MSERQRRTRILATLGPATDPPGVLDALFKAGVNVVRLNFSHGDVSDQARRVAEVRAAAAHVGVEIGILADLPGPKIRIGRFTGGKVRLVAGARFDLLADSNASLGDATQVGVSYLGLPQDVAAGDVLLLDDGLMQLQVVQVQGARIVTTVLNDGVLSDRKGLNKQGGGLSLGALTDRDRELIRIVARMGIDFIAVSFCRHAEEMHEARRIARECGCDAALVSKIERAEAIVNLAEIVAASDVVMVARGDLGVEIGDAQLPGLQKKIIKEALLQNKVVITATQMLQSMVESPMPTRAEVLDVANAVIDGTDAVMLSAETATGDYPVKAVEAMARICLGAEHQFEFDTDYEMAQRNLQRADHAIAMATMFLSEHICLGGVVALTESGTTPRFLSRFRSHVPIYAFTRHEDVRRRMVLMRGVFPMRFDSRGLTPREAARATIRLLVECGCMSPGDRVVFTSGEHMETLGATNTLRLLEVGADGCVSGLWEL

SEQ ID NO: 96448 - DNA, 1467 bp, Xylella fastidiosa Ann-1; identical to SEQ ID NO: 15852
  CDS (1)..(1467): transl_table=11

SEQ ID NO: 96449 - protein, 488 aa, Xylella fastidiosa Ann-1; identical to SEQ ID NO: 15853

SEQ ID NO: 96450 - DNA, 1431 bp, Croceibacter atlanticus HTCC2559; identical to SEQ ID NO: 8635
  CDS (1)..(1431): transl_table=11

SEQ ID NO: 96451 - protein, 476 aa, Croceibacter atlanticus HTCC2559; identical to SEQ ID NO: 8636

SEQ ID NO: 96452 - DNA, 1446 bp, Roseovarius nubinhibens ISM; identical to SEQ ID NO: 8637
  CDS (1)..(1446): transl_table=11

SEQ ID NO: 96453 - protein, 481 aa, Roseovarius nubinhibens ISM; identical to SEQ ID NO: 8638

SEQ ID NO: 96454 - DNA, 1446 bp, Oceanicola batsensis HTCC2597; identical to SEQ ID NO: 8639
  CDS (1)..(1446): transl_table=11

SEQ ID NO: 96455 - protein, 481 aa, Oceanicola batsensis HTCC2597; identical to SEQ ID NO: 8640

SEQ ID NO: 96456 - DNA, 1488 bp, Erythrobacter sp. NAP1; identical to SEQ ID NO: 8641
  CDS (1)..(1488): transl_table=11

SEQ ID NO: 96457 - protein, 495 aa, Erythrobacter sp. NAP1; identical to SEQ ID NO: 8642

SEQ ID NO: 96458 - DNA, 1437 bp, Pseudoalteromonas tunicata D2; identical to SEQ ID NO: 8645
  CDS (1)..(1437): transl_table=11

SEQ ID NO: 96459 - protein, 478 aa, Pseudoalteromonas tunicata D2; identical to SEQ ID NO: 8646

SEQ ID NO: 96460 - DNA, 1413 bp, Photobacterium sp. SKA34; identical to SEQ ID NO: 15858
  CDS (1)..(1413): transl_table=11

SEQ ID NO: 96461 - protein, 470 aa, Photobacterium sp. SKA34; identical to SEQ ID NO: 15859

SEQ ID NO: 96462 - DNA, 1437 bp, Oceanospirillum sp. MED92; identical to SEQ ID NO: 8649
  CDS (1)..(1437): transl_table=11

SEQ ID NO: 96463 - protein, 478 aa, Oceanospirillum sp. MED92; identical to SEQ ID NO: 8650

SEQ ID NO: 96464 - DNA, 1431 bp, Flavobacteria bacterium BBFL7; identical to SEQ ID NO: 8653
  CDS (1)..(1431): transl_table=11

SEQ ID NO: 96465 - protein, 476 aa, Flavobacteria bacterium BBFL7; identical to SEQ ID NO: 8654

SEQ ID NO: 96466 - DNA, 1431 bp, Rickettsiella grylli; identical to SEQ ID NO: 8657
  CDS (1)..(1431): transl_table=11

SEQ ID NO: 96467 - protein, 476 aa, Rickettsiella grylli; identical to SEQ ID NO: 8658

SEQ ID NO: 96468 - DNA, 1437 bp, Alteromonadales bacterium TW-7; identical to SEQ ID NO: 8661
  CDS (1)..(1437): transl_table=11

SEQ ID NO: 96469 - protein, 478 aa, Alteromonadales bacterium TW-7; identical to SEQ ID NO: 8662

SEQ ID NO: 96470 - DNA, 1437 bp, marine gamma proteobacterium HTCC2143; identical to SEQ ID NO: 8663
  CDS (1)..(1437): transl_table=11

SEQ ID NO: 96471 - protein, 478 aa, marine gamma proteobacterium HTCC2143; identical to SEQ ID NO: 8664

SEQ ID NO: 96472 - DNA, 1455 bp, marine gamma proteobacterium HTCC2080; identical to SEQ ID NO: 8665
  CDS (1)..(1455): transl_table=11

SEQ ID NO: 96473 - protein, 484 aa, marine gamma proteobacterium HTCC2080; identical to SEQ ID NO: 8666

SEQ ID NO: 96474 - DNA, 1437 bp, Candidatus Desulfococcus oleovorans Hxd3; identical to SEQ ID NO: 15874
  CDS (1)..(1437): transl_table=11

SEQ ID NO: 96475 - protein, 478 aa, Candidatus Desulfococcus oleovorans Hxd3; identical to SEQ ID NO: 15875

SEQ ID NO: 96476 - DNA, 1416 bp, Pseudomonas putida GB-1; identical to SEQ ID NO: 8667
  CDS (1)..(1416): transl_table=11

SEQ ID NO: 96477 - protein, 471 aa, Pseudomonas putida GB-1; identical to SEQ ID NO: 8668

SEQ ID NO: 96478 - DNA, 1455 bp, Pseudomonas putida GB-1; identical to SEQ ID NO: 8669
  CDS (1)..(1455): transl_table=11

SEQ ID NO: 96479 - protein, 484 aa, Pseudomonas putida GB-1; identical to SEQ ID NO: 8670

SEQ ID NO: 96480 - DNA, 1449 bp, Marinobacter sp. ELB17; identical to SEQ ID NO: 8671
  CDS (1)..(1449): transl_table=11

SEQ ID NO: 96481 - protein, 482 aa, Marinobacter sp. ELB17; identical to SEQ ID NO: 8672

SEQ ID NO: 96482 - DNA, 1431 bp, unidentified eubacterium SCB49; identical to SEQ ID NO: 15882
  CDS (1)..(1431): transl_table=11

SEQ ID NO: 96483 - protein, 476 aa, unidentified eubacterium SCB49; identical to SEQ ID NO: 15883

SEQ ID NO: 96484 - DNA, 1413 bp, Moritella sp. PE36; identical to SEQ ID NO: 15884
  CDS (1)..(1413): transl_table=11

SEQ ID NO: 96485 - protein, 470 aa, Moritella sp. PE36; identical to SEQ ID NO: 15885

SEQ ID NO: 96486 - DNA, 1437 bp, Moritella sp. PE36; identical to SEQ ID NO: 26734
  CDS (1)..(1437): transl_table=11

SEQ ID NO: 96487 - protein, 478 aa, Moritella sp. PE36; identical to SEQ ID NO: 26735

SEQ ID NO: 96488 - DNA, 1464 bp, Riemerella anatipestifer; identical to SEQ ID NO: 8673
  CDS (1)..(1464): transl_table=11

SEQ ID NO: 96489 - protein, 487 aa, Riemerella anatipestifer; identical to SEQ ID NO: 8674

SEQ ID NO: 96490 - DNA, 1446 bp, Magnetospirillum gryphiswaldense; identical to SEQ ID NO: 8679
  CDS (1)..(1446): transl_table=11

SEQ ID NO: 96491 - protein, 481 aa, Magnetospirillum gryphiswaldense; identical to SEQ ID NO: 8680

SEQ ID NO: 96492 - DNA, 1503 bp, Streptococcus bovis; identical to SEQ ID NO: 15890
  CDS (1)..(1503): transl_table=11

SEQ ID NO: 96493 - protein, 500 aa, Streptococcus bovis; identical to SEQ ID NO: 15891

SEQ ID NO: 96494 - DNA, 1503 bp, Vitis vinifera; identical to SEQ ID NO: 15892
  CDS (1)..(1503)

SEQ ID NO: 96495 - protein, 500 aa, Vitis vinifera; identical to SEQ ID NO: 15893

SEQ ID NO: 96496 - DNA, 1866 bp, Vitis vinifera; identical to SEQ ID NO: 15896
  CDS (1)..(1866)

SEQ ID NO: 96497 - protein, 621 aa, Vitis vinifera; identical to SEQ ID NO: 15897

SEQ ID NO: 96498 - DNA, 1326 bp, Nosema bombycis; identical to SEQ ID NO: 15900
  CDS (1)..(1326)

SEQ ID NO: 96499 - protein, 441 aa, Nosema bombycis; identical to SEQ ID NO: 15901

SEQ ID NO: 96500 - DNA, 1755 bp, Bacillus subtilis; identical to SEQ ID NO: 8681
  CDS (1)..(1755): transl_table=11

SEQ ID NO: 96501 - protein, 584 aa, Bacillus subtilis; identical to SEQ ID NO: 8682

SEQ ID NO: 96502 - DNA, 1428 bp, Zymomonas mobilis; identical to SEQ ID NO: 8683
  CDS (1)..(1428): transl_table=11

SEQ ID NO: 96503 - protein, 475 aa, Zymomonas mobilis; identical to SEQ ID NO: 8684

SEQ ID NO: 96504 - DNA, 2100 bp, Ostreococcus tauri; identical to SEQ ID NO: 8685
  CDS (1)..(2100)

SEQ ID NO: 96505 - protein, 699 aa, Ostreococcus tauri; identical to SEQ ID NO: 8686

SEQ ID NO: 96506 - DNA, 1692 bp, Crassostrea gigas; identical to SEQ ID NO: 15908
  CDS (1)..(1692)

SEQ ID NO: 96507 - protein, 563 aa, Crassostrea gigas; identical to SEQ ID NO: 15909

SEQ ID NO: 96508 - DNA, 1533 bp, Arabidopsis thaliana; identical to SEQ ID NO: 8689
  CDS (1)..(1533)

SEQ ID NO: 96509 - protein, 510 aa, Arabidopsis thaliana; identical to SEQ ID NO: 8690

SEQ ID NO: 96510 - DNA, 1536 bp, Capsicum annuum; identical to SEQ ID NO: 8691
  CDS (1)..(1536)

SEQ ID NO: 96511 - protein, 511 aa, Capsicum annuum; identical to SEQ ID NO: 8692

SEQ ID NO: 96512 - DNA, 1731 bp, Medicago truncatula; identical to SEQ ID NO: 15914
  CDS (1)..(1731)

SEQ ID NO: 96513 - protein, 576 aa, Medicago truncatula; identical to SEQ ID NO: 15915

SEQ ID NO: 96514 - DNA, 1590 bp, Medicago truncatula; identical to SEQ ID NO: 15916
  CDS (1)..(1590)

SEQ ID NO: 96515 - protein, 529 aa, Medicago truncatula; identical to SEQ ID NO: 15917

SEQ ID NO: 96516 - DNA, 1437 bp, Nitrosovibrio sp; identical to SEQ ID NO: 15918
  CDS (1)..(1437): transl_table=11

SEQ ID NO: 96517 - protein, 478 aa, Nitrosovibrio sp; identical to SEQ ID NO: 15919

SEQ ID NO: 96518 - DNA, 1437 bp, Nitrosovibrio sp; identical to SEQ ID NO: 16635
  CDS (1)..(1437): transl_table=11

SEQ ID NO: 96519 - protein, 478 aa, Nitrosovibrio sp; identical to SEQ ID NO: 16636

SEQ ID NO: 96520 - DNA, 1455 bp, Nitrosospira sp; identical to SEQ ID NO: 8697
  CDS (1)..(1455): transl_table=11

SEQ ID NO: 96521 - protein, 484 aa, Nitrosospira sp; identical to SEQ ID NO: 8698

SEQ ID NO: 96522 - DNA, 1620 bp, Phaeodactylum tricornutum; identical to SEQ ID NO: 8699
  CDS (1)..(1620)

SEQ ID NO: 96523 - protein, 539 aa, Phaeodactylum tricornutum; identical to SEQ ID NO: 8700

SEQ ID NO: 96524 - DNA, 1632 bp, Phaeodactylum tricornutum; identical to SEQ ID NO: 8701
  CDS (1)..(1632)

SEQ ID NO: 96525 - protein, 543 aa, Phaeodactylum tricornutum; identical to SEQ ID NO: 8702

SEQ ID NO: 96526 - DNA, 1542 bp, Phaeodactylum tricornutum; identical to SEQ ID NO: 8703
  CDS (1)..(1542)

SEQ ID NO: 96527 - protein, 513 aa, Phaeodactylum tricornutum; identical to SEQ ID NO: 8704

SEQ ID NO: 96528 - DNA, 1998 bp, Phaeodactylum tricornutum; identical to SEQ ID NO: 8705
  CDS (1)..(1998)

SEQ ID NO: 96529 - protein, 665 aa, Phaeodactylum tricornutum; identical to SEQ ID NO: 8706

SEQ ID NO: 96530 - DNA, 1500 bp, Propionibacterium freudenreichii subsp; identical to SEQ ID NO: 26780
  CDS (1)..(1500): transl_table=11

SEQ ID NO: 96531 - protein, 499 aa, Propionibacterium freudenreichii subsp; identical to SEQ ID NO: 26781

SEQ ID NO: 96532 - DNA, 1533 bp, Solanum tuberosum; identical to SEQ ID NO: 8707
  CDS (1)..(1533)

SEQ ID NO: 96533 - protein, 510 aa, Solanum tuberosum; identical to SEQ ID NO: 8708

SEQ ID NO: 96534 - DNA, 1533 bp, Citrus sinensis; identical to SEQ ID NO: 8709
  CDS (1)..(1533)

SEQ ID NO: 96535 - protein, 510 aa, Citrus sinensis; identical to SEQ ID NO: 8710

SEQ ID NO: 96536 - DNA, 1740 bp, Arabidopsis thaliana; identical to SEQ ID NO: 8711
  CDS (1)..(1740)

SEQ ID NO: 96537 - protein, 579 aa, Arabidopsis thaliana; identical to SEQ ID NO: 8712

SEQ ID NO: 96538 - DNA, 1509 bp, Glycine max; identical to SEQ ID NO: 8713
  CDS (1)..(1509)

SEQ ID NO: 96539 - protein, 502 aa, Glycine max; identical to SEQ ID NO: 8714

SEQ ID NO: 96540 - DNA, 1530 bp, Zea mays; identical to SEQ ID NO: 8715
  CDS (1)..(1530)

SEQ ID NO: 96541 - protein, 509 aa, Zea mays; identical to SEQ ID NO: 8716

SEQ ID NO: 96542 - DNA, 1425 bp, Microbispora rosea subsp; identical to SEQ ID NO: 16659
  CDS (1)..(1425): transl_table=11

SEQ ID NO: 96543 - protein, 474 aa, Microbispora rosea subsp; identical to SEQ ID NO: 16660

SEQ ID NO: 96544 - DNA, 1521 bp, Saccharomyces bayanus; identical to SEQ ID NO: 8719
  CDS (1)..(1521)

SEQ ID NO: 96545 - protein, 506 aa, Saccharomyces bayanus; identical to SEQ ID NO: 8720

SEQ ID NO: 96546 - DNA, 1434 bp, Stigmatella aurantiaca; identical to SEQ ID NO: 15938
  CDS (1)..(1434): transl_table=11

SEQ ID NO: 96547 - protein, 477 aa, Stigmatella aurantiaca; identical to SEQ ID NO: 15939

SEQ ID NO: 96548 - DNA, 1584 bp, Arabidopsis thaliana; identical to SEQ ID NO: 8721
  CDS (1)..(1584)

SEQ ID NO: 96549 - protein, 527 aa, Arabidopsis thaliana; identical to SEQ ID NO: 8722

SEQ ID NO: 96550 - DNA, 1533 bp, Glycine max; identical to SEQ ID NO: 8723
  CDS (1)..(1533)

SEQ ID NO: 96551 - protein, 510 aa, Glycine max; identical to SEQ ID NO: 8724

SEQ ID NO: 96552 - DNA, 1536 bp, Glycine max; identical to SEQ ID NO: 8725
  CDS (1)..(1536)

SEQ ID NO: 96553 - protein, 511 aa, Glycine max; identical to SEQ ID NO: 8726

SEQ ID NO: 96554 - DNA, 1791 bp, Arabidopsis thaliana; identical to SEQ ID NO: 8727
  CDS (1)..(1791)

SEQ ID NO: 96555 - protein, 596 aa, Arabidopsis thaliana; identical to SEQ ID NO: 8728

SEQ ID NO: 96556 - DNA, 1584 bp, Arabidopsis thaliana; identical to SEQ ID NO: 8729
  CDS (1)..(1584)

SEQ ID NO: 96557 - protein, 527 aa, Arabidopsis thaliana; identical to SEQ ID NO: 8730

SEQ ID NO: 96558 - DNA, 1665 bp, Drosophila melanogaster; identical to SEQ ID NO: 15948
  CDS (1)..(1665)

SEQ ID NO: 96559 - protein, 554 aa, Drosophila melanogaster; identical to SEQ ID NO: 15949

SEQ ID NO: 96560 - DNA, 1740 bp, Arabidopsis thaliana; identical to SEQ ID NO: 8731
  CDS (1)..(1740)

SEQ ID NO: 96561 - protein, 579 aa, Arabidopsis thaliana; identical to SEQ ID NO: 8732

SEQ ID NO: 96562 - DNA, 1581 bp, Aspergillus oryzae; identical to SEQ ID NO: 8733
  CDS (1)..(1581)

SEQ ID NO: 96563 - protein, 526 aa, Aspergillus oryzae; identical to SEQ ID NO: 8734

SEQ ID NO: 96564 - DNA, 1422 bp, Pseudomonas hydrogenothermophila; identical to SEQ ID NO: 16683
  CDS (1)..(1422): transl_table=11

SEQ ID NO: 96565 - protein, 473 aa, Pseudomonas hydrogenothermophila; identical to SEQ ID NO: 8736

SEQ ID NO: 96566 - DNA, 1413 bp, Selenomonas ruminantium; identical to SEQ ID NO: 8737
  CDS (1)..(1413): transl_table=11

SEQ ID NO: 96567 - protein, 470 aa, Selenomonas ruminantium; identical to SEQ ID NO: 8738

SEQ ID NO: 96568 - DNA, 1545 bp, Arabidopsis thaliana; identical to SEQ ID NO: 8739
  CDS (1)..(1545)

SEQ ID NO: 96569 - protein, 514 aa, Arabidopsis thaliana; identical to SEQ ID NO: 8740

SEQ ID NO: 96570 - DNA, 1704 bp, Arabidopsis thaliana; identical to SEQ ID NO: 8741
  CDS (1)..(1704)

SEQ ID NO: 96571 - protein, 567 aa, Arabidopsis thaliana; identical to SEQ ID NO: 8742

SEQ ID NO: 96572 - DNA, 1533 bp, Lilium longiflorum; identical to SEQ ID NO: 8743
  CDS (1)..(1533)

SEQ ID NO: 96573 - protein, 510 aa, Lilium longiflorum; identical to SEQ ID NO: 8744

SEQ ID NO: 96574 - DNA, 1413 bp, Vibrio marinus; identical to SEQ ID NO: 8745
  CDS (1)..(1413): transl_table=11

SEQ ID NO: 96575 - protein, 470 aa, Vibrio marinus; identical to SEQ ID NO: 8746

SEQ ID NO: 96576 - DNA, 1341 bp, Thermoproteus tenax
  CDS (1)..(1341): transl_table=11
gtgttcactaaaattgtagctacattggggccttcgactgatagactgccggatataacggccctgttgagcaaggttcacggcgtgcggataaatatgtctcacgcatcgccatcggaggtagaggcccgcgtgaacgccgtgaggaagtatgaggagaccagcgggaggtatatagccattatagcggatctaaggggccccagcgtcaggaccggccttatgcgccctctacagataacggcgggcgcccgcgtctcctttaaattagccgagaagggggacggcttcgtacctgtgccgcggcgtgagttcttcgaagtaatcgaggagggagacgaggttcttatgttagacggaaaactcgtcttgaggataatcagcgcagcgcagacctcggccgaggccgagtcgttatcctccggcgtcatatccagcaataaggcaatagtggtcaaaggcaaggaatatcatatagagcagcctgtggaggaagacataagggcgcttcagacgctctctcggttcagagacgacgtagactacgtggccctcagccttgtgagagacggagcagacgtgaggaaaatgaggagcgtcgtcgaggaggctgggctcacctccggcataatggccaaaatagagacgaagagcgcagtagataaaatcgaggagataatcaatgcggccgactacatagttatagcgagaggcgatctggcgctgcactacggactggagtacattcctaaagtacagaggctcttggtggagagatctctctcggcaggaaggcccgtggcggtggccacgcagcttttggactctatgcagaccaacacgacgcccactagggcggaggtcaacgacgtgtacacaacggcgagtctcggagtggactctctgtggctgaccaacgagactgcgagcggagagcacccgttagaggcagtggattggctgaggaggatagtgtcgcaggtcgagttcgggagacttaaggctgcgtcgccggccgacgcacgcgataggttcgccaaagccgtggtagatatggccgaggacatgggaggggaaatcgcagtatactcaatgacgggaactctggcgaagagaatagctaaatttaggccgatgacgacagtctacgtcggagtcaacgagaggaggctcgcgaggatgttggagctccgcgaggatgttggagctcatatggggcctagagcctgtggtcgtgccggcgcatacttacgaggagggcctcgagaggctcctctccagattctccgacaaagtcttgatagccacgtatgggctcagaggcggcacacatactattaa

SEQ ID NO: 96577 - protein, 446 aa, Thermoproteus tenax
MFTKIVATLGPSTDRLPDITALLSKVHGVRINMSHASPSEVEARVNAVRKYEETSGRYIAIIADLRGPSVRTGLMRPLQITAGARVSFKLAEKGDGFVPVPRREFFEVIEEGDEVLMLDGKLVLRIISAAQTSAEAESLSSGVISSNKAIVVKGKEYHIEQPVEEDIRALQTLSRFRDDVDYVALSLVRDGADVRKMRSVVEEAGLTSGIMAKIETKSAVDKIEEIINAADYIVIARGDLALHYGLEYIPKVQRLLVERSLSAGRPVAVATQLLDSMQTNTTPTRAEVNDVYTTASLGVDSLWLTNETASGEHPLEAVDWLRRIVSQVEFGRLKAASPADARDRFAKAVVDMAEDMGGEIAVYSMTGTLAKRIAKFRPMTTVYVGVNERRLARMLELREDVGAHMGPRACGRAGAYLRGGPREAPLQILRQSLDSHVWAQRRHTYY

SEQ ID NO: 96578 - DNA, 1752 bp, Ricinus communis; identical to SEQ ID NO: 8747
  CDS (1)..(1752)

SEQ ID NO: 96579 - protein, 583 aa, Ricinus communis; identical to SEQ ID NO: 8748

SEQ ID NO: 96580 - DNA, 1782 bp, Nicotiana tabacum; identical to SEQ ID NO: 8749
  CDS (1)..(1782)

SEQ ID NO: 96581 - protein, 593 aa, Nicotiana tabacum; identical to SEQ ID NO: 8750

SEQ ID NO: 96582 - DNA, 1494 bp, Arabidopsis thaliana; identical to SEQ ID NO: 8751
  CDS (1)..(1494)

SEQ ID NO: 96583 - protein, 497 aa, Arabidopsis thaliana; identical to SEQ ID NO: 8752

SEQ ID NO: 96584 - DNA, 1533 bp, Solanum tuberosum; identical to SEQ ID NO: 8753
  CDS (1)..(1533)

SEQ ID NO: 96585 - protein, 510 aa, Solanum tuberosum; identical to SEQ ID NO: 8754

SEQ ID NO: 96586 - DNA, 1536 bp, Glycine max; identical to SEQ ID NO: 8755
  CDS (1)..(1536)

SEQ ID NO: 96587 - protein, 511 aa, Glycine max; identical to SEQ ID NO: 8756

SEQ ID NO: 96588 - DNA, 1527 bp, Nicotiana tabacum; identical to SEQ ID NO: 15976
  CDS (1)..(1527)

SEQ ID NO: 96589 - protein, 508 aa, Nicotiana tabacum; identical to SEQ ID NO: 8758

SEQ ID NO: 96590 - DNA, 1689 bp, Nicotiana tabacum; identical to SEQ ID NO: 8759
  CDS (1)..(1689)

SEQ ID NO: 96591 - protein, 562 aa, Nicotiana tabacum; identical to SEQ ID NO: 8760

SEQ ID NO: 96592 - DNA, 1425 bp, Agrobacterium vitis; identical to SEQ ID NO: 8761
  CDS (1)..(1425): transl_table=11

SEQ ID NO: 96593 - protein, 474 aa, Agrobacterium vitis; identical to SEQ ID NO: 8762

SEQ ID NO: 96594 - DNA, 1506 bp, Candida glabrata; identical to SEQ ID NO: 8763
  CDS (1)..(1506)

SEQ ID NO: 96595 - protein, 501 aa, Candida glabrata; identical to SEQ ID NO: 8764

SEQ ID NO: 96596 - DNA, 1413 bp, Escherichia coli O157; identical to SEQ ID NO: 8765
  CDS (1)..(1413): transl_table=11

SEQ ID NO: 96597 - protein, 470 aa, Escherichia coli O157; identical to SEQ ID NO: 8766

SEQ ID NO: 96598 - DNA, 1413 bp, Salmonella typhi; identical to SEQ ID NO: 15984
  CDS (1)..(1413): transl_table=11

SEQ ID NO: 96599 - protein, 470 aa, Salmonella typhi; identical to SEQ ID NO: 15985

SEQ ID NO: 96600 - DNA, 1413 bp, Salmonella typhimurium; identical to SEQ ID NO: 8767
  CDS (1)..(1413): transl_table=11

SEQ ID NO: 96601 - protein, 470 aa, Salmonella typhimurium; identical to SEQ ID NO: 8768

SEQ ID NO: 96602 - DNA, 1449 bp, Agrobacterium vitis; identical to SEQ ID NO: 15990
  CDS (1)..(1449): transl_table=11

SEQ ID NO: 96603 - protein, 482 aa, Agrobacterium vitis; identical to SEQ ID NO: 15991

SEQ ID NO: 96604 - DNA, 1527 bp, Candida glabrata; identical to SEQ ID NO: 8771
  CDS (1)..(1527)

SEQ ID NO: 96605 - protein, 508 aa, Candida glabrata; identical to SEQ ID NO: 8772

SEQ ID NO: 96606 - DNA, 1443 bp, Escherichia coli; identical to SEQ ID NO: 8363
  CDS (1)..(1443): transl_table=11

SEQ ID NO: 96607 - protein, 480 aa, Escherichia coli; identical to SEQ ID NO: 8364

SEQ ID NO: 96608 - DNA, 1443 bp, Salmonella typhimurium; identical to SEQ ID NO: 8773
  CDS (1)..(1443): transl_table=11

SEQ ID NO: 96609 - protein, 480 aa, Salmonella typhimurium; identical to SEQ ID NO: 8774

SEQ ID NO: 96610 - DNA, 1521 bp, Saccharomyces cerevisiae; identical to SEQ ID NO: 8775
  CDS (1)..(1521)

SEQ ID NO: 96611 - protein, 506 aa, Saccharomyces cerevisiae; identical to SEQ ID NO: 8776

SEQ ID NO: 96612 - DNA, 1377 bp, Aeropyrum pernix; identical to SEQ ID NO: 16000
  CDS (1)..(1377): transl_table=11

SEQ ID NO: 96613 - protein, 458 aa, Aeropyrum pernix; identical to SEQ ID NO: 16001

SEQ ID NO: 96614 - DNA, 1599 bp, Agaricus bisporus; identical to SEQ ID NO: 16002
  CDS (1)..(1599)

SEQ ID NO: 96615 - protein, 532 aa, Agaricus bisporus; identical to SEQ ID NO: 16003

SEQ ID NO: 96616 - DNA, 1506 bp, Ashbya gossypii; identical to SEQ ID NO: 8777
  CDS (1)..(1506)

SEQ ID NO: 96617 - protein, 501 aa, Ashbya gossypii; identical to SEQ ID NO: 8778

SEQ ID NO: 96618 - DNA, 1581 bp, Aspergillus niger; identical to SEQ ID NO: 8779
  CDS (1)..(1581)

SEQ ID NO: 96619 - protein, 526 aa, Aspergillus niger; identical to SEQ ID NO: 8780

SEQ ID NO: 96620 - DNA, 1758 bp, Bacillus licheniformis; identical to SEQ ID NO: 8781
  CDS (1)..(1758): transl_table=11

SEQ ID NO: 96621 - protein, 585 aa, Bacillus licheniformis; identical to SEQ ID NO: 8782

SEQ ID NO: 96622 - DNA, 1761 bp, Bacillus psychrophilus; identical to SEQ ID NO: 16010
  CDS (1)..(1761): transl_table=11

SEQ ID NO: 96623 - protein, 586 aa, Bacillus psychrophilus; identical to SEQ ID NO: 8784

SEQ ID NO: 96624 - DNA, 1764 bp, Bacillus stearothermophilus; identical to SEQ ID NO: 8785
  CDS (1)..(1764): transl_table=11

SEQ ID NO: 96625 - protein, 587 aa, Bacillus stearothermophilus; identical to SEQ ID NO: 8786

SEQ ID NO: 96626 - DNA, 1758 bp, Bacillus subtilis; identical to SEQ ID NO: 8787
  CDS (1)..(1758): transl_table=11

SEQ ID NO: 96627 - protein, 585 aa, Bacillus subtilis; identical to SEQ ID NO: 8788

SEQ ID NO: 96628 - DNA, 1434 bp, Borrelia burgdorferi; identical to SEQ ID NO: 16741
  CDS (1)..(1434): transl_table=11

SEQ ID NO: 96629 - protein, 477 aa, Borrelia burgdorferi; identical to SEQ ID NO: 16742

SEQ ID NO: 96630 - DNA, 1446 bp, Buchnera aphidicola subsp; identical to SEQ ID NO: 8789
  CDS (1)..(1446): transl_table=11

SEQ ID NO: 96631 - protein, 481 aa, Buchnera aphidicola subsp; identical to SEQ ID NO: 8790

SEQ ID NO: 96632 - DNA, 1458 bp, Chlamydia trachomatis
  CDS (1)..(1458): transl_table=11
atgatcgctagaacgaaaattatttgtacgataggccctgcaacgaatacccctgagatgctggaaaagcttcttgatgcagggatgaatgtagctcgccttaattttagccacgggacccatgaaagccatggccggaccatcgctattcttaaagaactacgagagaagcgccaagttcctttagctattatgctagatacaaaaggtcccgaaattcgtttaggccaagtagaatctcctataaaagtacagcctggggatcgtcttactctcgttagcaaagaaattttaggatccaaagaaagcggcgttactctttatccaagttgtgtattcccttatgttagagaacgagctcctgttctcattgatgatgggtatatccaagcagtggtggtcaatgctcaagagcatatggtggaaatagagtttcaaaattcaggagaaataaaatccaacaaatctcttagcatcaaagatatcgatgttgctcttcctttcatgacagagaaggatattgcagacttaaaatttggggtagaacaagaactcgatcttatcgctgcttcgttcgtcagatgtaatgaagatattgacagcatgcgtaaagttttggaaagctttggtcgtcctaatatgcccatcattgctaaaatagaaaatcatttaggagtacaaaatttccaagagatcgctagagctgctgatggtatcatgattgcacgcggggatcttggtattgaattgtctattgttgaagttcctggactacaaaaatttatggcccgagcatcgagggaaacgggtcggttttgtatcactgcaacgcaaatgctcgagtcaatgattcgcaacccccttcctacacgagccgaagtctctgacgttgccaacgccatttacgatggaacctctgcagtcatgttgtctggagaaactgccttaggagcccatcctgtacatgcagtaaaaacaatgcgttccattatccaagagactgagaagactttcgattaccacgcttttttccagctgaacgacaaaaacagcgctctcaaagtttctccttatcttgaagccattgggttttctggaatccaaattgcagaaaaagcatctgccaaagccattattgtgtatacccagacgggaggatctccgatgtttttatccaaatatcgaccttatctccctattattgctgttacccctaaccgcaatgtgtactatcgtttagctgtagaatggggagtatatcctatgctaaccctagaatcgaaccgtacagtctggcgtcaccaagcttgtgtatatggagtagaaaaaggaattctttctaactatgataaaattcttgtcttcagccgcggagctgggatgcaagacaccaacaatctcaccttgacaactgtgcatgatgtgctatccccctctcttgacgagatagttccataa

SEQ ID NO: 96633 - protein, 485 aa, Chlamydia trachomatis
MIARTKIICTIGPATNTPEMLEKLLDAGMNVARLNFSHGTHESHGRTIAILKELREKRQVPLAIMLDTKGPEIRLGQVESPIKVQPGDRLTLVSKEILGSKESGVTLYPSCVFPYVRERAPVLIDDGYIQAVVVNAQEHMVEIEFQNSGEIKSNKSLSIKDIDVALPFMTEKDIADLKFGVEQELDLIAASFVRCNEDIDSMRKVLESFGRPNMPIIAKIENHLGVQNFQEIARAADGIMIARGDLGIELSIVEVPGLQKFMARASRETGRFCITATQMLESMIRNPLPTRAEVSDVANAIYDGTSAVMLSGETALGAHPVHAVKTMRSIIQETEKTFDYHAFFQLNDKNSALKVSPYLEAIGFSGIQIAEKASAKAIIVYTQTGGSPMFLSKYRPYLPIIAVTPNRNVYYRLAVEWGVYPMLTLESNRTVWRHQACVYGVEKGILSNYDKILVFSRGAGMQDTNNLTLTTVHDVLSPSLDEIVP

SEQ ID NO: 96634 - DNA, 1422 bp, Clostridium acetobutylicum; identical to SEQ ID NO: 8791
  CDS (1)..(1422): transl_table=11

SEQ ID NO: 96635 - protein, 473 aa, Clostridium acetobutylicum; identical to SEQ ID NO: 8792

SEQ ID NO: 96636 - DNA, 1428 bp, Corynebacterium glutamicum; identical to SEQ ID NO: 16020
  CDS (1)..(1428): transl_table=11

SEQ ID NO: 96637 - protein, 475 aa, Corynebacterium glutamicum; identical to SEQ ID NO: 16021

SEQ ID NO: 96638 - DNA, 1515 bp, Debaryomyces hansenii; identical to SEQ ID NO: 8793
  CDS (1)..(1515)

SEQ ID NO: 96639 - protein, 504 aa, Debaryomyces hansenii; identical to SEQ ID NO: 8794

SEQ ID NO: 96640 - DNA, 1602 bp, Drosophila melanogaster; identical to SEQ ID NO: 16024
  CDS (1)..(1602)

SEQ ID NO: 96641 - protein, 533 aa, Drosophila melanogaster; identical to SEQ ID NO: 16025

SEQ ID NO: 96642 - DNA, 1581 bp, Emericella nidulans; identical to SEQ ID NO: 8795
  CDS (1)..(1581)

SEQ ID NO: 96643 - protein, 526 aa, Emericella nidulans; identical to SEQ ID NO: 8796

SEQ ID NO: 96644 - DNA, 1437 bp, Haemophilus influenzae; identical to SEQ ID NO: 8373
  CDS (1)..(1437): transl_table=11

SEQ ID NO: 96645 - protein, 478 aa, Haemophilus influenzae; identical to SEQ ID NO: 8374

SEQ ID NO: 96646 - DNA, 1506 bp, Kluyveromyces lactis; identical to SEQ ID NO: 8797
  CDS (1)..(1506)

SEQ ID NO: 96647 - protein, 501 aa, Kluyveromyces lactis; identical to SEQ ID NO: 8798

SEQ ID NO: 96648 - DNA, 1452 bp, Methylobacterium extorquens; identical to SEQ ID NO: 16032
  CDS (1)..(1452): transl_table=11

SEQ ID NO: 96649 - protein, 483 aa, Methylobacterium extorquens; identical to SEQ ID NO: 16033

SEQ ID NO: 96650 - DNA, 1344 bp, Methanococcus jannaschii
  CDS (1)..(1344): transl_table=11
ttggtgggaatgatgagaaaaactaaaattttagtcactttaggaccatccttagaaaataaattagataaagcaataaatttgatagatggagttagatttaacatgtctcatgccacaacagattattgtgaaaagtttttgaatatattggaaaaaaataatatcgccaaagttatggatttgaagggaataaaaattagaattaaagaagttaaattaaaaaataaaatattaaaaatgggggagaaggttgttattggagaggatataaagctcaactacaatatagacacaattgaagaagggcattttattttaataaacgatgggaaaattaagctaagagttgtagaaaaaactgataaaattatcgcagttgtagaagttgggggagagattaaagaaggtatgggagttaatcttccagatacaaggatagaactcccaataattgatgaaactgatttgaagaatataaaattcgctgtagaaaaggactttgaatatattgctttatcatttgttaggaataaggaagatgttaaggaattaaaagatattatatcagaatacaaaggagattgtgaggtaatatcaaaaatagaaactaaggagggattaaagaatataaaagagatagcaagagaaagtgatggagtgatggtagcaaggggagatttgggtgtagaggttccaatagaaaatattccaattgaacaaaagaatatattgagaatagctaatagatatggaattttgtcaataacagccacacaaatattggattctatgataaacaatccatttccaacaagagctgaggttacagacatagctaatgccatatacgatggaactgactgcttaatgctctccaacgaaacaactattggaaaatacccaatagaggcgataaaggtattaaataaggttgccaaagtggcagatgaacattatgaggagtttggtgatagagtttgtttagaggttgagagcattgatgaaggtttagtatatgctgtttatgagctatataagaagctaaatactaagttagttataactccaacatattctggaagaactgctaagttaatatctaaattaaggataaatagtaaaataatagctccaacgccaaatataagaactttaaaaaggttgagattggtttggggagttgaaagctgtttgatggaagaatttgatgatatggagaaaataatcaacacctgtagagaaatggctaaaaaagaaattggaaaggggatttacttaatcacattaggtcatccaataggtcaaaagaaaactaacactataaaagttgaaagtatctaa

SEQ ID NO: 96651 - protein, 447 aa, Methanococcus jannaschii
MVGMMRKTKILVTLGPSLENKLDKAINLIDGVRFNMSHATTDYCEKFLNILEKNNIAKVMDLKGIKIRIKEVKLKNKILKMGEKVVIGEDIKLNYNIDTIEEGHFILINDGKIKLRVVEKTDKIIAVVEVGGEIKEGMGVNLPDTRIELPIIDETDLKNIKFAVEKDFEYIALSFVRNKEDVKELKDIISEYKGDCEVISKIETKEGLKNIKEIARESDGVMVARGDLGVEVPIENIPIEQKNILRIANRYGILSITATQILDSMINNPFPTRAEVTDIANAIYDGTDCLMLSNETTIGKYPIEAIKVLNKVAKVADEHYEEFGDRVCLEVESIDEGLVYAVYELYKKLNTKLVITPTYSGRTAKLISKLRINSKIIAPTPNIRTLKRLRLVWGVESCLMEEFDDMEKIINTCREMAKKEIGKGIYLITLGHPIGQKKTNTIKVESI

SEQ ID NO: 96652 - DNA, 1527 bp, Mycoplasma genitalium
  CDS (1)..(1527): transl_table=4
atgattgaccatttaaaaagaacaaagataatcgctacctgtggcccagctttaacaaaaagcttggttagcttaaagatgcttgatgataatgagtatgcagctattaaaaaggttgcttatgccaacattgaagcaattattaaaagtggggttagtgtgattaggcttaacttctctcatggtacccatgaagaacaacaagtgaggatcaagatagtaagggatgtagcgaaagcaatgaacatccctgtttctattatgttagatacaaatggtcctgagatcaggatagtagaaactaaaaaagagggtttgaaaatcaccaaagatagtgaagtgattatcaacaccatgagtaaaatgatcgctagtgacaaccagtttgctgtcagtgatgctagtggcaaatacaacatggttaatgatgtgaatataggtcagaaaatccttgttgatgatggtaagttaaccctggttgtcacaagggttgacaaacaacataaccaggttatctgtgttgcaaaaaacgaccacacagttttcactaaaaaaagacttaacctacccaacgcacagtactctatcccttttctcagtgaaaaggatctgaaggatattgactttggtttaagccaaggtattgactatattgctgcctcttttgttaatactgttgcagatattaaacaactgagagattatctgaaattaaagaatgctagtggggtgaagatcatcgctaagattgaatctaatcatgctttaaataacattgataagatcattaaagctagcgatgggattatggttgctaggggtgatttgggccttgaaatcccttattaccaagtcccttactgacaaaggtacatgattaaagcttgtcgcttttttaacaagcgttctattactgcaacccaaatgcttgattcactagaaaaaaacatccaaccaacccgagctgaagtgactgatgtttactttgcagttgatcggggtaatgatgcaactatgttaagtggggaaactgctagtgggctttaccctttaaatgcagtagcggtgatgcaaaagattgataaacaatcagaaaccttctttgattaccagtataacgttaactattatttgaaaaactccacggcaaataaaagtaggttttgacacaacgttgttttacctttaacaaaaaagactgttcctaaaagaaaacttgttaacagtgcctttaagtatgactttattgtctatcctactaataacattaacaggatctatgcattatcaaacgcacgcttagcagcagcagttattattttaaccaacaacaaacgggtttacactggccatggtgttgattatgggatcttctgttatttaattgataaaaaccccaaccagctaaccaaagctgaactgattgaacttgcttgaaaagcaattaaccactatcaggcttatggtgatttagaaaaactcaaacagtgtttagctgtctataatgaaacaattatcaatctttag

SEQ ID NO: 96653 - protein, 508 aa, Mycoplasma genitalium
MIDHLKRTKIIATCGPALTKSLVSLKMLDDNEYAAIKKVAYANIEAIIKSGVSVIRLNFSHGTHEEQQVRIKIVRDVAKAMNIPVSIMLDTNGPEIRIVETKKEGLKITKDSEVIINTMSKMIASDNQFAVSDASGKYNMVNDVNIGQKILVDDGKLTLVVTRVDKQHNQVICVAKNDHTVFTKKRLNLPNAQYSIPFLSEKDLKDIDFGLSQGIDYIAASFVNTVADIKQLRDYLKLKNASGVKIIAKIESNHALNNIDKIIKASDGIMVARGDLGLEIPYYQVPYWQRYMIKACRFFNKRSITATQMLDSLEKNIQPTRAEVTDVYFAVDRGNDATMLSGETASGLYPLNAVAVMQKIDKQSETFFDYQYNVNYYLKNSTANKSRFWHNVVLPLTKKTVPKRKLVNSAFKYDFIVYPTNNINRIYALSNARLAAAVIILTNNKRVYTGHGVDYGIFCYLIDKNPNQLTKAELIELAWKAINHYQAYGDLEKLKQCLAVYNETIINL

SEQ ID NO: 96654 - DNA, 1419 bp, Mycobacterium tuberculosis
  CDS (1)..(1419): transl_table=11
gtgacgagacgcgggaaaatcgtctgcactctcgggccggccacccagcgggacgacctggtcagagcgctggtcgaggccggaatggacgtcgcccgaatgaacttcagccacggcgactacgacgatcacaaggtcgcctatgagcgggtccgggtagcctccgacgccaccgggcgcgcggtcggcgtgctcgccgacctgcagggcccgaagatcaggttgggacgcttcgcctccggggccacccactgggccgaaggcgaaaccgtccggatcaccgtgggcgcctgcgagggcagccacgatcgggtgtccaccacctacaagcggctagcccaggacgcggtggccggtgaccgggtgctggtcgacgacggcaaagtcgcattggtggtcgacgccgtcgagggcgacgacgtggtctgcaccgtcgtcgaaggcggcccggtcagcgacaacaagggcatctcgttgcccggaatgaacgtgaccgcgccggccctgtcggagaaggacatcgaggatctcacgttcgcgctgaacctcggcgtcgacatggtggcgctttccttcgtccgctccccggccgatgtcgaactggtccacgaggtgatggatcggatcgggcgacgggtgccggtgatcgccaagctggagaagccggaagccatcgacaatctcgaagcgatcgtgctggcgttcgacgccgtcatggtcgctcggggcgacctaggtgttgagctgccgctcgaagaggtcccgctggtacagaagcgagccatccagatggcccgggagaacgccaagccggtcattgtggcgacccagatgctcgactcgatgatcgagaactcgcggccgacccgagctgaggcctccgacgtcgccaacgcggtgctcgatggcgccgacgcgctgatgctgtccggggaaacctcggtagggaagtacccccttgctgcggtccggacaatgtcgcgcatcatctgcgcggtcgaggagaactccacggccgcaccgccgttgacacacattccccggaccaagcgtggggtcatctcgtatgcggcccgtgacatcggcgaacgactcgacgccaaggccttggtggccttcactcagtccggtgataccgtgcggcgactggcccgcctgcataccccgctgccgctgctggccttcaccgcgtggcccgaggtgcgcagccaactggcgatgacctggggcaccgagacgttcatcgtgccgaagatgcagtccaccgatggcatgatccgccaggtcgacaaatcgctgctcgaactcgcccgctacaagcgtggtgacttggtggtcatcgtcgcgggtgcgccgccaggcacagtgggttcgaccaacctgatccacgtgcaccggatcggggaagatgacgtctag

SEQ ID NO: 96655 - protein, 472 aa, Mycobacterium tuberculosis
MTRRGKIVCTLGPATQRDDLVRALVEAGMDVARMNFSHGDYDDHKVAYERVRVASDATGRAVGVLADLQGPKIRLGRFASGATHWAEGETVRITVGACEGSHDRVSTTYKRLAQDAVAGDRVLVDDGKVALVVDAVEGDDVVCTVVEGGPVSDNKGISLPGMNVTAPALSEKDIEDLTFALNLGVDMVALSFVRSPADVELVHEVMDRIGRRVPVIAKLEKPEAIDNLEAIVLAFDAVMVARGDLGVELPLEEVPLVQKRAIQMARENAKPVIVATQMLDSMIENSRPTRAEASDVANAVLDGADALMLSGETSVGKYPLAAVRTMSRIICAVEENSTAAPPLTHIPRTKRGVISYAARDIGERLDAKALVAFTQSGDTVRRLARLHTPLPLLAFTAWPEVRSQLAMTWGTETFIVPKMQSTDGMIRQVDKSLLELARYKRGDLVVIVAGAPPGTVGSTNLIHVHRIGEDDV

SEQ ID NO: 96656 - DNA, 1386 bp, Pyrobaculum aerophilum
  CDS (1)..(1386): transl_table=11
atgagcgctcccagaggagatcacgccattctgcgcgcgcgtaatctcactaagagagttgcaacgctgggcccgtctacagacgttttacggccagacgagttgattaaatttctggacttagttgacggcgttaggattaacctagcccacgcatctcccaatgaagtcaaattcagaatagaggcagtgcgctcttatgaaaaggcaaagaataggccgctggctgtaattgtggatctcaaggggcccagcatcagagtgggcagtacctcgcctattaacgtgcaagaaggggaagtggtcaagtttaaactgagcgataaatctgacggcacgtatatccccgtgcctaacaaggcctttttcagcgcagtggaacaaaacgatgttattttaatgcttgatggaaggctgaggctaaaggtaacaaataccggctctgattggattgaggctgtggccgaatccagcggagttataactggcggcaaagctattgtcgttgagggcaaggattacgacatatccacgcctgcggaggaagacgtagaggcgttaaaggccatttctcccattagggataatattgactacgtggcgataagtctcgcgaaaagttgtaaagacgtagacagcgtaagatctctactcacggagctcggctttcaaagccaagtggcagtaaaaatagagactaaaggcgctgttaataatttagaagagcttgtccagtgtagcgattacgtagtagtggctagaggcgacttggggctacactacggccttgacgctctgcctatagtacagaggaggatagtgcacacgtcgcttaaatacggcaagccaattgccgtggccactcagcttttagactccatgcagagctctccaattcccacaagagctgagataaacgacgtctttacaactgcgtctatgggagtagacagcttgtggttaactaatgagactgccagcgggaaatatcctctagccgctgttagctggctttcaagaattttaatgaacgtcgaatatcaaataccacaatccccattgttgcaaaattccagagaccgcttcgccaagggactcgtggagctggcgcaggacttaggggctaacattctcgttttcagcatgagcgggacgttggcgagaagaatcgcgaaatttagacctcgaggcgtggtttacgtcgggacgcctaatgttagagtcgcccgctctctgtcaattgtctgggctctagagcctttatatatacccgctgagaattacgaggaggggcttgagaagttaatatcgcttaaaggaactacgccgtttgtggccacgtacggaatcagagggggtgtccactcggtaaaggtgaagctctag

SEQ ID NO: 96657 - protein, 461 aa, Pyrobaculum aerophilum
MSAPRGDHAILRARNLTKRVATLGPSTDVLRPDELIKFLDLVDGVRINLAHASPNEVKFRIEAVRSYEKAKNRPLAVIVDLKGPSIRVGSTSPINVQEGEVVKFKLSDKSDGTYIPVPNKAFFSAVEQNDVILMLDGRLRLKVTNTGSDWIEAVAESSGVITGGKAIVVEGKDYDISTPAEEDVEALKAISPIRDNIDYVAISLAKSCKDVDSVRSLLTELGFQSQVAVKIETKGAVNNLEELVQCSDYVVVARGDLGLHYGLDALPIVQRRIVHTSLKYGKPIAVATQLLDSMQSSPIPTRAEINDVFTTASMGVDSLWLTNETASGKYPLAAVSWLSRILMNVEYQIPQSPLLQNSRDRFAKGLVELAQDLGANILVFSMSGTLARRIAKFRPRGVVYVGTPNVRVARSLSIVWALEPLYIPAENYEEGLEKLISLKGTTPFVATYGIRGGVHSVKVKL

SEQ ID NO: 96658 - DNA, 1506 bp, Saccharomyces castellii; identical to SEQ ID NO: 8801
  CDS (1)..(1506)

SEQ ID NO: 96659 - protein, 501 aa, Saccharomyces castellii; identical to SEQ ID NO: 8802

SEQ ID NO: 96660 - DNA, 1506 bp, Saccharomyces kluyveri; identical to SEQ ID NO: 8803
  CDS (1)..(1506)

SEQ ID NO: 96661 - protein, 501 aa, Saccharomyces kluyveri; identical to SEQ ID NO: 8804

SEQ ID NO: 96662 - DNA, 1530 bp, Schizosaccharomyces pombe; identical to SEQ ID NO: 8805
  CDS (1)..(1530)

SEQ ID NO: 96663 - protein, 509 aa, Schizosaccharomyces pombe; identical to SEQ ID NO: 8806

SEQ ID NO: 96664 - DNA, 1758 bp, Staphylococcus aureus; identical to SEQ ID NO: 8517
  CDS (1)..(1758): transl_table=11

SEQ ID NO: 96665 - protein, 585 aa, Staphylococcus aureus; identical to SEQ ID NO: 8518

SEQ ID NO: 96666 - DNA, 1758 bp, Staphylococcus epidermidis; identical to SEQ ID NO: 16042
  CDS (1)..(1758): transl_table=11

SEQ ID NO: 96667 - protein, 585 aa, Staphylococcus epidermidis; identical to SEQ ID NO: 16043

SEQ ID NO: 96668 - DNA, 1635 bp, Thermoplasma acidophilum; identical to SEQ ID NO: 16044
  CDS (1)..(1635): transl_table=11

SEQ ID NO: 96669 - protein, 544 aa, Thermoplasma acidophilum; identical to SEQ ID NO: 16045

SEQ ID NO: 96670 - DNA, 1401 bp, Thermotoga maritima; identical to SEQ ID NO: 8407
  CDS (1)..(1401): transl_table=11

SEQ ID NO: 96671 - protein, 466 aa, Thermotoga maritima; identical to SEQ ID NO: 8408

SEQ ID NO: 96672 - DNA, 1617 bp, Trichoderma reesei; identical to SEQ ID NO: 8807
  CDS (1)..(1617)

SEQ ID NO: 96673 - protein, 538 aa, Trichoderma reesei; identical to SEQ ID NO: 8808

SEQ ID NO: 96674 - DNA, 1752 bp, Oryza sativa; identical to SEQ ID NO: 8811
  CDS (1)..(1752)

SEQ ID NO: 96675 - protein, 583 aa, Oryza sativa; identical to SEQ ID NO: 8812

SEQ ID NO: 96676 - DNA, 1647 bp, Oryza sativa; identical to SEQ ID NO: 8379
  CDS (1)..(1647)

SEQ ID NO: 96677 - protein, 548 aa, Oryza sativa; identical to SEQ ID NO: 8380

SEQ ID NO: 96678 - DNA, 1737 bp, Oryza sativa; identical to SEQ ID NO: 16058
  CDS (1)..(1737)

SEQ ID NO: 96679 - protein, 578 aa, Oryza sativa; identical to SEQ ID NO: 16059

SEQ ID NO: 96680 - DNA, 1584 bp, Oryza sativa; identical to SEQ ID NO: 8387
  CDS (1)..(1584)

SEQ ID NO: 96681 - protein, 527 aa, Oryza sativa; identical to SEQ ID NO: 8388

SEQ ID NO: 96682 - DNA, 1584 bp, Oryza sativa; identical to SEQ ID NO: 16068
  CDS (1)..(1584)

SEQ ID NO: 96683 - protein, 527 aa, Oryza sativa; identical to SEQ ID NO: 16069

SEQ ID NO: 96684 - DNA, 1716 bp, Brassica napus; identical to SEQ ID NO: 8817
  CDS (1)..(1716)

SEQ ID NO: 96685 - protein, 571 aa, Brassica napus; identical to SEQ ID NO: 8818

SEQ ID NO: 96686 - DNA, 1584 bp, Brassica napus; identical to SEQ ID NO: 8819
  CDS (1)..(1584)

SEQ ID NO: 96687 - protein, 527 aa, Brassica napus; identical to SEQ ID NO: 8820

SEQ ID NO: 96688 - DNA, 1584 bp, Brassica napus; identical to SEQ ID NO: 8823
  CDS (1)..(1584)

SEQ ID NO: 96689 - protein, 527 aa, Brassica napus; identical to SEQ ID NO: 8824

SEQ ID NO: 96690 - DNA, 1581 bp, Glycine max; identical to SEQ ID NO: 16795
  CDS (1)..(1581)

SEQ ID NO: 96691 - protein, 526 aa, Glycine max; identical to SEQ ID NO: 15541

SEQ ID NO: 96692 - DNA, 1581 bp, Glycine max; identical to SEQ ID NO: 8825
  CDS (1)..(1581)

SEQ ID NO: 96693 - protein, 526 aa, Glycine max; identical to SEQ ID NO: 8826

SEQ ID NO: 96694 - DNA, 1584 bp, Triticum aestivum; identical to SEQ ID NO: 8829
  CDS (1)..(1584)

SEQ ID NO: 96695 - protein, 527 aa, Triticum aestivum; identical to SEQ ID NO: 8830

SEQ ID NO: 96696 - DNA, 1584 bp, Brassica napus; identical to SEQ ID NO: 8835
  CDS (1)..(1584)

SEQ ID NO: 96697 - protein, 527 aa, Brassica napus; identical to SEQ ID NO: 8836

SEQ ID NO: 96698 - DNA, 1743 bp, Brassica napus; identical to SEQ ID NO: 8837
  CDS (1)..(1743)

SEQ ID NO: 96699 - protein, 580 aa, Brassica napus; identical to SEQ ID NO: 8838

SEQ ID NO: 96700 - DNA, 1743 bp, Brassica napus; identical to SEQ ID NO: 8839
  CDS (1)..(1743)

SEQ ID NO: 96701 - protein, 580 aa, Brassica napus; identical to SEQ ID NO: 8840

SEQ ID NO: 96702 - DNA, 1764 bp, Brassica napus; identical to SEQ ID NO: 8841
  CDS (1)..(1764)

SEQ ID NO: 96703 - protein, 587 aa, Brassica napus; identical to SEQ ID NO: 8842

SEQ ID NO: 96704 - DNA, 1533 bp, Brassica napus; identical to SEQ ID NO: 8843
  CDS (1)..(1533)

SEQ ID NO: 96705 - protein, 510 aa, Brassica napus; identical to SEQ ID NO: 8844

SEQ ID NO: 96706 - DNA, 1497 bp, Brassica napus; identical to SEQ ID NO: 8845
  CDS (1)..(1497)

SEQ ID NO: 96707 - protein, 498 aa, Brassica napus; identical to SEQ ID NO: 8846

SEQ ID NO: 96708 - DNA, 1584 bp, Brassica napus; identical to SEQ ID NO: 8847
  CDS (1)..(1584)

SEQ ID NO: 96709 - protein, 527 aa, Brassica napus; identical to SEQ ID NO: 8848

SEQ ID NO: 96710 - DNA, 1533 bp, Brassica napus; identical to SEQ ID NO: 8849
  CDS (1)..(1533)

SEQ ID NO: 96711 - protein, 510 aa, Brassica napus; identical to SEQ ID NO: 8850

SEQ ID NO: 96712 - DNA, 1584 bp, Brassica napus; identical to SEQ ID NO: 21831
  CDS (1)..(1584)

SEQ ID NO: 96713 - protein, 527 aa, Brassica napus; identical to SEQ ID NO: 8822

SEQ ID NO: 96714 - DNA, 1584 bp, Brassica napus; identical to SEQ ID NO: 8851
  CDS (1)..(1584)

SEQ ID NO: 96715 - protein, 527 aa, Brassica napus; identical to SEQ ID NO: 8852

SEQ ID NO: 96716 - DNA, 1497 bp, Brassica napus; identical to SEQ ID NO: 8855
  CDS (1)..(1497)

SEQ ID NO: 96717 - protein, 498 aa, Brassica napus; identical to SEQ ID NO: 8856

SEQ ID NO: 96718 - DNA, 1584 bp, Zea mays; identical to SEQ ID NO: 8857
  CDS (1)..(1584)

SEQ ID NO: 96719 - protein, 527 aa, Zea mays; identical to SEQ ID NO: 8858

SEQ ID NO: 96720 - DNA, 1728 bp, Glycine max; identical to SEQ ID NO: 8859
  CDS (1)..(1728)

SEQ ID NO: 96721 - protein, 575 aa, Glycine max; identical to SEQ ID NO: 8860

SEQ ID NO: 96722 - DNA, 1584 bp, Glycine max; identical to SEQ ID NO: 8861
  CDS (1)..(1584)

SEQ ID NO: 96723 - protein, 527 aa, Glycine max; identical to SEQ ID NO: 8862

SEQ ID NO: 96724 - DNA, 1584 bp, Glycine max; identical to SEQ ID NO: 8863
  CDS (1)..(1584)

SEQ ID NO: 96725 - protein, 527 aa, Glycine max; identical to SEQ ID NO: 8864

SEQ ID NO: 96726 - DNA, 1638 bp, Glycine max; identical to SEQ ID NO: 8865
  CDS (1)..(1638)

SEQ ID NO: 96727 - protein, 545 aa, Glycine max; identical to SEQ ID NO: 8866

SEQ ID NO: 96728 - DNA, 1638 bp, Glycine max; identical to SEQ ID NO: 8867
  CDS (1)..(1638)

SEQ ID NO: 96729 - protein, 545 aa, Glycine max; identical to SEQ ID NO: 8868

SEQ ID NO: 96730 - DNA, 1728 bp, Glycine max; identical to SEQ ID NO: 8869
  CDS (1)..(1728)

SEQ ID NO: 96731 - protein, 575 aa, Glycine max; identical to SEQ ID NO: 8870

SEQ ID NO: 96732 - DNA, 1749 bp, Glycine max; identical to SEQ ID NO: 8871
  CDS (1)..(1749)

SEQ ID NO: 96733 - protein, 582 aa, Glycine max; identical to SEQ ID NO: 8872

SEQ ID NO: 96734 - DNA, 1584 bp, Glycine max; identical to SEQ ID NO: 8873
  CDS (1)..(1584)

SEQ ID NO: 96735 - protein, 527 aa, Glycine max; identical to SEQ ID NO: 8874

SEQ ID NO: 96736 - DNA, 1749 bp, Glycine max; identical to SEQ ID NO: 8875
  CDS (1)..(1749)

SEQ ID NO: 96737 - protein, 582 aa, Glycine max; identical to SEQ ID NO: 8876

SEQ ID NO: 96738 - DNA, 1728 bp, Glycine max; identical to SEQ ID NO: 8877
  CDS (1)..(1728)

SEQ ID NO: 96739 - protein, 575 aa, Glycine max; identical to SEQ ID NO: 8878

SEQ ID NO: 96740 - DNA, 1749 bp, Glycine max; identical to SEQ ID NO: 8881
  CDS (1)..(1749)

SEQ ID NO: 96741 - protein, 582 aa, Glycine max; identical to SEQ ID NO: 8882

SEQ ID NO: 96742 - DNA, 1542 bp, Hordeum vulgare; identical to SEQ ID NO: 8883
  CDS (1)..(1542)

SEQ ID NO: 96743 - protein, 513 aa, Hordeum vulgare; identical to SEQ ID NO: 8884

SEQ ID NO: 96744 - DNA, 1584 bp, Oryza sativa; identical to SEQ ID NO: 8885
  CDS (1)..(1584)

SEQ ID NO: 96745 - protein, 527 aa, Oryza sativa; identical to SEQ ID NO: 8886

SEQ ID NO: 96746 - DNA, 1803 bp, Zea mays; identical to SEQ ID NO: 8887
  CDS (1)..(1803)

SEQ ID NO: 96747 - protein, 600 aa, Zea mays; identical to SEQ ID NO: 8888

SEQ ID NO: 96748 - DNA, 1698 bp, Triticum aestivum; identical to SEQ ID NO: 8889
  CDS (1)..(1698)

SEQ ID NO: 96749 - protein, 565 aa, Triticum aestivum; identical to SEQ ID NO: 8890

SEQ ID NO: 96750 - DNA, 1584 bp, Zea mays; identical to SEQ ID NO: 8891
  CDS (1)..(1584)

SEQ ID NO: 96751 - protein, 527 aa, Zea mays; identical to SEQ ID NO: 8892

SEQ ID NO: 96752 - DNA, 1728 bp, Zea mays; identical to SEQ ID NO: 8895
  CDS (1)..(1728)

SEQ ID NO: 96753 - protein, 575 aa, Zea mays; identical to SEQ ID NO: 8896

SEQ ID NO: 96754 - DNA, 1707 bp, Zea mays; identical to SEQ ID NO: 8897
  CDS (1)..(1707)

SEQ ID NO: 96755 - protein, 568 aa, Zea mays; identical to SEQ ID NO: 8898

SEQ ID NO: 96756 - DNA, 1629 bp, Zea mays; identical to SEQ ID NO: 8899
  CDS (1)..(1629)

SEQ ID NO: 96757 - protein, 542 aa, Zea mays; identical to SEQ ID NO: 8900

SEQ ID NO: 96758 - DNA, 1548 bp, Zea mays; identical to SEQ ID NO: 8901
  CDS (1)..(1548)

SEQ ID NO: 96759 - protein, 515 aa, Zea mays; identical to SEQ ID NO: 8902

SEQ ID NO: 96760 - DNA, 1542 bp, Zea mays; identical to SEQ ID NO: 8905
  CDS (1)..(1542)

SEQ ID NO: 96761 - protein, 513 aa, Zea mays; identical to SEQ ID NO: 8906

SEQ ID NO: 96762 - DNA, 1530 bp, Zea mays; identical to SEQ ID NO: 8903
  CDS (1)..(1530)

SEQ ID NO: 96763 - protein, 509 aa, Zea mays; identical to SEQ ID NO: 8904

SEQ ID NO: 96764 - DNA, 1707 bp, Zea mays; identical to SEQ ID NO: 8831
  CDS (1)..(1707)

SEQ ID NO: 96765 - protein, 568 aa, Zea mays; identical to SEQ ID NO: 8832

SEQ ID NO: 96766 - DNA, 1584 bp, Zea mays; identical to SEQ ID NO: 8907
  CDS (1)..(1584)

SEQ ID NO: 96767 - protein, 527 aa, Zea mays; identical to SEQ ID NO: 8908

SEQ ID NO: 96768 - DNA, 1554 bp, Zea mays; identical to SEQ ID NO: 8909
  CDS (1)..(1554)

SEQ ID NO: 96769 - protein, 517 aa, Zea mays; identical to SEQ ID NO: 8910

SEQ ID NO: 96770 - DNA, 1707 bp, Zea mays; identical to SEQ ID NO: 8911
  CDS (1)..(1707)

SEQ ID NO: 96771 - protein, 568 aa, Zea mays; identical to SEQ ID NO: 8912

SEQ ID NO: 96772 - DNA, 1728 bp, Zea mays; identical to SEQ ID NO: 8913
  CDS (1)..(1728)

SEQ ID NO: 96773 - protein, 575 aa, Zea mays; identical to SEQ ID NO: 8914

SEQ ID NO: 96774 - DNA, 26 bp, Artificial sequence
  primer
atgtctagattagaaagattgacctc

SEQ ID NO: 96775 - DNA, 25 bp, Artificial sequence
  primer
ttaaacggtagagacttgcaaagtg

SEQ ID NO: 96776 - protein, 563 aa, Artificial sequence
  consensus sequence
  Variant (4)..(5): Xaa in position 4 to 5 is any amino acid
  Variant (7)..(7): Xaa in position 7 is any amino acid
  Variant (10)..(21): Xaa in position 10 to 21 is any amino acid
  Variant (22)..(44): Xaa in position 22 to 44 is any or no amino acid
  Variant (46)..(48): Xaa in position 46 to 48 is any amino acid
  Variant (49)..(50): Xaa in position 49 to 50 is any or no amino acid
  Variant (52)..(52): Xaa in position 52 is any amino acid
  Variant (54)..(54): Xaa in position 54 is any amino acid
  Variant (58)..(58): Xaa in position 58 is any amino acid
  Variant (59)..(61): Xaa in position 59 to 61 is any or no amino acid
  Variant (63)..(77): Xaa in position 63 to 77 is any amino acid
  Variant (78)..(90): Xaa in position 78 to 90 is any or no amino acid
  Variant (92)..(93): Xaa in position 92 to 93 is any amino acid
  Variant (96)..(97): Xaa in position 96 to 97 is any amino acid
  Variant (99)..(109): Xaa in position 99 to 109 is any amino acid
  Variant (110)..(117): Xaa in position 110 to 117 is any or no amino acid
  Variant (119)..(138): Xaa in position 119 to 138 is any amino acid
  Variant (139)..(155): Xaa in position 139 to 155 is any or no amino acid
  Variant (157)..(187): Xaa in position 157 to 187 is any amino acid
  Variant (188)..(200): Xaa in position 188 to 200 is any or no amino acid
  Variant (202)..(203): Xaa in position 202 to 203 is any amino acid
  Variant (205)..(212): Xaa in position 205 to 212 is any amino acid
  Variant (213)..(224): Xaa in position 213 to 224 is any or no amino acid
  Variant (227)..(227): Xaa in position 227 is any amino acid
  Variant (228)..(229): Xaa in position 228 to 229 is any or no amino acid
  Variant (231)..(238): Xaa in position 231 to 238 is any amino acid
  Variant (239)..(240): Xaa in position 239 to 240 is any or no amino acid
  Variant (242)..(245): Xaa in position 242 to 245 is any amino acid
  Variant (246)..(246): Xaa in position 246 is any or no amino acid
  Variant (249)..(252): Xaa in position 249 to 252 is any amino acid
  Variant (253)..(253): Xaa in position 253 is any or no amino acid
  Variant (255)..(269): Xaa in position 255 to 269 is any amino acid
  Variant (270)..(278): Xaa in position 270 to 278 is any or no amino acid
  Variant (280)..(280): Xaa in position 280 is any amino acid
  Variant (282)..(291): Xaa in position 282 to 291 is any amino acid
  Variant (292)..(294): Xaa in position 292 to 294 is any or no amino acid
  Variant (296)..(299): Xaa in position 296 to 299 is any amino acid
  Variant (301)..(302): Xaa in position 301 to 302 is any amino acid
  Variant (311)..(311): Xaa in position 311 is any amino acid
  Variant (313)..(321): Xaa in position 313 to 321 is any amino acid
  Variant (324)..(333): Xaa in position 324 to 333 is any amino acid
  Variant (335)..(335): Xaa in position 335 is any amino acid
  Variant (337)..(337): Xaa in position 337 is any amino acid
  Variant (338)..(338): Xaa in position 338 is any or no amino acid
  Variant (343)..(344): Xaa in position 343 to 344 is any amino acid
  Variant (347)..(349): Xaa in position 347 to 349 is any amino acid
  Variant (351)..(351): Xaa in position 351 is any amino acid
  Variant (357)..(358): Xaa in position 357 to 358 is any amino acid
  Variant (364)..(365): Xaa in position 364 to 365 is any amino acid
  Variant (368)..(368): Xaa in position 368 is any amino acid
  Variant (370)..(371): Xaa in position 370 to 371 is any amino acid
  Variant (375)..(375): Xaa in position 375 is any amino acid
  Variant (377)..(377): Xaa in position 377 is any amino acid
  Variant (379)..(379): Xaa in position 379 is any amino acid
  Variant (381)..(382): Xaa in position 381 to 382 is any amino acid
  Variant (384)..(386): Xaa in position 384 to 386 is any amino acid
  Variant (388)..(389): Xaa in position 388 to 389 is any amino acid
  Variant (391)..(391): Xaa in position 391 is any amino acid
  Variant (392)..(397): Xaa in position 392 to 397 is any or no amino acid
  Variant (399)..(423): Xaa in position 399 to 423 is any amino acid
  Variant (424)..(452): Xaa in position 424 to 452 is any or no amino acid
  Variant (454)..(455): Xaa in position 454 to 455 is any amino acid
  Variant (457)..(488): Xaa in position 457 to 488 is any amino acid
  Variant (489)..(507): Xaa in position 489 to 507 is any or no amino acid
  Variant (509)..(530): Xaa in position 509 to 530 is any amino acid
  Variant (531)..(562): Xaa in position 531 to 562 is any or no amino acid
TKIXXTXGPXXXXXXXXXXXXXXXXXXXXXXXXXXXXXXXXXXXGXXXXXRXNXSHGXXXXHXXXXXXXXXXXXXXXXXXXXXXXXXXXXDXXGPXXRXXXXXXXXXXXXXXXXXXXGXXXXXXXXXXXXXXXXXXXXXXXXXXXXXXXXXXXXXGXXXXXXXXXXXXXXXXXXXXXXXXXXXXXXXXXXXXXXXXXXXXKXXNXXXXXXXXXXXXXXXXXXXXKDXXXDXXXXXXXXXXDXXXXXSFXXXXXDXXXXXXXXXXXXXXXXXXXXXXXXKXEXXXXXXXXXXXXXIXXXXDXXMVARGDLGXEXXXXXXXXXQKXXXXXXXXXXKXVXXATQMXXSMXXXPXPTRAEXXDVANAXXDGXDXXMLSXEXAXGXXPXXXVXXMXXXXXXXEXXXXXXXXXXXXXXXXXXXXXXXXXXXXXXXXXXXXXXXXXXXXXXXXXXXXXXTXXGXXXXXXXXXXXXXXXXXXXXXXXXXXXXXXXXXXXXXXXXXXXXXXXXXXXGXXXXXXXXXXXXXXXXXXXXXXXXXXXXXXXXXXXXXXXXXXXXXXXXXXXXXXG

SEQ ID NO: 96777 - protein, 44 aa, Artificial sequence
  protein pattern
  Variant (2)..(2): Xaa in position 2 is Ser or Thr
  Variant (3)..(3): Xaa in position 3 is Ala, Glu, Asn or Gln
  Variant (4)..(4): Xaa in position 4 is Ile, Leu, Met or Val
  Variant (5)..(5): Xaa in position 5 is Leu or Met
  Variant (6)..(6): Xaa in position 6 is any amino acid
  Variant (9)..(11): Xaa in position 9 to 11 is any amino acid
  Variant (12)..(13): Xaa in position 12 to 13 is any or no amino acid
  Variant (15)..(16): Xaa in position 15 to 16 is any or no amino acid
  Variant (21)..(22): Xaa in position 21 to 22 is any amino acid
  Variant (24)..(26): Xaa in position 24 to 26 is any amino acid
  Variant (28)..(31): Xaa in position 28 to 31 is any amino acid
  Variant (32)..(32): Xaa in position 32 is Ala, Gly, Ser or Thr
  Variant (34)..(35): Xaa in position 34 to 35 is any amino acid
  Variant (39)..(39): Xaa in position 39 is Ala, Glu, Gly or Asn
  Variant (41)..(41): Xaa in position 41 is Ser or Thr
  Variant (42)..(42): Xaa in position 42 is Ala, Ser or Thr
  Variant (43)..(43): Xaa in position 43 is any amino acid
AXXXXXSMXXXXXPXXTRAEXXDXXXAXXXXXDXXMLSXEXXXG

SEQ ID NO: 96778 - protein, 18 aa, Artificial sequence
  protein pattern
  Variant (2)..(4): Xaa in position 2 to 4 is any amino acid
  Variant (5)..(5): Xaa in position 5 is any or no amino acid
  Variant (7)..(7): Xaa in position 7 is Ala, Gly, Ser or Val
  Variant (8)..(8): Xaa in position 8 is any amino acid
  Variant (10)..(10): Xaa in position 10 is Ile or Val
  Variant (15)..(15): Xaa in position 15 is Leu or Met
  Variant (16)..(16): Xaa in position 16 is Ala or Gly
  Variant (17)..(17): Xaa in position 17 is any amino acid
IXXXXDXXMXARGDXXXE

SEQ ID NO: 96779 - DNA, 3543 bp, Saccharomyces cerevisiae
  CDS (1)..(3543)
atgagcagtagcaagaaattggccggtcttagggacaatttcagtttgctcggcgaaaagaataagatcttggtcgccaatagaggtgaaattccgattagaatttttagatctgctcatgagctgtctatgagaaccatcgccatatactcccatgaggaccgtctttcaatgcacaggttgaaggcggacgaagcgtatgttatcggggaggagggccagtatacacctgtgggtgcttacttggcaatggacgagatcatcgaaattgcaaagaagcataaggtggatttcatccatccaggttatgggttcttgtctgaaaattcggaatttgccgacaaagtagtgaaggccggtatcacttggatcggccctccagctgaagttattgactctgtgggtgacaaagtctctgccagacacttggcagcaagagctaacgttcctaccgttcccggtactccaggacctatcgaaactgtgcaagaggcacttgacttcgttaatgaatacggctacccggtgatcattaaggccgcctttggtggtggtggtagaggtatgagagtcgttagagaaggtgacgacgtggcagatgcctttcaacgtgctacctccgaagcccgtactgccttcggtaatggtacctgctttgtggaaagattcttggacaagccaaagcatattgaagttcaattgttggctgataaccacggaaacgtggttcatcttttcgaaagagactgttctgtgcaaagaagacaccaaaaagttgtcgaagtcgctccagcaaagactttgccccgtgaagttcgtgacgctattttgacagatgctgttaaattagctaaggtatgtggttacagaaacgcaggtaccgccgaattcttggttgacaaccaaaacagacactatttcattgaaattaatccaagaattcaagtggagcataccatcactgaagaaatcaccggtattgacattgtttctgcccaaatccagattgccgcaggtgccactttgactcaactaggtctattacaggataaaatcaccacccgtgggttttccatccaatgtcgtattaccactgaagatccctctaagaatttccaaccggataccggtcgcctggaggtctatcgttctgccggtggtaatggtgtgagattggacggtggtaacgcttatgcaggtgctactatctcgcctcactacgactcaatgctggtcaaatgttcatgctctggttctacttatgaaatcgtccgtaggaagatgattcgtgccctgatcgaattcagaatcagaggtgttaagaccaacattcccttcctattgactcttttgaccaatccagtttttattgagggtacatactggacgacttttattgacgacaccccacaactgttccaaatggtatcgtcacaaaacagagcgcaaaaactgttacactatttggcagacttggcagttaacggttcttctattaagggtcaaattggcttgccaaaactaaaatcaaatccaagtgtcccccatttgcacgatgctcagggcaatgtcatcaacgttacaaagtctgcaccaccatccggatggagacaagtgctactggaaaagggaccatctgaatttgccaagcaagtcagacagttcaatggtactctactgatggacaccacctggagagacgctcatcaatctctacttgcaacaagagtcagaacccacgatttggctacaatcgctccaacaaccgcacatgcccttgcaggtgctttcgctttagaatgttggggtggtgctacattcgacgttgcaatgagattcttgcatgaggatccatgggaacgtctgagaaaattaagatctctggtgcctaatattccattccaaatgttattacgtggtgccaacggtgtggcttactcttcattacctgacaatgctattgaccattttgtcaagcaagccaaggataatggtgttgatatatttagagtttttgatgccttgaatgatttagaacaattaaaagttggtgtgaatgctgtcaagaaggccggtggtgttgtcgaagctactgtttgttactctggtgacatgcttcagccaggtaagaaatacaacttagactactacctagaagttgttgaaaaaatagttcaaatgggtacacatatcttgggtattaaggatatggcaggtactatgaaaccggccgctgccaaattattaattggctccctaagaaccagatatccggatttaccaattcatgttcacagtcatgactccgcaggtactgctgttgcgtctatgactgcatgtgccctagcaggtgctgatgttgtcgatgtagctatcaattcaatgtcgggcttaacttcccaaccatcaattaatgcactgttggcttcattagaaggtaacattgatactgggattaacgttgagcatgttcgtgaattagatgcatactgggccgaaatgagactgttgtattcttgtttcgaggccgacttgaagggaccagatccagaagtttaccaacatgaaatcccaggtggtcaattgactaacttgttattccaagctcaacaactgggtcttggtgaacaatgggctgaaactaaaagagcttacagagaagccaattacctactgggagatattgttaaagttaccccaacttctaaggttgtcggtgatttagctcaattcatggtttctaacaaactgacttccgacgatattagacgtttagctaattctttggactttcctgactctgttatggacttttttgaaggtttaattggtcaaccatacggtgggttcccagaaccattaagatctgatgtattgagaaacaagagaagaaagttgacgtgccgtccaggtttagaattagaaccatttgatctcgaaaaaattagagaagacttgcagaacagattcggtgatattgatgaatgcgatgttgcttcttacaatatgtatccaagggtctatgaagatttccaaaagatcagagaaacatacggtgatttatcagttctaccaaccaaaaatttcctagcaccagcagaacctgatgaagaaatcgaagtcaccatcgaacaaggtaagactttgattatcaaattgcaagctgttggtgacttaaataagaaaactgggcaaagagaagtgtattttgaattgaacggtgaattaagaaagatcagagttgcagacaagtcacaaaacatacaatctgttgctaaaccaaaggctgatgtccacgatactcaccaaatcggtgcaccaatggctggtgttatcatagaagttaaagtacataaagggtctttggtgaaaaagggcgaatcgattgctgttttgagtgccatgaaaatggaaatggttgtctcttcaccagcagatggtcaagttaaagacgttttcattaaggatggtgaaagtgttgacgcatcagatttgttggttgtcctagaagaagaaaccctacccccatcccaaaaaaagtaa

SEQ ID NO: 96780 - protein, 1180 aa, Saccharomyces cerevisiae; identical to SEQ ID NO: 10063

SEQ ID NO: 96781 - DNA, 3459 bp, Mesorhizobium loti MAFF303099
  CDS (1)..(3459): transl_table=11
ttggccatcacgaagatcctcgtcgccaaccggtcagaaatcgccatccgcgtctttcgcgcggccaatgaactgggcctcaaaaccgtggcgatctgggccgaggaagacaaatattcgctgcaccgcttcaaggccgacgagagctaccaggtcgggcgcggtccgcatctcaccaaggatatggggccgatcgagagctatctgtcgatcgaggaggtgatccgcgtcgcccggctctcgggcgccgatgccatccaccccggctacgggcttctgtccgaaagccccgaattcgccgaagcctgcgcgcaagcgggcatcaccttcatcgggccgaagccggacacgatgcgccgcctcggcaacaaggtcgcggcgcgcaatctcgccatcgaggtcggcgtgcctgtcattcccgccaccgatccgttgccggacgatatggaggcggtcaagaaactggccaaggagatcggctatccagtgatgctcaaggcctcctggggcggcggtgggcgcggcatgcgcgccatccgctccgaggccgatctcgcccgtgaggtcacggaaggcaagcgcgaggcgaaagccgccttcggcaaggacgaggtctatctcgaaaagctgatcgagcgcgcccgccacgtcgaggtgcaggtgcttggcgacacgcatggcaatgccgtgcacctgttcgagcgcgactgctcgatccagcgccgcaaccagaaggtcgtcgagcgggcgccggcgccctatctcgaaatgtcgcagcgcgaggagctttgcggctacgcgctgaagatcgcgcgcgagaccagctatatcggcgccggcacggtcgagttcctgcaggatgccgataccggaaaattctatttcatcgaggtcaacccgcgcatccaggtcgagcataccgtcaccgagcaggtgaccggcatcgatatcgtcaaggcgcagatccacatcctcgacggcttcgccatcggcacaccgcaatcgggcgtgccggcgcagaaggatatcaggctgaacggccatgccttgcagtgccgcatcaccaccgaggatcccgagcacaatttcatcccggactatggccgcatcaccgcctatcgcggcgccaccggcttcggcatccggctggatggcggcaccgcctattctggcgcggtcatcacccgcttctacgatccgctgctggagaaggtgacggcgtgggcgccgacgccggccgagaccattgcccgcatgaaccgggcgctgcgcgaattccgcattcgcggcgttgccaccaacctcaccttcctcgaagcgatcatcaaccacccgagcttcgccgacaattcctacacgaccaagttcatcgacacgacgccggagctgttccagcaggtcaagcggcaggaccgcgcgaccaagctgctcaactatctggccgatgtcagcgtcaacggccatcccgagacgcgcggccggccgacgccgaaggccgatgcggccgcaccggtcgtgccctatctcaacggcaatgtgccgggcggcagcaagcagaagctggacgtgctcggtccggaaaaattcgccggctggatgcgcgaacaaaggcaagttctggtcaccgatacgacgatgcgcgacggccaccagtcgctgctcgcgacgcgcatgcgcacgcacgacattgccaatattgccggcacctatgcgcgcgccctgccgcagcttctgtcgctcgaatgctggggcggcgcgaccttcgacgtcgccatgcgcttccttaccgaggatccttgggagcggctgtcgctggtgcgcgaggcggcgcccaacctgttgctgcagatgctgctgcgcggcgccaacggcgtcggttacaccaattatcccgacaatgtcgtgcagcatttcgtcaagcaggcggcgagcggcggtatcgacctgttccgcgtcttcgactgcctgaactgggtcgagaacatgcgcgtcgccatggacgcggtcggcgccgaaggcaagctgatcgaagcggcgatgtgctacaccggcgacattctcgatccggcgcgggccaaatacgatctgaaatattatgtcggcctggccagcgaattgcaggccgccggcgcccacatcatcgccgtcaaggacatggccggcctgttgaagcccgccgccgcccgcgtgctgttcaaggcgctgcgcgaggcgaccgacctgccgatccatttccatacccacgacacgtctggcctgtcggcggcgaccgtgctggcggcggttgagagcggcgtcgacgccatcgatgcggcgatggacgccttctccggcaacacgtcgcagccttgcctgggctcgatcgtcgaggcgctgaagggcaccgagcgcgacccgggcctcgacccgcaatggatccgcaagatctcgttctactgggaagcggtgcgcaaccagtacgccgccttcgaaagcgacctcaaagggccggcttcggaagtctacctgcatgaaatgccgggcggacaattcaccaacctcaaggagcaggcgcgctcgctcgggctggaaacgcgctggcatgaggtggcgcagacctatcacgacgtcaatctgatgttcggcgacatcgtcaaggtgacgccgtcatccaaggtcgtcggcgacatggccctgatgatggtcagccaggacctgaccgtcgccgatgtcgagaacccggccagggatattgccttcccggactcggtcgtctcgatgctgcgcggcgatctcggccagtcgcccggcggttggccggcggcgctgcagaagaaggcgctgaaaggcgacgagccgatcacggcacggccaggctcgctgctcaagcccgccgatctcaaggccagccgcaaggagatcgaggagaagctcgagcgcaagctctcggaatacgaattcgcctcctggctgatgtatccgaaggtgttcactgacttcgccggcgcgcaggaaacctacggcccggtcagcgtcctgccgacgccgacctatttctacggcatgaaatcggaagacgagatcttcatcgacatcgagaagggtaagacgctggtcgtgcggtgccttgccatcggcgatgtggacgacaagggcatggtcacggtgttcttcgagctcaacggccagccacggcgcgtgaaggtgccggaccgggcgcatggcgcctccgccgccaaggcgcgccgtaaggccgagcctggcaacgaggcgcatgtcggcgcgccgatgccgggcgtggtttcggcgctttcggtcgccacggggcaagcggtgaaagccggtgacgtgctgctgtccatcgaggcgatgaagatggaaacggcgctgcatgccgagcgtgacggcaccgtcgccgaggtgctggtcaaggccggcgaccagatcgatgccaaggatctgctgatagccttcgcttga

SEQ ID NO: 96782 - protein, 1152 aa, Mesorhizobium loti MAFF303099
MAITKILVANRSEIAIRVFRAANELGLKTVAIWAEEDKYSLHRFKADESYQVGRGPHLTKDMGPIESYLSIEEVIRVARLSGADAIHPGYGLLSESPEFAEACAQAGITFIGPKPDTMRRLGNKVAARNLAIEVGVPVIPATDPLPDDMEAVKKLAKEIGYPVMLKASWGGGGRGMRAIRSEADLAREVTEGKREAKAAFGKDEVYLEKLIERARHVEVQVLGDTHGNAVHLFERDCSIQRRNQKVVERAPAPYLEMSQREELCGYALKIARETSYIGAGTVEFLQDADTGKFYFIEVNPRIQVEHTVTEQVTGIDIVKAQIHILDGFAIGTPQSGVPAQKDIRLNGHALQCRITTEDPEHNFIPDYGRITAYRGATGFGIRLDGGTAYSGAVITRFYDPLLEKVTAWAPTPAETIARMNRALREFRIRGVATNLTFLEAIINHPSFADNSYTTKFIDTTPELFQQVKRQDRATKLLNYLADVSVNGHPETRGRPTPKADAAAPVVPYLNGNVPGGSKQKLDVLGPEKFAGWMREQRQVLVTDTTMRDGHQSLLATRMRTHDIANIAGTYARALPQLLSLECWGGATFDVAMRFLTEDPWERLSLVREAAPNLLLQMLLRGANGVGYTNYPDNVVQHFVKQAASGGIDLFRVFDCLNWVENMRVAMDAVGAEGKLIEAAMCYTGDILDPARAKYDLKYYVGLASELQAAGAHIIAVKDMAGLLKPAAARVLFKALREATDLPIHFHTHDTSGLSAATVLAAVESGVDAIDAAMDAFSGNTSQPCLGSIVEALKGTERDPGLDPQWIRKISFYWEAVRNQYAAFESDLKGPASEVYLHEMPGGQFTNLKEQARSLGLETRWHEVAQTYHDVNLMFGDIVKVTPSSKVVGDMALMMVSQDLTVADVENPARDIAFPDSVVSMLRGDLGQSPGGWPAALQKKALKGDEPITARPGSLLKPADLKASRKEIEEKLERKLSEYEFASWLMYPKVFTDFAGAQETYGPVSVLPTPTYFYGMKSEDEIFIDIEKGKTLVVRCLAIGDVDDKGMVTVFFELNGQPRRVKVPDRAHGASAAKARRKAEPGNEAHVGAPMPGVVSALSVATGQAVKAGDVLLSIEAMKMETALHAERDGTVAEVLVKAGDQIDAKDLLIAFA

SEQ ID NO: 96783 - DNA, 3453 bp, Bacillus halodurans C-125
  CDS (1)..(3453): transl_table=11
atggacggattaaagaacataaagaaagtgttagttgcaaaccgaggcgaaattgccatccgtatttttcgcgcgtgtacggaattacatattcgtacagtagctatttactcaaaagaggacacaggcgcttaccatcgctataaggcagatgaagcttacttagtaggggaagggaaaaaaccaatcgaggcttatctcgatattgaaggcattatcgaaattgccaaacgtcatggtgtggatgccattcaccctggttatggatttttatctgaaaatatcgaattcgcgaaacgctgccatgaggaaggcattatcttcatcggacctgagcttgaacacttggtcatgtttggggataaagttcaagcccgtgagcaagcgattaaggccaatttaccagtcattcctggaagtgatggtcccgtttctagcctagaggatgtgaaagcttttgcggacaagcatggctatccgttcatcattaaagctgctcttggtggtgggggacgcggcatgcgaatcgttcgttctgaaaatgatgttcaggaatcatatgagcgggcaaagtcagaagcgaaagctgcttttgggaacgacgaagtatatgtggagaaatttatcgaaaacccgaaacatattgaagtacaaattcttgccgataaacacggcaacaccttgcacttgtatgagcgcgattgctctgtccaacggcgccatcaaaaagttgtggaagttgccccaagtgtatcattatctgaagatgtccgtgagcgcatctgtcaagcggccgttcagctagcggaaaacgttaattatgtaaatgctggtacggttgagtttcttgttgaccgagaaggaaatttttacttcatcgaagtgaacccacggattcaggtagagcatacgattacggaaatggttacaggaatcgatatcgtgcaatcccagctctttattgctgacggagagcatttgcatggggacaggcttgggattccgaagcaggaagagatcgtttgccatggatacgcgattcaatctcgcgtgacgacagaagatccaagcaacgggtttttgcctgacactggccgtattaacgcctatcgttccggtggtggattcggtgtacgtcttgacgcagggaacggattccaaggagctgttattacaccgtactatgattcgttgctcgtaaaagtgtcaacatgggcgctgacgtttgaaggggctgctgcaaaaatgctgcgaaaccttcgcgagttccgaattcgtggaattaaaacaaacattgcgtttcttgaaaatgtcgttcagcatcgccagtttttatccggtgaatacaatacgtcctttattgaccaaacacctgaactgtttgtgttccctaaacggaaagaccgggggacgaagatgctttcatttattggtgagacgattgtcaacgggtatcctgggcttgaaaaaacgaaaaaaccggtgtttgacaagcctccggttccaaagttaaagctatccgaaccgataccagacggaacgaagcaaatacttgatcagcacgggccagaaggattggcgaagtgggtcaaggaacaaaagcatgttctgttgacggatacgacgttccgcgacgcccatcagtcgctcttagcaacgcgcgttcggacacatgatttaaaacaaattgcagaaccgacagcaaggctactgccaaacttgttttccatggaaatgtggggaggcgcgacgtttgatgtggccatgcgtttccttcatgaagatccgtgggagcgtctgttaatcttgaggaaaaaagcacctaatgttttgtttcaaatgttgcttcgcgcctccaacgcagtcggatacaaaaattatccagacaatttgatccgtgaatttgtcgataagtcagcgaatgctgggattgatgtgttccgcatcttcgatagcttaaactgggttgaaggtatgaagttagccattgaagcggttggggaagcaaataaaattgctgaagctacgatttgttatacgggtgacattttagattcgagcagaccgaagtacgatttggcgtactataaaaaattagcgaaagaactagaagcagcaggtgcacacattcttggaattaaagatatggcaggactcttaaagccagaagctgcttaccaactagtggcagaattaaaggatacggtgacgatccccgttcaccttcatacacatgatacgagcggtaatggtatctttacgtatgctcgggccattgaagcgggcgtcgatatcgttgacgtggctgtaagttcaatggcaggtctcacatcacagccgagcgcgaatagcttatactatgcactagcggactctgaacgtcaaccgaatgtgaacattaccgcactagagcaattagctgaattctgggaagagacgcggaagttttatgctggattcgaaagtggtatgaacgcaccacacactgaggtatacgagcatgaaatgccaggtggacagtatagtaacctacagcagcaagcgaaagcagtaggtctcggtcatcgttggaacgaagtgaagaaaatgtaccggacggtgaacgacatgtttggagatgtcgtcaaagtaacgccatcatctaaagtagtcggtgatatggccttgtacatggtgcaaaacgacctgaccgaggaagaggtttatgagaatggtcataagcttgacttccctgattcagttgttgagttttttgaaggacagctaggtcaaccgtaccaagggtttccaaagaaattgcaggaaatcatcctgaaaggacggaaaccaattacgaatcgccctggtgaaaatatggagccaatccaatttgaggcgattaaagaagagctatataacaagttggatcgtcaagtgacgagccatgacattctatcatatgctctttatccaaaagtctttatggaatttgaacggttccgtcaaacattcggagatgtctcggttcttgatacacctaccttcttctatggtttacgtccaggtgaggaaattgaagtggaaatcgaacaagggaaaacattaattgtaaaatttatttccctttccaagccacaggatgatggaaaccggatcgtttactttgaattgaacggtcaaccacgggaagtgttgattaaagaccaaagcgtgaagacgagcattatttctcgtccaaaggccgataaatcaaatcctaatcatatcggagcgtccatgccaggaacggttgtgaaggctcttgttgaaaagggtgacaaagtgaagcaaggagatcatctcatgatcacggaagctatgaagatggaaacgactgtacaagccccatttgatggagaagttgttgccttgcatgtgaaagacggagatgcgattcaaacaggtgatttactaatcgaagtgaaagagctataa

SEQ ID NO: 96784 - protein, 1150 aa, Bacillus halodurans C-125
MDGLKNIKKVLVANRGEIAIRIFRACTELHIRTVAIYSKEDTGAYHRYKADEAYLVGEGKKPIEAYLDIEGIIEIAKRHGVDAIHPGYGFLSENIEFAKRCHEEGIIFIGPELEHLVMFGDKVQAREQAIKANLPVIPGSDGPVSSLEDVKAFADKHGYPFIIKAALGGGGRGMRIVRSENDVQESYERAKSEAKAAFGNDEVYVEKFIENPKHIEVQILADKHGNTLHLYERDCSVQRRHQKVVEVAPSVSLSEDVRERICQAAVQLAENVNYVNAGTVEFLVDREGNFYFIEVNPRIQVEHTITEMVTGIDIVQSQLFIADGEHLHGDRLGIPKQEEIVCHGYAIQSRVTTEDPSNGFLPDTGRINAYRSGGGFGVRLDAGNGFQGAVITPYYDSLLVKVSTWALTFEGAAAKMLRNLREFRIRGIKTNIAFLENVVQHRQFLSGEYNTSFIDQTPELFVFPKRKDRGTKMLSFIGETIVNGYPGLEKTKKPVFDKPPVPKLKLSEPIPDGTKQILDQHGPEGLAKWVKEQKHVLLTDTTFRDAHQSLLATRVRTHDLKQIAEPTARLLPNLFSMEMWGGATFDVAMRFLHEDPWERLLILRKKAPNVLFQMLLRASNAVGYKNYPDNLIREFVDKSANAGIDVFRIFDSLNWVEGMKLAIEAVGEANKIAEATICYTGDILDSSRPKYDLAYYKKLAKELEAAGAHILGIKDMAGLLKPEAAYQLVAELKDTVTIPVHLHTHDTSGNGIFTYARAIEAGVDIVDVAVSSMAGLTSQPSANSLYYALADSERQPNVNITALEQLAEFWEETRKFYAGFESGMNAPHTEVYEHEMPGGQYSNLQQQAKAVGLGHRWNEVKKMYRTVNDMFGDVVKVTPSSKVVGDMALYMVQNDLTEEEVYENGHKLDFPDSVVEFFEGQLGQPYQGFPKKLQEIILKGRKPITNRPGENMEPIQFEAIKEELYNKLDRQVTSHDILSYALYPKVFMEFERFRQTFGDVSVLDTPTFFYGLRPGEEIEVEIEQGKTLIVKFISLSKPQDDGNRIVYFELNGQPREVLIKDQSVKTSIISRPKADKSNPNHIGASMPGTVVKALVEKGDKVKQGDHLMITEAMKMETTVQAPFDGEVVALHVKDGDAIQTGDLLIEVKEL

SEQ ID NO: 96785 - DNA, 3414 bp, Lactococcus lactis subsp. lactis Il1403
  CDS (1)..(3414): transl_table=11
atgaaaaaactactcgtcgccaatcgtggagaaatcgccgttcgtgtctttcgtgcctgtaatgaactcggactttctactgtagccgtctatgcaagagaagatgaatattctgttcatcgctttaaagcagatgaatcttatctaatcggtcaaggaaaaaaaccaattgatgcctatttggatattgatgatatcattcgtgttgcccttgaatcaggagcagatgctattcacccaggttatggcctcttatctgaaaatctcgaatttgctaccaaagttcgcgcagcaggtttagtttttgtgggtcctgaacttcatcatttggatattttcggtgataaaattaaagctaaagcagctgccgacgaagcaaaagttccaggaattcccggaacaaatggagcagtagatatcgacggcgctttagaatttgctaaaacttacggttatccagttatgattaaggccgctttaggcggtggtggtcgcggaatgcgagttgcgagtaatgatgctgaaatgcatgatggttatgctagagcaaaatcagaagcaattggagcttttggttctggcgaaatctatgttgaaaaatatattgaaaatccaaaacatattgaagtccaaattcttggagatagtcatggaaatattattcacctccatgagcgtgactgttcagtacaacgacgtaatcaaaaagtcattgaaattgcgccagccgtgggactttcactggacttccgtaacgaaatatgtgaagcagcagtcaaactttgtaaaaatgttggctatgttaatgctggtacagttgagtttcttgttaaagatgataaattttatttcattgaagtaaatccacgtgttcaagttgaacatacaattacggaacttatcacaggtgtagatattgtccaagctcaaattttgattgctcaaggtaaagacttacatagagaaattggacttccagcacagtctgaaattccacttttgggttcagcaattcaatgtcgaatcacaacagaagatccacaaaatggattcttgccagacacaggtaaaattgatacttaccgttcaccaggtggttttggtgtacgtttagatgtcggaaatgcctatgctggatatgaagtaactccatattttgattcacttttagtaaaagtttgtacttttgccaatgaatttagtgacaccgtaagaaaaatggaccgcgttctccatgaattccgtattcgtggtgtcaaaacaaatattcctttcttgattaatgttattgctaatgaaaacttcacaagtggtcaagcaacaacaacctttattgataatacaccaagtctgttcaacttcccacacttacgtgaccgtggaacaaagacgctgcattatttatcaatgattacagtcaatggcttcccagggattgaaaatactgaaaaacgtcattttgaagaaccacgtcaaccccttcttaatcttgaaaagaaaaagacagccaaaaatatcttagatgaacaaggggctgatgctgttgttgattatgttaaaaatacaaaagaagtattattaacagatacaactttacgtgatgctcaccaatccttgcttgctactcgcttacgtttacaagatatgaaaggaattgcccaagcgattgaccaagggctaccagaacttttctcagctgagatgtggggtggtgcaacctttgatgtggcttatcgtttcttgaatgaatcaccatggtatcgtctgcgtaaactacgtaaactcatgccaaataccatgttccaaatgctcttccgtggttcaaatgcagttggttaccaaaactatccagataatgtgattgaagaatttatccgagtagcggcgcatgaaggtatcgatgttttccgtatctttgatagtcttaactggttaccccaaatggaaaaatccattcaagccgttcgcgataatggaaaaattgcagaagcaacaatttgttatacgggagatatcctagacccaagccgaccaaaatataatattcaatactataaagacttagcaaaagaattagaagcaacaggtgctcatatcttggcagttaaagatatggcaggtttattgaaacctcaagctgcttatcgtttgatttcagaattaaaagataccgttgatttgccaattcatttgcatacacacgatacttcaggaaatggaattattacatattctggtgcaactcaagcaggtgtagacattattgacgtagcaacagcgagtcttgctggcggaacatctcaaccatcaatgcaatctatttactatgcacttgaacatggtcctcgccatgcttcaattaatgtaaaaaatgctgaacaaattgaccattattgggaagatgttcgtaaatattatgcaccatttgaagcgggtattacaagtcctcagacagaagtttacatgcatgaaatgcctggtggtcaatacactaacctaaaatctcaggcagcagcagttggtcttggacatcgttttgatgaaatcaaacaaatgtatcgtaaagttaacatgatgtttggagatattattaaagtaactccttcttcaaaagtagttggagatatggctctctttatgattcaaaatgatttaacagaagaagatgtttatgcgcgtggtaacgaacttaatttcccagaatctgtagtatcattcttccgtggagatttaggacaaccagtgggtggcttcccagaagaattacaaaaaattatcgtgaaagataaagccgtaattactgaccgtccaggcttacacgcagaaaaagttgattttgaaactgttaaagcagacctagaacaaaaaattggctatgaaccaggagatcacgaagttatctcatatatcatgtatccacaagttttccttgattatcaaaaaatgcaaagagaatttggagcagttacactacttgacactcctactttcttacatggaatgcgtctcaatgaaaaaattgaagtacaaattgaaaaaggtaaaacactcagcattcgtttagatgaaataggagaacctgacctagctggaaatcgtgttctcttctttaacctaaatggtcaacgtcgagaagtcgtaattaatgaccaatctgtacaaactcaagttgtggctaaacgcaaagccgaaacaggaaatccaaaccaaattggagctactatgccaggttctgttcttgaaattttagttaaagctggtgacaaagttcaaaaaggtcaagccttgatggttactgaagccatgaaaatggaaacaactattgaagcaccatttgatggcgagattgttgaccttcatgtggttaaaggtgaggcaattcaaactcaagacttgttaatcgaaattaattaa

SEQ ID NO: 96786 - protein, 1137 aa, Lactococcus lactis subsp. lactis Il1403
MKKLLVANRGEIAVRVFRACNELGLSTVAVYAREDEYSVHRFKADESYLIGQGKKPIDAYLDIDDIIRVALESGADAIHPGYGLLSENLEFATKVRAAGLVFVGPELHHLDIFGDKIKAKAAADEAKVPGIPGTNGAVDIDGALEFAKTYGYPVMIKAALGGGGRGMRVASNDAEMHDGYARAKSEAIGAFGSGEIYVEKYIENPKHIEVQILGDSHGNIIHLHERDCSVQRRNQKVIEIAPAVGLSLDFRNEICEAAVKLCKNVGYVNAGTVEFLVKDDKFYFIEVNPRVQVEHTITELITGVDIVQAQILIAQGKDLHREIGLPAQSEIPLLGSAIQCRITTEDPQNGFLPDTGKIDTYRSPGGFGVRLDVGNAYAGYEVTPYFDSLLVKVCTFANEFSDTVRKMDRVLHEFRIRGVKTNIPFLINVIANENFTSGQATTTFIDNTPSLFNFPHLRDRGTKTLHYLSMITVNGFPGIENTEKRHFEEPRQPLLNLEKKKTAKNILDEQGADAVVDYVKNTKEVLLTDTTLRDAHQSLLATRLRLQDMKGIAQAIDQGLPELFSAEMWGGATFDVAYRFLNESPWYRLRKLRKLMPNTMFQMLFRGSNAVGYQNYPDNVIEEFIRVAAHEGIDVFRIFDSLNWLPQMEKSIQAVRDNGKIAEATICYTGDILDPSRPKYNIQYYKDLAKELEATGAHILAVKDMAGLLKPQAAYRLISELKDTVDLPIHLHTHDTSGNGIITYSGATQAGVDIIDVATASLAGGTSQPSMQSIYYALEHGPRHASINVKNAEQIDHYWEDVRKYYAPFEAGITSPQTEVYMHEMPGGQYTNLKSQAAAVGLGHRFDEIKQMYRKVNMMFGDIIKVTPSSKVVGDMALFMIQNDLTEEDVYARGNELNFPESVVSFFRGDLGQPVGGFPEELQKIIVKDKAVITDRPGLHAEKVDFETVKADLEQKIGYEPGDHEVISYIMYPQVFLDYQKMQREFGAVTLLDTPTFLHGMRLNEKIEVQIEKGKTLSIRLDEIGEPDLAGNRVLFFNLNGQRREVVINDQSVQTQVVAKRKAETGNPNQIGATMPGSVLEILVKAGDKVQKGQALMVTEAMKMETTIEAPFDGEIVDLHVVKGEAIQTQDLLIEIN

SEQ ID NO: 96787 - DNA, 3384 bp, Mycobacterium tuberculosis CDC1551
  CDS (1)..(3384): transl_table=11
gtgttttccaaggtgctcgtcgccaatcgcggggagatcgcgatccgggcctttcgtgccgcctacgaactgggcgtcggaaccgtggccgtttatccgtacgaggaccgcaattcgcagcaccgtctcaaggcggacgagtcttaccagatcggcgacatcggtcacccggtgcatgcatacctgtcggtcgacgagatcgtcgcgacggcccgtcgggcgggtgccgacgctatctaccctggctacgggtttctatcggagaatccggatctggctgcggcatgcgcggcggcgggcatcagcttcgtcggtcccagcgccgaagtgcttgagctggctgggaataagtctcgcgccatcgcggcggcccgcgaagccggcttgcccgtgctgatgtcctcggcgccgtcggcctcggtcgacgaactgctgtcggttgcggccggcatgccgtttccgttgttcgtcaaggcagttgccggtggcgggggccggggtatgcgtcgtgtcggcgatatcgcggcgcttccggaggcgatcgaagccgccagccgggaagccgagtcggcgttcggggacccgacggtctatctcgagcaggcagtgatcaatccacgccacatcgaggtgcagattctggcggacaacctcggcgacgtgatccatctctatgagcgtgactgcagtgtgcagcgtcgccatcagaaggtcatcgagctggcgcccgcgccgcacctggacgccgagttgcgttacaagatgtgcgtcgatgcggtcgccttcgcccgccatatcgggtacagctgcgcgggcaccgtcgagttcctgctggacgagcgaggggagtatgtcttcatcgagatgaatccgcgggttcaggtggagcacacggtgaccgaggagattaccgacgtcgacctggtcgccagccagctgcgcattgccgccggggagacgctcgaacaattgggcctgcggcaggaggacatcgcaccgcatggcgccgcactacagtgccggatcaccaccgaggatccggccaacggcttccggccggacacgggccggatcagcgcgttgcgcaccgccggcggtgccggtgtccgcctggacggcagcaccaacctgggcgcagaaatcagcccgtacttcgactccatgctggtcaagctgacctgtcggggccgtgacctccctaccgcagtgagccgtgcgcgccgggcgatcgcggagttccggatccgcggggtatcgacgaatattccgttcctgcaagcggtcctggatgacccggacttccgagcgggccgggtcaccacgtccttcattgatgagcggccgcagctgctgaccgcgcgcgcctcggccgaccgcggcaccaagatccttaacttcctggccgatgtcaccgtcaacaacccgtatggctcgcgtccgtcaacgatctacccggacgacaagctgcccgatcttgatctgcgggccgcaccaccggccgggtccaagcagcgactagtcaagttggggccggaaggatttgctcgttggctgcgggagtcggccgcggtcggggtcaccgataccacattccgggatgctcaccagtcgttactggctacccgagtacgcaccagcggactgtcgcgggtggcaccgtatctcgcgcggaccatgccgcagctgttgtccgtggagtgttggggcggtgcgacttacgatgtggcgctgcgctttctcaaggaggatccctgggaacggctggccacactgcgtgcagcaatgcccaatatctgcttgcagatgctattgcggggccgcaataccgtgggctacacgccgtacccggaaatcgtgacgtcggcgtttgtgcaagaagcaacagccaccggtatcgacatctttcgtatcttcgacgcgctcaacaacatcgagtcgatgcgtccggcgatcgacgcagtacgcgaaacaggttctgcgatagcagaagtcgcgatgtgctacacgggcgaccttaccgatccgggtgaacagctgtacacgctggactactacctgaaactggctgagcagatcgtggacgccggcgcccatgtgctggcgatcaaggatatggctggactgttgcgcccgccggccgctcaaaggttggtcagcgccctgcgcagtcgcttcgacctgcccgttcacctgcacacccacgacacaccgggtggccagctcgccagctatgtggccgcttggcacgccggggccgatgccgtcgacggcgccgccgcgccgctggcgggaacgaccagccagcccgcgctgagctcgatcgttgctgccgctgcccacaccgagtacgacaccggcctgtcgctttcggcggtgtgcgccctggagccgtactgggaggcgttacgaaaagtgtatgcgccgttcgagtctgggttgccggggccgacggggcgggtttatcaccacgagattccgggcggccaactgtccaatctgcgccagcaagcaattgctcttggtctgggagatcgattcgaagagatcgaagaggcctacgcgggcgccgaccgagtgttgggcaggctggttaaggtcacgccaacgtccaaggtggtcggcgatctggcgctggcactggtcggcgccggtgtcagtgcagacgaattcgcctccgatccagcgcgatttggcatcccggaatcggtactcggatttctgcggggcgagctgggtgatccgcccggcgggtggcccgaaccgctgcgcactgcggcgctggccggtcgcggggcggccaggcccactgcgcaattggcggcggacgacgagattgccctatcgtcggtcggagccaagcgtcaggccaccctgaacaggctgttatttcccagtccaacaaaggaattcaatgagcaccgggaagcctacggcgacacgtcgcaattgtcggccaaccagttcttctatggtctgcgccaaggtgaagagcatcgggtgaagctggagcgtggggtggagctgttgatcgggctggaggccatttccgaacccgacgaacgcggcatgcgaacggtgatgtgcatcctcaacgggcagctgcggccggtgctagtgcgcgaccgcagcattgccagtgccgttccggccgccgagaaggccgaccgcggcaatcccggacacatcgccgcgccatttgccggagtcgtcacggtcggggtgtgcgtcggcgagcgggtcggcgccggccaaaccatcgccaccatcgaggcgatgaagatggaagccccgatcaccgccccggttgccggcaccgtggagcgggtggcggtgtcggacaccgcccaggtggagggcggagacctgttggtggtggtgagctga

SEQ ID NO: 96788 - protein, 1127 aa, Mycobacterium tuberculosis CDC1551
MFSKVLVANRGEIAIRAFRAAYELGVGTVAVYPYEDRNSQHRLKADESYQIGDIGHPVHAYLSVDEIVATARRAGADAIYPGYGFLSENPDLAAACAAAGISFVGPSAEVLELAGNKSRAIAAAREAGLPVLMSSAPSASVDELLSVAAGMPFPLFVKAVAGGGGRGMRRVGDIAALPEAIEAASREAESAFGDPTVYLEQAVINPRHIEVQILADNLGDVIHLYERDCSVQRRHQKVIELAPAPHLDAELRYKMCVDAVAFARHIGYSCAGTVEFLLDERGEYVFIEMNPRVQVEHTVTEEITDVDLVASQLRIAAGETLEQLGLRQEDIAPHGAALQCRITTEDPANGFRPDTGRISALRTAGGAGVRLDGSTNLGAEISPYFDSMLVKLTCRGRDLPTAVSRARRAIAEFRIRGVSTNIPFLQAVLDDPDFRAGRVTTSFIDERPQLLTARASADRGTKILNFLADVTVNNPYGSRPSTIYPDDKLPDLDLRAAPPAGSKQRLVKLGPEGFARWLRESAAVGVTDTTFRDAHQSLLATRVRTSGLSRVAPYLARTMPQLLSVECWGGATYDVALRFLKEDPWERLATLRAAMPNICLQMLLRGRNTVGYTPYPEIVTSAFVQEATATGIDIFRIFDALNNIESMRPAIDAVRETGSAIAEVAMCYTGDLTDPGEQLYTLDYYLKLAEQIVDAGAHVLAIKDMAGLLRPPAAQRLVSALRSRFDLPVHLHTHDTPGGQLASYVAAWHAGADAVDGAAAPLAGTTSQPALSSIVAAAAHTEYDTGLSLSAVCALEPYWEALRKVYAPFESGLPGPTGRVYHHEIPGGQLSNLRQQAIALGLGDRFEEIEEAYAGADRVLGRLVKVTPTSKVVGDLALALVGAGVSADEFASDPARFGIPESVLGFLRGELGDPPGGWPEPLRTAALAGRGAARPTAQLAADDEIALSSVGAKRQATLNRLLFPSPTKEFNEHREAYGDTSQLSANQFFYGLRQGEEHRVKLERGVELLIGLEAISEPDERGMRTVMCILNGQLRPVLVRDRSIASAVPAAEKADRGNPGHIAAPFAGVVTVGVCVGERVGAGQTIATIEAMKMEAPITAPVAGTVERVAVSDTAQVEGGDLLVVVS

SEQ ID NO: 96789 - DNA, 3435 bp, Clostridium acetobutylicum ATCC 824
  CDS (1)..(3435): transl_table=11
gtggttaaaaagtttaaaagagtattagtggcaaatagaggagaaatagcaataagaatttttagagcttgtcacgaactaggtataagaactgtggctatatactcagaagaagacaaacttgctctgtttagaactaaggcagatgaatcttatcttataggacaaaacaaaggtccagtagatgcatacttaaatattgatgaaataattaatttagcgttaaaaaaaggggtagacgctatacatcctggatatggatttttatcagaaaactcagagttctctagaagatgtactgaggctggaatagaatttataggtccaactggggatatgatggataagcttggtgataaaattaactcaaagctagcagctaaagcagcaggtgtaaagacgatacctggagttgaaaaaccaatagagacagaacagcaggctattgaattcgcaagaacatgcggatatcctgttatggttaaagcagcagcaggcggcggcggaagaggtatgagaatagttgaaaaagaagaagatttaattgctgcttgtagaagtgcaaaaagtgaagccaaaaaggcttttggaatagaagacatatttatagaaaagtatcttgaaggaccaaaacatattgaagttcaggtgcttggagataagtatggtaatattgttcatttatatgaaagagattgctctgttcaaaggagacatcagaaggtaatagaactaactccagcggtttcaatgtctgaagaaaagagacttgaaatttgtgaagatgcacttaaaatcgcacgatcaataggttatagaagtgcgggaacattagagttcttactagataaacatggaaatcattactttatagaaatgaatcctagagtacaggtagaacacacaataactgaaatggttactggaatagatatagtacaaagtcaaattttaatagcagaaggttataaacttaactcacctgaagtcggaataaatagtcaagaagatatacacgtaaatggctatgctatacagtgtagaataacaacagaagatccgtctaatagttttgctccagacactggaaaaatagatgtctatagaactggttccggttttggtataagacttgatggtggaaatggatttactggtgcggtaataagcccttattatgatagtttacttgttaaatctacttcttggtctaggacttttgaggatgcaataagaaaagctatacgtgctataaaagaaacctacatatcaggggttaaaacaaacatagattttcttataaatgtattgaatcatgaaacatttagaaaaggtttatgtgatacaaactttatagctaataatccagaactttttgaaattacgcctagaatagatactgaattaagagttcttaagtttataggagaaaaagttgtaaatgaaactcatggacataaaattgaagttgatgttccatctgttcctaaatacgagataaaggaaccattaagaggaacaaagcagatacttgatgaaaaaggtcccaaaggtcttgttgaatggataaaggatcaagataaacttctacttactgatacaactatgagagatgcccatcaatcattaatggcaactaggcttagaaccgttgatatggtaaaaatagcaaaggcagaatctgtccttgcaaaggatttattttcaatggaaatgtggggaggagcaacatttgataccgcttatagatttttaaaggaatctccatgggaaagattagagagacttagaaaaagagttcctaacgtattgttccagatgcttttaagaggagctaatgcagtaggatataaaaactatcctgataatgttataagagagtttataaaacaatctagcaaatcaggaatagatgtatttagaatatttgattcattgaattgggtaaagggaatggaagttgccatagatgaagtattaaatcaaggtaaagtagcagaagcttgtatgtgttatacaggtgatatacttgatacaaatagagataaatacactttaaattattatgttaatttagctaaggaaatagagaaatcaggagcacacatcttaggaataaaggatatgtcagcgcttcttaagccatatgctgcccttaaacttataagagcacttaaaaacgaaatatctattcctatacatcttcatacgcatgatacaacaggaaatggtgttgctacggtgttaatggcggctcatgcaggtgttgatatagcagatactgctttcaatagtatgtcaggacttacaagtcaaccagctcttaattcagtagtagcagctcttaaaaacactgacagagacactaagatggatataggagatttacagaagatatctgactattggagtacagtaagacctgtatatagtaaatttgagtctggattaaaagcggtttcggctgaaatatataagtacgagataccaggaggacaatattcaaatttaaaacctcaagttgaaagctttggtttaggccatagatttgagcaagtaaaagagatgtatagagaagtaaatataatgttaggcgatatagtaaaggttactccatcttcaaaaatggtgggagatttagctatatttatggttcaaaatgagttgacgtcagagaatattcttgaaaaagctaaagatatgcctttcccagactctgtagtatcatattttaagggtatgatggggcagcctaagggtggatttccaaaagaacttcaaaaaattgttcttaaggatgaagaagctattacctgcagacctggagagcttttaccagatgaagattttgataagataagagttcgtcttaaaaaagaaaataaaattgaaccgacagataaagatgtaataagttatgcattgtaccctgatgtttttgaagaatacttaaaatataaaaatgagtatggtgatttaagtagaatgggtagtgatgtatttttccatggattagctgaaggtgaaatatctgaacttgagatagcagagggaaaaactttagtagtgcagcttttgcacataggtaaattagataaacaaggaaatagaactcttgtatttgaggttaatggtaatagacgagagattaaaatcaaagataaggttagcagtactaagtctgaaatagttgaagagatagttatagcagatagctccaataaaaaggagataggagcaagtataccaggaaatgtagttaaggtatttgttaaacctggagataaagtaaaaaaaggtgacagccttatggtaatagaggcaatgaaaatggagacaaatgtatcagtaagtgaagatggaactgtaggaggtatatttgttaaagagggggaccaagtacaatcaggacaattattagttaaattagattag

SEQ ID NO: 96790 - protein, 1144 aa, Clostridium acetobutylicum ATCC 824
MVKKFKRVLVANRGEIAIRIFRACHELGIRTVAIYSEEDKLALFRTKADESYLIGQNKGPVDAYLNIDEIINLALKKGVDAIHPGYGFLSENSEFSRRCTEAGIEFIGPTGDMMDKLGDKINSKLAAKAAGVKTIPGVEKPIETEQQAIEFARTCGYPVMVKAAAGGGGRGMRIVEKEEDLIAACRSAKSEAKKAFGIEDIFIEKYLEGPKHIEVQVLGDKYGNIVHLYERDCSVQRRHQKVIELTPAVSMSEEKRLEICEDALKIARSIGYRSAGTLEFLLDKHGNHYFIEMNPRVQVEHTITEMVTGIDIVQSQILIAEGYKLNSPEVGINSQEDIHVNGYAIQCRITTEDPSNSFAPDTGKIDVYRTGSGFGIRLDGGNGFTGAVISPYYDSLLVKSTSWSRTFEDAIRKAIRAIKETYISGVKTNIDFLINVLNHETFRKGLCDTNFIANNPELFEITPRIDTELRVLKFIGEKVVNETHGHKIEVDVPSVPKYEIKEPLRGTKQILDEKGPKGLVEWIKDQDKLLLTDTTMRDAHQSLMATRLRTVDMVKIAKAESVLAKDLFSMEMWGGATFDTAYRFLKESPWERLERLRKRVPNVLFQMLLRGANAVGYKNYPDNVIREFIKQSSKSGIDVFRIFDSLNWVKGMEVAIDEVLNQGKVAEACMCYTGDILDTNRDKYTLNYYVNLAKEIEKSGAHILGIKDMSALLKPYAALKLIRALKNEISIPIHLHTHDTTGNGVATVLMAAHAGVDIADTAFNSMSGLTSQPALNSVVAALKNTDRDTKMDIGDLQKISDYWSTVRPVYSKFESGLKAVSAEIYKYEIPGGQYSNLKPQVESFGLGHRFEQVKEMYREVNIMLGDIVKVTPSSKMVGDLAIFMVQNELTSENILEKAKDMPFPDSVVSYFKGMMGQPKGGFPKELQKIVLKDEEAITCRPGELLPDEDFDKIRVRLKKENKIEPTDKDVISYALYPDVFEEYLKYKNEYGDLSRMGSDVFFHGLAEGEISELEIAEGKTLVVQLLHIGKLDKQGNRTLVFEVNGNRREIKIKDKVSSTKSEIVEEIVIADSSNKKEIGASIPGNVVKVFVKPGDKVKKGDSLMVIEAMKMETNVSVSEDGTVGGIFVKEGDQVQSGQLLVKLD

SEQ ID NO: 96791 - DNA, 3453 bp, Staphylococcus aureus subsp. aureus Mu50
  CDS (1)..(3453): transl_table=11
ttgaaacaaataaaaaagttacttgttgctaaccgtggagaaattgcaattcgtatattcagagcggcggcagaattagacatcagcacagttgcaatttattcgaatgaagacaaaagttcattacatagatataaagcagatgaatcctatttagttggaagtgatttaggtcctgctgaaagttatttaaatattgagcgtatcattgatgtagcaaaacaagcgaatgtggatgcgattcatcctggctatggatttttaagtgaaaatgaacaatttgcgcgtcgttgtgcagaagaaggaattaaatttattggtcctcatttagaacatttagatatgtttggagataaagttaaagctcgtacaacggctatcaaggcagatttaccagttattcctggtacagacggtccaattaaatcatatgaattagcaaaagaatttgcagaagaagctggtttcccgctaatgattaaagccacaagtggtggcggcggtaaaggtatgagaatcgttcgtgaagaaagtgaattagaagatgctttccatagagcaaaatcagaagctgaaaaatcatttggtaatagtgaagtttacatagaaagatacattgataatccaaagcatattgaagtacaagtcataggtgacgaacatggaaatatcgtacacttatttgaacgtgattgttcagtacaacgtcgtcatcaaaaagttgtagaagttgcaccatcagttggattatcaccaacattacgtcaacgtatttgtgatgctgcaattcaattgatggaaaatattaaatatgtcaatgcaggtactgttgaatttctagtatctggtgacgaattcttctttatagaagttaaccctcgtgtacaagtagagcatacaattacagagatggtaacaggaattgatattgttaagacacaaattttagttgcagcaggtgccgatttatttggtgaagagattaatatgccgcaacaaaaagatattacaacattaggctatgccatccaatgtcgtattacaacagaagatccgttaaatgatttcatgccggatactggaacaatcattgcttatcgttcaagcggtggctttggtgtacgtcttgatgctggagatggtttccaaggtgctgagatatcaccttattatgattcattactcgtaaaattatctacacatgcgatatcatttaaacaagcagaagaaaaaatggtacgttcattacgagaaatgcgtattcgtggtgttaaaactaatattccattcttaattaatgtaatgaagaataaaaagttcacaagtggtgattacacaactaaatttattgaagaaacaccagaacttttcgacattcagccgtctctagatagaggtactaaaacattagaatatataggtaatgtaacaattaatggtttcccaaatgttgagaaacgtccgaaaccagactatgaattagcatcaattccaactgtatcttcaagtaaaatcgcttcatttagtggtacgaaacaattgcttgatgaagtaggtccaaaaggtgtagctgaatgggttaaaaagcaggatgatgtcttactaacagatacaacctttagagatgcacaccaatcattattagctacacgagttagaactaaggatatgattaatatcgcatccaaaacagcggacgtatttaaagatggtttctcactagaaatgtggggcggtgctacatttgatgtggcatataatttcttgaaggaaaacccatgggaacgacttgaacgtctacgtaaagctatcccaaatgtattattccaaatgttgttacgtgcttcaaacgcagttggttataaaaactatcctgataatgttattcataaattcgtacaagaaagtgctaaagcaggcatagatgtctttagaattttcgattcattaaactgggtagatcaaatgaaagttgccaatgaagcagtacaagaagcgggcaaaatctctgaaggtactatttgttatacaggtgacattttaaatcctgagcgatcaaacatttatactttagagtattatgtcaaactagctaaagagttagaacgtgaaggtttccatattttagcgattaaagatatggcaggcttattaaaacctaaagccgcttacgaattgattggtgagttaaaatcagctgtagatttaccaattcatcttcacactcatgatacaagtggtaatggtttattaacatacaaacaagcaatagatgctggggtcgatatcattgatactgctgttgcttcaatgagtggtttaacaagtcagccaagcgccaattcgttatattatgcattaaatggcttcccacgccaccttagaactgatattgaaggtatggagtcacttagtcattattggtcaactgtacgtacttattattcagactttgaaagtgatatcaaatcaccgaatactgaaatttatcaacatgaaatgcctggtggacagtattcgaatttaagtcaacaagctaaaagtttaggtttaggcgaaagatttgatgaagtcaaagatatgtatcgcagagtgaatttcttatttggtgatatcgtaaaagtaactccatcgtctaaagtagttggtgatatggcactttatatggtacaaaatgatcttgatgaacaatccgtgattacagatggctataaattagatttcccagaatcagtagtgtcgttcttcaaaggcgaaataggacaacctgtaaatggttttaataaagatttacaagcggttattttaaaaggccaagaagcactaacagctcgtccaggtgaatatctagagccagttgattttgaaaaagtccgtgagttgcttgaagaagagcaacaaggtcctgttacggagcaagatattattagttatgtattatatccaaaagtatatgaacaatatattcaaactagaaatcaatacggaaacttatcgttacttgatacgcctacattcttctttggaatgcgtaatggtgaaacagtagaaatcgaaatcgataagggtaaacgattaattattaaactagaaacgattagtgaaccagatgaaaatggtaatagaacgatttactatgcgatgaatggtcaagcgagacgtatttacattaaagatgaaaatgtgcatacaaatgcgaacgttaagccaaaagcagataagagtaatccaagtcatatcggtgctcaaatgccaggttcagtaactgaagtcaaggttagtgttggtgaaactgtgaaagctaatcagccgttgctaattactgaagctatgaaaatggaaacaacaattcaagcaccatttgacggtgtgattaaacaagtaactgtaaataatggtgacacaatagcgacaggcgatttattaatcgaaattgaaaaagcaactgactaa

SEQ ID NO: 96792 - protein, 1150 aa, Staphylococcus aureus subsp. aureus Mu50
MKQIKKLLVANRGEIAIRIFRAAAELDISTVAIYSNEDKSSLHRYKADESYLVGSDLGPAESYLNIERIIDVAKQANVDAIHPGYGFLSENEQFARRCAEEGIKFIGPHLEHLDMFGDKVKARTTAIKADLPVIPGTDGPIKSYELAKEFAEEAGFPLMIKATSGGGGKGMRIVREESELEDAFHRAKSEAEKSFGNSEVYIERYIDNPKHIEVQVIGDEHGNIVHLFERDCSVQRRHQKVVEVAPSVGLSPTLRQRICDAAIQLMENIKYVNAGTVEFLVSGDEFFFIEVNPRVQVEHTITEMVTGIDIVKTQILVAAGADLFGEEINMPQQKDITTLGYAIQCRITTEDPLNDFMPDTGTIIAYRSSGGFGVRLDAGDGFQGAEISPYYDSLLVKLSTHAISFKQAEEKMVRSLREMRIRGVKTNIPFLINVMKNKKFTSGDYTTKFIEETPELFDIQPSLDRGTKTLEYIGNVTINGFPNVEKRPKPDYELASIPTVSSSKIASFSGTKQLLDEVGPKGVAEWVKKQDDVLLTDTTFRDAHQSLLATRVRTKDMINIASKTADVFKDGFSLEMWGGATFDVAYNFLKENPWERLERLRKAIPNVLFQMLLRASNAVGYKNYPDNVIHKFVQESAKAGIDVFRIFDSLNWVDQMKVANEAVQEAGKISEGTICYTGDILNPERSNIYTLEYYVKLAKELEREGFHILAIKDMAGLLKPKAAYELIGELKSAVDLPIHLHTHDTSGNGLLTYKQAIDAGVDIIDTAVASMSGLTSQPSANSLYYALNGFPRHLRTDIEGMESLSHYWSTVRTYYSDFESDIKSPNTEIYQHEMPGGQYSNLSQQAKSLGLGERFDEVKDMYRRVNFLFGDIVKVTPSSKVVGDMALYMVQNDLDEQSVITDGYKLDFPESVVSFFKGEIGQPVNGFNKDLQAVILKGQEALTARPGEYLEPVDFEKVRELLEEEQQGPVTEQDIISYVLYPKVYEQYIQTRNQYGNLSLLDTPTFFFGMRNGETVEIEIDKGKRLIIKLETISEPDENGNRTIYYAMNGQARRIYIKDENVHTNANVKPKADKSNPSHIGAQMPGSVTEVKVSVGETVKANQPLLITEAMKMETTIQAPFDGVIKQVTVNNGDTIATGDLLIEIEKATD

SEQ ID NO: 96793 - DNA, 3459 bp, Sinorhizobium meliloti 1021
  CDS (1)..(3459): transl_table=11
ttgtccatttccaagatccttgttgccaaccgttccgaaatcgccatccgcgtcttccgcgcggccaatgagctggggcttaaaacggtcgcgatatgggctgaggaggataagctggcgctgcaccgcttcaaggcggacgagagttatcaggtcggacgcgggccgcaccttccccgcgacctcggaccgatcatgagctatctgtcgatcgacgaggtgatccgcgtcgccaagctctccggcgccgacgccatacatccgggctatgggctgctctccgaaagcccggaattcgccgaggcctgtgccgcaaacggcatcaccttcatcggccccaagccggagacgatgcgccagctcggcaacaaggtcgcggcccgcaacctcgcgatctcgatcggcgtgccggtcgtgccggcgaccgagcctctgccggacgacccggaagagatcaagcgactggccgaggagatcggctatccggtgatgctgaaggcctcctggggcggcggcggccgcggcatgcgggcgatccgcgaccccaaggacctgatccgcgaggtgaccgaggccaagcgcgaggccaaggccgccttcggcaaggacgaggtctatctcgaaaagctcgtcgagcgcgcccgtcacgtcgaaagccagatcctcggcgacacgcacggcaatgtcgtccatcttttcgagcgcgactgctcgatccagcgtcgcaaccagaaggtcgtggagcgggcgccggcgccctatctcaatgatgcgcagcgccaggaactcgcggattattcgctgaagatcgccagggcgaccaactatatcggcgcaggcaccgtcgagtatctgatggattccgataccggcaagttctacttcatcgaggtcaatccgcgcatccaggtcgagcatacggtcaccgaggtcgtcaccggcatcgatatcgtcaaggcgcagatccatattctcgacggcttcgccatcggtgcgccggaatcgggcgtgccgcgccaggaggacatccgcctcaacggccatgcgctgcagtgccgcatcacgacggaagacccggagcagaacttcattccggattatggccgcatcaccgcctatcgcggcgccaccggcttcggcatccgcctcgacggcggcaccgcctattccggcgcggtgatcacccgttactacgatccgctgctcgagaaggtcaccgcctgggcgccgaacccgggcgaggcgatccagcggatgattcgtgcgctgcgagaattccgcatccgcggcgtggcgaccaacctcaccttcctcgaggctatcatcagccacccgaagttccacgacaacagctatacgacgcgcttcatcgacacgacgccggaattgttccagcaggtcaagcgccaggaccgcgccaccaagcttctcacctatctcgccgacgtcaccgtcaacggccatccggaagtcaagggccggccgaagccttccgacgatatcgccgcgccggtcgtgccgttcaccggcggcgatgtgaagcccggcacgaagcagcgcctcgaccagctcggcccgaagaaattcgccgaatgggtgaaggcgcagccggaggtgctgatcaccgacacgacgatgcgcgacggccaccaatcgcttctcgccacgcgcatgcgcacctacgacatcgcccgcatcgccggcacctatgcgcgggcgctgcccaacctcttttcgctcgaatgctgggggggcgcgaccttcgacgtgtcgatgcgcttcctgaccgaagatccgtgggagcggctggcgatggtgcgcgagggtgcgccgaacctgctcctgcagatgcttctgcgcggcgccaacggcgtcggctacaagaactatccggataatgtcgtcaaatatttcgtccgccaggccgcgaagggaggcatcgacgtcttccgcgtcttcgactgcctgaactgggtcgagaacatgcgcgtggcgatggacgcggtggccgaggaggacaggatctgtgaggcggcgatctgctacaccggagacatcctcaattccgcccggccgaaatacgacctgaaatactacacggcgcttgcggccgagctggaaaaggccggcgcccacatgatcgccgtcaaggacatggccgggctcctgaagccggccgcggcgcgtgtgctcttcaaggcgctcaaggaagcgaccggcctgccgatccattttcacacgcacgacacttccggaattgcggcggcgaccgtgctcgccgcagtcgagtcgggcgtcgatgtcgtcgatgcggcgatggacgcgctctccggaaacacctctcagccctgcctcggctcgatcgtcgaagcgctgtccggctcggagcgcgacccgggtctcgatccggaatggatccgccgcatctccttctactgggaggcggtacgccatcaatatgcggccttcgaaagcgacctcaaggggccggcttcggaagtctatctgcacgagatgccgggcggccagttcaccaacctgaaggaacaggcccgctcgctcggcctcgagacccgctggcacgaggtggcgcaggcctatgccgacgccaaccggatgttcggcgatatcgtcaaggtgacgccgtcttccaaggtcgtcggcgacatggctctgatgatggtctcccaggatctgacggtcgccgatgtcgagaatccgggcaaggacatcgccttcccggaatcggtcgtctccatgctcaagggcgacctcggccaaccgccgggcggctggccggaggcgctgcagaagaaggcgctgaaaggcgaggagccctatgacgcgcgtccgggctcgctgctcgaagacgcggatctcgacgccgagcgcaagggcatcgaggagaagctcggccgcgaagtgaccgatttcgagttcgcctcctacctcatgtatccgaaggtcttcaccgattatgcggtggcctgcgagacctacggcccggtcagcgtgctgccgacgcccgcctatttctacgggatggcgccgggtgaggaactcttcgccgacatcgagaagggcaagacgctcgtcatcctcaaccaggcgcagggggagatcgacgagaagggcatggtcaagatgttcttcgaaatgaacgggcagccgcgttccatcaaggtacccgaccgcaaccgcggcgcctcggctgccgtccgccgcaaggcggaagccggcaacgccgcccatctcggcgcgccgatgccgggcgtgatctcgaccgttgcggtggcctccggccaatcggtcaaggccggagacgtgctgctctccatcgaggcgatgaagatggagacggcgcttcacgccgagaaggacggggtgatttccgaggtgctcgtaagggccggcgatcagatcgatgcgaaggatctgctggtggtgttcgggggttaa

SEQ ID NO: 96794 - protein, 1152 aa, Sinorhizobium meliloti 1021
MSISKILVANRSEIAIRVFRAANELGLKTVAIWAEEDKLALHRFKADESYQVGRGPHLPRDLGPIMSYLSIDEVIRVAKLSGADAIHPGYGLLSESPEFAEACAANGITFIGPKPETMRQLGNKVAARNLAISIGVPVVPATEPLPDDPEEIKRLAEEIGYPVMLKASWGGGGRGMRAIRDPKDLIREVTEAKREAKAAFGKDEVYLEKLVERARHVESQILGDTHGNVVHLFERDCSIQRRNQKVVERAPAPYLNDAQRQELADYSLKIARATNYIGAGTVEYLMDSDTGKFYFIEVNPRIQVEHTVTEVVTGIDIVKAQIHILDGFAIGAPESGVPRQEDIRLNGHALQCRITTEDPEQNFIPDYGRITAYRGATGFGIRLDGGTAYSGAVITRYYDPLLEKVTAWAPNPGEAIQRMIRALREFRIRGVATNLTFLEAIISHPKFHDNSYTTRFIDTTPELFQQVKRQDRATKLLTYLADVTVNGHPEVKGRPKPSDDIAAPVVPFTGGDVKPGTKQRLDQLGPKKFAEWVKAQPEVLITDTTMRDGHQSLLATRMRTYDIARIAGTYARALPNLFSLECWGGATFDVSMRFLTEDPWERLAMVREGAPNLLLQMLLRGANGVGYKNYPDNVVKYFVRQAAKGGIDVFRVFDCLNWVENMRVAMDAVAEEDRICEAAICYTGDILNSARPKYDLKYYTALAAELEKAGAHMIAVKDMAGLLKPAAARVLFKALKEATGLPIHFHTHDTSGIAAATVLAAVESGVDVVDAAMDALSGNTSQPCLGSIVEALSGSERDPGLDPEWIRRISFYWEAVRHQYAAFESDLKGPASEVYLHEMPGGQFTNLKEQARSLGLETRWHEVAQAYADANRMFGDIVKVTPSSKVVGDMALMMVSQDLTVADVENPGKDIAFPESVVSMLKGDLGQPPGGWPEALQKKALKGEEPYDARPGSLLEDADLDAERKGIEEKLGREVTDFEFASYLMYPKVFTDYAVACETYGPVSVLPTPAYFYGMAPGEELFADIEKGKTLVILNQAQGEIDEKGMVKMFFEMNGQPRSIKVPDRNRGASAAVRRKAEAGNAAHLGAPMPGVISTVAVASGQSVKAGDVLLSIEAMKMETALHAEKDGVISEVLVRAGDQIDAKDLLVVFGG

SEQ ID NO: 96795 - DNA, 3441 bp, Listeria monocytogenes EGD-e
  CDS (1)..(3441): transl_table=11
atgaatcgaattaaaaaagtattagtagcaaaccgcggagaaattgctatccgtgttatgcgtgcgtgtactgaactcaaaatcaaaacagtggctatttattcacaagaagatactggaagttttcaccggtataaatcagatgaagcttatctggttggagcagggaaaaagcctattgatgcgtatctagatatcgaaaacataatagagattgctaaagaatctggtgcagacgcgattcatccgggatatggtttcttgtccgaaaacattgaatttgctcgtcgttgtgagcaagaaggcattattttcgttggtcctaaatcaaaacacctagatatgtttggtgacaaaattaaagcaaaagaacaagccctattagctgatattccagtaattccgggaagtaatggacccgtggctggtattaaagaagtagaagaatttggtgagaaaaacggttatccattaatgattaaagcttcccttggaggcggcggtcgtggtatgcgtgtcgtagaatcaaaagaacatgtcaaagaaagctttgaacgcgcatcttcagaagcaaaagctgcattcggaaatgatgaagtatatgtagaaaaatgtgtgatgaatccaaaacatattgaagtacaaattcttggtgacacccatggcaacatcgttcatttattcgaacgtgattgttcaatacaacgacgtcatcaaaaagtagtagaagtagctccgtgtaatgcgattacttctgaactacgtaaccgaatctgtgatgctgcagtaaaactaatgaaaaatgttgattatattaatgctggaacggttgaatttttagttgaaggtgacgatttctactttatcgaagtaaatcctcgtgtccaagtggagcatacaattacagaaatgattactggtattgatatcgttcaatcacaattattcattgcagatggttatgcacttcacgaccaactagtagctattcctaagcaagaggatatccatattcacggttctgctattcaaagccgtattacaacggaagatccacttaataactttatgccagatactggtcgagtagatacgtatcgttccacaggtggttttggtgttcggttggatgctggtaacggcttccaaggaacagtagtaacaccattttatgattcattactagtaaaattatgtacttggggaatgacatttgagcaagcaacgcgcaaaatgcgtcgtaacctgatcgaattccgtatccgcggtgtcaaaacgaacattcctttcttattgaatgtagttcgtcatccagattttgcgagtggtaattacaatacaagctttatcgatacaactccggaactatttaaatttccacatattcgcgaccgtggtacgaaaacgttgcgttatattggtaatgtaactgttaatggtttcccaggaattaagcaccgtgataaacctgtttatgcagaaccacgtttgccaaaaattccttatggttcgcaaatctctccaggaacaaaacaaattttggatgcaaaaggtccagaaggcgttgtcgactgggtgaaaaaacaagaagaagtacttttgacagatactacgcttcgagatgcacatcaatctctacttgcgacacgtgttcgttcaaaagatatttttcaagtggcagacgcaatggcacatttattaccaaatatgttctcatttgaaatgtggggaggggcgacttttgacgtggcatatcgtttcctaaatgaagatccatgggtgcgcctagaaacacttagaaaacaaattccaaatgtgatgttccaaatgttacttcgcggagctaatgcagttgggtataaaaactaccctgacaatgttatccgtgaattcgttaagcaatcagcacaatccggtgtcgatgtattccgcgtgtttgacagcttaaactggatcaaaggcatggaagtgtccattgatgctgttcgtgaagcagggaaggtcgtagaggctgctatctgctatacaggagatatcgatgatgacacaagaacgaaatatacgattgattactataaagatatggcgaaagagctcgttgctcaaggtacgcatattttaggcattaaagatatggctggacttttaaaaccacaagcagcttaccgtttaattggtgaattaaaagatacagtagatgttccaatccaccttcatacacatgacacaagcggcaacggtatttatacttacgcagcagcagtcagtgcaggagttgacattgtggatgttgcatcaagcgcgatgagtggggctacaagccaaccaagtatgactggtctttactacggattagtgaatggtaaccgtcaaacgaacttagacgctcaaaattcccaaatcattaatcattactgggaagatgtccgtcactattataaagactttgacaatgcgcttaattcacctcaaacagaagtatacattcatgaaatgccaggtggtcaatatactaaccttcaacaacaagccattgcagttggactaggcgatcgttgggacgaagtgaaagaaatgtatacagtggttaatcaaatgtttggtgatatcgttaaagtaacaccttcttccaaagttgttggagacttggcgctattcatggttcaaaatgaattatccgaagaagatgtatatgaaaaaggcgataccattgatttcccagattccgttatcgaattctttatgggggaaattggtcaaccatacggcggcttcccagaaaaacttcaaaaactagtactcaaaggacgtacaccacttacagatcgtccaggcgctttaatggagccagttaactttgttgatgtcaaagcagaattaaaagaaaaaatgggttatgaaccaactgaaaaagatgtcatttcctatattttatatccaaaagtgttcctagattatcaagatatgattaacaaatatggtgatgtaacagtccttgatacaccgacattctataaaggaatgcgtttaggggaaacaatcgaagtagaacttgaaaaaggaaaaatccttttaatcaagctaaattccattggtgaaccaattgcggatggcacacgtgttatctattttgaattgaatggacaaccacgtgagattaacatccaagatatgaacgttcaatctactgttattgcacgccgtaagattgatacaactaaccctgaacatgttggagcgacaatgacaggttcagtcattcaagttgttgtgaaaaaaggcgactctgtgaaaaaaggagatccactactaatcacagaagcaatgaaaatggaaacaacgattcaagcgcctttcgatggagaagttagcagcatttatgtttctgacggcgatactatcgaatctggtgatctattaattgaagtaaacagaatttaa

SEQ ID NO: 96796 - protein, 1146 aa, Listeria monocytogenes EGD-e
MNRIKKVLVANRGEIAIRVMRACTELKIKTVAIYSQEDTGSFHRYKSDEAYLVGAGKKPIDAYLDIENIIEIAKESGADAIHPGYGFLSENIEFARRCEQEGIIFVGPKSKHLDMFGDKIKAKEQALLADIPVIPGSNGPVAGIKEVEEFGEKNGYPLMIKASLGGGGRGMRVVESKEHVKESFERASSEAKAAFGNDEVYVEKCVMNPKHIEVQILGDTHGNIVHLFERDCSIQRRHQKVVEVAPCNAITSELRNRICDAAVKLMKNVDYINAGTVEFLVEGDDFYFIEVNPRVQVEHTITEMITGIDIVQSQLFIADGYALHDQLVAIPKQEDIHIHGSAIQSRITTEDPLNNFMPDTGRVDTYRSTGGFGVRLDAGNGFQGTVVTPFYDSLLVKLCTWGMTFEQATRKMRRNLIEFRIRGVKTNIPFLLNVVRHPDFASGNYNTSFIDTTPELFKFPHIRDRGTKTLRYIGNVTVNGFPGIKHRDKPVYAEPRLPKIPYGSQISPGTKQILDAKGPEGVVDWVKKQEEVLLTDTTLRDAHQSLLATRVRSKDIFQVADAMAHLLPNMFSFEMWGGATFDVAYRFLNEDPWVRLETLRKQIPNVMFQMLLRGANAVGYKNYPDNVIREFVKQSAQSGVDVFRVFDSLNWIKGMEVSIDAVREAGKVVEAAICYTGDIDDDTRTKYTIDYYKDMAKELVAQGTHILGIKDMAGLLKPQAAYRLIGELKDTVDVPIHLHTHDTSGNGIYTYAAAVSAGVDIVDVASSAMSGATSQPSMTGLYYGLVNGNRQTNLDAQNSQIINHYWEDVRHYYKDFDNALNSPQTEVYIHEMPGGQYTNLQQQAIAVGLGDRWDEVKEMYTVVNQMFGDIVKVTPSSKVVGDLALFMVQNELSEEDVYEKGDTIDFPDSVIEFFMGEIGQPYGGFPEKLQKLVLKGRTPLTDRPGALMEPVNFVDVKAELKEKMGYEPTEKDVISYILYPKVFLDYQDMINKYGDVTVLDTPTFYKGMRLGETIEVELEKGKILLIKLNSIGEPIADGTRVIYFELNGQPREINIQDMNVQSTVIARRKIDTTNPEHVGATMTGSVIQVVVKKGDSVKKGDPLLITEAMKMETTIQAPFDGEVSSIYVSDGDTIESGDLLIEVNRI

SEQ ID NO: 96797 - DNA, 3441 bp, Listeria innocua Clip11262
  CDS (1)..(3441): transl_table=11
atgaatcgaataaaaaaagtattagtagcaaaccgtggagaaattgctatccgcgttatgcgtgcatgtactgaactcaaaatcaaaacagtggctatttattcacaagaagatactggtagttttcaccggtataaatcagatgaagcctatctggttggagcagggaaaaagcctattgatgcgtatctagatatcgaaaacatcattgaaattgctaaagaatctggtgcagacgcgattcatccgggatatggtttcttgtccgaaaacattgaatttgctcgtcgttgtgagcaagaaggcattattttcgttggtcctaaatcaaaacacctagatatgtttggcgacaaaattaaagcaaaagaacaagctttattagctgatattccagtaattccaggcagtgatggtccggtagctggtattaaagaagtagaagaattcggtgaaaagaacggctatcctttaatgattaaagcttcccttggaggcggcggtcgtggtatgcgtgtcgtagaatcaaaagaacatgtgaaagaaagttttgaacgtgcgtcttctgaagcaaaagccgctttcggaaacgatgaagtatacgtagaaaaatgtgttatgaatccaaaacatattgaagtacaaattcttggtgacactcacggtaatatcgttcatttatttgagcgtgattgttctattcaacgccgtcaccaaaaagtagtggaagttgctccgtgtaatgcgattacttctgaacttcgtaaccgtatttgtgatgcagcagttaaattaatgaaaaacgttgattatatcaatgcgggaacagtagaatttttagttgaaggcgataatttttactttattgaagtaaatcctcgtgtgcaagtagagcatacaattactgaaatgattacagggattgatattgttcaatctcaactattcattgcagatggttatgcgcttcacgatcagctagtggctattcctaaacaagaagacatccatattcacggctctgcaattcaaagccgtattactactgaagatccacttaataactttatgccagatactggtcgagtagacacataccgttctacaggtggttttggtgttcgtttagatgctggtaatggtttccaaggaacagtagtaacaccgttttatgattctttacttgtaaaattatgtacttggggcatgacatttgagcaagcaacgcgcaaaatgcgtcggaacttaattgaattccgtatccgcggtgtgaaaacaaacattcctttcttattaaatgttgttcgtcatccggattttgcaagtggtaattataatacaagctttatcgatactacgcctgaactatttaaattcccacatattcgcgaccgtggtacgaaaacgttgcgctatattggtaatgtaacagtaaatggcttcccaggaattaagcaccgtgacaaacctgtatacgcagagccacgtttgcctaaaattccttatggttcgcaaatcgcaccgggaactaaacaaattttggatgcaaaaggaccagaaggcgttgtagactgggtgaaaaaacaagaagaagtgcttttaacagacactacacttcgggatgcgcaccaatctttacttgcgacacgtgttcgctcgaaagacattttccaaatagcagatgcgatggctcatttattaccaaatatgttctcatttgaaatgtggggcggggcaacttttgatgtagcttatcgcttcctaaatgaagatccttgggtgcgcctggaaacacttagaaaacaaattccaaatgtaatgttccaaatgctacttcgcggagccaatgctgttggatacaaaaactatccagacaatgttattcgcgaattcgttaagcaatcagcgcaatccggtgtcgatgtattccgggtgtttgatagcttaaactggatcaaaggtatggaagtgtcaattgatgctgttcgtgaagcagggaaggtcgtagaggctactatctgctatacaggagacattgatgatgacacaagaacgaaatacacgattgactactataaagatatggcgaaagagctcgttgctcaaggtacgcatattttaggaattaaagatatggctggacttttaaaaccacaagcggcttaccgtttaattggtgaattaaaagatacagtagatgttccaatccaccttcatacgcatgacacaagcggtaacggtatttatacgtatgcagcggcagtcagtgcaggtgttgacattgttgacgtagcatcaagtgcgatgagtggagcgacaagccaaccaagtatgactggtctttattacggattagttaatggtaatcgtcaaaccaacctagacgcacaaaactcccaaattattaatcattactgggaagatgttcgtcattattataaagactttgacaacgcacttaactcgcctcaaacagaagtatatatccatgaaatgccaggtggtcaatataccaaccttcaacaacaagcaattgctgttggacttggcgatcgttgggatgaagtaaaagaaatgtacactgttgtaaaccaaatgtttggagacatcgttaaagttacaccatcttctaaagttgttggagacttggctctatttatggttcaaaacgaacttacagaagaagatgtctacgaaaaaggcgatactatcgacttcccagattccgttatcgaattctttatgggcgaaattggccaaccatatggcggtttcccagaaaaacttcaaaaattagtactcaaaggacgcacgccacttgcagatcgtccaggagctcttatggagccagttaactttgcagaggtcaaagctgaactaaaagagaaaatgggctatgaaccatctgaaaaagatgtcatttcctatatcttatatccaaaagtattcctagattatcaagagatgattagtaaatatggtgatgtaacagtccttgatacaccaacattttacaaaggtatgcgcttaggtgaaacgattgaagtagaacttgaaaaaggaaaaattctcctaatcaagcttaattcgatcggtgaaccaattgcggatggaacacgtgtcatttatttcgaactaaatggtcaaccacgtgaaatcaacatccaagatatgaatgttcaatcaacagttattgcccgccgtaaaattgatacaacaaacccagaacatgttggagctacaatgacaggttccgttattcaagttgttgtgaaaaaaggcgactctgtgaaaaaaggtgatccattattaatcacagaagcaatgaaaatggaaacaaccattcaagcgccattcgatggagaagttagcagcatttatgtttctgacggcgacactatcgaatctggtgatctattaattgaagtaaacagaaaataa

SEQ ID NO: 96798 - protein, 1146 aa, Listeria innocua Clip11262
MNRIKKVLVANRGEIAIRVMRACTELKIKTVAIYSQEDTGSFHRYKSDEAYLVGAGKKPIDAYLDIENIIEIAKESGADAIHPGYGFLSENIEFARRCEQEGIIFVGPKSKHLDMFGDKIKAKEQALLADIPVIPGSDGPVAGIKEVEEFGEKNGYPLMIKASLGGGGRGMRVVESKEHVKESFERASSEAKAAFGNDEVYVEKCVMNPKHIEVQILGDTHGNIVHLFERDCSIQRRHQKVVEVAPCNAITSELRNRICDAAVKLMKNVDYINAGTVEFLVEGDNFYFIEVNPRVQVEHTITEMITGIDIVQSQLFIADGYALHDQLVAIPKQEDIHIHGSAIQSRITTEDPLNNFMPDTGRVDTYRSTGGFGVRLDAGNGFQGTVVTPFYDSLLVKLCTWGMTFEQATRKMRRNLIEFRIRGVKTNIPFLLNVVRHPDFASGNYNTSFIDTTPELFKFPHIRDRGTKTLRYIGNVTVNGFPGIKHRDKPVYAEPRLPKIPYGSQIAPGTKQILDAKGPEGVVDWVKKQEEVLLTDTTLRDAHQSLLATRVRSKDIFQIADAMAHLLPNMFSFEMWGGATFDVAYRFLNEDPWVRLETLRKQIPNVMFQMLLRGANAVGYKNYPDNVIREFVKQSAQSGVDVFRVFDSLNWIKGMEVSIDAVREAGKVVEATICYTGDIDDDTRTKYTIDYYKDMAKELVAQGTHILGIKDMAGLLKPQAAYRLIGELKDTVDVPIHLHTHDTSGNGIYTYAAAVSAGVDIVDVASSAMSGATSQPSMTGLYYGLVNGNRQTNLDAQNSQIINHYWEDVRHYYKDFDNALNSPQTEVYIHEMPGGQYTNLQQQAIAVGLGDRWDEVKEMYTVVNQMFGDIVKVTPSSKVVGDLALFMVQNELTEEDVYEKGDTIDFPDSVIEFFMGEIGQPYGGFPEKLQKLVLKGRTPLADRPGALMEPVNFAEVKAELKEKMGYEPSEKDVISYILYPKVFLDYQEMISKYGDVTVLDTPTFYKGMRLGETIEVELEKGKILLIKLNSIGEPIADGTRVIYFELNGQPREINIQDMNVQSTVIARRKIDTTNPEHVGATMTGSVIQVVVKKGDSVKKGDPLLITEAMKMETTIQAPFDGEVSSIYVSDGDTIESGDLLIEVNRK

SEQ ID NO: 96799 - DNA, 3525 bp, Agrobacterium tumefaciens str. C58; identical to SEQ ID NO: 9538
  CDS (1)..(3525): transl_table=11

SEQ ID NO: 96800 - protein, 1174 aa, Agrobacterium tumefaciens str. C58; identical to SEQ ID NO: 9539

SEQ ID NO: 96801 - DNA, 3477 bp, Brucella melitensis 16M
  CDS (1)..(3477): transl_table=11
ttgtctttcgctccaaagcctatctcgaaaattctggtcgccaaccgatctgaaatcgcaattcgcgtattccgcgccgccaatgagctggggctcaaaacggtgaccatatgggctgaggaagacaagctttctctgcatcgcttcaaggcggacgaaagctatcaggtcggtcgcggaccgcacctggatcgcgatcttggccccattgaaagctatctttccattgacgaaatcatccgcgttgccaagctttcgggcgccgatgcgatccatccaggttacggtctcctgtcggaaagcccggaatttgccgaagcctgcgcggaaaacggtatcgtcttcatcgggccgaagccggaaaccatgcgccgcctcggcaacaaggtcgccgcgcgcaatctcgctatcgagattggcgtgccggtggtgcctgccaccgatccgctgccggatgatatggatgaggtgaagaagcttgccgcccagatcggctatccgctgatgctgaaagcaagctggggcggcggcggccgcggtatgcgcgccatccgggctgaagccgatcttgcccgcgaggtgatggaagccaagcgcgaggccaaggcggcctttggcaaggatgaagtttatctcgaaaagctggtggagcgtgcccgccatgtcgaagtgcagatattgggcgatacgtacggcaatgcggtccatctttttgagcgtgactgctccatccagcgccgtaaccagaaggtcgtggagcgcgcgcctgcaccctatctcaacgatgcgcagcgccgcgagctggccgattatggcctgaagatcgcgcatgccaccgattatatcggtgctggcacggttgagttcctcatggatgccgataccggcaagttctatttcatcgaggtcaatccacgcattcaggtggagcatacggtcacggaagaagtgaccggcatcgatatcgtcaaggcgcagatccatattctggaaggctttgccatcggcacgccggaatcgggcgtgccgcgccaggaggatatccgcctcaatggccacgcgctgcaatgccgcatcacaacggaagacccggaacagaatttcatccccgattacgggcgcattcaggcctatcgttcggcggcgggcttcggcatccgtctcgatggcggcacggcctattcgggcgcattcatcacccgttattacgacccgcttctggtaaaggtgacggcatccggcgcgacgccgcttgaagccattcaccgcatggaccgcgccttgcgcgagttccgcattcgcggcgtggcaacgaacctcaccttcctcgaagcgatcatcaatcatccgaaattcctgtcgaacgattatacgacccgtttcatcgatacgacgccggaattgttcgagcagatgaagcggcaggatcgcgccaccaagcttttgacctatattgccgatgtgaccgtcaacggccatcccgaaaccaagggccgcgcgaaacccgccagggatgctgccaagccgcgcgtgccgtggtttggcgacaagctggtcgctgacggcaccaaacagcttctggaccagcttgggccgaagaagtttgccgaatggatgcgcaatgaaaagcgcgcgctgattactgataccaccatgcgcgatggccaccagtcattgcttgccacgcgcgtgcgcacctatgatattgcgcggatcgccaatgcttacgcgcaggcgctgccaaacctgttctcgctggaatgctggggcggggctactttcgacgtctccatgcgcttcctgaccgaagacccgtgggagcgtctggcactggtgcgcgaaggcgcgcccaacctcctgttgcagatgcttctgcgcggtgcgaacggggttggctacaaatcctatccggacaatgtggtgaaatatttcgtgcgcgaggcagcgcgcgcgggcattgacctgttccgcgttttcgacagcctcaactgggttgagaacatgcgcgtgtcgatggatgcggtgctggaggaaaacaagctctgtgaagcggcgatctgctatacgggcgatattttgaacccggatcgcgccaaatacgaccttaattattacgtcaatctggcgaaggaagtggaaaaggctggcgcgcatattattgcggtcaaggatatggcgggcttgctgaagcctgccgccgcgcgcgtgctgttcaaggcgctgcgcgaggaaaccgatctgccgatccatttccacacacatgatacgtcgggcatttcggcggcgaccgtgcttgctgcaatcgatgcgggcgtggatgtcgtggatgcagcgatggacgcactttcgggcaatacatcgcagccctgcctcggttccatcgttgaagcgctgcatggttccgagcgtgattcggggctcgacccggatttgatccgccgtatttccttttattgggaagcggtgcgccatcaatatgcagcttttgaaagcgacctcaagggaccggcttcggaagtctatcttcacgaaatgccgggtggccagttcaccaatctgaaggaacaggcgcgctcgctggggcttgaaacgcgctggcatgaagtggcgcaggcctatgccgatgtgaaccgcatgttcggcgatatcgtcaaggtcacgccatcctccaaggtggtgggcgacatggcgctgatgatggttgcccaagacctcaccgttgccgatgtcgagaaccctgccaaggatattgccttcccggattcggtggtttccatgatgcgtggcgatctcggccagccgccatccggctggccggaagccttgcagaaaaaggttctgaaagatgaaaagcctttcaccgtgcgccccggctcgcttctgcctgccgccgatctcgatgcggaacgcaagagctttgaggacagtgtcggccgcaagctttccgatcaggaatttgcttcggcgctgatgtatccgaaggtcttcaccgattatgctacggcgcatgaaacctatggtccgacgagcgtgctgccgacgccggtttatttctacggcctcaagccggaagaagaagtttttgtcgatctggagcgtggcaagacgctggtgatcgtcaatcaggctatgagcgagaccgacgagaagggcatggtgacggtgttcttcgagctgaacggccagccgcgccgcatcaaggtgccaaaccgtgccaagggtgcttccggtggtgtccgccgcaaggtggaggcgggcaatgacaaacaggtcggtgcgccaatgccgggcgttatctccaccgttgcggttgtggcaggccagaaggttacgcagggcgacgtgcttctatccatcgaggcgatgaagatggaaaccgccatccatgccgaacgcgatggcactatcgcggaagtgctggtccgccccggcgagcagatcgacgcgaaggatttgctcatcgtttacgccgagtaa

SEQ ID NO: 96802 - protein, 1158 aa, Brucella melitensis 16M
MSFAPKPISKILVANRSEIAIRVFRAANELGLKTVTIWAEEDKLSLHRFKADESYQVGRGPHLDRDLGPIESYLSIDEIIRVAKLSGADAIHPGYGLLSESPEFAEACAENGIVFIGPKPETMRRLGNKVAARNLAIEIGVPVVPATDPLPDDMDEVKKLAAQIGYPLMLKASWGGGGRGMRAIRAEADLAREVMEAKREAKAAFGKDEVYLEKLVERARHVEVQILGDTYGNAVHLFERDCSIQRRNQKVVERAPAPYLNDAQRRELADYGLKIAHATDYIGAGTVEFLMDADTGKFYFIEVNPRIQVEHTVTEEVTGIDIVKAQIHILEGFAIGTPESGVPRQEDIRLNGHALQCRITTEDPEQNFIPDYGRIQAYRSAAGFGIRLDGGTAYSGAFITRYYDPLLVKVTASGATPLEAIHRMDRALREFRIRGVATNLTFLEAIINHPKFLSNDYTTRFIDTTPELFEQMKRQDRATKLLTYIADVTVNGHPETKGRAKPARDAAKPRVPWFGDKLVADGTKQLLDQLGPKKFAEWMRNEKRALITDTTMRDGHQSLLATRVRTYDIARIANAYAQALPNLFSLECWGGATFDVSMRFLTEDPWERLALVREGAPNLLLQMLLRGANGVGYKSYPDNVVKYFVREAARAGIDLFRVFDSLNWVENMRVSMDAVLEENKLCEAAICYTGDILNPDRAKYDLNYYVNLAKEVEKAGAHIIAVKDMAGLLKPAAARVLFKALREETDLPIHFHTHDTSGISAATVLAAIDAGVDVVDAAMDALSGNTSQPCLGSIVEALHGSERDSGLDPDLIRRISFYWEAVRHQYAAFESDLKGPASEVYLHEMPGGQFTNLKEQARSLGLETRWHEVAQAYADVNRMFGDIVKVTPSSKVVGDMALMMVAQDLTVADVENPAKDIAFPDSVVSMMRGDLGQPPSGWPEALQKKVLKDEKPFTVRPGSLLPAADLDAERKSFEDSVGRKLSDQEFASALMYPKVFTDYATAHETYGPTSVLPTPVYFYGLKPEEEVFVDLERGKTLVIVNQAMSETDEKGMVTVFFELNGQPRRIKVPNRAKGASGGVRRKVEAGNDKQVGAPMPGVISTVAVVAGQKVTQGDVLLSIEAMKMETAIHAERDGTIAEVLVRPGEQIDAKDLLIVYAE

SEQ ID NO: 96803 - DNA, 3423 bp, Corynebacterium glutamicum ATCC 13032; identical to SEQ ID NO: 9568
  CDS (1)..(3423): transl_table=11

SEQ ID NO: 96804 - protein, 1140 aa, Corynebacterium glutamicum ATCC 13032; identical to SEQ ID NO: 9569

SEQ ID NO: 96805 - DNA, 3375 bp, Streptomyces coelicolor A3(2); identical to SEQ ID NO: 9572
  CDS (1)..(3375): transl_table=11

SEQ ID NO: 96806 - protein, 1124 aa, Streptomyces coelicolor A3(2); identical to SEQ ID NO: 9573

SEQ ID NO: 96807 - DNA, 3444 bp, Oceanobacillus iheyensis HTE831
  CDS (1)..(3444): transl_table=11
atggcagagttaaacaagattaacaaagtactagtagcaaaccgaggggaaattgcaattcgcgtcttccgagcatgtacggagttaaatatacgcactgttgctatttattccaaagaggattcatctgcttttcatcgattcaaggcagatgaagcttatttaataggtgaagggaaaaaaccgattgatgcatacttagatattgaagggattattgaacttgcaaaagaagtcaatgttgatgcaattcacccgggttatggattcctttctgaaaatatacagtttgcaagacgctgtgaagaagaaggaattatctttattggaccaactagtaaacacttaagtatgtttggtgataaggtgaaagcaagagagcaagcagtagcagctaacttaccaatcatacctggaagtgatggtccagtaagctcattagaagaagttcaagactttactcaggaacatggatatccaataattattaaagcttccttaggtggcggcggtcgtggaatgcgtgtagtgaaagatgatagtgaactagagagtgcatatgatcgggcgaaatcagaagctaaagccgcttttgggaacgatgagatatatgtagagaggttaatcgaaaatcctaaacatatcgaggttcaaatattaggagataatgcaggcaatattgttcatttatatgaaagagattgttctgtccaacgtcgacatcaaaaacttattgaaatagcaccaagtttatcattgggagataaattacgagaagatatctgtcaatctgcggtaaacttaatgaaaaatgtagattatttaaatgccggaacagttgaatttcttgttaccgatgatgagtttttctttattgaggttaaccctcgtgtacaagtagaacacactattacagaaatgattactggtattgatatcgtccagtctcaaattaagattgctgatggagctcaattacacgatgaaacagtaggaattccgacacaagaacatataaatacacagggctatgcgattcaatcaagggtaacaacggaagatccacttaatgattttatgccagatgcaggtaaaattaatgcttatcgtaccggcggtgggtttggtgtccgtctagatgcgggtaacggctatcaaggagcaatcatttctcctcactatgattcgttattagtgaaagtatctacgtgggcattaacttttgaacaagctgcaataaaaatggtcagaaatttaaaagaattccgtattagagggataaaaacaaatattccgttcctagagaatgtaatggttcatcaaaaattcttatctggtgaatatgatacaacgtttatcgataaaacaccggagctattcatattcccgataagaaaagaccgtggaacaaaaatgcttacgtatatcgcaaatactactttaaacggaggggaaggcatcgctaatattgagaagcctgactttagaccgttggatattcctgctacaaaccatattgaatcagtatctaccggaacaaaacaaatcttggataagtatggtcctgaaggtgtagcgaaatggatgaaagaacagaaggaagtattattaacagacacaactttcagagatgcacaccaatcgttatttgcgacacgtgttcgtacgaatgacttgcttcatattgctgaaccaacgtctaaactgctgccaaatcttttctctgtagaaatgtggggaggagcaacgtacgatgtagcttatcgttttcttaaggaagatccttggacaagattgttaaaattacgtgaagaaatgccgaacgtactattccaaatgttattacgtgcgagtaatgctgtagggtataaaaattatcctgataatctcattgaagaatttgtaaagaaaagcagtgaagcgggtattgatgtattccgtatattcgacagcttgaactgggtagaaggaatgaagttgacaatcgatgcggtacgcaattcaaataaaattgctgaagcagctatttgttatacaggtgatatattagacacaggtagaagtaagtatgatgtgtcttactatcaaatgatggcaaaagaattagaatctgcaggtgcacatatcttaggtattaaagatatggctggtttattaaagccagaggccgcttatcaattaattcataaattaaaagagacgattgatatacccattcatttacacactcatgatacgagtggaaatggtgtgttcacatatgctcgtgctattgaagctggcgtagatgcagtagatgttgcagttgggtcaatggcaggtatgacttctcaaccaagtgcacagtcgctttatcatgcattagagggaactccattccagccggatattaatattgaaaattatgaacgtatcgggcattattgggaagggattcgtgattactatcaagaatttgaaagtggtatgaacgcaccacataccgaaatttatcatcatgaaatgcctggaggacaatatagtaaccttcagcaacaagcaaaagccgtagggttaggtcatcgttggaatgaagttaagaaaatgttccgtacggtaaacgatatgtttggtgatattgttaaagtaacaccttcatcaaaagttattggtgatatgacactatttatggtgcaaaacgatttaacagaagaagatatctatgaaaaaggtgaatctattgattttccagattcagtaatagaatttgctcaaggttacattggacagccttatcaaggattcccagagaaacttcaaaaaatcatattaaaagataaaaaaccgataactgttcgtccaggtgaattactagaaccaattgactttaaggtgatgagagatgagttatatgataagttaaatcgtccgatcactagcttcgatttaatttcttatgcactatatccaaaagtgtttatggattaccaagcatttacagaaacgtatggcgatatttctgtccttgatactccaaccttcttctatggtatgaaattaggagaagtaatagaagttgaaatcgaaaaagggaagacgcttattgttaaattggtttctatatcagagccaaaagaagatggtactcgcgtggtttacttcgatttaaatggtcaatcaagagaaattacaatcaaggatgaaagtattgaatccttggttgctgttaaaccgcaagttgacaaaaataataaaaaccacctaggagctactatgcctgggactgttttagaagtaaattgcagtaaaggtgataaagtgacaaaaggtcagcacttgatgacaaatgaagcgatgaagatggaaacttcggttcaagcaccatttgatggtgttataaaagagattcatgtatcgaatggcgatacaatagcagttaatgatttattaatagaatttgaataa

SEQ ID NO: 96808 - protein, 1147 aa, Oceanobacillus iheyensis HTE831
MAELNKINKVLVANRGEIAIRVFRACTELNIRTVAIYSKEDSSAFHRFKADEAYLIGEGKKPIDAYLDIEGIIELAKEVNVDAIHPGYGFLSENIQFARRCEEEGIIFIGPTSKHLSMFGDKVKAREQAVAANLPIIPGSDGPVSSLEEVQDFTQEHGYPIIIKASLGGGGRGMRVVKDDSELESAYDRAKSEAKAAFGNDEIYVERLIENPKHIEVQILGDNAGNIVHLYERDCSVQRRHQKLIEIAPSLSLGDKLREDICQSAVNLMKNVDYLNAGTVEFLVTDDEFFFIEVNPRVQVEHTITEMITGIDIVQSQIKIADGAQLHDETVGIPTQEHINTQGYAIQSRVTTEDPLNDFMPDAGKINAYRTGGGFGVRLDAGNGYQGAIISPHYDSLLVKVSTWALTFEQAAIKMVRNLKEFRIRGIKTNIPFLENVMVHQKFLSGEYDTTFIDKTPELFIFPIRKDRGTKMLTYIANTTLNGGEGIANIEKPDFRPLDIPATNHIESVSTGTKQILDKYGPEGVAKWMKEQKEVLLTDTTFRDAHQSLFATRVRTNDLLHIAEPTSKLLPNLFSVEMWGGATYDVAYRFLKEDPWTRLLKLREEMPNVLFQMLLRASNAVGYKNYPDNLIEEFVKKSSEAGIDVFRIFDSLNWVEGMKLTIDAVRNSNKIAEAAICYTGDILDTGRSKYDVSYYQMMAKELESAGAHILGIKDMAGLLKPEAAYQLIHKLKETIDIPIHLHTHDTSGNGVFTYARAIEAGVDAVDVAVGSMAGMTSQPSAQSLYHALEGTPFQPDINIENYERIGHYWEGIRDYYQEFESGMNAPHTEIYHHEMPGGQYSNLQQQAKAVGLGHRWNEVKKMFRTVNDMFGDIVKVTPSSKVIGDMTLFMVQNDLTEEDIYEKGESIDFPDSVIEFAQGYIGQPYQGFPEKLQKIILKDKKPITVRPGELLEPIDFKVMRDELYDKLNRPITSFDLISYALYPKVFMDYQAFTETYGDISVLDTPTFFYGMKLGEVIEVEIEKGKTLIVKLVSISEPKEDGTRVVYFDLNGQSREITIKDESIESLVAVKPQVDKNNKNHLGATMPGTVLEVNCSKGDKVTKGQHLMTNEAMKMETSVQAPFDGVIKEIHVSNGDTIAVNDLLIEFE

SEQ ID NO: 96809 - DNA, 3477 bp, Brucella suis 1330
  CDS (1)..(3477): transl_table=11
ttgtctttcgctccaaagcctatctcgaaaattctggtcgccaaccgatctgaaatcgcaattcgcgtattccgcgccgccaatgagctggggctcaaaacggtggccatatgggctgaggaagacaagctttccctgcatcgcttcaaggcggatgaaagctatcaggtcggtcgcggaccgcatctggatcgcgatcttggccccattgaaagctatctttccattgacgaaatcatccgcgttgccaagctttcgggcgccgatgcgatccatccaggttacggtctcctgtcggaaagcccggaatttgccgaagcctgcgcggaaaacggtatcgtcttcatcgggccgaagccggaaaccatgcgccgcctcggcaacaaggtcgccgcgcgcaatctcgctatcgagattggcgtgccggtggtgcctgccaccgatccgctgccggatgatatggatgaggtgaagaagcttgccgcccagatcggctatccgctgatgctgaaagcaagctggggcggcggcggccgcggtatgcgcgccatccgggctgaagccgatcttgcccgcgaggtgatggaagccaagcgcgaggccaaggcggcctttggcaaggatgaagtttatctcgaaaagctggtggagcgtgcccgccatgtcgaagtgcagatattgggcgatacgtacggcaatgcggtccatctttttgagcgtgactgctccatccagcgccgtaaccagaaggtcgtggagcgcgcgcctgcaccctatctcaacgatgcgcagcgccgcgagctggccgattatggcctgaagatcgcgcatgccaccgattatatcggtgctggcacggttgagttcctcatggatgccgataccggcaagttctatttcatcgaggtcaatccacgcattcaggtggagcatacggtcacggaagaagtgaccggcatcgatatcgtcaaggcgcagatccatattctggaaggctttgccatcggcacgccggaatcgggcgtgccgcgccaggaggatatccgcctcaatggccacgcgctgcaatgccgcatcacaacggaagacccggaacagaatttcatccccgattacgggcgcattcaggcctatcgttcggcggcgggcttcggcatccgtctcgatggcggcacggcctattcgggcgcattcatcacccgttattacgacccgcttctggtaaaggtgacggcatccggcgcgacgccgcttgaagccattcaccgcatggaccgcgccttgcgcgagttccgcattcgcggcgtggcaacgaacctcaccttcctcgaagcgatcatcaatcatccgaaattccagtcgaacgattatacgacccgtttcatcgatacgacgccggaattgttcgagcagatgaagcggcaggatcgcgccaccaagcttttgacctatattgccgatgtgaccgtcaacggccatcccgaaaccaagggccgcgcgaaacccgccagggatgctgccaagccgcgcgtgccgtggtttggcgacaagctggtcgctgacggcaccaaacagcttctggaccagcttgggccgaagaagtttgccgaatggatgcgcaatgaaaagcgcgcgctgattactgataccaccatgcgcgatggccaccagtcattgcttgccacgcgcgtgcgcacctatgatattgcgcggatcgccaatgcttacgcgcaggcgctgccaaacctgttctcgctggaatgctggggcggggctactttcgacgtctccatgcgcttcctgaccgaagacccgtgggagcgtctggcactggtgcgcgaaggcgcgcccaacctcctgttgcagatgcttctgcgcggtgcgaacggggttggctacaaatcctatccggacaatgtggtgaaatatttcgtgcgcgaggcagcgcgcgcaggcattgacctgttccgcgttttcgacagcctcaactgggttgagaacatgcgcgtgtcgatggatgcggtgctggaggaaaacaagctctgtgaagcggcgatctgctatacgggcgatattttgaacccggatcgcgccaaatacgaccttaattattacgtcaatctggcgaaggaagtggaaaaggctggcgcgcatattattgcggtcaaggatatggcgggcttgctgaagcctgccgccgcgcgcgtgctgttcaaggcgctgcgcgaggaaaccgatctgccgatccatttccacacacatgatacgtcgggcatttcggcggcgaccgtgcttgctgcaatcgatgcgggcgtggatgtcgtggatgcagcgatggacgcactttcgggcaatacatcgcagccctgcctcggttccatcgttgaagcgctgcatggttccgagcgtgattcggggctcgacccggattcgatccgccgtatttccttttattgggaagcggtgcgccatcaatatgcagcttttgaaagcgacctcaagggaccggcttcggaagtctatcttcacgaaatgccgggtggccagttcaccaatctgaaggaacaggcgcgctcgctggggcttgaaacgcgctggcatgaagtggcgcaggcctatgccgatgtgaaccgcatgttcggcgatatcgtcaaggtcacgccatcctccaaggtggtgggcgacatggcgctgatgatggttgcccaagacctcaccgttgccgatgtcgagaaccctgccaaggatattgccttcccggattcggtggtttccatgatgcgtggcgatctcggccagccgccatccggctggccggaagccttgcagaaaaaggttctgaaaggtgaaaagcctttcaccgtgcgccccggctcgcttctgcctgccgccgatctcgatgcggaacgcaagagctttgaggacagtgtcggccgcaagctttccgatcaggaatttgcttcggcgctgatgtatccgaaggtcttcaccgattatgctacggcgcatgaaacctatggtccgacgagcgtgctgccgacgccggtttatttctacggcctcaagccggaagaagaagtttttgtcgatctggagcgtggcaagacgctggtgatcgtcaatcaggctatgagcgagaccgacgagaagggcatggtgacggtgttcttcgagctgaacggccagccgcgccgcatcaaggtgccaaaccgtgccaagggtgcttccggtggtgtccgccgcaaggtggaggcgggcaatgacaaacaggtcggtgcgccgatgccgggcgttatctccaccgttgcggttgtggcaggccagaaggttacgcagggcgacgtgcttctatccatcgaggcgatgaagatggaaaccgccatccatgccgaacgcgatggcactatcgcggaagtgctggtccgccccggcgagcagatcgacgcgaaggatttgctcatcgtttacgccgagtaa

SEQ ID NO: 96810 - protein, 1158 aa, Brucella suis 1330
MSFAPKPISKILVANRSEIAIRVFRAANELGLKTVAIWAEEDKLSLHRFKADESYQVGRGPHLDRDLGPIESYLSIDEIIRVAKLSGADAIHPGYGLLSESPEFAEACAENGIVFIGPKPETMRRLGNKVAARNLAIEIGVPVVPATDPLPDDMDEVKKLAAQIGYPLMLKASWGGGGRGMRAIRAEADLAREVMEAKREAKAAFGKDEVYLEKLVERARHVEVQILGDTYGNAVHLFERDCSIQRRNQKVVERAPAPYLNDAQRRELADYGLKIAHATDYIGAGTVEFLMDADTGKFYFIEVNPRIQVEHTVTEEVTGIDIVKAQIHILEGFAIGTPESGVPRQEDIRLNGHALQCRITTEDPEQNFIPDYGRIQAYRSAAGFGIRLDGGTAYSGAFITRYYDPLLVKVTASGATPLEAIHRMDRALREFRIRGVATNLTFLEAIINHPKFQSNDYTTRFIDTTPELFEQMKRQDRATKLLTYIADVTVNGHPETKGRAKPARDAAKPRVPWFGDKLVADGTKQLLDQLGPKKFAEWMRNEKRALITDTTMRDGHQSLLATRVRTYDIARIANAYAQALPNLFSLECWGGATFDVSMRFLTEDPWERLALVREGAPNLLLQMLLRGANGVGYKSYPDNVVKYFVREAARAGIDLFRVFDSLNWVENMRVSMDAVLEENKLCEAAICYTGDILNPDRAKYDLNYYVNLAKEVEKAGAHIIAVKDMAGLLKPAAARVLFKALREETDLPIHFHTHDTSGISAATVLAAIDAGVDVVDAAMDALSGNTSQPCLGSIVEALHGSERDSGLDPDSIRRISFYWEAVRHQYAAFESDLKGPASEVYLHEMPGGQFTNLKEQARSLGLETRWHEVAQAYADVNRMFGDIVKVTPSSKVVGDMALMMVAQDLTVADVENPAKDIAFPDSVVSMMRGDLGQPPSGWPEALQKKVLKGEKPFTVRPGSLLPAADLDAERKSFEDSVGRKLSDQEFASALMYPKVFTDYATAHETYGPTSVLPTPVYFYGLKPEEEVFVDLERGKTLVIVNQAMSETDEKGMVTVFFELNGQPRRIKVPNRAKGASGGVRRKVEAGNDKQVGAPMPGVISTVAVVAGQKVTQGDVLLSIEAMKMETAIHAERDGTIAEVLVRPGEQIDAKDLLIVYAE

SEQ ID NO: 96811 - DNA, 3546 bp, Drosophila melanogaster
  CDS (1)..(3546)
atgttcattccggccgcccagtccgcgtacaggacgctgcgcaagacccagccacgcgtccggctcaacgccatcttcaaaaatggctactccagcaaggtggagtacaagcccatccggtcagtgctggtggctaaccgcggtgagatcgccatccgagtgttccgtgcctgcacagagttgggcatcaaatcggtggcggtctactcggagcaggataagatgcacatgcaccgacaaaaggccgacgagtcgtacatagtgggcaagggtctgcccccggtggaggcctacctcaacattccagagctaattagggtgtgcaaggagaacgatgtggatgccgtgcatcccggctacgggttcctttcagagcgcagtgacttcgcccaagcggtgattgatgctggactgcgcttcattggcccctcacccgaagtcgtccagaagatgggtgataaggtggcggctcgtgtggcggccattgaagcgggtgtgcccattgtgcccggcaccgacggtccagtgaccaccaaggaggaggcactggagttctgcaagaagcacggactgcccgttatcttcaaggccgcttacggaggcggaggtcgcggcatgcgcgtcgtccgcaaaatggaggatgtggaggagagcttccagcgagccagttccgaggccaaggccgcctttggcaatggtgcgatgttcattgagaagttcatcgagcgaccgcgtcacattgaggttcaactgctgggagacaaggccgggaatgtagtgcatctgtacgaacgtgactgctccgtgcagcgtcgccaccagaaggtggtggagatcgccccagcgccacgcctgcccatcgaaatccgggacaagatgacggaggcagcagtgcgcttggcccgccatgtgggctatgaaaacgccggaaccgtggagttcctttgcgacgagtccggcaacttctacttcatcgaagtgaacgcccgtctacaagtggagcacacggtcaccgaggagataacaggcatcgatttggtgcagtcgcaaatccgcgtggccgagggcatgaccctacccgaattgggctacacgcaggacaagatcgtgccgcgtggctatgccattcagtgccgtgtgaccaccgaagatccggccaacgattttcagcccaacaccggtcgcttggaggtcttccgatctggcgagggtatgggcattaggttggacagtgcgtccgcctacgccggagccatcatttcgccatactacgactccctgctggtcaaggtgatctcgcacgccagcgatctgcagagctccgcctccaagatgaaccgtgccctaagggaattccgcattcgcggcgtcaagaccaatatccccttcctcctaaacgtgctggagaaccagaagttcctccacggcgttctcgacacctacttcatcgacgagcacccgcaactgttcaagttcaagccctcgctcaatcgcgcccagaagctgctcaactatatgggtgaggtgctggtcaacggaccccagactcctctcgccaccactctgaagcctgccctcgtctcgccccacgttcccgaggttccgctggttacggaaccaccgaagggactccgcgaggtcctggtgtgcgaaggtccggaggccttcgccaaggaggtgcgcaaccgtaaggaactgctactcatggacaccaccttccgcgatgcccaccagtcgctgctggccacccgcgtgcgttcccacgatctgctgaagatctccccctacgtgacgcacaagttcaacaacctgtattcgctggagaactggggcggagccaccttcgacgtggcgctgcgcttcctgcacgagtgcccgtgggagcgcctggaggagatgcgcaagcgcatcccgaacattcccttccagatgctgttgcgcggagccaacgccgtcggctacaccagctatccggacaacgtggtctacaagttctgtgagctggctgtgcagaccggcatggacatcttcagggtgttcgactcgctcaactacctgcccaacctgatcctcggcatggaagccgctggaaaggcgggcggcgtggtggaggctgccatctcctataccggagacgtcagcgatcccaagcgcaccaagtatgatctgaaatactacactaaccttgccgatgagctggtcaaggcgggcacccacgtgctctgcataaaggatatggctggtctgctcaagcccgaatccgccaggcttctgatcacagccattcgtgacaagcaccccgacatcccaatccatatccacacccacgacacctctggagcgggagtggcctccatgctggcatgcgccaatgccggagccgatgtggtggacgtggccgtcgactccatgagcggcatgacttcccagccgagcatgggtgccgtagtggcctccctgcaaggcactccgctggacacgaacttggatctgcgcacggtgtcggagtactccgcctactgggagcagacccgcaccctgtacgctcccttcgagtgcaccacaacaatgcggtcgggcaacgccgatgtctacctcaacgagattcccggcggccagtacaccaacctgcagttccaggccttctcgctgggtctgggcgacttcttcgaggacgttaagaaggcctaccgtgaggccaacctgttgttgggtgacattatcaaggtgacgccctcgtcgaaggtggtaggtgatcttgcccagttcatggtgcagaatgacctgaccgccgatcaagtgctggagcgggccgaggagctgtcgttccccaagtcggtggtggagtacttgcagggctctattggcattccgcacggcggattccccgagccgctgcgttcgcgagtgctcaaggacatgccccgcatcgagggacgtccgggagccgaactgaaggacttggactttgacaagctgaagaaggaactgcaggagtctcacacctgcgtcaccaaccgtgatgtcatgtcagctgccctctacccgcaggtgacgaatgatttcctaaacttccgcgaaaagtacggacccgtcgacaagctggacactcgcatcttcctcacgggtcccaaggtgggcgaggagttcgacgtacctctggagcgcggtaagacgctgagcgtgaaagctctggctgtgtccgccgatctcaagcccaacggtatccgcgaggtattctttgagttgaatggccagctgcgcgcggtccacatcctggacaaggaagccgttaaggagatccatgtccatcccaaagcgaacaagtcgaacaagagcgaggtgggcgcccccatgcccggaactgtcatcgatatccgcgtgaaggttggcgacaaagtggagaagggtcagcctctggtcgtgctctcggccatgaagatggagatggtggtgcagtcgccattggcgggcgttgtcaagaagctggaaattgccaacggaacgaagctggagggcgaggacctcattatgattatcgaatag

SEQ ID NO: 96812 - protein, 1181 aa, Drosophila melanogaster
MFIPAAQSAYRTLRKTQPRVRLNAIFKNGYSSKVEYKPIRSVLVANRGEIAIRVFRACTELGIKSVAVYSEQDKMHMHRQKADESYIVGKGLPPVEAYLNIPELIRVCKENDVDAVHPGYGFLSERSDFAQAVIDAGLRFIGPSPEVVQKMGDKVAARVAAIEAGVPIVPGTDGPVTTKEEALEFCKKHGLPVIFKAAYGGGGRGMRVVRKMEDVEESFQRASSEAKAAFGNGAMFIEKFIERPRHIEVQLLGDKAGNVVHLYERDCSVQRRHQKVVEIAPAPRLPIEIRDKMTEAAVRLARHVGYENAGTVEFLCDESGNFYFIEVNARLQVEHTVTEEITGIDLVQSQIRVAEGMTLPELGYTQDKIVPRGYAIQCRVTTEDPANDFQPNTGRLEVFRSGEGMGIRLDSASAYAGAIISPYYDSLLVKVISHASDLQSSASKMNRALREFRIRGVKTNIPFLLNVLENQKFLHGVLDTYFIDEHPQLFKFKPSLNRAQKLLNYMGEVLVNGPQTPLATTLKPALVSPHVPEVPLVTEPPKGLREVLVCEGPEAFAKEVRNRKELLLMDTTFRDAHQSLLATRVRSHDLLKISPYVTHKFNNLYSLENWGGATFDVALRFLHECPWERLEEMRKRIPNIPFQMLLRGANAVGYTSYPDNVVYKFCELAVQTGMDIFRVFDSLNYLPNLILGMEAAGKAGGVVEAAISYTGDVSDPKRTKYDLKYYTNLADELVKAGTHVLCIKDMAGLLKPESARLLITAIRDKHPDIPIHIHTHDTSGAGVASMLACANAGADVVDVAVDSMSGMTSQPSMGAVVASLQGTPLDTNLDLRTVSEYSAYWEQTRTLYAPFECTTTMRSGNADVYLNEIPGGQYTNLQFQAFSLGLGDFFEDVKKAYREANLLLGDIIKVTPSSKVVGDLAQFMVQNDLTADQVLERAEELSFPKSVVEYLQGSIGIPHGGFPEPLRSRVLKDMPRIEGRPGAELKDLDFDKLKKELQESHTCVTNRDVMSAALYPQVTNDFLNFREKYGPVDKLDTRIFLTGPKVGEEFDVPLERGKTLSVKALAVSADLKPNGIREVFFELNGQLRAVHILDKEAVKEIHVHPKANKSNKSEVGAPMPGTVIDIRVKVGDKVEKGQPLVVLSAMKMEMVVQSPLAGVVKKLEIANGTKLEGEDLIMIIE

SEQ ID NO: 96813 - DNA, 3594 bp, Drosophila melanogaster
  CDS (1)..(3594)
atgttcattccggccgcccagtccgcgtacaggacgctgcgcaagacccagccacgcgtccggctcaacgccatcttcaaaaatggctactccagcaaggtggagtacaagcccatccggtcagtgctggtggctaaccgcggtgagatcgccatccgagtgttccgtgcctgcacagagttgggcatcaaatcggtggcggtctactcggagcaggataagatgcacatgcaccgacaaaaggccgacgagtcgtacatagtgggcaagggtctgcccccggtggaggcctacctcaacattccagagctaattagggtgtgcaaggagaacgatgtggatgccgtgcatcccggctacgggttcctttcagagcgcagtgacttcgcccaagcggtgattgatgctggactgcgcttcattggcccctcacccgaagtcgtccagaagatgggtgataaggtggcggctcgtgtggcggccattgaagcgggtgtgcccattgtgcccggcaccgacggtccagtgaccaccaaggaggaggcactggagttctgcaagaagcacggactgcccgttatcttcaaggccgcttacggaggcggaggtcgcggcatgcgcgtcgtccgcaaaatggaggatgtggaggagagcttccagcgagccagttccgaggccaaggccgcctttggcaatggtgcgatgttcattgagaagttcatcgagcgaccgcgtcacattgaggttcaactgctgggagacaaggccgggaatgtagtgcatctgtacgaacgtgactgctccgtgcagcgtcgccaccagaaggtggtggagatcgccccagcgccacgcctgcccatcgaaatccgggacaagatgacggaggcagcagtgcgcttggcccgccatgtgggctatgaaaacgccggaaccgtggagttcctttgcgacgagtccggcaacttctacttcatcgaagtgaacgcccgtctacaagtggagcacacggtcaccgaggagataacaggcatcgatttggtgcagtcgcaaatccgcgtggccgagggcatgaccctacccgaattgggctacacgcaggacaagatcgtgccgcgtggctatgccattcagtgccgtgtgaccaccgaagatccggccaacgattttcagcccaacaccggtcgcttggaggtcttccgatctggcgagggtatgggcattaggttggacagtgcgtccgcctacgccggagccatcatttcgccatactacgactccctgctggtcaaggtgatctcgcacgccagcgatctgcagagctccgcctccaagatgaaccgtgccctaagggaattccgcattcgcggcgtcaagaccaatatccccttcctcctaaacgtgctggagaaccagaagttcctccacggcgttctcgacacctacttcatcgacgagcacccgcaactgttcaagttcaagccctcgctcaatcgcgcccagaagctgctcaactatatgggtgaggtgctggtcaacggaccccagactcctctcgccaccactctgaagcctgccctcgtctcgccccacgttcccgaggttccgctggatctgtccccggaagctatagaacgcgaagaacgtggcgaggcaaaagttacggaaccaccgaagggactccgcgaggtcctggtgtgcgaaggtccggaggccttcgccaaggaggtgcgcaaccgtaaggaactgctactcatggacaccaccttccgcgatgcccaccagtcgctgctggccacccgcgtgcgttcccacgatctgctgaagatctccccctacgtgacgcacaagttcaacaacctgtattcgctggagaactggggcggagccaccttcgacgtggcgctgcgcttcctgcacgagtgcccgtgggagcgcctggaggagatgcgcaagcgcatcccgaacattcccttccagatgctgttgcgcggagccaacgccgtcggctacaccagctatccggacaacgtggtctacaagttctgtgagctggctgtgcagaccggcatggacatcttcagggtgttcgactcgctcaactacctgcccaacctgatcctcggcatggaagccgctggaaaggcgggcggcgtggtggaggctgccatctcctataccggagacgtcagcgatcccaagcgcaccaagtatgatctgaaatactacactaaccttgccgatgagctggtcaaggcgggcacccacgtgctctgcataaaggatatggctggtctgctcaagcccgaatccgccaggcttctgatcacagccattcgtgacaagcaccccgacatcccaatccatatccacacccacgacacctctggagcgggagtggcctccatgctggcatgcgccaatgccggagccgatgtggtggacgtggccgtcgactccatgagcggcatgacttcccagccgagcatgggtgccgtagtggcctccctgcaaggcactccgctggacacgaacttggatctgcgcacggtgtcggagtactccgcctactgggagcagacccgcaccctgtacgctcccttcgagtgcaccacaacaatgcggtcgggcaacgccgatgtctacctcaacgagattcccggcggccagtacaccaacctgcagttccaggccttctcgctgggtctgggcgacttcttcgaggacgttaagaaggcctaccgtgaggccaacctgttgttgggtgacattatcaaggtgacgccctcgtcgaaggtggtaggtgatcttgcccagttcatggtgcagaatgacctgaccgccgatcaagtgctggagcgggccgaggagctgtcgttccccaagtcggtggtggagtacttgcagggctctattggcattccgcacggcggattccccgagccgctgcgttcgcgagtgctcaaggacatgccccgcatcgagggacgtccgggagccgaactgaaggacttggactttgacaagctgaagaaggaactgcaggagtctcacacctgcgtcaccaaccgtgatgtcatgtcagctgccctctacccgcaggtgacgaatgatttcctaaacttccgcgaaaagtacggacccgtcgacaagctggacactcgcatcttcctcacgggtcccaaggtgggcgaggagttcgacgtacctctggagcgcggtaagacgctgagcgtgaaagctctggctgtgtccgccgatctcaagcccaacggtatccgcgaggtattctttgagttgaatggccagctgcgcgcggtccacatcctggacaaggaagccgttaaggagatccatgtccatcccaaagcgaacaagtcgaacaagagcgaggtgggcgcccccatgcccggaactgtcatcgatatccgcgtgaaggttggcgacaaagtggagaagggtcagcctctggtcgtgctctcggccatgaagatggagatggtggtgcagtcgccattggcgggcgttgtcaagaagctggaaattgccaacggaacgaagctggagggcgaggacctcattatgattatcgaatag

SEQ ID NO: 96814 - protein, 1197 aa, Drosophila melanogaster
MFIPAAQSAYRTLRKTQPRVRLNAIFKNGYSSKVEYKPIRSVLVANRGEIAIRVFRACTELGIKSVAVYSEQDKMHMHRQKADESYIVGKGLPPVEAYLNIPELIRVCKENDVDAVHPGYGFLSERSDFAQAVIDAGLRFIGPSPEVVQKMGDKVAARVAAIEAGVPIVPGTDGPVTTKEEALEFCKKHGLPVIFKAAYGGGGRGMRVVRKMEDVEESFQRASSEAKAAFGNGAMFIEKFIERPRHIEVQLLGDKAGNVVHLYERDCSVQRRHQKVVEIAPAPRLPIEIRDKMTEAAVRLARHVGYENAGTVEFLCDESGNFYFIEVNARLQVEHTVTEEITGIDLVQSQIRVAEGMTLPELGYTQDKIVPRGYAIQCRVTTEDPANDFQPNTGRLEVFRSGEGMGIRLDSASAYAGAIISPYYDSLLVKVISHASDLQSSASKMNRALREFRIRGVKTNIPFLLNVLENQKFLHGVLDTYFIDEHPQLFKFKPSLNRAQKLLNYMGEVLVNGPQTPLATTLKPALVSPHVPEVPLDLSPEAIEREERGEAKVTEPPKGLREVLVCEGPEAFAKEVRNRKELLLMDTTFRDAHQSLLATRVRSHDLLKISPYVTHKFNNLYSLENWGGATFDVALRFLHECPWERLEEMRKRIPNIPFQMLLRGANAVGYTSYPDNVVYKFCELAVQTGMDIFRVFDSLNYLPNLILGMEAAGKAGGVVEAAISYTGDVSDPKRTKYDLKYYTNLADELVKAGTHVLCIKDMAGLLKPESARLLITAIRDKHPDIPIHIHTHDTSGAGVASMLACANAGADVVDVAVDSMSGMTSQPSMGAVVASLQGTPLDTNLDLRTVSEYSAYWEQTRTLYAPFECTTTMRSGNADVYLNEIPGGQYTNLQFQAFSLGLGDFFEDVKKAYREANLLLGDIIKVTPSSKVVGDLAQFMVQNDLTADQVLERAEELSFPKSVVEYLQGSIGIPHGGFPEPLRSRVLKDMPRIEGRPGAELKDLDFDKLKKELQESHTCVTNRDVMSAALYPQVTNDFLNFREKYGPVDKLDTRIFLTGPKVGEEFDVPLERGKTLSVKALAVSADLKPNGIREVFFELNGQLRAVHILDKEAVKEIHVHPKANKSNKSEVGAPMPGTVIDIRVKVGDKVEKGQPLVVLSAMKMEMVVQSPLAGVVKKLEIANGTKLEGEDLIMIIE

SEQ ID NO: 96815 - DNA, 3507 bp, Corynebacterium efficiens YS-314
  CDS (1)..(3507): transl_table=11
gtggttttccggactggccgttacgatgttctgaagagtgactgccatcacccaacaggctggtcctcgtcgaaaggaacaaaaactgtggttacaacaacaccctccacgctgccggcgttcaaaaagatcctggtggccaaccgaggtgaaatcgcggtgcgagcattccgcgccgcctacgagaccggggccgcaaccgtggccatctacccccgggaggaccgtggctccttccaccgctccttcgcctccgaggcggtgaggatcggaaccgagggctcacccgtcaaggcgtacctcgatattgatgagatcatcaacgccgccaagaaggtgaaagcggacgcggtctacccggggtatggtttcctttcggaaaatgcccagctcgcgcgtgaatgcgcggagaacggcattaccttcatcggtcccaccccggaggtgctcgacctcacgggcgacaagtccaaggctgtgtccgccgcgaagaaggccgggctgccggtgctggcggaatccacccccagcaccgacatcgatgagatcgtcaagagtgccgaggggcagacctacccgatcttcgtcaaggccgtcgcaggtggtggcgggcgtggtatgcggttcgtcgagaagcccgaggacctgcgtgagctggccagggaggcctcccgcgaggcggaggccgctttcggtgacggatccgtctacgtcgaacgggccgtgatcaaaccccagcacatcgaggtgcagatcctcggtgatcacaccggcgatgtcatccacctgtatgaacgcgactgttccctgcagcgccgccaccagaaggtcgtggagatcgcacctgcccagcacctcgacccggagctgcgcgaccgcatctgtgccgatgccgtgaagttctgcaaatccatcggataccagggcgccggcaccgtggagttcctcgtcgacgaggcgggcaaccacgtcttcattgagatgaacccccgcatccaggtggaacacaccgtgaccgaggaggtcacctccgtcgacctggtcaaggcgcagatgcacctggccgccggtgccaccctgaaggaactgggcctgacccaggacaagatcaccacccacggtgccgccctgcagtgccgcatcaccacggaggacccgtccaacaacttccggcccgacaccggtgtgatcaccgcctaccgctccccgggtggtgcgggtgtgcgtctcgacggcgcagcccagctcggcggcgagatcaccgcacatttcgattccatgctggtcaagatgacctgccgcggttccgatttcgagaccgccgtgtcccgagcccagcgcgccctggcggagttcaacgtctccggcgtggccaccaacatcggcttcctgcgtgcgctgctgcgcgaggaagacttcaccaagaggcgcatcgacaccggcttcatcggctcccaccagcacctgctccaggccccaccggccgacgatgagcaggggcggatcctggaatacctggcggatgtcaccgtgaacaaaccccacggtgaacgccccgagacagcccgtccgatagagaagctgcccgaggtggagaacatcccgctgccacgcggctcccgcgaccgcctgaagcagctcggcccggagggtttcgcccgcgatctgcgcgaacaggatgccctggccgtcaccgacaccaccttccgcgatgcccaccagtccctcctggccacccgcgtgcgctccttcgcgctgaccccggcggcgcgcgccgtcgcaaagctcacccccgagctgctgtcggtggaggcctggggcggtgccacctacgacgtggccatgcgcttcctcttcgaggatccgtgggcacgcctggatgagctgcgtgaggcgatgccgaatgtgaacatccagatgctgctgcgtggtcgcaacaccgtcgggtacaccccgtaccccgattcggtgtgccgcgcgtttgtgcaggaggccgccaagtccggtgtggacatcttccgcatcttcgacgcgctcaacgacatctcccagatgcgcccggccatcgacgccgtcctggagaccggcaccagtgttgccgaggtcgccatggcgtactccggtgacctgtccaatccgggggagaagctctacaccctggactactacctgaacctggccgagcagatcgtcgactccggtgcacacatcctggccatcaaggacatggccggcctgctgcgcccggccgcggcgaccaaactggtcaccgccctgcgccgtgaattcgacctgcccgtgcatgtccacacccacgacaccgccggcggtcagctggccacctacctggccgccgccaacgccggggccgatgccgtcgacgccgcctccgcacccctgtccggtaccacctcccagccgtcgatgtccgctctggttgccgcgtttgcgcacacccgacgcgacaccggcctcaacctgcaggccgtctccgacctggaaccgtactgggaggcggtccgcggactgtacctgccgtttgaatccggcaccccgggcccgaccggacgcgtttaccgccacgagatccccggcggtcagctgtccaacctgcgtgcccaggccgttgcactgggtctggccgaccgcttcgagctcatcgaggactactacgcggccgtcaacgagatgctgggtcgtccgaccaaggtcaccccgtcctccaaggttgtcggtgacctcgcactgcacctcgtcggtgccggtgtgagcccggaggatttcgccgccgatccgcagaagtacgacatccccgattcggtcatcgccttcctccgcggcgaactgggtacccctcccggtggctggcccgaaccgctgcgcacccgtgcactcgagggtcgctcccagggtaaggccccgctggcggagatccccgccgaggagcaggcccacctggattccgatgattccgcggagcgtcgcggcaccctcaaccgcctgctgttcccgaagccgaccgaggagttccttgagcaccgtcgccgcttcggcaacacctccgccctggatgaccgcgagttcttctacggcttgaaggagggacgtgaggagctgatccgactgaccggtgtgtccaccccgatggtggtccgcctggatgcggtgtccgaaccggatgacaaaggcatgcgcaacgtggtggtcaacgtcaacggccagatccgcccgatcaaggtgcgcgaccgttccgtggagtccgtcaccgccaccgcggagaaggccgatgccaccaacaagggccatgtcgccgcaccattcgccggtgtggtcaccgtgaccgtcgccgagggtgatgagatcaaggctggcgacgccgtggccatcattgaggccatgaagatggaggccaccatcaccgcgcctgtcgacggtgtcatcgaccgcgtcgtggtgcccgccgccaccaaggtcgagggcggcgacctcatcgtggtcgtgtcctag

SEQ ID NO: 96816 - protein, 1168 aa, Corynebacterium efficiens YS-314
MVFRTGRYDVLKSDCHHPTGWSSSKGTKTVVTTTPSTLPAFKKILVANRGEIAVRAFRAAYETGAATVAIYPREDRGSFHRSFASEAVRIGTEGSPVKAYLDIDEIINAAKKVKADAVYPGYGFLSENAQLARECAENGITFIGPTPEVLDLTGDKSKAVSAAKKAGLPVLAESTPSTDIDEIVKSAEGQTYPIFVKAVAGGGGRGMRFVEKPEDLRELAREASREAEAAFGDGSVYVERAVIKPQHIEVQILGDHTGDVIHLYERDCSLQRRHQKVVEIAPAQHLDPELRDRICADAVKFCKSIGYQGAGTVEFLVDEAGNHVFIEMNPRIQVEHTVTEEVTSVDLVKAQMHLAAGATLKELGLTQDKITTHGAALQCRITTEDPSNNFRPDTGVITAYRSPGGAGVRLDGAAQLGGEITAHFDSMLVKMTCRGSDFETAVSRAQRALAEFNVSGVATNIGFLRALLREEDFTKRRIDTGFIGSHQHLLQAPPADDEQGRILEYLADVTVNKPHGERPETARPIEKLPEVENIPLPRGSRDRLKQLGPEGFARDLREQDALAVTDTTFRDAHQSLLATRVRSFALTPAARAVAKLTPELLSVEAWGGATYDVAMRFLFEDPWARLDELREAMPNVNIQMLLRGRNTVGYTPYPDSVCRAFVQEAAKSGVDIFRIFDALNDISQMRPAIDAVLETGTSVAEVAMAYSGDLSNPGEKLYTLDYYLNLAEQIVDSGAHILAIKDMAGLLRPAAATKLVTALRREFDLPVHVHTHDTAGGQLATYLAAANAGADAVDAASAPLSGTTSQPSMSALVAAFAHTRRDTGLNLQAVSDLEPYWEAVRGLYLPFESGTPGPTGRVYRHEIPGGQLSNLRAQAVALGLADRFELIEDYYAAVNEMLGRPTKVTPSSKVVGDLALHLVGAGVSPEDFAADPQKYDIPDSVIAFLRGELGTPPGGWPEPLRTRALEGRSQGKAPLAEIPAEEQAHLDSDDSAERRGTLNRLLFPKPTEEFLEHRRRFGNTSALDDREFFYGLKEGREELIRLTGVSTPMVVRLDAVSEPDDKGMRNVVVNVNGQIRPIKVRDRSVESVTATAEKADATNKGHVAAPFAGVVTVTVAEGDEIKAGDAVAIIEAMKMEATITAPVDGVIDRVVVPAATKVEGGDLIVVVS

SEQ ID NO: 96817 - DNA, 3462 bp, Staphylococcus epidermidis ATCC 12228
  CDS (1)..(3462): transl_table=11
gtgtcttggcttttgaaacaaataaagaaattacttgttgctaaccgtggtgaaatcgccattagaatttttagagcggcagcagaattaaatatcagtacagtagcaatttattctaatgaagataaaagttcgttacatagatataaagcagatgaatcctatctagttggaagtgatttaggacctgctgaaagttatttgaatatcgaacgtatcatcgaagtagctcttcgcgcaggtgtcgatgcaattcatcctgggtatggttttttaagtgaaaatgaacaatttgcacgccgatgtgctgaggaaggcattaaatttataggtccgcatcttgaacatctagacatgtttggagataaggttaaggctagaacaactgctattaacgctaacttacctgtaatcccgggtacagatggtcctattgaaagttttgaagctgcagaacagtttgctaatgaagcaggttacccacttatgattaaggccacaagcggtggcggtggtaaaggtatgcgaatcgttcgtgaatcaagcgaattagaagacgctttccatcgtgcgaaatcagaagccgaaaagtcatttggtaatagcgaagtttatatcgaaagatatattgataatccaaagcatatagaggttcaagttattggtgatgaattcgggaatatcattcatttgtatgaaagagattgctccgtacaacgacgtcatcaaaaggttgttgaagttgcaccttcagtaggtctttctaacaaattaagagagcgaatttgtgatgccgcaattcaactgatggaaaatataaaatacgtcaacgctggaacagtagaatttttagtttctggggatgaatttttcttcattgaggttaatccacgtgttcaagttgagcatacaattactgaaatgattactggtatagacattgtgaaaacgcaaattttagttgctaatggagaatcgttatttggagataaaatctctatgccacagcaaaatgaaattcaaacattagggtatgcgatacaatgtcgtataacaactgaagatcctactaatgattttatgccagattctggcacaattattgcatatcgatcaagtggcggttttggtgtgagacttgatgcaggggatggattccaaggtgcagaaatttcaccttactacgattcactattagttaagctttctacacatgccgtttcatttaaacaagctgaagagaaaatggaacgttcattacgcgaaatgcgaattcgtggcgtaaagacgaatattccatttctcatcaatgttatgcgtaatgataaatttagaagtggtgattatactactaaatttattgaagaaacacctgaacttttcgatattgcaccgacattggacagaggtaccaagactttagagtatattggtaatgtgacgataaacggatttcctaatgtagaaaagcgtccaaaaccagaatatgaatctaccaaaatcccaaaaatttctcaaaagaaaatcaatcagttatttggaacaaaacaaattcttgagcaacatggaccaacaggtgttacaaattgggttagagaacaagaagatgttttaattaccgatactacatttagagatgcacaccaatctttacttgcaacacgtgtaagaacaaaagatatgatgaacattgcatctaaaactgctgaagtttttaaagatagtttttcattagaaatgtggggtggtgcaacatttgatgtcgcctataatttcttgaaagagaatccatgggaacgtttagaaagattgcgcaaagccattccgaatgtgttattccaaatgttattacgagcttcgaacgcagtaggttataaaaactatcctgataatgtaattaagaaattcgttcatgaaagtgcaaaagctggtgtagatgttttccgtatattcgactcattgaactgggttgatcaaatgaaagtagcgaatgaagctgttcaagaagctggaatggtatctgagggtacaatttgctatacaggtgatattttaaatgctgaacgttccaatatttatactttagattattacgttaaaatggctaaagaactggaaagagaaggattccatatattagcaattaaagatatggctggtttattgaaaccgaaagcagcttacgaattaattggtgaattacgtgaggcaacacatcttccaattcatttacatacacatgatactagtggaaatggattgttgacatataaacaagcaattgatgctggcgtagatattatagatactgctgttgcatctatgagtggtttaacgagtcaaccaagtgcaaattcattatattatgcactaaatggatttccacgtaatttaagaactgatattgatgggttagaagagttgagtcattactggtctgtagtcagaccttactatgcagactttgagagtgatatcaaatcaccaaatacagaaatttatcaacatgaaatgccaggtggccaatattcaaacttaagtcaacaagctaaaagtttaggattgggcgaacgttttgatgaagtcaaagagatgtatcgtcgtgtcaacttcctgtttggagatcttgtaaaagtaacaccatcttcaaaggtagttggagatatggcactatatatggtgcaaaatgatcttgatgaagatacggtcatcaatgatggttataaattagatttcccagaatctgttgtgtcattctttaaaggtgacattggacaacctgtcaacggattcaacaagaaattgcaagatgttattttaaaaggacagcaaccaattactgaaagaccaggtgaatacttggagccggtcgattttgaagcaatccgtcaagaattaagcgacatacaacaagacgaggtaacagaacaagatataattagttatgtactttatccgaaggtatataaacaatatattcaaacgaaagagcaatttggtaatgtatctttactggatacaccgacattcttatttggcatgcgtaatggtgaaacagttgaaattgaaattgatactggtaaacgtctaattattaaattagaaacaatcagtgaaccagatgaaaatggtaagcgtacaatttattacgctatgaatggtcaagcaagacgtatctatattcaagatgaaaatgttaaaacgaatgctaatgttaaacctaaggcggataaatcaaatccaaatcatattggtgctcaaatgcctggttctgtaactgaagtcaaagtgtctgtaggcgatgaagttcaagctaatcagccattattaatcactgaagcaatgaagatggaaacgacgattcaggcaccatttgatggaattattaaacaaatcaatgttgctaatggagatgccattgccacaggagatttattagtggaaattgaaaagcaatcataa

SEQ ID NO: 96818 - protein, 1153 aa, Staphylococcus epidermidis ATCC 12228
MSWLLKQIKKLLVANRGEIAIRIFRAAAELNISTVAIYSNEDKSSLHRYKADESYLVGSDLGPAESYLNIERIIEVALRAGVDAIHPGYGFLSENEQFARRCAEEGIKFIGPHLEHLDMFGDKVKARTTAINANLPVIPGTDGPIESFEAAEQFANEAGYPLMIKATSGGGGKGMRIVRESSELEDAFHRAKSEAEKSFGNSEVYIERYIDNPKHIEVQVIGDEFGNIIHLYERDCSVQRRHQKVVEVAPSVGLSNKLRERICDAAIQLMENIKYVNAGTVEFLVSGDEFFFIEVNPRVQVEHTITEMITGIDIVKTQILVANGESLFGDKISMPQQNEIQTLGYAIQCRITTEDPTNDFMPDSGTIIAYRSSGGFGVRLDAGDGFQGAEISPYYDSLLVKLSTHAVSFKQAEEKMERSLREMRIRGVKTNIPFLINVMRNDKFRSGDYTTKFIEETPELFDIAPTLDRGTKTLEYIGNVTINGFPNVEKRPKPEYESTKIPKISQKKINQLFGTKQILEQHGPTGVTNWVREQEDVLITDTTFRDAHQSLLATRVRTKDMMNIASKTAEVFKDSFSLEMWGGATFDVAYNFLKENPWERLERLRKAIPNVLFQMLLRASNAVGYKNYPDNVIKKFVHESAKAGVDVFRIFDSLNWVDQMKVANEAVQEAGMVSEGTICYTGDILNAERSNIYTLDYYVKMAKELEREGFHILAIKDMAGLLKPKAAYELIGELREATHLPIHLHTHDTSGNGLLTYKQAIDAGVDIIDTAVASMSGLTSQPSANSLYYALNGFPRNLRTDIDGLEELSHYWSVVRPYYADFESDIKSPNTEIYQHEMPGGQYSNLSQQAKSLGLGERFDEVKEMYRRVNFLFGDLVKVTPSSKVVGDMALYMVQNDLDEDTVINDGYKLDFPESVVSFFKGDIGQPVNGFNKKLQDVILKGQQPITERPGEYLEPVDFEAIRQELSDIQQDEVTEQDIISYVLYPKVYKQYIQTKEQFGNVSLLDTPTFLFGMRNGETVEIEIDTGKRLIIKLETISEPDENGKRTIYYAMNGQARRIYIQDENVKTNANVKPKADKSNPNHIGAQMPGSVTEVKVSVGDEVQANQPLLITEAMKMETTIQAPFDGIIKQINVANGDAIATGDLLVEIEKQS

SEQ ID NO: 96819 - DNA, 3435 bp, Lactobacillus plantarum WCFS1
  CDS (1)..(3435): transl_table=11
ttggtgaagaaagtattaattgctaaccgtggtgaaattgcgacccgggtcattcgtgcttgccacgaattaggccttcagactgttgcgatttacgccaaagaagatgagttttcagttcaccgttttaaagctgatgaagcgtacttagtaggtgagggtaaggcgccgattgcggcttacctggatattgaagatattattcgcattgctaaagaaaatcatgtggatgcgattcacccaggttacggctttttatctgaaaatgctacttttgctcggcggattgctgaagaaggcatgaccttcgttggtcctaagccagagcacctcgagatgtttggtgataagattacggccaaacgtgtagctcgcgatgccggcgtgcagacgattccgagtaccttgcacccggttactagcctgaacgaggcgttacaatttactcagcaatacggttatccaattatgatcaaagctgccatgggtggtggtggtcggggaatgcgcatcgttcacgaagcttctgaattacaagaagcttttgaccgtgcccgttcagaggccatgcaatcctttggtgatgacgagatttacttggaaaaattcatcgcgaatcccaaacacattgaagtccagattttagcggatgctcacggcaatgtcatgcatttatttgaacgtgactgttctgttcagcgccgtaatcaaaaggtgattgaatttgcaccggccgtggccctgccaatcgagttgcgtcaaaagatctgtaacgccgcagtcgacttgatgaagagtgtacactatttaaacgccgcaacggttgaattcttggttgaaggggaccaattctacttcatggaagttaatccgcgggttcaagttgaacatacggtgacagaaatgattaccgaaatcgatattgtccatgctcagctcaaaattgcgatgggtggtgacctattcgaggatttacggttaccacatcaagacgcattgacatataagggtgcggcaattcagtgtcgaattacgacggaagatcccgcaaatgattttatgccagatactggtcgcatcgagacgtaccggtcaccaggtggtaatggggttcgtttggatgctggtaatacctattccggcgcaatcgtaacgccttattttgattcactgcttgtaaaggcttgtgttgcggcgcggaacttcaaagcggccgttcataaaatgcgacgcgtcctagttgaattcgatattcgcggcgtgaagacgaacattccgtttatgctgaatgtgattgacaacccaacgttccaagcaggtgaagcggggacccggtttattgatcagaccccaacgctcttcaaattccctgacgatacgcaacgtgaagataagatgttgaagtatattgggaatgtgacggtcaatggtttcgctgacgttgcccaacattcgaagaagtactatccggacgttgagtttaaggatgattttcaaccgatcgcacccgacatcgtcacggcaaaagacgtgttggatcaacaaggtgtccagggattacaacagtggttgttagcccagaagcaagtgttattaacagatacgaccatgcgggatgcgcatcagagtttatttgcaacgcggatgcggacgaaggatatgttagccgttgccgcggcttcacaaaaagcgttgccacagttattctcctatgagatgtggggtggtgcgacgttcgatgtggcctatcgttttctaaatgaaaatccctggaatcggctgaaagaacttcggcaggcaatgccccggacactcttccaaatgttgttccgtggttccaatgcggtgggttaccagaactatccagataatgtgattcgcgaatttatcttagaagcagctaagagtggcattgatgttttccgcatttttgacagtttgaattggattcctcaaatggaaaagagtattcaggccgtcaaggaaaccgggaagattgcggaagccacgatttgttatacgggcgacattatggaccctgaccggcaaaaatacaatcttgattattaccgtcagctggccttggatctgcaatcaactggtgccgatattattgccatcaaggatatggcgggtgtgttaaagccagaggccgcctatgaattagtatcgacgttgaaagacgcgctgtccgtgccagttcatctgcatacgcatgatacgactggtaatggaatctttacctatgcccgagcagtggaagctggtgttgacgtggtcgatgttgctgcgagtgcgctatcaggcacgaccagccaaccatcaatgagttcgttgtattacgcattagcccacaatgatcgtcaacctgatgttgatattaacaacgttgaagccatcaatcggtattggcaaggcgtacggccatactaccaagacttctcgaacggtatgaccggaccacagacagatatttatcagacgcagatgccgggtggacaatattctaacttgcagcaacaagctaaggctgttggtctcggggatcgttgggaagaagttaagacgatgtatgcgacggtcaatgatatgtttggtgatattatcaaagttacgcccagctctaaagttgttggtgacatggccctgttcatgatggaaaatcacttgacaccggacgatgtttataatcagggtaccaagctcgatttcccagcatcggtcatcaacttctttgctggcaatcttggtcaaccagtcggaggctttccaaagaagctccagcagatcgtcttgaaaggccagccagcgttgactgtgcggcccggtagtttagccaaaccagctgactttgctgcggtcaaagcagagctatcggctaagcttggccatgaagcgagccatcaggaagtgctcagctacatcctgtatccgaaagtattcatggattacgacgctagccataagcgctacgggcacgtatcactgttagacacaccgacctttttccaaggcatgcggctcggtgagacggtcaatattgagttagccaaaggtaagacgatgatcgtcaagcttaatcagattagtgatcccgatgtcgatggtgtccggacactttactttagtatcaatggtcaaaatcaagagattatggtcaaggacaatgccattcaccaatcggcaaccagcacgcgcaaggcggaaccaactaatgaagatgaagttggcgcaacgatgagtggttcagttctgaaactgttagttaagaagggccaaacggttaagaaaggtgagccattacttgtgacggaagcaatgaagatggagacaaccattcaggcaccggaagatggggtcatcgaacatatttatgttaatgcgggtgacgtcattcagacggatgacttactgctcgagattgcaccacaataa

SEQ ID NO: 96820 - protein, 1144 aa, Lactobacillus plantarum WCFS1
MVKKVLIANRGEIATRVIRACHELGLQTVAIYAKEDEFSVHRFKADEAYLVGEGKAPIAAYLDIEDIIRIAKENHVDAIHPGYGFLSENATFARRIAEEGMTFVGPKPEHLEMFGDKITAKRVARDAGVQTIPSTLHPVTSLNEALQFTQQYGYPIMIKAAMGGGGRGMRIVHEASELQEAFDRARSEAMQSFGDDEIYLEKFIANPKHIEVQILADAHGNVMHLFERDCSVQRRNQKVIEFAPAVALPIELRQKICNAAVDLMKSVHYLNAATVEFLVEGDQFYFMEVNPRVQVEHTVTEMITEIDIVHAQLKIAMGGDLFEDLRLPHQDALTYKGAAIQCRITTEDPANDFMPDTGRIETYRSPGGNGVRLDAGNTYSGAIVTPYFDSLLVKACVAARNFKAAVHKMRRVLVEFDIRGVKTNIPFMLNVIDNPTFQAGEAGTRFIDQTPTLFKFPDDTQREDKMLKYIGNVTVNGFADVAQHSKKYYPDVEFKDDFQPIAPDIVTAKDVLDQQGVQGLQQWLLAQKQVLLTDTTMRDAHQSLFATRMRTKDMLAVAAASQKALPQLFSYEMWGGATFDVAYRFLNENPWNRLKELRQAMPRTLFQMLFRGSNAVGYQNYPDNVIREFILEAAKSGIDVFRIFDSLNWIPQMEKSIQAVKETGKIAEATICYTGDIMDPDRQKYNLDYYRQLALDLQSTGADIIAIKDMAGVLKPEAAYELVSTLKDALSVPVHLHTHDTTGNGIFTYARAVEAGVDVVDVAASALSGTTSQPSMSSLYYALAHNDRQPDVDINNVEAINRYWQGVRPYYQDFSNGMTGPQTDIYQTQMPGGQYSNLQQQAKAVGLGDRWEEVKTMYATVNDMFGDIIKVTPSSKVVGDMALFMMENHLTPDDVYNQGTKLDFPASVINFFAGNLGQPVGGFPKKLQQIVLKGQPALTVRPGSLAKPADFAAVKAELSAKLGHEASHQEVLSYILYPKVFMDYDASHKRYGHVSLLDTPTFFQGMRLGETVNIELAKGKTMIVKLNQISDPDVDGVRTLYFSINGQNQEIMVKDNAIHQSATSTRKAEPTNEDEVGATMSGSVLKLLVKKGQTVKKGEPLLVTEAMKMETTIQAPEDGVIEHIYVNAGDVIQTDDLLLEIAPQ

SEQ ID NO: 96821 - DNA, 3396 bp, Tropheryma whipplei str. Twist
  CDS (1)..(3396): transl_table=11
gtgtttaaaaagattctcatagcaaaccgcggtgaaatagcgatccgtatctccagagccgcatttgagcggcagatacaaacggttgcgatatatgcccatgaggatcgtaatagtctacacagactaaaagctgatgaagcctatcaaatagggcaagttggcagccctgttgcggcttatcttgatgttcacgagattattcgtgtggcacttatgtcaaactctgatgcaattcatccgggatatggattcttatcagaaagctatctccttgccgatgaagccgaaaagaacggaataacttttataggcccaccaaaggatgtcctaaaaagtgcaggggataaggttctggcaaaacatatggcgcaggcagcaggcttgccaaccctgagatccagcaccgcaagtagcaattatgacgagttactccgtgaggctgaattatttgaatatccgatttttgtcaaggctgcgagtggcggtggtggccgtggaatgcgcattgtcgagaacaggacggccttaaagaactctcttgagagtgcgattcaagaagcggcggcatcatttggtgacccgcgcgttttcctggaaacagctttggacaaaccccgtcatatagaagttcaggttttggcagacaaattcggtaacattgtgcacttgtttgagagggattgctcgctgcaaaggcgacatcaaaaagttattgagattgctcccgctccaaatattccagaattactcagaaccactctctatcgtgatgcaattgcatttgcaaaaagtgtgaagtatgaaaatgcaggcacagttgaatttcttgttgactcaaagatgaatcattacttcattgaaatgaaccccaggattcaggttgagcatactgttaccgaagaaataaccgatattgatatagttcagagtcaaattcttattgccgccggtgccagccttgacgatattggacttgttcaagacaaaatagaacgaaggggttttgcactgcaatgcagaattacaacagaagatccccatgcaaactttagaccggacactgggcgtataacctcttatcaatctcccggcggcgcggggattcgtcttgatgccagtgctgtaaatccaggggtagagataacaccttattttgactcgatgcttgtcaaaatgacttgccgaggcaatagctttgcggatgcaacaaacagagctcgtagaggtcttgccgagtttagagttggtggcgttgcaacaaatatctccttcttacgcacattgcttgatagcagtaattttctgaatgcagattttgacacaacatttatagagaagaatggatatttactacaacaatcttttttgcttgataagcatgataggttggtgtcttacctgggacatgtaacagtaaataaaccgtacggagatcgcccagagcttgttgacccgtgttccaaaattgccaactttttacctgactcatctgaggtcaagaaaagtgtggagggaagcagagatgttcttttacgccttggaccccaagggtttgcaaaatggcttttatgccgcaagggtttagctgtaactgatacaacatttcgtgatgcacatcaatccctcctggcaacccgggttagaacaatagatctctcccgcgccgctgagtgcacatctgccgctttgcctgaactgttttctatggaggtctggggtggtgctacatatgatgtagctcttcgttttttgtatgaagatccatgggagagactttcaaaaatacgtgaaaaggtcggaagcatatgtctgcagatgcttcttcgagggcgcaacacggttggatataccccttacccagaccaggttactcgcgcttttgtagacgaggcatcggacttggggattgatatattccgtatatttgatgcgctaaatgatgtagaccagatgcgcatagctatagatgcggtacaacagacgaacagcgttgccgaagtggcaatctgttatacaggtgacctccttgataagcgtgaaacagtgtacacaattgactattatctcgagatagccaagaaaattgttgatgcgggtgcgcatattttagctataaaagatatggccggcgtcctgcgccctcgcgctgcgacacttctcgtaagcgccctgaaaagggaatttgcccttccggttcatttacacacacacgatactcctggaggacagcttgctacccttttggcggctgcggattcgggtgtcgatgcggtagatgttgccagtggccccatgtctggcacaaccagtcaaccctccatgtcgtcccttgttgccgccacagataatacagagcatgaaacaggcctttccctgagtcgtgtgaatgaattggagccatactgggaagcggtgcgccggctgtatgttccttttgaatctggtttactatccccaacaggtcgcgtatacatccatgaaattcccggaggtcagctctctaatctaaaacaacaggcaattgcactaggactttctgatcgatttgagattattgaggaaatgtatgcctatgtcaacacactctttgggcgtataccaaaagttaccccctcctccaaggtcgttggggatttggcgctttatttggcttctgtcaatcccgatttgggtgattttgaaatgaatccgaaaaaatatgatatcccggattctgttatttcttttttagccggcgaactgggcactcctccagctggttggcccgattttagagaccgggtactggccgaaagagaaattagcattgaacaacacccactgagcagtgatgattcaaagaatcttgccacctcgggcaaaatacggcagcaaaccctaagtaaactacttttcccagaaccttaccgcgcatttgaagcaaatagggcggaatacggcgacctatcaatcttgaggagtgaagagtttttctatggacttgattttggcattgagtacaaaatagccgtttcttcatcagttggcatccttgtgcgtcttgaggcaatcggcggagttgatagcaagggtgaacgatcgcttgtactatcagtcaatggtgaactgcgccccatacaggtaagggatgaatctgccaatgtcgaggtctcccgcgcagaaaaagccgacccgaataacccgggtcatattgcctccccttttgctgggcaggttacaattaaggtcgacgttggcgatgaggttgtttccggacaggctgttgcgatacttgaagctatgaagatgaccactgtggtcaatgcgccagtctccgggcaggttattcgcatttcaattccaccgggtcgtcaggtggatattggcgatctgattatggaaataagggtctga

SEQ ID NO: 96822 - protein, 1131 aa, Tropheryma whipplei str. Twist
MFKKILIANRGEIAIRISRAAFERQIQTVAIYAHEDRNSLHRLKADEAYQIGQVGSPVAAYLDVHEIIRVALMSNSDAIHPGYGFLSESYLLADEAEKNGITFIGPPKDVLKSAGDKVLAKHMAQAAGLPTLRSSTASSNYDELLREAELFEYPIFVKAASGGGGRGMRIVENRTALKNSLESAIQEAAASFGDPRVFLETALDKPRHIEVQVLADKFGNIVHLFERDCSLQRRHQKVIEIAPAPNIPELLRTTLYRDAIAFAKSVKYENAGTVEFLVDSKMNHYFIEMNPRIQVEHTVTEEITDIDIVQSQILIAAGASLDDIGLVQDKIERRGFALQCRITTEDPHANFRPDTGRITSYQSPGGAGIRLDASAVNPGVEITPYFDSMLVKMTCRGNSFADATNRARRGLAEFRVGGVATNISFLRTLLDSSNFLNADFDTTFIEKNGYLLQQSFLLDKHDRLVSYLGHVTVNKPYGDRPELVDPCSKIANFLPDSSEVKKSVEGSRDVLLRLGPQGFAKWLLCRKGLAVTDTTFRDAHQSLLATRVRTIDLSRAAECTSAALPELFSMEVWGGATYDVALRFLYEDPWERLSKIREKVGSICLQMLLRGRNTVGYTPYPDQVTRAFVDEASDLGIDIFRIFDALNDVDQMRIAIDAVQQTNSVAEVAICYTGDLLDKRETVYTIDYYLEIAKKIVDAGAHILAIKDMAGVLRPRAATLLVSALKREFALPVHLHTHDTPGGQLATLLAAADSGVDAVDVASGPMSGTTSQPSMSSLVAATDNTEHETGLSLSRVNELEPYWEAVRRLYVPFESGLLSPTGRVYIHEIPGGQLSNLKQQAIALGLSDRFEIIEEMYAYVNTLFGRIPKVTPSSKVVGDLALYLASVNPDLGDFEMNPKKYDIPDSVISFLAGELGTPPAGWPDFRDRVLAEREISIEQHPLSSDDSKNLATSGKIRQQTLSKLLFPEPYRAFEANRAEYGDLSILRSEEFFYGLDFGIEYKIAVSSSVGILVRLEAIGGVDSKGERSLVLSVNGELRPIQVRDESANVEVSRAEKADPNNPGHIASPFAGQVTIKVDVGDEVVSGQAVAILEAMKMTTVVNAPVSGQVIRISIPPGRQVDIGDLIMEIRV

SEQ ID NO: 96823 - DNA, 3396 bp, Tropheryma whipplei TW08/27
  CDS (1)..(3396): transl_table=11
gtgtttaaaaagattctcatagcaaaccgcggtgaaatagcgatccgtatctccagagccgcatttgagcggcagatacaaacggttgcgatatatgcccatgaggatcgtaatagtctacacagactaaaagctgatgaagcctatcaaatagggcaagttggcagccctgttgcggcttatcttgatgttcacgagattattcgtgtggcacttatgtcaaactctgatgcaattcatccgggatatggattcttatcagaaagctatctccttgccgatgaagccgaaaagaacggaataacttttataggcccaccaaaggatgtcctaaaaagtgcaggggataaggttctggcaaaacatatggcgcaggcagcaggcttgccaaccctgagatccagcaccgcaagtagcaattatgacgagttactccgtgaggctgaattatttgaatatccgatttttgtcaaggctgcgagtggcggtggtggccgtggaatgcgcattgtcgagaacaggacggccttaaagaactctcttgagagtgcgattcaagaagcggcggcatcatttggtgacccgcgcgttttcctggaaacagctttggacaaaccccgtcatatagaagttcaggttttggcagacaaattcggtaacattgtgcacttgtttgagagggattgctcgctgcaaaggcgacatcaaaaagttattgagattgctcccgctccaaatattccagaattactcagaaccactctctatcgtgatgcaattgcatttgcaaaaagcgtgaagtatgaaaatgcaggcacagttgaatttcttgttgactcaaagatgaatcattacttcattgaaatgaaccccaggattcaggttgagcatactgttaccgaagaaataaccgatattgatatagttcagagtcaaattcgtattgctgccggcgccagtcttgacgatattgggcttgttcaagacaaaatagaacgaaggggctttgcactgcaatgcagaattacaacagaagatccccatgcaaactttagaccggacactgggcgtataacctcttatcaatctcccggcggcgcggggattcgtcttgatgccagtgctgtaaatccaggggtagagataacaccttattttgactcgatgcttgtcaaaatgacttgccgaggcaatagctttgcggatgcaacaaacagagctcgtagaggtcttgccgagtttagagttggtggcgttgcaacaaatatctccttcttacgcacattgcttgatagcagtaattttctgaatgcagattttgacacaacatttatagagaagaatggatatttactacaacaatcttttttgcttgataagcatgataggttggtgtcttacctgggacatgtaacagtaaataaaccgtacggagatcgcccagagcttgttgacccgtgttccaaaattgccaactttttacctgactcatctgaggtcaagaaaagtgtggagggaagcagagatgttcttttacgccttggaccccaagggtttgcaaaatggcttttatgccgcaagggtttagctgtaactgatacaacatttcgtgatgcacatcaatccctcctggcaacccgggttagaacaatagatctctcccgcgccgctgagtgcacatctgccgctttgcctgaactgttttctatggaggtctggggtggtgctacatatgatgtagctcttcgttttttgtatgaagatccatgggagagactttcaaaaatacgtgaaaaggtcggaagcatatgtctgcagatgcttcttcgagggcgcaacacggttggatataccccttacccagaccaggttactcgcgcttttgtagacgaggcatcggacttggggattgatatattccgtatatttgatgcgctaaatgatgtagaccagatgcgcatagctatagatgcggtacaacagacgaacagcgttgccgaagtggcaatctgttatacaggtgacctccttgataagcgtgaaacagtgtacacaattgactattatctcgagatagccaagaaaattgttgatgcgggtgcgcatattttagctataaaagatatggccggcgtcctgcgccctcgcgctgcgacacttctcgtaagcgccctgaaaagggaatttgcccttccggttcatttacacacacacgatactcctggaggacagcttgctacccttttggcggctgcggattcgggtgtcgatgcggtagatgttgccagtggccccatgtctggcacaaccagtcaaccctccatgtcgtcccttgttgccgccacagataatacagagcatgaaacaggcctttccctgagtcgtgtgaatgaattggagccatactgggaagcggtgcgccggctgtatgttccttttgaatctggtttactatccccaacaggtcgcgtatacatccatgaaattcccggaggtcagctctctaatctaaaacaacaggcaattgcactaggactttctgatcgatttgagattattgaggaaatgtatgcctatgtcaacacactctttgggcgtataccaaaagttaccccctcctccaaggtcgttggggatttggcgctttatttggcttctgtcaatcccgatttgggtgattttgaaatgaatccgaaaaaatatgatatcccggattctgttatttcttttttagccggcgaactgggcactcctccagctggttggcccgattttagagaccgggtactggccgaaagagaaattagcattgaacaacacccactgagcagtgatgattcaaagaatcttgccacctcgggcaaaatacggcagcaaaccctaagtaaactacttttcccagaaccttaccgcgcatttgaagcaaatagggcggaatacggcgacctatcaatcttgaggagtgaagagtttttctatggacttgattttggcattgagtacaaaatagccgtttcttcatcagttggcatccttgtgcgtcttgaggcaatcggcggagttgatagcaagggtgaacgatcgcttgtactatcagtcaatggtgaactgcgccccatacaggtaagggatgaatctgccaatgtcgaggtctcccgcgcagaaaaagccgacccgaataacccgggtcatattgcctccccttttgctgggcaggttacaattaaggtcgacgttggcgatgaggttgtttccggacaggctgttgcgatacttgaagctatgaagatgaccactgtggtcaatgcgccagtctccgggcaggttattcgcatttcaattccaccgggtcgtcaggtggatattggcgatctgattatggaaataagggtctga

SEQ ID NO: 96824 - protein, 1131 aa, Tropheryma whipplei TW08/27
MFKKILIANRGEIAIRISRAAFERQIQTVAIYAHEDRNSLHRLKADEAYQIGQVGSPVAAYLDVHEIIRVALMSNSDAIHPGYGFLSESYLLADEAEKNGITFIGPPKDVLKSAGDKVLAKHMAQAAGLPTLRSSTASSNYDELLREAELFEYPIFVKAASGGGGRGMRIVENRTALKNSLESAIQEAAASFGDPRVFLETALDKPRHIEVQVLADKFGNIVHLFERDCSLQRRHQKVIEIAPAPNIPELLRTTLYRDAIAFAKSVKYENAGTVEFLVDSKMNHYFIEMNPRIQVEHTVTEEITDIDIVQSQIRIAAGASLDDIGLVQDKIERRGFALQCRITTEDPHANFRPDTGRITSYQSPGGAGIRLDASAVNPGVEITPYFDSMLVKMTCRGNSFADATNRARRGLAEFRVGGVATNISFLRTLLDSSNFLNADFDTTFIEKNGYLLQQSFLLDKHDRLVSYLGHVTVNKPYGDRPELVDPCSKIANFLPDSSEVKKSVEGSRDVLLRLGPQGFAKWLLCRKGLAVTDTTFRDAHQSLLATRVRTIDLSRAAECTSAALPELFSMEVWGGATYDVALRFLYEDPWERLSKIREKVGSICLQMLLRGRNTVGYTPYPDQVTRAFVDEASDLGIDIFRIFDALNDVDQMRIAIDAVQQTNSVAEVAICYTGDLLDKRETVYTIDYYLEIAKKIVDAGAHILAIKDMAGVLRPRAATLLVSALKREFALPVHLHTHDTPGGQLATLLAAADSGVDAVDVASGPMSGTTSQPSMSSLVAATDNTEHETGLSLSRVNELEPYWEAVRRLYVPFESGLLSPTGRVYIHEIPGGQLSNLKQQAIALGLSDRFEIIEEMYAYVNTLFGRIPKVTPSSKVVGDLALYLASVNPDLGDFEMNPKKYDIPDSVISFLAGELGTPPAGWPDFRDRVLAEREISIEQHPLSSDDSKNLATSGKIRQQTLSKLLFPEPYRAFEANRAEYGDLSILRSEEFFYGLDFGIEYKIAVSSSVGILVRLEAIGGVDSKGERSLVLSVNGELRPIQVRDESANVEVSRAEKADPNNPGHIASPFAGQVTIKVDVGDEVVSGQAVAILEAMKMTTVVNAPVSGQVIRISIPPGRQVDIGDLIMEIRV

SEQ ID NO: 96825 - DNA, 3429 bp, Enterococcus faecalis V583
  CDS (1)..(3429): transl_table=11
atgaaaaaggtattagttgccaatcgtggcgaaattgcgattcgaatttttagagcttgtacagaattagatatccgtacagtagcgatttatgctgcagaagatgagtattctgttcatcgtttcaaagcagatgaagcgtatttagttggtaaggggaaaaaaccaattgaagcctatttagacattgaaaatattatccaaattgccaaaaaatcgggagcagatgccattcatcctggttatggctttttatcagagaacttacgcttcgccgaacgttgtgaagaagaaggaatcatttttgtcggacctaaaacacatcatttagatatttttggcgataaaattaaagcgaaagaagcagctgtagctgcggggattgcttcgattccaggctcagacgggccagtagcaacggtggaagaggttgtagcttttggtgaaacacatggctttcctatcatgattaaagctgctttaggtggcggcggtcgcgggatgcgcgttgcccacgatgccaaagaagcacgagaaggttacgaaagagcaaaaagtgaagcgaaagcagcctttggttctgacgaggtttatgttgaaaagtatatttctaatcctaaacatatcgaagtacaaattttaggcgatcatcatgggaacgtcttgcatttatttgaacgtgattgttccgttcaacggcgccaccaaaaagtggtagaagtcgcaccatgtgtatcaatgaatgaagaacaacgagcagccatttgttcggctgctgtgcagttaatggcacatgtcggctacgtgaatgcgggaacggttgagtttttagtagaaggggatcagttttattttattgaagtgaatcctcgtgttcaggtagaacatactatcacagaaatgattacagatattgatattgtgatctctcaattacaaattgcgcaagggcttgatttgcataaagatatgcatttgccaaaacaaaacgaattgacattaaaaggcgcggctattcaatgtcggattacgactgaagatcccctgaaccagtttatgccagacacagggaaaatcgatacgtatcgttcaccaggtggttttggtgtgcgtttagatgtagggaatgcttattctggctacgctgtgactccctactttgattctttattggttaaagtctgtacgcatggtttctcttttgaacaggcaatcagtaaaatgcaacgctgcttaaaagaatttcggattcgtggcgtgaaaacaaatattccgtttttacaaaatgttgtgagctatccagcgtttcaatctggcgaagccaaaacaacctttattgataatacacctgaattatttgaatttcctcgtatgcgcgatcgtggcaataaaacgatgaaatacattggagaagtaacggtcaatgggttccctggcattgaaagaacggagaaaaaatattttgaagccccgcgcgtgccgacagatattgaagttccagaaaaagtgattacagctaaaaatattctagacgctcaaggagcaaccgccgtcatcgattgggttaagaatcaagaaagtgtgttaatgacagataccacgttccgtgatgcgcaccaaagtttattagctactcgtgtgagaacacaagattttaaagcaattgctggtctaactgatgcagccctgcctgagctgttttctagtgaaatgtggggtggcgctacgttcgatgttgcctatcgcttcttaaccgaagacccatggcaacgtttaagaaaaattcgtcagttgatgccaaacacacttttacaaatgctgttcagaggatctaatgcggtaggctatcaaaattatcctgataatgttattgaagaatttattaaagaatccgctcgccaaggagtcgatgttttccgaatttttgatagcttaaactggattcctcaaatggaaaaaagtattcaagtcgttcgggataccggaaaaattgcggaagcagcaatttgttatactggggacatcaatgatccagcccgagcaaaatataatgttcaatattaccttgatatggctaaagaattggaaaatttaggtgcacaaatcattgcgattaaagatatggctggcttattgaaaccacaagctgcttatcgtttaattagtgaattaaaggcagccacggatttaccaattcatctccacactcacgacactagtggcaatgggatcatcacatattcagcagctactaaagcgggcgttgatattgttgacgtcgcaatgagtgcgatgagtggcgcaactagccagccaagtatgaacagtctatattatgctttagtcaatggtgaacggacgccaactattaacattgataatgcacagaaaatcaatcattattgggaagatgtgcgcatgtattatcaaccatttgaaaatgggttaaatgccccgcaaacagaagtctatatgcatgaaatgcctggtgggcaatactctaatctacagcagcaagcaaaagcggtaggcttagggcaccgttgggatgaaatcaaaaaaatatatcacacagtgaatttgatgtttggcgatattgtaaaagtgacgccatcttcaaaagtcgtgggagacatggcactcttcatggttcaaaataatctgacagaacaagatgtttatgcgcgtggtgaagaactaagttttcctgaatcagttgtgacttttttccaaggtgatttaggtcaaccagttggtgggttcccgaaagagctgcaacgaattattctaaaaggtcgaccagccttcacagagcggccaggtgacttagcagcacctgttgattttgcgaaagtacaagaagaattagccgaaaaaattgggtatcaacctaaattggaagaagttttaagttatttaatgtatccacaagtatttttagagtatcgtcaaaaatacgaaacctttggagatataaccttattagatacgccaacattctttaatggtattcgtcaaggagagacattggaagttcaaattgaacgaggaaaaacgttaattattcgtttagatgaaattggcgaacctgatattgacggaaaccgtgtcttgttcttcaatttgaatgggcaacgtcgtgaggttttagttaaagatgcctctattaagtctgctgttcaagtaaaacaaaaggcggaaccaactaataaagaacaaatcggcgcaacgatgtctggttctgttctacaagtattggtcaaacgtggcgataaagtagaaaaaggtcagccgttgctgattacagaagccatgaaaatggaaacgactatcgaagcacgttttgcgggcacggtagatcacatttatgttgaagaaggcgaagcaatcagctcaggtgatttgttattagaagtgaaagaaaaataa

SEQ ID NO: 96826 - protein, 1142 aa, Enterococcus faecalis V583
MKKVLVANRGEIAIRIFRACTELDIRTVAIYAAEDEYSVHRFKADEAYLVGKGKKPIEAYLDIENIIQIAKKSGADAIHPGYGFLSENLRFAERCEEEGIIFVGPKTHHLDIFGDKIKAKEAAVAAGIASIPGSDGPVATVEEVVAFGETHGFPIMIKAALGGGGRGMRVAHDAKEAREGYERAKSEAKAAFGSDEVYVEKYISNPKHIEVQILGDHHGNVLHLFERDCSVQRRHQKVVEVAPCVSMNEEQRAAICSAAVQLMAHVGYVNAGTVEFLVEGDQFYFIEVNPRVQVEHTITEMITDIDIVISQLQIAQGLDLHKDMHLPKQNELTLKGAAIQCRITTEDPLNQFMPDTGKIDTYRSPGGFGVRLDVGNAYSGYAVTPYFDSLLVKVCTHGFSFEQAISKMQRCLKEFRIRGVKTNIPFLQNVVSYPAFQSGEAKTTFIDNTPELFEFPRMRDRGNKTMKYIGEVTVNGFPGIERTEKKYFEAPRVPTDIEVPEKVITAKNILDAQGATAVIDWVKNQESVLMTDTTFRDAHQSLLATRVRTQDFKAIAGLTDAALPELFSSEMWGGATFDVAYRFLTEDPWQRLRKIRQLMPNTLLQMLFRGSNAVGYQNYPDNVIEEFIKESARQGVDVFRIFDSLNWIPQMEKSIQVVRDTGKIAEAAICYTGDINDPARAKYNVQYYLDMAKELENLGAQIIAIKDMAGLLKPQAAYRLISELKAATDLPIHLHTHDTSGNGIITYSAATKAGVDIVDVAMSAMSGATSQPSMNSLYYALVNGERTPTINIDNAQKINHYWEDVRMYYQPFENGLNAPQTEVYMHEMPGGQYSNLQQQAKAVGLGHRWDEIKKIYHTVNLMFGDIVKVTPSSKVVGDMALFMVQNNLTEQDVYARGEELSFPESVVTFFQGDLGQPVGGFPKELQRIILKGRPAFTERPGDLAAPVDFAKVQEELAEKIGYQPKLEEVLSYLMYPQVFLEYRQKYETFGDITLLDTPTFFNGIRQGETLEVQIERGKTLIIRLDEIGEPDIDGNRVLFFNLNGQRREVLVKDASIKSAVQVKQKAEPTNKEQIGATMSGSVLQVLVKRGDKVEKGQPLLITEAMKMETTIEARFAGTVDHIYVEEGEAISSGDLLLEVKEK

SEQ ID NO: 96827 - DNA, 3447 bp, Bacillus cereus ATCC 14579
  CDS (1)..(3447): transl_table=11
atgacaaagctgcaacgtattcaaaaagtattggtagctaaccgtggagagattgcaattcgtgtgtttcgagcttgttcggaacttggattaaaaacagttgcaatctattctaaagaggatagtggttcttatcatcgctataaagccgatgagtcctatttagttggggaaggaaaaaaaccaattgatgcttatctagatattgaaggcattattgagattgcaaaaagtaatcatgtagatgcaatccaccctggatatggtttcttgtcagaaaatattcaattcgctaaacgttgtgaagaagaaggaattatctttatcggtccgaaaagtaagcatttagatatgtttggagataaagtgaaagcaagaacacaagcgcagctagcacaaattccagttatacctggtagtgatggtccagtaaattcattagaagaagtcgaaaaatttgctgaaaagtatgattacccgattattattaaagcatcccttgggggtggcggtcgtggtatgcgtattgtgcgtactagtgaggaattaggagaatcatataatcgagcgaaatcagaagcgaaagcagcctttggtaatgatgaagtttacgtcgaaaaattcgttgaaaaacctaaacatatagaagtacaaattttagcagatgaagaaggcaatgttgttcatttatacgagcgtgactgttctgtacaacgtcgtcatcaaaaagttgtagaaattgcaccgagtgtatcactttcagatgatctgcgtcagcgtatttgtgatgctgctgtgaagttaacgaaaaatgtaaattatttaaatgcaggaacagtagaattccttgtaaaagatgatgagttttactttattgaagtaaatccacgtgttcaagtagaacatacgattacagaaatgattacgggagtagatattgttcaatcacaaattttaatagctgatggacattcattacatagcaaaatggtaggtgttccgaagcaagaggaagtagttgtacatggatttgcaattcaatctcgtgtaacaactgaagatccgctaaataattttatgccggatacaggaaaaattatggcgtatcgatcaggcggtggttttggtgtacgtcttgatacaggaaatagcttccaaggtgcagttattacaccgtactacgattctttacttgtaaaagttacaacttgggcacttacttttgagcaagctgctgcaaaaatggaacgtaacttaaaagaattccgtattcgtggtattaaaacaaatattccattcctagagaatgtagtaaaacataaaaacttcttatcaggagaatatgatacttcatttatcgatgcgtcacctgaattgttcttgttcccgaaacgtaaagaccgtggaacgaaaatgttaaattacattggtacagtaacagtaaatggtttcccaggagtaggtaaaaaagaaaaaccaatattcccagatgctcgtattccatgtttaaaacattcagagccaatccaaaatggaacgaaacaaattttggacgagcgtggagcggacggattagtaaaatgggtacaggatcaaaaacgtgtacttttaacggatacaacattccgtgatgcacaccagtcattacttgcaactcgtattcgtacaaaagatttacatcaaattgcggagccaacagcgagaatgttaccgaacctattctcagcggaaatgtggggcggtgcaacgtttgatgttgcgtatcgtttcttaaaagaagatccatgggaacgattactagatcttcgtgaaaaaatgccgaacgttttattccaaatgttacttcgttcttcaaacgcagttggatacaaaaactatccagataatttaattcaaaaatttgtggaatgttctgctcaagcaggcattgatgtattccgtatttttgatagcttaaactgggtggaaggcatgagagttgcaattgacgctgtacgagacactggtaaaattgcagaagcaacaatgtgctacacaggggatatccatgatccactgcgtagtaaatatgatttaaattactataaaaatttagcaaaagagttagaagcatcaggagctcacattttaggtattaaagatatggcgggcttattaaaaccaaatgcagcatatgatttagtttctgcattaaaagagacagtgtcgattccgattcacctgcatacgcacgatacgagtggaaatggtatattaacgtatacgaaggcaattgaagcgggtgttgatatcgtcgatgtagcagtgagttctatggctggtcaaacgtcacaaccaagtgcgaacacgctatactatgcattaggtggaaacgaaagacaaccagatgttaatatagattctttagaaaaactatctcattattgggaagatgtacgcaaatactatgcaccgtttgaaagtggtatgaatgcgcctcatacagaggtatatatgcatgaaatgccgggtgggcagtatagtaatcttcagcaacaagcgaaggcggttggtttaggagatcgcttcgatgaagtgaaagtaatgtaccgccgtgtgaatgacatgtttggagatattgtaaaagtaacgccatcatcaaaagttgttggtgatatggcattatttatggttcaaaaccatctgacagaacaagatgttttagagcgtggacatgctatggacttcccaggatctgttgttgaaatgttctctggtgatttaggtcaaccgtacggtggtttcccgaaagaattacaaaagattattttaaaagggaaagagccattaacagtaagaccaggtgaattactagagccagtagatttcgaagcgttaaaagaagaattattccataaacttggacgcgaagtaacgatttttgatgtagttgcatatgctttatatccaaaagtatttatggattatgaaaaagttgctgagctttatggaaatgtatctgtacttgatacaccgacgttcttctatggtatgagactaggtgaagaaattgatgtagaaattgaacagggtaaaacattgatggttaaactagtatcaattggagaacctcagccggatggaaatcgtgtcctttacttggaatttaacggtcaaccacgtgaaattatcgtgaaagacgagagtgtaaaagcaacagttgcacaacgtgtgaaaggaaaccgtgagaatccaaatcatattagtgcaacgatgccaggaacggtaattaaagtagttgtaaaagaaggcgatgaagtgaaaaaaggcgattctatggcaattacagaagcgatgaaaatggaaacgacagttcaagcgccgttcaatggtaaagtgaagaaagtatatgttaacgatggtgatgcgattcaaacgggtgatttacttattgaattagatcactaa

SEQ ID NO: 96828 - protein, 1148 aa, Bacillus cereus ATCC 14579
MTKLQRIQKVLVANRGEIAIRVFRACSELGLKTVAIYSKEDSGSYHRYKADESYLVGEGKKPIDAYLDIEGIIEIAKSNHVDAIHPGYGFLSENIQFAKRCEEEGIIFIGPKSKHLDMFGDKVKARTQAQLAQIPVIPGSDGPVNSLEEVEKFAEKYDYPIIIKASLGGGGRGMRIVRTSEELGESYNRAKSEAKAAFGNDEVYVEKFVEKPKHIEVQILADEEGNVVHLYERDCSVQRRHQKVVEIAPSVSLSDDLRQRICDAAVKLTKNVNYLNAGTVEFLVKDDEFYFIEVNPRVQVEHTITEMITGVDIVQSQILIADGHSLHSKMVGVPKQEEVVVHGFAIQSRVTTEDPLNNFMPDTGKIMAYRSGGGFGVRLDTGNSFQGAVITPYYDSLLVKVTTWALTFEQAAAKMERNLKEFRIRGIKTNIPFLENVVKHKNFLSGEYDTSFIDASPELFLFPKRKDRGTKMLNYIGTVTVNGFPGVGKKEKPIFPDARIPCLKHSEPIQNGTKQILDERGADGLVKWVQDQKRVLLTDTTFRDAHQSLLATRIRTKDLHQIAEPTARMLPNLFSAEMWGGATFDVAYRFLKEDPWERLLDLREKMPNVLFQMLLRSSNAVGYKNYPDNLIQKFVECSAQAGIDVFRIFDSLNWVEGMRVAIDAVRDTGKIAEATMCYTGDIHDPLRSKYDLNYYKNLAKELEASGAHILGIKDMAGLLKPNAAYDLVSALKETVSIPIHLHTHDTSGNGILTYTKAIEAGVDIVDVAVSSMAGQTSQPSANTLYYALGGNERQPDVNIDSLEKLSHYWEDVRKYYAPFESGMNAPHTEVYMHEMPGGQYSNLQQQAKAVGLGDRFDEVKVMYRRVNDMFGDIVKVTPSSKVVGDMALFMVQNHLTEQDVLERGHAMDFPGSVVEMFSGDLGQPYGGFPKELQKIILKGKEPLTVRPGELLEPVDFEALKEELFHKLGREVTIFDVVAYALYPKVFMDYEKVAELYGNVSVLDTPTFFYGMRLGEEIDVEIEQGKTLMVKLVSIGEPQPDGNRVLYLEFNGQPREIIVKDESVKATVAQRVKGNRENPNHISATMPGTVIKVVVKEGDEVKKGDSMAITEAMKMETTVQAPFNGKVKKVYVNDGDAIQTGDLLIELDH

SEQ ID NO: 96829 - DNA, 3447 bp, Bacillus anthracis str. Ames
  CDS (1)..(3447): transl_table=11
atgacaaagctgcaacgtattcaaaaagtattggtagctaaccgtggagagattgcaattcgtgtgtttcgagcttgttcggaactgggattaaaaacagttgcaatctattccaaagaggatagtggttcttatcatcgttataaagccgatgagtcctatttagttggggaaggaaaaaagccaattgatgcttatctagatattgagggcattattgagattgcgaaaagtaatcatgtagatgcaatccaccctggatatggtttcttgtcagaaaatattcaattcgcaaaacgttgtgaagaagaaggaattatctttattggtccaaaaagtaagcatttagatatgtttggagataaagtgaaagcaagaacacaagcgcagctagcacaaattccagttattcctggtagtgatggaccggtagattcgttagaagaagttaaagaatttgctgaaaagtatgattacccgattataatcaaagcttcccttggcggtggcggtcgtggtatgcgtattgtacgtactagtgaagaattaagagaatcgtataatcgagcgaagtcagaagcaaaggcagcctttggtaatgatgaagtatacgttgaaaaattcgttgaaaaacctaaacatatagaagttcaaattttagcagatgaagagggcaatgttgttcatttatacgagcgagactgttctgtacaacgtcgtcaccaaaaagtagtagaaattgcacctagtgtgtcgctttcagatgatttgcgtcagcgtatttgtgaagctgctgtaaagttaacgaaaaatgtaaattatttaaacgcaggaacagttgaattccttgttaaagatgataatttctatttcattgaagtaaatccacgtgttcaagtagaacatacaattacagaaatgattacaggagttgacatcgttcaatcgcaaattttaatagctgatggacatgcattacatagtaaaatggtaggtgttccaaagcaagaggaagtggttgtgcacggttttgcaatccaatctcgtgtaacgactgaggacccactaaataatttcatgccggatacagggaaaattatggcataccgatcaggtggtggctttggggttcgtcttgatacaggtaatagtttccaaggtgcagtaattgcaccgtactatgattctttacttgtaaaagttacaacatgggcgcttacttttgaacaggctgctgcaaaaatggaacgtaacttaaaagaattccgtattcgtggtattaaaactaatattccatttctagagaatgtagtaaaacataaaaacttcttatcaggggaatatgacacttcatttattgatgcgtcacctgaactattcttgttcccgaaacgtaaagaccgcggaacgaaaatgttaaattacatcgggacagtaacagtaaatggtttcccaggagtagggaaaaaagagaaaccaattttcccggatgctcgtataccgaatgtattacactcagagccgatccaaaatggaacgaaacaaattttggatgagcgtggagcagacggattagtaaaatgggtacaagatcaaaaacgtgtccttttaacggatacaacgttccgtgatgcgcatcagtcattacttgcaacgcgtattcgtacaaaagatttacatcaaattgcagagccgacagcgagaatgctaccaaacttattctcagcggaaatgtggggcggtgcaacttttgatgttgcatatcgtttcttaaaagaagatccatgggaacgattactagatcttcgtgaaaaaatgccaaatgttttattccaaatgttacttcgttcttcaaacgcagttggctacaaaaactatccggataatttaattcaaaagtttgtggagtgttctgctcaagctggaattgatgtgttccgtatttttgatagcttaaactgggtggaaggtatgagagttgcgattgatgctgtacgagatactggtaaaattgcagaagcaacgatgtgctacacaggggatattcacgatccaatgcgtagtaaatacgatttgaattactataaaaacttagcaaaagaattagaagtatcaggagctcacattttaggtattaaagatatggcgggcttactaaaaccaaacgcagcatatgatttagtttcagcattaaaagagacggtatcgattccgattcacctgcacacacacgacacgagtggaaatggtattttaacgtatacgaaagcaattgaagcaggtgttgacattgtcgatgtagcagtaagttctatggctggtcaaacgtcacaaccaagtgcgaacacgctatactatgcgttaggcggaaacgaaagacagccagatgttaatatagattcattagaaaaactatctcattactgggaagatgtacgtaaatactacgcaccgtttgaaagtggtatgaacgctcctcatacagaggtatatatgcacgaaatgccaggcggacagtacagtaatttacaacaacaagcgaaagtggttggcttaggcgatcgcttcgatgaagtgaaagtaatgtatcgccgtgtgaatgatatgtttggtgatattgttaaagtaacgccatcatctaaagttgtcggtgatatggcattattcatggttcaaaatcacttaacagaacaagatgttttagagcgtggacattctatggacttcccaggatctgttgttgaaatgttctctggagacttaggacaaccatatggtggtttcccgaaaaagttacaagaaattattttaaaagggaaagaaccattaacagtaagaccgggtgaattattagagccagtagatttcgacgcgttaaaagaagagctattccataagcttggacgcgaagtgacgatgtttgatgtagttgcatatgcattatatccaaaagtatttatggattacgaaaaagttgctgagctttatggaaatgtatctgtgcttgatacaccgacattcttctatggtatgagacttggtgaagaaatcgatgtggaaattgaacaaggtaaaacattgatggttaaactagtatcaatcggagagcttcagccagatggaaatcgtgttctttatctggaatttaacggtcaaccacgtgagattgttgtgaaagacgaaagtgtgaaagcaacagttgcacaacgcgtgaaaggaaaccgtgaaaatccaaaccacattagcgcaacaatgccaggaacggttattaaagtagttgtaaaagaaggcgatgaagtgaaaaaaggcgattctatggcaattacagaagcgatgaaaatggaaacgacagttcaagcgccgttcaatggtaaagtgaaaaaagtatatgttaatgatggagatgcaattcaaacgggtgacttactcattgaattagatcactaa

SEQ ID NO: 96830 - protein, 1148 aa, Bacillus anthracis str. Ames
MTKLQRIQKVLVANRGEIAIRVFRACSELGLKTVAIYSKEDSGSYHRYKADESYLVGEGKKPIDAYLDIEGIIEIAKSNHVDAIHPGYGFLSENIQFAKRCEEEGIIFIGPKSKHLDMFGDKVKARTQAQLAQIPVIPGSDGPVDSLEEVKEFAEKYDYPIIIKASLGGGGRGMRIVRTSEELRESYNRAKSEAKAAFGNDEVYVEKFVEKPKHIEVQILADEEGNVVHLYERDCSVQRRHQKVVEIAPSVSLSDDLRQRICEAAVKLTKNVNYLNAGTVEFLVKDDNFYFIEVNPRVQVEHTITEMITGVDIVQSQILIADGHALHSKMVGVPKQEEVVVHGFAIQSRVTTEDPLNNFMPDTGKIMAYRSGGGFGVRLDTGNSFQGAVIAPYYDSLLVKVTTWALTFEQAAAKMERNLKEFRIRGIKTNIPFLENVVKHKNFLSGEYDTSFIDASPELFLFPKRKDRGTKMLNYIGTVTVNGFPGVGKKEKPIFPDARIPNVLHSEPIQNGTKQILDERGADGLVKWVQDQKRVLLTDTTFRDAHQSLLATRIRTKDLHQIAEPTARMLPNLFSAEMWGGATFDVAYRFLKEDPWERLLDLREKMPNVLFQMLLRSSNAVGYKNYPDNLIQKFVECSAQAGIDVFRIFDSLNWVEGMRVAIDAVRDTGKIAEATMCYTGDIHDPMRSKYDLNYYKNLAKELEVSGAHILGIKDMAGLLKPNAAYDLVSALKETVSIPIHLHTHDTSGNGILTYTKAIEAGVDIVDVAVSSMAGQTSQPSANTLYYALGGNERQPDVNIDSLEKLSHYWEDVRKYYAPFESGMNAPHTEVYMHEMPGGQYSNLQQQAKVVGLGDRFDEVKVMYRRVNDMFGDIVKVTPSSKVVGDMALFMVQNHLTEQDVLERGHSMDFPGSVVEMFSGDLGQPYGGFPKKLQEIILKGKEPLTVRPGELLEPVDFDALKEELFHKLGREVTMFDVVAYALYPKVFMDYEKVAELYGNVSVLDTPTFFYGMRLGEEIDVEIEQGKTLMVKLVSIGELQPDGNRVLYLEFNGQPREIVVKDESVKATVAQRVKGNRENPNHISATMPGTVIKVVVKEGDEVKKGDSMAITEAMKMETTVQAPFNGKVKKVYVNDGDAIQTGDLLIELDH

SEQ ID NO: 96831 - DNA, 3501 bp, Rhodopirellula baltica SH 1
  CDS (1)..(3501): transl_table=11
atggatgccctgatgaccgtcgctgatactgactccgccaatattcgcccgattcgaaaattgctggctgccaaccgcagcgaaatcgccacccgagtgtttcggtcagcacatgaattaggcattcgcacggtcgcaatctattctcacgaagaccgctacgcactgcaccgattcaaagccgacgaggcgtaccaaatcggaacgcccggcgagcccattcgttcttacctcaacatcgacgcgatcgtcgggttgtgtctcaagcatcacatcgatgcagtccacccgggttacggtttcttgtcggagaaccctgagttcgccaaagcgctcacggacgcgggcattttgtttgtcggtcccagcgaacaaagcttgcgagatttgggcgacaaaaccagcgcccgtcgcttggccgaaatcgcaggcgtgccagtactcggcggaaccgcacaagccgtctcgtcgctgaaagaagccaccgatgcggcggaaaaactcggctacccgatcatgctcaaagcggccaaaggcggtggcggtcgcggcatgcgagtcgtcatggaaccgagcgaattggccagctcactcgattccgctcagcgcgaagccaaaacagcattcggaagcgatgaagtgttcctggaacgttttgtccaacgagcccggcacttggaagtccaattgctcggcgaccgccatggcaacttggtccacttgtatgaacgcgactgcagcgttcaacgacggcaccagaaagttgtcgaacttgcccccgcaccgaacctttccaccgaaatgcgagacgcgatttgcgatgcggcgttgcgaatcggacgcgcggtcggcaaagaaagtggcggctacgagaacgcgggaacggttgagttcctgctcgacgtcgacaaagacgaattctacttcatcgaagtcaatccacgaatccaagtcgagcacaccgtgaccgaagaggtcactggcatcgacattgtccgcaaccaaatcctggtcgcgcaaggccatcctcttcacagcgaagaagtcggcctgccatcgcaggacgttatccgaaccatgggattcgcgatgcagtgccggatcacgacggaagatcccgccgccgagttccgtcccgactatggccgcatcagccactaccgaagtgcggcaggtttgggcgtccgtctcgatgcgggcacggcattcagcggagcggtcgtcaatcccttctacgattccatgttggtgaaggtcaccgcgagagctcccaccctggccgctgccgctcgccggatggatcggtgtctgcacgaatttcgaattcgcggcgtgaagacgaacattccgtttctgacgcggctggtcaatcatcccacattcttggccggcgaagccacgacgcgtttgatcgacacaaccccggaactgttccgtttgccacgccggcgtgaccgagccaccaagctgctgactttcttgggcgaaacgatcgtcaacggaaacccgcttgtcacgggacgcccgcctgccgtccgccgcgaaccggctcccgttcctgagatcccaaccgcagccaaacctcctcgcggaaccgccgacattttccgagaagaaggtgtcgatggtttggtgcgctggattcgtgatcagaaaggcctgctgctgaccgacacgaccatgcgcgacgcacatcaatcgctgttggccactcgagttcgcaccgatgacatgctccgcattgcgccggcttacgctcatctggctccgcaattgttctcgcttgagatgtggggaggggcgacgtttgacacatccatgcgattcctcaaggaatcaccgtggcaacgtttggctgacctgcgagaggcagttcccaacatcctgacgcaaatgttgctgcgtgccagcaacgcggttggctacaccaattatcccgacaacgtcgtgcgactgttcgttcgcgaagcggtccaagccggcatggacgtgttccgtgtcttcgacgcgttgaactgggaagagaacatgcgtgtcgcgatggatgccgtgatcgaagaaggcggcatctgcgaagcctcgatctgctacaccggcgatctgcaagacccacggcggaccaagtacgacttgaagtactacgtcgatctggcaaaaaaactgcaagccggtggcgctcacatgatcgcgatcaaggacatggctgggctgctcaaacccgccgcggcggtgaaactgctgcgtgccttgcgtgacgaagtcgacttgccaatccacctgcacacccatgacacggcgggcatccaagcgtccacattgatggccgccgccggggaaggcctgcagatcgcggacgcggcactcgcaccaatgtcaggtggaaccagccaagtgaacttgaacacgctggtcgaagcccttcgtttcaccgatcgtgaatctccactggacagcgagtcgctgactcagttggcgacctactggcaagccgctcgcgagttctacaagccgtttgaaagcgatgttctgccagccacgggtgacttgtacgatcacgagatgcctggtggccaatacaccaacttgtttcaacaggcccgtgctttgggtttggccgaccaatgggccggagtttgccgcgcttacgcggatgtgaaccgattgttcggcgacatcgtgaaggtgactcccaccagcaaagccgtcggcgacatggcgttgttcttggttgccaatgagatgtcagcggaagaggtcctgacaaccaacaaggctctcgcgtttcccgccagcgttttggacttgatcggcggtcgcatgggccaaccaccgggtggcttccccgagaaagtcatgcggaaaatcctcggtgaccaggctcctgtgctggaacgccctggtgcatcgatgccaccggcagacctgggggccgccaaagcgaaagcagcggaactcacccatgaagcccccagcgatcgcgatgcggtgacgtacttgctgtaccccaaggtgtttgaggagtactcgcagcatcgcaacacctacggcgatgtggcagccttgccgacgcccaactttttctatgggcaagaaccaggtgacgaaatcgcggtcgacatcgaacccggcaaacgactgatcgtcaaatacttggcggttgggcaaccgtatcccgatgggacgcggaccgtgttctttgaactcaatggacaacctcgagaagtgtccgtcatcgaccgatcattggaagtcgacatcaaagccgcggtgaaagccgatccgtcggatgccactcacgtcgccgcgtcgatgcccgggatggtgatcacggtggcggccgccgaaggcgaaaaggtgaaggccgggcaaaagctattggtgctggaagcgatgaaaatggaaaccaccatcaacgcacctgccgatggcgtcgtcaccaaaatccatacacctccggggacccaggttgaagcaggggatctgctggcggtggtggagtga

SEQ ID NO: 96832 - protein, 1166 aa, Rhodopirellula baltica SH 1
MDALMTVADTDSANIRPIRKLLAANRSEIATRVFRSAHELGIRTVAIYSHEDRYALHRFKADEAYQIGTPGEPIRSYLNIDAIVGLCLKHHIDAVHPGYGFLSENPEFAKALTDAGILFVGPSEQSLRDLGDKTSARRLAEIAGVPVLGGTAQAVSSLKEATDAAEKLGYPIMLKAAKGGGGRGMRVVMEPSELASSLDSAQREAKTAFGSDEVFLERFVQRARHLEVQLLGDRHGNLVHLYERDCSVQRRHQKVVELAPAPNLSTEMRDAICDAALRIGRAVGKESGGYENAGTVEFLLDVDKDEFYFIEVNPRIQVEHTVTEEVTGIDIVRNQILVAQGHPLHSEEVGLPSQDVIRTMGFAMQCRITTEDPAAEFRPDYGRISHYRSAAGLGVRLDAGTAFSGAVVNPFYDSMLVKVTARAPTLAAAARRMDRCLHEFRIRGVKTNIPFLTRLVNHPTFLAGEATTRLIDTTPELFRLPRRRDRATKLLTFLGETIVNGNPLVTGRPPAVRREPAPVPEIPTAAKPPRGTADIFREEGVDGLVRWIRDQKGLLLTDTTMRDAHQSLLATRVRTDDMLRIAPAYAHLAPQLFSLEMWGGATFDTSMRFLKESPWQRLADLREAVPNILTQMLLRASNAVGYTNYPDNVVRLFVREAVQAGMDVFRVFDALNWEENMRVAMDAVIEEGGICEASICYTGDLQDPRRTKYDLKYYVDLAKKLQAGGAHMIAIKDMAGLLKPAAAVKLLRALRDEVDLPIHLHTHDTAGIQASTLMAAAGEGLQIADAALAPMSGGTSQVNLNTLVEALRFTDRESPLDSESLTQLATYWQAAREFYKPFESDVLPATGDLYDHEMPGGQYTNLFQQARALGLADQWAGVCRAYADVNRLFGDIVKVTPTSKAVGDMALFLVANEMSAEEVLTTNKALAFPASVLDLIGGRMGQPPGGFPEKVMRKILGDQAPVLERPGASMPPADLGAAKAKAAELTHEAPSDRDAVTYLLYPKVFEEYSQHRNTYGDVAALPTPNFFYGQEPGDEIAVDIEPGKRLIVKYLAVGQPYPDGTRTVFFELNGQPREVSVIDRSLEVDIKAAVKADPSDATHVAASMPGMVITVAAAEGEKVKAGQKLLVLEAMKMETTINAPADGVVTKIHTPPGTQVEAGDLLAVVE

SEQ ID NO: 96833 - DNA, 3504 bp, Bordetella parapertussis 12822
  CDS (1)..(3504): transl_table=11
atgactaccgttatcaagagcatcctcgtcgcgaatcgcggcgaaatcgcgatccgggcgatgcgcgccgctgccgaactgggcatccgcaccgtcgccatctatgcgaacgaagaccgcttttccctgcaccgcttcaaggccgacgaaagctacccgatcggccaggggcggcggcccatcgaggcctacctggacattcccggcattctcgacatcgcccgccgggccggcgtcgacgcgatccaccccggctacggtttcctgtcggagaaccccgacttcgcccaggcctgcgacgacgccggcatcgccttcatcggccccagccccgcggtactgcgcagcctgggcaataaagtcgccgcgcgcaacctggccatcagcctgggcgtgcccgtggtccccgccaccgacgccctgccccacgacgacgccgcatgcctgcgcctggcgcgggaagtcggctatccgctgatgctcaaggccagctggggtggcggcggccgcgggatgcgcgccatccacgacgaggccgaactgctgcccgccatcgcctcggcgcggcgcgaagccggcgcggccttcggcaacgacgaggtgtacctggagaagctggtccagcgcgcccaccatgtcgaggtgcaggtgctgggcaaccagcacggcaacctggtgcatgtgttcgaacgcgattgctcggtgcagcggcgcaaccagaaagtcatcgaacgcgcgcccgccccctatctcggcgacgccgggcgccaggccttgttccaggccgcgctcaccctgacccggggggtcggatacacccatgccggcacggtcgagttcctgatggacgccgacaccgggaacttctatttcatcgaggtgaacccgcgcatccaggtcgaacacacggtcaccgaggaagtgaccggcctggacatcgtcaaggcccagatccgcgtgaccgagggcgtgcgcataggcgaagacgactatctgcccgcgcaggagcacatccgcctgtcgggccatgcgctgcaatgccgcatcacgaccgaggatccgcgcaaggacttcgcgcccgactacgggcgcatcaccgcctaccgcagcgccgcgggcccggggatacggctggacgccggcacggcctataccggcgcggtgatcacgccctactacgattcgctgctggtgaaagtgaccgcgcgcggccatacgcccgaggaaaccagccagcgcatggaccgtgcattgcgggaattccgcatccggggggtcgccaccaacctagcgttcctggagaaggtgatcgcgcacccccagttctcgcagggcaaatgcaccacgcgcttcctggacaccacgccggagctgttcgagatcgccccgcgcaaggatcgcgccagccgcctgctgcggttcatcggcgaggtggtggtcaacggccaccccgagatgcagggacgcacgccccccgccgcgccgctggcgcgcccggcgctgcccaaggcggatctcgccgcgcccctgccggccggcacccgcgaccggctgctcgaactcggccccgcggcgttctcggcgtggatgcggacgcagccgcgcacgctgctgaccgacacgaccatgcgcgacgcccatcaatcgctgttcgccacgcgcatgcgcacgacggacatgctggccatcgccccccactacgcccggctgctgcccgagctgttctcgctcgaatgctggggcggcgccaccttcgacgtggcgatgcggtttctcaaggaagacccgtgggaccgcctgcgcaagctgcgcgcggccgcgcccaacatcctgttccagatgctgctgcgcggctccaacgcggtcggctacaccaactacgccgacaacgtcgtgcgctacttcgtccagcaggcagcccgggaaggcatcgacctgttccgcgtcttcgactcgctcaactgggtcgagaacatgcgcgtggccatggacgccgtcatcgaaagcggcgcgctgtgcgagggcacgatctgctacaccagcgatatcttcgacgccagccgccccaagtaccagctgaagtactacgtggacatggcgcgccagctcgaacgggccggcgcccacatcatcggcatcaaggacatggccggcgtgtgccgcccgccggccgcccgcgcgctggtccaggcgctgcgcgaagaggtcggcctgccgctgcatttccacacccacgacaccagcggcggctcggtggccagcgtactggcggccgccgaggccggcgccgatgccgtcgacggcgccatggacgccatgagcgggctgacgtcgcagcccagcctgggcgtcatcatcgccggcctgcagcatactggccacgagaccggcatgcggcacgaaagcatcgcgccgttctcgcgctactgggagaatgtgcgccgctactacgcccccttcgaagccgacatgcgcagcggcacctcggacgtctaccgccacgagatgcccggcggccagtacaccaacctgcgcgaacaggcgcgcgccatggggttggacgcccggtgggacgacatcgcccggtgctacgcggacgccaaccagctgttcggcgacatcgtcaaggtcacgccgtcgtccaaggtggtcggcgacatggccttgttcatggtcgccggcggcatcacggccgccgatgtgctcgaccccgaacgcgagctgtccctgccggaatccgtggtgtcgatgatgcgcggcgagctgggctatcccgccgacggctttcccccggccctgcagcaacgcatcctgaagggcgaggcgccgctcgagggccgcgccggcgcccatatccccgacgtggacctggaggccgagcgcggccgggccgaaaaggccaccgacggtccggtcagcgacgccgacctggcgagctggctcatgtatcccaaggtctacgccgactatgccgcgcaccagcgcagctatggcgacgtctgcgccatccccacgcccgtcttcttctacggcctggccgagggcgaggagatggccgtcgatatcgaccagggcaagacgctgctgatacgcttgctgggccgggccgaagaaaagggcggcagcgagcaccgcctgttcttcgagctcaatggccagtcgcgttccgtgcgggtcgcgcgcgccggcctagcgggcgcgcaggaccaggcgcgccccaaggcgcaggacggcaatgccggacaattgggcgctcccatgcccggcatggtgtcggcggtctcggtccgggcggggcaggcggtgcggcgcggcgcgcccctggtgacgatcgaggccatgaaaatggagaacactctgtgcgccgagcgcgacggcgtggtgtcgcgcatcgtcgtcgcggtgggcgaccgtatcgaggcgaaagacctgctgctggagttcgcgccgcaagccgcccagcccgcggacgtcccgcgccagcgcccccgagccggcgcgtga

SEQ ID NO: 96834 - protein, 1167 aa, Bordetella parapertussis 12822
MTTVIKSILVANRGEIAIRAMRAAAELGIRTVAIYANEDRFSLHRFKADESYPIGQGRRPIEAYLDIPGILDIARRAGVDAIHPGYGFLSENPDFAQACDDAGIAFIGPSPAVLRSLGNKVAARNLAISLGVPVVPATDALPHDDAACLRLAREVGYPLMLKASWGGGGRGMRAIHDEAELLPAIASARREAGAAFGNDEVYLEKLVQRAHHVEVQVLGNQHGNLVHVFERDCSVQRRNQKVIERAPAPYLGDAGRQALFQAALTLTRGVGYTHAGTVEFLMDADTGNFYFIEVNPRIQVEHTVTEEVTGLDIVKAQIRVTEGVRIGEDDYLPAQEHIRLSGHALQCRITTEDPRKDFAPDYGRITAYRSAAGPGIRLDAGTAYTGAVITPYYDSLLVKVTARGHTPEETSQRMDRALREFRIRGVATNLAFLEKVIAHPQFSQGKCTTRFLDTTPELFEIAPRKDRASRLLRFIGEVVVNGHPEMQGRTPPAAPLARPALPKADLAAPLPAGTRDRLLELGPAAFSAWMRTQPRTLLTDTTMRDAHQSLFATRMRTTDMLAIAPHYARLLPELFSLECWGGATFDVAMRFLKEDPWDRLRKLRAAAPNILFQMLLRGSNAVGYTNYADNVVRYFVQQAAREGIDLFRVFDSLNWVENMRVAMDAVIESGALCEGTICYTSDIFDASRPKYQLKYYVDMARQLERAGAHIIGIKDMAGVCRPPAARALVQALREEVGLPLHFHTHDTSGGSVASVLAAAEAGADAVDGAMDAMSGLTSQPSLGVIIAGLQHTGHETGMRHESIAPFSRYWENVRRYYAPFEADMRSGTSDVYRHEMPGGQYTNLREQARAMGLDARWDDIARCYADANQLFGDIVKVTPSSKVVGDMALFMVAGGITAADVLDPERELSLPESVVSMMRGELGYPADGFPPALQQRILKGEAPLEGRAGAHIPDVDLEAERGRAEKATDGPVSDADLASWLMYPKVYADYAAHQRSYGDVCAIPTPVFFYGLAEGEEMAVDIDQGKTLLIRLLGRAEEKGGSEHRLFFELNGQSRSVRVARAGLAGAQDQARPKAQDGNAGQLGAPMPGMVSAVSVRAGQAVRRGAPLVTIEAMKMENTLCAERDGVVSRIVVAVGDRIEAKDLLLEFAPQAAQPADVPRQRPRAGA

SEQ ID NO: 96835 - DNA, 3504 bp, Bordetella bronchiseptica RB50
  CDS (1)..(3504): transl_table=11
atgactaccgctatcaagagcatcctcgtcgcgaatcgcggcgaaatcgcgatccgggcgatgcgcgccgctgccgaacttggcatccgcaccgtcgccatctatgcgaacgaagaccgcttttccctgcaccgcttcaaggccgacgaaagctacccgatcggccaggggcggcggcccatcgaggcctacctggacattcccggcattctcgacatcgcccgccgggccggcgtcgacgcgatccaccccggctacggtttcctgtcggagaaccccgacttcgcccaggcctgcgccgacgccggcatcgccttcatcggccccagccccgcggtactgcgcagcctgggcaataaagtcgccgcgcgcaacctggccatcagcctgggcgtgcccgtggtccccgccaccgacgccctgccccacgacgacgccgcatgcctgcgcctggcgcgggaagtcggctatccgctgatgctcaaggccagctggggcggcggcggccgcgggatgcgcgccatccacgacgaggccgaactgctgcccgccatcgcctcggcgcggcgcgaagccggcgcggccttcggcaacgacgaggtgtacctggagaagctggtccagcgcgcccaccatgtcgaggtgcaggtgctgggcgaccagcacggcaacctggtgcatgtgttcgagcgcgattgctcggtgcagcggcgcaaccagaaagtcatcgaacgcgcgcccgccccctatctcggcgacgccgggcgccaggccttgttccaggccgcgctcaccctgacccggggggtcggatacacccatgccggcacggtcgagttcctgatggacgccgacaccgggaacttctatttcatcgaggtgaacccgcgcatccaggtcgaacacacggtcaccgaggaagtgaccggcctggacatcgtcaaggcccagatccgcgtgaccgagggcgtgcgcataggcgaagacgactatctgcccgcgcaggagcacatccgcctgtcgggccatgcgctgcaatgccgcatcacgaccgaggatccgcgcaaggacttcgcgcccgactacgggcgcatcaccgcctaccgcagcgccgcgggcccggggatacggctggacgccggcacggcctataccggcgcggtgatcacgccctactacgattcgctgctggtgaaagtgaccgcgcgcggccatacgcccgaggaaaccagccagcgcatggaccgtgcattgcgggaattccgcatccggggggtcgccaccaacctggcgttcctggagaacgtgatcgcgcacccccagttctcgcagggcaaatgcaccacgcgcttcctggacaccacgccggagctgttcgagatcgccccgcgcaaggatcgcgccagccgcctgctgcggttcatcggcgaggtggtggtcaacggccaccccgagatgcagggacgcacgccccccgccgcgccgctggcgcgcccggcgctgcccaaggcggatctcgccgcgcccctgccggccggcacccgcgaccggctgctcgagctcggccccgcggcgttctcggcgtggatgcggacgcagccgcgcacgctgctgaccgacacgaccatgcgcgacgcccatcaatcgctgttcgccacgcgcatgcgcacgacggacatgctggccatcgccccccactacgcccggctgctgcccgagctgttctcgctcgaatgctggggcggcgccaccttcgacgtggcgatgcggtttctcaaggaagacccgtgggaccgcctgcgcaagctgcgcgcggccgcgcccaacatcctgttccagatgctgctgcgcggctccaacgcggtcggctacaccaactacgccgacaacgtcgtgcgctacttcgtccagcaggcagcccgggaaggcatcgacctgttccgcgtcttcgactcgctcaactgggtcgagaacatgcgcgtggccatggacgccgtcatcgaaagcggcgcgctgtgcgagggcacgatctgctacaccagcgatatcttcgacgccagccgccccaagtaccagctgaagtactacgtggacatggcgcgccagctcgaacgggccggcgcccacatcatcggcatcaaggacatggccggcgtgtgccgcccgccggccgcccgcgcgctggtccaggcgctgcgcgaagaggtcggcctgccgctgcatttccacacccacgacaccagcggcggctcggtggccagcgtactggcggccgccgaggccggcgccgatgccgtcgacggcgccatggacgccatgagcgggctgacgtcgcagcccagcctgggcgccatcatcgccggcctgcagcatactggccacgagaccggcatgcggcacgaaagcatcgcgccgttctcgcgctactgggaaaatgtgcgccgctactacgcccccttcgaagccgacatgcgcagcggcacctcggacgtctaccgccacgagatgcccggcggccagtacaccaacctgcgcgaacaggcgcgcgccatggggctggacgcccggtgggacgacatcgcccggtgctacgcggacgccaaccagctgttcggcgacatcgtcaaggtcacgccgtcgtccaaggtagtcggcgacatggccttgttcatggtcgccggcggcatcacggccgccgatgtgctcgaccccgaacgcgagctgtccctgccggaatccgtggtgtcgatgatgcgcggcgagctgggctatcccgccgacggctttcccccggccctgcagcaacgcatcctgaagggcgaggcgccgctcgagggccgcgccggcgcccatatccccgacgtggacctggaggccgagcgcggccgggccgaaaaggccaccgacggtccggtcagcgacgccgacctggcgagctggctcatgtatcccaaggtctacgccgactatgccgcgcaccagcgcagctatggcgacgtctgcgccatccccacgcccgtcttcttctacggcctggccgagggcgaggagatggccatcgatatcgaccagggcaagacgctgctgatacgcttgctgggccgggccgaagaaaagggcggcagcgagcaccgcctgttcttcgagctcaatggccagtcgcgttccgtgcgggtcgcgcgcgccggcctggcgggcgcgcaggaccaggcgcgccccaaggcgcaggacggcaatgccggacaattgggcgctcccatgcccggcatggtgtcggcggtctcggtccgggcggggcaggcggtgcggcgcggcgcgcccctggtgacgatcgaggccatgaaaatggagaacactctgtgcgccgagcgcgacggcgtggtgtcgcgcatcgtcgtcgcggtgggcgaccgtatcgaggcgaaagacctgctgctggagttcgcgccgcaagccgcccagcccgcggacgtcccgcgccagcgcccccgagccggcgcgtga

SEQ ID NO: 96836 - protein, 1167 aa, Bordetella bronchiseptica RB50
MTTAIKSILVANRGEIAIRAMRAAAELGIRTVAIYANEDRFSLHRFKADESYPIGQGRRPIEAYLDIPGILDIARRAGVDAIHPGYGFLSENPDFAQACADAGIAFIGPSPAVLRSLGNKVAARNLAISLGVPVVPATDALPHDDAACLRLAREVGYPLMLKASWGGGGRGMRAIHDEAELLPAIASARREAGAAFGNDEVYLEKLVQRAHHVEVQVLGDQHGNLVHVFERDCSVQRRNQKVIERAPAPYLGDAGRQALFQAALTLTRGVGYTHAGTVEFLMDADTGNFYFIEVNPRIQVEHTVTEEVTGLDIVKAQIRVTEGVRIGEDDYLPAQEHIRLSGHALQCRITTEDPRKDFAPDYGRITAYRSAAGPGIRLDAGTAYTGAVITPYYDSLLVKVTARGHTPEETSQRMDRALREFRIRGVATNLAFLENVIAHPQFSQGKCTTRFLDTTPELFEIAPRKDRASRLLRFIGEVVVNGHPEMQGRTPPAAPLARPALPKADLAAPLPAGTRDRLLELGPAAFSAWMRTQPRTLLTDTTMRDAHQSLFATRMRTTDMLAIAPHYARLLPELFSLECWGGATFDVAMRFLKEDPWDRLRKLRAAAPNILFQMLLRGSNAVGYTNYADNVVRYFVQQAAREGIDLFRVFDSLNWVENMRVAMDAVIESGALCEGTICYTSDIFDASRPKYQLKYYVDMARQLERAGAHIIGIKDMAGVCRPPAARALVQALREEVGLPLHFHTHDTSGGSVASVLAAAEAGADAVDGAMDAMSGLTSQPSLGAIIAGLQHTGHETGMRHESIAPFSRYWENVRRYYAPFEADMRSGTSDVYRHEMPGGQYTNLREQARAMGLDARWDDIARCYADANQLFGDIVKVTPSSKVVGDMALFMVAGGITAADVLDPERELSLPESVVSMMRGELGYPADGFPPALQQRILKGEAPLEGRAGAHIPDVDLEAERGRAEKATDGPVSDADLASWLMYPKVYADYAAHQRSYGDVCAIPTPVFFYGLAEGEEMAIDIDQGKTLLIRLLGRAEEKGGSEHRLFFELNGQSRSVRVARAGLAGAQDQARPKAQDGNAGQLGAPMPGMVSAVSVRAGQAVRRGAPLVTIEAMKMENTLCAERDGVVSRIVVAVGDRIEAKDLLLEFAPQAAQPADVPRQRPRAGA

SEQ ID NO: 96837 - DNA, 3426 bp, Corynebacterium diphtheriae NCTC 13129
  CDS (1)..(3426): transl_table=11
gtgtctcaacaatcatctgaacgtggaacctctacggtaaatccattgtcaaagatcctcgttgctaaccgtggcgagatcgccgtgcgagcttttcgtgcagcctttgaaaccggtgctgccacggtagctgtctacccgaacgaagaccgtaattcattccaccgatcgtttgcctctgaagctgtcctcattggtgagggcggatctgcggtcaaagcgtacctcgatatcgacgaaatcatccgtgctgctaaacaaacgggtgccgacgcaatttacccaggctacggcttcctttccgaaaacgcccagcttgctcgtgagtgcgctgaaaacggcataacctttatcggtccacctccatcagtgctggagcttaccggtgataaagcagctgctgttaccgcagcacgcgaggcaggtttgcccacgctgactgagacagaagcaacagacgatccaaagaagctcgcagagctgaccaaggggcagacctacccgctattcgtcaaagccgttgccggtggtggtggccgcggcatgcgttttgtcgacgcccccgaaaacctagaaaagctagcagcagaagcctcccgtgaggcggctgcagcattcggcgatggccgagtctacgccgagcgtgcagtaatcaatcctcagcatattgaggtccagatccttggtgactccgctggcaacatcatccacctgtacgagcgtgattgctcgctgcagcgtcgccaccaaaaggtcgtagagatcgccccagcacagcacttggcgcccggactacgcgaaaagatttgtgcagacgcagtcgcgtttgcacgccacatcggttaccaaggtgcaggcacggtcgagttcctagtcgatgaggaaggcaaccacgtcttcatcgagatgaaccctcgtatccaggtcgaacacaccgtgaccgaagaggtcacccaagtcgacttggtgaagtcccagatcatgatcgcctccggtgcgacactcgaagatctcggtctgcgccaagaagacatccacaccgaaggcgctgccctgcagtgccgtattactactgaagaccccaacaacggtttccgtcctgacaccggaacgattaccgcttatcgttccccaggtggcgcaggtgttcgtctcgacggtgctgccatgctcggtggtgagatcaccccgaatttcgactccatgctggtcaagatgacctgccgtggtgccgatttcgccaccgcagtcgctcgcgctcagcgtgcactcgcagaattcgttgtctcaggtgttgctaccaacatcggattcctgcgtgctttgctacgcgaagaagacttccagcacaagcgcatcgccactggcttcatcgcagatcacccatggctgctgcaggcaccacctgccgacgatgagcctggccgcattttgaactacctagctgatgtgactgtgaacaagcctcatggtctacgcccagccgtgatcaacccggtagaaaagctcccagcagagatcaaaggtgagctaccacgtggttcccgtgatcgcctgctccagctcggcccagagggatttgcgcgcgcactgcgtaaacaggatgcgctcgcggttacggataccaccttccgtgatgcacatcagtcgcttctcgcaacccgcgtgcgctccaacacgctgatcgacgcagcacggcacgtcgcaaagctcaccccagagctgctctctgtagaagcatggggtggtgctacctatgacgttgctatgcgcttcctacatgaggacccctgggagcgtctcgaccacctgcgtgaggccatgcccaacgtcaacattcagatgctgctgcgaggccgcaacacagtcggctacacaccgtacccagattctgtatgcaaggcttttgtcgacgaagccgcacgctctggtgttgatatcttccgcatcttcgacgcgcttaacgacgtctcccagatgcgtccagcaatcgacgcagtgctcgaaaccaacaccacgattgccgaagtcgcaatggcctactccggtgatctgaccaacccaagtgagaagctctacacactggattactaccttaagcttgccgaggaaatcgttaagtccggtgcacatgttctagccattaaagacatggctggactgatgaagccagccgcagcaaccaagctggtcaccgaactacgacgcaacttcgacctgccggttcatgttcacacccacgacactgctggtggccagctggctacgtattgggctgcagcagccgctggtgcagatgccgtcgatggtgcctccgcgccactgtcgggcacaacgtcgcagccatcgttgtctgcaattgtggcagcattcgctaacacctaccgcgatacgggtctctctctggacgcagtcggatcgatggaaccgtactgggaagcagtgcgcaaactctacgcacccttcgaatccggaaccccaggaccaactggccgcgtctaccagcacgaaatcccaggcggccagctgtccaatctgcgcgcacaggcaactgcactcggcttggcagatcgcttcgagctcatcgaggactactacgcagccgttaatgagatgctgggacgccccaccaaggtcaccccgtcctcaaaggtcgttggcgatcttgcactctacctagtcggcgcaggagttaacccagcggactttgcagcagatccccaaaagtacgatattcctgactccgtcattgccttcctccgtggtgagctcggcacccctccaggcggctggccagaagaactgcgtgctaaggcattggcaggacgtaaggaatcaaaggacacattggccccgctgccagcagaagatgaagctctgctcgcagatcgtgcgaccgttcgcccaacgctggatcgcctgctcttcccgaagcctgcggcagaattcgcagagcaccgccgtcagtttggcgataccaccaaactcggtgacgcagaattcctctatggcctcaaagaaggcaaagaaacggtcattcgtaccgcagacagtagcgtcccaatgctggtgcgtctcgatgccgtcggcgagcccgacgaaaagggcatgcgcaacgttgtgtgcaatgtcaacggccagattcgccccatcctcgtgcgtgatcgcagcgtagagtcagtgaccgcctcggtggaaaaggctgatccttccaacgccggacacgtagcagcaccattcgcaggcgttgtcacagtgacaatcgaggaaggcgctaccgtcaaagccggcgatccagttgctgtcattgaggcaatgaagatggaggcaacgatctctgccaccacagacggaaccgtcgaccgtatcgtcttgacgcaggccaccaaggtcgaaggtggagacttgctcctcgtgatcaagtag

SEQ ID NO: 96838 - protein, 1141 aa, Corynebacterium diphtheriae NCTC 13129
MSQQSSERGTSTVNPLSKILVANRGEIAVRAFRAAFETGAATVAVYPNEDRNSFHRSFASEAVLIGEGGSAVKAYLDIDEIIRAAKQTGADAIYPGYGFLSENAQLARECAENGITFIGPPPSVLELTGDKAAAVTAAREAGLPTLTETEATDDPKKLAELTKGQTYPLFVKAVAGGGGRGMRFVDAPENLEKLAAEASREAAAAFGDGRVYAERAVINPQHIEVQILGDSAGNIIHLYERDCSLQRRHQKVVEIAPAQHLAPGLREKICADAVAFARHIGYQGAGTVEFLVDEEGNHVFIEMNPRIQVEHTVTEEVTQVDLVKSQIMIASGATLEDLGLRQEDIHTEGAALQCRITTEDPNNGFRPDTGTITAYRSPGGAGVRLDGAAMLGGEITPNFDSMLVKMTCRGADFATAVARAQRALAEFVVSGVATNIGFLRALLREEDFQHKRIATGFIADHPWLLQAPPADDEPGRILNYLADVTVNKPHGLRPAVINPVEKLPAEIKGELPRGSRDRLLQLGPEGFARALRKQDALAVTDTTFRDAHQSLLATRVRSNTLIDAARHVAKLTPELLSVEAWGGATYDVAMRFLHEDPWERLDHLREAMPNVNIQMLLRGRNTVGYTPYPDSVCKAFVDEAARSGVDIFRIFDALNDVSQMRPAIDAVLETNTTIAEVAMAYSGDLTNPSEKLYTLDYYLKLAEEIVKSGAHVLAIKDMAGLMKPAAATKLVTELRRNFDLPVHVHTHDTAGGQLATYWAAAAAGADAVDGASAPLSGTTSQPSLSAIVAAFANTYRDTGLSLDAVGSMEPYWEAVRKLYAPFESGTPGPTGRVYQHEIPGGQLSNLRAQATALGLADRFELIEDYYAAVNEMLGRPTKVTPSSKVVGDLALYLVGAGVNPADFAADPQKYDIPDSVIAFLRGELGTPPGGWPEELRAKALAGRKESKDTLAPLPAEDEALLADRATVRPTLDRLLFPKPAAEFAEHRRQFGDTTKLGDAEFLYGLKEGKETVIRTADSSVPMLVRLDAVGEPDEKGMRNVVCNVNGQIRPILVRDRSVESVTASVEKADPSNAGHVAAPFAGVVTVTIEEGATVKAGDPVAVIEAMKMEATISATTDGTVDRIVLTQATKVEGGDLLLVIK

SEQ ID NO: 96839 - DNA, 3447 bp, Geobacter sulfurreducens PCA
  CDS (1)..(3447): transl_table=11
atggaaaagagaaagttcagaaaagtaatggccgccaaccgcggagagatcgcgatccgcatcttccgggcctgcactgagctggggatcagcacggtggccatctactcggaggaggacaagctgtccctccaccgctacaaggcggacgaggcctacctggtgggcaaggggaaagcccccatcgatgcctacctggggatcgacgaaatcatctccattgccaagcgggcggacgtggacgccattcacccgggctacggcttcctttcggagaatgccgagttcgccgaggcgtgcgagcgggccggcatcgccttcatcggtccccgggccgagatgcagcgggccctgggcgacaaggtctcggcccgcaaggtggccattgccgccgaggtgcccgtggttcccggaaccgaggagcccatcgagcacgaggaagaagcgctcatcttcgccaagcagcacggctatcccatcatcatcaaggcggctgccggcggcggcgggcggggcatgcgggttgcccgcaacaagaaagagctgctggaggggctggtggcggcccgcagcgaggccaaggccgccttcggcaacccggcggtcttcctggagcgctacctggagaatcccaagcacatcgaggtgcaggtgctgggggaccaccacggcaacctggtccacttctacgagcgcgactgctccatccagcgccgtcaccagaaggtggttgagttcgcgccgtcgctctccctgacccagaagctgcgggacgagatctgcaacgcggccctcaagatcgcgggtcaggtgggctacgtgaacgccggcaccgtggaattcctgctggaccaggaggggagctggtacttcatcgagatgaacccccgaatccaggtggagcacacggtcaccgagatgatcaccggcaggaacctggtgcaggcccagatcctcatcgccgaggggaagaagctctcggacccccccatcaacgtcccgaaccagtcggccatcgccatgcggggctacgccatccagtgccggatcaccaccgaggacccggccaacaactttgccccggatttcggcaccatcaccacctaccgctcctcggccggcttcggggtgcggctcgacgcgggcaacgccttcaccggttcggtcatcaccccccattacgactcgcttctggtgaaggtcacctcgtgggggctcaccttcgacgaggcggcccacatcatgaaccgctccctccaggagttccgggtccggggcgtgaagaccaatatcccgttcctggagaacgtggtcacccacccggtcttcctggccggtacctgcgatacgtcattcatcgagaagcaccccgagcttctggccattagcgagaagaaagaccgggccaccaaggtgctcaatttcctgggcgacgtcatcgtgaacggctcccccggcgttgccaagcccctcaagtcggcggagatgatcgaggcccgggtgcccgaggttgactatacggttccccggcccgccggctcccgcgacctgttcatgaagctcggcgccgaggggctctccaagtggatcctggagcagaaaaagctcctgatcaccgacaccaccatgcgggatgcccaccagtcgctcctggcgacccgggtccgcacctatgacctgctaaagatcgccgagcccacctcgtacctgggtgccgggctcttctcgctggagtgctggggcggcgccaccttcgacgtctccatgcgcttcctgaaggaggatccctggcagcggctccacaagctctcggaggcgatccccaacatcctcttccagatgctcctgcggggctccaacgccgtgggctacaccaactatcccgacaacgtggtgcagcgcttcgtggaggaggccgccgccagcggcgtcgacatcttccgggtcttcgattccctcaactggacccgggggatgaccgtggccatggaggcggtgcgcaagaccggcaagatctgcgaggcggccatctgctacaccggcgacatcaccgatcccaagcgggacaagtatccgctggaatactacgtggccatggccaaggaactggagcagatgggcgcccacatcctggccatcaaggacatggcggggctgctcaagcccatggccgcccacaagctggtgaaggccctcaaggagaacatcggcatcccggtccacctccatacccacgatacctcctccaacggcaacgccacgctgctcatggcctgccaggccggggtcgacatcgtggacgcggccctctcctccatctccggcctcacggcccagccgaacctgaacgcgctcctggccgccctcaaggggaccgagtgggacccggccctggacgacgaggggctccagcacctggccaactactgggagacggtgcgggactactacacccccttcgaatcggggctcaagagcggcactgccgaggtctaccaccacgagatccccggcggccagtactccaactacaagccccaggtggccggtctcggcctgctggaccggtgggaggagtgcaaggagatgtacttcaaggtcaacaggctctttggcgacatcgtcaaggtgaccccctcctccaaggtggtgggcgacatggccatgttcctggtgaaaaacaacctggacgtggacgacgtcttcaccaagggggacgagctcagcttccccgagtcggtagtggggatgttcaaggggatgctgggccagccctaccaggggtggcccgctgagctgcagaagatcatcctcaagggagaagagccgatcacctgccgccccggcgagctcctggagccggccgacttcgaagagaagcgcctggaggccgagaccaaggtggggcacgcggtgaacgacaaggatctcatgtcgtacctgctctaccctcatgtctaccccgagttcgacaagcaccgtcaggagtattcggacacctcggtcatcccgacccccatcttcttctacggcctggagccggggcaggagacctccatcgacatcgagccgggcaagaccctcatcatcaagctcaacgccgtcggcaaggtgcatccggacggtacccgccacatcttcttcgagcttaacggccaacagcggcaggtggtggtgcgcgaccaatcggtgcagaccgacgaggccgagcgggaaaaggccgacaaggggaacgccaagcatatcggcgcgcccatgcccggcaaggtcctgaagctcaatgtgaaggcgggcgacgtcgtgaaggcgggagacgtcctcatggttaccgaggccatgaagatggagaccaacatcaaggcgaaagaagacggcgccgttgccgaggtgaagttcaaggaaggcgacaaggtggaaaaagaagatctggtgatcgtgatggcatag

SEQ ID NO: 96840 - protein, 1148 aa, Geobacter sulfurreducens PCA
MEKRKFRKVMAANRGEIAIRIFRACTELGISTVAIYSEEDKLSLHRYKADEAYLVGKGKAPIDAYLGIDEIISIAKRADVDAIHPGYGFLSENAEFAEACERAGIAFIGPRAEMQRALGDKVSARKVAIAAEVPVVPGTEEPIEHEEEALIFAKQHGYPIIIKAAAGGGGRGMRVARNKKELLEGLVAARSEAKAAFGNPAVFLERYLENPKHIEVQVLGDHHGNLVHFYERDCSIQRRHQKVVEFAPSLSLTQKLRDEICNAALKIAGQVGYVNAGTVEFLLDQEGSWYFIEMNPRIQVEHTVTEMITGRNLVQAQILIAEGKKLSDPPINVPNQSAIAMRGYAIQCRITTEDPANNFAPDFGTITTYRSSAGFGVRLDAGNAFTGSVITPHYDSLLVKVTSWGLTFDEAAHIMNRSLQEFRVRGVKTNIPFLENVVTHPVFLAGTCDTSFIEKHPELLAISEKKDRATKVLNFLGDVIVNGSPGVAKPLKSAEMIEARVPEVDYTVPRPAGSRDLFMKLGAEGLSKWILEQKKLLITDTTMRDAHQSLLATRVRTYDLLKIAEPTSYLGAGLFSLECWGGATFDVSMRFLKEDPWQRLHKLSEAIPNILFQMLLRGSNAVGYTNYPDNVVQRFVEEAAASGVDIFRVFDSLNWTRGMTVAMEAVRKTGKICEAAICYTGDITDPKRDKYPLEYYVAMAKELEQMGAHILAIKDMAGLLKPMAAHKLVKALKENIGIPVHLHTHDTSSNGNATLLMACQAGVDIVDAALSSISGLTAQPNLNALLAALKGTEWDPALDDEGLQHLANYWETVRDYYTPFESGLKSGTAEVYHHEIPGGQYSNYKPQVAGLGLLDRWEECKEMYFKVNRLFGDIVKVTPSSKVVGDMAMFLVKNNLDVDDVFTKGDELSFPESVVGMFKGMLGQPYQGWPAELQKIILKGEEPITCRPGELLEPADFEEKRLEAETKVGHAVNDKDLMSYLLYPHVYPEFDKHRQEYSDTSVIPTPIFFYGLEPGQETSIDIEPGKTLIIKLNAVGKVHPDGTRHIFFELNGQQRQVVVRDQSVQTDEAEREKADKGNAKHIGAPMPGKVLKLNVKAGDVVKAGDVLMVTEAMKMETNIKAKEDGAVAEVKFKEGDKVEKEDLVIVMA

SEQ ID NO: 96841 - DNA, 3384 bp, Mycobacterium avium subsp. paratuberculosis K-10
  CDS (1)..(3384): transl_table=11
gtgttagcgaaagtcctggtcgccaaccgcggggagatcgcgatccgcgcgttccgcgcggcctacgagctggaaatggccaccgtggcggtgtatccctacgaggaccgcaattcggtgcaccggttgaaggccgacgagtcctaccagatcggtgaggaaggtcacccggtccgcgcctacctgtccgtcgacgagatcgtcgacacggcgctggcctgcggcgcggatgcgatctaccccggctacggcttcctgtcggagaaccccgatctggcggcggcgtgcgcggcggccggcatcacgttcgtcggccccagcgccgaggtgctcgagctcaccggcgacaagtcgcgggccatcgcggcggcgcgggccgcgggtcttccggtgctggcctcctcgccgccgtcgacctccgtgcaggagctgctgagcgccgccgagacgatgacgttcccgctgttcgtcaaggcggtcgccggcggcggcggccgcgggatgcgccgagtcaccgatccgggggcgctggccgaggcgatcgaggcggccagccgtgaggccgagtccgcgttcggggacgcctcggtgtttctcgaacaggcggtgatcaatccgcggcacatcgaggtccagatcctggccgacacgcacggcaacgtgatgcacctctacgagcgggactgcagcgtgcagcgccggcaccagaaggtgatcgagatcgccccggcgcccaacctggatccggcgctgcgcgaacgtatctgcgccgacgcggtggcgttcgcacgcagcatcggctacacctgcgcgggcacggtggagttcctgctcgacgaacgcggcaaccacgtgttcatcgagatgaacccgcgcatccaggtggagcacacggtgaccgaggagatcaccgacgtcgacctggtgtccgcgcagctgcgcatcgcctccggccagacgctggaagagattggcctgagccaggattcggtcatcccgcgcggcgcggccctgcagtgccggatcaccaccgaggaccccgccaacggtttccgcccggacaccggccgcatcaccgcctaccgcaccccgggcggcgcgggcatccggctggacggcggcaccacgctgggcgccgagatcagcgcgcacttcgattcgatgctgatcaagctgacctgccggggacgcgacttccccacggcggtgcgacgggcgcggcgcgcggtcgccgaattccgcatccgcggcgtatcgacgaatatcccgttcctgcaagcggttatggacgacctggattttcaggccgggcgcatcaccacctcgttcatcgaacaacggccgcagttgctcaccgcgcgcagttcggccgaccgcggcaccaagatcctcaactacctggccgacgtgaccgtcaacaagccgcacggcgagcgcccgtcggcggtgtacccgcatgacaagctgcccgacatcgacctggcggcgagcccgccggcgggctccaagcagcggttgaccgaactcggtccggagcgattcgcggcctggctgcgcgagtcgggcggcgtcggcgtcaccgacaccacgttccgcgacgcgcaccagtcgctgctggcgacccgggtccgcaccagcgggctgctcaaggtggcgccctacatcgcacggaccatgccgcagctgttgtcggtggagtgttggggcggggcgacttacgacgtggcgctgcggtttctcaaggaggacccgtgggagcggctggcggcgctgcgcgaggcgatgccgaacatctgccttcagatgctgctgcgtgggcgtaacaccgtggggtacacgccctatccggagacggtcacgacggccttcgtcgcggaggcgaccgacaccggcatcgacatcttccgcatcttcgacgcgttgaacaacgtcgactcgatgcgcccggccatcgccgcggtccgcgaaaccggaagcgccatagccgaagtggcgatgtcctacaccggcgacctgtccgatccggccgaaaagctgtacacgctggactattacctgaagctggccgaccagatcgtcgaagcgggcgcacacgtgctggcgatcaaggacatggccgggctgctgcgcgcaccggcggccgcgacgctggtgtcggcgctgaagtcgcggttcgacctgccggtgcacgtgcacacccatgacacgccgggcggacagctggcgacctacgtggcggcctggcaggccggggccgacgcggtcgacggcgccgccgcgccgctcgccggaaccaccagccagccggcactgtcgtcgatcgtggccgccgcggccaacacggagtatgacaccgggttgtccctgccggcggtgtgcgatctggagccgtactgggaggcgctgcgaaaggtatacgctcccttcgaatccgggcttccggcgccgaccgggcgggtgtatcaccacgagatcccgggcggccaattgtcgaatctgcgtcagcaggcgattgcgctgggactcggcgaccggttcgaggacatcgaaaacgcctacgccggcgccgacgcgattttgggacacctggtcaaggtcaccccgtccagcaaggtggtgggcgacctggcgctggccctggtgggtgcgggtgtgggcgcgcaggacttcgccgaagacccctcccgctacgacatcccggattcggtgatcggctttctgcgcggcgagctcggtgacccgccgggcggctggccggagccgttgcgcaccaaggccttacagggtcggggaccggccaagccggagcagccgctgacggccgaggacaaagcggcgttggccgccccgggtgcgcgacggcaggcggcgctgaaccggctgctgttcccgggaccgaccaaggagctcgaggagcaccgcgagcagtatggtgacacctcggggctgagcgccaaccagttcttctacggattgcggcagggcgacgaacaccgcgtcgaactcgagcgcggcgtggagttgctgatcggcctggaggccatctccgatcccgacgaacgcggcatgcgcactgtgatgtgcattctcaacgggcagctgcggccggtggtggtgcgcgaccgcagcatcgccatcgacgtgcccgccgcggagaaggccgaccgcgccaacccggaccacatcgccgccccgttcgccggggtggtgacggtcgccgccgaggtcggccggcaggtcgaggccggccagaccatcgcgacgatcgaggcgatgaagatggaagccgcggtcaccagcccgaagtcgggcaaggtggcgcgcatcgccgtgtcgcggaccgctcaagtcgagggcggcgacctcctgatggtgatcgactag

SEQ ID NO: 96842 - protein, 1127 aa, Mycobacterium avium subsp. paratuberculosis K-10
MLAKVLVANRGEIAIRAFRAAYELEMATVAVYPYEDRNSVHRLKADESYQIGEEGHPVRAYLSVDEIVDTALACGADAIYPGYGFLSENPDLAAACAAAGITFVGPSAEVLELTGDKSRAIAAARAAGLPVLASSPPSTSVQELLSAAETMTFPLFVKAVAGGGGRGMRRVTDPGALAEAIEAASREAESAFGDASVFLEQAVINPRHIEVQILADTHGNVMHLYERDCSVQRRHQKVIEIAPAPNLDPALRERICADAVAFARSIGYTCAGTVEFLLDERGNHVFIEMNPRIQVEHTVTEEITDVDLVSAQLRIASGQTLEEIGLSQDSVIPRGAALQCRITTEDPANGFRPDTGRITAYRTPGGAGIRLDGGTTLGAEISAHFDSMLIKLTCRGRDFPTAVRRARRAVAEFRIRGVSTNIPFLQAVMDDLDFQAGRITTSFIEQRPQLLTARSSADRGTKILNYLADVTVNKPHGERPSAVYPHDKLPDIDLAASPPAGSKQRLTELGPERFAAWLRESGGVGVTDTTFRDAHQSLLATRVRTSGLLKVAPYIARTMPQLLSVECWGGATYDVALRFLKEDPWERLAALREAMPNICLQMLLRGRNTVGYTPYPETVTTAFVAEATDTGIDIFRIFDALNNVDSMRPAIAAVRETGSAIAEVAMSYTGDLSDPAEKLYTLDYYLKLADQIVEAGAHVLAIKDMAGLLRAPAAATLVSALKSRFDLPVHVHTHDTPGGQLATYVAAWQAGADAVDGAAAPLAGTTSQPALSSIVAAAANTEYDTGLSLPAVCDLEPYWEALRKVYAPFESGLPAPTGRVYHHEIPGGQLSNLRQQAIALGLGDRFEDIENAYAGADAILGHLVKVTPSSKVVGDLALALVGAGVGAQDFAEDPSRYDIPDSVIGFLRGELGDPPGGWPEPLRTKALQGRGPAKPEQPLTAEDKAALAAPGARRQAALNRLLFPGPTKELEEHREQYGDTSGLSANQFFYGLRQGDEHRVELERGVELLIGLEAISDPDERGMRTVMCILNGQLRPVVVRDRSIAIDVPAAEKADRANPDHIAAPFAGVVTVAAEVGRQVEAGQTIATIEAMKMEAAVTSPKSGKVARIAVSRTAQVEGGDLLMVID

SEQ ID NO: 96843 - DNA, 3447 bp, Bacillus cereus ATCC 10987
  CDS (1)..(3447): transl_table=11
atgacaaagctgcaacgtattcaaaaagtattggtagctaaccgtggagagattgcaattcgtgtgtttcgagcttgttcggaactgggattaaaaacagttgcaatctattctaaagaggatagtggttcttatcatcgttataaagccgatgaatcctatttagttggggaaggaaaaaagccaattgatgcttatctagatattgagggcattattgagattgcgaaaagtaatcatgtagatgcaatccaccctggatatggtttcttgtcagaaaatattcaattcgcaaaacgttgtgaagaagaagggattatctttatcggtccaaaaagtaagcatttagatatgtttggagataaagtaaaagcaagaacacaagcgcagctagcacaaattccagttattcctggtagtgatgggccagtagattcattagaagaagtcgaagaatttgctgaaaagtatgattacccgattattattaaagcttcccttggcggtggcggtcgtggtatgcgtattgtacgtactagtgaagaattaagagaatcgtataatcgagcaaagtcagaagcgaaagcagcctttggcaatgatgaagtatacgtagaaaaattcgttgaaaaacctaaacatatagaagttcaaattttagcagatgaagagggcaatgttgttcatttatacgagcgagactgttctgtacaacgtcgtcatcaaaaagtagtagaaattgcacctagtgtgtcgctttcagatgatttgcgtcagcgtatttgtgatgctgctgtgaaattaacgaaaaatgtaaattatttaaacgcaggaacagttgaatttcttgtaaaagatgataatttctatttcattgaagtaaatccgcgtgttcaagtagaacatacaattacagaaatgattacaggagtcgatatcgttcaatcacaaattttaatagctgatggacatgcattacatagcaaattggtgggtgttccaaagcaagaggaagttgttgtacatggatttgcaatacaatctcgagtaacgactgaggatccactaaataatttcatgccggatacaggaaaaattatggcatatcgatcaggtggtggctttggagttcgtcttgatacaggtaatagtttccaaggtgctgttattacaccgtactatgattctttacttgtaaaagttacaacatgggcgcttacttttgaacaagctgctgcaaaaatggaacgtaacttaaaagaattccgtattcgtggtattaaaacgaatattccattcctagagaatgtagtaaaacataaaaacttcttatcaggggaatatgacacttcatttattgatgcgtcacctgaactattcttgttctcgaaacgtaaagaccgaggaacgaaaatgttaaattacatcgggacagtaacagtaaatggcttcccaggagtagggaaaaaagagaaaccaattttcccagatgctcgtataccgaatgtattacactcagagccaatccaaaatggaacgaaacaaattttggatgagcgtggagcagacggattagtaaaatgggtacaagatcaaaaacgtgtacttttaacggatacaacattccgtgatgcgcatcagtcattacttgcaacgcgtattcgtacaaaagatttacaccaaattgcagagccgacagcgagaatgttaccgaacttattctcagcagaaatgtggggcggtgcgacgtttgatgttgcatatcgtttcttaaaagaagatccgtgggaacgattactagatcttcgtgaaaaaatgccaaatgttttattccaaatgttacttcgttcttcaaacgcggttggttacaaaaactatccggataatttaattcaaaagtttgtggagtgttctgctcaagctggaattgatgtgttccgtatttttgatagcttaaactgggtagaaggtatgagagttgcgattgatgctgtacgagatactggtaaaattgcagaagcaactatgtgttacacaggggatattcatgatccgttacgtagtaaatatgatttaaattactataaaaatttagcaaaagaattagaagcatcaggagctcacattttaggtattaaagatatggcgggcttactaaaaccaaatgcagcatatgatttagtttcagcattaaaagagacggtatcgattccgattcacctgcacacacacgatacgagtggaaatggtatattaacgtatacgaaagcaattgaagcaggtgttgacattgtcgatgtagcagtaagttctatggctggtcaaacgtcacaaccaagtgcgaacacgctatactatgcgttaggtggaaacgaaagacagccagatgttaatatagattcattagaaaaattatctcattactgggaagatgtacgtaaatactacgcaccgtttgaaagtggtatgaatgctcctcatacagaggtatatatgcacgaaatgccaggcggacagtatagtaatttacaacaacaagcgaaagcggttggcttaggcgatcgtttcgatgaagtgaaagtaatgtaccgccgtgtgaatgacatgtttggtgatattgttaaagtaacgccatcatctaaagttgtcggtgatatggcattattcatggttcaaaatcacttaacagaacaagatgttttagagcgtggacattctatggacttcccaggatctgttgttgaaatgttctctggagatttaggacaaccatatggtggtttcccgaaaaagttacaagaaattattttaaaagggaaagaaccattaacagtaagaccaggtgaattattagaaccagtagatttcgacgcgttaaaagaagagctattccataaacttggacgcgaagtgacgatgtttgatgtagttgcatatgcattatatccaaaagtatttatggattacgaaaaagttgctgagatttatggaaatgtatctgtgcttgatacaccgacattcttctatggtatgagacttggtgaagaaatcgatgtggaaattgaacaaggtaaaacattgatggttaaactagtatcaattggagagcctcagccagatggaaatcgtgttctttacttggagtttaacggtcaaccacgtgagattgttgtgaaagacgaaagtgtgaaagcgacagttgcacaacgtgtgaaaggaaaccgtgaaaatccaaaccacattagcgcaacaatgccaggaacggttattaaagtagttgtaaaagaaggcgatgaagtgaaaaaaggcgattctatggcaattacagaagcgatgaaaatggaaacgacagttcaagcgccgtttaatggtaaagtgaaaaaagtatatgttaacgatggagatgcaattcaaacgggtgacttactcattgaattagatcactaa

SEQ ID NO: 96844 - protein, 1148 aa, Bacillus cereus ATCC 10987
MTKLQRIQKVLVANRGEIAIRVFRACSELGLKTVAIYSKEDSGSYHRYKADESYLVGEGKKPIDAYLDIEGIIEIAKSNHVDAIHPGYGFLSENIQFAKRCEEEGIIFIGPKSKHLDMFGDKVKARTQAQLAQIPVIPGSDGPVDSLEEVEEFAEKYDYPIIIKASLGGGGRGMRIVRTSEELRESYNRAKSEAKAAFGNDEVYVEKFVEKPKHIEVQILADEEGNVVHLYERDCSVQRRHQKVVEIAPSVSLSDDLRQRICDAAVKLTKNVNYLNAGTVEFLVKDDNFYFIEVNPRVQVEHTITEMITGVDIVQSQILIADGHALHSKLVGVPKQEEVVVHGFAIQSRVTTEDPLNNFMPDTGKIMAYRSGGGFGVRLDTGNSFQGAVITPYYDSLLVKVTTWALTFEQAAAKMERNLKEFRIRGIKTNIPFLENVVKHKNFLSGEYDTSFIDASPELFLFSKRKDRGTKMLNYIGTVTVNGFPGVGKKEKPIFPDARIPNVLHSEPIQNGTKQILDERGADGLVKWVQDQKRVLLTDTTFRDAHQSLLATRIRTKDLHQIAEPTARMLPNLFSAEMWGGATFDVAYRFLKEDPWERLLDLREKMPNVLFQMLLRSSNAVGYKNYPDNLIQKFVECSAQAGIDVFRIFDSLNWVEGMRVAIDAVRDTGKIAEATMCYTGDIHDPLRSKYDLNYYKNLAKELEASGAHILGIKDMAGLLKPNAAYDLVSALKETVSIPIHLHTHDTSGNGILTYTKAIEAGVDIVDVAVSSMAGQTSQPSANTLYYALGGNERQPDVNIDSLEKLSHYWEDVRKYYAPFESGMNAPHTEVYMHEMPGGQYSNLQQQAKAVGLGDRFDEVKVMYRRVNDMFGDIVKVTPSSKVVGDMALFMVQNHLTEQDVLERGHSMDFPGSVVEMFSGDLGQPYGGFPKKLQEIILKGKEPLTVRPGELLEPVDFDALKEELFHKLGREVTMFDVVAYALYPKVFMDYEKVAEIYGNVSVLDTPTFFYGMRLGEEIDVEIEQGKTLMVKLVSIGEPQPDGNRVLYLEFNGQPREIVVKDESVKATVAQRVKGNRENPNHISATMPGTVIKVVVKEGDEVKKGDSMAITEAMKMETTVQAPFNGKVKKVYVNDGDAIQTGDLLIELDH

SEQ ID NO: 96845 - DNA, 3591 bp, Nasonia vitripennis
  CDS (1)..(3591)
atgtattccgtacgcaaagctaacaaaatgttagcaaggcgtagagtaaccttgaggttgtggagtacttcaagtaggaatgtgaggacagaagttgagtacaaacctattcgcagcgttcttgtcgctaatcgaggtgaaatcgccattcgagttttccgagcatgtacggaattgggcatacgttcagtcgctgtttactcggagcaagacaaaatgcaaatgcatcgacaaaaggcggatgaaagttatatcgtcggtcgaggtttgccaccagttcaagcatatttaaacatacccgaaatcataagggtggccaaagaaaacaacgttgatgctattcatcctggctacggtttcctgtcagaaagggcagattttgcacagtctgttatcgatgccggcatacgctttattggacctaagccaagcgtcgtccagcaaatgggtgataaggttgcggcaaggaaggctgcaattgaatctggtgtgccaatcgttcccggtacagacggaccggtaaccacttctgatgaagccatggagttttgtacaaagtatggactgccagtaatattcaaagccgcttacggtggtggtggacgaggtatgagagttgttaagcaaatggaagaggttcgtgagatgtttgaccgggcttcttctgaagcaaaagcagcctttggcgacggcgctatgtttatagagaagtttattgaaaggccacgacacatcgaagtccaattgctcggggaccacgcgggcaacgttgtacatctttacgaacgtgattgttctgttcagcgtcgccatcaaaaagttgttgaaatagctccagcgccgacactcaatccaacagtacgcgacaaaatgaccgagcatgccattagattagctaaacacgttggctacggcaatgcaggtacggttgaatttctggttgacgaaacgggtaatttctacttcattgaggtgaacgctaggctacaagtcgagcatacagtcacggaagaaatcactggtatcgatttagtccagtcgcaaatccgcatcgcagagggtataactttacctgagcttggtatgacacaggataaaataaagccacaaggattcgccattcagtgtcgggtaactaccgaagatcctgctaaaagtttccaaccagacactggtagaatagaggtcttccgttcaggcgaaggtatgggtatacgtttggatggtgcatcagcctttgcaggtgccattatttcgccttattatgattcccttctggtcaaggtgatcgctcacgcaggtgatctacaatcatcttgcgcgaaaatgaatcgagctctccgtgaatttagagttcggggtgtcaaaacaaacattccatttctactcaacgtcctagaaaatcagaagtttttgaacggcaatgttgatacttactttattgatgaaaaccctcagctcttccagtttcaacctagtcaaaatcgtgctcaaaagctgctcaactacatcggtaccgttcttgttaacggtccaactacaccgcttgcaacttctctaaaacctgctgaaattcgaccctacgttcctcaaatagctatggactatgctaaactcgcagcggaagaagaatccgatccagagaaatcagatgtaataaatccgccaaaaggttttcgaaatattttaaaggagaagggaccagaggcatttgcgaaggcggtcaggcagcacaagggtttgctgtttatggatacgacttaccgcgatgcacaccagtcattactagcaactcgtgttcggtcacacgatctcttgctaatctcaccgttcgtcgctcacaaatttaacaacctctatgctttggaaaattggggcggcgccactttcgacgtagctcttcgttttctccacgagtgcccttgggaacggctagaggacatgagaaaaatcataccgaacatacctttccagatgttgcttcgcggtgccaacgccgtgggttacaccaactatcctgataacgttgtcttcaaattttgtgaacttgctgtgcaaacgggcatggatattttccgagtctttgactcgctgaattacttacccaatttgattctcggtatggatgcggctggaaaggctggtggcgttgttgaagcagcgatttcgtacacaggtgacatcagcgatccaagccgcaaaaagtacgatctcaaatactacgtgaatctagccgatgaattagttaaagctggaacgcacgtgctttcaatcaaggacatggctggactacttaagcctaaagctgcttcaatgctggtcgacgccattcggcaaaagcatcctgacgtaccgattcacattcatacacacgacacctcaggctctggggtcgcctcaatgcttgcctgcgctaaagctggtgcagatgtcgtcgacgtagcggtagatagtatgtccggcatgactagccagccatcaatgggagctttagtcgcttgcctccaaggctctcctcacgaaactggatttgacttgagggatgtatcagaatactcggcttactgggagcagaccagaacactttacgcacctttcgaatgcacaacgacaatgaagtctggaaacgccgacgtataccttaatgagattccaggaggacagtacacgaatcttcagttccaagcctactctctgggactcggtgaatttttcgaggacgtcaaaaaggcttacagggaggccaatcttcttttaggtgatattatcaaggtgactccgagctctaaagtagttggagacctggcccaattcatggtacaaaacaagctcaagccagcagacgtgctagaaaaagcagaggagctatcattccctaaatctgtagttgaatttctacagggtgctatcggcgaaccttatcaaggattccccgaacctttcagatcgaaggttttaaaggacatgccacgtattaacggaaggccaggcgaaagcttgcctccgttggactttgcggcccttaaagctcgtcttcaagaatctcatccacgcattactgataaagacgttatgtcagcagccctttatcctgaagtaactcaagactaccttacgttccacgatgcatttggaccagtggataaacttgatactaggatttttctgatcggtccaaaagttggtgaggaattcgaagtgactattgagaagggtaaaactttaggcatcaaaacactagcgatggctgaggatctaacaccgaacggggaacgagaagtatttttcgaaatgaatggacagttgcgatccgtcttcattaaagataaggaagctattaaggaattacacatccatccaaaagcatcgaagaatgacaagaaccaaatcggtgctcctatgcctggcaccgtgattgatattcgagtcaaagttggcgataccgtggagaagggcgcagctcttgttgttctttctgccatgaaaatggaaatggttgtccaagcaccgcgggcaggaaaaattaagagcttggatattaatcaaggaatgaagctcgaaggcgacgatcttctgatgaccatggaataa

SEQ ID NO: 96846 - protein, 1196 aa, Nasonia vitripennis
MYSVRKANKMLARRRVTLRLWSTSSRNVRTEVEYKPIRSVLVANRGEIAIRVFRACTELGIRSVAVYSEQDKMQMHRQKADESYIVGRGLPPVQAYLNIPEIIRVAKENNVDAIHPGYGFLSERADFAQSVIDAGIRFIGPKPSVVQQMGDKVAARKAAIESGVPIVPGTDGPVTTSDEAMEFCTKYGLPVIFKAAYGGGGRGMRVVKQMEEVREMFDRASSEAKAAFGDGAMFIEKFIERPRHIEVQLLGDHAGNVVHLYERDCSVQRRHQKVVEIAPAPTLNPTVRDKMTEHAIRLAKHVGYGNAGTVEFLVDETGNFYFIEVNARLQVEHTVTEEITGIDLVQSQIRIAEGITLPELGMTQDKIKPQGFAIQCRVTTEDPAKSFQPDTGRIEVFRSGEGMGIRLDGASAFAGAIISPYYDSLLVKVIAHAGDLQSSCAKMNRALREFRVRGVKTNIPFLLNVLENQKFLNGNVDTYFIDENPQLFQFQPSQNRAQKLLNYIGTVLVNGPTTPLATSLKPAEIRPYVPQIAMDYAKLAAEEESDPEKSDVINPPKGFRNILKEKGPEAFAKAVRQHKGLLFMDTTYRDAHQSLLATRVRSHDLLLISPFVAHKFNNLYALENWGGATFDVALRFLHECPWERLEDMRKIIPNIPFQMLLRGANAVGYTNYPDNVVFKFCELAVQTGMDIFRVFDSLNYLPNLILGMDAAGKAGGVVEAAISYTGDISDPSRKKYDLKYYVNLADELVKAGTHVLSIKDMAGLLKPKAASMLVDAIRQKHPDVPIHIHTHDTSGSGVASMLACAKAGADVVDVAVDSMSGMTSQPSMGALVACLQGSPHETGFDLRDVSEYSAYWEQTRTLYAPFECTTTMKSGNADVYLNEIPGGQYTNLQFQAYSLGLGEFFEDVKKAYREANLLLGDIIKVTPSSKVVGDLAQFMVQNKLKPADVLEKAEELSFPKSVVEFLQGAIGEPYQGFPEPFRSKVLKDMPRINGRPGESLPPLDFAALKARLQESHPRITDKDVMSAALYPEVTQDYLTFHDAFGPVDKLDTRIFLIGPKVGEEFEVTIEKGKTLGIKTLAMAEDLTPNGEREVFFEMNGQLRSVFIKDKEAIKELHIHPKASKNDKNQIGAPMPGTVIDIRVKVGDTVEKGAALVVLSAMKMEMVVQAPRAGKIKSLDINQGMKLEGDDLLMTME

SEQ ID NO: 96847 - DNA, 3543 bp, Anopheles gambiae str. PEST
  CDS (1)..(3543)
atgcagctattcagtgcccaaatcgctgttgcaggattacggcgaacaaatcgggctcgcctatggaccatccgtaaaaatggctttgcaagccaggtcgaatacaaacccatacgatccgtgctggttgcgaatcgaggagaaattgccattcgtgtctttcgtgcctgcacggaacttggaatccgatccgtggccgtttactccgaacaggacaagatgcatatgcaccgtcaaaaagcagatgagtcatacatggtaggaaaagggctggcccctgttgaagcatacctcagcattccggaaatcattcgagtgtgcaaggaaaatgatgttgatgccgttcatcctggatatggatttttgtctgaacggtctgactttgcgcaagctgtcatcgatgcaggattgcgtttcattggcccttcgccgaaagttgtgcaacagatgggagataaggtcgctgcacgcaaggctgccatcgaggctggtgtgcccattgtacccggtacagatggaccagtaaccaccaaagaggaggctgtcgagttctgtcgtaagcatggtttgcccgtcatttttaaggctgcgtacggtggtggcggccgtggcatgcgagtcgttcgcaaaatggatgaagttgaagataacttcatgcgtgccagttccgaagcaaaagcagcattcggaaatggtgctatgttcattgaaaagttcattgagcgtccgcggcacattgaggtgcaactgctgggtgacaaagcgggaaatgtcgttcatctgtacgagcgcgactgttccgtgcagcgacgccatcaaaaggtagttgaaattgcgccggcaccccgcctgccgattgaagtgcgggacaaaatgacggagtatgccgttcgtttggcgcggcacgtgggctatgaaaatgcgggcacggtcgagttcttgtgcgacgaatctggaaacttttacttcatcgaagttaatgctcgactacaagttgagcataccgttactgaggaaattactggcatcgatctggtgcagtcgcagatccgtgttgctgaaggtatgaccctgcccgaacttggctacacgcaagaaaatatcaaaccgcaaggatatgctattcagtgccgtgttacaacggaagatccggcgaacgatttccaaccaaacacaggccgtttggaggtattccgttccggcgaaggtatgggtattcgtttggacagcgcctcagcttacgctggtgccattatttctccgtactacgattcgctactggtcaaagtcatatcgcacgcctcggatctacaatcgtccgcggcaaaaatgaaccgagccctgcgtgagttccgtattcggggtgtcaaaaccaatataccattcctgcttaatgtgcttgagaatcaaaagttcctcaatggagtacttgacacctactttatcgatgagcatccgcagctgttccgattttccaaatcgaaaaaccgcgctcagaagctgctgaactatcttggcgaagttttggtaaatggaccgaccactccactcgcgacgaaactaaagcccgctgaagttcaaccgcacgttcctcaattgccattggttacagagccaccgcgtggtttcaaacaaattctgcaggaggaaggccctgaaggttttgcaaaggcggtacgaagccaaaagaagctgctactcatggataccacgttccgcgacgctcatcaatcgctactagccacacgtgtacgaacgcacgacctgctgaagatatcgccgtttgtggcgcacaaatttaacaacctatattcgctagaaaactggggaggtgctactttcgacgtcgcactacgtttcctgcacgaatgcccatgggaacggttggaggaaatgcgcaaacagattccaaacattcccttccagatgcttctacgcggtgcaaacgccgttggatacacgaactatcccgataatgtggtgtacaaattctgtgaactatcggtacaatgtggaatggatattttccgagtatttgactcgttgaactatctgccgaacttgatcctcggtatggaagcggccggtaatgctggcggtgtagtggaggctgctatctcgtacactggagatgtgagtgatccgaaaaaaaccaagtacgatcttaaatactacactaacctcgccgacgaattggtcaaagcagggactcatgtcctgtgcatcaaggatatggctggactgctaaaaccgcaagccgcacgcttactcattacagctattcgcgaaaaacacccagatgtaccaattcacattcacacacacgatacatcaggagcgggcgtagcttctatgctagcatgtgccgaggctggtgccgatgtcgttgatgtcgcggtcgactccatgtccggaatgacttcgcagccgagtatgggagcggttgtcgcatctcttcagggcaccagtctcgatactggcttaggattgccggatattagcgaatactctgcctactgggagcaaacgcgtacgctatatgcaccattcgaatgcaccaccacgatgaaatcgggcaatgccgatgtgtacatgaatgaaattcctggaggacagtacacgaatttgcaattccaggcttactcgcttggattgggggatttctttgaagacgtcaaaaaggcgtaccgtgaggccaacctgttattgggagacatcattaaagttactccctcttcgaaggtcgttggtgatttggcccaatttatggtacaaaaccacttaacggccgaccaggtgctggaacgagcggaggagctttctttcccgaaatcagtggtcgagttcctgcagggtgctattggcacaccacatggcggcttccccgaaccactacgatctcgcgtacttaaggatatgccacgcattgagggacgtcccggtgctcaactggctccacttgattttgatgcacttaagaaatcgctacaggaatctcatcccgacgtgcaagatcgtgatgtcatgtcggcagccctctaccctcaagttacaaacgatttccttaacttccgcgatacattcgggccggtagataaactaaatacacgcgtatttcttaccggacccaaggtaggtgaggagtttgaggcaaccatagagaagggaaaaacgcttggcttcaagacactagctatggccgaagatctaactgccaacggtgaacgagaagtgtttttcgaactgaacggtcagttgcgttcggtgctgattcgcgacaaggaggcagtcaaggagttgcacatccatccaaaggctaccaagggtaacaaaaacgaagttggtgccccaatgcccggatccgtgatcgaaatcaaggtaaaggttggagaccacgtcgagaaaggccagccgctgattgtgctgtcggcaatgaagatggaaatggtggtacagtcgccccgagctggcgttgtgaaaacactggatatcagcaacggcatgaaactcgaaggagaagacttgcttttgactcttgaataa

SEQ ID NO: 96848 - protein, 1180 aa, Anopheles gambiae str. PEST
MQLFSAQIAVAGLRRTNRARLWTIRKNGFASQVEYKPIRSVLVANRGEIAIRVFRACTELGIRSVAVYSEQDKMHMHRQKADESYMVGKGLAPVEAYLSIPEIIRVCKENDVDAVHPGYGFLSERSDFAQAVIDAGLRFIGPSPKVVQQMGDKVAARKAAIEAGVPIVPGTDGPVTTKEEAVEFCRKHGLPVIFKAAYGGGGRGMRVVRKMDEVEDNFMRASSEAKAAFGNGAMFIEKFIERPRHIEVQLLGDKAGNVVHLYERDCSVQRRHQKVVEIAPAPRLPIEVRDKMTEYAVRLARHVGYENAGTVEFLCDESGNFYFIEVNARLQVEHTVTEEITGIDLVQSQIRVAEGMTLPELGYTQENIKPQGYAIQCRVTTEDPANDFQPNTGRLEVFRSGEGMGIRLDSASAYAGAIISPYYDSLLVKVISHASDLQSSAAKMNRALREFRIRGVKTNIPFLLNVLENQKFLNGVLDTYFIDEHPQLFRFSKSKNRAQKLLNYLGEVLVNGPTTPLATKLKPAEVQPHVPQLPLVTEPPRGFKQILQEEGPEGFAKAVRSQKKLLLMDTTFRDAHQSLLATRVRTHDLLKISPFVAHKFNNLYSLENWGGATFDVALRFLHECPWERLEEMRKQIPNIPFQMLLRGANAVGYTNYPDNVVYKFCELSVQCGMDIFRVFDSLNYLPNLILGMEAAGNAGGVVEAAISYTGDVSDPKKTKYDLKYYTNLADELVKAGTHVLCIKDMAGLLKPQAARLLITAIREKHPDVPIHIHTHDTSGAGVASMLACAEAGADVVDVAVDSMSGMTSQPSMGAVVASLQGTSLDTGLGLPDISEYSAYWEQTRTLYAPFECTTTMKSGNADVYMNEIPGGQYTNLQFQAYSLGLGDFFEDVKKAYREANLLLGDIIKVTPSSKVVGDLAQFMVQNHLTADQVLERAEELSFPKSVVEFLQGAIGTPHGGFPEPLRSRVLKDMPRIEGRPGAQLAPLDFDALKKSLQESHPDVQDRDVMSAALYPQVTNDFLNFRDTFGPVDKLNTRVFLTGPKVGEEFEATIEKGKTLGFKTLAMAEDLTANGEREVFFELNGQLRSVLIRDKEAVKELHIHPKATKGNKNEVGAPMPGSVIEIKVKVGDHVEKGQPLIVLSAMKMEMVVQSPRAGVVKTLDISNGMKLEGEDLLLTLE

SEQ ID NO: 96849 - DNA, 3387 bp, Magnaporthe grisea 70-15
  CDS (1)..(3387)
atgtcgaccgacgctccgccgatcagggccaattccaccatcatgcaactgaagaagatactcgtcgcgaaccgtggcgagatccctatccgcatcttcaggacagcccacgagttgtcattgcacactattgcagccgacgaggcttacatgatcggcaagcggggccagtacactccagttggagcatatctggctggcgacgaaatcatcaagatcgccctggaacacggcgcgcagatgattcaccctggttacggattcctctctgaaaacgcagagttcgccaagaaggtcgaggacagtggcctcatcttcgtcggtccctcgcccgacgtcatccaggcccttggtgacaaggtttccgccaggaagctcgccattgctgccaacgtgcccgtcgttcccggcacagagggtgctgttgagaagtacgaggaggtcaagaagtttaccgacgagtatggcttccccatcatcatcaaggctgcctacggcggtggtggtcgtggtatgcgagtcgtccgcgaccaagagtcgctcaaggagtcttttgagcgcgccacatccgaggccaagtctgccttcggaaacggcaccgtctttgtcgagaggttccttgacaagcccaagcacatcgaggttcagctgctgggtgacaaccagggcaacattgtccacctctacgagcgtgactgctcggtccagcgcaggcaccagaaggttgtggagattgctccggcaaaggacctcccaccggagacgcgtgacgccatcctcaaggatgctgtcaggttggcgcagagcgtcaactacaggaacgccggaaccgccgagttccttgtggaccagcagaaccgctactacttcatcgagatcaacccccgaatccaggtcgagcacaccatcaccgaggagatcaccggcatcgacattgttgccgcccagattcagattgccgctggtgctacgctgcagcagttgggtctgacccaggaccgcatctcaacaaggggttttgctatccagtgccgtattaccacagaagacccacaaaacgcttttgcccctgacaccggcaagatcgaggtctacaggtccgcaggcggaaacggagtcaggctcgacggtggaaacggatttgcgggtctgcgtgccctggtagagttcaggatcaggggtgtcaagacaaacatccccttcttgatgtcactgctcacgcaccctacattcatcgatggcgcgtgctggaccaccttcatcgacaacacccccgagctcttcaccatgatgggcagccagaaccgtgcccagaagctgctcgcctaccttggcgatatggccgtcaacggaagcagcatcaagggccaggtcggcgagcccaagttcaagggtgacatcatccacccagagctcttcgacgccgccggcaacaagatcgacacctccaagccttgcaccaagggctggaggcagatccttgtggagcagggccccaaggcttttgctcaggctgtcaggaagaacaagggctgtcttcttatggacaccacctggagagatgctcaccagtctctgttggctactcgtgtgcgaacaatcgaccttctcaacattgccaacgagaccagccatgccctgtccaacctttacagtcttgagtgctggggaggtgcaacattcgatgtggcataccgcttcttgaacgaggacccctggttgcgtctgcgacgaatgcgccaggctgttcccaacatccccttccaaatgcttctgagaggtgccaacggtgtcgcatactcatcactgcccgacaacgccatcgaccacttctgcgagcaggccaagaagaacggtgtggacatcttccgtgtgttcgatgccctgaacgacatcacgcagctcgaggtcggtatcaaggccgtccacaaggcaggcggtgtcgtcgagggtactgtctgctacagcggtgacatgttgaaccccaagaagaagtacaacctcgagtactacatggacctggtcgacaagctggtggctctcgacatccacgtcctcggtgtcaaggacatggctggtgtgctcaagccgcacgcggccaagctgctcatcggcagcatccgcaagaagtaccccgacctccccatccacgtccacacccacgactctgctgccactggtgttgcatccatggttgcctgcgccgaggctggcgccgatgccgttgatgcggctacggacagcctgtcgggtatgacctcgcagccaagcatcaacgccatcatggcatcccttgagggtagcgacctggacacgggtctggatgctcgccaggtccgctcattggacacctactggcagcagctccgcctcctctactcgccattcgaggctcacctcacgggccccgaccccgaggtttacgagcacgagatccccggtggacagctcaccaacatgatgttccaagcctcccaactcggtcttggttcgcagtggctcgagaccaagaaggcctacgagcacgccaacgacctcctgggagacattgtcaaggtcacacccacctccaaggtggttggcgatctcgcgcagttcatggtgtcgaacaagctcggccccgaggacgtcaagaagcgcgccgccgagctcgacttccccggctcggtgctcgagttctttgagggtctcatgggccagccgtacggcggattccccgagcccctgcgcacggatgccctccgcggcaggcgcaagatggagaagcgccccggtctgtacctggagccgatcgacttccccaaggtcaagaaggagctcgccaagaagtacggccccggcctgaccgagtgcgacattgcctcccacatcatgtaccccaaggtctacgaggactaccgcagctttgtcgataagtacggcgacctgtcggtcctcccgacccggtacttcctcagcaagcccgagatcggcgaggagttccacgtcgagctggagaagggcaaggtcctcatcctcaagctcctggccgtgggtccgctttccgacgccaccggccagcgtgaggtgttttacgagatgaacggtgaggtcaggcaggtcaccgttgacgacaagcaggcgtcggtcgagaacgtgtcgaggccaaaggccgacccctcggactcgagccaggtcggtgctccgatgtctggtgtccttgtcgagctcagggtgcacgagggtaccgaggtcaagaagggtgaccctattgctgttctcagcgccatgaagatggaaatggttatctcggcaccccacgctggtgttgtgtcgaacctggtcgttcacgagggcgactcagttggcggatcggacttggtctgcaagatttcaaagaagggttga

SEQ ID NO: 96850 - protein, 1128 aa, Magnaporthe grisea 70-15
MSTDAPPIRANSTIMQLKKILVANRGEIPIRIFRTAHELSLHTIAADEAYMIGKRGQYTPVGAYLAGDEIIKIALEHGAQMIHPGYGFLSENAEFAKKVEDSGLIFVGPSPDVIQALGDKVSARKLAIAANVPVVPGTEGAVEKYEEVKKFTDEYGFPIIIKAAYGGGGRGMRVVRDQESLKESFERATSEAKSAFGNGTVFVERFLDKPKHIEVQLLGDNQGNIVHLYERDCSVQRRHQKVVEIAPAKDLPPETRDAILKDAVRLAQSVNYRNAGTAEFLVDQQNRYYFIEINPRIQVEHTITEEITGIDIVAAQIQIAAGATLQQLGLTQDRISTRGFAIQCRITTEDPQNAFAPDTGKIEVYRSAGGNGVRLDGGNGFAGLRALVEFRIRGVKTNIPFLMSLLTHPTFIDGACWTTFIDNTPELFTMMGSQNRAQKLLAYLGDMAVNGSSIKGQVGEPKFKGDIIHPELFDAAGNKIDTSKPCTKGWRQILVEQGPKAFAQAVRKNKGCLLMDTTWRDAHQSLLATRVRTIDLLNIANETSHALSNLYSLECWGGATFDVAYRFLNEDPWLRLRRMRQAVPNIPFQMLLRGANGVAYSSLPDNAIDHFCEQAKKNGVDIFRVFDALNDITQLEVGIKAVHKAGGVVEGTVCYSGDMLNPKKKYNLEYYMDLVDKLVALDIHVLGVKDMAGVLKPHAAKLLIGSIRKKYPDLPIHVHTHDSAATGVASMVACAEAGADAVDAATDSLSGMTSQPSINAIMASLEGSDLDTGLDARQVRSLDTYWQQLRLLYSPFEAHLTGPDPEVYEHEIPGGQLTNMMFQASQLGLGSQWLETKKAYEHANDLLGDIVKVTPTSKVVGDLAQFMVSNKLGPEDVKKRAAELDFPGSVLEFFEGLMGQPYGGFPEPLRTDALRGRRKMEKRPGLYLEPIDFPKVKKELAKKYGPGLTECDIASHIMYPKVYEDYRSFVDKYGDLSVLPTRYFLSKPEIGEEFHVELEKGKVLILKLLAVGPLSDATGQREVFYEMNGEVRQVTVDDKQASVENVSRPKADPSDSSQVGAPMSGVLVELRVHEGTEVKKGDPIAVLSAMKMEMVISAPHAGVVSNLVVHEGDSVGGSDLVCKISKKG

SEQ ID NO: 96851 - DNA, 3543 bp, Candida glabrata CBS 138; identical to SEQ ID NO: 9684
  CDS (1)..(3543)

SEQ ID NO: 96852 - protein, 1180 aa, Candida glabrata CBS 138; identical to SEQ ID NO: 9685

SEQ ID NO: 96853 - DNA, 3528 bp, Candida glabrata CBS 138; identical to SEQ ID NO: 9686
  CDS (1)..(3528)

SEQ ID NO: 96854 - protein, 1175 aa, Candida glabrata CBS 138; identical to SEQ ID NO: 9687

SEQ ID NO: 96855 - DNA, 3522 bp, Kluyveromyces lactis NRRL Y-1140; identical to SEQ ID NO: 9688
  CDS (1)..(3522)

SEQ ID NO: 96856 - protein, 1173 aa, Kluyveromyces lactis NRRL Y-1140; identical to SEQ ID NO: 9689

SEQ ID NO: 96857 - DNA, 3522 bp, Debaryomyces hansenii CBS767; identical to SEQ ID NO: 9690
  CDS (1)..(3522)

SEQ ID NO: 96858 - protein, 1173 aa, Debaryomyces hansenii CBS767; identical to SEQ ID NO: 9691

SEQ ID NO: 96859 - DNA, 3576 bp, Yarrowia lipolytica CLIB122; identical to SEQ ID NO: 9694
  CDS (1)..(3576)

SEQ ID NO: 96860 - protein, 1191 aa, Yarrowia lipolytica CLIB122; identical to SEQ ID NO: 9695

SEQ ID NO: 96861 - DNA, 3591 bp, Aspergillus nidulans FGSC A4; identical to SEQ ID NO: 9696
  CDS (1)..(3591)

SEQ ID NO: 96862 - protein, 1196 aa, Aspergillus nidulans FGSC A4; identical to SEQ ID NO: 9697

SEQ ID NO: 96863 - DNA, 3627 bp, Ustilago maydis 521; identical to SEQ ID NO: 9700
  CDS (1)..(3627)

SEQ ID NO: 96864 - protein, 1208 aa, Ustilago maydis 521; identical to SEQ ID NO: 9701

SEQ ID NO: 96865 - DNA, 3441 bp, Listeria monocytogenes str. 4b F2365
  CDS (1)..(3441): transl_table=11
atgaatcgaattaaaaaagtattagtagcaaaccgcggagaaattgctatccgtgttatgcgtgcgtgtactgaactcaaaatcaaaacagtggctatttattcacaagaagataccggaagttttcaccggtataaatcagatgaagcttatctggttggagcagggaaaaagcctattgatgcgtatctagatatcgaaaacataatagagattgctaaagaatctggtgcagacgcgattcatccgggatatggtttcttgtccgaaaacattgaatttgctcgtcgttgtgagcaagaaggcattattttcgttggtcctaaatcaaaacacctagatatgtttggtgataaaatcaaagcaaaagaacaagctctattagctgatattccagtaattccgggaagtaatggacccgtggctggtattaaagaagtagaagaatttggtgagaaaaacggttacccattaatgattaaagcttctcttggaggcggcggtcgtggtatgcgtgtcgtagaatcaaaagaacatgtcaaagaaagctttgaacgtgcatcctcagaagcaaaagcggcatttgggaacgatgaagtatacgtagaaaaatgcgtgatgaatccgaaacatatcgaagtacaaattcttggtgacacccatggcaacatcgttcatttatttgaacgtgattgttctatccaacgtcgtcatcaaaaagtagtagaggtagcgccatgtaatgcgattacttctgaactacgtaaccgtatctgtgatgctgcagtaaaattaatgaaaaatgttgattacattaatgctggaacagttgaatttttagtggaaggcgatgatttctactttatcgaagtaaatcctcgtgtccaagtggagcatacaattactgaaatgattacagggattgatattgttcaatcacaactattcattgcagatggttacgcgcttcacgaccaactagtagctattcctaagcaagaggatatccatattcacggttctgctattcaaagccgtattacaacggaagatccacttaataactttatgccagatactggtcgagtagatacgtatcgctctacaggtgggtttggagttcggttggatgctggtaacggcttccaaggaacagtagtaacaccattttatgattccttacttgtaaaattatgtacttggggaatgacattcgaacaagcaacgcgcaaaatgcgtcgtaacttaattgaattccgtatccgtggtgtcaaaacgaacattcctttcttattaaatgttgttcgtcatccggattttgcaagtggtaattataatacaagctttattgatacaacaccggaactatttaaattcccacatattcgcgaccgtggtacaaaaacgttgcgttatattggtaatgtaacggttaatggtttcccaggaattaagcaccgtgataaacctgtatatgcagaaccacgcttgccaaaaattccgtatggttcgcaaatctctccaggtacaaaacaaattttggatgcaaaaggtccagaaggcgttgtagactgggtgaaaaaacaagaagaagtgctcttaacagacactacacttcgggatgcgcaccaatctttacttgcaacacgtgttcgctcgaaagacattttccaaatagcagatgcgatggctcatttattaccaaacatgttttcctttgaaatgtggggtggcgcgacttttgacgtggcatatcgtttcctaaatgaagatccttgggtgcgcctagagacacttagaaaacaaattccaaacgtgatgttccaaatgttacttcgcggagctaatgcagttgggtataaaaactatcctgacaatgttatccgtgaattcgttaagcaatcagcacaatccggtgtggatgtattccgcgtgtttgacagcttaaactggatcaaaggcatggaagtgtccattgatgctgttcgtgaagcagggaagatcgtagaggctgctatctgctatacaggagatatcgatgatgacacaagaacgaaatataccatagattactataaagatatggcgaaagagctcgttgctcaaggcacgcatatcctaggaatcaaagatatggctgggcttttaaaaccacaagcggcataccgtttgattggcgaattaaaagatacagtagatgttccaatccaccttcacacgcatgacacaagcggcaacggtatttatacttacgcagcagctgtcagtgctggcgttgacattgtggacgtggcatcaagcgcaatgagtggggctacaagccaaccaagtatgactggtctttattacggattagtgaatggtaatcgtcaaacgaatttagacgctcaaaattcccaaatcattaatcattactgggaagatgttcgtcactattacaaagactttgacaatgcacttaattcacctcaaacagaagtatacattcatgaaatgccaggtggtcaatatactaaccttcaacaacaagccattgcagttggacttggcgatcgttgggacgaagtgaaagaaatgtatacagtggttaatcaaatgtttggtgatatcgttaaagtaacaccttcttccaaagttgttggagacttagcactatttatggttcaaaatgaattatccgaagaagatgtatacgaaaaaggcgataccattgatttcccagattccgttatcgaattctttatgggggaaattggtcaaccatacggcggcttcccagaaaaacttcaaaaactagtactcaaaggacgtacaccacttacagatcgtccaggcgctttaatggaaccagttaactttgttgaagtcaaagcagaattaaaagaaaaaatgggttatgaaccaactgaaaaagatgtcatttcctatattttgtatccaaaagtgttcttagattatcaagaaatgattaataaatatggtgatgtaacagtccttgatacaccaacattctataaaggaatgcgtttaggggaaacaatcgaagtagaacttgaaaaaggaaaaatccttttaatcaagctaaattctattggtgaaccaattgcggatggcacacgtgttatctattttgaattaaatggacaaccacgtgagattaacatccaagatatgaacgttcaatccactgttattgcacgccgtaagattgatacaactaaccctgaacatgttggagctacaatgacaggttcagtcattcaagtagttgttaaaaaaggcgactctgtgaaaaaaggtgatccactactaatcacagaagcaatgaaaatggaaacaacgattcaagcgcctttcgatggagaagttagcagcatttatgtttctgacggcgatactatcgaatctggtgatcttttaattgaagtaaacagaatttaa

SEQ ID NO: 96866 - protein, 1146 aa, Listeria monocytogenes str. 4b F2365
MNRIKKVLVANRGEIAIRVMRACTELKIKTVAIYSQEDTGSFHRYKSDEAYLVGAGKKPIDAYLDIENIIEIAKESGADAIHPGYGFLSENIEFARRCEQEGIIFVGPKSKHLDMFGDKIKAKEQALLADIPVIPGSNGPVAGIKEVEEFGEKNGYPLMIKASLGGGGRGMRVVESKEHVKESFERASSEAKAAFGNDEVYVEKCVMNPKHIEVQILGDTHGNIVHLFERDCSIQRRHQKVVEVAPCNAITSELRNRICDAAVKLMKNVDYINAGTVEFLVEGDDFYFIEVNPRVQVEHTITEMITGIDIVQSQLFIADGYALHDQLVAIPKQEDIHIHGSAIQSRITTEDPLNNFMPDTGRVDTYRSTGGFGVRLDAGNGFQGTVVTPFYDSLLVKLCTWGMTFEQATRKMRRNLIEFRIRGVKTNIPFLLNVVRHPDFASGNYNTSFIDTTPELFKFPHIRDRGTKTLRYIGNVTVNGFPGIKHRDKPVYAEPRLPKIPYGSQISPGTKQILDAKGPEGVVDWVKKQEEVLLTDTTLRDAHQSLLATRVRSKDIFQIADAMAHLLPNMFSFEMWGGATFDVAYRFLNEDPWVRLETLRKQIPNVMFQMLLRGANAVGYKNYPDNVIREFVKQSAQSGVDVFRVFDSLNWIKGMEVSIDAVREAGKIVEAAICYTGDIDDDTRTKYTIDYYKDMAKELVAQGTHILGIKDMAGLLKPQAAYRLIGELKDTVDVPIHLHTHDTSGNGIYTYAAAVSAGVDIVDVASSAMSGATSQPSMTGLYYGLVNGNRQTNLDAQNSQIINHYWEDVRHYYKDFDNALNSPQTEVYIHEMPGGQYTNLQQQAIAVGLGDRWDEVKEMYTVVNQMFGDIVKVTPSSKVVGDLALFMVQNELSEEDVYEKGDTIDFPDSVIEFFMGEIGQPYGGFPEKLQKLVLKGRTPLTDRPGALMEPVNFVEVKAELKEKMGYEPTEKDVISYILYPKVFLDYQEMINKYGDVTVLDTPTFYKGMRLGETIEVELEKGKILLIKLNSIGEPIADGTRVIYFELNGQPREINIQDMNVQSTVIARRKIDTTNPEHVGATMTGSVIQVVVKKGDSVKKGDPLLITEAMKMETTIQAPFDGEVSSIYVSDGDTIESGDLLIEVNRI

SEQ ID NO: 96867 - DNA, 3447 bp, Bacillus thuringiensis serovar konkukian str. 97-27
  CDS (1)..(3447): transl_table=11
atgacaaagctgcaacgtattcaaaaagtattggtagctaaccgtggagagattgcaattcgtgtgtttcgagcttgttcggaactgggattaaaaacagttgcaatctattcgaaagaggatagtggttcttatcatcgttataaagccgatgaatcctatttagttggggaaggaaaaaagccaattgatgcttatctagatattgagggcattattgagattgcgaaaagtaatcatgtagatgcaatccaccctggatatggtttcttgtcagaaaatattcaattcgcaaaacgttgtgaagaagaagggattatctttatcggtccaaaaagtaagcatttagatatgtttggagataaagtaaaagcaagaacacaagcgcagctagcacaaattccagttattcctggtagtgatgggccggtagattcgttagaagaagttaaagaatttgctgaaaagtatgattacccgattataatcaaagcttctcttggcggtggcggtcgtggtatgcgtattgtacgtactagtgaagaattaagagaatcgtataatcgagcgaagtcagaagcaaaggcagcctttggtaatgatgaagtatacgttgaaaaattcgttgaaaaacctaaacatatagaagttcaaattttagcagatgaagagggcaatgttgttcatttatacgagcgggactgttctgtacaacgtcgtcaccaaaaagtagtagaaattgcacctagtgtgtcactttcagatgatttgcgtcagcgtatttgtgaagctgctgtaaagttaacgaaaaatgtaaattatttaaacgcaggaacagttgaattccttgttaaagatgataatttctatttcattgaagtaaatccacgtgttcaagtagaacatacaattacagaaatgattacaggagttgacatcgttcaatcgcaaattttaatagctgatggacatgcattacatagtaaaatggtaggtgttccaaagcaagaggaagtggttgtacacggttttgcaatccaatctcgtgtaacgactgaggacccactaaataatttcatgccggatacagggaaaattatggcataccgatcaggcggtggctttggggttcgtcttgatacaggtaatagtttccaaggtgcagtaattacaccgtactatgattctttacttgtaaaagttacaacatgggcgcttacttttgaacaagctgcagcaaaaatggaacgtaacttaaaagaattccgtattcgtggtattaaaactaatattccatttctagagaatgtagtaaaacataaaaacttcttatcaggggaatatgacacttcatttattgatgcgtcacctgaactattcttgttcccgaaacgtaaagaccgcggaacgaaaatgttaaattacatcgggacagtaacagtaaatggtttcccgggagtagggaaaaaagagaaaccaattttcccggatgctcgtataccgagtgtattacactcagagccgatccaaaatggaacgaaacaaattttggatgagcgtggagcagaaggattagtaaaatgggtacaagatcaaaaacgtgtccttttaacggatacaacattccgtgatgcgcatcagtcattacttgcaacgcgtattcgtacaaaagatttacatcaaattgcagagccgacagcgaaaatgttaccgaacttattctcagcggaaatgtggggcggtgcaacgtttgatgttgcatatcgtttcttaaaagaagatccatgggaacgattactagatcttcgtgaaaaaatgccaaatgttttattccaaatgttacttcgttcttcaaacgcagttggttacaaaaactatccggataatttaattcaaaagtttgtggagtgttctgctcaagctggaattgatgtgttccgtatttttgatagcttaaactgggtggaaggtatgagagttgcgattgatgctgtacgagatactggtaaaattgcagaagcaacgatgtgttacacaggggatattcacgatccattgcgtagtaaatacgatttaaattactataaaaacttagcaaaagaattagaagcatcaggagctcatattttaggtattaaagatatggcgggcttactaaaaccaaacgcagcatatgatttagtttcagcattaaaagagacggtatcgattccgattcacctgcatacacacgacacgagtggaaatggtatattaacgtatacgaaagcaattgaagcaggtgttgacattgtcgatgtagcagtaagttctatggctggtcaaacgtcacaaccaagtgcgaacacgctatactatgcgttaggcggaaacgaaagacagccagatgttaatatagattcattagaaaaactatctcattactgggaagatgtacgtaaatactacgcaccgtttgaaagtggtatgaacgctcctcatacagaggtatatatgcacgaaatgccaggcggacagtacagtaatttacaacaacaagcgaaagcggttggcttaggcgatcgcttcgatgaagtgaaagtaatgtatcgccgtgtgaatgatatgtttggtgatattgttaaagtaacgccatcatctaaagttgtcggtgatatggcattattcatggttcaaaatcacttaacagaacaagatgttttagagcgtggacattctatggacttcccaggatctgttgttgaaatgttctctggagacttaggacaaccatatggtggtttcccgaaaaagttacaagaaattattttaaaagggaaagaaccattaacagtaagaccgggtgaattattagagccagtagatttcgacgcgttaaaagaagagctattccataagcttggacgcgaagtgacgatgtttgatgtagttgcatatgcattatatccaaaagtatttatggattacgaaaaagttgctgagctttatggaaatgtatctgtgcttgatacacctacattcttctatggtatgagacttggtgaagaaatcgatgtggaaattgaacaaggtaaaacattgatggttaaactagtatcaatcggagagcctcagccagatggaaatcgtgttctttatctggaatttaacggtcaaccacgtgagattgttgtgaaagacgaaagtgtgaaagcaacagttgcacaacgcgtgaaaggaaaccgtgaaaatccaaaccacattagcgcaacaatgccaggaacggttattaaagtagttgtaaaagaaggcgatgaagtgaaaaaaggcgattctatggcaattacagaagcgatgaaaatggaaacgacagttcaagcgccgttcaatggtaaagtgaaaaaagtatatgttaatgatggagatgcaattcaaacgggtgacttactcattgaattagatcactaa

SEQ ID NO: 96868 - protein, 1148 aa, Bacillus thuringiensis serovar konkukian str. 97-27
MTKLQRIQKVLVANRGEIAIRVFRACSELGLKTVAIYSKEDSGSYHRYKADESYLVGEGKKPIDAYLDIEGIIEIAKSNHVDAIHPGYGFLSENIQFAKRCEEEGIIFIGPKSKHLDMFGDKVKARTQAQLAQIPVIPGSDGPVDSLEEVKEFAEKYDYPIIIKASLGGGGRGMRIVRTSEELRESYNRAKSEAKAAFGNDEVYVEKFVEKPKHIEVQILADEEGNVVHLYERDCSVQRRHQKVVEIAPSVSLSDDLRQRICEAAVKLTKNVNYLNAGTVEFLVKDDNFYFIEVNPRVQVEHTITEMITGVDIVQSQILIADGHALHSKMVGVPKQEEVVVHGFAIQSRVTTEDPLNNFMPDTGKIMAYRSGGGFGVRLDTGNSFQGAVITPYYDSLLVKVTTWALTFEQAAAKMERNLKEFRIRGIKTNIPFLENVVKHKNFLSGEYDTSFIDASPELFLFPKRKDRGTKMLNYIGTVTVNGFPGVGKKEKPIFPDARIPSVLHSEPIQNGTKQILDERGAEGLVKWVQDQKRVLLTDTTFRDAHQSLLATRIRTKDLHQIAEPTAKMLPNLFSAEMWGGATFDVAYRFLKEDPWERLLDLREKMPNVLFQMLLRSSNAVGYKNYPDNLIQKFVECSAQAGIDVFRIFDSLNWVEGMRVAIDAVRDTGKIAEATMCYTGDIHDPLRSKYDLNYYKNLAKELEASGAHILGIKDMAGLLKPNAAYDLVSALKETVSIPIHLHTHDTSGNGILTYTKAIEAGVDIVDVAVSSMAGQTSQPSANTLYYALGGNERQPDVNIDSLEKLSHYWEDVRKYYAPFESGMNAPHTEVYMHEMPGGQYSNLQQQAKAVGLGDRFDEVKVMYRRVNDMFGDIVKVTPSSKVVGDMALFMVQNHLTEQDVLERGHSMDFPGSVVEMFSGDLGQPYGGFPKKLQEIILKGKEPLTVRPGELLEPVDFDALKEELFHKLGREVTMFDVVAYALYPKVFMDYEKVAELYGNVSVLDTPTFFYGMRLGEEIDVEIEQGKTLMVKLVSIGEPQPDGNRVLYLEFNGQPREIVVKDESVKATVAQRVKGNRENPNHISATMPGTVIKVVVKEGDEVKKGDSMAITEAMKMETTVQAPFNGKVKKVYVNDGDAIQTGDLLIELDH

SEQ ID NO: 96869 - DNA, 3453 bp, Staphylococcus aureus subsp. aureus MSSA476
  CDS (1)..(3453): transl_table=11
ttgaaacaaataaaaaagttacttgttgctaaccgtggagaaattgcaattcgtatattcagagcggcggcagaattagacatcagcacagttgcaatttattcgaatgaagacaaaagttcattacatagatataaagcagatgaatcctatttagttggaagtgatttaggtcctgctgaaagttatttaaatattgagcgtatcattgatgtagcaaaacaagcgaatgtggatgcgattcatcctggctatggatttttaagtgaaaatgaacaatttgcgcgtcgttgtgcagaagaaggaattaaatttattggtcctcatttagaacatttagatatgtttggagataaagttaaagctcgtacaacggctatcaaggcagatttaccagttattcctggtacagacggtccaattaaatcatatgaattagcaaaagaatttgcagaagaagctggtttcccgctaatgattaaggccacaagtggtggcggcggtaaaggtatgagaatcgttcgtgaagaaagtgaattagaagatgctttccatagagcaaaatcagaagctgaaaaatcatttggtaatagtgaagtttacatagagagatacattgataatccaaagcatattgaagtacaagttataggtgacgaatatggaaatatcgtacacttatttgaacgtgattgttcagtacaacgtcgtcatcaaaaagttgtagaagttgcaccatcagttggattatcaccaacattacgtcaacgtatttgtgatgctgcaattcaattgatggaaaatattaaatatgtcaatgcaggtactgttgaatttctagtatctggtgacgaattcttctttatagaagttaaccctcgtgtacaagttgagcatacaattacagagatggtaacaggaattgatattgttaagacacaaattttagttgcagcaggtgccgatttatttggtgaagaaattaatatgccgcaacaaaaagatattacaacattgggctatgccatccaatgtcgtattacaacagaagatccgttaaatgatttcatgccggatactggaacaatcattgcttatcgttcaagcggtggctttggtgtacgtctcgatgctggagatggtttccaaggtgctgagatatcaccttattatgattcattactcgtaaaattatctacacacgcgatatcatttaaacaagcagaagaaaaaatggtacgttcattacgagaaatgcgtattcgtggtgttaaaactaatattccattcttaattaatgtaatgaagaataaaaagttcacaagtggtgattacacaactaaatttattgaagaaacaccagaacttttcgacattcagccgtctctagatagaggtactaaaacattagaatatataggtaatgtaacaattaatggtttcccaaatgttgagaaacgtccgaaaccagactatgaattagcatcaattccaactgtatcttcaagtaaaatcgcttcatttagtggtacgaaacaattgcttgatgaagtaggtccaaaaggtgtagctgaatgggttaaaaagcaggatgatgttttactaacagatacaacctttagagatgcacaccaatcattattagctacacgagttagaactaaggatatgattaatatcgcatccaaaacagcggacgtatttaaagatggtttctcacttgaaatgtggggcggtgctacatttgatgtggcatataatttcttgaaggaaaacccatgggaacgacttgaacgtctacgtaaagctattccaaatgtattattccaaatgttgttacgtgcttcaaacgcagttggttataaaaactatcctgataatgttattcataaattcgtacaagaaagtgctaaagcaggcatagatgtctttagaattttcgattctttaaactgggtagatcaaatgaaagttgccaatgaagcagtacaagaagcgggcaaaatctctgaaggtactatttgttatacaggtgacattttaaatcctgagcgatcaaacatttatactttagagtattatgtcaaactagctaaagagttagaacgtgaaggtttccatattttagcgattaaagatatggcaggcttattaaaacctaaagccgcttacgaattgattggtgagttaaaatcagctgtagatttaccaattcatcttcacactcatgatacaagtggtaatggtttattaacatacaaacaagcaatagatgctggtgtcgatatcattgatactgctgttgcttcaatgagtggtttaacaagtcagccaagcgccaattcgttatattatgcattaaatggcttcccacgccaccttagaactgatattgaaggtatggagtcacttagtcattattggtcaactgtacgtacttattattcagactttgaaagtgatatcaaatcaccgaatactgaaatttatcaacatgaaatgcctggtggacagtattcgaatttaagtcaacaagctaaaagtttaggtttaggcgaaagatttgatgaagtcaaagatatgtatcgcagagtgaatttcttatttggtgatatcgtaaaagtaactccatcgtctaaagtagttggtgatatggcactttatatggtacaaaatgatcttgatgaacaatccgtgattacagatggctataaattagatttcccagaatcagtagtgtcgttcttcaaaggcgaaataggacaacctgtaaatggttttaataaagatttacaagcggttattttaaaaggccaagaagcactaacagctcgtccaggtgaatatctagagccagttgattttgaaaaagtccgtgagttgcttgaagaagagcaacaaggtcctgttacggagcaagatattattagttatgtattatatccaaaagtatatgaacaatatattcaaactagaaatcaatacggaaacttatcgttacttgatacgcctacattcttctttggaatgcgtaatggtgaaacagtagaaatcgaaatcgataagggtaaacgattaattattaaactagaaacgattagtgaaccagatgaaaatggtaatagaacgatttactatgcgatgaatggtcaagcgagacgtatttacattaaagatgagaatgtgcatacaaatgcgaacgttaagccaaaagcagataagagtaatccaagtcatatcggtgcgcaaatgccaggttcagtaactgaagtcaaggttagtgtaggtgaatctgtgaaagctaaccagccgttgctaattactgaagctatgaaaatggaaacaacaattcaagcaccatttgacggtgtgattaaacaagtaactgtaaataatggtgacacaatagcgacaggcgatttattaatcgaaattgaaaaagcaactgactaa

SEQ ID NO: 96870 - protein, 1150 aa, Staphylococcus aureus subsp. aureus MSSA476
MKQIKKLLVANRGEIAIRIFRAAAELDISTVAIYSNEDKSSLHRYKADESYLVGSDLGPAESYLNIERIIDVAKQANVDAIHPGYGFLSENEQFARRCAEEGIKFIGPHLEHLDMFGDKVKARTTAIKADLPVIPGTDGPIKSYELAKEFAEEAGFPLMIKATSGGGGKGMRIVREESELEDAFHRAKSEAEKSFGNSEVYIERYIDNPKHIEVQVIGDEYGNIVHLFERDCSVQRRHQKVVEVAPSVGLSPTLRQRICDAAIQLMENIKYVNAGTVEFLVSGDEFFFIEVNPRVQVEHTITEMVTGIDIVKTQILVAAGADLFGEEINMPQQKDITTLGYAIQCRITTEDPLNDFMPDTGTIIAYRSSGGFGVRLDAGDGFQGAEISPYYDSLLVKLSTHAISFKQAEEKMVRSLREMRIRGVKTNIPFLINVMKNKKFTSGDYTTKFIEETPELFDIQPSLDRGTKTLEYIGNVTINGFPNVEKRPKPDYELASIPTVSSSKIASFSGTKQLLDEVGPKGVAEWVKKQDDVLLTDTTFRDAHQSLLATRVRTKDMINIASKTADVFKDGFSLEMWGGATFDVAYNFLKENPWERLERLRKAIPNVLFQMLLRASNAVGYKNYPDNVIHKFVQESAKAGIDVFRIFDSLNWVDQMKVANEAVQEAGKISEGTICYTGDILNPERSNIYTLEYYVKLAKELEREGFHILAIKDMAGLLKPKAAYELIGELKSAVDLPIHLHTHDTSGNGLLTYKQAIDAGVDIIDTAVASMSGLTSQPSANSLYYALNGFPRHLRTDIEGMESLSHYWSTVRTYYSDFESDIKSPNTEIYQHEMPGGQYSNLSQQAKSLGLGERFDEVKDMYRRVNFLFGDIVKVTPSSKVVGDMALYMVQNDLDEQSVITDGYKLDFPESVVSFFKGEIGQPVNGFNKDLQAVILKGQEALTARPGEYLEPVDFEKVRELLEEEQQGPVTEQDIISYVLYPKVYEQYIQTRNQYGNLSLLDTPTFFFGMRNGETVEIEIDKGKRLIIKLETISEPDENGNRTIYYAMNGQARRIYIKDENVHTNANVKPKADKSNPSHIGAQMPGSVTEVKVSVGESVKANQPLLITEAMKMETTIQAPFDGVIKQVTVNNGDTIATGDLLIEIEKATD

SEQ ID NO: 96871 - DNA, 3405 bp, Leifsonia xyli subsp. xyli str. CTCB07
  CDS (1)..(3405): transl_table=11
atgttccgtaagatcctcgttgccaatcgcggtgaaatcgccatccgggccttccgggccgcctatgagctgggcgctcagacggtggccgtcttcccgtatgaggaccgtgactcgatgcaccgtctgaaggcggacgaagcgtaccagatcggtgagtcgggtcatccggtgcgtgcgtacctggatgtgcaggagatcatccgtgtcgccagggagtcgggggcggacgcgatctacccgggctacggtttcctctccgagaaccccgagctggccgaggccgcccgcgcggcgggcatcgcgttcatcggcccgcgcgccgaggtgctggagatggccggcaacaaggtgacggcgaaggagcacgcgatcgccgcgggcgtcccggtgctgaagtcgaccccgccgtcgaaagacatcgacgccctcctcgcccaggccgacgagatcggcttccccctcttcgccaaggccgtcgccggcggcggcggccgcgggatgcgccgcgtcgccgcccaggaggagctgcgctctgctctcgacgaggccatgcgcgaggcggacagcgccttcggtgacccgacgatgtttcttgagcaggccgtgctgcgcccccgccatatcgaggttcagattctggccgacggcggtggcgagacgatgcacctcttcgagcgcgactgctcggtgcagcgccgccaccagaaggtggtggagatcgcacccgcgccgaacctctccgacgagatccgccagtcgctctaccgcgacgcgatcgccttcgcgcgctccatcgtctacgagaacgcgggcaccgtcgagttcctgctcgacaccgcgggggagcgtgccggtcagcatgtgttcatcgagatgaacccgcgcatccaggtggagcacacggtcaccgaggagatcaccgacgtcgacctcgtgcagtcgcagatccgcatcgccgcgggcgagaccctcgccgatctcggcctcagtcaggacagtgtccagatgcgcggcgcggccctccagtgccgcatcacgaccgaggacccgaccgcgaacttccgtccggacaccggcaagatcacgacgtaccgttcgccgggcggggccggcatccgcctcgacggaggggcgatcaacccgggcgcccagatcagcccgcacttcgactccatgctggccaagctcatcacgcgcggtcgcgacttccctgccgctgtgttgcgcgcccggcgtgcgctggccgagttccgcgtgcgcggtgtcgctacgaacatcccgttcctccagacggtcatggaggacccggacttcatcgcgggcgacgtctccacctcgttcatcgaggagcgtcccgagctgttcaagggccgggcctccaaggaccgcggcaccaaggcgctcaactggctcgccgacgtcacggtcaaccagccgaacggcgcgcgccccgagaccgccgaccccctcgacaagctgccccgcctcgacctgagccttccggcgcccgcgggctcccggcagcggctactggagctcggcccggcagggttcgccggggcgctgcgggcccagaccgccctcgcggtcaccgagaccaccttccgcgacgcccatcagtccctgctcgcgacccgcgtgcgcaccaaggacctcctcgccgtcgccccgtatgtcgcgcgcatgacgcccgagctgctctccgtggaggcgtggggcggcgcgacctacgacgtcgcgctccgcttcctgggcgaagacccgtgggagcgtctcgccgcccttcgcgaggcgctgccgaacgtgaacatccagatgctgttgcgcggccgcaacactgtcggctacacgccgtacccgaccccggtgaccgacgccttcgtgcgggaggccgcggcgaccggcgtggacatcttccgcatcttcgacgcgctcaacgacgtctcgcagatgcgcccggcgatcgaatcggtgctggccaccggctccgctgtcgccgaggtcgccgtctgctacaccggcgacctgctcgacccggccgaggacctctacaccctcgactactatctgcggctcgccgagcggatcgtggactcgggcgcgcacatcctggggatcaaagacatggcgggcctgctgcgcccggcggcggccgagaagctcgtcgccgcattccgggagcgcttcgagctgccggtgcatgtccacacgcacgacactccgggcggccagctcggaacgctcctggccgccgcgcgggccggggcggacgcggtggatgtcgccagcgcgccgatggcgggcacgaccagccagccgagcgcgtccgccctggtcgctgcgctcgcgcacaccgagcgcgacaccggcgtctctctcacggccgtccaggacctcgaaccgtattgggaggcggtgcgtcacgtctaccgcccgttcgagtccgggctccccgggcccacgggccgggtctacaagcacgagatccccggcggtcagctctccaatttgcgccagcaggccaaggccctcggcctcgcggaggacttcgagctggtggaggacatgtacgccgcggccaaccgcatcctcggccgcatccccaaggtcacgccgtcgtccaaggtcgtcggcgacctcgcgctgcacctcgcggccgtgcgggccgacccgcaggacttcgcggagaacccccagaactacgatatcccggactcggtggtcggcttcatggcgggcgaactgggcgagctgcccggcggctggccggagccgttccgcaccaaggtgctggcgggcaagactgtcaaggtcggtgtggaggagctgtccgccgccgacgcgcgggcgctggagggctccagcgaggagcgccgcgcgaccctcaaccgtttgctcttccccgcccccacgcggatccacgagcagatgcgcgagctgttcggcgatctgtcggtggtggattcgctcgactacctctacgggctgcggcagggctccgagcacgtcatcgagttcagcaagggcgtgcgcctgtacatcggcctggaagccatcggcgaagccgacgagaagggcatgcgcacggttatgacgaccctcaacggccagctacggccggtgttcgtccgcgaccgcagcatcgtcgtggaggcgaaggcggcggagaaggcggacacggccaagccgggccaggtcgccgcgcctttctccggcgtggtgacgctgcacgtcgccgtcggtgactccgtcgcggcggggcaggcggtcgcgtccattgaggccatgaagatggaagcggccatcaccgctccggtcgccggtgttgtggagcggctcgctatcccgaagacccagcaagtggatgcgggtgatctgctcgtggtcgtcactccgctctga

SEQ ID NO: 96872 - protein, 1134 aa, Leifsonia xyli subsp. xyli str. CTCB07
MFRKILVANRGEIAIRAFRAAYELGAQTVAVFPYEDRDSMHRLKADEAYQIGESGHPVRAYLDVQEIIRVARESGADAIYPGYGFLSENPELAEAARAAGIAFIGPRAEVLEMAGNKVTAKEHAIAAGVPVLKSTPPSKDIDALLAQADEIGFPLFAKAVAGGGGRGMRRVAAQEELRSALDEAMREADSAFGDPTMFLEQAVLRPRHIEVQILADGGGETMHLFERDCSVQRRHQKVVEIAPAPNLSDEIRQSLYRDAIAFARSIVYENAGTVEFLLDTAGERAGQHVFIEMNPRIQVEHTVTEEITDVDLVQSQIRIAAGETLADLGLSQDSVQMRGAALQCRITTEDPTANFRPDTGKITTYRSPGGAGIRLDGGAINPGAQISPHFDSMLAKLITRGRDFPAAVLRARRALAEFRVRGVATNIPFLQTVMEDPDFIAGDVSTSFIEERPELFKGRASKDRGTKALNWLADVTVNQPNGARPETADPLDKLPRLDLSLPAPAGSRQRLLELGPAGFAGALRAQTALAVTETTFRDAHQSLLATRVRTKDLLAVAPYVARMTPELLSVEAWGGATYDVALRFLGEDPWERLAALREALPNVNIQMLLRGRNTVGYTPYPTPVTDAFVREAAATGVDIFRIFDALNDVSQMRPAIESVLATGSAVAEVAVCYTGDLLDPAEDLYTLDYYLRLAERIVDSGAHILGIKDMAGLLRPAAAEKLVAAFRERFELPVHVHTHDTPGGQLGTLLAAARAGADAVDVASAPMAGTTSQPSASALVAALAHTERDTGVSLTAVQDLEPYWEAVRHVYRPFESGLPGPTGRVYKHEIPGGQLSNLRQQAKALGLAEDFELVEDMYAAANRILGRIPKVTPSSKVVGDLALHLAAVRADPQDFAENPQNYDIPDSVVGFMAGELGELPGGWPEPFRTKVLAGKTVKVGVEELSAADARALEGSSEERRATLNRLLFPAPTRIHEQMRELFGDLSVVDSLDYLYGLRQGSEHVIEFSKGVRLYIGLEAIGEADEKGMRTVMTTLNGQLRPVFVRDRSIVVEAKAAEKADTAKPGQVAAPFSGVVTLHVAVGDSVAAGQAVASIEAMKMEAAITAPVAGVVERLAIPKTQQVDAGDLLVVVTPL

SEQ ID NO: 96873 - DNA, 3447 bp, Symbiobacterium thermophilum IAM 14863
  CDS (1)..(3447): transl_table=11
gtgatgcccatgccggcttttcggcgcgtgcttgtcgccaaccggggcgagatcgccatccgcatcttccgcgcgtgcacggaactgggcaaacagaccgtggccgtgtactccgaacaggacagcctctcgctccaccggtacaaggccgacgaagcctacctcatcggcgagggcaagggccccgtggaggcttacctcgacgtggaggggatcatccggctggcccgggagcacgaggtggacgccatccaccccggctacggcttcctggcagagaacgccgcgttcgcccgccgctgccgggaagaggggatcgccttcatcggcccggaccccgagcacctggagatgttcggcgacaaggtggcggcacgccggatcgcccgggaggcggggctgcccctcccccgcggcaccgaggcgccggtcgcctcggtgaaggaggccctcgccttcgcccgggaggtgggctacccgatcatcgtcaaggccgtgctgggcggcggcggccggggcatgcgggtggtccgctccgacgccgagctgaaggacgcgctggagcgggcccgctccgaggcccaggcggccttcggctcgggcgaagtctacctggaagagtacgtggagcggccccgccacatcgaggtccaggtgatggccgaccgatacggaaacgtggtccacctgtacgagcgggactgctccatccagcgccggcaccagaaggtggtggaaattgccccctcgctggccctgaccgaaccccagcggcaggagatctgcggtgcggccgtccggctgatggcccgggtgggctacgtgggcgccggcaccgtcgagttcctggtcgcgcccgacggccgctactacttcatggaggtcaacccgcgcatccaggtggagcacacggtgaccgaggagatcaccgggctggacatcgtccaggcccagatccgcatcgccgagggagcgcgcctggacgaggcgctgggggtcgcctcccaggcgcagatcgcccggcacggttacgccatccagtgccgggtgaccgccgaggacccggccaacgacttcctgcccgacaccggccgcatcctggtctaccgctcccccggcggacccggcgtccggctggacggcgacaacgggttcgtcggcgcggagatcacgccgtactacgactcgctgctggtgaaggccaccacctggggactcaccttcgaggcggcggccgccaagatgagccgggtgctccaggagttccgcatccgcggggtgaagaccaacatcccgttcctcctgaacgtcatccgccacccccggttcctcgccggcgacgtggacaccaacttcatccacgactcgcccgagctgttccagtttccgccccgccgggaccggggcaccaaggtgctccgctacatcggccacgtggtggtcaacggcggcccgggggtgcctcccggggccaagccgcccgcccggtcccagccgcccatcccgaaggcggaggggccggttccccccggcgtccggcaggtcctgctggagcggggcgccgaggggctggtggagtggatccggacccagaagcgactgctggtgaccgacactacgatgcgggacggccaccagtcgctgctggccacccgggtgcgtacccgggacatgctgaccatcgccccggccacggcgcgcctcgcctcggggctcttctccctggagatgtggggcggcgcgacgttcgacacggccctgcggttcctgaaggaggacccctgggagcggctggacctgctccgccgggccatccccaacatccccttccagatgctgctgcgcggcgccaacgccgtcggctacgccaactaccccgacaacctggtccacgccttcgtccgggaggccgcggcggcgggcatcgacatcttccgcatcttcgacgcgctcaactggctgcccaacatgcggcccgcgatcgaggcggtgcgcagcgccggcaaggtggccgaggtggccatctgctacacgggggacatcacggaccccgcccgcaccaagtacaacctgcggtactacgtggacctggcgaaggagctggagaaggccggcgcgcagatcctcgcgatcaaggacatgtcgggcctcctgaagccccgggcggccaagatgctgatctccgctctgaagcaggaggtcggcgtgccgctgcacctgcacacccacgacaccgccggcacggggctggcgacgctgctggccgcggccgaggccggggtggacatcgtcgacgccgccctctcctccctctccgggctgacgtcccagccgtcgctcaacacgctggtggcggcgctgcagggcagcgaccgggatacggggctggacctggcggcgctgcagcagctggccgactactggcaggaggtccgccgctggtacgccccctgggagtccgggctcctggccacttccgctgagacgtacctgcacgagatgcccggcgggcaggtctcgaacctgcgccagcaggccgtcgccctggggctcggcggtcgctggcatgaggtggtcgaggcctaccgcacggccaacctggccctgggggacatcgtcaaggtcaccccgtcctccaaggccgtcggcgacctggcgctgttcatggtgcagaacggcatccgcacgaccgaggagctggtccggcggggcgagggcctggccttccccgagtcggtggtgcagatgctggccggctatatggggcagccccccggcgggtggccggaggagctgcagcgggtggtgctgaagggccgggaggcgattacggtccgcccgggggagctgctgccgcccatcgacttcgaggcgaagcagagggagctctcggcgaagctcgggcggcccgcggcccagcgggaggtcttgtcggaggtgctcttccccggcctgctggagcagctggcccggcaccaggaggagtacgggaacacggcggtggtcgacacgcccaccttcttctacggcctgcgccccggcgaggagacccgggtggagatcgagaagggcaagacgctgatcatcaagctggtggacgtgcgggatcccaagcccaacggcatgcgggaagtcctgttcgagctgaacggttcccagcgggaggtcgaggtgcccgaccagcggctggtggacgccggcgcccgccggcccaaggcggacaagggcgatccgtgccatctgggcgcctccatgccgggcaaggtcctgaaagtcctggtcgcccccggcgaccaggtcgccaagggcgtgcagctggtggtgaccgaggcgatgaagatggagaacgtgctcaccgcgccccgggactgccggatcaaggacgtgctggtgaaggagggcgaccgggtcgaggccggggacctggtggtggtgctcgaagagtga

SEQ ID NO: 96874 - protein, 1148 aa, Symbiobacterium thermophilum IAM 14863
MMPMPAFRRVLVANRGEIAIRIFRACTELGKQTVAVYSEQDSLSLHRYKADEAYLIGEGKGPVEAYLDVEGIIRLAREHEVDAIHPGYGFLAENAAFARRCREEGIAFIGPDPEHLEMFGDKVAARRIAREAGLPLPRGTEAPVASVKEALAFAREVGYPIIVKAVLGGGGRGMRVVRSDAELKDALERARSEAQAAFGSGEVYLEEYVERPRHIEVQVMADRYGNVVHLYERDCSIQRRHQKVVEIAPSLALTEPQRQEICGAAVRLMARVGYVGAGTVEFLVAPDGRYYFMEVNPRIQVEHTVTEEITGLDIVQAQIRIAEGARLDEALGVASQAQIARHGYAIQCRVTAEDPANDFLPDTGRILVYRSPGGPGVRLDGDNGFVGAEITPYYDSLLVKATTWGLTFEAAAAKMSRVLQEFRIRGVKTNIPFLLNVIRHPRFLAGDVDTNFIHDSPELFQFPPRRDRGTKVLRYIGHVVVNGGPGVPPGAKPPARSQPPIPKAEGPVPPGVRQVLLERGAEGLVEWIRTQKRLLVTDTTMRDGHQSLLATRVRTRDMLTIAPATARLASGLFSLEMWGGATFDTALRFLKEDPWERLDLLRRAIPNIPFQMLLRGANAVGYANYPDNLVHAFVREAAAAGIDIFRIFDALNWLPNMRPAIEAVRSAGKVAEVAICYTGDITDPARTKYNLRYYVDLAKELEKAGAQILAIKDMSGLLKPRAAKMLISALKQEVGVPLHLHTHDTAGTGLATLLAAAEAGVDIVDAALSSLSGLTSQPSLNTLVAALQGSDRDTGLDLAALQQLADYWQEVRRWYAPWESGLLATSAETYLHEMPGGQVSNLRQQAVALGLGGRWHEVVEAYRTANLALGDIVKVTPSSKAVGDLALFMVQNGIRTTEELVRRGEGLAFPESVVQMLAGYMGQPPGGWPEELQRVVLKGREAITVRPGELLPPIDFEAKQRELSAKLGRPAAQREVLSEVLFPGLLEQLARHQEEYGNTAVVDTPTFFYGLRPGEETRVEIEKGKTLIIKLVDVRDPKPNGMREVLFELNGSQREVEVPDQRLVDAGARRPKADKGDPCHLGASMPGKVLKVLVAPGDQVAKGVQLVVTEAMKMENVLTAPRDCRIKDVLVKEGDRVEAGDLVVVLEE

SEQ ID NO: 96875 - DNA, 3444 bp, Bacillus licheniformis ATCC 14580
  CDS (1)..(3444): transl_table=11
atgtcacaacagtctattcaaaaagttcttgttgcaaacagaggggaaatcgctatccgcgtatttcgggcctgcacagaactgaatatccgtacggtagcgatctattctaaagaagacagcggatcttaccacagatacaaagccgatgaagcatacctggtcggcgaagggaaaaagccgattgacgcttatcttgatattgaaggcatcatcgagattgcaaaacgcaaccatgtggatgccatccatccaggctacggcttcctgtcggaaaacattcagtttgctaagcggtgtgaagaggaaggcatcatctttatcggaccgacctccgagcacctcgatatgtttggagacaaagtaaaagcccgcgaacaagctgaaaaagctggaattccggtcataccggggagcgacggaccagtggcggatatagcggaagtgaaacaatttgcggaaaagttcggatatccgtttatcattaaagcgtcgcttggcggcggcgggcgcggcatgcggatcgtcagggacgaatcggagctggtggagtcctataatagggcgaaatcagaggcgaaagcggcctttggcaatgatgaagtttatgtcgaaaagctgattgaaaagccgaagcacattgaagttcaagtcatcggagataaagaagggaacgtggttcacctttacgaccgcgactgctctgtgcaaaggcgtcatcaaaaggtcatcgaagtggcgccgagcgtttcgctttctgaatccctccgggaaaagatttgcgatgctgccgttaagcttgcgaagaatgttgaatatgtcaatgccggtacagtcgaatttttagttgcgaacgatgagtttttctttattgaagtgaacccgcgtgttcaggtggagcataccattacggaaatggtaacgggcgtcgatatcgttcagacgcaaatcctgatcgctgccggtctcagtctggacagcagcgaaatcagcattccgaaccaggatgcgatcacgctgcacggatatgcgatccagtcaagggttacgactgaagatccgtcaaacaatttcatgcctgacacaggcaaaatcatggcatatcgctcaggcggcggtttcggggtgaggcttgataccggaaacagttttcagggcgctgtcattacgccttattacgattcgctgcttgttaagctttcaacttgggcgctgacgtttgaacaggcggcagccaaaatggtccgcaaccttcaggaattcaggatcaggggaatcaaaacgaacattcctttccttgaaaatgtggcgaaacacgaaaagtttcttacagggcaatacgacacgtcttttatcgatacaacgccagaactttttgtctttcctaagcagagagaccgcggaacgaaaatgctgacatatatcgggaacgtaacggtcaacggcttcccgggcatcgataaaaagaagaagcccgagtttgataagccgcagatcgtcaaaacagatgtcgatcagccaatcgcaagcggaacaaaacagattcttgatgaacgcggagccgaagggctcgtcaaatgggtgaaagatcaagaggaagtgctcctcactgatacgacgttccgcgacgcccatcagtcattgcttgcgacaagagtcagaacgcatgacctgaaaaaaatcgccaatccgacggctgcgctctggccagagcttttcagtcttgaaatgtggggcggcgccacatttgatgtcgcttaccgtttcttgaaagaagatccgtggaaaaggctcgaggagctgcggaaggaaattccgaatacgatgtttcaaatgcttttgagatcttcgaatgccgtcgggtatacaaactaccctgacaacctgattaaaaagttcgtcagcgaatcggctgcggccggaatcgatgtattccgcatttttgacagcttgaactgggttaaagggatgacgctcgccattgatgcagtgcgcgagtcaggcaagcttgccgaagcggcgatctgctatacaggggacattctcgatccgaacagaagcaagtataatcttgaatattatacgtcaatggcaaaagagcttgaagctgcgggggcgcatattctcggcattaaagatatggccggcctgctgagacctcaagcggcatacgaactggtgtcggctttgaaagagacgatcgacattccgatccacttgcatacacacgacacgagcggcaacggtatttttatgtatgcgaaggcgatagaagcaggcgtcgacatcgtcgacgtagcggtcagctcgatggcgggtctgacatcacagccaagcgcaagctcgctttaccatgcgcttgaaggagataaacgccgtccgcagttcaatgtcgatgcggaagagtcgttgtctcaaaaaaaaaagtctgtcagaaaatattacagcgagtttgagagcggcatgattgcgcctcataccgaaatttacaagcatgaaatgcctggcggccaatacagcaaccttcagcagcaggctaagggagtcggcctcggcgaccgctggaatgaagtgaaagaaatgtacagccgggtcaaccacctgttcggggacatcgtaaaggttacgccgtcatctaaagtcgtcggggatatggcgctttacatggtgcaaaataacctgacggaagatgatatttacgaaaggggagaatctctcgattttcctgactcggttgtcgagctttttaaagggtatatcggtcagcctcacggcggattccctgagaaattgcaaaagctgattttaaaagggcaggagccgattacagtacgccctggagaactgcttgaaccggtttcatttgacgctataaaagcggaattcttggaaaagcatggtatggagctttccgaccaggatgctgttgcatatgcgctttatccgaaagtgtttaccgagtatgtcaagacagcggaactgtacggggatatctctgtgcttgatacaccaaccttcctctacggcatgaccctcggcgaagaaatcgaggtcgagattgaaagagggaaaacgctgatcgtcaaacttgtctctatcggggaaccgcgtccggatgcgacgagagtcgtttattttgaactgaacggccagcctcgcgaagtggtcattaaagacgaaagcattaaatcgtccgttcatcaaaaggtgaaagccgaccgttcaaacccgaatcatatcgcggcatctatgccgggaacggtaatcaagcttcttgtaagcaaaggggaccaagtgaagaagggcgatcatttgatgatcaatgaagcgatgaaaatggaaacgaccgttcaggctccgttttcaggaactgttgaaaacattcacgttacaaacggagaagccattcaaaccggcgaccttctcattgaactgaaaaaataa

SEQ ID NO: 96876 - protein, 1147 aa, Bacillus licheniformis ATCC 14580
MSQQSIQKVLVANRGEIAIRVFRACTELNIRTVAIYSKEDSGSYHRYKADEAYLVGEGKKPIDAYLDIEGIIEIAKRNHVDAIHPGYGFLSENIQFAKRCEEEGIIFIGPTSEHLDMFGDKVKAREQAEKAGIPVIPGSDGPVADIAEVKQFAEKFGYPFIIKASLGGGGRGMRIVRDESELVESYNRAKSEAKAAFGNDEVYVEKLIEKPKHIEVQVIGDKEGNVVHLYDRDCSVQRRHQKVIEVAPSVSLSESLREKICDAAVKLAKNVEYVNAGTVEFLVANDEFFFIEVNPRVQVEHTITEMVTGVDIVQTQILIAAGLSLDSSEISIPNQDAITLHGYAIQSRVTTEDPSNNFMPDTGKIMAYRSGGGFGVRLDTGNSFQGAVITPYYDSLLVKLSTWALTFEQAAAKMVRNLQEFRIRGIKTNIPFLENVAKHEKFLTGQYDTSFIDTTPELFVFPKQRDRGTKMLTYIGNVTVNGFPGIDKKKKPEFDKPQIVKTDVDQPIASGTKQILDERGAEGLVKWVKDQEEVLLTDTTFRDAHQSLLATRVRTHDLKKIANPTAALWPELFSLEMWGGATFDVAYRFLKEDPWKRLEELRKEIPNTMFQMLLRSSNAVGYTNYPDNLIKKFVSESAAAGIDVFRIFDSLNWVKGMTLAIDAVRESGKLAEAAICYTGDILDPNRSKYNLEYYTSMAKELEAAGAHILGIKDMAGLLRPQAAYELVSALKETIDIPIHLHTHDTSGNGIFMYAKAIEAGVDIVDVAVSSMAGLTSQPSASSLYHALEGDKRRPQFNVDAEESLSQKKKSVRKYYSEFESGMIAPHTEIYKHEMPGGQYSNLQQQAKGVGLGDRWNEVKEMYSRVNHLFGDIVKVTPSSKVVGDMALYMVQNNLTEDDIYERGESLDFPDSVVELFKGYIGQPHGGFPEKLQKLILKGQEPITVRPGELLEPVSFDAIKAEFLEKHGMELSDQDAVAYALYPKVFTEYVKTAELYGDISVLDTPTFLYGMTLGEEIEVEIERGKTLIVKLVSIGEPRPDATRVVYFELNGQPREVVIKDESIKSSVHQKVKADRSNPNHIAASMPGTVIKLLVSKGDQVKKGDHLMINEAMKMETTVQAPFSGTVENIHVTNGEAIQTGDLLIELKK

SEQ ID NO: 96877 - DNA, 3447 bp, Bacillus cereus E33L
  CDS (1)..(3447): transl_table=11
atgacaaagctgcaacgtattcaaaaagtattggtagctaaccgtggagagattgcaattcgtgtgtttcgagcttgttcggaactgggattaaaaacagttgcaatctattctaaagaggatagtggttcttatcatcgttataaagccgatgaatcctatttagttggggaaggaaaaaagccaattgatgcttatctagatattgaaggcattattgagattgcgaaaagtaatcatgtagatgcaatccaccctggatatggtttcttgtcagaaaatattcaattcgcaaaacgttgtgaagaagaagggattatctttatcggtccaaaaagtaagcatttagatatgtttggagataaagtaaaagcaagaacacaagcgcagctagcacaaattccagttattcctggtagtgatgggccagtagattcattagaagaagtcaaagaatttgctgaaaagtatgattacccgattattattaaagcttcccttggcggtggcggtcgtggtatgcgtattgtacgtaatagtgaagaattaagagaatcgtataatcgagcgaagtcagaagcaaaagcagcctttggtaatgatgaagtatacgtagaaaaattcgttgaaaaacctaaacatatagaagttcaaattttagcagatgaagagggcaatgttgttcatttatacgagcgagactgttctgtacaacgtcgtcaccaaaaagtagtagaaattgcacctagtgtgtcgctttcagatgatttgcgtcagcgtatttgtgatgccgctgtgaaattaacaaaaaatgtaaattatttaaacgcaggaacagttgaattccttgtaaaagatgataatttctatttcattgaagtaaatccgcgtgttcaagtagaacatacaattacagaaatgattacaggagtcgatatcgttcaatcacaaattttaatagctgatggacatgcgttacatagcaaattggtgggtgttcctaagcaagaggaagttgttgtacatggatttgcaatacaatctcgagtaacgactgaggacccactaaataatttcatgccagatacagggaaaattatggcatatcgatcaggtggtggctttggggttcgtcttgatacaggtaatagtttccaaggtgctgttattacaccgtactatgattctttacttgtaaaagttacaacatgggcgcttacttttgaacaagctgctgcaaaaatggaacgtaacttaaaagaattccgtattcgtggtattaaaactaatattccattcctagagaatgtagtaaaacataaaaacttcttatcaggggaatatgacacttcatttattgatgcgtcacctgaactattcttgttcccgaaacgtaaagaccgcggaacgaaaatgttaaattacatcgggacagtaacagtaaatggcttcccgggggtagggaaaaaagagaaaccaattttcccagatgctcgtataccgaatgtattacactcagagccaatccaaaatggaacgaaacaaattttggatgagcatggagcagacggattagtaaaatgggtacaagatcaaaaacgtgtacttttaacggatacaacattccgtgatgcgcatcagtcattacttgcaacgcgtattcgtacaaaagatttacatcaaattgcagagccaacagcgagaatgttaccgaacttattctcagcagaaatgtggggcggtgcaacgtttgatgttgcatatcgtttcttaaaagaagatccgtgggaacgattactagatcttcgtgaaaaaatgccaaatgttttattccaaatgttacttcgttcttcaaatgcagttggttacaaaaactatccggataatttaattcaaaagtttgtggagtgttctgctcaagctggaattgatgtgttccgtatttttgatagcttaaactgggtagaaggtatgagagttgcgattgatgctgtacgagatactggtaaaattgcagaagcaactatgtgttacacaggggatattcatgatccattgcgtagtaaatatgatttaaattactataaaaatttagcaaaagaattagaagcatcaggagctcacattttaggtattaaagatatggcgggcttactaaaaccaaacgcagcatatgatttagtttcagcattaaaagagacagtatcgattccgattcacctgcacacacacgatacgagtggaaatggtatattaacgtatacgaaagcaattgaagcgggtgttgatattgtcgatgtagcagtaagttctatggctggtcaaacgtcacaaccaagtgcgaacacgctatactatgcgttaggcggaaacgaaagacagccagatgttaatatagattcattagaaaaactatctcattactgggaagatgtacgtaaatactatgcaccgtttgaaagtggtatgaatgctcctcatacagaggtatatatgcacgaaatgccaggcggacagtatagtaatttacaacaacaagcgaaagcggttggcttaggagatcgttttgatgaagtgaaagtaatgtaccgccgtgtgaatgacatgtttggtgatattgttaaagtaacgccatcatctaaagttgtcggtgatatggcattattcatggttcaaaatcacttaacagaacaagatgttttagagcgtggacattctatggacttcccaggatctgttgttgaaatgttctctggagacttaggacaaccatatggtggtttcccgaaaaagttacaagaaattattttaaaagggaaagaaccattaacagtaagaccgggtgaattattagagccagtagatttcgacgcgttaaaagaagagctattccataagcttggacgcgaagtgacgatgtttgatgtagttgcatatgcattatatccaaaagtatttatggattacgaaaaagttgctgagctttatggaaatgtatctgtgcttgatacaccgacattcttctatggtatgagacttggtgaagaaatcgatgtggaaattgaacaaggtaaaacattgatggttaaactagtatcaatcgcagagcctcagccagatggaaatcgtgttctttatctggaatttaacggtcaaccacgtgagattgttgtgaaagacgaaagtgtgaaagcaacagttgcacaacgcgtgaaaggaaaccgtgaaaatccaaaccacattagcgcaacaatgccaggaacggttattaaagtagttgtaaaagaaggcgatgaagtgaaaaaaggcgattctatggcaattacagaagcgatgaaaatggaaacgacagttcaagcgccgttcaatggtaaagtgaaaaaagtatatgttaatgatggagatgcaattcaaacgggtgacttactcattgaattagatcactaa

SEQ ID NO: 96878 - protein, 1148 aa, Bacillus cereus E33L
MTKLQRIQKVLVANRGEIAIRVFRACSELGLKTVAIYSKEDSGSYHRYKADESYLVGEGKKPIDAYLDIEGIIEIAKSNHVDAIHPGYGFLSENIQFAKRCEEEGIIFIGPKSKHLDMFGDKVKARTQAQLAQIPVIPGSDGPVDSLEEVKEFAEKYDYPIIIKASLGGGGRGMRIVRNSEELRESYNRAKSEAKAAFGNDEVYVEKFVEKPKHIEVQILADEEGNVVHLYERDCSVQRRHQKVVEIAPSVSLSDDLRQRICDAAVKLTKNVNYLNAGTVEFLVKDDNFYFIEVNPRVQVEHTITEMITGVDIVQSQILIADGHALHSKLVGVPKQEEVVVHGFAIQSRVTTEDPLNNFMPDTGKIMAYRSGGGFGVRLDTGNSFQGAVITPYYDSLLVKVTTWALTFEQAAAKMERNLKEFRIRGIKTNIPFLENVVKHKNFLSGEYDTSFIDASPELFLFPKRKDRGTKMLNYIGTVTVNGFPGVGKKEKPIFPDARIPNVLHSEPIQNGTKQILDEHGADGLVKWVQDQKRVLLTDTTFRDAHQSLLATRIRTKDLHQIAEPTARMLPNLFSAEMWGGATFDVAYRFLKEDPWERLLDLREKMPNVLFQMLLRSSNAVGYKNYPDNLIQKFVECSAQAGIDVFRIFDSLNWVEGMRVAIDAVRDTGKIAEATMCYTGDIHDPLRSKYDLNYYKNLAKELEASGAHILGIKDMAGLLKPNAAYDLVSALKETVSIPIHLHTHDTSGNGILTYTKAIEAGVDIVDVAVSSMAGQTSQPSANTLYYALGGNERQPDVNIDSLEKLSHYWEDVRKYYAPFESGMNAPHTEVYMHEMPGGQYSNLQQQAKAVGLGDRFDEVKVMYRRVNDMFGDIVKVTPSSKVVGDMALFMVQNHLTEQDVLERGHSMDFPGSVVEMFSGDLGQPYGGFPKKLQEIILKGKEPLTVRPGELLEPVDFDALKEELFHKLGREVTMFDVVAYALYPKVFMDYEKVAELYGNVSVLDTPTFFYGMRLGEEIDVEIEQGKTLMVKLVSIAEPQPDGNRVLYLEFNGQPREIVVKDESVKATVAQRVKGNRENPNHISATMPGTVIKVVVKEGDEVKKGDSMAITEAMKMETTVQAPFNGKVKKVYVNDGDAIQTGDLLIELDH

SEQ ID NO: 96879 - DNA, 3444 bp, Bacillus licheniformis ATCC 14580
  CDS (1)..(3444): transl_table=11
atgtcacaacagtctattcaaaaagttcttgttgcaaacagaggggaaatcgctatccgcgtatttcgggcctgcacagaactgaatatccgtacggtagcgatctattctaaagaagacagcggatcttaccacagatacaaagccgatgaagcatacctggtcggcgaagggaaaaagccgattgacgcttatcttgatattgaaggcatcatcgagattgcaaaacgcaaccatgtggatgccatccatccaggctacggcttcctgtcggaaaacattcagtttgctaagcggtgtgaagaggaaggcatcatctttatcggaccgacctccgagcacctcgatatgtttggagacaaagtaaaagcccgcgaacaagctgaaaaagctggaattccggtcataccggggagcgacggaccagtggcggatatagcggaagtgaaacaatttgcggaaaagttcggatatccgtttatcattaaagcgtcgcttggcggcggcgggcgcggcatgcggatcgtcagggacgaatcggagctggtggagtcctataatagggcgaaatcagaggcgaaagcggcctttggcaatgatgaagtttatgtcgaaaagctgattgaaaagccgaagcacattgaagttcaagtcatcggagataaagaagggaacgtggttcacctttacgaccgcgactgctctgtgcaaaggcgtcatcaaaaggtcatcgaagtggcgccgagcgtttcgctttctgaatccctccgggaaaagatttgcgatgctgccgttaagcttgcgaagaatgttgaatatgtcaatgccggtacagtcgaatttttagttgcgaacgatgagtttttctttattgaagtgaacccgcgtgttcaggtggagcataccattacggaaatggtaacgggcgtcgatatcgttcagacgcaaatcctgatcgctgccggtctcagtctggacagcagcgaaatcagcattccgaaccaggatgcgatcacgctgcacggatatgcgatccagtcaagggttacgactgaagatccgtcaaacaatttcatgcctgacacaggcaaaatcatggcatatcgctcaggcggcggtttcggggtgaggcttgataccggaaacagttttcagggcgctgtcattacgccttattacgattcgctgcttgttaagctttcaacttgggcgctgacgtttgaacaggcggcagccaaaatggtccgcaaccttcaggaattcaggatcaggggaatcaaaacgaacattcctttccttgaaaatgtggcgaaacacgaaaagtttcttacagggcaatacgacacgtcttttatcgatacaacgccagaactttttgtctttcctaagcagagagaccgcggaacgaaaatgctgacatatatcgggaacgtaacggtcaacggcttcccgggcatcgataaaaagaagaagcccgagtttgataagccgcagatcgtcaaaacagatgtcgatcagccaatcgcaagcggaacaaaacagattcttgatgaacgcggagccgaagggctcgtcaaatgggtgaaagatcaagaggaagtgctcctcactgatacgacgttccgcgacgcccatcagtcattgcttgcgacaagagtcagaacgcatgacctgaaaaaaatcgccaatccgacggctgcgctctggccagagcttttcagtcttgaaatgtggggcggcgccacatttgatgtcgcttaccgtttcttgaaagaagatccgtggaaaaggctcgaggagctgcggaaggaaattccgaatacgatgtttcaaatgcttttgagatcttcgaatgccgtcgggtatacaaactaccctgacaacctgattaaaaagttcgtcagcgaatcggctgcggccggaatcgatgtattccgcatttttgacagcttgaactgggttaaagggatgacgctcgccattgatgcagtgcgcgagtcaggcaagcttgccgaagcggcgatctgctatacaggggacattctcgatccgaacagaagcaagtataatcttgaatattatacgtcaatggcaaaagagcttgaagctgcgggggcgcatattctcggcattaaagatatggccggcctgctgagacctcaagcggcatacgaactggtgtcggctttgaaagagacgatcgacattccgatccacttgcatacacacgacacgagcggcaacggtatttttatgtatgcgaaggcgatagaagcaggcgtcgacatcgtcgacgtagcggtcagctcgatggcgggtctgacatcacagccaagcgcaagctcgctttaccatgcgcttgaaggagataaacgccgtccgcagttcaatgtcgatgcggtagagtcgttgtctcaatattgggagtctgtcagaaaatattacagcgagtttgagagcggcatgattgcgcctcataccgaaatttacaagcatgaaatgcctggcggccaatacagcaaccttcagcagcaggctaagggagtcggcctcggcgaccgctggaatgaagtgaaagaaatgtacagccgggtcaaccacctgttcggggacatcgtaaaggttacgccgtcatctaaagtcgtcggggatatggcgctttacatggtgcaaaataacctgacggaagatgatatttacgaaaggggagaatctctcgattttcctgactcggttgtcgagctttttaaagggtatatcggtcagcctcacggcggattccctgagaaattgcaaaagctgattttaaaagggcaggagccgattacagtacgccctggagaactgcttgaaccggtttcatttgacgctataaaagcggaattcttggaaaagcatggtatggagctttccgaccaggatgctgttgcatatgcgctttatccgaaagtgtttaccgagtatgtcaagacagcggaactgtacggggatatctctgtgcttgatacaccaaccttcctctacggcatgaccctcggcgaagaaatcgaggtcgagattgaaagagggaaaacgctgatcgtcaaacttgtctctatcggggaaccgcgtccggatgcgacgagagtcgtttattttgaactgaacggccagcctcgcgaagtggtcattaaagacgaaagcattaaatcgtccgttcatcaaaaggtgaaagccgaccgttcaaacccgaatcatatcgcggcatctatgccgggaacggtaatcaagcttcttgtaagcaaaggggaccaagtgaagaagggcgatcatttgatgatcaatgaagcgatgaaaatggaaacgaccgttcaggctccgttttcaggaactgttgaaaacattcacgttacaaacggagaagccattcaaaccggcgaccttctcattgaactgaaaaaataa

SEQ ID NO: 96880 - protein, 1147 aa, Bacillus licheniformis ATCC 14580
MSQQSIQKVLVANRGEIAIRVFRACTELNIRTVAIYSKEDSGSYHRYKADEAYLVGEGKKPIDAYLDIEGIIEIAKRNHVDAIHPGYGFLSENIQFAKRCEEEGIIFIGPTSEHLDMFGDKVKAREQAEKAGIPVIPGSDGPVADIAEVKQFAEKFGYPFIIKASLGGGGRGMRIVRDESELVESYNRAKSEAKAAFGNDEVYVEKLIEKPKHIEVQVIGDKEGNVVHLYDRDCSVQRRHQKVIEVAPSVSLSESLREKICDAAVKLAKNVEYVNAGTVEFLVANDEFFFIEVNPRVQVEHTITEMVTGVDIVQTQILIAAGLSLDSSEISIPNQDAITLHGYAIQSRVTTEDPSNNFMPDTGKIMAYRSGGGFGVRLDTGNSFQGAVITPYYDSLLVKLSTWALTFEQAAAKMVRNLQEFRIRGIKTNIPFLENVAKHEKFLTGQYDTSFIDTTPELFVFPKQRDRGTKMLTYIGNVTVNGFPGIDKKKKPEFDKPQIVKTDVDQPIASGTKQILDERGAEGLVKWVKDQEEVLLTDTTFRDAHQSLLATRVRTHDLKKIANPTAALWPELFSLEMWGGATFDVAYRFLKEDPWKRLEELRKEIPNTMFQMLLRSSNAVGYTNYPDNLIKKFVSESAAAGIDVFRIFDSLNWVKGMTLAIDAVRESGKLAEAAICYTGDILDPNRSKYNLEYYTSMAKELEAAGAHILGIKDMAGLLRPQAAYELVSALKETIDIPIHLHTHDTSGNGIFMYAKAIEAGVDIVDVAVSSMAGLTSQPSASSLYHALEGDKRRPQFNVDAVESLSQYWESVRKYYSEFESGMIAPHTEIYKHEMPGGQYSNLQQQAKGVGLGDRWNEVKEMYSRVNHLFGDIVKVTPSSKVVGDMALYMVQNNLTEDDIYERGESLDFPDSVVELFKGYIGQPHGGFPEKLQKLILKGQEPITVRPGELLEPVSFDAIKAEFLEKHGMELSDQDAVAYALYPKVFTEYVKTAELYGDISVLDTPTFLYGMTLGEEIEVEIERGKTLIVKLVSIGEPRPDATRVVYFELNGQPREVVIKDESIKSSVHQKVKADRSNPNHIAASMPGTVIKLLVSKGDQVKKGDHLMINEAMKMETTVQAPFSGTVENIHVTNGEAIQTGDLLIELKK

SEQ ID NO: 96881 - DNA, 3438 bp, Silicibacter pomeroyi DSS-3
  CDS (1)..(3438): transl_table=11
atgaccgatttcaagaagatcctgattgccaaccgtggcgagatcgccatccgcgtgatgcgcgccgccaacgagatgggcaagaagacggttgccgtctacgccgaagaggacaagctgggcctgcaccggttcaaggccgacgaggcctatcgcatcggcgagggcatgggcccggttgctgcctatctgtcgatccccgagatcatccgggtggccaaggaatgtggcgccgacgcgatccacccgggctatggcctgctgagcgagaacccagatttcgtcgatgcctgtgtccagaacggcatcaccttcatcggaccgcgtgccgagaccatgcgctcgctgggggacaaggccagcgcccgcaaggtggccatcgccgccggtgttccggtgatcccggcgaccgaggttctgggcgacgacatggacgcgatccgcaaggaggccgccgagatcggctatccgctgatgctcaaggcctcgtggggcggtggtggacgcggtatgcgccccatccacagcgaaaaggaactggccgaaaaggtcatggagggccggcgcgaggctgaagccgcattcggcaatggcgagggttatctggaaaagatgatcatccgcgcccgccatgtcgaggttcagatcctgggcgacaagcatggcgagatctatcacctgtgggagcgcgactgctcggtccagcgccgcaaccagaaggtggtcgaacgcgccccggccccctatctgagccaggcccagcgcgaagagctctgcgatctcggccgtcgcatctgcgcccatgtgaactatgaatgcgccggtaccgtcgaattcctgatggatatggacagcggcaatttctacttcatcgaggtcaacccgcgcgtgcaggtcgaacatacggtgaccgaagaggtgaccggcatcgacatcgtgcaggcccagatcctgatcgccgagggcaagcccctggccgaggccaccggcaaggccagccagggtgagatcgcgctgaacggccacgcgttgcagacccggatcaccaccgaggatccgctcaacaacttcatccccgactatggccgcatcaccgcctatcgctcggccaccggcatgggcatccgactggatggcggcacggcttatgcgggcggggtgatcacgcgctattacgactcgctgctgaccaaggtcaccgcctgggcgccgacgccggaaaaggccatcgcccggatggaccgcgccctgcgcgaattccgcatccgcggggtcagcaccaatatcgcctttgtcgagaacctgctgaagcacccgaccttcctgtcgaacgaatacaccaccaagttcatcgacacgacaccggatctgttccagttcaagaagcggcgcgaccggggcaccaaggtgctgacctatatcgccgacatcacggtgaatgggcatcccgaaacccgggaccgcccgatgcccgccgccgaagcccgcatgccgaagccgcccgccaagcgcggcgagccgcgcatgggcacccgcaacttgctggagcagaagggcccgcaggcggtggccgactggatgaaggcgcagcgccagctgctgatcaccgacacaaccatgcgcgatggtcaccagtcgctgctggcgacccggatgcgctcgatcgacatgatccgggtggcgcccgcctatgccgccaacctgccgcagctgttcagcgtcgaatgctggggcggcgcgacttttgatgtggcctatcgcttcctccaggaatgcccgtggcagcgcctgcgcgacctgcgcgaggcgatgcccaacctgatgacccagatgctgctgcgcggcgccaacggggtgggctataccaactatcccgacaacgtggtgcgcgaattcgtgcgccaggccgccaagggcatcgacgtgttccgcgtgttcgacagcctgaactgggtcgagaacatgcgcgtcgccatggatgccgtggtcgagcagaacaagatctgcgagggcacgatctgttataccggcgatatcctgaaccccgaacgcgccaagtatgacctgaaatactatgttgcgatgggcaagcagctgcgtgacgcgggcgcccatgtgctggggctcaaggatatggcgggcctgttgaaacccgccgccgcacgggtgctgatccgcgcgctcaaggaagaggtgggcctgcccatccatttccacacccatgacaccgccggtatcgccagcgccaccatcctcgccgcctctgaggcaggtgtggatgcggtcgactgcgcgatggacagtttctcgggcaataccagccaggcaacgctgggcaccgtggtcgaggcgctgcgccataccgaccgcgacaccgggctggacgtcaaggcgatccgcgagatcagcgattacttcgaagcggtgcgcgcgcaatacgcggcctttgaaagcgggcttcaggctccggcctccgaggtctatctgcacgagatgcccggcggccagttcaccaacctcaaggcgcaggcgcgctcgatggggttggaggaccgctggcacgaagtggcgcagatgtatgccgacgtgaaccagatgttcggcgatatcgtcaaggtgacccccagctccaaggtggtgggcgacatggcgctgatgatggtcagccagggcctgacccgcgcccaggtcgaggacccgaagagtgacgtggccttccccgactcggtcgtcgacatgatgcgcggcaacctgggccagccgccgggcggcttccccaccgtgatcctgtccaaggtgctgaagggcgaggcgcccaataccgagcgccccggcgcgcatctgccgcccgtcgatctggaagaggtgcggtccaaagtctcggccgagctggagggcaaggaggtcgatgacgaggacctgaacggatacctgatgtatcccaaggtgttcatggattacatgggccggcaccgtcagtacggacccgtccgcaccctgcccacccgcaccttcttttacgggatggaaccgggcgaagagatcaccgccgagatcgaccccggcaagacgctggaaatccgctgccaggccatcggcgagaccgacgaaaatggcgaggtcaaggtgttctttgaactcaacggtcagccccgggtgatccgggtgccgaaccggctggtgaagtccaccaccatgcagcgccccaaggccgagccgggcaatgccaaccacctgggcgcgccgatgcccggcgtggtggccacggtcgcggtacaggccgggcaacaggtcaaggcgggcgatctgctgctgaccatcgaggcgatgaagatggaaaccggcatccacgccgagcggggcgccaccgtcaaatcggtgcatgtccagcccggcggccagatcgacgccaaggacctgctggtcgagctggaataa

SEQ ID NO: 96882 - protein, 1145 aa, Silicibacter pomeroyi DSS-3
MTDFKKILIANRGEIAIRVMRAANEMGKKTVAVYAEEDKLGLHRFKADEAYRIGEGMGPVAAYLSIPEIIRVAKECGADAIHPGYGLLSENPDFVDACVQNGITFIGPRAETMRSLGDKASARKVAIAAGVPVIPATEVLGDDMDAIRKEAAEIGYPLMLKASWGGGGRGMRPIHSEKELAEKVMEGRREAEAAFGNGEGYLEKMIIRARHVEVQILGDKHGEIYHLWERDCSVQRRNQKVVERAPAPYLSQAQREELCDLGRRICAHVNYECAGTVEFLMDMDSGNFYFIEVNPRVQVEHTVTEEVTGIDIVQAQILIAEGKPLAEATGKASQGEIALNGHALQTRITTEDPLNNFIPDYGRITAYRSATGMGIRLDGGTAYAGGVITRYYDSLLTKVTAWAPTPEKAIARMDRALREFRIRGVSTNIAFVENLLKHPTFLSNEYTTKFIDTTPDLFQFKKRRDRGTKVLTYIADITVNGHPETRDRPMPAAEARMPKPPAKRGEPRMGTRNLLEQKGPQAVADWMKAQRQLLITDTTMRDGHQSLLATRMRSIDMIRVAPAYAANLPQLFSVECWGGATFDVAYRFLQECPWQRLRDLREAMPNLMTQMLLRGANGVGYTNYPDNVVREFVRQAAKGIDVFRVFDSLNWVENMRVAMDAVVEQNKICEGTICYTGDILNPERAKYDLKYYVAMGKQLRDAGAHVLGLKDMAGLLKPAAARVLIRALKEEVGLPIHFHTHDTAGIASATILAASEAGVDAVDCAMDSFSGNTSQATLGTVVEALRHTDRDTGLDVKAIREISDYFEAVRAQYAAFESGLQAPASEVYLHEMPGGQFTNLKAQARSMGLEDRWHEVAQMYADVNQMFGDIVKVTPSSKVVGDMALMMVSQGLTRAQVEDPKSDVAFPDSVVDMMRGNLGQPPGGFPTVILSKVLKGEAPNTERPGAHLPPVDLEEVRSKVSAELEGKEVDDEDLNGYLMYPKVFMDYMGRHRQYGPVRTLPTRTFFYGMEPGEEITAEIDPGKTLEIRCQAIGETDENGEVKVFFELNGQPRVIRVPNRLVKSTTMQRPKAEPGNANHLGAPMPGVVATVAVQAGQQVKAGDLLLTIEAMKMETGIHAERGATVKSVHVQPGGQIDAKDLLVELE

SEQ ID NO: 96883 - DNA, 3450 bp, Bacillus clausii KSM-K16
  CDS (1)..(3450): transl_table=11
atgaacgcattaaaatcgattaaaaaagtgctcgttgcaaatcgtggggagatcgctattcggatttttcgagcatgttcagagttgaacatccgcactgtcgctatttattcaaaagaggacacaggtgcttttcaccgctataaagcggatgaagcgtatctcgttggcgaaggaaaaaagccgattgatgcttatctggacattgaagacatcattgcgacagcaaaagcacatgatgttgatgcgattcacccaggctatgggtttttgtcagagaatatcgaattcgccagacgttgtcaggaagaagggctgatttttgtcgggcctgagcttgagcaccttcggatgtttggtgacaaaatacaggcacgggaacaagcattaaaagcagggttgcctgtcattccaggaagcgatggcccagttgctagcttagaggaagtccaagcatttgcggacgaacacggctatccgttcatcatcaaagcttccttaggcggaggcggtcgcggtatgcgtattgtccgcgaagaaaaggatgtaaaagaatcgtatgaacgggcgaagtctgaagcgaaatcagcgttcggcaacgatgaagtgtatgtagaaaaatttgtcgaacgccctaaacatatcgaagtgcaaattttagctgataagcacggaaatattgtccacttgtatgaacgggactgttcggtgcaacggcgccatcagaaagtagtcgaaattgcgccaagcgtatccctgtccgatgaagtgcgaaccaatatttgcgatgcagccgtcaacttgatgaaaaatgtcggctacgtaaacgccggtacggttgagtttctcgtcaccgatgacggaacattctattttattgaagtcaatcctcgtgtccaagtggaacacacgattacggaaatgattactggcatcgacatcgtgcagtcgcagttgaaaattgccgacggttacaaactccatgaaaaagaactcgacattcctaaacaagaagatatcgcttgttttggctacgcgatccagtcacgggtaacgacggaagaccctgcaaatgggtttatgccggatacgggaagaatcaatgcctatcgttcaagtggcggctttggtgttcgccttgatgctggaaacgggttccaaggcgctgtcattagcccccactacgattcgttgctcgtaaaagtatcaacgtgggcgttaacgtttgaggctgcagccttgaagatggtacgtaatctacgggaatttcggattcgcggcattaagacaaatattgcatttttggaaaatgtcgtcacgcacccgcagtttttaaatggcgaatacaatactcattttatagacgaaacacctgagctatttgtctttcctaaacgaaaagaccgggggacaaaaatgttgtcctttatcggagagacggttgtgaatggctacccaggtttggaaaaaggggaaaagccgctgtttgacaaaccgattgtccctgcatttaataaaaacgagccgataccaacgggcacaaagcaaattttagatgggcgtgggccagaaggattagcgaaatgggtcaagcaagaacaaaaagtgttgttgaccgatacgacattccgcgatgcccaccagtcactgctagcgacacgtgtgcgcacgtatgatttaaagaaaattgctgaacctacagcgcgcttgcttcctgatttgttttctcttgagatgtggggcggagcgacttttgatgtcgcgatgcgttttctgcatgaaaatccgtgggaacggcttcttacattgcgtgaaaaagtgcctaatgtgctgttccaaatgcttttacgcgcttccaatggcgtcggttatacaagctatcctgacaacgtcattgctgattttgtccagaagtcggctgaagcaggcatcgacgttttccggatctttgacagcttgaactgggtggaagcaatgaagccagccattgaagctgtgggggcgagcggaaaagtggcagaagcggctgtatgctacacgggcgatattttggacaaaaatcgcgataaatatgatttaaattactacaaaaaaatggccaaagaattagaagcgtcaggcgcccatattcttgccattaaagatatggctggattgttaaaaccggaggcggcctaccaacttgtctctgagttaaaagaagcagtcgacattccgattcatttgcatatgcacgacacgagcggcaacggtattttcacgtatgcccgtgccgtcgatgcaggcgttgatattgtcgatgtcgccgtcagctcaatggcaggcctgacttcgcaaccaagcgcaaacagcttgtattatgcattagcggaaaaaagccgccaaccaaaaatggatgttggcaattatgaaaagctcgatcaattttggcatgacacacgcaaattttaccgtgggtttgaaagcggcatgaatgctccgcatacagaagtgtacgagcatgaaatgccagggggtcaatatagcaaccttcagcaacaagcaaaagcagttggactgtacaaccgttggaatgaagtgaaacgaatgtaccgtcgcgttaacgacttgtttggcgatattgtaaaagtaacgccatcctccaaagtagttggcgatatggccctttatatggtacaaaatgatttaacggaagaagccatttttgagcgtggcgaaagccttgattttcctgattccgtagtagagtttttccaagggcacttaggccagccgtacaaaggctttcctgaaaagctgcagcgcattattttaaaaggcaagcagccgattgaggggcgccctggcgaacatatgaagccagtggactttaaagcagttggcaaaagtttatttgaagagcttggccgtcaagtcacgagccatgacgtgctttcctatgccttatatccaaaagtgtttatggagtatgagcaattttgccaacgatttggcgatgtgtccgtcctggatacgccgacattcttttacggcctccatttaggcgaggaaattgaagttgaaatcgaacgtgggaaaacgttaattgtcaagcttgtatctgtgtcagacccacaaccagatgggacacggatcgtctattttgaactaaatgggcaacctcgtgaagttcatattcaagatttggatgtgaagacaacaaccgtgacacgtccgaaagcagagaaaaacaacccgagccatattggcgcttcaatgccaggaacggtcattaaggcccttgtagctgaaggcgacaaagtggaaaaaggcgaccatttgatgattactgaagcgatgaaaatggagacaactgtccaagcagcaattagcggtacggttaaaaaagtgtatgcacgagatggagagtcgatttcaacaggcgacttgctcattgaactttccgagtag

SEQ ID NO: 96884 - protein, 1149 aa, Bacillus clausii KSM-K16
MNALKSIKKVLVANRGEIAIRIFRACSELNIRTVAIYSKEDTGAFHRYKADEAYLVGEGKKPIDAYLDIEDIIATAKAHDVDAIHPGYGFLSENIEFARRCQEEGLIFVGPELEHLRMFGDKIQAREQALKAGLPVIPGSDGPVASLEEVQAFADEHGYPFIIKASLGGGGRGMRIVREEKDVKESYERAKSEAKSAFGNDEVYVEKFVERPKHIEVQILADKHGNIVHLYERDCSVQRRHQKVVEIAPSVSLSDEVRTNICDAAVNLMKNVGYVNAGTVEFLVTDDGTFYFIEVNPRVQVEHTITEMITGIDIVQSQLKIADGYKLHEKELDIPKQEDIACFGYAIQSRVTTEDPANGFMPDTGRINAYRSSGGFGVRLDAGNGFQGAVISPHYDSLLVKVSTWALTFEAAALKMVRNLREFRIRGIKTNIAFLENVVTHPQFLNGEYNTHFIDETPELFVFPKRKDRGTKMLSFIGETVVNGYPGLEKGEKPLFDKPIVPAFNKNEPIPTGTKQILDGRGPEGLAKWVKQEQKVLLTDTTFRDAHQSLLATRVRTYDLKKIAEPTARLLPDLFSLEMWGGATFDVAMRFLHENPWERLLTLREKVPNVLFQMLLRASNGVGYTSYPDNVIADFVQKSAEAGIDVFRIFDSLNWVEAMKPAIEAVGASGKVAEAAVCYTGDILDKNRDKYDLNYYKKMAKELEASGAHILAIKDMAGLLKPEAAYQLVSELKEAVDIPIHLHMHDTSGNGIFTYARAVDAGVDIVDVAVSSMAGLTSQPSANSLYYALAEKSRQPKMDVGNYEKLDQFWHDTRKFYRGFESGMNAPHTEVYEHEMPGGQYSNLQQQAKAVGLYNRWNEVKRMYRRVNDLFGDIVKVTPSSKVVGDMALYMVQNDLTEEAIFERGESLDFPDSVVEFFQGHLGQPYKGFPEKLQRIILKGKQPIEGRPGEHMKPVDFKAVGKSLFEELGRQVTSHDVLSYALYPKVFMEYEQFCQRFGDVSVLDTPTFFYGLHLGEEIEVEIERGKTLIVKLVSVSDPQPDGTRIVYFELNGQPREVHIQDLDVKTTTVTRPKAEKNNPSHIGASMPGTVIKALVAEGDKVEKGDHLMITEAMKMETTVQAAISGTVKKVYARDGESISTGDLLIELSE

SEQ ID NO: 96885 - DNA, 3444 bp, Staphylococcus epidermidis RP62A
  CDS (1)..(3444): transl_table=11
ttgaaacaaataaagaaattacttgttgctaaccgtggtgaaatcgccattagaatttttagagcggcagcagaattaaatatcagtacagtagcaatttattctaatgaagataaaagttcgttacatagatataaagcagatgaatcctatctagttggaagtgatttaggacctgctgaaagttatttgaatatcgaacgtatcatcgaagtagctcttcgcgcaggtgtcgatgcaattcatcctgggtatggttttttaagtgaaaatgaacaatttgcacgccgatgtgctgaggaaggcattaaatttataggtccgcatcttgaacatctagacatgtttggagataaggttaaggctagaacaactgctattaacgctaacttacctgtaatcccgggtacagatggtcctattgaaagttttgaagctgcagaacagtttgctaatgaagcaggttacccacttatgattaaggccacaagcggtggcggtggtaaaggtatgcgaatcgttcgtgaatcaagcgaattagaagacgctttccatcgtgcgaaatcagaagccgaaaagtcatttggtaatagcgaagtttatatcgaaagatatattgataatccaaagcatatagaggttcaagttattggtgatgaattcgggaatatcattcatttgtatgaaagagattgctccgtacaacgacgtcatcaaaaggttgttgaagttgcaccttcagtaggtctttctaacaaattaagagagcgaatttgtgatgccgcaattcaactgatggaaaatataaaatacgtcaacgctggaacagtagaatttttagtttctggggatgaatttttcttcattgaggttaatccacgtgttcaagttgagcatacaattactgaaatgattactggtatagacattgtgaaaacgcaaattttagttgctgatggagaatcgttatttggagataaaatctctatgccacagcaaaatgaaattcaaacattagggtatgcgatacaatgtcgtataacaactgaagatcctactaatgattttatgccagattctggcacaattattgcatatcgatcaagtggcggttttggtgtgagacttgatgcaggggatggattccaaggtgcagaaatttcaccttactacgattcactattagttaagctttctacacatgccgtttcatttaaacaagctgaagagaaaatggaacgttcattacgcgaaatgcgaattcgtggcgtaaagacgaatattccatttctcatcaatgttatgcgtaatgataaatttagaagtggtgattatactactaaatttattgaagaaacacctgaacttttcgatattgcaccgacattggacagaggtaccaagactttagagtatattggtaatgtgacgataaacggatttcctaatgtagaaaagcgtccaaaaccagaatatgaatctaccaaaatcccaaaaatttctcaaaagaaaatcaatcagttatttggaacaaaacaaattcttgagcaacatggaccaacaggtgttacaaattgggttagagaacaagaagatgttttaattaccgatactacatttagagatgcacaccaatctttacttgcaacacgtgtaagaacaaaagatatgatgaacattgcatctaaaactgctgaagtttttaaagatagtttttcattagaaatgtggggtggtgcaacatttgatgtcgcctataatttcttgaaagagaatccatgggaacgtttagaaagattgcgcaaagccattccgaatgtgttattccaaatgttattacgagcttcgaacgcagtaggttataaaaactatcctgataatgtaattaagaaattcgttcatgaaagtgcaaaagctggtgtagatgttttccgtatattcgactcattgaactgggttgatcaaatgaaagtagcgaatgaagctgttcaagaagctggaatggtatctgagggtacaatttgctatacaggtgatattttaaatgctgaacgttccaatatttatactttagattattacgttaaaatggctaaagaactggaaagagaaggattccatatattagcaattaaagatatggctggtttattgaaaccgaaagcagcttacgaattaattggtgaattacgtgaggcaacacatcttccaattcatttacatacacatgatactagtggaaatggattgttgacatataaacaagcaattgatgctggcgtagatattatagatactgctgttgcatctatgagtggtttaacgagtcaaccaagtgcaaattcattatattatgcactaaatggatttccacgtaatttaagaactgatattgatgggttagaagagttgagtcattactggtctgtagtcagaccttactatgcagactttgagagtgatatcaaatcaccaaatacagaaatttatcaacatgaaatgccaggtggccaatattcaaacttaagtcaacaagctaaaagtttaggattgggcgaacgttttgatgaagtcaaagagatgtatcgtcgtgtcaacttcctgtttggagatcttgtaaaagtaacaccatcttcaaaggtagttggagatatggcactatatatggtgcaaaatgatcttgatgaagatacggtcatcaatgatggttataaattagatttcccagaatctgttgtgtcattctttaaaggtgacattggacaacctgtcaacggattcaacaagaaattgcaagatgttattttaaaaggacagcaaccaattactgaaagaccaggtgaatacttggagccggtcgattttgaagcaatccgtcaagaattaagcgacatacaacaagacgaggtaacagaacaagatataattagttatgtactttatccgaaggtatataaacaatatattcaaacgaaagagcaatttggtaatgtatctttactggatacaccgacattcttatttggcatgcgtaatggtgaaacagttgaaattgaaattgatactggtaaacgtctaattattaaattagaaacaatcagtgaaccagatgagaatggtaaacgtacaatttattacgctatgaatggtcaagcaagacgtatttatattcaagatgaaaatgttaaaacgaatgctaatgttaaacctaaggcggataaatcaaatccaaatcatattggtgctcaaatgcctggttctgtaactgaagtcaaagtgtctgtaggcgatgaagttcaagctaatcagccattattaatcactgaagcaatgaagatggaaacgacgattcaggcaccatttgatggaattattaaacaaatcaatgttgctaatggagatgccattgccacaggagatttattagtggaaattgaaaagtaa

SEQ ID NO: 96886 - protein, 1147 aa, Staphylococcus epidermidis RP62A
MKQIKKLLVANRGEIAIRIFRAAAELNISTVAIYSNEDKSSLHRYKADESYLVGSDLGPAESYLNIERIIEVALRAGVDAIHPGYGFLSENEQFARRCAEEGIKFIGPHLEHLDMFGDKVKARTTAINANLPVIPGTDGPIESFEAAEQFANEAGYPLMIKATSGGGGKGMRIVRESSELEDAFHRAKSEAEKSFGNSEVYIERYIDNPKHIEVQVIGDEFGNIIHLYERDCSVQRRHQKVVEVAPSVGLSNKLRERICDAAIQLMENIKYVNAGTVEFLVSGDEFFFIEVNPRVQVEHTITEMITGIDIVKTQILVADGESLFGDKISMPQQNEIQTLGYAIQCRITTEDPTNDFMPDSGTIIAYRSSGGFGVRLDAGDGFQGAEISPYYDSLLVKLSTHAVSFKQAEEKMERSLREMRIRGVKTNIPFLINVMRNDKFRSGDYTTKFIEETPELFDIAPTLDRGTKTLEYIGNVTINGFPNVEKRPKPEYESTKIPKISQKKINQLFGTKQILEQHGPTGVTNWVREQEDVLITDTTFRDAHQSLLATRVRTKDMMNIASKTAEVFKDSFSLEMWGGATFDVAYNFLKENPWERLERLRKAIPNVLFQMLLRASNAVGYKNYPDNVIKKFVHESAKAGVDVFRIFDSLNWVDQMKVANEAVQEAGMVSEGTICYTGDILNAERSNIYTLDYYVKMAKELEREGFHILAIKDMAGLLKPKAAYELIGELREATHLPIHLHTHDTSGNGLLTYKQAIDAGVDIIDTAVASMSGLTSQPSANSLYYALNGFPRNLRTDIDGLEELSHYWSVVRPYYADFESDIKSPNTEIYQHEMPGGQYSNLSQQAKSLGLGERFDEVKEMYRRVNFLFGDLVKVTPSSKVVGDMALYMVQNDLDEDTVINDGYKLDFPESVVSFFKGDIGQPVNGFNKKLQDVILKGQQPITERPGEYLEPVDFEAIRQELSDIQQDEVTEQDIISYVLYPKVYKQYIQTKEQFGNVSLLDTPTFLFGMRNGETVEIEIDTGKRLIIKLETISEPDENGKRTIYYAMNGQARRIYIQDENVKTNANVKPKADKSNPNHIGAQMPGSVTEVKVSVGDEVQANQPLLITEAMKMETTIQAPFDGIIKQINVANGDAIATGDLLVEIEK

SEQ ID NO: 96887 - DNA, 3510 bp, Ralstonia eutropha JMP134
  CDS (1)..(3510): transl_table=11
atgaactacaccccaatcaaatccctgctgattgccaaccgatccgaaatcgcgattcgcgtgatgcgcgccgccgccgagatgaacatccgcacggttgcgatctattcgaaggaagaccggctcgcgctccatcgcttcaaggccgatgaaagctaccttgtcggcgagggcaagaagccgctggcggcctacctcgatatcgacgacatcttgcgcattgcgcgccaggcgaaggtcgacgccattcacccgggctacggcttcctctcggagaaccctgatttcgcgcaggccgtgatggatgccggtatccgctggatcggcccgtcgcccgatgtcatgcgcaagctcggcaacaaggtcgcggcgcgcaatgccgcgatcgaggcgggcgtgccggtgatgccggccaccgacccgttgccgcaagatctggacgagtgcaagcgcctggcagccggcatcggctatccgctaatgctcaaggcgagctggggtggcggcggacgcggcatgcgtatgctggagaatgaacaggatctcgaaacgttgctgccggcggcaaggcgggaggcgctggctgcgttcggcaacgatgaggtctatgtcgagaaactggtacgcaatgcgcgccacgtcgaagtgcaggcgctcggcgatacgcatggcaacctggtgcacctgtacgagcgcgattgtaccgtgcagcggcgcaaccagaaggtggtggagcgcgcgcctgcgccatacctcgacgccgccggtcgcgcagcactgtgcgacgcggcgatgcggctgatgcgcgcggtcggctacacgcatgcgggcacgatcgaattcctgatggatgccgactccggccagttctacttcatcgaagtcaatccgcgcatccaggtcgagcacacggtcaccgagatggtcaccggcgtcgatatcgtcaaggcgcagatccgcatcactgaaggcggccatatcggcatgaccgagaacacgcgcgacgctgagggcaagatcgtggtgcgcgctgcgggtgtgccggaacagtcggggatttcgctgaacgggcatgccttgcaatgccggatcaccacagaggaccctgagaacggcttcctgcccgactatggccgcctgtccgcgtatcgcagcgccgcaggcttcggcgtgcggctcgatgccggcaccgcctacggcggcgcggtgatcacgccctactacgattcgctgctggtcaaggtcacgacctgggcgcccactgctcccgagtcgatccggcgcatggaccgcgcgctgcgcgagttccgcatccgcggcgtcgcgtccaacctgcagttcctcgagaacgtcatcaaccacccatcgttcaaggccggtgacgtcaccacgcgctttatcgacaagacgcccgaactgctggcgttcaccaagcggcaggatcgcgcgaccaagctgctgcactatctcggcgatgtctgcgtcaatggccatccagaaatggcgggccgctcgctgccgtccttgccactgcccgcaccggtgcttccctcggtagacgcaacgagcccggtgccgaccggcacgcgcgatctgctgcgcgagcttggtgcagagaagttctcgcaatggatgctcgagcagaagcgggtgctgctgaccgacaccaccatgcgcgatgcgcaccagtcgctgttcgccacgcgcatgcgcaccgccgacatgctgccgatcgcgccgttctacgcgcgcgaactgccgcagctgttctcgatggagtgctggggtggcgcgacgttcgatgtggcgctgcgcttcctcaaggaagacccgtggcagcgtctcgagcaactgcgcgagcgggtgccgaacatcctgttccagatgctgttgcgcggctcgaacgcggtcggctacaccaactacgcggacaacgtggtgaagttcttcgtgcgccaggccgccagcgccggcgtggacgtgttccgcgtgttcgattccctgaactgggtgcgcaatatgcgcgtggccatcgatgccgtgggcgaaagcggcgcgctatgcgaaggcgcgatctgctacaccggcgacgtcttcgacggctcccgtcccaagtacgacctgaagtactacgtcggcatcgcgcgcgagctgaagcaggccggcgtgcatgtgctgggcatcaaggacatggccggcatctgccgtccgcaagcggcggccgcgctggtcaaggcgctcaaggaagagaccggcctgcccgtgcacttccatacccacgacaccagcggcatctcggccgcgtccgcgctggccgccatcgaggcaggctgcgatgcagtggatggtgcgctcgatgccatgagcggactgacgtcgcaaccgaacctgtctagcatcgcggcggcgctggccggcagcgagcgcgacccggggctcagcctggagcggctgcacgaggcgtcgatgtactgggaaggcgtgcgtcgctactacgcgccgttcgagtcggaaatccgcgcgggtaccgccgatgtctaccgccacgaaatgcccggcggccagtacaccaacctgcgcgagcaggcacgttcgctcggtatcgagcatcgctggaccgaggtgtcgcgcgcgtacgcagacgtcaacaagatgttcggcgatatcgtgaaggtgacgccgacttcaaaggtagtcggcgacatggcgctgatgatggtcgccaacgacatgagcgcagccgacgtctgcgatccggcccgcgaagttgccttccccgaatcggtggtctcgctgttcaagggcgagctgggcttcccgcccgacggcttccccgcggaactgtcgcgcaaggtgctgcgcggcgagccgcccgcaccttaccgcccgggcgaccagattccggcggttgacctcgaggcagcgcgcgccgaagccagcgcggcgtgcgaacagcctgtcgacgaccgccagctggcgtcgtacctgatgtatcccaagcaggccgttgcttatcacgcgcacgtgcgcacctacagcgatacctcggtggtgccgacgccggccttcctgtacggcctgcagccacaggaagaagtgggcatcgacatcgagccgggcaagacgctgctggtatcgctgcagggcacgcatgccgacgcggaagagggcaacatcaaggtccagttcgaactgaacgggcagtcgcgcacggcggtgatcgagcagcgcagcaccgtgcaggccggtacgtcacgccacagccgtccggttgcggaccctgagaatccgctgcatatcgccgcgccgatgccaggctcgatcgtgaccgtagcggtccagccgggccaacgcgtggcggcgggcacgacgctgattgcgttggaagccatgaagatggaaacccacatcgcggctgagcgcgactgtgagatcgcggccgtgcatgtgaagtctggtgaccgggtgtcggcgaaggatctgctgatcgagctgaagggaacggagtaa

SEQ ID NO: 96888 - protein, 1169 aa, Ralstonia eutropha JMP134
MNYTPIKSLLIANRSEIAIRVMRAAAEMNIRTVAIYSKEDRLALHRFKADESYLVGEGKKPLAAYLDIDDILRIARQAKVDAIHPGYGFLSENPDFAQAVMDAGIRWIGPSPDVMRKLGNKVAARNAAIEAGVPVMPATDPLPQDLDECKRLAAGIGYPLMLKASWGGGGRGMRMLENEQDLETLLPAARREALAAFGNDEVYVEKLVRNARHVEVQALGDTHGNLVHLYERDCTVQRRNQKVVERAPAPYLDAAGRAALCDAAMRLMRAVGYTHAGTIEFLMDADSGQFYFIEVNPRIQVEHTVTEMVTGVDIVKAQIRITEGGHIGMTENTRDAEGKIVVRAAGVPEQSGISLNGHALQCRITTEDPENGFLPDYGRLSAYRSAAGFGVRLDAGTAYGGAVITPYYDSLLVKVTTWAPTAPESIRRMDRALREFRIRGVASNLQFLENVINHPSFKAGDVTTRFIDKTPELLAFTKRQDRATKLLHYLGDVCVNGHPEMAGRSLPSLPLPAPVLPSVDATSPVPTGTRDLLRELGAEKFSQWMLEQKRVLLTDTTMRDAHQSLFATRMRTADMLPIAPFYARELPQLFSMECWGGATFDVALRFLKEDPWQRLEQLRERVPNILFQMLLRGSNAVGYTNYADNVVKFFVRQAASAGVDVFRVFDSLNWVRNMRVAIDAVGESGALCEGAICYTGDVFDGSRPKYDLKYYVGIARELKQAGVHVLGIKDMAGICRPQAAAALVKALKEETGLPVHFHTHDTSGISAASALAAIEAGCDAVDGALDAMSGLTSQPNLSSIAAALAGSERDPGLSLERLHEASMYWEGVRRYYAPFESEIRAGTADVYRHEMPGGQYTNLREQARSLGIEHRWTEVSRAYADVNKMFGDIVKVTPTSKVVGDMALMMVANDMSAADVCDPAREVAFPESVVSLFKGELGFPPDGFPAELSRKVLRGEPPAPYRPGDQIPAVDLEAARAEASAACEQPVDDRQLASYLMYPKQAVAYHAHVRTYSDTSVVPTPAFLYGLQPQEEVGIDIEPGKTLLVSLQGTHADAEEGNIKVQFELNGQSRTAVIEQRSTVQAGTSRHSRPVADPENPLHIAAPMPGSIVTVAVQPGQRVAAGTTLIALEAMKMETHIAAERDCEIAAVHVKSGDRVSAKDLLIELKGTE

SEQ ID NO: 96889 - DNA, 3465 bp, Rhodobacter sphaeroides 2.4.1
  CDS (1)..(3465): transl_table=11
atggccgagttccgaaagatcctcatcgccaaccgtggtgagatcgccatccgggtgatgcgggcggcaaacgagatgggcaagaagacggtcgccgtctatgccgaggaagacaagctctcgctccaccgcttcaaggcggacgaggcctaccggatcggcgagggcctctcgcccgtgggcgcctatctctcgatccccgagatcatccgcgtggcgcagatgtcgggcgccgatgcgatccacccgggctacgggcttctgtcggagaaccccgatttcgtcgaggcctgcgacgcagcgggcatcgccttcatcggcccgaaggccgagacgatgcgcgcgctcggcgacaaggcttcggcccgccgcgtggccatggccgcgggcgtgccggtgatcccggcgaccgaggtgctgggcgacgatatggaggagatcaagcggcaggcggccgagatcggctatccgctgatgctcaaggcctcgtggggcggcggtgggcgcggcatgcggcccatcacttccgaggccgagctggccgacaaggtgcgcgagggccgacgcgaggccgaggccgccttcggcaacggcgagggctatctcgagaagatgatccagcgcgcgcgccacgtcgaggtgcagatcctcggcgacaaatacggcgcgatctaccatctctacgagcgcgactgcaccgtgcagcggcgcaaccagaaggtcgtcgagcgcgcgcccgcgccttatctcaccgaggagcagcggacagagatctgcgagctcggccgccggatctgcgcccatgtgaattacgaatgcgcgggcacggtcgagttcctgatggatatggactcggagaaattctatttcatcgaggtcaatccgcgggttcaggtcgaacataccgtcaccgaggaagtgacgggcatcgacatcgtgcaatcccagatccgcatcgcggaaggggcgacgctggccgaggcaaccggatgcccgagccaggacgacatcaagctctcgggccatgcgctgcagtgccgcgtcacgaccgaggatccgcagaacaatttcattcccgactacggccggctcaccgcctatcgctcggccacgggcatgggcatccggctggacggcggcacggcctatgccgggggcgtcatcacccgctattacgattcactcctcgtgaaggtgacggcctgggcccccacgcccgaaaaggccatcgcgcggatggaccgggcgctgcgcgagttccgcatccggggcgtggccaccaacatcgccttcgtcgagaacctgctgaagcacccgagtttcctcgactattcctacacgacgaaattcatcgacacgacgcccgacctcttcaacttcaagccgcgtcgtgaccgggcgacgaagatcctgacctacatcgccgacatcaccgtgaacgggcaccccgagacggccggccgggtccgcccctcggccgagctgaaggatccgaaggcacccgagcccaagggcgcaccgcagcccggcacgcggaccctcctcgaggagaagggcccgcaggcggtggccgactggatggccgcgcagacccgcgtgctgatgaccgacacgacgatgcgcgacggccaccagagcctgctcgccacccggatgcgctcgatcgacatgatcaaggtcacgcccgcctatgcggcgaacctcggcggcctcttctcggtggaatgctggggcggcgccaccttcgatgtggcctatcgcttcctgcaggaatgtccctggcagcggctgcgcgacatccgcgcccggctgcccaacgtcatgacgcagatgctgctgcgcgcctcgaacggggtcggctatacgaactaccccgacaatgtggtgcaggaattcgtccgtcaggcggccgaaaccggcgtcgacgtgttccgcgtgttcgactcgctcaactgggtcgagaacatgcgcgtggcaatggatgcggtgatcgaggccaacaaggtctgcgagggcacgatctgctacacgggcgacctgctcgatcccgaccgctccaaatacgatctgaactactatgtcggcatgggccgcgcgctgcgcgacgcgggcgcgcatgtgctgggtctgaaggacatggccgggcttctgaagcctgccgccgcccgcgtgctggtgaaggcgctgaaggaggaggtgggcctgccgatccacttccacacccacgacacgagcggaattgcgggcgcgaccgtgctcgccgcctgcgatgccggggtggatgcggtcgatgcggcgatggacgccttctcgggcggcacctcgcagccctgcctcggctcgatcgtcgaggcgctgaagcacaccgaccgcgacacgggcctcgacatcgcggcgatccgcgagatctcggactactggggccatgtgcgccagcagtattcggccttcgaatcgggcctgccctcgcccgcctccgaggtctatctgcacgagatgcccggcggccagttcaccaacctcaaggcgcaggcgcgctccatggggctcgaggaacgctggtccgaggtggcgcaggcctatgccgacgcgaaccggatgttcggcgacatcgtgaaggtcacgccctcgtcgaaggtggtgggcgacatggcgctgatgatggtggcgcaggggctgacgcgggaagaggtcgaggatcccgaggtcgaggtgagcttcccggactcggtcgtggacatgctcaagggcaatctcggccagccccacggcggctggcccgagccgatcctgaagaaggtgctgaagggcgaggcaccctcgaccgagcgaccgggcgcgcatctgccgcccgtcgacatcgcagccgcgcgcgagaagctcctgtcggagatcaagcagggcgacgacgatccgctcgacacggccgtcgatgccgaggatctgaacggctacctcatgtatcccaaggtcttcaccgactaccgcgcccgccacaggatctacgggccggtgcggacgctgccgacccggaccttcttctacgggatggagccgggcgaggagatctcggccgaaatcgaccccggcaagacgctcgagatccggctgtccgccgtgggcgagacgtcggacgacggcgatgccaaggtgttcttcgagctgaacggccagccgcgggtgatccgcgtggccaaccgggcggtgaaggccaagaccgcgacccggcccaaggcgcaggacggcaatccggcccatgtcggcgccccgatgccgggttcggtcgcctcggtcgcggtctcggcgggccagaaggtgaagccgggcgatctcctcgtcaccatcgaggcgatgaagatggagaccgggctccatgccgaccgtgcggccaccgtgaaggctgtccatgtcgggcccggcgcgcagatcgaggcgaaggacctgctggtcgaactcgaggactga

SEQ ID NO: 96890 - protein, 1154 aa, Rhodobacter sphaeroides 2.4.1
MAEFRKILIANRGEIAIRVMRAANEMGKKTVAVYAEEDKLSLHRFKADEAYRIGEGLSPVGAYLSIPEIIRVAQMSGADAIHPGYGLLSENPDFVEACDAAGIAFIGPKAETMRALGDKASARRVAMAAGVPVIPATEVLGDDMEEIKRQAAEIGYPLMLKASWGGGGRGMRPITSEAELADKVREGRREAEAAFGNGEGYLEKMIQRARHVEVQILGDKYGAIYHLYERDCTVQRRNQKVVERAPAPYLTEEQRTEICELGRRICAHVNYECAGTVEFLMDMDSEKFYFIEVNPRVQVEHTVTEEVTGIDIVQSQIRIAEGATLAEATGCPSQDDIKLSGHALQCRVTTEDPQNNFIPDYGRLTAYRSATGMGIRLDGGTAYAGGVITRYYDSLLVKVTAWAPTPEKAIARMDRALREFRIRGVATNIAFVENLLKHPSFLDYSYTTKFIDTTPDLFNFKPRRDRATKILTYIADITVNGHPETAGRVRPSAELKDPKAPEPKGAPQPGTRTLLEEKGPQAVADWMAAQTRVLMTDTTMRDGHQSLLATRMRSIDMIKVTPAYAANLGGLFSVECWGGATFDVAYRFLQECPWQRLRDIRARLPNVMTQMLLRASNGVGYTNYPDNVVQEFVRQAAETGVDVFRVFDSLNWVENMRVAMDAVIEANKVCEGTICYTGDLLDPDRSKYDLNYYVGMGRALRDAGAHVLGLKDMAGLLKPAAARVLVKALKEEVGLPIHFHTHDTSGIAGATVLAACDAGVDAVDAAMDAFSGGTSQPCLGSIVEALKHTDRDTGLDIAAIREISDYWGHVRQQYSAFESGLPSPASEVYLHEMPGGQFTNLKAQARSMGLEERWSEVAQAYADANRMFGDIVKVTPSSKVVGDMALMMVAQGLTREEVEDPEVEVSFPDSVVDMLKGNLGQPHGGWPEPILKKVLKGEAPSTERPGAHLPPVDIAAAREKLLSEIKQGDDDPLDTAVDAEDLNGYLMYPKVFTDYRARHRIYGPVRTLPTRTFFYGMEPGEEISAEIDPGKTLEIRLSAVGETSDDGDAKVFFELNGQPRVIRVANRAVKAKTATRPKAQDGNPAHVGAPMPGSVASVAVSAGQKVKPGDLLVTIEAMKMETGLHADRAATVKAVHVGPGAQIEAKDLLVELED

SEQ ID NO: 96891 - DNA, 3519 bp, Burkholderia sp. 383
  CDS (1)..(3519): transl_table=11
atggctgccgtgactccaacccccatccagtccatcctgatcgcgaaccgctcggaaatctcgattcgcgtgatgcgtgccgccgccgagctgaacatccgcacggtggcgatctattcgaaggaagaccgcctggcgctgcatcgcttcaaggcggacgagagctacctgatcggtgaaggccgcaagccgctcgccgcgtatctcgacatcgacgacatcctgcgtgtcgcgcggcaggccaacgtcgacgcgatccaccccggttacggcttcctgtccgagaaccccgagttcgcgcaggccgtgatcgatgcgggcatccgctggatcggcccgtcgcccgacgtgatgcgcacgctcggcaacaaggtggccgcgcgtaacgcggcgatcgccgccggcgtgccggtgatgcccgcgaccgcgccgctgccggacgatctcgccgtatgcaaggcgctggctgaagaagtcggctatccgctgatgctgaaggcgagctggggcggcggcggacgcgggatgcgcgtgctcgagaacgagcgcgacctcgagacgctgctgcccgtcgcgcgacgcgaggcgctggccgcgttcggcaacgacgaggtgtatgtcgagaagctcgtgcgcaatgcgcgccacgtcgaggtgcaggtgctcggcgatacgcacggcaccgtcgtgcatttgtacgaacgcgactgcacggtgcagcggcgcaaccagaaggtggtcgaacgcgcaccggcgccgtatctcgatcacgatggccggcacgcgctgtgcgaatccgcgctgcgcctgatgcgcgcggtcggctatacgcatgcgggcaccgtcgagttcctgatggatgccgacaccggccagttctacttcatcgaggtgaacccgcgcatccaggtcgagcacacggtgaccgagatgatcaccgggatcgacatcgtgaaggcgcagatccgcatcacggaaggtgggcggatcggtctttccgacgatgtcgttgatggcgccggcacgcttgtcgaacgtgcggctggcgtgccggaacagcacgcgattccgctgaacggcaacgcactgcaatgccggatcacgactgaagatccggagaacgacttcctgcccgattacgggcggctcaccgcctatcgcagcgcggccggcttcggcgtgcggctcgatgcgggcacggcctacggcggcgcggtgatcacgccgtactacgactcgctgctcgtgaaggtgacgacgtgggcgccgacggcggccgaatcgattcaccggatggatcgcgcgctgcgcgagttccggattcgcggcgtcacgtcgaacctgcagttcctcgagaacgtgatcaaccatccggccttcatcgcgggcgaggtgacgacgcgcttcatcgacaggacccctgaactgctcgaattcgcgaagcgcggcgaccgcgcgacgaagctgctgcgctatctcggcgagctgaacgtgaacggcaacgcggagatgagcggccgcacgctgccggcgctgccgctacaaaaaccggtgctgccgaagatcgatacgaccgcggcgatcccggccggcacgcgcgatcgcctgcgcgagcttgggccggagaagttctcacagtggatgctcgaccagaagcaggtgctgctgaccgacacgacgatgcgcgacgcgcaccagtcgctgttcgcgacgcgcatgcgcacggccgacatgctgccgatcgcgccgttctacgcacgtgagctgtcgcagctgttctcgctcgaatgctggggcggcgcgaccttcgacgtcgcgctgcgcttcctgaaggaagacccgtgggagcggctcgcgctgctgcgcgaacgcgtgccgaacatcctgttccagatgctgctgcgcggctcgaacgcggtcggctatacgaactacgcggacaacgtcgtgcgcttcttcgtgcagcaggccgcgagcgcgggcgtcgacgtgttccgcgtattcgattcgctgaactgggtgcgcaacatgcgcgtggcgatcgacgcggtgggcgagagcgggatgctatgcgaaggcgcgatctgctacaccggcgacctgttcgacacgtcgcgcgcgaagtacgacctcaagtactacgtcggcatcgcgcgtgaactgcagcaggccggcgtgcacgtgctcggcatcaaggacatggccggcatctgccgtccgcaggccgtcgcgacgctcgtgaaggcgctgaaggaggaaaccgggctgcccgtgcatttccacacgcacgacacgagcggcatcgccgcggcgtcggtgctcgcggcggtggaggcgggttgcgacgcggtggacggcgcgctcgacgcgatgagcgggctcacgtcgcagccgaacctgtcgagcatcgcggcggcgctggccggtagcgtgcgcgaccccggcctcaatgcggaccgcctgcacgaagcgtcgatgtactgggagggcgtgcgccgctactacgcgccgttcgaatcggagatccgcgcgggcacggccgacgtctatcgccacgagatgcccggcggccagtacacgaacctgcgcgagcaggcgcgctcgctcggcatcgatcatcgctggaccgaggtgtcgcgtgcgtatgcggacgtgaaccggctgttcggcgacatcgtgaaggtcacgccgacgtcgaaggtggtcggcgacctggcgctgatgatggtcgcgaacgatctcggcgtggacgacgtgcgcaacccgaacaaggacattgcattccccgagtcggtcgtgtcgctgttcaagggcgagctcggcttcccgccggacggtttcccggcggacctgtcgcgcaaggtgctcaagggcgagccgccggcgccgtatcgccccggcgaccagattccgccggtcgatctcgacgcggcgcgcgtgcaggccgaggccgcctgcgagcagccgctcgatgatcggcaactggcgtcgtacctgatgtatccgaagcagacgatcgattactacgcgcacgtgcgtgcctatagcgacacgtcggtagtgccgacgccggcattcctgtacgggctgcagccgcaggaggaggtggcgatcgacatctcgccgggcaagacgctgctggtgtcgctgcagggccagcacgcggatgcgcaggacggcatcgtgaaggtgcagttcgagctgaacggccagtcgcgcacggcgctcgtggagcagaagacggtggtgcaggcgggcaaggagcgtcacgggctgcagcgtgcggagccgggcaatccgctgcacgtggccgcgccgatgccgggctcggtggtgacggtggccgtgcagccggggcagcgcgtgacggccggcacgacgctgatcgcgctcgaggcgatgaagatggaaacgcacatcgcggcggagcgcgattgcgaaatcgctgccgtgcacgtgaagcccggcgaccgggtcgcggcgaaggatctgttgatcgagttgaagggagggggctga

SEQ ID NO: 96892 - protein, 1172 aa, Burkholderia sp. 383
MAAVTPTPIQSILIANRSEISIRVMRAAAELNIRTVAIYSKEDRLALHRFKADESYLIGEGRKPLAAYLDIDDILRVARQANVDAIHPGYGFLSENPEFAQAVIDAGIRWIGPSPDVMRTLGNKVAARNAAIAAGVPVMPATAPLPDDLAVCKALAEEVGYPLMLKASWGGGGRGMRVLENERDLETLLPVARREALAAFGNDEVYVEKLVRNARHVEVQVLGDTHGTVVHLYERDCTVQRRNQKVVERAPAPYLDHDGRHALCESALRLMRAVGYTHAGTVEFLMDADTGQFYFIEVNPRIQVEHTVTEMITGIDIVKAQIRITEGGRIGLSDDVVDGAGTLVERAAGVPEQHAIPLNGNALQCRITTEDPENDFLPDYGRLTAYRSAAGFGVRLDAGTAYGGAVITPYYDSLLVKVTTWAPTAAESIHRMDRALREFRIRGVTSNLQFLENVINHPAFIAGEVTTRFIDRTPELLEFAKRGDRATKLLRYLGELNVNGNAEMSGRTLPALPLQKPVLPKIDTTAAIPAGTRDRLRELGPEKFSQWMLDQKQVLLTDTTMRDAHQSLFATRMRTADMLPIAPFYARELSQLFSLECWGGATFDVALRFLKEDPWERLALLRERVPNILFQMLLRGSNAVGYTNYADNVVRFFVQQAASAGVDVFRVFDSLNWVRNMRVAIDAVGESGMLCEGAICYTGDLFDTSRAKYDLKYYVGIARELQQAGVHVLGIKDMAGICRPQAVATLVKALKEETGLPVHFHTHDTSGIAAASVLAAVEAGCDAVDGALDAMSGLTSQPNLSSIAAALAGSVRDPGLNADRLHEASMYWEGVRRYYAPFESEIRAGTADVYRHEMPGGQYTNLREQARSLGIDHRWTEVSRAYADVNRLFGDIVKVTPTSKVVGDLALMMVANDLGVDDVRNPNKDIAFPESVVSLFKGELGFPPDGFPADLSRKVLKGEPPAPYRPGDQIPPVDLDAARVQAEAACEQPLDDRQLASYLMYPKQTIDYYAHVRAYSDTSVVPTPAFLYGLQPQEEVAIDISPGKTLLVSLQGQHADAQDGIVKVQFELNGQSRTALVEQKTVVQAGKERHGLQRAEPGNPLHVAAPMPGSVVTVAVQPGQRVTAGTTLIALEAMKMETHIAAERDCEIAAVHVKPGDRVAAKDLLIELKGGG

SEQ ID NO: 96893 - DNA, 3447 bp, Geobacter metallireducens GS-15
  CDS (1)..(3447): transl_table=11
atggagaagagaaagttcaggaaggtaatggccgccaaccgcggcgagattgcgattcgtattttccgggcctgcacggagctcgggatcagcaccgttgccatatactcggaggaggataagctgtcgctccaccgttacaaggccgacgaggcatatctggtggggaaggggaagaatcccatcgacgcctatcttggtatcgacgagatcatcgccatcgccaagaagtatgacgtggacgccatccatcccggctacggcttcctctcggagaacgccgagttcgccgagaagtgcgaagcgtcggggatcgccttcatcggccccacggccgagatgcagcgtgccctgggggacaaggtgtcggcccgcaaggtggccatggccgccggcgtcaccaccgtccccggcaccgaggaccccatcgagcacgaggaagaggccctcatcttcgccaagaactacggctaccccatcatcatcaaggcggcggccggtggcggcgggcgcggcatgcgggtggcccggaccaagaaggagctcctcgaagggctcgtggcggcccgcagcgaggccaaggcggccttcggcaacccagcggtcttcctggagcgctacattgagaatccgaagcatatcgaggtgcaggtcctgggcgacatgcacggcaacctggtccacttcttcgagcgggactgctccatccagcgccgccaccagaaggtggtggaattcgccccggccctctgcctgagccaggagacccgcgaggcgatctgcgccgcggccctcaagatcgccggccaggtgggataccgcaatgccggtactgtcgagttcctcctggaccaggaggggaacttcttcttcatcgagatgaacccccgtatccaggtggagcacacggtgaccgaaatgatcaccggccgcaacctggtccaggcccagatcctcgtggccgaggggaaaaaactctccgatgcccccatcaacatccccaaccaggaagccatcgccatgcgggggtacgccatccagtgccggatcaccaccgaggacccgaacaacaacttcgccccggacttcggcaccatcaccacctatcgctcctcggcgggttttggagtgcggctcgacgccggcaacgcctttaccggttcggtgatcactccccactatgactcgctcctcgtgaaggtcacctcctgggggctcaccttcgacgaagcagcccacatcatgaaccgctcgctccaggaattccgggtccggggggtcaagaccaacatcggcttcctggagaacgtcatcacccaccgggtcttcctcgacggcaagtgtgatacctccttcatcgagaaacactcggaactgctgcagattatcgagaagaaggaccgggccacgaaggttctcagcttcctcggtgacgtcatcgtcaacggttcgccgggaatcacgaagcccctcaagtcggcggagctcatggaggcccatgtgccggaggtggatctcacccagccccgccccgccgggagccgcgacctcctcatgaagctcggggccgaagggctctccaagtggatccttgagcagaagaagcttctcatcaccgacaccaccatgcgtgacgcccaccagtcgaacctagccacccgggtccgcacctatgatctcctgaagattgccgagcccacttcctatctcggtgccgggcttttctccatcgagtgctgggggggcgccaccttcgacgtctccatgcgcttcctgaaggaagacccgtggcagcggctccacaagctctcggaagcgatccccaacgttctcttccagatgctcctgcggggctccaacgccgtggggtacaccaactacccggacaacgtggtgcagcgcttcgtggaggaggcggcctcctccggcatagacatcttccgggtcttcgactccctcaactggacccgcggcatggccgtagccatggaggcggtccgcaagagcggcaagatctgcgaggcggccatctgctacaccggcgacatcaccgatccgacccgggacaagtatcccctggaatactacgtgaacatggccaaggaactggagcagatgggggcccacatcctcgccatcaaggacatggctggcctcctgaagcccttcgccgcctacaaactggtgaaggccctcaaggagaacatcggcatcccggtccacctccatactcacgacacctcctccaatgggagcgccacgctcctcatggcctgccaggcaggggtcgacatcgtcgacgcggccctgtcgtccctgtcggggctcacggcccaaccgaacctgaacgccttggtggcggccctgaaggggaccgagtgggacacccggctggatgaggacgggctccagaaactggccaactactgggagacggtgcgcgactactacgcccccttcgagtcagggctcaagaacggcaccgccgaggtctaccaccacgagattcccggcggccagtactccaactacaagccccaggtggccggcctcggcctcctggatcgctgggaggagtgcaaggagatgtaccacaaggtgaacctcctcttcggcgacatcgtgaaggtcacgccgtcctccaaggtggtgggggatatggccatgttcctcgtgaagaacaacctggatgtacaggatgtctttacacagggtgatgagcttgccttccccgagtcggtcatcgggatgttcaaggggatgctgggccagccttaccagggatggccccgggaactccagaagatcatcctgaagggagatgagcccatcacctgccgccccggcgaactcctggagccggccaatttcgacgaggagcgggacaaggtggaggagaaggtcggccacgccgtggacgacaaggcgctcatgagctacatcatgtacccccacgtctacccggagttccacaagcaccgccatgagtactccgacacctcggtcatcccgacccccatcttcttctacggcctggagccggggcaggagacctccatcgagatcgaggcgggcaagaccctcatcatcaagctgaacgccatcggcaaggtccaccccgacggcacccggcacatcttcttcgagctgaacggcaatgcccggagcgtggtggtacgcgaccagtcggttcagaccgacgagtcggtgcgcgagaaggccgacaaggggaacgccaagcacgtgggggcgccgatgccggggaaggtcctgaagctcaacgtcaaggtgggcgacgaggtcaaggccggcgatgtcctcatggtcaccgaggccatgaagatggagaccaacatcaaagccaaggaggacggcatcgtcgccgaggtgaagttcaaggaaggcgacaaggtggagaaggaggatcttctcatcgttatggggtaa

SEQ ID NO: 96894 - protein, 1148 aa, Geobacter metallireducens GS-15
MEKRKFRKVMAANRGEIAIRIFRACTELGISTVAIYSEEDKLSLHRYKADEAYLVGKGKNPIDAYLGIDEIIAIAKKYDVDAIHPGYGFLSENAEFAEKCEASGIAFIGPTAEMQRALGDKVSARKVAMAAGVTTVPGTEDPIEHEEEALIFAKNYGYPIIIKAAAGGGGRGMRVARTKKELLEGLVAARSEAKAAFGNPAVFLERYIENPKHIEVQVLGDMHGNLVHFFERDCSIQRRHQKVVEFAPALCLSQETREAICAAALKIAGQVGYRNAGTVEFLLDQEGNFFFIEMNPRIQVEHTVTEMITGRNLVQAQILVAEGKKLSDAPINIPNQEAIAMRGYAIQCRITTEDPNNNFAPDFGTITTYRSSAGFGVRLDAGNAFTGSVITPHYDSLLVKVTSWGLTFDEAAHIMNRSLQEFRVRGVKTNIGFLENVITHRVFLDGKCDTSFIEKHSELLQIIEKKDRATKVLSFLGDVIVNGSPGITKPLKSAELMEAHVPEVDLTQPRPAGSRDLLMKLGAEGLSKWILEQKKLLITDTTMRDAHQSNLATRVRTYDLLKIAEPTSYLGAGLFSIECWGGATFDVSMRFLKEDPWQRLHKLSEAIPNVLFQMLLRGSNAVGYTNYPDNVVQRFVEEAASSGIDIFRVFDSLNWTRGMAVAMEAVRKSGKICEAAICYTGDITDPTRDKYPLEYYVNMAKELEQMGAHILAIKDMAGLLKPFAAYKLVKALKENIGIPVHLHTHDTSSNGSATLLMACQAGVDIVDAALSSLSGLTAQPNLNALVAALKGTEWDTRLDEDGLQKLANYWETVRDYYAPFESGLKNGTAEVYHHEIPGGQYSNYKPQVAGLGLLDRWEECKEMYHKVNLLFGDIVKVTPSSKVVGDMAMFLVKNNLDVQDVFTQGDELAFPESVIGMFKGMLGQPYQGWPRELQKIILKGDEPITCRPGELLEPANFDEERDKVEEKVGHAVDDKALMSYIMYPHVYPEFHKHRHEYSDTSVIPTPIFFYGLEPGQETSIEIEAGKTLIIKLNAIGKVHPDGTRHIFFELNGNARSVVVRDQSVQTDESVREKADKGNAKHVGAPMPGKVLKLNVKVGDEVKAGDVLMVTEAMKMETNIKAKEDGIVAEVKFKEGDKVEKEDLLIVMG

SEQ ID NO: 96895 - DNA, 3462 bp, Rhodospirillum rubrum ATCC 11170
  CDS (1)..(3462): transl_table=11
atgacgagtcagtctccgagaaagatcaccaagatccttgtcgccaatcggggcgagatcgccattcgcgtgttccgcgcggccaatgaatcggggatccgcaccgtcgccatctatgccgaggaggacaagctgtcgctccatcggttcaaggccgacgaaagctatctgatcggcaccggcatgggcccggtgcgggcctatctgtcgatcgacgagatcctgcgcgtcgcccggcaaagcggcgccgacgccatccaccccggctatggcttcttgtcggagaaccccgagttcgccgaggcctgcgccgaggccgggctgatcttcatcggtccgccgcccgaggtcatgcgctcgcttggcaacaaagtctcggcgcgcgccatggccgaggccgccgatgtgccggtgatgccggccaccggccccctgcccgaggagatcgacctcatccgcccgatggccgaaaaggtcggctatcccctgatgctcaaggcgtcgtggggcggcggtgggcgcggcatgcgggtgatcaacacccccgacgagttggagcgtcaggtctcggccggccggcgcgaggccgaagccgccttcggcaatggcgaggtctatctggaaaagctggtgctgcgcgcccgccatgtcgaagtgcagttgctcggcgatcattacggcacggttgttcatttgttcgagcgcgattgttcggtccagcgccgcaaccagaaggtcgtcgagcgggcgccggccccctatctgacccccgaaaagcgcgaggaggtctgcgaggccgccctgcggctggcgcgggcggcgggctatgtttgcgccggaacggccgaattcctgatggatgccgatacgggtgacttccatttcatcgaagtcaatccccgcatccaggttgaacatacggtgaccgaggaggtcaccggcatcgatctggtcaaggcccagatccgcatttgcgaaggcggccatatcggcgtcgtcgaggaaaccggcgtgccggcccaggccgatctgcggctgcagggccatgccattcaatgccggatcaccaccgaggatccggaagccaatttcatccccgattacggccgcatcaccgcttatcgcggggcgacgggctttggcatccgcctggatggcggcacggcctattcgggggcggtgatcacccgctattacgacagcttgctggaaaaggtcaccgcctgggcgccgacgcccaaggaggccatcgaccgcctggaccgcgccctgcgcgaattccgcattcgcggcgtggcgaccaatctggccttcgtcgagaacctgatcaaccatccgaagttccgcgaggcgtcttataccacccgcttcatcgacgagacgcccgagctgttccacttcgaccgccgccttgaccgggcgaccaagcttttgcgcttcatcgccgatgtgacggtcaacggcaatcccgaggtcaagggccgggttctgcccacccccggaccggcgccgcgcctgccgatcgtccaggcccaggagccgccgcgcggcacccgccagatcctggccgaactggggccgaccggttttgccgaatggatgcttgaccagaagcgcaccctggtcaccgacaccaccttccgcgatgcccatcagtcgctgctcgccacccgcatgcgcagcttcgacatgatccaggtcgccgatgcctatgcccgcaatctgcccgagcttttcagcctggaatgctggggcggcgccaccttcgatgtcgccatgcgcttcttgcgcgaatgcccctgggagcggctggccgaactgcgccagcgcgtgcccaatatcttgttccaaatgctgctgcgcggcgccaatggcgttggctataccgtttatcccgacaatgtggtcaagggcttcacccataaggcggccgaggccggcgtcgatctgttccgggtgttcgacagcctgaactgggtcgagaatatgcgcgtctcaatggacgctgtgcttgaaaccggcaagctgctcgaaggcgtggtctgctacaccggcgatatcaacgatcccgagcgcagcaaatacgaccttaaatactatgtttcgatggcccgcgaactgcggaaggccggcagccatatcatcggcatcaaggacatggccggtctggtcaagccgcgcgccgcctatgccctggtcaaggcgctgaaagaggaaaccggcctgccggtgcatttccacacccacgacaccagcggcatcagcgccgccagcgtgctggaggccgtgcgcgccggggtcgatgcgatcgacgcggcgatggacagcttctcggggctgaccagccagccctgcctgggctcgatcgtcgaagccctgcgcttttccgaacgcgataccgggcttgatccgctcatcgtccgtcaggtcagcgattattgggaaggggtgcgccgccagtacgccggctttgaaagtgatctgcgctccggggcctcggaggtgtatctccacgaaatgcccggcggccagttcaccaatctgaaggagcaggcccgcgccatggggctggccggccattggcacgaggtggcgcgcacctatgccgaggtcaatcagatgtttggcgatatcgtcaaggtgacgccgtcatccaaggtggtcggcgacatggcgctttatatggttggcgccgggctgacccgcgccgatgtcgaggaccccgacaaggacgtgagcttccccgaaagcgtcgttagcctgatgcgcggtgagctgggtcatccgcccgagggcttccccgaagcccttcagcgcaaggttctgcgcggtcaggcgccgttggcgggccgcccgggcgcggcggtgccgccggccgatctggccgccgagcgcaagaccgccgaggaaaaggccggacgggcgatcagcgacgaggaattccagtcctatctgatgtaccccaaggtgttcatcgactacgccaagcagcgcgccgaatttggtccggtgcgcgtgctgccgacgccgatcttcttctatggcatgaagcccggccaggagaccgccgtcaccctggaagccggcaagaccctggtgatccgctgtcaggccctgggcgagaccgatgaagaggggatgatcaaggttttcttcgaactgaatggccagccgcgcgttgtgcgcgtggttaaccgagcggtcaaatcgacggtcatccagcatgaaaaggccgatccggccaatcccacccatgtcgcctgcccgatgcccggcttggtctcgtcggttggcgtgagcgtcgggcagacggtacgggcgggcgatccgctgctgaccatcgaggcgatgaagatggaaacctcgatcaccgccgaacgcgccggggtgatcgaacgcctgccgatcgccgccggcaccgcggtggaagccaaggacctgctggtcgtctacaagggctga

SEQ ID NO: 96896 - protein, 1153 aa, Rhodospirillum rubrum ATCC 11170
MTSQSPRKITKILVANRGEIAIRVFRAANESGIRTVAIYAEEDKLSLHRFKADESYLIGTGMGPVRAYLSIDEILRVARQSGADAIHPGYGFLSENPEFAEACAEAGLIFIGPPPEVMRSLGNKVSARAMAEAADVPVMPATGPLPEEIDLIRPMAEKVGYPLMLKASWGGGGRGMRVINTPDELERQVSAGRREAEAAFGNGEVYLEKLVLRARHVEVQLLGDHYGTVVHLFERDCSVQRRNQKVVERAPAPYLTPEKREEVCEAALRLARAAGYVCAGTAEFLMDADTGDFHFIEVNPRIQVEHTVTEEVTGIDLVKAQIRICEGGHIGVVEETGVPAQADLRLQGHAIQCRITTEDPEANFIPDYGRITAYRGATGFGIRLDGGTAYSGAVITRYYDSLLEKVTAWAPTPKEAIDRLDRALREFRIRGVATNLAFVENLINHPKFREASYTTRFIDETPELFHFDRRLDRATKLLRFIADVTVNGNPEVKGRVLPTPGPAPRLPIVQAQEPPRGTRQILAELGPTGFAEWMLDQKRTLVTDTTFRDAHQSLLATRMRSFDMIQVADAYARNLPELFSLECWGGATFDVAMRFLRECPWERLAELRQRVPNILFQMLLRGANGVGYTVYPDNVVKGFTHKAAEAGVDLFRVFDSLNWVENMRVSMDAVLETGKLLEGVVCYTGDINDPERSKYDLKYYVSMARELRKAGSHIIGIKDMAGLVKPRAAYALVKALKEETGLPVHFHTHDTSGISAASVLEAVRAGVDAIDAAMDSFSGLTSQPCLGSIVEALRFSERDTGLDPLIVRQVSDYWEGVRRQYAGFESDLRSGASEVYLHEMPGGQFTNLKEQARAMGLAGHWHEVARTYAEVNQMFGDIVKVTPSSKVVGDMALYMVGAGLTRADVEDPDKDVSFPESVVSLMRGELGHPPEGFPEALQRKVLRGQAPLAGRPGAAVPPADLAAERKTAEEKAGRAISDEEFQSYLMYPKVFIDYAKQRAEFGPVRVLPTPIFFYGMKPGQETAVTLEAGKTLVIRCQALGETDEEGMIKVFFELNGQPRVVRVVNRAVKSTVIQHEKADPANPTHVACPMPGLVSSVGVSVGQTVRAGDPLLTIEAMKMETSITAERAGVIERLPIAAGTAVEAKDLLVVYKG

SEQ ID NO: 96897 - DNA, 3441 bp, Rhodospirillum rubrum ATCC 11170
  CDS (1)..(3441): transl_table=11
atggggcaaaagatcaagcggctgatggtcgccaatcgttcggagatcgcgatccgcgtttttcgggcggcggcggaactcgggatccgaaccgtcgccctctatgccgaagaggaccggctgtcgctgcaccgtttcaaggcggacgaggcttaccgcgtgggggccggcaaagggccgcttcaggcttatctggcgatcgatgacatcatcgacatcgccacgcgcgaaaagatcgacgccatccatcccggatacggttttttgtcggaagacccggccttcgccgaagcctgcgccgcggcgggcattcggttcatcggcccgacgcccgaaaccctgcgccaactcggcaacaaggtcgcggcccgcaatttggcccgatcgctcggcgtgccggtgatgccggcgacgggtcccctgcccacggatccgggggtgatccaccgtctcgccaaggatatcggctatccggtgatgctgaaggcctcctggggcggtggcggccggggcatgcgcccgatcgacagcgaggagcacctgcttgacgcggtcaccacatcccggcgcgaggcggcggcggccttcggaaaggatgaggtctatcttgaaaagctcgtccgcgccgcccgccatgtcgaggtgcaactgctcggcgacagccatggcacgcttgttcacctgtttgaacgcgactgttccatccaacgccgccatcagaaggtcatcgagcgcgcccccgccccctatctggatagcgagacccggaggcggctgaccgacgcggcgttaaagatcggccgcgccaccggctatgtcggggccggaaccgtcgagttcctgatggacgtggcgaccaacgacttcttcttcatcgaggtcaatccccgcattcaggtcgagcataccgtgaccgaggtcgtgaccggcctcgatctggtgaaagcccagatccgcatcgccgagggcgggcatatcggccaaaccgccgaaacgggaattccggcgcaagaggcgatttgcctcaatggccacgccatgcaatgccggatcaccacggaagatcccgagcgtggcttcgttcccgactacggccggatctccgcctatcgcggcgcctccggcttcggcatccgggtggatggcggaacggcctattcgggcgccgtggtcacaccgttctacgacgccatgctggaaaaggtgacggcctgggccccgacgcccgatgaggtcatcgcccggatggaacgggttctgcgggaataccgcattcgcggcatcgccaccaatctgcccttcctggaagcgatcttggcccatcccgacttccgggcaacgcgctacaccacgcgcttcatcgacgaaacgccggcgttgttcaacagcccgcgacgccgcgatcgcgccaccaagcttctgacctatatcgccgatatcacggtcaatggccatccggagatggccgggcggccgccccgcgccgtggcgcggatccccgaaccgccccgtttgggaacgacgcggcgggaggggacgaaacaaggcctcgatcggctgggagcggacggcttcgcccgctggatgcgcgcgcaggatcgggttctcatcaccgataccaccctgcgcgacgcccatcagtctctgctggccacccgcttgcgcagttacgacatcgtgcgggcggccgaggcttacgccaccggcttgcccgacttgctgtcgctggaatgctggggcggcgccaccttcgatgtcgccctgcgcttcctttccgaagatccctgggaacggctggcggcgatccgggagcgcgtgcccaatatcctgcttcagatgctgctgcgcggcgcgaatggcgtgggctacacgaattatcccgataacgtcgtccgctttttcgtcgcccgggcggcggagggggggatcgatctttttcgtatcttcgactgcctcaactggatcgacaacatgcgcgtcgccatcgacgccgtgtgcgaggccggcaagatcgccgaaggcgccatctgctataccggcgacatcctcgaccccgaccgggccaaatattcgctgcgctattacgtcgatctcgcccagcagctcgatgccgccggctgccatgtgatcgccatcaaggatatggccgggcttttgagcccgaaagcggcgaaagtcctggtaagggttctgcgcaacgtcaccgaccgcccccttcacctccatacccacgacacctcgggcaccgccgccgcgaccctcatcgccgccatcgacgccggggtcgacgccgtcgatctggccatggacgccctgtcgggcaccacctcccaaccctgtctcggctccgtggtcgcggcgatcggcaaaagcgaccgcgacagcggcctcgatgccgaggcgatccgtcggatgagcctgtattgggaagacgtccgcgccctttatggcgcctttgaaagcgacctgcgcgccggagcctcggaagtctatctccacgagatgccgggcggccagttcaccaatctgaaagagcaggcccgggcgctgggcttggccaaccgctggcacgacgtggcggcggcttaccgacaggccaatgatctgtttggcgatatcgtcaaggtcacgccctcgtccaaggtcgttggcgacatggcgctgatgatggtgtcgcaggggcttactcccgaagacgtgctcaatcccgaccgcgacatcgcctttccggcctcggtcgtcgacatgctcaagggagacctggggcagccttatggcggctggcccgaagccctgcgcaaaaaggtcctcaaaggccaagcccccttgaccgtccgccccggcgccttgctgggaacggccgatctgggggccctgcgcgccaaaaccgcggccgagatcggccgtccggtcgataaccgcgatctcgcctcggcgctgatgtaccccaaggtcttcgccgatttcgcccgcgccaccgagacctggggcccggtggccgtcctgcccacgcccaccttctttggcggcatgaaagtcggcgaagaaatcgtcgtcgagatcgaaccgggcaaatccctgatcatcgtgcttcaggcgattggcgccgccgagccggacggcaaggtcaagctgttcttcgagttgaacggccagccccgggtgatccgcgtcgccgaccgcagccgggtggccgctcccccccgccccaaagccatcgagggcgacgatcggcaggtcgccgcgccaatggccggggccgtctcctcgatcctcgcccacaagggacaggccgtcgcggcgggcgatcccctgctgaccctggaggcgatgaagatggaaacgacccttcacgccccccgcgacggaatcgtcgccgatctgctggtccaggttcaagaaaccgtggaaagcaaagaccttctgcttctgcttcagtaa
